United States Patent Application Publication US 2015/0232836 A1 - sequence listing, part 33

SEQ ID NO: 1265824 - DNA, 15 bp, Homo sapiens
gaatagaagtctgtc

SEQ ID NO: 1265825 - DNA, 15 bp, Homo sapiens
tgaatagaagtctgt

SEQ ID NO: 1265826 - DNA, 15 bp, Homo sapiens
ctgaatagaagtctg

SEQ ID NO: 1265827 - DNA, 15 bp, Homo sapiens
gctgaatagaagtct

SEQ ID NO: 1265828 - DNA, 15 bp, Homo sapiens
tgctgaatagaagtc

SEQ ID NO: 1265829 - DNA, 15 bp, Homo sapiens
ctgctgaatagaagt

SEQ ID NO: 1265830 - DNA, 15 bp, Homo sapiens
gctgctgaatagaag

SEQ ID NO: 1265831 - DNA, 15 bp, Homo sapiens
agctgctgaatagaa

SEQ ID NO: 1265832 - DNA, 15 bp, Homo sapiens
tagctgctgaataga

SEQ ID NO: 1265833 - DNA, 15 bp, Homo sapiens
gtagctgctgaatag

SEQ ID NO: 1265834 - DNA, 15 bp, Homo sapiens
agtagctgctgaata

SEQ ID NO: 1265835 - DNA, 15 bp, Homo sapiens
cagtagctgctgaat

SEQ ID NO: 1265836 - DNA, 15 bp, Homo sapiens
gcagtagctgctgaa

SEQ ID NO: 1265837 - DNA, 15 bp, Homo sapiens
agcagtagctgctga

SEQ ID NO: 1265838 - DNA, 15 bp, Homo sapiens
gagcagtagctgctg

SEQ ID NO: 1265839 - DNA, 15 bp, Homo sapiens
ggagcagtagctgct

SEQ ID NO: 1265840 - DNA, 15 bp, Homo sapiens
gggagcagtagctgc

SEQ ID NO: 1265841 - DNA, 15 bp, Homo sapiens
ggggagcagtagctg

SEQ ID NO: 1265842 - DNA, 15 bp, Homo sapiens
aggggagcagtagct

SEQ ID NO: 1265843 - DNA, 15 bp, Homo sapiens
caggggagcagtagc

SEQ ID NO: 1265844 - DNA, 15 bp, Homo sapiens
tcaggggagcagtag

SEQ ID NO: 1265845 - DNA, 15 bp, Homo sapiens
ttcaggggagcagta

SEQ ID NO: 1265846 - DNA, 15 bp, Homo sapiens
tttcaggggagcagt

SEQ ID NO: 1265847 - DNA, 15 bp, Homo sapiens
ttttcaggggagcag

SEQ ID NO: 1265848 - DNA, 15 bp, Homo sapiens
attttcaggggagca

SEQ ID NO: 1265849 - DNA, 15 bp, Homo sapiens
gattttcaggggagc

SEQ ID NO: 1265850 - DNA, 15 bp, Homo sapiens
agattttcaggggag

SEQ ID NO: 1265851 - DNA, 15 bp, Homo sapiens
aagattttcagggga

SEQ ID NO: 1265852 - DNA, 15 bp, Homo sapiens
gaagattttcagggg

SEQ ID NO: 1265853 - DNA, 15 bp, Homo sapiens
ggaagattttcaggg

SEQ ID NO: 1265854 - DNA, 15 bp, Homo sapiens
aggaagattttcagg

SEQ ID NO: 1265855 - DNA, 15 bp, Homo sapiens
gaggaagattttcag

SEQ ID NO: 1265856 - DNA, 15 bp, Homo sapiens
tgaggaagattttca

SEQ ID NO: 1265857 - DNA, 15 bp, Homo sapiens
ctgaggaagattttc

SEQ ID NO: 1265858 - DNA, 15 bp, Homo sapiens
tctgaggaagatttt

SEQ ID NO: 1265859 - DNA, 15 bp, Homo sapiens
gtctgaggaagattt

SEQ ID NO: 1265860 - DNA, 15 bp, Homo sapiens
cgtctgaggaagatt

SEQ ID NO: 1265861 - DNA, 15 bp, Homo sapiens
acgtctgaggaagat

SEQ ID NO: 1265862 - DNA, 15 bp, Homo sapiens
aacgtctgaggaaga

SEQ ID NO: 1265863 - DNA, 15 bp, Homo sapiens
aaacgtctgaggaag

SEQ ID NO: 1265864 - DNA, 15 bp, Homo sapiens
gaaacgtctgaggaa

SEQ ID NO: 1265865 - DNA, 15 bp, Homo sapiens
ggaaacgtctgagga

SEQ ID NO: 1265866 - DNA, 15 bp, Homo sapiens
tggaaacgtctgagg

SEQ ID NO: 1265867 - DNA, 15 bp, Homo sapiens
gtggaaacgtctgag

SEQ ID NO: 1265868 - DNA, 15 bp, Homo sapiens
cgtggaaacgtctga

SEQ ID NO: 1265869 - DNA, 15 bp, Homo sapiens
ccgtggaaacgtctg

SEQ ID NO: 1265870 - DNA, 15 bp, Homo sapiens
accgtggaaacgtct

SEQ ID NO: 1265871 - DNA, 15 bp, Homo sapiens
caccgtggaaacgtc

SEQ ID NO: 1265872 - DNA, 15 bp, Homo sapiens
gcaccgtggaaacgt

SEQ ID NO: 1265873 - DNA, 15 bp, Homo sapiens
agcaccgtggaaacg

SEQ ID NO: 1265874 - DNA, 15 bp, Homo sapiens
aagcaccgtggaaac

SEQ ID NO: 1265875 - DNA, 15 bp, Homo sapiens
gaagcaccgtggaaa

SEQ ID NO: 1265876 - DNA, 15 bp, Homo sapiens
ggaagcaccgtggaa

SEQ ID NO: 1265877 - DNA, 15 bp, Homo sapiens
gggaagcaccgtgga

SEQ ID NO: 1265878 - DNA, 15 bp, Homo sapiens
cgggaagcaccgtgg

SEQ ID NO: 1265879 - DNA, 15 bp, Homo sapiens
acgggaagcaccgtg

SEQ ID NO: 1265880 - DNA, 15 bp, Homo sapiens
aacgggaagcaccgt

SEQ ID NO: 1265881 - DNA, 15 bp, Homo sapiens
gaacgggaagcaccg

SEQ ID NO: 1265882 - DNA, 15 bp, Homo sapiens
agaacgggaagcacc

SEQ ID NO: 1265883 - DNA, 15 bp, Homo sapiens
aagaacgggaagcac

SEQ ID NO: 1265884 - DNA, 15 bp, Homo sapiens
taagaacgggaagca

SEQ ID NO: 1265885 - DNA, 15 bp, Homo sapiens
gtaagaacgggaagc

SEQ ID NO: 1265886 - DNA, 15 bp, Homo sapiens
tgtaagaacgggaag

SEQ ID NO: 1265887 - DNA, 15 bp, Homo sapiens
gtgtaagaacgggaa

SEQ ID NO: 1265888 - DNA, 15 bp, Homo sapiens
ggtgtaagaacggga

SEQ ID NO: 1265889 - DNA, 15 bp, Homo sapiens
tggtgtaagaacggg

SEQ ID NO: 1265890 - DNA, 15 bp, Homo sapiens
gtggtgtaagaacgg

SEQ ID NO: 1265891 - DNA, 15 bp, Homo sapiens
agtggtgtaagaacg

SEQ ID NO: 1265892 - DNA, 15 bp, Homo sapiens
tagtggtgtaagaac

SEQ ID NO: 1265893 - DNA, 15 bp, Homo sapiens
gtagtggtgtaagaa

SEQ ID NO: 1265894 - DNA, 15 bp, Homo sapiens
tgtagtggtgtaaga

SEQ ID NO: 1265895 - DNA, 15 bp, Homo sapiens
ttgtagtggtgtaag

SEQ ID NO: 1265896 - DNA, 15 bp, Homo sapiens
attgtagtggtgtaa

SEQ ID NO: 1265897 - DNA, 15 bp, Homo sapiens
gattgtagtggtgta

SEQ ID NO: 1265898 - DNA, 15 bp, Homo sapiens
ggattgtagtggtgt

SEQ ID NO: 1265899 - DNA, 15 bp, Homo sapiens
aggattgtagtggtg

SEQ ID NO: 1265900 - DNA, 15 bp, Homo sapiens
aaggattgtagtggt

SEQ ID NO: 1265901 - DNA, 15 bp, Homo sapiens
aaaggattgtagtgg

SEQ ID NO: 1265902 - DNA, 15 bp, Homo sapiens
taaaggattgtagtg

SEQ ID NO: 1265903 - DNA, 15 bp, Homo sapiens
ataaaggattgtagt

SEQ ID NO: 1265904 - DNA, 15 bp, Homo sapiens
aataaaggattgtag

SEQ ID NO: 1265905 - DNA, 15 bp, Homo sapiens
taataaaggattgta

SEQ ID NO: 1265906 - DNA, 15 bp, Homo sapiens
gtaataaaggattgt

SEQ ID NO: 1265907 - DNA, 15 bp, Homo sapiens
tgtaataaaggattg

SEQ ID NO: 1265908 - DNA, 15 bp, Homo sapiens
gtgtaataaaggatt

SEQ ID NO: 1265909 - DNA, 15 bp, Homo sapiens
agtgtaataaaggat

SEQ ID NO: 1265910 - DNA, 15 bp, Homo sapiens
tagtgtaataaagga

SEQ ID NO: 1265911 - DNA, 15 bp, Homo sapiens
gtagtgtaataaagg

SEQ ID NO: 1265912 - DNA, 15 bp, Homo sapiens
agtagtgtaataaag

SEQ ID NO: 1265913 - DNA, 15 bp, Homo sapiens
tagtagtgtaataaa

SEQ ID NO: 1265914 - DNA, 15 bp, Homo sapiens
atagtagtgtaataa

SEQ ID NO: 1265915 - DNA, 15 bp, Homo sapiens
gatagtagtgtaata

SEQ ID NO: 1265916 - DNA, 15 bp, Homo sapiens
ggatagtagtgtaat

SEQ ID NO: 1265917 - DNA, 15 bp, Homo sapiens
cggatagtagtgtaa

SEQ ID NO: 1265918 - DNA, 15 bp, Homo sapiens
acggatagtagtgta

SEQ ID NO: 1265919 - DNA, 15 bp, Homo sapiens
aacggatagtagtgt

SEQ ID NO: 1265920 - DNA, 15 bp, Homo sapiens
gaacggatagtagtg

SEQ ID NO: 1265921 - DNA, 15 bp, Homo sapiens
tgaacggatagtagt

SEQ ID NO: 1265922 - DNA, 15 bp, Homo sapiens
atgaacggatagtag

SEQ ID NO: 1265923 - DNA, 15 bp, Homo sapiens
aatgaacggatagta

SEQ ID NO: 1265924 - DNA, 15 bp, Homo sapiens
gaatgaacggatagt

SEQ ID NO: 1265925 - DNA, 15 bp, Homo sapiens
ggaatgaacggatag

SEQ ID NO: 1265926 - DNA, 15 bp, Homo sapiens
gggaatgaacggata

SEQ ID NO: 1265927 - DNA, 15 bp, Homo sapiens
ggggaatgaacggat

SEQ ID NO: 1265928 - DNA, 15 bp, Homo sapiens
tggggaatgaacgga

SEQ ID NO: 1265929 - DNA, 15 bp, Homo sapiens
gtggggaatgaacgg

SEQ ID NO: 1265930 - DNA, 15 bp, Homo sapiens
tgtggggaatgaacg

SEQ ID NO: 1265931 - DNA, 15 bp, Homo sapiens
ctgtggggaatgaac

SEQ ID NO: 1265932 - DNA, 15 bp, Homo sapiens
gctgtggggaatgaa

SEQ ID NO: 1265933 - DNA, 15 bp, Homo sapiens
agctgtggggaatga

SEQ ID NO: 1265934 - DNA, 15 bp, Homo sapiens
gagctgtggggaatg

SEQ ID NO: 1265935 - DNA, 15 bp, Homo sapiens
ggagctgtggggaat

SEQ ID NO: 1265936 - DNA, 15 bp, Homo sapiens
gggagctgtggggaa

SEQ ID NO: 1265937 - DNA, 15 bp, Homo sapiens
agggagctgtgggga

SEQ ID NO: 1265938 - DNA, 15 bp, Homo sapiens
gagggagctgtgggg

SEQ ID NO: 1265939 - DNA, 15 bp, Homo sapiens
ggagggagctgtggg

SEQ ID NO: 1265940 - DNA, 15 bp, Homo sapiens
gggagggagctgtgg

SEQ ID NO: 1265941 - DNA, 15 bp, Homo sapiens
agggagggagctgtg

SEQ ID NO: 1265942 - DNA, 15 bp, Homo sapiens
aagggagggagctgt

SEQ ID NO: 1265943 - DNA, 15 bp, Homo sapiens
gaagggagggagctg

SEQ ID NO: 1265944 - DNA, 15 bp, Homo sapiens
ggaagggagggagct

SEQ ID NO: 1265945 - DNA, 15 bp, Homo sapiens
aggaagggagggagc

SEQ ID NO: 1265946 - DNA, 15 bp, Homo sapiens
aaggaagggagggag

SEQ ID NO: 1265947 - DNA, 15 bp, Homo sapiens
aaaggaagggaggga

SEQ ID NO: 1265948 - DNA, 15 bp, Homo sapiens
gaaaggaagggaggg

SEQ ID NO: 1265949 - DNA, 15 bp, Homo sapiens
ggaaaggaagggagg

SEQ ID NO: 1265950 - DNA, 15 bp, Homo sapiens
gggaaaggaagggag

SEQ ID NO: 1265951 - DNA, 15 bp, Homo sapiens
agggaaaggaaggga

SEQ ID NO: 1265952 - DNA, 15 bp, Homo sapiens
tagggaaaggaaggg

SEQ ID NO: 1265953 - DNA, 15 bp, Homo sapiens
ttagggaaaggaagg

SEQ ID NO: 1265954 - DNA, 15 bp, Homo sapiens
gttagggaaaggaag

SEQ ID NO: 1265955 - DNA, 15 bp, Homo sapiens
ggttagggaaaggaa

SEQ ID NO: 1265956 - DNA, 15 bp, Homo sapiens
tggttagggaaagga

SEQ ID NO: 1265957 - DNA, 15 bp, Homo sapiens
ctggttagggaaagg

SEQ ID NO: 1265958 - DNA, 15 bp, Homo sapiens
actggttagggaaag

SEQ ID NO: 1265959 - DNA, 15 bp, Homo sapiens
cactggttagggaaa

SEQ ID NO: 1265960 - DNA, 15 bp, Homo sapiens
tcactggttagggaa

SEQ ID NO: 1265961 - DNA, 15 bp, Homo sapiens
atcactggttaggga

SEQ ID NO: 1265962 - DNA, 15 bp, Homo sapiens
gatcactggttaggg

SEQ ID NO: 1265963 - DNA, 15 bp, Homo sapiens
ggatcactggttagg

SEQ ID NO: 1265964 - DNA, 15 bp, Homo sapiens
gggatcactggttag

SEQ ID NO: 1265965 - DNA, 15 bp, Homo sapiens
tgggatcactggtta

SEQ ID NO: 1265966 - DNA, 15 bp, Homo sapiens
ttgggatcactggtt

SEQ ID NO: 1265967 - DNA, 15 bp, Homo sapiens
tttgggatcactggt

SEQ ID NO: 1265968 - DNA, 15 bp, Homo sapiens
ttttgggatcactgg

SEQ ID NO: 1265969 - DNA, 15 bp, Homo sapiens
cttttgggatcactg

SEQ ID NO: 1265970 - DNA, 15 bp, Homo sapiens
ccttttgggatcact

SEQ ID NO: 1265971 - DNA, 15 bp, Homo sapiens
gccttttgggatcac

SEQ ID NO: 1265972 - DNA, 15 bp, Homo sapiens
ggccttttgggatca

SEQ ID NO: 1265973 - DNA, 15 bp, Homo sapiens
tggccttttgggatc

SEQ ID NO: 1265974 - DNA, 15 bp, Homo sapiens
ctggccttttgggat

SEQ ID NO: 1265975 - DNA, 15 bp, Homo sapiens
gctggccttttggga

SEQ ID NO: 1265976 - DNA, 15 bp, Homo sapiens
tgctggccttttggg

SEQ ID NO: 1265977 - DNA, 15 bp, Homo sapiens
ttgctggccttttgg

SEQ ID NO: 1265978 - DNA, 15 bp, Homo sapiens
cttgctggccttttg

SEQ ID NO: 1265979 - DNA, 15 bp, Homo sapiens
acttgctggcctttt

SEQ ID NO: 1265980 - DNA, 15 bp, Homo sapiens
cacttgctggccttt

SEQ ID NO: 1265981 - DNA, 15 bp, Homo sapiens
acacttgctggcctt

SEQ ID NO: 1265982 - DNA, 15 bp, Homo sapiens
gacacttgctggcct

SEQ ID NO: 1265983 - DNA, 15 bp, Homo sapiens
agacacttgctggcc

SEQ ID NO: 1265984 - DNA, 15 bp, Homo sapiens
tagacacttgctggc

SEQ ID NO: 1265985 - DNA, 15 bp, Homo sapiens
ttagacacttgctgg

SEQ ID NO: 1265986 - DNA, 15 bp, Homo sapiens
gttagacacttgctg

SEQ ID NO: 1265987 - DNA, 15 bp, Homo sapiens
tgttagacacttgct

SEQ ID NO: 1265988 - DNA, 15 bp, Homo sapiens
atgttagacacttgc

SEQ ID NO: 1265989 - DNA, 15 bp, Homo sapiens
aatgttagacacttg

SEQ ID NO: 1265990 - DNA, 15 bp, Homo sapiens
aaatgttagacactt

SEQ ID NO: 1265991 - DNA, 15 bp, Homo sapiens
aaaatgttagacact

SEQ ID NO: 1265992 - DNA, 15 bp, Homo sapiens
gaaaatgttagacac

SEQ ID NO: 1265993 - DNA, 15 bp, Homo sapiens
agaaaatgttagaca

SEQ ID NO: 1265994 - DNA, 15 bp, Homo sapiens
tagaaaatgttagac

SEQ ID NO: 1265995 - DNA, 15 bp, Homo sapiens
atagaaaatgttaga

SEQ ID NO: 1265996 - DNA, 15 bp, Homo sapiens
gatagaaaatgttag

SEQ ID NO: 1265997 - DNA, 15 bp, Homo sapiens
agatagaaaatgtta

SEQ ID NO: 1265998 - DNA, 15 bp, Homo sapiens
aagatagaaaatgtt

SEQ ID NO: 1265999 - DNA, 15 bp, Homo sapiens
gaagatagaaaatgt

SEQ ID NO: 1266000 - DNA, 15 bp, Homo sapiens
agaagatagaaaatg

SEQ ID NO: 1266001 - DNA, 15 bp, Homo sapiens
tagaagatagaaaat

SEQ ID NO: 1266002 - DNA, 15 bp, Homo sapiens
ttagaagatagaaaa

SEQ ID NO: 1266003 - DNA, 15 bp, Homo sapiens
cttagaagatagaaa

SEQ ID NO: 1266004 - DNA, 15 bp, Homo sapiens
acttagaagatagaa

SEQ ID NO: 1266005 - DNA, 15 bp, Homo sapiens
cacttagaagataga

SEQ ID NO: 1266006 - DNA, 15 bp, Homo sapiens
tcacttagaagatag

SEQ ID NO: 1266007 - DNA, 15 bp, Homo sapiens
gtcacttagaagata

SEQ ID NO: 1266008 - DNA, 15 bp, Homo sapiens
agtcacttagaagat

SEQ ID NO: 1266009 - DNA, 15 bp, Homo sapiens
cagtcacttagaaga

SEQ ID NO: 1266010 - DNA, 15 bp, Homo sapiens
ccagtcacttagaag

SEQ ID NO: 1266011 - DNA, 15 bp, Homo sapiens
accagtcacttagaa

SEQ ID NO: 1266012 - DNA, 15 bp, Homo sapiens
taccagtcacttaga

SEQ ID NO: 1266013 - DNA, 15 bp, Homo sapiens
ttaccagtcacttag

SEQ ID NO: 1266014 - DNA, 15 bp, Homo sapiens
tttaccagtcactta

SEQ ID NO: 1266015 - DNA, 15 bp, Homo sapiens
ctttaccagtcactt

SEQ ID NO: 1266016 - DNA, 15 bp, Homo sapiens
actttaccagtcact

SEQ ID NO: 1266017 - DNA, 15 bp, Homo sapiens
aactttaccagtcac

SEQ ID NO: 1266018 - DNA, 15 bp, Homo sapiens
gaactttaccagtca

SEQ ID NO: 1266019 - DNA, 15 bp, Homo sapiens
ggaactttaccagtc

SEQ ID NO: 1266020 - DNA, 15 bp, Homo sapiens
cggaactttaccagt

SEQ ID NO: 1266021 - DNA, 15 bp, Homo sapiens
gcggaactttaccag

SEQ ID NO: 1266022 - DNA, 15 bp, Homo sapiens
tgcggaactttacca

SEQ ID NO: 1266023 - DNA, 15 bp, Homo sapiens
gtgcggaactttacc

SEQ ID NO: 1266024 - DNA, 15 bp, Homo sapiens
ggtgcggaactttac

SEQ ID NO: 1266025 - DNA, 15 bp, Homo sapiens
aggtgcggaacttta

SEQ ID NO: 1266026 - DNA, 15 bp, Homo sapiens
taggtgcggaacttt

SEQ ID NO: 1266027 - DNA, 15 bp, Homo sapiens
ataggtgcggaactt

SEQ ID NO: 1266028 - DNA, 15 bp, Homo sapiens
gataggtgcggaact

SEQ ID NO: 1266029 - DNA, 15 bp, Homo sapiens
tgataggtgcggaac

SEQ ID NO: 1266030 - DNA, 15 bp, Homo sapiens
ctgataggtgcggaa

SEQ ID NO: 1266031 - DNA, 15 bp, Homo sapiens
gctgataggtgcgga

SEQ ID NO: 1266032 - DNA, 15 bp, Homo sapiens
cgctgataggtgcgg

SEQ ID NO: 1266033 - DNA, 15 bp, Homo sapiens
gcgctgataggtgcg

SEQ ID NO: 1266034 - DNA, 15 bp, Homo sapiens
agcgctgataggtgc

SEQ ID NO: 1266035 - DNA, 15 bp, Homo sapiens
gagcgctgataggtg

SEQ ID NO: 1266036 - DNA, 15 bp, Homo sapiens
ggagcgctgataggt

SEQ ID NO: 1266037 - DNA, 15 bp, Homo sapiens
tggagcgctgatagg

SEQ ID NO: 1266038 - DNA, 15 bp, Homo sapiens
ttggagcgctgatag

SEQ ID NO: 1266039 - DNA, 15 bp, Homo sapiens
cttggagcgctgata

SEQ ID NO: 1266040 - DNA, 15 bp, Homo sapiens
acttggagcgctgat

SEQ ID NO: 1266041 - DNA, 15 bp, Homo sapiens
aacttggagcgctga

SEQ ID NO: 1266042 - DNA, 15 bp, Homo sapiens
aaacttggagcgctg

SEQ ID NO: 1266043 - DNA, 15 bp, Homo sapiens
caaacttggagcgct

SEQ ID NO: 1266044 - DNA, 15 bp, Homo sapiens
acaaacttggagcgc

SEQ ID NO: 1266045 - DNA, 15 bp, Homo sapiens
aacaaacttggagcg

SEQ ID NO: 1266046 - DNA, 15 bp, Homo sapiens
aaacaaacttggagc

SEQ ID NO: 1266047 - DNA, 15 bp, Homo sapiens
aaaacaaacttggag

SEQ ID NO: 1266048 - DNA, 15 bp, Homo sapiens
aaaaacaaacttgga

SEQ ID NO: 1266049 - DNA, 15 bp, Homo sapiens
caaaaacaaacttgg

SEQ ID NO: 1266050 - DNA, 15 bp, Homo sapiens
acaaaaacaaacttg

SEQ ID NO: 1266051 - DNA, 15 bp, Homo sapiens
aacaaaaacaaactt

SEQ ID NO: 1266052 - DNA, 15 bp, Homo sapiens
aaacaaaaacaaact

SEQ ID NO: 1266053 - DNA, 15 bp, Homo sapiens
aaaacaaaaacaaac

SEQ ID NO: 1266054 - DNA, 15 bp, Homo sapiens
ccaaaacaaaaacaa

SEQ ID NO: 1266055 - DNA, 15 bp, Homo sapiens
gccaaaacaaaaaca

SEQ ID NO: 1266056 - DNA, 15 bp, Homo sapiens
ggccaaaacaaaaac

SEQ ID NO: 1266057 - DNA, 15 bp, Homo sapiens
cggccaaaacaaaaa

SEQ ID NO: 1266058 - DNA, 15 bp, Homo sapiens
tcggccaaaacaaaa

SEQ ID NO: 1266059 - DNA, 15 bp, Homo sapiens
gtcggccaaaacaaa

SEQ ID NO: 1266060 - DNA, 15 bp, Homo sapiens
agtcggccaaaacaa

SEQ ID NO: 1266061 - DNA, 15 bp, Homo sapiens
aagtcggccaaaaca

SEQ ID NO: 1266062 - DNA, 15 bp, Homo sapiens
aaagtcggccaaaac

SEQ ID NO: 1266063 - DNA, 15 bp, Homo sapiens
caaagtcggccaaaa

SEQ ID NO: 1266064 - DNA, 15 bp, Homo sapiens
gcaaagtcggccaaa

SEQ ID NO: 1266065 - DNA, 15 bp, Homo sapiens
tgcaaagtcggccaa

SEQ ID NO: 1266066 - DNA, 15 bp, Homo sapiens
ttgcaaagtcggcca

SEQ ID NO: 1266067 - DNA, 15 bp, Homo sapiens
tttgcaaagtcggcc

SEQ ID NO: 1266068 - DNA, 15 bp, Homo sapiens
ttttgcaaagtcggc

SEQ ID NO: 1266069 - DNA, 15 bp, Homo sapiens
gttttgcaaagtcgg

SEQ ID NO: 1266070 - DNA, 15 bp, Homo sapiens
cgttttgcaaagtcg

SEQ ID NO: 1266071 - DNA, 15 bp, Homo sapiens
ccgttttgcaaagtc

SEQ ID NO: 1266072 - DNA, 15 bp, Homo sapiens
tccgttttgcaaagt

SEQ ID NO: 1266073 - DNA, 15 bp, Homo sapiens
atccgttttgcaaag

SEQ ID NO: 1266074 - DNA, 15 bp, Homo sapiens
aatccgttttgcaaa

SEQ ID NO: 1266075 - DNA, 15 bp, Homo sapiens
caatccgttttgcaa

SEQ ID NO: 1266076 - DNA, 15 bp, Homo sapiens
ccaatccgttttgca

SEQ ID NO: 1266077 - DNA, 15 bp, Homo sapiens
cccaatccgttttgc

SEQ ID NO: 1266078 - DNA, 15 bp, Homo sapiens
gcccaatccgttttg

SEQ ID NO: 1266079 - DNA, 15 bp, Homo sapiens
cgcccaatccgtttt

SEQ ID NO: 1266080 - DNA, 15 bp, Homo sapiens
ccgcccaatccgttt

SEQ ID NO: 1266081 - DNA, 15 bp, Homo sapiens
cccgcccaatccgtt

SEQ ID NO: 1266082 - DNA, 15 bp, Homo sapiens
tcccgcccaatccgt

SEQ ID NO: 1266083 - DNA, 15 bp, Homo sapiens
atcccgcccaatccg

SEQ ID NO: 1266084 - DNA, 15 bp, Homo sapiens
catcccgcccaatcc

SEQ ID NO: 1266085 - DNA, 15 bp, Homo sapiens
tcatcccgcccaatc

SEQ ID NO: 1266086 - DNA, 15 bp, Homo sapiens
ctcatcccgcccaat

SEQ ID NO: 1266087 - DNA, 15 bp, Homo sapiens
tctcatcccgcccaa

SEQ ID NO: 1266088 - DNA, 15 bp, Homo sapiens
ctctcatcccgccca

SEQ ID NO: 1266089 - DNA, 15 bp, Homo sapiens
cctctcatcccgccc

SEQ ID NO: 1266090 - DNA, 15 bp, Homo sapiens
acctctcatcccgcc

SEQ ID NO: 1266091 - DNA, 15 bp, Homo sapiens
cacctctcatcccgc

SEQ ID NO: 1266092 - DNA, 15 bp, Homo sapiens
ccacctctcatcccg

SEQ ID NO: 1266093 - DNA, 15 bp, Homo sapiens
cccacctctcatccc

SEQ ID NO: 1266094 - DNA, 15 bp, Homo sapiens
ccccacctctcatcc

SEQ ID NO: 1266095 - DNA, 15 bp, Homo sapiens
cccccacctctcatc

SEQ ID NO: 1266096 - DNA, 15 bp, Homo sapiens
ccccccacctctcat

SEQ ID NO: 1266097 - DNA, 15 bp, Homo sapiens
gccccccacctctca

SEQ ID NO: 1266098 - DNA, 15 bp, Homo sapiens
cgccccccacctctc

SEQ ID NO: 1266099 - DNA, 15 bp, Homo sapiens
gcgccccccacctct

SEQ ID NO: 1266100 - DNA, 15 bp, Homo sapiens
ggcgccccccacctc

SEQ ID NO: 1266101 - DNA, 15 bp, Homo sapiens
cggcgccccccacct

SEQ ID NO: 1266102 - DNA, 15 bp, Homo sapiens
gcggcgccccccacc

SEQ ID NO: 1266103 - DNA, 15 bp, Homo sapiens
ggcggcgccccccac

SEQ ID NO: 1266104 - DNA, 15 bp, Homo sapiens
gggcggcgcccccca

SEQ ID NO: 1266105 - DNA, 15 bp, Homo sapiens
tgggcggcgcccccc

SEQ ID NO: 1266106 - DNA, 15 bp, Homo sapiens
ttgggcggcgccccc

SEQ ID NO: 1266107 - DNA, 15 bp, Homo sapiens
cttgggcggcgcccc

SEQ ID NO: 1266108 - DNA, 15 bp, Homo sapiens
ccttgggcggcgccc

SEQ ID NO: 1266109 - DNA, 15 bp, Homo sapiens
tccttgggcggcgcc

SEQ ID NO: 1266110 - DNA, 15 bp, Homo sapiens
ctccttgggcggcgc

SEQ ID NO: 1266111 - DNA, 15 bp, Homo sapiens
cctccttgggcggcg

SEQ ID NO: 1266112 - DNA, 15 bp, Homo sapiens
ccctccttgggcggc

SEQ ID NO: 1266113 - DNA, 15 bp, Homo sapiens
tccctccttgggcgg

SEQ ID NO: 1266114 - DNA, 15 bp, Homo sapiens
ctccctccttgggcg

SEQ ID NO: 1266115 - DNA, 15 bp, Homo sapiens
tctccctccttgggc

SEQ ID NO: 1266116 - DNA, 15 bp, Homo sapiens
ctctccctccttggg

SEQ ID NO: 1266117 - DNA, 15 bp, Homo sapiens
actctccctccttgg

SEQ ID NO: 1266118 - DNA, 15 bp, Homo sapiens
cactctccctccttg

SEQ ID NO: 1266119 - DNA, 15 bp, Homo sapiens
ccactctccctcctt

SEQ ID NO: 1266120 - DNA, 15 bp, Homo sapiens
gccactctccctcct

SEQ ID NO: 1266121 - DNA, 15 bp, Homo sapiens
cgccactctccctcc

SEQ ID NO: 1266122 - DNA, 15 bp, Homo sapiens
gcgccactctccctc

SEQ ID NO: 1266123 - DNA, 15 bp, Homo sapiens
agcgccactctccct

SEQ ID NO: 1266124 - DNA, 15 bp, Homo sapiens
gagcgccactctccc

SEQ ID NO: 1266125 - DNA, 15 bp, Homo sapiens
ggagcgccactctcc

SEQ ID NO: 1266126 - DNA, 15 bp, Homo sapiens
gggagcgccactctc

SEQ ID NO: 1266127 - DNA, 15 bp, Homo sapiens
cgggagcgccactct

SEQ ID NO: 1266128 - DNA, 15 bp, Homo sapiens
gcgggagcgccactc

SEQ ID NO: 1266129 - DNA, 15 bp, Homo sapiens
ggcgggagcgccact

SEQ ID NO: 1266130 - DNA, 15 bp, Homo sapiens
cggcgggagcgccac

SEQ ID NO: 1266131 - DNA, 15 bp, Homo sapiens
tcggcgggagcgcca

SEQ ID NO: 1266132 - DNA, 15 bp, Homo sapiens
ctcggcgggagcgcc

SEQ ID NO: 1266133 - DNA, 15 bp, Homo sapiens
cctcggcgggagcgc

SEQ ID NO: 1266134 - DNA, 15 bp, Homo sapiens
ccctcggcgggagcg

SEQ ID NO: 1266135 - DNA, 15 bp, Homo sapiens
accctcggcgggagc

SEQ ID NO: 1266136 - DNA, 15 bp, Homo sapiens
caccctcggcgggag

SEQ ID NO: 1266137 - DNA, 15 bp, Homo sapiens
gcaccctcggcggga

SEQ ID NO: 1266138 - DNA, 15 bp, Homo sapiens
tgcaccctcggcggg

SEQ ID NO: 1266139 - DNA, 15 bp, Homo sapiens
gtgcaccctcggcgg

SEQ ID NO: 1266140 - DNA, 15 bp, Homo sapiens
agtgcaccctcggcg

SEQ ID NO: 1266141 - DNA, 15 bp, Homo sapiens
tagtgcaccctcggc

SEQ ID NO: 1266142 - DNA, 15 bp, Homo sapiens
ctagtgcaccctcgg

SEQ ID NO: 1266143 - DNA, 15 bp, Homo sapiens
gctagtgcaccctcg

SEQ ID NO: 1266144 - DNA, 15 bp, Homo sapiens
ggctagtgcaccctc

SEQ ID NO: 1266145 - DNA, 15 bp, Homo sapiens
tggctagtgcaccct

SEQ ID NO: 1266146 - DNA, 15 bp, Homo sapiens
ctggctagtgcaccc

SEQ ID NO: 1266147 - DNA, 15 bp, Homo sapiens
tctggctagtgcacc

SEQ ID NO: 1266148 - DNA, 15 bp, Homo sapiens
atctggctagtgcac

SEQ ID NO: 1266149 - DNA, 15 bp, Homo sapiens
tatctggctagtgca

SEQ ID NO: 1266150 - DNA, 15 bp, Homo sapiens
atatctggctagtgc

SEQ ID NO: 1266151 - DNA, 15 bp, Homo sapiens
aatatctggctagtg

SEQ ID NO: 1266152 - DNA, 15 bp, Homo sapiens
gaatatctggctagt

SEQ ID NO: 1266153 - DNA, 15 bp, Homo sapiens
ggaatatctggctag

SEQ ID NO: 1266154 - DNA, 15 bp, Homo sapiens
gggaatatctggcta

SEQ ID NO: 1266155 - DNA, 15 bp, Homo sapiens
agggaatatctggct

SEQ ID NO: 1266156 - DNA, 15 bp, Homo sapiens
cagggaatatctggc

SEQ ID NO: 1266157 - DNA, 15 bp, Homo sapiens
gcagggaatatctgg

SEQ ID NO: 1266158 - DNA, 15 bp, Homo sapiens
cgcagggaatatctg

SEQ ID NO: 1266159 - DNA, 15 bp, Homo sapiens
ccgcagggaatatct

SEQ ID NO: 1266160 - DNA, 15 bp, Homo sapiens
cccgcagggaatatc

SEQ ID NO: 1266161 - DNA, 15 bp, Homo sapiens
ccccgcagggaatat

SEQ ID NO: 1266162 - DNA, 15 bp, Homo sapiens
gccccgcagggaata

SEQ ID NO: 1266163 - DNA, 15 bp, Homo sapiens
ggccccgcagggaat

SEQ ID NO: 1266164 - DNA, 15 bp, Homo sapiens
gggccccgcagggaa

SEQ ID NO: 1266165 - DNA, 15 bp, Homo sapiens
cgggccccgcaggga

SEQ ID NO: 1266166 - DNA, 15 bp, Homo sapiens
tcgggccccgcaggg

SEQ ID NO: 1266167 - DNA, 15 bp, Homo sapiens
ctcgggccccgcagg

SEQ ID NO: 1266168 - DNA, 15 bp, Homo sapiens
tctcgggccccgcag

SEQ ID NO: 1266169 - DNA, 15 bp, Homo sapiens
ctctcgggccccgca

SEQ ID NO: 1266170 - DNA, 15 bp, Homo sapiens
actctcgggccccgc

SEQ ID NO: 1266171 - DNA, 15 bp, Homo sapiens
gactctcgggccccg

SEQ ID NO: 1266172 - DNA, 15 bp, Homo sapiens
agactctcgggcccc

SEQ ID NO: 1266173 - DNA, 15 bp, Homo sapiens
aagactctcgggccc

SEQ ID NO: 1266174 - DNA, 15 bp, Homo sapiens
gaagactctcgggcc

SEQ ID NO: 1266175 - DNA, 15 bp, Homo sapiens
ggaagactctcgggc

SEQ ID NO: 1266176 - DNA, 15 bp, Homo sapiens
gggaagactctcggg

SEQ ID NO: 1266177 - DNA, 15 bp, Homo sapiens
agggaagactctcgg

SEQ ID NO: 1266178 - DNA, 15 bp, Homo sapiens
tagggaagactctcg

SEQ ID NO: 1266179 - DNA, 15 bp, Homo sapiens
atagggaagactctc

SEQ ID NO: 1266180 - DNA, 15 bp, Homo sapiens
gatagggaagactct

SEQ ID NO: 1266181 - DNA, 15 bp, Homo sapiens
tgatagggaagactc

SEQ ID NO: 1266182 - DNA, 15 bp, Homo sapiens
ctgatagggaagact

SEQ ID NO: 1266183 - DNA, 15 bp, Homo sapiens
tctgatagggaagac

SEQ ID NO: 1266184 - DNA, 15 bp, Homo sapiens
gtctgatagggaaga

SEQ ID NO: 1266185 - DNA, 15 bp, Homo sapiens
ggtctgatagggaag

SEQ ID NO: 1266186 - DNA, 15 bp, Homo sapiens
gggtctgatagggaa

SEQ ID NO: 1266187 - DNA, 15 bp, Homo sapiens
ggggtctgataggga

SEQ ID NO: 1266188 - DNA, 15 bp, Homo sapiens
cggggtctgataggg

SEQ ID NO: 1266189 - DNA, 15 bp, Homo sapiens
ccggggtctgatagg

SEQ ID NO: 1266190 - DNA, 15 bp, Homo sapiens
cccggggtctgatag

SEQ ID NO: 1266191 - DNA, 15 bp, Homo sapiens
tcccggggtctgata

SEQ ID NO: 1266192 - DNA, 15 bp, Homo sapiens
atcccggggtctgat

SEQ ID NO: 1266193 - DNA, 15 bp, Homo sapiens
tatcccggggtctga

SEQ ID NO: 1266194 - DNA, 15 bp, Homo sapiens
ctatcccggggtctg

SEQ ID NO: 1266195 - DNA, 15 bp, Homo sapiens
cctatcccggggtct

SEQ ID NO: 1266196 - DNA, 15 bp, Homo sapiens
ccctatcccggggtc

SEQ ID NO: 1266197 - DNA, 15 bp, Homo sapiens
tccctatcccggggt

SEQ ID NO: 1266198 - DNA, 15 bp, Homo sapiens
atccctatcccgggg

SEQ ID NO: 1266199 - DNA, 15 bp, Homo sapiens
catccctatcccggg

SEQ ID NO: 1266200 - DNA, 15 bp, Homo sapiens
tcatccctatcccgg

SEQ ID NO: 1266201 - DNA, 15 bp, Homo sapiens
ctcatccctatcccg

SEQ ID NO: 1266202 - DNA, 15 bp, Homo sapiens
cctcatccctatccc

SEQ ID NO: 1266203 - DNA, 15 bp, Homo sapiens
gcctcatccctatcc

SEQ ID NO: 1266204 - DNA, 15 bp, Homo sapiens
ggcctcatccctatc

SEQ ID NO: 1266205 - DNA, 15 bp, Homo sapiens
gggcctcatccctat

SEQ ID NO: 1266206 - DNA, 15 bp, Homo sapiens
tgggcctcatcccta

SEQ ID NO: 1266207 - DNA, 15 bp, Homo sapiens
gtgggcctcatccct

SEQ ID NO: 1266208 - DNA, 15 bp, Homo sapiens
tgtgggcctcatccc

SEQ ID NO: 1266209 - DNA, 15 bp, Homo sapiens
ctgtgggcctcatcc

SEQ ID NO: 1266210 - DNA, 15 bp, Homo sapiens
actgtgggcctcatc

SEQ ID NO: 1266211 - DNA, 15 bp, Homo sapiens
gactgtgggcctcat

SEQ ID NO: 1266212 - DNA, 15 bp, Homo sapiens
tgactgtgggcctca

SEQ ID NO: 1266213 - DNA, 15 bp, Homo sapiens
gtgactgtgggcctc

SEQ ID NO: 1266214 - DNA, 15 bp, Homo sapiens
ggtgactgtgggcct

SEQ ID NO: 1266215 - DNA, 15 bp, Homo sapiens
gggtgactgtgggcc

SEQ ID NO: 1266216 - DNA, 15 bp, Homo sapiens
tgggtgactgtgggc

SEQ ID NO: 1266217 - DNA, 15 bp, Homo sapiens
gtgggtgactgtggg

SEQ ID NO: 1266218 - DNA, 15 bp, Homo sapiens
ggtgggtgactgtgg

SEQ ID NO: 1266219 - DNA, 15 bp, Homo sapiens
tggtgggtgactgtg

SEQ ID NO: 1266220 - DNA, 15 bp, Homo sapiens
ctggtgggtgactgt

SEQ ID NO: 1266221 - DNA, 15 bp, Homo sapiens
tctggtgggtgactg

SEQ ID NO: 1266222 - DNA, 15 bp, Homo sapiens
gtctggtgggtgact

SEQ ID NO: 1266223 - DNA, 15 bp, Homo sapiens
agtctggtgggtgac

SEQ ID NO: 1266224 - DNA, 15 bp, Homo sapiens
gagtctggtgggtga

SEQ ID NO: 1266225 - DNA, 15 bp, Homo sapiens
agagtctggtgggtg

SEQ ID NO: 1266226 - DNA, 15 bp, Homo sapiens
aagagtctggtgggt

SEQ ID NO: 1266227 - DNA, 15 bp, Homo sapiens
aaagagtctggtggg

SEQ ID NO: 1266228 - DNA, 15 bp, Homo sapiens
caaagagtctggtgg

SEQ ID NO: 1266229 - DNA, 15 bp, Homo sapiens
acaaagagtctggtg

SEQ ID NO: 1266230 - DNA, 15 bp, Homo sapiens
tacaaagagtctggt

SEQ ID NO: 1266231 - DNA, 15 bp, Homo sapiens
atacaaagagtctgg

SEQ ID NO: 1266232 - DNA, 15 bp, Homo sapiens
tatacaaagagtctg

SEQ ID NO: 1266233 - DNA, 15 bp, Homo sapiens
ctatacaaagagtct

SEQ ID NO: 1266234 - DNA, 15 bp, Homo sapiens
gctatacaaagagtc

SEQ ID NO: 1266235 - DNA, 15 bp, Homo sapiens
ggctatacaaagagt

SEQ ID NO: 1266236 - DNA, 15 bp, Homo sapiens
gggctatacaaagag

SEQ ID NO: 1266237 - DNA, 15 bp, Homo sapiens
ggggctatacaaaga

SEQ ID NO: 1266238 - DNA, 15 bp, Homo sapiens
cggggctatacaaag

SEQ ID NO: 1266239 - DNA, 15 bp, Homo sapiens
acggggctatacaaa

SEQ ID NO: 1266240 - DNA, 15 bp, Homo sapiens
aacggggctatacaa

SEQ ID NO: 1266241 - DNA, 15 bp, Homo sapiens
taacggggctataca

SEQ ID NO: 1266242 - DNA, 15 bp, Homo sapiens
ttaacggggctatac

SEQ ID NO: 1266243 - DNA, 15 bp, Homo sapiens
cttaacggggctata

SEQ ID NO: 1266244 - DNA, 15 bp, Homo sapiens
acttaacggggctat

SEQ ID NO: 1266245 - DNA, 15 bp, Homo sapiens
cacttaacggggcta

SEQ ID NO: 1266246 - DNA, 15 bp, Homo sapiens
gcacttaacggggct

SEQ ID NO: 1266247 - DNA, 15 bp, Homo sapiens
tgcacttaacggggc

SEQ ID NO: 1266248 - DNA, 15 bp, Homo sapiens
gtgcacttaacgggg

SEQ ID NO: 1266249 - DNA, 15 bp, Homo sapiens
ggtgcacttaacggg

SEQ ID NO: 1266250 - DNA, 15 bp, Homo sapiens
gggtgcacttaacgg

SEQ ID NO: 1266251 - DNA, 15 bp, Homo sapiens
ggggtgcacttaacg

SEQ ID NO: 1266252 - DNA, 15 bp, Homo sapiens
cggggtgcacttaac

SEQ ID NO: 1266253 - DNA, 15 bp, Homo sapiens
ccggggtgcacttaa

SEQ ID NO: 1266254 - DNA, 15 bp, Homo sapiens
gccggggtgcactta

SEQ ID NO: 1266255 - DNA, 15 bp, Homo sapiens
ggccggggtgcactt

SEQ ID NO: 1266256 - DNA, 15 bp, Homo sapiens
aggccggggtgcact

SEQ ID NO: 1266257 - DNA, 15 bp, Homo sapiens
caggccggggtgcac

SEQ ID NO: 1266258 - DNA, 15 bp, Homo sapiens
ccaggccggggtgca

SEQ ID NO: 1266259 - DNA, 15 bp, Homo sapiens
tccaggccggggtgc

SEQ ID NO: 1266260 - DNA, 15 bp, Homo sapiens
ctccaggccggggtg

SEQ ID NO: 1266261 - DNA, 15 bp, Homo sapiens
cctccaggccggggt

SEQ ID NO: 1266262 - DNA, 15 bp, Homo sapiens
ccctccaggccgggg

SEQ ID NO: 1266263 - DNA, 15 bp, Homo sapiens
cccctccaggccggg

SEQ ID NO: 1266264 - DNA, 15 bp, Homo sapiens
ccccctccaggccgg

SEQ ID NO: 1266265 - DNA, 15 bp, Homo sapiens
accccctccaggccg

SEQ ID NO: 1266266 - DNA, 15 bp, Homo sapiens
caccccctccaggcc

SEQ ID NO: 1266267 - DNA, 15 bp, Homo sapiens
ccaccccctccaggc

SEQ ID NO: 1266268 - DNA, 15 bp, Homo sapiens
accaccccctccagg

SEQ ID NO: 1266269 - DNA, 15 bp, Homo sapiens
aaccaccccctccag

SEQ ID NO: 1266270 - DNA, 15 bp, Homo sapiens
gaaccaccccctcca

SEQ ID NO: 1266271 - DNA, 15 bp, Homo sapiens
agaaccaccccctcc

SEQ ID NO: 1266272 - DNA, 15 bp, Homo sapiens
cagaaccaccccctc

SEQ ID NO: 1266273 - DNA, 15 bp, Homo sapiens
ccagaaccaccccct

SEQ ID NO: 1266274 - DNA, 15 bp, Homo sapiens
cccagaaccaccccc

SEQ ID NO: 1266275 - DNA, 15 bp, Homo sapiens
acccagaaccacccc

SEQ ID NO: 1266276 - DNA, 15 bp, Homo sapiens
tacccagaaccaccc

SEQ ID NO: 1266277 - DNA, 15 bp, Homo sapiens
ctacccagaaccacc

SEQ ID NO: 1266278 - DNA, 15 bp, Homo sapiens
tctacccagaaccac

SEQ ID NO: 1266279 - DNA, 15 bp, Homo sapiens
ttctacccagaacca

SEQ ID NO: 1266280 - DNA, 15 bp, Homo sapiens
cttctacccagaacc

SEQ ID NO: 1266281 - DNA, 15 bp, Homo sapiens
gcttctacccagaac

SEQ ID NO: 1266282 - DNA, 15 bp, Homo sapiens
tgcttctacccagaa

SEQ ID NO: 1266283 - DNA, 15 bp, Homo sapiens
gtgcttctacccaga

SEQ ID NO: 1266284 - DNA, 15 bp, Homo sapiens
cgtgcttctacccag

SEQ ID NO: 1266285 - DNA, 15 bp, Homo sapiens
acgtgcttctaccca

SEQ ID NO: 1266286 - DNA, 15 bp, Homo sapiens
gacgtgcttctaccc

SEQ ID NO: 1266287 - DNA, 15 bp, Homo sapiens
ggacgtgcttctacc

SEQ ID NO: 1266288 - DNA, 15 bp, Homo sapiens
cggacgtgcttctac

SEQ ID NO: 1266289 - DNA, 15 bp, Homo sapiens
ccggacgtgcttcta

SEQ ID NO: 1266290 - DNA, 15 bp, Homo sapiens
cccggacgtgcttct

SEQ ID NO: 1266291 - DNA, 15 bp, Homo sapiens
gcccggacgtgcttc

SEQ ID NO: 1266292 - DNA, 15 bp, Homo sapiens
ggcccggacgtgctt

SEQ ID NO: 1266293 - DNA, 15 bp, Homo sapiens
cggcccggacgtgct

SEQ ID NO: 1266294 - DNA, 15 bp, Homo sapiens
gcggcccggacgtgc

SEQ ID NO: 1266295 - DNA, 15 bp, Homo sapiens
cgcggcccggacgtg

SEQ ID NO: 1266296 - DNA, 15 bp, Homo sapiens
gcgcggcccggacgt

SEQ ID NO: 1266297 - DNA, 15 bp, Homo sapiens
ggcgcggcccggacg

SEQ ID NO: 1266298 - DNA, 15 bp, Homo sapiens
cggcgcggcccggac

SEQ ID NO: 1266299 - DNA, 15 bp, Homo sapiens
ccggcgcggcccgga

SEQ ID NO: 1266300 - DNA, 15 bp, Homo sapiens
tccggcgcggcccgg

SEQ ID NO: 1266301 - DNA, 15 bp, Homo sapiens
atccggcgcggcccg

SEQ ID NO: 1266302 - DNA, 15 bp, Homo sapiens
catccggcgcggccc

SEQ ID NO: 1266303 - DNA, 15 bp, Homo sapiens
gcatccggcgcggcc

SEQ ID NO: 1266304 - DNA, 15 bp, Homo sapiens
ggcatccggcgcggc

SEQ ID NO: 1266305 - DNA, 15 bp, Homo sapiens
aggcatccggcgcgg

SEQ ID NO: 1266306 - DNA, 15 bp, Homo sapiens
gaggcatccggcgcg

SEQ ID NO: 1266307 - DNA, 15 bp, Homo sapiens
ggaggcatccggcgc

SEQ ID NO: 1266308 - DNA, 15 bp, Homo sapiens
aggaggcatccggcg

SEQ ID NO: 1266309 - DNA, 15 bp, Homo sapiens
caggaggcatccggc

SEQ ID NO: 1266310 - DNA, 15 bp, Homo sapiens
ccaggaggcatccgg

SEQ ID NO: 1266311 - DNA, 15 bp, Homo sapiens
tccaggaggcatccg

SEQ ID NO: 1266312 - DNA, 15 bp, Homo sapiens
ttccaggaggcatcc

SEQ ID NO: 1266313 - DNA, 15 bp, Homo sapiens
cttccaggaggcatc

SEQ ID NO: 1266314 - DNA, 15 bp, Homo sapiens
ccttccaggaggcat

SEQ ID NO: 1266315 - DNA, 15 bp, Homo sapiens
gccttccaggaggca

SEQ ID NO: 1266316 - DNA, 15 bp, Homo sapiens
cgccttccaggaggc

SEQ ID NO: 1266317 - DNA, 15 bp, Homo sapiens
gcgccttccaggagg

SEQ ID NO: 1266318 - DNA, 15 bp, Homo sapiens
ggcgccttccaggag

SEQ ID NO: 1266319 - DNA, 15 bp, Homo sapiens
aggcgccttccagga

SEQ ID NO: 1266320 - DNA, 15 bp, Homo sapiens
caggcgccttccagg

SEQ ID NO: 1266321 - DNA, 15 bp, Homo sapiens
ccaggcgccttccag

SEQ ID NO: 1266322 - DNA, 15 bp, Homo sapiens
tccaggcgccttcca

SEQ ID NO: 1266323 - DNA, 15 bp, Homo sapiens
gtccaggcgccttcc

SEQ ID NO: 1266324 - DNA, 15 bp, Homo sapiens
ggtccaggcgccttc

SEQ ID NO: 1266325 - DNA, 15 bp, Homo sapiens
gggtccaggcgcctt

SEQ ID NO: 1266326 - DNA, 15 bp, Homo sapiens
tgggtccaggcgcct

SEQ ID NO: 1266327 - DNA, 15 bp, Homo sapiens
gtgggtccaggcgcc

SEQ ID NO: 1266328 - DNA, 15 bp, Homo sapiens
cgtgggtccaggcgc

SEQ ID NO: 1266329 - DNA, 15 bp, Homo sapiens
gcgtgggtccaggcg

SEQ ID NO: 1266330 - DNA, 15 bp, Homo sapiens
ggcgtgggtccaggc

SEQ ID NO: 1266331 - DNA, 15 bp, Homo sapiens
tggcgtgggtccagg

SEQ ID NO: 1266332 - DNA, 15 bp, Homo sapiens
ctggcgtgggtccag

SEQ ID NO: 1266333 - DNA, 15 bp, Homo sapiens
cctggcgtgggtcca

SEQ ID NO: 1266334 - DNA, 15 bp, Homo sapiens
acctggcgtgggtcc

SEQ ID NO: 1266335 - DNA, 15 bp, Homo sapiens
aacctggcgtgggtc

SEQ ID NO: 1266336 - DNA, 15 bp, Homo sapiens
aaacctggcgtgggt

SEQ ID NO: 1266337 - DNA, 15 bp, Homo sapiens
gaaacctggcgtggg

SEQ ID NO: 1266338 - DNA, 15 bp, Homo sapiens
ggaaacctggcgtgg

SEQ ID NO: 1266339 - DNA, 15 bp, Homo sapiens
gggaaacctggcgtg

SEQ ID NO: 1266340 - DNA, 15 bp, Homo sapiens
tgggaaacctggcgt

SEQ ID NO: 1266341 - DNA, 15 bp, Homo sapiens
ctgggaaacctggcg

SEQ ID NO: 1266342 - DNA, 15 bp, Homo sapiens
actgggaaacctggc

SEQ ID NO: 1266343 - DNA, 15 bp, Homo sapiens
aactgggaaacctgg

SEQ ID NO: 1266344 - DNA, 15 bp, Homo sapiens
aaactgggaaacctg

SEQ ID NO: 1266345 - DNA, 15 bp, Homo sapiens
taaactgggaaacct

SEQ ID NO: 1266346 - DNA, 15 bp, Homo sapiens
ttaaactgggaaacc

SEQ ID NO: 1266347 - DNA, 15 bp, Homo sapiens
attaaactgggaaac

SEQ ID NO: 1266348 - DNA, 15 bp, Homo sapiens
aattaaactgggaaa

SEQ ID NO: 1266349 - DNA, 15 bp, Homo sapiens
gaattaaactgggaa

SEQ ID NO: 1266350 - DNA, 15 bp, Homo sapiens
ggaattaaactggga

SEQ ID NO: 1266351 - DNA, 15 bp, Homo sapiens
aggaattaaactggg

SEQ ID NO: 1266352 - DNA, 15 bp, Homo sapiens
gaggaattaaactgg

SEQ ID NO: 1266353 - DNA, 15 bp, Homo sapiens
tgaggaattaaactg

SEQ ID NO: 1266354 - DNA, 15 bp, Homo sapiens
atgaggaattaaact

SEQ ID NO: 1266355 - DNA, 15 bp, Homo sapiens
catgaggaattaaac

SEQ ID NO: 1266356 - DNA, 15 bp, Homo sapiens
tcatgaggaattaaa

SEQ ID NO: 1266357 - DNA, 15 bp, Homo sapiens
gtcatgaggaattaa

SEQ ID NO: 1266358 - DNA, 15 bp, Homo sapiens
agtcatgaggaatta

SEQ ID NO: 1266359 - DNA, 15 bp, Homo sapiens
aagtcatgaggaatt

SEQ ID NO: 1266360 - DNA, 15 bp, Homo sapiens
taagtcatgaggaat

SEQ ID NO: 1266361 - DNA, 15 bp, Homo sapiens
ctaagtcatgaggaa

SEQ ID NO: 1266362 - DNA, 15 bp, Homo sapiens
gctaagtcatgagga

SEQ ID NO: 1266363 - DNA, 15 bp, Homo sapiens
cgctaagtcatgagg

SEQ ID NO: 1266364 - DNA, 15 bp, Homo sapiens
acgctaagtcatgag

SEQ ID NO: 1266365 - DNA, 15 bp, Homo sapiens
gacgctaagtcatga

SEQ ID NO: 1266366 - DNA, 15 bp, Homo sapiens
ggacgctaagtcatg

SEQ ID NO: 1266367 - DNA, 15 bp, Homo sapiens
gggacgctaagtcat

SEQ ID NO: 1266368 - DNA, 15 bp, Homo sapiens
tgggacgctaagtca

SEQ ID NO: 1266369 - DNA, 15 bp, Homo sapiens
ctgggacgctaagtc

SEQ ID NO: 1266370 - DNA, 15 bp, Homo sapiens
gctgggacgctaagt

SEQ ID NO: 1266371 - DNA, 15 bp, Homo sapiens
ggctgggacgctaag

SEQ ID NO: 1266372 - DNA, 15 bp, Homo sapiens
gggctgggacgctaa

SEQ ID NO: 1266373 - DNA, 15 bp, Homo sapiens
cgggctgggacgcta

SEQ ID NO: 1266374 - DNA, 15 bp, Homo sapiens
gcgggctgggacgct

SEQ ID NO: 1266375 - DNA, 15 bp, Homo sapiens
cgcgggctgggacgc

SEQ ID NO: 1266376 - DNA, 15 bp, Homo sapiens
gcgcgggctgggacg

SEQ ID NO: 1266377 - DNA, 15 bp, Homo sapiens
tgcgcgggctgggac

SEQ ID NO: 1266378 - DNA, 15 bp, Homo sapiens
gtgcgcgggctggga

SEQ ID NO: 1266379 - DNA, 15 bp, Homo sapiens
ggtgcgcgggctggg

SEQ ID NO: 1266380 - DNA, 15 bp, Homo sapiens
cggtgcgcgggctgg

SEQ ID NO: 1266381 - DNA, 15 bp, Homo sapiens
tcggtgcgcgggctg

SEQ ID NO: 1266382 - DNA, 15 bp, Homo sapiens
gtcggtgcgcgggct

SEQ ID NO: 1266383 - DNA, 15 bp, Homo sapiens
ggtcggtgcgcgggc

SEQ ID NO: 1266384 - DNA, 15 bp, Homo sapiens
tggtcggtgcgcggg

SEQ ID NO: 1266385 - DNA, 15 bp, Homo sapiens
ctggtcggtgcgcgg

SEQ ID NO: 1266386 - DNA, 15 bp, Homo sapiens
gctggtcggtgcgcg

SEQ ID NO: 1266387 - DNA, 15 bp, Homo sapiens
cgctggtcggtgcgc

SEQ ID NO: 1266388 - DNA, 15 bp, Homo sapiens
gcgctggtcggtgcg

SEQ ID NO: 1266389 - DNA, 15 bp, Homo sapiens
ggcgctggtcggtgc

SEQ ID NO: 1266390 - DNA, 15 bp, Homo sapiens
gggcgctggtcggtg

SEQ ID NO: 1266391 - DNA, 15 bp, Homo sapiens
ggggcgctggtcggt

SEQ ID NO: 1266392 - DNA, 15 bp, Homo sapiens
tggggcgctggtcgg

SEQ ID NO: 1266393 - DNA, 15 bp, Homo sapiens
ctggggcgctggtcg

SEQ ID NO: 1266394 - DNA, 15 bp, Homo sapiens
actggggcgctggtc

SEQ ID NO: 1266395 - DNA, 15 bp, Homo sapiens
aactggggcgctggt

SEQ ID NO: 1266396 - DNA, 15 bp, Homo sapiens
gaactggggcgctgg

SEQ ID NO: 1266397 - DNA, 15 bp, Homo sapiens
ggaactggggcgctg

SEQ ID NO: 1266398 - DNA, 15 bp, Homo sapiens
gggaactggggcgct

SEQ ID NO: 1266399 - DNA, 15 bp, Homo sapiens
ggggaactggggcgc

SEQ ID NO: 1266400 - DNA, 15 bp, Homo sapiens
tggggaactggggcg

SEQ ID NO: 1266401 - DNA, 15 bp, Homo sapiens
gtggggaactggggc

SEQ ID NO: 1266402 - DNA, 15 bp, Homo sapiens
tgtggggaactgggg

SEQ ID NO: 1266403 - DNA, 15 bp, Homo sapiens
ctgtggggaactggg

SEQ ID NO: 1266404 - DNA, 15 bp, Homo sapiens
tctgtggggaactgg

SEQ ID NO: 1266405 - DNA, 15 bp, Homo sapiens
gtctgtggggaactg

SEQ ID NO: 1266406 - DNA, 15 bp, Homo sapiens
cgtctgtggggaact

SEQ ID NO: 1266407 - DNA, 15 bp, Homo sapiens
gcgtctgtggggaac

SEQ ID NO: 1266408 - DNA, 15 bp, Homo sapiens
ggcgtctgtggggaa

SEQ ID NO: 1266409 - DNA, 15 bp, Homo sapiens
cggcgtctgtgggga

SEQ ID NO: 1266410 - DNA, 15 bp, Homo sapiens
ccggcgtctgtgggg

SEQ ID NO: 1266411 - DNA, 15 bp, Homo sapiens
gccggcgtctgtggg

SEQ ID NO: 1266412 - DNA, 15 bp, Homo sapiens
cgccggcgtctgtgg

SEQ ID NO: 1266413 - DNA, 15 bp, Homo sapiens
ccgccggcgtctgtg

SEQ ID NO: 1266414 - DNA, 15 bp, Homo sapiens
cccgccggcgtctgt

SEQ ID NO: 1266415 - DNA, 15 bp, Homo sapiens
gcccgccggcgtctg

SEQ ID NO: 1266416 - DNA, 15 bp, Homo sapiens
ggcccgccggcgtct

SEQ ID NO: 1266417 - DNA, 15 bp, Homo sapiens
gggcccgccggcgtc

SEQ ID NO: 1266418 - DNA, 15 bp, Homo sapiens
cgggcccgccggcgt

SEQ ID NO: 1266419 - DNA, 15 bp, Homo sapiens
ccgggcccgccggcg

SEQ ID NO: 1266420 - DNA, 15 bp, Homo sapiens
cccgggcccgccggc

SEQ ID NO: 1266421 - DNA, 15 bp, Homo sapiens
tcccgggcccgccgg

SEQ ID NO: 1266422 - DNA, 15 bp, Homo sapiens
ctcccgggcccgccg

SEQ ID NO: 1266423 - DNA, 15 bp, Homo sapiens
gctcccgggcccgcc

SEQ ID NO: 1266424 - DNA, 15 bp, Homo sapiens
ggctcccgggcccgc

SEQ ID NO: 1266425 - DNA, 15 bp, Homo sapiens
aggctcccgggcccg

SEQ ID NO: 1266426 - DNA, 15 bp, Homo sapiens
gaggctcccgggccc

SEQ ID NO: 1266427 - DNA, 15 bp, Homo sapiens
cgaggctcccgggcc

SEQ ID NO: 1266428 - DNA, 15 bp, Homo sapiens
gcgaggctcccgggc

SEQ ID NO: 1266429 - DNA, 15 bp, Homo sapiens
cgcgaggctcccggg

SEQ ID NO: 1266430 - DNA, 15 bp, Homo sapiens
ccgcgaggctcccgg

SEQ ID NO: 1266431 - DNA, 15 bp, Homo sapiens
tccgcgaggctcccg

SEQ ID NO: 1266432 - DNA, 15 bp, Homo sapiens
gtccgcgaggctccc

SEQ ID NO: 1266433 - DNA, 15 bp, Homo sapiens
cgtccgcgaggctcc

SEQ ID NO: 1266434 - DNA, 15 bp, Homo sapiens
acgtccgcgaggctc

SEQ ID NO: 1266435 - DNA, 15 bp, Homo sapiens
cacgtccgcgaggct

SEQ ID NO: 1266436 - DNA, 15 bp, Homo sapiens
tcacgtccgcgaggc

SEQ ID NO: 1266437 - DNA, 15 bp, Homo sapiens
gtcacgtccgcgagg

SEQ ID NO: 1266438 - DNA, 15 bp, Homo sapiens
cgtcacgtccgcgag

SEQ ID NO: 1266439 - DNA, 15 bp, Homo sapiens
gcgtcacgtccgcga

SEQ ID NO: 1266440 - DNA, 15 bp, Homo sapiens
ggcgtcacgtccgcg

SEQ ID NO: 1266441 - DNA, 15 bp, Homo sapiens
cggcgtcacgtccgc

SEQ ID NO: 1266442 - DNA, 15 bp, Homo sapiens
gcggcgtcacgtccg

SEQ ID NO: 1266443 - DNA, 15 bp, Homo sapiens
cgcggcgtcacgtcc

SEQ ID NO: 1266444 - DNA, 15 bp, Homo sapiens
ccgcggcgtcacgtc

SEQ ID NO: 1266445 - DNA, 15 bp, Homo sapiens
cccgcggcgtcacgt

SEQ ID NO: 1266446 - DNA, 15 bp, Homo sapiens
gcccgcggcgtcacg

SEQ ID NO: 1266447 - DNA, 15 bp, Homo sapiens
cgcccgcggcgtcac

SEQ ID NO: 1266448 - DNA, 15 bp, Homo sapiens
ccgcccgcggcgtca

SEQ ID NO: 1266449 - DNA, 15 bp, Homo sapiens
tccgcccgcggcgtc

SEQ ID NO: 1266450 - DNA, 15 bp, Homo sapiens
ttccgcccgcggcgt

SEQ ID NO: 1266451 - DNA, 15 bp, Homo sapiens
cttccgcccgcggcg

SEQ ID NO: 1266452 - DNA, 15 bp, Homo sapiens
acttccgcccgcggc

SEQ ID NO: 1266453 - DNA, 15 bp, Homo sapiens
cacttccgcccgcgg

SEQ ID NO: 1266454 - DNA, 15 bp, Homo sapiens
tcacttccgcccgcg

SEQ ID NO: 1266455 - DNA, 15 bp, Homo sapiens
gtcacttccgcccgc

SEQ ID NO: 1266456 - DNA, 15 bp, Homo sapiens
cgtcacttccgcccg

SEQ ID NO: 1266457 - DNA, 15 bp, Homo sapiens
acgtcacttccgccc

SEQ ID NO: 1266458 - DNA, 15 bp, Homo sapiens
aacgtcacttccgcc

SEQ ID NO: 1266459 - DNA, 15 bp, Homo sapiens
aaacgtcacttccgc

SEQ ID NO: 1266460 - DNA, 15 bp, Homo sapiens
aaaacgtcacttccg

SEQ ID NO: 1266461 - DNA, 15 bp, Homo sapiens
gaaaacgtcacttcc

SEQ ID NO: 1266462 - DNA, 15 bp, Homo sapiens
ggaaaacgtcacttc

SEQ ID NO: 1266463 - DNA, 15 bp, Homo sapiens
gggaaaacgtcactt

SEQ ID NO: 1266464 - DNA, 15 bp, Homo sapiens
cgggaaaacgtcact

SEQ ID NO: 1266465 - DNA, 15 bp, Homo sapiens
gcgggaaaacgtcac

SEQ ID NO: 1266466 - DNA, 15 bp, Homo sapiens
cgcgggaaaacgtca

SEQ ID NO: 1266467 - DNA, 15 bp, Homo sapiens
ccgcgggaaaacgtc

SEQ ID NO: 1266468 - DNA, 15 bp, Homo sapiens
accgcgggaaaacgt

SEQ ID NO: 1266469 - DNA, 15 bp, Homo sapiens
aaccgcgggaaaacg

SEQ ID NO: 1266470 - DNA, 15 bp, Homo sapiens
caaccgcgggaaaac

SEQ ID NO: 1266471 - DNA, 15 bp, Homo sapiens
ccaaccgcgggaaaa

SEQ ID NO: 1266472 - DNA, 15 bp, Homo sapiens
tccaaccgcgggaaa

SEQ ID NO: 1266473 - DNA, 15 bp, Homo sapiens
gtccaaccgcgggaa

SEQ ID NO: 1266474 - DNA, 15 bp, Homo sapiens
cgtccaaccgcggga

SEQ ID NO: 1266475 - DNA, 15 bp, Homo sapiens
gcgtccaaccgcggg

SEQ ID NO: 1266476 - DNA, 15 bp, Homo sapiens
cgcgtccaaccgcgg

SEQ ID NO: 1266477 - DNA, 15 bp, Homo sapiens
ccgcgtccaaccgcg

SEQ ID NO: 1266478 - DNA, 15 bp, Homo sapiens
gccgcgtccaaccgc

SEQ ID NO: 1266479 - DNA, 15 bp, Homo sapiens
cgccgcgtccaaccg

SEQ ID NO: 1266480 - DNA, 15 bp, Homo sapiens
gcgccgcgtccaacc

SEQ ID NO: 1266481 - DNA, 15 bp, Homo sapiens
agcgccgcgtccaac

SEQ ID NO: 1266482 - DNA, 15 bp, Homo sapiens
gagcgccgcgtccaa

SEQ ID NO: 1266483 - DNA, 15 bp, Homo sapiens
tgagcgccgcgtcca

SEQ ID NO: 1266484 - DNA, 15 bp, Homo sapiens
ctgagcgccgcgtcc

SEQ ID NO: 1266485 - DNA, 15 bp, Homo sapiens
actgagcgccgcgtc

SEQ ID NO: 1266486 - DNA, 15 bp, Homo sapiens
aactgagcgccgcgt

SEQ ID NO: 1266487 - DNA, 15 bp, Homo sapiens
caactgagcgccgcg

SEQ ID NO: 1266488 - DNA, 15 bp, Homo sapiens
gcaactgagcgccgc

SEQ ID NO: 1266489 - DNA, 15 bp, Homo sapiens
ggcaactgagcgccg

SEQ ID NO: 1266490 - DNA, 15 bp, Homo sapiens
cggcaactgagcgcc

SEQ ID NO: 1266491 - DNA, 15 bp, Homo sapiens
ccggcaactgagcgc

SEQ ID NO: 1266492 - DNA, 15 bp, Homo sapiens
cccggcaactgagcg

SEQ ID NO: 1266493 - DNA, 15 bp, Homo sapiens
gcccggcaactgagc

SEQ ID NO: 1266494 - DNA, 15 bp, Homo sapiens
cgcccggcaactgag

SEQ ID NO: 1266495 - DNA, 15 bp, Homo sapiens
ccgcccggcaactga

SEQ ID NO: 1266496 - DNA, 15 bp, Homo sapiens
cccgcccggcaactg

SEQ ID NO: 1266497 - DNA, 15 bp, Homo sapiens
ccccgcccggcaact

SEQ ID NO: 1266498 - DNA, 15 bp, Homo sapiens
cccccgcccggcaac

SEQ ID NO: 1266499 - DNA, 15 bp, Homo sapiens
tcccccgcccggcaa

SEQ ID NO: 1266500 - DNA, 15 bp, Homo sapiens
ctcccccgcccggca

SEQ ID NO: 1266501 - DNA, 15 bp, Homo sapiens
cctcccccgcccggc

SEQ ID NO: 1266502 - DNA, 15 bp, Homo sapiens
ccctcccccgcccgg

SEQ ID NO: 1266503 - DNA, 15 bp, Homo sapiens
gccctcccccgcccg

SEQ ID NO: 1266504 - DNA, 15 bp, Homo sapiens
cgccctcccccgccc

SEQ ID NO: 1266505 - DNA, 15 bp, Homo sapiens
gcgccctcccccgcc

SEQ ID NO: 1266506 - DNA, 15 bp, Homo sapiens
cgcgccctcccccgc

SEQ ID NO: 1266507 - DNA, 15 bp, Homo sapiens
acgcgccctcccccg

SEQ ID NO: 1266508 - DNA, 15 bp, Homo sapiens
gacgcgccctccccc

SEQ ID NO: 1266509 - DNA, 15 bp, Homo sapiens
ggacgcgccctcccc

SEQ ID NO: 1266510 - DNA, 15 bp, Homo sapiens
cggacgcgccctccc

SEQ ID NO: 1266511 - DNA, 15 bp, Homo sapiens
ccggacgcgccctcc

SEQ ID NO: 1266512 - DNA, 15 bp, Homo sapiens
accggacgcgccctc

SEQ ID NO: 1266513 - DNA, 15 bp, Homo sapiens
aaccggacgcgccct

SEQ ID NO: 1266514 - DNA, 15 bp, Homo sapiens
aaaccggacgcgccc

SEQ ID NO: 1266515 - DNA, 15 bp, Homo sapiens
aaaaccggacgcgcc

SEQ ID NO: 1266516 - DNA, 15 bp, Homo sapiens
aaaaaccggacgcgc

SEQ ID NO: 1266517 - DNA, 15 bp, Homo sapiens
gaaaaaccggacgcg

SEQ ID NO: 1266518 - DNA, 15 bp, Homo sapiens
agaaaaaccggacgc

SEQ ID NO: 1266519 - DNA, 15 bp, Homo sapiens
gagaaaaaccggacg

SEQ ID NO: 1266520 - DNA, 15 bp, Homo sapiens
tgagaaaaaccggac

SEQ ID NO: 1266521 - DNA, 15 bp, Homo sapiens
ctgagaaaaaccgga

SEQ ID NO: 1266522 - DNA, 15 bp, Homo sapiens
cctgagaaaaaccgg

SEQ ID NO: 1266523 - DNA, 15 bp, Homo sapiens
ccctgagaaaaaccg

SEQ ID NO: 1266524 - DNA, 15 bp, Homo sapiens
cccctgagaaaaacc

SEQ ID NO: 1266525 - DNA, 15 bp, Homo sapiens
tcccctgagaaaaac

SEQ ID NO: 1266526 - DNA, 15 bp, Homo sapiens
gtcccctgagaaaaa

SEQ ID NO: 1266527 - DNA, 15 bp, Homo sapiens
cgtcccctgagaaaa

SEQ ID NO: 1266528 - DNA, 15 bp, Homo sapiens
acgtcccctgagaaa

SEQ ID NO: 1266529 - DNA, 15 bp, Homo sapiens
aacgtcccctgagaa

SEQ ID NO: 1266530 - DNA, 15 bp, Homo sapiens
caacgtcccctgaga

SEQ ID NO: 1266531 - DNA, 15 bp, Homo sapiens
tcaacgtcccctgag

SEQ ID NO: 1266532 - DNA, 15 bp, Homo sapiens
ttcaacgtcccctga

SEQ ID NO: 1266533 - DNA, 15 bp, Homo sapiens
tttcaacgtcccctg

SEQ ID NO: 1266534 - DNA, 15 bp, Homo sapiens
atttcaacgtcccct

SEQ ID NO: 1266535 - DNA, 15 bp, Homo sapiens
aatttcaacgtcccc

SEQ ID NO: 1266536 - DNA, 15 bp, Homo sapiens
taatttcaacgtccc

SEQ ID NO: 1266537 - DNA, 15 bp, Homo sapiens
ataatttcaacgtcc

SEQ ID NO: 1266538 - DNA, 15 bp, Homo sapiens
aataatttcaacgtc

SEQ ID NO: 1266539 - DNA, 15 bp, Homo sapiens
aaataatttcaacgt

SEQ ID NO: 1266540 - DNA, 15 bp, Homo sapiens
aaaataatttcaacg

SEQ ID NO: 1266541 - DNA, 15 bp, Homo sapiens
aaaaataatttcaac

SEQ ID NO: 1266542 - DNA, 15 bp, Homo sapiens
caaaaataatttcaa

SEQ ID NO: 1266543 - DNA, 15 bp, Homo sapiens
acaaaaataatttca

SEQ ID NO: 1266544 - DNA, 15 bp, Homo sapiens
tacaaaaataatttc

SEQ ID NO: 1266545 - DNA, 15 bp, Homo sapiens
ttacaaaaataattt

SEQ ID NO: 1266546 - DNA, 15 bp, Homo sapiens
gttacaaaaataatt

SEQ ID NO: 1266547 - DNA, 15 bp, Homo sapiens
cgttacaaaaataat

SEQ ID NO: 1266548 - DNA, 15 bp, Homo sapiens
ccgttacaaaaataa

SEQ ID NO: 1266549 - DNA, 15 bp, Homo sapiens
cccgttacaaaaata

SEQ ID NO: 1266550 - DNA, 15 bp, Homo sapiens
tcccgttacaaaaat

SEQ ID NO: 1266551 - DNA, 15 bp, Homo sapiens
ctcccgttacaaaaa

SEQ ID NO: 1266552 - DNA, 15 bp, Homo sapiens
actcccgttacaaaa

SEQ ID NO: 1266553 - DNA, 15 bp, Homo sapiens
gactcccgttacaaa

SEQ ID NO: 1266554 - DNA, 15 bp, Homo sapiens
cgactcccgttacaa

SEQ ID NO: 1266555 - DNA, 15 bp, Homo sapiens
ccgactcccgttaca

SEQ ID NO: 1266556 - DNA, 15 bp, Homo sapiens
cccgactcccgttac

SEQ ID NO: 1266557 - DNA, 15 bp, Homo sapiens
tcccgactcccgtta

SEQ ID NO: 1266558 - DNA, 15 bp, Homo sapiens
ctcccgactcccgtt

SEQ ID NO: 1266559 - DNA, 15 bp, Homo sapiens
tctcccgactcccgt

SEQ ID NO: 1266560 - DNA, 15 bp, Homo sapiens
ctctcccgactcccg

SEQ ID NO: 1266561 - DNA, 15 bp, Homo sapiens
cctctcccgactccc

SEQ ID NO: 1266562 - DNA, 15 bp, Homo sapiens
tcctctcccgactcc

SEQ ID NO: 1266563 - DNA, 15 bp, Homo sapiens
gtcctctcccgactc

SEQ ID NO: 1266564 - DNA, 15 bp, Homo sapiens
cgtcctctcccgact

SEQ ID NO: 1266565 - DNA, 15 bp, Homo sapiens
ccgtcctctcccgac

SEQ ID NO: 1266566 - DNA, 15 bp, Homo sapiens
cccgtcctctcccga

SEQ ID NO: 1266567 - DNA, 15 bp, Homo sapiens
ccccgtcctctcccg

SEQ ID NO: 1266568 - DNA, 15 bp, Homo sapiens
gccccgtcctctccc

SEQ ID NO: 1266569 - DNA, 15 bp, Homo sapiens
cgccccgtcctctcc

SEQ ID NO: 1266570 - DNA, 15 bp, Homo sapiens
acgccccgtcctctc

SEQ ID NO: 1266571 - DNA, 15 bp, Homo sapiens
cacgccccgtcctct

SEQ ID NO: 1266572 - DNA, 15 bp, Homo sapiens
gcacgccccgtcctc

SEQ ID NO: 1266573 - DNA, 15 bp, Homo sapiens
ggcacgccccgtcct

SEQ ID NO: 1266574 - DNA, 15 bp, Homo sapiens
gggcacgccccgtcc

SEQ ID NO: 1266575 - DNA, 15 bp, Homo sapiens
ggggcacgccccgtc

SEQ ID NO: 1266576 - DNA, 15 bp, Homo sapiens
cggggcacgccccgt

SEQ ID NO: 1266577 - DNA, 15 bp, Homo sapiens
tcggggcacgccccg

SEQ ID NO: 1266578 - DNA, 15 bp, Homo sapiens
gtcggggcacgcccc

SEQ ID NO: 1266579 - DNA, 15 bp, Homo sapiens
cgtcggggcacgccc

SEQ ID NO: 1266580 - DNA, 15 bp, Homo sapiens
acgtcggggcacgcc

SEQ ID NO: 1266581 - DNA, 15 bp, Homo sapiens
cacgtcggggcacgc

SEQ ID NO: 1266582 - DNA, 15 bp, Homo sapiens
gcacgtcggggcacg

SEQ ID NO: 1266583 - DNA, 15 bp, Homo sapiens
cgcacgtcggggcac

SEQ ID NO: 1266584 - DNA, 15 bp, Homo sapiens
gcgcacgtcggggca

SEQ ID NO: 1266585 - DNA, 15 bp, Homo sapiens
cgcgcacgtcggggc

SEQ ID NO: 1266586 - DNA, 15 bp, Homo sapiens
gcgcgcacgtcgggg

SEQ ID NO: 1266587 - DNA, 15 bp, Homo sapiens
cgcgcgcacgtcggg

SEQ ID NO: 1266588 - DNA, 15 bp, Homo sapiens
gcgcgcgcacgtcgg

SEQ ID NO: 1266589 - DNA, 15 bp, Homo sapiens
cgcgcgcgcacgtcg

SEQ ID NO: 1266590 - DNA, 15 bp, Homo sapiens
acgcgcgcgcacgtc

SEQ ID NO: 1266591 - DNA, 15 bp, Homo sapiens
gacgcgcgcgcacgt

SEQ ID NO: 1266592 - DNA, 15 bp, Homo sapiens
cgacgcgcgcgcacg

SEQ ID NO: 1266593 - DNA, 15 bp, Homo sapiens
acgacgcgcgcgcac

SEQ ID NO: 1266594 - DNA, 15 bp, Homo sapiens
gacgacgcgcgcgca

SEQ ID NO: 1266595 - DNA, 15 bp, Homo sapiens
ggacgacgcgcgcgc

SEQ ID NO: 1266596 - DNA, 15 bp, Homo sapiens
aggacgacgcgcgcg

SEQ ID NO: 1266597 - DNA, 15 bp, Homo sapiens
gaggacgacgcgcgc

SEQ ID NO: 1266598 - DNA, 15 bp, Homo sapiens
ggaggacgacgcgcg

SEQ ID NO: 1266599 - DNA, 15 bp, Homo sapiens
gggaggacgacgcgc

SEQ ID NO: 1266600 - DNA, 15 bp, Homo sapiens
ggggaggacgacgcg

SEQ ID NO: 1266601 - DNA, 15 bp, Homo sapiens
cggggaggacgacgc

SEQ ID NO: 1266602 - DNA, 15 bp, Homo sapiens
ccggggaggacgacg

SEQ ID NO: 1266603 - DNA, 15 bp, Homo sapiens
gccggggaggacgac

SEQ ID NO: 1266604 - DNA, 15 bp, Homo sapiens
cgccggggaggacga

SEQ ID NO: 1266605 - DNA, 15 bp, Homo sapiens
gcgccggggaggacg

SEQ ID NO: 1266606 - DNA, 15 bp, Homo sapiens
agcgccggggaggac

SEQ ID NO: 1266607 - DNA, 15 bp, Homo sapiens
gagcgccggggagga

SEQ ID NO: 1266608 - DNA, 15 bp, Homo sapiens
ggagcgccggggagg

SEQ ID NO: 1266609 - DNA, 15 bp, Homo sapiens
aggagcgccggggag

SEQ ID NO: 1266610 - DNA, 15 bp, Homo sapiens
gaggagcgccgggga

SEQ ID NO: 1266611 - DNA, 15 bp, Homo sapiens
ggaggagcgccgggg

SEQ ID NO: 1266612 - DNA, 15 bp, Homo sapiens
tggaggagcgccggg

SEQ ID NO: 1266613 - DNA, 15 bp, Homo sapiens
gtggaggagcgccgg

SEQ ID NO: 1266614 - DNA, 15 bp, Homo sapiens
tgtggaggagcgccg

SEQ ID NO: 1266615 - DNA, 15 bp, Homo sapiens
ctgtggaggagcgcc

SEQ ID NO: 1266616 - DNA, 15 bp, Homo sapiens
gctgtggaggagcgc

SEQ ID NO: 1266617 - DNA, 15 bp, Homo sapiens
agctgtggaggagcg

SEQ ID NO: 1266618 - DNA, 15 bp, Homo sapiens
gagctgtggaggagc

SEQ ID NO: 1266619 - DNA, 15 bp, Homo sapiens
cgagctgtggaggag

SEQ ID NO: 1266620 - DNA, 15 bp, Homo sapiens
gcgagctgtggagga

SEQ ID NO: 1266621 - DNA, 15 bp, Homo sapiens
agcgagctgtggagg

SEQ ID NO: 1266622 - DNA, 15 bp, Homo sapiens
cagcgagctgtggag

SEQ ID NO: 1266623 - DNA, 15 bp, Homo sapiens
ccagcgagctgtgga

SEQ ID NO: 1266624 - DNA, 15 bp, Homo sapiens
gccagcgagctgtgg

SEQ ID NO: 1266625 - DNA, 15 bp, Homo sapiens
agccagcgagctgtg

SEQ ID NO: 1266626 - DNA, 15 bp, Homo sapiens
gagccagcgagctgt

SEQ ID NO: 1266627 - DNA, 15 bp, Homo sapiens
ggagccagcgagctg

SEQ ID NO: 1266628 - DNA, 15 bp, Homo sapiens
gggagccagcgagct

SEQ ID NO: 1266629 - DNA, 15 bp, Homo sapiens
cgggagccagcgagc

SEQ ID NO: 1266630 - DNA, 15 bp, Homo sapiens
gcgggagccagcgag

SEQ ID NO: 1266631 - DNA, 15 bp, Homo sapiens
ggcgggagccagcga

SEQ ID NO: 1266632 - DNA, 15 bp, Homo sapiens
cggcgggagccagcg

SEQ ID NO: 1266633 - DNA, 15 bp, Homo sapiens
gcggcgggagccagc

SEQ ID NO: 1266634 - DNA, 15 bp, Homo sapiens
cgcggcgggagccag

SEQ ID NO: 1266635 - DNA, 15 bp, Homo sapiens
ccgcggcgggagcca

SEQ ID NO: 1266636 - DNA, 15 bp, Homo sapiens
tccgcggcgggagcc

SEQ ID NO: 1266637 - DNA, 15 bp, Homo sapiens
ttccgcggcgggagc

SEQ ID NO: 1266638 - DNA, 15 bp, Homo sapiens
tttccgcggcgggag

SEQ ID NO: 1266639 - DNA, 15 bp, Homo sapiens
ctttccgcggcggga

SEQ ID NO: 1266640 - DNA, 15 bp, Homo sapiens
cctttccgcggcggg

SEQ ID NO: 1266641 - DNA, 15 bp, Homo sapiens
gcctttccgcggcgg

SEQ ID NO: 1266642 - DNA, 15 bp, Homo sapiens
cgcctttccgcggcg

SEQ ID NO: 1266643 - DNA, 15 bp, Homo sapiens
acgcctttccgcggc

SEQ ID NO: 1266644 - DNA, 15 bp, Homo sapiens
gacgcctttccgcgg

SEQ ID NO: 1266645 - DNA, 15 bp, Homo sapiens
tgacgcctttccgcg

SEQ ID NO: 1266646 - DNA, 15 bp, Homo sapiens
atgacgcctttccgc

SEQ ID NO: 1266647 - DNA, 15 bp, Homo sapiens
catgacgcctttccg

SEQ ID NO: 1266648 - DNA, 15 bp, Homo sapiens
gcatgacgcctttcc

SEQ ID NO: 1266649 - DNA, 15 bp, Homo sapiens
ggcatgacgcctttc

SEQ ID NO: 1266650 - DNA, 15 bp, Homo sapiens
cggcatgacgccttt

SEQ ID NO: 1266651 - DNA, 15 bp, Homo sapiens
gcggcatgacgcctt

SEQ ID NO: 1266652 - DNA, 15 bp, Homo sapiens
ggcggcatgacgcct

SEQ ID NO: 1266653 - DNA, 15 bp, Homo sapiens
gggcggcatgacgcc

SEQ ID NO: 1266654 - DNA, 15 bp, Homo sapiens
tgggcggcatgacgc

SEQ ID NO: 1266655 - DNA, 15 bp, Homo sapiens
ttgggcggcatgacg

SEQ ID NO: 1266656 - DNA, 15 bp, Homo sapiens
tttgggcggcatgac

SEQ ID NO: 1266657 - DNA, 15 bp, Homo sapiens
ttttgggcggcatga

SEQ ID NO: 1266658 - DNA, 15 bp, Homo sapiens
gttttgggcggcatg

SEQ ID NO: 1266659 - DNA, 15 bp, Homo sapiens
ggttttgggcggcat

SEQ ID NO: 1266660 - DNA, 15 bp, Homo sapiens
gggttttgggcggca

SEQ ID NO: 1266661 - DNA, 15 bp, Homo sapiens
ggggttttgggcggc

SEQ ID NO: 1266662 - DNA, 15 bp, Homo sapiens
gggggttttgggcgg

SEQ ID NO: 1266663 - DNA, 15 bp, Homo sapiens
ggggggttttgggcg

SEQ ID NO: 1266664 - DNA, 15 bp, Homo sapiens
cggggggttttgggc

SEQ ID NO: 1266665 - DNA, 15 bp, Homo sapiens
tcggggggttttggg

SEQ ID NO: 1266666 - DNA, 15 bp, Homo sapiens
ttcggggggttttgg

SEQ ID NO: 1266667 - DNA, 15 bp, Homo sapiens
tttcggggggttttg

SEQ ID NO: 1266668 - DNA, 15 bp, Homo sapiens
ttttcggggggtttt

SEQ ID NO: 1266669 - DNA, 15 bp, Homo sapiens
tttttcggggggttt

SEQ ID NO: 1266670 - DNA, 15 bp, Homo sapiens
gtttttcggggggtt

SEQ ID NO: 1266671 - DNA, 15 bp, Homo sapiens
cgtttttcggggggt

SEQ ID NO: 1266672 - DNA, 15 bp, Homo sapiens
ccgtttttcgggggg

SEQ ID NO: 1266673 - DNA, 15 bp, Homo sapiens
gccgtttttcggggg

SEQ ID NO: 1266674 - DNA, 15 bp, Homo sapiens
ggccgtttttcgggg

SEQ ID NO: 1266675 - DNA, 15 bp, Homo sapiens
cggccgtttttcggg

SEQ ID NO: 1266676 - DNA, 15 bp, Homo sapiens
gcggccgtttttcgg

SEQ ID NO: 1266677 - DNA, 15 bp, Homo sapiens
ggcggccgtttttcg

SEQ ID NO: 1266678 - DNA, 15 bp, Homo sapiens
tggcggccgtttttc

SEQ ID NO: 1266679 - DNA, 15 bp, Homo sapiens
gtggcggccgttttt

SEQ ID NO: 1266680 - DNA, 15 bp, Homo sapiens
ggtggcggccgtttt

SEQ ID NO: 1266681 - DNA, 15 bp, Homo sapiens
cggtggcggccgttt

SEQ ID NO: 1266682 - DNA, 15 bp, Homo sapiens
gcggtggcggccgtt

SEQ ID NO: 1266683 - DNA, 15 bp, Homo sapiens
ggcggtggcggccgt

SEQ ID NO: 1266684 - DNA, 15 bp, Homo sapiens
cggcggtggcggccg

SEQ ID NO: 1266685 - DNA, 15 bp, Homo sapiens
gcggcggtggcggcc

SEQ ID NO: 1266686 - DNA, 15 bp, Homo sapiens
agcggcggcggtggc

SEQ ID NO: 1266687 - DNA, 15 bp, Homo sapiens
cagcggcggcggtgg

SEQ ID NO: 1266688 - DNA, 15 bp, Homo sapiens
gcagcggcggcggtg

SEQ ID NO: 1266689 - DNA, 15 bp, Homo sapiens
ggcagcggcggcggt

SEQ ID NO: 1266690 - DNA, 15 bp, Homo sapiens
cggcagcggcggcgg

SEQ ID NO: 1266691 - DNA, 15 bp, Homo sapiens
gcggcagcggcggcg

SEQ ID NO: 1266692 - DNA, 15 bp, Homo sapiens
ggcggcagcggcggc

SEQ ID NO: 1266693 - DNA, 15 bp, Homo sapiens
cggcggcagcggcgg

SEQ ID NO: 1266694 - DNA, 15 bp, Homo sapiens
gcggcggcagcggcg

SEQ ID NO: 1266695 - DNA, 15 bp, Homo sapiens
cgcggcggcagcggc

SEQ ID NO: 1266696 - DNA, 15 bp, Homo sapiens
ccgcggcggcagcgg

SEQ ID NO: 1266697 - DNA, 15 bp, Homo sapiens
tccgcggcggcagcg

SEQ ID NO: 1266698 - DNA, 15 bp, Homo sapiens
ttccgcggcggcagc

SEQ ID NO: 1266699 - DNA, 15 bp, Homo sapiens
gttccgcggcggcag

SEQ ID NO: 1266700 - DNA, 15 bp, Homo sapiens
ggttccgcggcggca

SEQ ID NO: 1266701 - DNA, 15 bp, Homo sapiens
gggttccgcggcggc

SEQ ID NO: 1266702 - DNA, 15 bp, Homo sapiens
ggggttccgcggcgg

SEQ ID NO: 1266703 - DNA, 15 bp, Homo sapiens
gggggttccgcggcg

SEQ ID NO: 1266704 - DNA, 15 bp, Homo sapiens
cgggggttccgcggc

SEQ ID NO: 1266705 - DNA, 15 bp, Homo sapiens
ccgggggttccgcgg

SEQ ID NO: 1266706 - DNA, 15 bp, Homo sapiens
gccgggggttccgcg

SEQ ID NO: 1266707 - DNA, 15 bp, Homo sapiens
tgccgggggttccgc

SEQ ID NO: 1266708 - DNA, 15 bp, Homo sapiens
gtgccgggggttccg

SEQ ID NO: 1266709 - DNA, 15 bp, Homo sapiens
ggtgccgggggttcc

SEQ ID NO: 1266710 - DNA, 15 bp, Homo sapiens
cggtgccgggggttc

SEQ ID NO: 1266711 - DNA, 15 bp, Homo sapiens
gcggtgccgggggtt

SEQ ID NO: 1266712 - DNA, 15 bp, Homo sapiens
ggcggtgccgggggt

SEQ ID NO: 1266713 - DNA, 15 bp, Homo sapiens
cggcggtgccggggg

SEQ ID NO: 1266714 - DNA, 15 bp, Homo sapiens
gcggcggtgccgggg

SEQ ID NO: 1266715 - DNA, 15 bp, Homo sapiens
ggcggcggtgccggg

SEQ ID NO: 1266716 - DNA, 15 bp, Homo sapiens
cggcggcggtgccgg

SEQ ID NO: 1266717 - DNA, 15 bp, Homo sapiens
gcggcggcggtgccg

SEQ ID NO: 1266718 - DNA, 15 bp, Homo sapiens
ggcggcggcggtgcc

SEQ ID NO: 1266719 - DNA, 15 bp, Homo sapiens
cggcggcggcggtgc

SEQ ID NO: 1266720 - DNA, 15 bp, Homo sapiens
gcggcggcggcggtg

SEQ ID NO: 1266721 - DNA, 15 bp, Homo sapiens
ggcggcggcggcggt

SEQ ID NO: 1266722 - DNA, 15 bp, Homo sapiens
gggcggcggcggcgg

SEQ ID NO: 1266723 - DNA, 15 bp, Homo sapiens
ggggcggcggcggcg

SEQ ID NO: 1266724 - DNA, 15 bp, Homo sapiens
gggggcggcggcggc

SEQ ID NO: 1266725 - DNA, 15 bp, Homo sapiens
agggggcggcggcgg

SEQ ID NO: 1266726 - DNA, 15 bp, Homo sapiens
gagggggcggcggcg

SEQ ID NO: 1266727 - DNA, 15 bp, Homo sapiens
ggagggggcggcggc

SEQ ID NO: 1266728 - DNA, 15 bp, Homo sapiens
aggagggggcggcgg

SEQ ID NO: 1266729 - DNA, 15 bp, Homo sapiens
caggagggggcggcg

SEQ ID NO: 1266730 - DNA, 15 bp, Homo sapiens
tcaggagggggcggc

SEQ ID NO: 1266731 - DNA, 15 bp, Homo sapiens
ctcaggagggggcgg

SEQ ID NO: 1266732 - DNA, 15 bp, Homo sapiens
cctcaggagggggcg

SEQ ID NO: 1266733 - DNA, 15 bp, Homo sapiens
tcctcaggagggggc

SEQ ID NO: 1266734 - DNA, 15 bp, Homo sapiens
ctcctcaggaggggg

SEQ ID NO: 1266735 - DNA, 15 bp, Homo sapiens
cctcctcaggagggg

SEQ ID NO: 1266736 - DNA, 15 bp, Homo sapiens
tcctcctcaggaggg

SEQ ID NO: 1266737 - DNA, 15 bp, Homo sapiens
gtcctcctcaggagg

SEQ ID NO: 1266738 - DNA, 15 bp, Homo sapiens
ggtcctcctcaggag

SEQ ID NO: 1266739 - DNA, 15 bp, Homo sapiens
gggtcctcctcagga

SEQ ID NO: 1266740 - DNA, 15 bp, Homo sapiens
tgggtcctcctcagg

SEQ ID NO: 1266741 - DNA, 15 bp, Homo sapiens
ctgggtcctcctcag

SEQ ID NO: 1266742 - DNA, 15 bp, Homo sapiens
tctgggtcctcctca

SEQ ID NO: 1266743 - DNA, 15 bp, Homo sapiens
ctctgggtcctcctc

SEQ ID NO: 1266744 - DNA, 15 bp, Homo sapiens
gctctgggtcctcct

SEQ ID NO: 1266745 - DNA, 15 bp, Homo sapiens
tgctctgggtcctcc

SEQ ID NO: 1266746 - DNA, 15 bp, Homo sapiens
ctgctctgggtcctc

SEQ ID NO: 1266747 - DNA, 15 bp, Homo sapiens
cctgctctgggtcct

SEQ ID NO: 1266748 - DNA, 15 bp, Homo sapiens
tcctgctctgggtcc

SEQ ID NO: 1266749 - DNA, 15 bp, Homo sapiens
gtcctgctctgggtc

SEQ ID NO: 1266750 - DNA, 15 bp, Homo sapiens
tgtcctgctctgggt

SEQ ID NO: 1266751 - DNA, 15 bp, Homo sapiens
ctgtcctgctctggg

SEQ ID NO: 1266752 - DNA, 15 bp, Homo sapiens
gctgtcctgctctgg

SEQ ID NO: 1266753 - DNA, 15 bp, Homo sapiens
cgctgtcctgctctg

SEQ ID NO: 1266754 - DNA, 15 bp, Homo sapiens
ccgctgtcctgctct

SEQ ID NO: 1266755 - DNA, 15 bp, Homo sapiens
gccgctgtcctgctc

SEQ ID NO: 1266756 - DNA, 15 bp, Homo sapiens
ggccgctgtcctgct

SEQ ID NO: 1266757 - DNA, 15 bp, Homo sapiens
gggccgctgtcctgc

SEQ ID NO: 1266758 - DNA, 15 bp, Homo sapiens
cgggccgctgtcctg

SEQ ID NO: 1266759 - DNA, 15 bp, Homo sapiens
ccgggccgctgtcct

SEQ ID NO: 1266760 - DNA, 15 bp, Homo sapiens
tccgggccgctgtcc

SEQ ID NO: 1266761 - DNA, 15 bp, Homo sapiens
ctccgggccgctgtc

SEQ ID NO: 1266762 - DNA, 15 bp, Homo sapiens
cctccgggccgctgt

SEQ ID NO: 1266763 - DNA, 15 bp, Homo sapiens
tcctccgggccgctg

SEQ ID NO: 1266764 - DNA, 15 bp, Homo sapiens
gtcctccgggccgct

SEQ ID NO: 1266765 - DNA, 15 bp, Homo sapiens
ggtcctccgggccgc

SEQ ID NO: 1266766 - DNA, 15 bp, Homo sapiens
aggtcctccgggccg

SEQ ID NO: 1266767 - DNA, 15 bp, Homo sapiens
caggtcctccgggcc

SEQ ID NO: 1266768 - DNA, 15 bp, Homo sapiens
gcaggtcctccgggc

SEQ ID NO: 1266769 - DNA, 15 bp, Homo sapiens
ggcaggtcctccggg

SEQ ID NO: 1266770 - DNA, 15 bp, Homo sapiens
aggcaggtcctccgg

SEQ ID NO: 1266771 - DNA, 15 bp, Homo sapiens
gaggcaggtcctccg

SEQ ID NO: 1266772 - DNA, 15 bp, Homo sapiens
agaggcaggtcctcc

SEQ ID NO: 1266773 - DNA, 15 bp, Homo sapiens
gagaggcaggtcctc

SEQ ID NO: 1266774 - DNA, 15 bp, Homo sapiens
cgagaggcaggtcct

SEQ ID NO: 1266775 - DNA, 15 bp, Homo sapiens
acgagaggcaggtcc

SEQ ID NO: 1266776 - DNA, 15 bp, Homo sapiens
gacgagaggcaggtc

SEQ ID NO: 1266777 - DNA, 15 bp, Homo sapiens
tgacgagaggcaggt

SEQ ID NO: 1266778 - DNA, 15 bp, Homo sapiens
ctgacgagaggcagg

SEQ ID NO: 1266779 - DNA, 15 bp, Homo sapiens
cctgacgagaggcag

SEQ ID NO: 1266780 - DNA, 15 bp, Homo sapiens
acctgacgagaggca

SEQ ID NO: 1266781 - DNA, 15 bp, Homo sapiens
cacctgacgagaggc

SEQ ID NO: 1266782 - DNA, 15 bp, Homo sapiens
tcacctgacgagagg

SEQ ID NO: 1266783 - DNA, 15 bp, Homo sapiens
ctcacctgacgagag

SEQ ID NO: 1266784 - DNA, 15 bp, Homo sapiens
gctcacctgacgaga

SEQ ID NO: 1266785 - DNA, 15 bp, Homo sapiens
cgctcacctgacgag

SEQ ID NO: 1266786 - DNA, 15 bp, Homo sapiens
tcgctcacctgacga

SEQ ID NO: 1266787 - DNA, 15 bp, Homo sapiens
ctcgctcacctgacg

SEQ ID NO: 1266788 - DNA, 15 bp, Homo sapiens
gctcgctcacctgac

SEQ ID NO: 1266789 - DNA, 15 bp, Homo sapiens
tgctcgctcacctga

SEQ ID NO: 1266790 - DNA, 15 bp, Homo sapiens
ctgctcgctcacctg

SEQ ID NO: 1266791 - DNA, 15 bp, Homo sapiens
tctgctcgctcacct

SEQ ID NO: 1266792 - DNA, 15 bp, Homo sapiens
ctctgctcgctcacc

SEQ ID NO: 1266793 - DNA, 15 bp, Homo sapiens
gctctgctcgctcac

SEQ ID NO: 1266794 - DNA, 15 bp, Homo sapiens
ggctctgctcgctca

SEQ ID NO: 1266795 - DNA, 15 bp, Homo sapiens
cggctctgctcgctc

SEQ ID NO: 1266796 - DNA, 15 bp, Homo sapiens
gcggctctgctcgct

SEQ ID NO: 1266797 - DNA, 15 bp, Homo sapiens
ggcggctctgctcgc

SEQ ID NO: 1266798 - DNA, 15 bp, Homo sapiens
cggcggctctgctcg

SEQ ID NO: 1266799 - DNA, 15 bp, Homo sapiens
acggcggctctgctc

SEQ ID NO: 1266800 - DNA, 15 bp, Homo sapiens
gacggcggctctgct

SEQ ID NO: 1266801 - DNA, 15 bp, Homo sapiens
cgacggcggctctgc

SEQ ID NO: 1266802 - DNA, 15 bp, Homo sapiens
gcgacggcggctctg

SEQ ID NO: 1266803 - DNA, 15 bp, Homo sapiens
ggcgacggcggctct

SEQ ID NO: 1266804 - DNA, 15 bp, Homo sapiens
aggcgacggcggctc

SEQ ID NO: 1266805 - DNA, 15 bp, Homo sapiens
gaggcgacggcggct

SEQ ID NO: 1266806 - DNA, 15 bp, Homo sapiens
tgaggcgacggcggc

SEQ ID NO: 1266807 - DNA, 15 bp, Homo sapiens
gtgaggcgacggcgg

SEQ ID NO: 1266808 - DNA, 15 bp, Homo sapiens
cgtgaggcgacggcg

SEQ ID NO: 1266809 - DNA, 15 bp, Homo sapiens
gcgtgaggcgacggc

SEQ ID NO: 1266810 - DNA, 15 bp, Homo sapiens
cgcgtgaggcgacgg

SEQ ID NO: 1266811 - DNA, 15 bp, Homo sapiens
ccgcgtgaggcgacg

SEQ ID NO: 1266812 - DNA, 15 bp, Homo sapiens
cccgcgtgaggcgac

SEQ ID NO: 1266813 - DNA, 15 bp, Homo sapiens
tcccgcgtgaggcga

SEQ ID NO: 1266814 - DNA, 15 bp, Homo sapiens
ttcccgcgtgaggcg

SEQ ID NO: 1266815 - DNA, 15 bp, Homo sapiens
cttcccgcgtgaggc

SEQ ID NO: 1266816 - DNA, 15 bp, Homo sapiens
ccttcccgcgtgagg

SEQ ID NO: 1266817 - DNA, 15 bp, Homo sapiens
cccttcccgcgtgag

SEQ ID NO: 1266818 - DNA, 15 bp, Homo sapiens
gcccttcccgcgtga

SEQ ID NO: 1266819 - DNA, 15 bp, Homo sapiens
cgcccttcccgcgtg

SEQ ID NO: 1266820 - DNA, 15 bp, Homo sapiens
gcgcccttcccgcgt

SEQ ID NO: 1266821 - DNA, 15 bp, Homo sapiens
ggcgcccttcccgcg

SEQ ID NO: 1266822 - DNA, 15 bp, Homo sapiens
gggcgcccttcccgc

SEQ ID NO: 1266823 - DNA, 15 bp, Homo sapiens
ggggcgcccttcccg

SEQ ID NO: 1266824 - DNA, 15 bp, Homo sapiens
cggggcgcccttccc

SEQ ID NO: 1266825 - DNA, 15 bp, Homo sapiens
ccggggcgcccttcc

SEQ ID NO: 1266826 - DNA, 15 bp, Homo sapiens
cccggggcgcccttc

SEQ ID NO: 1266827 - DNA, 15 bp, Homo sapiens
acccggggcgccctt

SEQ ID NO: 1266828 - DNA, 15 bp, Homo sapiens
cacccggggcgccct

SEQ ID NO: 1266829 - DNA, 15 bp, Homo sapiens
acacccggggcgccc

SEQ ID NO: 1266830 - DNA, 15 bp, Homo sapiens
cacacccggggcgcc

SEQ ID NO: 1266831 - DNA, 15 bp, Homo sapiens
gcacacccggggcgc

SEQ ID NO: 1266832 - DNA, 15 bp, Homo sapiens
cgcacacccggggcg

SEQ ID NO: 1266833 - DNA, 15 bp, Homo sapiens
acgcacacccggggc

SEQ ID NO: 1266834 - DNA, 15 bp, Homo sapiens
tacgcacacccgggg

SEQ ID NO: 1266835 - DNA, 15 bp, Homo sapiens
ctacgcacacccggg

SEQ ID NO: 1266836 - DNA, 15 bp, Homo sapiens
cctacgcacacccgg

SEQ ID NO: 1266837 - DNA, 15 bp, Homo sapiens
ccctacgcacacccg

SEQ ID NO: 1266838 - DNA, 15 bp, Homo sapiens
gccctacgcacaccc

SEQ ID NO: 1266839 - DNA, 15 bp, Homo sapiens
cgccctacgcacacc

SEQ ID NO: 1266840 - DNA, 15 bp, Homo sapiens
ccgccctacgcacac

SEQ ID NO: 1266841 - DNA, 15 bp, Homo sapiens
cccgccctacgcaca

SEQ ID NO: 1266842 - DNA, 15 bp, Homo sapiens
gcccgccctacgcac

SEQ ID NO: 1266843 - DNA, 15 bp, Homo sapiens
cgcccgccctacgca

SEQ ID NO: 1266844 - DNA, 15 bp, Homo sapiens
gcgcccgccctacgc

SEQ ID NO: 1266845 - DNA, 15 bp, Homo sapiens
ggcgcccgccctacg

SEQ ID NO: 1266846 - DNA, 15 bp, Homo sapiens
tggcgcccgccctac

SEQ ID NO: 1266847 - DNA, 15 bp, Homo sapiens
ttggcgcccgcccta

SEQ ID NO: 1266848 - DNA, 15 bp, Homo sapiens
cttggcgcccgccct

SEQ ID NO: 1266849 - DNA, 15 bp, Homo sapiens
ccttggcgcccgccc

SEQ ID NO: 1266850 - DNA, 15 bp, Homo sapiens
gccttggcgcccgcc

SEQ ID NO: 1266851 - DNA, 15 bp, Homo sapiens
cgccttggcgcccgc

SEQ ID NO: 1266852 - DNA, 15 bp, Homo sapiens
ccgccttggcgcccg

SEQ ID NO: 1266853 - DNA, 15 bp, Homo sapiens
gccgccttggcgccc

SEQ ID NO: 1266854 - DNA, 15 bp, Homo sapiens
agccgccttggcgcc

SEQ ID NO: 1266855 - DNA, 15 bp, Homo sapiens
gagccgccttggcgc

SEQ ID NO: 1266856 - DNA, 15 bp, Homo sapiens
cgagccgccttggcg

SEQ ID NO: 1266857 - DNA, 15 bp, Homo sapiens
ccgagccgccttggc

SEQ ID NO: 1266858 - DNA, 15 bp, Homo sapiens
gccgagccgccttgg

SEQ ID NO: 1266859 - DNA, 15 bp, Homo sapiens
cgccgagccgccttg

SEQ ID NO: 1266860 - DNA, 15 bp, Homo sapiens
ccgccgagccgcctt

SEQ ID NO: 1266861 - DNA, 15 bp, Homo sapiens
cccgccgagccgcct

SEQ ID NO: 1266862 - DNA, 15 bp, Homo sapiens
ccccgccgagccgcc

SEQ ID NO: 1266863 - DNA, 15 bp, Homo sapiens
tccccgccgagccgc

SEQ ID NO: 1266864 - DNA, 15 bp, Homo sapiens
atccccgccgagccg

SEQ ID NO: 1266865 - DNA, 15 bp, Homo sapiens
gatccccgccgagcc

SEQ ID NO: 1266866 - DNA, 15 bp, Homo sapiens
ggatccccgccgagc

SEQ ID NO: 1266867 - DNA, 15 bp, Homo sapiens
cggatccccgccgag

SEQ ID NO: 1266868 - DNA, 15 bp, Homo sapiens
acggatccccgccga

SEQ ID NO: 1266869 - DNA, 15 bp, Homo sapiens
gacggatccccgccg

SEQ ID NO: 1266870 - DNA, 15 bp, Homo sapiens
ggacggatccccgcc

SEQ ID NO: 1266871 - DNA, 15 bp, Homo sapiens
aggacggatccccgc

SEQ ID NO: 1266872 - DNA, 15 bp, Homo sapiens
gaggacggatccccg

SEQ ID NO: 1266873 - DNA, 15 bp, Homo sapiens
cgaggacggatcccc

SEQ ID NO: 1266874 - DNA, 15 bp, Homo sapiens
gcgaggacggatccc

SEQ ID NO: 1266875 - DNA, 15 bp, Homo sapiens
ggcgaggacggatcc

SEQ ID NO: 1266876 - DNA, 15 bp, Homo sapiens
tggcgaggacggatc

SEQ ID NO: 1266877 - DNA, 15 bp, Homo sapiens
ctggcgaggacggat

SEQ ID NO: 1266878 - DNA, 15 bp, Homo sapiens
cctggcgaggacgga

SEQ ID NO: 1266879 - DNA, 15 bp, Homo sapiens
ccctggcgaggacgg

SEQ ID NO: 1266880 - DNA, 15 bp, Homo sapiens
cccctggcgaggacg

SEQ ID NO: 1266881 - DNA, 15 bp, Homo sapiens
gcccctggcgaggac

SEQ ID NO: 1266882 - DNA, 15 bp, Homo sapiens
ggcccctggcgagga

SEQ ID NO: 1266883 - DNA, 15 bp, Homo sapiens
cggcccctggcgagg

SEQ ID NO: 1266884 - DNA, 15 bp, Homo sapiens
ccggcccctggcgag

SEQ ID NO: 1266885 - DNA, 15 bp, Homo sapiens
cccggcccctggcga

SEQ ID NO: 1266886 - DNA, 15 bp, Homo sapiens
acccggcccctggcg

SEQ ID NO: 1266887 - DNA, 15 bp, Homo sapiens
gacccggcccctggc

SEQ ID NO: 1266888 - DNA, 15 bp, Homo sapiens
ggacccggcccctgg

SEQ ID NO: 1266889 - DNA, 15 bp, Homo sapiens
gggacccggcccctg

SEQ ID NO: 1266890 - DNA, 15 bp, Homo sapiens
cgggacccggcccct

SEQ ID NO: 1266891 - DNA, 15 bp, Homo sapiens
ccgggacccggcccc

SEQ ID NO: 1266892 - DNA, 15 bp, Homo sapiens
gccgggacccggccc

SEQ ID NO: 1266893 - DNA, 15 bp, Homo sapiens
cgccgggacccggcc

SEQ ID NO: 1266894 - DNA, 15 bp, Homo sapiens
ccgccgggacccggc

SEQ ID NO: 1266895 - DNA, 15 bp, Homo sapiens
cccgccgggacccgg

SEQ ID NO: 1266896 - DNA, 15 bp, Homo sapiens
tcccgccgggacccg

SEQ ID NO: 1266897 - DNA, 15 bp, Homo sapiens
ctcccgccgggaccc

SEQ ID NO: 1266898 - DNA, 15 bp, Homo sapiens
cctcccgccgggacc

SEQ ID NO: 1266899 - DNA, 15 bp, Homo sapiens
tcctcccgccgggac

SEQ ID NO: 1266900 - DNA, 15 bp, Homo sapiens
ctcctcccgccggga

SEQ ID NO: 1266901 - DNA, 15 bp, Homo sapiens
cctcctcccgccggg

SEQ ID NO: 1266902 - DNA, 15 bp, Homo sapiens
gcctcctcccgccgg

SEQ ID NO: 1266903 - DNA, 15 bp, Homo sapiens
cgcctcctcccgccg

SEQ ID NO: 1266904 - DNA, 15 bp, Homo sapiens
gcgcctcctcccgcc

SEQ ID NO: 1266905 - DNA, 15 bp, Homo sapiens
ggcgcctcctcccgc

SEQ ID NO: 1266906 - DNA, 15 bp, Homo sapiens
gggcgcctcctcccg

SEQ ID NO: 1266907 - DNA, 15 bp, Homo sapiens
agggcgcctcctccc

SEQ ID NO: 1266908 - DNA, 15 bp, Homo sapiens
gagggcgcctcctcc

SEQ ID NO: 1266909 - DNA, 15 bp, Homo sapiens
ggagggcgcctcctc

SEQ ID NO: 1266910 - DNA, 15 bp, Homo sapiens
gggagggcgcctcct

SEQ ID NO: 1266911 - DNA, 15 bp, Homo sapiens
agggagggcgcctcc

SEQ ID NO: 1266912 - DNA, 15 bp, Homo sapiens
cagggagggcgcctc

SEQ ID NO: 1266913 - DNA, 15 bp, Homo sapiens
gcagggagggcgcct

SEQ ID NO: 1266914 - DNA, 15 bp, Homo sapiens
ggcagggagggcgcc

SEQ ID NO: 1266915 - DNA, 15 bp, Homo sapiens
aaacataattagttt

SEQ ID NO: 1266916 - DNA, 15 bp, Homo sapiens
aaaacataattagtt

SEQ ID NO: 1266917 - DNA, 15 bp, Homo sapiens
caaaacataattagt

SEQ ID NO: 1266918 - DNA, 15 bp, Homo sapiens
tcaaaacataattag

SEQ ID NO: 1266919 - DNA, 15 bp, Homo sapiens
ttcaaaacataatta

SEQ ID NO: 1266920 - DNA, 15 bp, Homo sapiens
cttcaaaacataatt

SEQ ID NO: 1266921 - DNA, 15 bp, Homo sapiens
ccttcaaaacataat

SEQ ID NO: 1266922 - DNA, 15 bp, Homo sapiens
tccttcaaaacataa

SEQ ID NO: 1266923 - DNA, 15 bp, Homo sapiens
ctccttcaaaacata

SEQ ID NO: 1266924 - DNA, 15 bp, Homo sapiens
cctccttcaaaacat

SEQ ID NO: 1266925 - DNA, 15 bp, Homo sapiens
tcctccttcaaaaca

SEQ ID NO: 1266926 - DNA, 15 bp, Homo sapiens
ttcctccttcaaaac

SEQ ID NO: 1266927 - DNA, 15 bp, Homo sapiens
attcctccttcaaaa

SEQ ID NO: 1266928 - DNA, 15 bp, Homo sapiens
aattcctccttcaaa

SEQ ID NO: 1266929 - DNA, 15 bp, Homo sapiens
caattcctccttcaa

SEQ ID NO: 1266930 - DNA, 15 bp, Homo sapiens
ccaattcctccttca

SEQ ID NO: 1266931 - DNA, 15 bp, Homo sapiens
gccaattcctccttc

SEQ ID NO: 1266932 - DNA, 15 bp, Homo sapiens
tgccaattcctcctt

SEQ ID NO: 1266933 - DNA, 15 bp, Homo sapiens
ctgccaattcctcct

SEQ ID NO: 1266934 - DNA, 15 bp, Homo sapiens
actgccaattcctcc

SEQ ID NO: 1266935 - DNA, 15 bp, Homo sapiens
gactgccaattcctc

SEQ ID NO: 1266936 - DNA, 15 bp, Homo sapiens
agactgccaattcct

SEQ ID NO: 1266937 - DNA, 15 bp, Homo sapiens
tagactgccaattcc

SEQ ID NO: 1266938 - DNA, 15 bp, Homo sapiens
ctagactgccaattc

SEQ ID NO: 1266939 - DNA, 15 bp, Homo sapiens
tctagactgccaatt

SEQ ID NO: 1266940 - DNA, 15 bp, Homo sapiens
ttctagactgccaat

SEQ ID NO: 1266941 - DNA, 15 bp, Homo sapiens
attctagactgccaa

SEQ ID NO: 1266942 - DNA, 15 bp, Homo sapiens
tattctagactgcca

SEQ ID NO: 1266943 - DNA, 15 bp, Homo sapiens
ctattctagactgcc

SEQ ID NO: 1266944 - DNA, 15 bp, Homo sapiens
actattctagactgc

SEQ ID NO: 1266945 - DNA, 15 bp, Homo sapiens
cactattctagactg

SEQ ID NO: 1266946 - DNA, 15 bp, Homo sapiens
ccactattctagact

SEQ ID NO: 1266947 - DNA, 15 bp, Homo sapiens
accactattctagac

SEQ ID NO: 1266948 - DNA, 15 bp, Homo sapiens
gaccactattctaga

SEQ ID NO: 1266949 - DNA, 15 bp, Homo sapiens
tgaccactattctag

SEQ ID NO: 1266950 - DNA, 15 bp, Homo sapiens
ttgaccactattcta

SEQ ID NO: 1266951 - DNA, 15 bp, Homo sapiens
cttgaccactattct

SEQ ID NO: 1266952 - DNA, 15 bp, Homo sapiens
ccttgaccactattc

SEQ ID NO: 1266953 - DNA, 15 bp, Homo sapiens
cccttgaccactatt

SEQ ID NO: 1266954 - DNA, 15 bp, Homo sapiens
gcccttgaccactat

SEQ ID NO: 1266955 - DNA, 15 bp, Homo sapiens
tgcccttgaccacta

SEQ ID NO: 1266956 - DNA, 15 bp, Homo sapiens
atgcccttgaccact

SEQ ID NO: 1266957 - DNA, 15 bp, Homo sapiens
catgcccttgaccac

SEQ ID NO: 1266958 - DNA, 15 bp, Homo sapiens
ccatgcccttgacca

SEQ ID NO: 1266959 - DNA, 15 bp, Homo sapiens
tccatgcccttgacc

SEQ ID NO: 1266960 - DNA, 15 bp, Homo sapiens
atccatgcccttgac

SEQ ID NO: 1266961 - DNA, 15 bp, Homo sapiens
aatccatgcccttga

SEQ ID NO: 1266962 - DNA, 15 bp, Homo sapiens
taatccatgcccttg

SEQ ID NO: 1266963 - DNA, 15 bp, Homo sapiens
ataatccatgccctt

SEQ ID NO: 1266964 - DNA, 15 bp, Homo sapiens
tataatccatgccct

SEQ ID NO: 1266965 - DNA, 15 bp, Homo sapiens
ctataatccatgccc

SEQ ID NO: 1266966 - DNA, 15 bp, Homo sapiens
tctataatccatgcc

SEQ ID NO: 1266967 - DNA, 15 bp, Homo sapiens
ctctataatccatgc

SEQ ID NO: 1266968 - DNA, 15 bp, Homo sapiens
actctataatccatg

SEQ ID NO: 1266969 - DNA, 15 bp, Homo sapiens
aactctataatccat

SEQ ID NO: 1266970 - DNA, 15 bp, Homo sapiens
taactctataatcca

SEQ ID NO: 1266971 - DNA, 15 bp, Homo sapiens
ctaactctataatcc

SEQ ID NO: 1266972 - DNA, 15 bp, Homo sapiens
tctaactctataatc

SEQ ID NO: 1266973 - DNA, 15 bp, Homo sapiens
gtctaactctataat

SEQ ID NO: 1266974 - DNA, 15 bp, Homo sapiens
agtctaactctataa

SEQ ID NO: 1266975 - DNA, 15 bp, Homo sapiens
cagtctaactctata

SEQ ID NO: 1266976 - DNA, 15 bp, Homo sapiens
acagtctaactctat

SEQ ID NO: 1266977 - DNA, 15 bp, Homo sapiens
aacagtctaactcta

SEQ ID NO: 1266978 - DNA, 15 bp, Homo sapiens
caacagtctaactct

SEQ ID NO: 1266979 - DNA, 15 bp, Homo sapiens
ccaacagtctaactc

SEQ ID NO: 1266980 - DNA, 15 bp, Homo sapiens
cccaacagtctaact

SEQ ID NO: 1266981 - DNA, 15 bp, Homo sapiens
gcccaacagtctaac

SEQ ID NO: 1266982 - DNA, 15 bp, Homo sapiens
agcccaacagtctaa

SEQ ID NO: 1266983 - DNA, 15 bp, Homo sapiens
gagcccaacagtcta

SEQ ID NO: 1266984 - DNA, 15 bp, Homo sapiens
tgagcccaacagtct

SEQ ID NO: 1266985 - DNA, 15 bp, Homo sapiens
gtgagcccaacagtc

SEQ ID NO: 1266986 - DNA, 15 bp, Homo sapiens
tgtgagcccaacagt

SEQ ID NO: 1266987 - DNA, 15 bp, Homo sapiens
atgtgagcccaacag

SEQ ID NO: 1266988 - DNA, 15 bp, Homo sapiens
tatgtgagcccaaca

SEQ ID NO: 1266989 - DNA, 15 bp, Homo sapiens
ctatgtgagcccaac

SEQ ID NO: 1266990 - DNA, 15 bp, Homo sapiens
actatgtgagcccaa

SEQ ID NO: 1266991 - DNA, 15 bp, Homo sapiens
cactatgtgagccca

SEQ ID NO: 1266992 - DNA, 15 bp, Homo sapiens
ccactatgtgagccc

SEQ ID NO: 1266993 - DNA, 15 bp, Homo sapiens
accactatgtgagcc

SEQ ID NO: 1266994 - DNA, 15 bp, Homo sapiens
aaccactatgtgagc

SEQ ID NO: 1266995 - DNA, 15 bp, Homo sapiens
aaaccactatgtgag

SEQ ID NO: 1266996 - DNA, 15 bp, Homo sapiens
taaaccactatgtga

SEQ ID NO: 1266997 - DNA, 15 bp, Homo sapiens
gtaaaccactatgtg

SEQ ID NO: 1266998 - DNA, 15 bp, Homo sapiens
ggtaaaccactatgt

SEQ ID NO: 1266999 - DNA, 15 bp, Homo sapiens
aggtaaaccactatg

SEQ ID NO: 1267000 - DNA, 15 bp, Homo sapiens
gaggtaaaccactat

SEQ ID NO: 1267001 - DNA, 15 bp, Homo sapiens
agaggtaaaccacta

SEQ ID NO: 1267002 - DNA, 15 bp, Homo sapiens
aagaggtaaaccact

SEQ ID NO: 1267003 - DNA, 15 bp, Homo sapiens
taagaggtaaaccac

SEQ ID NO: 1267004 - DNA, 15 bp, Homo sapiens
gtaagaggtaaacca

SEQ ID NO: 1267005 - DNA, 15 bp, Homo sapiens
ggtaagaggtaaacc

SEQ ID NO: 1267006 - DNA, 15 bp, Homo sapiens
cggtaagaggtaaac

SEQ ID NO: 1267007 - DNA, 15 bp, Homo sapiens
ccggtaagaggtaaa

SEQ ID NO: 1267008 - DNA, 15 bp, Homo sapiens
gccggtaagaggtaa

SEQ ID NO: 1267009 - DNA, 15 bp, Homo sapiens
agccggtaagaggta

SEQ ID NO: 1267010 - DNA, 15 bp, Homo sapiens
cagccggtaagaggt

SEQ ID NO: 1267011 - DNA, 15 bp, Homo sapiens
tcagccggtaagagg

SEQ ID NO: 1267012 - DNA, 15 bp, Homo sapiens
ctcagccggtaagag

SEQ ID NO: 1267013 - DNA, 15 bp, Homo sapiens
tctcagccggtaaga

SEQ ID NO: 1267014 - DNA, 15 bp, Homo sapiens
gtctcagccggtaag

SEQ ID NO: 1267015 - DNA, 15 bp, Homo sapiens
ggtctcagccggtaa

SEQ ID NO: 1267016 - DNA, 15 bp, Homo sapiens
aggtctcagccggta

SEQ ID NO: 1267017 - DNA, 15 bp, Homo sapiens
gaggtctcagccggt

SEQ ID NO: 1267018 - DNA, 15 bp, Homo sapiens
tgaggtctcagccgg

SEQ ID NO: 1267019 - DNA, 15 bp, Homo sapiens
ctgaggtctcagccg

SEQ ID NO: 1267020 - DNA, 15 bp, Homo sapiens
cctgaggtctcagcc

SEQ ID NO: 1267021 - DNA, 15 bp, Homo sapiens
acctgaggtctcagc

SEQ ID NO: 1267022 - DNA, 15 bp, Homo sapiens
tacctgaggtctcag

SEQ ID NO: 1267023 - DNA, 15 bp, Homo sapiens
ttacctgaggtctca

SEQ ID NO: 1267024 - DNA, 15 bp, Homo sapiens
cttacctgaggtctc

SEQ ID NO: 1267025 - DNA, 15 bp, Homo sapiens
acttacctgaggtct

SEQ ID NO: 1267026 - DNA, 15 bp, Homo sapiens
aacttacctgaggtc

SEQ ID NO: 1267027 - DNA, 15 bp, Homo sapiens
gaacttacctgaggt

SEQ ID NO: 1267028 - DNA, 15 bp, Homo sapiens
agaacttacctgagg

SEQ ID NO: 1267029 - DNA, 15 bp, Homo sapiens
aagaacttacctgag

SEQ ID NO: 1267030 - DNA, 15 bp, Homo sapiens
aaagaacttacctga

SEQ ID NO: 1267031 - DNA, 15 bp, Homo sapiens
taaagaacttacctg

SEQ ID NO: 1267032 - DNA, 15 bp, Homo sapiens
ttaaagaacttacct

SEQ ID NO: 1267033 - DNA, 15 bp, Homo sapiens
gttaaagaacttacc

SEQ ID NO: 1267034 - DNA, 15 bp, Homo sapiens
agttaaagaacttac

SEQ ID NO: 1267035 - DNA, 15 bp, Homo sapiens
aagttaaagaactta

SEQ ID NO: 1267036 - DNA, 15 bp, Homo sapiens
gaagttaaagaactt

SEQ ID NO: 1267037 - DNA, 15 bp, Homo sapiens
agaagttaaagaact

SEQ ID NO: 1267038 - DNA, 15 bp, Homo sapiens
gagaagttaaagaac

SEQ ID NO: 1267039 - DNA, 15 bp, Homo sapiens
ggagaagttaaagaa

SEQ ID NO: 1267040 - DNA, 15 bp, Homo sapiens
tggagaagttaaaga

SEQ ID NO: 1267041 - DNA, 15 bp, Homo sapiens
ttggagaagttaaag

SEQ ID NO: 1267042 - DNA, 15 bp, Homo sapiens
attggagaagttaaa

SEQ ID NO: 1267043 - DNA, 15 bp, Homo sapiens
aattggagaagttaa

SEQ ID NO: 1267044 - DNA, 15 bp, Homo sapiens
aaattggagaagtta

SEQ ID NO: 1267045 - DNA, 15 bp, Homo sapiens
caaattggagaagtt

SEQ ID NO: 1267046 - DNA, 15 bp, Homo sapiens
tcaaattggagaagt

SEQ ID NO: 1267047 - DNA, 15 bp, Homo sapiens
gtcaaattggagaag

SEQ ID NO: 1267048 - DNA, 15 bp, Homo sapiens
tgtcaaattggagaa

SEQ ID NO: 1267049 - DNA, 15 bp, Homo sapiens
ctgtcaaattggaga

SEQ ID NO: 1267050 - DNA, 15 bp, Homo sapiens
tctgtcaaattggag

SEQ ID NO: 1267051 - DNA, 15 bp, Homo sapiens
gtctgtcaaattgga

SEQ ID NO: 1267052 - DNA, 15 bp, Homo sapiens
tgtctgtcaaattgg

SEQ ID NO: 1267053 - DNA, 15 bp, Homo sapiens
atgtctgtcaaattg

SEQ ID NO: 1267054 - DNA, 15 bp, Homo sapiens
gatgtctgtcaaatt

SEQ ID NO: 1267055 - DNA, 15 bp, Homo sapiens
agatgtctgtcaaat

SEQ ID NO: 1267056 - DNA, 15 bp, Homo sapiens
cagatgtctgtcaaa

SEQ ID NO: 1267057 - DNA, 15 bp, Homo sapiens
acagatgtctgtcaa

SEQ ID NO: 1267058 - DNA, 15 bp, Homo sapiens
tacagatgtctgtca

SEQ ID NO: 1267059 - DNA, 15 bp, Homo sapiens
ttacagatgtctgtc

SEQ ID NO: 1267060 - DNA, 15 bp, Homo sapiens
tttacagatgtctgt

SEQ ID NO: 1267061 - DNA, 15 bp, Homo sapiens
atttacagatgtctg

SEQ ID NO: 1267062 - DNA, 15 bp, Homo sapiens
catttacagatgtct

SEQ ID NO: 1267063 - DNA, 15 bp, Homo sapiens
acatttacagatgtc

SEQ ID NO: 1267064 - DNA, 15 bp, Homo sapiens
gacatttacagatgt

SEQ ID NO: 1267065 - DNA, 15 bp, Homo sapiens
agacatttacagatg

SEQ ID NO: 1267066 - DNA, 15 bp, Homo sapiens
tagacatttacagat

SEQ ID NO: 1267067 - DNA, 15 bp, Homo sapiens
gtagacatttacaga

SEQ ID NO: 1267068 - DNA, 15 bp, Homo sapiens
agtagacatttacag

SEQ ID NO: 1267069 - DNA, 15 bp, Homo sapiens
aagtagacatttaca

SEQ ID NO: 1267070 - DNA, 15 bp, Homo sapiens
aaagtagacatttac

SEQ ID NO: 1267071 - DNA, 15 bp, Homo sapiens
aaaagtagacattta

SEQ ID NO: 1267072 - DNA, 15 bp, Homo sapiens
taaaagtagacattt

SEQ ID NO: 1267073 - DNA, 15 bp, Homo sapiens
gtaaaagtagacatt

SEQ ID NO: 1267074 - DNA, 15 bp, Homo sapiens
tgtaaaagtagacat

SEQ ID NO: 1267075 - DNA, 15 bp, Homo sapiens
ctgtaaaagtagaca

SEQ ID NO: 1267076 - DNA, 15 bp, Homo sapiens
tctgtaaaagtagac

SEQ ID NO: 1267077 - DNA, 15 bp, Homo sapiens
atctgtaaaagtaga

SEQ ID NO: 1267078 - DNA, 15 bp, Homo sapiens
catctgtaaaagtag

SEQ ID NO: 1267079 - DNA, 15 bp, Homo sapiens
tcatctgtaaaagta

SEQ ID NO: 1267080 - DNA, 15 bp, Homo sapiens
ctcatctgtaaaagt

SEQ ID NO: 1267081 - DNA, 15 bp, Homo sapiens
tctcatctgtaaaag

SEQ ID NO: 1267082 - DNA, 15 bp, Homo sapiens
attctcatctgtaaa

SEQ ID NO: 1267083 - DNA, 15 bp, Homo sapiens
tattctcatctgtaa

SEQ ID NO: 1267084 - DNA, 15 bp, Homo sapiens
gtattctcatctgta

SEQ ID NO: 1267085 - DNA, 15 bp, Homo sapiens
agtattctcatctgt

SEQ ID NO: 1267086 - DNA, 15 bp, Homo sapiens
aagtattctcatctg

SEQ ID NO: 1267087 - DNA, 15 bp, Homo sapiens
taagtattctcatct

SEQ ID NO: 1267088 - DNA, 15 bp, Homo sapiens
ataagtattctcatc

SEQ ID NO: 1267089 - DNA, 15 bp, Homo sapiens
gataagtattctcat

SEQ ID NO: 1267090 - DNA, 15 bp, Homo sapiens
agataagtattctca

SEQ ID NO: 1267091 - DNA, 15 bp, Homo sapiens
tagataagtattctc

SEQ ID NO: 1267092 - DNA, 15 bp, Homo sapiens
ttagataagtattct

SEQ ID NO: 1267093 - DNA, 15 bp, Homo sapiens
tttagataagtattc

SEQ ID NO: 1267094 - DNA, 15 bp, Homo sapiens
ttttagataagtatt

SEQ ID NO: 1267095 - DNA, 15 bp, Homo sapiens
cttttagataagtat

SEQ ID NO: 1267096 - DNA, 15 bp, Homo sapiens
ccttttagataagta

SEQ ID NO: 1267097 - DNA, 15 bp, Homo sapiens
cccttttagataagt

SEQ ID NO: 1267098 - DNA, 15 bp, Homo sapiens
gcccttttagataag

SEQ ID NO: 1267099 - DNA, 15 bp, Homo sapiens
agcccttttagataa

SEQ ID NO: 1267100 - DNA, 15 bp, Homo sapiens
cagcccttttagata

SEQ ID NO: 1267101 - DNA, 15 bp, Homo sapiens
tcagcccttttagat

SEQ ID NO: 1267102 - DNA, 15 bp, Homo sapiens
atcagcccttttaga

SEQ ID NO: 1267103 - DNA, 15 bp, Homo sapiens
catcagcccttttag

SEQ ID NO: 1267104 - DNA, 15 bp, Homo sapiens
acatcagccctttta

SEQ ID NO: 1267105 - DNA, 15 bp, Homo sapiens
gacatcagccctttt

SEQ ID NO: 1267106 - DNA, 15 bp, Homo sapiens
cgacatcagcccttt

SEQ ID NO: 1267107 - DNA, 15 bp, Homo sapiens
ccgacatcagccctt

SEQ ID NO: 1267108 - DNA, 15 bp, Homo sapiens
cccgacatcagccct

SEQ ID NO: 1267109 - DNA, 15 bp, Homo sapiens
tcccgacatcagccc

SEQ ID NO: 1267110 - DNA, 15 bp, Homo sapiens
atcccgacatcagcc

SEQ ID NO: 1267111 - DNA, 15 bp, Homo sapiens
aatcccgacatcagc

SEQ ID NO: 1267112 - DNA, 15 bp, Homo sapiens
gaatcccgacatcag

SEQ ID NO: 1267113 - DNA, 15 bp, Homo sapiens
tgaatcccgacatca

SEQ ID NO: 1267114 - DNA, 15 bp, Homo sapiens
ctgaatcccgacatc

SEQ ID NO: 1267115 - DNA, 15 bp, Homo sapiens
actgaatcccgacat

SEQ ID NO: 1267116 - DNA, 15 bp, Homo sapiens
cactgaatcccgaca

SEQ ID NO: 1267117 - DNA, 15 bp, Homo sapiens
tcactgaatcccgac

SEQ ID NO: 1267118 - DNA, 15 bp, Homo sapiens
ttcactgaatcccga

SEQ ID NO: 1267119 - DNA, 15 bp, Homo sapiens
tttcactgaatcccg

SEQ ID NO: 1267120 - DNA, 15 bp, Homo sapiens
gtttcactgaatccc

SEQ ID NO: 1267121 - DNA, 15 bp, Homo sapiens
ggtttcactgaatcc

SEQ ID NO: 1267122 - DNA, 15 bp, Homo sapiens
tggtttcactgaatc

SEQ ID NO: 1267123 - DNA, 15 bp, Homo sapiens
atggtttcactgaat

SEQ ID NO: 1267124 - DNA, 15 bp, Homo sapiens
tatggtttcactgaa

SEQ ID NO: 1267125 - DNA, 15 bp, Homo sapiens
atatggtttcactga

SEQ ID NO: 1267126 - DNA, 15 bp, Homo sapiens
catatggtttcactg

SEQ ID NO: 1267127 - DNA, 15 bp, Homo sapiens
acatatggtttcact

SEQ ID NO: 1267128 - DNA, 15 bp, Homo sapiens
aacatatggtttcac

SEQ ID NO: 1267129 - DNA, 15 bp, Homo sapiens
aaacatatggtttca

SEQ ID NO: 1267130 - DNA, 15 bp, Homo sapiens
taaacatatggtttc

SEQ ID NO: 1267131 - DNA, 15 bp, Homo sapiens
ttaaacatatggttt

SEQ ID NO: 1267132 - DNA, 15 bp, Homo sapiens
cttaaacatatggtt

SEQ ID NO: 1267133 - DNA, 15 bp, Homo sapiens
ccttaaacatatggt

SEQ ID NO: 1267134 - DNA, 15 bp, Homo sapiens
accttaaacatatgg

SEQ ID NO: 1267135 - DNA, 15 bp, Homo sapiens
taccttaaacatatg

SEQ ID NO: 1267136 - DNA, 15 bp, Homo sapiens
gtaccttaaacatat

SEQ ID NO: 1267137 - DNA, 15 bp, Homo sapiens
agtaccttaaacata

SEQ ID NO: 1267138 - DNA, 15 bp, Homo sapiens
aagtaccttaaacat

SEQ ID NO: 1267139 - DNA, 15 bp, Homo sapiens
aaagtaccttaaaca

SEQ ID NO: 1267140 - DNA, 15 bp, Homo sapiens
gaaagtaccttaaac

SEQ ID NO: 1267141 - DNA, 15 bp, Homo sapiens
agaaagtaccttaaa

SEQ ID NO: 1267142 - DNA, 15 bp, Homo sapiens
tagaaagtaccttaa

SEQ ID NO: 1267143 - DNA, 15 bp, Homo sapiens
gtagaaagtacctta

SEQ ID NO: 1267144 - DNA, 15 bp, Homo sapiens
tgtagaaagtacctt

SEQ ID NO: 1267145 - DNA, 15 bp, Homo sapiens
ctgtagaaagtacct

SEQ ID NO: 1267146 - DNA, 15 bp, Homo sapiens
cctgtagaaagtacc

SEQ ID NO: 1267147 - DNA, 15 bp, Homo sapiens
tcctgtagaaagtac

SEQ ID NO: 1267148 - DNA, 15 bp, Homo sapiens
atcctgtagaaagta

SEQ ID NO: 1267149 - DNA, 15 bp, Homo sapiens
gatcctgtagaaagt

SEQ ID NO: 1267150 - DNA, 15 bp, Homo sapiens
tgatcctgtagaaag

SEQ ID NO: 1267151 - DNA, 15 bp, Homo sapiens
atgatcctgtagaaa

SEQ ID NO: 1267152 - DNA, 15 bp, Homo sapiens
tatgatcctgtagaa

SEQ ID NO: 1267153 - DNA, 15 bp, Homo sapiens
ctatgatcctgtaga

SEQ ID NO: 1267154 - DNA, 15 bp, Homo sapiens
actatgatcctgtag

SEQ ID NO: 1267155 - DNA, 15 bp, Homo sapiens
tactatgatcctgta

SEQ ID NO: 1267156 - DNA, 15 bp, Homo sapiens
ttactatgatcctgt

SEQ ID NO: 1267157 - DNA, 15 bp, Homo sapiens
tttactatgatcctg

SEQ ID NO: 1267158 - DNA, 15 bp, Homo sapiens
atttactatgatcct

SEQ ID NO: 1267159 - DNA, 15 bp, Homo sapiens
tatttactatgatcc

SEQ ID NO: 1267160 - DNA, 15 bp, Homo sapiens
gtatttactatgatc

SEQ ID NO: 1267161 - DNA, 15 bp, Homo sapiens
agtatttactatgat

SEQ ID NO: 1267162 - DNA, 15 bp, Homo sapiens
gagtatttactatga

SEQ ID NO: 1267163 - DNA, 15 bp, Homo sapiens
tgagtatttactatg

SEQ ID NO: 1267164 - DNA, 15 bp, Homo sapiens
ttgagtatttactat

SEQ ID NO: 1267165 - DNA, 15 bp, Homo sapiens
tttgagtatttacta

SEQ ID NO: 1267166 - DNA, 15 bp, Homo sapiens
ttttgagtatttact

SEQ ID NO: 1267167 - DNA, 15 bp, Homo sapiens
tttttgagtatttac

SEQ ID NO: 1267168 - DNA, 15 bp, Homo sapiens
atttttgagtattta

SEQ ID NO: 1267169 - DNA, 15 bp, Homo sapiens
aatttttgagtattt

SEQ ID NO: 1267170 - DNA, 15 bp, Homo sapiens
taatttttgagtatt

SEQ ID NO: 1267171 - DNA, 15 bp, Homo sapiens
ataatttttgagtat

SEQ ID NO: 1267172 - DNA, 15 bp, Homo sapiens
aataatttttgagta

SEQ ID NO: 1267173 - DNA, 15 bp, Homo sapiens
taataatttttgagt

SEQ ID NO: 1267174 - DNA, 15 bp, Homo sapiens
ttaataatttttgag

SEQ ID NO: 1267175 - DNA, 15 bp, Homo sapiens
attaataatttttga

SEQ ID NO: 1267176 - DNA, 15 bp, Homo sapiens
aattaataatttttg

SEQ ID NO: 1267177 - DNA, 15 bp, Homo sapiens
ataattaataatttt

SEQ ID NO: 1267178 - DNA, 15 bp, Homo sapiens
aataattaataattt

SEQ ID NO: 1267179 - DNA, 15 bp, Homo sapiens
gaataattaataatt

SEQ ID NO: 1267180 - DNA, 15 bp, Homo sapiens
agaataattaataat

SEQ ID NO: 1267181 - DNA, 15 bp, Homo sapiens
aagaataattaataa

SEQ ID NO: 1267182 - DNA, 15 bp, Homo sapiens
gaagaataattaata

SEQ ID NO: 1267183 - DNA, 15 bp, Homo sapiens
tgaagaataattaat

SEQ ID NO: 1267184 - DNA, 15 bp, Homo sapiens
atgaagaataattaa

SEQ ID NO: 1267185 - DNA, 15 bp, Homo sapiens
tatgaagaataatta

SEQ ID NO: 1267186 - DNA, 15 bp, Homo sapiens
gtatgaagaataatt

SEQ ID NO: 1267187 - DNA, 15 bp, Homo sapiens
agtatgaagaataat

SEQ ID NO: 1267188 - DNA, 15 bp, Homo sapiens
tagtatgaagaataa

SEQ ID NO: 1267189 - DNA, 15 bp, Homo sapiens
atagtatgaagaata

SEQ ID NO: 1267190 - DNA, 15 bp, Homo sapiens
aatagtatgaagaat

SEQ ID NO: 1267191 - DNA, 15 bp, Homo sapiens
gaatagtatgaagaa

SEQ ID NO: 1267192 - DNA, 15 bp, Homo sapiens
agaatagtatgaaga

SEQ ID NO: 1267193 - DNA, 15 bp, Homo sapiens
aagaatagtatgaag

SEQ ID NO: 1267194 - DNA, 15 bp, Homo sapiens
taagaatagtatgaa

SEQ ID NO: 1267195 - DNA, 15 bp, Homo sapiens
ataagaatagtatga

SEQ ID NO: 1267196 - DNA, 15 bp, Homo sapiens
aataagaatagtatg

SEQ ID NO: 1267197 - DNA, 15 bp, Homo sapiens
taataagaatagtat

SEQ ID NO: 1267198 - DNA, 15 bp, Homo sapiens
ctaataagaatagta

SEQ ID NO: 1267199 - DNA, 15 bp, Homo sapiens
actaataagaatagt

SEQ ID NO: 1267200 - DNA, 15 bp, Homo sapiens
tactaataagaatag

SEQ ID NO: 1267201 - DNA, 15 bp, Homo sapiens
ctactaataagaata

SEQ ID NO: 1267202 - DNA, 15 bp, Homo sapiens
tctactaataagaat

SEQ ID NO: 1267203 - DNA, 15 bp, Homo sapiens
atctactaataagaa

SEQ ID NO: 1267204 - DNA, 15 bp, Homo sapiens
tatctactaataaga

SEQ ID NO: 1267205 - DNA, 15 bp, Homo sapiens
ttatctactaataag

SEQ ID NO: 1267206 - DNA, 15 bp, Homo sapiens
gttatctactaataa

SEQ ID NO: 1267207 - DNA, 15 bp, Homo sapiens
tgttatctactaata

SEQ ID NO: 1267208 - DNA, 15 bp, Homo sapiens
gtgttatctactaat

SEQ ID NO: 1267209 - DNA, 15 bp, Homo sapiens
tgtgttatctactaa

SEQ ID NO: 1267210 - DNA, 15 bp, Homo sapiens
atgtgttatctacta

SEQ ID NO: 1267211 - DNA, 15 bp, Homo sapiens
tatgtgttatctact

SEQ ID NO: 1267212 - DNA, 15 bp, Homo sapiens
ctatgtgttatctac

SEQ ID NO: 1267213 - DNA, 15 bp, Homo sapiens
tctatgtgttatcta

SEQ ID NO: 1267214 - DNA, 15 bp, Homo sapiens
ttctatgtgttatct

SEQ ID NO: 1267215 - DNA, 15 bp, Homo sapiens
tttctatgtgttatc

SEQ ID NO: 1267216 - DNA, 15 bp, Homo sapiens
atttctatgtgttat

SEQ ID NO: 1267217 - DNA, 15 bp, Homo sapiens
aatttctatgtgtta

SEQ ID NO: 1267218 - DNA, 15 bp, Homo sapiens
taatttctatgtgtt

SEQ ID NO: 1267219 - DNA, 15 bp, Homo sapiens
ctaatttctatgtgt

SEQ ID NO: 1267220 - DNA, 15 bp, Homo sapiens
tctaatttctatgtg

SEQ ID NO: 1267221 - DNA, 15 bp, Homo sapiens
atctaatttctatgt

SEQ ID NO: 1267222 - DNA, 15 bp, Homo sapiens
catctaatttctatg

SEQ ID NO: 1267223 - DNA, 15 bp, Homo sapiens
tcatctaatttctat

SEQ ID NO: 1267224 - DNA, 15 bp, Homo sapiens
ttcatctaatttcta

SEQ ID NO: 1267225 - DNA, 15 bp, Homo sapiens
attcatctaatttct

SEQ ID NO: 1267226 - DNA, 15 bp, Homo sapiens
cattcatctaatttc

SEQ ID NO: 1267227 - DNA, 15 bp, Homo sapiens
tcattcatctaattt

SEQ ID NO: 1267228 - DNA, 15 bp, Homo sapiens
ttcattcatctaatt

SEQ ID NO: 1267229 - DNA, 15 bp, Homo sapiens
tttcattcatctaat

SEQ ID NO: 1267230 - DNA, 15 bp, Homo sapiens
ttttcattcatctaa

SEQ ID NO: 1267231 - DNA, 15 bp, Homo sapiens
attttcattcatcta

SEQ ID NO: 1267232 - DNA, 15 bp, Homo sapiens
cattttcattcatct

SEQ ID NO: 1267233 - DNA, 15 bp, Homo sapiens
tcattttcattcatc

SEQ ID NO: 1267234 - DNA, 15 bp, Homo sapiens
ttcattttcattcat

SEQ ID NO: 1267235 - DNA, 15 bp, Homo sapiens
attcattttcattca

SEQ ID NO: 1267236 - DNA, 15 bp, Homo sapiens
aattcattttcattc

SEQ ID NO: 1267237 - DNA, 15 bp, Homo sapiens
taattcattttcatt

SEQ ID NO: 1267238 - DNA, 15 bp, Homo sapiens
ctaattcattttcat

SEQ ID NO: 1267239 - DNA, 15 bp, Homo sapiens
gctaattcattttca

SEQ ID NO: 1267240 - DNA, 15 bp, Homo sapiens
ggctaattcattttc

SEQ ID NO: 1267241 - DNA, 15 bp, Homo sapiens
tggctaattcatttt

SEQ ID NO: 1267242 - DNA, 15 bp, Homo sapiens
ttggctaattcattt

SEQ ID NO: 1267243 - DNA, 15 bp, Homo sapiens
gttggctaattcatt

SEQ ID NO: 1267244 - DNA, 15 bp, Homo sapiens
tgttggctaattcat

SEQ ID NO: 1267245 - DNA, 15 bp, Homo sapiens
ttgttggctaattca

SEQ ID NO: 1267246 - DNA, 15 bp, Homo sapiens
cttgttggctaattc

SEQ ID NO: 1267247 - DNA, 15 bp, Homo sapiens
tcttgttggctaatt

SEQ ID NO: 1267248 - DNA, 15 bp, Homo sapiens
ttcttgttggctaat

SEQ ID NO: 1267249 - DNA, 15 bp, Homo sapiens
attcttgttggctaa

SEQ ID NO: 1267250 - DNA, 15 bp, Homo sapiens
aattcttgttggcta

SEQ ID NO: 1267251 - DNA, 15 bp, Homo sapiens
aaattcttgttggct

SEQ ID NO: 1267252 - DNA, 15 bp, Homo sapiens
taaattcttgttggc

SEQ ID NO: 1267253 - DNA, 15 bp, Homo sapiens
ataaattcttgttgg

SEQ ID NO: 1267254 - DNA, 15 bp, Homo sapiens
aataaattcttgttg

SEQ ID NO: 1267255 - DNA, 15 bp, Homo sapiens
taataaattcttgtt

SEQ ID NO: 1267256 - DNA, 15 bp, Homo sapiens
ttaataaattcttgt

SEQ ID NO: 1267257 - DNA, 15 bp, Homo sapiens
tttaataaattcttg

SEQ ID NO: 1267258 - DNA, 15 bp, Homo sapiens
atttaataaattctt

SEQ ID NO: 1267259 - DNA, 15 bp, Homo sapiens
catttaataaattct

SEQ ID NO: 1267260 - DNA, 15 bp, Homo sapiens
gcatttaataaattc

SEQ ID NO: 1267261 - DNA, 15 bp, Homo sapiens
agcatttaataaatt

SEQ ID NO: 1267262 - DNA, 15 bp, Homo sapiens
aagcatttaataaat

SEQ ID NO: 1267263 - DNA, 15 bp, Homo sapiens
caagcatttaataaa

SEQ ID NO: 1267264 - DNA, 15 bp, Homo sapiens
acaagcatttaataa

SEQ ID NO: 1267265 - DNA, 15 bp, Homo sapiens
gacaagcatttaata

SEQ ID NO: 1267266 - DNA, 15 bp, Homo sapiens
agacaagcatttaat

SEQ ID NO: 1267267 - DNA, 15 bp, Homo sapiens
aagacaagcatttaa

SEQ ID NO: 1267268 - DNA, 15 bp, Homo sapiens
aaagacaagcattta

SEQ ID NO: 1267269 - DNA, 15 bp, Homo sapiens
caaagacaagcattt

SEQ ID NO: 1267270 - DNA, 15 bp, Homo sapiens
acaaagacaagcatt

SEQ ID NO: 1267271 - DNA, 15 bp, Homo sapiens
aacaaagacaagcat

SEQ ID NO: 1267272 - DNA, 15 bp, Homo sapiens
taacaaagacaagca

SEQ ID NO: 1267273 - DNA, 15 bp, Homo sapiens
ttaacaaagacaagc

SEQ ID NO: 1267274 - DNA, 15 bp, Homo sapiens
cttaacaaagacaag

SEQ ID NO: 1267275 - DNA, 15 bp, Homo sapiens
ccttaacaaagacaa

SEQ ID NO: 1267276 - DNA, 15 bp, Homo sapiens
cccttaacaaagaca

SEQ ID NO: 1267277 - DNA, 15 bp, Homo sapiens
ccccttaacaaagac

SEQ ID NO: 1267278 - DNA, 15 bp, Homo sapiens
tccccttaacaaaga

SEQ ID NO: 1267279 - DNA, 15 bp, Homo sapiens
ttccccttaacaaag

SEQ ID NO: 1267280 - DNA, 15 bp, Homo sapiens
tttccccttaacaaa

SEQ ID NO: 1267281 - DNA, 15 bp, Homo sapiens
ctttccccttaacaa

SEQ ID NO: 1267282 - DNA, 15 bp, Homo sapiens
cctttccccttaaca

SEQ ID NO: 1267283 - DNA, 15 bp, Homo sapiens
tcctttccccttaac

SEQ ID NO: 1267284 - DNA, 15 bp, Homo sapiens
gtcctttccccttaa

SEQ ID NO: 1267285 - DNA, 15 bp, Homo sapiens
tgtcctttcccctta

SEQ ID NO: 1267286 - DNA, 15 bp, Homo sapiens
ttgtcctttcccctt

SEQ ID NO: 1267287 - DNA, 15 bp, Homo sapiens
tttgtcctttcccct

SEQ ID NO: 1267288 - DNA, 15 bp, Homo sapiens
ttttgtcctttcccc

SEQ ID NO: 1267289 - DNA, 15 bp, Homo sapiens
tttttgtcctttccc

SEQ ID NO: 1267290 - DNA, 15 bp, Homo sapiens
atttttgtcctttcc

SEQ ID NO: 1267291 - DNA, 15 bp, Homo sapiens
tatttttgtcctttc

SEQ ID NO: 1267292 - DNA, 15 bp, Homo sapiens
ttatttttgtccttt

SEQ ID NO: 1267293 - DNA, 15 bp, Homo sapiens
cttatttttgtcctt

SEQ ID NO: 1267294 - DNA, 15 bp, Homo sapiens
gcttatttttgtcct

SEQ ID NO: 1267295 - DNA, 15 bp, Homo sapiens
tgcttatttttgtcc

SEQ ID NO: 1267296 - DNA, 15 bp, Homo sapiens
ctgcttatttttgtc

SEQ ID NO: 1267297 - DNA, 15 bp, Homo sapiens
actgcttatttttgt

SEQ ID NO: 1267298 - DNA, 15 bp, Homo sapiens
gactgcttatttttg

SEQ ID NO: 1267299 - DNA, 15 bp, Homo sapiens
cgactgcttattttt

SEQ ID NO: 1267300 - DNA, 15 bp, Homo sapiens
gcgactgcttatttt

SEQ ID NO: 1267301 - DNA, 15 bp, Homo sapiens
tgcgactgcttattt

SEQ ID NO: 1267302 - DNA, 15 bp, Homo sapiens
atgcgactgcttatt

SEQ ID NO: 1267303 - DNA, 15 bp, Homo sapiens
gatgcgactgcttat

SEQ ID NO: 1267304 - DNA, 15 bp, Homo sapiens
tgatgcgactgctta

SEQ ID NO: 1267305 - DNA, 15 bp, Homo sapiens
atgatgcgactgctt

SEQ ID NO: 1267306 - DNA, 15 bp, Homo sapiens
catgatgcgactgct

SEQ ID NO: 1267307 - DNA, 15 bp, Homo sapiens
acatgatgcgactgc

SEQ ID NO: 1267308 - DNA, 15 bp, Homo sapiens
tacatgatgcgactg

SEQ ID NO: 1267309 - DNA, 15 bp, Homo sapiens
ttacatgatgcgact

SEQ ID NO: 1267310 - DNA, 15 bp, Homo sapiens
cttacatgatgcgac

SEQ ID NO: 1267311 - DNA, 15 bp, Homo sapiens
tcttacatgatgcga

SEQ ID NO: 1267312 - DNA, 15 bp, Homo sapiens
atcttacatgatgcg

SEQ ID NO: 1267313 - DNA, 15 bp, Homo sapiens
catcttacatgatgc

SEQ ID NO: 1267314 - DNA, 15 bp, Homo sapiens
acatcttacatgatg

SEQ ID NO: 1267315 - DNA, 15 bp, Homo sapiens
cacatcttacatgat

SEQ ID NO: 1267316 - DNA, 15 bp, Homo sapiens
gcacatcttacatga

SEQ ID NO: 1267317 - DNA, 15 bp, Homo sapiens
agcacatcttacatg

SEQ ID NO: 1267318 - DNA, 15 bp, Homo sapiens
tagcacatcttacat

SEQ ID NO: 1267319 - DNA, 15 bp, Homo sapiens
ctagcacatcttaca

SEQ ID NO: 1267320 - DNA, 15 bp, Homo sapiens
actagcacatcttac

SEQ ID NO: 1267321 - DNA, 15 bp, Homo sapiens
tactagcacatctta

SEQ ID NO: 1267322 - DNA, 15 bp, Homo sapiens
ctactagcacatctt

SEQ ID NO: 1267323 - DNA, 15 bp, Homo sapiens
cctactagcacatct

SEQ ID NO: 1267324 - DNA, 15 bp, Homo sapiens
acctactagcacatc

SEQ ID NO: 1267325 - DNA, 15 bp, Homo sapiens
tacctactagcacat

SEQ ID NO: 1267326 - DNA, 15 bp, Homo sapiens
ctacctactagcaca

SEQ ID NO: 1267327 - DNA, 15 bp, Homo sapiens
tctacctactagcac

SEQ ID NO: 1267328 - DNA, 15 bp, Homo sapiens
ctctacctactagca

SEQ ID NO: 1267329 - DNA, 15 bp, Homo sapiens
tctctacctactagc

SEQ ID NO: 1267330 - DNA, 15 bp, Homo sapiens
ctctctacctactag

SEQ ID NO: 1267331 - DNA, 15 bp, Homo sapiens
tctctctacctacta

SEQ ID NO: 1267332 - DNA, 15 bp, Homo sapiens
atctctctacctact

SEQ ID NO: 1267333 - DNA, 15 bp, Homo sapiens
tatctctctacctac

SEQ ID NO: 1267334 - DNA, 15 bp, Homo sapiens
atatctctctaccta

SEQ ID NO: 1267335 - DNA, 15 bp, Homo sapiens
tatatctctctacct

SEQ ID NO: 1267336 - DNA, 15 bp, Homo sapiens
atatatctctctacc

SEQ ID NO: 1267337 - DNA, 15 bp, Homo sapiens
catatatctctctac

SEQ ID NO: 1267338 - DNA, 15 bp, Homo sapiens
tcatatatctctcta

SEQ ID NO: 1267339 - DNA, 15 bp, Homo sapiens
ttcatatatctctct

SEQ ID NO: 1267340 - DNA, 15 bp, Homo sapiens
tttcatatatctctc

SEQ ID NO: 1267341 - DNA, 15 bp, Homo sapiens
gtttcatatatctct

SEQ ID NO: 1267342 - DNA, 15 bp, Homo sapiens
tgtttcatatatctc

SEQ ID NO: 1267343 - DNA, 15 bp, Homo sapiens
atgtttcatatatct

SEQ ID NO: 1267344 - DNA, 15 bp, Homo sapiens
aatgtttcatatatc

SEQ ID NO: 1267345 - DNA, 15 bp, Homo sapiens
caatgtttcatatat

SEQ ID NO: 1267346 - DNA, 15 bp, Homo sapiens
tcaatgtttcatata

SEQ ID NO: 1267347 - DNA, 15 bp, Homo sapiens
atcaatgtttcatat

SEQ ID NO: 1267348 - DNA, 15 bp, Homo sapiens
tatcaatgtttcata

SEQ ID NO: 1267349 - DNA, 15 bp, Homo sapiens
ttatcaatgtttcat

SEQ ID NO: 1267350 - DNA, 15 bp, Homo sapiens
cttatcaatgtttca

SEQ ID NO: 1267351 - DNA, 15 bp, Homo sapiens
tcttatcaatgtttc

SEQ ID NO: 1267352 - DNA, 15 bp, Homo sapiens
ctcttatcaatgttt

SEQ ID NO: 1267353 - DNA, 15 bp, Homo sapiens
tctcttatcaatgtt

SEQ ID NO: 1267354 - DNA, 15 bp, Homo sapiens
ttctcttatcaatgt

SEQ ID NO: 1267355 - DNA, 15 bp, Homo sapiens
cttctcttatcaatg

SEQ ID NO: 1267356 - DNA, 15 bp, Homo sapiens
tcttctcttatcaat

SEQ ID NO: 1267357 - DNA, 15 bp, Homo sapiens
gtcttctcttatcaa

SEQ ID NO: 1267358 - DNA, 15 bp, Homo sapiens
agtcttctcttatca

SEQ ID NO: 1267359 - DNA, 15 bp, Homo sapiens
tagtcttctcttatc

SEQ ID NO: 1267360 - DNA, 15 bp, Homo sapiens
gtagtcttctcttat

SEQ ID NO: 1267361 - DNA, 15 bp, Homo sapiens
tgtagtcttctctta

SEQ ID NO: 1267362 - DNA, 15 bp, Homo sapiens
ctgtagtcttctctt

SEQ ID NO: 1267363 - DNA, 15 bp, Homo sapiens
actgtagtcttctct

SEQ ID NO: 1267364 - DNA, 15 bp, Homo sapiens
aactgtagtcttctc

SEQ ID NO: 1267365 - DNA, 15 bp, Homo sapiens
aaactgtagtcttct

SEQ ID NO: 1267366 - DNA, 15 bp, Homo sapiens
taaactgtagtcttc

SEQ ID NO: 1267367 - DNA, 15 bp, Homo sapiens
ttaaactgtagtctt

SEQ ID NO: 1267368 - DNA, 15 bp, Homo sapiens
gttaaactgtagtct

SEQ ID NO: 1267369 - DNA, 15 bp, Homo sapiens
tgttaaactgtagtc

SEQ ID NO: 1267370 - DNA, 15 bp, Homo sapiens
ttgttaaactgtagt

SEQ ID NO: 1267371 - DNA, 15 bp, Homo sapiens
tttgttaaactgtag

SEQ ID NO: 1267372 - DNA, 15 bp, Homo sapiens
ctttgttaaactgta

SEQ ID NO: 1267373 - DNA, 15 bp, Homo sapiens
actttgttaaactgt

SEQ ID NO: 1267374 - DNA, 15 bp, Homo sapiens
gactttgttaaactg

SEQ ID NO: 1267375 - DNA, 15 bp, Homo sapiens
tgactttgttaaact

SEQ ID NO: 1267376 - DNA, 15 bp, Homo sapiens
gtgactttgttaaac

SEQ ID NO: 1267377 - DNA, 15 bp, Homo sapiens
agtgactttgttaaa

SEQ ID NO: 1267378 - DNA, 15 bp, Homo sapiens
cagtgactttgttaa

SEQ ID NO: 1267379 - DNA, 15 bp, Homo sapiens
ccagtgactttgtta

SEQ ID NO: 1267380 - DNA, 15 bp, Homo sapiens
gccagtgactttgtt

SEQ ID NO: 1267381 - DNA, 15 bp, Homo sapiens
cgccagtgactttgt

SEQ ID NO: 1267382 - DNA, 15 bp, Homo sapiens
acgccagtgactttg

SEQ ID NO: 1267383 - DNA, 15 bp, Homo sapiens
aacgccagtgacttt

SEQ ID NO: 1267384 - DNA, 15 bp, Homo sapiens
caacgccagtgactt

SEQ ID NO: 1267385 - DNA, 15 bp, Homo sapiens
tcaacgccagtgact

SEQ ID NO: 1267386 - DNA, 15 bp, Homo sapiens
ttcaacgccagtgac

SEQ ID NO: 1267387 - DNA, 15 bp, Homo sapiens
attcaacgccagtga

SEQ ID NO: 1267388 - DNA, 15 bp, Homo sapiens
aattcaacgccagtg

SEQ ID NO: 1267389 - DNA, 15 bp, Homo sapiens
caattcaacgccagt

SEQ ID NO: 1267390 - DNA, 15 bp, Homo sapiens
acaattcaacgccag

SEQ ID NO: 1267391 - DNA, 15 bp, Homo sapiens
tacaattcaacgcca

SEQ ID NO: 1267392 - DNA, 15 bp, Homo sapiens
atacaattcaacgcc

SEQ ID NO: 1267393 - DNA, 15 bp, Homo sapiens
tatacaattcaacgc

SEQ ID NO: 1267394 - DNA, 15 bp, Homo sapiens
ttatacaattcaacg

SEQ ID NO: 1267395 - DNA, 15 bp, Homo sapiens
attatacaattcaac

SEQ ID NO: 1267396 - DNA, 15 bp, Homo sapiens
tattatacaattcaa

SEQ ID NO: 1267397 - DNA, 15 bp, Homo sapiens
atattatacaattca

SEQ ID NO: 1267398 - DNA, 15 bp, Homo sapiens
aatattatacaattc

SEQ ID NO: 1267399 - DNA, 15 bp, Homo sapiens
taatattatacaatt

SEQ ID NO: 1267400 - DNA, 15 bp, Homo sapiens
ataatattatacaat

SEQ ID NO: 1267401 - DNA, 15 bp, Homo sapiens
gataatattatacaa

SEQ ID NO: 1267402 - DNA, 15 bp, Homo sapiens
agataatattataca

SEQ ID NO: 1267403 - DNA, 15 bp, Homo sapiens
tagataatattatac

SEQ ID NO: 1267404 - DNA, 15 bp, Homo sapiens
atagataatattata

SEQ ID NO: 1267405 - DNA, 15 bp, Homo sapiens
catagataatattat

SEQ ID NO: 1267406 - DNA, 15 bp, Homo sapiens
ccatagataatatta

SEQ ID NO: 1267407 - DNA, 15 bp, Homo sapiens
cccatagataatatt

SEQ ID NO: 1267408 - DNA, 15 bp, Homo sapiens
acccatagataatat

SEQ ID NO: 1267409 - DNA, 15 bp, Homo sapiens
aacccatagataata

SEQ ID NO: 1267410 - DNA, 15 bp, Homo sapiens
aaacccatagataat

SEQ ID NO: 1267411 - DNA, 15 bp, Homo sapiens
aaaacccatagataa

SEQ ID NO: 1267412 - DNA, 15 bp, Homo sapiens
aaaaacccatagata

SEQ ID NO: 1267413 - DNA, 15 bp, Homo sapiens
taaaaacccatagat

SEQ ID NO: 1267414 - DNA, 15 bp, Homo sapiens
ataaaaacccataga

SEQ ID NO: 1267415 - DNA, 15 bp, Homo sapiens
gataaaaacccatag

SEQ ID NO: 1267416 - DNA, 15 bp, Homo sapiens
agataaaaacccata

SEQ ID NO: 1267417 - DNA, 15 bp, Homo sapiens
aagataaaaacccat

SEQ ID NO: 1267418 - DNA, 15 bp, Homo sapiens
aaagataaaaaccca

SEQ ID NO: 1267419 - DNA, 15 bp, Homo sapiens
aaaagataaaaaccc

SEQ ID NO: 1267420 - DNA, 15 bp, Homo sapiens
aaaaagataaaaacc

SEQ ID NO: 1267421 - DNA, 15 bp, Homo sapiens
caaaaagataaaaac

SEQ ID NO: 1267422 - DNA, 15 bp, Homo sapiens
acaaaaagataaaaa

SEQ ID NO: 1267423 - DNA, 15 bp, Homo sapiens
aacaaaaagataaaa

SEQ ID NO: 1267424 - DNA, 15 bp, Homo sapiens
caacaaaaagataaa

SEQ ID NO: 1267425 - DNA, 15 bp, Homo sapiens
acaacaaaaagataa

SEQ ID NO: 1267426 - DNA, 15 bp, Homo sapiens
aacaacaaaaagata

SEQ ID NO: 1267427 - DNA, 15 bp, Homo sapiens
taacaacaaaaagat

SEQ ID NO: 1267428 - DNA, 15 bp, Homo sapiens
ataacaacaaaaaga

SEQ ID NO: 1267429 - DNA, 15 bp, Homo sapiens
gataacaacaaaaag

SEQ ID NO: 1267430 - DNA, 15 bp, Homo sapiens
agataacaacaaaaa

SEQ ID NO: 1267431 - DNA, 15 bp, Homo sapiens
aagataacaacaaaa

SEQ ID NO: 1267432 - DNA, 15 bp, Homo sapiens
aaagataacaacaaa

SEQ ID NO: 1267433 - DNA, 15 bp, Homo sapiens
taaagataacaacaa

SEQ ID NO: 1267434 - DNA, 15 bp, Homo sapiens
ataaagataacaaca

SEQ ID NO: 1267435 - DNA, 15 bp, Homo sapiens
gataaagataacaac

SEQ ID NO: 1267436 - DNA, 15 bp, Homo sapiens
ggataaagataacaa

SEQ ID NO: 1267437 - DNA, 15 bp, Homo sapiens
aggataaagataaca

SEQ ID NO: 1267438 - DNA, 15 bp, Homo sapiens
taggataaagataac

SEQ ID NO: 1267439 - DNA, 15 bp, Homo sapiens
ataggataaagataa

SEQ ID NO: 1267440 - DNA, 15 bp, Homo sapiens
aataggataaagata

SEQ ID NO: 1267441 - DNA, 15 bp, Homo sapiens
aaataggataaagat

SEQ ID NO: 1267442 - DNA, 15 bp, Homo sapiens
aaaataggataaaga

SEQ ID NO: 1267443 - DNA, 15 bp, Homo sapiens
gaaaataggataaag

SEQ ID NO: 1267444 - DNA, 15 bp, Homo sapiens
ggaaaataggataaa

SEQ ID NO: 1267445 - DNA, 15 bp, Homo sapiens
gggaaaataggataa

SEQ ID NO: 1267446 - DNA, 15 bp, Homo sapiens
tgggaaaataggata

SEQ ID NO: 1267447 - DNA, 15 bp, Homo sapiens
ttgggaaaataggat

SEQ ID NO: 1267448 - DNA, 15 bp, Homo sapiens
tttgggaaaatagga

SEQ ID NO: 1267449 - DNA, 15 bp, Homo sapiens
gtttgggaaaatagg

SEQ ID NO: 1267450 - DNA, 15 bp, Homo sapiens
tgtttgggaaaatag

SEQ ID NO: 1267451 - DNA, 15 bp, Homo sapiens
ctgtttgggaaaata

SEQ ID NO: 1267452 - DNA, 15 bp, Homo sapiens
gctgtttgggaaaat

SEQ ID NO: 1267453 - DNA, 15 bp, Homo sapiens
agctgtttgggaaaa

SEQ ID NO: 1267454 - DNA, 15 bp, Homo sapiens
aagctgtttgggaaa

SEQ ID NO: 1267455 - DNA, 15 bp, Homo sapiens
aaagctgtttgggaa

SEQ ID NO: 1267456 - DNA, 15 bp, Homo sapiens
taaagctgtttggga

SEQ ID NO: 1267457 - DNA, 15 bp, Homo sapiens
ctaaagctgtttggg

SEQ ID NO: 1267458 - DNA, 15 bp, Homo sapiens
gctaaagctgtttgg

SEQ ID NO: 1267459 - DNA, 15 bp, Homo sapiens
agctaaagctgtttg

SEQ ID NO: 1267460 - DNA, 15 bp, Homo sapiens
tagctaaagctgttt

SEQ ID NO: 1267461 - DNA, 15 bp, Homo sapiens
atagctaaagctgtt

SEQ ID NO: 1267462 - DNA, 15 bp, Homo sapiens
aatagctaaagctgt

SEQ ID NO: 1267463 - DNA, 15 bp, Homo sapiens
taatagctaaagctg

SEQ ID NO: 1267464 - DNA, 15 bp, Homo sapiens
gtaatagctaaagct

SEQ ID NO: 1267465 - DNA, 15 bp, Homo sapiens
tgtaatagctaaagc

SEQ ID NO: 1267466 - DNA, 15 bp, Homo sapiens
atgtaatagctaaag

SEQ ID NO: 1267467 - DNA, 15 bp, Homo sapiens
aatgtaatagctaaa

SEQ ID NO: 1267468 - DNA, 15 bp, Homo sapiens
aaatgtaatagctaa

SEQ ID NO: 1267469 - DNA, 15 bp, Homo sapiens
taaatgtaatagcta

SEQ ID NO: 1267470 - DNA, 15 bp, Homo sapiens
gtaaatgtaatagct

SEQ ID NO: 1267471 - DNA, 15 bp, Homo sapiens
agtaaatgtaatagc

SEQ ID NO: 1267472 - DNA, 15 bp, Homo sapiens
aagtaaatgtaatag

SEQ ID NO: 1267473 - DNA, 15 bp, Homo sapiens
aaagtaaatgtaata

SEQ ID NO: 1267474 - DNA, 15 bp, Homo sapiens
gaaagtaaatgtaat

SEQ ID NO: 1267475 - DNA, 15 bp, Homo sapiens
ggaaagtaaatgtaa

SEQ ID NO: 1267476 - DNA, 15 bp, Homo sapiens
aggaaagtaaatgta

SEQ ID NO: 1267477 - DNA, 15 bp, Homo sapiens
aaggaaagtaaatgt

SEQ ID NO: 1267478 - DNA, 15 bp, Homo sapiens
gaaggaaagtaaatg

SEQ ID NO: 1267479 - DNA, 15 bp, Homo sapiens
tgaaggaaagtaaat

SEQ ID NO: 1267480 - DNA, 15 bp, Homo sapiens
gtgaaggaaagtaaa

SEQ ID NO: 1267481 - DNA, 15 bp, Homo sapiens
tgtgaaggaaagtaa

SEQ ID NO: 1267482 - DNA, 15 bp, Homo sapiens
ctgtgaaggaaagta

SEQ ID NO: 1267483 - DNA, 15 bp, Homo sapiens
tctgtgaaggaaagt

SEQ ID NO: 1267484 - DNA, 15 bp, Homo sapiens
ttctgtgaaggaaag

SEQ ID NO: 1267485 - DNA, 15 bp, Homo sapiens
cttctgtgaaggaaa

SEQ ID NO: 1267486 - DNA, 15 bp, Homo sapiens
acttctgtgaaggaa

SEQ ID NO: 1267487 - DNA, 15 bp, Homo sapiens
cacttctgtgaagga

SEQ ID NO: 1267488 - DNA, 15 bp, Homo sapiens
acacttctgtgaagg

SEQ ID NO: 1267489 - DNA, 15 bp, Homo sapiens
aacacttctgtgaag

SEQ ID NO: 1267490 - DNA, 15 bp, Homo sapiens
aaacacttctgtgaa

SEQ ID NO: 1267491 - DNA, 15 bp, Homo sapiens
aaaacacttctgtga

SEQ ID NO: 1267492 - DNA, 15 bp, Homo sapiens
caaaacacttctgtg

SEQ ID NO: 1267493 - DNA, 15 bp, Homo sapiens
gcaaaacacttctgt

SEQ ID NO: 1267494 - DNA, 15 bp, Homo sapiens
agcaaaacacttctg

SEQ ID NO: 1267495 - DNA, 15 bp, Homo sapiens
cagcaaaacacttct

SEQ ID NO: 1267496 - DNA, 15 bp, Homo sapiens
gcagcaaaacacttc

SEQ ID NO: 1267497 - DNA, 15 bp, Homo sapiens
agcagcaaaacactt

SEQ ID NO: 1267498 - DNA, 15 bp, Homo sapiens
aagcagcaaaacact

SEQ ID NO: 1267499 - DNA, 15 bp, Homo sapiens
aaagcagcaaaacac

SEQ ID NO: 1267500 - DNA, 15 bp, Homo sapiens
caaagcagcaaaaca

SEQ ID NO: 1267501 - DNA, 15 bp, Homo sapiens
tcaaagcagcaaaac

SEQ ID NO: 1267502 - DNA, 15 bp, Homo sapiens
ttcaaagcagcaaaa

SEQ ID NO: 1267503 - DNA, 15 bp, Homo sapiens
cttcaaagcagcaaa

SEQ ID NO: 1267504 - DNA, 15 bp, Homo sapiens
acttcaaagcagcaa

SEQ ID NO: 1267505 - DNA, 15 bp, Homo sapiens
tacttcaaagcagca

SEQ ID NO: 1267506 - DNA, 15 bp, Homo sapiens
atacttcaaagcagc

SEQ ID NO: 1267507 - DNA, 15 bp, Homo sapiens
tatacttcaaagcag

SEQ ID NO: 1267508 - DNA, 15 bp, Homo sapiens
atatacttcaaagca

SEQ ID NO: 1267509 - DNA, 15 bp, Homo sapiens
aatatacttcaaagc

SEQ ID NO: 1267510 - DNA, 15 bp, Homo sapiens
aaatatacttcaaag

SEQ ID NO: 1267511 - DNA, 15 bp, Homo sapiens
caaatatacttcaaa

SEQ ID NO: 1267512 - DNA, 15 bp, Homo sapiens
tcaaatatacttcaa

SEQ ID NO: 1267513 - DNA, 15 bp, Homo sapiens
gtcaaatatacttca

SEQ ID NO: 1267514 - DNA, 15 bp, Homo sapiens
agtcaaatatacttc

SEQ ID NO: 1267515 - DNA, 15 bp, Homo sapiens
aagtcaaatatactt

SEQ ID NO: 1267516 - DNA, 15 bp, Homo sapiens
taagtcaaatatact

SEQ ID NO: 1267517 - DNA, 15 bp, Homo sapiens
gtaagtcaaatatac

SEQ ID NO: 1267518 - DNA, 15 bp, Homo sapiens
ggtaagtcaaatata

SEQ ID NO: 1267519 - DNA, 15 bp, Homo sapiens
tggtaagtcaaatat

SEQ ID NO: 1267520 - DNA, 15 bp, Homo sapiens
atggtaagtcaaata

SEQ ID NO: 1267521 - DNA, 15 bp, Homo sapiens
catggtaagtcaaat

SEQ ID NO: 1267522 - DNA, 15 bp, Homo sapiens
gcatggtaagtcaaa

SEQ ID NO: 1267523 - DNA, 15 bp, Homo sapiens
tgcatggtaagtcaa

SEQ ID NO: 1267524 - DNA, 15 bp, Homo sapiens
ttgcatggtaagtca

SEQ ID NO: 1267525 - DNA, 15 bp, Homo sapiens
cttgcatggtaagtc

SEQ ID NO: 1267526 - DNA, 15 bp, Homo sapiens
gcttgcatggtaagt

SEQ ID NO: 1267527 - DNA, 15 bp, Homo sapiens
tgcttgcatggtaag

SEQ ID NO: 1267528 - DNA, 15 bp, Homo sapiens
ttgcttgcatggtaa

SEQ ID NO: 1267529 - DNA, 15 bp, Homo sapiens
tttgcttgcatggta

SEQ ID NO: 1267530 - DNA, 15 bp, Homo sapiens
atttgcttgcatggt

SEQ ID NO: 1267531 - DNA, 15 bp, Homo sapiens
tatttgcttgcatgg

SEQ ID NO: 1267532 - DNA, 15 bp, Homo sapiens
atatttgcttgcatg

SEQ ID NO: 1267533 - DNA, 15 bp, Homo sapiens
aatatttgcttgcat

SEQ ID NO: 1267534 - DNA, 15 bp, Homo sapiens
aaatatttgcttgca

SEQ ID NO: 1267535 - DNA, 15 bp, Homo sapiens
aaaatatttgcttgc

SEQ ID NO: 1267536 - DNA, 15 bp, Homo sapiens
aaaaatatttgcttg

SEQ ID NO: 1267537 - DNA, 15 bp, Homo sapiens
gaaaaatatttgctt

SEQ ID NO: 1267538 - DNA, 15 bp, Homo sapiens
tgaaaaatatttgct

SEQ ID NO: 1267539 - DNA, 15 bp, Homo sapiens
gtgaaaaatatttgc

SEQ ID NO: 1267540 - DNA, 15 bp, Homo sapiens
agtgaaaaatatttg

SEQ ID NO: 1267541 - DNA, 15 bp, Homo sapiens
cagtgaaaaatattt

SEQ ID NO: 1267542 - DNA, 15 bp, Homo sapiens
acagtgaaaaatatt

SEQ ID NO: 1267543 - DNA, 15 bp, Homo sapiens
cacagtgaaaaatat

SEQ ID NO: 1267544 - DNA, 15 bp, Homo sapiens
acacagtgaaaaata

SEQ ID NO: 1267545 - DNA, 15 bp, Homo sapiens
cacacagtgaaaaat

SEQ ID NO: 1267546 - DNA, 15 bp, Homo sapiens
ccacacagtgaaaaa

SEQ ID NO: 1267547 - DNA, 15 bp, Homo sapiens
accacacagtgaaaa

SEQ ID NO: 1267548 - DNA, 15 bp, Homo sapiens
taccacacagtgaaa

SEQ ID NO: 1267549 - DNA, 15 bp, Homo sapiens
ataccacacagtgaa

SEQ ID NO: 1267550 - DNA, 15 bp, Homo sapiens
gataccacacagtga

SEQ ID NO: 1267551 - DNA, 15 bp, Homo sapiens
ggataccacacagtg

SEQ ID NO: 1267552 - DNA, 15 bp, Homo sapiens
aggataccacacagt

SEQ ID NO: 1267553 - DNA, 15 bp, Homo sapiens
aaggataccacacag

SEQ ID NO: 1267554 - DNA, 15 bp, Homo sapiens
taaggataccacaca

SEQ ID NO: 1267555 - DNA, 15 bp, Homo sapiens
ataaggataccacac

SEQ ID NO: 1267556 - DNA, 15 bp, Homo sapiens
aataaggataccaca

SEQ ID NO: 1267557 - DNA, 15 bp, Homo sapiens
aaataaggataccac

SEQ ID NO: 1267558 - DNA, 15 bp, Homo sapiens
aaaataaggatacca

SEQ ID NO: 1267559 - DNA, 15 bp, Homo sapiens
caaaataaggatacc

SEQ ID NO: 1267560 - DNA, 15 bp, Homo sapiens
ccaaaataaggatac

SEQ ID NO: 1267561 - DNA, 15 bp, Homo sapiens
tccaaaataaggata

SEQ ID NO: 1267562 - DNA, 15 bp, Homo sapiens
ttccaaaataaggat

SEQ ID NO: 1267563 - DNA, 15 bp, Homo sapiens
attccaaaataagga

SEQ ID NO: 1267564 - DNA, 15 bp, Homo sapiens
cattccaaaataagg

SEQ ID NO: 1267565 - DNA, 15 bp, Homo sapiens
tcattccaaaataag

SEQ ID NO: 1267566 - DNA, 15 bp, Homo sapiens
gtcattccaaaataa

SEQ ID NO: 1267567 - DNA, 15 bp, Homo sapiens
ggtcattccaaaata

SEQ ID NO: 1267568 - DNA, 15 bp, Homo sapiens
tggtcattccaaaat

SEQ ID NO: 1267569 - DNA, 15 bp, Homo sapiens
atggtcattccaaaa

SEQ ID NO: 1267570 - DNA, 15 bp, Homo sapiens
catggtcattccaaa

SEQ ID NO: 1267571 - DNA, 15 bp, Homo sapiens
tcatggtcattccaa

SEQ ID NO: 1267572 - DNA, 15 bp, Homo sapiens
ttcatggtcattcca

SEQ ID NO: 1267573 - DNA, 15 bp, Homo sapiens
tttcatggtcattcc

SEQ ID NO: 1267574 - DNA, 15 bp, Homo sapiens
ttttcatggtcattc

SEQ ID NO: 1267575 - DNA, 15 bp, Homo sapiens
tttttcatggtcatt

SEQ ID NO: 1267576 - DNA, 15 bp, Homo sapiens
ctttttcatggtcat

SEQ ID NO: 1267577 - DNA, 15 bp, Homo sapiens
tctttttcatggtca

SEQ ID NO: 1267578 - DNA, 15 bp, Homo sapiens
atctttttcatggtc

SEQ ID NO: 1267579 - DNA, 15 bp, Homo sapiens
tatctttttcatggt

SEQ ID NO: 1267580 - DNA, 15 bp, Homo sapiens
ttatctttttcatgg

SEQ ID NO: 1267581 - DNA, 15 bp, Homo sapiens
attatctttttcatg

SEQ ID NO: 1267582 - DNA, 15 bp, Homo sapiens
gattatctttttcat

SEQ ID NO: 1267583 - DNA, 15 bp, Homo sapiens
tgattatctttttca

SEQ ID NO: 1267584 - DNA, 15 bp, Homo sapiens
atgattatctttttc

SEQ ID NO: 1267585 - DNA, 15 bp, Homo sapiens
tatgattatcttttt

SEQ ID NO: 1267586 - DNA, 15 bp, Homo sapiens
atatgattatctttt

SEQ ID NO: 1267587 - DNA, 15 bp, Homo sapiens
catatgattatcttt

SEQ ID NO: 1267588 - DNA, 15 bp, Homo sapiens
acatatgattatctt

SEQ ID NO: 1267589 - DNA, 15 bp, Homo sapiens
aacatatgattatct

SEQ ID NO: 1267590 - DNA, 15 bp, Homo sapiens
aaacatatgattatc

SEQ ID NO: 1267591 - DNA, 15 bp, Homo sapiens
taaacatatgattat

SEQ ID NO: 1267592 - DNA, 15 bp, Homo sapiens
ttaaacatatgatta

SEQ ID NO: 1267593 - DNA, 15 bp, Homo sapiens
tttaaacatatgatt

SEQ ID NO: 1267594 - DNA, 15 bp, Homo sapiens
atttaaacatatgat

SEQ ID NO: 1267595 - DNA, 15 bp, Homo sapiens
aatttaaacatatga

SEQ ID NO: 1267596 - DNA, 15 bp, Homo sapiens
aaatttaaacatatg

SEQ ID NO: 1267597 - DNA, 15 bp, Homo sapiens
caaatttaaacatat

SEQ ID NO: 1267598 - DNA, 15 bp, Homo sapiens
tcaaatttaaacata

SEQ ID NO: 1267599 - DNA, 15 bp, Homo sapiens
cttcaaatttaaaca

SEQ ID NO: 1267600 - DNA, 15 bp, Homo sapiens
acttcaaatttaaac

SEQ ID NO: 1267601 - DNA, 15 bp, Homo sapiens
cacttcaaatttaaa

SEQ ID NO: 1267602 - DNA, 15 bp, Homo sapiens
acacttcaaatttaa

SEQ ID NO: 1267603 - DNA, 15 bp, Homo sapiens
tacacttcaaattta

SEQ ID NO: 1267604 - DNA, 15 bp, Homo sapiens
ttacacttcaaattt

SEQ ID NO: 1267605 - DNA, 15 bp, Homo sapiens
attacacttcaaatt

SEQ ID NO: 1267606 - DNA, 15 bp, Homo sapiens
cattacacttcaaat

SEQ ID NO: 1267607 - DNA, 15 bp, Homo sapiens
acattacacttcaaa

SEQ ID NO: 1267608 - DNA, 15 bp, Homo sapiens
aacattacacttcaa

SEQ ID NO: 1267609 - DNA, 15 bp, Homo sapiens
aaacattacacttca

SEQ ID NO: 1267610 - DNA, 15 bp, Homo sapiens
aaaacattacacttc

SEQ ID NO: 1267611 - DNA, 15 bp, Homo sapiens
aaaaacattacactt

SEQ ID NO: 1267612 - DNA, 15 bp, Homo sapiens
gaaaaacattacact

SEQ ID NO: 1267613 - DNA, 15 bp, Homo sapiens
agaaaaacattacac

SEQ ID NO: 1267614 - DNA, 15 bp, Homo sapiens
tagaaaaacattaca

SEQ ID NO: 1267615 - DNA, 15 bp, Homo sapiens
ttagaaaaacattac

SEQ ID NO: 1267616 - DNA, 15 bp, Homo sapiens
cttagaaaaacatta

SEQ ID NO: 1267617 - DNA, 15 bp, Homo sapiens
tcttagaaaaacatt

SEQ ID NO: 1267618 - DNA, 15 bp, Homo sapiens
atcttagaaaaacat

SEQ ID NO: 1267619 - DNA, 15 bp, Homo sapiens
tatcttagaaaaaca

SEQ ID NO: 1267620 - DNA, 15 bp, Homo sapiens
ttatcttagaaaaac

SEQ ID NO: 1267621 - DNA, 15 bp, Homo sapiens
tttatcttagaaaaa

SEQ ID NO: 1267622 - DNA, 15 bp, Homo sapiens
ttttatcttagaaaa

SEQ ID NO: 1267623 - DNA, 15 bp, Homo sapiens
attttatcttagaaa

SEQ ID NO: 1267624 - DNA, 15 bp, Homo sapiens
tattttatcttagaa

SEQ ID NO: 1267625 - DNA, 15 bp, Homo sapiens
ttattttatcttaga

SEQ ID NO: 1267626 - DNA, 15 bp, Homo sapiens
cttattttatcttag

SEQ ID NO: 1267627 - DNA, 15 bp, Homo sapiens
tcttattttatctta

SEQ ID NO: 1267628 - DNA, 15 bp, Homo sapiens
atcttattttatctt

SEQ ID NO: 1267629 - DNA, 15 bp, Homo sapiens
gatcttattttatct

SEQ ID NO: 1267630 - DNA, 15 bp, Homo sapiens
agatcttattttatc

SEQ ID NO: 1267631 - DNA, 15 bp, Homo sapiens
aagatcttattttat

SEQ ID NO: 1267632 - DNA, 15 bp, Homo sapiens
taagatcttatttta

SEQ ID NO: 1267633 - DNA, 15 bp, Homo sapiens
ttaagatcttatttt

SEQ ID NO: 1267634 - DNA, 15 bp, Homo sapiens
tttaagatcttattt

SEQ ID NO: 1267635 - DNA, 15 bp, Homo sapiens
ctttaagatcttatt

SEQ ID NO: 1267636 - DNA, 15 bp, Homo sapiens
actttaagatcttat

SEQ ID NO: 1267637 - DNA, 15 bp, Homo sapiens
tactttaagatctta

SEQ ID NO: 1267638 - DNA, 15 bp, Homo sapiens
atactttaagatctt

SEQ ID NO: 1267639 - DNA, 15 bp, Homo sapiens
aatactttaagatct

SEQ ID NO: 1267640 - DNA, 15 bp, Homo sapiens
aaatactttaagatc

SEQ ID NO: 1267641 - DNA, 15 bp, Homo sapiens
taaatactttaagat

SEQ ID NO: 1267642 - DNA, 15 bp, Homo sapiens
ttaaatactttaaga

SEQ ID NO: 1267643 - DNA, 15 bp, Homo sapiens
attaaatactttaag

SEQ ID NO: 1267644 - DNA, 15 bp, Homo sapiens
tattaaatactttaa

SEQ ID NO: 1267645 - DNA, 15 bp, Homo sapiens
ttattaaatacttta

SEQ ID NO: 1267646 - DNA, 15 bp, Homo sapiens
attattaaatacttt

SEQ ID NO: 1267647 - DNA, 15 bp, Homo sapiens
cattattaaatactt

SEQ ID NO: 1267648 - DNA, 15 bp, Homo sapiens
acattattaaatact

SEQ ID NO: 1267649 - DNA, 15 bp, Homo sapiens
aacattattaaatac

SEQ ID NO: 1267650 - DNA, 15 bp, Homo sapiens
gaacattattaaata

SEQ ID NO: 1267651 - DNA, 15 bp, Homo sapiens
agaacattattaaat

SEQ ID NO: 1267652 - DNA, 15 bp, Homo sapiens
aagaacattattaaa

SEQ ID NO: 1267653 - DNA, 15 bp, Homo sapiens
aaagaacattattaa

SEQ ID NO: 1267654 - DNA, 15 bp, Homo sapiens
aaaagaacattatta

SEQ ID NO: 1267655 - DNA, 15 bp, Homo sapiens
aaaaagaacattatt

SEQ ID NO: 1267656 - DNA, 15 bp, Homo sapiens
gaaaaagaacattat

SEQ ID NO: 1267657 - DNA, 15 bp, Homo sapiens
tgaaaaagaacatta

SEQ ID NO: 1267658 - DNA, 15 bp, Homo sapiens
gtgaaaaagaacatt

SEQ ID NO: 1267659 - DNA, 15 bp, Homo sapiens
tgtgaaaaagaacat

SEQ ID NO: 1267660 - DNA, 15 bp, Homo sapiens
ctgtgaaaaagaaca

SEQ ID NO: 1267661 - DNA, 15 bp, Homo sapiens
actgtgaaaaagaac

SEQ ID NO: 1267662 - DNA, 15 bp, Homo sapiens
tactgtgaaaaagaa

SEQ ID NO: 1267663 - DNA, 15 bp, Homo sapiens
ctactgtgaaaaaga

SEQ ID NO: 1267664 - DNA, 15 bp, Homo sapiens
actactgtgaaaaag

SEQ ID NO: 1267665 - DNA, 15 bp, Homo sapiens
cactactgtgaaaaa

SEQ ID NO: 1267666 - DNA, 15 bp, Homo sapiens
acactactgtgaaaa

SEQ ID NO: 1267667 - DNA, 15 bp, Homo sapiens
aacactactgtgaaa

SEQ ID NO: 1267668 - DNA, 15 bp, Homo sapiens
taacactactgtgaa

SEQ ID NO: 1267669 - DNA, 15 bp, Homo sapiens
ataacactactgtga

SEQ ID NO: 1267670 - DNA, 15 bp, Homo sapiens
cataacactactgtg

SEQ ID NO: 1267671 - DNA, 15 bp, Homo sapiens
acataacactactgt

SEQ ID NO: 1267672 - DNA, 15 bp, Homo sapiens
cacataacactactg

SEQ ID NO: 1267673 - DNA, 15 bp, Homo sapiens
gcacataacactact

SEQ ID NO: 1267674 - DNA, 15 bp, Homo sapiens
tgcacataacactac

SEQ ID NO: 1267675 - DNA, 15 bp, Homo sapiens
ttgcacataacacta

SEQ ID NO: 1267676 - DNA, 15 bp, Homo sapiens
tttgcacataacact

SEQ ID NO: 1267677 - DNA, 15 bp, Homo sapiens
gtttgcacataacac

SEQ ID NO: 1267678 - DNA, 15 bp, Homo sapiens
agtttgcacataaca

SEQ ID NO: 1267679 - DNA, 15 bp, Homo sapiens
tagtttgcacataac

SEQ ID NO: 1267680 - DNA, 15 bp, Homo sapiens
atagtttgcacataa

SEQ ID NO: 1267681 - DNA, 15 bp, Homo sapiens
aatagtttgcacata

SEQ ID NO: 1267682 - DNA, 15 bp, Homo sapiens
caatagtttgcacat

SEQ ID NO: 1267683 - DNA, 15 bp, Homo sapiens
tcaatagtttgcaca

SEQ ID NO: 1267684 - DNA, 15 bp, Homo sapiens
ttcaatagtttgcac

SEQ ID NO: 1267685 - DNA, 15 bp, Homo sapiens
tttcaatagtttgca

SEQ ID NO: 1267686 - DNA, 15 bp, Homo sapiens
gtttcaatagtttgc

SEQ ID NO: 1267687 - DNA, 15 bp, Homo sapiens
tgtttcaatagtttg

SEQ ID NO: 1267688 - DNA, 15 bp, Homo sapiens
ttgtttcaatagttt

SEQ ID NO: 1267689 - DNA, 15 bp, Homo sapiens
cttgtttcaatagtt

SEQ ID NO: 1267690 - DNA, 15 bp, Homo sapiens
acttgtttcaatagt

SEQ ID NO: 1267691 - DNA, 15 bp, Homo sapiens
tacttgtttcaatag

SEQ ID NO: 1267692 - DNA, 15 bp, Homo sapiens
atacttgtttcaata

SEQ ID NO: 1267693 - DNA, 15 bp, Homo sapiens
catacttgtttcaat

SEQ ID NO: 1267694 - DNA, 15 bp, Homo sapiens
acatacttgtttcaa

SEQ ID NO: 1267695 - DNA, 15 bp, Homo sapiens
tacatacttgtttca

SEQ ID NO: 1267696 - DNA, 15 bp, Homo sapiens
gtacatacttgtttc

SEQ ID NO: 1267697 - DNA, 15 bp, Homo sapiens
agtacatacttgttt

SEQ ID NO: 1267698 - DNA, 15 bp, Homo sapiens
cagtacatacttgtt

SEQ ID NO: 1267699 - DNA, 15 bp, Homo sapiens
tcagtacatacttgt

SEQ ID NO: 1267700 - DNA, 15 bp, Homo sapiens
ttcagtacatacttg

SEQ ID NO: 1267701 - DNA, 15 bp, Homo sapiens
attcagtacatactt

SEQ ID NO: 1267702 - DNA, 15 bp, Homo sapiens
gattcagtacatact

SEQ ID NO: 1267703 - DNA, 15 bp, Homo sapiens
tgattcagtacatac

SEQ ID NO: 1267704 - DNA, 15 bp, Homo sapiens
ttgattcagtacata

SEQ ID NO: 1267705 - DNA, 15 bp, Homo sapiens
attgattcagtacat

SEQ ID NO: 1267706 - DNA, 15 bp, Homo sapiens
aattgattcagtaca

SEQ ID NO: 1267707 - DNA, 15 bp, Homo sapiens
aaattgattcagtac

SEQ ID NO: 1267708 - DNA, 15 bp, Homo sapiens
caaattgattcagta

SEQ ID NO: 1267709 - DNA, 15 bp, Homo sapiens
tcaaattgattcagt

SEQ ID NO: 1267710 - DNA, 15 bp, Homo sapiens
atcaaattgattcag

SEQ ID NO: 1267711 - DNA, 15 bp, Homo sapiens
aatcaaattgattca

SEQ ID NO: 1267712 - DNA, 15 bp, Homo sapiens
aaatcaaattgattc

SEQ ID NO: 1267713 - DNA, 15 bp, Homo sapiens
taaatcaaattgatt

SEQ ID NO: 1267714 - DNA, 15 bp, Homo sapiens
ataaatcaaattgat

SEQ ID NO: 1267715 - DNA, 15 bp, Homo sapiens
tataaatcaaattga

SEQ ID NO: 1267716 - DNA, 15 bp, Homo sapiens
ttataaatcaaattg

SEQ ID NO: 1267717 - DNA, 15 bp, Homo sapiens
cttataaatcaaatt

SEQ ID NO: 1267718 - DNA, 15 bp, Homo sapiens
acttataaatcaaat

SEQ ID NO: 1267719 - DNA, 15 bp, Homo sapiens
tacttataaatcaaa

SEQ ID NO: 1267720 - DNA, 15 bp, Homo sapiens
atacttataaatcaa

SEQ ID NO: 1267721 - DNA, 15 bp, Homo sapiens
tatacttataaatca

SEQ ID NO: 1267722 - DNA, 15 bp, Homo sapiens
atatacttataaatc

SEQ ID NO: 1267723 - DNA, 15 bp, Homo sapiens
catatacttataaat

SEQ ID NO: 1267724 - DNA, 15 bp, Homo sapiens
gcatatacttataaa

SEQ ID NO: 1267725 - DNA, 15 bp, Homo sapiens
ggcatatacttataa

SEQ ID NO: 1267726 - DNA, 15 bp, Homo sapiens
tggcatatacttata

SEQ ID NO: 1267727 - DNA, 15 bp, Homo sapiens
ttggcatatacttat

SEQ ID NO: 1267728 - DNA, 15 bp, Homo sapiens
attggcatatactta

SEQ ID NO: 1267729 - DNA, 15 bp, Homo sapiens
aattggcatatactt

SEQ ID NO: 1267730 - DNA, 15 bp, Homo sapiens
taattggcatatact

SEQ ID NO: 1267731 - DNA, 15 bp, Homo sapiens
ataattggcatatac

SEQ ID NO: 1267732 - DNA, 15 bp, Homo sapiens
tataattggcatata

SEQ ID NO: 1267733 - DNA, 15 bp, Homo sapiens
atataattggcatat

SEQ ID NO: 1267734 - DNA, 15 bp, Homo sapiens
catataattggcata

SEQ ID NO: 1267735 - DNA, 15 bp, Homo sapiens
tcatataattggcat

SEQ ID NO: 1267736 - DNA, 15 bp, Homo sapiens
atcatataattggca

SEQ ID NO: 1267737 - DNA, 15 bp, Homo sapiens
aatcatataattggc

SEQ ID NO: 1267738 - DNA, 15 bp, Homo sapiens
taatcatataattgg

SEQ ID NO: 1267739 - DNA, 15 bp, Homo sapiens
ataatcatataattg

SEQ ID NO: 1267740 - DNA, 15 bp, Homo sapiens
aataatcatataatt

SEQ ID NO: 1267741 - DNA, 15 bp, Homo sapiens
aaataatcatataat

SEQ ID NO: 1267742 - DNA, 15 bp, Homo sapiens
aaaataatcatataa

SEQ ID NO: 1267743 - DNA, 15 bp, Homo sapiens
gaaaataatcatata

SEQ ID NO: 1267744 - DNA, 15 bp, Homo sapiens
tgaaaataatcatat

SEQ ID NO: 1267745 - DNA, 15 bp, Homo sapiens
atgaaaataatcata

SEQ ID NO: 1267746 - DNA, 15 bp, Homo sapiens
aatgaaaataatcat

SEQ ID NO: 1267747 - DNA, 15 bp, Homo sapiens
aaatgaaaataatca

SEQ ID NO: 1267748 - DNA, 15 bp, Homo sapiens
caaatgaaaataatc

SEQ ID NO: 1267749 - DNA, 15 bp, Homo sapiens
ccaaatgaaaataat

SEQ ID NO: 1267750 - DNA, 15 bp, Homo sapiens
accaaatgaaaataa

SEQ ID NO: 1267751 - DNA, 15 bp, Homo sapiens
taccaaatgaaaata

SEQ ID NO: 1267752 - DNA, 15 bp, Homo sapiens
ctaccaaatgaaaat

SEQ ID NO: 1267753 - DNA, 15 bp, Homo sapiens
cctaccaaatgaaaa

SEQ ID NO: 1267754 - DNA, 15 bp, Homo sapiens
gcctaccaaatgaaa

SEQ ID NO: 1267755 - DNA, 15 bp, Homo sapiens
agcctaccaaatgaa

SEQ ID NO: 1267756 - DNA, 15 bp, Homo sapiens
aagcctaccaaatga

SEQ ID NO: 1267757 - DNA, 15 bp, Homo sapiens
caagcctaccaaatg

SEQ ID NO: 1267758 - DNA, 15 bp, Homo sapiens
tcaagcctaccaaat

SEQ ID NO: 1267759 - DNA, 15 bp, Homo sapiens
ctcaagcctaccaaa

SEQ ID NO: 1267760 - DNA, 15 bp, Homo sapiens
actcaagcctaccaa

SEQ ID NO: 1267761 - DNA, 15 bp, Homo sapiens
aactcaagcctacca

SEQ ID NO: 1267762 - DNA, 15 bp, Homo sapiens
aaactcaagcctacc

SEQ ID NO: 1267763 - DNA, 15 bp, Homo sapiens
caaactcaagcctac

SEQ ID NO: 1267764 - DNA, 15 bp, Homo sapiens
tcaaactcaagccta

SEQ ID NO: 1267765 - DNA, 15 bp, Homo sapiens
ttcaaactcaagcct

SEQ ID NO: 1267766 - DNA, 15 bp, Homo sapiens
cttcaaactcaagcc

SEQ ID NO: 1267767 - DNA, 15 bp, Homo sapiens
tcttcaaactcaagc

SEQ ID NO: 1267768 - DNA, 15 bp, Homo sapiens
ttcttcaaactcaag

SEQ ID NO: 1267769 - DNA, 15 bp, Homo sapiens
tttcttcaaactcaa

SEQ ID NO: 1267770 - DNA, 15 bp, Homo sapiens
gtttcttcaaactca

SEQ ID NO: 1267771 - DNA, 15 bp, Homo sapiens
tgtttcttcaaactc

SEQ ID NO: 1267772 - DNA, 15 bp, Homo sapiens
ctgtttcttcaaact

SEQ ID NO: 1267773 - DNA, 15 bp, Homo sapiens
tctgtttcttcaaac

SEQ ID NO: 1267774 - DNA, 15 bp, Homo sapiens
ttctgtttcttcaaa

SEQ ID NO: 1267775 - DNA, 15 bp, Homo sapiens
cttctgtttcttcaa

SEQ ID NO: 1267776 - DNA, 15 bp, Homo sapiens
tcttctgtttcttca

SEQ ID NO: 1267777 - DNA, 15 bp, Homo sapiens
ttcttctgtttcttc

SEQ ID NO: 1267778 - DNA, 15 bp, Homo sapiens
gttcttctgtttctt

SEQ ID NO: 1267779 - DNA, 15 bp, Homo sapiens
ggttcttctgtttct

SEQ ID NO: 1267780 - DNA, 15 bp, Homo sapiens
aggttcttctgtttc

SEQ ID NO: 1267781 - DNA, 15 bp, Homo sapiens
caggttcttctgttt

SEQ ID NO: 1267782 - DNA, 15 bp, Homo sapiens
tcaggttcttctgtt

SEQ ID NO: 1267783 - DNA, 15 bp, Homo sapiens
atcaggttcttctgt

SEQ ID NO: 1267784 - DNA, 15 bp, Homo sapiens
aatcaggttcttctg

SEQ ID NO: 1267785 - DNA, 15 bp, Homo sapiens
aaatcaggttcttct

SEQ ID NO: 1267786 - DNA, 15 bp, Homo sapiens
aaaatcaggttcttc

SEQ ID NO: 1267787 - DNA, 15 bp, Homo sapiens
taaaatcaggttctt

SEQ ID NO: 1267788 - DNA, 15 bp, Homo sapiens
gtaaaatcaggttct

SEQ ID NO: 1267789 - DNA, 15 bp, Homo sapiens
agtaaaatcaggttc

SEQ ID NO: 1267790 - DNA, 15 bp, Homo sapiens
cagtaaaatcaggtt

SEQ ID NO: 1267791 - DNA, 15 bp, Homo sapiens
gcagtaaaatcaggt

SEQ ID NO: 1267792 - DNA, 15 bp, Homo sapiens
tgcagtaaaatcagg

SEQ ID NO: 1267793 - DNA, 15 bp, Homo sapiens
atgcagtaaaatcag

SEQ ID NO: 1267794 - DNA, 15 bp, Homo sapiens
aatgcagtaaaatca

SEQ ID NO: 1267795 - DNA, 15 bp, Homo sapiens
taatgcagtaaaatc

SEQ ID NO: 1267796 - DNA, 15 bp, Homo sapiens
ataatgcagtaaaat

SEQ ID NO: 1267797 - DNA, 15 bp, Homo sapiens
cataatgcagtaaaa

SEQ ID NO: 1267798 - DNA, 15 bp, Homo sapiens
acataatgcagtaaa

SEQ ID NO: 1267799 - DNA, 15 bp, Homo sapiens
gacataatgcagtaa

SEQ ID NO: 1267800 - DNA, 15 bp, Homo sapiens
tgacataatgcagta

SEQ ID NO: 1267801 - DNA, 15 bp, Homo sapiens
ctgacataatgcagt

SEQ ID NO: 1267802 - DNA, 15 bp, Homo sapiens
tctgacataatgcag

SEQ ID NO: 1267803 - DNA, 15 bp, Homo sapiens
ttctgacataatgca

SEQ ID NO: 1267804 - DNA, 15 bp, Homo sapiens
tttctgacataatgc

SEQ ID NO: 1267805 - DNA, 15 bp, Homo sapiens
atttctgacataatg

SEQ ID NO: 1267806 - DNA, 15 bp, Homo sapiens
aatttctgacataat

SEQ ID NO: 1267807 - DNA, 15 bp, Homo sapiens
taatttctgacataa

SEQ ID NO: 1267808 - DNA, 15 bp, Homo sapiens
ttaatttctgacata

SEQ ID NO: 1267809 - DNA, 15 bp, Homo sapiens
tttaatttctgacat

SEQ ID NO: 1267810 - DNA, 15 bp, Homo sapiens
ctttaatttctgaca

SEQ ID NO: 1267811 - DNA, 15 bp, Homo sapiens
tctttaatttctgac

SEQ ID NO: 1267812 - DNA, 15 bp, Homo sapiens
atctttaatttctga

SEQ ID NO: 1267813 - DNA, 15 bp, Homo sapiens
tatctttaatttctg

SEQ ID NO: 1267814 - DNA, 15 bp, Homo sapiens
gtatctttaatttct

SEQ ID NO: 1267815 - DNA, 15 bp, Homo sapiens
ggtatctttaatttc

SEQ ID NO: 1267816 - DNA, 15 bp, Homo sapiens
tggtatctttaattt

SEQ ID NO: 1267817 - DNA, 15 bp, Homo sapiens
ctggtatctttaatt

SEQ ID NO: 1267818 - DNA, 15 bp, Homo sapiens
tctggtatctttaat

SEQ ID NO: 1267819 - DNA, 15 bp, Homo sapiens
atctggtatctttaa

SEQ ID NO: 1267820 - DNA, 15 bp, Homo sapiens
gatctggtatcttta

SEQ ID NO: 1267821 - DNA, 15 bp, Homo sapiens
tgatctggtatcttt

SEQ ID NO: 1267822 - DNA, 15 bp, Homo sapiens
atgatctggtatctt

SEQ ID NO: 1267823 - DNA, 15 bp, Homo sapiens
catgatctggtatct

SEQ ID NO: 1267824 - DNA, 15 bp, Homo sapiens
acatgatctggtatc

SEQ ID NO: 1267825 - DNA, 15 bp, Homo sapiens
gacatgatctggtat

SEQ ID NO: 1267826 - DNA, 15 bp, Homo sapiens
tgacatgatctggta

SEQ ID NO: 1267827 - DNA, 15 bp, Homo sapiens
ctgacatgatctggt

SEQ ID NO: 1267828 - DNA, 15 bp, Homo sapiens
tctgacatgatctgg

SEQ ID NO: 1267829 - DNA, 15 bp, Homo sapiens
ctctgacatgatctg

SEQ ID NO: 1267830 - DNA, 15 bp, Homo sapiens
tctctgacatgatct

SEQ ID NO: 1267831 - DNA, 15 bp, Homo sapiens
ctctctgacatgatc

SEQ ID NO: 1267832 - DNA, 15 bp, Homo sapiens
tctctctgacatgat

SEQ ID NO: 1267833 - DNA, 15 bp, Homo sapiens
ctctctctgacatga

SEQ ID NO: 1267834 - DNA, 15 bp, Homo sapiens
tctctctctgacatg

SEQ ID NO: 1267835 - DNA, 15 bp, Homo sapiens
ctctctctctgacat

SEQ ID NO: 1267836 - DNA, 15 bp, Homo sapiens
gctctctctctgaca

SEQ ID NO: 1267837 - DNA, 15 bp, Homo sapiens
agctctctctctgac

SEQ ID NO: 1267838 - DNA, 15 bp, Homo sapiens
aagctctctctctga

SEQ ID NO: 1267839 - DNA, 15 bp, Homo sapiens
caagctctctctctg

SEQ ID NO: 1267840 - DNA, 15 bp, Homo sapiens
ccaagctctctctct

SEQ ID NO: 1267841 - DNA, 15 bp, Homo sapiens
accaagctctctctc

SEQ ID NO: 1267842 - DNA, 15 bp, Homo sapiens
aaccaagctctctct

SEQ ID NO: 1267843 - DNA, 15 bp, Homo sapiens
taaccaagctctctc

SEQ ID NO: 1267844 - DNA, 15 bp, Homo sapiens
ttaaccaagctctct

SEQ ID NO: 1267845 - DNA, 15 bp, Homo sapiens
gttaaccaagctctc

SEQ ID NO: 1267846 - DNA, 15 bp, Homo sapiens
agttaaccaagctct

SEQ ID NO: 1267847 - DNA, 15 bp, Homo sapiens
aagttaaccaagctc

SEQ ID NO: 1267848 - DNA, 15 bp, Homo sapiens
caagttaaccaagct

SEQ ID NO: 1267849 - DNA, 15 bp, Homo sapiens
ccaagttaaccaagc

SEQ ID NO: 1267850 - DNA, 15 bp, Homo sapiens
cccaagttaaccaag

SEQ ID NO: 1267851 - DNA, 15 bp, Homo sapiens
tcccaagttaaccaa

SEQ ID NO: 1267852 - DNA, 15 bp, Homo sapiens
ctcccaagttaacca

SEQ ID NO: 1267853 - DNA, 15 bp, Homo sapiens
tctcccaagttaacc

SEQ ID NO: 1267854 - DNA, 15 bp, Homo sapiens
ttctcccaagttaac

SEQ ID NO: 1267855 - DNA, 15 bp, Homo sapiens
tttctcccaagttaa

SEQ ID NO: 1267856 - DNA, 15 bp, Homo sapiens
ctttctcccaagtta

SEQ ID NO: 1267857 - DNA, 15 bp, Homo sapiens
actttctcccaagtt

SEQ ID NO: 1267858 - DNA, 15 bp, Homo sapiens
aactttctcccaagt

SEQ ID NO: 1267859 - DNA, 15 bp, Homo sapiens
aaactttctcccaag

SEQ ID NO: 1267860 - DNA, 15 bp, Homo sapiens
gaaactttctcccaa

SEQ ID NO: 1267861 - DNA, 15 bp, Homo sapiens
tgaaactttctccca

SEQ ID NO: 1267862 - DNA, 15 bp, Homo sapiens
atgaaactttctccc

SEQ ID NO: 1267863 - DNA, 15 bp, Homo sapiens
gatgaaactttctcc

SEQ ID NO: 1267864 - DNA, 15 bp, Homo sapiens
agatgaaactttctc

SEQ ID NO: 1267865 - DNA, 15 bp, Homo sapiens
cagatgaaactttct

SEQ ID NO: 1267866 - DNA, 15 bp, Homo sapiens
acagatgaaactttc

SEQ ID NO: 1267867 - DNA, 15 bp, Homo sapiens
cacagatgaaacttt

SEQ ID NO: 1267868 - DNA, 15 bp, Homo sapiens
ccacagatgaaactt

SEQ ID NO: 1267869 - DNA, 15 bp, Homo sapiens
tccacagatgaaact

SEQ ID NO: 1267870 - DNA, 15 bp, Homo sapiens
atccacagatgaaac

SEQ ID NO: 1267871 - DNA, 15 bp, Homo sapiens
catccacagatgaaa

SEQ ID NO: 1267872 - DNA, 15 bp, Homo sapiens
ccatccacagatgaa

SEQ ID NO: 1267873 - DNA, 15 bp, Homo sapiens
tccatccacagatga

SEQ ID NO: 1267874 - DNA, 15 bp, Homo sapiens
ctccatccacagatg

SEQ ID NO: 1267875 - DNA, 15 bp, Homo sapiens
actccatccacagat

SEQ ID NO: 1267876 - DNA, 15 bp, Homo sapiens
tactccatccacaga

SEQ ID NO: 1267877 - DNA, 15 bp, Homo sapiens
atactccatccacag

SEQ ID NO: 1267878 - DNA, 15 bp, Homo sapiens
aatactccatccaca

SEQ ID NO: 1267879 - DNA, 15 bp, Homo sapiens
caatactccatccac

SEQ ID NO: 1267880 - DNA, 15 bp, Homo sapiens
ccaatactccatcca

SEQ ID NO: 1267881 - DNA, 15 bp, Homo sapiens
accaatactccatcc

SEQ ID NO: 1267882 - DNA, 15 bp, Homo sapiens
taccaatactccatc

SEQ ID NO: 1267883 - DNA, 15 bp, Homo sapiens
ttaccaatactccat

SEQ ID NO: 1267884 - DNA, 15 bp, Homo sapiens
cttaccaatactcca

SEQ ID NO: 1267885 - DNA, 15 bp, Homo sapiens
ccttaccaatactcc

SEQ ID NO: 1267886 - DNA, 15 bp, Homo sapiens
tccttaccaatactc

SEQ ID NO: 1267887 - DNA, 15 bp, Homo sapiens
atccttaccaatact

SEQ ID NO: 1267888 - DNA, 15 bp, Homo sapiens
aatccttaccaatac

SEQ ID NO: 1267889 - DNA, 15 bp, Homo sapiens
aaatccttaccaata

SEQ ID NO: 1267890 - DNA, 15 bp, Homo sapiens
aaaatccttaccaat

SEQ ID NO: 1267891 - DNA, 15 bp, Homo sapiens
gaaaatccttaccaa

SEQ ID NO: 1267892 - DNA, 15 bp, Homo sapiens
agaaaatccttacca

SEQ ID NO: 1267893 - DNA, 15 bp, Homo sapiens
aagaaaatccttacc

SEQ ID NO: 1267894 - DNA, 15 bp, Homo sapiens
taagaaaatccttac

SEQ ID NO: 1267895 - DNA, 15 bp, Homo sapiens
ttaagaaaatcctta

SEQ ID NO: 1267896 - DNA, 15 bp, Homo sapiens
tttaagaaaatcctt

SEQ ID NO: 1267897 - DNA, 15 bp, Homo sapiens
ttttaagaaaatcct

SEQ ID NO: 1267898 - DNA, 15 bp, Homo sapiens
gttttaagaaaatcc

SEQ ID NO: 1267899 - DNA, 15 bp, Homo sapiens
cgttttaagaaaatc

SEQ ID NO: 1267900 - DNA, 15 bp, Homo sapiens
acgttttaagaaaat

SEQ ID NO: 1267901 - DNA, 15 bp, Homo sapiens
aacgttttaagaaaa

SEQ ID NO: 1267902 - DNA, 15 bp, Homo sapiens
aaacgttttaagaaa

SEQ ID NO: 1267903 - DNA, 15 bp, Homo sapiens
aaaacgttttaagaa

SEQ ID NO: 1267904 - DNA, 15 bp, Homo sapiens
caaaacgttttaaga

SEQ ID NO: 1267905 - DNA, 15 bp, Homo sapiens
tcaaaacgttttaag

SEQ ID NO: 1267906 - DNA, 15 bp, Homo sapiens
ttcaaaacgttttaa

SEQ ID NO: 1267907 - DNA, 15 bp, Homo sapiens
tttcaaaacgtttta

SEQ ID NO: 1267908 - DNA, 15 bp, Homo sapiens
atttcaaaacgtttt

SEQ ID NO: 1267909 - DNA, 15 bp, Homo sapiens
aatttcaaaacgttt

SEQ ID NO: 1267910 - DNA, 15 bp, Homo sapiens
aaatttcaaaacgtt

SEQ ID NO: 1267911 - DNA, 15 bp, Homo sapiens
aaaatttcaaaacgt

SEQ ID NO: 1267912 - DNA, 15 bp, Homo sapiens
aaaaatttcaaaacg

SEQ ID NO: 1267913 - DNA, 15 bp, Homo sapiens
aaaaaatttcaaaac

SEQ ID NO: 1267914 - DNA, 15 bp, Homo sapiens
gaaaaaaaaatttca

SEQ ID NO: 1267915 - DNA, 15 bp, Homo sapiens
agaaaaaaaaatttc

SEQ ID NO: 1267916 - DNA, 15 bp, Homo sapiens
gagaaaaaaaaattt

SEQ ID NO: 1267917 - DNA, 15 bp, Homo sapiens
tgagaaaaaaaaatt

SEQ ID NO: 1267918 - DNA, 15 bp, Homo sapiens
atgagaaaaaaaaat

SEQ ID NO: 1267919 - DNA, 15 bp, Homo sapiens
aatgagaaaaaaaaa

SEQ ID NO: 1267920 - DNA, 15 bp, Homo sapiens
aaatgagaaaaaaaa

SEQ ID NO: 1267921 - DNA, 15 bp, Homo sapiens
aaaatgagaaaaaaa

SEQ ID NO: 1267922 - DNA, 15 bp, Homo sapiens
taaaatgagaaaaaa

SEQ ID NO: 1267923 - DNA, 15 bp, Homo sapiens
ttaaaatgagaaaaa

SEQ ID NO: 1267924 - DNA, 15 bp, Homo sapiens
tttaaaatgagaaaa

SEQ ID NO: 1267925 - DNA, 15 bp, Homo sapiens
ttttaaaatgagaaa

SEQ ID NO: 1267926 - DNA, 15 bp, Homo sapiens
tttttaaaatgagaa

SEQ ID NO: 1267927 - DNA, 15 bp, Homo sapiens
gtttttaaaatgaga

SEQ ID NO: 1267928 - DNA, 15 bp, Homo sapiens
tgtttttaaaatgag

SEQ ID NO: 1267929 - DNA, 15 bp, Homo sapiens
ttgtttttaaaatga

SEQ ID NO: 1267930 - DNA, 15 bp, Homo sapiens
gttgtttttaaaatg

SEQ ID NO: 1267931 - DNA, 15 bp, Homo sapiens
agttgtttttaaaat

SEQ ID NO: 1267932 - DNA, 15 bp, Homo sapiens
aagttgtttttaaaa

SEQ ID NO: 1267933 - DNA, 15 bp, Homo sapiens
gaagttgtttttaaa

SEQ ID NO: 1267934 - DNA, 15 bp, Homo sapiens
tgaagttgtttttaa

SEQ ID NO: 1267935 - DNA, 15 bp, Homo sapiens
ttgaagttgttttta

SEQ ID NO: 1267936 - DNA, 15 bp, Homo sapiens
tttgaagttgttttt

SEQ ID NO: 1267937 - DNA, 15 bp, Homo sapiens
atttgaagttgtttt

SEQ ID NO: 1267938 - DNA, 15 bp, Homo sapiens
gatttgaagttgttt

SEQ ID NO: 1267939 - DNA, 15 bp, Homo sapiens
tgatttgaagttgtt

SEQ ID NO: 1267940 - DNA, 15 bp, Homo sapiens
gtgatttgaagttgt

SEQ ID NO: 1267941 - DNA, 15 bp, Homo sapiens
agtgatttgaagttg

SEQ ID NO: 1267942 - DNA, 15 bp, Homo sapiens
tagtgatttgaagtt

SEQ ID NO: 1267943 - DNA, 15 bp, Homo sapiens
atagtgatttgaagt

SEQ ID NO: 1267944 - DNA, 15 bp, Homo sapiens
tatagtgatttgaag

SEQ ID NO: 1267945 - DNA, 15 bp, Homo sapiens
gtatagtgatttgaa

SEQ ID NO: 1267946 - DNA, 15 bp, Homo sapiens
tgtatagtgatttga

SEQ ID NO: 1267947 - DNA, 15 bp, Homo sapiens
ttgtatagtgatttg

SEQ ID NO: 1267948 - DNA, 15 bp, Homo sapiens
tttgtatagtgattt

SEQ ID NO: 1267949 - DNA, 15 bp, Homo sapiens
ttttgtatagtgatt

SEQ ID NO: 1267950 - DNA, 15 bp, Homo sapiens
tttttgtatagtgat

SEQ ID NO: 1267951 - DNA, 15 bp, Homo sapiens
atttttgtatagtga

SEQ ID NO: 1267952 - DNA, 15 bp, Homo sapiens
aatttttgtatagtg

SEQ ID NO: 1267953 - DNA, 15 bp, Homo sapiens
caatttttgtatagt

SEQ ID NO: 1267954 - DNA, 15 bp, Homo sapiens
tcaatttttgtatag

SEQ ID NO: 1267955 - DNA, 15 bp, Homo sapiens
ttcaatttttgtata

SEQ ID NO: 1267956 - DNA, 15 bp, Homo sapiens
tttcaatttttgtat

SEQ ID NO: 1267957 - DNA, 15 bp, Homo sapiens
ctttcaatttttgta

SEQ ID NO: 1267958 - DNA, 15 bp, Homo sapiens
tctttcaatttttgt

SEQ ID NO: 1267959 - DNA, 15 bp, Homo sapiens
atctttcaatttttg

SEQ ID NO: 1267960 - DNA, 15 bp, Homo sapiens
ctatctttcaatttt

SEQ ID NO: 1267961 - DNA, 15 bp, Homo sapiens
tctatctttcaattt

SEQ ID NO: 1267962 - DNA, 15 bp, Homo sapiens
ttctatctttcaatt

SEQ ID NO: 1267963 - DNA, 15 bp, Homo sapiens
tttctatctttcaat

SEQ ID NO: 1267964 - DNA, 15 bp, Homo sapiens
ttttctatctttcaa

SEQ ID NO: 1267965 - DNA, 15 bp, Homo sapiens
tttttctatctttca

SEQ ID NO: 1267966 - DNA, 15 bp, Homo sapiens
atttttctatctttc

SEQ ID NO: 1267967 - DNA, 15 bp, Homo sapiens
tatttttctatcttt

SEQ ID NO: 1267968 - DNA, 15 bp, Homo sapiens
atatttttctatctt

SEQ ID NO: 1267969 - DNA, 15 bp, Homo sapiens
tatatttttctatct

SEQ ID NO: 1267970 - DNA, 15 bp, Homo sapiens
ttatatttttctatc

SEQ ID NO: 1267971 - DNA, 15 bp, Homo sapiens
tttatatttttctat

SEQ ID NO: 1267972 - DNA, 15 bp, Homo sapiens
ctttatatttttcta

SEQ ID NO: 1267973 - DNA, 15 bp, Homo sapiens
tctttatatttttct

SEQ ID NO: 1267974 - DNA, 15 bp, Homo sapiens
gtctttatatttttc

SEQ ID NO: 1267975 - DNA, 15 bp, Homo sapiens
tgtctttatattttt

SEQ ID NO: 1267976 - DNA, 15 bp, Homo sapiens
ttgtctttatatttt

SEQ ID NO: 1267977 - DNA, 15 bp, Homo sapiens
attgtctttatattt

SEQ ID NO: 1267978 - DNA, 15 bp, Homo sapiens
tattgtctttatatt

SEQ ID NO: 1267979 - DNA, 15 bp, Homo sapiens
ttattgtctttatat

SEQ ID NO: 1267980 - DNA, 15 bp, Homo sapiens
tttattgtctttata

SEQ ID NO: 1267981 - DNA, 15 bp, Homo sapiens
ttttattgtctttat

SEQ ID NO: 1267982 - DNA, 15 bp, Homo sapiens
cttttattgtcttta

SEQ ID NO: 1267983 - DNA, 15 bp, Homo sapiens
gcttttattgtcttt

SEQ ID NO: 1267984 - DNA, 15 bp, Homo sapiens
agcttttattgtctt

SEQ ID NO: 1267985 - DNA, 15 bp, Homo sapiens
tagcttttattgtct

SEQ ID NO: 1267986 - DNA, 15 bp, Homo sapiens
ttagcttttattgtc

SEQ ID NO: 1267987 - DNA, 15 bp, Homo sapiens
attagcttttattgt

SEQ ID NO: 1267988 - DNA, 15 bp, Homo sapiens
tattagcttttattg

SEQ ID NO: 1267989 - DNA, 15 bp, Homo sapiens
ttattagcttttatt

SEQ ID NO: 1267990 - DNA, 15 bp, Homo sapiens
attattagcttttat

SEQ ID NO: 1267991 - DNA, 15 bp, Homo sapiens
tattattagctttta

SEQ ID NO: 1267992 - DNA, 15 bp, Homo sapiens
ttattattagctttt

SEQ ID NO: 1267993 - DNA, 15 bp, Homo sapiens
attattattagcttt

SEQ ID NO: 1267994 - DNA, 15 bp, Homo sapiens
aattattattagctt

SEQ ID NO: 1267995 - DNA, 15 bp, Homo sapiens
gaattattattagct

SEQ ID NO: 1267996 - DNA, 15 bp, Homo sapiens
ggaattattattagc

SEQ ID NO: 1267997 - DNA, 15 bp, Homo sapiens
tggaattattattag

SEQ ID NO: 1267998 - DNA, 15 bp, Homo sapiens
atggaattattatta

SEQ ID NO: 1267999 - DNA, 15 bp, Homo sapiens
aatggaattattatt

SEQ ID NO: 1268000 - DNA, 15 bp, Homo sapiens
taatggaattattat

SEQ ID NO: 1268001 - DNA, 15 bp, Homo sapiens
gtaatggaattatta

SEQ ID NO: 1268002 - DNA, 15 bp, Homo sapiens
ggtaatggaattatt

SEQ ID NO: 1268003 - DNA, 15 bp, Homo sapiens
gggtaatggaattat

SEQ ID NO: 1268004 - DNA, 15 bp, Homo sapiens
tgggtaatggaatta

SEQ ID NO: 1268005 - DNA, 15 bp, Homo sapiens
ctgggtaatggaatt

SEQ ID NO: 1268006 - DNA, 15 bp, Homo sapiens
tctgggtaatggaat

SEQ ID NO: 1268007 - DNA, 15 bp, Homo sapiens
ctctgggtaatggaa

SEQ ID NO: 1268008 - DNA, 15 bp, Homo sapiens
cctctgggtaatgga

SEQ ID NO: 1268009 - DNA, 15 bp, Homo sapiens
tcctctgggtaatgg

SEQ ID NO: 1268010 - DNA, 15 bp, Homo sapiens
ttcctctgggtaatg

SEQ ID NO: 1268011 - DNA, 15 bp, Homo sapiens
tttcctctgggtaat

SEQ ID NO: 1268012 - DNA, 15 bp, Homo sapiens
atttcctctgggtaa

SEQ ID NO: 1268013 - DNA, 15 bp, Homo sapiens
aatttcctctgggta

SEQ ID NO: 1268014 - DNA, 15 bp, Homo sapiens
aaatttcctctgggt

SEQ ID NO: 1268015 - DNA, 15 bp, Homo sapiens
taaatttcctctggg

SEQ ID NO: 1268016 - DNA, 15 bp, Homo sapiens
gtaaatttcctctgg

SEQ ID NO: 1268017 - DNA, 15 bp, Homo sapiens
ggtaaatttcctctg

SEQ ID NO: 1268018 - DNA, 15 bp, Homo sapiens
aggtaaatttcctct

SEQ ID NO: 1268019 - DNA, 15 bp, Homo sapiens
gaggtaaatttcctc

SEQ ID NO: 1268020 - DNA, 15 bp, Homo sapiens
agaggtaaatttcct

SEQ ID NO: 1268021 - DNA, 15 bp, Homo sapiens
cagaggtaaatttcc

SEQ ID NO: 1268022 - DNA, 15 bp, Homo sapiens
gcagaggtaaatttc

SEQ ID NO: 1268023 - DNA, 15 bp, Homo sapiens
agcagaggtaaattt

SEQ ID NO: 1268024 - DNA, 15 bp, Homo sapiens
tagcagaggtaaatt

SEQ ID NO: 1268025 - DNA, 15 bp, Homo sapiens
ttagcagaggtaaat

SEQ ID NO: 1268026 - DNA, 15 bp, Homo sapiens
gttagcagaggtaaa

SEQ ID NO: 1268027 - DNA, 15 bp, Homo sapiens
tgttagcagaggtaa

SEQ ID NO: 1268028 - DNA, 15 bp, Homo sapiens
atgttagcagaggta

SEQ ID NO: 1268029 - DNA, 15 bp, Homo sapiens
aatgttagcagaggt

SEQ ID NO: 1268030 - DNA, 15 bp, Homo sapiens
taatgttagcagagg

SEQ ID NO: 1268031 - DNA, 15 bp, Homo sapiens
ttaatgttagcagag

SEQ ID NO: 1268032 - DNA, 15 bp, Homo sapiens
tttaatgttagcaga

SEQ ID NO: 1268033 - DNA, 15 bp, Homo sapiens
ttttaatgttagcag

SEQ ID NO: 1268034 - DNA, 15 bp, Homo sapiens
tttttaatgttagca

SEQ ID NO: 1268035 - DNA, 15 bp, Homo sapiens
atttttaatgttagc

SEQ ID NO: 1268036 - DNA, 15 bp, Homo sapiens
catttttaatgttag

SEQ ID NO: 1268037 - DNA, 15 bp, Homo sapiens
acatttttaatgtta

SEQ ID NO: 1268038 - DNA, 15 bp, Homo sapiens
aacatttttaatgtt

SEQ ID NO: 1268039 - DNA, 15 bp, Homo sapiens
aaacatttttaatgt

SEQ ID NO: 1268040 - DNA, 15 bp, Homo sapiens
caaacatttttaatg

SEQ ID NO: 1268041 - DNA, 15 bp, Homo sapiens
tcaaacatttttaat

SEQ ID NO: 1268042 - DNA, 15 bp, Homo sapiens
ctcaaacatttttaa

SEQ ID NO: 1268043 - DNA, 15 bp, Homo sapiens
cctcaaacattttta

SEQ ID NO: 1268044 - DNA, 15 bp, Homo sapiens
gcctcaaacattttt

SEQ ID NO: 1268045 - DNA, 15 bp, Homo sapiens
ggcctcaaacatttt

SEQ ID NO: 1268046 - DNA, 15 bp, Homo sapiens
cggcctcaaacattt

SEQ ID NO: 1268047 - DNA, 15 bp, Homo sapiens
ccggcctcaaacatt

SEQ ID NO: 1268048 - DNA, 15 bp, Homo sapiens
cccggcctcaaacat

SEQ ID NO: 1268049 - DNA, 15 bp, Homo sapiens
gcccggcctcaaaca

SEQ ID NO: 1268050 - DNA, 15 bp, Homo sapiens
tgcccggcctcaaac

SEQ ID NO: 1268051 - DNA, 15 bp, Homo sapiens
gtgcccggcctcaaa

SEQ ID NO: 1268052 - DNA, 15 bp, Homo sapiens
cgtgcccggcctcaa

SEQ ID NO: 1268053 - DNA, 15 bp, Homo sapiens
ccgtgcccggcctca

SEQ ID NO: 1268054 - DNA, 15 bp, Homo sapiens
accgtgcccggcctc

SEQ ID NO: 1268055 - DNA, 15 bp, Homo sapiens
atgaaccaccgtgcc

SEQ ID NO: 1268056 - DNA, 15 bp, Homo sapiens
catgaaccaccgtgc

SEQ ID NO: 1268057 - DNA, 15 bp, Homo sapiens
gcatgaaccaccgtg

SEQ ID NO: 1268058 - DNA, 15 bp, Homo sapiens
ggcatgaaccaccgt

SEQ ID NO: 1268059 - DNA, 15 bp, Homo sapiens
aggcatgaaccaccg

SEQ ID NO: 1268060 - DNA, 15 bp, Homo sapiens
gtaggattacaggca

SEQ ID NO: 1268061 - DNA, 15 bp, Homo sapiens
ggtaggattacaggc

SEQ ID NO: 1268062 - DNA, 15 bp, Homo sapiens
tggtaggattacagg

SEQ ID NO: 1268063 - DNA, 15 bp, Homo sapiens
gtggtaggattacag

SEQ ID NO: 1268064 - DNA, 15 bp, Homo sapiens
agtggtaggattaca

SEQ ID NO: 1268065 - DNA, 15 bp, Homo sapiens
aagtggtaggattac

SEQ ID NO: 1268066 - DNA, 15 bp, Homo sapiens
aaagtggtaggatta

SEQ ID NO: 1268067 - DNA, 15 bp, Homo sapiens
caaagtggtaggatt

SEQ ID NO: 1268068 - DNA, 15 bp, Homo sapiens
ccaaagtggtaggat

SEQ ID NO: 1268069 - DNA, 15 bp, Homo sapiens
cccaaagtggtagga

SEQ ID NO: 1268070 - DNA, 15 bp, Homo sapiens
tcccaaagtggtagg

SEQ ID NO: 1268071 - DNA, 15 bp, Homo sapiens
ctcccaaagtggtag

SEQ ID NO: 1268072 - DNA, 15 bp, Homo sapiens
cctcccaaagtggta

SEQ ID NO: 1268073 - DNA, 15 bp, Homo sapiens
gcctcccaaagtggt

SEQ ID NO: 1268074 - DNA, 15 bp, Homo sapiens
agcctcccaaagtgg

SEQ ID NO: 1268075 - DNA, 15 bp, Homo sapiens
aatccacctgcctca

SEQ ID NO: 1268076 - DNA, 15 bp, Homo sapiens
tttttttgtatttta

SEQ ID NO: 1268077 - DNA, 15 bp, Homo sapiens
tttttttttgtattt

SEQ ID NO: 1268078 - DNA, 15 bp, Homo sapiens
tgctaattttttttt

SEQ ID NO: 1268079 - DNA, 15 bp, Homo sapiens
ctgctaatttttttt

SEQ ID NO: 1268080 - DNA, 15 bp, Homo sapiens
cctgctaattttttt

SEQ ID NO: 1268081 - DNA, 15 bp, Homo sapiens
ccctgctaatttttt

SEQ ID NO: 1268082 - DNA, 15 bp, Homo sapiens
accctgctaattttt

SEQ ID NO: 1268083 - DNA, 15 bp, Homo sapiens
gccacaccctgctaa

SEQ ID NO: 1268084 - DNA, 15 bp, Homo sapiens
cgccacaccctgcta

SEQ ID NO: 1268085 - DNA, 15 bp, Homo sapiens
acgccacaccctgct

SEQ ID NO: 1268086 - DNA, 15 bp, Homo sapiens
cacgccacaccctgc

SEQ ID NO: 1268087 - DNA, 15 bp, Homo sapiens
gcacgccacaccctg

SEQ ID NO: 1268088 - DNA, 15 bp, Homo sapiens
cgcacgccacaccct

SEQ ID NO: 1268089 - DNA, 15 bp, Homo sapiens
gcgcacgccacaccc

SEQ ID NO: 1268090 - DNA, 15 bp, Homo sapiens
ggcgcacgccacacc

SEQ ID NO: 1268091 - DNA, 15 bp, Homo sapiens
aggcgcacgccacac

SEQ ID NO: 1268092 - DNA, 15 bp, Homo sapiens
caggcgcacgccaca

SEQ ID NO: 1268093 - DNA, 15 bp, Homo sapiens
gcttcccaaatagct

SEQ ID NO: 1268094 - DNA, 15 bp, Homo sapiens
agcttcccaaatagc

SEQ ID NO: 1268095 - DNA, 15 bp, Homo sapiens
cagcttcccaaatag

SEQ ID NO: 1268096 - DNA, 15 bp, Homo sapiens
tcagcttcccaaata

SEQ ID NO: 1268097 - DNA, 15 bp, Homo sapiens
ctcagcttcccaaat

SEQ ID NO: 1268098 - DNA, 15 bp, Homo sapiens
taacctccacctcct

SEQ ID NO: 1268099 - DNA, 15 bp, Homo sapiens
gtaacctccacctcc

SEQ ID NO: 1268100 - DNA, 15 bp, Homo sapiens
tgtaacctccacctc

SEQ ID NO: 1268101 - DNA, 15 bp, Homo sapiens
ctgtaacctccacct

SEQ ID NO: 1268102 - DNA, 15 bp, Homo sapiens
actgtaacctccacc

SEQ ID NO: 1268103 - DNA, 15 bp, Homo sapiens
cactgtaacctccac

SEQ ID NO: 1268104 - DNA, 15 bp, Homo sapiens
tcactgtaacctcca

SEQ ID NO: 1268105 - DNA, 15 bp, Homo sapiens
cggctcactgtaacc

SEQ ID NO: 1268106 - DNA, 15 bp, Homo sapiens
tcggctcactgtaac

SEQ ID NO: 1268107 - DNA, 15 bp, Homo sapiens
gttgccaggctggag

SEQ ID NO: 1268108 - DNA, 15 bp, Homo sapiens
tgttgccaggctgga

SEQ ID NO: 1268109 - DNA, 15 bp, Homo sapiens
ctgttgccaggctgg

SEQ ID NO: 1268110 - DNA, 15 bp, Homo sapiens
tctgttgccaggctg

SEQ ID NO: 1268111 - DNA, 15 bp, Homo sapiens
ctctcgctctgttgc

SEQ ID NO: 1268112 - DNA, 15 bp, Homo sapiens
actctcgctctgttg

SEQ ID NO: 1268113 - DNA, 15 bp, Homo sapiens
gactctcgctctgtt

SEQ ID NO: 1268114 - DNA, 15 bp, Homo sapiens
agactctcgctctgt

SEQ ID NO: 1268115 - DNA, 15 bp, Homo sapiens
cagactctcgctctg

SEQ ID NO: 1268116 - DNA, 15 bp, Homo sapiens
acagactctcgctct

SEQ ID NO: 1268117 - DNA, 15 bp, Homo sapiens
gacagactctcgctc

SEQ ID NO: 1268118 - DNA, 15 bp, Homo sapiens
agacagactctcgct

SEQ ID NO: 1268119 - DNA, 15 bp, Homo sapiens
gagacagactctcgc

SEQ ID NO: 1268120 - DNA, 15 bp, Homo sapiens
tgagacagactctcg

SEQ ID NO: 1268121 - DNA, 15 bp, Homo sapiens
ttgagacagactctc

SEQ ID NO: 1268122 - DNA, 15 bp, Homo sapiens
tttgagacagactct

SEQ ID NO: 1268123 - DNA, 15 bp, Homo sapiens
ttttgagacagactc

SEQ ID NO: 1268124 - DNA, 15 bp, Homo sapiens
tttttgagacagact

SEQ ID NO: 1268125 - DNA, 15 bp, Homo sapiens
ttttttgagacagac

SEQ ID NO: 1268126 - DNA, 15 bp, Homo sapiens
ttttcaaactttttt

SEQ ID NO: 1268127 - DNA, 15 bp, Homo sapiens
tttttcaaacttttt

SEQ ID NO: 1268128 - DNA, 15 bp, Homo sapiens
ttttttcaaactttt

SEQ ID NO: 1268129 - DNA, 15 bp, Homo sapiens
tttttttcaaacttt

SEQ ID NO: 1268130 - DNA, 15 bp, Homo sapiens
atttttttcaaactt

SEQ ID NO: 1268131 - DNA, 15 bp, Homo sapiens
aatttttttcaaact

SEQ ID NO: 1268132 - DNA, 15 bp, Homo sapiens
gaatttttttcaaac

SEQ ID NO: 1268133 - DNA, 15 bp, Homo sapiens
ggaatttttttcaaa

SEQ ID NO: 1268134 - DNA, 15 bp, Homo sapiens
aggaatttttttcaa

SEQ ID NO: 1268135 - DNA, 15 bp, Homo sapiens
gaggaatttttttca

SEQ ID NO: 1268136 - DNA, 15 bp, Homo sapiens
ggaggaatttttttc

SEQ ID NO: 1268137 - DNA, 15 bp, Homo sapiens
tggaggaattttttt

SEQ ID NO: 1268138 - DNA, 15 bp, Homo sapiens
atggaggaatttttt

SEQ ID NO: 1268139 - DNA, 15 bp, Homo sapiens
tatggaggaattttt

SEQ ID NO: 1268140 - DNA, 15 bp, Homo sapiens
ttatggaggaatttt

SEQ ID NO: 1268141 - DNA, 15 bp, Homo sapiens
tttatggaggaattt

SEQ ID NO: 1268142 - DNA, 15 bp, Homo sapiens
atttatggaggaatt

SEQ ID NO: 1268143 - DNA, 15 bp, Homo sapiens
catttatggaggaat

SEQ ID NO: 1268144 - DNA, 15 bp, Homo sapiens
gcatttatggaggaa

SEQ ID NO: 1268145 - DNA, 15 bp, Homo sapiens
ggcatttatggagga

SEQ ID NO: 1268146 - DNA, 15 bp, Homo sapiens
aggcatttatggagg

SEQ ID NO: 1268147 - DNA, 15 bp, Homo sapiens
gaggcatttatggag

SEQ ID NO: 1268148 - DNA, 15 bp, Homo sapiens
ggaggcatttatgga

SEQ ID NO: 1268149 - DNA, 15 bp, Homo sapiens
gggaggcatttatgg

SEQ ID NO: 1268150 - DNA, 15 bp, Homo sapiens
tgggaggcatttatg

SEQ ID NO: 1268151 - DNA, 15 bp, Homo sapiens
gtgggaggcatttat

SEQ ID NO: 1268152 - DNA, 15 bp, Homo sapiens
ggtgggaggcattta

SEQ ID NO: 1268153 - DNA, 15 bp, Homo sapiens
tggtgggaggcattt

SEQ ID NO: 1268154 - DNA, 15 bp, Homo sapiens
ttggtgggaggcatt

SEQ ID NO: 1268155 - DNA, 15 bp, Homo sapiens
tttggtgggaggcat

SEQ ID NO: 1268156 - DNA, 15 bp, Homo sapiens
gtttggtgggaggca

SEQ ID NO: 1268157 - DNA, 15 bp, Homo sapiens
agtttggtgggaggc

SEQ ID NO: 1268158 - DNA, 15 bp, Homo sapiens
tagtttggtgggagg

SEQ ID NO: 1268159 - DNA, 15 bp, Homo sapiens
atagtttggtgggag

SEQ ID NO: 1268160 - DNA, 15 bp, Homo sapiens
aatagtttggtggga

SEQ ID NO: 1268161 - DNA, 15 bp, Homo sapiens
aaatagtttggtggg

SEQ ID NO: 1268162 - DNA, 15 bp, Homo sapiens
aaaatagtttggtgg

SEQ ID NO: 1268163 - DNA, 15 bp, Homo sapiens
taaaatagtttggtg

SEQ ID NO: 1268164 - DNA, 15 bp, Homo sapiens
ttaaaatagtttggt

SEQ ID NO: 1268165 - DNA, 15 bp, Homo sapiens
tttaaaatagtttgg

SEQ ID NO: 1268166 - DNA, 15 bp, Homo sapiens
ctttaaaatagtttg

SEQ ID NO: 1268167 - DNA, 15 bp, Homo sapiens
gctttaaaatagttt

SEQ ID NO: 1268168 - DNA, 15 bp, Homo sapiens
tgctttaaaatagtt

SEQ ID NO: 1268169 - DNA, 15 bp, Homo sapiens
ctgctttaaaatagt

SEQ ID NO: 1268170 - DNA, 15 bp, Homo sapiens
cctgctttaaaatag

SEQ ID NO: 1268171 - DNA, 15 bp, Homo sapiens
acctgctttaaaata

SEQ ID NO: 1268172 - DNA, 15 bp, Homo sapiens
gacctgctttaaaat

SEQ ID NO: 1268173 - DNA, 15 bp, Homo sapiens
agacctgctttaaaa

SEQ ID NO: 1268174 - DNA, 15 bp, Homo sapiens
aagacctgctttaaa

SEQ ID NO: 1268175 - DNA, 15 bp, Homo sapiens
taagacctgctttaa

SEQ ID NO: 1268176 - DNA, 15 bp, Homo sapiens
ctaagacctgcttta

SEQ ID NO: 1268177 - DNA, 15 bp, Homo sapiens
actaagacctgcttt

SEQ ID NO: 1268178 - DNA, 15 bp, Homo sapiens
aactaagacctgctt

SEQ ID NO: 1268179 - DNA, 15 bp, Homo sapiens
taactaagacctgct

SEQ ID NO: 1268180 - DNA, 15 bp, Homo sapiens
ataactaagacctgc

SEQ ID NO: 1268181 - DNA, 15 bp, Homo sapiens
tataactaagacctg

SEQ ID NO: 1268182 - DNA, 15 bp, Homo sapiens
atataactaagacct

SEQ ID NO: 1268183 - DNA, 15 bp, Homo sapiens
aatataactaagacc

SEQ ID NO: 1268184 - DNA, 15 bp, Homo sapiens
aaatataactaagac

SEQ ID NO: 1268185 - DNA, 15 bp, Homo sapiens
aaaatataactaaga

SEQ ID NO: 1268186 - DNA, 15 bp, Homo sapiens
taaaatataactaag

SEQ ID NO: 1268187 - DNA, 15 bp, Homo sapiens
ataaaatataactaa

SEQ ID NO: 1268188 - DNA, 15 bp, Homo sapiens
aataaaatataacta

SEQ ID NO: 1268189 - DNA, 15 bp, Homo sapiens
gaataaaatataact

SEQ ID NO: 1268190 - DNA, 15 bp, Homo sapiens
tgaataaaatataac

SEQ ID NO: 1268191 - DNA, 15 bp, Homo sapiens
gtgaataaaatataa

SEQ ID NO: 1268192 - DNA, 15 bp, Homo sapiens
agtgaataaaatata

SEQ ID NO: 1268193 - DNA, 15 bp, Homo sapiens
tagtgaataaaatat

SEQ ID NO: 1268194 - DNA, 15 bp, Homo sapiens
atagtgaataaaata

SEQ ID NO: 1268195 - DNA, 15 bp, Homo sapiens
catagtgaataaaat

SEQ ID NO: 1268196 - DNA, 15 bp, Homo sapiens
tcatagtgaataaaa

SEQ ID NO: 1268197 - DNA, 15 bp, Homo sapiens
atcatagtgaataaa

SEQ ID NO: 1268198 - DNA, 15 bp, Homo sapiens
tatcatagtgaataa

SEQ ID NO: 1268199 - DNA, 15 bp, Homo sapiens
gtatcatagtgaata

SEQ ID NO: 1268200 - DNA, 15 bp, Homo sapiens
tgtatcatagtgaat

SEQ ID NO: 1268201 - DNA, 15 bp, Homo sapiens
ttgtatcatagtgaa

SEQ ID NO: 1268202 - DNA, 15 bp, Homo sapiens
cttgtatcatagtga

SEQ ID NO: 1268203 - DNA, 15 bp, Homo sapiens
ccttgtatcatagtg

SEQ ID NO: 1268204 - DNA, 15 bp, Homo sapiens
agctttaaaatacac

SEQ ID NO: 1268205 - DNA, 15 bp, Homo sapiens
aagctttaaaataca

SEQ ID NO: 1268206 - DNA, 15 bp, Homo sapiens
aaagctttaaaatac

SEQ ID NO: 1268207 - DNA, 15 bp, Homo sapiens
taaagctttaaaata

SEQ ID NO: 1268208 - DNA, 15 bp, Homo sapiens
ataaagctttaaaat

SEQ ID NO: 1268209 - DNA, 15 bp, Homo sapiens
gataaagctttaaaa

SEQ ID NO: 1268210 - DNA, 15 bp, Homo sapiens
ggataaagctttaaa

SEQ ID NO: 1268211 - DNA, 15 bp, Homo sapiens
aggataaagctttaa

SEQ ID NO: 1268212 - DNA, 15 bp, Homo sapiens
aaggataaagcttta

SEQ ID NO: 1268213 - DNA, 15 bp, Homo sapiens
caaggataaagcttt

SEQ ID NO: 1268214 - DNA, 15 bp, Homo sapiens
ccaaggataaagctt

SEQ ID NO: 1268215 - DNA, 15 bp, Homo sapiens
cccaaggataaagct

SEQ ID NO: 1268216 - DNA, 15 bp, Homo sapiens
acccaaggataaagc

SEQ ID NO: 1268217 - DNA, 15 bp, Homo sapiens
tacccaaggataaag

SEQ ID NO: 1268218 - DNA, 15 bp, Homo sapiens
gtacccaaggataaa

SEQ ID NO: 1268219 - DNA, 15 bp, Homo sapiens
tgtacccaaggataa

SEQ ID NO: 1268220 - DNA, 15 bp, Homo sapiens
atgtacccaaggata

SEQ ID NO: 1268221 - DNA, 15 bp, Homo sapiens
tatgtacccaaggat

SEQ ID NO: 1268222 - DNA, 15 bp, Homo sapiens
gtatgtacccaagga

SEQ ID NO: 1268223 - DNA, 15 bp, Homo sapiens
tgtatgtacccaagg

SEQ ID NO: 1268224 - DNA, 15 bp, Homo sapiens
ttgtatgtacccaag

SEQ ID NO: 1268225 - DNA, 15 bp, Homo sapiens
cttgtatgtacccaa

SEQ ID NO: 1268226 - DNA, 15 bp, Homo sapiens
acttgtatgtaccca

SEQ ID NO: 1268227 - DNA, 15 bp, Homo sapiens
aacttgtatgtaccc

SEQ ID NO: 1268228 - DNA, 15 bp, Homo sapiens
aaacttgtatgtacc

SEQ ID NO: 1268229 - DNA, 15 bp, Homo sapiens
taaacttgtatgtac

SEQ ID NO: 1268230 - DNA, 15 bp, Homo sapiens
ctaaacttgtatgta

SEQ ID NO: 1268231 - DNA, 15 bp, Homo sapiens
tctaaacttgtatgt

SEQ ID NO: 1268232 - DNA, 15 bp, Homo sapiens
ttctaaacttgtatg

SEQ ID NO: 1268233 - DNA, 15 bp, Homo sapiens
attctaaacttgtat

SEQ ID NO: 1268234 - DNA, 15 bp, Homo sapiens
aattctaaacttgta

SEQ ID NO: 1268235 - DNA, 15 bp, Homo sapiens
aaattctaaacttgt

SEQ ID NO: 1268236 - DNA, 15 bp, Homo sapiens
aaaattctaaacttg

SEQ ID NO: 1268237 - DNA, 15 bp, Homo sapiens
aaaaattctaaactt

SEQ ID NO: 1268238 - DNA, 15 bp, Homo sapiens
taaaaattctaaact

SEQ ID NO: 1268239 - DNA, 15 bp, Homo sapiens
ataaaaattctaaac

SEQ ID NO: 1268240 - DNA, 15 bp, Homo sapiens
cataaaaattctaaa

SEQ ID NO: 1268241 - DNA, 15 bp, Homo sapiens
gcataaaaattctaa

SEQ ID NO: 1268242 - DNA, 15 bp, Homo sapiens
ggcataaaaattcta

SEQ ID NO: 1268243 - DNA, 15 bp, Homo sapiens
aggcataaaaattct

SEQ ID NO: 1268244 - DNA, 15 bp, Homo sapiens
aaggcataaaaattc

SEQ ID NO: 1268245 - DNA, 15 bp, Homo sapiens
aaaggcataaaaatt

SEQ ID NO: 1268246 - DNA, 15 bp, Homo sapiens
aaaaggcataaaaat

SEQ ID NO: 1268247 - DNA, 15 bp, Homo sapiens
taaaaggcataaaaa

SEQ ID NO: 1268248 - DNA, 15 bp, Homo sapiens
ctaaaaggcataaaa

SEQ ID NO: 1268249 - DNA, 15 bp, Homo sapiens
cctaaaaggcataaa

SEQ ID NO: 1268250 - DNA, 15 bp, Homo sapiens
acctaaaaggcataa

SEQ ID NO: 1268251 - DNA, 15 bp, Homo sapiens
tacctaaaaggcata

SEQ ID NO: 1268252 - DNA, 15 bp, Homo sapiens
ttacctaaaaggcat

SEQ ID NO: 1268253 - DNA, 15 bp, Homo sapiens
tttacctaaaaggca

SEQ ID NO: 1268254 - DNA, 15 bp, Homo sapiens
atttacctaaaaggc

SEQ ID NO: 1268255 - DNA, 15 bp, Homo sapiens
aatttacctaaaagg

SEQ ID NO: 1268256 - DNA, 15 bp, Homo sapiens
caatttacctaaaag

SEQ ID NO: 1268257 - DNA, 15 bp, Homo sapiens
ccaatttacctaaaa

SEQ ID NO: 1268258 - DNA, 15 bp, Homo sapiens
accaatttacctaaa

SEQ ID NO: 1268259 - DNA, 15 bp, Homo sapiens
taccaatttacctaa

SEQ ID NO: 1268260 - DNA, 15 bp, Homo sapiens
gtaccaatttaccta

SEQ ID NO: 1268261 - DNA, 15 bp, Homo sapiens
ggtaccaatttacct

SEQ ID NO: 1268262 - DNA, 15 bp, Homo sapiens
aggtaccaatttacc

SEQ ID NO: 1268263 - DNA, 15 bp, Homo sapiens
aaggtaccaatttac

SEQ ID NO: 1268264 - DNA, 15 bp, Homo sapiens
aaaggtaccaattta

SEQ ID NO: 1268265 - DNA, 15 bp, Homo sapiens
taaaggtaccaattt

SEQ ID NO: 1268266 - DNA, 15 bp, Homo sapiens
ataaaggtaccaatt

SEQ ID NO: 1268267 - DNA, 15 bp, Homo sapiens
gataaaggtaccaat

SEQ ID NO: 1268268 - DNA, 15 bp, Homo sapiens
tgataaaggtaccaa

SEQ ID NO: 1268269 - DNA, 15 bp, Homo sapiens
atgataaaggtacca

SEQ ID NO: 1268270 - DNA, 15 bp, Homo sapiens
aatgataaaggtacc

SEQ ID NO: 1268271 - DNA, 15 bp, Homo sapiens
taatgataaaggtac

SEQ ID NO: 1268272 - DNA, 15 bp, Homo sapiens
ataatgataaaggta

SEQ ID NO: 1268273 - DNA, 15 bp, Homo sapiens
cataatgataaaggt

SEQ ID NO: 1268274 - DNA, 15 bp, Homo sapiens
acataatgataaagg

SEQ ID NO: 1268275 - DNA, 15 bp, Homo sapiens
tacataatgataaag

SEQ ID NO: 1268276 - DNA, 15 bp, Homo sapiens
ttacataatgataaa

SEQ ID NO: 1268277 - DNA, 15 bp, Homo sapiens
attacataatgataa

SEQ ID NO: 1268278 - DNA, 15 bp, Homo sapiens
cattacataatgata

SEQ ID NO: 1268279 - DNA, 15 bp, Homo sapiens
acattacataatgat

SEQ ID NO: 1268280 - DNA, 15 bp, Homo sapiens
cacattacataatga

SEQ ID NO: 1268281 - DNA, 15 bp, Homo sapiens
gcacattacataatg

SEQ ID NO: 1268282 - DNA, 15 bp, Homo sapiens
agcacattacataat

SEQ ID NO: 1268283 - DNA, 15 bp, Homo sapiens
aagcacattacataa

SEQ ID NO: 1268284 - DNA, 15 bp, Homo sapiens
aaagcacattacata

SEQ ID NO: 1268285 - DNA, 15 bp, Homo sapiens
aaaagcacattacat

SEQ ID NO: 1268286 - DNA, 15 bp, Homo sapiens
aaaaagcacattaca

SEQ ID NO: 1268287 - DNA, 15 bp, Homo sapiens
aaaaaagcacattac

SEQ ID NO: 1268288 - DNA, 15 bp, Homo sapiens
taaaaaagcacatta

SEQ ID NO: 1268289 - DNA, 15 bp, Homo sapiens
ataaaaaagcacatt

SEQ ID NO: 1268290 - DNA, 15 bp, Homo sapiens
gataaaaaagcacat

SEQ ID NO: 1268291 - DNA, 15 bp, Homo sapiens
ggataaaaaagcaca

SEQ ID NO: 1268292 - DNA, 15 bp, Homo sapiens
tggataaaaaagcac

SEQ ID NO: 1268293 - DNA, 15 bp, Homo sapiens
ttggataaaaaagca

SEQ ID NO: 1268294 - DNA, 15 bp, Homo sapiens
tttggataaaaaagc

SEQ ID NO: 1268295 - DNA, 15 bp, Homo sapiens
atttggataaaaaag

SEQ ID NO: 1268296 - DNA, 15 bp, Homo sapiens
aatttggataaaaaa

SEQ ID NO: 1268297 - DNA, 15 bp, Homo sapiens
aaatttggataaaaa

SEQ ID NO: 1268298 - DNA, 15 bp, Homo sapiens
taaatttggataaaa

SEQ ID NO: 1268299 - DNA, 15 bp, Homo sapiens
ataaatttggataaa

SEQ ID NO: 1268300 - DNA, 15 bp, Homo sapiens
tataaatttggataa

SEQ ID NO: 1268301 - DNA, 15 bp, Homo sapiens
atataaatttggata

SEQ ID NO: 1268302 - DNA, 15 bp, Homo sapiens
gatataaatttggat

SEQ ID NO: 1268303 - DNA, 15 bp, Homo sapiens
agatataaatttgga

SEQ ID NO: 1268304 - DNA, 15 bp, Homo sapiens
aagatataaatttgg

SEQ ID NO: 1268305 - DNA, 15 bp, Homo sapiens
aaagatataaatttg

SEQ ID NO: 1268306 - DNA, 15 bp, Homo sapiens
aaaagatataaattt

SEQ ID NO: 1268307 - DNA, 15 bp, Homo sapiens
caaaagatataaatt

SEQ ID NO: 1268308 - DNA, 15 bp, Homo sapiens
acaaaagatataaat

SEQ ID NO: 1268309 - DNA, 15 bp, Homo sapiens
aacaaaagatataaa

SEQ ID NO: 1268310 - DNA, 15 bp, Homo sapiens
gaacaaaagatataa

SEQ ID NO: 1268311 - DNA, 15 bp, Homo sapiens
agaacaaaagatata

SEQ ID NO: 1268312 - DNA, 15 bp, Homo sapiens
cagaacaaaagatat

SEQ ID NO: 1268313 - DNA, 15 bp, Homo sapiens
gcagaacaaaagata

SEQ ID NO: 1268314 - DNA, 15 bp, Homo sapiens
tgcagaacaaaagat

SEQ ID NO: 1268315 - DNA, 15 bp, Homo sapiens
ctgcagaacaaaaga

SEQ ID NO: 1268316 - DNA, 15 bp, Homo sapiens
actgcagaacaaaag

SEQ ID NO: 1268317 - DNA, 15 bp, Homo sapiens
cactgcagaacaaaa

SEQ ID NO: 1268318 - DNA, 15 bp, Homo sapiens
acactgcagaacaaa

SEQ ID NO: 1268319 - DNA, 15 bp, Homo sapiens
gacactgcagaacaa

SEQ ID NO: 1268320 - DNA, 15 bp, Homo sapiens
ggacactgcagaaca

SEQ ID NO: 1268321 - DNA, 15 bp, Homo sapiens
tggacactgcagaac

SEQ ID NO: 1268322 - DNA, 15 bp, Homo sapiens
gtggacactgcagaa

SEQ ID NO: 1268323 - DNA, 15 bp, Homo sapiens
tgtggacactgcaga

SEQ ID NO: 1268324 - DNA, 15 bp, Homo sapiens
atgtggacactgcag

SEQ ID NO: 1268325 - DNA, 15 bp, Homo sapiens
tatgtggacactgca

SEQ ID NO: 1268326 - DNA, 15 bp, Homo sapiens
atatgtggacactgc

SEQ ID NO: 1268327 - DNA, 15 bp, Homo sapiens
gatatgtggacactg

SEQ ID NO: 1268328 - DNA, 15 bp, Homo sapiens
cgatatgtggacact

SEQ ID NO: 1268329 - DNA, 15 bp, Homo sapiens
tcgatatgtggacac

SEQ ID NO: 1268330 - DNA, 15 bp, Homo sapiens
atcgatatgtggaca

SEQ ID NO: 1268331 - DNA, 15 bp, Homo sapiens
aatcgatatgtggac

SEQ ID NO: 1268332 - DNA, 15 bp, Homo sapiens
gaatcgatatgtgga

SEQ ID NO: 1268333 - DNA, 15 bp, Homo sapiens
ggaatcgatatgtgg

SEQ ID NO: 1268334 - DNA, 15 bp, Homo sapiens
tggaatcgatatgtg

SEQ ID NO: 1268335 - DNA, 15 bp, Homo sapiens
gtggaatcgatatgt

SEQ ID NO: 1268336 - DNA, 15 bp, Homo sapiens
agtggaatcgatatg

SEQ ID NO: 1268337 - DNA, 15 bp, Homo sapiens
aagtggaatcgatat

SEQ ID NO: 1268338 - DNA, 15 bp, Homo sapiens
aaagtggaatcgata

SEQ ID NO: 1268339 - DNA, 15 bp, Homo sapiens
aaaagtggaatcgat

SEQ ID NO: 1268340 - DNA, 15 bp, Homo sapiens
gaaaagtggaatcga

SEQ ID NO: 1268341 - DNA, 15 bp, Homo sapiens
agaaaagtggaatcg

SEQ ID NO: 1268342 - DNA, 15 bp, Homo sapiens
aagaaaagtggaatc

SEQ ID NO: 1268343 - DNA, 15 bp, Homo sapiens
caagaaaagtggaat

SEQ ID NO: 1268344 - DNA, 15 bp, Homo sapiens
acaagaaaagtggaa

SEQ ID NO: 1268345 - DNA, 15 bp, Homo sapiens
cacaagaaaagtgga

SEQ ID NO: 1268346 - DNA, 15 bp, Homo sapiens
tcacaagaaaagtgg

SEQ ID NO: 1268347 - DNA, 15 bp, Homo sapiens
atcacaagaaaagtg

SEQ ID NO: 1268348 - DNA, 15 bp, Homo sapiens
gatcacaagaaaagt

SEQ ID NO: 1268349 - DNA, 15 bp, Homo sapiens
tgatcacaagaaaag

SEQ ID NO: 1268350 - DNA, 15 bp, Homo sapiens
gtgatcacaagaaaa

SEQ ID NO: 1268351 - DNA, 15 bp, Homo sapiens
agtgatcacaagaaa

SEQ ID NO: 1268352 - DNA, 15 bp, Homo sapiens
gagtgatcacaagaa

SEQ ID NO: 1268353 - DNA, 15 bp, Homo sapiens
agagtgatcacaaga

SEQ ID NO: 1268354 - DNA, 15 bp, Homo sapiens
aagagtgatcacaag

SEQ ID NO: 1268355 - DNA, 15 bp, Homo sapiens
aaagagtgatcacaa

SEQ ID NO: 1268356 - DNA, 15 bp, Homo sapiens
taaagagtgatcaca

SEQ ID NO: 1268357 - DNA, 15 bp, Homo sapiens
gtaaagagtgatcac

SEQ ID NO: 1268358 - DNA, 15 bp, Homo sapiens
tgtaaagagtgatca

SEQ ID NO: 1268359 - DNA, 15 bp, Homo sapiens
ttgtaaagagtgatc

SEQ ID NO: 1268360 - DNA, 15 bp, Homo sapiens
attgtaaagagtgat

SEQ ID NO: 1268361 - DNA, 15 bp, Homo sapiens
cattgtaaagagtga

SEQ ID NO: 1268362 - DNA, 15 bp, Homo sapiens
acattgtaaagagtg

SEQ ID NO: 1268363 - DNA, 15 bp, Homo sapiens
cacattgtaaagagt

SEQ ID NO: 1268364 - DNA, 15 bp, Homo sapiens
acacattgtaaagag

SEQ ID NO: 1268365 - DNA, 15 bp, Homo sapiens
tacacattgtaaaga

SEQ ID NO: 1268366 - DNA, 15 bp, Homo sapiens
atacacattgtaaag

SEQ ID NO: 1268367 - DNA, 15 bp, Homo sapiens
gatacacattgtaaa

SEQ ID NO: 1268368 - DNA, 15 bp, Homo sapiens
cgatacacattgtaa

SEQ ID NO: 1268369 - DNA, 15 bp, Homo sapiens
acgatacacattgta

SEQ ID NO: 1268370 - DNA, 15 bp, Homo sapiens
aacgatacacattgt

SEQ ID NO: 1268371 - DNA, 15 bp, Homo sapiens
aaacgatacacattg

SEQ ID NO: 1268372 - DNA, 15 bp, Homo sapiens
taaacgatacacatt

SEQ ID NO: 1268373 - DNA, 15 bp, Homo sapiens
gtaaacgatacacat

SEQ ID NO: 1268374 - DNA, 15 bp, Homo sapiens
ggtaaacgatacaca

SEQ ID NO: 1268375 - DNA, 15 bp, Homo sapiens
aggtaaacgatacac

SEQ ID NO: 1268376 - DNA, 15 bp, Homo sapiens
aaggtaaacgataca

SEQ ID NO: 1268377 - DNA, 15 bp, Homo sapiens
gaaggtaaacgatac

SEQ ID NO: 1268378 - DNA, 15 bp, Homo sapiens
tgaaggtaaacgata

SEQ ID NO: 1268379 - DNA, 15 bp, Homo sapiens
atgaaggtaaacgat

SEQ ID NO: 1268380 - DNA, 15 bp, Homo sapiens
aatgaaggtaaacga

SEQ ID NO: 1268381 - DNA, 15 bp, Homo sapiens
aaatgaaggtaaacg

SEQ ID NO: 1268382 - DNA, 15 bp, Homo sapiens
aaaatgaaggtaaac

SEQ ID NO: 1268383 - DNA, 15 bp, Homo sapiens
caaaatgaaggtaaa

SEQ ID NO: 1268384 - DNA, 15 bp, Homo sapiens
tcaaaatgaaggtaa

SEQ ID NO: 1268385 - DNA, 15 bp, Homo sapiens
atcaaaatgaaggta

SEQ ID NO: 1268386 - DNA, 15 bp, Homo sapiens
aatcaaaatgaaggt

SEQ ID NO: 1268387 - DNA, 15 bp, Homo sapiens
aaatcaaaatgaagg

SEQ ID NO: 1268388 - DNA, 15 bp, Homo sapiens
aaaatcaaaatgaag

SEQ ID NO: 1268389 - DNA, 15 bp, Homo sapiens
taaaatcaaaatgaa

SEQ ID NO: 1268390 - DNA, 15 bp, Homo sapiens
ttaaaatcaaaatga

SEQ ID NO: 1268391 - DNA, 15 bp, Homo sapiens
gttaaaatcaaaatg

SEQ ID NO: 1268392 - DNA, 15 bp, Homo sapiens
ggttaaaatcaaaat

SEQ ID NO: 1268393 - DNA, 15 bp, Homo sapiens
aggttaaaatcaaaa

SEQ ID NO: 1268394 - DNA, 15 bp, Homo sapiens
taggttaaaatcaaa

SEQ ID NO: 1268395 - DNA, 15 bp, Homo sapiens
ataggttaaaatcaa

SEQ ID NO: 1268396 - DNA, 15 bp, Homo sapiens
aataggttaaaatca

SEQ ID NO: 1268397 - DNA, 15 bp, Homo sapiens
aaataggttaaaatc

SEQ ID NO: 1268398 - DNA, 15 bp, Homo sapiens
gaaataggttaaaat

SEQ ID NO: 1268399 - DNA, 15 bp, Homo sapiens
agaaataggttaaaa

SEQ ID NO: 1268400 - DNA, 15 bp, Homo sapiens
aagaaataggttaaa

SEQ ID NO: 1268401 - DNA, 15 bp, Homo sapiens
aaagaaataggttaa

SEQ ID NO: 1268402 - DNA, 15 bp, Homo sapiens
aaaagaaataggtta

SEQ ID NO: 1268403 - DNA, 15 bp, Homo sapiens
aaaaagaaataggtt

SEQ ID NO: 1268404 - DNA, 15 bp, Homo sapiens
aaaaaagaaataggt

SEQ ID NO: 1268405 - DNA, 15 bp, Homo sapiens
taaaaaagaaatagg

SEQ ID NO: 1268406 - DNA, 15 bp, Homo sapiens
ataaaaaagaaatag

SEQ ID NO: 1268407 - DNA, 15 bp, Homo sapiens
tataaaaaagaaata

SEQ ID NO: 1268408 - DNA, 15 bp, Homo sapiens
atataaaaaagaaat

SEQ ID NO: 1268409 - DNA, 15 bp, Homo sapiens
taaatataaaaaaga

SEQ ID NO: 1268410 - DNA, 15 bp, Homo sapiens
ttaaatataaaaaag

SEQ ID NO: 1268411 - DNA, 15 bp, Homo sapiens
tttaaatataaaaaa

SEQ ID NO: 1268412 - DNA, 15 bp, Homo sapiens
atttaaatataaaaa

SEQ ID NO: 1268413 - DNA, 15 bp, Homo sapiens
catttaaatataaaa

SEQ ID NO: 1268414 - DNA, 15 bp, Homo sapiens
ccatttaaatataaa

SEQ ID NO: 1268415 - DNA, 15 bp, Homo sapiens
tccatttaaatataa

SEQ ID NO: 1268416 - DNA, 15 bp, Homo sapiens
atccatttaaatata

SEQ ID NO: 1268417 - DNA, 15 bp, Homo sapiens
aatccatttaaatat

SEQ ID NO: 1268418 - DNA, 15 bp, Homo sapiens
aaatccatttaaata

SEQ ID NO: 1268419 - DNA, 15 bp, Homo sapiens
aaaatccatttaaat

SEQ ID NO: 1268420 - DNA, 15 bp, Homo sapiens
aaaaatccatttaaa

SEQ ID NO: 1268421 - DNA, 15 bp, Homo sapiens
caaaaatccatttaa

SEQ ID NO: 1268422 - DNA, 15 bp, Homo sapiens
acaaaaatccattta

SEQ ID NO: 1268423 - DNA, 15 bp, Homo sapiens
aacaaaaatccattt

SEQ ID NO: 1268424 - DNA, 15 bp, Homo sapiens
caacaaaaatccatt

SEQ ID NO: 1268425 - DNA, 15 bp, Homo sapiens
acaacaaaaatccat

SEQ ID NO: 1268426 - DNA, 15 bp, Homo sapiens
aacaacaaaaatcca

SEQ ID NO: 1268427 - DNA, 15 bp, Homo sapiens
aaacaacaaaaatcc

SEQ ID NO: 1268428 - DNA, 15 bp, Homo sapiens
aaaacaacaaaaatc

SEQ ID NO: 1268429 - DNA, 15 bp, Homo sapiens
caaaacaacaaaaat

SEQ ID NO: 1268430 - DNA, 15 bp, Homo sapiens
acaaaacaacaaaaa

SEQ ID NO: 1268431 - DNA, 15 bp, Homo sapiens
tacaaaacaacaaaa

SEQ ID NO: 1268432 - DNA, 15 bp, Homo sapiens
ttacaaaacaacaaa

SEQ ID NO: 1268433 - DNA, 15 bp, Homo sapiens
attacaaaacaacaa

SEQ ID NO: 1268434 - DNA, 15 bp, Homo sapiens
gattacaaaacaaca

SEQ ID NO: 1268435 - DNA, 15 bp, Homo sapiens
tgattacaaaacaac

SEQ ID NO: 1268436 - DNA, 15 bp, Homo sapiens
ctgattacaaaacaa

SEQ ID NO: 1268437 - DNA, 15 bp, Homo sapiens
gctgattacaaaaca

SEQ ID NO: 1268438 - DNA, 15 bp, Homo sapiens
tgctgattacaaaac

SEQ ID NO: 1268439 - DNA, 15 bp, Homo sapiens
atgctgattacaaaa

SEQ ID NO: 1268440 - DNA, 15 bp, Homo sapiens
aatgctgattacaaa

SEQ ID NO: 1268441 - DNA, 15 bp, Homo sapiens
gaatgctgattacaa

SEQ ID NO: 1268442 - DNA, 15 bp, Homo sapiens
tgaatgctgattaca

SEQ ID NO: 1268443 - DNA, 15 bp, Homo sapiens
atgaatgctgattac

SEQ ID NO: 1268444 - DNA, 15 bp, Homo sapiens
aatgaatgctgatta

SEQ ID NO: 1268445 - DNA, 15 bp, Homo sapiens
taatgaatgctgatt

SEQ ID NO: 1268446 - DNA, 15 bp, Homo sapiens
ttaatgaatgctgat

SEQ ID NO: 1268447 - DNA, 15 bp, Homo sapiens
tttaatgaatgctga

SEQ ID NO: 1268448 - DNA, 15 bp, Homo sapiens
ttttaatgaatgctg

SEQ ID NO: 1268449 - DNA, 15 bp, Homo sapiens
tttttaatgaatgct

SEQ ID NO: 1268450 - DNA, 15 bp, Homo sapiens
atttttaatgaatgc

SEQ ID NO: 1268451 - DNA, 15 bp, Homo sapiens
aatttttaatgaatg

SEQ ID NO: 1268452 - DNA, 15 bp, Homo sapiens
aaatttttaatgaat

SEQ ID NO: 1268453 - DNA, 15 bp, Homo sapiens
aaaatttttaatgaa

SEQ ID NO: 1268454 - DNA, 15 bp, Homo sapiens
aaaaatttttaatga

SEQ ID NO: 1268455 - DNA, 15 bp, Homo sapiens
taaaaatttttaatg

SEQ ID NO: 1268456 - DNA, 15 bp, Homo sapiens
ctaaaaatttttaat

SEQ ID NO: 1268457 - DNA, 15 bp, Homo sapiens
gctaaaaatttttaa

SEQ ID NO: 1268458 - DNA, 15 bp, Homo sapiens
agctaaaaattttta

SEQ ID NO: 1268459 - DNA, 15 bp, Homo sapiens
cagctaaaaattttt

SEQ ID NO: 1268460 - DNA, 15 bp, Homo sapiens
tcagctaaaaatttt

SEQ ID NO: 1268461 - DNA, 15 bp, Homo sapiens
ttcagctaaaaattt

SEQ ID NO: 1268462 - DNA, 15 bp, Homo sapiens
attcagctaaaaatt

SEQ ID NO: 1268463 - DNA, 15 bp, Homo sapiens
tattcagctaaaaat

SEQ ID NO: 1268464 - DNA, 15 bp, Homo sapiens
gtattcagctaaaaa

SEQ ID NO: 1268465 - DNA, 15 bp, Homo sapiens
agtattcagctaaaa

SEQ ID NO: 1268466 - DNA, 15 bp, Homo sapiens
aagtattcagctaaa

SEQ ID NO: 1268467 - DNA, 15 bp, Homo sapiens
aaagtattcagctaa

SEQ ID NO: 1268468 - DNA, 15 bp, Homo sapiens
aaaagtattcagcta

SEQ ID NO: 1268469 - DNA, 15 bp, Homo sapiens
aaaaagtattcagct

SEQ ID NO: 1268470 - DNA, 15 bp, Homo sapiens
taaaaagtattcagc

SEQ ID NO: 1268471 - DNA, 15 bp, Homo sapiens
gtaaaaagtattcag

SEQ ID NO: 1268472 - DNA, 15 bp, Homo sapiens
agtaaaaagtattca

SEQ ID NO: 1268473 - DNA, 15 bp, Homo sapiens
aagtaaaaagtattc

SEQ ID NO: 1268474 - DNA, 15 bp, Homo sapiens
aaagtaaaaagtatt

SEQ ID NO: 1268475 - DNA, 15 bp, Homo sapiens
aaaagtaaaaagtat

SEQ ID NO: 1268476 - DNA, 15 bp, Homo sapiens
aacaaaagtaaaaag

SEQ ID NO: 1268477 - DNA, 15 bp, Homo sapiens
taacaaaagtaaaaa

SEQ ID NO: 1268478 - DNA, 15 bp, Homo sapiens
ctaacaaaagtaaaa

SEQ ID NO: 1268479 - DNA, 15 bp, Homo sapiens
cctaacaaaagtaaa

SEQ ID NO: 1268480 - DNA, 15 bp, Homo sapiens
ccctaacaaaagtaa

SEQ ID NO: 1268481 - DNA, 15 bp, Homo sapiens
accctaacaaaagta

SEQ ID NO: 1268482 - DNA, 15 bp, Homo sapiens
aaccctaacaaaagt

SEQ ID NO: 1268483 - DNA, 15 bp, Homo sapiens
gaaccctaacaaaag

SEQ ID NO: 1268484 - DNA, 15 bp, Homo sapiens
ggaaccctaacaaaa

SEQ ID NO: 1268485 - DNA, 15 bp, Homo sapiens
gggaaccctaacaaa

SEQ ID NO: 1268486 - DNA, 15 bp, Homo sapiens
agggaaccctaacaa

SEQ ID NO: 1268487 - DNA, 15 bp, Homo sapiens
cagggaaccctaaca

SEQ ID NO: 1268488 - DNA, 15 bp, Homo sapiens
acagggaaccctaac

SEQ ID NO: 1268489 - DNA, 15 bp, Homo sapiens
cacagggaaccctaa

SEQ ID NO: 1268490 - DNA, 15 bp, Homo sapiens
acacagggaacccta

SEQ ID NO: 1268491 - DNA, 15 bp, Homo sapiens
gacacagggaaccct

SEQ ID NO: 1268492 - DNA, 15 bp, Homo sapiens
agacacagggaaccc

SEQ ID NO: 1268493 - DNA, 15 bp, Homo sapiens
gagacacagggaacc

SEQ ID NO: 1268494 - DNA, 15 bp, Homo sapiens
agagacacagggaac

SEQ ID NO: 1268495 - DNA, 15 bp, Homo sapiens
aagagacacagggaa

SEQ ID NO: 1268496 - DNA, 15 bp, Homo sapiens
gaagagacacaggga

SEQ ID NO: 1268497 - DNA, 15 bp, Homo sapiens
ggaagagacacaggg

SEQ ID NO: 1268498 - DNA, 15 bp, Homo sapiens
aggaagagacacagg

SEQ ID NO: 1268499 - DNA, 15 bp, Homo sapiens
aaggaagagacacag

SEQ ID NO: 1268500 - DNA, 15 bp, Homo sapiens
aaaggaagagacaca

SEQ ID NO: 1268501 - DNA, 15 bp, Homo sapiens
gaaaggaagagacac

SEQ ID NO: 1268502 - DNA, 15 bp, Homo sapiens
tgaaaggaagagaca

SEQ ID NO: 1268503 - DNA, 15 bp, Homo sapiens
atgaaaggaagagac

SEQ ID NO: 1268504 - DNA, 15 bp, Homo sapiens
catgaaaggaagaga

SEQ ID NO: 1268505 - DNA, 15 bp, Homo sapiens
acatgaaaggaagag

SEQ ID NO: 1268506 - DNA, 15 bp, Homo sapiens
aacatgaaaggaaga

SEQ ID NO: 1268507 - DNA, 15 bp, Homo sapiens
caacatgaaaggaag

SEQ ID NO: 1268508 - DNA, 15 bp, Homo sapiens
acaacatgaaaggaa

SEQ ID NO: 1268509 - DNA, 15 bp, Homo sapiens
cacaacatgaaagga

SEQ ID NO: 1268510 - DNA, 15 bp, Homo sapiens
gcacaacatgaaagg

SEQ ID NO: 1268511 - DNA, 15 bp, Homo sapiens
ggcacaacatgaaag

SEQ ID NO: 1268512 - DNA, 15 bp, Homo sapiens
tggcacaacatgaaa

SEQ ID NO: 1268513 - DNA, 15 bp, Homo sapiens
gtggcacaacatgaa

SEQ ID NO: 1268514 - DNA, 15 bp, Homo sapiens
tgtggcacaacatga

SEQ ID NO: 1268515 - DNA, 15 bp, Homo sapiens
ctgtggcacaacatg

SEQ ID NO: 1268516 - DNA, 15 bp, Homo sapiens
tctgtggcacaacat

SEQ ID NO: 1268517 - DNA, 15 bp, Homo sapiens
atctgtggcacaaca

SEQ ID NO: 1268518 - DNA, 15 bp, Homo sapiens
catctgtggcacaac

SEQ ID NO: 1268519 - DNA, 15 bp, Homo sapiens
tcatctgtggcacaa

SEQ ID NO: 1268520 - DNA, 15 bp, Homo sapiens
ctcatctgtggcaca

SEQ ID NO: 1268521 - DNA, 15 bp, Homo sapiens
gctcatctgtggcac

SEQ ID NO: 1268522 - DNA, 15 bp, Homo sapiens
ggctcatctgtggca

SEQ ID NO: 1268523 - DNA, 15 bp, Homo sapiens
tggctcatctgtggc

SEQ ID NO: 1268524 - DNA, 15 bp, Homo sapiens
atggctcatctgtgg

SEQ ID NO: 1268525 - DNA, 15 bp, Homo sapiens
aatggctcatctgtg

SEQ ID NO: 1268526 - DNA, 15 bp, Homo sapiens
taatggctcatctgt

SEQ ID NO: 1268527 - DNA, 15 bp, Homo sapiens
ataatggctcatctg

SEQ ID NO: 1268528 - DNA, 15 bp, Homo sapiens
aataatggctcatct

SEQ ID NO: 1268529 - DNA, 15 bp, Homo sapiens
aaataatggctcatc

SEQ ID NO: 1268530 - DNA, 15 bp, Homo sapiens
taaataatggctcat

SEQ ID NO: 1268531 - DNA, 15 bp, Homo sapiens
ataaataatggctca

SEQ ID NO: 1268532 - DNA, 15 bp, Homo sapiens
tataaataatggctc

SEQ ID NO: 1268533 - DNA, 15 bp, Homo sapiens
atataaataatggct

SEQ ID NO: 1268534 - DNA, 15 bp, Homo sapiens
gatataaataatggc

SEQ ID NO: 1268535 - DNA, 15 bp, Homo sapiens
agatataaataatgg

SEQ ID NO: 1268536 - DNA, 15 bp, Homo sapiens
aagatataaataatg

SEQ ID NO: 1268537 - DNA, 15 bp, Homo sapiens
aaagatataaataat

SEQ ID NO: 1268538 - DNA, 15 bp, Homo sapiens
aaaagatataaataa

SEQ ID NO: 1268539 - DNA, 15 bp, Homo sapiens
gaaaagatataaata

SEQ ID NO: 1268540 - DNA, 15 bp, Homo sapiens
agaaaagatataaat

SEQ ID NO: 1268541 - DNA, 15 bp, Homo sapiens
gagaaaagatataaa

SEQ ID NO: 1268542 - DNA, 15 bp, Homo sapiens
agagaaaagatataa

SEQ ID NO: 1268543 - DNA, 15 bp, Homo sapiens
gagagaaaagatata

SEQ ID NO: 1268544 - DNA, 15 bp, Homo sapiens
tgagagaaaagatat

SEQ ID NO: 1268545 - DNA, 15 bp, Homo sapiens
atgagagaaaagata

SEQ ID NO: 1268546 - DNA, 15 bp, Homo sapiens
aatgagagaaaagat

SEQ ID NO: 1268547 - DNA, 15 bp, Homo sapiens
caatgagagaaaaga

SEQ ID NO: 1268548 - DNA, 15 bp, Homo sapiens
ccaatgagagaaaag

SEQ ID NO: 1268549 - DNA, 15 bp, Homo sapiens
tccaatgagagaaaa

SEQ ID NO: 1268550 - DNA, 15 bp, Homo sapiens
ctccaatgagagaaa

SEQ ID NO: 1268551 - DNA, 15 bp, Homo sapiens
cctccaatgagagaa

SEQ ID NO: 1268552 - DNA, 15 bp, Homo sapiens
acctccaatgagaga

SEQ ID NO: 1268553 - DNA, 15 bp, Homo sapiens
aacctccaatgagag

SEQ ID NO: 1268554 - DNA, 15 bp, Homo sapiens
gaacctccaatgaga

SEQ ID NO: 1268555 - DNA, 15 bp, Homo sapiens
ggaacctccaatgag

SEQ ID NO: 1268556 - DNA, 15 bp, Homo sapiens
aggaacctccaatga

SEQ ID NO: 1268557 - DNA, 15 bp, Homo sapiens
aaggaacctccaatg

SEQ ID NO: 1268558 - DNA, 15 bp, Homo sapiens
aaaggaacctccaat

SEQ ID NO: 1268559 - DNA, 15 bp, Homo sapiens
aaaaggaacctccaa

SEQ ID NO: 1268560 - DNA, 15 bp, Homo sapiens
aaaaaggaacctcca

SEQ ID NO: 1268561 - DNA, 15 bp, Homo sapiens
aaaaaaggaacctcc

SEQ ID NO: 1268562 - DNA, 15 bp, Homo sapiens
aaaaaaaggaacctc

SEQ ID NO: 1268563 - DNA, 15 bp, Homo sapiens
taaaaaaaggaacct

SEQ ID NO: 1268564 - DNA, 15 bp, Homo sapiens
ctaaaaaaaggaacc

SEQ ID NO: 1268565 - DNA, 15 bp, Homo sapiens
cctaaaaaaaggaac

SEQ ID NO: 1268566 - DNA, 15 bp, Homo sapiens
ccctaaaaaaaggaa

SEQ ID NO: 1268567 - DNA, 15 bp, Homo sapiens
cccctaaaaaaagga

SEQ ID NO: 1268568 - DNA, 15 bp, Homo sapiens
tcccctaaaaaaagg

SEQ ID NO: 1268569 - DNA, 15 bp, Homo sapiens
ttcccctaaaaaaag

SEQ ID NO: 1268570 - DNA, 15 bp, Homo sapiens
tttcccctaaaaaaa

SEQ ID NO: 1268571 - DNA, 15 bp, Homo sapiens
atttcccctaaaaaa

SEQ ID NO: 1268572 - DNA, 15 bp, Homo sapiens
aatttcccctaaaaa

SEQ ID NO: 1268573 - DNA, 15 bp, Homo sapiens
taatttcccctaaaa

SEQ ID NO: 1268574 - DNA, 15 bp, Homo sapiens
ttaatttcccctaaa

SEQ ID NO: 1268575 - DNA, 15 bp, Homo sapiens
tttaatttcccctaa

SEQ ID NO: 1268576 - DNA, 15 bp, Homo sapiens
atttaatttccccta

SEQ ID NO: 1268577 - DNA, 15 bp, Homo sapiens
tatttaatttcccct

SEQ ID NO: 1268578 - DNA, 15 bp, Homo sapiens
ttatttaatttcccc

SEQ ID NO: 1268579 - DNA, 15 bp, Homo sapiens
attatttaatttccc

SEQ ID NO: 1268580 - DNA, 15 bp, Homo sapiens
gattatttaatttcc

SEQ ID NO: 1268581 - DNA, 15 bp, Homo sapiens
agattatttaatttc

SEQ ID NO: 1268582 - DNA, 15 bp, Homo sapiens
cagattatttaattt

SEQ ID NO: 1268583 - DNA, 15 bp, Homo sapiens
tcagattatttaatt

SEQ ID NO: 1268584 - DNA, 15 bp, Homo sapiens
ttcagattatttaat

SEQ ID NO: 1268585 - DNA, 15 bp, Homo sapiens
tttcagattatttaa

SEQ ID NO: 1268586 - DNA, 15 bp, Homo sapiens
atttcagattattta

SEQ ID NO: 1268587 - DNA, 15 bp, Homo sapiens
tatttcagattattt

SEQ ID NO: 1268588 - DNA, 15 bp, Homo sapiens
atatttcagattatt

SEQ ID NO: 1268589 - DNA, 15 bp, Homo sapiens
tatatttcagattat

SEQ ID NO: 1268590 - DNA, 15 bp, Homo sapiens
ttatatttcagatta

SEQ ID NO: 1268591 - DNA, 15 bp, Homo sapiens
cttatatttcagatt

SEQ ID NO: 1268592 - DNA, 15 bp, Homo sapiens
ccttatatttcagat

SEQ ID NO: 1268593 - DNA, 15 bp, Homo sapiens
tccttatatttcaga

SEQ ID NO: 1268594 - DNA, 15 bp, Homo sapiens
ttccttatatttcag

SEQ ID NO: 1268595 - DNA, 15 bp, Homo sapiens
tttccttatatttca

SEQ ID NO: 1268596 - DNA, 15 bp, Homo sapiens
ctttccttatatttc

SEQ ID NO: 1268597 - DNA, 15 bp, Homo sapiens
cctttccttatattt

SEQ ID NO: 1268598 - DNA, 15 bp, Homo sapiens
tcctttccttatatt

SEQ ID NO: 1268599 - DNA, 15 bp, Homo sapiens
atcctttccttatat

SEQ ID NO: 1268600 - DNA, 15 bp, Homo sapiens
tatcctttccttata

SEQ ID NO: 1268601 - DNA, 15 bp, Homo sapiens
atatcctttccttat

SEQ ID NO: 1268602 - DNA, 15 bp, Homo sapiens
catatcctttcctta

SEQ ID NO: 1268603 - DNA, 15 bp, Homo sapiens
acatatcctttcctt

SEQ ID NO: 1268604 - DNA, 15 bp, Homo sapiens
aacatatcctttcct

SEQ ID NO: 1268605 - DNA, 15 bp, Homo sapiens
caacatatcctttcc

SEQ ID NO: 1268606 - DNA, 15 bp, Homo sapiens
tcaacatatcctttc

SEQ ID NO: 1268607 - DNA, 15 bp, Homo sapiens
atcaacatatccttt

SEQ ID NO: 1268608 - DNA, 15 bp, Homo sapiens
aatcaacatatcctt

SEQ ID NO: 1268609 - DNA, 15 bp, Homo sapiens
aaatcaacatatcct

SEQ ID NO: 1268610 - DNA, 15 bp, Homo sapiens
gaaatcaacatatcc

SEQ ID NO: 1268611 - DNA, 15 bp, Homo sapiens
tgaaatcaacatatc

SEQ ID NO: 1268612 - DNA, 15 bp, Homo sapiens
ttgaaatcaacatat

SEQ ID NO: 1268613 - DNA, 15 bp, Homo sapiens
cttgaaatcaacata

SEQ ID NO: 1268614 - DNA, 15 bp, Homo sapiens
tcttgaaatcaacat

SEQ ID NO: 1268615 - DNA, 15 bp, Homo sapiens
ttcttgaaatcaaca

SEQ ID NO: 1268616 - DNA, 15 bp, Homo sapiens
tttcttgaaatcaac

SEQ ID NO: 1268617 - DNA, 15 bp, Homo sapiens
ctttcttgaaatcaa

SEQ ID NO: 1268618 - DNA, 15 bp, Homo sapiens
cctttcttgaaatca

SEQ ID NO: 1268619 - DNA, 15 bp, Homo sapiens
acctttcttgaaatc

SEQ ID NO: 1268620 - DNA, 15 bp, Homo sapiens
aacctttcttgaaat

SEQ ID NO: 1268621 - DNA, 15 bp, Homo sapiens
caacctttcttgaaa

SEQ ID NO: 1268622 - DNA, 15 bp, Homo sapiens
acaacctttcttgaa

SEQ ID NO: 1268623 - DNA, 15 bp, Homo sapiens
aacaacctttcttga

SEQ ID NO: 1268624 - DNA, 15 bp, Homo sapiens
aaacaacctttcttg

SEQ ID NO: 1268625 - DNA, 15 bp, Homo sapiens
aaaacaacctttctt

SEQ ID NO: 1268626 - DNA, 15 bp, Homo sapiens
aaaaacaacctttct

SEQ ID NO: 1268627 - DNA, 15 bp, Homo sapiens
caaaaacaacctttc

SEQ ID NO: 1268628 - DNA, 15 bp, Homo sapiens
acaaaaacaaccttt

SEQ ID NO: 1268629 - DNA, 15 bp, Homo sapiens
aacaaaaacaacctt

SEQ ID NO: 1268630 - DNA, 15 bp, Homo sapiens
gaacaaaaacaacct

SEQ ID NO: 1268631 - DNA, 15 bp, Homo sapiens
ggaacaaaaacaacc

SEQ ID NO: 1268632 - DNA, 15 bp, Homo sapiens
aggaacaaaaacaac

SEQ ID NO: 1268633 - DNA, 15 bp, Homo sapiens
aaggaacaaaaacaa

SEQ ID NO: 1268634 - DNA, 15 bp, Homo sapiens
taaggaacaaaaaca

SEQ ID NO: 1268635 - DNA, 15 bp, Homo sapiens
ataaggaacaaaaac

SEQ ID NO: 1268636 - DNA, 15 bp, Homo sapiens
gataaggaacaaaaa

SEQ ID NO: 1268637 - DNA, 15 bp, Homo sapiens
agataaggaacaaaa

SEQ ID NO: 1268638 - DNA, 15 bp, Homo sapiens
cagataaggaacaaa

SEQ ID NO: 1268639 - DNA, 15 bp, Homo sapiens
ccagataaggaacaa

SEQ ID NO: 1268640 - DNA, 15 bp, Homo sapiens
gccagataaggaaca

SEQ ID NO: 1268641 - DNA, 15 bp, Homo sapiens
agccagataaggaac

SEQ ID NO: 1268642 - DNA, 15 bp, Homo sapiens
aagccagataaggaa

SEQ ID NO: 1268643 - DNA, 15 bp, Homo sapiens
caagccagataagga

SEQ ID NO: 1268644 - DNA, 15 bp, Homo sapiens
acaagccagataagg

SEQ ID NO: 1268645 - DNA, 15 bp, Homo sapiens
aacaagccagataag

SEQ ID NO: 1268646 - DNA, 15 bp, Homo sapiens
gaacaagccagataa

SEQ ID NO: 1268647 - DNA, 15 bp, Homo sapiens
agaacaagccagata

SEQ ID NO: 1268648 - DNA, 15 bp, Homo sapiens
aagaacaagccagat

SEQ ID NO: 1268649 - DNA, 15 bp, Homo sapiens
caagaacaagccaga

SEQ ID NO: 1268650 - DNA, 15 bp, Homo sapiens
acaagaacaagccag

SEQ ID NO: 1268651 - DNA, 15 bp, Homo sapiens
aacaagaacaagcca

SEQ ID NO: 1268652 - DNA, 15 bp, Homo sapiens
caacaagaacaagcc

SEQ ID NO: 1268653 - DNA, 15 bp, Homo sapiens
acaacaagaacaagc

SEQ ID NO: 1268654 - DNA, 15 bp, Homo sapiens
cacaacaagaacaag

SEQ ID NO: 1268655 - DNA, 15 bp, Homo sapiens
tcacaacaagaacaa

SEQ ID NO: 1268656 - DNA, 15 bp, Homo sapiens
ctcacaacaagaaca

SEQ ID NO: 1268657 - DNA, 15 bp, Homo sapiens
cctcacaacaagaac

SEQ ID NO: 1268658 - DNA, 15 bp, Homo sapiens
ccctcacaacaagaa

SEQ ID NO: 1268659 - DNA, 15 bp, Homo sapiens
accctcacaacaaga

SEQ ID NO: 1268660 - DNA, 15 bp, Homo sapiens
caccctcacaacaag

SEQ ID NO: 1268661 - DNA, 15 bp, Homo sapiens
ccaccctcacaacaa

SEQ ID NO: 1268662 - DNA, 15 bp, Homo sapiens
cccaccctcacaaca

SEQ ID NO: 1268663 - DNA, 15 bp, Homo sapiens
tcccaccctcacaac

SEQ ID NO: 1268664 - DNA, 15 bp, Homo sapiens
ctcccaccctcacaa

SEQ ID NO: 1268665 - DNA, 15 bp, Homo sapiens
gctcccaccctcaca

SEQ ID NO: 1268666 - DNA, 15 bp, Homo sapiens
tgctcccaccctcac

SEQ ID NO: 1268667 - DNA, 15 bp, Homo sapiens
ttgctcccaccctca

SEQ ID NO: 1268668 - DNA, 15 bp, Homo sapiens
attgctcccaccctc

SEQ ID NO: 1268669 - DNA, 15 bp, Homo sapiens
tattgctcccaccct

SEQ ID NO: 1268670 - DNA, 15 bp, Homo sapiens
gtattgctcccaccc

SEQ ID NO: 1268671 - DNA, 15 bp, Homo sapiens
agtattgctcccacc

SEQ ID NO: 1268672 - DNA, 15 bp, Homo sapiens
gagtattgctcccac

SEQ ID NO: 1268673 - DNA, 15 bp, Homo sapiens
agagtattgctccca

SEQ ID NO: 1268674 - DNA, 15 bp, Homo sapiens
aagagtattgctccc

SEQ ID NO: 1268675 - DNA, 15 bp, Homo sapiens
aaagagtattgctcc

SEQ ID NO: 1268676 - DNA, 15 bp, Homo sapiens
caaagagtattgctc

SEQ ID NO: 1268677 - DNA, 15 bp, Homo sapiens
gcaaagagtattgct

SEQ ID NO: 1268678 - DNA, 15 bp, Homo sapiens
tgcaaagagtattgc

SEQ ID NO: 1268679 - DNA, 15 bp, Homo sapiens
ctgcaaagagtattg

SEQ ID NO: 1268680 - DNA, 15 bp, Homo sapiens
gctgcaaagagtatt

SEQ ID NO: 1268681 - DNA, 15 bp, Homo sapiens
agctgcaaagagtat

SEQ ID NO: 1268682 - DNA, 15 bp, Homo sapiens
aagctgcaaagagta

SEQ ID NO: 1268683 - DNA, 15 bp, Homo sapiens
aaagctgcaaagagt

SEQ ID NO: 1268684 - DNA, 15 bp, Homo sapiens
gaaagctgcaaagag

SEQ ID NO: 1268685 - DNA, 15 bp, Homo sapiens
agaaagctgcaaaga

SEQ ID NO: 1268686 - DNA, 15 bp, Homo sapiens
cagaaagctgcaaag

SEQ ID NO: 1268687 - DNA, 15 bp, Homo sapiens
gcagaaagctgcaaa

SEQ ID NO: 1268688 - DNA, 15 bp, Homo sapiens
tgcagaaagctgcaa

SEQ ID NO: 1268689 - DNA, 15 bp, Homo sapiens
atgcagaaagctgca

SEQ ID NO: 1268690 - DNA, 15 bp, Homo sapiens
aatgcagaaagctgc

SEQ ID NO: 1268691 - DNA, 15 bp, Homo sapiens
gaatgcagaaagctg

SEQ ID NO: 1268692 - DNA, 15 bp, Homo sapiens
agaatgcagaaagct

SEQ ID NO: 1268693 - DNA, 15 bp, Homo sapiens
tagaatgcagaaagc

SEQ ID NO: 1268694 - DNA, 15 bp, Homo sapiens
ctagaatgcagaaag

SEQ ID NO: 1268695 - DNA, 15 bp, Homo sapiens
cctagaatgcagaaa

SEQ ID NO: 1268696 - DNA, 15 bp, Homo sapiens
tcctagaatgcagaa

SEQ ID NO: 1268697 - DNA, 15 bp, Homo sapiens
ttcctagaatgcaga

SEQ ID NO: 1268698 - DNA, 15 bp, Homo sapiens
cttcctagaatgcag

SEQ ID NO: 1268699 - DNA, 15 bp, Homo sapiens
tcttcctagaatgca

SEQ ID NO: 1268700 - DNA, 15 bp, Homo sapiens
ttcttcctagaatgc

SEQ ID NO: 1268701 - DNA, 15 bp, Homo sapiens
cttcttcctagaatg

SEQ ID NO: 1268702 - DNA, 15 bp, Homo sapiens
acttcttcctagaat

SEQ ID NO: 1268703 - DNA, 15 bp, Homo sapiens
cacttcttcctagaa

SEQ ID NO: 1268704 - DNA, 15 bp, Homo sapiens
ccacttcttcctaga

SEQ ID NO: 1268705 - DNA, 15 bp, Homo sapiens
tccacttcttcctag

SEQ ID NO: 1268706 - DNA, 15 bp, Homo sapiens
ttccacttcttccta

SEQ ID NO: 1268707 - DNA, 15 bp, Homo sapiens
attccacttcttcct

SEQ ID NO: 1268708 - DNA, 15 bp, Homo sapiens
aattccacttcttcc

SEQ ID NO: 1268709 - DNA, 15 bp, Homo sapiens
aaattccacttcttc

SEQ ID NO: 1268710 - DNA, 15 bp, Homo sapiens
aaaattccacttctt

SEQ ID NO: 1268711 - DNA, 15 bp, Homo sapiens
taaaattccacttct

SEQ ID NO: 1268712 - DNA, 15 bp, Homo sapiens
gtaaaattccacttc

SEQ ID NO: 1268713 - DNA, 15 bp, Homo sapiens
tgtaaaattccactt

SEQ ID NO: 1268714 - DNA, 15 bp, Homo sapiens
gtgtaaaattccact

SEQ ID NO: 1268715 - DNA, 15 bp, Homo sapiens
agtgtaaaattccac

SEQ ID NO: 1268716 - DNA, 15 bp, Homo sapiens
tagtgtaaaattcca

SEQ ID NO: 1268717 - DNA, 15 bp, Homo sapiens
gtagtgtaaaattcc

SEQ ID NO: 1268718 - DNA, 15 bp, Homo sapiens
ggtagtgtaaaattc

SEQ ID NO: 1268719 - DNA, 15 bp, Homo sapiens
tggtagtgtaaaatt

SEQ ID NO: 1268720 - DNA, 15 bp, Homo sapiens
atggtagtgtaaaat

SEQ ID NO: 1268721 - DNA, 15 bp, Homo sapiens
aatggtagtgtaaaa

SEQ ID NO: 1268722 - DNA, 15 bp, Homo sapiens
aaatggtagtgtaaa

SEQ ID NO: 1268723 - DNA, 15 bp, Homo sapiens
caaatggtagtgtaa

SEQ ID NO: 1268724 - DNA, 15 bp, Homo sapiens
gcaaatggtagtgta

SEQ ID NO: 1268725 - DNA, 15 bp, Homo sapiens
agcaaatggtagtgt

SEQ ID NO: 1268726 - DNA, 15 bp, Homo sapiens
aagcaaatggtagtg

SEQ ID NO: 1268727 - DNA, 15 bp, Homo sapiens
aaagcaaatggtagt

SEQ ID NO: 1268728 - DNA, 15 bp, Homo sapiens
gaaagcaaatggtag

SEQ ID NO: 1268729 - DNA, 15 bp, Homo sapiens
agaaagcaaatggta

SEQ ID NO: 1268730 - DNA, 15 bp, Homo sapiens
aagaaagcaaatggt

SEQ ID NO: 1268731 - DNA, 15 bp, Homo sapiens
aaagaaagcaaatgg

SEQ ID NO: 1268732 - DNA, 15 bp, Homo sapiens
taaagaaagcaaatg

SEQ ID NO: 1268733 - DNA, 15 bp, Homo sapiens
gtaaagaaagcaaat

SEQ ID NO: 1268734 - DNA, 15 bp, Homo sapiens
tgtaaagaaagcaaa

SEQ ID NO: 1268735 - DNA, 15 bp, Homo sapiens
ctgtaaagaaagcaa

SEQ ID NO: 1268736 - DNA, 15 bp, Homo sapiens
cctgtaaagaaagca

SEQ ID NO: 1268737 - DNA, 15 bp, Homo sapiens
acctgtaaagaaagc

SEQ ID NO: 1268738 - DNA, 15 bp, Homo sapiens
aacctgtaaagaaag

SEQ ID NO: 1268739 - DNA, 15 bp, Homo sapiens
aaacctgtaaagaaa

SEQ ID NO: 1268740 - DNA, 15 bp, Homo sapiens
taaacctgtaaagaa

SEQ ID NO: 1268741 - DNA, 15 bp, Homo sapiens
gtaaacctgtaaaga

SEQ ID NO: 1268742 - DNA, 15 bp, Homo sapiens
ggtaaacctgtaaag

SEQ ID NO: 1268743 - DNA, 15 bp, Homo sapiens
aggtaaacctgtaaa

SEQ ID NO: 1268744 - DNA, 15 bp, Homo sapiens
aaggtaaacctgtaa

SEQ ID NO: 1268745 - DNA, 15 bp, Homo sapiens
caaggtaaacctgta

SEQ ID NO: 1268746 - DNA, 15 bp, Homo sapiens
ccaaggtaaacctgt

SEQ ID NO: 1268747 - DNA, 15 bp, Homo sapiens
accaaggtaaacctg

SEQ ID NO: 1268748 - DNA, 15 bp, Homo sapiens
taccaaggtaaacct

SEQ ID NO: 1268749 - DNA, 15 bp, Homo sapiens
ataccaaggtaaacc

SEQ ID NO: 1268750 - DNA, 15 bp, Homo sapiens
aataccaaggtaaac

SEQ ID NO: 1268751 - DNA, 15 bp, Homo sapiens
gaataccaaggtaaa

SEQ ID NO: 1268752 - DNA, 15 bp, Homo sapiens
tgaataccaaggtaa

SEQ ID NO: 1268753 - DNA, 15 bp, Homo sapiens
ctgaataccaaggta

SEQ ID NO: 1268754 - DNA, 15 bp, Homo sapiens
actgaataccaaggt

SEQ ID NO: 1268755 - DNA, 15 bp, Homo sapiens
cactgaataccaagg

SEQ ID NO: 1268756 - DNA, 15 bp, Homo sapiens
acactgaataccaag

SEQ ID NO: 1268757 - DNA, 15 bp, Homo sapiens
gacactgaataccaa

SEQ ID NO: 1268758 - DNA, 15 bp, Homo sapiens
agacactgaatacca

SEQ ID NO: 1268759 - DNA, 15 bp, Homo sapiens
cagacactgaatacc

SEQ ID NO: 1268760 - DNA, 15 bp, Homo sapiens
acagacactgaatac

SEQ ID NO: 1268761 - DNA, 15 bp, Homo sapiens
gacagacactgaata

SEQ ID NO: 1268762 - DNA, 15 bp, Homo sapiens
ggacagacactgaat

SEQ ID NO: 1268763 - DNA, 15 bp, Homo sapiens
tggacagacactgaa

SEQ ID NO: 1268764 - DNA, 15 bp, Homo sapiens
atggacagacactga

SEQ ID NO: 1268765 - DNA, 15 bp, Homo sapiens
tatggacagacactg

SEQ ID NO: 1268766 - DNA, 15 bp, Homo sapiens
ctatggacagacact

SEQ ID NO: 1268767 - DNA, 15 bp, Homo sapiens
cctatggacagacac

SEQ ID NO: 1268768 - DNA, 15 bp, Homo sapiens
tcctatggacagaca

SEQ ID NO: 1268769 - DNA, 15 bp, Homo sapiens
gtcctatggacagac

SEQ ID NO: 1268770 - DNA, 15 bp, Homo sapiens
agtcctatggacaga

SEQ ID NO: 1268771 - DNA, 15 bp, Homo sapiens
tagtcctatggacag

SEQ ID NO: 1268772 - DNA, 15 bp, Homo sapiens
ttagtcctatggaca

SEQ ID NO: 1268773 - DNA, 15 bp, Homo sapiens
attagtcctatggac

SEQ ID NO: 1268774 - DNA, 15 bp, Homo sapiens
aattagtcctatgga

SEQ ID NO: 1268775 - DNA, 15 bp, Homo sapiens
taattagtcctatgg

SEQ ID NO: 1268776 - DNA, 15 bp, Homo sapiens
ttaattagtcctatg

SEQ ID NO: 1268777 - DNA, 15 bp, Homo sapiens
tttaattagtcctat

SEQ ID NO: 1268778 - DNA, 15 bp, Homo sapiens
ttttaattagtccta

SEQ ID NO: 1268779 - DNA, 15 bp, Homo sapiens
gttttaattagtcct

SEQ ID NO: 1268780 - DNA, 15 bp, Homo sapiens
agttttaattagtcc

SEQ ID NO: 1268781 - DNA, 15 bp, Homo sapiens
tagttttaattagtc

SEQ ID NO: 1268782 - DNA, 15 bp, Homo sapiens
atagttttaattagt

SEQ ID NO: 1268783 - DNA, 15 bp, Homo sapiens
tatagttttaattag

SEQ ID NO: 1268784 - DNA, 15 bp, Homo sapiens
gtatagttttaatta

SEQ ID NO: 1268785 - DNA, 15 bp, Homo sapiens
ggtatagttttaatt

SEQ ID NO: 1268786 - DNA, 15 bp, Homo sapiens
tggtatagttttaat

SEQ ID NO: 1268787 - DNA, 15 bp, Homo sapiens
ctggtatagttttaa

SEQ ID NO: 1268788 - DNA, 15 bp, Homo sapiens
tctggtatagtttta

SEQ ID NO: 1268789 - DNA, 15 bp, Homo sapiens
gtctggtatagtttt

SEQ ID NO: 1268790 - DNA, 15 bp, Homo sapiens
agtctggtatagttt

SEQ ID NO: 1268791 - DNA, 15 bp, Homo sapiens
gagtctggtatagtt

SEQ ID NO: 1268792 - DNA, 15 bp, Homo sapiens
ggagtctggtatagt

SEQ ID NO: 1268793 - DNA, 15 bp, Homo sapiens
aggagtctggtatag

SEQ ID NO: 1268794 - DNA, 15 bp, Homo sapiens
aaggagtctggtata

SEQ ID NO: 1268795 - DNA, 15 bp, Homo sapiens
gaaggagtctggtat

SEQ ID NO: 1268796 - DNA, 15 bp, Homo sapiens
agaaggagtctggta

SEQ ID NO: 1268797 - DNA, 15 bp, Homo sapiens
tagaaggagtctggt

SEQ ID NO: 1268798 - DNA, 15 bp, Homo sapiens
atagaaggagtctgg

SEQ ID NO: 1268799 - DNA, 15 bp, Homo sapiens
aatagaaggagtctg

SEQ ID NO: 1268800 - DNA, 15 bp, Homo sapiens
aaatagaaggagtct

SEQ ID NO: 1268801 - DNA, 15 bp, Homo sapiens
aaaatagaaggagtc

SEQ ID NO: 1268802 - DNA, 15 bp, Homo sapiens
taaaatagaaggagt

SEQ ID NO: 1268803 - DNA, 15 bp, Homo sapiens
ttaaaatagaaggag

SEQ ID NO: 1268804 - DNA, 15 bp, Homo sapiens
tttaaaatagaagga

SEQ ID NO: 1268805 - DNA, 15 bp, Homo sapiens
gtttaaaatagaagg

SEQ ID NO: 1268806 - DNA, 15 bp, Homo sapiens
ggtttaaaatagaag

SEQ ID NO: 1268807 - DNA, 15 bp, Homo sapiens
aggtttaaaatagaa

SEQ ID NO: 1268808 - DNA, 15 bp, Homo sapiens
taggtttaaaataga

SEQ ID NO: 1268809 - DNA, 15 bp, Homo sapiens
ataggtttaaaatag

SEQ ID NO: 1268810 - DNA, 15 bp, Homo sapiens
gataggtttaaaata

SEQ ID NO: 1268811 - DNA, 15 bp, Homo sapiens
ggataggtttaaaat

SEQ ID NO: 1268812 - DNA, 15 bp, Homo sapiens
cggataggtttaaaa

SEQ ID NO: 1268813 - DNA, 15 bp, Homo sapiens
acggataggtttaaa

SEQ ID NO: 1268814 - DNA, 15 bp, Homo sapiens
aacggataggtttaa

SEQ ID NO: 1268815 - DNA, 15 bp, Homo sapiens
gaacggataggttta

SEQ ID NO: 1268816 - DNA, 15 bp, Homo sapiens
tgaacggataggttt

SEQ ID NO: 1268817 - DNA, 15 bp, Homo sapiens
ctgaacggataggtt

SEQ ID NO: 1268818 - DNA, 15 bp, Homo sapiens
actgaacggataggt

SEQ ID NO: 1268819 - DNA, 15 bp, Homo sapiens
gactgaacggatagg

SEQ ID NO: 1268820 - DNA, 15 bp, Homo sapiens
agactgaacggatag

SEQ ID NO: 1268821 - DNA, 15 bp, Homo sapiens
gagactgaacggata

SEQ ID NO: 1268822 - DNA, 15 bp, Homo sapiens
tgagactgaacggat

SEQ ID NO: 1268823 - DNA, 15 bp, Homo sapiens
ttgagactgaacgga

SEQ ID NO: 1268824 - DNA, 15 bp, Homo sapiens
cttgagactgaacgg

SEQ ID NO: 1268825 - DNA, 15 bp, Homo sapiens
acttgagactgaacg

SEQ ID NO: 1268826 - DNA, 15 bp, Homo sapiens
aacttgagactgaac

SEQ ID NO: 1268827 - DNA, 15 bp, Homo sapiens
taacttgagactgaa

SEQ ID NO: 1268828 - DNA, 15 bp, Homo sapiens
ataacttgagactga

SEQ ID NO: 1268829 - DNA, 15 bp, Homo sapiens
gataacttgagactg

SEQ ID NO: 1268830 - DNA, 15 bp, Homo sapiens
agataacttgagact

SEQ ID NO: 1268831 - DNA, 15 bp, Homo sapiens
aagataacttgagac

SEQ ID NO: 1268832 - DNA, 15 bp, Homo sapiens
aaagataacttgaga

SEQ ID NO: 1268833 - DNA, 15 bp, Homo sapiens
aaaagataacttgag

SEQ ID NO: 1268834 - DNA, 15 bp, Homo sapiens
aaaaagataacttga

SEQ ID NO: 1268835 - DNA, 15 bp, Homo sapiens
caaaaagataacttg

SEQ ID NO: 1268836 - DNA, 15 bp, Homo sapiens
gcaaaaagataactt

SEQ ID NO: 1268837 - DNA, 15 bp, Homo sapiens
tgcaaaaagataact

SEQ ID NO: 1268838 - DNA, 15 bp, Homo sapiens
atgcaaaaagataac

SEQ ID NO: 1268839 - DNA, 15 bp, Homo sapiens
aatgcaaaaagataa

SEQ ID NO: 1268840 - DNA, 15 bp, Homo sapiens
caatgcaaaaagata

SEQ ID NO: 1268841 - DNA, 15 bp, Homo sapiens
gcaatgcaaaaagat

SEQ ID NO: 1268842 - DNA, 15 bp, Homo sapiens
ggcaatgcaaaaaga

SEQ ID NO: 1268843 - DNA, 15 bp, Homo sapiens
aggcaatgcaaaaag

SEQ ID NO: 1268844 - DNA, 15 bp, Homo sapiens
gaggcaatgcaaaaa

SEQ ID NO: 1268845 - DNA, 15 bp, Homo sapiens
agaggcaatgcaaaa

SEQ ID NO: 1268846 - DNA, 15 bp, Homo sapiens
gagaggcaatgcaaa

SEQ ID NO: 1268847 - DNA, 15 bp, Homo sapiens
tgagaggcaatgcaa

SEQ ID NO: 1268848 - DNA, 15 bp, Homo sapiens
gtgagaggcaatgca

SEQ ID NO: 1268849 - DNA, 15 bp, Homo sapiens
cgtgagaggcaatgc

SEQ ID NO: 1268850 - DNA, 15 bp, Homo sapiens
acgtgagaggcaatg

SEQ ID NO: 1268851 - DNA, 15 bp, Homo sapiens
gacgtgagaggcaat

SEQ ID NO: 1268852 - DNA, 15 bp, Homo sapiens
agacgtgagaggcaa

SEQ ID NO: 1268853 - DNA, 15 bp, Homo sapiens
cagacgtgagaggca

SEQ ID NO: 1268854 - DNA, 15 bp, Homo sapiens
acagacgtgagaggc

SEQ ID NO: 1268855 - DNA, 15 bp, Homo sapiens
gacagacgtgagagg

SEQ ID NO: 1268856 - DNA, 15 bp, Homo sapiens
ggacagacgtgagag

SEQ ID NO: 1268857 - DNA, 15 bp, Homo sapiens
gggacagacgtgaga

SEQ ID NO: 1268858 - DNA, 15 bp, Homo sapiens
agggacagacgtgag

SEQ ID NO: 1268859 - DNA, 15 bp, Homo sapiens
aagggacagacgtga

SEQ ID NO: 1268860 - DNA, 15 bp, Homo sapiens
gaagggacagacgtg

SEQ ID NO: 1268861 - DNA, 15 bp, Homo sapiens
tgaagggacagacgt

SEQ ID NO: 1268862 - DNA, 15 bp, Homo sapiens
atgaagggacagacg

SEQ ID NO: 1268863 - DNA, 15 bp, Homo sapiens
aatgaagggacagac

SEQ ID NO: 1268864 - DNA, 15 bp, Homo sapiens
aaatgaagggacaga

SEQ ID NO: 1268865 - DNA, 15 bp, Homo sapiens
gaaatgaagggacag

SEQ ID NO: 1268866 - DNA, 15 bp, Homo sapiens
agaaatgaagggaca

SEQ ID NO: 1268867 - DNA, 15 bp, Homo sapiens
aagaaatgaagggac

SEQ ID NO: 1268868 - DNA, 15 bp, Homo sapiens
aaagaaatgaaggga

SEQ ID NO: 1268869 - DNA, 15 bp, Homo sapiens
aaaagaaatgaaggg

SEQ ID NO: 1268870 - DNA, 15 bp, Homo sapiens
taaaagaaatgaagg

SEQ ID NO: 1268871 - DNA, 15 bp, Homo sapiens
gtaaaagaaatgaag

SEQ ID NO: 1268872 - DNA, 15 bp, Homo sapiens
ggtaaaagaaatgaa

SEQ ID NO: 1268873 - DNA, 15 bp, Homo sapiens
tggtaaaagaaatga

SEQ ID NO: 1268874 - DNA, 15 bp, Homo sapiens
ctggtaaaagaaatg

SEQ ID NO: 1268875 - DNA, 15 bp, Homo sapiens
gctggtaaaagaaat

SEQ ID NO: 1268876 - DNA, 15 bp, Homo sapiens
tgctggtaaaagaaa

SEQ ID NO: 1268877 - DNA, 15 bp, Homo sapiens
ctgctggtaaaagaa

SEQ ID NO: 1268878 - DNA, 15 bp, Homo sapiens
actgctggtaaaaga

SEQ ID NO: 1268879 - DNA, 15 bp, Homo sapiens
cactgctggtaaaag

SEQ ID NO: 1268880 - DNA, 15 bp, Homo sapiens
gcactgctggtaaaa

SEQ ID NO: 1268881 - DNA, 15 bp, Homo sapiens
agcactgctggtaaa

SEQ ID NO: 1268882 - DNA, 15 bp, Homo sapiens
aagcactgctggtaa

SEQ ID NO: 1268883 - DNA, 15 bp, Homo sapiens
caagcactgctggta

SEQ ID NO: 1268884 - DNA, 15 bp, Homo sapiens
ccaagcactgctggt

SEQ ID NO: 1268885 - DNA, 15 bp, Homo sapiens
accaagcactgctgg

SEQ ID NO: 1268886 - DNA, 15 bp, Homo sapiens
aaccaagcactgctg

SEQ ID NO: 1268887 - DNA, 15 bp, Homo sapiens
aaaccaagcactgct

SEQ ID NO: 1268888 - DNA, 15 bp, Homo sapiens
aaaaccaagcactgc

SEQ ID NO: 1268889 - DNA, 15 bp, Homo sapiens
aaaaaccaagcactg

SEQ ID NO: 1268890 - DNA, 15 bp, Homo sapiens
taaaaaccaagcact

SEQ ID NO: 1268891 - DNA, 15 bp, Homo sapiens
gtaaaaaccaagcac

SEQ ID NO: 1268892 - DNA, 15 bp, Homo sapiens
agtaaaaaccaagca

SEQ ID NO: 1268893 - DNA, 15 bp, Homo sapiens
cagtaaaaaccaagc

SEQ ID NO: 1268894 - DNA, 15 bp, Homo sapiens
acagtaaaaaccaag

SEQ ID NO: 1268895 - DNA, 15 bp, Homo sapiens
aacagtaaaaaccaa

SEQ ID NO: 1268896 - DNA, 15 bp, Homo sapiens
aaacagtaaaaacca

SEQ ID NO: 1268897 - DNA, 15 bp, Homo sapiens
caaacagtaaaaacc

SEQ ID NO: 1268898 - DNA, 15 bp, Homo sapiens
gcaaacagtaaaaac

SEQ ID NO: 1268899 - DNA, 15 bp, Homo sapiens
agcaaacagtaaaaa

SEQ ID NO: 1268900 - DNA, 15 bp, Homo sapiens
aagcaaacagtaaaa

SEQ ID NO: 1268901 - DNA, 15 bp, Homo sapiens
aaagcaaacagtaaa

SEQ ID NO: 1268902 - DNA, 15 bp, Homo sapiens
caaagcaaacagtaa

SEQ ID NO: 1268903 - DNA, 15 bp, Homo sapiens
ccaaagcaaacagta

SEQ ID NO: 1268904 - DNA, 15 bp, Homo sapiens
accaaagcaaacagt

SEQ ID NO: 1268905 - DNA, 15 bp, Homo sapiens
aaccaaagcaaacag

SEQ ID NO: 1268906 - DNA, 15 bp, Homo sapiens
aaaccaaagcaaaca

SEQ ID NO: 1268907 - DNA, 15 bp, Homo sapiens
aaaaccaaagcaaac

SEQ ID NO: 1268908 - DNA, 15 bp, Homo sapiens
taaaaccaaagcaaa

SEQ ID NO: 1268909 - DNA, 15 bp, Homo sapiens
ttaaaaccaaagcaa

SEQ ID NO: 1268910 - DNA, 15 bp, Homo sapiens
attaaaaccaaagca

SEQ ID NO: 1268911 - DNA, 15 bp, Homo sapiens
aattaaaaccaaagc

SEQ ID NO: 1268912 - DNA, 15 bp, Homo sapiens
aaattaaaaccaaag

SEQ ID NO: 1268913 - DNA, 15 bp, Homo sapiens
gaaattaaaaccaaa

SEQ ID NO: 1268914 - DNA, 15 bp, Homo sapiens
ggaaattaaaaccaa

SEQ ID NO: 1268915 - DNA, 15 bp, Homo sapiens
aggaaattaaaacca

SEQ ID NO: 1268916 - DNA, 15 bp, Homo sapiens
aaggaaattaaaacc

SEQ ID NO: 1268917 - DNA, 15 bp, Homo sapiens
aaaggaaattaaaac

SEQ ID NO: 1268918 - DNA, 15 bp, Homo sapiens
aaaaggaaattaaaa

SEQ ID NO: 1268919 - DNA, 15 bp, Homo sapiens
aaaaaggaaattaaa

SEQ ID NO: 1268920 - DNA, 15 bp, Homo sapiens
taaaaaggaaattaa

SEQ ID NO: 1268921 - DNA, 15 bp, Homo sapiens
ataaaaaggaaatta

SEQ ID NO: 1268922 - DNA, 15 bp, Homo sapiens
aataaaaaggaaatt

SEQ ID NO: 1268923 - DNA, 15 bp, Homo sapiens
aaataaaaaggaaat

SEQ ID NO: 1268924 - DNA, 15 bp, Homo sapiens
aaaataaaaaggaaa

SEQ ID NO: 1268925 - DNA, 15 bp, Homo sapiens
aaaaataaaaaggaa

SEQ ID NO: 1268926 - DNA, 15 bp, Homo sapiens
aaaaaataaaaagga

SEQ ID NO: 1268927 - DNA, 15 bp, Homo sapiens
aaaaaaataaaaagg

SEQ ID NO: 1268928 - DNA, 15 bp, Homo sapiens
taaaaaaataaaaag

SEQ ID NO: 1268929 - DNA, 15 bp, Homo sapiens
ttaaaaaaataaaaa

SEQ ID NO: 1268930 - DNA, 15 bp, Homo sapiens
attaaaaaaataaaa

SEQ ID NO: 1268931 - DNA, 15 bp, Homo sapiens
aattaaaaaaataaa

SEQ ID NO: 1268932 - DNA, 15 bp, Homo sapiens
aaattaaaaaaataa

SEQ ID NO: 1268933 - DNA, 15 bp, Homo sapiens
gaaattaaaaaaata

SEQ ID NO: 1268934 - DNA, 15 bp, Homo sapiens
tgaaattaaaaaaat

SEQ ID NO: 1268935 - DNA, 15 bp, Homo sapiens
ctgaaattaaaaaaa

SEQ ID NO: 1268936 - DNA, 15 bp, Homo sapiens
tctgaaattaaaaaa

SEQ ID NO: 1268937 - DNA, 15 bp, Homo sapiens
ttctgaaattaaaaa

SEQ ID NO: 1268938 - DNA, 15 bp, Homo sapiens
cttctgaaattaaaa

SEQ ID NO: 1268939 - DNA, 15 bp, Homo sapiens
ccttctgaaattaaa

SEQ ID NO: 1268940 - DNA, 15 bp, Homo sapiens
accttctgaaattaa

SEQ ID NO: 1268941 - DNA, 15 bp, Homo sapiens
caccttctgaaatta

SEQ ID NO: 1268942 - DNA, 15 bp, Homo sapiens
ccaccttctgaaatt

SEQ ID NO: 1268943 - DNA, 15 bp, Homo sapiens
tccaccttctgaaat

SEQ ID NO: 1268944 - DNA, 15 bp, Homo sapiens
ttccaccttctgaaa

SEQ ID NO: 1268945 - DNA, 15 bp, Homo sapiens
cttccaccttctgaa

SEQ ID NO: 1268946 - DNA, 15 bp, Homo sapiens
gcttccaccttctga

SEQ ID NO: 1268947 - DNA, 15 bp, Homo sapiens
agcttccaccttctg

SEQ ID NO: 1268948 - DNA, 15 bp, Homo sapiens
aagcttccaccttct

SEQ ID NO: 1268949 - DNA, 15 bp, Homo sapiens
taagcttccaccttc

SEQ ID NO: 1268950 - DNA, 15 bp, Homo sapiens
ataagcttccacctt

SEQ ID NO: 1268951 - DNA, 15 bp, Homo sapiens
cataagcttccacct

SEQ ID NO: 1268952 - DNA, 15 bp, Homo sapiens
acataagcttccacc

SEQ ID NO: 1268953 - DNA, 15 bp, Homo sapiens
gacataagcttccac

SEQ ID NO: 1268954 - DNA, 15 bp, Homo sapiens
tgacataagcttcca

SEQ ID NO: 1268955 - DNA, 15 bp, Homo sapiens
atgacataagcttcc

SEQ ID NO: 1268956 - DNA, 15 bp, Homo sapiens
aatgacataagcttc

SEQ ID NO: 1268957 - DNA, 15 bp, Homo sapiens
caatgacataagctt

SEQ ID NO: 1268958 - DNA, 15 bp, Homo sapiens
tcaatgacataagct

SEQ ID NO: 1268959 - DNA, 15 bp, Homo sapiens
gtcaatgacataagc

SEQ ID NO: 1268960 - DNA, 15 bp, Homo sapiens
agtcaatgacataag

SEQ ID NO: 1268961 - DNA, 15 bp, Homo sapiens
aagtcaatgacataa

SEQ ID NO: 1268962 - DNA, 15 bp, Homo sapiens
caagtcaatgacata

SEQ ID NO: 1268963 - DNA, 15 bp, Homo sapiens
tcaagtcaatgacat

SEQ ID NO: 1268964 - DNA, 15 bp, Homo sapiens
ctcaagtcaatgaca

SEQ ID NO: 1268965 - DNA, 15 bp, Homo sapiens
gctcaagtcaatgac

SEQ ID NO: 1268966 - DNA, 15 bp, Homo sapiens
tgctcaagtcaatga

SEQ ID NO: 1268967 - DNA, 15 bp, Homo sapiens
atgctcaagtcaatg

SEQ ID NO: 1268968 - DNA, 15 bp, Homo sapiens
aatgctcaagtcaat

SEQ ID NO: 1268969 - DNA, 15 bp, Homo sapiens
aaatgctcaagtcaa

SEQ ID NO: 1268970 - DNA, 15 bp, Homo sapiens
aaaatgctcaagtca

SEQ ID NO: 1268971 - DNA, 15 bp, Homo sapiens
aaaaatgctcaagtc

SEQ ID NO: 1268972 - DNA, 15 bp, Homo sapiens
aaaaaatgctcaagt

SEQ ID NO: 1268973 - DNA, 15 bp, Homo sapiens
taaaaaatgctcaag

SEQ ID NO: 1268974 - DNA, 15 bp, Homo sapiens
ataaaaaatgctcaa

SEQ ID NO: 1268975 - DNA, 15 bp, Homo sapiens
cataaaaaatgctca

SEQ ID NO: 1268976 - DNA, 15 bp, Homo sapiens
gcataaaaaatgctc

SEQ ID NO: 1268977 - DNA, 15 bp, Homo sapiens
tgcataaaaaatgct

SEQ ID NO: 1268978 - DNA, 15 bp, Homo sapiens
atgcataaaaaatgc

SEQ ID NO: 1268979 - DNA, 15 bp, Homo sapiens
catgcataaaaaatg

SEQ ID NO: 1268980 - DNA, 15 bp, Homo sapiens
acatgcataaaaaat

SEQ ID NO: 1268981 - DNA, 15 bp, Homo sapiens
aacatgcataaaaaa

SEQ ID NO: 1268982 - DNA, 15 bp, Homo sapiens
aaacatgcataaaaa

SEQ ID NO: 1268983 - DNA, 15 bp, Homo sapiens
aaaacatgcataaaa

SEQ ID NO: 1268984 - DNA, 15 bp, Homo sapiens
taaaacatgcataaa

SEQ ID NO: 1268985 - DNA, 15 bp, Homo sapiens
ctaaaacatgcataa

SEQ ID NO: 1268986 - DNA, 15 bp, Homo sapiens
actaaaacatgcata

SEQ ID NO: 1268987 - DNA, 15 bp, Homo sapiens
cactaaaacatgcat

SEQ ID NO: 1268988 - DNA, 15 bp, Homo sapiens
gcactaaaacatgca

SEQ ID NO: 1268989 - DNA, 15 bp, Homo sapiens
ggcactaaaacatgc

SEQ ID NO: 1268990 - DNA, 15 bp, Homo sapiens
aggcactaaaacatg

SEQ ID NO: 1268991 - DNA, 15 bp, Homo sapiens
gaggcactaaaacat

SEQ ID NO: 1268992 - DNA, 15 bp, Homo sapiens
agaggcactaaaaca

SEQ ID NO: 1268993 - DNA, 15 bp, Homo sapiens
aagaggcactaaaac

SEQ ID NO: 1268994 - DNA, 15 bp, Homo sapiens
aaagaggcactaaaa

SEQ ID NO: 1268995 - DNA, 15 bp, Homo sapiens
gaaagaggcactaaa

SEQ ID NO: 1268996 - DNA, 15 bp, Homo sapiens
agaaagaggcactaa

SEQ ID NO: 1268997 - DNA, 15 bp, Homo sapiens
cagaaagaggcacta

SEQ ID NO: 1268998 - DNA, 15 bp, Homo sapiens
tcagaaagaggcact

SEQ ID NO: 1268999 - DNA, 15 bp, Homo sapiens
gtcagaaagaggcac

SEQ ID NO: 1269000 - DNA, 15 bp, Homo sapiens
agtcagaaagaggca

SEQ ID NO: 1269001 - DNA, 15 bp, Homo sapiens
tagtcagaaagaggc

SEQ ID NO: 1269002 - DNA, 15 bp, Homo sapiens
ctagtcagaaagagg

SEQ ID NO: 1269003 - DNA, 15 bp, Homo sapiens
actagtcagaaagag

SEQ ID NO: 1269004 - DNA, 15 bp, Homo sapiens
gactagtcagaaaga

SEQ ID NO: 1269005 - DNA, 15 bp, Homo sapiens
agactagtcagaaag

SEQ ID NO: 1269006 - DNA, 15 bp, Homo sapiens
gagactagtcagaaa

SEQ ID NO: 1269007 - DNA, 15 bp, Homo sapiens
agagactagtcagaa

SEQ ID NO: 1269008 - DNA, 15 bp, Homo sapiens
aagagactagtcaga

SEQ ID NO: 1269009 - DNA, 15 bp, Homo sapiens
gaagagactagtcag

SEQ ID NO: 1269010 - DNA, 15 bp, Homo sapiens
agaagagactagtca

SEQ ID NO: 1269011 - DNA, 15 bp, Homo sapiens
aagaagagactagtc

SEQ ID NO: 1269012 - DNA, 15 bp, Homo sapiens
aaagaagagactagt

SEQ ID NO: 1269013 - DNA, 15 bp, Homo sapiens
aaaagaagagactag

SEQ ID NO: 1269014 - DNA, 15 bp, Homo sapiens
gaaaagaagagacta

SEQ ID NO: 1269015 - DNA, 15 bp, Homo sapiens
agaaaagaagagact

SEQ ID NO: 1269016 - DNA, 15 bp, Homo sapiens
gagaaaagaagagac

SEQ ID NO: 1269017 - DNA, 15 bp, Homo sapiens
ggagaaaagaagaga

SEQ ID NO: 1269018 - DNA, 15 bp, Homo sapiens
tggagaaaagaagag

SEQ ID NO: 1269019 - DNA, 15 bp, Homo sapiens
atggagaaaagaaga

SEQ ID NO: 1269020 - DNA, 15 bp, Homo sapiens
gatggagaaaagaag

SEQ ID NO: 1269021 - DNA, 15 bp, Homo sapiens
ggatggagaaaagaa

SEQ ID NO: 1269022 - DNA, 15 bp, Homo sapiens
tggatggagaaaaga

SEQ ID NO: 1269023 - DNA, 15 bp, Homo sapiens
ttggatggagaaaag

SEQ ID NO: 1269024 - DNA, 15 bp, Homo sapiens
attggatggagaaaa

SEQ ID NO: 1269025 - DNA, 15 bp, Homo sapiens
gattggatggagaaa

SEQ ID NO: 1269026 - DNA, 15 bp, Homo sapiens
ggattggatggagaa

SEQ ID NO: 1269027 - DNA, 15 bp, Homo sapiens
tggattggatggaga

SEQ ID NO: 1269028 - DNA, 15 bp, Homo sapiens
atggattggatggag

SEQ ID NO: 1269029 - DNA, 15 bp, Homo sapiens
gatggattggatgga

SEQ ID NO: 1269030 - DNA, 15 bp, Homo sapiens
ggatggattggatgg

SEQ ID NO: 1269031 - DNA, 15 bp, Homo sapiens
aggatggattggatg

SEQ ID NO: 1269032 - DNA, 15 bp, Homo sapiens
caggatggattggat

SEQ ID NO: 1269033 - DNA, 15 bp, Homo sapiens
acaggatggattgga

SEQ ID NO: 1269034 - DNA, 15 bp, Homo sapiens
cacaggatggattgg

SEQ ID NO: 1269035 - DNA, 15 bp, Homo sapiens
gcacaggatggattg

SEQ ID NO: 1269036 - DNA, 15 bp, Homo sapiens
ggcacaggatggatt

SEQ ID NO: 1269037 - DNA, 15 bp, Homo sapiens
aggcacaggatggat

SEQ ID NO: 1269038 - DNA, 15 bp, Homo sapiens
caggcacaggatgga

SEQ ID NO: 1269039 - DNA, 15 bp, Homo sapiens
tcaggcacaggatgg

SEQ ID NO: 1269040 - DNA, 15 bp, Homo sapiens
atcaggcacaggatg

SEQ ID NO: 1269041 - DNA, 15 bp, Homo sapiens
aatcaggcacaggat

SEQ ID NO: 1269042 - DNA, 15 bp, Homo sapiens
aaatcaggcacagga

SEQ ID NO: 1269043 - DNA, 15 bp, Homo sapiens
aaaatcaggcacagg

SEQ ID NO: 1269044 - DNA, 15 bp, Homo sapiens
aaaaatcaggcacag

SEQ ID NO: 1269045 - DNA, 15 bp, Homo sapiens
taaaaatcaggcaca

SEQ ID NO: 1269046 - DNA, 15 bp, Homo sapiens
ctaaaaatcaggcac

SEQ ID NO: 1269047 - DNA, 15 bp, Homo sapiens
tctaaaaatcaggca

SEQ ID NO: 1269048 - DNA, 15 bp, Homo sapiens
ttctaaaaatcaggc

SEQ ID NO: 1269049 - DNA, 15 bp, Homo sapiens
tttctaaaaatcagg

SEQ ID NO: 1269050 - DNA, 15 bp, Homo sapiens
ttttctaaaaatcag

SEQ ID NO: 1269051 - DNA, 15 bp, Homo sapiens
cttttctaaaaatca

SEQ ID NO: 1269052 - DNA, 15 bp, Homo sapiens
tcttttctaaaaatc

SEQ ID NO: 1269053 - DNA, 15 bp, Homo sapiens
gtcttttctaaaaat

SEQ ID NO: 1269054 - DNA, 15 bp, Homo sapiens
agtcttttctaaaaa

SEQ ID NO: 1269055 - DNA, 15 bp, Homo sapiens
cagtcttttctaaaa

SEQ ID NO: 1269056 - DNA, 15 bp, Homo sapiens
ccagtcttttctaaa

SEQ ID NO: 1269057 - DNA, 15 bp, Homo sapiens
accagtcttttctaa

SEQ ID NO: 1269058 - DNA, 15 bp, Homo sapiens
caccagtcttttcta

SEQ ID NO: 1269059 - DNA, 15 bp, Homo sapiens
acaccagtcttttct

SEQ ID NO: 1269060 - DNA, 15 bp, Homo sapiens
tacaccagtcttttc

SEQ ID NO: 1269061 - DNA, 15 bp, Homo sapiens
gtacaccagtctttt

SEQ ID NO: 1269062 - DNA, 15 bp, Homo sapiens
tgtacaccagtcttt

SEQ ID NO: 1269063 - DNA, 15 bp, Homo sapiens
ctgtacaccagtctt

SEQ ID NO: 1269064 - DNA, 15 bp, Homo sapiens
actgtacaccagtct

SEQ ID NO: 1269065 - DNA, 15 bp, Homo sapiens
aactgtacaccagtc

SEQ ID NO: 1269066 - DNA, 15 bp, Homo sapiens
aaactgtacaccagt

SEQ ID NO: 1269067 - DNA, 15 bp, Homo sapiens
caaactgtacaccag

SEQ ID NO: 1269068 - DNA, 15 bp, Homo sapiens
gcaaactgtacacca

SEQ ID NO: 1269069 - DNA, 15 bp, Homo sapiens
ggcaaactgtacacc

SEQ ID NO: 1269070 - DNA, 15 bp, Homo sapiens
gggcaaactgtacac

SEQ ID NO: 1269071 - DNA, 15 bp, Homo sapiens
ggggcaaactgtaca

SEQ ID NO: 1269072 - DNA, 15 bp, Homo sapiens
aggggcaaactgtac

SEQ ID NO: 1269073 - DNA, 15 bp, Homo sapiens
aaggggcaaactgta

SEQ ID NO: 1269074 - DNA, 15 bp, Homo sapiens
aaaggggcaaactgt

SEQ ID NO: 1269075 - DNA, 15 bp, Homo sapiens
aaaaggggcaaactg

SEQ ID NO: 1269076 - DNA, 15 bp, Homo sapiens
caaaaggggcaaact

SEQ ID NO: 1269077 - DNA, 15 bp, Homo sapiens
gcaaaaggggcaaac

SEQ ID NO: 1269078 - DNA, 15 bp, Homo sapiens
agcaaaaggggcaaa

SEQ ID NO: 1269079 - DNA, 15 bp, Homo sapiens
aagcaaaaggggcaa

SEQ ID NO: 1269080 - DNA, 15 bp, Homo sapiens
aaagcaaaaggggca

SEQ ID NO: 1269081 - DNA, 15 bp, Homo sapiens
taaagcaaaaggggc

SEQ ID NO: 1269082 - DNA, 15 bp, Homo sapiens
ttaaagcaaaagggg

SEQ ID NO: 1269083 - DNA, 15 bp, Homo sapiens
tttaaagcaaaaggg

SEQ ID NO: 1269084 - DNA, 15 bp, Homo sapiens
ttttaaagcaaaagg

SEQ ID NO: 1269085 - DNA, 15 bp, Homo sapiens
attttaaagcaaaag

SEQ ID NO: 1269086 - DNA, 15 bp, Homo sapiens
aaattttaaagcaaa

SEQ ID NO: 1269087 - DNA, 15 bp, Homo sapiens
taaattttaaagcaa

SEQ ID NO: 1269088 - DNA, 15 bp, Homo sapiens
ataaattttaaagca

SEQ ID NO: 1269089 - DNA, 15 bp, Homo sapiens
aataaattttaaagc

SEQ ID NO: 1269090 - DNA, 15 bp, Homo sapiens
aaataaattttaaag

SEQ ID NO: 1269091 - DNA, 15 bp, Homo sapiens
aaaataaattttaaa

SEQ ID NO: 1269092 - DNA, 15 bp, Homo sapiens
aaaaataaattttaa

SEQ ID NO: 1269093 - DNA, 15 bp, Homo sapiens
gaaaaataaatttta

SEQ ID NO: 1269094 - DNA, 15 bp, Homo sapiens
tgaaaaataaatttt

SEQ ID NO: 1269095 - DNA, 15 bp, Homo sapiens
atgaaaaataaattt

SEQ ID NO: 1269096 - DNA, 15 bp, Homo sapiens
aatgaaaaataaatt

SEQ ID NO: 1269097 - DNA, 15 bp, Homo sapiens
caatgaaaaataaat

SEQ ID NO: 1269098 - DNA, 15 bp, Homo sapiens
acaatgaaaaataaa

SEQ ID NO: 1269099 - DNA, 15 bp, Homo sapiens
aacaatgaaaaataa

SEQ ID NO: 1269100 - DNA, 15 bp, Homo sapiens
taacaatgaaaaata

SEQ ID NO: 1269101 - DNA, 15 bp, Homo sapiens
gtaacaatgaaaaat

SEQ ID NO: 1269102 - DNA, 15 bp, Homo sapiens
tgtaacaatgaaaaa

SEQ ID NO: 1269103 - DNA, 15 bp, Homo sapiens
ttgtaacaatgaaaa

SEQ ID NO: 1269104 - DNA, 15 bp, Homo sapiens
gttgtaacaatgaaa

SEQ ID NO: 1269105 - DNA, 15 bp, Homo sapiens
ggttgtaacaatgaa

SEQ ID NO: 1269106 - DNA, 15 bp, Homo sapiens
gggttgtaacaatga

SEQ ID NO: 1269107 - DNA, 15 bp, Homo sapiens
tgggttgtaacaatg

SEQ ID NO: 1269108 - DNA, 15 bp, Homo sapiens
gtgggttgtaacaat

SEQ ID NO: 1269109 - DNA, 15 bp, Homo sapiens
agtgggttgtaacaa

SEQ ID NO: 1269110 - DNA, 15 bp, Homo sapiens
gagtgggttgtaaca

SEQ ID NO: 1269111 - DNA, 15 bp, Homo sapiens
agagtgggttgtaac

SEQ ID NO: 1269112 - DNA, 15 bp, Homo sapiens
gagagtgggttgtaa

SEQ ID NO: 1269113 - DNA, 15 bp, Homo sapiens
tgagagtgggttgta

SEQ ID NO: 1269114 - DNA, 15 bp, Homo sapiens
ctgagagtgggttgt

SEQ ID NO: 1269115 - DNA, 15 bp, Homo sapiens
actgagagtgggttg

SEQ ID NO: 1269116 - DNA, 15 bp, Homo sapiens
tactgagagtgggtt

SEQ ID NO: 1269117 - DNA, 15 bp, Homo sapiens
ctactgagagtgggt

SEQ ID NO: 1269118 - DNA, 15 bp, Homo sapiens
gctactgagagtggg

SEQ ID NO: 1269119 - DNA, 15 bp, Homo sapiens
ggctactgagagtgg

SEQ ID NO: 1269120 - DNA, 15 bp, Homo sapiens
aggctactgagagtg

SEQ ID NO: 1269121 - DNA, 15 bp, Homo sapiens
gaggctactgagagt

SEQ ID NO: 1269122 - DNA, 15 bp, Homo sapiens
ggaggctactgagag

SEQ ID NO: 1269123 - DNA, 15 bp, Homo sapiens
tggaggctactgaga

SEQ ID NO: 1269124 - DNA, 15 bp, Homo sapiens
atggaggctactgag

SEQ ID NO: 1269125 - DNA, 15 bp, Homo sapiens
aatggaggctactga

SEQ ID NO: 1269126 - DNA, 15 bp, Homo sapiens
caatggaggctactg

SEQ ID NO: 1269127 - DNA, 15 bp, Homo sapiens
acaatggaggctact

SEQ ID NO: 1269128 - DNA, 15 bp, Homo sapiens
tacaatggaggctac

SEQ ID NO: 1269129 - DNA, 15 bp, Homo sapiens
ttacaatggaggcta

SEQ ID NO: 1269130 - DNA, 15 bp, Homo sapiens
gttacaatggaggct

SEQ ID NO: 1269131 - DNA, 15 bp, Homo sapiens
tgttacaatggaggc

SEQ ID NO: 1269132 - DNA, 15 bp, Homo sapiens
gtgttacaatggagg

SEQ ID NO: 1269133 - DNA, 15 bp, Homo sapiens
ggtgttacaatggag

SEQ ID NO: 1269134 - DNA, 15 bp, Homo sapiens
gggtgttacaatgga

SEQ ID NO: 1269135 - DNA, 15 bp, Homo sapiens
agggtgttacaatgg

SEQ ID NO: 1269136 - DNA, 15 bp, Homo sapiens
gagggtgttacaatg

SEQ ID NO: 1269137 - DNA, 15 bp, Homo sapiens
ggagggtgttacaat

SEQ ID NO: 1269138 - DNA, 15 bp, Homo sapiens
gggagggtgttacaa

SEQ ID NO: 1269139 - DNA, 15 bp, Homo sapiens
tgggagggtgttaca

SEQ ID NO: 1269140 - DNA, 15 bp, Homo sapiens
atgggagggtgttac

SEQ ID NO: 1269141 - DNA, 15 bp, Homo sapiens
catgggagggtgtta

SEQ ID NO: 1269142 - DNA, 15 bp, Homo sapiens
gcatgggagggtgtt

SEQ ID NO: 1269143 - DNA, 15 bp, Homo sapiens
agcatgggagggtgt

SEQ ID NO: 1269144 - DNA, 15 bp, Homo sapiens
gagcatgggagggtg

SEQ ID NO: 1269145 - DNA, 15 bp, Homo sapiens
ggagcatgggagggt

SEQ ID NO: 1269146 - DNA, 15 bp, Homo sapiens
gggagcatgggaggg

SEQ ID NO: 1269147 - DNA, 15 bp, Homo sapiens
tgggagcatgggagg

SEQ ID NO: 1269148 - DNA, 15 bp, Homo sapiens
gtgggagcatgggag

SEQ ID NO: 1269149 - DNA, 15 bp, Homo sapiens
ggtgggagcatggga

SEQ ID NO: 1269150 - DNA, 15 bp, Homo sapiens
tggtgggagcatggg

SEQ ID NO: 1269151 - DNA, 15 bp, Homo sapiens
gtggtgggagcatgg

SEQ ID NO: 1269152 - DNA, 15 bp, Homo sapiens
ggtggtgggagcatg

SEQ ID NO: 1269153 - DNA, 15 bp, Homo sapiens
tggtggtgggagcat

SEQ ID NO: 1269154 - DNA, 15 bp, Homo sapiens
atggtggtgggagca

SEQ ID NO: 1269155 - DNA, 15 bp, Homo sapiens
aatggtggtgggagc

SEQ ID NO: 1269156 - DNA, 15 bp, Homo sapiens
taatggtggtgggag

SEQ ID NO: 1269157 - DNA, 15 bp, Homo sapiens
ataatggtggtggga

SEQ ID NO: 1269158 - DNA, 15 bp, Homo sapiens
cataatggtggtggg

SEQ ID NO: 1269159 - DNA, 15 bp, Homo sapiens
tcataatggtggtgg

SEQ ID NO: 1269160 - DNA, 15 bp, Homo sapiens
ttcataatggtggtg

SEQ ID NO: 1269161 - DNA, 15 bp, Homo sapiens
cttcataatggtggt

SEQ ID NO: 1269162 - DNA, 15 bp, Homo sapiens
tcttcataatggtgg

SEQ ID NO: 1269163 - DNA, 15 bp, Homo sapiens
ttcttcataatggtg

SEQ ID NO: 1269164 - DNA, 15 bp, Homo sapiens
cttcttcataatggt

SEQ ID NO: 1269165 - DNA, 15 bp, Homo sapiens
acttcttcataatgg

SEQ ID NO: 1269166 - DNA, 15 bp, Homo sapiens
tacttcttcataatg

SEQ ID NO: 1269167 - DNA, 15 bp, Homo sapiens
ttacttcttcataat

SEQ ID NO: 1269168 - DNA, 15 bp, Homo sapiens
tttacttcttcataa

SEQ ID NO: 1269169 - DNA, 15 bp, Homo sapiens
ctttacttcttcata

SEQ ID NO: 1269170 - DNA, 15 bp, Homo sapiens
actttacttcttcat

SEQ ID NO: 1269171 - DNA, 15 bp, Homo sapiens
gactttacttcttca

SEQ ID NO: 1269172 - DNA, 15 bp, Homo sapiens
ggactttacttcttc

SEQ ID NO: 1269173 - DNA, 15 bp, Homo sapiens
tggactttacttctt

SEQ ID NO: 1269174 - DNA, 15 bp, Homo sapiens
ttggactttacttct

SEQ ID NO: 1269175 - DNA, 15 bp, Homo sapiens
tttggactttacttc

SEQ ID NO: 1269176 - DNA, 15 bp, Homo sapiens
gtttggactttactt

SEQ ID NO: 1269177 - DNA, 15 bp, Homo sapiens
agtttggactttact

SEQ ID NO: 1269178 - DNA, 15 bp, Homo sapiens
aagtttggactttac

SEQ ID NO: 1269179 - DNA, 15 bp, Homo sapiens
aaagtttggacttta

SEQ ID NO: 1269180 - DNA, 15 bp, Homo sapiens
gaaagtttggacttt

SEQ ID NO: 1269181 - DNA, 15 bp, Homo sapiens
agaaagtttggactt

SEQ ID NO: 1269182 - DNA, 15 bp, Homo sapiens
gagaaagtttggact

SEQ ID NO: 1269183 - DNA, 15 bp, Homo sapiens
tgagaaagtttggac

SEQ ID NO: 1269184 - DNA, 15 bp, Homo sapiens
ctgagaaagtttgga

SEQ ID NO: 1269185 - DNA, 15 bp, Homo sapiens
actgagaaagtttgg

SEQ ID NO: 1269186 - DNA, 15 bp, Homo sapiens
tactgagaaagtttg

SEQ ID NO: 1269187 - DNA, 15 bp, Homo sapiens
atactgagaaagttt

SEQ ID NO: 1269188 - DNA, 15 bp, Homo sapiens
aatactgagaaagtt

SEQ ID NO: 1269189 - DNA, 15 bp, Homo sapiens
aaatactgagaaagt

SEQ ID NO: 1269190 - DNA, 15 bp, Homo sapiens
caaatactgagaaag

SEQ ID NO: 1269191 - DNA, 15 bp, Homo sapiens
acaaatactgagaaa

SEQ ID NO: 1269192 - DNA, 15 bp, Homo sapiens
tacaaatactgagaa

SEQ ID NO: 1269193 - DNA, 15 bp, Homo sapiens
ctacaaatactgaga

SEQ ID NO: 1269194 - DNA, 15 bp, Homo sapiens
actacaaatactgag

SEQ ID NO: 1269195 - DNA, 15 bp, Homo sapiens
aactacaaatactga

SEQ ID NO: 1269196 - DNA, 15 bp, Homo sapiens
gaactacaaatactg

SEQ ID NO: 1269197 - DNA, 15 bp, Homo sapiens
agaactacaaatact

SEQ ID NO: 1269198 - DNA, 15 bp, Homo sapiens
aagaactacaaatac

SEQ ID NO: 1269199 - DNA, 15 bp, Homo sapiens
gaagaactacaaata

SEQ ID NO: 1269200 - DNA, 15 bp, Homo sapiens
tgaagaactacaaat

SEQ ID NO: 1269201 - DNA, 15 bp, Homo sapiens
atgaagaactacaaa

SEQ ID NO: 1269202 - DNA, 15 bp, Homo sapiens
catgaagaactacaa

SEQ ID NO: 1269203 - DNA, 15 bp, Homo sapiens
ccatgaagaactaca

SEQ ID NO: 1269204 - DNA, 15 bp, Homo sapiens
accatgaagaactac

SEQ ID NO: 1269205 - DNA, 15 bp, Homo sapiens
gaccatgaagaacta

SEQ ID NO: 1269206 - DNA, 15 bp, Homo sapiens
agaccatgaagaact

SEQ ID NO: 1269207 - DNA, 15 bp, Homo sapiens
cagaccatgaagaac

SEQ ID NO: 1269208 - DNA, 15 bp, Homo sapiens
acagaccatgaagaa

SEQ ID NO: 1269209 - DNA, 15 bp, Homo sapiens
cacagaccatgaaga

SEQ ID NO: 1269210 - DNA, 15 bp, Homo sapiens
gcacagaccatgaag

SEQ ID NO: 1269211 - DNA, 15 bp, Homo sapiens
agcacagaccatgaa

SEQ ID NO: 1269212 - DNA, 15 bp, Homo sapiens
aagcacagaccatga

SEQ ID NO: 1269213 - DNA, 15 bp, Homo sapiens
aaagcacagaccatg

SEQ ID NO: 1269214 - DNA, 15 bp, Homo sapiens
taaagcacagaccat

SEQ ID NO: 1269215 - DNA, 15 bp, Homo sapiens
ttaaagcacagacca

SEQ ID NO: 1269216 - DNA, 15 bp, Homo sapiens
gttaaagcacagacc

SEQ ID NO: 1269217 - DNA, 15 bp, Homo sapiens
ggttaaagcacagac

SEQ ID NO: 1269218 - DNA, 15 bp, Homo sapiens
aggttaaagcacaga

SEQ ID NO: 1269219 - DNA, 15 bp, Homo sapiens
aaggttaaagcacag

SEQ ID NO: 1269220 - DNA, 15 bp, Homo sapiens
gaaggttaaagcaca

SEQ ID NO: 1269221 - DNA, 15 bp, Homo sapiens
ggaaggttaaagcac

SEQ ID NO: 1269222 - DNA, 15 bp, Homo sapiens
aggaaggttaaagca

SEQ ID NO: 1269223 - DNA, 15 bp, Homo sapiens
aaggaaggttaaagc

SEQ ID NO: 1269224 - DNA, 15 bp, Homo sapiens
gaaggaaggttaaag

SEQ ID NO: 1269225 - DNA, 15 bp, Homo sapiens
ggaaggaaggttaaa

SEQ ID NO: 1269226 - DNA, 15 bp, Homo sapiens
tggaaggaaggttaa

SEQ ID NO: 1269227 - DNA, 15 bp, Homo sapiens
ctggaaggaaggtta

SEQ ID NO: 1269228 - DNA, 15 bp, Homo sapiens
actggaaggaaggtt

SEQ ID NO: 1269229 - DNA, 15 bp, Homo sapiens
gactggaaggaaggt

SEQ ID NO: 1269230 - DNA, 15 bp, Homo sapiens
agactggaaggaagg

SEQ ID NO: 1269231 - DNA, 15 bp, Homo sapiens
aagactggaaggaag

SEQ ID NO: 1269232 - DNA, 15 bp, Homo sapiens
taagactggaaggaa

SEQ ID NO: 1269233 - DNA, 15 bp, Homo sapiens
ataagactggaagga

SEQ ID NO: 1269234 - DNA, 15 bp, Homo sapiens
aataagactggaagg

SEQ ID NO: 1269235 - DNA, 15 bp, Homo sapiens
aaataagactggaag

SEQ ID NO: 1269236 - DNA, 15 bp, Homo sapiens
aaaataagactggaa

SEQ ID NO: 1269237 - DNA, 15 bp, Homo sapiens
aaaaataagactgga

SEQ ID NO: 1269238 - DNA, 15 bp, Homo sapiens
aaaaaataagactgg

SEQ ID NO: 1269239 - DNA, 15 bp, Homo sapiens
taaaaaataagactg

SEQ ID NO: 1269240 - DNA, 15 bp, Homo sapiens
ataaaaaataagact

SEQ ID NO: 1269241 - DNA, 15 bp, Homo sapiens
aataaaaaataagac

SEQ ID NO: 1269242 - DNA, 15 bp, Homo sapiens
aaataaaaaataaga

SEQ ID NO: 1269243 - DNA, 15 bp, Homo sapiens
gaaataaaaaataag

SEQ ID NO: 1269244 - DNA, 15 bp, Homo sapiens
ggaaataaaaaataa

SEQ ID NO: 1269245 - DNA, 15 bp, Homo sapiens
tggaaataaaaaata

SEQ ID NO: 1269246 - DNA, 15 bp, Homo sapiens
atggaaataaaaaat

SEQ ID NO: 1269247 - DNA, 15 bp, Homo sapiens
aatggaaataaaaaa

SEQ ID NO: 1269248 - DNA, 15 bp, Homo sapiens
caatggaaataaaaa

SEQ ID NO: 1269249 - DNA, 15 bp, Homo sapiens
acaatggaaataaaa

SEQ ID NO: 1269250 - DNA, 15 bp, Homo sapiens
aacaatggaaataaa

SEQ ID NO: 1269251 - DNA, 15 bp, Homo sapiens
caacaatggaaataa

SEQ ID NO: 1269252 - DNA, 15 bp, Homo sapiens
ccaacaatggaaata

SEQ ID NO: 1269253 - DNA, 15 bp, Homo sapiens
gccaacaatggaaat

SEQ ID NO: 1269254 - DNA, 15 bp, Homo sapiens
ggccaacaatggaaa

SEQ ID NO: 1269255 - DNA, 15 bp, Homo sapiens
gggccaacaatggaa

SEQ ID NO: 1269256 - DNA, 15 bp, Homo sapiens
ggggccaacaatgga

SEQ ID NO: 1269257 - DNA, 15 bp, Homo sapiens
gggggccaacaatgg

SEQ ID NO: 1269258 - DNA, 15 bp, Homo sapiens
tgggggccaacaatg

SEQ ID NO: 1269259 - DNA, 15 bp, Homo sapiens
ttgggggccaacaat

SEQ ID NO: 1269260 - DNA, 15 bp, Homo sapiens
attgggggccaacaa

SEQ ID NO: 1269261 - DNA, 15 bp, Homo sapiens
cattgggggccaaca

SEQ ID NO: 1269262 - DNA, 15 bp, Homo sapiens
gcattgggggccaac

SEQ ID NO: 1269263 - DNA, 15 bp, Homo sapiens
ggcattgggggccaa

SEQ ID NO: 1269264 - DNA, 15 bp, Homo sapiens
aggcattgggggcca

SEQ ID NO: 1269265 - DNA, 15 bp, Homo sapiens
caggcattgggggcc

SEQ ID NO: 1269266 - DNA, 15 bp, Homo sapiens
acaggcattgggggc

SEQ ID NO: 1269267 - DNA, 15 bp, Homo sapiens
cacaggcattggggg

SEQ ID NO: 1269268 - DNA, 15 bp, Homo sapiens
acacaggcattgggg

SEQ ID NO: 1269269 - DNA, 15 bp, Homo sapiens
aacacaggcattggg

SEQ ID NO: 1269270 - DNA, 15 bp, Homo sapiens
gaacacaggcattgg

SEQ ID NO: 1269271 - DNA, 15 bp, Homo sapiens
agaacacaggcattg

SEQ ID NO: 1269272 - DNA, 15 bp, Homo sapiens
gagaacacaggcatt

SEQ ID NO: 1269273 - DNA, 15 bp, Homo sapiens
agagaacacaggcat

SEQ ID NO: 1269274 - DNA, 15 bp, Homo sapiens
aagagaacacaggca

SEQ ID NO: 1269275 - DNA, 15 bp, Homo sapiens
gaagagaacacaggc

SEQ ID NO: 1269276 - DNA, 15 bp, Homo sapiens
ggaagagaacacagg

SEQ ID NO: 1269277 - DNA, 15 bp, Homo sapiens
gggaagagaacacag

SEQ ID NO: 1269278 - DNA, 15 bp, Homo sapiens
agggaagagaacaca

SEQ ID NO: 1269279 - DNA, 15 bp, Homo sapiens
aagggaagagaacac

SEQ ID NO: 1269280 - DNA, 15 bp, Homo sapiens
gaagggaagagaaca

SEQ ID NO: 1269281 - DNA, 15 bp, Homo sapiens
ggaagggaagagaac

SEQ ID NO: 1269282 - DNA, 15 bp, Homo sapiens
tggaagggaagagaa

SEQ ID NO: 1269283 - DNA, 15 bp, Homo sapiens
atggaagggaagaga

SEQ ID NO: 1269284 - DNA, 15 bp, Homo sapiens
tatggaagggaagag

SEQ ID NO: 1269285 - DNA, 15 bp, Homo sapiens
atatggaagggaaga

SEQ ID NO: 1269286 - DNA, 15 bp, Homo sapiens
catatggaagggaag

SEQ ID NO: 1269287 - DNA, 15 bp, Homo sapiens
tcatatggaagggaa

SEQ ID NO: 1269288 - DNA, 15 bp, Homo sapiens
ttcatatggaaggga

SEQ ID NO: 1269289 - DNA, 15 bp, Homo sapiens
attcatatggaaggg

SEQ ID NO: 1269290 - DNA, 15 bp, Homo sapiens
gattcatatggaagg

SEQ ID NO: 1269291 - DNA, 15 bp, Homo sapiens
agattcatatggaag

SEQ ID NO: 1269292 - DNA, 15 bp, Homo sapiens
aagattcatatggaa

SEQ ID NO: 1269293 - DNA, 15 bp, Homo sapiens
gaagattcatatgga

SEQ ID NO: 1269294 - DNA, 15 bp, Homo sapiens
ggaagattcatatgg

SEQ ID NO: 1269295 - DNA, 15 bp, Homo sapiens
tggaagattcatatg

SEQ ID NO: 1269296 - DNA, 15 bp, Homo sapiens
atggaagattcatat

SEQ ID NO: 1269297 - DNA, 15 bp, Homo sapiens
tatggaagattcata

SEQ ID NO: 1269298 - DNA, 15 bp, Homo sapiens
atatggaagattcat

SEQ ID NO: 1269299 - DNA, 15 bp, Homo sapiens
catatggaagattca

SEQ ID NO: 1269300 - DNA, 15 bp, Homo sapiens
tcatatggaagattc

SEQ ID NO: 1269301 - DNA, 15 bp, Homo sapiens
ttcatatggaagatt

SEQ ID NO: 1269302 - DNA, 15 bp, Homo sapiens
attcatatggaagat

SEQ ID NO: 1269303 - DNA, 15 bp, Homo sapiens
tattcatatggaaga

SEQ ID NO: 1269304 - DNA, 15 bp, Homo sapiens
atattcatatggaag

SEQ ID NO: 1269305 - DNA, 15 bp, Homo sapiens
gatattcatatggaa

SEQ ID NO: 1269306 - DNA, 15 bp, Homo sapiens
agatattcatatgga

SEQ ID NO: 1269307 - DNA, 15 bp, Homo sapiens
aagatattcatatgg

SEQ ID NO: 1269308 - DNA, 15 bp, Homo sapiens
gaagatattcatatg

SEQ ID NO: 1269309 - DNA, 15 bp, Homo sapiens
ggaagatattcatat

SEQ ID NO: 1269310 - DNA, 15 bp, Homo sapiens
tggaagatattcata

SEQ ID NO: 1269311 - DNA, 15 bp, Homo sapiens
atggaagatattcat

SEQ ID NO: 1269312 - DNA, 15 bp, Homo sapiens
tatggaagatattca

SEQ ID NO: 1269313 - DNA, 15 bp, Homo sapiens
atatggaagatattc

SEQ ID NO: 1269314 - DNA, 15 bp, Homo sapiens
catatggaagatatt

SEQ ID NO: 1269315 - DNA, 15 bp, Homo sapiens
tcatatggaagatat

SEQ ID NO: 1269316 - DNA, 15 bp, Homo sapiens
ttcatatggaagata

SEQ ID NO: 1269317 - DNA, 15 bp, Homo sapiens
catattcatatggaa

SEQ ID NO: 1269318 - DNA, 15 bp, Homo sapiens
tcatattcatatgga

SEQ ID NO: 1269319 - DNA, 15 bp, Homo sapiens
atcatattcatatgg

SEQ ID NO: 1269320 - DNA, 15 bp, Homo sapiens
tatcatattcatatg

SEQ ID NO: 1269321 - DNA, 15 bp, Homo sapiens
ctatcatattcatat

SEQ ID NO: 1269322 - DNA, 15 bp, Homo sapiens
actatcatattcata

SEQ ID NO: 1269323 - DNA, 15 bp, Homo sapiens
tactatcatattcat

SEQ ID NO: 1269324 - DNA, 15 bp, Homo sapiens
atactatcatattca

SEQ ID NO: 1269325 - DNA, 15 bp, Homo sapiens
aatactatcatattc

SEQ ID NO: 1269326 - DNA, 15 bp, Homo sapiens
gaatactatcatatt

SEQ ID NO: 1269327 - DNA, 15 bp, Homo sapiens
tgaatactatcatat

SEQ ID NO: 1269328 - DNA, 15 bp, Homo sapiens
atgaatactatcata

SEQ ID NO: 1269329 - DNA, 15 bp, Homo sapiens
tatgaatactatcat

SEQ ID NO: 1269330 - DNA, 15 bp, Homo sapiens
atatgaatactatca

SEQ ID NO: 1269331 - DNA, 15 bp, Homo sapiens
aatatgaatactatc

SEQ ID NO: 1269332 - DNA, 15 bp, Homo sapiens
gaatatgaatactat

SEQ ID NO: 1269333 - DNA, 15 bp, Homo sapiens
tgaatatgaatacta

SEQ ID NO: 1269334 - DNA, 15 bp, Homo sapiens
atgaatatgaatact

SEQ ID NO: 1269335 - DNA, 15 bp, Homo sapiens
catgaatatgaatac

SEQ ID NO: 1269336 - DNA, 15 bp, Homo sapiens
gcatgaatatgaata

SEQ ID NO: 1269337 - DNA, 15 bp, Homo sapiens
cgcatgaatatgaat

SEQ ID NO: 1269338 - DNA, 15 bp, Homo sapiens
tcgcatgaatatgaa

SEQ ID NO: 1269339 - DNA, 15 bp, Homo sapiens
atcgcatgaatatga

SEQ ID NO: 1269340 - DNA, 15 bp, Homo sapiens
gatcgcatgaatatg

SEQ ID NO: 1269341 - DNA, 15 bp, Homo sapiens
agatcgcatgaatat

SEQ ID NO: 1269342 - DNA, 15 bp, Homo sapiens
gagatcgcatgaata

SEQ ID NO: 1269343 - DNA, 15 bp, Homo sapiens
ggagatcgcatgaat

SEQ ID NO: 1269344 - DNA, 15 bp, Homo sapiens
gggagatcgcatgaa

SEQ ID NO: 1269345 - DNA, 15 bp, Homo sapiens
ggggagatcgcatga

SEQ ID NO: 1269346 - DNA, 15 bp, Homo sapiens
aggggagatcgcatg

SEQ ID NO: 1269347 - DNA, 15 bp, Homo sapiens
aaggggagatcgcat

SEQ ID NO: 1269348 - DNA, 15 bp, Homo sapiens
aaaggggagatcgca

SEQ ID NO: 1269349 - DNA, 15 bp, Homo sapiens
aaaaggggagatcgc

SEQ ID NO: 1269350 - DNA, 15 bp, Homo sapiens
aaaaaggggagatcg

SEQ ID NO: 1269351 - DNA, 15 bp, Homo sapiens
aaaaaaggggagatc

SEQ ID NO: 1269352 - DNA, 15 bp, Homo sapiens
aaaaaaaggggagat

SEQ ID NO: 1269353 - DNA, 15 bp, Homo sapiens
caaaaaaaggggaga

SEQ ID NO: 1269354 - DNA, 15 bp, Homo sapiens
ccaaaaaaaggggag

SEQ ID NO: 1269355 - DNA, 15 bp, Homo sapiens
tccaaaaaaagggga

SEQ ID NO: 1269356 - DNA, 15 bp, Homo sapiens
ttccaaaaaaagggg

SEQ ID NO: 1269357 - DNA, 15 bp, Homo sapiens
attccaaaaaaaggg

SEQ ID NO: 1269358 - DNA, 15 bp, Homo sapiens
tattccaaaaaaagg

SEQ ID NO: 1269359 - DNA, 15 bp, Homo sapiens
gtattccaaaaaaag

SEQ ID NO: 1269360 - DNA, 15 bp, Homo sapiens
ggtattccaaaaaaa

SEQ ID NO: 1269361 - DNA, 15 bp, Homo sapiens
gggtattccaaaaaa

SEQ ID NO: 1269362 - DNA, 15 bp, Homo sapiens
agggtattccaaaaa

SEQ ID NO: 1269363 - DNA, 15 bp, Homo sapiens
aagggtattccaaaa

SEQ ID NO: 1269364 - DNA, 15 bp, Homo sapiens
gaagggtattccaaa

SEQ ID NO: 1269365 - DNA, 15 bp, Homo sapiens
agaagggtattccaa

SEQ ID NO: 1269366 - DNA, 15 bp, Homo sapiens
aagaagggtattcca

SEQ ID NO: 1269367 - DNA, 15 bp, Homo sapiens
aaagaagggtattcc

SEQ ID NO: 1269368 - DNA, 15 bp, Homo sapiens
aaaagaagggtattc

SEQ ID NO: 1269369 - DNA, 15 bp, Homo sapiens
aaaaagaagggtatt

SEQ ID NO: 1269370 - DNA, 15 bp, Homo sapiens
aaaaaagaagggtat

SEQ ID NO: 1269371 - DNA, 15 bp, Homo sapiens
gaaaaaagaagggta

SEQ ID NO: 1269372 - DNA, 15 bp, Homo sapiens
agaaaaaagaagggt

SEQ ID NO: 1269373 - DNA, 15 bp, Homo sapiens
aagaaaaaagaaggg

SEQ ID NO: 1269374 - DNA, 15 bp, Homo sapiens
aaagaaaaaagaagg

SEQ ID NO: 1269375 - DNA, 15 bp, Homo sapiens
aaaagaaaaaagaag

SEQ ID NO: 1269376 - DNA, 15 bp, Homo sapiens
gctaaaagaaaaaag

SEQ ID NO: 1269377 - DNA, 15 bp, Homo sapiens
ggctaaaagaaaaaa

SEQ ID NO: 1269378 - DNA, 15 bp, Homo sapiens
aggctaaaagaaaaa

SEQ ID NO: 1269379 - DNA, 15 bp, Homo sapiens
taggctaaaagaaaa

SEQ ID NO: 1269380 - DNA, 15 bp, Homo sapiens
ttaggctaaaagaaa

SEQ ID NO: 1269381 - DNA, 15 bp, Homo sapiens
tttaggctaaaagaa

SEQ ID NO: 1269382 - DNA, 15 bp, Homo sapiens
atttaggctaaaaga

SEQ ID NO: 1269383 - DNA, 15 bp, Homo sapiens
aatttaggctaaaag

SEQ ID NO: 1269384 - DNA, 15 bp, Homo sapiens
gaatttaggctaaaa

SEQ ID NO: 1269385 - DNA, 15 bp, Homo sapiens
agaatttaggctaaa

SEQ ID NO: 1269386 - DNA, 15 bp, Homo sapiens
cagaatttaggctaa

SEQ ID NO: 1269387 - DNA, 15 bp, Homo sapiens
acagaatttaggcta

SEQ ID NO: 1269388 - DNA, 15 bp, Homo sapiens
aacagaatttaggct

SEQ ID NO: 1269389 - DNA, 15 bp, Homo sapiens
aaacagaatttaggc

SEQ ID NO: 1269390 - DNA, 15 bp, Homo sapiens
aaaacagaatttagg

SEQ ID NO: 1269391 - DNA, 15 bp, Homo sapiens
aaaaacagaatttag

SEQ ID NO: 1269392 - DNA, 15 bp, Homo sapiens
taaaaacagaattta

SEQ ID NO: 1269393 - DNA, 15 bp, Homo sapiens
cttaaaaacagaatt

SEQ ID NO: 1269394 - DNA, 15 bp, Homo sapiens
tcttaaaaacagaat

SEQ ID NO: 1269395 - DNA, 15 bp, Homo sapiens
atcttaaaaacagaa

SEQ ID NO: 1269396 - DNA, 15 bp, Homo sapiens
catcttaaaaacaga

SEQ ID NO: 1269397 - DNA, 15 bp, Homo sapiens
gcatcttaaaaacag

SEQ ID NO: 1269398 - DNA, 15 bp, Homo sapiens
tgcatcttaaaaaca

SEQ ID NO: 1269399 - DNA, 15 bp, Homo sapiens
ctgcatcttaaaaac

SEQ ID NO: 1269400 - DNA, 15 bp, Homo sapiens
actgcatcttaaaaa

SEQ ID NO: 1269401 - DNA, 15 bp, Homo sapiens
aactgcatcttaaaa

SEQ ID NO: 1269402 - DNA, 15 bp, Homo sapiens
taactgcatcttaaa

SEQ ID NO: 1269403 - DNA, 15 bp, Homo sapiens
ttaactgcatcttaa

SEQ ID NO: 1269404 - DNA, 15 bp, Homo sapiens
tttaactgcatctta

SEQ ID NO: 1269405 - DNA, 15 bp, Homo sapiens
ctttaactgcatctt

SEQ ID NO: 1269406 - DNA, 15 bp, Homo sapiens
gctttaactgcatct

SEQ ID NO: 1269407 - DNA, 15 bp, Homo sapiens
agctttaactgcatc

SEQ ID NO: 1269408 - DNA, 15 bp, Homo sapiens
aagctttaactgcat

SEQ ID NO: 1269409 - DNA, 15 bp, Homo sapiens
gaagctttaactgca

SEQ ID NO: 1269410 - DNA, 15 bp, Homo sapiens
agaagctttaactgc

SEQ ID NO: 1269411 - DNA, 15 bp, Homo sapiens
gagaagctttaactg

SEQ ID NO: 1269412 - DNA, 15 bp, Homo sapiens
ggagaagctttaact

SEQ ID NO: 1269413 - DNA, 15 bp, Homo sapiens
aggagaagctttaac

SEQ ID NO: 1269414 - DNA, 15 bp, Homo sapiens
aaggagaagctttaa

SEQ ID NO: 1269415 - DNA, 15 bp, Homo sapiens
aaaggagaagcttta

SEQ ID NO: 1269416 - DNA, 15 bp, Homo sapiens
taaaggagaagcttt

SEQ ID NO: 1269417 - DNA, 15 bp, Homo sapiens
ataaaggagaagctt

SEQ ID NO: 1269418 - DNA, 15 bp, Homo sapiens
cataaaggagaagct

SEQ ID NO: 1269419 - DNA, 15 bp, Homo sapiens
gcataaaggagaagc

SEQ ID NO: 1269420 - DNA, 15 bp, Homo sapiens
tgcataaaggagaag

SEQ ID NO: 1269421 - DNA, 15 bp, Homo sapiens
atgcataaaggagaa

SEQ ID NO: 1269422 - DNA, 15 bp, Homo sapiens
tatgcataaaggaga

SEQ ID NO: 1269423 - DNA, 15 bp, Homo sapiens
atatgcataaaggag

SEQ ID NO: 1269424 - DNA, 15 bp, Homo sapiens
gatatgcataaagga

SEQ ID NO: 1269425 - DNA, 15 bp, Homo sapiens
agatatgcataaagg

SEQ ID NO: 1269426 - DNA, 15 bp, Homo sapiens
gagatatgcataaag

SEQ ID NO: 1269427 - DNA, 15 bp, Homo sapiens
agagatatgcataaa

SEQ ID NO: 1269428 - DNA, 15 bp, Homo sapiens
aagagatatgcataa

SEQ ID NO: 1269429 - DNA, 15 bp, Homo sapiens
taagagatatgcata

SEQ ID NO: 1269430 - DNA, 15 bp, Homo sapiens
ataagagatatgcat

SEQ ID NO: 1269431 - DNA, 15 bp, Homo sapiens
ttataagagatatgc

SEQ ID NO: 1269432 - DNA, 15 bp, Homo sapiens
cttataagagatatg

SEQ ID NO: 1269433 - DNA, 15 bp, Homo sapiens
tcttataagagatat

SEQ ID NO: 1269434 - DNA, 15 bp, Homo sapiens
atcttataagagata

SEQ ID NO: 1269435 - DNA, 15 bp, Homo sapiens
tatcttataagagat

SEQ ID NO: 1269436 - DNA, 15 bp, Homo sapiens
atatcttataagaga

SEQ ID NO: 1269437 - DNA, 15 bp, Homo sapiens
tatatcttataagag

SEQ ID NO: 1269438 - DNA, 15 bp, Homo sapiens
atatatcttataaga

SEQ ID NO: 1269439 - DNA, 15 bp, Homo sapiens
aatatatcttataag

SEQ ID NO: 1269440 - DNA, 15 bp, Homo sapiens
taatatatcttataa

SEQ ID NO: 1269441 - DNA, 15 bp, Homo sapiens
ataatatatcttata

SEQ ID NO: 1269442 - DNA, 15 bp, Homo sapiens
aataatatatcttat

SEQ ID NO: 1269443 - DNA, 15 bp, Homo sapiens
aaataatatatctta

SEQ ID NO: 1269444 - DNA, 15 bp, Homo sapiens
caaataatatatctt

SEQ ID NO: 1269445 - DNA, 15 bp, Homo sapiens
gcaaataatatatct

SEQ ID NO: 1269446 - DNA, 15 bp, Homo sapiens
tgcaaataatatatc

SEQ ID NO: 1269447 - DNA, 15 bp, Homo sapiens
ctgcaaataatatat

SEQ ID NO: 1269448 - DNA, 15 bp, Homo sapiens
tctgcaaataatata

SEQ ID NO: 1269449 - DNA, 15 bp, Homo sapiens
gtctgcaaataatat

SEQ ID NO: 1269450 - DNA, 15 bp, Homo sapiens
agtctgcaaataata

SEQ ID NO: 1269451 - DNA, 15 bp, Homo sapiens
aagtctgcaaataat

SEQ ID NO: 1269452 - DNA, 15 bp, Homo sapiens
aaagtctgcaaataa

SEQ ID NO: 1269453 - DNA, 15 bp, Homo sapiens
aaaagtctgcaaata

SEQ ID NO: 1269454 - DNA, 15 bp, Homo sapiens
gaaaagtctgcaaat

SEQ ID NO: 1269455 - DNA, 15 bp, Homo sapiens
ggaaaagtctgcaaa

SEQ ID NO: 1269456 - DNA, 15 bp, Homo sapiens
gggaaaagtctgcaa

SEQ ID NO: 1269457 - DNA, 15 bp, Homo sapiens
ggggaaaagtctgca

SEQ ID NO: 1269458 - DNA, 15 bp, Homo sapiens
gggggaaaagtctgc

SEQ ID NO: 1269459 - DNA, 15 bp, Homo sapiens
ggggggaaaagtctg

SEQ ID NO: 1269460 - DNA, 15 bp, Homo sapiens
tggggggaaaagtct

SEQ ID NO: 1269461 - DNA, 15 bp, Homo sapiens
atggggggaaaagtc

SEQ ID NO: 1269462 - DNA, 15 bp, Homo sapiens
aatggggggaaaagt

SEQ ID NO: 1269463 - DNA, 15 bp, Homo sapiens
gaatggggggaaaag

SEQ ID NO: 1269464 - DNA, 15 bp, Homo sapiens
agaatggggggaaaa

SEQ ID NO: 1269465 - DNA, 15 bp, Homo sapiens
cagaatggggggaaa

SEQ ID NO: 1269466 - DNA, 15 bp, Homo sapiens
acagaatggggggaa

SEQ ID NO: 1269467 - DNA, 15 bp, Homo sapiens
cacagaatgggggga

SEQ ID NO: 1269468 - DNA, 15 bp, Homo sapiens
tcacagaatgggggg

SEQ ID NO: 1269469 - DNA, 15 bp, Homo sapiens
ctcacagaatggggg

SEQ ID NO: 1269470 - DNA, 15 bp, Homo sapiens
actcacagaatgggg

SEQ ID NO: 1269471 - DNA, 15 bp, Homo sapiens
aactcacagaatggg

SEQ ID NO: 1269472 - DNA, 15 bp, Homo sapiens
caactcacagaatgg

SEQ ID NO: 1269473 - DNA, 15 bp, Homo sapiens
gcaactcacagaatg

SEQ ID NO: 1269474 - DNA, 15 bp, Homo sapiens
ggcaactcacagaat

SEQ ID NO: 1269475 - DNA, 15 bp, Homo sapiens
aggcaactcacagaa

SEQ ID NO: 1269476 - DNA, 15 bp, Homo sapiens
aaggcaactcacaga

SEQ ID NO: 1269477 - DNA, 15 bp, Homo sapiens
aaaggcaactcacag

SEQ ID NO: 1269478 - DNA, 15 bp, Homo sapiens
aaaaggcaactcaca

SEQ ID NO: 1269479 - DNA, 15 bp, Homo sapiens
gaaaaggcaactcac

SEQ ID NO: 1269480 - DNA, 15 bp, Homo sapiens
tgaaaaggcaactca

SEQ ID NO: 1269481 - DNA, 15 bp, Homo sapiens
gtgaaaaggcaactc

SEQ ID NO: 1269482 - DNA, 15 bp, Homo sapiens
agtgaaaaggcaact

SEQ ID NO: 1269483 - DNA, 15 bp, Homo sapiens
aagtgaaaaggcaac

SEQ ID NO: 1269484 - DNA, 15 bp, Homo sapiens
aaagtgaaaaggcaa

SEQ ID NO: 1269485 - DNA, 15 bp, Homo sapiens
gaaagtgaaaaggca

SEQ ID NO: 1269486 - DNA, 15 bp, Homo sapiens
agaaagtgaaaaggc

SEQ ID NO: 1269487 - DNA, 15 bp, Homo sapiens
aagaaagtgaaaagg

SEQ ID NO: 1269488 - DNA, 15 bp, Homo sapiens
caagaaagtgaaaag

SEQ ID NO: 1269489 - DNA, 15 bp, Homo sapiens
tcaagaaagtgaaaa

SEQ ID NO: 1269490 - DNA, 15 bp, Homo sapiens
atcaagaaagtgaaa

SEQ ID NO: 1269491 - DNA, 15 bp, Homo sapiens
catcaagaaagtgaa

SEQ ID NO: 1269492 - DNA, 15 bp, Homo sapiens
tcatcaagaaagtga

SEQ ID NO: 1269493 - DNA, 15 bp, Homo sapiens
atcatcaagaaagtg

SEQ ID NO: 1269494 - DNA, 15 bp, Homo sapiens
catcatcaagaaagt

SEQ ID NO: 1269495 - DNA, 15 bp, Homo sapiens
acatcatcaagaaag

SEQ ID NO: 1269496 - DNA, 15 bp, Homo sapiens
gacatcatcaagaaa

SEQ ID NO: 1269497 - DNA, 15 bp, Homo sapiens
tgacatcatcaagaa

SEQ ID NO: 1269498 - DNA, 15 bp, Homo sapiens
atgacatcatcaaga

SEQ ID NO: 1269499 - DNA, 15 bp, Homo sapiens
aatgacatcatcaag

SEQ ID NO: 1269500 - DNA, 15 bp, Homo sapiens
aaatgacatcatcaa

SEQ ID NO: 1269501 - DNA, 15 bp, Homo sapiens
caaatgacatcatca

SEQ ID NO: 1269502 - DNA, 15 bp, Homo sapiens
gcaaatgacatcatc

SEQ ID NO: 1269503 - DNA, 15 bp, Homo sapiens
tgcaaatgacatcat

SEQ ID NO: 1269504 - DNA, 15 bp, Homo sapiens
ctgcaaatgacatca

SEQ ID NO: 1269505 - DNA, 15 bp, Homo sapiens
gctgcaaatgacatc

SEQ ID NO: 1269506 - DNA, 15 bp, Homo sapiens
cgctgcaaatgacat

SEQ ID NO: 1269507 - DNA, 15 bp, Homo sapiens
acgctgcaaatgaca

SEQ ID NO: 1269508 - DNA, 15 bp, Homo sapiens
tacgctgcaaatgac

SEQ ID NO: 1269509 - DNA, 15 bp, Homo sapiens
ctacgctgcaaatga

SEQ ID NO: 1269510 - DNA, 15 bp, Homo sapiens
cctacgctgcaaatg

SEQ ID NO: 1269511 - DNA, 15 bp, Homo sapiens
tcctacgctgcaaat

SEQ ID NO: 1269512 - DNA, 15 bp, Homo sapiens
atcctacgctgcaaa

SEQ ID NO: 1269513 - DNA, 15 bp, Homo sapiens
aatcctacgctgcaa

SEQ ID NO: 1269514 - DNA, 15 bp, Homo sapiens
aaatcctacgctgca

SEQ ID NO: 1269515 - DNA, 15 bp, Homo sapiens
aaaatcctacgctgc

SEQ ID NO: 1269516 - DNA, 15 bp, Homo sapiens
taaaatcctacgctg

SEQ ID NO: 1269517 - DNA, 15 bp, Homo sapiens
ttaaaatcctacgct

SEQ ID NO: 1269518 - DNA, 15 bp, Homo sapiens
attaaaatcctacgc

SEQ ID NO: 1269519 - DNA, 15 bp, Homo sapiens
aattaaaatcctacg

SEQ ID NO: 1269520 - DNA, 15 bp, Homo sapiens
aaattaaaatcctac

SEQ ID NO: 1269521 - DNA, 15 bp, Homo sapiens
aaaattaaaatccta

SEQ ID NO: 1269522 - DNA, 15 bp, Homo sapiens
caaaattaaaatcct

SEQ ID NO: 1269523 - DNA, 15 bp, Homo sapiens
tcaaaattaaaatcc

SEQ ID NO: 1269524 - DNA, 15 bp, Homo sapiens
atcaaaattaaaatc

SEQ ID NO: 1269525 - DNA, 15 bp, Homo sapiens
catcaaaattaaaat

SEQ ID NO: 1269526 - DNA, 15 bp, Homo sapiens
tcatcaaaattaaaa

SEQ ID NO: 1269527 - DNA, 15 bp, Homo sapiens
ttcatcaaaattaaa

SEQ ID NO: 1269528 - DNA, 15 bp, Homo sapiens
cttcatcaaaattaa

SEQ ID NO: 1269529 - DNA, 15 bp, Homo sapiens
acttcatcaaaatta

SEQ ID NO: 1269530 - DNA, 15 bp, Homo sapiens
gacttcatcaaaatt

SEQ ID NO: 1269531 - DNA, 15 bp, Homo sapiens
ggacttcatcaaaat

SEQ ID NO: 1269532 - DNA, 15 bp, Homo sapiens
tggacttcatcaaaa

SEQ ID NO: 1269533 - DNA, 15 bp, Homo sapiens
ctggacttcatcaaa

SEQ ID NO: 1269534 - DNA, 15 bp, Homo sapiens
actggacttcatcaa

SEQ ID NO: 1269535 - DNA, 15 bp, Homo sapiens
aactggacttcatca

SEQ ID NO: 1269536 - DNA, 15 bp, Homo sapiens
aaactggacttcatc

SEQ ID NO: 1269537 - DNA, 15 bp, Homo sapiens
aaaactggacttcat

SEQ ID NO: 1269538 - DNA, 15 bp, Homo sapiens
gaaaactggacttca

SEQ ID NO: 1269539 - DNA, 15 bp, Homo sapiens
agaaaactggacttc

SEQ ID NO: 1269540 - DNA, 15 bp, Homo sapiens
tagaaaactggactt

SEQ ID NO: 1269541 - DNA, 15 bp, Homo sapiens
atagaaaactggact

SEQ ID NO: 1269542 - DNA, 15 bp, Homo sapiens
aatagaaaactggac

SEQ ID NO: 1269543 - DNA, 15 bp, Homo sapiens
aaatagaaaactgga

SEQ ID NO: 1269544 - DNA, 15 bp, Homo sapiens
aaaatagaaaactgg

SEQ ID NO: 1269545 - DNA, 15 bp, Homo sapiens
aaaaatagaaaactg

SEQ ID NO: 1269546 - DNA, 15 bp, Homo sapiens
aaaaaatagaaaact

SEQ ID NO: 1269547 - DNA, 15 bp, Homo sapiens
aaaaaaatagaaaac

SEQ ID NO: 1269548 - DNA, 15 bp, Homo sapiens
aaaaaaaatagaaaa

SEQ ID NO: 1269549 - DNA, 15 bp, Homo sapiens
aaaaaaaaatagaaa

SEQ ID NO: 1269550 - DNA, 15 bp, Homo sapiens
caaaaaaaaaataga

SEQ ID NO: 1269551 - DNA, 15 bp, Homo sapiens
ccaaaaaaaaaatag

SEQ ID NO: 1269552 - DNA, 15 bp, Homo sapiens
accaaaaaaaaaata

SEQ ID NO: 1269553 - DNA, 15 bp, Homo sapiens
caccaaaaaaaaaat

SEQ ID NO: 1269554 - DNA, 15 bp, Homo sapiens
ccaccaaaaaaaaaa

SEQ ID NO: 1269555 - DNA, 15 bp, Homo sapiens
accaccaaaaaaaaa

SEQ ID NO: 1269556 - DNA, 15 bp, Homo sapiens
caccaccaaaaaaaa

SEQ ID NO: 1269557 - DNA, 15 bp, Homo sapiens
ccaccaccaaaaaaa

SEQ ID NO: 1269558 - DNA, 15 bp, Homo sapiens
accaccaccaaaaaa

SEQ ID NO: 1269559 - DNA, 15 bp, Homo sapiens
aaccaccaccaaaaa

SEQ ID NO: 1269560 - DNA, 15 bp, Homo sapiens
aaaccaccaccaaaa

SEQ ID NO: 1269561 - DNA, 15 bp, Homo sapiens
aaaaccaccaccaaa

SEQ ID NO: 1269562 - DNA, 15 bp, Homo sapiens
aaaaaccaccaccaa

SEQ ID NO: 1269563 - DNA, 15 bp, Homo sapiens
aaaaaaccaccacca

SEQ ID NO: 1269564 - DNA, 15 bp, Homo sapiens
aaaaaaaccaccacc

SEQ ID NO: 1269565 - DNA, 15 bp, Homo sapiens
aaaaaaaaccaccac

SEQ ID NO: 1269566 - DNA, 15 bp, Homo sapiens
aaaaaaaaaccacca

SEQ ID NO: 1269567 - DNA, 15 bp, Homo sapiens
aaaaaaaaaaccacc

SEQ ID NO: 1269568 - DNA, 15 bp, Homo sapiens
caaaaaaaaaaccac

SEQ ID NO: 1269569 - DNA, 15 bp, Homo sapiens
ccaaaaaaaaaacca

SEQ ID NO: 1269570 - DNA, 15 bp, Homo sapiens
accaaaaaaaaaacc

SEQ ID NO: 1269571 - DNA, 15 bp, Homo sapiens
aaccaaaaaaaaaac

SEQ ID NO: 1269572 - DNA, 15 bp, Homo sapiens
gcaaccaaaaaaaaa

SEQ ID NO: 1269573 - DNA, 15 bp, Homo sapiens
agcaaccaaaaaaaa

SEQ ID NO: 1269574 - DNA, 15 bp, Homo sapiens
aagcaaccaaaaaaa

SEQ ID NO: 1269575 - DNA, 15 bp, Homo sapiens
caagcaaccaaaaaa

SEQ ID NO: 1269576 - DNA, 15 bp, Homo sapiens
ccaagcaaccaaaaa

SEQ ID NO: 1269577 - DNA, 15 bp, Homo sapiens
cccaagcaaccaaaa

SEQ ID NO: 1269578 - DNA, 15 bp, Homo sapiens
gcccaagcaaccaaa

SEQ ID NO: 1269579 - DNA, 15 bp, Homo sapiens
agcccaagcaaccaa

SEQ ID NO: 1269580 - DNA, 15 bp, Homo sapiens
aagcccaagcaacca

SEQ ID NO: 1269581 - DNA, 15 bp, Homo sapiens
aaagcccaagcaacc

SEQ ID NO: 1269582 - DNA, 15 bp, Homo sapiens
aaaagcccaagcaac

SEQ ID NO: 1269583 - DNA, 15 bp, Homo sapiens
caaaagcccaagcaa

SEQ ID NO: 1269584 - DNA, 15 bp, Homo sapiens
tcaaaagcccaagca

SEQ ID NO: 1269585 - DNA, 15 bp, Homo sapiens
atcaaaagcccaagc

SEQ ID NO: 1269586 - DNA, 15 bp, Homo sapiens
catcaaaagcccaag

SEQ ID NO: 1269587 - DNA, 15 bp, Homo sapiens
acatcaaaagcccaa

SEQ ID NO: 1269588 - DNA, 15 bp, Homo sapiens
aacatcaaaagccca

SEQ ID NO: 1269589 - DNA, 15 bp, Homo sapiens
caacatcaaaagccc

SEQ ID NO: 1269590 - DNA, 15 bp, Homo sapiens
acaacatcaaaagcc

SEQ ID NO: 1269591 - DNA, 15 bp, Homo sapiens
tacaacatcaaaagc

SEQ ID NO: 1269592 - DNA, 15 bp, Homo sapiens
atacaacatcaaaag

SEQ ID NO: 1269593 - DNA, 15 bp, Homo sapiens
gatacaacatcaaaa

SEQ ID NO: 1269594 - DNA, 15 bp, Homo sapiens
agatacaacatcaaa

SEQ ID NO: 1269595 - DNA, 15 bp, Homo sapiens
tagatacaacatcaa

SEQ ID NO: 1269596 - DNA, 15 bp, Homo sapiens
ttagatacaacatca

SEQ ID NO: 1269597 - DNA, 15 bp, Homo sapiens
cttagatacaacatc

SEQ ID NO: 1269598 - DNA, 15 bp, Homo sapiens
tcttagatacaacat

SEQ ID NO: 1269599 - DNA, 15 bp, Homo sapiens
ttcttagatacaaca

SEQ ID NO: 1269600 - DNA, 15 bp, Homo sapiens
cttcttagatacaac

SEQ ID NO: 1269601 - DNA, 15 bp, Homo sapiens
ccttcttagatacaa

SEQ ID NO: 1269602 - DNA, 15 bp, Homo sapiens
gccttcttagataca

SEQ ID NO: 1269603 - DNA, 15 bp, Homo sapiens
ggccttcttagatac

SEQ ID NO: 1269604 - DNA, 15 bp, Homo sapiens
aggccttcttagata

SEQ ID NO: 1269605 - DNA, 15 bp, Homo sapiens
aaggccttcttagat

SEQ ID NO: 1269606 - DNA, 15 bp, Homo sapiens
caaggccttcttaga

SEQ ID NO: 1269607 - DNA, 15 bp, Homo sapiens
tcaaggccttcttag

SEQ ID NO: 1269608 - DNA, 15 bp, Homo sapiens
gtcaaggccttctta

SEQ ID NO: 1269609 - DNA, 15 bp, Homo sapiens
agtcaaggccttctt

SEQ ID NO: 1269610 - DNA, 15 bp, Homo sapiens
tagtcaaggccttct

SEQ ID NO: 1269611 - DNA, 15 bp, Homo sapiens
ttagtcaaggccttc

SEQ ID NO: 1269612 - DNA, 15 bp, Homo sapiens
gttagtcaaggcctt

SEQ ID NO: 1269613 - DNA, 15 bp, Homo sapiens
ggttagtcaaggcct

SEQ ID NO: 1269614 - DNA, 15 bp, Homo sapiens
gggttagtcaaggcc

SEQ ID NO: 1269615 - DNA, 15 bp, Homo sapiens
tgggttagtcaaggc

SEQ ID NO: 1269616 - DNA, 15 bp, Homo sapiens
ttgggttagtcaagg

SEQ ID NO: 1269617 - DNA, 15 bp, Homo sapiens
cttgggttagtcaag

SEQ ID NO: 1269618 - DNA, 15 bp, Homo sapiens
ccttgggttagtcaa

SEQ ID NO: 1269619 - DNA, 15 bp, Homo sapiens
accttgggttagtca

SEQ ID NO: 1269620 - DNA, 15 bp, Homo sapiens
gaccttgggttagtc

SEQ ID NO: 1269621 - DNA, 15 bp, Homo sapiens
tgaccttgggttagt

SEQ ID NO: 1269622 - DNA, 15 bp, Homo sapiens
atgaccttgggttag

SEQ ID NO: 1269623 - DNA, 15 bp, Homo sapiens
catgaccttgggtta

SEQ ID NO: 1269624 - DNA, 15 bp, Homo sapiens
tcatgaccttgggtt

SEQ ID NO: 1269625 - DNA, 15 bp, Homo sapiens
ttcatgaccttgggt

SEQ ID NO: 1269626 - DNA, 15 bp, Homo sapiens
cttcatgaccttggg

SEQ ID NO: 1269627 - DNA, 15 bp, Homo sapiens
tcttcatgaccttgg

SEQ ID NO: 1269628 - DNA, 15 bp, Homo sapiens
gtcttcatgaccttg

SEQ ID NO: 1269629 - DNA, 15 bp, Homo sapiens
agtcttcatgacctt

SEQ ID NO: 1269630 - DNA, 15 bp, Homo sapiens
aagtcttcatgacct

SEQ ID NO: 1269631 - DNA, 15 bp, Homo sapiens
taagtcttcatgacc

SEQ ID NO: 1269632 - DNA, 15 bp, Homo sapiens
ataagtcttcatgac

SEQ ID NO: 1269633 - DNA, 15 bp, Homo sapiens
aataagtcttcatga

SEQ ID NO: 1269634 - DNA, 15 bp, Homo sapiens
gaataagtcttcatg

SEQ ID NO: 1269635 - DNA, 15 bp, Homo sapiens
agaataagtcttcat

SEQ ID NO: 1269636 - DNA, 15 bp, Homo sapiens
cagaataagtcttca

SEQ ID NO: 1269637 - DNA, 15 bp, Homo sapiens
acagaataagtcttc

SEQ ID NO: 1269638 - DNA, 15 bp, Homo sapiens
cacagaataagtctt

SEQ ID NO: 1269639 - DNA, 15 bp, Homo sapiens
gcacagaataagtct

SEQ ID NO: 1269640 - DNA, 15 bp, Homo sapiens
agcacagaataagtc

SEQ ID NO: 1269641 - DNA, 15 bp, Homo sapiens
aagcacagaataagt

SEQ ID NO: 1269642 - DNA, 15 bp, Homo sapiens
aaagcacagaataag

SEQ ID NO: 1269643 - DNA, 15 bp, Homo sapiens
gaaagcacagaataa

SEQ ID NO: 1269644 - DNA, 15 bp, Homo sapiens
agaaagcacagaata

SEQ ID NO: 1269645 - DNA, 15 bp, Homo sapiens
aagaaagcacagaat

SEQ ID NO: 1269646 - DNA, 15 bp, Homo sapiens
gaagaaagcacagaa

SEQ ID NO: 1269647 - DNA, 15 bp, Homo sapiens
agaagaaagcacaga

SEQ ID NO: 1269648 - DNA, 15 bp, Homo sapiens
tagaagaaagcacag

SEQ ID NO: 1269649 - DNA, 15 bp, Homo sapiens
ttagaagaaagcaca

SEQ ID NO: 1269650 - DNA, 15 bp, Homo sapiens
tttagaagaaagcac

SEQ ID NO: 1269651 - DNA, 15 bp, Homo sapiens
ttttagaagaaagca

SEQ ID NO: 1269652 - DNA, 15 bp, Homo sapiens
cttttagaagaaagc

SEQ ID NO: 1269653 - DNA, 15 bp, Homo sapiens
acttttagaagaaag

SEQ ID NO: 1269654 - DNA, 15 bp, Homo sapiens
gacttttagaagaaa

SEQ ID NO: 1269655 - DNA, 15 bp, Homo sapiens
tgacttttagaagaa

SEQ ID NO: 1269656 - DNA, 15 bp, Homo sapiens
atgacttttagaaga

SEQ ID NO: 1269657 - DNA, 15 bp, Homo sapiens
tatgacttttagaag

SEQ ID NO: 1269658 - DNA, 15 bp, Homo sapiens
atatgacttttagaa

SEQ ID NO: 1269659 - DNA, 15 bp, Homo sapiens
catatgacttttaga

SEQ ID NO: 1269660 - DNA, 15 bp, Homo sapiens
ccatatgacttttag

SEQ ID NO: 1269661 - DNA, 15 bp, Homo sapiens
accatatgactttta

SEQ ID NO: 1269662 - DNA, 15 bp, Homo sapiens
aaccatatgactttt

SEQ ID NO: 1269663 - DNA, 15 bp, Homo sapiens
aaaccatatgacttt

SEQ ID NO: 1269664 - DNA, 15 bp, Homo sapiens
aaaaccatatgactt

SEQ ID NO: 1269665 - DNA, 15 bp, Homo sapiens
aaaaaccatatgact

SEQ ID NO: 1269666 - DNA, 15 bp, Homo sapiens
taaaaaccatatgac

SEQ ID NO: 1269667 - DNA, 15 bp, Homo sapiens
ctaaaaaccatatga

SEQ ID NO: 1269668 - DNA, 15 bp, Homo sapiens
actaaaaaccatatg

SEQ ID NO: 1269669 - DNA, 15 bp, Homo sapiens
aactaaaaaccatat

SEQ ID NO: 1269670 - DNA, 15 bp, Homo sapiens
gaactaaaaaccata

SEQ ID NO: 1269671 - DNA, 15 bp, Homo sapiens
agaactaaaaaccat

SEQ ID NO: 1269672 - DNA, 15 bp, Homo sapiens
aagaactaaaaacca

SEQ ID NO: 1269673 - DNA, 15 bp, Homo sapiens
caagaactaaaaacc

SEQ ID NO: 1269674 - DNA, 15 bp, Homo sapiens
acaagaactaaaaac

SEQ ID NO: 1269675 - DNA, 15 bp, Homo sapiens
gacaagaactaaaaa

SEQ ID NO: 1269676 - DNA, 15 bp, Homo sapiens
tgacaagaactaaaa

SEQ ID NO: 1269677 - DNA, 15 bp, Homo sapiens
ctgacaagaactaaa

SEQ ID NO: 1269678 - DNA, 15 bp, Homo sapiens
actgacaagaactaa

SEQ ID NO: 1269679 - DNA, 15 bp, Homo sapiens
gactgacaagaacta

SEQ ID NO: 1269680 - DNA, 15 bp, Homo sapiens
agactgacaagaact

SEQ ID NO: 1269681 - DNA, 15 bp, Homo sapiens
aagactgacaagaac

SEQ ID NO: 1269682 - DNA, 15 bp, Homo sapiens
caagactgacaagaa

SEQ ID NO: 1269683 - DNA, 15 bp, Homo sapiens
ccaagactgacaaga

SEQ ID NO: 1269684 - DNA, 15 bp, Homo sapiens
cccaagactgacaag

SEQ ID NO: 1269685 - DNA, 15 bp, Homo sapiens
acccaagactgacaa

SEQ ID NO: 1269686 - DNA, 15 bp, Homo sapiens
aacccaagactgaca

SEQ ID NO: 1269687 - DNA, 15 bp, Homo sapiens
aaacccaagactgac

SEQ ID NO: 1269688 - DNA, 15 bp, Homo sapiens
aaaacccaagactga

SEQ ID NO: 1269689 - DNA, 15 bp, Homo sapiens
aaaaacccaagactg

SEQ ID NO: 1269690 - DNA, 15 bp, Homo sapiens
aaaaaacccaagact

SEQ ID NO: 1269691 - DNA, 15 bp, Homo sapiens
aaaaaaacccaagac

SEQ ID NO: 1269692 - DNA, 15 bp, Homo sapiens
aaaaaaaacccaaga

SEQ ID NO: 1269693 - DNA, 15 bp, Homo sapiens
caaaaaaaaacccaa

SEQ ID NO: 1269694 - DNA, 15 bp, Homo sapiens
acaaaaaaaaaccca

SEQ ID NO: 1269695 - DNA, 15 bp, Homo sapiens
aacaaaaaaaaaccc

SEQ ID NO: 1269696 - DNA, 15 bp, Homo sapiens
caaaaaaaaaaaaca

SEQ ID NO: 1269697 - DNA, 15 bp, Homo sapiens
tcaaaaaaaaaaaac

SEQ ID NO: 1269698 - DNA, 15 bp, Homo sapiens
taactcaaaaaaaaa

SEQ ID NO: 1269699 - DNA, 15 bp, Homo sapiens
ttaactcaaaaaaaa

SEQ ID NO: 1269700 - DNA, 15 bp, Homo sapiens
attaactcaaaaaaa

SEQ ID NO: 1269701 - DNA, 15 bp, Homo sapiens
aattaactcaaaaaa

SEQ ID NO: 1269702 - DNA, 15 bp, Homo sapiens
aaattaactcaaaaa

SEQ ID NO: 1269703 - DNA, 15 bp, Homo sapiens
aaaattaactcaaaa

SEQ ID NO: 1269704 - DNA, 15 bp, Homo sapiens
aaaaattaactcaaa

SEQ ID NO: 1269705 - DNA, 15 bp, Homo sapiens
caaaaattaactcaa

SEQ ID NO: 1269706 - DNA, 15 bp, Homo sapiens
acaaaaattaactca

SEQ ID NO: 1269707 - DNA, 15 bp, Homo sapiens
cacaaaaattaactc

SEQ ID NO: 1269708 - DNA, 15 bp, Homo sapiens
acacaaaaattaact

SEQ ID NO: 1269709 - DNA, 15 bp, Homo sapiens
tacacaaaaattaac

SEQ ID NO: 1269710 - DNA, 15 bp, Homo sapiens
atacacaaaaattaa

SEQ ID NO: 1269711 - DNA, 15 bp, Homo sapiens
catacacaaaaatta

SEQ ID NO: 1269712 - DNA, 15 bp, Homo sapiens
tcatacacaaaaatt

SEQ ID NO: 1269713 - DNA, 15 bp, Homo sapiens
atcatacacaaaaat

SEQ ID NO: 1269714 - DNA, 15 bp, Homo sapiens
catcatacacaaaaa

SEQ ID NO: 1269715 - DNA, 15 bp, Homo sapiens
acatcatacacaaaa

SEQ ID NO: 1269716 - DNA, 15 bp, Homo sapiens
cacatcatacacaaa

SEQ ID NO: 1269717 - DNA, 15 bp, Homo sapiens
tcacatcatacacaa

SEQ ID NO: 1269718 - DNA, 15 bp, Homo sapiens
ctcacatcatacaca

SEQ ID NO: 1269719 - DNA, 15 bp, Homo sapiens
cctcacatcatacac

SEQ ID NO: 1269720 - DNA, 15 bp, Homo sapiens
tcctcacatcataca

SEQ ID NO: 1269721 - DNA, 15 bp, Homo sapiens
ttcctcacatcatac

SEQ ID NO: 1269722 - DNA, 15 bp, Homo sapiens
cttcctcacatcata

SEQ ID NO: 1269723 - DNA, 15 bp, Homo sapiens
tcttcctcacatcat

SEQ ID NO: 1269724 - DNA, 15 bp, Homo sapiens
ctcttcctcacatca

SEQ ID NO: 1269725 - DNA, 15 bp, Homo sapiens
cctcttcctcacatc

SEQ ID NO: 1269726 - DNA, 15 bp, Homo sapiens
acctcttcctcacat

SEQ ID NO: 1269727 - DNA, 15 bp, Homo sapiens
gacctcttcctcaca

SEQ ID NO: 1269728 - DNA, 15 bp, Homo sapiens
agacctcttcctcac

SEQ ID NO: 1269729 - DNA, 15 bp, Homo sapiens
tagacctcttcctca

SEQ ID NO: 1269730 - DNA, 15 bp, Homo sapiens
ttagacctcttcctc

SEQ ID NO: 1269731 - DNA, 15 bp, Homo sapiens
gttagacctcttcct

SEQ ID NO: 1269732 - DNA, 15 bp, Homo sapiens
agttagacctcttcc

SEQ ID NO: 1269733 - DNA, 15 bp, Homo sapiens
gagttagacctcttc

SEQ ID NO: 1269734 - DNA, 15 bp, Homo sapiens
ggagttagacctctt

SEQ ID NO: 1269735 - DNA, 15 bp, Homo sapiens
tggagttagacctct

SEQ ID NO: 1269736 - DNA, 15 bp, Homo sapiens
ctggagttagacctc

SEQ ID NO: 1269737 - DNA, 15 bp, Homo sapiens
actggagttagacct

SEQ ID NO: 1269738 - DNA, 15 bp, Homo sapiens
gactggagttagacc

SEQ ID NO: 1269739 - DNA, 15 bp, Homo sapiens
agactggagttagac

SEQ ID NO: 1269740 - DNA, 15 bp, Homo sapiens
aagactggagttaga

SEQ ID NO: 1269741 - DNA, 15 bp, Homo sapiens
aaagactggagttag

SEQ ID NO: 1269742 - DNA, 15 bp, Homo sapiens
aaaagactggagtta

SEQ ID NO: 1269743 - DNA, 15 bp, Homo sapiens
caaaagactggagtt

SEQ ID NO: 1269744 - DNA, 15 bp, Homo sapiens
tcaaaagactggagt

SEQ ID NO: 1269745 - DNA, 15 bp, Homo sapiens
ttcaaaagactggag

SEQ ID NO: 1269746 - DNA, 15 bp, Homo sapiens
attcaaaagactgga

SEQ ID NO: 1269747 - DNA, 15 bp, Homo sapiens
cattcaaaagactgg

SEQ ID NO: 1269748 - DNA, 15 bp, Homo sapiens
acattcaaaagactg

SEQ ID NO: 1269749 - DNA, 15 bp, Homo sapiens
cacattcaaaagact

SEQ ID NO: 1269750 - DNA, 15 bp, Homo sapiens
ccacattcaaaagac

SEQ ID NO: 1269751 - DNA, 15 bp, Homo sapiens
tccacattcaaaaga

SEQ ID NO: 1269752 - DNA, 15 bp, Homo sapiens
atccacattcaaaag

SEQ ID NO: 1269753 - DNA, 15 bp, Homo sapiens
tatccacattcaaaa

SEQ ID NO: 1269754 - DNA, 15 bp, Homo sapiens
atatccacattcaaa

SEQ ID NO: 1269755 - DNA, 15 bp, Homo sapiens
gatatccacattcaa

SEQ ID NO: 1269756 - DNA, 15 bp, Homo sapiens
ggatatccacattca

SEQ ID NO: 1269757 - DNA, 15 bp, Homo sapiens
tggatatccacattc

SEQ ID NO: 1269758 - DNA, 15 bp, Homo sapiens
ctggatatccacatt

SEQ ID NO: 1269759 - DNA, 15 bp, Homo sapiens
actggatatccacat

SEQ ID NO: 1269760 - DNA, 15 bp, Homo sapiens
aactggatatccaca

SEQ ID NO: 1269761 - DNA, 15 bp, Homo sapiens
caactggatatccac

SEQ ID NO: 1269762 - DNA, 15 bp, Homo sapiens
acaactggatatcca

SEQ ID NO: 1269763 - DNA, 15 bp, Homo sapiens
gacaactggatatcc

SEQ ID NO: 1269764 - DNA, 15 bp, Homo sapiens
agacaactggatatc

SEQ ID NO: 1269765 - DNA, 15 bp, Homo sapiens
gagacaactggatat

SEQ ID NO: 1269766 - DNA, 15 bp, Homo sapiens
agagacaactggata

SEQ ID NO: 1269767 - DNA, 15 bp, Homo sapiens
cagagacaactggat

SEQ ID NO: 1269768 - DNA, 15 bp, Homo sapiens
gcagagacaactgga

SEQ ID NO: 1269769 - DNA, 15 bp, Homo sapiens
tgcagagacaactgg

SEQ ID NO: 1269770 - DNA, 15 bp, Homo sapiens
gtgcagagacaactg

SEQ ID NO: 1269771 - DNA, 15 bp, Homo sapiens
ggtgcagagacaact

SEQ ID NO: 1269772 - DNA, 15 bp, Homo sapiens
tggtgcagagacaac

SEQ ID NO: 1269773 - DNA, 15 bp, Homo sapiens
gtggtgcagagacaa

SEQ ID NO: 1269774 - DNA, 15 bp, Homo sapiens
agtggtgcagagaca

SEQ ID NO: 1269775 - DNA, 15 bp, Homo sapiens
aagtggtgcagagac

SEQ ID NO: 1269776 - DNA, 15 bp, Homo sapiens
taagtggtgcagaga

SEQ ID NO: 1269777 - DNA, 15 bp, Homo sapiens
ataagtggtgcagag

SEQ ID NO: 1269778 - DNA, 15 bp, Homo sapiens
cataagtggtgcaga

SEQ ID NO: 1269779 - DNA, 15 bp, Homo sapiens
ccataagtggtgcag

SEQ ID NO: 1269780 - DNA, 15 bp, Homo sapiens
tccataagtggtgca

SEQ ID NO: 1269781 - DNA, 15 bp, Homo sapiens
ttccataagtggtgc

SEQ ID NO: 1269782 - DNA, 15 bp, Homo sapiens
tttccataagtggtg

SEQ ID NO: 1269783 - DNA, 15 bp, Homo sapiens
ttttccataagtggt

SEQ ID NO: 1269784 - DNA, 15 bp, Homo sapiens
cttttccataagtgg

SEQ ID NO: 1269785 - DNA, 15 bp, Homo sapiens
tcttttccataagtg

SEQ ID NO: 1269786 - DNA, 15 bp, Homo sapiens
gtcttttccataagt

SEQ ID NO: 1269787 - DNA, 15 bp, Homo sapiens
agtcttttccataag

SEQ ID NO: 1269788 - DNA, 15 bp, Homo sapiens
tagtcttttccataa

SEQ ID NO: 1269789 - DNA, 15 bp, Homo sapiens
atagtcttttccata

SEQ ID NO: 1269790 - DNA, 15 bp, Homo sapiens
aatagtcttttccat

SEQ ID NO: 1269791 - DNA, 15 bp, Homo sapiens
gaatagtcttttcca

SEQ ID NO: 1269792 - DNA, 15 bp, Homo sapiens
agaatagtcttttcc

SEQ ID NO: 1269793 - DNA, 15 bp, Homo sapiens
aagaatagtcttttc

SEQ ID NO: 1269794 - DNA, 15 bp, Homo sapiens
aaagaatagtctttt

SEQ ID NO: 1269795 - DNA, 15 bp, Homo sapiens
gaaagaatagtcttt

SEQ ID NO: 1269796 - DNA, 15 bp, Homo sapiens
agaaagaatagtctt

SEQ ID NO: 1269797 - DNA, 15 bp, Homo sapiens
aagaaagaatagtct

SEQ ID NO: 1269798 - DNA, 15 bp, Homo sapiens
gaagaaagaatagtc

SEQ ID NO: 1269799 - DNA, 15 bp, Homo sapiens
tgaagaaagaatagt

SEQ ID NO: 1269800 - DNA, 15 bp, Homo sapiens
atgaagaaagaatag

SEQ ID NO: 1269801 - DNA, 15 bp, Homo sapiens
aatgaagaaagaata

SEQ ID NO: 1269802 - DNA, 15 bp, Homo sapiens
caatgaagaaagaat

SEQ ID NO: 1269803 - DNA, 15 bp, Homo sapiens
tcaatgaagaaagaa

SEQ ID NO: 1269804 - DNA, 15 bp, Homo sapiens
ttcaatgaagaaaga

SEQ ID NO: 1269805 - DNA, 15 bp, Homo sapiens
attcaatgaagaaag

SEQ ID NO: 1269806 - DNA, 15 bp, Homo sapiens
aattcaatgaagaaa

SEQ ID NO: 1269807 - DNA, 15 bp, Homo sapiens
caattcaatgaagaa

SEQ ID NO: 1269808 - DNA, 15 bp, Homo sapiens
acaattcaatgaaga

SEQ ID NO: 1269809 - DNA, 15 bp, Homo sapiens
aacaattcaatgaag

SEQ ID NO: 1269810 - DNA, 15 bp, Homo sapiens
aaacaattcaatgaa

SEQ ID NO: 1269811 - DNA, 15 bp, Homo sapiens
aaaacaattcaatga

SEQ ID NO: 1269812 - DNA, 15 bp, Homo sapiens
caaaacaattcaatg

SEQ ID NO: 1269813 - DNA, 15 bp, Homo sapiens
ccaaaacaattcaat

SEQ ID NO: 1269814 - DNA, 15 bp, Homo sapiens
accaaaacaattcaa

SEQ ID NO: 1269815 - DNA, 15 bp, Homo sapiens
caccaaaacaattca

SEQ ID NO: 1269816 - DNA, 15 bp, Homo sapiens
gcaccaaaacaattc

SEQ ID NO: 1269817 - DNA, 15 bp, Homo sapiens
ggcaccaaaacaatt

SEQ ID NO: 1269818 - DNA, 15 bp, Homo sapiens
gggcaccaaaacaat

SEQ ID NO: 1269819 - DNA, 15 bp, Homo sapiens
agggcaccaaaacaa

SEQ ID NO: 1269820 - DNA, 15 bp, Homo sapiens
aagggcaccaaaaca

SEQ ID NO: 1269821 - DNA, 15 bp, Homo sapiens
caagggcaccaaaac

SEQ ID NO: 1269822 - DNA, 15 bp, Homo sapiens
tcaagggcaccaaaa

SEQ ID NO: 1269823 - DNA, 15 bp, Homo sapiens
atcaagggcaccaaa

SEQ ID NO: 1269824 - DNA, 15 bp, Homo sapiens
catcaagggcaccaa

SEQ ID NO: 1269825 - DNA, 15 bp, Homo sapiens
tcatcaagggcacca

SEQ ID NO: 1269826 - DNA, 15 bp, Homo sapiens
ttcatcaagggcacc

SEQ ID NO: 1269827 - DNA, 15 bp, Homo sapiens
tttcatcaagggcac

SEQ ID NO: 1269828 - DNA, 15 bp, Homo sapiens
ttttcatcaagggca

SEQ ID NO: 1269829 - DNA, 15 bp, Homo sapiens
attttcatcaagggc

SEQ ID NO: 1269830 - DNA, 15 bp, Homo sapiens
gattttcatcaaggg

SEQ ID NO: 1269831 - DNA, 15 bp, Homo sapiens
tgattttcatcaagg

SEQ ID NO: 1269832 - DNA, 15 bp, Homo sapiens
ctgattttcatcaag

SEQ ID NO: 1269833 - DNA, 15 bp, Homo sapiens
actgattttcatcaa

SEQ ID NO: 1269834 - DNA, 15 bp, Homo sapiens
aactgattttcatca

SEQ ID NO: 1269835 - DNA, 15 bp, Homo sapiens
caactgattttcatc

SEQ ID NO: 1269836 - DNA, 15 bp, Homo sapiens
tcaactgattttcat

SEQ ID NO: 1269837 - DNA, 15 bp, Homo sapiens
gtcaactgattttca

SEQ ID NO: 1269838 - DNA, 15 bp, Homo sapiens
agtcaactgattttc

SEQ ID NO: 1269839 - DNA, 15 bp, Homo sapiens
tagtcaactgatttt

SEQ ID NO: 1269840 - DNA, 15 bp, Homo sapiens
atagtcaactgattt

SEQ ID NO: 1269841 - DNA, 15 bp, Homo sapiens
tatagtcaactgatt

SEQ ID NO: 1269842 - DNA, 15 bp, Homo sapiens
ttatagtcaactgat

SEQ ID NO: 1269843 - DNA, 15 bp, Homo sapiens
tttatagtcaactga

SEQ ID NO: 1269844 - DNA, 15 bp, Homo sapiens
ttttatagtcaactg

SEQ ID NO: 1269845 - DNA, 15 bp, Homo sapiens
tttttatagtcaact

SEQ ID NO: 1269846 - DNA, 15 bp, Homo sapiens
gtttttatagtcaac

SEQ ID NO: 1269847 - DNA, 15 bp, Homo sapiens
ggtttttatagtcaa

SEQ ID NO: 1269848 - DNA, 15 bp, Homo sapiens
tggtttttatagtca

SEQ ID NO: 1269849 - DNA, 15 bp, Homo sapiens
ctggtttttatagtc

SEQ ID NO: 1269850 - DNA, 15 bp, Homo sapiens
cctggtttttatagt

SEQ ID NO: 1269851 - DNA, 15 bp, Homo sapiens
ccctggtttttatag

SEQ ID NO: 1269852 - DNA, 15 bp, Homo sapiens
accctggtttttata

SEQ ID NO: 1269853 - DNA, 15 bp, Homo sapiens
aaccctggtttttat

SEQ ID NO: 1269854 - DNA, 15 bp, Homo sapiens
aaaccctggttttta

SEQ ID NO: 1269855 - DNA, 15 bp, Homo sapiens
taaaccctggttttt

SEQ ID NO: 1269856 - DNA, 15 bp, Homo sapiens
ataaaccctggtttt

SEQ ID NO: 1269857 - DNA, 15 bp, Homo sapiens
aataaaccctggttt

SEQ ID NO: 1269858 - DNA, 15 bp, Homo sapiens
aaataaaccctggtt

SEQ ID NO: 1269859 - DNA, 15 bp, Homo sapiens
gaaataaaccctggt

SEQ ID NO: 1269860 - DNA, 15 bp, Homo sapiens
agaaataaaccctgg

SEQ ID NO: 1269861 - DNA, 15 bp, Homo sapiens
cagaaataaaccctg

SEQ ID NO: 1269862 - DNA, 15 bp, Homo sapiens
ccagaaataaaccct

SEQ ID NO: 1269863 - DNA, 15 bp, Homo sapiens
tccagaaataaaccc

SEQ ID NO: 1269864 - DNA, 15 bp, Homo sapiens
ctccagaaataaacc

SEQ ID NO: 1269865 - DNA, 15 bp, Homo sapiens
actccagaaataaac

SEQ ID NO: 1269866 - DNA, 15 bp, Homo sapiens
gactccagaaataaa

SEQ ID NO: 1269867 - DNA, 15 bp, Homo sapiens
agactccagaaataa

SEQ ID NO: 1269868 - DNA, 15 bp, Homo sapiens
gagactccagaaata

SEQ ID NO: 1269869 - DNA, 15 bp, Homo sapiens
tgagactccagaaat

SEQ ID NO: 1269870 - DNA, 15 bp, Homo sapiens
ctgagactccagaaa

SEQ ID NO: 1269871 - DNA, 15 bp, Homo sapiens
actgagactccagaa

SEQ ID NO: 1269872 - DNA, 15 bp, Homo sapiens
aactgagactccaga

SEQ ID NO: 1269873 - DNA, 15 bp, Homo sapiens
gaactgagactccag

SEQ ID NO: 1269874 - DNA, 15 bp, Homo sapiens
agaactgagactcca

SEQ ID NO: 1269875 - DNA, 15 bp, Homo sapiens
tagaactgagactcc

SEQ ID NO: 1269876 - DNA, 15 bp, Homo sapiens
atagaactgagactc

SEQ ID NO: 1269877 - DNA, 15 bp, Homo sapiens
aatagaactgagact

SEQ ID NO: 1269878 - DNA, 15 bp, Homo sapiens
gaatagaactgagac

SEQ ID NO: 1269879 - DNA, 15 bp, Homo sapiens
ggaatagaactgaga

SEQ ID NO: 1269880 - DNA, 15 bp, Homo sapiens
tggaatagaactgag

SEQ ID NO: 1269881 - DNA, 15 bp, Homo sapiens
atggaatagaactga

SEQ ID NO: 1269882 - DNA, 15 bp, Homo sapiens
aatggaatagaactg

SEQ ID NO: 1269883 - DNA, 15 bp, Homo sapiens
caatggaatagaact

SEQ ID NO: 1269884 - DNA, 15 bp, Homo sapiens
gcaatggaatagaac

SEQ ID NO: 1269885 - DNA, 15 bp, Homo sapiens
agcaatggaatagaa

SEQ ID NO: 1269886 - DNA, 15 bp, Homo sapiens
gagcaatggaataga

SEQ ID NO: 1269887 - DNA, 15 bp, Homo sapiens
agagcaatggaatag

SEQ ID NO: 1269888 - DNA, 15 bp, Homo sapiens
cagagcaatggaata

SEQ ID NO: 1269889 - DNA, 15 bp, Homo sapiens
acagagcaatggaat

SEQ ID NO: 1269890 - DNA, 15 bp, Homo sapiens
tacagagcaatggaa

SEQ ID NO: 1269891 - DNA, 15 bp, Homo sapiens
atacagagcaatgga

SEQ ID NO: 1269892 - DNA, 15 bp, Homo sapiens
catacagagcaatgg

SEQ ID NO: 1269893 - DNA, 15 bp, Homo sapiens
acatacagagcaatg

SEQ ID NO: 1269894 - DNA, 15 bp, Homo sapiens
aacatacagagcaat

SEQ ID NO: 1269895 - DNA, 15 bp, Homo sapiens
aaacatacagagcaa

SEQ ID NO: 1269896 - DNA, 15 bp, Homo sapiens
taaacatacagagca

SEQ ID NO: 1269897 - DNA, 15 bp, Homo sapiens
ataaacatacagagc

SEQ ID NO: 1269898 - DNA, 15 bp, Homo sapiens
aataaacatacagag

SEQ ID NO: 1269899 - DNA, 15 bp, Homo sapiens
gaataaacatacaga

SEQ ID NO: 1269900 - DNA, 15 bp, Homo sapiens
agaataaacatacag

SEQ ID NO: 1269901 - DNA, 15 bp, Homo sapiens
aagaataaacataca

SEQ ID NO: 1269902 - DNA, 15 bp, Homo sapiens
aaagaataaacatac

SEQ ID NO: 1269903 - DNA, 15 bp, Homo sapiens
aaaagaataaacata

SEQ ID NO: 1269904 - DNA, 15 bp, Homo sapiens
aaaaagaataaacat

SEQ ID NO: 1269905 - DNA, 15 bp, Homo sapiens
aaaaaagaataaaca

SEQ ID NO: 1269906 - DNA, 15 bp, Homo sapiens
aaaaaaagaataaac

SEQ ID NO: 1269907 - DNA, 15 bp, Homo sapiens
aaaaaaaaagaataa

SEQ ID NO: 1269908 - DNA, 15 bp, Homo sapiens
aaaaaaaaaagaata

SEQ ID NO: 1269909 - DNA, 15 bp, Homo sapiens
tgccaccgcactcca

SEQ ID NO: 1269910 - DNA, 15 bp, Homo sapiens
gtgccaccgcactcc

SEQ ID NO: 1269911 - DNA, 15 bp, Homo sapiens
tgtgccaccgcactc

SEQ ID NO: 1269912 - DNA, 15 bp, Homo sapiens
ttgtgccaccgcact

SEQ ID NO: 1269913 - DNA, 15 bp, Homo sapiens
attgtgccaccgcac

SEQ ID NO: 1269914 - DNA, 15 bp, Homo sapiens
gattgtgccaccgca

SEQ ID NO: 1269915 - DNA, 15 bp, Homo sapiens
agattgtgccaccgc

SEQ ID NO: 1269916 - DNA, 15 bp, Homo sapiens
gagattgtgccaccg

SEQ ID NO: 1269917 - DNA, 15 bp, Homo sapiens
cgagattgtgccacc

SEQ ID NO: 1269918 - DNA, 15 bp, Homo sapiens
aagccgagattgtgc

SEQ ID NO: 1269919 - DNA, 15 bp, Homo sapiens
gaagccgagattgtg

SEQ ID NO: 1269920 - DNA, 15 bp, Homo sapiens
ggaagccgagattgt

SEQ ID NO: 1269921 - DNA, 15 bp, Homo sapiens
aggaagccgagattg

SEQ ID NO: 1269922 - DNA, 15 bp, Homo sapiens
caggaagccgagatt

SEQ ID NO: 1269923 - DNA, 15 bp, Homo sapiens
gcaggaagccgagat

SEQ ID NO: 1269924 - DNA, 15 bp, Homo sapiens
tgcaggaagccgaga

SEQ ID NO: 1269925 - DNA, 15 bp, Homo sapiens
ttgcaggaagccgag

SEQ ID NO: 1269926 - DNA, 15 bp, Homo sapiens
cttgcaggaagccga

SEQ ID NO: 1269927 - DNA, 15 bp, Homo sapiens
gcttgcaggaagccg

SEQ ID NO: 1269928 - DNA, 15 bp, Homo sapiens
agcttgcaggaagcc

SEQ ID NO: 1269929 - DNA, 15 bp, Homo sapiens
gagcttgcaggaagc

SEQ ID NO: 1269930 - DNA, 15 bp, Homo sapiens
ggagcttgcaggaag

SEQ ID NO: 1269931 - DNA, 15 bp, Homo sapiens
cggagcttgcaggaa

SEQ ID NO: 1269932 - DNA, 15 bp, Homo sapiens
gcggagcttgcagga

SEQ ID NO: 1269933 - DNA, 15 bp, Homo sapiens
ggcggagcttgcagg

SEQ ID NO: 1269934 - DNA, 15 bp, Homo sapiens
tctttgggaggctga

SEQ ID NO: 1269935 - DNA, 15 bp, Homo sapiens
ctctttgggaggctg

SEQ ID NO: 1269936 - DNA, 15 bp, Homo sapiens
gctctttgggaggct

SEQ ID NO: 1269937 - DNA, 15 bp, Homo sapiens
agctctttgggaggc

SEQ ID NO: 1269938 - DNA, 15 bp, Homo sapiens
cagctctttgggagg

SEQ ID NO: 1269939 - DNA, 15 bp, Homo sapiens
ccagctctttgggag

SEQ ID NO: 1269940 - DNA, 15 bp, Homo sapiens
cccagctctttggga

SEQ ID NO: 1269941 - DNA, 15 bp, Homo sapiens
tcccagctctttggg

SEQ ID NO: 1269942 - DNA, 15 bp, Homo sapiens
gtcccagctctttgg

SEQ ID NO: 1269943 - DNA, 15 bp, Homo sapiens
agtcccagctctttg

SEQ ID NO: 1269944 - DNA, 15 bp, Homo sapiens
tagtcccagctcttt

SEQ ID NO: 1269945 - DNA, 15 bp, Homo sapiens
gtagtcccagctctt

SEQ ID NO: 1269946 - DNA, 15 bp, Homo sapiens
tgtagtcccagctct

SEQ ID NO: 1269947 - DNA, 15 bp, Homo sapiens
ctgtagtcccagctc

SEQ ID NO: 1269948 - DNA, 15 bp, Homo sapiens
gtggtggcaggcacc

SEQ ID NO: 1269949 - DNA, 15 bp, Homo sapiens
cgtggtggcaggcac

SEQ ID NO: 1269950 - DNA, 15 bp, Homo sapiens
gcgtggtggcaggca

SEQ ID NO: 1269951 - DNA, 15 bp, Homo sapiens
gaaaaattagccggg

SEQ ID NO: 1269952 - DNA, 15 bp, Homo sapiens
agaaaaattagccgg

SEQ ID NO: 1269953 - DNA, 15 bp, Homo sapiens
cagaaaaattagccg

SEQ ID NO: 1269954 - DNA, 15 bp, Homo sapiens
acagaaaaattagcc

SEQ ID NO: 1269955 - DNA, 15 bp, Homo sapiens
tacagaaaaattagc

SEQ ID NO: 1269956 - DNA, 15 bp, Homo sapiens
atacagaaaaattag

SEQ ID NO: 1269957 - DNA, 15 bp, Homo sapiens
aatacagaaaaatta

SEQ ID NO: 1269958 - DNA, 15 bp, Homo sapiens
aaatacagaaaaatt

SEQ ID NO: 1269959 - DNA, 15 bp, Homo sapiens
aaaatacagaaaaat

SEQ ID NO: 1269960 - DNA, 15 bp, Homo sapiens
aaaaatacagaaaaa

SEQ ID NO: 1269961 - DNA, 15 bp, Homo sapiens
taaaaatacagaaaa

SEQ ID NO: 1269962 - DNA, 15 bp, Homo sapiens
ctaaaaatacagaaa

SEQ ID NO: 1269963 - DNA, 15 bp, Homo sapiens
actaaaaatacagaa

SEQ ID NO: 1269964 - DNA, 15 bp, Homo sapiens
tactaaaaatacaga

SEQ ID NO: 1269965 - DNA, 15 bp, Homo sapiens
ctactaaaaatacag

SEQ ID NO: 1269966 - DNA, 15 bp, Homo sapiens
cgatcacgaggtcag

SEQ ID NO: 1269967 - DNA, 15 bp, Homo sapiens
gcgatcacgaggtca

SEQ ID NO: 1269968 - DNA, 15 bp, Homo sapiens
ggcgatcacgaggtc

SEQ ID NO: 1269969 - DNA, 15 bp, Homo sapiens
gggcgatcacgaggt

SEQ ID NO: 1269970 - DNA, 15 bp, Homo sapiens
tgggcgatcacgagg

SEQ ID NO: 1269971 - DNA, 15 bp, Homo sapiens
gtgggcgatcacgag

SEQ ID NO: 1269972 - DNA, 15 bp, Homo sapiens
ggtgggcgatcacga

SEQ ID NO: 1269973 - DNA, 15 bp, Homo sapiens
aggtgggcgatcacg

SEQ ID NO: 1269974 - DNA, 15 bp, Homo sapiens
gaggtgggcgatcac

SEQ ID NO: 1269975 - DNA, 15 bp, Homo sapiens
cgaggtgggcgatca

SEQ ID NO: 1269976 - DNA, 15 bp, Homo sapiens
ccgaggtgggcgatc

SEQ ID NO: 1269977 - DNA, 15 bp, Homo sapiens
gccgaggtgggcgat

SEQ ID NO: 1269978 - DNA, 15 bp, Homo sapiens
ggccgaggtgggcga

SEQ ID NO: 1269979 - DNA, 15 bp, Homo sapiens
cggccaggcgcggtg

SEQ ID NO: 1269980 - DNA, 15 bp, Homo sapiens
acggccaggcgcggt

SEQ ID NO: 1269981 - DNA, 15 bp, Homo sapiens
tacggccaggcgcgg

SEQ ID NO: 1269982 - DNA, 15 bp, Homo sapiens
atacggccaggcgcg

SEQ ID NO: 1269983 - DNA, 15 bp, Homo sapiens
catacggccaggcgc

SEQ ID NO: 1269984 - DNA, 15 bp, Homo sapiens
acatacggccaggcg

SEQ ID NO: 1269985 - DNA, 15 bp, Homo sapiens
aacatacggccaggc

SEQ ID NO: 1269986 - DNA, 15 bp, Homo sapiens
aaacatacggccagg

SEQ ID NO: 1269987 - DNA, 15 bp, Homo sapiens
taaacatacggccag

SEQ ID NO: 1269988 - DNA, 15 bp, Homo sapiens
ataaacatacggcca

SEQ ID NO: 1269989 - DNA, 15 bp, Homo sapiens
aataaacatacggcc

SEQ ID NO: 1269990 - DNA, 15 bp, Homo sapiens
gaataaacatacggc

SEQ ID NO: 1269991 - DNA, 15 bp, Homo sapiens
agaataaacatacgg

SEQ ID NO: 1269992 - DNA, 15 bp, Homo sapiens
aagaataaacatacg

SEQ ID NO: 1269993 - DNA, 15 bp, Homo sapiens
taagaataaacatac

SEQ ID NO: 1269994 - DNA, 15 bp, Homo sapiens
ataagaataaacata

SEQ ID NO: 1269995 - DNA, 15 bp, Homo sapiens
cataagaataaacat

SEQ ID NO: 1269996 - DNA, 15 bp, Homo sapiens
tcataagaataaaca

SEQ ID NO: 1269997 - DNA, 15 bp, Homo sapiens
atcataagaataaac

SEQ ID NO: 1269998 - DNA, 15 bp, Homo sapiens
tatcataagaataaa

SEQ ID NO: 1269999 - DNA, 15 bp, Homo sapiens
ctatcataagaataa

SEQ ID NO: 1270000 - DNA, 15 bp, Homo sapiens
actatcataagaata

SEQ ID NO: 1270001 - DNA, 15 bp, Homo sapiens
tactatcataagaat

SEQ ID NO: 1270002 - DNA, 15 bp, Homo sapiens
gtactatcataagaa

SEQ ID NO: 1270003 - DNA, 15 bp, Homo sapiens
ggtactatcataaga

SEQ ID NO: 1270004 - DNA, 15 bp, Homo sapiens
tggtactatcataag

SEQ ID NO: 1270005 - DNA, 15 bp, Homo sapiens
atggtactatcataa

SEQ ID NO: 1270006 - DNA, 15 bp, Homo sapiens
tatggtactatcata

SEQ ID NO: 1270007 - DNA, 15 bp, Homo sapiens
gtatggtactatcat

SEQ ID NO: 1270008 - DNA, 15 bp, Homo sapiens
agtatggtactatca

SEQ ID NO: 1270009 - DNA, 15 bp, Homo sapiens
cagtatggtactatc

SEQ ID NO: 1270010 - DNA, 15 bp, Homo sapiens
acagtatggtactat

SEQ ID NO: 1270011 - DNA, 15 bp, Homo sapiens
aacagtatggtacta

SEQ ID NO: 1270012 - DNA, 15 bp, Homo sapiens
aaacagtatggtact

SEQ ID NO: 1270013 - DNA, 15 bp, Homo sapiens
aaaacagtatggtac

SEQ ID NO: 1270014 - DNA, 15 bp, Homo sapiens
caaaacagtatggta

SEQ ID NO: 1270015 - DNA, 15 bp, Homo sapiens
acaaaacagtatggt

SEQ ID NO: 1270016 - DNA, 15 bp, Homo sapiens
tacaaaacagtatgg

SEQ ID NO: 1270017 - DNA, 15 bp, Homo sapiens
ctacaaaacagtatg

SEQ ID NO: 1270018 - DNA, 15 bp, Homo sapiens
actacaaaacagtat

SEQ ID NO: 1270019 - DNA, 15 bp, Homo sapiens
tactacaaaacagta

SEQ ID NO: 1270020 - DNA, 15 bp, Homo sapiens
atactacaaaacagt

SEQ ID NO: 1270021 - DNA, 15 bp, Homo sapiens
catactacaaaacag

SEQ ID NO: 1270022 - DNA, 15 bp, Homo sapiens
acatactacaaaaca

SEQ ID NO: 1270023 - DNA, 15 bp, Homo sapiens
aacatactacaaaac

SEQ ID NO: 1270024 - DNA, 15 bp, Homo sapiens
aaacatactacaaaa

SEQ ID NO: 1270025 - DNA, 15 bp, Homo sapiens
aaaacatactacaaa

SEQ ID NO: 1270026 - DNA, 15 bp, Homo sapiens
taaaacatactacaa

SEQ ID NO: 1270027 - DNA, 15 bp, Homo sapiens
ataaaacatactaca

SEQ ID NO: 1270028 - DNA, 15 bp, Homo sapiens
tataaaacatactac

SEQ ID NO: 1270029 - DNA, 15 bp, Homo sapiens
ctataaaacatacta

SEQ ID NO: 1270030 - DNA, 15 bp, Homo sapiens
gctataaaacatact

SEQ ID NO: 1270031 - DNA, 15 bp, Homo sapiens
agctataaaacatac

SEQ ID NO: 1270032 - DNA, 15 bp, Homo sapiens
aagctataaaacata

SEQ ID NO: 1270033 - DNA, 15 bp, Homo sapiens
aaagctataaaacat

SEQ ID NO: 1270034 - DNA, 15 bp, Homo sapiens
caaagctataaaaca

SEQ ID NO: 1270035 - DNA, 15 bp, Homo sapiens
acaaagctataaaac

SEQ ID NO: 1270036 - DNA, 15 bp, Homo sapiens
tacaaagctataaaa

SEQ ID NO: 1270037 - DNA, 15 bp, Homo sapiens
ctacaaagctataaa

SEQ ID NO: 1270038 - DNA, 15 bp, Homo sapiens
actacaaagctataa

SEQ ID NO: 1270039 - DNA, 15 bp, Homo sapiens
tactacaaagctata

SEQ ID NO: 1270040 - DNA, 15 bp, Homo sapiens
atactacaaagctat

SEQ ID NO: 1270041 - DNA, 15 bp, Homo sapiens
catactacaaagcta

SEQ ID NO: 1270042 - DNA, 15 bp, Homo sapiens
acatactacaaagct

SEQ ID NO: 1270043 - DNA, 15 bp, Homo sapiens
ggggcccggcgacac

SEQ ID NO: 1270044 - DNA, 15 bp, Homo sapiens
aggggcccggcgaca

SEQ ID NO: 1270045 - DNA, 15 bp, Homo sapiens
aaggggcccggcgac

SEQ ID NO: 1270046 - DNA, 15 bp, Homo sapiens
caaggggcccggcga

SEQ ID NO: 1270047 - DNA, 15 bp, Homo sapiens
ccaaggggcccggcg

SEQ ID NO: 1270048 - DNA, 15 bp, Homo sapiens
gccaaggggcccggc

SEQ ID NO: 1270049 - DNA, 15 bp, Homo sapiens
agccaaggggcccgg

SEQ ID NO: 1270050 - DNA, 15 bp, Homo sapiens
cagccaaggggcccg

SEQ ID NO: 1270051 - DNA, 15 bp, Homo sapiens
gcagccaaggggccc

SEQ ID NO: 1270052 - DNA, 15 bp, Homo sapiens
cgcagccaaggggcc

SEQ ID NO: 1270053 - DNA, 15 bp, Homo sapiens
gcgcagccaaggggc

SEQ ID NO: 1270054 - DNA, 15 bp, Homo sapiens
ggcgcagccaagggg

SEQ ID NO: 1270055 - DNA, 15 bp, Homo sapiens
gggcgcagccaaggg

SEQ ID NO: 1270056 - DNA, 15 bp, Homo sapiens
agggcgcagccaagg

SEQ ID NO: 1270057 - DNA, 15 bp, Homo sapiens
gagggcgcagccaag

SEQ ID NO: 1270058 - DNA, 15 bp, Homo sapiens
ggagggcgcagccaa

SEQ ID NO: 1270059 - DNA, 15 bp, Homo sapiens
gggagggcgcagcca

SEQ ID NO: 1270060 - DNA, 15 bp, Homo sapiens
ggggagggcgcagcc

SEQ ID NO: 1270061 - DNA, 15 bp, Homo sapiens
aggggagggcgcagc

SEQ ID NO: 1270062 - DNA, 15 bp, Homo sapiens
gaggggagggcgcag

SEQ ID NO: 1270063 - DNA, 15 bp, Homo sapiens
ggaggggagggcgca

SEQ ID NO: 1270064 - DNA, 15 bp, Homo sapiens
gggaggggagggcgc

SEQ ID NO: 1270065 - DNA, 15 bp, Homo sapiens
cgggaggggagggcg

SEQ ID NO: 1270066 - DNA, 15 bp, Homo sapiens
ccgggaggggagggc

SEQ ID NO: 1270067 - DNA, 15 bp, Homo sapiens
cccgggaggggaggg

SEQ ID NO: 1270068 - DNA, 15 bp, Homo sapiens
tcccgggaggggagg

SEQ ID NO: 1270069 - DNA, 15 bp, Homo sapiens
gtcccgggaggggag

SEQ ID NO: 1270070 - DNA, 15 bp, Homo sapiens
ggtcccgggagggga

SEQ ID NO: 1270071 - DNA, 15 bp, Homo sapiens
aggtcccgggagggg

SEQ ID NO: 1270072 - DNA, 15 bp, Homo sapiens
gaggtcccgggaggg

SEQ ID NO: 1270073 - DNA, 15 bp, Homo sapiens
cgaggtcccgggagg

SEQ ID NO: 1270074 - DNA, 15 bp, Homo sapiens
gcgaggtcccgggag

SEQ ID NO: 1270075 - DNA, 15 bp, Homo sapiens
agcgaggtcccggga

SEQ ID NO: 1270076 - DNA, 15 bp, Homo sapiens
cagcgaggtcccggg

SEQ ID NO: 1270077 - DNA, 15 bp, Homo sapiens
ccagcgaggtcccgg

SEQ ID NO: 1270078 - DNA, 15 bp, Homo sapiens
gccagcgaggtcccg

SEQ ID NO: 1270079 - DNA, 15 bp, Homo sapiens
agccagcgaggtccc

SEQ ID NO: 1270080 - DNA, 15 bp, Homo sapiens
aagccagcgaggtcc

SEQ ID NO: 1270081 - DNA, 15 bp, Homo sapiens
aaagccagcgaggtc

SEQ ID NO: 1270082 - DNA, 15 bp, Homo sapiens
caaagccagcgaggt

SEQ ID NO: 1270083 - DNA, 15 bp, Homo sapiens
gcaaagccagcgagg

SEQ ID NO: 1270084 - DNA, 15 bp, Homo sapiens
ggcaaagccagcgag

SEQ ID NO: 1270085 - DNA, 15 bp, Homo sapiens
gggcaaagccagcga

SEQ ID NO: 1270086 - DNA, 15 bp, Homo sapiens
agggcaaagccagcg

SEQ ID NO: 1270087 - DNA, 15 bp, Homo sapiens
cagggcaaagccagc

SEQ ID NO: 1270088 - DNA, 15 bp, Homo sapiens
ccagggcaaagccag

SEQ ID NO: 1270089 - DNA, 15 bp, Homo sapiens
tccagggcaaagcca

SEQ ID NO: 1270090 - DNA, 15 bp, Homo sapiens
gtccagggcaaagcc

SEQ ID NO: 1270091 - DNA, 15 bp, Homo sapiens
cgtccagggcaaagc

SEQ ID NO: 1270092 - DNA, 15 bp, Homo sapiens
ccgtccagggcaaag

SEQ ID NO: 1270093 - DNA, 15 bp, Homo sapiens
cccgtccagggcaaa

SEQ ID NO: 1270094 - DNA, 15 bp, Homo sapiens
gcccgtccagggcaa

SEQ ID NO: 1270095 - DNA, 15 bp, Homo sapiens
tgcccgtccagggca

SEQ ID NO: 1270096 - DNA, 15 bp, Homo sapiens
ctgcccgtccagggc

SEQ ID NO: 1270097 - DNA, 15 bp, Homo sapiens
cctgcccgtccaggg

SEQ ID NO: 1270098 - DNA, 15 bp, Homo sapiens
acctgcccgtccagg

SEQ ID NO: 1270099 - DNA, 15 bp, Homo sapiens
gacctgcccgtccag

SEQ ID NO: 1270100 - DNA, 15 bp, Homo sapiens
ggacctgcccgtcca

SEQ ID NO: 1270101 - DNA, 15 bp, Homo sapiens
gggacctgcccgtcc

SEQ ID NO: 1270102 - DNA, 15 bp, Homo sapiens
cgggacctgcccgtc

SEQ ID NO: 1270103 - DNA, 15 bp, Homo sapiens
gcgggacctgcccgt

SEQ ID NO: 1270104 - DNA, 15 bp, Homo sapiens
ggcgggacctgcccg

SEQ ID NO: 1270105 - DNA, 15 bp, Homo sapiens
gggcgggacctgccc

SEQ ID NO: 1270106 - DNA, 15 bp, Homo sapiens
ggggcgggacctgcc

SEQ ID NO: 1270107 - DNA, 15 bp, Homo sapiens
aggggcgggacctgc

SEQ ID NO: 1270108 - DNA, 15 bp, Homo sapiens
gaggggcgggacctg

SEQ ID NO: 1270109 - DNA, 15 bp, Homo sapiens
tgaggggcgggacct

SEQ ID NO: 1270110 - DNA, 15 bp, Homo sapiens
atgaggggcgggacc

SEQ ID NO: 1270111 - DNA, 15 bp, Homo sapiens
catgaggggcgggac

SEQ ID NO: 1270112 - DNA, 15 bp, Homo sapiens
ccatgaggggcggga

SEQ ID NO: 1270113 - DNA, 15 bp, Homo sapiens
gccatgaggggcggg

SEQ ID NO: 1270114 - DNA, 15 bp, Homo sapiens
ggccatgaggggcgg

SEQ ID NO: 1270115 - DNA, 15 bp, Homo sapiens
cggccatgaggggcg

SEQ ID NO: 1270116 - DNA, 15 bp, Homo sapiens
ccggccatgaggggc

SEQ ID NO: 1270117 - DNA, 15 bp, Homo sapiens
cccggccatgagggg

SEQ ID NO: 1270118 - DNA, 15 bp, Homo sapiens
gcccggccatgaggg

SEQ ID NO: 1270119 - DNA, 15 bp, Homo sapiens
tgcccggccatgagg

SEQ ID NO: 1270120 - DNA, 15 bp, Homo sapiens
gtgcccggccatgag

SEQ ID NO: 1270121 - DNA, 15 bp, Homo sapiens
cgtgcccggccatga

SEQ ID NO: 1270122 - DNA, 15 bp, Homo sapiens
ccgtgcccggccatg

SEQ ID NO: 1270123 - DNA, 15 bp, Homo sapiens
gccgtgcccggccat

SEQ ID NO: 1270124 - DNA, 15 bp, Homo sapiens
agccgtgcccggcca

SEQ ID NO: 1270125 - DNA, 15 bp, Homo sapiens
gagccgtgcccggcc

SEQ ID NO: 1270126 - DNA, 15 bp, Homo sapiens
tgagccgtgcccggc

SEQ ID NO: 1270127 - DNA, 15 bp, Homo sapiens
gtgagccgtgcccgg

SEQ ID NO: 1270128 - DNA, 15 bp, Homo sapiens
cgtgagccgtgcccg

SEQ ID NO: 1270129 - DNA, 15 bp, Homo sapiens
gcgtgagccgtgccc

SEQ ID NO: 1270130 - DNA, 15 bp, Homo sapiens
ggcgtgagccgtgcc

SEQ ID NO: 1270131 - DNA, 15 bp, Homo sapiens
aggcgtgagccgtgc

SEQ ID NO: 1270132 - DNA, 15 bp, Homo sapiens
caggcgtgagccgtg

SEQ ID NO: 1270133 - DNA, 15 bp, Homo sapiens
ccaggcgtgagccgt

SEQ ID NO: 1270134 - DNA, 15 bp, Homo sapiens
gccaggcgtgagccg

SEQ ID NO: 1270135 - DNA, 15 bp, Homo sapiens
agccaggcgtgagcc

SEQ ID NO: 1270136 - DNA, 15 bp, Homo sapiens
cagccaggcgtgagc

SEQ ID NO: 1270137 - DNA, 15 bp, Homo sapiens
acagccaggcgtgag

SEQ ID NO: 1270138 - DNA, 15 bp, Homo sapiens
cacagccaggcgtga

SEQ ID NO: 1270139 - DNA, 15 bp, Homo sapiens
ccacagccaggcgtg

SEQ ID NO: 1270140 - DNA, 15 bp, Homo sapiens
accacagccaggcgt

SEQ ID NO: 1270141 - DNA, 15 bp, Homo sapiens
gaccacagccaggcg

SEQ ID NO: 1270142 - DNA, 15 bp, Homo sapiens
cgaccacagccaggc

SEQ ID NO: 1270143 - DNA, 15 bp, Homo sapiens
ccgaccacagccagg

SEQ ID NO: 1270144 - DNA, 15 bp, Homo sapiens
gccgaccacagccag

SEQ ID NO: 1270145 - DNA, 15 bp, Homo sapiens
tgccgaccacagcca

SEQ ID NO: 1270146 - DNA, 15 bp, Homo sapiens
atgccgaccacagcc

SEQ ID NO: 1270147 - DNA, 15 bp, Homo sapiens
gatgccgaccacagc

SEQ ID NO: 1270148 - DNA, 15 bp, Homo sapiens
ggatgccgaccacag

SEQ ID NO: 1270149 - DNA, 15 bp, Homo sapiens
aggatgccgaccaca

SEQ ID NO: 1270150 - DNA, 15 bp, Homo sapiens
caggatgccgaccac

SEQ ID NO: 1270151 - DNA, 15 bp, Homo sapiens
ccaggatgccgacca

SEQ ID NO: 1270152 - DNA, 15 bp, Homo sapiens
gccaggatgccgacc

SEQ ID NO: 1270153 - DNA, 15 bp, Homo sapiens
ggccaggatgccgac

SEQ ID NO: 1270154 - DNA, 15 bp, Homo sapiens
tggccaggatgccga

SEQ ID NO: 1270155 - DNA, 15 bp, Homo sapiens
gtggccaggatgccg

SEQ ID NO: 1270156 - DNA, 15 bp, Homo sapiens
ggtggccaggatgcc

SEQ ID NO: 1270157 - DNA, 15 bp, Homo sapiens
tggtggccaggatgc

SEQ ID NO: 1270158 - DNA, 15 bp, Homo sapiens
atggtggccaggatg

SEQ ID NO: 1270159 - DNA, 15 bp, Homo sapiens
gatggtggccaggat

SEQ ID NO: 1270160 - DNA, 15 bp, Homo sapiens
agatggtggccagga

SEQ ID NO: 1270161 - DNA, 15 bp, Homo sapiens
aagatggtggccagg

SEQ ID NO: 1270162 - DNA, 15 bp, Homo sapiens
aaagatggtggccag

SEQ ID NO: 1270163 - DNA, 15 bp, Homo sapiens
gaaagatggtggcca

SEQ ID NO: 1270164 - DNA, 15 bp, Homo sapiens
tgaaagatggtggcc

SEQ ID NO: 1270165 - DNA, 15 bp, Homo sapiens
gtgaaagatggtggc

SEQ ID NO: 1270166 - DNA, 15 bp, Homo sapiens
ggtgaaagatggtgg

SEQ ID NO: 1270167 - DNA, 15 bp, Homo sapiens
tggtgaaagatggtg

SEQ ID NO: 1270168 - DNA, 15 bp, Homo sapiens
gtggtgaaagatggt

SEQ ID NO: 1270169 - DNA, 15 bp, Homo sapiens
ggtggtgaaagatgg

SEQ ID NO: 1270170 - DNA, 15 bp, Homo sapiens
aggtggtgaaagatg

SEQ ID NO: 1270171 - DNA, 15 bp, Homo sapiens
gaggtggtgaaagat

SEQ ID NO: 1270172 - DNA, 15 bp, Homo sapiens
ggaggtggtgaaaga

SEQ ID NO: 1270173 - DNA, 15 bp, Homo sapiens
gggaggtggtgaaag

SEQ ID NO: 1270174 - DNA, 15 bp, Homo sapiens
cgggaggtggtgaaa

SEQ ID NO: 1270175 - DNA, 15 bp, Homo sapiens
gcgggaggtggtgaa

SEQ ID NO: 1270176 - DNA, 15 bp, Homo sapiens
cgcgggaggtggtga

SEQ ID NO: 1270177 - DNA, 15 bp, Homo sapiens
acgcgggaggtggtg

SEQ ID NO: 1270178 - DNA, 15 bp, Homo sapiens
aacgcgggaggtggt

SEQ ID NO: 1270179 - DNA, 15 bp, Homo sapiens
aaacgcgggaggtgg

SEQ ID NO: 1270180 - DNA, 15 bp, Homo sapiens
aaaacgcgggaggtg

SEQ ID NO: 1270181 - DNA, 15 bp, Homo sapiens
gaaaacgcgggaggt

SEQ ID NO: 1270182 - DNA, 15 bp, Homo sapiens
agaaaacgcgggagg

SEQ ID NO: 1270183 - DNA, 15 bp, Homo sapiens
aagaaaacgcgggag

SEQ ID NO: 1270184 - DNA, 15 bp, Homo sapiens
caagaaaacgcggga

SEQ ID NO: 1270185 - DNA, 15 bp, Homo sapiens
ccaagaaaacgcggg

SEQ ID NO: 1270186 - DNA, 15 bp, Homo sapiens
cccaagaaaacgcgg

SEQ ID NO: 1270187 - DNA, 15 bp, Homo sapiens
gcccaagaaaacgcg

SEQ ID NO: 1270188 - DNA, 15 bp, Homo sapiens
cgcccaagaaaacgc

SEQ ID NO: 1270189 - DNA, 15 bp, Homo sapiens
acgcccaagaaaacg

SEQ ID NO: 1270190 - DNA, 15 bp, Homo sapiens
cacgcccaagaaaac

SEQ ID NO: 1270191 - DNA, 15 bp, Homo sapiens
ccacgcccaagaaaa

SEQ ID NO: 1270192 - DNA, 15 bp, Homo sapiens
tccacgcccaagaaa

SEQ ID NO: 1270193 - DNA, 15 bp, Homo sapiens
gtccacgcccaagaa

SEQ ID NO: 1270194 - DNA, 15 bp, Homo sapiens
cgtccacgcccaaga

SEQ ID NO: 1270195 - DNA, 15 bp, Homo sapiens
ccgtccacgcccaag

SEQ ID NO: 1270196 - DNA, 15 bp, Homo sapiens
gccgtccacgcccaa

SEQ ID NO: 1270197 - DNA, 15 bp, Homo sapiens
ggccgtccacgccca

SEQ ID NO: 1270198 - DNA, 15 bp, Homo sapiens
aggccgtccacgccc

SEQ ID NO: 1270199 - DNA, 15 bp, Homo sapiens
gaggccgtccacgcc

SEQ ID NO: 1270200 - DNA, 15 bp, Homo sapiens
tgaggccgtccacgc

SEQ ID NO: 1270201 - DNA, 15 bp, Homo sapiens
atgaggccgtccacg

SEQ ID NO: 1270202 - DNA, 15 bp, Homo sapiens
catgaggccgtccac

SEQ ID NO: 1270203 - DNA, 15 bp, Homo sapiens
ccatgaggccgtcca

SEQ ID NO: 1270204 - DNA, 15 bp, Homo sapiens
gccatgaggccgtcc

SEQ ID NO: 1270205 - DNA, 15 bp, Homo sapiens
tgccatgaggccgtc

SEQ ID NO: 1270206 - DNA, 15 bp, Homo sapiens
atgccatgaggccgt

SEQ ID NO: 1270207 - DNA, 15 bp, Homo sapiens
catgccatgaggccg

SEQ ID NO: 1270208 - DNA, 15 bp, Homo sapiens
ccatgccatgaggcc

SEQ ID NO: 1270209 - DNA, 15 bp, Homo sapiens
gccatgccatgaggc

SEQ ID NO: 1270210 - DNA, 15 bp, Homo sapiens
ggccatgccatgagg

SEQ ID NO: 1270211 - DNA, 15 bp, Homo sapiens
cggccatgccatgag

SEQ ID NO: 1270212 - DNA, 15 bp, Homo sapiens
gcggccatgccatga

SEQ ID NO: 1270213 - DNA, 15 bp, Homo sapiens
ggcggccatgccatg

SEQ ID NO: 1270214 - DNA, 15 bp, Homo sapiens
cggcggccatgccat

SEQ ID NO: 1270215 - DNA, 15 bp, Homo sapiens
gcggcggccatgcca

SEQ ID NO: 1270216 - DNA, 15 bp, Homo sapiens
ggcggcggccatgcc

SEQ ID NO: 1270217 - DNA, 15 bp, Homo sapiens
aggcggcggccatgc

SEQ ID NO: 1270218 - DNA, 15 bp, Homo sapiens
gaggcggcggccatg

SEQ ID NO: 1270219 - DNA, 15 bp, Homo sapiens
agaggcggcggccat

SEQ ID NO: 1270220 - DNA, 15 bp, Homo sapiens
tagaggcggcggcca

SEQ ID NO: 1270221 - DNA, 15 bp, Homo sapiens
gtagaggcggcggcc

SEQ ID NO: 1270222 - DNA, 15 bp, Homo sapiens
cgtagaggcggcggc

SEQ ID NO: 1270223 - DNA, 15 bp, Homo sapiens
acgtagaggcggcgg

SEQ ID NO: 1270224 - DNA, 15 bp, Homo sapiens
aacgtagaggcggcg

SEQ ID NO: 1270225 - DNA, 15 bp, Homo sapiens
aaacgtagaggcggc

SEQ ID NO: 1270226 - DNA, 15 bp, Homo sapiens
gaaacgtagaggcgg

SEQ ID NO: 1270227 - DNA, 15 bp, Homo sapiens
ggaaacgtagaggcg

SEQ ID NO: 1270228 - DNA, 15 bp, Homo sapiens
aggaaacgtagaggc

SEQ ID NO: 1270229 - DNA, 15 bp, Homo sapiens
aaggaaacgtagagg

SEQ ID NO: 1270230 - DNA, 15 bp, Homo sapiens
aaaggaaacgtagag

SEQ ID NO: 1270231 - DNA, 15 bp, Homo sapiens
aaaaggaaacgtaga

SEQ ID NO: 1270232 - DNA, 15 bp, Homo sapiens
caaaaggaaacgtag

SEQ ID NO: 1270233 - DNA, 15 bp, Homo sapiens
gcaaaaggaaacgta

SEQ ID NO: 1270234 - DNA, 15 bp, Homo sapiens
tgcaaaaggaaacgt

SEQ ID NO: 1270235 - DNA, 15 bp, Homo sapiens
ctgcaaaaggaaacg

SEQ ID NO: 1270236 - DNA, 15 bp, Homo sapiens
gctgcaaaaggaaac

SEQ ID NO: 1270237 - DNA, 15 bp, Homo sapiens
agctgcaaaaggaaa

SEQ ID NO: 1270238 - DNA, 15 bp, Homo sapiens
gagctgcaaaaggaa

SEQ ID NO: 1270239 - DNA, 15 bp, Homo sapiens
tgagctgcaaaagga

SEQ ID NO: 1270240 - DNA, 15 bp, Homo sapiens
ctgagctgcaaaagg

SEQ ID NO: 1270241 - DNA, 15 bp, Homo sapiens
gctgagctgcaaaag

SEQ ID NO: 1270242 - DNA, 15 bp, Homo sapiens
tgctgagctgcaaaa

SEQ ID NO: 1270243 - DNA, 15 bp, Homo sapiens
ctgctgagctgcaaa

SEQ ID NO: 1270244 - DNA, 15 bp, Homo sapiens
gctgctgagctgcaa

SEQ ID NO: 1270245 - DNA, 15 bp, Homo sapiens
cgctgctgagctgca

SEQ ID NO: 1270246 - DNA, 15 bp, Homo sapiens
ccgctgctgagctgc

SEQ ID NO: 1270247 - DNA, 15 bp, Homo sapiens
cccgctgctgagctg

SEQ ID NO: 1270248 - DNA, 15 bp, Homo sapiens
acccgctgctgagct

SEQ ID NO: 1270249 - DNA, 15 bp, Homo sapiens
gacccgctgctgagc

SEQ ID NO: 1270250 - DNA, 15 bp, Homo sapiens
ggacccgctgctgag

SEQ ID NO: 1270251 - DNA, 15 bp, Homo sapiens
cggacccgctgctga

SEQ ID NO: 1270252 - DNA, 15 bp, Homo sapiens
ccggacccgctgctg

SEQ ID NO: 1270253 - DNA, 15 bp, Homo sapiens
accggacccgctgct

SEQ ID NO: 1270254 - DNA, 15 bp, Homo sapiens
caccggacccgctgc

SEQ ID NO: 1270255 - DNA, 15 bp, Homo sapiens
acaccggacccgctg

SEQ ID NO: 1270256 - DNA, 15 bp, Homo sapiens
aacaccggacccgct

SEQ ID NO: 1270257 - DNA, 15 bp, Homo sapiens
aaacaccggacccgc

SEQ ID NO: 1270258 - DNA, 15 bp, Homo sapiens
aaaacaccggacccg

SEQ ID NO: 1270259 - DNA, 15 bp, Homo sapiens
taaaacaccggaccc

SEQ ID NO: 1270260 - DNA, 15 bp, Homo sapiens
ctaaaacaccggacc

SEQ ID NO: 1270261 - DNA, 15 bp, Homo sapiens
tctaaaacaccggac

SEQ ID NO: 1270262 - DNA, 15 bp, Homo sapiens
ctctaaaacaccgga

SEQ ID NO: 1270263 - DNA, 15 bp, Homo sapiens
tctctaaaacaccgg

SEQ ID NO: 1270264 - DNA, 15 bp, Homo sapiens
ctctctaaaacaccg

SEQ ID NO: 1270265 - DNA, 15 bp, Homo sapiens
cctctctaaaacacc

SEQ ID NO: 1270266 - DNA, 15 bp, Homo sapiens
ccctctctaaaacac

SEQ ID NO: 1270267 - DNA, 15 bp, Homo sapiens
cccctctctaaaaca

SEQ ID NO: 1270268 - DNA, 15 bp, Homo sapiens
ccccctctctaaaac

SEQ ID NO: 1270269 - DNA, 15 bp, Homo sapiens
cccccctctctaaaa

SEQ ID NO: 1270270 - DNA, 15 bp, Homo sapiens
gcccccctctctaaa

SEQ ID NO: 1270271 - DNA, 15 bp, Homo sapiens
ggcccccctctctaa

SEQ ID NO: 1270272 - DNA, 15 bp, Homo sapiens
aggcccccctctcta

SEQ ID NO: 1270273 - DNA, 15 bp, Homo sapiens
aaggcccccctctct

SEQ ID NO: 1270274 - DNA, 15 bp, Homo sapiens
caaggcccccctctc

SEQ ID NO: 1270275 - DNA, 15 bp, Homo sapiens
ccaaggcccccctct

SEQ ID NO: 1270276 - DNA, 15 bp, Homo sapiens
cccaaggcccccctc

SEQ ID NO: 1270277 - DNA, 15 bp, Homo sapiens
ccccaaggcccccct

SEQ ID NO: 1270278 - DNA, 15 bp, Homo sapiens
gccccaaggcccccc

SEQ ID NO: 1270279 - DNA, 15 bp, Homo sapiens
ggccccaaggccccc

SEQ ID NO: 1270280 - DNA, 15 bp, Homo sapiens
tggccccaaggcccc

SEQ ID NO: 1270281 - DNA, 15 bp, Homo sapiens
gtggccccaaggccc

SEQ ID NO: 1270282 - DNA, 15 bp, Homo sapiens
agtggccccaaggcc

SEQ ID NO: 1270283 - DNA, 15 bp, Homo sapiens
cagtggccccaaggc

SEQ ID NO: 1270284 - DNA, 15 bp, Homo sapiens
ccagtggccccaagg

SEQ ID NO: 1270285 - DNA, 15 bp, Homo sapiens
accagtggccccaag

SEQ ID NO: 1270286 - DNA, 15 bp, Homo sapiens
gaccagtggccccaa

SEQ ID NO: 1270287 - DNA, 15 bp, Homo sapiens
agaccagtggcccca

SEQ ID NO: 1270288 - DNA, 15 bp, Homo sapiens
cagaccagtggcccc

SEQ ID NO: 1270289 - DNA, 15 bp, Homo sapiens
ccagaccagtggccc

SEQ ID NO: 1270290 - DNA, 15 bp, Homo sapiens
gccagaccagtggcc

SEQ ID NO: 1270291 - DNA, 15 bp, Homo sapiens
agccagaccagtggc

SEQ ID NO: 1270292 - DNA, 15 bp, Homo sapiens
cagccagaccagtgg

SEQ ID NO: 1270293 - DNA, 15 bp, Homo sapiens
acagccagaccagtg

SEQ ID NO: 1270294 - DNA, 15 bp, Homo sapiens
aacagccagaccagt

SEQ ID NO: 1270295 - DNA, 15 bp, Homo sapiens
caacagccagaccag

SEQ ID NO: 1270296 - DNA, 15 bp, Homo sapiens
ccaacagccagacca

SEQ ID NO: 1270297 - DNA, 15 bp, Homo sapiens
cccaacagccagacc

SEQ ID NO: 1270298 - DNA, 15 bp, Homo sapiens
ccccaacagccagac

SEQ ID NO: 1270299 - DNA, 15 bp, Homo sapiens
gccccaacagccaga

SEQ ID NO: 1270300 - DNA, 15 bp, Homo sapiens
ggccccaacagccag

SEQ ID NO: 1270301 - DNA, 15 bp, Homo sapiens
tggccccaacagcca

SEQ ID NO: 1270302 - DNA, 15 bp, Homo sapiens
ctggccccaacagcc

SEQ ID NO: 1270303 - DNA, 15 bp, Homo sapiens
cctggccccaacagc

SEQ ID NO: 1270304 - DNA, 15 bp, Homo sapiens
gcctggccccaacag

SEQ ID NO: 1270305 - DNA, 15 bp, Homo sapiens
cgcctggccccaaca

SEQ ID NO: 1270306 - DNA, 15 bp, Homo sapiens
ccgcctggccccaac

SEQ ID NO: 1270307 - DNA, 15 bp, Homo sapiens
accgcctggccccaa

SEQ ID NO: 1270308 - DNA, 15 bp, Homo sapiens
caccgcctggcccca

SEQ ID NO: 1270309 - DNA, 15 bp, Homo sapiens
tcaccgcctggcccc

SEQ ID NO: 1270310 - DNA, 15 bp, Homo sapiens
ttcaccgcctggccc

SEQ ID NO: 1270311 - DNA, 15 bp, Homo sapiens
tttcaccgcctggcc

SEQ ID NO: 1270312 - DNA, 15 bp, Homo sapiens
ctttcaccgcctggc

SEQ ID NO: 1270313 - DNA, 15 bp, Homo sapiens
actttcaccgcctgg

SEQ ID NO: 1270314 - DNA, 15 bp, Homo sapiens
cactttcaccgcctg

SEQ ID NO: 1270315 - DNA, 15 bp, Homo sapiens
ccactttcaccgcct

SEQ ID NO: 1270316 - DNA, 15 bp, Homo sapiens
cccactttcaccgcc

SEQ ID NO: 1270317 - DNA, 15 bp, Homo sapiens
gcccactttcaccgc

SEQ ID NO: 1270318 - DNA, 15 bp, Homo sapiens
ggcccactttcaccg

SEQ ID NO: 1270319 - DNA, 15 bp, Homo sapiens
gggcccactttcacc

SEQ ID NO: 1270320 - DNA, 15 bp, Homo sapiens
agggcccactttcac

SEQ ID NO: 1270321 - DNA, 15 bp, Homo sapiens
cagggcccactttca

SEQ ID NO: 1270322 - DNA, 15 bp, Homo sapiens
ccagggcccactttc

SEQ ID NO: 1270323 - DNA, 15 bp, Homo sapiens
cccagggcccacttt

SEQ ID NO: 1270324 - DNA, 15 bp, Homo sapiens
gcccagggcccactt

SEQ ID NO: 1270325 - DNA, 15 bp, Homo sapiens
tgcccagggcccact

SEQ ID NO: 1270326 - DNA, 15 bp, Homo sapiens
ctgcccagggcccac

SEQ ID NO: 1270327 - DNA, 15 bp, Homo sapiens
gctgcccagggccca

SEQ ID NO: 1270328 - DNA, 15 bp, Homo sapiens
ggctgcccagggccc

SEQ ID NO: 1270329 - DNA, 15 bp, Homo sapiens
aggctgcccagggcc

SEQ ID NO: 1270330 - DNA, 15 bp, Homo sapiens
caggctgcccagggc

SEQ ID NO: 1270331 - DNA, 15 bp, Homo sapiens
gcaggctgcccaggg

SEQ ID NO: 1270332 - DNA, 15 bp, Homo sapiens
cgcaggctgcccagg

SEQ ID NO: 1270333 - DNA, 15 bp, Homo sapiens
tcgcaggctgcccag

SEQ ID NO: 1270334 - DNA, 15 bp, Homo sapiens
ctcgcaggctgccca

SEQ ID NO: 1270335 - DNA, 15 bp, Homo sapiens
gctcgcaggctgccc

SEQ ID NO: 1270336 - DNA, 15 bp, Homo sapiens
tgctcgcaggctgcc

SEQ ID NO: 1270337 - DNA, 15 bp, Homo sapiens
ctgctcgcaggctgc

SEQ ID NO: 1270338 - DNA, 15 bp, Homo sapiens
gctgctcgcaggctg

SEQ ID NO: 1270339 - DNA, 15 bp, Homo sapiens
agctgctcgcaggct

SEQ ID NO: 1270340 - DNA, 15 bp, Homo sapiens
gagctgctcgcaggc

SEQ ID NO: 1270341 - DNA, 15 bp, Homo sapiens
agagctgctcgcagg

SEQ ID NO: 1270342 - DNA, 15 bp, Homo sapiens
gagagctgctcgcag

SEQ ID NO: 1270343 - DNA, 15 bp, Homo sapiens
tgagagctgctcgca

SEQ ID NO: 1270344 - DNA, 15 bp, Homo sapiens
gtgagagctgctcgc

SEQ ID NO: 1270345 - DNA, 15 bp, Homo sapiens
ggtgagagctgctcg

SEQ ID NO: 1270346 - DNA, 15 bp, Homo sapiens
aggtgagagctgctc

SEQ ID NO: 1270347 - DNA, 15 bp, Homo sapiens
gaggtgagagctgct

SEQ ID NO: 1270348 - DNA, 15 bp, Homo sapiens
agaggtgagagctgc

SEQ ID NO: 1270349 - DNA, 15 bp, Homo sapiens
cagaggtgagagctg

SEQ ID NO: 1270350 - DNA, 15 bp, Homo sapiens
ccagaggtgagagct

SEQ ID NO: 1270351 - DNA, 15 bp, Homo sapiens
gccagaggtgagagc

SEQ ID NO: 1270352 - DNA, 15 bp, Homo sapiens
ggccagaggtgagag

SEQ ID NO: 1270353 - DNA, 15 bp, Homo sapiens
tggccagaggtgaga

SEQ ID NO: 1270354 - DNA, 15 bp, Homo sapiens
ctggccagaggtgag

SEQ ID NO: 1270355 - DNA, 15 bp, Homo sapiens
gctggccagaggtga

SEQ ID NO: 1270356 - DNA, 15 bp, Homo sapiens
tgctggccagaggtg

SEQ ID NO: 1270357 - DNA, 15 bp, Homo sapiens
ttgctggccagaggt

SEQ ID NO: 1270358 - DNA, 15 bp, Homo sapiens
tttgctggccagagg

SEQ ID NO: 1270359 - DNA, 15 bp, Homo sapiens
gtttgctggccagag

SEQ ID NO: 1270360 - DNA, 15 bp, Homo sapiens
agtttgctggccaga

SEQ ID NO: 1270361 - DNA, 15 bp, Homo sapiens
gagtttgctggccag

SEQ ID NO: 1270362 - DNA, 15 bp, Homo sapiens
ggagtttgctggcca

SEQ ID NO: 1270363 - DNA, 15 bp, Homo sapiens
gggagtttgctggcc

SEQ ID NO: 1270364 - DNA, 15 bp, Homo sapiens
ggggagtttgctggc

SEQ ID NO: 1270365 - DNA, 15 bp, Homo sapiens
cggggagtttgctgg

SEQ ID NO: 1270366 - DNA, 15 bp, Homo sapiens
tcggggagtttgctg

SEQ ID NO: 1270367 - DNA, 15 bp, Homo sapiens
gtcggggagtttgct

SEQ ID NO: 1270368 - DNA, 15 bp, Homo sapiens
agtcggggagtttgc

SEQ ID NO: 1270369 - DNA, 15 bp, Homo sapiens
tagtcggggagtttg

SEQ ID NO: 1270370 - DNA, 15 bp, Homo sapiens
atagtcggggagttt

SEQ ID NO: 1270371 - DNA, 15 bp, Homo sapiens
catagtcggggagtt

SEQ ID NO: 1270372 - DNA, 15 bp, Homo sapiens
gcatagtcggggagt

SEQ ID NO: 1270373 - DNA, 15 bp, Homo sapiens
ggcatagtcggggag

SEQ ID NO: 1270374 - DNA, 15 bp, Homo sapiens
aggcatagtcgggga

SEQ ID NO: 1270375 - DNA, 15 bp, Homo sapiens
aaggcatagtcgggg

SEQ ID NO: 1270376 - DNA, 15 bp, Homo sapiens
caaggcatagtcggg

SEQ ID NO: 1270377 - DNA, 15 bp, Homo sapiens
tcaaggcatagtcgg

SEQ ID NO: 1270378 - DNA, 15 bp, Homo sapiens
ctcaaggcatagtcg

SEQ ID NO: 1270379 - DNA, 15 bp, Homo sapiens
cctcaaggcatagtc

SEQ ID NO: 1270380 - DNA, 15 bp, Homo sapiens
ccctcaaggcatagt

SEQ ID NO: 1270381 - DNA, 15 bp, Homo sapiens
accctcaaggcatag

SEQ ID NO: 1270382 - DNA, 15 bp, Homo sapiens
gaccctcaaggcata

SEQ ID NO: 1270383 - DNA, 15 bp, Homo sapiens
tgaccctcaaggcat

SEQ ID NO: 1270384 - DNA, 15 bp, Homo sapiens
ttgaccctcaaggca

SEQ ID NO: 1270385 - DNA, 15 bp, Homo sapiens
tttgaccctcaaggc

SEQ ID NO: 1270386 - DNA, 15 bp, Homo sapiens
ttttgaccctcaagg

SEQ ID NO: 1270387 - DNA, 15 bp, Homo sapiens
gttttgaccctcaag

SEQ ID NO: 1270388 - DNA, 15 bp, Homo sapiens
cgttttgaccctcaa

SEQ ID NO: 1270389 - DNA, 15 bp, Homo sapiens
acgttttgaccctca

SEQ ID NO: 1270390 - DNA, 15 bp, Homo sapiens
gacgttttgaccctc

SEQ ID NO: 1270391 - DNA, 15 bp, Homo sapiens
agacgttttgaccct

SEQ ID NO: 1270392 - DNA, 15 bp, Homo sapiens
cagacgttttgaccc

SEQ ID NO: 1270393 - DNA, 15 bp, Homo sapiens
ccagacgttttgacc

SEQ ID NO: 1270394 - DNA, 15 bp, Homo sapiens
tccagacgttttgac

SEQ ID NO: 1270395 - DNA, 15 bp, Homo sapiens
atccagacgttttga

SEQ ID NO: 1270396 - DNA, 15 bp, Homo sapiens
aatccagacgttttg

SEQ ID NO: 1270397 - DNA, 15 bp, Homo sapiens
aaatccagacgtttt

SEQ ID NO: 1270398 - DNA, 15 bp, Homo sapiens
gaaatccagacgttt

SEQ ID NO: 1270399 - DNA, 15 bp, Homo sapiens
ggaaatccagacgtt

SEQ ID NO: 1270400 - DNA, 15 bp, Homo sapiens
aggaaatccagacgt

SEQ ID NO: 1270401 - DNA, 15 bp, Homo sapiens
caggaaatccagacg

SEQ ID NO: 1270402 - DNA, 15 bp, Homo sapiens
tcaggaaatccagac

SEQ ID NO: 1270403 - DNA, 15 bp, Homo sapiens
atcaggaaatccaga

SEQ ID NO: 1270404 - DNA, 15 bp, Homo sapiens
gatcaggaaatccag

SEQ ID NO: 1270405 - DNA, 15 bp, Homo sapiens
cgatcaggaaatcca

SEQ ID NO: 1270406 - DNA, 15 bp, Homo sapiens
tcgatcaggaaatcc

SEQ ID NO: 1270407 - DNA, 15 bp, Homo sapiens
atcgatcaggaaatc

SEQ ID NO: 1270408 - DNA, 15 bp, Homo sapiens
catcgatcaggaaat

SEQ ID NO: 1270409 - DNA, 15 bp, Homo sapiens
gcatcgatcaggaaa

SEQ ID NO: 1270410 - DNA, 15 bp, Homo sapiens
agcatcgatcaggaa

SEQ ID NO: 1270411 - DNA, 15 bp, Homo sapiens
cagcatcgatcagga

SEQ ID NO: 1270412 - DNA, 15 bp, Homo sapiens
acagcatcgatcagg

SEQ ID NO: 1270413 - DNA, 15 bp, Homo sapiens
gacagcatcgatcag

SEQ ID NO: 1270414 - DNA, 15 bp, Homo sapiens
cgacagcatcgatca

SEQ ID NO: 1270415 - DNA, 15 bp, Homo sapiens
acgacagcatcgatc

SEQ ID NO: 1270416 - DNA, 15 bp, Homo sapiens
gacgacagcatcgat

SEQ ID NO: 1270417 - DNA, 15 bp, Homo sapiens
cgacgacagcatcga

SEQ ID NO: 1270418 - DNA, 15 bp, Homo sapiens
gcgacgacagcatcg

SEQ ID NO: 1270419 - DNA, 15 bp, Homo sapiens
agcgacgacagcatc

SEQ ID NO: 1270420 - DNA, 15 bp, Homo sapiens
cagcgacgacagcat

SEQ ID NO: 1270421 - DNA, 15 bp, Homo sapiens
acagcgacgacagca

SEQ ID NO: 1270422 - DNA, 15 bp, Homo sapiens
gacagcgacgacagc

SEQ ID NO: 1270423 - DNA, 15 bp, Homo sapiens
ggacagcgacgacag

SEQ ID NO: 1270424 - DNA, 15 bp, Homo sapiens
tggacagcgacgaca

SEQ ID NO: 1270425 - DNA, 15 bp, Homo sapiens
gtggacagcgacgac

SEQ ID NO: 1270426 - DNA, 15 bp, Homo sapiens
cgtggacagcgacga

SEQ ID NO: 1270427 - DNA, 15 bp, Homo sapiens
ccgtggacagcgacg

SEQ ID NO: 1270428 - DNA, 15 bp, Homo sapiens
tccgtggacagcgac

SEQ ID NO: 1270429 - DNA, 15 bp, Homo sapiens
ctccgtggacagcga

SEQ ID NO: 1270430 - DNA, 15 bp, Homo sapiens
gctccgtggacagcg

SEQ ID NO: 1270431 - DNA, 15 bp, Homo sapiens
agctccgtggacagc

SEQ ID NO: 1270432 - DNA, 15 bp, Homo sapiens
tagctccgtggacag

SEQ ID NO: 1270433 - DNA, 15 bp, Homo sapiens
gtagctccgtggaca

SEQ ID NO: 1270434 - DNA, 15 bp, Homo sapiens
agtagctccgtggac

SEQ ID NO: 1270435 - DNA, 15 bp, Homo sapiens
cagtagctccgtgga

SEQ ID NO: 1270436 - DNA, 15 bp, Homo sapiens
acagtagctccgtgg

SEQ ID NO: 1270437 - DNA, 15 bp, Homo sapiens
gacagtagctccgtg

SEQ ID NO: 1270438 - DNA, 15 bp, Homo sapiens
cgacagtagctccgt

SEQ ID NO: 1270439 - DNA, 15 bp, Homo sapiens
gcgacagtagctccg

SEQ ID NO: 1270440 - DNA, 15 bp, Homo sapiens
ggcgacagtagctcc

SEQ ID NO: 1270441 - DNA, 15 bp, Homo sapiens
cggcgacagtagctc

SEQ ID NO: 1270442 - DNA, 15 bp, Homo sapiens
acggcgacagtagct

SEQ ID NO: 1270443 - DNA, 15 bp, Homo sapiens
gacggcgacagtagc

SEQ ID NO: 1270444 - DNA, 15 bp, Homo sapiens
tgacggcgacagtag

SEQ ID NO: 1270445 - DNA, 15 bp, Homo sapiens
ctgacggcgacagta

SEQ ID NO: 1270446 - DNA, 15 bp, Homo sapiens
tctgacggcgacagt

SEQ ID NO: 1270447 - DNA, 15 bp, Homo sapiens
ctctgacggcgacag

SEQ ID NO: 1270448 - DNA, 15 bp, Homo sapiens
gctctgacggcgaca

SEQ ID NO: 1270449 - DNA, 15 bp, Homo sapiens
cgctctgacggcgac

SEQ ID NO: 1270450 - DNA, 15 bp, Homo sapiens
ccgctctgacggcga

SEQ ID NO: 1270451 - DNA, 15 bp, Homo sapiens
cccgctctgacggcg

SEQ ID NO: 1270452 - DNA, 15 bp, Homo sapiens
tcccgctctgacggc

SEQ ID NO: 1270453 - DNA, 15 bp, Homo sapiens
ttcccgctctgacgg

SEQ ID NO: 1270454 - DNA, 15 bp, Homo sapiens
cttcccgctctgacg

SEQ ID NO: 1270455 - DNA, 15 bp, Homo sapiens
ccttcccgctctgac

SEQ ID NO: 1270456 - DNA, 15 bp, Homo sapiens
gccttcccgctctga

SEQ ID NO: 1270457 - DNA, 15 bp, Homo sapiens
tgccttcccgctctg

SEQ ID NO: 1270458 - DNA, 15 bp, Homo sapiens
gtgccttcccgctct

SEQ ID NO: 1270459 - DNA, 15 bp, Homo sapiens
cgtgccttcccgctc

SEQ ID NO: 1270460 - DNA, 15 bp, Homo sapiens
acgtgccttcccgct

SEQ ID NO: 1270461 - DNA, 15 bp, Homo sapiens
aacgtgccttcccgc

SEQ ID NO: 1270462 - DNA, 15 bp, Homo sapiens
gaacgtgccttcccg

SEQ ID NO: 1270463 - DNA, 15 bp, Homo sapiens
tgaacgtgccttccc

SEQ ID NO: 1270464 - DNA, 15 bp, Homo sapiens
ctgaacgtgccttcc

SEQ ID NO: 1270465 - DNA, 15 bp, Homo sapiens
cctgaacgtgccttc

SEQ ID NO: 1270466 - DNA, 15 bp, Homo sapiens
ccctgaacgtgcctt

SEQ ID NO: 1270467 - DNA, 15 bp, Homo sapiens
tccctgaacgtgcct

SEQ ID NO: 1270468 - DNA, 15 bp, Homo sapiens
ctccctgaacgtgcc

SEQ ID NO: 1270469 - DNA, 15 bp, Homo sapiens
actccctgaacgtgc

SEQ ID NO: 1270470 - DNA, 15 bp, Homo sapiens
tactccctgaacgtg

SEQ ID NO: 1270471 - DNA, 15 bp, Homo sapiens
ctactccctgaacgt

SEQ ID NO: 1270472 - DNA, 15 bp, Homo sapiens
tctactccctgaacg

SEQ ID NO: 1270473 - DNA, 15 bp, Homo sapiens
ttctactccctgaac

SEQ ID NO: 1270474 - DNA, 15 bp, Homo sapiens
cttctactccctgaa

SEQ ID NO: 1270475 - DNA, 15 bp, Homo sapiens
gcttctactccctga

SEQ ID NO: 1270476 - DNA, 15 bp, Homo sapiens
cgcttctactccctg

SEQ ID NO: 1270477 - DNA, 15 bp, Homo sapiens
acgcttctactccct

SEQ ID NO: 1270478 - DNA, 15 bp, Homo sapiens
cacgcttctactccc

SEQ ID NO: 1270479 - DNA, 15 bp, Homo sapiens
ccacgcttctactcc

SEQ ID NO: 1270480 - DNA, 15 bp, Homo sapiens
cccacgcttctactc

SEQ ID NO: 1270481 - DNA, 15 bp, Homo sapiens
gcccacgcttctact

SEQ ID NO: 1270482 - DNA, 15 bp, Homo sapiens
agcccacgcttctac

SEQ ID NO: 1270483 - DNA, 15 bp, Homo sapiens
aagcccacgcttcta

SEQ ID NO: 1270484 - DNA, 15 bp, Homo sapiens
caagcccacgcttct

SEQ ID NO: 1270485 - DNA, 15 bp, Homo sapiens
gcaagcccacgcttc

SEQ ID NO: 1270486 - DNA, 15 bp, Homo sapiens
tgcaagcccacgctt

SEQ ID NO: 1270487 - DNA, 15 bp, Homo sapiens
ctgcaagcccacgct

SEQ ID NO: 1270488 - DNA, 15 bp, Homo sapiens
tctgcaagcccacgc

SEQ ID NO: 1270489 - DNA, 15 bp, Homo sapiens
ttctgcaagcccacg

SEQ ID NO: 1270490 - DNA, 15 bp, Homo sapiens
tttctgcaagcccac

SEQ ID NO: 1270491 - DNA, 15 bp, Homo sapiens
ctttctgcaagccca

SEQ ID NO: 1270492 - DNA, 15 bp, Homo sapiens
cctttctgcaagccc

SEQ ID NO: 1270493 - DNA, 15 bp, Homo sapiens
ccctttctgcaagcc

SEQ ID NO: 1270494 - DNA, 15 bp, Homo sapiens
tccctttctgcaagc

SEQ ID NO: 1270495 - DNA, 15 bp, Homo sapiens
gtccctttctgcaag

SEQ ID NO: 1270496 - DNA, 15 bp, Homo sapiens
ggtccctttctgcaa

SEQ ID NO: 1270497 - DNA, 15 bp, Homo sapiens
aggtccctttctgca

SEQ ID NO: 1270498 - DNA, 15 bp, Homo sapiens
caggtccctttctgc

SEQ ID NO: 1270499 - DNA, 15 bp, Homo sapiens
acaggtccctttctg

SEQ ID NO: 1270500 - DNA, 15 bp, Homo sapiens
aacaggtccctttct

SEQ ID NO: 1270501 - DNA, 15 bp, Homo sapiens
caacaggtccctttc

SEQ ID NO: 1270502 - DNA, 15 bp, Homo sapiens
gcaacaggtcccttt

SEQ ID NO: 1270503 - DNA, 15 bp, Homo sapiens
agcaacaggtccctt

SEQ ID NO: 1270504 - DNA, 15 bp, Homo sapiens
cagcaacaggtccct

SEQ ID NO: 1270505 - DNA, 15 bp, Homo sapiens
gcagcaacaggtccc

SEQ ID NO: 1270506 - DNA, 15 bp, Homo sapiens
ggcagcaacaggtcc

SEQ ID NO: 1270507 - DNA, 15 bp, Homo sapiens
aggcagcaacaggtc

SEQ ID NO: 1270508 - DNA, 15 bp, Homo sapiens
aaggcagcaacaggt

SEQ ID NO: 1270509 - DNA, 15 bp, Homo sapiens
taaggcagcaacagg

SEQ ID NO: 1270510 - DNA, 15 bp, Homo sapiens
gtaaggcagcaacag

SEQ ID NO: 1270511 - DNA, 15 bp, Homo sapiens
tgtaaggcagcaaca

SEQ ID NO: 1270512 - DNA, 15 bp, Homo sapiens
atgtaaggcagcaac

SEQ ID NO: 1270513 - DNA, 15 bp, Homo sapiens
catgtaaggcagcaa

SEQ ID NO: 1270514 - DNA, 15 bp, Homo sapiens
ccatgtaaggcagca

SEQ ID NO: 1270515 - DNA, 15 bp, Homo sapiens
cccatgtaaggcagc

SEQ ID NO: 1270516 - DNA, 15 bp, Homo sapiens
ccccatgtaaggcag

SEQ ID NO: 1270517 - DNA, 15 bp, Homo sapiens
cccccatgtaaggca

SEQ ID NO: 1270518 - DNA, 15 bp, Homo sapiens
gcccccatgtaaggc

SEQ ID NO: 1270519 - DNA, 15 bp, Homo sapiens
ggcccccatgtaagg

SEQ ID NO: 1270520 - DNA, 15 bp, Homo sapiens
cggcccccatgtaag

SEQ ID NO: 1270521 - DNA, 15 bp, Homo sapiens
ccggcccccatgtaa

SEQ ID NO: 1270522 - DNA, 15 bp, Homo sapiens
gccggcccccatgta

SEQ ID NO: 1270523 - DNA, 15 bp, Homo sapiens
tgccggcccccatgt

SEQ ID NO: 1270524 - DNA, 15 bp, Homo sapiens
ctgccggcccccatg

SEQ ID NO: 1270525 - DNA, 15 bp, Homo sapiens
cctgccggcccccat

SEQ ID NO: 1270526 - DNA, 15 bp, Homo sapiens
ccctgccggccccca

SEQ ID NO: 1270527 - DNA, 15 bp, Homo sapiens
accctgccggccccc

SEQ ID NO: 1270528 - DNA, 15 bp, Homo sapiens
taccctgccggcccc

SEQ ID NO: 1270529 - DNA, 15 bp, Homo sapiens
ctaccctgccggccc

SEQ ID NO: 1270530 - DNA, 15 bp, Homo sapiens
actaccctgccggcc

SEQ ID NO: 1270531 - DNA, 15 bp, Homo sapiens
gactaccctgccggc

SEQ ID NO: 1270532 - DNA, 15 bp, Homo sapiens
agactaccctgccgg

SEQ ID NO: 1270533 - DNA, 15 bp, Homo sapiens
aagactaccctgccg

SEQ ID NO: 1270534 - DNA, 15 bp, Homo sapiens
caagactaccctgcc

SEQ ID NO: 1270535 - DNA, 15 bp, Homo sapiens
ccaagactaccctgc

SEQ ID NO: 1270536 - DNA, 15 bp, Homo sapiens
tccaagactaccctg

SEQ ID NO: 1270537 - DNA, 15 bp, Homo sapiens
ttccaagactaccct

SEQ ID NO: 1270538 - DNA, 15 bp, Homo sapiens
tttccaagactaccc

SEQ ID NO: 1270539 - DNA, 15 bp, Homo sapiens
atttccaagactacc

SEQ ID NO: 1270540 - DNA, 15 bp, Homo sapiens
catttccaagactac

SEQ ID NO: 1270541 - DNA, 15 bp, Homo sapiens
gcatttccaagacta

SEQ ID NO: 1270542 - DNA, 15 bp, Homo sapiens
ggcatttccaagact

SEQ ID NO: 1270543 - DNA, 15 bp, Homo sapiens
gggcatttccaagac

SEQ ID NO: 1270544 - DNA, 15 bp, Homo sapiens
tgggcatttccaaga

SEQ ID NO: 1270545 - DNA, 15 bp, Homo sapiens
ttgggcatttccaag

SEQ ID NO: 1270546 - DNA, 15 bp, Homo sapiens
cttgggcatttccaa

SEQ ID NO: 1270547 - DNA, 15 bp, Homo sapiens
tcttgggcatttcca

SEQ ID NO: 1270548 - DNA, 15 bp, Homo sapiens
atcttgggcatttcc

SEQ ID NO: 1270549 - DNA, 15 bp, Homo sapiens
aatcttgggcatttc

SEQ ID NO: 1270550 - DNA, 15 bp, Homo sapiens
caatcttgggcattt

SEQ ID NO: 1270551 - DNA, 15 bp, Homo sapiens
gcaatcttgggcatt

SEQ ID NO: 1270552 - DNA, 15 bp, Homo sapiens
agcaatcttgggcat

SEQ ID NO: 1270553 - DNA, 15 bp, Homo sapiens
aagcaatcttgggca

SEQ ID NO: 1270554 - DNA, 15 bp, Homo sapiens
gaagcaatcttgggc

SEQ ID NO: 1270555 - DNA, 15 bp, Homo sapiens
ggaagcaatcttggg

SEQ ID NO: 1270556 - DNA, 15 bp, Homo sapiens
cggaagcaatcttgg

SEQ ID NO: 1270557 - DNA, 15 bp, Homo sapiens
gcggaagcaatcttg

SEQ ID NO: 1270558 - DNA, 15 bp, Homo sapiens
cgcggaagcaatctt

SEQ ID NO: 1270559 - DNA, 15 bp, Homo sapiens
gcgcggaagcaatct

SEQ ID NO: 1270560 - DNA, 15 bp, Homo sapiens
cgcgcggaagcaatc

SEQ ID NO: 1270561 - DNA, 15 bp, Homo sapiens
gcgcgcggaagcaat

SEQ ID NO: 1270562 - DNA, 15 bp, Homo sapiens
cgcgcgcggaagcaa

SEQ ID NO: 1270563 - DNA, 15 bp, Homo sapiens
acgcgcgcggaagca

SEQ ID NO: 1270564 - DNA, 15 bp, Homo sapiens
gacgcgcgcggaagc

SEQ ID NO: 1270565 - DNA, 15 bp, Homo sapiens
tgacgcgcgcggaag

SEQ ID NO: 1270566 - DNA, 15 bp, Homo sapiens
ctgacgcgcgcggaa

SEQ ID NO: 1270567 - DNA, 15 bp, Homo sapiens
actgacgcgcgcgga

SEQ ID NO: 1270568 - DNA, 15 bp, Homo sapiens
aactgacgcgcgcgg

SEQ ID NO: 1270569 - DNA, 15 bp, Homo sapiens
gaactgacgcgcgcg

SEQ ID NO: 1270570 - DNA, 15 bp, Homo sapiens
tgaactgacgcgcgc

SEQ ID NO: 1270571 - DNA, 15 bp, Homo sapiens
ctgaactgacgcgcg

SEQ ID NO: 1270572 - DNA, 15 bp, Homo sapiens
gctgaactgacgcgc

SEQ ID NO: 1270573 - DNA, 15 bp, Homo sapiens
cgctgaactgacgcg

SEQ ID NO: 1270574 - DNA, 15 bp, Homo sapiens
ccgctgaactgacgc

SEQ ID NO: 1270575 - DNA, 15 bp, Homo sapiens
tccgctgaactgacg

SEQ ID NO: 1270576 - DNA, 15 bp, Homo sapiens
gtccgctgaactgac

SEQ ID NO: 1270577 - DNA, 15 bp, Homo sapiens
cgtccgctgaactga

SEQ ID NO: 1270578 - DNA, 15 bp, Homo sapiens
acgtccgctgaactg

SEQ ID NO: 1270579 - DNA, 15 bp, Homo sapiens
cacgtccgctgaact

SEQ ID NO: 1270580 - DNA, 15 bp, Homo sapiens
acacgtccgctgaac

SEQ ID NO: 1270581 - DNA, 15 bp, Homo sapiens
gacacgtccgctgaa

SEQ ID NO: 1270582 - DNA, 15 bp, Homo sapiens
agacacgtccgctga

SEQ ID NO: 1270583 - DNA, 15 bp, Homo sapiens
cagacacgtccgctg

SEQ ID NO: 1270584 - DNA, 15 bp, Homo sapiens
gcagacacgtccgct

SEQ ID NO: 1270585 - DNA, 15 bp, Homo sapiens
ggcagacacgtccgc

SEQ ID NO: 1270586 - DNA, 15 bp, Homo sapiens
aggcagacacgtccg

SEQ ID NO: 1270587 - DNA, 15 bp, Homo sapiens
caggcagacacgtcc

SEQ ID NO: 1270588 - DNA, 15 bp, Homo sapiens
ccaggcagacacgtc

SEQ ID NO: 1270589 - DNA, 15 bp, Homo sapiens
gccaggcagacacgt

SEQ ID NO: 1270590 - DNA, 15 bp, Homo sapiens
tgccaggcagacacg

SEQ ID NO: 1270591 - DNA, 15 bp, Homo sapiens
gtgccaggcagacac

SEQ ID NO: 1270592 - DNA, 15 bp, Homo sapiens
cgtgccaggcagaca

SEQ ID NO: 1270593 - DNA, 15 bp, Homo sapiens
tcgtgccaggcagac

SEQ ID NO: 1270594 - DNA, 15 bp, Homo sapiens
ctcgtgccaggcaga

SEQ ID NO: 1270595 - DNA, 15 bp, Homo sapiens
cctcgtgccaggcag

SEQ ID NO: 1270596 - DNA, 15 bp, Homo sapiens
tcctcgtgccaggca

SEQ ID NO: 1270597 - DNA, 15 bp, Homo sapiens
gtcctcgtgccaggc

SEQ ID NO: 1270598 - DNA, 15 bp, Homo sapiens
ggtcctcgtgccagg

SEQ ID NO: 1270599 - DNA, 15 bp, Homo sapiens
cggtcctcgtgccag

SEQ ID NO: 1270600 - DNA, 15 bp, Homo sapiens
acggtcctcgtgcca

SEQ ID NO: 1270601 - DNA, 15 bp, Homo sapiens
aacggtcctcgtgcc

SEQ ID NO: 1270602 - DNA, 15 bp, Homo sapiens
gaacggtcctcgtgc

SEQ ID NO: 1270603 - DNA, 15 bp, Homo sapiens
agaacggtcctcgtg

SEQ ID NO: 1270604 - DNA, 15 bp, Homo sapiens
tagaacggtcctcgt

SEQ ID NO: 1270605 - DNA, 15 bp, Homo sapiens
gtagaacggtcctcg

SEQ ID NO: 1270606 - DNA, 15 bp, Homo sapiens
tgtagaacggtcctc

SEQ ID NO: 1270607 - DNA, 15 bp, Homo sapiens
ttgtagaacggtcct

SEQ ID NO: 1270608 - DNA, 15 bp, Homo sapiens
tttgtagaacggtcc

SEQ ID NO: 1270609 - DNA, 15 bp, Homo sapiens
gtttgtagaacggtc

SEQ ID NO: 1270610 - DNA, 15 bp, Homo sapiens
agtttgtagaacggt

SEQ ID NO: 1270611 - DNA, 15 bp, Homo sapiens
gagtttgtagaacgg

SEQ ID NO: 1270612 - DNA, 15 bp, Homo sapiens
cgagtttgtagaacg

SEQ ID NO: 1270613 - DNA, 15 bp, Homo sapiens
acgagtttgtagaac

SEQ ID NO: 1270614 - DNA, 15 bp, Homo sapiens
aacgagtttgtagaa

SEQ ID NO: 1270615 - DNA, 15 bp, Homo sapiens
gaacgagtttgtaga

SEQ ID NO: 1270616 - DNA, 15 bp, Homo sapiens
ggaacgagtttgtag

SEQ ID NO: 1270617 - DNA, 15 bp, Homo sapiens
aggaacgagtttgta

SEQ ID NO: 1270618 - DNA, 15 bp, Homo sapiens
caggaacgagtttgt

SEQ ID NO: 1270619 - DNA, 15 bp, Homo sapiens
ccaggaacgagtttg

SEQ ID NO: 1270620 - DNA, 15 bp, Homo sapiens
tccaggaacgagttt

SEQ ID NO: 1270621 - DNA, 15 bp, Homo sapiens
ttccaggaacgagtt

SEQ ID NO: 1270622 - DNA, 15 bp, Homo sapiens
cttccaggaacgagt

SEQ ID NO: 1270623 - DNA, 15 bp, Homo sapiens
gcttccaggaacgag

SEQ ID NO: 1270624 - DNA, 15 bp, Homo sapiens
ggcttccaggaacga

SEQ ID NO: 1270625 - DNA, 15 bp, Homo sapiens
cggcttccaggaacg

SEQ ID NO: 1270626 - DNA, 15 bp, Homo sapiens
ccggcttccaggaac

SEQ ID NO: 1270627 - DNA, 15 bp, Homo sapiens
cccggcttccaggaa

SEQ ID NO: 1270628 - DNA, 15 bp, Homo sapiens
gcccggcttccagga

SEQ ID NO: 1270629 - DNA, 15 bp, Homo sapiens
agcccggcttccagg

SEQ ID NO: 1270630 - DNA, 15 bp, Homo sapiens
gagcccggcttccag

SEQ ID NO: 1270631 - DNA, 15 bp, Homo sapiens
cgagcccggcttcca

SEQ ID NO: 1270632 - DNA, 15 bp, Homo sapiens
gcgagcccggcttcc

SEQ ID NO: 1270633 - DNA, 15 bp, Homo sapiens
agcgagcccggcttc

SEQ ID NO: 1270634 - DNA, 15 bp, Homo sapiens
cagcgagcccggctt

SEQ ID NO: 1270635 - DNA, 15 bp, Homo sapiens
ccagcgagcccggct

SEQ ID NO: 1270636 - DNA, 15 bp, Homo sapiens
tccagcgagcccggc

SEQ ID NO: 1270637 - DNA, 15 bp, Homo sapiens
ctccagcgagcccgg

SEQ ID NO: 1270638 - DNA, 15 bp, Homo sapiens
cctccagcgagcccg

SEQ ID NO: 1270639 - DNA, 15 bp, Homo sapiens
gcctccagcgagccc

SEQ ID NO: 1270640 - DNA, 15 bp, Homo sapiens
cgcctccagcgagcc

SEQ ID NO: 1270641 - DNA, 15 bp, Homo sapiens
ccgcctccagcgagc

SEQ ID NO: 1270642 - DNA, 15 bp, Homo sapiens
tccgcctccagcgag

SEQ ID NO: 1270643 - DNA, 15 bp, Homo sapiens
ctccgcctccagcga

SEQ ID NO: 1270644 - DNA, 15 bp, Homo sapiens
gctccgcctccagcg

SEQ ID NO: 1270645 - DNA, 15 bp, Homo sapiens
agctccgcctccagc

SEQ ID NO: 1270646 - DNA, 15 bp, Homo sapiens
aaagctccgcctcca

SEQ ID NO: 1270647 - DNA, 15 bp, Homo sapiens
caaagctccgcctcc

SEQ ID NO: 1270648 - DNA, 15 bp, Homo sapiens
ccaaagctccgcctc

SEQ ID NO: 1270649 - DNA, 15 bp, Homo sapiens
accaaagctccgcct

SEQ ID NO: 1270650 - DNA, 15 bp, Homo sapiens
aaccaaagctccgcc

SEQ ID NO: 1270651 - DNA, 15 bp, Homo sapiens
aaaccaaagctccgc

SEQ ID NO: 1270652 - DNA, 15 bp, Homo sapiens
gaaaccaaagctccg

SEQ ID NO: 1270653 - DNA, 15 bp, Homo sapiens
ggaaaccaaagctcc

SEQ ID NO: 1270654 - DNA, 15 bp, Homo sapiens
aggaaaccaaagctc

SEQ ID NO: 1270655 - DNA, 15 bp, Homo sapiens
aaggaaaccaaagct

SEQ ID NO: 1270656 - DNA, 15 bp, Homo sapiens
gaaggaaaccaaagc

SEQ ID NO: 1270657 - DNA, 15 bp, Homo sapiens
cgaaggaaaccaaag

SEQ ID NO: 1270658 - DNA, 15 bp, Homo sapiens
ccgaaggaaaccaaa

SEQ ID NO: 1270659 - DNA, 15 bp, Homo sapiens
cccgaaggaaaccaa

SEQ ID NO: 1270660 - DNA, 15 bp, Homo sapiens
tcccgaaggaaacca

SEQ ID NO: 1270661 - DNA, 15 bp, Homo sapiens
ctcccgaaggaaacc

SEQ ID NO: 1270662 - DNA, 15 bp, Homo sapiens
gctcccgaaggaaac

SEQ ID NO: 1270663 - DNA, 15 bp, Homo sapiens
agctcccgaaggaaa

SEQ ID NO: 1270664 - DNA, 15 bp, Homo sapiens
aagctcccgaaggaa

SEQ ID NO: 1270665 - DNA, 15 bp, Homo sapiens
caagctcccgaagga

SEQ ID NO: 1270666 - DNA, 15 bp, Homo sapiens
acaagctcccgaagg

SEQ ID NO: 1270667 - DNA, 15 bp, Homo sapiens
cacaagctcccgaag

SEQ ID NO: 1270668 - DNA, 15 bp, Homo sapiens
ccacaagctcccgaa

SEQ ID NO: 1270669 - DNA, 15 bp, Homo sapiens
cccacaagctcccga

SEQ ID NO: 1270670 - DNA, 15 bp, Homo sapiens
ccccacaagctcccg

SEQ ID NO: 1270671 - DNA, 15 bp, Homo sapiens
tccccacaagctccc

SEQ ID NO: 1270672 - DNA, 15 bp, Homo sapiens
ttccccacaagctcc

SEQ ID NO: 1270673 - DNA, 15 bp, Homo sapiens
attccccacaagctc

SEQ ID NO: 1270674 - DNA, 15 bp, Homo sapiens
cattccccacaagct

SEQ ID NO: 1270675 - DNA, 15 bp, Homo sapiens
ccattccccacaagc

SEQ ID NO: 1270676 - DNA, 15 bp, Homo sapiens
accattccccacaag

SEQ ID NO: 1270677 - DNA, 15 bp, Homo sapiens
gaccattccccacaa

SEQ ID NO: 1270678 - DNA, 15 bp, Homo sapiens
tgaccattccccaca

SEQ ID NO: 1270679 - DNA, 15 bp, Homo sapiens
ctgaccattccccac

SEQ ID NO: 1270680 - DNA, 15 bp, Homo sapiens
gctgaccattcccca

SEQ ID NO: 1270681 - DNA, 15 bp, Homo sapiens
cgctgaccattcccc

SEQ ID NO: 1270682 - DNA, 15 bp, Homo sapiens
acgctgaccattccc

SEQ ID NO: 1270683 - DNA, 15 bp, Homo sapiens
gacgctgaccattcc

SEQ ID NO: 1270684 - DNA, 15 bp, Homo sapiens
agacgctgaccattc

SEQ ID NO: 1270685 - DNA, 15 bp, Homo sapiens
tagacgctgaccatt

SEQ ID NO: 1270686 - DNA, 15 bp, Homo sapiens
ctagacgctgaccat

SEQ ID NO: 1270687 - DNA, 15 bp, Homo sapiens
cctagacgctgacca

SEQ ID NO: 1270688 - DNA, 15 bp, Homo sapiens
gcctagacgctgacc

SEQ ID NO: 1270689 - DNA, 15 bp, Homo sapiens
tgcctagacgctgac

SEQ ID NO: 1270690 - DNA, 15 bp, Homo sapiens
gtgcctagacgctga

SEQ ID NO: 1270691 - DNA, 15 bp, Homo sapiens
ggtgcctagacgctg

SEQ ID NO: 1270692 - DNA, 15 bp, Homo sapiens
gggtgcctagacgct

SEQ ID NO: 1270693 - DNA, 15 bp, Homo sapiens
ggggtgcctagacgc

SEQ ID NO: 1270694 - DNA, 15 bp, Homo sapiens
cggggtgcctagacg

SEQ ID NO: 1270695 - DNA, 15 bp, Homo sapiens
ccggggtgcctagac

SEQ ID NO: 1270696 - DNA, 15 bp, Homo sapiens
cccggggtgcctaga

SEQ ID NO: 1270697 - DNA, 15 bp, Homo sapiens
gcccggggtgcctag

SEQ ID NO: 1270698 - DNA, 15 bp, Homo sapiens
tgcccggggtgccta

SEQ ID NO: 1270699 - DNA, 15 bp, Homo sapiens
ttgcccggggtgcct

SEQ ID NO: 1270700 - DNA, 15 bp, Homo sapiens
cttgcccggggtgcc

SEQ ID NO: 1270701 - DNA, 15 bp, Homo sapiens
ccttgcccggggtgc

SEQ ID NO: 1270702 - DNA, 15 bp, Homo sapiens
cccttgcccggggtg

SEQ ID NO: 1270703 - DNA, 15 bp, Homo sapiens
acccttgcccggggt

SEQ ID NO: 1270704 - DNA, 15 bp, Homo sapiens
gacccttgcccgggg

SEQ ID NO: 1270705 - DNA, 15 bp, Homo sapiens
agacccttgcccggg

SEQ ID NO: 1270706 - DNA, 15 bp, Homo sapiens
cagacccttgcccgg

SEQ ID NO: 1270707 - DNA, 15 bp, Homo sapiens
acagacccttgcccg

SEQ ID NO: 1270708 - DNA, 15 bp, Homo sapiens
cacagacccttgccc

SEQ ID NO: 1270709 - DNA, 15 bp, Homo sapiens
ccacagacccttgcc

SEQ ID NO: 1270710 - DNA, 15 bp, Homo sapiens
gccacagacccttgc

SEQ ID NO: 1270711 - DNA, 15 bp, Homo sapiens
ggccacagacccttg

SEQ ID NO: 1270712 - DNA, 15 bp, Homo sapiens
aggccacagaccctt

SEQ ID NO: 1270713 - DNA, 15 bp, Homo sapiens
aaggccacagaccct

SEQ ID NO: 1270714 - DNA, 15 bp, Homo sapiens
caaggccacagaccc

SEQ ID NO: 1270715 - DNA, 15 bp, Homo sapiens
ccaaggccacagacc

SEQ ID NO: 1270716 - DNA, 15 bp, Homo sapiens
accaaggccacagac

SEQ ID NO: 1270717 - DNA, 15 bp, Homo sapiens
caccaaggccacaga

SEQ ID NO: 1270718 - DNA, 15 bp, Homo sapiens
ccaccaaggccacag

SEQ ID NO: 1270719 - DNA, 15 bp, Homo sapiens
gccaccaaggccaca

SEQ ID NO: 1270720 - DNA, 15 bp, Homo sapiens
ggccaccaaggccac

SEQ ID NO: 1270721 - DNA, 15 bp, Homo sapiens
tggccaccaaggcca

SEQ ID NO: 1270722 - DNA, 15 bp, Homo sapiens
gtggccaccaaggcc

SEQ ID NO: 1270723 - DNA, 15 bp, Homo sapiens
agtggccaccaaggc

SEQ ID NO: 1270724 - DNA, 15 bp, Homo sapiens
cagtggccaccaagg

SEQ ID NO: 1270725 - DNA, 15 bp, Homo sapiens
ccagtggccaccaag

SEQ ID NO: 1270726 - DNA, 15 bp, Homo sapiens
gccagtggccaccaa

SEQ ID NO: 1270727 - DNA, 15 bp, Homo sapiens
agccagtggccacca

SEQ ID NO: 1270728 - DNA, 15 bp, Homo sapiens
aagccagtggccacc

SEQ ID NO: 1270729 - DNA, 15 bp, Homo sapiens
gaagccagtggccac

SEQ ID NO: 1270730 - DNA, 15 bp, Homo sapiens
ggaagccagtggcca

SEQ ID NO: 1270731 - DNA, 15 bp, Homo sapiens
aggaagccagtggcc

SEQ ID NO: 1270732 - DNA, 15 bp, Homo sapiens
gaggaagccagtggc

SEQ ID NO: 1270733 - DNA, 15 bp, Homo sapiens
agaggaagccagtgg

SEQ ID NO: 1270734 - DNA, 15 bp, Homo sapiens
tagaggaagccagtg

SEQ ID NO: 1270735 - DNA, 15 bp, Homo sapiens
ctagaggaagccagt

SEQ ID NO: 1270736 - DNA, 15 bp, Homo sapiens
gctagaggaagccag

SEQ ID NO: 1270737 - DNA, 15 bp, Homo sapiens
agctagaggaagcca

SEQ ID NO: 1270738 - DNA, 15 bp, Homo sapiens
cagctagaggaagcc

SEQ ID NO: 1270739 - DNA, 15 bp, Homo sapiens
ccagctagaggaagc

SEQ ID NO: 1270740 - DNA, 15 bp, Homo sapiens
cccagctagaggaag

SEQ ID NO: 1270741 - DNA, 15 bp, Homo sapiens
acccagctagaggaa

SEQ ID NO: 1270742 - DNA, 15 bp, Homo sapiens
cacccagctagagga

SEQ ID NO: 1270743 - DNA, 15 bp, Homo sapiens
acacccagctagagg

SEQ ID NO: 1270744 - DNA, 15 bp, Homo sapiens
aacacccagctagag

SEQ ID NO: 1270745 - DNA, 15 bp, Homo sapiens
aaacacccagctaga

SEQ ID NO: 1270746 - DNA, 15 bp, Homo sapiens
aaaacacccagctag

SEQ ID NO: 1270747 - DNA, 15 bp, Homo sapiens
gaaaacacccagcta

SEQ ID NO: 1270748 - DNA, 15 bp, Homo sapiens
ggaaaacacccagct

SEQ ID NO: 1270749 - DNA, 15 bp, Homo sapiens
aggaaaacacccagc

SEQ ID NO: 1270750 - DNA, 15 bp, Homo sapiens
caggaaaacacccag

SEQ ID NO: 1270751 - DNA, 15 bp, Homo sapiens
acaggaaaacaccca

SEQ ID NO: 1270752 - DNA, 15 bp, Homo sapiens
cacaggaaaacaccc

SEQ ID NO: 1270753 - DNA, 15 bp, Homo sapiens
ccacaggaaaacacc

SEQ ID NO: 1270754 - DNA, 15 bp, Homo sapiens
cccacaggaaaacac

SEQ ID NO: 1270755 - DNA, 15 bp, Homo sapiens
acccacaggaaaaca

SEQ ID NO: 1270756 - DNA, 15 bp, Homo sapiens
gacccacaggaaaac

SEQ ID NO: 1270757 - DNA, 15 bp, Homo sapiens
agacccacaggaaaa

SEQ ID NO: 1270758 - DNA, 15 bp, Homo sapiens
gagacccacaggaaa

SEQ ID NO: 1270759 - DNA, 15 bp, Homo sapiens
cgagacccacaggaa

SEQ ID NO: 1270760 - DNA, 15 bp, Homo sapiens
gcgagacccacagga

SEQ ID NO: 1270761 - DNA, 15 bp, Homo sapiens
cgcgagacccacagg

SEQ ID NO: 1270762 - DNA, 15 bp, Homo sapiens
gcgcgagacccacag

SEQ ID NO: 1270763 - DNA, 15 bp, Homo sapiens
tgcgcgagacccaca

SEQ ID NO: 1270764 - DNA, 15 bp, Homo sapiens
ttgcgcgagacccac

SEQ ID NO: 1270765 - DNA, 15 bp, Homo sapiens
cttgcgcgagaccca

SEQ ID NO: 1270766 - DNA, 15 bp, Homo sapiens
ccttgcgcgagaccc

SEQ ID NO: 1270767 - DNA, 15 bp, Homo sapiens
gccttgcgcgagacc

SEQ ID NO: 1270768 - DNA, 15 bp, Homo sapiens
tgccttgcgcgagac

SEQ ID NO: 1270769 - DNA, 15 bp, Homo sapiens
gtgccttgcgcgaga

SEQ ID NO: 1270770 - DNA, 15 bp, Homo sapiens
agtgccttgcgcgag

SEQ ID NO: 1270771 - DNA, 15 bp, Homo sapiens
aagtgccttgcgcga

SEQ ID NO: 1270772 - DNA, 15 bp, Homo sapiens
aaagtgccttgcgcg

SEQ ID NO: 1270773 - DNA, 15 bp, Homo sapiens
aaaagtgccttgcgc

SEQ ID NO: 1270774 - DNA, 15 bp, Homo sapiens
aaaaagtgccttgcg

SEQ ID NO: 1270775 - DNA, 15 bp, Homo sapiens
aaaaaagtgccttgc

SEQ ID NO: 1270776 - DNA, 15 bp, Homo sapiens
caaaaaagtgccttg

SEQ ID NO: 1270777 - DNA, 15 bp, Homo sapiens
acaaaaaagtgcctt

SEQ ID NO: 1270778 - DNA, 15 bp, Homo sapiens
cacaaaaaagtgcct

SEQ ID NO: 1270779 - DNA, 15 bp, Homo sapiens
ccacaaaaaagtgcc

SEQ ID NO: 1270780 - DNA, 15 bp, Homo sapiens
gccacaaaaaagtgc

SEQ ID NO: 1270781 - DNA, 15 bp, Homo sapiens
cgccacaaaaaagtg

SEQ ID NO: 1270782 - DNA, 15 bp, Homo sapiens
gcgccacaaaaaagt

SEQ ID NO: 1270783 - DNA, 15 bp, Homo sapiens
agcgccacaaaaaag

SEQ ID NO: 1270784 - DNA, 15 bp, Homo sapiens
cagcgccacaaaaaa

SEQ ID NO: 1270785 - DNA, 15 bp, Homo sapiens
gcagcgccacaaaaa

SEQ ID NO: 1270786 - DNA, 15 bp, Homo sapiens
agcagcgccacaaaa

SEQ ID NO: 1270787 - DNA, 15 bp, Homo sapiens
aagcagcgccacaaa

SEQ ID NO: 1270788 - DNA, 15 bp, Homo sapiens
caagcagcgccacaa

SEQ ID NO: 1270789 - DNA, 15 bp, Homo sapiens
acaagcagcgccaca

SEQ ID NO: 1270790 - DNA, 15 bp, Homo sapiens
cacaagcagcgccac

SEQ ID NO: 1270791 - DNA, 15 bp, Homo sapiens
gcacaagcagcgcca

SEQ ID NO: 1270792 - DNA, 15 bp, Homo sapiens
agcacaagcagcgcc

SEQ ID NO: 1270793 - DNA, 15 bp, Homo sapiens
cagcacaagcagcgc

SEQ ID NO: 1270794 - DNA, 15 bp, Homo sapiens
acagcacaagcagcg

SEQ ID NO: 1270795 - DNA, 15 bp, Homo sapiens
cacagcacaagcagc

SEQ ID NO: 1270796 - DNA, 15 bp, Homo sapiens
acacagcacaagcag

SEQ ID NO: 1270797 - DNA, 15 bp, Homo sapiens
cacacagcacaagca

SEQ ID NO: 1270798 - DNA, 15 bp, Homo sapiens
gcacacagcacaagc

SEQ ID NO: 1270799 - DNA, 15 bp, Homo sapiens
cgcacacagcacaag

SEQ ID NO: 1270800 - DNA, 15 bp, Homo sapiens
ccgcacacagcacaa

SEQ ID NO: 1270801 - DNA, 15 bp, Homo sapiens
cccgcacacagcaca

SEQ ID NO: 1270802 - DNA, 15 bp, Homo sapiens
ccccgcacacagcac

SEQ ID NO: 1270803 - DNA, 15 bp, Homo sapiens
accccgcacacagca

SEQ ID NO: 1270804 - DNA, 15 bp, Homo sapiens
gaccccgcacacagc

SEQ ID NO: 1270805 - DNA, 15 bp, Homo sapiens
tgaccccgcacacag

SEQ ID NO: 1270806 - DNA, 15 bp, Homo sapiens
ctgaccccgcacaca

SEQ ID NO: 1270807 - DNA, 15 bp, Homo sapiens
cctgaccccgcacac

SEQ ID NO: 1270808 - DNA, 15 bp, Homo sapiens
gcctgaccccgcaca

SEQ ID NO: 1270809 - DNA, 15 bp, Homo sapiens
cgcctgaccccgcac

SEQ ID NO: 1270810 - DNA, 15 bp, Homo sapiens
acgcctgaccccgca

SEQ ID NO: 1270811 - DNA, 15 bp, Homo sapiens
gacgcctgaccccgc

SEQ ID NO: 1270812 - DNA, 15 bp, Homo sapiens
ggacgcctgaccccg

SEQ ID NO: 1270813 - DNA, 15 bp, Homo sapiens
aggacgcctgacccc

SEQ ID NO: 1270814 - DNA, 15 bp, Homo sapiens
gaggacgcctgaccc

SEQ ID NO: 1270815 - DNA, 15 bp, Homo sapiens
agaggacgcctgacc

SEQ ID NO: 1270816 - DNA, 15 bp, Homo sapiens
gagaggacgcctgac

SEQ ID NO: 1270817 - DNA, 15 bp, Homo sapiens
agagaggacgcctga

SEQ ID NO: 1270818 - DNA, 15 bp, Homo sapiens
gagagaggacgcctg

SEQ ID NO: 1270819 - DNA, 15 bp, Homo sapiens
ggagagaggacgcct

SEQ ID NO: 1270820 - DNA, 15 bp, Homo sapiens
aggagagaggacgcc

SEQ ID NO: 1270821 - DNA, 15 bp, Homo sapiens
gaggagagaggacgc

SEQ ID NO: 1270822 - DNA, 15 bp, Homo sapiens
ggaggagagaggacg

SEQ ID NO: 1270823 - DNA, 15 bp, Homo sapiens
gggaggagagaggac

SEQ ID NO: 1270824 - DNA, 15 bp, Homo sapiens
cgggaggagagagga

SEQ ID NO: 1270825 - DNA, 15 bp, Homo sapiens
ccgggaggagagagg

SEQ ID NO: 1270826 - DNA, 15 bp, Homo sapiens
gccgggaggagagag

SEQ ID NO: 1270827 - DNA, 15 bp, Homo sapiens
cgccgggaggagaga

SEQ ID NO: 1270828 - DNA, 15 bp, Homo sapiens
gcgccgggaggagag

SEQ ID NO: 1270829 - DNA, 15 bp, Homo sapiens
agcgccgggaggaga

SEQ ID NO: 1270830 - DNA, 15 bp, Homo sapiens
cagcgccgggaggag

SEQ ID NO: 1270831 - DNA, 15 bp, Homo sapiens
ccagcgccgggagga

SEQ ID NO: 1270832 - DNA, 15 bp, Homo sapiens
cccagcgccgggagg

SEQ ID NO: 1270833 - DNA, 15 bp, Homo sapiens
gcccagcgccgggag

SEQ ID NO: 1270834 - DNA, 15 bp, Homo sapiens
ggcccagcgccggga

SEQ ID NO: 1270835 - DNA, 15 bp, Homo sapiens
gggcccagcgccggg

SEQ ID NO: 1270836 - DNA, 15 bp, Homo sapiens
agggcccagcgccgg

SEQ ID NO: 1270837 - DNA, 15 bp, Homo sapiens
gagggcccagcgccg

SEQ ID NO: 1270838 - DNA, 15 bp, Homo sapiens
agagggcccagcgcc

SEQ ID NO: 1270839 - DNA, 15 bp, Homo sapiens
cagagggcccagcgc

SEQ ID NO: 1270840 - DNA, 15 bp, Homo sapiens
ccagagggcccagcg

SEQ ID NO: 1270841 - DNA, 15 bp, Homo sapiens
cccagagggcccagc

SEQ ID NO: 1270842 - DNA, 15 bp, Homo sapiens
ccccagagggcccag

SEQ ID NO: 1270843 - DNA, 15 bp, Homo sapiens
gccccagagggccca

SEQ ID NO: 1270844 - DNA, 15 bp, Homo sapiens
tgccccagagggccc

SEQ ID NO: 1270845 - DNA, 15 bp, Homo sapiens
ctgccccagagggcc

SEQ ID NO: 1270846 - DNA, 15 bp, Homo sapiens
cctgccccagagggc

SEQ ID NO: 1270847 - DNA, 15 bp, Homo sapiens
acctgccccagaggg

SEQ ID NO: 1270848 - DNA, 15 bp, Homo sapiens
gacctgccccagagg

SEQ ID NO: 1270849 - DNA, 15 bp, Homo sapiens
ggacctgccccagag

SEQ ID NO: 1270850 - DNA, 15 bp, Homo sapiens
gggacctgccccaga

SEQ ID NO: 1270851 - DNA, 15 bp, Homo sapiens
ggggacctgccccag

SEQ ID NO: 1270852 - DNA, 15 bp, Homo sapiens
cggggacctgcccca

SEQ ID NO: 1270853 - DNA, 15 bp, Homo sapiens
acggggacctgcccc

SEQ ID NO: 1270854 - DNA, 15 bp, Homo sapiens
aacggggacctgccc

SEQ ID NO: 1270855 - DNA, 15 bp, Homo sapiens
caacggggacctgcc

SEQ ID NO: 1270856 - DNA, 15 bp, Homo sapiens
ccaacggggacctgc

SEQ ID NO: 1270857 - DNA, 15 bp, Homo sapiens
gccaacggggacctg

SEQ ID NO: 1270858 - DNA, 15 bp, Homo sapiens
ggccaacggggacct

SEQ ID NO: 1270859 - DNA, 15 bp, Homo sapiens
aggccaacggggacc

SEQ ID NO: 1270860 - DNA, 15 bp, Homo sapiens
gaggccaacggggac

SEQ ID NO: 1270861 - DNA, 15 bp, Homo sapiens
ggaggccaacgggga

SEQ ID NO: 1270862 - DNA, 15 bp, Homo sapiens
aggaggccaacgggg

SEQ ID NO: 1270863 - DNA, 15 bp, Homo sapiens
aaggaggccaacggg

SEQ ID NO: 1270864 - DNA, 15 bp, Homo sapiens
caaggaggccaacgg

SEQ ID NO: 1270865 - DNA, 15 bp, Homo sapiens
gcaaggaggccaacg

SEQ ID NO: 1270866 - DNA, 15 bp, Homo sapiens
cgcaaggaggccaac

SEQ ID NO: 1270867 - DNA, 15 bp, Homo sapiens
acgcaaggaggccaa

SEQ ID NO: 1270868 - DNA, 15 bp, Homo sapiens
cacgcaaggaggcca

SEQ ID NO: 1270869 - DNA, 15 bp, Homo sapiens
acacgcaaggaggcc

SEQ ID NO: 1270870 - DNA, 15 bp, Homo sapiens
aacacgcaaggaggc

SEQ ID NO: 1270871 - DNA, 15 bp, Homo sapiens
aaacacgcaaggagg

SEQ ID NO: 1270872 - DNA, 15 bp, Homo sapiens
caaacacgcaaggag

SEQ ID NO: 1270873 - DNA, 15 bp, Homo sapiens
gcaaacacgcaagga

SEQ ID NO: 1270874 - DNA, 15 bp, Homo sapiens
ggcaaacacgcaagg

SEQ ID NO: 1270875 - DNA, 15 bp, Homo sapiens
cggcaaacacgcaag

SEQ ID NO: 1270876 - DNA, 15 bp, Homo sapiens
gcggcaaacacgcaa

SEQ ID NO: 1270877 - DNA, 15 bp, Homo sapiens
tgcggcaaacacgca

SEQ ID NO: 1270878 - DNA, 15 bp, Homo sapiens
ctgcggcaaacacgc

SEQ ID NO: 1270879 - DNA, 15 bp, Homo sapiens
gctgcggcaaacacg

SEQ ID NO: 1270880 - DNA, 15 bp, Homo sapiens
agctgcggcaaacac

SEQ ID NO: 1270881 - DNA, 15 bp, Homo sapiens
tagctgcggcaaaca

SEQ ID NO: 1270882 - DNA, 15 bp, Homo sapiens
ctagctgcggcaaac

SEQ ID NO: 1270883 - DNA, 15 bp, Homo sapiens
actagctgcggcaaa

SEQ ID NO: 1270884 - DNA, 15 bp, Homo sapiens
tactagctgcggcaa

SEQ ID NO: 1270885 - DNA, 15 bp, Homo sapiens
gtactagctgcggca

SEQ ID NO: 1270886 - DNA, 15 bp, Homo sapiens
tgtactagctgcggc

SEQ ID NO: 1270887 - DNA, 15 bp, Homo sapiens
gtgtactagctgcgg

SEQ ID NO: 1270888 - DNA, 15 bp, Homo sapiens
ggtgtactagctgcg

SEQ ID NO: 1270889 - DNA, 15 bp, Homo sapiens
aggtgtactagctgc

SEQ ID NO: 1270890 - DNA, 15 bp, Homo sapiens
caggtgtactagctg

SEQ ID NO: 1270891 - DNA, 15 bp, Homo sapiens
ccaggtgtactagct

SEQ ID NO: 1270892 - DNA, 15 bp, Homo sapiens
tccaggtgtactagc

SEQ ID NO: 1270893 - DNA, 15 bp, Homo sapiens
atccaggtgtactag

SEQ ID NO: 1270894 - DNA, 15 bp, Homo sapiens
catccaggtgtacta

SEQ ID NO: 1270895 - DNA, 15 bp, Homo sapiens
ccatccaggtgtact

SEQ ID NO: 1270896 - DNA, 15 bp, Homo sapiens
gccatccaggtgtac

SEQ ID NO: 1270897 - DNA, 15 bp, Homo sapiens
ggccatccaggtgta

SEQ ID NO: 1270898 - DNA, 15 bp, Homo sapiens
aggccatccaggtgt

SEQ ID NO: 1270899 - DNA, 15 bp, Homo sapiens
gaggccatccaggtg

SEQ ID NO: 1270900 - DNA, 15 bp, Homo sapiens
ggaggccatccaggt

SEQ ID NO: 1270901 - DNA, 15 bp, Homo sapiens
aggaggccatccagg

SEQ ID NO: 1270902 - DNA, 15 bp, Homo sapiens
gaggaggccatccag

SEQ ID NO: 1270903 - DNA, 15 bp, Homo sapiens
tgaggaggccatcca

SEQ ID NO: 1270904 - DNA, 15 bp, Homo sapiens
ctgaggaggccatcc

SEQ ID NO: 1270905 - DNA, 15 bp, Homo sapiens
actgaggaggccatc

SEQ ID NO: 1270906 - DNA, 15 bp, Homo sapiens
cactgaggaggccat

SEQ ID NO: 1270907 - DNA, 15 bp, Homo sapiens
gcactgaggaggcca

SEQ ID NO: 1270908 - DNA, 15 bp, Homo sapiens
ggcactgaggaggcc

SEQ ID NO: 1270909 - DNA, 15 bp, Homo sapiens
cggcactgaggaggc

SEQ ID NO: 1270910 - DNA, 15 bp, Homo sapiens
acggcactgaggagg

SEQ ID NO: 1270911 - DNA, 15 bp, Homo sapiens
gacggcactgaggag

SEQ ID NO: 1270912 - DNA, 15 bp, Homo sapiens
cgacggcactgagga

SEQ ID NO: 1270913 - DNA, 15 bp, Homo sapiens
acgacggcactgagg

SEQ ID NO: 1270914 - DNA, 15 bp, Homo sapiens
aacgacggcactgag

SEQ ID NO: 1270915 - DNA, 15 bp, Homo sapiens
caacgacggcactga

SEQ ID NO: 1270916 - DNA, 15 bp, Homo sapiens
gcaacgacggcactg

SEQ ID NO: 1270917 - DNA, 15 bp, Homo sapiens
agcaacgacggcact

SEQ ID NO: 1270918 - DNA, 15 bp, Homo sapiens
cagcaacgacggcac

SEQ ID NO: 1270919 - DNA, 15 bp, Homo sapiens
gcagcaacgacggca

SEQ ID NO: 1270920 - DNA, 15 bp, Homo sapiens
agcagcaacgacggc

SEQ ID NO: 1270921 - DNA, 15 bp, Homo sapiens
cagcagcaacgacgg

SEQ ID NO: 1270922 - DNA, 15 bp, Homo sapiens
ccagcagcaacgacg

SEQ ID NO: 1270923 - DNA, 15 bp, Homo sapiens
tccagcagcaacgac

SEQ ID NO: 1270924 - DNA, 15 bp, Homo sapiens
ctccagcagcaacga

SEQ ID NO: 1270925 - DNA, 15 bp, Homo sapiens
actccagcagcaacg

SEQ ID NO: 1270926 - DNA, 15 bp, Homo sapiens
gactccagcagcaac

SEQ ID NO: 1270927 - DNA, 15 bp, Homo sapiens
agactccagcagcaa

SEQ ID NO: 1270928 - DNA, 15 bp, Homo sapiens
cagactccagcagca

SEQ ID NO: 1270929 - DNA, 15 bp, Homo sapiens
tcagactccagcagc

SEQ ID NO: 1270930 - DNA, 15 bp, Homo sapiens
gtcagactccagcag

SEQ ID NO: 1270931 - DNA, 15 bp, Homo sapiens
cgtcagactccagca

SEQ ID NO: 1270932 - DNA, 15 bp, Homo sapiens
gcgtcagactccagc

SEQ ID NO: 1270933 - DNA, 15 bp, Homo sapiens
ggcgtcagactccag

SEQ ID NO: 1270934 - DNA, 15 bp, Homo sapiens
aggcgtcagactcca

SEQ ID NO: 1270935 - DNA, 15 bp, Homo sapiens
gaggcgtcagactcc

SEQ ID NO: 1270936 - DNA, 15 bp, Homo sapiens
cgaggcgtcagactc

SEQ ID NO: 1270937 - DNA, 15 bp, Homo sapiens
ccgaggcgtcagact

SEQ ID NO: 1270938 - DNA, 15 bp, Homo sapiens
cccgaggcgtcagac

SEQ ID NO: 1270939 - DNA, 15 bp, Homo sapiens
gcccgaggcgtcaga

SEQ ID NO: 1270940 - DNA, 15 bp, Homo sapiens
cgcccgaggcgtcag

SEQ ID NO: 1270941 - DNA, 15 bp, Homo sapiens
gcgcccgaggcgtca

SEQ ID NO: 1270942 - DNA, 15 bp, Homo sapiens
ggcgcccgaggcgtc

SEQ ID NO: 1270943 - DNA, 15 bp, Homo sapiens
aggcgcccgaggcgt

SEQ ID NO: 1270944 - DNA, 15 bp, Homo sapiens
caggcgcccgaggcg

SEQ ID NO: 1270945 - DNA, 15 bp, Homo sapiens
gcaggcgcccgaggc

SEQ ID NO: 1270946 - DNA, 15 bp, Homo sapiens
cgcaggcgcccgagg

SEQ ID NO: 1270947 - DNA, 15 bp, Homo sapiens
gcgcaggcgcccgag

SEQ ID NO: 1270948 - DNA, 15 bp, Homo sapiens
ggcgcaggcgcccga

SEQ ID NO: 1270949 - DNA, 15 bp, Homo sapiens
cggcgcaggcgcccg

SEQ ID NO: 1270950 - DNA, 15 bp, Homo sapiens
gcggcgcaggcgccc

SEQ ID NO: 1270951 - DNA, 15 bp, Homo sapiens
tgcggcgcaggcgcc

SEQ ID NO: 1270952 - DNA, 15 bp, Homo sapiens
gtgcggcgcaggcgc

SEQ ID NO: 1270953 - DNA, 15 bp, Homo sapiens
agtgcggcgcaggcg

SEQ ID NO: 1270954 - DNA, 15 bp, Homo sapiens
aagtgcggcgcaggc

SEQ ID NO: 1270955 - DNA, 15 bp, Homo sapiens
caagtgcggcgcagg

SEQ ID NO: 1270956 - DNA, 15 bp, Homo sapiens
acaagtgcggcgcag

SEQ ID NO: 1270957 - DNA, 15 bp, Homo sapiens
cacaagtgcggcgca

SEQ ID NO: 1270958 - DNA, 15 bp, Homo sapiens
tcacaagtgcggcgc

SEQ ID NO: 1270959 - DNA, 15 bp, Homo sapiens
gtcacaagtgcggcg

SEQ ID NO: 1270960 - DNA, 15 bp, Homo sapiens
agtcacaagtgcggc

SEQ ID NO: 1270961 - DNA, 15 bp, Homo sapiens
aagtcacaagtgcgg

SEQ ID NO: 1270962 - DNA, 15 bp, Homo sapiens
caagtcacaagtgcg

SEQ ID NO: 1270963 - DNA, 15 bp, Homo sapiens
gcaagtcacaagtgc

SEQ ID NO: 1270964 - DNA, 15 bp, Homo sapiens
agcaagtcacaagtg

SEQ ID NO: 1270965 - DNA, 15 bp, Homo sapiens
aagcaagtcacaagt

SEQ ID NO: 1270966 - DNA, 15 bp, Homo sapiens
aaagcaagtcacaag

SEQ ID NO: 1270967 - DNA, 15 bp, Homo sapiens
gaaagcaagtcacaa

SEQ ID NO: 1270968 - DNA, 15 bp, Homo sapiens
ggaaagcaagtcaca

SEQ ID NO: 1270969 - DNA, 15 bp, Homo sapiens
gggaaagcaagtcac

SEQ ID NO: 1270970 - DNA, 15 bp, Homo sapiens
ggggaaagcaagtca

SEQ ID NO: 1270971 - DNA, 15 bp, Homo sapiens
aggggaaagcaagtc

SEQ ID NO: 1270972 - DNA, 15 bp, Homo sapiens
aaggggaaagcaagt

SEQ ID NO: 1270973 - DNA, 15 bp, Homo sapiens
gaaggggaaagcaag

SEQ ID NO: 1270974 - DNA, 15 bp, Homo sapiens
agaaggggaaagcaa

SEQ ID NO: 1270975 - DNA, 15 bp, Homo sapiens
gagaaggggaaagca

SEQ ID NO: 1270976 - DNA, 15 bp, Homo sapiens
tgagaaggggaaagc

SEQ ID NO: 1270977 - DNA, 15 bp, Homo sapiens
ctgagaaggggaaag

SEQ ID NO: 1270978 - DNA, 15 bp, Homo sapiens
cctgagaaggggaaa

SEQ ID NO: 1270979 - DNA, 15 bp, Homo sapiens
ccctgagaaggggaa

SEQ ID NO: 1270980 - DNA, 15 bp, Homo sapiens
gccctgagaagggga

SEQ ID NO: 1270981 - DNA, 15 bp, Homo sapiens
cgccctgagaagggg

SEQ ID NO: 1270982 - DNA, 15 bp, Homo sapiens
gcgccctgagaaggg

SEQ ID NO: 1270983 - DNA, 15 bp, Homo sapiens
ggcgccctgagaagg

SEQ ID NO: 1270984 - DNA, 15 bp, Homo sapiens
tggcgccctgagaag

SEQ ID NO: 1270985 - DNA, 15 bp, Homo sapiens
ctggcgccctgagaa

SEQ ID NO: 1270986 - DNA, 15 bp, Homo sapiens
gctggcgccctgaga

SEQ ID NO: 1270987 - DNA, 15 bp, Homo sapiens
cgctggcgccctgag

SEQ ID NO: 1270988 - DNA, 15 bp, Homo sapiens
gcgctggcgccctga

SEQ ID NO: 1270989 - DNA, 15 bp, Homo sapiens
agcgctggcgccctg

SEQ ID NO: 1270990 - DNA, 15 bp, Homo sapiens
gagcgctggcgccct

SEQ ID NO: 1270991 - DNA, 15 bp, Homo sapiens
ggagcgctggcgccc

SEQ ID NO: 1270992 - DNA, 15 bp, Homo sapiens
aggagcgctggcgcc

SEQ ID NO: 1270993 - DNA, 15 bp, Homo sapiens
gaggagcgctggcgc

SEQ ID NO: 1270994 - DNA, 15 bp, Homo sapiens
agaggagcgctggcg

SEQ ID NO: 1270995 - DNA, 15 bp, Homo sapiens
aagaggagcgctggc

SEQ ID NO: 1270996 - DNA, 15 bp, Homo sapiens
caagaggagcgctgg

SEQ ID NO: 1270997 - DNA, 15 bp, Homo sapiens
tcaagaggagcgctg

SEQ ID NO: 1270998 - DNA, 15 bp, Homo sapiens
gtcaagaggagcgct

SEQ ID NO: 1270999 - DNA, 15 bp, Homo sapiens
ggtcaagaggagcgc

SEQ ID NO: 1271000 - DNA, 15 bp, Homo sapiens
ggggtcaagaggagc

SEQ ID NO: 1271001 - DNA, 15 bp, Homo sapiens
cggggtcaagaggag

SEQ ID NO: 1271002 - DNA, 15 bp, Homo sapiens
gcggggtcaagagga

SEQ ID NO: 1271003 - DNA, 15 bp, Homo sapiens
agcggggtcaagagg

SEQ ID NO: 1271004 - DNA, 15 bp, Homo sapiens
aagcggggtcaagag

SEQ ID NO: 1271005 - DNA, 15 bp, Homo sapiens
aaagcggggtcaaga

SEQ ID NO: 1271006 - DNA, 15 bp, Homo sapiens
aaaagcggggtcaag

SEQ ID NO: 1271007 - DNA, 15 bp, Homo sapiens
taaaagcggggtcaa

SEQ ID NO: 1271008 - DNA, 15 bp, Homo sapiens
ataaaagcggggtca

SEQ ID NO: 1271009 - DNA, 15 bp, Homo sapiens
aataaaagcggggtc

SEQ ID NO: 1271010 - DNA, 15 bp, Homo sapiens
gaataaaagcggggt

SEQ ID NO: 1271011 - DNA, 15 bp, Homo sapiens
agaataaaagcgggg

SEQ ID NO: 1271012 - DNA, 15 bp, Homo sapiens
cagaataaaagcggg

SEQ ID NO: 1271013 - DNA, 15 bp, Homo sapiens
acagaataaaagcgg

SEQ ID NO: 1271014 - DNA, 15 bp, Homo sapiens
cacagaataaaagcg

SEQ ID NO: 1271015 - DNA, 15 bp, Homo sapiens
ccacagaataaaagc

SEQ ID NO: 1271016 - DNA, 15 bp, Homo sapiens
accacagaataaaag

SEQ ID NO: 1271017 - DNA, 15 bp, Homo sapiens
caccacagaataaaa

SEQ ID NO: 1271018 - DNA, 15 bp, Homo sapiens
gcaccacagaataaa

SEQ ID NO: 1271019 - DNA, 15 bp, Homo sapiens
agcaccacagaataa

SEQ ID NO: 1271020 - DNA, 15 bp, Homo sapiens
aagcaccacagaata

SEQ ID NO: 1271021 - DNA, 15 bp, Homo sapiens
gaagcaccacagaat

SEQ ID NO: 1271022 - DNA, 15 bp, Homo sapiens
agaagcaccacagaa

SEQ ID NO: 1271023 - DNA, 15 bp, Homo sapiens
cagaagcaccacaga

SEQ ID NO: 1271024 - DNA, 15 bp, Homo sapiens
tcagaagcaccacag

SEQ ID NO: 1271025 - DNA, 15 bp, Homo sapiens
ttcagaagcaccaca

SEQ ID NO: 1271026 - DNA, 15 bp, Homo sapiens
cttcagaagcaccac

SEQ ID NO: 1271027 - DNA, 15 bp, Homo sapiens
ccttcagaagcacca

SEQ ID NO: 1271028 - DNA, 15 bp, Homo sapiens
cccttcagaagcacc

SEQ ID NO: 1271029 - DNA, 15 bp, Homo sapiens
gcccttcagaagcac

SEQ ID NO: 1271030 - DNA, 15 bp, Homo sapiens
agcccttcagaagca

SEQ ID NO: 1271031 - DNA, 15 bp, Homo sapiens
cagcccttcagaagc

SEQ ID NO: 1271032 - DNA, 15 bp, Homo sapiens
gcagcccttcagaag

SEQ ID NO: 1271033 - DNA, 15 bp, Homo sapiens
tgcagcccttcagaa

SEQ ID NO: 1271034 - DNA, 15 bp, Homo sapiens
ctgcagcccttcaga

SEQ ID NO: 1271035 - DNA, 15 bp, Homo sapiens
cctgcagcccttcag

SEQ ID NO: 1271036 - DNA, 15 bp, Homo sapiens
ccctgcagcccttca

SEQ ID NO: 1271037 - DNA, 15 bp, Homo sapiens
cccctgcagcccttc

SEQ ID NO: 1271038 - DNA, 15 bp, Homo sapiens
ccccctgcagccctt

SEQ ID NO: 1271039 - DNA, 15 bp, Homo sapiens
gccccctgcagccct

SEQ ID NO: 1271040 - DNA, 15 bp, Homo sapiens
agccccctgcagccc

SEQ ID NO: 1271041 - DNA, 15 bp, Homo sapiens
cagccccctgcagcc

SEQ ID NO: 1271042 - DNA, 15 bp, Homo sapiens
gcagccccctgcagc

SEQ ID NO: 1271043 - DNA, 15 bp, Homo sapiens
agcagccccctgcag

SEQ ID NO: 1271044 - DNA, 15 bp, Homo sapiens
cagcagccccctgca

SEQ ID NO: 1271045 - DNA, 15 bp, Homo sapiens
ccagcagccccctgc

SEQ ID NO: 1271046 - DNA, 15 bp, Homo sapiens
gccagcagccccctg

SEQ ID NO: 1271047 - DNA, 15 bp, Homo sapiens
agccagcagccccct

SEQ ID NO: 1271048 - DNA, 15 bp, Homo sapiens
aagccagcagccccc

SEQ ID NO: 1271049 - DNA, 15 bp, Homo sapiens
gaagccagcagcccc

SEQ ID NO: 1271050 - DNA, 15 bp, Homo sapiens
cgaagccagcagccc

SEQ ID NO: 1271051 - DNA, 15 bp, Homo sapiens
ccgaagccagcagcc

SEQ ID NO: 1271052 - DNA, 15 bp, Homo sapiens
cccgaagccagcagc

SEQ ID NO: 1271053 - DNA, 15 bp, Homo sapiens
gcccgaagccagcag

SEQ ID NO: 1271054 - DNA, 15 bp, Homo sapiens
agcccgaagccagca

SEQ ID NO: 1271055 - DNA, 15 bp, Homo sapiens
cagcccgaagccagc

SEQ ID NO: 1271056 - DNA, 15 bp, Homo sapiens
gcagcccgaagccag

SEQ ID NO: 1271057 - DNA, 15 bp, Homo sapiens
ggcagcccgaagcca

SEQ ID NO: 1271058 - DNA, 15 bp, Homo sapiens
gggcagcccgaagcc

SEQ ID NO: 1271059 - DNA, 15 bp, Homo sapiens
agggcagcccgaagc

SEQ ID NO: 1271060 - DNA, 15 bp, Homo sapiens
aagggcagcccgaag

SEQ ID NO: 1271061 - DNA, 15 bp, Homo sapiens
caagggcagcccgaa

SEQ ID NO: 1271062 - DNA, 15 bp, Homo sapiens
acaagggcagcccga

SEQ ID NO: 1271063 - DNA, 15 bp, Homo sapiens
aacaagggcagcccg

SEQ ID NO: 1271064 - DNA, 15 bp, Homo sapiens
gaacaagggcagccc

SEQ ID NO: 1271065 - DNA, 15 bp, Homo sapiens
agaacaagggcagcc

SEQ ID NO: 1271066 - DNA, 15 bp, Homo sapiens
gagaacaagggcagc

SEQ ID NO: 1271067 - DNA, 15 bp, Homo sapiens
ggagaacaagggcag

SEQ ID NO: 1271068 - DNA, 15 bp, Homo sapiens
aggagaacaagggca

SEQ ID NO: 1271069 - DNA, 15 bp, Homo sapiens
caggagaacaagggc

SEQ ID NO: 1271070 - DNA, 15 bp, Homo sapiens
gcaggagaacaaggg

SEQ ID NO: 1271071 - DNA, 15 bp, Homo sapiens
agcaggagaacaagg

SEQ ID NO: 1271072 - DNA, 15 bp, Homo sapiens
aagcaggagaacaag

SEQ ID NO: 1271073 - DNA, 15 bp, Homo sapiens
caagcaggagaacaa

SEQ ID NO: 1271074 - DNA, 15 bp, Homo sapiens
ccaagcaggagaaca

SEQ ID NO: 1271075 - DNA, 15 bp, Homo sapiens
accaagcaggagaac

SEQ ID NO: 1271076 - DNA, 15 bp, Homo sapiens
gaccaagcaggagaa

SEQ ID NO: 1271077 - DNA, 15 bp, Homo sapiens
cgaccaagcaggaga

SEQ ID NO: 1271078 - DNA, 15 bp, Homo sapiens
acgaccaagcaggag

SEQ ID NO: 1271079 - DNA, 15 bp, Homo sapiens
cacgaccaagcagga

SEQ ID NO: 1271080 - DNA, 15 bp, Homo sapiens
tcacgaccaagcagg

SEQ ID NO: 1271081 - DNA, 15 bp, Homo sapiens
gtcacgaccaagcag

SEQ ID NO: 1271082 - DNA, 15 bp, Homo sapiens
ggtcacgaccaagca

SEQ ID NO: 1271083 - DNA, 15 bp, Homo sapiens
gggtcacgaccaagc

SEQ ID NO: 1271084 - DNA, 15 bp, Homo sapiens
agggtcacgaccaag

SEQ ID NO: 1271085 - DNA, 15 bp, Homo sapiens
cagggtcacgaccaa

SEQ ID NO: 1271086 - DNA, 15 bp, Homo sapiens
ccagggtcacgacca

SEQ ID NO: 1271087 - DNA, 15 bp, Homo sapiens
tccagggtcacgacc

SEQ ID NO: 1271088 - DNA, 15 bp, Homo sapiens
gtccagggtcacgac

SEQ ID NO: 1271089 - DNA, 15 bp, Homo sapiens
agtccagggtcacga

SEQ ID NO: 1271090 - DNA, 15 bp, Homo sapiens
aagtccagggtcacg

SEQ ID NO: 1271091 - DNA, 15 bp, Homo sapiens
caagtccagggtcac

SEQ ID NO: 1271092 - DNA, 15 bp, Homo sapiens
tcaagtccagggtca

SEQ ID NO: 1271093 - DNA, 15 bp, Homo sapiens
ctcaagtccagggtc

SEQ ID NO: 1271094 - DNA, 15 bp, Homo sapiens
cctcaagtccagggt

SEQ ID NO: 1271095 - DNA, 15 bp, Homo sapiens
gcctcaagtccaggg

SEQ ID NO: 1271096 - DNA, 15 bp, Homo sapiens
agcctcaagtccagg

SEQ ID NO: 1271097 - DNA, 15 bp, Homo sapiens
aagcctcaagtccag

SEQ ID NO: 1271098 - DNA, 15 bp, Homo sapiens
gaagcctcaagtcca

SEQ ID NO: 1271099 - DNA, 15 bp, Homo sapiens
agaagcctcaagtcc

SEQ ID NO: 1271100 - DNA, 15 bp, Homo sapiens
cagaagcctcaagtc

SEQ ID NO: 1271101 - DNA, 15 bp, Homo sapiens
ccagaagcctcaagt

SEQ ID NO: 1271102 - DNA, 15 bp, Homo sapiens
cccagaagcctcaag

SEQ ID NO: 1271103 - DNA, 15 bp, Homo sapiens
gcccagaagcctcaa

SEQ ID NO: 1271104 - DNA, 15 bp, Homo sapiens
agcccagaagcctca

SEQ ID NO: 1271105 - DNA, 15 bp, Homo sapiens
cagcccagaagcctc

SEQ ID NO: 1271106 - DNA, 15 bp, Homo sapiens
gcagcccagaagcct

SEQ ID NO: 1271107 - DNA, 15 bp, Homo sapiens
tgcagcccagaagcc

SEQ ID NO: 1271108 - DNA, 15 bp, Homo sapiens
gtgcagcccagaagc

SEQ ID NO: 1271109 - DNA, 15 bp, Homo sapiens
cgtgcagcccagaag

SEQ ID NO: 1271110 - DNA, 15 bp, Homo sapiens
acgtgcagcccagaa

SEQ ID NO: 1271111 - DNA, 15 bp, Homo sapiens
aacgtgcagcccaga

SEQ ID NO: 1271112 - DNA, 15 bp, Homo sapiens
gaacgtgcagcccag

SEQ ID NO: 1271113 - DNA, 15 bp, Homo sapiens
cgaacgtgcagccca

SEQ ID NO: 1271114 - DNA, 15 bp, Homo sapiens
acgaacgtgcagccc

SEQ ID NO: 1271115 - DNA, 15 bp, Homo sapiens
gacgaacgtgcagcc

SEQ ID NO: 1271116 - DNA, 15 bp, Homo sapiens
agacgaacgtgcagc

SEQ ID NO: 1271117 - DNA, 15 bp, Homo sapiens
aagacgaacgtgcag

SEQ ID NO: 1271118 - DNA, 15 bp, Homo sapiens
aaagacgaacgtgca

SEQ ID NO: 1271119 - DNA, 15 bp, Homo sapiens
caaagacgaacgtgc

SEQ ID NO: 1271120 - DNA, 15 bp, Homo sapiens
gcaaagacgaacgtg

SEQ ID NO: 1271121 - DNA, 15 bp, Homo sapiens
agcaaagacgaacgt

SEQ ID NO: 1271122 - DNA, 15 bp, Homo sapiens
tagcaaagacgaacg

SEQ ID NO: 1271123 - DNA, 15 bp, Homo sapiens
ttagcaaagacgaac

SEQ ID NO: 1271124 - DNA, 15 bp, Homo sapiens
gttagcaaagacgaa

SEQ ID NO: 1271125 - DNA, 15 bp, Homo sapiens
ggttagcaaagacga

SEQ ID NO: 1271126 - DNA, 15 bp, Homo sapiens
cggttagcaaagacg

SEQ ID NO: 1271127 - DNA, 15 bp, Homo sapiens
ccggttagcaaagac

SEQ ID NO: 1271128 - DNA, 15 bp, Homo sapiens
cccggttagcaaaga

SEQ ID NO: 1271129 - DNA, 15 bp, Homo sapiens
ccccggttagcaaag

SEQ ID NO: 1271130 - DNA, 15 bp, Homo sapiens
tccccggttagcaaa

SEQ ID NO: 1271131 - DNA, 15 bp, Homo sapiens
ctccccggttagcaa

SEQ ID NO: 1271132 - DNA, 15 bp, Homo sapiens
cctccccggttagca

SEQ ID NO: 1271133 - DNA, 15 bp, Homo sapiens
acctccccggttagc

SEQ ID NO: 1271134 - DNA, 15 bp, Homo sapiens
aacctccccggttag

SEQ ID NO: 1271135 - DNA, 15 bp, Homo sapiens
aaacctccccggtta

SEQ ID NO: 1271136 - DNA, 15 bp, Homo sapiens
caaacctccccggtt

SEQ ID NO: 1271137 - DNA, 15 bp, Homo sapiens
gcaaacctccccggt

SEQ ID NO: 1271138 - DNA, 15 bp, Homo sapiens
cgcaaacctccccgg

SEQ ID NO: 1271139 - DNA, 15 bp, Homo sapiens
tcgcaaacctccccg

SEQ ID NO: 1271140 - DNA, 15 bp, Homo sapiens
ttcgcaaacctcccc

SEQ ID NO: 1271141 - DNA, 15 bp, Homo sapiens
tttcgcaaacctccc

SEQ ID NO: 1271142 - DNA, 15 bp, Homo sapiens
ctttcgcaaacctcc

SEQ ID NO: 1271143 - DNA, 15 bp, Homo sapiens
cctttcgcaaacctc

SEQ ID NO: 1271144 - DNA, 15 bp, Homo sapiens
gcctttcgcaaacct

SEQ ID NO: 1271145 - DNA, 15 bp, Homo sapiens
cgcctttcgcaaacc

SEQ ID NO: 1271146 - DNA, 15 bp, Homo sapiens
tcgcctttcgcaaac

SEQ ID NO: 1271147 - DNA, 15 bp, Homo sapiens
ttcgcctttcgcaaa

SEQ ID NO: 1271148 - DNA, 15 bp, Homo sapiens
gttcgcctttcgcaa

SEQ ID NO: 1271149 - DNA, 15 bp, Homo sapiens
agttcgcctttcgca

SEQ ID NO: 1271150 - DNA, 15 bp, Homo sapiens
gagttcgcctttcgc

SEQ ID NO: 1271151 - DNA, 15 bp, Homo sapiens
agagttcgcctttcg

SEQ ID NO: 1271152 - DNA, 15 bp, Homo sapiens
aagagttcgcctttc

SEQ ID NO: 1271153 - DNA, 15 bp, Homo sapiens
aaagagttcgccttt

SEQ ID NO: 1271154 - DNA, 15 bp, Homo sapiens
taaagagttcgcctt

SEQ ID NO: 1271155 - DNA, 15 bp, Homo sapiens
ataaagagttcgcct

SEQ ID NO: 1271156 - DNA, 15 bp, Homo sapiens
cataaagagttcgcc

SEQ ID NO: 1271157 - DNA, 15 bp, Homo sapiens
ccataaagagttcgc

SEQ ID NO: 1271158 - DNA, 15 bp, Homo sapiens
cccataaagagttcg

SEQ ID NO: 1271159 - DNA, 15 bp, Homo sapiens
gcccataaagagttc

SEQ ID NO: 1271160 - DNA, 15 bp, Homo sapiens
cgcccataaagagtt

SEQ ID NO: 1271161 - DNA, 15 bp, Homo sapiens
gcgcccataaagagt

SEQ ID NO: 1271162 - DNA, 15 bp, Homo sapiens
ggcgcccataaagag

SEQ ID NO: 1271163 - DNA, 15 bp, Homo sapiens
gggcgcccataaaga

SEQ ID NO: 1271164 - DNA, 15 bp, Homo sapiens
agggcgcccataaag

SEQ ID NO: 1271165 - DNA, 15 bp, Homo sapiens
aagggcgcccataaa

SEQ ID NO: 1271166 - DNA, 15 bp, Homo sapiens
gaagggcgcccataa

SEQ ID NO: 1271167 - DNA, 15 bp, Homo sapiens
tgaagggcgcccata

SEQ ID NO: 1271168 - DNA, 15 bp, Homo sapiens
ctgaagggcgcccat

SEQ ID NO: 1271169 - DNA, 15 bp, Homo sapiens
tctgaagggcgccca

SEQ ID NO: 1271170 - DNA, 15 bp, Homo sapiens
gtctgaagggcgccc

SEQ ID NO: 1271171 - DNA, 15 bp, Homo sapiens
ggtctgaagggcgcc

SEQ ID NO: 1271172 - DNA, 15 bp, Homo sapiens
gggtctgaagggcgc

SEQ ID NO: 1271173 - DNA, 15 bp, Homo sapiens
agggtctgaagggcg

SEQ ID NO: 1271174 - DNA, 15 bp, Homo sapiens
cagggtctgaagggc

SEQ ID NO: 1271175 - DNA, 15 bp, Homo sapiens
gcagggtctgaaggg

SEQ ID NO: 1271176 - DNA, 15 bp, Homo sapiens
ggcagggtctgaagg

SEQ ID NO: 1271177 - DNA, 15 bp, Homo sapiens
cggcagggtctgaag

SEQ ID NO: 1271178 - DNA, 15 bp, Homo sapiens
tcggcagggtctgaa

SEQ ID NO: 1271179 - DNA, 15 bp, Homo sapiens
atcggcagggtctga

SEQ ID NO: 1271180 - DNA, 15 bp, Homo sapiens
catcggcagggtctg

SEQ ID NO: 1271181 - DNA, 15 bp, Homo sapiens
gcatcggcagggtct

SEQ ID NO: 1271182 - DNA, 15 bp, Homo sapiens
cgcatcggcagggtc

SEQ ID NO: 1271183 - DNA, 15 bp, Homo sapiens
gcgcatcggcagggt

SEQ ID NO: 1271184 - DNA, 15 bp, Homo sapiens
ggcgcatcggcaggg

SEQ ID NO: 1271185 - DNA, 15 bp, Homo sapiens
tggcgcatcggcagg

SEQ ID NO: 1271186 - DNA, 15 bp, Homo sapiens
gtggcgcatcggcag

SEQ ID NO: 1271187 - DNA, 15 bp, Homo sapiens
ggtggcgcatcggca

SEQ ID NO: 1271188 - DNA, 15 bp, Homo sapiens
aggtggcgcatcggc

SEQ ID NO: 1271189 - DNA, 15 bp, Homo sapiens
aaggtggcgcatcgg

SEQ ID NO: 1271190 - DNA, 15 bp, Homo sapiens
aaaggtggcgcatcg

SEQ ID NO: 1271191 - DNA, 15 bp, Homo sapiens
caaaggtggcgcatc

SEQ ID NO: 1271192 - DNA, 15 bp, Homo sapiens
gcaaaggtggcgcat

SEQ ID NO: 1271193 - DNA, 15 bp, Homo sapiens
cgcaaaggtggcgca

SEQ ID NO: 1271194 - DNA, 15 bp, Homo sapiens
ccgcaaaggtggcgc

SEQ ID NO: 1271195 - DNA, 15 bp, Homo sapiens
gccgcaaaggtggcg

SEQ ID NO: 1271196 - DNA, 15 bp, Homo sapiens
agccgcaaaggtggc

SEQ ID NO: 1271197 - DNA, 15 bp, Homo sapiens
tagccgcaaaggtgg

SEQ ID NO: 1271198 - DNA, 15 bp, Homo sapiens
ctagccgcaaaggtg

SEQ ID NO: 1271199 - DNA, 15 bp, Homo sapiens
gctagccgcaaaggt

SEQ ID NO: 1271200 - DNA, 15 bp, Homo sapiens
agctagccgcaaagg

SEQ ID NO: 1271201 - DNA, 15 bp, Homo sapiens
gagctagccgcaaag

SEQ ID NO: 1271202 - DNA, 15 bp, Homo sapiens
agagctagccgcaaa

SEQ ID NO: 1271203 - DNA, 15 bp, Homo sapiens
aagagctagccgcaa

SEQ ID NO: 1271204 - DNA, 15 bp, Homo sapiens
gaagagctagccgca

SEQ ID NO: 1271205 - DNA, 15 bp, Homo sapiens
cgaagagctagccgc

SEQ ID NO: 1271206 - DNA, 15 bp, Homo sapiens
acgaagagctagccg

SEQ ID NO: 1271207 - DNA, 15 bp, Homo sapiens
cacgaagagctagcc

SEQ ID NO: 1271208 - DNA, 15 bp, Homo sapiens
ccacgaagagctagc

SEQ ID NO: 1271209 - DNA, 15 bp, Homo sapiens
cccacgaagagctag

SEQ ID NO: 1271210 - DNA, 15 bp, Homo sapiens
tcccacgaagagcta

SEQ ID NO: 1271211 - DNA, 15 bp, Homo sapiens
atcccacgaagagct

SEQ ID NO: 1271212 - DNA, 15 bp, Homo sapiens
aatcccacgaagagc

SEQ ID NO: 1271213 - DNA, 15 bp, Homo sapiens
aaatcccacgaagag

SEQ ID NO: 1271214 - DNA, 15 bp, Homo sapiens
gaaatcccacgaaga

SEQ ID NO: 1271215 - DNA, 15 bp, Homo sapiens
tgaaatcccacgaag

SEQ ID NO: 1271216 - DNA, 15 bp, Homo sapiens
ttgaaatcccacgaa

SEQ ID NO: 1271217 - DNA, 15 bp, Homo sapiens
cttgaaatcccacga

SEQ ID NO: 1271218 - DNA, 15 bp, Homo sapiens
tcttgaaatcccacg

SEQ ID NO: 1271219 - DNA, 15 bp, Homo sapiens
ctcttgaaatcccac

SEQ ID NO: 1271220 - DNA, 15 bp, Homo sapiens
actcttgaaatccca

SEQ ID NO: 1271221 - DNA, 15 bp, Homo sapiens
cactcttgaaatccc

SEQ ID NO: 1271222 - DNA, 15 bp, Homo sapiens
tcactcttgaaatcc

SEQ ID NO: 1271223 - DNA, 15 bp, Homo sapiens
gtcactcttgaaatc

SEQ ID NO: 1271224 - DNA, 15 bp, Homo sapiens
agtcactcttgaaat

SEQ ID NO: 1271225 - DNA, 15 bp, Homo sapiens
aagtcactcttgaaa

SEQ ID NO: 1271226 - DNA, 15 bp, Homo sapiens
caagtcactcttgaa

SEQ ID NO: 1271227 - DNA, 15 bp, Homo sapiens
ccaagtcactcttga

SEQ ID NO: 1271228 - DNA, 15 bp, Homo sapiens
accaagtcactcttg

SEQ ID NO: 1271229 - DNA, 15 bp, Homo sapiens
gaccaagtcactctt

SEQ ID NO: 1271230 - DNA, 15 bp, Homo sapiens
cgaccaagtcactct

SEQ ID NO: 1271231 - DNA, 15 bp, Homo sapiens
tcgaccaagtcactc

SEQ ID NO: 1271232 - DNA, 15 bp, Homo sapiens
ttcgaccaagtcact

SEQ ID NO: 1271233 - DNA, 15 bp, Homo sapiens
attcgaccaagtcac

SEQ ID NO: 1271234 - DNA, 15 bp, Homo sapiens
aattcgaccaagtca

SEQ ID NO: 1271235 - DNA, 15 bp, Homo sapiens
aaattcgaccaagtc

SEQ ID NO: 1271236 - DNA, 15 bp, Homo sapiens
aaaattcgaccaagt

SEQ ID NO: 1271237 - DNA, 15 bp, Homo sapiens
gaaaattcgaccaag

SEQ ID NO: 1271238 - DNA, 15 bp, Homo sapiens
cgaaaattcgaccaa

SEQ ID NO: 1271239 - DNA, 15 bp, Homo sapiens
acgaaaattcgacca

SEQ ID NO: 1271240 - DNA, 15 bp, Homo sapiens
aacgaaaattcgacc

SEQ ID NO: 1271241 - DNA, 15 bp, Homo sapiens
aaacgaaaattcgac

SEQ ID NO: 1271242 - DNA, 15 bp, Homo sapiens
caaacgaaaattcga

SEQ ID NO: 1271243 - DNA, 15 bp, Homo sapiens
ccaaacgaaaattcg

SEQ ID NO: 1271244 - DNA, 15 bp, Homo sapiens
cccaaacgaaaattc

SEQ ID NO: 1271245 - DNA, 15 bp, Homo sapiens
acccaaacgaaaatt

SEQ ID NO: 1271246 - DNA, 15 bp, Homo sapiens
gacccaaacgaaaat

SEQ ID NO: 1271247 - DNA, 15 bp, Homo sapiens
agacccaaacgaaaa

SEQ ID NO: 1271248 - DNA, 15 bp, Homo sapiens
cagacccaaacgaaa

SEQ ID NO: 1271249 - DNA, 15 bp, Homo sapiens
ccagacccaaacgaa

SEQ ID NO: 1271250 - DNA, 15 bp, Homo sapiens
accagacccaaacga

SEQ ID NO: 1271251 - DNA, 15 bp, Homo sapiens
aaccagacccaaacg

SEQ ID NO: 1271252 - DNA, 15 bp, Homo sapiens
aaaccagacccaaac

SEQ ID NO: 1271253 - DNA, 15 bp, Homo sapiens
aaaaccagacccaaa

SEQ ID NO: 1271254 - DNA, 15 bp, Homo sapiens
aaaaaccagacccaa

SEQ ID NO: 1271255 - DNA, 15 bp, Homo sapiens
aaaaaaccagaccca

SEQ ID NO: 1271256 - DNA, 15 bp, Homo sapiens
taaaaaaccagaccc

SEQ ID NO: 1271257 - DNA, 15 bp, Homo sapiens
ataaaaaaccagacc

SEQ ID NO: 1271258 - DNA, 15 bp, Homo sapiens
gataaaaaaccagac

SEQ ID NO: 1271259 - DNA, 15 bp, Homo sapiens
agataaaaaaccaga

SEQ ID NO: 1271260 - DNA, 15 bp, Homo sapiens
tagataaaaaaccag

SEQ ID NO: 1271261 - DNA, 15 bp, Homo sapiens
atagataaaaaacca

SEQ ID NO: 1271262 - DNA, 15 bp, Homo sapiens
aatagataaaaaacc

SEQ ID NO: 1271263 - DNA, 15 bp, Homo sapiens
caatagataaaaaac

SEQ ID NO: 1271264 - DNA, 15 bp, Homo sapiens
tcaatagataaaaaa

SEQ ID NO: 1271265 - DNA, 15 bp, Homo sapiens
gtcaatagataaaaa

SEQ ID NO: 1271266 - DNA, 15 bp, Homo sapiens
ggtcaatagataaaa

SEQ ID NO: 1271267 - DNA, 15 bp, Homo sapiens
gggtcaatagataaa

SEQ ID NO: 1271268 - DNA, 15 bp, Homo sapiens
ggggtcaatagataa

SEQ ID NO: 1271269 - DNA, 15 bp, Homo sapiens
tggggtcaatagata

SEQ ID NO: 1271270 - DNA, 15 bp, Homo sapiens
atggggtcaatagat

SEQ ID NO: 1271271 - DNA, 15 bp, Homo sapiens
gatggggtcaataga

SEQ ID NO: 1271272 - DNA, 15 bp, Homo sapiens
tgatggggtcaatag

SEQ ID NO: 1271273 - DNA, 15 bp, Homo sapiens
gtgatggggtcaata

SEQ ID NO: 1271274 - DNA, 15 bp, Homo sapiens
tgtgatggggtcaat

SEQ ID NO: 1271275 - DNA, 15 bp, Homo sapiens
atgtgatggggtcaa

SEQ ID NO: 1271276 - DNA, 15 bp, Homo sapiens
aatgtgatggggtca

SEQ ID NO: 1271277 - DNA, 15 bp, Homo sapiens
aaatgtgatggggtc

SEQ ID NO: 1271278 - DNA, 15 bp, Homo sapiens
aaaatgtgatggggt

SEQ ID NO: 1271279 - DNA, 15 bp, Homo sapiens
aaaaatgtgatgggg

SEQ ID NO: 1271280 - DNA, 15 bp, Homo sapiens
caaaaatgtgatggg

SEQ ID NO: 1271281 - DNA, 15 bp, Homo sapiens
ccaaaaatgtgatgg

SEQ ID NO: 1271282 - DNA, 15 bp, Homo sapiens
cccaaaaatgtgatg

SEQ ID NO: 1271283 - DNA, 15 bp, Homo sapiens
acccaaaaatgtgat

SEQ ID NO: 1271284 - DNA, 15 bp, Homo sapiens
gacccaaaaatgtga

SEQ ID NO: 1271285 - DNA, 15 bp, Homo sapiens
cgacccaaaaatgtg

SEQ ID NO: 1271286 - DNA, 15 bp, Homo sapiens
gcgacccaaaaatgt

SEQ ID NO: 1271287 - DNA, 15 bp, Homo sapiens
tgcgacccaaaaatg

SEQ ID NO: 1271288 - DNA, 15 bp, Homo sapiens
atgcgacccaaaaat

SEQ ID NO: 1271289 - DNA, 15 bp, Homo sapiens
catgcgacccaaaaa

SEQ ID NO: 1271290 - DNA, 15 bp, Homo sapiens
gcatgcgacccaaaa

SEQ ID NO: 1271291 - DNA, 15 bp, Homo sapiens
agcatgcgacccaaa

SEQ ID NO: 1271292 - DNA, 15 bp, Homo sapiens
tagcatgcgacccaa

SEQ ID NO: 1271293 - DNA, 15 bp, Homo sapiens
atagcatgcgaccca

SEQ ID NO: 1271294 - DNA, 15 bp, Homo sapiens
gatagcatgcgaccc

SEQ ID NO: 1271295 - DNA, 15 bp, Homo sapiens
agatagcatgcgacc

SEQ ID NO: 1271296 - DNA, 15 bp, Homo sapiens
gagatagcatgcgac

SEQ ID NO: 1271297 - DNA, 15 bp, Homo sapiens
agagatagcatgcga

SEQ ID NO: 1271298 - DNA, 15 bp, Homo sapiens
aagagatagcatgcg

SEQ ID NO: 1271299 - DNA, 15 bp, Homo sapiens
gaagagatagcatgc

SEQ ID NO: 1271300 - DNA, 15 bp, Homo sapiens
agaagagatagcatg

SEQ ID NO: 1271301 - DNA, 15 bp, Homo sapiens
gagaagagatagcat

SEQ ID NO: 1271302 - DNA, 15 bp, Homo sapiens
tgagaagagatagca

SEQ ID NO: 1271303 - DNA, 15 bp, Homo sapiens
atgagaagagatagc

SEQ ID NO: 1271304 - DNA, 15 bp, Homo sapiens
aatgagaagagatag

SEQ ID NO: 1271305 - DNA, 15 bp, Homo sapiens
gaatgagaagagata

SEQ ID NO: 1271306 - DNA, 15 bp, Homo sapiens
tgaatgagaagagat

SEQ ID NO: 1271307 - DNA, 15 bp, Homo sapiens
ctgaatgagaagaga

SEQ ID NO: 1271308 - DNA, 15 bp, Homo sapiens
tctgaatgagaagag

SEQ ID NO: 1271309 - DNA, 15 bp, Homo sapiens
ttctgaatgagaaga

SEQ ID NO: 1271310 - DNA, 15 bp, Homo sapiens
cttctgaatgagaag

SEQ ID NO: 1271311 - DNA, 15 bp, Homo sapiens
gcttctgaatgagaa

SEQ ID NO: 1271312 - DNA, 15 bp, Homo sapiens
agcttctgaatgaga

SEQ ID NO: 1271313 - DNA, 15 bp, Homo sapiens
cagcttctgaatgag

SEQ ID NO: 1271314 - DNA, 15 bp, Homo sapiens
acagcttctgaatga

SEQ ID NO: 1271315 - DNA, 15 bp, Homo sapiens
aacagcttctgaatg

SEQ ID NO: 1271316 - DNA, 15 bp, Homo sapiens
gaacagcttctgaat

SEQ ID NO: 1271317 - DNA, 15 bp, Homo sapiens
agaacagcttctgaa

SEQ ID NO: 1271318 - DNA, 15 bp, Homo sapiens
tagaacagcttctga

SEQ ID NO: 1271319 - DNA, 15 bp, Homo sapiens
atagaacagcttctg

SEQ ID NO: 1271320 - DNA, 15 bp, Homo sapiens
aatagaacagcttct

SEQ ID NO: 1271321 - DNA, 15 bp, Homo sapiens
aaatagaacagcttc

SEQ ID NO: 1271322 - DNA, 15 bp, Homo sapiens
gaaatagaacagctt

SEQ ID NO: 1271323 - DNA, 15 bp, Homo sapiens
ggaaatagaacagct

SEQ ID NO: 1271324 - DNA, 15 bp, Homo sapiens
cggaaatagaacagc

SEQ ID NO: 1271325 - DNA, 15 bp, Homo sapiens
gcggaaatagaacag

SEQ ID NO: 1271326 - DNA, 15 bp, Homo sapiens
ggcggaaatagaaca

SEQ ID NO: 1271327 - DNA, 15 bp, Homo sapiens
aggcggaaatagaac

SEQ ID NO: 1271328 - DNA, 15 bp, Homo sapiens
aaggcggaaatagaa

SEQ ID NO: 1271329 - DNA, 15 bp, Homo sapiens
taaggcggaaataga

SEQ ID NO: 1271330 - DNA, 15 bp, Homo sapiens
ttaaggcggaaatag

SEQ ID NO: 1271331 - DNA, 15 bp, Homo sapiens
attaaggcggaaata

SEQ ID NO: 1271332 - DNA, 15 bp, Homo sapiens
cattaaggcggaaat

SEQ ID NO: 1271333 - DNA, 15 bp, Homo sapiens
gcattaaggcggaaa

SEQ ID NO: 1271334 - DNA, 15 bp, Homo sapiens
agcattaaggcggaa

SEQ ID NO: 1271335 - DNA, 15 bp, Homo sapiens
gagcattaaggcgga

SEQ ID NO: 1271336 - DNA, 15 bp, Homo sapiens
agagcattaaggcgg

SEQ ID NO: 1271337 - DNA, 15 bp, Homo sapiens
cagagcattaaggcg

SEQ ID NO: 1271338 - DNA, 15 bp, Homo sapiens
gcagagcattaaggc

SEQ ID NO: 1271339 - DNA, 15 bp, Homo sapiens
agcagagcattaagg

SEQ ID NO: 1271340 - DNA, 15 bp, Homo sapiens
gagcagagcattaag

SEQ ID NO: 1271341 - DNA, 15 bp, Homo sapiens
cgagcagagcattaa

SEQ ID NO: 1271342 - DNA, 15 bp, Homo sapiens
tcgagcagagcatta

SEQ ID NO: 1271343 - DNA, 15 bp, Homo sapiens
ttcgagcagagcatt

SEQ ID NO: 1271344 - DNA, 15 bp, Homo sapiens
cttcgagcagagcat

SEQ ID NO: 1271345 - DNA, 15 bp, Homo sapiens
ccttcgagcagagca

SEQ ID NO: 1271346 - DNA, 15 bp, Homo sapiens
tccttcgagcagagc

SEQ ID NO: 1271347 - DNA, 15 bp, Homo sapiens
ctccttcgagcagag

SEQ ID NO: 1271348 - DNA, 15 bp, Homo sapiens
actccttcgagcaga

SEQ ID NO: 1271349 - DNA, 15 bp, Homo sapiens
gactccttcgagcag

SEQ ID NO: 1271350 - DNA, 15 bp, Homo sapiens
cgactccttcgagca

SEQ ID NO: 1271351 - DNA, 15 bp, Homo sapiens
acgactccttcgagc

SEQ ID NO: 1271352 - DNA, 15 bp, Homo sapiens
aacgactccttcgag

SEQ ID NO: 1271353 - DNA, 15 bp, Homo sapiens
caacgactccttcga

SEQ ID NO: 1271354 - DNA, 15 bp, Homo sapiens
gcaacgactccttcg

SEQ ID NO: 1271355 - DNA, 15 bp, Homo sapiens
agcaacgactccttc

SEQ ID NO: 1271356 - DNA, 15 bp, Homo sapiens
cagcaacgactcctt

SEQ ID NO: 1271357 - DNA, 15 bp, Homo sapiens
gcagcaacgactcct

SEQ ID NO: 1271358 - DNA, 15 bp, Homo sapiens
agcagcaacgactcc

SEQ ID NO: 1271359 - DNA, 15 bp, Homo sapiens
gagcagcaacgactc

SEQ ID NO: 1271360 - DNA, 15 bp, Homo sapiens
cgagcagcaacgact

SEQ ID NO: 1271361 - DNA, 15 bp, Homo sapiens
gcgagcagcaacgac

SEQ ID NO: 1271362 - DNA, 15 bp, Homo sapiens
agcgagcagcaacga

SEQ ID NO: 1271363 - DNA, 15 bp, Homo sapiens
gagcgagcagcaacg

SEQ ID NO: 1271364 - DNA, 15 bp, Homo sapiens
agagcgagcagcaac

SEQ ID NO: 1271365 - DNA, 15 bp, Homo sapiens
cagagcgagcagcaa

SEQ ID NO: 1271366 - DNA, 15 bp, Homo sapiens
tcagagcgagcagca

SEQ ID NO: 1271367 - DNA, 15 bp, Homo sapiens
gtcagagcgagcagc

SEQ ID NO: 1271368 - DNA, 15 bp, Homo sapiens
ggtcagagcgagcag

SEQ ID NO: 1271369 - DNA, 15 bp, Homo sapiens
cggtcagagcgagca

SEQ ID NO: 1271370 - DNA, 15 bp, Homo sapiens
ccggtcagagcgagc

SEQ ID NO: 1271371 - DNA, 15 bp, Homo sapiens
cccggtcagagcgag

SEQ ID NO: 1271372 - DNA, 15 bp, Homo sapiens
tcccggtcagagcga

SEQ ID NO: 1271373 - DNA, 15 bp, Homo sapiens
ttcccggtcagagcg

SEQ ID NO: 1271374 - DNA, 15 bp, Homo sapiens
cttcccggtcagagc

SEQ ID NO: 1271375 - DNA, 15 bp, Homo sapiens
ccttcccggtcagag

SEQ ID NO: 1271376 - DNA, 15 bp, Homo sapiens
gccttcccggtcaga

SEQ ID NO: 1271377 - DNA, 15 bp, Homo sapiens
tgccttcccggtcag

SEQ ID NO: 1271378 - DNA, 15 bp, Homo sapiens
ctgccttcccggtca

SEQ ID NO: 1271379 - DNA, 15 bp, Homo sapiens
tctgccttcccggtc

SEQ ID NO: 1271380 - DNA, 15 bp, Homo sapiens
ttctgccttcccggt

SEQ ID NO: 1271381 - DNA, 15 bp, Homo sapiens
gttctgccttcccgg

SEQ ID NO: 1271382 - DNA, 15 bp, Homo sapiens
ggttctgccttcccg

SEQ ID NO: 1271383 - DNA, 15 bp, Homo sapiens
gggttctgccttccc

SEQ ID NO: 1271384 - DNA, 15 bp, Homo sapiens
agggttctgccttcc

SEQ ID NO: 1271385 - DNA, 15 bp, Homo sapiens
tagggttctgccttc

SEQ ID NO: 1271386 - DNA, 15 bp, Homo sapiens
ctagggttctgcctt

SEQ ID NO: 1271387 - DNA, 15 bp, Homo sapiens
actagggttctgcct

SEQ ID NO: 1271388 - DNA, 15 bp, Homo sapiens
gactagggttctgcc

SEQ ID NO: 1271389 - DNA, 15 bp, Homo sapiens
ggactagggttctgc

SEQ ID NO: 1271390 - DNA, 15 bp, Homo sapiens
aggactagggttctg

SEQ ID NO: 1271391 - DNA, 15 bp, Homo sapiens
gaggactagggttct

SEQ ID NO: 1271392 - DNA, 15 bp, Homo sapiens
tgaggactagggttc

SEQ ID NO: 1271393 - DNA, 15 bp, Homo sapiens
gtgaggactagggtt

SEQ ID NO: 1271394 - DNA, 15 bp, Homo sapiens
agtgaggactagggt

SEQ ID NO: 1271395 - DNA, 15 bp, Homo sapiens
cagtgaggactaggg

SEQ ID NO: 1271396 - DNA, 15 bp, Homo sapiens
ccagtgaggactagg

SEQ ID NO: 1271397 - DNA, 15 bp, Homo sapiens
tccagtgaggactag

SEQ ID NO: 1271398 - DNA, 15 bp, Homo sapiens
atccagtgaggacta

SEQ ID NO: 1271399 - DNA, 15 bp, Homo sapiens
gatccagtgaggact

SEQ ID NO: 1271400 - DNA, 15 bp, Homo sapiens
agatccagtgaggac

SEQ ID NO: 1271401 - DNA, 15 bp, Homo sapiens
gagatccagtgagga

SEQ ID NO: 1271402 - DNA, 15 bp, Homo sapiens
tgagatccagtgagg

SEQ ID NO: 1271403 - DNA, 15 bp, Homo sapiens
gtgagatccagtgag

SEQ ID NO: 1271404 - DNA, 15 bp, Homo sapiens
ggtgagatccagtga

SEQ ID NO: 1271405 - DNA, 15 bp, Homo sapiens
aggtgagatccagtg

SEQ ID NO: 1271406 - DNA, 15 bp, Homo sapiens
caggtgagatccagt

SEQ ID NO: 1271407 - DNA, 15 bp, Homo sapiens
gccaggtgagatcca

SEQ ID NO: 1271408 - DNA, 15 bp, Homo sapiens
agccaggtgagatcc

SEQ ID NO: 1271409 - DNA, 15 bp, Homo sapiens
cagccaggtgagatc

SEQ ID NO: 1271410 - DNA, 15 bp, Homo sapiens
gcagccaggtgagat

SEQ ID NO: 1271411 - DNA, 15 bp, Homo sapiens
ggcagccaggtgaga

SEQ ID NO: 1271412 - DNA, 15 bp, Homo sapiens
tggcagccaggtgag

SEQ ID NO: 1271413 - DNA, 15 bp, Homo sapiens
ctggcagccaggtga

SEQ ID NO: 1271414 - DNA, 15 bp, Homo sapiens
cctggcagccaggtg

SEQ ID NO: 1271415 - DNA, 15 bp, Homo sapiens
ccctggcagccaggt

SEQ ID NO: 1271416 - DNA, 15 bp, Homo sapiens
gccctggcagccagg

SEQ ID NO: 1271417 - DNA, 15 bp, Homo sapiens
ggccctggcagccag

SEQ ID NO: 1271418 - DNA, 15 bp, Homo sapiens
tggccctggcagcca

SEQ ID NO: 1271419 - DNA, 15 bp, Homo sapiens
gtggccctggcagcc

SEQ ID NO: 1271420 - DNA, 15 bp, Homo sapiens
ggtggccctggcagc

SEQ ID NO: 1271421 - DNA, 15 bp, Homo sapiens
tggtggccctggcag

SEQ ID NO: 1271422 - DNA, 15 bp, Homo sapiens
gtggtggccctggca

SEQ ID NO: 1271423 - DNA, 15 bp, Homo sapiens
ggtggtggccctggc

SEQ ID NO: 1271424 - DNA, 15 bp, Homo sapiens
aggtggtggccctgg

SEQ ID NO: 1271425 - DNA, 15 bp, Homo sapiens
caggtggtggccctg

SEQ ID NO: 1271426 - DNA, 15 bp, Homo sapiens
tcaggtggtggccct

SEQ ID NO: 1271427 - DNA, 15 bp, Homo sapiens
ctcaggtggtggccc

SEQ ID NO: 1271428 - DNA, 15 bp, Homo sapiens
gctcaggtggtggcc

SEQ ID NO: 1271429 - DNA, 15 bp, Homo sapiens
ggctcaggtggtggc

SEQ ID NO: 1271430 - DNA, 15 bp, Homo sapiens
tggctcaggtggtgg

SEQ ID NO: 1271431 - DNA, 15 bp, Homo sapiens
ctggctcaggtggtg

SEQ ID NO: 1271432 - DNA, 15 bp, Homo sapiens
cctggctcaggtggt

SEQ ID NO: 1271433 - DNA, 15 bp, Homo sapiens
acctggctcaggtgg

SEQ ID NO: 1271434 - DNA, 15 bp, Homo sapiens
tacctggctcaggtg

SEQ ID NO: 1271435 - DNA, 15 bp, Homo sapiens
gtacctggctcaggt

SEQ ID NO: 1271436 - DNA, 15 bp, Homo sapiens
tgtacctggctcagg

SEQ ID NO: 1271437 - DNA, 15 bp, Homo sapiens
ttgtacctggctcag

SEQ ID NO: 1271438 - DNA, 15 bp, Homo sapiens
cttgtacctggctca

SEQ ID NO: 1271439 - DNA, 15 bp, Homo sapiens
acttgtacctggctc

SEQ ID NO: 1271440 - DNA, 15 bp, Homo sapiens
aacttgtacctggct

SEQ ID NO: 1271441 - DNA, 15 bp, Homo sapiens
aaacttgtacctggc

SEQ ID NO: 1271442 - DNA, 15 bp, Homo sapiens
aaaacttgtacctgg

SEQ ID NO: 1271443 - DNA, 15 bp, Homo sapiens
caaaacttgtacctg

SEQ ID NO: 1271444 - DNA, 15 bp, Homo sapiens
ccaaaacttgtacct

SEQ ID NO: 1271445 - DNA, 15 bp, Homo sapiens
cccaaaacttgtacc

SEQ ID NO: 1271446 - DNA, 15 bp, Homo sapiens
ccccaaaacttgtac

SEQ ID NO: 1271447 - DNA, 15 bp, Homo sapiens
cccccaaaacttgta

SEQ ID NO: 1271448 - DNA, 15 bp, Homo sapiens
ccccccaaaacttgt

SEQ ID NO: 1271449 - DNA, 15 bp, Homo sapiens
tccccccaaaacttg

SEQ ID NO: 1271450 - DNA, 15 bp, Homo sapiens
gtccccccaaaactt

SEQ ID NO: 1271451 - DNA, 15 bp, Homo sapiens
tgtccccccaaaact

SEQ ID NO: 1271452 - DNA, 15 bp, Homo sapiens
gtgtccccccaaaac

SEQ ID NO: 1271453 - DNA, 15 bp, Homo sapiens
tgtgtccccccaaaa

SEQ ID NO: 1271454 - DNA, 15 bp, Homo sapiens
gtgtgtccccccaaa

SEQ ID NO: 1271455 - DNA, 15 bp, Homo sapiens
cgtgtgtccccccaa

SEQ ID NO: 1271456 - DNA, 15 bp, Homo sapiens
ccgtgtgtcccccca

SEQ ID NO: 1271457 - DNA, 15 bp, Homo sapiens
tccgtgtgtcccccc

SEQ ID NO: 1271458 - DNA, 15 bp, Homo sapiens
ttccgtgtgtccccc

SEQ ID NO: 1271459 - DNA, 15 bp, Homo sapiens
cttccgtgtgtcccc

SEQ ID NO: 1271460 - DNA, 15 bp, Homo sapiens
acttccgtgtgtccc

SEQ ID NO: 1271461 - DNA, 15 bp, Homo sapiens
gacttccgtgtgtcc

SEQ ID NO: 1271462 - DNA, 15 bp, Homo sapiens
cgacttccgtgtgtc

SEQ ID NO: 1271463 - DNA, 15 bp, Homo sapiens
ccgacttccgtgtgt

SEQ ID NO: 1271464 - DNA, 15 bp, Homo sapiens
cccgacttccgtgtg

SEQ ID NO: 1271465 - DNA, 15 bp, Homo sapiens
ccccgacttccgtgt

SEQ ID NO: 1271466 - DNA, 15 bp, Homo sapiens
gccccgacttccgtg

SEQ ID NO: 1271467 - DNA, 15 bp, Homo sapiens
tgccccgacttccgt

SEQ ID NO: 1271468 - DNA, 15 bp, Homo sapiens
gtgccccgacttccg

SEQ ID NO: 1271469 - DNA, 15 bp, Homo sapiens
agtgccccgacttcc

SEQ ID NO: 1271470 - DNA, 15 bp, Homo sapiens
cagtgccccgacttc

SEQ ID NO: 1271471 - DNA, 15 bp, Homo sapiens
gcagtgccccgactt

SEQ ID NO: 1271472 - DNA, 15 bp, Homo sapiens
ggcagtgccccgact

SEQ ID NO: 1271473 - DNA, 15 bp, Homo sapiens
cggcagtgccccgac

SEQ ID NO: 1271474 - DNA, 15 bp, Homo sapiens
acggcagtgccccga

SEQ ID NO: 1271475 - DNA, 15 bp, Homo sapiens
cacggcagtgccccg

SEQ ID NO: 1271476 - DNA, 15 bp, Homo sapiens
tcacggcagtgcccc

SEQ ID NO: 1271477 - DNA, 15 bp, Homo sapiens
ctcacggcagtgccc

SEQ ID NO: 1271478 - DNA, 15 bp, Homo sapiens
tctcacggcagtgcc

SEQ ID NO: 1271479 - DNA, 15 bp, Homo sapiens
atctcacggcagtgc

SEQ ID NO: 1271480 - DNA, 15 bp, Homo sapiens
tatctcacggcagtg

SEQ ID NO: 1271481 - DNA, 15 bp, Homo sapiens
ctatctcacggcagt

SEQ ID NO: 1271482 - DNA, 15 bp, Homo sapiens
actatctcacggcag

SEQ ID NO: 1271483 - DNA, 15 bp, Homo sapiens
aactatctcacggca

SEQ ID NO: 1271484 - DNA, 15 bp, Homo sapiens
gaactatctcacggc

SEQ ID NO: 1271485 - DNA, 15 bp, Homo sapiens
agaactatctcacgg

SEQ ID NO: 1271486 - DNA, 15 bp, Homo sapiens
cagaactatctcacg

SEQ ID NO: 1271487 - DNA, 15 bp, Homo sapiens
ccagaactatctcac

SEQ ID NO: 1271488 - DNA, 15 bp, Homo sapiens
gccagaactatctca

SEQ ID NO: 1271489 - DNA, 15 bp, Homo sapiens
agccagaactatctc

SEQ ID NO: 1271490 - DNA, 15 bp, Homo sapiens
aagccagaactatct

SEQ ID NO: 1271491 - DNA, 15 bp, Homo sapiens
taagccagaactatc

SEQ ID NO: 1271492 - DNA, 15 bp, Homo sapiens
gtaagccagaactat

SEQ ID NO: 1271493 - DNA, 15 bp, Homo sapiens
tgtaagccagaacta

SEQ ID NO: 1271494 - DNA, 15 bp, Homo sapiens
atgtaagccagaact

SEQ ID NO: 1271495 - DNA, 15 bp, Homo sapiens
gatgtaagccagaac

SEQ ID NO: 1271496 - DNA, 15 bp, Homo sapiens
agatgtaagccagaa

SEQ ID NO: 1271497 - DNA, 15 bp, Homo sapiens
tagatgtaagccaga

SEQ ID NO: 1271498 - DNA, 15 bp, Homo sapiens
gtagatgtaagccag

SEQ ID NO: 1271499 - DNA, 15 bp, Homo sapiens
agtagatgtaagcca

SEQ ID NO: 1271500 - DNA, 15 bp, Homo sapiens
cagtagatgtaagcc

SEQ ID NO: 1271501 - DNA, 15 bp, Homo sapiens
gcagtagatgtaagc

SEQ ID NO: 1271502 - DNA, 15 bp, Homo sapiens
ggcagtagatgtaag

SEQ ID NO: 1271503 - DNA, 15 bp, Homo sapiens
tggcagtagatgtaa

SEQ ID NO: 1271504 - DNA, 15 bp, Homo sapiens
gtggcagtagatgta

SEQ ID NO: 1271505 - DNA, 15 bp, Homo sapiens
agtggcagtagatgt

SEQ ID NO: 1271506 - DNA, 15 bp, Homo sapiens
cagtggcagtagatg

SEQ ID NO: 1271507 - DNA, 15 bp, Homo sapiens
gcagtggcagtagat

SEQ ID NO: 1271508 - DNA, 15 bp, Homo sapiens
ggcagtggcagtaga

SEQ ID NO: 1271509 - DNA, 15 bp, Homo sapiens
aggcagtggcagtag

SEQ ID NO: 1271510 - DNA, 15 bp, Homo sapiens
caggcagtggcagta

SEQ ID NO: 1271511 - DNA, 15 bp, Homo sapiens
gcaggcagtggcagt

SEQ ID NO: 1271512 - DNA, 15 bp, Homo sapiens
tgcaggcagtggcag

SEQ ID NO: 1271513 - DNA, 15 bp, Homo sapiens
ctgcaggcagtggca

SEQ ID NO: 1271514 - DNA, 15 bp, Homo sapiens
gctgcaggcagtggc

SEQ ID NO: 1271515 - DNA, 15 bp, Homo sapiens
ggctgcaggcagtgg

SEQ ID NO: 1271516 - DNA, 15 bp, Homo sapiens
gggctgcaggcagtg

SEQ ID NO: 1271517 - DNA, 15 bp, Homo sapiens
agggctgcaggcagt

SEQ ID NO: 1271518 - DNA, 15 bp, Homo sapiens
cagggctgcaggcag

SEQ ID NO: 1271519 - DNA, 15 bp, Homo sapiens
ccagggctgcaggca

SEQ ID NO: 1271520 - DNA, 15 bp, Homo sapiens
tccagggctgcaggc

SEQ ID NO: 1271521 - DNA, 15 bp, Homo sapiens
ttccagggctgcagg

SEQ ID NO: 1271522 - DNA, 15 bp, Homo sapiens
cttccagggctgcag

SEQ ID NO: 1271523 - DNA, 15 bp, Homo sapiens
ccttccagggctgca

SEQ ID NO: 1271524 - DNA, 15 bp, Homo sapiens
gccttccagggctgc

SEQ ID NO: 1271525 - DNA, 15 bp, Homo sapiens
agccttccagggctg

SEQ ID NO: 1271526 - DNA, 15 bp, Homo sapiens
cagccttccagggct

SEQ ID NO: 1271527 - DNA, 15 bp, Homo sapiens
ccagccttccagggc

SEQ ID NO: 1271528 - DNA, 15 bp, Homo sapiens
cccagccttccaggg

SEQ ID NO: 1271529 - DNA, 15 bp, Homo sapiens
gcccagccttccagg

SEQ ID NO: 1271530 - DNA, 15 bp, Homo sapiens
agcccagccttccag

SEQ ID NO: 1271531 - DNA, 15 bp, Homo sapiens
cagcccagccttcca

SEQ ID NO: 1271532 - DNA, 15 bp, Homo sapiens
gcagcccagccttcc

SEQ ID NO: 1271533 - DNA, 15 bp, Homo sapiens
cgcagcccagccttc

SEQ ID NO: 1271534 - DNA, 15 bp, Homo sapiens
gcgcagcccagcctt

SEQ ID NO: 1271535 - DNA, 15 bp, Homo sapiens
ggcgcagcccagcct

SEQ ID NO: 1271536 - DNA, 15 bp, Homo sapiens
aggcgcagcccagcc

SEQ ID NO: 1271537 - DNA, 15 bp, Homo sapiens
caggcgcagcccagc

SEQ ID NO: 1271538 - DNA, 15 bp, Homo sapiens
ccaggcgcagcccag

SEQ ID NO: 1271539 - DNA, 15 bp, Homo sapiens
gccaggcgcagccca

SEQ ID NO: 1271540 - DNA, 15 bp, Homo sapiens
agccaggcgcagccc

SEQ ID NO: 1271541 - DNA, 15 bp, Homo sapiens
cagccaggcgcagcc

SEQ ID NO: 1271542 - DNA, 15 bp, Homo sapiens
ccagccaggcgcagc

SEQ ID NO: 1271543 - DNA, 15 bp, Homo sapiens
gccagccaggcgcag

SEQ ID NO: 1271544 - DNA, 15 bp, Homo sapiens
ggccagccaggcgca

SEQ ID NO: 1271545 - DNA, 15 bp, Homo sapiens
gggccagccaggcgc

SEQ ID NO: 1271546 - DNA, 15 bp, Homo sapiens
ggggccagccaggcg

SEQ ID NO: 1271547 - DNA, 15 bp, Homo sapiens
aggggccagccaggc

SEQ ID NO: 1271548 - DNA, 15 bp, Homo sapiens
caggggccagccagg

SEQ ID NO: 1271549 - DNA, 15 bp, Homo sapiens
gcaggggccagccag

SEQ ID NO: 1271550 - DNA, 15 bp, Homo sapiens
ggcaggggccagcca

SEQ ID NO: 1271551 - DNA, 15 bp, Homo sapiens
tggcaggggccagcc

SEQ ID NO: 1271552 - DNA, 15 bp, Homo sapiens
ctggcaggggccagc

SEQ ID NO: 1271553 - DNA, 15 bp, Homo sapiens
gctggcaggggccag

SEQ ID NO: 1271554 - DNA, 15 bp, Homo sapiens
ggctggcaggggcca

SEQ ID NO: 1271555 - DNA, 15 bp, Homo sapiens
gggctggcaggggcc

SEQ ID NO: 1271556 - DNA, 15 bp, Homo sapiens
ggggctggcaggggc

SEQ ID NO: 1271557 - DNA, 15 bp, Homo sapiens
cggggctggcagggg

SEQ ID NO: 1271558 - DNA, 15 bp, Homo sapiens
ccggggctggcaggg

SEQ ID NO: 1271559 - DNA, 15 bp, Homo sapiens
cccggggctggcagg

SEQ ID NO: 1271560 - DNA, 15 bp, Homo sapiens
gcccggggctggcag

SEQ ID NO: 1271561 - DNA, 15 bp, Homo sapiens
agcccggggctggca

SEQ ID NO: 1271562 - DNA, 15 bp, Homo sapiens
cagcccggggctggc

SEQ ID NO: 1271563 - DNA, 15 bp, Homo sapiens
acagcccggggctgg

SEQ ID NO: 1271564 - DNA, 15 bp, Homo sapiens
cacagcccggggctg

SEQ ID NO: 1271565 - DNA, 15 bp, Homo sapiens
gcacagcccggggct

SEQ ID NO: 1271566 - DNA, 15 bp, Homo sapiens
cgcacagcccggggc

SEQ ID NO: 1271567 - DNA, 15 bp, Homo sapiens
ccgcacagcccgggg

SEQ ID NO: 1271568 - DNA, 15 bp, Homo sapiens
gccgcacagcccggg

SEQ ID NO: 1271569 - DNA, 15 bp, Homo sapiens
agccgcacagcccgg

SEQ ID NO: 1271570 - DNA, 15 bp, Homo sapiens
gagccgcacagcccg

SEQ ID NO: 1271571 - DNA, 15 bp, Homo sapiens
ggagccgcacagccc

SEQ ID NO: 1271572 - DNA, 15 bp, Homo sapiens
tggagccgcacagcc

SEQ ID NO: 1271573 - DNA, 15 bp, Homo sapiens
gtggagccgcacagc

SEQ ID NO: 1271574 - DNA, 15 bp, Homo sapiens
agtggagccgcacag

SEQ ID NO: 1271575 - DNA, 15 bp, Homo sapiens
gagtggagccgcaca

SEQ ID NO: 1271576 - DNA, 15 bp, Homo sapiens
agagtggagccgcac

SEQ ID NO: 1271577 - DNA, 15 bp, Homo sapiens
aagagtggagccgca

SEQ ID NO: 1271578 - DNA, 15 bp, Homo sapiens
aaagagtggagccgc

SEQ ID NO: 1271579 - DNA, 15 bp, Homo sapiens
caaagagtggagccg

SEQ ID NO: 1271580 - DNA, 15 bp, Homo sapiens
gcaaagagtggagcc

SEQ ID NO: 1271581 - DNA, 15 bp, Homo sapiens
ggcaaagagtggagc

SEQ ID NO: 1271582 - DNA, 15 bp, Homo sapiens
aggcaaagagtggag

SEQ ID NO: 1271583 - DNA, 15 bp, Homo sapiens
aaggcaaagagtgga

SEQ ID NO: 1271584 - DNA, 15 bp, Homo sapiens
aaaggcaaagagtgg

SEQ ID NO: 1271585 - DNA, 15 bp, Homo sapiens
taaaggcaaagagtg

SEQ ID NO: 1271586 - DNA, 15 bp, Homo sapiens
ctaaaggcaaagagt

SEQ ID NO: 1271587 - DNA, 15 bp, Homo sapiens
cctaaaggcaaagag

SEQ ID NO: 1271588 - DNA, 15 bp, Homo sapiens
acctaaaggcaaaga

SEQ ID NO: 1271589 - DNA, 15 bp, Homo sapiens
tacctaaaggcaaag

SEQ ID NO: 1271590 - DNA, 15 bp, Homo sapiens
gtacctaaaggcaaa

SEQ ID NO: 1271591 - DNA, 15 bp, Homo sapiens
agtacctaaaggcaa

SEQ ID NO: 1271592 - DNA, 15 bp, Homo sapiens
gagtacctaaaggca

SEQ ID NO: 1271593 - DNA, 15 bp, Homo sapiens
ggagtacctaaaggc

SEQ ID NO: 1271594 - DNA, 15 bp, Homo sapiens
gggagtacctaaagg

SEQ ID NO: 1271595 - DNA, 15 bp, Homo sapiens
cgggagtacctaaag

SEQ ID NO: 1271596 - DNA, 15 bp, Homo sapiens
ccgggagtacctaaa

SEQ ID NO: 1271597 - DNA, 15 bp, Homo sapiens
tccgggagtacctaa

SEQ ID NO: 1271598 - DNA, 15 bp, Homo sapiens
atccgggagtaccta

SEQ ID NO: 1271599 - DNA, 15 bp, Homo sapiens
catccgggagtacct

SEQ ID NO: 1271600 - DNA, 15 bp, Homo sapiens
ccatccgggagtacc

SEQ ID NO: 1271601 - DNA, 15 bp, Homo sapiens
gccatccgggagtac

SEQ ID NO: 1271602 - DNA, 15 bp, Homo sapiens
agccatccgggagta

SEQ ID NO: 1271603 - DNA, 15 bp, Homo sapiens
aagccatccgggagt

SEQ ID NO: 1271604 - DNA, 15 bp, Homo sapiens
gaagccatccgggag

SEQ ID NO: 1271605 - DNA, 15 bp, Homo sapiens
ggaagccatccggga

SEQ ID NO: 1271606 - DNA, 15 bp, Homo sapiens
cggaagccatccggg

SEQ ID NO: 1271607 - DNA, 15 bp, Homo sapiens
gcggaagccatccgg

SEQ ID NO: 1271608 - DNA, 15 bp, Homo sapiens
tgcggaagccatccg

SEQ ID NO: 1271609 - DNA, 15 bp, Homo sapiens
ttgcggaagccatcc

SEQ ID NO: 1271610 - DNA, 15 bp, Homo sapiens
attgcggaagccatc

SEQ ID NO: 1271611 - DNA, 15 bp, Homo sapiens
cattgcggaagccat

SEQ ID NO: 1271612 - DNA, 15 bp, Homo sapiens
acattgcggaagcca

SEQ ID NO: 1271613 - DNA, 15 bp, Homo sapiens
gacattgcggaagcc

SEQ ID NO: 1271614 - DNA, 15 bp, Homo sapiens
ggacattgcggaagc

SEQ ID NO: 1271615 - DNA, 15 bp, Homo sapiens
gggacattgcggaag

SEQ ID NO: 1271616 - DNA, 15 bp, Homo sapiens
cgggacattgcggaa

SEQ ID NO: 1271617 - DNA, 15 bp, Homo sapiens
ccgggacattgcgga

SEQ ID NO: 1271618 - DNA, 15 bp, Homo sapiens
accgggacattgcgg

SEQ ID NO: 1271619 - DNA, 15 bp, Homo sapiens
gaccgggacattgcg

SEQ ID NO: 1271620 - DNA, 15 bp, Homo sapiens
ggaccgggacattgc

SEQ ID NO: 1271621 - DNA, 15 bp, Homo sapiens
tggaccgggacattg

SEQ ID NO: 1271622 - DNA, 15 bp, Homo sapiens
gtggaccgggacatt

SEQ ID NO: 1271623 - DNA, 15 bp, Homo sapiens
cgtggaccgggacat

SEQ ID NO: 1271624 - DNA, 15 bp, Homo sapiens
ccgtggaccgggaca

SEQ ID NO: 1271625 - DNA, 15 bp, Homo sapiens
tccgtggaccgggac

SEQ ID NO: 1271626 - DNA, 15 bp, Homo sapiens
ttccgtggaccggga

SEQ ID NO: 1271627 - DNA, 15 bp, Homo sapiens
attccgtggaccggg

SEQ ID NO: 1271628 - DNA, 15 bp, Homo sapiens
gattccgtggaccgg

SEQ ID NO: 1271629 - DNA, 15 bp, Homo sapiens
tgattccgtggaccg

SEQ ID NO: 1271630 - DNA, 15 bp, Homo sapiens
atgattccgtggacc

SEQ ID NO: 1271631 - DNA, 15 bp, Homo sapiens
gatgattccgtggac

SEQ ID NO: 1271632 - DNA, 15 bp, Homo sapiens
tgatgattccgtgga

SEQ ID NO: 1271633 - DNA, 15 bp, Homo sapiens
atgatgattccgtgg

SEQ ID NO: 1271634 - DNA, 15 bp, Homo sapiens
aatgatgattccgtg

SEQ ID NO: 1271635 - DNA, 15 bp, Homo sapiens
caatgatgattccgt

SEQ ID NO: 1271636 - DNA, 15 bp, Homo sapiens
tcaatgatgattccg

SEQ ID NO: 1271637 - DNA, 15 bp, Homo sapiens
ttcaatgatgattcc

SEQ ID NO: 1271638 - DNA, 15 bp, Homo sapiens
attcaatgatgattc

SEQ ID NO: 1271639 - DNA, 15 bp, Homo sapiens
gattcaatgatgatt

SEQ ID NO: 1271640 - DNA, 15 bp, Homo sapiens
agattcaatgatgat

SEQ ID NO: 1271641 - DNA, 15 bp, Homo sapiens
tagattcaatgatga

SEQ ID NO: 1271642 - DNA, 15 bp, Homo sapiens
ctagattcaatgatg

SEQ ID NO: 1271643 - DNA, 15 bp, Homo sapiens
gctagattcaatgat

SEQ ID NO: 1271644 - DNA, 15 bp, Homo sapiens
tgctagattcaatga

SEQ ID NO: 1271645 - DNA, 15 bp, Homo sapiens
gtgctagattcaatg

SEQ ID NO: 1271646 - DNA, 15 bp, Homo sapiens
ggtgctagattcaat

SEQ ID NO: 1271647 - DNA, 15 bp, Homo sapiens
tggtgctagattcaa

SEQ ID NO: 1271648 - DNA, 15 bp, Homo sapiens
ttggtgctagattca

SEQ ID NO: 1271649 - DNA, 15 bp, Homo sapiens
gttggtgctagattc

SEQ ID NO: 1271650 - DNA, 15 bp, Homo sapiens
cgttggtgctagatt

SEQ ID NO: 1271651 - DNA, 15 bp, Homo sapiens
ccgttggtgctagat

SEQ ID NO: 1271652 - DNA, 15 bp, Homo sapiens
cccgttggtgctaga

SEQ ID NO: 1271653 - DNA, 15 bp, Homo sapiens
gcccgttggtgctag

SEQ ID NO: 1271654 - DNA, 15 bp, Homo sapiens
ggcccgttggtgcta

SEQ ID NO: 1271655 - DNA, 15 bp, Homo sapiens
tggcccgttggtgct

SEQ ID NO: 1271656 - DNA, 15 bp, Homo sapiens
ttggcccgttggtgc

SEQ ID NO: 1271657 - DNA, 15 bp, Homo sapiens
tttggcccgttggtg

SEQ ID NO: 1271658 - DNA, 15 bp, Homo sapiens
ctttggcccgttggt

SEQ ID NO: 1271659 - DNA, 15 bp, Homo sapiens
actttggcccgttgg

SEQ ID NO: 1271660 - DNA, 15 bp, Homo sapiens
gactttggcccgttg

SEQ ID NO: 1271661 - DNA, 15 bp, Homo sapiens
agactttggcccgtt

SEQ ID NO: 1271662 - DNA, 15 bp, Homo sapiens
cagactttggcccgt

SEQ ID NO: 1271663 - DNA, 15 bp, Homo sapiens
gcagactttggcccg

SEQ ID NO: 1271664 - DNA, 15 bp, Homo sapiens
tgcagactttggccc

SEQ ID NO: 1271665 - DNA, 15 bp, Homo sapiens
ctgcagactttggcc

SEQ ID NO: 1271666 - DNA, 15 bp, Homo sapiens
actgcagactttggc

SEQ ID NO: 1271667 - DNA, 15 bp, Homo sapiens
aactgcagactttgg

SEQ ID NO: 1271668 - DNA, 15 bp, Homo sapiens
aaactgcagactttg

SEQ ID NO: 1271669 - DNA, 15 bp, Homo sapiens
gaaactgcagacttt

SEQ ID NO: 1271670 - DNA, 15 bp, Homo sapiens
ggaaactgcagactt

SEQ ID NO: 1271671 - DNA, 15 bp, Homo sapiens
aggaaactgcagact

SEQ ID NO: 1271672 - DNA, 15 bp, Homo sapiens
gaggaaactgcagac

SEQ ID NO: 1271673 - DNA, 15 bp, Homo sapiens
ggaggaaactgcaga

SEQ ID NO: 1271674 - DNA, 15 bp, Homo sapiens
aggaggaaactgcag

SEQ ID NO: 1271675 - DNA, 15 bp, Homo sapiens
gaggaggaaactgca

SEQ ID NO: 1271676 - DNA, 15 bp, Homo sapiens
ggaggaggaaactgc

SEQ ID NO: 1271677 - DNA, 15 bp, Homo sapiens
gggaggaggaaactg

SEQ ID NO: 1271678 - DNA, 15 bp, Homo sapiens
agggaggaggaaact

SEQ ID NO: 1271679 - DNA, 15 bp, Homo sapiens
gagggaggaggaaac

SEQ ID NO: 1271680 - DNA, 15 bp, Homo sapiens
tgagggaggaggaaa

SEQ ID NO: 1271681 - DNA, 15 bp, Homo sapiens
atgagggaggaggaa

SEQ ID NO: 1271682 - DNA, 15 bp, Homo sapiens
catgagggaggagga

SEQ ID NO: 1271683 - DNA, 15 bp, Homo sapiens
ccatgagggaggagg

SEQ ID NO: 1271684 - DNA, 15 bp, Homo sapiens
cccatgagggaggag

SEQ ID NO: 1271685 - DNA, 15 bp, Homo sapiens
ccccatgagggagga

SEQ ID NO: 1271686 - DNA, 15 bp, Homo sapiens
accccatgagggagg

SEQ ID NO: 1271687 - DNA, 15 bp, Homo sapiens
gaccccatgagggag

SEQ ID NO: 1271688 - DNA, 15 bp, Homo sapiens
tgaccccatgaggga

SEQ ID NO: 1271689 - DNA, 15 bp, Homo sapiens
ttgaccccatgaggg

SEQ ID NO: 1271690 - DNA, 15 bp, Homo sapiens
tttgaccccatgagg

SEQ ID NO: 1271691 - DNA, 15 bp, Homo sapiens
ctttgaccccatgag

SEQ ID NO: 1271692 - DNA, 15 bp, Homo sapiens
actttgaccccatga

SEQ ID NO: 1271693 - DNA, 15 bp, Homo sapiens
gactttgaccccatg

SEQ ID NO: 1271694 - DNA, 15 bp, Homo sapiens
tgactttgaccccat

SEQ ID NO: 1271695 - DNA, 15 bp, Homo sapiens
ctgactttgacccca

SEQ ID NO: 1271696 - DNA, 15 bp, Homo sapiens
gctgactttgacccc

SEQ ID NO: 1271697 - DNA, 15 bp, Homo sapiens
tgctgactttgaccc

SEQ ID NO: 1271698 - DNA, 15 bp, Homo sapiens
ttgctgactttgacc

SEQ ID NO: 1271699 - DNA, 15 bp, Homo sapiens
gttgctgactttgac

SEQ ID NO: 1271700 - DNA, 15 bp, Homo sapiens
tgttgctgactttga

SEQ ID NO: 1271701 - DNA, 15 bp, Homo sapiens
ttgttgctgactttg

SEQ ID NO: 1271702 - DNA, 15 bp, Homo sapiens
cttgttgctgacttt

SEQ ID NO: 1271703 - DNA, 15 bp, Homo sapiens
tcttgttgctgactt

SEQ ID NO: 1271704 - DNA, 15 bp, Homo sapiens
gtcttgttgctgact

SEQ ID NO: 1271705 - DNA, 15 bp, Homo sapiens
ggtcttgttgctgac

SEQ ID NO: 1271706 - DNA, 15 bp, Homo sapiens
tggtcttgttgctga

SEQ ID NO: 1271707 - DNA, 15 bp, Homo sapiens
gtggtcttgttgctg

SEQ ID NO: 1271708 - DNA, 15 bp, Homo sapiens
tgtggtcttgttgct

SEQ ID NO: 1271709 - DNA, 15 bp, Homo sapiens
ctgtggtcttgttgc

SEQ ID NO: 1271710 - DNA, 15 bp, Homo sapiens
cctgtggtcttgttg

SEQ ID NO: 1271711 - DNA, 15 bp, Homo sapiens
gcctgtggtcttgtt

SEQ ID NO: 1271712 - DNA, 15 bp, Homo sapiens
tgcctgtggtcttgt

SEQ ID NO: 1271713 - DNA, 15 bp, Homo sapiens
ctgcctgtggtcttg

SEQ ID NO: 1271714 - DNA, 15 bp, Homo sapiens
cctgcctgtggtctt

SEQ ID NO: 1271715 - DNA, 15 bp, Homo sapiens
gcctgcctgtggtct

SEQ ID NO: 1271716 - DNA, 15 bp, Homo sapiens
tgcctgcctgtggtc

SEQ ID NO: 1271717 - DNA, 15 bp, Homo sapiens
ttgcctgcctgtggt

SEQ ID NO: 1271718 - DNA, 15 bp, Homo sapiens
attgcctgcctgtgg

SEQ ID NO: 1271719 - DNA, 15 bp, Homo sapiens
cattgcctgcctgtg

SEQ ID NO: 1271720 - DNA, 15 bp, Homo sapiens
gcattgcctgcctgt

SEQ ID NO: 1271721 - DNA, 15 bp, Homo sapiens
cgcattgcctgcctg

SEQ ID NO: 1271722 - DNA, 15 bp, Homo sapiens
ccgcattgcctgcct

SEQ ID NO: 1271723 - DNA, 15 bp, Homo sapiens
cccgcattgcctgcc

SEQ ID NO: 1271724 - DNA, 15 bp, Homo sapiens
gcccgcattgcctgc

SEQ ID NO: 1271725 - DNA, 15 bp, Homo sapiens
agcccgcattgcctg

SEQ ID NO: 1271726 - DNA, 15 bp, Homo sapiens
cagcccgcattgcct

SEQ ID NO: 1271727 - DNA, 15 bp, Homo sapiens
gcagcccgcattgcc

SEQ ID NO: 1271728 - DNA, 15 bp, Homo sapiens
agcagcccgcattgc

SEQ ID NO: 1271729 - DNA, 15 bp, Homo sapiens
gagcagcccgcattg

SEQ ID NO: 1271730 - DNA, 15 bp, Homo sapiens
ggagcagcccgcatt

SEQ ID NO: 1271731 - DNA, 15 bp, Homo sapiens
aggagcagcccgcat

SEQ ID NO: 1271732 - DNA, 15 bp, Homo sapiens
aaggagcagcccgca

SEQ ID NO: 1271733 - DNA, 15 bp, Homo sapiens
caaggagcagcccgc

SEQ ID NO: 1271734 - DNA, 15 bp, Homo sapiens
acaaggagcagcccg

SEQ ID NO: 1271735 - DNA, 15 bp, Homo sapiens
cacaaggagcagccc

SEQ ID NO: 1271736 - DNA, 15 bp, Homo sapiens
gcacaaggagcagcc

SEQ ID NO: 1271737 - DNA, 15 bp, Homo sapiens
tgcacaaggagcagc

SEQ ID NO: 1271738 - DNA, 15 bp, Homo sapiens
gtgcacaaggagcag

SEQ ID NO: 1271739 - DNA, 15 bp, Homo sapiens
cgtgcacaaggagca

SEQ ID NO: 1271740 - DNA, 15 bp, Homo sapiens
ccgtgcacaaggagc

SEQ ID NO: 1271741 - DNA, 15 bp, Homo sapiens
accgtgcacaaggag

SEQ ID NO: 1271742 - DNA, 15 bp, Homo sapiens
caccgtgcacaagga

SEQ ID NO: 1271743 - DNA, 15 bp, Homo sapiens
ccaccgtgcacaagg

SEQ ID NO: 1271744 - DNA, 15 bp, Homo sapiens
cccaccgtgcacaag

SEQ ID NO: 1271745 - DNA, 15 bp, Homo sapiens
gcccaccgtgcacaa

SEQ ID NO: 1271746 - DNA, 15 bp, Homo sapiens
agcccaccgtgcaca

SEQ ID NO: 1271747 - DNA, 15 bp, Homo sapiens
aagcccaccgtgcac

SEQ ID NO: 1271748 - DNA, 15 bp, Homo sapiens
caagcccaccgtgca

SEQ ID NO: 1271749 - DNA, 15 bp, Homo sapiens
ccaagcccaccgtgc

SEQ ID NO: 1271750 - DNA, 15 bp, Homo sapiens
gccaagcccaccgtg

SEQ ID NO: 1271751 - DNA, 15 bp, Homo sapiens
tgccaagcccaccgt

SEQ ID NO: 1271752 - DNA, 15 bp, Homo sapiens
ctgccaagcccaccg

SEQ ID NO: 1271753 - DNA, 15 bp, Homo sapiens
gctgccaagcccacc

SEQ ID NO: 1271754 - DNA, 15 bp, Homo sapiens
agctgccaagcccac

SEQ ID NO: 1271755 - DNA, 15 bp, Homo sapiens
cagctgccaagccca

SEQ ID NO: 1271756 - DNA, 15 bp, Homo sapiens
ccagctgccaagccc

SEQ ID NO: 1271757 - DNA, 15 bp, Homo sapiens
gccagctgccaagcc

SEQ ID NO: 1271758 - DNA, 15 bp, Homo sapiens
agccagctgccaagc

SEQ ID NO: 1271759 - DNA, 15 bp, Homo sapiens
aagccagctgccaag

SEQ ID NO: 1271760 - DNA, 15 bp, Homo sapiens
caagccagctgccaa

SEQ ID NO: 1271761 - DNA, 15 bp, Homo sapiens
ccaagccagctgcca

SEQ ID NO: 1271762 - DNA, 15 bp, Homo sapiens
gccaagccagctgcc

SEQ ID NO: 1271763 - DNA, 15 bp, Homo sapiens
cgccaagccagctgc

SEQ ID NO: 1271764 - DNA, 15 bp, Homo sapiens
acgccaagccagctg

SEQ ID NO: 1271765 - DNA, 15 bp, Homo sapiens
gacgccaagccagct

SEQ ID NO: 1271766 - DNA, 15 bp, Homo sapiens
agacgccaagccagc

SEQ ID NO: 1271767 - DNA, 15 bp, Homo sapiens
cagacgccaagccag

SEQ ID NO: 1271768 - DNA, 15 bp, Homo sapiens
gcagacgccaagcca

SEQ ID NO: 1271769 - DNA, 15 bp, Homo sapiens
ggcagacgccaagcc

SEQ ID NO: 1271770 - DNA, 15 bp, Homo sapiens
gggcagacgccaagc

SEQ ID NO: 1271771 - DNA, 15 bp, Homo sapiens
agggcagacgccaag

SEQ ID NO: 1271772 - DNA, 15 bp, Homo sapiens
cagggcagacgccaa

SEQ ID NO: 1271773 - DNA, 15 bp, Homo sapiens
acagggcagacgcca

SEQ ID NO: 1271774 - DNA, 15 bp, Homo sapiens
cacagggcagacgcc

SEQ ID NO: 1271775 - DNA, 15 bp, Homo sapiens
ccacagggcagacgc

SEQ ID NO: 1271776 - DNA, 15 bp, Homo sapiens
gccacagggcagacg

SEQ ID NO: 1271777 - DNA, 15 bp, Homo sapiens
ggccacagggcagac

SEQ ID NO: 1271778 - DNA, 15 bp, Homo sapiens
gggccacagggcaga

SEQ ID NO: 1271779 - DNA, 15 bp, Homo sapiens
ggggccacagggcag

SEQ ID NO: 1271780 - DNA, 15 bp, Homo sapiens
aggggccacagggca

SEQ ID NO: 1271781 - DNA, 15 bp, Homo sapiens
gaggggccacagggc

SEQ ID NO: 1271782 - DNA, 15 bp, Homo sapiens
agaggggccacaggg

SEQ ID NO: 1271783 - DNA, 15 bp, Homo sapiens
cagaggggccacagg

SEQ ID NO: 1271784 - DNA, 15 bp, Homo sapiens
acagaggggccacag

SEQ ID NO: 1271785 - DNA, 15 bp, Homo sapiens
cacagaggggccaca

SEQ ID NO: 1271786 - DNA, 15 bp, Homo sapiens
gcacagaggggccac

SEQ ID NO: 1271787 - DNA, 15 bp, Homo sapiens
tgcacagaggggcca

SEQ ID NO: 1271788 - DNA, 15 bp, Homo sapiens
ctgcacagaggggcc

SEQ ID NO: 1271789 - DNA, 15 bp, Homo sapiens
gctgcacagaggggc

SEQ ID NO: 1271790 - DNA, 15 bp, Homo sapiens
cgctgcacagagggg

SEQ ID NO: 1271791 - DNA, 15 bp, Homo sapiens
gcgctgcacagaggg

SEQ ID NO: 1271792 - DNA, 15 bp, Homo sapiens
cgcgctgcacagagg

SEQ ID NO: 1271793 - DNA, 15 bp, Homo sapiens
gcgcgctgcacagag

SEQ ID NO: 1271794 - DNA, 15 bp, Homo sapiens
agcgcgctgcacaga

SEQ ID NO: 1271795 - DNA, 15 bp, Homo sapiens
gagcgcgctgcacag

SEQ ID NO: 1271796 - DNA, 15 bp, Homo sapiens
tgagcgcgctgcaca

SEQ ID NO: 1271797 - DNA, 15 bp, Homo sapiens
atgagcgcgctgcac

SEQ ID NO: 1271798 - DNA, 15 bp, Homo sapiens
gatgagcgcgctgca

SEQ ID NO: 1271799 - DNA, 15 bp, Homo sapiens
cgatgagcgcgctgc

SEQ ID NO: 1271800 - DNA, 15 bp, Homo sapiens
ccgatgagcgcgctg

SEQ ID NO: 1271801 - DNA, 15 bp, Homo sapiens
accgatgagcgcgct

SEQ ID NO: 1271802 - DNA, 15 bp, Homo sapiens
caccgatgagcgcgc

SEQ ID NO: 1271803 - DNA, 15 bp, Homo sapiens
ccaccgatgagcgcg

SEQ ID NO: 1271804 - DNA, 15 bp, Homo sapiens
accaccgatgagcgc

SEQ ID NO: 1271805 - DNA, 15 bp, Homo sapiens
caccaccgatgagcg

SEQ ID NO: 1271806 - DNA, 15 bp, Homo sapiens
gcaccaccgatgagc

SEQ ID NO: 1271807 - DNA, 15 bp, Homo sapiens
ggcaccaccgatgag

SEQ ID NO: 1271808 - DNA, 15 bp, Homo sapiens
gggcaccaccgatga

SEQ ID NO: 1271809 - DNA, 15 bp, Homo sapiens
ggggcaccaccgatg

SEQ ID NO: 1271810 - DNA, 15 bp, Homo sapiens
cggggcaccaccgat

SEQ ID NO: 1271811 - DNA, 15 bp, Homo sapiens
tcggggcaccaccga

SEQ ID NO: 1271812 - DNA, 15 bp, Homo sapiens
ctcggggcaccaccg

SEQ ID NO: 1271813 - DNA, 15 bp, Homo sapiens
gctcggggcaccacc

SEQ ID NO: 1271814 - DNA, 15 bp, Homo sapiens
tgctcggggcaccac

SEQ ID NO: 1271815 - DNA, 15 bp, Homo sapiens
ttgctcggggcacca

SEQ ID NO: 1271816 - DNA, 15 bp, Homo sapiens
gttgctcggggcacc

SEQ ID NO: 1271817 - DNA, 15 bp, Homo sapiens
ggttgctcggggcac

SEQ ID NO: 1271818 - DNA, 15 bp, Homo sapiens
gggttgctcggggca

SEQ ID NO: 1271819 - DNA, 15 bp, Homo sapiens
ggggttgctcggggc

SEQ ID NO: 1271820 - DNA, 15 bp, Homo sapiens
cggggttgctcgggg

SEQ ID NO: 1271821 - DNA, 15 bp, Homo sapiens
gcggggttgctcggg

SEQ ID NO: 1271822 - DNA, 15 bp, Homo sapiens
agcggggttgctcgg

SEQ ID NO: 1271823 - DNA, 15 bp, Homo sapiens
cagcggggttgctcg

SEQ ID NO: 1271824 - DNA, 15 bp, Homo sapiens
gcagcggggttgctc

SEQ ID NO: 1271825 - DNA, 15 bp, Homo sapiens
cgcagcggggttgct

SEQ ID NO: 1271826 - DNA, 15 bp, Homo sapiens
gcgcagcggggttgc

SEQ ID NO: 1271827 - DNA, 15 bp, Homo sapiens
agcgcagcggggttg

SEQ ID NO: 1271828 - DNA, 15 bp, Homo sapiens
cagcgcagcggggtt

SEQ ID NO: 1271829 - DNA, 15 bp, Homo sapiens
gcagcgcagcggggt

SEQ ID NO: 1271830 - DNA, 15 bp, Homo sapiens
tgcagcgcagcgggg

SEQ ID NO: 1271831 - DNA, 15 bp, Homo sapiens
ctgcagcgcagcggg

SEQ ID NO: 1271832 - DNA, 15 bp, Homo sapiens
gctgcagcgcagcgg

SEQ ID NO: 1271833 - DNA, 15 bp, Homo sapiens
cgctgcagcgcagcg

SEQ ID NO: 1271834 - DNA, 15 bp, Homo sapiens
acgctgcagcgcagc

SEQ ID NO: 1271835 - DNA, 15 bp, Homo sapiens
cacgctgcagcgcag

SEQ ID NO: 1271836 - DNA, 15 bp, Homo sapiens
gcacgctgcagcgca

SEQ ID NO: 1271837 - DNA, 15 bp, Homo sapiens
agcacgctgcagcgc

SEQ ID NO: 1271838 - DNA, 15 bp, Homo sapiens
cagcacgctgcagcg

SEQ ID NO: 1271839 - DNA, 15 bp, Homo sapiens
tcagcacgctgcagc

SEQ ID NO: 1271840 - DNA, 15 bp, Homo sapiens
atcagcacgctgcag

SEQ ID NO: 1271841 - DNA, 15 bp, Homo sapiens
catcagcacgctgca

SEQ ID NO: 1271842 - DNA, 15 bp, Homo sapiens
tcatcagcacgctgc

SEQ ID NO: 1271843 - DNA, 15 bp, Homo sapiens
ctcatcagcacgctg

SEQ ID NO: 1271844 - DNA, 15 bp, Homo sapiens
gctcatcagcacgct

SEQ ID NO: 1271845 - DNA, 15 bp, Homo sapiens
tgctcatcagcacgc

SEQ ID NO: 1271846 - DNA, 15 bp, Homo sapiens
atgctcatcagcacg

SEQ ID NO: 1271847 - DNA, 15 bp, Homo sapiens
gatgctcatcagcac

SEQ ID NO: 1271848 - DNA, 15 bp, Homo sapiens
agatgctcatcagca

SEQ ID NO: 1271849 - DNA, 15 bp, Homo sapiens
cagatgctcatcagc

SEQ ID NO: 1271850 - DNA, 15 bp, Homo sapiens
gcagatgctcatcag

SEQ ID NO: 1271851 - DNA, 15 bp, Homo sapiens
tgcagatgctcatca

SEQ ID NO: 1271852 - DNA, 15 bp, Homo sapiens
gtgcagatgctcatc

SEQ ID NO: 1271853 - DNA, 15 bp, Homo sapiens
ggtgcagatgctcat

SEQ ID NO: 1271854 - DNA, 15 bp, Homo sapiens
gggtgcagatgctca

SEQ ID NO: 1271855 - DNA, 15 bp, Homo sapiens
cgggtgcagatgctc

SEQ ID NO: 1271856 - DNA, 15 bp, Homo sapiens
ccgggtgcagatgct

SEQ ID NO: 1271857 - DNA, 15 bp, Homo sapiens
cccgggtgcagatgc

SEQ ID NO: 1271858 - DNA, 15 bp, Homo sapiens
gcccgggtgcagatg

SEQ ID NO: 1271859 - DNA, 15 bp, Homo sapiens
cgcccgggtgcagat

SEQ ID NO: 1271860 - DNA, 15 bp, Homo sapiens
gcgcccgggtgcaga

SEQ ID NO: 1271861 - DNA, 15 bp, Homo sapiens
agcgcccgggtgcag

SEQ ID NO: 1271862 - DNA, 15 bp, Homo sapiens
gagcgcccgggtgca

SEQ ID NO: 1271863 - DNA, 15 bp, Homo sapiens
tgagcgcccgggtgc

SEQ ID NO: 1271864 - DNA, 15 bp, Homo sapiens
gtgagcgcccgggtg

SEQ ID NO: 1271865 - DNA, 15 bp, Homo sapiens
ggtgagcgcccgggt

SEQ ID NO: 1271866 - DNA, 15 bp, Homo sapiens
cggtgagcgcccggg

SEQ ID NO: 1271867 - DNA, 15 bp, Homo sapiens
tcggtgagcgcccgg

SEQ ID NO: 1271868 - DNA, 15 bp, Homo sapiens
gtcggtgagcgcccg

SEQ ID NO: 1271869 - DNA, 15 bp, Homo sapiens
tgtcggtgagcgccc

SEQ ID NO: 1271870 - DNA, 15 bp, Homo sapiens
gtgtcggtgagcgcc

SEQ ID NO: 1271871 - DNA, 15 bp, Homo sapiens
cgtgtcggtgagcgc

SEQ ID NO: 1271872 - DNA, 15 bp, Homo sapiens
gcgtgtcggtgagcg

SEQ ID NO: 1271873 - DNA, 15 bp, Homo sapiens
agcgtgtcggtgagc

SEQ ID NO: 1271874 - DNA, 15 bp, Homo sapiens
gagcgtgtcggtgag

SEQ ID NO: 1271875 - DNA, 15 bp, Homo sapiens
agagcgtgtcggtga

SEQ ID NO: 1271876 - DNA, 15 bp, Homo sapiens
gagagcgtgtcggtg

SEQ ID NO: 1271877 - DNA, 15 bp, Homo sapiens
ggagagcgtgtcggt

SEQ ID NO: 1271878 - DNA, 15 bp, Homo sapiens
tggagagcgtgtcgg

SEQ ID NO: 1271879 - DNA, 15 bp, Homo sapiens
gtggagagcgtgtcg

SEQ ID NO: 1271880 - DNA, 15 bp, Homo sapiens
ggtggagagcgtgtc

SEQ ID NO: 1271881 - DNA, 15 bp, Homo sapiens
gggtggagagcgtgt

SEQ ID NO: 1271882 - DNA, 15 bp, Homo sapiens
ggggtggagagcgtg

SEQ ID NO: 1271883 - DNA, 15 bp, Homo sapiens
gggggtggagagcgt

SEQ ID NO: 1271884 - DNA, 15 bp, Homo sapiens
agggggtggagagcg

SEQ ID NO: 1271885 - DNA, 15 bp, Homo sapiens
gagggggtggagagc

SEQ ID NO: 1271886 - DNA, 15 bp, Homo sapiens
cgagggggtggagag

SEQ ID NO: 1271887 - DNA, 15 bp, Homo sapiens
acgagggggtggaga

SEQ ID NO: 1271888 - DNA, 15 bp, Homo sapiens
gacgagggggtggag

SEQ ID NO: 1271889 - DNA, 15 bp, Homo sapiens
tgacgagggggtgga

SEQ ID NO: 1271890 - DNA, 15 bp, Homo sapiens
ctgacgagggggtgg

SEQ ID NO: 1271891 - DNA, 15 bp, Homo sapiens
gctgacgagggggtg

SEQ ID NO: 1271892 - DNA, 15 bp, Homo sapiens
ggctgacgagggggt

SEQ ID NO: 1271893 - DNA, 15 bp, Homo sapiens
aggctgacgaggggg

SEQ ID NO: 1271894 - DNA, 15 bp, Homo sapiens
gaggctgacgagggg

SEQ ID NO: 1271895 - DNA, 15 bp, Homo sapiens
ggaggctgacgaggg

SEQ ID NO: 1271896 - DNA, 15 bp, Homo sapiens
cggaggctgacgagg

SEQ ID NO: 1271897 - DNA, 15 bp, Homo sapiens
tcggaggctgacgag

SEQ ID NO: 1271898 - DNA, 15 bp, Homo sapiens
ctcggaggctgacga

SEQ ID NO: 1271899 - DNA, 15 bp, Homo sapiens
tctcggaggctgacg

SEQ ID NO: 1271900 - DNA, 15 bp, Homo sapiens
ttctcggaggctgac

SEQ ID NO: 1271901 - DNA, 15 bp, Homo sapiens
cttctcggaggctga

SEQ ID NO: 1271902 - DNA, 15 bp, Homo sapiens
gcttctcggaggctg

SEQ ID NO: 1271903 - DNA, 15 bp, Homo sapiens
tgcttctcggaggct

SEQ ID NO: 1271904 - DNA, 15 bp, Homo sapiens
gtgcttctcggaggc

SEQ ID NO: 1271905 - DNA, 15 bp, Homo sapiens
ggtgcttctcggagg

SEQ ID NO: 1271906 - DNA, 15 bp, Homo sapiens
gggtgcttctcggag

SEQ ID NO: 1271907 - DNA, 15 bp, Homo sapiens
cgggtgcttctcgga

SEQ ID NO: 1271908 - DNA, 15 bp, Homo sapiens
ccgggtgcttctcgg

SEQ ID NO: 1271909 - DNA, 15 bp, Homo sapiens
cccgggtgcttctcg

SEQ ID NO: 1271910 - DNA, 15 bp, Homo sapiens
ccccgggtgcttctc

SEQ ID NO: 1271911 - DNA, 15 bp, Homo sapiens
tccccgggtgcttct

SEQ ID NO: 1271912 - DNA, 15 bp, Homo sapiens
ttccccgggtgcttc

SEQ ID NO: 1271913 - DNA, 15 bp, Homo sapiens
gttccccgggtgctt

SEQ ID NO: 1271914 - DNA, 15 bp, Homo sapiens
ggttccccgggtgct

SEQ ID NO: 1271915 - DNA, 15 bp, Homo sapiens
aggttccccgggtgc

SEQ ID NO: 1271916 - DNA, 15 bp, Homo sapiens
taggttccccgggtg

SEQ ID NO: 1271917 - DNA, 15 bp, Homo sapiens
ttaggttccccgggt

SEQ ID NO: 1271918 - DNA, 15 bp, Homo sapiens
tttaggttccccggg

SEQ ID NO: 1271919 - DNA, 15 bp, Homo sapiens
ctttaggttccccgg

SEQ ID NO: 1271920 - DNA, 15 bp, Homo sapiens
gctttaggttccccg

SEQ ID NO: 1271921 - DNA, 15 bp, Homo sapiens
agctttaggttcccc

SEQ ID NO: 1271922 - DNA, 15 bp, Homo sapiens
gagctttaggttccc

SEQ ID NO: 1271923 - DNA, 15 bp, Homo sapiens
ggagctttaggttcc

SEQ ID NO: 1271924 - DNA, 15 bp, Homo sapiens
gggagctttaggttc

SEQ ID NO: 1271925 - DNA, 15 bp, Homo sapiens
agggagctttaggtt

SEQ ID NO: 1271926 - DNA, 15 bp, Homo sapiens
cagggagctttaggt

SEQ ID NO: 1271927 - DNA, 15 bp, Homo sapiens
ccagggagctttagg

SEQ ID NO: 1271928 - DNA, 15 bp, Homo sapiens
accagggagctttag

SEQ ID NO: 1271929 - DNA, 15 bp, Homo sapiens
caccagggagcttta

SEQ ID NO: 1271930 - DNA, 15 bp, Homo sapiens
ccaccagggagcttt

SEQ ID NO: 1271931 - DNA, 15 bp, Homo sapiens
cccaccagggagctt

SEQ ID NO: 1271932 - DNA, 15 bp, Homo sapiens
gcccaccagggagct

SEQ ID NO: 1271933 - DNA, 15 bp, Homo sapiens
ggcccaccagggagc

SEQ ID NO: 1271934 - DNA, 15 bp, Homo sapiens
tggcccaccagggag

SEQ ID NO: 1271935 - DNA, 15 bp, Homo sapiens
ttggcccaccaggga

SEQ ID NO: 1271936 - DNA, 15 bp, Homo sapiens
tttggcccaccaggg

SEQ ID NO: 1271937 - DNA, 15 bp, Homo sapiens
ctttggcccaccagg

SEQ ID NO: 1271938 - DNA, 15 bp, Homo sapiens
cctttggcccaccag

SEQ ID NO: 1271939 - DNA, 15 bp, Homo sapiens
gcctttggcccacca

SEQ ID NO: 1271940 - DNA, 15 bp, Homo sapiens
ggcctttggcccacc

SEQ ID NO: 1271941 - DNA, 15 bp, Homo sapiens
aggcctttggcccac

SEQ ID NO: 1271942 - DNA, 15 bp, Homo sapiens
gaggcctttggccca

SEQ ID NO: 1271943 - DNA, 15 bp, Homo sapiens
ggaggcctttggccc

SEQ ID NO: 1271944 - DNA, 15 bp, Homo sapiens
gggaggcctttggcc

SEQ ID NO: 1271945 - DNA, 15 bp, Homo sapiens
tgggaggcctttggc

SEQ ID NO: 1271946 - DNA, 15 bp, Homo sapiens
atgggaggcctttgg

SEQ ID NO: 1271947 - DNA, 15 bp, Homo sapiens
aatgggaggcctttg

SEQ ID NO: 1271948 - DNA, 15 bp, Homo sapiens
aaatgggaggccttt

SEQ ID NO: 1271949 - DNA, 15 bp, Homo sapiens
caaatgggaggcctt

SEQ ID NO: 1271950 - DNA, 15 bp, Homo sapiens
ccaaatgggaggcct

SEQ ID NO: 1271951 - DNA, 15 bp, Homo sapiens
tccaaatgggaggcc

SEQ ID NO: 1271952 - DNA, 15 bp, Homo sapiens
gtccaaatgggaggc

SEQ ID NO: 1271953 - DNA, 15 bp, Homo sapiens
agtccaaatgggagg

SEQ ID NO: 1271954 - DNA, 15 bp, Homo sapiens
cagtccaaatgggag

SEQ ID NO: 1271955 - DNA, 15 bp, Homo sapiens
ccagtccaaatggga

SEQ ID NO: 1271956 - DNA, 15 bp, Homo sapiens
cccagtccaaatggg

SEQ ID NO: 1271957 - DNA, 15 bp, Homo sapiens
ccccagtccaaatgg

SEQ ID NO: 1271958 - DNA, 15 bp, Homo sapiens
tccccagtccaaatg

SEQ ID NO: 1271959 - DNA, 15 bp, Homo sapiens
ctccccagtccaaat

SEQ ID NO: 1271960 - DNA, 15 bp, Homo sapiens
gctccccagtccaaa

SEQ ID NO: 1271961 - DNA, 15 bp, Homo sapiens
tgctccccagtccaa

SEQ ID NO: 1271962 - DNA, 15 bp, Homo sapiens
ttgctccccagtcca

SEQ ID NO: 1271963 - DNA, 15 bp, Homo sapiens
gttgctccccagtcc

SEQ ID NO: 1271964 - DNA, 15 bp, Homo sapiens
ggttgctccccagtc

SEQ ID NO: 1271965 - DNA, 15 bp, Homo sapiens
gggttgctccccagt

SEQ ID NO: 1271966 - DNA, 15 bp, Homo sapiens
ggggttgctccccag

SEQ ID NO: 1271967 - DNA, 15 bp, Homo sapiens
aggggttgctcccca

SEQ ID NO: 1271968 - DNA, 15 bp, Homo sapiens
caggggttgctcccc

SEQ ID NO: 1271969 - DNA, 15 bp, Homo sapiens
ccaggggttgctccc

SEQ ID NO: 1271970 - DNA, 15 bp, Homo sapiens
tccaggggttgctcc

SEQ ID NO: 1271971 - DNA, 15 bp, Homo sapiens
ctccaggggttgctc

SEQ ID NO: 1271972 - DNA, 15 bp, Homo sapiens
actccaggggttgct

SEQ ID NO: 1271973 - DNA, 15 bp, Homo sapiens
tactccaggggttgc

SEQ ID NO: 1271974 - DNA, 15 bp, Homo sapiens
ctactccaggggttg

SEQ ID NO: 1271975 - DNA, 15 bp, Homo sapiens
gctactccaggggtt

SEQ ID NO: 1271976 - DNA, 15 bp, Homo sapiens
cgctactccaggggt

SEQ ID NO: 1271977 - DNA, 15 bp, Homo sapiens
acgctactccagggg

SEQ ID NO: 1271978 - DNA, 15 bp, Homo sapiens
aacgctactccaggg

SEQ ID NO: 1271979 - DNA, 15 bp, Homo sapiens
gaacgctactccagg

SEQ ID NO: 1271980 - DNA, 15 bp, Homo sapiens
ggaacgctactccag

SEQ ID NO: 1271981 - DNA, 15 bp, Homo sapiens
aggaacgctactcca

SEQ ID NO: 1271982 - DNA, 15 bp, Homo sapiens
caggaacgctactcc

SEQ ID NO: 1271983 - DNA, 15 bp, Homo sapiens
tcaggaacgctactc

SEQ ID NO: 1271984 - DNA, 15 bp, Homo sapiens
ctcaggaacgctact

SEQ ID NO: 1271985 - DNA, 15 bp, Homo sapiens
tctcaggaacgctac

SEQ ID NO: 1271986 - DNA, 15 bp, Homo sapiens
ttctcaggaacgcta

SEQ ID NO: 1271987 - DNA, 15 bp, Homo sapiens
tttctcaggaacgct

SEQ ID NO: 1271988 - DNA, 15 bp, Homo sapiens
gtttctcaggaacgc

SEQ ID NO: 1271989 - DNA, 15 bp, Homo sapiens
tgtttctcaggaacg

SEQ ID NO: 1271990 - DNA, 15 bp, Homo sapiens
atgtttctcaggaac

SEQ ID NO: 1271991 - DNA, 15 bp, Homo sapiens
aatgtttctcaggaa

SEQ ID NO: 1271992 - DNA, 15 bp, Homo sapiens
gaatgtttctcagga

SEQ ID NO: 1271993 - DNA, 15 bp, Homo sapiens
agaatgtttctcagg

SEQ ID NO: 1271994 - DNA, 15 bp, Homo sapiens
tagaatgtttctcag

SEQ ID NO: 1271995 - DNA, 15 bp, Homo sapiens
ctagaatgtttctca

SEQ ID NO: 1271996 - DNA, 15 bp, Homo sapiens
gctagaatgtttctc

SEQ ID NO: 1271997 - DNA, 15 bp, Homo sapiens
tgctagaatgtttct

SEQ ID NO: 1271998 - DNA, 15 bp, Homo sapiens
ctgctagaatgtttc

SEQ ID NO: 1271999 - DNA, 15 bp, Homo sapiens
tctgctagaatgttt

SEQ ID NO: 1272000 - DNA, 15 bp, Homo sapiens
ttctgctagaatgtt

SEQ ID NO: 1272001 - DNA, 15 bp, Homo sapiens
cttctgctagaatgt

SEQ ID NO: 1272002 - DNA, 15 bp, Homo sapiens
ccttctgctagaatg

SEQ ID NO: 1272003 - DNA, 15 bp, Homo sapiens
cccttctgctagaat

SEQ ID NO: 1272004 - DNA, 15 bp, Homo sapiens
ccccttctgctagaa

SEQ ID NO: 1272005 - DNA, 15 bp, Homo sapiens
tccccttctgctaga

SEQ ID NO: 1272006 - DNA, 15 bp, Homo sapiens
ctccccttctgctag

SEQ ID NO: 1272007 - DNA, 15 bp, Homo sapiens
cctccccttctgcta

SEQ ID NO: 1272008 - DNA, 15 bp, Homo sapiens
ccctccccttctgct

SEQ ID NO: 1272009 - DNA, 15 bp, Homo sapiens
tccctccccttctgc

SEQ ID NO: 1272010 - DNA, 15 bp, Homo sapiens
gtccctccccttctg

SEQ ID NO: 1272011 - DNA, 15 bp, Homo sapiens
cgtccctccccttct

SEQ ID NO: 1272012 - DNA, 15 bp, Homo sapiens
gcgtccctccccttc

SEQ ID NO: 1272013 - DNA, 15 bp, Homo sapiens
cgcgtccctcccctt

SEQ ID NO: 1272014 - DNA, 15 bp, Homo sapiens
gcgcgtccctcccct

SEQ ID NO: 1272015 - DNA, 15 bp, Homo sapiens
tgcgcgtccctcccc

SEQ ID NO: 1272016 - DNA, 15 bp, Homo sapiens
ctgcgcgtccctccc

SEQ ID NO: 1272017 - DNA, 15 bp, Homo sapiens
tctgcgcgtccctcc

SEQ ID NO: 1272018 - DNA, 15 bp, Homo sapiens
ctctgcgcgtccctc

SEQ ID NO: 1272019 - DNA, 15 bp, Homo sapiens
cctctgcgcgtccct

SEQ ID NO: 1272020 - DNA, 15 bp, Homo sapiens
ccctctgcgcgtccc

SEQ ID NO: 1272021 - DNA, 15 bp, Homo sapiens
tccctctgcgcgtcc

SEQ ID NO: 1272022 - DNA, 15 bp, Homo sapiens
gtccctctgcgcgtc

SEQ ID NO: 1272023 - DNA, 15 bp, Homo sapiens
cgtccctctgcgcgt

SEQ ID NO: 1272024 - DNA, 15 bp, Homo sapiens
tcgtccctctgcgcg

SEQ ID NO: 1272025 - DNA, 15 bp, Homo sapiens
gtcgtccctctgcgc

SEQ ID NO: 1272026 - DNA, 15 bp, Homo sapiens
cgtcgtccctctgcg

SEQ ID NO: 1272027 - DNA, 15 bp, Homo sapiens
gcgtcgtccctctgc

SEQ ID NO: 1272028 - DNA, 15 bp, Homo sapiens
agcgtcgtccctctg

SEQ ID NO: 1272029 - DNA, 15 bp, Homo sapiens
aagcgtcgtccctct

SEQ ID NO: 1272030 - DNA, 15 bp, Homo sapiens
aaagcgtcgtccctc

SEQ ID NO: 1272031 - DNA, 15 bp, Homo sapiens
taaagcgtcgtccct

SEQ ID NO: 1272032 - DNA, 15 bp, Homo sapiens
ataaagcgtcgtccc

SEQ ID NO: 1272033 - DNA, 15 bp, Homo sapiens
aataaagcgtcgtcc

SEQ ID NO: 1272034 - DNA, 15 bp, Homo sapiens
aaataaagcgtcgtc

SEQ ID NO: 1272035 - DNA, 15 bp, Homo sapiens
gaaataaagcgtcgt

SEQ ID NO: 1272036 - DNA, 15 bp, Homo sapiens
agaaataaagcgtcg

SEQ ID NO: 1272037 - DNA, 15 bp, Homo sapiens
gagaaataaagcgtc

SEQ ID NO: 1272038 - DNA, 15 bp, Homo sapiens
agagaaataaagcgt

SEQ ID NO: 1272039 - DNA, 15 bp, Homo sapiens
cagagaaataaagcg

SEQ ID NO: 1272040 - DNA, 15 bp, Homo sapiens
gcagagaaataaagc

SEQ ID NO: 1272041 - DNA, 15 bp, Homo sapiens
ggcagagaaataaag

SEQ ID NO: 1272042 - DNA, 15 bp, Homo sapiens
tggcagagaaataaa

SEQ ID NO: 1272043 - DNA, 15 bp, Homo sapiens
ctggcagagaaataa

SEQ ID NO: 1272044 - DNA, 15 bp, Homo sapiens
gctggcagagaaata

SEQ ID NO: 1272045 - DNA, 15 bp, Homo sapiens
agctggcagagaaat

SEQ ID NO: 1272046 - DNA, 15 bp, Homo sapiens
aagctggcagagaaa

SEQ ID NO: 1272047 - DNA, 15 bp, Homo sapiens
gaagctggcagagaa

SEQ ID NO: 1272048 - DNA, 15 bp, Homo sapiens
tgaagctggcagaga

SEQ ID NO: 1272049 - DNA, 15 bp, Homo sapiens
atgaagctggcagag

SEQ ID NO: 1272050 - DNA, 15 bp, Homo sapiens
tatgaagctggcaga

SEQ ID NO: 1272051 - DNA, 15 bp, Homo sapiens
atatgaagctggcag

SEQ ID NO: 1272052 - DNA, 15 bp, Homo sapiens
tatatgaagctggca

SEQ ID NO: 1272053 - DNA, 15 bp, Homo sapiens
gtatatgaagctggc

SEQ ID NO: 1272054 - DNA, 15 bp, Homo sapiens
agtatatgaagctgg

SEQ ID NO: 1272055 - DNA, 15 bp, Homo sapiens
gagtatatgaagctg

SEQ ID NO: 1272056 - DNA, 15 bp, Homo sapiens
tgagtatatgaagct

SEQ ID NO: 1272057 - DNA, 15 bp, Homo sapiens
ttgagtatatgaagc

SEQ ID NO: 1272058 - DNA, 15 bp, Homo sapiens
tttgagtatatgaag

SEQ ID NO: 1272059 - DNA, 15 bp, Homo sapiens
ttttgagtatatgaa

SEQ ID NO: 1272060 - DNA, 15 bp, Homo sapiens
cttttgagtatatga

SEQ ID NO: 1272061 - DNA, 15 bp, Homo sapiens
ccttttgagtatatg

SEQ ID NO: 1272062 - DNA, 15 bp, Homo sapiens
accttttgagtatat

SEQ ID NO: 1272063 - DNA, 15 bp, Homo sapiens
aaccttttgagtata

SEQ ID NO: 1272064 - DNA, 15 bp, Homo sapiens
caaccttttgagtat

SEQ ID NO: 1272065 - DNA, 15 bp, Homo sapiens
ccaaccttttgagta

SEQ ID NO: 1272066 - DNA, 15 bp, Homo sapiens
gccaaccttttgagt

SEQ ID NO: 1272067 - DNA, 15 bp, Homo sapiens
tgccaaccttttgag

SEQ ID NO: 1272068 - DNA, 15 bp, Homo sapiens
ctgccaaccttttga

SEQ ID NO: 1272069 - DNA, 15 bp, Homo sapiens
gctgccaaccttttg

SEQ ID NO: 1272070 - DNA, 15 bp, Homo sapiens
cgctgccaacctttt

SEQ ID NO: 1272071 - DNA, 15 bp, Homo sapiens
cccgctgccaacctt

SEQ ID NO: 1272072 - DNA, 15 bp, Homo sapiens
ccccgctgccaacct

SEQ ID NO: 1272073 - DNA, 15 bp, Homo sapiens
accccgctgccaacc

SEQ ID NO: 1272074 - DNA, 15 bp, Homo sapiens
caccccgctgccaac

SEQ ID NO: 1272075 - DNA, 15 bp, Homo sapiens
gcaccccgctgccaa

SEQ ID NO: 1272076 - DNA, 15 bp, Homo sapiens
tgcaccccgctgcca

SEQ ID NO: 1272077 - DNA, 15 bp, Homo sapiens
ctgcaccccgctgcc

SEQ ID NO: 1272078 - DNA, 15 bp, Homo sapiens
actgcaccccgctgc

SEQ ID NO: 1272079 - DNA, 15 bp, Homo sapiens
cactgcaccccgctg

SEQ ID NO: 1272080 - DNA, 15 bp, Homo sapiens
ccactgcaccccgct

SEQ ID NO: 1272081 - DNA, 15 bp, Homo sapiens
gccactgcaccccgc

SEQ ID NO: 1272082 - DNA, 15 bp, Homo sapiens
agccactgcaccccg

SEQ ID NO: 1272083 - DNA, 15 bp, Homo sapiens
gagccactgcacccc

SEQ ID NO: 1272084 - DNA, 15 bp, Homo sapiens
ttgagccactgcacc

SEQ ID NO: 1272085 - DNA, 15 bp, Homo sapiens
cttgagccactgcac

SEQ ID NO: 1272086 - DNA, 15 bp, Homo sapiens
gcttgagccactgca

SEQ ID NO: 1272087 - DNA, 15 bp, Homo sapiens
ggcttgagccactgc

SEQ ID NO: 1272088 - DNA, 15 bp, Homo sapiens
gggcttgagccactg

SEQ ID NO: 1272089 - DNA, 15 bp, Homo sapiens
cgggcttgagccact

SEQ ID NO: 1272090 - DNA, 15 bp, Homo sapiens
acgggcttgagccac

SEQ ID NO: 1272091 - DNA, 15 bp, Homo sapiens
tacgggcttgagcca

SEQ ID NO: 1272092 - DNA, 15 bp, Homo sapiens
ttacgggcttgagcc

SEQ ID NO: 1272093 - DNA, 15 bp, Homo sapiens
attacgggcttgagc

SEQ ID NO: 1272094 - DNA, 15 bp, Homo sapiens
gattacgggcttgag

SEQ ID NO: 1272095 - DNA, 15 bp, Homo sapiens
tgattacgggcttga

SEQ ID NO: 1272096 - DNA, 15 bp, Homo sapiens
gtgattacgggcttg

SEQ ID NO: 1272097 - DNA, 15 bp, Homo sapiens
tgtgattacgggctt

SEQ ID NO: 1272098 - DNA, 15 bp, Homo sapiens
ctgtgattacgggct

SEQ ID NO: 1272099 - DNA, 15 bp, Homo sapiens
gctgtgattacgggc

SEQ ID NO: 1272100 - DNA, 15 bp, Homo sapiens
tgctgtgattacggg

SEQ ID NO: 1272101 - DNA, 15 bp, Homo sapiens
gtgctgtgattacgg

SEQ ID NO: 1272102 - DNA, 15 bp, Homo sapiens
agtgctgtgattacg

SEQ ID NO: 1272103 - DNA, 15 bp, Homo sapiens
aagtgctgtgattac

SEQ ID NO: 1272104 - DNA, 15 bp, Homo sapiens
aaagtgctgtgatta

SEQ ID NO: 1272105 - DNA, 15 bp, Homo sapiens
caaagtgctgtgatt

SEQ ID NO: 1272106 - DNA, 15 bp, Homo sapiens
tcaaagtgctgtgat

SEQ ID NO: 1272107 - DNA, 15 bp, Homo sapiens
ctcaaagtgctgtga

SEQ ID NO: 1272108 - DNA, 15 bp, Homo sapiens
tctcaaagtgctgtg

SEQ ID NO: 1272109 - DNA, 15 bp, Homo sapiens
ctctcaaagtgctgt

SEQ ID NO: 1272110 - DNA, 15 bp, Homo sapiens
ggcctctcaaagtgc

SEQ ID NO: 1272111 - DNA, 15 bp, Homo sapiens
cggcctctcaaagtg

SEQ ID NO: 1272112 - DNA, 15 bp, Homo sapiens
tcggcctctcaaagt

SEQ ID NO: 1272113 - DNA, 15 bp, Homo sapiens
ctcggcctctcaaag

SEQ ID NO: 1272114 - DNA, 15 bp, Homo sapiens
cctcggcctctcaaa

SEQ ID NO: 1272115 - DNA, 15 bp, Homo sapiens
gcctcggcctctcaa

SEQ ID NO: 1272116 - DNA, 15 bp, Homo sapiens
cgcctcggcctctca

SEQ ID NO: 1272117 - DNA, 15 bp, Homo sapiens
ccgcctcggcctctc

SEQ ID NO: 1272118 - DNA, 15 bp, Homo sapiens
cccgcctcggcctct

SEQ ID NO: 1272119 - DNA, 15 bp, Homo sapiens
cgatccgcccgcctc

SEQ ID NO: 1272120 - DNA, 15 bp, Homo sapiens
gcgatccgcccgcct

SEQ ID NO: 1272121 - DNA, 15 bp, Homo sapiens
cgcgatccgcccgcc

SEQ ID NO: 1272122 - DNA, 15 bp, Homo sapiens
tcgcgatccgcccgc

SEQ ID NO: 1272123 - DNA, 15 bp, Homo sapiens
ctcgcgatccgcccg

SEQ ID NO: 1272124 - DNA, 15 bp, Homo sapiens
cctcgcgatccgccc

SEQ ID NO: 1272125 - DNA, 15 bp, Homo sapiens
acctcgcgatccgcc

SEQ ID NO: 1272126 - DNA, 15 bp, Homo sapiens
gacctcgcgatccgc

SEQ ID NO: 1272127 - DNA, 15 bp, Homo sapiens
tgacctcgcgatccg

SEQ ID NO: 1272128 - DNA, 15 bp, Homo sapiens
ctgacctcgcgatcc

SEQ ID NO: 1272129 - DNA, 15 bp, Homo sapiens
cctgacctcgcgatc

SEQ ID NO: 1272130 - DNA, 15 bp, Homo sapiens
tcctgacctcgcgat

SEQ ID NO: 1272131 - DNA, 15 bp, Homo sapiens
ctcctgacctcgcga

SEQ ID NO: 1272132 - DNA, 15 bp, Homo sapiens
actcctgacctcgcg

SEQ ID NO: 1272133 - DNA, 15 bp, Homo sapiens
aactcctgacctcgc

SEQ ID NO: 1272134 - DNA, 15 bp, Homo sapiens
gggtctcaaactcct

SEQ ID NO: 1272135 - DNA, 15 bp, Homo sapiens
cgggtctcaaactcc

SEQ ID NO: 1272136 - DNA, 15 bp, Homo sapiens
gcgggtctcaaactc

SEQ ID NO: 1272137 - DNA, 15 bp, Homo sapiens
ggcgggtctcaaact

SEQ ID NO: 1272138 - DNA, 15 bp, Homo sapiens
aggcgggtctcaaac

SEQ ID NO: 1272139 - DNA, 15 bp, Homo sapiens
caggcgggtctcaaa

SEQ ID NO: 1272140 - DNA, 15 bp, Homo sapiens
ccaggcgggtctcaa

SEQ ID NO: 1272141 - DNA, 15 bp, Homo sapiens
gccaggcgggtctca

SEQ ID NO: 1272142 - DNA, 15 bp, Homo sapiens
ggccaggcgggtctc

SEQ ID NO: 1272143 - DNA, 15 bp, Homo sapiens
tggccaggcgggtct

SEQ ID NO: 1272144 - DNA, 15 bp, Homo sapiens
ttggccaggcgggtc

SEQ ID NO: 1272145 - DNA, 15 bp, Homo sapiens
gttggccaggcgggt

SEQ ID NO: 1272146 - DNA, 15 bp, Homo sapiens
tgttggccaggcggg

SEQ ID NO: 1272147 - DNA, 15 bp, Homo sapiens
atgttggccaggcgg

SEQ ID NO: 1272148 - DNA, 15 bp, Homo sapiens
tatgttggccaggcg

SEQ ID NO: 1272149 - DNA, 15 bp, Homo sapiens
gtatgttggccaggc

SEQ ID NO: 1272150 - DNA, 15 bp, Homo sapiens
agtatgttggccagg

SEQ ID NO: 1272151 - DNA, 15 bp, Homo sapiens
cagtatgttggccag

SEQ ID NO: 1272152 - DNA, 15 bp, Homo sapiens
tcagtatgttggcca

SEQ ID NO: 1272153 - DNA, 15 bp, Homo sapiens
ttcagtatgttggcc

SEQ ID NO: 1272154 - DNA, 15 bp, Homo sapiens
tttcagtatgttggc

SEQ ID NO: 1272155 - DNA, 15 bp, Homo sapiens
gtttcagtatgttgg

SEQ ID NO: 1272156 - DNA, 15 bp, Homo sapiens
ggtttcagtatgttg

SEQ ID NO: 1272157 - DNA, 15 bp, Homo sapiens
gggtttcagtatgtt

SEQ ID NO: 1272158 - DNA, 15 bp, Homo sapiens
ggggtttcagtatgt

SEQ ID NO: 1272159 - DNA, 15 bp, Homo sapiens
cggggtttcagtatg

SEQ ID NO: 1272160 - DNA, 15 bp, Homo sapiens
acggggtttcagtat

SEQ ID NO: 1272161 - DNA, 15 bp, Homo sapiens
gacggggtttcagta

SEQ ID NO: 1272162 - DNA, 15 bp, Homo sapiens
agacggggtttcagt

SEQ ID NO: 1272163 - DNA, 15 bp, Homo sapiens
gagacggggtttcag

SEQ ID NO: 1272164 - DNA, 15 bp, Homo sapiens
attagtagagacggg

SEQ ID NO: 1272165 - DNA, 15 bp, Homo sapiens
tattagtagagacgg

SEQ ID NO: 1272166 - DNA, 15 bp, Homo sapiens
ttattagtagagacg

SEQ ID NO: 1272167 - DNA, 15 bp, Homo sapiens
attattagtagagac

SEQ ID NO: 1272168 - DNA, 15 bp, Homo sapiens
tattattagtagaga

SEQ ID NO: 1272169 - DNA, 15 bp, Homo sapiens
gtattattagtagag

SEQ ID NO: 1272170 - DNA, 15 bp, Homo sapiens
tgtattattagtaga

SEQ ID NO: 1272171 - DNA, 15 bp, Homo sapiens
ttgtattattagtag

SEQ ID NO: 1272172 - DNA, 15 bp, Homo sapiens
tttgtattattagta

SEQ ID NO: 1272173 - DNA, 15 bp, Homo sapiens
ttttgtattattagt

SEQ ID NO: 1272174 - DNA, 15 bp, Homo sapiens
tttttgtattattag

SEQ ID NO: 1272175 - DNA, 15 bp, Homo sapiens
acaccaccacgcccg

SEQ ID NO: 1272176 - DNA, 15 bp, Homo sapiens
tcacaccaccacgcc

SEQ ID NO: 1272177 - DNA, 15 bp, Homo sapiens
ctcacaccaccacgc

SEQ ID NO: 1272178 - DNA, 15 bp, Homo sapiens
gctcacaccaccacg

SEQ ID NO: 1272179 - DNA, 15 bp, Homo sapiens
ggctcacaccaccac

SEQ ID NO: 1272180 - DNA, 15 bp, Homo sapiens
aggctcacaccacca

SEQ ID NO: 1272181 - DNA, 15 bp, Homo sapiens
caggctcacaccacc

SEQ ID NO: 1272182 - DNA, 15 bp, Homo sapiens
acaggctcacaccac

SEQ ID NO: 1272183 - DNA, 15 bp, Homo sapiens
tacaggctcacacca

SEQ ID NO: 1272184 - DNA, 15 bp, Homo sapiens
ctacaggctcacacc

SEQ ID NO: 1272185 - DNA, 15 bp, Homo sapiens
actacaggctcacac

SEQ ID NO: 1272186 - DNA, 15 bp, Homo sapiens
gactacaggctcaca

SEQ ID NO: 1272187 - DNA, 15 bp, Homo sapiens
ggactacaggctcac

SEQ ID NO: 1272188 - DNA, 15 bp, Homo sapiens
gggactacaggctca

SEQ ID NO: 1272189 - DNA, 15 bp, Homo sapiens
tgggactacaggctc

SEQ ID NO: 1272190 - DNA, 15 bp, Homo sapiens
ctgggactacaggct

SEQ ID NO: 1272191 - DNA, 15 bp, Homo sapiens
tgcctcacgagtagc

SEQ ID NO: 1272192 - DNA, 15 bp, Homo sapiens
ctgcctcacgagtag

SEQ ID NO: 1272193 - DNA, 15 bp, Homo sapiens
tctgcctcacgagta

SEQ ID NO: 1272194 - DNA, 15 bp, Homo sapiens
ctctgcctcacgagt

SEQ ID NO: 1272195 - DNA, 15 bp, Homo sapiens
cctctgcctcacgag

SEQ ID NO: 1272196 - DNA, 15 bp, Homo sapiens
gcctctgcctcacga

SEQ ID NO: 1272197 - DNA, 15 bp, Homo sapiens
ggcctctgcctcacg

SEQ ID NO: 1272198 - DNA, 15 bp, Homo sapiens
tggcctctgcctcac

SEQ ID NO: 1272199 - DNA, 15 bp, Homo sapiens
ctggcctctgcctca

SEQ ID NO: 1272200 - DNA, 15 bp, Homo sapiens
cctggcctctgcctc

SEQ ID NO: 1272201 - DNA, 15 bp, Homo sapiens
ccctggcctctgcct

SEQ ID NO: 1272202 - DNA, 15 bp, Homo sapiens
tccctggcctctgcc

SEQ ID NO: 1272203 - DNA, 15 bp, Homo sapiens
ttccctggcctctgc

SEQ ID NO: 1272204 - DNA, 15 bp, Homo sapiens
attccctggcctctg

SEQ ID NO: 1272205 - DNA, 15 bp, Homo sapiens
gattccctggcctct

SEQ ID NO: 1272206 - DNA, 15 bp, Homo sapiens
cgattccctggcctc

SEQ ID NO: 1272207 - DNA, 15 bp, Homo sapiens
gcgattccctggcct

SEQ ID NO: 1272208 - DNA, 15 bp, Homo sapiens
agcgattccctggcc

SEQ ID NO: 1272209 - DNA, 15 bp, Homo sapiens
aagcgattccctggc

SEQ ID NO: 1272210 - DNA, 15 bp, Homo sapiens
caagcgattccctgg

SEQ ID NO: 1272211 - DNA, 15 bp, Homo sapiens
tcaagcgattccctg

SEQ ID NO: 1272212 - DNA, 15 bp, Homo sapiens
ttcaagcgattccct

SEQ ID NO: 1272213 - DNA, 15 bp, Homo sapiens
cttcaagcgattccc

SEQ ID NO: 1272214 - DNA, 15 bp, Homo sapiens
gcttcaagcgattcc

SEQ ID NO: 1272215 - DNA, 15 bp, Homo sapiens
ggcttcaagcgattc

SEQ ID NO: 1272216 - DNA, 15 bp, Homo sapiens
cggcttcaagcgatt

SEQ ID NO: 1272217 - DNA, 15 bp, Homo sapiens
ccggcttcaagcgat

SEQ ID NO: 1272218 - DNA, 15 bp, Homo sapiens
tccggcttcaagcga

SEQ ID NO: 1272219 - DNA, 15 bp, Homo sapiens
ttccggcttcaagcg

SEQ ID NO: 1272220 - DNA, 15 bp, Homo sapiens
cttccggcttcaagc

SEQ ID NO: 1272221 - DNA, 15 bp, Homo sapiens
ccttccggcttcaag

SEQ ID NO: 1272222 - DNA, 15 bp, Homo sapiens
accttccggcttcaa

SEQ ID NO: 1272223 - DNA, 15 bp, Homo sapiens
caccttccggcttca

SEQ ID NO: 1272224 - DNA, 15 bp, Homo sapiens
ccaccttccggcttc

SEQ ID NO: 1272225 - DNA, 15 bp, Homo sapiens
tccaccttccggctt

SEQ ID NO: 1272226 - DNA, 15 bp, Homo sapiens
ctccaccttccggct

SEQ ID NO: 1272227 - DNA, 15 bp, Homo sapiens
cctccaccttccggc

SEQ ID NO: 1272228 - DNA, 15 bp, Homo sapiens
acctccaccttccgg

SEQ ID NO: 1272229 - DNA, 15 bp, Homo sapiens
aacctccaccttccg

SEQ ID NO: 1272230 - DNA, 15 bp, Homo sapiens
caacctccaccttcc

SEQ ID NO: 1272231 - DNA, 15 bp, Homo sapiens
gcaacctccaccttc

SEQ ID NO: 1272232 - DNA, 15 bp, Homo sapiens
tgcaacctccacctt

SEQ ID NO: 1272233 - DNA, 15 bp, Homo sapiens
ggcgatctcagctca

SEQ ID NO: 1272234 - DNA, 15 bp, Homo sapiens
gggcgatctcagctc

SEQ ID NO: 1272235 - DNA, 15 bp, Homo sapiens
ggggcgatctcagct

SEQ ID NO: 1272236 - DNA, 15 bp, Homo sapiens
tggggcgatctcagc

SEQ ID NO: 1272237 - DNA, 15 bp, Homo sapiens
gtggggcgatctcag

SEQ ID NO: 1272238 - DNA, 15 bp, Homo sapiens
agtggggcgatctca

SEQ ID NO: 1272239 - DNA, 15 bp, Homo sapiens
cagtggggcgatctc

SEQ ID NO: 1272240 - DNA, 15 bp, Homo sapiens
agcagtggggcgatc

SEQ ID NO: 1272241 - DNA, 15 bp, Homo sapiens
gagcagtggggcgat

SEQ ID NO: 1272242 - DNA, 15 bp, Homo sapiens
agagcagtggggcga

SEQ ID NO: 1272243 - DNA, 15 bp, Homo sapiens
gagagcagtggggcg

SEQ ID NO: 1272244 - DNA, 15 bp, Homo sapiens
ggagagcagtggggc

SEQ ID NO: 1272245 - DNA, 15 bp, Homo sapiens
tggagagcagtgggg

SEQ ID NO: 1272246 - DNA, 15 bp, Homo sapiens
ctggagagcagtggg

SEQ ID NO: 1272247 - DNA, 15 bp, Homo sapiens
acccaggctggagag

SEQ ID NO: 1272248 - DNA, 15 bp, Homo sapiens
cacccaggctggaga

SEQ ID NO: 1272249 - DNA, 15 bp, Homo sapiens
cttttttgagacgga

SEQ ID NO: 1272250 - DNA, 15 bp, Homo sapiens
tcttttttgagacgg

SEQ ID NO: 1272251 - DNA, 15 bp, Homo sapiens
ttcttttttgagacg

SEQ ID NO: 1272252 - DNA, 15 bp, Homo sapiens
ttttttcttttttga

SEQ ID NO: 1272253 - DNA, 15 bp, Homo sapiens
cactctttttttttt

SEQ ID NO: 1272254 - DNA, 15 bp, Homo sapiens
ccactcttttttttt

SEQ ID NO: 1272255 - DNA, 15 bp, Homo sapiens
gccactctttttttt

SEQ ID NO: 1272256 - DNA, 15 bp, Homo sapiens
tgccactcttttttt

SEQ ID NO: 1272257 - DNA, 15 bp, Homo sapiens
ttgccactctttttt

SEQ ID NO: 1272258 - DNA, 15 bp, Homo sapiens
cttgccactcttttt

SEQ ID NO: 1272259 - DNA, 15 bp, Homo sapiens
acttgccactctttt

SEQ ID NO: 1272260 - DNA, 15 bp, Homo sapiens
cacttgccactcttt

SEQ ID NO: 1272261 - DNA, 15 bp, Homo sapiens
ccacttgccactctt

SEQ ID NO: 1272262 - DNA, 15 bp, Homo sapiens
accacttgccactct

SEQ ID NO: 1272263 - DNA, 15 bp, Homo sapiens
caccacttgccactc

SEQ ID NO: 1272264 - DNA, 15 bp, Homo sapiens
gcaccacttgccact

SEQ ID NO: 1272265 - DNA, 15 bp, Homo sapiens
ggcaccacttgccac

SEQ ID NO: 1272266 - DNA, 15 bp, Homo sapiens
gggcaccacttgcca

SEQ ID NO: 1272267 - DNA, 15 bp, Homo sapiens
tgggcaccacttgcc

SEQ ID NO: 1272268 - DNA, 15 bp, Homo sapiens
atgggcaccacttgc

SEQ ID NO: 1272269 - DNA, 15 bp, Homo sapiens
catgggcaccacttg

SEQ ID NO: 1272270 - DNA, 15 bp, Homo sapiens
tcatgggcaccactt

SEQ ID NO: 1272271 - DNA, 15 bp, Homo sapiens
ctcatgggcaccact

SEQ ID NO: 1272272 - DNA, 15 bp, Homo sapiens
tctcatgggcaccac

SEQ ID NO: 1272273 - DNA, 15 bp, Homo sapiens
atctcatgggcacca

SEQ ID NO: 1272274 - DNA, 15 bp, Homo sapiens
tatctcatgggcacc

SEQ ID NO: 1272275 - DNA, 15 bp, Homo sapiens
ttatctcatgggcac

SEQ ID NO: 1272276 - DNA, 15 bp, Homo sapiens
tttatctcatgggca

SEQ ID NO: 1272277 - DNA, 15 bp, Homo sapiens
ctttatctcatgggc

SEQ ID NO: 1272278 - DNA, 15 bp, Homo sapiens
actttatctcatggg

SEQ ID NO: 1272279 - DNA, 15 bp, Homo sapiens
gactttatctcatgg

SEQ ID NO: 1272280 - DNA, 15 bp, Homo sapiens
agactttatctcatg

SEQ ID NO: 1272281 - DNA, 15 bp, Homo sapiens
cagactttatctcat

SEQ ID NO: 1272282 - DNA, 15 bp, Homo sapiens
gcagactttatctca

SEQ ID NO: 1272283 - DNA, 15 bp, Homo sapiens
tgcagactttatctc

SEQ ID NO: 1272284 - DNA, 15 bp, Homo sapiens
ttgcagactttatct

SEQ ID NO: 1272285 - DNA, 15 bp, Homo sapiens
tttgcagactttatc

SEQ ID NO: 1272286 - DNA, 15 bp, Homo sapiens
atttgcagactttat

SEQ ID NO: 1272287 - DNA, 15 bp, Homo sapiens
catttgcagacttta

SEQ ID NO: 1272288 - DNA, 15 bp, Homo sapiens
gcatttgcagacttt

SEQ ID NO: 1272289 - DNA, 15 bp, Homo sapiens
agcatttgcagactt

SEQ ID NO: 1272290 - DNA, 15 bp, Homo sapiens
aagcatttgcagact

SEQ ID NO: 1272291 - DNA, 15 bp, Homo sapiens
gaagcatttgcagac

SEQ ID NO: 1272292 - DNA, 15 bp, Homo sapiens
agaagcatttgcaga

SEQ ID NO: 1272293 - DNA, 15 bp, Homo sapiens
aagaagcatttgcag

SEQ ID NO: 1272294 - DNA, 15 bp, Homo sapiens
aaagaagcatttgca

SEQ ID NO: 1272295 - DNA, 15 bp, Homo sapiens
caaagaagcatttgc

SEQ ID NO: 1272296 - DNA, 15 bp, Homo sapiens
gcaaagaagcatttg

SEQ ID NO: 1272297 - DNA, 15 bp, Homo sapiens
tgcaaagaagcattt

SEQ ID NO: 1272298 - DNA, 15 bp, Homo sapiens
ctgcaaagaagcatt

SEQ ID NO: 1272299 - DNA, 15 bp, Homo sapiens
actgcaaagaagcat

SEQ ID NO: 1272300 - DNA, 15 bp, Homo sapiens
aactgcaaagaagca

SEQ ID NO: 1272301 - DNA, 15 bp, Homo sapiens
aaactgcaaagaagc

SEQ ID NO: 1272302 - DNA, 15 bp, Homo sapiens
taaactgcaaagaag

SEQ ID NO: 1272303 - DNA, 15 bp, Homo sapiens
ttaaactgcaaagaa

SEQ ID NO: 1272304 - DNA, 15 bp, Homo sapiens
tttaaactgcaaaga

SEQ ID NO: 1272305 - DNA, 15 bp, Homo sapiens
ttttaaactgcaaag

SEQ ID NO: 1272306 - DNA, 15 bp, Homo sapiens
tttttaaactgcaaa

SEQ ID NO: 1272307 - DNA, 15 bp, Homo sapiens
ctttttaaactgcaa

SEQ ID NO: 1272308 - DNA, 15 bp, Homo sapiens
cctttttaaactgca

SEQ ID NO: 1272309 - DNA, 15 bp, Homo sapiens
tcctttttaaactgc

SEQ ID NO: 1272310 - DNA, 15 bp, Homo sapiens
gtcctttttaaactg

SEQ ID NO: 1272311 - DNA, 15 bp, Homo sapiens
cgtcctttttaaact

SEQ ID NO: 1272312 - DNA, 15 bp, Homo sapiens
tcgtcctttttaaac

SEQ ID NO: 1272313 - DNA, 15 bp, Homo sapiens
gtcgtcctttttaaa

SEQ ID NO: 1272314 - DNA, 15 bp, Homo sapiens
cgtcgtcctttttaa

SEQ ID NO: 1272315 - DNA, 15 bp, Homo sapiens
tcgtcgtccttttta

SEQ ID NO: 1272316 - DNA, 15 bp, Homo sapiens
gtcgtcgtccttttt

SEQ ID NO: 1272317 - DNA, 15 bp, Homo sapiens
agtcgtcgtcctttt

SEQ ID NO: 1272318 - DNA, 15 bp, Homo sapiens
tagtcgtcgtccttt

SEQ ID NO: 1272319 - DNA, 15 bp, Homo sapiens
atagtcgtcgtcctt

SEQ ID NO: 1272320 - DNA, 15 bp, Homo sapiens
tatagtcgtcgtcct

SEQ ID NO: 1272321 - DNA, 15 bp, Homo sapiens
ttatagtcgtcgtcc

SEQ ID NO: 1272322 - DNA, 15 bp, Homo sapiens
tttatagtcgtcgtc

SEQ ID NO: 1272323 - DNA, 15 bp, Homo sapiens
gtttatagtcgtcgt

SEQ ID NO: 1272324 - DNA, 15 bp, Homo sapiens
ggtttatagtcgtcg

SEQ ID NO: 1272325 - DNA, 15 bp, Homo sapiens
gggtttatagtcgtc

SEQ ID NO: 1272326 - DNA, 15 bp, Homo sapiens
tgggtttatagtcgt

SEQ ID NO: 1272327 - DNA, 15 bp, Homo sapiens
ctgggtttatagtcg

SEQ ID NO: 1272328 - DNA, 15 bp, Homo sapiens
cctgggtttatagtc

SEQ ID NO: 1272329 - DNA, 15 bp, Homo sapiens
tcctgggtttatagt

SEQ ID NO: 1272330 - DNA, 15 bp, Homo sapiens
atcctgggtttatag

SEQ ID NO: 1272331 - DNA, 15 bp, Homo sapiens
gatcctgggtttata

SEQ ID NO: 1272332 - DNA, 15 bp, Homo sapiens
tgatcctgggtttat

SEQ ID NO: 1272333 - DNA, 15 bp, Homo sapiens
ctgatcctgggttta

SEQ ID NO: 1272334 - DNA, 15 bp, Homo sapiens
cctgatcctgggttt

SEQ ID NO: 1272335 - DNA, 15 bp, Homo sapiens
tcctgatcctgggtt

SEQ ID NO: 1272336 - DNA, 15 bp, Homo sapiens
gtcctgatcctgggt

SEQ ID NO: 1272337 - DNA, 15 bp, Homo sapiens
cgtcctgatcctggg

SEQ ID NO: 1272338 - DNA, 15 bp, Homo sapiens
tcgtcctgatcctgg

SEQ ID NO: 1272339 - DNA, 15 bp, Homo sapiens
gtcgtcctgatcctg

SEQ ID NO: 1272340 - DNA, 15 bp, Homo sapiens
cgtcgtcctgatcct

SEQ ID NO: 1272341 - DNA, 15 bp, Homo sapiens
acgtcgtcctgatcc

SEQ ID NO: 1272342 - DNA, 15 bp, Homo sapiens
aacgtcgtcctgatc

SEQ ID NO: 1272343 - DNA, 15 bp, Homo sapiens
taacgtcgtcctgat

SEQ ID NO: 1272344 - DNA, 15 bp, Homo sapiens
gtaacgtcgtcctga

SEQ ID NO: 1272345 - DNA, 15 bp, Homo sapiens
cgtaacgtcgtcctg

SEQ ID NO: 1272346 - DNA, 15 bp, Homo sapiens
gcgtaacgtcgtcct

SEQ ID NO: 1272347 - DNA, 15 bp, Homo sapiens
tgcgtaacgtcgtcc

SEQ ID NO: 1272348 - DNA, 15 bp, Homo sapiens
atgcgtaacgtcgtc

SEQ ID NO: 1272349 - DNA, 15 bp, Homo sapiens
tatgcgtaacgtcgt

SEQ ID NO: 1272350 - DNA, 15 bp, Homo sapiens
ctatgcgtaacgtcg

SEQ ID NO: 1272351 - DNA, 15 bp, Homo sapiens
tctatgcgtaacgtc

SEQ ID NO: 1272352 - DNA, 15 bp, Homo sapiens
atctatgcgtaacgt

SEQ ID NO: 1272353 - DNA, 15 bp, Homo sapiens
aatctatgcgtaacg

SEQ ID NO: 1272354 - DNA, 15 bp, Homo sapiens
aaatctatgcgtaac

SEQ ID NO: 1272355 - DNA, 15 bp, Homo sapiens
taaatctatgcgtaa

SEQ ID NO: 1272356 - DNA, 15 bp, Homo sapiens
ataaatctatgcgta

SEQ ID NO: 1272357 - DNA, 15 bp, Homo sapiens
aataaatctatgcgt

SEQ ID NO: 1272358 - DNA, 15 bp, Homo sapiens
gaataaatctatgcg

SEQ ID NO: 1272359 - DNA, 15 bp, Homo sapiens
agaataaatctatgc

SEQ ID NO: 1272360 - DNA, 15 bp, Homo sapiens
aagaataaatctatg

SEQ ID NO: 1272361 - DNA, 15 bp, Homo sapiens
caagaataaatctat

SEQ ID NO: 1272362 - DNA, 15 bp, Homo sapiens
tcaagaataaatcta

SEQ ID NO: 1272363 - DNA, 15 bp, Homo sapiens
gtcaagaataaatct

SEQ ID NO: 1272364 - DNA, 15 bp, Homo sapiens
ggtcaagaataaatc

SEQ ID NO: 1272365 - DNA, 15 bp, Homo sapiens
aggtcaagaataaat

SEQ ID NO: 1272366 - DNA, 15 bp, Homo sapiens
caggtcaagaataaa

SEQ ID NO: 1272367 - DNA, 15 bp, Homo sapiens
tcaggtcaagaataa

SEQ ID NO: 1272368 - DNA, 15 bp, Homo sapiens
gtcaggtcaagaata

SEQ ID NO: 1272369 - DNA, 15 bp, Homo sapiens
ggtcaggtcaagaat

SEQ ID NO: 1272370 - DNA, 15 bp, Homo sapiens
tggtcaggtcaagaa

SEQ ID NO: 1272371 - DNA, 15 bp, Homo sapiens
ttggtcaggtcaaga

SEQ ID NO: 1272372 - DNA, 15 bp, Homo sapiens
gttggtcaggtcaag

SEQ ID NO: 1272373 - DNA, 15 bp, Homo sapiens
cgttggtcaggtcaa

SEQ ID NO: 1272374 - DNA, 15 bp, Homo sapiens
tcgttggtcaggtca

SEQ ID NO: 1272375 - DNA, 15 bp, Homo sapiens
ctcgttggtcaggtc

SEQ ID NO: 1272376 - DNA, 15 bp, Homo sapiens
gctcgttggtcaggt

SEQ ID NO: 1272377 - DNA, 15 bp, Homo sapiens
agctcgttggtcagg

SEQ ID NO: 1272378 - DNA, 15 bp, Homo sapiens
gagctcgttggtcag

SEQ ID NO: 1272379 - DNA, 15 bp, Homo sapiens
agagctcgttggtca

SEQ ID NO: 1272380 - DNA, 15 bp, Homo sapiens
aagagctcgttggtc

SEQ ID NO: 1272381 - DNA, 15 bp, Homo sapiens
caagagctcgttggt

SEQ ID NO: 1272382 - DNA, 15 bp, Homo sapiens
tcaagagctcgttgg

SEQ ID NO: 1272383 - DNA, 15 bp, Homo sapiens
ttcaagagctcgttg

SEQ ID NO: 1272384 - DNA, 15 bp, Homo sapiens
tttcaagagctcgtt

SEQ ID NO: 1272385 - DNA, 15 bp, Homo sapiens
atttcaagagctcgt

SEQ ID NO: 1272386 - DNA, 15 bp, Homo sapiens
aatttcaagagctcg

SEQ ID NO: 1272387 - DNA, 15 bp, Homo sapiens
gaatttcaagagctc

SEQ ID NO: 1272388 - DNA, 15 bp, Homo sapiens
agaatttcaagagct

SEQ ID NO: 1272389 - DNA, 15 bp, Homo sapiens
gagaatttcaagagc

SEQ ID NO: 1272390 - DNA, 15 bp, Homo sapiens
agagaatttcaagag

SEQ ID NO: 1272391 - DNA, 15 bp, Homo sapiens
aagagaatttcaaga

SEQ ID NO: 1272392 - DNA, 15 bp, Homo sapiens
aaagagaatttcaag

SEQ ID NO: 1272393 - DNA, 15 bp, Homo sapiens
gcaaagagaatttca

SEQ ID NO: 1272394 - DNA, 15 bp, Homo sapiens
tgcaaagagaatttc

SEQ ID NO: 1272395 - DNA, 15 bp, Homo sapiens
ttgcaaagagaattt

SEQ ID NO: 1272396 - DNA, 15 bp, Homo sapiens
gttgcaaagagaatt

SEQ ID NO: 1272397 - DNA, 15 bp, Homo sapiens
agttgcaaagagaat

SEQ ID NO: 1272398 - DNA, 15 bp, Homo sapiens
tagttgcaaagagaa

SEQ ID NO: 1272399 - DNA, 15 bp, Homo sapiens
ctagttgcaaagaga

SEQ ID NO: 1272400 - DNA, 15 bp, Homo sapiens
cctagttgcaaagag

SEQ ID NO: 1272401 - DNA, 15 bp, Homo sapiens
acctagttgcaaaga

SEQ ID NO: 1272402 - DNA, 15 bp, Homo sapiens
gacctagttgcaaag

SEQ ID NO: 1272403 - DNA, 15 bp, Homo sapiens
cgacctagttgcaaa

SEQ ID NO: 1272404 - DNA, 15 bp, Homo sapiens
tcgacctagttgcaa

SEQ ID NO: 1272405 - DNA, 15 bp, Homo sapiens
gtcgacctagttgca

SEQ ID NO: 1272406 - DNA, 15 bp, Homo sapiens
agtcgacctagttgc

SEQ ID NO: 1272407 - DNA, 15 bp, Homo sapiens
cagtcgacctagttg

SEQ ID NO: 1272408 - DNA, 15 bp, Homo sapiens
acagtcgacctagtt

SEQ ID NO: 1272409 - DNA, 15 bp, Homo sapiens
cacagtcgacctagt

SEQ ID NO: 1272410 - DNA, 15 bp, Homo sapiens
tcacagtcgacctag

SEQ ID NO: 1272411 - DNA, 15 bp, Homo sapiens
ttcacagtcgaccta

SEQ ID NO: 1272412 - DNA, 15 bp, Homo sapiens
tttcacagtcgacct

SEQ ID NO: 1272413 - DNA, 15 bp, Homo sapiens
gtttcacagtcgacc

SEQ ID NO: 1272414 - DNA, 15 bp, Homo sapiens
agtttcacagtcgac

SEQ ID NO: 1272415 - DNA, 15 bp, Homo sapiens
cagtttcacagtcga

SEQ ID NO: 1272416 - DNA, 15 bp, Homo sapiens
gcagtttcacagtcg

SEQ ID NO: 1272417 - DNA, 15 bp, Homo sapiens
tgcagtttcacagtc

SEQ ID NO: 1272418 - DNA, 15 bp, Homo sapiens
ctgcagtttcacagt

SEQ ID NO: 1272419 - DNA, 15 bp, Homo sapiens
gctgcagtttcacag

SEQ ID NO: 1272420 - DNA, 15 bp, Homo sapiens
ggctgcagtttcaca

SEQ ID NO: 1272421 - DNA, 15 bp, Homo sapiens
tggctgcagtttcac

SEQ ID NO: 1272422 - DNA, 15 bp, Homo sapiens
ctggctgcagtttca

SEQ ID NO: 1272423 - DNA, 15 bp, Homo sapiens
actggctgcagtttc

SEQ ID NO: 1272424 - DNA, 15 bp, Homo sapiens
cactggctgcagttt

SEQ ID NO: 1272425 - DNA, 15 bp, Homo sapiens
acactggctgcagtt

SEQ ID NO: 1272426 - DNA, 15 bp, Homo sapiens
gacactggctgcagt

SEQ ID NO: 1272427 - DNA, 15 bp, Homo sapiens
ggacactggctgcag

SEQ ID NO: 1272428 - DNA, 15 bp, Homo sapiens
gggacactggctgca

SEQ ID NO: 1272429 - DNA, 15 bp, Homo sapiens
ggggacactggctgc

SEQ ID NO: 1272430 - DNA, 15 bp, Homo sapiens
tggggacactggctg

SEQ ID NO: 1272431 - DNA, 15 bp, Homo sapiens
ttggggacactggct

SEQ ID NO: 1272432 - DNA, 15 bp, Homo sapiens
tttggggacactggc

SEQ ID NO: 1272433 - DNA, 15 bp, Homo sapiens
gtttggggacactgg

SEQ ID NO: 1272434 - DNA, 15 bp, Homo sapiens
cgtttggggacactg

SEQ ID NO: 1272435 - DNA, 15 bp, Homo sapiens
gcgtttggggacact

SEQ ID NO: 1272436 - DNA, 15 bp, Homo sapiens
ggcgtttggggacac

SEQ ID NO: 1272437 - DNA, 15 bp, Homo sapiens
gggcgtttggggaca

SEQ ID NO: 1272438 - DNA, 15 bp, Homo sapiens
ggggcgtttggggac

SEQ ID NO: 1272439 - DNA, 15 bp, Homo sapiens
tggggcgtttgggga

SEQ ID NO: 1272440 - DNA, 15 bp, Homo sapiens
ttggggcgtttgggg

SEQ ID NO: 1272441 - DNA, 15 bp, Homo sapiens
cttggggcgtttggg

SEQ ID NO: 1272442 - DNA, 15 bp, Homo sapiens
ccttggggcgtttgg

SEQ ID NO: 1272443 - DNA, 15 bp, Homo sapiens
tccttggggcgtttg

SEQ ID NO: 1272444 - DNA, 15 bp, Homo sapiens
atccttggggcgttt

SEQ ID NO: 1272445 - DNA, 15 bp, Homo sapiens
tatccttggggcgtt

SEQ ID NO: 1272446 - DNA, 15 bp, Homo sapiens
ttatccttggggcgt

SEQ ID NO: 1272447 - DNA, 15 bp, Homo sapiens
cttatccttggggcg

SEQ ID NO: 1272448 - DNA, 15 bp, Homo sapiens
ccttatccttggggc

SEQ ID NO: 1272449 - DNA, 15 bp, Homo sapiens
gccttatccttgggg

SEQ ID NO: 1272450 - DNA, 15 bp, Homo sapiens
ggccttatccttggg

SEQ ID NO: 1272451 - DNA, 15 bp, Homo sapiens
aggccttatccttgg

SEQ ID NO: 1272452 - DNA, 15 bp, Homo sapiens
aaggccttatccttg

SEQ ID NO: 1272453 - DNA, 15 bp, Homo sapiens
aaaggccttatcctt

SEQ ID NO: 1272454 - DNA, 15 bp, Homo sapiens
taaaggccttatcct

SEQ ID NO: 1272455 - DNA, 15 bp, Homo sapiens
ataaaggccttatcc

SEQ ID NO: 1272456 - DNA, 15 bp, Homo sapiens
gataaaggccttatc

SEQ ID NO: 1272457 - DNA, 15 bp, Homo sapiens
tgataaaggccttat

SEQ ID NO: 1272458 - DNA, 15 bp, Homo sapiens
gtgataaaggcctta

SEQ ID NO: 1272459 - DNA, 15 bp, Homo sapiens
agtgataaaggcctt

SEQ ID NO: 1272460 - DNA, 15 bp, Homo sapiens
gagtgataaaggcct

SEQ ID NO: 1272461 - DNA, 15 bp, Homo sapiens
ggagtgataaaggcc

SEQ ID NO: 1272462 - DNA, 15 bp, Homo sapiens
cggagtgataaaggc

SEQ ID NO: 1272463 - DNA, 15 bp, Homo sapiens
tcggagtgataaagg

SEQ ID NO: 1272464 - DNA, 15 bp, Homo sapiens
gtcggagtgataaag

SEQ ID NO: 1272465 - DNA, 15 bp, Homo sapiens
cgtcggagtgataaa

SEQ ID NO: 1272466 - DNA, 15 bp, Homo sapiens
gcgtcggagtgataa

SEQ ID NO: 1272467 - DNA, 15 bp, Homo sapiens
tgcgtcggagtgata

SEQ ID NO: 1272468 - DNA, 15 bp, Homo sapiens
atgcgtcggagtgat

SEQ ID NO: 1272469 - DNA, 15 bp, Homo sapiens
gatgcgtcggagtga

SEQ ID NO: 1272470 - DNA, 15 bp, Homo sapiens
ggatgcgtcggagtg

SEQ ID NO: 1272471 - DNA, 15 bp, Homo sapiens
aggatgcgtcggagt

SEQ ID NO: 1272472 - DNA, 15 bp, Homo sapiens
gaggatgcgtcggag

SEQ ID NO: 1272473 - DNA, 15 bp, Homo sapiens
agaggatgcgtcgga

SEQ ID NO: 1272474 - DNA, 15 bp, Homo sapiens
gagaggatgcgtcgg

SEQ ID NO: 1272475 - DNA, 15 bp, Homo sapiens
agagaggatgcgtcg

SEQ ID NO: 1272476 - DNA, 15 bp, Homo sapiens
gagagaggatgcgtc

SEQ ID NO: 1272477 - DNA, 15 bp, Homo sapiens
agagagaggatgcgt

SEQ ID NO: 1272478 - DNA, 15 bp, Homo sapiens
cagagagaggatgcg

SEQ ID NO: 1272479 - DNA, 15 bp, Homo sapiens
gcagagagaggatgc

SEQ ID NO: 1272480 - DNA, 15 bp, Homo sapiens
agcagagagaggatg

SEQ ID NO: 1272481 - DNA, 15 bp, Homo sapiens
aagcagagagaggat

SEQ ID NO: 1272482 - DNA, 15 bp, Homo sapiens
aaagcagagagagga

SEQ ID NO: 1272483 - DNA, 15 bp, Homo sapiens
aaaagcagagagagg

SEQ ID NO: 1272484 - DNA, 15 bp, Homo sapiens
aaaaagcagagagag

SEQ ID NO: 1272485 - DNA, 15 bp, Homo sapiens
taaaaagcagagaga

SEQ ID NO: 1272486 - DNA, 15 bp, Homo sapiens
ttaaaaagcagagag

SEQ ID NO: 1272487 - DNA, 15 bp, Homo sapiens
tttaaaaagcagaga

SEQ ID NO: 1272488 - DNA, 15 bp, Homo sapiens
atttaaaaagcagag

SEQ ID NO: 1272489 - DNA, 15 bp, Homo sapiens
tatttaaaaagcaga

SEQ ID NO: 1272490 - DNA, 15 bp, Homo sapiens
ctatttaaaaagcag

SEQ ID NO: 1272491 - DNA, 15 bp, Homo sapiens
tctatttaaaaagca

SEQ ID NO: 1272492 - DNA, 15 bp, Homo sapiens
gtctatttaaaaagc

SEQ ID NO: 1272493 - DNA, 15 bp, Homo sapiens
agtctatttaaaaag

SEQ ID NO: 1272494 - DNA, 15 bp, Homo sapiens
aagtctatttaaaaa

SEQ ID NO: 1272495 - DNA, 15 bp, Homo sapiens
aaagtctatttaaaa

SEQ ID NO: 1272496 - DNA, 15 bp, Homo sapiens
aaaagtctatttaaa

SEQ ID NO: 1272497 - DNA, 15 bp, Homo sapiens
caaaagtctatttaa

SEQ ID NO: 1272498 - DNA, 15 bp, Homo sapiens
tcaaaagtctattta

SEQ ID NO: 1272499 - DNA, 15 bp, Homo sapiens
gtcaaaagtctattt

SEQ ID NO: 1272500 - DNA, 15 bp, Homo sapiens
agtcaaaagtctatt

SEQ ID NO: 1272501 - DNA, 15 bp, Homo sapiens
gagtcaaaagtctat

SEQ ID NO: 1272502 - DNA, 15 bp, Homo sapiens
cgagtcaaaagtcta

SEQ ID NO: 1272503 - DNA, 15 bp, Homo sapiens
ccgagtcaaaagtct

SEQ ID NO: 1272504 - DNA, 15 bp, Homo sapiens
gccgagtcaaaagtc

SEQ ID NO: 1272505 - DNA, 15 bp, Homo sapiens
ggccgagtcaaaagt

SEQ ID NO: 1272506 - DNA, 15 bp, Homo sapiens
tggccgagtcaaaag

SEQ ID NO: 1272507 - DNA, 15 bp, Homo sapiens
ctggccgagtcaaaa

SEQ ID NO: 1272508 - DNA, 15 bp, Homo sapiens
cctggccgagtcaaa

SEQ ID NO: 1272509 - DNA, 15 bp, Homo sapiens
gcctggccgagtcaa

SEQ ID NO: 1272510 - DNA, 15 bp, Homo sapiens
ggcctggccgagtca

SEQ ID NO: 1272511 - DNA, 15 bp, Homo sapiens
gggcctggccgagtc

SEQ ID NO: 1272512 - DNA, 15 bp, Homo sapiens
ggggcctggccgagt

SEQ ID NO: 1272513 - DNA, 15 bp, Homo sapiens
gggggcctggccgag

SEQ ID NO: 1272514 - DNA, 15 bp, Homo sapiens
agggggcctggccga

SEQ ID NO: 1272515 - DNA, 15 bp, Homo sapiens
cagggggcctggccg

SEQ ID NO: 1272516 - DNA, 15 bp, Homo sapiens
gcagggggcctggcc

SEQ ID NO: 1272517 - DNA, 15 bp, Homo sapiens
ggcagggggcctggc

SEQ ID NO: 1272518 - DNA, 15 bp, Homo sapiens
tggcagggggcctgg

SEQ ID NO: 1272519 - DNA, 15 bp, Homo sapiens
gtggcagggggcctg

SEQ ID NO: 1272520 - DNA, 15 bp, Homo sapiens
ggtggcagggggcct

SEQ ID NO: 1272521 - DNA, 15 bp, Homo sapiens
gggtggcagggggcc

SEQ ID NO: 1272522 - DNA, 15 bp, Homo sapiens
tgggtggcagggggc

SEQ ID NO: 1272523 - DNA, 15 bp, Homo sapiens
gtgggtggcaggggg

SEQ ID NO: 1272524 - DNA, 15 bp, Homo sapiens
ggtgggtggcagggg

SEQ ID NO: 1272525 - DNA, 15 bp, Homo sapiens
cggtgggtggcaggg

SEQ ID NO: 1272526 - DNA, 15 bp, Homo sapiens
gcggtgggtggcagg

SEQ ID NO: 1272527 - DNA, 15 bp, Homo sapiens
cgcggtgggtggcag

SEQ ID NO: 1272528 - DNA, 15 bp, Homo sapiens
gcgcggtgggtggca

SEQ ID NO: 1272529 - DNA, 15 bp, Homo sapiens
agcgcggtgggtggc

SEQ ID NO: 1272530 - DNA, 15 bp, Homo sapiens
cagcgcggtgggtgg

SEQ ID NO: 1272531 - DNA, 15 bp, Homo sapiens
tcagcgcggtgggtg

SEQ ID NO: 1272532 - DNA, 15 bp, Homo sapiens
gtcagcgcggtgggt

SEQ ID NO: 1272533 - DNA, 15 bp, Homo sapiens
ggtcagcgcggtggg

SEQ ID NO: 1272534 - DNA, 15 bp, Homo sapiens
gggtcagcgcggtgg

SEQ ID NO: 1272535 - DNA, 15 bp, Homo sapiens
agggtcagcgcggtg

SEQ ID NO: 1272536 - DNA, 15 bp, Homo sapiens
cagggtcagcgcggt

SEQ ID NO: 1272537 - DNA, 15 bp, Homo sapiens
gcagggtcagcgcgg

SEQ ID NO: 1272538 - DNA, 15 bp, Homo sapiens
ggcagggtcagcgcg

SEQ ID NO: 1272539 - DNA, 15 bp, Homo sapiens
aggcagggtcagcgc

SEQ ID NO: 1272540 - DNA, 15 bp, Homo sapiens
caggcagggtcagcg

SEQ ID NO: 1272541 - DNA, 15 bp, Homo sapiens
gcaggcagggtcagc

SEQ ID NO: 1272542 - DNA, 15 bp, Homo sapiens
cgcaggcagggtcag

SEQ ID NO: 1272543 - DNA, 15 bp, Homo sapiens
gcgcaggcagggtca

SEQ ID NO: 1272544 - DNA, 15 bp, Homo sapiens
agcgcaggcagggtc

SEQ ID NO: 1272545 - DNA, 15 bp, Homo sapiens
aagcgcaggcagggt

SEQ ID NO: 1272546 - DNA, 15 bp, Homo sapiens
caagcgcaggcaggg

SEQ ID NO: 1272547 - DNA, 15 bp, Homo sapiens
gcaagcgcaggcagg

SEQ ID NO: 1272548 - DNA, 15 bp, Homo sapiens
cgcaagcgcaggcag

SEQ ID NO: 1272549 - DNA, 15 bp, Homo sapiens
acgcaagcgcaggca

SEQ ID NO: 1272550 - DNA, 15 bp, Homo sapiens
gacgcaagcgcaggc

SEQ ID NO: 1272551 - DNA, 15 bp, Homo sapiens
ggacgcaagcgcagg

SEQ ID NO: 1272552 - DNA, 15 bp, Homo sapiens
gggacgcaagcgcag

SEQ ID NO: 1272553 - DNA, 15 bp, Homo sapiens
cgggacgcaagcgca

SEQ ID NO: 1272554 - DNA, 15 bp, Homo sapiens
gcgggacgcaagcgc

SEQ ID NO: 1272555 - DNA, 15 bp, Homo sapiens
cgcgggacgcaagcg

SEQ ID NO: 1272556 - DNA, 15 bp, Homo sapiens
acgcgggacgcaagc

SEQ ID NO: 1272557 - DNA, 15 bp, Homo sapiens
gacgcgggacgcaag

SEQ ID NO: 1272558 - DNA, 15 bp, Homo sapiens
ggacgcgggacgcaa

SEQ ID NO: 1272559 - DNA, 15 bp, Homo sapiens
gggacgcgggacgca

SEQ ID NO: 1272560 - DNA, 15 bp, Homo sapiens
cgggacgcgggacgc

SEQ ID NO: 1272561 - DNA, 15 bp, Homo sapiens
gcgggacgcgggacg

SEQ ID NO: 1272562 - DNA, 15 bp, Homo sapiens
tgcgggacgcgggac

SEQ ID NO: 1272563 - DNA, 15 bp, Homo sapiens
atgcgggacgcggga

SEQ ID NO: 1272564 - DNA, 15 bp, Homo sapiens
gatgcgggacgcggg

SEQ ID NO: 1272565 - DNA, 15 bp, Homo sapiens
ggatgcgggacgcgg

SEQ ID NO: 1272566 - DNA, 15 bp, Homo sapiens
cggatgcgggacgcg

SEQ ID NO: 1272567 - DNA, 15 bp, Homo sapiens
ccggatgcgggacgc

SEQ ID NO: 1272568 - DNA, 15 bp, Homo sapiens
cccggatgcgggacg

SEQ ID NO: 1272569 - DNA, 15 bp, Homo sapiens
ccccggatgcgggac

SEQ ID NO: 1272570 - DNA, 15 bp, Homo sapiens
cccccggatgcggga

SEQ ID NO: 1272571 - DNA, 15 bp, Homo sapiens
ccccccggatgcggg

SEQ ID NO: 1272572 - DNA, 15 bp, Homo sapiens
tccccccggatgcgg

SEQ ID NO: 1272573 - DNA, 15 bp, Homo sapiens
ctccccccggatgcg

SEQ ID NO: 1272574 - DNA, 15 bp, Homo sapiens
cctccccccggatgc

SEQ ID NO: 1272575 - DNA, 15 bp, Homo sapiens
gcctccccccggatg

SEQ ID NO: 1272576 - DNA, 15 bp, Homo sapiens
cgcctccccccggat

SEQ ID NO: 1272577 - DNA, 15 bp, Homo sapiens
ccgcctccccccgga

SEQ ID NO: 1272578 - DNA, 15 bp, Homo sapiens
gccgcctccccccgg

SEQ ID NO: 1272579 - DNA, 15 bp, Homo sapiens
cgccgcctccccccg

SEQ ID NO: 1272580 - DNA, 15 bp, Homo sapiens
ccgccgcctcccccc

SEQ ID NO: 1272581 - DNA, 15 bp, Homo sapiens
cccgccgcctccccc

SEQ ID NO: 1272582 - DNA, 15 bp, Homo sapiens
gcccgccgcctcccc

SEQ ID NO: 1272583 - DNA, 15 bp, Homo sapiens
ggcccgccgcctccc

SEQ ID NO: 1272584 - DNA, 15 bp, Homo sapiens
gggcccgccgcctcc

SEQ ID NO: 1272585 - DNA, 15 bp, Homo sapiens
cgggcccgccgcctc

SEQ ID NO: 1272586 - DNA, 15 bp, Homo sapiens
ccgggcccgccgcct

SEQ ID NO: 1272587 - DNA, 15 bp, Homo sapiens
cccgggcccgccgcc

SEQ ID NO: 1272588 - DNA, 15 bp, Homo sapiens
acccgggcccgccgc

SEQ ID NO: 1272589 - DNA, 15 bp, Homo sapiens
gacccgggcccgccg

SEQ ID NO: 1272590 - DNA, 15 bp, Homo sapiens
agacccgggcccgcc

SEQ ID NO: 1272591 - DNA, 15 bp, Homo sapiens
gagacccgggcccgc

SEQ ID NO: 1272592 - DNA, 15 bp, Homo sapiens
agagacccgggcccg

SEQ ID NO: 1272593 - DNA, 15 bp, Homo sapiens
cagagacccgggccc

SEQ ID NO: 1272594 - DNA, 15 bp, Homo sapiens
ccagagacccgggcc

SEQ ID NO: 1272595 - DNA, 15 bp, Homo sapiens
cccagagacccgggc

SEQ ID NO: 1272596 - DNA, 15 bp, Homo sapiens
ccccagagacccggg

SEQ ID NO: 1272597 - DNA, 15 bp, Homo sapiens
gccccagagacccgg

SEQ ID NO: 1272598 - DNA, 15 bp, Homo sapiens
agccccagagacccg

SEQ ID NO: 1272599 - DNA, 15 bp, Homo sapiens
cagccccagagaccc

SEQ ID NO: 1272600 - DNA, 15 bp, Homo sapiens
ccagccccagagacc

SEQ ID NO: 1272601 - DNA, 15 bp, Homo sapiens
gccagccccagagac

SEQ ID NO: 1272602 - DNA, 15 bp, Homo sapiens
ggccagccccagaga

SEQ ID NO: 1272603 - DNA, 15 bp, Homo sapiens
gggccagccccagag

SEQ ID NO: 1272604 - DNA, 15 bp, Homo sapiens
tgggccagccccaga

SEQ ID NO: 1272605 - DNA, 15 bp, Homo sapiens
atgggccagccccag

SEQ ID NO: 1272606 - DNA, 15 bp, Homo sapiens
aatgggccagcccca

SEQ ID NO: 1272607 - DNA, 15 bp, Homo sapiens
aaatgggccagcccc

SEQ ID NO: 1272608 - DNA, 15 bp, Homo sapiens
taaatgggccagccc

SEQ ID NO: 1272609 - DNA, 15 bp, Homo sapiens
gtaaatgggccagcc

SEQ ID NO: 1272610 - DNA, 15 bp, Homo sapiens
agtaaatgggccagc

SEQ ID NO: 1272611 - DNA, 15 bp, Homo sapiens
aagtaaatgggccag

SEQ ID NO: 1272612 - DNA, 15 bp, Homo sapiens
taagtaaatgggcca

SEQ ID NO: 1272613 - DNA, 15 bp, Homo sapiens
ctaagtaaatgggcc

SEQ ID NO: 1272614 - DNA, 15 bp, Homo sapiens
actaagtaaatgggc

SEQ ID NO: 1272615 - DNA, 15 bp, Homo sapiens
aactaagtaaatggg

SEQ ID NO: 1272616 - DNA, 15 bp, Homo sapiens
aaactaagtaaatgg

SEQ ID NO: 1272617 - DNA, 15 bp, Homo sapiens
aaaactaagtaaatg

SEQ ID NO: 1272618 - DNA, 15 bp, Homo sapiens
caaaactaagtaaat

SEQ ID NO: 1272619 - DNA, 15 bp, Homo sapiens
acaaaactaagtaaa

SEQ ID NO: 1272620 - DNA, 15 bp, Homo sapiens
aacaaaactaagtaa

SEQ ID NO: 1272621 - DNA, 15 bp, Homo sapiens
aaacaaaactaagta

SEQ ID NO: 1272622 - DNA, 15 bp, Homo sapiens
aaaacaaaactaagt

SEQ ID NO: 1272623 - DNA, 15 bp, Homo sapiens
aaaaacaaaactaag

SEQ ID NO: 1272624 - DNA, 15 bp, Homo sapiens
caaaaacaaaactaa

SEQ ID NO: 1272625 - DNA, 15 bp, Homo sapiens
acaaaaacaaaacta

SEQ ID NO: 1272626 - DNA, 15 bp, Homo sapiens
aacaaaaacaaaact

SEQ ID NO: 1272627 - DNA, 15 bp, Homo sapiens
caacaaaaacaaaac

SEQ ID NO: 1272628 - DNA, 15 bp, Homo sapiens
gcaacaaaaacaaaa

SEQ ID NO: 1272629 - DNA, 15 bp, Homo sapiens
tgcaacaaaaacaaa

SEQ ID NO: 1272630 - DNA, 15 bp, Homo sapiens
atgcaacaaaaacaa

SEQ ID NO: 1272631 - DNA, 15 bp, Homo sapiens
aatgcaacaaaaaca

SEQ ID NO: 1272632 - DNA, 15 bp, Homo sapiens
aaatgcaacaaaaac

SEQ ID NO: 1272633 - DNA, 15 bp, Homo sapiens
caaatgcaacaaaaa

SEQ ID NO: 1272634 - DNA, 15 bp, Homo sapiens
gcaaatgcaacaaaa

SEQ ID NO: 1272635 - DNA, 15 bp, Homo sapiens
agcaaatgcaacaaa

SEQ ID NO: 1272636 - DNA, 15 bp, Homo sapiens
aagcaaatgcaacaa

SEQ ID NO: 1272637 - DNA, 15 bp, Homo sapiens
aaagcaaatgcaaca

SEQ ID NO: 1272638 - DNA, 15 bp, Homo sapiens
aaaagcaaatgcaac

SEQ ID NO: 1272639 - DNA, 15 bp, Homo sapiens
caaaagcaaatgcaa

SEQ ID NO: 1272640 - DNA, 15 bp, Homo sapiens
ccaaaagcaaatgca

SEQ ID NO: 1272641 - DNA, 15 bp, Homo sapiens
accaaaagcaaatgc

SEQ ID NO: 1272642 - DNA, 15 bp, Homo sapiens
caccaaaagcaaatg

SEQ ID NO: 1272643 - DNA, 15 bp, Homo sapiens
tcaccaaaagcaaat

SEQ ID NO: 1272644 - DNA, 15 bp, Homo sapiens
gtcaccaaaagcaaa

SEQ ID NO: 1272645 - DNA, 15 bp, Homo sapiens
tgtcaccaaaagcaa

SEQ ID NO: 1272646 - DNA, 15 bp, Homo sapiens
gtgtcaccaaaagca

SEQ ID NO: 1272647 - DNA, 15 bp, Homo sapiens
agtgtcaccaaaagc

SEQ ID NO: 1272648 - DNA, 15 bp, Homo sapiens
gagtgtcaccaaaag

SEQ ID NO: 1272649 - DNA, 15 bp, Homo sapiens
ggagtgtcaccaaaa

SEQ ID NO: 1272650 - DNA, 15 bp, Homo sapiens
gggagtgtcaccaaa

SEQ ID NO: 1272651 - DNA, 15 bp, Homo sapiens
agggagtgtcaccaa

SEQ ID NO: 1272652 - DNA, 15 bp, Homo sapiens
aagggagtgtcacca

SEQ ID NO: 1272653 - DNA, 15 bp, Homo sapiens
aaagggagtgtcacc

SEQ ID NO: 1272654 - DNA, 15 bp, Homo sapiens
aaaagggagtgtcac

SEQ ID NO: 1272655 - DNA, 15 bp, Homo sapiens
aaaaagggagtgtca

SEQ ID NO: 1272656 - DNA, 15 bp, Homo sapiens
caaaaagggagtgtc

SEQ ID NO: 1272657 - DNA, 15 bp, Homo sapiens
tcaaaaagggagtgt

SEQ ID NO: 1272658 - DNA, 15 bp, Homo sapiens
atcaaaaagggagtg

SEQ ID NO: 1272659 - DNA, 15 bp, Homo sapiens
tatcaaaaagggagt

SEQ ID NO: 1272660 - DNA, 15 bp, Homo sapiens
atatcaaaaagggag

SEQ ID NO: 1272661 - DNA, 15 bp, Homo sapiens
aatatcaaaaaggga

SEQ ID NO: 1272662 - DNA, 15 bp, Homo sapiens
gaatatcaaaaaggg

SEQ ID NO: 1272663 - DNA, 15 bp, Homo sapiens
ggaatatcaaaaagg

SEQ ID NO: 1272664 - DNA, 15 bp, Homo sapiens
tggaatatcaaaaag

SEQ ID NO: 1272665 - DNA, 15 bp, Homo sapiens
gtggaatatcaaaaa

SEQ ID NO: 1272666 - DNA, 15 bp, Homo sapiens
tgtggaatatcaaaa

SEQ ID NO: 1272667 - DNA, 15 bp, Homo sapiens
atgtggaatatcaaa

SEQ ID NO: 1272668 - DNA, 15 bp, Homo sapiens
tatgtggaatatcaa

SEQ ID NO: 1272669 - DNA, 15 bp, Homo sapiens
atatgtggaatatca

SEQ ID NO: 1272670 - DNA, 15 bp, Homo sapiens
tatatgtggaatatc

SEQ ID NO: 1272671 - DNA, 15 bp, Homo sapiens
ttatatgtggaatat

SEQ ID NO: 1272672 - DNA, 15 bp, Homo sapiens
tttatatgtggaata

SEQ ID NO: 1272673 - DNA, 15 bp, Homo sapiens
atttatatgtggaat

SEQ ID NO: 1272674 - DNA, 15 bp, Homo sapiens
catttatatgtggaa

SEQ ID NO: 1272675 - DNA, 15 bp, Homo sapiens
tcatttatatgtgga

SEQ ID NO: 1272676 - DNA, 15 bp, Homo sapiens
ctcatttatatgtgg

SEQ ID NO: 1272677 - DNA, 15 bp, Homo sapiens
cctcatttatatgtg

SEQ ID NO: 1272678 - DNA, 15 bp, Homo sapiens
gcctcatttatatgt

SEQ ID NO: 1272679 - DNA, 15 bp, Homo sapiens
tgcctcatttatatg

SEQ ID NO: 1272680 - DNA, 15 bp, Homo sapiens
ttgcctcatttatat

SEQ ID NO: 1272681 - DNA, 15 bp, Homo sapiens
attgcctcatttata

SEQ ID NO: 1272682 - DNA, 15 bp, Homo sapiens
tattgcctcatttat

SEQ ID NO: 1272683 - DNA, 15 bp, Homo sapiens
ttattgcctcattta

SEQ ID NO: 1272684 - DNA, 15 bp, Homo sapiens
attattgcctcattt

SEQ ID NO: 1272685 - DNA, 15 bp, Homo sapiens
aattattgcctcatt

SEQ ID NO: 1272686 - DNA, 15 bp, Homo sapiens
aaattattgcctcat

SEQ ID NO: 1272687 - DNA, 15 bp, Homo sapiens
aaaattattgcctca

SEQ ID NO: 1272688 - DNA, 15 bp, Homo sapiens
gaaaattattgcctc

SEQ ID NO: 1272689 - DNA, 15 bp, Homo sapiens
agaaaattattgcct

SEQ ID NO: 1272690 - DNA, 15 bp, Homo sapiens
aagaaaattattgcc

SEQ ID NO: 1272691 - DNA, 15 bp, Homo sapiens
aaagaaaattattgc

SEQ ID NO: 1272692 - DNA, 15 bp, Homo sapiens
gaaagaaaattattg

SEQ ID NO: 1272693 - DNA, 15 bp, Homo sapiens
agaaagaaaattatt

SEQ ID NO: 1272694 - DNA, 15 bp, Homo sapiens
tagaaagaaaattat

SEQ ID NO: 1272695 - DNA, 15 bp, Homo sapiens
atagaaagaaaatta

SEQ ID NO: 1272696 - DNA, 15 bp, Homo sapiens
catagaaagaaaatt

SEQ ID NO: 1272697 - DNA, 15 bp, Homo sapiens
gacatagaaagaaaa

SEQ ID NO: 1272698 - DNA, 15 bp, Homo sapiens
agacatagaaagaaa

SEQ ID NO: 1272699 - DNA, 15 bp, Homo sapiens
cagacatagaaagaa

SEQ ID NO: 1272700 - DNA, 15 bp, Homo sapiens
gcagacatagaaaga

SEQ ID NO: 1272701 - DNA, 15 bp, Homo sapiens
agcagacatagaaag

SEQ ID NO: 1272702 - DNA, 15 bp, Homo sapiens
aagcagacatagaaa

SEQ ID NO: 1272703 - DNA, 15 bp, Homo sapiens
taagcagacatagaa

SEQ ID NO: 1272704 - DNA, 15 bp, Homo sapiens
ataagcagacataga

SEQ ID NO: 1272705 - DNA, 15 bp, Homo sapiens
aataagcagacatag

SEQ ID NO: 1272706 - DNA, 15 bp, Homo sapiens
aaataagcagacata

SEQ ID NO: 1272707 - DNA, 15 bp, Homo sapiens
gaaataagcagacat

SEQ ID NO: 1272708 - DNA, 15 bp, Homo sapiens
tgaaataagcagaca

SEQ ID NO: 1272709 - DNA, 15 bp, Homo sapiens
gtgaaataagcagac

SEQ ID NO: 1272710 - DNA, 15 bp, Homo sapiens
agtgaaataagcaga

SEQ ID NO: 1272711 - DNA, 15 bp, Homo sapiens
aagtgaaataagcag

SEQ ID NO: 1272712 - DNA, 15 bp, Homo sapiens
taagtgaaataagca

SEQ ID NO: 1272713 - DNA, 15 bp, Homo sapiens
tatgctaagtgaaat

SEQ ID NO: 1272714 - DNA, 15 bp, Homo sapiens
ccattatgctaagtg

SEQ ID NO: 1272715 - DNA, 15 bp, Homo sapiens
accattatgctaagt

SEQ ID NO: 1272716 - DNA, 15 bp, Homo sapiens
gaccattatgctaag

SEQ ID NO: 1272717 - DNA, 15 bp, Homo sapiens
agaccattatgctaa

SEQ ID NO: 1272718 - DNA, 15 bp, Homo sapiens
gagaccattatgcta

SEQ ID NO: 1272719 - DNA, 15 bp, Homo sapiens
ggagaccattatgct

SEQ ID NO: 1272720 - DNA, 15 bp, Homo sapiens
gggagaccattatgc

SEQ ID NO: 1272721 - DNA, 15 bp, Homo sapiens
agggagaccattatg

SEQ ID NO: 1272722 - DNA, 15 bp, Homo sapiens
cagggagaccattat

SEQ ID NO: 1272723 - DNA, 15 bp, Homo sapiens
acagggagaccatta

SEQ ID NO: 1272724 - DNA, 15 bp, Homo sapiens
gacagggagaccatt

SEQ ID NO: 1272725 - DNA, 15 bp, Homo sapiens
ggacagggagaccat

SEQ ID NO: 1272726 - DNA, 15 bp, Homo sapiens
tggacagggagacca

SEQ ID NO: 1272727 - DNA, 15 bp, Homo sapiens
gtggacagggagacc

SEQ ID NO: 1272728 - DNA, 15 bp, Homo sapiens
ggtggacagggagac

SEQ ID NO: 1272729 - DNA, 15 bp, Homo sapiens
aggtggacagggaga

SEQ ID NO: 1272730 - DNA, 15 bp, Homo sapiens
gaggtggacagggag

SEQ ID NO: 1272731 - DNA, 15 bp, Homo sapiens
cgaggtggacaggga

SEQ ID NO: 1272732 - DNA, 15 bp, Homo sapiens
ccgaggtggacaggg

SEQ ID NO: 1272733 - DNA, 15 bp, Homo sapiens
gccgaggtggacagg

SEQ ID NO: 1272734 - DNA, 15 bp, Homo sapiens
agccgaggtggacag

SEQ ID NO: 1272735 - DNA, 15 bp, Homo sapiens
gagccgaggtggaca

SEQ ID NO: 1272736 - DNA, 15 bp, Homo sapiens
ggagccgaggtggac

SEQ ID NO: 1272737 - DNA, 15 bp, Homo sapiens
gggagccgaggtgga

SEQ ID NO: 1272738 - DNA, 15 bp, Homo sapiens
cgggagccgaggtgg

SEQ ID NO: 1272739 - DNA, 15 bp, Homo sapiens
gcgggagccgaggtg

SEQ ID NO: 1272740 - DNA, 15 bp, Homo sapiens
cgcgggagccgaggt

SEQ ID NO: 1272741 - DNA, 15 bp, Homo sapiens
gcgcgggagccgagg

SEQ ID NO: 1272742 - DNA, 15 bp, Homo sapiens
cgcgcgggagccgag

SEQ ID NO: 1272743 - DNA, 15 bp, Homo sapiens
ccgcgcgggagccga

SEQ ID NO: 1272744 - DNA, 15 bp, Homo sapiens
cccgcgcgggagccg

SEQ ID NO: 1272745 - DNA, 15 bp, Homo sapiens
ccccgcgcgggagcc

SEQ ID NO: 1272746 - DNA, 15 bp, Homo sapiens
tccccgcgcgggagc

SEQ ID NO: 1272747 - DNA, 15 bp, Homo sapiens
ctccccgcgcgggag

SEQ ID NO: 1272748 - DNA, 15 bp, Homo sapiens
cctccccgcgcggga

SEQ ID NO: 1272749 - DNA, 15 bp, Homo sapiens
tcctccccgcgcggg

SEQ ID NO: 1272750 - DNA, 15 bp, Homo sapiens
ctcctccccgcgcgg

SEQ ID NO: 1272751 - DNA, 15 bp, Homo sapiens
cctcctccccgcgcg

SEQ ID NO: 1272752 - DNA, 15 bp, Homo sapiens
ccctcctccccgcgc

SEQ ID NO: 1272753 - DNA, 15 bp, Homo sapiens
cccctcctccccgcg

SEQ ID NO: 1272754 - DNA, 15 bp, Homo sapiens
gcccctcctccccgc

SEQ ID NO: 1272755 - DNA, 15 bp, Homo sapiens
tgcccctcctccccg

SEQ ID NO: 1272756 - DNA, 15 bp, Homo sapiens
ttgcccctcctcccc

SEQ ID NO: 1272757 - DNA, 15 bp, Homo sapiens
cttgcccctcctccc

SEQ ID NO: 1272758 - DNA, 15 bp, Homo sapiens
ccttgcccctcctcc

SEQ ID NO: 1272759 - DNA, 15 bp, Homo sapiens
cccttgcccctcctc

SEQ ID NO: 1272760 - DNA, 15 bp, Homo sapiens
gcccttgcccctcct

SEQ ID NO: 1272761 - DNA, 15 bp, Homo sapiens
ggcccttgcccctcc

SEQ ID NO: 1272762 - DNA, 15 bp, Homo sapiens
gggcccttgcccctc

SEQ ID NO: 1272763 - DNA, 15 bp, Homo sapiens
agggcccttgcccct

SEQ ID NO: 1272764 - DNA, 15 bp, Homo sapiens
gagggcccttgcccc

SEQ ID NO: 1272765 - DNA, 15 bp, Homo sapiens
ggagggcccttgccc

SEQ ID NO: 1272766 - DNA, 15 bp, Homo sapiens
cggagggcccttgcc

SEQ ID NO: 1272767 - DNA, 15 bp, Homo sapiens
gcggagggcccttgc

SEQ ID NO: 1272768 - DNA, 15 bp, Homo sapiens
ggcggagggcccttg

SEQ ID NO: 1272769 - DNA, 15 bp, Homo sapiens
gggcggagggccctt

SEQ ID NO: 1272770 - DNA, 15 bp, Homo sapiens
cgggcggagggccct

SEQ ID NO: 1272771 - DNA, 15 bp, Homo sapiens
ccgggcggagggccc

SEQ ID NO: 1272772 - DNA, 15 bp, Homo sapiens
cccgggcggagggcc

SEQ ID NO: 1272773 - DNA, 15 bp, Homo sapiens
gcccgggcggagggc

SEQ ID NO: 1272774 - DNA, 15 bp, Homo sapiens
ggcccgggcggaggg

SEQ ID NO: 1272775 - DNA, 15 bp, Homo sapiens
gggcccgggcggagg

SEQ ID NO: 1272776 - DNA, 15 bp, Homo sapiens
ggggcccgggcggag

SEQ ID NO: 1272777 - DNA, 15 bp, Homo sapiens
cggggcccgggcgga

SEQ ID NO: 1272778 - DNA, 15 bp, Homo sapiens
gcggggcccgggcgg

SEQ ID NO: 1272779 - DNA, 15 bp, Homo sapiens
ggcggggcccgggcg

SEQ ID NO: 1272780 - DNA, 15 bp, Homo sapiens
aggcggggcccgggc

SEQ ID NO: 1272781 - DNA, 15 bp, Homo sapiens
gaggcggggcccggg

SEQ ID NO: 1272782 - DNA, 15 bp, Homo sapiens
ggaggcggggcccgg

SEQ ID NO: 1272783 - DNA, 15 bp, Homo sapiens
gggaggcggggcccg

SEQ ID NO: 1272784 - DNA, 15 bp, Homo sapiens
ggggaggcggggccc

SEQ ID NO: 1272785 - DNA, 15 bp, Homo sapiens
cggggaggcggggcc

SEQ ID NO: 1272786 - DNA, 15 bp, Homo sapiens
gcggggaggcggggc

SEQ ID NO: 1272787 - DNA, 15 bp, Homo sapiens
cgcggggaggcgggg

SEQ ID NO: 1272788 - DNA, 15 bp, Homo sapiens
gcgcggggaggcggg

SEQ ID NO: 1272789 - DNA, 15 bp, Homo sapiens
cgcgcggggaggcgg

SEQ ID NO: 1272790 - DNA, 15 bp, Homo sapiens
gcgcgcggggaggcg

SEQ ID NO: 1272791 - DNA, 15 bp, Homo sapiens
ggcgcgcggggaggc

SEQ ID NO: 1272792 - DNA, 15 bp, Homo sapiens
cggcgcgcggggagg

SEQ ID NO: 1272793 - DNA, 15 bp, Homo sapiens
gcggcgcgcggggag

SEQ ID NO: 1272794 - DNA, 15 bp, Homo sapiens
agcggcgcgcgggga

SEQ ID NO: 1272795 - DNA, 15 bp, Homo sapiens
cagcggcgcgcgggg

SEQ ID NO: 1272796 - DNA, 15 bp, Homo sapiens
gcagcggcgcgcggg

SEQ ID NO: 1272797 - DNA, 15 bp, Homo sapiens
ggcagcggcgcgcgg

SEQ ID NO: 1272798 - DNA, 15 bp, Homo sapiens
tggcagcggcgcgcg

SEQ ID NO: 1272799 - DNA, 15 bp, Homo sapiens
gtggcagcggcgcgc

SEQ ID NO: 1272800 - DNA, 15 bp, Homo sapiens
ggtggcagcggcgcg

SEQ ID NO: 1272801 - DNA, 15 bp, Homo sapiens
cggtggcagcggcgc

SEQ ID NO: 1272802 - DNA, 15 bp, Homo sapiens
gcggtggcagcggcg

SEQ ID NO: 1272803 - DNA, 15 bp, Homo sapiens
ggcggtggcagcggc

SEQ ID NO: 1272804 - DNA, 15 bp, Homo sapiens
gggcggtggcagcgg

SEQ ID NO: 1272805 - DNA, 15 bp, Homo sapiens
ggggcggtggcagcg

SEQ ID NO: 1272806 - DNA, 15 bp, Homo sapiens
cggggcggtggcagc

SEQ ID NO: 1272807 - DNA, 15 bp, Homo sapiens
gcggggcggtggcag

SEQ ID NO: 1272808 - DNA, 15 bp, Homo sapiens
tgcggggcggtggca

SEQ ID NO: 1272809 - DNA, 15 bp, Homo sapiens
gtgcggggcggtggc

SEQ ID NO: 1272810 - DNA, 15 bp, Homo sapiens
ggtgcggggcggtgg

SEQ ID NO: 1272811 - DNA, 15 bp, Homo sapiens
aggtgcggggcggtg

SEQ ID NO: 1272812 - DNA, 15 bp, Homo sapiens
aaggtgcggggcggt

SEQ ID NO: 1272813 - DNA, 15 bp, Homo sapiens
aaaggtgcggggcgg

SEQ ID NO: 1272814 - DNA, 15 bp, Homo sapiens
aaaaggtgcggggcg

SEQ ID NO: 1272815 - DNA, 15 bp, Homo sapiens
aaaaaggtgcggggc

SEQ ID NO: 1272816 - DNA, 15 bp, Homo sapiens
aaaaaaggtgcgggg

SEQ ID NO: 1272817 - DNA, 15 bp, Homo sapiens
aaaaaaaggtgcggg

SEQ ID NO: 1272818 - DNA, 15 bp, Homo sapiens
caaaaaaaggtgcgg

SEQ ID NO: 1272819 - DNA, 15 bp, Homo sapiens
tcaaaaaaaggtgcg

SEQ ID NO: 1272820 - DNA, 15 bp, Homo sapiens
gtcaaaaaaaggtgc

SEQ ID NO: 1272821 - DNA, 15 bp, Homo sapiens
agtcaaaaaaaggtg

SEQ ID NO: 1272822 - DNA, 15 bp, Homo sapiens
aagtcaaaaaaaggt

SEQ ID NO: 1272823 - DNA, 15 bp, Homo sapiens
aaagtcaaaaaaagg

SEQ ID NO: 1272824 - DNA, 15 bp, Homo sapiens
aaaagtcaaaaaaag

SEQ ID NO: 1272825 - DNA, 15 bp, Homo sapiens
aaaaagtcaaaaaaa

SEQ ID NO: 1272826 - DNA, 15 bp, Homo sapiens
taaaaagtcaaaaaa

SEQ ID NO: 1272827 - DNA, 15 bp, Homo sapiens
ttaaaaagtcaaaaa

SEQ ID NO: 1272828 - DNA, 15 bp, Homo sapiens
attaaaaagtcaaaa

SEQ ID NO: 1272829 - DNA, 15 bp, Homo sapiens
tattaaaaagtcaaa

SEQ ID NO: 1272830 - DNA, 15 bp, Homo sapiens
ttattaaaaagtcaa

SEQ ID NO: 1272831 - DNA, 15 bp, Homo sapiens
attattaaaaagtca

SEQ ID NO: 1272832 - DNA, 15 bp, Homo sapiens
cattattaaaaagtc

SEQ ID NO: 1272833 - DNA, 15 bp, Homo sapiens
gcattattaaaaagt

SEQ ID NO: 1272834 - DNA, 15 bp, Homo sapiens
agcattattaaaaag

SEQ ID NO: 1272835 - DNA, 15 bp, Homo sapiens
gagcattattaaaaa

SEQ ID NO: 1272836 - DNA, 15 bp, Homo sapiens
tgagcattattaaaa

SEQ ID NO: 1272837 - DNA, 15 bp, Homo sapiens
atgagcattattaaa

SEQ ID NO: 1272838 - DNA, 15 bp, Homo sapiens
aatgagcattattaa

SEQ ID NO: 1272839 - DNA, 15 bp, Homo sapiens
gaatgagcattatta

SEQ ID NO: 1272840 - DNA, 15 bp, Homo sapiens
agaatgagcattatt

SEQ ID NO: 1272841 - DNA, 15 bp, Homo sapiens
cagaatgagcattat

SEQ ID NO: 1272842 - DNA, 15 bp, Homo sapiens
tcagaatgagcatta

SEQ ID NO: 1272843 - DNA, 15 bp, Homo sapiens
gtcagaatgagcatt

SEQ ID NO: 1272844 - DNA, 15 bp, Homo sapiens
agtcagaatgagcat

SEQ ID NO: 1272845 - DNA, 15 bp, Homo sapiens
cagtcagaatgagca

SEQ ID NO: 1272846 - DNA, 15 bp, Homo sapiens
acagtcagaatgagc

SEQ ID NO: 1272847 - DNA, 15 bp, Homo sapiens
cacagtcagaatgag

SEQ ID NO: 1272848 - DNA, 15 bp, Homo sapiens
tcacagtcagaatga

SEQ ID NO: 1272849 - DNA, 15 bp, Homo sapiens
atcacagtcagaatg

SEQ ID NO: 1272850 - DNA, 15 bp, Homo sapiens
tatcacagtcagaat

SEQ ID NO: 1272851 - DNA, 15 bp, Homo sapiens
ttatcacagtcagaa

SEQ ID NO: 1272852 - DNA, 15 bp, Homo sapiens
cttatcacagtcaga

SEQ ID NO: 1272853 - DNA, 15 bp, Homo sapiens
ccttatcacagtcag

SEQ ID NO: 1272854 - DNA, 15 bp, Homo sapiens
accttatcacagtca

SEQ ID NO: 1272855 - DNA, 15 bp, Homo sapiens
caccttatcacagtc

SEQ ID NO: 1272856 - DNA, 15 bp, Homo sapiens
ccaccttatcacagt

SEQ ID NO: 1272857 - DNA, 15 bp, Homo sapiens
accaccttatcacag

SEQ ID NO: 1272858 - DNA, 15 bp, Homo sapiens
taccaccttatcaca

SEQ ID NO: 1272859 - DNA, 15 bp, Homo sapiens
ataccaccttatcac

SEQ ID NO: 1272860 - DNA, 15 bp, Homo sapiens
gataccaccttatca

SEQ ID NO: 1272861 - DNA, 15 bp, Homo sapiens
agataccaccttatc

SEQ ID NO: 1272862 - DNA, 15 bp, Homo sapiens
gagataccaccttat

SEQ ID NO: 1272863 - DNA, 15 bp, Homo sapiens
tgagataccacctta

SEQ ID NO: 1272864 - DNA, 15 bp, Homo sapiens
atgagataccacctt

SEQ ID NO: 1272865 - DNA, 15 bp, Homo sapiens
aatgagataccacct

SEQ ID NO: 1272866 - DNA, 15 bp, Homo sapiens
taatgagataccacc

SEQ ID NO: 1272867 - DNA, 15 bp, Homo sapiens
ataatgagataccac

SEQ ID NO: 1272868 - DNA, 15 bp, Homo sapiens
cataatgagatacca

SEQ ID NO: 1272869 - DNA, 15 bp, Homo sapiens
ccataatgagatacc

SEQ ID NO: 1272870 - DNA, 15 bp, Homo sapiens
accataatgagatac

SEQ ID NO: 1272871 - DNA, 15 bp, Homo sapiens
aaccataatgagata

SEQ ID NO: 1272872 - DNA, 15 bp, Homo sapiens
aaaccataatgagat

SEQ ID NO: 1272873 - DNA, 15 bp, Homo sapiens
aaaaccataatgaga

SEQ ID NO: 1272874 - DNA, 15 bp, Homo sapiens
taaaaccataatgag

SEQ ID NO: 1272875 - DNA, 15 bp, Homo sapiens
ttaaaaccataatga

SEQ ID NO: 1272876 - DNA, 15 bp, Homo sapiens
attaaaaccataatg

SEQ ID NO: 1272877 - DNA, 15 bp, Homo sapiens
aattaaaaccataat

SEQ ID NO: 1272878 - DNA, 15 bp, Homo sapiens
caattaaaaccataa

SEQ ID NO: 1272879 - DNA, 15 bp, Homo sapiens
ccaattaaaaccata

SEQ ID NO: 1272880 - DNA, 15 bp, Homo sapiens
accaattaaaaccat

SEQ ID NO: 1272881 - DNA, 15 bp, Homo sapiens
taccaattaaaacca

SEQ ID NO: 1272882 - DNA, 15 bp, Homo sapiens
ataccaattaaaacc

SEQ ID NO: 1272883 - DNA, 15 bp, Homo sapiens
aataccaattaaaac

SEQ ID NO: 1272884 - DNA, 15 bp, Homo sapiens
gaaataccaattaaa

SEQ ID NO: 1272885 - DNA, 15 bp, Homo sapiens
ggaaataccaattaa

SEQ ID NO: 1272886 - DNA, 15 bp, Homo sapiens
gggaaataccaatta

SEQ ID NO: 1272887 - DNA, 15 bp, Homo sapiens
agggaaataccaatt

SEQ ID NO: 1272888 - DNA, 15 bp, Homo sapiens
aagggaaataccaat

SEQ ID NO: 1272889 - DNA, 15 bp, Homo sapiens
caagggaaataccaa

SEQ ID NO: 1272890 - DNA, 15 bp, Homo sapiens
acaagggaaatacca

SEQ ID NO: 1272891 - DNA, 15 bp, Homo sapiens
cacaagggaaatacc

SEQ ID NO: 1272892 - DNA, 15 bp, Homo sapiens
tcacaagggaaatac

SEQ ID NO: 1272893 - DNA, 15 bp, Homo sapiens
atcacaagggaaata

SEQ ID NO: 1272894 - DNA, 15 bp, Homo sapiens
aatcacaagggaaat

SEQ ID NO: 1272895 - DNA, 15 bp, Homo sapiens
caatcacaagggaaa

SEQ ID NO: 1272896 - DNA, 15 bp, Homo sapiens
ccaatcacaagggaa

SEQ ID NO: 1272897 - DNA, 15 bp, Homo sapiens
accaatcacaaggga

SEQ ID NO: 1272898 - DNA, 15 bp, Homo sapiens
caccaatcacaaggg

SEQ ID NO: 1272899 - DNA, 15 bp, Homo sapiens
tcaccaatcacaagg

SEQ ID NO: 1272900 - DNA, 15 bp, Homo sapiens
atcaccaatcacaag

SEQ ID NO: 1272901 - DNA, 15 bp, Homo sapiens
catcaccaatcacaa

SEQ ID NO: 1272902 - DNA, 15 bp, Homo sapiens
acatcaccaatcaca

SEQ ID NO: 1272903 - DNA, 15 bp, Homo sapiens
aacatcaccaatcac

SEQ ID NO: 1272904 - DNA, 15 bp, Homo sapiens
caacatcaccaatca

SEQ ID NO: 1272905 - DNA, 15 bp, Homo sapiens
tcaacatcaccaatc

SEQ ID NO: 1272906 - DNA, 15 bp, Homo sapiens
ctcaacatcaccaat

SEQ ID NO: 1272907 - DNA, 15 bp, Homo sapiens
actcaacatcaccaa

SEQ ID NO: 1272908 - DNA, 15 bp, Homo sapiens
tactcaacatcacca

SEQ ID NO: 1272909 - DNA, 15 bp, Homo sapiens
atactcaacatcacc

SEQ ID NO: 1272910 - DNA, 15 bp, Homo sapiens
aatactcaacatcac

SEQ ID NO: 1272911 - DNA, 15 bp, Homo sapiens
aaatactcaacatca

SEQ ID NO: 1272912 - DNA, 15 bp, Homo sapiens
aaaatactcaacatc

SEQ ID NO: 1272913 - DNA, 15 bp, Homo sapiens
aaaaatactcaacat

SEQ ID NO: 1272914 - DNA, 15 bp, Homo sapiens
gaaaaatactcaaca

SEQ ID NO: 1272915 - DNA, 15 bp, Homo sapiens
tgaaaaatactcaac

SEQ ID NO: 1272916 - DNA, 15 bp, Homo sapiens
atgaaaaatactcaa

SEQ ID NO: 1272917 - DNA, 15 bp, Homo sapiens
catgaaaaatactca

SEQ ID NO: 1272918 - DNA, 15 bp, Homo sapiens
acatgaaaaatactc

SEQ ID NO: 1272919 - DNA, 15 bp, Homo sapiens
aacatgaaaaatact

SEQ ID NO: 1272920 - DNA, 15 bp, Homo sapiens
aaacatgaaaaatac

SEQ ID NO: 1272921 - DNA, 15 bp, Homo sapiens
gaaacatgaaaaata

SEQ ID NO: 1272922 - DNA, 15 bp, Homo sapiens
agaaacatgaaaaat

SEQ ID NO: 1272923 - DNA, 15 bp, Homo sapiens
aagaaacatgaaaaa

SEQ ID NO: 1272924 - DNA, 15 bp, Homo sapiens
caagaaacatgaaaa

SEQ ID NO: 1272925 - DNA, 15 bp, Homo sapiens
ccaagaaacatgaaa

SEQ ID NO: 1272926 - DNA, 15 bp, Homo sapiens
gccaagaaacatgaa

SEQ ID NO: 1272927 - DNA, 15 bp, Homo sapiens
ggccaagaaacatga

SEQ ID NO: 1272928 - DNA, 15 bp, Homo sapiens
tggccaagaaacatg

SEQ ID NO: 1272929 - DNA, 15 bp, Homo sapiens
atggccaagaaacat

SEQ ID NO: 1272930 - DNA, 15 bp, Homo sapiens
aatggccaagaaaca

SEQ ID NO: 1272931 - DNA, 15 bp, Homo sapiens
aaatggccaagaaac

SEQ ID NO: 1272932 - DNA, 15 bp, Homo sapiens
caaatggccaagaaa

SEQ ID NO: 1272933 - DNA, 15 bp, Homo sapiens
acaaatggccaagaa

SEQ ID NO: 1272934 - DNA, 15 bp, Homo sapiens
cacaaatggccaaga

SEQ ID NO: 1272935 - DNA, 15 bp, Homo sapiens
acacaaatggccaag

SEQ ID NO: 1272936 - DNA, 15 bp, Homo sapiens
tacacaaatggccaa

SEQ ID NO: 1272937 - DNA, 15 bp, Homo sapiens
atacacaaatggcca

SEQ ID NO: 1272938 - DNA, 15 bp, Homo sapiens
gatacacaaatggcc

SEQ ID NO: 1272939 - DNA, 15 bp, Homo sapiens
agatacacaaatggc

SEQ ID NO: 1272940 - DNA, 15 bp, Homo sapiens
aagatacacaaatgg

SEQ ID NO: 1272941 - DNA, 15 bp, Homo sapiens
gaagatacacaaatg

SEQ ID NO: 1272942 - DNA, 15 bp, Homo sapiens
agaagatacacaaat

SEQ ID NO: 1272943 - DNA, 15 bp, Homo sapiens
aagaagatacacaaa

SEQ ID NO: 1272944 - DNA, 15 bp, Homo sapiens
aaagaagatacacaa

SEQ ID NO: 1272945 - DNA, 15 bp, Homo sapiens
aaaagaagatacaca

SEQ ID NO: 1272946 - DNA, 15 bp, Homo sapiens
caaaagaagatacac

SEQ ID NO: 1272947 - DNA, 15 bp, Homo sapiens
tcaaaagaagataca

SEQ ID NO: 1272948 - DNA, 15 bp, Homo sapiens
ttcaaaagaagatac

SEQ ID NO: 1272949 - DNA, 15 bp, Homo sapiens
tttcaaaagaagata

SEQ ID NO: 1272950 - DNA, 15 bp, Homo sapiens
ttttcaaaagaagat

SEQ ID NO: 1272951 - DNA, 15 bp, Homo sapiens
tttttcaaaagaaga

SEQ ID NO: 1272952 - DNA, 15 bp, Homo sapiens
atttttcaaaagaag

SEQ ID NO: 1272953 - DNA, 15 bp, Homo sapiens
catttttcaaaagaa

SEQ ID NO: 1272954 - DNA, 15 bp, Homo sapiens
acatttttcaaaaga

SEQ ID NO: 1272955 - DNA, 15 bp, Homo sapiens
gacatttttcaaaag

SEQ ID NO: 1272956 - DNA, 15 bp, Homo sapiens
ggacatttttcaaaa

SEQ ID NO: 1272957 - DNA, 15 bp, Homo sapiens
cggacatttttcaaa

SEQ ID NO: 1272958 - DNA, 15 bp, Homo sapiens
acggacatttttcaa

SEQ ID NO: 1272959 - DNA, 15 bp, Homo sapiens
aacggacatttttca

SEQ ID NO: 1272960 - DNA, 15 bp, Homo sapiens
aaacggacatttttc

SEQ ID NO: 1272961 - DNA, 15 bp, Homo sapiens
caaacggacattttt

SEQ ID NO: 1272962 - DNA, 15 bp, Homo sapiens
ccaaacggacatttt

SEQ ID NO: 1272963 - DNA, 15 bp, Homo sapiens
gccaaacggacattt

SEQ ID NO: 1272964 - DNA, 15 bp, Homo sapiens
agccaaacggacatt

SEQ ID NO: 1272965 - DNA, 15 bp, Homo sapiens
cagccaaacggacat

SEQ ID NO: 1272966 - DNA, 15 bp, Homo sapiens
ccagccaaacggaca

SEQ ID NO: 1272967 - DNA, 15 bp, Homo sapiens
cccagccaaacggac

SEQ ID NO: 1272968 - DNA, 15 bp, Homo sapiens
gcccagccaaacgga

SEQ ID NO: 1272969 - DNA, 15 bp, Homo sapiens
cgcccagccaaacgg

SEQ ID NO: 1272970 - DNA, 15 bp, Homo sapiens
gcgcccagccaaacg

SEQ ID NO: 1272971 - DNA, 15 bp, Homo sapiens
cgcgcccagccaaac

SEQ ID NO: 1272972 - DNA, 15 bp, Homo sapiens
ccgcgcccagccaaa

SEQ ID NO: 1272973 - DNA, 15 bp, Homo sapiens
accgcgcccagccaa

SEQ ID NO: 1272974 - DNA, 15 bp, Homo sapiens
acgtgagccaccgcg

SEQ ID NO: 1272975 - DNA, 15 bp, Homo sapiens
gacgtgagccaccgc

SEQ ID NO: 1272976 - DNA, 15 bp, Homo sapiens
agacgtgagccaccg

SEQ ID NO: 1272977 - DNA, 15 bp, Homo sapiens
aggattacagacgtg

SEQ ID NO: 1272978 - DNA, 15 bp, Homo sapiens
taggattacagacgt

SEQ ID NO: 1272979 - DNA, 15 bp, Homo sapiens
ctaggattacagacg

SEQ ID NO: 1272980 - DNA, 15 bp, Homo sapiens
gctaggattacagac

SEQ ID NO: 1272981 - DNA, 15 bp, Homo sapiens
tgctaggattacaga

SEQ ID NO: 1272982 - DNA, 15 bp, Homo sapiens
gaaagtgctaggatt

SEQ ID NO: 1272983 - DNA, 15 bp, Homo sapiens
cgaaagtgctaggat

SEQ ID NO: 1272984 - DNA, 15 bp, Homo sapiens
ccgaaagtgctagga

SEQ ID NO: 1272985 - DNA, 15 bp, Homo sapiens
tccgaaagtgctagg

SEQ ID NO: 1272986 - DNA, 15 bp, Homo sapiens
ttccgaaagtgctag

SEQ ID NO: 1272987 - DNA, 15 bp, Homo sapiens
cttccgaaagtgcta

SEQ ID NO: 1272988 - DNA, 15 bp, Homo sapiens
gcttccgaaagtgct

SEQ ID NO: 1272989 - DNA, 15 bp, Homo sapiens
ggcttccgaaagtgc

SEQ ID NO: 1272990 - DNA, 15 bp, Homo sapiens
tggcttccgaaagtg

SEQ ID NO: 1272991 - DNA, 15 bp, Homo sapiens
ttggcttccgaaagt

SEQ ID NO: 1272992 - DNA, 15 bp, Homo sapiens
cttggcttccgaaag

SEQ ID NO: 1272993 - DNA, 15 bp, Homo sapiens
ccttggcttccgaaa

SEQ ID NO: 1272994 - DNA, 15 bp, Homo sapiens
gccttggcttccgaa

SEQ ID NO: 1272995 - DNA, 15 bp, Homo sapiens
cgccttggcttccga

SEQ ID NO: 1272996 - DNA, 15 bp, Homo sapiens
ccgccttggcttccg

SEQ ID NO: 1272997 - DNA, 15 bp, Homo sapiens
cccgccttggcttcc

SEQ ID NO: 1272998 - DNA, 15 bp, Homo sapiens
acccgccttggcttc

SEQ ID NO: 1272999 - DNA, 15 bp, Homo sapiens
cacccgccttggctt

SEQ ID NO: 1273000 - DNA, 15 bp, Homo sapiens
ccacccgccttggct

SEQ ID NO: 1273001 - DNA, 15 bp, Homo sapiens
agtttcaccatgtta

SEQ ID NO: 1273002 - DNA, 15 bp, Homo sapiens
cggagtttcaccatg

SEQ ID NO: 1273003 - DNA, 15 bp, Homo sapiens
acggagtttcaccat

SEQ ID NO: 1273004 - DNA, 15 bp, Homo sapiens
cacggagtttcacca

SEQ ID NO: 1273005 - DNA, 15 bp, Homo sapiens
acacggagtttcacc

SEQ ID NO: 1273006 - DNA, 15 bp, Homo sapiens
gacacggagtttcac

SEQ ID NO: 1273007 - DNA, 15 bp, Homo sapiens
agacacggagtttca

SEQ ID NO: 1273008 - DNA, 15 bp, Homo sapiens
tagacacggagtttc

SEQ ID NO: 1273009 - DNA, 15 bp, Homo sapiens
gtagacacggagttt

SEQ ID NO: 1273010 - DNA, 15 bp, Homo sapiens
agtagacacggagtt

SEQ ID NO: 1273011 - DNA, 15 bp, Homo sapiens
tagtagacacggagt

SEQ ID NO: 1273012 - DNA, 15 bp, Homo sapiens
ttagtagacacggag

SEQ ID NO: 1273013 - DNA, 15 bp, Homo sapiens
tttagtagacacgga

SEQ ID NO: 1273014 - DNA, 15 bp, Homo sapiens
ttttagtagacacgg

SEQ ID NO: 1273015 - DNA, 15 bp, Homo sapiens
tttttagtagacacg

SEQ ID NO: 1273016 - DNA, 15 bp, Homo sapiens
atttttagtagacac

SEQ ID NO: 1273017 - DNA, 15 bp, Homo sapiens
atgccaccacgccca

SEQ ID NO: 1273018 - DNA, 15 bp, Homo sapiens
catgccaccacgccc

SEQ ID NO: 1273019 - DNA, 15 bp, Homo sapiens
gagagtagctgggat

SEQ ID NO: 1273020 - DNA, 15 bp, Homo sapiens
cgagagtagctggga

SEQ ID NO: 1273021 - DNA, 15 bp, Homo sapiens
tcgagagtagctggg

SEQ ID NO: 1273022 - DNA, 15 bp, Homo sapiens
ctcgagagtagctgg

SEQ ID NO: 1273023 - DNA, 15 bp, Homo sapiens
tctcgagagtagctg

SEQ ID NO: 1273024 - DNA, 15 bp, Homo sapiens
gtctcgagagtagct

SEQ ID NO: 1273025 - DNA, 15 bp, Homo sapiens
agtctcgagagtagc

SEQ ID NO: 1273026 - DNA, 15 bp, Homo sapiens
cagtctcgagagtag

SEQ ID NO: 1273027 - DNA, 15 bp, Homo sapiens
tcagtctcgagagta

SEQ ID NO: 1273028 - DNA, 15 bp, Homo sapiens
ctcagtctcgagagt

SEQ ID NO: 1273029 - DNA, 15 bp, Homo sapiens
cctcagtctcgagag

SEQ ID NO: 1273030 - DNA, 15 bp, Homo sapiens
gcctcagtctcgaga

SEQ ID NO: 1273031 - DNA, 15 bp, Homo sapiens
tgcctcagtctcgag

SEQ ID NO: 1273032 - DNA, 15 bp, Homo sapiens
ctgcctcagtctcga

SEQ ID NO: 1273033 - DNA, 15 bp, Homo sapiens
cctgcctcagtctcg

SEQ ID NO: 1273034 - DNA, 15 bp, Homo sapiens
tcattctcctgcctc

SEQ ID NO: 1273035 - DNA, 15 bp, Homo sapiens
gtcattctcctgcct

SEQ ID NO: 1273036 - DNA, 15 bp, Homo sapiens
tgtcattctcctgcc

SEQ ID NO: 1273037 - DNA, 15 bp, Homo sapiens
atgtcattctcctgc

SEQ ID NO: 1273038 - DNA, 15 bp, Homo sapiens
catgtcattctcctg

SEQ ID NO: 1273039 - DNA, 15 bp, Homo sapiens
tcatgtcattctcct

SEQ ID NO: 1273040 - DNA, 15 bp, Homo sapiens
ttcatgtcattctcc

SEQ ID NO: 1273041 - DNA, 15 bp, Homo sapiens
gttcatgtcattctc

SEQ ID NO: 1273042 - DNA, 15 bp, Homo sapiens
ggttcatgtcattct

SEQ ID NO: 1273043 - DNA, 15 bp, Homo sapiens
gggttcatgtcattc

SEQ ID NO: 1273044 - DNA, 15 bp, Homo sapiens
tgggttcatgtcatt

SEQ ID NO: 1273045 - DNA, 15 bp, Homo sapiens
ctgggttcatgtcat

SEQ ID NO: 1273046 - DNA, 15 bp, Homo sapiens
cctgggttcatgtca

SEQ ID NO: 1273047 - DNA, 15 bp, Homo sapiens
tcctgggttcatgtc

SEQ ID NO: 1273048 - DNA, 15 bp, Homo sapiens
ctcctgggttcatgt

SEQ ID NO: 1273049 - DNA, 15 bp, Homo sapiens
ccttggctcactgca

SEQ ID NO: 1273050 - DNA, 15 bp, Homo sapiens
accttggctcactgc

SEQ ID NO: 1273051 - DNA, 15 bp, Homo sapiens
aaccttggctcactg

SEQ ID NO: 1273052 - DNA, 15 bp, Homo sapiens
caaccttggctcact

SEQ ID NO: 1273053 - DNA, 15 bp, Homo sapiens
gcaaccttggctcac

SEQ ID NO: 1273054 - DNA, 15 bp, Homo sapiens
cgcaaccttggctca

SEQ ID NO: 1273055 - DNA, 15 bp, Homo sapiens
gcgcaaccttggctc

SEQ ID NO: 1273056 - DNA, 15 bp, Homo sapiens
ggcgcaaccttggct

SEQ ID NO: 1273057 - DNA, 15 bp, Homo sapiens
tggcgcaaccttggc

SEQ ID NO: 1273058 - DNA, 15 bp, Homo sapiens
atggcgcaaccttgg

SEQ ID NO: 1273059 - DNA, 15 bp, Homo sapiens
aatggcgcaaccttg

SEQ ID NO: 1273060 - DNA, 15 bp, Homo sapiens
caatggcgcaacctt

SEQ ID NO: 1273061 - DNA, 15 bp, Homo sapiens
gcaatggcgcaacct

SEQ ID NO: 1273062 - DNA, 15 bp, Homo sapiens
tgcaatggcgcaacc

SEQ ID NO: 1273063 - DNA, 15 bp, Homo sapiens
gtgcaatggcgcaac

SEQ ID NO: 1273064 - DNA, 15 bp, Homo sapiens
cctgtcgtccaggct

SEQ ID NO: 1273065 - DNA, 15 bp, Homo sapiens
tcctgtcgtccaggc

SEQ ID NO: 1273066 - DNA, 15 bp, Homo sapiens
ctcctgtcgtccagg

SEQ ID NO: 1273067 - DNA, 15 bp, Homo sapiens
actcctgtcgtccag

SEQ ID NO: 1273068 - DNA, 15 bp, Homo sapiens
cactcctgtcgtcca

SEQ ID NO: 1273069 - DNA, 15 bp, Homo sapiens
tcactcctgtcgtcc

SEQ ID NO: 1273070 - DNA, 15 bp, Homo sapiens
ttcactcctgtcgtc

SEQ ID NO: 1273071 - DNA, 15 bp, Homo sapiens
tttcactcctgtcgt

SEQ ID NO: 1273072 - DNA, 15 bp, Homo sapiens
gtttcactcctgtcg

SEQ ID NO: 1273073 - DNA, 15 bp, Homo sapiens
agtttcactcctgtc

SEQ ID NO: 1273074 - DNA, 15 bp, Homo sapiens
cagtttcactcctgt

SEQ ID NO: 1273075 - DNA, 15 bp, Homo sapiens
gcagtttcactcctg

SEQ ID NO: 1273076 - DNA, 15 bp, Homo sapiens
tgcagtttcactcct

SEQ ID NO: 1273077 - DNA, 15 bp, Homo sapiens
atgcagtttcactcc

SEQ ID NO: 1273078 - DNA, 15 bp, Homo sapiens
aatgcagtttcactc

SEQ ID NO: 1273079 - DNA, 15 bp, Homo sapiens
caatgcagtttcact

SEQ ID NO: 1273080 - DNA, 15 bp, Homo sapiens
gcaatgcagtttcac

SEQ ID NO: 1273081 - DNA, 15 bp, Homo sapiens
tgcaatgcagtttca

SEQ ID NO: 1273082 - DNA, 15 bp, Homo sapiens
ttgcaatgcagtttc

SEQ ID NO: 1273083 - DNA, 15 bp, Homo sapiens
tttgcaatgcagttt

SEQ ID NO: 1273084 - DNA, 15 bp, Homo sapiens
ttttgcaatgcagtt

SEQ ID NO: 1273085 - DNA, 15 bp, Homo sapiens
tttttgcaatgcagt

SEQ ID NO: 1273086 - DNA, 15 bp, Homo sapiens
gtttttgcaatgcag

SEQ ID NO: 1273087 - DNA, 15 bp, Homo sapiens
tgtttttgcaatgca

SEQ ID NO: 1273088 - DNA, 15 bp, Homo sapiens
ctgtttttgcaatgc

SEQ ID NO: 1273089 - DNA, 15 bp, Homo sapiens
gctgtttttgcaatg

SEQ ID NO: 1273090 - DNA, 15 bp, Homo sapiens
tgctgtttttgcaat

SEQ ID NO: 1273091 - DNA, 15 bp, Homo sapiens
ttgctgtttttgcaa

SEQ ID NO: 1273092 - DNA, 15 bp, Homo sapiens
gttgctgtttttgca

SEQ ID NO: 1273093 - DNA, 15 bp, Homo sapiens
tgttgctgtttttgc

SEQ ID NO: 1273094 - DNA, 15 bp, Homo sapiens
ttgttgctgtttttg

SEQ ID NO: 1273095 - DNA, 15 bp, Homo sapiens
tttgttgctgttttt

SEQ ID NO: 1273096 - DNA, 15 bp, Homo sapiens
ttttgttgctgtttt

SEQ ID NO: 1273097 - DNA, 15 bp, Homo sapiens
tttttgttgctgttt

SEQ ID NO: 1273098 - DNA, 15 bp, Homo sapiens
ttttttgttgctgtt

SEQ ID NO: 1273099 - DNA, 15 bp, Homo sapiens
tttttttgttgctgt

SEQ ID NO: 1273100 - DNA, 15 bp, Homo sapiens
ttttttttgttgctg

SEQ ID NO: 1273101 - DNA, 15 bp, Homo sapiens
attttttttgttgct

SEQ ID NO: 1273102 - DNA, 15 bp, Homo sapiens
gattttttttgttgc

SEQ ID NO: 1273103 - DNA, 15 bp, Homo sapiens
ggattttttttgttg

SEQ ID NO: 1273104 - DNA, 15 bp, Homo sapiens
tggattttttttgtt

SEQ ID NO: 1273105 - DNA, 15 bp, Homo sapiens
atggattttttttgt

SEQ ID NO: 1273106 - DNA, 15 bp, Homo sapiens
aatggattttttttg

SEQ ID NO: 1273107 - DNA, 15 bp, Homo sapiens
gaatggatttttttt

SEQ ID NO: 1273108 - DNA, 15 bp, Homo sapiens
tgaatggattttttt

SEQ ID NO: 1273109 - DNA, 15 bp, Homo sapiens
atgaatggatttttt

SEQ ID NO: 1273110 - DNA, 15 bp, Homo sapiens
gatgaatggattttt

SEQ ID NO: 1273111 - DNA, 15 bp, Homo sapiens
agatgaatggatttt

SEQ ID NO: 1273112 - DNA, 15 bp, Homo sapiens
tagatgaatggattt

SEQ ID NO: 1273113 - DNA, 15 bp, Homo sapiens
ctagatgaatggatt

SEQ ID NO: 1273114 - DNA, 15 bp, Homo sapiens
actagatgaatggat

SEQ ID NO: 1273115 - DNA, 15 bp, Homo sapiens
aactagatgaatgga

SEQ ID NO: 1273116 - DNA, 15 bp, Homo sapiens
aaactagatgaatgg

SEQ ID NO: 1273117 - DNA, 15 bp, Homo sapiens
caaactagatgaatg

SEQ ID NO: 1273118 - DNA, 15 bp, Homo sapiens
acaaactagatgaat

SEQ ID NO: 1273119 - DNA, 15 bp, Homo sapiens
gacaaactagatgaa

SEQ ID NO: 1273120 - DNA, 15 bp, Homo sapiens
ggacaaactagatga

SEQ ID NO: 1273121 - DNA, 15 bp, Homo sapiens
tggacaaactagatg

SEQ ID NO: 1273122 - DNA, 15 bp, Homo sapiens
gtggacaaactagat

SEQ ID NO: 1273123 - DNA, 15 bp, Homo sapiens
agtggacaaactaga

SEQ ID NO: 1273124 - DNA, 15 bp, Homo sapiens
aagtggacaaactag

SEQ ID NO: 1273125 - DNA, 15 bp, Homo sapiens
aaagtggacaaacta

SEQ ID NO: 1273126 - DNA, 15 bp, Homo sapiens
aaaagtggacaaact

SEQ ID NO: 1273127 - DNA, 15 bp, Homo sapiens
aaaaagtggacaaac

SEQ ID NO: 1273128 - DNA, 15 bp, Homo sapiens
taaaaagtggacaaa

SEQ ID NO: 1273129 - DNA, 15 bp, Homo sapiens
ttaaaaagtggacaa

SEQ ID NO: 1273130 - DNA, 15 bp, Homo sapiens
gttaaaaagtggaca

SEQ ID NO: 1273131 - DNA, 15 bp, Homo sapiens
tgttaaaaagtggac

SEQ ID NO: 1273132 - DNA, 15 bp, Homo sapiens
ctgttaaaaagtgga

SEQ ID NO: 1273133 - DNA, 15 bp, Homo sapiens
cctgttaaaaagtgg

SEQ ID NO: 1273134 - DNA, 15 bp, Homo sapiens
tcctgttaaaaagtg

SEQ ID NO: 1273135 - DNA, 15 bp, Homo sapiens
atcctgttaaaaagt

SEQ ID NO: 1273136 - DNA, 15 bp, Homo sapiens
aatcctgttaaaaag

SEQ ID NO: 1273137 - DNA, 15 bp, Homo sapiens
taatcctgttaaaaa

SEQ ID NO: 1273138 - DNA, 15 bp, Homo sapiens
ataatcctgttaaaa

SEQ ID NO: 1273139 - DNA, 15 bp, Homo sapiens
aataatcctgttaaa

SEQ ID NO: 1273140 - DNA, 15 bp, Homo sapiens
aaataatcctgttaa

SEQ ID NO: 1273141 - DNA, 15 bp, Homo sapiens
caaataatcctgtta

SEQ ID NO: 1273142 - DNA, 15 bp, Homo sapiens
acaaataatcctgtt

SEQ ID NO: 1273143 - DNA, 15 bp, Homo sapiens
aacaaataatcctgt

SEQ ID NO: 1273144 - DNA, 15 bp, Homo sapiens
aaacaaataatcctg

SEQ ID NO: 1273145 - DNA, 15 bp, Homo sapiens
aaaacaaataatcct

SEQ ID NO: 1273146 - DNA, 15 bp, Homo sapiens
gaaaacaaataatcc

SEQ ID NO: 1273147 - DNA, 15 bp, Homo sapiens
agaaaacaaataatc

SEQ ID NO: 1273148 - DNA, 15 bp, Homo sapiens
aagaaaacaaataat

SEQ ID NO: 1273149 - DNA, 15 bp, Homo sapiens
gaagaaaacaaataa

SEQ ID NO: 1273150 - DNA, 15 bp, Homo sapiens
agaagaaaacaaata

SEQ ID NO: 1273151 - DNA, 15 bp, Homo sapiens
caagaagaaaacaaa

SEQ ID NO: 1273152 - DNA, 15 bp, Homo sapiens
gcaagaagaaaacaa

SEQ ID NO: 1273153 - DNA, 15 bp, Homo sapiens
agcaagaagaaaaca

SEQ ID NO: 1273154 - DNA, 15 bp, Homo sapiens
cagcaagaagaaaac

SEQ ID NO: 1273155 - DNA, 15 bp, Homo sapiens
tcagcaagaagaaaa

SEQ ID NO: 1273156 - DNA, 15 bp, Homo sapiens
atcagcaagaagaaa

SEQ ID NO: 1273157 - DNA, 15 bp, Homo sapiens
aatcagcaagaagaa

SEQ ID NO: 1273158 - DNA, 15 bp, Homo sapiens
aaatcagcaagaaga

SEQ ID NO: 1273159 - DNA, 15 bp, Homo sapiens
aaaatcagcaagaag

SEQ ID NO: 1273160 - DNA, 15 bp, Homo sapiens
gaaaatcagcaagaa

SEQ ID NO: 1273161 - DNA, 15 bp, Homo sapiens
agaaaatcagcaaga

SEQ ID NO: 1273162 - DNA, 15 bp, Homo sapiens
aagaaaatcagcaag

SEQ ID NO: 1273163 - DNA, 15 bp, Homo sapiens
caagaaaatcagcaa

SEQ ID NO: 1273164 - DNA, 15 bp, Homo sapiens
tcaagaaaatcagca

SEQ ID NO: 1273165 - DNA, 15 bp, Homo sapiens
ctcaagaaaatcagc

SEQ ID NO: 1273166 - DNA, 15 bp, Homo sapiens
actcaagaaaatcag

SEQ ID NO: 1273167 - DNA, 15 bp, Homo sapiens
aactcaagaaaatca

SEQ ID NO: 1273168 - DNA, 15 bp, Homo sapiens
aaactcaagaaaatc

SEQ ID NO: 1273169 - DNA, 15 bp, Homo sapiens
gaaactcaagaaaat

SEQ ID NO: 1273170 - DNA, 15 bp, Homo sapiens
agaaactcaagaaaa

SEQ ID NO: 1273171 - DNA, 15 bp, Homo sapiens
aagaaactcaagaaa

SEQ ID NO: 1273172 - DNA, 15 bp, Homo sapiens
caagaaactcaagaa

SEQ ID NO: 1273173 - DNA, 15 bp, Homo sapiens
acaagaaactcaaga

SEQ ID NO: 1273174 - DNA, 15 bp, Homo sapiens
tacaagaaactcaag

SEQ ID NO: 1273175 - DNA, 15 bp, Homo sapiens
ctacaagaaactcaa

SEQ ID NO: 1273176 - DNA, 15 bp, Homo sapiens
tctacaagaaactca

SEQ ID NO: 1273177 - DNA, 15 bp, Homo sapiens
atctacaagaaactc

SEQ ID NO: 1273178 - DNA, 15 bp, Homo sapiens
aatctacaagaaact

SEQ ID NO: 1273179 - DNA, 15 bp, Homo sapiens
gaatctacaagaaac

SEQ ID NO: 1273180 - DNA, 15 bp, Homo sapiens
agaatctacaagaaa

SEQ ID NO: 1273181 - DNA, 15 bp, Homo sapiens
cagaatctacaagaa

SEQ ID NO: 1273182 - DNA, 15 bp, Homo sapiens
ccagaatctacaaga

SEQ ID NO: 1273183 - DNA, 15 bp, Homo sapiens
tccagaatctacaag

SEQ ID NO: 1273184 - DNA, 15 bp, Homo sapiens
atccagaatctacaa

SEQ ID NO: 1273185 - DNA, 15 bp, Homo sapiens
gatccagaatctaca

SEQ ID NO: 1273186 - DNA, 15 bp, Homo sapiens
ggatccagaatctac

SEQ ID NO: 1273187 - DNA, 15 bp, Homo sapiens
aggatccagaatcta

SEQ ID NO: 1273188 - DNA, 15 bp, Homo sapiens
aaggatccagaatct

SEQ ID NO: 1273189 - DNA, 15 bp, Homo sapiens
aaaggatccagaatc

SEQ ID NO: 1273190 - DNA, 15 bp, Homo sapiens
caaaggatccagaat

SEQ ID NO: 1273191 - DNA, 15 bp, Homo sapiens
acaaaggatccagaa

SEQ ID NO: 1273192 - DNA, 15 bp, Homo sapiens
aacaaaggatccaga

SEQ ID NO: 1273193 - DNA, 15 bp, Homo sapiens
caacaaaggatccag

SEQ ID NO: 1273194 - DNA, 15 bp, Homo sapiens
ccaacaaaggatcca

SEQ ID NO: 1273195 - DNA, 15 bp, Homo sapiens
tccaacaaaggatcc

SEQ ID NO: 1273196 - DNA, 15 bp, Homo sapiens
atccaacaaaggatc

SEQ ID NO: 1273197 - DNA, 15 bp, Homo sapiens
catccaacaaaggat

SEQ ID NO: 1273198 - DNA, 15 bp, Homo sapiens
acatccaacaaagga

SEQ ID NO: 1273199 - DNA, 15 bp, Homo sapiens
tacatccaacaaagg

SEQ ID NO: 1273200 - DNA, 15 bp, Homo sapiens
atacatccaacaaag

SEQ ID NO: 1273201 - DNA, 15 bp, Homo sapiens
tatacatccaacaaa

SEQ ID NO: 1273202 - DNA, 15 bp, Homo sapiens
ctatacatccaacaa

SEQ ID NO: 1273203 - DNA, 15 bp, Homo sapiens
actatacatccaaca

SEQ ID NO: 1273204 - DNA, 15 bp, Homo sapiens
aactatacatccaac

SEQ ID NO: 1273205 - DNA, 15 bp, Homo sapiens
aaactatacatccaa

SEQ ID NO: 1273206 - DNA, 15 bp, Homo sapiens
caaactatacatcca

SEQ ID NO: 1273207 - DNA, 15 bp, Homo sapiens
acaaactatacatcc

SEQ ID NO: 1273208 - DNA, 15 bp, Homo sapiens
tacaaactatacatc

SEQ ID NO: 1273209 - DNA, 15 bp, Homo sapiens
ttacaaactatacat

SEQ ID NO: 1273210 - DNA, 15 bp, Homo sapiens
tttacaaactataca

SEQ ID NO: 1273211 - DNA, 15 bp, Homo sapiens
atttacaaactatac

SEQ ID NO: 1273212 - DNA, 15 bp, Homo sapiens
tatttacaaactata

SEQ ID NO: 1273213 - DNA, 15 bp, Homo sapiens
atatttacaaactat

SEQ ID NO: 1273214 - DNA, 15 bp, Homo sapiens
aatatttacaaacta

SEQ ID NO: 1273215 - DNA, 15 bp, Homo sapiens
aaatatttacaaact

SEQ ID NO: 1273216 - DNA, 15 bp, Homo sapiens
aaaatatttacaaac

SEQ ID NO: 1273217 - DNA, 15 bp, Homo sapiens
gaaaatatttacaaa

SEQ ID NO: 1273218 - DNA, 15 bp, Homo sapiens
agaaaatatttacaa

SEQ ID NO: 1273219 - DNA, 15 bp, Homo sapiens
gagaaaatatttaca

SEQ ID NO: 1273220 - DNA, 15 bp, Homo sapiens
ggagaaaatatttac

SEQ ID NO: 1273221 - DNA, 15 bp, Homo sapiens
gggagaaaatattta

SEQ ID NO: 1273222 - DNA, 15 bp, Homo sapiens
atgggagaaaatatt

SEQ ID NO: 1273223 - DNA, 15 bp, Homo sapiens
aatgggagaaaatat

SEQ ID NO: 1273224 - DNA, 15 bp, Homo sapiens
gaatgggagaaaata

SEQ ID NO: 1273225 - DNA, 15 bp, Homo sapiens
agaatgggagaaaat

SEQ ID NO: 1273226 - DNA, 15 bp, Homo sapiens
cagaatgggagaaaa

SEQ ID NO: 1273227 - DNA, 15 bp, Homo sapiens
tcagaatgggagaaa

SEQ ID NO: 1273228 - DNA, 15 bp, Homo sapiens
ctcagaatgggagaa

SEQ ID NO: 1273229 - DNA, 15 bp, Homo sapiens
cctcagaatgggaga

SEQ ID NO: 1273230 - DNA, 15 bp, Homo sapiens
ccctcagaatgggag

SEQ ID NO: 1273231 - DNA, 15 bp, Homo sapiens
accctcagaatggga

SEQ ID NO: 1273232 - DNA, 15 bp, Homo sapiens
aaccctcagaatggg

SEQ ID NO: 1273233 - DNA, 15 bp, Homo sapiens
caaccctcagaatgg

SEQ ID NO: 1273234 - DNA, 15 bp, Homo sapiens
acaaccctcagaatg

SEQ ID NO: 1273235 - DNA, 15 bp, Homo sapiens
gacaaccctcagaat

SEQ ID NO: 1273236 - DNA, 15 bp, Homo sapiens
agacaaccctcagaa

SEQ ID NO: 1273237 - DNA, 15 bp, Homo sapiens
gagacaaccctcaga

SEQ ID NO: 1273238 - DNA, 15 bp, Homo sapiens
agagacaaccctcag

SEQ ID NO: 1273239 - DNA, 15 bp, Homo sapiens
aagagacaaccctca

SEQ ID NO: 1273240 - DNA, 15 bp, Homo sapiens
aaagagacaaccctc

SEQ ID NO: 1273241 - DNA, 15 bp, Homo sapiens
aaaagagacaaccct

SEQ ID NO: 1273242 - DNA, 15 bp, Homo sapiens
gaaaagagacaaccc

SEQ ID NO: 1273243 - DNA, 15 bp, Homo sapiens
agaaaagagacaacc

SEQ ID NO: 1273244 - DNA, 15 bp, Homo sapiens
gagaaaagagacaac

SEQ ID NO: 1273245 - DNA, 15 bp, Homo sapiens
agagaaaagagacaa

SEQ ID NO: 1273246 - DNA, 15 bp, Homo sapiens
cagagaaaagagaca

SEQ ID NO: 1273247 - DNA, 15 bp, Homo sapiens
acagagaaaagagac

SEQ ID NO: 1273248 - DNA, 15 bp, Homo sapiens
aacagagaaaagaga

SEQ ID NO: 1273249 - DNA, 15 bp, Homo sapiens
caacagagaaaagag

SEQ ID NO: 1273250 - DNA, 15 bp, Homo sapiens
tcaacagagaaaaga

SEQ ID NO: 1273251 - DNA, 15 bp, Homo sapiens
atcaacagagaaaag

SEQ ID NO: 1273252 - DNA, 15 bp, Homo sapiens
aatcaacagagaaaa

SEQ ID NO: 1273253 - DNA, 15 bp, Homo sapiens
taatcaacagagaaa

SEQ ID NO: 1273254 - DNA, 15 bp, Homo sapiens
ataatcaacagagaa

SEQ ID NO: 1273255 - DNA, 15 bp, Homo sapiens
aataatcaacagaga

SEQ ID NO: 1273256 - DNA, 15 bp, Homo sapiens
aaataatcaacagag

SEQ ID NO: 1273257 - DNA, 15 bp, Homo sapiens
taaataatcaacaga

SEQ ID NO: 1273258 - DNA, 15 bp, Homo sapiens
ataaataatcaacag

SEQ ID NO: 1273259 - DNA, 15 bp, Homo sapiens
aataaataatcaaca

SEQ ID NO: 1273260 - DNA, 15 bp, Homo sapiens
aaataaataatcaac

SEQ ID NO: 1273261 - DNA, 15 bp, Homo sapiens
aaaataaataatcaa

SEQ ID NO: 1273262 - DNA, 15 bp, Homo sapiens
caaaataaataatca

SEQ ID NO: 1273263 - DNA, 15 bp, Homo sapiens
gcaaaataaataatc

SEQ ID NO: 1273264 - DNA, 15 bp, Homo sapiens
agcaaaataaataat

SEQ ID NO: 1273265 - DNA, 15 bp, Homo sapiens
tagcaaaataaataa

SEQ ID NO: 1273266 - DNA, 15 bp, Homo sapiens
atagcaaaataaata

SEQ ID NO: 1273267 - DNA, 15 bp, Homo sapiens
catagcaaaataaat

SEQ ID NO: 1273268 - DNA, 15 bp, Homo sapiens
gcatagcaaaataaa

SEQ ID NO: 1273269 - DNA, 15 bp, Homo sapiens
tgcatagcaaaataa

SEQ ID NO: 1273270 - DNA, 15 bp, Homo sapiens
ctgcatagcaaaata

SEQ ID NO: 1273271 - DNA, 15 bp, Homo sapiens
tctgcatagcaaaat

SEQ ID NO: 1273272 - DNA, 15 bp, Homo sapiens
ttctgcatagcaaaa

SEQ ID NO: 1273273 - DNA, 15 bp, Homo sapiens
tttctgcatagcaaa

SEQ ID NO: 1273274 - DNA, 15 bp, Homo sapiens
gtttctgcatagcaa

SEQ ID NO: 1273275 - DNA, 15 bp, Homo sapiens
agtttctgcatagca

SEQ ID NO: 1273276 - DNA, 15 bp, Homo sapiens
aagtttctgcatagc

SEQ ID NO: 1273277 - DNA, 15 bp, Homo sapiens
aaagtttctgcatag

SEQ ID NO: 1273278 - DNA, 15 bp, Homo sapiens
aaaagtttctgcata

SEQ ID NO: 1273279 - DNA, 15 bp, Homo sapiens
aaaaagtttctgcat

SEQ ID NO: 1273280 - DNA, 15 bp, Homo sapiens
taaaaagtttctgca

SEQ ID NO: 1273281 - DNA, 15 bp, Homo sapiens
ctaaaaagtttctgc

SEQ ID NO: 1273282 - DNA, 15 bp, Homo sapiens
actaaaaagtttctg

SEQ ID NO: 1273283 - DNA, 15 bp, Homo sapiens
aactaaaaagtttct

SEQ ID NO: 1273284 - DNA, 15 bp, Homo sapiens
aaactaaaaagtttc

SEQ ID NO: 1273285 - DNA, 15 bp, Homo sapiens
taaactaaaaagttt

SEQ ID NO: 1273286 - DNA, 15 bp, Homo sapiens
ttaaactaaaaagtt

SEQ ID NO: 1273287 - DNA, 15 bp, Homo sapiens
cttaaactaaaaagt

SEQ ID NO: 1273288 - DNA, 15 bp, Homo sapiens
acttaaactaaaaag

SEQ ID NO: 1273289 - DNA, 15 bp, Homo sapiens
gacttaaactaaaaa

SEQ ID NO: 1273290 - DNA, 15 bp, Homo sapiens
ggacttaaactaaaa

SEQ ID NO: 1273291 - DNA, 15 bp, Homo sapiens
gggacttaaactaaa

SEQ ID NO: 1273292 - DNA, 15 bp, Homo sapiens
tgggacttaaactaa

SEQ ID NO: 1273293 - DNA, 15 bp, Homo sapiens
atgggacttaaacta

SEQ ID NO: 1273294 - DNA, 15 bp, Homo sapiens
aatgggacttaaact

SEQ ID NO: 1273295 - DNA, 15 bp, Homo sapiens
aaatgggacttaaac

SEQ ID NO: 1273296 - DNA, 15 bp, Homo sapiens
taaatgggacttaaa

SEQ ID NO: 1273297 - DNA, 15 bp, Homo sapiens
gtaaatgggacttaa

SEQ ID NO: 1273298 - DNA, 15 bp, Homo sapiens
agtaaatgggactta

SEQ ID NO: 1273299 - DNA, 15 bp, Homo sapiens
aagtaaatgggactt

SEQ ID NO: 1273300 - DNA, 15 bp, Homo sapiens
taagtaaatgggact

SEQ ID NO: 1273301 - DNA, 15 bp, Homo sapiens
ctaagtaaatgggac

SEQ ID NO: 1273302 - DNA, 15 bp, Homo sapiens
actaagtaaatggga

SEQ ID NO: 1273303 - DNA, 15 bp, Homo sapiens
acaaatgcaacaaaa

SEQ ID NO: 1273304 - DNA, 15 bp, Homo sapiens
aacaaatgcaacaaa

SEQ ID NO: 1273305 - DNA, 15 bp, Homo sapiens
aaacaaatgcaacaa

SEQ ID NO: 1273306 - DNA, 15 bp, Homo sapiens
aaaacaaatgcaaca

SEQ ID NO: 1273307 - DNA, 15 bp, Homo sapiens
aaaaacaaatgcaac

SEQ ID NO: 1273308 - DNA, 15 bp, Homo sapiens
caaaaacaaatgcaa

SEQ ID NO: 1273309 - DNA, 15 bp, Homo sapiens
ccaaaaacaaatgca

SEQ ID NO: 1273310 - DNA, 15 bp, Homo sapiens
accaaaaacaaatgc

SEQ ID NO: 1273311 - DNA, 15 bp, Homo sapiens
caccaaaaacaaatg

SEQ ID NO: 1273312 - DNA, 15 bp, Homo sapiens
tcaccaaaaacaaat

SEQ ID NO: 1273313 - DNA, 15 bp, Homo sapiens
gtcaccaaaaacaaa

SEQ ID NO: 1273314 - DNA, 15 bp, Homo sapiens
tgtcaccaaaaacaa

SEQ ID NO: 1273315 - DNA, 15 bp, Homo sapiens
gtgtcaccaaaaaca

SEQ ID NO: 1273316 - DNA, 15 bp, Homo sapiens
ggtgtcaccaaaaac

SEQ ID NO: 1273317 - DNA, 15 bp, Homo sapiens
gggtgtcaccaaaaa

SEQ ID NO: 1273318 - DNA, 15 bp, Homo sapiens
ggggtgtcaccaaaa

SEQ ID NO: 1273319 - DNA, 15 bp, Homo sapiens
gggggtgtcaccaaa

SEQ ID NO: 1273320 - DNA, 15 bp, Homo sapiens
agggggtgtcaccaa

SEQ ID NO: 1273321 - DNA, 15 bp, Homo sapiens
tagggggtgtcacca

SEQ ID NO: 1273322 - DNA, 15 bp, Homo sapiens
atagggggtgtcacc

SEQ ID NO: 1273323 - DNA, 15 bp, Homo sapiens
aatagggggtgtcac

SEQ ID NO: 1273324 - DNA, 15 bp, Homo sapiens
aaatagggggtgtca

SEQ ID NO: 1273325 - DNA, 15 bp, Homo sapiens
aaaatagggggtgtc

SEQ ID NO: 1273326 - DNA, 15 bp, Homo sapiens
aaaaatagggggtgt

SEQ ID NO: 1273327 - DNA, 15 bp, Homo sapiens
aaaaaatagggggtg

SEQ ID NO: 1273328 - DNA, 15 bp, Homo sapiens
taaaaaatagggggt

SEQ ID NO: 1273329 - DNA, 15 bp, Homo sapiens
ctaaaaaataggggg

SEQ ID NO: 1273330 - DNA, 15 bp, Homo sapiens
tctaaaaaatagggg

SEQ ID NO: 1273331 - DNA, 15 bp, Homo sapiens
atctaaaaaataggg

SEQ ID NO: 1273332 - DNA, 15 bp, Homo sapiens
aatctaaaaaatagg

SEQ ID NO: 1273333 - DNA, 15 bp, Homo sapiens
gaatctaaaaaatag

SEQ ID NO: 1273334 - DNA, 15 bp, Homo sapiens
ggaatctaaaaaata

SEQ ID NO: 1273335 - DNA, 15 bp, Homo sapiens
tggaatctaaaaaat

SEQ ID NO: 1273336 - DNA, 15 bp, Homo sapiens
gtggaatctaaaaaa

SEQ ID NO: 1273337 - DNA, 15 bp, Homo sapiens
tgtggaatctaaaaa

SEQ ID NO: 1273338 - DNA, 15 bp, Homo sapiens
atgtggaatctaaaa

SEQ ID NO: 1273339 - DNA, 15 bp, Homo sapiens
tatgtggaatctaaa

SEQ ID NO: 1273340 - DNA, 15 bp, Homo sapiens
atatgtggaatctaa

SEQ ID NO: 1273341 - DNA, 15 bp, Homo sapiens
tatatgtggaatcta

SEQ ID NO: 1273342 - DNA, 15 bp, Homo sapiens
ttatatgtggaatct

SEQ ID NO: 1273343 - DNA, 15 bp, Homo sapiens
tttatatgtggaatc

SEQ ID NO: 1273344 - DNA, 15 bp, Homo sapiens
tctcatttatatgtg

SEQ ID NO: 1273345 - DNA, 15 bp, Homo sapiens
atctcatttatatgt

SEQ ID NO: 1273346 - DNA, 15 bp, Homo sapiens
gatctcatttatatg

SEQ ID NO: 1273347 - DNA, 15 bp, Homo sapiens
tgatctcatttatat

SEQ ID NO: 1273348 - DNA, 15 bp, Homo sapiens
atgatctcatttata

SEQ ID NO: 1273349 - DNA, 15 bp, Homo sapiens
catgatctcatttat

SEQ ID NO: 1273350 - DNA, 15 bp, Homo sapiens
gcatgatctcattta

SEQ ID NO: 1273351 - DNA, 15 bp, Homo sapiens
tgcatgatctcattt

SEQ ID NO: 1273352 - DNA, 15 bp, Homo sapiens
ttgcatgatctcatt

SEQ ID NO: 1273353 - DNA, 15 bp, Homo sapiens
attgcatgatctcat

SEQ ID NO: 1273354 - DNA, 15 bp, Homo sapiens
tattgcatgatctca

SEQ ID NO: 1273355 - DNA, 15 bp, Homo sapiens
ttattgcatgatctc

SEQ ID NO: 1273356 - DNA, 15 bp, Homo sapiens
attattgcatgatct

SEQ ID NO: 1273357 - DNA, 15 bp, Homo sapiens
aattattgcatgatc

SEQ ID NO: 1273358 - DNA, 15 bp, Homo sapiens
aaattattgcatgat

SEQ ID NO: 1273359 - DNA, 15 bp, Homo sapiens
aaaattattgcatga

SEQ ID NO: 1273360 - DNA, 15 bp, Homo sapiens
gaaaattattgcatg

SEQ ID NO: 1273361 - DNA, 15 bp, Homo sapiens
agaaaattattgcat

SEQ ID NO: 1273362 - DNA, 15 bp, Homo sapiens
aagaaaattattgca

SEQ ID NO: 1273363 - DNA, 15 bp, Homo sapiens
cagaaagaaaattat

SEQ ID NO: 1273364 - DNA, 15 bp, Homo sapiens
acagaaagaaaatta

SEQ ID NO: 1273365 - DNA, 15 bp, Homo sapiens
cacagaaagaaaatt

SEQ ID NO: 1273366 - DNA, 15 bp, Homo sapiens
acacagaaagaaaat

SEQ ID NO: 1273367 - DNA, 15 bp, Homo sapiens
gacacagaaagaaaa

SEQ ID NO: 1273368 - DNA, 15 bp, Homo sapiens
agacacagaaagaaa

SEQ ID NO: 1273369 - DNA, 15 bp, Homo sapiens
cagacacagaaagaa

SEQ ID NO: 1273370 - DNA, 15 bp, Homo sapiens
gcagacacagaaaga

SEQ ID NO: 1273371 - DNA, 15 bp, Homo sapiens
agcagacacagaaag

SEQ ID NO: 1273372 - DNA, 15 bp, Homo sapiens
aagcagacacagaaa

SEQ ID NO: 1273373 - DNA, 15 bp, Homo sapiens
taagcagacacagaa

SEQ ID NO: 1273374 - DNA, 15 bp, Homo sapiens
ataagcagacacaga

SEQ ID NO: 1273375 - DNA, 15 bp, Homo sapiens
aataagcagacacag

SEQ ID NO: 1273376 - DNA, 15 bp, Homo sapiens
aaataagcagacaca

SEQ ID NO: 1273377 - DNA, 15 bp, Homo sapiens
gaaataagcagacac

SEQ ID NO: 1273378 - DNA, 15 bp, Homo sapiens
gccattatgctaagt

SEQ ID NO: 1273379 - DNA, 15 bp, Homo sapiens
ggccattatgctaag

SEQ ID NO: 1273380 - DNA, 15 bp, Homo sapiens
aggccattatgctaa

SEQ ID NO: 1273381 - DNA, 15 bp, Homo sapiens
gaggccattatgcta

SEQ ID NO: 1273382 - DNA, 15 bp, Homo sapiens
ggaggccattatgct

SEQ ID NO: 1273383 - DNA, 15 bp, Homo sapiens
tggaggccattatgc

SEQ ID NO: 1273384 - DNA, 15 bp, Homo sapiens
atggaggccattatg

SEQ ID NO: 1273385 - DNA, 15 bp, Homo sapiens
catggaggccattat

SEQ ID NO: 1273386 - DNA, 15 bp, Homo sapiens
acatggaggccatta

SEQ ID NO: 1273387 - DNA, 15 bp, Homo sapiens
gacatggaggccatt

SEQ ID NO: 1273388 - DNA, 15 bp, Homo sapiens
ggacatggaggccat

SEQ ID NO: 1273389 - DNA, 15 bp, Homo sapiens
tggacatggaggcca

SEQ ID NO: 1273390 - DNA, 15 bp, Homo sapiens
gtggacatggaggcc

SEQ ID NO: 1273391 - DNA, 15 bp, Homo sapiens
ggtggacatggaggc

SEQ ID NO: 1273392 - DNA, 15 bp, Homo sapiens
aggtggacatggagg

SEQ ID NO: 1273393 - DNA, 15 bp, Homo sapiens
caggtggacatggag

SEQ ID NO: 1273394 - DNA, 15 bp, Homo sapiens
acaggtggacatgga

SEQ ID NO: 1273395 - DNA, 15 bp, Homo sapiens
cacaggtggacatgg

SEQ ID NO: 1273396 - DNA, 15 bp, Homo sapiens
acacaggtggacatg

SEQ ID NO: 1273397 - DNA, 15 bp, Homo sapiens
aacacaggtggacat

SEQ ID NO: 1273398 - DNA, 15 bp, Homo sapiens
caacacaggtggaca

SEQ ID NO: 1273399 - DNA, 15 bp, Homo sapiens
acaacacaggtggac

SEQ ID NO: 1273400 - DNA, 15 bp, Homo sapiens
cacaacacaggtgga

SEQ ID NO: 1273401 - DNA, 15 bp, Homo sapiens
ccacaacacaggtgg

SEQ ID NO: 1273402 - DNA, 15 bp, Homo sapiens
gccacaacacaggtg

SEQ ID NO: 1273403 - DNA, 15 bp, Homo sapiens
tgccacaacacaggt

SEQ ID NO: 1273404 - DNA, 15 bp, Homo sapiens
ttgccacaacacagg

SEQ ID NO: 1273405 - DNA, 15 bp, Homo sapiens
cttgccacaacacag

SEQ ID NO: 1273406 - DNA, 15 bp, Homo sapiens
acttgccacaacaca

SEQ ID NO: 1273407 - DNA, 15 bp, Homo sapiens
cacttgccacaacac

SEQ ID NO: 1273408 - DNA, 15 bp, Homo sapiens
tcacttgccacaaca

SEQ ID NO: 1273409 - DNA, 15 bp, Homo sapiens
gtcacttgccacaac

SEQ ID NO: 1273410 - DNA, 15 bp, Homo sapiens
tgtcacttgccacaa

SEQ ID NO: 1273411 - DNA, 15 bp, Homo sapiens
ctgtcacttgccaca

SEQ ID NO: 1273412 - DNA, 15 bp, Homo sapiens
cctgtcacttgccac

SEQ ID NO: 1273413 - DNA, 15 bp, Homo sapiens
tcctgtcacttgcca

SEQ ID NO: 1273414 - DNA, 15 bp, Homo sapiens
atcctgtcacttgcc

SEQ ID NO: 1273415 - DNA, 15 bp, Homo sapiens
gatcctgtcacttgc

SEQ ID NO: 1273416 - DNA, 15 bp, Homo sapiens
tgatcctgtcacttg

SEQ ID NO: 1273417 - DNA, 15 bp, Homo sapiens
gtgatcctgtcactt

SEQ ID NO: 1273418 - DNA, 15 bp, Homo sapiens
ggtgatcctgtcact

SEQ ID NO: 1273419 - DNA, 15 bp, Homo sapiens
aggtgatcctgtcac

SEQ ID NO: 1273420 - DNA, 15 bp, Homo sapiens
aaggtgatcctgtca

SEQ ID NO: 1273421 - DNA, 15 bp, Homo sapiens
aaaggtgatcctgtc

SEQ ID NO: 1273422 - DNA, 15 bp, Homo sapiens
gaaaggtgatcctgt

SEQ ID NO: 1273423 - DNA, 15 bp, Homo sapiens
agaaaggtgatcctg

SEQ ID NO: 1273424 - DNA, 15 bp, Homo sapiens
aagaaaggtgatcct

SEQ ID NO: 1273425 - DNA, 15 bp, Homo sapiens
aaagaaaggtgatcc

SEQ ID NO: 1273426 - DNA, 15 bp, Homo sapiens
aaaagaaaggtgatc

SEQ ID NO: 1273427 - DNA, 15 bp, Homo sapiens
aaaaagaaaggtgat

SEQ ID NO: 1273428 - DNA, 15 bp, Homo sapiens
taaaaagaaaggtga

SEQ ID NO: 1273429 - DNA, 15 bp, Homo sapiens
ataaaaagaaaggtg

SEQ ID NO: 1273430 - DNA, 15 bp, Homo sapiens
cataaaaagaaaggt

SEQ ID NO: 1273431 - DNA, 15 bp, Homo sapiens
ccataaaaagaaagg

SEQ ID NO: 1273432 - DNA, 15 bp, Homo sapiens
gccataaaaagaaag

SEQ ID NO: 1273433 - DNA, 15 bp, Homo sapiens
agccataaaaagaaa

SEQ ID NO: 1273434 - DNA, 15 bp, Homo sapiens
cagccataaaaagaa

SEQ ID NO: 1273435 - DNA, 15 bp, Homo sapiens
tcagccataaaaaga

SEQ ID NO: 1273436 - DNA, 15 bp, Homo sapiens
ttcagccataaaaag

SEQ ID NO: 1273437 - DNA, 15 bp, Homo sapiens
tattcagccataaaa

SEQ ID NO: 1273438 - DNA, 15 bp, Homo sapiens
ttattcagccataaa

SEQ ID NO: 1273439 - DNA, 15 bp, Homo sapiens
attattcagccataa

SEQ ID NO: 1273440 - DNA, 15 bp, Homo sapiens
tattattcagccata

SEQ ID NO: 1273441 - DNA, 15 bp, Homo sapiens
atattattcagccat

SEQ ID NO: 1273442 - DNA, 15 bp, Homo sapiens
gaatattattcagcc

SEQ ID NO: 1273443 - DNA, 15 bp, Homo sapiens
ggaatattattcagc

SEQ ID NO: 1273444 - DNA, 15 bp, Homo sapiens
aatggaatattattc

SEQ ID NO: 1273445 - DNA, 15 bp, Homo sapiens
caatggaatattatt

SEQ ID NO: 1273446 - DNA, 15 bp, Homo sapiens
acaatggaatattat

SEQ ID NO: 1273447 - DNA, 15 bp, Homo sapiens
aacaatggaatatta

SEQ ID NO: 1273448 - DNA, 15 bp, Homo sapiens
aaacaatggaatatt

SEQ ID NO: 1273449 - DNA, 15 bp, Homo sapiens
taaacaatggaatat

SEQ ID NO: 1273450 - DNA, 15 bp, Homo sapiens
ataaacaatggaata

SEQ ID NO: 1273451 - DNA, 15 bp, Homo sapiens
tataaacaatggaat

SEQ ID NO: 1273452 - DNA, 15 bp, Homo sapiens
atataaacaatggaa

SEQ ID NO: 1273453 - DNA, 15 bp, Homo sapiens
tatataaacaatgga

SEQ ID NO: 1273454 - DNA, 15 bp, Homo sapiens
atatataaacaatgg

SEQ ID NO: 1273455 - DNA, 15 bp, Homo sapiens
tatatataaacaatg

SEQ ID NO: 1273456 - DNA, 15 bp, Homo sapiens
gtatatataaacaat

SEQ ID NO: 1273457 - DNA, 15 bp, Homo sapiens
agtatatataaacaa

SEQ ID NO: 1273458 - DNA, 15 bp, Homo sapiens
tagtatatataaaca

SEQ ID NO: 1273459 - DNA, 15 bp, Homo sapiens
gtagtatatataaac

SEQ ID NO: 1273460 - DNA, 15 bp, Homo sapiens
tgtagtatatataaa

SEQ ID NO: 1273461 - DNA, 15 bp, Homo sapiens
atgtagtatatataa

SEQ ID NO: 1273462 - DNA, 15 bp, Homo sapiens
aatgtagtatatata

SEQ ID NO: 1273463 - DNA, 15 bp, Homo sapiens
aaatgtagtatatat

SEQ ID NO: 1273464 - DNA, 15 bp, Homo sapiens
aaaatgtagtatata

SEQ ID NO: 1273465 - DNA, 15 bp, Homo sapiens
caaaatgtagtatat

SEQ ID NO: 1273466 - DNA, 15 bp, Homo sapiens
acaaaatgtagtata

SEQ ID NO: 1273467 - DNA, 15 bp, Homo sapiens
aacaaaatgtagtat

SEQ ID NO: 1273468 - DNA, 15 bp, Homo sapiens
aaacaaaatgtagta

SEQ ID NO: 1273469 - DNA, 15 bp, Homo sapiens
taaacaaaatgtagt

SEQ ID NO: 1273470 - DNA, 15 bp, Homo sapiens
ataaacaaaatgtag

SEQ ID NO: 1273471 - DNA, 15 bp, Homo sapiens
gataaacaaaatgta

SEQ ID NO: 1273472 - DNA, 15 bp, Homo sapiens
gtggataaacaaaat

SEQ ID NO: 1273473 - DNA, 15 bp, Homo sapiens
agtggataaacaaaa

SEQ ID NO: 1273474 - DNA, 15 bp, Homo sapiens
aagtggataaacaaa

SEQ ID NO: 1273475 - DNA, 15 bp, Homo sapiens
gaagtggataaacaa

SEQ ID NO: 1273476 - DNA, 15 bp, Homo sapiens
agaagtggataaaca

SEQ ID NO: 1273477 - DNA, 15 bp, Homo sapiens
gagaagtggataaac

SEQ ID NO: 1273478 - DNA, 15 bp, Homo sapiens
agagaagtggataaa

SEQ ID NO: 1273479 - DNA, 15 bp, Homo sapiens
cagagaagtggataa

SEQ ID NO: 1273480 - DNA, 15 bp, Homo sapiens
acagagaagtggata

SEQ ID NO: 1273481 - DNA, 15 bp, Homo sapiens
aacagagaagtggat

SEQ ID NO: 1273482 - DNA, 15 bp, Homo sapiens
caacagagaagtgga

SEQ ID NO: 1273483 - DNA, 15 bp, Homo sapiens
tcaacagagaagtgg

SEQ ID NO: 1273484 - DNA, 15 bp, Homo sapiens
gtcaacagagaagtg

SEQ ID NO: 1273485 - DNA, 15 bp, Homo sapiens
tgtcaacagagaagt

SEQ ID NO: 1273486 - DNA, 15 bp, Homo sapiens
ctgtcaacagagaag

SEQ ID NO: 1273487 - DNA, 15 bp, Homo sapiens
tctgtcaacagagaa

SEQ ID NO: 1273488 - DNA, 15 bp, Homo sapiens
gtctgtcaacagaga

SEQ ID NO: 1273489 - DNA, 15 bp, Homo sapiens
tgtctgtcaacagag

SEQ ID NO: 1273490 - DNA, 15 bp, Homo sapiens
gtgtctgtcaacaga

SEQ ID NO: 1273491 - DNA, 15 bp, Homo sapiens
tgtgtctgtcaacag

SEQ ID NO: 1273492 - DNA, 15 bp, Homo sapiens
atgtgtctgtcaaca

SEQ ID NO: 1273493 - DNA, 15 bp, Homo sapiens
tatgtgtctgtcaac

SEQ ID NO: 1273494 - DNA, 15 bp, Homo sapiens
ctatgtgtctgtcaa

SEQ ID NO: 1273495 - DNA, 15 bp, Homo sapiens
cctatgtgtctgtca

SEQ ID NO: 1273496 - DNA, 15 bp, Homo sapiens
acctatgtgtctgtc

SEQ ID NO: 1273497 - DNA, 15 bp, Homo sapiens
aacctatgtgtctgt

SEQ ID NO: 1273498 - DNA, 15 bp, Homo sapiens
caacctatgtgtctg

SEQ ID NO: 1273499 - DNA, 15 bp, Homo sapiens
acaacctatgtgtct

SEQ ID NO: 1273500 - DNA, 15 bp, Homo sapiens
aacaacctatgtgtc

SEQ ID NO: 1273501 - DNA, 15 bp, Homo sapiens
aaacaacctatgtgt

SEQ ID NO: 1273502 - DNA, 15 bp, Homo sapiens
gaaacaacctatgtg

SEQ ID NO: 1273503 - DNA, 15 bp, Homo sapiens
ggaaacaacctatgt

SEQ ID NO: 1273504 - DNA, 15 bp, Homo sapiens
tggaaacaacctatg

SEQ ID NO: 1273505 - DNA, 15 bp, Homo sapiens
atggaaacaacctat

SEQ ID NO: 1273506 - DNA, 15 bp, Homo sapiens
tatggaaacaaccta

SEQ ID NO: 1273507 - DNA, 15 bp, Homo sapiens
atatggaaacaacct

SEQ ID NO: 1273508 - DNA, 15 bp, Homo sapiens
aatatggaaacaacc

SEQ ID NO: 1273509 - DNA, 15 bp, Homo sapiens
taatatggaaacaac

SEQ ID NO: 1273510 - DNA, 15 bp, Homo sapiens
gtaatatggaaacaa

SEQ ID NO: 1273511 - DNA, 15 bp, Homo sapiens
agtaatatggaaaca

SEQ ID NO: 1273512 - DNA, 15 bp, Homo sapiens
aagtaatatggaaac

SEQ ID NO: 1273513 - DNA, 15 bp, Homo sapiens
taagtaatatggaaa

SEQ ID NO: 1273514 - DNA, 15 bp, Homo sapiens
ctaagtaatatggaa

SEQ ID NO: 1273515 - DNA, 15 bp, Homo sapiens
gctaagtaatatgga

SEQ ID NO: 1273516 - DNA, 15 bp, Homo sapiens
agctaagtaatatgg

SEQ ID NO: 1273517 - DNA, 15 bp, Homo sapiens
cagctaagtaatatg

SEQ ID NO: 1273518 - DNA, 15 bp, Homo sapiens
acagctaagtaatat

SEQ ID NO: 1273519 - DNA, 15 bp, Homo sapiens
tacagctaagtaata

SEQ ID NO: 1273520 - DNA, 15 bp, Homo sapiens
atacagctaagtaat

SEQ ID NO: 1273521 - DNA, 15 bp, Homo sapiens
tatacagctaagtaa

SEQ ID NO: 1273522 - DNA, 15 bp, Homo sapiens
atatacagctaagta

SEQ ID NO: 1273523 - DNA, 15 bp, Homo sapiens
tatatacagctaagt

SEQ ID NO: 1273524 - DNA, 15 bp, Homo sapiens
ctatatacagctaag

SEQ ID NO: 1273525 - DNA, 15 bp, Homo sapiens
tctatatacagctaa

SEQ ID NO: 1273526 - DNA, 15 bp, Homo sapiens
ttctatatacagcta

SEQ ID NO: 1273527 - DNA, 15 bp, Homo sapiens
tttctatatacagct

SEQ ID NO: 1273528 - DNA, 15 bp, Homo sapiens
atttctatatacagc

SEQ ID NO: 1273529 - DNA, 15 bp, Homo sapiens
tatttctatatacag

SEQ ID NO: 1273530 - DNA, 15 bp, Homo sapiens
gtatttctatataca

SEQ ID NO: 1273531 - DNA, 15 bp, Homo sapiens
tgtatttctatatac

SEQ ID NO: 1273532 - DNA, 15 bp, Homo sapiens
ctgtatttctatata

SEQ ID NO: 1273533 - DNA, 15 bp, Homo sapiens
cctgtatttctatat

SEQ ID NO: 1273534 - DNA, 15 bp, Homo sapiens
acctgtatttctata

SEQ ID NO: 1273535 - DNA, 15 bp, Homo sapiens
cacctgtatttctat

SEQ ID NO: 1273536 - DNA, 15 bp, Homo sapiens
ccacctgtatttcta

SEQ ID NO: 1273537 - DNA, 15 bp, Homo sapiens
accacctgtatttct

SEQ ID NO: 1273538 - DNA, 15 bp, Homo sapiens
aaccacctgtatttc

SEQ ID NO: 1273539 - DNA, 15 bp, Homo sapiens
aaaccacctgtattt

SEQ ID NO: 1273540 - DNA, 15 bp, Homo sapiens
aaaaccacctgtatt

SEQ ID NO: 1273541 - DNA, 15 bp, Homo sapiens
aaaaaccacctgtat

SEQ ID NO: 1273542 - DNA, 15 bp, Homo sapiens
caaaaaccacctgta

SEQ ID NO: 1273543 - DNA, 15 bp, Homo sapiens
acaaaaaccacctgt

SEQ ID NO: 1273544 - DNA, 15 bp, Homo sapiens
tacaaaaaccacctg

SEQ ID NO: 1273545 - DNA, 15 bp, Homo sapiens
atacaaaaaccacct

SEQ ID NO: 1273546 - DNA, 15 bp, Homo sapiens
catacaaaaaccacc

SEQ ID NO: 1273547 - DNA, 15 bp, Homo sapiens
acatacaaaaaccac

SEQ ID NO: 1273548 - DNA, 15 bp, Homo sapiens
aacatacaaaaacca

SEQ ID NO: 1273549 - DNA, 15 bp, Homo sapiens
caacatacaaaaacc

SEQ ID NO: 1273550 - DNA, 15 bp, Homo sapiens
tcaacatacaaaaac

SEQ ID NO: 1273551 - DNA, 15 bp, Homo sapiens
atcaacatacaaaaa

SEQ ID NO: 1273552 - DNA, 15 bp, Homo sapiens
aatcaacatacaaaa

SEQ ID NO: 1273553 - DNA, 15 bp, Homo sapiens
aaatcaacatacaaa

SEQ ID NO: 1273554 - DNA, 15 bp, Homo sapiens
aaaatcaacatacaa

SEQ ID NO: 1273555 - DNA, 15 bp, Homo sapiens
caaaatcaacataca

SEQ ID NO: 1273556 - DNA, 15 bp, Homo sapiens
acaaaatcaacatac

SEQ ID NO: 1273557 - DNA, 15 bp, Homo sapiens
tacaaaatcaacata

SEQ ID NO: 1273558 - DNA, 15 bp, Homo sapiens
gtacaaaatcaacat

SEQ ID NO: 1273559 - DNA, 15 bp, Homo sapiens
agtacaaaatcaaca

SEQ ID NO: 1273560 - DNA, 15 bp, Homo sapiens
gagtacaaaatcaac

SEQ ID NO: 1273561 - DNA, 15 bp, Homo sapiens
agagtacaaaatcaa

SEQ ID NO: 1273562 - DNA, 15 bp, Homo sapiens
cagagtacaaaatca

SEQ ID NO: 1273563 - DNA, 15 bp, Homo sapiens
tcagagtacaaaatc

SEQ ID NO: 1273564 - DNA, 15 bp, Homo sapiens
ttcagagtacaaaat

SEQ ID NO: 1273565 - DNA, 15 bp, Homo sapiens
tttcagagtacaaaa

SEQ ID NO: 1273566 - DNA, 15 bp, Homo sapiens
ttttcagagtacaaa

SEQ ID NO: 1273567 - DNA, 15 bp, Homo sapiens
gttttcagagtacaa

SEQ ID NO: 1273568 - DNA, 15 bp, Homo sapiens
agttttcagagtaca

SEQ ID NO: 1273569 - DNA, 15 bp, Homo sapiens
aagttttcagagtac

SEQ ID NO: 1273570 - DNA, 15 bp, Homo sapiens
caagttttcagagta

SEQ ID NO: 1273571 - DNA, 15 bp, Homo sapiens
ccaagttttcagagt

SEQ ID NO: 1273572 - DNA, 15 bp, Homo sapiens
accaagttttcagag

SEQ ID NO: 1273573 - DNA, 15 bp, Homo sapiens
caccaagttttcaga

SEQ ID NO: 1273574 - DNA, 15 bp, Homo sapiens
tcaccaagttttcag

SEQ ID NO: 1273575 - DNA, 15 bp, Homo sapiens
ttcaccaagttttca

SEQ ID NO: 1273576 - DNA, 15 bp, Homo sapiens
gttcaccaagttttc

SEQ ID NO: 1273577 - DNA, 15 bp, Homo sapiens
agttcaccaagtttt

SEQ ID NO: 1273578 - DNA, 15 bp, Homo sapiens
tagttcaccaagttt

SEQ ID NO: 1273579 - DNA, 15 bp, Homo sapiens
ttagttcaccaagtt

SEQ ID NO: 1273580 - DNA, 15 bp, Homo sapiens
attagttcaccaagt

SEQ ID NO: 1273581 - DNA, 15 bp, Homo sapiens
aattagttcaccaag

SEQ ID NO: 1273582 - DNA, 15 bp, Homo sapiens
aaattagttcaccaa

SEQ ID NO: 1273583 - DNA, 15 bp, Homo sapiens
taaattagttcacca

SEQ ID NO: 1273584 - DNA, 15 bp, Homo sapiens
ataaattagttcacc

SEQ ID NO: 1273585 - DNA, 15 bp, Homo sapiens
aataaattagttcac

SEQ ID NO: 1273586 - DNA, 15 bp, Homo sapiens
taataaattagttca

SEQ ID NO: 1273587 - DNA, 15 bp, Homo sapiens
ctaataaattagttc

SEQ ID NO: 1273588 - DNA, 15 bp, Homo sapiens
gctaataaattagtt

SEQ ID NO: 1273589 - DNA, 15 bp, Homo sapiens
agctaataaattagt

SEQ ID NO: 1273590 - DNA, 15 bp, Homo sapiens
aagctaataaattag

SEQ ID NO: 1273591 - DNA, 15 bp, Homo sapiens
gaagctaataaatta

SEQ ID NO: 1273592 - DNA, 15 bp, Homo sapiens
tgaagctaataaatt

SEQ ID NO: 1273593 - DNA, 15 bp, Homo sapiens
ttgaagctaataaat

SEQ ID NO: 1273594 - DNA, 15 bp, Homo sapiens
attgaagctaataaa

SEQ ID NO: 1273595 - DNA, 15 bp, Homo sapiens
tattgaagctaataa

SEQ ID NO: 1273596 - DNA, 15 bp, Homo sapiens
ctattgaagctaata

SEQ ID NO: 1273597 - DNA, 15 bp, Homo sapiens
actattgaagctaat

SEQ ID NO: 1273598 - DNA, 15 bp, Homo sapiens
aactattgaagctaa

SEQ ID NO: 1273599 - DNA, 15 bp, Homo sapiens
aaactattgaagcta

SEQ ID NO: 1273600 - DNA, 15 bp, Homo sapiens
gaaactattgaagct

SEQ ID NO: 1273601 - DNA, 15 bp, Homo sapiens
agaaactattgaagc

SEQ ID NO: 1273602 - DNA, 15 bp, Homo sapiens
aagaaactattgaag

SEQ ID NO: 1273603 - DNA, 15 bp, Homo sapiens
taagaaactattgaa

SEQ ID NO: 1273604 - DNA, 15 bp, Homo sapiens
ctaagaaactattga

SEQ ID NO: 1273605 - DNA, 15 bp, Homo sapiens
actaagaaactattg

SEQ ID NO: 1273606 - DNA, 15 bp, Homo sapiens
cactaagaaactatt

SEQ ID NO: 1273607 - DNA, 15 bp, Homo sapiens
tcactaagaaactat

SEQ ID NO: 1273608 - DNA, 15 bp, Homo sapiens
ttcactaagaaacta

SEQ ID NO: 1273609 - DNA, 15 bp, Homo sapiens
attcactaagaaact

SEQ ID NO: 1273610 - DNA, 15 bp, Homo sapiens
aattcactaagaaac

SEQ ID NO: 1273611 - DNA, 15 bp, Homo sapiens
gaattcactaagaaa

SEQ ID NO: 1273612 - DNA, 15 bp, Homo sapiens
ggaattcactaagaa

SEQ ID NO: 1273613 - DNA, 15 bp, Homo sapiens
aggaattcactaaga

SEQ ID NO: 1273614 - DNA, 15 bp, Homo sapiens
aaggaattcactaag

SEQ ID NO: 1273615 - DNA, 15 bp, Homo sapiens
taaggaattcactaa

SEQ ID NO: 1273616 - DNA, 15 bp, Homo sapiens
ctaaggaattcacta

SEQ ID NO: 1273617 - DNA, 15 bp, Homo sapiens
cctaaggaattcact

SEQ ID NO: 1273618 - DNA, 15 bp, Homo sapiens
tcctaaggaattcac

SEQ ID NO: 1273619 - DNA, 15 bp, Homo sapiens
atcctaaggaattca

SEQ ID NO: 1273620 - DNA, 15 bp, Homo sapiens
aatcctaaggaattc

SEQ ID NO: 1273621 - DNA, 15 bp, Homo sapiens
aaatcctaaggaatt

SEQ ID NO: 1273622 - DNA, 15 bp, Homo sapiens
aaaatcctaaggaat

SEQ ID NO: 1273623 - DNA, 15 bp, Homo sapiens
gaaaatcctaaggaa

SEQ ID NO: 1273624 - DNA, 15 bp, Homo sapiens
agaaaatcctaagga

SEQ ID NO: 1273625 - DNA, 15 bp, Homo sapiens
tagaaaatcctaagg

SEQ ID NO: 1273626 - DNA, 15 bp, Homo sapiens
ctagaaaatcctaag

SEQ ID NO: 1273627 - DNA, 15 bp, Homo sapiens
tctagaaaatcctaa

SEQ ID NO: 1273628 - DNA, 15 bp, Homo sapiens
atctagaaaatccta

SEQ ID NO: 1273629 - DNA, 15 bp, Homo sapiens
catctagaaaatcct

SEQ ID NO: 1273630 - DNA, 15 bp, Homo sapiens
acatctagaaaatcc

SEQ ID NO: 1273631 - DNA, 15 bp, Homo sapiens
tacatctagaaaatc

SEQ ID NO: 1273632 - DNA, 15 bp, Homo sapiens
ttacatctagaaaat

SEQ ID NO: 1273633 - DNA, 15 bp, Homo sapiens
tttacatctagaaaa

SEQ ID NO: 1273634 - DNA, 15 bp, Homo sapiens
ttttacatctagaaa

SEQ ID NO: 1273635 - DNA, 15 bp, Homo sapiens
attttacatctagaa

SEQ ID NO: 1273636 - DNA, 15 bp, Homo sapiens
tattttacatctaga

SEQ ID NO: 1273637 - DNA, 15 bp, Homo sapiens
ttattttacatctag

SEQ ID NO: 1273638 - DNA, 15 bp, Homo sapiens
attattttacatcta

SEQ ID NO: 1273639 - DNA, 15 bp, Homo sapiens
cattattttacatct

SEQ ID NO: 1273640 - DNA, 15 bp, Homo sapiens
acattattttacatc

SEQ ID NO: 1273641 - DNA, 15 bp, Homo sapiens
gacattattttacat

SEQ ID NO: 1273642 - DNA, 15 bp, Homo sapiens
tgacattattttaca

SEQ ID NO: 1273643 - DNA, 15 bp, Homo sapiens
atgacattattttac

SEQ ID NO: 1273644 - DNA, 15 bp, Homo sapiens
aatgacattatttta

SEQ ID NO: 1273645 - DNA, 15 bp, Homo sapiens
aaatgacattatttt

SEQ ID NO: 1273646 - DNA, 15 bp, Homo sapiens
caaatgacattattt

SEQ ID NO: 1273647 - DNA, 15 bp, Homo sapiens
gcaaatgacattatt

SEQ ID NO: 1273648 - DNA, 15 bp, Homo sapiens
tgcaaatgacattat

SEQ ID NO: 1273649 - DNA, 15 bp, Homo sapiens
ttgcaaatgacatta

SEQ ID NO: 1273650 - DNA, 15 bp, Homo sapiens
tttgcaaatgacatt

SEQ ID NO: 1273651 - DNA, 15 bp, Homo sapiens
atttgcaaatgacat

SEQ ID NO: 1273652 - DNA, 15 bp, Homo sapiens
tatttgcaaatgaca

SEQ ID NO: 1273653 - DNA, 15 bp, Homo sapiens
ctatttgcaaatgac

SEQ ID NO: 1273654 - DNA, 15 bp, Homo sapiens
tctatttgcaaatga

SEQ ID NO: 1273655 - DNA, 15 bp, Homo sapiens
ctctatttgcaaatg

SEQ ID NO: 1273656 - DNA, 15 bp, Homo sapiens
tctctatttgcaaat

SEQ ID NO: 1273657 - DNA, 15 bp, Homo sapiens
atctctatttgcaaa

SEQ ID NO: 1273658 - DNA, 15 bp, Homo sapiens
tatctctatttgcaa

SEQ ID NO: 1273659 - DNA, 15 bp, Homo sapiens
ctatctctatttgca

SEQ ID NO: 1273660 - DNA, 15 bp, Homo sapiens
actatctctatttgc

SEQ ID NO: 1273661 - DNA, 15 bp, Homo sapiens
aactatctctatttg

SEQ ID NO: 1273662 - DNA, 15 bp, Homo sapiens
aaactatctctattt

SEQ ID NO: 1273663 - DNA, 15 bp, Homo sapiens
aaaactatctctatt

SEQ ID NO: 1273664 - DNA, 15 bp, Homo sapiens
taaaactatctctat

SEQ ID NO: 1273665 - DNA, 15 bp, Homo sapiens
gtaaaactatctcta

SEQ ID NO: 1273666 - DNA, 15 bp, Homo sapiens
agtaaaactatctct

SEQ ID NO: 1273667 - DNA, 15 bp, Homo sapiens
aagtaaaactatctc

SEQ ID NO: 1273668 - DNA, 15 bp, Homo sapiens
gaagtaaaactatct

SEQ ID NO: 1273669 - DNA, 15 bp, Homo sapiens
agaagtaaaactatc

SEQ ID NO: 1273670 - DNA, 15 bp, Homo sapiens
aagaagtaaaactat

SEQ ID NO: 1273671 - DNA, 15 bp, Homo sapiens
gaagaagtaaaacta

SEQ ID NO: 1273672 - DNA, 15 bp, Homo sapiens
ggaagaagtaaaact

SEQ ID NO: 1273673 - DNA, 15 bp, Homo sapiens
aggaagaagtaaaac

SEQ ID NO: 1273674 - DNA, 15 bp, Homo sapiens
aaggaagaagtaaaa

SEQ ID NO: 1273675 - DNA, 15 bp, Homo sapiens
aaaggaagaagtaaa

SEQ ID NO: 1273676 - DNA, 15 bp, Homo sapiens
taaaggaagaagtaa

SEQ ID NO: 1273677 - DNA, 15 bp, Homo sapiens
ttaaaggaagaagta

SEQ ID NO: 1273678 - DNA, 15 bp, Homo sapiens
tttaaaggaagaagt

SEQ ID NO: 1273679 - DNA, 15 bp, Homo sapiens
ttttaaaggaagaag

SEQ ID NO: 1273680 - DNA, 15 bp, Homo sapiens
attttaaaggaagaa

SEQ ID NO: 1273681 - DNA, 15 bp, Homo sapiens
gattttaaaggaaga

SEQ ID NO: 1273682 - DNA, 15 bp, Homo sapiens
agattttaaaggaag

SEQ ID NO: 1273683 - DNA, 15 bp, Homo sapiens
cagattttaaaggaa

SEQ ID NO: 1273684 - DNA, 15 bp, Homo sapiens
ccagattttaaagga

SEQ ID NO: 1273685 - DNA, 15 bp, Homo sapiens
tccagattttaaagg

SEQ ID NO: 1273686 - DNA, 15 bp, Homo sapiens
atccagattttaaag

SEQ ID NO: 1273687 - DNA, 15 bp, Homo sapiens
tatccagattttaaa

SEQ ID NO: 1273688 - DNA, 15 bp, Homo sapiens
gtatccagattttaa

SEQ ID NO: 1273689 - DNA, 15 bp, Homo sapiens
ggtatccagatttta

SEQ ID NO: 1273690 - DNA, 15 bp, Homo sapiens
aggtatccagatttt

SEQ ID NO: 1273691 - DNA, 15 bp, Homo sapiens
aaggtatccagattt

SEQ ID NO: 1273692 - DNA, 15 bp, Homo sapiens
aaaggtatccagatt

SEQ ID NO: 1273693 - DNA, 15 bp, Homo sapiens
aaaaggtatccagat

SEQ ID NO: 1273694 - DNA, 15 bp, Homo sapiens
taaaaggtatccaga

SEQ ID NO: 1273695 - DNA, 15 bp, Homo sapiens
ataaaaggtatccag

SEQ ID NO: 1273696 - DNA, 15 bp, Homo sapiens
aataaaaggtatcca

SEQ ID NO: 1273697 - DNA, 15 bp, Homo sapiens
aaataaaaggtatcc

SEQ ID NO: 1273698 - DNA, 15 bp, Homo sapiens
gaaataaaaggtatc

SEQ ID NO: 1273699 - DNA, 15 bp, Homo sapiens
agaaataaaaggtat

SEQ ID NO: 1273700 - DNA, 15 bp, Homo sapiens
aagaaataaaaggta

SEQ ID NO: 1273701 - DNA, 15 bp, Homo sapiens
aaagaaataaaaggt

SEQ ID NO: 1273702 - DNA, 15 bp, Homo sapiens
aaaagaaataaaagg

SEQ ID NO: 1273703 - DNA, 15 bp, Homo sapiens
aaaaagaaataaaag

SEQ ID NO: 1273704 - DNA, 15 bp, Homo sapiens
gaaaaagaaataaaa

SEQ ID NO: 1273705 - DNA, 15 bp, Homo sapiens
agaaaaagaaataaa

SEQ ID NO: 1273706 - DNA, 15 bp, Homo sapiens
aagaaaaagaaataa

SEQ ID NO: 1273707 - DNA, 15 bp, Homo sapiens
caagaaaaagaaata

SEQ ID NO: 1273708 - DNA, 15 bp, Homo sapiens
gcaagaaaaagaaat

SEQ ID NO: 1273709 - DNA, 15 bp, Homo sapiens
ggcaagaaaaagaaa

SEQ ID NO: 1273710 - DNA, 15 bp, Homo sapiens
aggcaagaaaaagaa

SEQ ID NO: 1273711 - DNA, 15 bp, Homo sapiens
taggcaagaaaaaga

SEQ ID NO: 1273712 - DNA, 15 bp, Homo sapiens
ttaggcaagaaaaag

SEQ ID NO: 1273713 - DNA, 15 bp, Homo sapiens
attaggcaagaaaaa

SEQ ID NO: 1273714 - DNA, 15 bp, Homo sapiens
aattaggcaagaaaa

SEQ ID NO: 1273715 - DNA, 15 bp, Homo sapiens
caattaggcaagaaa

SEQ ID NO: 1273716 - DNA, 15 bp, Homo sapiens
gcaattaggcaagaa

SEQ ID NO: 1273717 - DNA, 15 bp, Homo sapiens
agcaattaggcaaga

SEQ ID NO: 1273718 - DNA, 15 bp, Homo sapiens
aagcaattaggcaag

SEQ ID NO: 1273719 - DNA, 15 bp, Homo sapiens
aaagcaattaggcaa

SEQ ID NO: 1273720 - DNA, 15 bp, Homo sapiens
caaagcaattaggca

SEQ ID NO: 1273721 - DNA, 15 bp, Homo sapiens
acaaagcaattaggc

SEQ ID NO: 1273722 - DNA, 15 bp, Homo sapiens
gacaaagcaattagg

SEQ ID NO: 1273723 - DNA, 15 bp, Homo sapiens
agacaaagcaattag

SEQ ID NO: 1273724 - DNA, 15 bp, Homo sapiens
tagacaaagcaatta

SEQ ID NO: 1273725 - DNA, 15 bp, Homo sapiens
ttagacaaagcaatt

SEQ ID NO: 1273726 - DNA, 15 bp, Homo sapiens
tttagacaaagcaat

SEQ ID NO: 1273727 - DNA, 15 bp, Homo sapiens
ttttagacaaagcaa

SEQ ID NO: 1273728 - DNA, 15 bp, Homo sapiens
attttagacaaagca

SEQ ID NO: 1273729 - DNA, 15 bp, Homo sapiens
gattttagacaaagc

SEQ ID NO: 1273730 - DNA, 15 bp, Homo sapiens
agattttagacaaag

SEQ ID NO: 1273731 - DNA, 15 bp, Homo sapiens
gagattttagacaaa

SEQ ID NO: 1273732 - DNA, 15 bp, Homo sapiens
ggagattttagacaa

SEQ ID NO: 1273733 - DNA, 15 bp, Homo sapiens
tggagattttagaca

SEQ ID NO: 1273734 - DNA, 15 bp, Homo sapiens
ttggagattttagac

SEQ ID NO: 1273735 - DNA, 15 bp, Homo sapiens
attggagattttaga

SEQ ID NO: 1273736 - DNA, 15 bp, Homo sapiens
tattggagattttag

SEQ ID NO: 1273737 - DNA, 15 bp, Homo sapiens
ctattggagatttta

SEQ ID NO: 1273738 - DNA, 15 bp, Homo sapiens
tctattggagatttt

SEQ ID NO: 1273739 - DNA, 15 bp, Homo sapiens
ttctattggagattt

SEQ ID NO: 1273740 - DNA, 15 bp, Homo sapiens
attctattggagatt

SEQ ID NO: 1273741 - DNA, 15 bp, Homo sapiens
cattctattggagat

SEQ ID NO: 1273742 - DNA, 15 bp, Homo sapiens
acattctattggaga

SEQ ID NO: 1273743 - DNA, 15 bp, Homo sapiens
aacattctattggag

SEQ ID NO: 1273744 - DNA, 15 bp, Homo sapiens
caacattctattgga

SEQ ID NO: 1273745 - DNA, 15 bp, Homo sapiens
tcaacattctattgg

SEQ ID NO: 1273746 - DNA, 15 bp, Homo sapiens
ttcaacattctattg

SEQ ID NO: 1273747 - DNA, 15 bp, Homo sapiens
attcaacattctatt

SEQ ID NO: 1273748 - DNA, 15 bp, Homo sapiens
tattcaacattctat

SEQ ID NO: 1273749 - DNA, 15 bp, Homo sapiens
ctattcaacattcta

SEQ ID NO: 1273750 - DNA, 15 bp, Homo sapiens
tctattcaacattct

SEQ ID NO: 1273751 - DNA, 15 bp, Homo sapiens
ttctattcaacattc

SEQ ID NO: 1273752 - DNA, 15 bp, Homo sapiens
attctattcaacatt

SEQ ID NO: 1273753 - DNA, 15 bp, Homo sapiens
cattctattcaacat

SEQ ID NO: 1273754 - DNA, 15 bp, Homo sapiens
tcattctattcaaca

SEQ ID NO: 1273755 - DNA, 15 bp, Homo sapiens
atcattctattcaac

SEQ ID NO: 1273756 - DNA, 15 bp, Homo sapiens
catcattctattcaa

SEQ ID NO: 1273757 - DNA, 15 bp, Homo sapiens
tcatcattctattca

SEQ ID NO: 1273758 - DNA, 15 bp, Homo sapiens
ctcatcattctattc

SEQ ID NO: 1273759 - DNA, 15 bp, Homo sapiens
tctcatcattctatt

SEQ ID NO: 1273760 - DNA, 15 bp, Homo sapiens
ttctcatcattctat

SEQ ID NO: 1273761 - DNA, 15 bp, Homo sapiens
cttctcatcattcta

SEQ ID NO: 1273762 - DNA, 15 bp, Homo sapiens
ccttctcatcattct

SEQ ID NO: 1273763 - DNA, 15 bp, Homo sapiens
tccttctcatcattc

SEQ ID NO: 1273764 - DNA, 15 bp, Homo sapiens
gtccttctcatcatt

SEQ ID NO: 1273765 - DNA, 15 bp, Homo sapiens
tgtccttctcatcat

SEQ ID NO: 1273766 - DNA, 15 bp, Homo sapiens
atgtccttctcatca

SEQ ID NO: 1273767 - DNA, 15 bp, Homo sapiens
aatgtccttctcatc

SEQ ID NO: 1273768 - DNA, 15 bp, Homo sapiens
caatgtccttctcat

SEQ ID NO: 1273769 - DNA, 15 bp, Homo sapiens
acaatgtccttctca

SEQ ID NO: 1273770 - DNA, 15 bp, Homo sapiens
aacaatgtccttctc

SEQ ID NO: 1273771 - DNA, 15 bp, Homo sapiens
caacaatgtccttct

SEQ ID NO: 1273772 - DNA, 15 bp, Homo sapiens
acaacaatgtccttc

SEQ ID NO: 1273773 - DNA, 15 bp, Homo sapiens
gacaacaatgtcctt

SEQ ID NO: 1273774 - DNA, 15 bp, Homo sapiens
agacaacaatgtcct

SEQ ID NO: 1273775 - DNA, 15 bp, Homo sapiens
gagacaacaatgtcc

SEQ ID NO: 1273776 - DNA, 15 bp, Homo sapiens
agagacaacaatgtc

SEQ ID NO: 1273777 - DNA, 15 bp, Homo sapiens
aagagacaacaatgt

SEQ ID NO: 1273778 - DNA, 15 bp, Homo sapiens
gaagagacaacaatg

SEQ ID NO: 1273779 - DNA, 15 bp, Homo sapiens
ggaagagacaacaat

SEQ ID NO: 1273780 - DNA, 15 bp, Homo sapiens
aggaagagacaacaa

SEQ ID NO: 1273781 - DNA, 15 bp, Homo sapiens
caggaagagacaaca

SEQ ID NO: 1273782 - DNA, 15 bp, Homo sapiens
ccaggaagagacaac

SEQ ID NO: 1273783 - DNA, 15 bp, Homo sapiens
tccaggaagagacaa

SEQ ID NO: 1273784 - DNA, 15 bp, Homo sapiens
atccaggaagagaca

SEQ ID NO: 1273785 - DNA, 15 bp, Homo sapiens
gatccaggaagagac

SEQ ID NO: 1273786 - DNA, 15 bp, Homo sapiens
agatccaggaagaga

SEQ ID NO: 1273787 - DNA, 15 bp, Homo sapiens
aagatccaggaagag

SEQ ID NO: 1273788 - DNA, 15 bp, Homo sapiens
taagatccaggaaga

SEQ ID NO: 1273789 - DNA, 15 bp, Homo sapiens
ctaagatccaggaag

SEQ ID NO: 1273790 - DNA, 15 bp, Homo sapiens
actaagatccaggaa

SEQ ID NO: 1273791 - DNA, 15 bp, Homo sapiens
cactaagatccagga

SEQ ID NO: 1273792 - DNA, 15 bp, Homo sapiens
ccactaagatccagg

SEQ ID NO: 1273793 - DNA, 15 bp, Homo sapiens
cccactaagatccag

SEQ ID NO: 1273794 - DNA, 15 bp, Homo sapiens
tcccactaagatcca

SEQ ID NO: 1273795 - DNA, 15 bp, Homo sapiens
ctcccactaagatcc

SEQ ID NO: 1273796 - DNA, 15 bp, Homo sapiens
tctcccactaagatc

SEQ ID NO: 1273797 - DNA, 15 bp, Homo sapiens
gtctcccactaagat

SEQ ID NO: 1273798 - DNA, 15 bp, Homo sapiens
ggtctcccactaaga

SEQ ID NO: 1273799 - DNA, 15 bp, Homo sapiens
tggtctcccactaag

SEQ ID NO: 1273800 - DNA, 15 bp, Homo sapiens
atggtctcccactaa

SEQ ID NO: 1273801 - DNA, 15 bp, Homo sapiens
gatggtctcccacta

SEQ ID NO: 1273802 - DNA, 15 bp, Homo sapiens
ggatggtctcccact

SEQ ID NO: 1273803 - DNA, 15 bp, Homo sapiens
tggatggtctcccac

SEQ ID NO: 1273804 - DNA, 15 bp, Homo sapiens
ctggatggtctccca

SEQ ID NO: 1273805 - DNA, 15 bp, Homo sapiens
actggatggtctccc

SEQ ID NO: 1273806 - DNA, 15 bp, Homo sapiens
aactggatggtctcc

SEQ ID NO: 1273807 - DNA, 15 bp, Homo sapiens
aaactggatggtctc

SEQ ID NO: 1273808 - DNA, 15 bp, Homo sapiens
aaaactggatggtct

SEQ ID NO: 1273809 - DNA, 15 bp, Homo sapiens
aaaaactggatggtc

SEQ ID NO: 1273810 - DNA, 15 bp, Homo sapiens
gaaaaactggatggt

SEQ ID NO: 1273811 - DNA, 15 bp, Homo sapiens
tgaaaaactggatgg

SEQ ID NO: 1273812 - DNA, 15 bp, Homo sapiens
gtgaaaaactggatg

SEQ ID NO: 1273813 - DNA, 15 bp, Homo sapiens
ggtgaaaaactggat

SEQ ID NO: 1273814 - DNA, 15 bp, Homo sapiens
tggtgaaaaactgga

SEQ ID NO: 1273815 - DNA, 15 bp, Homo sapiens
atggtgaaaaactgg

SEQ ID NO: 1273816 - DNA, 15 bp, Homo sapiens
taatggtgaaaaact

SEQ ID NO: 1273817 - DNA, 15 bp, Homo sapiens
ttaatggtgaaaaac

SEQ ID NO: 1273818 - DNA, 15 bp, Homo sapiens
cttaatggtgaaaaa

SEQ ID NO: 1273819 - DNA, 15 bp, Homo sapiens
acttaatggtgaaaa

SEQ ID NO: 1273820 - DNA, 15 bp, Homo sapiens
tacttaatggtgaaa

SEQ ID NO: 1273821 - DNA, 15 bp, Homo sapiens
ctacttaatggtgaa

SEQ ID NO: 1273822 - DNA, 15 bp, Homo sapiens
tctacttaatggtga

SEQ ID NO: 1273823 - DNA, 15 bp, Homo sapiens
atctacttaatggtg

SEQ ID NO: 1273824 - DNA, 15 bp, Homo sapiens
catctacttaatggt

SEQ ID NO: 1273825 - DNA, 15 bp, Homo sapiens
acatctacttaatgg

SEQ ID NO: 1273826 - DNA, 15 bp, Homo sapiens
aacatctacttaatg

SEQ ID NO: 1273827 - DNA, 15 bp, Homo sapiens
taacatctacttaat

SEQ ID NO: 1273828 - DNA, 15 bp, Homo sapiens
ctaacatctacttaa

SEQ ID NO: 1273829 - DNA, 15 bp, Homo sapiens
gctaacatctactta

SEQ ID NO: 1273830 - DNA, 15 bp, Homo sapiens
agctaacatctactt

SEQ ID NO: 1273831 - DNA, 15 bp, Homo sapiens
cagctaacatctact

SEQ ID NO: 1273832 - DNA, 15 bp, Homo sapiens
acagctaacatctac

SEQ ID NO: 1273833 - DNA, 15 bp, Homo sapiens
cacagctaacatcta

SEQ ID NO: 1273834 - DNA, 15 bp, Homo sapiens
ccacagctaacatct

SEQ ID NO: 1273835 - DNA, 15 bp, Homo sapiens
cccacagctaacatc

SEQ ID NO: 1273836 - DNA, 15 bp, Homo sapiens
ccccacagctaacat

SEQ ID NO: 1273837 - DNA, 15 bp, Homo sapiens
accccacagctaaca

SEQ ID NO: 1273838 - DNA, 15 bp, Homo sapiens
aaccccacagctaac

SEQ ID NO: 1273839 - DNA, 15 bp, Homo sapiens
aaaccccacagctaa

SEQ ID NO: 1273840 - DNA, 15 bp, Homo sapiens
aaaaccccacagcta

SEQ ID NO: 1273841 - DNA, 15 bp, Homo sapiens
aaaaaccccacagct

SEQ ID NO: 1273842 - DNA, 15 bp, Homo sapiens
caaaaaccccacagc

SEQ ID NO: 1273843 - DNA, 15 bp, Homo sapiens
acaaaaaccccacag

SEQ ID NO: 1273844 - DNA, 15 bp, Homo sapiens
tacaaaaaccccaca

SEQ ID NO: 1273845 - DNA, 15 bp, Homo sapiens
ctacaaaaaccccac

SEQ ID NO: 1273846 - DNA, 15 bp, Homo sapiens
tctacaaaaacccca

SEQ ID NO: 1273847 - DNA, 15 bp, Homo sapiens
atctacaaaaacccc

SEQ ID NO: 1273848 - DNA, 15 bp, Homo sapiens
catctacaaaaaccc

SEQ ID NO: 1273849 - DNA, 15 bp, Homo sapiens
gcatctacaaaaacc

SEQ ID NO: 1273850 - DNA, 15 bp, Homo sapiens
ggcatctacaaaaac

SEQ ID NO: 1273851 - DNA, 15 bp, Homo sapiens
aggcatctacaaaaa

SEQ ID NO: 1273852 - DNA, 15 bp, Homo sapiens
aaggcatctacaaaa

SEQ ID NO: 1273853 - DNA, 15 bp, Homo sapiens
aaaggcatctacaaa

SEQ ID NO: 1273854 - DNA, 15 bp, Homo sapiens
gaaaggcatctacaa

SEQ ID NO: 1273855 - DNA, 15 bp, Homo sapiens
tgaaaggcatctaca

SEQ ID NO: 1273856 - DNA, 15 bp, Homo sapiens
atgaaaggcatctac

SEQ ID NO: 1273857 - DNA, 15 bp, Homo sapiens
gatgaaaggcatcta

SEQ ID NO: 1273858 - DNA, 15 bp, Homo sapiens
tgatgaaaggcatct

SEQ ID NO: 1273859 - DNA, 15 bp, Homo sapiens
ctgatgaaaggcatc

SEQ ID NO: 1273860 - DNA, 15 bp, Homo sapiens
actgatgaaaggcat

SEQ ID NO: 1273861 - DNA, 15 bp, Homo sapiens
aactgatgaaaggca

SEQ ID NO: 1273862 - DNA, 15 bp, Homo sapiens
caactgatgaaaggc

SEQ ID NO: 1273863 - DNA, 15 bp, Homo sapiens
tcaactgatgaaagg

SEQ ID NO: 1273864 - DNA, 15 bp, Homo sapiens
ttcaactgatgaaag

SEQ ID NO: 1273865 - DNA, 15 bp, Homo sapiens
cttcaactgatgaaa

SEQ ID NO: 1273866 - DNA, 15 bp, Homo sapiens
tcttcaactgatgaa

SEQ ID NO: 1273867 - DNA, 15 bp, Homo sapiens
ttcttcaactgatga

SEQ ID NO: 1273868 - DNA, 15 bp, Homo sapiens
attcttcaactgatg

SEQ ID NO: 1273869 - DNA, 15 bp, Homo sapiens
aattcttcaactgat

SEQ ID NO: 1273870 - DNA, 15 bp, Homo sapiens
aaattcttcaactga

SEQ ID NO: 1273871 - DNA, 15 bp, Homo sapiens
aaaattcttcaactg

SEQ ID NO: 1273872 - DNA, 15 bp, Homo sapiens
aaaaattcttcaact

SEQ ID NO: 1273873 - DNA, 15 bp, Homo sapiens
aaaaaattcttcaac

SEQ ID NO: 1273874 - DNA, 15 bp, Homo sapiens
taaaaaattcttcaa

SEQ ID NO: 1273875 - DNA, 15 bp, Homo sapiens
ataaaaaattcttca

SEQ ID NO: 1273876 - DNA, 15 bp, Homo sapiens
aataaaaaattcttc

SEQ ID NO: 1273877 - DNA, 15 bp, Homo sapiens
gaaataaaaaattct

SEQ ID NO: 1273878 - DNA, 15 bp, Homo sapiens
agaaataaaaaattc

SEQ ID NO: 1273879 - DNA, 15 bp, Homo sapiens
tagaaataaaaaatt

SEQ ID NO: 1273880 - DNA, 15 bp, Homo sapiens
ctagaaataaaaaat

SEQ ID NO: 1273881 - DNA, 15 bp, Homo sapiens
cctagaaataaaaaa

SEQ ID NO: 1273882 - DNA, 15 bp, Homo sapiens
ccctagaaataaaaa

SEQ ID NO: 1273883 - DNA, 15 bp, Homo sapiens
accctagaaataaaa

SEQ ID NO: 1273884 - DNA, 15 bp, Homo sapiens
caccctagaaataaa

SEQ ID NO: 1273885 - DNA, 15 bp, Homo sapiens
acaccctagaaataa

SEQ ID NO: 1273886 - DNA, 15 bp, Homo sapiens
aacaccctagaaata

SEQ ID NO: 1273887 - DNA, 15 bp, Homo sapiens
caacaccctagaaat

SEQ ID NO: 1273888 - DNA, 15 bp, Homo sapiens
tcaacaccctagaaa

SEQ ID NO: 1273889 - DNA, 15 bp, Homo sapiens
ctcaacaccctagaa

SEQ ID NO: 1273890 - DNA, 15 bp, Homo sapiens
actcaacaccctaga

SEQ ID NO: 1273891 - DNA, 15 bp, Homo sapiens
cactcaacaccctag

SEQ ID NO: 1273892 - DNA, 15 bp, Homo sapiens
acactcaacacccta

SEQ ID NO: 1273893 - DNA, 15 bp, Homo sapiens
aacactcaacaccct

SEQ ID NO: 1273894 - DNA, 15 bp, Homo sapiens
aaacactcaacaccc

SEQ ID NO: 1273895 - DNA, 15 bp, Homo sapiens
aaaacactcaacacc

SEQ ID NO: 1273896 - DNA, 15 bp, Homo sapiens
caaaacactcaacac

SEQ ID NO: 1273897 - DNA, 15 bp, Homo sapiens
acaaaacactcaaca

SEQ ID NO: 1273898 - DNA, 15 bp, Homo sapiens
aacaaaacactcaac

SEQ ID NO: 1273899 - DNA, 15 bp, Homo sapiens
taacaaaacactcaa

SEQ ID NO: 1273900 - DNA, 15 bp, Homo sapiens
ataacaaaacactca

SEQ ID NO: 1273901 - DNA, 15 bp, Homo sapiens
cataacaaaacactc

SEQ ID NO: 1273902 - DNA, 15 bp, Homo sapiens
tcataacaaaacact

SEQ ID NO: 1273903 - DNA, 15 bp, Homo sapiens
ttcataacaaaacac

SEQ ID NO: 1273904 - DNA, 15 bp, Homo sapiens
tttcataacaaaaca

SEQ ID NO: 1273905 - DNA, 15 bp, Homo sapiens
ctttcataacaaaac

SEQ ID NO: 1273906 - DNA, 15 bp, Homo sapiens
cctttcataacaaaa

SEQ ID NO: 1273907 - DNA, 15 bp, Homo sapiens
ccctttcataacaaa

SEQ ID NO: 1273908 - DNA, 15 bp, Homo sapiens
accctttcataacaa

SEQ ID NO: 1273909 - DNA, 15 bp, Homo sapiens
caccctttcataaca

SEQ ID NO: 1273910 - DNA, 15 bp, Homo sapiens
acaccctttcataac

SEQ ID NO: 1273911 - DNA, 15 bp, Homo sapiens
aacaccctttcataa

SEQ ID NO: 1273912 - DNA, 15 bp, Homo sapiens
caacaccctttcata

SEQ ID NO: 1273913 - DNA, 15 bp, Homo sapiens
ccaacaccctttcat

SEQ ID NO: 1273914 - DNA, 15 bp, Homo sapiens
tccaacaccctttca

SEQ ID NO: 1273915 - DNA, 15 bp, Homo sapiens
atccaacaccctttc

SEQ ID NO: 1273916 - DNA, 15 bp, Homo sapiens
aatccaacacccttt

SEQ ID NO: 1273917 - DNA, 15 bp, Homo sapiens
aaatccaacaccctt

SEQ ID NO: 1273918 - DNA, 15 bp, Homo sapiens
aaaatccaacaccct

SEQ ID NO: 1273919 - DNA, 15 bp, Homo sapiens
caaaatccaacaccc

SEQ ID NO: 1273920 - DNA, 15 bp, Homo sapiens
acaaaatccaacacc

SEQ ID NO: 1273921 - DNA, 15 bp, Homo sapiens
gacaaaatccaacac

SEQ ID NO: 1273922 - DNA, 15 bp, Homo sapiens
tgacaaaatccaaca

SEQ ID NO: 1273923 - DNA, 15 bp, Homo sapiens
ttgacaaaatccaac

SEQ ID NO: 1273924 - DNA, 15 bp, Homo sapiens
tttgacaaaatccaa

SEQ ID NO: 1273925 - DNA, 15 bp, Homo sapiens
atttgacaaaatcca

SEQ ID NO: 1273926 - DNA, 15 bp, Homo sapiens
catttgacaaaatcc

SEQ ID NO: 1273927 - DNA, 15 bp, Homo sapiens
tcatttgacaaaatc

SEQ ID NO: 1273928 - DNA, 15 bp, Homo sapiens
atcatttgacaaaat

SEQ ID NO: 1273929 - DNA, 15 bp, Homo sapiens
aatcatttgacaaaa

SEQ ID NO: 1273930 - DNA, 15 bp, Homo sapiens
aaatcatttgacaaa

SEQ ID NO: 1273931 - DNA, 15 bp, Homo sapiens
aaaatcatttgacaa

SEQ ID NO: 1273932 - DNA, 15 bp, Homo sapiens
aaaaatcatttgaca

SEQ ID NO: 1273933 - DNA, 15 bp, Homo sapiens
gaaaaatcatttgac

SEQ ID NO: 1273934 - DNA, 15 bp, Homo sapiens
agaaaaatcatttga

SEQ ID NO: 1273935 - DNA, 15 bp, Homo sapiens
cagaaaaatcatttg

SEQ ID NO: 1273936 - DNA, 15 bp, Homo sapiens
gcagaaaaatcattt

SEQ ID NO: 1273937 - DNA, 15 bp, Homo sapiens
agcagaaaaatcatt

SEQ ID NO: 1273938 - DNA, 15 bp, Homo sapiens
aagcagaaaaatcat

SEQ ID NO: 1273939 - DNA, 15 bp, Homo sapiens
gaagcagaaaaatca

SEQ ID NO: 1273940 - DNA, 15 bp, Homo sapiens
agaagcagaaaaatc

SEQ ID NO: 1273941 - DNA, 15 bp, Homo sapiens
tagaagcagaaaaat

SEQ ID NO: 1273942 - DNA, 15 bp, Homo sapiens
atagaagcagaaaaa

SEQ ID NO: 1273943 - DNA, 15 bp, Homo sapiens
aatagaagcagaaaa

SEQ ID NO: 1273944 - DNA, 15 bp, Homo sapiens
atcaatagaagcaga

SEQ ID NO: 1273945 - DNA, 15 bp, Homo sapiens
tatcaatagaagcag

SEQ ID NO: 1273946 - DNA, 15 bp, Homo sapiens
atatcaatagaagca

SEQ ID NO: 1273947 - DNA, 15 bp, Homo sapiens
tatatcaatagaagc

SEQ ID NO: 1273948 - DNA, 15 bp, Homo sapiens
ttatatcaatagaag

SEQ ID NO: 1273949 - DNA, 15 bp, Homo sapiens
attatatcaatagaa

SEQ ID NO: 1273950 - DNA, 15 bp, Homo sapiens
tattatatcaataga

SEQ ID NO: 1273951 - DNA, 15 bp, Homo sapiens
ttattatatcaatag

SEQ ID NO: 1273952 - DNA, 15 bp, Homo sapiens
attattatatcaata

SEQ ID NO: 1273953 - DNA, 15 bp, Homo sapiens
cattattatatcaat

SEQ ID NO: 1273954 - DNA, 15 bp, Homo sapiens
acattattatatcaa

SEQ ID NO: 1273955 - DNA, 15 bp, Homo sapiens
tacattattatatca

SEQ ID NO: 1273956 - DNA, 15 bp, Homo sapiens
ctacattattatatc

SEQ ID NO: 1273957 - DNA, 15 bp, Homo sapiens
actacattattatat

SEQ ID NO: 1273958 - DNA, 15 bp, Homo sapiens
aactacattattata

SEQ ID NO: 1273959 - DNA, 15 bp, Homo sapiens
gaactacattattat

SEQ ID NO: 1273960 - DNA, 15 bp, Homo sapiens
agaactacattatta

SEQ ID NO: 1273961 - DNA, 15 bp, Homo sapiens
aagaactacattatt

SEQ ID NO: 1273962 - DNA, 15 bp, Homo sapiens
caagaactacattat

SEQ ID NO: 1273963 - DNA, 15 bp, Homo sapiens
acaagaactacatta

SEQ ID NO: 1273964 - DNA, 15 bp, Homo sapiens
aacaagaactacatt

SEQ ID NO: 1273965 - DNA, 15 bp, Homo sapiens
gaacaagaactacat

SEQ ID NO: 1273966 - DNA, 15 bp, Homo sapiens
agaacaagaactaca

SEQ ID NO: 1273967 - DNA, 15 bp, Homo sapiens
aagaacaagaactac

SEQ ID NO: 1273968 - DNA, 15 bp, Homo sapiens
aaagaacaagaacta

SEQ ID NO: 1273969 - DNA, 15 bp, Homo sapiens
taaagaacaagaact

SEQ ID NO: 1273970 - DNA, 15 bp, Homo sapiens
ataaagaacaagaac

SEQ ID NO: 1273971 - DNA, 15 bp, Homo sapiens
aataaagaacaagaa

SEQ ID NO: 1273972 - DNA, 15 bp, Homo sapiens
caataaagaacaaga

SEQ ID NO: 1273973 - DNA, 15 bp, Homo sapiens
tcaataaagaacaag

SEQ ID NO: 1273974 - DNA, 15 bp, Homo sapiens
ttcaataaagaacaa

SEQ ID NO: 1273975 - DNA, 15 bp, Homo sapiens
tttcaataaagaaca

SEQ ID NO: 1273976 - DNA, 15 bp, Homo sapiens
atttcaataaagaac

SEQ ID NO: 1273977 - DNA, 15 bp, Homo sapiens
catttcaataaagaa

SEQ ID NO: 1273978 - DNA, 15 bp, Homo sapiens
ccatttcaataaaga

SEQ ID NO: 1273979 - DNA, 15 bp, Homo sapiens
accatttcaataaag

SEQ ID NO: 1273980 - DNA, 15 bp, Homo sapiens
caccatttcaataaa

SEQ ID NO: 1273981 - DNA, 15 bp, Homo sapiens
acaccatttcaataa

SEQ ID NO: 1273982 - DNA, 15 bp, Homo sapiens
tacaccatttcaata

SEQ ID NO: 1273983 - DNA, 15 bp, Homo sapiens
ctacaccatttcaat

SEQ ID NO: 1273984 - DNA, 15 bp, Homo sapiens
actacaccatttcaa

SEQ ID NO: 1273985 - DNA, 15 bp, Homo sapiens
tactacaccatttca

SEQ ID NO: 1273986 - DNA, 15 bp, Homo sapiens
atactacaccatttc

SEQ ID NO: 1273987 - DNA, 15 bp, Homo sapiens
tatactacaccattt

SEQ ID NO: 1273988 - DNA, 15 bp, Homo sapiens
atatactacaccatt

SEQ ID NO: 1273989 - DNA, 15 bp, Homo sapiens
aatatactacaccat

SEQ ID NO: 1273990 - DNA, 15 bp, Homo sapiens
taatatactacacca

SEQ ID NO: 1273991 - DNA, 15 bp, Homo sapiens
ctaatatactacacc

SEQ ID NO: 1273992 - DNA, 15 bp, Homo sapiens
actaatatactacac

SEQ ID NO: 1273993 - DNA, 15 bp, Homo sapiens
aactaatatactaca

SEQ ID NO: 1273994 - DNA, 15 bp, Homo sapiens
caactaatatactac

SEQ ID NO: 1273995 - DNA, 15 bp, Homo sapiens
tcaactaatatacta

SEQ ID NO: 1273996 - DNA, 15 bp, Homo sapiens
atcaactaatatact

SEQ ID NO: 1273997 - DNA, 15 bp, Homo sapiens
aatcaactaatatac

SEQ ID NO: 1273998 - DNA, 15 bp, Homo sapiens
aaatcaactaatata

SEQ ID NO: 1273999 - DNA, 15 bp, Homo sapiens
aaaatcaactaatat

SEQ ID NO: 1274000 - DNA, 15 bp, Homo sapiens
gaaaatcaactaata

SEQ ID NO: 1274001 - DNA, 15 bp, Homo sapiens
tgaaaatcaactaat

SEQ ID NO: 1274002 - DNA, 15 bp, Homo sapiens
ctgaaaatcaactaa

SEQ ID NO: 1274003 - DNA, 15 bp, Homo sapiens
cctgaaaatcaacta

SEQ ID NO: 1274004 - DNA, 15 bp, Homo sapiens
acctgaaaatcaact

SEQ ID NO: 1274005 - DNA, 15 bp, Homo sapiens
cacctgaaaatcaac

SEQ ID NO: 1274006 - DNA, 15 bp, Homo sapiens
acacctgaaaatcaa

SEQ ID NO: 1274007 - DNA, 15 bp, Homo sapiens
aacacctgaaaatca

SEQ ID NO: 1274008 - DNA, 15 bp, Homo sapiens
taacacctgaaaatc

SEQ ID NO: 1274009 - DNA, 15 bp, Homo sapiens
ttaacacctgaaaat

SEQ ID NO: 1274010 - DNA, 15 bp, Homo sapiens
tttaacacctgaaaa

SEQ ID NO: 1274011 - DNA, 15 bp, Homo sapiens
gtttaacacctgaaa

SEQ ID NO: 1274012 - DNA, 15 bp, Homo sapiens
ggtttaacacctgaa

SEQ ID NO: 1274013 - DNA, 15 bp, Homo sapiens
tggtttaacacctga

SEQ ID NO: 1274014 - DNA, 15 bp, Homo sapiens
ttggtttaacacctg

SEQ ID NO: 1274015 - DNA, 15 bp, Homo sapiens
gttggtttaacacct

SEQ ID NO: 1274016 - DNA, 15 bp, Homo sapiens
tgttggtttaacacc

SEQ ID NO: 1274017 - DNA, 15 bp, Homo sapiens
atgttggtttaacac

SEQ ID NO: 1274018 - DNA, 15 bp, Homo sapiens
aatgttggtttaaca

SEQ ID NO: 1274019 - DNA, 15 bp, Homo sapiens
caatgttggtttaac

SEQ ID NO: 1274020 - DNA, 15 bp, Homo sapiens
gcaatgttggtttaa

SEQ ID NO: 1274021 - DNA, 15 bp, Homo sapiens
tgcaatgttggttta

SEQ ID NO: 1274022 - DNA, 15 bp, Homo sapiens
atgcaatgttggttt

SEQ ID NO: 1274023 - DNA, 15 bp, Homo sapiens
gatgcaatgttggtt

SEQ ID NO: 1274024 - DNA, 15 bp, Homo sapiens
agatgcaatgttggt

SEQ ID NO: 1274025 - DNA, 15 bp, Homo sapiens
gagatgcaatgttgg

SEQ ID NO: 1274026 - DNA, 15 bp, Homo sapiens
agagatgcaatgttg

SEQ ID NO: 1274027 - DNA, 15 bp, Homo sapiens
cagagatgcaatgtt

SEQ ID NO: 1274028 - DNA, 15 bp, Homo sapiens
ccagagatgcaatgt

SEQ ID NO: 1274029 - DNA, 15 bp, Homo sapiens
tccagagatgcaatg

SEQ ID NO: 1274030 - DNA, 15 bp, Homo sapiens
ttccagagatgcaat

SEQ ID NO: 1274031 - DNA, 15 bp, Homo sapiens
attccagagatgcaa

SEQ ID NO: 1274032 - DNA, 15 bp, Homo sapiens
tattccagagatgca

SEQ ID NO: 1274033 - DNA, 15 bp, Homo sapiens
ttattccagagatgc

SEQ ID NO: 1274034 - DNA, 15 bp, Homo sapiens
cttattccagagatg

SEQ ID NO: 1274035 - DNA, 15 bp, Homo sapiens
acttattccagagat

SEQ ID NO: 1274036 - DNA, 15 bp, Homo sapiens
gacttattccagaga

SEQ ID NO: 1274037 - DNA, 15 bp, Homo sapiens
ggacttattccagag

SEQ ID NO: 1274038 - DNA, 15 bp, Homo sapiens
gggacttattccaga

SEQ ID NO: 1274039 - DNA, 15 bp, Homo sapiens
tgggacttattccag

SEQ ID NO: 1274040 - DNA, 15 bp, Homo sapiens
gtgggacttattcca

SEQ ID NO: 1274041 - DNA, 15 bp, Homo sapiens
agtgggacttattcc

SEQ ID NO: 1274042 - DNA, 15 bp, Homo sapiens
aagtgggacttattc

SEQ ID NO: 1274043 - DNA, 15 bp, Homo sapiens
caagtgggacttatt

SEQ ID NO: 1274044 - DNA, 15 bp, Homo sapiens
ccaagtgggacttat

SEQ ID NO: 1274045 - DNA, 15 bp, Homo sapiens
accaagtgggactta

SEQ ID NO: 1274046 - DNA, 15 bp, Homo sapiens
gaccaagtgggactt

SEQ ID NO: 1274047 - DNA, 15 bp, Homo sapiens
tgaccaagtgggact

SEQ ID NO: 1274048 - DNA, 15 bp, Homo sapiens
gtgaccaagtgggac

SEQ ID NO: 1274049 - DNA, 15 bp, Homo sapiens
tgtgaccaagtggga

SEQ ID NO: 1274050 - DNA, 15 bp, Homo sapiens
ttgtgaccaagtggg

SEQ ID NO: 1274051 - DNA, 15 bp, Homo sapiens
attgtgaccaagtgg

SEQ ID NO: 1274052 - DNA, 15 bp, Homo sapiens
cattgtgaccaagtg

SEQ ID NO: 1274053 - DNA, 15 bp, Homo sapiens
acattgtgaccaagt

SEQ ID NO: 1274054 - DNA, 15 bp, Homo sapiens
tacattgtgaccaag

SEQ ID NO: 1274055 - DNA, 15 bp, Homo sapiens
atacattgtgaccaa

SEQ ID NO: 1274056 - DNA, 15 bp, Homo sapiens
tatacattgtgacca

SEQ ID NO: 1274057 - DNA, 15 bp, Homo sapiens
ttatacattgtgacc

SEQ ID NO: 1274058 - DNA, 15 bp, Homo sapiens
attatacattgtgac

SEQ ID NO: 1274059 - DNA, 15 bp, Homo sapiens
gattatacattgtga

SEQ ID NO: 1274060 - DNA, 15 bp, Homo sapiens
ggattatacattgtg

SEQ ID NO: 1274061 - DNA, 15 bp, Homo sapiens
aggattatacattgt

SEQ ID NO: 1274062 - DNA, 15 bp, Homo sapiens
aaggattatacattg

SEQ ID NO: 1274063 - DNA, 15 bp, Homo sapiens
aaaggattatacatt

SEQ ID NO: 1274064 - DNA, 15 bp, Homo sapiens
aaaaggattatacat

SEQ ID NO: 1274065 - DNA, 15 bp, Homo sapiens
caaaaggattataca

SEQ ID NO: 1274066 - DNA, 15 bp, Homo sapiens
tcaaaaggattatac

SEQ ID NO: 1274067 - DNA, 15 bp, Homo sapiens
atcaaaaggattata

SEQ ID NO: 1274068 - DNA, 15 bp, Homo sapiens
tatcaaaaggattat

SEQ ID NO: 1274069 - DNA, 15 bp, Homo sapiens
atatcaaaaggatta

SEQ ID NO: 1274070 - DNA, 15 bp, Homo sapiens
catatcaaaaggatt

SEQ ID NO: 1274071 - DNA, 15 bp, Homo sapiens
acatatcaaaaggat

SEQ ID NO: 1274072 - DNA, 15 bp, Homo sapiens
aacatatcaaaagga

SEQ ID NO: 1274073 - DNA, 15 bp, Homo sapiens
caacatatcaaaagg

SEQ ID NO: 1274074 - DNA, 15 bp, Homo sapiens
gcaacatatcaaaag

SEQ ID NO: 1274075 - DNA, 15 bp, Homo sapiens
agcaacatatcaaaa

SEQ ID NO: 1274076 - DNA, 15 bp, Homo sapiens
tagcaacatatcaaa

SEQ ID NO: 1274077 - DNA, 15 bp, Homo sapiens
ctagcaacatatcaa

SEQ ID NO: 1274078 - DNA, 15 bp, Homo sapiens
tctagcaacatatca

SEQ ID NO: 1274079 - DNA, 15 bp, Homo sapiens
atctagcaacatatc

SEQ ID NO: 1274080 - DNA, 15 bp, Homo sapiens
aatctagcaacatat

SEQ ID NO: 1274081 - DNA, 15 bp, Homo sapiens
aaatctagcaacata

SEQ ID NO: 1274082 - DNA, 15 bp, Homo sapiens
caaatctagcaacat

SEQ ID NO: 1274083 - DNA, 15 bp, Homo sapiens
ccaaatctagcaaca

SEQ ID NO: 1274084 - DNA, 15 bp, Homo sapiens
accaaatctagcaac

SEQ ID NO: 1274085 - DNA, 15 bp, Homo sapiens
aaccaaatctagcaa

SEQ ID NO: 1274086 - DNA, 15 bp, Homo sapiens
aaaccaaatctagca

SEQ ID NO: 1274087 - DNA, 15 bp, Homo sapiens
caaaccaaatctagc

SEQ ID NO: 1274088 - DNA, 15 bp, Homo sapiens
gcaaaccaaatctag

SEQ ID NO: 1274089 - DNA, 15 bp, Homo sapiens
agcaaaccaaatcta

SEQ ID NO: 1274090 - DNA, 15 bp, Homo sapiens
tagcaaaccaaatct

SEQ ID NO: 1274091 - DNA, 15 bp, Homo sapiens
ttagcaaaccaaatc

SEQ ID NO: 1274092 - DNA, 15 bp, Homo sapiens
attagcaaaccaaat

SEQ ID NO: 1274093 - DNA, 15 bp, Homo sapiens
aattagcaaaccaaa

SEQ ID NO: 1274094 - DNA, 15 bp, Homo sapiens
aaattagcaaaccaa

SEQ ID NO: 1274095 - DNA, 15 bp, Homo sapiens
aaaattagcaaacca

SEQ ID NO: 1274096 - DNA, 15 bp, Homo sapiens
aaaaattagcaaacc

SEQ ID NO: 1274097 - DNA, 15 bp, Homo sapiens
aaaaaattagcaaac

SEQ ID NO: 1274098 - DNA, 15 bp, Homo sapiens
aaaaaaattagcaaa

SEQ ID NO: 1274099 - DNA, 15 bp, Homo sapiens
aaaaaaaattagcaa

SEQ ID NO: 1274100 - DNA, 15 bp, Homo sapiens
aaaaaaaaattagca

SEQ ID NO: 1274101 - DNA, 15 bp, Homo sapiens
caaaaaaaaaaatta

SEQ ID NO: 1274102 - DNA, 15 bp, Homo sapiens
tcaaaaaaaaaaatt

SEQ ID NO: 1274103 - DNA, 15 bp, Homo sapiens
ctcaaaaaaaaaaat

SEQ ID NO: 1274104 - DNA, 15 bp, Homo sapiens
tcctcaaaaaaaaaa

SEQ ID NO: 1274105 - DNA, 15 bp, Homo sapiens
atcctcaaaaaaaaa

SEQ ID NO: 1274106 - DNA, 15 bp, Homo sapiens
aatcctcaaaaaaaa

SEQ ID NO: 1274107 - DNA, 15 bp, Homo sapiens
aaatcctcaaaaaaa

SEQ ID NO: 1274108 - DNA, 15 bp, Homo sapiens
gaaatcctcaaaaaa

SEQ ID NO: 1274109 - DNA, 15 bp, Homo sapiens
agaaatcctcaaaaa

SEQ ID NO: 1274110 - DNA, 15 bp, Homo sapiens
tagaaatcctcaaaa

SEQ ID NO: 1274111 - DNA, 15 bp, Homo sapiens
atagaaatcctcaaa

SEQ ID NO: 1274112 - DNA, 15 bp, Homo sapiens
tatagaaatcctcaa

SEQ ID NO: 1274113 - DNA, 15 bp, Homo sapiens
gtatagaaatcctca

SEQ ID NO: 1274114 - DNA, 15 bp, Homo sapiens
cgtatagaaatcctc

SEQ ID NO: 1274115 - DNA, 15 bp, Homo sapiens
acgtatagaaatcct

SEQ ID NO: 1274116 - DNA, 15 bp, Homo sapiens
cacgtatagaaatcc

SEQ ID NO: 1274117 - DNA, 15 bp, Homo sapiens
acacgtatagaaatc

SEQ ID NO: 1274118 - DNA, 15 bp, Homo sapiens
tacacgtatagaaat

SEQ ID NO: 1274119 - DNA, 15 bp, Homo sapiens
atacacgtatagaaa

SEQ ID NO: 1274120 - DNA, 15 bp, Homo sapiens
aatacacgtatagaa

SEQ ID NO: 1274121 - DNA, 15 bp, Homo sapiens
aaatacacgtataga

SEQ ID NO: 1274122 - DNA, 15 bp, Homo sapiens
taaatacacgtatag

SEQ ID NO: 1274123 - DNA, 15 bp, Homo sapiens
ataaatacacgtata

SEQ ID NO: 1274124 - DNA, 15 bp, Homo sapiens
tataaatacacgtat

SEQ ID NO: 1274125 - DNA, 15 bp, Homo sapiens
ttataaatacacgta

SEQ ID NO: 1274126 - DNA, 15 bp, Homo sapiens
cttataaatacacgt

SEQ ID NO: 1274127 - DNA, 15 bp, Homo sapiens
tcttataaatacacg

SEQ ID NO: 1274128 - DNA, 15 bp, Homo sapiens
ctcttataaatacac

SEQ ID NO: 1274129 - DNA, 15 bp, Homo sapiens
tctcttataaataca

SEQ ID NO: 1274130 - DNA, 15 bp, Homo sapiens
atctcttataaatac

SEQ ID NO: 1274131 - DNA, 15 bp, Homo sapiens
aatctcttataaata

SEQ ID NO: 1274132 - DNA, 15 bp, Homo sapiens
aaatctcttataaat

SEQ ID NO: 1274133 - DNA, 15 bp, Homo sapiens
aaaatctcttataaa

SEQ ID NO: 1274134 - DNA, 15 bp, Homo sapiens
caaaatctcttataa

SEQ ID NO: 1274135 - DNA, 15 bp, Homo sapiens
ccaaaatctcttata

SEQ ID NO: 1274136 - DNA, 15 bp, Homo sapiens
accaaaatctcttat

SEQ ID NO: 1274137 - DNA, 15 bp, Homo sapiens
gaccaaaatctctta

SEQ ID NO: 1274138 - DNA, 15 bp, Homo sapiens
agaccaaaatctctt

SEQ ID NO: 1274139 - DNA, 15 bp, Homo sapiens
aagaccaaaatctct

SEQ ID NO: 1274140 - DNA, 15 bp, Homo sapiens
aaagaccaaaatctc

SEQ ID NO: 1274141 - DNA, 15 bp, Homo sapiens
taaagaccaaaatct

SEQ ID NO: 1274142 - DNA, 15 bp, Homo sapiens
ctaaagaccaaaatc

SEQ ID NO: 1274143 - DNA, 15 bp, Homo sapiens
actaaagaccaaaat

SEQ ID NO: 1274144 - DNA, 15 bp, Homo sapiens
aactaaagaccaaaa

SEQ ID NO: 1274145 - DNA, 15 bp, Homo sapiens
aaactaaagaccaaa

SEQ ID NO: 1274146 - DNA, 15 bp, Homo sapiens
aaaactaaagaccaa

SEQ ID NO: 1274147 - DNA, 15 bp, Homo sapiens
aaaaactaaagacca

SEQ ID NO: 1274148 - DNA, 15 bp, Homo sapiens
aaaaaactaaagacc

SEQ ID NO: 1274149 - DNA, 15 bp, Homo sapiens
aaaaaaactaaagac

SEQ ID NO: 1274150 - DNA, 15 bp, Homo sapiens
gaaaaaaactaaaga

SEQ ID NO: 1274151 - DNA, 15 bp, Homo sapiens
ggaaaaaaactaaag

SEQ ID NO: 1274152 - DNA, 15 bp, Homo sapiens
aaggaaaaaaactaa

SEQ ID NO: 1274153 - DNA, 15 bp, Homo sapiens
caaggaaaaaaacta

SEQ ID NO: 1274154 - DNA, 15 bp, Homo sapiens
acaaggaaaaaaact

SEQ ID NO: 1274155 - DNA, 15 bp, Homo sapiens
cacaaggaaaaaaac

SEQ ID NO: 1274156 - DNA, 15 bp, Homo sapiens
gcacaaggaaaaaaa

SEQ ID NO: 1274157 - DNA, 15 bp, Homo sapiens
agcacaaggaaaaaa

SEQ ID NO: 1274158 - DNA, 15 bp, Homo sapiens
cagcacaaggaaaaa

SEQ ID NO: 1274159 - DNA, 15 bp, Homo sapiens
acagcacaaggaaaa

SEQ ID NO: 1274160 - DNA, 15 bp, Homo sapiens
gacagcacaaggaaa

SEQ ID NO: 1274161 - DNA, 15 bp, Homo sapiens
agacagcacaaggaa

SEQ ID NO: 1274162 - DNA, 15 bp, Homo sapiens
aagacagcacaagga

SEQ ID NO: 1274163 - DNA, 15 bp, Homo sapiens
aaagacagcacaagg

SEQ ID NO: 1274164 - DNA, 15 bp, Homo sapiens
caaagacagcacaag

SEQ ID NO: 1274165 - DNA, 15 bp, Homo sapiens
acaaagacagcacaa

SEQ ID NO: 1274166 - DNA, 15 bp, Homo sapiens
gacaaagacagcaca

SEQ ID NO: 1274167 - DNA, 15 bp, Homo sapiens
agacaaagacagcac

SEQ ID NO: 1274168 - DNA, 15 bp, Homo sapiens
cagacaaagacagca

SEQ ID NO: 1274169 - DNA, 15 bp, Homo sapiens
tcagacaaagacagc

SEQ ID NO: 1274170 - DNA, 15 bp, Homo sapiens
atcagacaaagacag

SEQ ID NO: 1274171 - DNA, 15 bp, Homo sapiens
aatcagacaaagaca

SEQ ID NO: 1274172 - DNA, 15 bp, Homo sapiens
aaatcagacaaagac

SEQ ID NO: 1274173 - DNA, 15 bp, Homo sapiens
aaaatcagacaaaga

SEQ ID NO: 1274174 - DNA, 15 bp, Homo sapiens
taaaatcagacaaag

SEQ ID NO: 1274175 - DNA, 15 bp, Homo sapiens
ctaaaatcagacaaa

SEQ ID NO: 1274176 - DNA, 15 bp, Homo sapiens
actaaaatcagacaa

SEQ ID NO: 1274177 - DNA, 15 bp, Homo sapiens
tactaaaatcagaca

SEQ ID NO: 1274178 - DNA, 15 bp, Homo sapiens
atactaaaatcagac

SEQ ID NO: 1274179 - DNA, 15 bp, Homo sapiens
gatactaaaatcaga

SEQ ID NO: 1274180 - DNA, 15 bp, Homo sapiens
tgatactaaaatcag

SEQ ID NO: 1274181 - DNA, 15 bp, Homo sapiens
ttgatactaaaatca

SEQ ID NO: 1274182 - DNA, 15 bp, Homo sapiens
cttgatactaaaatc

SEQ ID NO: 1274183 - DNA, 15 bp, Homo sapiens
tcttgatactaaaat

SEQ ID NO: 1274184 - DNA, 15 bp, Homo sapiens
atcttgatactaaaa

SEQ ID NO: 1274185 - DNA, 15 bp, Homo sapiens
tatcttgatactaaa

SEQ ID NO: 1274186 - DNA, 15 bp, Homo sapiens
ttatcttgatactaa

SEQ ID NO: 1274187 - DNA, 15 bp, Homo sapiens
attatcttgatacta

SEQ ID NO: 1274188 - DNA, 15 bp, Homo sapiens
tattatcttgatact

SEQ ID NO: 1274189 - DNA, 15 bp, Homo sapiens
gtattatcttgatac

SEQ ID NO: 1274190 - DNA, 15 bp, Homo sapiens
agtattatcttgata

SEQ ID NO: 1274191 - DNA, 15 bp, Homo sapiens
cagtattatcttgat

SEQ ID NO: 1274192 - DNA, 15 bp, Homo sapiens
ccagtattatcttga

SEQ ID NO: 1274193 - DNA, 15 bp, Homo sapiens
gccagtattatcttg

SEQ ID NO: 1274194 - DNA, 15 bp, Homo sapiens
ggccagtattatctt

SEQ ID NO: 1274195 - DNA, 15 bp, Homo sapiens
aggccagtattatct

SEQ ID NO: 1274196 - DNA, 15 bp, Homo sapiens
aaggccagtattatc

SEQ ID NO: 1274197 - DNA, 15 bp, Homo sapiens
aaaggccagtattat

SEQ ID NO: 1274198 - DNA, 15 bp, Homo sapiens
gaaaggccagtatta

SEQ ID NO: 1274199 - DNA, 15 bp, Homo sapiens
tgaaaggccagtatt

SEQ ID NO: 1274200 - DNA, 15 bp, Homo sapiens
gtgaaaggccagtat

SEQ ID NO: 1274201 - DNA, 15 bp, Homo sapiens
tgtgaaaggccagta

SEQ ID NO: 1274202 - DNA, 15 bp, Homo sapiens
ctgtgaaaggccagt

SEQ ID NO: 1274203 - DNA, 15 bp, Homo sapiens
tctgtgaaaggccag

SEQ ID NO: 1274204 - DNA, 15 bp, Homo sapiens
ttctgtgaaaggcca

SEQ ID NO: 1274205 - DNA, 15 bp, Homo sapiens
attctgtgaaaggcc

SEQ ID NO: 1274206 - DNA, 15 bp, Homo sapiens
cattctgtgaaaggc

SEQ ID NO: 1274207 - DNA, 15 bp, Homo sapiens
ccattctgtgaaagg

SEQ ID NO: 1274208 - DNA, 15 bp, Homo sapiens
tccattctgtgaaag

SEQ ID NO: 1274209 - DNA, 15 bp, Homo sapiens
gtccattctgtgaaa

SEQ ID NO: 1274210 - DNA, 15 bp, Homo sapiens
agtccattctgtgaa

SEQ ID NO: 1274211 - DNA, 15 bp, Homo sapiens
cagtccattctgtga

SEQ ID NO: 1274212 - DNA, 15 bp, Homo sapiens
ccagtccattctgtg

SEQ ID NO: 1274213 - DNA, 15 bp, Homo sapiens
cccagtccattctgt

SEQ ID NO: 1274214 - DNA, 15 bp, Homo sapiens
tcccagtccattctg

SEQ ID NO: 1274215 - DNA, 15 bp, Homo sapiens
ttcccagtccattct

SEQ ID NO: 1274216 - DNA, 15 bp, Homo sapiens
cttcccagtccattc

SEQ ID NO: 1274217 - DNA, 15 bp, Homo sapiens
acttcccagtccatt

SEQ ID NO: 1274218 - DNA, 15 bp, Homo sapiens
cacttcccagtccat

SEQ ID NO: 1274219 - DNA, 15 bp, Homo sapiens
acacttcccagtcca

SEQ ID NO: 1274220 - DNA, 15 bp, Homo sapiens
aacacttcccagtcc

SEQ ID NO: 1274221 - DNA, 15 bp, Homo sapiens
gaacacttcccagtc

SEQ ID NO: 1274222 - DNA, 15 bp, Homo sapiens
ggaacacttcccagt

SEQ ID NO: 1274223 - DNA, 15 bp, Homo sapiens
gggaacacttcccag

SEQ ID NO: 1274224 - DNA, 15 bp, Homo sapiens
agggaacacttccca

SEQ ID NO: 1274225 - DNA, 15 bp, Homo sapiens
gagggaacacttccc

SEQ ID NO: 1274226 - DNA, 15 bp, Homo sapiens
ggagggaacacttcc

SEQ ID NO: 1274227 - DNA, 15 bp, Homo sapiens
aggagggaacacttc

SEQ ID NO: 1274228 - DNA, 15 bp, Homo sapiens
gaggagggaacactt

SEQ ID NO: 1274229 - DNA, 15 bp, Homo sapiens
agaggagggaacact

SEQ ID NO: 1274230 - DNA, 15 bp, Homo sapiens
aagaggagggaacac

SEQ ID NO: 1274231 - DNA, 15 bp, Homo sapiens
gaagaggagggaaca

SEQ ID NO: 1274232 - DNA, 15 bp, Homo sapiens
agaagaggagggaac

SEQ ID NO: 1274233 - DNA, 15 bp, Homo sapiens
cagaagaggagggaa

SEQ ID NO: 1274234 - DNA, 15 bp, Homo sapiens
acagaagaggaggga

SEQ ID NO: 1274235 - DNA, 15 bp, Homo sapiens
aacagaagaggaggg

SEQ ID NO: 1274236 - DNA, 15 bp, Homo sapiens
aaacagaagaggagg

SEQ ID NO: 1274237 - DNA, 15 bp, Homo sapiens
aaaacagaagaggag

SEQ ID NO: 1274238 - DNA, 15 bp, Homo sapiens
caaaacagaagagga

SEQ ID NO: 1274239 - DNA, 15 bp, Homo sapiens
tcaaaacagaagagg

SEQ ID NO: 1274240 - DNA, 15 bp, Homo sapiens
atcaaaacagaagag

SEQ ID NO: 1274241 - DNA, 15 bp, Homo sapiens
catcaaaacagaaga

SEQ ID NO: 1274242 - DNA, 15 bp, Homo sapiens
ccatcaaaacagaag

SEQ ID NO: 1274243 - DNA, 15 bp, Homo sapiens
cccatcaaaacagaa

SEQ ID NO: 1274244 - DNA, 15 bp, Homo sapiens
ccccatcaaaacaga

SEQ ID NO: 1274245 - DNA, 15 bp, Homo sapiens
gccccatcaaaacag

SEQ ID NO: 1274246 - DNA, 15 bp, Homo sapiens
tgccccatcaaaaca

SEQ ID NO: 1274247 - DNA, 15 bp, Homo sapiens
ctgccccatcaaaac

SEQ ID NO: 1274248 - DNA, 15 bp, Homo sapiens
actgccccatcaaaa

SEQ ID NO: 1274249 - DNA, 15 bp, Homo sapiens
aactgccccatcaaa

SEQ ID NO: 1274250 - DNA, 15 bp, Homo sapiens
aaactgccccatcaa

SEQ ID NO: 1274251 - DNA, 15 bp, Homo sapiens
caaactgccccatca

SEQ ID NO: 1274252 - DNA, 15 bp, Homo sapiens
acaaactgccccatc

SEQ ID NO: 1274253 - DNA, 15 bp, Homo sapiens
cacaaactgccccat

SEQ ID NO: 1274254 - DNA, 15 bp, Homo sapiens
tcacaaactgcccca

SEQ ID NO: 1274255 - DNA, 15 bp, Homo sapiens
ttcacaaactgcccc

SEQ ID NO: 1274256 - DNA, 15 bp, Homo sapiens
cttcacaaactgccc

SEQ ID NO: 1274257 - DNA, 15 bp, Homo sapiens
tcttcacaaactgcc

SEQ ID NO: 1274258 - DNA, 15 bp, Homo sapiens
ttcttcacaaactgc

SEQ ID NO: 1274259 - DNA, 15 bp, Homo sapiens
attcttcacaaactg

SEQ ID NO: 1274260 - DNA, 15 bp, Homo sapiens
tattcttcacaaact

SEQ ID NO: 1274261 - DNA, 15 bp, Homo sapiens
ctattcttcacaaac

SEQ ID NO: 1274262 - DNA, 15 bp, Homo sapiens
tctattcttcacaaa

SEQ ID NO: 1274263 - DNA, 15 bp, Homo sapiens
atctattcttcacaa

SEQ ID NO: 1274264 - DNA, 15 bp, Homo sapiens
tatctattcttcaca

SEQ ID NO: 1274265 - DNA, 15 bp, Homo sapiens
atatctattcttcac

SEQ ID NO: 1274266 - DNA, 15 bp, Homo sapiens
aatatctattcttca

SEQ ID NO: 1274267 - DNA, 15 bp, Homo sapiens
taatatctattcttc

SEQ ID NO: 1274268 - DNA, 15 bp, Homo sapiens
ttaatatctattctt

SEQ ID NO: 1274269 - DNA, 15 bp, Homo sapiens
attaatatctattct

SEQ ID NO: 1274270 - DNA, 15 bp, Homo sapiens
aattaatatctattc

SEQ ID NO: 1274271 - DNA, 15 bp, Homo sapiens
gaattaatatctatt

SEQ ID NO: 1274272 - DNA, 15 bp, Homo sapiens
agaattaatatctat

SEQ ID NO: 1274273 - DNA, 15 bp, Homo sapiens
aagaattaatatcta

SEQ ID NO: 1274274 - DNA, 15 bp, Homo sapiens
gaagaattaatatct

SEQ ID NO: 1274275 - DNA, 15 bp, Homo sapiens
agaagaattaatatc

SEQ ID NO: 1274276 - DNA, 15 bp, Homo sapiens
aagaagaattaatat

SEQ ID NO: 1274277 - DNA, 15 bp, Homo sapiens
aaagaagaattaata

SEQ ID NO: 1274278 - DNA, 15 bp, Homo sapiens
taaagaagaattaat

SEQ ID NO: 1274279 - DNA, 15 bp, Homo sapiens
ttaaagaagaattaa

SEQ ID NO: 1274280 - DNA, 15 bp, Homo sapiens
tttaaagaagaatta

SEQ ID NO: 1274281 - DNA, 15 bp, Homo sapiens
atttaaagaagaatt

SEQ ID NO: 1274282 - DNA, 15 bp, Homo sapiens
tatttaaagaagaat

SEQ ID NO: 1274283 - DNA, 15 bp, Homo sapiens
atatttaaagaagaa

SEQ ID NO: 1274284 - DNA, 15 bp, Homo sapiens
aatatttaaagaaga

SEQ ID NO: 1274285 - DNA, 15 bp, Homo sapiens
aaatatttaaagaag

SEQ ID NO: 1274286 - DNA, 15 bp, Homo sapiens
caaatatttaaagaa

SEQ ID NO: 1274287 - DNA, 15 bp, Homo sapiens
ccaaatatttaaaga

SEQ ID NO: 1274288 - DNA, 15 bp, Homo sapiens
accaaatatttaaag

SEQ ID NO: 1274289 - DNA, 15 bp, Homo sapiens
taccaaatatttaaa

SEQ ID NO: 1274290 - DNA, 15 bp, Homo sapiens
ctaccaaatatttaa

SEQ ID NO: 1274291 - DNA, 15 bp, Homo sapiens
tctaccaaatattta

SEQ ID NO: 1274292 - DNA, 15 bp, Homo sapiens
ttctaccaaatattt

SEQ ID NO: 1274293 - DNA, 15 bp, Homo sapiens
attctaccaaatatt

SEQ ID NO: 1274294 - DNA, 15 bp, Homo sapiens
aattctaccaaatat

SEQ ID NO: 1274295 - DNA, 15 bp, Homo sapiens
gaattctaccaaata

SEQ ID NO: 1274296 - DNA, 15 bp, Homo sapiens
tgaattctaccaaat

SEQ ID NO: 1274297 - DNA, 15 bp, Homo sapiens
atgaattctaccaaa

SEQ ID NO: 1274298 - DNA, 15 bp, Homo sapiens
gatgaattctaccaa

SEQ ID NO: 1274299 - DNA, 15 bp, Homo sapiens
tgatgaattctacca

SEQ ID NO: 1274300 - DNA, 15 bp, Homo sapiens
ctgatgaattctacc

SEQ ID NO: 1274301 - DNA, 15 bp, Homo sapiens
actgatgaattctac

SEQ ID NO: 1274302 - DNA, 15 bp, Homo sapiens
cactgatgaattcta

SEQ ID NO: 1274303 - DNA, 15 bp, Homo sapiens
tcactgatgaattct

SEQ ID NO: 1274304 - DNA, 15 bp, Homo sapiens
atcactgatgaattc

SEQ ID NO: 1274305 - DNA, 15 bp, Homo sapiens
catcactgatgaatt

SEQ ID NO: 1274306 - DNA, 15 bp, Homo sapiens
gcatcactgatgaat

SEQ ID NO: 1274307 - DNA, 15 bp, Homo sapiens
ggcatcactgatgaa

SEQ ID NO: 1274308 - DNA, 15 bp, Homo sapiens
tggcatcactgatga

SEQ ID NO: 1274309 - DNA, 15 bp, Homo sapiens
atggcatcactgatg

SEQ ID NO: 1274310 - DNA, 15 bp, Homo sapiens
gatggcatcactgat

SEQ ID NO: 1274311 - DNA, 15 bp, Homo sapiens
agatggcatcactga

SEQ ID NO: 1274312 - DNA, 15 bp, Homo sapiens
cagatggcatcactg

SEQ ID NO: 1274313 - DNA, 15 bp, Homo sapiens
ccagatggcatcact

SEQ ID NO: 1274314 - DNA, 15 bp, Homo sapiens
cccagatggcatcac

SEQ ID NO: 1274315 - DNA, 15 bp, Homo sapiens
gcccagatggcatca

SEQ ID NO: 1274316 - DNA, 15 bp, Homo sapiens
ggcccagatggcatc

SEQ ID NO: 1274317 - DNA, 15 bp, Homo sapiens
aggcccagatggcat

SEQ ID NO: 1274318 - DNA, 15 bp, Homo sapiens
caggcccagatggca

SEQ ID NO: 1274319 - DNA, 15 bp, Homo sapiens
ccaggcccagatggc

SEQ ID NO: 1274320 - DNA, 15 bp, Homo sapiens
tccaggcccagatgg

SEQ ID NO: 1274321 - DNA, 15 bp, Homo sapiens
gtccaggcccagatg

SEQ ID NO: 1274322 - DNA, 15 bp, Homo sapiens
agtccaggcccagat

SEQ ID NO: 1274323 - DNA, 15 bp, Homo sapiens
aagtccaggcccaga

SEQ ID NO: 1274324 - DNA, 15 bp, Homo sapiens
aaagtccaggcccag

SEQ ID NO: 1274325 - DNA, 15 bp, Homo sapiens
aaaagtccaggccca

SEQ ID NO: 1274326 - DNA, 15 bp, Homo sapiens
gaaaagtccaggccc

SEQ ID NO: 1274327 - DNA, 15 bp, Homo sapiens
agaaaagtccaggcc

SEQ ID NO: 1274328 - DNA, 15 bp, Homo sapiens
gagaaaagtccaggc

SEQ ID NO: 1274329 - DNA, 15 bp, Homo sapiens
agagaaaagtccagg

SEQ ID NO: 1274330 - DNA, 15 bp, Homo sapiens
cagagaaaagtccag

SEQ ID NO: 1274331 - DNA, 15 bp, Homo sapiens
acagagaaaagtcca

SEQ ID NO: 1274332 - DNA, 15 bp, Homo sapiens
cacagagaaaagtcc

SEQ ID NO: 1274333 - DNA, 15 bp, Homo sapiens
ccacagagaaaagtc

SEQ ID NO: 1274334 - DNA, 15 bp, Homo sapiens
tccacagagaaaagt

SEQ ID NO: 1274335 - DNA, 15 bp, Homo sapiens
ttccacagagaaaag

SEQ ID NO: 1274336 - DNA, 15 bp, Homo sapiens
tttccacagagaaaa

SEQ ID NO: 1274337 - DNA, 15 bp, Homo sapiens
ctttccacagagaaa

SEQ ID NO: 1274338 - DNA, 15 bp, Homo sapiens
actttccacagagaa

SEQ ID NO: 1274339 - DNA, 15 bp, Homo sapiens
aactttccacagaga

SEQ ID NO: 1274340 - DNA, 15 bp, Homo sapiens
aaactttccacagag

SEQ ID NO: 1274341 - DNA, 15 bp, Homo sapiens
gaaactttccacaga

SEQ ID NO: 1274342 - DNA, 15 bp, Homo sapiens
tgaaactttccacag

SEQ ID NO: 1274343 - DNA, 15 bp, Homo sapiens
ttgaaactttccaca

SEQ ID NO: 1274344 - DNA, 15 bp, Homo sapiens
tttgaaactttccac

SEQ ID NO: 1274345 - DNA, 15 bp, Homo sapiens
ttttgaaactttcca

SEQ ID NO: 1274346 - DNA, 15 bp, Homo sapiens
attttgaaactttcc

SEQ ID NO: 1274347 - DNA, 15 bp, Homo sapiens
aattttgaaactttc

SEQ ID NO: 1274348 - DNA, 15 bp, Homo sapiens
taattttgaaacttt

SEQ ID NO: 1274349 - DNA, 15 bp, Homo sapiens
gtaattttgaaactt

SEQ ID NO: 1274350 - DNA, 15 bp, Homo sapiens
agtaattttgaaact

SEQ ID NO: 1274351 - DNA, 15 bp, Homo sapiens
tagtaattttgaaac

SEQ ID NO: 1274352 - DNA, 15 bp, Homo sapiens
ttagtaattttgaaa

SEQ ID NO: 1274353 - DNA, 15 bp, Homo sapiens
attagtaattttgaa

SEQ ID NO: 1274354 - DNA, 15 bp, Homo sapiens
aattagtaattttga

SEQ ID NO: 1274355 - DNA, 15 bp, Homo sapiens
gaattagtaattttg

SEQ ID NO: 1274356 - DNA, 15 bp, Homo sapiens
tgaattagtaatttt

SEQ ID NO: 1274357 - DNA, 15 bp, Homo sapiens
ctgaattagtaattt

SEQ ID NO: 1274358 - DNA, 15 bp, Homo sapiens
actgaattagtaatt

SEQ ID NO: 1274359 - DNA, 15 bp, Homo sapiens
gactgaattagtaat

SEQ ID NO: 1274360 - DNA, 15 bp, Homo sapiens
tgactgaattagtaa

SEQ ID NO: 1274361 - DNA, 15 bp, Homo sapiens
atgactgaattagta

SEQ ID NO: 1274362 - DNA, 15 bp, Homo sapiens
aatgactgaattagt

SEQ ID NO: 1274363 - DNA, 15 bp, Homo sapiens
aaatgactgaattag

SEQ ID NO: 1274364 - DNA, 15 bp, Homo sapiens
aaaatgactgaatta

SEQ ID NO: 1274365 - DNA, 15 bp, Homo sapiens
taaaatgactgaatt

SEQ ID NO: 1274366 - DNA, 15 bp, Homo sapiens
gtaaaatgactgaat

SEQ ID NO: 1274367 - DNA, 15 bp, Homo sapiens
agtaaaatgactgaa

SEQ ID NO: 1274368 - DNA, 15 bp, Homo sapiens
aagtaaaatgactga

SEQ ID NO: 1274369 - DNA, 15 bp, Homo sapiens
caagtaaaatgactg

SEQ ID NO: 1274370 - DNA, 15 bp, Homo sapiens
acaagtaaaatgact

SEQ ID NO: 1274371 - DNA, 15 bp, Homo sapiens
aacaagtaaaatgac

SEQ ID NO: 1274372 - DNA, 15 bp, Homo sapiens
taacaagtaaaatga

SEQ ID NO: 1274373 - DNA, 15 bp, Homo sapiens
ataacaagtaaaatg

SEQ ID NO: 1274374 - DNA, 15 bp, Homo sapiens
tataacaagtaaaat

SEQ ID NO: 1274375 - DNA, 15 bp, Homo sapiens
ctataacaagtaaaa

SEQ ID NO: 1274376 - DNA, 15 bp, Homo sapiens
cctataacaagtaaa

SEQ ID NO: 1274377 - DNA, 15 bp, Homo sapiens
acctataacaagtaa

SEQ ID NO: 1274378 - DNA, 15 bp, Homo sapiens
aacctataacaagta

SEQ ID NO: 1274379 - DNA, 15 bp, Homo sapiens
aaacctataacaagt

SEQ ID NO: 1274380 - DNA, 15 bp, Homo sapiens
taaacctataacaag

SEQ ID NO: 1274381 - DNA, 15 bp, Homo sapiens
ataaacctataacaa

SEQ ID NO: 1274382 - DNA, 15 bp, Homo sapiens
aataaacctataaca

SEQ ID NO: 1274383 - DNA, 15 bp, Homo sapiens
gaataaacctataac

SEQ ID NO: 1274384 - DNA, 15 bp, Homo sapiens
tgaataaacctataa

SEQ ID NO: 1274385 - DNA, 15 bp, Homo sapiens
ctgaataaacctata

SEQ ID NO: 1274386 - DNA, 15 bp, Homo sapiens
actgaataaacctat

SEQ ID NO: 1274387 - DNA, 15 bp, Homo sapiens
aactgaataaaccta

SEQ ID NO: 1274388 - DNA, 15 bp, Homo sapiens
aaactgaataaacct

SEQ ID NO: 1274389 - DNA, 15 bp, Homo sapiens
caaactgaataaacc

SEQ ID NO: 1274390 - DNA, 15 bp, Homo sapiens
acaaactgaataaac

SEQ ID NO: 1274391 - DNA, 15 bp, Homo sapiens
gacaaactgaataaa

SEQ ID NO: 1274392 - DNA, 15 bp, Homo sapiens
tgacaaactgaataa

SEQ ID NO: 1274393 - DNA, 15 bp, Homo sapiens
ctgacaaactgaata

SEQ ID NO: 1274394 - DNA, 15 bp, Homo sapiens
actgacaaactgaat

SEQ ID NO: 1274395 - DNA, 15 bp, Homo sapiens
aactgacaaactgaa

SEQ ID NO: 1274396 - DNA, 15 bp, Homo sapiens
aaactgacaaactga

SEQ ID NO: 1274397 - DNA, 15 bp, Homo sapiens
gaaactgacaaactg

SEQ ID NO: 1274398 - DNA, 15 bp, Homo sapiens
agaaactgacaaact

SEQ ID NO: 1274399 - DNA, 15 bp, Homo sapiens
aagaaactgacaaac

SEQ ID NO: 1274400 - DNA, 15 bp, Homo sapiens
aaagaaactgacaaa

SEQ ID NO: 1274401 - DNA, 15 bp, Homo sapiens
gaaagaaactgacaa

SEQ ID NO: 1274402 - DNA, 15 bp, Homo sapiens
agaaagaaactgaca

SEQ ID NO: 1274403 - DNA, 15 bp, Homo sapiens
cagaaagaaactgac

SEQ ID NO: 1274404 - DNA, 15 bp, Homo sapiens
tcagaaagaaactga

SEQ ID NO: 1274405 - DNA, 15 bp, Homo sapiens
ttcagaaagaaactg

SEQ ID NO: 1274406 - DNA, 15 bp, Homo sapiens
attcagaaagaaact

SEQ ID NO: 1274407 - DNA, 15 bp, Homo sapiens
gattcagaaagaaac

SEQ ID NO: 1274408 - DNA, 15 bp, Homo sapiens
tgattcagaaagaaa

SEQ ID NO: 1274409 - DNA, 15 bp, Homo sapiens
ctgattcagaaagaa

SEQ ID NO: 1274410 - DNA, 15 bp, Homo sapiens
actgattcagaaaga

SEQ ID NO: 1274411 - DNA, 15 bp, Homo sapiens
aactgattcagaaag

SEQ ID NO: 1274412 - DNA, 15 bp, Homo sapiens
aaactgattcagaaa

SEQ ID NO: 1274413 - DNA, 15 bp, Homo sapiens
aaaactgattcagaa

SEQ ID NO: 1274414 - DNA, 15 bp, Homo sapiens
aaaaactgattcaga

SEQ ID NO: 1274415 - DNA, 15 bp, Homo sapiens
taaaaactgattcag

SEQ ID NO: 1274416 - DNA, 15 bp, Homo sapiens
ataaaaactgattca

SEQ ID NO: 1274417 - DNA, 15 bp, Homo sapiens
tataaaaactgattc

SEQ ID NO: 1274418 - DNA, 15 bp, Homo sapiens
gtataaaaactgatt

SEQ ID NO: 1274419 - DNA, 15 bp, Homo sapiens
agtataaaaactgat

SEQ ID NO: 1274420 - DNA, 15 bp, Homo sapiens
aagtataaaaactga

SEQ ID NO: 1274421 - DNA, 15 bp, Homo sapiens
aaagtataaaaactg

SEQ ID NO: 1274422 - DNA, 15 bp, Homo sapiens
taaagtataaaaact

SEQ ID NO: 1274423 - DNA, 15 bp, Homo sapiens
ataaagtataaaaac

SEQ ID NO: 1274424 - DNA, 15 bp, Homo sapiens
tataaagtataaaaa

SEQ ID NO: 1274425 - DNA, 15 bp, Homo sapiens
atataaagtataaaa

SEQ ID NO: 1274426 - DNA, 15 bp, Homo sapiens
aatataaagtataaa

SEQ ID NO: 1274427 - DNA, 15 bp, Homo sapiens
aaatataaagtataa

SEQ ID NO: 1274428 - DNA, 15 bp, Homo sapiens
aaaatataaagtata

SEQ ID NO: 1274429 - DNA, 15 bp, Homo sapiens
aaaaatataaagtat

SEQ ID NO: 1274430 - DNA, 15 bp, Homo sapiens
gaaaaatataaagta

SEQ ID NO: 1274431 - DNA, 15 bp, Homo sapiens
agaaaaatataaagt

SEQ ID NO: 1274432 - DNA, 15 bp, Homo sapiens
tagaaaaatataaag

SEQ ID NO: 1274433 - DNA, 15 bp, Homo sapiens
ctagaaaaatataaa

SEQ ID NO: 1274434 - DNA, 15 bp, Homo sapiens
cctagaaaaatataa

SEQ ID NO: 1274435 - DNA, 15 bp, Homo sapiens
tcctagaaaaatata

SEQ ID NO: 1274436 - DNA, 15 bp, Homo sapiens
ttcctagaaaaatat

SEQ ID NO: 1274437 - DNA, 15 bp, Homo sapiens
attcctagaaaaata

SEQ ID NO: 1274438 - DNA, 15 bp, Homo sapiens
aattcctagaaaaat

SEQ ID NO: 1274439 - DNA, 15 bp, Homo sapiens
aaattcctagaaaaa

SEQ ID NO: 1274440 - DNA, 15 bp, Homo sapiens
caaattcctagaaaa

SEQ ID NO: 1274441 - DNA, 15 bp, Homo sapiens
acaaattcctagaaa

SEQ ID NO: 1274442 - DNA, 15 bp, Homo sapiens
gacaaattcctagaa

SEQ ID NO: 1274443 - DNA, 15 bp, Homo sapiens
agacaaattcctaga

SEQ ID NO: 1274444 - DNA, 15 bp, Homo sapiens
tagacaaattcctag

SEQ ID NO: 1274445 - DNA, 15 bp, Homo sapiens
gtagacaaattccta

SEQ ID NO: 1274446 - DNA, 15 bp, Homo sapiens
ggtagacaaattcct

SEQ ID NO: 1274447 - DNA, 15 bp, Homo sapiens
aggtagacaaattcc

SEQ ID NO: 1274448 - DNA, 15 bp, Homo sapiens
gaggtagacaaattc

SEQ ID NO: 1274449 - DNA, 15 bp, Homo sapiens
tgaggtagacaaatt

SEQ ID NO: 1274450 - DNA, 15 bp, Homo sapiens
atgaggtagacaaat

SEQ ID NO: 1274451 - DNA, 15 bp, Homo sapiens
gatgaggtagacaaa

SEQ ID NO: 1274452 - DNA, 15 bp, Homo sapiens
agatgaggtagacaa

SEQ ID NO: 1274453 - DNA, 15 bp, Homo sapiens
tagatgaggtagaca

SEQ ID NO: 1274454 - DNA, 15 bp, Homo sapiens
ttagatgaggtagac

SEQ ID NO: 1274455 - DNA, 15 bp, Homo sapiens
cttagatgaggtaga

SEQ ID NO: 1274456 - DNA, 15 bp, Homo sapiens
acttagatgaggtag

SEQ ID NO: 1274457 - DNA, 15 bp, Homo sapiens
aacttagatgaggta

SEQ ID NO: 1274458 - DNA, 15 bp, Homo sapiens
taacttagatgaggt

SEQ ID NO: 1274459 - DNA, 15 bp, Homo sapiens
gtaacttagatgagg

SEQ ID NO: 1274460 - DNA, 15 bp, Homo sapiens
ggtaacttagatgag

SEQ ID NO: 1274461 - DNA, 15 bp, Homo sapiens
aggtaacttagatga

SEQ ID NO: 1274462 - DNA, 15 bp, Homo sapiens
taggtaacttagatg

SEQ ID NO: 1274463 - DNA, 15 bp, Homo sapiens
ctaggtaacttagat

SEQ ID NO: 1274464 - DNA, 15 bp, Homo sapiens
actaggtaacttaga

SEQ ID NO: 1274465 - DNA, 15 bp, Homo sapiens
aactaggtaacttag

SEQ ID NO: 1274466 - DNA, 15 bp, Homo sapiens
gaactaggtaactta

SEQ ID NO: 1274467 - DNA, 15 bp, Homo sapiens
tgaactaggtaactt

SEQ ID NO: 1274468 - DNA, 15 bp, Homo sapiens
atgaactaggtaact

SEQ ID NO: 1274469 - DNA, 15 bp, Homo sapiens
aatgaactaggtaac

SEQ ID NO: 1274470 - DNA, 15 bp, Homo sapiens
caatgaactaggtaa

SEQ ID NO: 1274471 - DNA, 15 bp, Homo sapiens
ccaatgaactaggta

SEQ ID NO: 1274472 - DNA, 15 bp, Homo sapiens
gccaatgaactaggt

SEQ ID NO: 1274473 - DNA, 15 bp, Homo sapiens
tgccaatgaactagg

SEQ ID NO: 1274474 - DNA, 15 bp, Homo sapiens
ttgccaatgaactag

SEQ ID NO: 1274475 - DNA, 15 bp, Homo sapiens
tttgccaatgaacta

SEQ ID NO: 1274476 - DNA, 15 bp, Homo sapiens
atttgccaatgaact

SEQ ID NO: 1274477 - DNA, 15 bp, Homo sapiens
tatttgccaatgaac

SEQ ID NO: 1274478 - DNA, 15 bp, Homo sapiens
ttatttgccaatgaa

SEQ ID NO: 1274479 - DNA, 15 bp, Homo sapiens
attatttgccaatga

SEQ ID NO: 1274480 - DNA, 15 bp, Homo sapiens
aattatttgccaatg

SEQ ID NO: 1274481 - DNA, 15 bp, Homo sapiens
caattatttgccaat

SEQ ID NO: 1274482 - DNA, 15 bp, Homo sapiens
acaattatttgccaa

SEQ ID NO: 1274483 - DNA, 15 bp, Homo sapiens
aacaattatttgcca

SEQ ID NO: 1274484 - DNA, 15 bp, Homo sapiens
gaacaattatttgcc

SEQ ID NO: 1274485 - DNA, 15 bp, Homo sapiens
tgaacaattatttgc

SEQ ID NO: 1274486 - DNA, 15 bp, Homo sapiens
atgaacaattatttg

SEQ ID NO: 1274487 - DNA, 15 bp, Homo sapiens
catgaacaattattt

SEQ ID NO: 1274488 - DNA, 15 bp, Homo sapiens
ccatgaacaattatt

SEQ ID NO: 1274489 - DNA, 15 bp, Homo sapiens
gccatgaacaattat

SEQ ID NO: 1274490 - DNA, 15 bp, Homo sapiens
tgccatgaacaatta

SEQ ID NO: 1274491 - DNA, 15 bp, Homo sapiens
atgccatgaacaatt

SEQ ID NO: 1274492 - DNA, 15 bp, Homo sapiens
aatgccatgaacaat

SEQ ID NO: 1274493 - DNA, 15 bp, Homo sapiens
caatgccatgaacaa

SEQ ID NO: 1274494 - DNA, 15 bp, Homo sapiens
gcaatgccatgaaca

SEQ ID NO: 1274495 - DNA, 15 bp, Homo sapiens
ggcaatgccatgaac

SEQ ID NO: 1274496 - DNA, 15 bp, Homo sapiens
tggcaatgccatgaa

SEQ ID NO: 1274497 - DNA, 15 bp, Homo sapiens
atggcaatgccatga

SEQ ID NO: 1274498 - DNA, 15 bp, Homo sapiens
aatggcaatgccatg

SEQ ID NO: 1274499 - DNA, 15 bp, Homo sapiens
taatggcaatgccat

SEQ ID NO: 1274500 - DNA, 15 bp, Homo sapiens
ataatggcaatgcca

SEQ ID NO: 1274501 - DNA, 15 bp, Homo sapiens
tataatggcaatgcc

SEQ ID NO: 1274502 - DNA, 15 bp, Homo sapiens
ttataatggcaatgc

SEQ ID NO: 1274503 - DNA, 15 bp, Homo sapiens
attataatggcaatg

SEQ ID NO: 1274504 - DNA, 15 bp, Homo sapiens
gattataatggcaat

SEQ ID NO: 1274505 - DNA, 15 bp, Homo sapiens
ggattataatggcaa

SEQ ID NO: 1274506 - DNA, 15 bp, Homo sapiens
aggattataatggca

SEQ ID NO: 1274507 - DNA, 15 bp, Homo sapiens
aaggattataatggc

SEQ ID NO: 1274508 - DNA, 15 bp, Homo sapiens
aaaggattataatgg

SEQ ID NO: 1274509 - DNA, 15 bp, Homo sapiens
aaaaggattataatg

SEQ ID NO: 1274510 - DNA, 15 bp, Homo sapiens
aaaaaggattataat

SEQ ID NO: 1274511 - DNA, 15 bp, Homo sapiens
taaaaaggattataa

SEQ ID NO: 1274512 - DNA, 15 bp, Homo sapiens
ataaaaaggattata

SEQ ID NO: 1274513 - DNA, 15 bp, Homo sapiens
aataaaaaggattat

SEQ ID NO: 1274514 - DNA, 15 bp, Homo sapiens
aaataaaaaggatta

SEQ ID NO: 1274515 - DNA, 15 bp, Homo sapiens
gaaataaaaaggatt

SEQ ID NO: 1274516 - DNA, 15 bp, Homo sapiens
agaaataaaaaggat

SEQ ID NO: 1274517 - DNA, 15 bp, Homo sapiens
cagaaataaaaagga

SEQ ID NO: 1274518 - DNA, 15 bp, Homo sapiens
acagaaataaaaagg

SEQ ID NO: 1274519 - DNA, 15 bp, Homo sapiens
tacagaaataaaaag

SEQ ID NO: 1274520 - DNA, 15 bp, Homo sapiens
ttacagaaataaaaa

SEQ ID NO: 1274521 - DNA, 15 bp, Homo sapiens
cttacagaaataaaa

SEQ ID NO: 1274522 - DNA, 15 bp, Homo sapiens
ccttacagaaataaa

SEQ ID NO: 1274523 - DNA, 15 bp, Homo sapiens
accttacagaaataa

SEQ ID NO: 1274524 - DNA, 15 bp, Homo sapiens
aaccttacagaaata

SEQ ID NO: 1274525 - DNA, 15 bp, Homo sapiens
taaccttacagaaat

SEQ ID NO: 1274526 - DNA, 15 bp, Homo sapiens
ctaaccttacagaaa

SEQ ID NO: 1274527 - DNA, 15 bp, Homo sapiens
actaaccttacagaa

SEQ ID NO: 1274528 - DNA, 15 bp, Homo sapiens
tactaaccttacaga

SEQ ID NO: 1274529 - DNA, 15 bp, Homo sapiens
ctactaaccttacag

SEQ ID NO: 1274530 - DNA, 15 bp, Homo sapiens
actactaaccttaca

SEQ ID NO: 1274531 - DNA, 15 bp, Homo sapiens
tactactaaccttac

SEQ ID NO: 1274532 - DNA, 15 bp, Homo sapiens
ttactactaacctta

SEQ ID NO: 1274533 - DNA, 15 bp, Homo sapiens
attactactaacctt

SEQ ID NO: 1274534 - DNA, 15 bp, Homo sapiens
aattactactaacct

SEQ ID NO: 1274535 - DNA, 15 bp, Homo sapiens
aaattactactaacc

SEQ ID NO: 1274536 - DNA, 15 bp, Homo sapiens
aaaattactactaac

SEQ ID NO: 1274537 - DNA, 15 bp, Homo sapiens
aaaaattactactaa

SEQ ID NO: 1274538 - DNA, 15 bp, Homo sapiens
aaaaaattactacta

SEQ ID NO: 1274539 - DNA, 15 bp, Homo sapiens
aaaaaaattactact

SEQ ID NO: 1274540 - DNA, 15 bp, Homo sapiens
aaaaaaaattactac

SEQ ID NO: 1274541 - DNA, 15 bp, Homo sapiens
aaaaaaaaattacta

SEQ ID NO: 1274542 - DNA, 15 bp, Homo sapiens
taaaaaaaaattact

SEQ ID NO: 1274543 - DNA, 15 bp, Homo sapiens
aataaaaaaaaatta

SEQ ID NO: 1274544 - DNA, 15 bp, Homo sapiens
aaataaaaaaaaatt

SEQ ID NO: 1274545 - DNA, 15 bp, Homo sapiens
gaaataaaaaaaaat

SEQ ID NO: 1274546 - DNA, 15 bp, Homo sapiens
tgaaataaaaaaaaa

SEQ ID NO: 1274547 - DNA, 15 bp, Homo sapiens
atgaaataaaaaaaa

SEQ ID NO: 1274548 - DNA, 15 bp, Homo sapiens
aatgaaataaaaaaa

SEQ ID NO: 1274549 - DNA, 15 bp, Homo sapiens
gaatgaaataaaaaa

SEQ ID NO: 1274550 - DNA, 15 bp, Homo sapiens
ggaatgaaataaaaa

SEQ ID NO: 1274551 - DNA, 15 bp, Homo sapiens
gggaatgaaataaaa

SEQ ID NO: 1274552 - DNA, 15 bp, Homo sapiens
cgggaatgaaataaa

SEQ ID NO: 1274553 - DNA, 15 bp, Homo sapiens
tcgggaatgaaataa

SEQ ID NO: 1274554 - DNA, 15 bp, Homo sapiens
atcgggaatgaaata

SEQ ID NO: 1274555 - DNA, 15 bp, Homo sapiens
aatcgggaatgaaat

SEQ ID NO: 1274556 - DNA, 15 bp, Homo sapiens
aaatcgggaatgaaa

SEQ ID NO: 1274557 - DNA, 15 bp, Homo sapiens
aaaatcgggaatgaa

SEQ ID NO: 1274558 - DNA, 15 bp, Homo sapiens
caaaatcgggaatga

SEQ ID NO: 1274559 - DNA, 15 bp, Homo sapiens
ccaaaatcgggaatg

SEQ ID NO: 1274560 - DNA, 15 bp, Homo sapiens
accaaaatcgggaat

SEQ ID NO: 1274561 - DNA, 15 bp, Homo sapiens
aaccaaaatcgggaa

SEQ ID NO: 1274562 - DNA, 15 bp, Homo sapiens
taaccaaaatcggga

SEQ ID NO: 1274563 - DNA, 15 bp, Homo sapiens
ttaaccaaaatcggg

SEQ ID NO: 1274564 - DNA, 15 bp, Homo sapiens
attaaccaaaatcgg

SEQ ID NO: 1274565 - DNA, 15 bp, Homo sapiens
aattaaccaaaatcg

SEQ ID NO: 1274566 - DNA, 15 bp, Homo sapiens
aaattaaccaaaatc

SEQ ID NO: 1274567 - DNA, 15 bp, Homo sapiens
caaattaaccaaaat

SEQ ID NO: 1274568 - DNA, 15 bp, Homo sapiens
tcaaattaaccaaaa

SEQ ID NO: 1274569 - DNA, 15 bp, Homo sapiens
ctcaaattaaccaaa

SEQ ID NO: 1274570 - DNA, 15 bp, Homo sapiens
gctcaaattaaccaa

SEQ ID NO: 1274571 - DNA, 15 bp, Homo sapiens
ggctcaaattaacca

SEQ ID NO: 1274572 - DNA, 15 bp, Homo sapiens
aggctcaaattaacc

SEQ ID NO: 1274573 - DNA, 15 bp, Homo sapiens
aaggctcaaattaac

SEQ ID NO: 1274574 - DNA, 15 bp, Homo sapiens
gaaggctcaaattaa

SEQ ID NO: 1274575 - DNA, 15 bp, Homo sapiens
agaaggctcaaatta

SEQ ID NO: 1274576 - DNA, 15 bp, Homo sapiens
gagaaggctcaaatt

SEQ ID NO: 1274577 - DNA, 15 bp, Homo sapiens
agagaaggctcaaat

SEQ ID NO: 1274578 - DNA, 15 bp, Homo sapiens
gagagaaggctcaaa

SEQ ID NO: 1274579 - DNA, 15 bp, Homo sapiens
agagagaaggctcaa

SEQ ID NO: 1274580 - DNA, 15 bp, Homo sapiens
aagagagaaggctca

SEQ ID NO: 1274581 - DNA, 15 bp, Homo sapiens
aaagagagaaggctc

SEQ ID NO: 1274582 - DNA, 15 bp, Homo sapiens
aaaagagagaaggct

SEQ ID NO: 1274583 - DNA, 15 bp, Homo sapiens
taaaagagagaaggc

SEQ ID NO: 1274584 - DNA, 15 bp, Homo sapiens
ataaaagagagaagg

SEQ ID NO: 1274585 - DNA, 15 bp, Homo sapiens
gataaaagagagaag

SEQ ID NO: 1274586 - DNA, 15 bp, Homo sapiens
agataaaagagagaa

SEQ ID NO: 1274587 - DNA, 15 bp, Homo sapiens
aagataaaagagaga

SEQ ID NO: 1274588 - DNA, 15 bp, Homo sapiens
caagataaaagagag

SEQ ID NO: 1274589 - DNA, 15 bp, Homo sapiens
ccaagataaaagaga

SEQ ID NO: 1274590 - DNA, 15 bp, Homo sapiens
accaagataaaagag

SEQ ID NO: 1274591 - DNA, 15 bp, Homo sapiens
gaccaagataaaaga

SEQ ID NO: 1274592 - DNA, 15 bp, Homo sapiens
tgaccaagataaaag

SEQ ID NO: 1274593 - DNA, 15 bp, Homo sapiens
ctgaccaagataaaa

SEQ ID NO: 1274594 - DNA, 15 bp, Homo sapiens
actgaccaagataaa

SEQ ID NO: 1274595 - DNA, 15 bp, Homo sapiens
gactgaccaagataa

SEQ ID NO: 1274596 - DNA, 15 bp, Homo sapiens
agactgaccaagata

SEQ ID NO: 1274597 - DNA, 15 bp, Homo sapiens
tagactgaccaagat

SEQ ID NO: 1274598 - DNA, 15 bp, Homo sapiens
ttagactgaccaaga

SEQ ID NO: 1274599 - DNA, 15 bp, Homo sapiens
gttagactgaccaag

SEQ ID NO: 1274600 - DNA, 15 bp, Homo sapiens
agttagactgaccaa

SEQ ID NO: 1274601 - DNA, 15 bp, Homo sapiens
tagttagactgacca

SEQ ID NO: 1274602 - DNA, 15 bp, Homo sapiens
ctagttagactgacc

SEQ ID NO: 1274603 - DNA, 15 bp, Homo sapiens
tctagttagactgac

SEQ ID NO: 1274604 - DNA, 15 bp, Homo sapiens
ttctagttagactga

SEQ ID NO: 1274605 - DNA, 15 bp, Homo sapiens
cttctagttagactg

SEQ ID NO: 1274606 - DNA, 15 bp, Homo sapiens
acttctagttagact

SEQ ID NO: 1274607 - DNA, 15 bp, Homo sapiens
aacttctagttagac

SEQ ID NO: 1274608 - DNA, 15 bp, Homo sapiens
aaacttctagttaga

SEQ ID NO: 1274609 - DNA, 15 bp, Homo sapiens
gaaacttctagttag

SEQ ID NO: 1274610 - DNA, 15 bp, Homo sapiens
agaaacttctagtta

SEQ ID NO: 1274611 - DNA, 15 bp, Homo sapiens
gagaaacttctagtt

SEQ ID NO: 1274612 - DNA, 15 bp, Homo sapiens
tgagaaacttctagt

SEQ ID NO: 1274613 - DNA, 15 bp, Homo sapiens
ttgagaaacttctag

SEQ ID NO: 1274614 - DNA, 15 bp, Homo sapiens
attgagaaacttcta

SEQ ID NO: 1274615 - DNA, 15 bp, Homo sapiens
cattgagaaacttct

SEQ ID NO: 1274616 - DNA, 15 bp, Homo sapiens
acattgagaaacttc

SEQ ID NO: 1274617 - DNA, 15 bp, Homo sapiens
aacattgagaaactt

SEQ ID NO: 1274618 - DNA, 15 bp, Homo sapiens
caacattgagaaact

SEQ ID NO: 1274619 - DNA, 15 bp, Homo sapiens
ccaacattgagaaac

SEQ ID NO: 1274620 - DNA, 15 bp, Homo sapiens
accaacattgagaaa

SEQ ID NO: 1274621 - DNA, 15 bp, Homo sapiens
caccaacattgagaa

SEQ ID NO: 1274622 - DNA, 15 bp, Homo sapiens
tcaccaacattgaga

SEQ ID NO: 1274623 - DNA, 15 bp, Homo sapiens
atcaccaacattgag

SEQ ID NO: 1274624 - DNA, 15 bp, Homo sapiens
aatcaccaacattga

SEQ ID NO: 1274625 - DNA, 15 bp, Homo sapiens
aaatcaccaacattg

SEQ ID NO: 1274626 - DNA, 15 bp, Homo sapiens
taaatcaccaacatt

SEQ ID NO: 1274627 - DNA, 15 bp, Homo sapiens
ttaaatcaccaacat

SEQ ID NO: 1274628 - DNA, 15 bp, Homo sapiens
tttaaatcaccaaca

SEQ ID NO: 1274629 - DNA, 15 bp, Homo sapiens
ctttaaatcaccaac

SEQ ID NO: 1274630 - DNA, 15 bp, Homo sapiens
actttaaatcaccaa

SEQ ID NO: 1274631 - DNA, 15 bp, Homo sapiens
aactttaaatcacca

SEQ ID NO: 1274632 - DNA, 15 bp, Homo sapiens
aaactttaaatcacc

SEQ ID NO: 1274633 - DNA, 15 bp, Homo sapiens
aaaactttaaatcac

SEQ ID NO: 1274634 - DNA, 15 bp, Homo sapiens
aaaaactttaaatca

SEQ ID NO: 1274635 - DNA, 15 bp, Homo sapiens
aaaaaactttaaatc

SEQ ID NO: 1274636 - DNA, 15 bp, Homo sapiens
aaaaaaactttaaat

SEQ ID NO: 1274637 - DNA, 15 bp, Homo sapiens
aaaaaaaactttaaa

SEQ ID NO: 1274638 - DNA, 15 bp, Homo sapiens
aaaaaaaaactttaa

SEQ ID NO: 1274639 - DNA, 15 bp, Homo sapiens
gaaaaaaaaacttta

SEQ ID NO: 1274640 - DNA, 15 bp, Homo sapiens
agaaaaaaaaacttt

SEQ ID NO: 1274641 - DNA, 15 bp, Homo sapiens
cagaaaaaaaaactt

SEQ ID NO: 1274642 - DNA, 15 bp, Homo sapiens
ccagaaaaaaaaact

SEQ ID NO: 1274643 - DNA, 15 bp, Homo sapiens
accagaaaaaaaaac

SEQ ID NO: 1274644 - DNA, 15 bp, Homo sapiens
aaccagaaaaaaaaa

SEQ ID NO: 1274645 - DNA, 15 bp, Homo sapiens
aaaccagaaaaaaaa

SEQ ID NO: 1274646 - DNA, 15 bp, Homo sapiens
gaaaccagaaaaaaa

SEQ ID NO: 1274647 - DNA, 15 bp, Homo sapiens
tgaaaccagaaaaaa

SEQ ID NO: 1274648 - DNA, 15 bp, Homo sapiens
atgaaaccagaaaaa

SEQ ID NO: 1274649 - DNA, 15 bp, Homo sapiens
aatgaaaccagaaaa

SEQ ID NO: 1274650 - DNA, 15 bp, Homo sapiens
caatgaaaccagaaa

SEQ ID NO: 1274651 - DNA, 15 bp, Homo sapiens
tcaatgaaaccagaa

SEQ ID NO: 1274652 - DNA, 15 bp, Homo sapiens
atcaatgaaaccaga

SEQ ID NO: 1274653 - DNA, 15 bp, Homo sapiens
aatcaatgaaaccag

SEQ ID NO: 1274654 - DNA, 15 bp, Homo sapiens
aaatcaatgaaacca

SEQ ID NO: 1274655 - DNA, 15 bp, Homo sapiens
aaaatcaatgaaacc

SEQ ID NO: 1274656 - DNA, 15 bp, Homo sapiens
aaaaatcaatgaaac

SEQ ID NO: 1274657 - DNA, 15 bp, Homo sapiens
gaaaaatcaatgaaa

SEQ ID NO: 1274658 - DNA, 15 bp, Homo sapiens
agaaaaatcaatgaa

SEQ ID NO: 1274659 - DNA, 15 bp, Homo sapiens
aagaaaaatcaatga

SEQ ID NO: 1274660 - DNA, 15 bp, Homo sapiens
aaagaaaaatcaatg

SEQ ID NO: 1274661 - DNA, 15 bp, Homo sapiens
taaagaaaaatcaat

SEQ ID NO: 1274662 - DNA, 15 bp, Homo sapiens
ataaagaaaaatcaa

SEQ ID NO: 1274663 - DNA, 15 bp, Homo sapiens
aataaagaaaaatca

SEQ ID NO: 1274664 - DNA, 15 bp, Homo sapiens
aaataaagaaaaatc

SEQ ID NO: 1274665 - DNA, 15 bp, Homo sapiens
gaaataaagaaaaat

SEQ ID NO: 1274666 - DNA, 15 bp, Homo sapiens
agaaataaagaaaaa

SEQ ID NO: 1274667 - DNA, 15 bp, Homo sapiens
gagaaataaagaaaa

SEQ ID NO: 1274668 - DNA, 15 bp, Homo sapiens
agagaaataaagaaa

SEQ ID NO: 1274669 - DNA, 15 bp, Homo sapiens
tagagaaataaagaa

SEQ ID NO: 1274670 - DNA, 15 bp, Homo sapiens
atagagaaataaaga

SEQ ID NO: 1274671 - DNA, 15 bp, Homo sapiens
aatagagaaataaag

SEQ ID NO: 1274672 - DNA, 15 bp, Homo sapiens
gaatagagaaataaa

SEQ ID NO: 1274673 - DNA, 15 bp, Homo sapiens
agaatagagaaataa

SEQ ID NO: 1274674 - DNA, 15 bp, Homo sapiens
gagaatagagaaata

SEQ ID NO: 1274675 - DNA, 15 bp, Homo sapiens
agagaatagagaaat

SEQ ID NO: 1274676 - DNA, 15 bp, Homo sapiens
tagagaatagagaaa

SEQ ID NO: 1274677 - DNA, 15 bp, Homo sapiens
ttagagaatagagaa

SEQ ID NO: 1274678 - DNA, 15 bp, Homo sapiens
tttagagaatagaga

SEQ ID NO: 1274679 - DNA, 15 bp, Homo sapiens
ttttagagaatagag

SEQ ID NO: 1274680 - DNA, 15 bp, Homo sapiens
tttttagagaataga

SEQ ID NO: 1274681 - DNA, 15 bp, Homo sapiens
ttttttagagaatag

SEQ ID NO: 1274682 - DNA, 15 bp, Homo sapiens
attttttagagaata

SEQ ID NO: 1274683 - DNA, 15 bp, Homo sapiens
aattttttagagaat

SEQ ID NO: 1274684 - DNA, 15 bp, Homo sapiens
aaattttttagagaa

SEQ ID NO: 1274685 - DNA, 15 bp, Homo sapiens
aaaattttttagaga

SEQ ID NO: 1274686 - DNA, 15 bp, Homo sapiens
caaaattttttagag

SEQ ID NO: 1274687 - DNA, 15 bp, Homo sapiens
tcaaaattttttaga

SEQ ID NO: 1274688 - DNA, 15 bp, Homo sapiens
atcaaaattttttag

SEQ ID NO: 1274689 - DNA, 15 bp, Homo sapiens
gatcaaaatttttta

SEQ ID NO: 1274690 - DNA, 15 bp, Homo sapiens
ttgatcaaaattttt

SEQ ID NO: 1274691 - DNA, 15 bp, Homo sapiens
tttgatcaaaatttt

SEQ ID NO: 1274692 - DNA, 15 bp, Homo sapiens
gtttgatcaaaattt

SEQ ID NO: 1274693 - DNA, 15 bp, Homo sapiens
cgtttgatcaaaatt

SEQ ID NO: 1274694 - DNA, 15 bp, Homo sapiens
tcgtttgatcaaaat

SEQ ID NO: 1274695 - DNA, 15 bp, Homo sapiens
atcgtttgatcaaaa

SEQ ID NO: 1274696 - DNA, 15 bp, Homo sapiens
aatcgtttgatcaaa

SEQ ID NO: 1274697 - DNA, 15 bp, Homo sapiens
aaatcgtttgatcaa

SEQ ID NO: 1274698 - DNA, 15 bp, Homo sapiens
aaaatcgtttgatca

SEQ ID NO: 1274699 - DNA, 15 bp, Homo sapiens
aaaaatcgtttgatc

SEQ ID NO: 1274700 - DNA, 15 bp, Homo sapiens
gaaaaatcgtttgat

SEQ ID NO: 1274701 - DNA, 15 bp, Homo sapiens
ggaaaaatcgtttga

SEQ ID NO: 1274702 - DNA, 15 bp, Homo sapiens
gggaaaaatcgtttg

SEQ ID NO: 1274703 - DNA, 15 bp, Homo sapiens
agggaaaaatcgttt

SEQ ID NO: 1274704 - DNA, 15 bp, Homo sapiens
cagggaaaaatcgtt

SEQ ID NO: 1274705 - DNA, 15 bp, Homo sapiens
acagggaaaaatcgt

SEQ ID NO: 1274706 - DNA, 15 bp, Homo sapiens
aacagggaaaaatcg

SEQ ID NO: 1274707 - DNA, 15 bp, Homo sapiens
aaacagggaaaaatc

SEQ ID NO: 1274708 - DNA, 15 bp, Homo sapiens
aaaacagggaaaaat

SEQ ID NO: 1274709 - DNA, 15 bp, Homo sapiens
aaaaacagggaaaaa

SEQ ID NO: 1274710 - DNA, 15 bp, Homo sapiens
aaaaaacagggaaaa

SEQ ID NO: 1274711 - DNA, 15 bp, Homo sapiens
gaaaaaacagggaaa

SEQ ID NO: 1274712 - DNA, 15 bp, Homo sapiens
tgaaaaaacagggaa

SEQ ID NO: 1274713 - DNA, 15 bp, Homo sapiens
gtgaaaaaacaggga

SEQ ID NO: 1274714 - DNA, 15 bp, Homo sapiens
agtgaaaaaacaggg

SEQ ID NO: 1274715 - DNA, 15 bp, Homo sapiens
tagtgaaaaaacagg

SEQ ID NO: 1274716 - DNA, 15 bp, Homo sapiens
gtagtgaaaaaacag

SEQ ID NO: 1274717 - DNA, 15 bp, Homo sapiens
ggtagtgaaaaaaca

SEQ ID NO: 1274718 - DNA, 15 bp, Homo sapiens
gggtagtgaaaaaac

SEQ ID NO: 1274719 - DNA, 15 bp, Homo sapiens
tgggtagtgaaaaaa

SEQ ID NO: 1274720 - DNA, 15 bp, Homo sapiens
ttgggtagtgaaaaa

SEQ ID NO: 1274721 - DNA, 15 bp, Homo sapiens
attgggtagtgaaaa

SEQ ID NO: 1274722 - DNA, 15 bp, Homo sapiens
cattgggtagtgaaa

SEQ ID NO: 1274723 - DNA, 15 bp, Homo sapiens
acattgggtagtgaa

SEQ ID NO: 1274724 - DNA, 15 bp, Homo sapiens
aacattgggtagtga

SEQ ID NO: 1274725 - DNA, 15 bp, Homo sapiens
aaacattgggtagtg

SEQ ID NO: 1274726 - DNA, 15 bp, Homo sapiens
taaacattgggtagt

SEQ ID NO: 1274727 - DNA, 15 bp, Homo sapiens
ataaacattgggtag

SEQ ID NO: 1274728 - DNA, 15 bp, Homo sapiens
tataaacattgggta

SEQ ID NO: 1274729 - DNA, 15 bp, Homo sapiens
gtataaacattgggt

SEQ ID NO: 1274730 - DNA, 15 bp, Homo sapiens
agtataaacattggg

SEQ ID NO: 1274731 - DNA, 15 bp, Homo sapiens
aagtataaacattgg

SEQ ID NO: 1274732 - DNA, 15 bp, Homo sapiens
taagtataaacattg

SEQ ID NO: 1274733 - DNA, 15 bp, Homo sapiens
ttaagtataaacatt

SEQ ID NO: 1274734 - DNA, 15 bp, Homo sapiens
attaagtataaacat

SEQ ID NO: 1274735 - DNA, 15 bp, Homo sapiens
cattaagtataaaca

SEQ ID NO: 1274736 - DNA, 15 bp, Homo sapiens
acattaagtataaac

SEQ ID NO: 1274737 - DNA, 15 bp, Homo sapiens
cacattaagtataaa

SEQ ID NO: 1274738 - DNA, 15 bp, Homo sapiens
acacattaagtataa

SEQ ID NO: 1274739 - DNA, 15 bp, Homo sapiens
cacacattaagtata

SEQ ID NO: 1274740 - DNA, 15 bp, Homo sapiens
acacacattaagtat

SEQ ID NO: 1274741 - DNA, 15 bp, Homo sapiens
tacacacattaagta

SEQ ID NO: 1274742 - DNA, 15 bp, Homo sapiens
atacacacattaagt

SEQ ID NO: 1274743 - DNA, 15 bp, Homo sapiens
aatacacacattaag

SEQ ID NO: 1274744 - DNA, 15 bp, Homo sapiens
caatacacacattaa

SEQ ID NO: 1274745 - DNA, 15 bp, Homo sapiens
ccaatacacacatta

SEQ ID NO: 1274746 - DNA, 15 bp, Homo sapiens
tccaatacacacatt

SEQ ID NO: 1274747 - DNA, 15 bp, Homo sapiens
atccaatacacacat

SEQ ID NO: 1274748 - DNA, 15 bp, Homo sapiens
tatccaatacacaca

SEQ ID NO: 1274749 - DNA, 15 bp, Homo sapiens
ttatccaatacacac

SEQ ID NO: 1274750 - DNA, 15 bp, Homo sapiens
gttatccaatacaca

SEQ ID NO: 1274751 - DNA, 15 bp, Homo sapiens
agttatccaatacac

SEQ ID NO: 1274752 - DNA, 15 bp, Homo sapiens
gagttatccaataca

SEQ ID NO: 1274753 - DNA, 15 bp, Homo sapiens
agagttatccaatac

SEQ ID NO: 1274754 - DNA, 15 bp, Homo sapiens
tagagttatccaata

SEQ ID NO: 1274755 - DNA, 15 bp, Homo sapiens
atagagttatccaat

SEQ ID NO: 1274756 - DNA, 15 bp, Homo sapiens
aatagagttatccaa

SEQ ID NO: 1274757 - DNA, 15 bp, Homo sapiens
taatagagttatcca

SEQ ID NO: 1274758 - DNA, 15 bp, Homo sapiens
ttaatagagttatcc

SEQ ID NO: 1274759 - DNA, 15 bp, Homo sapiens
tttaatagagttatc

SEQ ID NO: 1274760 - DNA, 15 bp, Homo sapiens
ctttaatagagttat

SEQ ID NO: 1274761 - DNA, 15 bp, Homo sapiens
actttaatagagtta

SEQ ID NO: 1274762 - DNA, 15 bp, Homo sapiens
aactttaatagagtt

SEQ ID NO: 1274763 - DNA, 15 bp, Homo sapiens
gaactttaatagagt

SEQ ID NO: 1274764 - DNA, 15 bp, Homo sapiens
tgaactttaatagag

SEQ ID NO: 1274765 - DNA, 15 bp, Homo sapiens
atgaactttaataga

SEQ ID NO: 1274766 - DNA, 15 bp, Homo sapiens
gatgaactttaatag

SEQ ID NO: 1274767 - DNA, 15 bp, Homo sapiens
tgatgaactttaata

SEQ ID NO: 1274768 - DNA, 15 bp, Homo sapiens
atgatgaactttaat

SEQ ID NO: 1274769 - DNA, 15 bp, Homo sapiens
gatgatgaactttaa

SEQ ID NO: 1274770 - DNA, 15 bp, Homo sapiens
tgatgatgaacttta

SEQ ID NO: 1274771 - DNA, 15 bp, Homo sapiens
atgatgatgaacttt

SEQ ID NO: 1274772 - DNA, 15 bp, Homo sapiens
catgatgatgaactt

SEQ ID NO: 1274773 - DNA, 15 bp, Homo sapiens
acatgatgatgaact

SEQ ID NO: 1274774 - DNA, 15 bp, Homo sapiens
tacatgatgatgaac

SEQ ID NO: 1274775 - DNA, 15 bp, Homo sapiens
gtacatgatgatgaa

SEQ ID NO: 1274776 - DNA, 15 bp, Homo sapiens
agtacatgatgatga

SEQ ID NO: 1274777 - DNA, 15 bp, Homo sapiens
aagtacatgatgatg

SEQ ID NO: 1274778 - DNA, 15 bp, Homo sapiens
aaagtacatgatgat

SEQ ID NO: 1274779 - DNA, 15 bp, Homo sapiens
gaaagtacatgatga

SEQ ID NO: 1274780 - DNA, 15 bp, Homo sapiens
tgaaagtacatgatg

SEQ ID NO: 1274781 - DNA, 15 bp, Homo sapiens
atgaaagtacatgat

SEQ ID NO: 1274782 - DNA, 15 bp, Homo sapiens
gatgaaagtacatga

SEQ ID NO: 1274783 - DNA, 15 bp, Homo sapiens
tgatgaaagtacatg

SEQ ID NO: 1274784 - DNA, 15 bp, Homo sapiens
atgatgaaagtacat

SEQ ID NO: 1274785 - DNA, 15 bp, Homo sapiens
catgatgaaagtaca

SEQ ID NO: 1274786 - DNA, 15 bp, Homo sapiens
acatgatgaaagtac

SEQ ID NO: 1274787 - DNA, 15 bp, Homo sapiens
tacatgatgaaagta

SEQ ID NO: 1274788 - DNA, 15 bp, Homo sapiens
ttacatgatgaaagt

SEQ ID NO: 1274789 - DNA, 15 bp, Homo sapiens
attacatgatgaaag

SEQ ID NO: 1274790 - DNA, 15 bp, Homo sapiens
tattacatgatgaaa

SEQ ID NO: 1274791 - DNA, 15 bp, Homo sapiens
ctattacatgatgaa

SEQ ID NO: 1274792 - DNA, 15 bp, Homo sapiens
actattacatgatga

SEQ ID NO: 1274793 - DNA, 15 bp, Homo sapiens
gactattacatgatg

SEQ ID NO: 1274794 - DNA, 15 bp, Homo sapiens
tgactattacatgat

SEQ ID NO: 1274795 - DNA, 15 bp, Homo sapiens
ctgactattacatga

SEQ ID NO: 1274796 - DNA, 15 bp, Homo sapiens
tctgactattacatg

SEQ ID NO: 1274797 - DNA, 15 bp, Homo sapiens
atctgactattacat

SEQ ID NO: 1274798 - DNA, 15 bp, Homo sapiens
tatctgactattaca

SEQ ID NO: 1274799 - DNA, 15 bp, Homo sapiens
atatctgactattac

SEQ ID NO: 1274800 - DNA, 15 bp, Homo sapiens
tatatctgactatta

SEQ ID NO: 1274801 - DNA, 15 bp, Homo sapiens
atatatctgactatt

SEQ ID NO: 1274802 - DNA, 15 bp, Homo sapiens
gatatatctgactat

SEQ ID NO: 1274803 - DNA, 15 bp, Homo sapiens
agatatatctgacta

SEQ ID NO: 1274804 - DNA, 15 bp, Homo sapiens
aagatatatctgact

SEQ ID NO: 1274805 - DNA, 15 bp, Homo sapiens
taagatatatctgac

SEQ ID NO: 1274806 - DNA, 15 bp, Homo sapiens
ataagatatatctga

SEQ ID NO: 1274807 - DNA, 15 bp, Homo sapiens
tataagatatatctg

SEQ ID NO: 1274808 - DNA, 15 bp, Homo sapiens
atataagatatatct

SEQ ID NO: 1274809 - DNA, 15 bp, Homo sapiens
tatataagatatatc

SEQ ID NO: 1274810 - DNA, 15 bp, Homo sapiens
atatataagatatat

SEQ ID NO: 1274811 - DNA, 15 bp, Homo sapiens
tatatataagatata

SEQ ID NO: 1274812 - DNA, 15 bp, Homo sapiens
ttatatataagatat

SEQ ID NO: 1274813 - DNA, 15 bp, Homo sapiens
attatatataagata

SEQ ID NO: 1274814 - DNA, 15 bp, Homo sapiens
aattatatataagat

SEQ ID NO: 1274815 - DNA, 15 bp, Homo sapiens
caattatatataaga

SEQ ID NO: 1274816 - DNA, 15 bp, Homo sapiens
acaattatatataag

SEQ ID NO: 1274817 - DNA, 15 bp, Homo sapiens
tacaattatatataa

SEQ ID NO: 1274818 - DNA, 15 bp, Homo sapiens
gtacaattatatata

SEQ ID NO: 1274819 - DNA, 15 bp, Homo sapiens
agtacaattatatat

SEQ ID NO: 1274820 - DNA, 15 bp, Homo sapiens
cagtacaattatata

SEQ ID NO: 1274821 - DNA, 15 bp, Homo sapiens
gcagtacaattatat

SEQ ID NO: 1274822 - DNA, 15 bp, Homo sapiens
ggcagtacaattata

SEQ ID NO: 1274823 - DNA, 15 bp, Homo sapiens
aggcagtacaattat

SEQ ID NO: 1274824 - DNA, 15 bp, Homo sapiens
taggcagtacaatta

SEQ ID NO: 1274825 - DNA, 15 bp, Homo sapiens
gtaggcagtacaatt

SEQ ID NO: 1274826 - DNA, 15 bp, Homo sapiens
agtaggcagtacaat

SEQ ID NO: 1274827 - DNA, 15 bp, Homo sapiens
aagtaggcagtacaa

SEQ ID NO: 1274828 - DNA, 15 bp, Homo sapiens
aaagtaggcagtaca

SEQ ID NO: 1274829 - DNA, 15 bp, Homo sapiens
aaaagtaggcagtac

SEQ ID NO: 1274830 - DNA, 15 bp, Homo sapiens
taaaagtaggcagta

SEQ ID NO: 1274831 - DNA, 15 bp, Homo sapiens
ctaaaagtaggcagt

SEQ ID NO: 1274832 - DNA, 15 bp, Homo sapiens
tctaaaagtaggcag

SEQ ID NO: 1274833 - DNA, 15 bp, Homo sapiens
ttctaaaagtaggca

SEQ ID NO: 1274834 - DNA, 15 bp, Homo sapiens
attctaaaagtaggc

SEQ ID NO: 1274835 - DNA, 15 bp, Homo sapiens
aattctaaaagtagg

SEQ ID NO: 1274836 - DNA, 15 bp, Homo sapiens
caattctaaaagtag

SEQ ID NO: 1274837 - DNA, 15 bp, Homo sapiens
gcaattctaaaagta

SEQ ID NO: 1274838 - DNA, 15 bp, Homo sapiens
agcaattctaaaagt

SEQ ID NO: 1274839 - DNA, 15 bp, Homo sapiens
aagcaattctaaaag

SEQ ID NO: 1274840 - DNA, 15 bp, Homo sapiens
caagcaattctaaaa

SEQ ID NO: 1274841 - DNA, 15 bp, Homo sapiens
acaagcaattctaaa

SEQ ID NO: 1274842 - DNA, 15 bp, Homo sapiens
aacaagcaattctaa

SEQ ID NO: 1274843 - DNA, 15 bp, Homo sapiens
gaacaagcaattcta

SEQ ID NO: 1274844 - DNA, 15 bp, Homo sapiens
agaacaagcaattct

SEQ ID NO: 1274845 - DNA, 15 bp, Homo sapiens
aagaacaagcaattc

SEQ ID NO: 1274846 - DNA, 15 bp, Homo sapiens
aaagaacaagcaatt

SEQ ID NO: 1274847 - DNA, 15 bp, Homo sapiens
taaagaacaagcaat

SEQ ID NO: 1274848 - DNA, 15 bp, Homo sapiens
ttaaagaacaagcaa

SEQ ID NO: 1274849 - DNA, 15 bp, Homo sapiens
cttaaagaacaagca

SEQ ID NO: 1274850 - DNA, 15 bp, Homo sapiens
ccttaaagaacaagc

SEQ ID NO: 1274851 - DNA, 15 bp, Homo sapiens
gccttaaagaacaag

SEQ ID NO: 1274852 - DNA, 15 bp, Homo sapiens
agccttaaagaacaa

SEQ ID NO: 1274853 - DNA, 15 bp, Homo sapiens
aagccttaaagaaca

SEQ ID NO: 1274854 - DNA, 15 bp, Homo sapiens
aaagccttaaagaac

SEQ ID NO: 1274855 - DNA, 15 bp, Homo sapiens
caaagccttaaagaa

SEQ ID NO: 1274856 - DNA, 15 bp, Homo sapiens
tcaaagccttaaaga

SEQ ID NO: 1274857 - DNA, 15 bp, Homo sapiens
gtcaaagccttaaag

SEQ ID NO: 1274858 - DNA, 15 bp, Homo sapiens
agtcaaagccttaaa

SEQ ID NO: 1274859 - DNA, 15 bp, Homo sapiens
aagtcaaagccttaa

SEQ ID NO: 1274860 - DNA, 15 bp, Homo sapiens
gaagtcaaagcctta

SEQ ID NO: 1274861 - DNA, 15 bp, Homo sapiens
tgaagtcaaagcctt

SEQ ID NO: 1274862 - DNA, 15 bp, Homo sapiens
atgaagtcaaagcct

SEQ ID NO: 1274863 - DNA, 15 bp, Homo sapiens
tatgaagtcaaagcc

SEQ ID NO: 1274864 - DNA, 15 bp, Homo sapiens
ttatgaagtcaaagc

SEQ ID NO: 1274865 - DNA, 15 bp, Homo sapiens
tttatgaagtcaaag

SEQ ID NO: 1274866 - DNA, 15 bp, Homo sapiens
ttttatgaagtcaaa

SEQ ID NO: 1274867 - DNA, 15 bp, Homo sapiens
cttttatgaagtcaa

SEQ ID NO: 1274868 - DNA, 15 bp, Homo sapiens
acttttatgaagtca

SEQ ID NO: 1274869 - DNA, 15 bp, Homo sapiens
aacttttatgaagtc

SEQ ID NO: 1274870 - DNA, 15 bp, Homo sapiens
aaacttttatgaagt

SEQ ID NO: 1274871 - DNA, 15 bp, Homo sapiens
aaaacttttatgaag

SEQ ID NO: 1274872 - DNA, 15 bp, Homo sapiens
gaaaacttttatgaa

SEQ ID NO: 1274873 - DNA, 15 bp, Homo sapiens
tgaaaacttttatga

SEQ ID NO: 1274874 - DNA, 15 bp, Homo sapiens
gtgaaaacttttatg

SEQ ID NO: 1274875 - DNA, 15 bp, Homo sapiens
agtgaaaacttttat

SEQ ID NO: 1274876 - DNA, 15 bp, Homo sapiens
gagtgaaaactttta

SEQ ID NO: 1274877 - DNA, 15 bp, Homo sapiens
agagtgaaaactttt

SEQ ID NO: 1274878 - DNA, 15 bp, Homo sapiens
aagagtgaaaacttt

SEQ ID NO: 1274879 - DNA, 15 bp, Homo sapiens
caagagtgaaaactt

SEQ ID NO: 1274880 - DNA, 15 bp, Homo sapiens
ccaagagtgaaaact

SEQ ID NO: 1274881 - DNA, 15 bp, Homo sapiens
gccaagagtgaaaac

SEQ ID NO: 1274882 - DNA, 15 bp, Homo sapiens
ggccaagagtgaaaa

SEQ ID NO: 1274883 - DNA, 15 bp, Homo sapiens
tggccaagagtgaaa

SEQ ID NO: 1274884 - DNA, 15 bp, Homo sapiens
ttggccaagagtgaa

SEQ ID NO: 1274885 - DNA, 15 bp, Homo sapiens
attggccaagagtga

SEQ ID NO: 1274886 - DNA, 15 bp, Homo sapiens
tattggccaagagtg

SEQ ID NO: 1274887 - DNA, 15 bp, Homo sapiens
atattggccaagagt

SEQ ID NO: 1274888 - DNA, 15 bp, Homo sapiens
aatattggccaagag

SEQ ID NO: 1274889 - DNA, 15 bp, Homo sapiens
taatattggccaaga

SEQ ID NO: 1274890 - DNA, 15 bp, Homo sapiens
ataatattggccaag

SEQ ID NO: 1274891 - DNA, 15 bp, Homo sapiens
aataatattggccaa

SEQ ID NO: 1274892 - DNA, 15 bp, Homo sapiens
aaataatattggcca

SEQ ID NO: 1274893 - DNA, 15 bp, Homo sapiens
taaataatattggcc

SEQ ID NO: 1274894 - DNA, 15 bp, Homo sapiens
gtaaataatattggc

SEQ ID NO: 1274895 - DNA, 15 bp, Homo sapiens
agtaaataatattgg

SEQ ID NO: 1274896 - DNA, 15 bp, Homo sapiens
tagtaaataatattg

SEQ ID NO: 1274897 - DNA, 15 bp, Homo sapiens
gtagtaaataatatt

SEQ ID NO: 1274898 - DNA, 15 bp, Homo sapiens
tgtagtaaataatat

SEQ ID NO: 1274899 - DNA, 15 bp, Homo sapiens
ctgtagtaaataata

SEQ ID NO: 1274900 - DNA, 15 bp, Homo sapiens
gctgtagtaaataat

SEQ ID NO: 1274901 - DNA, 15 bp, Homo sapiens
cgctgtagtaaataa

SEQ ID NO: 1274902 - DNA, 15 bp, Homo sapiens
acgctgtagtaaata

SEQ ID NO: 1274903 - DNA, 15 bp, Homo sapiens
cacgctgtagtaaat

SEQ ID NO: 1274904 - DNA, 15 bp, Homo sapiens
acacgctgtagtaaa

SEQ ID NO: 1274905 - DNA, 15 bp, Homo sapiens
aacacgctgtagtaa

SEQ ID NO: 1274906 - DNA, 15 bp, Homo sapiens
aaacacgctgtagta

SEQ ID NO: 1274907 - DNA, 15 bp, Homo sapiens
aaaacacgctgtagt

SEQ ID NO: 1274908 - DNA, 15 bp, Homo sapiens
gaaaacacgctgtag

SEQ ID NO: 1274909 - DNA, 15 bp, Homo sapiens
agaaaacacgctgta

SEQ ID NO: 1274910 - DNA, 15 bp, Homo sapiens
aagaaaacacgctgt

SEQ ID NO: 1274911 - DNA, 15 bp, Homo sapiens
gaagaaaacacgctg

SEQ ID NO: 1274912 - DNA, 15 bp, Homo sapiens
agaagaaaacacgct

SEQ ID NO: 1274913 - DNA, 15 bp, Homo sapiens
aagaagaaaacacgc

SEQ ID NO: 1274914 - DNA, 15 bp, Homo sapiens
gaagaagaaaacacg

SEQ ID NO: 1274915 - DNA, 15 bp, Homo sapiens
tgaagaagaaaacac

SEQ ID NO: 1274916 - DNA, 15 bp, Homo sapiens
atgaagaagaaaaca

SEQ ID NO: 1274917 - DNA, 15 bp, Homo sapiens
catgaagaagaaaac

SEQ ID NO: 1274918 - DNA, 15 bp, Homo sapiens
tcatgaagaagaaaa

SEQ ID NO: 1274919 - DNA, 15 bp, Homo sapiens
ctcatgaagaagaaa

SEQ ID NO: 1274920 - DNA, 15 bp, Homo sapiens
cctcatgaagaagaa

SEQ ID NO: 1274921 - DNA, 15 bp, Homo sapiens
tcctcatgaagaaga

SEQ ID NO: 1274922 - DNA, 15 bp, Homo sapiens
ttcctcatgaagaag

SEQ ID NO: 1274923 - DNA, 15 bp, Homo sapiens
gttcctcatgaagaa

SEQ ID NO: 1274924 - DNA, 15 bp, Homo sapiens
ggttcctcatgaaga

SEQ ID NO: 1274925 - DNA, 15 bp, Homo sapiens
tggttcctcatgaag

SEQ ID NO: 1274926 - DNA, 15 bp, Homo sapiens
atggttcctcatgaa

SEQ ID NO: 1274927 - DNA, 15 bp, Homo sapiens
catggttcctcatga

SEQ ID NO: 1274928 - DNA, 15 bp, Homo sapiens
ccatggttcctcatg

SEQ ID NO: 1274929 - DNA, 15 bp, Homo sapiens
tccatggttcctcat

SEQ ID NO: 1274930 - DNA, 15 bp, Homo sapiens
ttccatggttcctca

SEQ ID NO: 1274931 - DNA, 15 bp, Homo sapiens
cttccatggttcctc

SEQ ID NO: 1274932 - DNA, 15 bp, Homo sapiens
tcttccatggttcct

SEQ ID NO: 1274933 - DNA, 15 bp, Homo sapiens
ttcttccatggttcc

SEQ ID NO: 1274934 - DNA, 15 bp, Homo sapiens
tttcttccatggttc

SEQ ID NO: 1274935 - DNA, 15 bp, Homo sapiens
atttcttccatggtt

SEQ ID NO: 1274936 - DNA, 15 bp, Homo sapiens
gatttcttccatggt

SEQ ID NO: 1274937 - DNA, 15 bp, Homo sapiens
agatttcttccatgg

SEQ ID NO: 1274938 - DNA, 15 bp, Homo sapiens
aagatttcttccatg

SEQ ID NO: 1274939 - DNA, 15 bp, Homo sapiens
aaagatttcttccat

SEQ ID NO: 1274940 - DNA, 15 bp, Homo sapiens
caaagatttcttcca

SEQ ID NO: 1274941 - DNA, 15 bp, Homo sapiens
ccaaagatttcttcc

SEQ ID NO: 1274942 - DNA, 15 bp, Homo sapiens
accaaagatttcttc

SEQ ID NO: 1274943 - DNA, 15 bp, Homo sapiens
gaccaaagatttctt

SEQ ID NO: 1274944 - DNA, 15 bp, Homo sapiens
ggaccaaagatttct

SEQ ID NO: 1274945 - DNA, 15 bp, Homo sapiens
tggaccaaagatttc

SEQ ID NO: 1274946 - DNA, 15 bp, Homo sapiens
ttggaccaaagattt

SEQ ID NO: 1274947 - DNA, 15 bp, Homo sapiens
cttggaccaaagatt

SEQ ID NO: 1274948 - DNA, 15 bp, Homo sapiens
tcttggaccaaagat

SEQ ID NO: 1274949 - DNA, 15 bp, Homo sapiens
gtcttggaccaaaga

SEQ ID NO: 1274950 - DNA, 15 bp, Homo sapiens
ggtcttggaccaaag

SEQ ID NO: 1274951 - DNA, 15 bp, Homo sapiens
gggtcttggaccaaa

SEQ ID NO: 1274952 - DNA, 15 bp, Homo sapiens
tgggtcttggaccaa

SEQ ID NO: 1274953 - DNA, 15 bp, Homo sapiens
atgggtcttggacca

SEQ ID NO: 1274954 - DNA, 15 bp, Homo sapiens
aatgggtcttggacc

SEQ ID NO: 1274955 - DNA, 15 bp, Homo sapiens
taatgggtcttggac

SEQ ID NO: 1274956 - DNA, 15 bp, Homo sapiens
ttaatgggtcttgga

SEQ ID NO: 1274957 - DNA, 15 bp, Homo sapiens
cttaatgggtcttgg

SEQ ID NO: 1274958 - DNA, 15 bp, Homo sapiens
gcttaatgggtcttg

SEQ ID NO: 1274959 - DNA, 15 bp, Homo sapiens
agcttaatgggtctt

SEQ ID NO: 1274960 - DNA, 15 bp, Homo sapiens
aagcttaatgggtct

SEQ ID NO: 1274961 - DNA, 15 bp, Homo sapiens
aaagcttaatgggtc

SEQ ID NO: 1274962 - DNA, 15 bp, Homo sapiens
gaaagcttaatgggt

SEQ ID NO: 1274963 - DNA, 15 bp, Homo sapiens
ggaaagcttaatggg

SEQ ID NO: 1274964 - DNA, 15 bp, Homo sapiens
aggaaagcttaatgg

SEQ ID NO: 1274965 - DNA, 15 bp, Homo sapiens
caggaaagcttaatg

SEQ ID NO: 1274966 - DNA, 15 bp, Homo sapiens
ccaggaaagcttaat

SEQ ID NO: 1274967 - DNA, 15 bp, Homo sapiens
tccaggaaagcttaa

SEQ ID NO: 1274968 - DNA, 15 bp, Homo sapiens
ctccaggaaagctta

SEQ ID NO: 1274969 - DNA, 15 bp, Homo sapiens
tctccaggaaagctt

SEQ ID NO: 1274970 - DNA, 15 bp, Homo sapiens
ttctccaggaaagct

SEQ ID NO: 1274971 - DNA, 15 bp, Homo sapiens
cttctccaggaaagc

SEQ ID NO: 1274972 - DNA, 15 bp, Homo sapiens
gcttctccaggaaag

SEQ ID NO: 1274973 - DNA, 15 bp, Homo sapiens
agcttctccaggaaa

SEQ ID NO: 1274974 - DNA, 15 bp, Homo sapiens
tagcttctccaggaa

SEQ ID NO: 1274975 - DNA, 15 bp, Homo sapiens
ttagcttctccagga

SEQ ID NO: 1274976 - DNA, 15 bp, Homo sapiens
gttagcttctccagg

SEQ ID NO: 1274977 - DNA, 15 bp, Homo sapiens
agttagcttctccag

SEQ ID NO: 1274978 - DNA, 15 bp, Homo sapiens
tagttagcttctcca

SEQ ID NO: 1274979 - DNA, 15 bp, Homo sapiens
ttagttagcttctcc

SEQ ID NO: 1274980 - DNA, 15 bp, Homo sapiens
attagttagcttctc

SEQ ID NO: 1274981 - DNA, 15 bp, Homo sapiens
aattagttagcttct

SEQ ID NO: 1274982 - DNA, 15 bp, Homo sapiens
taattagttagcttc

SEQ ID NO: 1274983 - DNA, 15 bp, Homo sapiens
ttaattagttagctt

SEQ ID NO: 1274984 - DNA, 15 bp, Homo sapiens
attaattagttagct

SEQ ID NO: 1274985 - DNA, 15 bp, Homo sapiens
aattaattagttagc

SEQ ID NO: 1274986 - DNA, 15 bp, Homo sapiens
aaattaattagttag

SEQ ID NO: 1274987 - DNA, 15 bp, Homo sapiens
taaattaattagtta

SEQ ID NO: 1274988 - DNA, 15 bp, Homo sapiens
ttaaattaattagtt

SEQ ID NO: 1274989 - DNA, 15 bp, Homo sapiens
attaaattaattagt

SEQ ID NO: 1274990 - DNA, 15 bp, Homo sapiens
aattaaattaattag

SEQ ID NO: 1274991 - DNA, 15 bp, Homo sapiens
aaattaaattaatta

SEQ ID NO: 1274992 - DNA, 15 bp, Homo sapiens
taaattaaattaatt

SEQ ID NO: 1274993 - DNA, 15 bp, Homo sapiens
ttaaattaaattaat

SEQ ID NO: 1274994 - DNA, 15 bp, Homo sapiens
gttaaattaaattaa

SEQ ID NO: 1274995 - DNA, 15 bp, Homo sapiens
ggttaaattaaatta

SEQ ID NO: 1274996 - DNA, 15 bp, Homo sapiens
aggttaaattaaatt

SEQ ID NO: 1274997 - DNA, 15 bp, Homo sapiens
aaggttaaattaaat

SEQ ID NO: 1274998 - DNA, 15 bp, Homo sapiens
taaggttaaattaaa

SEQ ID NO: 1274999 - DNA, 15 bp, Homo sapiens
ataaggttaaattaa

SEQ ID NO: 1275000 - DNA, 15 bp, Homo sapiens
tataaggttaaatta

SEQ ID NO: 1275001 - DNA, 15 bp, Homo sapiens
ctataaggttaaatt

SEQ ID NO: 1275002 - DNA, 15 bp, Homo sapiens
tctataaggttaaat

SEQ ID NO: 1275003 - DNA, 15 bp, Homo sapiens
atctataaggttaaa

SEQ ID NO: 1275004 - DNA, 15 bp, Homo sapiens
tatctataaggttaa

SEQ ID NO: 1275005 - DNA, 15 bp, Homo sapiens
gtatctataaggtta

SEQ ID NO: 1275006 - DNA, 15 bp, Homo sapiens
agtatctataaggtt

SEQ ID NO: 1275007 - DNA, 15 bp, Homo sapiens
tagtatctataaggt

SEQ ID NO: 1275008 - DNA, 15 bp, Homo sapiens
atagtatctataagg

SEQ ID NO: 1275009 - DNA, 15 bp, Homo sapiens
catagtatctataag

SEQ ID NO: 1275010 - DNA, 15 bp, Homo sapiens
tcatagtatctataa

SEQ ID NO: 1275011 - DNA, 15 bp, Homo sapiens
ttcatagtatctata

SEQ ID NO: 1275012 - DNA, 15 bp, Homo sapiens
attcatagtatctat

SEQ ID NO: 1275013 - DNA, 15 bp, Homo sapiens
gattcatagtatcta

SEQ ID NO: 1275014 - DNA, 15 bp, Homo sapiens
agattcatagtatct

SEQ ID NO: 1275015 - DNA, 15 bp, Homo sapiens
aagattcatagtatc

SEQ ID NO: 1275016 - DNA, 15 bp, Homo sapiens
taagattcatagtat

SEQ ID NO: 1275017 - DNA, 15 bp, Homo sapiens
ataagattcatagta

SEQ ID NO: 1275018 - DNA, 15 bp, Homo sapiens
tataagattcatagt

SEQ ID NO: 1275019 - DNA, 15 bp, Homo sapiens
ttataagattcatag

SEQ ID NO: 1275020 - DNA, 15 bp, Homo sapiens
attataagattcata

SEQ ID NO: 1275021 - DNA, 15 bp, Homo sapiens
aattataagattcat

SEQ ID NO: 1275022 - DNA, 15 bp, Homo sapiens
caattataagattca

SEQ ID NO: 1275023 - DNA, 15 bp, Homo sapiens
acaattataagattc

SEQ ID NO: 1275024 - DNA, 15 bp, Homo sapiens
aacaattataagatt

SEQ ID NO: 1275025 - DNA, 15 bp, Homo sapiens
aaacaattataagat

SEQ ID NO: 1275026 - DNA, 15 bp, Homo sapiens
caaacaattataaga

SEQ ID NO: 1275027 - DNA, 15 bp, Homo sapiens
acaaacaattataag

SEQ ID NO: 1275028 - DNA, 15 bp, Homo sapiens
aacaaacaattataa

SEQ ID NO: 1275029 - DNA, 15 bp, Homo sapiens
taacaaacaattata

SEQ ID NO: 1275030 - DNA, 15 bp, Homo sapiens
gtaacaaacaattat

SEQ ID NO: 1275031 - DNA, 15 bp, Homo sapiens
agtaacaaacaatta

SEQ ID NO: 1275032 - DNA, 15 bp, Homo sapiens
cagtaacaaacaatt

SEQ ID NO: 1275033 - DNA, 15 bp, Homo sapiens
acagtaacaaacaat

SEQ ID NO: 1275034 - DNA, 15 bp, Homo sapiens
aacagtaacaaacaa

SEQ ID NO: 1275035 - DNA, 15 bp, Homo sapiens
aaacagtaacaaaca

SEQ ID NO: 1275036 - DNA, 15 bp, Homo sapiens
aaaacagtaacaaac

SEQ ID NO: 1275037 - DNA, 15 bp, Homo sapiens
taaaacagtaacaaa

SEQ ID NO: 1275038 - DNA, 15 bp, Homo sapiens
ttaaaacagtaacaa

SEQ ID NO: 1275039 - DNA, 15 bp, Homo sapiens
gttaaaacagtaaca

SEQ ID NO: 1275040 - DNA, 15 bp, Homo sapiens
agttaaaacagtaac

SEQ ID NO: 1275041 - DNA, 15 bp, Homo sapiens
cagttaaaacagtaa

SEQ ID NO: 1275042 - DNA, 15 bp, Homo sapiens
gcagttaaaacagta

SEQ ID NO: 1275043 - DNA, 15 bp, Homo sapiens
ggcagttaaaacagt

SEQ ID NO: 1275044 - DNA, 15 bp, Homo sapiens
tggcagttaaaacag

SEQ ID NO: 1275045 - DNA, 15 bp, Homo sapiens
ctggcagttaaaaca

SEQ ID NO: 1275046 - DNA, 15 bp, Homo sapiens
gctggcagttaaaac

SEQ ID NO: 1275047 - DNA, 15 bp, Homo sapiens
agctggcagttaaaa

SEQ ID NO: 1275048 - DNA, 15 bp, Homo sapiens
aagctggcagttaaa

SEQ ID NO: 1275049 - DNA, 15 bp, Homo sapiens
aaagctggcagttaa

SEQ ID NO: 1275050 - DNA, 15 bp, Homo sapiens
gaaagctggcagtta

SEQ ID NO: 1275051 - DNA, 15 bp, Homo sapiens
tgaaagctggcagtt

SEQ ID NO: 1275052 - DNA, 15 bp, Homo sapiens
atgaaagctggcagt

SEQ ID NO: 1275053 - DNA, 15 bp, Homo sapiens
catgaaagctggcag

SEQ ID NO: 1275054 - DNA, 15 bp, Homo sapiens
tcatgaaagctggca

SEQ ID NO: 1275055 - DNA, 15 bp, Homo sapiens
atcatgaaagctggc

SEQ ID NO: 1275056 - DNA, 15 bp, Homo sapiens
tatcatgaaagctgg

SEQ ID NO: 1275057 - DNA, 15 bp, Homo sapiens
ctatcatgaaagctg

SEQ ID NO: 1275058 - DNA, 15 bp, Homo sapiens
gctatcatgaaagct

SEQ ID NO: 1275059 - DNA, 15 bp, Homo sapiens
tgctatcatgaaagc

SEQ ID NO: 1275060 - DNA, 15 bp, Homo sapiens
atgctatcatgaaag

SEQ ID NO: 1275061 - DNA, 15 bp, Homo sapiens
catgctatcatgaaa

SEQ ID NO: 1275062 - DNA, 15 bp, Homo sapiens
gcatgctatcatgaa

SEQ ID NO: 1275063 - DNA, 15 bp, Homo sapiens
tgcatgctatcatga

SEQ ID NO: 1275064 - DNA, 15 bp, Homo sapiens
atgcatgctatcatg

SEQ ID NO: 1275065 - DNA, 15 bp, Homo sapiens
aatgcatgctatcat

SEQ ID NO: 1275066 - DNA, 15 bp, Homo sapiens
aaatgcatgctatca

SEQ ID NO: 1275067 - DNA, 15 bp, Homo sapiens
aaaatgcatgctatc

SEQ ID NO: 1275068 - DNA, 15 bp, Homo sapiens
caaaatgcatgctat

SEQ ID NO: 1275069 - DNA, 15 bp, Homo sapiens
ccaaaatgcatgcta

SEQ ID NO: 1275070 - DNA, 15 bp, Homo sapiens
cccaaaatgcatgct

SEQ ID NO: 1275071 - DNA, 15 bp, Homo sapiens
ccccaaaatgcatgc

SEQ ID NO: 1275072 - DNA, 15 bp, Homo sapiens
cccccaaaatgcatg

SEQ ID NO: 1275073 - DNA, 15 bp, Homo sapiens
tcccccaaaatgcat

SEQ ID NO: 1275074 - DNA, 15 bp, Homo sapiens
atcccccaaaatgca

SEQ ID NO: 1275075 - DNA, 15 bp, Homo sapiens
tatcccccaaaatgc

SEQ ID NO: 1275076 - DNA, 15 bp, Homo sapiens
gtatcccccaaaatg

SEQ ID NO: 1275077 - DNA, 15 bp, Homo sapiens
agtatcccccaaaat

SEQ ID NO: 1275078 - DNA, 15 bp, Homo sapiens
tagtatcccccaaaa

SEQ ID NO: 1275079 - DNA, 15 bp, Homo sapiens
ttagtatcccccaaa

SEQ ID NO: 1275080 - DNA, 15 bp, Homo sapiens
gttagtatcccccaa

SEQ ID NO: 1275081 - DNA, 15 bp, Homo sapiens
tgttagtatccccca

SEQ ID NO: 1275082 - DNA, 15 bp, Homo sapiens
atgttagtatccccc

SEQ ID NO: 1275083 - DNA, 15 bp, Homo sapiens
aatgttagtatcccc

SEQ ID NO: 1275084 - DNA, 15 bp, Homo sapiens
aaatgttagtatccc

SEQ ID NO: 1275085 - DNA, 15 bp, Homo sapiens
aaaatgttagtatcc

SEQ ID NO: 1275086 - DNA, 15 bp, Homo sapiens
aaaaatgttagtatc

SEQ ID NO: 1275087 - DNA, 15 bp, Homo sapiens
gaaaaatgttagtat

SEQ ID NO: 1275088 - DNA, 15 bp, Homo sapiens
agaaaaatgttagta

SEQ ID NO: 1275089 - DNA, 15 bp, Homo sapiens
aagaaaaatgttagt

SEQ ID NO: 1275090 - DNA, 15 bp, Homo sapiens
caagaaaaatgttag

SEQ ID NO: 1275091 - DNA, 15 bp, Homo sapiens
acaagaaaaatgtta

SEQ ID NO: 1275092 - DNA, 15 bp, Homo sapiens
gacaagaaaaatgtt

SEQ ID NO: 1275093 - DNA, 15 bp, Homo sapiens
tgacaagaaaaatgt

SEQ ID NO: 1275094 - DNA, 15 bp, Homo sapiens
atgacaagaaaaatg

SEQ ID NO: 1275095 - DNA, 15 bp, Homo sapiens
aatgacaagaaaaat

SEQ ID NO: 1275096 - DNA, 15 bp, Homo sapiens
aaatgacaagaaaaa

SEQ ID NO: 1275097 - DNA, 15 bp, Homo sapiens
aaaatgacaagaaaa

SEQ ID NO: 1275098 - DNA, 15 bp, Homo sapiens
aaaaatgacaagaaa

SEQ ID NO: 1275099 - DNA, 15 bp, Homo sapiens
aaaaaatgacaagaa

SEQ ID NO: 1275100 - DNA, 15 bp, Homo sapiens
aaaaaaatgacaaga

SEQ ID NO: 1275101 - DNA, 15 bp, Homo sapiens
gaaaaaaatgacaag

SEQ ID NO: 1275102 - DNA, 15 bp, Homo sapiens
tgaaaaaaatgacaa

SEQ ID NO: 1275103 - DNA, 15 bp, Homo sapiens
gtgaaaaaaatgaca

SEQ ID NO: 1275104 - DNA, 15 bp, Homo sapiens
ggtgaaaaaaatgac

SEQ ID NO: 1275105 - DNA, 15 bp, Homo sapiens
aggtgaaaaaaatga

SEQ ID NO: 1275106 - DNA, 15 bp, Homo sapiens
aaggtgaaaaaaatg

SEQ ID NO: 1275107 - DNA, 15 bp, Homo sapiens
aaaggtgaaaaaaat

SEQ ID NO: 1275108 - DNA, 15 bp, Homo sapiens
gaaaggtgaaaaaaa

SEQ ID NO: 1275109 - DNA, 15 bp, Homo sapiens
agaaaggtgaaaaaa

SEQ ID NO: 1275110 - DNA, 15 bp, Homo sapiens
tagaaaggtgaaaaa

SEQ ID NO: 1275111 - DNA, 15 bp, Homo sapiens
atagaaaggtgaaaa

SEQ ID NO: 1275112 - DNA, 15 bp, Homo sapiens
tatagaaaggtgaaa

SEQ ID NO: 1275113 - DNA, 15 bp, Homo sapiens
atatagaaaggtgaa

SEQ ID NO: 1275114 - DNA, 15 bp, Homo sapiens
aatatagaaaggtga

SEQ ID NO: 1275115 - DNA, 15 bp, Homo sapiens
aaatatagaaaggtg

SEQ ID NO: 1275116 - DNA, 15 bp, Homo sapiens
aaaatatagaaaggt

SEQ ID NO: 1275117 - DNA, 15 bp, Homo sapiens
taaaatatagaaagg

SEQ ID NO: 1275118 - DNA, 15 bp, Homo sapiens
gtaaaatatagaaag

SEQ ID NO: 1275119 - DNA, 15 bp, Homo sapiens
agtaaaatatagaaa

SEQ ID NO: 1275120 - DNA, 15 bp, Homo sapiens
aagtaaaatatagaa

SEQ ID NO: 1275121 - DNA, 15 bp, Homo sapiens
aaagtaaaatataga

SEQ ID NO: 1275122 - DNA, 15 bp, Homo sapiens
gaaagtaaaatatag

SEQ ID NO: 1275123 - DNA, 15 bp, Homo sapiens
tgaaagtaaaatata

SEQ ID NO: 1275124 - DNA, 15 bp, Homo sapiens
gtgaaagtaaaatat

SEQ ID NO: 1275125 - DNA, 15 bp, Homo sapiens
tgtgaaagtaaaata

SEQ ID NO: 1275126 - DNA, 15 bp, Homo sapiens
ttgtgaaagtaaaat

SEQ ID NO: 1275127 - DNA, 15 bp, Homo sapiens
attgtgaaagtaaaa

SEQ ID NO: 1275128 - DNA, 15 bp, Homo sapiens
aattgtgaaagtaaa

SEQ ID NO: 1275129 - DNA, 15 bp, Homo sapiens
taattgtgaaagtaa

SEQ ID NO: 1275130 - DNA, 15 bp, Homo sapiens
ataattgtgaaagta

SEQ ID NO: 1275131 - DNA, 15 bp, Homo sapiens
tataattgtgaaagt

SEQ ID NO: 1275132 - DNA, 15 bp, Homo sapiens
ttataattgtgaaag

SEQ ID NO: 1275133 - DNA, 15 bp, Homo sapiens
cttataattgtgaaa

SEQ ID NO: 1275134 - DNA, 15 bp, Homo sapiens
acttataattgtgaa

SEQ ID NO: 1275135 - DNA, 15 bp, Homo sapiens
tacttataattgtga

SEQ ID NO: 1275136 - DNA, 15 bp, Homo sapiens
ttacttataattgtg

SEQ ID NO: 1275137 - DNA, 15 bp, Homo sapiens
tttacttataattgt

SEQ ID NO: 1275138 - DNA, 15 bp, Homo sapiens
atttacttataattg

SEQ ID NO: 1275139 - DNA, 15 bp, Homo sapiens
tatttacttataatt

SEQ ID NO: 1275140 - DNA, 15 bp, Homo sapiens
ttatttacttataat

SEQ ID NO: 1275141 - DNA, 15 bp, Homo sapiens
tttatttacttataa

SEQ ID NO: 1275142 - DNA, 15 bp, Homo sapiens
ctttatttacttata

SEQ ID NO: 1275143 - DNA, 15 bp, Homo sapiens
tctttatttacttat

SEQ ID NO: 1275144 - DNA, 15 bp, Homo sapiens
gtctttatttactta

SEQ ID NO: 1275145 - DNA, 15 bp, Homo sapiens
agtctttatttactt

SEQ ID NO: 1275146 - DNA, 15 bp, Homo sapiens
aagtctttatttact

SEQ ID NO: 1275147 - DNA, 15 bp, Homo sapiens
caagtctttatttac

SEQ ID NO: 1275148 - DNA, 15 bp, Homo sapiens
acaagtctttattta

SEQ ID NO: 1275149 - DNA, 15 bp, Homo sapiens
aacaagtctttattt

SEQ ID NO: 1275150 - DNA, 15 bp, Homo sapiens
aaacaagtctttatt

SEQ ID NO: 1275151 - DNA, 15 bp, Homo sapiens
aaaacaagtctttat

SEQ ID NO: 1275152 - DNA, 15 bp, Homo sapiens
taaaacaagtcttta

SEQ ID NO: 1275153 - DNA, 15 bp, Homo sapiens
ttaaaacaagtcttt

SEQ ID NO: 1275154 - DNA, 15 bp, Homo sapiens
gttaaaacaagtctt

SEQ ID NO: 1275155 - DNA, 15 bp, Homo sapiens
tgttaaaacaagtct

SEQ ID NO: 1275156 - DNA, 15 bp, Homo sapiens
atgttaaaacaagtc

SEQ ID NO: 1275157 - DNA, 15 bp, Homo sapiens
tatgttaaaacaagt

SEQ ID NO: 1275158 - DNA, 15 bp, Homo sapiens
ttatgttaaaacaag

SEQ ID NO: 1275159 - DNA, 15 bp, Homo sapiens
tttatgttaaaacaa

SEQ ID NO: 1275160 - DNA, 15 bp, Homo sapiens
atttatgttaaaaca

SEQ ID NO: 1275161 - DNA, 15 bp, Homo sapiens
gatttatgttaaaac

SEQ ID NO: 1275162 - DNA, 15 bp, Homo sapiens
tgatttatgttaaaa

SEQ ID NO: 1275163 - DNA, 15 bp, Homo sapiens
gtgatttatgttaaa

SEQ ID NO: 1275164 - DNA, 15 bp, Homo sapiens
tgtgatttatgttaa

SEQ ID NO: 1275165 - DNA, 15 bp, Homo sapiens
gtgtgatttatgtta

SEQ ID NO: 1275166 - DNA, 15 bp, Homo sapiens
agtgtgatttatgtt

SEQ ID NO: 1275167 - DNA, 15 bp, Homo sapiens
aagtgtgatttatgt

SEQ ID NO: 1275168 - DNA, 15 bp, Homo sapiens
aaagtgtgatttatg

SEQ ID NO: 1275169 - DNA, 15 bp, Homo sapiens
taaagtgtgatttat

SEQ ID NO: 1275170 - DNA, 15 bp, Homo sapiens
ataaagtgtgattta

SEQ ID NO: 1275171 - DNA, 15 bp, Homo sapiens
tataaagtgtgattt

SEQ ID NO: 1275172 - DNA, 15 bp, Homo sapiens
ctataaagtgtgatt

SEQ ID NO: 1275173 - DNA, 15 bp, Homo sapiens
actataaagtgtgat

SEQ ID NO: 1275174 - DNA, 15 bp, Homo sapiens
tactataaagtgtga

SEQ ID NO: 1275175 - DNA, 15 bp, Homo sapiens
ttactataaagtgtg

SEQ ID NO: 1275176 - DNA, 15 bp, Homo sapiens
attactataaagtgt

SEQ ID NO: 1275177 - DNA, 15 bp, Homo sapiens
tattactataaagtg

SEQ ID NO: 1275178 - DNA, 15 bp, Homo sapiens
ttattactataaagt

SEQ ID NO: 1275179 - DNA, 15 bp, Homo sapiens
tttattactataaag

SEQ ID NO: 1275180 - DNA, 15 bp, Homo sapiens
ctttattactataaa

SEQ ID NO: 1275181 - DNA, 15 bp, Homo sapiens
tctttattactataa

SEQ ID NO: 1275182 - DNA, 15 bp, Homo sapiens
ctctttattactata

SEQ ID NO: 1275183 - DNA, 15 bp, Homo sapiens
gctctttattactat

SEQ ID NO: 1275184 - DNA, 15 bp, Homo sapiens
cgctctttattacta

SEQ ID NO: 1275185 - DNA, 15 bp, Homo sapiens
ccgctctttattact

SEQ ID NO: 1275186 - DNA, 15 bp, Homo sapiens
tccgctctttattac

SEQ ID NO: 1275187 - DNA, 15 bp, Homo sapiens
atccgctctttatta

SEQ ID NO: 1275188 - DNA, 15 bp, Homo sapiens
gatccgctctttatt

SEQ ID NO: 1275189 - DNA, 15 bp, Homo sapiens
agatccgctctttat

SEQ ID NO: 1275190 - DNA, 15 bp, Homo sapiens
gagatccgctcttta

SEQ ID NO: 1275191 - DNA, 15 bp, Homo sapiens
agagatccgctcttt

SEQ ID NO: 1275192 - DNA, 15 bp, Homo sapiens
cagagatccgctctt

SEQ ID NO: 1275193 - DNA, 15 bp, Homo sapiens
acagagatccgctct

SEQ ID NO: 1275194 - DNA, 15 bp, Homo sapiens
aacagagatccgctc

SEQ ID NO: 1275195 - DNA, 15 bp, Homo sapiens
caacagagatccgct

SEQ ID NO: 1275196 - DNA, 15 bp, Homo sapiens
gcaacagagatccgc

SEQ ID NO: 1275197 - DNA, 15 bp, Homo sapiens
agcaacagagatccg

SEQ ID NO: 1275198 - DNA, 15 bp, Homo sapiens
gagcaacagagatcc

SEQ ID NO: 1275199 - DNA, 15 bp, Homo sapiens
agagcaacagagatc

SEQ ID NO: 1275200 - DNA, 15 bp, Homo sapiens
gagagcaacagagat

SEQ ID NO: 1275201 - DNA, 15 bp, Homo sapiens
ggagagcaacagaga

SEQ ID NO: 1275202 - DNA, 15 bp, Homo sapiens
aggagagcaacagag

SEQ ID NO: 1275203 - DNA, 15 bp, Homo sapiens
aaggagagcaacaga

SEQ ID NO: 1275204 - DNA, 15 bp, Homo sapiens
aaaggagagcaacag

SEQ ID NO: 1275205 - DNA, 15 bp, Homo sapiens
aaaaggagagcaaca

SEQ ID NO: 1275206 - DNA, 15 bp, Homo sapiens
aaaaaggagagcaac

SEQ ID NO: 1275207 - DNA, 15 bp, Homo sapiens
aaaaaaggagagcaa

SEQ ID NO: 1275208 - DNA, 15 bp, Homo sapiens
taaaaaaggagagca

SEQ ID NO: 1275209 - DNA, 15 bp, Homo sapiens
gtaaaaaaggagagc

SEQ ID NO: 1275210 - DNA, 15 bp, Homo sapiens
agtaaaaaaggagag

SEQ ID NO: 1275211 - DNA, 15 bp, Homo sapiens
aagtaaaaaaggaga

SEQ ID NO: 1275212 - DNA, 15 bp, Homo sapiens
aaagtaaaaaaggag

SEQ ID NO: 1275213 - DNA, 15 bp, Homo sapiens
taaagtaaaaaagga

SEQ ID NO: 1275214 - DNA, 15 bp, Homo sapiens
ttaaagtaaaaaagg

SEQ ID NO: 1275215 - DNA, 15 bp, Homo sapiens
tttaaagtaaaaaag

SEQ ID NO: 1275216 - DNA, 15 bp, Homo sapiens
ttttaaagtaaaaaa

SEQ ID NO: 1275217 - DNA, 15 bp, Homo sapiens
attttaaagtaaaaa

SEQ ID NO: 1275218 - DNA, 15 bp, Homo sapiens
aattttaaagtaaaa

SEQ ID NO: 1275219 - DNA, 15 bp, Homo sapiens
aaaaattttaaagta

SEQ ID NO: 1275220 - DNA, 15 bp, Homo sapiens
aaaaaattttaaagt

SEQ ID NO: 1275221 - DNA, 15 bp, Homo sapiens
taaaaaattttaaag

SEQ ID NO: 1275222 - DNA, 15 bp, Homo sapiens
ataaaaaattttaaa

SEQ ID NO: 1275223 - DNA, 15 bp, Homo sapiens
aataaaaaattttaa

SEQ ID NO: 1275224 - DNA, 15 bp, Homo sapiens
aaataaaaaatttta

SEQ ID NO: 1275225 - DNA, 15 bp, Homo sapiens
aaaataaaaaatttt

SEQ ID NO: 1275226 - DNA, 15 bp, Homo sapiens
aaaaataaaaaattt

SEQ ID NO: 1275227 - DNA, 15 bp, Homo sapiens
taaaaataaaaaatt

SEQ ID NO: 1275228 - DNA, 15 bp, Homo sapiens
ttaaaaataaaaaat

SEQ ID NO: 1275229 - DNA, 15 bp, Homo sapiens
attaaaaataaaaaa

SEQ ID NO: 1275230 - DNA, 15 bp, Homo sapiens
aattaaaaataaaaa

SEQ ID NO: 1275231 - DNA, 15 bp, Homo sapiens
taattaaaaataaaa

SEQ ID NO: 1275232 - DNA, 15 bp, Homo sapiens
ataattaaaaataaa

SEQ ID NO: 1275233 - DNA, 15 bp, Homo sapiens
aataattaaaaataa

SEQ ID NO: 1275234 - DNA, 15 bp, Homo sapiens
taataattaaaaata

SEQ ID NO: 1275235 - DNA, 15 bp, Homo sapiens
ataataattaaaaat

SEQ ID NO: 1275236 - DNA, 15 bp, Homo sapiens
cataataattaaaaa

SEQ ID NO: 1275237 - DNA, 15 bp, Homo sapiens
ccataataattaaaa

SEQ ID NO: 1275238 - DNA, 15 bp, Homo sapiens
tccataataattaaa

SEQ ID NO: 1275239 - DNA, 15 bp, Homo sapiens
ctccataataattaa

SEQ ID NO: 1275240 - DNA, 15 bp, Homo sapiens
tctccataataatta

SEQ ID NO: 1275241 - DNA, 15 bp, Homo sapiens
gtctccataataatt

SEQ ID NO: 1275242 - DNA, 15 bp, Homo sapiens
tgtctccataataat

SEQ ID NO: 1275243 - DNA, 15 bp, Homo sapiens
atgtctccataataa

SEQ ID NO: 1275244 - DNA, 15 bp, Homo sapiens
tatgtctccataata

SEQ ID NO: 1275245 - DNA, 15 bp, Homo sapiens
ttatgtctccataat

SEQ ID NO: 1275246 - DNA, 15 bp, Homo sapiens
attatgtctccataa

SEQ ID NO: 1275247 - DNA, 15 bp, Homo sapiens
tattatgtctccata

SEQ ID NO: 1275248 - DNA, 15 bp, Homo sapiens
ctattatgtctccat

SEQ ID NO: 1275249 - DNA, 15 bp, Homo sapiens
cctattatgtctcca

SEQ ID NO: 1275250 - DNA, 15 bp, Homo sapiens
acctattatgtctcc

SEQ ID NO: 1275251 - DNA, 15 bp, Homo sapiens
cacctattatgtctc

SEQ ID NO: 1275252 - DNA, 15 bp, Homo sapiens
acacctattatgtct

SEQ ID NO: 1275253 - DNA, 15 bp, Homo sapiens
tacacctattatgtc

SEQ ID NO: 1275254 - DNA, 15 bp, Homo sapiens
gtacacctattatgt

SEQ ID NO: 1275255 - DNA, 15 bp, Homo sapiens
tgtacacctattatg

SEQ ID NO: 1275256 - DNA, 15 bp, Homo sapiens
atgtacacctattat

SEQ ID NO: 1275257 - DNA, 15 bp, Homo sapiens
tatgtacacctatta

SEQ ID NO: 1275258 - DNA, 15 bp, Homo sapiens
atatgtacacctatt

SEQ ID NO: 1275259 - DNA, 15 bp, Homo sapiens
aatatgtacacctat

SEQ ID NO: 1275260 - DNA, 15 bp, Homo sapiens
aaatatgtacaccta

SEQ ID NO: 1275261 - DNA, 15 bp, Homo sapiens
taaatatgtacacct

SEQ ID NO: 1275262 - DNA, 15 bp, Homo sapiens
ataaatatgtacacc

SEQ ID NO: 1275263 - DNA, 15 bp, Homo sapiens
cataaatatgtacac

SEQ ID NO: 1275264 - DNA, 15 bp, Homo sapiens
ccataaatatgtaca

SEQ ID NO: 1275265 - DNA, 15 bp, Homo sapiens
cccataaatatgtac

SEQ ID NO: 1275266 - DNA, 15 bp, Homo sapiens
tcccataaatatgta

SEQ ID NO: 1275267 - DNA, 15 bp, Homo sapiens
atcccataaatatgt

SEQ ID NO: 1275268 - DNA, 15 bp, Homo sapiens
tatcccataaatatg

SEQ ID NO: 1275269 - DNA, 15 bp, Homo sapiens
gtatcccataaatat

SEQ ID NO: 1275270 - DNA, 15 bp, Homo sapiens
tgtatcccataaata

SEQ ID NO: 1275271 - DNA, 15 bp, Homo sapiens
atgtatcccataaat

SEQ ID NO: 1275272 - DNA, 15 bp, Homo sapiens
catgtatcccataaa

SEQ ID NO: 1275273 - DNA, 15 bp, Homo sapiens
acatgtatcccataa

SEQ ID NO: 1275274 - DNA, 15 bp, Homo sapiens
cacatgtatcccata

SEQ ID NO: 1275275 - DNA, 15 bp, Homo sapiens
tcacatgtatcccat

SEQ ID NO: 1275276 - DNA, 15 bp, Homo sapiens
atcacatgtatccca

SEQ ID NO: 1275277 - DNA, 15 bp, Homo sapiens
catcacatgtatccc

SEQ ID NO: 1275278 - DNA, 15 bp, Homo sapiens
acatcacatgtatcc

SEQ ID NO: 1275279 - DNA, 15 bp, Homo sapiens
aacatcacatgtatc

SEQ ID NO: 1275280 - DNA, 15 bp, Homo sapiens
aaacatcacatgtat

SEQ ID NO: 1275281 - DNA, 15 bp, Homo sapiens
aaaacatcacatgta

SEQ ID NO: 1275282 - DNA, 15 bp, Homo sapiens
caaaacatcacatgt

SEQ ID NO: 1275283 - DNA, 15 bp, Homo sapiens
tcaaaacatcacatg

SEQ ID NO: 1275284 - DNA, 15 bp, Homo sapiens
atcaaaacatcacat

SEQ ID NO: 1275285 - DNA, 15 bp, Homo sapiens
tatcaaaacatcaca

SEQ ID NO: 1275286 - DNA, 15 bp, Homo sapiens
gtatcaaaacatcac

SEQ ID NO: 1275287 - DNA, 15 bp, Homo sapiens
tgtatcaaaacatca

SEQ ID NO: 1275288 - DNA, 15 bp, Homo sapiens
ttgtatcaaaacatc

SEQ ID NO: 1275289 - DNA, 15 bp, Homo sapiens
cttgtatcaaaacat

SEQ ID NO: 1275290 - DNA, 15 bp, Homo sapiens
gcttgtatcaaaaca

SEQ ID NO: 1275291 - DNA, 15 bp, Homo sapiens
tgcttgtatcaaaac

SEQ ID NO: 1275292 - DNA, 15 bp, Homo sapiens
atgcttgtatcaaaa

SEQ ID NO: 1275293 - DNA, 15 bp, Homo sapiens
tatgcttgtatcaaa

SEQ ID NO: 1275294 - DNA, 15 bp, Homo sapiens
atatgcttgtatcaa

SEQ ID NO: 1275295 - DNA, 15 bp, Homo sapiens
tatatgcttgtatca

SEQ ID NO: 1275296 - DNA, 15 bp, Homo sapiens
ttatatgcttgtatc

SEQ ID NO: 1275297 - DNA, 15 bp, Homo sapiens
attatatgcttgtat

SEQ ID NO: 1275298 - DNA, 15 bp, Homo sapiens
cattatatgcttgta

SEQ ID NO: 1275299 - DNA, 15 bp, Homo sapiens
acattatatgcttgt

SEQ ID NO: 1275300 - DNA, 15 bp, Homo sapiens
cacattatatgcttg

SEQ ID NO: 1275301 - DNA, 15 bp, Homo sapiens
acacattatatgctt

SEQ ID NO: 1275302 - DNA, 15 bp, Homo sapiens
tacacattatatgct

SEQ ID NO: 1275303 - DNA, 15 bp, Homo sapiens
ttacacattatatgc

SEQ ID NO: 1275304 - DNA, 15 bp, Homo sapiens
attacacattatatg

SEQ ID NO: 1275305 - DNA, 15 bp, Homo sapiens
cattacacattatat

SEQ ID NO: 1275306 - DNA, 15 bp, Homo sapiens
tcattacacattata

SEQ ID NO: 1275307 - DNA, 15 bp, Homo sapiens
gtcattacacattat

SEQ ID NO: 1275308 - DNA, 15 bp, Homo sapiens
ggtcattacacatta

SEQ ID NO: 1275309 - DNA, 15 bp, Homo sapiens
tggtcattacacatt

SEQ ID NO: 1275310 - DNA, 15 bp, Homo sapiens
ttggtcattacacat

SEQ ID NO: 1275311 - DNA, 15 bp, Homo sapiens
tttggtcattacaca

SEQ ID NO: 1275312 - DNA, 15 bp, Homo sapiens
atttggtcattacac

SEQ ID NO: 1275313 - DNA, 15 bp, Homo sapiens
gatttggtcattaca

SEQ ID NO: 1275314 - DNA, 15 bp, Homo sapiens
tgatttggtcattac

SEQ ID NO: 1275315 - DNA, 15 bp, Homo sapiens
atgatttggtcatta

SEQ ID NO: 1275316 - DNA, 15 bp, Homo sapiens
catgatttggtcatt

SEQ ID NO: 1275317 - DNA, 15 bp, Homo sapiens
ccatgatttggtcat

SEQ ID NO: 1275318 - DNA, 15 bp, Homo sapiens
accatgatttggtca

SEQ ID NO: 1275319 - DNA, 15 bp, Homo sapiens
taccatgatttggtc

SEQ ID NO: 1275320 - DNA, 15 bp, Homo sapiens
ctaccatgatttggt

SEQ ID NO: 1275321 - DNA, 15 bp, Homo sapiens
actaccatgatttgg

SEQ ID NO: 1275322 - DNA, 15 bp, Homo sapiens
aactaccatgatttg

SEQ ID NO: 1275323 - DNA, 15 bp, Homo sapiens
caactaccatgattt

SEQ ID NO: 1275324 - DNA, 15 bp, Homo sapiens
ccaactaccatgatt

SEQ ID NO: 1275325 - DNA, 15 bp, Homo sapiens
tccaactaccatgat

SEQ ID NO: 1275326 - DNA, 15 bp, Homo sapiens
ctccaactaccatga

SEQ ID NO: 1275327 - DNA, 15 bp, Homo sapiens
actccaactaccatg

SEQ ID NO: 1275328 - DNA, 15 bp, Homo sapiens
tactccaactaccat

SEQ ID NO: 1275329 - DNA, 15 bp, Homo sapiens
atactccaactacca

SEQ ID NO: 1275330 - DNA, 15 bp, Homo sapiens
gatactccaactacc

SEQ ID NO: 1275331 - DNA, 15 bp, Homo sapiens
ggatactccaactac

SEQ ID NO: 1275332 - DNA, 15 bp, Homo sapiens
tggatactccaacta

SEQ ID NO: 1275333 - DNA, 15 bp, Homo sapiens
atggatactccaact

SEQ ID NO: 1275334 - DNA, 15 bp, Homo sapiens
gatggatactccaac

SEQ ID NO: 1275335 - DNA, 15 bp, Homo sapiens
tgatggatactccaa

SEQ ID NO: 1275336 - DNA, 15 bp, Homo sapiens
atgatggatactcca

SEQ ID NO: 1275337 - DNA, 15 bp, Homo sapiens
gatgatggatactcc

SEQ ID NO: 1275338 - DNA, 15 bp, Homo sapiens
agatgatggatactc

SEQ ID NO: 1275339 - DNA, 15 bp, Homo sapiens
aagatgatggatact

SEQ ID NO: 1275340 - DNA, 15 bp, Homo sapiens
taagatgatggatac

SEQ ID NO: 1275341 - DNA, 15 bp, Homo sapiens
ttaagatgatggata

SEQ ID NO: 1275342 - DNA, 15 bp, Homo sapiens
cttaagatgatggat

SEQ ID NO: 1275343 - DNA, 15 bp, Homo sapiens
gcttaagatgatgga

SEQ ID NO: 1275344 - DNA, 15 bp, Homo sapiens
agcttaagatgatgg

SEQ ID NO: 1275345 - DNA, 15 bp, Homo sapiens
aagcttaagatgatg

SEQ ID NO: 1275346 - DNA, 15 bp, Homo sapiens
aaagcttaagatgat

SEQ ID NO: 1275347 - DNA, 15 bp, Homo sapiens
aaaagcttaagatga

SEQ ID NO: 1275348 - DNA, 15 bp, Homo sapiens
taaaagcttaagatg

SEQ ID NO: 1275349 - DNA, 15 bp, Homo sapiens
ataaaagcttaagat

SEQ ID NO: 1275350 - DNA, 15 bp, Homo sapiens
gataaaagcttaaga

SEQ ID NO: 1275351 - DNA, 15 bp, Homo sapiens
tgataaaagcttaag

SEQ ID NO: 1275352 - DNA, 15 bp, Homo sapiens
atgataaaagcttaa

SEQ ID NO: 1275353 - DNA, 15 bp, Homo sapiens
aatgataaaagctta

SEQ ID NO: 1275354 - DNA, 15 bp, Homo sapiens
aaatgataaaagctt

SEQ ID NO: 1275355 - DNA, 15 bp, Homo sapiens
taaatgataaaagct

SEQ ID NO: 1275356 - DNA, 15 bp, Homo sapiens
ataaatgataaaagc

SEQ ID NO: 1275357 - DNA, 15 bp, Homo sapiens
aataaatgataaaag

SEQ ID NO: 1275358 - DNA, 15 bp, Homo sapiens
aaataaatgataaaa

SEQ ID NO: 1275359 - DNA, 15 bp, Homo sapiens
caaataaatgataaa

SEQ ID NO: 1275360 - DNA, 15 bp, Homo sapiens
acaaataaatgataa

SEQ ID NO: 1275361 - DNA, 15 bp, Homo sapiens
cacaaataaatgata

SEQ ID NO: 1275362 - DNA, 15 bp, Homo sapiens
acacaaataaatgat

SEQ ID NO: 1275363 - DNA, 15 bp, Homo sapiens
aacacaaataaatga

SEQ ID NO: 1275364 - DNA, 15 bp, Homo sapiens
taacacaaataaatg

SEQ ID NO: 1275365 - DNA, 15 bp, Homo sapiens
ctaacacaaataaat

SEQ ID NO: 1275366 - DNA, 15 bp, Homo sapiens
cctaacacaaataaa

SEQ ID NO: 1275367 - DNA, 15 bp, Homo sapiens
tcctaacacaaataa

SEQ ID NO: 1275368 - DNA, 15 bp, Homo sapiens
ctcctaacacaaata

SEQ ID NO: 1275369 - DNA, 15 bp, Homo sapiens
gctcctaacacaaat

SEQ ID NO: 1275370 - DNA, 15 bp, Homo sapiens
tgctcctaacacaaa

SEQ ID NO: 1275371 - DNA, 15 bp, Homo sapiens
atgctcctaacacaa

SEQ ID NO: 1275372 - DNA, 15 bp, Homo sapiens
aatgctcctaacaca

SEQ ID NO: 1275373 - DNA, 15 bp, Homo sapiens
gaatgctcctaacac

SEQ ID NO: 1275374 - DNA, 15 bp, Homo sapiens
ggaatgctcctaaca

SEQ ID NO: 1275375 - DNA, 15 bp, Homo sapiens
tggaatgctcctaac

SEQ ID NO: 1275376 - DNA, 15 bp, Homo sapiens
ttggaatgctcctaa

SEQ ID NO: 1275377 - DNA, 15 bp, Homo sapiens
attggaatgctccta

SEQ ID NO: 1275378 - DNA, 15 bp, Homo sapiens
aattggaatgctcct

SEQ ID NO: 1275379 - DNA, 15 bp, Homo sapiens
gaattggaatgctcc

SEQ ID NO: 1275380 - DNA, 15 bp, Homo sapiens
agaattggaatgctc

SEQ ID NO: 1275381 - DNA, 15 bp, Homo sapiens
tagaattggaatgct

SEQ ID NO: 1275382 - DNA, 15 bp, Homo sapiens
ttagaattggaatgc

SEQ ID NO: 1275383 - DNA, 15 bp, Homo sapiens
attagaattggaatg

SEQ ID NO: 1275384 - DNA, 15 bp, Homo sapiens
gattagaattggaat

SEQ ID NO: 1275385 - DNA, 15 bp, Homo sapiens
agattagaattggaa

SEQ ID NO: 1275386 - DNA, 15 bp, Homo sapiens
aagattagaattgga

SEQ ID NO: 1275387 - DNA, 15 bp, Homo sapiens
aaagattagaattgg

SEQ ID NO: 1275388 - DNA, 15 bp, Homo sapiens
aaaagattagaattg

SEQ ID NO: 1275389 - DNA, 15 bp, Homo sapiens
taaaagattagaatt

SEQ ID NO: 1275390 - DNA, 15 bp, Homo sapiens
ctaaaagattagaat

SEQ ID NO: 1275391 - DNA, 15 bp, Homo sapiens
actaaaagattagaa

SEQ ID NO: 1275392 - DNA, 15 bp, Homo sapiens
aactaaaagattaga

SEQ ID NO: 1275393 - DNA, 15 bp, Homo sapiens
taactaaaagattag

SEQ ID NO: 1275394 - DNA, 15 bp, Homo sapiens
ataactaaaagatta

SEQ ID NO: 1275395 - DNA, 15 bp, Homo sapiens
aataactaaaagatt

SEQ ID NO: 1275396 - DNA, 15 bp, Homo sapiens
aaataactaaaagat

SEQ ID NO: 1275397 - DNA, 15 bp, Homo sapiens
aaaataactaaaaga

SEQ ID NO: 1275398 - DNA, 15 bp, Homo sapiens
caaaataactaaaag

SEQ ID NO: 1275399 - DNA, 15 bp, Homo sapiens
tcaaaataactaaaa

SEQ ID NO: 1275400 - DNA, 15 bp, Homo sapiens
ttcaaaataactaaa

SEQ ID NO: 1275401 - DNA, 15 bp, Homo sapiens
tttcaaaataactaa

SEQ ID NO: 1275402 - DNA, 15 bp, Homo sapiens
atttcaaaataacta

SEQ ID NO: 1275403 - DNA, 15 bp, Homo sapiens
tatttcaaaataact

SEQ ID NO: 1275404 - DNA, 15 bp, Homo sapiens
atatttcaaaataac

SEQ ID NO: 1275405 - DNA, 15 bp, Homo sapiens
tatatttcaaaataa

SEQ ID NO: 1275406 - DNA, 15 bp, Homo sapiens
gtatatttcaaaata

SEQ ID NO: 1275407 - DNA, 15 bp, Homo sapiens
tgtatatttcaaaat

SEQ ID NO: 1275408 - DNA, 15 bp, Homo sapiens
ttgtatatttcaaaa

SEQ ID NO: 1275409 - DNA, 15 bp, Homo sapiens
attgtatatttcaaa

SEQ ID NO: 1275410 - DNA, 15 bp, Homo sapiens
tattgtatatttcaa

SEQ ID NO: 1275411 - DNA, 15 bp, Homo sapiens
ttattgtatatttca

SEQ ID NO: 1275412 - DNA, 15 bp, Homo sapiens
tttattgtatatttc

SEQ ID NO: 1275413 - DNA, 15 bp, Homo sapiens
atttattgtatattt

SEQ ID NO: 1275414 - DNA, 15 bp, Homo sapiens
aatttattgtatatt

SEQ ID NO: 1275415 - DNA, 15 bp, Homo sapiens
taatttattgtatat

SEQ ID NO: 1275416 - DNA, 15 bp, Homo sapiens
ataatttattgtata

SEQ ID NO: 1275417 - DNA, 15 bp, Homo sapiens
aataatttattgtat

SEQ ID NO: 1275418 - DNA, 15 bp, Homo sapiens
caataatttattgta

SEQ ID NO: 1275419 - DNA, 15 bp, Homo sapiens
acaataatttattgt

SEQ ID NO: 1275420 - DNA, 15 bp, Homo sapiens
aacaataatttattg

SEQ ID NO: 1275421 - DNA, 15 bp, Homo sapiens
taacaataatttatt

SEQ ID NO: 1275422 - DNA, 15 bp, Homo sapiens
ttaacaataatttat

SEQ ID NO: 1275423 - DNA, 15 bp, Homo sapiens
gttaacaataattta

SEQ ID NO: 1275424 - DNA, 15 bp, Homo sapiens
agttaacaataattt

SEQ ID NO: 1275425 - DNA, 15 bp, Homo sapiens
tagttaacaataatt

SEQ ID NO: 1275426 - DNA, 15 bp, Homo sapiens
atagttaacaataat

SEQ ID NO: 1275427 - DNA, 15 bp, Homo sapiens
tatagttaacaataa

SEQ ID NO: 1275428 - DNA, 15 bp, Homo sapiens
ctatagttaacaata

SEQ ID NO: 1275429 - DNA, 15 bp, Homo sapiens
actatagttaacaat

SEQ ID NO: 1275430 - DNA, 15 bp, Homo sapiens
gactatagttaacaa

SEQ ID NO: 1275431 - DNA, 15 bp, Homo sapiens
tgactatagttaaca

SEQ ID NO: 1275432 - DNA, 15 bp, Homo sapiens
gtgactatagttaac

SEQ ID NO: 1275433 - DNA, 15 bp, Homo sapiens
agtgactatagttaa

SEQ ID NO: 1275434 - DNA, 15 bp, Homo sapiens
cagtgactatagtta

SEQ ID NO: 1275435 - DNA, 15 bp, Homo sapiens
acagtgactatagtt

SEQ ID NO: 1275436 - DNA, 15 bp, Homo sapiens
tacagtgactatagt

SEQ ID NO: 1275437 - DNA, 15 bp, Homo sapiens
atacagtgactatag

SEQ ID NO: 1275438 - DNA, 15 bp, Homo sapiens
aatacagtgactata

SEQ ID NO: 1275439 - DNA, 15 bp, Homo sapiens
caatacagtgactat

SEQ ID NO: 1275440 - DNA, 15 bp, Homo sapiens
acaatacagtgacta

SEQ ID NO: 1275441 - DNA, 15 bp, Homo sapiens
tcacaatacagtgac

SEQ ID NO: 1275442 - DNA, 15 bp, Homo sapiens
gtcacaatacagtga

SEQ ID NO: 1275443 - DNA, 15 bp, Homo sapiens
agtcacaatacagtg

SEQ ID NO: 1275444 - DNA, 15 bp, Homo sapiens
tagtcacaatacagt

SEQ ID NO: 1275445 - DNA, 15 bp, Homo sapiens
atagtcacaatacag

SEQ ID NO: 1275446 - DNA, 15 bp, Homo sapiens
tatagtcacaataca

SEQ ID NO: 1275447 - DNA, 15 bp, Homo sapiens
atatagtcacaatac

SEQ ID NO: 1275448 - DNA, 15 bp, Homo sapiens
tatatagtcacaata

SEQ ID NO: 1275449 - DNA, 15 bp, Homo sapiens
ctatatagtcacaat

SEQ ID NO: 1275450 - DNA, 15 bp, Homo sapiens
actatatagtcacaa

SEQ ID NO: 1275451 - DNA, 15 bp, Homo sapiens
cactatatagtcaca

SEQ ID NO: 1275452 - DNA, 15 bp, Homo sapiens
acactatatagtcac

SEQ ID NO: 1275453 - DNA, 15 bp, Homo sapiens
aacactatatagtca

SEQ ID NO: 1275454 - DNA, 15 bp, Homo sapiens
aaacactatatagtc

SEQ ID NO: 1275455 - DNA, 15 bp, Homo sapiens
gaaacactatatagt

SEQ ID NO: 1275456 - DNA, 15 bp, Homo sapiens
ggaaacactatatag

SEQ ID NO: 1275457 - DNA, 15 bp, Homo sapiens
tggaaacactatata

SEQ ID NO: 1275458 - DNA, 15 bp, Homo sapiens
atggaaacactatat

SEQ ID NO: 1275459 - DNA, 15 bp, Homo sapiens
tatggaaacactata

SEQ ID NO: 1275460 - DNA, 15 bp, Homo sapiens
ctatggaaacactat

SEQ ID NO: 1275461 - DNA, 15 bp, Homo sapiens
tctatggaaacacta

SEQ ID NO: 1275462 - DNA, 15 bp, Homo sapiens
ttctatggaaacact

SEQ ID NO: 1275463 - DNA, 15 bp, Homo sapiens
gttctatggaaacac

SEQ ID NO: 1275464 - DNA, 15 bp, Homo sapiens
tgttctatggaaaca

SEQ ID NO: 1275465 - DNA, 15 bp, Homo sapiens
gtgttctatggaaac

SEQ ID NO: 1275466 - DNA, 15 bp, Homo sapiens
agtgttctatggaaa

SEQ ID NO: 1275467 - DNA, 15 bp, Homo sapiens
tagtgttctatggaa

SEQ ID NO: 1275468 - DNA, 15 bp, Homo sapiens
ctagtgttctatgga

SEQ ID NO: 1275469 - DNA, 15 bp, Homo sapiens
tctagtgttctatgg

SEQ ID NO: 1275470 - DNA, 15 bp, Homo sapiens
atctagtgttctatg

SEQ ID NO: 1275471 - DNA, 15 bp, Homo sapiens
gatctagtgttctat

SEQ ID NO: 1275472 - DNA, 15 bp, Homo sapiens
agatctagtgttcta

SEQ ID NO: 1275473 - DNA, 15 bp, Homo sapiens
aagatctagtgttct

SEQ ID NO: 1275474 - DNA, 15 bp, Homo sapiens
caagatctagtgttc

SEQ ID NO: 1275475 - DNA, 15 bp, Homo sapiens
acaagatctagtgtt

SEQ ID NO: 1275476 - DNA, 15 bp, Homo sapiens
aacaagatctagtgt

SEQ ID NO: 1275477 - DNA, 15 bp, Homo sapiens
gaacaagatctagtg

SEQ ID NO: 1275478 - DNA, 15 bp, Homo sapiens
ggaacaagatctagt

SEQ ID NO: 1275479 - DNA, 15 bp, Homo sapiens
aggaacaagatctag

SEQ ID NO: 1275480 - DNA, 15 bp, Homo sapiens
aaggaacaagatcta

SEQ ID NO: 1275481 - DNA, 15 bp, Homo sapiens
gaaggaacaagatct

SEQ ID NO: 1275482 - DNA, 15 bp, Homo sapiens
agaaggaacaagatc

SEQ ID NO: 1275483 - DNA, 15 bp, Homo sapiens
tagaaggaacaagat

SEQ ID NO: 1275484 - DNA, 15 bp, Homo sapiens
atagaaggaacaaga

SEQ ID NO: 1275485 - DNA, 15 bp, Homo sapiens
gatagaaggaacaag

SEQ ID NO: 1275486 - DNA, 15 bp, Homo sapiens
agatagaaggaacaa

SEQ ID NO: 1275487 - DNA, 15 bp, Homo sapiens
tagatagaaggaaca

SEQ ID NO: 1275488 - DNA, 15 bp, Homo sapiens
ttagatagaaggaac

SEQ ID NO: 1275489 - DNA, 15 bp, Homo sapiens
gttagatagaaggaa

SEQ ID NO: 1275490 - DNA, 15 bp, Homo sapiens
agttagatagaagga

SEQ ID NO: 1275491 - DNA, 15 bp, Homo sapiens
cagttagatagaagg

SEQ ID NO: 1275492 - DNA, 15 bp, Homo sapiens
acagttagatagaag

SEQ ID NO: 1275493 - DNA, 15 bp, Homo sapiens
gacagttagatagaa

SEQ ID NO: 1275494 - DNA, 15 bp, Homo sapiens
agacagttagataga

SEQ ID NO: 1275495 - DNA, 15 bp, Homo sapiens
aagacagttagatag

SEQ ID NO: 1275496 - DNA, 15 bp, Homo sapiens
aaagacagttagata

SEQ ID NO: 1275497 - DNA, 15 bp, Homo sapiens
aaaagacagttagat

SEQ ID NO: 1275498 - DNA, 15 bp, Homo sapiens
aaaaagacagttaga

SEQ ID NO: 1275499 - DNA, 15 bp, Homo sapiens
caaaaagacagttag

SEQ ID NO: 1275500 - DNA, 15 bp, Homo sapiens
acaaaaagacagtta

SEQ ID NO: 1275501 - DNA, 15 bp, Homo sapiens
tacaaaaagacagtt

SEQ ID NO: 1275502 - DNA, 15 bp, Homo sapiens
gtacaaaaagacagt

SEQ ID NO: 1275503 - DNA, 15 bp, Homo sapiens
ggtacaaaaagacag

SEQ ID NO: 1275504 - DNA, 15 bp, Homo sapiens
gggtacaaaaagaca

SEQ ID NO: 1275505 - DNA, 15 bp, Homo sapiens
tgggtacaaaaagac

SEQ ID NO: 1275506 - DNA, 15 bp, Homo sapiens
atgggtacaaaaaga

SEQ ID NO: 1275507 - DNA, 15 bp, Homo sapiens
aatgggtacaaaaag

SEQ ID NO: 1275508 - DNA, 15 bp, Homo sapiens
ggttaatgggtacaa

SEQ ID NO: 1275509 - DNA, 15 bp, Homo sapiens
tggttaatgggtaca

SEQ ID NO: 1275510 - DNA, 15 bp, Homo sapiens
ttggttaatgggtac

SEQ ID NO: 1275511 - DNA, 15 bp, Homo sapiens
gttggttaatgggta

SEQ ID NO: 1275512 - DNA, 15 bp, Homo sapiens
agttggttaatgggt

SEQ ID NO: 1275513 - DNA, 15 bp, Homo sapiens
gagttggttaatggg

SEQ ID NO: 1275514 - DNA, 15 bp, Homo sapiens
ggagttggttaatgg

SEQ ID NO: 1275515 - DNA, 15 bp, Homo sapiens
aggagttggttaatg

SEQ ID NO: 1275516 - DNA, 15 bp, Homo sapiens
gaggagttggttaat

SEQ ID NO: 1275517 - DNA, 15 bp, Homo sapiens
agaggagttggttaa

SEQ ID NO: 1275518 - DNA, 15 bp, Homo sapiens
aagaggagttggtta

SEQ ID NO: 1275519 - DNA, 15 bp, Homo sapiens
aaagaggagttggtt

SEQ ID NO: 1275520 - DNA, 15 bp, Homo sapiens
aaaagaggagttggt

SEQ ID NO: 1275521 - DNA, 15 bp, Homo sapiens
taaaagaggagttgg

SEQ ID NO: 1275522 - DNA, 15 bp, Homo sapiens
ataaaagaggagttg

SEQ ID NO: 1275523 - DNA, 15 bp, Homo sapiens
gataaaagaggagtt

SEQ ID NO: 1275524 - DNA, 15 bp, Homo sapiens
ggataaaagaggagt

SEQ ID NO: 1275525 - DNA, 15 bp, Homo sapiens
aggataaaagaggag

SEQ ID NO: 1275526 - DNA, 15 bp, Homo sapiens
gaggataaaagagga

SEQ ID NO: 1275527 - DNA, 15 bp, Homo sapiens
ggaggataaaagagg

SEQ ID NO: 1275528 - DNA, 15 bp, Homo sapiens
gggaggataaaagag

SEQ ID NO: 1275529 - DNA, 15 bp, Homo sapiens
tgggaggataaaaga

SEQ ID NO: 1275530 - DNA, 15 bp, Homo sapiens
atgggaggataaaag

SEQ ID NO: 1275531 - DNA, 15 bp, Homo sapiens
gatgggaggataaaa

SEQ ID NO: 1275532 - DNA, 15 bp, Homo sapiens
ggatgggaggataaa

SEQ ID NO: 1275533 - DNA, 15 bp, Homo sapiens
gggatgggaggataa

SEQ ID NO: 1275534 - DNA, 15 bp, Homo sapiens
ggggatgggaggata

SEQ ID NO: 1275535 - DNA, 15 bp, Homo sapiens
tggggatgggaggat

SEQ ID NO: 1275536 - DNA, 15 bp, Homo sapiens
gtggggatgggagga

SEQ ID NO: 1275537 - DNA, 15 bp, Homo sapiens
agtggggatgggagg

SEQ ID NO: 1275538 - DNA, 15 bp, Homo sapiens
tagtggggatgggag

SEQ ID NO: 1275539 - DNA, 15 bp, Homo sapiens
gtagtggggatggga

SEQ ID NO: 1275540 - DNA, 15 bp, Homo sapiens
ggtagtggggatggg

SEQ ID NO: 1275541 - DNA, 15 bp, Homo sapiens
gggtagtggggatgg

SEQ ID NO: 1275542 - DNA, 15 bp, Homo sapiens
agggtagtggggatg

SEQ ID NO: 1275543 - DNA, 15 bp, Homo sapiens
aagggtagtggggat

SEQ ID NO: 1275544 - DNA, 15 bp, Homo sapiens
gaagggtagtgggga

SEQ ID NO: 1275545 - DNA, 15 bp, Homo sapiens
tgaagggtagtgggg

SEQ ID NO: 1275546 - DNA, 15 bp, Homo sapiens
gtgaagggtagtggg

SEQ ID NO: 1275547 - DNA, 15 bp, Homo sapiens
tgtgaagggtagtgg

SEQ ID NO: 1275548 - DNA, 15 bp, Homo sapiens
ctgtgaagggtagtg

SEQ ID NO: 1275549 - DNA, 15 bp, Homo sapiens
gctgtgaagggtagt

SEQ ID NO: 1275550 - DNA, 15 bp, Homo sapiens
agctgtgaagggtag

SEQ ID NO: 1275551 - DNA, 15 bp, Homo sapiens
aagctgtgaagggta

SEQ ID NO: 1275552 - DNA, 15 bp, Homo sapiens
gaagctgtgaagggt

SEQ ID NO: 1275553 - DNA, 15 bp, Homo sapiens
agaagctgtgaaggg

SEQ ID NO: 1275554 - DNA, 15 bp, Homo sapiens
cagaagctgtgaagg

SEQ ID NO: 1275555 - DNA, 15 bp, Homo sapiens
ccagaagctgtgaag

SEQ ID NO: 1275556 - DNA, 15 bp, Homo sapiens
accagaagctgtgaa

SEQ ID NO: 1275557 - DNA, 15 bp, Homo sapiens
taccagaagctgtga

SEQ ID NO: 1275558 - DNA, 15 bp, Homo sapiens
ttaccagaagctgtg

SEQ ID NO: 1275559 - DNA, 15 bp, Homo sapiens
attaccagaagctgt

SEQ ID NO: 1275560 - DNA, 15 bp, Homo sapiens
gattaccagaagctg

SEQ ID NO: 1275561 - DNA, 15 bp, Homo sapiens
tgattaccagaagct

SEQ ID NO: 1275562 - DNA, 15 bp, Homo sapiens
atgattaccagaagc

SEQ ID NO: 1275563 - DNA, 15 bp, Homo sapiens
gatgattaccagaag

SEQ ID NO: 1275564 - DNA, 15 bp, Homo sapiens
tgatgattaccagaa

SEQ ID NO: 1275565 - DNA, 15 bp, Homo sapiens
atgatgattaccaga

SEQ ID NO: 1275566 - DNA, 15 bp, Homo sapiens
aatgatgattaccag

SEQ ID NO: 1275567 - DNA, 15 bp, Homo sapiens
gaatgatgattacca

SEQ ID NO: 1275568 - DNA, 15 bp, Homo sapiens
agaatgatgattacc

SEQ ID NO: 1275569 - DNA, 15 bp, Homo sapiens
tagaatgatgattac

SEQ ID NO: 1275570 - DNA, 15 bp, Homo sapiens
gtagaatgatgatta

SEQ ID NO: 1275571 - DNA, 15 bp, Homo sapiens
agtagaatgatgatt

SEQ ID NO: 1275572 - DNA, 15 bp, Homo sapiens
gagtagaatgatgat

SEQ ID NO: 1275573 - DNA, 15 bp, Homo sapiens
agagtagaatgatga

SEQ ID NO: 1275574 - DNA, 15 bp, Homo sapiens
cagagtagaatgatg

SEQ ID NO: 1275575 - DNA, 15 bp, Homo sapiens
acagagtagaatgat

SEQ ID NO: 1275576 - DNA, 15 bp, Homo sapiens
gacagagtagaatga

SEQ ID NO: 1275577 - DNA, 15 bp, Homo sapiens
agacagagtagaatg

SEQ ID NO: 1275578 - DNA, 15 bp, Homo sapiens
gagacagagtagaat

SEQ ID NO: 1275579 - DNA, 15 bp, Homo sapiens
ggagacagagtagaa

SEQ ID NO: 1275580 - DNA, 15 bp, Homo sapiens
tggagacagagtaga

SEQ ID NO: 1275581 - DNA, 15 bp, Homo sapiens
atggagacagagtag

SEQ ID NO: 1275582 - DNA, 15 bp, Homo sapiens
catggagacagagta

SEQ ID NO: 1275583 - DNA, 15 bp, Homo sapiens
tcatggagacagagt

SEQ ID NO: 1275584 - DNA, 15 bp, Homo sapiens
ctcatggagacagag

SEQ ID NO: 1275585 - DNA, 15 bp, Homo sapiens
actcatggagacaga

SEQ ID NO: 1275586 - DNA, 15 bp, Homo sapiens
aactcatggagacag

SEQ ID NO: 1275587 - DNA, 15 bp, Homo sapiens
gaactcatggagaca

SEQ ID NO: 1275588 - DNA, 15 bp, Homo sapiens
tgaactcatggagac

SEQ ID NO: 1275589 - DNA, 15 bp, Homo sapiens
ttgaactcatggaga

SEQ ID NO: 1275590 - DNA, 15 bp, Homo sapiens
attgaactcatggag

SEQ ID NO: 1275591 - DNA, 15 bp, Homo sapiens
tattgaactcatgga

SEQ ID NO: 1275592 - DNA, 15 bp, Homo sapiens
atattgaactcatgg

SEQ ID NO: 1275593 - DNA, 15 bp, Homo sapiens
aatattgaactcatg

SEQ ID NO: 1275594 - DNA, 15 bp, Homo sapiens
aaatattgaactcat

SEQ ID NO: 1275595 - DNA, 15 bp, Homo sapiens
aaaatattgaactca

SEQ ID NO: 1275596 - DNA, 15 bp, Homo sapiens
aaaaatattgaactc

SEQ ID NO: 1275597 - DNA, 15 bp, Homo sapiens
aaaaaatattgaact

SEQ ID NO: 1275598 - DNA, 15 bp, Homo sapiens
aaaaaaatattgaac

SEQ ID NO: 1275599 - DNA, 15 bp, Homo sapiens
aaaaaaaatattgaa

SEQ ID NO: 1275600 - DNA, 15 bp, Homo sapiens
aaaaaaaaatattga

SEQ ID NO: 1275601 - DNA, 15 bp, Homo sapiens
aaaaaaaaaatattg

SEQ ID NO: 1275602 - DNA, 15 bp, Homo sapiens
gcttaaaaaaaaaaa

SEQ ID NO: 1275603 - DNA, 15 bp, Homo sapiens
agcttaaaaaaaaaa

SEQ ID NO: 1275604 - DNA, 15 bp, Homo sapiens
gagcttaaaaaaaaa

SEQ ID NO: 1275605 - DNA, 15 bp, Homo sapiens
caagagcttaaaaaa

SEQ ID NO: 1275606 - DNA, 15 bp, Homo sapiens
gcaagagcttaaaaa

SEQ ID NO: 1275607 - DNA, 15 bp, Homo sapiens
agcaagagcttaaaa

SEQ ID NO: 1275608 - DNA, 15 bp, Homo sapiens
aagcaagagcttaaa

SEQ ID NO: 1275609 - DNA, 15 bp, Homo sapiens
caagcaagagcttaa

SEQ ID NO: 1275610 - DNA, 15 bp, Homo sapiens
acaagcaagagctta

SEQ ID NO: 1275611 - DNA, 15 bp, Homo sapiens
tacaagcaagagctt

SEQ ID NO: 1275612 - DNA, 15 bp, Homo sapiens
ttacaagcaagagct

SEQ ID NO: 1275613 - DNA, 15 bp, Homo sapiens
cttacaagcaagagc

SEQ ID NO: 1275614 - DNA, 15 bp, Homo sapiens
acttacaagcaagag

SEQ ID NO: 1275615 - DNA, 15 bp, Homo sapiens
cacttacaagcaaga

SEQ ID NO: 1275616 - DNA, 15 bp, Homo sapiens
tcacttacaagcaag

SEQ ID NO: 1275617 - DNA, 15 bp, Homo sapiens
ctcacttacaagcaa

SEQ ID NO: 1275618 - DNA, 15 bp, Homo sapiens
tctcacttacaagca

SEQ ID NO: 1275619 - DNA, 15 bp, Homo sapiens
ttctcacttacaagc

SEQ ID NO: 1275620 - DNA, 15 bp, Homo sapiens
gttctcacttacaag

SEQ ID NO: 1275621 - DNA, 15 bp, Homo sapiens
tgttctcacttacaa

SEQ ID NO: 1275622 - DNA, 15 bp, Homo sapiens
atgttctcacttaca

SEQ ID NO: 1275623 - DNA, 15 bp, Homo sapiens
catgttctcacttac

SEQ ID NO: 1275624 - DNA, 15 bp, Homo sapiens
acatgttctcactta

SEQ ID NO: 1275625 - DNA, 15 bp, Homo sapiens
tacatgttctcactt

SEQ ID NO: 1275626 - DNA, 15 bp, Homo sapiens
gtacatgttctcact

SEQ ID NO: 1275627 - DNA, 15 bp, Homo sapiens
agtacatgttctcac

SEQ ID NO: 1275628 - DNA, 15 bp, Homo sapiens
aagtacatgttctca

SEQ ID NO: 1275629 - DNA, 15 bp, Homo sapiens
caagtacatgttctc

SEQ ID NO: 1275630 - DNA, 15 bp, Homo sapiens
acaagtacatgttct

SEQ ID NO: 1275631 - DNA, 15 bp, Homo sapiens
gacaagtacatgttc

SEQ ID NO: 1275632 - DNA, 15 bp, Homo sapiens
ggacaagtacatgtt

SEQ ID NO: 1275633 - DNA, 15 bp, Homo sapiens
aggacaagtacatgt

SEQ ID NO: 1275634 - DNA, 15 bp, Homo sapiens
aaggacaagtacatg

SEQ ID NO: 1275635 - DNA, 15 bp, Homo sapiens
gaaggacaagtacat

SEQ ID NO: 1275636 - DNA, 15 bp, Homo sapiens
agaaggacaagtaca

SEQ ID NO: 1275637 - DNA, 15 bp, Homo sapiens
cagaaggacaagtac

SEQ ID NO: 1275638 - DNA, 15 bp, Homo sapiens
acagaaggacaagta

SEQ ID NO: 1275639 - DNA, 15 bp, Homo sapiens
cacagaaggacaagt

SEQ ID NO: 1275640 - DNA, 15 bp, Homo sapiens
gcacagaaggacaag

SEQ ID NO: 1275641 - DNA, 15 bp, Homo sapiens
ggcacagaaggacaa

SEQ ID NO: 1275642 - DNA, 15 bp, Homo sapiens
aggcacagaaggaca

SEQ ID NO: 1275643 - DNA, 15 bp, Homo sapiens
caggcacagaaggac

SEQ ID NO: 1275644 - DNA, 15 bp, Homo sapiens
ccaggcacagaagga

SEQ ID NO: 1275645 - DNA, 15 bp, Homo sapiens
gccaggcacagaagg

SEQ ID NO: 1275646 - DNA, 15 bp, Homo sapiens
agccaggcacagaag

SEQ ID NO: 1275647 - DNA, 15 bp, Homo sapiens
aagccaggcacagaa

SEQ ID NO: 1275648 - DNA, 15 bp, Homo sapiens
taagccaggcacaga

SEQ ID NO: 1275649 - DNA, 15 bp, Homo sapiens
ataagccaggcacag

SEQ ID NO: 1275650 - DNA, 15 bp, Homo sapiens
aataagccaggcaca

SEQ ID NO: 1275651 - DNA, 15 bp, Homo sapiens
aaataagccaggcac

SEQ ID NO: 1275652 - DNA, 15 bp, Homo sapiens
gaaataagccaggca

SEQ ID NO: 1275653 - DNA, 15 bp, Homo sapiens
tgaaataagccaggc

SEQ ID NO: 1275654 - DNA, 15 bp, Homo sapiens
gtgaaataagccagg

SEQ ID NO: 1275655 - DNA, 15 bp, Homo sapiens
catgttaagtgaaat

SEQ ID NO: 1275656 - DNA, 15 bp, Homo sapiens
tcatgttaagtgaaa

SEQ ID NO: 1275657 - DNA, 15 bp, Homo sapiens
atcatgttaagtgaa

SEQ ID NO: 1275658 - DNA, 15 bp, Homo sapiens
catcatgttaagtga

SEQ ID NO: 1275659 - DNA, 15 bp, Homo sapiens
acatcatgttaagtg

SEQ ID NO: 1275660 - DNA, 15 bp, Homo sapiens
aacatcatgttaagt

SEQ ID NO: 1275661 - DNA, 15 bp, Homo sapiens
gaacatcatgttaag

SEQ ID NO: 1275662 - DNA, 15 bp, Homo sapiens
agaacatcatgttaa

SEQ ID NO: 1275663 - DNA, 15 bp, Homo sapiens
gagaacatcatgtta

SEQ ID NO: 1275664 - DNA, 15 bp, Homo sapiens
agagaacatcatgtt

SEQ ID NO: 1275665 - DNA, 15 bp, Homo sapiens
cagagaacatcatgt

SEQ ID NO: 1275666 - DNA, 15 bp, Homo sapiens
ccagagaacatcatg

SEQ ID NO: 1275667 - DNA, 15 bp, Homo sapiens
accagagaacatcat

SEQ ID NO: 1275668 - DNA, 15 bp, Homo sapiens
aaccagagaacatca

SEQ ID NO: 1275669 - DNA, 15 bp, Homo sapiens
gaaccagagaacatc

SEQ ID NO: 1275670 - DNA, 15 bp, Homo sapiens
ggaaccagagaacat

SEQ ID NO: 1275671 - DNA, 15 bp, Homo sapiens
tggaaccagagaaca

SEQ ID NO: 1275672 - DNA, 15 bp, Homo sapiens
ttggaaccagagaac

SEQ ID NO: 1275673 - DNA, 15 bp, Homo sapiens
tttggaaccagagaa

SEQ ID NO: 1275674 - DNA, 15 bp, Homo sapiens
atttggaaccagaga

SEQ ID NO: 1275675 - DNA, 15 bp, Homo sapiens
catttggaaccagag

SEQ ID NO: 1275676 - DNA, 15 bp, Homo sapiens
tcatttggaaccaga

SEQ ID NO: 1275677 - DNA, 15 bp, Homo sapiens
gtcatttggaaccag

SEQ ID NO: 1275678 - DNA, 15 bp, Homo sapiens
tgtcatttggaacca

SEQ ID NO: 1275679 - DNA, 15 bp, Homo sapiens
ctgtcatttggaacc

SEQ ID NO: 1275680 - DNA, 15 bp, Homo sapiens
cctgtcatttggaac

SEQ ID NO: 1275681 - DNA, 15 bp, Homo sapiens
tcctgtcatttggaa

SEQ ID NO: 1275682 - DNA, 15 bp, Homo sapiens
atcctgtcatttgga

SEQ ID NO: 1275683 - DNA, 15 bp, Homo sapiens
aatcctgtcatttgg

SEQ ID NO: 1275684 - DNA, 15 bp, Homo sapiens
aaatcctgtcatttg

SEQ ID NO: 1275685 - DNA, 15 bp, Homo sapiens
gaaatcctgtcattt

SEQ ID NO: 1275686 - DNA, 15 bp, Homo sapiens
tgaaatcctgtcatt

SEQ ID NO: 1275687 - DNA, 15 bp, Homo sapiens
atgaaatcctgtcat

SEQ ID NO: 1275688 - DNA, 15 bp, Homo sapiens
aatgaaatcctgtca

SEQ ID NO: 1275689 - DNA, 15 bp, Homo sapiens
gaatgaaatcctgtc

SEQ ID NO: 1275690 - DNA, 15 bp, Homo sapiens
agaatgaaatcctgt

SEQ ID NO: 1275691 - DNA, 15 bp, Homo sapiens
cagaatgaaatcctg

SEQ ID NO: 1275692 - DNA, 15 bp, Homo sapiens
acagaatgaaatcct

SEQ ID NO: 1275693 - DNA, 15 bp, Homo sapiens
aacagaatgaaatcc

SEQ ID NO: 1275694 - DNA, 15 bp, Homo sapiens
aaacagaatgaaatc

SEQ ID NO: 1275695 - DNA, 15 bp, Homo sapiens
aaaacagaatgaaat

SEQ ID NO: 1275696 - DNA, 15 bp, Homo sapiens
taaaacagaatgaaa

SEQ ID NO: 1275697 - DNA, 15 bp, Homo sapiens
ataaaacagaatgaa

SEQ ID NO: 1275698 - DNA, 15 bp, Homo sapiens
cataaaacagaatga

SEQ ID NO: 1275699 - DNA, 15 bp, Homo sapiens
ccataaaacagaatg

SEQ ID NO: 1275700 - DNA, 15 bp, Homo sapiens
gccataaaacagaat

SEQ ID NO: 1275701 - DNA, 15 bp, Homo sapiens
agccataaaacagaa

SEQ ID NO: 1275702 - DNA, 15 bp, Homo sapiens
cagccataaaacaga

SEQ ID NO: 1275703 - DNA, 15 bp, Homo sapiens
tcagccataaaacag

SEQ ID NO: 1275704 - DNA, 15 bp, Homo sapiens
ttcagccataaaaca

SEQ ID NO: 1275705 - DNA, 15 bp, Homo sapiens
attcagccataaaac

SEQ ID NO: 1275706 - DNA, 15 bp, Homo sapiens
gttattcagccataa

SEQ ID NO: 1275707 - DNA, 15 bp, Homo sapiens
tgttattcagccata

SEQ ID NO: 1275708 - DNA, 15 bp, Homo sapiens
atgttattcagccat

SEQ ID NO: 1275709 - DNA, 15 bp, Homo sapiens
aatgttattcagcca

SEQ ID NO: 1275710 - DNA, 15 bp, Homo sapiens
gaatgttattcagcc

SEQ ID NO: 1275711 - DNA, 15 bp, Homo sapiens
ggaatgttattcagc

SEQ ID NO: 1275712 - DNA, 15 bp, Homo sapiens
tggaatgttattcag

SEQ ID NO: 1275713 - DNA, 15 bp, Homo sapiens
atggaatgttattca

SEQ ID NO: 1275714 - DNA, 15 bp, Homo sapiens
aatggaatgttattc

SEQ ID NO: 1275715 - DNA, 15 bp, Homo sapiens
caatggaatgttatt

SEQ ID NO: 1275716 - DNA, 15 bp, Homo sapiens
acaatggaatgttat

SEQ ID NO: 1275717 - DNA, 15 bp, Homo sapiens
aacaatggaatgtta

SEQ ID NO: 1275718 - DNA, 15 bp, Homo sapiens
aaacaatggaatgtt

SEQ ID NO: 1275719 - DNA, 15 bp, Homo sapiens
taaacaatggaatgt

SEQ ID NO: 1275720 - DNA, 15 bp, Homo sapiens
ataaacaatggaatg

SEQ ID NO: 1275721 - DNA, 15 bp, Homo sapiens
catataaacaatgga

SEQ ID NO: 1275722 - DNA, 15 bp, Homo sapiens
acatataaacaatgg

SEQ ID NO: 1275723 - DNA, 15 bp, Homo sapiens
tacatataaacaatg

SEQ ID NO: 1275724 - DNA, 15 bp, Homo sapiens
gtacatataaacaat

SEQ ID NO: 1275725 - DNA, 15 bp, Homo sapiens
ggtacatataaacaa

SEQ ID NO: 1275726 - DNA, 15 bp, Homo sapiens
tggtacatataaaca

SEQ ID NO: 1275727 - DNA, 15 bp, Homo sapiens
gtggtacatataaac

SEQ ID NO: 1275728 - DNA, 15 bp, Homo sapiens
tgtggtacatataaa

SEQ ID NO: 1275729 - DNA, 15 bp, Homo sapiens
atgtggtacatataa

SEQ ID NO: 1275730 - DNA, 15 bp, Homo sapiens
aatgtggtacatata

SEQ ID NO: 1275731 - DNA, 15 bp, Homo sapiens
aaatgtggtacatat

SEQ ID NO: 1275732 - DNA, 15 bp, Homo sapiens
aaaatgtggtacata

SEQ ID NO: 1275733 - DNA, 15 bp, Homo sapiens
gaaaatgtggtacat

SEQ ID NO: 1275734 - DNA, 15 bp, Homo sapiens
agaaaatgtggtaca

SEQ ID NO: 1275735 - DNA, 15 bp, Homo sapiens
aagaaaatgtggtac

SEQ ID NO: 1275736 - DNA, 15 bp, Homo sapiens
aaagaaaatgtggta

SEQ ID NO: 1275737 - DNA, 15 bp, Homo sapiens
taaagaaaatgtggt

SEQ ID NO: 1275738 - DNA, 15 bp, Homo sapiens
gataaagaaaatgtg

SEQ ID NO: 1275739 - DNA, 15 bp, Homo sapiens
ggataaagaaaatgt

SEQ ID NO: 1275740 - DNA, 15 bp, Homo sapiens
tggataaagaaaatg

SEQ ID NO: 1275741 - DNA, 15 bp, Homo sapiens
catggataaagaaaa

SEQ ID NO: 1275742 - DNA, 15 bp, Homo sapiens
gcatggataaagaaa

SEQ ID NO: 1275743 - DNA, 15 bp, Homo sapiens
tgcatggataaagaa

SEQ ID NO: 1275744 - DNA, 15 bp, Homo sapiens
atgcatggataaaga

SEQ ID NO: 1275745 - DNA, 15 bp, Homo sapiens
gatgcatggataaag

SEQ ID NO: 1275746 - DNA, 15 bp, Homo sapiens
ggatgcatggataaa

SEQ ID NO: 1275747 - DNA, 15 bp, Homo sapiens
tggatgcatggataa

SEQ ID NO: 1275748 - DNA, 15 bp, Homo sapiens
atggatgcatggata

SEQ ID NO: 1275749 - DNA, 15 bp, Homo sapiens
aatggatgcatggat

SEQ ID NO: 1275750 - DNA, 15 bp, Homo sapiens
taatggatgcatgga

SEQ ID NO: 1275751 - DNA, 15 bp, Homo sapiens
ttaatggatgcatgg

SEQ ID NO: 1275752 - DNA, 15 bp, Homo sapiens
attaatggatgcatg

SEQ ID NO: 1275753 - DNA, 15 bp, Homo sapiens
cattaatggatgcat

SEQ ID NO: 1275754 - DNA, 15 bp, Homo sapiens
ccattaatggatgca

SEQ ID NO: 1275755 - DNA, 15 bp, Homo sapiens
cccattaatggatgc

SEQ ID NO: 1275756 - DNA, 15 bp, Homo sapiens
gcccattaatggatg

SEQ ID NO: 1275757 - DNA, 15 bp, Homo sapiens
tgcccattaatggat

SEQ ID NO: 1275758 - DNA, 15 bp, Homo sapiens
atgcccattaatgga

SEQ ID NO: 1275759 - DNA, 15 bp, Homo sapiens
aatgcccattaatgg

SEQ ID NO: 1275760 - DNA, 15 bp, Homo sapiens
gaatgcccattaatg

SEQ ID NO: 1275761 - DNA, 15 bp, Homo sapiens
tgaatgcccattaat

SEQ ID NO: 1275762 - DNA, 15 bp, Homo sapiens
ctgaatgcccattaa

SEQ ID NO: 1275763 - DNA, 15 bp, Homo sapiens
cctgaatgcccatta

SEQ ID NO: 1275764 - DNA, 15 bp, Homo sapiens
acctgaatgcccatt

SEQ ID NO: 1275765 - DNA, 15 bp, Homo sapiens
aacctgaatgcccat

SEQ ID NO: 1275766 - DNA, 15 bp, Homo sapiens
taacctgaatgccca

SEQ ID NO: 1275767 - DNA, 15 bp, Homo sapiens
ttaacctgaatgccc

SEQ ID NO: 1275768 - DNA, 15 bp, Homo sapiens
attaacctgaatgcc

SEQ ID NO: 1275769 - DNA, 15 bp, Homo sapiens
aattaacctgaatgc

SEQ ID NO: 1275770 - DNA, 15 bp, Homo sapiens
gaattaacctgaatg

SEQ ID NO: 1275771 - DNA, 15 bp, Homo sapiens
ggaattaacctgaat

SEQ ID NO: 1275772 - DNA, 15 bp, Homo sapiens
tggaattaacctgaa

SEQ ID NO: 1275773 - DNA, 15 bp, Homo sapiens
atggaattaacctga

SEQ ID NO: 1275774 - DNA, 15 bp, Homo sapiens
catggaattaacctg

SEQ ID NO: 1275775 - DNA, 15 bp, Homo sapiens
acatggaattaacct

SEQ ID NO: 1275776 - DNA, 15 bp, Homo sapiens
gacatggaattaacc

SEQ ID NO: 1275777 - DNA, 15 bp, Homo sapiens
agacatggaattaac

SEQ ID NO: 1275778 - DNA, 15 bp, Homo sapiens
aagacatggaattaa

SEQ ID NO: 1275779 - DNA, 15 bp, Homo sapiens
caagacatggaatta

SEQ ID NO: 1275780 - DNA, 15 bp, Homo sapiens
ccaagacatggaatt

SEQ ID NO: 1275781 - DNA, 15 bp, Homo sapiens
gccaagacatggaat

SEQ ID NO: 1275782 - DNA, 15 bp, Homo sapiens
agccaagacatggaa

SEQ ID NO: 1275783 - DNA, 15 bp, Homo sapiens
cagccaagacatgga

SEQ ID NO: 1275784 - DNA, 15 bp, Homo sapiens
acagccaagacatgg

SEQ ID NO: 1275785 - DNA, 15 bp, Homo sapiens
aacagccaagacatg

SEQ ID NO: 1275786 - DNA, 15 bp, Homo sapiens
caacagccaagacat

SEQ ID NO: 1275787 - DNA, 15 bp, Homo sapiens
ccaacagccaagaca

SEQ ID NO: 1275788 - DNA, 15 bp, Homo sapiens
cccaacagccaagac

SEQ ID NO: 1275789 - DNA, 15 bp, Homo sapiens
tcccaacagccaaga

SEQ ID NO: 1275790 - DNA, 15 bp, Homo sapiens
ttcccaacagccaag

SEQ ID NO: 1275791 - DNA, 15 bp, Homo sapiens
tttcccaacagccaa

SEQ ID NO: 1275792 - DNA, 15 bp, Homo sapiens
ttttcccaacagcca

SEQ ID NO: 1275793 - DNA, 15 bp, Homo sapiens
tttttcccaacagcc

SEQ ID NO: 1275794 - DNA, 15 bp, Homo sapiens
atttttcccaacagc

SEQ ID NO: 1275795 - DNA, 15 bp, Homo sapiens
catttttcccaacag

SEQ ID NO: 1275796 - DNA, 15 bp, Homo sapiens
gcatttttcccaaca

SEQ ID NO: 1275797 - DNA, 15 bp, Homo sapiens
tgcatttttcccaac

SEQ ID NO: 1275798 - DNA, 15 bp, Homo sapiens
ctgcatttttcccaa

SEQ ID NO: 1275799 - DNA, 15 bp, Homo sapiens
gctgcatttttccca

SEQ ID NO: 1275800 - DNA, 15 bp, Homo sapiens
tgctgcatttttccc

SEQ ID NO: 1275801 - DNA, 15 bp, Homo sapiens
atgctgcatttttcc

SEQ ID NO: 1275802 - DNA, 15 bp, Homo sapiens
aatgctgcatttttc

SEQ ID NO: 1275803 - DNA, 15 bp, Homo sapiens
gaatgctgcattttt

SEQ ID NO: 1275804 - DNA, 15 bp, Homo sapiens
tgaatgctgcatttt

SEQ ID NO: 1275805 - DNA, 15 bp, Homo sapiens
ttgaatgctgcattt

SEQ ID NO: 1275806 - DNA, 15 bp, Homo sapiens
gttgaatgctgcatt

SEQ ID NO: 1275807 - DNA, 15 bp, Homo sapiens
tgttgaatgctgcat

SEQ ID NO: 1275808 - DNA, 15 bp, Homo sapiens
atgttgaatgctgca

SEQ ID NO: 1275809 - DNA, 15 bp, Homo sapiens
catgttgaatgctgc

SEQ ID NO: 1275810 - DNA, 15 bp, Homo sapiens
ccatgttgaatgctg

SEQ ID NO: 1275811 - DNA, 15 bp, Homo sapiens
cccatgttgaatgct

SEQ ID NO: 1275812 - DNA, 15 bp, Homo sapiens
tcccatgttgaatgc

SEQ ID NO: 1275813 - DNA, 15 bp, Homo sapiens
ttcccatgttgaatg

SEQ ID NO: 1275814 - DNA, 15 bp, Homo sapiens
attcccatgttgaat

SEQ ID NO: 1275815 - DNA, 15 bp, Homo sapiens
cattcccatgttgaa

SEQ ID NO: 1275816 - DNA, 15 bp, Homo sapiens
gcattcccatgttga

SEQ ID NO: 1275817 - DNA, 15 bp, Homo sapiens
tgcattcccatgttg

SEQ ID NO: 1275818 - DNA, 15 bp, Homo sapiens
ctgcattcccatgtt

SEQ ID NO: 1275819 - DNA, 15 bp, Homo sapiens
tctgcattcccatgt

SEQ ID NO: 1275820 - DNA, 15 bp, Homo sapiens
atctgcattcccatg

SEQ ID NO: 1275821 - DNA, 15 bp, Homo sapiens
tatctgcattcccat

SEQ ID NO: 1275822 - DNA, 15 bp, Homo sapiens
atatctgcattccca

SEQ ID NO: 1275823 - DNA, 15 bp, Homo sapiens
gatatctgcattccc

SEQ ID NO: 1275824 - DNA, 15 bp, Homo sapiens
agatatctgcattcc

SEQ ID NO: 1275825 - DNA, 15 bp, Homo sapiens
gagatatctgcattc

SEQ ID NO: 1275826 - DNA, 15 bp, Homo sapiens
agagatatctgcatt

SEQ ID NO: 1275827 - DNA, 15 bp, Homo sapiens
aagagatatctgcat

SEQ ID NO: 1275828 - DNA, 15 bp, Homo sapiens
aaagagatatctgca

SEQ ID NO: 1275829 - DNA, 15 bp, Homo sapiens
caaagagatatctgc

SEQ ID NO: 1275830 - DNA, 15 bp, Homo sapiens
tcaaagagatatctg

SEQ ID NO: 1275831 - DNA, 15 bp, Homo sapiens
atcaaagagatatct

SEQ ID NO: 1275832 - DNA, 15 bp, Homo sapiens
tatcaaagagatatc

SEQ ID NO: 1275833 - DNA, 15 bp, Homo sapiens
atatcaaagagatat

SEQ ID NO: 1275834 - DNA, 15 bp, Homo sapiens
tatatcaaagagata

SEQ ID NO: 1275835 - DNA, 15 bp, Homo sapiens
gtatatcaaagagat

SEQ ID NO: 1275836 - DNA, 15 bp, Homo sapiens
agtatatcaaagaga

SEQ ID NO: 1275837 - DNA, 15 bp, Homo sapiens
cagtatatcaaagag

SEQ ID NO: 1275838 - DNA, 15 bp, Homo sapiens
acagtatatcaaaga

SEQ ID NO: 1275839 - DNA, 15 bp, Homo sapiens
aacagtatatcaaag

SEQ ID NO: 1275840 - DNA, 15 bp, Homo sapiens
aaacagtatatcaaa

SEQ ID NO: 1275841 - DNA, 15 bp, Homo sapiens
aaaacagtatatcaa

SEQ ID NO: 1275842 - DNA, 15 bp, Homo sapiens
aaaaacagtatatca

SEQ ID NO: 1275843 - DNA, 15 bp, Homo sapiens
taaaaacagtatatc

SEQ ID NO: 1275844 - DNA, 15 bp, Homo sapiens
ataaaaacagtatat

SEQ ID NO: 1275845 - DNA, 15 bp, Homo sapiens
aataaaaacagtata

SEQ ID NO: 1275846 - DNA, 15 bp, Homo sapiens
aaataaaaacagtat

SEQ ID NO: 1275847 - DNA, 15 bp, Homo sapiens
gaaataaaaacagta

SEQ ID NO: 1275848 - DNA, 15 bp, Homo sapiens
agaaataaaaacagt

SEQ ID NO: 1275849 - DNA, 15 bp, Homo sapiens
aagaaataaaaacag

SEQ ID NO: 1275850 - DNA, 15 bp, Homo sapiens
aaagaaataaaaaca

SEQ ID NO: 1275851 - DNA, 15 bp, Homo sapiens
aaaagaaataaaaac

SEQ ID NO: 1275852 - DNA, 15 bp, Homo sapiens
caaaagaaataaaaa

SEQ ID NO: 1275853 - DNA, 15 bp, Homo sapiens
ccaaaagaaataaaa

SEQ ID NO: 1275854 - DNA, 15 bp, Homo sapiens
tccaaaagaaataaa

SEQ ID NO: 1275855 - DNA, 15 bp, Homo sapiens
atccaaaagaaataa

SEQ ID NO: 1275856 - DNA, 15 bp, Homo sapiens
tatccaaaagaaata

SEQ ID NO: 1275857 - DNA, 15 bp, Homo sapiens
atatccaaaagaaat

SEQ ID NO: 1275858 - DNA, 15 bp, Homo sapiens
tatatccaaaagaaa

SEQ ID NO: 1275859 - DNA, 15 bp, Homo sapiens
atatatccaaaagaa

SEQ ID NO: 1275860 - DNA, 15 bp, Homo sapiens
tatatatccaaaaga

SEQ ID NO: 1275861 - DNA, 15 bp, Homo sapiens
gtatatatccaaaag

SEQ ID NO: 1275862 - DNA, 15 bp, Homo sapiens
ggtatatatccaaaa

SEQ ID NO: 1275863 - DNA, 15 bp, Homo sapiens
gggtatatatccaaa

SEQ ID NO: 1275864 - DNA, 15 bp, Homo sapiens
tgggtatatatccaa

SEQ ID NO: 1275865 - DNA, 15 bp, Homo sapiens
ctgggtatatatcca

SEQ ID NO: 1275866 - DNA, 15 bp, Homo sapiens
actgggtatatatcc

SEQ ID NO: 1275867 - DNA, 15 bp, Homo sapiens
cactgggtatatatc

SEQ ID NO: 1275868 - DNA, 15 bp, Homo sapiens
ccactgggtatatat

SEQ ID NO: 1275869 - DNA, 15 bp, Homo sapiens
accactgggtatata

SEQ ID NO: 1275870 - DNA, 15 bp, Homo sapiens
caccactgggtatat

SEQ ID NO: 1275871 - DNA, 15 bp, Homo sapiens
ccaccactgggtata

SEQ ID NO: 1275872 - DNA, 15 bp, Homo sapiens
cccaccactgggtat

SEQ ID NO: 1275873 - DNA, 15 bp, Homo sapiens
tcccaccactgggta

SEQ ID NO: 1275874 - DNA, 15 bp, Homo sapiens
atcccaccactgggt

SEQ ID NO: 1275875 - DNA, 15 bp, Homo sapiens
aatcccaccactggg

SEQ ID NO: 1275876 - DNA, 15 bp, Homo sapiens
caatcccaccactgg

SEQ ID NO: 1275877 - DNA, 15 bp, Homo sapiens
gcaatcccaccactg

SEQ ID NO: 1275878 - DNA, 15 bp, Homo sapiens
agcaatcccaccact

SEQ ID NO: 1275879 - DNA, 15 bp, Homo sapiens
cagcaatcccaccac

SEQ ID NO: 1275880 - DNA, 15 bp, Homo sapiens
acagcaatcccacca

SEQ ID NO: 1275881 - DNA, 15 bp, Homo sapiens
tacagcaatcccacc

SEQ ID NO: 1275882 - DNA, 15 bp, Homo sapiens
atacagcaatcccac

SEQ ID NO: 1275883 - DNA, 15 bp, Homo sapiens
gatacagcaatccca

SEQ ID NO: 1275884 - DNA, 15 bp, Homo sapiens
tgatacagcaatccc

SEQ ID NO: 1275885 - DNA, 15 bp, Homo sapiens
atgatacagcaatcc

SEQ ID NO: 1275886 - DNA, 15 bp, Homo sapiens
tatgatacagcaatc

SEQ ID NO: 1275887 - DNA, 15 bp, Homo sapiens
atatgatacagcaat

SEQ ID NO: 1275888 - DNA, 15 bp, Homo sapiens
catatgatacagcaa

SEQ ID NO: 1275889 - DNA, 15 bp, Homo sapiens
ccatatgatacagca

SEQ ID NO: 1275890 - DNA, 15 bp, Homo sapiens
accatatgatacagc

SEQ ID NO: 1275891 - DNA, 15 bp, Homo sapiens
taccatatgatacag

SEQ ID NO: 1275892 - DNA, 15 bp, Homo sapiens
ctaccatatgataca

SEQ ID NO: 1275893 - DNA, 15 bp, Homo sapiens
actaccatatgatac

SEQ ID NO: 1275894 - DNA, 15 bp, Homo sapiens
aactaccatatgata

SEQ ID NO: 1275895 - DNA, 15 bp, Homo sapiens
aaactaccatatgat

SEQ ID NO: 1275896 - DNA, 15 bp, Homo sapiens
aaaactaccatatga

SEQ ID NO: 1275897 - DNA, 15 bp, Homo sapiens
taaaactaccatatg

SEQ ID NO: 1275898 - DNA, 15 bp, Homo sapiens
ataaaactaccatat

SEQ ID NO: 1275899 - DNA, 15 bp, Homo sapiens
aataaaactaccata

SEQ ID NO: 1275900 - DNA, 15 bp, Homo sapiens
aaataaaactaccat

SEQ ID NO: 1275901 - DNA, 15 bp, Homo sapiens
aaaataaaactacca

SEQ ID NO: 1275902 - DNA, 15 bp, Homo sapiens
aaaaataaaactacc

SEQ ID NO: 1275903 - DNA, 15 bp, Homo sapiens
taaaaataaaactac

SEQ ID NO: 1275904 - DNA, 15 bp, Homo sapiens
ataaaaataaaacta

SEQ ID NO: 1275905 - DNA, 15 bp, Homo sapiens
aataaaaataaaact

SEQ ID NO: 1275906 - DNA, 15 bp, Homo sapiens
cctcaaaaaaataaa

SEQ ID NO: 1275907 - DNA, 15 bp, Homo sapiens
tcctcaaaaaaataa

SEQ ID NO: 1275908 - DNA, 15 bp, Homo sapiens
ttcctcaaaaaaata

SEQ ID NO: 1275909 - DNA, 15 bp, Homo sapiens
gttcctcaaaaaaat

SEQ ID NO: 1275910 - DNA, 15 bp, Homo sapiens
ggttcctcaaaaaaa

SEQ ID NO: 1275911 - DNA, 15 bp, Homo sapiens
aggttcctcaaaaaa

SEQ ID NO: 1275912 - DNA, 15 bp, Homo sapiens
gaggttcctcaaaaa

SEQ ID NO: 1275913 - DNA, 15 bp, Homo sapiens
agaggttcctcaaaa

SEQ ID NO: 1275914 - DNA, 15 bp, Homo sapiens
tagaggttcctcaaa

SEQ ID NO: 1275915 - DNA, 15 bp, Homo sapiens
ttagaggttcctcaa

SEQ ID NO: 1275916 - DNA, 15 bp, Homo sapiens
tttagaggttcctca

SEQ ID NO: 1275917 - DNA, 15 bp, Homo sapiens
gtttagaggttcctc

SEQ ID NO: 1275918 - DNA, 15 bp, Homo sapiens
agtttagaggttcct

SEQ ID NO: 1275919 - DNA, 15 bp, Homo sapiens
tagtttagaggttcc

SEQ ID NO: 1275920 - DNA, 15 bp, Homo sapiens
atagtttagaggttc

SEQ ID NO: 1275921 - DNA, 15 bp, Homo sapiens
aatagtttagaggtt

SEQ ID NO: 1275922 - DNA, 15 bp, Homo sapiens
gaatagtttagaggt

SEQ ID NO: 1275923 - DNA, 15 bp, Homo sapiens
agaatagtttagagg

SEQ ID NO: 1275924 - DNA, 15 bp, Homo sapiens
aagaatagtttagag

SEQ ID NO: 1275925 - DNA, 15 bp, Homo sapiens
aaagaatagtttaga

SEQ ID NO: 1275926 - DNA, 15 bp, Homo sapiens
aaaagaatagtttag

SEQ ID NO: 1275927 - DNA, 15 bp, Homo sapiens
taaaagaatagttta

SEQ ID NO: 1275928 - DNA, 15 bp, Homo sapiens
ataaaagaatagttt

SEQ ID NO: 1275929 - DNA, 15 bp, Homo sapiens
tataaaagaatagtt

SEQ ID NO: 1275930 - DNA, 15 bp, Homo sapiens
ctataaaagaatagt

SEQ ID NO: 1275931 - DNA, 15 bp, Homo sapiens
actataaaagaatag

SEQ ID NO: 1275932 - DNA, 15 bp, Homo sapiens
cactataaaagaata

SEQ ID NO: 1275933 - DNA, 15 bp, Homo sapiens
ccactataaaagaat

SEQ ID NO: 1275934 - DNA, 15 bp, Homo sapiens
gccactataaaagaa

SEQ ID NO: 1275935 - DNA, 15 bp, Homo sapiens
agccactataaaaga

SEQ ID NO: 1275936 - DNA, 15 bp, Homo sapiens
gagccactataaaag

SEQ ID NO: 1275937 - DNA, 15 bp, Homo sapiens
agagccactataaaa

SEQ ID NO: 1275938 - DNA, 15 bp, Homo sapiens
tagagccactataaa

SEQ ID NO: 1275939 - DNA, 15 bp, Homo sapiens
gtagagccactataa

SEQ ID NO: 1275940 - DNA, 15 bp, Homo sapiens
agtagagccactata

SEQ ID NO: 1275941 - DNA, 15 bp, Homo sapiens
tagtagagccactat

SEQ ID NO: 1275942 - DNA, 15 bp, Homo sapiens
ttagtagagccacta

SEQ ID NO: 1275943 - DNA, 15 bp, Homo sapiens
attagtagagccact

SEQ ID NO: 1275944 - DNA, 15 bp, Homo sapiens
aattagtagagccac

SEQ ID NO: 1275945 - DNA, 15 bp, Homo sapiens
aaattagtagagcca

SEQ ID NO: 1275946 - DNA, 15 bp, Homo sapiens
taaattagtagagcc

SEQ ID NO: 1275947 - DNA, 15 bp, Homo sapiens
gtaaattagtagagc

SEQ ID NO: 1275948 - DNA, 15 bp, Homo sapiens
tgtaaattagtagag

SEQ ID NO: 1275949 - DNA, 15 bp, Homo sapiens
atgtaaattagtaga

SEQ ID NO: 1275950 - DNA, 15 bp, Homo sapiens
aatgtaaattagtag

SEQ ID NO: 1275951 - DNA, 15 bp, Homo sapiens
caatgtaaattagta

SEQ ID NO: 1275952 - DNA, 15 bp, Homo sapiens
gcaatgtaaattagt

SEQ ID NO: 1275953 - DNA, 15 bp, Homo sapiens
ggcaatgtaaattag

SEQ ID NO: 1275954 - DNA, 15 bp, Homo sapiens
tggcaatgtaaatta

SEQ ID NO: 1275955 - DNA, 15 bp, Homo sapiens
gtggcaatgtaaatt

SEQ ID NO: 1275956 - DNA, 15 bp, Homo sapiens
tgtggcaatgtaaat

SEQ ID NO: 1275957 - DNA, 15 bp, Homo sapiens
ttgtggcaatgtaaa

SEQ ID NO: 1275958 - DNA, 15 bp, Homo sapiens
cttgtggcaatgtaa

SEQ ID NO: 1275959 - DNA, 15 bp, Homo sapiens
gcttgtggcaatgta

SEQ ID NO: 1275960 - DNA, 15 bp, Homo sapiens
tgcttgtggcaatgt

SEQ ID NO: 1275961 - DNA, 15 bp, Homo sapiens
ctgcttgtggcaatg

SEQ ID NO: 1275962 - DNA, 15 bp, Homo sapiens
actgcttgtggcaat

SEQ ID NO: 1275963 - DNA, 15 bp, Homo sapiens
aactgcttgtggcaa

SEQ ID NO: 1275964 - DNA, 15 bp, Homo sapiens
caactgcttgtggca

SEQ ID NO: 1275965 - DNA, 15 bp, Homo sapiens
acaactgcttgtggc

SEQ ID NO: 1275966 - DNA, 15 bp, Homo sapiens
cacaactgcttgtgg

SEQ ID NO: 1275967 - DNA, 15 bp, Homo sapiens
gcacaactgcttgtg

SEQ ID NO: 1275968 - DNA, 15 bp, Homo sapiens
agcacaactgcttgt

SEQ ID NO: 1275969 - DNA, 15 bp, Homo sapiens
aagcacaactgcttg

SEQ ID NO: 1275970 - DNA, 15 bp, Homo sapiens
aaagcacaactgctt

SEQ ID NO: 1275971 - DNA, 15 bp, Homo sapiens
aaaagcacaactgct

SEQ ID NO: 1275972 - DNA, 15 bp, Homo sapiens
caaaagcacaactgc

SEQ ID NO: 1275973 - DNA, 15 bp, Homo sapiens
acaaaagcacaactg

SEQ ID NO: 1275974 - DNA, 15 bp, Homo sapiens
aacaaaagcacaact

SEQ ID NO: 1275975 - DNA, 15 bp, Homo sapiens
aaacaaaagcacaac

SEQ ID NO: 1275976 - DNA, 15 bp, Homo sapiens
aaaacaaaagcacaa

SEQ ID NO: 1275977 - DNA, 15 bp, Homo sapiens
aaaaacaaaagcaca

SEQ ID NO: 1275978 - DNA, 15 bp, Homo sapiens
aaaaaacaaaagcac

SEQ ID NO: 1275979 - DNA, 15 bp, Homo sapiens
aaaaaaacaaaagca

SEQ ID NO: 1275980 - DNA, 15 bp, Homo sapiens
aaaaaaaacaaaagc

SEQ ID NO: 1275981 - DNA, 15 bp, Homo sapiens
aaaaaaaaacaaaag

SEQ ID NO: 1275982 - DNA, 15 bp, Homo sapiens
caaaaaaaaaacaaa

SEQ ID NO: 1275983 - DNA, 15 bp, Homo sapiens
acaaaaaaaaaacaa

SEQ ID NO: 1275984 - DNA, 15 bp, Homo sapiens
aaaaaaaacaaaaac

SEQ ID NO: 1275985 - DNA, 15 bp, Homo sapiens
gtaaaaaaaaacaaa

SEQ ID NO: 1275986 - DNA, 15 bp, Homo sapiens
agtaaaaaaaaacaa

SEQ ID NO: 1275987 - DNA, 15 bp, Homo sapiens
cagtaaaaaaaaaca

SEQ ID NO: 1275988 - DNA, 15 bp, Homo sapiens
acagtaaaaaaaaac

SEQ ID NO: 1275989 - DNA, 15 bp, Homo sapiens
aacagtaaaaaaaaa

SEQ ID NO: 1275990 - DNA, 15 bp, Homo sapiens
aaacagtaaaaaaaa

SEQ ID NO: 1275991 - DNA, 15 bp, Homo sapiens
aaaacagtaaaaaaa

SEQ ID NO: 1275992 - DNA, 15 bp, Homo sapiens
taaaacagtaaaaaa

SEQ ID NO: 1275993 - DNA, 15 bp, Homo sapiens
ttaaaacagtaaaaa

SEQ ID NO: 1275994 - DNA, 15 bp, Homo sapiens
gttaaaacagtaaaa

SEQ ID NO: 1275995 - DNA, 15 bp, Homo sapiens
tgttaaaacagtaaa

SEQ ID NO: 1275996 - DNA, 15 bp, Homo sapiens
atgttaaaacagtaa

SEQ ID NO: 1275997 - DNA, 15 bp, Homo sapiens
tatgttaaaacagta

SEQ ID NO: 1275998 - DNA, 15 bp, Homo sapiens
ttatgttaaaacagt

SEQ ID NO: 1275999 - DNA, 15 bp, Homo sapiens
attatgttaaaacag

SEQ ID NO: 1276000 - DNA, 15 bp, Homo sapiens
aattatgttaaaaca

SEQ ID NO: 1276001 - DNA, 15 bp, Homo sapiens
taattatgttaaaac

SEQ ID NO: 1276002 - DNA, 15 bp, Homo sapiens
ataattatgttaaaa

SEQ ID NO: 1276003 - DNA, 15 bp, Homo sapiens
aataattatgttaaa

SEQ ID NO: 1276004 - DNA, 15 bp, Homo sapiens
aaataattatgttaa

SEQ ID NO: 1276005 - DNA, 15 bp, Homo sapiens
caaataattatgtta

SEQ ID NO: 1276006 - DNA, 15 bp, Homo sapiens
ccaaataattatgtt

SEQ ID NO: 1276007 - DNA, 15 bp, Homo sapiens
tccaaataattatgt

SEQ ID NO: 1276008 - DNA, 15 bp, Homo sapiens
ctccaaataattatg

SEQ ID NO: 1276009 - DNA, 15 bp, Homo sapiens
gctccaaataattat

SEQ ID NO: 1276010 - DNA, 15 bp, Homo sapiens
agctccaaataatta

SEQ ID NO: 1276011 - DNA, 15 bp, Homo sapiens
aagctccaaataatt

SEQ ID NO: 1276012 - DNA, 15 bp, Homo sapiens
gaagctccaaataat

SEQ ID NO: 1276013 - DNA, 15 bp, Homo sapiens
tgaagctccaaataa

SEQ ID NO: 1276014 - DNA, 15 bp, Homo sapiens
atgaagctccaaata

SEQ ID NO: 1276015 - DNA, 15 bp, Homo sapiens
aatgaagctccaaat

SEQ ID NO: 1276016 - DNA, 15 bp, Homo sapiens
gaatgaagctccaaa

SEQ ID NO: 1276017 - DNA, 15 bp, Homo sapiens
tgaatgaagctccaa

SEQ ID NO: 1276018 - DNA, 15 bp, Homo sapiens
atgaatgaagctcca

SEQ ID NO: 1276019 - DNA, 15 bp, Homo sapiens
catgaatgaagctcc

SEQ ID NO: 1276020 - DNA, 15 bp, Homo sapiens
tcatgaatgaagctc

SEQ ID NO: 1276021 - DNA, 15 bp, Homo sapiens
atcatgaatgaagct

SEQ ID NO: 1276022 - DNA, 15 bp, Homo sapiens
catcatgaatgaagc

SEQ ID NO: 1276023 - DNA, 15 bp, Homo sapiens
ccatcatgaatgaag

SEQ ID NO: 1276024 - DNA, 15 bp, Homo sapiens
gccatcatgaatgaa

SEQ ID NO: 1276025 - DNA, 15 bp, Homo sapiens
tgccatcatgaatga

SEQ ID NO: 1276026 - DNA, 15 bp, Homo sapiens
atgccatcatgaatg

SEQ ID NO: 1276027 - DNA, 15 bp, Homo sapiens
tatgccatcatgaat

SEQ ID NO: 1276028 - DNA, 15 bp, Homo sapiens
atatgccatcatgaa

SEQ ID NO: 1276029 - DNA, 15 bp, Homo sapiens
catatgccatcatga

SEQ ID NO: 1276030 - DNA, 15 bp, Homo sapiens
gcatatgccatcatg

SEQ ID NO: 1276031 - DNA, 15 bp, Homo sapiens
tgcatatgccatcat

SEQ ID NO: 1276032 - DNA, 15 bp, Homo sapiens
atgcatatgccatca

SEQ ID NO: 1276033 - DNA, 15 bp, Homo sapiens
gatgcatatgccatc

SEQ ID NO: 1276034 - DNA, 15 bp, Homo sapiens
tgatgcatatgccat

SEQ ID NO: 1276035 - DNA, 15 bp, Homo sapiens
ttgatgcatatgcca

SEQ ID NO: 1276036 - DNA, 15 bp, Homo sapiens
gttgatgcatatgcc

SEQ ID NO: 1276037 - DNA, 15 bp, Homo sapiens
tgttgatgcatatgc

SEQ ID NO: 1276038 - DNA, 15 bp, Homo sapiens
ttgttgatgcatatg

SEQ ID NO: 1276039 - DNA, 15 bp, Homo sapiens
attgttgatgcatat

SEQ ID NO: 1276040 - DNA, 15 bp, Homo sapiens
aattgttgatgcata

SEQ ID NO: 1276041 - DNA, 15 bp, Homo sapiens
aaattgttgatgcat

SEQ ID NO: 1276042 - DNA, 15 bp, Homo sapiens
taaattgttgatgca

SEQ ID NO: 1276043 - DNA, 15 bp, Homo sapiens
ataaattgttgatgc

SEQ ID NO: 1276044 - DNA, 15 bp, Homo sapiens
aataaattgttgatg

SEQ ID NO: 1276045 - DNA, 15 bp, Homo sapiens
aaataaattgttgat

SEQ ID NO: 1276046 - DNA, 15 bp, Homo sapiens
taaataaattgttga

SEQ ID NO: 1276047 - DNA, 15 bp, Homo sapiens
ataaataaattgttg

SEQ ID NO: 1276048 - DNA, 15 bp, Homo sapiens
aataaataaattgtt

SEQ ID NO: 1276049 - DNA, 15 bp, Homo sapiens
gaataaataaattgt

SEQ ID NO: 1276050 - DNA, 15 bp, Homo sapiens
agaataaataaattg

SEQ ID NO: 1276051 - DNA, 15 bp, Homo sapiens
gagaataaataaatt

SEQ ID NO: 1276052 - DNA, 15 bp, Homo sapiens
tgagaataaataaat

SEQ ID NO: 1276053 - DNA, 15 bp, Homo sapiens
atgagaataaataaa

SEQ ID NO: 1276054 - DNA, 15 bp, Homo sapiens
aatgagaataaataa

SEQ ID NO: 1276055 - DNA, 15 bp, Homo sapiens
taatgagaataaata

SEQ ID NO: 1276056 - DNA, 15 bp, Homo sapiens
gtaatgagaataaat

SEQ ID NO: 1276057 - DNA, 15 bp, Homo sapiens
agtaatgagaataaa

SEQ ID NO: 1276058 - DNA, 15 bp, Homo sapiens
cagtaatgagaataa

SEQ ID NO: 1276059 - DNA, 15 bp, Homo sapiens
tcagtaatgagaata

SEQ ID NO: 1276060 - DNA, 15 bp, Homo sapiens
ctcagtaatgagaat

SEQ ID NO: 1276061 - DNA, 15 bp, Homo sapiens
actcagtaatgagaa

SEQ ID NO: 1276062 - DNA, 15 bp, Homo sapiens
tactcagtaatgaga

SEQ ID NO: 1276063 - DNA, 15 bp, Homo sapiens
ctactcagtaatgag

SEQ ID NO: 1276064 - DNA, 15 bp, Homo sapiens
actactcagtaatga

SEQ ID NO: 1276065 - DNA, 15 bp, Homo sapiens
tactactcagtaatg

SEQ ID NO: 1276066 - DNA, 15 bp, Homo sapiens
atactactcagtaat

SEQ ID NO: 1276067 - DNA, 15 bp, Homo sapiens
gatactactcagtaa

SEQ ID NO: 1276068 - DNA, 15 bp, Homo sapiens
agatactactcagta

SEQ ID NO: 1276069 - DNA, 15 bp, Homo sapiens
gagatactactcagt

SEQ ID NO: 1276070 - DNA, 15 bp, Homo sapiens
tgagatactactcag

SEQ ID NO: 1276071 - DNA, 15 bp, Homo sapiens
gtgagatactactca

SEQ ID NO: 1276072 - DNA, 15 bp, Homo sapiens
agtgagatactactc

SEQ ID NO: 1276073 - DNA, 15 bp, Homo sapiens
cagtgagatactact

SEQ ID NO: 1276074 - DNA, 15 bp, Homo sapiens
gcagtgagatactac

SEQ ID NO: 1276075 - DNA, 15 bp, Homo sapiens
tgcagtgagatacta

SEQ ID NO: 1276076 - DNA, 15 bp, Homo sapiens
atgcagtgagatact

SEQ ID NO: 1276077 - DNA, 15 bp, Homo sapiens
catgcagtgagatac

SEQ ID NO: 1276078 - DNA, 15 bp, Homo sapiens
ccatgcagtgagata

SEQ ID NO: 1276079 - DNA, 15 bp, Homo sapiens
cccatgcagtgagat

SEQ ID NO: 1276080 - DNA, 15 bp, Homo sapiens
tcccatgcagtgaga

SEQ ID NO: 1276081 - DNA, 15 bp, Homo sapiens
atcccatgcagtgag

SEQ ID NO: 1276082 - DNA, 15 bp, Homo sapiens
aatcccatgcagtga

SEQ ID NO: 1276083 - DNA, 15 bp, Homo sapiens
aaatcccatgcagtg

SEQ ID NO: 1276084 - DNA, 15 bp, Homo sapiens
caaatcccatgcagt

SEQ ID NO: 1276085 - DNA, 15 bp, Homo sapiens
acaaatcccatgcag

SEQ ID NO: 1276086 - DNA, 15 bp, Homo sapiens
aacaaatcccatgca

SEQ ID NO: 1276087 - DNA, 15 bp, Homo sapiens
aaacaaatcccatgc

SEQ ID NO: 1276088 - DNA, 15 bp, Homo sapiens
aaaacaaatcccatg

SEQ ID NO: 1276089 - DNA, 15 bp, Homo sapiens
aaaaacaaatcccat

SEQ ID NO: 1276090 - DNA, 15 bp, Homo sapiens
aaaaaacaaatccca

SEQ ID NO: 1276091 - DNA, 15 bp, Homo sapiens
aaaaaaacaaatccc

SEQ ID NO: 1276092 - DNA, 15 bp, Homo sapiens
aaaaaaaacaaatcc

SEQ ID NO: 1276093 - DNA, 15 bp, Homo sapiens
aaaaaaaaacaaatc

SEQ ID NO: 1276094 - DNA, 15 bp, Homo sapiens
aaaaaaaaaacaaat

SEQ ID NO: 1276095 - DNA, 15 bp, Homo sapiens
taaaaaaaaaaacaa

SEQ ID NO: 1276096 - DNA, 15 bp, Homo sapiens
ttaaaaaaaaaaaca

SEQ ID NO: 1276097 - DNA, 15 bp, Homo sapiens
cttaaaaaaaaaaac

SEQ ID NO: 1276098 - DNA, 15 bp, Homo sapiens
aacttaaaaaaaaaa

SEQ ID NO: 1276099 - DNA, 15 bp, Homo sapiens
gaacttaaaaaaaaa

SEQ ID NO: 1276100 - DNA, 15 bp, Homo sapiens
tgaacttaaaaaaaa

SEQ ID NO: 1276101 - DNA, 15 bp, Homo sapiens
ctgaacttaaaaaaa

SEQ ID NO: 1276102 - DNA, 15 bp, Homo sapiens
cctgaacttaaaaaa

SEQ ID NO: 1276103 - DNA, 15 bp, Homo sapiens
ccctgaacttaaaaa

SEQ ID NO: 1276104 - DNA, 15 bp, Homo sapiens
cccctgaacttaaaa

SEQ ID NO: 1276105 - DNA, 15 bp, Homo sapiens
acccctgaacttaaa

SEQ ID NO: 1276106 - DNA, 15 bp, Homo sapiens
tacccctgaacttaa

SEQ ID NO: 1276107 - DNA, 15 bp, Homo sapiens
gtacccctgaactta

SEQ ID NO: 1276108 - DNA, 15 bp, Homo sapiens
tgtacccctgaactt

SEQ ID NO: 1276109 - DNA, 15 bp, Homo sapiens
atgtacccctgaact

SEQ ID NO: 1276110 - DNA, 15 bp, Homo sapiens
catgtacccctgaac

SEQ ID NO: 1276111 - DNA, 15 bp, Homo sapiens
acatgtacccctgaa

SEQ ID NO: 1276112 - DNA, 15 bp, Homo sapiens
cacatgtacccctga

SEQ ID NO: 1276113 - DNA, 15 bp, Homo sapiens
gcacatgtacccctg

SEQ ID NO: 1276114 - DNA, 15 bp, Homo sapiens
tgcacatgtacccct

SEQ ID NO: 1276115 - DNA, 15 bp, Homo sapiens
ctgcacatgtacccc

SEQ ID NO: 1276116 - DNA, 15 bp, Homo sapiens
actgcacatgtaccc

SEQ ID NO: 1276117 - DNA, 15 bp, Homo sapiens
aactgcacatgtacc

SEQ ID NO: 1276118 - DNA, 15 bp, Homo sapiens
aaactgcacatgtac

SEQ ID NO: 1276119 - DNA, 15 bp, Homo sapiens
aaaactgcacatgta

SEQ ID NO: 1276120 - DNA, 15 bp, Homo sapiens
caaaactgcacatgt

SEQ ID NO: 1276121 - DNA, 15 bp, Homo sapiens
acaaaactgcacatg

SEQ ID NO: 1276122 - DNA, 15 bp, Homo sapiens
aacaaaactgcacat

SEQ ID NO: 1276123 - DNA, 15 bp, Homo sapiens
taacaaaactgcaca

SEQ ID NO: 1276124 - DNA, 15 bp, Homo sapiens
gtaacaaaactgcac

SEQ ID NO: 1276125 - DNA, 15 bp, Homo sapiens
tgtaacaaaactgca

SEQ ID NO: 1276126 - DNA, 15 bp, Homo sapiens
atgtaacaaaactgc

SEQ ID NO: 1276127 - DNA, 15 bp, Homo sapiens
tatgtaacaaaactg

SEQ ID NO: 1276128 - DNA, 15 bp, Homo sapiens
ctatgtaacaaaact

SEQ ID NO: 1276129 - DNA, 15 bp, Homo sapiens
cctatgtaacaaaac

SEQ ID NO: 1276130 - DNA, 15 bp, Homo sapiens
acctatgtaacaaaa

SEQ ID NO: 1276131 - DNA, 15 bp, Homo sapiens
ttacctatgtaacaa

SEQ ID NO: 1276132 - DNA, 15 bp, Homo sapiens
tttacctatgtaaca

SEQ ID NO: 1276133 - DNA, 15 bp, Homo sapiens
gtttacctatgtaac

SEQ ID NO: 1276134 - DNA, 15 bp, Homo sapiens
agtttacctatgtaa

SEQ ID NO: 1276135 - DNA, 15 bp, Homo sapiens
aagtttacctatgta

SEQ ID NO: 1276136 - DNA, 15 bp, Homo sapiens
taagtttacctatgt

SEQ ID NO: 1276137 - DNA, 15 bp, Homo sapiens
ataagtttacctatg

SEQ ID NO: 1276138 - DNA, 15 bp, Homo sapiens
cataagtttacctat

SEQ ID NO: 1276139 - DNA, 15 bp, Homo sapiens
acataagtttaccta

SEQ ID NO: 1276140 - DNA, 15 bp, Homo sapiens
gacataagtttacct

SEQ ID NO: 1276141 - DNA, 15 bp, Homo sapiens
tgacataagtttacc

SEQ ID NO: 1276142 - DNA, 15 bp, Homo sapiens
atgacataagtttac

SEQ ID NO: 1276143 - DNA, 15 bp, Homo sapiens
catgacataagttta

SEQ ID NO: 1276144 - DNA, 15 bp, Homo sapiens
ccatgacataagttt

SEQ ID NO: 1276145 - DNA, 15 bp, Homo sapiens
cccatgacataagtt

SEQ ID NO: 1276146 - DNA, 15 bp, Homo sapiens
ccccatgacataagt

SEQ ID NO: 1276147 - DNA, 15 bp, Homo sapiens
cccccatgacataag

SEQ ID NO: 1276148 - DNA, 15 bp, Homo sapiens
acccccatgacataa

SEQ ID NO: 1276149 - DNA, 15 bp, Homo sapiens
aacccccatgacata

SEQ ID NO: 1276150 - DNA, 15 bp, Homo sapiens
aaacccccatgacat

SEQ ID NO: 1276151 - DNA, 15 bp, Homo sapiens
caaacccccatgaca

SEQ ID NO: 1276152 - DNA, 15 bp, Homo sapiens
acaaacccccatgac

SEQ ID NO: 1276153 - DNA, 15 bp, Homo sapiens
aacaaacccccatga

SEQ ID NO: 1276154 - DNA, 15 bp, Homo sapiens
caacaaacccccatg

SEQ ID NO: 1276155 - DNA, 15 bp, Homo sapiens
acaacaaacccccat

SEQ ID NO: 1276156 - DNA, 15 bp, Homo sapiens
tacaacaaaccccca

SEQ ID NO: 1276157 - DNA, 15 bp, Homo sapiens
gtacaacaaaccccc

SEQ ID NO: 1276158 - DNA, 15 bp, Homo sapiens
tgtacaacaaacccc

SEQ ID NO: 1276159 - DNA, 15 bp, Homo sapiens
ctgtacaacaaaccc

SEQ ID NO: 1276160 - DNA, 15 bp, Homo sapiens
tctgtacaacaaacc

SEQ ID NO: 1276161 - DNA, 15 bp, Homo sapiens
atctgtacaacaaac

SEQ ID NO: 1276162 - DNA, 15 bp, Homo sapiens
aatctgtacaacaaa

SEQ ID NO: 1276163 - DNA, 15 bp, Homo sapiens
taatctgtacaacaa

SEQ ID NO: 1276164 - DNA, 15 bp, Homo sapiens
ataatctgtacaaca

SEQ ID NO: 1276165 - DNA, 15 bp, Homo sapiens
aataatctgtacaac

SEQ ID NO: 1276166 - DNA, 15 bp, Homo sapiens
aaataatctgtacaa

SEQ ID NO: 1276167 - DNA, 15 bp, Homo sapiens
gaaataatctgtaca

SEQ ID NO: 1276168 - DNA, 15 bp, Homo sapiens
tgaaataatctgtac

SEQ ID NO: 1276169 - DNA, 15 bp, Homo sapiens
atgaaataatctgta

SEQ ID NO: 1276170 - DNA, 15 bp, Homo sapiens
aatgaaataatctgt

SEQ ID NO: 1276171 - DNA, 15 bp, Homo sapiens
caatgaaataatctg

SEQ ID NO: 1276172 - DNA, 15 bp, Homo sapiens
gcaatgaaataatct

SEQ ID NO: 1276173 - DNA, 15 bp, Homo sapiens
ggcaatgaaataatc

SEQ ID NO: 1276174 - DNA, 15 bp, Homo sapiens
gggcaatgaaataat

SEQ ID NO: 1276175 - DNA, 15 bp, Homo sapiens
tgggcaatgaaataa

SEQ ID NO: 1276176 - DNA, 15 bp, Homo sapiens
ctgggcaatgaaata

SEQ ID NO: 1276177 - DNA, 15 bp, Homo sapiens
cctgggcaatgaaat

SEQ ID NO: 1276178 - DNA, 15 bp, Homo sapiens
tcctgggcaatgaaa

SEQ ID NO: 1276179 - DNA, 15 bp, Homo sapiens
ttcctgggcaatgaa

SEQ ID NO: 1276180 - DNA, 15 bp, Homo sapiens
attcctgggcaatga

SEQ ID NO: 1276181 - DNA, 15 bp, Homo sapiens
cattcctgggcaatg

SEQ ID NO: 1276182 - DNA, 15 bp, Homo sapiens
tcattcctgggcaat

SEQ ID NO: 1276183 - DNA, 15 bp, Homo sapiens
ttcattcctgggcaa

SEQ ID NO: 1276184 - DNA, 15 bp, Homo sapiens
cttcattcctgggca

SEQ ID NO: 1276185 - DNA, 15 bp, Homo sapiens
acttcattcctgggc

SEQ ID NO: 1276186 - DNA, 15 bp, Homo sapiens
gacttcattcctggg

SEQ ID NO: 1276187 - DNA, 15 bp, Homo sapiens
ggacttcattcctgg

SEQ ID NO: 1276188 - DNA, 15 bp, Homo sapiens
tggacttcattcctg

SEQ ID NO: 1276189 - DNA, 15 bp, Homo sapiens
ttggacttcattcct

SEQ ID NO: 1276190 - DNA, 15 bp, Homo sapiens
attggacttcattcc

SEQ ID NO: 1276191 - DNA, 15 bp, Homo sapiens
tattggacttcattc

SEQ ID NO: 1276192 - DNA, 15 bp, Homo sapiens
gtattggacttcatt

SEQ ID NO: 1276193 - DNA, 15 bp, Homo sapiens
ggtattggacttcat

SEQ ID NO: 1276194 - DNA, 15 bp, Homo sapiens
aggtattggacttca

SEQ ID NO: 1276195 - DNA, 15 bp, Homo sapiens
taggtattggacttc

SEQ ID NO: 1276196 - DNA, 15 bp, Homo sapiens
gtaggtattggactt

SEQ ID NO: 1276197 - DNA, 15 bp, Homo sapiens
agtaggtattggact

SEQ ID NO: 1276198 - DNA, 15 bp, Homo sapiens
tagtaggtattggac

SEQ ID NO: 1276199 - DNA, 15 bp, Homo sapiens
ctagtaggtattgga

SEQ ID NO: 1276200 - DNA, 15 bp, Homo sapiens
actagtaggtattgg

SEQ ID NO: 1276201 - DNA, 15 bp, Homo sapiens
aactagtaggtattg

SEQ ID NO: 1276202 - DNA, 15 bp, Homo sapiens
caactagtaggtatt

SEQ ID NO: 1276203 - DNA, 15 bp, Homo sapiens
acaactagtaggtat

SEQ ID NO: 1276204 - DNA, 15 bp, Homo sapiens
aacaactagtaggta

SEQ ID NO: 1276205 - DNA, 15 bp, Homo sapiens
aaacaactagtaggt

SEQ ID NO: 1276206 - DNA, 15 bp, Homo sapiens
caaacaactagtagg

SEQ ID NO: 1276207 - DNA, 15 bp, Homo sapiens
acaaacaactagtag

SEQ ID NO: 1276208 - DNA, 15 bp, Homo sapiens
gacaaacaactagta

SEQ ID NO: 1276209 - DNA, 15 bp, Homo sapiens
ggacaaacaactagt

SEQ ID NO: 1276210 - DNA, 15 bp, Homo sapiens
aggacaaacaactag

SEQ ID NO: 1276211 - DNA, 15 bp, Homo sapiens
taggacaaacaacta

SEQ ID NO: 1276212 - DNA, 15 bp, Homo sapiens
ttaggacaaacaact

SEQ ID NO: 1276213 - DNA, 15 bp, Homo sapiens
attaggacaaacaac

SEQ ID NO: 1276214 - DNA, 15 bp, Homo sapiens
gattaggacaaacaa

SEQ ID NO: 1276215 - DNA, 15 bp, Homo sapiens
ggattaggacaaaca

SEQ ID NO: 1276216 - DNA, 15 bp, Homo sapiens
cggattaggacaaac

SEQ ID NO: 1276217 - DNA, 15 bp, Homo sapiens
gcggattaggacaaa

SEQ ID NO: 1276218 - DNA, 15 bp, Homo sapiens
agcggattaggacaa

SEQ ID NO: 1276219 - DNA, 15 bp, Homo sapiens
aagcggattaggaca

SEQ ID NO: 1276220 - DNA, 15 bp, Homo sapiens
gaagcggattaggac

SEQ ID NO: 1276221 - DNA, 15 bp, Homo sapiens
ggaagcggattagga

SEQ ID NO: 1276222 - DNA, 15 bp, Homo sapiens
aggaagcggattagg

SEQ ID NO: 1276223 - DNA, 15 bp, Homo sapiens
gaggaagcggattag

SEQ ID NO: 1276224 - DNA, 15 bp, Homo sapiens
agaggaagcggatta

SEQ ID NO: 1276225 - DNA, 15 bp, Homo sapiens
gagaggaagcggatt

SEQ ID NO: 1276226 - DNA, 15 bp, Homo sapiens
ggagaggaagcggat

SEQ ID NO: 1276227 - DNA, 15 bp, Homo sapiens
gggagaggaagcgga

SEQ ID NO: 1276228 - DNA, 15 bp, Homo sapiens
tgggagaggaagcgg

SEQ ID NO: 1276229 - DNA, 15 bp, Homo sapiens
gtgggagaggaagcg

SEQ ID NO: 1276230 - DNA, 15 bp, Homo sapiens
ggtgggagaggaagc

SEQ ID NO: 1276231 - DNA, 15 bp, Homo sapiens
gggtgggagaggaag

SEQ ID NO: 1276232 - DNA, 15 bp, Homo sapiens
agggtgggagaggaa

SEQ ID NO: 1276233 - DNA, 15 bp, Homo sapiens
gagggtgggagagga

SEQ ID NO: 1276234 - DNA, 15 bp, Homo sapiens
ggagggtgggagagg

SEQ ID NO: 1276235 - DNA, 15 bp, Homo sapiens
tggagggtgggagag

SEQ ID NO: 1276236 - DNA, 15 bp, Homo sapiens
gtggagggtgggaga

SEQ ID NO: 1276237 - DNA, 15 bp, Homo sapiens
ggtggagggtgggag

SEQ ID NO: 1276238 - DNA, 15 bp, Homo sapiens
gggtggagggtggga

SEQ ID NO: 1276239 - DNA, 15 bp, Homo sapiens
agggtggagggtggg

SEQ ID NO: 1276240 - DNA, 15 bp, Homo sapiens
gagggtggagggtgg

SEQ ID NO: 1276241 - DNA, 15 bp, Homo sapiens
agagggtggagggtg

SEQ ID NO: 1276242 - DNA, 15 bp, Homo sapiens
cagagggtggagggt

SEQ ID NO: 1276243 - DNA, 15 bp, Homo sapiens
tcagagggtggaggg

SEQ ID NO: 1276244 - DNA, 15 bp, Homo sapiens
atcagagggtggagg

SEQ ID NO: 1276245 - DNA, 15 bp, Homo sapiens
tatcagagggtggag

SEQ ID NO: 1276246 - DNA, 15 bp, Homo sapiens
ctatcagagggtgga

SEQ ID NO: 1276247 - DNA, 15 bp, Homo sapiens
cctatcagagggtgg

SEQ ID NO: 1276248 - DNA, 15 bp, Homo sapiens
acctatcagagggtg

SEQ ID NO: 1276249 - DNA, 15 bp, Homo sapiens
gacctatcagagggt

SEQ ID NO: 1276250 - DNA, 15 bp, Homo sapiens
ggacctatcagaggg

SEQ ID NO: 1276251 - DNA, 15 bp, Homo sapiens
gggacctatcagagg

SEQ ID NO: 1276252 - DNA, 15 bp, Homo sapiens
tgggacctatcagag

SEQ ID NO: 1276253 - DNA, 15 bp, Homo sapiens
ctgggacctatcaga

SEQ ID NO: 1276254 - DNA, 15 bp, Homo sapiens
actgggacctatcag

SEQ ID NO: 1276255 - DNA, 15 bp, Homo sapiens
cactgggacctatca

SEQ ID NO: 1276256 - DNA, 15 bp, Homo sapiens
acactgggacctatc

SEQ ID NO: 1276257 - DNA, 15 bp, Homo sapiens
cacactgggacctat

SEQ ID NO: 1276258 - DNA, 15 bp, Homo sapiens
acacactgggaccta

SEQ ID NO: 1276259 - DNA, 15 bp, Homo sapiens
gacacactgggacct

SEQ ID NO: 1276260 - DNA, 15 bp, Homo sapiens
agacacactgggacc

SEQ ID NO: 1276261 - DNA, 15 bp, Homo sapiens
aagacacactgggac

SEQ ID NO: 1276262 - DNA, 15 bp, Homo sapiens
caagacacactggga

SEQ ID NO: 1276263 - DNA, 15 bp, Homo sapiens
acaagacacactggg

SEQ ID NO: 1276264 - DNA, 15 bp, Homo sapiens
aacaagacacactgg

SEQ ID NO: 1276265 - DNA, 15 bp, Homo sapiens
gaacaagacacactg

SEQ ID NO: 1276266 - DNA, 15 bp, Homo sapiens
ggaacaagacacact

SEQ ID NO: 1276267 - DNA, 15 bp, Homo sapiens
gggaacaagacacac

SEQ ID NO: 1276268 - DNA, 15 bp, Homo sapiens
ggggaacaagacaca

SEQ ID NO: 1276269 - DNA, 15 bp, Homo sapiens
aggggaacaagacac

SEQ ID NO: 1276270 - DNA, 15 bp, Homo sapiens
caggggaacaagaca

SEQ ID NO: 1276271 - DNA, 15 bp, Homo sapiens
acaggggaacaagac

SEQ ID NO: 1276272 - DNA, 15 bp, Homo sapiens
cacaggggaacaaga

SEQ ID NO: 1276273 - DNA, 15 bp, Homo sapiens
acacaggggaacaag

SEQ ID NO: 1276274 - DNA, 15 bp, Homo sapiens
cacacaggggaacaa

SEQ ID NO: 1276275 - DNA, 15 bp, Homo sapiens
acacacaggggaaca

SEQ ID NO: 1276276 - DNA, 15 bp, Homo sapiens
cacacacaggggaac

SEQ ID NO: 1276277 - DNA, 15 bp, Homo sapiens
acacacacaggggaa

SEQ ID NO: 1276278 - DNA, 15 bp, Homo sapiens
gacacacacagggga

SEQ ID NO: 1276279 - DNA, 15 bp, Homo sapiens
ggacacacacagggg

SEQ ID NO: 1276280 - DNA, 15 bp, Homo sapiens
tggacacacacaggg

SEQ ID NO: 1276281 - DNA, 15 bp, Homo sapiens
atggacacacacagg

SEQ ID NO: 1276282 - DNA, 15 bp, Homo sapiens
catggacacacacag

SEQ ID NO: 1276283 - DNA, 15 bp, Homo sapiens
acatggacacacaca

SEQ ID NO: 1276284 - DNA, 15 bp, Homo sapiens
cacatggacacacac

SEQ ID NO: 1276285 - DNA, 15 bp, Homo sapiens
acacatggacacaca

SEQ ID NO: 1276286 - DNA, 15 bp, Homo sapiens
aacacatggacacac

SEQ ID NO: 1276287 - DNA, 15 bp, Homo sapiens
taatgagaacacatg

SEQ ID NO: 1276288 - DNA, 15 bp, Homo sapiens
ataatgagaacacat

SEQ ID NO: 1276289 - DNA, 15 bp, Homo sapiens
gataatgagaacaca

SEQ ID NO: 1276290 - DNA, 15 bp, Homo sapiens
agataatgagaacac

SEQ ID NO: 1276291 - DNA, 15 bp, Homo sapiens
tagataatgagaaca

SEQ ID NO: 1276292 - DNA, 15 bp, Homo sapiens
ctagataatgagaac

SEQ ID NO: 1276293 - DNA, 15 bp, Homo sapiens
gctagataatgagaa

SEQ ID NO: 1276294 - DNA, 15 bp, Homo sapiens
agctagataatgaga

SEQ ID NO: 1276295 - DNA, 15 bp, Homo sapiens
gagctagataatgag

SEQ ID NO: 1276296 - DNA, 15 bp, Homo sapiens
ggagctagataatga

SEQ ID NO: 1276297 - DNA, 15 bp, Homo sapiens
aggagctagataatg

SEQ ID NO: 1276298 - DNA, 15 bp, Homo sapiens
taggagctagataat

SEQ ID NO: 1276299 - DNA, 15 bp, Homo sapiens
gtaggagctagataa

SEQ ID NO: 1276300 - DNA, 15 bp, Homo sapiens
agtaggagctagata

SEQ ID NO: 1276301 - DNA, 15 bp, Homo sapiens
aagtaggagctagat

SEQ ID NO: 1276302 - DNA, 15 bp, Homo sapiens
taagtaggagctaga

SEQ ID NO: 1276303 - DNA, 15 bp, Homo sapiens
ataagtaggagctag

SEQ ID NO: 1276304 - DNA, 15 bp, Homo sapiens
tataagtaggagcta

SEQ ID NO: 1276305 - DNA, 15 bp, Homo sapiens
ttataagtaggagct

SEQ ID NO: 1276306 - DNA, 15 bp, Homo sapiens
cttataagtaggagc

SEQ ID NO: 1276307 - DNA, 15 bp, Homo sapiens
acttataagtaggag

SEQ ID NO: 1276308 - DNA, 15 bp, Homo sapiens
cacttataagtagga

SEQ ID NO: 1276309 - DNA, 15 bp, Homo sapiens
tcacttataagtagg

SEQ ID NO: 1276310 - DNA, 15 bp, Homo sapiens
ctcacttataagtag

SEQ ID NO: 1276311 - DNA, 15 bp, Homo sapiens
tctcacttataagta

SEQ ID NO: 1276312 - DNA, 15 bp, Homo sapiens
gctgcatgttctcac

SEQ ID NO: 1276313 - DNA, 15 bp, Homo sapiens
tgctgcatgttctca

SEQ ID NO: 1276314 - DNA, 15 bp, Homo sapiens
atgctgcatgttctc

SEQ ID NO: 1276315 - DNA, 15 bp, Homo sapiens
aatgctgcatgttct

SEQ ID NO: 1276316 - DNA, 15 bp, Homo sapiens
aaatgctgcatgttc

SEQ ID NO: 1276317 - DNA, 15 bp, Homo sapiens
caaatgctgcatgtt

SEQ ID NO: 1276318 - DNA, 15 bp, Homo sapiens
ccaaatgctgcatgt

SEQ ID NO: 1276319 - DNA, 15 bp, Homo sapiens
accaaatgctgcatg

SEQ ID NO: 1276320 - DNA, 15 bp, Homo sapiens
aaccaaatgctgcat

SEQ ID NO: 1276321 - DNA, 15 bp, Homo sapiens
aaaccaaatgctgca

SEQ ID NO: 1276322 - DNA, 15 bp, Homo sapiens
aaaaccaaatgctgc

SEQ ID NO: 1276323 - DNA, 15 bp, Homo sapiens
gaaaaccaaatgctg

SEQ ID NO: 1276324 - DNA, 15 bp, Homo sapiens
agaaaaccaaatgct

SEQ ID NO: 1276325 - DNA, 15 bp, Homo sapiens
cagaaaaccaaatgc

SEQ ID NO: 1276326 - DNA, 15 bp, Homo sapiens
acagaaaaccaaatg

SEQ ID NO: 1276327 - DNA, 15 bp, Homo sapiens
aacagaaaaccaaat

SEQ ID NO: 1276328 - DNA, 15 bp, Homo sapiens
tagcaaactaacgca

SEQ ID NO: 1276329 - DNA, 15 bp, Homo sapiens
ttagcaaactaacgc

SEQ ID NO: 1276330 - DNA, 15 bp, Homo sapiens
cttagcaaactaacg

SEQ ID NO: 1276331 - DNA, 15 bp, Homo sapiens
ccttagcaaactaac

SEQ ID NO: 1276332 - DNA, 15 bp, Homo sapiens
tccttagcaaactaa

SEQ ID NO: 1276333 - DNA, 15 bp, Homo sapiens
atccttagcaaacta

SEQ ID NO: 1276334 - DNA, 15 bp, Homo sapiens
tatccttagcaaact

SEQ ID NO: 1276335 - DNA, 15 bp, Homo sapiens
ttatccttagcaaac

SEQ ID NO: 1276336 - DNA, 15 bp, Homo sapiens
attatccttagcaaa

SEQ ID NO: 1276337 - DNA, 15 bp, Homo sapiens
cattatccttagcaa

SEQ ID NO: 1276338 - DNA, 15 bp, Homo sapiens
ccattatccttagca

SEQ ID NO: 1276339 - DNA, 15 bp, Homo sapiens
gccattatccttagc

SEQ ID NO: 1276340 - DNA, 15 bp, Homo sapiens
ggccattatccttag

SEQ ID NO: 1276341 - DNA, 15 bp, Homo sapiens
aggccattatcctta

SEQ ID NO: 1276342 - DNA, 15 bp, Homo sapiens
gaggccattatcctt

SEQ ID NO: 1276343 - DNA, 15 bp, Homo sapiens
ggaggccattatcct

SEQ ID NO: 1276344 - DNA, 15 bp, Homo sapiens
tggaggccattatcc

SEQ ID NO: 1276345 - DNA, 15 bp, Homo sapiens
ctggaggccattatc

SEQ ID NO: 1276346 - DNA, 15 bp, Homo sapiens
gctggaggccattat

SEQ ID NO: 1276347 - DNA, 15 bp, Homo sapiens
agctggaggccatta

SEQ ID NO: 1276348 - DNA, 15 bp, Homo sapiens
gagctggaggccatt

SEQ ID NO: 1276349 - DNA, 15 bp, Homo sapiens
agagctggaggccat

SEQ ID NO: 1276350 - DNA, 15 bp, Homo sapiens
tagagctggaggcca

SEQ ID NO: 1276351 - DNA, 15 bp, Homo sapiens
atagagctggaggcc

SEQ ID NO: 1276352 - DNA, 15 bp, Homo sapiens
gatagagctggaggc

SEQ ID NO: 1276353 - DNA, 15 bp, Homo sapiens
ggatagagctggagg

SEQ ID NO: 1276354 - DNA, 15 bp, Homo sapiens
tggatagagctggag

SEQ ID NO: 1276355 - DNA, 15 bp, Homo sapiens
atggatagagctgga

SEQ ID NO: 1276356 - DNA, 15 bp, Homo sapiens
catggatagagctgg

SEQ ID NO: 1276357 - DNA, 15 bp, Homo sapiens
acatggatagagctg

SEQ ID NO: 1276358 - DNA, 15 bp, Homo sapiens
gacatggatagagct

SEQ ID NO: 1276359 - DNA, 15 bp, Homo sapiens
ggacatggatagagc

SEQ ID NO: 1276360 - DNA, 15 bp, Homo sapiens
gggacatggatagag

SEQ ID NO: 1276361 - DNA, 15 bp, Homo sapiens
agggacatggataga

SEQ ID NO: 1276362 - DNA, 15 bp, Homo sapiens
cagggacatggatag

SEQ ID NO: 1276363 - DNA, 15 bp, Homo sapiens
tcagggacatggata

SEQ ID NO: 1276364 - DNA, 15 bp, Homo sapiens
ttcagggacatggat

SEQ ID NO: 1276365 - DNA, 15 bp, Homo sapiens
tttcagggacatgga

SEQ ID NO: 1276366 - DNA, 15 bp, Homo sapiens
ttttcagggacatgg

SEQ ID NO: 1276367 - DNA, 15 bp, Homo sapiens
tttttcagggacatg

SEQ ID NO: 1276368 - DNA, 15 bp, Homo sapiens
gtttttcagggacat

SEQ ID NO: 1276369 - DNA, 15 bp, Homo sapiens
tgtttttcagggaca

SEQ ID NO: 1276370 - DNA, 15 bp, Homo sapiens
atgtttttcagggac

SEQ ID NO: 1276371 - DNA, 15 bp, Homo sapiens
aatgtttttcaggga

SEQ ID NO: 1276372 - DNA, 15 bp, Homo sapiens
caatgtttttcaggg

SEQ ID NO: 1276373 - DNA, 15 bp, Homo sapiens
gcaatgtttttcagg

SEQ ID NO: 1276374 - DNA, 15 bp, Homo sapiens
agcaatgtttttcag

SEQ ID NO: 1276375 - DNA, 15 bp, Homo sapiens
gagcaatgtttttca

SEQ ID NO: 1276376 - DNA, 15 bp, Homo sapiens
agagcaatgtttttc

SEQ ID NO: 1276377 - DNA, 15 bp, Homo sapiens
aagagcaatgttttt

SEQ ID NO: 1276378 - DNA, 15 bp, Homo sapiens
aaagagcaatgtttt

SEQ ID NO: 1276379 - DNA, 15 bp, Homo sapiens
aaaagagcaatgttt

SEQ ID NO: 1276380 - DNA, 15 bp, Homo sapiens
aaaaagagcaatgtt

SEQ ID NO: 1276381 - DNA, 15 bp, Homo sapiens
gaaaaagagcaatgt

SEQ ID NO: 1276382 - DNA, 15 bp, Homo sapiens
agaaaaagagcaatg

SEQ ID NO: 1276383 - DNA, 15 bp, Homo sapiens
tagaaaaagagcaat

SEQ ID NO: 1276384 - DNA, 15 bp, Homo sapiens
atagaaaaagagcaa

SEQ ID NO: 1276385 - DNA, 15 bp, Homo sapiens
aatagaaaaagagca

SEQ ID NO: 1276386 - DNA, 15 bp, Homo sapiens
gaatagaaaaagagc

SEQ ID NO: 1276387 - DNA, 15 bp, Homo sapiens
ggaatagaaaaagag

SEQ ID NO: 1276388 - DNA, 15 bp, Homo sapiens
aggaatagaaaaaga

SEQ ID NO: 1276389 - DNA, 15 bp, Homo sapiens
taggaatagaaaaag

SEQ ID NO: 1276390 - DNA, 15 bp, Homo sapiens
ctaggaatagaaaaa

SEQ ID NO: 1276391 - DNA, 15 bp, Homo sapiens
actaggaatagaaaa

SEQ ID NO: 1276392 - DNA, 15 bp, Homo sapiens
aactaggaatagaaa

SEQ ID NO: 1276393 - DNA, 15 bp, Homo sapiens
taactaggaatagaa

SEQ ID NO: 1276394 - DNA, 15 bp, Homo sapiens
ataactaggaataga

SEQ ID NO: 1276395 - DNA, 15 bp, Homo sapiens
tataactaggaatag

SEQ ID NO: 1276396 - DNA, 15 bp, Homo sapiens
atataactaggaata

SEQ ID NO: 1276397 - DNA, 15 bp, Homo sapiens
gatataactaggaat

SEQ ID NO: 1276398 - DNA, 15 bp, Homo sapiens
ggatataactaggaa

SEQ ID NO: 1276399 - DNA, 15 bp, Homo sapiens
tggatataactagga

SEQ ID NO: 1276400 - DNA, 15 bp, Homo sapiens
atggatataactagg

SEQ ID NO: 1276401 - DNA, 15 bp, Homo sapiens
tatggatataactag

SEQ ID NO: 1276402 - DNA, 15 bp, Homo sapiens
ctatggatataacta

SEQ ID NO: 1276403 - DNA, 15 bp, Homo sapiens
tctatggatataact

SEQ ID NO: 1276404 - DNA, 15 bp, Homo sapiens
ttctatggatataac

SEQ ID NO: 1276405 - DNA, 15 bp, Homo sapiens
tttctatggatataa

SEQ ID NO: 1276406 - DNA, 15 bp, Homo sapiens
atttctatggatata

SEQ ID NO: 1276407 - DNA, 15 bp, Homo sapiens
catttctatggatat

SEQ ID NO: 1276408 - DNA, 15 bp, Homo sapiens
tcatttctatggata

SEQ ID NO: 1276409 - DNA, 15 bp, Homo sapiens
gtcatttctatggat

SEQ ID NO: 1276410 - DNA, 15 bp, Homo sapiens
ggtcatttctatgga

SEQ ID NO: 1276411 - DNA, 15 bp, Homo sapiens
tggtcatttctatgg

SEQ ID NO: 1276412 - DNA, 15 bp, Homo sapiens
atggtcatttctatg

SEQ ID NO: 1276413 - DNA, 15 bp, Homo sapiens
aatggtcatttctat

SEQ ID NO: 1276414 - DNA, 15 bp, Homo sapiens
caatggtcatttcta

SEQ ID NO: 1276415 - DNA, 15 bp, Homo sapiens
tcaatggtcatttct

SEQ ID NO: 1276416 - DNA, 15 bp, Homo sapiens
atcaatggtcatttc

SEQ ID NO: 1276417 - DNA, 15 bp, Homo sapiens
tatcaatggtcattt

SEQ ID NO: 1276418 - DNA, 15 bp, Homo sapiens
ctatcaatggtcatt

SEQ ID NO: 1276419 - DNA, 15 bp, Homo sapiens
actatcaatggtcat

SEQ ID NO: 1276420 - DNA, 15 bp, Homo sapiens
aactatcaatggtca

SEQ ID NO: 1276421 - DNA, 15 bp, Homo sapiens
aaactatcaatggtc

SEQ ID NO: 1276422 - DNA, 15 bp, Homo sapiens
aaaactatcaatggt

SEQ ID NO: 1276423 - DNA, 15 bp, Homo sapiens
aaaaactatcaatgg

SEQ ID NO: 1276424 - DNA, 15 bp, Homo sapiens
caaaaactatcaatg

SEQ ID NO: 1276425 - DNA, 15 bp, Homo sapiens
gcaaaaactatcaat

SEQ ID NO: 1276426 - DNA, 15 bp, Homo sapiens
agcaaaaactatcaa

SEQ ID NO: 1276427 - DNA, 15 bp, Homo sapiens
aagcaaaaactatca

SEQ ID NO: 1276428 - DNA, 15 bp, Homo sapiens
taagcaaaaactatc

SEQ ID NO: 1276429 - DNA, 15 bp, Homo sapiens
gtaagcaaaaactat

SEQ ID NO: 1276430 - DNA, 15 bp, Homo sapiens
agtaagcaaaaacta

SEQ ID NO: 1276431 - DNA, 15 bp, Homo sapiens
gagtaagcaaaaact

SEQ ID NO: 1276432 - DNA, 15 bp, Homo sapiens
agagtaagcaaaaac

SEQ ID NO: 1276433 - DNA, 15 bp, Homo sapiens
cagagtaagcaaaaa

SEQ ID NO: 1276434 - DNA, 15 bp, Homo sapiens
acagagtaagcaaaa

SEQ ID NO: 1276435 - DNA, 15 bp, Homo sapiens
gacagagtaagcaaa

SEQ ID NO: 1276436 - DNA, 15 bp, Homo sapiens
ggacagagtaagcaa

SEQ ID NO: 1276437 - DNA, 15 bp, Homo sapiens
gggacagagtaagca

SEQ ID NO: 1276438 - DNA, 15 bp, Homo sapiens
agggacagagtaagc

SEQ ID NO: 1276439 - DNA, 15 bp, Homo sapiens
gagggacagagtaag

SEQ ID NO: 1276440 - DNA, 15 bp, Homo sapiens
ggagggacagagtaa

SEQ ID NO: 1276441 - DNA, 15 bp, Homo sapiens
tggagggacagagta

SEQ ID NO: 1276442 - DNA, 15 bp, Homo sapiens
ctggagggacagagt

SEQ ID NO: 1276443 - DNA, 15 bp, Homo sapiens
actggagggacagag

SEQ ID NO: 1276444 - DNA, 15 bp, Homo sapiens
aactggagggacaga

SEQ ID NO: 1276445 - DNA, 15 bp, Homo sapiens
aaactggagggacag

SEQ ID NO: 1276446 - DNA, 15 bp, Homo sapiens
aaaactggagggaca

SEQ ID NO: 1276447 - DNA, 15 bp, Homo sapiens
aaaaactggagggac

SEQ ID NO: 1276448 - DNA, 15 bp, Homo sapiens
gaaaaactggaggga

SEQ ID NO: 1276449 - DNA, 15 bp, Homo sapiens
ggaaaaactggaggg

SEQ ID NO: 1276450 - DNA, 15 bp, Homo sapiens
aggaaaaactggagg

SEQ ID NO: 1276451 - DNA, 15 bp, Homo sapiens
aaggaaaaactggag

SEQ ID NO: 1276452 - DNA, 15 bp, Homo sapiens
gaaggaaaaactgga

SEQ ID NO: 1276453 - DNA, 15 bp, Homo sapiens
ggaaggaaaaactgg

SEQ ID NO: 1276454 - DNA, 15 bp, Homo sapiens
aggaaggaaaaactg

SEQ ID NO: 1276455 - DNA, 15 bp, Homo sapiens
gaggaaggaaaaact

SEQ ID NO: 1276456 - DNA, 15 bp, Homo sapiens
ggaggaaggaaaaac

SEQ ID NO: 1276457 - DNA, 15 bp, Homo sapiens
tggaggaaggaaaaa

SEQ ID NO: 1276458 - DNA, 15 bp, Homo sapiens
ctggaggaaggaaaa

SEQ ID NO: 1276459 - DNA, 15 bp, Homo sapiens
gctggaggaaggaaa

SEQ ID NO: 1276460 - DNA, 15 bp, Homo sapiens
tgctggaggaaggaa

SEQ ID NO: 1276461 - DNA, 15 bp, Homo sapiens
atgctggaggaagga

SEQ ID NO: 1276462 - DNA, 15 bp, Homo sapiens
tatgctggaggaagg

SEQ ID NO: 1276463 - DNA, 15 bp, Homo sapiens
atatgctggaggaag

SEQ ID NO: 1276464 - DNA, 15 bp, Homo sapiens
tatatgctggaggaa

SEQ ID NO: 1276465 - DNA, 15 bp, Homo sapiens
gtatatgctggagga

SEQ ID NO: 1276466 - DNA, 15 bp, Homo sapiens
tgtatatgctggagg

SEQ ID NO: 1276467 - DNA, 15 bp, Homo sapiens
gtgtatatgctggag

SEQ ID NO: 1276468 - DNA, 15 bp, Homo sapiens
tgtgtatatgctgga

SEQ ID NO: 1276469 - DNA, 15 bp, Homo sapiens
ttgtgtatatgctgg

SEQ ID NO: 1276470 - DNA, 15 bp, Homo sapiens
cttgtgtatatgctg

SEQ ID NO: 1276471 - DNA, 15 bp, Homo sapiens
ccttgtgtatatgct

SEQ ID NO: 1276472 - DNA, 15 bp, Homo sapiens
tccttgtgtatatgc

SEQ ID NO: 1276473 - DNA, 15 bp, Homo sapiens
atccttgtgtatatg

SEQ ID NO: 1276474 - DNA, 15 bp, Homo sapiens
aatccttgtgtatat

SEQ ID NO: 1276475 - DNA, 15 bp, Homo sapiens
aaatccttgtgtata

SEQ ID NO: 1276476 - DNA, 15 bp, Homo sapiens
aaaatccttgtgtat

SEQ ID NO: 1276477 - DNA, 15 bp, Homo sapiens
taaaatccttgtgta

SEQ ID NO: 1276478 - DNA, 15 bp, Homo sapiens
ttaaaatccttgtgt

SEQ ID NO: 1276479 - DNA, 15 bp, Homo sapiens
attaaaatccttgtg

SEQ ID NO: 1276480 - DNA, 15 bp, Homo sapiens
aattaaaatccttgt

SEQ ID NO: 1276481 - DNA, 15 bp, Homo sapiens
aaattaaaatccttg

SEQ ID NO: 1276482 - DNA, 15 bp, Homo sapiens
aaaattaaaatcctt

SEQ ID NO: 1276483 - DNA, 15 bp, Homo sapiens
taaaattaaaatcct

SEQ ID NO: 1276484 - DNA, 15 bp, Homo sapiens
gtaaaattaaaatcc

SEQ ID NO: 1276485 - DNA, 15 bp, Homo sapiens
ggtaaaattaaaatc

SEQ ID NO: 1276486 - DNA, 15 bp, Homo sapiens
gggtaaaattaaaat

SEQ ID NO: 1276487 - DNA, 15 bp, Homo sapiens
tgggtaaaattaaaa

SEQ ID NO: 1276488 - DNA, 15 bp, Homo sapiens
ttgggtaaaattaaa

SEQ ID NO: 1276489 - DNA, 15 bp, Homo sapiens
attgggtaaaattaa

SEQ ID NO: 1276490 - DNA, 15 bp, Homo sapiens
aattgggtaaaatta

SEQ ID NO: 1276491 - DNA, 15 bp, Homo sapiens
caattgggtaaaatt

SEQ ID NO: 1276492 - DNA, 15 bp, Homo sapiens
tcaattgggtaaaat

SEQ ID NO: 1276493 - DNA, 15 bp, Homo sapiens
ttcaattgggtaaaa

SEQ ID NO: 1276494 - DNA, 15 bp, Homo sapiens
cttcaattgggtaaa

SEQ ID NO: 1276495 - DNA, 15 bp, Homo sapiens
acttcaattgggtaa

SEQ ID NO: 1276496 - DNA, 15 bp, Homo sapiens
gacttcaattgggta

SEQ ID NO: 1276497 - DNA, 15 bp, Homo sapiens
agacttcaattgggt

SEQ ID NO: 1276498 - DNA, 15 bp, Homo sapiens
aagacttcaattggg

SEQ ID NO: 1276499 - DNA, 15 bp, Homo sapiens
taagacttcaattgg

SEQ ID NO: 1276500 - DNA, 15 bp, Homo sapiens
gtaagacttcaattg

SEQ ID NO: 1276501 - DNA, 15 bp, Homo sapiens
agtaagacttcaatt

SEQ ID NO: 1276502 - DNA, 15 bp, Homo sapiens
aagtaagacttcaat

SEQ ID NO: 1276503 - DNA, 15 bp, Homo sapiens
taagtaagacttcaa

SEQ ID NO: 1276504 - DNA, 15 bp, Homo sapiens
ataagtaagacttca

SEQ ID NO: 1276505 - DNA, 15 bp, Homo sapiens
gataagtaagacttc

SEQ ID NO: 1276506 - DNA, 15 bp, Homo sapiens
agataagtaagactt

SEQ ID NO: 1276507 - DNA, 15 bp, Homo sapiens
tagataagtaagact

SEQ ID NO: 1276508 - DNA, 15 bp, Homo sapiens
gtagataagtaagac

SEQ ID NO: 1276509 - DNA, 15 bp, Homo sapiens
tgtagataagtaaga

SEQ ID NO: 1276510 - DNA, 15 bp, Homo sapiens
gtgtagataagtaag

SEQ ID NO: 1276511 - DNA, 15 bp, Homo sapiens
ggtgtagataagtaa

SEQ ID NO: 1276512 - DNA, 15 bp, Homo sapiens
aggtgtagataagta

SEQ ID NO: 1276513 - DNA, 15 bp, Homo sapiens
aaggtgtagataagt

SEQ ID NO: 1276514 - DNA, 15 bp, Homo sapiens
aaaggtgtagataag

SEQ ID NO: 1276515 - DNA, 15 bp, Homo sapiens
aaaaggtgtagataa

SEQ ID NO: 1276516 - DNA, 15 bp, Homo sapiens
taaaaggtgtagata

SEQ ID NO: 1276517 - DNA, 15 bp, Homo sapiens
ttaaaaggtgtagat

SEQ ID NO: 1276518 - DNA, 15 bp, Homo sapiens
gttaaaaggtgtaga

SEQ ID NO: 1276519 - DNA, 15 bp, Homo sapiens
tgttaaaaggtgtag

SEQ ID NO: 1276520 - DNA, 15 bp, Homo sapiens
ttgttaaaaggtgta

SEQ ID NO: 1276521 - DNA, 15 bp, Homo sapiens
cttgttaaaaggtgt

SEQ ID NO: 1276522 - DNA, 15 bp, Homo sapiens
acttgttaaaaggtg

SEQ ID NO: 1276523 - DNA, 15 bp, Homo sapiens
gacttgttaaaaggt

SEQ ID NO: 1276524 - DNA, 15 bp, Homo sapiens
tgacttgttaaaagg

SEQ ID NO: 1276525 - DNA, 15 bp, Homo sapiens
atgacttgttaaaag

SEQ ID NO: 1276526 - DNA, 15 bp, Homo sapiens
gatgacttgttaaaa

SEQ ID NO: 1276527 - DNA, 15 bp, Homo sapiens
tgatgacttgttaaa

SEQ ID NO: 1276528 - DNA, 15 bp, Homo sapiens
atgatgacttgttaa

SEQ ID NO: 1276529 - DNA, 15 bp, Homo sapiens
gatgatgacttgtta

SEQ ID NO: 1276530 - DNA, 15 bp, Homo sapiens
tgatgatgacttgtt

SEQ ID NO: 1276531 - DNA, 15 bp, Homo sapiens
ctgatgatgacttgt

SEQ ID NO: 1276532 - DNA, 15 bp, Homo sapiens
actgatgatgacttg

SEQ ID NO: 1276533 - DNA, 15 bp, Homo sapiens
tactgatgatgactt

SEQ ID NO: 1276534 - DNA, 15 bp, Homo sapiens
ttactgatgatgact

SEQ ID NO: 1276535 - DNA, 15 bp, Homo sapiens
attactgatgatgac

SEQ ID NO: 1276536 - DNA, 15 bp, Homo sapiens
aattactgatgatga

SEQ ID NO: 1276537 - DNA, 15 bp, Homo sapiens
aaattactgatgatg

SEQ ID NO: 1276538 - DNA, 15 bp, Homo sapiens
aaaattactgatgat

SEQ ID NO: 1276539 - DNA, 15 bp, Homo sapiens
caaaattactgatga

SEQ ID NO: 1276540 - DNA, 15 bp, Homo sapiens
ccaaaattactgatg

SEQ ID NO: 1276541 - DNA, 15 bp, Homo sapiens
tccaaaattactgat

SEQ ID NO: 1276542 - DNA, 15 bp, Homo sapiens
ttccaaaattactga

SEQ ID NO: 1276543 - DNA, 15 bp, Homo sapiens
attccaaaattactg

SEQ ID NO: 1276544 - DNA, 15 bp, Homo sapiens
tattccaaaattact

SEQ ID NO: 1276545 - DNA, 15 bp, Homo sapiens
ctattccaaaattac

SEQ ID NO: 1276546 - DNA, 15 bp, Homo sapiens
cctattccaaaatta

SEQ ID NO: 1276547 - DNA, 15 bp, Homo sapiens
gcctattccaaaatt

SEQ ID NO: 1276548 - DNA, 15 bp, Homo sapiens
tgcctattccaaaat

SEQ ID NO: 1276549 - DNA, 15 bp, Homo sapiens
atgcctattccaaaa

SEQ ID NO: 1276550 - DNA, 15 bp, Homo sapiens
aatgcctattccaaa

SEQ ID NO: 1276551 - DNA, 15 bp, Homo sapiens
taatgcctattccaa

SEQ ID NO: 1276552 - DNA, 15 bp, Homo sapiens
ctaatgcctattcca

SEQ ID NO: 1276553 - DNA, 15 bp, Homo sapiens
tctaatgcctattcc

SEQ ID NO: 1276554 - DNA, 15 bp, Homo sapiens
atctaatgcctattc

SEQ ID NO: 1276555 - DNA, 15 bp, Homo sapiens
aatctaatgcctatt

SEQ ID NO: 1276556 - DNA, 15 bp, Homo sapiens
gaatctaatgcctat

SEQ ID NO: 1276557 - DNA, 15 bp, Homo sapiens
tgaatctaatgccta

SEQ ID NO: 1276558 - DNA, 15 bp, Homo sapiens
gtgaatctaatgcct

SEQ ID NO: 1276559 - DNA, 15 bp, Homo sapiens
tgtgaatctaatgcc

SEQ ID NO: 1276560 - DNA, 15 bp, Homo sapiens
atgtgaatctaatgc

SEQ ID NO: 1276561 - DNA, 15 bp, Homo sapiens
catgtgaatctaatg

SEQ ID NO: 1276562 - DNA, 15 bp, Homo sapiens
ccatgtgaatctaat

SEQ ID NO: 1276563 - DNA, 15 bp, Homo sapiens
accatgtgaatctaa

SEQ ID NO: 1276564 - DNA, 15 bp, Homo sapiens
aaccatgtgaatcta

SEQ ID NO: 1276565 - DNA, 15 bp, Homo sapiens
gaaccatgtgaatct

SEQ ID NO: 1276566 - DNA, 15 bp, Homo sapiens
tgaaccatgtgaatc

SEQ ID NO: 1276567 - DNA, 15 bp, Homo sapiens
ttgaaccatgtgaat

SEQ ID NO: 1276568 - DNA, 15 bp, Homo sapiens
cttgaaccatgtgaa

SEQ ID NO: 1276569 - DNA, 15 bp, Homo sapiens
tcttgaaccatgtga

SEQ ID NO: 1276570 - DNA, 15 bp, Homo sapiens
atcttgaaccatgtg

SEQ ID NO: 1276571 - DNA, 15 bp, Homo sapiens
aatcttgaaccatgt

SEQ ID NO: 1276572 - DNA, 15 bp, Homo sapiens
gaatcttgaaccatg

SEQ ID NO: 1276573 - DNA, 15 bp, Homo sapiens
tgaatcttgaaccat

SEQ ID NO: 1276574 - DNA, 15 bp, Homo sapiens
ttgaatcttgaacca

SEQ ID NO: 1276575 - DNA, 15 bp, Homo sapiens
tttgaatcttgaacc

SEQ ID NO: 1276576 - DNA, 15 bp, Homo sapiens
gtttgaatcttgaac

SEQ ID NO: 1276577 - DNA, 15 bp, Homo sapiens
cgtttgaatcttgaa

SEQ ID NO: 1276578 - DNA, 15 bp, Homo sapiens
tcgtttgaatcttga

SEQ ID NO: 1276579 - DNA, 15 bp, Homo sapiens
ttcgtttgaatcttg

SEQ ID NO: 1276580 - DNA, 15 bp, Homo sapiens
tttcgtttgaatctt

SEQ ID NO: 1276581 - DNA, 15 bp, Homo sapiens
ctttcgtttgaatct

SEQ ID NO: 1276582 - DNA, 15 bp, Homo sapiens
tctttcgtttgaatc

SEQ ID NO: 1276583 - DNA, 15 bp, Homo sapiens
ttctttcgtttgaat

SEQ ID NO: 1276584 - DNA, 15 bp, Homo sapiens
tttctttcgtttgaa

SEQ ID NO: 1276585 - DNA, 15 bp, Homo sapiens
ttttctttcgtttga

SEQ ID NO: 1276586 - DNA, 15 bp, Homo sapiens
cttttctttcgtttg

SEQ ID NO: 1276587 - DNA, 15 bp, Homo sapiens
acttttctttcgttt

SEQ ID NO: 1276588 - DNA, 15 bp, Homo sapiens
tacttttctttcgtt

SEQ ID NO: 1276589 - DNA, 15 bp, Homo sapiens
atacttttctttcgt

SEQ ID NO: 1276590 - DNA, 15 bp, Homo sapiens
tatacttttctttcg

SEQ ID NO: 1276591 - DNA, 15 bp, Homo sapiens
ttatacttttctttc

SEQ ID NO: 1276592 - DNA, 15 bp, Homo sapiens
tttatacttttcttt

SEQ ID NO: 1276593 - DNA, 15 bp, Homo sapiens
gtttatacttttctt

SEQ ID NO: 1276594 - DNA, 15 bp, Homo sapiens
tgtttatacttttct

SEQ ID NO: 1276595 - DNA, 15 bp, Homo sapiens
ctgtttatacttttc

SEQ ID NO: 1276596 - DNA, 15 bp, Homo sapiens
actgtttatactttt

SEQ ID NO: 1276597 - DNA, 15 bp, Homo sapiens
tactgtttatacttt

SEQ ID NO: 1276598 - DNA, 15 bp, Homo sapiens
ttactgtttatactt

SEQ ID NO: 1276599 - DNA, 15 bp, Homo sapiens
tttactgtttatact

SEQ ID NO: 1276600 - DNA, 15 bp, Homo sapiens
ttttactgtttatac

SEQ ID NO: 1276601 - DNA, 15 bp, Homo sapiens
tttttactgtttata

SEQ ID NO: 1276602 - DNA, 15 bp, Homo sapiens
ctttttactgtttat

SEQ ID NO: 1276603 - DNA, 15 bp, Homo sapiens
actttttactgttta

SEQ ID NO: 1276604 - DNA, 15 bp, Homo sapiens
gactttttactgttt

SEQ ID NO: 1276605 - DNA, 15 bp, Homo sapiens
agactttttactgtt

SEQ ID NO: 1276606 - DNA, 15 bp, Homo sapiens
gagactttttactgt

SEQ ID NO: 1276607 - DNA, 15 bp, Homo sapiens
ggagactttttactg

SEQ ID NO: 1276608 - DNA, 15 bp, Homo sapiens
aggagactttttact

SEQ ID NO: 1276609 - DNA, 15 bp, Homo sapiens
gaggagactttttac

SEQ ID NO: 1276610 - DNA, 15 bp, Homo sapiens
tgaggagacttttta

SEQ ID NO: 1276611 - DNA, 15 bp, Homo sapiens
atgaggagacttttt

SEQ ID NO: 1276612 - DNA, 15 bp, Homo sapiens
aatgaggagactttt

SEQ ID NO: 1276613 - DNA, 15 bp, Homo sapiens
gaatgaggagacttt

SEQ ID NO: 1276614 - DNA, 15 bp, Homo sapiens
ggaatgaggagactt

SEQ ID NO: 1276615 - DNA, 15 bp, Homo sapiens
aggaatgaggagact

SEQ ID NO: 1276616 - DNA, 15 bp, Homo sapiens
aaggaatgaggagac

SEQ ID NO: 1276617 - DNA, 15 bp, Homo sapiens
aaaggaatgaggaga

SEQ ID NO: 1276618 - DNA, 15 bp, Homo sapiens
gaaaggaatgaggag

SEQ ID NO: 1276619 - DNA, 15 bp, Homo sapiens
ggaaaggaatgagga

SEQ ID NO: 1276620 - DNA, 15 bp, Homo sapiens
gggaaaggaatgagg

SEQ ID NO: 1276621 - DNA, 15 bp, Homo sapiens
agggaaaggaatgag

SEQ ID NO: 1276622 - DNA, 15 bp, Homo sapiens
tagggaaaggaatga

SEQ ID NO: 1276623 - DNA, 15 bp, Homo sapiens
ttagggaaaggaatg

SEQ ID NO: 1276624 - DNA, 15 bp, Homo sapiens
cttagggaaaggaat

SEQ ID NO: 1276625 - DNA, 15 bp, Homo sapiens
gcttagggaaaggaa

SEQ ID NO: 1276626 - DNA, 15 bp, Homo sapiens
ggcttagggaaagga

SEQ ID NO: 1276627 - DNA, 15 bp, Homo sapiens
tggcttagggaaagg

SEQ ID NO: 1276628 - DNA, 15 bp, Homo sapiens
gtggcttagggaaag

SEQ ID NO: 1276629 - DNA, 15 bp, Homo sapiens
ggtggcttagggaaa

SEQ ID NO: 1276630 - DNA, 15 bp, Homo sapiens
gggtggcttagggaa

SEQ ID NO: 1276631 - DNA, 15 bp, Homo sapiens
tgggtggcttaggga

SEQ ID NO: 1276632 - DNA, 15 bp, Homo sapiens
gtgggtggcttaggg

SEQ ID NO: 1276633 - DNA, 15 bp, Homo sapiens
agtgggtggcttagg

SEQ ID NO: 1276634 - DNA, 15 bp, Homo sapiens
aagtgggtggcttag

SEQ ID NO: 1276635 - DNA, 15 bp, Homo sapiens
gaagtgggtggctta

SEQ ID NO: 1276636 - DNA, 15 bp, Homo sapiens
agaagtgggtggctt

SEQ ID NO: 1276637 - DNA, 15 bp, Homo sapiens
gagaagtgggtggct

SEQ ID NO: 1276638 - DNA, 15 bp, Homo sapiens
agagaagtgggtggc

SEQ ID NO: 1276639 - DNA, 15 bp, Homo sapiens
aagagaagtgggtgg

SEQ ID NO: 1276640 - DNA, 15 bp, Homo sapiens
gaagagaagtgggtg

SEQ ID NO: 1276641 - DNA, 15 bp, Homo sapiens
tgaagagaagtgggt

SEQ ID NO: 1276642 - DNA, 15 bp, Homo sapiens
ctgaagagaagtggg

SEQ ID NO: 1276643 - DNA, 15 bp, Homo sapiens
tctgaagagaagtgg

SEQ ID NO: 1276644 - DNA, 15 bp, Homo sapiens
ctctgaagagaagtg

SEQ ID NO: 1276645 - DNA, 15 bp, Homo sapiens
cctctgaagagaagt

SEQ ID NO: 1276646 - DNA, 15 bp, Homo sapiens
gcctctgaagagaag

SEQ ID NO: 1276647 - DNA, 15 bp, Homo sapiens
tgcctctgaagagaa

SEQ ID NO: 1276648 - DNA, 15 bp, Homo sapiens
ttgcctctgaagaga

SEQ ID NO: 1276649 - DNA, 15 bp, Homo sapiens
gttgcctctgaagag

SEQ ID NO: 1276650 - DNA, 15 bp, Homo sapiens
agttgcctctgaaga

SEQ ID NO: 1276651 - DNA, 15 bp, Homo sapiens
ttagttgcctctgaa

SEQ ID NO: 1276652 - DNA, 15 bp, Homo sapiens
attagttgcctctga

SEQ ID NO: 1276653 - DNA, 15 bp, Homo sapiens
tattagttgcctctg

SEQ ID NO: 1276654 - DNA, 15 bp, Homo sapiens
ttattagttgcctct

SEQ ID NO: 1276655 - DNA, 15 bp, Homo sapiens
tttattagttgcctc

SEQ ID NO: 1276656 - DNA, 15 bp, Homo sapiens
ttttattagttgcct

SEQ ID NO: 1276657 - DNA, 15 bp, Homo sapiens
cttttattagttgcc

SEQ ID NO: 1276658 - DNA, 15 bp, Homo sapiens
acttttattagttgc

SEQ ID NO: 1276659 - DNA, 15 bp, Homo sapiens
aacttttattagttg

SEQ ID NO: 1276660 - DNA, 15 bp, Homo sapiens
aaacttttattagtt

SEQ ID NO: 1276661 - DNA, 15 bp, Homo sapiens
gaaacttttattagt

SEQ ID NO: 1276662 - DNA, 15 bp, Homo sapiens
agaaacttttattag

SEQ ID NO: 1276663 - DNA, 15 bp, Homo sapiens
tagaaacttttatta

SEQ ID NO: 1276664 - DNA, 15 bp, Homo sapiens
ctagaaacttttatt

SEQ ID NO: 1276665 - DNA, 15 bp, Homo sapiens
actagaaacttttat

SEQ ID NO: 1276666 - DNA, 15 bp, Homo sapiens
aactagaaactttta

SEQ ID NO: 1276667 - DNA, 15 bp, Homo sapiens
aaactagaaactttt

SEQ ID NO: 1276668 - DNA, 15 bp, Homo sapiens
aaaactagaaacttt

SEQ ID NO: 1276669 - DNA, 15 bp, Homo sapiens
caaaactagaaactt

SEQ ID NO: 1276670 - DNA, 15 bp, Homo sapiens
gcaaaactagaaact

SEQ ID NO: 1276671 - DNA, 15 bp, Homo sapiens
tgcaaaactagaaac

SEQ ID NO: 1276672 - DNA, 15 bp, Homo sapiens
atgcaaaactagaaa

SEQ ID NO: 1276673 - DNA, 15 bp, Homo sapiens
aatgcaaaactagaa

SEQ ID NO: 1276674 - DNA, 15 bp, Homo sapiens
taatgcaaaactaga

SEQ ID NO: 1276675 - DNA, 15 bp, Homo sapiens
ataatgcaaaactag

SEQ ID NO: 1276676 - DNA, 15 bp, Homo sapiens
aataatgcaaaacta

SEQ ID NO: 1276677 - DNA, 15 bp, Homo sapiens
gaataatgcaaaact

SEQ ID NO: 1276678 - DNA, 15 bp, Homo sapiens
agaataatgcaaaac

SEQ ID NO: 1276679 - DNA, 15 bp, Homo sapiens
tagaataatgcaaaa

SEQ ID NO: 1276680 - DNA, 15 bp, Homo sapiens
gtagaataatgcaaa

SEQ ID NO: 1276681 - DNA, 15 bp, Homo sapiens
tgtagaataatgcaa

SEQ ID NO: 1276682 - DNA, 15 bp, Homo sapiens
gtgtagaataatgca

SEQ ID NO: 1276683 - DNA, 15 bp, Homo sapiens
ggtgtagaataatgc

SEQ ID NO: 1276684 - DNA, 15 bp, Homo sapiens
aggtgtagaataatg

SEQ ID NO: 1276685 - DNA, 15 bp, Homo sapiens
aaggtgtagaataat

SEQ ID NO: 1276686 - DNA, 15 bp, Homo sapiens
caaggtgtagaataa

SEQ ID NO: 1276687 - DNA, 15 bp, Homo sapiens
gcaaggtgtagaata

SEQ ID NO: 1276688 - DNA, 15 bp, Homo sapiens
agcaaggtgtagaat

SEQ ID NO: 1276689 - DNA, 15 bp, Homo sapiens
aagcaaggtgtagaa

SEQ ID NO: 1276690 - DNA, 15 bp, Homo sapiens
aaagcaaggtgtaga

SEQ ID NO: 1276691 - DNA, 15 bp, Homo sapiens
aaaagcaaggtgtag

SEQ ID NO: 1276692 - DNA, 15 bp, Homo sapiens
aaaaagcaaggtgta

SEQ ID NO: 1276693 - DNA, 15 bp, Homo sapiens
aaaaaagcaaggtgt

SEQ ID NO: 1276694 - DNA, 15 bp, Homo sapiens
gaaaaaagcaaggtg

SEQ ID NO: 1276695 - DNA, 15 bp, Homo sapiens
tgaaaaaagcaaggt

SEQ ID NO: 1276696 - DNA, 15 bp, Homo sapiens
atgaaaaaagcaagg

SEQ ID NO: 1276697 - DNA, 15 bp, Homo sapiens
aatgaaaaaagcaag

SEQ ID NO: 1276698 - DNA, 15 bp, Homo sapiens
aaatgaaaaaagcaa

SEQ ID NO: 1276699 - DNA, 15 bp, Homo sapiens
taaatgaaaaaagca

SEQ ID NO: 1276700 - DNA, 15 bp, Homo sapiens
ctaaatgaaaaaagc

SEQ ID NO: 1276701 - DNA, 15 bp, Homo sapiens
gctaaatgaaaaaag

SEQ ID NO: 1276702 - DNA, 15 bp, Homo sapiens
tgctaaatgaaaaaa

SEQ ID NO: 1276703 - DNA, 15 bp, Homo sapiens
ttgctaaatgaaaaa

SEQ ID NO: 1276704 - DNA, 15 bp, Homo sapiens
attgctaaatgaaaa

SEQ ID NO: 1276705 - DNA, 15 bp, Homo sapiens
tattgctaaatgaaa

SEQ ID NO: 1276706 - DNA, 15 bp, Homo sapiens
atattgctaaatgaa

SEQ ID NO: 1276707 - DNA, 15 bp, Homo sapiens
tatattgctaaatga

SEQ ID NO: 1276708 - DNA, 15 bp, Homo sapiens
atatattgctaaatg

SEQ ID NO: 1276709 - DNA, 15 bp, Homo sapiens
gatatattgctaaat

SEQ ID NO: 1276710 - DNA, 15 bp, Homo sapiens
agatatattgctaaa

SEQ ID NO: 1276711 - DNA, 15 bp, Homo sapiens
aagatatattgctaa

SEQ ID NO: 1276712 - DNA, 15 bp, Homo sapiens
caagatatattgcta

SEQ ID NO: 1276713 - DNA, 15 bp, Homo sapiens
tcaagatatattgct

SEQ ID NO: 1276714 - DNA, 15 bp, Homo sapiens
ttcaagatatattgc

SEQ ID NO: 1276715 - DNA, 15 bp, Homo sapiens
cttcaagatatattg

SEQ ID NO: 1276716 - DNA, 15 bp, Homo sapiens
tcttcaagatatatt

SEQ ID NO: 1276717 - DNA, 15 bp, Homo sapiens
ctcttcaagatatat

SEQ ID NO: 1276718 - DNA, 15 bp, Homo sapiens
gctcttcaagatata

SEQ ID NO: 1276719 - DNA, 15 bp, Homo sapiens
tgctcttcaagatat

SEQ ID NO: 1276720 - DNA, 15 bp, Homo sapiens
gtgctcttcaagata

SEQ ID NO: 1276721 - DNA, 15 bp, Homo sapiens
tgtgctcttcaagat

SEQ ID NO: 1276722 - DNA, 15 bp, Homo sapiens
atgtgctcttcaaga

SEQ ID NO: 1276723 - DNA, 15 bp, Homo sapiens
gatgtgctcttcaag

SEQ ID NO: 1276724 - DNA, 15 bp, Homo sapiens
agatgtgctcttcaa

SEQ ID NO: 1276725 - DNA, 15 bp, Homo sapiens
gagatgtgctcttca

SEQ ID NO: 1276726 - DNA, 15 bp, Homo sapiens
ggagatgtgctcttc

SEQ ID NO: 1276727 - DNA, 15 bp, Homo sapiens
gggagatgtgctctt

SEQ ID NO: 1276728 - DNA, 15 bp, Homo sapiens
agggagatgtgctct

SEQ ID NO: 1276729 - DNA, 15 bp, Homo sapiens
gagggagatgtgctc

SEQ ID NO: 1276730 - DNA, 15 bp, Homo sapiens
agagggagatgtgct

SEQ ID NO: 1276731 - DNA, 15 bp, Homo sapiens
cagagggagatgtgc

SEQ ID NO: 1276732 - DNA, 15 bp, Homo sapiens
acagagggagatgtg

SEQ ID NO: 1276733 - DNA, 15 bp, Homo sapiens
tacagagggagatgt

SEQ ID NO: 1276734 - DNA, 15 bp, Homo sapiens
atacagagggagatg

SEQ ID NO: 1276735 - DNA, 15 bp, Homo sapiens
aatacagagggagat

SEQ ID NO: 1276736 - DNA, 15 bp, Homo sapiens
aaatacagagggaga

SEQ ID NO: 1276737 - DNA, 15 bp, Homo sapiens
taaatacagagggag

SEQ ID NO: 1276738 - DNA, 15 bp, Homo sapiens
ctaaatacagaggga

SEQ ID NO: 1276739 - DNA, 15 bp, Homo sapiens
gctaaatacagaggg

SEQ ID NO: 1276740 - DNA, 15 bp, Homo sapiens
agctaaatacagagg

SEQ ID NO: 1276741 - DNA, 15 bp, Homo sapiens
aagctaaatacagag

SEQ ID NO: 1276742 - DNA, 15 bp, Homo sapiens
taagctaaatacaga

SEQ ID NO: 1276743 - DNA, 15 bp, Homo sapiens
ttaagctaaatacag

SEQ ID NO: 1276744 - DNA, 15 bp, Homo sapiens
attaagctaaataca

SEQ ID NO: 1276745 - DNA, 15 bp, Homo sapiens
gattaagctaaatac

SEQ ID NO: 1276746 - DNA, 15 bp, Homo sapiens
ggattaagctaaata

SEQ ID NO: 1276747 - DNA, 15 bp, Homo sapiens
aggattaagctaaat

SEQ ID NO: 1276748 - DNA, 15 bp, Homo sapiens
aaggattaagctaaa

SEQ ID NO: 1276749 - DNA, 15 bp, Homo sapiens
aaaggattaagctaa

SEQ ID NO: 1276750 - DNA, 15 bp, Homo sapiens
aaaaggattaagcta

SEQ ID NO: 1276751 - DNA, 15 bp, Homo sapiens
taaaaggattaagct

SEQ ID NO: 1276752 - DNA, 15 bp, Homo sapiens
ctaaaaggattaagc

SEQ ID NO: 1276753 - DNA, 15 bp, Homo sapiens
actaaaaggattaag

SEQ ID NO: 1276754 - DNA, 15 bp, Homo sapiens
cactaaaaggattaa

SEQ ID NO: 1276755 - DNA, 15 bp, Homo sapiens
ccactaaaaggatta

SEQ ID NO: 1276756 - DNA, 15 bp, Homo sapiens
tccactaaaaggatt

SEQ ID NO: 1276757 - DNA, 15 bp, Homo sapiens
atccactaaaaggat

SEQ ID NO: 1276758 - DNA, 15 bp, Homo sapiens
aatccactaaaagga

SEQ ID NO: 1276759 - DNA, 15 bp, Homo sapiens
aaatccactaaaagg

SEQ ID NO: 1276760 - DNA, 15 bp, Homo sapiens
aaaatccactaaaag

SEQ ID NO: 1276761 - DNA, 15 bp, Homo sapiens
aaaaatccactaaaa

SEQ ID NO: 1276762 - DNA, 15 bp, Homo sapiens
aaaaaatccactaaa

SEQ ID NO: 1276763 - DNA, 15 bp, Homo sapiens
aaaaaaatccactaa

SEQ ID NO: 1276764 - DNA, 15 bp, Homo sapiens
aaaaaaaatccacta

SEQ ID NO: 1276765 - DNA, 15 bp, Homo sapiens
aaaaaaaaatccact

SEQ ID NO: 1276766 - DNA, 15 bp, Homo sapiens
aaaaaaaaaatccac

SEQ ID NO: 1276767 - DNA, 15 bp, Homo sapiens
taaaaaaaaaatcca

SEQ ID NO: 1276768 - DNA, 15 bp, Homo sapiens
ataaaaaaaaaatcc

SEQ ID NO: 1276769 - DNA, 15 bp, Homo sapiens
aataaaaaaaaaatc

SEQ ID NO: 1276770 - DNA, 15 bp, Homo sapiens
aaataaaaaaaaaat

SEQ ID NO: 1276771 - DNA, 15 bp, Homo sapiens
caaaaaataaaaaaa

SEQ ID NO: 1276772 - DNA, 15 bp, Homo sapiens
cccaaaaaataaaaa

SEQ ID NO: 1276773 - DNA, 15 bp, Homo sapiens
acccaaaaaataaaa

SEQ ID NO: 1276774 - DNA, 15 bp, Homo sapiens
tacccaaaaaataaa

SEQ ID NO: 1276775 - DNA, 15 bp, Homo sapiens
atacccaaaaaataa

SEQ ID NO: 1276776 - DNA, 15 bp, Homo sapiens
tatacccaaaaaata

SEQ ID NO: 1276777 - DNA, 15 bp, Homo sapiens
atatacccaaaaaat

SEQ ID NO: 1276778 - DNA, 15 bp, Homo sapiens
gatatacccaaaaaa

SEQ ID NO: 1276779 - DNA, 15 bp, Homo sapiens
tgatatacccaaaaa

SEQ ID NO: 1276780 - DNA, 15 bp, Homo sapiens
atgatatacccaaaa

SEQ ID NO: 1276781 - DNA, 15 bp, Homo sapiens
tatgatatacccaaa

SEQ ID NO: 1276782 - DNA, 15 bp, Homo sapiens
ttatgatatacccaa

SEQ ID NO: 1276783 - DNA, 15 bp, Homo sapiens
attatgatataccca

SEQ ID NO: 1276784 - DNA, 15 bp, Homo sapiens
aattatgatataccc

SEQ ID NO: 1276785 - DNA, 15 bp, Homo sapiens
aaattatgatatacc

SEQ ID NO: 1276786 - DNA, 15 bp, Homo sapiens
taaattatgatatac

SEQ ID NO: 1276787 - DNA, 15 bp, Homo sapiens
ataaattatgatata

SEQ ID NO: 1276788 - DNA, 15 bp, Homo sapiens
aataaattatgatat

SEQ ID NO: 1276789 - DNA, 15 bp, Homo sapiens
aaataaattatgata

SEQ ID NO: 1276790 - DNA, 15 bp, Homo sapiens
taaataaattatgat

SEQ ID NO: 1276791 - DNA, 15 bp, Homo sapiens
ataaataaattatga

SEQ ID NO: 1276792 - DNA, 15 bp, Homo sapiens
cataaataaattatg

SEQ ID NO: 1276793 - DNA, 15 bp, Homo sapiens
tcataaataaattat

SEQ ID NO: 1276794 - DNA, 15 bp, Homo sapiens
ttcataaataaatta

SEQ ID NO: 1276795 - DNA, 15 bp, Homo sapiens
attcataaataaatt

SEQ ID NO: 1276796 - DNA, 15 bp, Homo sapiens
aattcataaataaat

SEQ ID NO: 1276797 - DNA, 15 bp, Homo sapiens
aaattcataaataaa

SEQ ID NO: 1276798 - DNA, 15 bp, Homo sapiens
gaaattcataaataa

SEQ ID NO: 1276799 - DNA, 15 bp, Homo sapiens
tgaaattcataaata

SEQ ID NO: 1276800 - DNA, 15 bp, Homo sapiens
atgaaattcataaat

SEQ ID NO: 1276801 - DNA, 15 bp, Homo sapiens
aatgaaattcataaa

SEQ ID NO: 1276802 - DNA, 15 bp, Homo sapiens
caatgaaattcataa

SEQ ID NO: 1276803 - DNA, 15 bp, Homo sapiens
acaatgaaattcata

SEQ ID NO: 1276804 - DNA, 15 bp, Homo sapiens
aacaatgaaattcat

SEQ ID NO: 1276805 - DNA, 15 bp, Homo sapiens
caacaatgaaattca

SEQ ID NO: 1276806 - DNA, 15 bp, Homo sapiens
tcaacaatgaaattc

SEQ ID NO: 1276807 - DNA, 15 bp, Homo sapiens
ctcaacaatgaaatt

SEQ ID NO: 1276808 - DNA, 15 bp, Homo sapiens
tctcaacaatgaaat

SEQ ID NO: 1276809 - DNA, 15 bp, Homo sapiens
ctctcaacaatgaaa

SEQ ID NO: 1276810 - DNA, 15 bp, Homo sapiens
tctctcaacaatgaa

SEQ ID NO: 1276811 - DNA, 15 bp, Homo sapiens
gtctctcaacaatga

SEQ ID NO: 1276812 - DNA, 15 bp, Homo sapiens
tgtctctcaacaatg

SEQ ID NO: 1276813 - DNA, 15 bp, Homo sapiens
atgtctctcaacaat

SEQ ID NO: 1276814 - DNA, 15 bp, Homo sapiens
aatgtctctcaacaa

SEQ ID NO: 1276815 - DNA, 15 bp, Homo sapiens
aaatgtctctcaaca

SEQ ID NO: 1276816 - DNA, 15 bp, Homo sapiens
taaatgtctctcaac

SEQ ID NO: 1276817 - DNA, 15 bp, Homo sapiens
ctaaatgtctctcaa

SEQ ID NO: 1276818 - DNA, 15 bp, Homo sapiens
actaaatgtctctca

SEQ ID NO: 1276819 - DNA, 15 bp, Homo sapiens
aactaaatgtctctc

SEQ ID NO: 1276820 - DNA, 15 bp, Homo sapiens
aaactaaatgtctct

SEQ ID NO: 1276821 - DNA, 15 bp, Homo sapiens
caaactaaatgtctc

SEQ ID NO: 1276822 - DNA, 15 bp, Homo sapiens
acaaactaaatgtct

SEQ ID NO: 1276823 - DNA, 15 bp, Homo sapiens
aacaaactaaatgtc

SEQ ID NO: 1276824 - DNA, 15 bp, Homo sapiens
aaacaaactaaatgt

SEQ ID NO: 1276825 - DNA, 15 bp, Homo sapiens
aaaacaaactaaatg

SEQ ID NO: 1276826 - DNA, 15 bp, Homo sapiens
aaaaacaaactaaat

SEQ ID NO: 1276827 - DNA, 15 bp, Homo sapiens
caaaaacaaactaaa

SEQ ID NO: 1276828 - DNA, 15 bp, Homo sapiens
tcaaaaacaaactaa

SEQ ID NO: 1276829 - DNA, 15 bp, Homo sapiens
ttcaaaaacaaacta

SEQ ID NO: 1276830 - DNA, 15 bp, Homo sapiens
attcaaaaacaaact

SEQ ID NO: 1276831 - DNA, 15 bp, Homo sapiens
cattcaaaaacaaac

SEQ ID NO: 1276832 - DNA, 15 bp, Homo sapiens
acattcaaaaacaaa

SEQ ID NO: 1276833 - DNA, 15 bp, Homo sapiens
cacattcaaaaacaa

SEQ ID NO: 1276834 - DNA, 15 bp, Homo sapiens
acacattcaaaaaca

SEQ ID NO: 1276835 - DNA, 15 bp, Homo sapiens
tacacattcaaaaac

SEQ ID NO: 1276836 - DNA, 15 bp, Homo sapiens
ttacacattcaaaaa

SEQ ID NO: 1276837 - DNA, 15 bp, Homo sapiens
attacacattcaaaa

SEQ ID NO: 1276838 - DNA, 15 bp, Homo sapiens
tattacacattcaaa

SEQ ID NO: 1276839 - DNA, 15 bp, Homo sapiens
gtattacacattcaa

SEQ ID NO: 1276840 - DNA, 15 bp, Homo sapiens
agtattacacattca

SEQ ID NO: 1276841 - DNA, 15 bp, Homo sapiens
tagtattacacattc

SEQ ID NO: 1276842 - DNA, 15 bp, Homo sapiens
gtagtattacacatt

SEQ ID NO: 1276843 - DNA, 15 bp, Homo sapiens
tgtagtattacacat

SEQ ID NO: 1276844 - DNA, 15 bp, Homo sapiens
ttgtagtattacaca

SEQ ID NO: 1276845 - DNA, 15 bp, Homo sapiens
tttgtagtattacac

SEQ ID NO: 1276846 - DNA, 15 bp, Homo sapiens
gtttgtagtattaca

SEQ ID NO: 1276847 - DNA, 15 bp, Homo sapiens
ggtttgtagtattac

SEQ ID NO: 1276848 - DNA, 15 bp, Homo sapiens
cggtttgtagtatta

SEQ ID NO: 1276849 - DNA, 15 bp, Homo sapiens
acggtttgtagtatt

SEQ ID NO: 1276850 - DNA, 15 bp, Homo sapiens
aacggtttgtagtat

SEQ ID NO: 1276851 - DNA, 15 bp, Homo sapiens
caacggtttgtagta

SEQ ID NO: 1276852 - DNA, 15 bp, Homo sapiens
gcaacggtttgtagt

SEQ ID NO: 1276853 - DNA, 15 bp, Homo sapiens
cgcaacggtttgtag

SEQ ID NO: 1276854 - DNA, 15 bp, Homo sapiens
ccgcaacggtttgta

SEQ ID NO: 1276855 - DNA, 15 bp, Homo sapiens
accgcaacggtttgt

SEQ ID NO: 1276856 - DNA, 15 bp, Homo sapiens
caccgcaacggtttg

SEQ ID NO: 1276857 - DNA, 15 bp, Homo sapiens
tcaccgcaacggttt

SEQ ID NO: 1276858 - DNA, 15 bp, Homo sapiens
ttcaccgcaacggtt

SEQ ID NO: 1276859 - DNA, 15 bp, Homo sapiens
attcaccgcaacggt

SEQ ID NO: 1276860 - DNA, 15 bp, Homo sapiens
aattcaccgcaacgg

SEQ ID NO: 1276861 - DNA, 15 bp, Homo sapiens
taattcaccgcaacg

SEQ ID NO: 1276862 - DNA, 15 bp, Homo sapiens
ataattcaccgcaac

SEQ ID NO: 1276863 - DNA, 15 bp, Homo sapiens
gataattcaccgcaa

SEQ ID NO: 1276864 - DNA, 15 bp, Homo sapiens
ggataattcaccgca

SEQ ID NO: 1276865 - DNA, 15 bp, Homo sapiens
aggataattcaccgc

SEQ ID NO: 1276866 - DNA, 15 bp, Homo sapiens
aaggataattcaccg

SEQ ID NO: 1276867 - DNA, 15 bp, Homo sapiens
taaggataattcacc

SEQ ID NO: 1276868 - DNA, 15 bp, Homo sapiens
ataaggataattcac

SEQ ID NO: 1276869 - DNA, 15 bp, Homo sapiens
tataaggataattca

SEQ ID NO: 1276870 - DNA, 15 bp, Homo sapiens
atataaggataattc

SEQ ID NO: 1276871 - DNA, 15 bp, Homo sapiens
tatataaggataatt

SEQ ID NO: 1276872 - DNA, 15 bp, Homo sapiens
atatataaggataat

SEQ ID NO: 1276873 - DNA, 15 bp, Homo sapiens
tatatataaggataa

SEQ ID NO: 1276874 - DNA, 15 bp, Homo sapiens
gtatatataaggata

SEQ ID NO: 1276875 - DNA, 15 bp, Homo sapiens
tgtatatataaggat

SEQ ID NO: 1276876 - DNA, 15 bp, Homo sapiens
atgtatatataagga

SEQ ID NO: 1276877 - DNA, 15 bp, Homo sapiens
aatgtatatataagg

SEQ ID NO: 1276878 - DNA, 15 bp, Homo sapiens
aaatgtatatataag

SEQ ID NO: 1276879 - DNA, 15 bp, Homo sapiens
aaaatgtatatataa

SEQ ID NO: 1276880 - DNA, 15 bp, Homo sapiens
gaaaatgtatatata

SEQ ID NO: 1276881 - DNA, 15 bp, Homo sapiens
tgaaaatgtatatat

SEQ ID NO: 1276882 - DNA, 15 bp, Homo sapiens
atgaaaatgtatata

SEQ ID NO: 1276883 - DNA, 15 bp, Homo sapiens
catgaaaatgtatat

SEQ ID NO: 1276884 - DNA, 15 bp, Homo sapiens
gcatgaaaatgtata

SEQ ID NO: 1276885 - DNA, 15 bp, Homo sapiens
tgcatgaaaatgtat

SEQ ID NO: 1276886 - DNA, 15 bp, Homo sapiens
gtgcatgaaaatgta

SEQ ID NO: 1276887 - DNA, 15 bp, Homo sapiens
tgtgcatgaaaatgt

SEQ ID NO: 1276888 - DNA, 15 bp, Homo sapiens
ttgtgcatgaaaatg

SEQ ID NO: 1276889 - DNA, 15 bp, Homo sapiens
tttgtgcatgaaaat

SEQ ID NO: 1276890 - DNA, 15 bp, Homo sapiens
atttgtgcatgaaaa

SEQ ID NO: 1276891 - DNA, 15 bp, Homo sapiens
catttgtgcatgaaa

SEQ ID NO: 1276892 - DNA, 15 bp, Homo sapiens
tcatttgtgcatgaa

SEQ ID NO: 1276893 - DNA, 15 bp, Homo sapiens
ctcatttgtgcatga

SEQ ID NO: 1276894 - DNA, 15 bp, Homo sapiens
tctcatttgtgcatg

SEQ ID NO: 1276895 - DNA, 15 bp, Homo sapiens
ctctcatttgtgcat

SEQ ID NO: 1276896 - DNA, 15 bp, Homo sapiens
actctcatttgtgca

SEQ ID NO: 1276897 - DNA, 15 bp, Homo sapiens
tactctcatttgtgc

SEQ ID NO: 1276898 - DNA, 15 bp, Homo sapiens
gtactctcatttgtg

SEQ ID NO: 1276899 - DNA, 15 bp, Homo sapiens
agtactctcatttgt

SEQ ID NO: 1276900 - DNA, 15 bp, Homo sapiens
aagtactctcatttg

SEQ ID NO: 1276901 - DNA, 15 bp, Homo sapiens
aaagtactctcattt

SEQ ID NO: 1276902 - DNA, 15 bp, Homo sapiens
aaaagtactctcatt

SEQ ID NO: 1276903 - DNA, 15 bp, Homo sapiens
taaaagtactctcat

SEQ ID NO: 1276904 - DNA, 15 bp, Homo sapiens
ataaaagtactctca

SEQ ID NO: 1276905 - DNA, 15 bp, Homo sapiens
tataaaagtactctc

SEQ ID NO: 1276906 - DNA, 15 bp, Homo sapiens
ctataaaagtactct

SEQ ID NO: 1276907 - DNA, 15 bp, Homo sapiens
actataaaagtactc

SEQ ID NO: 1276908 - DNA, 15 bp, Homo sapiens
cactataaaagtact

SEQ ID NO: 1276909 - DNA, 15 bp, Homo sapiens
acactataaaagtac

SEQ ID NO: 1276910 - DNA, 15 bp, Homo sapiens
tacactataaaagta

SEQ ID NO: 1276911 - DNA, 15 bp, Homo sapiens
ctacactataaaagt

SEQ ID NO: 1276912 - DNA, 15 bp, Homo sapiens
tctacactataaaag

SEQ ID NO: 1276913 - DNA, 15 bp, Homo sapiens
atctacactataaaa

SEQ ID NO: 1276914 - DNA, 15 bp, Homo sapiens
aatctacactataaa

SEQ ID NO: 1276915 - DNA, 15 bp, Homo sapiens
gaatctacactataa

SEQ ID NO: 1276916 - DNA, 15 bp, Homo sapiens
ggaatctacactata

SEQ ID NO: 1276917 - DNA, 15 bp, Homo sapiens
aggaatctacactat

SEQ ID NO: 1276918 - DNA, 15 bp, Homo sapiens
taggaatctacacta

SEQ ID NO: 1276919 - DNA, 15 bp, Homo sapiens
ctaggaatctacact

SEQ ID NO: 1276920 - DNA, 15 bp, Homo sapiens
tctaggaatctacac

SEQ ID NO: 1276921 - DNA, 15 bp, Homo sapiens
ttctaggaatctaca

SEQ ID NO: 1276922 - DNA, 15 bp, Homo sapiens
cttctaggaatctac

SEQ ID NO: 1276923 - DNA, 15 bp, Homo sapiens
acttctaggaatcta

SEQ ID NO: 1276924 - DNA, 15 bp, Homo sapiens
tacttctaggaatct

SEQ ID NO: 1276925 - DNA, 15 bp, Homo sapiens
ctacttctaggaatc

SEQ ID NO: 1276926 - DNA, 15 bp, Homo sapiens
tctacttctaggaat

SEQ ID NO: 1276927 - DNA, 15 bp, Homo sapiens
ttctacttctaggaa

SEQ ID NO: 1276928 - DNA, 15 bp, Homo sapiens
gttctacttctagga

SEQ ID NO: 1276929 - DNA, 15 bp, Homo sapiens
agttctacttctagg

SEQ ID NO: 1276930 - DNA, 15 bp, Homo sapiens
cagttctacttctag

SEQ ID NO: 1276931 - DNA, 15 bp, Homo sapiens
gcagttctacttcta

SEQ ID NO: 1276932 - DNA, 15 bp, Homo sapiens
agcagttctacttct

SEQ ID NO: 1276933 - DNA, 15 bp, Homo sapiens
tagcagttctacttc

SEQ ID NO: 1276934 - DNA, 15 bp, Homo sapiens
ctagcagttctactt

SEQ ID NO: 1276935 - DNA, 15 bp, Homo sapiens
cctagcagttctact

SEQ ID NO: 1276936 - DNA, 15 bp, Homo sapiens
acctagcagttctac

SEQ ID NO: 1276937 - DNA, 15 bp, Homo sapiens
gacctagcagttcta

SEQ ID NO: 1276938 - DNA, 15 bp, Homo sapiens
tgacctagcagttct

SEQ ID NO: 1276939 - DNA, 15 bp, Homo sapiens
ctgacctagcagttc

SEQ ID NO: 1276940 - DNA, 15 bp, Homo sapiens
tctgacctagcagtt

SEQ ID NO: 1276941 - DNA, 15 bp, Homo sapiens
ttctgacctagcagt

SEQ ID NO: 1276942 - DNA, 15 bp, Homo sapiens
cttctgacctagcag

SEQ ID NO: 1276943 - DNA, 15 bp, Homo sapiens
ccttctgacctagca

SEQ ID NO: 1276944 - DNA, 15 bp, Homo sapiens
accttctgacctagc

SEQ ID NO: 1276945 - DNA, 15 bp, Homo sapiens
taccttctgacctag

SEQ ID NO: 1276946 - DNA, 15 bp, Homo sapiens
ataccttctgaccta

SEQ ID NO: 1276947 - DNA, 15 bp, Homo sapiens
aataccttctgacct

SEQ ID NO: 1276948 - DNA, 15 bp, Homo sapiens
gaataccttctgacc

SEQ ID NO: 1276949 - DNA, 15 bp, Homo sapiens
tgaataccttctgac

SEQ ID NO: 1276950 - DNA, 15 bp, Homo sapiens
gtgaataccttctga

SEQ ID NO: 1276951 - DNA, 15 bp, Homo sapiens
tgtgaataccttctg

SEQ ID NO: 1276952 - DNA, 15 bp, Homo sapiens
atgtgaataccttct

SEQ ID NO: 1276953 - DNA, 15 bp, Homo sapiens
aatgtgaataccttc

SEQ ID NO: 1276954 - DNA, 15 bp, Homo sapiens
aaatgtgaatacctt

SEQ ID NO: 1276955 - DNA, 15 bp, Homo sapiens
taaatgtgaatacct

SEQ ID NO: 1276956 - DNA, 15 bp, Homo sapiens
ttaaatgtgaatacc

SEQ ID NO: 1276957 - DNA, 15 bp, Homo sapiens
tttaaatgtgaatac

SEQ ID NO: 1276958 - DNA, 15 bp, Homo sapiens
ttttaaatgtgaata

SEQ ID NO: 1276959 - DNA, 15 bp, Homo sapiens
tttttaaatgtgaat

SEQ ID NO: 1276960 - DNA, 15 bp, Homo sapiens
atttttaaatgtgaa

SEQ ID NO: 1276961 - DNA, 15 bp, Homo sapiens
aatttttaaatgtga

SEQ ID NO: 1276962 - DNA, 15 bp, Homo sapiens
aaatttttaaatgtg

SEQ ID NO: 1276963 - DNA, 15 bp, Homo sapiens
aaaatttttaaatgt

SEQ ID NO: 1276964 - DNA, 15 bp, Homo sapiens
taaaatttttaaatg

SEQ ID NO: 1276965 - DNA, 15 bp, Homo sapiens
atttaaaatttttaa

SEQ ID NO: 1276966 - DNA, 15 bp, Homo sapiens
aatttaaaattttta

SEQ ID NO: 1276967 - DNA, 15 bp, Homo sapiens
aaatttaaaattttt

SEQ ID NO: 1276968 - DNA, 15 bp, Homo sapiens
caaatttaaaatttt

SEQ ID NO: 1276969 - DNA, 15 bp, Homo sapiens
gcaaatttaaaattt

SEQ ID NO: 1276970 - DNA, 15 bp, Homo sapiens
agcaaatttaaaatt

SEQ ID NO: 1276971 - DNA, 15 bp, Homo sapiens
gagcaaatttaaaat

SEQ ID NO: 1276972 - DNA, 15 bp, Homo sapiens
tgagcaaatttaaaa

SEQ ID NO: 1276973 - DNA, 15 bp, Homo sapiens
atgagcaaatttaaa

SEQ ID NO: 1276974 - DNA, 15 bp, Homo sapiens
tatgagcaaatttaa

SEQ ID NO: 1276975 - DNA, 15 bp, Homo sapiens
ctatgagcaaattta

SEQ ID NO: 1276976 - DNA, 15 bp, Homo sapiens
tctatgagcaaattt

SEQ ID NO: 1276977 - DNA, 15 bp, Homo sapiens
ttctatgagcaaatt

SEQ ID NO: 1276978 - DNA, 15 bp, Homo sapiens
attctatgagcaaat

SEQ ID NO: 1276979 - DNA, 15 bp, Homo sapiens
cattctatgagcaaa

SEQ ID NO: 1276980 - DNA, 15 bp, Homo sapiens
tcattctatgagcaa

SEQ ID NO: 1276981 - DNA, 15 bp, Homo sapiens
ttcattctatgagca

SEQ ID NO: 1276982 - DNA, 15 bp, Homo sapiens
cttcattctatgagc

SEQ ID NO: 1276983 - DNA, 15 bp, Homo sapiens
acttcattctatgag

SEQ ID NO: 1276984 - DNA, 15 bp, Homo sapiens
gacttcattctatga

SEQ ID NO: 1276985 - DNA, 15 bp, Homo sapiens
agacttcattctatg

SEQ ID NO: 1276986 - DNA, 15 bp, Homo sapiens
aagacttcattctat

SEQ ID NO: 1276987 - DNA, 15 bp, Homo sapiens
aaagacttcattcta

SEQ ID NO: 1276988 - DNA, 15 bp, Homo sapiens
caaagacttcattct

SEQ ID NO: 1276989 - DNA, 15 bp, Homo sapiens
gcaaagacttcattc

SEQ ID NO: 1276990 - DNA, 15 bp, Homo sapiens
agcaaagacttcatt

SEQ ID NO: 1276991 - DNA, 15 bp, Homo sapiens
gagcaaagacttcat

SEQ ID NO: 1276992 - DNA, 15 bp, Homo sapiens
tgagcaaagacttca

SEQ ID NO: 1276993 - DNA, 15 bp, Homo sapiens
atgagcaaagacttc

SEQ ID NO: 1276994 - DNA, 15 bp, Homo sapiens
tatgagcaaagactt

SEQ ID NO: 1276995 - DNA, 15 bp, Homo sapiens
ctatgagcaaagact

SEQ ID NO: 1276996 - DNA, 15 bp, Homo sapiens
tctatgagcaaagac

SEQ ID NO: 1276997 - DNA, 15 bp, Homo sapiens
ttctatgagcaaaga

SEQ ID NO: 1276998 - DNA, 15 bp, Homo sapiens
attctatgagcaaag

SEQ ID NO: 1276999 - DNA, 15 bp, Homo sapiens
tattctatgagcaaa

SEQ ID NO: 1277000 - DNA, 15 bp, Homo sapiens
ctattctatgagcaa

SEQ ID NO: 1277001 - DNA, 15 bp, Homo sapiens
actattctatgagca

SEQ ID NO: 1277002 - DNA, 15 bp, Homo sapiens
gactattctatgagc

SEQ ID NO: 1277003 - DNA, 15 bp, Homo sapiens
agactattctatgag

SEQ ID NO: 1277004 - DNA, 15 bp, Homo sapiens
aagactattctatga

SEQ ID NO: 1277005 - DNA, 15 bp, Homo sapiens
aaagactattctatg

SEQ ID NO: 1277006 - DNA, 15 bp, Homo sapiens
caaagactattctat

SEQ ID NO: 1277007 - DNA, 15 bp, Homo sapiens
gcaaagactattcta

SEQ ID NO: 1277008 - DNA, 15 bp, Homo sapiens
agcaaagactattct

SEQ ID NO: 1277009 - DNA, 15 bp, Homo sapiens
gagcaaagactattc

SEQ ID NO: 1277010 - DNA, 15 bp, Homo sapiens
tgagcaaagactatt

SEQ ID NO: 1277011 - DNA, 15 bp, Homo sapiens
ttgagcaaagactat

SEQ ID NO: 1277012 - DNA, 15 bp, Homo sapiens
tttgagcaaagacta

SEQ ID NO: 1277013 - DNA, 15 bp, Homo sapiens
atttgagcaaagact

SEQ ID NO: 1277014 - DNA, 15 bp, Homo sapiens
gatttgagcaaagac

SEQ ID NO: 1277015 - DNA, 15 bp, Homo sapiens
agatttgagcaaaga

SEQ ID NO: 1277016 - DNA, 15 bp, Homo sapiens
gagatttgagcaaag

SEQ ID NO: 1277017 - DNA, 15 bp, Homo sapiens
tgagatttgagcaaa

SEQ ID NO: 1277018 - DNA, 15 bp, Homo sapiens
gtgagatttgagcaa

SEQ ID NO: 1277019 - DNA, 15 bp, Homo sapiens
agtgagatttgagca

SEQ ID NO: 1277020 - DNA, 15 bp, Homo sapiens
aagtgagatttgagc

SEQ ID NO: 1277021 - DNA, 15 bp, Homo sapiens
aaagtgagatttgag

SEQ ID NO: 1277022 - DNA, 15 bp, Homo sapiens
taaagtgagatttga

SEQ ID NO: 1277023 - DNA, 15 bp, Homo sapiens
gtaaagtgagatttg

SEQ ID NO: 1277024 - DNA, 15 bp, Homo sapiens
ggtaaagtgagattt

SEQ ID NO: 1277025 - DNA, 15 bp, Homo sapiens
tggtaaagtgagatt

SEQ ID NO: 1277026 - DNA, 15 bp, Homo sapiens
ttggtaaagtgagat

SEQ ID NO: 1277027 - DNA, 15 bp, Homo sapiens
tttggtaaagtgaga

SEQ ID NO: 1277028 - DNA, 15 bp, Homo sapiens
ctttggtaaagtgag

SEQ ID NO: 1277029 - DNA, 15 bp, Homo sapiens
tctttggtaaagtga

SEQ ID NO: 1277030 - DNA, 15 bp, Homo sapiens
ctctttggtaaagtg

SEQ ID NO: 1277031 - DNA, 15 bp, Homo sapiens
cctctttggtaaagt

SEQ ID NO: 1277032 - DNA, 15 bp, Homo sapiens
gcctctttggtaaag

SEQ ID NO: 1277033 - DNA, 15 bp, Homo sapiens
ggcctctttggtaaa

SEQ ID NO: 1277034 - DNA, 15 bp, Homo sapiens
aggcctctttggtaa

SEQ ID NO: 1277035 - DNA, 15 bp, Homo sapiens
taggcctctttggta

SEQ ID NO: 1277036 - DNA, 15 bp, Homo sapiens
ataggcctctttggt

SEQ ID NO: 1277037 - DNA, 15 bp, Homo sapiens
gataggcctctttgg

SEQ ID NO: 1277038 - DNA, 15 bp, Homo sapiens
cgataggcctctttg

SEQ ID NO: 1277039 - DNA, 15 bp, Homo sapiens
acgataggcctcttt

SEQ ID NO: 1277040 - DNA, 15 bp, Homo sapiens
cacgataggcctctt

SEQ ID NO: 1277041 - DNA, 15 bp, Homo sapiens
tcacgataggcctct

SEQ ID NO: 1277042 - DNA, 15 bp, Homo sapiens
gtcacgataggcctc

SEQ ID NO: 1277043 - DNA, 15 bp, Homo sapiens
ggtcacgataggcct

SEQ ID NO: 1277044 - DNA, 15 bp, Homo sapiens
tggtcacgataggcc

SEQ ID NO: 1277045 - DNA, 15 bp, Homo sapiens
gtggtcacgataggc

SEQ ID NO: 1277046 - DNA, 15 bp, Homo sapiens
agtggtcacgatagg

SEQ ID NO: 1277047 - DNA, 15 bp, Homo sapiens
gagtggtcacgatag

SEQ ID NO: 1277048 - DNA, 15 bp, Homo sapiens
agagtggtcacgata

SEQ ID NO: 1277049 - DNA, 15 bp, Homo sapiens
cagagtggtcacgat

SEQ ID NO: 1277050 - DNA, 15 bp, Homo sapiens
gcagagtggtcacga

SEQ ID NO: 1277051 - DNA, 15 bp, Homo sapiens
agcagagtggtcacg

SEQ ID NO: 1277052 - DNA, 15 bp, Homo sapiens
aagcagagtggtcac

SEQ ID NO: 1277053 - DNA, 15 bp, Homo sapiens
taagcagagtggtca

SEQ ID NO: 1277054 - DNA, 15 bp, Homo sapiens
ttaagcagagtggtc

SEQ ID NO: 1277055 - DNA, 15 bp, Homo sapiens
attaagcagagtggt

SEQ ID NO: 1277056 - DNA, 15 bp, Homo sapiens
tattaagcagagtgg

SEQ ID NO: 1277057 - DNA, 15 bp, Homo sapiens
gtattaagcagagtg

SEQ ID NO: 1277058 - DNA, 15 bp, Homo sapiens
agtattaagcagagt

SEQ ID NO: 1277059 - DNA, 15 bp, Homo sapiens
cagtattaagcagag

SEQ ID NO: 1277060 - DNA, 15 bp, Homo sapiens
acagtattaagcaga

SEQ ID NO: 1277061 - DNA, 15 bp, Homo sapiens
tacagtattaagcag

SEQ ID NO: 1277062 - DNA, 15 bp, Homo sapiens
ttacagtattaagca

SEQ ID NO: 1277063 - DNA, 15 bp, Homo sapiens
gttacagtattaagc

SEQ ID NO: 1277064 - DNA, 15 bp, Homo sapiens
ggttacagtattaag

SEQ ID NO: 1277065 - DNA, 15 bp, Homo sapiens
aggttacagtattaa

SEQ ID NO: 1277066 - DNA, 15 bp, Homo sapiens
caggttacagtatta

SEQ ID NO: 1277067 - DNA, 15 bp, Homo sapiens
gcaggttacagtatt

SEQ ID NO: 1277068 - DNA, 15 bp, Homo sapiens
ggcaggttacagtat

SEQ ID NO: 1277069 - DNA, 15 bp, Homo sapiens
gggcaggttacagta

SEQ ID NO: 1277070 - DNA, 15 bp, Homo sapiens
ggggcaggttacagt

SEQ ID NO: 1277071 - DNA, 15 bp, Homo sapiens
aggggcaggttacag

SEQ ID NO: 1277072 - DNA, 15 bp, Homo sapiens
taggggcaggttaca

SEQ ID NO: 1277073 - DNA, 15 bp, Homo sapiens
gtaggggcaggttac

SEQ ID NO: 1277074 - DNA, 15 bp, Homo sapiens
agtaggggcaggtta

SEQ ID NO: 1277075 - DNA, 15 bp, Homo sapiens
aagtaggggcaggtt

SEQ ID NO: 1277076 - DNA, 15 bp, Homo sapiens
gaagtaggggcaggt

SEQ ID NO: 1277077 - DNA, 15 bp, Homo sapiens
agaagtaggggcagg

SEQ ID NO: 1277078 - DNA, 15 bp, Homo sapiens
gagaagtaggggcag

SEQ ID NO: 1277079 - DNA, 15 bp, Homo sapiens
ggagaagtaggggca

SEQ ID NO: 1277080 - DNA, 15 bp, Homo sapiens
gggagaagtaggggc

SEQ ID NO: 1277081 - DNA, 15 bp, Homo sapiens
agggagaagtagggg

SEQ ID NO: 1277082 - DNA, 15 bp, Homo sapiens
cagggagaagtaggg

SEQ ID NO: 1277083 - DNA, 15 bp, Homo sapiens
tcagggagaagtagg

SEQ ID NO: 1277084 - DNA, 15 bp, Homo sapiens
ttcagggagaagtag

SEQ ID NO: 1277085 - DNA, 15 bp, Homo sapiens
gttcagggagaagta

SEQ ID NO: 1277086 - DNA, 15 bp, Homo sapiens
agttcagggagaagt

SEQ ID NO: 1277087 - DNA, 15 bp, Homo sapiens
aagttcagggagaag

SEQ ID NO: 1277088 - DNA, 15 bp, Homo sapiens
gaagttcagggagaa

SEQ ID NO: 1277089 - DNA, 15 bp, Homo sapiens
agaagttcagggaga

SEQ ID NO: 1277090 - DNA, 15 bp, Homo sapiens
gagaagttcagggag

SEQ ID NO: 1277091 - DNA, 15 bp, Homo sapiens
agagaagttcaggga

SEQ ID NO: 1277092 - DNA, 15 bp, Homo sapiens
tagagaagttcaggg

SEQ ID NO: 1277093 - DNA, 15 bp, Homo sapiens
atagagaagttcagg

SEQ ID NO: 1277094 - DNA, 15 bp, Homo sapiens
gatagagaagttcag

SEQ ID NO: 1277095 - DNA, 15 bp, Homo sapiens
ggatagagaagttca

SEQ ID NO: 1277096 - DNA, 15 bp, Homo sapiens
tggatagagaagttc

SEQ ID NO: 1277097 - DNA, 15 bp, Homo sapiens
atggatagagaagtt

SEQ ID NO: 1277098 - DNA, 15 bp, Homo sapiens
aatggatagagaagt

SEQ ID NO: 1277099 - DNA, 15 bp, Homo sapiens
caatggatagagaag

SEQ ID NO: 1277100 - DNA, 15 bp, Homo sapiens
gcaatggatagagaa

SEQ ID NO: 1277101 - DNA, 15 bp, Homo sapiens
tgcaatggatagaga

SEQ ID NO: 1277102 - DNA, 15 bp, Homo sapiens
gtgcaatggatagag

SEQ ID NO: 1277103 - DNA, 15 bp, Homo sapiens
agtgcaatggataga

SEQ ID NO: 1277104 - DNA, 15 bp, Homo sapiens
gagtgcaatggatag

SEQ ID NO: 1277105 - DNA, 15 bp, Homo sapiens
agagtgcaatggata

SEQ ID NO: 1277106 - DNA, 15 bp, Homo sapiens
tagagtgcaatggat

SEQ ID NO: 1277107 - DNA, 15 bp, Homo sapiens
atagagtgcaatgga

SEQ ID NO: 1277108 - DNA, 15 bp, Homo sapiens
aatagagtgcaatgg

SEQ ID NO: 1277109 - DNA, 15 bp, Homo sapiens
gaatagagtgcaatg

SEQ ID NO: 1277110 - DNA, 15 bp, Homo sapiens
ggaatagagtgcaat

SEQ ID NO: 1277111 - DNA, 15 bp, Homo sapiens
aggaatagagtgcaa

SEQ ID NO: 1277112 - DNA, 15 bp, Homo sapiens
aaggaatagagtgca

SEQ ID NO: 1277113 - DNA, 15 bp, Homo sapiens
aaaggaatagagtgc

SEQ ID NO: 1277114 - DNA, 15 bp, Homo sapiens
aaaaggaatagagtg

SEQ ID NO: 1277115 - DNA, 15 bp, Homo sapiens
gaaaaggaatagagt

SEQ ID NO: 1277116 - DNA, 15 bp, Homo sapiens
agaaaaggaatagag

SEQ ID NO: 1277117 - DNA, 15 bp, Homo sapiens
tagaaaaggaataga

SEQ ID NO: 1277118 - DNA, 15 bp, Homo sapiens
ctagaaaaggaatag

SEQ ID NO: 1277119 - DNA, 15 bp, Homo sapiens
gctagaaaaggaata

SEQ ID NO: 1277120 - DNA, 15 bp, Homo sapiens
tgctagaaaaggaat

SEQ ID NO: 1277121 - DNA, 15 bp, Homo sapiens
atgctagaaaaggaa

SEQ ID NO: 1277122 - DNA, 15 bp, Homo sapiens
tatgctagaaaagga

SEQ ID NO: 1277123 - DNA, 15 bp, Homo sapiens
ctatgctagaaaagg

SEQ ID NO: 1277124 - DNA, 15 bp, Homo sapiens
actatgctagaaaag

SEQ ID NO: 1277125 - DNA, 15 bp, Homo sapiens
tactatgctagaaaa

SEQ ID NO: 1277126 - DNA, 15 bp, Homo sapiens
atactatgctagaaa

SEQ ID NO: 1277127 - DNA, 15 bp, Homo sapiens
tatactatgctagaa

SEQ ID NO: 1277128 - DNA, 15 bp, Homo sapiens
atatactatgctaga

SEQ ID NO: 1277129 - DNA, 15 bp, Homo sapiens
catatactatgctag

SEQ ID NO: 1277130 - DNA, 15 bp, Homo sapiens
ccatatactatgcta

SEQ ID NO: 1277131 - DNA, 15 bp, Homo sapiens
accatatactatgct

SEQ ID NO: 1277132 - DNA, 15 bp, Homo sapiens
aaccatatactatgc

SEQ ID NO: 1277133 - DNA, 15 bp, Homo sapiens
aaaccatatactatg

SEQ ID NO: 1277134 - DNA, 15 bp, Homo sapiens
taaaccatatactat

SEQ ID NO: 1277135 - DNA, 15 bp, Homo sapiens
gtaaaccatatacta

SEQ ID NO: 1277136 - DNA, 15 bp, Homo sapiens
ggtaaaccatatact

SEQ ID NO: 1277137 - DNA, 15 bp, Homo sapiens
aggtaaaccatatac

SEQ ID NO: 1277138 - DNA, 15 bp, Homo sapiens
taggtaaaccatata

SEQ ID NO: 1277139 - DNA, 15 bp, Homo sapiens
ataggtaaaccatat

SEQ ID NO: 1277140 - DNA, 15 bp, Homo sapiens
aataggtaaaccata

SEQ ID NO: 1277141 - DNA, 15 bp, Homo sapiens
aaataggtaaaccat

SEQ ID NO: 1277142 - DNA, 15 bp, Homo sapiens
taaataggtaaacca

SEQ ID NO: 1277143 - DNA, 15 bp, Homo sapiens
ataaataggtaaacc

SEQ ID NO: 1277144 - DNA, 15 bp, Homo sapiens
tataaataggtaaac

SEQ ID NO: 1277145 - DNA, 15 bp, Homo sapiens
gtataaataggtaaa

SEQ ID NO: 1277146 - DNA, 15 bp, Homo sapiens
agtataaataggtaa

SEQ ID NO: 1277147 - DNA, 15 bp, Homo sapiens
cagtataaataggta

SEQ ID NO: 1277148 - DNA, 15 bp, Homo sapiens
gcagtataaataggt

SEQ ID NO: 1277149 - DNA, 15 bp, Homo sapiens
agcagtataaatagg

SEQ ID NO: 1277150 - DNA, 15 bp, Homo sapiens
aagcagtataaatag

SEQ ID NO: 1277151 - DNA, 15 bp, Homo sapiens
aaagcagtataaata

SEQ ID NO: 1277152 - DNA, 15 bp, Homo sapiens
aaaagcagtataaat

SEQ ID NO: 1277153 - DNA, 15 bp, Homo sapiens
aaaaagcagtataaa

SEQ ID NO: 1277154 - DNA, 15 bp, Homo sapiens
caaaaagcagtataa

SEQ ID NO: 1277155 - DNA, 15 bp, Homo sapiens
ccaaaaagcagtata

SEQ ID NO: 1277156 - DNA, 15 bp, Homo sapiens
accaaaaagcagtat

SEQ ID NO: 1277157 - DNA, 15 bp, Homo sapiens
aaccaaaaagcagta

SEQ ID NO: 1277158 - DNA, 15 bp, Homo sapiens
taaccaaaaagcagt

SEQ ID NO: 1277159 - DNA, 15 bp, Homo sapiens
gtaaccaaaaagcag

SEQ ID NO: 1277160 - DNA, 15 bp, Homo sapiens
agtaaccaaaaagca

SEQ ID NO: 1277161 - DNA, 15 bp, Homo sapiens
cagtaaccaaaaagc

SEQ ID NO: 1277162 - DNA, 15 bp, Homo sapiens
acagtaaccaaaaag

SEQ ID NO: 1277163 - DNA, 15 bp, Homo sapiens
gacagtaaccaaaaa

SEQ ID NO: 1277164 - DNA, 15 bp, Homo sapiens
agacagtaaccaaaa

SEQ ID NO: 1277165 - DNA, 15 bp, Homo sapiens
aagacagtaaccaaa

SEQ ID NO: 1277166 - DNA, 15 bp, Homo sapiens
aaagacagtaaccaa

SEQ ID NO: 1277167 - DNA, 15 bp, Homo sapiens
aaaagacagtaacca

SEQ ID NO: 1277168 - DNA, 15 bp, Homo sapiens
aaaaagacagtaacc

SEQ ID NO: 1277169 - DNA, 15 bp, Homo sapiens
gaaaaagacagtaac

SEQ ID NO: 1277170 - DNA, 15 bp, Homo sapiens
ggaaaaagacagtaa

SEQ ID NO: 1277171 - DNA, 15 bp, Homo sapiens
gggaaaaagacagta

SEQ ID NO: 1277172 - DNA, 15 bp, Homo sapiens
agggaaaaagacagt

SEQ ID NO: 1277173 - DNA, 15 bp, Homo sapiens
gagggaaaaagacag

SEQ ID NO: 1277174 - DNA, 15 bp, Homo sapiens
agagggaaaaagaca

SEQ ID NO: 1277175 - DNA, 15 bp, Homo sapiens
cagagggaaaaagac

SEQ ID NO: 1277176 - DNA, 15 bp, Homo sapiens
gcagagggaaaaaga

SEQ ID NO: 1277177 - DNA, 15 bp, Homo sapiens
agcagagggaaaaag

SEQ ID NO: 1277178 - DNA, 15 bp, Homo sapiens
gagcagagggaaaaa

SEQ ID NO: 1277179 - DNA, 15 bp, Homo sapiens
ggagcagagggaaaa

SEQ ID NO: 1277180 - DNA, 15 bp, Homo sapiens
tggagcagagggaaa

SEQ ID NO: 1277181 - DNA, 15 bp, Homo sapiens
ttggagcagagggaa

SEQ ID NO: 1277182 - DNA, 15 bp, Homo sapiens
cttggagcagaggga

SEQ ID NO: 1277183 - DNA, 15 bp, Homo sapiens
tcttggagcagaggg

SEQ ID NO: 1277184 - DNA, 15 bp, Homo sapiens
ttcttggagcagagg

SEQ ID NO: 1277185 - DNA, 15 bp, Homo sapiens
tttcttggagcagag

SEQ ID NO: 1277186 - DNA, 15 bp, Homo sapiens
gtttcttggagcaga

SEQ ID NO: 1277187 - DNA, 15 bp, Homo sapiens
tgtttcttggagcag

SEQ ID NO: 1277188 - DNA, 15 bp, Homo sapiens
ctgtttcttggagca

SEQ ID NO: 1277189 - DNA, 15 bp, Homo sapiens
cctgtttcttggagc

SEQ ID NO: 1277190 - DNA, 15 bp, Homo sapiens
tcctgtttcttggag

SEQ ID NO: 1277191 - DNA, 15 bp, Homo sapiens
ttcctgtttcttgga

SEQ ID NO: 1277192 - DNA, 15 bp, Homo sapiens
attcctgtttcttgg

SEQ ID NO: 1277193 - DNA, 15 bp, Homo sapiens
cattcctgtttcttg

SEQ ID NO: 1277194 - DNA, 15 bp, Homo sapiens
acattcctgtttctt

SEQ ID NO: 1277195 - DNA, 15 bp, Homo sapiens
aacattcctgtttct

SEQ ID NO: 1277196 - DNA, 15 bp, Homo sapiens
aaacattcctgtttc

SEQ ID NO: 1277197 - DNA, 15 bp, Homo sapiens
caaacattcctgttt

SEQ ID NO: 1277198 - DNA, 15 bp, Homo sapiens
acaaacattcctgtt

SEQ ID NO: 1277199 - DNA, 15 bp, Homo sapiens
aacaaacattcctgt

SEQ ID NO: 1277200 - DNA, 15 bp, Homo sapiens
aaacaaacattcctg

SEQ ID NO: 1277201 - DNA, 15 bp, Homo sapiens
aaaacaaacattcct

SEQ ID NO: 1277202 - DNA, 15 bp, Homo sapiens
caaaacaaacattcc

SEQ ID NO: 1277203 - DNA, 15 bp, Homo sapiens
acaaaacaaacattc

SEQ ID NO: 1277204 - DNA, 15 bp, Homo sapiens
aacaaaacaaacatt

SEQ ID NO: 1277205 - DNA, 15 bp, Homo sapiens
gaacaaaacaaacat

SEQ ID NO: 1277206 - DNA, 15 bp, Homo sapiens
tgaacaaaacaaaca

SEQ ID NO: 1277207 - DNA, 15 bp, Homo sapiens
gtgaacaaaacaaac

SEQ ID NO: 1277208 - DNA, 15 bp, Homo sapiens
agtgaacaaaacaaa

SEQ ID NO: 1277209 - DNA, 15 bp, Homo sapiens
tagtgaacaaaacaa

SEQ ID NO: 1277210 - DNA, 15 bp, Homo sapiens
ttagtgaacaaaaca

SEQ ID NO: 1277211 - DNA, 15 bp, Homo sapiens
attagtgaacaaaac

SEQ ID NO: 1277212 - DNA, 15 bp, Homo sapiens
tattagtgaacaaaa

SEQ ID NO: 1277213 - DNA, 15 bp, Homo sapiens
atattagtgaacaaa

SEQ ID NO: 1277214 - DNA, 15 bp, Homo sapiens
tatattagtgaacaa

SEQ ID NO: 1277215 - DNA, 15 bp, Homo sapiens
atatattagtgaaca

SEQ ID NO: 1277216 - DNA, 15 bp, Homo sapiens
tatatattagtgaac

SEQ ID NO: 1277217 - DNA, 15 bp, Homo sapiens
atatatattagtgaa

SEQ ID NO: 1277218 - DNA, 15 bp, Homo sapiens
aatatatattagtga

SEQ ID NO: 1277219 - DNA, 15 bp, Homo sapiens
aaatatatattagtg

SEQ ID NO: 1277220 - DNA, 15 bp, Homo sapiens
gaaatatatattagt

SEQ ID NO: 1277221 - DNA, 15 bp, Homo sapiens
agaaatatatattag

SEQ ID NO: 1277222 - DNA, 15 bp, Homo sapiens
tagaaatatatatta

SEQ ID NO: 1277223 - DNA, 15 bp, Homo sapiens
ctagaaatatatatt

SEQ ID NO: 1277224 - DNA, 15 bp, Homo sapiens
gctagaaatatatat

SEQ ID NO: 1277225 - DNA, 15 bp, Homo sapiens
tgctagaaatatata

SEQ ID NO: 1277226 - DNA, 15 bp, Homo sapiens
ctgctagaaatatat

SEQ ID NO: 1277227 - DNA, 15 bp, Homo sapiens
actgctagaaatata

SEQ ID NO: 1277228 - DNA, 15 bp, Homo sapiens
aactgctagaaatat

SEQ ID NO: 1277229 - DNA, 15 bp, Homo sapiens
taactgctagaaata

SEQ ID NO: 1277230 - DNA, 15 bp, Homo sapiens
ctaactgctagaaat

SEQ ID NO: 1277231 - DNA, 15 bp, Homo sapiens
tctaactgctagaaa

SEQ ID NO: 1277232 - DNA, 15 bp, Homo sapiens
ttctaactgctagaa

SEQ ID NO: 1277233 - DNA, 15 bp, Homo sapiens
attctaactgctaga

SEQ ID NO: 1277234 - DNA, 15 bp, Homo sapiens
tattctaactgctag

SEQ ID NO: 1277235 - DNA, 15 bp, Homo sapiens
ctattctaactgcta

SEQ ID NO: 1277236 - DNA, 15 bp, Homo sapiens
actattctaactgct

SEQ ID NO: 1277237 - DNA, 15 bp, Homo sapiens
cactattctaactgc

SEQ ID NO: 1277238 - DNA, 15 bp, Homo sapiens
acactattctaactg

SEQ ID NO: 1277239 - DNA, 15 bp, Homo sapiens
aacactattctaact

SEQ ID NO: 1277240 - DNA, 15 bp, Homo sapiens
aaacactattctaac

SEQ ID NO: 1277241 - DNA, 15 bp, Homo sapiens
caaacactattctaa

SEQ ID NO: 1277242 - DNA, 15 bp, Homo sapiens
tcaaacactattcta

SEQ ID NO: 1277243 - DNA, 15 bp, Homo sapiens
gcatcaaacactatt

SEQ ID NO: 1277244 - DNA, 15 bp, Homo sapiens
agcatcaaacactat

SEQ ID NO: 1277245 - DNA, 15 bp, Homo sapiens
aagcatcaaacacta

SEQ ID NO: 1277246 - DNA, 15 bp, Homo sapiens
taagcatcaaacact

SEQ ID NO: 1277247 - DNA, 15 bp, Homo sapiens
ctaagcatcaaacac

SEQ ID NO: 1277248 - DNA, 15 bp, Homo sapiens
actaagcatcaaaca

SEQ ID NO: 1277249 - DNA, 15 bp, Homo sapiens
tactaagcatcaaac

SEQ ID NO: 1277250 - DNA, 15 bp, Homo sapiens
ctactaagcatcaaa

SEQ ID NO: 1277251 - DNA, 15 bp, Homo sapiens
cctactaagcatcaa

SEQ ID NO: 1277252 - DNA, 15 bp, Homo sapiens
gcctactaagcatca

SEQ ID NO: 1277253 - DNA, 15 bp, Homo sapiens
tgcctactaagcatc

SEQ ID NO: 1277254 - DNA, 15 bp, Homo sapiens
atgcctactaagcat

SEQ ID NO: 1277255 - DNA, 15 bp, Homo sapiens
aatgcctactaagca

SEQ ID NO: 1277256 - DNA, 15 bp, Homo sapiens
aaatgcctactaagc

SEQ ID NO: 1277257 - DNA, 15 bp, Homo sapiens
taaatgcctactaag

SEQ ID NO: 1277258 - DNA, 15 bp, Homo sapiens
ctaaatgcctactaa

SEQ ID NO: 1277259 - DNA, 15 bp, Homo sapiens
actaaatgcctacta

SEQ ID NO: 1277260 - DNA, 15 bp, Homo sapiens
tactaaatgcctact

SEQ ID NO: 1277261 - DNA, 15 bp, Homo sapiens
ttactaaatgcctac

SEQ ID NO: 1277262 - DNA, 15 bp, Homo sapiens
tttactaaatgccta

SEQ ID NO: 1277263 - DNA, 15 bp, Homo sapiens
atttactaaatgcct

SEQ ID NO: 1277264 - DNA, 15 bp, Homo sapiens
tatttactaaatgcc

SEQ ID NO: 1277265 - DNA, 15 bp, Homo sapiens
atatttactaaatgc

SEQ ID NO: 1277266 - DNA, 15 bp, Homo sapiens
aatatttactaaatg

SEQ ID NO: 1277267 - DNA, 15 bp, Homo sapiens
aaatatttactaaat

SEQ ID NO: 1277268 - DNA, 15 bp, Homo sapiens
taaatatttactaaa

SEQ ID NO: 1277269 - DNA, 15 bp, Homo sapiens
ataaatatttactaa

SEQ ID NO: 1277270 - DNA, 15 bp, Homo sapiens
aataaatatttacta

SEQ ID NO: 1277271 - DNA, 15 bp, Homo sapiens
caataaatatttact

SEQ ID NO: 1277272 - DNA, 15 bp, Homo sapiens
tcaataaatatttac

SEQ ID NO: 1277273 - DNA, 15 bp, Homo sapiens
ttcaataaatattta

SEQ ID NO: 1277274 - DNA, 15 bp, Homo sapiens
attcaataaatattt

SEQ ID NO: 1277275 - DNA, 15 bp, Homo sapiens
tattcaataaatatt

SEQ ID NO: 1277276 - DNA, 15 bp, Homo sapiens
ttattcaataaatat

SEQ ID NO: 1277277 - DNA, 15 bp, Homo sapiens
tttattcaataaata

SEQ ID NO: 1277278 - DNA, 15 bp, Homo sapiens
atttattcaataaat

SEQ ID NO: 1277279 - DNA, 15 bp, Homo sapiens
gatttattcaataaa

SEQ ID NO: 1277280 - DNA, 15 bp, Homo sapiens
cgatttattcaataa

SEQ ID NO: 1277281 - DNA, 15 bp, Homo sapiens
tcgatttattcaata

SEQ ID NO: 1277282 - DNA, 15 bp, Homo sapiens
ttcgatttattcaat

SEQ ID NO: 1277283 - DNA, 15 bp, Homo sapiens
attcgatttattcaa

SEQ ID NO: 1277284 - DNA, 15 bp, Homo sapiens
tattcgatttattca

SEQ ID NO: 1277285 - DNA, 15 bp, Homo sapiens
gtattcgatttattc

SEQ ID NO: 1277286 - DNA, 15 bp, Homo sapiens
tgtattcgatttatt

SEQ ID NO: 1277287 - DNA, 15 bp, Homo sapiens
atgtattcgatttat

SEQ ID NO: 1277288 - DNA, 15 bp, Homo sapiens
tatgtattcgattta

SEQ ID NO: 1277289 - DNA, 15 bp, Homo sapiens
ttatgtattcgattt

SEQ ID NO: 1277290 - DNA, 15 bp, Homo sapiens
cttatgtattcgatt

SEQ ID NO: 1277291 - DNA, 15 bp, Homo sapiens
gcttatgtattcgat

SEQ ID NO: 1277292 - DNA, 15 bp, Homo sapiens
tgcttatgtattcga

SEQ ID NO: 1277293 - DNA, 15 bp, Homo sapiens
ttgcttatgtattcg

SEQ ID NO: 1277294 - DNA, 15 bp, Homo sapiens
tttgcttatgtattc

SEQ ID NO: 1277295 - DNA, 15 bp, Homo sapiens
gtttgcttatgtatt

SEQ ID NO: 1277296 - DNA, 15 bp, Homo sapiens
tgtttgcttatgtat

SEQ ID NO: 1277297 - DNA, 15 bp, Homo sapiens
ctgtttgcttatgta

SEQ ID NO: 1277298 - DNA, 15 bp, Homo sapiens
actgtttgcttatgt

SEQ ID NO: 1277299 - DNA, 15 bp, Homo sapiens
tactgtttgcttatg

SEQ ID NO: 1277300 - DNA, 15 bp, Homo sapiens
atactgtttgcttat

SEQ ID NO: 1277301 - DNA, 15 bp, Homo sapiens
gatactgtttgctta

SEQ ID NO: 1277302 - DNA, 15 bp, Homo sapiens
ggatactgtttgctt

SEQ ID NO: 1277303 - DNA, 15 bp, Homo sapiens
tggatactgtttgct

SEQ ID NO: 1277304 - DNA, 15 bp, Homo sapiens
ttggatactgtttgc

SEQ ID NO: 1277305 - DNA, 15 bp, Homo sapiens
tttggatactgtttg

SEQ ID NO: 1277306 - DNA, 15 bp, Homo sapiens
ttttggatactgttt

SEQ ID NO: 1277307 - DNA, 15 bp, Homo sapiens
attttggatactgtt

SEQ ID NO: 1277308 - DNA, 15 bp, Homo sapiens
aattttggatactgt

SEQ ID NO: 1277309 - DNA, 15 bp, Homo sapiens
taattttggatactg

SEQ ID NO: 1277310 - DNA, 15 bp, Homo sapiens
ataattttggatact

SEQ ID NO: 1277311 - DNA, 15 bp, Homo sapiens
gataattttggatac

SEQ ID NO: 1277312 - DNA, 15 bp, Homo sapiens
ggataattttggata

SEQ ID NO: 1277313 - DNA, 15 bp, Homo sapiens
aggataattttggat

SEQ ID NO: 1277314 - DNA, 15 bp, Homo sapiens
gaggataattttgga

SEQ ID NO: 1277315 - DNA, 15 bp, Homo sapiens
ggaggataattttgg

SEQ ID NO: 1277316 - DNA, 15 bp, Homo sapiens
cggaggataattttg

SEQ ID NO: 1277317 - DNA, 15 bp, Homo sapiens
acggaggataatttt

SEQ ID NO: 1277318 - DNA, 15 bp, Homo sapiens
tacggaggataattt

SEQ ID NO: 1277319 - DNA, 15 bp, Homo sapiens
ttacggaggataatt

SEQ ID NO: 1277320 - DNA, 15 bp, Homo sapiens
tttacggaggataat

SEQ ID NO: 1277321 - DNA, 15 bp, Homo sapiens
ttttacggaggataa

SEQ ID NO: 1277322 - DNA, 15 bp, Homo sapiens
tttttacggaggata

SEQ ID NO: 1277323 - DNA, 15 bp, Homo sapiens
atttttacggaggat

SEQ ID NO: 1277324 - DNA, 15 bp, Homo sapiens
catttttacggagga

SEQ ID NO: 1277325 - DNA, 15 bp, Homo sapiens
gcatttttacggagg

SEQ ID NO: 1277326 - DNA, 15 bp, Homo sapiens
ggcatttttacggag

SEQ ID NO: 1277327 - DNA, 15 bp, Homo sapiens
aggcatttttacgga

SEQ ID NO: 1277328 - DNA, 15 bp, Homo sapiens
taggcatttttacgg

SEQ ID NO: 1277329 - DNA, 15 bp, Homo sapiens
ttaggcatttttacg

SEQ ID NO: 1277330 - DNA, 15 bp, Homo sapiens
attaggcatttttac

SEQ ID NO: 1277331 - DNA, 15 bp, Homo sapiens
aattaggcattttta

SEQ ID NO: 1277332 - DNA, 15 bp, Homo sapiens
aaattaggcattttt

SEQ ID NO: 1277333 - DNA, 15 bp, Homo sapiens
gaaattaggcatttt

SEQ ID NO: 1277334 - DNA, 15 bp, Homo sapiens
agaaattaggcattt

SEQ ID NO: 1277335 - DNA, 15 bp, Homo sapiens
aagaaattaggcatt

SEQ ID NO: 1277336 - DNA, 15 bp, Homo sapiens
aaagaaattaggcat

SEQ ID NO: 1277337 - DNA, 15 bp, Homo sapiens
aaaagaaattaggca

SEQ ID NO: 1277338 - DNA, 15 bp, Homo sapiens
aaaaagaaattaggc

SEQ ID NO: 1277339 - DNA, 15 bp, Homo sapiens
aaaaaagaaattagg

SEQ ID NO: 1277340 - DNA, 15 bp, Homo sapiens
aaaaaaagaaattag

SEQ ID NO: 1277341 - DNA, 15 bp, Homo sapiens
aaaaaaaagaaatta

SEQ ID NO: 1277342 - DNA, 15 bp, Homo sapiens
gaaaaaaaagaaatt

SEQ ID NO: 1277343 - DNA, 15 bp, Homo sapiens
ggaaaaaaaagaaat

SEQ ID NO: 1277344 - DNA, 15 bp, Homo sapiens
aggaaaaaaaagaaa

SEQ ID NO: 1277345 - DNA, 15 bp, Homo sapiens
gaggaaaaaaaagaa

SEQ ID NO: 1277346 - DNA, 15 bp, Homo sapiens
agaggaaaaaaaaga

SEQ ID NO: 1277347 - DNA, 15 bp, Homo sapiens
cagaggaaaaaaaag

SEQ ID NO: 1277348 - DNA, 15 bp, Homo sapiens
acagaggaaaaaaaa

SEQ ID NO: 1277349 - DNA, 15 bp, Homo sapiens
tacagaggaaaaaaa

SEQ ID NO: 1277350 - DNA, 15 bp, Homo sapiens
atacagaggaaaaaa

SEQ ID NO: 1277351 - DNA, 15 bp, Homo sapiens
gatacagaggaaaaa

SEQ ID NO: 1277352 - DNA, 15 bp, Homo sapiens
agatacagaggaaaa

SEQ ID NO: 1277353 - DNA, 15 bp, Homo sapiens
gagatacagaggaaa

SEQ ID NO: 1277354 - DNA, 15 bp, Homo sapiens
tgagatacagaggaa

SEQ ID NO: 1277355 - DNA, 15 bp, Homo sapiens
ttgagatacagagga

SEQ ID NO: 1277356 - DNA, 15 bp, Homo sapiens
attgagatacagagg

SEQ ID NO: 1277357 - DNA, 15 bp, Homo sapiens
cattgagatacagag

SEQ ID NO: 1277358 - DNA, 15 bp, Homo sapiens
tcattgagatacaga

SEQ ID NO: 1277359 - DNA, 15 bp, Homo sapiens
ttcattgagatacag

SEQ ID NO: 1277360 - DNA, 15 bp, Homo sapiens
attcattgagataca

SEQ ID NO: 1277361 - DNA, 15 bp, Homo sapiens
tattcattgagatac

SEQ ID NO: 1277362 - DNA, 15 bp, Homo sapiens
ttattcattgagata

SEQ ID NO: 1277363 - DNA, 15 bp, Homo sapiens
tttattcattgagat

SEQ ID NO: 1277364 - DNA, 15 bp, Homo sapiens
ttttattcattgaga

SEQ ID NO: 1277365 - DNA, 15 bp, Homo sapiens
tttttattcattgag

SEQ ID NO: 1277366 - DNA, 15 bp, Homo sapiens
ttttttattcattga

SEQ ID NO: 1277367 - DNA, 15 bp, Homo sapiens
tttttttattcattg

SEQ ID NO: 1277368 - DNA, 15 bp, Homo sapiens
ttttttttattcatt

SEQ ID NO: 1277369 - DNA, 15 bp, Homo sapiens
tttttttttattcat

SEQ ID NO: 1277370 - DNA, 15 bp, Homo sapiens
atttttttttattca

SEQ ID NO: 1277371 - DNA, 15 bp, Homo sapiens
tatttttttttattc

SEQ ID NO: 1277372 - DNA, 15 bp, Homo sapiens
gtatttttttttatt

SEQ ID NO: 1277373 - DNA, 15 bp, Homo sapiens
agtatttttttttat

SEQ ID NO: 1277374 - DNA, 15 bp, Homo sapiens
cagtattttttttta

SEQ ID NO: 1277375 - DNA, 15 bp, Homo sapiens
acagtattttttttt

SEQ ID NO: 1277376 - DNA, 15 bp, Homo sapiens
gacagtatttttttt

SEQ ID NO: 1277377 - DNA, 15 bp, Homo sapiens
agacagtattttttt

SEQ ID NO: 1277378 - DNA, 15 bp, Homo sapiens
aagacagtatttttt

SEQ ID NO: 1277379 - DNA, 15 bp, Homo sapiens
aaagacagtattttt

SEQ ID NO: 1277380 - DNA, 15 bp, Homo sapiens
gaaagacagtatttt

SEQ ID NO: 1277381 - DNA, 15 bp, Homo sapiens
agaaagacagtattt

SEQ ID NO: 1277382 - DNA, 15 bp, Homo sapiens
aagaaagacagtatt

SEQ ID NO: 1277383 - DNA, 15 bp, Homo sapiens
aaagaaagacagtat

SEQ ID NO: 1277384 - DNA, 15 bp, Homo sapiens
taaagaaagacagta

SEQ ID NO: 1277385 - DNA, 15 bp, Homo sapiens
gtaaagaaagacagt

SEQ ID NO: 1277386 - DNA, 15 bp, Homo sapiens
ggtaaagaaagacag

SEQ ID NO: 1277387 - DNA, 15 bp, Homo sapiens
gggtaaagaaagaca

SEQ ID NO: 1277388 - DNA, 15 bp, Homo sapiens
tgggtaaagaaagac

SEQ ID NO: 1277389 - DNA, 15 bp, Homo sapiens
gtgggtaaagaaaga

SEQ ID NO: 1277390 - DNA, 15 bp, Homo sapiens
agtgggtaaagaaag

SEQ ID NO: 1277391 - DNA, 15 bp, Homo sapiens
aagtgggtaaagaaa

SEQ ID NO: 1277392 - DNA, 15 bp, Homo sapiens
taagtgggtaaagaa

SEQ ID NO: 1277393 - DNA, 15 bp, Homo sapiens
ataagtgggtaaaga

SEQ ID NO: 1277394 - DNA, 15 bp, Homo sapiens
aataagtgggtaaag

SEQ ID NO: 1277395 - DNA, 15 bp, Homo sapiens
aaataagtgggtaaa

SEQ ID NO: 1277396 - DNA, 15 bp, Homo sapiens
aaaataagtgggtaa

SEQ ID NO: 1277397 - DNA, 15 bp, Homo sapiens
caaaataagtgggta

SEQ ID NO: 1277398 - DNA, 15 bp, Homo sapiens
ccaaaataagtgggt

SEQ ID NO: 1277399 - DNA, 15 bp, Homo sapiens
tccaaaataagtggg

SEQ ID NO: 1277400 - DNA, 15 bp, Homo sapiens
atccaaaataagtgg

SEQ ID NO: 1277401 - DNA, 15 bp, Homo sapiens
aatccaaaataagtg

SEQ ID NO: 1277402 - DNA, 15 bp, Homo sapiens
aaatccaaaataagt

SEQ ID NO: 1277403 - DNA, 15 bp, Homo sapiens
aaaatccaaaataag

SEQ ID NO: 1277404 - DNA, 15 bp, Homo sapiens
aaaaatccaaaataa

SEQ ID NO: 1277405 - DNA, 15 bp, Homo sapiens
aaaaaatccaaaata

SEQ ID NO: 1277406 - DNA, 15 bp, Homo sapiens
aaaaaaatccaaaat

SEQ ID NO: 1277407 - DNA, 15 bp, Homo sapiens
caaaaaaatccaaaa

SEQ ID NO: 1277408 - DNA, 15 bp, Homo sapiens
ccaaaaaaatccaaa

SEQ ID NO: 1277409 - DNA, 15 bp, Homo sapiens
accaaaaaaatccaa

SEQ ID NO: 1277410 - DNA, 15 bp, Homo sapiens
gaccaaaaaaatcca

SEQ ID NO: 1277411 - DNA, 15 bp, Homo sapiens
agaccaaaaaaatcc

SEQ ID NO: 1277412 - DNA, 15 bp, Homo sapiens
aagaccaaaaaaatc

SEQ ID NO: 1277413 - DNA, 15 bp, Homo sapiens
caagaccaaaaaaat

SEQ ID NO: 1277414 - DNA, 15 bp, Homo sapiens
acaagaccaaaaaaa

SEQ ID NO: 1277415 - DNA, 15 bp, Homo sapiens
aacaagaccaaaaaa

SEQ ID NO: 1277416 - DNA, 15 bp, Homo sapiens
aaacaagaccaaaaa

SEQ ID NO: 1277417 - DNA, 15 bp, Homo sapiens
aaaacaagaccaaaa

SEQ ID NO: 1277418 - DNA, 15 bp, Homo sapiens
aaaaacaagaccaaa

SEQ ID NO: 1277419 - DNA, 15 bp, Homo sapiens
aaaaaacaagaccaa

SEQ ID NO: 1277420 - DNA, 15 bp, Homo sapiens
caaaaaacaagacca

SEQ ID NO: 1277421 - DNA, 15 bp, Homo sapiens
acaaaaaacaagacc

SEQ ID NO: 1277422 - DNA, 15 bp, Homo sapiens
aacaaaaaacaagac

SEQ ID NO: 1277423 - DNA, 15 bp, Homo sapiens
caaacaaaaaacaag

SEQ ID NO: 1277424 - DNA, 15 bp, Homo sapiens
acaaacaaaaaacaa

SEQ ID NO: 1277425 - DNA, 15 bp, Homo sapiens
aacaaacaaaaaaca

SEQ ID NO: 1277426 - DNA, 15 bp, Homo sapiens
tcaaaaacaaacaaa

SEQ ID NO: 1277427 - DNA, 15 bp, Homo sapiens
ctcaaaaacaaacaa

SEQ ID NO: 1277428 - DNA, 15 bp, Homo sapiens
actcaaaaacaaaca

SEQ ID NO: 1277429 - DNA, 15 bp, Homo sapiens
aactcaaaaacaaac

SEQ ID NO: 1277430 - DNA, 15 bp, Homo sapiens
caaactcaaaaacaa

SEQ ID NO: 1277431 - DNA, 15 bp, Homo sapiens
tcaaactcaaaaaca

SEQ ID NO: 1277432 - DNA, 15 bp, Homo sapiens
gtcaaactcaaaaac

SEQ ID NO: 1277433 - DNA, 15 bp, Homo sapiens
tgtcaaactcaaaaa

SEQ ID NO: 1277434 - DNA, 15 bp, Homo sapiens
ttgtcaaactcaaaa

SEQ ID NO: 1277435 - DNA, 15 bp, Homo sapiens
tttgtcaaactcaaa

SEQ ID NO: 1277436 - DNA, 15 bp, Homo sapiens
atttgtcaaactcaa

SEQ ID NO: 1277437 - DNA, 15 bp, Homo sapiens
aatttgtcaaactca

SEQ ID NO: 1277438 - DNA, 15 bp, Homo sapiens
aaatttgtcaaactc

SEQ ID NO: 1277439 - DNA, 15 bp, Homo sapiens
taaatttgtcaaact

SEQ ID NO: 1277440 - DNA, 15 bp, Homo sapiens
ataaatttgtcaaac

SEQ ID NO: 1277441 - DNA, 15 bp, Homo sapiens
aataaatttgtcaaa

SEQ ID NO: 1277442 - DNA, 15 bp, Homo sapiens
caataaatttgtcaa

SEQ ID NO: 1277443 - DNA, 15 bp, Homo sapiens
ccaataaatttgtca

SEQ ID NO: 1277444 - DNA, 15 bp, Homo sapiens
accaataaatttgtc

SEQ ID NO: 1277445 - DNA, 15 bp, Homo sapiens
taccaataaatttgt

SEQ ID NO: 1277446 - DNA, 15 bp, Homo sapiens
ataccaataaatttg

SEQ ID NO: 1277447 - DNA, 15 bp, Homo sapiens
aataccaataaattt

SEQ ID NO: 1277448 - DNA, 15 bp, Homo sapiens
aaataccaataaatt

SEQ ID NO: 1277449 - DNA, 15 bp, Homo sapiens
aaaataccaataaat

SEQ ID NO: 1277450 - DNA, 15 bp, Homo sapiens
taaaataccaataaa

SEQ ID NO: 1277451 - DNA, 15 bp, Homo sapiens
ataaaataccaataa

SEQ ID NO: 1277452 - DNA, 15 bp, Homo sapiens
aataaaataccaata

SEQ ID NO: 1277453 - DNA, 15 bp, Homo sapiens
taataaaataccaat

SEQ ID NO: 1277454 - DNA, 15 bp, Homo sapiens
ttaataaaataccaa

SEQ ID NO: 1277455 - DNA, 15 bp, Homo sapiens
tttaataaaatacca

SEQ ID NO: 1277456 - DNA, 15 bp, Homo sapiens
ctttaataaaatacc

SEQ ID NO: 1277457 - DNA, 15 bp, Homo sapiens
gtctttaataaaata

SEQ ID NO: 1277458 - DNA, 15 bp, Homo sapiens
tgtctttaataaaat

SEQ ID NO: 1277459 - DNA, 15 bp, Homo sapiens
atgtctttaataaaa

SEQ ID NO: 1277460 - DNA, 15 bp, Homo sapiens
aatgtctttaataaa

SEQ ID NO: 1277461 - DNA, 15 bp, Homo sapiens
gaatgtctttaataa

SEQ ID NO: 1277462 - DNA, 15 bp, Homo sapiens
tgaatgtctttaata

SEQ ID NO: 1277463 - DNA, 15 bp, Homo sapiens
atgaatgtctttaat

SEQ ID NO: 1277464 - DNA, 15 bp, Homo sapiens
gatgaatgtctttaa

SEQ ID NO: 1277465 - DNA, 15 bp, Homo sapiens
agatgaatgtcttta

SEQ ID NO: 1277466 - DNA, 15 bp, Homo sapiens
gagatgaatgtcttt

SEQ ID NO: 1277467 - DNA, 15 bp, Homo sapiens
tgagatgaatgtctt

SEQ ID NO: 1277468 - DNA, 15 bp, Homo sapiens
ctgagatgaatgtct

SEQ ID NO: 1277469 - DNA, 15 bp, Homo sapiens
actgagatgaatgtc

SEQ ID NO: 1277470 - DNA, 15 bp, Homo sapiens
aactgagatgaatgt

SEQ ID NO: 1277471 - DNA, 15 bp, Homo sapiens
caactgagatgaatg

SEQ ID NO: 1277472 - DNA, 15 bp, Homo sapiens
acaactgagatgaat

SEQ ID NO: 1277473 - DNA, 15 bp, Homo sapiens
aacaactgagatgaa

SEQ ID NO: 1277474 - DNA, 15 bp, Homo sapiens
aaacaactgagatga

SEQ ID NO: 1277475 - DNA, 15 bp, Homo sapiens
gaaacaactgagatg

SEQ ID NO: 1277476 - DNA, 15 bp, Homo sapiens
agaaacaactgagat

SEQ ID NO: 1277477 - DNA, 15 bp, Homo sapiens
gagaaacaactgaga

SEQ ID NO: 1277478 - DNA, 15 bp, Homo sapiens
agagaaacaactgag

SEQ ID NO: 1277479 - DNA, 15 bp, Homo sapiens
gagagaaacaactga

SEQ ID NO: 1277480 - DNA, 15 bp, Homo sapiens
agagagaaacaactg

SEQ ID NO: 1277481 - DNA, 15 bp, Homo sapiens
gagagagaaacaact

SEQ ID NO: 1277482 - DNA, 15 bp, Homo sapiens
ggagagagaaacaac

SEQ ID NO: 1277483 - DNA, 15 bp, Homo sapiens
gggagagagaaacaa

SEQ ID NO: 1277484 - DNA, 15 bp, Homo sapiens
tgggagagagaaaca

SEQ ID NO: 1277485 - DNA, 15 bp, Homo sapiens
ctgggagagagaaac

SEQ ID NO: 1277486 - DNA, 15 bp, Homo sapiens
gctgggagagagaaa

SEQ ID NO: 1277487 - DNA, 15 bp, Homo sapiens
agctgggagagagaa

SEQ ID NO: 1277488 - DNA, 15 bp, Homo sapiens
aagctgggagagaga

SEQ ID NO: 1277489 - DNA, 15 bp, Homo sapiens
caagctgggagagag

SEQ ID NO: 1277490 - DNA, 15 bp, Homo sapiens
tcaagctgggagaga

SEQ ID NO: 1277491 - DNA, 15 bp, Homo sapiens
gtcaagctgggagag

SEQ ID NO: 1277492 - DNA, 15 bp, Homo sapiens
ggtcaagctgggaga

SEQ ID NO: 1277493 - DNA, 15 bp, Homo sapiens
aggtcaagctgggag

SEQ ID NO: 1277494 - DNA, 15 bp, Homo sapiens
aaggtcaagctggga

SEQ ID NO: 1277495 - DNA, 15 bp, Homo sapiens
taaggtcaagctggg

SEQ ID NO: 1277496 - DNA, 15 bp, Homo sapiens
ctaaggtcaagctgg

SEQ ID NO: 1277497 - DNA, 15 bp, Homo sapiens
cctaaggtcaagctg

SEQ ID NO: 1277498 - DNA, 15 bp, Homo sapiens
acctaaggtcaagct

SEQ ID NO: 1277499 - DNA, 15 bp, Homo sapiens
aacctaaggtcaagc

SEQ ID NO: 1277500 - DNA, 15 bp, Homo sapiens
taacctaaggtcaag

SEQ ID NO: 1277501 - DNA, 15 bp, Homo sapiens
ttaacctaaggtcaa

SEQ ID NO: 1277502 - DNA, 15 bp, Homo sapiens
attaacctaaggtca

SEQ ID NO: 1277503 - DNA, 15 bp, Homo sapiens
tattaacctaaggtc

SEQ ID NO: 1277504 - DNA, 15 bp, Homo sapiens
atattaacctaaggt

SEQ ID NO: 1277505 - DNA, 15 bp, Homo sapiens
aatattaacctaagg

SEQ ID NO: 1277506 - DNA, 15 bp, Homo sapiens
aaatattaacctaag

SEQ ID NO: 1277507 - DNA, 15 bp, Homo sapiens
gaaatattaacctaa

SEQ ID NO: 1277508 - DNA, 15 bp, Homo sapiens
tgaaatattaaccta

SEQ ID NO: 1277509 - DNA, 15 bp, Homo sapiens
atgaaatattaacct

SEQ ID NO: 1277510 - DNA, 15 bp, Homo sapiens
aatgaaatattaacc

SEQ ID NO: 1277511 - DNA, 15 bp, Homo sapiens
aaatgaaatattaac

SEQ ID NO: 1277512 - DNA, 15 bp, Homo sapiens
caaatgaaatattaa

SEQ ID NO: 1277513 - DNA, 15 bp, Homo sapiens
ccaaatgaaatatta

SEQ ID NO: 1277514 - DNA, 15 bp, Homo sapiens
cccaaatgaaatatt

SEQ ID NO: 1277515 - DNA, 15 bp, Homo sapiens
acccaaatgaaatat

SEQ ID NO: 1277516 - DNA, 15 bp, Homo sapiens
gacccaaatgaaata

SEQ ID NO: 1277517 - DNA, 15 bp, Homo sapiens
tgacccaaatgaaat

SEQ ID NO: 1277518 - DNA, 15 bp, Homo sapiens
ttgacccaaatgaaa

SEQ ID NO: 1277519 - DNA, 15 bp, Homo sapiens
cttgacccaaatgaa

SEQ ID NO: 1277520 - DNA, 15 bp, Homo sapiens
tcttgacccaaatga

SEQ ID NO: 1277521 - DNA, 15 bp, Homo sapiens
ttcttgacccaaatg

SEQ ID NO: 1277522 - DNA, 15 bp, Homo sapiens
tttcttgacccaaat

SEQ ID NO: 1277523 - DNA, 15 bp, Homo sapiens
ttttcttgacccaaa

SEQ ID NO: 1277524 - DNA, 15 bp, Homo sapiens
cttttcttgacccaa

SEQ ID NO: 1277525 - DNA, 15 bp, Homo sapiens
tcttttcttgaccca

SEQ ID NO: 1277526 - DNA, 15 bp, Homo sapiens
ttcttttcttgaccc

SEQ ID NO: 1277527 - DNA, 15 bp, Homo sapiens
attcttttcttgacc

SEQ ID NO: 1277528 - DNA, 15 bp, Homo sapiens
tattcttttcttgac

SEQ ID NO: 1277529 - DNA, 15 bp, Homo sapiens
atattcttttcttga

SEQ ID NO: 1277530 - DNA, 15 bp, Homo sapiens
gatattcttttcttg

SEQ ID NO: 1277531 - DNA, 15 bp, Homo sapiens
tgatattcttttctt

SEQ ID NO: 1277532 - DNA, 15 bp, Homo sapiens
ctgatattcttttct

SEQ ID NO: 1277533 - DNA, 15 bp, Homo sapiens
tctgatattcttttc

SEQ ID NO: 1277534 - DNA, 15 bp, Homo sapiens
ttctgatattctttt

SEQ ID NO: 1277535 - DNA, 15 bp, Homo sapiens
cttctgatattcttt

SEQ ID NO: 1277536 - DNA, 15 bp, Homo sapiens
tcttctgatattctt

SEQ ID NO: 1277537 - DNA, 15 bp, Homo sapiens
ctcttctgatattct

SEQ ID NO: 1277538 - DNA, 15 bp, Homo sapiens
cctcttctgatattc

SEQ ID NO: 1277539 - DNA, 15 bp, Homo sapiens
acctcttctgatatt

SEQ ID NO: 1277540 - DNA, 15 bp, Homo sapiens
tacctcttctgatat

SEQ ID NO: 1277541 - DNA, 15 bp, Homo sapiens
atacctcttctgata

SEQ ID NO: 1277542 - DNA, 15 bp, Homo sapiens
catacctcttctgat

SEQ ID NO: 1277543 - DNA, 15 bp, Homo sapiens
acatacctcttctga

SEQ ID NO: 1277544 - DNA, 15 bp, Homo sapiens
aacatacctcttctg

SEQ ID NO: 1277545 - DNA, 15 bp, Homo sapiens
ataacatacctcttc

SEQ ID NO: 1277546 - DNA, 15 bp, Homo sapiens
aataacatacctctt

SEQ ID NO: 1277547 - DNA, 15 bp, Homo sapiens
aaataacatacctct

SEQ ID NO: 1277548 - DNA, 15 bp, Homo sapiens
aaaataacatacctc

SEQ ID NO: 1277549 - DNA, 15 bp, Homo sapiens
taaaataacatacct

SEQ ID NO: 1277550 - DNA, 15 bp, Homo sapiens
ttaaaataacatacc

SEQ ID NO: 1277551 - DNA, 15 bp, Homo sapiens
gttaaaataacatac

SEQ ID NO: 1277552 - DNA, 15 bp, Homo sapiens
tgttaaaataacata

SEQ ID NO: 1277553 - DNA, 15 bp, Homo sapiens
ttgttaaaataacat

SEQ ID NO: 1277554 - DNA, 15 bp, Homo sapiens
tttgttaaaataaca

SEQ ID NO: 1277555 - DNA, 15 bp, Homo sapiens
gtttgttaaaataac

SEQ ID NO: 1277556 - DNA, 15 bp, Homo sapiens
tgtttgttaaaataa

SEQ ID NO: 1277557 - DNA, 15 bp, Homo sapiens
ctgtttgttaaaata

SEQ ID NO: 1277558 - DNA, 15 bp, Homo sapiens
cctgtttgttaaaat

SEQ ID NO: 1277559 - DNA, 15 bp, Homo sapiens
tcctgtttgttaaaa

SEQ ID NO: 1277560 - DNA, 15 bp, Homo sapiens
ttcctgtttgttaaa

SEQ ID NO: 1277561 - DNA, 15 bp, Homo sapiens
tttcctgtttgttaa

SEQ ID NO: 1277562 - DNA, 15 bp, Homo sapiens
ttttcctgtttgtta

SEQ ID NO: 1277563 - DNA, 15 bp, Homo sapiens
attttcctgtttgtt

SEQ ID NO: 1277564 - DNA, 15 bp, Homo sapiens
cattttcctgtttgt

SEQ ID NO: 1277565 - DNA, 15 bp, Homo sapiens
ccattttcctgtttg

SEQ ID NO: 1277566 - DNA, 15 bp, Homo sapiens
tccattttcctgttt

SEQ ID NO: 1277567 - DNA, 15 bp, Homo sapiens
gtccattttcctgtt

SEQ ID NO: 1277568 - DNA, 15 bp, Homo sapiens
tgtccattttcctgt

SEQ ID NO: 1277569 - DNA, 15 bp, Homo sapiens
ttgtccattttcctg

SEQ ID NO: 1277570 - DNA, 15 bp, Homo sapiens
tttgtccattttcct

SEQ ID NO: 1277571 - DNA, 15 bp, Homo sapiens
ttttgtccattttcc

SEQ ID NO: 1277572 - DNA, 15 bp, Homo sapiens
tttttgtccattttc

SEQ ID NO: 1277573 - DNA, 15 bp, Homo sapiens
atttttgtccatttt

SEQ ID NO: 1277574 - DNA, 15 bp, Homo sapiens
catttttgtccattt

SEQ ID NO: 1277575 - DNA, 15 bp, Homo sapiens
ccatttttgtccatt

SEQ ID NO: 1277576 - DNA, 15 bp, Homo sapiens
tccatttttgtccat

SEQ ID NO: 1277577 - DNA, 15 bp, Homo sapiens
atccatttttgtcca

SEQ ID NO: 1277578 - DNA, 15 bp, Homo sapiens
tatccatttttgtcc

SEQ ID NO: 1277579 - DNA, 15 bp, Homo sapiens
ctatccatttttgtc

SEQ ID NO: 1277580 - DNA, 15 bp, Homo sapiens
actatccatttttgt

SEQ ID NO: 1277581 - DNA, 15 bp, Homo sapiens
aactatccatttttg

SEQ ID NO: 1277582 - DNA, 15 bp, Homo sapiens
aaactatccattttt

SEQ ID NO: 1277583 - DNA, 15 bp, Homo sapiens
caaactatccatttt

SEQ ID NO: 1277584 - DNA, 15 bp, Homo sapiens
gcaaactatccattt

SEQ ID NO: 1277585 - DNA, 15 bp, Homo sapiens
ggcaaactatccatt

SEQ ID NO: 1277586 - DNA, 15 bp, Homo sapiens
aggcaaactatccat

SEQ ID NO: 1277587 - DNA, 15 bp, Homo sapiens
taggcaaactatcca

SEQ ID NO: 1277588 - DNA, 15 bp, Homo sapiens
gtaggcaaactatcc

SEQ ID NO: 1277589 - DNA, 15 bp, Homo sapiens
tgtaggcaaactatc

SEQ ID NO: 1277590 - DNA, 15 bp, Homo sapiens
atgtaggcaaactat

SEQ ID NO: 1277591 - DNA, 15 bp, Homo sapiens
aatgtaggcaaacta

SEQ ID NO: 1277592 - DNA, 15 bp, Homo sapiens
taatgtaggcaaact

SEQ ID NO: 1277593 - DNA, 15 bp, Homo sapiens
ttaatgtaggcaaac

SEQ ID NO: 1277594 - DNA, 15 bp, Homo sapiens
tttaatgtaggcaaa

SEQ ID NO: 1277595 - DNA, 15 bp, Homo sapiens
ctttaatgtaggcaa

SEQ ID NO: 1277596 - DNA, 15 bp, Homo sapiens
actttaatgtaggca

SEQ ID NO: 1277597 - DNA, 15 bp, Homo sapiens
cactttaatgtaggc

SEQ ID NO: 1277598 - DNA, 15 bp, Homo sapiens
tcactttaatgtagg

SEQ ID NO: 1277599 - DNA, 15 bp, Homo sapiens
ctcactttaatgtag

SEQ ID NO: 1277600 - DNA, 15 bp, Homo sapiens
actcactttaatgta

SEQ ID NO: 1277601 - DNA, 15 bp, Homo sapiens
aactcactttaatgt

SEQ ID NO: 1277602 - DNA, 15 bp, Homo sapiens
taactcactttaatg

SEQ ID NO: 1277603 - DNA, 15 bp, Homo sapiens
ttaactcactttaat

SEQ ID NO: 1277604 - DNA, 15 bp, Homo sapiens
tttaactcactttaa

SEQ ID NO: 1277605 - DNA, 15 bp, Homo sapiens
atttaactcacttta

SEQ ID NO: 1277606 - DNA, 15 bp, Homo sapiens
aatttaactcacttt

SEQ ID NO: 1277607 - DNA, 15 bp, Homo sapiens
gaatttaactcactt

SEQ ID NO: 1277608 - DNA, 15 bp, Homo sapiens
tgaatttaactcact

SEQ ID NO: 1277609 - DNA, 15 bp, Homo sapiens
ttgaatttaactcac

SEQ ID NO: 1277610 - DNA, 15 bp, Homo sapiens
cttgaatttaactca

SEQ ID NO: 1277611 - DNA, 15 bp, Homo sapiens
acttgaatttaactc

SEQ ID NO: 1277612 - DNA, 15 bp, Homo sapiens
tacttgaatttaact

SEQ ID NO: 1277613 - DNA, 15 bp, Homo sapiens
atacttgaatttaac

SEQ ID NO: 1277614 - DNA, 15 bp, Homo sapiens
gatacttgaatttaa

SEQ ID NO: 1277615 - DNA, 15 bp, Homo sapiens
agatacttgaattta

SEQ ID NO: 1277616 - DNA, 15 bp, Homo sapiens
aagatacttgaattt

SEQ ID NO: 1277617 - DNA, 15 bp, Homo sapiens
caagatacttgaatt

SEQ ID NO: 1277618 - DNA, 15 bp, Homo sapiens
tcaagatacttgaat

SEQ ID NO: 1277619 - DNA, 15 bp, Homo sapiens
atcaagatacttgaa

SEQ ID NO: 1277620 - DNA, 15 bp, Homo sapiens
tatcaagatacttga

SEQ ID NO: 1277621 - DNA, 15 bp, Homo sapiens
atatcaagatacttg

SEQ ID NO: 1277622 - DNA, 15 bp, Homo sapiens
tatatcaagatactt

SEQ ID NO: 1277623 - DNA, 15 bp, Homo sapiens
ttatatcaagatact

SEQ ID NO: 1277624 - DNA, 15 bp, Homo sapiens
attatatcaagatac

SEQ ID NO: 1277625 - DNA, 15 bp, Homo sapiens
aattatatcaagata

SEQ ID NO: 1277626 - DNA, 15 bp, Homo sapiens
taattatatcaagat

SEQ ID NO: 1277627 - DNA, 15 bp, Homo sapiens
ttaattatatcaaga

SEQ ID NO: 1277628 - DNA, 15 bp, Homo sapiens
tttaattatatcaag

SEQ ID NO: 1277629 - DNA, 15 bp, Homo sapiens
atttaattatatcaa

SEQ ID NO: 1277630 - DNA, 15 bp, Homo sapiens
gatttaattatatca

SEQ ID NO: 1277631 - DNA, 15 bp, Homo sapiens
tgatttaattatatc

SEQ ID NO: 1277632 - DNA, 15 bp, Homo sapiens
atgatttaattatat

SEQ ID NO: 1277633 - DNA, 15 bp, Homo sapiens
tatgatttaattata

SEQ ID NO: 1277634 - DNA, 15 bp, Homo sapiens
atatgatttaattat

SEQ ID NO: 1277635 - DNA, 15 bp, Homo sapiens
tatatgatttaatta

SEQ ID NO: 1277636 - DNA, 15 bp, Homo sapiens
ttatatgatttaatt

SEQ ID NO: 1277637 - DNA, 15 bp, Homo sapiens
cttatatgatttaat

SEQ ID NO: 1277638 - DNA, 15 bp, Homo sapiens
tcttatatgatttaa

SEQ ID NO: 1277639 - DNA, 15 bp, Homo sapiens
ttcttatatgattta

SEQ ID NO: 1277640 - DNA, 15 bp, Homo sapiens
gttcttatatgattt

SEQ ID NO: 1277641 - DNA, 15 bp, Homo sapiens
agttcttatatgatt

SEQ ID NO: 1277642 - DNA, 15 bp, Homo sapiens
tagttcttatatgat

SEQ ID NO: 1277643 - DNA, 15 bp, Homo sapiens
ttagttcttatatga

SEQ ID NO: 1277644 - DNA, 15 bp, Homo sapiens
cttagttcttatatg

SEQ ID NO: 1277645 - DNA, 15 bp, Homo sapiens
tcttagttcttatat

SEQ ID NO: 1277646 - DNA, 15 bp, Homo sapiens
ctcttagttcttata

SEQ ID NO: 1277647 - DNA, 15 bp, Homo sapiens
actcttagttcttat

SEQ ID NO: 1277648 - DNA, 15 bp, Homo sapiens
aactcttagttctta

SEQ ID NO: 1277649 - DNA, 15 bp, Homo sapiens
gaactcttagttctt

SEQ ID NO: 1277650 - DNA, 15 bp, Homo sapiens
agaactcttagttct

SEQ ID NO: 1277651 - DNA, 15 bp, Homo sapiens
tagaactcttagttc

SEQ ID NO: 1277652 - DNA, 15 bp, Homo sapiens
atagaactcttagtt

SEQ ID NO: 1277653 - DNA, 15 bp, Homo sapiens
tatagaactcttagt

SEQ ID NO: 1277654 - DNA, 15 bp, Homo sapiens
atatagaactcttag

SEQ ID NO: 1277655 - DNA, 15 bp, Homo sapiens
tatatagaactctta

SEQ ID NO: 1277656 - DNA, 15 bp, Homo sapiens
gtatatagaactctt

SEQ ID NO: 1277657 - DNA, 15 bp, Homo sapiens
tgtatatagaactct

SEQ ID NO: 1277658 - DNA, 15 bp, Homo sapiens
atgtatatagaactc

SEQ ID NO: 1277659 - DNA, 15 bp, Homo sapiens
aatgtatatagaact

SEQ ID NO: 1277660 - DNA, 15 bp, Homo sapiens
aaatgtatatagaac

SEQ ID NO: 1277661 - DNA, 15 bp, Homo sapiens
gaaatgtatatagaa

SEQ ID NO: 1277662 - DNA, 15 bp, Homo sapiens
ggaaatgtatataga

SEQ ID NO: 1277663 - DNA, 15 bp, Homo sapiens
tggaaatgtatatag

SEQ ID NO: 1277664 - DNA, 15 bp, Homo sapiens
atggaaatgtatata

SEQ ID NO: 1277665 - DNA, 15 bp, Homo sapiens
aatggaaatgtatat

SEQ ID NO: 1277666 - DNA, 15 bp, Homo sapiens
caatggaaatgtata

SEQ ID NO: 1277667 - DNA, 15 bp, Homo sapiens
acaatggaaatgtat

SEQ ID NO: 1277668 - DNA, 15 bp, Homo sapiens
aacaatggaaatgta

SEQ ID NO: 1277669 - DNA, 15 bp, Homo sapiens
aaacaatggaaatgt

SEQ ID NO: 1277670 - DNA, 15 bp, Homo sapiens
aaaacaatggaaatg

SEQ ID NO: 1277671 - DNA, 15 bp, Homo sapiens
taaaacaatggaaat

SEQ ID NO: 1277672 - DNA, 15 bp, Homo sapiens
gtaaaacaatggaaa

SEQ ID NO: 1277673 - DNA, 15 bp, Homo sapiens
ggtaaaacaatggaa

SEQ ID NO: 1277674 - DNA, 15 bp, Homo sapiens
aggtaaaacaatgga

SEQ ID NO: 1277675 - DNA, 15 bp, Homo sapiens
caggtaaaacaatgg

SEQ ID NO: 1277676 - DNA, 15 bp, Homo sapiens
ccaggtaaaacaatg

SEQ ID NO: 1277677 - DNA, 15 bp, Homo sapiens
cccaggtaaaacaat

SEQ ID NO: 1277678 - DNA, 15 bp, Homo sapiens
ccccaggtaaaacaa

SEQ ID NO: 1277679 - DNA, 15 bp, Homo sapiens
gccccaggtaaaaca

SEQ ID NO: 1277680 - DNA, 15 bp, Homo sapiens
agccccaggtaaaac

SEQ ID NO: 1277681 - DNA, 15 bp, Homo sapiens
aagccccaggtaaaa

SEQ ID NO: 1277682 - DNA, 15 bp, Homo sapiens
taagccccaggtaaa

SEQ ID NO: 1277683 - DNA, 15 bp, Homo sapiens
ataagccccaggtaa

SEQ ID NO: 1277684 - DNA, 15 bp, Homo sapiens
aataagccccaggta

SEQ ID NO: 1277685 - DNA, 15 bp, Homo sapiens
gaataagccccaggt

SEQ ID NO: 1277686 - DNA, 15 bp, Homo sapiens
agaataagccccagg

SEQ ID NO: 1277687 - DNA, 15 bp, Homo sapiens
tagaataagccccag

SEQ ID NO: 1277688 - DNA, 15 bp, Homo sapiens
ttagaataagcccca

SEQ ID NO: 1277689 - DNA, 15 bp, Homo sapiens
tttagaataagcccc

SEQ ID NO: 1277690 - DNA, 15 bp, Homo sapiens
gtttagaataagccc

SEQ ID NO: 1277691 - DNA, 15 bp, Homo sapiens
agtttagaataagcc

SEQ ID NO: 1277692 - DNA, 15 bp, Homo sapiens
aagtttagaataagc

SEQ ID NO: 1277693 - DNA, 15 bp, Homo sapiens
taagtttagaataag

SEQ ID NO: 1277694 - DNA, 15 bp, Homo sapiens
ttaagtttagaataa

SEQ ID NO: 1277695 - DNA, 15 bp, Homo sapiens
tttaagtttagaata

SEQ ID NO: 1277696 - DNA, 15 bp, Homo sapiens
atttaagtttagaat

SEQ ID NO: 1277697 - DNA, 15 bp, Homo sapiens
tatttaagtttagaa

SEQ ID NO: 1277698 - DNA, 15 bp, Homo sapiens
gtatttaagtttaga

SEQ ID NO: 1277699 - DNA, 15 bp, Homo sapiens
agtatttaagtttag

SEQ ID NO: 1277700 - DNA, 15 bp, Homo sapiens
tagtatttaagttta

SEQ ID NO: 1277701 - DNA, 15 bp, Homo sapiens
ctagtatttaagttt

SEQ ID NO: 1277702 - DNA, 15 bp, Homo sapiens
actagtatttaagtt

SEQ ID NO: 1277703 - DNA, 15 bp, Homo sapiens
aactagtatttaagt

SEQ ID NO: 1277704 - DNA, 15 bp, Homo sapiens
taactagtatttaag

SEQ ID NO: 1277705 - DNA, 15 bp, Homo sapiens
ttaactagtatttaa

SEQ ID NO: 1277706 - DNA, 15 bp, Homo sapiens
gttaactagtattta

SEQ ID NO: 1277707 - DNA, 15 bp, Homo sapiens
tgttaactagtattt

SEQ ID NO: 1277708 - DNA, 15 bp, Homo sapiens
ttgttaactagtatt

SEQ ID NO: 1277709 - DNA, 15 bp, Homo sapiens
tttgttaactagtat

SEQ ID NO: 1277710 - DNA, 15 bp, Homo sapiens
ctttgttaactagta

SEQ ID NO: 1277711 - DNA, 15 bp, Homo sapiens
tctttgttaactagt

SEQ ID NO: 1277712 - DNA, 15 bp, Homo sapiens
ctctttgttaactag

SEQ ID NO: 1277713 - DNA, 15 bp, Homo sapiens
actctttgttaacta

SEQ ID NO: 1277714 - DNA, 15 bp, Homo sapiens
aactctttgttaact

SEQ ID NO: 1277715 - DNA, 15 bp, Homo sapiens
taactctttgttaac

SEQ ID NO: 1277716 - DNA, 15 bp, Homo sapiens
ctaactctttgttaa

SEQ ID NO: 1277717 - DNA, 15 bp, Homo sapiens
cctaactctttgtta

SEQ ID NO: 1277718 - DNA, 15 bp, Homo sapiens
tcctaactctttgtt

SEQ ID NO: 1277719 - DNA, 15 bp, Homo sapiens
ttcctaactctttgt

SEQ ID NO: 1277720 - DNA, 15 bp, Homo sapiens
attcctaactctttg

SEQ ID NO: 1277721 - DNA, 15 bp, Homo sapiens
tattcctaactcttt

SEQ ID NO: 1277722 - DNA, 15 bp, Homo sapiens
atattcctaactctt

SEQ ID NO: 1277723 - DNA, 15 bp, Homo sapiens
tatattcctaactct

SEQ ID NO: 1277724 - DNA, 15 bp, Homo sapiens
gtatattcctaactc

SEQ ID NO: 1277725 - DNA, 15 bp, Homo sapiens
tgtatattcctaact

SEQ ID NO: 1277726 - DNA, 15 bp, Homo sapiens
gtgtatattcctaac

SEQ ID NO: 1277727 - DNA, 15 bp, Homo sapiens
tgtgtatattcctaa

SEQ ID NO: 1277728 - DNA, 15 bp, Homo sapiens
ctgtgtatattccta

SEQ ID NO: 1277729 - DNA, 15 bp, Homo sapiens
cctgtgtatattcct

SEQ ID NO: 1277730 - DNA, 15 bp, Homo sapiens
acctgtgtatattcc

SEQ ID NO: 1277731 - DNA, 15 bp, Homo sapiens
aacctgtgtatattc

SEQ ID NO: 1277732 - DNA, 15 bp, Homo sapiens
caacctgtgtatatt

SEQ ID NO: 1277733 - DNA, 15 bp, Homo sapiens
gcaacctgtgtatat

SEQ ID NO: 1277734 - DNA, 15 bp, Homo sapiens
agcaacctgtgtata

SEQ ID NO: 1277735 - DNA, 15 bp, Homo sapiens
aagcaacctgtgtat

SEQ ID NO: 1277736 - DNA, 15 bp, Homo sapiens
gaagcaacctgtgta

SEQ ID NO: 1277737 - DNA, 15 bp, Homo sapiens
agaagcaacctgtgt

SEQ ID NO: 1277738 - DNA, 15 bp, Homo sapiens
gagaagcaacctgtg

SEQ ID NO: 1277739 - DNA, 15 bp, Homo sapiens
agagaagcaacctgt

SEQ ID NO: 1277740 - DNA, 15 bp, Homo sapiens
cagagaagcaacctg

SEQ ID NO: 1277741 - DNA, 15 bp, Homo sapiens
tcagagaagcaacct

SEQ ID NO: 1277742 - DNA, 15 bp, Homo sapiens
ctcagagaagcaacc

SEQ ID NO: 1277743 - DNA, 15 bp, Homo sapiens
actcagagaagcaac

SEQ ID NO: 1277744 - DNA, 15 bp, Homo sapiens
aactcagagaagcaa

SEQ ID NO: 1277745 - DNA, 15 bp, Homo sapiens
taactcagagaagca

SEQ ID NO: 1277746 - DNA, 15 bp, Homo sapiens
ataactcagagaagc

SEQ ID NO: 1277747 - DNA, 15 bp, Homo sapiens
aataactcagagaag

SEQ ID NO: 1277748 - DNA, 15 bp, Homo sapiens
taataactcagagaa

SEQ ID NO: 1277749 - DNA, 15 bp, Homo sapiens
gtaataactcagaga

SEQ ID NO: 1277750 - DNA, 15 bp, Homo sapiens
ggtaataactcagag

SEQ ID NO: 1277751 - DNA, 15 bp, Homo sapiens
cggtaataactcaga

SEQ ID NO: 1277752 - DNA, 15 bp, Homo sapiens
tcggtaataactcag

SEQ ID NO: 1277753 - DNA, 15 bp, Homo sapiens
gtcggtaataactca

SEQ ID NO: 1277754 - DNA, 15 bp, Homo sapiens
agtcggtaataactc

SEQ ID NO: 1277755 - DNA, 15 bp, Homo sapiens
tagtcggtaataact

SEQ ID NO: 1277756 - DNA, 15 bp, Homo sapiens
ttagtcggtaataac

SEQ ID NO: 1277757 - DNA, 15 bp, Homo sapiens
tttagtcggtaataa

SEQ ID NO: 1277758 - DNA, 15 bp, Homo sapiens
ttttagtcggtaata

SEQ ID NO: 1277759 - DNA, 15 bp, Homo sapiens
cttttagtcggtaat

SEQ ID NO: 1277760 - DNA, 15 bp, Homo sapiens
tcttttagtcggtaa

SEQ ID NO: 1277761 - DNA, 15 bp, Homo sapiens
ctcttttagtcggta

SEQ ID NO: 1277762 - DNA, 15 bp, Homo sapiens
gctcttttagtcggt

SEQ ID NO: 1277763 - DNA, 15 bp, Homo sapiens
agctcttttagtcgg

SEQ ID NO: 1277764 - DNA, 15 bp, Homo sapiens
gagctcttttagtcg

SEQ ID NO: 1277765 - DNA, 15 bp, Homo sapiens
tgagctcttttagtc

SEQ ID NO: 1277766 - DNA, 15 bp, Homo sapiens
ctgagctcttttagt

SEQ ID NO: 1277767 - DNA, 15 bp, Homo sapiens
gctgagctcttttag

SEQ ID NO: 1277768 - DNA, 15 bp, Homo sapiens
cgctgagctctttta

SEQ ID NO: 1277769 - DNA, 15 bp, Homo sapiens
tcgctgagctctttt

SEQ ID NO: 1277770 - DNA, 15 bp, Homo sapiens
ctcgctgagctcttt

SEQ ID NO: 1277771 - DNA, 15 bp, Homo sapiens
gctcgctgagctctt

SEQ ID NO: 1277772 - DNA, 15 bp, Homo sapiens
tgctcgctgagctct

SEQ ID NO: 1277773 - DNA, 15 bp, Homo sapiens
ctgctcgctgagctc

SEQ ID NO: 1277774 - DNA, 15 bp, Homo sapiens
actgctcgctgagct

SEQ ID NO: 1277775 - DNA, 15 bp, Homo sapiens
aactgctcgctgagc

SEQ ID NO: 1277776 - DNA, 15 bp, Homo sapiens
taactgctcgctgag

SEQ ID NO: 1277777 - DNA, 15 bp, Homo sapiens
gtaactgctcgctga

SEQ ID NO: 1277778 - DNA, 15 bp, Homo sapiens
ggtaactgctcgctg

SEQ ID NO: 1277779 - DNA, 15 bp, Homo sapiens
tggtaactgctcgct

SEQ ID NO: 1277780 - DNA, 15 bp, Homo sapiens
gtggtaactgctcgc

SEQ ID NO: 1277781 - DNA, 15 bp, Homo sapiens
ggtggtaactgctcg

SEQ ID NO: 1277782 - DNA, 15 bp, Homo sapiens
tggtggtaactgctc

SEQ ID NO: 1277783 - DNA, 15 bp, Homo sapiens
ttggtggtaactgct

SEQ ID NO: 1277784 - DNA, 15 bp, Homo sapiens
attggtggtaactgc

SEQ ID NO: 1277785 - DNA, 15 bp, Homo sapiens
tattggtggtaactg

SEQ ID NO: 1277786 - DNA, 15 bp, Homo sapiens
ttattggtggtaact

SEQ ID NO: 1277787 - DNA, 15 bp, Homo sapiens
tttattggtggtaac

SEQ ID NO: 1277788 - DNA, 15 bp, Homo sapiens
ttttattggtggtaa

SEQ ID NO: 1277789 - DNA, 15 bp, Homo sapiens
gttttattggtggta

SEQ ID NO: 1277790 - DNA, 15 bp, Homo sapiens
cgttttattggtggt

SEQ ID NO: 1277791 - DNA, 15 bp, Homo sapiens
ccgttttattggtgg

SEQ ID NO: 1277792 - DNA, 15 bp, Homo sapiens
accgttttattggtg

SEQ ID NO: 1277793 - DNA, 15 bp, Homo sapiens
gaccgttttattggt

SEQ ID NO: 1277794 - DNA, 15 bp, Homo sapiens
agaccgttttattgg

SEQ ID NO: 1277795 - DNA, 15 bp, Homo sapiens
cagaccgttttattg

SEQ ID NO: 1277796 - DNA, 15 bp, Homo sapiens
tcagaccgttttatt

SEQ ID NO: 1277797 - DNA, 15 bp, Homo sapiens
ttcagaccgttttat

SEQ ID NO: 1277798 - DNA, 15 bp, Homo sapiens
cttcagaccgtttta

SEQ ID NO: 1277799 - DNA, 15 bp, Homo sapiens
gcttcagaccgtttt

SEQ ID NO: 1277800 - DNA, 15 bp, Homo sapiens
agcttcagaccgttt

SEQ ID NO: 1277801 - DNA, 15 bp, Homo sapiens
cagcttcagaccgtt

SEQ ID NO: 1277802 - DNA, 15 bp, Homo sapiens
gcagcttcagaccgt

SEQ ID NO: 1277803 - DNA, 15 bp, Homo sapiens
ggcagcttcagaccg

SEQ ID NO: 1277804 - DNA, 15 bp, Homo sapiens
aggcagcttcagacc

SEQ ID NO: 1277805 - DNA, 15 bp, Homo sapiens
gaggcagcttcagac

SEQ ID NO: 1277806 - DNA, 15 bp, Homo sapiens
ggaggcagcttcaga

SEQ ID NO: 1277807 - DNA, 15 bp, Homo sapiens
tggaggcagcttcag

SEQ ID NO: 1277808 - DNA, 15 bp, Homo sapiens
ttggaggcagcttca

SEQ ID NO: 1277809 - DNA, 15 bp, Homo sapiens
tttggaggcagcttc

SEQ ID NO: 1277810 - DNA, 15 bp, Homo sapiens
atttggaggcagctt

SEQ ID NO: 1277811 - DNA, 15 bp, Homo sapiens
tatttggaggcagct

SEQ ID NO: 1277812 - DNA, 15 bp, Homo sapiens
gtatttggaggcagc

SEQ ID NO: 1277813 - DNA, 15 bp, Homo sapiens
tgtatttggaggcag

SEQ ID NO: 1277814 - DNA, 15 bp, Homo sapiens
ttgtatttggaggca

SEQ ID NO: 1277815 - DNA, 15 bp, Homo sapiens
attgtatttggaggc

SEQ ID NO: 1277816 - DNA, 15 bp, Homo sapiens
tattgtatttggagg

SEQ ID NO: 1277817 - DNA, 15 bp, Homo sapiens
atattgtatttggag

SEQ ID NO: 1277818 - DNA, 15 bp, Homo sapiens
aatattgtatttgga

SEQ ID NO: 1277819 - DNA, 15 bp, Homo sapiens
caatattgtatttgg

SEQ ID NO: 1277820 - DNA, 15 bp, Homo sapiens
acaatattgtatttg

SEQ ID NO: 1277821 - DNA, 15 bp, Homo sapiens
tacaatattgtattt

SEQ ID NO: 1277822 - DNA, 15 bp, Homo sapiens
ctacaatattgtatt

SEQ ID NO: 1277823 - DNA, 15 bp, Homo sapiens
actacaatattgtat

SEQ ID NO: 1277824 - DNA, 15 bp, Homo sapiens
tactacaatattgta

SEQ ID NO: 1277825 - DNA, 15 bp, Homo sapiens
ctactacaatattgt

SEQ ID NO: 1277826 - DNA, 15 bp, Homo sapiens
cctactacaatattg

SEQ ID NO: 1277827 - DNA, 15 bp, Homo sapiens
tcctactacaatatt

SEQ ID NO: 1277828 - DNA, 15 bp, Homo sapiens
ctcctactacaatat

SEQ ID NO: 1277829 - DNA, 15 bp, Homo sapiens
actcctactacaata

SEQ ID NO: 1277830 - DNA, 15 bp, Homo sapiens
aactcctactacaat

SEQ ID NO: 1277831 - DNA, 15 bp, Homo sapiens
aaactcctactacaa

SEQ ID NO: 1277832 - DNA, 15 bp, Homo sapiens
aaaactcctactaca

SEQ ID NO: 1277833 - DNA, 15 bp, Homo sapiens
gaaaactcctactac

SEQ ID NO: 1277834 - DNA, 15 bp, Homo sapiens
tgaaaactcctacta

SEQ ID NO: 1277835 - DNA, 15 bp, Homo sapiens
ttgaaaactcctact

SEQ ID NO: 1277836 - DNA, 15 bp, Homo sapiens
cttgaaaactcctac

SEQ ID NO: 1277837 - DNA, 15 bp, Homo sapiens
ccttgaaaactccta

SEQ ID NO: 1277838 - DNA, 15 bp, Homo sapiens
tccttgaaaactcct

SEQ ID NO: 1277839 - DNA, 15 bp, Homo sapiens
ttccttgaaaactcc

SEQ ID NO: 1277840 - DNA, 15 bp, Homo sapiens
tttccttgaaaactc

SEQ ID NO: 1277841 - DNA, 15 bp, Homo sapiens
atttccttgaaaact

SEQ ID NO: 1277842 - DNA, 15 bp, Homo sapiens
aatttccttgaaaac

SEQ ID NO: 1277843 - DNA, 15 bp, Homo sapiens
aaatttccttgaaaa

SEQ ID NO: 1277844 - DNA, 15 bp, Homo sapiens
aaaatttccttgaaa

SEQ ID NO: 1277845 - DNA, 15 bp, Homo sapiens
aaaaatttccttgaa

SEQ ID NO: 1277846 - DNA, 15 bp, Homo sapiens
taaaaatttccttga

SEQ ID NO: 1277847 - DNA, 15 bp, Homo sapiens
ataaaaatttccttg

SEQ ID NO: 1277848 - DNA, 15 bp, Homo sapiens
tataaaaatttcctt

SEQ ID NO: 1277849 - DNA, 15 bp, Homo sapiens
gtataaaaatttcct

SEQ ID NO: 1277850 - DNA, 15 bp, Homo sapiens
agtataaaaatttcc

SEQ ID NO: 1277851 - DNA, 15 bp, Homo sapiens
cagtataaaaatttc

SEQ ID NO: 1277852 - DNA, 15 bp, Homo sapiens
acagtataaaaattt

SEQ ID NO: 1277853 - DNA, 15 bp, Homo sapiens
tacagtataaaaatt

SEQ ID NO: 1277854 - DNA, 15 bp, Homo sapiens
atacagtataaaaat

SEQ ID NO: 1277855 - DNA, 15 bp, Homo sapiens
aatacagtataaaaa

SEQ ID NO: 1277856 - DNA, 15 bp, Homo sapiens
aaatacagtataaaa

SEQ ID NO: 1277857 - DNA, 15 bp, Homo sapiens
aaaatacagtataaa

SEQ ID NO: 1277858 - DNA, 15 bp, Homo sapiens
aaaaatacagtataa

SEQ ID NO: 1277859 - DNA, 15 bp, Homo sapiens
aaaaaatacagtata

SEQ ID NO: 1277860 - DNA, 15 bp, Homo sapiens
aaaaaaatacagtat

SEQ ID NO: 1277861 - DNA, 15 bp, Homo sapiens
aaaaaaaatacagta

SEQ ID NO: 1277862 - DNA, 15 bp, Homo sapiens
aaaaaaaaatacagt

SEQ ID NO: 1277863 - DNA, 15 bp, Homo sapiens
caaaaaaaaatacag

SEQ ID NO: 1277864 - DNA, 15 bp, Homo sapiens
acaaaaaaaaataca

SEQ ID NO: 1277865 - DNA, 15 bp, Homo sapiens
gacaaaaaaaaatac

SEQ ID NO: 1277866 - DNA, 15 bp, Homo sapiens
agacaaaaaaaaata

SEQ ID NO: 1277867 - DNA, 15 bp, Homo sapiens
cagacaaaaaaaaat

SEQ ID NO: 1277868 - DNA, 15 bp, Homo sapiens
acagacaaaaaaaaa

SEQ ID NO: 1277869 - DNA, 15 bp, Homo sapiens
cacagacaaaaaaaa

SEQ ID NO: 1277870 - DNA, 15 bp, Homo sapiens
tcacagacaaaaaaa

SEQ ID NO: 1277871 - DNA, 15 bp, Homo sapiens
gtcacagacaaaaaa

SEQ ID NO: 1277872 - DNA, 15 bp, Homo sapiens
agtcacagacaaaaa

SEQ ID NO: 1277873 - DNA, 15 bp, Homo sapiens
cagtcacagacaaaa

SEQ ID NO: 1277874 - DNA, 15 bp, Homo sapiens
acagtcacagacaaa

SEQ ID NO: 1277875 - DNA, 15 bp, Homo sapiens
cacagtcacagacaa

SEQ ID NO: 1277876 - DNA, 15 bp, Homo sapiens
gcacagtcacagaca

SEQ ID NO: 1277877 - DNA, 15 bp, Homo sapiens
agcacagtcacagac

SEQ ID NO: 1277878 - DNA, 15 bp, Homo sapiens
aagcacagtcacaga

SEQ ID NO: 1277879 - DNA, 15 bp, Homo sapiens
aaagcacagtcacag

SEQ ID NO: 1277880 - DNA, 15 bp, Homo sapiens
aaaagcacagtcaca

SEQ ID NO: 1277881 - DNA, 15 bp, Homo sapiens
taaaagcacagtcac

SEQ ID NO: 1277882 - DNA, 15 bp, Homo sapiens
ttaaaagcacagtca

SEQ ID NO: 1277883 - DNA, 15 bp, Homo sapiens
tttaaaagcacagtc

SEQ ID NO: 1277884 - DNA, 15 bp, Homo sapiens
ctttaaaagcacagt

SEQ ID NO: 1277885 - DNA, 15 bp, Homo sapiens
tctttaaaagcacag

SEQ ID NO: 1277886 - DNA, 15 bp, Homo sapiens
atctttaaaagcaca

SEQ ID NO: 1277887 - DNA, 15 bp, Homo sapiens
catctttaaaagcac

SEQ ID NO: 1277888 - DNA, 15 bp, Homo sapiens
acatctttaaaagca

SEQ ID NO: 1277889 - DNA, 15 bp, Homo sapiens
cacatctttaaaagc

SEQ ID NO: 1277890 - DNA, 15 bp, Homo sapiens
acacatctttaaaag

SEQ ID NO: 1277891 - DNA, 15 bp, Homo sapiens
aacacatctttaaaa

SEQ ID NO: 1277892 - DNA, 15 bp, Homo sapiens
aaacacatctttaaa

SEQ ID NO: 1277893 - DNA, 15 bp, Homo sapiens
taaacacatctttaa

SEQ ID NO: 1277894 - DNA, 15 bp, Homo sapiens
ttaaacacatcttta

SEQ ID NO: 1277895 - DNA, 15 bp, Homo sapiens
gttaaacacatcttt

SEQ ID NO: 1277896 - DNA, 15 bp, Homo sapiens
agttaaacacatctt

SEQ ID NO: 1277897 - DNA, 15 bp, Homo sapiens
cagttaaacacatct

SEQ ID NO: 1277898 - DNA, 15 bp, Homo sapiens
acagttaaacacatc

SEQ ID NO: 1277899 - DNA, 15 bp, Homo sapiens
gacagttaaacacat

SEQ ID NO: 1277900 - DNA, 15 bp, Homo sapiens
tgacagttaaacaca

SEQ ID NO: 1277901 - DNA, 15 bp, Homo sapiens
gtgacagttaaacac

SEQ ID NO: 1277902 - DNA, 15 bp, Homo sapiens
tgtgacagttaaaca

SEQ ID NO: 1277903 - DNA, 15 bp, Homo sapiens
atgtgacagttaaac

SEQ ID NO: 1277904 - DNA, 15 bp, Homo sapiens
aatgtgacagttaaa

SEQ ID NO: 1277905 - DNA, 15 bp, Homo sapiens
taatgtgacagttaa

SEQ ID NO: 1277906 - DNA, 15 bp, Homo sapiens
ttaatgtgacagtta

SEQ ID NO: 1277907 - DNA, 15 bp, Homo sapiens
tttaatgtgacagtt

SEQ ID NO: 1277908 - DNA, 15 bp, Homo sapiens
ttttaatgtgacagt

SEQ ID NO: 1277909 - DNA, 15 bp, Homo sapiens
tttttaatgtgacag

SEQ ID NO: 1277910 - DNA, 15 bp, Homo sapiens
ttttttaatgtgaca

SEQ ID NO: 1277911 - DNA, 15 bp, Homo sapiens
tttttttaatgtgac

SEQ ID NO: 1277912 - DNA, 15 bp, Homo sapiens
ttttttttaatgtga

SEQ ID NO: 1277913 - DNA, 15 bp, Homo sapiens
tttttttttaatgtg

SEQ ID NO: 1277914 - DNA, 15 bp, Homo sapiens
ctttttttttaatgt

SEQ ID NO: 1277915 - DNA, 15 bp, Homo sapiens
actttttttttaatg

SEQ ID NO: 1277916 - DNA, 15 bp, Homo sapiens
aactttttttttaat

SEQ ID NO: 1277917 - DNA, 15 bp, Homo sapiens
gaactttttttttaa

SEQ ID NO: 1277918 - DNA, 15 bp, Homo sapiens
cgaacttttttttta

SEQ ID NO: 1277919 - DNA, 15 bp, Homo sapiens
acgaacttttttttt

SEQ ID NO: 1277920 - DNA, 15 bp, Homo sapiens
tacgaactttttttt

SEQ ID NO: 1277921 - DNA, 15 bp, Homo sapiens
atacgaacttttttt

SEQ ID NO: 1277922 - DNA, 15 bp, Homo sapiens
tatacgaactttttt

SEQ ID NO: 1277923 - DNA, 15 bp, Homo sapiens
gtatacgaacttttt

SEQ ID NO: 1277924 - DNA, 15 bp, Homo sapiens
tgtatacgaactttt

SEQ ID NO: 1277925 - DNA, 15 bp, Homo sapiens
ttgtatacgaacttt

SEQ ID NO: 1277926 - DNA, 15 bp, Homo sapiens
attgtatacgaactt

SEQ ID NO: 1277927 - DNA, 15 bp, Homo sapiens
tattgtatacgaact

SEQ ID NO: 1277928 - DNA, 15 bp, Homo sapiens
gtattgtatacgaac

SEQ ID NO: 1277929 - DNA, 15 bp, Homo sapiens
tgtattgtatacgaa

SEQ ID NO: 1277930 - DNA, 15 bp, Homo sapiens
ttgtattgtatacga

SEQ ID NO: 1277931 - DNA, 15 bp, Homo sapiens
tttgtattgtatacg

SEQ ID NO: 1277932 - DNA, 15 bp, Homo sapiens
ttttgtattgtatac

SEQ ID NO: 1277933 - DNA, 15 bp, Homo sapiens
tttttgtattgtata

SEQ ID NO: 1277934 - DNA, 15 bp, Homo sapiens
atttttgtattgtat

SEQ ID NO: 1277935 - DNA, 15 bp, Homo sapiens
tatttttgtattgta

SEQ ID NO: 1277936 - DNA, 15 bp, Homo sapiens
gtatttttgtattgt

SEQ ID NO: 1277937 - DNA, 15 bp, Homo sapiens
tgtatttttgtattg

SEQ ID NO: 1277938 - DNA, 15 bp, Homo sapiens
ttgtatttttgtatt

SEQ ID NO: 1277939 - DNA, 15 bp, Homo sapiens
tttgtatttttgtat

SEQ ID NO: 1277940 - DNA, 15 bp, Homo sapiens
ctttttgtatttttg

SEQ ID NO: 1277941 - DNA, 15 bp, Homo sapiens
tctttttgtattttt

SEQ ID NO: 1277942 - DNA, 15 bp, Homo sapiens
ttctttttgtatttt

SEQ ID NO: 1277943 - DNA, 15 bp, Homo sapiens
tttctttttgtattt

SEQ ID NO: 1277944 - DNA, 15 bp, Homo sapiens
ttttctttttgtatt

SEQ ID NO: 1277945 - DNA, 15 bp, Homo sapiens
gttttctttttgtat

SEQ ID NO: 1277946 - DNA, 15 bp, Homo sapiens
tgttttctttttgta

SEQ ID NO: 1277947 - DNA, 15 bp, Homo sapiens
gtgttttctttttgt

SEQ ID NO: 1277948 - DNA, 15 bp, Homo sapiens
ggtgttttctttttg

SEQ ID NO: 1277949 - DNA, 15 bp, Homo sapiens
gggtgttttcttttt

SEQ ID NO: 1277950 - DNA, 15 bp, Homo sapiens
agggtgttttctttt

SEQ ID NO: 1277951 - DNA, 15 bp, Homo sapiens
tagggtgttttcttt

SEQ ID NO: 1277952 - DNA, 15 bp, Homo sapiens
gtagggtgttttctt

SEQ ID NO: 1277953 - DNA, 15 bp, Homo sapiens
tgtagggtgttttct

SEQ ID NO: 1277954 - DNA, 15 bp, Homo sapiens
ttgtagggtgttttc

SEQ ID NO: 1277955 - DNA, 15 bp, Homo sapiens
attgtagggtgtttt

SEQ ID NO: 1277956 - DNA, 15 bp, Homo sapiens
tattgtagggtgttt

SEQ ID NO: 1277957 - DNA, 15 bp, Homo sapiens
gtattgtagggtgtt

SEQ ID NO: 1277958 - DNA, 15 bp, Homo sapiens
tgtattgtagggtgt

SEQ ID NO: 1277959 - DNA, 15 bp, Homo sapiens
gtgtattgtagggtg

SEQ ID NO: 1277960 - DNA, 15 bp, Homo sapiens
tgtgtattgtagggt

SEQ ID NO: 1277961 - DNA, 15 bp, Homo sapiens
ttgtgtattgtaggg

SEQ ID NO: 1277962 - DNA, 15 bp, Homo sapiens
tttgtgtattgtagg

SEQ ID NO: 1277963 - DNA, 15 bp, Homo sapiens
atttgtgtattgtag

SEQ ID NO: 1277964 - DNA, 15 bp, Homo sapiens
aatttgtgtattgta

SEQ ID NO: 1277965 - DNA, 15 bp, Homo sapiens
gaatttgtgtattgt

SEQ ID NO: 1277966 - DNA, 15 bp, Homo sapiens
tgaatttgtgtattg

SEQ ID NO: 1277967 - DNA, 15 bp, Homo sapiens
gtgaatttgtgtatt

SEQ ID NO: 1277968 - DNA, 15 bp, Homo sapiens
tgtgaatttgtgtat

SEQ ID NO: 1277969 - DNA, 15 bp, Homo sapiens
ttgtgaatttgtgta

SEQ ID NO: 1277970 - DNA, 15 bp, Homo sapiens
tttgtgaatttgtgt

SEQ ID NO: 1277971 - DNA, 15 bp, Homo sapiens
ctttgtgaatttgtg

SEQ ID NO: 1277972 - DNA, 15 bp, Homo sapiens
actttgtgaatttgt

SEQ ID NO: 1277973 - DNA, 15 bp, Homo sapiens
tactttgtgaatttg

SEQ ID NO: 1277974 - DNA, 15 bp, Homo sapiens
atactttgtgaattt

SEQ ID NO: 1277975 - DNA, 15 bp, Homo sapiens
catactttgtgaatt

SEQ ID NO: 1277976 - DNA, 15 bp, Homo sapiens
acatactttgtgaat

SEQ ID NO: 1277977 - DNA, 15 bp, Homo sapiens
cacatactttgtgaa

SEQ ID NO: 1277978 - DNA, 15 bp, Homo sapiens
acacatactttgtga

SEQ ID NO: 1277979 - DNA, 15 bp, Homo sapiens
cacacatactttgtg

SEQ ID NO: 1277980 - DNA, 15 bp, Homo sapiens
ccacacatactttgt

SEQ ID NO: 1277981 - DNA, 15 bp, Homo sapiens
accacacatactttg

SEQ ID NO: 1277982 - DNA, 15 bp, Homo sapiens
caccacacatacttt

SEQ ID NO: 1277983 - DNA, 15 bp, Homo sapiens
tcaccacacatactt

SEQ ID NO: 1277984 - DNA, 15 bp, Homo sapiens
ctcaccacacatact

SEQ ID NO: 1277985 - DNA, 15 bp, Homo sapiens
tctcaccacacatac

SEQ ID NO: 1277986 - DNA, 15 bp, Homo sapiens
atctcaccacacata

SEQ ID NO: 1277987 - DNA, 15 bp, Homo sapiens
aatctcaccacacat

SEQ ID NO: 1277988 - DNA, 15 bp, Homo sapiens
gaatctcaccacaca

SEQ ID NO: 1277989 - DNA, 15 bp, Homo sapiens
ggaatctcaccacac

SEQ ID NO: 1277990 - DNA, 15 bp, Homo sapiens
tggaatctcaccaca

SEQ ID NO: 1277991 - DNA, 15 bp, Homo sapiens
ttggaatctcaccac

SEQ ID NO: 1277992 - DNA, 15 bp, Homo sapiens
tttggaatctcacca

SEQ ID NO: 1277993 - DNA, 15 bp, Homo sapiens
ttttggaatctcacc

SEQ ID NO: 1277994 - DNA, 15 bp, Homo sapiens
tttttggaatctcac

SEQ ID NO: 1277995 - DNA, 15 bp, Homo sapiens
ttttttggaatctca

SEQ ID NO: 1277996 - DNA, 15 bp, Homo sapiens
attttttggaatctc

SEQ ID NO: 1277997 - DNA, 15 bp, Homo sapiens
cattttttggaatct

SEQ ID NO: 1277998 - DNA, 15 bp, Homo sapiens
acattttttggaatc

SEQ ID NO: 1277999 - DNA, 15 bp, Homo sapiens
aacattttttggaat

SEQ ID NO: 1278000 - DNA, 15 bp, Homo sapiens
aaacattttttggaa

SEQ ID NO: 1278001 - DNA, 15 bp, Homo sapiens
caaacattttttgga

SEQ ID NO: 1278002 - DNA, 15 bp, Homo sapiens
tcaaacattttttgg

SEQ ID NO: 1278003 - DNA, 15 bp, Homo sapiens
ttcaaacattttttg

SEQ ID NO: 1278004 - DNA, 15 bp, Homo sapiens
cttcaaacatttttt

SEQ ID NO: 1278005 - DNA, 15 bp, Homo sapiens
tcttcaaacattttt

SEQ ID NO: 1278006 - DNA, 15 bp, Homo sapiens
atcttcaaacatttt

SEQ ID NO: 1278007 - DNA, 15 bp, Homo sapiens
catcttcaaacattt

SEQ ID NO: 1278008 - DNA, 15 bp, Homo sapiens
gcatcttcaaacatt

SEQ ID NO: 1278009 - DNA, 15 bp, Homo sapiens
tgcatcttcaaacat

SEQ ID NO: 1278010 - DNA, 15 bp, Homo sapiens
atgcatcttcaaaca

SEQ ID NO: 1278011 - DNA, 15 bp, Homo sapiens
aatgcatcttcaaac

SEQ ID NO: 1278012 - DNA, 15 bp, Homo sapiens
aaatgcatcttcaaa

SEQ ID NO: 1278013 - DNA, 15 bp, Homo sapiens
aaaatgcatcttcaa

SEQ ID NO: 1278014 - DNA, 15 bp, Homo sapiens
gaaaatgcatcttca

SEQ ID NO: 1278015 - DNA, 15 bp, Homo sapiens
agaaaatgcatcttc

SEQ ID NO: 1278016 - DNA, 15 bp, Homo sapiens
aagaaaatgcatctt

SEQ ID NO: 1278017 - DNA, 15 bp, Homo sapiens
aaagaaaatgcatct

SEQ ID NO: 1278018 - DNA, 15 bp, Homo sapiens
gaaagaaaatgcatc

SEQ ID NO: 1278019 - DNA, 15 bp, Homo sapiens
ggaaagaaaatgcat

SEQ ID NO: 1278020 - DNA, 15 bp, Homo sapiens
aggaaagaaaatgca

SEQ ID NO: 1278021 - DNA, 15 bp, Homo sapiens
aaggaaagaaaatgc

SEQ ID NO: 1278022 - DNA, 15 bp, Homo sapiens
gaaggaaagaaaatg

SEQ ID NO: 1278023 - DNA, 15 bp, Homo sapiens
agaaggaaagaaaat

SEQ ID NO: 1278024 - DNA, 15 bp, Homo sapiens
tagaaggaaagaaaa

SEQ ID NO: 1278025 - DNA, 15 bp, Homo sapiens
atagaaggaaagaaa

SEQ ID NO: 1278026 - DNA, 15 bp, Homo sapiens
aatagaaggaaagaa

SEQ ID NO: 1278027 - DNA, 15 bp, Homo sapiens
aaatagaaggaaaga

SEQ ID NO: 1278028 - DNA, 15 bp, Homo sapiens
gaaatagaaggaaag

SEQ ID NO: 1278029 - DNA, 15 bp, Homo sapiens
tgaaatagaaggaaa

SEQ ID NO: 1278030 - DNA, 15 bp, Homo sapiens
ctgaaatagaaggaa

SEQ ID NO: 1278031 - DNA, 15 bp, Homo sapiens
actgaaatagaagga

SEQ ID NO: 1278032 - DNA, 15 bp, Homo sapiens
tactgaaatagaagg

SEQ ID NO: 1278033 - DNA, 15 bp, Homo sapiens
atactgaaatagaag

SEQ ID NO: 1278034 - DNA, 15 bp, Homo sapiens
gatactgaaatagaa

SEQ ID NO: 1278035 - DNA, 15 bp, Homo sapiens
agatactgaaataga

SEQ ID NO: 1278036 - DNA, 15 bp, Homo sapiens
tagatactgaaatag

SEQ ID NO: 1278037 - DNA, 15 bp, Homo sapiens
ttagatactgaaata

SEQ ID NO: 1278038 - DNA, 15 bp, Homo sapiens
tttagatactgaaat

SEQ ID NO: 1278039 - DNA, 15 bp, Homo sapiens
ttttagatactgaaa

SEQ ID NO: 1278040 - DNA, 15 bp, Homo sapiens
attttagatactgaa

SEQ ID NO: 1278041 - DNA, 15 bp, Homo sapiens
cattttagatactga

SEQ ID NO: 1278042 - DNA, 15 bp, Homo sapiens
acattttagatactg

SEQ ID NO: 1278043 - DNA, 15 bp, Homo sapiens
cacattttagatact

SEQ ID NO: 1278044 - DNA, 15 bp, Homo sapiens
gcacattttagatac

SEQ ID NO: 1278045 - DNA, 15 bp, Homo sapiens
agcacattttagata

SEQ ID NO: 1278046 - DNA, 15 bp, Homo sapiens
aagcacattttagat

SEQ ID NO: 1278047 - DNA, 15 bp, Homo sapiens
aaagcacattttaga

SEQ ID NO: 1278048 - DNA, 15 bp, Homo sapiens
aaaagcacattttag

SEQ ID NO: 1278049 - DNA, 15 bp, Homo sapiens
aaaaagcacatttta

SEQ ID NO: 1278050 - DNA, 15 bp, Homo sapiens
caaaaagcacatttt

SEQ ID NO: 1278051 - DNA, 15 bp, Homo sapiens
tcaaaaagcacattt

SEQ ID NO: 1278052 - DNA, 15 bp, Homo sapiens
ctcaaaaagcacatt

SEQ ID NO: 1278053 - DNA, 15 bp, Homo sapiens
tctcaaaaagcacat

SEQ ID NO: 1278054 - DNA, 15 bp, Homo sapiens
ctctcaaaaagcaca

SEQ ID NO: 1278055 - DNA, 15 bp, Homo sapiens
cctctcaaaaagcac

SEQ ID NO: 1278056 - DNA, 15 bp, Homo sapiens
gcctctcaaaaagca

SEQ ID NO: 1278057 - DNA, 15 bp, Homo sapiens
ggcctctcaaaaagc

SEQ ID NO: 1278058 - DNA, 15 bp, Homo sapiens
tggcctctcaaaaag

SEQ ID NO: 1278059 - DNA, 15 bp, Homo sapiens
atggcctctcaaaaa

SEQ ID NO: 1278060 - DNA, 15 bp, Homo sapiens
aatggcctctcaaaa

SEQ ID NO: 1278061 - DNA, 15 bp, Homo sapiens
caatggcctctcaaa

SEQ ID NO: 1278062 - DNA, 15 bp, Homo sapiens
ccaatggcctctcaa

SEQ ID NO: 1278063 - DNA, 15 bp, Homo sapiens
accaatggcctctca

SEQ ID NO: 1278064 - DNA, 15 bp, Homo sapiens
gaccaatggcctctc

SEQ ID NO: 1278065 - DNA, 15 bp, Homo sapiens
tgaccaatggcctct

SEQ ID NO: 1278066 - DNA, 15 bp, Homo sapiens
ttgaccaatggcctc

SEQ ID NO: 1278067 - DNA, 15 bp, Homo sapiens
attgaccaatggcct

SEQ ID NO: 1278068 - DNA, 15 bp, Homo sapiens
tattgaccaatggcc

SEQ ID NO: 1278069 - DNA, 15 bp, Homo sapiens
atattgaccaatggc

SEQ ID NO: 1278070 - DNA, 15 bp, Homo sapiens
catattgaccaatgg

SEQ ID NO: 1278071 - DNA, 15 bp, Homo sapiens
acatattgaccaatg

SEQ ID NO: 1278072 - DNA, 15 bp, Homo sapiens
tacatattgaccaat

SEQ ID NO: 1278073 - DNA, 15 bp, Homo sapiens
atacatattgaccaa

SEQ ID NO: 1278074 - DNA, 15 bp, Homo sapiens
tatacatattgacca

SEQ ID NO: 1278075 - DNA, 15 bp, Homo sapiens
gtatacatattgacc

SEQ ID NO: 1278076 - DNA, 15 bp, Homo sapiens
tgtatacatattgac

SEQ ID NO: 1278077 - DNA, 15 bp, Homo sapiens
atgtatacatattga

SEQ ID NO: 1278078 - DNA, 15 bp, Homo sapiens
aatgtatacatattg

SEQ ID NO: 1278079 - DNA, 15 bp, Homo sapiens
aaatgtatacatatt

SEQ ID NO: 1278080 - DNA, 15 bp, Homo sapiens
taaatgtatacatat

SEQ ID NO: 1278081 - DNA, 15 bp, Homo sapiens
ttaaatgtatacata

SEQ ID NO: 1278082 - DNA, 15 bp, Homo sapiens
tttaaatgtatacat

SEQ ID NO: 1278083 - DNA, 15 bp, Homo sapiens
ttttaaatgtataca

SEQ ID NO: 1278084 - DNA, 15 bp, Homo sapiens
attttaaatgtatac

SEQ ID NO: 1278085 - DNA, 15 bp, Homo sapiens
tattttaaatgtata

SEQ ID NO: 1278086 - DNA, 15 bp, Homo sapiens
ttattttaaatgtat

SEQ ID NO: 1278087 - DNA, 15 bp, Homo sapiens
tttattttaaatgta

SEQ ID NO: 1278088 - DNA, 15 bp, Homo sapiens
gtttattttaaatgt

SEQ ID NO: 1278089 - DNA, 15 bp, Homo sapiens
ggtttattttaaatg

SEQ ID NO: 1278090 - DNA, 15 bp, Homo sapiens
tggtttattttaaat

SEQ ID NO: 1278091 - DNA, 15 bp, Homo sapiens
atggtttattttaaa

SEQ ID NO: 1278092 - DNA, 15 bp, Homo sapiens
tatggtttattttaa

SEQ ID NO: 1278093 - DNA, 15 bp, Homo sapiens
atatggtttatttta

SEQ ID NO: 1278094 - DNA, 15 bp, Homo sapiens
tatatggtttatttt

SEQ ID NO: 1278095 - DNA, 15 bp, Homo sapiens
ttatatggtttattt

SEQ ID NO: 1278096 - DNA, 15 bp, Homo sapiens
attatatggtttatt

SEQ ID NO: 1278097 - DNA, 15 bp, Homo sapiens
aattatatggtttat

SEQ ID NO: 1278098 - DNA, 15 bp, Homo sapiens
aaattatatggttta

SEQ ID NO: 1278099 - DNA, 15 bp, Homo sapiens
aaaattatatggttt

SEQ ID NO: 1278100 - DNA, 15 bp, Homo sapiens
taaaattatatggtt

SEQ ID NO: 1278101 - DNA, 15 bp, Homo sapiens
gtaaaattatatggt

SEQ ID NO: 1278102 - DNA, 15 bp, Homo sapiens
agtaaaattatatgg

SEQ ID NO: 1278103 - DNA, 15 bp, Homo sapiens
tagtaaaattatatg

SEQ ID NO: 1278104 - DNA, 15 bp, Homo sapiens
ctagtaaaattatat

SEQ ID NO: 1278105 - DNA, 15 bp, Homo sapiens
actagtaaaattata

SEQ ID NO: 1278106 - DNA, 15 bp, Homo sapiens
tactagtaaaattat

SEQ ID NO: 1278107 - DNA, 15 bp, Homo sapiens
ttactagtaaaatta

SEQ ID NO: 1278108 - DNA, 15 bp, Homo sapiens
cttactagtaaaatt

SEQ ID NO: 1278109 - DNA, 15 bp, Homo sapiens
tcttactagtaaaat

SEQ ID NO: 1278110 - DNA, 15 bp, Homo sapiens
ttcttactagtaaaa

SEQ ID NO: 1278111 - DNA, 15 bp, Homo sapiens
tttcttactagtaaa

SEQ ID NO: 1278112 - DNA, 15 bp, Homo sapiens
ctttcttactagtaa

SEQ ID NO: 1278113 - DNA, 15 bp, Homo sapiens
gctttcttactagta

SEQ ID NO: 1278114 - DNA, 15 bp, Homo sapiens
ggctttcttactagt

SEQ ID NO: 1278115 - DNA, 15 bp, Homo sapiens
tggctttcttactag

SEQ ID NO: 1278116 - DNA, 15 bp, Homo sapiens
ctggctttcttacta

SEQ ID NO: 1278117 - DNA, 15 bp, Homo sapiens
actggctttcttact

SEQ ID NO: 1278118 - DNA, 15 bp, Homo sapiens
tactggctttcttac

SEQ ID NO: 1278119 - DNA, 15 bp, Homo sapiens
ctactggctttctta

SEQ ID NO: 1278120 - DNA, 15 bp, Homo sapiens
actactggctttctt

SEQ ID NO: 1278121 - DNA, 15 bp, Homo sapiens
aactactggctttct

SEQ ID NO: 1278122 - DNA, 15 bp, Homo sapiens
taactactggctttc

SEQ ID NO: 1278123 - DNA, 15 bp, Homo sapiens
ttaactactggcttt

SEQ ID NO: 1278124 - DNA, 15 bp, Homo sapiens
cttaactactggctt

SEQ ID NO: 1278125 - DNA, 15 bp, Homo sapiens
acttaactactggct

SEQ ID NO: 1278126 - DNA, 15 bp, Homo sapiens
aacttaactactggc

SEQ ID NO: 1278127 - DNA, 15 bp, Homo sapiens
gaacttaactactgg

SEQ ID NO: 1278128 - DNA, 15 bp, Homo sapiens
tgaacttaactactg

SEQ ID NO: 1278129 - DNA, 15 bp, Homo sapiens
ttgaacttaactact

SEQ ID NO: 1278130 - DNA, 15 bp, Homo sapiens
attgaacttaactac

SEQ ID NO: 1278131 - DNA, 15 bp, Homo sapiens
aattgaacttaacta

SEQ ID NO: 1278132 - DNA, 15 bp, Homo sapiens
gaattgaacttaact

SEQ ID NO: 1278133 - DNA, 15 bp, Homo sapiens
tgaattgaacttaac

SEQ ID NO: 1278134 - DNA, 15 bp, Homo sapiens
ttgaattgaacttaa

SEQ ID NO: 1278135 - DNA, 15 bp, Homo sapiens
tttgaattgaactta

SEQ ID NO: 1278136 - DNA, 15 bp, Homo sapiens
atttgaattgaactt

SEQ ID NO: 1278137 - DNA, 15 bp, Homo sapiens
aatttgaattgaact

SEQ ID NO: 1278138 - DNA, 15 bp, Homo sapiens
caatttgaattgaac

SEQ ID NO: 1278139 - DNA, 15 bp, Homo sapiens
ccaatttgaattgaa

SEQ ID NO: 1278140 - DNA, 15 bp, Homo sapiens
tccaatttgaattga

SEQ ID NO: 1278141 - DNA, 15 bp, Homo sapiens
atccaatttgaattg

SEQ ID NO: 1278142 - DNA, 15 bp, Homo sapiens
aatccaatttgaatt

SEQ ID NO: 1278143 - DNA, 15 bp, Homo sapiens
aaatccaatttgaat

SEQ ID NO: 1278144 - DNA, 15 bp, Homo sapiens
gaaatccaatttgaa

SEQ ID NO: 1278145 - DNA, 15 bp, Homo sapiens
tgaaatccaatttga

SEQ ID NO: 1278146 - DNA, 15 bp, Homo sapiens
gtgaaatccaatttg

SEQ ID NO: 1278147 - DNA, 15 bp, Homo sapiens
tgtgaaatccaattt

SEQ ID NO: 1278148 - DNA, 15 bp, Homo sapiens
ttgtgaaatccaatt

SEQ ID NO: 1278149 - DNA, 15 bp, Homo sapiens
cttgtgaaatccaat

SEQ ID NO: 1278150 - DNA, 15 bp, Homo sapiens
acttgtgaaatccaa

SEQ ID NO: 1278151 - DNA, 15 bp, Homo sapiens
aacttgtgaaatcca

SEQ ID NO: 1278152 - DNA, 15 bp, Homo sapiens
taacttgtgaaatcc

SEQ ID NO: 1278153 - DNA, 15 bp, Homo sapiens
ctaacttgtgaaatc

SEQ ID NO: 1278154 - DNA, 15 bp, Homo sapiens
actaacttgtgaaat

SEQ ID NO: 1278155 - DNA, 15 bp, Homo sapiens
tactaacttgtgaaa

SEQ ID NO: 1278156 - DNA, 15 bp, Homo sapiens
ttactaacttgtgaa

SEQ ID NO: 1278157 - DNA, 15 bp, Homo sapiens
attactaacttgtga

SEQ ID NO: 1278158 - DNA, 15 bp, Homo sapiens
aattactaacttgtg

SEQ ID NO: 1278159 - DNA, 15 bp, Homo sapiens
aaattactaacttgt

SEQ ID NO: 1278160 - DNA, 15 bp, Homo sapiens
taaattactaacttg

SEQ ID NO: 1278161 - DNA, 15 bp, Homo sapiens
ttaaattactaactt

SEQ ID NO: 1278162 - DNA, 15 bp, Homo sapiens
tttaaattactaact

SEQ ID NO: 1278163 - DNA, 15 bp, Homo sapiens
atttaaattactaac

SEQ ID NO: 1278164 - DNA, 15 bp, Homo sapiens
gatttaaattactaa

SEQ ID NO: 1278165 - DNA, 15 bp, Homo sapiens
ggatttaaattacta

SEQ ID NO: 1278166 - DNA, 15 bp, Homo sapiens
aggatttaaattact

SEQ ID NO: 1278167 - DNA, 15 bp, Homo sapiens
aaggatttaaattac

SEQ ID NO: 1278168 - DNA, 15 bp, Homo sapiens
caaggatttaaatta

SEQ ID NO: 1278169 - DNA, 15 bp, Homo sapiens
ccaaggatttaaatt

SEQ ID NO: 1278170 - DNA, 15 bp, Homo sapiens
tccaaggatttaaat

SEQ ID NO: 1278171 - DNA, 15 bp, Homo sapiens
gtccaaggatttaaa

SEQ ID NO: 1278172 - DNA, 15 bp, Homo sapiens
tgtccaaggatttaa

SEQ ID NO: 1278173 - DNA, 15 bp, Homo sapiens
ttgtccaaggattta

SEQ ID NO: 1278174 - DNA, 15 bp, Homo sapiens
tttgtccaaggattt

SEQ ID NO: 1278175 - DNA, 15 bp, Homo sapiens
ctttgtccaaggatt

SEQ ID NO: 1278176 - DNA, 15 bp, Homo sapiens
actttgtccaaggat

SEQ ID NO: 1278177 - DNA, 15 bp, Homo sapiens
aactttgtccaagga

SEQ ID NO: 1278178 - DNA, 15 bp, Homo sapiens
taactttgtccaagg

SEQ ID NO: 1278179 - DNA, 15 bp, Homo sapiens
gtaactttgtccaag

SEQ ID NO: 1278180 - DNA, 15 bp, Homo sapiens
tgtaactttgtccaa

SEQ ID NO: 1278181 - DNA, 15 bp, Homo sapiens
ctgtaactttgtcca

SEQ ID NO: 1278182 - DNA, 15 bp, Homo sapiens
tctgtaactttgtcc

SEQ ID NO: 1278183 - DNA, 15 bp, Homo sapiens
ttctgtaactttgtc

SEQ ID NO: 1278184 - DNA, 15 bp, Homo sapiens
tttctgtaactttgt

SEQ ID NO: 1278185 - DNA, 15 bp, Homo sapiens
ctttctgtaactttg

SEQ ID NO: 1278186 - DNA, 15 bp, Homo sapiens
actttctgtaacttt

SEQ ID NO: 1278187 - DNA, 15 bp, Homo sapiens
cactttctgtaactt

SEQ ID NO: 1278188 - DNA, 15 bp, Homo sapiens
gcactttctgtaact

SEQ ID NO: 1278189 - DNA, 15 bp, Homo sapiens
tgcactttctgtaac

SEQ ID NO: 1278190 - DNA, 15 bp, Homo sapiens
atgcactttctgtaa

SEQ ID NO: 1278191 - DNA, 15 bp, Homo sapiens
gatgcactttctgta

SEQ ID NO: 1278192 - DNA, 15 bp, Homo sapiens
agatgcactttctgt

SEQ ID NO: 1278193 - DNA, 15 bp, Homo sapiens
aagatgcactttctg

SEQ ID NO: 1278194 - DNA, 15 bp, Homo sapiens
gaagatgcactttct

SEQ ID NO: 1278195 - DNA, 15 bp, Homo sapiens
agaagatgcactttc

SEQ ID NO: 1278196 - DNA, 15 bp, Homo sapiens
aagaagatgcacttt

SEQ ID NO: 1278197 - DNA, 15 bp, Homo sapiens
caagaagatgcactt

SEQ ID NO: 1278198 - DNA, 15 bp, Homo sapiens
acaagaagatgcact

SEQ ID NO: 1278199 - DNA, 15 bp, Homo sapiens
aacaagaagatgcac

SEQ ID NO: 1278200 - DNA, 15 bp, Homo sapiens
aaacaagaagatgca

SEQ ID NO: 1278201 - DNA, 15 bp, Homo sapiens
aaaacaagaagatgc

SEQ ID NO: 1278202 - DNA, 15 bp, Homo sapiens
gaaaacaagaagatg

SEQ ID NO: 1278203 - DNA, 15 bp, Homo sapiens
ggaaaacaagaagat

SEQ ID NO: 1278204 - DNA, 15 bp, Homo sapiens
tggaaaacaagaaga

SEQ ID NO: 1278205 - DNA, 15 bp, Homo sapiens
atggaaaacaagaag

SEQ ID NO: 1278206 - DNA, 15 bp, Homo sapiens
gatggaaaacaagaa

SEQ ID NO: 1278207 - DNA, 15 bp, Homo sapiens
agatggaaaacaaga

SEQ ID NO: 1278208 - DNA, 15 bp, Homo sapiens
aagatggaaaacaag

SEQ ID NO: 1278209 - DNA, 15 bp, Homo sapiens
gaagatggaaaacaa

SEQ ID NO: 1278210 - DNA, 15 bp, Homo sapiens
tgaagatggaaaaca

SEQ ID NO: 1278211 - DNA, 15 bp, Homo sapiens
atgaagatggaaaac

SEQ ID NO: 1278212 - DNA, 15 bp, Homo sapiens
tatgaagatggaaaa

SEQ ID NO: 1278213 - DNA, 15 bp, Homo sapiens
gtatgaagatggaaa

SEQ ID NO: 1278214 - DNA, 15 bp, Homo sapiens
tgtatgaagatggaa

SEQ ID NO: 1278215 - DNA, 15 bp, Homo sapiens
ttgtatgaagatgga

SEQ ID NO: 1278216 - DNA, 15 bp, Homo sapiens
attgtatgaagatgg

SEQ ID NO: 1278217 - DNA, 15 bp, Homo sapiens
cattgtatgaagatg

SEQ ID NO: 1278218 - DNA, 15 bp, Homo sapiens
acattgtatgaagat

SEQ ID NO: 1278219 - DNA, 15 bp, Homo sapiens
aacattgtatgaaga

SEQ ID NO: 1278220 - DNA, 15 bp, Homo sapiens
taacattgtatgaag

SEQ ID NO: 1278221 - DNA, 15 bp, Homo sapiens
ttaacattgtatgaa

SEQ ID NO: 1278222 - DNA, 15 bp, Homo sapiens
tttaacattgtatga

SEQ ID NO: 1278223 - DNA, 15 bp, Homo sapiens
atttaacattgtatg

SEQ ID NO: 1278224 - DNA, 15 bp, Homo sapiens
aatttaacattgtat

SEQ ID NO: 1278225 - DNA, 15 bp, Homo sapiens
aaatttaacattgta

SEQ ID NO: 1278226 - DNA, 15 bp, Homo sapiens
aaaatttaacattgt

SEQ ID NO: 1278227 - DNA, 15 bp, Homo sapiens
aaaaatttaacattg

SEQ ID NO: 1278228 - DNA, 15 bp, Homo sapiens
aaaaaatttaacatt

SEQ ID NO: 1278229 - DNA, 15 bp, Homo sapiens
aaaaaaatttaacat

SEQ ID NO: 1278230 - DNA, 15 bp, Homo sapiens
aaaaaaaatttaaca

SEQ ID NO: 1278231 - DNA, 15 bp, Homo sapiens
aaaaaaaaatttaac

SEQ ID NO: 1278232 - DNA, 15 bp, Homo sapiens
caaaaaaaaaaaatt

SEQ ID NO: 1278233 - DNA, 15 bp, Homo sapiens
ccaaaaaaaaaaaat

SEQ ID NO: 1278234 - DNA, 15 bp, Homo sapiens
caccaaaaaaaaaaa

SEQ ID NO: 1278235 - DNA, 15 bp, Homo sapiens
acaccaaaaaaaaaa

SEQ ID NO: 1278236 - DNA, 15 bp, Homo sapiens
aacaccaaaaaaaaa

SEQ ID NO: 1278237 - DNA, 15 bp, Homo sapiens
aaacaccaaaaaaaa

SEQ ID NO: 1278238 - DNA, 15 bp, Homo sapiens
taaacaccaaaaaaa

SEQ ID NO: 1278239 - DNA, 15 bp, Homo sapiens
ataaacaccaaaaaa

SEQ ID NO: 1278240 - DNA, 15 bp, Homo sapiens
tataaacaccaaaaa

SEQ ID NO: 1278241 - DNA, 15 bp, Homo sapiens
gtataaacaccaaaa

SEQ ID NO: 1278242 - DNA, 15 bp, Homo sapiens
ggtataaacaccaaa

SEQ ID NO: 1278243 - DNA, 15 bp, Homo sapiens
aggtataaacaccaa

SEQ ID NO: 1278244 - DNA, 15 bp, Homo sapiens
aaggtataaacacca

SEQ ID NO: 1278245 - DNA, 15 bp, Homo sapiens
aaaggtataaacacc

SEQ ID NO: 1278246 - DNA, 15 bp, Homo sapiens
aaaaggtataaacac

SEQ ID NO: 1278247 - DNA, 15 bp, Homo sapiens
taaaaggtataaaca

SEQ ID NO: 1278248 - DNA, 15 bp, Homo sapiens
ttaaaaggtataaac

SEQ ID NO: 1278249 - DNA, 15 bp, Homo sapiens
tttaaaaggtataaa

SEQ ID NO: 1278250 - DNA, 15 bp, Homo sapiens
ttttaaaaggtataa

SEQ ID NO: 1278251 - DNA, 15 bp, Homo sapiens
tttttaaaaggtata

SEQ ID NO: 1278252 - DNA, 15 bp, Homo sapiens
ttttttaaaaggtat

SEQ ID NO: 1278253 - DNA, 15 bp, Homo sapiens
attttttaaaaggta

SEQ ID NO: 1278254 - DNA, 15 bp, Homo sapiens
tattttttaaaaggt

SEQ ID NO: 1278255 - DNA, 15 bp, Homo sapiens
ttattttttaaaagg

SEQ ID NO: 1278256 - DNA, 15 bp, Homo sapiens
tttattttttaaaag

SEQ ID NO: 1278257 - DNA, 15 bp, Homo sapiens
ttttattttttaaaa

SEQ ID NO: 1278258 - DNA, 15 bp, Homo sapiens
cttttattttttaaa

SEQ ID NO: 1278259 - DNA, 15 bp, Homo sapiens
gcttttattttttaa

SEQ ID NO: 1278260 - DNA, 15 bp, Homo sapiens
tgcttttatttttta

SEQ ID NO: 1278261 - DNA, 15 bp, Homo sapiens
gctgcttttattttt

SEQ ID NO: 1278262 - DNA, 15 bp, Homo sapiens
ggctgcttttatttt

SEQ ID NO: 1278263 - DNA, 15 bp, Homo sapiens
tggctgcttttattt

SEQ ID NO: 1278264 - DNA, 15 bp, Homo sapiens
ttggctgcttttatt

SEQ ID NO: 1278265 - DNA, 15 bp, Homo sapiens
tttggctgcttttat

SEQ ID NO: 1278266 - DNA, 15 bp, Homo sapiens
atttggctgctttta

SEQ ID NO: 1278267 - DNA, 15 bp, Homo sapiens
tatttggctgctttt

SEQ ID NO: 1278268 - DNA, 15 bp, Homo sapiens
gtatttggctgcttt

SEQ ID NO: 1278269 - DNA, 15 bp, Homo sapiens
agtatttggctgctt

SEQ ID NO: 1278270 - DNA, 15 bp, Homo sapiens
aagtatttggctgct

SEQ ID NO: 1278271 - DNA, 15 bp, Homo sapiens
taagtatttggctgc

SEQ ID NO: 1278272 - DNA, 15 bp, Homo sapiens
ttaagtatttggctg

SEQ ID NO: 1278273 - DNA, 15 bp, Homo sapiens
cttaagtatttggct

SEQ ID NO: 1278274 - DNA, 15 bp, Homo sapiens
gcttaagtatttggc

SEQ ID NO: 1278275 - DNA, 15 bp, Homo sapiens
tgcttaagtatttgg

SEQ ID NO: 1278276 - DNA, 15 bp, Homo sapiens
ttgcttaagtatttg

SEQ ID NO: 1278277 - DNA, 15 bp, Homo sapiens
attgcttaagtattt

SEQ ID NO: 1278278 - DNA, 15 bp, Homo sapiens
tattgcttaagtatt

SEQ ID NO: 1278279 - DNA, 15 bp, Homo sapiens
atattgcttaagtat

SEQ ID NO: 1278280 - DNA, 15 bp, Homo sapiens
catattgcttaagta

SEQ ID NO: 1278281 - DNA, 15 bp, Homo sapiens
acatattgcttaagt

SEQ ID NO: 1278282 - DNA, 15 bp, Homo sapiens
tacatattgcttaag

SEQ ID NO: 1278283 - DNA, 15 bp, Homo sapiens
gtacatattgcttaa

SEQ ID NO: 1278284 - DNA, 15 bp, Homo sapiens
tgtacatattgctta

SEQ ID NO: 1278285 - DNA, 15 bp, Homo sapiens
atgtacatattgctt

SEQ ID NO: 1278286 - DNA, 15 bp, Homo sapiens
aatgtacatattgct

SEQ ID NO: 1278287 - DNA, 15 bp, Homo sapiens
aaatgtacatattgc

SEQ ID NO: 1278288 - DNA, 15 bp, Homo sapiens
taaatgtacatattg

SEQ ID NO: 1278289 - DNA, 15 bp, Homo sapiens
ttaaatgtacatatt

SEQ ID NO: 1278290 - DNA, 15 bp, Homo sapiens
tttaaatgtacatat

SEQ ID NO: 1278291 - DNA, 15 bp, Homo sapiens
atttaaatgtacata

SEQ ID NO: 1278292 - DNA, 15 bp, Homo sapiens
aatttaaatgtacat

SEQ ID NO: 1278293 - DNA, 15 bp, Homo sapiens
aaatttaaatgtaca

SEQ ID NO: 1278294 - DNA, 15 bp, Homo sapiens
aaaatttaaatgtac

SEQ ID NO: 1278295 - DNA, 15 bp, Homo sapiens
aaaaatttaaatgta

SEQ ID NO: 1278296 - DNA, 15 bp, Homo sapiens
caaaaatttaaatgt

SEQ ID NO: 1278297 - DNA, 15 bp, Homo sapiens
ccaaaaatttaaatg

SEQ ID NO: 1278298 - DNA, 15 bp, Homo sapiens
accaaaaatttaaat

SEQ ID NO: 1278299 - DNA, 15 bp, Homo sapiens
caccaaaaatttaaa

SEQ ID NO: 1278300 - DNA, 15 bp, Homo sapiens
ccaccaaaaatttaa

SEQ ID NO: 1278301 - DNA, 15 bp, Homo sapiens
accaccaaaaattta

SEQ ID NO: 1278302 - DNA, 15 bp, Homo sapiens
caccaccaaaaattt

SEQ ID NO: 1278303 - DNA, 15 bp, Homo sapiens
ccaccaccaaaaatt

SEQ ID NO: 1278304 - DNA, 15 bp, Homo sapiens
accaccaccaaaaat

SEQ ID NO: 1278305 - DNA, 15 bp, Homo sapiens
caaaccaccaccaaa

SEQ ID NO: 1278306 - DNA, 15 bp, Homo sapiens
acaaaccaccaccaa

SEQ ID NO: 1278307 - DNA, 15 bp, Homo sapiens
tacaaaccaccacca

SEQ ID NO: 1278308 - DNA, 15 bp, Homo sapiens
atacaaaccaccacc

SEQ ID NO: 1278309 - DNA, 15 bp, Homo sapiens
aatacaaaccaccac

SEQ ID NO: 1278310 - DNA, 15 bp, Homo sapiens
aaatacaaaccacca

SEQ ID NO: 1278311 - DNA, 15 bp, Homo sapiens
aaaatacaaaccacc

SEQ ID NO: 1278312 - DNA, 15 bp, Homo sapiens
taaaatacaaaccac

SEQ ID NO: 1278313 - DNA, 15 bp, Homo sapiens
ttaaaatacaaacca

SEQ ID NO: 1278314 - DNA, 15 bp, Homo sapiens
tttaaaatacaaacc

SEQ ID NO: 1278315 - DNA, 15 bp, Homo sapiens
ttttaaaatacaaac

SEQ ID NO: 1278316 - DNA, 15 bp, Homo sapiens
cttttaaaatacaaa

SEQ ID NO: 1278317 - DNA, 15 bp, Homo sapiens
tcttttaaaatacaa

SEQ ID NO: 1278318 - DNA, 15 bp, Homo sapiens
ttcttttaaaataca

SEQ ID NO: 1278319 - DNA, 15 bp, Homo sapiens
tttcttttaaaatac

SEQ ID NO: 1278320 - DNA, 15 bp, Homo sapiens
gtttcttttaaaata

SEQ ID NO: 1278321 - DNA, 15 bp, Homo sapiens
tgtttcttttaaaat

SEQ ID NO: 1278322 - DNA, 15 bp, Homo sapiens
ctgtttcttttaaaa

SEQ ID NO: 1278323 - DNA, 15 bp, Homo sapiens
actgtttcttttaaa

SEQ ID NO: 1278324 - DNA, 15 bp, Homo sapiens
aactgtttcttttaa

SEQ ID NO: 1278325 - DNA, 15 bp, Homo sapiens
aaactgtttctttta

SEQ ID NO: 1278326 - DNA, 15 bp, Homo sapiens
aaaactgtttctttt

SEQ ID NO: 1278327 - DNA, 15 bp, Homo sapiens
gaaaactgtttcttt

SEQ ID NO: 1278328 - DNA, 15 bp, Homo sapiens
agaaaactgtttctt

SEQ ID NO: 1278329 - DNA, 15 bp, Homo sapiens
aagaaaactgtttct

SEQ ID NO: 1278330 - DNA, 15 bp, Homo sapiens
taagaaaactgtttc

SEQ ID NO: 1278331 - DNA, 15 bp, Homo sapiens
ataagaaaactgttt

SEQ ID NO: 1278332 - DNA, 15 bp, Homo sapiens
cataagaaaactgtt

SEQ ID NO: 1278333 - DNA, 15 bp, Homo sapiens
tcataagaaaactgt

SEQ ID NO: 1278334 - DNA, 15 bp, Homo sapiens
atcataagaaaactg

SEQ ID NO: 1278335 - DNA, 15 bp, Homo sapiens
aatcataagaaaact

SEQ ID NO: 1278336 - DNA, 15 bp, Homo sapiens
gaatcataagaaaac

SEQ ID NO: 1278337 - DNA, 15 bp, Homo sapiens
cgaatcataagaaaa

SEQ ID NO: 1278338 - DNA, 15 bp, Homo sapiens
gcgaatcataagaaa

SEQ ID NO: 1278339 - DNA, 15 bp, Homo sapiens
agcgaatcataagaa

SEQ ID NO: 1278340 - DNA, 15 bp, Homo sapiens
aagcgaatcataaga

SEQ ID NO: 1278341 - DNA, 15 bp, Homo sapiens
gaagcgaatcataag

SEQ ID NO: 1278342 - DNA, 15 bp, Homo sapiens
tgaagcgaatcataa

SEQ ID NO: 1278343 - DNA, 15 bp, Homo sapiens
ttgaagcgaatcata

SEQ ID NO: 1278344 - DNA, 15 bp, Homo sapiens
cttgaagcgaatcat

SEQ ID NO: 1278345 - DNA, 15 bp, Homo sapiens
acttgaagcgaatca

SEQ ID NO: 1278346 - DNA, 15 bp, Homo sapiens
aacttgaagcgaatc

SEQ ID NO: 1278347 - DNA, 15 bp, Homo sapiens
gaacttgaagcgaat

SEQ ID NO: 1278348 - DNA, 15 bp, Homo sapiens
agaacttgaagcgaa

SEQ ID NO: 1278349 - DNA, 15 bp, Homo sapiens
cagaacttgaagcga

SEQ ID NO: 1278350 - DNA, 15 bp, Homo sapiens
ccagaacttgaagcg

SEQ ID NO: 1278351 - DNA, 15 bp, Homo sapiens
accagaacttgaagc

SEQ ID NO: 1278352 - DNA, 15 bp, Homo sapiens
caccagaacttgaag

SEQ ID NO: 1278353 - DNA, 15 bp, Homo sapiens
ccaccagaacttgaa

SEQ ID NO: 1278354 - DNA, 15 bp, Homo sapiens
tccaccagaacttga

SEQ ID NO: 1278355 - DNA, 15 bp, Homo sapiens
ttccaccagaacttg

SEQ ID NO: 1278356 - DNA, 15 bp, Homo sapiens
tttccaccagaactt

SEQ ID NO: 1278357 - DNA, 15 bp, Homo sapiens
atttccaccagaact

SEQ ID NO: 1278358 - DNA, 15 bp, Homo sapiens
catttccaccagaac

SEQ ID NO: 1278359 - DNA, 15 bp, Homo sapiens
gcatttccaccagaa

SEQ ID NO: 1278360 - DNA, 15 bp, Homo sapiens
agcatttccaccaga

SEQ ID NO: 1278361 - DNA, 15 bp, Homo sapiens
aagcatttccaccag

SEQ ID NO: 1278362 - DNA, 15 bp, Homo sapiens
taagcatttccacca

SEQ ID NO: 1278363 - DNA, 15 bp, Homo sapiens
gtaagcatttccacc

SEQ ID NO: 1278364 - DNA, 15 bp, Homo sapiens
tgtaagcatttccac

SEQ ID NO: 1278365 - DNA, 15 bp, Homo sapiens
ctgtaagcatttcca

SEQ ID NO: 1278366 - DNA, 15 bp, Homo sapiens
cctgtaagcatttcc

SEQ ID NO: 1278367 - DNA, 15 bp, Homo sapiens
tcctgtaagcatttc

SEQ ID NO: 1278368 - DNA, 15 bp, Homo sapiens
ttcctgtaagcattt

SEQ ID NO: 1278369 - DNA, 15 bp, Homo sapiens
gttcctgtaagcatt

SEQ ID NO: 1278370 - DNA, 15 bp, Homo sapiens
agttcctgtaagcat

SEQ ID NO: 1278371 - DNA, 15 bp, Homo sapiens
tagttcctgtaagca

SEQ ID NO: 1278372 - DNA, 15 bp, Homo sapiens
ctagttcctgtaagc

SEQ ID NO: 1278373 - DNA, 15 bp, Homo sapiens
gctagttcctgtaag

SEQ ID NO: 1278374 - DNA, 15 bp, Homo sapiens
agctagttcctgtaa

SEQ ID NO: 1278375 - DNA, 15 bp, Homo sapiens
tagctagttcctgta

SEQ ID NO: 1278376 - DNA, 15 bp, Homo sapiens
ttagctagttcctgt

SEQ ID NO: 1278377 - DNA, 15 bp, Homo sapiens
attagctagttcctg

SEQ ID NO: 1278378 - DNA, 15 bp, Homo sapiens
tattagctagttcct

SEQ ID NO: 1278379 - DNA, 15 bp, Homo sapiens
ttattagctagttcc

SEQ ID NO: 1278380 - DNA, 15 bp, Homo sapiens
tttattagctagttc

SEQ ID NO: 1278381 - DNA, 15 bp, Homo sapiens
gtttattagctagtt

SEQ ID NO: 1278382 - DNA, 15 bp, Homo sapiens
tgtttattagctagt

SEQ ID NO: 1278383 - DNA, 15 bp, Homo sapiens
ttgtttattagctag

SEQ ID NO: 1278384 - DNA, 15 bp, Homo sapiens
tttgtttattagcta

SEQ ID NO: 1278385 - DNA, 15 bp, Homo sapiens
ttttgtttattagct

SEQ ID NO: 1278386 - DNA, 15 bp, Homo sapiens
tttttgtttattagc

SEQ ID NO: 1278387 - DNA, 15 bp, Homo sapiens
ttttttgtttattag

SEQ ID NO: 1278388 - DNA, 15 bp, Homo sapiens
gttttttgtttatta

SEQ ID NO: 1278389 - DNA, 15 bp, Homo sapiens
tgttttttgtttatt

SEQ ID NO: 1278390 - DNA, 15 bp, Homo sapiens
ttgttttttgtttat

SEQ ID NO: 1278391 - DNA, 15 bp, Homo sapiens
cttgttttttgttta

SEQ ID NO: 1278392 - DNA, 15 bp, Homo sapiens
ctcttgttttttgtt

SEQ ID NO: 1278393 - DNA, 15 bp, Homo sapiens
tctcttgttttttgt

SEQ ID NO: 1278394 - DNA, 15 bp, Homo sapiens
ttctcttgttttttg

SEQ ID NO: 1278395 - DNA, 15 bp, Homo sapiens
cttctcttgtttttt

SEQ ID NO: 1278396 - DNA, 15 bp, Homo sapiens
gcttctcttgttttt

SEQ ID NO: 1278397 - DNA, 15 bp, Homo sapiens
tgcttctcttgtttt

SEQ ID NO: 1278398 - DNA, 15 bp, Homo sapiens
gtgcttctcttgttt

SEQ ID NO: 1278399 - DNA, 15 bp, Homo sapiens
tgtgcttctcttgtt

SEQ ID NO: 1278400 - DNA, 15 bp, Homo sapiens
atgtgcttctcttgt

SEQ ID NO: 1278401 - DNA, 15 bp, Homo sapiens
aatgtgcttctcttg

SEQ ID NO: 1278402 - DNA, 15 bp, Homo sapiens
gaatgtgcttctctt

SEQ ID NO: 1278403 - DNA, 15 bp, Homo sapiens
tgaatgtgcttctct

SEQ ID NO: 1278404 - DNA, 15 bp, Homo sapiens
ttgaatgtgcttctc

SEQ ID NO: 1278405 - DNA, 15 bp, Homo sapiens
tttgaatgtgcttct

SEQ ID NO: 1278406 - DNA, 15 bp, Homo sapiens
ttttgaatgtgcttc

SEQ ID NO: 1278407 - DNA, 15 bp, Homo sapiens
attttgaatgtgctt

SEQ ID NO: 1278408 - DNA, 15 bp, Homo sapiens
tattttgaatgtgct

SEQ ID NO: 1278409 - DNA, 15 bp, Homo sapiens
gtattttgaatgtgc

SEQ ID NO: 1278410 - DNA, 15 bp, Homo sapiens
agtattttgaatgtg

SEQ ID NO: 1278411 - DNA, 15 bp, Homo sapiens
cagtattttgaatgt

SEQ ID NO: 1278412 - DNA, 15 bp, Homo sapiens
tcagtattttgaatg

SEQ ID NO: 1278413 - DNA, 15 bp, Homo sapiens
atcagtattttgaat

SEQ ID NO: 1278414 - DNA, 15 bp, Homo sapiens
aatcagtattttgaa

SEQ ID NO: 1278415 - DNA, 15 bp, Homo sapiens
aaatcagtattttga

SEQ ID NO: 1278416 - DNA, 15 bp, Homo sapiens
taaatcagtattttg

SEQ ID NO: 1278417 - DNA, 15 bp, Homo sapiens
gtaaatcagtatttt

SEQ ID NO: 1278418 - DNA, 15 bp, Homo sapiens
agtaaatcagtattt

SEQ ID NO: 1278419 - DNA, 15 bp, Homo sapiens
aagtaaatcagtatt

SEQ ID NO: 1278420 - DNA, 15 bp, Homo sapiens
aaagtaaatcagtat

SEQ ID NO: 1278421 - DNA, 15 bp, Homo sapiens
caaagtaaatcagta

SEQ ID NO: 1278422 - DNA, 15 bp, Homo sapiens
ccaaagtaaatcagt

SEQ ID NO: 1278423 - DNA, 15 bp, Homo sapiens
accaaagtaaatcag

SEQ ID NO: 1278424 - DNA, 15 bp, Homo sapiens
taccaaagtaaatca

SEQ ID NO: 1278425 - DNA, 15 bp, Homo sapiens
ctaccaaagtaaatc

SEQ ID NO: 1278426 - DNA, 15 bp, Homo sapiens
gctaccaaagtaaat

SEQ ID NO: 1278427 - DNA, 15 bp, Homo sapiens
tgctaccaaagtaaa

SEQ ID NO: 1278428 - DNA, 15 bp, Homo sapiens
acctttggagccact

SEQ ID NO: 1278429 - DNA, 15 bp, Homo sapiens
tacctttggagccac

SEQ ID NO: 1278430 - DNA, 15 bp, Homo sapiens
ctacctttggagcca

SEQ ID NO: 1278431 - DNA, 15 bp, Homo sapiens
actacctttggagcc

SEQ ID NO: 1278432 - DNA, 15 bp, Homo sapiens
gactacctttggagc

SEQ ID NO: 1278433 - DNA, 15 bp, Homo sapiens
agactacctttggag

SEQ ID NO: 1278434 - DNA, 15 bp, Homo sapiens
aagactacctttgga

SEQ ID NO: 1278435 - DNA, 15 bp, Homo sapiens
taagactacctttgg

SEQ ID NO: 1278436 - DNA, 15 bp, Homo sapiens
ataagactacctttg

SEQ ID NO: 1278437 - DNA, 15 bp, Homo sapiens
tataagactaccttt

SEQ ID NO: 1278438 - DNA, 15 bp, Homo sapiens
gtataagactacctt

SEQ ID NO: 1278439 - DNA, 15 bp, Homo sapiens
ggtataagactacct

SEQ ID NO: 1278440 - DNA, 15 bp, Homo sapiens
tggtataagactacc

SEQ ID NO: 1278441 - DNA, 15 bp, Homo sapiens
atggtataagactac

SEQ ID NO: 1278442 - DNA, 15 bp, Homo sapiens
aatggtataagacta

SEQ ID NO: 1278443 - DNA, 15 bp, Homo sapiens
gaatggtataagact

SEQ ID NO: 1278444 - DNA, 15 bp, Homo sapiens
agaatggtataagac

SEQ ID NO: 1278445 - DNA, 15 bp, Homo sapiens
aagaatggtataaga

SEQ ID NO: 1278446 - DNA, 15 bp, Homo sapiens
taagaatggtataag

SEQ ID NO: 1278447 - DNA, 15 bp, Homo sapiens
ttaagaatggtataa

SEQ ID NO: 1278448 - DNA, 15 bp, Homo sapiens
tttaagaatggtata

SEQ ID NO: 1278449 - DNA, 15 bp, Homo sapiens
ttttaagaatggtat

SEQ ID NO: 1278450 - DNA, 15 bp, Homo sapiens
tttttaagaatggta

SEQ ID NO: 1278451 - DNA, 15 bp, Homo sapiens
ttttttaagaatggt

SEQ ID NO: 1278452 - DNA, 15 bp, Homo sapiens
tttttttaagaatgg

SEQ ID NO: 1278453 - DNA, 15 bp, Homo sapiens
ctttttttaagaatg

SEQ ID NO: 1278454 - DNA, 15 bp, Homo sapiens
cctttttttaagaat

SEQ ID NO: 1278455 - DNA, 15 bp, Homo sapiens
tcctttttttaagaa

SEQ ID NO: 1278456 - DNA, 15 bp, Homo sapiens
ttcctttttttaaga

SEQ ID NO: 1278457 - DNA, 15 bp, Homo sapiens
tttcctttttttaag

SEQ ID NO: 1278458 - DNA, 15 bp, Homo sapiens
gtttcctttttttaa

SEQ ID NO: 1278459 - DNA, 15 bp, Homo sapiens
agtttccttttttta

SEQ ID NO: 1278460 - DNA, 15 bp, Homo sapiens
cagtttccttttttt

SEQ ID NO: 1278461 - DNA, 15 bp, Homo sapiens
acagtttcctttttt

SEQ ID NO: 1278462 - DNA, 15 bp, Homo sapiens
aacagtttccttttt

SEQ ID NO: 1278463 - DNA, 15 bp, Homo sapiens
gaacagtttcctttt

SEQ ID NO: 1278464 - DNA, 15 bp, Homo sapiens
agaacagtttccttt

SEQ ID NO: 1278465 - DNA, 15 bp, Homo sapiens
aagaacagtttcctt

SEQ ID NO: 1278466 - DNA, 15 bp, Homo sapiens
aaagaacagtttcct

SEQ ID NO: 1278467 - DNA, 15 bp, Homo sapiens
aaaagaacagtttcc

SEQ ID NO: 1278468 - DNA, 15 bp, Homo sapiens
aaaaagaacagtttc

SEQ ID NO: 1278469 - DNA, 15 bp, Homo sapiens
taaaaagaacagttt

SEQ ID NO: 1278470 - DNA, 15 bp, Homo sapiens
ttaaaaagaacagtt

SEQ ID NO: 1278471 - DNA, 15 bp, Homo sapiens
gttaaaaagaacagt

SEQ ID NO: 1278472 - DNA, 15 bp, Homo sapiens
agttaaaaagaacag

SEQ ID NO: 1278473 - DNA, 15 bp, Homo sapiens
aagttaaaaagaaca

SEQ ID NO: 1278474 - DNA, 15 bp, Homo sapiens
aaagttaaaaagaac

SEQ ID NO: 1278475 - DNA, 15 bp, Homo sapiens
taaagttaaaaagaa

SEQ ID NO: 1278476 - DNA, 15 bp, Homo sapiens
ataaagttaaaaaga

SEQ ID NO: 1278477 - DNA, 15 bp, Homo sapiens
tataaagttaaaaag

SEQ ID NO: 1278478 - DNA, 15 bp, Homo sapiens
gtataaagttaaaaa

SEQ ID NO: 1278479 - DNA, 15 bp, Homo sapiens
ggtataaagttaaaa

SEQ ID NO: 1278480 - DNA, 15 bp, Homo sapiens
gggtataaagttaaa

SEQ ID NO: 1278481 - DNA, 15 bp, Homo sapiens
tgggtataaagttaa

SEQ ID NO: 1278482 - DNA, 15 bp, Homo sapiens
gtgggtataaagtta

SEQ ID NO: 1278483 - DNA, 15 bp, Homo sapiens
ggtgggtataaagtt

SEQ ID NO: 1278484 - DNA, 15 bp, Homo sapiens
gggtgggtataaagt

SEQ ID NO: 1278485 - DNA, 15 bp, Homo sapiens
tgggtgggtataaag

SEQ ID NO: 1278486 - DNA, 15 bp, Homo sapiens
gtgggtgggtataaa

SEQ ID NO: 1278487 - DNA, 15 bp, Homo sapiens
tgtgggtgggtataa

SEQ ID NO: 1278488 - DNA, 15 bp, Homo sapiens
gtgtgggtgggtata

SEQ ID NO: 1278489 - DNA, 15 bp, Homo sapiens
ggtgtgggtgggtat

SEQ ID NO: 1278490 - DNA, 15 bp, Homo sapiens
gggtgtgggtgggta

SEQ ID NO: 1278491 - DNA, 15 bp, Homo sapiens
ggggtgtgggtgggt

SEQ ID NO: 1278492 - DNA, 15 bp, Homo sapiens
tggggtgtgggtggg

SEQ ID NO: 1278493 - DNA, 15 bp, Homo sapiens
ttggggtgtgggtgg

SEQ ID NO: 1278494 - DNA, 15 bp, Homo sapiens
attggggtgtgggtg

SEQ ID NO: 1278495 - DNA, 15 bp, Homo sapiens
aattggggtgtgggt

SEQ ID NO: 1278496 - DNA, 15 bp, Homo sapiens
aaattggggtgtggg

SEQ ID NO: 1278497 - DNA, 15 bp, Homo sapiens
gaaattggggtgtgg

SEQ ID NO: 1278498 - DNA, 15 bp, Homo sapiens
tgaaattggggtgtg

SEQ ID NO: 1278499 - DNA, 15 bp, Homo sapiens
ttgaaattggggtgt

SEQ ID NO: 1278500 - DNA, 15 bp, Homo sapiens
tttgaaattggggtg

SEQ ID NO: 1278501 - DNA, 15 bp, Homo sapiens
ttttgaaattggggt

SEQ ID NO: 1278502 - DNA, 15 bp, Homo sapiens
gttttgaaattgggg

SEQ ID NO: 1278503 - DNA, 15 bp, Homo sapiens
tgttttgaaattggg

SEQ ID NO: 1278504 - DNA, 15 bp, Homo sapiens
atgttttgaaattgg

SEQ ID NO: 1278505 - DNA, 15 bp, Homo sapiens
gatgttttgaaattg

SEQ ID NO: 1278506 - DNA, 15 bp, Homo sapiens
tgatgttttgaaatt

SEQ ID NO: 1278507 - DNA, 15 bp, Homo sapiens
atgatgttttgaaat

SEQ ID NO: 1278508 - DNA, 15 bp, Homo sapiens
aatgatgttttgaaa

SEQ ID NO: 1278509 - DNA, 15 bp, Homo sapiens
aaatgatgttttgaa

SEQ ID NO: 1278510 - DNA, 15 bp, Homo sapiens
taaatgatgttttga

SEQ ID NO: 1278511 - DNA, 15 bp, Homo sapiens
ttaaatgatgttttg

SEQ ID NO: 1278512 - DNA, 15 bp, Homo sapiens
attaaatgatgtttt

SEQ ID NO: 1278513 - DNA, 15 bp, Homo sapiens
aattaaatgatgttt

SEQ ID NO: 1278514 - DNA, 15 bp, Homo sapiens
caattaaatgatgtt

SEQ ID NO: 1278515 - DNA, 15 bp, Homo sapiens
acaattaaatgatgt

SEQ ID NO: 1278516 - DNA, 15 bp, Homo sapiens
gacaattaaatgatg

SEQ ID NO: 1278517 - DNA, 15 bp, Homo sapiens
agacaattaaatgat

SEQ ID NO: 1278518 - DNA, 15 bp, Homo sapiens
aagacaattaaatga

SEQ ID NO: 1278519 - DNA, 15 bp, Homo sapiens
caagacaattaaatg

SEQ ID NO: 1278520 - DNA, 15 bp, Homo sapiens
ccaagacaattaaat

SEQ ID NO: 1278521 - DNA, 15 bp, Homo sapiens
accaagacaattaaa

SEQ ID NO: 1278522 - DNA, 15 bp, Homo sapiens
gaccaagacaattaa

SEQ ID NO: 1278523 - DNA, 15 bp, Homo sapiens
tgaccaagacaatta

SEQ ID NO: 1278524 - DNA, 15 bp, Homo sapiens
atgaccaagacaatt

SEQ ID NO: 1278525 - DNA, 15 bp, Homo sapiens
tatgaccaagacaat

SEQ ID NO: 1278526 - DNA, 15 bp, Homo sapiens
ctatgaccaagacaa

SEQ ID NO: 1278527 - DNA, 15 bp, Homo sapiens
tctatgaccaagaca

SEQ ID NO: 1278528 - DNA, 15 bp, Homo sapiens
gtctatgaccaagac

SEQ ID NO: 1278529 - DNA, 15 bp, Homo sapiens
tgtctatgaccaaga

SEQ ID NO: 1278530 - DNA, 15 bp, Homo sapiens
atgtctatgaccaag

SEQ ID NO: 1278531 - DNA, 15 bp, Homo sapiens
aatgtctatgaccaa

SEQ ID NO: 1278532 - DNA, 15 bp, Homo sapiens
aaatgtctatgacca

SEQ ID NO: 1278533 - DNA, 15 bp, Homo sapiens
gaaatgtctatgacc

SEQ ID NO: 1278534 - DNA, 15 bp, Homo sapiens
cgaaatgtctatgac

SEQ ID NO: 1278535 - DNA, 15 bp, Homo sapiens
tcgaaatgtctatga

SEQ ID NO: 1278536 - DNA, 15 bp, Homo sapiens
ttcgaaatgtctatg

SEQ ID NO: 1278537 - DNA, 15 bp, Homo sapiens
cttcgaaatgtctat

SEQ ID NO: 1278538 - DNA, 15 bp, Homo sapiens
tcttcgaaatgtcta

SEQ ID NO: 1278539 - DNA, 15 bp, Homo sapiens
atcttcgaaatgtct

SEQ ID NO: 1278540 - DNA, 15 bp, Homo sapiens
catcttcgaaatgtc

SEQ ID NO: 1278541 - DNA, 15 bp, Homo sapiens
tcatcttcgaaatgt

SEQ ID NO: 1278542 - DNA, 15 bp, Homo sapiens
ctcatcttcgaaatg

SEQ ID NO: 1278543 - DNA, 15 bp, Homo sapiens
tctcatcttcgaaat

SEQ ID NO: 1278544 - DNA, 15 bp, Homo sapiens
atctcatcttcgaaa

SEQ ID NO: 1278545 - DNA, 15 bp, Homo sapiens
aatctcatcttcgaa

SEQ ID NO: 1278546 - DNA, 15 bp, Homo sapiens
aaatctcatcttcga

SEQ ID NO: 1278547 - DNA, 15 bp, Homo sapiens
aaaatctcatcttcg

SEQ ID NO: 1278548 - DNA, 15 bp, Homo sapiens
taaaatctcatcttc

SEQ ID NO: 1278549 - DNA, 15 bp, Homo sapiens
ataaaatctcatctt

SEQ ID NO: 1278550 - DNA, 15 bp, Homo sapiens
tataaaatctcatct

SEQ ID NO: 1278551 - DNA, 15 bp, Homo sapiens
atataaaatctcatc

SEQ ID NO: 1278552 - DNA, 15 bp, Homo sapiens
aatataaaatctcat

SEQ ID NO: 1278553 - DNA, 15 bp, Homo sapiens
gaatataaaatctca

SEQ ID NO: 1278554 - DNA, 15 bp, Homo sapiens
ggaatataaaatctc

SEQ ID NO: 1278555 - DNA, 15 bp, Homo sapiens
tggaatataaaatct

SEQ ID NO: 1278556 - DNA, 15 bp, Homo sapiens
gtggaatataaaatc

SEQ ID NO: 1278557 - DNA, 15 bp, Homo sapiens
agtggaatataaaat

SEQ ID NO: 1278558 - DNA, 15 bp, Homo sapiens
gagtggaatataaaa

SEQ ID NO: 1278559 - DNA, 15 bp, Homo sapiens
ggagtggaatataaa

SEQ ID NO: 1278560 - DNA, 15 bp, Homo sapiens
gggagtggaatataa

SEQ ID NO: 1278561 - DNA, 15 bp, Homo sapiens
tgggagtggaatata

SEQ ID NO: 1278562 - DNA, 15 bp, Homo sapiens
atgggagtggaatat

SEQ ID NO: 1278563 - DNA, 15 bp, Homo sapiens
tatgggagtggaata

SEQ ID NO: 1278564 - DNA, 15 bp, Homo sapiens
ctatgggagtggaat

SEQ ID NO: 1278565 - DNA, 15 bp, Homo sapiens
gctatgggagtggaa

SEQ ID NO: 1278566 - DNA, 15 bp, Homo sapiens
agctatgggagtgga

SEQ ID NO: 1278567 - DNA, 15 bp, Homo sapiens
aagctatgggagtgg

SEQ ID NO: 1278568 - DNA, 15 bp, Homo sapiens
gaagctatgggagtg

SEQ ID NO: 1278569 - DNA, 15 bp, Homo sapiens
agaagctatgggagt

SEQ ID NO: 1278570 - DNA, 15 bp, Homo sapiens
cagaagctatgggag

SEQ ID NO: 1278571 - DNA, 15 bp, Homo sapiens
ccagaagctatggga

SEQ ID NO: 1278572 - DNA, 15 bp, Homo sapiens
accagaagctatggg

SEQ ID NO: 1278573 - DNA, 15 bp, Homo sapiens
aaccagaagctatgg

SEQ ID NO: 1278574 - DNA, 15 bp, Homo sapiens
taaccagaagctatg

SEQ ID NO: 1278575 - DNA, 15 bp, Homo sapiens
ataaccagaagctat

SEQ ID NO: 1278576 - DNA, 15 bp, Homo sapiens
gataaccagaagcta

SEQ ID NO: 1278577 - DNA, 15 bp, Homo sapiens
tgataaccagaagct

SEQ ID NO: 1278578 - DNA, 15 bp, Homo sapiens
ctgataaccagaagc

SEQ ID NO: 1278579 - DNA, 15 bp, Homo sapiens
tctgataaccagaag

SEQ ID NO: 1278580 - DNA, 15 bp, Homo sapiens
ttctgataaccagaa

SEQ ID NO: 1278581 - DNA, 15 bp, Homo sapiens
tttctgataaccaga

SEQ ID NO: 1278582 - DNA, 15 bp, Homo sapiens
ttttctgataaccag

SEQ ID NO: 1278583 - DNA, 15 bp, Homo sapiens
gttttctgataacca

SEQ ID NO: 1278584 - DNA, 15 bp, Homo sapiens
ggttttctgataacc

SEQ ID NO: 1278585 - DNA, 15 bp, Homo sapiens
gggttttctgataac

SEQ ID NO: 1278586 - DNA, 15 bp, Homo sapiens
tgggttttctgataa

SEQ ID NO: 1278587 - DNA, 15 bp, Homo sapiens
atgggttttctgata

SEQ ID NO: 1278588 - DNA, 15 bp, Homo sapiens
catgggttttctgat

SEQ ID NO: 1278589 - DNA, 15 bp, Homo sapiens
gcatgggttttctga

SEQ ID NO: 1278590 - DNA, 15 bp, Homo sapiens
agcatgggttttctg

SEQ ID NO: 1278591 - DNA, 15 bp, Homo sapiens
aagcatgggttttct

SEQ ID NO: 1278592 - DNA, 15 bp, Homo sapiens
aaagcatgggttttc

SEQ ID NO: 1278593 - DNA, 15 bp, Homo sapiens
gaaagcatgggtttt

SEQ ID NO: 1278594 - DNA, 15 bp, Homo sapiens
ggaaagcatgggttt

SEQ ID NO: 1278595 - DNA, 15 bp, Homo sapiens
aggaaagcatgggtt

SEQ ID NO: 1278596 - DNA, 15 bp, Homo sapiens
aaggaaagcatgggt

SEQ ID NO: 1278597 - DNA, 15 bp, Homo sapiens
aaaggaaagcatggg

SEQ ID NO: 1278598 - DNA, 15 bp, Homo sapiens
taaaggaaagcatgg

SEQ ID NO: 1278599 - DNA, 15 bp, Homo sapiens
ataaaggaaagcatg

SEQ ID NO: 1278600 - DNA, 15 bp, Homo sapiens
aataaaggaaagcat

SEQ ID NO: 1278601 - DNA, 15 bp, Homo sapiens
caataaaggaaagca

SEQ ID NO: 1278602 - DNA, 15 bp, Homo sapiens
tcaataaaggaaagc

SEQ ID NO: 1278603 - DNA, 15 bp, Homo sapiens
ttcaataaaggaaag

SEQ ID NO: 1278604 - DNA, 15 bp, Homo sapiens
cttcaataaaggaaa

SEQ ID NO: 1278605 - DNA, 15 bp, Homo sapiens
ccttcaataaaggaa

SEQ ID NO: 1278606 - DNA, 15 bp, Homo sapiens
tccttcaataaagga

SEQ ID NO: 1278607 - DNA, 15 bp, Homo sapiens
ctccttcaataaagg

SEQ ID NO: 1278608 - DNA, 15 bp, Homo sapiens
actccttcaataaag

SEQ ID NO: 1278609 - DNA, 15 bp, Homo sapiens
aactccttcaataaa

SEQ ID NO: 1278610 - DNA, 15 bp, Homo sapiens
aaactccttcaataa

SEQ ID NO: 1278611 - DNA, 15 bp, Homo sapiens
caaactccttcaata

SEQ ID NO: 1278612 - DNA, 15 bp, Homo sapiens
ccaaactccttcaat

SEQ ID NO: 1278613 - DNA, 15 bp, Homo sapiens
accaaactccttcaa

SEQ ID NO: 1278614 - DNA, 15 bp, Homo sapiens
gaccaaactccttca

SEQ ID NO: 1278615 - DNA, 15 bp, Homo sapiens
ggaccaaactccttc

SEQ ID NO: 1278616 - DNA, 15 bp, Homo sapiens
tggaccaaactcctt

SEQ ID NO: 1278617 - DNA, 15 bp, Homo sapiens
ctggaccaaactcct

SEQ ID NO: 1278618 - DNA, 15 bp, Homo sapiens
gctggaccaaactcc

SEQ ID NO: 1278619 - DNA, 15 bp, Homo sapiens
agctggaccaaactc

SEQ ID NO: 1278620 - DNA, 15 bp, Homo sapiens
cagctggaccaaact

SEQ ID NO: 1278621 - DNA, 15 bp, Homo sapiens
tcagctggaccaaac

SEQ ID NO: 1278622 - DNA, 15 bp, Homo sapiens
atcagctggaccaaa

SEQ ID NO: 1278623 - DNA, 15 bp, Homo sapiens
catcagctggaccaa

SEQ ID NO: 1278624 - DNA, 15 bp, Homo sapiens
acatcagctggacca

SEQ ID NO: 1278625 - DNA, 15 bp, Homo sapiens
aacatcagctggacc

SEQ ID NO: 1278626 - DNA, 15 bp, Homo sapiens
caacatcagctggac

SEQ ID NO: 1278627 - DNA, 15 bp, Homo sapiens
ccaacatcagctgga

SEQ ID NO: 1278628 - DNA, 15 bp, Homo sapiens
accaacatcagctgg

SEQ ID NO: 1278629 - DNA, 15 bp, Homo sapiens
caccaacatcagctg

SEQ ID NO: 1278630 - DNA, 15 bp, Homo sapiens
acaccaacatcagct

SEQ ID NO: 1278631 - DNA, 15 bp, Homo sapiens
tacaccaacatcagc

SEQ ID NO: 1278632 - DNA, 15 bp, Homo sapiens
atacaccaacatcag

SEQ ID NO: 1278633 - DNA, 15 bp, Homo sapiens
gatacaccaacatca

SEQ ID NO: 1278634 - DNA, 15 bp, Homo sapiens
ggatacaccaacatc

SEQ ID NO: 1278635 - DNA, 15 bp, Homo sapiens
gggatacaccaacat

SEQ ID NO: 1278636 - DNA, 15 bp, Homo sapiens
agggatacaccaaca

SEQ ID NO: 1278637 - DNA, 15 bp, Homo sapiens
aagggatacaccaac

SEQ ID NO: 1278638 - DNA, 15 bp, Homo sapiens
caagggatacaccaa

SEQ ID NO: 1278639 - DNA, 15 bp, Homo sapiens
gcaagggatacacca

SEQ ID NO: 1278640 - DNA, 15 bp, Homo sapiens
tgcaagggatacacc

SEQ ID NO: 1278641 - DNA, 15 bp, Homo sapiens
ttgcaagggatacac

SEQ ID NO: 1278642 - DNA, 15 bp, Homo sapiens
attgcaagggataca

SEQ ID NO: 1278643 - DNA, 15 bp, Homo sapiens
tattgcaagggatac

SEQ ID NO: 1278644 - DNA, 15 bp, Homo sapiens
atattgcaagggata

SEQ ID NO: 1278645 - DNA, 15 bp, Homo sapiens
aatattgcaagggat

SEQ ID NO: 1278646 - DNA, 15 bp, Homo sapiens
gaatattgcaaggga

SEQ ID NO: 1278647 - DNA, 15 bp, Homo sapiens
agaatattgcaaggg

SEQ ID NO: 1278648 - DNA, 15 bp, Homo sapiens
aagaatattgcaagg

SEQ ID NO: 1278649 - DNA, 15 bp, Homo sapiens
gaagaatattgcaag

SEQ ID NO: 1278650 - DNA, 15 bp, Homo sapiens
tgaagaatattgcaa

SEQ ID NO: 1278651 - DNA, 15 bp, Homo sapiens
atgaagaatattgca

SEQ ID NO: 1278652 - DNA, 15 bp, Homo sapiens
gatgaagaatattgc

SEQ ID NO: 1278653 - DNA, 15 bp, Homo sapiens
ggatgaagaatattg

SEQ ID NO: 1278654 - DNA, 15 bp, Homo sapiens
aggatgaagaatatt

SEQ ID NO: 1278655 - DNA, 15 bp, Homo sapiens
gaggatgaagaatat

SEQ ID NO: 1278656 - DNA, 15 bp, Homo sapiens
tgaggatgaagaata

SEQ ID NO: 1278657 - DNA, 15 bp, Homo sapiens
atgaggatgaagaat

SEQ ID NO: 1278658 - DNA, 15 bp, Homo sapiens
gatgaggatgaagaa

SEQ ID NO: 1278659 - DNA, 15 bp, Homo sapiens
agatgaggatgaaga

SEQ ID NO: 1278660 - DNA, 15 bp, Homo sapiens
aagatgaggatgaag

SEQ ID NO: 1278661 - DNA, 15 bp, Homo sapiens
aaagatgaggatgaa

SEQ ID NO: 1278662 - DNA, 15 bp, Homo sapiens
caaagatgaggatga

SEQ ID NO: 1278663 - DNA, 15 bp, Homo sapiens
gcaaagatgaggatg

SEQ ID NO: 1278664 - DNA, 15 bp, Homo sapiens
agcaaagatgaggat

SEQ ID NO: 1278665 - DNA, 15 bp, Homo sapiens
aagcaaagatgagga

SEQ ID NO: 1278666 - DNA, 15 bp, Homo sapiens
gaagcaaagatgagg

SEQ ID NO: 1278667 - DNA, 15 bp, Homo sapiens
agaagcaaagatgag

SEQ ID NO: 1278668 - DNA, 15 bp, Homo sapiens
cagaagcaaagatga

SEQ ID NO: 1278669 - DNA, 15 bp, Homo sapiens
ccagaagcaaagatg

SEQ ID NO: 1278670 - DNA, 15 bp, Homo sapiens
tccagaagcaaagat

SEQ ID NO: 1278671 - DNA, 15 bp, Homo sapiens
ctccagaagcaaaga

SEQ ID NO: 1278672 - DNA, 15 bp, Homo sapiens
cctccagaagcaaag

SEQ ID NO: 1278673 - DNA, 15 bp, Homo sapiens
gcctccagaagcaaa

SEQ ID NO: 1278674 - DNA, 15 bp, Homo sapiens
ggcctccagaagcaa

SEQ ID NO: 1278675 - DNA, 15 bp, Homo sapiens
aggcctccagaagca

SEQ ID NO: 1278676 - DNA, 15 bp, Homo sapiens
aaggcctccagaagc

SEQ ID NO: 1278677 - DNA, 15 bp, Homo sapiens
aaaggcctccagaag

SEQ ID NO: 1278678 - DNA, 15 bp, Homo sapiens
gaaaggcctccagaa

SEQ ID NO: 1278679 - DNA, 15 bp, Homo sapiens
ggaaaggcctccaga

SEQ ID NO: 1278680 - DNA, 15 bp, Homo sapiens
aggaaaggcctccag

SEQ ID NO: 1278681 - DNA, 15 bp, Homo sapiens
gaggaaaggcctcca

SEQ ID NO: 1278682 - DNA, 15 bp, Homo sapiens
agaggaaaggcctcc

SEQ ID NO: 1278683 - DNA, 15 bp, Homo sapiens
cagaggaaaggcctc

SEQ ID NO: 1278684 - DNA, 15 bp, Homo sapiens
tcagaggaaaggcct

SEQ ID NO: 1278685 - DNA, 15 bp, Homo sapiens
atcagaggaaaggcc

SEQ ID NO: 1278686 - DNA, 15 bp, Homo sapiens
aatcagaggaaaggc

SEQ ID NO: 1278687 - DNA, 15 bp, Homo sapiens
gaatcagaggaaagg

SEQ ID NO: 1278688 - DNA, 15 bp, Homo sapiens
tgaatcagaggaaag

SEQ ID NO: 1278689 - DNA, 15 bp, Homo sapiens
gtgaatcagaggaaa

SEQ ID NO: 1278690 - DNA, 15 bp, Homo sapiens
agtgaatcagaggaa

SEQ ID NO: 1278691 - DNA, 15 bp, Homo sapiens
tagtgaatcagagga

SEQ ID NO: 1278692 - DNA, 15 bp, Homo sapiens
atagtgaatcagagg

SEQ ID NO: 1278693 - DNA, 15 bp, Homo sapiens
gatagtgaatcagag

SEQ ID NO: 1278694 - DNA, 15 bp, Homo sapiens
agatagtgaatcaga

SEQ ID NO: 1278695 - DNA, 15 bp, Homo sapiens
aagatagtgaatcag

SEQ ID NO: 1278696 - DNA, 15 bp, Homo sapiens
gaagatagtgaatca

SEQ ID NO: 1278697 - DNA, 15 bp, Homo sapiens
tgaagatagtgaatc

SEQ ID NO: 1278698 - DNA, 15 bp, Homo sapiens
atgaagatagtgaat

SEQ ID NO: 1278699 - DNA, 15 bp, Homo sapiens
gatgaagatagtgaa

SEQ ID NO: 1278700 - DNA, 15 bp, Homo sapiens
agatgaagatagtga

SEQ ID NO: 1278701 - DNA, 15 bp, Homo sapiens
aagatgaagatagtg

SEQ ID NO: 1278702 - DNA, 15 bp, Homo sapiens
gaagatgaagatagt

SEQ ID NO: 1278703 - DNA, 15 bp, Homo sapiens
tgaagatgaagatag

SEQ ID NO: 1278704 - DNA, 15 bp, Homo sapiens
atgaagatgaagata

SEQ ID NO: 1278705 - DNA, 15 bp, Homo sapiens
aatgaagatgaagat

SEQ ID NO: 1278706 - DNA, 15 bp, Homo sapiens
taatgaagatgaaga

SEQ ID NO: 1278707 - DNA, 15 bp, Homo sapiens
ttaatgaagatgaag

SEQ ID NO: 1278708 - DNA, 15 bp, Homo sapiens
tttaatgaagatgaa

SEQ ID NO: 1278709 - DNA, 15 bp, Homo sapiens
ttttaatgaagatga

SEQ ID NO: 1278710 - DNA, 15 bp, Homo sapiens
cttttaatgaagatg

SEQ ID NO: 1278711 - DNA, 15 bp, Homo sapiens
gcttttaatgaagat

SEQ ID NO: 1278712 - DNA, 15 bp, Homo sapiens
agcttttaatgaaga

SEQ ID NO: 1278713 - DNA, 15 bp, Homo sapiens
cagcttttaatgaag

SEQ ID NO: 1278714 - DNA, 15 bp, Homo sapiens
gcagcttttaatgaa

SEQ ID NO: 1278715 - DNA, 15 bp, Homo sapiens
agcagcttttaatga

SEQ ID NO: 1278716 - DNA, 15 bp, Homo sapiens
cagcagcttttaatg

SEQ ID NO: 1278717 - DNA, 15 bp, Homo sapiens
gcagcagcttttaat

SEQ ID NO: 1278718 - DNA, 15 bp, Homo sapiens
agcagcagcttttaa

SEQ ID NO: 1278719 - DNA, 15 bp, Homo sapiens
tagcagcagctttta

SEQ ID NO: 1278720 - DNA, 15 bp, Homo sapiens
gtagcagcagctttt

SEQ ID NO: 1278721 - DNA, 15 bp, Homo sapiens
agtagcagcagcttt

SEQ ID NO: 1278722 - DNA, 15 bp, Homo sapiens
cagtagcagcagctt

SEQ ID NO: 1278723 - DNA, 15 bp, Homo sapiens
tcagtagcagcagct

SEQ ID NO: 1278724 - DNA, 15 bp, Homo sapiens
ttcagtagcagcagc

SEQ ID NO: 1278725 - DNA, 15 bp, Homo sapiens
tttcagtagcagcag

SEQ ID NO: 1278726 - DNA, 15 bp, Homo sapiens
ctttcagtagcagca

SEQ ID NO: 1278727 - DNA, 15 bp, Homo sapiens
tctttcagtagcagc

SEQ ID NO: 1278728 - DNA, 15 bp, Homo sapiens
ctctttcagtagcag

SEQ ID NO: 1278729 - DNA, 15 bp, Homo sapiens
actctttcagtagca

SEQ ID NO: 1278730 - DNA, 15 bp, Homo sapiens
aactctttcagtagc

SEQ ID NO: 1278731 - DNA, 15 bp, Homo sapiens
aaactctttcagtag

SEQ ID NO: 1278732 - DNA, 15 bp, Homo sapiens
aaaactctttcagta

SEQ ID NO: 1278733 - DNA, 15 bp, Homo sapiens
aaaaactctttcagt

SEQ ID NO: 1278734 - DNA, 15 bp, Homo sapiens
caaaaactctttcag

SEQ ID NO: 1278735 - DNA, 15 bp, Homo sapiens
ccaaaaactctttca

SEQ ID NO: 1278736 - DNA, 15 bp, Homo sapiens
tccaaaaactctttc

SEQ ID NO: 1278737 - DNA, 15 bp, Homo sapiens
ctccaaaaactcttt

SEQ ID NO: 1278738 - DNA, 15 bp, Homo sapiens
gctccaaaaactctt

SEQ ID NO: 1278739 - DNA, 15 bp, Homo sapiens
tgctccaaaaactct

SEQ ID NO: 1278740 - DNA, 15 bp, Homo sapiens
ttgctccaaaaactc

SEQ ID NO: 1278741 - DNA, 15 bp, Homo sapiens
cttgctccaaaaact

SEQ ID NO: 1278742 - DNA, 15 bp, Homo sapiens
tcttgctccaaaaac

SEQ ID NO: 1278743 - DNA, 15 bp, Homo sapiens
ctcttgctccaaaaa

SEQ ID NO: 1278744 - DNA, 15 bp, Homo sapiens
actcttgctccaaaa

SEQ ID NO: 1278745 - DNA, 15 bp, Homo sapiens
aactcttgctccaaa

SEQ ID NO: 1278746 - DNA, 15 bp, Homo sapiens
caactcttgctccaa

SEQ ID NO: 1278747 - DNA, 15 bp, Homo sapiens
ccaactcttgctcca

SEQ ID NO: 1278748 - DNA, 15 bp, Homo sapiens
tccaactcttgctcc

SEQ ID NO: 1278749 - DNA, 15 bp, Homo sapiens
ttccaactcttgctc

SEQ ID NO: 1278750 - DNA, 15 bp, Homo sapiens
gttccaactcttgct

SEQ ID NO: 1278751 - DNA, 15 bp, Homo sapiens
tgttccaactcttgc

SEQ ID NO: 1278752 - DNA, 15 bp, Homo sapiens
ctgttccaactcttg

SEQ ID NO: 1278753 - DNA, 15 bp, Homo sapiens
actgttccaactctt

SEQ ID NO: 1278754 - DNA, 15 bp, Homo sapiens
aactgttccaactct

SEQ ID NO: 1278755 - DNA, 15 bp, Homo sapiens
aaactgttccaactc

SEQ ID NO: 1278756 - DNA, 15 bp, Homo sapiens
gaaactgttccaact

SEQ ID NO: 1278757 - DNA, 15 bp, Homo sapiens
agaaactgttccaac

SEQ ID NO: 1278758 - DNA, 15 bp, Homo sapiens
aaagaaactgttcca

SEQ ID NO: 1278759 - DNA, 15 bp, Homo sapiens
taaagaaactgttcc

SEQ ID NO: 1278760 - DNA, 15 bp, Homo sapiens
ctaaagaaactgttc

SEQ ID NO: 1278761 - DNA, 15 bp, Homo sapiens
cctaaagaaactgtt

SEQ ID NO: 1278762 - DNA, 15 bp, Homo sapiens
gcctaaagaaactgt

SEQ ID NO: 1278763 - DNA, 15 bp, Homo sapiens
agcctaaagaaactg

SEQ ID NO: 1278764 - DNA, 15 bp, Homo sapiens
aagcctaaagaaact

SEQ ID NO: 1278765 - DNA, 15 bp, Homo sapiens
taagcctaaagaaac

SEQ ID NO: 1278766 - DNA, 15 bp, Homo sapiens
gtaagcctaaagaaa

SEQ ID NO: 1278767 - DNA, 15 bp, Homo sapiens
agtaagcctaaagaa

SEQ ID NO: 1278768 - DNA, 15 bp, Homo sapiens
aagtaagcctaaaga

SEQ ID NO: 1278769 - DNA, 15 bp, Homo sapiens
caagtaagcctaaag

SEQ ID NO: 1278770 - DNA, 15 bp, Homo sapiens
tcaagtaagcctaaa

SEQ ID NO: 1278771 - DNA, 15 bp, Homo sapiens
atcaagtaagcctaa

SEQ ID NO: 1278772 - DNA, 15 bp, Homo sapiens
gatcaagtaagccta

SEQ ID NO: 1278773 - DNA, 15 bp, Homo sapiens
ggatcaagtaagcct

SEQ ID NO: 1278774 - DNA, 15 bp, Homo sapiens
tggatcaagtaagcc

SEQ ID NO: 1278775 - DNA, 15 bp, Homo sapiens
ttggatcaagtaagc

SEQ ID NO: 1278776 - DNA, 15 bp, Homo sapiens
cttggatcaagtaag

SEQ ID NO: 1278777 - DNA, 15 bp, Homo sapiens
acttggatcaagtaa

SEQ ID NO: 1278778 - DNA, 15 bp, Homo sapiens
aacttggatcaagta

SEQ ID NO: 1278779 - DNA, 15 bp, Homo sapiens
aaacttggatcaagt

SEQ ID NO: 1278780 - DNA, 15 bp, Homo sapiens
caaacttggatcaag

SEQ ID NO: 1278781 - DNA, 15 bp, Homo sapiens
tcaaacttggatcaa

SEQ ID NO: 1278782 - DNA, 15 bp, Homo sapiens
atcaaacttggatca

SEQ ID NO: 1278783 - DNA, 15 bp, Homo sapiens
ccatcaaacttggat

SEQ ID NO: 1278784 - DNA, 15 bp, Homo sapiens
tccatcaaacttgga

SEQ ID NO: 1278785 - DNA, 15 bp, Homo sapiens
atccatcaaacttgg

SEQ ID NO: 1278786 - DNA, 15 bp, Homo sapiens
tatccatcaaacttg

SEQ ID NO: 1278787 - DNA, 15 bp, Homo sapiens
atatccatcaaactt

SEQ ID NO: 1278788 - DNA, 15 bp, Homo sapiens
catatccatcaaact

SEQ ID NO: 1278789 - DNA, 15 bp, Homo sapiens
ccatatccatcaaac

SEQ ID NO: 1278790 - DNA, 15 bp, Homo sapiens
cccatatccatcaaa

SEQ ID NO: 1278791 - DNA, 15 bp, Homo sapiens
acccatatccatcaa

SEQ ID NO: 1278792 - DNA, 15 bp, Homo sapiens
cacccatatccatca

SEQ ID NO: 1278793 - DNA, 15 bp, Homo sapiens
tcacccatatccatc

SEQ ID NO: 1278794 - DNA, 15 bp, Homo sapiens
atcacccatatccat

SEQ ID NO: 1278795 - DNA, 15 bp, Homo sapiens
catcacccatatcca

SEQ ID NO: 1278796 - DNA, 15 bp, Homo sapiens
gcatcacccatatcc

SEQ ID NO: 1278797 - DNA, 15 bp, Homo sapiens
agcatcacccatatc

SEQ ID NO: 1278798 - DNA, 15 bp, Homo sapiens
aagcatcacccatat

SEQ ID NO: 1278799 - DNA, 15 bp, Homo sapiens
aaagcatcacccata

SEQ ID NO: 1278800 - DNA, 15 bp, Homo sapiens
gaaagcatcacccat

SEQ ID NO: 1278801 - DNA, 15 bp, Homo sapiens
agaaagcatcaccca

SEQ ID NO: 1278802 - DNA, 15 bp, Homo sapiens
aagaaagcatcaccc

SEQ ID NO: 1278803 - DNA, 15 bp, Homo sapiens
aaagaaagcatcacc

SEQ ID NO: 1278804 - DNA, 15 bp, Homo sapiens
caaagaaagcatcac

SEQ ID NO: 1278805 - DNA, 15 bp, Homo sapiens
acaaagaaagcatca

SEQ ID NO: 1278806 - DNA, 15 bp, Homo sapiens
gacaaagaaagcatc

SEQ ID NO: 1278807 - DNA, 15 bp, Homo sapiens
cgacaaagaaagcat

SEQ ID NO: 1278808 - DNA, 15 bp, Homo sapiens
acgacaaagaaagca

SEQ ID NO: 1278809 - DNA, 15 bp, Homo sapiens
gacgacaaagaaagc

SEQ ID NO: 1278810 - DNA, 15 bp, Homo sapiens
agacgacaaagaaag

SEQ ID NO: 1278811 - DNA, 15 bp, Homo sapiens
cagacgacaaagaaa

SEQ ID NO: 1278812 - DNA, 15 bp, Homo sapiens
tcagacgacaaagaa

SEQ ID NO: 1278813 - DNA, 15 bp, Homo sapiens
gtcagacgacaaaga

SEQ ID NO: 1278814 - DNA, 15 bp, Homo sapiens
agtcagacgacaaag

SEQ ID NO: 1278815 - DNA, 15 bp, Homo sapiens
tagtcagacgacaaa

SEQ ID NO: 1278816 - DNA, 15 bp, Homo sapiens
gtagtcagacgacaa

SEQ ID NO: 1278817 - DNA, 15 bp, Homo sapiens
ggtagtcagacgaca

SEQ ID NO: 1278818 - DNA, 15 bp, Homo sapiens
aggtagtcagacgac

SEQ ID NO: 1278819 - DNA, 15 bp, Homo sapiens
taggtagtcagacga

SEQ ID NO: 1278820 - DNA, 15 bp, Homo sapiens
ataggtagtcagacg

SEQ ID NO: 1278821 - DNA, 15 bp, Homo sapiens
cataggtagtcagac

SEQ ID NO: 1278822 - DNA, 15 bp, Homo sapiens
ccataggtagtcaga

SEQ ID NO: 1278823 - DNA, 15 bp, Homo sapiens
gccataggtagtcag

SEQ ID NO: 1278824 - DNA, 15 bp, Homo sapiens
tgccataggtagtca

SEQ ID NO: 1278825 - DNA, 15 bp, Homo sapiens
ttgccataggtagtc

SEQ ID NO: 1278826 - DNA, 15 bp, Homo sapiens
tttgccataggtagt

SEQ ID NO: 1278827 - DNA, 15 bp, Homo sapiens
atttgccataggtag

SEQ ID NO: 1278828 - DNA, 15 bp, Homo sapiens
gatttgccataggta

SEQ ID NO: 1278829 - DNA, 15 bp, Homo sapiens
ggatttgccataggt

SEQ ID NO: 1278830 - DNA, 15 bp, Homo sapiens
tggatttgccatagg

SEQ ID NO: 1278831 - DNA, 15 bp, Homo sapiens
ttggatttgccatag

SEQ ID NO: 1278832 - DNA, 15 bp, Homo sapiens
tttggatttgccata

SEQ ID NO: 1278833 - DNA, 15 bp, Homo sapiens
ctttggatttgccat

SEQ ID NO: 1278834 - DNA, 15 bp, Homo sapiens
actttggatttgcca

SEQ ID NO: 1278835 - DNA, 15 bp, Homo sapiens
aactttggatttgcc

SEQ ID NO: 1278836 - DNA, 15 bp, Homo sapiens
caactttggatttgc

SEQ ID NO: 1278837 - DNA, 15 bp, Homo sapiens
ccaactttggatttg

SEQ ID NO: 1278838 - DNA, 15 bp, Homo sapiens
tccaactttggattt

SEQ ID NO: 1278839 - DNA, 15 bp, Homo sapiens
ctccaactttggatt

SEQ ID NO: 1278840 - DNA, 15 bp, Homo sapiens
tctccaactttggat

SEQ ID NO: 1278841 - DNA, 15 bp, Homo sapiens
atctccaactttgga

SEQ ID NO: 1278842 - DNA, 15 bp, Homo sapiens
gatctccaactttgg

SEQ ID NO: 1278843 - DNA, 15 bp, Homo sapiens
agatctccaactttg

SEQ ID NO: 1278844 - DNA, 15 bp, Homo sapiens
aagatctccaacttt

SEQ ID NO: 1278845 - DNA, 15 bp, Homo sapiens
aaagatctccaactt

SEQ ID NO: 1278846 - DNA, 15 bp, Homo sapiens
caaagatctccaact

SEQ ID NO: 1278847 - DNA, 15 bp, Homo sapiens
gcaaagatctccaac

SEQ ID NO: 1278848 - DNA, 15 bp, Homo sapiens
tgcaaagatctccaa

SEQ ID NO: 1278849 - DNA, 15 bp, Homo sapiens
ctgcaaagatctcca

SEQ ID NO: 1278850 - DNA, 15 bp, Homo sapiens
cctgcaaagatctcc

SEQ ID NO: 1278851 - DNA, 15 bp, Homo sapiens
gcctgcaaagatctc

SEQ ID NO: 1278852 - DNA, 15 bp, Homo sapiens
agcctgcaaagatct

SEQ ID NO: 1278853 - DNA, 15 bp, Homo sapiens
aagcctgcaaagatc

SEQ ID NO: 1278854 - DNA, 15 bp, Homo sapiens
aaagcctgcaaagat

SEQ ID NO: 1278855 - DNA, 15 bp, Homo sapiens
caaagcctgcaaaga

SEQ ID NO: 1278856 - DNA, 15 bp, Homo sapiens
acaaagcctgcaaag

SEQ ID NO: 1278857 - DNA, 15 bp, Homo sapiens
aacaaagcctgcaaa

SEQ ID NO: 1278858 - DNA, 15 bp, Homo sapiens
caacaaagcctgcaa

SEQ ID NO: 1278859 - DNA, 15 bp, Homo sapiens
ccaacaaagcctgca

SEQ ID NO: 1278860 - DNA, 15 bp, Homo sapiens
tccaacaaagcctgc

SEQ ID NO: 1278861 - DNA, 15 bp, Homo sapiens
ctccaacaaagcctg

SEQ ID NO: 1278862 - DNA, 15 bp, Homo sapiens
cctccaacaaagcct

SEQ ID NO: 1278863 - DNA, 15 bp, Homo sapiens
acctccaacaaagcc

SEQ ID NO: 1278864 - DNA, 15 bp, Homo sapiens
gacctccaacaaagc

SEQ ID NO: 1278865 - DNA, 15 bp, Homo sapiens
agacctccaacaaag

SEQ ID NO: 1278866 - DNA, 15 bp, Homo sapiens
cagacctccaacaaa

SEQ ID NO: 1278867 - DNA, 15 bp, Homo sapiens
gcagacctccaacaa

SEQ ID NO: 1278868 - DNA, 15 bp, Homo sapiens
tgcagacctccaaca

SEQ ID NO: 1278869 - DNA, 15 bp, Homo sapiens
ctgcagacctccaac

SEQ ID NO: 1278870 - DNA, 15 bp, Homo sapiens
gctgcagacctccaa

SEQ ID NO: 1278871 - DNA, 15 bp, Homo sapiens
agctgcagacctcca

SEQ ID NO: 1278872 - DNA, 15 bp, Homo sapiens
aagctgcagacctcc

SEQ ID NO: 1278873 - DNA, 15 bp, Homo sapiens
gaagctgcagacctc

SEQ ID NO: 1278874 - DNA, 15 bp, Homo sapiens
agaagctgcagacct

SEQ ID NO: 1278875 - DNA, 15 bp, Homo sapiens
aagaagctgcagacc

SEQ ID NO: 1278876 - DNA, 15 bp, Homo sapiens
gaagaagctgcagac

SEQ ID NO: 1278877 - DNA, 15 bp, Homo sapiens
agaagaagctgcaga

SEQ ID NO: 1278878 - DNA, 15 bp, Homo sapiens
aagaagaagctgcag

SEQ ID NO: 1278879 - DNA, 15 bp, Homo sapiens
gaagaagaagctgca

SEQ ID NO: 1278880 - DNA, 15 bp, Homo sapiens
tgaagaagaagctgc

SEQ ID NO: 1278881 - DNA, 15 bp, Homo sapiens
ctgaagaagaagctg

SEQ ID NO: 1278882 - DNA, 15 bp, Homo sapiens
gctgaagaagaagct

SEQ ID NO: 1278883 - DNA, 15 bp, Homo sapiens
agctgaagaagaagc

SEQ ID NO: 1278884 - DNA, 15 bp, Homo sapiens
cagctgaagaagaag

SEQ ID NO: 1278885 - DNA, 15 bp, Homo sapiens
tcagctgaagaagaa

SEQ ID NO: 1278886 - DNA, 15 bp, Homo sapiens
atcagctgaagaaga

SEQ ID NO: 1278887 - DNA, 15 bp, Homo sapiens
gatcagctgaagaag

SEQ ID NO: 1278888 - DNA, 15 bp, Homo sapiens
cgatcagctgaagaa

SEQ ID NO: 1278889 - DNA, 15 bp, Homo sapiens
gcgatcagctgaaga

SEQ ID NO: 1278890 - DNA, 15 bp, Homo sapiens
agcgatcagctgaag

SEQ ID NO: 1278891 - DNA, 15 bp, Homo sapiens
aagcgatcagctgaa

SEQ ID NO: 1278892 - DNA, 15 bp, Homo sapiens
gaagcgatcagctga

SEQ ID NO: 1278893 - DNA, 15 bp, Homo sapiens
agaagcgatcagctg

SEQ ID NO: 1278894 - DNA, 15 bp, Homo sapiens
gagaagcgatcagct

SEQ ID NO: 1278895 - DNA, 15 bp, Homo sapiens
tgagaagcgatcagc

SEQ ID NO: 1278896 - DNA, 15 bp, Homo sapiens
ctgagaagcgatcag

SEQ ID NO: 1278897 - DNA, 15 bp, Homo sapiens
gctgagaagcgatca

SEQ ID NO: 1278898 - DNA, 15 bp, Homo sapiens
cgctgagaagcgatc

SEQ ID NO: 1278899 - DNA, 15 bp, Homo sapiens
gcgctgagaagcgat

SEQ ID NO: 1278900 - DNA, 15 bp, Homo sapiens
agcgctgagaagcga

SEQ ID NO: 1278901 - DNA, 15 bp, Homo sapiens
cagcgctgagaagcg

SEQ ID NO: 1278902 - DNA, 15 bp, Homo sapiens
gcagcgctgagaagc

SEQ ID NO: 1278903 - DNA, 15 bp, Homo sapiens
cgcagcgctgagaag

SEQ ID NO: 1278904 - DNA, 15 bp, Homo sapiens
ccgcagcgctgagaa

SEQ ID NO: 1278905 - DNA, 15 bp, Homo sapiens
gccgcagcgctgaga

SEQ ID NO: 1278906 - DNA, 15 bp, Homo sapiens
agccgcagcgctgag

SEQ ID NO: 1278907 - DNA, 15 bp, Homo sapiens
cagccgcagcgctga

SEQ ID NO: 1278908 - DNA, 15 bp, Homo sapiens
ccagccgcagcgctg

SEQ ID NO: 1278909 - DNA, 15 bp, Homo sapiens
tccagccgcagcgct

SEQ ID NO: 1278910 - DNA, 15 bp, Homo sapiens
ttccagccgcagcgc

SEQ ID NO: 1278911 - DNA, 15 bp, Homo sapiens
gttccagccgcagcg

SEQ ID NO: 1278912 - DNA, 15 bp, Homo sapiens
agttccagccgcagc

SEQ ID NO: 1278913 - DNA, 15 bp, Homo sapiens
ggtagtatgtggcaa

SEQ ID NO: 1278914 - DNA, 15 bp, Homo sapiens
aggtagtatgtggca

SEQ ID NO: 1278915 - DNA, 15 bp, Homo sapiens
caggtagtatgtggc

SEQ ID NO: 1278916 - DNA, 15 bp, Homo sapiens
gcaggtagtatgtgg

SEQ ID NO: 1278917 - DNA, 15 bp, Homo sapiens
agcaggtagtatgtg

SEQ ID NO: 1278918 - DNA, 15 bp, Homo sapiens
tagcaggtagtatgt

SEQ ID NO: 1278919 - DNA, 15 bp, Homo sapiens
ttagcaggtagtatg

SEQ ID NO: 1278920 - DNA, 15 bp, Homo sapiens
cttagcaggtagtat

SEQ ID NO: 1278921 - DNA, 15 bp, Homo sapiens
tcttagcaggtagta

SEQ ID NO: 1278922 - DNA, 15 bp, Homo sapiens
gtcttagcaggtagt

SEQ ID NO: 1278923 - DNA, 15 bp, Homo sapiens
agtcttagcaggtag

SEQ ID NO: 1278924 - DNA, 15 bp, Homo sapiens
cagtcttagcaggta

SEQ ID NO: 1278925 - DNA, 15 bp, Homo sapiens
tcagtcttagcaggt

SEQ ID NO: 1278926 - DNA, 15 bp, Homo sapiens
ttcagtcttagcagg

SEQ ID NO: 1278927 - DNA, 15 bp, Homo sapiens
attcagtcttagcag

SEQ ID NO: 1278928 - DNA, 15 bp, Homo sapiens
tattcagtcttagca

SEQ ID NO: 1278929 - DNA, 15 bp, Homo sapiens
ctattcagtcttagc

SEQ ID NO: 1278930 - DNA, 15 bp, Homo sapiens
gctattcagtcttag

SEQ ID NO: 1278931 - DNA, 15 bp, Homo sapiens
tgctattcagtctta

SEQ ID NO: 1278932 - DNA, 15 bp, Homo sapiens
ctgctattcagtctt

SEQ ID NO: 1278933 - DNA, 15 bp, Homo sapiens
tctgctattcagtct

SEQ ID NO: 1278934 - DNA, 15 bp, Homo sapiens
ttctgctattcagtc

SEQ ID NO: 1278935 - DNA, 15 bp, Homo sapiens
cttctgctattcagt

SEQ ID NO: 1278936 - DNA, 15 bp, Homo sapiens
tcttctgctattcag

SEQ ID NO: 1278937 - DNA, 15 bp, Homo sapiens
ttcttctgctattca

SEQ ID NO: 1278938 - DNA, 15 bp, Homo sapiens
tttcttctgctattc

SEQ ID NO: 1278939 - DNA, 15 bp, Homo sapiens
atttcttctgctatt

SEQ ID NO: 1278940 - DNA, 15 bp, Homo sapiens
tatttcttctgctat

SEQ ID NO: 1278941 - DNA, 15 bp, Homo sapiens
ctatttcttctgcta

SEQ ID NO: 1278942 - DNA, 15 bp, Homo sapiens
tctatttcttctgct

SEQ ID NO: 1278943 - DNA, 15 bp, Homo sapiens
ttctatttcttctgc

SEQ ID NO: 1278944 - DNA, 15 bp, Homo sapiens
tttctatttcttctg

SEQ ID NO: 1278945 - DNA, 15 bp, Homo sapiens
ttttctatttcttct

SEQ ID NO: 1278946 - DNA, 15 bp, Homo sapiens
attttctatttcttc

SEQ ID NO: 1278947 - DNA, 15 bp, Homo sapiens
gattttctatttctt

SEQ ID NO: 1278948 - DNA, 15 bp, Homo sapiens
agattttctatttct

SEQ ID NO: 1278949 - DNA, 15 bp, Homo sapiens
cagattttctatttc

SEQ ID NO: 1278950 - DNA, 15 bp, Homo sapiens
tcagattttctattt

SEQ ID NO: 1278951 - DNA, 15 bp, Homo sapiens
ttcagattttctatt

SEQ ID NO: 1278952 - DNA, 15 bp, Homo sapiens
attcagattttctat

SEQ ID NO: 1278953 - DNA, 15 bp, Homo sapiens
cattcagattttcta

SEQ ID NO: 1278954 - DNA, 15 bp, Homo sapiens
tcattcagattttct

SEQ ID NO: 1278955 - DNA, 15 bp, Homo sapiens
gtcattcagattttc

SEQ ID NO: 1278956 - DNA, 15 bp, Homo sapiens
ggtcattcagatttt

SEQ ID NO: 1278957 - DNA, 15 bp, Homo sapiens
tggtcattcagattt

SEQ ID NO: 1278958 - DNA, 15 bp, Homo sapiens
ttggtcattcagatt

SEQ ID NO: 1278959 - DNA, 15 bp, Homo sapiens
attggtcattcagat

SEQ ID NO: 1278960 - DNA, 15 bp, Homo sapiens
tattggtcattcaga

SEQ ID NO: 1278961 - DNA, 15 bp, Homo sapiens
ttattggtcattcag

SEQ ID NO: 1278962 - DNA, 15 bp, Homo sapiens
gttattggtcattca

SEQ ID NO: 1278963 - DNA, 15 bp, Homo sapiens
tgttattggtcattc

SEQ ID NO: 1278964 - DNA, 15 bp, Homo sapiens
ttgttattggtcatt

SEQ ID NO: 1278965 - DNA, 15 bp, Homo sapiens
tttgttattggtcat

SEQ ID NO: 1278966 - DNA, 15 bp, Homo sapiens
atttgttattggtca

SEQ ID NO: 1278967 - DNA, 15 bp, Homo sapiens
tatttgttattggtc

SEQ ID NO: 1278968 - DNA, 15 bp, Homo sapiens
ttatttgttattggt

SEQ ID NO: 1278969 - DNA, 15 bp, Homo sapiens
cttatttgttattgg

SEQ ID NO: 1278970 - DNA, 15 bp, Homo sapiens
ccttatttgttattg

SEQ ID NO: 1278971 - DNA, 15 bp, Homo sapiens
cccttatttgttatt

SEQ ID NO: 1278972 - DNA, 15 bp, Homo sapiens
tcccttatttgttat

SEQ ID NO: 1278973 - DNA, 15 bp, Homo sapiens
gtcccttatttgtta

SEQ ID NO: 1278974 - DNA, 15 bp, Homo sapiens
agtcccttatttgtt

SEQ ID NO: 1278975 - DNA, 15 bp, Homo sapiens
cagtcccttatttgt

SEQ ID NO: 1278976 - DNA, 15 bp, Homo sapiens
tcagtcccttatttg

SEQ ID NO: 1278977 - DNA, 15 bp, Homo sapiens
ttcagtcccttattt

SEQ ID NO: 1278978 - DNA, 15 bp, Homo sapiens
attcagtcccttatt

SEQ ID NO: 1278979 - DNA, 15 bp, Homo sapiens
gattcagtcccttat

SEQ ID NO: 1278980 - DNA, 15 bp, Homo sapiens
tgattcagtccctta

SEQ ID NO: 1278981 - DNA, 15 bp, Homo sapiens
ctgattcagtccctt

SEQ ID NO: 1278982 - DNA, 15 bp, Homo sapiens
actgattcagtccct

SEQ ID NO: 1278983 - DNA, 15 bp, Homo sapiens
tactgattcagtccc

SEQ ID NO: 1278984 - DNA, 15 bp, Homo sapiens
ttactgattcagtcc

SEQ ID NO: 1278985 - DNA, 15 bp, Homo sapiens
attactgattcagtc

SEQ ID NO: 1278986 - DNA, 15 bp, Homo sapiens
gattactgattcagt

SEQ ID NO: 1278987 - DNA, 15 bp, Homo sapiens
tgattactgattcag

SEQ ID NO: 1278988 - DNA, 15 bp, Homo sapiens
ttgattactgattca

SEQ ID NO: 1278989 - DNA, 15 bp, Homo sapiens
tttgattactgattc

SEQ ID NO: 1278990 - DNA, 15 bp, Homo sapiens
ttttgattactgatt

SEQ ID NO: 1278991 - DNA, 15 bp, Homo sapiens
tttttgattactgat

SEQ ID NO: 1278992 - DNA, 15 bp, Homo sapiens
atttttgattactga

SEQ ID NO: 1278993 - DNA, 15 bp, Homo sapiens
gatttttgattactg

SEQ ID NO: 1278994 - DNA, 15 bp, Homo sapiens
agatttttgattact

SEQ ID NO: 1278995 - DNA, 15 bp, Homo sapiens
tagatttttgattac

SEQ ID NO: 1278996 - DNA, 15 bp, Homo sapiens
gtagatttttgatta

SEQ ID NO: 1278997 - DNA, 15 bp, Homo sapiens
ggtagatttttgatt

SEQ ID NO: 1278998 - DNA, 15 bp, Homo sapiens
tggtagatttttgat

SEQ ID NO: 1278999 - DNA, 15 bp, Homo sapiens
ttggtagatttttga

SEQ ID NO: 1279000 - DNA, 15 bp, Homo sapiens
attggtagatttttg

SEQ ID NO: 1279001 - DNA, 15 bp, Homo sapiens
tattggtagattttt

SEQ ID NO: 1279002 - DNA, 15 bp, Homo sapiens
ctattggtagatttt

SEQ ID NO: 1279003 - DNA, 15 bp, Homo sapiens
tctattggtagattt

SEQ ID NO: 1279004 - DNA, 15 bp, Homo sapiens
ctctattggtagatt

SEQ ID NO: 1279005 - DNA, 15 bp, Homo sapiens
tctctattggtagat

SEQ ID NO: 1279006 - DNA, 15 bp, Homo sapiens
ttctctattggtaga

SEQ ID NO: 1279007 - DNA, 15 bp, Homo sapiens
tttctctattggtag

SEQ ID NO: 1279008 - DNA, 15 bp, Homo sapiens
ttttctctattggta

SEQ ID NO: 1279009 - DNA, 15 bp, Homo sapiens
cttttctctattggt

SEQ ID NO: 1279010 - DNA, 15 bp, Homo sapiens
gcttttctctattgg

SEQ ID NO: 1279011 - DNA, 15 bp, Homo sapiens
ggcttttctctattg

SEQ ID NO: 1279012 - DNA, 15 bp, Homo sapiens
aggcttttctctatt

SEQ ID NO: 1279013 - DNA, 15 bp, Homo sapiens
gaggcttttctctat

SEQ ID NO: 1279014 - DNA, 15 bp, Homo sapiens
tgaggcttttctcta

SEQ ID NO: 1279015 - DNA, 15 bp, Homo sapiens
ctgaggcttttctct

SEQ ID NO: 1279016 - DNA, 15 bp, Homo sapiens
cctgaggcttttctc

SEQ ID NO: 1279017 - DNA, 15 bp, Homo sapiens
tcctgaggcttttct

SEQ ID NO: 1279018 - DNA, 15 bp, Homo sapiens
gtcctgaggcttttc

SEQ ID NO: 1279019 - DNA, 15 bp, Homo sapiens
ggtcctgaggctttt

SEQ ID NO: 1279020 - DNA, 15 bp, Homo sapiens
aggtcctgaggcttt

SEQ ID NO: 1279021 - DNA, 15 bp, Homo sapiens
caggtcctgaggctt

SEQ ID NO: 1279022 - DNA, 15 bp, Homo sapiens
tcaggtcctgaggct

SEQ ID NO: 1279023 - DNA, 15 bp, Homo sapiens
atcaggtcctgaggc

SEQ ID NO: 1279024 - DNA, 15 bp, Homo sapiens
catcaggtcctgagg

SEQ ID NO: 1279025 - DNA, 15 bp, Homo sapiens
ccatcaggtcctgag

SEQ ID NO: 1279026 - DNA, 15 bp, Homo sapiens
gccatcaggtcctga

SEQ ID NO: 1279027 - DNA, 15 bp, Homo sapiens
agccatcaggtcctg

SEQ ID NO: 1279028 - DNA, 15 bp, Homo sapiens
aagccatcaggtcct

SEQ ID NO: 1279029 - DNA, 15 bp, Homo sapiens
gaagccatcaggtcc

SEQ ID NO: 1279030 - DNA, 15 bp, Homo sapiens
tgaagccatcaggtc

SEQ ID NO: 1279031 - DNA, 15 bp, Homo sapiens
gtgaagccatcaggt

SEQ ID NO: 1279032 - DNA, 15 bp, Homo sapiens
agtgaagccatcagg

SEQ ID NO: 1279033 - DNA, 15 bp, Homo sapiens
cagtgaagccatcag

SEQ ID NO: 1279034 - DNA, 15 bp, Homo sapiens
ccagtgaagccatca

SEQ ID NO: 1279035 - DNA, 15 bp, Homo sapiens
accagtgaagccatc

SEQ ID NO: 1279036 - DNA, 15 bp, Homo sapiens
caccagtgaagccat

SEQ ID NO: 1279037 - DNA, 15 bp, Homo sapiens
tcaccagtgaagcca

SEQ ID NO: 1279038 - DNA, 15 bp, Homo sapiens
ttcaccagtgaagcc

SEQ ID NO: 1279039 - DNA, 15 bp, Homo sapiens
attcaccagtgaagc

SEQ ID NO: 1279040 - DNA, 15 bp, Homo sapiens
aattcaccagtgaag

SEQ ID NO: 1279041 - DNA, 15 bp, Homo sapiens
gaattcaccagtgaa

SEQ ID NO: 1279042 - DNA, 15 bp, Homo sapiens
agaattcaccagtga

SEQ ID NO: 1279043 - DNA, 15 bp, Homo sapiens
tagaattcaccagtg

SEQ ID NO: 1279044 - DNA, 15 bp, Homo sapiens
gtagaattcaccagt

SEQ ID NO: 1279045 - DNA, 15 bp, Homo sapiens
ggtagaattcaccag

SEQ ID NO: 1279046 - DNA, 15 bp, Homo sapiens
tggtagaattcacca

SEQ ID NO: 1279047 - DNA, 15 bp, Homo sapiens
ctggtagaattcacc

SEQ ID NO: 1279048 - DNA, 15 bp, Homo sapiens
tctggtagaattcac

SEQ ID NO: 1279049 - DNA, 15 bp, Homo sapiens
gtctggtagaattca

SEQ ID NO: 1279050 - DNA, 15 bp, Homo sapiens
tgtctggtagaattc

SEQ ID NO: 1279051 - DNA, 15 bp, Homo sapiens
atgtctggtagaatt

SEQ ID NO: 1279052 - DNA, 15 bp, Homo sapiens
aatgtctggtagaat

SEQ ID NO: 1279053 - DNA, 15 bp, Homo sapiens
aaatgtctggtagaa

SEQ ID NO: 1279054 - DNA, 15 bp, Homo sapiens
caaatgtctggtaga

SEQ ID NO: 1279055 - DNA, 15 bp, Homo sapiens
tcaaatgtctggtag

SEQ ID NO: 1279056 - DNA, 15 bp, Homo sapiens
ttcaaatgtctggta

SEQ ID NO: 1279057 - DNA, 15 bp, Homo sapiens
cttcaaatgtctggt

SEQ ID NO: 1279058 - DNA, 15 bp, Homo sapiens
tcttcaaatgtctgg

SEQ ID NO: 1279059 - DNA, 15 bp, Homo sapiens
ttcttcaaatgtctg

SEQ ID NO: 1279060 - DNA, 15 bp, Homo sapiens
attcttcaaatgtct

SEQ ID NO: 1279061 - DNA, 15 bp, Homo sapiens
tattcttcaaatgtc

SEQ ID NO: 1279062 - DNA, 15 bp, Homo sapiens
gtattcttcaaatgt

SEQ ID NO: 1279063 - DNA, 15 bp, Homo sapiens
ggtattcttcaaatg

SEQ ID NO: 1279064 - DNA, 15 bp, Homo sapiens
tggtattcttcaaat

SEQ ID NO: 1279065 - DNA, 15 bp, Homo sapiens
ttggtattcttcaaa

SEQ ID NO: 1279066 - DNA, 15 bp, Homo sapiens
attggtattcttcaa

SEQ ID NO: 1279067 - DNA, 15 bp, Homo sapiens
gattggtattcttca

SEQ ID NO: 1279068 - DNA, 15 bp, Homo sapiens
ggattggtattcttc

SEQ ID NO: 1279069 - DNA, 15 bp, Homo sapiens
aggattggtattctt

SEQ ID NO: 1279070 - DNA, 15 bp, Homo sapiens
aaggattggtattct

SEQ ID NO: 1279071 - DNA, 15 bp, Homo sapiens
gaaggattggtattc

SEQ ID NO: 1279072 - DNA, 15 bp, Homo sapiens
agaaggattggtatt

SEQ ID NO: 1279073 - DNA, 15 bp, Homo sapiens
gagaaggattggtat

SEQ ID NO: 1279074 - DNA, 15 bp, Homo sapiens
tgagaaggattggta

SEQ ID NO: 1279075 - DNA, 15 bp, Homo sapiens
ttgagaaggattggt

SEQ ID NO: 1279076 - DNA, 15 bp, Homo sapiens
tttgagaaggattgg

SEQ ID NO: 1279077 - DNA, 15 bp, Homo sapiens
gtttgagaaggattg

SEQ ID NO: 1279078 - DNA, 15 bp, Homo sapiens
cgtttgagaaggatt

SEQ ID NO: 1279079 - DNA, 15 bp, Homo sapiens
acgtttgagaaggat

SEQ ID NO: 1279080 - DNA, 15 bp, Homo sapiens
aacgtttgagaagga

SEQ ID NO: 1279081 - DNA, 15 bp, Homo sapiens
aaacgtttgagaagg

SEQ ID NO: 1279082 - DNA, 15 bp, Homo sapiens
aaaacgtttgagaag

SEQ ID NO: 1279083 - DNA, 15 bp, Homo sapiens
gaaaacgtttgagaa

SEQ ID NO: 1279084 - DNA, 15 bp, Homo sapiens
tgaaaacgtttgaga

SEQ ID NO: 1279085 - DNA, 15 bp, Homo sapiens
ttgaaaacgtttgag

SEQ ID NO: 1279086 - DNA, 15 bp, Homo sapiens
tttgaaaacgtttga

SEQ ID NO: 1279087 - DNA, 15 bp, Homo sapiens
ttttgaaaacgtttg

SEQ ID NO: 1279088 - DNA, 15 bp, Homo sapiens
tttttgaaaacgttt

SEQ ID NO: 1279089 - DNA, 15 bp, Homo sapiens
atttttgaaaacgtt

SEQ ID NO: 1279090 - DNA, 15 bp, Homo sapiens
aatttttgaaaacgt

SEQ ID NO: 1279091 - DNA, 15 bp, Homo sapiens
aaatttttgaaaacg

SEQ ID NO: 1279092 - DNA, 15 bp, Homo sapiens
caaatttttgaaaac

SEQ ID NO: 1279093 - DNA, 15 bp, Homo sapiens
tcaaatttttgaaaa

SEQ ID NO: 1279094 - DNA, 15 bp, Homo sapiens
attcaaatttttgaa

SEQ ID NO: 1279095 - DNA, 15 bp, Homo sapiens
tattcaaatttttga

SEQ ID NO: 1279096 - DNA, 15 bp, Homo sapiens
ctattcaaatttttg

SEQ ID NO: 1279097 - DNA, 15 bp, Homo sapiens
cctattcaaattttt

SEQ ID NO: 1279098 - DNA, 15 bp, Homo sapiens
tcctattcaaatttt

SEQ ID NO: 1279099 - DNA, 15 bp, Homo sapiens
ctcctattcaaattt

SEQ ID NO: 1279100 - DNA, 15 bp, Homo sapiens
cctcctattcaaatt

SEQ ID NO: 1279101 - DNA, 15 bp, Homo sapiens
tcctcctattcaaat

SEQ ID NO: 1279102 - DNA, 15 bp, Homo sapiens
ttcctcctattcaaa

SEQ ID NO: 1279103 - DNA, 15 bp, Homo sapiens
tttcctcctattcaa

SEQ ID NO: 1279104 - DNA, 15 bp, Homo sapiens
gtttcctcctattca

SEQ ID NO: 1279105 - DNA, 15 bp, Homo sapiens
tgtttcctcctattc

SEQ ID NO: 1279106 - DNA, 15 bp, Homo sapiens
gtgtttcctcctatt

SEQ ID NO: 1279107 - DNA, 15 bp, Homo sapiens
agtgtttcctcctat

SEQ ID NO: 1279108 - DNA, 15 bp, Homo sapiens
aagtgtttcctccta

SEQ ID NO: 1279109 - DNA, 15 bp, Homo sapiens
gaagtgtttcctcct

SEQ ID NO: 1279110 - DNA, 15 bp, Homo sapiens
ggaagtgtttcctcc

SEQ ID NO: 1279111 - DNA, 15 bp, Homo sapiens
tggaagtgtttcctc

SEQ ID NO: 1279112 - DNA, 15 bp, Homo sapiens
ttggaagtgtttcct

SEQ ID NO: 1279113 - DNA, 15 bp, Homo sapiens
tttggaagtgtttcc

SEQ ID NO: 1279114 - DNA, 15 bp, Homo sapiens
gtttggaagtgtttc

SEQ ID NO: 1279115 - DNA, 15 bp, Homo sapiens
agtttggaagtgttt

SEQ ID NO: 1279116 - DNA, 15 bp, Homo sapiens
gagtttggaagtgtt

SEQ ID NO: 1279117 - DNA, 15 bp, Homo sapiens
tgagtttggaagtgt

SEQ ID NO: 1279118 - DNA, 15 bp, Homo sapiens
atgagtttggaagtg

SEQ ID NO: 1279119 - DNA, 15 bp, Homo sapiens
aatgagtttggaagt

SEQ ID NO: 1279120 - DNA, 15 bp, Homo sapiens
tgagactgtaataag

SEQ ID NO: 1279121 - DNA, 15 bp, Homo sapiens
atgagactgtaataa

SEQ ID NO: 1279122 - DNA, 15 bp, Homo sapiens
catgagactgtaata

SEQ ID NO: 1279123 - DNA, 15 bp, Homo sapiens
tcatgagactgtaat

SEQ ID NO: 1279124 - DNA, 15 bp, Homo sapiens
ttcatgagactgtaa

SEQ ID NO: 1279125 - DNA, 15 bp, Homo sapiens
gttcatgagactgta

SEQ ID NO: 1279126 - DNA, 15 bp, Homo sapiens
agttcatgagactgt

SEQ ID NO: 1279127 - DNA, 15 bp, Homo sapiens
tagttcatgagactg

SEQ ID NO: 1279128 - DNA, 15 bp, Homo sapiens
atagttcatgagact

SEQ ID NO: 1279129 - DNA, 15 bp, Homo sapiens
catagttcatgagac

SEQ ID NO: 1279130 - DNA, 15 bp, Homo sapiens
gcatagttcatgaga

SEQ ID NO: 1279131 - DNA, 15 bp, Homo sapiens
cgcatagttcatgag

SEQ ID NO: 1279132 - DNA, 15 bp, Homo sapiens
acgcatagttcatga

SEQ ID NO: 1279133 - DNA, 15 bp, Homo sapiens
tacgcatagttcatg

SEQ ID NO: 1279134 - DNA, 15 bp, Homo sapiens
ttacgcatagttcat

SEQ ID NO: 1279135 - DNA, 15 bp, Homo sapiens
cttacgcatagttca

SEQ ID NO: 1279136 - DNA, 15 bp, Homo sapiens
ccttacgcatagttc

SEQ ID NO: 1279137 - DNA, 15 bp, Homo sapiens
tccttacgcatagtt

SEQ ID NO: 1279138 - DNA, 15 bp, Homo sapiens
atccttacgcatagt

SEQ ID NO: 1279139 - DNA, 15 bp, Homo sapiens
tatccttacgcatag

SEQ ID NO: 1279140 - DNA, 15 bp, Homo sapiens
atatccttacgcata

SEQ ID NO: 1279141 - DNA, 15 bp, Homo sapiens
tatatccttacgcat

SEQ ID NO: 1279142 - DNA, 15 bp, Homo sapiens
atatatccttacgca

SEQ ID NO: 1279143 - DNA, 15 bp, Homo sapiens
gatatatccttacgc

SEQ ID NO: 1279144 - DNA, 15 bp, Homo sapiens
agatatatccttacg

SEQ ID NO: 1279145 - DNA, 15 bp, Homo sapiens
aagatatatccttac

SEQ ID NO: 1279146 - DNA, 15 bp, Homo sapiens
aaagatatatcctta

SEQ ID NO: 1279147 - DNA, 15 bp, Homo sapiens
aaaagatatatcctt

SEQ ID NO: 1279148 - DNA, 15 bp, Homo sapiens
caaaagatatatcct

SEQ ID NO: 1279149 - DNA, 15 bp, Homo sapiens
tcaaaagatatatcc

SEQ ID NO: 1279150 - DNA, 15 bp, Homo sapiens
gtcaaaagatatatc

SEQ ID NO: 1279151 - DNA, 15 bp, Homo sapiens
ggtcaaaagatatat

SEQ ID NO: 1279152 - DNA, 15 bp, Homo sapiens
gggtcaaaagatata

SEQ ID NO: 1279153 - DNA, 15 bp, Homo sapiens
agggtcaaaagatat

SEQ ID NO: 1279154 - DNA, 15 bp, Homo sapiens
cagggtcaaaagata

SEQ ID NO: 1279155 - DNA, 15 bp, Homo sapiens
tcagggtcaaaagat

SEQ ID NO: 1279156 - DNA, 15 bp, Homo sapiens
ctcagggtcaaaaga

SEQ ID NO: 1279157 - DNA, 15 bp, Homo sapiens
cctcagggtcaaaag

SEQ ID NO: 1279158 - DNA, 15 bp, Homo sapiens
acctcagggtcaaaa

SEQ ID NO: 1279159 - DNA, 15 bp, Homo sapiens
tacctcagggtcaaa

SEQ ID NO: 1279160 - DNA, 15 bp, Homo sapiens
ctacctcagggtcaa

SEQ ID NO: 1279161 - DNA, 15 bp, Homo sapiens
tctacctcagggtca

SEQ ID NO: 1279162 - DNA, 15 bp, Homo sapiens
gctctacctcagggt

SEQ ID NO: 1279163 - DNA, 15 bp, Homo sapiens
tgctctacctcaggg

SEQ ID NO: 1279164 - DNA, 15 bp, Homo sapiens
gtgctctacctcagg

SEQ ID NO: 1279165 - DNA, 15 bp, Homo sapiens
tgtgctctacctcag

SEQ ID NO: 1279166 - DNA, 15 bp, Homo sapiens
ttgtgctctacctca

SEQ ID NO: 1279167 - DNA, 15 bp, Homo sapiens
tttgtgctctacctc

SEQ ID NO: 1279168 - DNA, 15 bp, Homo sapiens
ttttgtgctctacct

SEQ ID NO: 1279169 - DNA, 15 bp, Homo sapiens
cttttgtgctctacc

SEQ ID NO: 1279170 - DNA, 15 bp, Homo sapiens
gcttttgtgctctac

SEQ ID NO: 1279171 - DNA, 15 bp, Homo sapiens
tgcttttgtgctcta

SEQ ID NO: 1279172 - DNA, 15 bp, Homo sapiens
gtgcttttgtgctct

SEQ ID NO: 1279173 - DNA, 15 bp, Homo sapiens
tgtgcttttgtgctc

SEQ ID NO: 1279174 - DNA, 15 bp, Homo sapiens
atgtgcttttgtgct

SEQ ID NO: 1279175 - DNA, 15 bp, Homo sapiens
catgtgcttttgtgc

SEQ ID NO: 1279176 - DNA, 15 bp, Homo sapiens
acatgtgcttttgtg

SEQ ID NO: 1279177 - DNA, 15 bp, Homo sapiens
aacatgtgcttttgt

SEQ ID NO: 1279178 - DNA, 15 bp, Homo sapiens
aaacatgtgcttttg

SEQ ID NO: 1279179 - DNA, 15 bp, Homo sapiens
gaaacatgtgctttt

SEQ ID NO: 1279180 - DNA, 15 bp, Homo sapiens
agaaacatgtgcttt

SEQ ID NO: 1279181 - DNA, 15 bp, Homo sapiens
aagaaacatgtgctt

SEQ ID NO: 1279182 - DNA, 15 bp, Homo sapiens
taagaaacatgtgct

SEQ ID NO: 1279183 - DNA, 15 bp, Homo sapiens
ataagaaacatgtgc

SEQ ID NO: 1279184 - DNA, 15 bp, Homo sapiens
cataagaaacatgtg

SEQ ID NO: 1279185 - DNA, 15 bp, Homo sapiens
tcataagaaacatgt

SEQ ID NO: 1279186 - DNA, 15 bp, Homo sapiens
gtcataagaaacatg

SEQ ID NO: 1279187 - DNA, 15 bp, Homo sapiens
agtcataagaaacat

SEQ ID NO: 1279188 - DNA, 15 bp, Homo sapiens
aagtcataagaaaca

SEQ ID NO: 1279189 - DNA, 15 bp, Homo sapiens
taagtcataagaaac

SEQ ID NO: 1279190 - DNA, 15 bp, Homo sapiens
ataagtcataagaaa

SEQ ID NO: 1279191 - DNA, 15 bp, Homo sapiens
aataagtcataagaa

SEQ ID NO: 1279192 - DNA, 15 bp, Homo sapiens
aaataagtcataaga

SEQ ID NO: 1279193 - DNA, 15 bp, Homo sapiens
aaaataagtcataag

SEQ ID NO: 1279194 - DNA, 15 bp, Homo sapiens
gaaaataagtcataa

SEQ ID NO: 1279195 - DNA, 15 bp, Homo sapiens
tgaaaataagtcata

SEQ ID NO: 1279196 - DNA, 15 bp, Homo sapiens
atgaaaataagtcat

SEQ ID NO: 1279197 - DNA, 15 bp, Homo sapiens
gatgaaaataagtca

SEQ ID NO: 1279198 - DNA, 15 bp, Homo sapiens
agatgaaaataagtc

SEQ ID NO: 1279199 - DNA, 15 bp, Homo sapiens
aagatgaaaataagt

SEQ ID NO: 1279200 - DNA, 15 bp, Homo sapiens
aaagatgaaaataag

SEQ ID NO: 1279201 - DNA, 15 bp, Homo sapiens
gaaagatgaaaataa

SEQ ID NO: 1279202 - DNA, 15 bp, Homo sapiens
tgaaagatgaaaata

SEQ ID NO: 1279203 - DNA, 15 bp, Homo sapiens
atgaaagatgaaaat

SEQ ID NO: 1279204 - DNA, 15 bp, Homo sapiens
tatgaaagatgaaaa

SEQ ID NO: 1279205 - DNA, 15 bp, Homo sapiens
atatgaaagatgaaa

SEQ ID NO: 1279206 - DNA, 15 bp, Homo sapiens
aatatgaaagatgaa

SEQ ID NO: 1279207 - DNA, 15 bp, Homo sapiens
aaatatgaaagatga

SEQ ID NO: 1279208 - DNA, 15 bp, Homo sapiens
gaaatatgaaagatg

SEQ ID NO: 1279209 - DNA, 15 bp, Homo sapiens
tgaaatatgaaagat

SEQ ID NO: 1279210 - DNA, 15 bp, Homo sapiens
gtgaaatatgaaaga

SEQ ID NO: 1279211 - DNA, 15 bp, Homo sapiens
tgtgaaatatgaaag

SEQ ID NO: 1279212 - DNA, 15 bp, Homo sapiens
ttgtgaaatatgaaa

SEQ ID NO: 1279213 - DNA, 15 bp, Homo sapiens
tttgtgaaatatgaa

SEQ ID NO: 1279214 - DNA, 15 bp, Homo sapiens
ctttgtgaaatatga

SEQ ID NO: 1279215 - DNA, 15 bp, Homo sapiens
actttgtgaaatatg

SEQ ID NO: 1279216 - DNA, 15 bp, Homo sapiens
cactttgtgaaatat

SEQ ID NO: 1279217 - DNA, 15 bp, Homo sapiens
gcactttgtgaaata

SEQ ID NO: 1279218 - DNA, 15 bp, Homo sapiens
tgcactttgtgaaat

SEQ ID NO: 1279219 - DNA, 15 bp, Homo sapiens
ttgcactttgtgaaa

SEQ ID NO: 1279220 - DNA, 15 bp, Homo sapiens
cttgcactttgtgaa

SEQ ID NO: 1279221 - DNA, 15 bp, Homo sapiens
gcttgcactttgtga

SEQ ID NO: 1279222 - DNA, 15 bp, Homo sapiens
agcttgcactttgtg

SEQ ID NO: 1279223 - DNA, 15 bp, Homo sapiens
tagcttgcactttgt

SEQ ID NO: 1279224 - DNA, 15 bp, Homo sapiens
ctagcttgcactttg

SEQ ID NO: 1279225 - DNA, 15 bp, Homo sapiens
tctagcttgcacttt

SEQ ID NO: 1279226 - DNA, 15 bp, Homo sapiens
atctagcttgcactt

SEQ ID NO: 1279227 - DNA, 15 bp, Homo sapiens
tatctagcttgcact

SEQ ID NO: 1279228 - DNA, 15 bp, Homo sapiens
ctatctagcttgcac

SEQ ID NO: 1279229 - DNA, 15 bp, Homo sapiens
tctatctagcttgca

SEQ ID NO: 1279230 - DNA, 15 bp, Homo sapiens
ttctatctagcttgc

SEQ ID NO: 1279231 - DNA, 15 bp, Homo sapiens
gttctatctagcttg

SEQ ID NO: 1279232 - DNA, 15 bp, Homo sapiens
tgttctatctagctt

SEQ ID NO: 1279233 - DNA, 15 bp, Homo sapiens
atgttctatctagct

SEQ ID NO: 1279234 - DNA, 15 bp, Homo sapiens
aatgttctatctagc

SEQ ID NO: 1279235 - DNA, 15 bp, Homo sapiens
taatgttctatctag

SEQ ID NO: 1279236 - DNA, 15 bp, Homo sapiens
ataatgttctatcta

SEQ ID NO: 1279237 - DNA, 15 bp, Homo sapiens
aataatgttctatct

SEQ ID NO: 1279238 - DNA, 15 bp, Homo sapiens
aaataatgttctatc

SEQ ID NO: 1279239 - DNA, 15 bp, Homo sapiens
aaaataatgttctat

SEQ ID NO: 1279240 - DNA, 15 bp, Homo sapiens
aaaaataatgttcta

SEQ ID NO: 1279241 - DNA, 15 bp, Homo sapiens
taaaaataatgttct

SEQ ID NO: 1279242 - DNA, 15 bp, Homo sapiens
ttaaaaataatgttc

SEQ ID NO: 1279243 - DNA, 15 bp, Homo sapiens
gttaaaaataatgtt

SEQ ID NO: 1279244 - DNA, 15 bp, Homo sapiens
agttaaaaataatgt

SEQ ID NO: 1279245 - DNA, 15 bp, Homo sapiens
aagttaaaaataatg

SEQ ID NO: 1279246 - DNA, 15 bp, Homo sapiens
aaagttaaaaataat

SEQ ID NO: 1279247 - DNA, 15 bp, Homo sapiens
aaaagttaaaaataa

SEQ ID NO: 1279248 - DNA, 15 bp, Homo sapiens
caaaagttaaaaata

SEQ ID NO: 1279249 - DNA, 15 bp, Homo sapiens
tcaaaagttaaaaat

SEQ ID NO: 1279250 - DNA, 15 bp, Homo sapiens
ttcaaaagttaaaaa

SEQ ID NO: 1279251 - DNA, 15 bp, Homo sapiens
tttcaaaagttaaaa

SEQ ID NO: 1279252 - DNA, 15 bp, Homo sapiens
atttcaaaagttaaa

SEQ ID NO: 1279253 - DNA, 15 bp, Homo sapiens
aatttcaaaagttaa

SEQ ID NO: 1279254 - DNA, 15 bp, Homo sapiens
caatttcaaaagtta

SEQ ID NO: 1279255 - DNA, 15 bp, Homo sapiens
gcaatttcaaaagtt

SEQ ID NO: 1279256 - DNA, 15 bp, Homo sapiens
tgcaatttcaaaagt

SEQ ID NO: 1279257 - DNA, 15 bp, Homo sapiens
ttgcaatttcaaaag

SEQ ID NO: 1279258 - DNA, 15 bp, Homo sapiens
gttgcaatttcaaaa

SEQ ID NO: 1279259 - DNA, 15 bp, Homo sapiens
agttgcaatttcaaa

SEQ ID NO: 1279260 - DNA, 15 bp, Homo sapiens
aagttgcaatttcaa

SEQ ID NO: 1279261 - DNA, 15 bp, Homo sapiens
taagttgcaatttca

SEQ ID NO: 1279262 - DNA, 15 bp, Homo sapiens
ttaagttgcaatttc

SEQ ID NO: 1279263 - DNA, 15 bp, Homo sapiens
tttaagttgcaattt

SEQ ID NO: 1279264 - DNA, 15 bp, Homo sapiens
atttaagttgcaatt

SEQ ID NO: 1279265 - DNA, 15 bp, Homo sapiens
aatttaagttgcaat

SEQ ID NO: 1279266 - DNA, 15 bp, Homo sapiens
aaatttaagttgcaa

SEQ ID NO: 1279267 - DNA, 15 bp, Homo sapiens
taaatttaagttgca

SEQ ID NO: 1279268 - DNA, 15 bp, Homo sapiens
ataaatttaagttgc

SEQ ID NO: 1279269 - DNA, 15 bp, Homo sapiens
cataaatttaagttg

SEQ ID NO: 1279270 - DNA, 15 bp, Homo sapiens
acataaatttaagtt

SEQ ID NO: 1279271 - DNA, 15 bp, Homo sapiens
gacataaatttaagt

SEQ ID NO: 1279272 - DNA, 15 bp, Homo sapiens
tgacataaatttaag

SEQ ID NO: 1279273 - DNA, 15 bp, Homo sapiens
ctgacataaatttaa

SEQ ID NO: 1279274 - DNA, 15 bp, Homo sapiens
actgacataaattta

SEQ ID NO: 1279275 - DNA, 15 bp, Homo sapiens
aactgacataaattt

SEQ ID NO: 1279276 - DNA, 15 bp, Homo sapiens
caactgacataaatt

SEQ ID NO: 1279277 - DNA, 15 bp, Homo sapiens
acaactgacataaat

SEQ ID NO: 1279278 - DNA, 15 bp, Homo sapiens
cacaactgacataaa

SEQ ID NO: 1279279 - DNA, 15 bp, Homo sapiens
tcacaactgacataa

SEQ ID NO: 1279280 - DNA, 15 bp, Homo sapiens
gtcacaactgacata

SEQ ID NO: 1279281 - DNA, 15 bp, Homo sapiens
tgtcacaactgacat

SEQ ID NO: 1279282 - DNA, 15 bp, Homo sapiens
ctgtcacaactgaca

SEQ ID NO: 1279283 - DNA, 15 bp, Homo sapiens
gctgtcacaactgac

SEQ ID NO: 1279284 - DNA, 15 bp, Homo sapiens
tgctgtcacaactga

SEQ ID NO: 1279285 - DNA, 15 bp, Homo sapiens
atgctgtcacaactg

SEQ ID NO: 1279286 - DNA, 15 bp, Homo sapiens
tatgctgtcacaact

SEQ ID NO: 1279287 - DNA, 15 bp, Homo sapiens
gtatgctgtcacaac

SEQ ID NO: 1279288 - DNA, 15 bp, Homo sapiens
tgtatgctgtcacaa

SEQ ID NO: 1279289 - DNA, 15 bp, Homo sapiens
atgtatgctgtcaca

SEQ ID NO: 1279290 - DNA, 15 bp, Homo sapiens
tatgtatgctgtcac

SEQ ID NO: 1279291 - DNA, 15 bp, Homo sapiens
ctatgtatgctgtca

SEQ ID NO: 1279292 - DNA, 15 bp, Homo sapiens
actatgtatgctgtc

SEQ ID NO: 1279293 - DNA, 15 bp, Homo sapiens
tactatgtatgctgt

SEQ ID NO: 1279294 - DNA, 15 bp, Homo sapiens
ctactatgtatgctg

SEQ ID NO: 1279295 - DNA, 15 bp, Homo sapiens
actactatgtatgct

SEQ ID NO: 1279296 - DNA, 15 bp, Homo sapiens
tactactatgtatgc

SEQ ID NO: 1279297 - DNA, 15 bp, Homo sapiens
gtactactatgtatg

SEQ ID NO: 1279298 - DNA, 15 bp, Homo sapiens
agtactactatgtat

SEQ ID NO: 1279299 - DNA, 15 bp, Homo sapiens
aagtactactatgta

SEQ ID NO: 1279300 - DNA, 15 bp, Homo sapiens
aaagtactactatgt

SEQ ID NO: 1279301 - DNA, 15 bp, Homo sapiens
aaaagtactactatg

SEQ ID NO: 1279302 - DNA, 15 bp, Homo sapiens
gaaaagtactactat

SEQ ID NO: 1279303 - DNA, 15 bp, Homo sapiens
agaaaagtactacta

SEQ ID NO: 1279304 - DNA, 15 bp, Homo sapiens
cagaaaagtactact

SEQ ID NO: 1279305 - DNA, 15 bp, Homo sapiens
tcagaaaagtactac

SEQ ID NO: 1279306 - DNA, 15 bp, Homo sapiens
atcagaaaagtacta

SEQ ID NO: 1279307 - DNA, 15 bp, Homo sapiens
tatcagaaaagtact

SEQ ID NO: 1279308 - DNA, 15 bp, Homo sapiens
ctatcagaaaagtac

SEQ ID NO: 1279309 - DNA, 15 bp, Homo sapiens
actatcagaaaagta

SEQ ID NO: 1279310 - DNA, 15 bp, Homo sapiens
aactatcagaaaagt

SEQ ID NO: 1279311 - DNA, 15 bp, Homo sapiens
gaactatcagaaaag

SEQ ID NO: 1279312 - DNA, 15 bp, Homo sapiens
ggaactatcagaaaa

SEQ ID NO: 1279313 - DNA, 15 bp, Homo sapiens
tggaactatcagaaa

SEQ ID NO: 1279314 - DNA, 15 bp, Homo sapiens
ctggaactatcagaa

SEQ ID NO: 1279315 - DNA, 15 bp, Homo sapiens
cctggaactatcaga

SEQ ID NO: 1279316 - DNA, 15 bp, Homo sapiens
tcctggaactatcag

SEQ ID NO: 1279317 - DNA, 15 bp, Homo sapiens
atcctggaactatca

SEQ ID NO: 1279318 - DNA, 15 bp, Homo sapiens
catcctggaactatc

SEQ ID NO: 1279319 - DNA, 15 bp, Homo sapiens
tcatcctggaactat

SEQ ID NO: 1279320 - DNA, 15 bp, Homo sapiens
atcatcctggaacta

SEQ ID NO: 1279321 - DNA, 15 bp, Homo sapiens
aatcatcctggaact

SEQ ID NO: 1279322 - DNA, 15 bp, Homo sapiens
aaatcatcctggaac

SEQ ID NO: 1279323 - DNA, 15 bp, Homo sapiens
taaatcatcctggaa

SEQ ID NO: 1279324 - DNA, 15 bp, Homo sapiens
ataaatcatcctgga

SEQ ID NO: 1279325 - DNA, 15 bp, Homo sapiens
cataaatcatcctgg

SEQ ID NO: 1279326 - DNA, 15 bp, Homo sapiens
acataaatcatcctg

SEQ ID NO: 1279327 - DNA, 15 bp, Homo sapiens
gacataaatcatcct

SEQ ID NO: 1279328 - DNA, 15 bp, Homo sapiens
tgacataaatcatcc

SEQ ID NO: 1279329 - DNA, 15 bp, Homo sapiens
gtgacataaatcatc

SEQ ID NO: 1279330 - DNA, 15 bp, Homo sapiens
ggtgacataaatcat

SEQ ID NO: 1279331 - DNA, 15 bp, Homo sapiens
tggtgacataaatca

SEQ ID NO: 1279332 - DNA, 15 bp, Homo sapiens
gtggtgacataaatc

SEQ ID NO: 1279333 - DNA, 15 bp, Homo sapiens
agtggtgacataaat

SEQ ID NO: 1279334 - DNA, 15 bp, Homo sapiens
aagtggtgacataaa

SEQ ID NO: 1279335 - DNA, 15 bp, Homo sapiens
caagtggtgacataa

SEQ ID NO: 1279336 - DNA, 15 bp, Homo sapiens
ccaagtggtgacata

SEQ ID NO: 1279337 - DNA, 15 bp, Homo sapiens
accaagtggtgacat

SEQ ID NO: 1279338 - DNA, 15 bp, Homo sapiens
caccaagtggtgaca

SEQ ID NO: 1279339 - DNA, 15 bp, Homo sapiens
ccaccaagtggtgac

SEQ ID NO: 1279340 - DNA, 15 bp, Homo sapiens
gctccaccaagtggt

SEQ ID NO: 1279341 - DNA, 15 bp, Homo sapiens
agctccaccaagtgg

SEQ ID NO: 1279342 - DNA, 15 bp, Homo sapiens
gagctccaccaagtg

SEQ ID NO: 1279343 - DNA, 15 bp, Homo sapiens
agagctccaccaagt

SEQ ID NO: 1279344 - DNA, 15 bp, Homo sapiens
aagagctccaccaag

SEQ ID NO: 1279345 - DNA, 15 bp, Homo sapiens
aaagagctccaccaa

SEQ ID NO: 1279346 - DNA, 15 bp, Homo sapiens
aaaagagctccacca

SEQ ID NO: 1279347 - DNA, 15 bp, Homo sapiens
taaaagagctccacc

SEQ ID NO: 1279348 - DNA, 15 bp, Homo sapiens
ataaaagagctccac

SEQ ID NO: 1279349 - DNA, 15 bp, Homo sapiens
tataaaagagctcca

SEQ ID NO: 1279350 - DNA, 15 bp, Homo sapiens
ttataaaagagctcc

SEQ ID NO: 1279351 - DNA, 15 bp, Homo sapiens
cttataaaagagctc

SEQ ID NO: 1279352 - DNA, 15 bp, Homo sapiens
acttataaaagagct

SEQ ID NO: 1279353 - DNA, 15 bp, Homo sapiens
tacttataaaagagc

SEQ ID NO: 1279354 - DNA, 15 bp, Homo sapiens
ttacttataaaagag

SEQ ID NO: 1279355 - DNA, 15 bp, Homo sapiens
cttacttataaaaga

SEQ ID NO: 1279356 - DNA, 15 bp, Homo sapiens
acttacttataaaag

SEQ ID NO: 1279357 - DNA, 15 bp, Homo sapiens
cacttacttataaaa

SEQ ID NO: 1279358 - DNA, 15 bp, Homo sapiens
gcacttacttataaa

SEQ ID NO: 1279359 - DNA, 15 bp, Homo sapiens
tgcacttacttataa

SEQ ID NO: 1279360 - DNA, 15 bp, Homo sapiens
atgcacttacttata

SEQ ID NO: 1279361 - DNA, 15 bp, Homo sapiens
aatgcacttacttat

SEQ ID NO: 1279362 - DNA, 15 bp, Homo sapiens
caatgcacttactta

SEQ ID NO: 1279363 - DNA, 15 bp, Homo sapiens
acaatgcacttactt

SEQ ID NO: 1279364 - DNA, 15 bp, Homo sapiens
aacaatgcacttact

SEQ ID NO: 1279365 - DNA, 15 bp, Homo sapiens
aaacaatgcacttac

SEQ ID NO: 1279366 - DNA, 15 bp, Homo sapiens
taaacaatgcactta

SEQ ID NO: 1279367 - DNA, 15 bp, Homo sapiens
ttaaacaatgcactt

SEQ ID NO: 1279368 - DNA, 15 bp, Homo sapiens
tttaaacaatgcact

SEQ ID NO: 1279369 - DNA, 15 bp, Homo sapiens
ttttaaacaatgcac

SEQ ID NO: 1279370 - DNA, 15 bp, Homo sapiens
tttttaaacaatgca

SEQ ID NO: 1279371 - DNA, 15 bp, Homo sapiens
ttttttaaacaatgc

SEQ ID NO: 1279372 - DNA, 15 bp, Homo sapiens
cttttttaaacaatg

SEQ ID NO: 1279373 - DNA, 15 bp, Homo sapiens
gcttttttaaacaat

SEQ ID NO: 1279374 - DNA, 15 bp, Homo sapiens
cgcttttttaaacaa

SEQ ID NO: 1279375 - DNA, 15 bp, Homo sapiens
tcgcttttttaaaca

SEQ ID NO: 1279376 - DNA, 15 bp, Homo sapiens
ctcgcttttttaaac

SEQ ID NO: 1279377 - DNA, 15 bp, Homo sapiens
actcgcttttttaaa

SEQ ID NO: 1279378 - DNA, 15 bp, Homo sapiens
tactcgcttttttaa

SEQ ID NO: 1279379 - DNA, 15 bp, Homo sapiens
atactcgctttttta

SEQ ID NO: 1279380 - DNA, 15 bp, Homo sapiens
tatactcgctttttt

SEQ ID NO: 1279381 - DNA, 15 bp, Homo sapiens
ttatactcgcttttt

SEQ ID NO: 1279382 - DNA, 15 bp, Homo sapiens
cttatactcgctttt

SEQ ID NO: 1279383 - DNA, 15 bp, Homo sapiens
acttatactcgcttt

SEQ ID NO: 1279384 - DNA, 15 bp, Homo sapiens
aacttatactcgctt

SEQ ID NO: 1279385 - DNA, 15 bp, Homo sapiens
caacttatactcgct

SEQ ID NO: 1279386 - DNA, 15 bp, Homo sapiens
acaacttatactcgc

SEQ ID NO: 1279387 - DNA, 15 bp, Homo sapiens
gacaacttatactcg

SEQ ID NO: 1279388 - DNA, 15 bp, Homo sapiens
tgacaacttatactc

SEQ ID NO: 1279389 - DNA, 15 bp, Homo sapiens
gtgacaacttatact

SEQ ID NO: 1279390 - DNA, 15 bp, Homo sapiens
agtgacaacttatac

SEQ ID NO: 1279391 - DNA, 15 bp, Homo sapiens
tagtgacaacttata

SEQ ID NO: 1279392 - DNA, 15 bp, Homo sapiens
ttagtgacaacttat

SEQ ID NO: 1279393 - DNA, 15 bp, Homo sapiens
attagtgacaactta

SEQ ID NO: 1279394 - DNA, 15 bp, Homo sapiens
aattagtgacaactt

SEQ ID NO: 1279395 - DNA, 15 bp, Homo sapiens
taattagtgacaact

SEQ ID NO: 1279396 - DNA, 15 bp, Homo sapiens
ctaattagtgacaac

SEQ ID NO: 1279397 - DNA, 15 bp, Homo sapiens
cctaattagtgacaa

SEQ ID NO: 1279398 - DNA, 15 bp, Homo sapiens
ccctaattagtgaca

SEQ ID NO: 1279399 - DNA, 15 bp, Homo sapiens
cccctaattagtgac

SEQ ID NO: 1279400 - DNA, 15 bp, Homo sapiens
acccctaattagtga

SEQ ID NO: 1279401 - DNA, 15 bp, Homo sapiens
aacccctaattagtg

SEQ ID NO: 1279402 - DNA, 15 bp, Homo sapiens
taacccctaattagt

SEQ ID NO: 1279403 - DNA, 15 bp, Homo sapiens
ataacccctaattag

SEQ ID NO: 1279404 - DNA, 15 bp, Homo sapiens
gataacccctaatta

SEQ ID NO: 1279405 - DNA, 15 bp, Homo sapiens
tgataacccctaatt

SEQ ID NO: 1279406 - DNA, 15 bp, Homo sapiens
atgataacccctaat

SEQ ID NO: 1279407 - DNA, 15 bp, Homo sapiens
aatgataacccctaa

SEQ ID NO: 1279408 - DNA, 15 bp, Homo sapiens
taatgataaccccta

SEQ ID NO: 1279409 - DNA, 15 bp, Homo sapiens
ctaatgataacccct

SEQ ID NO: 1279410 - DNA, 15 bp, Homo sapiens
tctaatgataacccc

SEQ ID NO: 1279411 - DNA, 15 bp, Homo sapiens
atctaatgataaccc

SEQ ID NO: 1279412 - DNA, 15 bp, Homo sapiens
aatctaatgataacc

SEQ ID NO: 1279413 - DNA, 15 bp, Homo sapiens
caatctaatgataac

SEQ ID NO: 1279414 - DNA, 15 bp, Homo sapiens
ccaatctaatgataa

SEQ ID NO: 1279415 - DNA, 15 bp, Homo sapiens
accaatctaatgata

SEQ ID NO: 1279416 - DNA, 15 bp, Homo sapiens
aaccaatctaatgat

SEQ ID NO: 1279417 - DNA, 15 bp, Homo sapiens
gaaccaatctaatga

SEQ ID NO: 1279418 - DNA, 15 bp, Homo sapiens
tgaaccaatctaatg

SEQ ID NO: 1279419 - DNA, 15 bp, Homo sapiens
ttgaaccaatctaat

SEQ ID NO: 1279420 - DNA, 15 bp, Homo sapiens
tttgaaccaatctaa

SEQ ID NO: 1279421 - DNA, 15 bp, Homo sapiens
atttgaaccaatcta

SEQ ID NO: 1279422 - DNA, 15 bp, Homo sapiens
catttgaaccaatct

SEQ ID NO: 1279423 - DNA, 15 bp, Homo sapiens
tcatttgaaccaatc

SEQ ID NO: 1279424 - DNA, 15 bp, Homo sapiens
ttcatttgaaccaat

SEQ ID NO: 1279425 - DNA, 15 bp, Homo sapiens
gttcatttgaaccaa

SEQ ID NO: 1279426 - DNA, 15 bp, Homo sapiens
agttcatttgaacca

SEQ ID NO: 1279427 - DNA, 15 bp, Homo sapiens
gagttcatttgaacc

SEQ ID NO: 1279428 - DNA, 15 bp, Homo sapiens
tgagttcatttgaac

SEQ ID NO: 1279429 - DNA, 15 bp, Homo sapiens
ttgagttcatttgaa

SEQ ID NO: 1279430 - DNA, 15 bp, Homo sapiens
gttgagttcatttga

SEQ ID NO: 1279431 - DNA, 15 bp, Homo sapiens
agttgagttcatttg

SEQ ID NO: 1279432 - DNA, 15 bp, Homo sapiens
tagttgagttcattt

SEQ ID NO: 1279433 - DNA, 15 bp, Homo sapiens
ttagttgagttcatt

SEQ ID NO: 1279434 - DNA, 15 bp, Homo sapiens
tttagttgagttcat

SEQ ID NO: 1279435 - DNA, 15 bp, Homo sapiens
atttagttgagttca

SEQ ID NO: 1279436 - DNA, 15 bp, Homo sapiens
catttagttgagttc

SEQ ID NO: 1279437 - DNA, 15 bp, Homo sapiens
tcatttagttgagtt

SEQ ID NO: 1279438 - DNA, 15 bp, Homo sapiens
atcatttagttgagt

SEQ ID NO: 1279439 - DNA, 15 bp, Homo sapiens
catcatttagttgag

SEQ ID NO: 1279440 - DNA, 15 bp, Homo sapiens
ccatcatttagttga

SEQ ID NO: 1279441 - DNA, 15 bp, Homo sapiens
accatcatttagttg

SEQ ID NO: 1279442 - DNA, 15 bp, Homo sapiens
taccatcatttagtt

SEQ ID NO: 1279443 - DNA, 15 bp, Homo sapiens
ataccatcatttagt

SEQ ID NO: 1279444 - DNA, 15 bp, Homo sapiens
tataccatcatttag

SEQ ID NO: 1279445 - DNA, 15 bp, Homo sapiens
ttataccatcattta

SEQ ID NO: 1279446 - DNA, 15 bp, Homo sapiens
attataccatcattt

SEQ ID NO: 1279447 - DNA, 15 bp, Homo sapiens
aattataccatcatt

SEQ ID NO: 1279448 - DNA, 15 bp, Homo sapiens
caattataccatcat

SEQ ID NO: 1279449 - DNA, 15 bp, Homo sapiens
ccaattataccatca

SEQ ID NO: 1279450 - DNA, 15 bp, Homo sapiens
accaattataccatc

SEQ ID NO: 1279451 - DNA, 15 bp, Homo sapiens
taccaattataccat

SEQ ID NO: 1279452 - DNA, 15 bp, Homo sapiens
ttaccaattatacca

SEQ ID NO: 1279453 - DNA, 15 bp, Homo sapiens
attaccaattatacc

SEQ ID NO: 1279454 - DNA, 15 bp, Homo sapiens
gattaccaattatac

SEQ ID NO: 1279455 - DNA, 15 bp, Homo sapiens
agattaccaattata

SEQ ID NO: 1279456 - DNA, 15 bp, Homo sapiens
gagattaccaattat

SEQ ID NO: 1279457 - DNA, 15 bp, Homo sapiens
agagattaccaatta

SEQ ID NO: 1279458 - DNA, 15 bp, Homo sapiens
aagagattaccaatt

SEQ ID NO: 1279459 - DNA, 15 bp, Homo sapiens
gaagagattaccaat

SEQ ID NO: 1279460 - DNA, 15 bp, Homo sapiens
tgaagagattaccaa

SEQ ID NO: 1279461 - DNA, 15 bp, Homo sapiens
ttgaagagattacca

SEQ ID NO: 1279462 - DNA, 15 bp, Homo sapiens
cttgaagagattacc

SEQ ID NO: 1279463 - DNA, 15 bp, Homo sapiens
acttgaagagattac

SEQ ID NO: 1279464 - DNA, 15 bp, Homo sapiens
tacttgaagagatta

SEQ ID NO: 1279465 - DNA, 15 bp, Homo sapiens
gtacttgaagagatt

SEQ ID NO: 1279466 - DNA, 15 bp, Homo sapiens
agtacttgaagagat

SEQ ID NO: 1279467 - DNA, 15 bp, Homo sapiens
cagtacttgaagaga

SEQ ID NO: 1279468 - DNA, 15 bp, Homo sapiens
tcagtacttgaagag

SEQ ID NO: 1279469 - DNA, 15 bp, Homo sapiens
ctcagtacttgaaga

SEQ ID NO: 1279470 - DNA, 15 bp, Homo sapiens
actcagtacttgaag

SEQ ID NO: 1279471 - DNA, 15 bp, Homo sapiens
cactcagtacttgaa

SEQ ID NO: 1279472 - DNA, 15 bp, Homo sapiens
acactcagtacttga

SEQ ID NO: 1279473 - DNA, 15 bp, Homo sapiens
tacactcagtacttg

SEQ ID NO: 1279474 - DNA, 15 bp, Homo sapiens
ctacactcagtactt

SEQ ID NO: 1279475 - DNA, 15 bp, Homo sapiens
tctacactcagtact

SEQ ID NO: 1279476 - DNA, 15 bp, Homo sapiens
atctacactcagtac

SEQ ID NO: 1279477 - DNA, 15 bp, Homo sapiens
aatctacactcagta

SEQ ID NO: 1279478 - DNA, 15 bp, Homo sapiens
aaatctacactcagt

SEQ ID NO: 1279479 - DNA, 15 bp, Homo sapiens
aaaatctacactcag

SEQ ID NO: 1279480 - DNA, 15 bp, Homo sapiens
caaaatctacactca

SEQ ID NO: 1279481 - DNA, 15 bp, Homo sapiens
acaaaatctacactc

SEQ ID NO: 1279482 - DNA, 15 bp, Homo sapiens
aacaaaatctacact

SEQ ID NO: 1279483 - DNA, 15 bp, Homo sapiens
aaacaaaatctacac

SEQ ID NO: 1279484 - DNA, 15 bp, Homo sapiens
aaaacaaaatctaca

SEQ ID NO: 1279485 - DNA, 15 bp, Homo sapiens
taaaacaaaatctac

SEQ ID NO: 1279486 - DNA, 15 bp, Homo sapiens
ttaaaacaaaatcta

SEQ ID NO: 1279487 - DNA, 15 bp, Homo sapiens
tttaaaacaaaatct

SEQ ID NO: 1279488 - DNA, 15 bp, Homo sapiens
gtttaaaacaaaatc

SEQ ID NO: 1279489 - DNA, 15 bp, Homo sapiens
agtttaaaacaaaat

SEQ ID NO: 1279490 - DNA, 15 bp, Homo sapiens
cagtttaaaacaaaa

SEQ ID NO: 1279491 - DNA, 15 bp, Homo sapiens
acagtttaaaacaaa

SEQ ID NO: 1279492 - DNA, 15 bp, Homo sapiens
tacagtttaaaacaa

SEQ ID NO: 1279493 - DNA, 15 bp, Homo sapiens
ttacagtttaaaaca

SEQ ID NO: 1279494 - DNA, 15 bp, Homo sapiens
attacagtttaaaac

SEQ ID NO: 1279495 - DNA, 15 bp, Homo sapiens
cattacagtttaaaa

SEQ ID NO: 1279496 - DNA, 15 bp, Homo sapiens
acattacagtttaaa

SEQ ID NO: 1279497 - DNA, 15 bp, Homo sapiens
tacattacagtttaa

SEQ ID NO: 1279498 - DNA, 15 bp, Homo sapiens
atacattacagttta

SEQ ID NO: 1279499 - DNA, 15 bp, Homo sapiens
catacattacagttt

SEQ ID NO: 1279500 - DNA, 15 bp, Homo sapiens
acatacattacagtt

SEQ ID NO: 1279501 - DNA, 15 bp, Homo sapiens
cacatacattacagt

SEQ ID NO: 1279502 - DNA, 15 bp, Homo sapiens
tcacatacattacag

SEQ ID NO: 1279503 - DNA, 15 bp, Homo sapiens
atcacatacattaca

SEQ ID NO: 1279504 - DNA, 15 bp, Homo sapiens
aatcacatacattac

SEQ ID NO: 1279505 - DNA, 15 bp, Homo sapiens
taatcacatacatta

SEQ ID NO: 1279506 - DNA, 15 bp, Homo sapiens
ttaatcacatacatt

SEQ ID NO: 1279507 - DNA, 15 bp, Homo sapiens
tttaatcacatacat

SEQ ID NO: 1279508 - DNA, 15 bp, Homo sapiens
ttttaatcacataca

SEQ ID NO: 1279509 - DNA, 15 bp, Homo sapiens
attttaatcacatac

SEQ ID NO: 1279510 - DNA, 15 bp, Homo sapiens
aattttaatcacata

SEQ ID NO: 1279511 - DNA, 15 bp, Homo sapiens
aaattttaatcacat

SEQ ID NO: 1279512 - DNA, 15 bp, Homo sapiens
aaaattttaatcaca

SEQ ID NO: 1279513 - DNA, 15 bp, Homo sapiens
caaaattttaatcac

SEQ ID NO: 1279514 - DNA, 15 bp, Homo sapiens
tcaaaattttaatca

SEQ ID NO: 1279515 - DNA, 15 bp, Homo sapiens
atcaaaattttaatc

SEQ ID NO: 1279516 - DNA, 15 bp, Homo sapiens
tatcaaaattttaat

SEQ ID NO: 1279517 - DNA, 15 bp, Homo sapiens
ttatcaaaattttaa

SEQ ID NO: 1279518 - DNA, 15 bp, Homo sapiens
tttatcaaaatttta

SEQ ID NO: 1279519 - DNA, 15 bp, Homo sapiens
ctttatcaaaatttt

SEQ ID NO: 1279520 - DNA, 15 bp, Homo sapiens
tctttatcaaaattt

SEQ ID NO: 1279521 - DNA, 15 bp, Homo sapiens
atctttatcaaaatt

SEQ ID NO: 1279522 - DNA, 15 bp, Homo sapiens
aatctttatcaaaat

SEQ ID NO: 1279523 - DNA, 15 bp, Homo sapiens
aaatctttatcaaaa

SEQ ID NO: 1279524 - DNA, 15 bp, Homo sapiens
aaaatctttatcaaa

SEQ ID NO: 1279525 - DNA, 15 bp, Homo sapiens
aaaaatctttatcaa

SEQ ID NO: 1279526 - DNA, 15 bp, Homo sapiens
gaaaaatctttatca

SEQ ID NO: 1279527 - DNA, 15 bp, Homo sapiens
agaaaaatctttatc

SEQ ID NO: 1279528 - DNA, 15 bp, Homo sapiens
gagaaaaatctttat

SEQ ID NO: 1279529 - DNA, 15 bp, Homo sapiens
cgagaaaaatcttta

SEQ ID NO: 1279530 - DNA, 15 bp, Homo sapiens
tcgagaaaaatcttt

SEQ ID NO: 1279531 - DNA, 15 bp, Homo sapiens
ctcgagaaaaatctt

SEQ ID NO: 1279532 - DNA, 15 bp, Homo sapiens
actcgagaaaaatct

SEQ ID NO: 1279533 - DNA, 15 bp, Homo sapiens
tactcgagaaaaatc

SEQ ID NO: 1279534 - DNA, 15 bp, Homo sapiens
atactcgagaaaaat

SEQ ID NO: 1279535 - DNA, 15 bp, Homo sapiens
aatactcgagaaaaa

SEQ ID NO: 1279536 - DNA, 15 bp, Homo sapiens
aaatactcgagaaaa

SEQ ID NO: 1279537 - DNA, 15 bp, Homo sapiens
gaaatactcgagaaa

SEQ ID NO: 1279538 - DNA, 15 bp, Homo sapiens
agaaatactcgagaa

SEQ ID NO: 1279539 - DNA, 15 bp, Homo sapiens
tagaaatactcgaga

SEQ ID NO: 1279540 - DNA, 15 bp, Homo sapiens
ttagaaatactcgag

SEQ ID NO: 1279541 - DNA, 15 bp, Homo sapiens
attagaaatactcga

SEQ ID NO: 1279542 - DNA, 15 bp, Homo sapiens
aattagaaatactcg

SEQ ID NO: 1279543 - DNA, 15 bp, Homo sapiens
aaattagaaatactc

SEQ ID NO: 1279544 - DNA, 15 bp, Homo sapiens
aaaattagaaatact

SEQ ID NO: 1279545 - DNA, 15 bp, Homo sapiens
aaaaattagaaatac

SEQ ID NO: 1279546 - DNA, 15 bp, Homo sapiens
gaaaaattagaaata

SEQ ID NO: 1279547 - DNA, 15 bp, Homo sapiens
agaaaaattagaaat

SEQ ID NO: 1279548 - DNA, 15 bp, Homo sapiens
gagaaaaattagaaa

SEQ ID NO: 1279549 - DNA, 15 bp, Homo sapiens
agagaaaaattagaa

SEQ ID NO: 1279550 - DNA, 15 bp, Homo sapiens
gagagaaaaattaga

SEQ ID NO: 1279551 - DNA, 15 bp, Homo sapiens
agagagaaaaattag

SEQ ID NO: 1279552 - DNA, 15 bp, Homo sapiens
gagagagaaaaatta

SEQ ID NO: 1279553 - DNA, 15 bp, Homo sapiens
ggagagagaaaaatt

SEQ ID NO: 1279554 - DNA, 15 bp, Homo sapiens
aggagagagaaaaat

SEQ ID NO: 1279555 - DNA, 15 bp, Homo sapiens
gcaggagagagaaaa

SEQ ID NO: 1279556 - DNA, 15 bp, Homo sapiens
agcaggagagagaaa

SEQ ID NO: 1279557 - DNA, 15 bp, Homo sapiens
aagcaggagagagaa

SEQ ID NO: 1279558 - DNA, 15 bp, Homo sapiens
aaagcaggagagaga

SEQ ID NO: 1279559 - DNA, 15 bp, Homo sapiens
taaagcaggagagag

SEQ ID NO: 1279560 - DNA, 15 bp, Homo sapiens
ataaagcaggagaga

SEQ ID NO: 1279561 - DNA, 15 bp, Homo sapiens
cataaagcaggagag

SEQ ID NO: 1279562 - DNA, 15 bp, Homo sapiens
acataaagcaggaga

SEQ ID NO: 1279563 - DNA, 15 bp, Homo sapiens
tacataaagcaggag

SEQ ID NO: 1279564 - DNA, 15 bp, Homo sapiens
ttacataaagcagga

SEQ ID NO: 1279565 - DNA, 15 bp, Homo sapiens
tttacataaagcagg

SEQ ID NO: 1279566 - DNA, 15 bp, Homo sapiens
atttacataaagcag

SEQ ID NO: 1279567 - DNA, 15 bp, Homo sapiens
catttacataaagca

SEQ ID NO: 1279568 - DNA, 15 bp, Homo sapiens
acatttacataaagc

SEQ ID NO: 1279569 - DNA, 15 bp, Homo sapiens
tacatttacataaag

SEQ ID NO: 1279570 - DNA, 15 bp, Homo sapiens
ctacatttacataaa

SEQ ID NO: 1279571 - DNA, 15 bp, Homo sapiens
gctacatttacataa

SEQ ID NO: 1279572 - DNA, 15 bp, Homo sapiens
tgctacatttacata

SEQ ID NO: 1279573 - DNA, 15 bp, Homo sapiens
gtgctacatttacat

SEQ ID NO: 1279574 - DNA, 15 bp, Homo sapiens
agtgctacatttaca

SEQ ID NO: 1279575 - DNA, 15 bp, Homo sapiens
aagtgctacatttac

SEQ ID NO: 1279576 - DNA, 15 bp, Homo sapiens
taagtgctacattta

SEQ ID NO: 1279577 - DNA, 15 bp, Homo sapiens
ataagtgctacattt

SEQ ID NO: 1279578 - DNA, 15 bp, Homo sapiens
aataagtgctacatt

SEQ ID NO: 1279579 - DNA, 15 bp, Homo sapiens
caataagtgctacat

SEQ ID NO: 1279580 - DNA, 15 bp, Homo sapiens
tcaataagtgctaca

SEQ ID NO: 1279581 - DNA, 15 bp, Homo sapiens
gtcaataagtgctac

SEQ ID NO: 1279582 - DNA, 15 bp, Homo sapiens
agtcaataagtgcta

SEQ ID NO: 1279583 - DNA, 15 bp, Homo sapiens
aagtcaataagtgct

SEQ ID NO: 1279584 - DNA, 15 bp, Homo sapiens
aaagtcaataagtgc

SEQ ID NO: 1279585 - DNA, 15 bp, Homo sapiens
aaaagtcaataagtg

SEQ ID NO: 1279586 - DNA, 15 bp, Homo sapiens
gaaaagtcaataagt

SEQ ID NO: 1279587 - DNA, 15 bp, Homo sapiens
agaaaagtcaataag

SEQ ID NO: 1279588 - DNA, 15 bp, Homo sapiens
gagaaaagtcaataa

SEQ ID NO: 1279589 - DNA, 15 bp, Homo sapiens
ggagaaaagtcaata

SEQ ID NO: 1279590 - DNA, 15 bp, Homo sapiens
aggagaaaagtcaat

SEQ ID NO: 1279591 - DNA, 15 bp, Homo sapiens
taggagaaaagtcaa

SEQ ID NO: 1279592 - DNA, 15 bp, Homo sapiens
ataggagaaaagtca

SEQ ID NO: 1279593 - DNA, 15 bp, Homo sapiens
aataggagaaaagtc

SEQ ID NO: 1279594 - DNA, 15 bp, Homo sapiens
aaataggagaaaagt

SEQ ID NO: 1279595 - DNA, 15 bp, Homo sapiens
aaaataggagaaaag

SEQ ID NO: 1279596 - DNA, 15 bp, Homo sapiens
taaaataggagaaaa

SEQ ID NO: 1279597 - DNA, 15 bp, Homo sapiens
gtaaaataggagaaa

SEQ ID NO: 1279598 - DNA, 15 bp, Homo sapiens
tgtaaaataggagaa

SEQ ID NO: 1279599 - DNA, 15 bp, Homo sapiens
ttgtaaaataggaga

SEQ ID NO: 1279600 - DNA, 15 bp, Homo sapiens
attgtaaaataggag

SEQ ID NO: 1279601 - DNA, 15 bp, Homo sapiens
aattgtaaaatagga

SEQ ID NO: 1279602 - DNA, 15 bp, Homo sapiens
caattgtaaaatagg

SEQ ID NO: 1279603 - DNA, 15 bp, Homo sapiens
acaattgtaaaatag

SEQ ID NO: 1279604 - DNA, 15 bp, Homo sapiens
tacaattgtaaaata

SEQ ID NO: 1279605 - DNA, 15 bp, Homo sapiens
ctacaattgtaaaat

SEQ ID NO: 1279606 - DNA, 15 bp, Homo sapiens
tctacaattgtaaaa

SEQ ID NO: 1279607 - DNA, 15 bp, Homo sapiens
atctacaattgtaaa

SEQ ID NO: 1279608 - DNA, 15 bp, Homo sapiens
tatctacaattgtaa

SEQ ID NO: 1279609 - DNA, 15 bp, Homo sapiens
ttatctacaattgta

SEQ ID NO: 1279610 - DNA, 15 bp, Homo sapiens
attatctacaattgt

SEQ ID NO: 1279611 - DNA, 15 bp, Homo sapiens
aattatctacaattg

SEQ ID NO: 1279612 - DNA, 15 bp, Homo sapiens
aaattatctacaatt

SEQ ID NO: 1279613 - DNA, 15 bp, Homo sapiens
taaattatctacaat

SEQ ID NO: 1279614 - DNA, 15 bp, Homo sapiens
ttaaattatctacaa

SEQ ID NO: 1279615 - DNA, 15 bp, Homo sapiens
tttaaattatctaca

SEQ ID NO: 1279616 - DNA, 15 bp, Homo sapiens
ttttaaattatctac

SEQ ID NO: 1279617 - DNA, 15 bp, Homo sapiens
tttttaaattatcta

SEQ ID NO: 1279618 - DNA, 15 bp, Homo sapiens
attttttaaattatc

SEQ ID NO: 1279619 - DNA, 15 bp, Homo sapiens
cattttttaaattat

SEQ ID NO: 1279620 - DNA, 15 bp, Homo sapiens
acattttttaaatta

SEQ ID NO: 1279621 - DNA, 15 bp, Homo sapiens
tacattttttaaatt

SEQ ID NO: 1279622 - DNA, 15 bp, Homo sapiens
atacattttttaaat

SEQ ID NO: 1279623 - DNA, 15 bp, Homo sapiens
catacattttttaaa

SEQ ID NO: 1279624 - DNA, 15 bp, Homo sapiens
gcatacattttttaa

SEQ ID NO: 1279625 - DNA, 15 bp, Homo sapiens
tgcatacatttttta

SEQ ID NO: 1279626 - DNA, 15 bp, Homo sapiens
ctgcatacatttttt

SEQ ID NO: 1279627 - DNA, 15 bp, Homo sapiens
cctgcatacattttt

SEQ ID NO: 1279628 - DNA, 15 bp, Homo sapiens
tcctgcatacatttt

SEQ ID NO: 1279629 - DNA, 15 bp, Homo sapiens
atcctgcatacattt

SEQ ID NO: 1279630 - DNA, 15 bp, Homo sapiens
aatcctgcatacatt

SEQ ID NO: 1279631 - DNA, 15 bp, Homo sapiens
taatcctgcatacat

SEQ ID NO: 1279632 - DNA, 15 bp, Homo sapiens
ttaatcctgcataca

SEQ ID NO: 1279633 - DNA, 15 bp, Homo sapiens
attaatcctgcatac

SEQ ID NO: 1279634 - DNA, 15 bp, Homo sapiens
tattaatcctgcata

SEQ ID NO: 1279635 - DNA, 15 bp, Homo sapiens
ttattaatcctgcat

SEQ ID NO: 1279636 - DNA, 15 bp, Homo sapiens
cttattaatcctgca

SEQ ID NO: 1279637 - DNA, 15 bp, Homo sapiens
ccttattaatcctgc

SEQ ID NO: 1279638 - DNA, 15 bp, Homo sapiens
tccttattaatcctg

SEQ ID NO: 1279639 - DNA, 15 bp, Homo sapiens
ttccttattaatcct

SEQ ID NO: 1279640 - DNA, 15 bp, Homo sapiens
tttccttattaatcc

SEQ ID NO: 1279641 - DNA, 15 bp, Homo sapiens
ttttccttattaatc

SEQ ID NO: 1279642 - DNA, 15 bp, Homo sapiens
attttccttattaat

SEQ ID NO: 1279643 - DNA, 15 bp, Homo sapiens
cattttccttattaa

SEQ ID NO: 1279644 - DNA, 15 bp, Homo sapiens
tcattttccttatta

SEQ ID NO: 1279645 - DNA, 15 bp, Homo sapiens
ttcattttccttatt

SEQ ID NO: 1279646 - DNA, 15 bp, Homo sapiens
tttcattttccttat

SEQ ID NO: 1279647 - DNA, 15 bp, Homo sapiens
ttttcattttcctta

SEQ ID NO: 1279648 - DNA, 15 bp, Homo sapiens
gttttcattttcctt

SEQ ID NO: 1279649 - DNA, 15 bp, Homo sapiens
agttttcattttcct

SEQ ID NO: 1279650 - DNA, 15 bp, Homo sapiens
cagttttcattttcc

SEQ ID NO: 1279651 - DNA, 15 bp, Homo sapiens
acagttttcattttc

SEQ ID NO: 1279652 - DNA, 15 bp, Homo sapiens
aacagttttcatttt

SEQ ID NO: 1279653 - DNA, 15 bp, Homo sapiens
gaacagttttcattt

SEQ ID NO: 1279654 - DNA, 15 bp, Homo sapiens
cgaacagttttcatt

SEQ ID NO: 1279655 - DNA, 15 bp, Homo sapiens
acgaacagttttcat

SEQ ID NO: 1279656 - DNA, 15 bp, Homo sapiens
tacgaacagttttca

SEQ ID NO: 1279657 - DNA, 15 bp, Homo sapiens
ttacgaacagttttc

SEQ ID NO: 1279658 - DNA, 15 bp, Homo sapiens
attacgaacagtttt

SEQ ID NO: 1279659 - DNA, 15 bp, Homo sapiens
gattacgaacagttt

SEQ ID NO: 1279660 - DNA, 15 bp, Homo sapiens
ggattacgaacagtt

SEQ ID NO: 1279661 - DNA, 15 bp, Homo sapiens
aggattacgaacagt

SEQ ID NO: 1279662 - DNA, 15 bp, Homo sapiens
taggattacgaacag

SEQ ID NO: 1279663 - DNA, 15 bp, Homo sapiens
gtaggattacgaaca

SEQ ID NO: 1279664 - DNA, 15 bp, Homo sapiens
ggtaggattacgaac

SEQ ID NO: 1279665 - DNA, 15 bp, Homo sapiens
tggtaggattacgaa

SEQ ID NO: 1279666 - DNA, 15 bp, Homo sapiens
atggtaggattacga

SEQ ID NO: 1279667 - DNA, 15 bp, Homo sapiens
catggtaggattacg

SEQ ID NO: 1279668 - DNA, 15 bp, Homo sapiens
acatggtaggattac

SEQ ID NO: 1279669 - DNA, 15 bp, Homo sapiens
tacatggtaggatta

SEQ ID NO: 1279670 - DNA, 15 bp, Homo sapiens
ctacatggtaggatt

SEQ ID NO: 1279671 - DNA, 15 bp, Homo sapiens
tctacatggtaggat

SEQ ID NO: 1279672 - DNA, 15 bp, Homo sapiens
ctctacatggtagga

SEQ ID NO: 1279673 - DNA, 15 bp, Homo sapiens
tctctacatggtagg

SEQ ID NO: 1279674 - DNA, 15 bp, Homo sapiens
atctctacatggtag

SEQ ID NO: 1279675 - DNA, 15 bp, Homo sapiens
tatctctacatggta

SEQ ID NO: 1279676 - DNA, 15 bp, Homo sapiens
ttatctctacatggt

SEQ ID NO: 1279677 - DNA, 15 bp, Homo sapiens
attatctctacatgg

SEQ ID NO: 1279678 - DNA, 15 bp, Homo sapiens
gattatctctacatg

SEQ ID NO: 1279679 - DNA, 15 bp, Homo sapiens
cgattatctctacat

SEQ ID NO: 1279680 - DNA, 15 bp, Homo sapiens
acgattatctctaca

SEQ ID NO: 1279681 - DNA, 15 bp, Homo sapiens
cacgattatctctac

SEQ ID NO: 1279682 - DNA, 15 bp, Homo sapiens
tcacgattatctcta

SEQ ID NO: 1279683 - DNA, 15 bp, Homo sapiens
ttcacgattatctct

SEQ ID NO: 1279684 - DNA, 15 bp, Homo sapiens
gttcacgattatctc

SEQ ID NO: 1279685 - DNA, 15 bp, Homo sapiens
tgttcacgattatct

SEQ ID NO: 1279686 - DNA, 15 bp, Homo sapiens
atgttcacgattatc

SEQ ID NO: 1279687 - DNA, 15 bp, Homo sapiens
aatgttcacgattat

SEQ ID NO: 1279688 - DNA, 15 bp, Homo sapiens
aaatgttcacgatta

SEQ ID NO: 1279689 - DNA, 15 bp, Homo sapiens
aaaatgttcacgatt

SEQ ID NO: 1279690 - DNA, 15 bp, Homo sapiens
taaaatgttcacgat

SEQ ID NO: 1279691 - DNA, 15 bp, Homo sapiens
ttaaaatgttcacga

SEQ ID NO: 1279692 - DNA, 15 bp, Homo sapiens
attaaaatgttcacg

SEQ ID NO: 1279693 - DNA, 15 bp, Homo sapiens
tattaaaatgttcac

SEQ ID NO: 1279694 - DNA, 15 bp, Homo sapiens
atattaaaatgttca

SEQ ID NO: 1279695 - DNA, 15 bp, Homo sapiens
tatattaaaatgttc

SEQ ID NO: 1279696 - DNA, 15 bp, Homo sapiens
atatattaaaatgtt

SEQ ID NO: 1279697 - DNA, 15 bp, Homo sapiens
tatatattaaaatgt

SEQ ID NO: 1279698 - DNA, 15 bp, Homo sapiens
atatatattaaaatg

SEQ ID NO: 1279699 - DNA, 15 bp, Homo sapiens
aatatatattaaaat

SEQ ID NO: 1279700 - DNA, 15 bp, Homo sapiens
aaatatatattaaaa

SEQ ID NO: 1279701 - DNA, 15 bp, Homo sapiens
aaaatatatattaaa

SEQ ID NO: 1279702 - DNA, 15 bp, Homo sapiens
gaaaatatatattaa

SEQ ID NO: 1279703 - DNA, 15 bp, Homo sapiens
tgaaaatatatatta

SEQ ID NO: 1279704 - DNA, 15 bp, Homo sapiens
atgaaaatatatatt

SEQ ID NO: 1279705 - DNA, 15 bp, Homo sapiens
aatgaaaatatatat

SEQ ID NO: 1279706 - DNA, 15 bp, Homo sapiens
aaatgaaaatatata

SEQ ID NO: 1279707 - DNA, 15 bp, Homo sapiens
aaaatgaaaatatat

SEQ ID NO: 1279708 - DNA, 15 bp, Homo sapiens
gaaaatgaaaatata

SEQ ID NO: 1279709 - DNA, 15 bp, Homo sapiens
agaaaatgaaaatat

SEQ ID NO: 1279710 - DNA, 15 bp, Homo sapiens
aagagaaaatgaaaa

SEQ ID NO: 1279711 - DNA, 15 bp, Homo sapiens
gaagagaaaatgaaa

SEQ ID NO: 1279712 - DNA, 15 bp, Homo sapiens
agaagagaaaatgaa

SEQ ID NO: 1279713 - DNA, 15 bp, Homo sapiens
aagaagagaaaatga

SEQ ID NO: 1279714 - DNA, 15 bp, Homo sapiens
aaagaagagaaaatg

SEQ ID NO: 1279715 - DNA, 15 bp, Homo sapiens
aaaagaagagaaaat

SEQ ID NO: 1279716 - DNA, 15 bp, Homo sapiens
aaaaagaagagaaaa

SEQ ID NO: 1279717 - DNA, 15 bp, Homo sapiens
aaaaaagaagagaaa

SEQ ID NO: 1279718 - DNA, 15 bp, Homo sapiens
caaaaaagaagagaa

SEQ ID NO: 1279719 - DNA, 15 bp, Homo sapiens
acaaaaaagaagaga

SEQ ID NO: 1279720 - DNA, 15 bp, Homo sapiens
aacaaaaaagaagag

SEQ ID NO: 1279721 - DNA, 15 bp, Homo sapiens
aaaaacaaaaaagaa

SEQ ID NO: 1279722 - DNA, 15 bp, Homo sapiens
aaaaaacaaaaaaga

SEQ ID NO: 1279723 - DNA, 15 bp, Homo sapiens
gaaaaaacaaaaaag

SEQ ID NO: 1279724 - DNA, 15 bp, Homo sapiens
tgaaaaaacaaaaaa

SEQ ID NO: 1279725 - DNA, 15 bp, Homo sapiens
gtgaaaaaacaaaaa

SEQ ID NO: 1279726 - DNA, 15 bp, Homo sapiens
tgtgaaaaaacaaaa

SEQ ID NO: 1279727 - DNA, 15 bp, Homo sapiens
ttgtgaaaaaacaaa

SEQ ID NO: 1279728 - DNA, 15 bp, Homo sapiens
tttgtgaaaaaacaa

SEQ ID NO: 1279729 - DNA, 15 bp, Homo sapiens
ttttgtgaaaaaaca

SEQ ID NO: 1279730 - DNA, 15 bp, Homo sapiens
attttgtgaaaaaac

SEQ ID NO: 1279731 - DNA, 15 bp, Homo sapiens
aattttgtgaaaaaa

SEQ ID NO: 1279732 - DNA, 15 bp, Homo sapiens
caattttgtgaaaaa

SEQ ID NO: 1279733 - DNA, 15 bp, Homo sapiens
ccaattttgtgaaaa

SEQ ID NO: 1279734 - DNA, 15 bp, Homo sapiens
tccaattttgtgaaa

SEQ ID NO: 1279735 - DNA, 15 bp, Homo sapiens
ttccaattttgtgaa

SEQ ID NO: 1279736 - DNA, 15 bp, Homo sapiens
attccaattttgtga

SEQ ID NO: 1279737 - DNA, 15 bp, Homo sapiens
gattccaattttgtg

SEQ ID NO: 1279738 - DNA, 15 bp, Homo sapiens
tgattccaattttgt

SEQ ID NO: 1279739 - DNA, 15 bp, Homo sapiens
ttgattccaattttg

SEQ ID NO: 1279740 - DNA, 15 bp, Homo sapiens
tttgattccaatttt

SEQ ID NO: 1279741 - DNA, 15 bp, Homo sapiens
ttttgattccaattt

SEQ ID NO: 1279742 - DNA, 15 bp, Homo sapiens
attttgattccaatt

SEQ ID NO: 1279743 - DNA, 15 bp, Homo sapiens
tattttgattccaat

SEQ ID NO: 1279744 - DNA, 15 bp, Homo sapiens
atattttgattccaa

SEQ ID NO: 1279745 - DNA, 15 bp, Homo sapiens
catattttgattcca

SEQ ID NO: 1279746 - DNA, 15 bp, Homo sapiens
acatattttgattcc

SEQ ID NO: 1279747 - DNA, 15 bp, Homo sapiens
cacatattttgattc

SEQ ID NO: 1279748 - DNA, 15 bp, Homo sapiens
gcacatattttgatt

SEQ ID NO: 1279749 - DNA, 15 bp, Homo sapiens
tgcacatattttgat

SEQ ID NO: 1279750 - DNA, 15 bp, Homo sapiens
ctgcacatattttga

SEQ ID NO: 1279751 - DNA, 15 bp, Homo sapiens
tctgcacatattttg

SEQ ID NO: 1279752 - DNA, 15 bp, Homo sapiens
ttctgcacatatttt

SEQ ID NO: 1279753 - DNA, 15 bp, Homo sapiens
gttctgcacatattt

SEQ ID NO: 1279754 - DNA, 15 bp, Homo sapiens
agttctgcacatatt

SEQ ID NO: 1279755 - DNA, 15 bp, Homo sapiens
aagttctgcacatat

SEQ ID NO: 1279756 - DNA, 15 bp, Homo sapiens
aaagttctgcacata

SEQ ID NO: 1279757 - DNA, 15 bp, Homo sapiens
aaaagttctgcacat

SEQ ID NO: 1279758 - DNA, 15 bp, Homo sapiens
aaaaagttctgcaca

SEQ ID NO: 1279759 - DNA, 15 bp, Homo sapiens
taaaaagttctgcac

SEQ ID NO: 1279760 - DNA, 15 bp, Homo sapiens
ataaaaagttctgca

SEQ ID NO: 1279761 - DNA, 15 bp, Homo sapiens
aataaaaagttctgc

SEQ ID NO: 1279762 - DNA, 15 bp, Homo sapiens
gaataaaaagttctg

SEQ ID NO: 1279763 - DNA, 15 bp, Homo sapiens
agaataaaaagttct

SEQ ID NO: 1279764 - DNA, 15 bp, Homo sapiens
cagaataaaaagttc

SEQ ID NO: 1279765 - DNA, 15 bp, Homo sapiens
acagaataaaaagtt

SEQ ID NO: 1279766 - DNA, 15 bp, Homo sapiens
aacagaataaaaagt

SEQ ID NO: 1279767 - DNA, 15 bp, Homo sapiens
aaacagaataaaaag

SEQ ID NO: 1279768 - DNA, 15 bp, Homo sapiens
aaaaacagaataaaa

SEQ ID NO: 1279769 - DNA, 15 bp, Homo sapiens
aaaaaacagaataaa

SEQ ID NO: 1279770 - DNA, 15 bp, Homo sapiens
aaaaaaacagaataa

SEQ ID NO: 1279771 - DNA, 15 bp, Homo sapiens
gaaaaaaacagaata

SEQ ID NO: 1279772 - DNA, 15 bp, Homo sapiens
agaaaaaaacagaat

SEQ ID NO: 1279773 - DNA, 15 bp, Homo sapiens
taagaaaaaaacaga

SEQ ID NO: 1279774 - DNA, 15 bp, Homo sapiens
ttaagaaaaaaacag

SEQ ID NO: 1279775 - DNA, 15 bp, Homo sapiens
gttaagaaaaaaaca

SEQ ID NO: 1279776 - DNA, 15 bp, Homo sapiens
cgttaagaaaaaaac

SEQ ID NO: 1279777 - DNA, 15 bp, Homo sapiens
acgttaagaaaaaaa

SEQ ID NO: 1279778 - DNA, 15 bp, Homo sapiens
aacgttaagaaaaaa

SEQ ID NO: 1279779 - DNA, 15 bp, Homo sapiens
taacgttaagaaaaa

SEQ ID NO: 1279780 - DNA, 15 bp, Homo sapiens
ataacgttaagaaaa

SEQ ID NO: 1279781 - DNA, 15 bp, Homo sapiens
tataacgttaagaaa

SEQ ID NO: 1279782 - DNA, 15 bp, Homo sapiens
atataacgttaagaa

SEQ ID NO: 1279783 - DNA, 15 bp, Homo sapiens
catataacgttaaga

SEQ ID NO: 1279784 - DNA, 15 bp, Homo sapiens
acatataacgttaag

SEQ ID NO: 1279785 - DNA, 15 bp, Homo sapiens
aacatataacgttaa

SEQ ID NO: 1279786 - DNA, 15 bp, Homo sapiens
caacatataacgtta

SEQ ID NO: 1279787 - DNA, 15 bp, Homo sapiens
ccaacatataacgtt

SEQ ID NO: 1279788 - DNA, 15 bp, Homo sapiens
cccaacatataacgt

SEQ ID NO: 1279789 - DNA, 15 bp, Homo sapiens
acccaacatataacg

SEQ ID NO: 1279790 - DNA, 15 bp, Homo sapiens
tacccaacatataac

SEQ ID NO: 1279791 - DNA, 15 bp, Homo sapiens
atacccaacatataa

SEQ ID NO: 1279792 - DNA, 15 bp, Homo sapiens
aatacccaacatata

SEQ ID NO: 1279793 - DNA, 15 bp, Homo sapiens
aaatacccaacatat

SEQ ID NO: 1279794 - DNA, 15 bp, Homo sapiens
aaaatacccaacata

SEQ ID NO: 1279795 - DNA, 15 bp, Homo sapiens
aaaaatacccaacat

SEQ ID NO: 1279796 - DNA, 15 bp, Homo sapiens
taaaaatacccaaca

SEQ ID NO: 1279797 - DNA, 15 bp, Homo sapiens
gtaaaaatacccaac

SEQ ID NO: 1279798 - DNA, 15 bp, Homo sapiens
tgtaaaaatacccaa

SEQ ID NO: 1279799 - DNA, 15 bp, Homo sapiens
atgtaaaaataccca

SEQ ID NO: 1279800 - DNA, 15 bp, Homo sapiens
tatgtaaaaataccc

SEQ ID NO: 1279801 - DNA, 15 bp, Homo sapiens
atatgtaaaaatacc

SEQ ID NO: 1279802 - DNA, 15 bp, Homo sapiens
gatatgtaaaaatac

SEQ ID NO: 1279803 - DNA, 15 bp, Homo sapiens
ggatatgtaaaaata

SEQ ID NO: 1279804 - DNA, 15 bp, Homo sapiens
gggatatgtaaaaat

SEQ ID NO: 1279805 - DNA, 15 bp, Homo sapiens
agggatatgtaaaaa

SEQ ID NO: 1279806 - DNA, 15 bp, Homo sapiens
aagggatatgtaaaa

SEQ ID NO: 1279807 - DNA, 15 bp, Homo sapiens
aaagggatatgtaaa

SEQ ID NO: 1279808 - DNA, 15 bp, Homo sapiens
taaagggatatgtaa

SEQ ID NO: 1279809 - DNA, 15 bp, Homo sapiens
ttaaagggatatgta

SEQ ID NO: 1279810 - DNA, 15 bp, Homo sapiens
attaaagggatatgt

SEQ ID NO: 1279811 - DNA, 15 bp, Homo sapiens
tattaaagggatatg

SEQ ID NO: 1279812 - DNA, 15 bp, Homo sapiens
atattaaagggatat

SEQ ID NO: 1279813 - DNA, 15 bp, Homo sapiens
aatattaaagggata

SEQ ID NO: 1279814 - DNA, 15 bp, Homo sapiens
gaatattaaagggat

SEQ ID NO: 1279815 - DNA, 15 bp, Homo sapiens
ggaatattaaaggga

SEQ ID NO: 1279816 - DNA, 15 bp, Homo sapiens
aggaatattaaaggg

SEQ ID NO: 1279817 - DNA, 15 bp, Homo sapiens
aaggaatattaaagg

SEQ ID NO: 1279818 - DNA, 15 bp, Homo sapiens
caaggaatattaaag

SEQ ID NO: 1279819 - DNA, 15 bp, Homo sapiens
tcaaggaatattaaa

SEQ ID NO: 1279820 - DNA, 15 bp, Homo sapiens
ttcaaggaatattaa

SEQ ID NO: 1279821 - DNA, 15 bp, Homo sapiens
tttcaaggaatatta

SEQ ID NO: 1279822 - DNA, 15 bp, Homo sapiens
gtttcaaggaatatt

SEQ ID NO: 1279823 - DNA, 15 bp, Homo sapiens
agtttcaaggaatat

SEQ ID NO: 1279824 - DNA, 15 bp, Homo sapiens
cagtttcaaggaata

SEQ ID NO: 1279825 - DNA, 15 bp, Homo sapiens
acagtttcaaggaat

SEQ ID NO: 1279826 - DNA, 15 bp, Homo sapiens
aacagtttcaaggaa

SEQ ID NO: 1279827 - DNA, 15 bp, Homo sapiens
aaacagtttcaagga

SEQ ID NO: 1279828 - DNA, 15 bp, Homo sapiens
aaaacagtttcaagg

SEQ ID NO: 1279829 - DNA, 15 bp, Homo sapiens
caaaacagtttcaag

SEQ ID NO: 1279830 - DNA, 15 bp, Homo sapiens
ccaaaacagtttcaa

SEQ ID NO: 1279831 - DNA, 15 bp, Homo sapiens
cccaaaacagtttca

SEQ ID NO: 1279832 - DNA, 15 bp, Homo sapiens
acccaaaacagtttc

SEQ ID NO: 1279833 - DNA, 15 bp, Homo sapiens
aacccaaaacagttt

SEQ ID NO: 1279834 - DNA, 15 bp, Homo sapiens
aaacccaaaacagtt

SEQ ID NO: 1279835 - DNA, 15 bp, Homo sapiens
aaaacccaaaacagt

SEQ ID NO: 1279836 - DNA, 15 bp, Homo sapiens
aaaaacccaaaacag

SEQ ID NO: 1279837 - DNA, 15 bp, Homo sapiens
taaaaacccaaaaca

SEQ ID NO: 1279838 - DNA, 15 bp, Homo sapiens
ataaaaacccaaaac

SEQ ID NO: 1279839 - DNA, 15 bp, Homo sapiens
tataaaaacccaaaa

SEQ ID NO: 1279840 - DNA, 15 bp, Homo sapiens
atataaaaacccaaa

SEQ ID NO: 1279841 - DNA, 15 bp, Homo sapiens
aatataaaaacccaa

SEQ ID NO: 1279842 - DNA, 15 bp, Homo sapiens
taatataaaaaccca

SEQ ID NO: 1279843 - DNA, 15 bp, Homo sapiens
ataatataaaaaccc

SEQ ID NO: 1279844 - DNA, 15 bp, Homo sapiens
aataatataaaaacc

SEQ ID NO: 1279845 - DNA, 15 bp, Homo sapiens
gaataatataaaaac

SEQ ID NO: 1279846 - DNA, 15 bp, Homo sapiens
agaataatataaaaa

SEQ ID NO: 1279847 - DNA, 15 bp, Homo sapiens
tagaataatataaaa

SEQ ID NO: 1279848 - DNA, 15 bp, Homo sapiens
atagaataatataaa

SEQ ID NO: 1279849 - DNA, 15 bp, Homo sapiens
catagaataatataa

SEQ ID NO: 1279850 - DNA, 15 bp, Homo sapiens
tcatagaataatata

SEQ ID NO: 1279851 - DNA, 15 bp, Homo sapiens
atcatagaataatat

SEQ ID NO: 1279852 - DNA, 15 bp, Homo sapiens
tatcatagaataata

SEQ ID NO: 1279853 - DNA, 15 bp, Homo sapiens
atatcatagaataat

SEQ ID NO: 1279854 - DNA, 15 bp, Homo sapiens
tatatcatagaataa

SEQ ID NO: 1279855 - DNA, 15 bp, Homo sapiens
ctatatcatagaata

SEQ ID NO: 1279856 - DNA, 15 bp, Homo sapiens
gctatatcatagaat

SEQ ID NO: 1279857 - DNA, 15 bp, Homo sapiens
agctatatcatagaa

SEQ ID NO: 1279858 - DNA, 15 bp, Homo sapiens
gagctatatcataga

SEQ ID NO: 1279859 - DNA, 15 bp, Homo sapiens
agagctatatcatag

SEQ ID NO: 1279860 - DNA, 15 bp, Homo sapiens
tagagctatatcata

SEQ ID NO: 1279861 - DNA, 15 bp, Homo sapiens
atagagctatatcat

SEQ ID NO: 1279862 - DNA, 15 bp, Homo sapiens
gatagagctatatca

SEQ ID NO: 1279863 - DNA, 15 bp, Homo sapiens
tgatagagctatatc

SEQ ID NO: 1279864 - DNA, 15 bp, Homo sapiens
gtgatagagctatat

SEQ ID NO: 1279865 - DNA, 15 bp, Homo sapiens
tgtgatagagctata

SEQ ID NO: 1279866 - DNA, 15 bp, Homo sapiens
ttgtgatagagctat

SEQ ID NO: 1279867 - DNA, 15 bp, Homo sapiens
attgtgatagagcta

SEQ ID NO: 1279868 - DNA, 15 bp, Homo sapiens
tattgtgatagagct

SEQ ID NO: 1279869 - DNA, 15 bp, Homo sapiens
atattgtgatagagc

SEQ ID NO: 1279870 - DNA, 15 bp, Homo sapiens
catattgtgatagag

SEQ ID NO: 1279871 - DNA, 15 bp, Homo sapiens
acatattgtgataga

SEQ ID NO: 1279872 - DNA, 15 bp, Homo sapiens
aacatattgtgatag

SEQ ID NO: 1279873 - DNA, 15 bp, Homo sapiens
aaacatattgtgata

SEQ ID NO: 1279874 - DNA, 15 bp, Homo sapiens
taaacatattgtgat

SEQ ID NO: 1279875 - DNA, 15 bp, Homo sapiens
ttaaacatattgtga

SEQ ID NO: 1279876 - DNA, 15 bp, Homo sapiens
gttaaacatattgtg

SEQ ID NO: 1279877 - DNA, 15 bp, Homo sapiens
ggttaaacatattgt

SEQ ID NO: 1279878 - DNA, 15 bp, Homo sapiens
tggttaaacatattg

SEQ ID NO: 1279879 - DNA, 15 bp, Homo sapiens
atggttaaacatatt

SEQ ID NO: 1279880 - DNA, 15 bp, Homo sapiens
aatggttaaacatat

SEQ ID NO: 1279881 - DNA, 15 bp, Homo sapiens
gaatggttaaacata

SEQ ID NO: 1279882 - DNA, 15 bp, Homo sapiens
agaatggttaaacat

SEQ ID NO: 1279883 - DNA, 15 bp, Homo sapiens
cagaatggttaaaca

SEQ ID NO: 1279884 - DNA, 15 bp, Homo sapiens
acagaatggttaaac

SEQ ID NO: 1279885 - DNA, 15 bp, Homo sapiens
aacagaatggttaaa

SEQ ID NO: 1279886 - DNA, 15 bp, Homo sapiens
aaacagaatggttaa

SEQ ID NO: 1279887 - DNA, 15 bp, Homo sapiens
aaaacagaatggtta

SEQ ID NO: 1279888 - DNA, 15 bp, Homo sapiens
taaaacagaatggtt

SEQ ID NO: 1279889 - DNA, 15 bp, Homo sapiens
ttaaaacagaatggt

SEQ ID NO: 1279890 - DNA, 15 bp, Homo sapiens
cttaaaacagaatgg

SEQ ID NO: 1279891 - DNA, 15 bp, Homo sapiens
tcttaaaacagaatg

SEQ ID NO: 1279892 - DNA, 15 bp, Homo sapiens
atcttaaaacagaat

SEQ ID NO: 1279893 - DNA, 15 bp, Homo sapiens
aatcttaaaacagaa

SEQ ID NO: 1279894 - DNA, 15 bp, Homo sapiens
aaatcttaaaacaga

SEQ ID NO: 1279895 - DNA, 15 bp, Homo sapiens
aaaatcttaaaacag

SEQ ID NO: 1279896 - DNA, 15 bp, Homo sapiens
aaaaatcttaaaaca

SEQ ID NO: 1279897 - DNA, 15 bp, Homo sapiens
taaaaatcttaaaac

SEQ ID NO: 1279898 - DNA, 15 bp, Homo sapiens
ctaaaaatcttaaaa

SEQ ID NO: 1279899 - DNA, 15 bp, Homo sapiens
cctaaaaatcttaaa

SEQ ID NO: 1279900 - DNA, 15 bp, Homo sapiens
gcctaaaaatcttaa

SEQ ID NO: 1279901 - DNA, 15 bp, Homo sapiens
agcctaaaaatctta

SEQ ID NO: 1279902 - DNA, 15 bp, Homo sapiens
gagcctaaaaatctt

SEQ ID NO: 1279903 - DNA, 15 bp, Homo sapiens
agagcctaaaaatct

SEQ ID NO: 1279904 - DNA, 15 bp, Homo sapiens
aagagcctaaaaatc

SEQ ID NO: 1279905 - DNA, 15 bp, Homo sapiens
gaagagcctaaaaat

SEQ ID NO: 1279906 - DNA, 15 bp, Homo sapiens
ggaagagcctaaaaa

SEQ ID NO: 1279907 - DNA, 15 bp, Homo sapiens
aggaagagcctaaaa

SEQ ID NO: 1279908 - DNA, 15 bp, Homo sapiens
taggaagagcctaaa

SEQ ID NO: 1279909 - DNA, 15 bp, Homo sapiens
gtaggaagagcctaa

SEQ ID NO: 1279910 - DNA, 15 bp, Homo sapiens
agtaggaagagccta

SEQ ID NO: 1279911 - DNA, 15 bp, Homo sapiens
tagtaggaagagcct

SEQ ID NO: 1279912 - DNA, 15 bp, Homo sapiens
atagtaggaagagcc

SEQ ID NO: 1279913 - DNA, 15 bp, Homo sapiens
aatagtaggaagagc

SEQ ID NO: 1279914 - DNA, 15 bp, Homo sapiens
aaatagtaggaagag

SEQ ID NO: 1279915 - DNA, 15 bp, Homo sapiens
aaaatagtaggaaga

SEQ ID NO: 1279916 - DNA, 15 bp, Homo sapiens
aaaaatagtaggaag

SEQ ID NO: 1279917 - DNA, 15 bp, Homo sapiens
caaaaatagtaggaa

SEQ ID NO: 1279918 - DNA, 15 bp, Homo sapiens
gcaaaaatagtagga

SEQ ID NO: 1279919 - DNA, 15 bp, Homo sapiens
agcaaaaatagtagg

SEQ ID NO: 1279920 - DNA, 15 bp, Homo sapiens
tagcaaaaatagtag

SEQ ID NO: 1279921 - DNA, 15 bp, Homo sapiens
atagcaaaaatagta

SEQ ID NO: 1279922 - DNA, 15 bp, Homo sapiens
aatagcaaaaatagt

SEQ ID NO: 1279923 - DNA, 15 bp, Homo sapiens
ataatagcaaaaata

SEQ ID NO: 1279924 - DNA, 15 bp, Homo sapiens
tataatagcaaaaat

SEQ ID NO: 1279925 - DNA, 15 bp, Homo sapiens
ttataatagcaaaaa

SEQ ID NO: 1279926 - DNA, 15 bp, Homo sapiens
tttataatagcaaaa

SEQ ID NO: 1279927 - DNA, 15 bp, Homo sapiens
atttataatagcaaa

SEQ ID NO: 1279928 - DNA, 15 bp, Homo sapiens
tatttataatagcaa

SEQ ID NO: 1279929 - DNA, 15 bp, Homo sapiens
ttatttataatagca

SEQ ID NO: 1279930 - DNA, 15 bp, Homo sapiens
gttatttataatagc

SEQ ID NO: 1279931 - DNA, 15 bp, Homo sapiens
agttatttataatag

SEQ ID NO: 1279932 - DNA, 15 bp, Homo sapiens
aagttatttataata

SEQ ID NO: 1279933 - DNA, 15 bp, Homo sapiens
aaagttatttataat

SEQ ID NO: 1279934 - DNA, 15 bp, Homo sapiens
aaaagttatttataa

SEQ ID NO: 1279935 - DNA, 15 bp, Homo sapiens
gaaaagttatttata

SEQ ID NO: 1279936 - DNA, 15 bp, Homo sapiens
tgaaaagttatttat

SEQ ID NO: 1279937 - DNA, 15 bp, Homo sapiens
ttgaaaagttattta

SEQ ID NO: 1279938 - DNA, 15 bp, Homo sapiens
tttgaaaagttattt

SEQ ID NO: 1279939 - DNA, 15 bp, Homo sapiens
gtttgaaaagttatt

SEQ ID NO: 1279940 - DNA, 15 bp, Homo sapiens
tgtttgaaaagttat

SEQ ID NO: 1279941 - DNA, 15 bp, Homo sapiens
atgtttgaaaagtta

SEQ ID NO: 1279942 - DNA, 15 bp, Homo sapiens
gatgtttgaaaagtt

SEQ ID NO: 1279943 - DNA, 15 bp, Homo sapiens
agatgtttgaaaagt

SEQ ID NO: 1279944 - DNA, 15 bp, Homo sapiens
tagatgtttgaaaag

SEQ ID NO: 1279945 - DNA, 15 bp, Homo sapiens
atagatgtttgaaaa

SEQ ID NO: 1279946 - DNA, 15 bp, Homo sapiens
aatagatgtttgaaa

SEQ ID NO: 1279947 - DNA, 15 bp, Homo sapiens
taatagatgtttgaa

SEQ ID NO: 1279948 - DNA, 15 bp, Homo sapiens
gtaatagatgtttga

SEQ ID NO: 1279949 - DNA, 15 bp, Homo sapiens
tgtaatagatgtttg

SEQ ID NO: 1279950 - DNA, 15 bp, Homo sapiens
gtgtaatagatgttt

SEQ ID NO: 1279951 - DNA, 15 bp, Homo sapiens
agtgtaatagatgtt

SEQ ID NO: 1279952 - DNA, 15 bp, Homo sapiens
tagtgtaatagatgt

SEQ ID NO: 1279953 - DNA, 15 bp, Homo sapiens
ttagtgtaatagatg

SEQ ID NO: 1279954 - DNA, 15 bp, Homo sapiens
tttagtgtaatagat

SEQ ID NO: 1279955 - DNA, 15 bp, Homo sapiens
atttagtgtaataga

SEQ ID NO: 1279956 - DNA, 15 bp, Homo sapiens
gatttagtgtaatag

SEQ ID NO: 1279957 - DNA, 15 bp, Homo sapiens
agatttagtgtaata

SEQ ID NO: 1279958 - DNA, 15 bp, Homo sapiens
aagatttagtgtaat

SEQ ID NO: 1279959 - DNA, 15 bp, Homo sapiens
aaagatttagtgtaa

SEQ ID NO: 1279960 - DNA, 15 bp, Homo sapiens
aaaagatttagtgta

SEQ ID NO: 1279961 - DNA, 15 bp, Homo sapiens
aaaaagatttagtgt

SEQ ID NO: 1279962 - DNA, 15 bp, Homo sapiens
aaaaaagatttagtg

SEQ ID NO: 1279963 - DNA, 15 bp, Homo sapiens
aaaaaaagatttagt

SEQ ID NO: 1279964 - DNA, 15 bp, Homo sapiens
taaaaaaagatttag

SEQ ID NO: 1279965 - DNA, 15 bp, Homo sapiens
attaaaaaaagattt

SEQ ID NO: 1279966 - DNA, 15 bp, Homo sapiens
aattaaaaaaagatt

SEQ ID NO: 1279967 - DNA, 15 bp, Homo sapiens
aaattaaaaaaagat

SEQ ID NO: 1279968 - DNA, 15 bp, Homo sapiens
taaaaattaaaaaaa

SEQ ID NO: 1279969 - DNA, 15 bp, Homo sapiens
ttaaaaattaaaaaa

SEQ ID NO: 1279970 - DNA, 15 bp, Homo sapiens
cttaaaaattaaaaa

SEQ ID NO: 1279971 - DNA, 15 bp, Homo sapiens
acttaaaaattaaaa

SEQ ID NO: 1279972 - DNA, 15 bp, Homo sapiens
aacttaaaaattaaa

SEQ ID NO: 1279973 - DNA, 15 bp, Homo sapiens
aaacttaaaaattaa

SEQ ID NO: 1279974 - DNA, 15 bp, Homo sapiens
caaaacttaaaaatt

SEQ ID NO: 1279975 - DNA, 15 bp, Homo sapiens
acaaaacttaaaaat

SEQ ID NO: 1279976 - DNA, 15 bp, Homo sapiens
cacaaaacttaaaaa

SEQ ID NO: 1279977 - DNA, 15 bp, Homo sapiens
cccacaaaacttaaa

SEQ ID NO: 1279978 - DNA, 15 bp, Homo sapiens
acccacaaaacttaa

SEQ ID NO: 1279979 - DNA, 15 bp, Homo sapiens
tacccacaaaactta

SEQ ID NO: 1279980 - DNA, 15 bp, Homo sapiens
gtacccacaaaactt

SEQ ID NO: 1279981 - DNA, 15 bp, Homo sapiens
tgtacccacaaaact

SEQ ID NO: 1279982 - DNA, 15 bp, Homo sapiens
atgtacccacaaaac

SEQ ID NO: 1279983 - DNA, 15 bp, Homo sapiens
atatgtacccacaaa

SEQ ID NO: 1279984 - DNA, 15 bp, Homo sapiens
gatatgtacccacaa

SEQ ID NO: 1279985 - DNA, 15 bp, Homo sapiens
tgatatgtacccaca

SEQ ID NO: 1279986 - DNA, 15 bp, Homo sapiens
ttgatatgtacccac

SEQ ID NO: 1279987 - DNA, 15 bp, Homo sapiens
cttgatatgtaccca

SEQ ID NO: 1279988 - DNA, 15 bp, Homo sapiens
acttgatatgtaccc

SEQ ID NO: 1279989 - DNA, 15 bp, Homo sapiens
cacttgatatgtacc

SEQ ID NO: 1279990 - DNA, 15 bp, Homo sapiens
acacttgatatgtac

SEQ ID NO: 1279991 - DNA, 15 bp, Homo sapiens
tacacttgatatgta

SEQ ID NO: 1279992 - DNA, 15 bp, Homo sapiens
gtacacttgatatgt

SEQ ID NO: 1279993 - DNA, 15 bp, Homo sapiens
tgtacacttgatatg

SEQ ID NO: 1279994 - DNA, 15 bp, Homo sapiens
gtgtacacttgatat

SEQ ID NO: 1279995 - DNA, 15 bp, Homo sapiens
tgtgtacacttgata

SEQ ID NO: 1279996 - DNA, 15 bp, Homo sapiens
atgtgtacacttgat

SEQ ID NO: 1279997 - DNA, 15 bp, Homo sapiens
aatgtgtacacttga

SEQ ID NO: 1279998 - DNA, 15 bp, Homo sapiens
aaatgtgtacacttg

SEQ ID NO: 1279999 - DNA, 15 bp, Homo sapiens
taaatgtgtacactt

SEQ ID NO: 1280000 - DNA, 15 bp, Homo sapiens
ataaatgtgtacact

SEQ ID NO: 1280001 - DNA, 15 bp, Homo sapiens
cataaatgtgtacac

SEQ ID NO: 1280002 - DNA, 15 bp, Homo sapiens
ccataaatgtgtaca

SEQ ID NO: 1280003 - DNA, 15 bp, Homo sapiens
cccataaatgtgtac

SEQ ID NO: 1280004 - DNA, 15 bp, Homo sapiens
tcccataaatgtgta

SEQ ID NO: 1280005 - DNA, 15 bp, Homo sapiens
gtcccataaatgtgt

SEQ ID NO: 1280006 - DNA, 15 bp, Homo sapiens
tgtcccataaatgtg

SEQ ID NO: 1280007 - DNA, 15 bp, Homo sapiens
atgtcccataaatgt

SEQ ID NO: 1280008 - DNA, 15 bp, Homo sapiens
tatgtcccataaatg

SEQ ID NO: 1280009 - DNA, 15 bp, Homo sapiens
atatgtcccataaat

SEQ ID NO: 1280010 - DNA, 15 bp, Homo sapiens
catatgtcccataaa

SEQ ID NO: 1280011 - DNA, 15 bp, Homo sapiens
tcatatgtcccataa

SEQ ID NO: 1280012 - DNA, 15 bp, Homo sapiens
ttcatatgtcccata

SEQ ID NO: 1280013 - DNA, 15 bp, Homo sapiens
tttcatatgtcccat

SEQ ID NO: 1280014 - DNA, 15 bp, Homo sapiens
atttcatatgtccca

SEQ ID NO: 1280015 - DNA, 15 bp, Homo sapiens
catttcatatgtccc

SEQ ID NO: 1280016 - DNA, 15 bp, Homo sapiens
gcatttcatatgtcc

SEQ ID NO: 1280017 - DNA, 15 bp, Homo sapiens
ggcatttcatatgtc

SEQ ID NO: 1280018 - DNA, 15 bp, Homo sapiens
gggcatttcatatgt

SEQ ID NO: 1280019 - DNA, 15 bp, Homo sapiens
agggcatttcatatg

SEQ ID NO: 1280020 - DNA, 15 bp, Homo sapiens
cagggcatttcatat

SEQ ID NO: 1280021 - DNA, 15 bp, Homo sapiens
tcagggcatttcata

SEQ ID NO: 1280022 - DNA, 15 bp, Homo sapiens
atcagggcatttcat

SEQ ID NO: 1280023 - DNA, 15 bp, Homo sapiens
catcagggcatttca

SEQ ID NO: 1280024 - DNA, 15 bp, Homo sapiens
gcatcagggcatttc

SEQ ID NO: 1280025 - DNA, 15 bp, Homo sapiens
tgcatcagggcattt

SEQ ID NO: 1280026 - DNA, 15 bp, Homo sapiens
ttgcatcagggcatt

SEQ ID NO: 1280027 - DNA, 15 bp, Homo sapiens
cttgcatcagggcat

SEQ ID NO: 1280028 - DNA, 15 bp, Homo sapiens
gcttgcatcagggca

SEQ ID NO: 1280029 - DNA, 15 bp, Homo sapiens
tgcttgcatcagggc

SEQ ID NO: 1280030 - DNA, 15 bp, Homo sapiens
atgcttgcatcaggg

SEQ ID NO: 1280031 - DNA, 15 bp, Homo sapiens
catgcttgcatcagg

SEQ ID NO: 1280032 - DNA, 15 bp, Homo sapiens
gcatgcttgcatcag

SEQ ID NO: 1280033 - DNA, 15 bp, Homo sapiens
tgcatgcttgcatca

SEQ ID NO: 1280034 - DNA, 15 bp, Homo sapiens
ctgcatgcttgcatc

SEQ ID NO: 1280035 - DNA, 15 bp, Homo sapiens
actgcatgcttgcat

SEQ ID NO: 1280036 - DNA, 15 bp, Homo sapiens
aactgcatgcttgca

SEQ ID NO: 1280037 - DNA, 15 bp, Homo sapiens
gaactgcatgcttgc

SEQ ID NO: 1280038 - DNA, 15 bp, Homo sapiens
agaactgcatgcttg

SEQ ID NO: 1280039 - DNA, 15 bp, Homo sapiens
cagaactgcatgctt

SEQ ID NO: 1280040 - DNA, 15 bp, Homo sapiens
acagaactgcatgct

SEQ ID NO: 1280041 - DNA, 15 bp, Homo sapiens
aacagaactgcatgc

SEQ ID NO: 1280042 - DNA, 15 bp, Homo sapiens
taacagaactgcatg

SEQ ID NO: 1280043 - DNA, 15 bp, Homo sapiens
gtaacagaactgcat

SEQ ID NO: 1280044 - DNA, 15 bp, Homo sapiens
agtaacagaactgca

SEQ ID NO: 1280045 - DNA, 15 bp, Homo sapiens
gagtaacagaactgc

SEQ ID NO: 1280046 - DNA, 15 bp, Homo sapiens
agagtaacagaactg

SEQ ID NO: 1280047 - DNA, 15 bp, Homo sapiens
tagagtaacagaact

SEQ ID NO: 1280048 - DNA, 15 bp, Homo sapiens
ttagagtaacagaac

SEQ ID NO: 1280049 - DNA, 15 bp, Homo sapiens
tttagagtaacagaa

SEQ ID NO: 1280050 - DNA, 15 bp, Homo sapiens
atttagagtaacaga

SEQ ID NO: 1280051 - DNA, 15 bp, Homo sapiens
gatttagagtaacag

SEQ ID NO: 1280052 - DNA, 15 bp, Homo sapiens
agatttagagtaaca

SEQ ID NO: 1280053 - DNA, 15 bp, Homo sapiens
aagatttagagtaac

SEQ ID NO: 1280054 - DNA, 15 bp, Homo sapiens
caagatttagagtaa

SEQ ID NO: 1280055 - DNA, 15 bp, Homo sapiens
tcaagatttagagta

SEQ ID NO: 1280056 - DNA, 15 bp, Homo sapiens
gtcaagatttagagt

SEQ ID NO: 1280057 - DNA, 15 bp, Homo sapiens
agtcaagatttagag

SEQ ID NO: 1280058 - DNA, 15 bp, Homo sapiens
gagtcaagatttaga

SEQ ID NO: 1280059 - DNA, 15 bp, Homo sapiens
tgagtcaagatttag

SEQ ID NO: 1280060 - DNA, 15 bp, Homo sapiens
ttgagtcaagattta

SEQ ID NO: 1280061 - DNA, 15 bp, Homo sapiens
gttgagtcaagattt

SEQ ID NO: 1280062 - DNA, 15 bp, Homo sapiens
agttgagtcaagatt

SEQ ID NO: 1280063 - DNA, 15 bp, Homo sapiens
gagttgagtcaagat

SEQ ID NO: 1280064 - DNA, 15 bp, Homo sapiens
agagttgagtcaaga

SEQ ID NO: 1280065 - DNA, 15 bp, Homo sapiens
tagagttgagtcaag

SEQ ID NO: 1280066 - DNA, 15 bp, Homo sapiens
atagagttgagtcaa

SEQ ID NO: 1280067 - DNA, 15 bp, Homo sapiens
aatagagttgagtca

SEQ ID NO: 1280068 - DNA, 15 bp, Homo sapiens
aaatagagttgagtc

SEQ ID NO: 1280069 - DNA, 15 bp, Homo sapiens
aaaatagagttgagt

SEQ ID NO: 1280070 - DNA, 15 bp, Homo sapiens
aaaaatagagttgag

SEQ ID NO: 1280071 - DNA, 15 bp, Homo sapiens
taaaaatagagttga

SEQ ID NO: 1280072 - DNA, 15 bp, Homo sapiens
gtaaaaatagagttg

SEQ ID NO: 1280073 - DNA, 15 bp, Homo sapiens
agtaaaaatagagtt

SEQ ID NO: 1280074 - DNA, 15 bp, Homo sapiens
aagtaaaaatagagt

SEQ ID NO: 1280075 - DNA, 15 bp, Homo sapiens
caagtaaaaatagag

SEQ ID NO: 1280076 - DNA, 15 bp, Homo sapiens
acaagtaaaaataga

SEQ ID NO: 1280077 - DNA, 15 bp, Homo sapiens
aacaagtaaaaatag

SEQ ID NO: 1280078 - DNA, 15 bp, Homo sapiens
taacaagtaaaaata

SEQ ID NO: 1280079 - DNA, 15 bp, Homo sapiens
ttaacaagtaaaaat

SEQ ID NO: 1280080 - DNA, 15 bp, Homo sapiens
tttaacaagtaaaaa

SEQ ID NO: 1280081 - DNA, 15 bp, Homo sapiens
atttaacaagtaaaa

SEQ ID NO: 1280082 - DNA, 15 bp, Homo sapiens
aatttaacaagtaaa

SEQ ID NO: 1280083 - DNA, 15 bp, Homo sapiens
gaatttaacaagtaa

SEQ ID NO: 1280084 - DNA, 15 bp, Homo sapiens
agaatttaacaagta

SEQ ID NO: 1280085 - DNA, 15 bp, Homo sapiens
aagaatttaacaagt

SEQ ID NO: 1280086 - DNA, 15 bp, Homo sapiens
taagaatttaacaag

SEQ ID NO: 1280087 - DNA, 15 bp, Homo sapiens
ctaagaatttaacaa

SEQ ID NO: 1280088 - DNA, 15 bp, Homo sapiens
gctaagaatttaaca

SEQ ID NO: 1280089 - DNA, 15 bp, Homo sapiens
agctaagaatttaac

SEQ ID NO: 1280090 - DNA, 15 bp, Homo sapiens
tagctaagaatttaa

SEQ ID NO: 1280091 - DNA, 15 bp, Homo sapiens
atagctaagaattta

SEQ ID NO: 1280092 - DNA, 15 bp, Homo sapiens
tatagctaagaattt

SEQ ID NO: 1280093 - DNA, 15 bp, Homo sapiens
ttatagctaagaatt

SEQ ID NO: 1280094 - DNA, 15 bp, Homo sapiens
tttatagctaagaat

SEQ ID NO: 1280095 - DNA, 15 bp, Homo sapiens
ttttatagctaagaa

SEQ ID NO: 1280096 - DNA, 15 bp, Homo sapiens
gttttatagctaaga

SEQ ID NO: 1280097 - DNA, 15 bp, Homo sapiens
agttttatagctaag

SEQ ID NO: 1280098 - DNA, 15 bp, Homo sapiens
cagttttatagctaa

SEQ ID NO: 1280099 - DNA, 15 bp, Homo sapiens
tcagttttatagcta

SEQ ID NO: 1280100 - DNA, 15 bp, Homo sapiens
ctcagttttatagct

SEQ ID NO: 1280101 - DNA, 15 bp, Homo sapiens
cctcagttttatagc

SEQ ID NO: 1280102 - DNA, 15 bp, Homo sapiens
acctcagttttatag

SEQ ID NO: 1280103 - DNA, 15 bp, Homo sapiens
tacctcagttttata

SEQ ID NO: 1280104 - DNA, 15 bp, Homo sapiens
atacctcagttttat

SEQ ID NO: 1280105 - DNA, 15 bp, Homo sapiens
aatacctcagtttta

SEQ ID NO: 1280106 - DNA, 15 bp, Homo sapiens
aaatacctcagtttt

SEQ ID NO: 1280107 - DNA, 15 bp, Homo sapiens
aaaatacctcagttt

SEQ ID NO: 1280108 - DNA, 15 bp, Homo sapiens
taaaatacctcagtt

SEQ ID NO: 1280109 - DNA, 15 bp, Homo sapiens
ttaaaatacctcagt

SEQ ID NO: 1280110 - DNA, 15 bp, Homo sapiens
cttaaaatacctcag

SEQ ID NO: 1280111 - DNA, 15 bp, Homo sapiens
ccttaaaatacctca

SEQ ID NO: 1280112 - DNA, 15 bp, Homo sapiens
tccttaaaatacctc

SEQ ID NO: 1280113 - DNA, 15 bp, Homo sapiens
atccttaaaatacct

SEQ ID NO: 1280114 - DNA, 15 bp, Homo sapiens
aatccttaaaatacc

SEQ ID NO: 1280115 - DNA, 15 bp, Homo sapiens
aaatccttaaaatac

SEQ ID NO: 1280116 - DNA, 15 bp, Homo sapiens
aaaatccttaaaata

SEQ ID NO: 1280117 - DNA, 15 bp, Homo sapiens
aaaaatccttaaaat

SEQ ID NO: 1280118 - DNA, 15 bp, Homo sapiens
taaaaatccttaaaa

SEQ ID NO: 1280119 - DNA, 15 bp, Homo sapiens
ataaaaatccttaaa

SEQ ID NO: 1280120 - DNA, 15 bp, Homo sapiens
cataaaaatccttaa

SEQ ID NO: 1280121 - DNA, 15 bp, Homo sapiens
tacataaaaatcctt

SEQ ID NO: 1280122 - DNA, 15 bp, Homo sapiens
gtacataaaaatcct

SEQ ID NO: 1280123 - DNA, 15 bp, Homo sapiens
ggtacataaaaatcc

SEQ ID NO: 1280124 - DNA, 15 bp, Homo sapiens
aggtacataaaaatc

SEQ ID NO: 1280125 - DNA, 15 bp, Homo sapiens
aaggtacataaaaat

SEQ ID NO: 1280126 - DNA, 15 bp, Homo sapiens
taaggtacataaaaa

SEQ ID NO: 1280127 - DNA, 15 bp, Homo sapiens
ttaaggtacataaaa

SEQ ID NO: 1280128 - DNA, 15 bp, Homo sapiens
gttaaggtacataaa

SEQ ID NO: 1280129 - DNA, 15 bp, Homo sapiens
tgttaaggtacataa

SEQ ID NO: 1280130 - DNA, 15 bp, Homo sapiens
ttgttaaggtacata

SEQ ID NO: 1280131 - DNA, 15 bp, Homo sapiens
tttgttaaggtacat

SEQ ID NO: 1280132 - DNA, 15 bp, Homo sapiens
ttttgttaaggtaca

SEQ ID NO: 1280133 - DNA, 15 bp, Homo sapiens
attttgttaaggtac

SEQ ID NO: 1280134 - DNA, 15 bp, Homo sapiens
cattttgttaaggta

SEQ ID NO: 1280135 - DNA, 15 bp, Homo sapiens
acattttgttaaggt

SEQ ID NO: 1280136 - DNA, 15 bp, Homo sapiens
gacattttgttaagg

SEQ ID NO: 1280137 - DNA, 15 bp, Homo sapiens
ggacattttgttaag

SEQ ID NO: 1280138 - DNA, 15 bp, Homo sapiens
aggacattttgttaa

SEQ ID NO: 1280139 - DNA, 15 bp, Homo sapiens
aaggacattttgtta

SEQ ID NO: 1280140 - DNA, 15 bp, Homo sapiens
gaaggacattttgtt

SEQ ID NO: 1280141 - DNA, 15 bp, Homo sapiens
tgaaggacattttgt

SEQ ID NO: 1280142 - DNA, 15 bp, Homo sapiens
ttgaaggacattttg

SEQ ID NO: 1280143 - DNA, 15 bp, Homo sapiens
attgaaggacatttt

SEQ ID NO: 1280144 - DNA, 15 bp, Homo sapiens
aattgaaggacattt

SEQ ID NO: 1280145 - DNA, 15 bp, Homo sapiens
caattgaaggacatt

SEQ ID NO: 1280146 - DNA, 15 bp, Homo sapiens
tcaattgaaggacat

SEQ ID NO: 1280147 - DNA, 15 bp, Homo sapiens
gtcaattgaaggaca

SEQ ID NO: 1280148 - DNA, 15 bp, Homo sapiens
tgtcaattgaaggac

SEQ ID NO: 1280149 - DNA, 15 bp, Homo sapiens
atgtcaattgaagga

SEQ ID NO: 1280150 - DNA, 15 bp, Homo sapiens
aatgtcaattgaagg

SEQ ID NO: 1280151 - DNA, 15 bp, Homo sapiens
taatgtcaattgaag

SEQ ID NO: 1280152 - DNA, 15 bp, Homo sapiens
ataatgtcaattgaa

SEQ ID NO: 1280153 - DNA, 15 bp, Homo sapiens
aataatgtcaattga

SEQ ID NO: 1280154 - DNA, 15 bp, Homo sapiens
gaataatgtcaattg

SEQ ID NO: 1280155 - DNA, 15 bp, Homo sapiens
agaataatgtcaatt

SEQ ID NO: 1280156 - DNA, 15 bp, Homo sapiens
gagaataatgtcaat

SEQ ID NO: 1280157 - DNA, 15 bp, Homo sapiens
tgagaataatgtcaa

SEQ ID NO: 1280158 - DNA, 15 bp, Homo sapiens
ttgagaataatgtca

SEQ ID NO: 1280159 - DNA, 15 bp, Homo sapiens
tttgagaataatgtc

SEQ ID NO: 1280160 - DNA, 15 bp, Homo sapiens
atttgagaataatgt

SEQ ID NO: 1280161 - DNA, 15 bp, Homo sapiens
tatttgagaataatg

SEQ ID NO: 1280162 - DNA, 15 bp, Homo sapiens
atatttgagaataat

SEQ ID NO: 1280163 - DNA, 15 bp, Homo sapiens
catatttgagaataa

SEQ ID NO: 1280164 - DNA, 15 bp, Homo sapiens
acatatttgagaata

SEQ ID NO: 1280165 - DNA, 15 bp, Homo sapiens
aacatatttgagaat

SEQ ID NO: 1280166 - DNA, 15 bp, Homo sapiens
aaacatatttgagaa

SEQ ID NO: 1280167 - DNA, 15 bp, Homo sapiens
caaacatatttgaga

SEQ ID NO: 1280168 - DNA, 15 bp, Homo sapiens
acaaacatatttgag

SEQ ID NO: 1280169 - DNA, 15 bp, Homo sapiens
aacaaacatatttga

SEQ ID NO: 1280170 - DNA, 15 bp, Homo sapiens
caacaaacatatttg

SEQ ID NO: 1280171 - DNA, 15 bp, Homo sapiens
tcaacaaacatattt

SEQ ID NO: 1280172 - DNA, 15 bp, Homo sapiens
ttcaacaaacatatt

SEQ ID NO: 1280173 - DNA, 15 bp, Homo sapiens
tttcaacaaacatat

SEQ ID NO: 1280174 - DNA, 15 bp, Homo sapiens
ttttcaacaaacata

SEQ ID NO: 1280175 - DNA, 15 bp, Homo sapiens
attttcaacaaacat

SEQ ID NO: 1280176 - DNA, 15 bp, Homo sapiens
tattttcaacaaaca

SEQ ID NO: 1280177 - DNA, 15 bp, Homo sapiens
atattttcaacaaac

SEQ ID NO: 1280178 - DNA, 15 bp, Homo sapiens
catattttcaacaaa

SEQ ID NO: 1280179 - DNA, 15 bp, Homo sapiens
acatattttcaacaa

SEQ ID NO: 1280180 - DNA, 15 bp, Homo sapiens
aacatattttcaaca

SEQ ID NO: 1280181 - DNA, 15 bp, Homo sapiens
aaacatattttcaac

SEQ ID NO: 1280182 - DNA, 15 bp, Homo sapiens
caaacatattttcaa

SEQ ID NO: 1280183 - DNA, 15 bp, Homo sapiens
acaaacatattttca

SEQ ID NO: 1280184 - DNA, 15 bp, Homo sapiens
aacaaacatattttc

SEQ ID NO: 1280185 - DNA, 15 bp, Homo sapiens
caacaaacatatttt

SEQ ID NO: 1280186 - DNA, 15 bp, Homo sapiens
ctttcaacaaacata

SEQ ID NO: 1280187 - DNA, 15 bp, Homo sapiens
actttcaacaaacat

SEQ ID NO: 1280188 - DNA, 15 bp, Homo sapiens
tactttcaacaaaca

SEQ ID NO: 1280189 - DNA, 15 bp, Homo sapiens
gtactttcaacaaac

SEQ ID NO: 1280190 - DNA, 15 bp, Homo sapiens
ggtactttcaacaaa

SEQ ID NO: 1280191 - DNA, 15 bp, Homo sapiens
aggtactttcaacaa

SEQ ID NO: 1280192 - DNA, 15 bp, Homo sapiens
aaggtactttcaaca

SEQ ID NO: 1280193 - DNA, 15 bp, Homo sapiens
aaaggtactttcaac

SEQ ID NO: 1280194 - DNA, 15 bp, Homo sapiens
aaaaggtactttcaa

SEQ ID NO: 1280195 - DNA, 15 bp, Homo sapiens
aaaaaggtactttca

SEQ ID NO: 1280196 - DNA, 15 bp, Homo sapiens
aaaaaaggtactttc

SEQ ID NO: 1280197 - DNA, 15 bp, Homo sapiens
aaaaaaaggtacttt

SEQ ID NO: 1280198 - DNA, 15 bp, Homo sapiens
aaaaaaaaggtactt

SEQ ID NO: 1280199 - DNA, 15 bp, Homo sapiens
aaaaaaaaaggtact

SEQ ID NO: 1280200 - DNA, 15 bp, Homo sapiens
aaaaaaaaaaggtac

SEQ ID NO: 1280201 - DNA, 15 bp, Homo sapiens
aaaaaaaaaaaggta

SEQ ID NO: 1280202 - DNA, 15 bp, Homo sapiens
caaaaaaaaaaaggt

SEQ ID NO: 1280203 - DNA, 15 bp, Homo sapiens
gcaaaaaaaaaaagg

SEQ ID NO: 1280204 - DNA, 15 bp, Homo sapiens
tgcaaaaaaaaaaag

SEQ ID NO: 1280205 - DNA, 15 bp, Homo sapiens
ttgcaaaaaaaaaaa

SEQ ID NO: 1280206 - DNA, 15 bp, Homo sapiens
tttgcaaaaaaaaaa

SEQ ID NO: 1280207 - DNA, 15 bp, Homo sapiens
ctttgcaaaaaaaaa

SEQ ID NO: 1280208 - DNA, 15 bp, Homo sapiens
actttgcaaaaaaaa

SEQ ID NO: 1280209 - DNA, 15 bp, Homo sapiens
cactttgcaaaaaaa

SEQ ID NO: 1280210 - DNA, 15 bp, Homo sapiens
gcactttgcaaaaaa

SEQ ID NO: 1280211 - DNA, 15 bp, Homo sapiens
agcactttgcaaaaa

SEQ ID NO: 1280212 - DNA, 15 bp, Homo sapiens
aagcactttgcaaaa

SEQ ID NO: 1280213 - DNA, 15 bp, Homo sapiens
caagcactttgcaaa

SEQ ID NO: 1280214 - DNA, 15 bp, Homo sapiens
acaagcactttgcaa

SEQ ID NO: 1280215 - DNA, 15 bp, Homo sapiens
aacaagcactttgca

SEQ ID NO: 1280216 - DNA, 15 bp, Homo sapiens
gaacaagcactttgc

SEQ ID NO: 1280217 - DNA, 15 bp, Homo sapiens
agaacaagcactttg

SEQ ID NO: 1280218 - DNA, 15 bp, Homo sapiens
aagaacaagcacttt

SEQ ID NO: 1280219 - DNA, 15 bp, Homo sapiens
aaagaacaagcactt

SEQ ID NO: 1280220 - DNA, 15 bp, Homo sapiens
caaagaacaagcact

SEQ ID NO: 1280221 - DNA, 15 bp, Homo sapiens
gcaaagaacaagcac

SEQ ID NO: 1280222 - DNA, 15 bp, Homo sapiens
ggcaaagaacaagca

SEQ ID NO: 1280223 - DNA, 15 bp, Homo sapiens
gggcaaagaacaagc

SEQ ID NO: 1280224 - DNA, 15 bp, Homo sapiens
tgggcaaagaacaag

SEQ ID NO: 1280225 - DNA, 15 bp, Homo sapiens
atgggcaaagaacaa

SEQ ID NO: 1280226 - DNA, 15 bp, Homo sapiens
aatgggcaaagaaca

SEQ ID NO: 1280227 - DNA, 15 bp, Homo sapiens
aaatgggcaaagaac

SEQ ID NO: 1280228 - DNA, 15 bp, Homo sapiens
aaaatgggcaaagaa

SEQ ID NO: 1280229 - DNA, 15 bp, Homo sapiens
gaaaatgggcaaaga

SEQ ID NO: 1280230 - DNA, 15 bp, Homo sapiens
ggaaaatgggcaaag

SEQ ID NO: 1280231 - DNA, 15 bp, Homo sapiens
gggaaaatgggcaaa

SEQ ID NO: 1280232 - DNA, 15 bp, Homo sapiens
ggggaaaatgggcaa

SEQ ID NO: 1280233 - DNA, 15 bp, Homo sapiens
gggggaaaatgggca

SEQ ID NO: 1280234 - DNA, 15 bp, Homo sapiens
ggggggaaaatgggc

SEQ ID NO: 1280235 - DNA, 15 bp, Homo sapiens
tggggggaaaatggg

SEQ ID NO: 1280236 - DNA, 15 bp, Homo sapiens
atggggggaaaatgg

SEQ ID NO: 1280237 - DNA, 15 bp, Homo sapiens
aatggggggaaaatg

SEQ ID NO: 1280238 - DNA, 15 bp, Homo sapiens
aaatggggggaaaat

SEQ ID NO: 1280239 - DNA, 15 bp, Homo sapiens
aaaatggggggaaaa

SEQ ID NO: 1280240 - DNA, 15 bp, Homo sapiens
aaaaatggggggaaa

SEQ ID NO: 1280241 - DNA, 15 bp, Homo sapiens
aaaaaatggggggaa

SEQ ID NO: 1280242 - DNA, 15 bp, Homo sapiens
caaaaaatgggggga

SEQ ID NO: 1280243 - DNA, 15 bp, Homo sapiens
acaaaaaatgggggg

SEQ ID NO: 1280244 - DNA, 15 bp, Homo sapiens
aacaaaaaatggggg

SEQ ID NO: 1280245 - DNA, 15 bp, Homo sapiens
gaacaaaaaatgggg

SEQ ID NO: 1280246 - DNA, 15 bp, Homo sapiens
agaacaaaaaatggg

SEQ ID NO: 1280247 - DNA, 15 bp, Homo sapiens
aagaacaaaaaatgg

SEQ ID NO: 1280248 - DNA, 15 bp, Homo sapiens
aaagaacaaaaaatg

SEQ ID NO: 1280249 - DNA, 15 bp, Homo sapiens
aaaagaacaaaaaat

SEQ ID NO: 1280250 - DNA, 15 bp, Homo sapiens
aaaaagaacaaaaaa

SEQ ID NO: 1280251 - DNA, 15 bp, Homo sapiens
caaaaaaagaacaaa

SEQ ID NO: 1280252 - DNA, 15 bp, Homo sapiens
ccaaaaaaagaacaa

SEQ ID NO: 1280253 - DNA, 15 bp, Homo sapiens
accaaaaaaagaaca

SEQ ID NO: 1280254 - DNA, 15 bp, Homo sapiens
caccaaaaaaagaac

SEQ ID NO: 1280255 - DNA, 15 bp, Homo sapiens
acaccaaaaaaagaa

SEQ ID NO: 1280256 - DNA, 15 bp, Homo sapiens
cacaccaaaaaaaga

SEQ ID NO: 1280257 - DNA, 15 bp, Homo sapiens
acacaccaaaaaaag

SEQ ID NO: 1280258 - DNA, 15 bp, Homo sapiens
cacacaccaaaaaaa

SEQ ID NO: 1280259 - DNA, 15 bp, Homo sapiens
acacacaccaaaaaa

SEQ ID NO: 1280260 - DNA, 15 bp, Homo sapiens
cacacacaccaaaaa

SEQ ID NO: 1280261 - DNA, 15 bp, Homo sapiens
ccacacacaccaaaa

SEQ ID NO: 1280262 - DNA, 15 bp, Homo sapiens
cccacacacaccaaa

SEQ ID NO: 1280263 - DNA, 15 bp, Homo sapiens
ccccacacacaccaa

SEQ ID NO: 1280264 - DNA, 15 bp, Homo sapiens
cccccacacacacca

SEQ ID NO: 1280265 - DNA, 15 bp, Homo sapiens
tcccccacacacacc

SEQ ID NO: 1280266 - DNA, 15 bp, Homo sapiens
ttcccccacacacac

SEQ ID NO: 1280267 - DNA, 15 bp, Homo sapiens
attcccccacacaca

SEQ ID NO: 1280268 - DNA, 15 bp, Homo sapiens
aattcccccacacac

SEQ ID NO: 1280269 - DNA, 15 bp, Homo sapiens
caattcccccacaca

SEQ ID NO: 1280270 - DNA, 15 bp, Homo sapiens
acaattcccccacac

SEQ ID NO: 1280271 - DNA, 15 bp, Homo sapiens
aacaattcccccaca

SEQ ID NO: 1280272 - DNA, 15 bp, Homo sapiens
aaacaattcccccac

SEQ ID NO: 1280273 - DNA, 15 bp, Homo sapiens
aaaacaattccccca

SEQ ID NO: 1280274 - DNA, 15 bp, Homo sapiens
caaaacaattccccc

SEQ ID NO: 1280275 - DNA, 15 bp, Homo sapiens
ccaaaacaattcccc

SEQ ID NO: 1280276 - DNA, 15 bp, Homo sapiens
gccaaaacaattccc

SEQ ID NO: 1280277 - DNA, 15 bp, Homo sapiens
agccaaaacaattcc

SEQ ID NO: 1280278 - DNA, 15 bp, Homo sapiens
tagccaaaacaattc

SEQ ID NO: 1280279 - DNA, 15 bp, Homo sapiens
ctagccaaaacaatt

SEQ ID NO: 1280280 - DNA, 15 bp, Homo sapiens
cctagccaaaacaat

SEQ ID NO: 1280281 - DNA, 15 bp, Homo sapiens
acctagccaaaacaa

SEQ ID NO: 1280282 - DNA, 15 bp, Homo sapiens
tacctagccaaaaca

SEQ ID NO: 1280283 - DNA, 15 bp, Homo sapiens
ttacctagccaaaac

SEQ ID NO: 1280284 - DNA, 15 bp, Homo sapiens
cttacctagccaaaa

SEQ ID NO: 1280285 - DNA, 15 bp, Homo sapiens
tcttacctagccaaa

SEQ ID NO: 1280286 - DNA, 15 bp, Homo sapiens
ttcttacctagccaa

SEQ ID NO: 1280287 - DNA, 15 bp, Homo sapiens
attcttacctagcca

SEQ ID NO: 1280288 - DNA, 15 bp, Homo sapiens
aattcttacctagcc

SEQ ID NO: 1280289 - DNA, 15 bp, Homo sapiens
taattcttacctagc

SEQ ID NO: 1280290 - DNA, 15 bp, Homo sapiens
gtaattcttacctag

SEQ ID NO: 1280291 - DNA, 15 bp, Homo sapiens
agtaattcttaccta

SEQ ID NO: 1280292 - DNA, 15 bp, Homo sapiens
aagtaattcttacct

SEQ ID NO: 1280293 - DNA, 15 bp, Homo sapiens
aaagtaattcttacc

SEQ ID NO: 1280294 - DNA, 15 bp, Homo sapiens
gaaaagtaattctta

SEQ ID NO: 1280295 - DNA, 15 bp, Homo sapiens
agaaaagtaattctt

SEQ ID NO: 1280296 - DNA, 15 bp, Homo sapiens
aagaaaagtaattct

SEQ ID NO: 1280297 - DNA, 15 bp, Homo sapiens
gaagaaaagtaattc

SEQ ID NO: 1280298 - DNA, 15 bp, Homo sapiens
agaagaaaagtaatt

SEQ ID NO: 1280299 - DNA, 15 bp, Homo sapiens
cagaagaaaagtaat

SEQ ID NO: 1280300 - DNA, 15 bp, Homo sapiens
acagaagaaaagtaa

SEQ ID NO: 1280301 - DNA, 15 bp, Homo sapiens
aacagaagaaaagta

SEQ ID NO: 1280302 - DNA, 15 bp, Homo sapiens
aaacagaagaaaagt

SEQ ID NO: 1280303 - DNA, 15 bp, Homo sapiens
gaaacagaagaaaag

SEQ ID NO: 1280304 - DNA, 15 bp, Homo sapiens
tgaaacagaagaaaa

SEQ ID NO: 1280305 - DNA, 15 bp, Homo sapiens
ttgaaacagaagaaa

SEQ ID NO: 1280306 - DNA, 15 bp, Homo sapiens
gttgaaacagaagaa

SEQ ID NO: 1280307 - DNA, 15 bp, Homo sapiens
tgttgaaacagaaga

SEQ ID NO: 1280308 - DNA, 15 bp, Homo sapiens
ttgttgaaacagaag

SEQ ID NO: 1280309 - DNA, 15 bp, Homo sapiens
attgttgaaacagaa

SEQ ID NO: 1280310 - DNA, 15 bp, Homo sapiens
aattgttgaaacaga

SEQ ID NO: 1280311 - DNA, 15 bp, Homo sapiens
aaattgttgaaacag

SEQ ID NO: 1280312 - DNA, 15 bp, Homo sapiens
aaaattgttgaaaca

SEQ ID NO: 1280313 - DNA, 15 bp, Homo sapiens
aaaaattgttgaaac

SEQ ID NO: 1280314 - DNA, 15 bp, Homo sapiens
taaaaattgttgaaa

SEQ ID NO: 1280315 - DNA, 15 bp, Homo sapiens
ttaaaaattgttgaa

SEQ ID NO: 1280316 - DNA, 15 bp, Homo sapiens
tttaaaaattgttga

SEQ ID NO: 1280317 - DNA, 15 bp, Homo sapiens
ctttaaaaattgttg

SEQ ID NO: 1280318 - DNA, 15 bp, Homo sapiens
actttaaaaattgtt

SEQ ID NO: 1280319 - DNA, 15 bp, Homo sapiens
cactttaaaaattgt

SEQ ID NO: 1280320 - DNA, 15 bp, Homo sapiens
gcactttaaaaattg

SEQ ID NO: 1280321 - DNA, 15 bp, Homo sapiens
agcactttaaaaatt

SEQ ID NO: 1280322 - DNA, 15 bp, Homo sapiens
tagcactttaaaaat

SEQ ID NO: 1280323 - DNA, 15 bp, Homo sapiens
atagcactttaaaaa

SEQ ID NO: 1280324 - DNA, 15 bp, Homo sapiens
gatagcactttaaaa

SEQ ID NO: 1280325 - DNA, 15 bp, Homo sapiens
ggatagcactttaaa

SEQ ID NO: 1280326 - DNA, 15 bp, Homo sapiens
aggatagcactttaa

SEQ ID NO: 1280327 - DNA, 15 bp, Homo sapiens
caggatagcacttta

SEQ ID NO: 1280328 - DNA, 15 bp, Homo sapiens
tcaggatagcacttt

SEQ ID NO: 1280329 - DNA, 15 bp, Homo sapiens
ctcaggatagcactt

SEQ ID NO: 1280330 - DNA, 15 bp, Homo sapiens
actcaggatagcact

SEQ ID NO: 1280331 - DNA, 15 bp, Homo sapiens
gactcaggatagcac

SEQ ID NO: 1280332 - DNA, 15 bp, Homo sapiens
ggactcaggatagca

SEQ ID NO: 1280333 - DNA, 15 bp, Homo sapiens
aggactcaggatagc

SEQ ID NO: 1280334 - DNA, 15 bp, Homo sapiens
aaggactcaggatag

SEQ ID NO: 1280335 - DNA, 15 bp, Homo sapiens
aaaggactcaggata

SEQ ID NO: 1280336 - DNA, 15 bp, Homo sapiens
aaaaggactcaggat

SEQ ID NO: 1280337 - DNA, 15 bp, Homo sapiens
gaaaaggactcagga

SEQ ID NO: 1280338 - DNA, 15 bp, Homo sapiens
tgaaaaggactcagg

SEQ ID NO: 1280339 - DNA, 15 bp, Homo sapiens
atgaaaaggactcag

SEQ ID NO: 1280340 - DNA, 15 bp, Homo sapiens
tatgaaaaggactca

SEQ ID NO: 1280341 - DNA, 15 bp, Homo sapiens
ttatgaaaaggactc

SEQ ID NO: 1280342 - DNA, 15 bp, Homo sapiens
attatgaaaaggact

SEQ ID NO: 1280343 - DNA, 15 bp, Homo sapiens
aattatgaaaaggac

SEQ ID NO: 1280344 - DNA, 15 bp, Homo sapiens
aaattatgaaaagga

SEQ ID NO: 1280345 - DNA, 15 bp, Homo sapiens
aaaattatgaaaagg

SEQ ID NO: 1280346 - DNA, 15 bp, Homo sapiens
gaaaattatgaaaag

SEQ ID NO: 1280347 - DNA, 15 bp, Homo sapiens
tgaaaattatgaaaa

SEQ ID NO: 1280348 - DNA, 15 bp, Homo sapiens
ttgaaaattatgaaa

SEQ ID NO: 1280349 - DNA, 15 bp, Homo sapiens
cttgaaaattatgaa

SEQ ID NO: 1280350 - DNA, 15 bp, Homo sapiens
tcttgaaaattatga

SEQ ID NO: 1280351 - DNA, 15 bp, Homo sapiens
ttcttgaaaattatg

SEQ ID NO: 1280352 - DNA, 15 bp, Homo sapiens
tttcttgaaaattat

SEQ ID NO: 1280353 - DNA, 15 bp, Homo sapiens
ttttcttgaaaatta

SEQ ID NO: 1280354 - DNA, 15 bp, Homo sapiens
gttttcttgaaaatt

SEQ ID NO: 1280355 - DNA, 15 bp, Homo sapiens
tgttttcttgaaaat

SEQ ID NO: 1280356 - DNA, 15 bp, Homo sapiens
gtgttttcttgaaaa

SEQ ID NO: 1280357 - DNA, 15 bp, Homo sapiens
tgtgttttcttgaaa

SEQ ID NO: 1280358 - DNA, 15 bp, Homo sapiens
atgtgttttcttgaa

SEQ ID NO: 1280359 - DNA, 15 bp, Homo sapiens
gatgtgttttcttga

SEQ ID NO: 1280360 - DNA, 15 bp, Homo sapiens
tgatgtgttttcttg

SEQ ID NO: 1280361 - DNA, 15 bp, Homo sapiens
ctgatgtgttttctt

SEQ ID NO: 1280362 - DNA, 15 bp, Homo sapiens
actgatgtgttttct

SEQ ID NO: 1280363 - DNA, 15 bp, Homo sapiens
aactgatgtgttttc

SEQ ID NO: 1280364 - DNA, 15 bp, Homo sapiens
taactgatgtgtttt

SEQ ID NO: 1280365 - DNA, 15 bp, Homo sapiens
gtaactgatgtgttt

SEQ ID NO: 1280366 - DNA, 15 bp, Homo sapiens
tgtaactgatgtgtt

SEQ ID NO: 1280367 - DNA, 15 bp, Homo sapiens
ctgtaactgatgtgt

SEQ ID NO: 1280368 - DNA, 15 bp, Homo sapiens
tctgtaactgatgtg

SEQ ID NO: 1280369 - DNA, 15 bp, Homo sapiens
atctgtaactgatgt

SEQ ID NO: 1280370 - DNA, 15 bp, Homo sapiens
aatctgtaactgatg

SEQ ID NO: 1280371 - DNA, 15 bp, Homo sapiens
aaatctgtaactgat

SEQ ID NO: 1280372 - DNA, 15 bp, Homo sapiens
aaaatctgtaactga

SEQ ID NO: 1280373 - DNA, 15 bp, Homo sapiens
taaaatctgtaactg

SEQ ID NO: 1280374 - DNA, 15 bp, Homo sapiens
ctaaaatctgtaact

SEQ ID NO: 1280375 - DNA, 15 bp, Homo sapiens
cctaaaatctgtaac

SEQ ID NO: 1280376 - DNA, 15 bp, Homo sapiens
acctaaaatctgtaa

SEQ ID NO: 1280377 - DNA, 15 bp, Homo sapiens
aacctaaaatctgta

SEQ ID NO: 1280378 - DNA, 15 bp, Homo sapiens
caacctaaaatctgt

SEQ ID NO: 1280379 - DNA, 15 bp, Homo sapiens
gcaacctaaaatctg

SEQ ID NO: 1280380 - DNA, 15 bp, Homo sapiens
tgcaacctaaaatct

SEQ ID NO: 1280381 - DNA, 15 bp, Homo sapiens
ttgcaacctaaaatc

SEQ ID NO: 1280382 - DNA, 15 bp, Homo sapiens
tttgcaacctaaaat

SEQ ID NO: 1280383 - DNA, 15 bp, Homo sapiens
atttgcaacctaaaa

SEQ ID NO: 1280384 - DNA, 15 bp, Homo sapiens
aatttgcaacctaaa

SEQ ID NO: 1280385 - DNA, 15 bp, Homo sapiens
caatttgcaacctaa

SEQ ID NO: 1280386 - DNA, 15 bp, Homo sapiens
acaatttgcaaccta

SEQ ID NO: 1280387 - DNA, 15 bp, Homo sapiens
aacaatttgcaacct

SEQ ID NO: 1280388 - DNA, 15 bp, Homo sapiens
caacaatttgcaacc

SEQ ID NO: 1280389 - DNA, 15 bp, Homo sapiens
acaacaatttgcaac

SEQ ID NO: 1280390 - DNA, 15 bp, Homo sapiens
aacaacaatttgcaa

SEQ ID NO: 1280391 - DNA, 15 bp, Homo sapiens
caacaacaatttgca

SEQ ID NO: 1280392 - DNA, 15 bp, Homo sapiens
ccaacaacaatttgc

SEQ ID NO: 1280393 - DNA, 15 bp, Homo sapiens
tccaacaacaatttg

SEQ ID NO: 1280394 - DNA, 15 bp, Homo sapiens
ttccaacaacaattt

SEQ ID NO: 1280395 - DNA, 15 bp, Homo sapiens
tttccaacaacaatt

SEQ ID NO: 1280396 - DNA, 15 bp, Homo sapiens
ttttccaacaacaat

SEQ ID NO: 1280397 - DNA, 15 bp, Homo sapiens
cttttccaacaacaa

SEQ ID NO: 1280398 - DNA, 15 bp, Homo sapiens
ccttttccaacaaca

SEQ ID NO: 1280399 - DNA, 15 bp, Homo sapiens
tccttttccaacaac

SEQ ID NO: 1280400 - DNA, 15 bp, Homo sapiens
ctccttttccaacaa

SEQ ID NO: 1280401 - DNA, 15 bp, Homo sapiens
tctccttttccaaca

SEQ ID NO: 1280402 - DNA, 15 bp, Homo sapiens
gtctccttttccaac

SEQ ID NO: 1280403 - DNA, 15 bp, Homo sapiens
ggtctccttttccaa

SEQ ID NO: 1280404 - DNA, 15 bp, Homo sapiens
aggtctccttttcca

SEQ ID NO: 1280405 - DNA, 15 bp, Homo sapiens
caggtctccttttcc

SEQ ID NO: 1280406 - DNA, 15 bp, Homo sapiens
gtccaggtctccttt

SEQ ID NO: 1280407 - DNA, 15 bp, Homo sapiens
ggtccaggtctcctt

SEQ ID NO: 1280408 - DNA, 15 bp, Homo sapiens
aggtccaggtctcct

SEQ ID NO: 1280409 - DNA, 15 bp, Homo sapiens
aaggtccaggtctcc

SEQ ID NO: 1280410 - DNA, 15 bp, Homo sapiens
taaggtccaggtctc

SEQ ID NO: 1280411 - DNA, 15 bp, Homo sapiens
ttaaggtccaggtct

SEQ ID NO: 1280412 - DNA, 15 bp, Homo sapiens
tttaaggtccaggtc

SEQ ID NO: 1280413 - DNA, 15 bp, Homo sapiens
ttttaaggtccaggt

SEQ ID NO: 1280414 - DNA, 15 bp, Homo sapiens
cttttaaggtccagg

SEQ ID NO: 1280415 - DNA, 15 bp, Homo sapiens
tcttttaaggtccag

SEQ ID NO: 1280416 - DNA, 15 bp, Homo sapiens
ctcttttaaggtcca

SEQ ID NO: 1280417 - DNA, 15 bp, Homo sapiens
cctcttttaaggtcc

SEQ ID NO: 1280418 - DNA, 15 bp, Homo sapiens
tcctcttttaaggtc

SEQ ID NO: 1280419 - DNA, 15 bp, Homo sapiens
ttcctcttttaaggt

SEQ ID NO: 1280420 - DNA, 15 bp, Homo sapiens
attcctcttttaagg

SEQ ID NO: 1280421 - DNA, 15 bp, Homo sapiens
gattcctcttttaag

SEQ ID NO: 1280422 - DNA, 15 bp, Homo sapiens
tgattcctcttttaa

SEQ ID NO: 1280423 - DNA, 15 bp, Homo sapiens
ctgattcctctttta

SEQ ID NO: 1280424 - DNA, 15 bp, Homo sapiens
cctgattcctctttt

SEQ ID NO: 1280425 - DNA, 15 bp, Homo sapiens
gcctgattcctcttt

SEQ ID NO: 1280426 - DNA, 15 bp, Homo sapiens
agcctgattcctctt

SEQ ID NO: 1280427 - DNA, 15 bp, Homo sapiens
cagcctgattcctct

SEQ ID NO: 1280428 - DNA, 15 bp, Homo sapiens
ccagcctgattcctc

SEQ ID NO: 1280429 - DNA, 15 bp, Homo sapiens
tccagcctgattcct

SEQ ID NO: 1280430 - DNA, 15 bp, Homo sapiens
ttccagcctgattcc

SEQ ID NO: 1280431 - DNA, 15 bp, Homo sapiens
tttccagcctgattc

SEQ ID NO: 1280432 - DNA, 15 bp, Homo sapiens
ctttccagcctgatt

SEQ ID NO: 1280433 - DNA, 15 bp, Homo sapiens
gctttccagcctgat

SEQ ID NO: 1280434 - DNA, 15 bp, Homo sapiens
tgctttccagcctga

SEQ ID NO: 1280435 - DNA, 15 bp, Homo sapiens
ctgctttccagcctg

SEQ ID NO: 1280436 - DNA, 15 bp, Homo sapiens
tctgctttccagcct

SEQ ID NO: 1280437 - DNA, 15 bp, Homo sapiens
ttctgctttccagcc

SEQ ID NO: 1280438 - DNA, 15 bp, Homo sapiens
attctgctttccagc

SEQ ID NO: 1280439 - DNA, 15 bp, Homo sapiens
cattctgctttccag

SEQ ID NO: 1280440 - DNA, 15 bp, Homo sapiens
tcattctgctttcca

SEQ ID NO: 1280441 - DNA, 15 bp, Homo sapiens
ctcattctgctttcc

SEQ ID NO: 1280442 - DNA, 15 bp, Homo sapiens
tctcattctgctttc

SEQ ID NO: 1280443 - DNA, 15 bp, Homo sapiens
atctcattctgcttt

SEQ ID NO: 1280444 - DNA, 15 bp, Homo sapiens
tatctcattctgctt

SEQ ID NO: 1280445 - DNA, 15 bp, Homo sapiens
atatctcattctgct

SEQ ID NO: 1280446 - DNA, 15 bp, Homo sapiens
catatctcattctgc

SEQ ID NO: 1280447 - DNA, 15 bp, Homo sapiens
tcatatctcattctg

SEQ ID NO: 1280448 - DNA, 15 bp, Homo sapiens
ctcatatctcattct

SEQ ID NO: 1280449 - DNA, 15 bp, Homo sapiens
tctcatatctcattc

SEQ ID NO: 1280450 - DNA, 15 bp, Homo sapiens
ttctcatatctcatt

SEQ ID NO: 1280451 - DNA, 15 bp, Homo sapiens
attctcatatctcat

SEQ ID NO: 1280452 - DNA, 15 bp, Homo sapiens
gattctcatatctca

SEQ ID NO: 1280453 - DNA, 15 bp, Homo sapiens
tgattctcatatctc

SEQ ID NO: 1280454 - DNA, 15 bp, Homo sapiens
atgattctcatatct

SEQ ID NO: 1280455 - DNA, 15 bp, Homo sapiens
gatgattctcatatc

SEQ ID NO: 1280456 - DNA, 15 bp, Homo sapiens
agatgattctcatat

SEQ ID NO: 1280457 - DNA, 15 bp, Homo sapiens
cagatgattctcata

SEQ ID NO: 1280458 - DNA, 15 bp, Homo sapiens
acagatgattctcat

SEQ ID NO: 1280459 - DNA, 15 bp, Homo sapiens
tacagatgattctca

SEQ ID NO: 1280460 - DNA, 15 bp, Homo sapiens
atacagatgattctc

SEQ ID NO: 1280461 - DNA, 15 bp, Homo sapiens
tatacagatgattct

SEQ ID NO: 1280462 - DNA, 15 bp, Homo sapiens
atatacagatgattc

SEQ ID NO: 1280463 - DNA, 15 bp, Homo sapiens
catatacagatgatt

SEQ ID NO: 1280464 - DNA, 15 bp, Homo sapiens
tcatatacagatgat

SEQ ID NO: 1280465 - DNA, 15 bp, Homo sapiens
ctcatatacagatga

SEQ ID NO: 1280466 - DNA, 15 bp, Homo sapiens
tctcatatacagatg

SEQ ID NO: 1280467 - DNA, 15 bp, Homo sapiens
atctcatatacagat

SEQ ID NO: 1280468 - DNA, 15 bp, Homo sapiens
catctcatatacaga

SEQ ID NO: 1280469 - DNA, 15 bp, Homo sapiens
tcatctcatatacag

SEQ ID NO: 1280470 - DNA, 15 bp, Homo sapiens
atcatctcatataca

SEQ ID NO: 1280471 - DNA, 15 bp, Homo sapiens
catcatctcatatac

SEQ ID NO: 1280472 - DNA, 15 bp, Homo sapiens
tcatcatctcatata

SEQ ID NO: 1280473 - DNA, 15 bp, Homo sapiens
ctcatcatctcatat

SEQ ID NO: 1280474 - DNA, 15 bp, Homo sapiens
cctcatcatctcata

SEQ ID NO: 1280475 - DNA, 15 bp, Homo sapiens
ccctcatcatctcat

SEQ ID NO: 1280476 - DNA, 15 bp, Homo sapiens
gccctcatcatctca

SEQ ID NO: 1280477 - DNA, 15 bp, Homo sapiens
agccctcatcatctc

SEQ ID NO: 1280478 - DNA, 15 bp, Homo sapiens
cagccctcatcatct

SEQ ID NO: 1280479 - DNA, 15 bp, Homo sapiens
acagccctcatcatc

SEQ ID NO: 1280480 - DNA, 15 bp, Homo sapiens
tacagccctcatcat

SEQ ID NO: 1280481 - DNA, 15 bp, Homo sapiens
ctacagccctcatca

SEQ ID NO: 1280482 - DNA, 15 bp, Homo sapiens
cctacagccctcatc

SEQ ID NO: 1280483 - DNA, 15 bp, Homo sapiens
tcctacagccctcat

SEQ ID NO: 1280484 - DNA, 15 bp, Homo sapiens
ctcctacagccctca

SEQ ID NO: 1280485 - DNA, 15 bp, Homo sapiens
actcctacagccctc

SEQ ID NO: 1280486 - DNA, 15 bp, Homo sapiens
cactcctacagccct

SEQ ID NO: 1280487 - DNA, 15 bp, Homo sapiens
ccactcctacagccc

SEQ ID NO: 1280488 - DNA, 15 bp, Homo sapiens
tccactcctacagcc

SEQ ID NO: 1280489 - DNA, 15 bp, Homo sapiens
atccactcctacagc

SEQ ID NO: 1280490 - DNA, 15 bp, Homo sapiens
catccactcctacag

SEQ ID NO: 1280491 - DNA, 15 bp, Homo sapiens
tcatccactcctaca

SEQ ID NO: 1280492 - DNA, 15 bp, Homo sapiens
ctcatccactcctac

SEQ ID NO: 1280493 - DNA, 15 bp, Homo sapiens
tctcatccactccta

SEQ ID NO: 1280494 - DNA, 15 bp, Homo sapiens
ctctcatccactcct

SEQ ID NO: 1280495 - DNA, 15 bp, Homo sapiens
actctcatccactcc

SEQ ID NO: 1280496 - DNA, 15 bp, Homo sapiens
cactctcatccactc

SEQ ID NO: 1280497 - DNA, 15 bp, Homo sapiens
gcactctcatccact

SEQ ID NO: 1280498 - DNA, 15 bp, Homo sapiens
agcactctcatccac

SEQ ID NO: 1280499 - DNA, 15 bp, Homo sapiens
cagcactctcatcca

SEQ ID NO: 1280500 - DNA, 15 bp, Homo sapiens
tcagcactctcatcc

SEQ ID NO: 1280501 - DNA, 15 bp, Homo sapiens
ctcagcactctcatc

SEQ ID NO: 1280502 - DNA, 15 bp, Homo sapiens
cctcagcactctcat

SEQ ID NO: 1280503 - DNA, 15 bp, Homo sapiens
tcctcagcactctca

SEQ ID NO: 1280504 - DNA, 15 bp, Homo sapiens
ttcctcagcactctc

SEQ ID NO: 1280505 - DNA, 15 bp, Homo sapiens
tttcctcagcactct

SEQ ID NO: 1280506 - DNA, 15 bp, Homo sapiens
ttttcctcagcactc

SEQ ID NO: 1280507 - DNA, 15 bp, Homo sapiens
tttttcctcagcact

SEQ ID NO: 1280508 - DNA, 15 bp, Homo sapiens
ttttttcctcagcac

SEQ ID NO: 1280509 - DNA, 15 bp, Homo sapiens
cttttttcctcagca

SEQ ID NO: 1280510 - DNA, 15 bp, Homo sapiens
tcttttttcctcagc

SEQ ID NO: 1280511 - DNA, 15 bp, Homo sapiens
ctcttttttcctcag

SEQ ID NO: 1280512 - DNA, 15 bp, Homo sapiens
tctcttttttcctca

SEQ ID NO: 1280513 - DNA, 15 bp, Homo sapiens
ttctcttttttcctc

SEQ ID NO: 1280514 - DNA, 15 bp, Homo sapiens
attctcttttttcct

SEQ ID NO: 1280515 - DNA, 15 bp, Homo sapiens
cattctcttttttcc

SEQ ID NO: 1280516 - DNA, 15 bp, Homo sapiens
ccattctcttttttc

SEQ ID NO: 1280517 - DNA, 15 bp, Homo sapiens
accattctctttttt

SEQ ID NO: 1280518 - DNA, 15 bp, Homo sapiens
caccattctcttttt

SEQ ID NO: 1280519 - DNA, 15 bp, Homo sapiens
ccaccattctctttt

SEQ ID NO: 1280520 - DNA, 15 bp, Homo sapiens
cccaccattctcttt

SEQ ID NO: 1280521 - DNA, 15 bp, Homo sapiens
tcccaccattctctt

SEQ ID NO: 1280522 - DNA, 15 bp, Homo sapiens
ttcccaccattctct

SEQ ID NO: 1280523 - DNA, 15 bp, Homo sapiens
tttcccaccattctc

SEQ ID NO: 1280524 - DNA, 15 bp, Homo sapiens
ttttcccaccattct

SEQ ID NO: 1280525 - DNA, 15 bp, Homo sapiens
tttttcccaccattc

SEQ ID NO: 1280526 - DNA, 15 bp, Homo sapiens
ttttttcccaccatt

SEQ ID NO: 1280527 - DNA, 15 bp, Homo sapiens
cttttttcccaccat

SEQ ID NO: 1280528 - DNA, 15 bp, Homo sapiens
gcttttttcccacca

SEQ ID NO: 1280529 - DNA, 15 bp, Homo sapiens
ggcttttttcccacc

SEQ ID NO: 1280530 - DNA, 15 bp, Homo sapiens
gggcttttttcccac

SEQ ID NO: 1280531 - DNA, 15 bp, Homo sapiens
tgggcttttttccca

SEQ ID NO: 1280532 - DNA, 15 bp, Homo sapiens
atgggcttttttccc

SEQ ID NO: 1280533 - DNA, 15 bp, Homo sapiens
catgggcttttttcc

SEQ ID NO: 1280534 - DNA, 15 bp, Homo sapiens
ccatgggcttttttc

SEQ ID NO: 1280535 - DNA, 15 bp, Homo sapiens
tccatgggctttttt

SEQ ID NO: 1280536 - DNA, 15 bp, Homo sapiens
ctccatgggcttttt

SEQ ID NO: 1280537 - DNA, 15 bp, Homo sapiens
actccatgggctttt

SEQ ID NO: 1280538 - DNA, 15 bp, Homo sapiens
aactccatgggcttt

SEQ ID NO: 1280539 - DNA, 15 bp, Homo sapiens
caactccatgggctt

SEQ ID NO: 1280540 - DNA, 15 bp, Homo sapiens
tcaactccatgggct

SEQ ID NO: 1280541 - DNA, 15 bp, Homo sapiens
ctcaactccatgggc

SEQ ID NO: 1280542 - DNA, 15 bp, Homo sapiens
tctcaactccatggg

SEQ ID NO: 1280543 - DNA, 15 bp, Homo sapiens
ttctcaactccatgg

SEQ ID NO: 1280544 - DNA, 15 bp, Homo sapiens
tttctcaactccatg

SEQ ID NO: 1280545 - DNA, 15 bp, Homo sapiens
gtttctcaactccat

SEQ ID NO: 1280546 - DNA, 15 bp, Homo sapiens
ggtttctcaactcca

SEQ ID NO: 1280547 - DNA, 15 bp, Homo sapiens
gggtttctcaactcc

SEQ ID NO: 1280548 - DNA, 15 bp, Homo sapiens
ggggtttctcaactc

SEQ ID NO: 1280549 - DNA, 15 bp, Homo sapiens
tggggtttctcaact

SEQ ID NO: 1280550 - DNA, 15 bp, Homo sapiens
atggggtttctcaac

SEQ ID NO: 1280551 - DNA, 15 bp, Homo sapiens
catggggtttctcaa

SEQ ID NO: 1280552 - DNA, 15 bp, Homo sapiens
tcatggggtttctca

SEQ ID NO: 1280553 - DNA, 15 bp, Homo sapiens
ttcatggggtttctc

SEQ ID NO: 1280554 - DNA, 15 bp, Homo sapiens
tttcatggggtttct

SEQ ID NO: 1280555 - DNA, 15 bp, Homo sapiens
ttttcatggggtttc

SEQ ID NO: 1280556 - DNA, 15 bp, Homo sapiens
tttttcatggggttt

SEQ ID NO: 1280557 - DNA, 15 bp, Homo sapiens
ctttttcatggggtt

SEQ ID NO: 1280558 - DNA, 15 bp, Homo sapiens
actttttcatggggt

SEQ ID NO: 1280559 - DNA, 15 bp, Homo sapiens
aactttttcatgggg

SEQ ID NO: 1280560 - DNA, 15 bp, Homo sapiens
caactttttcatggg

SEQ ID NO: 1280561 - DNA, 15 bp, Homo sapiens
acaactttttcatgg

SEQ ID NO: 1280562 - DNA, 15 bp, Homo sapiens
cacaactttttcatg

SEQ ID NO: 1280563 - DNA, 15 bp, Homo sapiens
tcacaactttttcat

SEQ ID NO: 1280564 - DNA, 15 bp, Homo sapiens
ctcacaactttttca

SEQ ID NO: 1280565 - DNA, 15 bp, Homo sapiens
tctcacaactttttc

SEQ ID NO: 1280566 - DNA, 15 bp, Homo sapiens
ctctcacaacttttt

SEQ ID NO: 1280567 - DNA, 15 bp, Homo sapiens
cctctcacaactttt

SEQ ID NO: 1280568 - DNA, 15 bp, Homo sapiens
tcctctcacaacttt

SEQ ID NO: 1280569 - DNA, 15 bp, Homo sapiens
ttcctctcacaactt

SEQ ID NO: 1280570 - DNA, 15 bp, Homo sapiens
tttcctctcacaact

SEQ ID NO: 1280571 - DNA, 15 bp, Homo sapiens
ttttcctctcacaac

SEQ ID NO: 1280572 - DNA, 15 bp, Homo sapiens
cttttcctctcacaa

SEQ ID NO: 1280573 - DNA, 15 bp, Homo sapiens
tcttttcctctcaca

SEQ ID NO: 1280574 - DNA, 15 bp, Homo sapiens
ctcttttcctctcac

SEQ ID NO: 1280575 - DNA, 15 bp, Homo sapiens
tctcttttcctctca

SEQ ID NO: 1280576 - DNA, 15 bp, Homo sapiens
ttctcttttcctctc

SEQ ID NO: 1280577 - DNA, 15 bp, Homo sapiens
cttctcttttcctct

SEQ ID NO: 1280578 - DNA, 15 bp, Homo sapiens
tcttctcttttcctc

SEQ ID NO: 1280579 - DNA, 15 bp, Homo sapiens
ctcttctcttttcct

SEQ ID NO: 1280580 - DNA, 15 bp, Homo sapiens
cattctcttctcttt

SEQ ID NO: 1280581 - DNA, 15 bp, Homo sapiens
tcattctcttctctt

SEQ ID NO: 1280582 - DNA, 15 bp, Homo sapiens
ctcattctcttctct

SEQ ID NO: 1280583 - DNA, 15 bp, Homo sapiens
cctcattctcttctc

SEQ ID NO: 1280584 - DNA, 15 bp, Homo sapiens
tcctcattctcttct

SEQ ID NO: 1280585 - DNA, 15 bp, Homo sapiens
atcctcattctcttc

SEQ ID NO: 1280586 - DNA, 15 bp, Homo sapiens
catcctcattctctt

SEQ ID NO: 1280587 - DNA, 15 bp, Homo sapiens
acatcctcattctct

SEQ ID NO: 1280588 - DNA, 15 bp, Homo sapiens
cacatcctcattctc

SEQ ID NO: 1280589 - DNA, 15 bp, Homo sapiens
tcacatcctcattct

SEQ ID NO: 1280590 - DNA, 15 bp, Homo sapiens
ctcacatcctcattc

SEQ ID NO: 1280591 - DNA, 15 bp, Homo sapiens
cctcacatcctcatt

SEQ ID NO: 1280592 - DNA, 15 bp, Homo sapiens
ccctcacatcctcat

SEQ ID NO: 1280593 - DNA, 15 bp, Homo sapiens
gccctcacatcctca

SEQ ID NO: 1280594 - DNA, 15 bp, Homo sapiens
tgccctcacatcctc

SEQ ID NO: 1280595 - DNA, 15 bp, Homo sapiens
atgccctcacatcct

SEQ ID NO: 1280596 - DNA, 15 bp, Homo sapiens
aatgccctcacatcc

SEQ ID NO: 1280597 - DNA, 15 bp, Homo sapiens
aaatgccctcacatc

SEQ ID NO: 1280598 - DNA, 15 bp, Homo sapiens
taaatgccctcacat

SEQ ID NO: 1280599 - DNA, 15 bp, Homo sapiens
ttaaatgccctcaca

SEQ ID NO: 1280600 - DNA, 15 bp, Homo sapiens
tttaaatgccctcac

SEQ ID NO: 1280601 - DNA, 15 bp, Homo sapiens
ttttaaatgccctca

SEQ ID NO: 1280602 - DNA, 15 bp, Homo sapiens
tttttaaatgccctc

SEQ ID NO: 1280603 - DNA, 15 bp, Homo sapiens
ttttttaaatgccct

SEQ ID NO: 1280604 - DNA, 15 bp, Homo sapiens
cttttttaaatgccc

SEQ ID NO: 1280605 - DNA, 15 bp, Homo sapiens
gcttttttaaatgcc

SEQ ID NO: 1280606 - DNA, 15 bp, Homo sapiens
agcttttttaaatgc

SEQ ID NO: 1280607 - DNA, 15 bp, Homo sapiens
tagcttttttaaatg

SEQ ID NO: 1280608 - DNA, 15 bp, Homo sapiens
gtagcttttttaaat

SEQ ID NO: 1280609 - DNA, 15 bp, Homo sapiens
agtagcttttttaaa

SEQ ID NO: 1280610 - DNA, 15 bp, Homo sapiens
cagtagcttttttaa

SEQ ID NO: 1280611 - DNA, 15 bp, Homo sapiens
tcagtagctttttta

SEQ ID NO: 1280612 - DNA, 15 bp, Homo sapiens
ttcagtagctttttt

SEQ ID NO: 1280613 - DNA, 15 bp, Homo sapiens
tttcagtagcttttt

SEQ ID NO: 1280614 - DNA, 15 bp, Homo sapiens
ttttcagtagctttt

SEQ ID NO: 1280615 - DNA, 15 bp, Homo sapiens
tttttcagtagcttt

SEQ ID NO: 1280616 - DNA, 15 bp, Homo sapiens
ttttttcagtagctt

SEQ ID NO: 1280617 - DNA, 15 bp, Homo sapiens
cttttttcagtagct

SEQ ID NO: 1280618 - DNA, 15 bp, Homo sapiens
acttttttcagtagc

SEQ ID NO: 1280619 - DNA, 15 bp, Homo sapiens
aacttttttcagtag

SEQ ID NO: 1280620 - DNA, 15 bp, Homo sapiens
caacttttttcagta

SEQ ID NO: 1280621 - DNA, 15 bp, Homo sapiens
gcaacttttttcagt

SEQ ID NO: 1280622 - DNA, 15 bp, Homo sapiens
tgcaacttttttcag

SEQ ID NO: 1280623 - DNA, 15 bp, Homo sapiens
atgcaacttttttca

SEQ ID NO: 1280624 - DNA, 15 bp, Homo sapiens
catgcaacttttttc

SEQ ID NO: 1280625 - DNA, 15 bp, Homo sapiens
ccatgcaactttttt

SEQ ID NO: 1280626 - DNA, 15 bp, Homo sapiens
tccatgcaacttttt

SEQ ID NO: 1280627 - DNA, 15 bp, Homo sapiens
ctccatgcaactttt

SEQ ID NO: 1280628 - DNA, 15 bp, Homo sapiens
cctccatgcaacttt

SEQ ID NO: 1280629 - DNA, 15 bp, Homo sapiens
acctccatgcaactt

SEQ ID NO: 1280630 - DNA, 15 bp, Homo sapiens
tacctccatgcaact

SEQ ID NO: 1280631 - DNA, 15 bp, Homo sapiens
atacctccatgcaac

SEQ ID NO: 1280632 - DNA, 15 bp, Homo sapiens
tatacctccatgcaa

SEQ ID NO: 1280633 - DNA, 15 bp, Homo sapiens
gtatacctccatgca

SEQ ID NO: 1280634 - DNA, 15 bp, Homo sapiens
agtatacctccatgc

SEQ ID NO: 1280635 - DNA, 15 bp, Homo sapiens
cagtatacctccatg

SEQ ID NO: 1280636 - DNA, 15 bp, Homo sapiens
tcagtatacctccat

SEQ ID NO: 1280637 - DNA, 15 bp, Homo sapiens
ttcagtatacctcca

SEQ ID NO: 1280638 - DNA, 15 bp, Homo sapiens
cttcagtatacctcc

SEQ ID NO: 1280639 - DNA, 15 bp, Homo sapiens
ccttcagtatacctc

SEQ ID NO: 1280640 - DNA, 15 bp, Homo sapiens
tccttcagtatacct

SEQ ID NO: 1280641 - DNA, 15 bp, Homo sapiens
ctccttcagtatacc

SEQ ID NO: 1280642 - DNA, 15 bp, Homo sapiens
tctccttcagtatac

SEQ ID NO: 1280643 - DNA, 15 bp, Homo sapiens
ttctccttcagtata

SEQ ID NO: 1280644 - DNA, 15 bp, Homo sapiens
tttctccttcagtat

SEQ ID NO: 1280645 - DNA, 15 bp, Homo sapiens
ttttctccttcagta

SEQ ID NO: 1280646 - DNA, 15 bp, Homo sapiens
tttttctccttcagt

SEQ ID NO: 1280647 - DNA, 15 bp, Homo sapiens
atttttctccttcag

SEQ ID NO: 1280648 - DNA, 15 bp, Homo sapiens
aatttttctccttca

SEQ ID NO: 1280649 - DNA, 15 bp, Homo sapiens
caatttttctccttc

SEQ ID NO: 1280650 - DNA, 15 bp, Homo sapiens
gcaatttttctcctt

SEQ ID NO: 1280651 - DNA, 15 bp, Homo sapiens
tgcaatttttctcct

SEQ ID NO: 1280652 - DNA, 15 bp, Homo sapiens
ttgcaatttttctcc

SEQ ID NO: 1280653 - DNA, 15 bp, Homo sapiens
gttgcaatttttctc

SEQ ID NO: 1280654 - DNA, 15 bp, Homo sapiens
tgttgcaatttttct

SEQ ID NO: 1280655 - DNA, 15 bp, Homo sapiens
ctgttgcaatttttc

SEQ ID NO: 1280656 - DNA, 15 bp, Homo sapiens
actgttgcaattttt

SEQ ID NO: 1280657 - DNA, 15 bp, Homo sapiens
cactgttgcaatttt

SEQ ID NO: 1280658 - DNA, 15 bp, Homo sapiens
acactgttgcaattt

SEQ ID NO: 1280659 - DNA, 15 bp, Homo sapiens
gacactgttgcaatt

SEQ ID NO: 1280660 - DNA, 15 bp, Homo sapiens
tgacactgttgcaat

SEQ ID NO: 1280661 - DNA, 15 bp, Homo sapiens
ctgacactgttgcaa

SEQ ID NO: 1280662 - DNA, 15 bp, Homo sapiens
tctgacactgttgca

SEQ ID NO: 1280663 - DNA, 15 bp, Homo sapiens
atctgacactgttgc

SEQ ID NO: 1280664 - DNA, 15 bp, Homo sapiens
catctgacactgttg

SEQ ID NO: 1280665 - DNA, 15 bp, Homo sapiens
gcatctgacactgtt

SEQ ID NO: 1280666 - DNA, 15 bp, Homo sapiens
agcatctgacactgt

SEQ ID NO: 1280667 - DNA, 15 bp, Homo sapiens
cagcatctgacactg

SEQ ID NO: 1280668 - DNA, 15 bp, Homo sapiens
gcagcatctgacact

SEQ ID NO: 1280669 - DNA, 15 bp, Homo sapiens
tgcagcatctgacac

SEQ ID NO: 1280670 - DNA, 15 bp, Homo sapiens
atgcagcatctgaca

SEQ ID NO: 1280671 - DNA, 15 bp, Homo sapiens
tatgcagcatctgac

SEQ ID NO: 1280672 - DNA, 15 bp, Homo sapiens
ctatgcagcatctga

SEQ ID NO: 1280673 - DNA, 15 bp, Homo sapiens
tctatgcagcatctg

SEQ ID NO: 1280674 - DNA, 15 bp, Homo sapiens
ctctatgcagcatct

SEQ ID NO: 1280675 - DNA, 15 bp, Homo sapiens
cctctatgcagcatc

SEQ ID NO: 1280676 - DNA, 15 bp, Homo sapiens
acctctatgcagcat

SEQ ID NO: 1280677 - DNA, 15 bp, Homo sapiens
gacctctatgcagca

SEQ ID NO: 1280678 - DNA, 15 bp, Homo sapiens
agacctctatgcagc

SEQ ID NO: 1280679 - DNA, 15 bp, Homo sapiens
aagacctctatgcag

SEQ ID NO: 1280680 - DNA, 15 bp, Homo sapiens
aaagacctctatgca

SEQ ID NO: 1280681 - DNA, 15 bp, Homo sapiens
gaaagacctctatgc

SEQ ID NO: 1280682 - DNA, 15 bp, Homo sapiens
agaaagacctctatg

SEQ ID NO: 1280683 - DNA, 15 bp, Homo sapiens
cagaaagacctctat

SEQ ID NO: 1280684 - DNA, 15 bp, Homo sapiens
ccagaaagacctcta

SEQ ID NO: 1280685 - DNA, 15 bp, Homo sapiens
tccagaaagacctct

SEQ ID NO: 1280686 - DNA, 15 bp, Homo sapiens
atccagaaagacctc

SEQ ID NO: 1280687 - DNA, 15 bp, Homo sapiens
aatccagaaagacct

SEQ ID NO: 1280688 - DNA, 15 bp, Homo sapiens
aaatccagaaagacc

SEQ ID NO: 1280689 - DNA, 15 bp, Homo sapiens
aaaatccagaaagac

SEQ ID NO: 1280690 - DNA, 15 bp, Homo sapiens
caaaatccagaaaga

SEQ ID NO: 1280691 - DNA, 15 bp, Homo sapiens
gcaaaatccagaaag

SEQ ID NO: 1280692 - DNA, 15 bp, Homo sapiens
tgcaaaatccagaaa

SEQ ID NO: 1280693 - DNA, 15 bp, Homo sapiens
atgcaaaatccagaa

SEQ ID NO: 1280694 - DNA, 15 bp, Homo sapiens
gatgcaaaatccaga

SEQ ID NO: 1280695 - DNA, 15 bp, Homo sapiens
ggatgcaaaatccag

SEQ ID NO: 1280696 - DNA, 15 bp, Homo sapiens
tggatgcaaaatcca

SEQ ID NO: 1280697 - DNA, 15 bp, Homo sapiens
atggatgcaaaatcc

SEQ ID NO: 1280698 - DNA, 15 bp, Homo sapiens
catggatgcaaaatc

SEQ ID NO: 1280699 - DNA, 15 bp, Homo sapiens
acatggatgcaaaat

SEQ ID NO: 1280700 - DNA, 15 bp, Homo sapiens
aacatggatgcaaaa

SEQ ID NO: 1280701 - DNA, 15 bp, Homo sapiens
gaacatggatgcaaa

SEQ ID NO: 1280702 - DNA, 15 bp, Homo sapiens
tgaacatggatgcaa

SEQ ID NO: 1280703 - DNA, 15 bp, Homo sapiens
atgaacatggatgca

SEQ ID NO: 1280704 - DNA, 15 bp, Homo sapiens
gatgaacatggatgc

SEQ ID NO: 1280705 - DNA, 15 bp, Homo sapiens
tgatgaacatggatg

SEQ ID NO: 1280706 - DNA, 15 bp, Homo sapiens
ctgatgaacatggat

SEQ ID NO: 1280707 - DNA, 15 bp, Homo sapiens
cctgatgaacatgga

SEQ ID NO: 1280708 - DNA, 15 bp, Homo sapiens
ccctgatgaacatgg

SEQ ID NO: 1280709 - DNA, 15 bp, Homo sapiens
tccctgatgaacatg

SEQ ID NO: 1280710 - DNA, 15 bp, Homo sapiens
gtccctgatgaacat

SEQ ID NO: 1280711 - DNA, 15 bp, Homo sapiens
tgtccctgatgaaca

SEQ ID NO: 1280712 - DNA, 15 bp, Homo sapiens
atgtccctgatgaac

SEQ ID NO: 1280713 - DNA, 15 bp, Homo sapiens
gatgtccctgatgaa

SEQ ID NO: 1280714 - DNA, 15 bp, Homo sapiens
tgatgtccctgatga

SEQ ID NO: 1280715 - DNA, 15 bp, Homo sapiens
ctgatgtccctgatg

SEQ ID NO: 1280716 - DNA, 15 bp, Homo sapiens
actgatgtccctgat

SEQ ID NO: 1280717 - DNA, 15 bp, Homo sapiens
gactgatgtccctga

SEQ ID NO: 1280718 - DNA, 15 bp, Homo sapiens
agactgatgtccctg

SEQ ID NO: 1280719 - DNA, 15 bp, Homo sapiens
tagactgatgtccct

SEQ ID NO: 1280720 - DNA, 15 bp, Homo sapiens
ttagactgatgtccc

SEQ ID NO: 1280721 - DNA, 15 bp, Homo sapiens
tttagactgatgtcc

SEQ ID NO: 1280722 - DNA, 15 bp, Homo sapiens
ttttagactgatgtc

SEQ ID NO: 1280723 - DNA, 15 bp, Homo sapiens
attttagactgatgt

SEQ ID NO: 1280724 - DNA, 15 bp, Homo sapiens
aattttagactgatg

SEQ ID NO: 1280725 - DNA, 15 bp, Homo sapiens
gaattttagactgat

SEQ ID NO: 1280726 - DNA, 15 bp, Homo sapiens
agaattttagactga

SEQ ID NO: 1280727 - DNA, 15 bp, Homo sapiens
gagaattttagactg

SEQ ID NO: 1280728 - DNA, 15 bp, Homo sapiens
agagaattttagact

SEQ ID NO: 1280729 - DNA, 15 bp, Homo sapiens
aagagaattttagac

SEQ ID NO: 1280730 - DNA, 15 bp, Homo sapiens
aaagagaattttaga

SEQ ID NO: 1280731 - DNA, 15 bp, Homo sapiens
aaaagagaattttag

SEQ ID NO: 1280732 - DNA, 15 bp, Homo sapiens
aaaaagagaatttta

SEQ ID NO: 1280733 - DNA, 15 bp, Homo sapiens
aaaaaagagaatttt

SEQ ID NO: 1280734 - DNA, 15 bp, Homo sapiens
aaaaaaagagaattt

SEQ ID NO: 1280735 - DNA, 15 bp, Homo sapiens
caaaaaaagagaatt

SEQ ID NO: 1280736 - DNA, 15 bp, Homo sapiens
caacaaaaaaagaga

SEQ ID NO: 1280737 - DNA, 15 bp, Homo sapiens
acaacaaaaaaagag

SEQ ID NO: 1280738 - DNA, 15 bp, Homo sapiens
cacaacaaaaaaaga

SEQ ID NO: 1280739 - DNA, 15 bp, Homo sapiens
acacaacaaaaaaag

SEQ ID NO: 1280740 - DNA, 15 bp, Homo sapiens
gacacaacaaaaaaa

SEQ ID NO: 1280741 - DNA, 15 bp, Homo sapiens
agacacaacaaaaaa

SEQ ID NO: 1280742 - DNA, 15 bp, Homo sapiens
gagacacaacaaaaa

SEQ ID NO: 1280743 - DNA, 15 bp, Homo sapiens
agagacacaacaaaa

SEQ ID NO: 1280744 - DNA, 15 bp, Homo sapiens
cagagacacaacaaa

SEQ ID NO: 1280745 - DNA, 15 bp, Homo sapiens
gcagagacacaacaa

SEQ ID NO: 1280746 - DNA, 15 bp, Homo sapiens
ggcagagacacaaca

SEQ ID NO: 1280747 - DNA, 15 bp, Homo sapiens
tggcagagacacaac

SEQ ID NO: 1280748 - DNA, 15 bp, Homo sapiens
ctggcagagacacaa

SEQ ID NO: 1280749 - DNA, 15 bp, Homo sapiens
cctggcagagacaca

SEQ ID NO: 1280750 - DNA, 15 bp, Homo sapiens
gcctggcagagacac

SEQ ID NO: 1280751 - DNA, 15 bp, Homo sapiens
agcctggcagagaca

SEQ ID NO: 1280752 - DNA, 15 bp, Homo sapiens
aagcctggcagagac

SEQ ID NO: 1280753 - DNA, 15 bp, Homo sapiens
aaagcctggcagaga

SEQ ID NO: 1280754 - DNA, 15 bp, Homo sapiens
caaagcctggcagag

SEQ ID NO: 1280755 - DNA, 15 bp, Homo sapiens
ccaaagcctggcaga

SEQ ID NO: 1280756 - DNA, 15 bp, Homo sapiens
accaaagcctggcag

SEQ ID NO: 1280757 - DNA, 15 bp, Homo sapiens
taccaaagcctggca

SEQ ID NO: 1280758 - DNA, 15 bp, Homo sapiens
ataccaaagcctggc

SEQ ID NO: 1280759 - DNA, 15 bp, Homo sapiens
gataccaaagcctgg

SEQ ID NO: 1280760 - DNA, 15 bp, Homo sapiens
tgataccaaagcctg

SEQ ID NO: 1280761 - DNA, 15 bp, Homo sapiens
ctgataccaaagcct

SEQ ID NO: 1280762 - DNA, 15 bp, Homo sapiens
cctgataccaaagcc

SEQ ID NO: 1280763 - DNA, 15 bp, Homo sapiens
tcctgataccaaagc

SEQ ID NO: 1280764 - DNA, 15 bp, Homo sapiens
atcctgataccaaag

SEQ ID NO: 1280765 - DNA, 15 bp, Homo sapiens
catcctgataccaaa

SEQ ID NO: 1280766 - DNA, 15 bp, Homo sapiens
tcatcctgataccaa

SEQ ID NO: 1280767 - DNA, 15 bp, Homo sapiens
atcatcctgatacca

SEQ ID NO: 1280768 - DNA, 15 bp, Homo sapiens
aatcatcctgatacc

SEQ ID NO: 1280769 - DNA, 15 bp, Homo sapiens
aaatcatcctgatac

SEQ ID NO: 1280770 - DNA, 15 bp, Homo sapiens
aaaatcatcctgata

SEQ ID NO: 1280771 - DNA, 15 bp, Homo sapiens
caaaatcatcctgat

SEQ ID NO: 1280772 - DNA, 15 bp, Homo sapiens
ccaaaatcatcctga

SEQ ID NO: 1280773 - DNA, 15 bp, Homo sapiens
gccaaaatcatcctg

SEQ ID NO: 1280774 - DNA, 15 bp, Homo sapiens
ggccaaaatcatcct

SEQ ID NO: 1280775 - DNA, 15 bp, Homo sapiens
aggccaaaatcatcc

SEQ ID NO: 1280776 - DNA, 15 bp, Homo sapiens
gaggccaaaatcatc

SEQ ID NO: 1280777 - DNA, 15 bp, Homo sapiens
tgaggccaaaatcat

SEQ ID NO: 1280778 - DNA, 15 bp, Homo sapiens
atgaggccaaaatca

SEQ ID NO: 1280779 - DNA, 15 bp, Homo sapiens
tatgaggccaaaatc

SEQ ID NO: 1280780 - DNA, 15 bp, Homo sapiens
ttatgaggccaaaat

SEQ ID NO: 1280781 - DNA, 15 bp, Homo sapiens
tttatgaggccaaaa

SEQ ID NO: 1280782 - DNA, 15 bp, Homo sapiens
ttttatgaggccaaa

SEQ ID NO: 1280783 - DNA, 15 bp, Homo sapiens
attttatgaggccaa

SEQ ID NO: 1280784 - DNA, 15 bp, Homo sapiens
cattttatgaggcca

SEQ ID NO: 1280785 - DNA, 15 bp, Homo sapiens
tcattttatgaggcc

SEQ ID NO: 1280786 - DNA, 15 bp, Homo sapiens
ttcattttatgaggc

SEQ ID NO: 1280787 - DNA, 15 bp, Homo sapiens
attcattttatgagg

SEQ ID NO: 1280788 - DNA, 15 bp, Homo sapiens
aattcattttatgag

SEQ ID NO: 1280789 - DNA, 15 bp, Homo sapiens
taattcattttatga

SEQ ID NO: 1280790 - DNA, 15 bp, Homo sapiens
ctaattcattttatg

SEQ ID NO: 1280791 - DNA, 15 bp, Homo sapiens
cctaattcattttat

SEQ ID NO: 1280792 - DNA, 15 bp, Homo sapiens
ccctaattcatttta

SEQ ID NO: 1280793 - DNA, 15 bp, Homo sapiens
tccctaattcatttt

SEQ ID NO: 1280794 - DNA, 15 bp, Homo sapiens
ctccctaattcattt

SEQ ID NO: 1280795 - DNA, 15 bp, Homo sapiens
cctccctaattcatt

SEQ ID NO: 1280796 - DNA, 15 bp, Homo sapiens
tcctccctaattcat

SEQ ID NO: 1280797 - DNA, 15 bp, Homo sapiens
atcctccctaattca

SEQ ID NO: 1280798 - DNA, 15 bp, Homo sapiens
aatcctccctaattc

SEQ ID NO: 1280799 - DNA, 15 bp, Homo sapiens
gaatcctccctaatt

SEQ ID NO: 1280800 - DNA, 15 bp, Homo sapiens
ggaatcctccctaat

SEQ ID NO: 1280801 - DNA, 15 bp, Homo sapiens
gggaatcctccctaa

SEQ ID NO: 1280802 - DNA, 15 bp, Homo sapiens
agggaatcctcccta

SEQ ID NO: 1280803 - DNA, 15 bp, Homo sapiens
gagggaatcctccct

SEQ ID NO: 1280804 - DNA, 15 bp, Homo sapiens
agagggaatcctccc

SEQ ID NO: 1280805 - DNA, 15 bp, Homo sapiens
aagagggaatcctcc

SEQ ID NO: 1280806 - DNA, 15 bp, Homo sapiens
aaagagggaatcctc

SEQ ID NO: 1280807 - DNA, 15 bp, Homo sapiens
aaaagagggaatcct

SEQ ID NO: 1280808 - DNA, 15 bp, Homo sapiens
aaaaagagggaatcc

SEQ ID NO: 1280809 - DNA, 15 bp, Homo sapiens
gaaaaagagggaatc

SEQ ID NO: 1280810 - DNA, 15 bp, Homo sapiens
agaaaaagagggaat

SEQ ID NO: 1280811 - DNA, 15 bp, Homo sapiens
tagaaaaagagggaa

SEQ ID NO: 1280812 - DNA, 15 bp, Homo sapiens
atagaaaaagaggga

SEQ ID NO: 1280813 - DNA, 15 bp, Homo sapiens
aatagaaaaagaggg

SEQ ID NO: 1280814 - DNA, 15 bp, Homo sapiens
caatagaaaaagagg

SEQ ID NO: 1280815 - DNA, 15 bp, Homo sapiens
tcaatagaaaaagag

SEQ ID NO: 1280816 - DNA, 15 bp, Homo sapiens
atcaatagaaaaaga

SEQ ID NO: 1280817 - DNA, 15 bp, Homo sapiens
aatcaatagaaaaag

SEQ ID NO: 1280818 - DNA, 15 bp, Homo sapiens
caatcaatagaaaaa

SEQ ID NO: 1280819 - DNA, 15 bp, Homo sapiens
ccaatcaatagaaaa

SEQ ID NO: 1280820 - DNA, 15 bp, Homo sapiens
tccaatcaatagaaa

SEQ ID NO: 1280821 - DNA, 15 bp, Homo sapiens
ttccaatcaatagaa

SEQ ID NO: 1280822 - DNA, 15 bp, Homo sapiens
attccaatcaataga

SEQ ID NO: 1280823 - DNA, 15 bp, Homo sapiens
tattccaatcaatag

SEQ ID NO: 1280824 - DNA, 15 bp, Homo sapiens
ctattccaatcaata

SEQ ID NO: 1280825 - DNA, 15 bp, Homo sapiens
actattccaatcaat

SEQ ID NO: 1280826 - DNA, 15 bp, Homo sapiens
aactattccaatcaa

SEQ ID NO: 1280827 - DNA, 15 bp, Homo sapiens
aaactattccaatca

SEQ ID NO: 1280828 - DNA, 15 bp, Homo sapiens
gaaactattccaatc

SEQ ID NO: 1280829 - DNA, 15 bp, Homo sapiens
tgaaactattccaat

SEQ ID NO: 1280830 - DNA, 15 bp, Homo sapiens
ctgaaactattccaa

SEQ ID NO: 1280831 - DNA, 15 bp, Homo sapiens
tctgaaactattcca

SEQ ID NO: 1280832 - DNA, 15 bp, Homo sapiens
ttctgaaactattcc

SEQ ID NO: 1280833 - DNA, 15 bp, Homo sapiens
cttctgaaactattc

SEQ ID NO: 1280834 - DNA, 15 bp, Homo sapiens
ccttctgaaactatt

SEQ ID NO: 1280835 - DNA, 15 bp, Homo sapiens
tccttctgaaactat

SEQ ID NO: 1280836 - DNA, 15 bp, Homo sapiens
ttccttctgaaacta

SEQ ID NO: 1280837 - DNA, 15 bp, Homo sapiens
attccttctgaaact

SEQ ID NO: 1280838 - DNA, 15 bp, Homo sapiens
cattccttctgaaac

SEQ ID NO: 1280839 - DNA, 15 bp, Homo sapiens
ccattccttctgaaa

SEQ ID NO: 1280840 - DNA, 15 bp, Homo sapiens
accattccttctgaa

SEQ ID NO: 1280841 - DNA, 15 bp, Homo sapiens
taccattccttctga

SEQ ID NO: 1280842 - DNA, 15 bp, Homo sapiens
gtaccattccttctg

SEQ ID NO: 1280843 - DNA, 15 bp, Homo sapiens
ggtaccattccttct

SEQ ID NO: 1280844 - DNA, 15 bp, Homo sapiens
tggtaccattccttc

SEQ ID NO: 1280845 - DNA, 15 bp, Homo sapiens
ctggtaccattcctt

SEQ ID NO: 1280846 - DNA, 15 bp, Homo sapiens
gctggtaccattcct

SEQ ID NO: 1280847 - DNA, 15 bp, Homo sapiens
agctggtaccattcc

SEQ ID NO: 1280848 - DNA, 15 bp, Homo sapiens
gagctggtaccattc

SEQ ID NO: 1280849 - DNA, 15 bp, Homo sapiens
ggagctggtaccatt

SEQ ID NO: 1280850 - DNA, 15 bp, Homo sapiens
aggagctggtaccat

SEQ ID NO: 1280851 - DNA, 15 bp, Homo sapiens
gaggagctggtacca

SEQ ID NO: 1280852 - DNA, 15 bp, Homo sapiens
agaggagctggtacc

SEQ ID NO: 1280853 - DNA, 15 bp, Homo sapiens
aagaggagctggtac

SEQ ID NO: 1280854 - DNA, 15 bp, Homo sapiens
aaagaggagctggta

SEQ ID NO: 1280855 - DNA, 15 bp, Homo sapiens
caaagaggagctggt

SEQ ID NO: 1280856 - DNA, 15 bp, Homo sapiens
acaaagaggagctgg

SEQ ID NO: 1280857 - DNA, 15 bp, Homo sapiens
tacaaagaggagctg

SEQ ID NO: 1280858 - DNA, 15 bp, Homo sapiens
gtacaaagaggagct

SEQ ID NO: 1280859 - DNA, 15 bp, Homo sapiens
ggtacaaagaggagc

SEQ ID NO: 1280860 - DNA, 15 bp, Homo sapiens
aggtacaaagaggag

SEQ ID NO: 1280861 - DNA, 15 bp, Homo sapiens
gaggtacaaagagga

SEQ ID NO: 1280862 - DNA, 15 bp, Homo sapiens
agaggtacaaagagg

SEQ ID NO: 1280863 - DNA, 15 bp, Homo sapiens
cagaggtacaaagag

SEQ ID NO: 1280864 - DNA, 15 bp, Homo sapiens
ccagaggtacaaaga

SEQ ID NO: 1280865 - DNA, 15 bp, Homo sapiens
accagaggtacaaag

SEQ ID NO: 1280866 - DNA, 15 bp, Homo sapiens
taccagaggtacaaa

SEQ ID NO: 1280867 - DNA, 15 bp, Homo sapiens
ctaccagaggtacaa

SEQ ID NO: 1280868 - DNA, 15 bp, Homo sapiens
tctaccagaggtaca

SEQ ID NO: 1280869 - DNA, 15 bp, Homo sapiens
ttctaccagaggtac

SEQ ID NO: 1280870 - DNA, 15 bp, Homo sapiens
attctaccagaggta

SEQ ID NO: 1280871 - DNA, 15 bp, Homo sapiens
aattctaccagaggt

SEQ ID NO: 1280872 - DNA, 15 bp, Homo sapiens
gaattctaccagagg

SEQ ID NO: 1280873 - DNA, 15 bp, Homo sapiens
cgaattctaccagag

SEQ ID NO: 1280874 - DNA, 15 bp, Homo sapiens
ccgaattctaccaga

SEQ ID NO: 1280875 - DNA, 15 bp, Homo sapiens
gccgaattctaccag

SEQ ID NO: 1280876 - DNA, 15 bp, Homo sapiens
agccgaattctacca

SEQ ID NO: 1280877 - DNA, 15 bp, Homo sapiens
cagccgaattctacc

SEQ ID NO: 1280878 - DNA, 15 bp, Homo sapiens
acagccgaattctac

SEQ ID NO: 1280879 - DNA, 15 bp, Homo sapiens
cacagccgaattcta

SEQ ID NO: 1280880 - DNA, 15 bp, Homo sapiens
tcacagccgaattct

SEQ ID NO: 1280881 - DNA, 15 bp, Homo sapiens
ttcacagccgaattc

SEQ ID NO: 1280882 - DNA, 15 bp, Homo sapiens
attcacagccgaatt

SEQ ID NO: 1280883 - DNA, 15 bp, Homo sapiens
aattcacagccgaat

SEQ ID NO: 1280884 - DNA, 15 bp, Homo sapiens
gaattcacagccgaa

SEQ ID NO: 1280885 - DNA, 15 bp, Homo sapiens
tgaattcacagccga

SEQ ID NO: 1280886 - DNA, 15 bp, Homo sapiens
atgaattcacagccg

SEQ ID NO: 1280887 - DNA, 15 bp, Homo sapiens
gatgaattcacagcc

SEQ ID NO: 1280888 - DNA, 15 bp, Homo sapiens
agatgaattcacagc

SEQ ID NO: 1280889 - DNA, 15 bp, Homo sapiens
cagatgaattcacag

SEQ ID NO: 1280890 - DNA, 15 bp, Homo sapiens
gcagatgaattcaca

SEQ ID NO: 1280891 - DNA, 15 bp, Homo sapiens
agcagatgaattcac

SEQ ID NO: 1280892 - DNA, 15 bp, Homo sapiens
gagcagatgaattca

SEQ ID NO: 1280893 - DNA, 15 bp, Homo sapiens
ggagcagatgaattc

SEQ ID NO: 1280894 - DNA, 15 bp, Homo sapiens
aggagcagatgaatt

SEQ ID NO: 1280895 - DNA, 15 bp, Homo sapiens
caggagcagatgaat

SEQ ID NO: 1280896 - DNA, 15 bp, Homo sapiens
ccaggagcagatgaa

SEQ ID NO: 1280897 - DNA, 15 bp, Homo sapiens
tccaggagcagatga

SEQ ID NO: 1280898 - DNA, 15 bp, Homo sapiens
gtccaggagcagatg

SEQ ID NO: 1280899 - DNA, 15 bp, Homo sapiens
agtccaggagcagat

SEQ ID NO: 1280900 - DNA, 15 bp, Homo sapiens
aagtccaggagcaga

SEQ ID NO: 1280901 - DNA, 15 bp, Homo sapiens
gaagtccaggagcag

SEQ ID NO: 1280902 - DNA, 15 bp, Homo sapiens
agaagtccaggagca

SEQ ID NO: 1280903 - DNA, 15 bp, Homo sapiens
aagaagtccaggagc

SEQ ID NO: 1280904 - DNA, 15 bp, Homo sapiens
aaagaagtccaggag

SEQ ID NO: 1280905 - DNA, 15 bp, Homo sapiens
aaaagaagtccagga

SEQ ID NO: 1280906 - DNA, 15 bp, Homo sapiens
caaaagaagtccagg

SEQ ID NO: 1280907 - DNA, 15 bp, Homo sapiens
ccaaaagaagtccag

SEQ ID NO: 1280908 - DNA, 15 bp, Homo sapiens
accaaaagaagtcca

SEQ ID NO: 1280909 - DNA, 15 bp, Homo sapiens
aaccaaaagaagtcc

SEQ ID NO: 1280910 - DNA, 15 bp, Homo sapiens
caaccaaaagaagtc

SEQ ID NO: 1280911 - DNA, 15 bp, Homo sapiens
ccaaccaaaagaagt

SEQ ID NO: 1280912 - DNA, 15 bp, Homo sapiens
accaaccaaaagaag

SEQ ID NO: 1280913 - DNA, 15 bp, Homo sapiens
taccaaccaaaagaa

SEQ ID NO: 1280914 - DNA, 15 bp, Homo sapiens
ctaccaaccaaaaga

SEQ ID NO: 1280915 - DNA, 15 bp, Homo sapiens
cctaccaaccaaaag

SEQ ID NO: 1280916 - DNA, 15 bp, Homo sapiens
tcctaccaaccaaaa

SEQ ID NO: 1280917 - DNA, 15 bp, Homo sapiens
atcctaccaaccaaa

SEQ ID NO: 1280918 - DNA, 15 bp, Homo sapiens
tatcctaccaaccaa

SEQ ID NO: 1280919 - DNA, 15 bp, Homo sapiens
atatcctaccaacca

SEQ ID NO: 1280920 - DNA, 15 bp, Homo sapiens
aatatcctaccaacc

SEQ ID NO: 1280921 - DNA, 15 bp, Homo sapiens
taatatcctaccaac

SEQ ID NO: 1280922 - DNA, 15 bp, Homo sapiens
ttaatatcctaccaa

SEQ ID NO: 1280923 - DNA, 15 bp, Homo sapiens
attaatatcctacca

SEQ ID NO: 1280924 - DNA, 15 bp, Homo sapiens
aattaatatcctacc

SEQ ID NO: 1280925 - DNA, 15 bp, Homo sapiens
taattaatatcctac

SEQ ID NO: 1280926 - DNA, 15 bp, Homo sapiens
gtaattaatatccta

SEQ ID NO: 1280927 - DNA, 15 bp, Homo sapiens
agtaattaatatcct

SEQ ID NO: 1280928 - DNA, 15 bp, Homo sapiens
gagtaattaatatcc

SEQ ID NO: 1280929 - DNA, 15 bp, Homo sapiens
ggagtaattaatatc

SEQ ID NO: 1280930 - DNA, 15 bp, Homo sapiens
gggagtaattaatat

SEQ ID NO: 1280931 - DNA, 15 bp, Homo sapiens
agggagtaattaata

SEQ ID NO: 1280932 - DNA, 15 bp, Homo sapiens
gagggagtaattaat

SEQ ID NO: 1280933 - DNA, 15 bp, Homo sapiens
tgagggagtaattaa

SEQ ID NO: 1280934 - DNA, 15 bp, Homo sapiens
ttgagggagtaatta

SEQ ID NO: 1280935 - DNA, 15 bp, Homo sapiens
attgagggagtaatt

SEQ ID NO: 1280936 - DNA, 15 bp, Homo sapiens
aattgagggagtaat

SEQ ID NO: 1280937 - DNA, 15 bp, Homo sapiens
aaattgagggagtaa

SEQ ID NO: 1280938 - DNA, 15 bp, Homo sapiens
gaaattgagggagta

SEQ ID NO: 1280939 - DNA, 15 bp, Homo sapiens
tgaaattgagggagt

SEQ ID NO: 1280940 - DNA, 15 bp, Homo sapiens
ctgaaattgagggag

SEQ ID NO: 1280941 - DNA, 15 bp, Homo sapiens
tctgaaattgaggga

SEQ ID NO: 1280942 - DNA, 15 bp, Homo sapiens
ttctgaaattgaggg

SEQ ID NO: 1280943 - DNA, 15 bp, Homo sapiens
gttctgaaattgagg

SEQ ID NO: 1280944 - DNA, 15 bp, Homo sapiens
cgttctgaaattgag

SEQ ID NO: 1280945 - DNA, 15 bp, Homo sapiens
acgttctgaaattga

SEQ ID NO: 1280946 - DNA, 15 bp, Homo sapiens
cacgttctgaaattg

SEQ ID NO: 1280947 - DNA, 15 bp, Homo sapiens
acacgttctgaaatt

SEQ ID NO: 1280948 - DNA, 15 bp, Homo sapiens
aacacgttctgaaat

SEQ ID NO: 1280949 - DNA, 15 bp, Homo sapiens
taacacgttctgaaa

SEQ ID NO: 1280950 - DNA, 15 bp, Homo sapiens
ataacacgttctgaa

SEQ ID NO: 1280951 - DNA, 15 bp, Homo sapiens
aataacacgttctga

SEQ ID NO: 1280952 - DNA, 15 bp, Homo sapiens
caataacacgttctg

SEQ ID NO: 1280953 - DNA, 15 bp, Homo sapiens
ccaataacacgttct

SEQ ID NO: 1280954 - DNA, 15 bp, Homo sapiens
accaataacacgttc

SEQ ID NO: 1280955 - DNA, 15 bp, Homo sapiens
gaccaataacacgtt

SEQ ID NO: 1280956 - DNA, 15 bp, Homo sapiens
agaccaataacacgt

SEQ ID NO: 1280957 - DNA, 15 bp, Homo sapiens
tagaccaataacacg

SEQ ID NO: 1280958 - DNA, 15 bp, Homo sapiens
atagaccaataacac

SEQ ID NO: 1280959 - DNA, 15 bp, Homo sapiens
aatagaccaataaca

SEQ ID NO: 1280960 - DNA, 15 bp, Homo sapiens
gaatagaccaataac

SEQ ID NO: 1280961 - DNA, 15 bp, Homo sapiens
tgaatagaccaataa

SEQ ID NO: 1280962 - DNA, 15 bp, Homo sapiens
ctgaatagaccaata

SEQ ID NO: 1280963 - DNA, 15 bp, Homo sapiens
cctgaatagaccaat

SEQ ID NO: 1280964 - DNA, 15 bp, Homo sapiens
ccctgaatagaccaa

SEQ ID NO: 1280965 - DNA, 15 bp, Homo sapiens
tccctgaatagacca

SEQ ID NO: 1280966 - DNA, 15 bp, Homo sapiens
atccctgaatagacc

SEQ ID NO: 1280967 - DNA, 15 bp, Homo sapiens
aatccctgaatagac

SEQ ID NO: 1280968 - DNA, 15 bp, Homo sapiens
gaatccctgaataga

SEQ ID NO: 1280969 - DNA, 15 bp, Homo sapiens
tgaatccctgaatag

SEQ ID NO: 1280970 - DNA, 15 bp, Homo sapiens
ttgaatccctgaata

SEQ ID NO: 1280971 - DNA, 15 bp, Homo sapiens
gttgaatccctgaat

SEQ ID NO: 1280972 - DNA, 15 bp, Homo sapiens
agttgaatccctgaa

SEQ ID NO: 1280973 - DNA, 15 bp, Homo sapiens
aagttgaatccctga

SEQ ID NO: 1280974 - DNA, 15 bp, Homo sapiens
gaagttgaatccctg

SEQ ID NO: 1280975 - DNA, 15 bp, Homo sapiens
agaagttgaatccct

SEQ ID NO: 1280976 - DNA, 15 bp, Homo sapiens
aagaagttgaatccc

SEQ ID NO: 1280977 - DNA, 15 bp, Homo sapiens
gaagaagttgaatcc

SEQ ID NO: 1280978 - DNA, 15 bp, Homo sapiens
ggaagaagttgaatc

SEQ ID NO: 1280979 - DNA, 15 bp, Homo sapiens
aggaagaagttgaat

SEQ ID NO: 1280980 - DNA, 15 bp, Homo sapiens
caggaagaagttgaa

SEQ ID NO: 1280981 - DNA, 15 bp, Homo sapiens
tcaggaagaagttga

SEQ ID NO: 1280982 - DNA, 15 bp, Homo sapiens
atcaggaagaagttg

SEQ ID NO: 1280983 - DNA, 15 bp, Homo sapiens
aatcaggaagaagtt

SEQ ID NO: 1280984 - DNA, 15 bp, Homo sapiens
aaatcaggaagaagt

SEQ ID NO: 1280985 - DNA, 15 bp, Homo sapiens
taaatcaggaagaag

SEQ ID NO: 1280986 - DNA, 15 bp, Homo sapiens
ctaaatcaggaagaa

SEQ ID NO: 1280987 - DNA, 15 bp, Homo sapiens
actaaatcaggaaga

SEQ ID NO: 1280988 - DNA, 15 bp, Homo sapiens
gactaaatcaggaag

SEQ ID NO: 1280989 - DNA, 15 bp, Homo sapiens
agactaaatcaggaa

SEQ ID NO: 1280990 - DNA, 15 bp, Homo sapiens
aagactaaatcagga

SEQ ID NO: 1280991 - DNA, 15 bp, Homo sapiens
caagactaaatcagg

SEQ ID NO: 1280992 - DNA, 15 bp, Homo sapiens
ccaagactaaatcag

SEQ ID NO: 1280993 - DNA, 15 bp, Homo sapiens
cccaagactaaatca

SEQ ID NO: 1280994 - DNA, 15 bp, Homo sapiens
tcccaagactaaatc

SEQ ID NO: 1280995 - DNA, 15 bp, Homo sapiens
ctcccaagactaaat

SEQ ID NO: 1280996 - DNA, 15 bp, Homo sapiens
cctcccaagactaaa

SEQ ID NO: 1280997 - DNA, 15 bp, Homo sapiens
ccctcccaagactaa

SEQ ID NO: 1280998 - DNA, 15 bp, Homo sapiens
accctcccaagacta

SEQ ID NO: 1280999 - DNA, 15 bp, Homo sapiens
caccctcccaagact

SEQ ID NO: 1281000 - DNA, 15 bp, Homo sapiens
acaccctcccaagac

SEQ ID NO: 1281001 - DNA, 15 bp, Homo sapiens
tacaccctcccaaga

SEQ ID NO: 1281002 - DNA, 15 bp, Homo sapiens
atacaccctcccaag

SEQ ID NO: 1281003 - DNA, 15 bp, Homo sapiens
catacaccctcccaa

SEQ ID NO: 1281004 - DNA, 15 bp, Homo sapiens
acatacaccctccca

SEQ ID NO: 1281005 - DNA, 15 bp, Homo sapiens
cacatacaccctccc

SEQ ID NO: 1281006 - DNA, 15 bp, Homo sapiens
acacatacaccctcc

SEQ ID NO: 1281007 - DNA, 15 bp, Homo sapiens
gacacatacaccctc

SEQ ID NO: 1281008 - DNA, 15 bp, Homo sapiens
ggacacatacaccct

SEQ ID NO: 1281009 - DNA, 15 bp, Homo sapiens
tggacacatacaccc

SEQ ID NO: 1281010 - DNA, 15 bp, Homo sapiens
ctggacacatacacc

SEQ ID NO: 1281011 - DNA, 15 bp, Homo sapiens
cctggacacatacac

SEQ ID NO: 1281012 - DNA, 15 bp, Homo sapiens
tcctggacacataca

SEQ ID NO: 1281013 - DNA, 15 bp, Homo sapiens
ttcctggacacatac

SEQ ID NO: 1281014 - DNA, 15 bp, Homo sapiens
attcctggacacata

SEQ ID NO: 1281015 - DNA, 15 bp, Homo sapiens
aattcctggacacat

SEQ ID NO: 1281016 - DNA, 15 bp, Homo sapiens
aaattcctggacaca

SEQ ID NO: 1281017 - DNA, 15 bp, Homo sapiens
taaattcctggacac

SEQ ID NO: 1281018 - DNA, 15 bp, Homo sapiens
ataaattcctggaca

SEQ ID NO: 1281019 - DNA, 15 bp, Homo sapiens
gataaattcctggac

SEQ ID NO: 1281020 - DNA, 15 bp, Homo sapiens
ggataaattcctgga

SEQ ID NO: 1281021 - DNA, 15 bp, Homo sapiens
tggataaattcctgg

SEQ ID NO: 1281022 - DNA, 15 bp, Homo sapiens
atggataaattcctg

SEQ ID NO: 1281023 - DNA, 15 bp, Homo sapiens
aatggataaattcct

SEQ ID NO: 1281024 - DNA, 15 bp, Homo sapiens
aaatggataaattcc

SEQ ID NO: 1281025 - DNA, 15 bp, Homo sapiens
gaaatggataaattc

SEQ ID NO: 1281026 - DNA, 15 bp, Homo sapiens
agaaatggataaatt

SEQ ID NO: 1281027 - DNA, 15 bp, Homo sapiens
aagaaatggataaat

SEQ ID NO: 1281028 - DNA, 15 bp, Homo sapiens
gaagaaatggataaa

SEQ ID NO: 1281029 - DNA, 15 bp, Homo sapiens
agaagaaatggataa

SEQ ID NO: 1281030 - DNA, 15 bp, Homo sapiens
tagaagaaatggata

SEQ ID NO: 1281031 - DNA, 15 bp, Homo sapiens
ctagaagaaatggat

SEQ ID NO: 1281032 - DNA, 15 bp, Homo sapiens
tctagaagaaatgga

SEQ ID NO: 1281033 - DNA, 15 bp, Homo sapiens
atctagaagaaatgg

SEQ ID NO: 1281034 - DNA, 15 bp, Homo sapiens
aatctagaagaaatg

SEQ ID NO: 1281035 - DNA, 15 bp, Homo sapiens
aaatctagaagaaat

SEQ ID NO: 1281036 - DNA, 15 bp, Homo sapiens
aaaatctagaagaaa

SEQ ID NO: 1281037 - DNA, 15 bp, Homo sapiens
gaaaatctagaagaa

SEQ ID NO: 1281038 - DNA, 15 bp, Homo sapiens
agaaaatctagaaga

SEQ ID NO: 1281039 - DNA, 15 bp, Homo sapiens
tagaaaatctagaag

SEQ ID NO: 1281040 - DNA, 15 bp, Homo sapiens
ctagaaaatctagaa

SEQ ID NO: 1281041 - DNA, 15 bp, Homo sapiens
actagaaaatctaga

SEQ ID NO: 1281042 - DNA, 15 bp, Homo sapiens
aactagaaaatctag

SEQ ID NO: 1281043 - DNA, 15 bp, Homo sapiens
aaactagaaaatcta

SEQ ID NO: 1281044 - DNA, 15 bp, Homo sapiens
taaactagaaaatct

SEQ ID NO: 1281045 - DNA, 15 bp, Homo sapiens
ataaactagaaaatc

SEQ ID NO: 1281046 - DNA, 15 bp, Homo sapiens
aataaactagaaaat

SEQ ID NO: 1281047 - DNA, 15 bp, Homo sapiens
aaataaactagaaaa

SEQ ID NO: 1281048 - DNA, 15 bp, Homo sapiens
caaataaactagaaa

SEQ ID NO: 1281049 - DNA, 15 bp, Homo sapiens
gcaaataaactagaa

SEQ ID NO: 1281050 - DNA, 15 bp, Homo sapiens
cgcaaataaactaga

SEQ ID NO: 1281051 - DNA, 15 bp, Homo sapiens
acgcaaataaactag

SEQ ID NO: 1281052 - DNA, 15 bp, Homo sapiens
tacgcaaataaacta

SEQ ID NO: 1281053 - DNA, 15 bp, Homo sapiens
ctacgcaaataaact

SEQ ID NO: 1281054 - DNA, 15 bp, Homo sapiens
tctacgcaaataaac

SEQ ID NO: 1281055 - DNA, 15 bp, Homo sapiens
ctctacgcaaataaa

SEQ ID NO: 1281056 - DNA, 15 bp, Homo sapiens
cctctacgcaaataa

SEQ ID NO: 1281057 - DNA, 15 bp, Homo sapiens
acctctacgcaaata

SEQ ID NO: 1281058 - DNA, 15 bp, Homo sapiens
cacctctacgcaaat

SEQ ID NO: 1281059 - DNA, 15 bp, Homo sapiens
acacctctacgcaaa

SEQ ID NO: 1281060 - DNA, 15 bp, Homo sapiens
aacacctctacgcaa

SEQ ID NO: 1281061 - DNA, 15 bp, Homo sapiens
aaacacctctacgca

SEQ ID NO: 1281062 - DNA, 15 bp, Homo sapiens
taaacacctctacgc

SEQ ID NO: 1281063 - DNA, 15 bp, Homo sapiens
ataaacacctctacg

SEQ ID NO: 1281064 - DNA, 15 bp, Homo sapiens
tataaacacctctac

SEQ ID NO: 1281065 - DNA, 15 bp, Homo sapiens
ctataaacacctcta

SEQ ID NO: 1281066 - DNA, 15 bp, Homo sapiens
actataaacacctct

SEQ ID NO: 1281067 - DNA, 15 bp, Homo sapiens
tactataaacacctc

SEQ ID NO: 1281068 - DNA, 15 bp, Homo sapiens
atactataaacacct

SEQ ID NO: 1281069 - DNA, 15 bp, Homo sapiens
aatactataaacacc

SEQ ID NO: 1281070 - DNA, 15 bp, Homo sapiens
gaatactataaacac

SEQ ID NO: 1281071 - DNA, 15 bp, Homo sapiens
agaatactataaaca

SEQ ID NO: 1281072 - DNA, 15 bp, Homo sapiens
gagaatactataaac

SEQ ID NO: 1281073 - DNA, 15 bp, Homo sapiens
agagaatactataaa

SEQ ID NO: 1281074 - DNA, 15 bp, Homo sapiens
cagagaatactataa

SEQ ID NO: 1281075 - DNA, 15 bp, Homo sapiens
tcagagaatactata

SEQ ID NO: 1281076 - DNA, 15 bp, Homo sapiens
atcagagaatactat

SEQ ID NO: 1281077 - DNA, 15 bp, Homo sapiens
catcagagaatacta

SEQ ID NO: 1281078 - DNA, 15 bp, Homo sapiens
ccatcagagaatact

SEQ ID NO: 1281079 - DNA, 15 bp, Homo sapiens
accatcagagaatac

SEQ ID NO: 1281080 - DNA, 15 bp, Homo sapiens
taccatcagagaata

SEQ ID NO: 1281081 - DNA, 15 bp, Homo sapiens
ctaccatcagagaat

SEQ ID NO: 1281082 - DNA, 15 bp, Homo sapiens
actaccatcagagaa

SEQ ID NO: 1281083 - DNA, 15 bp, Homo sapiens
aactaccatcagaga

SEQ ID NO: 1281084 - DNA, 15 bp, Homo sapiens
aaactaccatcagag

SEQ ID NO: 1281085 - DNA, 15 bp, Homo sapiens
caaactaccatcaga

SEQ ID NO: 1281086 - DNA, 15 bp, Homo sapiens
acaaactaccatcag

SEQ ID NO: 1281087 - DNA, 15 bp, Homo sapiens
tacaaactaccatca

SEQ ID NO: 1281088 - DNA, 15 bp, Homo sapiens
atacaaactaccatc

SEQ ID NO: 1281089 - DNA, 15 bp, Homo sapiens
aatacaaactaccat

SEQ ID NO: 1281090 - DNA, 15 bp, Homo sapiens
aaatacaaactacca

SEQ ID NO: 1281091 - DNA, 15 bp, Homo sapiens
gaaatacaaactacc

SEQ ID NO: 1281092 - DNA, 15 bp, Homo sapiens
agaaatacaaactac

SEQ ID NO: 1281093 - DNA, 15 bp, Homo sapiens
cagaaatacaaacta

SEQ ID NO: 1281094 - DNA, 15 bp, Homo sapiens
acagaaatacaaact

SEQ ID NO: 1281095 - DNA, 15 bp, Homo sapiens
cacagaaatacaaac

SEQ ID NO: 1281096 - DNA, 15 bp, Homo sapiens
ccacagaaatacaaa

SEQ ID NO: 1281097 - DNA, 15 bp, Homo sapiens
cccacagaaatacaa

SEQ ID NO: 1281098 - DNA, 15 bp, Homo sapiens
tcccacagaaataca

SEQ ID NO: 1281099 - DNA, 15 bp, Homo sapiens
atcccacagaaatac

SEQ ID NO: 1281100 - DNA, 15 bp, Homo sapiens
gatcccacagaaata

SEQ ID NO: 1281101 - DNA, 15 bp, Homo sapiens
agatcccacagaaat

SEQ ID NO: 1281102 - DNA, 15 bp, Homo sapiens
cagatcccacagaaa

SEQ ID NO: 1281103 - DNA, 15 bp, Homo sapiens
acagatcccacagaa

SEQ ID NO: 1281104 - DNA, 15 bp, Homo sapiens
cacagatcccacaga

SEQ ID NO: 1281105 - DNA, 15 bp, Homo sapiens
ccacagatcccacag

SEQ ID NO: 1281106 - DNA, 15 bp, Homo sapiens
accacagatcccaca

SEQ ID NO: 1281107 - DNA, 15 bp, Homo sapiens
caccacagatcccac

SEQ ID NO: 1281108 - DNA, 15 bp, Homo sapiens
tcaccacagatccca

SEQ ID NO: 1281109 - DNA, 15 bp, Homo sapiens
atcaccacagatccc

SEQ ID NO: 1281110 - DNA, 15 bp, Homo sapiens
tatcaccacagatcc

SEQ ID NO: 1281111 - DNA, 15 bp, Homo sapiens
atatcaccacagatc

SEQ ID NO: 1281112 - DNA, 15 bp, Homo sapiens
gatatcaccacagat

SEQ ID NO: 1281113 - DNA, 15 bp, Homo sapiens
ggatatcaccacaga

SEQ ID NO: 1281114 - DNA, 15 bp, Homo sapiens
gggatatcaccacag

SEQ ID NO: 1281115 - DNA, 15 bp, Homo sapiens
ggggatatcaccaca

SEQ ID NO: 1281116 - DNA, 15 bp, Homo sapiens
aggggatatcaccac

SEQ ID NO: 1281117 - DNA, 15 bp, Homo sapiens
aaggggatatcacca

SEQ ID NO: 1281118 - DNA, 15 bp, Homo sapiens
aaaggggatatcacc

SEQ ID NO: 1281119 - DNA, 15 bp, Homo sapiens
taaaggggatatcac

SEQ ID NO: 1281120 - DNA, 15 bp, Homo sapiens
ataaaggggatatca

SEQ ID NO: 1281121 - DNA, 15 bp, Homo sapiens
gataaaggggatatc

SEQ ID NO: 1281122 - DNA, 15 bp, Homo sapiens
tgataaaggggatat

SEQ ID NO: 1281123 - DNA, 15 bp, Homo sapiens
atgataaaggggata

SEQ ID NO: 1281124 - DNA, 15 bp, Homo sapiens
aatgataaaggggat

SEQ ID NO: 1281125 - DNA, 15 bp, Homo sapiens
aaatgataaagggga

SEQ ID NO: 1281126 - DNA, 15 bp, Homo sapiens
aaaatgataaagggg

SEQ ID NO: 1281127 - DNA, 15 bp, Homo sapiens
aaaaatgataaaggg

SEQ ID NO: 1281128 - DNA, 15 bp, Homo sapiens
aaaaaatgataaagg

SEQ ID NO: 1281129 - DNA, 15 bp, Homo sapiens
taaaaaatgataaag

SEQ ID NO: 1281130 - DNA, 15 bp, Homo sapiens
ataaaaaatgataaa

SEQ ID NO: 1281131 - DNA, 15 bp, Homo sapiens
aataaaaaatgataa

SEQ ID NO: 1281132 - DNA, 15 bp, Homo sapiens
caataaaaaatgata

SEQ ID NO: 1281133 - DNA, 15 bp, Homo sapiens
gcaataaaaaatgat

SEQ ID NO: 1281134 - DNA, 15 bp, Homo sapiens
tgcaataaaaaatga

SEQ ID NO: 1281135 - DNA, 15 bp, Homo sapiens
atgcaataaaaaatg

SEQ ID NO: 1281136 - DNA, 15 bp, Homo sapiens
gatgcaataaaaaat

SEQ ID NO: 1281137 - DNA, 15 bp, Homo sapiens
agatgcaataaaaaa

SEQ ID NO: 1281138 - DNA, 15 bp, Homo sapiens
tagatgcaataaaaa

SEQ ID NO: 1281139 - DNA, 15 bp, Homo sapiens
atagatgcaataaaa

SEQ ID NO: 1281140 - DNA, 15 bp, Homo sapiens
aatagatgcaataaa

SEQ ID NO: 1281141 - DNA, 15 bp, Homo sapiens
aaatagatgcaataa

SEQ ID NO: 1281142 - DNA, 15 bp, Homo sapiens
caaatagatgcaata

SEQ ID NO: 1281143 - DNA, 15 bp, Homo sapiens
tcaaatagatgcaat

SEQ ID NO: 1281144 - DNA, 15 bp, Homo sapiens
atcaaatagatgcaa

SEQ ID NO: 1281145 - DNA, 15 bp, Homo sapiens
aatcaaatagatgca

SEQ ID NO: 1281146 - DNA, 15 bp, Homo sapiens
gaatcaaatagatgc

SEQ ID NO: 1281147 - DNA, 15 bp, Homo sapiens
agaatcaaatagatg

SEQ ID NO: 1281148 - DNA, 15 bp, Homo sapiens
aagaatcaaatagat

SEQ ID NO: 1281149 - DNA, 15 bp, Homo sapiens
gaagaatcaaataga

SEQ ID NO: 1281150 - DNA, 15 bp, Homo sapiens
agaagaatcaaatag

SEQ ID NO: 1281151 - DNA, 15 bp, Homo sapiens
gagaagaatcaaata

SEQ ID NO: 1281152 - DNA, 15 bp, Homo sapiens
agagaagaatcaaat

SEQ ID NO: 1281153 - DNA, 15 bp, Homo sapiens
gagagaagaatcaaa

SEQ ID NO: 1281154 - DNA, 15 bp, Homo sapiens
agagagaagaatcaa

SEQ ID NO: 1281155 - DNA, 15 bp, Homo sapiens
aagagagaagaatca

SEQ ID NO: 1281156 - DNA, 15 bp, Homo sapiens
aaagagagaagaatc

SEQ ID NO: 1281157 - DNA, 15 bp, Homo sapiens
aaaagagagaagaat

SEQ ID NO: 1281158 - DNA, 15 bp, Homo sapiens
gaaaagagagaagaa

SEQ ID NO: 1281159 - DNA, 15 bp, Homo sapiens
agaaaagagagaaga

SEQ ID NO: 1281160 - DNA, 15 bp, Homo sapiens
aagaaaagagagaag

SEQ ID NO: 1281161 - DNA, 15 bp, Homo sapiens
gaagaaaagagagaa

SEQ ID NO: 1281162 - DNA, 15 bp, Homo sapiens
agaagaaaagagaga

SEQ ID NO: 1281163 - DNA, 15 bp, Homo sapiens
aagaagaaaagagag

SEQ ID NO: 1281164 - DNA, 15 bp, Homo sapiens
aaagaagaaaagaga

SEQ ID NO: 1281165 - DNA, 15 bp, Homo sapiens
taaagaagaaaagag

SEQ ID NO: 1281166 - DNA, 15 bp, Homo sapiens
ataaagaagaaaaga

SEQ ID NO: 1281167 - DNA, 15 bp, Homo sapiens
aataaagaagaaaag

SEQ ID NO: 1281168 - DNA, 15 bp, Homo sapiens
taataaagaagaaaa

SEQ ID NO: 1281169 - DNA, 15 bp, Homo sapiens
ctaataaagaagaaa

SEQ ID NO: 1281170 - DNA, 15 bp, Homo sapiens
actaataaagaagaa

SEQ ID NO: 1281171 - DNA, 15 bp, Homo sapiens
gactaataaagaaga

SEQ ID NO: 1281172 - DNA, 15 bp, Homo sapiens
agactaataaagaag

SEQ ID NO: 1281173 - DNA, 15 bp, Homo sapiens
aagactaataaagaa

SEQ ID NO: 1281174 - DNA, 15 bp, Homo sapiens
caagactaataaaga

SEQ ID NO: 1281175 - DNA, 15 bp, Homo sapiens
gcaagactaataaag

SEQ ID NO: 1281176 - DNA, 15 bp, Homo sapiens
agcaagactaataaa

SEQ ID NO: 1281177 - DNA, 15 bp, Homo sapiens
tagcaagactaataa

SEQ ID NO: 1281178 - DNA, 15 bp, Homo sapiens
ctagcaagactaata

SEQ ID NO: 1281179 - DNA, 15 bp, Homo sapiens
actagcaagactaat

SEQ ID NO: 1281180 - DNA, 15 bp, Homo sapiens
cactagcaagactaa

SEQ ID NO: 1281181 - DNA, 15 bp, Homo sapiens
ccactagcaagacta

SEQ ID NO: 1281182 - DNA, 15 bp, Homo sapiens
accactagcaagact

SEQ ID NO: 1281183 - DNA, 15 bp, Homo sapiens
gaccactagcaagac

SEQ ID NO: 1281184 - DNA, 15 bp, Homo sapiens
agaccactagcaaga

SEQ ID NO: 1281185 - DNA, 15 bp, Homo sapiens
tagaccactagcaag

SEQ ID NO: 1281186 - DNA, 15 bp, Homo sapiens
atagaccactagcaa

SEQ ID NO: 1281187 - DNA, 15 bp, Homo sapiens
gatagaccactagca

SEQ ID NO: 1281188 - DNA, 15 bp, Homo sapiens
tgatagaccactagc

SEQ ID NO: 1281189 - DNA, 15 bp, Homo sapiens
ttgatagaccactag

SEQ ID NO: 1281190 - DNA, 15 bp, Homo sapiens
attgatagaccacta

SEQ ID NO: 1281191 - DNA, 15 bp, Homo sapiens
aattgatagaccact

SEQ ID NO: 1281192 - DNA, 15 bp, Homo sapiens
aaattgatagaccac

SEQ ID NO: 1281193 - DNA, 15 bp, Homo sapiens
aaaattgatagacca

SEQ ID NO: 1281194 - DNA, 15 bp, Homo sapiens
caaaattgatagacc

SEQ ID NO: 1281195 - DNA, 15 bp, Homo sapiens
acaaaattgatagac

SEQ ID NO: 1281196 - DNA, 15 bp, Homo sapiens
aacaaaattgataga

SEQ ID NO: 1281197 - DNA, 15 bp, Homo sapiens
caacaaaattgatag

SEQ ID NO: 1281198 - DNA, 15 bp, Homo sapiens
tcaacaaaattgata

SEQ ID NO: 1281199 - DNA, 15 bp, Homo sapiens
atcaacaaaattgat

SEQ ID NO: 1281200 - DNA, 15 bp, Homo sapiens
gatcaacaaaattga

SEQ ID NO: 1281201 - DNA, 15 bp, Homo sapiens
agatcaacaaaattg

SEQ ID NO: 1281202 - DNA, 15 bp, Homo sapiens
aagatcaacaaaatt

SEQ ID NO: 1281203 - DNA, 15 bp, Homo sapiens
aaagatcaacaaaat

SEQ ID NO: 1281204 - DNA, 15 bp, Homo sapiens
aaaagatcaacaaaa

SEQ ID NO: 1281205 - DNA, 15 bp, Homo sapiens
gaaaagatcaacaaa

SEQ ID NO: 1281206 - DNA, 15 bp, Homo sapiens
tgaaaagatcaacaa

SEQ ID NO: 1281207 - DNA, 15 bp, Homo sapiens
ttgaaaagatcaaca

SEQ ID NO: 1281208 - DNA, 15 bp, Homo sapiens
tttgaaaagatcaac

SEQ ID NO: 1281209 - DNA, 15 bp, Homo sapiens
ttttgaaaagatcaa

SEQ ID NO: 1281210 - DNA, 15 bp, Homo sapiens
tttttgaaaagatca

SEQ ID NO: 1281211 - DNA, 15 bp, Homo sapiens
ctttttgaaaagatc

SEQ ID NO: 1281212 - DNA, 15 bp, Homo sapiens
gctttttgaaaagat

SEQ ID NO: 1281213 - DNA, 15 bp, Homo sapiens
ggctttttgaaaaga

SEQ ID NO: 1281214 - DNA, 15 bp, Homo sapiens
tggctttttgaaaag

SEQ ID NO: 1281215 - DNA, 15 bp, Homo sapiens
ctggctttttgaaaa

SEQ ID NO: 1281216 - DNA, 15 bp, Homo sapiens
gctggctttttgaaa

SEQ ID NO: 1281217 - DNA, 15 bp, Homo sapiens
agctggctttttgaa

SEQ ID NO: 1281218 - DNA, 15 bp, Homo sapiens
gagctggctttttga

SEQ ID NO: 1281219 - DNA, 15 bp, Homo sapiens
ggagctggctttttg

SEQ ID NO: 1281220 - DNA, 15 bp, Homo sapiens
aggagctggcttttt

SEQ ID NO: 1281221 - DNA, 15 bp, Homo sapiens
caggagctggctttt

SEQ ID NO: 1281222 - DNA, 15 bp, Homo sapiens
ccaggagctggcttt

SEQ ID NO: 1281223 - DNA, 15 bp, Homo sapiens
tccaggagctggctt

SEQ ID NO: 1281224 - DNA, 15 bp, Homo sapiens
atccaggagctggct

SEQ ID NO: 1281225 - DNA, 15 bp, Homo sapiens
aatccaggagctggc

SEQ ID NO: 1281226 - DNA, 15 bp, Homo sapiens
gaatccaggagctgg

SEQ ID NO: 1281227 - DNA, 15 bp, Homo sapiens
tgaatccaggagctg

SEQ ID NO: 1281228 - DNA, 15 bp, Homo sapiens
atgaatccaggagct

SEQ ID NO: 1281229 - DNA, 15 bp, Homo sapiens
aatgaatccaggagc

SEQ ID NO: 1281230 - DNA, 15 bp, Homo sapiens
taatgaatccaggag

SEQ ID NO: 1281231 - DNA, 15 bp, Homo sapiens
ttaatgaatccagga

SEQ ID NO: 1281232 - DNA, 15 bp, Homo sapiens
attaatgaatccagg

SEQ ID NO: 1281233 - DNA, 15 bp, Homo sapiens
aattaatgaatccag

SEQ ID NO: 1281234 - DNA, 15 bp, Homo sapiens
aaattaatgaatcca

SEQ ID NO: 1281235 - DNA, 15 bp, Homo sapiens
aaaattaatgaatcc

SEQ ID NO: 1281236 - DNA, 15 bp, Homo sapiens
aaaaattaatgaatc

SEQ ID NO: 1281237 - DNA, 15 bp, Homo sapiens
aaaaaattaatgaat

SEQ ID NO: 1281238 - DNA, 15 bp, Homo sapiens
caaaaaattaatgaa

SEQ ID NO: 1281239 - DNA, 15 bp, Homo sapiens
tcaaaaaattaatga

SEQ ID NO: 1281240 - DNA, 15 bp, Homo sapiens
ttcaaaaaattaatg

SEQ ID NO: 1281241 - DNA, 15 bp, Homo sapiens
cttcaaaaaattaat

SEQ ID NO: 1281242 - DNA, 15 bp, Homo sapiens
ccttcaaaaaattaa

SEQ ID NO: 1281243 - DNA, 15 bp, Homo sapiens
cccttcaaaaaatta

SEQ ID NO: 1281244 - DNA, 15 bp, Homo sapiens
acccttcaaaaaatt

SEQ ID NO: 1281245 - DNA, 15 bp, Homo sapiens
aacccttcaaaaaat

SEQ ID NO: 1281246 - DNA, 15 bp, Homo sapiens
aaacccttcaaaaaa

SEQ ID NO: 1281247 - DNA, 15 bp, Homo sapiens
aaaacccttcaaaaa

SEQ ID NO: 1281248 - DNA, 15 bp, Homo sapiens
aaaaacccttcaaaa

SEQ ID NO: 1281249 - DNA, 15 bp, Homo sapiens
aaaaaacccttcaaa

SEQ ID NO: 1281250 - DNA, 15 bp, Homo sapiens
caaaaaacccttcaa

SEQ ID NO: 1281251 - DNA, 15 bp, Homo sapiens
acaaaaaacccttca

SEQ ID NO: 1281252 - DNA, 15 bp, Homo sapiens
cacaaaaaacccttc

SEQ ID NO: 1281253 - DNA, 15 bp, Homo sapiens
acacaaaaaaccctt

SEQ ID NO: 1281254 - DNA, 15 bp, Homo sapiens
gacacaaaaaaccct

SEQ ID NO: 1281255 - DNA, 15 bp, Homo sapiens
agacacaaaaaaccc

SEQ ID NO: 1281256 - DNA, 15 bp, Homo sapiens
gagacacaaaaaacc

SEQ ID NO: 1281257 - DNA, 15 bp, Homo sapiens
agagacacaaaaaac

SEQ ID NO: 1281258 - DNA, 15 bp, Homo sapiens
tagagacacaaaaaa

SEQ ID NO: 1281259 - DNA, 15 bp, Homo sapiens
atagagacacaaaaa

SEQ ID NO: 1281260 - DNA, 15 bp, Homo sapiens
aatagagacacaaaa

SEQ ID NO: 1281261 - DNA, 15 bp, Homo sapiens
aaatagagacacaaa

SEQ ID NO: 1281262 - DNA, 15 bp, Homo sapiens
gaaatagagacacaa

SEQ ID NO: 1281263 - DNA, 15 bp, Homo sapiens
ggaaatagagacaca

SEQ ID NO: 1281264 - DNA, 15 bp, Homo sapiens
aggaaatagagacac

SEQ ID NO: 1281265 - DNA, 15 bp, Homo sapiens
aaggaaatagagaca

SEQ ID NO: 1281266 - DNA, 15 bp, Homo sapiens
gaaggaaatagagac

SEQ ID NO: 1281267 - DNA, 15 bp, Homo sapiens
tgaaggaaatagaga

SEQ ID NO: 1281268 - DNA, 15 bp, Homo sapiens
ctgaaggaaatagag

SEQ ID NO: 1281269 - DNA, 15 bp, Homo sapiens
actgaaggaaataga

SEQ ID NO: 1281270 - DNA, 15 bp, Homo sapiens
aactgaaggaaatag

SEQ ID NO: 1281271 - DNA, 15 bp, Homo sapiens
gaactgaaggaaata

SEQ ID NO: 1281272 - DNA, 15 bp, Homo sapiens
agaactgaaggaaat

SEQ ID NO: 1281273 - DNA, 15 bp, Homo sapiens
cagaactgaaggaaa

SEQ ID NO: 1281274 - DNA, 15 bp, Homo sapiens
gcagaactgaaggaa

SEQ ID NO: 1281275 - DNA, 15 bp, Homo sapiens
agcagaactgaagga

SEQ ID NO: 1281276 - DNA, 15 bp, Homo sapiens
gagcagaactgaagg

SEQ ID NO: 1281277 - DNA, 15 bp, Homo sapiens
agagcagaactgaag

SEQ ID NO: 1281278 - DNA, 15 bp, Homo sapiens
cagagcagaactgaa

SEQ ID NO: 1281279 - DNA, 15 bp, Homo sapiens
tcagagcagaactga

SEQ ID NO: 1281280 - DNA, 15 bp, Homo sapiens
atcagagcagaactg

SEQ ID NO: 1281281 - DNA, 15 bp, Homo sapiens
gatcagagcagaact

SEQ ID NO: 1281282 - DNA, 15 bp, Homo sapiens
agatcagagcagaac

SEQ ID NO: 1281283 - DNA, 15 bp, Homo sapiens
aagatcagagcagaa

SEQ ID NO: 1281284 - DNA, 15 bp, Homo sapiens
taagatcagagcaga

SEQ ID NO: 1281285 - DNA, 15 bp, Homo sapiens
ctaagatcagagcag

SEQ ID NO: 1281286 - DNA, 15 bp, Homo sapiens
actaagatcagagca

SEQ ID NO: 1281287 - DNA, 15 bp, Homo sapiens
aactaagatcagagc

SEQ ID NO: 1281288 - DNA, 15 bp, Homo sapiens
taactaagatcagag

SEQ ID NO: 1281289 - DNA, 15 bp, Homo sapiens
ataactaagatcaga

SEQ ID NO: 1281290 - DNA, 15 bp, Homo sapiens
aataactaagatcag

SEQ ID NO: 1281291 - DNA, 15 bp, Homo sapiens
aaataactaagatca

SEQ ID NO: 1281292 - DNA, 15 bp, Homo sapiens
gaaataactaagatc

SEQ ID NO: 1281293 - DNA, 15 bp, Homo sapiens
agaaataactaagat

SEQ ID NO: 1281294 - DNA, 15 bp, Homo sapiens
aagaaataactaaga

SEQ ID NO: 1281295 - DNA, 15 bp, Homo sapiens
caagaaataactaag

SEQ ID NO: 1281296 - DNA, 15 bp, Homo sapiens
gcaagaaataactaa

SEQ ID NO: 1281297 - DNA, 15 bp, Homo sapiens
ggcaagaaataacta

SEQ ID NO: 1281298 - DNA, 15 bp, Homo sapiens
aggcaagaaataact

SEQ ID NO: 1281299 - DNA, 15 bp, Homo sapiens
aaggcaagaaataac

SEQ ID NO: 1281300 - DNA, 15 bp, Homo sapiens
gaaggcaagaaataa

SEQ ID NO: 1281301 - DNA, 15 bp, Homo sapiens
agaaggcaagaaata

SEQ ID NO: 1281302 - DNA, 15 bp, Homo sapiens
cagaaggcaagaaat

SEQ ID NO: 1281303 - DNA, 15 bp, Homo sapiens
gcagaaggcaagaaa

SEQ ID NO: 1281304 - DNA, 15 bp, Homo sapiens
agcagaaggcaagaa

SEQ ID NO: 1281305 - DNA, 15 bp, Homo sapiens
tagcagaaggcaaga

SEQ ID NO: 1281306 - DNA, 15 bp, Homo sapiens
ctagcagaaggcaag

SEQ ID NO: 1281307 - DNA, 15 bp, Homo sapiens
gctagcagaaggcaa

SEQ ID NO: 1281308 - DNA, 15 bp, Homo sapiens
agctagcagaaggca

SEQ ID NO: 1281309 - DNA, 15 bp, Homo sapiens
aagctagcagaaggc

SEQ ID NO: 1281310 - DNA, 15 bp, Homo sapiens
aaagctagcagaagg

SEQ ID NO: 1281311 - DNA, 15 bp, Homo sapiens
aaaagctagcagaag

SEQ ID NO: 1281312 - DNA, 15 bp, Homo sapiens
caaaagctagcagaa

SEQ ID NO: 1281313 - DNA, 15 bp, Homo sapiens
tcaaaagctagcaga

SEQ ID NO: 1281314 - DNA, 15 bp, Homo sapiens
ttcaaaagctagcag

SEQ ID NO: 1281315 - DNA, 15 bp, Homo sapiens
attcaaaagctagca

SEQ ID NO: 1281316 - DNA, 15 bp, Homo sapiens
cattcaaaagctagc

SEQ ID NO: 1281317 - DNA, 15 bp, Homo sapiens
acattcaaaagctag

SEQ ID NO: 1281318 - DNA, 15 bp, Homo sapiens
cacattcaaaagcta

SEQ ID NO: 1281319 - DNA, 15 bp, Homo sapiens
acacattcaaaagct

SEQ ID NO: 1281320 - DNA, 15 bp, Homo sapiens
aacacattcaaaagc

SEQ ID NO: 1281321 - DNA, 15 bp, Homo sapiens
aaacacattcaaaag

SEQ ID NO: 1281322 - DNA, 15 bp, Homo sapiens
caaacacattcaaaa

SEQ ID NO: 1281323 - DNA, 15 bp, Homo sapiens
gcaaacacattcaaa

SEQ ID NO: 1281324 - DNA, 15 bp, Homo sapiens
agcaaacacattcaa

SEQ ID NO: 1281325 - DNA, 15 bp, Homo sapiens
gagcaaacacattca

SEQ ID NO: 1281326 - DNA, 15 bp, Homo sapiens
agagcaaacacattc

SEQ ID NO: 1281327 - DNA, 15 bp, Homo sapiens
aagagcaaacacatt

SEQ ID NO: 1281328 - DNA, 15 bp, Homo sapiens
gaagagcaaacacat

SEQ ID NO: 1281329 - DNA, 15 bp, Homo sapiens
agaagagcaaacaca

SEQ ID NO: 1281330 - DNA, 15 bp, Homo sapiens
gagaagagcaaacac

SEQ ID NO: 1281331 - DNA, 15 bp, Homo sapiens
agagaagagcaaaca

SEQ ID NO: 1281332 - DNA, 15 bp, Homo sapiens
tagagaagagcaaac

SEQ ID NO: 1281333 - DNA, 15 bp, Homo sapiens
ctagagaagagcaaa

SEQ ID NO: 1281334 - DNA, 15 bp, Homo sapiens
actagagaagagcaa

SEQ ID NO: 1281335 - DNA, 15 bp, Homo sapiens
aactagagaagagca

SEQ ID NO: 1281336 - DNA, 15 bp, Homo sapiens
gaactagagaagagc

SEQ ID NO: 1281337 - DNA, 15 bp, Homo sapiens
agaactagagaagag

SEQ ID NO: 1281338 - DNA, 15 bp, Homo sapiens
aagaactagagaaga

SEQ ID NO: 1281339 - DNA, 15 bp, Homo sapiens
aaagaactagagaag

SEQ ID NO: 1281340 - DNA, 15 bp, Homo sapiens
aaaagaactagagaa

SEQ ID NO: 1281341 - DNA, 15 bp, Homo sapiens
taaaagaactagaga

SEQ ID NO: 1281342 - DNA, 15 bp, Homo sapiens
ttaaaagaactagag

SEQ ID NO: 1281343 - DNA, 15 bp, Homo sapiens
attaaaagaactaga

SEQ ID NO: 1281344 - DNA, 15 bp, Homo sapiens
aattaaaagaactag

SEQ ID NO: 1281345 - DNA, 15 bp, Homo sapiens
caattaaaagaacta

SEQ ID NO: 1281346 - DNA, 15 bp, Homo sapiens
acaattaaaagaact

SEQ ID NO: 1281347 - DNA, 15 bp, Homo sapiens
cacaattaaaagaac

SEQ ID NO: 1281348 - DNA, 15 bp, Homo sapiens
tcacaattaaaagaa

SEQ ID NO: 1281349 - DNA, 15 bp, Homo sapiens
atcacaattaaaaga

SEQ ID NO: 1281350 - DNA, 15 bp, Homo sapiens
catcacaattaaaag

SEQ ID NO: 1281351 - DNA, 15 bp, Homo sapiens
acatcacaattaaaa

SEQ ID NO: 1281352 - DNA, 15 bp, Homo sapiens
aacatcacaattaaa

SEQ ID NO: 1281353 - DNA, 15 bp, Homo sapiens
taacatcacaattaa

SEQ ID NO: 1281354 - DNA, 15 bp, Homo sapiens
ctaacatcacaatta

SEQ ID NO: 1281355 - DNA, 15 bp, Homo sapiens
cctaacatcacaatt

SEQ ID NO: 1281356 - DNA, 15 bp, Homo sapiens
ccctaacatcacaat

SEQ ID NO: 1281357 - DNA, 15 bp, Homo sapiens
accctaacatcacaa

SEQ ID NO: 1281358 - DNA, 15 bp, Homo sapiens
caccctaacatcaca

SEQ ID NO: 1281359 - DNA, 15 bp, Homo sapiens
acaccctaacatcac

SEQ ID NO: 1281360 - DNA, 15 bp, Homo sapiens
gacaccctaacatca

SEQ ID NO: 1281361 - DNA, 15 bp, Homo sapiens
tgacaccctaacatc

SEQ ID NO: 1281362 - DNA, 15 bp, Homo sapiens
ttgacaccctaacat

SEQ ID NO: 1281363 - DNA, 15 bp, Homo sapiens
attgacaccctaaca

SEQ ID NO: 1281364 - DNA, 15 bp, Homo sapiens
aattgacaccctaac

SEQ ID NO: 1281365 - DNA, 15 bp, Homo sapiens
aaattgacaccctaa

SEQ ID NO: 1281366 - DNA, 15 bp, Homo sapiens
aaaattgacacccta

SEQ ID NO: 1281367 - DNA, 15 bp, Homo sapiens
caaaattgacaccct

SEQ ID NO: 1281368 - DNA, 15 bp, Homo sapiens
ccaaaattgacaccc

SEQ ID NO: 1281369 - DNA, 15 bp, Homo sapiens
tccaaaattgacacc

SEQ ID NO: 1281370 - DNA, 15 bp, Homo sapiens
atccaaaattgacac

SEQ ID NO: 1281371 - DNA, 15 bp, Homo sapiens
catccaaaattgaca

SEQ ID NO: 1281372 - DNA, 15 bp, Homo sapiens
acatccaaaattgac

SEQ ID NO: 1281373 - DNA, 15 bp, Homo sapiens
aacatccaaaattga

SEQ ID NO: 1281374 - DNA, 15 bp, Homo sapiens
aaacatccaaaattg

SEQ ID NO: 1281375 - DNA, 15 bp, Homo sapiens
gaaacatccaaaatt

SEQ ID NO: 1281376 - DNA, 15 bp, Homo sapiens
ggaaacatccaaaat

SEQ ID NO: 1281377 - DNA, 15 bp, Homo sapiens
aggaaacatccaaaa

SEQ ID NO: 1281378 - DNA, 15 bp, Homo sapiens
caggaaacatccaaa

SEQ ID NO: 1281379 - DNA, 15 bp, Homo sapiens
gcaggaaacatccaa

SEQ ID NO: 1281380 - DNA, 15 bp, Homo sapiens
agcaggaaacatcca

SEQ ID NO: 1281381 - DNA, 15 bp, Homo sapiens
aagcaggaaacatcc

SEQ ID NO: 1281382 - DNA, 15 bp, Homo sapiens
aaagcaggaaacatc

SEQ ID NO: 1281383 - DNA, 15 bp, Homo sapiens
gaaagcaggaaacat

SEQ ID NO: 1281384 - DNA, 15 bp, Homo sapiens
agaaagcaggaaaca

SEQ ID NO: 1281385 - DNA, 15 bp, Homo sapiens
gagaaagcaggaaac

SEQ ID NO: 1281386 - DNA, 15 bp, Homo sapiens
agagaaagcaggaaa

SEQ ID NO: 1281387 - DNA, 15 bp, Homo sapiens
aagagaaagcaggaa

SEQ ID NO: 1281388 - DNA, 15 bp, Homo sapiens
caagagaaagcagga

SEQ ID NO: 1281389 - DNA, 15 bp, Homo sapiens
acaagagaaagcagg

SEQ ID NO: 1281390 - DNA, 15 bp, Homo sapiens
cacaagagaaagcag

SEQ ID NO: 1281391 - DNA, 15 bp, Homo sapiens
ccacaagagaaagca

SEQ ID NO: 1281392 - DNA, 15 bp, Homo sapiens
cccacaagagaaagc

SEQ ID NO: 1281393 - DNA, 15 bp, Homo sapiens
gcccacaagagaaag

SEQ ID NO: 1281394 - DNA, 15 bp, Homo sapiens
tgcccacaagagaaa

SEQ ID NO: 1281395 - DNA, 15 bp, Homo sapiens
atgcccacaagagaa

SEQ ID NO: 1281396 - DNA, 15 bp, Homo sapiens
aatgcccacaagaga

SEQ ID NO: 1281397 - DNA, 15 bp, Homo sapiens
aaatgcccacaagag

SEQ ID NO: 1281398 - DNA, 15 bp, Homo sapiens
taaatgcccacaaga

SEQ ID NO: 1281399 - DNA, 15 bp, Homo sapiens
ctaaatgcccacaag

SEQ ID NO: 1281400 - DNA, 15 bp, Homo sapiens
actaaatgcccacaa

SEQ ID NO: 1281401 - DNA, 15 bp, Homo sapiens
cactaaatgcccaca

SEQ ID NO: 1281402 - DNA, 15 bp, Homo sapiens
gcactaaatgcccac

SEQ ID NO: 1281403 - DNA, 15 bp, Homo sapiens
agcactaaatgccca

SEQ ID NO: 1281404 - DNA, 15 bp, Homo sapiens
tagcactaaatgccc

SEQ ID NO: 1281405 - DNA, 15 bp, Homo sapiens
atagcactaaatgcc

SEQ ID NO: 1281406 - DNA, 15 bp, Homo sapiens
tatagcactaaatgc

SEQ ID NO: 1281407 - DNA, 15 bp, Homo sapiens
ttatagcactaaatg

SEQ ID NO: 1281408 - DNA, 15 bp, Homo sapiens
tttatagcactaaat

SEQ ID NO: 1281409 - DNA, 15 bp, Homo sapiens
atttatagcactaaa

SEQ ID NO: 1281410 - DNA, 15 bp, Homo sapiens
aatttatagcactaa

SEQ ID NO: 1281411 - DNA, 15 bp, Homo sapiens
aaatttatagcacta

SEQ ID NO: 1281412 - DNA, 15 bp, Homo sapiens
gaaatttatagcact

SEQ ID NO: 1281413 - DNA, 15 bp, Homo sapiens
ggaaatttatagcac

SEQ ID NO: 1281414 - DNA, 15 bp, Homo sapiens
gggaaatttatagca

SEQ ID NO: 1281415 - DNA, 15 bp, Homo sapiens
agggaaatttatagc

SEQ ID NO: 1281416 - DNA, 15 bp, Homo sapiens
gagggaaatttatag

SEQ ID NO: 1281417 - DNA, 15 bp, Homo sapiens
agagggaaatttata

SEQ ID NO: 1281418 - DNA, 15 bp, Homo sapiens
tagagggaaatttat

SEQ ID NO: 1281419 - DNA, 15 bp, Homo sapiens
gtagagggaaattta

SEQ ID NO: 1281420 - DNA, 15 bp, Homo sapiens
tgtagagggaaattt

SEQ ID NO: 1281421 - DNA, 15 bp, Homo sapiens
gtgtagagggaaatt

SEQ ID NO: 1281422 - DNA, 15 bp, Homo sapiens
tgtgtagagggaaat

SEQ ID NO: 1281423 - DNA, 15 bp, Homo sapiens
gtgtgtagagggaaa

SEQ ID NO: 1281424 - DNA, 15 bp, Homo sapiens
agtgtgtagagggaa

SEQ ID NO: 1281425 - DNA, 15 bp, Homo sapiens
cagtgtgtagaggga

SEQ ID NO: 1281426 - DNA, 15 bp, Homo sapiens
gcagtgtgtagaggg

SEQ ID NO: 1281427 - DNA, 15 bp, Homo sapiens
agcagtgtgtagagg

SEQ ID NO: 1281428 - DNA, 15 bp, Homo sapiens
aagcagtgtgtagag

SEQ ID NO: 1281429 - DNA, 15 bp, Homo sapiens
aaagcagtgtgtaga

SEQ ID NO: 1281430 - DNA, 15 bp, Homo sapiens
taaagcagtgtgtag

SEQ ID NO: 1281431 - DNA, 15 bp, Homo sapiens
gtaaagcagtgtgta

SEQ ID NO: 1281432 - DNA, 15 bp, Homo sapiens
tgtaaagcagtgtgt

SEQ ID NO: 1281433 - DNA, 15 bp, Homo sapiens
atgtaaagcagtgtg

SEQ ID NO: 1281434 - DNA, 15 bp, Homo sapiens
catgtaaagcagtgt

SEQ ID NO: 1281435 - DNA, 15 bp, Homo sapiens
acatgtaaagcagtg

SEQ ID NO: 1281436 - DNA, 15 bp, Homo sapiens
cacatgtaaagcagt

SEQ ID NO: 1281437 - DNA, 15 bp, Homo sapiens
acacatgtaaagcag

SEQ ID NO: 1281438 - DNA, 15 bp, Homo sapiens
gacacatgtaaagca

SEQ ID NO: 1281439 - DNA, 15 bp, Homo sapiens
ggacacatgtaaagc

SEQ ID NO: 1281440 - DNA, 15 bp, Homo sapiens
gggacacatgtaaag

SEQ ID NO: 1281441 - DNA, 15 bp, Homo sapiens
tgggacacatgtaaa

SEQ ID NO: 1281442 - DNA, 15 bp, Homo sapiens
ctgggacacatgtaa

SEQ ID NO: 1281443 - DNA, 15 bp, Homo sapiens
tctgggacacatgta

SEQ ID NO: 1281444 - DNA, 15 bp, Homo sapiens
ctctgggacacatgt

SEQ ID NO: 1281445 - DNA, 15 bp, Homo sapiens
tctctgggacacatg

SEQ ID NO: 1281446 - DNA, 15 bp, Homo sapiens
atctctgggacacat

SEQ ID NO: 1281447 - DNA, 15 bp, Homo sapiens
aatctctgggacaca

SEQ ID NO: 1281448 - DNA, 15 bp, Homo sapiens
gaatctctgggacac

SEQ ID NO: 1281449 - DNA, 15 bp, Homo sapiens
agaatctctgggaca

SEQ ID NO: 1281450 - DNA, 15 bp, Homo sapiens
cagaatctctgggac

SEQ ID NO: 1281451 - DNA, 15 bp, Homo sapiens
ccagaatctctggga

SEQ ID NO: 1281452 - DNA, 15 bp, Homo sapiens
accagaatctctggg

SEQ ID NO: 1281453 - DNA, 15 bp, Homo sapiens
taccagaatctctgg

SEQ ID NO: 1281454 - DNA, 15 bp, Homo sapiens
ataccagaatctctg

SEQ ID NO: 1281455 - DNA, 15 bp, Homo sapiens
cataccagaatctct

SEQ ID NO: 1281456 - DNA, 15 bp, Homo sapiens
acataccagaatctc

SEQ ID NO: 1281457 - DNA, 15 bp, Homo sapiens
aacataccagaatct

SEQ ID NO: 1281458 - DNA, 15 bp, Homo sapiens
caacataccagaatc

SEQ ID NO: 1281459 - DNA, 15 bp, Homo sapiens
acaacataccagaat

SEQ ID NO: 1281460 - DNA, 15 bp, Homo sapiens
cacaacataccagaa

SEQ ID NO: 1281461 - DNA, 15 bp, Homo sapiens
acacaacataccaga

SEQ ID NO: 1281462 - DNA, 15 bp, Homo sapiens
gacacaacataccag

SEQ ID NO: 1281463 - DNA, 15 bp, Homo sapiens
agacacaacatacca

SEQ ID NO: 1281464 - DNA, 15 bp, Homo sapiens
aagacacaacatacc

SEQ ID NO: 1281465 - DNA, 15 bp, Homo sapiens
aaagacacaacatac

SEQ ID NO: 1281466 - DNA, 15 bp, Homo sapiens
caaagacacaacata

SEQ ID NO: 1281467 - DNA, 15 bp, Homo sapiens
acaaagacacaacat

SEQ ID NO: 1281468 - DNA, 15 bp, Homo sapiens
aacaaagacacaaca

SEQ ID NO: 1281469 - DNA, 15 bp, Homo sapiens
gaacaaagacacaac

SEQ ID NO: 1281470 - DNA, 15 bp, Homo sapiens
agaacaaagacacaa

SEQ ID NO: 1281471 - DNA, 15 bp, Homo sapiens
cagaacaaagacaca

SEQ ID NO: 1281472 - DNA, 15 bp, Homo sapiens
tcagaacaaagacac

SEQ ID NO: 1281473 - DNA, 15 bp, Homo sapiens
atcagaacaaagaca

SEQ ID NO: 1281474 - DNA, 15 bp, Homo sapiens
aatcagaacaaagac

SEQ ID NO: 1281475 - DNA, 15 bp, Homo sapiens
caatcagaacaaaga

SEQ ID NO: 1281476 - DNA, 15 bp, Homo sapiens
ccaatcagaacaaag

SEQ ID NO: 1281477 - DNA, 15 bp, Homo sapiens
accaatcagaacaaa

SEQ ID NO: 1281478 - DNA, 15 bp, Homo sapiens
aaccaatcagaacaa

SEQ ID NO: 1281479 - DNA, 15 bp, Homo sapiens
aaaccaatcagaaca

SEQ ID NO: 1281480 - DNA, 15 bp, Homo sapiens
gaaaccaatcagaac

SEQ ID NO: 1281481 - DNA, 15 bp, Homo sapiens
tgaaaccaatcagaa

SEQ ID NO: 1281482 - DNA, 15 bp, Homo sapiens
ttgaaaccaatcaga

SEQ ID NO: 1281483 - DNA, 15 bp, Homo sapiens
tttgaaaccaatcag

SEQ ID NO: 1281484 - DNA, 15 bp, Homo sapiens
ctttgaaaccaatca

SEQ ID NO: 1281485 - DNA, 15 bp, Homo sapiens
tctttgaaaccaatc

SEQ ID NO: 1281486 - DNA, 15 bp, Homo sapiens
ttctttgaaaccaat

SEQ ID NO: 1281487 - DNA, 15 bp, Homo sapiens
gttctttgaaaccaa

SEQ ID NO: 1281488 - DNA, 15 bp, Homo sapiens
tgttctttgaaacca

SEQ ID NO: 1281489 - DNA, 15 bp, Homo sapiens
atgttctttgaaacc

SEQ ID NO: 1281490 - DNA, 15 bp, Homo sapiens
gatgttctttgaaac

SEQ ID NO: 1281491 - DNA, 15 bp, Homo sapiens
agatgttctttgaaa

SEQ ID NO: 1281492 - DNA, 15 bp, Homo sapiens
aagatgttctttgaa

SEQ ID NO: 1281493 - DNA, 15 bp, Homo sapiens
aaagatgttctttga

SEQ ID NO: 1281494 - DNA, 15 bp, Homo sapiens
taaagatgttctttg

SEQ ID NO: 1281495 - DNA, 15 bp, Homo sapiens
ataaagatgttcttt

SEQ ID NO: 1281496 - DNA, 15 bp, Homo sapiens
aataaagatgttctt

SEQ ID NO: 1281497 - DNA, 15 bp, Homo sapiens
aaataaagatgttct

SEQ ID NO: 1281498 - DNA, 15 bp, Homo sapiens
gaaataaagatgttc

SEQ ID NO: 1281499 - DNA, 15 bp, Homo sapiens
agaaataaagatgtt

SEQ ID NO: 1281500 - DNA, 15 bp, Homo sapiens
cagaaataaagatgt

SEQ ID NO: 1281501 - DNA, 15 bp, Homo sapiens
gcagaaataaagatg

SEQ ID NO: 1281502 - DNA, 15 bp, Homo sapiens
ggcagaaataaagat

SEQ ID NO: 1281503 - DNA, 15 bp, Homo sapiens
aggcagaaataaaga

SEQ ID NO: 1281504 - DNA, 15 bp, Homo sapiens
aaggcagaaataaag

SEQ ID NO: 1281505 - DNA, 15 bp, Homo sapiens
gaaggcagaaataaa

SEQ ID NO: 1281506 - DNA, 15 bp, Homo sapiens
tgaaggcagaaataa

SEQ ID NO: 1281507 - DNA, 15 bp, Homo sapiens
atgaaggcagaaata

SEQ ID NO: 1281508 - DNA, 15 bp, Homo sapiens
aatgaaggcagaaat

SEQ ID NO: 1281509 - DNA, 15 bp, Homo sapiens
aaatgaaggcagaaa

SEQ ID NO: 1281510 - DNA, 15 bp, Homo sapiens
gaaatgaaggcagaa

SEQ ID NO: 1281511 - DNA, 15 bp, Homo sapiens
cgaaatgaaggcaga

SEQ ID NO: 1281512 - DNA, 15 bp, Homo sapiens
acgaaatgaaggcag

SEQ ID NO: 1281513 - DNA, 15 bp, Homo sapiens
aacgaaatgaaggca

SEQ ID NO: 1281514 - DNA, 15 bp, Homo sapiens
taacgaaatgaaggc

SEQ ID NO: 1281515 - DNA, 15 bp, Homo sapiens
ataacgaaatgaagg

SEQ ID NO: 1281516 - DNA, 15 bp, Homo sapiens
cataacgaaatgaag

SEQ ID NO: 1281517 - DNA, 15 bp, Homo sapiens
acataacgaaatgaa

SEQ ID NO: 1281518 - DNA, 15 bp, Homo sapiens
tacataacgaaatga

SEQ ID NO: 1281519 - DNA, 15 bp, Homo sapiens
gtacataacgaaatg

SEQ ID NO: 1281520 - DNA, 15 bp, Homo sapiens
ggtacataacgaaat

SEQ ID NO: 1281521 - DNA, 15 bp, Homo sapiens
gggtacataacgaaa

SEQ ID NO: 1281522 - DNA, 15 bp, Homo sapiens
tgggtacataacgaa

SEQ ID NO: 1281523 - DNA, 15 bp, Homo sapiens
ctgggtacataacga

SEQ ID NO: 1281524 - DNA, 15 bp, Homo sapiens
actgggtacataacg

SEQ ID NO: 1281525 - DNA, 15 bp, Homo sapiens
tactgggtacataac

SEQ ID NO: 1281526 - DNA, 15 bp, Homo sapiens
ctactgggtacataa

SEQ ID NO: 1281527 - DNA, 15 bp, Homo sapiens
actactgggtacata

SEQ ID NO: 1281528 - DNA, 15 bp, Homo sapiens
gactactgggtacat

SEQ ID NO: 1281529 - DNA, 15 bp, Homo sapiens
tgactactgggtaca

SEQ ID NO: 1281530 - DNA, 15 bp, Homo sapiens
atgactactgggtac

SEQ ID NO: 1281531 - DNA, 15 bp, Homo sapiens
aatgactactgggta

SEQ ID NO: 1281532 - DNA, 15 bp, Homo sapiens
gaatgactactgggt

SEQ ID NO: 1281533 - DNA, 15 bp, Homo sapiens
tgaatgactactggg

SEQ ID NO: 1281534 - DNA, 15 bp, Homo sapiens
ctgaatgactactgg

SEQ ID NO: 1281535 - DNA, 15 bp, Homo sapiens
cctgaatgactactg

SEQ ID NO: 1281536 - DNA, 15 bp, Homo sapiens
tcctgaatgactact

SEQ ID NO: 1281537 - DNA, 15 bp, Homo sapiens
ctcctgaatgactac

SEQ ID NO: 1281538 - DNA, 15 bp, Homo sapiens
gctcctgaatgacta

SEQ ID NO: 1281539 - DNA, 15 bp, Homo sapiens
tgctcctgaatgact

SEQ ID NO: 1281540 - DNA, 15 bp, Homo sapiens
ctgctcctgaatgac

SEQ ID NO: 1281541 - DNA, 15 bp, Homo sapiens
cctgctcctgaatga

SEQ ID NO: 1281542 - DNA, 15 bp, Homo sapiens
acctgctcctgaatg

SEQ ID NO: 1281543 - DNA, 15 bp, Homo sapiens
aacctgctcctgaat

SEQ ID NO: 1281544 - DNA, 15 bp, Homo sapiens
caacctgctcctgaa

SEQ ID NO: 1281545 - DNA, 15 bp, Homo sapiens
acaacctgctcctga

SEQ ID NO: 1281546 - DNA, 15 bp, Homo sapiens
aacaacctgctcctg

SEQ ID NO: 1281547 - DNA, 15 bp, Homo sapiens
gaacaacctgctcct

SEQ ID NO: 1281548 - DNA, 15 bp, Homo sapiens
tgaacaacctgctcc

SEQ ID NO: 1281549 - DNA, 15 bp, Homo sapiens
ctgaacaacctgctc

SEQ ID NO: 1281550 - DNA, 15 bp, Homo sapiens
actgaacaacctgct

SEQ ID NO: 1281551 - DNA, 15 bp, Homo sapiens
aactgaacaacctgc

SEQ ID NO: 1281552 - DNA, 15 bp, Homo sapiens
aaactgaacaacctg

SEQ ID NO: 1281553 - DNA, 15 bp, Homo sapiens
gaaactgaacaacct

SEQ ID NO: 1281554 - DNA, 15 bp, Homo sapiens
ggaaactgaacaacc

SEQ ID NO: 1281555 - DNA, 15 bp, Homo sapiens
tggaaactgaacaac

SEQ ID NO: 1281556 - DNA, 15 bp, Homo sapiens
atggaaactgaacaa

SEQ ID NO: 1281557 - DNA, 15 bp, Homo sapiens
catggaaactgaaca

SEQ ID NO: 1281558 - DNA, 15 bp, Homo sapiens
acatggaaactgaac

SEQ ID NO: 1281559 - DNA, 15 bp, Homo sapiens
tacatggaaactgaa

SEQ ID NO: 1281560 - DNA, 15 bp, Homo sapiens
ctacatggaaactga

SEQ ID NO: 1281561 - DNA, 15 bp, Homo sapiens
actacatggaaactg

SEQ ID NO: 1281562 - DNA, 15 bp, Homo sapiens
aactacatggaaact

SEQ ID NO: 1281563 - DNA, 15 bp, Homo sapiens
taactacatggaaac

SEQ ID NO: 1281564 - DNA, 15 bp, Homo sapiens
ataactacatggaaa

SEQ ID NO: 1281565 - DNA, 15 bp, Homo sapiens
cataactacatggaa

SEQ ID NO: 1281566 - DNA, 15 bp, Homo sapiens
gcataactacatgga

SEQ ID NO: 1281567 - DNA, 15 bp, Homo sapiens
cgcataactacatgg

SEQ ID NO: 1281568 - DNA, 15 bp, Homo sapiens
ccgcataactacatg

SEQ ID NO: 1281569 - DNA, 15 bp, Homo sapiens
accgcataactacat

SEQ ID NO: 1281570 - DNA, 15 bp, Homo sapiens
aaccgcataactaca

SEQ ID NO: 1281571 - DNA, 15 bp, Homo sapiens
aaaccgcataactac

SEQ ID NO: 1281572 - DNA, 15 bp, Homo sapiens
aaaaccgcataacta

SEQ ID NO: 1281573 - DNA, 15 bp, Homo sapiens
caaaaccgcataact

SEQ ID NO: 1281574 - DNA, 15 bp, Homo sapiens
tcaaaaccgcataac

SEQ ID NO: 1281575 - DNA, 15 bp, Homo sapiens
ctcaaaaccgcataa

SEQ ID NO: 1281576 - DNA, 15 bp, Homo sapiens
actcaaaaccgcata

SEQ ID NO: 1281577 - DNA, 15 bp, Homo sapiens
cactcaaaaccgcat

SEQ ID NO: 1281578 - DNA, 15 bp, Homo sapiens
tcactcaaaaccgca

SEQ ID NO: 1281579 - DNA, 15 bp, Homo sapiens
ctcactcaaaaccgc

SEQ ID NO: 1281580 - DNA, 15 bp, Homo sapiens
actcactcaaaaccg

SEQ ID NO: 1281581 - DNA, 15 bp, Homo sapiens
aactcactcaaaacc

SEQ ID NO: 1281582 - DNA, 15 bp, Homo sapiens
aaactcactcaaaac

SEQ ID NO: 1281583 - DNA, 15 bp, Homo sapiens
gaaactcactcaaaa

SEQ ID NO: 1281584 - DNA, 15 bp, Homo sapiens
agaaactcactcaaa

SEQ ID NO: 1281585 - DNA, 15 bp, Homo sapiens
aagaaactcactcaa

SEQ ID NO: 1281586 - DNA, 15 bp, Homo sapiens
taagaaactcactca

SEQ ID NO: 1281587 - DNA, 15 bp, Homo sapiens
ttaagaaactcactc

SEQ ID NO: 1281588 - DNA, 15 bp, Homo sapiens
attaagaaactcact

SEQ ID NO: 1281589 - DNA, 15 bp, Homo sapiens
gattaagaaactcac

SEQ ID NO: 1281590 - DNA, 15 bp, Homo sapiens
ggattaagaaactca

SEQ ID NO: 1281591 - DNA, 15 bp, Homo sapiens
aggattaagaaactc

SEQ ID NO: 1281592 - DNA, 15 bp, Homo sapiens
caggattaagaaact

SEQ ID NO: 1281593 - DNA, 15 bp, Homo sapiens
tcaggattaagaaac

SEQ ID NO: 1281594 - DNA, 15 bp, Homo sapiens
ctcaggattaagaaa

SEQ ID NO: 1281595 - DNA, 15 bp, Homo sapiens
actcaggattaagaa

SEQ ID NO: 1281596 - DNA, 15 bp, Homo sapiens
aactcaggattaaga

SEQ ID NO: 1281597 - DNA, 15 bp, Homo sapiens
gaactcaggattaag

SEQ ID NO: 1281598 - DNA, 15 bp, Homo sapiens
agaactcaggattaa

SEQ ID NO: 1281599 - DNA, 15 bp, Homo sapiens
tagaactcaggatta

SEQ ID NO: 1281600 - DNA, 15 bp, Homo sapiens
ctagaactcaggatt

SEQ ID NO: 1281601 - DNA, 15 bp, Homo sapiens
actagaactcaggat

SEQ ID NO: 1281602 - DNA, 15 bp, Homo sapiens
aactagaactcagga

SEQ ID NO: 1281603 - DNA, 15 bp, Homo sapiens
aaactagaactcagg

SEQ ID NO: 1281604 - DNA, 15 bp, Homo sapiens
caaactagaactcag

SEQ ID NO: 1281605 - DNA, 15 bp, Homo sapiens
tcaaactagaactca

SEQ ID NO: 1281606 - DNA, 15 bp, Homo sapiens
atcaaactagaactc

SEQ ID NO: 1281607 - DNA, 15 bp, Homo sapiens
aatcaaactagaact

SEQ ID NO: 1281608 - DNA, 15 bp, Homo sapiens
caatcaaactagaac

SEQ ID NO: 1281609 - DNA, 15 bp, Homo sapiens
gcaatcaaactagaa

SEQ ID NO: 1281610 - DNA, 15 bp, Homo sapiens
tgcaatcaaactaga

SEQ ID NO: 1281611 - DNA, 15 bp, Homo sapiens
gtgcaatcaaactag

SEQ ID NO: 1281612 - DNA, 15 bp, Homo sapiens
agtgcaatcaaacta

SEQ ID NO: 1281613 - DNA, 15 bp, Homo sapiens
cagtgcaatcaaact

SEQ ID NO: 1281614 - DNA, 15 bp, Homo sapiens
acagtgcaatcaaac

SEQ ID NO: 1281615 - DNA, 15 bp, Homo sapiens
cacagtgcaatcaaa

SEQ ID NO: 1281616 - DNA, 15 bp, Homo sapiens
tcacagtgcaatcaa

SEQ ID NO: 1281617 - DNA, 15 bp, Homo sapiens
atcacagtgcaatca

SEQ ID NO: 1281618 - DNA, 15 bp, Homo sapiens
gatcacagtgcaatc

SEQ ID NO: 1281619 - DNA, 15 bp, Homo sapiens
agatcacagtgcaat

SEQ ID NO: 1281620 - DNA, 15 bp, Homo sapiens
cagatcacagtgcaa

SEQ ID NO: 1281621 - DNA, 15 bp, Homo sapiens
tcagatcacagtgca

SEQ ID NO: 1281622 - DNA, 15 bp, Homo sapiens
ctcagatcacagtgc

SEQ ID NO: 1281623 - DNA, 15 bp, Homo sapiens
tctcagatcacagtg

SEQ ID NO: 1281624 - DNA, 15 bp, Homo sapiens
ctctcagatcacagt

SEQ ID NO: 1281625 - DNA, 15 bp, Homo sapiens
tctctcagatcacag

SEQ ID NO: 1281626 - DNA, 15 bp, Homo sapiens
gtctctcagatcaca

SEQ ID NO: 1281627 - DNA, 15 bp, Homo sapiens
tgtctctcagatcac

SEQ ID NO: 1281628 - DNA, 15 bp, Homo sapiens
ctgtctctcagatca

SEQ ID NO: 1281629 - DNA, 15 bp, Homo sapiens
actgtctctcagatc

SEQ ID NO: 1281630 - DNA, 15 bp, Homo sapiens
aactgtctctcagat

SEQ ID NO: 1281631 - DNA, 15 bp, Homo sapiens
aaactgtctctcaga

SEQ ID NO: 1281632 - DNA, 15 bp, Homo sapiens
caaactgtctctcag

SEQ ID NO: 1281633 - DNA, 15 bp, Homo sapiens
acaaactgtctctca

SEQ ID NO: 1281634 - DNA, 15 bp, Homo sapiens
aacaaactgtctctc

SEQ ID NO: 1281635 - DNA, 15 bp, Homo sapiens
taacaaactgtctct

SEQ ID NO: 1281636 - DNA, 15 bp, Homo sapiens
ataacaaactgtctc

SEQ ID NO: 1281637 - DNA, 15 bp, Homo sapiens
tataacaaactgtct

SEQ ID NO: 1281638 - DNA, 15 bp, Homo sapiens
ttataacaaactgtc

SEQ ID NO: 1281639 - DNA, 15 bp, Homo sapiens
attataacaaactgt

SEQ ID NO: 1281640 - DNA, 15 bp, Homo sapiens
aattataacaaactg

SEQ ID NO: 1281641 - DNA, 15 bp, Homo sapiens
aaattataacaaact

SEQ ID NO: 1281642 - DNA, 15 bp, Homo sapiens
gaaattataacaaac

SEQ ID NO: 1281643 - DNA, 15 bp, Homo sapiens
agaaattataacaaa

SEQ ID NO: 1281644 - DNA, 15 bp, Homo sapiens
aagaaattataacaa

SEQ ID NO: 1281645 - DNA, 15 bp, Homo sapiens
aaagaaattataaca

SEQ ID NO: 1281646 - DNA, 15 bp, Homo sapiens
aaaagaaattataac

SEQ ID NO: 1281647 - DNA, 15 bp, Homo sapiens
gaaaagaaattataa

SEQ ID NO: 1281648 - DNA, 15 bp, Homo sapiens
agaaaagaaattata

SEQ ID NO: 1281649 - DNA, 15 bp, Homo sapiens
aagaaaagaaattat

SEQ ID NO: 1281650 - DNA, 15 bp, Homo sapiens
aaagaaaagaaatta

SEQ ID NO: 1281651 - DNA, 15 bp, Homo sapiens
aaaagaaaagaaatt

SEQ ID NO: 1281652 - DNA, 15 bp, Homo sapiens
taaaagaaaagaaat

SEQ ID NO: 1281653 - DNA, 15 bp, Homo sapiens
gtaaaagaaaagaaa

SEQ ID NO: 1281654 - DNA, 15 bp, Homo sapiens
tgtaaaagaaaagaa

SEQ ID NO: 1281655 - DNA, 15 bp, Homo sapiens
atgtaaaagaaaaga

SEQ ID NO: 1281656 - DNA, 15 bp, Homo sapiens
aatgtaaaagaaaag

SEQ ID NO: 1281657 - DNA, 15 bp, Homo sapiens
aaatgtaaaagaaaa

SEQ ID NO: 1281658 - DNA, 15 bp, Homo sapiens
caaatgtaaaagaaa

SEQ ID NO: 1281659 - DNA, 15 bp, Homo sapiens
gcaaatgtaaaagaa

SEQ ID NO: 1281660 - DNA, 15 bp, Homo sapiens
agcaaatgtaaaaga

SEQ ID NO: 1281661 - DNA, 15 bp, Homo sapiens
cagcaaatgtaaaag

SEQ ID NO: 1281662 - DNA, 15 bp, Homo sapiens
tcagcaaatgtaaaa

SEQ ID NO: 1281663 - DNA, 15 bp, Homo sapiens
ctcagcaaatgtaaa

SEQ ID NO: 1281664 - DNA, 15 bp, Homo sapiens
cctcagcaaatgtaa

SEQ ID NO: 1281665 - DNA, 15 bp, Homo sapiens
tcctcagcaaatgta

SEQ ID NO: 1281666 - DNA, 15 bp, Homo sapiens
ctcctcagcaaatgt

SEQ ID NO: 1281667 - DNA, 15 bp, Homo sapiens
tctcctcagcaaatg

SEQ ID NO: 1281668 - DNA, 15 bp, Homo sapiens
ctctcctcagcaaat

SEQ ID NO: 1281669 - DNA, 15 bp, Homo sapiens
gctctcctcagcaaa

SEQ ID NO: 1281670 - DNA, 15 bp, Homo sapiens
agctctcctcagcaa

SEQ ID NO: 1281671 - DNA, 15 bp, Homo sapiens
aagctctcctcagca

SEQ ID NO: 1281672 - DNA, 15 bp, Homo sapiens
aaagctctcctcagc

SEQ ID NO: 1281673 - DNA, 15 bp, Homo sapiens
taaagctctcctcag

SEQ ID NO: 1281674 - DNA, 15 bp, Homo sapiens
gtaaagctctcctca

SEQ ID NO: 1281675 - DNA, 15 bp, Homo sapiens
agtaaagctctcctc

SEQ ID NO: 1281676 - DNA, 15 bp, Homo sapiens
aagtaaagctctcct

SEQ ID NO: 1281677 - DNA, 15 bp, Homo sapiens
gaagtaaagctctcc

SEQ ID NO: 1281678 - DNA, 15 bp, Homo sapiens
ggaagtaaagctctc

SEQ ID NO: 1281679 - DNA, 15 bp, Homo sapiens
tggaagtaaagctct

SEQ ID NO: 1281680 - DNA, 15 bp, Homo sapiens
ttggaagtaaagctc

SEQ ID NO: 1281681 - DNA, 15 bp, Homo sapiens
gttggaagtaaagct

SEQ ID NO: 1281682 - DNA, 15 bp, Homo sapiens
agttggaagtaaagc

SEQ ID NO: 1281683 - DNA, 15 bp, Homo sapiens
tagttggaagtaaag

SEQ ID NO: 1281684 - DNA, 15 bp, Homo sapiens
atagttggaagtaaa

SEQ ID NO: 1281685 - DNA, 15 bp, Homo sapiens
catagttggaagtaa

SEQ ID NO: 1281686 - DNA, 15 bp, Homo sapiens
acatagttggaagta

SEQ ID NO: 1281687 - DNA, 15 bp, Homo sapiens
cacatagttggaagt

SEQ ID NO: 1281688 - DNA, 15 bp, Homo sapiens
ccacatagttggaag

SEQ ID NO: 1281689 - DNA, 15 bp, Homo sapiens
accacatagttggaa

SEQ ID NO: 1281690 - DNA, 15 bp, Homo sapiens
gaccacatagttgga

SEQ ID NO: 1281691 - DNA, 15 bp, Homo sapiens
tgaccacatagttgg

SEQ ID NO: 1281692 - DNA, 15 bp, Homo sapiens
ttgaccacatagttg

SEQ ID NO: 1281693 - DNA, 15 bp, Homo sapiens
attgaccacatagtt

SEQ ID NO: 1281694 - DNA, 15 bp, Homo sapiens
aattgaccacatagt

SEQ ID NO: 1281695 - DNA, 15 bp, Homo sapiens
aaattgaccacatag

SEQ ID NO: 1281696 - DNA, 15 bp, Homo sapiens
aaaattgaccacata

SEQ ID NO: 1281697 - DNA, 15 bp, Homo sapiens
caaaattgaccacat

SEQ ID NO: 1281698 - DNA, 15 bp, Homo sapiens
ccaaaattgaccaca

SEQ ID NO: 1281699 - DNA, 15 bp, Homo sapiens
tccaaaattgaccac

SEQ ID NO: 1281700 - DNA, 15 bp, Homo sapiens
ttccaaaattgacca

SEQ ID NO: 1281701 - DNA, 15 bp, Homo sapiens
attccaaaattgacc

SEQ ID NO: 1281702 - DNA, 15 bp, Homo sapiens
tattccaaaattgac

SEQ ID NO: 1281703 - DNA, 15 bp, Homo sapiens
ttattccaaaattga

SEQ ID NO: 1281704 - DNA, 15 bp, Homo sapiens
cttattccaaaattg

SEQ ID NO: 1281705 - DNA, 15 bp, Homo sapiens
acttattccaaaatt

SEQ ID NO: 1281706 - DNA, 15 bp, Homo sapiens
cacttattccaaaat

SEQ ID NO: 1281707 - DNA, 15 bp, Homo sapiens
acacttattccaaaa

SEQ ID NO: 1281708 - DNA, 15 bp, Homo sapiens
cacacttattccaaa

SEQ ID NO: 1281709 - DNA, 15 bp, Homo sapiens
tcacacttattccaa

SEQ ID NO: 1281710 - DNA, 15 bp, Homo sapiens
atcacacttattcca

SEQ ID NO: 1281711 - DNA, 15 bp, Homo sapiens
tatcacacttattcc

SEQ ID NO: 1281712 - DNA, 15 bp, Homo sapiens
atatcacacttattc

SEQ ID NO: 1281713 - DNA, 15 bp, Homo sapiens
catatcacacttatt

SEQ ID NO: 1281714 - DNA, 15 bp, Homo sapiens
gcatatcacacttat

SEQ ID NO: 1281715 - DNA, 15 bp, Homo sapiens
agcatatcacactta

SEQ ID NO: 1281716 - DNA, 15 bp, Homo sapiens
cagcatatcacactt

SEQ ID NO: 1281717 - DNA, 15 bp, Homo sapiens
tcagcatatcacact

SEQ ID NO: 1281718 - DNA, 15 bp, Homo sapiens
ctcagcatatcacac

SEQ ID NO: 1281719 - DNA, 15 bp, Homo sapiens
tctcagcatatcaca

SEQ ID NO: 1281720 - DNA, 15 bp, Homo sapiens
ttctcagcatatcac

SEQ ID NO: 1281721 - DNA, 15 bp, Homo sapiens
cttctcagcatatca

SEQ ID NO: 1281722 - DNA, 15 bp, Homo sapiens
tcttctcagcatatc

SEQ ID NO: 1281723 - DNA, 15 bp, Homo sapiens
ttcttctcagcatat

SEQ ID NO: 1281724 - DNA, 15 bp, Homo sapiens
attcttctcagcata

SEQ ID NO: 1281725 - DNA, 15 bp, Homo sapiens
cattcttctcagcat

SEQ ID NO: 1281726 - DNA, 15 bp, Homo sapiens
acattcttctcagca

SEQ ID NO: 1281727 - DNA, 15 bp, Homo sapiens
tacattcttctcagc

SEQ ID NO: 1281728 - DNA, 15 bp, Homo sapiens
atacattcttctcag

SEQ ID NO: 1281729 - DNA, 15 bp, Homo sapiens
tatacattcttctca

SEQ ID NO: 1281730 - DNA, 15 bp, Homo sapiens
atatacattcttctc

SEQ ID NO: 1281731 - DNA, 15 bp, Homo sapiens
aatatacattcttct

SEQ ID NO: 1281732 - DNA, 15 bp, Homo sapiens
gaatatacattcttc

SEQ ID NO: 1281733 - DNA, 15 bp, Homo sapiens
agaatatacattctt

SEQ ID NO: 1281734 - DNA, 15 bp, Homo sapiens
cagaatatacattct

SEQ ID NO: 1281735 - DNA, 15 bp, Homo sapiens
acagaatatacattc

SEQ ID NO: 1281736 - DNA, 15 bp, Homo sapiens
aacagaatatacatt

SEQ ID NO: 1281737 - DNA, 15 bp, Homo sapiens
caacagaatatacat

SEQ ID NO: 1281738 - DNA, 15 bp, Homo sapiens
tcaacagaatataca

SEQ ID NO: 1281739 - DNA, 15 bp, Homo sapiens
atcaacagaatatac

SEQ ID NO: 1281740 - DNA, 15 bp, Homo sapiens
aatcaacagaatata

SEQ ID NO: 1281741 - DNA, 15 bp, Homo sapiens
aaatcaacagaatat

SEQ ID NO: 1281742 - DNA, 15 bp, Homo sapiens
aaaatcaacagaata

SEQ ID NO: 1281743 - DNA, 15 bp, Homo sapiens
caaaatcaacagaat

SEQ ID NO: 1281744 - DNA, 15 bp, Homo sapiens
ccaaaatcaacagaa

SEQ ID NO: 1281745 - DNA, 15 bp, Homo sapiens
tccaaaatcaacaga

SEQ ID NO: 1281746 - DNA, 15 bp, Homo sapiens
atccaaaatcaacag

SEQ ID NO: 1281747 - DNA, 15 bp, Homo sapiens
catccaaaatcaaca

SEQ ID NO: 1281748 - DNA, 15 bp, Homo sapiens
ccatccaaaatcaac

SEQ ID NO: 1281749 - DNA, 15 bp, Homo sapiens
tccatccaaaatcaa

SEQ ID NO: 1281750 - DNA, 15 bp, Homo sapiens
ctccatccaaaatca

SEQ ID NO: 1281751 - DNA, 15 bp, Homo sapiens
tctccatccaaaatc

SEQ ID NO: 1281752 - DNA, 15 bp, Homo sapiens
ctctccatccaaaat

SEQ ID NO: 1281753 - DNA, 15 bp, Homo sapiens
actctccatccaaaa

SEQ ID NO: 1281754 - DNA, 15 bp, Homo sapiens
aactctccatccaaa

SEQ ID NO: 1281755 - DNA, 15 bp, Homo sapiens
gaactctccatccaa

SEQ ID NO: 1281756 - DNA, 15 bp, Homo sapiens
agaactctccatcca

SEQ ID NO: 1281757 - DNA, 15 bp, Homo sapiens
cagaactctccatcc

SEQ ID NO: 1281758 - DNA, 15 bp, Homo sapiens
acagaactctccatc

SEQ ID NO: 1281759 - DNA, 15 bp, Homo sapiens
tacagaactctccat

SEQ ID NO: 1281760 - DNA, 15 bp, Homo sapiens
ctacagaactctcca

SEQ ID NO: 1281761 - DNA, 15 bp, Homo sapiens
tctacagaactctcc

SEQ ID NO: 1281762 - DNA, 15 bp, Homo sapiens
atctacagaactctc

SEQ ID NO: 1281763 - DNA, 15 bp, Homo sapiens
catctacagaactct

SEQ ID NO: 1281764 - DNA, 15 bp, Homo sapiens
acatctacagaactc

SEQ ID NO: 1281765 - DNA, 15 bp, Homo sapiens
gacatctacagaact

SEQ ID NO: 1281766 - DNA, 15 bp, Homo sapiens
agacatctacagaac

SEQ ID NO: 1281767 - DNA, 15 bp, Homo sapiens
tagacatctacagaa

SEQ ID NO: 1281768 - DNA, 15 bp, Homo sapiens
atagacatctacaga

SEQ ID NO: 1281769 - DNA, 15 bp, Homo sapiens
aatagacatctacag

SEQ ID NO: 1281770 - DNA, 15 bp, Homo sapiens
taatagacatctaca

SEQ ID NO: 1281771 - DNA, 15 bp, Homo sapiens
ctaatagacatctac

SEQ ID NO: 1281772 - DNA, 15 bp, Homo sapiens
cctaatagacatcta

SEQ ID NO: 1281773 - DNA, 15 bp, Homo sapiens
acctaatagacatct

SEQ ID NO: 1281774 - DNA, 15 bp, Homo sapiens
gacctaatagacatc

SEQ ID NO: 1281775 - DNA, 15 bp, Homo sapiens
ggacctaatagacat

SEQ ID NO: 1281776 - DNA, 15 bp, Homo sapiens
cggacctaatagaca

SEQ ID NO: 1281777 - DNA, 15 bp, Homo sapiens
gcggacctaatagac

SEQ ID NO: 1281778 - DNA, 15 bp, Homo sapiens
agcggacctaataga

SEQ ID NO: 1281779 - DNA, 15 bp, Homo sapiens
aagcggacctaatag

SEQ ID NO: 1281780 - DNA, 15 bp, Homo sapiens
caagcggacctaata

SEQ ID NO: 1281781 - DNA, 15 bp, Homo sapiens
ccaagcggacctaat

SEQ ID NO: 1281782 - DNA, 15 bp, Homo sapiens
accaagcggacctaa

SEQ ID NO: 1281783 - DNA, 15 bp, Homo sapiens
caccaagcggaccta

SEQ ID NO: 1281784 - DNA, 15 bp, Homo sapiens
gcaccaagcggacct

SEQ ID NO: 1281785 - DNA, 15 bp, Homo sapiens
tgcaccaagcggacc

SEQ ID NO: 1281786 - DNA, 15 bp, Homo sapiens
ctgcaccaagcggac

SEQ ID NO: 1281787 - DNA, 15 bp, Homo sapiens
tctgcaccaagcgga

SEQ ID NO: 1281788 - DNA, 15 bp, Homo sapiens
ctctgcaccaagcgg

SEQ ID NO: 1281789 - DNA, 15 bp, Homo sapiens
gctctgcaccaagcg

SEQ ID NO: 1281790 - DNA, 15 bp, Homo sapiens
agctctgcaccaagc

SEQ ID NO: 1281791 - DNA, 15 bp, Homo sapiens
cagctctgcaccaag

SEQ ID NO: 1281792 - DNA, 15 bp, Homo sapiens
tcagctctgcaccaa

SEQ ID NO: 1281793 - DNA, 15 bp, Homo sapiens
ctcagctctgcacca

SEQ ID NO: 1281794 - DNA, 15 bp, Homo sapiens
actcagctctgcacc

SEQ ID NO: 1281795 - DNA, 15 bp, Homo sapiens
aactcagctctgcac

SEQ ID NO: 1281796 - DNA, 15 bp, Homo sapiens
gaactcagctctgca

SEQ ID NO: 1281797 - DNA, 15 bp, Homo sapiens
tgaactcagctctgc

SEQ ID NO: 1281798 - DNA, 15 bp, Homo sapiens
ttgaactcagctctg

SEQ ID NO: 1281799 - DNA, 15 bp, Homo sapiens
attgaactcagctct

SEQ ID NO: 1281800 - DNA, 15 bp, Homo sapiens
aattgaactcagctc

SEQ ID NO: 1281801 - DNA, 15 bp, Homo sapiens
gaattgaactcagct

SEQ ID NO: 1281802 - DNA, 15 bp, Homo sapiens
ggaattgaactcagc

SEQ ID NO: 1281803 - DNA, 15 bp, Homo sapiens
aggaattgaactcag

SEQ ID NO: 1281804 - DNA, 15 bp, Homo sapiens
caggaattgaactca

SEQ ID NO: 1281805 - DNA, 15 bp, Homo sapiens
ccaggaattgaactc

SEQ ID NO: 1281806 - DNA, 15 bp, Homo sapiens
tccaggaattgaact

SEQ ID NO: 1281807 - DNA, 15 bp, Homo sapiens
atccaggaattgaac

SEQ ID NO: 1281808 - DNA, 15 bp, Homo sapiens
tatccaggaattgaa

SEQ ID NO: 1281809 - DNA, 15 bp, Homo sapiens
atatccaggaattga

SEQ ID NO: 1281810 - DNA, 15 bp, Homo sapiens
gatatccaggaattg

SEQ ID NO: 1281811 - DNA, 15 bp, Homo sapiens
ggatatccaggaatt

SEQ ID NO: 1281812 - DNA, 15 bp, Homo sapiens
aggatatccaggaat

SEQ ID NO: 1281813 - DNA, 15 bp, Homo sapiens
aaggatatccaggaa

SEQ ID NO: 1281814 - DNA, 15 bp, Homo sapiens
caaggatatccagga

SEQ ID NO: 1281815 - DNA, 15 bp, Homo sapiens
acaaggatatccagg

SEQ ID NO: 1281816 - DNA, 15 bp, Homo sapiens
aacaaggatatccag

SEQ ID NO: 1281817 - DNA, 15 bp, Homo sapiens
taacaaggatatcca

SEQ ID NO: 1281818 - DNA, 15 bp, Homo sapiens
ttaacaaggatatcc

SEQ ID NO: 1281819 - DNA, 15 bp, Homo sapiens
gttaacaaggatatc

SEQ ID NO: 1281820 - DNA, 15 bp, Homo sapiens
cgttaacaaggatat

SEQ ID NO: 1281821 - DNA, 15 bp, Homo sapiens
acgttaacaaggata

SEQ ID NO: 1281822 - DNA, 15 bp, Homo sapiens
aacgttaacaaggat

SEQ ID NO: 1281823 - DNA, 15 bp, Homo sapiens
gaacgttaacaagga

SEQ ID NO: 1281824 - DNA, 15 bp, Homo sapiens
agaacgttaacaagg

SEQ ID NO: 1281825 - DNA, 15 bp, Homo sapiens
cagaacgttaacaag

SEQ ID NO: 1281826 - DNA, 15 bp, Homo sapiens
tcagaacgttaacaa

SEQ ID NO: 1281827 - DNA, 15 bp, Homo sapiens
gtcagaacgttaaca

SEQ ID NO: 1281828 - DNA, 15 bp, Homo sapiens
agtcagaacgttaac

SEQ ID NO: 1281829 - DNA, 15 bp, Homo sapiens
gagtcagaacgttaa

SEQ ID NO: 1281830 - DNA, 15 bp, Homo sapiens
tgagtcagaacgtta

SEQ ID NO: 1281831 - DNA, 15 bp, Homo sapiens
atgagtcagaacgtt

SEQ ID NO: 1281832 - DNA, 15 bp, Homo sapiens
aatgagtcagaacgt

SEQ ID NO: 1281833 - DNA, 15 bp, Homo sapiens
caatgagtcagaacg

SEQ ID NO: 1281834 - DNA, 15 bp, Homo sapiens
tcaatgagtcagaac

SEQ ID NO: 1281835 - DNA, 15 bp, Homo sapiens
ttcaatgagtcagaa

SEQ ID NO: 1281836 - DNA, 15 bp, Homo sapiens
gttcaatgagtcaga

SEQ ID NO: 1281837 - DNA, 15 bp, Homo sapiens
agttcaatgagtcag

SEQ ID NO: 1281838 - DNA, 15 bp, Homo sapiens
cagttcaatgagtca

SEQ ID NO: 1281839 - DNA, 15 bp, Homo sapiens
acagttcaatgagtc

SEQ ID NO: 1281840 - DNA, 15 bp, Homo sapiens
gacagttcaatgagt

SEQ ID NO: 1281841 - DNA, 15 bp, Homo sapiens
agacagttcaatgag

SEQ ID NO: 1281842 - DNA, 15 bp, Homo sapiens
tagacagttcaatga

SEQ ID NO: 1281843 - DNA, 15 bp, Homo sapiens
ttagacagttcaatg

SEQ ID NO: 1281844 - DNA, 15 bp, Homo sapiens
attagacagttcaat

SEQ ID NO: 1281845 - DNA, 15 bp, Homo sapiens
cattagacagttcaa

SEQ ID NO: 1281846 - DNA, 15 bp, Homo sapiens
acattagacagttca

SEQ ID NO: 1281847 - DNA, 15 bp, Homo sapiens
aacattagacagttc

SEQ ID NO: 1281848 - DNA, 15 bp, Homo sapiens
caacattagacagtt

SEQ ID NO: 1281849 - DNA, 15 bp, Homo sapiens
tcaacattagacagt

SEQ ID NO: 1281850 - DNA, 15 bp, Homo sapiens
gtcaacattagacag

SEQ ID NO: 1281851 - DNA, 15 bp, Homo sapiens
tgtcaacattagaca

SEQ ID NO: 1281852 - DNA, 15 bp, Homo sapiens
ctgtcaacattagac

SEQ ID NO: 1281853 - DNA, 15 bp, Homo sapiens
actgtcaacattaga

SEQ ID NO: 1281854 - DNA, 15 bp, Homo sapiens
cactgtcaacattag

SEQ ID NO: 1281855 - DNA, 15 bp, Homo sapiens
ccactgtcaacatta

SEQ ID NO: 1281856 - DNA, 15 bp, Homo sapiens
cccactgtcaacatt

SEQ ID NO: 1281857 - DNA, 15 bp, Homo sapiens
ccccactgtcaacat

SEQ ID NO: 1281858 - DNA, 15 bp, Homo sapiens
accccactgtcaaca

SEQ ID NO: 1281859 - DNA, 15 bp, Homo sapiens
caccccactgtcaac

SEQ ID NO: 1281860 - DNA, 15 bp, Homo sapiens
acaccccactgtcaa

SEQ ID NO: 1281861 - DNA, 15 bp, Homo sapiens
aacaccccactgtca

SEQ ID NO: 1281862 - DNA, 15 bp, Homo sapiens
taacaccccactgtc

SEQ ID NO: 1281863 - DNA, 15 bp, Homo sapiens
ttaacaccccactgt

SEQ ID NO: 1281864 - DNA, 15 bp, Homo sapiens
tttaacaccccactg

SEQ ID NO: 1281865 - DNA, 15 bp, Homo sapiens
ctttaacaccccact

SEQ ID NO: 1281866 - DNA, 15 bp, Homo sapiens
actttaacaccccac

SEQ ID NO: 1281867 - DNA, 15 bp, Homo sapiens
gactttaacacccca

SEQ ID NO: 1281868 - DNA, 15 bp, Homo sapiens
agactttaacacccc

SEQ ID NO: 1281869 - DNA, 15 bp, Homo sapiens
gagactttaacaccc

SEQ ID NO: 1281870 - DNA, 15 bp, Homo sapiens
ggagactttaacacc

SEQ ID NO: 1281871 - DNA, 15 bp, Homo sapiens
gggagactttaacac

SEQ ID NO: 1281872 - DNA, 15 bp, Homo sapiens
tgggagactttaaca

SEQ ID NO: 1281873 - DNA, 15 bp, Homo sapiens
atgggagactttaac

SEQ ID NO: 1281874 - DNA, 15 bp, Homo sapiens
aatgggagactttaa

SEQ ID NO: 1281875 - DNA, 15 bp, Homo sapiens
taatgggagacttta

SEQ ID NO: 1281876 - DNA, 15 bp, Homo sapiens
ataatgggagacttt

SEQ ID NO: 1281877 - DNA, 15 bp, Homo sapiens
aataatgggagactt

SEQ ID NO: 1281878 - DNA, 15 bp, Homo sapiens
taataatgggagact

SEQ ID NO: 1281879 - DNA, 15 bp, Homo sapiens
ataataatgggagac

SEQ ID NO: 1281880 - DNA, 15 bp, Homo sapiens
aataataatgggaga

SEQ ID NO: 1281881 - DNA, 15 bp, Homo sapiens
caataataatgggag

SEQ ID NO: 1281882 - DNA, 15 bp, Homo sapiens
acaataataatggga

SEQ ID NO: 1281883 - DNA, 15 bp, Homo sapiens
cacaataataatggg

SEQ ID NO: 1281884 - DNA, 15 bp, Homo sapiens
acacaataataatgg

SEQ ID NO: 1281885 - DNA, 15 bp, Homo sapiens
cacacaataataatg

SEQ ID NO: 1281886 - DNA, 15 bp, Homo sapiens
tcacacaataataat

SEQ ID NO: 1281887 - DNA, 15 bp, Homo sapiens
ctcacacaataataa

SEQ ID NO: 1281888 - DNA, 15 bp, Homo sapiens
tctcacacaataata

SEQ ID NO: 1281889 - DNA, 15 bp, Homo sapiens
ctctcacacaataat

SEQ ID NO: 1281890 - DNA, 15 bp, Homo sapiens
actctcacacaataa

SEQ ID NO: 1281891 - DNA, 15 bp, Homo sapiens
gactctcacacaata

SEQ ID NO: 1281892 - DNA, 15 bp, Homo sapiens
agactctcacacaat

SEQ ID NO: 1281893 - DNA, 15 bp, Homo sapiens
tagactctcacacaa

SEQ ID NO: 1281894 - DNA, 15 bp, Homo sapiens
ttagactctcacaca

SEQ ID NO: 1281895 - DNA, 15 bp, Homo sapiens
cttagactctcacac

SEQ ID NO: 1281896 - DNA, 15 bp, Homo sapiens
acttagactctcaca

SEQ ID NO: 1281897 - DNA, 15 bp, Homo sapiens
gacttagactctcac

SEQ ID NO: 1281898 - DNA, 15 bp, Homo sapiens
agacttagactctca

SEQ ID NO: 1281899 - DNA, 15 bp, Homo sapiens
gagacttagactctc

SEQ ID NO: 1281900 - DNA, 15 bp, Homo sapiens
agagacttagactct

SEQ ID NO: 1281901 - DNA, 15 bp, Homo sapiens
aagagacttagactc

SEQ ID NO: 1281902 - DNA, 15 bp, Homo sapiens
aaagagacttagact

SEQ ID NO: 1281903 - DNA, 15 bp, Homo sapiens
caaagagacttagac

SEQ ID NO: 1281904 - DNA, 15 bp, Homo sapiens
acaaagagacttaga

SEQ ID NO: 1281905 - DNA, 15 bp, Homo sapiens
tacaaagagacttag

SEQ ID NO: 1281906 - DNA, 15 bp, Homo sapiens
ctacaaagagactta

SEQ ID NO: 1281907 - DNA, 15 bp, Homo sapiens
cctacaaagagactt

SEQ ID NO: 1281908 - DNA, 15 bp, Homo sapiens
acctacaaagagact

SEQ ID NO: 1281909 - DNA, 15 bp, Homo sapiens
gacctacaaagagac

SEQ ID NO: 1281910 - DNA, 15 bp, Homo sapiens
agacctacaaagaga

SEQ ID NO: 1281911 - DNA, 15 bp, Homo sapiens
gagacctacaaagag

SEQ ID NO: 1281912 - DNA, 15 bp, Homo sapiens
agagacctacaaaga

SEQ ID NO: 1281913 - DNA, 15 bp, Homo sapiens
tagagacctacaaag

SEQ ID NO: 1281914 - DNA, 15 bp, Homo sapiens
ttagagacctacaaa

SEQ ID NO: 1281915 - DNA, 15 bp, Homo sapiens
cttagagacctacaa

SEQ ID NO: 1281916 - DNA, 15 bp, Homo sapiens
ccttagagacctaca

SEQ ID NO: 1281917 - DNA, 15 bp, Homo sapiens
tccttagagacctac

SEQ ID NO: 1281918 - DNA, 15 bp, Homo sapiens
gtccttagagaccta

SEQ ID NO: 1281919 - DNA, 15 bp, Homo sapiens
agtccttagagacct

SEQ ID NO: 1281920 - DNA, 15 bp, Homo sapiens
aagtccttagagacc

SEQ ID NO: 1281921 - DNA, 15 bp, Homo sapiens
caagtccttagagac

SEQ ID NO: 1281922 - DNA, 15 bp, Homo sapiens
gcaagtccttagaga

SEQ ID NO: 1281923 - DNA, 15 bp, Homo sapiens
agcaagtccttagag

SEQ ID NO: 1281924 - DNA, 15 bp, Homo sapiens
aagcaagtccttaga

SEQ ID NO: 1281925 - DNA, 15 bp, Homo sapiens
aaagcaagtccttag

SEQ ID NO: 1281926 - DNA, 15 bp, Homo sapiens
taaagcaagtcctta

SEQ ID NO: 1281927 - DNA, 15 bp, Homo sapiens
ataaagcaagtcctt

SEQ ID NO: 1281928 - DNA, 15 bp, Homo sapiens
cataaagcaagtcct

SEQ ID NO: 1281929 - DNA, 15 bp, Homo sapiens
tcataaagcaagtcc

SEQ ID NO: 1281930 - DNA, 15 bp, Homo sapiens
ttcataaagcaagtc

SEQ ID NO: 1281931 - DNA, 15 bp, Homo sapiens
attcataaagcaagt

SEQ ID NO: 1281932 - DNA, 15 bp, Homo sapiens
aattcataaagcaag

SEQ ID NO: 1281933 - DNA, 15 bp, Homo sapiens
aaattcataaagcaa

SEQ ID NO: 1281934 - DNA, 15 bp, Homo sapiens
caaattcataaagca

SEQ ID NO: 1281935 - DNA, 15 bp, Homo sapiens
ccaaattcataaagc

SEQ ID NO: 1281936 - DNA, 15 bp, Homo sapiens
cccaaattcataaag

SEQ ID NO: 1281937 - DNA, 15 bp, Homo sapiens
acccaaattcataaa

SEQ ID NO: 1281938 - DNA, 15 bp, Homo sapiens
cacccaaattcataa

SEQ ID NO: 1281939 - DNA, 15 bp, Homo sapiens
gcacccaaattcata

SEQ ID NO: 1281940 - DNA, 15 bp, Homo sapiens
agcacccaaattcat

SEQ ID NO: 1281941 - DNA, 15 bp, Homo sapiens
gagcacccaaattca

SEQ ID NO: 1281942 - DNA, 15 bp, Homo sapiens
ggagcacccaaattc

SEQ ID NO: 1281943 - DNA, 15 bp, Homo sapiens
aggagcacccaaatt

SEQ ID NO: 1281944 - DNA, 15 bp, Homo sapiens
caggagcacccaaat

SEQ ID NO: 1281945 - DNA, 15 bp, Homo sapiens
acaggagcacccaaa

SEQ ID NO: 1281946 - DNA, 15 bp, Homo sapiens
tacaggagcacccaa

SEQ ID NO: 1281947 - DNA, 15 bp, Homo sapiens
atacaggagcaccca

SEQ ID NO: 1281948 - DNA, 15 bp, Homo sapiens
aatacaggagcaccc

SEQ ID NO: 1281949 - DNA, 15 bp, Homo sapiens
caatacaggagcacc

SEQ ID NO: 1281950 - DNA, 15 bp, Homo sapiens
ccaatacaggagcac

SEQ ID NO: 1281951 - DNA, 15 bp, Homo sapiens
cccaatacaggagca

SEQ ID NO: 1281952 - DNA, 15 bp, Homo sapiens
acccaatacaggagc

SEQ ID NO: 1281953 - DNA, 15 bp, Homo sapiens
cacccaatacaggag

SEQ ID NO: 1281954 - DNA, 15 bp, Homo sapiens
gcacccaatacagga

SEQ ID NO: 1281955 - DNA, 15 bp, Homo sapiens
tgcacccaatacagg

SEQ ID NO: 1281956 - DNA, 15 bp, Homo sapiens
atgcacccaatacag

SEQ ID NO: 1281957 - DNA, 15 bp, Homo sapiens
tatgcacccaataca

SEQ ID NO: 1281958 - DNA, 15 bp, Homo sapiens
atatgcacccaatac

SEQ ID NO: 1281959 - DNA, 15 bp, Homo sapiens
tatatgcacccaata

SEQ ID NO: 1281960 - DNA, 15 bp, Homo sapiens
atatatgcacccaat

SEQ ID NO: 1281961 - DNA, 15 bp, Homo sapiens
tatatatgcacccaa

SEQ ID NO: 1281962 - DNA, 15 bp, Homo sapiens
atatatatgcaccca

SEQ ID NO: 1281963 - DNA, 15 bp, Homo sapiens
aatatatatgcaccc

SEQ ID NO: 1281964 - DNA, 15 bp, Homo sapiens
aaatatatatgcacc

SEQ ID NO: 1281965 - DNA, 15 bp, Homo sapiens
taaatatatatgcac

SEQ ID NO: 1281966 - DNA, 15 bp, Homo sapiens
ctaaatatatatgca

SEQ ID NO: 1281967 - DNA, 15 bp, Homo sapiens
cctaaatatatatgc

SEQ ID NO: 1281968 - DNA, 15 bp, Homo sapiens
tcctaaatatatatg

SEQ ID NO: 1281969 - DNA, 15 bp, Homo sapiens
atcctaaatatatat

SEQ ID NO: 1281970 - DNA, 15 bp, Homo sapiens
tatcctaaatatata

SEQ ID NO: 1281971 - DNA, 15 bp, Homo sapiens
ctatcctaaatatat

SEQ ID NO: 1281972 - DNA, 15 bp, Homo sapiens
actatcctaaatata

SEQ ID NO: 1281973 - DNA, 15 bp, Homo sapiens
aactatcctaaatat

SEQ ID NO: 1281974 - DNA, 15 bp, Homo sapiens
taactatcctaaata

SEQ ID NO: 1281975 - DNA, 15 bp, Homo sapiens
ctaactatcctaaat

SEQ ID NO: 1281976 - DNA, 15 bp, Homo sapiens
actaactatcctaaa

SEQ ID NO: 1281977 - DNA, 15 bp, Homo sapiens
aactaactatcctaa

SEQ ID NO: 1281978 - DNA, 15 bp, Homo sapiens
gaactaactatccta

SEQ ID NO: 1281979 - DNA, 15 bp, Homo sapiens
agaactaactatcct

SEQ ID NO: 1281980 - DNA, 15 bp, Homo sapiens
aagaactaactatcc

SEQ ID NO: 1281981 - DNA, 15 bp, Homo sapiens
gaagaactaactatc

SEQ ID NO: 1281982 - DNA, 15 bp, Homo sapiens
agaagaactaactat

SEQ ID NO: 1281983 - DNA, 15 bp, Homo sapiens
aagaagaactaacta

SEQ ID NO: 1281984 - DNA, 15 bp, Homo sapiens
caagaagaactaact

SEQ ID NO: 1281985 - DNA, 15 bp, Homo sapiens
acaagaagaactaac

SEQ ID NO: 1281986 - DNA, 15 bp, Homo sapiens
aacaagaagaactaa

SEQ ID NO: 1281987 - DNA, 15 bp, Homo sapiens
caacaagaagaacta

SEQ ID NO: 1281988 - DNA, 15 bp, Homo sapiens
tcaacaagaagaact

SEQ ID NO: 1281989 - DNA, 15 bp, Homo sapiens
ttcaacaagaagaac

SEQ ID NO: 1281990 - DNA, 15 bp, Homo sapiens
attcaacaagaagaa

SEQ ID NO: 1281991 - DNA, 15 bp, Homo sapiens
aattcaacaagaaga

SEQ ID NO: 1281992 - DNA, 15 bp, Homo sapiens
caattcaacaagaag

SEQ ID NO: 1281993 - DNA, 15 bp, Homo sapiens
tcaattcaacaagaa

SEQ ID NO: 1281994 - DNA, 15 bp, Homo sapiens
atcaattcaacaaga

SEQ ID NO: 1281995 - DNA, 15 bp, Homo sapiens
gatcaattcaacaag

SEQ ID NO: 1281996 - DNA, 15 bp, Homo sapiens
ggatcaattcaacaa

SEQ ID NO: 1281997 - DNA, 15 bp, Homo sapiens
gggatcaattcaaca

SEQ ID NO: 1281998 - DNA, 15 bp, Homo sapiens
agggatcaattcaac

SEQ ID NO: 1281999 - DNA, 15 bp, Homo sapiens
aagggatcaattcaa

SEQ ID NO: 1282000 - DNA, 15 bp, Homo sapiens
aaagggatcaattca

SEQ ID NO: 1282001 - DNA, 15 bp, Homo sapiens
taaagggatcaattc

SEQ ID NO: 1282002 - DNA, 15 bp, Homo sapiens
gtaaagggatcaatt

SEQ ID NO: 1282003 - DNA, 15 bp, Homo sapiens
ggtaaagggatcaat

SEQ ID NO: 1282004 - DNA, 15 bp, Homo sapiens
tggtaaagggatcaa

SEQ ID NO: 1282005 - DNA, 15 bp, Homo sapiens
atggtaaagggatca

SEQ ID NO: 1282006 - DNA, 15 bp, Homo sapiens
aatggtaaagggatc

SEQ ID NO: 1282007 - DNA, 15 bp, Homo sapiens
taatggtaaagggat

SEQ ID NO: 1282008 - DNA, 15 bp, Homo sapiens
ataatggtaaaggga

SEQ ID NO: 1282009 - DNA, 15 bp, Homo sapiens
cataatggtaaaggg

SEQ ID NO: 1282010 - DNA, 15 bp, Homo sapiens
acataatggtaaagg

SEQ ID NO: 1282011 - DNA, 15 bp, Homo sapiens
tacataatggtaaag

SEQ ID NO: 1282012 - DNA, 15 bp, Homo sapiens
ttacataatggtaaa

SEQ ID NO: 1282013 - DNA, 15 bp, Homo sapiens
attacataatggtaa

SEQ ID NO: 1282014 - DNA, 15 bp, Homo sapiens
cattacataatggta

SEQ ID NO: 1282015 - DNA, 15 bp, Homo sapiens
ccattacataatggt

SEQ ID NO: 1282016 - DNA, 15 bp, Homo sapiens
gccattacataatgg

SEQ ID NO: 1282017 - DNA, 15 bp, Homo sapiens
ggccattacataatg

SEQ ID NO: 1282018 - DNA, 15 bp, Homo sapiens
aggccattacataat

SEQ ID NO: 1282019 - DNA, 15 bp, Homo sapiens
aaggccattacataa

SEQ ID NO: 1282020 - DNA, 15 bp, Homo sapiens
gaaggccattacata

SEQ ID NO: 1282021 - DNA, 15 bp, Homo sapiens
agaaggccattacat

SEQ ID NO: 1282022 - DNA, 15 bp, Homo sapiens
aagaaggccattaca

SEQ ID NO: 1282023 - DNA, 15 bp, Homo sapiens
aaagaaggccattac

SEQ ID NO: 1282024 - DNA, 15 bp, Homo sapiens
caaagaaggccatta

SEQ ID NO: 1282025 - DNA, 15 bp, Homo sapiens
acaaagaaggccatt

SEQ ID NO: 1282026 - DNA, 15 bp, Homo sapiens
gacaaagaaggccat

SEQ ID NO: 1282027 - DNA, 15 bp, Homo sapiens
agacaaagaaggcca

SEQ ID NO: 1282028 - DNA, 15 bp, Homo sapiens
gagacaaagaaggcc

SEQ ID NO: 1282029 - DNA, 15 bp, Homo sapiens
agagacaaagaaggc

SEQ ID NO: 1282030 - DNA, 15 bp, Homo sapiens
aagagacaaagaagg

SEQ ID NO: 1282031 - DNA, 15 bp, Homo sapiens
aaagagacaaagaag

SEQ ID NO: 1282032 - DNA, 15 bp, Homo sapiens
aaaagagacaaagaa

SEQ ID NO: 1282033 - DNA, 15 bp, Homo sapiens
caaaagagacaaaga

SEQ ID NO: 1282034 - DNA, 15 bp, Homo sapiens
tcaaaagagacaaag

SEQ ID NO: 1282035 - DNA, 15 bp, Homo sapiens
atcaaaagagacaaa

SEQ ID NO: 1282036 - DNA, 15 bp, Homo sapiens
gatcaaaagagacaa

SEQ ID NO: 1282037 - DNA, 15 bp, Homo sapiens
agatcaaaagagaca

SEQ ID NO: 1282038 - DNA, 15 bp, Homo sapiens
aagatcaaaagagac

SEQ ID NO: 1282039 - DNA, 15 bp, Homo sapiens
aaagatcaaaagaga

SEQ ID NO: 1282040 - DNA, 15 bp, Homo sapiens
caaagatcaaaagag

SEQ ID NO: 1282041 - DNA, 15 bp, Homo sapiens
acaaagatcaaaaga

SEQ ID NO: 1282042 - DNA, 15 bp, Homo sapiens
aacaaagatcaaaag

SEQ ID NO: 1282043 - DNA, 15 bp, Homo sapiens
caacaaagatcaaaa

SEQ ID NO: 1282044 - DNA, 15 bp, Homo sapiens
ccaacaaagatcaaa

SEQ ID NO: 1282045 - DNA, 15 bp, Homo sapiens
accaacaaagatcaa

SEQ ID NO: 1282046 - DNA, 15 bp, Homo sapiens
aaccaacaaagatca

SEQ ID NO: 1282047 - DNA, 15 bp, Homo sapiens
aaaccaacaaagatc

SEQ ID NO: 1282048 - DNA, 15 bp, Homo sapiens
taaaccaacaaagat

SEQ ID NO: 1282049 - DNA, 15 bp, Homo sapiens
ttaaaccaacaaaga

SEQ ID NO: 1282050 - DNA, 15 bp, Homo sapiens
gttaaaccaacaaag

SEQ ID NO: 1282051 - DNA, 15 bp, Homo sapiens
cgttaaaccaacaaa

SEQ ID NO: 1282052 - DNA, 15 bp, Homo sapiens
acgttaaaccaacaa

SEQ ID NO: 1282053 - DNA, 15 bp, Homo sapiens
gacgttaaaccaaca

SEQ ID NO: 1282054 - DNA, 15 bp, Homo sapiens
agacgttaaaccaac

SEQ ID NO: 1282055 - DNA, 15 bp, Homo sapiens
cagacgttaaaccaa

SEQ ID NO: 1282056 - DNA, 15 bp, Homo sapiens
acagacgttaaacca

SEQ ID NO: 1282057 - DNA, 15 bp, Homo sapiens
aacagacgttaaacc

SEQ ID NO: 1282058 - DNA, 15 bp, Homo sapiens
aaacagacgttaaac

SEQ ID NO: 1282059 - DNA, 15 bp, Homo sapiens
aaaacagacgttaaa

SEQ ID NO: 1282060 - DNA, 15 bp, Homo sapiens
taaaacagacgttaa

SEQ ID NO: 1282061 - DNA, 15 bp, Homo sapiens
ataaaacagacgtta

SEQ ID NO: 1282062 - DNA, 15 bp, Homo sapiens
gataaaacagacgtt

SEQ ID NO: 1282063 - DNA, 15 bp, Homo sapiens
tgataaaacagacgt

SEQ ID NO: 1282064 - DNA, 15 bp, Homo sapiens
ctgataaaacagacg

SEQ ID NO: 1282065 - DNA, 15 bp, Homo sapiens
tctgataaaacagac

SEQ ID NO: 1282066 - DNA, 15 bp, Homo sapiens
ctctgataaaacaga

SEQ ID NO: 1282067 - DNA, 15 bp, Homo sapiens
tctctgataaaacag

SEQ ID NO: 1282068 - DNA, 15 bp, Homo sapiens
gtctctgataaaaca

SEQ ID NO: 1282069 - DNA, 15 bp, Homo sapiens
agtctctgataaaac

SEQ ID NO: 1282070 - DNA, 15 bp, Homo sapiens
tagtctctgataaaa

SEQ ID NO: 1282071 - DNA, 15 bp, Homo sapiens
ctagtctctgataaa

SEQ ID NO: 1282072 - DNA, 15 bp, Homo sapiens
cctagtctctgataa

SEQ ID NO: 1282073 - DNA, 15 bp, Homo sapiens
tcctagtctctgata

SEQ ID NO: 1282074 - DNA, 15 bp, Homo sapiens
atcctagtctctgat

SEQ ID NO: 1282075 - DNA, 15 bp, Homo sapiens
aatcctagtctctga

SEQ ID NO: 1282076 - DNA, 15 bp, Homo sapiens
caatcctagtctctg

SEQ ID NO: 1282077 - DNA, 15 bp, Homo sapiens
gcaatcctagtctct

SEQ ID NO: 1282078 - DNA, 15 bp, Homo sapiens
tgcaatcctagtctc

SEQ ID NO: 1282079 - DNA, 15 bp, Homo sapiens
ttgcaatcctagtct

SEQ ID NO: 1282080 - DNA, 15 bp, Homo sapiens
gttgcaatcctagtc

SEQ ID NO: 1282081 - DNA, 15 bp, Homo sapiens
ggttgcaatcctagt

SEQ ID NO: 1282082 - DNA, 15 bp, Homo sapiens
gggttgcaatcctag

SEQ ID NO: 1282083 - DNA, 15 bp, Homo sapiens
ggggttgcaatccta

SEQ ID NO: 1282084 - DNA, 15 bp, Homo sapiens
aggggttgcaatcct

SEQ ID NO: 1282085 - DNA, 15 bp, Homo sapiens
caggggttgcaatcc

SEQ ID NO: 1282086 - DNA, 15 bp, Homo sapiens
gcaggggttgcaatc

SEQ ID NO: 1282087 - DNA, 15 bp, Homo sapiens
ggcaggggttgcaat

SEQ ID NO: 1282088 - DNA, 15 bp, Homo sapiens
aggcaggggttgcaa

SEQ ID NO: 1282089 - DNA, 15 bp, Homo sapiens
aaggcaggggttgca

SEQ ID NO: 1282090 - DNA, 15 bp, Homo sapiens
aaaggcaggggttgc

SEQ ID NO: 1282091 - DNA, 15 bp, Homo sapiens
aaaaggcaggggttg

SEQ ID NO: 1282092 - DNA, 15 bp, Homo sapiens
aaaaaggcaggggtt

SEQ ID NO: 1282093 - DNA, 15 bp, Homo sapiens
aaaaaaggcaggggt

SEQ ID NO: 1282094 - DNA, 15 bp, Homo sapiens
aaaaaaaggcagggg

SEQ ID NO: 1282095 - DNA, 15 bp, Homo sapiens
caaaaaaaggcaggg

SEQ ID NO: 1282096 - DNA, 15 bp, Homo sapiens
acaaaaaaaggcagg

SEQ ID NO: 1282097 - DNA, 15 bp, Homo sapiens
aacaaaaaaaggcag

SEQ ID NO: 1282098 - DNA, 15 bp, Homo sapiens
aaacaaaaaaaggca

SEQ ID NO: 1282099 - DNA, 15 bp, Homo sapiens
gaaaacaaaaaaagg

SEQ ID NO: 1282100 - DNA, 15 bp, Homo sapiens
ggaaaacaaaaaaag

SEQ ID NO: 1282101 - DNA, 15 bp, Homo sapiens
tggaaaacaaaaaaa

SEQ ID NO: 1282102 - DNA, 15 bp, Homo sapiens
atggaaaacaaaaaa

SEQ ID NO: 1282103 - DNA, 15 bp, Homo sapiens
aatggaaaacaaaaa

SEQ ID NO: 1282104 - DNA, 15 bp, Homo sapiens
aaatggaaaacaaaa

SEQ ID NO: 1282105 - DNA, 15 bp, Homo sapiens
caaatggaaaacaaa

SEQ ID NO: 1282106 - DNA, 15 bp, Homo sapiens
gcaaatggaaaacaa

SEQ ID NO: 1282107 - DNA, 15 bp, Homo sapiens
agcaaatggaaaaca

SEQ ID NO: 1282108 - DNA, 15 bp, Homo sapiens
aagcaaatggaaaac

SEQ ID NO: 1282109 - DNA, 15 bp, Homo sapiens
caagcaaatggaaaa

SEQ ID NO: 1282110 - DNA, 15 bp, Homo sapiens
ccaagcaaatggaaa

SEQ ID NO: 1282111 - DNA, 15 bp, Homo sapiens
accaagcaaatggaa

SEQ ID NO: 1282112 - DNA, 15 bp, Homo sapiens
taccaagcaaatgga

SEQ ID NO: 1282113 - DNA, 15 bp, Homo sapiens
ctaccaagcaaatgg

SEQ ID NO: 1282114 - DNA, 15 bp, Homo sapiens
tctaccaagcaaatg

SEQ ID NO: 1282115 - DNA, 15 bp, Homo sapiens
atctaccaagcaaat

SEQ ID NO: 1282116 - DNA, 15 bp, Homo sapiens
gatctaccaagcaaa

SEQ ID NO: 1282117 - DNA, 15 bp, Homo sapiens
agatctaccaagcaa

SEQ ID NO: 1282118 - DNA, 15 bp, Homo sapiens
aagatctaccaagca

SEQ ID NO: 1282119 - DNA, 15 bp, Homo sapiens
gaagatctaccaagc

SEQ ID NO: 1282120 - DNA, 15 bp, Homo sapiens
ggaagatctaccaag

SEQ ID NO: 1282121 - DNA, 15 bp, Homo sapiens
aggaagatctaccaa

SEQ ID NO: 1282122 - DNA, 15 bp, Homo sapiens
gaggaagatctacca

SEQ ID NO: 1282123 - DNA, 15 bp, Homo sapiens
ggaggaagatctacc

SEQ ID NO: 1282124 - DNA, 15 bp, Homo sapiens
tggaggaagatctac

SEQ ID NO: 1282125 - DNA, 15 bp, Homo sapiens
atggaggaagatcta

SEQ ID NO: 1282126 - DNA, 15 bp, Homo sapiens
aatggaggaagatct

SEQ ID NO: 1282127 - DNA, 15 bp, Homo sapiens
gaatggaggaagatc

SEQ ID NO: 1282128 - DNA, 15 bp, Homo sapiens
ggaatggaggaagat

SEQ ID NO: 1282129 - DNA, 15 bp, Homo sapiens
aggaatggaggaaga

SEQ ID NO: 1282130 - DNA, 15 bp, Homo sapiens
aaggaatggaggaag

SEQ ID NO: 1282131 - DNA, 15 bp, Homo sapiens
aaaggaatggaggaa

SEQ ID NO: 1282132 - DNA, 15 bp, Homo sapiens
taaaggaatggagga

SEQ ID NO: 1282133 - DNA, 15 bp, Homo sapiens
ataaaggaatggagg

SEQ ID NO: 1282134 - DNA, 15 bp, Homo sapiens
aataaaggaatggag

SEQ ID NO: 1282135 - DNA, 15 bp, Homo sapiens
aaataaaggaatgga

SEQ ID NO: 1282136 - DNA, 15 bp, Homo sapiens
aaaataaaggaatgg

SEQ ID NO: 1282137 - DNA, 15 bp, Homo sapiens
caaaataaaggaatg

SEQ ID NO: 1282138 - DNA, 15 bp, Homo sapiens
tcaaaataaaggaat

SEQ ID NO: 1282139 - DNA, 15 bp, Homo sapiens
ctcaaaataaaggaa

SEQ ID NO: 1282140 - DNA, 15 bp, Homo sapiens
gctcaaaataaagga

SEQ ID NO: 1282141 - DNA, 15 bp, Homo sapiens
ggctcaaaataaagg

SEQ ID NO: 1282142 - DNA, 15 bp, Homo sapiens
aggctcaaaataaag

SEQ ID NO: 1282143 - DNA, 15 bp, Homo sapiens
taggctcaaaataaa

SEQ ID NO: 1282144 - DNA, 15 bp, Homo sapiens
ataggctcaaaataa

SEQ ID NO: 1282145 - DNA, 15 bp, Homo sapiens
cataggctcaaaata

SEQ ID NO: 1282146 - DNA, 15 bp, Homo sapiens
acataggctcaaaat

SEQ ID NO: 1282147 - DNA, 15 bp, Homo sapiens
cacataggctcaaaa

SEQ ID NO: 1282148 - DNA, 15 bp, Homo sapiens
acacataggctcaaa

SEQ ID NO: 1282149 - DNA, 15 bp, Homo sapiens
cacacataggctcaa

SEQ ID NO: 1282150 - DNA, 15 bp, Homo sapiens
acacacataggctca

SEQ ID NO: 1282151 - DNA, 15 bp, Homo sapiens
gacacacataggctc

SEQ ID NO: 1282152 - DNA, 15 bp, Homo sapiens
agacacacataggct

SEQ ID NO: 1282153 - DNA, 15 bp, Homo sapiens
gagacacacataggc

SEQ ID NO: 1282154 - DNA, 15 bp, Homo sapiens
agagacacacatagg

SEQ ID NO: 1282155 - DNA, 15 bp, Homo sapiens
cagagacacacatag

SEQ ID NO: 1282156 - DNA, 15 bp, Homo sapiens
gcagagacacacata

SEQ ID NO: 1282157 - DNA, 15 bp, Homo sapiens
tgcagagacacacat

SEQ ID NO: 1282158 - DNA, 15 bp, Homo sapiens
gtgcagagacacaca

SEQ ID NO: 1282159 - DNA, 15 bp, Homo sapiens
cgtgcagagacacac

SEQ ID NO: 1282160 - DNA, 15 bp, Homo sapiens
acgtgcagagacaca

SEQ ID NO: 1282161 - DNA, 15 bp, Homo sapiens
cacgtgcagagacac

SEQ ID NO: 1282162 - DNA, 15 bp, Homo sapiens
tcacgtgcagagaca

SEQ ID NO: 1282163 - DNA, 15 bp, Homo sapiens
ctcacgtgcagagac

SEQ ID NO: 1282164 - DNA, 15 bp, Homo sapiens
tctcacgtgcagaga

SEQ ID NO: 1282165 - DNA, 15 bp, Homo sapiens
atctcacgtgcagag

SEQ ID NO: 1282166 - DNA, 15 bp, Homo sapiens
catctcacgtgcaga

SEQ ID NO: 1282167 - DNA, 15 bp, Homo sapiens
ccatctcacgtgcag

SEQ ID NO: 1282168 - DNA, 15 bp, Homo sapiens
tccatctcacgtgca

SEQ ID NO: 1282169 - DNA, 15 bp, Homo sapiens
atccatctcacgtgc

SEQ ID NO: 1282170 - DNA, 15 bp, Homo sapiens
gatccatctcacgtg

SEQ ID NO: 1282171 - DNA, 15 bp, Homo sapiens
agatccatctcacgt

SEQ ID NO: 1282172 - DNA, 15 bp, Homo sapiens
gagatccatctcacg

SEQ ID NO: 1282173 - DNA, 15 bp, Homo sapiens
ggagatccatctcac

SEQ ID NO: 1282174 - DNA, 15 bp, Homo sapiens
aggagatccatctca

SEQ ID NO: 1282175 - DNA, 15 bp, Homo sapiens
caggagatccatctc

SEQ ID NO: 1282176 - DNA, 15 bp, Homo sapiens
tcaggagatccatct

SEQ ID NO: 1282177 - DNA, 15 bp, Homo sapiens
ttcaggagatccatc

SEQ ID NO: 1282178 - DNA, 15 bp, Homo sapiens
attcaggagatccat

SEQ ID NO: 1282179 - DNA, 15 bp, Homo sapiens
tattcaggagatcca

SEQ ID NO: 1282180 - DNA, 15 bp, Homo sapiens
gtattcaggagatcc

SEQ ID NO: 1282181 - DNA, 15 bp, Homo sapiens
tgtattcaggagatc

SEQ ID NO: 1282182 - DNA, 15 bp, Homo sapiens
ctgtattcaggagat

SEQ ID NO: 1282183 - DNA, 15 bp, Homo sapiens
gctgtattcaggaga

SEQ ID NO: 1282184 - DNA, 15 bp, Homo sapiens
tgctgtattcaggag

SEQ ID NO: 1282185 - DNA, 15 bp, Homo sapiens
gtgctgtattcagga

SEQ ID NO: 1282186 - DNA, 15 bp, Homo sapiens
tgtgctgtattcagg

SEQ ID NO: 1282187 - DNA, 15 bp, Homo sapiens
gtgtgctgtattcag

SEQ ID NO: 1282188 - DNA, 15 bp, Homo sapiens
agtgtgctgtattca

SEQ ID NO: 1282189 - DNA, 15 bp, Homo sapiens
cagtgtgctgtattc

SEQ ID NO: 1282190 - DNA, 15 bp, Homo sapiens
tcagtgtgctgtatt

SEQ ID NO: 1282191 - DNA, 15 bp, Homo sapiens
atcagtgtgctgtat

SEQ ID NO: 1282192 - DNA, 15 bp, Homo sapiens
catcagtgtgctgta

SEQ ID NO: 1282193 - DNA, 15 bp, Homo sapiens
ccatcagtgtgctgt

SEQ ID NO: 1282194 - DNA, 15 bp, Homo sapiens
cccatcagtgtgctg

SEQ ID NO: 1282195 - DNA, 15 bp, Homo sapiens
acccatcagtgtgct

SEQ ID NO: 1282196 - DNA, 15 bp, Homo sapiens
gacccatcagtgtgc

SEQ ID NO: 1282197 - DNA, 15 bp, Homo sapiens
agacccatcagtgtg

SEQ ID NO: 1282198 - DNA, 15 bp, Homo sapiens
aagacccatcagtgt

SEQ ID NO: 1282199 - DNA, 15 bp, Homo sapiens
caagacccatcagtg

SEQ ID NO: 1282200 - DNA, 15 bp, Homo sapiens
tcaagacccatcagt

SEQ ID NO: 1282201 - DNA, 15 bp, Homo sapiens
gtcaagacccatcag

SEQ ID NO: 1282202 - DNA, 15 bp, Homo sapiens
agtcaagacccatca

SEQ ID NO: 1282203 - DNA, 15 bp, Homo sapiens
gagtcaagacccatc

SEQ ID NO: 1282204 - DNA, 15 bp, Homo sapiens
agagtcaagacccat

SEQ ID NO: 1282205 - DNA, 15 bp, Homo sapiens
aagagtcaagaccca

SEQ ID NO: 1282206 - DNA, 15 bp, Homo sapiens
aaagagtcaagaccc

SEQ ID NO: 1282207 - DNA, 15 bp, Homo sapiens
taaagagtcaagacc

SEQ ID NO: 1282208 - DNA, 15 bp, Homo sapiens
ataaagagtcaagac

SEQ ID NO: 1282209 - DNA, 15 bp, Homo sapiens
gataaagagtcaaga

SEQ ID NO: 1282210 - DNA, 15 bp, Homo sapiens
ggataaagagtcaag

SEQ ID NO: 1282211 - DNA, 15 bp, Homo sapiens
tggataaagagtcaa

SEQ ID NO: 1282212 - DNA, 15 bp, Homo sapiens
ttggataaagagtca

SEQ ID NO: 1282213 - DNA, 15 bp, Homo sapiens
attggataaagagtc

SEQ ID NO: 1282214 - DNA, 15 bp, Homo sapiens
aattggataaagagt

SEQ ID NO: 1282215 - DNA, 15 bp, Homo sapiens
aaattggataaagag

SEQ ID NO: 1282216 - DNA, 15 bp, Homo sapiens
caaattggataaaga

SEQ ID NO: 1282217 - DNA, 15 bp, Homo sapiens
gcaaattggataaag

SEQ ID NO: 1282218 - DNA, 15 bp, Homo sapiens
ggcaaattggataaa

SEQ ID NO: 1282219 - DNA, 15 bp, Homo sapiens
tggcaaattggataa

SEQ ID NO: 1282220 - DNA, 15 bp, Homo sapiens
ctggcaaattggata

SEQ ID NO: 1282221 - DNA, 15 bp, Homo sapiens
actggcaaattggat

SEQ ID NO: 1282222 - DNA, 15 bp, Homo sapiens
gactggcaaattgga

SEQ ID NO: 1282223 - DNA, 15 bp, Homo sapiens
agactggcaaattgg

SEQ ID NO: 1282224 - DNA, 15 bp, Homo sapiens
cagactggcaaattg

SEQ ID NO: 1282225 - DNA, 15 bp, Homo sapiens
acagactggcaaatt

SEQ ID NO: 1282226 - DNA, 15 bp, Homo sapiens
cacagactggcaaat

SEQ ID NO: 1282227 - DNA, 15 bp, Homo sapiens
acacagactggcaaa

SEQ ID NO: 1282228 - DNA, 15 bp, Homo sapiens
gacacagactggcaa

SEQ ID NO: 1282229 - DNA, 15 bp, Homo sapiens
aaaagacacagactg

SEQ ID NO: 1282230 - DNA, 15 bp, Homo sapiens
taaaagacacagact

SEQ ID NO: 1282231 - DNA, 15 bp, Homo sapiens
ttaaaagacacagac

SEQ ID NO: 1282232 - DNA, 15 bp, Homo sapiens
attaaaagacacaga

SEQ ID NO: 1282233 - DNA, 15 bp, Homo sapiens
aattaaaagacacag

SEQ ID NO: 1282234 - DNA, 15 bp, Homo sapiens
caattaaaagacaca

SEQ ID NO: 1282235 - DNA, 15 bp, Homo sapiens
ccaattaaaagacac

SEQ ID NO: 1282236 - DNA, 15 bp, Homo sapiens
tccaattaaaagaca

SEQ ID NO: 1282237 - DNA, 15 bp, Homo sapiens
ctccaattaaaagac

SEQ ID NO: 1282238 - DNA, 15 bp, Homo sapiens
gctccaattaaaaga

SEQ ID NO: 1282239 - DNA, 15 bp, Homo sapiens
tgctccaattaaaag

SEQ ID NO: 1282240 - DNA, 15 bp, Homo sapiens
atgctccaattaaaa

SEQ ID NO: 1282241 - DNA, 15 bp, Homo sapiens
aatgctccaattaaa

SEQ ID NO: 1282242 - DNA, 15 bp, Homo sapiens
aaatgctccaattaa

SEQ ID NO: 1282243 - DNA, 15 bp, Homo sapiens
taaatgctccaatta

SEQ ID NO: 1282244 - DNA, 15 bp, Homo sapiens
ctaaatgctccaatt

SEQ ID NO: 1282245 - DNA, 15 bp, Homo sapiens
gctaaatgctccaat

SEQ ID NO: 1282246 - DNA, 15 bp, Homo sapiens
ggctaaatgctccaa

SEQ ID NO: 1282247 - DNA, 15 bp, Homo sapiens
gggctaaatgctcca

SEQ ID NO: 1282248 - DNA, 15 bp, Homo sapiens
tgggctaaatgctcc

SEQ ID NO: 1282249 - DNA, 15 bp, Homo sapiens
atgggctaaatgctc

SEQ ID NO: 1282250 - DNA, 15 bp, Homo sapiens
aaatgggctaaatgc

SEQ ID NO: 1282251 - DNA, 15 bp, Homo sapiens
taaatgggctaaatg

SEQ ID NO: 1282252 - DNA, 15 bp, Homo sapiens
gtaaatgggctaaat

SEQ ID NO: 1282253 - DNA, 15 bp, Homo sapiens
tgtaaatgggctaaa

SEQ ID NO: 1282254 - DNA, 15 bp, Homo sapiens
atgtaaatgggctaa

SEQ ID NO: 1282255 - DNA, 15 bp, Homo sapiens
aatgtaaatgggcta

SEQ ID NO: 1282256 - DNA, 15 bp, Homo sapiens
aaatgtaaatgggct

SEQ ID NO: 1282257 - DNA, 15 bp, Homo sapiens
taaatgtaaatgggc

SEQ ID NO: 1282258 - DNA, 15 bp, Homo sapiens
ttaaatgtaaatggg

SEQ ID NO: 1282259 - DNA, 15 bp, Homo sapiens
cttaaatgtaaatgg

SEQ ID NO: 1282260 - DNA, 15 bp, Homo sapiens
ccttaaatgtaaatg

SEQ ID NO: 1282261 - DNA, 15 bp, Homo sapiens
accttaaatgtaaat

SEQ ID NO: 1282262 - DNA, 15 bp, Homo sapiens
aaccttaaatgtaaa

SEQ ID NO: 1282263 - DNA, 15 bp, Homo sapiens
taaccttaaatgtaa

SEQ ID NO: 1282264 - DNA, 15 bp, Homo sapiens
ttaaccttaaatgta

SEQ ID NO: 1282265 - DNA, 15 bp, Homo sapiens
attaaccttaaatgt

SEQ ID NO: 1282266 - DNA, 15 bp, Homo sapiens
tattaaccttaaatg

SEQ ID NO: 1282267 - DNA, 15 bp, Homo sapiens
atattaaccttaaat

SEQ ID NO: 1282268 - DNA, 15 bp, Homo sapiens
aatattaaccttaaa

SEQ ID NO: 1282269 - DNA, 15 bp, Homo sapiens
caatattaaccttaa

SEQ ID NO: 1282270 - DNA, 15 bp, Homo sapiens
acaatattaacctta

SEQ ID NO: 1282271 - DNA, 15 bp, Homo sapiens
aacaatattaacctt

SEQ ID NO: 1282272 - DNA, 15 bp, Homo sapiens
taacaatattaacct

SEQ ID NO: 1282273 - DNA, 15 bp, Homo sapiens
ataacaatattaacc

SEQ ID NO: 1282274 - DNA, 15 bp, Homo sapiens
cataacaatattaac

SEQ ID NO: 1282275 - DNA, 15 bp, Homo sapiens
acataacaatattaa

SEQ ID NO: 1282276 - DNA, 15 bp, Homo sapiens
cacataacaatatta

SEQ ID NO: 1282277 - DNA, 15 bp, Homo sapiens
acacataacaatatt

SEQ ID NO: 1282278 - DNA, 15 bp, Homo sapiens
cacacataacaatat

SEQ ID NO: 1282279 - DNA, 15 bp, Homo sapiens
tcacacataacaata

SEQ ID NO: 1282280 - DNA, 15 bp, Homo sapiens
ttcacacataacaat

SEQ ID NO: 1282281 - DNA, 15 bp, Homo sapiens
attcacacataacaa

SEQ ID NO: 1282282 - DNA, 15 bp, Homo sapiens
aattcacacataaca

SEQ ID NO: 1282283 - DNA, 15 bp, Homo sapiens
aaattcacacataac

SEQ ID NO: 1282284 - DNA, 15 bp, Homo sapiens
caaattcacacataa

SEQ ID NO: 1282285 - DNA, 15 bp, Homo sapiens
tcaaattcacacata

SEQ ID NO: 1282286 - DNA, 15 bp, Homo sapiens
atcaaattcacacat

SEQ ID NO: 1282287 - DNA, 15 bp, Homo sapiens
gatcaaattcacaca

SEQ ID NO: 1282288 - DNA, 15 bp, Homo sapiens
ggatcaaattcacac

SEQ ID NO: 1282289 - DNA, 15 bp, Homo sapiens
aggatcaaattcaca

SEQ ID NO: 1282290 - DNA, 15 bp, Homo sapiens
caggatcaaattcac

SEQ ID NO: 1282291 - DNA, 15 bp, Homo sapiens
acaggatcaaattca

SEQ ID NO: 1282292 - DNA, 15 bp, Homo sapiens
gacaggatcaaattc

SEQ ID NO: 1282293 - DNA, 15 bp, Homo sapiens
tgacaggatcaaatt

SEQ ID NO: 1282294 - DNA, 15 bp, Homo sapiens
atgacaggatcaaat

SEQ ID NO: 1282295 - DNA, 15 bp, Homo sapiens
aatgacaggatcaaa

SEQ ID NO: 1282296 - DNA, 15 bp, Homo sapiens
taatgacaggatcaa

SEQ ID NO: 1282297 - DNA, 15 bp, Homo sapiens
ataatgacaggatca

SEQ ID NO: 1282298 - DNA, 15 bp, Homo sapiens
cataatgacaggatc

SEQ ID NO: 1282299 - DNA, 15 bp, Homo sapiens
tcataatgacaggat

SEQ ID NO: 1282300 - DNA, 15 bp, Homo sapiens
atcataatgacagga

SEQ ID NO: 1282301 - DNA, 15 bp, Homo sapiens
catcataatgacagg

SEQ ID NO: 1282302 - DNA, 15 bp, Homo sapiens
acatcataatgacag

SEQ ID NO: 1282303 - DNA, 15 bp, Homo sapiens
aacatcataatgaca

SEQ ID NO: 1282304 - DNA, 15 bp, Homo sapiens
taacatcataatgac

SEQ ID NO: 1282305 - DNA, 15 bp, Homo sapiens
ctaacatcataatga

SEQ ID NO: 1282306 - DNA, 15 bp, Homo sapiens
gctaacatcataatg

SEQ ID NO: 1282307 - DNA, 15 bp, Homo sapiens
agctaacatcataat

SEQ ID NO: 1282308 - DNA, 15 bp, Homo sapiens
cagctaacatcataa

SEQ ID NO: 1282309 - DNA, 15 bp, Homo sapiens
ccagctaacatcata

SEQ ID NO: 1282310 - DNA, 15 bp, Homo sapiens
accagctaacatcat

SEQ ID NO: 1282311 - DNA, 15 bp, Homo sapiens
caccagctaacatca

SEQ ID NO: 1282312 - DNA, 15 bp, Homo sapiens
tcaccagctaacatc

SEQ ID NO: 1282313 - DNA, 15 bp, Homo sapiens
atcaccagctaacat

SEQ ID NO: 1282314 - DNA, 15 bp, Homo sapiens
aatcaccagctaaca

SEQ ID NO: 1282315 - DNA, 15 bp, Homo sapiens
aaatcaccagctaac

SEQ ID NO: 1282316 - DNA, 15 bp, Homo sapiens
aaaatcaccagctaa

SEQ ID NO: 1282317 - DNA, 15 bp, Homo sapiens
caaaatcaccagcta

SEQ ID NO: 1282318 - DNA, 15 bp, Homo sapiens
gcaaaatcaccagct

SEQ ID NO: 1282319 - DNA, 15 bp, Homo sapiens
agcaaaatcaccagc

SEQ ID NO: 1282320 - DNA, 15 bp, Homo sapiens
gagcaaaatcaccag

SEQ ID NO: 1282321 - DNA, 15 bp, Homo sapiens
cgagcaaaatcacca

SEQ ID NO: 1282322 - DNA, 15 bp, Homo sapiens
acgagcaaaatcacc

SEQ ID NO: 1282323 - DNA, 15 bp, Homo sapiens
aacgagcaaaatcac

SEQ ID NO: 1282324 - DNA, 15 bp, Homo sapiens
taacgagcaaaatca

SEQ ID NO: 1282325 - DNA, 15 bp, Homo sapiens
ctaacgagcaaaatc

SEQ ID NO: 1282326 - DNA, 15 bp, Homo sapiens
actaacgagcaaaat

SEQ ID NO: 1282327 - DNA, 15 bp, Homo sapiens
aactaacgagcaaaa

SEQ ID NO: 1282328 - DNA, 15 bp, Homo sapiens
caactaacgagcaaa

SEQ ID NO: 1282329 - DNA, 15 bp, Homo sapiens
tcaactaacgagcaa

SEQ ID NO: 1282330 - DNA, 15 bp, Homo sapiens
atcaactaacgagca

SEQ ID NO: 1282331 - DNA, 15 bp, Homo sapiens
catcaactaacgagc

SEQ ID NO: 1282332 - DNA, 15 bp, Homo sapiens
gcatcaactaacgag

SEQ ID NO: 1282333 - DNA, 15 bp, Homo sapiens
tgcatcaactaacga

SEQ ID NO: 1282334 - DNA, 15 bp, Homo sapiens
ctgcatcaactaacg

SEQ ID NO: 1282335 - DNA, 15 bp, Homo sapiens
actgcatcaactaac

SEQ ID NO: 1282336 - DNA, 15 bp, Homo sapiens
aactgcatcaactaa

SEQ ID NO: 1282337 - DNA, 15 bp, Homo sapiens
aaactgcatcaacta

SEQ ID NO: 1282338 - DNA, 15 bp, Homo sapiens
gaaactgcatcaact

SEQ ID NO: 1282339 - DNA, 15 bp, Homo sapiens
agaaactgcatcaac

SEQ ID NO: 1282340 - DNA, 15 bp, Homo sapiens
aagaaactgcatcaa

SEQ ID NO: 1282341 - DNA, 15 bp, Homo sapiens
gaagaaactgcatca

SEQ ID NO: 1282342 - DNA, 15 bp, Homo sapiens
ggaagaaactgcatc

SEQ ID NO: 1282343 - DNA, 15 bp, Homo sapiens
aggaagaaactgcat

SEQ ID NO: 1282344 - DNA, 15 bp, Homo sapiens
taggaagaaactgca

SEQ ID NO: 1282345 - DNA, 15 bp, Homo sapiens
ctaggaagaaactgc

SEQ ID NO: 1282346 - DNA, 15 bp, Homo sapiens
gctaggaagaaactg

SEQ ID NO: 1282347 - DNA, 15 bp, Homo sapiens
ggctaggaagaaact

SEQ ID NO: 1282348 - DNA, 15 bp, Homo sapiens
aggctaggaagaaac

SEQ ID NO: 1282349 - DNA, 15 bp, Homo sapiens
gaggctaggaagaaa

SEQ ID NO: 1282350 - DNA, 15 bp, Homo sapiens
cgaggctaggaagaa

SEQ ID NO: 1282351 - DNA, 15 bp, Homo sapiens
tcgaggctaggaaga

SEQ ID NO: 1282352 - DNA, 15 bp, Homo sapiens
atcgaggctaggaag

SEQ ID NO: 1282353 - DNA, 15 bp, Homo sapiens
catcgaggctaggaa

SEQ ID NO: 1282354 - DNA, 15 bp, Homo sapiens
ccatcgaggctagga

SEQ ID NO: 1282355 - DNA, 15 bp, Homo sapiens
accatcgaggctagg

SEQ ID NO: 1282356 - DNA, 15 bp, Homo sapiens
gaccatcgaggctag

SEQ ID NO: 1282357 - DNA, 15 bp, Homo sapiens
agaccatcgaggcta

SEQ ID NO: 1282358 - DNA, 15 bp, Homo sapiens
aagaccatcgaggct

SEQ ID NO: 1282359 - DNA, 15 bp, Homo sapiens
aaagaccatcgaggc

SEQ ID NO: 1282360 - DNA, 15 bp, Homo sapiens
taaagaccatcgagg

SEQ ID NO: 1282361 - DNA, 15 bp, Homo sapiens
gtaaagaccatcgag

SEQ ID NO: 1282362 - DNA, 15 bp, Homo sapiens
tgtaaagaccatcga

SEQ ID NO: 1282363 - DNA, 15 bp, Homo sapiens
ttgtaaagaccatcg

SEQ ID NO: 1282364 - DNA, 15 bp, Homo sapiens
attgtaaagaccatc

SEQ ID NO: 1282365 - DNA, 15 bp, Homo sapiens
aattgtaaagaccat

SEQ ID NO: 1282366 - DNA, 15 bp, Homo sapiens
aaattgtaaagacca

SEQ ID NO: 1282367 - DNA, 15 bp, Homo sapiens
caaattgtaaagacc

SEQ ID NO: 1282368 - DNA, 15 bp, Homo sapiens
ccaaattgtaaagac

SEQ ID NO: 1282369 - DNA, 15 bp, Homo sapiens
gccaaattgtaaaga

SEQ ID NO: 1282370 - DNA, 15 bp, Homo sapiens
tgccaaattgtaaag

SEQ ID NO: 1282371 - DNA, 15 bp, Homo sapiens
atgccaaattgtaaa

SEQ ID NO: 1282372 - DNA, 15 bp, Homo sapiens
catgccaaattgtaa

SEQ ID NO: 1282373 - DNA, 15 bp, Homo sapiens
acatgccaaattgta

SEQ ID NO: 1282374 - DNA, 15 bp, Homo sapiens
aacatgccaaattgt

SEQ ID NO: 1282375 - DNA, 15 bp, Homo sapiens
aaacatgccaaattg

SEQ ID NO: 1282376 - DNA, 15 bp, Homo sapiens
aaaacatgccaaatt

SEQ ID NO: 1282377 - DNA, 15 bp, Homo sapiens
aaaaacatgccaaat

SEQ ID NO: 1282378 - DNA, 15 bp, Homo sapiens
caaaaacatgccaaa

SEQ ID NO: 1282379 - DNA, 15 bp, Homo sapiens
gcaaaaacatgccaa

SEQ ID NO: 1282380 - DNA, 15 bp, Homo sapiens
tgcaaaaacatgcca

SEQ ID NO: 1282381 - DNA, 15 bp, Homo sapiens
ctgcaaaaacatgcc

SEQ ID NO: 1282382 - DNA, 15 bp, Homo sapiens
actgcaaaaacatgc

SEQ ID NO: 1282383 - DNA, 15 bp, Homo sapiens
cactgcaaaaacatg

SEQ ID NO: 1282384 - DNA, 15 bp, Homo sapiens
ccactgcaaaaacat

SEQ ID NO: 1282385 - DNA, 15 bp, Homo sapiens
gccactgcaaaaaca

SEQ ID NO: 1282386 - DNA, 15 bp, Homo sapiens
agccactgcaaaaac

SEQ ID NO: 1282387 - DNA, 15 bp, Homo sapiens
cagccactgcaaaaa

SEQ ID NO: 1282388 - DNA, 15 bp, Homo sapiens
ccagccactgcaaaa

SEQ ID NO: 1282389 - DNA, 15 bp, Homo sapiens
accagccactgcaaa

SEQ ID NO: 1282390 - DNA, 15 bp, Homo sapiens
taccagccactgcaa

SEQ ID NO: 1282391 - DNA, 15 bp, Homo sapiens
gtaccagccactgca

SEQ ID NO: 1282392 - DNA, 15 bp, Homo sapiens
ggtaccagccactgc

SEQ ID NO: 1282393 - DNA, 15 bp, Homo sapiens
tggtaccagccactg

SEQ ID NO: 1282394 - DNA, 15 bp, Homo sapiens
gctggtaccagccac

SEQ ID NO: 1282395 - DNA, 15 bp, Homo sapiens
agctggtaccagcca

SEQ ID NO: 1282396 - DNA, 15 bp, Homo sapiens
cagctggtaccagcc

SEQ ID NO: 1282397 - DNA, 15 bp, Homo sapiens
acagctggtaccagc

SEQ ID NO: 1282398 - DNA, 15 bp, Homo sapiens
aacagctggtaccag

SEQ ID NO: 1282399 - DNA, 15 bp, Homo sapiens
gaacagctggtacca

SEQ ID NO: 1282400 - DNA, 15 bp, Homo sapiens
ggaacagctggtacc

SEQ ID NO: 1282401 - DNA, 15 bp, Homo sapiens
aggaacagctggtac

SEQ ID NO: 1282402 - DNA, 15 bp, Homo sapiens
aaggaacagctggta

SEQ ID NO: 1282403 - DNA, 15 bp, Homo sapiens
aaaggaacagctggt

SEQ ID NO: 1282404 - DNA, 15 bp, Homo sapiens
gaaaggaacagctgg

SEQ ID NO: 1282405 - DNA, 15 bp, Homo sapiens
ggaaaggaacagctg

SEQ ID NO: 1282406 - DNA, 15 bp, Homo sapiens
tggaaaggaacagct

SEQ ID NO: 1282407 - DNA, 15 bp, Homo sapiens
atggaaaggaacagc

SEQ ID NO: 1282408 - DNA, 15 bp, Homo sapiens
catggaaaggaacag

SEQ ID NO: 1282409 - DNA, 15 bp, Homo sapiens
acatggaaaggaaca

SEQ ID NO: 1282410 - DNA, 15 bp, Homo sapiens
aacatggaaaggaac

SEQ ID NO: 1282411 - DNA, 15 bp, Homo sapiens
aaacatggaaaggaa

SEQ ID NO: 1282412 - DNA, 15 bp, Homo sapiens
taaacatggaaagga

SEQ ID NO: 1282413 - DNA, 15 bp, Homo sapiens
ctaaacatggaaagg

SEQ ID NO: 1282414 - DNA, 15 bp, Homo sapiens
actaaacatggaaag

SEQ ID NO: 1282415 - DNA, 15 bp, Homo sapiens
cactaaacatggaaa

SEQ ID NO: 1282416 - DNA, 15 bp, Homo sapiens
gcactaaacatggaa

SEQ ID NO: 1282417 - DNA, 15 bp, Homo sapiens
agcactaaacatgga

SEQ ID NO: 1282418 - DNA, 15 bp, Homo sapiens
aagcactaaacatgg

SEQ ID NO: 1282419 - DNA, 15 bp, Homo sapiens
gaagcactaaacatg

SEQ ID NO: 1282420 - DNA, 15 bp, Homo sapiens
ggaagcactaaacat

SEQ ID NO: 1282421 - DNA, 15 bp, Homo sapiens
aggaagcactaaaca

SEQ ID NO: 1282422 - DNA, 15 bp, Homo sapiens
aaggaagcactaaac

SEQ ID NO: 1282423 - DNA, 15 bp, Homo sapiens
gaaggaagcactaaa

SEQ ID NO: 1282424 - DNA, 15 bp, Homo sapiens
tgaaggaagcactaa

SEQ ID NO: 1282425 - DNA, 15 bp, Homo sapiens
ctgaaggaagcacta

SEQ ID NO: 1282426 - DNA, 15 bp, Homo sapiens
cctgaaggaagcact

SEQ ID NO: 1282427 - DNA, 15 bp, Homo sapiens
tcctgaaggaagcac

SEQ ID NO: 1282428 - DNA, 15 bp, Homo sapiens
ctcctgaaggaagca

SEQ ID NO: 1282429 - DNA, 15 bp, Homo sapiens
gctcctgaaggaagc

SEQ ID NO: 1282430 - DNA, 15 bp, Homo sapiens
agctcctgaaggaag

SEQ ID NO: 1282431 - DNA, 15 bp, Homo sapiens
gagctcctgaaggaa

SEQ ID NO: 1282432 - DNA, 15 bp, Homo sapiens
agagctcctgaagga

SEQ ID NO: 1282433 - DNA, 15 bp, Homo sapiens
aagagctcctgaagg

SEQ ID NO: 1282434 - DNA, 15 bp, Homo sapiens
caagagctcctgaag

SEQ ID NO: 1282435 - DNA, 15 bp, Homo sapiens
acaagagctcctgaa

SEQ ID NO: 1282436 - DNA, 15 bp, Homo sapiens
tacaagagctcctga

SEQ ID NO: 1282437 - DNA, 15 bp, Homo sapiens
ttacaagagctcctg

SEQ ID NO: 1282438 - DNA, 15 bp, Homo sapiens
cttacaagagctcct

SEQ ID NO: 1282439 - DNA, 15 bp, Homo sapiens
ccttacaagagctcc

SEQ ID NO: 1282440 - DNA, 15 bp, Homo sapiens
gccttacaagagctc

SEQ ID NO: 1282441 - DNA, 15 bp, Homo sapiens
tgccttacaagagct

SEQ ID NO: 1282442 - DNA, 15 bp, Homo sapiens
ctgccttacaagagc

SEQ ID NO: 1282443 - DNA, 15 bp, Homo sapiens
cctgccttacaagag

SEQ ID NO: 1282444 - DNA, 15 bp, Homo sapiens
gcctgccttacaaga

SEQ ID NO: 1282445 - DNA, 15 bp, Homo sapiens
ggcctgccttacaag

SEQ ID NO: 1282446 - DNA, 15 bp, Homo sapiens
aggcctgccttacaa

SEQ ID NO: 1282447 - DNA, 15 bp, Homo sapiens
caggcctgccttaca

SEQ ID NO: 1282448 - DNA, 15 bp, Homo sapiens
ccaggcctgccttac

SEQ ID NO: 1282449 - DNA, 15 bp, Homo sapiens
accaggcctgcctta

SEQ ID NO: 1282450 - DNA, 15 bp, Homo sapiens
caccaggcctgcctt

SEQ ID NO: 1282451 - DNA, 15 bp, Homo sapiens
ccaccaggcctgcct

SEQ ID NO: 1282452 - DNA, 15 bp, Homo sapiens
accaccaggcctgcc

SEQ ID NO: 1282453 - DNA, 15 bp, Homo sapiens
caccaccaggcctgc

SEQ ID NO: 1282454 - DNA, 15 bp, Homo sapiens
tcaccaccaggcctg

SEQ ID NO: 1282455 - DNA, 15 bp, Homo sapiens
gtcaccaccaggcct

SEQ ID NO: 1282456 - DNA, 15 bp, Homo sapiens
tgtcaccaccaggcc

SEQ ID NO: 1282457 - DNA, 15 bp, Homo sapiens
ttgtcaccaccaggc

SEQ ID NO: 1282458 - DNA, 15 bp, Homo sapiens
tttgtcaccaccagg

SEQ ID NO: 1282459 - DNA, 15 bp, Homo sapiens
ttttgtcaccaccag

SEQ ID NO: 1282460 - DNA, 15 bp, Homo sapiens
attttgtcaccacca

SEQ ID NO: 1282461 - DNA, 15 bp, Homo sapiens
cattttgtcaccacc

SEQ ID NO: 1282462 - DNA, 15 bp, Homo sapiens
acattttgtcaccac

SEQ ID NO: 1282463 - DNA, 15 bp, Homo sapiens
gacattttgtcacca

SEQ ID NO: 1282464 - DNA, 15 bp, Homo sapiens
agacattttgtcacc

SEQ ID NO: 1282465 - DNA, 15 bp, Homo sapiens
gagacattttgtcac

SEQ ID NO: 1282466 - DNA, 15 bp, Homo sapiens
tgagacattttgtca

SEQ ID NO: 1282467 - DNA, 15 bp, Homo sapiens
ctgagacattttgtc

SEQ ID NO: 1282468 - DNA, 15 bp, Homo sapiens
gctgagacattttgt

SEQ ID NO: 1282469 - DNA, 15 bp, Homo sapiens
tgctgagacattttg

SEQ ID NO: 1282470 - DNA, 15 bp, Homo sapiens
atgctgagacatttt

SEQ ID NO: 1282471 - DNA, 15 bp, Homo sapiens
aatgctgagacattt

SEQ ID NO: 1282472 - DNA, 15 bp, Homo sapiens
aaatgctgagacatt

SEQ ID NO: 1282473 - DNA, 15 bp, Homo sapiens
caaatgctgagacat

SEQ ID NO: 1282474 - DNA, 15 bp, Homo sapiens
acaaatgctgagaca

SEQ ID NO: 1282475 - DNA, 15 bp, Homo sapiens
aacaaatgctgagac

SEQ ID NO: 1282476 - DNA, 15 bp, Homo sapiens
aaacaaatgctgaga

SEQ ID NO: 1282477 - DNA, 15 bp, Homo sapiens
caaacaaatgctgag

SEQ ID NO: 1282478 - DNA, 15 bp, Homo sapiens
gcaaacaaatgctga

SEQ ID NO: 1282479 - DNA, 15 bp, Homo sapiens
ggcaaacaaatgctg

SEQ ID NO: 1282480 - DNA, 15 bp, Homo sapiens
aggcaaacaaatgct

SEQ ID NO: 1282481 - DNA, 15 bp, Homo sapiens
caggcaaacaaatgc

SEQ ID NO: 1282482 - DNA, 15 bp, Homo sapiens
acaggcaaacaaatg

SEQ ID NO: 1282483 - DNA, 15 bp, Homo sapiens
cacaggcaaacaaat

SEQ ID NO: 1282484 - DNA, 15 bp, Homo sapiens
tcacaggcaaacaaa

SEQ ID NO: 1282485 - DNA, 15 bp, Homo sapiens
ttcacaggcaaacaa

SEQ ID NO: 1282486 - DNA, 15 bp, Homo sapiens
cttcacaggcaaaca

SEQ ID NO: 1282487 - DNA, 15 bp, Homo sapiens
ccttcacaggcaaac

SEQ ID NO: 1282488 - DNA, 15 bp, Homo sapiens
tccttcacaggcaaa

SEQ ID NO: 1282489 - DNA, 15 bp, Homo sapiens
atccttcacaggcaa

SEQ ID NO: 1282490 - DNA, 15 bp, Homo sapiens
aatccttcacaggca

SEQ ID NO: 1282491 - DNA, 15 bp, Homo sapiens
aaatccttcacaggc

SEQ ID NO: 1282492 - DNA, 15 bp, Homo sapiens
aaaatccttcacagg

SEQ ID NO: 1282493 - DNA, 15 bp, Homo sapiens
taaaatccttcacag

SEQ ID NO: 1282494 - DNA, 15 bp, Homo sapiens
ataaaatccttcaca

SEQ ID NO: 1282495 - DNA, 15 bp, Homo sapiens
aataaaatccttcac

SEQ ID NO: 1282496 - DNA, 15 bp, Homo sapiens
aaataaaatccttca

SEQ ID NO: 1282497 - DNA, 15 bp, Homo sapiens
gaaataaaatccttc

SEQ ID NO: 1282498 - DNA, 15 bp, Homo sapiens
agaaataaaatcctt

SEQ ID NO: 1282499 - DNA, 15 bp, Homo sapiens
gagaaataaaatcct

SEQ ID NO: 1282500 - DNA, 15 bp, Homo sapiens
ggagaaataaaatcc

SEQ ID NO: 1282501 - DNA, 15 bp, Homo sapiens
aggagaaataaaatc

SEQ ID NO: 1282502 - DNA, 15 bp, Homo sapiens
aaggagaaataaaat

SEQ ID NO: 1282503 - DNA, 15 bp, Homo sapiens
gaaggagaaataaaa

SEQ ID NO: 1282504 - DNA, 15 bp, Homo sapiens
tgaaggagaaataaa

SEQ ID NO: 1282505 - DNA, 15 bp, Homo sapiens
gtgaaggagaaataa

SEQ ID NO: 1282506 - DNA, 15 bp, Homo sapiens
agtgaaggagaaata

SEQ ID NO: 1282507 - DNA, 15 bp, Homo sapiens
aagtgaaggagaaat

SEQ ID NO: 1282508 - DNA, 15 bp, Homo sapiens
taagtgaaggagaaa

SEQ ID NO: 1282509 - DNA, 15 bp, Homo sapiens
ataagtgaaggagaa

SEQ ID NO: 1282510 - DNA, 15 bp, Homo sapiens
cataagtgaaggaga

SEQ ID NO: 1282511 - DNA, 15 bp, Homo sapiens
tcataagtgaaggag

SEQ ID NO: 1282512 - DNA, 15 bp, Homo sapiens
ttcataagtgaagga

SEQ ID NO: 1282513 - DNA, 15 bp, Homo sapiens
cttcataagtgaagg

SEQ ID NO: 1282514 - DNA, 15 bp, Homo sapiens
gcttcataagtgaag

SEQ ID NO: 1282515 - DNA, 15 bp, Homo sapiens
ggcttcataagtgaa

SEQ ID NO: 1282516 - DNA, 15 bp, Homo sapiens
aggcttcataagtga

SEQ ID NO: 1282517 - DNA, 15 bp, Homo sapiens
taggcttcataagtg

SEQ ID NO: 1282518 - DNA, 15 bp, Homo sapiens
ctaggcttcataagt

SEQ ID NO: 1282519 - DNA, 15 bp, Homo sapiens
actaggcttcataag

SEQ ID NO: 1282520 - DNA, 15 bp, Homo sapiens
aactaggcttcataa

SEQ ID NO: 1282521 - DNA, 15 bp, Homo sapiens
aaactaggcttcata

SEQ ID NO: 1282522 - DNA, 15 bp, Homo sapiens
caaactaggcttcat

SEQ ID NO: 1282523 - DNA, 15 bp, Homo sapiens
ccaaactaggcttca

SEQ ID NO: 1282524 - DNA, 15 bp, Homo sapiens
gccaaactaggcttc

SEQ ID NO: 1282525 - DNA, 15 bp, Homo sapiens
agccaaactaggctt

SEQ ID NO: 1282526 - DNA, 15 bp, Homo sapiens
cagccaaactaggct

SEQ ID NO: 1282527 - DNA, 15 bp, Homo sapiens
ccagccaaactaggc

SEQ ID NO: 1282528 - DNA, 15 bp, Homo sapiens
tccagccaaactagg

SEQ ID NO: 1282529 - DNA, 15 bp, Homo sapiens
atccagccaaactag

SEQ ID NO: 1282530 - DNA, 15 bp, Homo sapiens
tatccagccaaacta

SEQ ID NO: 1282531 - DNA, 15 bp, Homo sapiens
atatccagccaaact

SEQ ID NO: 1282532 - DNA, 15 bp, Homo sapiens
catatccagccaaac

SEQ ID NO: 1282533 - DNA, 15 bp, Homo sapiens
tcatatccagccaaa

SEQ ID NO: 1282534 - DNA, 15 bp, Homo sapiens
ttcatatccagccaa

SEQ ID NO: 1282535 - DNA, 15 bp, Homo sapiens
tttcatatccagcca

SEQ ID NO: 1282536 - DNA, 15 bp, Homo sapiens
atttcatatccagcc

SEQ ID NO: 1282537 - DNA, 15 bp, Homo sapiens
aatttcatatccagc

SEQ ID NO: 1282538 - DNA, 15 bp, Homo sapiens
gaatttcatatccag

SEQ ID NO: 1282539 - DNA, 15 bp, Homo sapiens
agaatttcatatcca

SEQ ID NO: 1282540 - DNA, 15 bp, Homo sapiens
cagaatttcatatcc

SEQ ID NO: 1282541 - DNA, 15 bp, Homo sapiens
ccagaatttcatatc

SEQ ID NO: 1282542 - DNA, 15 bp, Homo sapiens
cccagaatttcatat

SEQ ID NO: 1282543 - DNA, 15 bp, Homo sapiens
acccagaatttcata

SEQ ID NO: 1282544 - DNA, 15 bp, Homo sapiens
aacccagaatttcat

SEQ ID NO: 1282545 - DNA, 15 bp, Homo sapiens
caacccagaatttca

SEQ ID NO: 1282546 - DNA, 15 bp, Homo sapiens
tcaacccagaatttc

SEQ ID NO: 1282547 - DNA, 15 bp, Homo sapiens
ttcaacccagaattt

SEQ ID NO: 1282548 - DNA, 15 bp, Homo sapiens
tttcaacccagaatt

SEQ ID NO: 1282549 - DNA, 15 bp, Homo sapiens
ttttcaacccagaat

SEQ ID NO: 1282550 - DNA, 15 bp, Homo sapiens
attttcaacccagaa

SEQ ID NO: 1282551 - DNA, 15 bp, Homo sapiens
aattttcaacccaga

SEQ ID NO: 1282552 - DNA, 15 bp, Homo sapiens
gaattttcaacccag

SEQ ID NO: 1282553 - DNA, 15 bp, Homo sapiens
agaattttcaaccca

SEQ ID NO: 1282554 - DNA, 15 bp, Homo sapiens
aagaattttcaaccc

SEQ ID NO: 1282555 - DNA, 15 bp, Homo sapiens
aaagaattttcaacc

SEQ ID NO: 1282556 - DNA, 15 bp, Homo sapiens
aaaagaattttcaac

SEQ ID NO: 1282557 - DNA, 15 bp, Homo sapiens
gaaaagaattttcaa

SEQ ID NO: 1282558 - DNA, 15 bp, Homo sapiens
agaaaagaattttca

SEQ ID NO: 1282559 - DNA, 15 bp, Homo sapiens
aagaaaagaattttc

SEQ ID NO: 1282560 - DNA, 15 bp, Homo sapiens
aaagaaaagaatttt

SEQ ID NO: 1282561 - DNA, 15 bp, Homo sapiens
taaagaaaagaattt

SEQ ID NO: 1282562 - DNA, 15 bp, Homo sapiens
ttaaagaaaagaatt

SEQ ID NO: 1282563 - DNA, 15 bp, Homo sapiens
cttaaagaaaagaat

SEQ ID NO: 1282564 - DNA, 15 bp, Homo sapiens
tcttaaagaaaagaa

SEQ ID NO: 1282565 - DNA, 15 bp, Homo sapiens
ttcttaaagaaaaga

SEQ ID NO: 1282566 - DNA, 15 bp, Homo sapiens
attcttaaagaaaag

SEQ ID NO: 1282567 - DNA, 15 bp, Homo sapiens
cattcttaaagaaaa

SEQ ID NO: 1282568 - DNA, 15 bp, Homo sapiens
acattcttaaagaaa

SEQ ID NO: 1282569 - DNA, 15 bp, Homo sapiens
aacattcttaaagaa

SEQ ID NO: 1282570 - DNA, 15 bp, Homo sapiens
caacattcttaaaga

SEQ ID NO: 1282571 - DNA, 15 bp, Homo sapiens
tcaacattcttaaag

SEQ ID NO: 1282572 - DNA, 15 bp, Homo sapiens
ttcaacattcttaaa

SEQ ID NO: 1282573 - DNA, 15 bp, Homo sapiens
attcaacattcttaa

SEQ ID NO: 1282574 - DNA, 15 bp, Homo sapiens
tattcaacattctta

SEQ ID NO: 1282575 - DNA, 15 bp, Homo sapiens
atattcaacattctt

SEQ ID NO: 1282576 - DNA, 15 bp, Homo sapiens
aatattcaacattct

SEQ ID NO: 1282577 - DNA, 15 bp, Homo sapiens
caatattcaacattc

SEQ ID NO: 1282578 - DNA, 15 bp, Homo sapiens
ccaatattcaacatt

SEQ ID NO: 1282579 - DNA, 15 bp, Homo sapiens
gccaatattcaacat

SEQ ID NO: 1282580 - DNA, 15 bp, Homo sapiens
ggccaatattcaaca

SEQ ID NO: 1282581 - DNA, 15 bp, Homo sapiens
gggccaatattcaac

SEQ ID NO: 1282582 - DNA, 15 bp, Homo sapiens
ggggccaatattcaa

SEQ ID NO: 1282583 - DNA, 15 bp, Homo sapiens
gggggccaatattca

SEQ ID NO: 1282584 - DNA, 15 bp, Homo sapiens
tgggggccaatattc

SEQ ID NO: 1282585 - DNA, 15 bp, Homo sapiens
gtgggggccaatatt

SEQ ID NO: 1282586 - DNA, 15 bp, Homo sapiens
agtgggggccaatat

SEQ ID NO: 1282587 - DNA, 15 bp, Homo sapiens
gagtgggggccaata

SEQ ID NO: 1282588 - DNA, 15 bp, Homo sapiens
agagtgggggccaat

SEQ ID NO: 1282589 - DNA, 15 bp, Homo sapiens
gagagtgggggccaa

SEQ ID NO: 1282590 - DNA, 15 bp, Homo sapiens
agagagtgggggcca

SEQ ID NO: 1282591 - DNA, 15 bp, Homo sapiens
aagagagtgggggcc

SEQ ID NO: 1282592 - DNA, 15 bp, Homo sapiens
gaagagagtgggggc

SEQ ID NO: 1282593 - DNA, 15 bp, Homo sapiens
agaagagagtggggg

SEQ ID NO: 1282594 - DNA, 15 bp, Homo sapiens
cagaagagagtgggg

SEQ ID NO: 1282595 - DNA, 15 bp, Homo sapiens
ccagaagagagtggg

SEQ ID NO: 1282596 - DNA, 15 bp, Homo sapiens
gccagaagagagtgg

SEQ ID NO: 1282597 - DNA, 15 bp, Homo sapiens
agccagaagagagtg

SEQ ID NO: 1282598 - DNA, 15 bp, Homo sapiens
aagccagaagagagt

SEQ ID NO: 1282599 - DNA, 15 bp, Homo sapiens
caagccagaagagag

SEQ ID NO: 1282600 - DNA, 15 bp, Homo sapiens
acaagccagaagaga

SEQ ID NO: 1282601 - DNA, 15 bp, Homo sapiens
tacaagccagaagag

SEQ ID NO: 1282602 - DNA, 15 bp, Homo sapiens
ctacaagccagaaga

SEQ ID NO: 1282603 - DNA, 15 bp, Homo sapiens
tctacaagccagaag

SEQ ID NO: 1282604 - DNA, 15 bp, Homo sapiens
ctctacaagccagaa

SEQ ID NO: 1282605 - DNA, 15 bp, Homo sapiens
actctacaagccaga

SEQ ID NO: 1282606 - DNA, 15 bp, Homo sapiens
aactctacaagccag

SEQ ID NO: 1282607 - DNA, 15 bp, Homo sapiens
aaactctacaagcca

SEQ ID NO: 1282608 - DNA, 15 bp, Homo sapiens
gaaactctacaagcc

SEQ ID NO: 1282609 - DNA, 15 bp, Homo sapiens
agaaactctacaagc

SEQ ID NO: 1282610 - DNA, 15 bp, Homo sapiens
cagaaactctacaag

SEQ ID NO: 1282611 - DNA, 15 bp, Homo sapiens
gcagaaactctacaa

SEQ ID NO: 1282612 - DNA, 15 bp, Homo sapiens
agcagaaactctaca

SEQ ID NO: 1282613 - DNA, 15 bp, Homo sapiens
cagcagaaactctac

SEQ ID NO: 1282614 - DNA, 15 bp, Homo sapiens
tcagcagaaactcta

SEQ ID NO: 1282615 - DNA, 15 bp, Homo sapiens
ctcagcagaaactct

SEQ ID NO: 1282616 - DNA, 15 bp, Homo sapiens
tctcagcagaaactc

SEQ ID NO: 1282617 - DNA, 15 bp, Homo sapiens
ctctcagcagaaact

SEQ ID NO: 1282618 - DNA, 15 bp, Homo sapiens
tctctcagcagaaac

SEQ ID NO: 1282619 - DNA, 15 bp, Homo sapiens
atctctcagcagaaa

SEQ ID NO: 1282620 - DNA, 15 bp, Homo sapiens
gatctctcagcagaa

SEQ ID NO: 1282621 - DNA, 15 bp, Homo sapiens
ggatctctcagcaga

SEQ ID NO: 1282622 - DNA, 15 bp, Homo sapiens
tggatctctcagcag

SEQ ID NO: 1282623 - DNA, 15 bp, Homo sapiens
gtggatctctcagca

SEQ ID NO: 1282624 - DNA, 15 bp, Homo sapiens
agtggatctctcagc

SEQ ID NO: 1282625 - DNA, 15 bp, Homo sapiens
cagtggatctctcag

SEQ ID NO: 1282626 - DNA, 15 bp, Homo sapiens
acagtggatctctca

SEQ ID NO: 1282627 - DNA, 15 bp, Homo sapiens
aacagtggatctctc

SEQ ID NO: 1282628 - DNA, 15 bp, Homo sapiens
taacagtggatctct

SEQ ID NO: 1282629 - DNA, 15 bp, Homo sapiens
ctaacagtggatctc

SEQ ID NO: 1282630 - DNA, 15 bp, Homo sapiens
actaacagtggatct

SEQ ID NO: 1282631 - DNA, 15 bp, Homo sapiens
gactaacagtggatc

SEQ ID NO: 1282632 - DNA, 15 bp, Homo sapiens
agactaacagtggat

SEQ ID NO: 1282633 - DNA, 15 bp, Homo sapiens
cagactaacagtgga

SEQ ID NO: 1282634 - DNA, 15 bp, Homo sapiens
tcagactaacagtgg

SEQ ID NO: 1282635 - DNA, 15 bp, Homo sapiens
atcagactaacagtg

SEQ ID NO: 1282636 - DNA, 15 bp, Homo sapiens
catcagactaacagt

SEQ ID NO: 1282637 - DNA, 15 bp, Homo sapiens
ccatcagactaacag

SEQ ID NO: 1282638 - DNA, 15 bp, Homo sapiens
cccatcagactaaca

SEQ ID NO: 1282639 - DNA, 15 bp, Homo sapiens
gcccatcagactaac

SEQ ID NO: 1282640 - DNA, 15 bp, Homo sapiens
agcccatcagactaa

SEQ ID NO: 1282641 - DNA, 15 bp, Homo sapiens
aagcccatcagacta

SEQ ID NO: 1282642 - DNA, 15 bp, Homo sapiens
gaagcccatcagact

SEQ ID NO: 1282643 - DNA, 15 bp, Homo sapiens
cgaagcccatcagac

SEQ ID NO: 1282644 - DNA, 15 bp, Homo sapiens
gcgaagcccatcaga

SEQ ID NO: 1282645 - DNA, 15 bp, Homo sapiens
agcgaagcccatcag

SEQ ID NO: 1282646 - DNA, 15 bp, Homo sapiens
aagcgaagcccatca

SEQ ID NO: 1282647 - DNA, 15 bp, Homo sapiens
aaagcgaagcccatc

SEQ ID NO: 1282648 - DNA, 15 bp, Homo sapiens
caaagcgaagcccat

SEQ ID NO: 1282649 - DNA, 15 bp, Homo sapiens
acaaagcgaagccca

SEQ ID NO: 1282650 - DNA, 15 bp, Homo sapiens
cacaaagcgaagccc

SEQ ID NO: 1282651 - DNA, 15 bp, Homo sapiens
ccacaaagcgaagcc

SEQ ID NO: 1282652 - DNA, 15 bp, Homo sapiens
cccacaaagcgaagc

SEQ ID NO: 1282653 - DNA, 15 bp, Homo sapiens
acccacaaagcgaag

SEQ ID NO: 1282654 - DNA, 15 bp, Homo sapiens
tacccacaaagcgaa

SEQ ID NO: 1282655 - DNA, 15 bp, Homo sapiens
ttacccacaaagcga

SEQ ID NO: 1282656 - DNA, 15 bp, Homo sapiens
gttacccacaaagcg

SEQ ID NO: 1282657 - DNA, 15 bp, Homo sapiens
ggttacccacaaagc

SEQ ID NO: 1282658 - DNA, 15 bp, Homo sapiens
gggttacccacaaag

SEQ ID NO: 1282659 - DNA, 15 bp, Homo sapiens
agggttacccacaaa

SEQ ID NO: 1282660 - DNA, 15 bp, Homo sapiens
tagggttacccacaa

SEQ ID NO: 1282661 - DNA, 15 bp, Homo sapiens
gtagggttacccaca

SEQ ID NO: 1282662 - DNA, 15 bp, Homo sapiens
ggtagggttacccac

SEQ ID NO: 1282663 - DNA, 15 bp, Homo sapiens
aggtagggttaccca

SEQ ID NO: 1282664 - DNA, 15 bp, Homo sapiens
aaggtagggttaccc

SEQ ID NO: 1282665 - DNA, 15 bp, Homo sapiens
aaaggtagggttacc

SEQ ID NO: 1282666 - DNA, 15 bp, Homo sapiens
gaaaggtagggttac

SEQ ID NO: 1282667 - DNA, 15 bp, Homo sapiens
agaaaggtagggtta

SEQ ID NO: 1282668 - DNA, 15 bp, Homo sapiens
gagaaaggtagggtt

SEQ ID NO: 1282669 - DNA, 15 bp, Homo sapiens
agagaaaggtagggt

SEQ ID NO: 1282670 - DNA, 15 bp, Homo sapiens
gagagaaaggtaggg

SEQ ID NO: 1282671 - DNA, 15 bp, Homo sapiens
agagagaaaggtagg

SEQ ID NO: 1282672 - DNA, 15 bp, Homo sapiens
cagagagaaaggtag

SEQ ID NO: 1282673 - DNA, 15 bp, Homo sapiens
ccagagagaaaggta

SEQ ID NO: 1282674 - DNA, 15 bp, Homo sapiens
gccagagagaaaggt

SEQ ID NO: 1282675 - DNA, 15 bp, Homo sapiens
agccagagagaaagg

SEQ ID NO: 1282676 - DNA, 15 bp, Homo sapiens
cagccagagagaaag

SEQ ID NO: 1282677 - DNA, 15 bp, Homo sapiens
gcagccagagagaaa

SEQ ID NO: 1282678 - DNA, 15 bp, Homo sapiens
ggcagccagagagaa

SEQ ID NO: 1282679 - DNA, 15 bp, Homo sapiens
aggcagccagagaga

SEQ ID NO: 1282680 - DNA, 15 bp, Homo sapiens
aaggcagccagagag

SEQ ID NO: 1282681 - DNA, 15 bp, Homo sapiens
taaggcagccagaga

SEQ ID NO: 1282682 - DNA, 15 bp, Homo sapiens
ttaaggcagccagag

SEQ ID NO: 1282683 - DNA, 15 bp, Homo sapiens
gttaaggcagccaga

SEQ ID NO: 1282684 - DNA, 15 bp, Homo sapiens
tgttaaggcagccag

SEQ ID NO: 1282685 - DNA, 15 bp, Homo sapiens
atgttaaggcagcca

SEQ ID NO: 1282686 - DNA, 15 bp, Homo sapiens
aatgttaaggcagcc

SEQ ID NO: 1282687 - DNA, 15 bp, Homo sapiens
aaatgttaaggcagc

SEQ ID NO: 1282688 - DNA, 15 bp, Homo sapiens
aaaatgttaaggcag

SEQ ID NO: 1282689 - DNA, 15 bp, Homo sapiens
aaaaatgttaaggca

SEQ ID NO: 1282690 - DNA, 15 bp, Homo sapiens
aaaaaatgttaaggc

SEQ ID NO: 1282691 - DNA, 15 bp, Homo sapiens
gaaaaaatgttaagg

SEQ ID NO: 1282692 - DNA, 15 bp, Homo sapiens
aggaaaaaatgttaa

SEQ ID NO: 1282693 - DNA, 15 bp, Homo sapiens
aaggaaaaaatgtta

SEQ ID NO: 1282694 - DNA, 15 bp, Homo sapiens
gaaggaaaaaatgtt

SEQ ID NO: 1282695 - DNA, 15 bp, Homo sapiens
tgaaggaaaaaatgt

SEQ ID NO: 1282696 - DNA, 15 bp, Homo sapiens
atgaaggaaaaaatg

SEQ ID NO: 1282697 - DNA, 15 bp, Homo sapiens
aatgaaggaaaaaat

SEQ ID NO: 1282698 - DNA, 15 bp, Homo sapiens
aaatgaaggaaaaaa

SEQ ID NO: 1282699 - DNA, 15 bp, Homo sapiens
gaaatgaaggaaaaa

SEQ ID NO: 1282700 - DNA, 15 bp, Homo sapiens
tgaaatgaaggaaaa

SEQ ID NO: 1282701 - DNA, 15 bp, Homo sapiens
ttgaaatgaaggaaa

SEQ ID NO: 1282702 - DNA, 15 bp, Homo sapiens
gttgaaatgaaggaa

SEQ ID NO: 1282703 - DNA, 15 bp, Homo sapiens
agttgaaatgaagga

SEQ ID NO: 1282704 - DNA, 15 bp, Homo sapiens
aagttgaaatgaagg

SEQ ID NO: 1282705 - DNA, 15 bp, Homo sapiens
aaagttgaaatgaag

SEQ ID NO: 1282706 - DNA, 15 bp, Homo sapiens
caaagttgaaatgaa

SEQ ID NO: 1282707 - DNA, 15 bp, Homo sapiens
ccaaagttgaaatga

SEQ ID NO: 1282708 - DNA, 15 bp, Homo sapiens
accaaagttgaaatg

SEQ ID NO: 1282709 - DNA, 15 bp, Homo sapiens
caccaaagttgaaat

SEQ ID NO: 1282710 - DNA, 15 bp, Homo sapiens
tcaccaaagttgaaa

SEQ ID NO: 1282711 - DNA, 15 bp, Homo sapiens
ttcaccaaagttgaa

SEQ ID NO: 1282712 - DNA, 15 bp, Homo sapiens
attcaccaaagttga

SEQ ID NO: 1282713 - DNA, 15 bp, Homo sapiens
gattcaccaaagttg

SEQ ID NO: 1282714 - DNA, 15 bp, Homo sapiens
agattcaccaaagtt

SEQ ID NO: 1282715 - DNA, 15 bp, Homo sapiens
cagattcaccaaagt

SEQ ID NO: 1282716 - DNA, 15 bp, Homo sapiens
tcagattcaccaaag

SEQ ID NO: 1282717 - DNA, 15 bp, Homo sapiens
gtcagattcaccaaa

SEQ ID NO: 1282718 - DNA, 15 bp, Homo sapiens
tgtcagattcaccaa

SEQ ID NO: 1282719 - DNA, 15 bp, Homo sapiens
ttgtcagattcacca

SEQ ID NO: 1282720 - DNA, 15 bp, Homo sapiens
attgtcagattcacc

SEQ ID NO: 1282721 - DNA, 15 bp, Homo sapiens
aattgtcagattcac

SEQ ID NO: 1282722 - DNA, 15 bp, Homo sapiens
taattgtcagattca

SEQ ID NO: 1282723 - DNA, 15 bp, Homo sapiens
ataattgtcagattc

SEQ ID NO: 1282724 - DNA, 15 bp, Homo sapiens
cataattgtcagatt

SEQ ID NO: 1282725 - DNA, 15 bp, Homo sapiens
acataattgtcagat

SEQ ID NO: 1282726 - DNA, 15 bp, Homo sapiens
cacataattgtcaga

SEQ ID NO: 1282727 - DNA, 15 bp, Homo sapiens
acacataattgtcag

SEQ ID NO: 1282728 - DNA, 15 bp, Homo sapiens
gacacataattgtca

SEQ ID NO: 1282729 - DNA, 15 bp, Homo sapiens
ggacacataattgtc

SEQ ID NO: 1282730 - DNA, 15 bp, Homo sapiens
aggacacataattgt

SEQ ID NO: 1282731 - DNA, 15 bp, Homo sapiens
caggacacataattg

SEQ ID NO: 1282732 - DNA, 15 bp, Homo sapiens
ccaggacacataatt

SEQ ID NO: 1282733 - DNA, 15 bp, Homo sapiens
tccaggacacataat

SEQ ID NO: 1282734 - DNA, 15 bp, Homo sapiens
ctccaggacacataa

SEQ ID NO: 1282735 - DNA, 15 bp, Homo sapiens
actccaggacacata

SEQ ID NO: 1282736 - DNA, 15 bp, Homo sapiens
aactccaggacacat

SEQ ID NO: 1282737 - DNA, 15 bp, Homo sapiens
caactccaggacaca

SEQ ID NO: 1282738 - DNA, 15 bp, Homo sapiens
gcaactccaggacac

SEQ ID NO: 1282739 - DNA, 15 bp, Homo sapiens
agcaactccaggaca

SEQ ID NO: 1282740 - DNA, 15 bp, Homo sapiens
gagcaactccaggac

SEQ ID NO: 1282741 - DNA, 15 bp, Homo sapiens
agagcaactccagga

SEQ ID NO: 1282742 - DNA, 15 bp, Homo sapiens
aagagcaactccagg

SEQ ID NO: 1282743 - DNA, 15 bp, Homo sapiens
gaagagcaactccag

SEQ ID NO: 1282744 - DNA, 15 bp, Homo sapiens
agaagagcaactcca

SEQ ID NO: 1282745 - DNA, 15 bp, Homo sapiens
gagaagagcaactcc

SEQ ID NO: 1282746 - DNA, 15 bp, Homo sapiens
cgagaagagcaactc

SEQ ID NO: 1282747 - DNA, 15 bp, Homo sapiens
tcgagaagagcaact

SEQ ID NO: 1282748 - DNA, 15 bp, Homo sapiens
ctcgagaagagcaac

SEQ ID NO: 1282749 - DNA, 15 bp, Homo sapiens
cctcgagaagagcaa

SEQ ID NO: 1282750 - DNA, 15 bp, Homo sapiens
tcctcgagaagagca

SEQ ID NO: 1282751 - DNA, 15 bp, Homo sapiens
ctcctcgagaagagc

SEQ ID NO: 1282752 - DNA, 15 bp, Homo sapiens
actcctcgagaagag

SEQ ID NO: 1282753 - DNA, 15 bp, Homo sapiens
tactcctcgagaaga

SEQ ID NO: 1282754 - DNA, 15 bp, Homo sapiens
atactcctcgagaag

SEQ ID NO: 1282755 - DNA, 15 bp, Homo sapiens
gatactcctcgagaa

SEQ ID NO: 1282756 - DNA, 15 bp, Homo sapiens
agatactcctcgaga

SEQ ID NO: 1282757 - DNA, 15 bp, Homo sapiens
aagatactcctcgag

SEQ ID NO: 1282758 - DNA, 15 bp, Homo sapiens
aaagatactcctcga

SEQ ID NO: 1282759 - DNA, 15 bp, Homo sapiens
caaagatactcctcg

SEQ ID NO: 1282760 - DNA, 15 bp, Homo sapiens
acaaagatactcctc

SEQ ID NO: 1282761 - DNA, 15 bp, Homo sapiens
cacaaagatactcct

SEQ ID NO: 1282762 - DNA, 15 bp, Homo sapiens
ccacaaagatactcc

SEQ ID NO: 1282763 - DNA, 15 bp, Homo sapiens
gccacaaagatactc

SEQ ID NO: 1282764 - DNA, 15 bp, Homo sapiens
tgccacaaagatact

SEQ ID NO: 1282765 - DNA, 15 bp, Homo sapiens
atgccacaaagatac

SEQ ID NO: 1282766 - DNA, 15 bp, Homo sapiens
aatgccacaaagata

SEQ ID NO: 1282767 - DNA, 15 bp, Homo sapiens
gaatgccacaaagat

SEQ ID NO: 1282768 - DNA, 15 bp, Homo sapiens
agaatgccacaaaga

SEQ ID NO: 1282769 - DNA, 15 bp, Homo sapiens
gagaatgccacaaag

SEQ ID NO: 1282770 - DNA, 15 bp, Homo sapiens
agagaatgccacaaa

SEQ ID NO: 1282771 - DNA, 15 bp, Homo sapiens
cagagaatgccacaa

SEQ ID NO: 1282772 - DNA, 15 bp, Homo sapiens
acagagaatgccaca

SEQ ID NO: 1282773 - DNA, 15 bp, Homo sapiens
tacagagaatgccac

SEQ ID NO: 1282774 - DNA, 15 bp, Homo sapiens
atacagagaatgcca

SEQ ID NO: 1282775 - DNA, 15 bp, Homo sapiens
aatacagagaatgcc

SEQ ID NO: 1282776 - DNA, 15 bp, Homo sapiens
aaatacagagaatgc

SEQ ID NO: 1282777 - DNA, 15 bp, Homo sapiens
gaaatacagagaatg

SEQ ID NO: 1282778 - DNA, 15 bp, Homo sapiens
ggaaatacagagaat

SEQ ID NO: 1282779 - DNA, 15 bp, Homo sapiens
aggaaatacagagaa

SEQ ID NO: 1282780 - DNA, 15 bp, Homo sapiens
caggaaatacagaga

SEQ ID NO: 1282781 - DNA, 15 bp, Homo sapiens
tcaggaaatacagag

SEQ ID NO: 1282782 - DNA, 15 bp, Homo sapiens
ttcaggaaatacaga

SEQ ID NO: 1282783 - DNA, 15 bp, Homo sapiens
attcaggaaatacag

SEQ ID NO: 1282784 - DNA, 15 bp, Homo sapiens
aattcaggaaataca

SEQ ID NO: 1282785 - DNA, 15 bp, Homo sapiens
aaattcaggaaatac

SEQ ID NO: 1282786 - DNA, 15 bp, Homo sapiens
caaattcaggaaata

SEQ ID NO: 1282787 - DNA, 15 bp, Homo sapiens
tcaaattcaggaaat

SEQ ID NO: 1282788 - DNA, 15 bp, Homo sapiens
ttcaaattcaggaaa

SEQ ID NO: 1282789 - DNA, 15 bp, Homo sapiens
attcaaattcaggaa

SEQ ID NO: 1282790 - DNA, 15 bp, Homo sapiens
cattcaaattcagga

SEQ ID NO: 1282791 - DNA, 15 bp, Homo sapiens
acattcaaattcagg

SEQ ID NO: 1282792 - DNA, 15 bp, Homo sapiens
aacattcaaattcag

SEQ ID NO: 1282793 - DNA, 15 bp, Homo sapiens
caacattcaaattca

SEQ ID NO: 1282794 - DNA, 15 bp, Homo sapiens
ccaacattcaaattc

SEQ ID NO: 1282795 - DNA, 15 bp, Homo sapiens
gccaacattcaaatt

SEQ ID NO: 1282796 - DNA, 15 bp, Homo sapiens
ggccaacattcaaat

SEQ ID NO: 1282797 - DNA, 15 bp, Homo sapiens
aggccaacattcaaa

SEQ ID NO: 1282798 - DNA, 15 bp, Homo sapiens
caggccaacattcaa

SEQ ID NO: 1282799 - DNA, 15 bp, Homo sapiens
gcaggccaacattca

SEQ ID NO: 1282800 - DNA, 15 bp, Homo sapiens
ggcaggccaacattc

SEQ ID NO: 1282801 - DNA, 15 bp, Homo sapiens
aggcaggccaacatt

SEQ ID NO: 1282802 - DNA, 15 bp, Homo sapiens
aaggcaggccaacat

SEQ ID NO: 1282803 - DNA, 15 bp, Homo sapiens
caaggcaggccaaca

SEQ ID NO: 1282804 - DNA, 15 bp, Homo sapiens
gcaaggcaggccaac

SEQ ID NO: 1282805 - DNA, 15 bp, Homo sapiens
agcaaggcaggccaa

SEQ ID NO: 1282806 - DNA, 15 bp, Homo sapiens
tagcaaggcaggcca

SEQ ID NO: 1282807 - DNA, 15 bp, Homo sapiens
ctagcaaggcaggcc

SEQ ID NO: 1282808 - DNA, 15 bp, Homo sapiens
cctagcaaggcaggc

SEQ ID NO: 1282809 - DNA, 15 bp, Homo sapiens
acctagcaaggcagg

SEQ ID NO: 1282810 - DNA, 15 bp, Homo sapiens
aacctagcaaggcag

SEQ ID NO: 1282811 - DNA, 15 bp, Homo sapiens
caacctagcaaggca

SEQ ID NO: 1282812 - DNA, 15 bp, Homo sapiens
ccaacctagcaaggc

SEQ ID NO: 1282813 - DNA, 15 bp, Homo sapiens
cccaacctagcaagg

SEQ ID NO: 1282814 - DNA, 15 bp, Homo sapiens
ccccaacctagcaag

SEQ ID NO: 1282815 - DNA, 15 bp, Homo sapiens
tccccaacctagcaa

SEQ ID NO: 1282816 - DNA, 15 bp, Homo sapiens
ttccccaacctagca

SEQ ID NO: 1282817 - DNA, 15 bp, Homo sapiens
cttccccaacctagc

SEQ ID NO: 1282818 - DNA, 15 bp, Homo sapiens
acttccccaacctag

SEQ ID NO: 1282819 - DNA, 15 bp, Homo sapiens
aacttccccaaccta

SEQ ID NO: 1282820 - DNA, 15 bp, Homo sapiens
gaacttccccaacct

SEQ ID NO: 1282821 - DNA, 15 bp, Homo sapiens
agaacttccccaacc

SEQ ID NO: 1282822 - DNA, 15 bp, Homo sapiens
gagaacttccccaac

SEQ ID NO: 1282823 - DNA, 15 bp, Homo sapiens
ggagaacttccccaa

SEQ ID NO: 1282824 - DNA, 15 bp, Homo sapiens
aggagaacttcccca

SEQ ID NO: 1282825 - DNA, 15 bp, Homo sapiens
caggagaacttcccc

SEQ ID NO: 1282826 - DNA, 15 bp, Homo sapiens
acaggagaacttccc

SEQ ID NO: 1282827 - DNA, 15 bp, Homo sapiens
tacaggagaacttcc

SEQ ID NO: 1282828 - DNA, 15 bp, Homo sapiens
atacaggagaacttc

SEQ ID NO: 1282829 - DNA, 15 bp, Homo sapiens
tatacaggagaactt

SEQ ID NO: 1282830 - DNA, 15 bp, Homo sapiens
ttatacaggagaact

SEQ ID NO: 1282831 - DNA, 15 bp, Homo sapiens
attatacaggagaac

SEQ ID NO: 1282832 - DNA, 15 bp, Homo sapiens
tattatacaggagaa

SEQ ID NO: 1282833 - DNA, 15 bp, Homo sapiens
atattatacaggaga

SEQ ID NO: 1282834 - DNA, 15 bp, Homo sapiens
gatattatacaggag

SEQ ID NO: 1282835 - DNA, 15 bp, Homo sapiens
ggatattatacagga

SEQ ID NO: 1282836 - DNA, 15 bp, Homo sapiens
aggatattatacagg

SEQ ID NO: 1282837 - DNA, 15 bp, Homo sapiens
caggatattatacag

SEQ ID NO: 1282838 - DNA, 15 bp, Homo sapiens
gcaggatattataca

SEQ ID NO: 1282839 - DNA, 15 bp, Homo sapiens
tgcaggatattatac

SEQ ID NO: 1282840 - DNA, 15 bp, Homo sapiens
ctgcaggatattata

SEQ ID NO: 1282841 - DNA, 15 bp, Homo sapiens
tctgcaggatattat

SEQ ID NO: 1282842 - DNA, 15 bp, Homo sapiens
ctctgcaggatatta

SEQ ID NO: 1282843 - DNA, 15 bp, Homo sapiens
actctgcaggatatt

SEQ ID NO: 1282844 - DNA, 15 bp, Homo sapiens
cactctgcaggatat

SEQ ID NO: 1282845 - DNA, 15 bp, Homo sapiens
acactctgcaggata

SEQ ID NO: 1282846 - DNA, 15 bp, Homo sapiens
aacactctgcaggat

SEQ ID NO: 1282847 - DNA, 15 bp, Homo sapiens
aaacactctgcagga

SEQ ID NO: 1282848 - DNA, 15 bp, Homo sapiens
aaaacactctgcagg

SEQ ID NO: 1282849 - DNA, 15 bp, Homo sapiens
gaaaacactctgcag

SEQ ID NO: 1282850 - DNA, 15 bp, Homo sapiens
ggaaaacactctgca

SEQ ID NO: 1282851 - DNA, 15 bp, Homo sapiens
tggaaaacactctgc

SEQ ID NO: 1282852 - DNA, 15 bp, Homo sapiens
ttggaaaacactctg

SEQ ID NO: 1282853 - DNA, 15 bp, Homo sapiens
gttggaaaacactct

SEQ ID NO: 1282854 - DNA, 15 bp, Homo sapiens
agttggaaaacactc

SEQ ID NO: 1282855 - DNA, 15 bp, Homo sapiens
aagttggaaaacact

SEQ ID NO: 1282856 - DNA, 15 bp, Homo sapiens
caagttggaaaacac

SEQ ID NO: 1282857 - DNA, 15 bp, Homo sapiens
ccaagttggaaaaca

SEQ ID NO: 1282858 - DNA, 15 bp, Homo sapiens
accaagttggaaaac

SEQ ID NO: 1282859 - DNA, 15 bp, Homo sapiens
aaccaagttggaaaa

SEQ ID NO: 1282860 - DNA, 15 bp, Homo sapiens
gaaccaagttggaaa

SEQ ID NO: 1282861 - DNA, 15 bp, Homo sapiens
ggaaccaagttggaa

SEQ ID NO: 1282862 - DNA, 15 bp, Homo sapiens
tggaaccaagttgga

SEQ ID NO: 1282863 - DNA, 15 bp, Homo sapiens
atggaaccaagttgg

SEQ ID NO: 1282864 - DNA, 15 bp, Homo sapiens
aatggaaccaagttg

SEQ ID NO: 1282865 - DNA, 15 bp, Homo sapiens
gaatggaaccaagtt

SEQ ID NO: 1282866 - DNA, 15 bp, Homo sapiens
agaatggaaccaagt

SEQ ID NO: 1282867 - DNA, 15 bp, Homo sapiens
gagaatggaaccaag

SEQ ID NO: 1282868 - DNA, 15 bp, Homo sapiens
ggagaatggaaccaa

SEQ ID NO: 1282869 - DNA, 15 bp, Homo sapiens
gggagaatggaacca

SEQ ID NO: 1282870 - DNA, 15 bp, Homo sapiens
agggagaatggaacc

SEQ ID NO: 1282871 - DNA, 15 bp, Homo sapiens
cagggagaatggaac

SEQ ID NO: 1282872 - DNA, 15 bp, Homo sapiens
acagggagaatggaa

SEQ ID NO: 1282873 - DNA, 15 bp, Homo sapiens
gacagggagaatgga

SEQ ID NO: 1282874 - DNA, 15 bp, Homo sapiens
tgacagggagaatgg

SEQ ID NO: 1282875 - DNA, 15 bp, Homo sapiens
gtgacagggagaatg

SEQ ID NO: 1282876 - DNA, 15 bp, Homo sapiens
agtgacagggagaat

SEQ ID NO: 1282877 - DNA, 15 bp, Homo sapiens
aagtgacagggagaa

SEQ ID NO: 1282878 - DNA, 15 bp, Homo sapiens
aaagtgacagggaga

SEQ ID NO: 1282879 - DNA, 15 bp, Homo sapiens
gaaagtgacagggag

SEQ ID NO: 1282880 - DNA, 15 bp, Homo sapiens
tgaaagtgacaggga

SEQ ID NO: 1282881 - DNA, 15 bp, Homo sapiens
ctgaaagtgacaggg

SEQ ID NO: 1282882 - DNA, 15 bp, Homo sapiens
cctgaaagtgacagg

SEQ ID NO: 1282883 - DNA, 15 bp, Homo sapiens
acctgaaagtgacag

SEQ ID NO: 1282884 - DNA, 15 bp, Homo sapiens
tacctgaaagtgaca

SEQ ID NO: 1282885 - DNA, 15 bp, Homo sapiens
gtacctgaaagtgac

SEQ ID NO: 1282886 - DNA, 15 bp, Homo sapiens
tgtacctgaaagtga

SEQ ID NO: 1282887 - DNA, 15 bp, Homo sapiens
gtgtacctgaaagtg

SEQ ID NO: 1282888 - DNA, 15 bp, Homo sapiens
ggtgtacctgaaagt

SEQ ID NO: 1282889 - DNA, 15 bp, Homo sapiens
tggtgtacctgaaag

SEQ ID NO: 1282890 - DNA, 15 bp, Homo sapiens
ttggtgtacctgaaa

SEQ ID NO: 1282891 - DNA, 15 bp, Homo sapiens
attggtgtacctgaa

SEQ ID NO: 1282892 - DNA, 15 bp, Homo sapiens
gattggtgtacctga

SEQ ID NO: 1282893 - DNA, 15 bp, Homo sapiens
tgattggtgtacctg

SEQ ID NO: 1282894 - DNA, 15 bp, Homo sapiens
ctgattggtgtacct

SEQ ID NO: 1282895 - DNA, 15 bp, Homo sapiens
tctgattggtgtacc

SEQ ID NO: 1282896 - DNA, 15 bp, Homo sapiens
atctgattggtgtac

SEQ ID NO: 1282897 - DNA, 15 bp, Homo sapiens
catctgattggtgta

SEQ ID NO: 1282898 - DNA, 15 bp, Homo sapiens
acatctgattggtgt

SEQ ID NO: 1282899 - DNA, 15 bp, Homo sapiens
tacatctgattggtg

SEQ ID NO: 1282900 - DNA, 15 bp, Homo sapiens
ctacatctgattggt

SEQ ID NO: 1282901 - DNA, 15 bp, Homo sapiens
tctacatctgattgg

SEQ ID NO: 1282902 - DNA, 15 bp, Homo sapiens
atctacatctgattg

SEQ ID NO: 1282903 - DNA, 15 bp, Homo sapiens
aatctacatctgatt

SEQ ID NO: 1282904 - DNA, 15 bp, Homo sapiens
aaatctacatctgat

SEQ ID NO: 1282905 - DNA, 15 bp, Homo sapiens
caaatctacatctga

SEQ ID NO: 1282906 - DNA, 15 bp, Homo sapiens
ccaaatctacatctg

SEQ ID NO: 1282907 - DNA, 15 bp, Homo sapiens
accaaatctacatct

SEQ ID NO: 1282908 - DNA, 15 bp, Homo sapiens
gaccaaatctacatc

SEQ ID NO: 1282909 - DNA, 15 bp, Homo sapiens
agaccaaatctacat

SEQ ID NO: 1282910 - DNA, 15 bp, Homo sapiens
aagaccaaatctaca

SEQ ID NO: 1282911 - DNA, 15 bp, Homo sapiens
aaagaccaaatctac

SEQ ID NO: 1282912 - DNA, 15 bp, Homo sapiens
aaaagaccaaatcta

SEQ ID NO: 1282913 - DNA, 15 bp, Homo sapiens
gaaaagaccaaatct

SEQ ID NO: 1282914 - DNA, 15 bp, Homo sapiens
tgaaaagaccaaatc

SEQ ID NO: 1282915 - DNA, 15 bp, Homo sapiens
gtgaaaagaccaaat

SEQ ID NO: 1282916 - DNA, 15 bp, Homo sapiens
tgtgaaaagaccaaa

SEQ ID NO: 1282917 - DNA, 15 bp, Homo sapiens
ctgtgaaaagaccaa

SEQ ID NO: 1282918 - DNA, 15 bp, Homo sapiens
tctgtgaaaagacca

SEQ ID NO: 1282919 - DNA, 15 bp, Homo sapiens
ctctgtgaaaagacc

SEQ ID NO: 1282920 - DNA, 15 bp, Homo sapiens
actctgtgaaaagac

SEQ ID NO: 1282921 - DNA, 15 bp, Homo sapiens
gactctgtgaaaaga

SEQ ID NO: 1282922 - DNA, 15 bp, Homo sapiens
ggactctgtgaaaag

SEQ ID NO: 1282923 - DNA, 15 bp, Homo sapiens
cggactctgtgaaaa

SEQ ID NO: 1282924 - DNA, 15 bp, Homo sapiens
ccggactctgtgaaa

SEQ ID NO: 1282925 - DNA, 15 bp, Homo sapiens
accggactctgtgaa

SEQ ID NO: 1282926 - DNA, 15 bp, Homo sapiens
taccggactctgtga

SEQ ID NO: 1282927 - DNA, 15 bp, Homo sapiens
ataccggactctgtg

SEQ ID NO: 1282928 - DNA, 15 bp, Homo sapiens
aataccggactctgt

SEQ ID NO: 1282929 - DNA, 15 bp, Homo sapiens
aaataccggactctg

SEQ ID NO: 1282930 - DNA, 15 bp, Homo sapiens
gaaataccggactct

SEQ ID NO: 1282931 - DNA, 15 bp, Homo sapiens
agaaataccggactc

SEQ ID NO: 1282932 - DNA, 15 bp, Homo sapiens
aagaaataccggact

SEQ ID NO: 1282933 - DNA, 15 bp, Homo sapiens
caagaaataccggac

SEQ ID NO: 1282934 - DNA, 15 bp, Homo sapiens
acaagaaataccgga

SEQ ID NO: 1282935 - DNA, 15 bp, Homo sapiens
tacaagaaataccgg

SEQ ID NO: 1282936 - DNA, 15 bp, Homo sapiens
ctacaagaaataccg

SEQ ID NO: 1282937 - DNA, 15 bp, Homo sapiens
cctacaagaaatacc

SEQ ID NO: 1282938 - DNA, 15 bp, Homo sapiens
gcctacaagaaatac

SEQ ID NO: 1282939 - DNA, 15 bp, Homo sapiens
agcctacaagaaata

SEQ ID NO: 1282940 - DNA, 15 bp, Homo sapiens
aagcctacaagaaat

SEQ ID NO: 1282941 - DNA, 15 bp, Homo sapiens
aaagcctacaagaaa

SEQ ID NO: 1282942 - DNA, 15 bp, Homo sapiens
taaagcctacaagaa

SEQ ID NO: 1282943 - DNA, 15 bp, Homo sapiens
ataaagcctacaaga

SEQ ID NO: 1282944 - DNA, 15 bp, Homo sapiens
aataaagcctacaag

SEQ ID NO: 1282945 - DNA, 15 bp, Homo sapiens
aaataaagcctacaa

SEQ ID NO: 1282946 - DNA, 15 bp, Homo sapiens
caaataaagcctaca

SEQ ID NO: 1282947 - DNA, 15 bp, Homo sapiens
acaaataaagcctac

SEQ ID NO: 1282948 - DNA, 15 bp, Homo sapiens
aacaaataaagccta

SEQ ID NO: 1282949 - DNA, 15 bp, Homo sapiens
aaacaaataaagcct

SEQ ID NO: 1282950 - DNA, 15 bp, Homo sapiens
gaaacaaataaagcc

SEQ ID NO: 1282951 - DNA, 15 bp, Homo sapiens
agaaacaaataaagc

SEQ ID NO: 1282952 - DNA, 15 bp, Homo sapiens
aagaaacaaataaag

SEQ ID NO: 1282953 - DNA, 15 bp, Homo sapiens
aaagaaacaaataaa

SEQ ID NO: 1282954 - DNA, 15 bp, Homo sapiens
aaaagaaacaaataa

SEQ ID NO: 1282955 - DNA, 15 bp, Homo sapiens
aaaaagaaacaaata

SEQ ID NO: 1282956 - DNA, 15 bp, Homo sapiens
taaaaagaaacaaat

SEQ ID NO: 1282957 - DNA, 15 bp, Homo sapiens
gtaaaaagaaacaaa

SEQ ID NO: 1282958 - DNA, 15 bp, Homo sapiens
agtaaaaagaaacaa

SEQ ID NO: 1282959 - DNA, 15 bp, Homo sapiens
gagtaaaaagaaaca

SEQ ID NO: 1282960 - DNA, 15 bp, Homo sapiens
agagtaaaaagaaac

SEQ ID NO: 1282961 - DNA, 15 bp, Homo sapiens
aagagtaaaaagaaa

SEQ ID NO: 1282962 - DNA, 15 bp, Homo sapiens
aaagagtaaaaagaa

SEQ ID NO: 1282963 - DNA, 15 bp, Homo sapiens
aaaagagtaaaaaga

SEQ ID NO: 1282964 - DNA, 15 bp, Homo sapiens
aaaaagagtaaaaag

SEQ ID NO: 1282965 - DNA, 15 bp, Homo sapiens
aaaaaagagtaaaaa

SEQ ID NO: 1282966 - DNA, 15 bp, Homo sapiens
gaaaaaagagtaaaa

SEQ ID NO: 1282967 - DNA, 15 bp, Homo sapiens
agaaaaaagagtaaa

SEQ ID NO: 1282968 - DNA, 15 bp, Homo sapiens
gagaaaaaagagtaa

SEQ ID NO: 1282969 - DNA, 15 bp, Homo sapiens
agagaaaaaagagta

SEQ ID NO: 1282970 - DNA, 15 bp, Homo sapiens
tagagaaaaaagagt

SEQ ID NO: 1282971 - DNA, 15 bp, Homo sapiens
ttagagaaaaaagag

SEQ ID NO: 1282972 - DNA, 15 bp, Homo sapiens
tttagagaaaaaaga

SEQ ID NO: 1282973 - DNA, 15 bp, Homo sapiens
gtttagagaaaaaag

SEQ ID NO: 1282974 - DNA, 15 bp, Homo sapiens
agtttagagaaaaaa

SEQ ID NO: 1282975 - DNA, 15 bp, Homo sapiens
aagtttagagaaaaa

SEQ ID NO: 1282976 - DNA, 15 bp, Homo sapiens
gaagtttagagaaaa

SEQ ID NO: 1282977 - DNA, 15 bp, Homo sapiens
agaagtttagagaaa

SEQ ID NO: 1282978 - DNA, 15 bp, Homo sapiens
gagaagtttagagaa

SEQ ID NO: 1282979 - DNA, 15 bp, Homo sapiens
agagaagtttagaga

SEQ ID NO: 1282980 - DNA, 15 bp, Homo sapiens
aagagaagtttagag

SEQ ID NO: 1282981 - DNA, 15 bp, Homo sapiens
gaagagaagtttaga

SEQ ID NO: 1282982 - DNA, 15 bp, Homo sapiens
agaagagaagtttag

SEQ ID NO: 1282983 - DNA, 15 bp, Homo sapiens
aagaagagaagttta

SEQ ID NO: 1282984 - DNA, 15 bp, Homo sapiens
caagaagagaagttt

SEQ ID NO: 1282985 - DNA, 15 bp, Homo sapiens
gcaagaagagaagtt

SEQ ID NO: 1282986 - DNA, 15 bp, Homo sapiens
agcaagaagagaagt

SEQ ID NO: 1282987 - DNA, 15 bp, Homo sapiens
aagcaagaagagaag

SEQ ID NO: 1282988 - DNA, 15 bp, Homo sapiens
gaagcaagaagagaa

SEQ ID NO: 1282989 - DNA, 15 bp, Homo sapiens
tgaagcaagaagaga

SEQ ID NO: 1282990 - DNA, 15 bp, Homo sapiens
atgaagcaagaagag

SEQ ID NO: 1282991 - DNA, 15 bp, Homo sapiens
aatgaagcaagaaga

SEQ ID NO: 1282992 - DNA, 15 bp, Homo sapiens
aaatgaagcaagaag

SEQ ID NO: 1282993 - DNA, 15 bp, Homo sapiens
gaaatgaagcaagaa

SEQ ID NO: 1282994 - DNA, 15 bp, Homo sapiens
tgaaatgaagcaaga

SEQ ID NO: 1282995 - DNA, 15 bp, Homo sapiens
atgaaatgaagcaag

SEQ ID NO: 1282996 - DNA, 15 bp, Homo sapiens
aatgaaatgaagcaa

SEQ ID NO: 1282997 - DNA, 15 bp, Homo sapiens
gaatgaaatgaagca

SEQ ID NO: 1282998 - DNA, 15 bp, Homo sapiens
tgaatgaaatgaagc

SEQ ID NO: 1282999 - DNA, 15 bp, Homo sapiens
atgaatgaaatgaag

SEQ ID NO: 1283000 - DNA, 15 bp, Homo sapiens
aatgaatgaaatgaa

SEQ ID NO: 1283001 - DNA, 15 bp, Homo sapiens
aaatgaatgaaatga

SEQ ID NO: 1283002 - DNA, 15 bp, Homo sapiens
caaatgaatgaaatg

SEQ ID NO: 1283003 - DNA, 15 bp, Homo sapiens
tcaaatgaatgaaat

SEQ ID NO: 1283004 - DNA, 15 bp, Homo sapiens
atcaaatgaatgaaa

SEQ ID NO: 1283005 - DNA, 15 bp, Homo sapiens
gatcaaatgaatgaa

SEQ ID NO: 1283006 - DNA, 15 bp, Homo sapiens
agatcaaatgaatga

SEQ ID NO: 1283007 - DNA, 15 bp, Homo sapiens
aagatcaaatgaatg

SEQ ID NO: 1283008 - DNA, 15 bp, Homo sapiens
gaagatcaaatgaat

SEQ ID NO: 1283009 - DNA, 15 bp, Homo sapiens
ggaagatcaaatgaa

SEQ ID NO: 1283010 - DNA, 15 bp, Homo sapiens
tggaagatcaaatga

SEQ ID NO: 1283011 - DNA, 15 bp, Homo sapiens
atggaagatcaaatg

SEQ ID NO: 1283012 - DNA, 15 bp, Homo sapiens
gatggaagatcaaat

SEQ ID NO: 1283013 - DNA, 15 bp, Homo sapiens
tgatggaagatcaaa

SEQ ID NO: 1283014 - DNA, 15 bp, Homo sapiens
gtgatggaagatcaa

SEQ ID NO: 1283015 - DNA, 15 bp, Homo sapiens
agtgatggaagatca

SEQ ID NO: 1283016 - DNA, 15 bp, Homo sapiens
cagtgatggaagatc

SEQ ID NO: 1283017 - DNA, 15 bp, Homo sapiens
tcagtgatggaagat

SEQ ID NO: 1283018 - DNA, 15 bp, Homo sapiens
atcagtgatggaaga

SEQ ID NO: 1283019 - DNA, 15 bp, Homo sapiens
tatcagtgatggaag

SEQ ID NO: 1283020 - DNA, 15 bp, Homo sapiens
gtatcagtgatggaa

SEQ ID NO: 1283021 - DNA, 15 bp, Homo sapiens
ggtatcagtgatgga

SEQ ID NO: 1283022 - DNA, 15 bp, Homo sapiens
gggtatcagtgatgg

SEQ ID NO: 1283023 - DNA, 15 bp, Homo sapiens
agggtatcagtgatg

SEQ ID NO: 1283024 - DNA, 15 bp, Homo sapiens
aagggtatcagtgat

SEQ ID NO: 1283025 - DNA, 15 bp, Homo sapiens
aaagggtatcagtga

SEQ ID NO: 1283026 - DNA, 15 bp, Homo sapiens
gaaagggtatcagtg

SEQ ID NO: 1283027 - DNA, 15 bp, Homo sapiens
agaaagggtatcagt

SEQ ID NO: 1283028 - DNA, 15 bp, Homo sapiens
aagaaagggtatcag

SEQ ID NO: 1283029 - DNA, 15 bp, Homo sapiens
gaagaaagggtatca

SEQ ID NO: 1283030 - DNA, 15 bp, Homo sapiens
ggaagaaagggtatc

SEQ ID NO: 1283031 - DNA, 15 bp, Homo sapiens
tggaagaaagggtat

SEQ ID NO: 1283032 - DNA, 15 bp, Homo sapiens
ctggaagaaagggta

SEQ ID NO: 1283033 - DNA, 15 bp, Homo sapiens
actggaagaaagggt

SEQ ID NO: 1283034 - DNA, 15 bp, Homo sapiens
aactggaagaaaggg

SEQ ID NO: 1283035 - DNA, 15 bp, Homo sapiens
caactggaagaaagg

SEQ ID NO: 1283036 - DNA, 15 bp, Homo sapiens
tcaactggaagaaag

SEQ ID NO: 1283037 - DNA, 15 bp, Homo sapiens
atcaactggaagaaa

SEQ ID NO: 1283038 - DNA, 15 bp, Homo sapiens
gatcaactggaagaa

SEQ ID NO: 1283039 - DNA, 15 bp, Homo sapiens
cgatcaactggaaga

SEQ ID NO: 1283040 - DNA, 15 bp, Homo sapiens
tcgatcaactggaag

SEQ ID NO: 1283041 - DNA, 15 bp, Homo sapiens
ttcgatcaactggaa

SEQ ID NO: 1283042 - DNA, 15 bp, Homo sapiens
attcgatcaactgga

SEQ ID NO: 1283043 - DNA, 15 bp, Homo sapiens
gattcgatcaactgg

SEQ ID NO: 1283044 - DNA, 15 bp, Homo sapiens
tgattcgatcaactg

SEQ ID NO: 1283045 - DNA, 15 bp, Homo sapiens
ctgattcgatcaact

SEQ ID NO: 1283046 - DNA, 15 bp, Homo sapiens
gctgattcgatcaac

SEQ ID NO: 1283047 - DNA, 15 bp, Homo sapiens
agctgattcgatcaa

SEQ ID NO: 1283048 - DNA, 15 bp, Homo sapiens
cagctgattcgatca

SEQ ID NO: 1283049 - DNA, 15 bp, Homo sapiens
gcagctgattcgatc

SEQ ID NO: 1283050 - DNA, 15 bp, Homo sapiens
agcagctgattcgat

SEQ ID NO: 1283051 - DNA, 15 bp, Homo sapiens
cagcagctgattcga

SEQ ID NO: 1283052 - DNA, 15 bp, Homo sapiens
tcagcagctgattcg

SEQ ID NO: 1283053 - DNA, 15 bp, Homo sapiens
ttcagcagctgattc

SEQ ID NO: 1283054 - DNA, 15 bp, Homo sapiens
cttcagcagctgatt

SEQ ID NO: 1283055 - DNA, 15 bp, Homo sapiens
gcttcagcagctgat

SEQ ID NO: 1283056 - DNA, 15 bp, Homo sapiens
agcttcagcagctga

SEQ ID NO: 1283057 - DNA, 15 bp, Homo sapiens
aagcttcagcagctg

SEQ ID NO: 1283058 - DNA, 15 bp, Homo sapiens
caagcttcagcagct

SEQ ID NO: 1283059 - DNA, 15 bp, Homo sapiens
acaagcttcagcagc

SEQ ID NO: 1283060 - DNA, 15 bp, Homo sapiens
cacaagcttcagcag

SEQ ID NO: 1283061 - DNA, 15 bp, Homo sapiens
gcacaagcttcagca

SEQ ID NO: 1283062 - DNA, 15 bp, Homo sapiens
tgcacaagcttcagc

SEQ ID NO: 1283063 - DNA, 15 bp, Homo sapiens
atgcacaagcttcag

SEQ ID NO: 1283064 - DNA, 15 bp, Homo sapiens
aatgcacaagcttca

SEQ ID NO: 1283065 - DNA, 15 bp, Homo sapiens
gaatgcacaagcttc

SEQ ID NO: 1283066 - DNA, 15 bp, Homo sapiens
tgaatgcacaagctt

SEQ ID NO: 1283067 - DNA, 15 bp, Homo sapiens
atgaatgcacaagct

SEQ ID NO: 1283068 - DNA, 15 bp, Homo sapiens
gatgaatgcacaagc

SEQ ID NO: 1283069 - DNA, 15 bp, Homo sapiens
tgatgaatgcacaag

SEQ ID NO: 1283070 - DNA, 15 bp, Homo sapiens
gtgatgaatgcacaa

SEQ ID NO: 1283071 - DNA, 15 bp, Homo sapiens
cgtgatgaatgcaca

SEQ ID NO: 1283072 - DNA, 15 bp, Homo sapiens
acgtgatgaatgcac

SEQ ID NO: 1283073 - DNA, 15 bp, Homo sapiens
tacgtgatgaatgca

SEQ ID NO: 1283074 - DNA, 15 bp, Homo sapiens
ctacgtgatgaatgc

SEQ ID NO: 1283075 - DNA, 15 bp, Homo sapiens
actacgtgatgaatg

SEQ ID NO: 1283076 - DNA, 15 bp, Homo sapiens
aactacgtgatgaat

SEQ ID NO: 1283077 - DNA, 15 bp, Homo sapiens
gaactacgtgatgaa

SEQ ID NO: 1283078 - DNA, 15 bp, Homo sapiens
agaactacgtgatga

SEQ ID NO: 1283079 - DNA, 15 bp, Homo sapiens
gagaactacgtgatg

SEQ ID NO: 1283080 - DNA, 15 bp, Homo sapiens
cgagaactacgtgat

SEQ ID NO: 1283081 - DNA, 15 bp, Homo sapiens
acgagaactacgtga

SEQ ID NO: 1283082 - DNA, 15 bp, Homo sapiens
cacgagaactacgtg

SEQ ID NO: 1283083 - DNA, 15 bp, Homo sapiens
gcacgagaactacgt

SEQ ID NO: 1283084 - DNA, 15 bp, Homo sapiens
ggcacgagaactacg

SEQ ID NO: 1283085 - DNA, 15 bp, Homo sapiens
tggcacgagaactac

SEQ ID NO: 1283086 - DNA, 15 bp, Homo sapiens
atggcacgagaacta

SEQ ID NO: 1283087 - DNA, 15 bp, Homo sapiens
catggcacgagaact

SEQ ID NO: 1283088 - DNA, 15 bp, Homo sapiens
ccatggcacgagaac

SEQ ID NO: 1283089 - DNA, 15 bp, Homo sapiens
accatggcacgagaa

SEQ ID NO: 1283090 - DNA, 15 bp, Homo sapiens
aaccatggcacgaga

SEQ ID NO: 1283091 - DNA, 15 bp, Homo sapiens
aaaccatggcacgag

SEQ ID NO: 1283092 - DNA, 15 bp, Homo sapiens
aaaaccatggcacga

SEQ ID NO: 1283093 - DNA, 15 bp, Homo sapiens
gaaaaccatggcacg

SEQ ID NO: 1283094 - DNA, 15 bp, Homo sapiens
tgaaaaccatggcac

SEQ ID NO: 1283095 - DNA, 15 bp, Homo sapiens
ctgaaaaccatggca

SEQ ID NO: 1283096 - DNA, 15 bp, Homo sapiens
gctgaaaaccatggc

SEQ ID NO: 1283097 - DNA, 15 bp, Homo sapiens
agctgaaaaccatgg

SEQ ID NO: 1283098 - DNA, 15 bp, Homo sapiens
gagctgaaaaccatg

SEQ ID NO: 1283099 - DNA, 15 bp, Homo sapiens
ggagctgaaaaccat

SEQ ID NO: 1283100 - DNA, 15 bp, Homo sapiens
tggagctgaaaacca

SEQ ID NO: 1283101 - DNA, 15 bp, Homo sapiens
atggagctgaaaacc

SEQ ID NO: 1283102 - DNA, 15 bp, Homo sapiens
gatggagctgaaaac

SEQ ID NO: 1283103 - DNA, 15 bp, Homo sapiens
tgatggagctgaaaa

SEQ ID NO: 1283104 - DNA, 15 bp, Homo sapiens
ctgatggagctgaaa

SEQ ID NO: 1283105 - DNA, 15 bp, Homo sapiens
cctgatggagctgaa

SEQ ID NO: 1283106 - DNA, 15 bp, Homo sapiens
acctgatggagctga

SEQ ID NO: 1283107 - DNA, 15 bp, Homo sapiens
aacctgatggagctg

SEQ ID NO: 1283108 - DNA, 15 bp, Homo sapiens
taacctgatggagct

SEQ ID NO: 1283109 - DNA, 15 bp, Homo sapiens
ataacctgatggagc

SEQ ID NO: 1283110 - DNA, 15 bp, Homo sapiens
aataacctgatggag

SEQ ID NO: 1283111 - DNA, 15 bp, Homo sapiens
aaataacctgatgga

SEQ ID NO: 1283112 - DNA, 15 bp, Homo sapiens
taaataacctgatgg

SEQ ID NO: 1283113 - DNA, 15 bp, Homo sapiens
ttaaataacctgatg

SEQ ID NO: 1283114 - DNA, 15 bp, Homo sapiens
cttaaataacctgat

SEQ ID NO: 1283115 - DNA, 15 bp, Homo sapiens
ccttaaataacctga

SEQ ID NO: 1283116 - DNA, 15 bp, Homo sapiens
tccttaaataacctg

SEQ ID NO: 1283117 - DNA, 15 bp, Homo sapiens
atccttaaataacct

SEQ ID NO: 1283118 - DNA, 15 bp, Homo sapiens
aatccttaaataacc

SEQ ID NO: 1283119 - DNA, 15 bp, Homo sapiens
aaatccttaaataac

SEQ ID NO: 1283120 - DNA, 15 bp, Homo sapiens
gaaatccttaaataa

SEQ ID NO: 1283121 - DNA, 15 bp, Homo sapiens
agaaatccttaaata

SEQ ID NO: 1283122 - DNA, 15 bp, Homo sapiens
gagaaatccttaaat

SEQ ID NO: 1283123 - DNA, 15 bp, Homo sapiens
tagagaaatccttaa

SEQ ID NO: 1283124 - DNA, 15 bp, Homo sapiens
gtagagaaatcctta

SEQ ID NO: 1283125 - DNA, 15 bp, Homo sapiens
tgtagagaaatcctt

SEQ ID NO: 1283126 - DNA, 15 bp, Homo sapiens
gtgtagagaaatcct

SEQ ID NO: 1283127 - DNA, 15 bp, Homo sapiens
agtgtagagaaatcc

SEQ ID NO: 1283128 - DNA, 15 bp, Homo sapiens
cagtgtagagaaatc

SEQ ID NO: 1283129 - DNA, 15 bp, Homo sapiens
ccagtgtagagaaat

SEQ ID NO: 1283130 - DNA, 15 bp, Homo sapiens
accagtgtagagaaa

SEQ ID NO: 1283131 - DNA, 15 bp, Homo sapiens
aaccagtgtagagaa

SEQ ID NO: 1283132 - DNA, 15 bp, Homo sapiens
taaccagtgtagaga

SEQ ID NO: 1283133 - DNA, 15 bp, Homo sapiens
ataaccagtgtagag

SEQ ID NO: 1283134 - DNA, 15 bp, Homo sapiens
aataaccagtgtaga

SEQ ID NO: 1283135 - DNA, 15 bp, Homo sapiens
gaataaccagtgtag

SEQ ID NO: 1283136 - DNA, 15 bp, Homo sapiens
agaataaccagtgta

SEQ ID NO: 1283137 - DNA, 15 bp, Homo sapiens
tagaataaccagtgt

SEQ ID NO: 1283138 - DNA, 15 bp, Homo sapiens
ctagaataaccagtg

SEQ ID NO: 1283139 - DNA, 15 bp, Homo sapiens
actagaataaccagt

SEQ ID NO: 1283140 - DNA, 15 bp, Homo sapiens
aactagaataaccag

SEQ ID NO: 1283141 - DNA, 15 bp, Homo sapiens
caactagaataacca

SEQ ID NO: 1283142 - DNA, 15 bp, Homo sapiens
ccaactagaataacc

SEQ ID NO: 1283143 - DNA, 15 bp, Homo sapiens
gccaactagaataac

SEQ ID NO: 1283144 - DNA, 15 bp, Homo sapiens
ggccaactagaataa

SEQ ID NO: 1283145 - DNA, 15 bp, Homo sapiens
tggccaactagaata

SEQ ID NO: 1283146 - DNA, 15 bp, Homo sapiens
ctggccaactagaat

SEQ ID NO: 1283147 - DNA, 15 bp, Homo sapiens
actggccaactagaa

SEQ ID NO: 1283148 - DNA, 15 bp, Homo sapiens
aactggccaactaga

SEQ ID NO: 1283149 - DNA, 15 bp, Homo sapiens
caactggccaactag

SEQ ID NO: 1283150 - DNA, 15 bp, Homo sapiens
acaactggccaacta

SEQ ID NO: 1283151 - DNA, 15 bp, Homo sapiens
gacaactggccaact

SEQ ID NO: 1283152 - DNA, 15 bp, Homo sapiens
agacaactggccaac

SEQ ID NO: 1283153 - DNA, 15 bp, Homo sapiens
tagacaactggccaa

SEQ ID NO: 1283154 - DNA, 15 bp, Homo sapiens
ttagacaactggcca

SEQ ID NO: 1283155 - DNA, 15 bp, Homo sapiens
attagacaactggcc

SEQ ID NO: 1283156 - DNA, 15 bp, Homo sapiens
gattagacaactggc

SEQ ID NO: 1283157 - DNA, 15 bp, Homo sapiens
agattagacaactgg

SEQ ID NO: 1283158 - DNA, 15 bp, Homo sapiens
aagattagacaactg

SEQ ID NO: 1283159 - DNA, 15 bp, Homo sapiens
aaagattagacaact

SEQ ID NO: 1283160 - DNA, 15 bp, Homo sapiens
aaaagattagacaac

SEQ ID NO: 1283161 - DNA, 15 bp, Homo sapiens
aaaaagattagacaa

SEQ ID NO: 1283162 - DNA, 15 bp, Homo sapiens
aaaaaagattagaca

SEQ ID NO: 1283163 - DNA, 15 bp, Homo sapiens
gaaaaaagattagac

SEQ ID NO: 1283164 - DNA, 15 bp, Homo sapiens
tgaaaaaagattaga

SEQ ID NO: 1283165 - DNA, 15 bp, Homo sapiens
ttgaaaaaagattag

SEQ ID NO: 1283166 - DNA, 15 bp, Homo sapiens
cttgaaaaaagatta

SEQ ID NO: 1283167 - DNA, 15 bp, Homo sapiens
ccttgaaaaaagatt

SEQ ID NO: 1283168 - DNA, 15 bp, Homo sapiens
accttgaaaaaagat

SEQ ID NO: 1283169 - DNA, 15 bp, Homo sapiens
aaccttgaaaaaaga

SEQ ID NO: 1283170 - DNA, 15 bp, Homo sapiens
aaaccttgaaaaaag

SEQ ID NO: 1283171 - DNA, 15 bp, Homo sapiens
aaaaccttgaaaaaa

SEQ ID NO: 1283172 - DNA, 15 bp, Homo sapiens
aaaaaccttgaaaaa

SEQ ID NO: 1283173 - DNA, 15 bp, Homo sapiens
taaaaaccttgaaaa

SEQ ID NO: 1283174 - DNA, 15 bp, Homo sapiens
ctaaaaaccttgaaa

SEQ ID NO: 1283175 - DNA, 15 bp, Homo sapiens
gctaaaaaccttgaa

SEQ ID NO: 1283176 - DNA, 15 bp, Homo sapiens
agctaaaaaccttga

SEQ ID NO: 1283177 - DNA, 15 bp, Homo sapiens
aagctaaaaaccttg

SEQ ID NO: 1283178 - DNA, 15 bp, Homo sapiens
gaagctaaaaacctt

SEQ ID NO: 1283179 - DNA, 15 bp, Homo sapiens
agaagctaaaaacct

SEQ ID NO: 1283180 - DNA, 15 bp, Homo sapiens
aagaagctaaaaacc

SEQ ID NO: 1283181 - DNA, 15 bp, Homo sapiens
aaagaagctaaaaac

SEQ ID NO: 1283182 - DNA, 15 bp, Homo sapiens
taaagaagctaaaaa

SEQ ID NO: 1283183 - DNA, 15 bp, Homo sapiens
ataaagaagctaaaa

SEQ ID NO: 1283184 - DNA, 15 bp, Homo sapiens
cataaagaagctaaa

SEQ ID NO: 1283185 - DNA, 15 bp, Homo sapiens
acataaagaagctaa

SEQ ID NO: 1283186 - DNA, 15 bp, Homo sapiens
aacataaagaagcta

SEQ ID NO: 1283187 - DNA, 15 bp, Homo sapiens
caacataaagaagct

SEQ ID NO: 1283188 - DNA, 15 bp, Homo sapiens
ccaacataaagaagc

SEQ ID NO: 1283189 - DNA, 15 bp, Homo sapiens
cccaacataaagaag

SEQ ID NO: 1283190 - DNA, 15 bp, Homo sapiens
acccaacataaagaa

SEQ ID NO: 1283191 - DNA, 15 bp, Homo sapiens
aacccaacataaaga

SEQ ID NO: 1283192 - DNA, 15 bp, Homo sapiens
taacccaacataaag

SEQ ID NO: 1283193 - DNA, 15 bp, Homo sapiens
ctaacccaacataaa

SEQ ID NO: 1283194 - DNA, 15 bp, Homo sapiens
tctaacccaacataa

SEQ ID NO: 1283195 - DNA, 15 bp, Homo sapiens
ttctaacccaacata

SEQ ID NO: 1283196 - DNA, 15 bp, Homo sapiens
gttctaacccaacat

SEQ ID NO: 1283197 - DNA, 15 bp, Homo sapiens
agttctaacccaaca

SEQ ID NO: 1283198 - DNA, 15 bp, Homo sapiens
aagttctaacccaac

SEQ ID NO: 1283199 - DNA, 15 bp, Homo sapiens
gaagttctaacccaa

SEQ ID NO: 1283200 - DNA, 15 bp, Homo sapiens
ggaagttctaaccca

SEQ ID NO: 1283201 - DNA, 15 bp, Homo sapiens
aggaagttctaaccc

SEQ ID NO: 1283202 - DNA, 15 bp, Homo sapiens
aaggaagttctaacc

SEQ ID NO: 1283203 - DNA, 15 bp, Homo sapiens
gaaggaagttctaac

SEQ ID NO: 1283204 - DNA, 15 bp, Homo sapiens
agaaggaagttctaa

SEQ ID NO: 1283205 - DNA, 15 bp, Homo sapiens
aagaaggaagttcta

SEQ ID NO: 1283206 - DNA, 15 bp, Homo sapiens
aaagaaggaagttct

SEQ ID NO: 1283207 - DNA, 15 bp, Homo sapiens
taaagaaggaagttc

SEQ ID NO: 1283208 - DNA, 15 bp, Homo sapiens
ctaaagaaggaagtt

SEQ ID NO: 1283209 - DNA, 15 bp, Homo sapiens
gctaaagaaggaagt

SEQ ID NO: 1283210 - DNA, 15 bp, Homo sapiens
agctaaagaaggaag

SEQ ID NO: 1283211 - DNA, 15 bp, Homo sapiens
gagctaaagaaggaa

SEQ ID NO: 1283212 - DNA, 15 bp, Homo sapiens
cgagctaaagaagga

SEQ ID NO: 1283213 - DNA, 15 bp, Homo sapiens
ccgagctaaagaagg

SEQ ID NO: 1283214 - DNA, 15 bp, Homo sapiens
tccgagctaaagaag

SEQ ID NO: 1283215 - DNA, 15 bp, Homo sapiens
ctccgagctaaagaa

SEQ ID NO: 1283216 - DNA, 15 bp, Homo sapiens
tctccgagctaaaga

SEQ ID NO: 1283217 - DNA, 15 bp, Homo sapiens
ttctccgagctaaag

SEQ ID NO: 1283218 - DNA, 15 bp, Homo sapiens
cttctccgagctaaa

SEQ ID NO: 1283219 - DNA, 15 bp, Homo sapiens
acttctccgagctaa

SEQ ID NO: 1283220 - DNA, 15 bp, Homo sapiens
aacttctccgagcta

SEQ ID NO: 1283221 - DNA, 15 bp, Homo sapiens
aaacttctccgagct

SEQ ID NO: 1283222 - DNA, 15 bp, Homo sapiens
caaacttctccgagc

SEQ ID NO: 1283223 - DNA, 15 bp, Homo sapiens
tcaaacttctccgag

SEQ ID NO: 1283224 - DNA, 15 bp, Homo sapiens
atcaaacttctccga

SEQ ID NO: 1283225 - DNA, 15 bp, Homo sapiens
gatcaaacttctccg

SEQ ID NO: 1283226 - DNA, 15 bp, Homo sapiens
tgatcaaacttctcc

SEQ ID NO: 1283227 - DNA, 15 bp, Homo sapiens
atgatcaaacttctc

SEQ ID NO: 1283228 - DNA, 15 bp, Homo sapiens
ctgatttctatgttt

SEQ ID NO: 1283229 - DNA, 15 bp, Homo sapiens
cctgatttctatgtt

SEQ ID NO: 1283230 - DNA, 15 bp, Homo sapiens
acctgatttctatgt

SEQ ID NO: 1283231 - DNA, 15 bp, Homo sapiens
tacctgatttctatg

SEQ ID NO: 1283232 - DNA, 15 bp, Homo sapiens
ttacctgatttctat

SEQ ID NO: 1283233 - DNA, 15 bp, Homo sapiens
tttacctgatttcta

SEQ ID NO: 1283234 - DNA, 15 bp, Homo sapiens
ctttacctgatttct

SEQ ID NO: 1283235 - DNA, 15 bp, Homo sapiens
actttacctgatttc

SEQ ID NO: 1283236 - DNA, 15 bp, Homo sapiens
aactttacctgattt

SEQ ID NO: 1283237 - DNA, 15 bp, Homo sapiens
aaactttacctgatt

SEQ ID NO: 1283238 - DNA, 15 bp, Homo sapiens
gaaactttacctgat

SEQ ID NO: 1283239 - DNA, 15 bp, Homo sapiens
agaaactttacctga

SEQ ID NO: 1283240 - DNA, 15 bp, Homo sapiens
aagaaactttacctg

SEQ ID NO: 1283241 - DNA, 15 bp, Homo sapiens
caagaaactttacct

SEQ ID NO: 1283242 - DNA, 15 bp, Homo sapiens
acaagaaactttacc

SEQ ID NO: 1283243 - DNA, 15 bp, Homo sapiens
tacaagaaactttac

SEQ ID NO: 1283244 - DNA, 15 bp, Homo sapiens
atacaagaaacttta

SEQ ID NO: 1283245 - DNA, 15 bp, Homo sapiens
tatacaagaaacttt

SEQ ID NO: 1283246 - DNA, 15 bp, Homo sapiens
tatttatacaagaaa

SEQ ID NO: 1283247 - DNA, 15 bp, Homo sapiens
atatttatacaagaa

SEQ ID NO: 1283248 - DNA, 15 bp, Homo sapiens
tatatttatacaaga

SEQ ID NO: 1283249 - DNA, 15 bp, Homo sapiens
ttatatttatacaag

SEQ ID NO: 1283250 - DNA, 15 bp, Homo sapiens
cttatatttatacaa

SEQ ID NO: 1283251 - DNA, 15 bp, Homo sapiens
gcttatatttataca

SEQ ID NO: 1283252 - DNA, 15 bp, Homo sapiens
ggcttatatttatac

SEQ ID NO: 1283253 - DNA, 15 bp, Homo sapiens
aggcttatatttata

SEQ ID NO: 1283254 - DNA, 15 bp, Homo sapiens
gaggcttatatttat

SEQ ID NO: 1283255 - DNA, 15 bp, Homo sapiens
agaggcttatattta

SEQ ID NO: 1283256 - DNA, 15 bp, Homo sapiens
cagaggcttatattt

SEQ ID NO: 1283257 - DNA, 15 bp, Homo sapiens
gcagaggcttatatt

SEQ ID NO: 1283258 - DNA, 15 bp, Homo sapiens
ggcagaggcttatat

SEQ ID NO: 1283259 - DNA, 15 bp, Homo sapiens
tggcagaggcttata

SEQ ID NO: 1283260 - DNA, 15 bp, Homo sapiens
atggcagaggcttat

SEQ ID NO: 1283261 - DNA, 15 bp, Homo sapiens
tatggcagaggctta

SEQ ID NO: 1283262 - DNA, 15 bp, Homo sapiens
ttatggcagaggctt

SEQ ID NO: 1283263 - DNA, 15 bp, Homo sapiens
tttatggcagaggct

SEQ ID NO: 1283264 - DNA, 15 bp, Homo sapiens
ttttatggcagaggc

SEQ ID NO: 1283265 - DNA, 15 bp, Homo sapiens
cttttatggcagagg

SEQ ID NO: 1283266 - DNA, 15 bp, Homo sapiens
ccttttatggcagag

SEQ ID NO: 1283267 - DNA, 15 bp, Homo sapiens
tccttttatggcaga

SEQ ID NO: 1283268 - DNA, 15 bp, Homo sapiens
ttccttttatggcag

SEQ ID NO: 1283269 - DNA, 15 bp, Homo sapiens
tttccttttatggca

SEQ ID NO: 1283270 - DNA, 15 bp, Homo sapiens
gtttccttttatggc

SEQ ID NO: 1283271 - DNA, 15 bp, Homo sapiens
cgtttccttttatgg

SEQ ID NO: 1283272 - DNA, 15 bp, Homo sapiens
tcgtttccttttatg

SEQ ID NO: 1283273 - DNA, 15 bp, Homo sapiens
ttcgtttccttttat

SEQ ID NO: 1283274 - DNA, 15 bp, Homo sapiens
attcgtttcctttta

SEQ ID NO: 1283275 - DNA, 15 bp, Homo sapiens
aattcgtttcctttt

SEQ ID NO: 1283276 - DNA, 15 bp, Homo sapiens
gaattcgtttccttt

SEQ ID NO: 1283277 - DNA, 15 bp, Homo sapiens
agaattcgtttcctt

SEQ ID NO: 1283278 - DNA, 15 bp, Homo sapiens
cagaattcgtttcct

SEQ ID NO: 1283279 - DNA, 15 bp, Homo sapiens
ccagaattcgtttcc

SEQ ID NO: 1283280 - DNA, 15 bp, Homo sapiens
tccagaattcgtttc

SEQ ID NO: 1283281 - DNA, 15 bp, Homo sapiens
atccagaattcgttt

SEQ ID NO: 1283282 - DNA, 15 bp, Homo sapiens
aatccagaattcgtt

SEQ ID NO: 1283283 - DNA, 15 bp, Homo sapiens
aaatccagaattcgt

SEQ ID NO: 1283284 - DNA, 15 bp, Homo sapiens
aaaatccagaattcg

SEQ ID NO: 1283285 - DNA, 15 bp, Homo sapiens
gaaaatccagaattc

SEQ ID NO: 1283286 - DNA, 15 bp, Homo sapiens
ggaaaatccagaatt

SEQ ID NO: 1283287 - DNA, 15 bp, Homo sapiens
aggaaaatccagaat

SEQ ID NO: 1283288 - DNA, 15 bp, Homo sapiens
gaggaaaatccagaa

SEQ ID NO: 1283289 - DNA, 15 bp, Homo sapiens
agaggaaaatccaga

SEQ ID NO: 1283290 - DNA, 15 bp, Homo sapiens
gagaggaaaatccag

SEQ ID NO: 1283291 - DNA, 15 bp, Homo sapiens
tgagaggaaaatcca

SEQ ID NO: 1283292 - DNA, 15 bp, Homo sapiens
ttgagaggaaaatcc

SEQ ID NO: 1283293 - DNA, 15 bp, Homo sapiens
attgagaggaaaatc

SEQ ID NO: 1283294 - DNA, 15 bp, Homo sapiens
tattgagaggaaaat

SEQ ID NO: 1283295 - DNA, 15 bp, Homo sapiens
ctattgagaggaaaa

SEQ ID NO: 1283296 - DNA, 15 bp, Homo sapiens
tctattgagaggaaa

SEQ ID NO: 1283297 - DNA, 15 bp, Homo sapiens
gtctattgagaggaa

SEQ ID NO: 1283298 - DNA, 15 bp, Homo sapiens
agtctattgagagga

SEQ ID NO: 1283299 - DNA, 15 bp, Homo sapiens
aagtctattgagagg

SEQ ID NO: 1283300 - DNA, 15 bp, Homo sapiens
aaagtctattgagag

SEQ ID NO: 1283301 - DNA, 15 bp, Homo sapiens
aaaagtctattgaga

SEQ ID NO: 1283302 - DNA, 15 bp, Homo sapiens
caaaagtctattgag

SEQ ID NO: 1283303 - DNA, 15 bp, Homo sapiens
acaaaagtctattga

SEQ ID NO: 1283304 - DNA, 15 bp, Homo sapiens
cacaaaagtctattg

SEQ ID NO: 1283305 - DNA, 15 bp, Homo sapiens
tcacaaaagtctatt

SEQ ID NO: 1283306 - DNA, 15 bp, Homo sapiens
ttcacaaaagtctat

SEQ ID NO: 1283307 - DNA, 15 bp, Homo sapiens
attcacaaaagtcta

SEQ ID NO: 1283308 - DNA, 15 bp, Homo sapiens
aattcacaaaagtct

SEQ ID NO: 1283309 - DNA, 15 bp, Homo sapiens
taattcacaaaagtc

SEQ ID NO: 1283310 - DNA, 15 bp, Homo sapiens
ctaattcacaaaagt

SEQ ID NO: 1283311 - DNA, 15 bp, Homo sapiens
actaattcacaaaag

SEQ ID NO: 1283312 - DNA, 15 bp, Homo sapiens
cactaattcacaaaa

SEQ ID NO: 1283313 - DNA, 15 bp, Homo sapiens
tcactaattcacaaa

SEQ ID NO: 1283314 - DNA, 15 bp, Homo sapiens
ctcactaattcacaa

SEQ ID NO: 1283315 - DNA, 15 bp, Homo sapiens
tctcactaattcaca

SEQ ID NO: 1283316 - DNA, 15 bp, Homo sapiens
ttctcactaattcac

SEQ ID NO: 1283317 - DNA, 15 bp, Homo sapiens
tttctcactaattca

SEQ ID NO: 1283318 - DNA, 15 bp, Homo sapiens
atttctcactaattc

SEQ ID NO: 1283319 - DNA, 15 bp, Homo sapiens
catttctcactaatt

SEQ ID NO: 1283320 - DNA, 15 bp, Homo sapiens
gcatttctcactaat

SEQ ID NO: 1283321 - DNA, 15 bp, Homo sapiens
agcatttctcactaa

SEQ ID NO: 1283322 - DNA, 15 bp, Homo sapiens
tagcatttctcacta

SEQ ID NO: 1283323 - DNA, 15 bp, Homo sapiens
ttagcatttctcact

SEQ ID NO: 1283324 - DNA, 15 bp, Homo sapiens
tttagcatttctcac

SEQ ID NO: 1283325 - DNA, 15 bp, Homo sapiens
ttttagcatttctca

SEQ ID NO: 1283326 - DNA, 15 bp, Homo sapiens
attttagcatttctc

SEQ ID NO: 1283327 - DNA, 15 bp, Homo sapiens
tattttagcatttct

SEQ ID NO: 1283328 - DNA, 15 bp, Homo sapiens
ttattttagcatttc

SEQ ID NO: 1283329 - DNA, 15 bp, Homo sapiens
tttattttagcattt

SEQ ID NO: 1283330 - DNA, 15 bp, Homo sapiens
ctttattttagcatt

SEQ ID NO: 1283331 - DNA, 15 bp, Homo sapiens
actttattttagcat

SEQ ID NO: 1283332 - DNA, 15 bp, Homo sapiens
tactttattttagca

SEQ ID NO: 1283333 - DNA, 15 bp, Homo sapiens
ttactttattttagc

SEQ ID NO: 1283334 - DNA, 15 bp, Homo sapiens
tttactttattttag

SEQ ID NO: 1283335 - DNA, 15 bp, Homo sapiens
ttttactttatttta

SEQ ID NO: 1283336 - DNA, 15 bp, Homo sapiens
gttttactttatttt

SEQ ID NO: 1283337 - DNA, 15 bp, Homo sapiens
tgttttactttattt

SEQ ID NO: 1283338 - DNA, 15 bp, Homo sapiens
ttgttttactttatt

SEQ ID NO: 1283339 - DNA, 15 bp, Homo sapiens
tttgttttactttat

SEQ ID NO: 1283340 - DNA, 15 bp, Homo sapiens
ttttgttttacttta

SEQ ID NO: 1283341 - DNA, 15 bp, Homo sapiens
tttttgttttacttt

SEQ ID NO: 1283342 - DNA, 15 bp, Homo sapiens
ctttttgttttactt

SEQ ID NO: 1283343 - DNA, 15 bp, Homo sapiens
tctttttgttttact

SEQ ID NO: 1283344 - DNA, 15 bp, Homo sapiens
ttctttttgttttac

SEQ ID NO: 1283345 - DNA, 15 bp, Homo sapiens
gttctttttgtttta

SEQ ID NO: 1283346 - DNA, 15 bp, Homo sapiens
agttctttttgtttt

SEQ ID NO: 1283347 - DNA, 15 bp, Homo sapiens
aagttctttttgttt

SEQ ID NO: 1283348 - DNA, 15 bp, Homo sapiens
caagttctttttgtt

SEQ ID NO: 1283349 - DNA, 15 bp, Homo sapiens
ccaagttctttttgt

SEQ ID NO: 1283350 - DNA, 15 bp, Homo sapiens
tccaagttctttttg

SEQ ID NO: 1283351 - DNA, 15 bp, Homo sapiens
gtccaagttcttttt

SEQ ID NO: 1283352 - DNA, 15 bp, Homo sapiens
ggtccaagttctttt

SEQ ID NO: 1283353 - DNA, 15 bp, Homo sapiens
tggtccaagttcttt

SEQ ID NO: 1283354 - DNA, 15 bp, Homo sapiens
ttggtccaagttctt

SEQ ID NO: 1283355 - DNA, 15 bp, Homo sapiens
tttggtccaagttct

SEQ ID NO: 1283356 - DNA, 15 bp, Homo sapiens
atttggtccaagttc

SEQ ID NO: 1283357 - DNA, 15 bp, Homo sapiens
tatttggtccaagtt

SEQ ID NO: 1283358 - DNA, 15 bp, Homo sapiens
ctatttggtccaagt

SEQ ID NO: 1283359 - DNA, 15 bp, Homo sapiens
actatttggtccaag

SEQ ID NO: 1283360 - DNA, 15 bp, Homo sapiens
cactatttggtccaa

SEQ ID NO: 1283361 - DNA, 15 bp, Homo sapiens
tcactatttggtcca

SEQ ID NO: 1283362 - DNA, 15 bp, Homo sapiens
ttcactatttggtcc

SEQ ID NO: 1283363 - DNA, 15 bp, Homo sapiens
gttcactatttggtc

SEQ ID NO: 1283364 - DNA, 15 bp, Homo sapiens
agttcactatttggt

SEQ ID NO: 1283365 - DNA, 15 bp, Homo sapiens
cagttcactatttgg

SEQ ID NO: 1283366 - DNA, 15 bp, Homo sapiens
gcagttcactatttg

SEQ ID NO: 1283367 - DNA, 15 bp, Homo sapiens
ggcagttcactattt

SEQ ID NO: 1283368 - DNA, 15 bp, Homo sapiens
tggcagttcactatt

SEQ ID NO: 1283369 - DNA, 15 bp, Homo sapiens
atggcagttcactat

SEQ ID NO: 1283370 - DNA, 15 bp, Homo sapiens
aatggcagttcacta

SEQ ID NO: 1283371 - DNA, 15 bp, Homo sapiens
gaatggcagttcact

SEQ ID NO: 1283372 - DNA, 15 bp, Homo sapiens
agaatggcagttcac

SEQ ID NO: 1283373 - DNA, 15 bp, Homo sapiens
gagaatggcagttca

SEQ ID NO: 1283374 - DNA, 15 bp, Homo sapiens
agagaatggcagttc

SEQ ID NO: 1283375 - DNA, 15 bp, Homo sapiens
gagagaatggcagtt

SEQ ID NO: 1283376 - DNA, 15 bp, Homo sapiens
tgagagaatggcagt

SEQ ID NO: 1283377 - DNA, 15 bp, Homo sapiens
atgagagaatggcag

SEQ ID NO: 1283378 - DNA, 15 bp, Homo sapiens
catgagagaatggca

SEQ ID NO: 1283379 - DNA, 15 bp, Homo sapiens
ccatgagagaatggc

SEQ ID NO: 1283380 - DNA, 15 bp, Homo sapiens
tccatgagagaatgg

SEQ ID NO: 1283381 - DNA, 15 bp, Homo sapiens
ctccatgagagaatg

SEQ ID NO: 1283382 - DNA, 15 bp, Homo sapiens
gctccatgagagaat

SEQ ID NO: 1283383 - DNA, 15 bp, Homo sapiens
ggctccatgagagaa

SEQ ID NO: 1283384 - DNA, 15 bp, Homo sapiens
cggctccatgagaga

SEQ ID NO: 1283385 - DNA, 15 bp, Homo sapiens
acggctccatgagag

SEQ ID NO: 1283386 - DNA, 15 bp, Homo sapiens
aacggctccatgaga

SEQ ID NO: 1283387 - DNA, 15 bp, Homo sapiens
taacggctccatgag

SEQ ID NO: 1283388 - DNA, 15 bp, Homo sapiens
ataacggctccatga

SEQ ID NO: 1283389 - DNA, 15 bp, Homo sapiens
cataacggctccatg

SEQ ID NO: 1283390 - DNA, 15 bp, Homo sapiens
tcataacggctccat

SEQ ID NO: 1283391 - DNA, 15 bp, Homo sapiens
ttcataacggctcca

SEQ ID NO: 1283392 - DNA, 15 bp, Homo sapiens
tttcataacggctcc

SEQ ID NO: 1283393 - DNA, 15 bp, Homo sapiens
ctttcataacggctc

SEQ ID NO: 1283394 - DNA, 15 bp, Homo sapiens
actttcataacggct

SEQ ID NO: 1283395 - DNA, 15 bp, Homo sapiens
cactttcataacggc

SEQ ID NO: 1283396 - DNA, 15 bp, Homo sapiens
acactttcataacgg

SEQ ID NO: 1283397 - DNA, 15 bp, Homo sapiens
tacactttcataacg

SEQ ID NO: 1283398 - DNA, 15 bp, Homo sapiens
atacactttcataac

SEQ ID NO: 1283399 - DNA, 15 bp, Homo sapiens
aatacactttcataa

SEQ ID NO: 1283400 - DNA, 15 bp, Homo sapiens
aaatacactttcata

SEQ ID NO: 1283401 - DNA, 15 bp, Homo sapiens
taaatacactttcat

SEQ ID NO: 1283402 - DNA, 15 bp, Homo sapiens
ataaatacactttca

SEQ ID NO: 1283403 - DNA, 15 bp, Homo sapiens
cataaatacactttc

SEQ ID NO: 1283404 - DNA, 15 bp, Homo sapiens
gcataaatacacttt

SEQ ID NO: 1283405 - DNA, 15 bp, Homo sapiens
agcataaatacactt

SEQ ID NO: 1283406 - DNA, 15 bp, Homo sapiens
cagcataaatacact

SEQ ID NO: 1283407 - DNA, 15 bp, Homo sapiens
acagcataaatacac

SEQ ID NO: 1283408 - DNA, 15 bp, Homo sapiens
tacagcataaataca

SEQ ID NO: 1283409 - DNA, 15 bp, Homo sapiens
atacagcataaatac

SEQ ID NO: 1283410 - DNA, 15 bp, Homo sapiens
aatacagcataaata

SEQ ID NO: 1283411 - DNA, 15 bp, Homo sapiens
aaatacagcataaat

SEQ ID NO: 1283412 - DNA, 15 bp, Homo sapiens
gaaatacagcataaa

SEQ ID NO: 1283413 - DNA, 15 bp, Homo sapiens
agaaatacagcataa

SEQ ID NO: 1283414 - DNA, 15 bp, Homo sapiens
aagaaatacagcata

SEQ ID NO: 1283415 - DNA, 15 bp, Homo sapiens
aaagaaatacagcat

SEQ ID NO: 1283416 - DNA, 15 bp, Homo sapiens
taaagaaatacagca

SEQ ID NO: 1283417 - DNA, 15 bp, Homo sapiens
ttaaagaaatacagc

SEQ ID NO: 1283418 - DNA, 15 bp, Homo sapiens
cttaaagaaatacag

SEQ ID NO: 1283419 - DNA, 15 bp, Homo sapiens
tcttaaagaaataca

SEQ ID NO: 1283420 - DNA, 15 bp, Homo sapiens
ctcttaaagaaatac

SEQ ID NO: 1283421 - DNA, 15 bp, Homo sapiens
cctcttaaagaaata

SEQ ID NO: 1283422 - DNA, 15 bp, Homo sapiens
acctcttaaagaaat

SEQ ID NO: 1283423 - DNA, 15 bp, Homo sapiens
tacctcttaaagaaa

SEQ ID NO: 1283424 - DNA, 15 bp, Homo sapiens
ctacctcttaaagaa

SEQ ID NO: 1283425 - DNA, 15 bp, Homo sapiens
gctacctcttaaaga

SEQ ID NO: 1283426 - DNA, 15 bp, Homo sapiens
tgctacctcttaaag

SEQ ID NO: 1283427 - DNA, 15 bp, Homo sapiens
ctgctacctcttaaa

SEQ ID NO: 1283428 - DNA, 15 bp, Homo sapiens
actgctacctcttaa

SEQ ID NO: 1283429 - DNA, 15 bp, Homo sapiens
aactgctacctctta

SEQ ID NO: 1283430 - DNA, 15 bp, Homo sapiens
aaactgctacctctt

SEQ ID NO: 1283431 - DNA, 15 bp, Homo sapiens
caaactgctacctct

SEQ ID NO: 1283432 - DNA, 15 bp, Homo sapiens
acaaactgctacctc

SEQ ID NO: 1283433 - DNA, 15 bp, Homo sapiens
cacaaactgctacct

SEQ ID NO: 1283434 - DNA, 15 bp, Homo sapiens
acacaaactgctacc

SEQ ID NO: 1283435 - DNA, 15 bp, Homo sapiens
gacacaaactgctac

SEQ ID NO: 1283436 - DNA, 15 bp, Homo sapiens
ggacacaaactgcta

SEQ ID NO: 1283437 - DNA, 15 bp, Homo sapiens
aggacacaaactgct

SEQ ID NO: 1283438 - DNA, 15 bp, Homo sapiens
caggacacaaactgc

SEQ ID NO: 1283439 - DNA, 15 bp, Homo sapiens
ccaggacacaaactg

SEQ ID NO: 1283440 - DNA, 15 bp, Homo sapiens
tccaggacacaaact

SEQ ID NO: 1283441 - DNA, 15 bp, Homo sapiens
ttccaggacacaaac

SEQ ID NO: 1283442 - DNA, 15 bp, Homo sapiens
tttccaggacacaaa

SEQ ID NO: 1283443 - DNA, 15 bp, Homo sapiens
ttttccaggacacaa

SEQ ID NO: 1283444 - DNA, 15 bp, Homo sapiens
tttttccaggacaca

SEQ ID NO: 1283445 - DNA, 15 bp, Homo sapiens
atttttccaggacac

SEQ ID NO: 1283446 - DNA, 15 bp, Homo sapiens
aatttttccaggaca

SEQ ID NO: 1283447 - DNA, 15 bp, Homo sapiens
aaatttttccaggac

SEQ ID NO: 1283448 - DNA, 15 bp, Homo sapiens
aaaatttttccagga

SEQ ID NO: 1283449 - DNA, 15 bp, Homo sapiens
gaaaatttttccagg

SEQ ID NO: 1283450 - DNA, 15 bp, Homo sapiens
tgaaaatttttccag

SEQ ID NO: 1283451 - DNA, 15 bp, Homo sapiens
atgaaaatttttcca

SEQ ID NO: 1283452 - DNA, 15 bp, Homo sapiens
aatgaaaatttttcc

SEQ ID NO: 1283453 - DNA, 15 bp, Homo sapiens
caatgaaaatttttc

SEQ ID NO: 1283454 - DNA, 15 bp, Homo sapiens
acaatgaaaattttt

SEQ ID NO: 1283455 - DNA, 15 bp, Homo sapiens
cacaatgaaaatttt

SEQ ID NO: 1283456 - DNA, 15 bp, Homo sapiens
acacaatgaaaattt

SEQ ID NO: 1283457 - DNA, 15 bp, Homo sapiens
gacacaatgaaaatt

SEQ ID NO: 1283458 - DNA, 15 bp, Homo sapiens
agacacaatgaaaat

SEQ ID NO: 1283459 - DNA, 15 bp, Homo sapiens
gagacacaatgaaaa

SEQ ID NO: 1283460 - DNA, 15 bp, Homo sapiens
agagacacaatgaaa

SEQ ID NO: 1283461 - DNA, 15 bp, Homo sapiens
gagagacacaatgaa

SEQ ID NO: 1283462 - DNA, 15 bp, Homo sapiens
tgagagacacaatga

SEQ ID NO: 1283463 - DNA, 15 bp, Homo sapiens
gtgagagacacaatg

SEQ ID NO: 1283464 - DNA, 15 bp, Homo sapiens
agtgagagacacaat

SEQ ID NO: 1283465 - DNA, 15 bp, Homo sapiens
tagtgagagacacaa

SEQ ID NO: 1283466 - DNA, 15 bp, Homo sapiens
atagtgagagacaca

SEQ ID NO: 1283467 - DNA, 15 bp, Homo sapiens
aatagtgagagacac

SEQ ID NO: 1283468 - DNA, 15 bp, Homo sapiens
gaatagtgagagaca

SEQ ID NO: 1283469 - DNA, 15 bp, Homo sapiens
tgaatagtgagagac

SEQ ID NO: 1283470 - DNA, 15 bp, Homo sapiens
atgaatagtgagaga

SEQ ID NO: 1283471 - DNA, 15 bp, Homo sapiens
catgaatagtgagag

SEQ ID NO: 1283472 - DNA, 15 bp, Homo sapiens
acatgaatagtgaga

SEQ ID NO: 1283473 - DNA, 15 bp, Homo sapiens
cacatgaatagtgag

SEQ ID NO: 1283474 - DNA, 15 bp, Homo sapiens
acacatgaatagtga

SEQ ID NO: 1283475 - DNA, 15 bp, Homo sapiens
tacacatgaatagtg

SEQ ID NO: 1283476 - DNA, 15 bp, Homo sapiens
ttacacatgaatagt

SEQ ID NO: 1283477 - DNA, 15 bp, Homo sapiens
cttacacatgaatag

SEQ ID NO: 1283478 - DNA, 15 bp, Homo sapiens
gcttacacatgaata

SEQ ID NO: 1283479 - DNA, 15 bp, Homo sapiens
agcttacacatgaat

SEQ ID NO: 1283480 - DNA, 15 bp, Homo sapiens
aagcttacacatgaa

SEQ ID NO: 1283481 - DNA, 15 bp, Homo sapiens
aaagcttacacatga

SEQ ID NO: 1283482 - DNA, 15 bp, Homo sapiens
gaaagcttacacatg

SEQ ID NO: 1283483 - DNA, 15 bp, Homo sapiens
agaaagcttacacat

SEQ ID NO: 1283484 - DNA, 15 bp, Homo sapiens
aagaaagcttacaca

SEQ ID NO: 1283485 - DNA, 15 bp, Homo sapiens
taagaaagcttacac

SEQ ID NO: 1283486 - DNA, 15 bp, Homo sapiens
ttaagaaagcttaca

SEQ ID NO: 1283487 - DNA, 15 bp, Homo sapiens
attaagaaagcttac

SEQ ID NO: 1283488 - DNA, 15 bp, Homo sapiens
aattaagaaagctta

SEQ ID NO: 1283489 - DNA, 15 bp, Homo sapiens
caattaagaaagctt

SEQ ID NO: 1283490 - DNA, 15 bp, Homo sapiens
acaattaagaaagct

SEQ ID NO: 1283491 - DNA, 15 bp, Homo sapiens
cacaattaagaaagc

SEQ ID NO: 1283492 - DNA, 15 bp, Homo sapiens
ccacaattaagaaag

SEQ ID NO: 1283493 - DNA, 15 bp, Homo sapiens
gccacaattaagaaa

SEQ ID NO: 1283494 - DNA, 15 bp, Homo sapiens
agccacaattaagaa

SEQ ID NO: 1283495 - DNA, 15 bp, Homo sapiens
cagccacaattaaga

SEQ ID NO: 1283496 - DNA, 15 bp, Homo sapiens
acagccacaattaag

SEQ ID NO: 1283497 - DNA, 15 bp, Homo sapiens
aacagccacaattaa

SEQ ID NO: 1283498 - DNA, 15 bp, Homo sapiens
taacagccacaatta

SEQ ID NO: 1283499 - DNA, 15 bp, Homo sapiens
ttaacagccacaatt

SEQ ID NO: 1283500 - DNA, 15 bp, Homo sapiens
attaacagccacaat

SEQ ID NO: 1283501 - DNA, 15 bp, Homo sapiens
tattaacagccacaa

SEQ ID NO: 1283502 - DNA, 15 bp, Homo sapiens
ttattaacagccaca

SEQ ID NO: 1283503 - DNA, 15 bp, Homo sapiens
tttattaacagccac

SEQ ID NO: 1283504 - DNA, 15 bp, Homo sapiens
ctttattaacagcca

SEQ ID NO: 1283505 - DNA, 15 bp, Homo sapiens
actttattaacagcc

SEQ ID NO: 1283506 - DNA, 15 bp, Homo sapiens
cactttattaacagc

SEQ ID NO: 1283507 - DNA, 15 bp, Homo sapiens
tcactttattaacag

SEQ ID NO: 1283508 - DNA, 15 bp, Homo sapiens
ttcactttattaaca

SEQ ID NO: 1283509 - DNA, 15 bp, Homo sapiens
gttcactttattaac

SEQ ID NO: 1283510 - DNA, 15 bp, Homo sapiens
tgttcactttattaa

SEQ ID NO: 1283511 - DNA, 15 bp, Homo sapiens
ctgttcactttatta

SEQ ID NO: 1283512 - DNA, 15 bp, Homo sapiens
tctgttcactttatt

SEQ ID NO: 1283513 - DNA, 15 bp, Homo sapiens
ttctgttcactttat

SEQ ID NO: 1283514 - DNA, 15 bp, Homo sapiens
tttctgttcacttta

SEQ ID NO: 1283515 - DNA, 15 bp, Homo sapiens
ttttctgttcacttt

SEQ ID NO: 1283516 - DNA, 15 bp, Homo sapiens
cttttctgttcactt

SEQ ID NO: 1283517 - DNA, 15 bp, Homo sapiens
gcttttctgttcact

SEQ ID NO: 1283518 - DNA, 15 bp, Homo sapiens
tgcttttctgttcac

SEQ ID NO: 1283519 - DNA, 15 bp, Homo sapiens
ttgcttttctgttca

SEQ ID NO: 1283520 - DNA, 15 bp, Homo sapiens
cttgcttttctgttc

SEQ ID NO: 1283521 - DNA, 15 bp, Homo sapiens
ccttgcttttctgtt

SEQ ID NO: 1283522 - DNA, 15 bp, Homo sapiens
tccttgcttttctgt

SEQ ID NO: 1283523 - DNA, 15 bp, Homo sapiens
atccttgcttttctg

SEQ ID NO: 1283524 - DNA, 15 bp, Homo sapiens
aatccttgcttttct

SEQ ID NO: 1283525 - DNA, 15 bp, Homo sapiens
aaatccttgcttttc

SEQ ID NO: 1283526 - DNA, 15 bp, Homo sapiens
caaatccttgctttt

SEQ ID NO: 1283527 - DNA, 15 bp, Homo sapiens
acaaatccttgcttt

SEQ ID NO: 1283528 - DNA, 15 bp, Homo sapiens
tacaaatccttgctt

SEQ ID NO: 1283529 - DNA, 15 bp, Homo sapiens
ttacaaatccttgct

SEQ ID NO: 1283530 - DNA, 15 bp, Homo sapiens
tttacaaatccttgc

SEQ ID NO: 1283531 - DNA, 15 bp, Homo sapiens
atttacaaatccttg

SEQ ID NO: 1283532 - DNA, 15 bp, Homo sapiens
tatttacaaatcctt

SEQ ID NO: 1283533 - DNA, 15 bp, Homo sapiens
ctatttacaaatcct

SEQ ID NO: 1283534 - DNA, 15 bp, Homo sapiens
cctatttacaaatcc

SEQ ID NO: 1283535 - DNA, 15 bp, Homo sapiens
gcctatttacaaatc

SEQ ID NO: 1283536 - DNA, 15 bp, Homo sapiens
agcctatttacaaat

SEQ ID NO: 1283537 - DNA, 15 bp, Homo sapiens
aagcctatttacaaa

SEQ ID NO: 1283538 - DNA, 15 bp, Homo sapiens
caagcctatttacaa

SEQ ID NO: 1283539 - DNA, 15 bp, Homo sapiens
acaagcctatttaca

SEQ ID NO: 1283540 - DNA, 15 bp, Homo sapiens
aacaagcctatttac

SEQ ID NO: 1283541 - DNA, 15 bp, Homo sapiens
aaacaagcctattta

SEQ ID NO: 1283542 - DNA, 15 bp, Homo sapiens
aaaacaagcctattt

SEQ ID NO: 1283543 - DNA, 15 bp, Homo sapiens
taaaacaagcctatt

SEQ ID NO: 1283544 - DNA, 15 bp, Homo sapiens
ataaaacaagcctat

SEQ ID NO: 1283545 - DNA, 15 bp, Homo sapiens
tataaaacaagccta

SEQ ID NO: 1283546 - DNA, 15 bp, Homo sapiens
atataaaacaagcct

SEQ ID NO: 1283547 - DNA, 15 bp, Homo sapiens
aatataaaacaagcc

SEQ ID NO: 1283548 - DNA, 15 bp, Homo sapiens
taatataaaacaagc

SEQ ID NO: 1283549 - DNA, 15 bp, Homo sapiens
ttaatataaaacaag

SEQ ID NO: 1283550 - DNA, 15 bp, Homo sapiens
tttaatataaaacaa

SEQ ID NO: 1283551 - DNA, 15 bp, Homo sapiens
ttttaatataaaaca

SEQ ID NO: 1283552 - DNA, 15 bp, Homo sapiens
gttttaatataaaac

SEQ ID NO: 1283553 - DNA, 15 bp, Homo sapiens
ggttttaatataaaa

SEQ ID NO: 1283554 - DNA, 15 bp, Homo sapiens
aggttttaatataaa

SEQ ID NO: 1283555 - DNA, 15 bp, Homo sapiens
aaggttttaatataa

SEQ ID NO: 1283556 - DNA, 15 bp, Homo sapiens
aaaggttttaatata

SEQ ID NO: 1283557 - DNA, 15 bp, Homo sapiens
taaaggttttaatat

SEQ ID NO: 1283558 - DNA, 15 bp, Homo sapiens
ataaaggttttaata

SEQ ID NO: 1283559 - DNA, 15 bp, Homo sapiens
tataaaggttttaat

SEQ ID NO: 1283560 - DNA, 15 bp, Homo sapiens
atataaaggttttaa

SEQ ID NO: 1283561 - DNA, 15 bp, Homo sapiens
tatataaaggtttta

SEQ ID NO: 1283562 - DNA, 15 bp, Homo sapiens
ttatataaaggtttt

SEQ ID NO: 1283563 - DNA, 15 bp, Homo sapiens
cttatataaaggttt

SEQ ID NO: 1283564 - DNA, 15 bp, Homo sapiens
acttatataaaggtt

SEQ ID NO: 1283565 - DNA, 15 bp, Homo sapiens
tacttatataaaggt

SEQ ID NO: 1283566 - DNA, 15 bp, Homo sapiens
ctacttatataaagg

SEQ ID NO: 1283567 - DNA, 15 bp, Homo sapiens
actacttatataaag

SEQ ID NO: 1283568 - DNA, 15 bp, Homo sapiens
aactacttatataaa

SEQ ID NO: 1283569 - DNA, 15 bp, Homo sapiens
aaactacttatataa

SEQ ID NO: 1283570 - DNA, 15 bp, Homo sapiens
caaactacttatata

SEQ ID NO: 1283571 - DNA, 15 bp, Homo sapiens
tcaaactacttatat

SEQ ID NO: 1283572 - DNA, 15 bp, Homo sapiens
ctcaaactacttata

SEQ ID NO: 1283573 - DNA, 15 bp, Homo sapiens
actcaaactacttat

SEQ ID NO: 1283574 - DNA, 15 bp, Homo sapiens
aactcaaactactta

SEQ ID NO: 1283575 - DNA, 15 bp, Homo sapiens
aaactcaaactactt

SEQ ID NO: 1283576 - DNA, 15 bp, Homo sapiens
taaactcaaactact

SEQ ID NO: 1283577 - DNA, 15 bp, Homo sapiens
ataaactcaaactac

SEQ ID NO: 1283578 - DNA, 15 bp, Homo sapiens
gataaactcaaacta

SEQ ID NO: 1283579 - DNA, 15 bp, Homo sapiens
agataaactcaaact

SEQ ID NO: 1283580 - DNA, 15 bp, Homo sapiens
aagataaactcaaac

SEQ ID NO: 1283581 - DNA, 15 bp, Homo sapiens
taagataaactcaaa

SEQ ID NO: 1283582 - DNA, 15 bp, Homo sapiens
ttaagataaactcaa

SEQ ID NO: 1283583 - DNA, 15 bp, Homo sapiens
tttaagataaactca

SEQ ID NO: 1283584 - DNA, 15 bp, Homo sapiens
ctttaagataaactc

SEQ ID NO: 1283585 - DNA, 15 bp, Homo sapiens
cctttaagataaact

SEQ ID NO: 1283586 - DNA, 15 bp, Homo sapiens
acctttaagataaac

SEQ ID NO: 1283587 - DNA, 15 bp, Homo sapiens
tacctttaagataaa

SEQ ID NO: 1283588 - DNA, 15 bp, Homo sapiens
atacctttaagataa

SEQ ID NO: 1283589 - DNA, 15 bp, Homo sapiens
aatacctttaagata

SEQ ID NO: 1283590 - DNA, 15 bp, Homo sapiens
aaatacctttaagat

SEQ ID NO: 1283591 - DNA, 15 bp, Homo sapiens
taaatacctttaaga

SEQ ID NO: 1283592 - DNA, 15 bp, Homo sapiens
ctaaatacctttaag

SEQ ID NO: 1283593 - DNA, 15 bp, Homo sapiens
cctaaatacctttaa

SEQ ID NO: 1283594 - DNA, 15 bp, Homo sapiens
acctaaataccttta

SEQ ID NO: 1283595 - DNA, 15 bp, Homo sapiens
tacctaaataccttt

SEQ ID NO: 1283596 - DNA, 15 bp, Homo sapiens
ttacctaaatacctt

SEQ ID NO: 1283597 - DNA, 15 bp, Homo sapiens
cttacctaaatacct

SEQ ID NO: 1283598 - DNA, 15 bp, Homo sapiens
tcttacctaaatacc

SEQ ID NO: 1283599 - DNA, 15 bp, Homo sapiens
atcttacctaaatac

SEQ ID NO: 1283600 - DNA, 15 bp, Homo sapiens
aatcttacctaaata

SEQ ID NO: 1283601 - DNA, 15 bp, Homo sapiens
taaatcttacctaaa

SEQ ID NO: 1283602 - DNA, 15 bp, Homo sapiens
ataaatcttacctaa

SEQ ID NO: 1283603 - DNA, 15 bp, Homo sapiens
aataaatcttaccta

SEQ ID NO: 1283604 - DNA, 15 bp, Homo sapiens
taataaatcttacct

SEQ ID NO: 1283605 - DNA, 15 bp, Homo sapiens
ttaataaatcttacc

SEQ ID NO: 1283606 - DNA, 15 bp, Homo sapiens
tttaataaatcttac

SEQ ID NO: 1283607 - DNA, 15 bp, Homo sapiens
ctttaataaatctta

SEQ ID NO: 1283608 - DNA, 15 bp, Homo sapiens
gctttaataaatctt

SEQ ID NO: 1283609 - DNA, 15 bp, Homo sapiens
ggctttaataaatct

SEQ ID NO: 1283610 - DNA, 15 bp, Homo sapiens
aggctttaataaatc

SEQ ID NO: 1283611 - DNA, 15 bp, Homo sapiens
taggctttaataaat

SEQ ID NO: 1283612 - DNA, 15 bp, Homo sapiens
ttaggctttaataaa

SEQ ID NO: 1283613 - DNA, 15 bp, Homo sapiens
cttaggctttaataa

SEQ ID NO: 1283614 - DNA, 15 bp, Homo sapiens
tcttaggctttaata

SEQ ID NO: 1283615 - DNA, 15 bp, Homo sapiens
atcttaggctttaat

SEQ ID NO: 1283616 - DNA, 15 bp, Homo sapiens
aatcttaggctttaa

SEQ ID NO: 1283617 - DNA, 15 bp, Homo sapiens
caatcttaggcttta

SEQ ID NO: 1283618 - DNA, 15 bp, Homo sapiens
acaatcttaggcttt

SEQ ID NO: 1283619 - DNA, 15 bp, Homo sapiens
aacaatcttaggctt

SEQ ID NO: 1283620 - DNA, 15 bp, Homo sapiens
aaacaatcttaggct

SEQ ID NO: 1283621 - DNA, 15 bp, Homo sapiens
aaaacaatcttaggc

SEQ ID NO: 1283622 - DNA, 15 bp, Homo sapiens
taaaacaatcttagg

SEQ ID NO: 1283623 - DNA, 15 bp, Homo sapiens
ttaaaacaatcttag

SEQ ID NO: 1283624 - DNA, 15 bp, Homo sapiens
gttaaaacaatctta

SEQ ID NO: 1283625 - DNA, 15 bp, Homo sapiens
agttaaaacaatctt

SEQ ID NO: 1283626 - DNA, 15 bp, Homo sapiens
tagttaaaacaatct

SEQ ID NO: 1283627 - DNA, 15 bp, Homo sapiens
ctagttaaaacaatc

SEQ ID NO: 1283628 - DNA, 15 bp, Homo sapiens
tctagttaaaacaat

SEQ ID NO: 1283629 - DNA, 15 bp, Homo sapiens
ctctagttaaaacaa

SEQ ID NO: 1283630 - DNA, 15 bp, Homo sapiens
cctctagttaaaaca

SEQ ID NO: 1283631 - DNA, 15 bp, Homo sapiens
tcctctagttaaaac

SEQ ID NO: 1283632 - DNA, 15 bp, Homo sapiens
atcctctagttaaaa

SEQ ID NO: 1283633 - DNA, 15 bp, Homo sapiens
tatcctctagttaaa

SEQ ID NO: 1283634 - DNA, 15 bp, Homo sapiens
atatcctctagttaa

SEQ ID NO: 1283635 - DNA, 15 bp, Homo sapiens
aatatcctctagtta

SEQ ID NO: 1283636 - DNA, 15 bp, Homo sapiens
taatatcctctagtt

SEQ ID NO: 1283637 - DNA, 15 bp, Homo sapiens
ataatatcctctagt

SEQ ID NO: 1283638 - DNA, 15 bp, Homo sapiens
tataatatcctctag

SEQ ID NO: 1283639 - DNA, 15 bp, Homo sapiens
ttataatatcctcta

SEQ ID NO: 1283640 - DNA, 15 bp, Homo sapiens
gttataatatcctct

SEQ ID NO: 1283641 - DNA, 15 bp, Homo sapiens
agttataatatcctc

SEQ ID NO: 1283642 - DNA, 15 bp, Homo sapiens
tagttataatatcct

SEQ ID NO: 1283643 - DNA, 15 bp, Homo sapiens
ttagttataatatcc

SEQ ID NO: 1283644 - DNA, 15 bp, Homo sapiens
tttagttataatatc

SEQ ID NO: 1283645 - DNA, 15 bp, Homo sapiens
atttagttataatat

SEQ ID NO: 1283646 - DNA, 15 bp, Homo sapiens
catttagttataata

SEQ ID NO: 1283647 - DNA, 15 bp, Homo sapiens
gcatttagttataat

SEQ ID NO: 1283648 - DNA, 15 bp, Homo sapiens
agcatttagttataa

SEQ ID NO: 1283649 - DNA, 15 bp, Homo sapiens
aagcatttagttata

SEQ ID NO: 1283650 - DNA, 15 bp, Homo sapiens
aaagcatttagttat

SEQ ID NO: 1283651 - DNA, 15 bp, Homo sapiens
aaaagcatttagtta

SEQ ID NO: 1283652 - DNA, 15 bp, Homo sapiens
aaaaagcatttagtt

SEQ ID NO: 1283653 - DNA, 15 bp, Homo sapiens
aaaaaagcatttagt

SEQ ID NO: 1283654 - DNA, 15 bp, Homo sapiens
aaaaaaagcatttag

SEQ ID NO: 1283655 - DNA, 15 bp, Homo sapiens
gaaaaaaagcattta

SEQ ID NO: 1283656 - DNA, 15 bp, Homo sapiens
tgaaaaaaagcattt

SEQ ID NO: 1283657 - DNA, 15 bp, Homo sapiens
ctgaaaaaaagcatt

SEQ ID NO: 1283658 - DNA, 15 bp, Homo sapiens
tctgaaaaaaagcat

SEQ ID NO: 1283659 - DNA, 15 bp, Homo sapiens
atctgaaaaaaagca

SEQ ID NO: 1283660 - DNA, 15 bp, Homo sapiens
aatctgaaaaaaagc

SEQ ID NO: 1283661 - DNA, 15 bp, Homo sapiens
taatctgaaaaaaag

SEQ ID NO: 1283662 - DNA, 15 bp, Homo sapiens
ataatctgaaaaaaa

SEQ ID NO: 1283663 - DNA, 15 bp, Homo sapiens
tataatctgaaaaaa

SEQ ID NO: 1283664 - DNA, 15 bp, Homo sapiens
atataatctgaaaaa

SEQ ID NO: 1283665 - DNA, 15 bp, Homo sapiens
atatataatctgaaa

SEQ ID NO: 1283666 - DNA, 15 bp, Homo sapiens
aatatataatctgaa

SEQ ID NO: 1283667 - DNA, 15 bp, Homo sapiens
caatatataatctga

SEQ ID NO: 1283668 - DNA, 15 bp, Homo sapiens
tcaatatataatctg

SEQ ID NO: 1283669 - DNA, 15 bp, Homo sapiens
atcaatatataatct

SEQ ID NO: 1283670 - DNA, 15 bp, Homo sapiens
aatcaatatataatc

SEQ ID NO: 1283671 - DNA, 15 bp, Homo sapiens
aaatcaatatataat

SEQ ID NO: 1283672 - DNA, 15 bp, Homo sapiens
caaatcaatatataa

SEQ ID NO: 1283673 - DNA, 15 bp, Homo sapiens
tcaaatcaatatata

SEQ ID NO: 1283674 - DNA, 15 bp, Homo sapiens
ttcaaatcaatatat

SEQ ID NO: 1283675 - DNA, 15 bp, Homo sapiens
gttcaaatcaatata

SEQ ID NO: 1283676 - DNA, 15 bp, Homo sapiens
tgttcaaatcaatat

SEQ ID NO: 1283677 - DNA, 15 bp, Homo sapiens
atgttcaaatcaata

SEQ ID NO: 1283678 - DNA, 15 bp, Homo sapiens
catgttcaaatcaat

SEQ ID NO: 1283679 - DNA, 15 bp, Homo sapiens
gcatgttcaaatcaa

SEQ ID NO: 1283680 - DNA, 15 bp, Homo sapiens
agcatgttcaaatca

SEQ ID NO: 1283681 - DNA, 15 bp, Homo sapiens
tagcatgttcaaatc

SEQ ID NO: 1283682 - DNA, 15 bp, Homo sapiens
gtagcatgttcaaat

SEQ ID NO: 1283683 - DNA, 15 bp, Homo sapiens
tgtagcatgttcaaa

SEQ ID NO: 1283684 - DNA, 15 bp, Homo sapiens
ttgtagcatgttcaa

SEQ ID NO: 1283685 - DNA, 15 bp, Homo sapiens
attgtagcatgttca

SEQ ID NO: 1283686 - DNA, 15 bp, Homo sapiens
tattgtagcatgttc

SEQ ID NO: 1283687 - DNA, 15 bp, Homo sapiens
gtattgtagcatgtt

SEQ ID NO: 1283688 - DNA, 15 bp, Homo sapiens
agtattgtagcatgt

SEQ ID NO: 1283689 - DNA, 15 bp, Homo sapiens
aagtattgtagcatg

SEQ ID NO: 1283690 - DNA, 15 bp, Homo sapiens
caagtattgtagcat

SEQ ID NO: 1283691 - DNA, 15 bp, Homo sapiens
tcaagtattgtagca

SEQ ID NO: 1283692 - DNA, 15 bp, Homo sapiens
ttcaagtattgtagc

SEQ ID NO: 1283693 - DNA, 15 bp, Homo sapiens
gttcaagtattgtag

SEQ ID NO: 1283694 - DNA, 15 bp, Homo sapiens
ggttcaagtattgta

SEQ ID NO: 1283695 - DNA, 15 bp, Homo sapiens
tggttcaagtattgt

SEQ ID NO: 1283696 - DNA, 15 bp, Homo sapiens
ctggttcaagtattg

SEQ ID NO: 1283697 - DNA, 15 bp, Homo sapiens
actggttcaagtatt

SEQ ID NO: 1283698 - DNA, 15 bp, Homo sapiens
aactggttcaagtat

SEQ ID NO: 1283699 - DNA, 15 bp, Homo sapiens
taactggttcaagta

SEQ ID NO: 1283700 - DNA, 15 bp, Homo sapiens
ttaactggttcaagt

SEQ ID NO: 1283701 - DNA, 15 bp, Homo sapiens
attaactggttcaag

SEQ ID NO: 1283702 - DNA, 15 bp, Homo sapiens
aattaactggttcaa

SEQ ID NO: 1283703 - DNA, 15 bp, Homo sapiens
taattaactggttca

SEQ ID NO: 1283704 - DNA, 15 bp, Homo sapiens
gtaattaactggttc

SEQ ID NO: 1283705 - DNA, 15 bp, Homo sapiens
agtaattaactggtt

SEQ ID NO: 1283706 - DNA, 15 bp, Homo sapiens
aagtaattaactggt

SEQ ID NO: 1283707 - DNA, 15 bp, Homo sapiens
taagtaattaactgg

SEQ ID NO: 1283708 - DNA, 15 bp, Homo sapiens
ttaagtaattaactg

SEQ ID NO: 1283709 - DNA, 15 bp, Homo sapiens
attaagtaattaact

SEQ ID NO: 1283710 - DNA, 15 bp, Homo sapiens
tattaagtaattaac

SEQ ID NO: 1283711 - DNA, 15 bp, Homo sapiens
ctattaagtaattaa

SEQ ID NO: 1283712 - DNA, 15 bp, Homo sapiens
cctattaagtaatta

SEQ ID NO: 1283713 - DNA, 15 bp, Homo sapiens
acctattaagtaatt

SEQ ID NO: 1283714 - DNA, 15 bp, Homo sapiens
cacctattaagtaat

SEQ ID NO: 1283715 - DNA, 15 bp, Homo sapiens
acacctattaagtaa

SEQ ID NO: 1283716 - DNA, 15 bp, Homo sapiens
aacacctattaagta

SEQ ID NO: 1283717 - DNA, 15 bp, Homo sapiens
aaacacctattaagt

SEQ ID NO: 1283718 - DNA, 15 bp, Homo sapiens
caaacacctattaag

SEQ ID NO: 1283719 - DNA, 15 bp, Homo sapiens
acaaacacctattaa

SEQ ID NO: 1283720 - DNA, 15 bp, Homo sapiens
aacaaacacctatta

SEQ ID NO: 1283721 - DNA, 15 bp, Homo sapiens
caacaaacacctatt

SEQ ID NO: 1283722 - DNA, 15 bp, Homo sapiens
acaacaaacacctat

SEQ ID NO: 1283723 - DNA, 15 bp, Homo sapiens
aacaacaaacaccta

SEQ ID NO: 1283724 - DNA, 15 bp, Homo sapiens
caacaacaaacacct

SEQ ID NO: 1283725 - DNA, 15 bp, Homo sapiens
tcaacaacaaacacc

SEQ ID NO: 1283726 - DNA, 15 bp, Homo sapiens
ctcaacaacaaacac

SEQ ID NO: 1283727 - DNA, 15 bp, Homo sapiens
actcaacaacaaaca

SEQ ID NO: 1283728 - DNA, 15 bp, Homo sapiens
aactcaacaacaaac

SEQ ID NO: 1283729 - DNA, 15 bp, Homo sapiens
aaactcaacaacaaa

SEQ ID NO: 1283730 - DNA, 15 bp, Homo sapiens
taaactcaacaacaa

SEQ ID NO: 1283731 - DNA, 15 bp, Homo sapiens
ataaactcaacaaca

SEQ ID NO: 1283732 - DNA, 15 bp, Homo sapiens
tataaactcaacaac

SEQ ID NO: 1283733 - DNA, 15 bp, Homo sapiens
ttataaactcaacaa

SEQ ID NO: 1283734 - DNA, 15 bp, Homo sapiens
cttataaactcaaca

SEQ ID NO: 1283735 - DNA, 15 bp, Homo sapiens
gcttataaactcaac

SEQ ID NO: 1283736 - DNA, 15 bp, Homo sapiens
ggcttataaactcaa

SEQ ID NO: 1283737 - DNA, 15 bp, Homo sapiens
aggcttataaactca

SEQ ID NO: 1283738 - DNA, 15 bp, Homo sapiens
gaggcttataaactc

SEQ ID NO: 1283739 - DNA, 15 bp, Homo sapiens
tgaggcttataaact

SEQ ID NO: 1283740 - DNA, 15 bp, Homo sapiens
atgaggcttataaac

SEQ ID NO: 1283741 - DNA, 15 bp, Homo sapiens
tatgaggcttataaa

SEQ ID NO: 1283742 - DNA, 15 bp, Homo sapiens
ttatgaggcttataa

SEQ ID NO: 1283743 - DNA, 15 bp, Homo sapiens
cttatgaggcttata

SEQ ID NO: 1283744 - DNA, 15 bp, Homo sapiens
tcttatgaggcttat

SEQ ID NO: 1283745 - DNA, 15 bp, Homo sapiens
ttcttatgaggctta

SEQ ID NO: 1283746 - DNA, 15 bp, Homo sapiens
cttcttatgaggctt

SEQ ID NO: 1283747 - DNA, 15 bp, Homo sapiens
tcttcttatgaggct

SEQ ID NO: 1283748 - DNA, 15 bp, Homo sapiens
ctcttcttatgaggc

SEQ ID NO: 1283749 - DNA, 15 bp, Homo sapiens
actcttcttatgagg

SEQ ID NO: 1283750 - DNA, 15 bp, Homo sapiens
aactcttcttatgag

SEQ ID NO: 1283751 - DNA, 15 bp, Homo sapiens
aaactcttcttatga

SEQ ID NO: 1283752 - DNA, 15 bp, Homo sapiens
taaactcttcttatg

SEQ ID NO: 1283753 - DNA, 15 bp, Homo sapiens
ataaactcttcttat

SEQ ID NO: 1283754 - DNA, 15 bp, Homo sapiens
aataaactcttctta

SEQ ID NO: 1283755 - DNA, 15 bp, Homo sapiens
taataaactcttctt

SEQ ID NO: 1283756 - DNA, 15 bp, Homo sapiens
ttaataaactcttct

SEQ ID NO: 1283757 - DNA, 15 bp, Homo sapiens
attaataaactcttc

SEQ ID NO: 1283758 - DNA, 15 bp, Homo sapiens
cattaataaactctt

SEQ ID NO: 1283759 - DNA, 15 bp, Homo sapiens
acattaataaactct

SEQ ID NO: 1283760 - DNA, 15 bp, Homo sapiens
cacattaataaactc

SEQ ID NO: 1283761 - DNA, 15 bp, Homo sapiens
acacattaataaact

SEQ ID NO: 1283762 - DNA, 15 bp, Homo sapiens
aacacattaataaac

SEQ ID NO: 1283763 - DNA, 15 bp, Homo sapiens
aaacacattaataaa

SEQ ID NO: 1283764 - DNA, 15 bp, Homo sapiens
aaaacacattaataa

SEQ ID NO: 1283765 - DNA, 15 bp, Homo sapiens
gaaaacacattaata

SEQ ID NO: 1283766 - DNA, 15 bp, Homo sapiens
tgaaaacacattaat

SEQ ID NO: 1283767 - DNA, 15 bp, Homo sapiens
ttgaaaacacattaa

SEQ ID NO: 1283768 - DNA, 15 bp, Homo sapiens
attgaaaacacatta

SEQ ID NO: 1283769 - DNA, 15 bp, Homo sapiens
tattgaaaacacatt

SEQ ID NO: 1283770 - DNA, 15 bp, Homo sapiens
ttattgaaaacacat

SEQ ID NO: 1283771 - DNA, 15 bp, Homo sapiens
attattgaaaacaca

SEQ ID NO: 1283772 - DNA, 15 bp, Homo sapiens
cattattgaaaacac

SEQ ID NO: 1283773 - DNA, 15 bp, Homo sapiens
acattattgaaaaca

SEQ ID NO: 1283774 - DNA, 15 bp, Homo sapiens
tacattattgaaaac

SEQ ID NO: 1283775 - DNA, 15 bp, Homo sapiens
atacattattgaaaa

SEQ ID NO: 1283776 - DNA, 15 bp, Homo sapiens
catacattattgaaa

SEQ ID NO: 1283777 - DNA, 15 bp, Homo sapiens
tcatacattattgaa

SEQ ID NO: 1283778 - DNA, 15 bp, Homo sapiens
ttcatacattattga

SEQ ID NO: 1283779 - DNA, 15 bp, Homo sapiens
gttcatacattattg

SEQ ID NO: 1283780 - DNA, 15 bp, Homo sapiens
agttcatacattatt

SEQ ID NO: 1283781 - DNA, 15 bp, Homo sapiens
aagttcatacattat

SEQ ID NO: 1283782 - DNA, 15 bp, Homo sapiens
aaagttcatacatta

SEQ ID NO: 1283783 - DNA, 15 bp, Homo sapiens
taaagttcatacatt

SEQ ID NO: 1283784 - DNA, 15 bp, Homo sapiens
ataaagttcatacat

SEQ ID NO: 1283785 - DNA, 15 bp, Homo sapiens
gataaagttcataca

SEQ ID NO: 1283786 - DNA, 15 bp, Homo sapiens
agataaagttcatac

SEQ ID NO: 1283787 - DNA, 15 bp, Homo sapiens
aagataaagttcata

SEQ ID NO: 1283788 - DNA, 15 bp, Homo sapiens
gaagataaagttcat

SEQ ID NO: 1283789 - DNA, 15 bp, Homo sapiens
tgaagataaagttca

SEQ ID NO: 1283790 - DNA, 15 bp, Homo sapiens
ctgaagataaagttc

SEQ ID NO: 1283791 - DNA, 15 bp, Homo sapiens
tctgaagataaagtt

SEQ ID NO: 1283792 - DNA, 15 bp, Homo sapiens
ttctgaagataaagt

SEQ ID NO: 1283793 - DNA, 15 bp, Homo sapiens
tttctgaagataaag

SEQ ID NO: 1283794 - DNA, 15 bp, Homo sapiens
ctttctgaagataaa

SEQ ID NO: 1283795 - DNA, 15 bp, Homo sapiens
actttctgaagataa

SEQ ID NO: 1283796 - DNA, 15 bp, Homo sapiens
tactttctgaagata

SEQ ID NO: 1283797 - DNA, 15 bp, Homo sapiens
atactttctgaagat

SEQ ID NO: 1283798 - DNA, 15 bp, Homo sapiens
gatactttctgaaga

SEQ ID NO: 1283799 - DNA, 15 bp, Homo sapiens
ggatactttctgaag

SEQ ID NO: 1283800 - DNA, 15 bp, Homo sapiens
tggatactttctgaa

SEQ ID NO: 1283801 - DNA, 15 bp, Homo sapiens
ctggatactttctga

SEQ ID NO: 1283802 - DNA, 15 bp, Homo sapiens
cctggatactttctg

SEQ ID NO: 1283803 - DNA, 15 bp, Homo sapiens
tcctggatactttct

SEQ ID NO: 1283804 - DNA, 15 bp, Homo sapiens
gtcctggatactttc

SEQ ID NO: 1283805 - DNA, 15 bp, Homo sapiens
agtcctggatacttt

SEQ ID NO: 1283806 - DNA, 15 bp, Homo sapiens
aagtcctggatactt

SEQ ID NO: 1283807 - DNA, 15 bp, Homo sapiens
gaagtcctggatact

SEQ ID NO: 1283808 - DNA, 15 bp, Homo sapiens
ggaagtcctggatac

SEQ ID NO: 1283809 - DNA, 15 bp, Homo sapiens
tggaagtcctggata

SEQ ID NO: 1283810 - DNA, 15 bp, Homo sapiens
ctggaagtcctggat

SEQ ID NO: 1283811 - DNA, 15 bp, Homo sapiens
actggaagtcctgga

SEQ ID NO: 1283812 - DNA, 15 bp, Homo sapiens
gactggaagtcctgg

SEQ ID NO: 1283813 - DNA, 15 bp, Homo sapiens
tgactggaagtcctg

SEQ ID NO: 1283814 - DNA, 15 bp, Homo sapiens
atgactggaagtcct

SEQ ID NO: 1283815 - DNA, 15 bp, Homo sapiens
aatgactggaagtcc

SEQ ID NO: 1283816 - DNA, 15 bp, Homo sapiens
aaatgactggaagtc

SEQ ID NO: 1283817 - DNA, 15 bp, Homo sapiens
aaaatgactggaagt

SEQ ID NO: 1283818 - DNA, 15 bp, Homo sapiens
gaaaatgactggaag

SEQ ID NO: 1283819 - DNA, 15 bp, Homo sapiens
agaaaatgactggaa

SEQ ID NO: 1283820 - DNA, 15 bp, Homo sapiens
aagaaaatgactgga

SEQ ID NO: 1283821 - DNA, 15 bp, Homo sapiens
aaagaaaatgactgg

SEQ ID NO: 1283822 - DNA, 15 bp, Homo sapiens
caaagaaaatgactg

SEQ ID NO: 1283823 - DNA, 15 bp, Homo sapiens
gcaaagaaaatgact

SEQ ID NO: 1283824 - DNA, 15 bp, Homo sapiens
tgcaaagaaaatgac

SEQ ID NO: 1283825 - DNA, 15 bp, Homo sapiens
ttgcaaagaaaatga

SEQ ID NO: 1283826 - DNA, 15 bp, Homo sapiens
gttgcaaagaaaatg

SEQ ID NO: 1283827 - DNA, 15 bp, Homo sapiens
tgttgcaaagaaaat

SEQ ID NO: 1283828 - DNA, 15 bp, Homo sapiens
atgttgcaaagaaaa

SEQ ID NO: 1283829 - DNA, 15 bp, Homo sapiens
tatgttgcaaagaaa

SEQ ID NO: 1283830 - DNA, 15 bp, Homo sapiens
atatgttgcaaagaa

SEQ ID NO: 1283831 - DNA, 15 bp, Homo sapiens
aatatgttgcaaaga

SEQ ID NO: 1283832 - DNA, 15 bp, Homo sapiens
aaatatgttgcaaag

SEQ ID NO: 1283833 - DNA, 15 bp, Homo sapiens
taaatatgttgcaaa

SEQ ID NO: 1283834 - DNA, 15 bp, Homo sapiens
gtaaatatgttgcaa

SEQ ID NO: 1283835 - DNA, 15 bp, Homo sapiens
tgtaaatatgttgca

SEQ ID NO: 1283836 - DNA, 15 bp, Homo sapiens
ttgtaaatatgttgc

SEQ ID NO: 1283837 - DNA, 15 bp, Homo sapiens
tttgtaaatatgttg

SEQ ID NO: 1283838 - DNA, 15 bp, Homo sapiens
ttttgtaaatatgtt

SEQ ID NO: 1283839 - DNA, 15 bp, Homo sapiens
tttttgtaaatatgt

SEQ ID NO: 1283840 - DNA, 15 bp, Homo sapiens
atttttgtaaatatg

SEQ ID NO: 1283841 - DNA, 15 bp, Homo sapiens
catttttgtaaatat

SEQ ID NO: 1283842 - DNA, 15 bp, Homo sapiens
gcatttttgtaaata

SEQ ID NO: 1283843 - DNA, 15 bp, Homo sapiens
tgcatttttgtaaat

SEQ ID NO: 1283844 - DNA, 15 bp, Homo sapiens
ttgcatttttgtaaa

SEQ ID NO: 1283845 - DNA, 15 bp, Homo sapiens
gttgcatttttgtaa

SEQ ID NO: 1283846 - DNA, 15 bp, Homo sapiens
tgttgcatttttgta

SEQ ID NO: 1283847 - DNA, 15 bp, Homo sapiens
ctgttgcatttttgt

SEQ ID NO: 1283848 - DNA, 15 bp, Homo sapiens
actgttgcatttttg

SEQ ID NO: 1283849 - DNA, 15 bp, Homo sapiens
tactgttgcattttt

SEQ ID NO: 1283850 - DNA, 15 bp, Homo sapiens
atactgttgcatttt

SEQ ID NO: 1283851 - DNA, 15 bp, Homo sapiens
catactgttgcattt

SEQ ID NO: 1283852 - DNA, 15 bp, Homo sapiens
acatactgttgcatt

SEQ ID NO: 1283853 - DNA, 15 bp, Homo sapiens
tacatactgttgcat

SEQ ID NO: 1283854 - DNA, 15 bp, Homo sapiens
atacatactgttgca

SEQ ID NO: 1283855 - DNA, 15 bp, Homo sapiens
aatacatactgttgc

SEQ ID NO: 1283856 - DNA, 15 bp, Homo sapiens
aaatacatactgttg

SEQ ID NO: 1283857 - DNA, 15 bp, Homo sapiens
aaaatacatactgtt

SEQ ID NO: 1283858 - DNA, 15 bp, Homo sapiens
aaaaatacatactgt

SEQ ID NO: 1283859 - DNA, 15 bp, Homo sapiens
taaaaatacatactg

SEQ ID NO: 1283860 - DNA, 15 bp, Homo sapiens
gtaaaaatacatact

SEQ ID NO: 1283861 - DNA, 15 bp, Homo sapiens
ggtaaaaatacatac

SEQ ID NO: 1283862 - DNA, 15 bp, Homo sapiens
tggtaaaaatacata

SEQ ID NO: 1283863 - DNA, 15 bp, Homo sapiens
ttggtaaaaatacat

SEQ ID NO: 1283864 - DNA, 15 bp, Homo sapiens
tttggtaaaaataca

SEQ ID NO: 1283865 - DNA, 15 bp, Homo sapiens
atttggtaaaaatac

SEQ ID NO: 1283866 - DNA, 15 bp, Homo sapiens
tatttggtaaaaata

SEQ ID NO: 1283867 - DNA, 15 bp, Homo sapiens
ctatttggtaaaaat

SEQ ID NO: 1283868 - DNA, 15 bp, Homo sapiens
cctatttggtaaaaa

SEQ ID NO: 1283869 - DNA, 15 bp, Homo sapiens
acctatttggtaaaa

SEQ ID NO: 1283870 - DNA, 15 bp, Homo sapiens
tacctatttggtaaa

SEQ ID NO: 1283871 - DNA, 15 bp, Homo sapiens
ttacctatttggtaa

SEQ ID NO: 1283872 - DNA, 15 bp, Homo sapiens
attacctatttggta

SEQ ID NO: 1283873 - DNA, 15 bp, Homo sapiens
aattacctatttggt

SEQ ID NO: 1283874 - DNA, 15 bp, Homo sapiens
taattacctatttgg

SEQ ID NO: 1283875 - DNA, 15 bp, Homo sapiens
ataattacctatttg

SEQ ID NO: 1283876 - DNA, 15 bp, Homo sapiens
cataattacctattt

SEQ ID NO: 1283877 - DNA, 15 bp, Homo sapiens
acataattacctatt

SEQ ID NO: 1283878 - DNA, 15 bp, Homo sapiens
aacataattacctat

SEQ ID NO: 1283879 - DNA, 15 bp, Homo sapiens
aaacataattaccta

SEQ ID NO: 1283880 - DNA, 15 bp, Homo sapiens
gaaacataattacct

SEQ ID NO: 1283881 - DNA, 15 bp, Homo sapiens
agaaacataattacc

SEQ ID NO: 1283882 - DNA, 15 bp, Homo sapiens
gagaaacataattac

SEQ ID NO: 1283883 - DNA, 15 bp, Homo sapiens
ggagaaacataatta

SEQ ID NO: 1283884 - DNA, 15 bp, Homo sapiens
aggagaaacataatt

SEQ ID NO: 1283885 - DNA, 15 bp, Homo sapiens
aaggagaaacataat

SEQ ID NO: 1283886 - DNA, 15 bp, Homo sapiens
caaggagaaacataa

SEQ ID NO: 1283887 - DNA, 15 bp, Homo sapiens
tcaaggagaaacata

SEQ ID NO: 1283888 - DNA, 15 bp, Homo sapiens
ttcaaggagaaacat

SEQ ID NO: 1283889 - DNA, 15 bp, Homo sapiens
gttcaaggagaaaca

SEQ ID NO: 1283890 - DNA, 15 bp, Homo sapiens
tgttcaaggagaaac

SEQ ID NO: 1283891 - DNA, 15 bp, Homo sapiens
ttgttcaaggagaaa

SEQ ID NO: 1283892 - DNA, 15 bp, Homo sapiens
tttgttcaaggagaa

SEQ ID NO: 1283893 - DNA, 15 bp, Homo sapiens
ctttgttcaaggaga

SEQ ID NO: 1283894 - DNA, 15 bp, Homo sapiens
tctttgttcaaggag

SEQ ID NO: 1283895 - DNA, 15 bp, Homo sapiens
gtctttgttcaagga

SEQ ID NO: 1283896 - DNA, 15 bp, Homo sapiens
tgtctttgttcaagg

SEQ ID NO: 1283897 - DNA, 15 bp, Homo sapiens
atgtctttgttcaag

SEQ ID NO: 1283898 - DNA, 15 bp, Homo sapiens
gatgtctttgttcaa

SEQ ID NO: 1283899 - DNA, 15 bp, Homo sapiens
agatgtctttgttca

SEQ ID NO: 1283900 - DNA, 15 bp, Homo sapiens
tagatgtctttgttc

SEQ ID NO: 1283901 - DNA, 15 bp, Homo sapiens
ctagatgtctttgtt

SEQ ID NO: 1283902 - DNA, 15 bp, Homo sapiens
tctagatgtctttgt

SEQ ID NO: 1283903 - DNA, 15 bp, Homo sapiens
ttctagatgtctttg

SEQ ID NO: 1283904 - DNA, 15 bp, Homo sapiens
attctagatgtcttt

SEQ ID NO: 1283905 - DNA, 15 bp, Homo sapiens
aattctagatgtctt

SEQ ID NO: 1283906 - DNA, 15 bp, Homo sapiens
taattctagatgtct

SEQ ID NO: 1283907 - DNA, 15 bp, Homo sapiens
ttaattctagatgtc

SEQ ID NO: 1283908 - DNA, 15 bp, Homo sapiens
tttaattctagatgt

SEQ ID NO: 1283909 - DNA, 15 bp, Homo sapiens
gtttaattctagatg

SEQ ID NO: 1283910 - DNA, 15 bp, Homo sapiens
tgtttaattctagat

SEQ ID NO: 1283911 - DNA, 15 bp, Homo sapiens
atgtttaattctaga

SEQ ID NO: 1283912 - DNA, 15 bp, Homo sapiens
tatgtttaattctag

SEQ ID NO: 1283913 - DNA, 15 bp, Homo sapiens
ttatgtttaattcta

SEQ ID NO: 1283914 - DNA, 15 bp, Homo sapiens
attatgtttaattct

SEQ ID NO: 1283915 - DNA, 15 bp, Homo sapiens
aattatgtttaattc

SEQ ID NO: 1283916 - DNA, 15 bp, Homo sapiens
caattatgtttaatt

SEQ ID NO: 1283917 - DNA, 15 bp, Homo sapiens
tcaattatgtttaat

SEQ ID NO: 1283918 - DNA, 15 bp, Homo sapiens
atcaattatgtttaa

SEQ ID NO: 1283919 - DNA, 15 bp, Homo sapiens
tatcaattatgttta

SEQ ID NO: 1283920 - DNA, 15 bp, Homo sapiens
atatcaattatgttt

SEQ ID NO: 1283921 - DNA, 15 bp, Homo sapiens
aatatcaattatgtt

SEQ ID NO: 1283922 - DNA, 15 bp, Homo sapiens
aaatatcaattatgt

SEQ ID NO: 1283923 - DNA, 15 bp, Homo sapiens
aaaatatcaattatg

SEQ ID NO: 1283924 - DNA, 15 bp, Homo sapiens
taaaatatcaattat

SEQ ID NO: 1283925 - DNA, 15 bp, Homo sapiens
ataaaatatcaatta

SEQ ID NO: 1283926 - DNA, 15 bp, Homo sapiens
aataaaatatcaatt

SEQ ID NO: 1283927 - DNA, 15 bp, Homo sapiens
aaataaaatatcaat

SEQ ID NO: 1283928 - DNA, 15 bp, Homo sapiens
taaataaaatatcaa

SEQ ID NO: 1283929 - DNA, 15 bp, Homo sapiens
ttaaataaaatatca

SEQ ID NO: 1283930 - DNA, 15 bp, Homo sapiens
tttaaataaaatatc

SEQ ID NO: 1283931 - DNA, 15 bp, Homo sapiens
gtttaaataaaatat

SEQ ID NO: 1283932 - DNA, 15 bp, Homo sapiens
cgtttaaataaaata

SEQ ID NO: 1283933 - DNA, 15 bp, Homo sapiens
tcgtttaaataaaat

SEQ ID NO: 1283934 - DNA, 15 bp, Homo sapiens
ctcgtttaaataaaa

SEQ ID NO: 1283935 - DNA, 15 bp, Homo sapiens
tctcgtttaaataaa

SEQ ID NO: 1283936 - DNA, 15 bp, Homo sapiens
atctcgtttaaataa

SEQ ID NO: 1283937 - DNA, 15 bp, Homo sapiens
tatctcgtttaaata

SEQ ID NO: 1283938 - DNA, 15 bp, Homo sapiens
ctatctcgtttaaat

SEQ ID NO: 1283939 - DNA, 15 bp, Homo sapiens
tctatctcgtttaaa

SEQ ID NO: 1283940 - DNA, 15 bp, Homo sapiens
atctatctcgtttaa

SEQ ID NO: 1283941 - DNA, 15 bp, Homo sapiens
aatctatctcgttta

SEQ ID NO: 1283942 - DNA, 15 bp, Homo sapiens
taatctatctcgttt

SEQ ID NO: 1283943 - DNA, 15 bp, Homo sapiens
ttaatctatctcgtt

SEQ ID NO: 1283944 - DNA, 15 bp, Homo sapiens
tttaatctatctcgt

SEQ ID NO: 1283945 - DNA, 15 bp, Homo sapiens
atttaatctatctcg

SEQ ID NO: 1283946 - DNA, 15 bp, Homo sapiens
aatttaatctatctc

SEQ ID NO: 1283947 - DNA, 15 bp, Homo sapiens
caatttaatctatct

SEQ ID NO: 1283948 - DNA, 15 bp, Homo sapiens
acaatttaatctatc

SEQ ID NO: 1283949 - DNA, 15 bp, Homo sapiens
aacaatttaatctat

SEQ ID NO: 1283950 - DNA, 15 bp, Homo sapiens
caacaatttaatcta

SEQ ID NO: 1283951 - DNA, 15 bp, Homo sapiens
gcaacaatttaatct

SEQ ID NO: 1283952 - DNA, 15 bp, Homo sapiens
tgcaacaatttaatc

SEQ ID NO: 1283953 - DNA, 15 bp, Homo sapiens
atgcaacaatttaat

SEQ ID NO: 1283954 - DNA, 15 bp, Homo sapiens
aatgcaacaatttaa

SEQ ID NO: 1283955 - DNA, 15 bp, Homo sapiens
aaatgcaacaattta

SEQ ID NO: 1283956 - DNA, 15 bp, Homo sapiens
aaaatgcaacaattt

SEQ ID NO: 1283957 - DNA, 15 bp, Homo sapiens
aaaaatgcaacaatt

SEQ ID NO: 1283958 - DNA, 15 bp, Homo sapiens
caaaaatgcaacaat

SEQ ID NO: 1283959 - DNA, 15 bp, Homo sapiens
tcaaaaatgcaacaa

SEQ ID NO: 1283960 - DNA, 15 bp, Homo sapiens
ttcaaaaatgcaaca

SEQ ID NO: 1283961 - DNA, 15 bp, Homo sapiens
tttcaaaaatgcaac

SEQ ID NO: 1283962 - DNA, 15 bp, Homo sapiens
atttcaaaaatgcaa

SEQ ID NO: 1283963 - DNA, 15 bp, Homo sapiens
tatttcaaaaatgca

SEQ ID NO: 1283964 - DNA, 15 bp, Homo sapiens
gtatttcaaaaatgc

SEQ ID NO: 1283965 - DNA, 15 bp, Homo sapiens
agtatttcaaaaatg

SEQ ID NO: 1283966 - DNA, 15 bp, Homo sapiens
aagtatttcaaaaat

SEQ ID NO: 1283967 - DNA, 15 bp, Homo sapiens
aaagtatttcaaaaa

SEQ ID NO: 1283968 - DNA, 15 bp, Homo sapiens
aaaagtatttcaaaa

SEQ ID NO: 1283969 - DNA, 15 bp, Homo sapiens
aaaaagtatttcaaa

SEQ ID NO: 1283970 - DNA, 15 bp, Homo sapiens
aaaaaagtatttcaa

SEQ ID NO: 1283971 - DNA, 15 bp, Homo sapiens
aaaaaaagtatttca

SEQ ID NO: 1283972 - DNA, 15 bp, Homo sapiens
caaaaaaagtatttc

SEQ ID NO: 1283973 - DNA, 15 bp, Homo sapiens
gcaaaaaaagtattt

SEQ ID NO: 1283974 - DNA, 15 bp, Homo sapiens
agcaaaaaaagtatt

SEQ ID NO: 1283975 - DNA, 15 bp, Homo sapiens
tagcaaaaaaagtat

SEQ ID NO: 1283976 - DNA, 15 bp, Homo sapiens
atagcaaaaaaagta

SEQ ID NO: 1283977 - DNA, 15 bp, Homo sapiens
tatagcaaaaaaagt

SEQ ID NO: 1283978 - DNA, 15 bp, Homo sapiens
atatagcaaaaaaag

SEQ ID NO: 1283979 - DNA, 15 bp, Homo sapiens
gatatagcaaaaaaa

SEQ ID NO: 1283980 - DNA, 15 bp, Homo sapiens
agatatagcaaaaaa

SEQ ID NO: 1283981 - DNA, 15 bp, Homo sapiens
tagatatagcaaaaa

SEQ ID NO: 1283982 - DNA, 15 bp, Homo sapiens
ttagatatagcaaaa

SEQ ID NO: 1283983 - DNA, 15 bp, Homo sapiens
tttagatatagcaaa

SEQ ID NO: 1283984 - DNA, 15 bp, Homo sapiens
atttagatatagcaa

SEQ ID NO: 1283985 - DNA, 15 bp, Homo sapiens
tatttagatatagca

SEQ ID NO: 1283986 - DNA, 15 bp, Homo sapiens
ttatttagatatagc

SEQ ID NO: 1283987 - DNA, 15 bp, Homo sapiens
tttatttagatatag

SEQ ID NO: 1283988 - DNA, 15 bp, Homo sapiens
ttttatttagatata

SEQ ID NO: 1283989 - DNA, 15 bp, Homo sapiens
attttatttagatat

SEQ ID NO: 1283990 - DNA, 15 bp, Homo sapiens
cattttatttagata

SEQ ID NO: 1283991 - DNA, 15 bp, Homo sapiens
acattttatttagat

SEQ ID NO: 1283992 - DNA, 15 bp, Homo sapiens
cacattttatttaga

SEQ ID NO: 1283993 - DNA, 15 bp, Homo sapiens
ccacattttatttag

SEQ ID NO: 1283994 - DNA, 15 bp, Homo sapiens
tccacattttattta

SEQ ID NO: 1283995 - DNA, 15 bp, Homo sapiens
ttccacattttattt

SEQ ID NO: 1283996 - DNA, 15 bp, Homo sapiens
tttccacattttatt

SEQ ID NO: 1283997 - DNA, 15 bp, Homo sapiens
gtttccacattttat

SEQ ID NO: 1283998 - DNA, 15 bp, Homo sapiens
tgtttccacatttta

SEQ ID NO: 1283999 - DNA, 15 bp, Homo sapiens
ttgtttccacatttt

SEQ ID NO: 1284000 - DNA, 15 bp, Homo sapiens
tttgtttccacattt

SEQ ID NO: 1284001 - DNA, 15 bp, Homo sapiens
ctttgtttccacatt

SEQ ID NO: 1284002 - DNA, 15 bp, Homo sapiens
cctttgtttccacat

SEQ ID NO: 1284003 - DNA, 15 bp, Homo sapiens
gcctttgtttccaca

SEQ ID NO: 1284004 - DNA, 15 bp, Homo sapiens
ggcctttgtttccac

SEQ ID NO: 1284005 - DNA, 15 bp, Homo sapiens
aggcctttgtttcca

SEQ ID NO: 1284006 - DNA, 15 bp, Homo sapiens
aaggcctttgtttcc

SEQ ID NO: 1284007 - DNA, 15 bp, Homo sapiens
caaggcctttgtttc

SEQ ID NO: 1284008 - DNA, 15 bp, Homo sapiens
acaaggcctttgttt

SEQ ID NO: 1284009 - DNA, 15 bp, Homo sapiens
tacaaggcctttgtt

SEQ ID NO: 1284010 - DNA, 15 bp, Homo sapiens
atacaaggcctttgt

SEQ ID NO: 1284011 - DNA, 15 bp, Homo sapiens
tatacaaggcctttg

SEQ ID NO: 1284012 - DNA, 15 bp, Homo sapiens
atatacaaggccttt

SEQ ID NO: 1284013 - DNA, 15 bp, Homo sapiens
aatatacaaggcctt

SEQ ID NO: 1284014 - DNA, 15 bp, Homo sapiens
aaatatacaaggcct

SEQ ID NO: 1284015 - DNA, 15 bp, Homo sapiens
caaatatacaaggcc

SEQ ID NO: 1284016 - DNA, 15 bp, Homo sapiens
acaaatatacaaggc

SEQ ID NO: 1284017 - DNA, 15 bp, Homo sapiens
tacaaatatacaagg

SEQ ID NO: 1284018 - DNA, 15 bp, Homo sapiens
ttacaaatatacaag

SEQ ID NO: 1284019 - DNA, 15 bp, Homo sapiens
tttacaaatatacaa

SEQ ID NO: 1284020 - DNA, 15 bp, Homo sapiens
atttacaaatataca

SEQ ID NO: 1284021 - DNA, 15 bp, Homo sapiens
tatttacaaatatac

SEQ ID NO: 1284022 - DNA, 15 bp, Homo sapiens
atatttacaaatata

SEQ ID NO: 1284023 - DNA, 15 bp, Homo sapiens
tatatttacaaatat

SEQ ID NO: 1284024 - DNA, 15 bp, Homo sapiens
gtatatttacaaata

SEQ ID NO: 1284025 - DNA, 15 bp, Homo sapiens
tgtatatttacaaat

SEQ ID NO: 1284026 - DNA, 15 bp, Homo sapiens
ttgtatatttacaaa

SEQ ID NO: 1284027 - DNA, 15 bp, Homo sapiens
tttgtatatttacaa

SEQ ID NO: 1284028 - DNA, 15 bp, Homo sapiens
ttttgtatatttaca

SEQ ID NO: 1284029 - DNA, 15 bp, Homo sapiens
attttgtatatttac

SEQ ID NO: 1284030 - DNA, 15 bp, Homo sapiens
tattttgtatattta

SEQ ID NO: 1284031 - DNA, 15 bp, Homo sapiens
ttattttgtatattt

SEQ ID NO: 1284032 - DNA, 15 bp, Homo sapiens
attattttgtatatt

SEQ ID NO: 1284033 - DNA, 15 bp, Homo sapiens
tattattttgtatat

SEQ ID NO: 1284034 - DNA, 15 bp, Homo sapiens
ctattattttgtata

SEQ ID NO: 1284035 - DNA, 15 bp, Homo sapiens
tctattattttgtat

SEQ ID NO: 1284036 - DNA, 15 bp, Homo sapiens
ttctattattttgta

SEQ ID NO: 1284037 - DNA, 15 bp, Homo sapiens
tttctattattttgt

SEQ ID NO: 1284038 - DNA, 15 bp, Homo sapiens
atttctattattttg

SEQ ID NO: 1284039 - DNA, 15 bp, Homo sapiens
catttctattatttt

SEQ ID NO: 1284040 - DNA, 15 bp, Homo sapiens
tcatttctattattt

SEQ ID NO: 1284041 - DNA, 15 bp, Homo sapiens
gtcatttctattatt

SEQ ID NO: 1284042 - DNA, 15 bp, Homo sapiens
atgtcatttctatta

SEQ ID NO: 1284043 - DNA, 15 bp, Homo sapiens
tatgtcatttctatt

SEQ ID NO: 1284044 - DNA, 15 bp, Homo sapiens
ttatgtcatttctat

SEQ ID NO: 1284045 - DNA, 15 bp, Homo sapiens
tttatgtcatttcta

SEQ ID NO: 1284046 - DNA, 15 bp, Homo sapiens
atttatgtcatttct

SEQ ID NO: 1284047 - DNA, 15 bp, Homo sapiens
tatttatgtcatttc

SEQ ID NO: 1284048 - DNA, 15 bp, Homo sapiens
ctatttatgtcattt

SEQ ID NO: 1284049 - DNA, 15 bp, Homo sapiens
actatttatgtcatt

SEQ ID NO: 1284050 - DNA, 15 bp, Homo sapiens
aactatttatgtcat

SEQ ID NO: 1284051 - DNA, 15 bp, Homo sapiens
gaactatttatgtca

SEQ ID NO: 1284052 - DNA, 15 bp, Homo sapiens
tgaactatttatgtc

SEQ ID NO: 1284053 - DNA, 15 bp, Homo sapiens
atgaactatttatgt

SEQ ID NO: 1284054 - DNA, 15 bp, Homo sapiens
tatgaactatttatg

SEQ ID NO: 1284055 - DNA, 15 bp, Homo sapiens
ctatgaactatttat

SEQ ID NO: 1284056 - DNA, 15 bp, Homo sapiens
tctatgaactattta

SEQ ID NO: 1284057 - DNA, 15 bp, Homo sapiens
ctctatgaactattt

SEQ ID NO: 1284058 - DNA, 15 bp, Homo sapiens
actctatgaactatt

SEQ ID NO: 1284059 - DNA, 15 bp, Homo sapiens
gactctatgaactat

SEQ ID NO: 1284060 - DNA, 15 bp, Homo sapiens
tgactctatgaacta

SEQ ID NO: 1284061 - DNA, 15 bp, Homo sapiens
ttgactctatgaact

SEQ ID NO: 1284062 - DNA, 15 bp, Homo sapiens
attgactctatgaac

SEQ ID NO: 1284063 - DNA, 15 bp, Homo sapiens
tattgactctatgaa

SEQ ID NO: 1284064 - DNA, 15 bp, Homo sapiens
gtattgactctatga

SEQ ID NO: 1284065 - DNA, 15 bp, Homo sapiens
ggtattgactctatg

SEQ ID NO: 1284066 - DNA, 15 bp, Homo sapiens
aggtattgactctat

SEQ ID NO: 1284067 - DNA, 15 bp, Homo sapiens
caggtattgactcta

SEQ ID NO: 1284068 - DNA, 15 bp, Homo sapiens
gcaggtattgactct

SEQ ID NO: 1284069 - DNA, 15 bp, Homo sapiens
tgcaggtattgactc

SEQ ID NO: 1284070 - DNA, 15 bp, Homo sapiens
ttgcaggtattgact

SEQ ID NO: 1284071 - DNA, 15 bp, Homo sapiens
gttgcaggtattgac

SEQ ID NO: 1284072 - DNA, 15 bp, Homo sapiens
tgttgcaggtattga

SEQ ID NO: 1284073 - DNA, 15 bp, Homo sapiens
gtgttgcaggtattg

SEQ ID NO: 1284074 - DNA, 15 bp, Homo sapiens
ggtgttgcaggtatt

SEQ ID NO: 1284075 - DNA, 15 bp, Homo sapiens
tggtgttgcaggtat

SEQ ID NO: 1284076 - DNA, 15 bp, Homo sapiens
gtggtgttgcaggta

SEQ ID NO: 1284077 - DNA, 15 bp, Homo sapiens
tgtggtgttgcaggt

SEQ ID NO: 1284078 - DNA, 15 bp, Homo sapiens
ctgtggtgttgcagg

SEQ ID NO: 1284079 - DNA, 15 bp, Homo sapiens
cctgtggtgttgcag

SEQ ID NO: 1284080 - DNA, 15 bp, Homo sapiens
gcctgtggtgttgca

SEQ ID NO: 1284081 - DNA, 15 bp, Homo sapiens
tgcctgtggtgttgc

SEQ ID NO: 1284082 - DNA, 15 bp, Homo sapiens
gtgcctgtggtgttg

SEQ ID NO: 1284083 - DNA, 15 bp, Homo sapiens
agtgcctgtggtgtt

SEQ ID NO: 1284084 - DNA, 15 bp, Homo sapiens
gagtgcctgtggtgt

SEQ ID NO: 1284085 - DNA, 15 bp, Homo sapiens
tgagtgcctgtggtg

SEQ ID NO: 1284086 - DNA, 15 bp, Homo sapiens
gtgagtgcctgtggt

SEQ ID NO: 1284087 - DNA, 15 bp, Homo sapiens
agtgagtgcctgtgg

SEQ ID NO: 1284088 - DNA, 15 bp, Homo sapiens
cagtgagtgcctgtg

SEQ ID NO: 1284089 - DNA, 15 bp, Homo sapiens
gcagtgagtgcctgt

SEQ ID NO: 1284090 - DNA, 15 bp, Homo sapiens
agcagtgagtgcctg

SEQ ID NO: 1284091 - DNA, 15 bp, Homo sapiens
aagcagtgagtgcct

SEQ ID NO: 1284092 - DNA, 15 bp, Homo sapiens
gaagcagtgagtgcc

SEQ ID NO: 1284093 - DNA, 15 bp, Homo sapiens
agaagcagtgagtgc

SEQ ID NO: 1284094 - DNA, 15 bp, Homo sapiens
gagaagcagtgagtg

SEQ ID NO: 1284095 - DNA, 15 bp, Homo sapiens
agagaagcagtgagt

SEQ ID NO: 1284096 - DNA, 15 bp, Homo sapiens
gagagaagcagtgag

SEQ ID NO: 1284097 - DNA, 15 bp, Homo sapiens
ggagagaagcagtga

SEQ ID NO: 1284098 - DNA, 15 bp, Homo sapiens
gggagagaagcagtg

SEQ ID NO: 1284099 - DNA, 15 bp, Homo sapiens
agggagagaagcagt

SEQ ID NO: 1284100 - DNA, 15 bp, Homo sapiens
aagggagagaagcag

SEQ ID NO: 1284101 - DNA, 15 bp, Homo sapiens
gaagggagagaagca

SEQ ID NO: 1284102 - DNA, 15 bp, Homo sapiens
ggaagggagagaagc

SEQ ID NO: 1284103 - DNA, 15 bp, Homo sapiens
aggaagggagagaag

SEQ ID NO: 1284104 - DNA, 15 bp, Homo sapiens
aaggaagggagagaa

SEQ ID NO: 1284105 - DNA, 15 bp, Homo sapiens
caaggaagggagaga

SEQ ID NO: 1284106 - DNA, 15 bp, Homo sapiens
acaaggaagggagag

SEQ ID NO: 1284107 - DNA, 15 bp, Homo sapiens
aacaaggaagggaga

SEQ ID NO: 1284108 - DNA, 15 bp, Homo sapiens
gaaaacaaggaaggg

SEQ ID NO: 1284109 - DNA, 15 bp, Homo sapiens
agaaaacaaggaagg

SEQ ID NO: 1284110 - DNA, 15 bp, Homo sapiens
aagaaaacaaggaag

SEQ ID NO: 1284111 - DNA, 15 bp, Homo sapiens
gaagaaaacaaggaa

SEQ ID NO: 1284112 - DNA, 15 bp, Homo sapiens
ggaagaaaacaagga

SEQ ID NO: 1284113 - DNA, 15 bp, Homo sapiens
gggaagaaaacaagg

SEQ ID NO: 1284114 - DNA, 15 bp, Homo sapiens
agggaagaaaacaag

SEQ ID NO: 1284115 - DNA, 15 bp, Homo sapiens
aagggaagaaaacaa

SEQ ID NO: 1284116 - DNA, 15 bp, Homo sapiens
taagggaagaaaaca

SEQ ID NO: 1284117 - DNA, 15 bp, Homo sapiens
ttaagggaagaaaac

SEQ ID NO: 1284118 - DNA, 15 bp, Homo sapiens
cttaagggaagaaaa

SEQ ID NO: 1284119 - DNA, 15 bp, Homo sapiens
acttaagggaagaaa

SEQ ID NO: 1284120 - DNA, 15 bp, Homo sapiens
aacttaagggaagaa

SEQ ID NO: 1284121 - DNA, 15 bp, Homo sapiens
aaacttaagggaaga

SEQ ID NO: 1284122 - DNA, 15 bp, Homo sapiens
gaaacttaagggaag

SEQ ID NO: 1284123 - DNA, 15 bp, Homo sapiens
ggaaacttaagggaa

SEQ ID NO: 1284124 - DNA, 15 bp, Homo sapiens
gggaaacttaaggga

SEQ ID NO: 1284125 - DNA, 15 bp, Homo sapiens
ggggaaacttaaggg

SEQ ID NO: 1284126 - DNA, 15 bp, Homo sapiens
aggggaaacttaagg

SEQ ID NO: 1284127 - DNA, 15 bp, Homo sapiens
taggggaaacttaag

SEQ ID NO: 1284128 - DNA, 15 bp, Homo sapiens
ctaggggaaacttaa

SEQ ID NO: 1284129 - DNA, 15 bp, Homo sapiens
tctaggggaaactta

SEQ ID NO: 1284130 - DNA, 15 bp, Homo sapiens
ttctaggggaaactt

SEQ ID NO: 1284131 - DNA, 15 bp, Homo sapiens
tttctaggggaaact

SEQ ID NO: 1284132 - DNA, 15 bp, Homo sapiens
ttttctaggggaaac

SEQ ID NO: 1284133 - DNA, 15 bp, Homo sapiens
tttttctaggggaaa

SEQ ID NO: 1284134 - DNA, 15 bp, Homo sapiens
ttttttctaggggaa

SEQ ID NO: 1284135 - DNA, 15 bp, Homo sapiens
cttttttctagggga

SEQ ID NO: 1284136 - DNA, 15 bp, Homo sapiens
ccttttttctagggg

SEQ ID NO: 1284137 - DNA, 15 bp, Homo sapiens
gccttttttctaggg

SEQ ID NO: 1284138 - DNA, 15 bp, Homo sapiens
agccttttttctagg

SEQ ID NO: 1284139 - DNA, 15 bp, Homo sapiens
aagccttttttctag

SEQ ID NO: 1284140 - DNA, 15 bp, Homo sapiens
aaagccttttttcta

SEQ ID NO: 1284141 - DNA, 15 bp, Homo sapiens
caaagccttttttct

SEQ ID NO: 1284142 - DNA, 15 bp, Homo sapiens
acaaagccttttttc

SEQ ID NO: 1284143 - DNA, 15 bp, Homo sapiens
aacaaagcctttttt

SEQ ID NO: 1284144 - DNA, 15 bp, Homo sapiens
caacaaagccttttt

SEQ ID NO: 1284145 - DNA, 15 bp, Homo sapiens
acaacaaagcctttt

SEQ ID NO: 1284146 - DNA, 15 bp, Homo sapiens
tacaacaaagccttt

SEQ ID NO: 1284147 - DNA, 15 bp, Homo sapiens
ttacaacaaagcctt

SEQ ID NO: 1284148 - DNA, 15 bp, Homo sapiens
gttacaacaaagcct

SEQ ID NO: 1284149 - DNA, 15 bp, Homo sapiens
tgttacaacaaagcc

SEQ ID NO: 1284150 - DNA, 15 bp, Homo sapiens
ttgttacaacaaagc

SEQ ID NO: 1284151 - DNA, 15 bp, Homo sapiens
attgttacaacaaag

SEQ ID NO: 1284152 - DNA, 15 bp, Homo sapiens
aattgttacaacaaa

SEQ ID NO: 1284153 - DNA, 15 bp, Homo sapiens
gaattgttacaacaa

SEQ ID NO: 1284154 - DNA, 15 bp, Homo sapiens
tgaattgttacaaca

SEQ ID NO: 1284155 - DNA, 15 bp, Homo sapiens
ctgaattgttacaac

SEQ ID NO: 1284156 - DNA, 15 bp, Homo sapiens
actgaattgttacaa

SEQ ID NO: 1284157 - DNA, 15 bp, Homo sapiens
aactgaattgttaca

SEQ ID NO: 1284158 - DNA, 15 bp, Homo sapiens
aaactgaattgttac

SEQ ID NO: 1284159 - DNA, 15 bp, Homo sapiens
aaaactgaattgtta

SEQ ID NO: 1284160 - DNA, 15 bp, Homo sapiens
gaaaactgaattgtt

SEQ ID NO: 1284161 - DNA, 15 bp, Homo sapiens
tgaaaactgaattgt

SEQ ID NO: 1284162 - DNA, 15 bp, Homo sapiens
atgaaaactgaattg

SEQ ID NO: 1284163 - DNA, 15 bp, Homo sapiens
catgaaaactgaatt

SEQ ID NO: 1284164 - DNA, 15 bp, Homo sapiens
ccatgaaaactgaat

SEQ ID NO: 1284165 - DNA, 15 bp, Homo sapiens
accatgaaaactgaa

SEQ ID NO: 1284166 - DNA, 15 bp, Homo sapiens
taccatgaaaactga

SEQ ID NO: 1284167 - DNA, 15 bp, Homo sapiens
ttaccatgaaaactg

SEQ ID NO: 1284168 - DNA, 15 bp, Homo sapiens
attaccatgaaaact

SEQ ID NO: 1284169 - DNA, 15 bp, Homo sapiens
gattaccatgaaaac

SEQ ID NO: 1284170 - DNA, 15 bp, Homo sapiens
agattaccatgaaaa

SEQ ID NO: 1284171 - DNA, 15 bp, Homo sapiens
gagattaccatgaaa

SEQ ID NO: 1284172 - DNA, 15 bp, Homo sapiens
tgagattaccatgaa

SEQ ID NO: 1284173 - DNA, 15 bp, Homo sapiens
ctgagattaccatga

SEQ ID NO: 1284174 - DNA, 15 bp, Homo sapiens
cctgagattaccatg

SEQ ID NO: 1284175 - DNA, 15 bp, Homo sapiens
tcctgagattaccat

SEQ ID NO: 1284176 - DNA, 15 bp, Homo sapiens
gtcctgagattacca

SEQ ID NO: 1284177 - DNA, 15 bp, Homo sapiens
tgtcctgagattacc

SEQ ID NO: 1284178 - DNA, 15 bp, Homo sapiens
ctgtcctgagattac

SEQ ID NO: 1284179 - DNA, 15 bp, Homo sapiens
cctgtcctgagatta

SEQ ID NO: 1284180 - DNA, 15 bp, Homo sapiens
acctgtcctgagatt

SEQ ID NO: 1284181 - DNA, 15 bp, Homo sapiens
tacctgtcctgagat

SEQ ID NO: 1284182 - DNA, 15 bp, Homo sapiens
atacctgtcctgaga

SEQ ID NO: 1284183 - DNA, 15 bp, Homo sapiens
aatacctgtcctgag

SEQ ID NO: 1284184 - DNA, 15 bp, Homo sapiens
caatacctgtcctga

SEQ ID NO: 1284185 - DNA, 15 bp, Homo sapiens
gcaatacctgtcctg

SEQ ID NO: 1284186 - DNA, 15 bp, Homo sapiens
ggcaatacctgtcct

SEQ ID NO: 1284187 - DNA, 15 bp, Homo sapiens
tggcaatacctgtcc

SEQ ID NO: 1284188 - DNA, 15 bp, Homo sapiens
atggcaatacctgtc

SEQ ID NO: 1284189 - DNA, 15 bp, Homo sapiens
tatggcaatacctgt

SEQ ID NO: 1284190 - DNA, 15 bp, Homo sapiens
atatggcaatacctg

SEQ ID NO: 1284191 - DNA, 15 bp, Homo sapiens
tatatggcaatacct

SEQ ID NO: 1284192 - DNA, 15 bp, Homo sapiens
gtatatggcaatacc

SEQ ID NO: 1284193 - DNA, 15 bp, Homo sapiens
ggtatatggcaatac

SEQ ID NO: 1284194 - DNA, 15 bp, Homo sapiens
aggtatatggcaata

SEQ ID NO: 1284195 - DNA, 15 bp, Homo sapiens
gaggtatatggcaat

SEQ ID NO: 1284196 - DNA, 15 bp, Homo sapiens
tgaggtatatggcaa

SEQ ID NO: 1284197 - DNA, 15 bp, Homo sapiens
ttgaggtatatggca

SEQ ID NO: 1284198 - DNA, 15 bp, Homo sapiens
tttgaggtatatggc

SEQ ID NO: 1284199 - DNA, 15 bp, Homo sapiens
ttttgaggtatatgg

SEQ ID NO: 1284200 - DNA, 15 bp, Homo sapiens
tttttgaggtatatg

SEQ ID NO: 1284201 - DNA, 15 bp, Homo sapiens
ttttttgaggtatat

SEQ ID NO: 1284202 - DNA, 15 bp, Homo sapiens
tttttttgaggtata

SEQ ID NO: 1284203 - DNA, 15 bp, Homo sapiens
gtttttttgaggtat

SEQ ID NO: 1284204 - DNA, 15 bp, Homo sapiens
agtttttttgaggta

SEQ ID NO: 1284205 - DNA, 15 bp, Homo sapiens
cagtttttttgaggt

SEQ ID NO: 1284206 - DNA, 15 bp, Homo sapiens
ccagtttttttgagg

SEQ ID NO: 1284207 - DNA, 15 bp, Homo sapiens
tccagtttttttgag

SEQ ID NO: 1284208 - DNA, 15 bp, Homo sapiens
ttccagtttttttga

SEQ ID NO: 1284209 - DNA, 15 bp, Homo sapiens
gttccagtttttttg

SEQ ID NO: 1284210 - DNA, 15 bp, Homo sapiens
agttccagttttttt

SEQ ID NO: 1284211 - DNA, 15 bp, Homo sapiens
cagttccagtttttt

SEQ ID NO: 1284212 - DNA, 15 bp, Homo sapiens
tcagttccagttttt

SEQ ID NO: 1284213 - DNA, 15 bp, Homo sapiens
ctcagttccagtttt

SEQ ID NO: 1284214 - DNA, 15 bp, Homo sapiens
tctcagttccagttt

SEQ ID NO: 1284215 - DNA, 15 bp, Homo sapiens
ctctcagttccagtt

SEQ ID NO: 1284216 - DNA, 15 bp, Homo sapiens
actctcagttccagt

SEQ ID NO: 1284217 - DNA, 15 bp, Homo sapiens
tactctcagttccag

SEQ ID NO: 1284218 - DNA, 15 bp, Homo sapiens
ctactctcagttcca

SEQ ID NO: 1284219 - DNA, 15 bp, Homo sapiens
actactctcagttcc

SEQ ID NO: 1284220 - DNA, 15 bp, Homo sapiens
aactactctcagttc

SEQ ID NO: 1284221 - DNA, 15 bp, Homo sapiens
gaactactctcagtt

SEQ ID NO: 1284222 - DNA, 15 bp, Homo sapiens
agaactactctcagt

SEQ ID NO: 1284223 - DNA, 15 bp, Homo sapiens
aagaactactctcag

SEQ ID NO: 1284224 - DNA, 15 bp, Homo sapiens
aaagaactactctca

SEQ ID NO: 1284225 - DNA, 15 bp, Homo sapiens
taaagaactactctc

SEQ ID NO: 1284226 - DNA, 15 bp, Homo sapiens
ttaaagaactactct

SEQ ID NO: 1284227 - DNA, 15 bp, Homo sapiens
attaaagaactactc

SEQ ID NO: 1284228 - DNA, 15 bp, Homo sapiens
tattaaagaactact

SEQ ID NO: 1284229 - DNA, 15 bp, Homo sapiens
ttattaaagaactac

SEQ ID NO: 1284230 - DNA, 15 bp, Homo sapiens
tttattaaagaacta

SEQ ID NO: 1284231 - DNA, 15 bp, Homo sapiens
atttattaaagaact

SEQ ID NO: 1284232 - DNA, 15 bp, Homo sapiens
catttattaaagaac

SEQ ID NO: 1284233 - DNA, 15 bp, Homo sapiens
gcatttattaaagaa

SEQ ID NO: 1284234 - DNA, 15 bp, Homo sapiens
agcatttattaaaga

SEQ ID NO: 1284235 - DNA, 15 bp, Homo sapiens
tagcatttattaaag

SEQ ID NO: 1284236 - DNA, 15 bp, Homo sapiens
atagcatttattaaa

SEQ ID NO: 1284237 - DNA, 15 bp, Homo sapiens
aatagcatttattaa

SEQ ID NO: 1284238 - DNA, 15 bp, Homo sapiens
gaatagcatttatta

SEQ ID NO: 1284239 - DNA, 15 bp, Homo sapiens
agaatagcatttatt

SEQ ID NO: 1284240 - DNA, 15 bp, Homo sapiens
cagaatagcatttat

SEQ ID NO: 1284241 - DNA, 15 bp, Homo sapiens
tcagaatagcattta

SEQ ID NO: 1284242 - DNA, 15 bp, Homo sapiens
ctcagaatagcattt

SEQ ID NO: 1284243 - DNA, 15 bp, Homo sapiens
cctcagaatagcatt

SEQ ID NO: 1284244 - DNA, 15 bp, Homo sapiens
gcctcagaatagcat

SEQ ID NO: 1284245 - DNA, 15 bp, Homo sapiens
agcctcagaatagca

SEQ ID NO: 1284246 - DNA, 15 bp, Homo sapiens
cagcctcagaatagc

SEQ ID NO: 1284247 - DNA, 15 bp, Homo sapiens
tcagcctcagaatag

SEQ ID NO: 1284248 - DNA, 15 bp, Homo sapiens
atcagcctcagaata

SEQ ID NO: 1284249 - DNA, 15 bp, Homo sapiens
aatcagcctcagaat

SEQ ID NO: 1284250 - DNA, 15 bp, Homo sapiens
aaatcagcctcagaa

SEQ ID NO: 1284251 - DNA, 15 bp, Homo sapiens
gaaatcagcctcaga

SEQ ID NO: 1284252 - DNA, 15 bp, Homo sapiens
agaaatcagcctcag

SEQ ID NO: 1284253 - DNA, 15 bp, Homo sapiens
aagaaatcagcctca

SEQ ID NO: 1284254 - DNA, 15 bp, Homo sapiens
aaagaaatcagcctc

SEQ ID NO: 1284255 - DNA, 15 bp, Homo sapiens
aaaagaaatcagcct

SEQ ID NO: 1284256 - DNA, 15 bp, Homo sapiens
aaaaagaaatcagcc

SEQ ID NO: 1284257 - DNA, 15 bp, Homo sapiens
gaaaaagaaatcagc

SEQ ID NO: 1284258 - DNA, 15 bp, Homo sapiens
agaaaaagaaatcag

SEQ ID NO: 1284259 - DNA, 15 bp, Homo sapiens
aagaaaaagaaatca

SEQ ID NO: 1284260 - DNA, 15 bp, Homo sapiens
aaagaaaaagaaatc

SEQ ID NO: 1284261 - DNA, 15 bp, Homo sapiens
caaagaaaaagaaat

SEQ ID NO: 1284262 - DNA, 15 bp, Homo sapiens
ccaaagaaaaagaaa

SEQ ID NO: 1284263 - DNA, 15 bp, Homo sapiens
tccaaagaaaaagaa

SEQ ID NO: 1284264 - DNA, 15 bp, Homo sapiens
atccaaagaaaaaga

SEQ ID NO: 1284265 - DNA, 15 bp, Homo sapiens
tatccaaagaaaaag

SEQ ID NO: 1284266 - DNA, 15 bp, Homo sapiens
atatccaaagaaaaa

SEQ ID NO: 1284267 - DNA, 15 bp, Homo sapiens
tatatccaaagaaaa

SEQ ID NO: 1284268 - DNA, 15 bp, Homo sapiens
atatatccaaagaaa

SEQ ID NO: 1284269 - DNA, 15 bp, Homo sapiens
gatatatccaaagaa

SEQ ID NO: 1284270 - DNA, 15 bp, Homo sapiens
agatatatccaaaga

SEQ ID NO: 1284271 - DNA, 15 bp, Homo sapiens
cagatatatccaaag

SEQ ID NO: 1284272 - DNA, 15 bp, Homo sapiens
gcagatatatccaaa

SEQ ID NO: 1284273 - DNA, 15 bp, Homo sapiens
tgcagatatatccaa

SEQ ID NO: 1284274 - DNA, 15 bp, Homo sapiens
gtgcagatatatcca

SEQ ID NO: 1284275 - DNA, 15 bp, Homo sapiens
agtgcagatatatcc

SEQ ID NO: 1284276 - DNA, 15 bp, Homo sapiens
aagtgcagatatatc

SEQ ID NO: 1284277 - DNA, 15 bp, Homo sapiens
aaagtgcagatatat

SEQ ID NO: 1284278 - DNA, 15 bp, Homo sapiens
aaaagtgcagatata

SEQ ID NO: 1284279 - DNA, 15 bp, Homo sapiens
caaaagtgcagatat

SEQ ID NO: 1284280 - DNA, 15 bp, Homo sapiens
acaaaagtgcagata

SEQ ID NO: 1284281 - DNA, 15 bp, Homo sapiens
aacaaaagtgcagat

SEQ ID NO: 1284282 - DNA, 15 bp, Homo sapiens
gaacaaaagtgcaga

SEQ ID NO: 1284283 - DNA, 15 bp, Homo sapiens
ggaacaaaagtgcag

SEQ ID NO: 1284284 - DNA, 15 bp, Homo sapiens
aggaacaaaagtgca

SEQ ID NO: 1284285 - DNA, 15 bp, Homo sapiens
aaggaacaaaagtgc

SEQ ID NO: 1284286 - DNA, 15 bp, Homo sapiens
aaaggaacaaaagtg

SEQ ID NO: 1284287 - DNA, 15 bp, Homo sapiens
gaaaggaacaaaagt

SEQ ID NO: 1284288 - DNA, 15 bp, Homo sapiens
agaaaggaacaaaag

SEQ ID NO: 1284289 - DNA, 15 bp, Homo sapiens
gagaaaggaacaaaa

SEQ ID NO: 1284290 - DNA, 15 bp, Homo sapiens
agagaaaggaacaaa

SEQ ID NO: 1284291 - DNA, 15 bp, Homo sapiens
aagagaaaggaacaa

SEQ ID NO: 1284292 - DNA, 15 bp, Homo sapiens
aaagagaaaggaaca

SEQ ID NO: 1284293 - DNA, 15 bp, Homo sapiens
aaaagagaaaggaac

SEQ ID NO: 1284294 - DNA, 15 bp, Homo sapiens
gaaaagagaaaggaa

SEQ ID NO: 1284295 - DNA, 15 bp, Homo sapiens
agaaaagagaaagga

SEQ ID NO: 1284296 - DNA, 15 bp, Homo sapiens
gagaaaagagaaagg

SEQ ID NO: 1284297 - DNA, 15 bp, Homo sapiens
agagaaaagagaaag

SEQ ID NO: 1284298 - DNA, 15 bp, Homo sapiens
aagagaaaagagaaa

SEQ ID NO: 1284299 - DNA, 15 bp, Homo sapiens
gaagagaaaagagaa

SEQ ID NO: 1284300 - DNA, 15 bp, Homo sapiens
agaagagaaaagaga

SEQ ID NO: 1284301 - DNA, 15 bp, Homo sapiens
tagaagagaaaagag

SEQ ID NO: 1284302 - DNA, 15 bp, Homo sapiens
ttagaagagaaaaga

SEQ ID NO: 1284303 - DNA, 15 bp, Homo sapiens
attagaagagaaaag

SEQ ID NO: 1284304 - DNA, 15 bp, Homo sapiens
gattagaagagaaaa

SEQ ID NO: 1284305 - DNA, 15 bp, Homo sapiens
tgattagaagagaaa

SEQ ID NO: 1284306 - DNA, 15 bp, Homo sapiens
ttgattagaagagaa

SEQ ID NO: 1284307 - DNA, 15 bp, Homo sapiens
gttgattagaagaga

SEQ ID NO: 1284308 - DNA, 15 bp, Homo sapiens
tgttgattagaagag

SEQ ID NO: 1284309 - DNA, 15 bp, Homo sapiens
atgttgattagaaga

SEQ ID NO: 1284310 - DNA, 15 bp, Homo sapiens
aatgttgattagaag

SEQ ID NO: 1284311 - DNA, 15 bp, Homo sapiens
gaatgttgattagaa

SEQ ID NO: 1284312 - DNA, 15 bp, Homo sapiens
agaatgttgattaga

SEQ ID NO: 1284313 - DNA, 15 bp, Homo sapiens
cagaatgttgattag

SEQ ID NO: 1284314 - DNA, 15 bp, Homo sapiens
tcagaatgttgatta

SEQ ID NO: 1284315 - DNA, 15 bp, Homo sapiens
atcagaatgttgatt

SEQ ID NO: 1284316 - DNA, 15 bp, Homo sapiens
gatcagaatgttgat

SEQ ID NO: 1284317 - DNA, 15 bp, Homo sapiens
agatcagaatgttga

SEQ ID NO: 1284318 - DNA, 15 bp, Homo sapiens
aagatcagaatgttg

SEQ ID NO: 1284319 - DNA, 15 bp, Homo sapiens
gaagatcagaatgtt

SEQ ID NO: 1284320 - DNA, 15 bp, Homo sapiens
agaagatcagaatgt

SEQ ID NO: 1284321 - DNA, 15 bp, Homo sapiens
tagaagatcagaatg

SEQ ID NO: 1284322 - DNA, 15 bp, Homo sapiens
atagaagatcagaat

SEQ ID NO: 1284323 - DNA, 15 bp, Homo sapiens
aatagaagatcagaa

SEQ ID NO: 1284324 - DNA, 15 bp, Homo sapiens
gaatagaagatcaga

SEQ ID NO: 1284325 - DNA, 15 bp, Homo sapiens
agaatagaagatcag

SEQ ID NO: 1284326 - DNA, 15 bp, Homo sapiens
aagaatagaagatca

SEQ ID NO: 1284327 - DNA, 15 bp, Homo sapiens
aaagaatagaagatc

SEQ ID NO: 1284328 - DNA, 15 bp, Homo sapiens
caaagaatagaagat

SEQ ID NO: 1284329 - DNA, 15 bp, Homo sapiens
acaaagaatagaaga

SEQ ID NO: 1284330 - DNA, 15 bp, Homo sapiens
gacaaagaatagaag

SEQ ID NO: 1284331 - DNA, 15 bp, Homo sapiens
tgacaaagaatagaa

SEQ ID NO: 1284332 - DNA, 15 bp, Homo sapiens
atgacaaagaataga

SEQ ID NO: 1284333 - DNA, 15 bp, Homo sapiens
aatgacaaagaatag

SEQ ID NO: 1284334 - DNA, 15 bp, Homo sapiens
aaatgacaaagaata

SEQ ID NO: 1284335 - DNA, 15 bp, Homo sapiens
gaaatgacaaagaat

SEQ ID NO: 1284336 - DNA, 15 bp, Homo sapiens
agaaatgacaaagaa

SEQ ID NO: 1284337 - DNA, 15 bp, Homo sapiens
tagaaatgacaaaga

SEQ ID NO: 1284338 - DNA, 15 bp, Homo sapiens
gtagaaatgacaaag

SEQ ID NO: 1284339 - DNA, 15 bp, Homo sapiens
agtagaaatgacaaa

SEQ ID NO: 1284340 - DNA, 15 bp, Homo sapiens
gagtagaaatgacaa

SEQ ID NO: 1284341 - DNA, 15 bp, Homo sapiens
agagtagaaatgaca

SEQ ID NO: 1284342 - DNA, 15 bp, Homo sapiens
aagagtagaaatgac

SEQ ID NO: 1284343 - DNA, 15 bp, Homo sapiens
aaagagtagaaatga

SEQ ID NO: 1284344 - DNA, 15 bp, Homo sapiens
gaaagagtagaaatg

SEQ ID NO: 1284345 - DNA, 15 bp, Homo sapiens
agaaagagtagaaat

SEQ ID NO: 1284346 - DNA, 15 bp, Homo sapiens
aagaaagagtagaaa

SEQ ID NO: 1284347 - DNA, 15 bp, Homo sapiens
aaagaaagagtagaa

SEQ ID NO: 1284348 - DNA, 15 bp, Homo sapiens
taaagaaagagtaga

SEQ ID NO: 1284349 - DNA, 15 bp, Homo sapiens
ataaagaaagagtag

SEQ ID NO: 1284350 - DNA, 15 bp, Homo sapiens
aataaagaaagagta

SEQ ID NO: 1284351 - DNA, 15 bp, Homo sapiens
aaataaagaaagagt

SEQ ID NO: 1284352 - DNA, 15 bp, Homo sapiens
caaataaagaaagag

SEQ ID NO: 1284353 - DNA, 15 bp, Homo sapiens
gcaaataaagaaaga

SEQ ID NO: 1284354 - DNA, 15 bp, Homo sapiens
agcaaataaagaaag

SEQ ID NO: 1284355 - DNA, 15 bp, Homo sapiens
aagcaaataaagaaa

SEQ ID NO: 1284356 - DNA, 15 bp, Homo sapiens
aaagcaaataaagaa

SEQ ID NO: 1284357 - DNA, 15 bp, Homo sapiens
aaaagcaaataaaga

SEQ ID NO: 1284358 - DNA, 15 bp, Homo sapiens
aaaaagcaaataaag

SEQ ID NO: 1284359 - DNA, 15 bp, Homo sapiens
gaaaaagcaaataaa

SEQ ID NO: 1284360 - DNA, 15 bp, Homo sapiens
tgaaaaagcaaataa

SEQ ID NO: 1284361 - DNA, 15 bp, Homo sapiens
gtgaaaaagcaaata

SEQ ID NO: 1284362 - DNA, 15 bp, Homo sapiens
tgtgaaaaagcaaat

SEQ ID NO: 1284363 - DNA, 15 bp, Homo sapiens
atgtgaaaaagcaaa

SEQ ID NO: 1284364 - DNA, 15 bp, Homo sapiens
tatgtgaaaaagcaa

SEQ ID NO: 1284365 - DNA, 15 bp, Homo sapiens
ctatgtgaaaaagca

SEQ ID NO: 1284366 - DNA, 15 bp, Homo sapiens
gctatgtgaaaaagc

SEQ ID NO: 1284367 - DNA, 15 bp, Homo sapiens
agctatgtgaaaaag

SEQ ID NO: 1284368 - DNA, 15 bp, Homo sapiens
aagctatgtgaaaaa

SEQ ID NO: 1284369 - DNA, 15 bp, Homo sapiens
caagctatgtgaaaa

SEQ ID NO: 1284370 - DNA, 15 bp, Homo sapiens
acaagctatgtgaaa

SEQ ID NO: 1284371 - DNA, 15 bp, Homo sapiens
gacaagctatgtgaa

SEQ ID NO: 1284372 - DNA, 15 bp, Homo sapiens
tgacaagctatgtga

SEQ ID NO: 1284373 - DNA, 15 bp, Homo sapiens
atgacaagctatgtg

SEQ ID NO: 1284374 - DNA, 15 bp, Homo sapiens
catgacaagctatgt

SEQ ID NO: 1284375 - DNA, 15 bp, Homo sapiens
ccatgacaagctatg

SEQ ID NO: 1284376 - DNA, 15 bp, Homo sapiens
gccatgacaagctat

SEQ ID NO: 1284377 - DNA, 15 bp, Homo sapiens
agccatgacaagcta

SEQ ID NO: 1284378 - DNA, 15 bp, Homo sapiens
gagccatgacaagct

SEQ ID NO: 1284379 - DNA, 15 bp, Homo sapiens
ggagccatgacaagc

SEQ ID NO: 1284380 - DNA, 15 bp, Homo sapiens
gggagccatgacaag

SEQ ID NO: 1284381 - DNA, 15 bp, Homo sapiens
ggggagccatgacaa

SEQ ID NO: 1284382 - DNA, 15 bp, Homo sapiens
gggggagccatgaca

SEQ ID NO: 1284383 - DNA, 15 bp, Homo sapiens
tgggggagccatgac

SEQ ID NO: 1284384 - DNA, 15 bp, Homo sapiens
atgggggagccatga

SEQ ID NO: 1284385 - DNA, 15 bp, Homo sapiens
aatgggggagccatg

SEQ ID NO: 1284386 - DNA, 15 bp, Homo sapiens
gaatgggggagccat

SEQ ID NO: 1284387 - DNA, 15 bp, Homo sapiens
ggaatgggggagcca

SEQ ID NO: 1284388 - DNA, 15 bp, Homo sapiens
aggaatgggggagcc

SEQ ID NO: 1284389 - DNA, 15 bp, Homo sapiens
aaggaatgggggagc

SEQ ID NO: 1284390 - DNA, 15 bp, Homo sapiens
aaaggaatgggggag

SEQ ID NO: 1284391 - DNA, 15 bp, Homo sapiens
gaaaggaatggggga

SEQ ID NO: 1284392 - DNA, 15 bp, Homo sapiens
agaaaggaatggggg

SEQ ID NO: 1284393 - DNA, 15 bp, Homo sapiens
cagaaaggaatgggg

SEQ ID NO: 1284394 - DNA, 15 bp, Homo sapiens
acagaaaggaatggg

SEQ ID NO: 1284395 - DNA, 15 bp, Homo sapiens
tacagaaaggaatgg

SEQ ID NO: 1284396 - DNA, 15 bp, Homo sapiens
atacagaaaggaatg

SEQ ID NO: 1284397 - DNA, 15 bp, Homo sapiens
gatacagaaaggaat

SEQ ID NO: 1284398 - DNA, 15 bp, Homo sapiens
tgatacagaaaggaa

SEQ ID NO: 1284399 - DNA, 15 bp, Homo sapiens
atgatacagaaagga

SEQ ID NO: 1284400 - DNA, 15 bp, Homo sapiens
tatgatacagaaagg

SEQ ID NO: 1284401 - DNA, 15 bp, Homo sapiens
ctatgatacagaaag

SEQ ID NO: 1284402 - DNA, 15 bp, Homo sapiens
cctatgatacagaaa

SEQ ID NO: 1284403 - DNA, 15 bp, Homo sapiens
tcctatgatacagaa

SEQ ID NO: 1284404 - DNA, 15 bp, Homo sapiens
ttcctatgatacaga

SEQ ID NO: 1284405 - DNA, 15 bp, Homo sapiens
gttcctatgatacag

SEQ ID NO: 1284406 - DNA, 15 bp, Homo sapiens
agttcctatgataca

SEQ ID NO: 1284407 - DNA, 15 bp, Homo sapiens
aagttcctatgatac

SEQ ID NO: 1284408 - DNA, 15 bp, Homo sapiens
aaagttcctatgata

SEQ ID NO: 1284409 - DNA, 15 bp, Homo sapiens
taaagttcctatgat

SEQ ID NO: 1284410 - DNA, 15 bp, Homo sapiens
ttaaagttcctatga

SEQ ID NO: 1284411 - DNA, 15 bp, Homo sapiens
attaaagttcctatg

SEQ ID NO: 1284412 - DNA, 15 bp, Homo sapiens
tattaaagttcctat

SEQ ID NO: 1284413 - DNA, 15 bp, Homo sapiens
ttattaaagttccta

SEQ ID NO: 1284414 - DNA, 15 bp, Homo sapiens
gttattaaagttcct

SEQ ID NO: 1284415 - DNA, 15 bp, Homo sapiens
ggttattaaagttcc

SEQ ID NO: 1284416 - DNA, 15 bp, Homo sapiens
aggttattaaagttc

SEQ ID NO: 1284417 - DNA, 15 bp, Homo sapiens
aaggttattaaagtt

SEQ ID NO: 1284418 - DNA, 15 bp, Homo sapiens
aaaggttattaaagt

SEQ ID NO: 1284419 - DNA, 15 bp, Homo sapiens
aaaaggttattaaag

SEQ ID NO: 1284420 - DNA, 15 bp, Homo sapiens
caaaaggttattaaa

SEQ ID NO: 1284421 - DNA, 15 bp, Homo sapiens
ccaaaaggttattaa

SEQ ID NO: 1284422 - DNA, 15 bp, Homo sapiens
accaaaaggttatta

SEQ ID NO: 1284423 - DNA, 15 bp, Homo sapiens
aaccaaaaggttatt

SEQ ID NO: 1284424 - DNA, 15 bp, Homo sapiens
gaaccaaaaggttat

SEQ ID NO: 1284425 - DNA, 15 bp, Homo sapiens
ggaaccaaaaggtta

SEQ ID NO: 1284426 - DNA, 15 bp, Homo sapiens
gggaaccaaaaggtt

SEQ ID NO: 1284427 - DNA, 15 bp, Homo sapiens
ggggaaccaaaaggt

SEQ ID NO: 1284428 - DNA, 15 bp, Homo sapiens
aggggaaccaaaagg

SEQ ID NO: 1284429 - DNA, 15 bp, Homo sapiens
caggggaaccaaaag

SEQ ID NO: 1284430 - DNA, 15 bp, Homo sapiens
gcaggggaaccaaaa

SEQ ID NO: 1284431 - DNA, 15 bp, Homo sapiens
agcaggggaaccaaa

SEQ ID NO: 1284432 - DNA, 15 bp, Homo sapiens
cagcaggggaaccaa

SEQ ID NO: 1284433 - DNA, 15 bp, Homo sapiens
tcagcaggggaacca

SEQ ID NO: 1284434 - DNA, 15 bp, Homo sapiens
atcagcaggggaacc

SEQ ID NO: 1284435 - DNA, 15 bp, Homo sapiens
aatcagcaggggaac

SEQ ID NO: 1284436 - DNA, 15 bp, Homo sapiens
taatcagcaggggaa

SEQ ID NO: 1284437 - DNA, 15 bp, Homo sapiens
ctaatcagcagggga

SEQ ID NO: 1284438 - DNA, 15 bp, Homo sapiens
gctaatcagcagggg

SEQ ID NO: 1284439 - DNA, 15 bp, Homo sapiens
agctaatcagcaggg

SEQ ID NO: 1284440 - DNA, 15 bp, Homo sapiens
cagctaatcagcagg

SEQ ID NO: 1284441 - DNA, 15 bp, Homo sapiens
tcagctaatcagcag

SEQ ID NO: 1284442 - DNA, 15 bp, Homo sapiens
ttcagctaatcagca

SEQ ID NO: 1284443 - DNA, 15 bp, Homo sapiens
cttcagctaatcagc

SEQ ID NO: 1284444 - DNA, 15 bp, Homo sapiens
gcttcagctaatcag

SEQ ID NO: 1284445 - DNA, 15 bp, Homo sapiens
agcttcagctaatca

SEQ ID NO: 1284446 - DNA, 15 bp, Homo sapiens
aagcttcagctaatc

SEQ ID NO: 1284447 - DNA, 15 bp, Homo sapiens
aaagcttcagctaat

SEQ ID NO: 1284448 - DNA, 15 bp, Homo sapiens
aaaagcttcagctaa

SEQ ID NO: 1284449 - DNA, 15 bp, Homo sapiens
taaaagcttcagcta

SEQ ID NO: 1284450 - DNA, 15 bp, Homo sapiens
ataaaagcttcagct

SEQ ID NO: 1284451 - DNA, 15 bp, Homo sapiens
aataaaagcttcagc

SEQ ID NO: 1284452 - DNA, 15 bp, Homo sapiens
aaataaaagcttcag

SEQ ID NO: 1284453 - DNA, 15 bp, Homo sapiens
gaaataaaagcttca

SEQ ID NO: 1284454 - DNA, 15 bp, Homo sapiens
ggaaataaaagcttc

SEQ ID NO: 1284455 - DNA, 15 bp, Homo sapiens
gggaaataaaagctt

SEQ ID NO: 1284456 - DNA, 15 bp, Homo sapiens
ggggaaataaaagct

SEQ ID NO: 1284457 - DNA, 15 bp, Homo sapiens
tggggaaataaaagc

SEQ ID NO: 1284458 - DNA, 15 bp, Homo sapiens
ctggggaaataaaag

SEQ ID NO: 1284459 - DNA, 15 bp, Homo sapiens
actggggaaataaaa

SEQ ID NO: 1284460 - DNA, 15 bp, Homo sapiens
cactggggaaataaa

SEQ ID NO: 1284461 - DNA, 15 bp, Homo sapiens
acactggggaaataa

SEQ ID NO: 1284462 - DNA, 15 bp, Homo sapiens
aacactggggaaata

SEQ ID NO: 1284463 - DNA, 15 bp, Homo sapiens
aaacactggggaaat

SEQ ID NO: 1284464 - DNA, 15 bp, Homo sapiens
caaacactggggaaa

SEQ ID NO: 1284465 - DNA, 15 bp, Homo sapiens
tcaaacactggggaa

SEQ ID NO: 1284466 - DNA, 15 bp, Homo sapiens
atcaaacactgggga

SEQ ID NO: 1284467 - DNA, 15 bp, Homo sapiens
aatcaaacactgggg

SEQ ID NO: 1284468 - DNA, 15 bp, Homo sapiens
caatcaaacactggg

SEQ ID NO: 1284469 - DNA, 15 bp, Homo sapiens
ccaatcaaacactgg

SEQ ID NO: 1284470 - DNA, 15 bp, Homo sapiens
accaatcaaacactg

SEQ ID NO: 1284471 - DNA, 15 bp, Homo sapiens
gaccaatcaaacact

SEQ ID NO: 1284472 - DNA, 15 bp, Homo sapiens
ggaccaatcaaacac

SEQ ID NO: 1284473 - DNA, 15 bp, Homo sapiens
tggaccaatcaaaca

SEQ ID NO: 1284474 - DNA, 15 bp, Homo sapiens
ctggaccaatcaaac

SEQ ID NO: 1284475 - DNA, 15 bp, Homo sapiens
gctggaccaatcaaa

SEQ ID NO: 1284476 - DNA, 15 bp, Homo sapiens
ggctggaccaatcaa

SEQ ID NO: 1284477 - DNA, 15 bp, Homo sapiens
gggctggaccaatca

SEQ ID NO: 1284478 - DNA, 15 bp, Homo sapiens
tgggctggaccaatc

SEQ ID NO: 1284479 - DNA, 15 bp, Homo sapiens
atgggctggaccaat

SEQ ID NO: 1284480 - DNA, 15 bp, Homo sapiens
aatgggctggaccaa

SEQ ID NO: 1284481 - DNA, 15 bp, Homo sapiens
aaatgggctggacca

SEQ ID NO: 1284482 - DNA, 15 bp, Homo sapiens
aaaatgggctggacc

SEQ ID NO: 1284483 - DNA, 15 bp, Homo sapiens
aaaaatgggctggac

SEQ ID NO: 1284484 - DNA, 15 bp, Homo sapiens
aaaaaatgggctgga

SEQ ID NO: 1284485 - DNA, 15 bp, Homo sapiens
aaaaaaatgggctgg

SEQ ID NO: 1284486 - DNA, 15 bp, Homo sapiens
caaaaaaatgggctg

SEQ ID NO: 1284487 - DNA, 15 bp, Homo sapiens
tcaaaaaaatgggct

SEQ ID NO: 1284488 - DNA, 15 bp, Homo sapiens
ctcaaaaaaatgggc

SEQ ID NO: 1284489 - DNA, 15 bp, Homo sapiens
actcaaaaaaatggg

SEQ ID NO: 1284490 - DNA, 15 bp, Homo sapiens
cactcaaaaaaatgg

SEQ ID NO: 1284491 - DNA, 15 bp, Homo sapiens
tcactcaaaaaaatg

SEQ ID NO: 1284492 - DNA, 15 bp, Homo sapiens
ctcactcaaaaaaat

SEQ ID NO: 1284493 - DNA, 15 bp, Homo sapiens
cctcactcaaaaaaa

SEQ ID NO: 1284494 - DNA, 15 bp, Homo sapiens
ccctcactcaaaaaa

SEQ ID NO: 1284495 - DNA, 15 bp, Homo sapiens
gccctcactcaaaaa

SEQ ID NO: 1284496 - DNA, 15 bp, Homo sapiens
agccctcactcaaaa

SEQ ID NO: 1284497 - DNA, 15 bp, Homo sapiens
tagccctcactcaaa

SEQ ID NO: 1284498 - DNA, 15 bp, Homo sapiens
atagccctcactcaa

SEQ ID NO: 1284499 - DNA, 15 bp, Homo sapiens
tatagccctcactca

SEQ ID NO: 1284500 - DNA, 15 bp, Homo sapiens
ttatagccctcactc

SEQ ID NO: 1284501 - DNA, 15 bp, Homo sapiens
gttatagccctcact

SEQ ID NO: 1284502 - DNA, 15 bp, Homo sapiens
agttatagccctcac

SEQ ID NO: 1284503 - DNA, 15 bp, Homo sapiens
gagttatagccctca

SEQ ID NO: 1284504 - DNA, 15 bp, Homo sapiens
tgagttatagccctc

SEQ ID NO: 1284505 - DNA, 15 bp, Homo sapiens
atgagttatagccct

SEQ ID NO: 1284506 - DNA, 15 bp, Homo sapiens
aatgagttatagccc

SEQ ID NO: 1284507 - DNA, 15 bp, Homo sapiens
caatgagttatagcc

SEQ ID NO: 1284508 - DNA, 15 bp, Homo sapiens
ccaatgagttatagc

SEQ ID NO: 1284509 - DNA, 15 bp, Homo sapiens
accaatgagttatag

SEQ ID NO: 1284510 - DNA, 15 bp, Homo sapiens
aaccaatgagttata

SEQ ID NO: 1284511 - DNA, 15 bp, Homo sapiens
caaccaatgagttat

SEQ ID NO: 1284512 - DNA, 15 bp, Homo sapiens
gcaaccaatgagtta

SEQ ID NO: 1284513 - DNA, 15 bp, Homo sapiens
agcaaccaatgagtt

SEQ ID NO: 1284514 - DNA, 15 bp, Homo sapiens
cagcaaccaatgagt

SEQ ID NO: 1284515 - DNA, 15 bp, Homo sapiens
ccagcaaccaatgag

SEQ ID NO: 1284516 - DNA, 15 bp, Homo sapiens
tccagcaaccaatga

SEQ ID NO: 1284517 - DNA, 15 bp, Homo sapiens
gtccagcaaccaatg

SEQ ID NO: 1284518 - DNA, 15 bp, Homo sapiens
tgtccagcaaccaat

SEQ ID NO: 1284519 - DNA, 15 bp, Homo sapiens
ctgtccagcaaccaa

SEQ ID NO: 1284520 - DNA, 15 bp, Homo sapiens
gctgtccagcaacca

SEQ ID NO: 1284521 - DNA, 15 bp, Homo sapiens
ggctgtccagcaacc

SEQ ID NO: 1284522 - DNA, 15 bp, Homo sapiens
aggctgtccagcaac

SEQ ID NO: 1284523 - DNA, 15 bp, Homo sapiens
taggctgtccagcaa

SEQ ID NO: 1284524 - DNA, 15 bp, Homo sapiens
ataggctgtccagca

SEQ ID NO: 1284525 - DNA, 15 bp, Homo sapiens
cataggctgtccagc

SEQ ID NO: 1284526 - DNA, 15 bp, Homo sapiens
ccataggctgtccag

SEQ ID NO: 1284527 - DNA, 15 bp, Homo sapiens
tccataggctgtcca

SEQ ID NO: 1284528 - DNA, 15 bp, Homo sapiens
atccataggctgtcc

SEQ ID NO: 1284529 - DNA, 15 bp, Homo sapiens
catccataggctgtc

SEQ ID NO: 1284530 - DNA, 15 bp, Homo sapiens
ccatccataggctgt

SEQ ID NO: 1284531 - DNA, 15 bp, Homo sapiens
cccatccataggctg

SEQ ID NO: 1284532 - DNA, 15 bp, Homo sapiens
acccatccataggct

SEQ ID NO: 1284533 - DNA, 15 bp, Homo sapiens
gacccatccataggc

SEQ ID NO: 1284534 - DNA, 15 bp, Homo sapiens
tgacccatccatagg

SEQ ID NO: 1284535 - DNA, 15 bp, Homo sapiens
ctgacccatccatag

SEQ ID NO: 1284536 - DNA, 15 bp, Homo sapiens
cctgacccatccata

SEQ ID NO: 1284537 - DNA, 15 bp, Homo sapiens
acctgacccatccat

SEQ ID NO: 1284538 - DNA, 15 bp, Homo sapiens
cacctgacccatcca

SEQ ID NO: 1284539 - DNA, 15 bp, Homo sapiens
tcacctgacccatcc

SEQ ID NO: 1284540 - DNA, 15 bp, Homo sapiens
gtcacctgacccatc

SEQ ID NO: 1284541 - DNA, 15 bp, Homo sapiens
agtcacctgacccat

SEQ ID NO: 1284542 - DNA, 15 bp, Homo sapiens
tagtcacctgaccca

SEQ ID NO: 1284543 - DNA, 15 bp, Homo sapiens
atagtcacctgaccc

SEQ ID NO: 1284544 - DNA, 15 bp, Homo sapiens
gatagtcacctgacc

SEQ ID NO: 1284545 - DNA, 15 bp, Homo sapiens
agatagtcacctgac

SEQ ID NO: 1284546 - DNA, 15 bp, Homo sapiens
aagatagtcacctga

SEQ ID NO: 1284547 - DNA, 15 bp, Homo sapiens
aaagatagtcacctg

SEQ ID NO: 1284548 - DNA, 15 bp, Homo sapiens
aaaagatagtcacct

SEQ ID NO: 1284549 - DNA, 15 bp, Homo sapiens
caaaagatagtcacc

SEQ ID NO: 1284550 - DNA, 15 bp, Homo sapiens
acaaaagatagtcac

SEQ ID NO: 1284551 - DNA, 15 bp, Homo sapiens
aacaaaagatagtca

SEQ ID NO: 1284552 - DNA, 15 bp, Homo sapiens
aaacaaaagatagtc

SEQ ID NO: 1284553 - DNA, 15 bp, Homo sapiens
gaaacaaaagatagt

SEQ ID NO: 1284554 - DNA, 15 bp, Homo sapiens
tgaaacaaaagatag

SEQ ID NO: 1284555 - DNA, 15 bp, Homo sapiens
ctgaaacaaaagata

SEQ ID NO: 1284556 - DNA, 15 bp, Homo sapiens
actgaaacaaaagat

SEQ ID NO: 1284557 - DNA, 15 bp, Homo sapiens
aactgaaacaaaaga

SEQ ID NO: 1284558 - DNA, 15 bp, Homo sapiens
taactgaaacaaaag

SEQ ID NO: 1284559 - DNA, 15 bp, Homo sapiens
ctaactgaaacaaaa

SEQ ID NO: 1284560 - DNA, 15 bp, Homo sapiens
gctaactgaaacaaa

SEQ ID NO: 1284561 - DNA, 15 bp, Homo sapiens
agctaactgaaacaa

SEQ ID NO: 1284562 - DNA, 15 bp, Homo sapiens
cagctaactgaaaca

SEQ ID NO: 1284563 - DNA, 15 bp, Homo sapiens
gcagctaactgaaac

SEQ ID NO: 1284564 - DNA, 15 bp, Homo sapiens
agcagctaactgaaa

SEQ ID NO: 1284565 - DNA, 15 bp, Homo sapiens
aagcagctaactgaa

SEQ ID NO: 1284566 - DNA, 15 bp, Homo sapiens
aaagcagctaactga

SEQ ID NO: 1284567 - DNA, 15 bp, Homo sapiens
caaagcagctaactg

SEQ ID NO: 1284568 - DNA, 15 bp, Homo sapiens
ccaaagcagctaact

SEQ ID NO: 1284569 - DNA, 15 bp, Homo sapiens
accaaagcagctaac

SEQ ID NO: 1284570 - DNA, 15 bp, Homo sapiens
taccaaagcagctaa

SEQ ID NO: 1284571 - DNA, 15 bp, Homo sapiens
ataccaaagcagcta

SEQ ID NO: 1284572 - DNA, 15 bp, Homo sapiens
tataccaaagcagct

SEQ ID NO: 1284573 - DNA, 15 bp, Homo sapiens
ttataccaaagcagc

SEQ ID NO: 1284574 - DNA, 15 bp, Homo sapiens
attataccaaagcag

SEQ ID NO: 1284575 - DNA, 15 bp, Homo sapiens
aattataccaaagca

SEQ ID NO: 1284576 - DNA, 15 bp, Homo sapiens
gaattataccaaagc

SEQ ID NO: 1284577 - DNA, 15 bp, Homo sapiens
ggaattataccaaag

SEQ ID NO: 1284578 - DNA, 15 bp, Homo sapiens
aggaattataccaaa

SEQ ID NO: 1284579 - DNA, 15 bp, Homo sapiens
aaggaattataccaa

SEQ ID NO: 1284580 - DNA, 15 bp, Homo sapiens
taaggaattatacca

SEQ ID NO: 1284581 - DNA, 15 bp, Homo sapiens
ataaggaattatacc

SEQ ID NO: 1284582 - DNA, 15 bp, Homo sapiens
tataaggaattatac

SEQ ID NO: 1284583 - DNA, 15 bp, Homo sapiens
gtataaggaattata

SEQ ID NO: 1284584 - DNA, 15 bp, Homo sapiens
tgtataaggaattat

SEQ ID NO: 1284585 - DNA, 15 bp, Homo sapiens
ttgtataaggaatta

SEQ ID NO: 1284586 - DNA, 15 bp, Homo sapiens
tttgtataaggaatt

SEQ ID NO: 1284587 - DNA, 15 bp, Homo sapiens
ttttgtataaggaat

SEQ ID NO: 1284588 - DNA, 15 bp, Homo sapiens
attttgtataaggaa

SEQ ID NO: 1284589 - DNA, 15 bp, Homo sapiens
aattttgtataagga

SEQ ID NO: 1284590 - DNA, 15 bp, Homo sapiens
gaattttgtataagg

SEQ ID NO: 1284591 - DNA, 15 bp, Homo sapiens
tgaattttgtataag

SEQ ID NO: 1284592 - DNA, 15 bp, Homo sapiens
atgaattttgtataa

SEQ ID NO: 1284593 - DNA, 15 bp, Homo sapiens
catgaattttgtata

SEQ ID NO: 1284594 - DNA, 15 bp, Homo sapiens
tcatgaattttgtat

SEQ ID NO: 1284595 - DNA, 15 bp, Homo sapiens
atcatgaattttgta

SEQ ID NO: 1284596 - DNA, 15 bp, Homo sapiens
aatcatgaattttgt

SEQ ID NO: 1284597 - DNA, 15 bp, Homo sapiens
taatcatgaattttg

SEQ ID NO: 1284598 - DNA, 15 bp, Homo sapiens
ctaatcatgaatttt

SEQ ID NO: 1284599 - DNA, 15 bp, Homo sapiens
tctaatcatgaattt

SEQ ID NO: 1284600 - DNA, 15 bp, Homo sapiens
ttctaatcatgaatt

SEQ ID NO: 1284601 - DNA, 15 bp, Homo sapiens
tttctaatcatgaat

SEQ ID NO: 1284602 - DNA, 15 bp, Homo sapiens
atttctaatcatgaa

SEQ ID NO: 1284603 - DNA, 15 bp, Homo sapiens
aatttctaatcatga

SEQ ID NO: 1284604 - DNA, 15 bp, Homo sapiens
taatttctaatcatg

SEQ ID NO: 1284605 - DNA, 15 bp, Homo sapiens
ctaatttctaatcat

SEQ ID NO: 1284606 - DNA, 15 bp, Homo sapiens
gctaatttctaatca

SEQ ID NO: 1284607 - DNA, 15 bp, Homo sapiens
tgctaatttctaatc

SEQ ID NO: 1284608 - DNA, 15 bp, Homo sapiens
atgctaatttctaat

SEQ ID NO: 1284609 - DNA, 15 bp, Homo sapiens
catgctaatttctaa

SEQ ID NO: 1284610 - DNA, 15 bp, Homo sapiens
acatgctaatttcta

SEQ ID NO: 1284611 - DNA, 15 bp, Homo sapiens
cacatgctaatttct

SEQ ID NO: 1284612 - DNA, 15 bp, Homo sapiens
tcacatgctaatttc

SEQ ID NO: 1284613 - DNA, 15 bp, Homo sapiens
ctcacatgctaattt

SEQ ID NO: 1284614 - DNA, 15 bp, Homo sapiens
tctcacatgctaatt

SEQ ID NO: 1284615 - DNA, 15 bp, Homo sapiens
atctcacatgctaat

SEQ ID NO: 1284616 - DNA, 15 bp, Homo sapiens
catctcacatgctaa

SEQ ID NO: 1284617 - DNA, 15 bp, Homo sapiens
acatctcacatgcta

SEQ ID NO: 1284618 - DNA, 15 bp, Homo sapiens
tacatctcacatgct

SEQ ID NO: 1284619 - DNA, 15 bp, Homo sapiens
ctacatctcacatgc

SEQ ID NO: 1284620 - DNA, 15 bp, Homo sapiens
actacatctcacatg

SEQ ID NO: 1284621 - DNA, 15 bp, Homo sapiens
aactacatctcacat

SEQ ID NO: 1284622 - DNA, 15 bp, Homo sapiens
caactacatctcaca

SEQ ID NO: 1284623 - DNA, 15 bp, Homo sapiens
tcaactacatctcac

SEQ ID NO: 1284624 - DNA, 15 bp, Homo sapiens
atcaactacatctca

SEQ ID NO: 1284625 - DNA, 15 bp, Homo sapiens
catcaactacatctc

SEQ ID NO: 1284626 - DNA, 15 bp, Homo sapiens
tcatcaactacatct

SEQ ID NO: 1284627 - DNA, 15 bp, Homo sapiens
atcatcaactacatc

SEQ ID NO: 1284628 - DNA, 15 bp, Homo sapiens
aatcatcaactacat

SEQ ID NO: 1284629 - DNA, 15 bp, Homo sapiens
caatcatcaactaca

SEQ ID NO: 1284630 - DNA, 15 bp, Homo sapiens
gcaatcatcaactac

SEQ ID NO: 1284631 - DNA, 15 bp, Homo sapiens
agcaatcatcaacta

SEQ ID NO: 1284632 - DNA, 15 bp, Homo sapiens
tagcaatcatcaact

SEQ ID NO: 1284633 - DNA, 15 bp, Homo sapiens
atagcaatcatcaac

SEQ ID NO: 1284634 - DNA, 15 bp, Homo sapiens
gatagcaatcatcaa

SEQ ID NO: 1284635 - DNA, 15 bp, Homo sapiens
agatagcaatcatca

SEQ ID NO: 1284636 - DNA, 15 bp, Homo sapiens
aagatagcaatcatc

SEQ ID NO: 1284637 - DNA, 15 bp, Homo sapiens
aaagatagcaatcat

SEQ ID NO: 1284638 - DNA, 15 bp, Homo sapiens
taaagatagcaatca

SEQ ID NO: 1284639 - DNA, 15 bp, Homo sapiens
ttaaagatagcaatc

SEQ ID NO: 1284640 - DNA, 15 bp, Homo sapiens
attaaagatagcaat

SEQ ID NO: 1284641 - DNA, 15 bp, Homo sapiens
tattaaagatagcaa

SEQ ID NO: 1284642 - DNA, 15 bp, Homo sapiens
atattaaagatagca

SEQ ID NO: 1284643 - DNA, 15 bp, Homo sapiens
gatattaaagatagc

SEQ ID NO: 1284644 - DNA, 15 bp, Homo sapiens
ggatattaaagatag

SEQ ID NO: 1284645 - DNA, 15 bp, Homo sapiens
aggatattaaagata

SEQ ID NO: 1284646 - DNA, 15 bp, Homo sapiens
taggatattaaagat

SEQ ID NO: 1284647 - DNA, 15 bp, Homo sapiens
ataggatattaaaga

SEQ ID NO: 1284648 - DNA, 15 bp, Homo sapiens
aataggatattaaag

SEQ ID NO: 1284649 - DNA, 15 bp, Homo sapiens
caataggatattaaa

SEQ ID NO: 1284650 - DNA, 15 bp, Homo sapiens
ccaataggatattaa

SEQ ID NO: 1284651 - DNA, 15 bp, Homo sapiens
tccaataggatatta

SEQ ID NO: 1284652 - DNA, 15 bp, Homo sapiens
ttccaataggatatt

SEQ ID NO: 1284653 - DNA, 15 bp, Homo sapiens
tttccaataggatat

SEQ ID NO: 1284654 - DNA, 15 bp, Homo sapiens
ttttccaataggata

SEQ ID NO: 1284655 - DNA, 15 bp, Homo sapiens
attttccaataggat

SEQ ID NO: 1284656 - DNA, 15 bp, Homo sapiens
cattttccaatagga

SEQ ID NO: 1284657 - DNA, 15 bp, Homo sapiens
acattttccaatagg

SEQ ID NO: 1284658 - DNA, 15 bp, Homo sapiens
tacattttccaatag

SEQ ID NO: 1284659 - DNA, 15 bp, Homo sapiens
atacattttccaata

SEQ ID NO: 1284660 - DNA, 15 bp, Homo sapiens
tatacattttccaat

SEQ ID NO: 1284661 - DNA, 15 bp, Homo sapiens
atatacattttccaa

SEQ ID NO: 1284662 - DNA, 15 bp, Homo sapiens
tatatacattttcca

SEQ ID NO: 1284663 - DNA, 15 bp, Homo sapiens
atatatacattttcc

SEQ ID NO: 1284664 - DNA, 15 bp, Homo sapiens
aatatatacattttc

SEQ ID NO: 1284665 - DNA, 15 bp, Homo sapiens
caatatatacatttt

SEQ ID NO: 1284666 - DNA, 15 bp, Homo sapiens
tcaatatatacattt

SEQ ID NO: 1284667 - DNA, 15 bp, Homo sapiens
atcaatatatacatt

SEQ ID NO: 1284668 - DNA, 15 bp, Homo sapiens
catcaatatatacat

SEQ ID NO: 1284669 - DNA, 15 bp, Homo sapiens
acatcaatatataca

SEQ ID NO: 1284670 - DNA, 15 bp, Homo sapiens
aacatcaatatatac

SEQ ID NO: 1284671 - DNA, 15 bp, Homo sapiens
aaacatcaatatata

SEQ ID NO: 1284672 - DNA, 15 bp, Homo sapiens
gaaacatcaatatat

SEQ ID NO: 1284673 - DNA, 15 bp, Homo sapiens
tgaaacatcaatata

SEQ ID NO: 1284674 - DNA, 15 bp, Homo sapiens
ttgaaacatcaatat

SEQ ID NO: 1284675 - DNA, 15 bp, Homo sapiens
tttgaaacatcaata

SEQ ID NO: 1284676 - DNA, 15 bp, Homo sapiens
atttgaaacatcaat

SEQ ID NO: 1284677 - DNA, 15 bp, Homo sapiens
tatttgaaacatcaa

SEQ ID NO: 1284678 - DNA, 15 bp, Homo sapiens
gtatttgaaacatca

SEQ ID NO: 1284679 - DNA, 15 bp, Homo sapiens
cgtatttgaaacatc

SEQ ID NO: 1284680 - DNA, 15 bp, Homo sapiens
acgtatttgaaacat

SEQ ID NO: 1284681 - DNA, 15 bp, Homo sapiens
aacgtatttgaaaca

SEQ ID NO: 1284682 - DNA, 15 bp, Homo sapiens
taacgtatttgaaac

SEQ ID NO: 1284683 - DNA, 15 bp, Homo sapiens
ttaacgtatttgaaa

SEQ ID NO: 1284684 - DNA, 15 bp, Homo sapiens
attaacgtatttgaa

SEQ ID NO: 1284685 - DNA, 15 bp, Homo sapiens
aattaacgtatttga

SEQ ID NO: 1284686 - DNA, 15 bp, Homo sapiens
aaattaacgtatttg

SEQ ID NO: 1284687 - DNA, 15 bp, Homo sapiens
aaaattaacgtattt

SEQ ID NO: 1284688 - DNA, 15 bp, Homo sapiens
aaaaattaacgtatt

SEQ ID NO: 1284689 - DNA, 15 bp, Homo sapiens
taaaaattaacgtat

SEQ ID NO: 1284690 - DNA, 15 bp, Homo sapiens
ataaaaattaacgta

SEQ ID NO: 1284691 - DNA, 15 bp, Homo sapiens
cataaaaattaacgt

SEQ ID NO: 1284692 - DNA, 15 bp, Homo sapiens
ccataaaaattaacg

SEQ ID NO: 1284693 - DNA, 15 bp, Homo sapiens
tccataaaaattaac

SEQ ID NO: 1284694 - DNA, 15 bp, Homo sapiens
ttccataaaaattaa

SEQ ID NO: 1284695 - DNA, 15 bp, Homo sapiens
tttccataaaaatta

SEQ ID NO: 1284696 - DNA, 15 bp, Homo sapiens
ttttccataaaaatt

SEQ ID NO: 1284697 - DNA, 15 bp, Homo sapiens
cttttccataaaaat

SEQ ID NO: 1284698 - DNA, 15 bp, Homo sapiens
tcttttccataaaaa

SEQ ID NO: 1284699 - DNA, 15 bp, Homo sapiens
ctcttttccataaaa

SEQ ID NO: 1284700 - DNA, 15 bp, Homo sapiens
actcttttccataaa

SEQ ID NO: 1284701 - DNA, 15 bp, Homo sapiens
tactcttttccataa

SEQ ID NO: 1284702 - DNA, 15 bp, Homo sapiens
ttactcttttccata

SEQ ID NO: 1284703 - DNA, 15 bp, Homo sapiens
gttactcttttccat

SEQ ID NO: 1284704 - DNA, 15 bp, Homo sapiens
cgttactcttttcca

SEQ ID NO: 1284705 - DNA, 15 bp, Homo sapiens
tcgttactcttttcc

SEQ ID NO: 1284706 - DNA, 15 bp, Homo sapiens
ttcgttactcttttc

SEQ ID NO: 1284707 - DNA, 15 bp, Homo sapiens
cttcgttactctttt

SEQ ID NO: 1284708 - DNA, 15 bp, Homo sapiens
tcttcgttactcttt

SEQ ID NO: 1284709 - DNA, 15 bp, Homo sapiens
ctcttcgttactctt

SEQ ID NO: 1284710 - DNA, 15 bp, Homo sapiens
actcttcgttactct

SEQ ID NO: 1284711 - DNA, 15 bp, Homo sapiens
cactcttcgttactc

SEQ ID NO: 1284712 - DNA, 15 bp, Homo sapiens
tcactcttcgttact

SEQ ID NO: 1284713 - DNA, 15 bp, Homo sapiens
atcactcttcgttac

SEQ ID NO: 1284714 - DNA, 15 bp, Homo sapiens
aatcactcttcgtta

SEQ ID NO: 1284715 - DNA, 15 bp, Homo sapiens
aaatcactcttcgtt

SEQ ID NO: 1284716 - DNA, 15 bp, Homo sapiens
taaatcactcttcgt

SEQ ID NO: 1284717 - DNA, 15 bp, Homo sapiens
ttaaatcactcttcg

SEQ ID NO: 1284718 - DNA, 15 bp, Homo sapiens
tttaaatcactcttc

SEQ ID NO: 1284719 - DNA, 15 bp, Homo sapiens
ctttaaatcactctt

SEQ ID NO: 1284720 - DNA, 15 bp, Homo sapiens
actttaaatcactct

SEQ ID NO: 1284721 - DNA, 15 bp, Homo sapiens
aactttaaatcactc

SEQ ID NO: 1284722 - DNA, 15 bp, Homo sapiens
taactttaaatcact

SEQ ID NO: 1284723 - DNA, 15 bp, Homo sapiens
ataactttaaatcac

SEQ ID NO: 1284724 - DNA, 15 bp, Homo sapiens
aataactttaaatca

SEQ ID NO: 1284725 - DNA, 15 bp, Homo sapiens
taataactttaaatc

SEQ ID NO: 1284726 - DNA, 15 bp, Homo sapiens
ataataactttaaat

SEQ ID NO: 1284727 - DNA, 15 bp, Homo sapiens
aataataactttaaa

SEQ ID NO: 1284728 - DNA, 15 bp, Homo sapiens
aaataataactttaa

SEQ ID NO: 1284729 - DNA, 15 bp, Homo sapiens
taaataataacttta

SEQ ID NO: 1284730 - DNA, 15 bp, Homo sapiens
ttaaataataacttt

SEQ ID NO: 1284731 - DNA, 15 bp, Homo sapiens
tttaaataataactt

SEQ ID NO: 1284732 - DNA, 15 bp, Homo sapiens
gtttaaataataact

SEQ ID NO: 1284733 - DNA, 15 bp, Homo sapiens
agtttaaataataac

SEQ ID NO: 1284734 - DNA, 15 bp, Homo sapiens
cagtttaaataataa

SEQ ID NO: 1284735 - DNA, 15 bp, Homo sapiens
gcagtttaaataata

SEQ ID NO: 1284736 - DNA, 15 bp, Homo sapiens
agcagtttaaataat

SEQ ID NO: 1284737 - DNA, 15 bp, Homo sapiens
aagcagtttaaataa

SEQ ID NO: 1284738 - DNA, 15 bp, Homo sapiens
taagcagtttaaata

SEQ ID NO: 1284739 - DNA, 15 bp, Homo sapiens
ttaagcagtttaaat

SEQ ID NO: 1284740 - DNA, 15 bp, Homo sapiens
tttaagcagtttaaa

SEQ ID NO: 1284741 - DNA, 15 bp, Homo sapiens
atttaagcagtttaa

SEQ ID NO: 1284742 - DNA, 15 bp, Homo sapiens
aatttaagcagttta

SEQ ID NO: 1284743 - DNA, 15 bp, Homo sapiens
taatttaagcagttt

SEQ ID NO: 1284744 - DNA, 15 bp, Homo sapiens
ataatttaagcagtt

SEQ ID NO: 1284745 - DNA, 15 bp, Homo sapiens
aataatttaagcagt

SEQ ID NO: 1284746 - DNA, 15 bp, Homo sapiens
aaataatttaagcag

SEQ ID NO: 1284747 - DNA, 15 bp, Homo sapiens
taaataatttaagca

SEQ ID NO: 1284748 - DNA, 15 bp, Homo sapiens
ttaaataatttaagc

SEQ ID NO: 1284749 - DNA, 15 bp, Homo sapiens
tttaaataatttaag

SEQ ID NO: 1284750 - DNA, 15 bp, Homo sapiens
atttaaataatttaa

SEQ ID NO: 1284751 - DNA, 15 bp, Homo sapiens
gatttaaataattta

SEQ ID NO: 1284752 - DNA, 15 bp, Homo sapiens
tgatttaaataattt

SEQ ID NO: 1284753 - DNA, 15 bp, Homo sapiens
ttgatttaaataatt

SEQ ID NO: 1284754 - DNA, 15 bp, Homo sapiens
gttgatttaaataat

SEQ ID NO: 1284755 - DNA, 15 bp, Homo sapiens
agttgatttaaataa

SEQ ID NO: 1284756 - DNA, 15 bp, Homo sapiens
aagttgatttaaata

SEQ ID NO: 1284757 - DNA, 15 bp, Homo sapiens
aaagttgatttaaat

SEQ ID NO: 1284758 - DNA, 15 bp, Homo sapiens
gaaagttgatttaaa

SEQ ID NO: 1284759 - DNA, 15 bp, Homo sapiens
ggaaagttgatttaa

SEQ ID NO: 1284760 - DNA, 15 bp, Homo sapiens
aggaaagttgattta

SEQ ID NO: 1284761 - DNA, 15 bp, Homo sapiens
aaggaaagttgattt

SEQ ID NO: 1284762 - DNA, 15 bp, Homo sapiens
aaaggaaagttgatt

SEQ ID NO: 1284763 - DNA, 15 bp, Homo sapiens
aaaaggaaagttgat

SEQ ID NO: 1284764 - DNA, 15 bp, Homo sapiens
gaaaaggaaagttga

SEQ ID NO: 1284765 - DNA, 15 bp, Homo sapiens
ggaaaaggaaagttg

SEQ ID NO: 1284766 - DNA, 15 bp, Homo sapiens
tggaaaaggaaagtt

SEQ ID NO: 1284767 - DNA, 15 bp, Homo sapiens
ttggaaaaggaaagt

SEQ ID NO: 1284768 - DNA, 15 bp, Homo sapiens
tttggaaaaggaaag

SEQ ID NO: 1284769 - DNA, 15 bp, Homo sapiens
ttttggaaaaggaaa

SEQ ID NO: 1284770 - DNA, 15 bp, Homo sapiens
tttttggaaaaggaa

SEQ ID NO: 1284771 - DNA, 15 bp, Homo sapiens
atttttggaaaagga

SEQ ID NO: 1284772 - DNA, 15 bp, Homo sapiens
tatttttggaaaagg

SEQ ID NO: 1284773 - DNA, 15 bp, Homo sapiens
ttatttttggaaaag

SEQ ID NO: 1284774 - DNA, 15 bp, Homo sapiens
attatttttggaaaa

SEQ ID NO: 1284775 - DNA, 15 bp, Homo sapiens
aattatttttggaaa

SEQ ID NO: 1284776 - DNA, 15 bp, Homo sapiens
gaattatttttggaa

SEQ ID NO: 1284777 - DNA, 15 bp, Homo sapiens
tgaattatttttgga

SEQ ID NO: 1284778 - DNA, 15 bp, Homo sapiens
ttgaattatttttgg

SEQ ID NO: 1284779 - DNA, 15 bp, Homo sapiens
attgaattatttttg

SEQ ID NO: 1284780 - DNA, 15 bp, Homo sapiens
aattgaattattttt

SEQ ID NO: 1284781 - DNA, 15 bp, Homo sapiens
gaattgaattatttt

SEQ ID NO: 1284782 - DNA, 15 bp, Homo sapiens
agaattgaattattt

SEQ ID NO: 1284783 - DNA, 15 bp, Homo sapiens
tagaattgaattatt

SEQ ID NO: 1284784 - DNA, 15 bp, Homo sapiens
ttagaattgaattat

SEQ ID NO: 1284785 - DNA, 15 bp, Homo sapiens
tttagaattgaatta

SEQ ID NO: 1284786 - DNA, 15 bp, Homo sapiens
ttttagaattgaatt

SEQ ID NO: 1284787 - DNA, 15 bp, Homo sapiens
attttagaattgaat

SEQ ID NO: 1284788 - DNA, 15 bp, Homo sapiens
gattttagaattgaa

SEQ ID NO: 1284789 - DNA, 15 bp, Homo sapiens
tgattttagaattga

SEQ ID NO: 1284790 - DNA, 15 bp, Homo sapiens
atgattttagaattg

SEQ ID NO: 1284791 - DNA, 15 bp, Homo sapiens
aatgattttagaatt

SEQ ID NO: 1284792 - DNA, 15 bp, Homo sapiens
caatgattttagaat

SEQ ID NO: 1284793 - DNA, 15 bp, Homo sapiens
ccaatgattttagaa

SEQ ID NO: 1284794 - DNA, 15 bp, Homo sapiens
accaatgattttaga

SEQ ID NO: 1284795 - DNA, 15 bp, Homo sapiens
caccaatgattttag

SEQ ID NO: 1284796 - DNA, 15 bp, Homo sapiens
ccaccaatgatttta

SEQ ID NO: 1284797 - DNA, 15 bp, Homo sapiens
cccaccaatgatttt

SEQ ID NO: 1284798 - DNA, 15 bp, Homo sapiens
ccccaccaatgattt

SEQ ID NO: 1284799 - DNA, 15 bp, Homo sapiens
gccccaccaatgatt

SEQ ID NO: 1284800 - DNA, 15 bp, Homo sapiens
tgccccaccaatgat

SEQ ID NO: 1284801 - DNA, 15 bp, Homo sapiens
ttgccccaccaatga

SEQ ID NO: 1284802 - DNA, 15 bp, Homo sapiens
tttgccccaccaatg

SEQ ID NO: 1284803 - DNA, 15 bp, Homo sapiens
atttgccccaccaat

SEQ ID NO: 1284804 - DNA, 15 bp, Homo sapiens
tatttgccccaccaa

SEQ ID NO: 1284805 - DNA, 15 bp, Homo sapiens
ttatttgccccacca

SEQ ID NO: 1284806 - DNA, 15 bp, Homo sapiens
tttatttgccccacc

SEQ ID NO: 1284807 - DNA, 15 bp, Homo sapiens
ctttatttgccccac

SEQ ID NO: 1284808 - DNA, 15 bp, Homo sapiens
actttatttgcccca

SEQ ID NO: 1284809 - DNA, 15 bp, Homo sapiens
tactttatttgcccc

SEQ ID NO: 1284810 - DNA, 15 bp, Homo sapiens
atactttatttgccc

SEQ ID NO: 1284811 - DNA, 15 bp, Homo sapiens
catactttatttgcc

SEQ ID NO: 1284812 - DNA, 15 bp, Homo sapiens
gcatactttatttgc

SEQ ID NO: 1284813 - DNA, 15 bp, Homo sapiens
tgcatactttatttg

SEQ ID NO: 1284814 - DNA, 15 bp, Homo sapiens
atgcatactttattt

SEQ ID NO: 1284815 - DNA, 15 bp, Homo sapiens
aatgcatactttatt

SEQ ID NO: 1284816 - DNA, 15 bp, Homo sapiens
aaatgcatactttat

SEQ ID NO: 1284817 - DNA, 15 bp, Homo sapiens
aaaatgcatacttta

SEQ ID NO: 1284818 - DNA, 15 bp, Homo sapiens
caaaatgcatacttt

SEQ ID NO: 1284819 - DNA, 15 bp, Homo sapiens
ccaaaatgcatactt

SEQ ID NO: 1284820 - DNA, 15 bp, Homo sapiens
accaaaatgcatact

SEQ ID NO: 1284821 - DNA, 15 bp, Homo sapiens
caccaaaatgcatac

SEQ ID NO: 1284822 - DNA, 15 bp, Homo sapiens
acaccaaaatgcata

SEQ ID NO: 1284823 - DNA, 15 bp, Homo sapiens
cacaccaaaatgcat

SEQ ID NO: 1284824 - DNA, 15 bp, Homo sapiens
acacaccaaaatgca

SEQ ID NO: 1284825 - DNA, 15 bp, Homo sapiens
tacacaccaaaatgc

SEQ ID NO: 1284826 - DNA, 15 bp, Homo sapiens
atacacaccaaaatg

SEQ ID NO: 1284827 - DNA, 15 bp, Homo sapiens
gatacacaccaaaat

SEQ ID NO: 1284828 - DNA, 15 bp, Homo sapiens
agatacacaccaaaa

SEQ ID NO: 1284829 - DNA, 15 bp, Homo sapiens
gagatacacaccaaa

SEQ ID NO: 1284830 - DNA, 15 bp, Homo sapiens
agagatacacaccaa

SEQ ID NO: 1284831 - DNA, 15 bp, Homo sapiens
cagagatacacacca

SEQ ID NO: 1284832 - DNA, 15 bp, Homo sapiens
tcagagatacacacc

SEQ ID NO: 1284833 - DNA, 15 bp, Homo sapiens
gtcagagatacacac

SEQ ID NO: 1284834 - DNA, 15 bp, Homo sapiens
tgtcagagatacaca

SEQ ID NO: 1284835 - DNA, 15 bp, Homo sapiens
ctgtcagagatacac

SEQ ID NO: 1284836 - DNA, 15 bp, Homo sapiens
cctgtcagagataca

SEQ ID NO: 1284837 - DNA, 15 bp, Homo sapiens
tcctgtcagagatac

SEQ ID NO: 1284838 - DNA, 15 bp, Homo sapiens
ctcctgtcagagata

SEQ ID NO: 1284839 - DNA, 15 bp, Homo sapiens
cctcctgtcagagat

SEQ ID NO: 1284840 - DNA, 15 bp, Homo sapiens
ccctcctgtcagaga

SEQ ID NO: 1284841 - DNA, 15 bp, Homo sapiens
accctcctgtcagag

SEQ ID NO: 1284842 - DNA, 15 bp, Homo sapiens
caccctcctgtcaga

SEQ ID NO: 1284843 - DNA, 15 bp, Homo sapiens
gcaccctcctgtcag

SEQ ID NO: 1284844 - DNA, 15 bp, Homo sapiens
ggcaccctcctgtca

SEQ ID NO: 1284845 - DNA, 15 bp, Homo sapiens
tggcaccctcctgtc

SEQ ID NO: 1284846 - DNA, 15 bp, Homo sapiens
gtggcaccctcctgt

SEQ ID NO: 1284847 - DNA, 15 bp, Homo sapiens
tgtggcaccctcctg

SEQ ID NO: 1284848 - DNA, 15 bp, Homo sapiens
ctgtggcaccctcct

SEQ ID NO: 1284849 - DNA, 15 bp, Homo sapiens
cctgtggcaccctcc

SEQ ID NO: 1284850 - DNA, 15 bp, Homo sapiens
ccctgtggcaccctc

SEQ ID NO: 1284851 - DNA, 15 bp, Homo sapiens
gccctgtggcaccct

SEQ ID NO: 1284852 - DNA, 15 bp, Homo sapiens
ggccctgtggcaccc

SEQ ID NO: 1284853 - DNA, 15 bp, Homo sapiens
gggccctgtggcacc

SEQ ID NO: 1284854 - DNA, 15 bp, Homo sapiens
tgggccctgtggcac

SEQ ID NO: 1284855 - DNA, 15 bp, Homo sapiens
ctgggccctgtggca

SEQ ID NO: 1284856 - DNA, 15 bp, Homo sapiens
tctgggccctgtggc

SEQ ID NO: 1284857 - DNA, 15 bp, Homo sapiens
ctctgggccctgtgg

SEQ ID NO: 1284858 - DNA, 15 bp, Homo sapiens
gctctgggccctgtg

SEQ ID NO: 1284859 - DNA, 15 bp, Homo sapiens
tgctctgggccctgt

SEQ ID NO: 1284860 - DNA, 15 bp, Homo sapiens
ctgctctgggccctg

SEQ ID NO: 1284861 - DNA, 15 bp, Homo sapiens
cctgctctgggccct

SEQ ID NO: 1284862 - DNA, 15 bp, Homo sapiens
tcctgctctgggccc

SEQ ID NO: 1284863 - DNA, 15 bp, Homo sapiens
atcctgctctgggcc

SEQ ID NO: 1284864 - DNA, 15 bp, Homo sapiens
catcctgctctgggc

SEQ ID NO: 1284865 - DNA, 15 bp, Homo sapiens
acatcctgctctggg

SEQ ID NO: 1284866 - DNA, 15 bp, Homo sapiens
aacatcctgctctgg

SEQ ID NO: 1284867 - DNA, 15 bp, Homo sapiens
taacatcctgctctg

SEQ ID NO: 1284868 - DNA, 15 bp, Homo sapiens
ctaacatcctgctct

SEQ ID NO: 1284869 - DNA, 15 bp, Homo sapiens
tctaacatcctgctc

SEQ ID NO: 1284870 - DNA, 15 bp, Homo sapiens
ctctaacatcctgct

SEQ ID NO: 1284871 - DNA, 15 bp, Homo sapiens
actctaacatcctgc

SEQ ID NO: 1284872 - DNA, 15 bp, Homo sapiens
gactctaacatcctg

SEQ ID NO: 1284873 - DNA, 15 bp, Homo sapiens
tgactctaacatcct

SEQ ID NO: 1284874 - DNA, 15 bp, Homo sapiens
ttgactctaacatcc

SEQ ID NO: 1284875 - DNA, 15 bp, Homo sapiens
tttgactctaacatc

SEQ ID NO: 1284876 - DNA, 15 bp, Homo sapiens
ctttgactctaacat

SEQ ID NO: 1284877 - DNA, 15 bp, Homo sapiens
actttgactctaaca

SEQ ID NO: 1284878 - DNA, 15 bp, Homo sapiens
tactttgactctaac

SEQ ID NO: 1284879 - DNA, 15 bp, Homo sapiens
ctactttgactctaa

SEQ ID NO: 1284880 - DNA, 15 bp, Homo sapiens
cctactttgactcta

SEQ ID NO: 1284881 - DNA, 15 bp, Homo sapiens
ccctactttgactct

SEQ ID NO: 1284882 - DNA, 15 bp, Homo sapiens
accctactttgactc

SEQ ID NO: 1284883 - DNA, 15 bp, Homo sapiens
caccctactttgact

SEQ ID NO: 1284884 - DNA, 15 bp, Homo sapiens
tcaccctactttgac

SEQ ID NO: 1284885 - DNA, 15 bp, Homo sapiens
ctcaccctactttga

SEQ ID NO: 1284886 - DNA, 15 bp, Homo sapiens
cctcaccctactttg

SEQ ID NO: 1284887 - DNA, 15 bp, Homo sapiens
tcctcaccctacttt

SEQ ID NO: 1284888 - DNA, 15 bp, Homo sapiens
ctcctcaccctactt

SEQ ID NO: 1284889 - DNA, 15 bp, Homo sapiens
cctcctcaccctact

SEQ ID NO: 1284890 - DNA, 15 bp, Homo sapiens
ccctcctcaccctac

SEQ ID NO: 1284891 - DNA, 15 bp, Homo sapiens
gccctcctcacccta

SEQ ID NO: 1284892 - DNA, 15 bp, Homo sapiens
tgccctcctcaccct

SEQ ID NO: 1284893 - DNA, 15 bp, Homo sapiens
atgccctcctcaccc

SEQ ID NO: 1284894 - DNA, 15 bp, Homo sapiens
gatgccctcctcacc

SEQ ID NO: 1284895 - DNA, 15 bp, Homo sapiens
ggatgccctcctcac

SEQ ID NO: 1284896 - DNA, 15 bp, Homo sapiens
aggatgccctcctca

SEQ ID NO: 1284897 - DNA, 15 bp, Homo sapiens
aaggatgccctcctc

SEQ ID NO: 1284898 - DNA, 15 bp, Homo sapiens
aaaggatgccctcct

SEQ ID NO: 1284899 - DNA, 15 bp, Homo sapiens
caaaggatgccctcc

SEQ ID NO: 1284900 - DNA, 15 bp, Homo sapiens
acaaaggatgccctc

SEQ ID NO: 1284901 - DNA, 15 bp, Homo sapiens
cacaaaggatgccct

SEQ ID NO: 1284902 - DNA, 15 bp, Homo sapiens
acacaaaggatgccc

SEQ ID NO: 1284903 - DNA, 15 bp, Homo sapiens
cacacaaaggatgcc

SEQ ID NO: 1284904 - DNA, 15 bp, Homo sapiens
ccacacaaaggatgc

SEQ ID NO: 1284905 - DNA, 15 bp, Homo sapiens
cccacacaaaggatg

SEQ ID NO: 1284906 - DNA, 15 bp, Homo sapiens
ccccacacaaaggat

SEQ ID NO: 1284907 - DNA, 15 bp, Homo sapiens
cccccacacaaagga

SEQ ID NO: 1284908 - DNA, 15 bp, Homo sapiens
gcccccacacaaagg

SEQ ID NO: 1284909 - DNA, 15 bp, Homo sapiens
tgcccccacacaaag

SEQ ID NO: 1284910 - DNA, 15 bp, Homo sapiens
ttgcccccacacaaa

SEQ ID NO: 1284911 - DNA, 15 bp, Homo sapiens
gttgcccccacacaa

SEQ ID NO: 1284912 - DNA, 15 bp, Homo sapiens
ggttgcccccacaca

SEQ ID NO: 1284913 - DNA, 15 bp, Homo sapiens
aggttgcccccacac

SEQ ID NO: 1284914 - DNA, 15 bp, Homo sapiens
caggttgcccccaca

SEQ ID NO: 1284915 - DNA, 15 bp, Homo sapiens
tcaggttgcccccac

SEQ ID NO: 1284916 - DNA, 15 bp, Homo sapiens
atcaggttgccccca

SEQ ID NO: 1284917 - DNA, 15 bp, Homo sapiens
catcaggttgccccc

SEQ ID NO: 1284918 - DNA, 15 bp, Homo sapiens
ccatcaggttgcccc

SEQ ID NO: 1284919 - DNA, 15 bp, Homo sapiens
cccatcaggttgccc

SEQ ID NO: 1284920 - DNA, 15 bp, Homo sapiens
ccccatcaggttgcc

SEQ ID NO: 1284921 - DNA, 15 bp, Homo sapiens
gccccatcaggttgc

SEQ ID NO: 1284922 - DNA, 15 bp, Homo sapiens
agccccatcaggttg

SEQ ID NO: 1284923 - DNA, 15 bp, Homo sapiens
cagccccatcaggtt

SEQ ID NO: 1284924 - DNA, 15 bp, Homo sapiens
gcagccccatcaggt

SEQ ID NO: 1284925 - DNA, 15 bp, Homo sapiens
agcagccccatcagg

SEQ ID NO: 1284926 - DNA, 15 bp, Homo sapiens
aagcagccccatcag

SEQ ID NO: 1284927 - DNA, 15 bp, Homo sapiens
aaagcagccccatca

SEQ ID NO: 1284928 - DNA, 15 bp, Homo sapiens
caaagcagccccatc

SEQ ID NO: 1284929 - DNA, 15 bp, Homo sapiens
acaaagcagccccat

SEQ ID NO: 1284930 - DNA, 15 bp, Homo sapiens
cacaaagcagcccca

SEQ ID NO: 1284931 - DNA, 15 bp, Homo sapiens
acacaaagcagcccc

SEQ ID NO: 1284932 - DNA, 15 bp, Homo sapiens
cacacaaagcagccc

SEQ ID NO: 1284933 - DNA, 15 bp, Homo sapiens
gcacacaaagcagcc

SEQ ID NO: 1284934 - DNA, 15 bp, Homo sapiens
tgcacacaaagcagc

SEQ ID NO: 1284935 - DNA, 15 bp, Homo sapiens
ctgcacacaaagcag

SEQ ID NO: 1284936 - DNA, 15 bp, Homo sapiens
actgcacacaaagca

SEQ ID NO: 1284937 - DNA, 15 bp, Homo sapiens
cactgcacacaaagc

SEQ ID NO: 1284938 - DNA, 15 bp, Homo sapiens
acactgcacacaaag

SEQ ID NO: 1284939 - DNA, 15 bp, Homo sapiens
gacactgcacacaaa

SEQ ID NO: 1284940 - DNA, 15 bp, Homo sapiens
tgacactgcacacaa

SEQ ID NO: 1284941 - DNA, 15 bp, Homo sapiens
ctgacactgcacaca

SEQ ID NO: 1284942 - DNA, 15 bp, Homo sapiens
tctgacactgcacac

SEQ ID NO: 1284943 - DNA, 15 bp, Homo sapiens
ctctgacactgcaca

SEQ ID NO: 1284944 - DNA, 15 bp, Homo sapiens
tctctgacactgcac

SEQ ID NO: 1284945 - DNA, 15 bp, Homo sapiens
gtctctgacactgca

SEQ ID NO: 1284946 - DNA, 15 bp, Homo sapiens
agtctctgacactgc

SEQ ID NO: 1284947 - DNA, 15 bp, Homo sapiens
tagtctctgacactg

SEQ ID NO: 1284948 - DNA, 15 bp, Homo sapiens
ttagtctctgacact

SEQ ID NO: 1284949 - DNA, 15 bp, Homo sapiens
cttagtctctgacac

SEQ ID NO: 1284950 - DNA, 15 bp, Homo sapiens
gcttagtctctgaca

SEQ ID NO: 1284951 - DNA, 15 bp, Homo sapiens
tgcttagtctctgac

SEQ ID NO: 1284952 - DNA, 15 bp, Homo sapiens
ctgcttagtctctga

SEQ ID NO: 1284953 - DNA, 15 bp, Homo sapiens
cctgcttagtctctg

SEQ ID NO: 1284954 - DNA, 15 bp, Homo sapiens
ccctgcttagtctct

SEQ ID NO: 1284955 - DNA, 15 bp, Homo sapiens
accctgcttagtctc

SEQ ID NO: 1284956 - DNA, 15 bp, Homo sapiens
caccctgcttagtct

SEQ ID NO: 1284957 - DNA, 15 bp, Homo sapiens
acaccctgcttagtc

SEQ ID NO: 1284958 - DNA, 15 bp, Homo sapiens
cacaccctgcttagt

SEQ ID NO: 1284959 - DNA, 15 bp, Homo sapiens
gcacaccctgcttag

SEQ ID NO: 1284960 - DNA, 15 bp, Homo sapiens
tgcacaccctgctta

SEQ ID NO: 1284961 - DNA, 15 bp, Homo sapiens
ctgcacaccctgctt

SEQ ID NO: 1284962 - DNA, 15 bp, Homo sapiens
cctgcacaccctgct

SEQ ID NO: 1284963 - DNA, 15 bp, Homo sapiens
gcctgcacaccctgc

SEQ ID NO: 1284964 - DNA, 15 bp, Homo sapiens
tgcctgcacaccctg

SEQ ID NO: 1284965 - DNA, 15 bp, Homo sapiens
ctgcctgcacaccct

SEQ ID NO: 1284966 - DNA, 15 bp, Homo sapiens
gctgcctgcacaccc

SEQ ID NO: 1284967 - DNA, 15 bp, Homo sapiens
ggctgcctgcacacc

SEQ ID NO: 1284968 - DNA, 15 bp, Homo sapiens
cggctgcctgcacac

SEQ ID NO: 1284969 - DNA, 15 bp, Homo sapiens
ccggctgcctgcaca

SEQ ID NO: 1284970 - DNA, 15 bp, Homo sapiens
accggctgcctgcac

SEQ ID NO: 1284971 - DNA, 15 bp, Homo sapiens
caccggctgcctgca

SEQ ID NO: 1284972 - DNA, 15 bp, Homo sapiens
gcaccggctgcctgc

SEQ ID NO: 1284973 - DNA, 15 bp, Homo sapiens
tgcaccggctgcctg

SEQ ID NO: 1284974 - DNA, 15 bp, Homo sapiens
gtgcaccggctgcct

SEQ ID NO: 1284975 - DNA, 15 bp, Homo sapiens
tgtgcaccggctgcc

SEQ ID NO: 1284976 - DNA, 15 bp, Homo sapiens
ttgtgcaccggctgc

SEQ ID NO: 1284977 - DNA, 15 bp, Homo sapiens
cttgtgcaccggctg

SEQ ID NO: 1284978 - DNA, 15 bp, Homo sapiens
acttgtgcaccggct

SEQ ID NO: 1284979 - DNA, 15 bp, Homo sapiens
cacttgtgcaccggc

SEQ ID NO: 1284980 - DNA, 15 bp, Homo sapiens
tcacttgtgcaccgg

SEQ ID NO: 1284981 - DNA, 15 bp, Homo sapiens
ctcacttgtgcaccg

SEQ ID NO: 1284982 - DNA, 15 bp, Homo sapiens
cctcacttgtgcacc

SEQ ID NO: 1284983 - DNA, 15 bp, Homo sapiens
acctcacttgtgcac

SEQ ID NO: 1284984 - DNA, 15 bp, Homo sapiens
cacctcacttgtgca

SEQ ID NO: 1284985 - DNA, 15 bp, Homo sapiens
tcacctcacttgtgc

SEQ ID NO: 1284986 - DNA, 15 bp, Homo sapiens
ctcacctcacttgtg

SEQ ID NO: 1284987 - DNA, 15 bp, Homo sapiens
cctcacctcacttgt

SEQ ID NO: 1284988 - DNA, 15 bp, Homo sapiens
tcctcacctcacttg

SEQ ID NO: 1284989 - DNA, 15 bp, Homo sapiens
ctcctcacctcactt

SEQ ID NO: 1284990 - DNA, 15 bp, Homo sapiens
cctcctcacctcact

SEQ ID NO: 1284991 - DNA, 15 bp, Homo sapiens
ccctcctcacctcac

SEQ ID NO: 1284992 - DNA, 15 bp, Homo sapiens
gccctcctcacctca

SEQ ID NO: 1284993 - DNA, 15 bp, Homo sapiens
tgccctcctcacctc

SEQ ID NO: 1284994 - DNA, 15 bp, Homo sapiens
ctgccctcctcacct

SEQ ID NO: 1284995 - DNA, 15 bp, Homo sapiens
gctgccctcctcacc

SEQ ID NO: 1284996 - DNA, 15 bp, Homo sapiens
ggctgccctcctcac

SEQ ID NO: 1284997 - DNA, 15 bp, Homo sapiens
aggctgccctcctca

SEQ ID NO: 1284998 - DNA, 15 bp, Homo sapiens
caggctgccctcctc

SEQ ID NO: 1284999 - DNA, 15 bp, Homo sapiens
gcaggctgccctcct

SEQ ID NO: 1285000 - DNA, 15 bp, Homo sapiens
agcaggctgccctcc

SEQ ID NO: 1285001 - DNA, 15 bp, Homo sapiens
cagcaggctgccctc

SEQ ID NO: 1285002 - DNA, 15 bp, Homo sapiens
acagcaggctgccct

SEQ ID NO: 1285003 - DNA, 15 bp, Homo sapiens
cacagcaggctgccc

SEQ ID NO: 1285004 - DNA, 15 bp, Homo sapiens
ccacagcaggctgcc

SEQ ID NO: 1285005 - DNA, 15 bp, Homo sapiens
cccacagcaggctgc

SEQ ID NO: 1285006 - DNA, 15 bp, Homo sapiens
ccccacagcaggctg

SEQ ID NO: 1285007 - DNA, 15 bp, Homo sapiens
tccccacagcaggct

SEQ ID NO: 1285008 - DNA, 15 bp, Homo sapiens
ctccccacagcaggc

SEQ ID NO: 1285009 - DNA, 15 bp, Homo sapiens
actccccacagcagg

SEQ ID NO: 1285010 - DNA, 15 bp, Homo sapiens
gactccccacagcag

SEQ ID NO: 1285011 - DNA, 15 bp, Homo sapiens
tgactccccacagca

SEQ ID NO: 1285012 - DNA, 15 bp, Homo sapiens
ctgactccccacagc

SEQ ID NO: 1285013 - DNA, 15 bp, Homo sapiens
tctgactccccacag

SEQ ID NO: 1285014 - DNA, 15 bp, Homo sapiens
ttctgactccccaca

SEQ ID NO: 1285015 - DNA, 15 bp, Homo sapiens
gttctgactccccac

SEQ ID NO: 1285016 - DNA, 15 bp, Homo sapiens
ggttctgactcccca

SEQ ID NO: 1285017 - DNA, 15 bp, Homo sapiens
gggttctgactcccc

SEQ ID NO: 1285018 - DNA, 15 bp, Homo sapiens
agggttctgactccc

SEQ ID NO: 1285019 - DNA, 15 bp, Homo sapiens
aagggttctgactcc

SEQ ID NO: 1285020 - DNA, 15 bp, Homo sapiens
gaagggttctgactc

SEQ ID NO: 1285021 - DNA, 15 bp, Homo sapiens
ggaagggttctgact

SEQ ID NO: 1285022 - DNA, 15 bp, Homo sapiens
tggaagggttctgac

SEQ ID NO: 1285023 - DNA, 15 bp, Homo sapiens
gtggaagggttctga

SEQ ID NO: 1285024 - DNA, 15 bp, Homo sapiens
tgtggaagggttctg

SEQ ID NO: 1285025 - DNA, 15 bp, Homo sapiens
ctgtggaagggttct

SEQ ID NO: 1285026 - DNA, 15 bp, Homo sapiens
actgtggaagggttc

SEQ ID NO: 1285027 - DNA, 15 bp, Homo sapiens
cactgtggaagggtt

SEQ ID NO: 1285028 - DNA, 15 bp, Homo sapiens
tcactgtggaagggt

SEQ ID NO: 1285029 - DNA, 15 bp, Homo sapiens
ctcactgtggaaggg

SEQ ID NO: 1285030 - DNA, 15 bp, Homo sapiens
cctcactgtggaagg

SEQ ID NO: 1285031 - DNA, 15 bp, Homo sapiens
tcctcactgtggaag

SEQ ID NO: 1285032 - DNA, 15 bp, Homo sapiens
ttcctcactgtggaa

SEQ ID NO: 1285033 - DNA, 15 bp, Homo sapiens
acttcctcactgtgg

SEQ ID NO: 1285034 - DNA, 15 bp, Homo sapiens
cacttcctcactgtg

SEQ ID NO: 1285035 - DNA, 15 bp, Homo sapiens
acacttcctcactgt

SEQ ID NO: 1285036 - DNA, 15 bp, Homo sapiens
gacacttcctcactg

SEQ ID NO: 1285037 - DNA, 15 bp, Homo sapiens
agacacttcctcact

SEQ ID NO: 1285038 - DNA, 15 bp, Homo sapiens
tagacacttcctcac

SEQ ID NO: 1285039 - DNA, 15 bp, Homo sapiens
atagacacttcctca

SEQ ID NO: 1285040 - DNA, 15 bp, Homo sapiens
catagacacttcctc

SEQ ID NO: 1285041 - DNA, 15 bp, Homo sapiens
gcatagacacttcct

SEQ ID NO: 1285042 - DNA, 15 bp, Homo sapiens
agcatagacacttcc

SEQ ID NO: 1285043 - DNA, 15 bp, Homo sapiens
tagcatagacacttc

SEQ ID NO: 1285044 - DNA, 15 bp, Homo sapiens
ttagcatagacactt

SEQ ID NO: 1285045 - DNA, 15 bp, Homo sapiens
cttagcatagacact

SEQ ID NO: 1285046 - DNA, 15 bp, Homo sapiens
ccttagcatagacac

SEQ ID NO: 1285047 - DNA, 15 bp, Homo sapiens
cccttagcatagaca

SEQ ID NO: 1285048 - DNA, 15 bp, Homo sapiens
ccccttagcatagac

SEQ ID NO: 1285049 - DNA, 15 bp, Homo sapiens
accccttagcataga

SEQ ID NO: 1285050 - DNA, 15 bp, Homo sapiens
caccccttagcatag

SEQ ID NO: 1285051 - DNA, 15 bp, Homo sapiens
ccaccccttagcata

SEQ ID NO: 1285052 - DNA, 15 bp, Homo sapiens
cccaccccttagcat

SEQ ID NO: 1285053 - DNA, 15 bp, Homo sapiens
ccccaccccttagca

SEQ ID NO: 1285054 - DNA, 15 bp, Homo sapiens
accccaccccttagc

SEQ ID NO: 1285055 - DNA, 15 bp, Homo sapiens
taccccaccccttag

SEQ ID NO: 1285056 - DNA, 15 bp, Homo sapiens
ttaccccacccctta

SEQ ID NO: 1285057 - DNA, 15 bp, Homo sapiens
cttaccccacccctt

SEQ ID NO: 1285058 - DNA, 15 bp, Homo sapiens
acttaccccacccct

SEQ ID NO: 1285059 - DNA, 15 bp, Homo sapiens
gacttaccccacccc

SEQ ID NO: 1285060 - DNA, 15 bp, Homo sapiens
ggacttaccccaccc

SEQ ID NO: 1285061 - DNA, 15 bp, Homo sapiens
tggacttaccccacc

SEQ ID NO: 1285062 - DNA, 15 bp, Homo sapiens
ctggacttaccccac

SEQ ID NO: 1285063 - DNA, 15 bp, Homo sapiens
tctggacttacccca

SEQ ID NO: 1285064 - DNA, 15 bp, Homo sapiens
ttctggacttacccc

SEQ ID NO: 1285065 - DNA, 15 bp, Homo sapiens
gttctggacttaccc

SEQ ID NO: 1285066 - DNA, 15 bp, Homo sapiens
agttctggacttacc

SEQ ID NO: 1285067 - DNA, 15 bp, Homo sapiens
cagttctggacttac

SEQ ID NO: 1285068 - DNA, 15 bp, Homo sapiens
ccagttctggactta

SEQ ID NO: 1285069 - DNA, 15 bp, Homo sapiens
cccagttctggactt

SEQ ID NO: 1285070 - DNA, 15 bp, Homo sapiens
tcccagttctggact

SEQ ID NO: 1285071 - DNA, 15 bp, Homo sapiens
ctcccagttctggac

SEQ ID NO: 1285072 - DNA, 15 bp, Homo sapiens
actcccagttctgga

SEQ ID NO: 1285073 - DNA, 15 bp, Homo sapiens
gactcccagttctgg

SEQ ID NO: 1285074 - DNA, 15 bp, Homo sapiens
tgactcccagttctg

SEQ ID NO: 1285075 - DNA, 15 bp, Homo sapiens
ctgactcccagttct

SEQ ID NO: 1285076 - DNA, 15 bp, Homo sapiens
actgactcccagttc

SEQ ID NO: 1285077 - DNA, 15 bp, Homo sapiens
aactgactcccagtt

SEQ ID NO: 1285078 - DNA, 15 bp, Homo sapiens
gaactgactcccagt

SEQ ID NO: 1285079 - DNA, 15 bp, Homo sapiens
agaactgactcccag

SEQ ID NO: 1285080 - DNA, 15 bp, Homo sapiens
cagaactgactccca

SEQ ID NO: 1285081 - DNA, 15 bp, Homo sapiens
tcagaactgactccc

SEQ ID NO: 1285082 - DNA, 15 bp, Homo sapiens
ctcagaactgactcc

SEQ ID NO: 1285083 - DNA, 15 bp, Homo sapiens
tctcagaactgactc

SEQ ID NO: 1285084 - DNA, 15 bp, Homo sapiens
ttctcagaactgact

SEQ ID NO: 1285085 - DNA, 15 bp, Homo sapiens
cttctcagaactgac

SEQ ID NO: 1285086 - DNA, 15 bp, Homo sapiens
tcttctcagaactga

SEQ ID NO: 1285087 - DNA, 15 bp, Homo sapiens
ttcttctcagaactg

SEQ ID NO: 1285088 - DNA, 15 bp, Homo sapiens
gttcttctcagaact

SEQ ID NO: 1285089 - DNA, 15 bp, Homo sapiens
tgttcttctcagaac

SEQ ID NO: 1285090 - DNA, 15 bp, Homo sapiens
ctgttcttctcagaa

SEQ ID NO: 1285091 - DNA, 15 bp, Homo sapiens
tctgttcttctcaga

SEQ ID NO: 1285092 - DNA, 15 bp, Homo sapiens
ttctgttcttctcag

SEQ ID NO: 1285093 - DNA, 15 bp, Homo sapiens
tttctgttcttctca

SEQ ID NO: 1285094 - DNA, 15 bp, Homo sapiens
ttttctgttcttctc

SEQ ID NO: 1285095 - DNA, 15 bp, Homo sapiens
cttttctgttcttct

SEQ ID NO: 1285096 - DNA, 15 bp, Homo sapiens
acttttctgttcttc

SEQ ID NO: 1285097 - DNA, 15 bp, Homo sapiens
cacttttctgttctt

SEQ ID NO: 1285098 - DNA, 15 bp, Homo sapiens
acacttttctgttct

SEQ ID NO: 1285099 - DNA, 15 bp, Homo sapiens
gacacttttctgttc

SEQ ID NO: 1285100 - DNA, 15 bp, Homo sapiens
ggacacttttctgtt

SEQ ID NO: 1285101 - DNA, 15 bp, Homo sapiens
tggacacttttctgt

SEQ ID NO: 1285102 - DNA, 15 bp, Homo sapiens
gtggacacttttctg

SEQ ID NO: 1285103 - DNA, 15 bp, Homo sapiens
tgtggacacttttct

SEQ ID NO: 1285104 - DNA, 15 bp, Homo sapiens
gtgtggacacttttc

SEQ ID NO: 1285105 - DNA, 15 bp, Homo sapiens
cgtgtggacactttt

SEQ ID NO: 1285106 - DNA, 15 bp, Homo sapiens
ccgtgtggacacttt

SEQ ID NO: 1285107 - DNA, 15 bp, Homo sapiens
cccgtgtggacactt

SEQ ID NO: 1285108 - DNA, 15 bp, Homo sapiens
ccccgtgtggacact

SEQ ID NO: 1285109 - DNA, 15 bp, Homo sapiens
cccccgtgtggacac

SEQ ID NO: 1285110 - DNA, 15 bp, Homo sapiens
tcccccgtgtggaca

SEQ ID NO: 1285111 - DNA, 15 bp, Homo sapiens
ctcccccgtgtggac

SEQ ID NO: 1285112 - DNA, 15 bp, Homo sapiens
cctcccccgtgtgga

SEQ ID NO: 1285113 - DNA, 15 bp, Homo sapiens
ccctcccccgtgtgg

SEQ ID NO: 1285114 - DNA, 15 bp, Homo sapiens
cccctcccccgtgtg

SEQ ID NO: 1285115 - DNA, 15 bp, Homo sapiens
ccccctcccccgtgt

SEQ ID NO: 1285116 - DNA, 15 bp, Homo sapiens
accccctcccccgtg

SEQ ID NO: 1285117 - DNA, 15 bp, Homo sapiens
caccccctcccccgt

SEQ ID NO: 1285118 - DNA, 15 bp, Homo sapiens
ccaccccctcccccg

SEQ ID NO: 1285119 - DNA, 15 bp, Homo sapiens
gccaccccctccccc

SEQ ID NO: 1285120 - DNA, 15 bp, Homo sapiens
agccaccccctcccc

SEQ ID NO: 1285121 - DNA, 15 bp, Homo sapiens
aagccaccccctccc

SEQ ID NO: 1285122 - DNA, 15 bp, Homo sapiens
aaagccaccccctcc

SEQ ID NO: 1285123 - DNA, 15 bp, Homo sapiens
caaagccaccccctc

SEQ ID NO: 1285124 - DNA, 15 bp, Homo sapiens
ccaaagccaccccct

SEQ ID NO: 1285125 - DNA, 15 bp, Homo sapiens
tccaaagccaccccc

SEQ ID NO: 1285126 - DNA, 15 bp, Homo sapiens
ctccaaagccacccc

SEQ ID NO: 1285127 - DNA, 15 bp, Homo sapiens
tctccaaagccaccc

SEQ ID NO: 1285128 - DNA, 15 bp, Homo sapiens
atctccaaagccacc

SEQ ID NO: 1285129 - DNA, 15 bp, Homo sapiens
tatctccaaagccac

SEQ ID NO: 1285130 - DNA, 15 bp, Homo sapiens
ctatctccaaagcca

SEQ ID NO: 1285131 - DNA, 15 bp, Homo sapiens
tctatctccaaagcc

SEQ ID NO: 1285132 - DNA, 15 bp, Homo sapiens
ttctatctccaaagc

SEQ ID NO: 1285133 - DNA, 15 bp, Homo sapiens
tttctatctccaaag

SEQ ID NO: 1285134 - DNA, 15 bp, Homo sapiens
ttttctatctccaaa

SEQ ID NO: 1285135 - DNA, 15 bp, Homo sapiens
attttctatctccaa

SEQ ID NO: 1285136 - DNA, 15 bp, Homo sapiens
cattttctatctcca

SEQ ID NO: 1285137 - DNA, 15 bp, Homo sapiens
ccattttctatctcc

SEQ ID NO: 1285138 - DNA, 15 bp, Homo sapiens
accattttctatctc

SEQ ID NO: 1285139 - DNA, 15 bp, Homo sapiens
aaccattttctatct

SEQ ID NO: 1285140 - DNA, 15 bp, Homo sapiens
taaccattttctatc

SEQ ID NO: 1285141 - DNA, 15 bp, Homo sapiens
gtaaccattttctat

SEQ ID NO: 1285142 - DNA, 15 bp, Homo sapiens
agtaaccattttcta

SEQ ID NO: 1285143 - DNA, 15 bp, Homo sapiens
aagtaaccattttct

SEQ ID NO: 1285144 - DNA, 15 bp, Homo sapiens
taagtaaccattttc

SEQ ID NO: 1285145 - DNA, 15 bp, Homo sapiens
gtaagtaaccatttt

SEQ ID NO: 1285146 - DNA, 15 bp, Homo sapiens
tgtaagtaaccattt

SEQ ID NO: 1285147 - DNA, 15 bp, Homo sapiens
ctgtaagtaaccatt

SEQ ID NO: 1285148 - DNA, 15 bp, Homo sapiens
cctgtaagtaaccat

SEQ ID NO: 1285149 - DNA, 15 bp, Homo sapiens
ccctgtaagtaacca

SEQ ID NO: 1285150 - DNA, 15 bp, Homo sapiens
cccctgtaagtaacc

SEQ ID NO: 1285151 - DNA, 15 bp, Homo sapiens
ccccctgtaagtaac

SEQ ID NO: 1285152 - DNA, 15 bp, Homo sapiens
tccccctgtaagtaa

SEQ ID NO: 1285153 - DNA, 15 bp, Homo sapiens
atccccctgtaagta

SEQ ID NO: 1285154 - DNA, 15 bp, Homo sapiens
aatccccctgtaagt

SEQ ID NO: 1285155 - DNA, 15 bp, Homo sapiens
caatccccctgtaag

SEQ ID NO: 1285156 - DNA, 15 bp, Homo sapiens
tcaatccccctgtaa

SEQ ID NO: 1285157 - DNA, 15 bp, Homo sapiens
atcaatccccctgta

SEQ ID NO: 1285158 - DNA, 15 bp, Homo sapiens
aatcaatccccctgt

SEQ ID NO: 1285159 - DNA, 15 bp, Homo sapiens
taatcaatccccctg

SEQ ID NO: 1285160 - DNA, 15 bp, Homo sapiens
ttaatcaatccccct

SEQ ID NO: 1285161 - DNA, 15 bp, Homo sapiens
tttaatcaatccccc

SEQ ID NO: 1285162 - DNA, 15 bp, Homo sapiens
atttaatcaatcccc

SEQ ID NO: 1285163 - DNA, 15 bp, Homo sapiens
catttaatcaatccc

SEQ ID NO: 1285164 - DNA, 15 bp, Homo sapiens
tcatttaatcaatcc

SEQ ID NO: 1285165 - DNA, 15 bp, Homo sapiens
ctcatttaatcaatc

SEQ ID NO: 1285166 - DNA, 15 bp, Homo sapiens
actcatttaatcaat

SEQ ID NO: 1285167 - DNA, 15 bp, Homo sapiens
tactcatttaatcaa

SEQ ID NO: 1285168 - DNA, 15 bp, Homo sapiens
acttactcatttaat

SEQ ID NO: 1285169 - DNA, 15 bp, Homo sapiens
tacttactcatttaa

SEQ ID NO: 1285170 - DNA, 15 bp, Homo sapiens
ttacttactcattta

SEQ ID NO: 1285171 - DNA, 15 bp, Homo sapiens
tttacttactcattt

SEQ ID NO: 1285172 - DNA, 15 bp, Homo sapiens
gtttacttactcatt

SEQ ID NO: 1285173 - DNA, 15 bp, Homo sapiens
agtttacttactcat

SEQ ID NO: 1285174 - DNA, 15 bp, Homo sapiens
cagtttacttactca

SEQ ID NO: 1285175 - DNA, 15 bp, Homo sapiens
tcagtttacttactc

SEQ ID NO: 1285176 - DNA, 15 bp, Homo sapiens
ctcagtttacttact

SEQ ID NO: 1285177 - DNA, 15 bp, Homo sapiens
cctcagtttacttac

SEQ ID NO: 1285178 - DNA, 15 bp, Homo sapiens
tcctcagtttactta

SEQ ID NO: 1285179 - DNA, 15 bp, Homo sapiens
atcctcagtttactt

SEQ ID NO: 1285180 - DNA, 15 bp, Homo sapiens
catcctcagtttact

SEQ ID NO: 1285181 - DNA, 15 bp, Homo sapiens
tcatcctcagtttac

SEQ ID NO: 1285182 - DNA, 15 bp, Homo sapiens
ttcatcctcagttta

SEQ ID NO: 1285183 - DNA, 15 bp, Homo sapiens
attcatcctcagttt

SEQ ID NO: 1285184 - DNA, 15 bp, Homo sapiens
cattcatcctcagtt

SEQ ID NO: 1285185 - DNA, 15 bp, Homo sapiens
ccattcatcctcagt

SEQ ID NO: 1285186 - DNA, 15 bp, Homo sapiens
cccattcatcctcag

SEQ ID NO: 1285187 - DNA, 15 bp, Homo sapiens
acccattcatcctca

SEQ ID NO: 1285188 - DNA, 15 bp, Homo sapiens
aacccattcatcctc

SEQ ID NO: 1285189 - DNA, 15 bp, Homo sapiens
gaacccattcatcct

SEQ ID NO: 1285190 - DNA, 15 bp, Homo sapiens
ggaacccattcatcc

SEQ ID NO: 1285191 - DNA, 15 bp, Homo sapiens
tggaacccattcatc

SEQ ID NO: 1285192 - DNA, 15 bp, Homo sapiens
ctggaacccattcat

SEQ ID NO: 1285193 - DNA, 15 bp, Homo sapiens
cctggaacccattca

SEQ ID NO: 1285194 - DNA, 15 bp, Homo sapiens
acctggaacccattc

SEQ ID NO: 1285195 - DNA, 15 bp, Homo sapiens
aacctggaacccatt

SEQ ID NO: 1285196 - DNA, 15 bp, Homo sapiens
aaacctggaacccat

SEQ ID NO: 1285197 - DNA, 15 bp, Homo sapiens
gaaacctggaaccca

SEQ ID NO: 1285198 - DNA, 15 bp, Homo sapiens
ggaaacctggaaccc

SEQ ID NO: 1285199 - DNA, 15 bp, Homo sapiens
gggaaacctggaacc

SEQ ID NO: 1285200 - DNA, 15 bp, Homo sapiens
tgggaaacctggaac

SEQ ID NO: 1285201 - DNA, 15 bp, Homo sapiens
gtgggaaacctggaa

SEQ ID NO: 1285202 - DNA, 15 bp, Homo sapiens
agtgggaaacctgga

SEQ ID NO: 1285203 - DNA, 15 bp, Homo sapiens
cagtgggaaacctgg

SEQ ID NO: 1285204 - DNA, 15 bp, Homo sapiens
acagtgggaaacctg

SEQ ID NO: 1285205 - DNA, 15 bp, Homo sapiens
gacagtgggaaacct

SEQ ID NO: 1285206 - DNA, 15 bp, Homo sapiens
tgacagtgggaaacc

SEQ ID NO: 1285207 - DNA, 15 bp, Homo sapiens
ttgacagtgggaaac

SEQ ID NO: 1285208 - DNA, 15 bp, Homo sapiens
attgacagtgggaaa

SEQ ID NO: 1285209 - DNA, 15 bp, Homo sapiens
cattgacagtgggaa

SEQ ID NO: 1285210 - DNA, 15 bp, Homo sapiens
tcattgacagtggga

SEQ ID NO: 1285211 - DNA, 15 bp, Homo sapiens
ttcattgacagtggg

SEQ ID NO: 1285212 - DNA, 15 bp, Homo sapiens
cttcattgacagtgg

SEQ ID NO: 1285213 - DNA, 15 bp, Homo sapiens
tcttcattgacagtg

SEQ ID NO: 1285214 - DNA, 15 bp, Homo sapiens
ctcttcattgacagt

SEQ ID NO: 1285215 - DNA, 15 bp, Homo sapiens
actcttcattgacag

SEQ ID NO: 1285216 - DNA, 15 bp, Homo sapiens
aactcttcattgaca

SEQ ID NO: 1285217 - DNA, 15 bp, Homo sapiens
taactcttcattgac

SEQ ID NO: 1285218 - DNA, 15 bp, Homo sapiens
gtaactcttcattga

SEQ ID NO: 1285219 - DNA, 15 bp, Homo sapiens
tgtaactcttcattg

SEQ ID NO: 1285220 - DNA, 15 bp, Homo sapiens
ttgtaactcttcatt

SEQ ID NO: 1285221 - DNA, 15 bp, Homo sapiens
tttgtaactcttcat

SEQ ID NO: 1285222 - DNA, 15 bp, Homo sapiens
atttgtaactcttca

SEQ ID NO: 1285223 - DNA, 15 bp, Homo sapiens
tatttgtaactcttc

SEQ ID NO: 1285224 - DNA, 15 bp, Homo sapiens
atatttgtaactctt

SEQ ID NO: 1285225 - DNA, 15 bp, Homo sapiens
tatatttgtaactct

SEQ ID NO: 1285226 - DNA, 15 bp, Homo sapiens
ctatatttgtaactc

SEQ ID NO: 1285227 - DNA, 15 bp, Homo sapiens
tctatatttgtaact

SEQ ID NO: 1285228 - DNA, 15 bp, Homo sapiens
ttctatatttgtaac

SEQ ID NO: 1285229 - DNA, 15 bp, Homo sapiens
tttctatatttgtaa

SEQ ID NO: 1285230 - DNA, 15 bp, Homo sapiens
ctttctatatttgta

SEQ ID NO: 1285231 - DNA, 15 bp, Homo sapiens
cctttctatatttgt

SEQ ID NO: 1285232 - DNA, 15 bp, Homo sapiens
ccctttctatatttg

SEQ ID NO: 1285233 - DNA, 15 bp, Homo sapiens
tccctttctatattt

SEQ ID NO: 1285234 - DNA, 15 bp, Homo sapiens
ttccctttctatatt

SEQ ID NO: 1285235 - DNA, 15 bp, Homo sapiens
tttccctttctatat

SEQ ID NO: 1285236 - DNA, 15 bp, Homo sapiens
gtttccctttctata

SEQ ID NO: 1285237 - DNA, 15 bp, Homo sapiens
tgtttccctttctat

SEQ ID NO: 1285238 - DNA, 15 bp, Homo sapiens
gtgtttccctttcta

SEQ ID NO: 1285239 - DNA, 15 bp, Homo sapiens
agtgtttccctttct

SEQ ID NO: 1285240 - DNA, 15 bp, Homo sapiens
tagtgtttccctttc

SEQ ID NO: 1285241 - DNA, 15 bp, Homo sapiens
ttagtgtttcccttt

SEQ ID NO: 1285242 - DNA, 15 bp, Homo sapiens
tttagtgtttccctt

SEQ ID NO: 1285243 - DNA, 15 bp, Homo sapiens
ttttagtgtttccct

SEQ ID NO: 1285244 - DNA, 15 bp, Homo sapiens
attttagtgtttccc

SEQ ID NO: 1285245 - DNA, 15 bp, Homo sapiens
cattttagtgtttcc

SEQ ID NO: 1285246 - DNA, 15 bp, Homo sapiens
tcattttagtgtttc

SEQ ID NO: 1285247 - DNA, 15 bp, Homo sapiens
ttcattttagtgttt

SEQ ID NO: 1285248 - DNA, 15 bp, Homo sapiens
cttcattttagtgtt

SEQ ID NO: 1285249 - DNA, 15 bp, Homo sapiens
gcttcattttagtgt

SEQ ID NO: 1285250 - DNA, 15 bp, Homo sapiens
tgcttcattttagtg

SEQ ID NO: 1285251 - DNA, 15 bp, Homo sapiens
atgcttcattttagt

SEQ ID NO: 1285252 - DNA, 15 bp, Homo sapiens
tatgcttcattttag

SEQ ID NO: 1285253 - DNA, 15 bp, Homo sapiens
atatgcttcatttta

SEQ ID NO: 1285254 - DNA, 15 bp, Homo sapiens
catatgcttcatttt

SEQ ID NO: 1285255 - DNA, 15 bp, Homo sapiens
ccatatgcttcattt

SEQ ID NO: 1285256 - DNA, 15 bp, Homo sapiens
accatatgcttcatt

SEQ ID NO: 1285257 - DNA, 15 bp, Homo sapiens
aaccatatgcttcat

SEQ ID NO: 1285258 - DNA, 15 bp, Homo sapiens
aaaccatatgcttca

SEQ ID NO: 1285259 - DNA, 15 bp, Homo sapiens
aaaaccatatgcttc

SEQ ID NO: 1285260 - DNA, 15 bp, Homo sapiens
taaaaccatatgctt

SEQ ID NO: 1285261 - DNA, 15 bp, Homo sapiens
ataaaaccatatgct

SEQ ID NO: 1285262 - DNA, 15 bp, Homo sapiens
tataaaaccatatgc

SEQ ID NO: 1285263 - DNA, 15 bp, Homo sapiens
atataaaaccatatg

SEQ ID NO: 1285264 - DNA, 15 bp, Homo sapiens
aatataaaaccatat

SEQ ID NO: 1285265 - DNA, 15 bp, Homo sapiens
caatataaaaccata

SEQ ID NO: 1285266 - DNA, 15 bp, Homo sapiens
ccaatataaaaccat

SEQ ID NO: 1285267 - DNA, 15 bp, Homo sapiens
tccaatataaaacca

SEQ ID NO: 1285268 - DNA, 15 bp, Homo sapiens
ttccaatataaaacc

SEQ ID NO: 1285269 - DNA, 15 bp, Homo sapiens
attccaatataaaac

SEQ ID NO: 1285270 - DNA, 15 bp, Homo sapiens
aattccaatataaaa

SEQ ID NO: 1285271 - DNA, 15 bp, Homo sapiens
caattccaatataaa

SEQ ID NO: 1285272 - DNA, 15 bp, Homo sapiens
ccaattccaatataa

SEQ ID NO: 1285273 - DNA, 15 bp, Homo sapiens
tccaattccaatata

SEQ ID NO: 1285274 - DNA, 15 bp, Homo sapiens
atccaattccaatat

SEQ ID NO: 1285275 - DNA, 15 bp, Homo sapiens
catccaattccaata

SEQ ID NO: 1285276 - DNA, 15 bp, Homo sapiens
tcatccaattccaat

SEQ ID NO: 1285277 - DNA, 15 bp, Homo sapiens
ttcatccaattccaa

SEQ ID NO: 1285278 - DNA, 15 bp, Homo sapiens
attcatccaattcca

SEQ ID NO: 1285279 - DNA, 15 bp, Homo sapiens
cattcatccaattcc

SEQ ID NO: 1285280 - DNA, 15 bp, Homo sapiens
ccattcatccaattc

SEQ ID NO: 1285281 - DNA, 15 bp, Homo sapiens
tccattcatccaatt

SEQ ID NO: 1285282 - DNA, 15 bp, Homo sapiens
atccattcatccaat

SEQ ID NO: 1285283 - DNA, 15 bp, Homo sapiens
catccattcatccaa

SEQ ID NO: 1285284 - DNA, 15 bp, Homo sapiens
acatccattcatcca

SEQ ID NO: 1285285 - DNA, 15 bp, Homo sapiens
cacatccattcatcc

SEQ ID NO: 1285286 - DNA, 15 bp, Homo sapiens
tcacatccattcatc

SEQ ID NO: 1285287 - DNA, 15 bp, Homo sapiens
ttcacatccattcat

SEQ ID NO: 1285288 - DNA, 15 bp, Homo sapiens
gttcacatccattca

SEQ ID NO: 1285289 - DNA, 15 bp, Homo sapiens
agttcacatccattc

SEQ ID NO: 1285290 - DNA, 15 bp, Homo sapiens
gagttcacatccatt

SEQ ID NO: 1285291 - DNA, 15 bp, Homo sapiens
tgagttcacatccat

SEQ ID NO: 1285292 - DNA, 15 bp, Homo sapiens
atgagttcacatcca

SEQ ID NO: 1285293 - DNA, 15 bp, Homo sapiens
catgagttcacatcc

SEQ ID NO: 1285294 - DNA, 15 bp, Homo sapiens
acatgagttcacatc

SEQ ID NO: 1285295 - DNA, 15 bp, Homo sapiens
aacatgagttcacat

SEQ ID NO: 1285296 - DNA, 15 bp, Homo sapiens
aaacatgagttcaca

SEQ ID NO: 1285297 - DNA, 15 bp, Homo sapiens
aaaacatgagttcac

SEQ ID NO: 1285298 - DNA, 15 bp, Homo sapiens
aaaaacatgagttca

SEQ ID NO: 1285299 - DNA, 15 bp, Homo sapiens
aaaaaacatgagttc

SEQ ID NO: 1285300 - DNA, 15 bp, Homo sapiens
taaaaaacatgagtt

SEQ ID NO: 1285301 - DNA, 15 bp, Homo sapiens
ttaaaaaacatgagt

SEQ ID NO: 1285302 - DNA, 15 bp, Homo sapiens
tttaaaaaacatgag

SEQ ID NO: 1285303 - DNA, 15 bp, Homo sapiens
ttttaaaaaacatga

SEQ ID NO: 1285304 - DNA, 15 bp, Homo sapiens
gttttaaaaaacatg

SEQ ID NO: 1285305 - DNA, 15 bp, Homo sapiens
tgttttaaaaaacat

SEQ ID NO: 1285306 - DNA, 15 bp, Homo sapiens
gtgttttaaaaaaca

SEQ ID NO: 1285307 - DNA, 15 bp, Homo sapiens
tgtgttttaaaaaac

SEQ ID NO: 1285308 - DNA, 15 bp, Homo sapiens
atgtgttttaaaaaa

SEQ ID NO: 1285309 - DNA, 15 bp, Homo sapiens
ctatgtgttttaaaa

SEQ ID NO: 1285310 - DNA, 15 bp, Homo sapiens
tctatgtgttttaaa

SEQ ID NO: 1285311 - DNA, 15 bp, Homo sapiens
gtctatgtgttttaa

SEQ ID NO: 1285312 - DNA, 15 bp, Homo sapiens
tgtctatgtgtttta

SEQ ID NO: 1285313 - DNA, 15 bp, Homo sapiens
ctgtctatgtgtttt

SEQ ID NO: 1285314 - DNA, 15 bp, Homo sapiens
tctgtctatgtgttt

SEQ ID NO: 1285315 - DNA, 15 bp, Homo sapiens
atctgtctatgtgtt

SEQ ID NO: 1285316 - DNA, 15 bp, Homo sapiens
tatctgtctatgtgt

SEQ ID NO: 1285317 - DNA, 15 bp, Homo sapiens
gtatctgtctatgtg

SEQ ID NO: 1285318 - DNA, 15 bp, Homo sapiens
tgtatctgtctatgt

SEQ ID NO: 1285319 - DNA, 15 bp, Homo sapiens
ctgtatctgtctatg

SEQ ID NO: 1285320 - DNA, 15 bp, Homo sapiens
tctgtatctgtctat

SEQ ID NO: 1285321 - DNA, 15 bp, Homo sapiens
ttctgtatctgtcta

SEQ ID NO: 1285322 - DNA, 15 bp, Homo sapiens
attctgtatctgtct

SEQ ID NO: 1285323 - DNA, 15 bp, Homo sapiens
tattctgtatctgtc

SEQ ID NO: 1285324 - DNA, 15 bp, Homo sapiens
ttattctgtatctgt

SEQ ID NO: 1285325 - DNA, 15 bp, Homo sapiens
tttattctgtatctg

SEQ ID NO: 1285326 - DNA, 15 bp, Homo sapiens
atttattctgtatct

SEQ ID NO: 1285327 - DNA, 15 bp, Homo sapiens
tatttattctgtatc

SEQ ID NO: 1285328 - DNA, 15 bp, Homo sapiens
atatttattctgtat

SEQ ID NO: 1285329 - DNA, 15 bp, Homo sapiens
tatatttattctgta

SEQ ID NO: 1285330 - DNA, 15 bp, Homo sapiens
gtatatttattctgt

SEQ ID NO: 1285331 - DNA, 15 bp, Homo sapiens
cgtatatttattctg

SEQ ID NO: 1285332 - DNA, 15 bp, Homo sapiens
gcgtatatttattct

SEQ ID NO: 1285333 - DNA, 15 bp, Homo sapiens
tgcgtatatttattc

SEQ ID NO: 1285334 - DNA, 15 bp, Homo sapiens
atgcgtatatttatt

SEQ ID NO: 1285335 - DNA, 15 bp, Homo sapiens
tatgcgtatatttat

SEQ ID NO: 1285336 - DNA, 15 bp, Homo sapiens
atatgcgtatattta

SEQ ID NO: 1285337 - DNA, 15 bp, Homo sapiens
gatatgcgtatattt

SEQ ID NO: 1285338 - DNA, 15 bp, Homo sapiens
agatatgcgtatatt

SEQ ID NO: 1285339 - DNA, 15 bp, Homo sapiens
gagatatgcgtatat

SEQ ID NO: 1285340 - DNA, 15 bp, Homo sapiens
agagatatgcgtata

SEQ ID NO: 1285341 - DNA, 15 bp, Homo sapiens
aagagatatgcgtat

SEQ ID NO: 1285342 - DNA, 15 bp, Homo sapiens
gaagagatatgcgta

SEQ ID NO: 1285343 - DNA, 15 bp, Homo sapiens
agaagagatatgcgt

SEQ ID NO: 1285344 - DNA, 15 bp, Homo sapiens
aagaagagatatgcg

SEQ ID NO: 1285345 - DNA, 15 bp, Homo sapiens
caagaagagatatgc

SEQ ID NO: 1285346 - DNA, 15 bp, Homo sapiens
tcaagaagagatatg

SEQ ID NO: 1285347 - DNA, 15 bp, Homo sapiens
gtcaagaagagatat

SEQ ID NO: 1285348 - DNA, 15 bp, Homo sapiens
ggtcaagaagagata

SEQ ID NO: 1285349 - DNA, 15 bp, Homo sapiens
gggtcaagaagagat

SEQ ID NO: 1285350 - DNA, 15 bp, Homo sapiens
agggtcaagaagaga

SEQ ID NO: 1285351 - DNA, 15 bp, Homo sapiens
aagggtcaagaagag

SEQ ID NO: 1285352 - DNA, 15 bp, Homo sapiens
gaagggtcaagaaga

SEQ ID NO: 1285353 - DNA, 15 bp, Homo sapiens
cgaagggtcaagaag

SEQ ID NO: 1285354 - DNA, 15 bp, Homo sapiens
acgaagggtcaagaa

SEQ ID NO: 1285355 - DNA, 15 bp, Homo sapiens
aacgaagggtcaaga

SEQ ID NO: 1285356 - DNA, 15 bp, Homo sapiens
aaacgaagggtcaag

SEQ ID NO: 1285357 - DNA, 15 bp, Homo sapiens
aaaacgaagggtcaa

SEQ ID NO: 1285358 - DNA, 15 bp, Homo sapiens
gaaaacgaagggtca

SEQ ID NO: 1285359 - DNA, 15 bp, Homo sapiens
agaaaacgaagggtc

SEQ ID NO: 1285360 - DNA, 15 bp, Homo sapiens
aagaaaacgaagggt

SEQ ID NO: 1285361 - DNA, 15 bp, Homo sapiens
taagaaaacgaaggg

SEQ ID NO: 1285362 - DNA, 15 bp, Homo sapiens
ataagaaaacgaagg

SEQ ID NO: 1285363 - DNA, 15 bp, Homo sapiens
tataagaaaacgaag

SEQ ID NO: 1285364 - DNA, 15 bp, Homo sapiens
atataagaaaacgaa

SEQ ID NO: 1285365 - DNA, 15 bp, Homo sapiens
aatataagaaaacga

SEQ ID NO: 1285366 - DNA, 15 bp, Homo sapiens
gaatataagaaaacg

SEQ ID NO: 1285367 - DNA, 15 bp, Homo sapiens
agaatataagaaaac

SEQ ID NO: 1285368 - DNA, 15 bp, Homo sapiens
gagaatataagaaaa

SEQ ID NO: 1285369 - DNA, 15 bp, Homo sapiens
tgagaatataagaaa

SEQ ID NO: 1285370 - DNA, 15 bp, Homo sapiens
ttgagaatataagaa

SEQ ID NO: 1285371 - DNA, 15 bp, Homo sapiens
attgagaatataaga

SEQ ID NO: 1285372 - DNA, 15 bp, Homo sapiens
cattgagaatataag

SEQ ID NO: 1285373 - DNA, 15 bp, Homo sapiens
tcattgagaatataa

SEQ ID NO: 1285374 - DNA, 15 bp, Homo sapiens
atcattgagaatata

SEQ ID NO: 1285375 - DNA, 15 bp, Homo sapiens
catcattgagaatat

SEQ ID NO: 1285376 - DNA, 15 bp, Homo sapiens
tcatcattgagaata

SEQ ID NO: 1285377 - DNA, 15 bp, Homo sapiens
ttcatcattgagaat

SEQ ID NO: 1285378 - DNA, 15 bp, Homo sapiens
attcatcattgagaa

SEQ ID NO: 1285379 - DNA, 15 bp, Homo sapiens
tattcatcattgaga

SEQ ID NO: 1285380 - DNA, 15 bp, Homo sapiens
ctattcatcattgag

SEQ ID NO: 1285381 - DNA, 15 bp, Homo sapiens
tctattcatcattga

SEQ ID NO: 1285382 - DNA, 15 bp, Homo sapiens
atctattcatcattg

SEQ ID NO: 1285383 - DNA, 15 bp, Homo sapiens
tatctattcatcatt

SEQ ID NO: 1285384 - DNA, 15 bp, Homo sapiens
atatctattcatcat

SEQ ID NO: 1285385 - DNA, 15 bp, Homo sapiens
tatatctattcatca

SEQ ID NO: 1285386 - DNA, 15 bp, Homo sapiens
ttatatctattcatc

SEQ ID NO: 1285387 - DNA, 15 bp, Homo sapiens
cttatatctattcat

SEQ ID NO: 1285388 - DNA, 15 bp, Homo sapiens
gcttatatctattca

SEQ ID NO: 1285389 - DNA, 15 bp, Homo sapiens
tgcttatatctattc

SEQ ID NO: 1285390 - DNA, 15 bp, Homo sapiens
atgcttatatctatt

SEQ ID NO: 1285391 - DNA, 15 bp, Homo sapiens
tatgcttatatctat

SEQ ID NO: 1285392 - DNA, 15 bp, Homo sapiens
ctatgcttatatcta

SEQ ID NO: 1285393 - DNA, 15 bp, Homo sapiens
cctatgcttatatct

SEQ ID NO: 1285394 - DNA, 15 bp, Homo sapiens
acctatgcttatatc

SEQ ID NO: 1285395 - DNA, 15 bp, Homo sapiens
tacctatgcttatat

SEQ ID NO: 1285396 - DNA, 15 bp, Homo sapiens
atacctatgcttata

SEQ ID NO: 1285397 - DNA, 15 bp, Homo sapiens
tatacctatgcttat

SEQ ID NO: 1285398 - DNA, 15 bp, Homo sapiens
atatacctatgctta

SEQ ID NO: 1285399 - DNA, 15 bp, Homo sapiens
tatatacctatgctt

SEQ ID NO: 1285400 - DNA, 15 bp, Homo sapiens
ctatatacctatgct

SEQ ID NO: 1285401 - DNA, 15 bp, Homo sapiens
tctatatacctatgc

SEQ ID NO: 1285402 - DNA, 15 bp, Homo sapiens
atctatatacctatg

SEQ ID NO: 1285403 - DNA, 15 bp, Homo sapiens
tatctatatacctat

SEQ ID NO: 1285404 - DNA, 15 bp, Homo sapiens
ttatctatataccta

SEQ ID NO: 1285405 - DNA, 15 bp, Homo sapiens
attatctatatacct

SEQ ID NO: 1285406 - DNA, 15 bp, Homo sapiens
tattatctatatacc

SEQ ID NO: 1285407 - DNA, 15 bp, Homo sapiens
ctattatctatatac

SEQ ID NO: 1285408 - DNA, 15 bp, Homo sapiens
tctattatctatata

SEQ ID NO: 1285409 - DNA, 15 bp, Homo sapiens
ctctattatctatat

SEQ ID NO: 1285410 - DNA, 15 bp, Homo sapiens
cctctattatctata

SEQ ID NO: 1285411 - DNA, 15 bp, Homo sapiens
acctctattatctat

SEQ ID NO: 1285412 - DNA, 15 bp, Homo sapiens
cacctctattatcta

SEQ ID NO: 1285413 - DNA, 15 bp, Homo sapiens
acacctctattatct

SEQ ID NO: 1285414 - DNA, 15 bp, Homo sapiens
tacacctctattatc

SEQ ID NO: 1285415 - DNA, 15 bp, Homo sapiens
ttacacctctattat

SEQ ID NO: 1285416 - DNA, 15 bp, Homo sapiens
cttacacctctatta

SEQ ID NO: 1285417 - DNA, 15 bp, Homo sapiens
acttacacctctatt

SEQ ID NO: 1285418 - DNA, 15 bp, Homo sapiens
aacttacacctctat

SEQ ID NO: 1285419 - DNA, 15 bp, Homo sapiens
caacttacacctcta

SEQ ID NO: 1285420 - DNA, 15 bp, Homo sapiens
tcaacttacacctct

SEQ ID NO: 1285421 - DNA, 15 bp, Homo sapiens
ttcaacttacacctc

SEQ ID NO: 1285422 - DNA, 15 bp, Homo sapiens
cttcaacttacacct

SEQ ID NO: 1285423 - DNA, 15 bp, Homo sapiens
ccttcaacttacacc

SEQ ID NO: 1285424 - DNA, 15 bp, Homo sapiens
gccttcaacttacac

SEQ ID NO: 1285425 - DNA, 15 bp, Homo sapiens
agccttcaacttaca

SEQ ID NO: 1285426 - DNA, 15 bp, Homo sapiens
tagccttcaacttac

SEQ ID NO: 1285427 - DNA, 15 bp, Homo sapiens
ttagccttcaactta

SEQ ID NO: 1285428 - DNA, 15 bp, Homo sapiens
attagccttcaactt

SEQ ID NO: 1285429 - DNA, 15 bp, Homo sapiens
aattagccttcaact

SEQ ID NO: 1285430 - DNA, 15 bp, Homo sapiens
taattagccttcaac

SEQ ID NO: 1285431 - DNA, 15 bp, Homo sapiens
ataattagccttcaa

SEQ ID NO: 1285432 - DNA, 15 bp, Homo sapiens
aataattagccttca

SEQ ID NO: 1285433 - DNA, 15 bp, Homo sapiens
aaataattagccttc

SEQ ID NO: 1285434 - DNA, 15 bp, Homo sapiens
aaaataattagcctt

SEQ ID NO: 1285435 - DNA, 15 bp, Homo sapiens
aaaaataattagcct

SEQ ID NO: 1285436 - DNA, 15 bp, Homo sapiens
caaaaataattagcc

SEQ ID NO: 1285437 - DNA, 15 bp, Homo sapiens
gcaaaaataattagc

SEQ ID NO: 1285438 - DNA, 15 bp, Homo sapiens
tgcaaaaataattag

SEQ ID NO: 1285439 - DNA, 15 bp, Homo sapiens
ttgcaaaaataatta

SEQ ID NO: 1285440 - DNA, 15 bp, Homo sapiens
tttgcaaaaataatt

SEQ ID NO: 1285441 - DNA, 15 bp, Homo sapiens
ttttgcaaaaataat

SEQ ID NO: 1285442 - DNA, 15 bp, Homo sapiens
tttttgcaaaaataa

SEQ ID NO: 1285443 - DNA, 15 bp, Homo sapiens
ctttttgcaaaaata

SEQ ID NO: 1285444 - DNA, 15 bp, Homo sapiens
actttttgcaaaaat

SEQ ID NO: 1285445 - DNA, 15 bp, Homo sapiens
tactttttgcaaaaa

SEQ ID NO: 1285446 - DNA, 15 bp, Homo sapiens
ttactttttgcaaaa

SEQ ID NO: 1285447 - DNA, 15 bp, Homo sapiens
attactttttgcaaa

SEQ ID NO: 1285448 - DNA, 15 bp, Homo sapiens
aattactttttgcaa

SEQ ID NO: 1285449 - DNA, 15 bp, Homo sapiens
gaattactttttgca

SEQ ID NO: 1285450 - DNA, 15 bp, Homo sapiens
ggaattactttttgc

SEQ ID NO: 1285451 - DNA, 15 bp, Homo sapiens
aggaattactttttg

SEQ ID NO: 1285452 - DNA, 15 bp, Homo sapiens
aaggaattacttttt

SEQ ID NO: 1285453 - DNA, 15 bp, Homo sapiens
gaaggaattactttt

SEQ ID NO: 1285454 - DNA, 15 bp, Homo sapiens
ggaaggaattacttt

SEQ ID NO: 1285455 - DNA, 15 bp, Homo sapiens
tggaaggaattactt

SEQ ID NO: 1285456 - DNA, 15 bp, Homo sapiens
ttggaaggaattact

SEQ ID NO: 1285457 - DNA, 15 bp, Homo sapiens
tttggaaggaattac

SEQ ID NO: 1285458 - DNA, 15 bp, Homo sapiens
ctttggaaggaatta

SEQ ID NO: 1285459 - DNA, 15 bp, Homo sapiens
cctttggaaggaatt

SEQ ID NO: 1285460 - DNA, 15 bp, Homo sapiens
tcctttggaaggaat

SEQ ID NO: 1285461 - DNA, 15 bp, Homo sapiens
atcctttggaaggaa

SEQ ID NO: 1285462 - DNA, 15 bp, Homo sapiens
tatcctttggaagga

SEQ ID NO: 1285463 - DNA, 15 bp, Homo sapiens
atatcctttggaagg

SEQ ID NO: 1285464 - DNA, 15 bp, Homo sapiens
tatatcctttggaag

SEQ ID NO: 1285465 - DNA, 15 bp, Homo sapiens
ctatatcctttggaa

SEQ ID NO: 1285466 - DNA, 15 bp, Homo sapiens
actatatcctttgga

SEQ ID NO: 1285467 - DNA, 15 bp, Homo sapiens
tactatatcctttgg

SEQ ID NO: 1285468 - DNA, 15 bp, Homo sapiens
ctactatatcctttg

SEQ ID NO: 1285469 - DNA, 15 bp, Homo sapiens
actactatatccttt

SEQ ID NO: 1285470 - DNA, 15 bp, Homo sapiens
cactactatatcctt

SEQ ID NO: 1285471 - DNA, 15 bp, Homo sapiens
tcactactatatcct

SEQ ID NO: 1285472 - DNA, 15 bp, Homo sapiens
atcactactatatcc

SEQ ID NO: 1285473 - DNA, 15 bp, Homo sapiens
aatcactactatatc

SEQ ID NO: 1285474 - DNA, 15 bp, Homo sapiens
aaatcactactatat

SEQ ID NO: 1285475 - DNA, 15 bp, Homo sapiens
caaatcactactata

SEQ ID NO: 1285476 - DNA, 15 bp, Homo sapiens
tcaaatcactactat

SEQ ID NO: 1285477 - DNA, 15 bp, Homo sapiens
atcaaatcactacta

SEQ ID NO: 1285478 - DNA, 15 bp, Homo sapiens
catcaaatcactact

SEQ ID NO: 1285479 - DNA, 15 bp, Homo sapiens
acatcaaatcactac

SEQ ID NO: 1285480 - DNA, 15 bp, Homo sapiens
tacatcaaatcacta

SEQ ID NO: 1285481 - DNA, 15 bp, Homo sapiens
ctacatcaaatcact

SEQ ID NO: 1285482 - DNA, 15 bp, Homo sapiens
tctacatcaaatcac

SEQ ID NO: 1285483 - DNA, 15 bp, Homo sapiens
ctctacatcaaatca

SEQ ID NO: 1285484 - DNA, 15 bp, Homo sapiens
gctctacatcaaatc

SEQ ID NO: 1285485 - DNA, 15 bp, Homo sapiens
agctctacatcaaat

SEQ ID NO: 1285486 - DNA, 15 bp, Homo sapiens
cagctctacatcaaa

SEQ ID NO: 1285487 - DNA, 15 bp, Homo sapiens
tcagctctacatcaa

SEQ ID NO: 1285488 - DNA, 15 bp, Homo sapiens
atcagctctacatca

SEQ ID NO: 1285489 - DNA, 15 bp, Homo sapiens
tatcagctctacatc

SEQ ID NO: 1285490 - DNA, 15 bp, Homo sapiens
ttatcagctctacat

SEQ ID NO: 1285491 - DNA, 15 bp, Homo sapiens
attatcagctctaca

SEQ ID NO: 1285492 - DNA, 15 bp, Homo sapiens
gattatcagctctac

SEQ ID NO: 1285493 - DNA, 15 bp, Homo sapiens
agattatcagctcta

SEQ ID NO: 1285494 - DNA, 15 bp, Homo sapiens
aagattatcagctct

SEQ ID NO: 1285495 - DNA, 15 bp, Homo sapiens
aaagattatcagctc

SEQ ID NO: 1285496 - DNA, 15 bp, Homo sapiens
aaaagattatcagct

SEQ ID NO: 1285497 - DNA, 15 bp, Homo sapiens
caaaagattatcagc

SEQ ID NO: 1285498 - DNA, 15 bp, Homo sapiens
tcaaaagattatcag

SEQ ID NO: 1285499 - DNA, 15 bp, Homo sapiens
ttcaaaagattatca

SEQ ID NO: 1285500 - DNA, 15 bp, Homo sapiens
attcaaaagattatc

SEQ ID NO: 1285501 - DNA, 15 bp, Homo sapiens
aattcaaaagattat

SEQ ID NO: 1285502 - DNA, 15 bp, Homo sapiens
caattcaaaagatta

SEQ ID NO: 1285503 - DNA, 15 bp, Homo sapiens
tcaattcaaaagatt

SEQ ID NO: 1285504 - DNA, 15 bp, Homo sapiens
ttcaattcaaaagat

SEQ ID NO: 1285505 - DNA, 15 bp, Homo sapiens
tttcaattcaaaaga

SEQ ID NO: 1285506 - DNA, 15 bp, Homo sapiens
atttcaattcaaaag

SEQ ID NO: 1285507 - DNA, 15 bp, Homo sapiens
tatttcaattcaaaa

SEQ ID NO: 1285508 - DNA, 15 bp, Homo sapiens
atatttcaattcaaa

SEQ ID NO: 1285509 - DNA, 15 bp, Homo sapiens
gatatttcaattcaa

SEQ ID NO: 1285510 - DNA, 15 bp, Homo sapiens
agatatttcaattca

SEQ ID NO: 1285511 - DNA, 15 bp, Homo sapiens
tagatatttcaattc

SEQ ID NO: 1285512 - DNA, 15 bp, Homo sapiens
atagatatttcaatt

SEQ ID NO: 1285513 - DNA, 15 bp, Homo sapiens
catagatatttcaat

SEQ ID NO: 1285514 - DNA, 15 bp, Homo sapiens
tcatagatatttcaa

SEQ ID NO: 1285515 - DNA, 15 bp, Homo sapiens
atcatagatatttca

SEQ ID NO: 1285516 - DNA, 15 bp, Homo sapiens
aatcatagatatttc

SEQ ID NO: 1285517 - DNA, 15 bp, Homo sapiens
aaatcatagatattt

SEQ ID NO: 1285518 - DNA, 15 bp, Homo sapiens
caaatcatagatatt

SEQ ID NO: 1285519 - DNA, 15 bp, Homo sapiens
tcaaatcatagatat

SEQ ID NO: 1285520 - DNA, 15 bp, Homo sapiens
ttcaaatcatagata

SEQ ID NO: 1285521 - DNA, 15 bp, Homo sapiens
tttcaaatcatagat

SEQ ID NO: 1285522 - DNA, 15 bp, Homo sapiens
ttttcaaatcataga

SEQ ID NO: 1285523 - DNA, 15 bp, Homo sapiens
gttttcaaatcatag

SEQ ID NO: 1285524 - DNA, 15 bp, Homo sapiens
cgttttcaaatcata

SEQ ID NO: 1285525 - DNA, 15 bp, Homo sapiens
tcgttttcaaatcat

SEQ ID NO: 1285526 - DNA, 15 bp, Homo sapiens
ttcgttttcaaatca

SEQ ID NO: 1285527 - DNA, 15 bp, Homo sapiens
tttcgttttcaaatc

SEQ ID NO: 1285528 - DNA, 15 bp, Homo sapiens
atttcgttttcaaat

SEQ ID NO: 1285529 - DNA, 15 bp, Homo sapiens
tatttcgttttcaaa

SEQ ID NO: 1285530 - DNA, 15 bp, Homo sapiens
ttatttcgttttcaa

SEQ ID NO: 1285531 - DNA, 15 bp, Homo sapiens
gttatttcgttttca

SEQ ID NO: 1285532 - DNA, 15 bp, Homo sapiens
tgttatttcgttttc

SEQ ID NO: 1285533 - DNA, 15 bp, Homo sapiens
gtgttatttcgtttt

SEQ ID NO: 1285534 - DNA, 15 bp, Homo sapiens
tgtgttatttcgttt

SEQ ID NO: 1285535 - DNA, 15 bp, Homo sapiens
ttgtgttatttcgtt

SEQ ID NO: 1285536 - DNA, 15 bp, Homo sapiens
tttgtgttatttcgt

SEQ ID NO: 1285537 - DNA, 15 bp, Homo sapiens
atttgtgttatttcg

SEQ ID NO: 1285538 - DNA, 15 bp, Homo sapiens
aatttgtgttatttc

SEQ ID NO: 1285539 - DNA, 15 bp, Homo sapiens
aaatttgtgttattt

SEQ ID NO: 1285540 - DNA, 15 bp, Homo sapiens
aaaatttgtgttatt

SEQ ID NO: 1285541 - DNA, 15 bp, Homo sapiens
aaaaatttgtgttat

SEQ ID NO: 1285542 - DNA, 15 bp, Homo sapiens
taaaaatttgtgtta

SEQ ID NO: 1285543 - DNA, 15 bp, Homo sapiens
ttaaaaatttgtgtt

SEQ ID NO: 1285544 - DNA, 15 bp, Homo sapiens
cttaaaaatttgtgt

SEQ ID NO: 1285545 - DNA, 15 bp, Homo sapiens
ccttaaaaatttgtg

SEQ ID NO: 1285546 - DNA, 15 bp, Homo sapiens
accttaaaaatttgt

SEQ ID NO: 1285547 - DNA, 15 bp, Homo sapiens
aaccttaaaaatttg

SEQ ID NO: 1285548 - DNA, 15 bp, Homo sapiens
taaccttaaaaattt

SEQ ID NO: 1285549 - DNA, 15 bp, Homo sapiens
gtaaccttaaaaatt

SEQ ID NO: 1285550 - DNA, 15 bp, Homo sapiens
agtaaccttaaaaat

SEQ ID NO: 1285551 - DNA, 15 bp, Homo sapiens
cagtaaccttaaaaa

SEQ ID NO: 1285552 - DNA, 15 bp, Homo sapiens
tcagtaaccttaaaa

SEQ ID NO: 1285553 - DNA, 15 bp, Homo sapiens
atcagtaaccttaaa

SEQ ID NO: 1285554 - DNA, 15 bp, Homo sapiens
aatcagtaaccttaa

SEQ ID NO: 1285555 - DNA, 15 bp, Homo sapiens
aaatcagtaacctta

SEQ ID NO: 1285556 - DNA, 15 bp, Homo sapiens
taaatcagtaacctt

SEQ ID NO: 1285557 - DNA, 15 bp, Homo sapiens
gtaaatcagtaacct

SEQ ID NO: 1285558 - DNA, 15 bp, Homo sapiens
agtaaatcagtaacc

SEQ ID NO: 1285559 - DNA, 15 bp, Homo sapiens
aagtaaatcagtaac

SEQ ID NO: 1285560 - DNA, 15 bp, Homo sapiens
aaagtaaatcagtaa

SEQ ID NO: 1285561 - DNA, 15 bp, Homo sapiens
aaaagtaaatcagta

SEQ ID NO: 1285562 - DNA, 15 bp, Homo sapiens
aaaaagtaaatcagt

SEQ ID NO: 1285563 - DNA, 15 bp, Homo sapiens
aaaaaagtaaatcag

SEQ ID NO: 1285564 - DNA, 15 bp, Homo sapiens
gaaaaaagtaaatca

SEQ ID NO: 1285565 - DNA, 15 bp, Homo sapiens
agaaaaaagtaaatc

SEQ ID NO: 1285566 - DNA, 15 bp, Homo sapiens
tagaaaaaagtaaat

SEQ ID NO: 1285567 - DNA, 15 bp, Homo sapiens
atagaaaaaagtaaa

SEQ ID NO: 1285568 - DNA, 15 bp, Homo sapiens
aatagaaaaaagtaa

SEQ ID NO: 1285569 - DNA, 15 bp, Homo sapiens
gaatagaaaaaagta

SEQ ID NO: 1285570 - DNA, 15 bp, Homo sapiens
agaatagaaaaaagt

SEQ ID NO: 1285571 - DNA, 15 bp, Homo sapiens
aagaatagaaaaaag

SEQ ID NO: 1285572 - DNA, 15 bp, Homo sapiens
aaagaatagaaaaaa

SEQ ID NO: 1285573 - DNA, 15 bp, Homo sapiens
gaaagaatagaaaaa

SEQ ID NO: 1285574 - DNA, 15 bp, Homo sapiens
ggaaagaatagaaaa

SEQ ID NO: 1285575 - DNA, 15 bp, Homo sapiens
aggaaagaatagaaa

SEQ ID NO: 1285576 - DNA, 15 bp, Homo sapiens
aaggaaagaatagaa

SEQ ID NO: 1285577 - DNA, 15 bp, Homo sapiens
aaaggaaagaataga

SEQ ID NO: 1285578 - DNA, 15 bp, Homo sapiens
caaaggaaagaatag

SEQ ID NO: 1285579 - DNA, 15 bp, Homo sapiens
acaaaggaaagaata

SEQ ID NO: 1285580 - DNA, 15 bp, Homo sapiens
tacaaaggaaagaat

SEQ ID NO: 1285581 - DNA, 15 bp, Homo sapiens
ctacaaaggaaagaa

SEQ ID NO: 1285582 - DNA, 15 bp, Homo sapiens
actacaaaggaaaga

SEQ ID NO: 1285583 - DNA, 15 bp, Homo sapiens
cactacaaaggaaag

SEQ ID NO: 1285584 - DNA, 15 bp, Homo sapiens
acactacaaaggaaa

SEQ ID NO: 1285585 - DNA, 15 bp, Homo sapiens
gacactacaaaggaa

SEQ ID NO: 1285586 - DNA, 15 bp, Homo sapiens
ggacactacaaagga

SEQ ID NO: 1285587 - DNA, 15 bp, Homo sapiens
tggacactacaaagg

SEQ ID NO: 1285588 - DNA, 15 bp, Homo sapiens
atggacactacaaag

SEQ ID NO: 1285589 - DNA, 15 bp, Homo sapiens
tatggacactacaaa

SEQ ID NO: 1285590 - DNA, 15 bp, Homo sapiens
ttatggacactacaa

SEQ ID NO: 1285591 - DNA, 15 bp, Homo sapiens
tttatggacactaca

SEQ ID NO: 1285592 - DNA, 15 bp, Homo sapiens
atttatggacactac

SEQ ID NO: 1285593 - DNA, 15 bp, Homo sapiens
aatttatggacacta

SEQ ID NO: 1285594 - DNA, 15 bp, Homo sapiens
gaatttatggacact

SEQ ID NO: 1285595 - DNA, 15 bp, Homo sapiens
agaatttatggacac

SEQ ID NO: 1285596 - DNA, 15 bp, Homo sapiens
aagaatttatggaca

SEQ ID NO: 1285597 - DNA, 15 bp, Homo sapiens
aaagaatttatggac

SEQ ID NO: 1285598 - DNA, 15 bp, Homo sapiens
taaagaatttatgga

SEQ ID NO: 1285599 - DNA, 15 bp, Homo sapiens
ttaaagaatttatgg

SEQ ID NO: 1285600 - DNA, 15 bp, Homo sapiens
gttaaagaatttatg

SEQ ID NO: 1285601 - DNA, 15 bp, Homo sapiens
agttaaagaatttat

SEQ ID NO: 1285602 - DNA, 15 bp, Homo sapiens
aagttaaagaattta

SEQ ID NO: 1285603 - DNA, 15 bp, Homo sapiens
taagttaaagaattt

SEQ ID NO: 1285604 - DNA, 15 bp, Homo sapiens
gtaagttaaagaatt

SEQ ID NO: 1285605 - DNA, 15 bp, Homo sapiens
agtaagttaaagaat

SEQ ID NO: 1285606 - DNA, 15 bp, Homo sapiens
tagtaagttaaagaa

SEQ ID NO: 1285607 - DNA, 15 bp, Homo sapiens
ttagtaagttaaaga

SEQ ID NO: 1285608 - DNA, 15 bp, Homo sapiens
tttagtaagttaaag

SEQ ID NO: 1285609 - DNA, 15 bp, Homo sapiens
ttttagtaagttaaa

SEQ ID NO: 1285610 - DNA, 15 bp, Homo sapiens
cttttagtaagttaa

SEQ ID NO: 1285611 - DNA, 15 bp, Homo sapiens
tcttttagtaagtta

SEQ ID NO: 1285612 - DNA, 15 bp, Homo sapiens
ttcttttagtaagtt

SEQ ID NO: 1285613 - DNA, 15 bp, Homo sapiens
tttcttttagtaagt

SEQ ID NO: 1285614 - DNA, 15 bp, Homo sapiens
atttcttttagtaag

SEQ ID NO: 1285615 - DNA, 15 bp, Homo sapiens
aatttcttttagtaa

SEQ ID NO: 1285616 - DNA, 15 bp, Homo sapiens
caatttcttttagta

SEQ ID NO: 1285617 - DNA, 15 bp, Homo sapiens
tcaatttcttttagt

SEQ ID NO: 1285618 - DNA, 15 bp, Homo sapiens
atcaatttcttttag

SEQ ID NO: 1285619 - DNA, 15 bp, Homo sapiens
tatcaatttctttta

SEQ ID NO: 1285620 - DNA, 15 bp, Homo sapiens
gtatcaatttctttt

SEQ ID NO: 1285621 - DNA, 15 bp, Homo sapiens
ggtatcaatttcttt

SEQ ID NO: 1285622 - DNA, 15 bp, Homo sapiens
tggtatcaatttctt

SEQ ID NO: 1285623 - DNA, 15 bp, Homo sapiens
ctggtatcaatttct

SEQ ID NO: 1285624 - DNA, 15 bp, Homo sapiens
actggtatcaatttc

SEQ ID NO: 1285625 - DNA, 15 bp, Homo sapiens
tactggtatcaattt

SEQ ID NO: 1285626 - DNA, 15 bp, Homo sapiens
gtactggtatcaatt

SEQ ID NO: 1285627 - DNA, 15 bp, Homo sapiens
ggtactggtatcaat

SEQ ID NO: 1285628 - DNA, 15 bp, Homo sapiens
tggtactggtatcaa

SEQ ID NO: 1285629 - DNA, 15 bp, Homo sapiens
ttggtactggtatca

SEQ ID NO: 1285630 - DNA, 15 bp, Homo sapiens
tttggtactggtatc

SEQ ID NO: 1285631 - DNA, 15 bp, Homo sapiens
ctttggtactggtat

SEQ ID NO: 1285632 - DNA, 15 bp, Homo sapiens
actttggtactggta

SEQ ID NO: 1285633 - DNA, 15 bp, Homo sapiens
aactttggtactggt

SEQ ID NO: 1285634 - DNA, 15 bp, Homo sapiens
caactttggtactgg

SEQ ID NO: 1285635 - DNA, 15 bp, Homo sapiens
tcaactttggtactg

SEQ ID NO: 1285636 - DNA, 15 bp, Homo sapiens
atcaactttggtact

SEQ ID NO: 1285637 - DNA, 15 bp, Homo sapiens
tatcaactttggtac

SEQ ID NO: 1285638 - DNA, 15 bp, Homo sapiens
ttatcaactttggta

SEQ ID NO: 1285639 - DNA, 15 bp, Homo sapiens
attatcaactttggt

SEQ ID NO: 1285640 - DNA, 15 bp, Homo sapiens
cattatcaactttgg

SEQ ID NO: 1285641 - DNA, 15 bp, Homo sapiens
gcattatcaactttg

SEQ ID NO: 1285642 - DNA, 15 bp, Homo sapiens
agcattatcaacttt

SEQ ID NO: 1285643 - DNA, 15 bp, Homo sapiens
tagcattatcaactt

SEQ ID NO: 1285644 - DNA, 15 bp, Homo sapiens
atagcattatcaact

SEQ ID NO: 1285645 - DNA, 15 bp, Homo sapiens
catagcattatcaac

SEQ ID NO: 1285646 - DNA, 15 bp, Homo sapiens
acatagcattatcaa

SEQ ID NO: 1285647 - DNA, 15 bp, Homo sapiens
gacatagcattatca

SEQ ID NO: 1285648 - DNA, 15 bp, Homo sapiens
tgacatagcattatc

SEQ ID NO: 1285649 - DNA, 15 bp, Homo sapiens
ttgacatagcattat

SEQ ID NO: 1285650 - DNA, 15 bp, Homo sapiens
cttgacatagcatta

SEQ ID NO: 1285651 - DNA, 15 bp, Homo sapiens
tcttgacatagcatt

SEQ ID NO: 1285652 - DNA, 15 bp, Homo sapiens
gtcttgacatagcat

SEQ ID NO: 1285653 - DNA, 15 bp, Homo sapiens
agtcttgacatagca

SEQ ID NO: 1285654 - DNA, 15 bp, Homo sapiens
cagtcttgacatagc

SEQ ID NO: 1285655 - DNA, 15 bp, Homo sapiens
acagtcttgacatag

SEQ ID NO: 1285656 - DNA, 15 bp, Homo sapiens
aacagtcttgacata

SEQ ID NO: 1285657 - DNA, 15 bp, Homo sapiens
caacagtcttgacat

SEQ ID NO: 1285658 - DNA, 15 bp, Homo sapiens
tcaacagtcttgaca

SEQ ID NO: 1285659 - DNA, 15 bp, Homo sapiens
ttcaacagtcttgac

SEQ ID NO: 1285660 - DNA, 15 bp, Homo sapiens
cttcaacagtcttga

SEQ ID NO: 1285661 - DNA, 15 bp, Homo sapiens
tcttcaacagtcttg

SEQ ID NO: 1285662 - DNA, 15 bp, Homo sapiens
ttcttcaacagtctt

SEQ ID NO: 1285663 - DNA, 15 bp, Homo sapiens
cttcttcaacagtct

SEQ ID NO: 1285664 - DNA, 15 bp, Homo sapiens
acttcttcaacagtc

SEQ ID NO: 1285665 - DNA, 15 bp, Homo sapiens
tacttcttcaacagt

SEQ ID NO: 1285666 - DNA, 15 bp, Homo sapiens
atacttcttcaacag

SEQ ID NO: 1285667 - DNA, 15 bp, Homo sapiens
catacttcttcaaca

SEQ ID NO: 1285668 - DNA, 15 bp, Homo sapiens
tcatacttcttcaac

SEQ ID NO: 1285669 - DNA, 15 bp, Homo sapiens
atcatacttcttcaa

SEQ ID NO: 1285670 - DNA, 15 bp, Homo sapiens
catcatacttcttca

SEQ ID NO: 1285671 - DNA, 15 bp, Homo sapiens
acatcatacttcttc

SEQ ID NO: 1285672 - DNA, 15 bp, Homo sapiens
tacatcatacttctt

SEQ ID NO: 1285673 - DNA, 15 bp, Homo sapiens
atacatcatacttct

SEQ ID NO: 1285674 - DNA, 15 bp, Homo sapiens
aatacatcatacttc

SEQ ID NO: 1285675 - DNA, 15 bp, Homo sapiens
caatacatcatactt

SEQ ID NO: 1285676 - DNA, 15 bp, Homo sapiens
acaatacatcatact

SEQ ID NO: 1285677 - DNA, 15 bp, Homo sapiens
aacaatacatcatac

SEQ ID NO: 1285678 - DNA, 15 bp, Homo sapiens
aaacaatacatcata

SEQ ID NO: 1285679 - DNA, 15 bp, Homo sapiens
caaacaatacatcat

SEQ ID NO: 1285680 - DNA, 15 bp, Homo sapiens
gcaaacaatacatca

SEQ ID NO: 1285681 - DNA, 15 bp, Homo sapiens
tgcaaacaatacatc

SEQ ID NO: 1285682 - DNA, 15 bp, Homo sapiens
gtgcaaacaatacat

SEQ ID NO: 1285683 - DNA, 15 bp, Homo sapiens
agtgcaaacaataca

SEQ ID NO: 1285684 - DNA, 15 bp, Homo sapiens
gagtgcaaacaatac

SEQ ID NO: 1285685 - DNA, 15 bp, Homo sapiens
agagtgcaaacaata

SEQ ID NO: 1285686 - DNA, 15 bp, Homo sapiens
aagagtgcaaacaat

SEQ ID NO: 1285687 - DNA, 15 bp, Homo sapiens
gaagagtgcaaacaa

SEQ ID NO: 1285688 - DNA, 15 bp, Homo sapiens
tgaagagtgcaaaca

SEQ ID NO: 1285689 - DNA, 15 bp, Homo sapiens
ctgaagagtgcaaac

SEQ ID NO: 1285690 - DNA, 15 bp, Homo sapiens
gctgaagagtgcaaa

SEQ ID NO: 1285691 - DNA, 15 bp, Homo sapiens
tgctgaagagtgcaa

SEQ ID NO: 1285692 - DNA, 15 bp, Homo sapiens
ttgctgaagagtgca

SEQ ID NO: 1285693 - DNA, 15 bp, Homo sapiens
tttgctgaagagtgc

SEQ ID NO: 1285694 - DNA, 15 bp, Homo sapiens
atttgctgaagagtg

SEQ ID NO: 1285695 - DNA, 15 bp, Homo sapiens
aatttgctgaagagt

SEQ ID NO: 1285696 - DNA, 15 bp, Homo sapiens
caatttgctgaagag

SEQ ID NO: 1285697 - DNA, 15 bp, Homo sapiens
ccaatttgctgaaga

SEQ ID NO: 1285698 - DNA, 15 bp, Homo sapiens
tccaatttgctgaag

SEQ ID NO: 1285699 - DNA, 15 bp, Homo sapiens
ttccaatttgctgaa

SEQ ID NO: 1285700 - DNA, 15 bp, Homo sapiens
tttccaatttgctga

SEQ ID NO: 1285701 - DNA, 15 bp, Homo sapiens
ctttccaatttgctg

SEQ ID NO: 1285702 - DNA, 15 bp, Homo sapiens
cctttccaatttgct

SEQ ID NO: 1285703 - DNA, 15 bp, Homo sapiens
acctttccaatttgc

SEQ ID NO: 1285704 - DNA, 15 bp, Homo sapiens
tacctttccaatttg

SEQ ID NO: 1285705 - DNA, 15 bp, Homo sapiens
ttacctttccaattt

SEQ ID NO: 1285706 - DNA, 15 bp, Homo sapiens
tttacctttccaatt

SEQ ID NO: 1285707 - DNA, 15 bp, Homo sapiens
ctttacctttccaat

SEQ ID NO: 1285708 - DNA, 15 bp, Homo sapiens
actttacctttccaa

SEQ ID NO: 1285709 - DNA, 15 bp, Homo sapiens
tactttacctttcca

SEQ ID NO: 1285710 - DNA, 15 bp, Homo sapiens
ttactttacctttcc

SEQ ID NO: 1285711 - DNA, 15 bp, Homo sapiens
tttactttacctttc

SEQ ID NO: 1285712 - DNA, 15 bp, Homo sapiens
gtttactttaccttt

SEQ ID NO: 1285713 - DNA, 15 bp, Homo sapiens
tgtttactttacctt

SEQ ID NO: 1285714 - DNA, 15 bp, Homo sapiens
atgtttactttacct

SEQ ID NO: 1285715 - DNA, 15 bp, Homo sapiens
aatgtttactttacc

SEQ ID NO: 1285716 - DNA, 15 bp, Homo sapiens
aaatgtttactttac

SEQ ID NO: 1285717 - DNA, 15 bp, Homo sapiens
aaaatgtttacttta

SEQ ID NO: 1285718 - DNA, 15 bp, Homo sapiens
taaaatgtttacttt

SEQ ID NO: 1285719 - DNA, 15 bp, Homo sapiens
ataaaatgtttactt

SEQ ID NO: 1285720 - DNA, 15 bp, Homo sapiens
aataaaatgtttact

SEQ ID NO: 1285721 - DNA, 15 bp, Homo sapiens
taataaaatgtttac

SEQ ID NO: 1285722 - DNA, 15 bp, Homo sapiens
gtgtaaacctaataa

SEQ ID NO: 1285723 - DNA, 15 bp, Homo sapiens
agtgtaaacctaata

SEQ ID NO: 1285724 - DNA, 15 bp, Homo sapiens
gagtgtaaacctaat

SEQ ID NO: 1285725 - DNA, 15 bp, Homo sapiens
agagtgtaaacctaa

SEQ ID NO: 1285726 - DNA, 15 bp, Homo sapiens
cagagtgtaaaccta

SEQ ID NO: 1285727 - DNA, 15 bp, Homo sapiens
tcagagtgtaaacct

SEQ ID NO: 1285728 - DNA, 15 bp, Homo sapiens
atcagagtgtaaacc

SEQ ID NO: 1285729 - DNA, 15 bp, Homo sapiens
aatcagagtgtaaac

SEQ ID NO: 1285730 - DNA, 15 bp, Homo sapiens
aaatcagagtgtaaa

SEQ ID NO: 1285731 - DNA, 15 bp, Homo sapiens
aaaatcagagtgtaa

SEQ ID NO: 1285732 - DNA, 15 bp, Homo sapiens
aaaaatcagagtgta

SEQ ID NO: 1285733 - DNA, 15 bp, Homo sapiens
aaaaaatcagagtgt

SEQ ID NO: 1285734 - DNA, 15 bp, Homo sapiens
taaaaaatcagagtg

SEQ ID NO: 1285735 - DNA, 15 bp, Homo sapiens
ataaaaaatcagagt

SEQ ID NO: 1285736 - DNA, 15 bp, Homo sapiens
cataaaaaatcagag

SEQ ID NO: 1285737 - DNA, 15 bp, Homo sapiens
acataaaaaatcaga

SEQ ID NO: 1285738 - DNA, 15 bp, Homo sapiens
gacataaaaaatcag

SEQ ID NO: 1285739 - DNA, 15 bp, Homo sapiens
tgacataaaaaatca

SEQ ID NO: 1285740 - DNA, 15 bp, Homo sapiens
atgacataaaaaatc

SEQ ID NO: 1285741 - DNA, 15 bp, Homo sapiens
aatgacataaaaaat

SEQ ID NO: 1285742 - DNA, 15 bp, Homo sapiens
caatgacataaaaaa

SEQ ID NO: 1285743 - DNA, 15 bp, Homo sapiens
acaatgacataaaaa

SEQ ID NO: 1285744 - DNA, 15 bp, Homo sapiens
aacaatgacataaaa

SEQ ID NO: 1285745 - DNA, 15 bp, Homo sapiens
gaacaatgacataaa

SEQ ID NO: 1285746 - DNA, 15 bp, Homo sapiens
tgaacaatgacataa

SEQ ID NO: 1285747 - DNA, 15 bp, Homo sapiens
gtgaacaatgacata

SEQ ID NO: 1285748 - DNA, 15 bp, Homo sapiens
tgtgaacaatgacat

SEQ ID NO: 1285749 - DNA, 15 bp, Homo sapiens
ttgtgaacaatgaca

SEQ ID NO: 1285750 - DNA, 15 bp, Homo sapiens
attgtgaacaatgac

SEQ ID NO: 1285751 - DNA, 15 bp, Homo sapiens
aattgtgaacaatga

SEQ ID NO: 1285752 - DNA, 15 bp, Homo sapiens
taattgtgaacaatg

SEQ ID NO: 1285753 - DNA, 15 bp, Homo sapiens
ctaattgtgaacaat

SEQ ID NO: 1285754 - DNA, 15 bp, Homo sapiens
tctaattgtgaacaa

SEQ ID NO: 1285755 - DNA, 15 bp, Homo sapiens
atctaattgtgaaca

SEQ ID NO: 1285756 - DNA, 15 bp, Homo sapiens
aatctaattgtgaac

SEQ ID NO: 1285757 - DNA, 15 bp, Homo sapiens
gaatctaattgtgaa

SEQ ID NO: 1285758 - DNA, 15 bp, Homo sapiens
agaatctaattgtga

SEQ ID NO: 1285759 - DNA, 15 bp, Homo sapiens
cagaatctaattgtg

SEQ ID NO: 1285760 - DNA, 15 bp, Homo sapiens
ccagaatctaattgt

SEQ ID NO: 1285761 - DNA, 15 bp, Homo sapiens
cccagaatctaattg

SEQ ID NO: 1285762 - DNA, 15 bp, Homo sapiens
tcccagaatctaatt

SEQ ID NO: 1285763 - DNA, 15 bp, Homo sapiens
ttcccagaatctaat

SEQ ID NO: 1285764 - DNA, 15 bp, Homo sapiens
attcccagaatctaa

SEQ ID NO: 1285765 - DNA, 15 bp, Homo sapiens
aattcccagaatcta

SEQ ID NO: 1285766 - DNA, 15 bp, Homo sapiens
taattcccagaatct

SEQ ID NO: 1285767 - DNA, 15 bp, Homo sapiens
ataattcccagaatc

SEQ ID NO: 1285768 - DNA, 15 bp, Homo sapiens
aataattcccagaat

SEQ ID NO: 1285769 - DNA, 15 bp, Homo sapiens
aaataattcccagaa

SEQ ID NO: 1285770 - DNA, 15 bp, Homo sapiens
taaataattcccaga

SEQ ID NO: 1285771 - DNA, 15 bp, Homo sapiens
ttaaataattcccag

SEQ ID NO: 1285772 - DNA, 15 bp, Homo sapiens
gttaaataattccca

SEQ ID NO: 1285773 - DNA, 15 bp, Homo sapiens
tgttaaataattccc

SEQ ID NO: 1285774 - DNA, 15 bp, Homo sapiens
gtgttaaataattcc

SEQ ID NO: 1285775 - DNA, 15 bp, Homo sapiens
tgtgttaaataattc

SEQ ID NO: 1285776 - DNA, 15 bp, Homo sapiens
atgtgttaaataatt

SEQ ID NO: 1285777 - DNA, 15 bp, Homo sapiens
aatgtgttaaataat

SEQ ID NO: 1285778 - DNA, 15 bp, Homo sapiens
aaatgtgttaaataa

SEQ ID NO: 1285779 - DNA, 15 bp, Homo sapiens
taaatgtgttaaata

SEQ ID NO: 1285780 - DNA, 15 bp, Homo sapiens
ctaaatgtgttaaat

SEQ ID NO: 1285781 - DNA, 15 bp, Homo sapiens
actaaatgtgttaaa

SEQ ID NO: 1285782 - DNA, 15 bp, Homo sapiens
tactaaatgtgttaa

SEQ ID NO: 1285783 - DNA, 15 bp, Homo sapiens
ttactaaatgtgtta

SEQ ID NO: 1285784 - DNA, 15 bp, Homo sapiens
tttactaaatgtgtt

SEQ ID NO: 1285785 - DNA, 15 bp, Homo sapiens
ctttactaaatgtgt

SEQ ID NO: 1285786 - DNA, 15 bp, Homo sapiens
actttactaaatgtg

SEQ ID NO: 1285787 - DNA, 15 bp, Homo sapiens
aactttactaaatgt

SEQ ID NO: 1285788 - DNA, 15 bp, Homo sapiens
taactttactaaatg

SEQ ID NO: 1285789 - DNA, 15 bp, Homo sapiens
ctaactttactaaat

SEQ ID NO: 1285790 - DNA, 15 bp, Homo sapiens
actaactttactaaa

SEQ ID NO: 1285791 - DNA, 15 bp, Homo sapiens
tactaactttactaa

SEQ ID NO: 1285792 - DNA, 15 bp, Homo sapiens
ttactaactttacta

SEQ ID NO: 1285793 - DNA, 15 bp, Homo sapiens
cttactaactttact

SEQ ID NO: 1285794 - DNA, 15 bp, Homo sapiens
acttactaactttac

SEQ ID NO: 1285795 - DNA, 15 bp, Homo sapiens
tacttactaacttta

SEQ ID NO: 1285796 - DNA, 15 bp, Homo sapiens
atacttactaacttt

SEQ ID NO: 1285797 - DNA, 15 bp, Homo sapiens
aatacttactaactt

SEQ ID NO: 1285798 - DNA, 15 bp, Homo sapiens
taatacttactaact

SEQ ID NO: 1285799 - DNA, 15 bp, Homo sapiens
ttaatacttactaac

SEQ ID NO: 1285800 - DNA, 15 bp, Homo sapiens
attaatacttactaa

SEQ ID NO: 1285801 - DNA, 15 bp, Homo sapiens
aattaatacttacta

SEQ ID NO: 1285802 - DNA, 15 bp, Homo sapiens
gaattaatacttact

SEQ ID NO: 1285803 - DNA, 15 bp, Homo sapiens
agaattaatacttac

SEQ ID NO: 1285804 - DNA, 15 bp, Homo sapiens
aagaattaatactta

SEQ ID NO: 1285805 - DNA, 15 bp, Homo sapiens
taagaattaatactt

SEQ ID NO: 1285806 - DNA, 15 bp, Homo sapiens
ctaagaattaatact

SEQ ID NO: 1285807 - DNA, 15 bp, Homo sapiens
tctaagaattaatac

SEQ ID NO: 1285808 - DNA, 15 bp, Homo sapiens
gtctaagaattaata

SEQ ID NO: 1285809 - DNA, 15 bp, Homo sapiens
agtctaagaattaat

SEQ ID NO: 1285810 - DNA, 15 bp, Homo sapiens
aagtctaagaattaa

SEQ ID NO: 1285811 - DNA, 15 bp, Homo sapiens
caagtctaagaatta

SEQ ID NO: 1285812 - DNA, 15 bp, Homo sapiens
acaagtctaagaatt

SEQ ID NO: 1285813 - DNA, 15 bp, Homo sapiens
gacaagtctaagaat

SEQ ID NO: 1285814 - DNA, 15 bp, Homo sapiens
ggacaagtctaagaa

SEQ ID NO: 1285815 - DNA, 15 bp, Homo sapiens
gggacaagtctaaga

SEQ ID NO: 1285816 - DNA, 15 bp, Homo sapiens
agggacaagtctaag

SEQ ID NO: 1285817 - DNA, 15 bp, Homo sapiens
aagggacaagtctaa

SEQ ID NO: 1285818 - DNA, 15 bp, Homo sapiens
aaagggacaagtcta

SEQ ID NO: 1285819 - DNA, 15 bp, Homo sapiens
aaaagggacaagtct

SEQ ID NO: 1285820 - DNA, 15 bp, Homo sapiens
taaaagggacaagtc

SEQ ID NO: 1285821 - DNA, 15 bp, Homo sapiens
ttaaaagggacaagt

SEQ ID NO: 1285822 - DNA, 15 bp, Homo sapiens
attaaaagggacaag

SEQ ID NO: 1285823 - DNA, 15 bp, Homo sapiens
cattaaaagggacaa

SEQ ID NO: 1285824 - DNA, 15 bp, Homo sapiens
acattaaaagggaca

SEQ ID NO: 1285825 - DNA, 15 bp, Homo sapiens
aacattaaaagggac

SEQ ID NO: 1285826 - DNA, 15 bp, Homo sapiens
taacattaaaaggga

SEQ ID NO: 1285827 - DNA, 15 bp, Homo sapiens
ctaacattaaaaggg

SEQ ID NO: 1285828 - DNA, 15 bp, Homo sapiens
gctaacattaaaagg

SEQ ID NO: 1285829 - DNA, 15 bp, Homo sapiens
agctaacattaaaag

SEQ ID NO: 1285830 - DNA, 15 bp, Homo sapiens
gagctaacattaaaa

SEQ ID NO: 1285831 - DNA, 15 bp, Homo sapiens
tgagctaacattaaa

SEQ ID NO: 1285832 - DNA, 15 bp, Homo sapiens
atgagctaacattaa

SEQ ID NO: 1285833 - DNA, 15 bp, Homo sapiens
aatgagctaacatta

SEQ ID NO: 1285834 - DNA, 15 bp, Homo sapiens
taatgagctaacatt

SEQ ID NO: 1285835 - DNA, 15 bp, Homo sapiens
ttaatgagctaacat

SEQ ID NO: 1285836 - DNA, 15 bp, Homo sapiens
attaatgagctaaca

SEQ ID NO: 1285837 - DNA, 15 bp, Homo sapiens
aattaatgagctaac

SEQ ID NO: 1285838 - DNA, 15 bp, Homo sapiens
gaattaatgagctaa

SEQ ID NO: 1285839 - DNA, 15 bp, Homo sapiens
agaattaatgagcta

SEQ ID NO: 1285840 - DNA, 15 bp, Homo sapiens
aagaattaatgagct

SEQ ID NO: 1285841 - DNA, 15 bp, Homo sapiens
taagaattaatgagc

SEQ ID NO: 1285842 - DNA, 15 bp, Homo sapiens
ctaagaattaatgag

SEQ ID NO: 1285843 - DNA, 15 bp, Homo sapiens
gctaagaattaatga

SEQ ID NO: 1285844 - DNA, 15 bp, Homo sapiens
agctaagaattaatg

SEQ ID NO: 1285845 - DNA, 15 bp, Homo sapiens
aagctaagaattaat

SEQ ID NO: 1285846 - DNA, 15 bp, Homo sapiens
aaagctaagaattaa

SEQ ID NO: 1285847 - DNA, 15 bp, Homo sapiens
gaaagctaagaatta

SEQ ID NO: 1285848 - DNA, 15 bp, Homo sapiens
agaaagctaagaatt

SEQ ID NO: 1285849 - DNA, 15 bp, Homo sapiens
aagaaagctaagaat

SEQ ID NO: 1285850 - DNA, 15 bp, Homo sapiens
taagaaagctaagaa

SEQ ID NO: 1285851 - DNA, 15 bp, Homo sapiens
ataagaaagctaaga

SEQ ID NO: 1285852 - DNA, 15 bp, Homo sapiens
aataagaaagctaag

SEQ ID NO: 1285853 - DNA, 15 bp, Homo sapiens
aaataagaaagctaa

SEQ ID NO: 1285854 - DNA, 15 bp, Homo sapiens
taaataagaaagcta

SEQ ID NO: 1285855 - DNA, 15 bp, Homo sapiens
ataaataagaaagct

SEQ ID NO: 1285856 - DNA, 15 bp, Homo sapiens
gataaataagaaagc

SEQ ID NO: 1285857 - DNA, 15 bp, Homo sapiens
ggataaataagaaag

SEQ ID NO: 1285858 - DNA, 15 bp, Homo sapiens
tggataaataagaaa

SEQ ID NO: 1285859 - DNA, 15 bp, Homo sapiens
ctggataaataagaa

SEQ ID NO: 1285860 - DNA, 15 bp, Homo sapiens
actggataaataaga

SEQ ID NO: 1285861 - DNA, 15 bp, Homo sapiens
tactggataaataag

SEQ ID NO: 1285862 - DNA, 15 bp, Homo sapiens
ttactggataaataa

SEQ ID NO: 1285863 - DNA, 15 bp, Homo sapiens
attactggataaata

SEQ ID NO: 1285864 - DNA, 15 bp, Homo sapiens
tattactggataaat

SEQ ID NO: 1285865 - DNA, 15 bp, Homo sapiens
atattactggataaa

SEQ ID NO: 1285866 - DNA, 15 bp, Homo sapiens
catattactggataa

SEQ ID NO: 1285867 - DNA, 15 bp, Homo sapiens
gcatattactggata

SEQ ID NO: 1285868 - DNA, 15 bp, Homo sapiens
tgcatattactggat

SEQ ID NO: 1285869 - DNA, 15 bp, Homo sapiens
atgcatattactgga

SEQ ID NO: 1285870 - DNA, 15 bp, Homo sapiens
aatgcatattactgg

SEQ ID NO: 1285871 - DNA, 15 bp, Homo sapiens
gaatgcatattactg

SEQ ID NO: 1285872 - DNA, 15 bp, Homo sapiens
agaatgcatattact

SEQ ID NO: 1285873 - DNA, 15 bp, Homo sapiens
cagaatgcatattac

SEQ ID NO: 1285874 - DNA, 15 bp, Homo sapiens
tcagaatgcatatta

SEQ ID NO: 1285875 - DNA, 15 bp, Homo sapiens
ttcagaatgcatatt

SEQ ID NO: 1285876 - DNA, 15 bp, Homo sapiens
attcagaatgcatat

SEQ ID NO: 1285877 - DNA, 15 bp, Homo sapiens
cattcagaatgcata

SEQ ID NO: 1285878 - DNA, 15 bp, Homo sapiens
gcattcagaatgcat

SEQ ID NO: 1285879 - DNA, 15 bp, Homo sapiens
agcattcagaatgca

SEQ ID NO: 1285880 - DNA, 15 bp, Homo sapiens
aagcattcagaatgc

SEQ ID NO: 1285881 - DNA, 15 bp, Homo sapiens
gaagcattcagaatg

SEQ ID NO: 1285882 - DNA, 15 bp, Homo sapiens
ggaagcattcagaat

SEQ ID NO: 1285883 - DNA, 15 bp, Homo sapiens
aggaagcattcagaa

SEQ ID NO: 1285884 - DNA, 15 bp, Homo sapiens
caggaagcattcaga

SEQ ID NO: 1285885 - DNA, 15 bp, Homo sapiens
ccaggaagcattcag

SEQ ID NO: 1285886 - DNA, 15 bp, Homo sapiens
tccaggaagcattca

SEQ ID NO: 1285887 - DNA, 15 bp, Homo sapiens
ttccaggaagcattc

SEQ ID NO: 1285888 - DNA, 15 bp, Homo sapiens
tttccaggaagcatt

SEQ ID NO: 1285889 - DNA, 15 bp, Homo sapiens
ttttccaggaagcat

SEQ ID NO: 1285890 - DNA, 15 bp, Homo sapiens
attttccaggaagca

SEQ ID NO: 1285891 - DNA, 15 bp, Homo sapiens
aattttccaggaagc

SEQ ID NO: 1285892 - DNA, 15 bp, Homo sapiens
taattttccaggaag

SEQ ID NO: 1285893 - DNA, 15 bp, Homo sapiens
ttaattttccaggaa

SEQ ID NO: 1285894 - DNA, 15 bp, Homo sapiens
gttaattttccagga

SEQ ID NO: 1285895 - DNA, 15 bp, Homo sapiens
ggttaattttccagg

SEQ ID NO: 1285896 - DNA, 15 bp, Homo sapiens
cggttaattttccag

SEQ ID NO: 1285897 - DNA, 15 bp, Homo sapiens
acggttaattttcca

SEQ ID NO: 1285898 - DNA, 15 bp, Homo sapiens
aacggttaattttcc

SEQ ID NO: 1285899 - DNA, 15 bp, Homo sapiens
aaacggttaattttc

SEQ ID NO: 1285900 - DNA, 15 bp, Homo sapiens
aaaacggttaatttt

SEQ ID NO: 1285901 - DNA, 15 bp, Homo sapiens
taaaacggttaattt

SEQ ID NO: 1285902 - DNA, 15 bp, Homo sapiens
ataaaacggttaatt

SEQ ID NO: 1285903 - DNA, 15 bp, Homo sapiens
aataaaacggttaat

SEQ ID NO: 1285904 - DNA, 15 bp, Homo sapiens
taataaaacggttaa

SEQ ID NO: 1285905 - DNA, 15 bp, Homo sapiens
ataataaaacggtta

SEQ ID NO: 1285906 - DNA, 15 bp, Homo sapiens
gataataaaacggtt

SEQ ID NO: 1285907 - DNA, 15 bp, Homo sapiens
ggataataaaacggt

SEQ ID NO: 1285908 - DNA, 15 bp, Homo sapiens
aggataataaaacgg

SEQ ID NO: 1285909 - DNA, 15 bp, Homo sapiens
aaggataataaaacg

SEQ ID NO: 1285910 - DNA, 15 bp, Homo sapiens
aaaggataataaaac

SEQ ID NO: 1285911 - DNA, 15 bp, Homo sapiens
gaaaggataataaaa

SEQ ID NO: 1285912 - DNA, 15 bp, Homo sapiens
tgaaaggataataaa

SEQ ID NO: 1285913 - DNA, 15 bp, Homo sapiens
atgaaaggataataa

SEQ ID NO: 1285914 - DNA, 15 bp, Homo sapiens
catgaaaggataata

SEQ ID NO: 1285915 - DNA, 15 bp, Homo sapiens
acatgaaaggataat

SEQ ID NO: 1285916 - DNA, 15 bp, Homo sapiens
gacatgaaaggataa

SEQ ID NO: 1285917 - DNA, 15 bp, Homo sapiens
agacatgaaaggata

SEQ ID NO: 1285918 - DNA, 15 bp, Homo sapiens
aagacatgaaaggat

SEQ ID NO: 1285919 - DNA, 15 bp, Homo sapiens
gaagacatgaaagga

SEQ ID NO: 1285920 - DNA, 15 bp, Homo sapiens
ggaagacatgaaagg

SEQ ID NO: 1285921 - DNA, 15 bp, Homo sapiens
tggaagacatgaaag

SEQ ID NO: 1285922 - DNA, 15 bp, Homo sapiens
atggaagacatgaaa

SEQ ID NO: 1285923 - DNA, 15 bp, Homo sapiens
aatggaagacatgaa

SEQ ID NO: 1285924 - DNA, 15 bp, Homo sapiens
aaatggaagacatga

SEQ ID NO: 1285925 - DNA, 15 bp, Homo sapiens
caaatggaagacatg

SEQ ID NO: 1285926 - DNA, 15 bp, Homo sapiens
acaaatggaagacat

SEQ ID NO: 1285927 - DNA, 15 bp, Homo sapiens
aacaaatggaagaca

SEQ ID NO: 1285928 - DNA, 15 bp, Homo sapiens
aaacaaatggaagac

SEQ ID NO: 1285929 - DNA, 15 bp, Homo sapiens
aaaacaaatggaaga

SEQ ID NO: 1285930 - DNA, 15 bp, Homo sapiens
gaaaacaaatggaag

SEQ ID NO: 1285931 - DNA, 15 bp, Homo sapiens
tgaaaacaaatggaa

SEQ ID NO: 1285932 - DNA, 15 bp, Homo sapiens
ttgaaaacaaatgga

SEQ ID NO: 1285933 - DNA, 15 bp, Homo sapiens
tttgaaaacaaatgg

SEQ ID NO: 1285934 - DNA, 15 bp, Homo sapiens
ttttgaaaacaaatg

SEQ ID NO: 1285935 - DNA, 15 bp, Homo sapiens
tttttgaaaacaaat

SEQ ID NO: 1285936 - DNA, 15 bp, Homo sapiens
gtttttgaaaacaaa

SEQ ID NO: 1285937 - DNA, 15 bp, Homo sapiens
agtttttgaaaacaa

SEQ ID NO: 1285938 - DNA, 15 bp, Homo sapiens
aagtttttgaaaaca

SEQ ID NO: 1285939 - DNA, 15 bp, Homo sapiens
aaagtttttgaaaac

SEQ ID NO: 1285940 - DNA, 15 bp, Homo sapiens
taaagtttttgaaaa

SEQ ID NO: 1285941 - DNA, 15 bp, Homo sapiens
ttaaagtttttgaaa

SEQ ID NO: 1285942 - DNA, 15 bp, Homo sapiens
cttaaagtttttgaa

SEQ ID NO: 1285943 - DNA, 15 bp, Homo sapiens
gcttaaagtttttga

SEQ ID NO: 1285944 - DNA, 15 bp, Homo sapiens
agcttaaagtttttg

SEQ ID NO: 1285945 - DNA, 15 bp, Homo sapiens
aagcttaaagttttt

SEQ ID NO: 1285946 - DNA, 15 bp, Homo sapiens
taagcttaaagtttt

SEQ ID NO: 1285947 - DNA, 15 bp, Homo sapiens
ataagcttaaagttt

SEQ ID NO: 1285948 - DNA, 15 bp, Homo sapiens
gataagcttaaagtt

SEQ ID NO: 1285949 - DNA, 15 bp, Homo sapiens
agataagcttaaagt

SEQ ID NO: 1285950 - DNA, 15 bp, Homo sapiens
gagataagcttaaag

SEQ ID NO: 1285951 - DNA, 15 bp, Homo sapiens
ggagataagcttaaa

SEQ ID NO: 1285952 - DNA, 15 bp, Homo sapiens
gggagataagcttaa

SEQ ID NO: 1285953 - DNA, 15 bp, Homo sapiens
tgggagataagctta

SEQ ID NO: 1285954 - DNA, 15 bp, Homo sapiens
atgggagataagctt

SEQ ID NO: 1285955 - DNA, 15 bp, Homo sapiens
aatgggagataagct

SEQ ID NO: 1285956 - DNA, 15 bp, Homo sapiens
aaatgggagataagc

SEQ ID NO: 1285957 - DNA, 15 bp, Homo sapiens
aaaatgggagataag

SEQ ID NO: 1285958 - DNA, 15 bp, Homo sapiens
taaaatgggagataa

SEQ ID NO: 1285959 - DNA, 15 bp, Homo sapiens
ctaaaatgggagata

SEQ ID NO: 1285960 - DNA, 15 bp, Homo sapiens
gctaaaatgggagat

SEQ ID NO: 1285961 - DNA, 15 bp, Homo sapiens
ggctaaaatgggaga

SEQ ID NO: 1285962 - DNA, 15 bp, Homo sapiens
aggctaaaatgggag

SEQ ID NO: 1285963 - DNA, 15 bp, Homo sapiens
aaggctaaaatggga

SEQ ID NO: 1285964 - DNA, 15 bp, Homo sapiens
gaaggctaaaatggg

SEQ ID NO: 1285965 - DNA, 15 bp, Homo sapiens
agaaggctaaaatgg

SEQ ID NO: 1285966 - DNA, 15 bp, Homo sapiens
aagaaggctaaaatg

SEQ ID NO: 1285967 - DNA, 15 bp, Homo sapiens
aaagaaggctaaaat

SEQ ID NO: 1285968 - DNA, 15 bp, Homo sapiens
caaagaaggctaaaa

SEQ ID NO: 1285969 - DNA, 15 bp, Homo sapiens
gcaaagaaggctaaa

SEQ ID NO: 1285970 - DNA, 15 bp, Homo sapiens
ggcaaagaaggctaa

SEQ ID NO: 1285971 - DNA, 15 bp, Homo sapiens
tggcaaagaaggcta

SEQ ID NO: 1285972 - DNA, 15 bp, Homo sapiens
ctggcaaagaaggct

SEQ ID NO: 1285973 - DNA, 15 bp, Homo sapiens
tctggcaaagaaggc

SEQ ID NO: 1285974 - DNA, 15 bp, Homo sapiens
ttctggcaaagaagg

SEQ ID NO: 1285975 - DNA, 15 bp, Homo sapiens
tttctggcaaagaag

SEQ ID NO: 1285976 - DNA, 15 bp, Homo sapiens
ttttctggcaaagaa

SEQ ID NO: 1285977 - DNA, 15 bp, Homo sapiens
gttttctggcaaaga

SEQ ID NO: 1285978 - DNA, 15 bp, Homo sapiens
agttttctggcaaag

SEQ ID NO: 1285979 - DNA, 15 bp, Homo sapiens
aagttttctggcaaa

SEQ ID NO: 1285980 - DNA, 15 bp, Homo sapiens
gaagttttctggcaa

SEQ ID NO: 1285981 - DNA, 15 bp, Homo sapiens
agaagttttctggca

SEQ ID NO: 1285982 - DNA, 15 bp, Homo sapiens
tagaagttttctggc

SEQ ID NO: 1285983 - DNA, 15 bp, Homo sapiens
ctagaagttttctgg

SEQ ID NO: 1285984 - DNA, 15 bp, Homo sapiens
actagaagttttctg

SEQ ID NO: 1285985 - DNA, 15 bp, Homo sapiens
aactagaagttttct

SEQ ID NO: 1285986 - DNA, 15 bp, Homo sapiens
gaactagaagttttc

SEQ ID NO: 1285987 - DNA, 15 bp, Homo sapiens
agaactagaagtttt

SEQ ID NO: 1285988 - DNA, 15 bp, Homo sapiens
cagaactagaagttt

SEQ ID NO: 1285989 - DNA, 15 bp, Homo sapiens
tcagaactagaagtt

SEQ ID NO: 1285990 - DNA, 15 bp, Homo sapiens
ttcagaactagaagt

SEQ ID NO: 1285991 - DNA, 15 bp, Homo sapiens
attcagaactagaag

SEQ ID NO: 1285992 - DNA, 15 bp, Homo sapiens
tattcagaactagaa

SEQ ID NO: 1285993 - DNA, 15 bp, Homo sapiens
ctattcagaactaga

SEQ ID NO: 1285994 - DNA, 15 bp, Homo sapiens
tctattcagaactag

SEQ ID NO: 1285995 - DNA, 15 bp, Homo sapiens
ttctattcagaacta

SEQ ID NO: 1285996 - DNA, 15 bp, Homo sapiens
attctattcagaact

SEQ ID NO: 1285997 - DNA, 15 bp, Homo sapiens
cattctattcagaac

SEQ ID NO: 1285998 - DNA, 15 bp, Homo sapiens
ccattctattcagaa

SEQ ID NO: 1285999 - DNA, 15 bp, Homo sapiens
accattctattcaga

SEQ ID NO: 1286000 - DNA, 15 bp, Homo sapiens
caccattctattcag

SEQ ID NO: 1286001 - DNA, 15 bp, Homo sapiens
tcaccattctattca

SEQ ID NO: 1286002 - DNA, 15 bp, Homo sapiens
gtcaccattctattc

SEQ ID NO: 1286003 - DNA, 15 bp, Homo sapiens
tgtcaccattctatt

SEQ ID NO: 1286004 - DNA, 15 bp, Homo sapiens
atgtcaccattctat

SEQ ID NO: 1286005 - DNA, 15 bp, Homo sapiens
tatgtcaccattcta

SEQ ID NO: 1286006 - DNA, 15 bp, Homo sapiens
ttatgtcaccattct

SEQ ID NO: 1286007 - DNA, 15 bp, Homo sapiens
tttatgtcaccattc

SEQ ID NO: 1286008 - DNA, 15 bp, Homo sapiens
atttatgtcaccatt

SEQ ID NO: 1286009 - DNA, 15 bp, Homo sapiens
aatttatgtcaccat

SEQ ID NO: 1286010 - DNA, 15 bp, Homo sapiens
aaatttatgtcacca

SEQ ID NO: 1286011 - DNA, 15 bp, Homo sapiens
taaatttatgtcacc

SEQ ID NO: 1286012 - DNA, 15 bp, Homo sapiens
ttaaatttatgtcac

SEQ ID NO: 1286013 - DNA, 15 bp, Homo sapiens
tttaaatttatgtca

SEQ ID NO: 1286014 - DNA, 15 bp, Homo sapiens
gtttaaatttatgtc

SEQ ID NO: 1286015 - DNA, 15 bp, Homo sapiens
agtttaaatttatgt

SEQ ID NO: 1286016 - DNA, 15 bp, Homo sapiens
aagtttaaatttatg

SEQ ID NO: 1286017 - DNA, 15 bp, Homo sapiens
gaagtttaaatttat

SEQ ID NO: 1286018 - DNA, 15 bp, Homo sapiens
agaagtttaaattta

SEQ ID NO: 1286019 - DNA, 15 bp, Homo sapiens
aagaagtttaaattt

SEQ ID NO: 1286020 - DNA, 15 bp, Homo sapiens
gaagaagtttaaatt

SEQ ID NO: 1286021 - DNA, 15 bp, Homo sapiens
ggaagaagtttaaat

SEQ ID NO: 1286022 - DNA, 15 bp, Homo sapiens
aggaagaagtttaaa

SEQ ID NO: 1286023 - DNA, 15 bp, Homo sapiens
taggaagaagtttaa

SEQ ID NO: 1286024 - DNA, 15 bp, Homo sapiens
ttaggaagaagttta

SEQ ID NO: 1286025 - DNA, 15 bp, Homo sapiens
attaggaagaagttt

SEQ ID NO: 1286026 - DNA, 15 bp, Homo sapiens
tattaggaagaagtt

SEQ ID NO: 1286027 - DNA, 15 bp, Homo sapiens
ctattaggaagaagt

SEQ ID NO: 1286028 - DNA, 15 bp, Homo sapiens
actattaggaagaag

SEQ ID NO: 1286029 - DNA, 15 bp, Homo sapiens
cactattaggaagaa

SEQ ID NO: 1286030 - DNA, 15 bp, Homo sapiens
acactattaggaaga

SEQ ID NO: 1286031 - DNA, 15 bp, Homo sapiens
aacactattaggaag

SEQ ID NO: 1286032 - DNA, 15 bp, Homo sapiens
taacactattaggaa

SEQ ID NO: 1286033 - DNA, 15 bp, Homo sapiens
ataacactattagga

SEQ ID NO: 1286034 - DNA, 15 bp, Homo sapiens
aataacactattagg

SEQ ID NO: 1286035 - DNA, 15 bp, Homo sapiens
aaataacactattag

SEQ ID NO: 1286036 - DNA, 15 bp, Homo sapiens
taaataacactatta

SEQ ID NO: 1286037 - DNA, 15 bp, Homo sapiens
ctaaataacactatt

SEQ ID NO: 1286038 - DNA, 15 bp, Homo sapiens
actaaataacactat

SEQ ID NO: 1286039 - DNA, 15 bp, Homo sapiens
aactaaataacacta

SEQ ID NO: 1286040 - DNA, 15 bp, Homo sapiens
aaactaaataacact

SEQ ID NO: 1286041 - DNA, 15 bp, Homo sapiens
caaactaaataacac

SEQ ID NO: 1286042 - DNA, 15 bp, Homo sapiens
ccaaactaaataaca

SEQ ID NO: 1286043 - DNA, 15 bp, Homo sapiens
tccaaactaaataac

SEQ ID NO: 1286044 - DNA, 15 bp, Homo sapiens
ttccaaactaaataa

SEQ ID NO: 1286045 - DNA, 15 bp, Homo sapiens
gttccaaactaaata

SEQ ID NO: 1286046 - DNA, 15 bp, Homo sapiens
cgttccaaactaaat

SEQ ID NO: 1286047 - DNA, 15 bp, Homo sapiens
tcgttccaaactaaa

SEQ ID NO: 1286048 - DNA, 15 bp, Homo sapiens
ctcgttccaaactaa

SEQ ID NO: 1286049 - DNA, 15 bp, Homo sapiens
tctcgttccaaacta

SEQ ID NO: 1286050 - DNA, 15 bp, Homo sapiens
ttctcgttccaaact

SEQ ID NO: 1286051 - DNA, 15 bp, Homo sapiens
tttctcgttccaaac

SEQ ID NO: 1286052 - DNA, 15 bp, Homo sapiens
ttttctcgttccaaa

SEQ ID NO: 1286053 - DNA, 15 bp, Homo sapiens
gttttctcgttccaa

SEQ ID NO: 1286054 - DNA, 15 bp, Homo sapiens
tgttttctcgttcca

SEQ ID NO: 1286055 - DNA, 15 bp, Homo sapiens
gtgttttctcgttcc

SEQ ID NO: 1286056 - DNA, 15 bp, Homo sapiens
agtgttttctcgttc

SEQ ID NO: 1286057 - DNA, 15 bp, Homo sapiens
aagtgttttctcgtt

SEQ ID NO: 1286058 - DNA, 15 bp, Homo sapiens
caagtgttttctcgt

SEQ ID NO: 1286059 - DNA, 15 bp, Homo sapiens
gcaagtgttttctcg

SEQ ID NO: 1286060 - DNA, 15 bp, Homo sapiens
tgcaagtgttttctc

SEQ ID NO: 1286061 - DNA, 15 bp, Homo sapiens
ttgcaagtgttttct

SEQ ID NO: 1286062 - DNA, 15 bp, Homo sapiens
attgcaagtgttttc

SEQ ID NO: 1286063 - DNA, 15 bp, Homo sapiens
cattgcaagtgtttt

SEQ ID NO: 1286064 - DNA, 15 bp, Homo sapiens
ccattgcaagtgttt

SEQ ID NO: 1286065 - DNA, 15 bp, Homo sapiens
tccattgcaagtgtt

SEQ ID NO: 1286066 - DNA, 15 bp, Homo sapiens
atccattgcaagtgt

SEQ ID NO: 1286067 - DNA, 15 bp, Homo sapiens
catccattgcaagtg

SEQ ID NO: 1286068 - DNA, 15 bp, Homo sapiens
ccatccattgcaagt

SEQ ID NO: 1286069 - DNA, 15 bp, Homo sapiens
accatccattgcaag

SEQ ID NO: 1286070 - DNA, 15 bp, Homo sapiens
caccatccattgcaa

SEQ ID NO: 1286071 - DNA, 15 bp, Homo sapiens
acaccatccattgca

SEQ ID NO: 1286072 - DNA, 15 bp, Homo sapiens
tacaccatccattgc

SEQ ID NO: 1286073 - DNA, 15 bp, Homo sapiens
atacaccatccattg

SEQ ID NO: 1286074 - DNA, 15 bp, Homo sapiens
catacaccatccatt

SEQ ID NO: 1286075 - DNA, 15 bp, Homo sapiens
acatacaccatccat

SEQ ID NO: 1286076 - DNA, 15 bp, Homo sapiens
cacatacaccatcca

SEQ ID NO: 1286077 - DNA, 15 bp, Homo sapiens
tcacatacaccatcc

SEQ ID NO: 1286078 - DNA, 15 bp, Homo sapiens
gtcacatacaccatc

SEQ ID NO: 1286079 - DNA, 15 bp, Homo sapiens
ggtcacatacaccat

SEQ ID NO: 1286080 - DNA, 15 bp, Homo sapiens
aggtcacatacacca

SEQ ID NO: 1286081 - DNA, 15 bp, Homo sapiens
taggtcacatacacc

SEQ ID NO: 1286082 - DNA, 15 bp, Homo sapiens
ataggtcacatacac

SEQ ID NO: 1286083 - DNA, 15 bp, Homo sapiens
tataggtcacataca

SEQ ID NO: 1286084 - DNA, 15 bp, Homo sapiens
gtataggtcacatac

SEQ ID NO: 1286085 - DNA, 15 bp, Homo sapiens
agtataggtcacata

SEQ ID NO: 1286086 - DNA, 15 bp, Homo sapiens
tagtataggtcacat

SEQ ID NO: 1286087 - DNA, 15 bp, Homo sapiens
atagtataggtcaca

SEQ ID NO: 1286088 - DNA, 15 bp, Homo sapiens
tatagtataggtcac

SEQ ID NO: 1286089 - DNA, 15 bp, Homo sapiens
ttatagtataggtca

SEQ ID NO: 1286090 - DNA, 15 bp, Homo sapiens
tttatagtataggtc

SEQ ID NO: 1286091 - DNA, 15 bp, Homo sapiens
ctttatagtataggt

SEQ ID NO: 1286092 - DNA, 15 bp, Homo sapiens
actttatagtatagg

SEQ ID NO: 1286093 - DNA, 15 bp, Homo sapiens
tactttatagtatag

SEQ ID NO: 1286094 - DNA, 15 bp, Homo sapiens
ttactttatagtata

SEQ ID NO: 1286095 - DNA, 15 bp, Homo sapiens
attactttatagtat

SEQ ID NO: 1286096 - DNA, 15 bp, Homo sapiens
cattactttatagta

SEQ ID NO: 1286097 - DNA, 15 bp, Homo sapiens
tcattactttatagt

SEQ ID NO: 1286098 - DNA, 15 bp, Homo sapiens
atcattactttatag

SEQ ID NO: 1286099 - DNA, 15 bp, Homo sapiens
aatcattactttata

SEQ ID NO: 1286100 - DNA, 15 bp, Homo sapiens
aaatcattactttat

SEQ ID NO: 1286101 - DNA, 15 bp, Homo sapiens
caaatcattacttta

SEQ ID NO: 1286102 - DNA, 15 bp, Homo sapiens
acaaatcattacttt

SEQ ID NO: 1286103 - DNA, 15 bp, Homo sapiens
tacaaatcattactt

SEQ ID NO: 1286104 - DNA, 15 bp, Homo sapiens
gtacaaatcattact

SEQ ID NO: 1286105 - DNA, 15 bp, Homo sapiens
agtacaaatcattac

SEQ ID NO: 1286106 - DNA, 15 bp, Homo sapiens
gagtacaaatcatta

SEQ ID NO: 1286107 - DNA, 15 bp, Homo sapiens
ggagtacaaatcatt

SEQ ID NO: 1286108 - DNA, 15 bp, Homo sapiens
gggagtacaaatcat

SEQ ID NO: 1286109 - DNA, 15 bp, Homo sapiens
tgggagtacaaatca

SEQ ID NO: 1286110 - DNA, 15 bp, Homo sapiens
ttgggagtacaaatc

SEQ ID NO: 1286111 - DNA, 15 bp, Homo sapiens
attgggagtacaaat

SEQ ID NO: 1286112 - DNA, 15 bp, Homo sapiens
cattgggagtacaaa

SEQ ID NO: 1286113 - DNA, 15 bp, Homo sapiens
ccattgggagtacaa

SEQ ID NO: 1286114 - DNA, 15 bp, Homo sapiens
accattgggagtaca

SEQ ID NO: 1286115 - DNA, 15 bp, Homo sapiens
caccattgggagtac

SEQ ID NO: 1286116 - DNA, 15 bp, Homo sapiens
ccaccattgggagta

SEQ ID NO: 1286117 - DNA, 15 bp, Homo sapiens
gccaccattgggagt

SEQ ID NO: 1286118 - DNA, 15 bp, Homo sapiens
agccaccattgggag

SEQ ID NO: 1286119 - DNA, 15 bp, Homo sapiens
aagccaccattggga

SEQ ID NO: 1286120 - DNA, 15 bp, Homo sapiens
taagccaccattggg

SEQ ID NO: 1286121 - DNA, 15 bp, Homo sapiens
ctaagccaccattgg

SEQ ID NO: 1286122 - DNA, 15 bp, Homo sapiens
tctaagccaccattg

SEQ ID NO: 1286123 - DNA, 15 bp, Homo sapiens
ctctaagccaccatt

SEQ ID NO: 1286124 - DNA, 15 bp, Homo sapiens
cctctaagccaccat

SEQ ID NO: 1286125 - DNA, 15 bp, Homo sapiens
tcctctaagccacca

SEQ ID NO: 1286126 - DNA, 15 bp, Homo sapiens
gtcctctaagccacc

SEQ ID NO: 1286127 - DNA, 15 bp, Homo sapiens
agtcctctaagccac

SEQ ID NO: 1286128 - DNA, 15 bp, Homo sapiens
aagtcctctaagcca

SEQ ID NO: 1286129 - DNA, 15 bp, Homo sapiens
aaagtcctctaagcc

SEQ ID NO: 1286130 - DNA, 15 bp, Homo sapiens
aaaagtcctctaagc

SEQ ID NO: 1286131 - DNA, 15 bp, Homo sapiens
aaaaagtcctctaag

SEQ ID NO: 1286132 - DNA, 15 bp, Homo sapiens
gaaaaagtcctctaa

SEQ ID NO: 1286133 - DNA, 15 bp, Homo sapiens
ggaaaaagtcctcta

SEQ ID NO: 1286134 - DNA, 15 bp, Homo sapiens
tggaaaaagtcctct

SEQ ID NO: 1286135 - DNA, 15 bp, Homo sapiens
atggaaaaagtcctc

SEQ ID NO: 1286136 - DNA, 15 bp, Homo sapiens
aatggaaaaagtcct

SEQ ID NO: 1286137 - DNA, 15 bp, Homo sapiens
taatggaaaaagtcc

SEQ ID NO: 1286138 - DNA, 15 bp, Homo sapiens
gtaatggaaaaagtc

SEQ ID NO: 1286139 - DNA, 15 bp, Homo sapiens
tgtaatggaaaaagt

SEQ ID NO: 1286140 - DNA, 15 bp, Homo sapiens
ctgtaatggaaaaag

SEQ ID NO: 1286141 - DNA, 15 bp, Homo sapiens
actgtaatggaaaaa

SEQ ID NO: 1286142 - DNA, 15 bp, Homo sapiens
aactgtaatggaaaa

SEQ ID NO: 1286143 - DNA, 15 bp, Homo sapiens
gaactgtaatggaaa

SEQ ID NO: 1286144 - DNA, 15 bp, Homo sapiens
cgaactgtaatggaa

SEQ ID NO: 1286145 - DNA, 15 bp, Homo sapiens
tcgaactgtaatgga

SEQ ID NO: 1286146 - DNA, 15 bp, Homo sapiens
ctcgaactgtaatgg

SEQ ID NO: 1286147 - DNA, 15 bp, Homo sapiens
actcgaactgtaatg

SEQ ID NO: 1286148 - DNA, 15 bp, Homo sapiens
tactcgaactgtaat

SEQ ID NO: 1286149 - DNA, 15 bp, Homo sapiens
ctactcgaactgtaa

SEQ ID NO: 1286150 - DNA, 15 bp, Homo sapiens
cctactcgaactgta

SEQ ID NO: 1286151 - DNA, 15 bp, Homo sapiens
tcctactcgaactgt

SEQ ID NO: 1286152 - DNA, 15 bp, Homo sapiens
ctcctactcgaactg

SEQ ID NO: 1286153 - DNA, 15 bp, Homo sapiens
gctcctactcgaact

SEQ ID NO: 1286154 - DNA, 15 bp, Homo sapiens
tgctcctactcgaac

SEQ ID NO: 1286155 - DNA, 15 bp, Homo sapiens
atgctcctactcgaa

SEQ ID NO: 1286156 - DNA, 15 bp, Homo sapiens
tatgctcctactcga

SEQ ID NO: 1286157 - DNA, 15 bp, Homo sapiens
ttatgctcctactcg

SEQ ID NO: 1286158 - DNA, 15 bp, Homo sapiens
attatgctcctactc

SEQ ID NO: 1286159 - DNA, 15 bp, Homo sapiens
aattatgctcctact

SEQ ID NO: 1286160 - DNA, 15 bp, Homo sapiens
taattatgctcctac

SEQ ID NO: 1286161 - DNA, 15 bp, Homo sapiens
ttaattatgctccta

SEQ ID NO: 1286162 - DNA, 15 bp, Homo sapiens
attaattatgctcct

SEQ ID NO: 1286163 - DNA, 15 bp, Homo sapiens
tattaattatgctcc

SEQ ID NO: 1286164 - DNA, 15 bp, Homo sapiens
atattaattatgctc

SEQ ID NO: 1286165 - DNA, 15 bp, Homo sapiens
catattaattatgct

SEQ ID NO: 1286166 - DNA, 15 bp, Homo sapiens
gcatattaattatgc

SEQ ID NO: 1286167 - DNA, 15 bp, Homo sapiens
agcatattaattatg

SEQ ID NO: 1286168 - DNA, 15 bp, Homo sapiens
aagcatattaattat

SEQ ID NO: 1286169 - DNA, 15 bp, Homo sapiens
taagcatattaatta

SEQ ID NO: 1286170 - DNA, 15 bp, Homo sapiens
ctaagcatattaatt

SEQ ID NO: 1286171 - DNA, 15 bp, Homo sapiens
cctaagcatattaat

SEQ ID NO: 1286172 - DNA, 15 bp, Homo sapiens
acctaagcatattaa

SEQ ID NO: 1286173 - DNA, 15 bp, Homo sapiens
aacctaagcatatta

SEQ ID NO: 1286174 - DNA, 15 bp, Homo sapiens
taacctaagcatatt

SEQ ID NO: 1286175 - DNA, 15 bp, Homo sapiens
ttaacctaagcatat

SEQ ID NO: 1286176 - DNA, 15 bp, Homo sapiens
cttaacctaagcata

SEQ ID NO: 1286177 - DNA, 15 bp, Homo sapiens
acttaacctaagcat

SEQ ID NO: 1286178 - DNA, 15 bp, Homo sapiens
aacttaacctaagca

SEQ ID NO: 1286179 - DNA, 15 bp, Homo sapiens
aaacttaacctaagc

SEQ ID NO: 1286180 - DNA, 15 bp, Homo sapiens
aaaacttaacctaag

SEQ ID NO: 1286181 - DNA, 15 bp, Homo sapiens
aaaaacttaacctaa

SEQ ID NO: 1286182 - DNA, 15 bp, Homo sapiens
aaaaaacttaaccta

SEQ ID NO: 1286183 - DNA, 15 bp, Homo sapiens
gaaaaaacttaacct

SEQ ID NO: 1286184 - DNA, 15 bp, Homo sapiens
agaaaaaacttaacc

SEQ ID NO: 1286185 - DNA, 15 bp, Homo sapiens
tagaaaaaacttaac

SEQ ID NO: 1286186 - DNA, 15 bp, Homo sapiens
atagaaaaaacttaa

SEQ ID NO: 1286187 - DNA, 15 bp, Homo sapiens
tatagaaaaaactta

SEQ ID NO: 1286188 - DNA, 15 bp, Homo sapiens
gtatagaaaaaactt

SEQ ID NO: 1286189 - DNA, 15 bp, Homo sapiens
agtatagaaaaaact

SEQ ID NO: 1286190 - DNA, 15 bp, Homo sapiens
aagtatagaaaaaac

SEQ ID NO: 1286191 - DNA, 15 bp, Homo sapiens
aaagtatagaaaaaa

SEQ ID NO: 1286192 - DNA, 15 bp, Homo sapiens
aaaagtatagaaaaa

SEQ ID NO: 1286193 - DNA, 15 bp, Homo sapiens
gaaaagtatagaaaa

SEQ ID NO: 1286194 - DNA, 15 bp, Homo sapiens
tgaaaagtatagaaa

SEQ ID NO: 1286195 - DNA, 15 bp, Homo sapiens
atgaaaagtatagaa

SEQ ID NO: 1286196 - DNA, 15 bp, Homo sapiens
gatgaaaagtataga

SEQ ID NO: 1286197 - DNA, 15 bp, Homo sapiens
tgatgaaaagtatag

SEQ ID NO: 1286198 - DNA, 15 bp, Homo sapiens
ttgatgaaaagtata

SEQ ID NO: 1286199 - DNA, 15 bp, Homo sapiens
tttgatgaaaagtat

SEQ ID NO: 1286200 - DNA, 15 bp, Homo sapiens
ttttgatgaaaagta

SEQ ID NO: 1286201 - DNA, 15 bp, Homo sapiens
gttttgatgaaaagt

SEQ ID NO: 1286202 - DNA, 15 bp, Homo sapiens
agttttgatgaaaag

SEQ ID NO: 1286203 - DNA, 15 bp, Homo sapiens
cagttttgatgaaaa

SEQ ID NO: 1286204 - DNA, 15 bp, Homo sapiens
acagttttgatgaaa

SEQ ID NO: 1286205 - DNA, 15 bp, Homo sapiens
tacagttttgatgaa

SEQ ID NO: 1286206 - DNA, 15 bp, Homo sapiens
gtacagttttgatga

SEQ ID NO: 1286207 - DNA, 15 bp, Homo sapiens
agtacagttttgatg

SEQ ID NO: 1286208 - DNA, 15 bp, Homo sapiens
aagtacagttttgat

SEQ ID NO: 1286209 - DNA, 15 bp, Homo sapiens
gaagtacagttttga

SEQ ID NO: 1286210 - DNA, 15 bp, Homo sapiens
ggaagtacagttttg

SEQ ID NO: 1286211 - DNA, 15 bp, Homo sapiens
gggaagtacagtttt

SEQ ID NO: 1286212 - DNA, 15 bp, Homo sapiens
agggaagtacagttt

SEQ ID NO: 1286213 - DNA, 15 bp, Homo sapiens
tagggaagtacagtt

SEQ ID NO: 1286214 - DNA, 15 bp, Homo sapiens
gtagggaagtacagt

SEQ ID NO: 1286215 - DNA, 15 bp, Homo sapiens
ggtagggaagtacag

SEQ ID NO: 1286216 - DNA, 15 bp, Homo sapiens
gggtagggaagtaca

SEQ ID NO: 1286217 - DNA, 15 bp, Homo sapiens
ggggtagggaagtac

SEQ ID NO: 1286218 - DNA, 15 bp, Homo sapiens
tggggtagggaagta

SEQ ID NO: 1286219 - DNA, 15 bp, Homo sapiens
ttggggtagggaagt

SEQ ID NO: 1286220 - DNA, 15 bp, Homo sapiens
tttggggtagggaag

SEQ ID NO: 1286221 - DNA, 15 bp, Homo sapiens
atttggggtagggaa

SEQ ID NO: 1286222 - DNA, 15 bp, Homo sapiens
catttggggtaggga

SEQ ID NO: 1286223 - DNA, 15 bp, Homo sapiens
acatttggggtaggg

SEQ ID NO: 1286224 - DNA, 15 bp, Homo sapiens
aacatttggggtagg

SEQ ID NO: 1286225 - DNA, 15 bp, Homo sapiens
aaacatttggggtag

SEQ ID NO: 1286226 - DNA, 15 bp, Homo sapiens
gaaacatttggggta

SEQ ID NO: 1286227 - DNA, 15 bp, Homo sapiens
tgaaacatttggggt

SEQ ID NO: 1286228 - DNA, 15 bp, Homo sapiens
ctgaaacatttgggg

SEQ ID NO: 1286229 - DNA, 15 bp, Homo sapiens
gctgaaacatttggg

SEQ ID NO: 1286230 - DNA, 15 bp, Homo sapiens
ggctgaaacatttgg

SEQ ID NO: 1286231 - DNA, 15 bp, Homo sapiens
gggctgaaacatttg

SEQ ID NO: 1286232 - DNA, 15 bp, Homo sapiens
agggctgaaacattt

SEQ ID NO: 1286233 - DNA, 15 bp, Homo sapiens
aagggctgaaacatt

SEQ ID NO: 1286234 - DNA, 15 bp, Homo sapiens
taagggctgaaacat

SEQ ID NO: 1286235 - DNA, 15 bp, Homo sapiens
ttaagggctgaaaca

SEQ ID NO: 1286236 - DNA, 15 bp, Homo sapiens
attaagggctgaaac

SEQ ID NO: 1286237 - DNA, 15 bp, Homo sapiens
aattaagggctgaaa

SEQ ID NO: 1286238 - DNA, 15 bp, Homo sapiens
aaattaagggctgaa

SEQ ID NO: 1286239 - DNA, 15 bp, Homo sapiens
caaattaagggctga

SEQ ID NO: 1286240 - DNA, 15 bp, Homo sapiens
ccaaattaagggctg

SEQ ID NO: 1286241 - DNA, 15 bp, Homo sapiens
gccaaattaagggct

SEQ ID NO: 1286242 - DNA, 15 bp, Homo sapiens
tgccaaattaagggc

SEQ ID NO: 1286243 - DNA, 15 bp, Homo sapiens
atgccaaattaaggg

SEQ ID NO: 1286244 - DNA, 15 bp, Homo sapiens
tatgccaaattaagg

SEQ ID NO: 1286245 - DNA, 15 bp, Homo sapiens
atatgccaaattaag

SEQ ID NO: 1286246 - DNA, 15 bp, Homo sapiens
catatgccaaattaa

SEQ ID NO: 1286247 - DNA, 15 bp, Homo sapiens
acatatgccaaatta

SEQ ID NO: 1286248 - DNA, 15 bp, Homo sapiens
gacatatgccaaatt

SEQ ID NO: 1286249 - DNA, 15 bp, Homo sapiens
agacatatgccaaat

SEQ ID NO: 1286250 - DNA, 15 bp, Homo sapiens
cagacatatgccaaa

SEQ ID NO: 1286251 - DNA, 15 bp, Homo sapiens
acagacatatgccaa

SEQ ID NO: 1286252 - DNA, 15 bp, Homo sapiens
aacagacatatgcca

SEQ ID NO: 1286253 - DNA, 15 bp, Homo sapiens
taacagacatatgcc

SEQ ID NO: 1286254 - DNA, 15 bp, Homo sapiens
ataacagacatatgc

SEQ ID NO: 1286255 - DNA, 15 bp, Homo sapiens
gataacagacatatg

SEQ ID NO: 1286256 - DNA, 15 bp, Homo sapiens
tgataacagacatat

SEQ ID NO: 1286257 - DNA, 15 bp, Homo sapiens
atgataacagacata

SEQ ID NO: 1286258 - DNA, 15 bp, Homo sapiens
catgataacagacat

SEQ ID NO: 1286259 - DNA, 15 bp, Homo sapiens
acatgataacagaca

SEQ ID NO: 1286260 - DNA, 15 bp, Homo sapiens
aacatgataacagac

SEQ ID NO: 1286261 - DNA, 15 bp, Homo sapiens
aaacatgataacaga

SEQ ID NO: 1286262 - DNA, 15 bp, Homo sapiens
caaacatgataacag

SEQ ID NO: 1286263 - DNA, 15 bp, Homo sapiens
acaaacatgataaca

SEQ ID NO: 1286264 - DNA, 15 bp, Homo sapiens
aacaaacatgataac

SEQ ID NO: 1286265 - DNA, 15 bp, Homo sapiens
aaacaaacatgataa

SEQ ID NO: 1286266 - DNA, 15 bp, Homo sapiens
aaaacaaacatgata

SEQ ID NO: 1286267 - DNA, 15 bp, Homo sapiens
caaaacaaacatgat

SEQ ID NO: 1286268 - DNA, 15 bp, Homo sapiens
tcaaaacaaacatga

SEQ ID NO: 1286269 - DNA, 15 bp, Homo sapiens
ctcaaaacaaacatg

SEQ ID NO: 1286270 - DNA, 15 bp, Homo sapiens
cctcaaaacaaacat

SEQ ID NO: 1286271 - DNA, 15 bp, Homo sapiens
gcctcaaaacaaaca

SEQ ID NO: 1286272 - DNA, 15 bp, Homo sapiens
agcctcaaaacaaac

SEQ ID NO: 1286273 - DNA, 15 bp, Homo sapiens
gagcctcaaaacaaa

SEQ ID NO: 1286274 - DNA, 15 bp, Homo sapiens
tgagcctcaaaacaa

SEQ ID NO: 1286275 - DNA, 15 bp, Homo sapiens
atgagcctcaaaaca

SEQ ID NO: 1286276 - DNA, 15 bp, Homo sapiens
aatgagcctcaaaac

SEQ ID NO: 1286277 - DNA, 15 bp, Homo sapiens
aaatgagcctcaaaa

SEQ ID NO: 1286278 - DNA, 15 bp, Homo sapiens
gaaatgagcctcaaa

SEQ ID NO: 1286279 - DNA, 15 bp, Homo sapiens
tgaaatgagcctcaa

SEQ ID NO: 1286280 - DNA, 15 bp, Homo sapiens
atgaaatgagcctca

SEQ ID NO: 1286281 - DNA, 15 bp, Homo sapiens
aatgaaatgagcctc

SEQ ID NO: 1286282 - DNA, 15 bp, Homo sapiens
aaatgaaatgagcct

SEQ ID NO: 1286283 - DNA, 15 bp, Homo sapiens
caaatgaaatgagcc

SEQ ID NO: 1286284 - DNA, 15 bp, Homo sapiens
gcaaatgaaatgagc

SEQ ID NO: 1286285 - DNA, 15 bp, Homo sapiens
cgcaaatgaaatgag

SEQ ID NO: 1286286 - DNA, 15 bp, Homo sapiens
ccgcaaatgaaatga

SEQ ID NO: 1286287 - DNA, 15 bp, Homo sapiens
accgcaaatgaaatg

SEQ ID NO: 1286288 - DNA, 15 bp, Homo sapiens
aaccgcaaatgaaat

SEQ ID NO: 1286289 - DNA, 15 bp, Homo sapiens
taaccgcaaatgaaa

SEQ ID NO: 1286290 - DNA, 15 bp, Homo sapiens
ttaaccgcaaatgaa

SEQ ID NO: 1286291 - DNA, 15 bp, Homo sapiens
cttaaccgcaaatga

SEQ ID NO: 1286292 - DNA, 15 bp, Homo sapiens
tcttaaccgcaaatg

SEQ ID NO: 1286293 - DNA, 15 bp, Homo sapiens
ctcttaaccgcaaat

SEQ ID NO: 1286294 - DNA, 15 bp, Homo sapiens
tctcttaaccgcaaa

SEQ ID NO: 1286295 - DNA, 15 bp, Homo sapiens
ttctcttaaccgcaa

SEQ ID NO: 1286296 - DNA, 15 bp, Homo sapiens
attctcttaaccgca

SEQ ID NO: 1286297 - DNA, 15 bp, Homo sapiens
tattctcttaaccgc

SEQ ID NO: 1286298 - DNA, 15 bp, Homo sapiens
atattctcttaaccg

SEQ ID NO: 1286299 - DNA, 15 bp, Homo sapiens
catattctcttaacc

SEQ ID NO: 1286300 - DNA, 15 bp, Homo sapiens
tcatattctcttaac

SEQ ID NO: 1286301 - DNA, 15 bp, Homo sapiens
ttcatattctcttaa

SEQ ID NO: 1286302 - DNA, 15 bp, Homo sapiens
tttcatattctctta

SEQ ID NO: 1286303 - DNA, 15 bp, Homo sapiens
ctttcatattctctt

SEQ ID NO: 1286304 - DNA, 15 bp, Homo sapiens
actttcatattctct

SEQ ID NO: 1286305 - DNA, 15 bp, Homo sapiens
aactttcatattctc

SEQ ID NO: 1286306 - DNA, 15 bp, Homo sapiens
taactttcatattct

SEQ ID NO: 1286307 - DNA, 15 bp, Homo sapiens
gtaactttcatattc

SEQ ID NO: 1286308 - DNA, 15 bp, Homo sapiens
tgtaactttcatatt

SEQ ID NO: 1286309 - DNA, 15 bp, Homo sapiens
ctgtaactttcatat

SEQ ID NO: 1286310 - DNA, 15 bp, Homo sapiens
actgtaactttcata

SEQ ID NO: 1286311 - DNA, 15 bp, Homo sapiens
cactgtaactttcat

SEQ ID NO: 1286312 - DNA, 15 bp, Homo sapiens
acactgtaactttca

SEQ ID NO: 1286313 - DNA, 15 bp, Homo sapiens
aacactgtaactttc

SEQ ID NO: 1286314 - DNA, 15 bp, Homo sapiens
taacactgtaacttt

SEQ ID NO: 1286315 - DNA, 15 bp, Homo sapiens
ctaacactgtaactt

SEQ ID NO: 1286316 - DNA, 15 bp, Homo sapiens
gctaacactgtaact

SEQ ID NO: 1286317 - DNA, 15 bp, Homo sapiens
agctaacactgtaac

SEQ ID NO: 1286318 - DNA, 15 bp, Homo sapiens
tagctaacactgtaa

SEQ ID NO: 1286319 - DNA, 15 bp, Homo sapiens
ttagctaacactgta

SEQ ID NO: 1286320 - DNA, 15 bp, Homo sapiens
tttagctaacactgt

SEQ ID NO: 1286321 - DNA, 15 bp, Homo sapiens
atttagctaacactg

SEQ ID NO: 1286322 - DNA, 15 bp, Homo sapiens
tatttagctaacact

SEQ ID NO: 1286323 - DNA, 15 bp, Homo sapiens
ttatttagctaacac

SEQ ID NO: 1286324 - DNA, 15 bp, Homo sapiens
cttatttagctaaca

SEQ ID NO: 1286325 - DNA, 15 bp, Homo sapiens
gcttatttagctaac

SEQ ID NO: 1286326 - DNA, 15 bp, Homo sapiens
tgcttatttagctaa

SEQ ID NO: 1286327 - DNA, 15 bp, Homo sapiens
ttgcttatttagcta

SEQ ID NO: 1286328 - DNA, 15 bp, Homo sapiens
attgcttatttagct

SEQ ID NO: 1286329 - DNA, 15 bp, Homo sapiens
aattgcttatttagc

SEQ ID NO: 1286330 - DNA, 15 bp, Homo sapiens
caattgcttatttag

SEQ ID NO: 1286331 - DNA, 15 bp, Homo sapiens
acaattgcttattta

SEQ ID NO: 1286332 - DNA, 15 bp, Homo sapiens
cacaattgcttattt

SEQ ID NO: 1286333 - DNA, 15 bp, Homo sapiens
acacaattgcttatt

SEQ ID NO: 1286334 - DNA, 15 bp, Homo sapiens
tacacaattgcttat

SEQ ID NO: 1286335 - DNA, 15 bp, Homo sapiens
ttacacaattgctta

SEQ ID NO: 1286336 - DNA, 15 bp, Homo sapiens
attacacaattgctt

SEQ ID NO: 1286337 - DNA, 15 bp, Homo sapiens
tattacacaattgct

SEQ ID NO: 1286338 - DNA, 15 bp, Homo sapiens
ctattacacaattgc

SEQ ID NO: 1286339 - DNA, 15 bp, Homo sapiens
gctattacacaattg

SEQ ID NO: 1286340 - DNA, 15 bp, Homo sapiens
tgctattacacaatt

SEQ ID NO: 1286341 - DNA, 15 bp, Homo sapiens
atgctattacacaat

SEQ ID NO: 1286342 - DNA, 15 bp, Homo sapiens
catgctattacacaa

SEQ ID NO: 1286343 - DNA, 15 bp, Homo sapiens
ccatgctattacaca

SEQ ID NO: 1286344 - DNA, 15 bp, Homo sapiens
accatgctattacac

SEQ ID NO: 1286345 - DNA, 15 bp, Homo sapiens
taccatgctattaca

SEQ ID NO: 1286346 - DNA, 15 bp, Homo sapiens
ttaccatgctattac

SEQ ID NO: 1286347 - DNA, 15 bp, Homo sapiens
tttaccatgctatta

SEQ ID NO: 1286348 - DNA, 15 bp, Homo sapiens
ctttaccatgctatt

SEQ ID NO: 1286349 - DNA, 15 bp, Homo sapiens
cctttaccatgctat

SEQ ID NO: 1286350 - DNA, 15 bp, Homo sapiens
ccctttaccatgcta

SEQ ID NO: 1286351 - DNA, 15 bp, Homo sapiens
tccctttaccatgct

SEQ ID NO: 1286352 - DNA, 15 bp, Homo sapiens
ctccctttaccatgc

SEQ ID NO: 1286353 - DNA, 15 bp, Homo sapiens
tctccctttaccatg

SEQ ID NO: 1286354 - DNA, 15 bp, Homo sapiens
ttctccctttaccat

SEQ ID NO: 1286355 - DNA, 15 bp, Homo sapiens
cttctccctttacca

SEQ ID NO: 1286356 - DNA, 15 bp, Homo sapiens
ccttctccctttacc

SEQ ID NO: 1286357 - DNA, 15 bp, Homo sapiens
cccttctccctttac

SEQ ID NO: 1286358 - DNA, 15 bp, Homo sapiens
acccttctcccttta

SEQ ID NO: 1286359 - DNA, 15 bp, Homo sapiens
tacccttctcccttt

SEQ ID NO: 1286360 - DNA, 15 bp, Homo sapiens
ttacccttctccctt

SEQ ID NO: 1286361 - DNA, 15 bp, Homo sapiens
tttacccttctccct

SEQ ID NO: 1286362 - DNA, 15 bp, Homo sapiens
ttttacccttctccc

SEQ ID NO: 1286363 - DNA, 15 bp, Homo sapiens
cttttacccttctcc

SEQ ID NO: 1286364 - DNA, 15 bp, Homo sapiens
tcttttacccttctc

SEQ ID NO: 1286365 - DNA, 15 bp, Homo sapiens
ctcttttacccttct

SEQ ID NO: 1286366 - DNA, 15 bp, Homo sapiens
cctcttttacccttc

SEQ ID NO: 1286367 - DNA, 15 bp, Homo sapiens
gcctcttttaccctt

SEQ ID NO: 1286368 - DNA, 15 bp, Homo sapiens
tgcctcttttaccct

SEQ ID NO: 1286369 - DNA, 15 bp, Homo sapiens
atgcctcttttaccc

SEQ ID NO: 1286370 - DNA, 15 bp, Homo sapiens
catgcctcttttacc

SEQ ID NO: 1286371 - DNA, 15 bp, Homo sapiens
ccatgcctcttttac

SEQ ID NO: 1286372 - DNA, 15 bp, Homo sapiens
gccatgcctctttta

SEQ ID NO: 1286373 - DNA, 15 bp, Homo sapiens
ggccatgcctctttt

SEQ ID NO: 1286374 - DNA, 15 bp, Homo sapiens
gggccatgcctcttt

SEQ ID NO: 1286375 - DNA, 15 bp, Homo sapiens
agggccatgcctctt

SEQ ID NO: 1286376 - DNA, 15 bp, Homo sapiens
tagggccatgcctct

SEQ ID NO: 1286377 - DNA, 15 bp, Homo sapiens
atagggccatgcctc

SEQ ID NO: 1286378 - DNA, 15 bp, Homo sapiens
aatagggccatgcct

SEQ ID NO: 1286379 - DNA, 15 bp, Homo sapiens
gaatagggccatgcc

SEQ ID NO: 1286380 - DNA, 15 bp, Homo sapiens
agaatagggccatgc

SEQ ID NO: 1286381 - DNA, 15 bp, Homo sapiens
cagaatagggccatg

SEQ ID NO: 1286382 - DNA, 15 bp, Homo sapiens
ccagaatagggccat

SEQ ID NO: 1286383 - DNA, 15 bp, Homo sapiens
tccagaatagggcca

SEQ ID NO: 1286384 - DNA, 15 bp, Homo sapiens
ctccagaatagggcc

SEQ ID NO: 1286385 - DNA, 15 bp, Homo sapiens
tctccagaatagggc

SEQ ID NO: 1286386 - DNA, 15 bp, Homo sapiens
ctctccagaataggg

SEQ ID NO: 1286387 - DNA, 15 bp, Homo sapiens
tctctccagaatagg

SEQ ID NO: 1286388 - DNA, 15 bp, Homo sapiens
ttctctccagaatag

SEQ ID NO: 1286389 - DNA, 15 bp, Homo sapiens
attctctccagaata

SEQ ID NO: 1286390 - DNA, 15 bp, Homo sapiens
cattctctccagaat

SEQ ID NO: 1286391 - DNA, 15 bp, Homo sapiens
tcattctctccagaa

SEQ ID NO: 1286392 - DNA, 15 bp, Homo sapiens
ctcattctctccaga

SEQ ID NO: 1286393 - DNA, 15 bp, Homo sapiens
cctcattctctccag

SEQ ID NO: 1286394 - DNA, 15 bp, Homo sapiens
tcctcattctctcca

SEQ ID NO: 1286395 - DNA, 15 bp, Homo sapiens
atcctcattctctcc

SEQ ID NO: 1286396 - DNA, 15 bp, Homo sapiens
catcctcattctctc

SEQ ID NO: 1286397 - DNA, 15 bp, Homo sapiens
ccatcctcattctct

SEQ ID NO: 1286398 - DNA, 15 bp, Homo sapiens
tccatcctcattctc

SEQ ID NO: 1286399 - DNA, 15 bp, Homo sapiens
ctccatcctcattct

SEQ ID NO: 1286400 - DNA, 15 bp, Homo sapiens
tctccatcctcattc

SEQ ID NO: 1286401 - DNA, 15 bp, Homo sapiens
atctccatcctcatt

SEQ ID NO: 1286402 - DNA, 15 bp, Homo sapiens
tatctccatcctcat

SEQ ID NO: 1286403 - DNA, 15 bp, Homo sapiens
ctatctccatcctca

SEQ ID NO: 1286404 - DNA, 15 bp, Homo sapiens
tctatctccatcctc

SEQ ID NO: 1286405 - DNA, 15 bp, Homo sapiens
ctctatctccatcct

SEQ ID NO: 1286406 - DNA, 15 bp, Homo sapiens
cctctatctccatcc

SEQ ID NO: 1286407 - DNA, 15 bp, Homo sapiens
acctctatctccatc

SEQ ID NO: 1286408 - DNA, 15 bp, Homo sapiens
cacctctatctccat

SEQ ID NO: 1286409 - DNA, 15 bp, Homo sapiens
ccacctctatctcca

SEQ ID NO: 1286410 - DNA, 15 bp, Homo sapiens
tccacctctatctcc

SEQ ID NO: 1286411 - DNA, 15 bp, Homo sapiens
ttccacctctatctc

SEQ ID NO: 1286412 - DNA, 15 bp, Homo sapiens
tttccacctctatct

SEQ ID NO: 1286413 - DNA, 15 bp, Homo sapiens
ctttccacctctatc

SEQ ID NO: 1286414 - DNA, 15 bp, Homo sapiens
tctttccacctctat

SEQ ID NO: 1286415 - DNA, 15 bp, Homo sapiens
ttctttccacctcta

SEQ ID NO: 1286416 - DNA, 15 bp, Homo sapiens
cttctttccacctct

SEQ ID NO: 1286417 - DNA, 15 bp, Homo sapiens
gcttctttccacctc

SEQ ID NO: 1286418 - DNA, 15 bp, Homo sapiens
tgcttctttccacct

SEQ ID NO: 1286419 - DNA, 15 bp, Homo sapiens
atgcttctttccacc

SEQ ID NO: 1286420 - DNA, 15 bp, Homo sapiens
gatgcttctttccac

SEQ ID NO: 1286421 - DNA, 15 bp, Homo sapiens
agatgcttctttcca

SEQ ID NO: 1286422 - DNA, 15 bp, Homo sapiens
gagatgcttctttcc

SEQ ID NO: 1286423 - DNA, 15 bp, Homo sapiens
ggagatgcttctttc

SEQ ID NO: 1286424 - DNA, 15 bp, Homo sapiens
aggagatgcttcttt

SEQ ID NO: 1286425 - DNA, 15 bp, Homo sapiens
aaggagatgcttctt

SEQ ID NO: 1286426 - DNA, 15 bp, Homo sapiens
taaggagatgcttct

SEQ ID NO: 1286427 - DNA, 15 bp, Homo sapiens
ctaaggagatgcttc

SEQ ID NO: 1286428 - DNA, 15 bp, Homo sapiens
cctaaggagatgctt

SEQ ID NO: 1286429 - DNA, 15 bp, Homo sapiens
tcctaaggagatgct

SEQ ID NO: 1286430 - DNA, 15 bp, Homo sapiens
ctcctaaggagatgc

SEQ ID NO: 1286431 - DNA, 15 bp, Homo sapiens
cctcctaaggagatg

SEQ ID NO: 1286432 - DNA, 15 bp, Homo sapiens
tcctcctaaggagat

SEQ ID NO: 1286433 - DNA, 15 bp, Homo sapiens
atcctcctaaggaga

SEQ ID NO: 1286434 - DNA, 15 bp, Homo sapiens
catcctcctaaggag

SEQ ID NO: 1286435 - DNA, 15 bp, Homo sapiens
ccatcctcctaagga

SEQ ID NO: 1286436 - DNA, 15 bp, Homo sapiens
gccatcctcctaagg

SEQ ID NO: 1286437 - DNA, 15 bp, Homo sapiens
agccatcctcctaag

SEQ ID NO: 1286438 - DNA, 15 bp, Homo sapiens
gagccatcctcctaa

SEQ ID NO: 1286439 - DNA, 15 bp, Homo sapiens
agagccatcctccta

SEQ ID NO: 1286440 - DNA, 15 bp, Homo sapiens
tagagccatcctcct

SEQ ID NO: 1286441 - DNA, 15 bp, Homo sapiens
atagagccatcctcc

SEQ ID NO: 1286442 - DNA, 15 bp, Homo sapiens
aatagagccatcctc

SEQ ID NO: 1286443 - DNA, 15 bp, Homo sapiens
aaatagagccatcct

SEQ ID NO: 1286444 - DNA, 15 bp, Homo sapiens
aaaatagagccatcc

SEQ ID NO: 1286445 - DNA, 15 bp, Homo sapiens
gaaaatagagccatc

SEQ ID NO: 1286446 - DNA, 15 bp, Homo sapiens
agaaaatagagccat

SEQ ID NO: 1286447 - DNA, 15 bp, Homo sapiens
gagaaaatagagcca

SEQ ID NO: 1286448 - DNA, 15 bp, Homo sapiens
ggagaaaatagagcc

SEQ ID NO: 1286449 - DNA, 15 bp, Homo sapiens
gggagaaaatagagc

SEQ ID NO: 1286450 - DNA, 15 bp, Homo sapiens
ggggagaaaatagag

SEQ ID NO: 1286451 - DNA, 15 bp, Homo sapiens
gggggagaaaataga

SEQ ID NO: 1286452 - DNA, 15 bp, Homo sapiens
agggggagaaaatag

SEQ ID NO: 1286453 - DNA, 15 bp, Homo sapiens
aagggggagaaaata

SEQ ID NO: 1286454 - DNA, 15 bp, Homo sapiens
aaagggggagaaaat

SEQ ID NO: 1286455 - DNA, 15 bp, Homo sapiens
aaaagggggagaaaa

SEQ ID NO: 1286456 - DNA, 15 bp, Homo sapiens
aaaaagggggagaaa

SEQ ID NO: 1286457 - DNA, 15 bp, Homo sapiens
gaaaaagggggagaa

SEQ ID NO: 1286458 - DNA, 15 bp, Homo sapiens
agaaaaagggggaga

SEQ ID NO: 1286459 - DNA, 15 bp, Homo sapiens
aagaaaaagggggag

SEQ ID NO: 1286460 - DNA, 15 bp, Homo sapiens
aaagaaaaaggggga

SEQ ID NO: 1286461 - DNA, 15 bp, Homo sapiens
aaaagaaaaaggggg

SEQ ID NO: 1286462 - DNA, 15 bp, Homo sapiens
aaaaagaaaaagggg

SEQ ID NO: 1286463 - DNA, 15 bp, Homo sapiens
aaaaaagaaaaaggg

SEQ ID NO: 1286464 - DNA, 15 bp, Homo sapiens
caaaaaagaaaaagg

SEQ ID NO: 1286465 - DNA, 15 bp, Homo sapiens
tcaaaaaagaaaaag

SEQ ID NO: 1286466 - DNA, 15 bp, Homo sapiens
ggtcaaaaaagaaaa

SEQ ID NO: 1286467 - DNA, 15 bp, Homo sapiens
tggtcaaaaaagaaa

SEQ ID NO: 1286468 - DNA, 15 bp, Homo sapiens
gtggtcaaaaaagaa

SEQ ID NO: 1286469 - DNA, 15 bp, Homo sapiens
agtggtcaaaaaaga

SEQ ID NO: 1286470 - DNA, 15 bp, Homo sapiens
tagtggtcaaaaaag

SEQ ID NO: 1286471 - DNA, 15 bp, Homo sapiens
ttagtggtcaaaaaa

SEQ ID NO: 1286472 - DNA, 15 bp, Homo sapiens
tttagtggtcaaaaa

SEQ ID NO: 1286473 - DNA, 15 bp, Homo sapiens
ttttagtggtcaaaa

SEQ ID NO: 1286474 - DNA, 15 bp, Homo sapiens
gttttagtggtcaaa

SEQ ID NO: 1286475 - DNA, 15 bp, Homo sapiens
agttttagtggtcaa

SEQ ID NO: 1286476 - DNA, 15 bp, Homo sapiens
aagttttagtggtca

SEQ ID NO: 1286477 - DNA, 15 bp, Homo sapiens
gaagttttagtggtc

SEQ ID NO: 1286478 - DNA, 15 bp, Homo sapiens
tgaagttttagtggt

SEQ ID NO: 1286479 - DNA, 15 bp, Homo sapiens
gtgaagttttagtgg

SEQ ID NO: 1286480 - DNA, 15 bp, Homo sapiens
tgtgaagttttagtg

SEQ ID NO: 1286481 - DNA, 15 bp, Homo sapiens
ttgtgaagttttagt

SEQ ID NO: 1286482 - DNA, 15 bp, Homo sapiens
gttgtgaagttttag

SEQ ID NO: 1286483 - DNA, 15 bp, Homo sapiens
agttgtgaagtttta

SEQ ID NO: 1286484 - DNA, 15 bp, Homo sapiens
cagttgtgaagtttt

SEQ ID NO: 1286485 - DNA, 15 bp, Homo sapiens
acagttgtgaagttt

SEQ ID NO: 1286486 - DNA, 15 bp, Homo sapiens
cacagttgtgaagtt

SEQ ID NO: 1286487 - DNA, 15 bp, Homo sapiens
ccacagttgtgaagt

SEQ ID NO: 1286488 - DNA, 15 bp, Homo sapiens
accacagttgtgaag

SEQ ID NO: 1286489 - DNA, 15 bp, Homo sapiens
caccacagttgtgaa

SEQ ID NO: 1286490 - DNA, 15 bp, Homo sapiens
ccaccacagttgtga

SEQ ID NO: 1286491 - DNA, 15 bp, Homo sapiens
tccaccacagttgtg

SEQ ID NO: 1286492 - DNA, 15 bp, Homo sapiens
ctccaccacagttgt

SEQ ID NO: 1286493 - DNA, 15 bp, Homo sapiens
cctccaccacagttg

SEQ ID NO: 1286494 - DNA, 15 bp, Homo sapiens
tcctccaccacagtt

SEQ ID NO: 1286495 - DNA, 15 bp, Homo sapiens
atcctccaccacagt

SEQ ID NO: 1286496 - DNA, 15 bp, Homo sapiens
catcctccaccacag

SEQ ID NO: 1286497 - DNA, 15 bp, Homo sapiens
tcatcctccaccaca

SEQ ID NO: 1286498 - DNA, 15 bp, Homo sapiens
ctcatcctccaccac

SEQ ID NO: 1286499 - DNA, 15 bp, Homo sapiens
tctcatcctccacca

SEQ ID NO: 1286500 - DNA, 15 bp, Homo sapiens
ttctcatcctccacc

SEQ ID NO: 1286501 - DNA, 15 bp, Homo sapiens
tttctcatcctccac

SEQ ID NO: 1286502 - DNA, 15 bp, Homo sapiens
ttttctcatcctcca

SEQ ID NO: 1286503 - DNA, 15 bp, Homo sapiens
tttttctcatcctcc

SEQ ID NO: 1286504 - DNA, 15 bp, Homo sapiens
atttttctcatcctc

SEQ ID NO: 1286505 - DNA, 15 bp, Homo sapiens
aatttttctcatcct

SEQ ID NO: 1286506 - DNA, 15 bp, Homo sapiens
taatttttctcatcc

SEQ ID NO: 1286507 - DNA, 15 bp, Homo sapiens
ctaatttttctcatc

SEQ ID NO: 1286508 - DNA, 15 bp, Homo sapiens
tctaatttttctcat

SEQ ID NO: 1286509 - DNA, 15 bp, Homo sapiens
ctctaatttttctca

SEQ ID NO: 1286510 - DNA, 15 bp, Homo sapiens
tctctaatttttctc

SEQ ID NO: 1286511 - DNA, 15 bp, Homo sapiens
ttctctaatttttct

SEQ ID NO: 1286512 - DNA, 15 bp, Homo sapiens
tttctctaatttttc

SEQ ID NO: 1286513 - DNA, 15 bp, Homo sapiens
ttttctctaattttt

SEQ ID NO: 1286514 - DNA, 15 bp, Homo sapiens
tttttctctaatttt

SEQ ID NO: 1286515 - DNA, 15 bp, Homo sapiens
ttttttctctaattt

SEQ ID NO: 1286516 - DNA, 15 bp, Homo sapiens
gttttttctctaatt

SEQ ID NO: 1286517 - DNA, 15 bp, Homo sapiens
agttttttctctaat

SEQ ID NO: 1286518 - DNA, 15 bp, Homo sapiens
gagttttttctctaa

SEQ ID NO: 1286519 - DNA, 15 bp, Homo sapiens
tgagttttttctcta

SEQ ID NO: 1286520 - DNA, 15 bp, Homo sapiens
ttgagttttttctct

SEQ ID NO: 1286521 - DNA, 15 bp, Homo sapiens
tttgagttttttctc

SEQ ID NO: 1286522 - DNA, 15 bp, Homo sapiens
ctttgagttttttct

SEQ ID NO: 1286523 - DNA, 15 bp, Homo sapiens
cctttgagttttttc

SEQ ID NO: 1286524 - DNA, 15 bp, Homo sapiens
gcctttgagtttttt

SEQ ID NO: 1286525 - DNA, 15 bp, Homo sapiens
ggcctttgagttttt

SEQ ID NO: 1286526 - DNA, 15 bp, Homo sapiens
aggcctttgagtttt

SEQ ID NO: 1286527 - DNA, 15 bp, Homo sapiens
taggcctttgagttt

SEQ ID NO: 1286528 - DNA, 15 bp, Homo sapiens
ctaggcctttgagtt

SEQ ID NO: 1286529 - DNA, 15 bp, Homo sapiens
cctaggcctttgagt

SEQ ID NO: 1286530 - DNA, 15 bp, Homo sapiens
ccctaggcctttgag

SEQ ID NO: 1286531 - DNA, 15 bp, Homo sapiens
gccctaggcctttga

SEQ ID NO: 1286532 - DNA, 15 bp, Homo sapiens
agccctaggcctttg

SEQ ID NO: 1286533 - DNA, 15 bp, Homo sapiens
aagccctaggccttt

SEQ ID NO: 1286534 - DNA, 15 bp, Homo sapiens
aaagccctaggcctt

SEQ ID NO: 1286535 - DNA, 15 bp, Homo sapiens
aaaagccctaggcct

SEQ ID NO: 1286536 - DNA, 15 bp, Homo sapiens
caaaagccctaggcc

SEQ ID NO: 1286537 - DNA, 15 bp, Homo sapiens
tcaaaagccctaggc

SEQ ID NO: 1286538 - DNA, 15 bp, Homo sapiens
ttcaaaagccctagg

SEQ ID NO: 1286539 - DNA, 15 bp, Homo sapiens
cttcaaaagccctag

SEQ ID NO: 1286540 - DNA, 15 bp, Homo sapiens
ccttcaaaagcccta

SEQ ID NO: 1286541 - DNA, 15 bp, Homo sapiens
tccttcaaaagccct

SEQ ID NO: 1286542 - DNA, 15 bp, Homo sapiens
gtccttcaaaagccc

SEQ ID NO: 1286543 - DNA, 15 bp, Homo sapiens
agtccttcaaaagcc

SEQ ID NO: 1286544 - DNA, 15 bp, Homo sapiens
cagtccttcaaaagc

SEQ ID NO: 1286545 - DNA, 15 bp, Homo sapiens
acagtccttcaaaag

SEQ ID NO: 1286546 - DNA, 15 bp, Homo sapiens
gacagtccttcaaaa

SEQ ID NO: 1286547 - DNA, 15 bp, Homo sapiens
agacagtccttcaaa

SEQ ID NO: 1286548 - DNA, 15 bp, Homo sapiens
aagacagtccttcaa

SEQ ID NO: 1286549 - DNA, 15 bp, Homo sapiens
aaagacagtccttca

SEQ ID NO: 1286550 - DNA, 15 bp, Homo sapiens
gaaaagacagtcctt

SEQ ID NO: 1286551 - DNA, 15 bp, Homo sapiens
agaaaagacagtcct

SEQ ID NO: 1286552 - DNA, 15 bp, Homo sapiens
aagaaaagacagtcc

SEQ ID NO: 1286553 - DNA, 15 bp, Homo sapiens
caagaaaagacagtc

SEQ ID NO: 1286554 - DNA, 15 bp, Homo sapiens
gcaagaaaagacagt

SEQ ID NO: 1286555 - DNA, 15 bp, Homo sapiens
ggcaagaaaagacag

SEQ ID NO: 1286556 - DNA, 15 bp, Homo sapiens
gggcaagaaaagaca

SEQ ID NO: 1286557 - DNA, 15 bp, Homo sapiens
ggggcaagaaaagac

SEQ ID NO: 1286558 - DNA, 15 bp, Homo sapiens
aggggcaagaaaaga

SEQ ID NO: 1286559 - DNA, 15 bp, Homo sapiens
caggggcaagaaaag

SEQ ID NO: 1286560 - DNA, 15 bp, Homo sapiens
ccaggggcaagaaaa

SEQ ID NO: 1286561 - DNA, 15 bp, Homo sapiens
accaggggcaagaaa

SEQ ID NO: 1286562 - DNA, 15 bp, Homo sapiens
aaccaggggcaagaa

SEQ ID NO: 1286563 - DNA, 15 bp, Homo sapiens
aaaccaggggcaaga

SEQ ID NO: 1286564 - DNA, 15 bp, Homo sapiens
aaaaccaggggcaag

SEQ ID NO: 1286565 - DNA, 15 bp, Homo sapiens
taaaaccaggggcaa

SEQ ID NO: 1286566 - DNA, 15 bp, Homo sapiens
ttaaaaccaggggca

SEQ ID NO: 1286567 - DNA, 15 bp, Homo sapiens
attaaaaccaggggc

SEQ ID NO: 1286568 - DNA, 15 bp, Homo sapiens
aattaaaaccagggg

SEQ ID NO: 1286569 - DNA, 15 bp, Homo sapiens
caattaaaaccaggg

SEQ ID NO: 1286570 - DNA, 15 bp, Homo sapiens
acaattaaaaccagg

SEQ ID NO: 1286571 - DNA, 15 bp, Homo sapiens
tacaattaaaaccag

SEQ ID NO: 1286572 - DNA, 15 bp, Homo sapiens
ttacaattaaaacca

SEQ ID NO: 1286573 - DNA, 15 bp, Homo sapiens
attacaattaaaacc

SEQ ID NO: 1286574 - DNA, 15 bp, Homo sapiens
tattacaattaaaac

SEQ ID NO: 1286575 - DNA, 15 bp, Homo sapiens
atattacaattaaaa

SEQ ID NO: 1286576 - DNA, 15 bp, Homo sapiens
catattacaattaaa

SEQ ID NO: 1286577 - DNA, 15 bp, Homo sapiens
ccatattacaattaa

SEQ ID NO: 1286578 - DNA, 15 bp, Homo sapiens
ctaccatattacaat

SEQ ID NO: 1286579 - DNA, 15 bp, Homo sapiens
gctaccatattacaa

SEQ ID NO: 1286580 - DNA, 15 bp, Homo sapiens
tgctaccatattaca

SEQ ID NO: 1286581 - DNA, 15 bp, Homo sapiens
atgctaccatattac

SEQ ID NO: 1286582 - DNA, 15 bp, Homo sapiens
aatgctaccatatta

SEQ ID NO: 1286583 - DNA, 15 bp, Homo sapiens
caatgctaccatatt

SEQ ID NO: 1286584 - DNA, 15 bp, Homo sapiens
ccaatgctaccatat

SEQ ID NO: 1286585 - DNA, 15 bp, Homo sapiens
gccaatgctaccata

SEQ ID NO: 1286586 - DNA, 15 bp, Homo sapiens
ggccaatgctaccat

SEQ ID NO: 1286587 - DNA, 15 bp, Homo sapiens
tggccaatgctacca

SEQ ID NO: 1286588 - DNA, 15 bp, Homo sapiens
atggccaatgctacc

SEQ ID NO: 1286589 - DNA, 15 bp, Homo sapiens
gatggccaatgctac

SEQ ID NO: 1286590 - DNA, 15 bp, Homo sapiens
agatggccaatgcta

SEQ ID NO: 1286591 - DNA, 15 bp, Homo sapiens
aagatggccaatgct

SEQ ID NO: 1286592 - DNA, 15 bp, Homo sapiens
aaagatggccaatgc

SEQ ID NO: 1286593 - DNA, 15 bp, Homo sapiens
aaaagatggccaatg

SEQ ID NO: 1286594 - DNA, 15 bp, Homo sapiens
aaaaagatggccaat

SEQ ID NO: 1286595 - DNA, 15 bp, Homo sapiens
aaaaaagatggccaa

SEQ ID NO: 1286596 - DNA, 15 bp, Homo sapiens
aaaaaaagatggcca

SEQ ID NO: 1286597 - DNA, 15 bp, Homo sapiens
aaaaaaaagatggcc

SEQ ID NO: 1286598 - DNA, 15 bp, Homo sapiens
aaaaaaaaagatggc

SEQ ID NO: 1286599 - DNA, 15 bp, Homo sapiens
aaaaaaaaaagatgg

SEQ ID NO: 1286600 - DNA, 15 bp, Homo sapiens
gaccaaaaaaaaaaa

SEQ ID NO: 1286601 - DNA, 15 bp, Homo sapiens
agaccaaaaaaaaaa

SEQ ID NO: 1286602 - DNA, 15 bp, Homo sapiens
aagaccaaaaaaaaa

SEQ ID NO: 1286603 - DNA, 15 bp, Homo sapiens
aaagaccaaaaaaaa

SEQ ID NO: 1286604 - DNA, 15 bp, Homo sapiens
aaaagaccaaaaaaa

SEQ ID NO: 1286605 - DNA, 15 bp, Homo sapiens
agaaaagaccaaaaa

SEQ ID NO: 1286606 - DNA, 15 bp, Homo sapiens
aagaaaagaccaaaa

SEQ ID NO: 1286607 - DNA, 15 bp, Homo sapiens
caagaaaagaccaaa

SEQ ID NO: 1286608 - DNA, 15 bp, Homo sapiens
tcaagaaaagaccaa

SEQ ID NO: 1286609 - DNA, 15 bp, Homo sapiens
atcaagaaaagacca

SEQ ID NO: 1286610 - DNA, 15 bp, Homo sapiens
catcaagaaaagacc

SEQ ID NO: 1286611 - DNA, 15 bp, Homo sapiens
tcatcaagaaaagac

SEQ ID NO: 1286612 - DNA, 15 bp, Homo sapiens
ctcatcaagaaaaga

SEQ ID NO: 1286613 - DNA, 15 bp, Homo sapiens
tctcatcaagaaaag

SEQ ID NO: 1286614 - DNA, 15 bp, Homo sapiens
ttctcatcaagaaaa

SEQ ID NO: 1286615 - DNA, 15 bp, Homo sapiens
attctcatcaagaaa

SEQ ID NO: 1286616 - DNA, 15 bp, Homo sapiens
tattctcatcaagaa

SEQ ID NO: 1286617 - DNA, 15 bp, Homo sapiens
ctattctcatcaaga

SEQ ID NO: 1286618 - DNA, 15 bp, Homo sapiens
tctattctcatcaag

SEQ ID NO: 1286619 - DNA, 15 bp, Homo sapiens
ttctattctcatcaa

SEQ ID NO: 1286620 - DNA, 15 bp, Homo sapiens
cttctattctcatca

SEQ ID NO: 1286621 - DNA, 15 bp, Homo sapiens
gcttctattctcatc

SEQ ID NO: 1286622 - DNA, 15 bp, Homo sapiens
agcttctattctcat

SEQ ID NO: 1286623 - DNA, 15 bp, Homo sapiens
aagcttctattctca

SEQ ID NO: 1286624 - DNA, 15 bp, Homo sapiens
aaagcttctattctc

SEQ ID NO: 1286625 - DNA, 15 bp, Homo sapiens
aaaagcttctattct

SEQ ID NO: 1286626 - DNA, 15 bp, Homo sapiens
aaaaagcttctattc

SEQ ID NO: 1286627 - DNA, 15 bp, Homo sapiens
caaaaagcttctatt

SEQ ID NO: 1286628 - DNA, 15 bp, Homo sapiens
gcaaaaagcttctat

SEQ ID NO: 1286629 - DNA, 15 bp, Homo sapiens
tgcaaaaagcttcta

SEQ ID NO: 1286630 - DNA, 15 bp, Homo sapiens
gtgcaaaaagcttct

SEQ ID NO: 1286631 - DNA, 15 bp, Homo sapiens
tgtgcaaaaagcttc

SEQ ID NO: 1286632 - DNA, 15 bp, Homo sapiens
ttgtgcaaaaagctt

SEQ ID NO: 1286633 - DNA, 15 bp, Homo sapiens
cttgtgcaaaaagct

SEQ ID NO: 1286634 - DNA, 15 bp, Homo sapiens
tcttgtgcaaaaagc

SEQ ID NO: 1286635 - DNA, 15 bp, Homo sapiens
ttcttgtgcaaaaag

SEQ ID NO: 1286636 - DNA, 15 bp, Homo sapiens
tttcttgtgcaaaaa

SEQ ID NO: 1286637 - DNA, 15 bp, Homo sapiens
ttttcttgtgcaaaa

SEQ ID NO: 1286638 - DNA, 15 bp, Homo sapiens
tttttcttgtgcaaa

SEQ ID NO: 1286639 - DNA, 15 bp, Homo sapiens
ctttttcttgtgcaa

SEQ ID NO: 1286640 - DNA, 15 bp, Homo sapiens
cctttttcttgtgca

SEQ ID NO: 1286641 - DNA, 15 bp, Homo sapiens
ccctttttcttgtgc

SEQ ID NO: 1286642 - DNA, 15 bp, Homo sapiens
tccctttttcttgtg

SEQ ID NO: 1286643 - DNA, 15 bp, Homo sapiens
ttccctttttcttgt

SEQ ID NO: 1286644 - DNA, 15 bp, Homo sapiens
tttccctttttcttg

SEQ ID NO: 1286645 - DNA, 15 bp, Homo sapiens
atttccctttttctt

SEQ ID NO: 1286646 - DNA, 15 bp, Homo sapiens
aatttccctttttct

SEQ ID NO: 1286647 - DNA, 15 bp, Homo sapiens
aaatttccctttttc

SEQ ID NO: 1286648 - DNA, 15 bp, Homo sapiens
aaaatttcccttttt

SEQ ID NO: 1286649 - DNA, 15 bp, Homo sapiens
aaaaatttccctttt

SEQ ID NO: 1286650 - DNA, 15 bp, Homo sapiens
taaaaatttcccttt

SEQ ID NO: 1286651 - DNA, 15 bp, Homo sapiens
ttaaaaatttccctt

SEQ ID NO: 1286652 - DNA, 15 bp, Homo sapiens
attaaaaatttccct

SEQ ID NO: 1286653 - DNA, 15 bp, Homo sapiens
aattaaaaatttccc

SEQ ID NO: 1286654 - DNA, 15 bp, Homo sapiens
taattaaaaatttcc

SEQ ID NO: 1286655 - DNA, 15 bp, Homo sapiens
ataattaaaaatttc

SEQ ID NO: 1286656 - DNA, 15 bp, Homo sapiens
aataattaaaaattt

SEQ ID NO: 1286657 - DNA, 15 bp, Homo sapiens
taataattaaaaatt

SEQ ID NO: 1286658 - DNA, 15 bp, Homo sapiens
ttaataattaaaaat

SEQ ID NO: 1286659 - DNA, 15 bp, Homo sapiens
attaataattaaaaa

SEQ ID NO: 1286660 - DNA, 15 bp, Homo sapiens
cattaataattaaaa

SEQ ID NO: 1286661 - DNA, 15 bp, Homo sapiens
ccattaataattaaa

SEQ ID NO: 1286662 - DNA, 15 bp, Homo sapiens
tccattaataattaa

SEQ ID NO: 1286663 - DNA, 15 bp, Homo sapiens
ctccattaataatta

SEQ ID NO: 1286664 - DNA, 15 bp, Homo sapiens
tctccattaataatt

SEQ ID NO: 1286665 - DNA, 15 bp, Homo sapiens
atctccattaataat

SEQ ID NO: 1286666 - DNA, 15 bp, Homo sapiens
tatctccattaataa

SEQ ID NO: 1286667 - DNA, 15 bp, Homo sapiens
ttatctccattaata

SEQ ID NO: 1286668 - DNA, 15 bp, Homo sapiens
tttatctccattaat

SEQ ID NO: 1286669 - DNA, 15 bp, Homo sapiens
atttatctccattaa

SEQ ID NO: 1286670 - DNA, 15 bp, Homo sapiens
aatttatctccatta

SEQ ID NO: 1286671 - DNA, 15 bp, Homo sapiens
taatttatctccatt

SEQ ID NO: 1286672 - DNA, 15 bp, Homo sapiens
ataatttatctccat

SEQ ID NO: 1286673 - DNA, 15 bp, Homo sapiens
gataatttatctcca

SEQ ID NO: 1286674 - DNA, 15 bp, Homo sapiens
agataatttatctcc

SEQ ID NO: 1286675 - DNA, 15 bp, Homo sapiens
tagataatttatctc

SEQ ID NO: 1286676 - DNA, 15 bp, Homo sapiens
ttagataatttatct

SEQ ID NO: 1286677 - DNA, 15 bp, Homo sapiens
tttagataatttatc

SEQ ID NO: 1286678 - DNA, 15 bp, Homo sapiens
atttagataatttat

SEQ ID NO: 1286679 - DNA, 15 bp, Homo sapiens
tatttagataattta

SEQ ID NO: 1286680 - DNA, 15 bp, Homo sapiens
ttatttagataattt

SEQ ID NO: 1286681 - DNA, 15 bp, Homo sapiens
attatttagataatt

SEQ ID NO: 1286682 - DNA, 15 bp, Homo sapiens
aattatttagataat

SEQ ID NO: 1286683 - DNA, 15 bp, Homo sapiens
aaattatttagataa

SEQ ID NO: 1286684 - DNA, 15 bp, Homo sapiens
caaattatttagata

SEQ ID NO: 1286685 - DNA, 15 bp, Homo sapiens
gcaaattatttagat

SEQ ID NO: 1286686 - DNA, 15 bp, Homo sapiens
tgcaaattatttaga

SEQ ID NO: 1286687 - DNA, 15 bp, Homo sapiens
atgcaaattatttag

SEQ ID NO: 1286688 - DNA, 15 bp, Homo sapiens
tatgcaaattattta

SEQ ID NO: 1286689 - DNA, 15 bp, Homo sapiens
ttatgcaaattattt

SEQ ID NO: 1286690 - DNA, 15 bp, Homo sapiens
gttatgcaaattatt

SEQ ID NO: 1286691 - DNA, 15 bp, Homo sapiens
tgttatgcaaattat

SEQ ID NO: 1286692 - DNA, 15 bp, Homo sapiens
ttgttatgcaaatta

SEQ ID NO: 1286693 - DNA, 15 bp, Homo sapiens
tttgttatgcaaatt

SEQ ID NO: 1286694 - DNA, 15 bp, Homo sapiens
gtttgttatgcaaat

SEQ ID NO: 1286695 - DNA, 15 bp, Homo sapiens
tgtttgttatgcaaa

SEQ ID NO: 1286696 - DNA, 15 bp, Homo sapiens
atgtttgttatgcaa

SEQ ID NO: 1286697 - DNA, 15 bp, Homo sapiens
catgtttgttatgca

SEQ ID NO: 1286698 - DNA, 15 bp, Homo sapiens
tcatgtttgttatgc

SEQ ID NO: 1286699 - DNA, 15 bp, Homo sapiens
ttcatgtttgttatg

SEQ ID NO: 1286700 - DNA, 15 bp, Homo sapiens
gttcatgtttgttat

SEQ ID NO: 1286701 - DNA, 15 bp, Homo sapiens
agttcatgtttgtta

SEQ ID NO: 1286702 - DNA, 15 bp, Homo sapiens
tagttcatgtttgtt

SEQ ID NO: 1286703 - DNA, 15 bp, Homo sapiens
ttagttcatgtttgt

SEQ ID NO: 1286704 - DNA, 15 bp, Homo sapiens
attagttcatgtttg

SEQ ID NO: 1286705 - DNA, 15 bp, Homo sapiens
aattagttcatgttt

SEQ ID NO: 1286706 - DNA, 15 bp, Homo sapiens
taattagttcatgtt

SEQ ID NO: 1286707 - DNA, 15 bp, Homo sapiens
ataattagttcatgt

SEQ ID NO: 1286708 - DNA, 15 bp, Homo sapiens
tataattagttcatg

SEQ ID NO: 1286709 - DNA, 15 bp, Homo sapiens
ctataattagttcat

SEQ ID NO: 1286710 - DNA, 15 bp, Homo sapiens
tctataattagttca

SEQ ID NO: 1286711 - DNA, 15 bp, Homo sapiens
ttctataattagttc

SEQ ID NO: 1286712 - DNA, 15 bp, Homo sapiens
attctataattagtt

SEQ ID NO: 1286713 - DNA, 15 bp, Homo sapiens
tattctataattagt

SEQ ID NO: 1286714 - DNA, 15 bp, Homo sapiens
gtattctataattag

SEQ ID NO: 1286715 - DNA, 15 bp, Homo sapiens
agtattctataatta

SEQ ID NO: 1286716 - DNA, 15 bp, Homo sapiens
aagtattctataatt

SEQ ID NO: 1286717 - DNA, 15 bp, Homo sapiens
caagtattctataat

SEQ ID NO: 1286718 - DNA, 15 bp, Homo sapiens
ccaagtattctataa

SEQ ID NO: 1286719 - DNA, 15 bp, Homo sapiens
tccaagtattctata

SEQ ID NO: 1286720 - DNA, 15 bp, Homo sapiens
ttccaagtattctat

SEQ ID NO: 1286721 - DNA, 15 bp, Homo sapiens
tttccaagtattcta

SEQ ID NO: 1286722 - DNA, 15 bp, Homo sapiens
ttttccaagtattct

SEQ ID NO: 1286723 - DNA, 15 bp, Homo sapiens
gttttccaagtattc

SEQ ID NO: 1286724 - DNA, 15 bp, Homo sapiens
tgttttccaagtatt

SEQ ID NO: 1286725 - DNA, 15 bp, Homo sapiens
gtgttttccaagtat

SEQ ID NO: 1286726 - DNA, 15 bp, Homo sapiens
tgtgttttccaagta

SEQ ID NO: 1286727 - DNA, 15 bp, Homo sapiens
ctgtgttttccaagt

SEQ ID NO: 1286728 - DNA, 15 bp, Homo sapiens
tctgtgttttccaag

SEQ ID NO: 1286729 - DNA, 15 bp, Homo sapiens
ttctgtgttttccaa

SEQ ID NO: 1286730 - DNA, 15 bp, Homo sapiens
tttctgtgttttcca

SEQ ID NO: 1286731 - DNA, 15 bp, Homo sapiens
ctttctgtgttttcc

SEQ ID NO: 1286732 - DNA, 15 bp, Homo sapiens
cctttctgtgttttc

SEQ ID NO: 1286733 - DNA, 15 bp, Homo sapiens
gcctttctgtgtttt

SEQ ID NO: 1286734 - DNA, 15 bp, Homo sapiens
tgcctttctgtgttt

SEQ ID NO: 1286735 - DNA, 15 bp, Homo sapiens
atgcctttctgtgtt

SEQ ID NO: 1286736 - DNA, 15 bp, Homo sapiens
tatgcctttctgtgt

SEQ ID NO: 1286737 - DNA, 15 bp, Homo sapiens
ttatgcctttctgtg

SEQ ID NO: 1286738 - DNA, 15 bp, Homo sapiens
tttatgcctttctgt

SEQ ID NO: 1286739 - DNA, 15 bp, Homo sapiens
atttatgcctttctg

SEQ ID NO: 1286740 - DNA, 15 bp, Homo sapiens
tatttatgcctttct

SEQ ID NO: 1286741 - DNA, 15 bp, Homo sapiens
ttatttatgcctttc

SEQ ID NO: 1286742 - DNA, 15 bp, Homo sapiens
tttatttatgccttt

SEQ ID NO: 1286743 - DNA, 15 bp, Homo sapiens
ttttatttatgcctt

SEQ ID NO: 1286744 - DNA, 15 bp, Homo sapiens
attttatttatgcct

SEQ ID NO: 1286745 - DNA, 15 bp, Homo sapiens
tattttatttatgcc

SEQ ID NO: 1286746 - DNA, 15 bp, Homo sapiens
atattttatttatgc

SEQ ID NO: 1286747 - DNA, 15 bp, Homo sapiens
catattttatttatg

SEQ ID NO: 1286748 - DNA, 15 bp, Homo sapiens
tcatattttatttat

SEQ ID NO: 1286749 - DNA, 15 bp, Homo sapiens
ttcatattttattta

SEQ ID NO: 1286750 - DNA, 15 bp, Homo sapiens
attcatattttattt

SEQ ID NO: 1286751 - DNA, 15 bp, Homo sapiens
gattcatattttatt

SEQ ID NO: 1286752 - DNA, 15 bp, Homo sapiens
cgattcatattttat

SEQ ID NO: 1286753 - DNA, 15 bp, Homo sapiens
tcgattcatatttta

SEQ ID NO: 1286754 - DNA, 15 bp, Homo sapiens
gtcgattcatatttt

SEQ ID NO: 1286755 - DNA, 15 bp, Homo sapiens
ggtcgattcatattt

SEQ ID NO: 1286756 - DNA, 15 bp, Homo sapiens
tggtcgattcatatt

SEQ ID NO: 1286757 - DNA, 15 bp, Homo sapiens
ttggtcgattcatat

SEQ ID NO: 1286758 - DNA, 15 bp, Homo sapiens
tttggtcgattcata

SEQ ID NO: 1286759 - DNA, 15 bp, Homo sapiens
ttttggtcgattcat

SEQ ID NO: 1286760 - DNA, 15 bp, Homo sapiens
attttggtcgattca

SEQ ID NO: 1286761 - DNA, 15 bp, Homo sapiens
cattttggtcgattc

SEQ ID NO: 1286762 - DNA, 15 bp, Homo sapiens
acattttggtcgatt

SEQ ID NO: 1286763 - DNA, 15 bp, Homo sapiens
gacattttggtcgat

SEQ ID NO: 1286764 - DNA, 15 bp, Homo sapiens
tgacattttggtcga

SEQ ID NO: 1286765 - DNA, 15 bp, Homo sapiens
ttgacattttggtcg

SEQ ID NO: 1286766 - DNA, 15 bp, Homo sapiens
gttgacattttggtc

SEQ ID NO: 1286767 - DNA, 15 bp, Homo sapiens
tgttgacattttggt

SEQ ID NO: 1286768 - DNA, 15 bp, Homo sapiens
ctgttgacattttgg

SEQ ID NO: 1286769 - DNA, 15 bp, Homo sapiens
actgttgacattttg

SEQ ID NO: 1286770 - DNA, 15 bp, Homo sapiens
cactgttgacatttt

SEQ ID NO: 1286771 - DNA, 15 bp, Homo sapiens
ccactgttgacattt

SEQ ID NO: 1286772 - DNA, 15 bp, Homo sapiens
tccactgttgacatt

SEQ ID NO: 1286773 - DNA, 15 bp, Homo sapiens
ctccactgttgacat

SEQ ID NO: 1286774 - DNA, 15 bp, Homo sapiens
tctccactgttgaca

SEQ ID NO: 1286775 - DNA, 15 bp, Homo sapiens
ctctccactgttgac

SEQ ID NO: 1286776 - DNA, 15 bp, Homo sapiens
tctctccactgttga

SEQ ID NO: 1286777 - DNA, 15 bp, Homo sapiens
ttctctccactgttg

SEQ ID NO: 1286778 - DNA, 15 bp, Homo sapiens
attctctccactgtt

SEQ ID NO: 1286779 - DNA, 15 bp, Homo sapiens
gattctctccactgt

SEQ ID NO: 1286780 - DNA, 15 bp, Homo sapiens
tgattctctccactg

SEQ ID NO: 1286781 - DNA, 15 bp, Homo sapiens
gtgattctctccact

SEQ ID NO: 1286782 - DNA, 15 bp, Homo sapiens
agtgattctctccac

SEQ ID NO: 1286783 - DNA, 15 bp, Homo sapiens
aagtgattctctcca

SEQ ID NO: 1286784 - DNA, 15 bp, Homo sapiens
aaagtgattctctcc

SEQ ID NO: 1286785 - DNA, 15 bp, Homo sapiens
aaaagtgattctctc

SEQ ID NO: 1286786 - DNA, 15 bp, Homo sapiens
gaaaagtgattctct

SEQ ID NO: 1286787 - DNA, 15 bp, Homo sapiens
tgaaaagtgattctc

SEQ ID NO: 1286788 - DNA, 15 bp, Homo sapiens
atgaaaagtgattct

SEQ ID NO: 1286789 - DNA, 15 bp, Homo sapiens
tatgaaaagtgattc

SEQ ID NO: 1286790 - DNA, 15 bp, Homo sapiens
atatgaaaagtgatt

SEQ ID NO: 1286791 - DNA, 15 bp, Homo sapiens
aatatgaaaagtgat

SEQ ID NO: 1286792 - DNA, 15 bp, Homo sapiens
aaatatgaaaagtga

SEQ ID NO: 1286793 - DNA, 15 bp, Homo sapiens
aaaatatgaaaagtg

SEQ ID NO: 1286794 - DNA, 15 bp, Homo sapiens
taaaatatgaaaagt

SEQ ID NO: 1286795 - DNA, 15 bp, Homo sapiens
ctaaaatatgaaaag

SEQ ID NO: 1286796 - DNA, 15 bp, Homo sapiens
tctaaaatatgaaaa

SEQ ID NO: 1286797 - DNA, 15 bp, Homo sapiens
ttctaaaatatgaaa

SEQ ID NO: 1286798 - DNA, 15 bp, Homo sapiens
attctaaaatatgaa

SEQ ID NO: 1286799 - DNA, 15 bp, Homo sapiens
cattctaaaatatga

SEQ ID NO: 1286800 - DNA, 15 bp, Homo sapiens
acattctaaaatatg

SEQ ID NO: 1286801 - DNA, 15 bp, Homo sapiens
aacattctaaaatat

SEQ ID NO: 1286802 - DNA, 15 bp, Homo sapiens
aaacattctaaaata

SEQ ID NO: 1286803 - DNA, 15 bp, Homo sapiens
gaaacattctaaaat

SEQ ID NO: 1286804 - DNA, 15 bp, Homo sapiens
agaaacattctaaaa

SEQ ID NO: 1286805 - DNA, 15 bp, Homo sapiens
aagaaacattctaaa

SEQ ID NO: 1286806 - DNA, 15 bp, Homo sapiens
aaagaaacattctaa

SEQ ID NO: 1286807 - DNA, 15 bp, Homo sapiens
gaaagaaacattcta

SEQ ID NO: 1286808 - DNA, 15 bp, Homo sapiens
ggaaagaaacattct

SEQ ID NO: 1286809 - DNA, 15 bp, Homo sapiens
aggaaagaaacattc

SEQ ID NO: 1286810 - DNA, 15 bp, Homo sapiens
aaggaaagaaacatt

SEQ ID NO: 1286811 - DNA, 15 bp, Homo sapiens
aaaggaaagaaacat

SEQ ID NO: 1286812 - DNA, 15 bp, Homo sapiens
caaaggaaagaaaca

SEQ ID NO: 1286813 - DNA, 15 bp, Homo sapiens
ccaaaggaaagaaac

SEQ ID NO: 1286814 - DNA, 15 bp, Homo sapiens
cccaaaggaaagaaa

SEQ ID NO: 1286815 - DNA, 15 bp, Homo sapiens
acccaaaggaaagaa

SEQ ID NO: 1286816 - DNA, 15 bp, Homo sapiens
tacccaaaggaaaga

SEQ ID NO: 1286817 - DNA, 15 bp, Homo sapiens
atacccaaaggaaag

SEQ ID NO: 1286818 - DNA, 15 bp, Homo sapiens
aatacccaaaggaaa

SEQ ID NO: 1286819 - DNA, 15 bp, Homo sapiens
caatacccaaaggaa

SEQ ID NO: 1286820 - DNA, 15 bp, Homo sapiens
acaatacccaaagga

SEQ ID NO: 1286821 - DNA, 15 bp, Homo sapiens
aacaatacccaaagg

SEQ ID NO: 1286822 - DNA, 15 bp, Homo sapiens
aaacaatacccaaag

SEQ ID NO: 1286823 - DNA, 15 bp, Homo sapiens
gaaacaatacccaaa

SEQ ID NO: 1286824 - DNA, 15 bp, Homo sapiens
tgaaacaatacccaa

SEQ ID NO: 1286825 - DNA, 15 bp, Homo sapiens
gtgaaacaataccca

SEQ ID NO: 1286826 - DNA, 15 bp, Homo sapiens
tgtgaaacaataccc

SEQ ID NO: 1286827 - DNA, 15 bp, Homo sapiens
atgtgaaacaatacc

SEQ ID NO: 1286828 - DNA, 15 bp, Homo sapiens
aatgtgaaacaatac

SEQ ID NO: 1286829 - DNA, 15 bp, Homo sapiens
caatgtgaaacaata

SEQ ID NO: 1286830 - DNA, 15 bp, Homo sapiens
tcaatgtgaaacaat

SEQ ID NO: 1286831 - DNA, 15 bp, Homo sapiens
ctcaatgtgaaacaa

SEQ ID NO: 1286832 - DNA, 15 bp, Homo sapiens
actcaatgtgaaaca

SEQ ID NO: 1286833 - DNA, 15 bp, Homo sapiens
tactcaatgtgaaac

SEQ ID NO: 1286834 - DNA, 15 bp, Homo sapiens
ctactcaatgtgaaa

SEQ ID NO: 1286835 - DNA, 15 bp, Homo sapiens
tctactcaatgtgaa

SEQ ID NO: 1286836 - DNA, 15 bp, Homo sapiens
ttctactcaatgtga

SEQ ID NO: 1286837 - DNA, 15 bp, Homo sapiens
attctactcaatgtg

SEQ ID NO: 1286838 - DNA, 15 bp, Homo sapiens
tattctactcaatgt

SEQ ID NO: 1286839 - DNA, 15 bp, Homo sapiens
atattctactcaatg

SEQ ID NO: 1286840 - DNA, 15 bp, Homo sapiens
aatattctactcaat

SEQ ID NO: 1286841 - DNA, 15 bp, Homo sapiens
taatattctactcaa

SEQ ID NO: 1286842 - DNA, 15 bp, Homo sapiens
ataatattctactca

SEQ ID NO: 1286843 - DNA, 15 bp, Homo sapiens
tataatattctactc

SEQ ID NO: 1286844 - DNA, 15 bp, Homo sapiens
atataatattctact

SEQ ID NO: 1286845 - DNA, 15 bp, Homo sapiens
tatataatattctac

SEQ ID NO: 1286846 - DNA, 15 bp, Homo sapiens
atatataatattcta

SEQ ID NO: 1286847 - DNA, 15 bp, Homo sapiens
tatatataatattct

SEQ ID NO: 1286848 - DNA, 15 bp, Homo sapiens
atatatataatattc

SEQ ID NO: 1286849 - DNA, 15 bp, Homo sapiens
catatatataatatt

SEQ ID NO: 1286850 - DNA, 15 bp, Homo sapiens
acatatatataatat

SEQ ID NO: 1286851 - DNA, 15 bp, Homo sapiens
cacatatatataata

SEQ ID NO: 1286852 - DNA, 15 bp, Homo sapiens
acacatatatataat

SEQ ID NO: 1286853 - DNA, 15 bp, Homo sapiens
cacacatatatataa

SEQ ID NO: 1286854 - DNA, 15 bp, Homo sapiens
gccacacacacacac

SEQ ID NO: 1286855 - DNA, 15 bp, Homo sapiens
agccacacacacaca

SEQ ID NO: 1286856 - DNA, 15 bp, Homo sapiens
aagccacacacacac

SEQ ID NO: 1286857 - DNA, 15 bp, Homo sapiens
aaagccacacacaca

SEQ ID NO: 1286858 - DNA, 15 bp, Homo sapiens
aaaagccacacacac

SEQ ID NO: 1286859 - DNA, 15 bp, Homo sapiens
taaaagccacacaca

SEQ ID NO: 1286860 - DNA, 15 bp, Homo sapiens
ttaaaagccacacac

SEQ ID NO: 1286861 - DNA, 15 bp, Homo sapiens
tttaaaagccacaca

SEQ ID NO: 1286862 - DNA, 15 bp, Homo sapiens
ttttaaaagccacac

SEQ ID NO: 1286863 - DNA, 15 bp, Homo sapiens
attttaaaagccaca

SEQ ID NO: 1286864 - DNA, 15 bp, Homo sapiens
aattttaaaagccac

SEQ ID NO: 1286865 - DNA, 15 bp, Homo sapiens
aaattttaaaagcca

SEQ ID NO: 1286866 - DNA, 15 bp, Homo sapiens
taaattttaaaagcc

SEQ ID NO: 1286867 - DNA, 15 bp, Homo sapiens
gtaaattttaaaagc

SEQ ID NO: 1286868 - DNA, 15 bp, Homo sapiens
ggtaaattttaaaag

SEQ ID NO: 1286869 - DNA, 15 bp, Homo sapiens
aggtaaattttaaaa

SEQ ID NO: 1286870 - DNA, 15 bp, Homo sapiens
taggtaaattttaaa

SEQ ID NO: 1286871 - DNA, 15 bp, Homo sapiens
ttaggtaaattttaa

SEQ ID NO: 1286872 - DNA, 15 bp, Homo sapiens
attaggtaaatttta

SEQ ID NO: 1286873 - DNA, 15 bp, Homo sapiens
aattaggtaaatttt

SEQ ID NO: 1286874 - DNA, 15 bp, Homo sapiens
caattaggtaaattt

SEQ ID NO: 1286875 - DNA, 15 bp, Homo sapiens
acaattaggtaaatt

SEQ ID NO: 1286876 - DNA, 15 bp, Homo sapiens
cacaattaggtaaat

SEQ ID NO: 1286877 - DNA, 15 bp, Homo sapiens
tcacaattaggtaaa

SEQ ID NO: 1286878 - DNA, 15 bp, Homo sapiens
gtcacaattaggtaa

SEQ ID NO: 1286879 - DNA, 15 bp, Homo sapiens
agtcacaattaggta

SEQ ID NO: 1286880 - DNA, 15 bp, Homo sapiens
aagtcacaattaggt

SEQ ID NO: 1286881 - DNA, 15 bp, Homo sapiens
aaagtcacaattagg

SEQ ID NO: 1286882 - DNA, 15 bp, Homo sapiens
gaaagtcacaattag

SEQ ID NO: 1286883 - DNA, 15 bp, Homo sapiens
agaaagtcacaatta

SEQ ID NO: 1286884 - DNA, 15 bp, Homo sapiens
tagaaagtcacaatt

SEQ ID NO: 1286885 - DNA, 15 bp, Homo sapiens
ttagaaagtcacaat

SEQ ID NO: 1286886 - DNA, 15 bp, Homo sapiens
tttagaaagtcacaa

SEQ ID NO: 1286887 - DNA, 15 bp, Homo sapiens
atttagaaagtcaca

SEQ ID NO: 1286888 - DNA, 15 bp, Homo sapiens
aatttagaaagtcac

SEQ ID NO: 1286889 - DNA, 15 bp, Homo sapiens
aaatttagaaagtca

SEQ ID NO: 1286890 - DNA, 15 bp, Homo sapiens
aaaatttagaaagtc

SEQ ID NO: 1286891 - DNA, 15 bp, Homo sapiens
aaaaatttagaaagt

SEQ ID NO: 1286892 - DNA, 15 bp, Homo sapiens
aaaaaatttagaaag

SEQ ID NO: 1286893 - DNA, 15 bp, Homo sapiens
aaaaaaatttagaaa

SEQ ID NO: 1286894 - DNA, 15 bp, Homo sapiens
gaaaaaaatttagaa

SEQ ID NO: 1286895 - DNA, 15 bp, Homo sapiens
agaaaaaaatttaga

SEQ ID NO: 1286896 - DNA, 15 bp, Homo sapiens
tagaaaaaaatttag

SEQ ID NO: 1286897 - DNA, 15 bp, Homo sapiens
atagaaaaaaattta

SEQ ID NO: 1286898 - DNA, 15 bp, Homo sapiens
aatagaaaaaaattt

SEQ ID NO: 1286899 - DNA, 15 bp, Homo sapiens
gaatagaaaaaaatt

SEQ ID NO: 1286900 - DNA, 15 bp, Homo sapiens
agaatagaaaaaaat

SEQ ID NO: 1286901 - DNA, 15 bp, Homo sapiens
aagaatagaaaaaaa

SEQ ID NO: 1286902 - DNA, 15 bp, Homo sapiens
taaagaatagaaaaa

SEQ ID NO: 1286903 - DNA, 15 bp, Homo sapiens
ttaaagaatagaaaa

SEQ ID NO: 1286904 - DNA, 15 bp, Homo sapiens
tttaaagaatagaaa

SEQ ID NO: 1286905 - DNA, 15 bp, Homo sapiens
gtttaaagaatagaa

SEQ ID NO: 1286906 - DNA, 15 bp, Homo sapiens
agtttaaagaataga

SEQ ID NO: 1286907 - DNA, 15 bp, Homo sapiens
aagtttaaagaatag

SEQ ID NO: 1286908 - DNA, 15 bp, Homo sapiens
caagtttaaagaata

SEQ ID NO: 1286909 - DNA, 15 bp, Homo sapiens
acaagtttaaagaat

SEQ ID NO: 1286910 - DNA, 15 bp, Homo sapiens
aacaagtttaaagaa

SEQ ID NO: 1286911 - DNA, 15 bp, Homo sapiens
aaacaagtttaaaga

SEQ ID NO: 1286912 - DNA, 15 bp, Homo sapiens
taaacaagtttaaag

SEQ ID NO: 1286913 - DNA, 15 bp, Homo sapiens
gtaaacaagtttaaa

SEQ ID NO: 1286914 - DNA, 15 bp, Homo sapiens
tgtaaacaagtttaa

SEQ ID NO: 1286915 - DNA, 15 bp, Homo sapiens
ttgtaaacaagttta

SEQ ID NO: 1286916 - DNA, 15 bp, Homo sapiens
gttgtaaacaagttt

SEQ ID NO: 1286917 - DNA, 15 bp, Homo sapiens
ggttgtaaacaagtt

SEQ ID NO: 1286918 - DNA, 15 bp, Homo sapiens
aggttgtaaacaagt

SEQ ID NO: 1286919 - DNA, 15 bp, Homo sapiens
aaggttgtaaacaag

SEQ ID NO: 1286920 - DNA, 15 bp, Homo sapiens
aaaggttgtaaacaa

SEQ ID NO: 1286921 - DNA, 15 bp, Homo sapiens
aaaaggttgtaaaca

SEQ ID NO: 1286922 - DNA, 15 bp, Homo sapiens
aaaaaggttgtaaac

SEQ ID NO: 1286923 - DNA, 15 bp, Homo sapiens
taaaaaggttgtaaa

SEQ ID NO: 1286924 - DNA, 15 bp, Homo sapiens
ttaaaaaggttgtaa

SEQ ID NO: 1286925 - DNA, 15 bp, Homo sapiens
attaaaaaggttgta

SEQ ID NO: 1286926 - DNA, 15 bp, Homo sapiens
aattaaaaaggttgt

SEQ ID NO: 1286927 - DNA, 15 bp, Homo sapiens
gaattaaaaaggttg

SEQ ID NO: 1286928 - DNA, 15 bp, Homo sapiens
tgaattaaaaaggtt

SEQ ID NO: 1286929 - DNA, 15 bp, Homo sapiens
atgaattaaaaaggt

SEQ ID NO: 1286930 - DNA, 15 bp, Homo sapiens
tatgaattaaaaagg

SEQ ID NO: 1286931 - DNA, 15 bp, Homo sapiens
atatgaattaaaaag

SEQ ID NO: 1286932 - DNA, 15 bp, Homo sapiens
gatatgaattaaaaa

SEQ ID NO: 1286933 - DNA, 15 bp, Homo sapiens
agatatgaattaaaa

SEQ ID NO: 1286934 - DNA, 15 bp, Homo sapiens
cagatatgaattaaa

SEQ ID NO: 1286935 - DNA, 15 bp, Homo sapiens
ccagatatgaattaa

SEQ ID NO: 1286936 - DNA, 15 bp, Homo sapiens
accagatatgaatta

SEQ ID NO: 1286937 - DNA, 15 bp, Homo sapiens
taccagatatgaatt

SEQ ID NO: 1286938 - DNA, 15 bp, Homo sapiens
ctaccagatatgaat

SEQ ID NO: 1286939 - DNA, 15 bp, Homo sapiens
gctaccagatatgaa

SEQ ID NO: 1286940 - DNA, 15 bp, Homo sapiens
agctaccagatatga

SEQ ID NO: 1286941 - DNA, 15 bp, Homo sapiens
aagctaccagatatg

SEQ ID NO: 1286942 - DNA, 15 bp, Homo sapiens
taagctaccagatat

SEQ ID NO: 1286943 - DNA, 15 bp, Homo sapiens
ataagctaccagata

SEQ ID NO: 1286944 - DNA, 15 bp, Homo sapiens
aataagctaccagat

SEQ ID NO: 1286945 - DNA, 15 bp, Homo sapiens
aaataagctaccaga

SEQ ID NO: 1286946 - DNA, 15 bp, Homo sapiens
aaaataagctaccag

SEQ ID NO: 1286947 - DNA, 15 bp, Homo sapiens
taaaataagctacca

SEQ ID NO: 1286948 - DNA, 15 bp, Homo sapiens
ttaaaataagctacc

SEQ ID NO: 1286949 - DNA, 15 bp, Homo sapiens
attaaaataagctac

SEQ ID NO: 1286950 - DNA, 15 bp, Homo sapiens
tattaaaataagcta

SEQ ID NO: 1286951 - DNA, 15 bp, Homo sapiens
atattaaaataagct

SEQ ID NO: 1286952 - DNA, 15 bp, Homo sapiens
catattaaaataagc

SEQ ID NO: 1286953 - DNA, 15 bp, Homo sapiens
tcatattaaaataag

SEQ ID NO: 1286954 - DNA, 15 bp, Homo sapiens
atcatattaaaataa

SEQ ID NO: 1286955 - DNA, 15 bp, Homo sapiens
gatcatattaaaata

SEQ ID NO: 1286956 - DNA, 15 bp, Homo sapiens
ggatcatattaaaat

SEQ ID NO: 1286957 - DNA, 15 bp, Homo sapiens
aggatcatattaaaa

SEQ ID NO: 1286958 - DNA, 15 bp, Homo sapiens
taggatcatattaaa

SEQ ID NO: 1286959 - DNA, 15 bp, Homo sapiens
ttaggatcatattaa

SEQ ID NO: 1286960 - DNA, 15 bp, Homo sapiens
tttaggatcatatta

SEQ ID NO: 1286961 - DNA, 15 bp, Homo sapiens
atttaggatcatatt

SEQ ID NO: 1286962 - DNA, 15 bp, Homo sapiens
tatttaggatcatat

SEQ ID NO: 1286963 - DNA, 15 bp, Homo sapiens
gtatttaggatcata

SEQ ID NO: 1286964 - DNA, 15 bp, Homo sapiens
tgtatttaggatcat

SEQ ID NO: 1286965 - DNA, 15 bp, Homo sapiens
ttgtatttaggatca

SEQ ID NO: 1286966 - DNA, 15 bp, Homo sapiens
attgtatttaggatc

SEQ ID NO: 1286967 - DNA, 15 bp, Homo sapiens
cattgtatttaggat

SEQ ID NO: 1286968 - DNA, 15 bp, Homo sapiens
acattgtatttagga

SEQ ID NO: 1286969 - DNA, 15 bp, Homo sapiens
aacattgtatttagg

SEQ ID NO: 1286970 - DNA, 15 bp, Homo sapiens
caacattgtatttag

SEQ ID NO: 1286971 - DNA, 15 bp, Homo sapiens
gcaacattgtattta

SEQ ID NO: 1286972 - DNA, 15 bp, Homo sapiens
agcaacattgtattt

SEQ ID NO: 1286973 - DNA, 15 bp, Homo sapiens
aagcaacattgtatt

SEQ ID NO: 1286974 - DNA, 15 bp, Homo sapiens
aaagcaacattgtat

SEQ ID NO: 1286975 - DNA, 15 bp, Homo sapiens
taaagcaacattgta

SEQ ID NO: 1286976 - DNA, 15 bp, Homo sapiens
ctaaagcaacattgt

SEQ ID NO: 1286977 - DNA, 15 bp, Homo sapiens
tctaaagcaacattg

SEQ ID NO: 1286978 - DNA, 15 bp, Homo sapiens
ctctaaagcaacatt

SEQ ID NO: 1286979 - DNA, 15 bp, Homo sapiens
actctaaagcaacat

SEQ ID NO: 1286980 - DNA, 15 bp, Homo sapiens
aactctaaagcaaca

SEQ ID NO: 1286981 - DNA, 15 bp, Homo sapiens
aaactctaaagcaac

SEQ ID NO: 1286982 - DNA, 15 bp, Homo sapiens
aaaactctaaagcaa

SEQ ID NO: 1286983 - DNA, 15 bp, Homo sapiens
aaaaactctaaagca

SEQ ID NO: 1286984 - DNA, 15 bp, Homo sapiens
aaaaaactctaaagc

SEQ ID NO: 1286985 - DNA, 15 bp, Homo sapiens
aaaaaaactctaaag

SEQ ID NO: 1286986 - DNA, 15 bp, Homo sapiens
caaaaaaactctaaa

SEQ ID NO: 1286987 - DNA, 15 bp, Homo sapiens
ccaaaaaaactctaa

SEQ ID NO: 1286988 - DNA, 15 bp, Homo sapiens
accaaaaaaactcta

SEQ ID NO: 1286989 - DNA, 15 bp, Homo sapiens
taccaaaaaaactct

SEQ ID NO: 1286990 - DNA, 15 bp, Homo sapiens
gtaccaaaaaaactc

SEQ ID NO: 1286991 - DNA, 15 bp, Homo sapiens
tgtaccaaaaaaact

SEQ ID NO: 1286992 - DNA, 15 bp, Homo sapiens
ttgtaccaaaaaaac

SEQ ID NO: 1286993 - DNA, 15 bp, Homo sapiens
attgtaccaaaaaaa

SEQ ID NO: 1286994 - DNA, 15 bp, Homo sapiens
tattgtaccaaaaaa

SEQ ID NO: 1286995 - DNA, 15 bp, Homo sapiens
atattgtaccaaaaa

SEQ ID NO: 1286996 - DNA, 15 bp, Homo sapiens
aatattgtaccaaaa

SEQ ID NO: 1286997 - DNA, 15 bp, Homo sapiens
taatattgtaccaaa

SEQ ID NO: 1286998 - DNA, 15 bp, Homo sapiens
ataatattgtaccaa

SEQ ID NO: 1286999 - DNA, 15 bp, Homo sapiens
aataatattgtacca

SEQ ID NO: 1287000 - DNA, 15 bp, Homo sapiens
aaataatattgtacc

SEQ ID NO: 1287001 - DNA, 15 bp, Homo sapiens
taaataatattgtac

SEQ ID NO: 1287002 - DNA, 15 bp, Homo sapiens
ctaaataatattgta

SEQ ID NO: 1287003 - DNA, 15 bp, Homo sapiens
cctaaataatattgt

SEQ ID NO: 1287004 - DNA, 15 bp, Homo sapiens
gcctaaataatattg

SEQ ID NO: 1287005 - DNA, 15 bp, Homo sapiens
ggcctaaataatatt

SEQ ID NO: 1287006 - DNA, 15 bp, Homo sapiens
gggcctaaataatat

SEQ ID NO: 1287007 - DNA, 15 bp, Homo sapiens
ggggcctaaataata

SEQ ID NO: 1287008 - DNA, 15 bp, Homo sapiens
aggggcctaaataat

SEQ ID NO: 1287009 - DNA, 15 bp, Homo sapiens
caggggcctaaataa

SEQ ID NO: 1287010 - DNA, 15 bp, Homo sapiens
tcaggggcctaaata

SEQ ID NO: 1287011 - DNA, 15 bp, Homo sapiens
ttcaggggcctaaat

SEQ ID NO: 1287012 - DNA, 15 bp, Homo sapiens
tttcaggggcctaaa

SEQ ID NO: 1287013 - DNA, 15 bp, Homo sapiens
ttttcaggggcctaa

SEQ ID NO: 1287014 - DNA, 15 bp, Homo sapiens
tttttcaggggccta

SEQ ID NO: 1287015 - DNA, 15 bp, Homo sapiens
gtttttcaggggcct

SEQ ID NO: 1287016 - DNA, 15 bp, Homo sapiens
agtttttcaggggcc

SEQ ID NO: 1287017 - DNA, 15 bp, Homo sapiens
cagtttttcaggggc

SEQ ID NO: 1287018 - DNA, 15 bp, Homo sapiens
ccagtttttcagggg

SEQ ID NO: 1287019 - DNA, 15 bp, Homo sapiens
tccagtttttcaggg

SEQ ID NO: 1287020 - DNA, 15 bp, Homo sapiens
ttccagtttttcagg

SEQ ID NO: 1287021 - DNA, 15 bp, Homo sapiens
tttccagtttttcag

SEQ ID NO: 1287022 - DNA, 15 bp, Homo sapiens
gtttccagtttttca

SEQ ID NO: 1287023 - DNA, 15 bp, Homo sapiens
tgtttccagtttttc

SEQ ID NO: 1287024 - DNA, 15 bp, Homo sapiens
ttgtttccagttttt

SEQ ID NO: 1287025 - DNA, 15 bp, Homo sapiens
gttgtttccagtttt

SEQ ID NO: 1287026 - DNA, 15 bp, Homo sapiens
agttgtttccagttt

SEQ ID NO: 1287027 - DNA, 15 bp, Homo sapiens
cagttgtttccagtt

SEQ ID NO: 1287028 - DNA, 15 bp, Homo sapiens
tcagttgtttccagt

SEQ ID NO: 1287029 - DNA, 15 bp, Homo sapiens
atcagttgtttccag

SEQ ID NO: 1287030 - DNA, 15 bp, Homo sapiens
tatcagttgtttcca

SEQ ID NO: 1287031 - DNA, 15 bp, Homo sapiens
atatcagttgtttcc

SEQ ID NO: 1287032 - DNA, 15 bp, Homo sapiens
aatatcagttgtttc

SEQ ID NO: 1287033 - DNA, 15 bp, Homo sapiens
gaatatcagttgttt

SEQ ID NO: 1287034 - DNA, 15 bp, Homo sapiens
tgaatatcagttgtt

SEQ ID NO: 1287035 - DNA, 15 bp, Homo sapiens
gtgaatatcagttgt

SEQ ID NO: 1287036 - DNA, 15 bp, Homo sapiens
tgtgaatatcagttg

SEQ ID NO: 1287037 - DNA, 15 bp, Homo sapiens
ctgtgaatatcagtt

SEQ ID NO: 1287038 - DNA, 15 bp, Homo sapiens
gctgtgaatatcagt

SEQ ID NO: 1287039 - DNA, 15 bp, Homo sapiens
agctgtgaatatcag

SEQ ID NO: 1287040 - DNA, 15 bp, Homo sapiens
cagctgtgaatatca

SEQ ID NO: 1287041 - DNA, 15 bp, Homo sapiens
tcagctgtgaatatc

SEQ ID NO: 1287042 - DNA, 15 bp, Homo sapiens
ttcagctgtgaatat

SEQ ID NO: 1287043 - DNA, 15 bp, Homo sapiens
cttcagctgtgaata

SEQ ID NO: 1287044 - DNA, 15 bp, Homo sapiens
acttcagctgtgaat

SEQ ID NO: 1287045 - DNA, 15 bp, Homo sapiens
aacttcagctgtgaa

SEQ ID NO: 1287046 - DNA, 15 bp, Homo sapiens
taacttcagctgtga

SEQ ID NO: 1287047 - DNA, 15 bp, Homo sapiens
ttaacttcagctgtg

SEQ ID NO: 1287048 - DNA, 15 bp, Homo sapiens
tttaacttcagctgt

SEQ ID NO: 1287049 - DNA, 15 bp, Homo sapiens
gtttaacttcagctg

SEQ ID NO: 1287050 - DNA, 15 bp, Homo sapiens
tgtttaacttcagct

SEQ ID NO: 1287051 - DNA, 15 bp, Homo sapiens
ttgtttaacttcagc

SEQ ID NO: 1287052 - DNA, 15 bp, Homo sapiens
attgtttaacttcag

SEQ ID NO: 1287053 - DNA, 15 bp, Homo sapiens
tattgtttaacttca

SEQ ID NO: 1287054 - DNA, 15 bp, Homo sapiens
gtattgtttaacttc

SEQ ID NO: 1287055 - DNA, 15 bp, Homo sapiens
tgtattgtttaactt

SEQ ID NO: 1287056 - DNA, 15 bp, Homo sapiens
atgtattgtttaact

SEQ ID NO: 1287057 - DNA, 15 bp, Homo sapiens
tatgtattgtttaac

SEQ ID NO: 1287058 - DNA, 15 bp, Homo sapiens
atatgtattgtttaa

SEQ ID NO: 1287059 - DNA, 15 bp, Homo sapiens
aatatgtattgttta

SEQ ID NO: 1287060 - DNA, 15 bp, Homo sapiens
taatatgtattgttt

SEQ ID NO: 1287061 - DNA, 15 bp, Homo sapiens
ttaatatgtattgtt

SEQ ID NO: 1287062 - DNA, 15 bp, Homo sapiens
tttaatatgtattgt

SEQ ID NO: 1287063 - DNA, 15 bp, Homo sapiens
gtttaatatgtattg

SEQ ID NO: 1287064 - DNA, 15 bp, Homo sapiens
tgtttaatatgtatt

SEQ ID NO: 1287065 - DNA, 15 bp, Homo sapiens
atgtttaatatgtat

SEQ ID NO: 1287066 - DNA, 15 bp, Homo sapiens
tatgtttaatatgta

SEQ ID NO: 1287067 - DNA, 15 bp, Homo sapiens
atatgtttaatatgt

SEQ ID NO: 1287068 - DNA, 15 bp, Homo sapiens
gatatgtttaatatg

SEQ ID NO: 1287069 - DNA, 15 bp, Homo sapiens
agatatgtttaatat

SEQ ID NO: 1287070 - DNA, 15 bp, Homo sapiens
tagatatgtttaata

SEQ ID NO: 1287071 - DNA, 15 bp, Homo sapiens
ttagatatgtttaat

SEQ ID NO: 1287072 - DNA, 15 bp, Homo sapiens
tttagatatgtttaa

SEQ ID NO: 1287073 - DNA, 15 bp, Homo sapiens
gtttagatatgttta

SEQ ID NO: 1287074 - DNA, 15 bp, Homo sapiens
tgtttagatatgttt

SEQ ID NO: 1287075 - DNA, 15 bp, Homo sapiens
atgtttagatatgtt

SEQ ID NO: 1287076 - DNA, 15 bp, Homo sapiens
tatgtttagatatgt

SEQ ID NO: 1287077 - DNA, 15 bp, Homo sapiens
ttatgtttagatatg

SEQ ID NO: 1287078 - DNA, 15 bp, Homo sapiens
tttatgtttagatat

SEQ ID NO: 1287079 - DNA, 15 bp, Homo sapiens
ttttatgtttagata

SEQ ID NO: 1287080 - DNA, 15 bp, Homo sapiens
attttatgtttagat

SEQ ID NO: 1287081 - DNA, 15 bp, Homo sapiens
cattttatgtttaga

SEQ ID NO: 1287082 - DNA, 15 bp, Homo sapiens
acattttatgtttag

SEQ ID NO: 1287083 - DNA, 15 bp, Homo sapiens
aacattttatgttta

SEQ ID NO: 1287084 - DNA, 15 bp, Homo sapiens
taacattttatgttt

SEQ ID NO: 1287085 - DNA, 15 bp, Homo sapiens
ataacattttatgtt

SEQ ID NO: 1287086 - DNA, 15 bp, Homo sapiens
tataacattttatgt

SEQ ID NO: 1287087 - DNA, 15 bp, Homo sapiens
ttataacattttatg

SEQ ID NO: 1287088 - DNA, 15 bp, Homo sapiens
tttataacattttat

SEQ ID NO: 1287089 - DNA, 15 bp, Homo sapiens
atttataacatttta

SEQ ID NO: 1287090 - DNA, 15 bp, Homo sapiens
tatttataacatttt

SEQ ID NO: 1287091 - DNA, 15 bp, Homo sapiens
atatttataacattt

SEQ ID NO: 1287092 - DNA, 15 bp, Homo sapiens
tatatttataacatt

SEQ ID NO: 1287093 - DNA, 15 bp, Homo sapiens
ttatatttataacat

SEQ ID NO: 1287094 - DNA, 15 bp, Homo sapiens
tttatatttataaca

SEQ ID NO: 1287095 - DNA, 15 bp, Homo sapiens
ttttatatttataac

SEQ ID NO: 1287096 - DNA, 15 bp, Homo sapiens
attttatatttataa

SEQ ID NO: 1287097 - DNA, 15 bp, Homo sapiens
tattttatatttata

SEQ ID NO: 1287098 - DNA, 15 bp, Homo sapiens
ttattttatatttat

SEQ ID NO: 1287099 - DNA, 15 bp, Homo sapiens
tttattttatattta

SEQ ID NO: 1287100 - DNA, 15 bp, Homo sapiens
ttttattttatattt

SEQ ID NO: 1287101 - DNA, 15 bp, Homo sapiens
attttattttatatt

SEQ ID NO: 1287102 - DNA, 15 bp, Homo sapiens
cattttattttatat

SEQ ID NO: 1287103 - DNA, 15 bp, Homo sapiens
acattttattttata

SEQ ID NO: 1287104 - DNA, 15 bp, Homo sapiens
cacattttattttat

SEQ ID NO: 1287105 - DNA, 15 bp, Homo sapiens
tcacattttatttta

SEQ ID NO: 1287106 - DNA, 15 bp, Homo sapiens
atcacattttatttt

SEQ ID NO: 1287107 - DNA, 15 bp, Homo sapiens
tatcacattttattt

SEQ ID NO: 1287108 - DNA, 15 bp, Homo sapiens
ttatcacattttatt

SEQ ID NO: 1287109 - DNA, 15 bp, Homo sapiens
tttatcacattttat

SEQ ID NO: 1287110 - DNA, 15 bp, Homo sapiens
ctttatcacatttta

SEQ ID NO: 1287111 - DNA, 15 bp, Homo sapiens
tctttatcacatttt

SEQ ID NO: 1287112 - DNA, 15 bp, Homo sapiens
ttctttatcacattt

SEQ ID NO: 1287113 - DNA, 15 bp, Homo sapiens
attctttatcacatt

SEQ ID NO: 1287114 - DNA, 15 bp, Homo sapiens
tattctttatcacat

SEQ ID NO: 1287115 - DNA, 15 bp, Homo sapiens
ttattctttatcaca

SEQ ID NO: 1287116 - DNA, 15 bp, Homo sapiens
attattctttatcac

SEQ ID NO: 1287117 - DNA, 15 bp, Homo sapiens
cattattctttatca

SEQ ID NO: 1287118 - DNA, 15 bp, Homo sapiens
ccattattctttatc

SEQ ID NO: 1287119 - DNA, 15 bp, Homo sapiens
gccattattctttat

SEQ ID NO: 1287120 - DNA, 15 bp, Homo sapiens
tgccattattcttta

SEQ ID NO: 1287121 - DNA, 15 bp, Homo sapiens
ttgccattattcttt

SEQ ID NO: 1287122 - DNA, 15 bp, Homo sapiens
attgccattattctt

SEQ ID NO: 1287123 - DNA, 15 bp, Homo sapiens
tattgccattattct

SEQ ID NO: 1287124 - DNA, 15 bp, Homo sapiens
atattgccattattc

SEQ ID NO: 1287125 - DNA, 15 bp, Homo sapiens
aatattgccattatt

SEQ ID NO: 1287126 - DNA, 15 bp, Homo sapiens
caatattgccattat

SEQ ID NO: 1287127 - DNA, 15 bp, Homo sapiens
ccaatattgccatta

SEQ ID NO: 1287128 - DNA, 15 bp, Homo sapiens
gccaatattgccatt

SEQ ID NO: 1287129 - DNA, 15 bp, Homo sapiens
tgccaatattgccat

SEQ ID NO: 1287130 - DNA, 15 bp, Homo sapiens
ttgccaatattgcca

SEQ ID NO: 1287131 - DNA, 15 bp, Homo sapiens
cttgccaatattgcc

SEQ ID NO: 1287132 - DNA, 15 bp, Homo sapiens
acttgccaatattgc

SEQ ID NO: 1287133 - DNA, 15 bp, Homo sapiens
cacttgccaatattg

SEQ ID NO: 1287134 - DNA, 15 bp, Homo sapiens
gcacttgccaatatt

SEQ ID NO: 1287135 - DNA, 15 bp, Homo sapiens
agcacttgccaatat

SEQ ID NO: 1287136 - DNA, 15 bp, Homo sapiens
aagcacttgccaata

SEQ ID NO: 1287137 - DNA, 15 bp, Homo sapiens
gaagcacttgccaat

SEQ ID NO: 1287138 - DNA, 15 bp, Homo sapiens
agaagcacttgccaa

SEQ ID NO: 1287139 - DNA, 15 bp, Homo sapiens
tagaagcacttgcca

SEQ ID NO: 1287140 - DNA, 15 bp, Homo sapiens
ttagaagcacttgcc

SEQ ID NO: 1287141 - DNA, 15 bp, Homo sapiens
attagaagcacttgc

SEQ ID NO: 1287142 - DNA, 15 bp, Homo sapiens
cattagaagcacttg

SEQ ID NO: 1287143 - DNA, 15 bp, Homo sapiens
acattagaagcactt

SEQ ID NO: 1287144 - DNA, 15 bp, Homo sapiens
aacattagaagcact

SEQ ID NO: 1287145 - DNA, 15 bp, Homo sapiens
taacattagaagcac

SEQ ID NO: 1287146 - DNA, 15 bp, Homo sapiens
ttaacattagaagca

SEQ ID NO: 1287147 - DNA, 15 bp, Homo sapiens
tttaacattagaagc

SEQ ID NO: 1287148 - DNA, 15 bp, Homo sapiens
gtttaacattagaag

SEQ ID NO: 1287149 - DNA, 15 bp, Homo sapiens
tgtttaacattagaa

SEQ ID NO: 1287150 - DNA, 15 bp, Homo sapiens
ttgtttaacattaga

SEQ ID NO: 1287151 - DNA, 15 bp, Homo sapiens
tttgtttaacattag

SEQ ID NO: 1287152 - DNA, 15 bp, Homo sapiens
atttgtttaacatta

SEQ ID NO: 1287153 - DNA, 15 bp, Homo sapiens
catttgtttaacatt

SEQ ID NO: 1287154 - DNA, 15 bp, Homo sapiens
tcatttgtttaacat

SEQ ID NO: 1287155 - DNA, 15 bp, Homo sapiens
ttcatttgtttaaca

SEQ ID NO: 1287156 - DNA, 15 bp, Homo sapiens
cttcatttgtttaac

SEQ ID NO: 1287157 - DNA, 15 bp, Homo sapiens
gcttcatttgtttaa

SEQ ID NO: 1287158 - DNA, 15 bp, Homo sapiens
tgcttcatttgttta

SEQ ID NO: 1287159 - DNA, 15 bp, Homo sapiens
ctgcttcatttgttt

SEQ ID NO: 1287160 - DNA, 15 bp, Homo sapiens
cctgcttcatttgtt

SEQ ID NO: 1287161 - DNA, 15 bp, Homo sapiens
tcctgcttcatttgt

SEQ ID NO: 1287162 - DNA, 15 bp, Homo sapiens
atcctgcttcatttg

SEQ ID NO: 1287163 - DNA, 15 bp, Homo sapiens
tatcctgcttcattt

SEQ ID NO: 1287164 - DNA, 15 bp, Homo sapiens
atatcctgcttcatt

SEQ ID NO: 1287165 - DNA, 15 bp, Homo sapiens
tatatcctgcttcat

SEQ ID NO: 1287166 - DNA, 15 bp, Homo sapiens
gtatatcctgcttca

SEQ ID NO: 1287167 - DNA, 15 bp, Homo sapiens
agtatatcctgcttc

SEQ ID NO: 1287168 - DNA, 15 bp, Homo sapiens
gagtatatcctgctt

SEQ ID NO: 1287169 - DNA, 15 bp, Homo sapiens
agagtatatcctgct

SEQ ID NO: 1287170 - DNA, 15 bp, Homo sapiens
cagagtatatcctgc

SEQ ID NO: 1287171 - DNA, 15 bp, Homo sapiens
tcagagtatatcctg

SEQ ID NO: 1287172 - DNA, 15 bp, Homo sapiens
atcagagtatatcct

SEQ ID NO: 1287173 - DNA, 15 bp, Homo sapiens
aatcagagtatatcc

SEQ ID NO: 1287174 - DNA, 15 bp, Homo sapiens
taatcagagtatatc

SEQ ID NO: 1287175 - DNA, 15 bp, Homo sapiens
ataatcagagtatat

SEQ ID NO: 1287176 - DNA, 15 bp, Homo sapiens
cataatcagagtata

SEQ ID NO: 1287177 - DNA, 15 bp, Homo sapiens
tcataatcagagtat

SEQ ID NO: 1287178 - DNA, 15 bp, Homo sapiens
gtcataatcagagta

SEQ ID NO: 1287179 - DNA, 15 bp, Homo sapiens
agtcataatcagagt

SEQ ID NO: 1287180 - DNA, 15 bp, Homo sapiens
cagtcataatcagag

SEQ ID NO: 1287181 - DNA, 15 bp, Homo sapiens
acagtcataatcaga

SEQ ID NO: 1287182 - DNA, 15 bp, Homo sapiens
cacagtcataatcag

SEQ ID NO: 1287183 - DNA, 15 bp, Homo sapiens
acacagtcataatca

SEQ ID NO: 1287184 - DNA, 15 bp, Homo sapiens
cacacagtcataatc

SEQ ID NO: 1287185 - DNA, 15 bp, Homo sapiens
acacacagtcataat

SEQ ID NO: 1287186 - DNA, 15 bp, Homo sapiens
tacacacagtcataa

SEQ ID NO: 1287187 - DNA, 15 bp, Homo sapiens
ttacacacagtcata

SEQ ID NO: 1287188 - DNA, 15 bp, Homo sapiens
cttacacacagtcat

SEQ ID NO: 1287189 - DNA, 15 bp, Homo sapiens
ccttacacacagtca

SEQ ID NO: 1287190 - DNA, 15 bp, Homo sapiens
tccttacacacagtc

SEQ ID NO: 1287191 - DNA, 15 bp, Homo sapiens
ttccttacacacagt

SEQ ID NO: 1287192 - DNA, 15 bp, Homo sapiens
cttccttacacacag

SEQ ID NO: 1287193 - DNA, 15 bp, Homo sapiens
tcttccttacacaca

SEQ ID NO: 1287194 - DNA, 15 bp, Homo sapiens
ttcttccttacacac

SEQ ID NO: 1287195 - DNA, 15 bp, Homo sapiens
tttcttccttacaca

SEQ ID NO: 1287196 - DNA, 15 bp, Homo sapiens
gtttcttccttacac

SEQ ID NO: 1287197 - DNA, 15 bp, Homo sapiens
ggtttcttccttaca

SEQ ID NO: 1287198 - DNA, 15 bp, Homo sapiens
aggtttcttccttac

SEQ ID NO: 1287199 - DNA, 15 bp, Homo sapiens
taggtttcttcctta

SEQ ID NO: 1287200 - DNA, 15 bp, Homo sapiens
ctaggtttcttcctt

SEQ ID NO: 1287201 - DNA, 15 bp, Homo sapiens
tctaggtttcttcct

SEQ ID NO: 1287202 - DNA, 15 bp, Homo sapiens
gtctaggtttcttcc

SEQ ID NO: 1287203 - DNA, 15 bp, Homo sapiens
ggtctaggtttcttc

SEQ ID NO: 1287204 - DNA, 15 bp, Homo sapiens
tggtctaggtttctt

SEQ ID NO: 1287205 - DNA, 15 bp, Homo sapiens
gtggtctaggtttct

SEQ ID NO: 1287206 - DNA, 15 bp, Homo sapiens
agtggtctaggtttc

SEQ ID NO: 1287207 - DNA, 15 bp, Homo sapiens
tagtggtctaggttt

SEQ ID NO: 1287208 - DNA, 15 bp, Homo sapiens
ttagtggtctaggtt

SEQ ID NO: 1287209 - DNA, 15 bp, Homo sapiens
gttagtggtctaggt

SEQ ID NO: 1287210 - DNA, 15 bp, Homo sapiens
cgttagtggtctagg

SEQ ID NO: 1287211 - DNA, 15 bp, Homo sapiens
gcgttagtggtctag

SEQ ID NO: 1287212 - DNA, 15 bp, Homo sapiens
tgcgttagtggtcta

SEQ ID NO: 1287213 - DNA, 15 bp, Homo sapiens
atgcgttagtggtct

SEQ ID NO: 1287214 - DNA, 15 bp, Homo sapiens
tatgcgttagtggtc

SEQ ID NO: 1287215 - DNA, 15 bp, Homo sapiens
ctatgcgttagtggt

SEQ ID NO: 1287216 - DNA, 15 bp, Homo sapiens
tctatgcgttagtgg

SEQ ID NO: 1287217 - DNA, 15 bp, Homo sapiens
ttctatgcgttagtg

SEQ ID NO: 1287218 - DNA, 15 bp, Homo sapiens
attctatgcgttagt

SEQ ID NO: 1287219 - DNA, 15 bp, Homo sapiens
cattctatgcgttag

SEQ ID NO: 1287220 - DNA, 15 bp, Homo sapiens
tcattctatgcgtta

SEQ ID NO: 1287221 - DNA, 15 bp, Homo sapiens
ttcattctatgcgtt

SEQ ID NO: 1287222 - DNA, 15 bp, Homo sapiens
tttcattctatgcgt

SEQ ID NO: 1287223 - DNA, 15 bp, Homo sapiens
atttcattctatgcg

SEQ ID NO: 1287224 - DNA, 15 bp, Homo sapiens
catttcattctatgc

SEQ ID NO: 1287225 - DNA, 15 bp, Homo sapiens
tcatttcattctatg

SEQ ID NO: 1287226 - DNA, 15 bp, Homo sapiens
gtcatttcattctat

SEQ ID NO: 1287227 - DNA, 15 bp, Homo sapiens
agtcatttcattcta

SEQ ID NO: 1287228 - DNA, 15 bp, Homo sapiens
cagtcatttcattct

SEQ ID NO: 1287229 - DNA, 15 bp, Homo sapiens
ccagtcatttcattc

SEQ ID NO: 1287230 - DNA, 15 bp, Homo sapiens
tccagtcatttcatt

SEQ ID NO: 1287231 - DNA, 15 bp, Homo sapiens
ctccagtcatttcat

SEQ ID NO: 1287232 - DNA, 15 bp, Homo sapiens
tctccagtcatttca

SEQ ID NO: 1287233 - DNA, 15 bp, Homo sapiens
ctctccagtcatttc

SEQ ID NO: 1287234 - DNA, 15 bp, Homo sapiens
tctctccagtcattt

SEQ ID NO: 1287235 - DNA, 15 bp, Homo sapiens
ttctctccagtcatt

SEQ ID NO: 1287236 - DNA, 15 bp, Homo sapiens
cttctctccagtcat

SEQ ID NO: 1287237 - DNA, 15 bp, Homo sapiens
acttctctccagtca

SEQ ID NO: 1287238 - DNA, 15 bp, Homo sapiens
aacttctctccagtc

SEQ ID NO: 1287239 - DNA, 15 bp, Homo sapiens
aaacttctctccagt

SEQ ID NO: 1287240 - DNA, 15 bp, Homo sapiens
taaacttctctccag

SEQ ID NO: 1287241 - DNA, 15 bp, Homo sapiens
gtaaacttctctcca

SEQ ID NO: 1287242 - DNA, 15 bp, Homo sapiens
ggtaaacttctctcc

SEQ ID NO: 1287243 - DNA, 15 bp, Homo sapiens
tggtaaacttctctc

SEQ ID NO: 1287244 - DNA, 15 bp, Homo sapiens
gtggtaaacttctct

SEQ ID NO: 1287245 - DNA, 15 bp, Homo sapiens
tgtggtaaacttctc

SEQ ID NO: 1287246 - DNA, 15 bp, Homo sapiens
ttgtggtaaacttct

SEQ ID NO: 1287247 - DNA, 15 bp, Homo sapiens
attgtggtaaacttc

SEQ ID NO: 1287248 - DNA, 15 bp, Homo sapiens
cattgtggtaaactt

SEQ ID NO: 1287249 - DNA, 15 bp, Homo sapiens
acattgtggtaaact

SEQ ID NO: 1287250 - DNA, 15 bp, Homo sapiens
aacattgtggtaaac

SEQ ID NO: 1287251 - DNA, 15 bp, Homo sapiens
taacattgtggtaaa

SEQ ID NO: 1287252 - DNA, 15 bp, Homo sapiens
ttaacattgtggtaa

SEQ ID NO: 1287253 - DNA, 15 bp, Homo sapiens
gttaacattgtggta

SEQ ID NO: 1287254 - DNA, 15 bp, Homo sapiens
ggttaacattgtggt

SEQ ID NO: 1287255 - DNA, 15 bp, Homo sapiens
gggttaacattgtgg

SEQ ID NO: 1287256 - DNA, 15 bp, Homo sapiens
tgggttaacattgtg

SEQ ID NO: 1287257 - DNA, 15 bp, Homo sapiens
ttgggttaacattgt

SEQ ID NO: 1287258 - DNA, 15 bp, Homo sapiens
cttgggttaacattg

SEQ ID NO: 1287259 - DNA, 15 bp, Homo sapiens
acttgggttaacatt

SEQ ID NO: 1287260 - DNA, 15 bp, Homo sapiens
aacttgggttaacat

SEQ ID NO: 1287261 - DNA, 15 bp, Homo sapiens
aaacttgggttaaca

SEQ ID NO: 1287262 - DNA, 15 bp, Homo sapiens
aaaacttgggttaac

SEQ ID NO: 1287263 - DNA, 15 bp, Homo sapiens
taaaacttgggttaa

SEQ ID NO: 1287264 - DNA, 15 bp, Homo sapiens
ataaaacttgggtta

SEQ ID NO: 1287265 - DNA, 15 bp, Homo sapiens
tataaaacttgggtt

SEQ ID NO: 1287266 - DNA, 15 bp, Homo sapiens
atataaaacttgggt

SEQ ID NO: 1287267 - DNA, 15 bp, Homo sapiens
catataaaacttggg

SEQ ID NO: 1287268 - DNA, 15 bp, Homo sapiens
tcatataaaacttgg

SEQ ID NO: 1287269 - DNA, 15 bp, Homo sapiens
ctcatataaaacttg

SEQ ID NO: 1287270 - DNA, 15 bp, Homo sapiens
actcatataaaactt

SEQ ID NO: 1287271 - DNA, 15 bp, Homo sapiens
tactcatataaaact

SEQ ID NO: 1287272 - DNA, 15 bp, Homo sapiens
ttactcatataaaac

SEQ ID NO: 1287273 - DNA, 15 bp, Homo sapiens
gttactcatataaaa

SEQ ID NO: 1287274 - DNA, 15 bp, Homo sapiens
agttactcatataaa

SEQ ID NO: 1287275 - DNA, 15 bp, Homo sapiens
aagttactcatataa

SEQ ID NO: 1287276 - DNA, 15 bp, Homo sapiens
taagttactcatata

SEQ ID NO: 1287277 - DNA, 15 bp, Homo sapiens
gtaagttactcatat

SEQ ID NO: 1287278 - DNA, 15 bp, Homo sapiens
tgtaagttactcata

SEQ ID NO: 1287279 - DNA, 15 bp, Homo sapiens
atgtaagttactcat

SEQ ID NO: 1287280 - DNA, 15 bp, Homo sapiens
aatgtaagttactca

SEQ ID NO: 1287281 - DNA, 15 bp, Homo sapiens
aaatgtaagttactc

SEQ ID NO: 1287282 - DNA, 15 bp, Homo sapiens
caaatgtaagttact

SEQ ID NO: 1287283 - DNA, 15 bp, Homo sapiens
acaaatgtaagttac

SEQ ID NO: 1287284 - DNA, 15 bp, Homo sapiens
tacaaatgtaagtta

SEQ ID NO: 1287285 - DNA, 15 bp, Homo sapiens
ttacaaatgtaagtt

SEQ ID NO: 1287286 - DNA, 15 bp, Homo sapiens
cttacaaatgtaagt

SEQ ID NO: 1287287 - DNA, 15 bp, Homo sapiens
ccttacaaatgtaag

SEQ ID NO: 1287288 - DNA, 15 bp, Homo sapiens
tccttacaaatgtaa

SEQ ID NO: 1287289 - DNA, 15 bp, Homo sapiens
ctccttacaaatgta

SEQ ID NO: 1287290 - DNA, 15 bp, Homo sapiens
cctccttacaaatgt

SEQ ID NO: 1287291 - DNA, 15 bp, Homo sapiens
tcctccttacaaatg

SEQ ID NO: 1287292 - DNA, 15 bp, Homo sapiens
atcctccttacaaat

SEQ ID NO: 1287293 - DNA, 15 bp, Homo sapiens
catcctccttacaaa

SEQ ID NO: 1287294 - DNA, 15 bp, Homo sapiens
acatcctccttacaa

SEQ ID NO: 1287295 - DNA, 15 bp, Homo sapiens
tacatcctccttaca

SEQ ID NO: 1287296 - DNA, 15 bp, Homo sapiens
atacatcctccttac

SEQ ID NO: 1287297 - DNA, 15 bp, Homo sapiens
aatacatcctcctta

SEQ ID NO: 1287298 - DNA, 15 bp, Homo sapiens
taatacatcctcctt

SEQ ID NO: 1287299 - DNA, 15 bp, Homo sapiens
gtaatacatcctcct

SEQ ID NO: 1287300 - DNA, 15 bp, Homo sapiens
ggtaatacatcctcc

SEQ ID NO: 1287301 - DNA, 15 bp, Homo sapiens
aggtaatacatcctc

SEQ ID NO: 1287302 - DNA, 15 bp, Homo sapiens
aaggtaatacatcct

SEQ ID NO: 1287303 - DNA, 15 bp, Homo sapiens
aaaggtaatacatcc

SEQ ID NO: 1287304 - DNA, 15 bp, Homo sapiens
gaaaggtaatacatc

SEQ ID NO: 1287305 - DNA, 15 bp, Homo sapiens
tagaaaggtaataca

SEQ ID NO: 1287306 - DNA, 15 bp, Homo sapiens
ctagaaaggtaatac

SEQ ID NO: 1287307 - DNA, 15 bp, Homo sapiens
actagaaaggtaata

SEQ ID NO: 1287308 - DNA, 15 bp, Homo sapiens
tactagaaaggtaat

SEQ ID NO: 1287309 - DNA, 15 bp, Homo sapiens
ttactagaaaggtaa

SEQ ID NO: 1287310 - DNA, 15 bp, Homo sapiens
tttactagaaaggta

SEQ ID NO: 1287311 - DNA, 15 bp, Homo sapiens
gtttactagaaaggt

SEQ ID NO: 1287312 - DNA, 15 bp, Homo sapiens
tgtttactagaaagg

SEQ ID NO: 1287313 - DNA, 15 bp, Homo sapiens
ttgtttactagaaag

SEQ ID NO: 1287314 - DNA, 15 bp, Homo sapiens
tttgtttactagaaa

SEQ ID NO: 1287315 - DNA, 15 bp, Homo sapiens
ctttgtttactagaa

SEQ ID NO: 1287316 - DNA, 15 bp, Homo sapiens
gctttgtttactaga

SEQ ID NO: 1287317 - DNA, 15 bp, Homo sapiens
tgctttgtttactag

SEQ ID NO: 1287318 - DNA, 15 bp, Homo sapiens
ttgctttgtttacta

SEQ ID NO: 1287319 - DNA, 15 bp, Homo sapiens
cttgctttgtttact

SEQ ID NO: 1287320 - DNA, 15 bp, Homo sapiens
gcttgctttgtttac

SEQ ID NO: 1287321 - DNA, 15 bp, Homo sapiens
tgcttgctttgttta

SEQ ID NO: 1287322 - DNA, 15 bp, Homo sapiens
ttgcttgctttgttt

SEQ ID NO: 1287323 - DNA, 15 bp, Homo sapiens
tttgcttgctttgtt

SEQ ID NO: 1287324 - DNA, 15 bp, Homo sapiens
ttttgcttgctttgt

SEQ ID NO: 1287325 - DNA, 15 bp, Homo sapiens
tttttgcttgctttg

SEQ ID NO: 1287326 - DNA, 15 bp, Homo sapiens
gtttttgcttgcttt

SEQ ID NO: 1287327 - DNA, 15 bp, Homo sapiens
agtttttgcttgctt

SEQ ID NO: 1287328 - DNA, 15 bp, Homo sapiens
aagtttttgcttgct

SEQ ID NO: 1287329 - DNA, 15 bp, Homo sapiens
gaagtttttgcttgc

SEQ ID NO: 1287330 - DNA, 15 bp, Homo sapiens
agaagtttttgcttg

SEQ ID NO: 1287331 - DNA, 15 bp, Homo sapiens
aagaagtttttgctt

SEQ ID NO: 1287332 - DNA, 15 bp, Homo sapiens
aaagaagtttttgct

SEQ ID NO: 1287333 - DNA, 15 bp, Homo sapiens
taaagaagtttttgc

SEQ ID NO: 1287334 - DNA, 15 bp, Homo sapiens
ttaaagaagtttttg

SEQ ID NO: 1287335 - DNA, 15 bp, Homo sapiens
cttaaagaagttttt

SEQ ID NO: 1287336 - DNA, 15 bp, Homo sapiens
gcttaaagaagtttt

SEQ ID NO: 1287337 - DNA, 15 bp, Homo sapiens
ggcttaaagaagttt

SEQ ID NO: 1287338 - DNA, 15 bp, Homo sapiens
tggcttaaagaagtt

SEQ ID NO: 1287339 - DNA, 15 bp, Homo sapiens
ttggcttaaagaagt

SEQ ID NO: 1287340 - DNA, 15 bp, Homo sapiens
gttggcttaaagaag

SEQ ID NO: 1287341 - DNA, 15 bp, Homo sapiens
agttggcttaaagaa

SEQ ID NO: 1287342 - DNA, 15 bp, Homo sapiens
aagttggcttaaaga

SEQ ID NO: 1287343 - DNA, 15 bp, Homo sapiens
aaagttggcttaaag

SEQ ID NO: 1287344 - DNA, 15 bp, Homo sapiens
taaagttggcttaaa

SEQ ID NO: 1287345 - DNA, 15 bp, Homo sapiens
ttaaagttggcttaa

SEQ ID NO: 1287346 - DNA, 15 bp, Homo sapiens
attaaagttggctta

SEQ ID NO: 1287347 - DNA, 15 bp, Homo sapiens
cattaaagttggctt

SEQ ID NO: 1287348 - DNA, 15 bp, Homo sapiens
tcattaaagttggct

SEQ ID NO: 1287349 - DNA, 15 bp, Homo sapiens
ctcattaaagttggc

SEQ ID NO: 1287350 - DNA, 15 bp, Homo sapiens
actcattaaagttgg

SEQ ID NO: 1287351 - DNA, 15 bp, Homo sapiens
tactcattaaagttg

SEQ ID NO: 1287352 - DNA, 15 bp, Homo sapiens
atactcattaaagtt

SEQ ID NO: 1287353 - DNA, 15 bp, Homo sapiens
aatactcattaaagt

SEQ ID NO: 1287354 - DNA, 15 bp, Homo sapiens
gaatactcattaaag

SEQ ID NO: 1287355 - DNA, 15 bp, Homo sapiens
agaatactcattaaa

SEQ ID NO: 1287356 - DNA, 15 bp, Homo sapiens
tagaatactcattaa

SEQ ID NO: 1287357 - DNA, 15 bp, Homo sapiens
atagaatactcatta

SEQ ID NO: 1287358 - DNA, 15 bp, Homo sapiens
tatagaatactcatt

SEQ ID NO: 1287359 - DNA, 15 bp, Homo sapiens
gtatagaatactcat

SEQ ID NO: 1287360 - DNA, 15 bp, Homo sapiens
tgtatagaatactca

SEQ ID NO: 1287361 - DNA, 15 bp, Homo sapiens
atgtatagaatactc

SEQ ID NO: 1287362 - DNA, 15 bp, Homo sapiens
tatgtatagaatact

SEQ ID NO: 1287363 - DNA, 15 bp, Homo sapiens
atatgtatagaatac

SEQ ID NO: 1287364 - DNA, 15 bp, Homo sapiens
tatatgtatagaata

SEQ ID NO: 1287365 - DNA, 15 bp, Homo sapiens
ttatatgtatagaat

SEQ ID NO: 1287366 - DNA, 15 bp, Homo sapiens
cttatatgtatagaa

SEQ ID NO: 1287367 - DNA, 15 bp, Homo sapiens
acttatatgtataga

SEQ ID NO: 1287368 - DNA, 15 bp, Homo sapiens
tacttatatgtatag

SEQ ID NO: 1287369 - DNA, 15 bp, Homo sapiens
gtacttatatgtata

SEQ ID NO: 1287370 - DNA, 15 bp, Homo sapiens
agtacttatatgtat

SEQ ID NO: 1287371 - DNA, 15 bp, Homo sapiens
aagtacttatatgta

SEQ ID NO: 1287372 - DNA, 15 bp, Homo sapiens
aaagtacttatatgt

SEQ ID NO: 1287373 - DNA, 15 bp, Homo sapiens
taaagtacttatatg

SEQ ID NO: 1287374 - DNA, 15 bp, Homo sapiens
ttaaagtacttatat

SEQ ID NO: 1287375 - DNA, 15 bp, Homo sapiens
cttaaagtacttata

SEQ ID NO: 1287376 - DNA, 15 bp, Homo sapiens
tcttaaagtacttat

SEQ ID NO: 1287377 - DNA, 15 bp, Homo sapiens
atcttaaagtactta

SEQ ID NO: 1287378 - DNA, 15 bp, Homo sapiens
gatcttaaagtactt

SEQ ID NO: 1287379 - DNA, 15 bp, Homo sapiens
agatcttaaagtact

SEQ ID NO: 1287380 - DNA, 15 bp, Homo sapiens
tagatcttaaagtac

SEQ ID NO: 1287381 - DNA, 15 bp, Homo sapiens
atagatcttaaagta

SEQ ID NO: 1287382 - DNA, 15 bp, Homo sapiens
tatagatcttaaagt

SEQ ID NO: 1287383 - DNA, 15 bp, Homo sapiens
ttatagatcttaaag

SEQ ID NO: 1287384 - DNA, 15 bp, Homo sapiens
attatagatcttaaa

SEQ ID NO: 1287385 - DNA, 15 bp, Homo sapiens
gattatagatcttaa

SEQ ID NO: 1287386 - DNA, 15 bp, Homo sapiens
tgattatagatctta

SEQ ID NO: 1287387 - DNA, 15 bp, Homo sapiens
atgattatagatctt

SEQ ID NO: 1287388 - DNA, 15 bp, Homo sapiens
gatgattatagatct

SEQ ID NO: 1287389 - DNA, 15 bp, Homo sapiens
tgatgattatagatc

SEQ ID NO: 1287390 - DNA, 15 bp, Homo sapiens
ctgatgattatagat

SEQ ID NO: 1287391 - DNA, 15 bp, Homo sapiens
cctgatgattataga

SEQ ID NO: 1287392 - DNA, 15 bp, Homo sapiens
ccctgatgattatag

SEQ ID NO: 1287393 - DNA, 15 bp, Homo sapiens
accctgatgattata

SEQ ID NO: 1287394 - DNA, 15 bp, Homo sapiens
aaccctgatgattat

SEQ ID NO: 1287395 - DNA, 15 bp, Homo sapiens
aaaccctgatgatta

SEQ ID NO: 1287396 - DNA, 15 bp, Homo sapiens
aaaaccctgatgatt

SEQ ID NO: 1287397 - DNA, 15 bp, Homo sapiens
aaaaaccctgatgat

SEQ ID NO: 1287398 - DNA, 15 bp, Homo sapiens
aaaaaaccctgatga

SEQ ID NO: 1287399 - DNA, 15 bp, Homo sapiens
aaaaaaaccctgatg

SEQ ID NO: 1287400 - DNA, 15 bp, Homo sapiens
aaaaaaaaccctgat

SEQ ID NO: 1287401 - DNA, 15 bp, Homo sapiens
aaaaaaaaaccctga

SEQ ID NO: 1287402 - DNA, 15 bp, Homo sapiens
aaaaaaaaaaccctg

SEQ ID NO: 1287403 - DNA, 15 bp, Homo sapiens
tagaaaaaaaaaaac

SEQ ID NO: 1287404 - DNA, 15 bp, Homo sapiens
ctagaaaaaaaaaaa

SEQ ID NO: 1287405 - DNA, 15 bp, Homo sapiens
tctagaaaaaaaaaa

SEQ ID NO: 1287406 - DNA, 15 bp, Homo sapiens
atctagaaaaaaaaa

SEQ ID NO: 1287407 - DNA, 15 bp, Homo sapiens
tatctagaaaaaaaa

SEQ ID NO: 1287408 - DNA, 15 bp, Homo sapiens
atatctagaaaaaaa

SEQ ID NO: 1287409 - DNA, 15 bp, Homo sapiens
tatatctagaaaaaa

SEQ ID NO: 1287410 - DNA, 15 bp, Homo sapiens
ctatatctagaaaaa

SEQ ID NO: 1287411 - DNA, 15 bp, Homo sapiens
tctatatctagaaaa

SEQ ID NO: 1287412 - DNA, 15 bp, Homo sapiens
ttctatatctagaaa

SEQ ID NO: 1287413 - DNA, 15 bp, Homo sapiens
attctatatctagaa

SEQ ID NO: 1287414 - DNA, 15 bp, Homo sapiens
aattctatatctaga

SEQ ID NO: 1287415 - DNA, 15 bp, Homo sapiens
aaattctatatctag

SEQ ID NO: 1287416 - DNA, 15 bp, Homo sapiens
caaattctatatcta

SEQ ID NO: 1287417 - DNA, 15 bp, Homo sapiens
ccaaattctatatct

SEQ ID NO: 1287418 - DNA, 15 bp, Homo sapiens
cccaaattctatatc

SEQ ID NO: 1287419 - DNA, 15 bp, Homo sapiens
ccccaaattctatat

SEQ ID NO: 1287420 - DNA, 15 bp, Homo sapiens
tccccaaattctata

SEQ ID NO: 1287421 - DNA, 15 bp, Homo sapiens
gtccccaaattctat

SEQ ID NO: 1287422 - DNA, 15 bp, Homo sapiens
agtccccaaattcta

SEQ ID NO: 1287423 - DNA, 15 bp, Homo sapiens
gagtccccaaattct

SEQ ID NO: 1287424 - DNA, 15 bp, Homo sapiens
tgagtccccaaattc

SEQ ID NO: 1287425 - DNA, 15 bp, Homo sapiens
atgagtccccaaatt

SEQ ID NO: 1287426 - DNA, 15 bp, Homo sapiens
aatgagtccccaaat

SEQ ID NO: 1287427 - DNA, 15 bp, Homo sapiens
caatgagtccccaaa

SEQ ID NO: 1287428 - DNA, 15 bp, Homo sapiens
ccaatgagtccccaa

SEQ ID NO: 1287429 - DNA, 15 bp, Homo sapiens
accaatgagtcccca

SEQ ID NO: 1287430 - DNA, 15 bp, Homo sapiens
taccaatgagtcccc

SEQ ID NO: 1287431 - DNA, 15 bp, Homo sapiens
ctaccaatgagtccc

SEQ ID NO: 1287432 - DNA, 15 bp, Homo sapiens
cctaccaatgagtcc

SEQ ID NO: 1287433 - DNA, 15 bp, Homo sapiens
tcctaccaatgagtc

SEQ ID NO: 1287434 - DNA, 15 bp, Homo sapiens
ctcctaccaatgagt

SEQ ID NO: 1287435 - DNA, 15 bp, Homo sapiens
actcctaccaatgag

SEQ ID NO: 1287436 - DNA, 15 bp, Homo sapiens
cactcctaccaatga

SEQ ID NO: 1287437 - DNA, 15 bp, Homo sapiens
tcactcctaccaatg

SEQ ID NO: 1287438 - DNA, 15 bp, Homo sapiens
atcactcctaccaat

SEQ ID NO: 1287439 - DNA, 15 bp, Homo sapiens
aatcactcctaccaa

SEQ ID NO: 1287440 - DNA, 15 bp, Homo sapiens
aaatcactcctacca

SEQ ID NO: 1287441 - DNA, 15 bp, Homo sapiens
caaatcactcctacc

SEQ ID NO: 1287442 - DNA, 15 bp, Homo sapiens
ccaaatcactcctac

SEQ ID NO: 1287443 - DNA, 15 bp, Homo sapiens
cccaaatcactccta

SEQ ID NO: 1287444 - DNA, 15 bp, Homo sapiens
ccccaaatcactcct

SEQ ID NO: 1287445 - DNA, 15 bp, Homo sapiens
accccaaatcactcc

SEQ ID NO: 1287446 - DNA, 15 bp, Homo sapiens
taccccaaatcactc

SEQ ID NO: 1287447 - DNA, 15 bp, Homo sapiens
gtaccccaaatcact

SEQ ID NO: 1287448 - DNA, 15 bp, Homo sapiens
tgtaccccaaatcac

SEQ ID NO: 1287449 - DNA, 15 bp, Homo sapiens
ctgtaccccaaatca

SEQ ID NO: 1287450 - DNA, 15 bp, Homo sapiens
actgtaccccaaatc

SEQ ID NO: 1287451 - DNA, 15 bp, Homo sapiens
aactgtaccccaaat

SEQ ID NO: 1287452 - DNA, 15 bp, Homo sapiens
gaactgtaccccaaa

SEQ ID NO: 1287453 - DNA, 15 bp, Homo sapiens
agaactgtaccccaa

SEQ ID NO: 1287454 - DNA, 15 bp, Homo sapiens
cagaactgtacccca

SEQ ID NO: 1287455 - DNA, 15 bp, Homo sapiens
tcagaactgtacccc

SEQ ID NO: 1287456 - DNA, 15 bp, Homo sapiens
atcagaactgtaccc

SEQ ID NO: 1287457 - DNA, 15 bp, Homo sapiens
aatcagaactgtacc

SEQ ID NO: 1287458 - DNA, 15 bp, Homo sapiens
aaatcagaactgtac

SEQ ID NO: 1287459 - DNA, 15 bp, Homo sapiens
aaaatcagaactgta

SEQ ID NO: 1287460 - DNA, 15 bp, Homo sapiens
aaaaatcagaactgt

SEQ ID NO: 1287461 - DNA, 15 bp, Homo sapiens
aaaaaatcagaactg

SEQ ID NO: 1287462 - DNA, 15 bp, Homo sapiens
aaaaaaatcagaact

SEQ ID NO: 1287463 - DNA, 15 bp, Homo sapiens
aaaaaaaatcagaac

SEQ ID NO: 1287464 - DNA, 15 bp, Homo sapiens
gaaaaaaaatcagaa

SEQ ID NO: 1287465 - DNA, 15 bp, Homo sapiens
ggaaaaaaaatcaga

SEQ ID NO: 1287466 - DNA, 15 bp, Homo sapiens
aggaaaaaaaatcag

SEQ ID NO: 1287467 - DNA, 15 bp, Homo sapiens
gcaggaaaaaaaatc

SEQ ID NO: 1287468 - DNA, 15 bp, Homo sapiens
agcaggaaaaaaaat

SEQ ID NO: 1287469 - DNA, 15 bp, Homo sapiens
tagcaggaaaaaaaa

SEQ ID NO: 1287470 - DNA, 15 bp, Homo sapiens
atagcaggaaaaaaa

SEQ ID NO: 1287471 - DNA, 15 bp, Homo sapiens
tatagcaggaaaaaa

SEQ ID NO: 1287472 - DNA, 15 bp, Homo sapiens
ctatagcaggaaaaa

SEQ ID NO: 1287473 - DNA, 15 bp, Homo sapiens
actatagcaggaaaa

SEQ ID NO: 1287474 - DNA, 15 bp, Homo sapiens
tactatagcaggaaa

SEQ ID NO: 1287475 - DNA, 15 bp, Homo sapiens
ttactatagcaggaa

SEQ ID NO: 1287476 - DNA, 15 bp, Homo sapiens
attactatagcagga

SEQ ID NO: 1287477 - DNA, 15 bp, Homo sapiens
aattactatagcagg

SEQ ID NO: 1287478 - DNA, 15 bp, Homo sapiens
aaattactatagcag

SEQ ID NO: 1287479 - DNA, 15 bp, Homo sapiens
gaaattactatagca

SEQ ID NO: 1287480 - DNA, 15 bp, Homo sapiens
cgaaattactatagc

SEQ ID NO: 1287481 - DNA, 15 bp, Homo sapiens
tcgaaattactatag

SEQ ID NO: 1287482 - DNA, 15 bp, Homo sapiens
gtcgaaattactata

SEQ ID NO: 1287483 - DNA, 15 bp, Homo sapiens
agtcgaaattactat

SEQ ID NO: 1287484 - DNA, 15 bp, Homo sapiens
cagtcgaaattacta

SEQ ID NO: 1287485 - DNA, 15 bp, Homo sapiens
ccagtcgaaattact

SEQ ID NO: 1287486 - DNA, 15 bp, Homo sapiens
tccagtcgaaattac

SEQ ID NO: 1287487 - DNA, 15 bp, Homo sapiens
atccagtcgaaatta

SEQ ID NO: 1287488 - DNA, 15 bp, Homo sapiens
catccagtcgaaatt

SEQ ID NO: 1287489 - DNA, 15 bp, Homo sapiens
gcatccagtcgaaat

SEQ ID NO: 1287490 - DNA, 15 bp, Homo sapiens
agcatccagtcgaaa

SEQ ID NO: 1287491 - DNA, 15 bp, Homo sapiens
aagcatccagtcgaa

SEQ ID NO: 1287492 - DNA, 15 bp, Homo sapiens
gaagcatccagtcga

SEQ ID NO: 1287493 - DNA, 15 bp, Homo sapiens
ggaagcatccagtcg

SEQ ID NO: 1287494 - DNA, 15 bp, Homo sapiens
tggaagcatccagtc

SEQ ID NO: 1287495 - DNA, 15 bp, Homo sapiens
ttggaagcatccagt

SEQ ID NO: 1287496 - DNA, 15 bp, Homo sapiens
cttggaagcatccag

SEQ ID NO: 1287497 - DNA, 15 bp, Homo sapiens
acttggaagcatcca

SEQ ID NO: 1287498 - DNA, 15 bp, Homo sapiens
aacttggaagcatcc

SEQ ID NO: 1287499 - DNA, 15 bp, Homo sapiens
caacttggaagcatc

SEQ ID NO: 1287500 - DNA, 15 bp, Homo sapiens
acaacttggaagcat

SEQ ID NO: 1287501 - DNA, 15 bp, Homo sapiens
aacaacttggaagca

SEQ ID NO: 1287502 - DNA, 15 bp, Homo sapiens
aaacaacttggaagc

SEQ ID NO: 1287503 - DNA, 15 bp, Homo sapiens
caaacaacttggaag

SEQ ID NO: 1287504 - DNA, 15 bp, Homo sapiens
gcaaacaacttggaa

SEQ ID NO: 1287505 - DNA, 15 bp, Homo sapiens
agcaaacaacttgga

SEQ ID NO: 1287506 - DNA, 15 bp, Homo sapiens
gagcaaacaacttgg

SEQ ID NO: 1287507 - DNA, 15 bp, Homo sapiens
agagcaaacaacttg

SEQ ID NO: 1287508 - DNA, 15 bp, Homo sapiens
cagagcaaacaactt

SEQ ID NO: 1287509 - DNA, 15 bp, Homo sapiens
gcagagcaaacaact

SEQ ID NO: 1287510 - DNA, 15 bp, Homo sapiens
agcagagcaaacaac

SEQ ID NO: 1287511 - DNA, 15 bp, Homo sapiens
cagcagagcaaacaa

SEQ ID NO: 1287512 - DNA, 15 bp, Homo sapiens
acagcagagcaaaca

SEQ ID NO: 1287513 - DNA, 15 bp, Homo sapiens
gacagcagagcaaac

SEQ ID NO: 1287514 - DNA, 15 bp, Homo sapiens
agacagcagagcaaa

SEQ ID NO: 1287515 - DNA, 15 bp, Homo sapiens
cagacagcagagcaa

SEQ ID NO: 1287516 - DNA, 15 bp, Homo sapiens
tcagacagcagagca

SEQ ID NO: 1287517 - DNA, 15 bp, Homo sapiens
ctcagacagcagagc

SEQ ID NO: 1287518 - DNA, 15 bp, Homo sapiens
tctcagacagcagag

SEQ ID NO: 1287519 - DNA, 15 bp, Homo sapiens
atctcagacagcaga

SEQ ID NO: 1287520 - DNA, 15 bp, Homo sapiens
tatctcagacagcag

SEQ ID NO: 1287521 - DNA, 15 bp, Homo sapiens
ttatctcagacagca

SEQ ID NO: 1287522 - DNA, 15 bp, Homo sapiens
cttatctcagacagc

SEQ ID NO: 1287523 - DNA, 15 bp, Homo sapiens
ccttatctcagacag

SEQ ID NO: 1287524 - DNA, 15 bp, Homo sapiens
tccttatctcagaca

SEQ ID NO: 1287525 - DNA, 15 bp, Homo sapiens
ttccttatctcagac

SEQ ID NO: 1287526 - DNA, 15 bp, Homo sapiens
attccttatctcaga

SEQ ID NO: 1287527 - DNA, 15 bp, Homo sapiens
gattccttatctcag

SEQ ID NO: 1287528 - DNA, 15 bp, Homo sapiens
agattccttatctca

SEQ ID NO: 1287529 - DNA, 15 bp, Homo sapiens
cagattccttatctc

SEQ ID NO: 1287530 - DNA, 15 bp, Homo sapiens
gcagattccttatct

SEQ ID NO: 1287531 - DNA, 15 bp, Homo sapiens
agcagattccttatc

SEQ ID NO: 1287532 - DNA, 15 bp, Homo sapiens
aagcagattccttat

SEQ ID NO: 1287533 - DNA, 15 bp, Homo sapiens
caagcagattcctta

SEQ ID NO: 1287534 - DNA, 15 bp, Homo sapiens
ccaagcagattcctt

SEQ ID NO: 1287535 - DNA, 15 bp, Homo sapiens
tccaagcagattcct

SEQ ID NO: 1287536 - DNA, 15 bp, Homo sapiens
atccaagcagattcc

SEQ ID NO: 1287537 - DNA, 15 bp, Homo sapiens
tatccaagcagattc

SEQ ID NO: 1287538 - DNA, 15 bp, Homo sapiens
atatccaagcagatt

SEQ ID NO: 1287539 - DNA, 15 bp, Homo sapiens
aatatccaagcagat

SEQ ID NO: 1287540 - DNA, 15 bp, Homo sapiens
aaatatccaagcaga

SEQ ID NO: 1287541 - DNA, 15 bp, Homo sapiens
caaatatccaagcag

SEQ ID NO: 1287542 - DNA, 15 bp, Homo sapiens
acaaatatccaagca

SEQ ID NO: 1287543 - DNA, 15 bp, Homo sapiens
aacaaatatccaagc

SEQ ID NO: 1287544 - DNA, 15 bp, Homo sapiens
aaacaaatatccaag

SEQ ID NO: 1287545 - DNA, 15 bp, Homo sapiens
gaaacaaatatccaa

SEQ ID NO: 1287546 - DNA, 15 bp, Homo sapiens
agaaacaaatatcca

SEQ ID NO: 1287547 - DNA, 15 bp, Homo sapiens
cagaaacaaatatcc

SEQ ID NO: 1287548 - DNA, 15 bp, Homo sapiens
acagaaacaaatatc

SEQ ID NO: 1287549 - DNA, 15 bp, Homo sapiens
aacagaaacaaatat

SEQ ID NO: 1287550 - DNA, 15 bp, Homo sapiens
caacagaaacaaata

SEQ ID NO: 1287551 - DNA, 15 bp, Homo sapiens
acaacagaaacaaat

SEQ ID NO: 1287552 - DNA, 15 bp, Homo sapiens
tacaacagaaacaaa

SEQ ID NO: 1287553 - DNA, 15 bp, Homo sapiens
ttacaacagaaacaa

SEQ ID NO: 1287554 - DNA, 15 bp, Homo sapiens
cttacaacagaaaca

SEQ ID NO: 1287555 - DNA, 15 bp, Homo sapiens
tcttacaacagaaac

SEQ ID NO: 1287556 - DNA, 15 bp, Homo sapiens
ttcttacaacagaaa

SEQ ID NO: 1287557 - DNA, 15 bp, Homo sapiens
cttcttacaacagaa

SEQ ID NO: 1287558 - DNA, 15 bp, Homo sapiens
gcttcttacaacaga

SEQ ID NO: 1287559 - DNA, 15 bp, Homo sapiens
tgcttcttacaacag

SEQ ID NO: 1287560 - DNA, 15 bp, Homo sapiens
ctgcttcttacaaca

SEQ ID NO: 1287561 - DNA, 15 bp, Homo sapiens
cctgcttcttacaac

SEQ ID NO: 1287562 - DNA, 15 bp, Homo sapiens
tcctgcttcttacaa

SEQ ID NO: 1287563 - DNA, 15 bp, Homo sapiens
ttcctgcttcttaca

SEQ ID NO: 1287564 - DNA, 15 bp, Homo sapiens
attcctgcttcttac

SEQ ID NO: 1287565 - DNA, 15 bp, Homo sapiens
aattcctgcttctta

SEQ ID NO: 1287566 - DNA, 15 bp, Homo sapiens
taattcctgcttctt

SEQ ID NO: 1287567 - DNA, 15 bp, Homo sapiens
gtaattcctgcttct

SEQ ID NO: 1287568 - DNA, 15 bp, Homo sapiens
tgtaattcctgcttc

SEQ ID NO: 1287569 - DNA, 15 bp, Homo sapiens
atgtaattcctgctt

SEQ ID NO: 1287570 - DNA, 15 bp, Homo sapiens
tatgtaattcctgct

SEQ ID NO: 1287571 - DNA, 15 bp, Homo sapiens
ctatgtaattcctgc

SEQ ID NO: 1287572 - DNA, 15 bp, Homo sapiens
actatgtaattcctg

SEQ ID NO: 1287573 - DNA, 15 bp, Homo sapiens
cactatgtaattcct

SEQ ID NO: 1287574 - DNA, 15 bp, Homo sapiens
ccactatgtaattcc

SEQ ID NO: 1287575 - DNA, 15 bp, Homo sapiens
tccactatgtaattc

SEQ ID NO: 1287576 - DNA, 15 bp, Homo sapiens
gtccactatgtaatt

SEQ ID NO: 1287577 - DNA, 15 bp, Homo sapiens
tgtccactatgtaat

SEQ ID NO: 1287578 - DNA, 15 bp, Homo sapiens
ttgtccactatgtaa

SEQ ID NO: 1287579 - DNA, 15 bp, Homo sapiens
tttgtccactatgta

SEQ ID NO: 1287580 - DNA, 15 bp, Homo sapiens
ctttgtccactatgt

SEQ ID NO: 1287581 - DNA, 15 bp, Homo sapiens
gctttgtccactatg

SEQ ID NO: 1287582 - DNA, 15 bp, Homo sapiens
tgctttgtccactat

SEQ ID NO: 1287583 - DNA, 15 bp, Homo sapiens
atgctttgtccacta

SEQ ID NO: 1287584 - DNA, 15 bp, Homo sapiens
aatgctttgtccact

SEQ ID NO: 1287585 - DNA, 15 bp, Homo sapiens
taatgctttgtccac

SEQ ID NO: 1287586 - DNA, 15 bp, Homo sapiens
gtaatgctttgtcca

SEQ ID NO: 1287587 - DNA, 15 bp, Homo sapiens
tgtaatgctttgtcc

SEQ ID NO: 1287588 - DNA, 15 bp, Homo sapiens
atgtaatgctttgtc

SEQ ID NO: 1287589 - DNA, 15 bp, Homo sapiens
aatgtaatgctttgt

SEQ ID NO: 1287590 - DNA, 15 bp, Homo sapiens
caatgtaatgctttg

SEQ ID NO: 1287591 - DNA, 15 bp, Homo sapiens
acaatgtaatgcttt

SEQ ID NO: 1287592 - DNA, 15 bp, Homo sapiens
tacaatgtaatgctt

SEQ ID NO: 1287593 - DNA, 15 bp, Homo sapiens
atacaatgtaatgct

SEQ ID NO: 1287594 - DNA, 15 bp, Homo sapiens
tatacaatgtaatgc

SEQ ID NO: 1287595 - DNA, 15 bp, Homo sapiens
atatacaatgtaatg

SEQ ID NO: 1287596 - DNA, 15 bp, Homo sapiens
catatacaatgtaat

SEQ ID NO: 1287597 - DNA, 15 bp, Homo sapiens
acatatacaatgtaa

SEQ ID NO: 1287598 - DNA, 15 bp, Homo sapiens
aacatatacaatgta

SEQ ID NO: 1287599 - DNA, 15 bp, Homo sapiens
aaacatatacaatgt

SEQ ID NO: 1287600 - DNA, 15 bp, Homo sapiens
taaacatatacaatg

SEQ ID NO: 1287601 - DNA, 15 bp, Homo sapiens
ttaaacatatacaat

SEQ ID NO: 1287602 - DNA, 15 bp, Homo sapiens
cttaaacatatacaa

SEQ ID NO: 1287603 - DNA, 15 bp, Homo sapiens
ccttaaacatataca

SEQ ID NO: 1287604 - DNA, 15 bp, Homo sapiens
cccttaaacatatac

SEQ ID NO: 1287605 - DNA, 15 bp, Homo sapiens
acccttaaacatata

SEQ ID NO: 1287606 - DNA, 15 bp, Homo sapiens
cacccttaaacatat

SEQ ID NO: 1287607 - DNA, 15 bp, Homo sapiens
tcacccttaaacata

SEQ ID NO: 1287608 - DNA, 15 bp, Homo sapiens
ttcacccttaaacat

SEQ ID NO: 1287609 - DNA, 15 bp, Homo sapiens
cttcacccttaaaca

SEQ ID NO: 1287610 - DNA, 15 bp, Homo sapiens
ccttcacccttaaac

SEQ ID NO: 1287611 - DNA, 15 bp, Homo sapiens
cccttcacccttaaa

SEQ ID NO: 1287612 - DNA, 15 bp, Homo sapiens
acccttcacccttaa

SEQ ID NO: 1287613 - DNA, 15 bp, Homo sapiens
tacccttcaccctta

SEQ ID NO: 1287614 - DNA, 15 bp, Homo sapiens
ttacccttcaccctt

SEQ ID NO: 1287615 - DNA, 15 bp, Homo sapiens
gttacccttcaccct

SEQ ID NO: 1287616 - DNA, 15 bp, Homo sapiens
agttacccttcaccc

SEQ ID NO: 1287617 - DNA, 15 bp, Homo sapiens
tagttacccttcacc

SEQ ID NO: 1287618 - DNA, 15 bp, Homo sapiens
atagttacccttcac

SEQ ID NO: 1287619 - DNA, 15 bp, Homo sapiens
tatagttacccttca

SEQ ID NO: 1287620 - DNA, 15 bp, Homo sapiens
ctatagttacccttc

SEQ ID NO: 1287621 - DNA, 15 bp, Homo sapiens
actatagttaccctt

SEQ ID NO: 1287622 - DNA, 15 bp, Homo sapiens
cactatagttaccct

SEQ ID NO: 1287623 - DNA, 15 bp, Homo sapiens
ccactatagttaccc

SEQ ID NO: 1287624 - DNA, 15 bp, Homo sapiens
accactatagttacc

SEQ ID NO: 1287625 - DNA, 15 bp, Homo sapiens
caccactatagttac

SEQ ID NO: 1287626 - DNA, 15 bp, Homo sapiens
tcaccactatagtta

SEQ ID NO: 1287627 - DNA, 15 bp, Homo sapiens
atcaccactatagtt

SEQ ID NO: 1287628 - DNA, 15 bp, Homo sapiens
aatcaccactatagt

SEQ ID NO: 1287629 - DNA, 15 bp, Homo sapiens
aaatcaccactatag

SEQ ID NO: 1287630 - DNA, 15 bp, Homo sapiens
aaaatcaccactata

SEQ ID NO: 1287631 - DNA, 15 bp, Homo sapiens
caaaatcaccactat

SEQ ID NO: 1287632 - DNA, 15 bp, Homo sapiens
ccaaaatcaccacta

SEQ ID NO: 1287633 - DNA, 15 bp, Homo sapiens
accaaaatcaccact

SEQ ID NO: 1287634 - DNA, 15 bp, Homo sapiens
gaccaaaatcaccac

SEQ ID NO: 1287635 - DNA, 15 bp, Homo sapiens
tgaccaaaatcacca

SEQ ID NO: 1287636 - DNA, 15 bp, Homo sapiens
ctgaccaaaatcacc

SEQ ID NO: 1287637 - DNA, 15 bp, Homo sapiens
ctctgaccaaaatca

SEQ ID NO: 1287638 - DNA, 15 bp, Homo sapiens
tctctgaccaaaatc

SEQ ID NO: 1287639 - DNA, 15 bp, Homo sapiens
ttctctgaccaaaat

SEQ ID NO: 1287640 - DNA, 15 bp, Homo sapiens
tttctctgaccaaaa

SEQ ID NO: 1287641 - DNA, 15 bp, Homo sapiens
ttttctctgaccaaa

SEQ ID NO: 1287642 - DNA, 15 bp, Homo sapiens
tttttctctgaccaa

SEQ ID NO: 1287643 - DNA, 15 bp, Homo sapiens
ttttttctctgacca

SEQ ID NO: 1287644 - DNA, 15 bp, Homo sapiens
gttttttctctgacc

SEQ ID NO: 1287645 - DNA, 15 bp, Homo sapiens
ggttttttctctgac

SEQ ID NO: 1287646 - DNA, 15 bp, Homo sapiens
tggttttttctctga

SEQ ID NO: 1287647 - DNA, 15 bp, Homo sapiens
atggttttttctctg

SEQ ID NO: 1287648 - DNA, 15 bp, Homo sapiens
tatggttttttctct

SEQ ID NO: 1287649 - DNA, 15 bp, Homo sapiens
ctatggttttttctc

SEQ ID NO: 1287650 - DNA, 15 bp, Homo sapiens
tctatggttttttct

SEQ ID NO: 1287651 - DNA, 15 bp, Homo sapiens
ttctatggttttttc

SEQ ID NO: 1287652 - DNA, 15 bp, Homo sapiens
cttctatggtttttt

SEQ ID NO: 1287653 - DNA, 15 bp, Homo sapiens
ccttctatggttttt

SEQ ID NO: 1287654 - DNA, 15 bp, Homo sapiens
gccttctatggtttt

SEQ ID NO: 1287655 - DNA, 15 bp, Homo sapiens
tgccttctatggttt

SEQ ID NO: 1287656 - DNA, 15 bp, Homo sapiens
ttgccttctatggtt

SEQ ID NO: 1287657 - DNA, 15 bp, Homo sapiens
attgccttctatggt

SEQ ID NO: 1287658 - DNA, 15 bp, Homo sapiens
cattgccttctatgg

SEQ ID NO: 1287659 - DNA, 15 bp, Homo sapiens
acattgccttctatg

SEQ ID NO: 1287660 - DNA, 15 bp, Homo sapiens
gacattgccttctat

SEQ ID NO: 1287661 - DNA, 15 bp, Homo sapiens
ggacattgccttcta

SEQ ID NO: 1287662 - DNA, 15 bp, Homo sapiens
cggacattgccttct

SEQ ID NO: 1287663 - DNA, 15 bp, Homo sapiens
tcggacattgccttc

SEQ ID NO: 1287664 - DNA, 15 bp, Homo sapiens
ttcggacattgcctt

SEQ ID NO: 1287665 - DNA, 15 bp, Homo sapiens
attcggacattgcct

SEQ ID NO: 1287666 - DNA, 15 bp, Homo sapiens
tattcggacattgcc

SEQ ID NO: 1287667 - DNA, 15 bp, Homo sapiens
ctattcggacattgc

SEQ ID NO: 1287668 - DNA, 15 bp, Homo sapiens
cctattcggacattg

SEQ ID NO: 1287669 - DNA, 15 bp, Homo sapiens
ccctattcggacatt

SEQ ID NO: 1287670 - DNA, 15 bp, Homo sapiens
accctattcggacat

SEQ ID NO: 1287671 - DNA, 15 bp, Homo sapiens
aaccctattcggaca

SEQ ID NO: 1287672 - DNA, 15 bp, Homo sapiens
aaaccctattcggac

SEQ ID NO: 1287673 - DNA, 15 bp, Homo sapiens
taaaccctattcgga

SEQ ID NO: 1287674 - DNA, 15 bp, Homo sapiens
gtaaaccctattcgg

SEQ ID NO: 1287675 - DNA, 15 bp, Homo sapiens
tgtaaaccctattcg

SEQ ID NO: 1287676 - DNA, 15 bp, Homo sapiens
ctgtaaaccctattc

SEQ ID NO: 1287677 - DNA, 15 bp, Homo sapiens
cctgtaaaccctatt

SEQ ID NO: 1287678 - DNA, 15 bp, Homo sapiens
tcctgtaaaccctat

SEQ ID NO: 1287679 - DNA, 15 bp, Homo sapiens
ttcctgtaaacccta

SEQ ID NO: 1287680 - DNA, 15 bp, Homo sapiens
tttcctgtaaaccct

SEQ ID NO: 1287681 - DNA, 15 bp, Homo sapiens
ttttcctgtaaaccc

SEQ ID NO: 1287682 - DNA, 15 bp, Homo sapiens
tttttcctgtaaacc

SEQ ID NO: 1287683 - DNA, 15 bp, Homo sapiens
tatttttcctgtaaa

SEQ ID NO: 1287684 - DNA, 15 bp, Homo sapiens
ctatttttcctgtaa

SEQ ID NO: 1287685 - DNA, 15 bp, Homo sapiens
tctatttttcctgta

SEQ ID NO: 1287686 - DNA, 15 bp, Homo sapiens
ttctatttttcctgt

SEQ ID NO: 1287687 - DNA, 15 bp, Homo sapiens
tttctatttttcctg

SEQ ID NO: 1287688 - DNA, 15 bp, Homo sapiens
atttctatttttcct

SEQ ID NO: 1287689 - DNA, 15 bp, Homo sapiens
aatttctatttttcc

SEQ ID NO: 1287690 - DNA, 15 bp, Homo sapiens
gaatttctatttttc

SEQ ID NO: 1287691 - DNA, 15 bp, Homo sapiens
tgaatttctattttt

SEQ ID NO: 1287692 - DNA, 15 bp, Homo sapiens
gtgaatttctatttt

SEQ ID NO: 1287693 - DNA, 15 bp, Homo sapiens
ggtgaatttctattt

SEQ ID NO: 1287694 - DNA, 15 bp, Homo sapiens
tggtgaatttctatt

SEQ ID NO: 1287695 - DNA, 15 bp, Homo sapiens
ttggtgaatttctat

SEQ ID NO: 1287696 - DNA, 15 bp, Homo sapiens
cttggtgaatttcta

SEQ ID NO: 1287697 - DNA, 15 bp, Homo sapiens
gcttggtgaatttct

SEQ ID NO: 1287698 - DNA, 15 bp, Homo sapiens
tgcttggtgaatttc

SEQ ID NO: 1287699 - DNA, 15 bp, Homo sapiens
ttgcttggtgaattt

SEQ ID NO: 1287700 - DNA, 15 bp, Homo sapiens
tttgcttggtgaatt

SEQ ID NO: 1287701 - DNA, 15 bp, Homo sapiens
ttttgcttggtgaat

SEQ ID NO: 1287702 - DNA, 15 bp, Homo sapiens
attttgcttggtgaa

SEQ ID NO: 1287703 - DNA, 15 bp, Homo sapiens
cattttgcttggtga

SEQ ID NO: 1287704 - DNA, 15 bp, Homo sapiens
tcattttgcttggtg

SEQ ID NO: 1287705 - DNA, 15 bp, Homo sapiens
ctcattttgcttggt

SEQ ID NO: 1287706 - DNA, 15 bp, Homo sapiens
actcattttgcttgg

SEQ ID NO: 1287707 - DNA, 15 bp, Homo sapiens
cactcattttgcttg

SEQ ID NO: 1287708 - DNA, 15 bp, Homo sapiens
ccactcattttgctt

SEQ ID NO: 1287709 - DNA, 15 bp, Homo sapiens
cccactcattttgct

SEQ ID NO: 1287710 - DNA, 15 bp, Homo sapiens
tcccactcattttgc

SEQ ID NO: 1287711 - DNA, 15 bp, Homo sapiens
ttcccactcattttg

SEQ ID NO: 1287712 - DNA, 15 bp, Homo sapiens
gttcccactcatttt

SEQ ID NO: 1287713 - DNA, 15 bp, Homo sapiens
agttcccactcattt

SEQ ID NO: 1287714 - DNA, 15 bp, Homo sapiens
cagttcccactcatt

SEQ ID NO: 1287715 - DNA, 15 bp, Homo sapiens
ccagttcccactcat

SEQ ID NO: 1287716 - DNA, 15 bp, Homo sapiens
cccagttcccactca

SEQ ID NO: 1287717 - DNA, 15 bp, Homo sapiens
tcccagttcccactc

SEQ ID NO: 1287718 - DNA, 15 bp, Homo sapiens
ctcccagttcccact

SEQ ID NO: 1287719 - DNA, 15 bp, Homo sapiens
gctcccagttcccac

SEQ ID NO: 1287720 - DNA, 15 bp, Homo sapiens
cgctcccagttccca

SEQ ID NO: 1287721 - DNA, 15 bp, Homo sapiens
tcgctcccagttccc

SEQ ID NO: 1287722 - DNA, 15 bp, Homo sapiens
ctcgctcccagttcc

SEQ ID NO: 1287723 - DNA, 15 bp, Homo sapiens
gctcgctcccagttc

SEQ ID NO: 1287724 - DNA, 15 bp, Homo sapiens
tgctcgctcccagtt

SEQ ID NO: 1287725 - DNA, 15 bp, Homo sapiens
atgctcgctcccagt

SEQ ID NO: 1287726 - DNA, 15 bp, Homo sapiens
gatgctcgctcccag

SEQ ID NO: 1287727 - DNA, 15 bp, Homo sapiens
agatgctcgctccca

SEQ ID NO: 1287728 - DNA, 15 bp, Homo sapiens
aagatgctcgctccc

SEQ ID NO: 1287729 - DNA, 15 bp, Homo sapiens
taagatgctcgctcc

SEQ ID NO: 1287730 - DNA, 15 bp, Homo sapiens
ctaagatgctcgctc

SEQ ID NO: 1287731 - DNA, 15 bp, Homo sapiens
tctaagatgctcgct

SEQ ID NO: 1287732 - DNA, 15 bp, Homo sapiens
ctctaagatgctcgc

SEQ ID NO: 1287733 - DNA, 15 bp, Homo sapiens
tctctaagatgctcg

SEQ ID NO: 1287734 - DNA, 15 bp, Homo sapiens
atctctaagatgctc

SEQ ID NO: 1287735 - DNA, 15 bp, Homo sapiens
aatctctaagatgct

SEQ ID NO: 1287736 - DNA, 15 bp, Homo sapiens
taatctctaagatgc

SEQ ID NO: 1287737 - DNA, 15 bp, Homo sapiens
ctaatctctaagatg

SEQ ID NO: 1287738 - DNA, 15 bp, Homo sapiens
gctaatctctaagat

SEQ ID NO: 1287739 - DNA, 15 bp, Homo sapiens
tgctaatctctaaga

SEQ ID NO: 1287740 - DNA, 15 bp, Homo sapiens
atgctaatctctaag

SEQ ID NO: 1287741 - DNA, 15 bp, Homo sapiens
catgctaatctctaa

SEQ ID NO: 1287742 - DNA, 15 bp, Homo sapiens
acatgctaatctcta

SEQ ID NO: 1287743 - DNA, 15 bp, Homo sapiens
cacatgctaatctct

SEQ ID NO: 1287744 - DNA, 15 bp, Homo sapiens
acacatgctaatctc

SEQ ID NO: 1287745 - DNA, 15 bp, Homo sapiens
tacacatgctaatct

SEQ ID NO: 1287746 - DNA, 15 bp, Homo sapiens
gtacacatgctaatc

SEQ ID NO: 1287747 - DNA, 15 bp, Homo sapiens
tgtacacatgctaat

SEQ ID NO: 1287748 - DNA, 15 bp, Homo sapiens
ttgtacacatgctaa

SEQ ID NO: 1287749 - DNA, 15 bp, Homo sapiens
tttgtacacatgcta

SEQ ID NO: 1287750 - DNA, 15 bp, Homo sapiens
ctttgtacacatgct

SEQ ID NO: 1287751 - DNA, 15 bp, Homo sapiens
gctttgtacacatgc

SEQ ID NO: 1287752 - DNA, 15 bp, Homo sapiens
ggctttgtacacatg

SEQ ID NO: 1287753 - DNA, 15 bp, Homo sapiens
tggctttgtacacat

SEQ ID NO: 1287754 - DNA, 15 bp, Homo sapiens
ttggctttgtacaca

SEQ ID NO: 1287755 - DNA, 15 bp, Homo sapiens
tttggctttgtacac

SEQ ID NO: 1287756 - DNA, 15 bp, Homo sapiens
ctttggctttgtaca

SEQ ID NO: 1287757 - DNA, 15 bp, Homo sapiens
gctttggctttgtac

SEQ ID NO: 1287758 - DNA, 15 bp, Homo sapiens
tgctttggctttgta

SEQ ID NO: 1287759 - DNA, 15 bp, Homo sapiens
ctgctttggctttgt

SEQ ID NO: 1287760 - DNA, 15 bp, Homo sapiens
actgctttggctttg

SEQ ID NO: 1287761 - DNA, 15 bp, Homo sapiens
cactgctttggcttt

SEQ ID NO: 1287762 - DNA, 15 bp, Homo sapiens
tcactgctttggctt

SEQ ID NO: 1287763 - DNA, 15 bp, Homo sapiens
atcactgctttggct

SEQ ID NO: 1287764 - DNA, 15 bp, Homo sapiens
tatcactgctttggc

SEQ ID NO: 1287765 - DNA, 15 bp, Homo sapiens
atatcactgctttgg

SEQ ID NO: 1287766 - DNA, 15 bp, Homo sapiens
gatatcactgctttg

SEQ ID NO: 1287767 - DNA, 15 bp, Homo sapiens
tgatatcactgcttt

SEQ ID NO: 1287768 - DNA, 15 bp, Homo sapiens
ctgatatcactgctt

SEQ ID NO: 1287769 - DNA, 15 bp, Homo sapiens
cctgatatcactgct

SEQ ID NO: 1287770 - DNA, 15 bp, Homo sapiens
tcctgatatcactgc

SEQ ID NO: 1287771 - DNA, 15 bp, Homo sapiens
atcctgatatcactg

SEQ ID NO: 1287772 - DNA, 15 bp, Homo sapiens
catcctgatatcact

SEQ ID NO: 1287773 - DNA, 15 bp, Homo sapiens
acatcctgatatcac

SEQ ID NO: 1287774 - DNA, 15 bp, Homo sapiens
tacatcctgatatca

SEQ ID NO: 1287775 - DNA, 15 bp, Homo sapiens
gtacatcctgatatc

SEQ ID NO: 1287776 - DNA, 15 bp, Homo sapiens
agtacatcctgatat

SEQ ID NO: 1287777 - DNA, 15 bp, Homo sapiens
aagtacatcctgata

SEQ ID NO: 1287778 - DNA, 15 bp, Homo sapiens
aaagtacatcctgat

SEQ ID NO: 1287779 - DNA, 15 bp, Homo sapiens
caaagtacatcctga

SEQ ID NO: 1287780 - DNA, 15 bp, Homo sapiens
tcaaagtacatcctg

SEQ ID NO: 1287781 - DNA, 15 bp, Homo sapiens
atcaaagtacatcct

SEQ ID NO: 1287782 - DNA, 15 bp, Homo sapiens
tatcaaagtacatcc

SEQ ID NO: 1287783 - DNA, 15 bp, Homo sapiens
atatcaaagtacatc

SEQ ID NO: 1287784 - DNA, 15 bp, Homo sapiens
aatatcaaagtacat

SEQ ID NO: 1287785 - DNA, 15 bp, Homo sapiens
caatatcaaagtaca

SEQ ID NO: 1287786 - DNA, 15 bp, Homo sapiens
gcaatatcaaagtac

SEQ ID NO: 1287787 - DNA, 15 bp, Homo sapiens
agcaatatcaaagta

SEQ ID NO: 1287788 - DNA, 15 bp, Homo sapiens
tagcaatatcaaagt

SEQ ID NO: 1287789 - DNA, 15 bp, Homo sapiens
ttagcaatatcaaag

SEQ ID NO: 1287790 - DNA, 15 bp, Homo sapiens
attagcaatatcaaa

SEQ ID NO: 1287791 - DNA, 15 bp, Homo sapiens
cattagcaatatcaa

SEQ ID NO: 1287792 - DNA, 15 bp, Homo sapiens
ccattagcaatatca

SEQ ID NO: 1287793 - DNA, 15 bp, Homo sapiens
gccattagcaatatc

SEQ ID NO: 1287794 - DNA, 15 bp, Homo sapiens
agccattagcaatat

SEQ ID NO: 1287795 - DNA, 15 bp, Homo sapiens
cagccattagcaata

SEQ ID NO: 1287796 - DNA, 15 bp, Homo sapiens
tcagccattagcaat

SEQ ID NO: 1287797 - DNA, 15 bp, Homo sapiens
ttcagccattagcaa

SEQ ID NO: 1287798 - DNA, 15 bp, Homo sapiens
tttcagccattagca

SEQ ID NO: 1287799 - DNA, 15 bp, Homo sapiens
ctttcagccattagc

SEQ ID NO: 1287800 - DNA, 15 bp, Homo sapiens
cctttcagccattag

SEQ ID NO: 1287801 - DNA, 15 bp, Homo sapiens
acctttcagccatta

SEQ ID NO: 1287802 - DNA, 15 bp, Homo sapiens
tacctttcagccatt

SEQ ID NO: 1287803 - DNA, 15 bp, Homo sapiens
ttacctttcagccat

SEQ ID NO: 1287804 - DNA, 15 bp, Homo sapiens
cttacctttcagcca

SEQ ID NO: 1287805 - DNA, 15 bp, Homo sapiens
tcttacctttcagcc

SEQ ID NO: 1287806 - DNA, 15 bp, Homo sapiens
ttcttacctttcagc

SEQ ID NO: 1287807 - DNA, 15 bp, Homo sapiens
cttcttacctttcag

SEQ ID NO: 1287808 - DNA, 15 bp, Homo sapiens
ccttcttacctttca

SEQ ID NO: 1287809 - DNA, 15 bp, Homo sapiens
cccttcttacctttc

SEQ ID NO: 1287810 - DNA, 15 bp, Homo sapiens
tcccttcttaccttt

SEQ ID NO: 1287811 - DNA, 15 bp, Homo sapiens
atcccttcttacctt

SEQ ID NO: 1287812 - DNA, 15 bp, Homo sapiens
gatcccttcttacct

SEQ ID NO: 1287813 - DNA, 15 bp, Homo sapiens
tgatcccttcttacc

SEQ ID NO: 1287814 - DNA, 15 bp, Homo sapiens
ctgatcccttcttac

SEQ ID NO: 1287815 - DNA, 15 bp, Homo sapiens
tctgatcccttctta

SEQ ID NO: 1287816 - DNA, 15 bp, Homo sapiens
atctgatcccttctt

SEQ ID NO: 1287817 - DNA, 15 bp, Homo sapiens
aatctgatcccttct

SEQ ID NO: 1287818 - DNA, 15 bp, Homo sapiens
caatctgatcccttc

SEQ ID NO: 1287819 - DNA, 15 bp, Homo sapiens
ccaatctgatccctt

SEQ ID NO: 1287820 - DNA, 15 bp, Homo sapiens
accaatctgatccct

SEQ ID NO: 1287821 - DNA, 15 bp, Homo sapiens
taccaatctgatccc

SEQ ID NO: 1287822 - DNA, 15 bp, Homo sapiens
ctaccaatctgatcc

SEQ ID NO: 1287823 - DNA, 15 bp, Homo sapiens
actaccaatctgatc

SEQ ID NO: 1287824 - DNA, 15 bp, Homo sapiens
tactaccaatctgat

SEQ ID NO: 1287825 - DNA, 15 bp, Homo sapiens
ttactaccaatctga

SEQ ID NO: 1287826 - DNA, 15 bp, Homo sapiens
attactaccaatctg

SEQ ID NO: 1287827 - DNA, 15 bp, Homo sapiens
gattactaccaatct

SEQ ID NO: 1287828 - DNA, 15 bp, Homo sapiens
agattactaccaatc

SEQ ID NO: 1287829 - DNA, 15 bp, Homo sapiens
aagattactaccaat

SEQ ID NO: 1287830 - DNA, 15 bp, Homo sapiens
caagattactaccaa

SEQ ID NO: 1287831 - DNA, 15 bp, Homo sapiens
ccaagattactacca

SEQ ID NO: 1287832 - DNA, 15 bp, Homo sapiens
cccaagattactacc

SEQ ID NO: 1287833 - DNA, 15 bp, Homo sapiens
gcccaagattactac

SEQ ID NO: 1287834 - DNA, 15 bp, Homo sapiens
agcccaagattacta

SEQ ID NO: 1287835 - DNA, 15 bp, Homo sapiens
aagcccaagattact

SEQ ID NO: 1287836 - DNA, 15 bp, Homo sapiens
aaagcccaagattac

SEQ ID NO: 1287837 - DNA, 15 bp, Homo sapiens
caaagcccaagatta

SEQ ID NO: 1287838 - DNA, 15 bp, Homo sapiens
gcaaagcccaagatt

SEQ ID NO: 1287839 - DNA, 15 bp, Homo sapiens
ggcaaagcccaagat

SEQ ID NO: 1287840 - DNA, 15 bp, Homo sapiens
gggcaaagcccaaga

SEQ ID NO: 1287841 - DNA, 15 bp, Homo sapiens
agggcaaagcccaag

SEQ ID NO: 1287842 - DNA, 15 bp, Homo sapiens
cagggcaaagcccaa

SEQ ID NO: 1287843 - DNA, 15 bp, Homo sapiens
gcagggcaaagccca

SEQ ID NO: 1287844 - DNA, 15 bp, Homo sapiens
tgcagggcaaagccc

SEQ ID NO: 1287845 - DNA, 15 bp, Homo sapiens
ctgcagggcaaagcc

SEQ ID NO: 1287846 - DNA, 15 bp, Homo sapiens
cctgcagggcaaagc

SEQ ID NO: 1287847 - DNA, 15 bp, Homo sapiens
gcctgcagggcaaag

SEQ ID NO: 1287848 - DNA, 15 bp, Homo sapiens
tgcctgcagggcaaa

SEQ ID NO: 1287849 - DNA, 15 bp, Homo sapiens
ctgcctgcagggcaa

SEQ ID NO: 1287850 - DNA, 15 bp, Homo sapiens
actgcctgcagggca

SEQ ID NO: 1287851 - DNA, 15 bp, Homo sapiens
cactgcctgcagggc

SEQ ID NO: 1287852 - DNA, 15 bp, Homo sapiens
ccactgcctgcaggg

SEQ ID NO: 1287853 - DNA, 15 bp, Homo sapiens
tccactgcctgcagg

SEQ ID NO: 1287854 - DNA, 15 bp, Homo sapiens
ttccactgcctgcag

SEQ ID NO: 1287855 - DNA, 15 bp, Homo sapiens
tttccactgcctgca

SEQ ID NO: 1287856 - DNA, 15 bp, Homo sapiens
gtttccactgcctgc

SEQ ID NO: 1287857 - DNA, 15 bp, Homo sapiens
agtttccactgcctg

SEQ ID NO: 1287858 - DNA, 15 bp, Homo sapiens
gagtttccactgcct

SEQ ID NO: 1287859 - DNA, 15 bp, Homo sapiens
ggagtttccactgcc

SEQ ID NO: 1287860 - DNA, 15 bp, Homo sapiens
aggagtttccactgc

SEQ ID NO: 1287861 - DNA, 15 bp, Homo sapiens
aaggagtttccactg

SEQ ID NO: 1287862 - DNA, 15 bp, Homo sapiens
caaggagtttccact

SEQ ID NO: 1287863 - DNA, 15 bp, Homo sapiens
tcaaggagtttccac

SEQ ID NO: 1287864 - DNA, 15 bp, Homo sapiens
ttcaaggagtttcca

SEQ ID NO: 1287865 - DNA, 15 bp, Homo sapiens
attcaaggagtttcc

SEQ ID NO: 1287866 - DNA, 15 bp, Homo sapiens
cattcaaggagtttc

SEQ ID NO: 1287867 - DNA, 15 bp, Homo sapiens
tcattcaaggagttt

SEQ ID NO: 1287868 - DNA, 15 bp, Homo sapiens
atcattcaaggagtt

SEQ ID NO: 1287869 - DNA, 15 bp, Homo sapiens
aatcattcaaggagt

SEQ ID NO: 1287870 - DNA, 15 bp, Homo sapiens
aaatcattcaaggag

SEQ ID NO: 1287871 - DNA, 15 bp, Homo sapiens
aaaatcattcaagga

SEQ ID NO: 1287872 - DNA, 15 bp, Homo sapiens
taaaatcattcaagg

SEQ ID NO: 1287873 - DNA, 15 bp, Homo sapiens
ttaaaatcattcaag

SEQ ID NO: 1287874 - DNA, 15 bp, Homo sapiens
tttaaaatcattcaa

SEQ ID NO: 1287875 - DNA, 15 bp, Homo sapiens
gtttaaaatcattca

SEQ ID NO: 1287876 - DNA, 15 bp, Homo sapiens
agtttaaaatcattc

SEQ ID NO: 1287877 - DNA, 15 bp, Homo sapiens
tagtttaaaatcatt

SEQ ID NO: 1287878 - DNA, 15 bp, Homo sapiens
ctagtttaaaatcat

SEQ ID NO: 1287879 - DNA, 15 bp, Homo sapiens
cctagtttaaaatca

SEQ ID NO: 1287880 - DNA, 15 bp, Homo sapiens
ccctagtttaaaatc

SEQ ID NO: 1287881 - DNA, 15 bp, Homo sapiens
tccctagtttaaaat

SEQ ID NO: 1287882 - DNA, 15 bp, Homo sapiens
ctccctagtttaaaa

SEQ ID NO: 1287883 - DNA, 15 bp, Homo sapiens
actccctagtttaaa

SEQ ID NO: 1287884 - DNA, 15 bp, Homo sapiens
tactccctagtttaa

SEQ ID NO: 1287885 - DNA, 15 bp, Homo sapiens
ttactccctagttta

SEQ ID NO: 1287886 - DNA, 15 bp, Homo sapiens
gttactccctagttt

SEQ ID NO: 1287887 - DNA, 15 bp, Homo sapiens
tgttactccctagtt

SEQ ID NO: 1287888 - DNA, 15 bp, Homo sapiens
ctgttactccctagt

SEQ ID NO: 1287889 - DNA, 15 bp, Homo sapiens
actgttactccctag

SEQ ID NO: 1287890 - DNA, 15 bp, Homo sapiens
aactgttactcccta

SEQ ID NO: 1287891 - DNA, 15 bp, Homo sapiens
caactgttactccct

SEQ ID NO: 1287892 - DNA, 15 bp, Homo sapiens
ccaactgttactccc

SEQ ID NO: 1287893 - DNA, 15 bp, Homo sapiens
tccaactgttactcc

SEQ ID NO: 1287894 - DNA, 15 bp, Homo sapiens
atccaactgttactc

SEQ ID NO: 1287895 - DNA, 15 bp, Homo sapiens
aatccaactgttact

SEQ ID NO: 1287896 - DNA, 15 bp, Homo sapiens
aaatccaactgttac

SEQ ID NO: 1287897 - DNA, 15 bp, Homo sapiens
caaatccaactgtta

SEQ ID NO: 1287898 - DNA, 15 bp, Homo sapiens
ccaaatccaactgtt

SEQ ID NO: 1287899 - DNA, 15 bp, Homo sapiens
gccaaatccaactgt

SEQ ID NO: 1287900 - DNA, 15 bp, Homo sapiens
ggccaaatccaactg

SEQ ID NO: 1287901 - DNA, 15 bp, Homo sapiens
aggccaaatccaact

SEQ ID NO: 1287902 - DNA, 15 bp, Homo sapiens
gaggccaaatccaac

SEQ ID NO: 1287903 - DNA, 15 bp, Homo sapiens
tgaggccaaatccaa

SEQ ID NO: 1287904 - DNA, 15 bp, Homo sapiens
ttgaggccaaatcca

SEQ ID NO: 1287905 - DNA, 15 bp, Homo sapiens
tttgaggccaaatcc

SEQ ID NO: 1287906 - DNA, 15 bp, Homo sapiens
ttttgaggccaaatc

SEQ ID NO: 1287907 - DNA, 15 bp, Homo sapiens
cttttgaggccaaat

SEQ ID NO: 1287908 - DNA, 15 bp, Homo sapiens
tcttttgaggccaaa

SEQ ID NO: 1287909 - DNA, 15 bp, Homo sapiens
gtcttttgaggccaa

SEQ ID NO: 1287910 - DNA, 15 bp, Homo sapiens
ggtcttttgaggcca

SEQ ID NO: 1287911 - DNA, 15 bp, Homo sapiens
tggtcttttgaggcc

SEQ ID NO: 1287912 - DNA, 15 bp, Homo sapiens
gtggtcttttgaggc

SEQ ID NO: 1287913 - DNA, 15 bp, Homo sapiens
agtggtcttttgagg

SEQ ID NO: 1287914 - DNA, 15 bp, Homo sapiens
gagtggtcttttgag

SEQ ID NO: 1287915 - DNA, 15 bp, Homo sapiens
tgagtggtcttttga

SEQ ID NO: 1287916 - DNA, 15 bp, Homo sapiens
ctgagtggtcttttg

SEQ ID NO: 1287917 - DNA, 15 bp, Homo sapiens
cctgagtggtctttt

SEQ ID NO: 1287918 - DNA, 15 bp, Homo sapiens
tcctgagtggtcttt

SEQ ID NO: 1287919 - DNA, 15 bp, Homo sapiens
gtcctgagtggtctt

SEQ ID NO: 1287920 - DNA, 15 bp, Homo sapiens
agtcctgagtggtct

SEQ ID NO: 1287921 - DNA, 15 bp, Homo sapiens
aagtcctgagtggtc

SEQ ID NO: 1287922 - DNA, 15 bp, Homo sapiens
aaagtcctgagtggt

SEQ ID NO: 1287923 - DNA, 15 bp, Homo sapiens
caaagtcctgagtgg

SEQ ID NO: 1287924 - DNA, 15 bp, Homo sapiens
acaaagtcctgagtg

SEQ ID NO: 1287925 - DNA, 15 bp, Homo sapiens
tacaaagtcctgagt

SEQ ID NO: 1287926 - DNA, 15 bp, Homo sapiens
ttacaaagtcctgag

SEQ ID NO: 1287927 - DNA, 15 bp, Homo sapiens
tttacaaagtcctga

SEQ ID NO: 1287928 - DNA, 15 bp, Homo sapiens
ttttacaaagtcctg

SEQ ID NO: 1287929 - DNA, 15 bp, Homo sapiens
cttttacaaagtcct

SEQ ID NO: 1287930 - DNA, 15 bp, Homo sapiens
ccttttacaaagtcc

SEQ ID NO: 1287931 - DNA, 15 bp, Homo sapiens
cccttttacaaagtc

SEQ ID NO: 1287932 - DNA, 15 bp, Homo sapiens
tcccttttacaaagt

SEQ ID NO: 1287933 - DNA, 15 bp, Homo sapiens
atcccttttacaaag

SEQ ID NO: 1287934 - DNA, 15 bp, Homo sapiens
aatcccttttacaaa

SEQ ID NO: 1287935 - DNA, 15 bp, Homo sapiens
aaatcccttttacaa

SEQ ID NO: 1287936 - DNA, 15 bp, Homo sapiens
taaatcccttttaca

SEQ ID NO: 1287937 - DNA, 15 bp, Homo sapiens
ttaaatcccttttac

SEQ ID NO: 1287938 - DNA, 15 bp, Homo sapiens
tttaaatccctttta

SEQ ID NO: 1287939 - DNA, 15 bp, Homo sapiens
ttttaaatccctttt

SEQ ID NO: 1287940 - DNA, 15 bp, Homo sapiens
attttaaatcccttt

SEQ ID NO: 1287941 - DNA, 15 bp, Homo sapiens
aattttaaatccctt

SEQ ID NO: 1287942 - DNA, 15 bp, Homo sapiens
aaattttaaatccct

SEQ ID NO: 1287943 - DNA, 15 bp, Homo sapiens
aaaattttaaatccc

SEQ ID NO: 1287944 - DNA, 15 bp, Homo sapiens
aaaaattttaaatcc

SEQ ID NO: 1287945 - DNA, 15 bp, Homo sapiens
taaaaattttaaatc

SEQ ID NO: 1287946 - DNA, 15 bp, Homo sapiens
ataaaaattttaaat

SEQ ID NO: 1287947 - DNA, 15 bp, Homo sapiens
aataaaaattttaaa

SEQ ID NO: 1287948 - DNA, 15 bp, Homo sapiens
caataaaaattttaa

SEQ ID NO: 1287949 - DNA, 15 bp, Homo sapiens
tcaataaaaatttta

SEQ ID NO: 1287950 - DNA, 15 bp, Homo sapiens
gtcaataaaaatttt

SEQ ID NO: 1287951 - DNA, 15 bp, Homo sapiens
tgtcaataaaaattt

SEQ ID NO: 1287952 - DNA, 15 bp, Homo sapiens
ttgtcaataaaaatt

SEQ ID NO: 1287953 - DNA, 15 bp, Homo sapiens
tttgtcaataaaaat

SEQ ID NO: 1287954 - DNA, 15 bp, Homo sapiens
atttgtcaataaaaa

SEQ ID NO: 1287955 - DNA, 15 bp, Homo sapiens
gatttgtcaataaaa

SEQ ID NO: 1287956 - DNA, 15 bp, Homo sapiens
tgatttgtcaataaa

SEQ ID NO: 1287957 - DNA, 15 bp, Homo sapiens
atgatttgtcaataa

SEQ ID NO: 1287958 - DNA, 15 bp, Homo sapiens
tatgatttgtcaata

SEQ ID NO: 1287959 - DNA, 15 bp, Homo sapiens
atatgatttgtcaat

SEQ ID NO: 1287960 - DNA, 15 bp, Homo sapiens
catatgatttgtcaa

SEQ ID NO: 1287961 - DNA, 15 bp, Homo sapiens
tcatatgatttgtca

SEQ ID NO: 1287962 - DNA, 15 bp, Homo sapiens
ctcatatgatttgtc

SEQ ID NO: 1287963 - DNA, 15 bp, Homo sapiens
tctcatatgatttgt

SEQ ID NO: 1287964 - DNA, 15 bp, Homo sapiens
atctcatatgatttg

SEQ ID NO: 1287965 - DNA, 15 bp, Homo sapiens
tatctcatatgattt

SEQ ID NO: 1287966 - DNA, 15 bp, Homo sapiens
ttatctcatatgatt

SEQ ID NO: 1287967 - DNA, 15 bp, Homo sapiens
attatctcatatgat

SEQ ID NO: 1287968 - DNA, 15 bp, Homo sapiens
aattatctcatatga

SEQ ID NO: 1287969 - DNA, 15 bp, Homo sapiens
aaattatctcatatg

SEQ ID NO: 1287970 - DNA, 15 bp, Homo sapiens
taaattatctcatat

SEQ ID NO: 1287971 - DNA, 15 bp, Homo sapiens
ttaaattatctcata

SEQ ID NO: 1287972 - DNA, 15 bp, Homo sapiens
tttaaattatctcat

SEQ ID NO: 1287973 - DNA, 15 bp, Homo sapiens
ctttaaattatctca

SEQ ID NO: 1287974 - DNA, 15 bp, Homo sapiens
tctttaaattatctc

SEQ ID NO: 1287975 - DNA, 15 bp, Homo sapiens
ctctttaaattatct

SEQ ID NO: 1287976 - DNA, 15 bp, Homo sapiens
actctttaaattatc

SEQ ID NO: 1287977 - DNA, 15 bp, Homo sapiens
tactctttaaattat

SEQ ID NO: 1287978 - DNA, 15 bp, Homo sapiens
ttactctttaaatta

SEQ ID NO: 1287979 - DNA, 15 bp, Homo sapiens
tttactctttaaatt

SEQ ID NO: 1287980 - DNA, 15 bp, Homo sapiens
gtttactctttaaat

SEQ ID NO: 1287981 - DNA, 15 bp, Homo sapiens
agtttactctttaaa

SEQ ID NO: 1287982 - DNA, 15 bp, Homo sapiens
aagtttactctttaa

SEQ ID NO: 1287983 - DNA, 15 bp, Homo sapiens
aaagtttactcttta

SEQ ID NO: 1287984 - DNA, 15 bp, Homo sapiens
taaagtttactcttt

SEQ ID NO: 1287985 - DNA, 15 bp, Homo sapiens
gtaaagtttactctt

SEQ ID NO: 1287986 - DNA, 15 bp, Homo sapiens
agtaaagtttactct

SEQ ID NO: 1287987 - DNA, 15 bp, Homo sapiens
tagtaaagtttactc

SEQ ID NO: 1287988 - DNA, 15 bp, Homo sapiens
ttagtaaagtttact

SEQ ID NO: 1287989 - DNA, 15 bp, Homo sapiens
gttagtaaagtttac

SEQ ID NO: 1287990 - DNA, 15 bp, Homo sapiens
ggttagtaaagttta

SEQ ID NO: 1287991 - DNA, 15 bp, Homo sapiens
aggttagtaaagttt

SEQ ID NO: 1287992 - DNA, 15 bp, Homo sapiens
aaggttagtaaagtt

SEQ ID NO: 1287993 - DNA, 15 bp, Homo sapiens
taaggttagtaaagt

SEQ ID NO: 1287994 - DNA, 15 bp, Homo sapiens
ctaaggttagtaaag

SEQ ID NO: 1287995 - DNA, 15 bp, Homo sapiens
cctaaggttagtaaa

SEQ ID NO: 1287996 - DNA, 15 bp, Homo sapiens
acctaaggttagtaa

SEQ ID NO: 1287997 - DNA, 15 bp, Homo sapiens
cacctaaggttagta

SEQ ID NO: 1287998 - DNA, 15 bp, Homo sapiens
ccacctaaggttagt

SEQ ID NO: 1287999 - DNA, 15 bp, Homo sapiens
tccacctaaggttag

SEQ ID NO: 1288000 - DNA, 15 bp, Homo sapiens
atccacctaaggtta

SEQ ID NO: 1288001 - DNA, 15 bp, Homo sapiens
gatccacctaaggtt

SEQ ID NO: 1288002 - DNA, 15 bp, Homo sapiens
tgatccacctaaggt

SEQ ID NO: 1288003 - DNA, 15 bp, Homo sapiens
ctgatccacctaagg

SEQ ID NO: 1288004 - DNA, 15 bp, Homo sapiens
gctgatccacctaag

SEQ ID NO: 1288005 - DNA, 15 bp, Homo sapiens
agctgatccacctaa

SEQ ID NO: 1288006 - DNA, 15 bp, Homo sapiens
cagctgatccaccta

SEQ ID NO: 1288007 - DNA, 15 bp, Homo sapiens
ccagctgatccacct

SEQ ID NO: 1288008 - DNA, 15 bp, Homo sapiens
cccagctgatccacc

SEQ ID NO: 1288009 - DNA, 15 bp, Homo sapiens
acccagctgatccac

SEQ ID NO: 1288010 - DNA, 15 bp, Homo sapiens
cacccagctgatcca

SEQ ID NO: 1288011 - DNA, 15 bp, Homo sapiens
acacccagctgatcc

SEQ ID NO: 1288012 - DNA, 15 bp, Homo sapiens
aacacccagctgatc

SEQ ID NO: 1288013 - DNA, 15 bp, Homo sapiens
aaacacccagctgat

SEQ ID NO: 1288014 - DNA, 15 bp, Homo sapiens
aaaacacccagctga

SEQ ID NO: 1288015 - DNA, 15 bp, Homo sapiens
gaaaacacccagctg

SEQ ID NO: 1288016 - DNA, 15 bp, Homo sapiens
agaaaacacccagct

SEQ ID NO: 1288017 - DNA, 15 bp, Homo sapiens
tagaaaacacccagc

SEQ ID NO: 1288018 - DNA, 15 bp, Homo sapiens
atagaaaacacccag

SEQ ID NO: 1288019 - DNA, 15 bp, Homo sapiens
gatagaaaacaccca

SEQ ID NO: 1288020 - DNA, 15 bp, Homo sapiens
agatagaaaacaccc

SEQ ID NO: 1288021 - DNA, 15 bp, Homo sapiens
aagatagaaaacacc

SEQ ID NO: 1288022 - DNA, 15 bp, Homo sapiens
taagatagaaaacac

SEQ ID NO: 1288023 - DNA, 15 bp, Homo sapiens
ataagatagaaaaca

SEQ ID NO: 1288024 - DNA, 15 bp, Homo sapiens
taaataagatagaaa

SEQ ID NO: 1288025 - DNA, 15 bp, Homo sapiens
ataaataagatagaa

SEQ ID NO: 1288026 - DNA, 15 bp, Homo sapiens
tataaataagataga

SEQ ID NO: 1288027 - DNA, 15 bp, Homo sapiens
gtataaataagatag

SEQ ID NO: 1288028 - DNA, 15 bp, Homo sapiens
ggtataaataagata

SEQ ID NO: 1288029 - DNA, 15 bp, Homo sapiens
aggtataaataagat

SEQ ID NO: 1288030 - DNA, 15 bp, Homo sapiens
aaggtataaataaga

SEQ ID NO: 1288031 - DNA, 15 bp, Homo sapiens
aaaggtataaataag

SEQ ID NO: 1288032 - DNA, 15 bp, Homo sapiens
aaaaggtataaataa

SEQ ID NO: 1288033 - DNA, 15 bp, Homo sapiens
aaaaaggtataaata

SEQ ID NO: 1288034 - DNA, 15 bp, Homo sapiens
aaaaaaggtataaat

SEQ ID NO: 1288035 - DNA, 15 bp, Homo sapiens
aaaaaaaggtataaa

SEQ ID NO: 1288036 - DNA, 15 bp, Homo sapiens
aaaaaaaaggtataa

SEQ ID NO: 1288037 - DNA, 15 bp, Homo sapiens
caaaaaaaaggtata

SEQ ID NO: 1288038 - DNA, 15 bp, Homo sapiens
tcaaaaaaaaggtat

SEQ ID NO: 1288039 - DNA, 15 bp, Homo sapiens
ttcaaaaaaaaggta

SEQ ID NO: 1288040 - DNA, 15 bp, Homo sapiens
cttcaaaaaaaaggt

SEQ ID NO: 1288041 - DNA, 15 bp, Homo sapiens
tcttcaaaaaaaagg

SEQ ID NO: 1288042 - DNA, 15 bp, Homo sapiens
gtcttcaaaaaaaag

SEQ ID NO: 1288043 - DNA, 15 bp, Homo sapiens
agtcttcaaaaaaaa

SEQ ID NO: 1288044 - DNA, 15 bp, Homo sapiens
tagtcttcaaaaaaa

SEQ ID NO: 1288045 - DNA, 15 bp, Homo sapiens
ttagtcttcaaaaaa

SEQ ID NO: 1288046 - DNA, 15 bp, Homo sapiens
attagtcttcaaaaa

SEQ ID NO: 1288047 - DNA, 15 bp, Homo sapiens
caattagtcttcaaa

SEQ ID NO: 1288048 - DNA, 15 bp, Homo sapiens
tcaattagtcttcaa

SEQ ID NO: 1288049 - DNA, 15 bp, Homo sapiens
ctcaattagtcttca

SEQ ID NO: 1288050 - DNA, 15 bp, Homo sapiens
tctcaattagtcttc

SEQ ID NO: 1288051 - DNA, 15 bp, Homo sapiens
ctctcaattagtctt

SEQ ID NO: 1288052 - DNA, 15 bp, Homo sapiens
cctctcaattagtct

SEQ ID NO: 1288053 - DNA, 15 bp, Homo sapiens
tcctctcaattagtc

SEQ ID NO: 1288054 - DNA, 15 bp, Homo sapiens
atcctctcaattagt

SEQ ID NO: 1288055 - DNA, 15 bp, Homo sapiens
aatcctctcaattag

SEQ ID NO: 1288056 - DNA, 15 bp, Homo sapiens
taatcctctcaatta

SEQ ID NO: 1288057 - DNA, 15 bp, Homo sapiens
ttaatcctctcaatt

SEQ ID NO: 1288058 - DNA, 15 bp, Homo sapiens
gttaatcctctcaat

SEQ ID NO: 1288059 - DNA, 15 bp, Homo sapiens
agttaatcctctcaa

SEQ ID NO: 1288060 - DNA, 15 bp, Homo sapiens
cagttaatcctctca

SEQ ID NO: 1288061 - DNA, 15 bp, Homo sapiens
acagttaatcctctc

SEQ ID NO: 1288062 - DNA, 15 bp, Homo sapiens
tacagttaatcctct

SEQ ID NO: 1288063 - DNA, 15 bp, Homo sapiens
ttacagttaatcctc

SEQ ID NO: 1288064 - DNA, 15 bp, Homo sapiens
attacagttaatcct

SEQ ID NO: 1288065 - DNA, 15 bp, Homo sapiens
aattacagttaatcc

SEQ ID NO: 1288066 - DNA, 15 bp, Homo sapiens
taattacagttaatc

SEQ ID NO: 1288067 - DNA, 15 bp, Homo sapiens
ataattacagttaat

SEQ ID NO: 1288068 - DNA, 15 bp, Homo sapiens
tataattacagttaa

SEQ ID NO: 1288069 - DNA, 15 bp, Homo sapiens
atataattacagtta

SEQ ID NO: 1288070 - DNA, 15 bp, Homo sapiens
tatataattacagtt

SEQ ID NO: 1288071 - DNA, 15 bp, Homo sapiens
atatataattacagt

SEQ ID NO: 1288072 - DNA, 15 bp, Homo sapiens
aatatataattacag

SEQ ID NO: 1288073 - DNA, 15 bp, Homo sapiens
taatatataattaca

SEQ ID NO: 1288074 - DNA, 15 bp, Homo sapiens
ttaatatataattac

SEQ ID NO: 1288075 - DNA, 15 bp, Homo sapiens
tttaatatataatta

SEQ ID NO: 1288076 - DNA, 15 bp, Homo sapiens
ctttaatatataatt

SEQ ID NO: 1288077 - DNA, 15 bp, Homo sapiens
actttaatatataat

SEQ ID NO: 1288078 - DNA, 15 bp, Homo sapiens
cactttaatatataa

SEQ ID NO: 1288079 - DNA, 15 bp, Homo sapiens
tcactttaatatata

SEQ ID NO: 1288080 - DNA, 15 bp, Homo sapiens
atcactttaatatat

SEQ ID NO: 1288081 - DNA, 15 bp, Homo sapiens
catcactttaatata

SEQ ID NO: 1288082 - DNA, 15 bp, Homo sapiens
acatcactttaatat

SEQ ID NO: 1288083 - DNA, 15 bp, Homo sapiens
cacatcactttaata

SEQ ID NO: 1288084 - DNA, 15 bp, Homo sapiens
tcacatcactttaat

SEQ ID NO: 1288085 - DNA, 15 bp, Homo sapiens
ctcacatcactttaa

SEQ ID NO: 1288086 - DNA, 15 bp, Homo sapiens
tctcacatcacttta

SEQ ID NO: 1288087 - DNA, 15 bp, Homo sapiens
atctcacatcacttt

SEQ ID NO: 1288088 - DNA, 15 bp, Homo sapiens
catctcacatcactt

SEQ ID NO: 1288089 - DNA, 15 bp, Homo sapiens
acatctcacatcact

SEQ ID NO: 1288090 - DNA, 15 bp, Homo sapiens
gacatctcacatcac

SEQ ID NO: 1288091 - DNA, 15 bp, Homo sapiens
tgacatctcacatca

SEQ ID NO: 1288092 - DNA, 15 bp, Homo sapiens
atgacatctcacatc

SEQ ID NO: 1288093 - DNA, 15 bp, Homo sapiens
tatgacatctcacat

SEQ ID NO: 1288094 - DNA, 15 bp, Homo sapiens
ttatgacatctcaca

SEQ ID NO: 1288095 - DNA, 15 bp, Homo sapiens
tttatgacatctcac

SEQ ID NO: 1288096 - DNA, 15 bp, Homo sapiens
atttatgacatctca

SEQ ID NO: 1288097 - DNA, 15 bp, Homo sapiens
aatttatgacatctc

SEQ ID NO: 1288098 - DNA, 15 bp, Homo sapiens
caatttatgacatct

SEQ ID NO: 1288099 - DNA, 15 bp, Homo sapiens
ccaatttatgacatc

SEQ ID NO: 1288100 - DNA, 15 bp, Homo sapiens
cccaatttatgacat

SEQ ID NO: 1288101 - DNA, 15 bp, Homo sapiens
tcccaatttatgaca

SEQ ID NO: 1288102 - DNA, 15 bp, Homo sapiens
ttcccaatttatgac

SEQ ID NO: 1288103 - DNA, 15 bp, Homo sapiens
tttcccaatttatga

SEQ ID NO: 1288104 - DNA, 15 bp, Homo sapiens
ttttcccaatttatg

SEQ ID NO: 1288105 - DNA, 15 bp, Homo sapiens
attttcccaatttat

SEQ ID NO: 1288106 - DNA, 15 bp, Homo sapiens
gattttcccaattta

SEQ ID NO: 1288107 - DNA, 15 bp, Homo sapiens
agattttcccaattt

SEQ ID NO: 1288108 - DNA, 15 bp, Homo sapiens
tagattttcccaatt

SEQ ID NO: 1288109 - DNA, 15 bp, Homo sapiens
gtagattttcccaat

SEQ ID NO: 1288110 - DNA, 15 bp, Homo sapiens
agtagattttcccaa

SEQ ID NO: 1288111 - DNA, 15 bp, Homo sapiens
aagtagattttccca

SEQ ID NO: 1288112 - DNA, 15 bp, Homo sapiens
caagtagattttccc

SEQ ID NO: 1288113 - DNA, 15 bp, Homo sapiens
tcaagtagattttcc

SEQ ID NO: 1288114 - DNA, 15 bp, Homo sapiens
ttcaagtagattttc

SEQ ID NO: 1288115 - DNA, 15 bp, Homo sapiens
gttcaagtagatttt

SEQ ID NO: 1288116 - DNA, 15 bp, Homo sapiens
agttcaagtagattt

SEQ ID NO: 1288117 - DNA, 15 bp, Homo sapiens
aagttcaagtagatt

SEQ ID NO: 1288118 - DNA, 15 bp, Homo sapiens
aaagttcaagtagat

SEQ ID NO: 1288119 - DNA, 15 bp, Homo sapiens
caaagttcaagtaga

SEQ ID NO: 1288120 - DNA, 15 bp, Homo sapiens
acaaagttcaagtag

SEQ ID NO: 1288121 - DNA, 15 bp, Homo sapiens
aacaaagttcaagta

SEQ ID NO: 1288122 - DNA, 15 bp, Homo sapiens
aaacaaagttcaagt

SEQ ID NO: 1288123 - DNA, 15 bp, Homo sapiens
aaaacaaagttcaag

SEQ ID NO: 1288124 - DNA, 15 bp, Homo sapiens
taaaacaaagttcaa

SEQ ID NO: 1288125 - DNA, 15 bp, Homo sapiens
ataaaacaaagttca

SEQ ID NO: 1288126 - DNA, 15 bp, Homo sapiens
tataaaacaaagttc

SEQ ID NO: 1288127 - DNA, 15 bp, Homo sapiens
ttataaaacaaagtt

SEQ ID NO: 1288128 - DNA, 15 bp, Homo sapiens
attataaaacaaagt

SEQ ID NO: 1288129 - DNA, 15 bp, Homo sapiens
cattataaaacaaag

SEQ ID NO: 1288130 - DNA, 15 bp, Homo sapiens
gcattataaaacaaa

SEQ ID NO: 1288131 - DNA, 15 bp, Homo sapiens
agcattataaaacaa

SEQ ID NO: 1288132 - DNA, 15 bp, Homo sapiens
tagcattataaaaca

SEQ ID NO: 1288133 - DNA, 15 bp, Homo sapiens
atagcattataaaac

SEQ ID NO: 1288134 - DNA, 15 bp, Homo sapiens
tatagcattataaaa

SEQ ID NO: 1288135 - DNA, 15 bp, Homo sapiens
atatagcattataaa

SEQ ID NO: 1288136 - DNA, 15 bp, Homo sapiens
tatatagcattataa

SEQ ID NO: 1288137 - DNA, 15 bp, Homo sapiens
atatatagcattata

SEQ ID NO: 1288138 - DNA, 15 bp, Homo sapiens
aatatatagcattat

SEQ ID NO: 1288139 - DNA, 15 bp, Homo sapiens
aaatatatagcatta

SEQ ID NO: 1288140 - DNA, 15 bp, Homo sapiens
aaaatatatagcatt

SEQ ID NO: 1288141 - DNA, 15 bp, Homo sapiens
aaaaatatatagcat

SEQ ID NO: 1288142 - DNA, 15 bp, Homo sapiens
aaaaaatatatagca

SEQ ID NO: 1288143 - DNA, 15 bp, Homo sapiens
caaaaaatatatagc

SEQ ID NO: 1288144 - DNA, 15 bp, Homo sapiens
acaaaaaatatatag

SEQ ID NO: 1288145 - DNA, 15 bp, Homo sapiens
aacaaaaaatatata

SEQ ID NO: 1288146 - DNA, 15 bp, Homo sapiens
aaacaaaaaatatat

SEQ ID NO: 1288147 - DNA, 15 bp, Homo sapiens
aaaacaaaaaatata

SEQ ID NO: 1288148 - DNA, 15 bp, Homo sapiens
aaaaacaaaaaatat

SEQ ID NO: 1288149 - DNA, 15 bp, Homo sapiens
taaaaacaaaaaata

SEQ ID NO: 1288150 - DNA, 15 bp, Homo sapiens
ttaaaaacaaaaaat

SEQ ID NO: 1288151 - DNA, 15 bp, Homo sapiens
tttaaaaacaaaaaa

SEQ ID NO: 1288152 - DNA, 15 bp, Homo sapiens
ttttaaaaacaaaaa

SEQ ID NO: 1288153 - DNA, 15 bp, Homo sapiens
attttaaaaacaaaa

SEQ ID NO: 1288154 - DNA, 15 bp, Homo sapiens
tattttaaaaacaaa

SEQ ID NO: 1288155 - DNA, 15 bp, Homo sapiens
atattttaaaaacaa

SEQ ID NO: 1288156 - DNA, 15 bp, Homo sapiens
tatattttaaaaaca

SEQ ID NO: 1288157 - DNA, 15 bp, Homo sapiens
atatattttaaaaac

SEQ ID NO: 1288158 - DNA, 15 bp, Homo sapiens
tatatattttaaaaa

SEQ ID NO: 1288159 - DNA, 15 bp, Homo sapiens
gtatatattttaaaa

SEQ ID NO: 1288160 - DNA, 15 bp, Homo sapiens
agtatatattttaaa

SEQ ID NO: 1288161 - DNA, 15 bp, Homo sapiens
aagtatatattttaa

SEQ ID NO: 1288162 - DNA, 15 bp, Homo sapiens
gaagtatatatttta

SEQ ID NO: 1288163 - DNA, 15 bp, Homo sapiens
agaagtatatatttt

SEQ ID NO: 1288164 - DNA, 15 bp, Homo sapiens
aagaagtatatattt

SEQ ID NO: 1288165 - DNA, 15 bp, Homo sapiens
taagaagtatatatt

SEQ ID NO: 1288166 - DNA, 15 bp, Homo sapiens
ttaagaagtatatat

SEQ ID NO: 1288167 - DNA, 15 bp, Homo sapiens
tttaagaagtatata

SEQ ID NO: 1288168 - DNA, 15 bp, Homo sapiens
ttttaagaagtatat

SEQ ID NO: 1288169 - DNA, 15 bp, Homo sapiens
cttttaagaagtata

SEQ ID NO: 1288170 - DNA, 15 bp, Homo sapiens
tcttttaagaagtat

SEQ ID NO: 1288171 - DNA, 15 bp, Homo sapiens
ttcttttaagaagta

SEQ ID NO: 1288172 - DNA, 15 bp, Homo sapiens
cttcttttaagaagt

SEQ ID NO: 1288173 - DNA, 15 bp, Homo sapiens
tcttcttttaagaag

SEQ ID NO: 1288174 - DNA, 15 bp, Homo sapiens
atcttcttttaagaa

SEQ ID NO: 1288175 - DNA, 15 bp, Homo sapiens
tatcttcttttaaga

SEQ ID NO: 1288176 - DNA, 15 bp, Homo sapiens
ttatcttcttttaag

SEQ ID NO: 1288177 - DNA, 15 bp, Homo sapiens
tttatcttcttttaa

SEQ ID NO: 1288178 - DNA, 15 bp, Homo sapiens
atttatcttctttta

SEQ ID NO: 1288179 - DNA, 15 bp, Homo sapiens
tatttatcttctttt

SEQ ID NO: 1288180 - DNA, 15 bp, Homo sapiens
ttatttatcttcttt

SEQ ID NO: 1288181 - DNA, 15 bp, Homo sapiens
tttatttatcttctt

SEQ ID NO: 1288182 - DNA, 15 bp, Homo sapiens
ctttatttatcttct

SEQ ID NO: 1288183 - DNA, 15 bp, Homo sapiens
gctttatttatcttc

SEQ ID NO: 1288184 - DNA, 15 bp, Homo sapiens
tgctttatttatctt

SEQ ID NO: 1288185 - DNA, 15 bp, Homo sapiens
atgctttatttatct

SEQ ID NO: 1288186 - DNA, 15 bp, Homo sapiens
catgctttatttatc

SEQ ID NO: 1288187 - DNA, 15 bp, Homo sapiens
tcatgctttatttat

SEQ ID NO: 1288188 - DNA, 15 bp, Homo sapiens
ctcatgctttattta

SEQ ID NO: 1288189 - DNA, 15 bp, Homo sapiens
tctcatgctttattt

SEQ ID NO: 1288190 - DNA, 15 bp, Homo sapiens
ttctcatgctttatt

SEQ ID NO: 1288191 - DNA, 15 bp, Homo sapiens
tttctcatgctttat

SEQ ID NO: 1288192 - DNA, 15 bp, Homo sapiens
ttttctcatgcttta

SEQ ID NO: 1288193 - DNA, 15 bp, Homo sapiens
gttttctcatgcttt

SEQ ID NO: 1288194 - DNA, 15 bp, Homo sapiens
agttttctcatgctt

SEQ ID NO: 1288195 - DNA, 15 bp, Homo sapiens
tagttttctcatgct

SEQ ID NO: 1288196 - DNA, 15 bp, Homo sapiens
gtagttttctcatgc

SEQ ID NO: 1288197 - DNA, 15 bp, Homo sapiens
agtagttttctcatg

SEQ ID NO: 1288198 - DNA, 15 bp, Homo sapiens
tagtagttttctcat

SEQ ID NO: 1288199 - DNA, 15 bp, Homo sapiens
atagtagttttctca

SEQ ID NO: 1288200 - DNA, 15 bp, Homo sapiens
catagtagttttctc

SEQ ID NO: 1288201 - DNA, 15 bp, Homo sapiens
tcatagtagttttct

SEQ ID NO: 1288202 - DNA, 15 bp, Homo sapiens
gtcatagtagttttc

SEQ ID NO: 1288203 - DNA, 15 bp, Homo sapiens
agtcatagtagtttt

SEQ ID NO: 1288204 - DNA, 15 bp, Homo sapiens
aagtcatagtagttt

SEQ ID NO: 1288205 - DNA, 15 bp, Homo sapiens
gaagtcatagtagtt

SEQ ID NO: 1288206 - DNA, 15 bp, Homo sapiens
agaagtcatagtagt

SEQ ID NO: 1288207 - DNA, 15 bp, Homo sapiens
tagaagtcatagtag

SEQ ID NO: 1288208 - DNA, 15 bp, Homo sapiens
ttagaagtcatagta

SEQ ID NO: 1288209 - DNA, 15 bp, Homo sapiens
tttagaagtcatagt

SEQ ID NO: 1288210 - DNA, 15 bp, Homo sapiens
atttagaagtcatag

SEQ ID NO: 1288211 - DNA, 15 bp, Homo sapiens
aatttagaagtcata

SEQ ID NO: 1288212 - DNA, 15 bp, Homo sapiens
taatttagaagtcat

SEQ ID NO: 1288213 - DNA, 15 bp, Homo sapiens
gtaatttagaagtca

SEQ ID NO: 1288214 - DNA, 15 bp, Homo sapiens
cgtaatttagaagtc

SEQ ID NO: 1288215 - DNA, 15 bp, Homo sapiens
tcgtaatttagaagt

SEQ ID NO: 1288216 - DNA, 15 bp, Homo sapiens
ttcgtaatttagaag

SEQ ID NO: 1288217 - DNA, 15 bp, Homo sapiens
tttcgtaatttagaa

SEQ ID NO: 1288218 - DNA, 15 bp, Homo sapiens
ttttcgtaatttaga

SEQ ID NO: 1288219 - DNA, 15 bp, Homo sapiens
tttttcgtaatttag

SEQ ID NO: 1288220 - DNA, 15 bp, Homo sapiens
ttttttcgtaattta

SEQ ID NO: 1288221 - DNA, 15 bp, Homo sapiens
attttttcgtaattt

SEQ ID NO: 1288222 - DNA, 15 bp, Homo sapiens
cattttttcgtaatt

SEQ ID NO: 1288223 - DNA, 15 bp, Homo sapiens
acattttttcgtaat

SEQ ID NO: 1288224 - DNA, 15 bp, Homo sapiens
aacattttttcgtaa

SEQ ID NO: 1288225 - DNA, 15 bp, Homo sapiens
taacattttttcgta

SEQ ID NO: 1288226 - DNA, 15 bp, Homo sapiens
ttaacattttttcgt

SEQ ID NO: 1288227 - DNA, 15 bp, Homo sapiens
tttaacattttttcg

SEQ ID NO: 1288228 - DNA, 15 bp, Homo sapiens
ttttaacattttttc

SEQ ID NO: 1288229 - DNA, 15 bp, Homo sapiens
tttttaacatttttt

SEQ ID NO: 1288230 - DNA, 15 bp, Homo sapiens
ctttttaacattttt

SEQ ID NO: 1288231 - DNA, 15 bp, Homo sapiens
actttttaacatttt

SEQ ID NO: 1288232 - DNA, 15 bp, Homo sapiens
gactttttaacattt

SEQ ID NO: 1288233 - DNA, 15 bp, Homo sapiens
tgactttttaacatt

SEQ ID NO: 1288234 - DNA, 15 bp, Homo sapiens
atgactttttaacat

SEQ ID NO: 1288235 - DNA, 15 bp, Homo sapiens
tatgactttttaaca

SEQ ID NO: 1288236 - DNA, 15 bp, Homo sapiens
ttatgactttttaac

SEQ ID NO: 1288237 - DNA, 15 bp, Homo sapiens
attatgactttttaa

SEQ ID NO: 1288238 - DNA, 15 bp, Homo sapiens
cattatgacttttta

SEQ ID NO: 1288239 - DNA, 15 bp, Homo sapiens
acattatgacttttt

SEQ ID NO: 1288240 - DNA, 15 bp, Homo sapiens
aacattatgactttt

SEQ ID NO: 1288241 - DNA, 15 bp, Homo sapiens
aaacattatgacttt

SEQ ID NO: 1288242 - DNA, 15 bp, Homo sapiens
aaaacattatgactt

SEQ ID NO: 1288243 - DNA, 15 bp, Homo sapiens
aaaaacattatgact

SEQ ID NO: 1288244 - DNA, 15 bp, Homo sapiens
gaaaaacattatgac

SEQ ID NO: 1288245 - DNA, 15 bp, Homo sapiens
agaaaaacattatga

SEQ ID NO: 1288246 - DNA, 15 bp, Homo sapiens
aagaaaaacattatg

SEQ ID NO: 1288247 - DNA, 15 bp, Homo sapiens
aaagaaaaacattat

SEQ ID NO: 1288248 - DNA, 15 bp, Homo sapiens
aaaagaaaaacatta

SEQ ID NO: 1288249 - DNA, 15 bp, Homo sapiens
gaaaagaaaaacatt

SEQ ID NO: 1288250 - DNA, 15 bp, Homo sapiens
tgaaaagaaaaacat

SEQ ID NO: 1288251 - DNA, 15 bp, Homo sapiens
ctgaaaagaaaaaca

SEQ ID NO: 1288252 - DNA, 15 bp, Homo sapiens
cctgaaaagaaaaac

SEQ ID NO: 1288253 - DNA, 15 bp, Homo sapiens
tcctgaaaagaaaaa

SEQ ID NO: 1288254 - DNA, 15 bp, Homo sapiens
gtcctgaaaagaaaa

SEQ ID NO: 1288255 - DNA, 15 bp, Homo sapiens
tgtcctgaaaagaaa

SEQ ID NO: 1288256 - DNA, 15 bp, Homo sapiens
atgtcctgaaaagaa

SEQ ID NO: 1288257 - DNA, 15 bp, Homo sapiens
catgtcctgaaaaga

SEQ ID NO: 1288258 - DNA, 15 bp, Homo sapiens
acatgtcctgaaaag

SEQ ID NO: 1288259 - DNA, 15 bp, Homo sapiens
cacatgtcctgaaaa

SEQ ID NO: 1288260 - DNA, 15 bp, Homo sapiens
tcacatgtcctgaaa

SEQ ID NO: 1288261 - DNA, 15 bp, Homo sapiens
ttcacatgtcctgaa

SEQ ID NO: 1288262 - DNA, 15 bp, Homo sapiens
gttcacatgtcctga

SEQ ID NO: 1288263 - DNA, 15 bp, Homo sapiens
agttcacatgtcctg

SEQ ID NO: 1288264 - DNA, 15 bp, Homo sapiens
aagttcacatgtcct

SEQ ID NO: 1288265 - DNA, 15 bp, Homo sapiens
taagttcacatgtcc

SEQ ID NO: 1288266 - DNA, 15 bp, Homo sapiens
ataagttcacatgtc

SEQ ID NO: 1288267 - DNA, 15 bp, Homo sapiens
tataagttcacatgt

SEQ ID NO: 1288268 - DNA, 15 bp, Homo sapiens
atataagttcacatg

SEQ ID NO: 1288269 - DNA, 15 bp, Homo sapiens
tatataagttcacat

SEQ ID NO: 1288270 - DNA, 15 bp, Homo sapiens
atatataagttcaca

SEQ ID NO: 1288271 - DNA, 15 bp, Homo sapiens
aatatataagttcac

SEQ ID NO: 1288272 - DNA, 15 bp, Homo sapiens
aaatatataagttca

SEQ ID NO: 1288273 - DNA, 15 bp, Homo sapiens
caaatatataagttc

SEQ ID NO: 1288274 - DNA, 15 bp, Homo sapiens
tcaaatatataagtt

SEQ ID NO: 1288275 - DNA, 15 bp, Homo sapiens
gtcaaatatataagt

SEQ ID NO: 1288276 - DNA, 15 bp, Homo sapiens
tgtcaaatatataag

SEQ ID NO: 1288277 - DNA, 15 bp, Homo sapiens
gtgtcaaatatataa

SEQ ID NO: 1288278 - DNA, 15 bp, Homo sapiens
tgtgtcaaatatata

SEQ ID NO: 1288279 - DNA, 15 bp, Homo sapiens
ttgtgtcaaatatat

SEQ ID NO: 1288280 - DNA, 15 bp, Homo sapiens
gttgtgtcaaatata

SEQ ID NO: 1288281 - DNA, 15 bp, Homo sapiens
ggttgtgtcaaatat

SEQ ID NO: 1288282 - DNA, 15 bp, Homo sapiens
gggttgtgtcaaata

SEQ ID NO: 1288283 - DNA, 15 bp, Homo sapiens
tgggttgtgtcaaat

SEQ ID NO: 1288284 - DNA, 15 bp, Homo sapiens
ctgggttgtgtcaaa

SEQ ID NO: 1288285 - DNA, 15 bp, Homo sapiens
gctgggttgtgtcaa

SEQ ID NO: 1288286 - DNA, 15 bp, Homo sapiens
tgctgggttgtgtca

SEQ ID NO: 1288287 - DNA, 15 bp, Homo sapiens
ctgctgggttgtgtc

SEQ ID NO: 1288288 - DNA, 15 bp, Homo sapiens
actgctgggttgtgt

SEQ ID NO: 1288289 - DNA, 15 bp, Homo sapiens
aactgctgggttgtg

SEQ ID NO: 1288290 - DNA, 15 bp, Homo sapiens
gaactgctgggttgt

SEQ ID NO: 1288291 - DNA, 15 bp, Homo sapiens
cgaactgctgggttg

SEQ ID NO: 1288292 - DNA, 15 bp, Homo sapiens
acgaactgctgggtt

SEQ ID NO: 1288293 - DNA, 15 bp, Homo sapiens
tacgaactgctgggt

SEQ ID NO: 1288294 - DNA, 15 bp, Homo sapiens
ttacgaactgctggg

SEQ ID NO: 1288295 - DNA, 15 bp, Homo sapiens
cttacgaactgctgg

SEQ ID NO: 1288296 - DNA, 15 bp, Homo sapiens
acttacgaactgctg

SEQ ID NO: 1288297 - DNA, 15 bp, Homo sapiens
tacttacgaactgct

SEQ ID NO: 1288298 - DNA, 15 bp, Homo sapiens
ctacttacgaactgc

SEQ ID NO: 1288299 - DNA, 15 bp, Homo sapiens
actacttacgaactg

SEQ ID NO: 1288300 - DNA, 15 bp, Homo sapiens
aactacttacgaact

SEQ ID NO: 1288301 - DNA, 15 bp, Homo sapiens
gaactacttacgaac

SEQ ID NO: 1288302 - DNA, 15 bp, Homo sapiens
tgaactacttacgaa

SEQ ID NO: 1288303 - DNA, 15 bp, Homo sapiens
gtgaactacttacga

SEQ ID NO: 1288304 - DNA, 15 bp, Homo sapiens
tgtgaactacttacg

SEQ ID NO: 1288305 - DNA, 15 bp, Homo sapiens
ctgtgaactacttac

SEQ ID NO: 1288306 - DNA, 15 bp, Homo sapiens
tctgtgaactactta

SEQ ID NO: 1288307 - DNA, 15 bp, Homo sapiens
ttctgtgaactactt

SEQ ID NO: 1288308 - DNA, 15 bp, Homo sapiens
attctgtgaactact

SEQ ID NO: 1288309 - DNA, 15 bp, Homo sapiens
cattctgtgaactac

SEQ ID NO: 1288310 - DNA, 15 bp, Homo sapiens
acattctgtgaacta

SEQ ID NO: 1288311 - DNA, 15 bp, Homo sapiens
aacattctgtgaact

SEQ ID NO: 1288312 - DNA, 15 bp, Homo sapiens
taacattctgtgaac

SEQ ID NO: 1288313 - DNA, 15 bp, Homo sapiens
ataacattctgtgaa

SEQ ID NO: 1288314 - DNA, 15 bp, Homo sapiens
aataacattctgtga

SEQ ID NO: 1288315 - DNA, 15 bp, Homo sapiens
aaataacattctgtg

SEQ ID NO: 1288316 - DNA, 15 bp, Homo sapiens
aaaataacattctgt

SEQ ID NO: 1288317 - DNA, 15 bp, Homo sapiens
aaaaataacattctg

SEQ ID NO: 1288318 - DNA, 15 bp, Homo sapiens
gaaaaataacattct

SEQ ID NO: 1288319 - DNA, 15 bp, Homo sapiens
tgaaaaataacattc

SEQ ID NO: 1288320 - DNA, 15 bp, Homo sapiens
gtgaaaaataacatt

SEQ ID NO: 1288321 - DNA, 15 bp, Homo sapiens
agtgaaaaataacat

SEQ ID NO: 1288322 - DNA, 15 bp, Homo sapiens
aagtgaaaaataaca

SEQ ID NO: 1288323 - DNA, 15 bp, Homo sapiens
taagtgaaaaataac

SEQ ID NO: 1288324 - DNA, 15 bp, Homo sapiens
ttaagtgaaaaataa

SEQ ID NO: 1288325 - DNA, 15 bp, Homo sapiens
tttaagtgaaaaata

SEQ ID NO: 1288326 - DNA, 15 bp, Homo sapiens
ttttaagtgaaaaat

SEQ ID NO: 1288327 - DNA, 15 bp, Homo sapiens
tttttaagtgaaaaa

SEQ ID NO: 1288328 - DNA, 15 bp, Homo sapiens
ttttttaagtgaaaa

SEQ ID NO: 1288329 - DNA, 15 bp, Homo sapiens
tttttttaagtgaaa

SEQ ID NO: 1288330 - DNA, 15 bp, Homo sapiens
ttttttttaagtgaa

SEQ ID NO: 1288331 - DNA, 15 bp, Homo sapiens
tttttttttaagtga

SEQ ID NO: 1288332 - DNA, 15 bp, Homo sapiens
ctttttttttaagtg

SEQ ID NO: 1288333 - DNA, 15 bp, Homo sapiens
tctttttttttaagt

SEQ ID NO: 1288334 - DNA, 15 bp, Homo sapiens
atctttttttttaag

SEQ ID NO: 1288335 - DNA, 15 bp, Homo sapiens
aatctttttttttaa

SEQ ID NO: 1288336 - DNA, 15 bp, Homo sapiens
aaatcttttttttta

SEQ ID NO: 1288337 - DNA, 15 bp, Homo sapiens
taaaaatcttttttt

SEQ ID NO: 1288338 - DNA, 15 bp, Homo sapiens
ataaaaatctttttt

SEQ ID NO: 1288339 - DNA, 15 bp, Homo sapiens
cataaaaatcttttt

SEQ ID NO: 1288340 - DNA, 15 bp, Homo sapiens
ccataaaaatctttt

SEQ ID NO: 1288341 - DNA, 15 bp, Homo sapiens
tccataaaaatcttt

SEQ ID NO: 1288342 - DNA, 15 bp, Homo sapiens
ttccataaaaatctt

SEQ ID NO: 1288343 - DNA, 15 bp, Homo sapiens
attccataaaaatct

SEQ ID NO: 1288344 - DNA, 15 bp, Homo sapiens
tattccataaaaatc

SEQ ID NO: 1288345 - DNA, 15 bp, Homo sapiens
ttattccataaaaat

SEQ ID NO: 1288346 - DNA, 15 bp, Homo sapiens
attattccataaaaa

SEQ ID NO: 1288347 - DNA, 15 bp, Homo sapiens
gattattccataaaa

SEQ ID NO: 1288348 - DNA, 15 bp, Homo sapiens
agattattccataaa

SEQ ID NO: 1288349 - DNA, 15 bp, Homo sapiens
gagattattccataa

SEQ ID NO: 1288350 - DNA, 15 bp, Homo sapiens
tgagattattccata

SEQ ID NO: 1288351 - DNA, 15 bp, Homo sapiens
ttgagattattccat

SEQ ID NO: 1288352 - DNA, 15 bp, Homo sapiens
tttgagattattcca

SEQ ID NO: 1288353 - DNA, 15 bp, Homo sapiens
gtttgagattattcc

SEQ ID NO: 1288354 - DNA, 15 bp, Homo sapiens
tgtttgagattattc

SEQ ID NO: 1288355 - DNA, 15 bp, Homo sapiens
atgtttgagattatt

SEQ ID NO: 1288356 - DNA, 15 bp, Homo sapiens
gatgtttgagattat

SEQ ID NO: 1288357 - DNA, 15 bp, Homo sapiens
agatgtttgagatta

SEQ ID NO: 1288358 - DNA, 15 bp, Homo sapiens
aagatgtttgagatt

SEQ ID NO: 1288359 - DNA, 15 bp, Homo sapiens
caagatgtttgagat

SEQ ID NO: 1288360 - DNA, 15 bp, Homo sapiens
tcaagatgtttgaga

SEQ ID NO: 1288361 - DNA, 15 bp, Homo sapiens
atcaagatgtttgag

SEQ ID NO: 1288362 - DNA, 15 bp, Homo sapiens
tatcaagatgtttga

SEQ ID NO: 1288363 - DNA, 15 bp, Homo sapiens
ctatcaagatgtttg

SEQ ID NO: 1288364 - DNA, 15 bp, Homo sapiens
actatcaagatgttt

SEQ ID NO: 1288365 - DNA, 15 bp, Homo sapiens
aactatcaagatgtt

SEQ ID NO: 1288366 - DNA, 15 bp, Homo sapiens
taactatcaagatgt

SEQ ID NO: 1288367 - DNA, 15 bp, Homo sapiens
ctaactatcaagatg

SEQ ID NO: 1288368 - DNA, 15 bp, Homo sapiens
cctaactatcaagat

SEQ ID NO: 1288369 - DNA, 15 bp, Homo sapiens
ccctaactatcaaga

SEQ ID NO: 1288370 - DNA, 15 bp, Homo sapiens
accctaactatcaag

SEQ ID NO: 1288371 - DNA, 15 bp, Homo sapiens
aaccctaactatcaa

SEQ ID NO: 1288372 - DNA, 15 bp, Homo sapiens
taaccctaactatca

SEQ ID NO: 1288373 - DNA, 15 bp, Homo sapiens
ctaaccctaactatc

SEQ ID NO: 1288374 - DNA, 15 bp, Homo sapiens
actaaccctaactat

SEQ ID NO: 1288375 - DNA, 15 bp, Homo sapiens
aactaaccctaacta

SEQ ID NO: 1288376 - DNA, 15 bp, Homo sapiens
caaactaaccctaac

SEQ ID NO: 1288377 - DNA, 15 bp, Homo sapiens
tcaaactaaccctaa

SEQ ID NO: 1288378 - DNA, 15 bp, Homo sapiens
atcaaactaacccta

SEQ ID NO: 1288379 - DNA, 15 bp, Homo sapiens
gatcaaactaaccct

SEQ ID NO: 1288380 - DNA, 15 bp, Homo sapiens
cgatcaaactaaccc

SEQ ID NO: 1288381 - DNA, 15 bp, Homo sapiens
tcgatcaaactaacc

SEQ ID NO: 1288382 - DNA, 15 bp, Homo sapiens
atcgatcaaactaac

SEQ ID NO: 1288383 - DNA, 15 bp, Homo sapiens
aatcgatcaaactaa

SEQ ID NO: 1288384 - DNA, 15 bp, Homo sapiens
taatcgatcaaacta

SEQ ID NO: 1288385 - DNA, 15 bp, Homo sapiens
ataatcgatcaaact

SEQ ID NO: 1288386 - DNA, 15 bp, Homo sapiens
tataatcgatcaaac

SEQ ID NO: 1288387 - DNA, 15 bp, Homo sapiens
ctataatcgatcaaa

SEQ ID NO: 1288388 - DNA, 15 bp, Homo sapiens
gctataatcgatcaa

SEQ ID NO: 1288389 - DNA, 15 bp, Homo sapiens
tgctataatcgatca

SEQ ID NO: 1288390 - DNA, 15 bp, Homo sapiens
ctgctataatcgatc

SEQ ID NO: 1288391 - DNA, 15 bp, Homo sapiens
cctgctataatcgat

SEQ ID NO: 1288392 - DNA, 15 bp, Homo sapiens
gcctgctataatcga

SEQ ID NO: 1288393 - DNA, 15 bp, Homo sapiens
agcctgctataatcg

SEQ ID NO: 1288394 - DNA, 15 bp, Homo sapiens
tagcctgctataatc

SEQ ID NO: 1288395 - DNA, 15 bp, Homo sapiens
gtagcctgctataat

SEQ ID NO: 1288396 - DNA, 15 bp, Homo sapiens
agtagcctgctataa

SEQ ID NO: 1288397 - DNA, 15 bp, Homo sapiens
aagtagcctgctata

SEQ ID NO: 1288398 - DNA, 15 bp, Homo sapiens
gaagtagcctgctat

SEQ ID NO: 1288399 - DNA, 15 bp, Homo sapiens
tgaagtagcctgcta

SEQ ID NO: 1288400 - DNA, 15 bp, Homo sapiens
atgaagtagcctgct

SEQ ID NO: 1288401 - DNA, 15 bp, Homo sapiens
tatgaagtagcctgc

SEQ ID NO: 1288402 - DNA, 15 bp, Homo sapiens
ttatgaagtagcctg

SEQ ID NO: 1288403 - DNA, 15 bp, Homo sapiens
tttatgaagtagcct

SEQ ID NO: 1288404 - DNA, 15 bp, Homo sapiens
atttatgaagtagcc

SEQ ID NO: 1288405 - DNA, 15 bp, Homo sapiens
aatttatgaagtagc

SEQ ID NO: 1288406 - DNA, 15 bp, Homo sapiens
taatttatgaagtag

SEQ ID NO: 1288407 - DNA, 15 bp, Homo sapiens
ttaatttatgaagta

SEQ ID NO: 1288408 - DNA, 15 bp, Homo sapiens
cttaatttatgaagt

SEQ ID NO: 1288409 - DNA, 15 bp, Homo sapiens
gcttaatttatgaag

SEQ ID NO: 1288410 - DNA, 15 bp, Homo sapiens
ggcttaatttatgaa

SEQ ID NO: 1288411 - DNA, 15 bp, Homo sapiens
gggcttaatttatga

SEQ ID NO: 1288412 - DNA, 15 bp, Homo sapiens
tgggcttaatttatg

SEQ ID NO: 1288413 - DNA, 15 bp, Homo sapiens
atgggcttaatttat

SEQ ID NO: 1288414 - DNA, 15 bp, Homo sapiens
tatgggcttaattta

SEQ ID NO: 1288415 - DNA, 15 bp, Homo sapiens
ctatgggcttaattt

SEQ ID NO: 1288416 - DNA, 15 bp, Homo sapiens
tctatgggcttaatt

SEQ ID NO: 1288417 - DNA, 15 bp, Homo sapiens
atctatgggcttaat

SEQ ID NO: 1288418 - DNA, 15 bp, Homo sapiens
aatctatgggcttaa

SEQ ID NO: 1288419 - DNA, 15 bp, Homo sapiens
aaatctatgggctta

SEQ ID NO: 1288420 - DNA, 15 bp, Homo sapiens
taaatctatgggctt

SEQ ID NO: 1288421 - DNA, 15 bp, Homo sapiens
ttaaatctatgggct

SEQ ID NO: 1288422 - DNA, 15 bp, Homo sapiens
cttaaatctatgggc

SEQ ID NO: 1288423 - DNA, 15 bp, Homo sapiens
acttaaatctatggg

SEQ ID NO: 1288424 - DNA, 15 bp, Homo sapiens
gacttaaatctatgg

SEQ ID NO: 1288425 - DNA, 15 bp, Homo sapiens
ggacttaaatctatg

SEQ ID NO: 1288426 - DNA, 15 bp, Homo sapiens
aggacttaaatctat

SEQ ID NO: 1288427 - DNA, 15 bp, Homo sapiens
caggacttaaatcta

SEQ ID NO: 1288428 - DNA, 15 bp, Homo sapiens
acaggacttaaatct

SEQ ID NO: 1288429 - DNA, 15 bp, Homo sapiens
cacaggacttaaatc

SEQ ID NO: 1288430 - DNA, 15 bp, Homo sapiens
acacaggacttaaat

SEQ ID NO: 1288431 - DNA, 15 bp, Homo sapiens
tacacaggacttaaa

SEQ ID NO: 1288432 - DNA, 15 bp, Homo sapiens
ctacacaggacttaa

SEQ ID NO: 1288433 - DNA, 15 bp, Homo sapiens
tctacacaggactta

SEQ ID NO: 1288434 - DNA, 15 bp, Homo sapiens
atctacacaggactt

SEQ ID NO: 1288435 - DNA, 15 bp, Homo sapiens
aatctacacaggact

SEQ ID NO: 1288436 - DNA, 15 bp, Homo sapiens
taatctacacaggac

SEQ ID NO: 1288437 - DNA, 15 bp, Homo sapiens
ataatctacacagga

SEQ ID NO: 1288438 - DNA, 15 bp, Homo sapiens
aataatctacacagg

SEQ ID NO: 1288439 - DNA, 15 bp, Homo sapiens
aaataatctacacag

SEQ ID NO: 1288440 - DNA, 15 bp, Homo sapiens
taaataatctacaca

SEQ ID NO: 1288441 - DNA, 15 bp, Homo sapiens
ataaataatctacac

SEQ ID NO: 1288442 - DNA, 15 bp, Homo sapiens
gataaataatctaca

SEQ ID NO: 1288443 - DNA, 15 bp, Homo sapiens
agataaataatctac

SEQ ID NO: 1288444 - DNA, 15 bp, Homo sapiens
aagataaataatcta

SEQ ID NO: 1288445 - DNA, 15 bp, Homo sapiens
gaagataaataatct

SEQ ID NO: 1288446 - DNA, 15 bp, Homo sapiens
agaagataaataatc

SEQ ID NO: 1288447 - DNA, 15 bp, Homo sapiens
gagaagataaataat

SEQ ID NO: 1288448 - DNA, 15 bp, Homo sapiens
tgagaagataaataa

SEQ ID NO: 1288449 - DNA, 15 bp, Homo sapiens
gtgagaagataaata

SEQ ID NO: 1288450 - DNA, 15 bp, Homo sapiens
tgtgagaagataaat

SEQ ID NO: 1288451 - DNA, 15 bp, Homo sapiens
ttgtgagaagataaa

SEQ ID NO: 1288452 - DNA, 15 bp, Homo sapiens
tttgtgagaagataa

SEQ ID NO: 1288453 - DNA, 15 bp, Homo sapiens
ctttgtgagaagata

SEQ ID NO: 1288454 - DNA, 15 bp, Homo sapiens
tctttgtgagaagat

SEQ ID NO: 1288455 - DNA, 15 bp, Homo sapiens
ttctttgtgagaaga

SEQ ID NO: 1288456 - DNA, 15 bp, Homo sapiens
tttctttgtgagaag

SEQ ID NO: 1288457 - DNA, 15 bp, Homo sapiens
ttttctttgtgagaa

SEQ ID NO: 1288458 - DNA, 15 bp, Homo sapiens
attttctttgtgaga

SEQ ID NO: 1288459 - DNA, 15 bp, Homo sapiens
tattttctttgtgag

SEQ ID NO: 1288460 - DNA, 15 bp, Homo sapiens
ctattttctttgtga

SEQ ID NO: 1288461 - DNA, 15 bp, Homo sapiens
actattttctttgtg

SEQ ID NO: 1288462 - DNA, 15 bp, Homo sapiens
tactattttctttgt

SEQ ID NO: 1288463 - DNA, 15 bp, Homo sapiens
atactattttctttg

SEQ ID NO: 1288464 - DNA, 15 bp, Homo sapiens
tatactattttcttt

SEQ ID NO: 1288465 - DNA, 15 bp, Homo sapiens
ttatactattttctt

SEQ ID NO: 1288466 - DNA, 15 bp, Homo sapiens
tttatactattttct

SEQ ID NO: 1288467 - DNA, 15 bp, Homo sapiens
ttttatactattttc

SEQ ID NO: 1288468 - DNA, 15 bp, Homo sapiens
attttatactatttt

SEQ ID NO: 1288469 - DNA, 15 bp, Homo sapiens
tattttatactattt

SEQ ID NO: 1288470 - DNA, 15 bp, Homo sapiens
gtattttatactatt

SEQ ID NO: 1288471 - DNA, 15 bp, Homo sapiens
tgtattttatactat

SEQ ID NO: 1288472 - DNA, 15 bp, Homo sapiens
atgtattttatacta

SEQ ID NO: 1288473 - DNA, 15 bp, Homo sapiens
catgtattttatact

SEQ ID NO: 1288474 - DNA, 15 bp, Homo sapiens
gcatgtattttatac

SEQ ID NO: 1288475 - DNA, 15 bp, Homo sapiens
ggcatgtattttata

SEQ ID NO: 1288476 - DNA, 15 bp, Homo sapiens
aggcatgtattttat

SEQ ID NO: 1288477 - DNA, 15 bp, Homo sapiens
aaggcatgtatttta

SEQ ID NO: 1288478 - DNA, 15 bp, Homo sapiens
caaggcatgtatttt

SEQ ID NO: 1288479 - DNA, 15 bp, Homo sapiens
acaaggcatgtattt

SEQ ID NO: 1288480 - DNA, 15 bp, Homo sapiens
tacaaggcatgtatt

SEQ ID NO: 1288481 - DNA, 15 bp, Homo sapiens
gtacaaggcatgtat

SEQ ID NO: 1288482 - DNA, 15 bp, Homo sapiens
agtacaaggcatgta

SEQ ID NO: 1288483 - DNA, 15 bp, Homo sapiens
tagtacaaggcatgt

SEQ ID NO: 1288484 - DNA, 15 bp, Homo sapiens
gtagtacaaggcatg

SEQ ID NO: 1288485 - DNA, 15 bp, Homo sapiens
tgtagtacaaggcat

SEQ ID NO: 1288486 - DNA, 15 bp, Homo sapiens
ttgtagtacaaggca

SEQ ID NO: 1288487 - DNA, 15 bp, Homo sapiens
tttgtagtacaaggc

SEQ ID NO: 1288488 - DNA, 15 bp, Homo sapiens
ctttgtagtacaagg

SEQ ID NO: 1288489 - DNA, 15 bp, Homo sapiens
tctttgtagtacaag

SEQ ID NO: 1288490 - DNA, 15 bp, Homo sapiens
ttctttgtagtacaa

SEQ ID NO: 1288491 - DNA, 15 bp, Homo sapiens
cttctttgtagtaca

SEQ ID NO: 1288492 - DNA, 15 bp, Homo sapiens
tcttctttgtagtac

SEQ ID NO: 1288493 - DNA, 15 bp, Homo sapiens
ttcttctttgtagta

SEQ ID NO: 1288494 - DNA, 15 bp, Homo sapiens
gttcttctttgtagt

SEQ ID NO: 1288495 - DNA, 15 bp, Homo sapiens
agttcttctttgtag

SEQ ID NO: 1288496 - DNA, 15 bp, Homo sapiens
tagttcttctttgta

SEQ ID NO: 1288497 - DNA, 15 bp, Homo sapiens
ttagttcttctttgt

SEQ ID NO: 1288498 - DNA, 15 bp, Homo sapiens
attagttcttctttg

SEQ ID NO: 1288499 - DNA, 15 bp, Homo sapiens
tattagttcttcttt

SEQ ID NO: 1288500 - DNA, 15 bp, Homo sapiens
ttattagttcttctt

SEQ ID NO: 1288501 - DNA, 15 bp, Homo sapiens
cttattagttcttct

SEQ ID NO: 1288502 - DNA, 15 bp, Homo sapiens
ccttattagttcttc

SEQ ID NO: 1288503 - DNA, 15 bp, Homo sapiens
accttattagttctt

SEQ ID NO: 1288504 - DNA, 15 bp, Homo sapiens
caccttattagttct

SEQ ID NO: 1288505 - DNA, 15 bp, Homo sapiens
ccaccttattagttc

SEQ ID NO: 1288506 - DNA, 15 bp, Homo sapiens
tccaccttattagtt

SEQ ID NO: 1288507 - DNA, 15 bp, Homo sapiens
ttccaccttattagt

SEQ ID NO: 1288508 - DNA, 15 bp, Homo sapiens
attccaccttattag

SEQ ID NO: 1288509 - DNA, 15 bp, Homo sapiens
aattccaccttatta

SEQ ID NO: 1288510 - DNA, 15 bp, Homo sapiens
caattccaccttatt

SEQ ID NO: 1288511 - DNA, 15 bp, Homo sapiens
tcaattccaccttat

SEQ ID NO: 1288512 - DNA, 15 bp, Homo sapiens
atcaattccacctta

SEQ ID NO: 1288513 - DNA, 15 bp, Homo sapiens
aatcaattccacctt

SEQ ID NO: 1288514 - DNA, 15 bp, Homo sapiens
gaatcaattccacct

SEQ ID NO: 1288515 - DNA, 15 bp, Homo sapiens
tgaatcaattccacc

SEQ ID NO: 1288516 - DNA, 15 bp, Homo sapiens
ctgaatcaattccac

SEQ ID NO: 1288517 - DNA, 15 bp, Homo sapiens
cctgaatcaattcca

SEQ ID NO: 1288518 - DNA, 15 bp, Homo sapiens
tcctgaatcaattcc

SEQ ID NO: 1288519 - DNA, 15 bp, Homo sapiens
gtcctgaatcaattc

SEQ ID NO: 1288520 - DNA, 15 bp, Homo sapiens
tgtcctgaatcaatt

SEQ ID NO: 1288521 - DNA, 15 bp, Homo sapiens
ctgtcctgaatcaat

SEQ ID NO: 1288522 - DNA, 15 bp, Homo sapiens
gctgtcctgaatcaa

SEQ ID NO: 1288523 - DNA, 15 bp, Homo sapiens
tgctgtcctgaatca

SEQ ID NO: 1288524 - DNA, 15 bp, Homo sapiens
atgctgtcctgaatc

SEQ ID NO: 1288525 - DNA, 15 bp, Homo sapiens
tatgctgtcctgaat

SEQ ID NO: 1288526 - DNA, 15 bp, Homo sapiens
atatgctgtcctgaa

SEQ ID NO: 1288527 - DNA, 15 bp, Homo sapiens
gatatgctgtcctga

SEQ ID NO: 1288528 - DNA, 15 bp, Homo sapiens
tgatatgctgtcctg

SEQ ID NO: 1288529 - DNA, 15 bp, Homo sapiens
gtgatatgctgtcct

SEQ ID NO: 1288530 - DNA, 15 bp, Homo sapiens
ggtgatatgctgtcc

SEQ ID NO: 1288531 - DNA, 15 bp, Homo sapiens
tggtgatatgctgtc

SEQ ID NO: 1288532 - DNA, 15 bp, Homo sapiens
ttggtgatatgctgt

SEQ ID NO: 1288533 - DNA, 15 bp, Homo sapiens
gttggtgatatgctg

SEQ ID NO: 1288534 - DNA, 15 bp, Homo sapiens
agttggtgatatgct

SEQ ID NO: 1288535 - DNA, 15 bp, Homo sapiens
gagttggtgatatgc

SEQ ID NO: 1288536 - DNA, 15 bp, Homo sapiens
agagttggtgatatg

SEQ ID NO: 1288537 - DNA, 15 bp, Homo sapiens
cagagttggtgatat

SEQ ID NO: 1288538 - DNA, 15 bp, Homo sapiens
tcagagttggtgata

SEQ ID NO: 1288539 - DNA, 15 bp, Homo sapiens
ctcagagttggtgat

SEQ ID NO: 1288540 - DNA, 15 bp, Homo sapiens
tctcagagttggtga

SEQ ID NO: 1288541 - DNA, 15 bp, Homo sapiens
ttctcagagttggtg

SEQ ID NO: 1288542 - DNA, 15 bp, Homo sapiens
tttctcagagttggt

SEQ ID NO: 1288543 - DNA, 15 bp, Homo sapiens
ttttctcagagttgg

SEQ ID NO: 1288544 - DNA, 15 bp, Homo sapiens
tttttctcagagttg

SEQ ID NO: 1288545 - DNA, 15 bp, Homo sapiens
atttttctcagagtt

SEQ ID NO: 1288546 - DNA, 15 bp, Homo sapiens
catttttctcagagt

SEQ ID NO: 1288547 - DNA, 15 bp, Homo sapiens
gcatttttctcagag

SEQ ID NO: 1288548 - DNA, 15 bp, Homo sapiens
tgcatttttctcaga

SEQ ID NO: 1288549 - DNA, 15 bp, Homo sapiens
ttgcatttttctcag

SEQ ID NO: 1288550 - DNA, 15 bp, Homo sapiens
gttgcatttttctca

SEQ ID NO: 1288551 - DNA, 15 bp, Homo sapiens
tgttgcatttttctc

SEQ ID NO: 1288552 - DNA, 15 bp, Homo sapiens
ttgttgcatttttct

SEQ ID NO: 1288553 - DNA, 15 bp, Homo sapiens
tttgttgcatttttc

SEQ ID NO: 1288554 - DNA, 15 bp, Homo sapiens
atttgttgcattttt

SEQ ID NO: 1288555 - DNA, 15 bp, Homo sapiens
catttgttgcatttt

SEQ ID NO: 1288556 - DNA, 15 bp, Homo sapiens
gcatttgttgcattt

SEQ ID NO: 1288557 - DNA, 15 bp, Homo sapiens
tgcatttgttgcatt

SEQ ID NO: 1288558 - DNA, 15 bp, Homo sapiens
ttgcatttgttgcat

SEQ ID NO: 1288559 - DNA, 15 bp, Homo sapiens
tttgcatttgttgca

SEQ ID NO: 1288560 - DNA, 15 bp, Homo sapiens
atttgcatttgttgc

SEQ ID NO: 1288561 - DNA, 15 bp, Homo sapiens
aatttgcatttgttg

SEQ ID NO: 1288562 - DNA, 15 bp, Homo sapiens
gaatttgcatttgtt

SEQ ID NO: 1288563 - DNA, 15 bp, Homo sapiens
tgaatttgcatttgt

SEQ ID NO: 1288564 - DNA, 15 bp, Homo sapiens
atgaatttgcatttg

SEQ ID NO: 1288565 - DNA, 15 bp, Homo sapiens
aatgaatttgcattt

SEQ ID NO: 1288566 - DNA, 15 bp, Homo sapiens
caatgaatttgcatt

SEQ ID NO: 1288567 - DNA, 15 bp, Homo sapiens
tcaatgaatttgcat

SEQ ID NO: 1288568 - DNA, 15 bp, Homo sapiens
gtcaatgaatttgca

SEQ ID NO: 1288569 - DNA, 15 bp, Homo sapiens
agtcaatgaatttgc

SEQ ID NO: 1288570 - DNA, 15 bp, Homo sapiens
tagtcaatgaatttg

SEQ ID NO: 1288571 - DNA, 15 bp, Homo sapiens
ttagtcaatgaattt

SEQ ID NO: 1288572 - DNA, 15 bp, Homo sapiens
tttagtcaatgaatt

SEQ ID NO: 1288573 - DNA, 15 bp, Homo sapiens
atttagtcaatgaat

SEQ ID NO: 1288574 - DNA, 15 bp, Homo sapiens
gatttagtcaatgaa

SEQ ID NO: 1288575 - DNA, 15 bp, Homo sapiens
agatttagtcaatga

SEQ ID NO: 1288576 - DNA, 15 bp, Homo sapiens
aagatttagtcaatg

SEQ ID NO: 1288577 - DNA, 15 bp, Homo sapiens
aaagatttagtcaat

SEQ ID NO: 1288578 - DNA, 15 bp, Homo sapiens
taaagatttagtcaa

SEQ ID NO: 1288579 - DNA, 15 bp, Homo sapiens
ataaagatttagtca

SEQ ID NO: 1288580 - DNA, 15 bp, Homo sapiens
aataaagatttagtc

SEQ ID NO: 1288581 - DNA, 15 bp, Homo sapiens
caataaagatttagt

SEQ ID NO: 1288582 - DNA, 15 bp, Homo sapiens
tcaataaagatttag

SEQ ID NO: 1288583 - DNA, 15 bp, Homo sapiens
ctcaataaagattta

SEQ ID NO: 1288584 - DNA, 15 bp, Homo sapiens
cctcaataaagattt

SEQ ID NO: 1288585 - DNA, 15 bp, Homo sapiens
ccctcaataaagatt

SEQ ID NO: 1288586 - DNA, 15 bp, Homo sapiens
accctcaataaagat

SEQ ID NO: 1288587 - DNA, 15 bp, Homo sapiens
gaccctcaataaaga

SEQ ID NO: 1288588 - DNA, 15 bp, Homo sapiens
agaccctcaataaag

SEQ ID NO: 1288589 - DNA, 15 bp, Homo sapiens
cagaccctcaataaa

SEQ ID NO: 1288590 - DNA, 15 bp, Homo sapiens
acagaccctcaataa

SEQ ID NO: 1288591 - DNA, 15 bp, Homo sapiens
aacagaccctcaata

SEQ ID NO: 1288592 - DNA, 15 bp, Homo sapiens
taacagaccctcaat

SEQ ID NO: 1288593 - DNA, 15 bp, Homo sapiens
gtaacagaccctcaa

SEQ ID NO: 1288594 - DNA, 15 bp, Homo sapiens
tgtaacagaccctca

SEQ ID NO: 1288595 - DNA, 15 bp, Homo sapiens
ctgtaacagaccctc

SEQ ID NO: 1288596 - DNA, 15 bp, Homo sapiens
cctgtaacagaccct

SEQ ID NO: 1288597 - DNA, 15 bp, Homo sapiens
gcctgtaacagaccc

SEQ ID NO: 1288598 - DNA, 15 bp, Homo sapiens
tgcctgtaacagacc

SEQ ID NO: 1288599 - DNA, 15 bp, Homo sapiens
gtgcctgtaacagac

SEQ ID NO: 1288600 - DNA, 15 bp, Homo sapiens
agtgcctgtaacaga

SEQ ID NO: 1288601 - DNA, 15 bp, Homo sapiens
aagtgcctgtaacag

SEQ ID NO: 1288602 - DNA, 15 bp, Homo sapiens
aaagtgcctgtaaca

SEQ ID NO: 1288603 - DNA, 15 bp, Homo sapiens
taaagtgcctgtaac

SEQ ID NO: 1288604 - DNA, 15 bp, Homo sapiens
ataaagtgcctgtaa

SEQ ID NO: 1288605 - DNA, 15 bp, Homo sapiens
aataaagtgcctgta

SEQ ID NO: 1288606 - DNA, 15 bp, Homo sapiens
taataaagtgcctgt

SEQ ID NO: 1288607 - DNA, 15 bp, Homo sapiens
ttaataaagtgcctg

SEQ ID NO: 1288608 - DNA, 15 bp, Homo sapiens
gttaataaagtgcct

SEQ ID NO: 1288609 - DNA, 15 bp, Homo sapiens
agttaataaagtgcc

SEQ ID NO: 1288610 - DNA, 15 bp, Homo sapiens
tagttaataaagtgc

SEQ ID NO: 1288611 - DNA, 15 bp, Homo sapiens
ttagttaataaagtg

SEQ ID NO: 1288612 - DNA, 15 bp, Homo sapiens
attagttaataaagt

SEQ ID NO: 1288613 - DNA, 15 bp, Homo sapiens
tattagttaataaag

SEQ ID NO: 1288614 - DNA, 15 bp, Homo sapiens
ttattagttaataaa

SEQ ID NO: 1288615 - DNA, 15 bp, Homo sapiens
attattagttaataa

SEQ ID NO: 1288616 - DNA, 15 bp, Homo sapiens
gattattagttaata

SEQ ID NO: 1288617 - DNA, 15 bp, Homo sapiens
tgattattagttaat

SEQ ID NO: 1288618 - DNA, 15 bp, Homo sapiens
ctgattattagttaa

SEQ ID NO: 1288619 - DNA, 15 bp, Homo sapiens
gctgattattagtta

SEQ ID NO: 1288620 - DNA, 15 bp, Homo sapiens
tgctgattattagtt

SEQ ID NO: 1288621 - DNA, 15 bp, Homo sapiens
atgctgattattagt

SEQ ID NO: 1288622 - DNA, 15 bp, Homo sapiens
tatgctgattattag

SEQ ID NO: 1288623 - DNA, 15 bp, Homo sapiens
ttatgctgattatta

SEQ ID NO: 1288624 - DNA, 15 bp, Homo sapiens
attatgctgattatt

SEQ ID NO: 1288625 - DNA, 15 bp, Homo sapiens
aattatgctgattat

SEQ ID NO: 1288626 - DNA, 15 bp, Homo sapiens
aaattatgctgatta

SEQ ID NO: 1288627 - DNA, 15 bp, Homo sapiens
gaaattatgctgatt

SEQ ID NO: 1288628 - DNA, 15 bp, Homo sapiens
agaaattatgctgat

SEQ ID NO: 1288629 - DNA, 15 bp, Homo sapiens
cagaaattatgctga

SEQ ID NO: 1288630 - DNA, 15 bp, Homo sapiens
acagaaattatgctg

SEQ ID NO: 1288631 - DNA, 15 bp, Homo sapiens
cacagaaattatgct

SEQ ID NO: 1288632 - DNA, 15 bp, Homo sapiens
acacagaaattatgc

SEQ ID NO: 1288633 - DNA, 15 bp, Homo sapiens
cacacagaaattatg

SEQ ID NO: 1288634 - DNA, 15 bp, Homo sapiens
tcacacagaaattat

SEQ ID NO: 1288635 - DNA, 15 bp, Homo sapiens
ctcacacagaaatta

SEQ ID NO: 1288636 - DNA, 15 bp, Homo sapiens
tctcacacagaaatt

SEQ ID NO: 1288637 - DNA, 15 bp, Homo sapiens
ttctcacacagaaat

SEQ ID NO: 1288638 - DNA, 15 bp, Homo sapiens
attctcacacagaaa

SEQ ID NO: 1288639 - DNA, 15 bp, Homo sapiens
tattctcacacagaa

SEQ ID NO: 1288640 - DNA, 15 bp, Homo sapiens
ttattctcacacaga

SEQ ID NO: 1288641 - DNA, 15 bp, Homo sapiens
tttattctcacacag

SEQ ID NO: 1288642 - DNA, 15 bp, Homo sapiens
atttattctcacaca

SEQ ID NO: 1288643 - DNA, 15 bp, Homo sapiens
catttattctcacac

SEQ ID NO: 1288644 - DNA, 15 bp, Homo sapiens
acatttattctcaca

SEQ ID NO: 1288645 - DNA, 15 bp, Homo sapiens
tacatttattctcac

SEQ ID NO: 1288646 - DNA, 15 bp, Homo sapiens
ttacatttattctca

SEQ ID NO: 1288647 - DNA, 15 bp, Homo sapiens
tttacatttattctc

SEQ ID NO: 1288648 - DNA, 15 bp, Homo sapiens
ttttacatttattct

SEQ ID NO: 1288649 - DNA, 15 bp, Homo sapiens
tttttacatttattc

SEQ ID NO: 1288650 - DNA, 15 bp, Homo sapiens
atttttacatttatt

SEQ ID NO: 1288651 - DNA, 15 bp, Homo sapiens
gatttttacatttat

SEQ ID NO: 1288652 - DNA, 15 bp, Homo sapiens
agatttttacattta

SEQ ID NO: 1288653 - DNA, 15 bp, Homo sapiens
cagatttttacattt

SEQ ID NO: 1288654 - DNA, 15 bp, Homo sapiens
acagatttttacatt

SEQ ID NO: 1288655 - DNA, 15 bp, Homo sapiens
tacagatttttacat

SEQ ID NO: 1288656 - DNA, 15 bp, Homo sapiens
atacagatttttaca

SEQ ID NO: 1288657 - DNA, 15 bp, Homo sapiens
aatacagatttttac

SEQ ID NO: 1288658 - DNA, 15 bp, Homo sapiens
taatacagattttta

SEQ ID NO: 1288659 - DNA, 15 bp, Homo sapiens
ttaatacagattttt

SEQ ID NO: 1288660 - DNA, 15 bp, Homo sapiens
tttaatacagatttt

SEQ ID NO: 1288661 - DNA, 15 bp, Homo sapiens
ttttaatacagattt

SEQ ID NO: 1288662 - DNA, 15 bp, Homo sapiens
attttaatacagatt

SEQ ID NO: 1288663 - DNA, 15 bp, Homo sapiens
aattttaatacagat

SEQ ID NO: 1288664 - DNA, 15 bp, Homo sapiens
aaattttaatacaga

SEQ ID NO: 1288665 - DNA, 15 bp, Homo sapiens
gaaattttaatacag

SEQ ID NO: 1288666 - DNA, 15 bp, Homo sapiens
ggaaattttaataca

SEQ ID NO: 1288667 - DNA, 15 bp, Homo sapiens
tggaaattttaatac

SEQ ID NO: 1288668 - DNA, 15 bp, Homo sapiens
ttggaaattttaata

SEQ ID NO: 1288669 - DNA, 15 bp, Homo sapiens
tttggaaattttaat

SEQ ID NO: 1288670 - DNA, 15 bp, Homo sapiens
atttggaaattttaa

SEQ ID NO: 1288671 - DNA, 15 bp, Homo sapiens
catttggaaatttta

SEQ ID NO: 1288672 - DNA, 15 bp, Homo sapiens
tcatttggaaatttt

SEQ ID NO: 1288673 - DNA, 15 bp, Homo sapiens
atcatttggaaattt

SEQ ID NO: 1288674 - DNA, 15 bp, Homo sapiens
aatcatttggaaatt

SEQ ID NO: 1288675 - DNA, 15 bp, Homo sapiens
taatcatttggaaat

SEQ ID NO: 1288676 - DNA, 15 bp, Homo sapiens
ataatcatttggaaa

SEQ ID NO: 1288677 - DNA, 15 bp, Homo sapiens
aataatcatttggaa

SEQ ID NO: 1288678 - DNA, 15 bp, Homo sapiens
aaataatcatttgga

SEQ ID NO: 1288679 - DNA, 15 bp, Homo sapiens
aaaataatcatttgg

SEQ ID NO: 1288680 - DNA, 15 bp, Homo sapiens
taaaataatcatttg

SEQ ID NO: 1288681 - DNA, 15 bp, Homo sapiens
ttaaaataatcattt

SEQ ID NO: 1288682 - DNA, 15 bp, Homo sapiens
tttaaaataatcatt

SEQ ID NO: 1288683 - DNA, 15 bp, Homo sapiens
atttaaaataatcat

SEQ ID NO: 1288684 - DNA, 15 bp, Homo sapiens
catttaaaataatca

SEQ ID NO: 1288685 - DNA, 15 bp, Homo sapiens
acatttaaaataatc

SEQ ID NO: 1288686 - DNA, 15 bp, Homo sapiens
tacatttaaaataat

SEQ ID NO: 1288687 - DNA, 15 bp, Homo sapiens
ttatacatttaaaat

SEQ ID NO: 1288688 - DNA, 15 bp, Homo sapiens
attatacatttaaaa

SEQ ID NO: 1288689 - DNA, 15 bp, Homo sapiens
cattatacatttaaa

SEQ ID NO: 1288690 - DNA, 15 bp, Homo sapiens
gcattatacatttaa

SEQ ID NO: 1288691 - DNA, 15 bp, Homo sapiens
tgcattatacattta

SEQ ID NO: 1288692 - DNA, 15 bp, Homo sapiens
atgcattatacattt

SEQ ID NO: 1288693 - DNA, 15 bp, Homo sapiens
catgcattatacatt

SEQ ID NO: 1288694 - DNA, 15 bp, Homo sapiens
gcatgcattatacat

SEQ ID NO: 1288695 - DNA, 15 bp, Homo sapiens
agcatgcattataca

SEQ ID NO: 1288696 - DNA, 15 bp, Homo sapiens
gagcatgcattatac

SEQ ID NO: 1288697 - DNA, 15 bp, Homo sapiens
agagcatgcattata

SEQ ID NO: 1288698 - DNA, 15 bp, Homo sapiens
tagagcatgcattat

SEQ ID NO: 1288699 - DNA, 15 bp, Homo sapiens
ttagagcatgcatta

SEQ ID NO: 1288700 - DNA, 15 bp, Homo sapiens
gttagagcatgcatt

SEQ ID NO: 1288701 - DNA, 15 bp, Homo sapiens
tgttagagcatgcat

SEQ ID NO: 1288702 - DNA, 15 bp, Homo sapiens
ctgttagagcatgca

SEQ ID NO: 1288703 - DNA, 15 bp, Homo sapiens
actgttagagcatgc

SEQ ID NO: 1288704 - DNA, 15 bp, Homo sapiens
tactgttagagcatg

SEQ ID NO: 1288705 - DNA, 15 bp, Homo sapiens
atactgttagagcat

SEQ ID NO: 1288706 - DNA, 15 bp, Homo sapiens
catactgttagagca

SEQ ID NO: 1288707 - DNA, 15 bp, Homo sapiens
gcatactgttagagc

SEQ ID NO: 1288708 - DNA, 15 bp, Homo sapiens
ggcatactgttagag

SEQ ID NO: 1288709 - DNA, 15 bp, Homo sapiens
gggcatactgttaga

SEQ ID NO: 1288710 - DNA, 15 bp, Homo sapiens
tgggcatactgttag

SEQ ID NO: 1288711 - DNA, 15 bp, Homo sapiens
atgggcatactgtta

SEQ ID NO: 1288712 - DNA, 15 bp, Homo sapiens
catgggcatactgtt

SEQ ID NO: 1288713 - DNA, 15 bp, Homo sapiens
acatgggcatactgt

SEQ ID NO: 1288714 - DNA, 15 bp, Homo sapiens
tacatgggcatactg

SEQ ID NO: 1288715 - DNA, 15 bp, Homo sapiens
ctacatgggcatact

SEQ ID NO: 1288716 - DNA, 15 bp, Homo sapiens
tctacatgggcatac

SEQ ID NO: 1288717 - DNA, 15 bp, Homo sapiens
ctctacatgggcata

SEQ ID NO: 1288718 - DNA, 15 bp, Homo sapiens
gctctacatgggcat

SEQ ID NO: 1288719 - DNA, 15 bp, Homo sapiens
agctctacatgggca

SEQ ID NO: 1288720 - DNA, 15 bp, Homo sapiens
gagctctacatgggc

SEQ ID NO: 1288721 - DNA, 15 bp, Homo sapiens
ggagctctacatggg

SEQ ID NO: 1288722 - DNA, 15 bp, Homo sapiens
tggagctctacatgg

SEQ ID NO: 1288723 - DNA, 15 bp, Homo sapiens
ctggagctctacatg

SEQ ID NO: 1288724 - DNA, 15 bp, Homo sapiens
tctggagctctacat

SEQ ID NO: 1288725 - DNA, 15 bp, Homo sapiens
ctctggagctctaca

SEQ ID NO: 1288726 - DNA, 15 bp, Homo sapiens
actctggagctctac

SEQ ID NO: 1288727 - DNA, 15 bp, Homo sapiens
aactctggagctcta

SEQ ID NO: 1288728 - DNA, 15 bp, Homo sapiens
aaactctggagctct

SEQ ID NO: 1288729 - DNA, 15 bp, Homo sapiens
aaaactctggagctc

SEQ ID NO: 1288730 - DNA, 15 bp, Homo sapiens
aaaaactctggagct

SEQ ID NO: 1288731 - DNA, 15 bp, Homo sapiens
aaaaaactctggagc

SEQ ID NO: 1288732 - DNA, 15 bp, Homo sapiens
gaaaaaactctggag

SEQ ID NO: 1288733 - DNA, 15 bp, Homo sapiens
agaaaaaactctgga

SEQ ID NO: 1288734 - DNA, 15 bp, Homo sapiens
aagaaaaaactctgg

SEQ ID NO: 1288735 - DNA, 15 bp, Homo sapiens
caagaaaaaactctg

SEQ ID NO: 1288736 - DNA, 15 bp, Homo sapiens
ccaagaaaaaactct

SEQ ID NO: 1288737 - DNA, 15 bp, Homo sapiens
tccaagaaaaaactc

SEQ ID NO: 1288738 - DNA, 15 bp, Homo sapiens
ttccaagaaaaaact

SEQ ID NO: 1288739 - DNA, 15 bp, Homo sapiens
tttccaagaaaaaac

SEQ ID NO: 1288740 - DNA, 15 bp, Homo sapiens
gtttccaagaaaaaa

SEQ ID NO: 1288741 - DNA, 15 bp, Homo sapiens
tgtttccaagaaaaa

SEQ ID NO: 1288742 - DNA, 15 bp, Homo sapiens
ctgtttccaagaaaa

SEQ ID NO: 1288743 - DNA, 15 bp, Homo sapiens
tctgtttccaagaaa

SEQ ID NO: 1288744 - DNA, 15 bp, Homo sapiens
ttctgtttccaagaa

SEQ ID NO: 1288745 - DNA, 15 bp, Homo sapiens
attctgtttccaaga

SEQ ID NO: 1288746 - DNA, 15 bp, Homo sapiens
cattctgtttccaag

SEQ ID NO: 1288747 - DNA, 15 bp, Homo sapiens
tcattctgtttccaa

SEQ ID NO: 1288748 - DNA, 15 bp, Homo sapiens
ctcattctgtttcca

SEQ ID NO: 1288749 - DNA, 15 bp, Homo sapiens
actcattctgtttcc

SEQ ID NO: 1288750 - DNA, 15 bp, Homo sapiens
tactcattctgtttc

SEQ ID NO: 1288751 - DNA, 15 bp, Homo sapiens
ctactcattctgttt

SEQ ID NO: 1288752 - DNA, 15 bp, Homo sapiens
actactcattctgtt

SEQ ID NO: 1288753 - DNA, 15 bp, Homo sapiens
tactactcattctgt

SEQ ID NO: 1288754 - DNA, 15 bp, Homo sapiens
gtactactcattctg

SEQ ID NO: 1288755 - DNA, 15 bp, Homo sapiens
tgtactactcattct

SEQ ID NO: 1288756 - DNA, 15 bp, Homo sapiens
atgtactactcattc

SEQ ID NO: 1288757 - DNA, 15 bp, Homo sapiens
catgtactactcatt

SEQ ID NO: 1288758 - DNA, 15 bp, Homo sapiens
tcatgtactactcat

SEQ ID NO: 1288759 - DNA, 15 bp, Homo sapiens
ctcatgtactactca

SEQ ID NO: 1288760 - DNA, 15 bp, Homo sapiens
tctcatgtactactc

SEQ ID NO: 1288761 - DNA, 15 bp, Homo sapiens
atctcatgtactact

SEQ ID NO: 1288762 - DNA, 15 bp, Homo sapiens
aatctcatgtactac

SEQ ID NO: 1288763 - DNA, 15 bp, Homo sapiens
aaatctcatgtacta

SEQ ID NO: 1288764 - DNA, 15 bp, Homo sapiens
aaaatctcatgtact

SEQ ID NO: 1288765 - DNA, 15 bp, Homo sapiens
gaaaatctcatgtac

SEQ ID NO: 1288766 - DNA, 15 bp, Homo sapiens
agaaaatctcatgta

SEQ ID NO: 1288767 - DNA, 15 bp, Homo sapiens
cagaaaatctcatgt

SEQ ID NO: 1288768 - DNA, 15 bp, Homo sapiens
gcagaaaatctcatg

SEQ ID NO: 1288769 - DNA, 15 bp, Homo sapiens
ggcagaaaatctcat

SEQ ID NO: 1288770 - DNA, 15 bp, Homo sapiens
aggcagaaaatctca

SEQ ID NO: 1288771 - DNA, 15 bp, Homo sapiens
gaggcagaaaatctc

SEQ ID NO: 1288772 - DNA, 15 bp, Homo sapiens
tgaggcagaaaatct

SEQ ID NO: 1288773 - DNA, 15 bp, Homo sapiens
atgaggcagaaaatc

SEQ ID NO: 1288774 - DNA, 15 bp, Homo sapiens
aatgaggcagaaaat

SEQ ID NO: 1288775 - DNA, 15 bp, Homo sapiens
caatgaggcagaaaa

SEQ ID NO: 1288776 - DNA, 15 bp, Homo sapiens
ccaatgaggcagaaa

SEQ ID NO: 1288777 - DNA, 15 bp, Homo sapiens
tccaatgaggcagaa

SEQ ID NO: 1288778 - DNA, 15 bp, Homo sapiens
ctccaatgaggcaga

SEQ ID NO: 1288779 - DNA, 15 bp, Homo sapiens
actccaatgaggcag

SEQ ID NO: 1288780 - DNA, 15 bp, Homo sapiens
tactccaatgaggca

SEQ ID NO: 1288781 - DNA, 15 bp, Homo sapiens
ctactccaatgaggc

SEQ ID NO: 1288782 - DNA, 15 bp, Homo sapiens
actactccaatgagg

SEQ ID NO: 1288783 - DNA, 15 bp, Homo sapiens
tactactccaatgag

SEQ ID NO: 1288784 - DNA, 15 bp, Homo sapiens
atactactccaatga

SEQ ID NO: 1288785 - DNA, 15 bp, Homo sapiens
aatactactccaatg

SEQ ID NO: 1288786 - DNA, 15 bp, Homo sapiens
caatactactccaat

SEQ ID NO: 1288787 - DNA, 15 bp, Homo sapiens
tcaatactactccaa

SEQ ID NO: 1288788 - DNA, 15 bp, Homo sapiens
ttcaatactactcca

SEQ ID NO: 1288789 - DNA, 15 bp, Homo sapiens
cttcaatactactcc

SEQ ID NO: 1288790 - DNA, 15 bp, Homo sapiens
tcttcaatactactc

SEQ ID NO: 1288791 - DNA, 15 bp, Homo sapiens
atcttcaatactact

SEQ ID NO: 1288792 - DNA, 15 bp, Homo sapiens
tatcttcaatactac

SEQ ID NO: 1288793 - DNA, 15 bp, Homo sapiens
ttatcttcaatacta

SEQ ID NO: 1288794 - DNA, 15 bp, Homo sapiens
attatcttcaatact

SEQ ID NO: 1288795 - DNA, 15 bp, Homo sapiens
aattatcttcaatac

SEQ ID NO: 1288796 - DNA, 15 bp, Homo sapiens
taattatcttcaata

SEQ ID NO: 1288797 - DNA, 15 bp, Homo sapiens
ttaattatcttcaat

SEQ ID NO: 1288798 - DNA, 15 bp, Homo sapiens
attaattatcttcaa

SEQ ID NO: 1288799 - DNA, 15 bp, Homo sapiens
tattaattatcttca

SEQ ID NO: 1288800 - DNA, 15 bp, Homo sapiens
atattaattatcttc

SEQ ID NO: 1288801 - DNA, 15 bp, Homo sapiens
tatattaattatctt

SEQ ID NO: 1288802 - DNA, 15 bp, Homo sapiens
ttatattaattatct

SEQ ID NO: 1288803 - DNA, 15 bp, Homo sapiens
tttatattaattatc

SEQ ID NO: 1288804 - DNA, 15 bp, Homo sapiens
ctttatattaattat

SEQ ID NO: 1288805 - DNA, 15 bp, Homo sapiens
cctttatattaatta

SEQ ID NO: 1288806 - DNA, 15 bp, Homo sapiens
ccctttatattaatt

SEQ ID NO: 1288807 - DNA, 15 bp, Homo sapiens
tccctttatattaat

SEQ ID NO: 1288808 - DNA, 15 bp, Homo sapiens
ttccctttatattaa

SEQ ID NO: 1288809 - DNA, 15 bp, Homo sapiens
tttccctttatatta

SEQ ID NO: 1288810 - DNA, 15 bp, Homo sapiens
atttccctttatatt

SEQ ID NO: 1288811 - DNA, 15 bp, Homo sapiens
aatttccctttatat

SEQ ID NO: 1288812 - DNA, 15 bp, Homo sapiens
caatttccctttata

SEQ ID NO: 1288813 - DNA, 15 bp, Homo sapiens
acaatttccctttat

SEQ ID NO: 1288814 - DNA, 15 bp, Homo sapiens
tacaatttcccttta

SEQ ID NO: 1288815 - DNA, 15 bp, Homo sapiens
atacaatttcccttt

SEQ ID NO: 1288816 - DNA, 15 bp, Homo sapiens
tatacaatttccctt

SEQ ID NO: 1288817 - DNA, 15 bp, Homo sapiens
atatacaatttccct

SEQ ID NO: 1288818 - DNA, 15 bp, Homo sapiens
aatatacaatttccc

SEQ ID NO: 1288819 - DNA, 15 bp, Homo sapiens
aaatatacaatttcc

SEQ ID NO: 1288820 - DNA, 15 bp, Homo sapiens
taaatatacaatttc

SEQ ID NO: 1288821 - DNA, 15 bp, Homo sapiens
gtaaatatacaattt

SEQ ID NO: 1288822 - DNA, 15 bp, Homo sapiens
agtaaatatacaatt

SEQ ID NO: 1288823 - DNA, 15 bp, Homo sapiens
cagtaaatatacaat

SEQ ID NO: 1288824 - DNA, 15 bp, Homo sapiens
tcagtaaatatacaa

SEQ ID NO: 1288825 - DNA, 15 bp, Homo sapiens
atcagtaaatataca

SEQ ID NO: 1288826 - DNA, 15 bp, Homo sapiens
aatcagtaaatatac

SEQ ID NO: 1288827 - DNA, 15 bp, Homo sapiens
taatcagtaaatata

SEQ ID NO: 1288828 - DNA, 15 bp, Homo sapiens
ttaatcagtaaatat

SEQ ID NO: 1288829 - DNA, 15 bp, Homo sapiens
attaatcagtaaata

SEQ ID NO: 1288830 - DNA, 15 bp, Homo sapiens
aattaatcagtaaat

SEQ ID NO: 1288831 - DNA, 15 bp, Homo sapiens
caattaatcagtaaa

SEQ ID NO: 1288832 - DNA, 15 bp, Homo sapiens
tcaattaatcagtaa

SEQ ID NO: 1288833 - DNA, 15 bp, Homo sapiens
atcaattaatcagta

SEQ ID NO: 1288834 - DNA, 15 bp, Homo sapiens
tatcaattaatcagt

SEQ ID NO: 1288835 - DNA, 15 bp, Homo sapiens
atatcaattaatcag

SEQ ID NO: 1288836 - DNA, 15 bp, Homo sapiens
gatatcaattaatca

SEQ ID NO: 1288837 - DNA, 15 bp, Homo sapiens
tgatatcaattaatc

SEQ ID NO: 1288838 - DNA, 15 bp, Homo sapiens
ttgatatcaattaat

SEQ ID NO: 1288839 - DNA, 15 bp, Homo sapiens
attgatatcaattaa

SEQ ID NO: 1288840 - DNA, 15 bp, Homo sapiens
gattgatatcaatta

SEQ ID NO: 1288841 - DNA, 15 bp, Homo sapiens
agattgatatcaatt

SEQ ID NO: 1288842 - DNA, 15 bp, Homo sapiens
tagattgatatcaat

SEQ ID NO: 1288843 - DNA, 15 bp, Homo sapiens
atagattgatatcaa

SEQ ID NO: 1288844 - DNA, 15 bp, Homo sapiens
aatagattgatatca

SEQ ID NO: 1288845 - DNA, 15 bp, Homo sapiens
taatagattgatatc

SEQ ID NO: 1288846 - DNA, 15 bp, Homo sapiens
ttaatagattgatat

SEQ ID NO: 1288847 - DNA, 15 bp, Homo sapiens
attaatagattgata

SEQ ID NO: 1288848 - DNA, 15 bp, Homo sapiens
aattaatagattgat

SEQ ID NO: 1288849 - DNA, 15 bp, Homo sapiens
gaattaatagattga

SEQ ID NO: 1288850 - DNA, 15 bp, Homo sapiens
ggaattaatagattg

SEQ ID NO: 1288851 - DNA, 15 bp, Homo sapiens
tggaattaatagatt

SEQ ID NO: 1288852 - DNA, 15 bp, Homo sapiens
ttggaattaatagat

SEQ ID NO: 1288853 - DNA, 15 bp, Homo sapiens
gttggaattaataga

SEQ ID NO: 1288854 - DNA, 15 bp, Homo sapiens
tgttggaattaatag

SEQ ID NO: 1288855 - DNA, 15 bp, Homo sapiens
ttgttggaattaata

SEQ ID NO: 1288856 - DNA, 15 bp, Homo sapiens
cttgttggaattaat

SEQ ID NO: 1288857 - DNA, 15 bp, Homo sapiens
acttgttggaattaa

SEQ ID NO: 1288858 - DNA, 15 bp, Homo sapiens
cacttgttggaatta

SEQ ID NO: 1288859 - DNA, 15 bp, Homo sapiens
tcacttgttggaatt

SEQ ID NO: 1288860 - DNA, 15 bp, Homo sapiens
ttcacttgttggaat

SEQ ID NO: 1288861 - DNA, 15 bp, Homo sapiens
attcacttgttggaa

SEQ ID NO: 1288862 - DNA, 15 bp, Homo sapiens
cattcacttgttgga

SEQ ID NO: 1288863 - DNA, 15 bp, Homo sapiens
acattcacttgttgg

SEQ ID NO: 1288864 - DNA, 15 bp, Homo sapiens
gacattcacttgttg

SEQ ID NO: 1288865 - DNA, 15 bp, Homo sapiens
agacattcacttgtt

SEQ ID NO: 1288866 - DNA, 15 bp, Homo sapiens
gagacattcacttgt

SEQ ID NO: 1288867 - DNA, 15 bp, Homo sapiens
agagacattcacttg

SEQ ID NO: 1288868 - DNA, 15 bp, Homo sapiens
cagagacattcactt

SEQ ID NO: 1288869 - DNA, 15 bp, Homo sapiens
ccagagacattcact

SEQ ID NO: 1288870 - DNA, 15 bp, Homo sapiens
tccagagacattcac

SEQ ID NO: 1288871 - DNA, 15 bp, Homo sapiens
ttccagagacattca

SEQ ID NO: 1288872 - DNA, 15 bp, Homo sapiens
tttccagagacattc

SEQ ID NO: 1288873 - DNA, 15 bp, Homo sapiens
ctttccagagacatt

SEQ ID NO: 1288874 - DNA, 15 bp, Homo sapiens
tctttccagagacat

SEQ ID NO: 1288875 - DNA, 15 bp, Homo sapiens
atctttccagagaca

SEQ ID NO: 1288876 - DNA, 15 bp, Homo sapiens
aatctttccagagac

SEQ ID NO: 1288877 - DNA, 15 bp, Homo sapiens
taatctttccagaga

SEQ ID NO: 1288878 - DNA, 15 bp, Homo sapiens
ataatctttccagag

SEQ ID NO: 1288879 - DNA, 15 bp, Homo sapiens
gataatctttccaga

SEQ ID NO: 1288880 - DNA, 15 bp, Homo sapiens
tgataatctttccag

SEQ ID NO: 1288881 - DNA, 15 bp, Homo sapiens
ttgataatctttcca

SEQ ID NO: 1288882 - DNA, 15 bp, Homo sapiens
cttgataatctttcc

SEQ ID NO: 1288883 - DNA, 15 bp, Homo sapiens
ccttgataatctttc

SEQ ID NO: 1288884 - DNA, 15 bp, Homo sapiens
gccttgataatcttt

SEQ ID NO: 1288885 - DNA, 15 bp, Homo sapiens
tgccttgataatctt

SEQ ID NO: 1288886 - DNA, 15 bp, Homo sapiens
ttgccttgataatct

SEQ ID NO: 1288887 - DNA, 15 bp, Homo sapiens
tttgccttgataatc

SEQ ID NO: 1288888 - DNA, 15 bp, Homo sapiens
ctttgccttgataat

SEQ ID NO: 1288889 - DNA, 15 bp, Homo sapiens
actttgccttgataa

SEQ ID NO: 1288890 - DNA, 15 bp, Homo sapiens
cactttgccttgata

SEQ ID NO: 1288891 - DNA, 15 bp, Homo sapiens
acactttgccttgat

SEQ ID NO: 1288892 - DNA, 15 bp, Homo sapiens
aacactttgccttga

SEQ ID NO: 1288893 - DNA, 15 bp, Homo sapiens
taacactttgccttg

SEQ ID NO: 1288894 - DNA, 15 bp, Homo sapiens
ttaacactttgcctt

SEQ ID NO: 1288895 - DNA, 15 bp, Homo sapiens
tttaacactttgcct

SEQ ID NO: 1288896 - DNA, 15 bp, Homo sapiens
atttaacactttgcc

SEQ ID NO: 1288897 - DNA, 15 bp, Homo sapiens
aatttaacactttgc

SEQ ID NO: 1288898 - DNA, 15 bp, Homo sapiens
caatttaacactttg

SEQ ID NO: 1288899 - DNA, 15 bp, Homo sapiens
ccaatttaacacttt

SEQ ID NO: 1288900 - DNA, 15 bp, Homo sapiens
gccaatttaacactt

SEQ ID NO: 1288901 - DNA, 15 bp, Homo sapiens
tgccaatttaacact

SEQ ID NO: 1288902 - DNA, 15 bp, Homo sapiens
ttgccaatttaacac

SEQ ID NO: 1288903 - DNA, 15 bp, Homo sapiens
tttgccaatttaaca

SEQ ID NO: 1288904 - DNA, 15 bp, Homo sapiens
gtttgccaatttaac

SEQ ID NO: 1288905 - DNA, 15 bp, Homo sapiens
agtttgccaatttaa

SEQ ID NO: 1288906 - DNA, 15 bp, Homo sapiens
tagtttgccaattta

SEQ ID NO: 1288907 - DNA, 15 bp, Homo sapiens
ttagtttgccaattt

SEQ ID NO: 1288908 - DNA, 15 bp, Homo sapiens
tttagtttgccaatt

SEQ ID NO: 1288909 - DNA, 15 bp, Homo sapiens
ctttagtttgccaat

SEQ ID NO: 1288910 - DNA, 15 bp, Homo sapiens
actttagtttgccaa

SEQ ID NO: 1288911 - DNA, 15 bp, Homo sapiens
gactttagtttgcca

SEQ ID NO: 1288912 - DNA, 15 bp, Homo sapiens
tgactttagtttgcc

SEQ ID NO: 1288913 - DNA, 15 bp, Homo sapiens
atgactttagtttgc

SEQ ID NO: 1288914 - DNA, 15 bp, Homo sapiens
gatgactttagtttg

SEQ ID NO: 1288915 - DNA, 15 bp, Homo sapiens
ggatgactttagttt

SEQ ID NO: 1288916 - DNA, 15 bp, Homo sapiens
tggatgactttagtt

SEQ ID NO: 1288917 - DNA, 15 bp, Homo sapiens
ttggatgactttagt

SEQ ID NO: 1288918 - DNA, 15 bp, Homo sapiens
tttggatgactttag

SEQ ID NO: 1288919 - DNA, 15 bp, Homo sapiens
gtttggatgacttta

SEQ ID NO: 1288920 - DNA, 15 bp, Homo sapiens
ggtttggatgacttt

SEQ ID NO: 1288921 - DNA, 15 bp, Homo sapiens
aggtttggatgactt

SEQ ID NO: 1288922 - DNA, 15 bp, Homo sapiens
aaggtttggatgact

SEQ ID NO: 1288923 - DNA, 15 bp, Homo sapiens
gaaggtttggatgac

SEQ ID NO: 1288924 - DNA, 15 bp, Homo sapiens
tgaaggtttggatga

SEQ ID NO: 1288925 - DNA, 15 bp, Homo sapiens
atgaaggtttggatg

SEQ ID NO: 1288926 - DNA, 15 bp, Homo sapiens
aatgaaggtttggat

SEQ ID NO: 1288927 - DNA, 15 bp, Homo sapiens
aaatgaaggtttgga

SEQ ID NO: 1288928 - DNA, 15 bp, Homo sapiens
aaaatgaaggtttgg

SEQ ID NO: 1288929 - DNA, 15 bp, Homo sapiens
aaaaatgaaggtttg

SEQ ID NO: 1288930 - DNA, 15 bp, Homo sapiens
gaaaaatgaaggttt

SEQ ID NO: 1288931 - DNA, 15 bp, Homo sapiens
agaaaaatgaaggtt

SEQ ID NO: 1288932 - DNA, 15 bp, Homo sapiens
cagaaaaatgaaggt

SEQ ID NO: 1288933 - DNA, 15 bp, Homo sapiens
gcagaaaaatgaagg

SEQ ID NO: 1288934 - DNA, 15 bp, Homo sapiens
agcagaaaaatgaag

SEQ ID NO: 1288935 - DNA, 15 bp, Homo sapiens
gagcagaaaaatgaa

SEQ ID NO: 1288936 - DNA, 15 bp, Homo sapiens
tgagcagaaaaatga

SEQ ID NO: 1288937 - DNA, 15 bp, Homo sapiens
gtgagcagaaaaatg

SEQ ID NO: 1288938 - DNA, 15 bp, Homo sapiens
tgtgagcagaaaaat

SEQ ID NO: 1288939 - DNA, 15 bp, Homo sapiens
ctgtgagcagaaaaa

SEQ ID NO: 1288940 - DNA, 15 bp, Homo sapiens
actgtgagcagaaaa

SEQ ID NO: 1288941 - DNA, 15 bp, Homo sapiens
cactgtgagcagaaa

SEQ ID NO: 1288942 - DNA, 15 bp, Homo sapiens
acactgtgagcagaa

SEQ ID NO: 1288943 - DNA, 15 bp, Homo sapiens
aacactgtgagcaga

SEQ ID NO: 1288944 - DNA, 15 bp, Homo sapiens
caacactgtgagcag

SEQ ID NO: 1288945 - DNA, 15 bp, Homo sapiens
tcaacactgtgagca

SEQ ID NO: 1288946 - DNA, 15 bp, Homo sapiens
atcaacactgtgagc

SEQ ID NO: 1288947 - DNA, 15 bp, Homo sapiens
tatcaacactgtgag

SEQ ID NO: 1288948 - DNA, 15 bp, Homo sapiens
ttatcaacactgtga

SEQ ID NO: 1288949 - DNA, 15 bp, Homo sapiens
attatcaacactgtg

SEQ ID NO: 1288950 - DNA, 15 bp, Homo sapiens
aattatcaacactgt

SEQ ID NO: 1288951 - DNA, 15 bp, Homo sapiens
taattatcaacactg

SEQ ID NO: 1288952 - DNA, 15 bp, Homo sapiens
ttaattatcaacact

SEQ ID NO: 1288953 - DNA, 15 bp, Homo sapiens
attaattatcaacac

SEQ ID NO: 1288954 - DNA, 15 bp, Homo sapiens
gattaattatcaaca

SEQ ID NO: 1288955 - DNA, 15 bp, Homo sapiens
tgattaattatcaac

SEQ ID NO: 1288956 - DNA, 15 bp, Homo sapiens
ctgattaattatcaa

SEQ ID NO: 1288957 - DNA, 15 bp, Homo sapiens
tctgattaattatca

SEQ ID NO: 1288958 - DNA, 15 bp, Homo sapiens
ttctgattaattatc

SEQ ID NO: 1288959 - DNA, 15 bp, Homo sapiens
tttctgattaattat

SEQ ID NO: 1288960 - DNA, 15 bp, Homo sapiens
ttttctgattaatta

SEQ ID NO: 1288961 - DNA, 15 bp, Homo sapiens
tttttctgattaatt

SEQ ID NO: 1288962 - DNA, 15 bp, Homo sapiens
ttttttctgattaat

SEQ ID NO: 1288963 - DNA, 15 bp, Homo sapiens
cttttttctgattaa

SEQ ID NO: 1288964 - DNA, 15 bp, Homo sapiens
tcttttttctgatta

SEQ ID NO: 1288965 - DNA, 15 bp, Homo sapiens
ctcttttttctgatt

SEQ ID NO: 1288966 - DNA, 15 bp, Homo sapiens
gctcttttttctgat

SEQ ID NO: 1288967 - DNA, 15 bp, Homo sapiens
tgctcttttttctga

SEQ ID NO: 1288968 - DNA, 15 bp, Homo sapiens
ttgctcttttttctg

SEQ ID NO: 1288969 - DNA, 15 bp, Homo sapiens
tttgctcttttttct

SEQ ID NO: 1288970 - DNA, 15 bp, Homo sapiens
ttttgctcttttttc

SEQ ID NO: 1288971 - DNA, 15 bp, Homo sapiens
tttttgctctttttt

SEQ ID NO: 1288972 - DNA, 15 bp, Homo sapiens
ttttttgctcttttt

SEQ ID NO: 1288973 - DNA, 15 bp, Homo sapiens
attttttgctctttt

SEQ ID NO: 1288974 - DNA, 15 bp, Homo sapiens
tattttttgctcttt

SEQ ID NO: 1288975 - DNA, 15 bp, Homo sapiens
atattttttgctctt

SEQ ID NO: 1288976 - DNA, 15 bp, Homo sapiens
aatattttttgctct

SEQ ID NO: 1288977 - DNA, 15 bp, Homo sapiens
taatattttttgctc

SEQ ID NO: 1288978 - DNA, 15 bp, Homo sapiens
ttaatattttttgct

SEQ ID NO: 1288979 - DNA, 15 bp, Homo sapiens
cttaatattttttgc

SEQ ID NO: 1288980 - DNA, 15 bp, Homo sapiens
ccttaatattttttg

SEQ ID NO: 1288981 - DNA, 15 bp, Homo sapiens
accttaatatttttt

SEQ ID NO: 1288982 - DNA, 15 bp, Homo sapiens
taccttaatattttt

SEQ ID NO: 1288983 - DNA, 15 bp, Homo sapiens
ttaccttaatatttt

SEQ ID NO: 1288984 - DNA, 15 bp, Homo sapiens
attaccttaatattt

SEQ ID NO: 1288985 - DNA, 15 bp, Homo sapiens
aattaccttaatatt

SEQ ID NO: 1288986 - DNA, 15 bp, Homo sapiens
aaattaccttaatat

SEQ ID NO: 1288987 - DNA, 15 bp, Homo sapiens
caaattaccttaata

SEQ ID NO: 1288988 - DNA, 15 bp, Homo sapiens
tcaaattaccttaat

SEQ ID NO: 1288989 - DNA, 15 bp, Homo sapiens
ttcaaattaccttaa

SEQ ID NO: 1288990 - DNA, 15 bp, Homo sapiens
tttcaaattacctta

SEQ ID NO: 1288991 - DNA, 15 bp, Homo sapiens
gtttcaaattacctt

SEQ ID NO: 1288992 - DNA, 15 bp, Homo sapiens
tgtttcaaattacct

SEQ ID NO: 1288993 - DNA, 15 bp, Homo sapiens
ttgtttcaaattacc

SEQ ID NO: 1288994 - DNA, 15 bp, Homo sapiens
tttgtttcaaattac

SEQ ID NO: 1288995 - DNA, 15 bp, Homo sapiens
ctttgtttcaaatta

SEQ ID NO: 1288996 - DNA, 15 bp, Homo sapiens
actttgtttcaaatt

SEQ ID NO: 1288997 - DNA, 15 bp, Homo sapiens
tactttgtttcaaat

SEQ ID NO: 1288998 - DNA, 15 bp, Homo sapiens
atactttgtttcaaa

SEQ ID NO: 1288999 - DNA, 15 bp, Homo sapiens
catactttgtttcaa

SEQ ID NO: 1289000 - DNA, 15 bp, Homo sapiens
acatactttgtttca

SEQ ID NO: 1289001 - DNA, 15 bp, Homo sapiens
aacatactttgtttc

SEQ ID NO: 1289002 - DNA, 15 bp, Homo sapiens
taacatactttgttt

SEQ ID NO: 1289003 - DNA, 15 bp, Homo sapiens
ataacatactttgtt

SEQ ID NO: 1289004 - DNA, 15 bp, Homo sapiens
tataacatactttgt

SEQ ID NO: 1289005 - DNA, 15 bp, Homo sapiens
ttataacatactttg

SEQ ID NO: 1289006 - DNA, 15 bp, Homo sapiens
gttataacatacttt

SEQ ID NO: 1289007 - DNA, 15 bp, Homo sapiens
tgttataacatactt

SEQ ID NO: 1289008 - DNA, 15 bp, Homo sapiens
atgttataacatact

SEQ ID NO: 1289009 - DNA, 15 bp, Homo sapiens
tatgttataacatac

SEQ ID NO: 1289010 - DNA, 15 bp, Homo sapiens
gtatgttataacata

SEQ ID NO: 1289011 - DNA, 15 bp, Homo sapiens
agtatgttataacat

SEQ ID NO: 1289012 - DNA, 15 bp, Homo sapiens
tagtatgttataaca

SEQ ID NO: 1289013 - DNA, 15 bp, Homo sapiens
atagtatgttataac

SEQ ID NO: 1289014 - DNA, 15 bp, Homo sapiens
catagtatgttataa

SEQ ID NO: 1289015 - DNA, 15 bp, Homo sapiens
acatagtatgttata

SEQ ID NO: 1289016 - DNA, 15 bp, Homo sapiens
aacatagtatgttat

SEQ ID NO: 1289017 - DNA, 15 bp, Homo sapiens
aaacatagtatgtta

SEQ ID NO: 1289018 - DNA, 15 bp, Homo sapiens
aaaacatagtatgtt

SEQ ID NO: 1289019 - DNA, 15 bp, Homo sapiens
aaaaacatagtatgt

SEQ ID NO: 1289020 - DNA, 15 bp, Homo sapiens
aaaaaacatagtatg

SEQ ID NO: 1289021 - DNA, 15 bp, Homo sapiens
taaaaaacatagtat

SEQ ID NO: 1289022 - DNA, 15 bp, Homo sapiens
ataaaaaacatagta

SEQ ID NO: 1289023 - DNA, 15 bp, Homo sapiens
tataaaaaacatagt

SEQ ID NO: 1289024 - DNA, 15 bp, Homo sapiens
atataaaaaacatag

SEQ ID NO: 1289025 - DNA, 15 bp, Homo sapiens
tatataaaaaacata

SEQ ID NO: 1289026 - DNA, 15 bp, Homo sapiens
atatataaaaaacat

SEQ ID NO: 1289027 - DNA, 15 bp, Homo sapiens
aatatataaaaaaca

SEQ ID NO: 1289028 - DNA, 15 bp, Homo sapiens
aaatatataaaaaac

SEQ ID NO: 1289029 - DNA, 15 bp, Homo sapiens
aaaatatataaaaaa

SEQ ID NO: 1289030 - DNA, 15 bp, Homo sapiens
ataaaaatatataaa

SEQ ID NO: 1289031 - DNA, 15 bp, Homo sapiens
tataaaaatatataa

SEQ ID NO: 1289032 - DNA, 15 bp, Homo sapiens
atataaaaatatata

SEQ ID NO: 1289033 - DNA, 15 bp, Homo sapiens
aatataaaaatatat

SEQ ID NO: 1289034 - DNA, 15 bp, Homo sapiens
taatataaaaatata

SEQ ID NO: 1289035 - DNA, 15 bp, Homo sapiens
ctaatataaaaatat

SEQ ID NO: 1289036 - DNA, 15 bp, Homo sapiens
tctaatataaaaata

SEQ ID NO: 1289037 - DNA, 15 bp, Homo sapiens
ttctaatataaaaat

SEQ ID NO: 1289038 - DNA, 15 bp, Homo sapiens
attctaatataaaaa

SEQ ID NO: 1289039 - DNA, 15 bp, Homo sapiens
aattctaatataaaa

SEQ ID NO: 1289040 - DNA, 15 bp, Homo sapiens
caattctaatataaa

SEQ ID NO: 1289041 - DNA, 15 bp, Homo sapiens
tcaattctaatataa

SEQ ID NO: 1289042 - DNA, 15 bp, Homo sapiens
ttcaattctaatata

SEQ ID NO: 1289043 - DNA, 15 bp, Homo sapiens
tttcaattctaatat

SEQ ID NO: 1289044 - DNA, 15 bp, Homo sapiens
atttcaattctaata

SEQ ID NO: 1289045 - DNA, 15 bp, Homo sapiens
tatttcaattctaat

SEQ ID NO: 1289046 - DNA, 15 bp, Homo sapiens
atatttcaattctaa

SEQ ID NO: 1289047 - DNA, 15 bp, Homo sapiens
aatatttcaattcta

SEQ ID NO: 1289048 - DNA, 15 bp, Homo sapiens
gaatatttcaattct

SEQ ID NO: 1289049 - DNA, 15 bp, Homo sapiens
tgaatatttcaattc

SEQ ID NO: 1289050 - DNA, 15 bp, Homo sapiens
ctgaatatttcaatt

SEQ ID NO: 1289051 - DNA, 15 bp, Homo sapiens
actgaatatttcaat

SEQ ID NO: 1289052 - DNA, 15 bp, Homo sapiens
tactgaatatttcaa

SEQ ID NO: 1289053 - DNA, 15 bp, Homo sapiens
atactgaatatttca

SEQ ID NO: 1289054 - DNA, 15 bp, Homo sapiens
aatactgaatatttc

SEQ ID NO: 1289055 - DNA, 15 bp, Homo sapiens
aaatactgaatattt

SEQ ID NO: 1289056 - DNA, 15 bp, Homo sapiens
gaaatactgaatatt

SEQ ID NO: 1289057 - DNA, 15 bp, Homo sapiens
agaaatactgaatat

SEQ ID NO: 1289058 - DNA, 15 bp, Homo sapiens
aagaaatactgaata

SEQ ID NO: 1289059 - DNA, 15 bp, Homo sapiens
aaagaaatactgaat

SEQ ID NO: 1289060 - DNA, 15 bp, Homo sapiens
aaaagaaatactgaa

SEQ ID NO: 1289061 - DNA, 15 bp, Homo sapiens
taaaagaaatactga

SEQ ID NO: 1289062 - DNA, 15 bp, Homo sapiens
gtaaaagaaatactg

SEQ ID NO: 1289063 - DNA, 15 bp, Homo sapiens
tgtaaaagaaatact

SEQ ID NO: 1289064 - DNA, 15 bp, Homo sapiens
ttgtaaaagaaatac

SEQ ID NO: 1289065 - DNA, 15 bp, Homo sapiens
tttgtaaaagaaata

SEQ ID NO: 1289066 - DNA, 15 bp, Homo sapiens
ttttgtaaaagaaat

SEQ ID NO: 1289067 - DNA, 15 bp, Homo sapiens
attttgtaaaagaaa

SEQ ID NO: 1289068 - DNA, 15 bp, Homo sapiens
aattttgtaaaagaa

SEQ ID NO: 1289069 - DNA, 15 bp, Homo sapiens
aaattttgtaaaaga

SEQ ID NO: 1289070 - DNA, 15 bp, Homo sapiens
aaaattttgtaaaag

SEQ ID NO: 1289071 - DNA, 15 bp, Homo sapiens
aaaaattttgtaaaa

SEQ ID NO: 1289072 - DNA, 15 bp, Homo sapiens
gaaaaattttgtaaa

SEQ ID NO: 1289073 - DNA, 15 bp, Homo sapiens
agaaaaattttgtaa

SEQ ID NO: 1289074 - DNA, 15 bp, Homo sapiens
aagaaaaattttgta

SEQ ID NO: 1289075 - DNA, 15 bp, Homo sapiens
aaagaaaaattttgt

SEQ ID NO: 1289076 - DNA, 15 bp, Homo sapiens
gaaagaaaaattttg

SEQ ID NO: 1289077 - DNA, 15 bp, Homo sapiens
tgaaagaaaaatttt

SEQ ID NO: 1289078 - DNA, 15 bp, Homo sapiens
ttgaaagaaaaattt

SEQ ID NO: 1289079 - DNA, 15 bp, Homo sapiens
tttgaaagaaaaatt

SEQ ID NO: 1289080 - DNA, 15 bp, Homo sapiens
ttttgaaagaaaaat

SEQ ID NO: 1289081 - DNA, 15 bp, Homo sapiens
attttgaaagaaaaa

SEQ ID NO: 1289082 - DNA, 15 bp, Homo sapiens
cattttgaaagaaaa

SEQ ID NO: 1289083 - DNA, 15 bp, Homo sapiens
acattttgaaagaaa

SEQ ID NO: 1289084 - DNA, 15 bp, Homo sapiens
tacattttgaaagaa

SEQ ID NO: 1289085 - DNA, 15 bp, Homo sapiens
atacattttgaaaga

SEQ ID NO: 1289086 - DNA, 15 bp, Homo sapiens
tatacattttgaaag

SEQ ID NO: 1289087 - DNA, 15 bp, Homo sapiens
gtatacattttgaaa

SEQ ID NO: 1289088 - DNA, 15 bp, Homo sapiens
agtatacattttgaa

SEQ ID NO: 1289089 - DNA, 15 bp, Homo sapiens
aagtatacattttga

SEQ ID NO: 1289090 - DNA, 15 bp, Homo sapiens
aaagtatacattttg

SEQ ID NO: 1289091 - DNA, 15 bp, Homo sapiens
aaaagtatacatttt

SEQ ID NO: 1289092 - DNA, 15 bp, Homo sapiens
aaaaaagtatacatt

SEQ ID NO: 1289093 - DNA, 15 bp, Homo sapiens
aaaaaaagtatacat

SEQ ID NO: 1289094 - DNA, 15 bp, Homo sapiens
aaaaaaaagtataca

SEQ ID NO: 1289095 - DNA, 15 bp, Homo sapiens
gaaaaaaaagtatac

SEQ ID NO: 1289096 - DNA, 15 bp, Homo sapiens
agaaaaaaaagtata

SEQ ID NO: 1289097 - DNA, 15 bp, Homo sapiens
aagaaaaaaaagtat

SEQ ID NO: 1289098 - DNA, 15 bp, Homo sapiens
taagaaaaaaaagta

SEQ ID NO: 1289099 - DNA, 15 bp, Homo sapiens
ttaagaaaaaaaagt

SEQ ID NO: 1289100 - DNA, 15 bp, Homo sapiens
attaagaaaaaaaag

SEQ ID NO: 1289101 - DNA, 15 bp, Homo sapiens
aattaagaaaaaaaa

SEQ ID NO: 1289102 - DNA, 15 bp, Homo sapiens
aaattaagaaaaaaa

SEQ ID NO: 1289103 - DNA, 15 bp, Homo sapiens
aaaattaagaaaaaa

SEQ ID NO: 1289104 - DNA, 15 bp, Homo sapiens
gcaaaaaaaaaaatt

SEQ ID NO: 1289105 - DNA, 15 bp, Homo sapiens
tgcaaaaaaaaaaat

SEQ ID NO: 1289106 - DNA, 15 bp, Homo sapiens
gctgcaaaaaaaaaa

SEQ ID NO: 1289107 - DNA, 15 bp, Homo sapiens
agctgcaaaaaaaaa

SEQ ID NO: 1289108 - DNA, 15 bp, Homo sapiens
aagctgcaaaaaaaa

SEQ ID NO: 1289109 - DNA, 15 bp, Homo sapiens
gaagctgcaaaaaaa

SEQ ID NO: 1289110 - DNA, 15 bp, Homo sapiens
agaagctgcaaaaaa

SEQ ID NO: 1289111 - DNA, 15 bp, Homo sapiens
gagaagctgcaaaaa

SEQ ID NO: 1289112 - DNA, 15 bp, Homo sapiens
tgagaagctgcaaaa

SEQ ID NO: 1289113 - DNA, 15 bp, Homo sapiens
atgagaagctgcaaa

SEQ ID NO: 1289114 - DNA, 15 bp, Homo sapiens
catgagaagctgcaa

SEQ ID NO: 1289115 - DNA, 15 bp, Homo sapiens
ccatgagaagctgca

SEQ ID NO: 1289116 - DNA, 15 bp, Homo sapiens
accatgagaagctgc

SEQ ID NO: 1289117 - DNA, 15 bp, Homo sapiens
gaccatgagaagctg

SEQ ID NO: 1289118 - DNA, 15 bp, Homo sapiens
tgaccatgagaagct

SEQ ID NO: 1289119 - DNA, 15 bp, Homo sapiens
ttgaccatgagaagc

SEQ ID NO: 1289120 - DNA, 15 bp, Homo sapiens
cttgaccatgagaag

SEQ ID NO: 1289121 - DNA, 15 bp, Homo sapiens
tcttgaccatgagaa

SEQ ID NO: 1289122 - DNA, 15 bp, Homo sapiens
ttcttgaccatgaga

SEQ ID NO: 1289123 - DNA, 15 bp, Homo sapiens
attcttgaccatgag

SEQ ID NO: 1289124 - DNA, 15 bp, Homo sapiens
cattcttgaccatga

SEQ ID NO: 1289125 - DNA, 15 bp, Homo sapiens
acattcttgaccatg

SEQ ID NO: 1289126 - DNA, 15 bp, Homo sapiens
tacattcttgaccat

SEQ ID NO: 1289127 - DNA, 15 bp, Homo sapiens
atacattcttgacca

SEQ ID NO: 1289128 - DNA, 15 bp, Homo sapiens
tatacattcttgacc

SEQ ID NO: 1289129 - DNA, 15 bp, Homo sapiens
gtatacattcttgac

SEQ ID NO: 1289130 - DNA, 15 bp, Homo sapiens
agtatacattcttga

SEQ ID NO: 1289131 - DNA, 15 bp, Homo sapiens
tagtatacattcttg

SEQ ID NO: 1289132 - DNA, 15 bp, Homo sapiens
atagtatacattctt

SEQ ID NO: 1289133 - DNA, 15 bp, Homo sapiens
aatagtatacattct

SEQ ID NO: 1289134 - DNA, 15 bp, Homo sapiens
gaatagtatacattc

SEQ ID NO: 1289135 - DNA, 15 bp, Homo sapiens
agaatagtatacatt

SEQ ID NO: 1289136 - DNA, 15 bp, Homo sapiens
cagaatagtatacat

SEQ ID NO: 1289137 - DNA, 15 bp, Homo sapiens
acagaatagtataca

SEQ ID NO: 1289138 - DNA, 15 bp, Homo sapiens
cacagaatagtatac

SEQ ID NO: 1289139 - DNA, 15 bp, Homo sapiens
ccacagaatagtata

SEQ ID NO: 1289140 - DNA, 15 bp, Homo sapiens
cccacagaatagtat

SEQ ID NO: 1289141 - DNA, 15 bp, Homo sapiens
gcccacagaatagta

SEQ ID NO: 1289142 - DNA, 15 bp, Homo sapiens
agcccacagaatagt

SEQ ID NO: 1289143 - DNA, 15 bp, Homo sapiens
tagcccacagaatag

SEQ ID NO: 1289144 - DNA, 15 bp, Homo sapiens
ttagcccacagaata

SEQ ID NO: 1289145 - DNA, 15 bp, Homo sapiens
tttagcccacagaat

SEQ ID NO: 1289146 - DNA, 15 bp, Homo sapiens
atttagcccacagaa

SEQ ID NO: 1289147 - DNA, 15 bp, Homo sapiens
tatttagcccacaga

SEQ ID NO: 1289148 - DNA, 15 bp, Homo sapiens
atatttagcccacag

SEQ ID NO: 1289149 - DNA, 15 bp, Homo sapiens
gatatttagcccaca

SEQ ID NO: 1289150 - DNA, 15 bp, Homo sapiens
tgatatttagcccac

SEQ ID NO: 1289151 - DNA, 15 bp, Homo sapiens
atgatatttagccca

SEQ ID NO: 1289152 - DNA, 15 bp, Homo sapiens
tatgatatttagccc

SEQ ID NO: 1289153 - DNA, 15 bp, Homo sapiens
atatgatatttagcc

SEQ ID NO: 1289154 - DNA, 15 bp, Homo sapiens
gatatgatatttagc

SEQ ID NO: 1289155 - DNA, 15 bp, Homo sapiens
agatatgatatttag

SEQ ID NO: 1289156 - DNA, 15 bp, Homo sapiens
aagatatgatattta

SEQ ID NO: 1289157 - DNA, 15 bp, Homo sapiens
taagatatgatattt

SEQ ID NO: 1289158 - DNA, 15 bp, Homo sapiens
ctaagatatgatatt

SEQ ID NO: 1289159 - DNA, 15 bp, Homo sapiens
tctaagatatgatat

SEQ ID NO: 1289160 - DNA, 15 bp, Homo sapiens
ttctaagatatgata

SEQ ID NO: 1289161 - DNA, 15 bp, Homo sapiens
attctaagatatgat

SEQ ID NO: 1289162 - DNA, 15 bp, Homo sapiens
aattctaagatatga

SEQ ID NO: 1289163 - DNA, 15 bp, Homo sapiens
taattctaagatatg

SEQ ID NO: 1289164 - DNA, 15 bp, Homo sapiens
ataattctaagatat

SEQ ID NO: 1289165 - DNA, 15 bp, Homo sapiens
tataattctaagata

SEQ ID NO: 1289166 - DNA, 15 bp, Homo sapiens
ttataattctaagat

SEQ ID NO: 1289167 - DNA, 15 bp, Homo sapiens
cttataattctaaga

SEQ ID NO: 1289168 - DNA, 15 bp, Homo sapiens
tcttataattctaag

SEQ ID NO: 1289169 - DNA, 15 bp, Homo sapiens
gtcttataattctaa

SEQ ID NO: 1289170 - DNA, 15 bp, Homo sapiens
tgtcttataattcta

SEQ ID NO: 1289171 - DNA, 15 bp, Homo sapiens
atgtcttataattct

SEQ ID NO: 1289172 - DNA, 15 bp, Homo sapiens
tatgtcttataattc

SEQ ID NO: 1289173 - DNA, 15 bp, Homo sapiens
ctatgtcttataatt

SEQ ID NO: 1289174 - DNA, 15 bp, Homo sapiens
tctatgtcttataat

SEQ ID NO: 1289175 - DNA, 15 bp, Homo sapiens
ttctatgtcttataa

SEQ ID NO: 1289176 - DNA, 15 bp, Homo sapiens
tttctatgtcttata

SEQ ID NO: 1289177 - DNA, 15 bp, Homo sapiens
gtttctatgtcttat

SEQ ID NO: 1289178 - DNA, 15 bp, Homo sapiens
tgtttctatgtctta

SEQ ID NO: 1289179 - DNA, 15 bp, Homo sapiens
atgtttctatgtctt

SEQ ID NO: 1289180 - DNA, 15 bp, Homo sapiens
aatgtttctatgtct

SEQ ID NO: 1289181 - DNA, 15 bp, Homo sapiens
taatgtttctatgtc

SEQ ID NO: 1289182 - DNA, 15 bp, Homo sapiens
ttaatgtttctatgt

SEQ ID NO: 1289183 - DNA, 15 bp, Homo sapiens
tttaatgtttctatg

SEQ ID NO: 1289184 - DNA, 15 bp, Homo sapiens
atttaatgtttctat

SEQ ID NO: 1289185 - DNA, 15 bp, Homo sapiens
catttaatgtttcta

SEQ ID NO: 1289186 - DNA, 15 bp, Homo sapiens
tcatttaatgtttct

SEQ ID NO: 1289187 - DNA, 15 bp, Homo sapiens
ttcatttaatgtttc

SEQ ID NO: 1289188 - DNA, 15 bp, Homo sapiens
attcatttaatgttt

SEQ ID NO: 1289189 - DNA, 15 bp, Homo sapiens
tattcatttaatgtt

SEQ ID NO: 1289190 - DNA, 15 bp, Homo sapiens
ctattcatttaatgt

SEQ ID NO: 1289191 - DNA, 15 bp, Homo sapiens
tctattcatttaatg

SEQ ID NO: 1289192 - DNA, 15 bp, Homo sapiens
ctctattcatttaat

SEQ ID NO: 1289193 - DNA, 15 bp, Homo sapiens
tctctattcatttaa

SEQ ID NO: 1289194 - DNA, 15 bp, Homo sapiens
atctctattcattta

SEQ ID NO: 1289195 - DNA, 15 bp, Homo sapiens
ttatctctattcatt

SEQ ID NO: 1289196 - DNA, 15 bp, Homo sapiens
tttatctctattcat

SEQ ID NO: 1289197 - DNA, 15 bp, Homo sapiens
gtttatctctattca

SEQ ID NO: 1289198 - DNA, 15 bp, Homo sapiens
agtttatctctattc

SEQ ID NO: 1289199 - DNA, 15 bp, Homo sapiens
gagtttatctctatt

SEQ ID NO: 1289200 - DNA, 15 bp, Homo sapiens
tgagtttatctctat

SEQ ID NO: 1289201 - DNA, 15 bp, Homo sapiens
ctgagtttatctcta

SEQ ID NO: 1289202 - DNA, 15 bp, Homo sapiens
cctgagtttatctct

SEQ ID NO: 1289203 - DNA, 15 bp, Homo sapiens
acctgagtttatctc

SEQ ID NO: 1289204 - DNA, 15 bp, Homo sapiens
cacctgagtttatct

SEQ ID NO: 1289205 - DNA, 15 bp, Homo sapiens
acacctgagtttatc

SEQ ID NO: 1289206 - DNA, 15 bp, Homo sapiens
tacacctgagtttat

SEQ ID NO: 1289207 - DNA, 15 bp, Homo sapiens
ttacacctgagttta

SEQ ID NO: 1289208 - DNA, 15 bp, Homo sapiens
tttacacctgagttt

SEQ ID NO: 1289209 - DNA, 15 bp, Homo sapiens
atttacacctgagtt

SEQ ID NO: 1289210 - DNA, 15 bp, Homo sapiens
aatttacacctgagt

SEQ ID NO: 1289211 - DNA, 15 bp, Homo sapiens
taatttacacctgag

SEQ ID NO: 1289212 - DNA, 15 bp, Homo sapiens
ataatttacacctga

SEQ ID NO: 1289213 - DNA, 15 bp, Homo sapiens
cataatttacacctg

SEQ ID NO: 1289214 - DNA, 15 bp, Homo sapiens
gcataatttacacct

SEQ ID NO: 1289215 - DNA, 15 bp, Homo sapiens
tgcataatttacacc

SEQ ID NO: 1289216 - DNA, 15 bp, Homo sapiens
ttgcataatttacac

SEQ ID NO: 1289217 - DNA, 15 bp, Homo sapiens
attgcataatttaca

SEQ ID NO: 1289218 - DNA, 15 bp, Homo sapiens
aattgcataatttac

SEQ ID NO: 1289219 - DNA, 15 bp, Homo sapiens
taattgcataattta

SEQ ID NO: 1289220 - DNA, 15 bp, Homo sapiens
ttaattgcataattt

SEQ ID NO: 1289221 - DNA, 15 bp, Homo sapiens
tttaattgcataatt

SEQ ID NO: 1289222 - DNA, 15 bp, Homo sapiens
ttttaattgcataat

SEQ ID NO: 1289223 - DNA, 15 bp, Homo sapiens
attttaattgcataa

SEQ ID NO: 1289224 - DNA, 15 bp, Homo sapiens
cattttaattgcata

SEQ ID NO: 1289225 - DNA, 15 bp, Homo sapiens
ccattttaattgcat

SEQ ID NO: 1289226 - DNA, 15 bp, Homo sapiens
tccattttaattgca

SEQ ID NO: 1289227 - DNA, 15 bp, Homo sapiens
gtccattttaattgc

SEQ ID NO: 1289228 - DNA, 15 bp, Homo sapiens
agtccattttaattg

SEQ ID NO: 1289229 - DNA, 15 bp, Homo sapiens
cagtccattttaatt

SEQ ID NO: 1289230 - DNA, 15 bp, Homo sapiens
gcagtccattttaat

SEQ ID NO: 1289231 - DNA, 15 bp, Homo sapiens
tgcagtccattttaa

SEQ ID NO: 1289232 - DNA, 15 bp, Homo sapiens
atgcagtccatttta

SEQ ID NO: 1289233 - DNA, 15 bp, Homo sapiens
aatgcagtccatttt

SEQ ID NO: 1289234 - DNA, 15 bp, Homo sapiens
gaatgcagtccattt

SEQ ID NO: 1289235 - DNA, 15 bp, Homo sapiens
agaatgcagtccatt

SEQ ID NO: 1289236 - DNA, 15 bp, Homo sapiens
tagaatgcagtccat

SEQ ID NO: 1289237 - DNA, 15 bp, Homo sapiens
atagaatgcagtcca

SEQ ID NO: 1289238 - DNA, 15 bp, Homo sapiens
aatagaatgcagtcc

SEQ ID NO: 1289239 - DNA, 15 bp, Homo sapiens
taatagaatgcagtc

SEQ ID NO: 1289240 - DNA, 15 bp, Homo sapiens
ataatagaatgcagt

SEQ ID NO: 1289241 - DNA, 15 bp, Homo sapiens
cataatagaatgcag

SEQ ID NO: 1289242 - DNA, 15 bp, Homo sapiens
gcataatagaatgca

SEQ ID NO: 1289243 - DNA, 15 bp, Homo sapiens
tgcataatagaatgc

SEQ ID NO: 1289244 - DNA, 15 bp, Homo sapiens
atgcataatagaatg

SEQ ID NO: 1289245 - DNA, 15 bp, Homo sapiens
aatgcataatagaat

SEQ ID NO: 1289246 - DNA, 15 bp, Homo sapiens
aaatgcataatagaa

SEQ ID NO: 1289247 - DNA, 15 bp, Homo sapiens
taaatgcataataga

SEQ ID NO: 1289248 - DNA, 15 bp, Homo sapiens
ttaaatgcataatag

SEQ ID NO: 1289249 - DNA, 15 bp, Homo sapiens
gttaaatgcataata

SEQ ID NO: 1289250 - DNA, 15 bp, Homo sapiens
agttaaatgcataat

SEQ ID NO: 1289251 - DNA, 15 bp, Homo sapiens
tagttaaatgcataa

SEQ ID NO: 1289252 - DNA, 15 bp, Homo sapiens
ttagttaaatgcata

SEQ ID NO: 1289253 - DNA, 15 bp, Homo sapiens
cttagttaaatgcat

SEQ ID NO: 1289254 - DNA, 15 bp, Homo sapiens
ccttagttaaatgca

SEQ ID NO: 1289255 - DNA, 15 bp, Homo sapiens
accttagttaaatgc

SEQ ID NO: 1289256 - DNA, 15 bp, Homo sapiens
gaccttagttaaatg

SEQ ID NO: 1289257 - DNA, 15 bp, Homo sapiens
tgaccttagttaaat

SEQ ID NO: 1289258 - DNA, 15 bp, Homo sapiens
atgaccttagttaaa

SEQ ID NO: 1289259 - DNA, 15 bp, Homo sapiens
aatgaccttagttaa

SEQ ID NO: 1289260 - DNA, 15 bp, Homo sapiens
aaatgaccttagtta

SEQ ID NO: 1289261 - DNA, 15 bp, Homo sapiens
aaaatgaccttagtt

SEQ ID NO: 1289262 - DNA, 15 bp, Homo sapiens
aaaaatgaccttagt

SEQ ID NO: 1289263 - DNA, 15 bp, Homo sapiens
aaaaaatgaccttag

SEQ ID NO: 1289264 - DNA, 15 bp, Homo sapiens
aaaaaaatgacctta

SEQ ID NO: 1289265 - DNA, 15 bp, Homo sapiens
aaaaaaaatgacctt

SEQ ID NO: 1289266 - DNA, 15 bp, Homo sapiens
aaaaaaaaatgacct

SEQ ID NO: 1289267 - DNA, 15 bp, Homo sapiens
aaaaaaaaaatgacc

SEQ ID NO: 1289268 - DNA, 15 bp, Homo sapiens
taaaaaaaaaatgac

SEQ ID NO: 1289269 - DNA, 15 bp, Homo sapiens
ttaaaaaaaaaatga

SEQ ID NO: 1289270 - DNA, 15 bp, Homo sapiens
attaaaaaaaaaatg

SEQ ID NO: 1289271 - DNA, 15 bp, Homo sapiens
cattaaaaaaaaaat

SEQ ID NO: 1289272 - DNA, 15 bp, Homo sapiens
gcattaaaaaaaaaa

SEQ ID NO: 1289273 - DNA, 15 bp, Homo sapiens
tgcattaaaaaaaaa

SEQ ID NO: 1289274 - DNA, 15 bp, Homo sapiens
gtgcattaaaaaaaa

SEQ ID NO: 1289275 - DNA, 15 bp, Homo sapiens
tgtgcattaaaaaaa

SEQ ID NO: 1289276 - DNA, 15 bp, Homo sapiens
ttgtgcattaaaaaa

SEQ ID NO: 1289277 - DNA, 15 bp, Homo sapiens
tttgtgcattaaaaa

SEQ ID NO: 1289278 - DNA, 15 bp, Homo sapiens
ttttgtgcattaaaa

SEQ ID NO: 1289279 - DNA, 15 bp, Homo sapiens
tttttgtgcattaaa

SEQ ID NO: 1289280 - DNA, 15 bp, Homo sapiens
ctttttgtgcattaa

SEQ ID NO: 1289281 - DNA, 15 bp, Homo sapiens
tctttttgtgcatta

SEQ ID NO: 1289282 - DNA, 15 bp, Homo sapiens
ttctttttgtgcatt

SEQ ID NO: 1289283 - DNA, 15 bp, Homo sapiens
tttctttttgtgcat

SEQ ID NO: 1289284 - DNA, 15 bp, Homo sapiens
gtttctttttgtgca

SEQ ID NO: 1289285 - DNA, 15 bp, Homo sapiens
tgtttctttttgtgc

SEQ ID NO: 1289286 - DNA, 15 bp, Homo sapiens
gtgtttctttttgtg

SEQ ID NO: 1289287 - DNA, 15 bp, Homo sapiens
ggtgtttctttttgt

SEQ ID NO: 1289288 - DNA, 15 bp, Homo sapiens
gggtgtttctttttg

SEQ ID NO: 1289289 - DNA, 15 bp, Homo sapiens
tgggtgtttcttttt

SEQ ID NO: 1289290 - DNA, 15 bp, Homo sapiens
ttgggtgtttctttt

SEQ ID NO: 1289291 - DNA, 15 bp, Homo sapiens
tttgggtgtttcttt

SEQ ID NO: 1289292 - DNA, 15 bp, Homo sapiens
ttttgggtgtttctt

SEQ ID NO: 1289293 - DNA, 15 bp, Homo sapiens
cttttgggtgtttct

SEQ ID NO: 1289294 - DNA, 15 bp, Homo sapiens
tcttttgggtgtttc

SEQ ID NO: 1289295 - DNA, 15 bp, Homo sapiens
atcttttgggtgttt

SEQ ID NO: 1289296 - DNA, 15 bp, Homo sapiens
tatcttttgggtgtt

SEQ ID NO: 1289297 - DNA, 15 bp, Homo sapiens
atatcttttgggtgt

SEQ ID NO: 1289298 - DNA, 15 bp, Homo sapiens
tatatcttttgggtg

SEQ ID NO: 1289299 - DNA, 15 bp, Homo sapiens
atatatcttttgggt

SEQ ID NO: 1289300 - DNA, 15 bp, Homo sapiens
gatatatcttttggg

SEQ ID NO: 1289301 - DNA, 15 bp, Homo sapiens
agatatatcttttgg

SEQ ID NO: 1289302 - DNA, 15 bp, Homo sapiens
cagatatatcttttg

SEQ ID NO: 1289303 - DNA, 15 bp, Homo sapiens
ccagatatatctttt

SEQ ID NO: 1289304 - DNA, 15 bp, Homo sapiens
tccagatatatcttt

SEQ ID NO: 1289305 - DNA, 15 bp, Homo sapiens
ttccagatatatctt

SEQ ID NO: 1289306 - DNA, 15 bp, Homo sapiens
tttccagatatatct

SEQ ID NO: 1289307 - DNA, 15 bp, Homo sapiens
ttttccagatatatc

SEQ ID NO: 1289308 - DNA, 15 bp, Homo sapiens
gttttccagatatat

SEQ ID NO: 1289309 - DNA, 15 bp, Homo sapiens
agttttccagatata

SEQ ID NO: 1289310 - DNA, 15 bp, Homo sapiens
aagttttccagatat

SEQ ID NO: 1289311 - DNA, 15 bp, Homo sapiens
aaagttttccagata

SEQ ID NO: 1289312 - DNA, 15 bp, Homo sapiens
gaaagttttccagat

SEQ ID NO: 1289313 - DNA, 15 bp, Homo sapiens
agaaagttttccaga

SEQ ID NO: 1289314 - DNA, 15 bp, Homo sapiens
aagaaagttttccag

SEQ ID NO: 1289315 - DNA, 15 bp, Homo sapiens
aaagaaagttttcca

SEQ ID NO: 1289316 - DNA, 15 bp, Homo sapiens
gaaagaaagttttcc

SEQ ID NO: 1289317 - DNA, 15 bp, Homo sapiens
tgaaagaaagttttc

SEQ ID NO: 1289318 - DNA, 15 bp, Homo sapiens
ctgaaagaaagtttt

SEQ ID NO: 1289319 - DNA, 15 bp, Homo sapiens
actgaaagaaagttt

SEQ ID NO: 1289320 - DNA, 15 bp, Homo sapiens
cactgaaagaaagtt

SEQ ID NO: 1289321 - DNA, 15 bp, Homo sapiens
tcactgaaagaaagt

SEQ ID NO: 1289322 - DNA, 15 bp, Homo sapiens
atcactgaaagaaag

SEQ ID NO: 1289323 - DNA, 15 bp, Homo sapiens
tatcactgaaagaaa

SEQ ID NO: 1289324 - DNA, 15 bp, Homo sapiens
gtatcactgaaagaa

SEQ ID NO: 1289325 - DNA, 15 bp, Homo sapiens
tgtatcactgaaaga

SEQ ID NO: 1289326 - DNA, 15 bp, Homo sapiens
atgtatcactgaaag

SEQ ID NO: 1289327 - DNA, 15 bp, Homo sapiens
aatgtatcactgaaa

SEQ ID NO: 1289328 - DNA, 15 bp, Homo sapiens
aaatgtatcactgaa

SEQ ID NO: 1289329 - DNA, 15 bp, Homo sapiens
aaaatgtatcactga

SEQ ID NO: 1289330 - DNA, 15 bp, Homo sapiens
aaaaatgtatcactg

SEQ ID NO: 1289331 - DNA, 15 bp, Homo sapiens
gaaaaatgtatcact

SEQ ID NO: 1289332 - DNA, 15 bp, Homo sapiens
ggaaaaatgtatcac

SEQ ID NO: 1289333 - DNA, 15 bp, Homo sapiens
aggaaaaatgtatca

SEQ ID NO: 1289334 - DNA, 15 bp, Homo sapiens
caggaaaaatgtatc

SEQ ID NO: 1289335 - DNA, 15 bp, Homo sapiens
acaggaaaaatgtat

SEQ ID NO: 1289336 - DNA, 15 bp, Homo sapiens
aacaggaaaaatgta

SEQ ID NO: 1289337 - DNA, 15 bp, Homo sapiens
aaacaggaaaaatgt

SEQ ID NO: 1289338 - DNA, 15 bp, Homo sapiens
aaaacaggaaaaatg

SEQ ID NO: 1289339 - DNA, 15 bp, Homo sapiens
aaaaacaggaaaaat

SEQ ID NO: 1289340 - DNA, 15 bp, Homo sapiens
aaaaaacaggaaaaa

SEQ ID NO: 1289341 - DNA, 15 bp, Homo sapiens
aaaaaaaacaggaaa

SEQ ID NO: 1289342 - DNA, 15 bp, Homo sapiens
gaaaaaaaacaggaa

SEQ ID NO: 1289343 - DNA, 15 bp, Homo sapiens
agaaaaaaaacagga

SEQ ID NO: 1289344 - DNA, 15 bp, Homo sapiens
cagaaaaaaaacagg

SEQ ID NO: 1289345 - DNA, 15 bp, Homo sapiens
gcagaaaaaaaacag

SEQ ID NO: 1289346 - DNA, 15 bp, Homo sapiens
agcagaaaaaaaaca

SEQ ID NO: 1289347 - DNA, 15 bp, Homo sapiens
aagcagaaaaaaaac

SEQ ID NO: 1289348 - DNA, 15 bp, Homo sapiens
aaagcagaaaaaaaa

SEQ ID NO: 1289349 - DNA, 15 bp, Homo sapiens
gaaagcagaaaaaaa

SEQ ID NO: 1289350 - DNA, 15 bp, Homo sapiens
agaaagcagaaaaaa

SEQ ID NO: 1289351 - DNA, 15 bp, Homo sapiens
tagaaagcagaaaaa

SEQ ID NO: 1289352 - DNA, 15 bp, Homo sapiens
atagaaagcagaaaa

SEQ ID NO: 1289353 - DNA, 15 bp, Homo sapiens
aatagaaagcagaaa

SEQ ID NO: 1289354 - DNA, 15 bp, Homo sapiens
aaatagaaagcagaa

SEQ ID NO: 1289355 - DNA, 15 bp, Homo sapiens
caaatagaaagcaga

SEQ ID NO: 1289356 - DNA, 15 bp, Homo sapiens
acaaatagaaagcag

SEQ ID NO: 1289357 - DNA, 15 bp, Homo sapiens
aacaaatagaaagca

SEQ ID NO: 1289358 - DNA, 15 bp, Homo sapiens
aaacaaatagaaagc

SEQ ID NO: 1289359 - DNA, 15 bp, Homo sapiens
taaacaaatagaaag

SEQ ID NO: 1289360 - DNA, 15 bp, Homo sapiens
ttaaacaaatagaaa

SEQ ID NO: 1289361 - DNA, 15 bp, Homo sapiens
attaaacaaatagaa

SEQ ID NO: 1289362 - DNA, 15 bp, Homo sapiens
tattaaacaaataga

SEQ ID NO: 1289363 - DNA, 15 bp, Homo sapiens
ctattaaacaaatag

SEQ ID NO: 1289364 - DNA, 15 bp, Homo sapiens
cctattaaacaaata

SEQ ID NO: 1289365 - DNA, 15 bp, Homo sapiens
tcctattaaacaaat

SEQ ID NO: 1289366 - DNA, 15 bp, Homo sapiens
atcctattaaacaaa

SEQ ID NO: 1289367 - DNA, 15 bp, Homo sapiens
tatcctattaaacaa

SEQ ID NO: 1289368 - DNA, 15 bp, Homo sapiens
atatcctattaaaca

SEQ ID NO: 1289369 - DNA, 15 bp, Homo sapiens
gatatcctattaaac

SEQ ID NO: 1289370 - DNA, 15 bp, Homo sapiens
agatatcctattaaa

SEQ ID NO: 1289371 - DNA, 15 bp, Homo sapiens
tagatatcctattaa

SEQ ID NO: 1289372 - DNA, 15 bp, Homo sapiens
gtagatatcctatta

SEQ ID NO: 1289373 - DNA, 15 bp, Homo sapiens
agtagatatcctatt

SEQ ID NO: 1289374 - DNA, 15 bp, Homo sapiens
cagtagatatcctat

SEQ ID NO: 1289375 - DNA, 15 bp, Homo sapiens
tcagtagatatccta

SEQ ID NO: 1289376 - DNA, 15 bp, Homo sapiens
ttcagtagatatcct

SEQ ID NO: 1289377 - DNA, 15 bp, Homo sapiens
tttcagtagatatcc

SEQ ID NO: 1289378 - DNA, 15 bp, Homo sapiens
atttcagtagatatc

SEQ ID NO: 1289379 - DNA, 15 bp, Homo sapiens
tatttcagtagatat

SEQ ID NO: 1289380 - DNA, 15 bp, Homo sapiens
ttatttcagtagata

SEQ ID NO: 1289381 - DNA, 15 bp, Homo sapiens
tttatttcagtagat

SEQ ID NO: 1289382 - DNA, 15 bp, Homo sapiens
atttatttcagtaga

SEQ ID NO: 1289383 - DNA, 15 bp, Homo sapiens
aatttatttcagtag

SEQ ID NO: 1289384 - DNA, 15 bp, Homo sapiens
gaatttatttcagta

SEQ ID NO: 1289385 - DNA, 15 bp, Homo sapiens
agaatttatttcagt

SEQ ID NO: 1289386 - DNA, 15 bp, Homo sapiens
cagaatttatttcag

SEQ ID NO: 1289387 - DNA, 15 bp, Homo sapiens
gcagaatttatttca

SEQ ID NO: 1289388 - DNA, 15 bp, Homo sapiens
tgcagaatttatttc

SEQ ID NO: 1289389 - DNA, 15 bp, Homo sapiens
atgcagaatttattt

SEQ ID NO: 1289390 - DNA, 15 bp, Homo sapiens
aatgcagaatttatt

SEQ ID NO: 1289391 - DNA, 15 bp, Homo sapiens
caatgcagaatttat

SEQ ID NO: 1289392 - DNA, 15 bp, Homo sapiens
ccaatgcagaattta

SEQ ID NO: 1289393 - DNA, 15 bp, Homo sapiens
accaatgcagaattt

SEQ ID NO: 1289394 - DNA, 15 bp, Homo sapiens
caccaatgcagaatt

SEQ ID NO: 1289395 - DNA, 15 bp, Homo sapiens
gcaccaatgcagaat

SEQ ID NO: 1289396 - DNA, 15 bp, Homo sapiens
agcaccaatgcagaa

SEQ ID NO: 1289397 - DNA, 15 bp, Homo sapiens
tagcaccaatgcaga

SEQ ID NO: 1289398 - DNA, 15 bp, Homo sapiens
ttagcaccaatgcag

SEQ ID NO: 1289399 - DNA, 15 bp, Homo sapiens
tttagcaccaatgca

SEQ ID NO: 1289400 - DNA, 15 bp, Homo sapiens
ttttagcaccaatgc

SEQ ID NO: 1289401 - DNA, 15 bp, Homo sapiens
cttttagcaccaatg

SEQ ID NO: 1289402 - DNA, 15 bp, Homo sapiens
acttttagcaccaat

SEQ ID NO: 1289403 - DNA, 15 bp, Homo sapiens
aacttttagcaccaa

SEQ ID NO: 1289404 - DNA, 15 bp, Homo sapiens
aaacttttagcacca

SEQ ID NO: 1289405 - DNA, 15 bp, Homo sapiens
gaaacttttagcacc

SEQ ID NO: 1289406 - DNA, 15 bp, Homo sapiens
agaaacttttagcac

SEQ ID NO: 1289407 - DNA, 15 bp, Homo sapiens
aagaaacttttagca

SEQ ID NO: 1289408 - DNA, 15 bp, Homo sapiens
caagaaacttttagc

SEQ ID NO: 1289409 - DNA, 15 bp, Homo sapiens
ccaagaaacttttag

SEQ ID NO: 1289410 - DNA, 15 bp, Homo sapiens
tccaagaaactttta

SEQ ID NO: 1289411 - DNA, 15 bp, Homo sapiens
atccaagaaactttt

SEQ ID NO: 1289412 - DNA, 15 bp, Homo sapiens
gatccaagaaacttt

SEQ ID NO: 1289413 - DNA, 15 bp, Homo sapiens
tgatccaagaaactt

SEQ ID NO: 1289414 - DNA, 15 bp, Homo sapiens
gtgatccaagaaact

SEQ ID NO: 1289415 - DNA, 15 bp, Homo sapiens
tgtgatccaagaaac

SEQ ID NO: 1289416 - DNA, 15 bp, Homo sapiens
atgtgatccaagaaa

SEQ ID NO: 1289417 - DNA, 15 bp, Homo sapiens
aatgtgatccaagaa

SEQ ID NO: 1289418 - DNA, 15 bp, Homo sapiens
aaatgtgatccaaga

SEQ ID NO: 1289419 - DNA, 15 bp, Homo sapiens
aaaatgtgatccaag

SEQ ID NO: 1289420 - DNA, 15 bp, Homo sapiens
aaaaatgtgatccaa

SEQ ID NO: 1289421 - DNA, 15 bp, Homo sapiens
taaaaatgtgatcca

SEQ ID NO: 1289422 - DNA, 15 bp, Homo sapiens
ataaaaatgtgatcc

SEQ ID NO: 1289423 - DNA, 15 bp, Homo sapiens
aataaaaatgtgatc

SEQ ID NO: 1289424 - DNA, 15 bp, Homo sapiens
taataaaaatgtgat

SEQ ID NO: 1289425 - DNA, 15 bp, Homo sapiens
ctaataaaaatgtga

SEQ ID NO: 1289426 - DNA, 15 bp, Homo sapiens
gctaataaaaatgtg

SEQ ID NO: 1289427 - DNA, 15 bp, Homo sapiens
agctaataaaaatgt

SEQ ID NO: 1289428 - DNA, 15 bp, Homo sapiens
tagctaataaaaatg

SEQ ID NO: 1289429 - DNA, 15 bp, Homo sapiens
ttagctaataaaaat

SEQ ID NO: 1289430 - DNA, 15 bp, Homo sapiens
tttagctaataaaaa

SEQ ID NO: 1289431 - DNA, 15 bp, Homo sapiens
ctttagctaataaaa

SEQ ID NO: 1289432 - DNA, 15 bp, Homo sapiens
cctttagctaataaa

SEQ ID NO: 1289433 - DNA, 15 bp, Homo sapiens
acctttagctaataa

SEQ ID NO: 1289434 - DNA, 15 bp, Homo sapiens
tacctttagctaata

SEQ ID NO: 1289435 - DNA, 15 bp, Homo sapiens
ttacctttagctaat

SEQ ID NO: 1289436 - DNA, 15 bp, Homo sapiens
cttacctttagctaa

SEQ ID NO: 1289437 - DNA, 15 bp, Homo sapiens
acttacctttagcta

SEQ ID NO: 1289438 - DNA, 15 bp, Homo sapiens
aacttacctttagct

SEQ ID NO: 1289439 - DNA, 15 bp, Homo sapiens
gaacttacctttagc

SEQ ID NO: 1289440 - DNA, 15 bp, Homo sapiens
tgaacttacctttag

SEQ ID NO: 1289441 - DNA, 15 bp, Homo sapiens
atgaacttaccttta

SEQ ID NO: 1289442 - DNA, 15 bp, Homo sapiens
aatgaacttaccttt

SEQ ID NO: 1289443 - DNA, 15 bp, Homo sapiens
taatgaacttacctt

SEQ ID NO: 1289444 - DNA, 15 bp, Homo sapiens
ataatgaacttacct

SEQ ID NO: 1289445 - DNA, 15 bp, Homo sapiens
tataatgaacttacc

SEQ ID NO: 1289446 - DNA, 15 bp, Homo sapiens
atataatgaacttac

SEQ ID NO: 1289447 - DNA, 15 bp, Homo sapiens
aatataatgaactta

SEQ ID NO: 1289448 - DNA, 15 bp, Homo sapiens
aaatataatgaactt

SEQ ID NO: 1289449 - DNA, 15 bp, Homo sapiens
taaatataatgaact

SEQ ID NO: 1289450 - DNA, 15 bp, Homo sapiens
ataaatataatgaac

SEQ ID NO: 1289451 - DNA, 15 bp, Homo sapiens
aataaatataatgaa

SEQ ID NO: 1289452 - DNA, 15 bp, Homo sapiens
taataaatataatga

SEQ ID NO: 1289453 - DNA, 15 bp, Homo sapiens
ttaataaatataatg

SEQ ID NO: 1289454 - DNA, 15 bp, Homo sapiens
tttaataaatataat

SEQ ID NO: 1289455 - DNA, 15 bp, Homo sapiens
atttaataaatataa

SEQ ID NO: 1289456 - DNA, 15 bp, Homo sapiens
catttaataaatata

SEQ ID NO: 1289457 - DNA, 15 bp, Homo sapiens
gcatttaataaatat

SEQ ID NO: 1289458 - DNA, 15 bp, Homo sapiens
agcatttaataaata

SEQ ID NO: 1289459 - DNA, 15 bp, Homo sapiens
tagcatttaataaat

SEQ ID NO: 1289460 - DNA, 15 bp, Homo sapiens
ttagcatttaataaa

SEQ ID NO: 1289461 - DNA, 15 bp, Homo sapiens
attagcatttaataa

SEQ ID NO: 1289462 - DNA, 15 bp, Homo sapiens
tattagcatttaata

SEQ ID NO: 1289463 - DNA, 15 bp, Homo sapiens
atattagcatttaat

SEQ ID NO: 1289464 - DNA, 15 bp, Homo sapiens
aatattagcatttaa

SEQ ID NO: 1289465 - DNA, 15 bp, Homo sapiens
aaatattagcattta

SEQ ID NO: 1289466 - DNA, 15 bp, Homo sapiens
gaaatattagcattt

SEQ ID NO: 1289467 - DNA, 15 bp, Homo sapiens
tgaaatattagcatt

SEQ ID NO: 1289468 - DNA, 15 bp, Homo sapiens
ttgaaatattagcat

SEQ ID NO: 1289469 - DNA, 15 bp, Homo sapiens
tttgaaatattagca

SEQ ID NO: 1289470 - DNA, 15 bp, Homo sapiens
atttgaaatattagc

SEQ ID NO: 1289471 - DNA, 15 bp, Homo sapiens
catttgaaatattag

SEQ ID NO: 1289472 - DNA, 15 bp, Homo sapiens
acatttgaaatatta

SEQ ID NO: 1289473 - DNA, 15 bp, Homo sapiens
tacatttgaaatatt

SEQ ID NO: 1289474 - DNA, 15 bp, Homo sapiens
ttacatttgaaatat

SEQ ID NO: 1289475 - DNA, 15 bp, Homo sapiens
attacatttgaaata

SEQ ID NO: 1289476 - DNA, 15 bp, Homo sapiens
tattacatttgaaat

SEQ ID NO: 1289477 - DNA, 15 bp, Homo sapiens
ttattacatttgaaa

SEQ ID NO: 1289478 - DNA, 15 bp, Homo sapiens
attattacatttgaa

SEQ ID NO: 1289479 - DNA, 15 bp, Homo sapiens
aattattacatttga

SEQ ID NO: 1289480 - DNA, 15 bp, Homo sapiens
taattattacatttg

SEQ ID NO: 1289481 - DNA, 15 bp, Homo sapiens
ttaattattacattt

SEQ ID NO: 1289482 - DNA, 15 bp, Homo sapiens
tttaattattacatt

SEQ ID NO: 1289483 - DNA, 15 bp, Homo sapiens
atttaattattacat

SEQ ID NO: 1289484 - DNA, 15 bp, Homo sapiens
aatttaattattaca

SEQ ID NO: 1289485 - DNA, 15 bp, Homo sapiens
caatttaattattac

SEQ ID NO: 1289486 - DNA, 15 bp, Homo sapiens
ccaatttaattatta

SEQ ID NO: 1289487 - DNA, 15 bp, Homo sapiens
gccaatttaattatt

SEQ ID NO: 1289488 - DNA, 15 bp, Homo sapiens
tgccaatttaattat

SEQ ID NO: 1289489 - DNA, 15 bp, Homo sapiens
atgccaatttaatta

SEQ ID NO: 1289490 - DNA, 15 bp, Homo sapiens
aatgccaatttaatt

SEQ ID NO: 1289491 - DNA, 15 bp, Homo sapiens
gaatgccaatttaat

SEQ ID NO: 1289492 - DNA, 15 bp, Homo sapiens
ggaatgccaatttaa

SEQ ID NO: 1289493 - DNA, 15 bp, Homo sapiens
aggaatgccaattta

SEQ ID NO: 1289494 - DNA, 15 bp, Homo sapiens
aaggaatgccaattt

SEQ ID NO: 1289495 - DNA, 15 bp, Homo sapiens
aaaggaatgccaatt

SEQ ID NO: 1289496 - DNA, 15 bp, Homo sapiens
caaaggaatgccaat

SEQ ID NO: 1289497 - DNA, 15 bp, Homo sapiens
ccaaaggaatgccaa

SEQ ID NO: 1289498 - DNA, 15 bp, Homo sapiens
tccaaaggaatgcca

SEQ ID NO: 1289499 - DNA, 15 bp, Homo sapiens
gtccaaaggaatgcc

SEQ ID NO: 1289500 - DNA, 15 bp, Homo sapiens
agtccaaaggaatgc

SEQ ID NO: 1289501 - DNA, 15 bp, Homo sapiens
tagtccaaaggaatg

SEQ ID NO: 1289502 - DNA, 15 bp, Homo sapiens
ttagtccaaaggaat

SEQ ID NO: 1289503 - DNA, 15 bp, Homo sapiens
tttagtccaaaggaa

SEQ ID NO: 1289504 - DNA, 15 bp, Homo sapiens
atttagtccaaagga

SEQ ID NO: 1289505 - DNA, 15 bp, Homo sapiens
aatttagtccaaagg

SEQ ID NO: 1289506 - DNA, 15 bp, Homo sapiens
gaatttagtccaaag

SEQ ID NO: 1289507 - DNA, 15 bp, Homo sapiens
ggaatttagtccaaa

SEQ ID NO: 1289508 - DNA, 15 bp, Homo sapiens
gggaatttagtccaa

SEQ ID NO: 1289509 - DNA, 15 bp, Homo sapiens
ggggaatttagtcca

SEQ ID NO: 1289510 - DNA, 15 bp, Homo sapiens
tggggaatttagtcc

SEQ ID NO: 1289511 - DNA, 15 bp, Homo sapiens
ttggggaatttagtc

SEQ ID NO: 1289512 - DNA, 15 bp, Homo sapiens
attggggaatttagt

SEQ ID NO: 1289513 - DNA, 15 bp, Homo sapiens
aattggggaatttag

SEQ ID NO: 1289514 - DNA, 15 bp, Homo sapiens
aaattggggaattta

SEQ ID NO: 1289515 - DNA, 15 bp, Homo sapiens
aaaattggggaattt

SEQ ID NO: 1289516 - DNA, 15 bp, Homo sapiens
aaaaattggggaatt

SEQ ID NO: 1289517 - DNA, 15 bp, Homo sapiens
taaaaattggggaat

SEQ ID NO: 1289518 - DNA, 15 bp, Homo sapiens
ataaaaattggggaa

SEQ ID NO: 1289519 - DNA, 15 bp, Homo sapiens
aataaaaattgggga

SEQ ID NO: 1289520 - DNA, 15 bp, Homo sapiens
caataaaaattgggg

SEQ ID NO: 1289521 - DNA, 15 bp, Homo sapiens
tcaataaaaattggg

SEQ ID NO: 1289522 - DNA, 15 bp, Homo sapiens
ctcaataaaaattgg

SEQ ID NO: 1289523 - DNA, 15 bp, Homo sapiens
actcaataaaaattg

SEQ ID NO: 1289524 - DNA, 15 bp, Homo sapiens
tactcaataaaaatt

SEQ ID NO: 1289525 - DNA, 15 bp, Homo sapiens
ttactcaataaaaat

SEQ ID NO: 1289526 - DNA, 15 bp, Homo sapiens
attactcaataaaaa

SEQ ID NO: 1289527 - DNA, 15 bp, Homo sapiens
cattactcaataaaa

SEQ ID NO: 1289528 - DNA, 15 bp, Homo sapiens
acattactcaataaa

SEQ ID NO: 1289529 - DNA, 15 bp, Homo sapiens
tacattactcaataa

SEQ ID NO: 1289530 - DNA, 15 bp, Homo sapiens
gtacattactcaata

SEQ ID NO: 1289531 - DNA, 15 bp, Homo sapiens
agtacattactcaat

SEQ ID NO: 1289532 - DNA, 15 bp, Homo sapiens
gagtacattactcaa

SEQ ID NO: 1289533 - DNA, 15 bp, Homo sapiens
ggagtacattactca

SEQ ID NO: 1289534 - DNA, 15 bp, Homo sapiens
aggagtacattactc

SEQ ID NO: 1289535 - DNA, 15 bp, Homo sapiens
gaggagtacattact

SEQ ID NO: 1289536 - DNA, 15 bp, Homo sapiens
ggaggagtacattac

SEQ ID NO: 1289537 - DNA, 15 bp, Homo sapiens
gggaggagtacatta

SEQ ID NO: 1289538 - DNA, 15 bp, Homo sapiens
agggaggagtacatt

SEQ ID NO: 1289539 - DNA, 15 bp, Homo sapiens
gagggaggagtacat

SEQ ID NO: 1289540 - DNA, 15 bp, Homo sapiens
tgagggaggagtaca

SEQ ID NO: 1289541 - DNA, 15 bp, Homo sapiens
atgagggaggagtac

SEQ ID NO: 1289542 - DNA, 15 bp, Homo sapiens
aatgagggaggagta

SEQ ID NO: 1289543 - DNA, 15 bp, Homo sapiens
gaatgagggaggagt

SEQ ID NO: 1289544 - DNA, 15 bp, Homo sapiens
agaatgagggaggag

SEQ ID NO: 1289545 - DNA, 15 bp, Homo sapiens
gagaatgagggagga

SEQ ID NO: 1289546 - DNA, 15 bp, Homo sapiens
agagaatgagggagg

SEQ ID NO: 1289547 - DNA, 15 bp, Homo sapiens
cagagaatgagggag

SEQ ID NO: 1289548 - DNA, 15 bp, Homo sapiens
gcagagaatgaggga

SEQ ID NO: 1289549 - DNA, 15 bp, Homo sapiens
agcagagaatgaggg

SEQ ID NO: 1289550 - DNA, 15 bp, Homo sapiens
aagcagagaatgagg

SEQ ID NO: 1289551 - DNA, 15 bp, Homo sapiens
caagcagagaatgag

SEQ ID NO: 1289552 - DNA, 15 bp, Homo sapiens
ccaagcagagaatga

SEQ ID NO: 1289553 - DNA, 15 bp, Homo sapiens
gccaagcagagaatg

SEQ ID NO: 1289554 - DNA, 15 bp, Homo sapiens
agccaagcagagaat

SEQ ID NO: 1289555 - DNA, 15 bp, Homo sapiens
aagccaagcagagaa

SEQ ID NO: 1289556 - DNA, 15 bp, Homo sapiens
taagccaagcagaga

SEQ ID NO: 1289557 - DNA, 15 bp, Homo sapiens
ataagccaagcagag

SEQ ID NO: 1289558 - DNA, 15 bp, Homo sapiens
aataagccaagcaga

SEQ ID NO: 1289559 - DNA, 15 bp, Homo sapiens
taataagccaagcag

SEQ ID NO: 1289560 - DNA, 15 bp, Homo sapiens
ttaataagccaagca

SEQ ID NO: 1289561 - DNA, 15 bp, Homo sapiens
gttaataagccaagc

SEQ ID NO: 1289562 - DNA, 15 bp, Homo sapiens
agttaataagccaag

SEQ ID NO: 1289563 - DNA, 15 bp, Homo sapiens
cagttaataagccaa

SEQ ID NO: 1289564 - DNA, 15 bp, Homo sapiens
acagttaataagcca

SEQ ID NO: 1289565 - DNA, 15 bp, Homo sapiens
aacagttaataagcc

SEQ ID NO: 1289566 - DNA, 15 bp, Homo sapiens
taacagttaataagc

SEQ ID NO: 1289567 - DNA, 15 bp, Homo sapiens
ctaacagttaataag

SEQ ID NO: 1289568 - DNA, 15 bp, Homo sapiens
gctaacagttaataa

SEQ ID NO: 1289569 - DNA, 15 bp, Homo sapiens
tgctaacagttaata

SEQ ID NO: 1289570 - DNA, 15 bp, Homo sapiens
ttgctaacagttaat

SEQ ID NO: 1289571 - DNA, 15 bp, Homo sapiens
cttgctaacagttaa

SEQ ID NO: 1289572 - DNA, 15 bp, Homo sapiens
acttgctaacagtta

SEQ ID NO: 1289573 - DNA, 15 bp, Homo sapiens
aacttgctaacagtt

SEQ ID NO: 1289574 - DNA, 15 bp, Homo sapiens
gaacttgctaacagt

SEQ ID NO: 1289575 - DNA, 15 bp, Homo sapiens
ggaacttgctaacag

SEQ ID NO: 1289576 - DNA, 15 bp, Homo sapiens
aggaacttgctaaca

SEQ ID NO: 1289577 - DNA, 15 bp, Homo sapiens
taggaacttgctaac

SEQ ID NO: 1289578 - DNA, 15 bp, Homo sapiens
ataggaacttgctaa

SEQ ID NO: 1289579 - DNA, 15 bp, Homo sapiens
tataggaacttgcta

SEQ ID NO: 1289580 - DNA, 15 bp, Homo sapiens
ttataggaacttgct

SEQ ID NO: 1289581 - DNA, 15 bp, Homo sapiens
attataggaacttgc

SEQ ID NO: 1289582 - DNA, 15 bp, Homo sapiens
aattataggaacttg

SEQ ID NO: 1289583 - DNA, 15 bp, Homo sapiens
gaattataggaactt

SEQ ID NO: 1289584 - DNA, 15 bp, Homo sapiens
agaattataggaact

SEQ ID NO: 1289585 - DNA, 15 bp, Homo sapiens
cagaattataggaac

SEQ ID NO: 1289586 - DNA, 15 bp, Homo sapiens
ccagaattataggaa

SEQ ID NO: 1289587 - DNA, 15 bp, Homo sapiens
accagaattatagga

SEQ ID NO: 1289588 - DNA, 15 bp, Homo sapiens
taccagaattatagg

SEQ ID NO: 1289589 - DNA, 15 bp, Homo sapiens
gtaccagaattatag

SEQ ID NO: 1289590 - DNA, 15 bp, Homo sapiens
agtaccagaattata

SEQ ID NO: 1289591 - DNA, 15 bp, Homo sapiens
tagtaccagaattat

SEQ ID NO: 1289592 - DNA, 15 bp, Homo sapiens
ctagtaccagaatta

SEQ ID NO: 1289593 - DNA, 15 bp, Homo sapiens
tctagtaccagaatt

SEQ ID NO: 1289594 - DNA, 15 bp, Homo sapiens
ttctagtaccagaat

SEQ ID NO: 1289595 - DNA, 15 bp, Homo sapiens
tttctagtaccagaa

SEQ ID NO: 1289596 - DNA, 15 bp, Homo sapiens
gtttctagtaccaga

SEQ ID NO: 1289597 - DNA, 15 bp, Homo sapiens
tgtttctagtaccag

SEQ ID NO: 1289598 - DNA, 15 bp, Homo sapiens
ttgtttctagtacca

SEQ ID NO: 1289599 - DNA, 15 bp, Homo sapiens
gttgtttctagtacc

SEQ ID NO: 1289600 - DNA, 15 bp, Homo sapiens
ggttgtttctagtac

SEQ ID NO: 1289601 - DNA, 15 bp, Homo sapiens
aggttgtttctagta

SEQ ID NO: 1289602 - DNA, 15 bp, Homo sapiens
aaggttgtttctagt

SEQ ID NO: 1289603 - DNA, 15 bp, Homo sapiens
caaggttgtttctag

SEQ ID NO: 1289604 - DNA, 15 bp, Homo sapiens
ccaaggttgtttcta

SEQ ID NO: 1289605 - DNA, 15 bp, Homo sapiens
tccaaggttgtttct

SEQ ID NO: 1289606 - DNA, 15 bp, Homo sapiens
ttccaaggttgtttc

SEQ ID NO: 1289607 - DNA, 15 bp, Homo sapiens
tttccaaggttgttt

SEQ ID NO: 1289608 - DNA, 15 bp, Homo sapiens
atttccaaggttgtt

SEQ ID NO: 1289609 - DNA, 15 bp, Homo sapiens
catttccaaggttgt

SEQ ID NO: 1289610 - DNA, 15 bp, Homo sapiens
gcatttccaaggttg

SEQ ID NO: 1289611 - DNA, 15 bp, Homo sapiens
agcatttccaaggtt

SEQ ID NO: 1289612 - DNA, 15 bp, Homo sapiens
aagcatttccaaggt

SEQ ID NO: 1289613 - DNA, 15 bp, Homo sapiens
aaagcatttccaagg

SEQ ID NO: 1289614 - DNA, 15 bp, Homo sapiens
taaagcatttccaag

SEQ ID NO: 1289615 - DNA, 15 bp, Homo sapiens
ataaagcatttccaa

SEQ ID NO: 1289616 - DNA, 15 bp, Homo sapiens
aataaagcatttcca

SEQ ID NO: 1289617 - DNA, 15 bp, Homo sapiens
aaataaagcatttcc

SEQ ID NO: 1289618 - DNA, 15 bp, Homo sapiens
taaataaagcatttc

SEQ ID NO: 1289619 - DNA, 15 bp, Homo sapiens
ttaaataaagcattt

SEQ ID NO: 1289620 - DNA, 15 bp, Homo sapiens
attaaataaagcatt

SEQ ID NO: 1289621 - DNA, 15 bp, Homo sapiens
aattaaataaagcat

SEQ ID NO: 1289622 - DNA, 15 bp, Homo sapiens
aaattaaataaagca

SEQ ID NO: 1289623 - DNA, 15 bp, Homo sapiens
aaaattaaataaagc

SEQ ID NO: 1289624 - DNA, 15 bp, Homo sapiens
aaaaattaaataaag

SEQ ID NO: 1289625 - DNA, 15 bp, Homo sapiens
caaaaattaaataaa

SEQ ID NO: 1289626 - DNA, 15 bp, Homo sapiens
acaaaaattaaataa

SEQ ID NO: 1289627 - DNA, 15 bp, Homo sapiens
aacaaaaattaaata

SEQ ID NO: 1289628 - DNA, 15 bp, Homo sapiens
aaacaaaaattaaat

SEQ ID NO: 1289629 - DNA, 15 bp, Homo sapiens
gaaacaaaaattaaa

SEQ ID NO: 1289630 - DNA, 15 bp, Homo sapiens
agaaacaaaaattaa

SEQ ID NO: 1289631 - DNA, 15 bp, Homo sapiens
tagaaacaaaaatta

SEQ ID NO: 1289632 - DNA, 15 bp, Homo sapiens
ttagaaacaaaaatt

SEQ ID NO: 1289633 - DNA, 15 bp, Homo sapiens
attagaaacaaaaat

SEQ ID NO: 1289634 - DNA, 15 bp, Homo sapiens
tattagaaacaaaaa

SEQ ID NO: 1289635 - DNA, 15 bp, Homo sapiens
atattagaaacaaaa

SEQ ID NO: 1289636 - DNA, 15 bp, Homo sapiens
aatattagaaacaaa

SEQ ID NO: 1289637 - DNA, 15 bp, Homo sapiens
gaatattagaaacaa

SEQ ID NO: 1289638 - DNA, 15 bp, Homo sapiens
ggaatattagaaaca

SEQ ID NO: 1289639 - DNA, 15 bp, Homo sapiens
tggaatattagaaac

SEQ ID NO: 1289640 - DNA, 15 bp, Homo sapiens
atggaatattagaaa

SEQ ID NO: 1289641 - DNA, 15 bp, Homo sapiens
gatggaatattagaa

SEQ ID NO: 1289642 - DNA, 15 bp, Homo sapiens
agatggaatattaga

SEQ ID NO: 1289643 - DNA, 15 bp, Homo sapiens
aagatggaatattag

SEQ ID NO: 1289644 - DNA, 15 bp, Homo sapiens
gaagatggaatatta

SEQ ID NO: 1289645 - DNA, 15 bp, Homo sapiens
ggaagatggaatatt

SEQ ID NO: 1289646 - DNA, 15 bp, Homo sapiens
gggaagatggaatat

SEQ ID NO: 1289647 - DNA, 15 bp, Homo sapiens
agggaagatggaata

SEQ ID NO: 1289648 - DNA, 15 bp, Homo sapiens
gagggaagatggaat

SEQ ID NO: 1289649 - DNA, 15 bp, Homo sapiens
ggagggaagatggaa

SEQ ID NO: 1289650 - DNA, 15 bp, Homo sapiens
gggagggaagatgga

SEQ ID NO: 1289651 - DNA, 15 bp, Homo sapiens
agggagggaagatgg

SEQ ID NO: 1289652 - DNA, 15 bp, Homo sapiens
aagggagggaagatg

SEQ ID NO: 1289653 - DNA, 15 bp, Homo sapiens
aaagggagggaagat

SEQ ID NO: 1289654 - DNA, 15 bp, Homo sapiens
gaaagggagggaaga

SEQ ID NO: 1289655 - DNA, 15 bp, Homo sapiens
agaaagggagggaag

SEQ ID NO: 1289656 - DNA, 15 bp, Homo sapiens
aagaaagggagggaa

SEQ ID NO: 1289657 - DNA, 15 bp, Homo sapiens
aaagaaagggaggga

SEQ ID NO: 1289658 - DNA, 15 bp, Homo sapiens
aaaagaaagggaggg

SEQ ID NO: 1289659 - DNA, 15 bp, Homo sapiens
aaaaagaaagggagg

SEQ ID NO: 1289660 - DNA, 15 bp, Homo sapiens
aaaaaagaaagggag

SEQ ID NO: 1289661 - DNA, 15 bp, Homo sapiens
aaaaaaagaaaggga

SEQ ID NO: 1289662 - DNA, 15 bp, Homo sapiens
aaaaaaaagaaaggg

SEQ ID NO: 1289663 - DNA, 15 bp, Homo sapiens
caaaaaaaagaaagg

SEQ ID NO: 1289664 - DNA, 15 bp, Homo sapiens
tcaaaaaaaagaaag

SEQ ID NO: 1289665 - DNA, 15 bp, Homo sapiens
ttcaaaaaaaagaaa

SEQ ID NO: 1289666 - DNA, 15 bp, Homo sapiens
cttcaaaaaaaagaa

SEQ ID NO: 1289667 - DNA, 15 bp, Homo sapiens
tcttcaaaaaaaaga

SEQ ID NO: 1289668 - DNA, 15 bp, Homo sapiens
ttcttcaaaaaaaag

SEQ ID NO: 1289669 - DNA, 15 bp, Homo sapiens
attcttcaaaaaaaa

SEQ ID NO: 1289670 - DNA, 15 bp, Homo sapiens
tattcttcaaaaaaa

SEQ ID NO: 1289671 - DNA, 15 bp, Homo sapiens
ttattcttcaaaaaa

SEQ ID NO: 1289672 - DNA, 15 bp, Homo sapiens
attattcttcaaaaa

SEQ ID NO: 1289673 - DNA, 15 bp, Homo sapiens
cattattcttcaaaa

SEQ ID NO: 1289674 - DNA, 15 bp, Homo sapiens
tcattattcttcaaa

SEQ ID NO: 1289675 - DNA, 15 bp, Homo sapiens
atcattattcttcaa

SEQ ID NO: 1289676 - DNA, 15 bp, Homo sapiens
catcattattcttca

SEQ ID NO: 1289677 - DNA, 15 bp, Homo sapiens
acatcattattcttc

SEQ ID NO: 1289678 - DNA, 15 bp, Homo sapiens
aacatcattattctt

SEQ ID NO: 1289679 - DNA, 15 bp, Homo sapiens
taacatcattattct

SEQ ID NO: 1289680 - DNA, 15 bp, Homo sapiens
gtaacatcattattc

SEQ ID NO: 1289681 - DNA, 15 bp, Homo sapiens
agtaacatcattatt

SEQ ID NO: 1289682 - DNA, 15 bp, Homo sapiens
cagtaacatcattat

SEQ ID NO: 1289683 - DNA, 15 bp, Homo sapiens
acagtaacatcatta

SEQ ID NO: 1289684 - DNA, 15 bp, Homo sapiens
aacagtaacatcatt

SEQ ID NO: 1289685 - DNA, 15 bp, Homo sapiens
aaacagtaacatcat

SEQ ID NO: 1289686 - DNA, 15 bp, Homo sapiens
aaaacagtaacatca

SEQ ID NO: 1289687 - DNA, 15 bp, Homo sapiens
gaaaacagtaacatc

SEQ ID NO: 1289688 - DNA, 15 bp, Homo sapiens
tgaaaacagtaacat

SEQ ID NO: 1289689 - DNA, 15 bp, Homo sapiens
atgaaaacagtaaca

SEQ ID NO: 1289690 - DNA, 15 bp, Homo sapiens
tatgaaaacagtaac

SEQ ID NO: 1289691 - DNA, 15 bp, Homo sapiens
ttatgaaaacagtaa

SEQ ID NO: 1289692 - DNA, 15 bp, Homo sapiens
tttatgaaaacagta

SEQ ID NO: 1289693 - DNA, 15 bp, Homo sapiens
ttttatgaaaacagt

SEQ ID NO: 1289694 - DNA, 15 bp, Homo sapiens
tttttatgaaaacag

SEQ ID NO: 1289695 - DNA, 15 bp, Homo sapiens
atttttatgaaaaca

SEQ ID NO: 1289696 - DNA, 15 bp, Homo sapiens
catttttatgaaaac

SEQ ID NO: 1289697 - DNA, 15 bp, Homo sapiens
tcatttttatgaaaa

SEQ ID NO: 1289698 - DNA, 15 bp, Homo sapiens
atcatttttatgaaa

SEQ ID NO: 1289699 - DNA, 15 bp, Homo sapiens
tatcatttttatgaa

SEQ ID NO: 1289700 - DNA, 15 bp, Homo sapiens
atatcatttttatga

SEQ ID NO: 1289701 - DNA, 15 bp, Homo sapiens
aatatcatttttatg

SEQ ID NO: 1289702 - DNA, 15 bp, Homo sapiens
aaatatcatttttat

SEQ ID NO: 1289703 - DNA, 15 bp, Homo sapiens
caaatatcattttta

SEQ ID NO: 1289704 - DNA, 15 bp, Homo sapiens
gcaaatatcattttt

SEQ ID NO: 1289705 - DNA, 15 bp, Homo sapiens
agcaaatatcatttt

SEQ ID NO: 1289706 - DNA, 15 bp, Homo sapiens
gagcaaatatcattt

SEQ ID NO: 1289707 - DNA, 15 bp, Homo sapiens
tgagcaaatatcatt

SEQ ID NO: 1289708 - DNA, 15 bp, Homo sapiens
atgagcaaatatcat

SEQ ID NO: 1289709 - DNA, 15 bp, Homo sapiens
catgagcaaatatca

SEQ ID NO: 1289710 - DNA, 15 bp, Homo sapiens
tcatgagcaaatatc

SEQ ID NO: 1289711 - DNA, 15 bp, Homo sapiens
atcatgagcaaatat

SEQ ID NO: 1289712 - DNA, 15 bp, Homo sapiens
tatcatgagcaaata

SEQ ID NO: 1289713 - DNA, 15 bp, Homo sapiens
ttatcatgagcaaat

SEQ ID NO: 1289714 - DNA, 15 bp, Homo sapiens
tttatcatgagcaaa

SEQ ID NO: 1289715 - DNA, 15 bp, Homo sapiens
atttatcatgagcaa

SEQ ID NO: 1289716 - DNA, 15 bp, Homo sapiens
tatttatcatgagca

SEQ ID NO: 1289717 - DNA, 15 bp, Homo sapiens
ttatttatcatgagc

SEQ ID NO: 1289718 - DNA, 15 bp, Homo sapiens
attatttatcatgag

SEQ ID NO: 1289719 - DNA, 15 bp, Homo sapiens
aattatttatcatga

SEQ ID NO: 1289720 - DNA, 15 bp, Homo sapiens
gaattatttatcatg

SEQ ID NO: 1289721 - DNA, 15 bp, Homo sapiens
tgaattatttatcat

SEQ ID NO: 1289722 - DNA, 15 bp, Homo sapiens
ttgaattatttatca

SEQ ID NO: 1289723 - DNA, 15 bp, Homo sapiens
tttgaattatttatc

SEQ ID NO: 1289724 - DNA, 15 bp, Homo sapiens
atttgaattatttat

SEQ ID NO: 1289725 - DNA, 15 bp, Homo sapiens
tatttgaattattta

SEQ ID NO: 1289726 - DNA, 15 bp, Homo sapiens
ttatttgaattattt

SEQ ID NO: 1289727 - DNA, 15 bp, Homo sapiens
tttatttgaattatt

SEQ ID NO: 1289728 - DNA, 15 bp, Homo sapiens
ttttatttgaattat

SEQ ID NO: 1289729 - DNA, 15 bp, Homo sapiens
attttatttgaatta

SEQ ID NO: 1289730 - DNA, 15 bp, Homo sapiens
tattttatttgaatt

SEQ ID NO: 1289731 - DNA, 15 bp, Homo sapiens
ttattttatttgaat

SEQ ID NO: 1289732 - DNA, 15 bp, Homo sapiens
attattttatttgaa

SEQ ID NO: 1289733 - DNA, 15 bp, Homo sapiens
aattattttatttga

SEQ ID NO: 1289734 - DNA, 15 bp, Homo sapiens
aaattattttatttg

SEQ ID NO: 1289735 - DNA, 15 bp, Homo sapiens
aaaattattttattt

SEQ ID NO: 1289736 - DNA, 15 bp, Homo sapiens
caaaattattttatt

SEQ ID NO: 1289737 - DNA, 15 bp, Homo sapiens
ccaaaattattttat

SEQ ID NO: 1289738 - DNA, 15 bp, Homo sapiens
accaaaattatttta

SEQ ID NO: 1289739 - DNA, 15 bp, Homo sapiens
gaccaaaattatttt

SEQ ID NO: 1289740 - DNA, 15 bp, Homo sapiens
tgaccaaaattattt

SEQ ID NO: 1289741 - DNA, 15 bp, Homo sapiens
gtgaccaaaattatt

SEQ ID NO: 1289742 - DNA, 15 bp, Homo sapiens
tgtgaccaaaattat

SEQ ID NO: 1289743 - DNA, 15 bp, Homo sapiens
ttgtgaccaaaatta

SEQ ID NO: 1289744 - DNA, 15 bp, Homo sapiens
tttgtgaccaaaatt

SEQ ID NO: 1289745 - DNA, 15 bp, Homo sapiens
ttttgtgaccaaaat

SEQ ID NO: 1289746 - DNA, 15 bp, Homo sapiens
cttttgtgaccaaaa

SEQ ID NO: 1289747 - DNA, 15 bp, Homo sapiens
gcttttgtgaccaaa

SEQ ID NO: 1289748 - DNA, 15 bp, Homo sapiens
tgcttttgtgaccaa

SEQ ID NO: 1289749 - DNA, 15 bp, Homo sapiens
gtgcttttgtgacca

SEQ ID NO: 1289750 - DNA, 15 bp, Homo sapiens
tgtgcttttgtgacc

SEQ ID NO: 1289751 - DNA, 15 bp, Homo sapiens
ttgtgcttttgtgac

SEQ ID NO: 1289752 - DNA, 15 bp, Homo sapiens
tttgtgcttttgtga

SEQ ID NO: 1289753 - DNA, 15 bp, Homo sapiens
ctttgtgcttttgtg

SEQ ID NO: 1289754 - DNA, 15 bp, Homo sapiens
tctttgtgcttttgt

SEQ ID NO: 1289755 - DNA, 15 bp, Homo sapiens
ttctttgtgcttttg

SEQ ID NO: 1289756 - DNA, 15 bp, Homo sapiens
tttttctttgtgctt

SEQ ID NO: 1289757 - DNA, 15 bp, Homo sapiens
atttttctttgtgct

SEQ ID NO: 1289758 - DNA, 15 bp, Homo sapiens
aatttttctttgtgc

SEQ ID NO: 1289759 - DNA, 15 bp, Homo sapiens
taatttttctttgtg

SEQ ID NO: 1289760 - DNA, 15 bp, Homo sapiens
ataatttttctttgt

SEQ ID NO: 1289761 - DNA, 15 bp, Homo sapiens
gataatttttctttg

SEQ ID NO: 1289762 - DNA, 15 bp, Homo sapiens
agataatttttcttt

SEQ ID NO: 1289763 - DNA, 15 bp, Homo sapiens
tagataatttttctt

SEQ ID NO: 1289764 - DNA, 15 bp, Homo sapiens
ttagataatttttct

SEQ ID NO: 1289765 - DNA, 15 bp, Homo sapiens
tttagataatttttc

SEQ ID NO: 1289766 - DNA, 15 bp, Homo sapiens
ttttagataattttt

SEQ ID NO: 1289767 - DNA, 15 bp, Homo sapiens
attttagataatttt

SEQ ID NO: 1289768 - DNA, 15 bp, Homo sapiens
gattttagataattt

SEQ ID NO: 1289769 - DNA, 15 bp, Homo sapiens
ggattttagataatt

SEQ ID NO: 1289770 - DNA, 15 bp, Homo sapiens
tggattttagataat

SEQ ID NO: 1289771 - DNA, 15 bp, Homo sapiens
gtggattttagataa

SEQ ID NO: 1289772 - DNA, 15 bp, Homo sapiens
ggtggattttagata

SEQ ID NO: 1289773 - DNA, 15 bp, Homo sapiens
gggtggattttagat

SEQ ID NO: 1289774 - DNA, 15 bp, Homo sapiens
tgggtggattttaga

SEQ ID NO: 1289775 - DNA, 15 bp, Homo sapiens
ctgggtggattttag

SEQ ID NO: 1289776 - DNA, 15 bp, Homo sapiens
cctgggtggatttta

SEQ ID NO: 1289777 - DNA, 15 bp, Homo sapiens
ccctgggtggatttt

SEQ ID NO: 1289778 - DNA, 15 bp, Homo sapiens
tccctgggtggattt

SEQ ID NO: 1289779 - DNA, 15 bp, Homo sapiens
atccctgggtggatt

SEQ ID NO: 1289780 - DNA, 15 bp, Homo sapiens
tatccctgggtggat

SEQ ID NO: 1289781 - DNA, 15 bp, Homo sapiens
ttatccctgggtgga

SEQ ID NO: 1289782 - DNA, 15 bp, Homo sapiens
attatccctgggtgg

SEQ ID NO: 1289783 - DNA, 15 bp, Homo sapiens
gattatccctgggtg

SEQ ID NO: 1289784 - DNA, 15 bp, Homo sapiens
cgattatccctgggt

SEQ ID NO: 1289785 - DNA, 15 bp, Homo sapiens
ccgattatccctggg

SEQ ID NO: 1289786 - DNA, 15 bp, Homo sapiens
gccgattatccctgg

SEQ ID NO: 1289787 - DNA, 15 bp, Homo sapiens
tgccgattatccctg

SEQ ID NO: 1289788 - DNA, 15 bp, Homo sapiens
atgccgattatccct

SEQ ID NO: 1289789 - DNA, 15 bp, Homo sapiens
aatgccgattatccc

SEQ ID NO: 1289790 - DNA, 15 bp, Homo sapiens
taatgccgattatcc

SEQ ID NO: 1289791 - DNA, 15 bp, Homo sapiens
ttaatgccgattatc

SEQ ID NO: 1289792 - DNA, 15 bp, Homo sapiens
tttaatgccgattat

SEQ ID NO: 1289793 - DNA, 15 bp, Homo sapiens
ttttaatgccgatta

SEQ ID NO: 1289794 - DNA, 15 bp, Homo sapiens
attttaatgccgatt

SEQ ID NO: 1289795 - DNA, 15 bp, Homo sapiens
aattttaatgccgat

SEQ ID NO: 1289796 - DNA, 15 bp, Homo sapiens
taattttaatgccga

SEQ ID NO: 1289797 - DNA, 15 bp, Homo sapiens
gtaattttaatgccg

SEQ ID NO: 1289798 - DNA, 15 bp, Homo sapiens
tgtaattttaatgcc

SEQ ID NO: 1289799 - DNA, 15 bp, Homo sapiens
atgtaattttaatgc

SEQ ID NO: 1289800 - DNA, 15 bp, Homo sapiens
tatgtaattttaatg

SEQ ID NO: 1289801 - DNA, 15 bp, Homo sapiens
ttatgtaattttaat

SEQ ID NO: 1289802 - DNA, 15 bp, Homo sapiens
attatgtaattttaa

SEQ ID NO: 1289803 - DNA, 15 bp, Homo sapiens
aattatgtaatttta

SEQ ID NO: 1289804 - DNA, 15 bp, Homo sapiens
caattatgtaatttt

SEQ ID NO: 1289805 - DNA, 15 bp, Homo sapiens
ccaattatgtaattt

SEQ ID NO: 1289806 - DNA, 15 bp, Homo sapiens
cccaattatgtaatt

SEQ ID NO: 1289807 - DNA, 15 bp, Homo sapiens
tcccaattatgtaat

SEQ ID NO: 1289808 - DNA, 15 bp, Homo sapiens
atcccaattatgtaa

SEQ ID NO: 1289809 - DNA, 15 bp, Homo sapiens
catcccaattatgta

SEQ ID NO: 1289810 - DNA, 15 bp, Homo sapiens
gcatcccaattatgt

SEQ ID NO: 1289811 - DNA, 15 bp, Homo sapiens
tgcatcccaattatg

SEQ ID NO: 1289812 - DNA, 15 bp, Homo sapiens
ctgcatcccaattat

SEQ ID NO: 1289813 - DNA, 15 bp, Homo sapiens
actgcatcccaatta

SEQ ID NO: 1289814 - DNA, 15 bp, Homo sapiens
aactgcatcccaatt

SEQ ID NO: 1289815 - DNA, 15 bp, Homo sapiens
taactgcatcccaat

SEQ ID NO: 1289816 - DNA, 15 bp, Homo sapiens
ttaactgcatcccaa

SEQ ID NO: 1289817 - DNA, 15 bp, Homo sapiens
cttaactgcatccca

SEQ ID NO: 1289818 - DNA, 15 bp, Homo sapiens
ccttaactgcatccc

SEQ ID NO: 1289819 - DNA, 15 bp, Homo sapiens
accttaactgcatcc

SEQ ID NO: 1289820 - DNA, 15 bp, Homo sapiens
taccttaactgcatc

SEQ ID NO: 1289821 - DNA, 15 bp, Homo sapiens
ataccttaactgcat

SEQ ID NO: 1289822 - DNA, 15 bp, Homo sapiens
tataccttaactgca

SEQ ID NO: 1289823 - DNA, 15 bp, Homo sapiens
ctataccttaactgc

SEQ ID NO: 1289824 - DNA, 15 bp, Homo sapiens
tctataccttaactg

SEQ ID NO: 1289825 - DNA, 15 bp, Homo sapiens
ttctataccttaact

SEQ ID NO: 1289826 - DNA, 15 bp, Homo sapiens
attctataccttaac

SEQ ID NO: 1289827 - DNA, 15 bp, Homo sapiens
aattctataccttaa

SEQ ID NO: 1289828 - DNA, 15 bp, Homo sapiens
aaattctatacctta

SEQ ID NO: 1289829 - DNA, 15 bp, Homo sapiens
aaaattctatacctt

SEQ ID NO: 1289830 - DNA, 15 bp, Homo sapiens
aaaaattctatacct

SEQ ID NO: 1289831 - DNA, 15 bp, Homo sapiens
taaaaattctatacc

SEQ ID NO: 1289832 - DNA, 15 bp, Homo sapiens
ataaaaattctatac

SEQ ID NO: 1289833 - DNA, 15 bp, Homo sapiens
aataaaaattctata

SEQ ID NO: 1289834 - DNA, 15 bp, Homo sapiens
taataaaaattctat

SEQ ID NO: 1289835 - DNA, 15 bp, Homo sapiens
ataataaaaattcta

SEQ ID NO: 1289836 - DNA, 15 bp, Homo sapiens
aataataaaaattct

SEQ ID NO: 1289837 - DNA, 15 bp, Homo sapiens
aaataataaaaattc

SEQ ID NO: 1289838 - DNA, 15 bp, Homo sapiens
aaaataataaaaatt

SEQ ID NO: 1289839 - DNA, 15 bp, Homo sapiens
aaaaataataaaaat

SEQ ID NO: 1289840 - DNA, 15 bp, Homo sapiens
caaaaataataaaaa

SEQ ID NO: 1289841 - DNA, 15 bp, Homo sapiens
acaaaaataataaaa

SEQ ID NO: 1289842 - DNA, 15 bp, Homo sapiens
aacaaaaataataaa

SEQ ID NO: 1289843 - DNA, 15 bp, Homo sapiens
aaacaaaaataataa

SEQ ID NO: 1289844 - DNA, 15 bp, Homo sapiens
caaacaaaaataata

SEQ ID NO: 1289845 - DNA, 15 bp, Homo sapiens
acaaacaaaaataat

SEQ ID NO: 1289846 - DNA, 15 bp, Homo sapiens
taaacaaacaaaaat

SEQ ID NO: 1289847 - DNA, 15 bp, Homo sapiens
cataaacaaacaaaa

SEQ ID NO: 1289848 - DNA, 15 bp, Homo sapiens
gcataaacaaacaaa

SEQ ID NO: 1289849 - DNA, 15 bp, Homo sapiens
tgcataaacaaacaa

SEQ ID NO: 1289850 - DNA, 15 bp, Homo sapiens
ttgcataaacaaaca

SEQ ID NO: 1289851 - DNA, 15 bp, Homo sapiens
tttgcataaacaaac

SEQ ID NO: 1289852 - DNA, 15 bp, Homo sapiens
gtttgcataaacaaa

SEQ ID NO: 1289853 - DNA, 15 bp, Homo sapiens
tgtttgcataaacaa

SEQ ID NO: 1289854 - DNA, 15 bp, Homo sapiens
ctgtttgcataaaca

SEQ ID NO: 1289855 - DNA, 15 bp, Homo sapiens
actgtttgcataaac

SEQ ID NO: 1289856 - DNA, 15 bp, Homo sapiens
cactgtttgcataaa

SEQ ID NO: 1289857 - DNA, 15 bp, Homo sapiens
acactgtttgcataa

SEQ ID NO: 1289858 - DNA, 15 bp, Homo sapiens
aacactgtttgcata

SEQ ID NO: 1289859 - DNA, 15 bp, Homo sapiens
taacactgtttgcat

SEQ ID NO: 1289860 - DNA, 15 bp, Homo sapiens
ttaacactgtttgca

SEQ ID NO: 1289861 - DNA, 15 bp, Homo sapiens
gttaacactgtttgc

SEQ ID NO: 1289862 - DNA, 15 bp, Homo sapiens
agttaacactgtttg

SEQ ID NO: 1289863 - DNA, 15 bp, Homo sapiens
aagttaacactgttt

SEQ ID NO: 1289864 - DNA, 15 bp, Homo sapiens
caagttaacactgtt

SEQ ID NO: 1289865 - DNA, 15 bp, Homo sapiens
acaagttaacactgt

SEQ ID NO: 1289866 - DNA, 15 bp, Homo sapiens
aacaagttaacactg

SEQ ID NO: 1289867 - DNA, 15 bp, Homo sapiens
taacaagttaacact

SEQ ID NO: 1289868 - DNA, 15 bp, Homo sapiens
ataacaagttaacac

SEQ ID NO: 1289869 - DNA, 15 bp, Homo sapiens
gataacaagttaaca

SEQ ID NO: 1289870 - DNA, 15 bp, Homo sapiens
tgataacaagttaac

SEQ ID NO: 1289871 - DNA, 15 bp, Homo sapiens
ctgataacaagttaa

SEQ ID NO: 1289872 - DNA, 15 bp, Homo sapiens
actgataacaagtta

SEQ ID NO: 1289873 - DNA, 15 bp, Homo sapiens
aactgataacaagtt

SEQ ID NO: 1289874 - DNA, 15 bp, Homo sapiens
caactgataacaagt

SEQ ID NO: 1289875 - DNA, 15 bp, Homo sapiens
tcaactgataacaag

SEQ ID NO: 1289876 - DNA, 15 bp, Homo sapiens
ttcaactgataacaa

SEQ ID NO: 1289877 - DNA, 15 bp, Homo sapiens
tttcaactgataaca

SEQ ID NO: 1289878 - DNA, 15 bp, Homo sapiens
atttcaactgataac

SEQ ID NO: 1289879 - DNA, 15 bp, Homo sapiens
tatttcaactgataa

SEQ ID NO: 1289880 - DNA, 15 bp, Homo sapiens
ttatttcaactgata

SEQ ID NO: 1289881 - DNA, 15 bp, Homo sapiens
attatttcaactgat

SEQ ID NO: 1289882 - DNA, 15 bp, Homo sapiens
cattatttcaactga

SEQ ID NO: 1289883 - DNA, 15 bp, Homo sapiens
ccattatttcaactg

SEQ ID NO: 1289884 - DNA, 15 bp, Homo sapiens
cccattatttcaact

SEQ ID NO: 1289885 - DNA, 15 bp, Homo sapiens
acccattatttcaac

SEQ ID NO: 1289886 - DNA, 15 bp, Homo sapiens
aacccattatttcaa

SEQ ID NO: 1289887 - DNA, 15 bp, Homo sapiens
taacccattatttca

SEQ ID NO: 1289888 - DNA, 15 bp, Homo sapiens
ataacccattatttc

SEQ ID NO: 1289889 - DNA, 15 bp, Homo sapiens
tataacccattattt

SEQ ID NO: 1289890 - DNA, 15 bp, Homo sapiens
ttataacccattatt

SEQ ID NO: 1289891 - DNA, 15 bp, Homo sapiens
cttataacccattat

SEQ ID NO: 1289892 - DNA, 15 bp, Homo sapiens
tcttataacccatta

SEQ ID NO: 1289893 - DNA, 15 bp, Homo sapiens
atcttataacccatt

SEQ ID NO: 1289894 - DNA, 15 bp, Homo sapiens
tatcttataacccat

SEQ ID NO: 1289895 - DNA, 15 bp, Homo sapiens
ctatcttataaccca

SEQ ID NO: 1289896 - DNA, 15 bp, Homo sapiens
actatcttataaccc

SEQ ID NO: 1289897 - DNA, 15 bp, Homo sapiens
tactatcttataacc

SEQ ID NO: 1289898 - DNA, 15 bp, Homo sapiens
atactatcttataac

SEQ ID NO: 1289899 - DNA, 15 bp, Homo sapiens
aatactatcttataa

SEQ ID NO: 1289900 - DNA, 15 bp, Homo sapiens
aaatactatcttata

SEQ ID NO: 1289901 - DNA, 15 bp, Homo sapiens
caaatactatcttat

SEQ ID NO: 1289902 - DNA, 15 bp, Homo sapiens
gcaaatactatctta

SEQ ID NO: 1289903 - DNA, 15 bp, Homo sapiens
tgcaaatactatctt

SEQ ID NO: 1289904 - DNA, 15 bp, Homo sapiens
ttgcaaatactatct

SEQ ID NO: 1289905 - DNA, 15 bp, Homo sapiens
cttgcaaatactatc

SEQ ID NO: 1289906 - DNA, 15 bp, Homo sapiens
gcttgcaaatactat

SEQ ID NO: 1289907 - DNA, 15 bp, Homo sapiens
ggcttgcaaatacta

SEQ ID NO: 1289908 - DNA, 15 bp, Homo sapiens
aggcttgcaaatact

SEQ ID NO: 1289909 - DNA, 15 bp, Homo sapiens
gaggcttgcaaatac

SEQ ID NO: 1289910 - DNA, 15 bp, Homo sapiens
tgaggcttgcaaata

SEQ ID NO: 1289911 - DNA, 15 bp, Homo sapiens
atgaggcttgcaaat

SEQ ID NO: 1289912 - DNA, 15 bp, Homo sapiens
tatgaggcttgcaaa

SEQ ID NO: 1289913 - DNA, 15 bp, Homo sapiens
ctatgaggcttgcaa

SEQ ID NO: 1289914 - DNA, 15 bp, Homo sapiens
actatgaggcttgca

SEQ ID NO: 1289915 - DNA, 15 bp, Homo sapiens
tactatgaggcttgc

SEQ ID NO: 1289916 - DNA, 15 bp, Homo sapiens
ttactatgaggcttg

SEQ ID NO: 1289917 - DNA, 15 bp, Homo sapiens
gttactatgaggctt

SEQ ID NO: 1289918 - DNA, 15 bp, Homo sapiens
ggttactatgaggct

SEQ ID NO: 1289919 - DNA, 15 bp, Homo sapiens
aggttactatgaggc

SEQ ID NO: 1289920 - DNA, 15 bp, Homo sapiens
gaggttactatgagg

SEQ ID NO: 1289921 - DNA, 15 bp, Homo sapiens
tgaggttactatgag

SEQ ID NO: 1289922 - DNA, 15 bp, Homo sapiens
ttgaggttactatga

SEQ ID NO: 1289923 - DNA, 15 bp, Homo sapiens
tttgaggttactatg

SEQ ID NO: 1289924 - DNA, 15 bp, Homo sapiens
gtttgaggttactat

SEQ ID NO: 1289925 - DNA, 15 bp, Homo sapiens
ggtttgaggttacta

SEQ ID NO: 1289926 - DNA, 15 bp, Homo sapiens
tggtttgaggttact

SEQ ID NO: 1289927 - DNA, 15 bp, Homo sapiens
ttggtttgaggttac

SEQ ID NO: 1289928 - DNA, 15 bp, Homo sapiens
tttggtttgaggtta

SEQ ID NO: 1289929 - DNA, 15 bp, Homo sapiens
ttttggtttgaggtt

SEQ ID NO: 1289930 - DNA, 15 bp, Homo sapiens
tttttggtttgaggt

SEQ ID NO: 1289931 - DNA, 15 bp, Homo sapiens
ttttttggtttgagg

SEQ ID NO: 1289932 - DNA, 15 bp, Homo sapiens
gttttttggtttgag

SEQ ID NO: 1289933 - DNA, 15 bp, Homo sapiens
tgttttttggtttga

SEQ ID NO: 1289934 - DNA, 15 bp, Homo sapiens
atgttttttggtttg

SEQ ID NO: 1289935 - DNA, 15 bp, Homo sapiens
tatgttttttggttt

SEQ ID NO: 1289936 - DNA, 15 bp, Homo sapiens
gtatgttttttggtt

SEQ ID NO: 1289937 - DNA, 15 bp, Homo sapiens
tgtatgttttttggt

SEQ ID NO: 1289938 - DNA, 15 bp, Homo sapiens
ttgtatgttttttgg

SEQ ID NO: 1289939 - DNA, 15 bp, Homo sapiens
attgtatgttttttg

SEQ ID NO: 1289940 - DNA, 15 bp, Homo sapiens
cattgtatgtttttt

SEQ ID NO: 1289941 - DNA, 15 bp, Homo sapiens
acattgtatgttttt

SEQ ID NO: 1289942 - DNA, 15 bp, Homo sapiens
tacattgtatgtttt

SEQ ID NO: 1289943 - DNA, 15 bp, Homo sapiens
ctacattgtatgttt

SEQ ID NO: 1289944 - DNA, 15 bp, Homo sapiens
tctacattgtatgtt

SEQ ID NO: 1289945 - DNA, 15 bp, Homo sapiens
gtctacattgtatgt

SEQ ID NO: 1289946 - DNA, 15 bp, Homo sapiens
tgtctacattgtatg

SEQ ID NO: 1289947 - DNA, 15 bp, Homo sapiens
atgtctacattgtat

SEQ ID NO: 1289948 - DNA, 15 bp, Homo sapiens
catgtctacattgta

SEQ ID NO: 1289949 - DNA, 15 bp, Homo sapiens
tcatgtctacattgt

SEQ ID NO: 1289950 - DNA, 15 bp, Homo sapiens
ttcatgtctacattg

SEQ ID NO: 1289951 - DNA, 15 bp, Homo sapiens
tttcatgtctacatt

SEQ ID NO: 1289952 - DNA, 15 bp, Homo sapiens
ttttcatgtctacat

SEQ ID NO: 1289953 - DNA, 15 bp, Homo sapiens
tttttcatgtctaca

SEQ ID NO: 1289954 - DNA, 15 bp, Homo sapiens
atttttcatgtctac

SEQ ID NO: 1289955 - DNA, 15 bp, Homo sapiens
tatttttcatgtcta

SEQ ID NO: 1289956 - DNA, 15 bp, Homo sapiens
ttatttttcatgtct

SEQ ID NO: 1289957 - DNA, 15 bp, Homo sapiens
tttatttttcatgtc

SEQ ID NO: 1289958 - DNA, 15 bp, Homo sapiens
ttttatttttcatgt

SEQ ID NO: 1289959 - DNA, 15 bp, Homo sapiens
tttttatttttcatg

SEQ ID NO: 1289960 - DNA, 15 bp, Homo sapiens
ctttttatttttcat

SEQ ID NO: 1289961 - DNA, 15 bp, Homo sapiens
gctttttatttttca

SEQ ID NO: 1289962 - DNA, 15 bp, Homo sapiens
tgctttttatttttc

SEQ ID NO: 1289963 - DNA, 15 bp, Homo sapiens
ttgctttttattttt

SEQ ID NO: 1289964 - DNA, 15 bp, Homo sapiens
cttgctttttatttt

SEQ ID NO: 1289965 - DNA, 15 bp, Homo sapiens
tcttgctttttattt

SEQ ID NO: 1289966 - DNA, 15 bp, Homo sapiens
ttcttgctttttatt

SEQ ID NO: 1289967 - DNA, 15 bp, Homo sapiens
tttcttgctttttat

SEQ ID NO: 1289968 - DNA, 15 bp, Homo sapiens
gtttcttgcttttta

SEQ ID NO: 1289969 - DNA, 15 bp, Homo sapiens
agtttcttgcttttt

SEQ ID NO: 1289970 - DNA, 15 bp, Homo sapiens
tagtttcttgctttt

SEQ ID NO: 1289971 - DNA, 15 bp, Homo sapiens
ttagtttcttgcttt

SEQ ID NO: 1289972 - DNA, 15 bp, Homo sapiens
tttagtttcttgctt

SEQ ID NO: 1289973 - DNA, 15 bp, Homo sapiens
ctttagtttcttgct

SEQ ID NO: 1289974 - DNA, 15 bp, Homo sapiens
gctttagtttcttgc

SEQ ID NO: 1289975 - DNA, 15 bp, Homo sapiens
tgctttagtttcttg

SEQ ID NO: 1289976 - DNA, 15 bp, Homo sapiens
atgctttagtttctt

SEQ ID NO: 1289977 - DNA, 15 bp, Homo sapiens
tatgctttagtttct

SEQ ID NO: 1289978 - DNA, 15 bp, Homo sapiens
atatgctttagtttc

SEQ ID NO: 1289979 - DNA, 15 bp, Homo sapiens
gatatgctttagttt

SEQ ID NO: 1289980 - DNA, 15 bp, Homo sapiens
tgatatgctttagtt

SEQ ID NO: 1289981 - DNA, 15 bp, Homo sapiens
atgatatgctttagt

SEQ ID NO: 1289982 - DNA, 15 bp, Homo sapiens
gatgatatgctttag

SEQ ID NO: 1289983 - DNA, 15 bp, Homo sapiens
tgatgatatgcttta

SEQ ID NO: 1289984 - DNA, 15 bp, Homo sapiens
ctgatgatatgcttt

SEQ ID NO: 1289985 - DNA, 15 bp, Homo sapiens
tctgatgatatgctt

SEQ ID NO: 1289986 - DNA, 15 bp, Homo sapiens
ctctgatgatatgct

SEQ ID NO: 1289987 - DNA, 15 bp, Homo sapiens
tctctgatgatatgc

SEQ ID NO: 1289988 - DNA, 15 bp, Homo sapiens
ttctctgatgatatg

SEQ ID NO: 1289989 - DNA, 15 bp, Homo sapiens
tttctctgatgatat

SEQ ID NO: 1289990 - DNA, 15 bp, Homo sapiens
ttttctctgatgata

SEQ ID NO: 1289991 - DNA, 15 bp, Homo sapiens
gttttctctgatgat

SEQ ID NO: 1289992 - DNA, 15 bp, Homo sapiens
agttttctctgatga

SEQ ID NO: 1289993 - DNA, 15 bp, Homo sapiens
tagttttctctgatg

SEQ ID NO: 1289994 - DNA, 15 bp, Homo sapiens
gtagttttctctgat

SEQ ID NO: 1289995 - DNA, 15 bp, Homo sapiens
agtagttttctctga

SEQ ID NO: 1289996 - DNA, 15 bp, Homo sapiens
aagtagttttctctg

SEQ ID NO: 1289997 - DNA, 15 bp, Homo sapiens
aaagtagttttctct

SEQ ID NO: 1289998 - DNA, 15 bp, Homo sapiens
gaaagtagttttctc

SEQ ID NO: 1289999 - DNA, 15 bp, Homo sapiens
tgaaagtagttttct

SEQ ID NO: 1290000 - DNA, 15 bp, Homo sapiens
gtgaaagtagttttc

SEQ ID NO: 1290001 - DNA, 15 bp, Homo sapiens
agtgaaagtagtttt

SEQ ID NO: 1290002 - DNA, 15 bp, Homo sapiens
tagtgaaagtagttt

SEQ ID NO: 1290003 - DNA, 15 bp, Homo sapiens
ttagtgaaagtagtt

SEQ ID NO: 1290004 - DNA, 15 bp, Homo sapiens
tttagtgaaagtagt

SEQ ID NO: 1290005 - DNA, 15 bp, Homo sapiens
ctttagtgaaagtag

SEQ ID NO: 1290006 - DNA, 15 bp, Homo sapiens
cctttagtgaaagta

SEQ ID NO: 1290007 - DNA, 15 bp, Homo sapiens
tcctttagtgaaagt

SEQ ID NO: 1290008 - DNA, 15 bp, Homo sapiens
ttcctttagtgaaag

SEQ ID NO: 1290009 - DNA, 15 bp, Homo sapiens
cttcctttagtgaaa

SEQ ID NO: 1290010 - DNA, 15 bp, Homo sapiens
tcttcctttagtgaa

SEQ ID NO: 1290011 - DNA, 15 bp, Homo sapiens
gtcttcctttagtga

SEQ ID NO: 1290012 - DNA, 15 bp, Homo sapiens
tgtcttcctttagtg

SEQ ID NO: 1290013 - DNA, 15 bp, Homo sapiens
ctgtcttcctttagt

SEQ ID NO: 1290014 - DNA, 15 bp, Homo sapiens
tctgtcttcctttag

SEQ ID NO: 1290015 - DNA, 15 bp, Homo sapiens
ttctgtcttccttta

SEQ ID NO: 1290016 - DNA, 15 bp, Homo sapiens
tttctgtcttccttt

SEQ ID NO: 1290017 - DNA, 15 bp, Homo sapiens
ctttctgtcttcctt

SEQ ID NO: 1290018 - DNA, 15 bp, Homo sapiens
cctttctgtcttcct

SEQ ID NO: 1290019 - DNA, 15 bp, Homo sapiens
tcctttctgtcttcc

SEQ ID NO: 1290020 - DNA, 15 bp, Homo sapiens
ttcctttctgtcttc

SEQ ID NO: 1290021 - DNA, 15 bp, Homo sapiens
tttcctttctgtctt

SEQ ID NO: 1290022 - DNA, 15 bp, Homo sapiens
ctttcctttctgtct

SEQ ID NO: 1290023 - DNA, 15 bp, Homo sapiens
tctttcctttctgtc

SEQ ID NO: 1290024 - DNA, 15 bp, Homo sapiens
ttctttcctttctgt

SEQ ID NO: 1290025 - DNA, 15 bp, Homo sapiens
tttctttcctttctg

SEQ ID NO: 1290026 - DNA, 15 bp, Homo sapiens
cttctttctttcctt

SEQ ID NO: 1290027 - DNA, 15 bp, Homo sapiens
ccttctttctttcct

SEQ ID NO: 1290028 - DNA, 15 bp, Homo sapiens
tccttctttctttcc

SEQ ID NO: 1290029 - DNA, 15 bp, Homo sapiens
ttccttctttctttc

SEQ ID NO: 1290030 - DNA, 15 bp, Homo sapiens
cttccttctttcttt

SEQ ID NO: 1290031 - DNA, 15 bp, Homo sapiens
tcttccttctttctt

SEQ ID NO: 1290032 - DNA, 15 bp, Homo sapiens
ctcttccttctttct

SEQ ID NO: 1290033 - DNA, 15 bp, Homo sapiens
tctcttccttctttc

SEQ ID NO: 1290034 - DNA, 15 bp, Homo sapiens
cttctcttccttctt

SEQ ID NO: 1290035 - DNA, 15 bp, Homo sapiens
tcttctcttccttct

SEQ ID NO: 1290036 - DNA, 15 bp, Homo sapiens
gtcttctcttccttc

SEQ ID NO: 1290037 - DNA, 15 bp, Homo sapiens
ggtcttctcttcctt

SEQ ID NO: 1290038 - DNA, 15 bp, Homo sapiens
tggtcttctcttcct

SEQ ID NO: 1290039 - DNA, 15 bp, Homo sapiens
gtggtcttctcttcc

SEQ ID NO: 1290040 - DNA, 15 bp, Homo sapiens
tgtggtcttctcttc

SEQ ID NO: 1290041 - DNA, 15 bp, Homo sapiens
ttgtggtcttctctt

SEQ ID NO: 1290042 - DNA, 15 bp, Homo sapiens
tttgtggtcttctct

SEQ ID NO: 1290043 - DNA, 15 bp, Homo sapiens
ttttgtggtcttctc

SEQ ID NO: 1290044 - DNA, 15 bp, Homo sapiens
gttttgtggtcttct

SEQ ID NO: 1290045 - DNA, 15 bp, Homo sapiens
tgttttgtggtcttc

SEQ ID NO: 1290046 - DNA, 15 bp, Homo sapiens
ttgttttgtggtctt

SEQ ID NO: 1290047 - DNA, 15 bp, Homo sapiens
gttgttttgtggtct

SEQ ID NO: 1290048 - DNA, 15 bp, Homo sapiens
ggttgttttgtggtc

SEQ ID NO: 1290049 - DNA, 15 bp, Homo sapiens
tggttgttttgtggt

SEQ ID NO: 1290050 - DNA, 15 bp, Homo sapiens
ctggttgttttgtgg

SEQ ID NO: 1290051 - DNA, 15 bp, Homo sapiens
tctggttgttttgtg

SEQ ID NO: 1290052 - DNA, 15 bp, Homo sapiens
ttctggttgttttgt

SEQ ID NO: 1290053 - DNA, 15 bp, Homo sapiens
tttctggttgttttg

SEQ ID NO: 1290054 - DNA, 15 bp, Homo sapiens
ttttctggttgtttt

SEQ ID NO: 1290055 - DNA, 15 bp, Homo sapiens
gttttctggttgttt

SEQ ID NO: 1290056 - DNA, 15 bp, Homo sapiens
tgttttctggttgtt

SEQ ID NO: 1290057 - DNA, 15 bp, Homo sapiens
ttgttttctggttgt

SEQ ID NO: 1290058 - DNA, 15 bp, Homo sapiens
tttgttttctggttg

SEQ ID NO: 1290059 - DNA, 15 bp, Homo sapiens
atttgttttctggtt

SEQ ID NO: 1290060 - DNA, 15 bp, Homo sapiens
tatttgttttctggt

SEQ ID NO: 1290061 - DNA, 15 bp, Homo sapiens
ttatttgttttctgg

SEQ ID NO: 1290062 - DNA, 15 bp, Homo sapiens
gttatttgttttctg

SEQ ID NO: 1290063 - DNA, 15 bp, Homo sapiens
tgttatttgttttct

SEQ ID NO: 1290064 - DNA, 15 bp, Homo sapiens
ttgttatttgttttc

SEQ ID NO: 1290065 - DNA, 15 bp, Homo sapiens
tttgttatttgtttt

SEQ ID NO: 1290066 - DNA, 15 bp, Homo sapiens
ttttgttatttgttt

SEQ ID NO: 1290067 - DNA, 15 bp, Homo sapiens
attttgttatttgtt

SEQ ID NO: 1290068 - DNA, 15 bp, Homo sapiens
cattttgttatttgt

SEQ ID NO: 1290069 - DNA, 15 bp, Homo sapiens
tcattttgttatttg

SEQ ID NO: 1290070 - DNA, 15 bp, Homo sapiens
gtcattttgttattt

SEQ ID NO: 1290071 - DNA, 15 bp, Homo sapiens
tgtcattttgttatt

SEQ ID NO: 1290072 - DNA, 15 bp, Homo sapiens
atgtcattttgttat

SEQ ID NO: 1290073 - DNA, 15 bp, Homo sapiens
catgtcattttgtta

SEQ ID NO: 1290074 - DNA, 15 bp, Homo sapiens
tcatgtcattttgtt

SEQ ID NO: 1290075 - DNA, 15 bp, Homo sapiens
ctcatgtcattttgt

SEQ ID NO: 1290076 - DNA, 15 bp, Homo sapiens
actcatgtcattttg

SEQ ID NO: 1290077 - DNA, 15 bp, Homo sapiens
tactcatgtcatttt

SEQ ID NO: 1290078 - DNA, 15 bp, Homo sapiens
ttactcatgtcattt

SEQ ID NO: 1290079 - DNA, 15 bp, Homo sapiens
cttactcatgtcatt

SEQ ID NO: 1290080 - DNA, 15 bp, Homo sapiens
acttactcatgtcat

SEQ ID NO: 1290081 - DNA, 15 bp, Homo sapiens
gacttactcatgtca

SEQ ID NO: 1290082 - DNA, 15 bp, Homo sapiens
ggacttactcatgtc

SEQ ID NO: 1290083 - DNA, 15 bp, Homo sapiens
aggacttactcatgt

SEQ ID NO: 1290084 - DNA, 15 bp, Homo sapiens
aaggacttactcatg

SEQ ID NO: 1290085 - DNA, 15 bp, Homo sapiens
taaggacttactcat

SEQ ID NO: 1290086 - DNA, 15 bp, Homo sapiens
gtaaggacttactca

SEQ ID NO: 1290087 - DNA, 15 bp, Homo sapiens
agtaaggacttactc

SEQ ID NO: 1290088 - DNA, 15 bp, Homo sapiens
aagtaaggacttact

SEQ ID NO: 1290089 - DNA, 15 bp, Homo sapiens
taagtaaggacttac

SEQ ID NO: 1290090 - DNA, 15 bp, Homo sapiens
gtaagtaaggactta

SEQ ID NO: 1290091 - DNA, 15 bp, Homo sapiens
ggtaagtaaggactt

SEQ ID NO: 1290092 - DNA, 15 bp, Homo sapiens
tggtaagtaaggact

SEQ ID NO: 1290093 - DNA, 15 bp, Homo sapiens
ttggtaagtaaggac

SEQ ID NO: 1290094 - DNA, 15 bp, Homo sapiens
attggtaagtaagga

SEQ ID NO: 1290095 - DNA, 15 bp, Homo sapiens
tattggtaagtaagg

SEQ ID NO: 1290096 - DNA, 15 bp, Homo sapiens
ttattggtaagtaag

SEQ ID NO: 1290097 - DNA, 15 bp, Homo sapiens
attattggtaagtaa

SEQ ID NO: 1290098 - DNA, 15 bp, Homo sapiens
tattattggtaagta

SEQ ID NO: 1290099 - DNA, 15 bp, Homo sapiens
ttattattggtaagt

SEQ ID NO: 1290100 - DNA, 15 bp, Homo sapiens
gttattattggtaag

SEQ ID NO: 1290101 - DNA, 15 bp, Homo sapiens
cgttattattggtaa

SEQ ID NO: 1290102 - DNA, 15 bp, Homo sapiens
acgttattattggta

SEQ ID NO: 1290103 - DNA, 15 bp, Homo sapiens
aacgttattattggt

SEQ ID NO: 1290104 - DNA, 15 bp, Homo sapiens
caacgttattattgg

SEQ ID NO: 1290105 - DNA, 15 bp, Homo sapiens
tcaacgttattattg

SEQ ID NO: 1290106 - DNA, 15 bp, Homo sapiens
ttcaacgttattatt

SEQ ID NO: 1290107 - DNA, 15 bp, Homo sapiens
gttcaacgttattat

SEQ ID NO: 1290108 - DNA, 15 bp, Homo sapiens
tgttcaacgttatta

SEQ ID NO: 1290109 - DNA, 15 bp, Homo sapiens
atgttcaacgttatt

SEQ ID NO: 1290110 - DNA, 15 bp, Homo sapiens
tatgttcaacgttat

SEQ ID NO: 1290111 - DNA, 15 bp, Homo sapiens
ttatgttcaacgtta

SEQ ID NO: 1290112 - DNA, 15 bp, Homo sapiens
tttatgttcaacgtt

SEQ ID NO: 1290113 - DNA, 15 bp, Homo sapiens
atttatgttcaacgt

SEQ ID NO: 1290114 - DNA, 15 bp, Homo sapiens
catttatgttcaacg

SEQ ID NO: 1290115 - DNA, 15 bp, Homo sapiens
ccatttatgttcaac

SEQ ID NO: 1290116 - DNA, 15 bp, Homo sapiens
tccatttatgttcaa

SEQ ID NO: 1290117 - DNA, 15 bp, Homo sapiens
gtccatttatgttca

SEQ ID NO: 1290118 - DNA, 15 bp, Homo sapiens
agtccatttatgttc

SEQ ID NO: 1290119 - DNA, 15 bp, Homo sapiens
tagtccatttatgtt

SEQ ID NO: 1290120 - DNA, 15 bp, Homo sapiens
ttagtccatttatgt

SEQ ID NO: 1290121 - DNA, 15 bp, Homo sapiens
tttagtccatttatg

SEQ ID NO: 1290122 - DNA, 15 bp, Homo sapiens
ctttagtccatttat

SEQ ID NO: 1290123 - DNA, 15 bp, Homo sapiens
actttagtccattta

SEQ ID NO: 1290124 - DNA, 15 bp, Homo sapiens
gactttagtccattt

SEQ ID NO: 1290125 - DNA, 15 bp, Homo sapiens
agactttagtccatt

SEQ ID NO: 1290126 - DNA, 15 bp, Homo sapiens
gagactttagtccat

SEQ ID NO: 1290127 - DNA, 15 bp, Homo sapiens
agagactttagtcca

SEQ ID NO: 1290128 - DNA, 15 bp, Homo sapiens
tagagactttagtcc

SEQ ID NO: 1290129 - DNA, 15 bp, Homo sapiens
ttagagactttagtc

SEQ ID NO: 1290130 - DNA, 15 bp, Homo sapiens
attagagactttagt

SEQ ID NO: 1290131 - DNA, 15 bp, Homo sapiens
aattagagactttag

SEQ ID NO: 1290132 - DNA, 15 bp, Homo sapiens
taattagagacttta

SEQ ID NO: 1290133 - DNA, 15 bp, Homo sapiens
ttaattagagacttt

SEQ ID NO: 1290134 - DNA, 15 bp, Homo sapiens
tttaattagagactt

SEQ ID NO: 1290135 - DNA, 15 bp, Homo sapiens
ttttaattagagact

SEQ ID NO: 1290136 - DNA, 15 bp, Homo sapiens
cttttaattagagac

SEQ ID NO: 1290137 - DNA, 15 bp, Homo sapiens
tcttttaattagaga

SEQ ID NO: 1290138 - DNA, 15 bp, Homo sapiens
gtcttttaattagag

SEQ ID NO: 1290139 - DNA, 15 bp, Homo sapiens
tgtcttttaattaga

SEQ ID NO: 1290140 - DNA, 15 bp, Homo sapiens
gtgtcttttaattag

SEQ ID NO: 1290141 - DNA, 15 bp, Homo sapiens
tgtgtcttttaatta

SEQ ID NO: 1290142 - DNA, 15 bp, Homo sapiens
ctgtgtcttttaatt

SEQ ID NO: 1290143 - DNA, 15 bp, Homo sapiens
tctgtgtcttttaat

SEQ ID NO: 1290144 - DNA, 15 bp, Homo sapiens
gtctgtgtcttttaa

SEQ ID NO: 1290145 - DNA, 15 bp, Homo sapiens
agtctgtgtctttta

SEQ ID NO: 1290146 - DNA, 15 bp, Homo sapiens
cagtctgtgtctttt

SEQ ID NO: 1290147 - DNA, 15 bp, Homo sapiens
ccagtctgtgtcttt

SEQ ID NO: 1290148 - DNA, 15 bp, Homo sapiens
accagtctgtgtctt

SEQ ID NO: 1290149 - DNA, 15 bp, Homo sapiens
aaccagtctgtgtct

SEQ ID NO: 1290150 - DNA, 15 bp, Homo sapiens
caaccagtctgtgtc

SEQ ID NO: 1290151 - DNA, 15 bp, Homo sapiens
tcaaccagtctgtgt

SEQ ID NO: 1290152 - DNA, 15 bp, Homo sapiens
ttcaaccagtctgtg

SEQ ID NO: 1290153 - DNA, 15 bp, Homo sapiens
attcaaccagtctgt

SEQ ID NO: 1290154 - DNA, 15 bp, Homo sapiens
cattcaaccagtctg

SEQ ID NO: 1290155 - DNA, 15 bp, Homo sapiens
tcattcaaccagtct

SEQ ID NO: 1290156 - DNA, 15 bp, Homo sapiens
atcattcaaccagtc

SEQ ID NO: 1290157 - DNA, 15 bp, Homo sapiens
catcattcaaccagt

SEQ ID NO: 1290158 - DNA, 15 bp, Homo sapiens
ccatcattcaaccag

SEQ ID NO: 1290159 - DNA, 15 bp, Homo sapiens
tccatcattcaacca

SEQ ID NO: 1290160 - DNA, 15 bp, Homo sapiens
ttccatcattcaacc

SEQ ID NO: 1290161 - DNA, 15 bp, Homo sapiens
tttccatcattcaac

SEQ ID NO: 1290162 - DNA, 15 bp, Homo sapiens
ttttccatcattcaa

SEQ ID NO: 1290163 - DNA, 15 bp, Homo sapiens
tttttccatcattca

SEQ ID NO: 1290164 - DNA, 15 bp, Homo sapiens
gtttttccatcattc

SEQ ID NO: 1290165 - DNA, 15 bp, Homo sapiens
tgtttttccatcatt

SEQ ID NO: 1290166 - DNA, 15 bp, Homo sapiens
ttgtttttccatcat

SEQ ID NO: 1290167 - DNA, 15 bp, Homo sapiens
cttgtttttccatca

SEQ ID NO: 1290168 - DNA, 15 bp, Homo sapiens
tcttgtttttccatc

SEQ ID NO: 1290169 - DNA, 15 bp, Homo sapiens
gtcttgtttttccat

SEQ ID NO: 1290170 - DNA, 15 bp, Homo sapiens
agtcttgtttttcca

SEQ ID NO: 1290171 - DNA, 15 bp, Homo sapiens
gagtcttgtttttcc

SEQ ID NO: 1290172 - DNA, 15 bp, Homo sapiens
tgagtcttgtttttc

SEQ ID NO: 1290173 - DNA, 15 bp, Homo sapiens
atgagtcttgttttt

SEQ ID NO: 1290174 - DNA, 15 bp, Homo sapiens
aatgagtcttgtttt

SEQ ID NO: 1290175 - DNA, 15 bp, Homo sapiens
aaatgagtcttgttt

SEQ ID NO: 1290176 - DNA, 15 bp, Homo sapiens
caaatgagtcttgtt

SEQ ID NO: 1290177 - DNA, 15 bp, Homo sapiens
tcaaatgagtcttgt

SEQ ID NO: 1290178 - DNA, 15 bp, Homo sapiens
atcaaatgagtcttg

SEQ ID NO: 1290179 - DNA, 15 bp, Homo sapiens
gatcaaatgagtctt

SEQ ID NO: 1290180 - DNA, 15 bp, Homo sapiens
agatcaaatgagtct

SEQ ID NO: 1290181 - DNA, 15 bp, Homo sapiens
cagatcaaatgagtc

SEQ ID NO: 1290182 - DNA, 15 bp, Homo sapiens
acagatcaaatgagt

SEQ ID NO: 1290183 - DNA, 15 bp, Homo sapiens
aacagatcaaatgag

SEQ ID NO: 1290184 - DNA, 15 bp, Homo sapiens
aaacagatcaaatga

SEQ ID NO: 1290185 - DNA, 15 bp, Homo sapiens
gaaacagatcaaatg

SEQ ID NO: 1290186 - DNA, 15 bp, Homo sapiens
ggaaacagatcaaat

SEQ ID NO: 1290187 - DNA, 15 bp, Homo sapiens
aggaaacagatcaaa

SEQ ID NO: 1290188 - DNA, 15 bp, Homo sapiens
taggaaacagatcaa

SEQ ID NO: 1290189 - DNA, 15 bp, Homo sapiens
gtaggaaacagatca

SEQ ID NO: 1290190 - DNA, 15 bp, Homo sapiens
tgtaggaaacagatc

SEQ ID NO: 1290191 - DNA, 15 bp, Homo sapiens
ttgtaggaaacagat

SEQ ID NO: 1290192 - DNA, 15 bp, Homo sapiens
cttgtaggaaacaga

SEQ ID NO: 1290193 - DNA, 15 bp, Homo sapiens
tcttgtaggaaacag

SEQ ID NO: 1290194 - DNA, 15 bp, Homo sapiens
ttcttgtaggaaaca

SEQ ID NO: 1290195 - DNA, 15 bp, Homo sapiens
tttcttgtaggaaac

SEQ ID NO: 1290196 - DNA, 15 bp, Homo sapiens
gtttcttgtaggaaa

SEQ ID NO: 1290197 - DNA, 15 bp, Homo sapiens
tgtttcttgtaggaa

SEQ ID NO: 1290198 - DNA, 15 bp, Homo sapiens
gtgtttcttgtagga

SEQ ID NO: 1290199 - DNA, 15 bp, Homo sapiens
tgtgtttcttgtagg

SEQ ID NO: 1290200 - DNA, 15 bp, Homo sapiens
gtgtgtttcttgtag

SEQ ID NO: 1290201 - DNA, 15 bp, Homo sapiens
agtgtgtttcttgta

SEQ ID NO: 1290202 - DNA, 15 bp, Homo sapiens
aagtgtgtttcttgt

SEQ ID NO: 1290203 - DNA, 15 bp, Homo sapiens
aaagtgtgtttcttg

SEQ ID NO: 1290204 - DNA, 15 bp, Homo sapiens
caaagtgtgtttctt

SEQ ID NO: 1290205 - DNA, 15 bp, Homo sapiens
gcaaagtgtgtttct

SEQ ID NO: 1290206 - DNA, 15 bp, Homo sapiens
ggcaaagtgtgtttc

SEQ ID NO: 1290207 - DNA, 15 bp, Homo sapiens
aggcaaagtgtgttt

SEQ ID NO: 1290208 - DNA, 15 bp, Homo sapiens
taggcaaagtgtgtt

SEQ ID NO: 1290209 - DNA, 15 bp, Homo sapiens
ataggcaaagtgtgt

SEQ ID NO: 1290210 - DNA, 15 bp, Homo sapiens
tataggcaaagtgtg

SEQ ID NO: 1290211 - DNA, 15 bp, Homo sapiens
ttataggcaaagtgt

SEQ ID NO: 1290212 - DNA, 15 bp, Homo sapiens
tttataggcaaagtg

SEQ ID NO: 1290213 - DNA, 15 bp, Homo sapiens
ctttataggcaaagt

SEQ ID NO: 1290214 - DNA, 15 bp, Homo sapiens
tctttataggcaaag

SEQ ID NO: 1290215 - DNA, 15 bp, Homo sapiens
gtctttataggcaaa

SEQ ID NO: 1290216 - DNA, 15 bp, Homo sapiens
tgtctttataggcaa

SEQ ID NO: 1290217 - DNA, 15 bp, Homo sapiens
gtgtctttataggca

SEQ ID NO: 1290218 - DNA, 15 bp, Homo sapiens
tgtgtctttataggc

SEQ ID NO: 1290219 - DNA, 15 bp, Homo sapiens
atgtgtctttatagg

SEQ ID NO: 1290220 - DNA, 15 bp, Homo sapiens
tatgtgtctttatag

SEQ ID NO: 1290221 - DNA, 15 bp, Homo sapiens
gtatgtgtctttata

SEQ ID NO: 1290222 - DNA, 15 bp, Homo sapiens
ggtatgtgtctttat

SEQ ID NO: 1290223 - DNA, 15 bp, Homo sapiens
cggtatgtgtcttta

SEQ ID NO: 1290224 - DNA, 15 bp, Homo sapiens
tcggtatgtgtcttt

SEQ ID NO: 1290225 - DNA, 15 bp, Homo sapiens
gtcggtatgtgtctt

SEQ ID NO: 1290226 - DNA, 15 bp, Homo sapiens
agtcggtatgtgtct

SEQ ID NO: 1290227 - DNA, 15 bp, Homo sapiens
cagtcggtatgtgtc

SEQ ID NO: 1290228 - DNA, 15 bp, Homo sapiens
tcagtcggtatgtgt

SEQ ID NO: 1290229 - DNA, 15 bp, Homo sapiens
ttcagtcggtatgtg

SEQ ID NO: 1290230 - DNA, 15 bp, Homo sapiens
tttcagtcggtatgt

SEQ ID NO: 1290231 - DNA, 15 bp, Homo sapiens
ttttcagtcggtatg

SEQ ID NO: 1290232 - DNA, 15 bp, Homo sapiens
attttcagtcggtat

SEQ ID NO: 1290233 - DNA, 15 bp, Homo sapiens
tattttcagtcggta

SEQ ID NO: 1290234 - DNA, 15 bp, Homo sapiens
ttattttcagtcggt

SEQ ID NO: 1290235 - DNA, 15 bp, Homo sapiens
tttattttcagtcgg

SEQ ID NO: 1290236 - DNA, 15 bp, Homo sapiens
ctttattttcagtcg

SEQ ID NO: 1290237 - DNA, 15 bp, Homo sapiens
cctttattttcagtc

SEQ ID NO: 1290238 - DNA, 15 bp, Homo sapiens
ccctttattttcagt

SEQ ID NO: 1290239 - DNA, 15 bp, Homo sapiens
tccctttattttcag

SEQ ID NO: 1290240 - DNA, 15 bp, Homo sapiens
atccctttattttca

SEQ ID NO: 1290241 - DNA, 15 bp, Homo sapiens
catccctttattttc

SEQ ID NO: 1290242 - DNA, 15 bp, Homo sapiens
ccatccctttatttt

SEQ ID NO: 1290243 - DNA, 15 bp, Homo sapiens
tccatccctttattt

SEQ ID NO: 1290244 - DNA, 15 bp, Homo sapiens
ttccatccctttatt

SEQ ID NO: 1290245 - DNA, 15 bp, Homo sapiens
tttccatccctttat

SEQ ID NO: 1290246 - DNA, 15 bp, Homo sapiens
ttttccatcccttta

SEQ ID NO: 1290247 - DNA, 15 bp, Homo sapiens
tttttccatcccttt

SEQ ID NO: 1290248 - DNA, 15 bp, Homo sapiens
atttttccatccctt

SEQ ID NO: 1290249 - DNA, 15 bp, Homo sapiens
tatttttccatccct

SEQ ID NO: 1290250 - DNA, 15 bp, Homo sapiens
atatttttccatccc

SEQ ID NO: 1290251 - DNA, 15 bp, Homo sapiens
tatatttttccatcc

SEQ ID NO: 1290252 - DNA, 15 bp, Homo sapiens
atatatttttccatc

SEQ ID NO: 1290253 - DNA, 15 bp, Homo sapiens
aatatatttttccat

SEQ ID NO: 1290254 - DNA, 15 bp, Homo sapiens
gaatatatttttcca

SEQ ID NO: 1290255 - DNA, 15 bp, Homo sapiens
ggaatatatttttcc

SEQ ID NO: 1290256 - DNA, 15 bp, Homo sapiens
tggaatatatttttc

SEQ ID NO: 1290257 - DNA, 15 bp, Homo sapiens
atggaatatattttt

SEQ ID NO: 1290258 - DNA, 15 bp, Homo sapiens
catggaatatatttt

SEQ ID NO: 1290259 - DNA, 15 bp, Homo sapiens
gcatggaatatattt

SEQ ID NO: 1290260 - DNA, 15 bp, Homo sapiens
ggcatggaatatatt

SEQ ID NO: 1290261 - DNA, 15 bp, Homo sapiens
gggcatggaatatat

SEQ ID NO: 1290262 - DNA, 15 bp, Homo sapiens
tgggcatggaatata

SEQ ID NO: 1290263 - DNA, 15 bp, Homo sapiens
gtgggcatggaatat

SEQ ID NO: 1290264 - DNA, 15 bp, Homo sapiens
tgtgggcatggaata

SEQ ID NO: 1290265 - DNA, 15 bp, Homo sapiens
ctgtgggcatggaat

SEQ ID NO: 1290266 - DNA, 15 bp, Homo sapiens
tctgtgggcatggaa

SEQ ID NO: 1290267 - DNA, 15 bp, Homo sapiens
ttctgtgggcatgga

SEQ ID NO: 1290268 - DNA, 15 bp, Homo sapiens
tttctgtgggcatgg

SEQ ID NO: 1290269 - DNA, 15 bp, Homo sapiens
gtttctgtgggcatg

SEQ ID NO: 1290270 - DNA, 15 bp, Homo sapiens
ggtttctgtgggcat

SEQ ID NO: 1290271 - DNA, 15 bp, Homo sapiens
tggtttctgtgggca

SEQ ID NO: 1290272 - DNA, 15 bp, Homo sapiens
ttggtttctgtgggc

SEQ ID NO: 1290273 - DNA, 15 bp, Homo sapiens
tttggtttctgtggg

SEQ ID NO: 1290274 - DNA, 15 bp, Homo sapiens
ttttggtttctgtgg

SEQ ID NO: 1290275 - DNA, 15 bp, Homo sapiens
attttggtttctgtg

SEQ ID NO: 1290276 - DNA, 15 bp, Homo sapiens
tattttggtttctgt

SEQ ID NO: 1290277 - DNA, 15 bp, Homo sapiens
ttattttggtttctg

SEQ ID NO: 1290278 - DNA, 15 bp, Homo sapiens
cttattttggtttct

SEQ ID NO: 1290279 - DNA, 15 bp, Homo sapiens
tcttattttggtttc

SEQ ID NO: 1290280 - DNA, 15 bp, Homo sapiens
ctcttattttggttt

SEQ ID NO: 1290281 - DNA, 15 bp, Homo sapiens
gctcttattttggtt

SEQ ID NO: 1290282 - DNA, 15 bp, Homo sapiens
tgctcttattttggt

SEQ ID NO: 1290283 - DNA, 15 bp, Homo sapiens
ctgctcttattttgg

SEQ ID NO: 1290284 - DNA, 15 bp, Homo sapiens
cctgctcttattttg

SEQ ID NO: 1290285 - DNA, 15 bp, Homo sapiens
ccctgctcttatttt

SEQ ID NO: 1290286 - DNA, 15 bp, Homo sapiens
cccctgctcttattt

SEQ ID NO: 1290287 - DNA, 15 bp, Homo sapiens
acccctgctcttatt

SEQ ID NO: 1290288 - DNA, 15 bp, Homo sapiens
gacccctgctcttat

SEQ ID NO: 1290289 - DNA, 15 bp, Homo sapiens
tgacccctgctctta

SEQ ID NO: 1290290 - DNA, 15 bp, Homo sapiens
gtgacccctgctctt

SEQ ID NO: 1290291 - DNA, 15 bp, Homo sapiens
agtgacccctgctct

SEQ ID NO: 1290292 - DNA, 15 bp, Homo sapiens
tagtgacccctgctc

SEQ ID NO: 1290293 - DNA, 15 bp, Homo sapiens
atagtgacccctgct

SEQ ID NO: 1290294 - DNA, 15 bp, Homo sapiens
tatagtgacccctgc

SEQ ID NO: 1290295 - DNA, 15 bp, Homo sapiens
gtatagtgacccctg

SEQ ID NO: 1290296 - DNA, 15 bp, Homo sapiens
agtatagtgacccct

SEQ ID NO: 1290297 - DNA, 15 bp, Homo sapiens
aagtatagtgacccc

SEQ ID NO: 1290298 - DNA, 15 bp, Homo sapiens
taagtatagtgaccc

SEQ ID NO: 1290299 - DNA, 15 bp, Homo sapiens
ataagtatagtgacc

SEQ ID NO: 1290300 - DNA, 15 bp, Homo sapiens
tataagtatagtgac

SEQ ID NO: 1290301 - DNA, 15 bp, Homo sapiens
atataagtatagtga

SEQ ID NO: 1290302 - DNA, 15 bp, Homo sapiens
gatataagtatagtg

SEQ ID NO: 1290303 - DNA, 15 bp, Homo sapiens
tgatataagtatagt

SEQ ID NO: 1290304 - DNA, 15 bp, Homo sapiens
ctgatataagtatag

SEQ ID NO: 1290305 - DNA, 15 bp, Homo sapiens
tctgatataagtata

SEQ ID NO: 1290306 - DNA, 15 bp, Homo sapiens
gtctgatataagtat

SEQ ID NO: 1290307 - DNA, 15 bp, Homo sapiens
tgtctgatataagta

SEQ ID NO: 1290308 - DNA, 15 bp, Homo sapiens
ttgtctgatataagt

SEQ ID NO: 1290309 - DNA, 15 bp, Homo sapiens
tttgtctgatataag

SEQ ID NO: 1290310 - DNA, 15 bp, Homo sapiens
ttttgtctgatataa

SEQ ID NO: 1290311 - DNA, 15 bp, Homo sapiens
attttgtctgatata

SEQ ID NO: 1290312 - DNA, 15 bp, Homo sapiens
tattttgtctgatat

SEQ ID NO: 1290313 - DNA, 15 bp, Homo sapiens
ctattttgtctgata

SEQ ID NO: 1290314 - DNA, 15 bp, Homo sapiens
tctattttgtctgat

SEQ ID NO: 1290315 - DNA, 15 bp, Homo sapiens
atctattttgtctga

SEQ ID NO: 1290316 - DNA, 15 bp, Homo sapiens
aatctattttgtctg

SEQ ID NO: 1290317 - DNA, 15 bp, Homo sapiens
aaatctattttgtct

SEQ ID NO: 1290318 - DNA, 15 bp, Homo sapiens
gaaatctattttgtc

SEQ ID NO: 1290319 - DNA, 15 bp, Homo sapiens
tgaaatctattttgt

SEQ ID NO: 1290320 - DNA, 15 bp, Homo sapiens
ttgaaatctattttg

SEQ ID NO: 1290321 - DNA, 15 bp, Homo sapiens
cttgaaatctatttt

SEQ ID NO: 1290322 - DNA, 15 bp, Homo sapiens
tcttgaaatctattt

SEQ ID NO: 1290323 - DNA, 15 bp, Homo sapiens
ttcttgaaatctatt

SEQ ID NO: 1290324 - DNA, 15 bp, Homo sapiens
gttcttgaaatctat

SEQ ID NO: 1290325 - DNA, 15 bp, Homo sapiens
tgttcttgaaatcta

SEQ ID NO: 1290326 - DNA, 15 bp, Homo sapiens
ttgttcttgaaatct

SEQ ID NO: 1290327 - DNA, 15 bp, Homo sapiens
tttgttcttgaaatc

SEQ ID NO: 1290328 - DNA, 15 bp, Homo sapiens
ttttgttcttgaaat

SEQ ID NO: 1290329 - DNA, 15 bp, Homo sapiens
gttttgttcttgaaa

SEQ ID NO: 1290330 - DNA, 15 bp, Homo sapiens
agttttgttcttgaa

SEQ ID NO: 1290331 - DNA, 15 bp, Homo sapiens
cagttttgttcttga

SEQ ID NO: 1290332 - DNA, 15 bp, Homo sapiens
acagttttgttcttg

SEQ ID NO: 1290333 - DNA, 15 bp, Homo sapiens
tacagttttgttctt

SEQ ID NO: 1290334 - DNA, 15 bp, Homo sapiens
ttacagttttgttct

SEQ ID NO: 1290335 - DNA, 15 bp, Homo sapiens
cttacagttttgttc

SEQ ID NO: 1290336 - DNA, 15 bp, Homo sapiens
ccttacagttttgtt

SEQ ID NO: 1290337 - DNA, 15 bp, Homo sapiens
tccttacagttttgt

SEQ ID NO: 1290338 - DNA, 15 bp, Homo sapiens
gtccttacagttttg

SEQ ID NO: 1290339 - DNA, 15 bp, Homo sapiens
tgtccttacagtttt

SEQ ID NO: 1290340 - DNA, 15 bp, Homo sapiens
ttgtccttacagttt

SEQ ID NO: 1290341 - DNA, 15 bp, Homo sapiens
tttgtccttacagtt

SEQ ID NO: 1290342 - DNA, 15 bp, Homo sapiens
ctttgtccttacagt

SEQ ID NO: 1290343 - DNA, 15 bp, Homo sapiens
tctttgtccttacag

SEQ ID NO: 1290344 - DNA, 15 bp, Homo sapiens
ttctttgtccttaca

SEQ ID NO: 1290345 - DNA, 15 bp, Homo sapiens
cttctttgtccttac

SEQ ID NO: 1290346 - DNA, 15 bp, Homo sapiens
ccttctttgtcctta

SEQ ID NO: 1290347 - DNA, 15 bp, Homo sapiens
accttctttgtcctt

SEQ ID NO: 1290348 - DNA, 15 bp, Homo sapiens
gaccttctttgtcct

SEQ ID NO: 1290349 - DNA, 15 bp, Homo sapiens
tgaccttctttgtcc

SEQ ID NO: 1290350 - DNA, 15 bp, Homo sapiens
atgaccttctttgtc

SEQ ID NO: 1290351 - DNA, 15 bp, Homo sapiens
aatgaccttctttgt

SEQ ID NO: 1290352 - DNA, 15 bp, Homo sapiens
taatgaccttctttg

SEQ ID NO: 1290353 - DNA, 15 bp, Homo sapiens
ataatgaccttcttt

SEQ ID NO: 1290354 - DNA, 15 bp, Homo sapiens
tataatgaccttctt

SEQ ID NO: 1290355 - DNA, 15 bp, Homo sapiens
atataatgaccttct

SEQ ID NO: 1290356 - DNA, 15 bp, Homo sapiens
tatataatgaccttc

SEQ ID NO: 1290357 - DNA, 15 bp, Homo sapiens
ttatataatgacctt

SEQ ID NO: 1290358 - DNA, 15 bp, Homo sapiens
attatataatgacct

SEQ ID NO: 1290359 - DNA, 15 bp, Homo sapiens
cattatataatgacc

SEQ ID NO: 1290360 - DNA, 15 bp, Homo sapiens
tcattatataatgac

SEQ ID NO: 1290361 - DNA, 15 bp, Homo sapiens
atcattatataatga

SEQ ID NO: 1290362 - DNA, 15 bp, Homo sapiens
tatcattatataatg

SEQ ID NO: 1290363 - DNA, 15 bp, Homo sapiens
ttatcattatataat

SEQ ID NO: 1290364 - DNA, 15 bp, Homo sapiens
tttatcattatataa

SEQ ID NO: 1290365 - DNA, 15 bp, Homo sapiens
ctttatcattatata

SEQ ID NO: 1290366 - DNA, 15 bp, Homo sapiens
cctttatcattatat

SEQ ID NO: 1290367 - DNA, 15 bp, Homo sapiens
ccctttatcattata

SEQ ID NO: 1290368 - DNA, 15 bp, Homo sapiens
cccctttatcattat

SEQ ID NO: 1290369 - DNA, 15 bp, Homo sapiens
acccctttatcatta

SEQ ID NO: 1290370 - DNA, 15 bp, Homo sapiens
gacccctttatcatt

SEQ ID NO: 1290371 - DNA, 15 bp, Homo sapiens
tgacccctttatcat

SEQ ID NO: 1290372 - DNA, 15 bp, Homo sapiens
ttgacccctttatca

SEQ ID NO: 1290373 - DNA, 15 bp, Homo sapiens
attgacccctttatc

SEQ ID NO: 1290374 - DNA, 15 bp, Homo sapiens
aattgacccctttat

SEQ ID NO: 1290375 - DNA, 15 bp, Homo sapiens
gaattgaccccttta

SEQ ID NO: 1290376 - DNA, 15 bp, Homo sapiens
tgaattgaccccttt

SEQ ID NO: 1290377 - DNA, 15 bp, Homo sapiens
ctgaattgacccctt

SEQ ID NO: 1290378 - DNA, 15 bp, Homo sapiens
gctgaattgacccct

SEQ ID NO: 1290379 - DNA, 15 bp, Homo sapiens
tgctgaattgacccc

SEQ ID NO: 1290380 - DNA, 15 bp, Homo sapiens
ttgctgaattgaccc

SEQ ID NO: 1290381 - DNA, 15 bp, Homo sapiens
cttgctgaattgacc

SEQ ID NO: 1290382 - DNA, 15 bp, Homo sapiens
tcttgctgaattgac

SEQ ID NO: 1290383 - DNA, 15 bp, Homo sapiens
ctcttgctgaattga

SEQ ID NO: 1290384 - DNA, 15 bp, Homo sapiens
cctcttgctgaattg

SEQ ID NO: 1290385 - DNA, 15 bp, Homo sapiens
tcctcttgctgaatt

SEQ ID NO: 1290386 - DNA, 15 bp, Homo sapiens
atcctcttgctgaat

SEQ ID NO: 1290387 - DNA, 15 bp, Homo sapiens
tatcctcttgctgaa

SEQ ID NO: 1290388 - DNA, 15 bp, Homo sapiens
atatcctcttgctga

SEQ ID NO: 1290389 - DNA, 15 bp, Homo sapiens
tatatcctcttgctg

SEQ ID NO: 1290390 - DNA, 15 bp, Homo sapiens
ttatatcctcttgct

SEQ ID NO: 1290391 - DNA, 15 bp, Homo sapiens
gttatatcctcttgc

SEQ ID NO: 1290392 - DNA, 15 bp, Homo sapiens
tgttatatcctcttg

SEQ ID NO: 1290393 - DNA, 15 bp, Homo sapiens
ctgttatatcctctt

SEQ ID NO: 1290394 - DNA, 15 bp, Homo sapiens
actgttatatcctct

SEQ ID NO: 1290395 - DNA, 15 bp, Homo sapiens
cactgttatatcctc

SEQ ID NO: 1290396 - DNA, 15 bp, Homo sapiens
acactgttatatcct

SEQ ID NO: 1290397 - DNA, 15 bp, Homo sapiens
aacactgttatatcc

SEQ ID NO: 1290398 - DNA, 15 bp, Homo sapiens
taacactgttatatc

SEQ ID NO: 1290399 - DNA, 15 bp, Homo sapiens
ttaacactgttatat

SEQ ID NO: 1290400 - DNA, 15 bp, Homo sapiens
tttaacactgttata

SEQ ID NO: 1290401 - DNA, 15 bp, Homo sapiens
atttaacactgttat

SEQ ID NO: 1290402 - DNA, 15 bp, Homo sapiens
tatttaacactgtta

SEQ ID NO: 1290403 - DNA, 15 bp, Homo sapiens
atatttaacactgtt

SEQ ID NO: 1290404 - DNA, 15 bp, Homo sapiens
aatatttaacactgt

SEQ ID NO: 1290405 - DNA, 15 bp, Homo sapiens
aaatatttaacactg

SEQ ID NO: 1290406 - DNA, 15 bp, Homo sapiens
taaatatttaacact

SEQ ID NO: 1290407 - DNA, 15 bp, Homo sapiens
ataaatatttaacac

SEQ ID NO: 1290408 - DNA, 15 bp, Homo sapiens
cataaatatttaaca

SEQ ID NO: 1290409 - DNA, 15 bp, Homo sapiens
gcataaatatttaac

SEQ ID NO: 1290410 - DNA, 15 bp, Homo sapiens
tgcataaatatttaa

SEQ ID NO: 1290411 - DNA, 15 bp, Homo sapiens
ttgcataaatattta

SEQ ID NO: 1290412 - DNA, 15 bp, Homo sapiens
gttgcataaatattt

SEQ ID NO: 1290413 - DNA, 15 bp, Homo sapiens
agttgcataaatatt

SEQ ID NO: 1290414 - DNA, 15 bp, Homo sapiens
tagttgcataaatat

SEQ ID NO: 1290415 - DNA, 15 bp, Homo sapiens
ttagttgcataaata

SEQ ID NO: 1290416 - DNA, 15 bp, Homo sapiens
attagttgcataaat

SEQ ID NO: 1290417 - DNA, 15 bp, Homo sapiens
tattagttgcataaa

SEQ ID NO: 1290418 - DNA, 15 bp, Homo sapiens
gtattagttgcataa

SEQ ID NO: 1290419 - DNA, 15 bp, Homo sapiens
agtattagttgcata

SEQ ID NO: 1290420 - DNA, 15 bp, Homo sapiens
cagtattagttgcat

SEQ ID NO: 1290421 - DNA, 15 bp, Homo sapiens
ccagtattagttgca

SEQ ID NO: 1290422 - DNA, 15 bp, Homo sapiens
tccagtattagttgc

SEQ ID NO: 1290423 - DNA, 15 bp, Homo sapiens
ctccagtattagttg

SEQ ID NO: 1290424 - DNA, 15 bp, Homo sapiens
gctccagtattagtt

SEQ ID NO: 1290425 - DNA, 15 bp, Homo sapiens
tgctccagtattagt

SEQ ID NO: 1290426 - DNA, 15 bp, Homo sapiens
gtgctccagtattag

SEQ ID NO: 1290427 - DNA, 15 bp, Homo sapiens
ggtgctccagtatta

SEQ ID NO: 1290428 - DNA, 15 bp, Homo sapiens
gggtgctccagtatt

SEQ ID NO: 1290429 - DNA, 15 bp, Homo sapiens
tgggtgctccagtat

SEQ ID NO: 1290430 - DNA, 15 bp, Homo sapiens
ctgggtgctccagta

SEQ ID NO: 1290431 - DNA, 15 bp, Homo sapiens
tctgggtgctccagt

SEQ ID NO: 1290432 - DNA, 15 bp, Homo sapiens
atctgggtgctccag

SEQ ID NO: 1290433 - DNA, 15 bp, Homo sapiens
tatctgggtgctcca

SEQ ID NO: 1290434 - DNA, 15 bp, Homo sapiens
atatctgggtgctcc

SEQ ID NO: 1290435 - DNA, 15 bp, Homo sapiens
tatatctgggtgctc

SEQ ID NO: 1290436 - DNA, 15 bp, Homo sapiens
atatatctgggtgct

SEQ ID NO: 1290437 - DNA, 15 bp, Homo sapiens
tatatatctgggtgc

SEQ ID NO: 1290438 - DNA, 15 bp, Homo sapiens
ttatatatctgggtg

SEQ ID NO: 1290439 - DNA, 15 bp, Homo sapiens
tttatatatctgggt

SEQ ID NO: 1290440 - DNA, 15 bp, Homo sapiens
ctttatatatctggg

SEQ ID NO: 1290441 - DNA, 15 bp, Homo sapiens
gctttatatatctgg

SEQ ID NO: 1290442 - DNA, 15 bp, Homo sapiens
tgctttatatatctg

SEQ ID NO: 1290443 - DNA, 15 bp, Homo sapiens
ttgctttatatatct

SEQ ID NO: 1290444 - DNA, 15 bp, Homo sapiens
tttgctttatatatc

SEQ ID NO: 1290445 - DNA, 15 bp, Homo sapiens
atttgctttatatat

SEQ ID NO: 1290446 - DNA, 15 bp, Homo sapiens
tatttgctttatata

SEQ ID NO: 1290447 - DNA, 15 bp, Homo sapiens
atatttgctttatat

SEQ ID NO: 1290448 - DNA, 15 bp, Homo sapiens
aatatttgctttata

SEQ ID NO: 1290449 - DNA, 15 bp, Homo sapiens
taatatttgctttat

SEQ ID NO: 1290450 - DNA, 15 bp, Homo sapiens
ataatatttgcttta

SEQ ID NO: 1290451 - DNA, 15 bp, Homo sapiens
aataatatttgcttt

SEQ ID NO: 1290452 - DNA, 15 bp, Homo sapiens
taataatatttgctt

SEQ ID NO: 1290453 - DNA, 15 bp, Homo sapiens
ctaataatatttgct

SEQ ID NO: 1290454 - DNA, 15 bp, Homo sapiens
tctaataatatttgc

SEQ ID NO: 1290455 - DNA, 15 bp, Homo sapiens
ctctaataatatttg

SEQ ID NO: 1290456 - DNA, 15 bp, Homo sapiens
gctctaataatattt

SEQ ID NO: 1290457 - DNA, 15 bp, Homo sapiens
agctctaataatatt

SEQ ID NO: 1290458 - DNA, 15 bp, Homo sapiens
tagctctaataatat

SEQ ID NO: 1290459 - DNA, 15 bp, Homo sapiens
ttagctctaataata

SEQ ID NO: 1290460 - DNA, 15 bp, Homo sapiens
tttagctctaataat

SEQ ID NO: 1290461 - DNA, 15 bp, Homo sapiens
ctttagctctaataa

SEQ ID NO: 1290462 - DNA, 15 bp, Homo sapiens
tctttagctctaata

SEQ ID NO: 1290463 - DNA, 15 bp, Homo sapiens
ctctttagctctaat

SEQ ID NO: 1290464 - DNA, 15 bp, Homo sapiens
tctctttagctctaa

SEQ ID NO: 1290465 - DNA, 15 bp, Homo sapiens
ctctctttagctcta

SEQ ID NO: 1290466 - DNA, 15 bp, Homo sapiens
tctctctttagctct

SEQ ID NO: 1290467 - DNA, 15 bp, Homo sapiens
gtctctctttagctc

SEQ ID NO: 1290468 - DNA, 15 bp, Homo sapiens
tgtctctctttagct

SEQ ID NO: 1290469 - DNA, 15 bp, Homo sapiens
atgtctctctttagc

SEQ ID NO: 1290470 - DNA, 15 bp, Homo sapiens
tatgtctctctttag

SEQ ID NO: 1290471 - DNA, 15 bp, Homo sapiens
ctatgtctctcttta

SEQ ID NO: 1290472 - DNA, 15 bp, Homo sapiens
cctatgtctctcttt

SEQ ID NO: 1290473 - DNA, 15 bp, Homo sapiens
gcctatgtctctctt

SEQ ID NO: 1290474 - DNA, 15 bp, Homo sapiens
ggcctatgtctctct

SEQ ID NO: 1290475 - DNA, 15 bp, Homo sapiens
gggcctatgtctctc

SEQ ID NO: 1290476 - DNA, 15 bp, Homo sapiens
ggggcctatgtctct

SEQ ID NO: 1290477 - DNA, 15 bp, Homo sapiens
tggggcctatgtctc

SEQ ID NO: 1290478 - DNA, 15 bp, Homo sapiens
ttggggcctatgtct

SEQ ID NO: 1290479 - DNA, 15 bp, Homo sapiens
attggggcctatgtc

SEQ ID NO: 1290480 - DNA, 15 bp, Homo sapiens
tattggggcctatgt

SEQ ID NO: 1290481 - DNA, 15 bp, Homo sapiens
gtattggggcctatg

SEQ ID NO: 1290482 - DNA, 15 bp, Homo sapiens
tgtattggggcctat

SEQ ID NO: 1290483 - DNA, 15 bp, Homo sapiens
ttgtattggggccta

SEQ ID NO: 1290484 - DNA, 15 bp, Homo sapiens
attgtattggggcct

SEQ ID NO: 1290485 - DNA, 15 bp, Homo sapiens
tattgtattggggcc

SEQ ID NO: 1290486 - DNA, 15 bp, Homo sapiens
ctattgtattggggc

SEQ ID NO: 1290487 - DNA, 15 bp, Homo sapiens
tctattgtattgggg

SEQ ID NO: 1290488 - DNA, 15 bp, Homo sapiens
ttctattgtattggg

SEQ ID NO: 1290489 - DNA, 15 bp, Homo sapiens
tttctattgtattgg

SEQ ID NO: 1290490 - DNA, 15 bp, Homo sapiens
atttctattgtattg

SEQ ID NO: 1290491 - DNA, 15 bp, Homo sapiens
tatttctattgtatt

SEQ ID NO: 1290492 - DNA, 15 bp, Homo sapiens
ctatttctattgtat

SEQ ID NO: 1290493 - DNA, 15 bp, Homo sapiens
gctatttctattgta

SEQ ID NO: 1290494 - DNA, 15 bp, Homo sapiens
agctatttctattgt

SEQ ID NO: 1290495 - DNA, 15 bp, Homo sapiens
cagctatttctattg

SEQ ID NO: 1290496 - DNA, 15 bp, Homo sapiens
ccagctatttctatt

SEQ ID NO: 1290497 - DNA, 15 bp, Homo sapiens
tccagctatttctat

SEQ ID NO: 1290498 - DNA, 15 bp, Homo sapiens
ctccagctatttcta

SEQ ID NO: 1290499 - DNA, 15 bp, Homo sapiens
tctccagctatttct

SEQ ID NO: 1290500 - DNA, 15 bp, Homo sapiens
gtctccagctatttc

SEQ ID NO: 1290501 - DNA, 15 bp, Homo sapiens
agtctccagctattt

SEQ ID NO: 1290502 - DNA, 15 bp, Homo sapiens
aagtctccagctatt

SEQ ID NO: 1290503 - DNA, 15 bp, Homo sapiens
gaagtctccagctat

SEQ ID NO: 1290504 - DNA, 15 bp, Homo sapiens
tgaagtctccagcta

SEQ ID NO: 1290505 - DNA, 15 bp, Homo sapiens
ttgaagtctccagct

SEQ ID NO: 1290506 - DNA, 15 bp, Homo sapiens
gttgaagtctccagc

SEQ ID NO: 1290507 - DNA, 15 bp, Homo sapiens
tgttgaagtctccag

SEQ ID NO: 1290508 - DNA, 15 bp, Homo sapiens
gtgttgaagtctcca

SEQ ID NO: 1290509 - DNA, 15 bp, Homo sapiens
ggtgttgaagtctcc

SEQ ID NO: 1290510 - DNA, 15 bp, Homo sapiens
gggtgttgaagtctc

SEQ ID NO: 1290511 - DNA, 15 bp, Homo sapiens
ggggtgttgaagtct

SEQ ID NO: 1290512 - DNA, 15 bp, Homo sapiens
tggggtgttgaagtc

SEQ ID NO: 1290513 - DNA, 15 bp, Homo sapiens
gtggggtgttgaagt

SEQ ID NO: 1290514 - DNA, 15 bp, Homo sapiens
agtggggtgttgaag

SEQ ID NO: 1290515 - DNA, 15 bp, Homo sapiens
aagtggggtgttgaa

SEQ ID NO: 1290516 - DNA, 15 bp, Homo sapiens
aaagtggggtgttga

SEQ ID NO: 1290517 - DNA, 15 bp, Homo sapiens
gaaagtggggtgttg

SEQ ID NO: 1290518 - DNA, 15 bp, Homo sapiens
tgaaagtggggtgtt

SEQ ID NO: 1290519 - DNA, 15 bp, Homo sapiens
ctgaaagtggggtgt

SEQ ID NO: 1290520 - DNA, 15 bp, Homo sapiens
gctgaaagtggggtg

SEQ ID NO: 1290521 - DNA, 15 bp, Homo sapiens
tgctgaaagtggggt

SEQ ID NO: 1290522 - DNA, 15 bp, Homo sapiens
atgctgaaagtgggg

SEQ ID NO: 1290523 - DNA, 15 bp, Homo sapiens
aatgctgaaagtggg

SEQ ID NO: 1290524 - DNA, 15 bp, Homo sapiens
caatgctgaaagtgg

SEQ ID NO: 1290525 - DNA, 15 bp, Homo sapiens
ccaatgctgaaagtg

SEQ ID NO: 1290526 - DNA, 15 bp, Homo sapiens
tccaatgctgaaagt

SEQ ID NO: 1290527 - DNA, 15 bp, Homo sapiens
gtccaatgctgaaag

SEQ ID NO: 1290528 - DNA, 15 bp, Homo sapiens
tgtccaatgctgaaa

SEQ ID NO: 1290529 - DNA, 15 bp, Homo sapiens
ctgtccaatgctgaa

SEQ ID NO: 1290530 - DNA, 15 bp, Homo sapiens
tctgtccaatgctga

SEQ ID NO: 1290531 - DNA, 15 bp, Homo sapiens
atctgtccaatgctg

SEQ ID NO: 1290532 - DNA, 15 bp, Homo sapiens
gatctgtccaatgct

SEQ ID NO: 1290533 - DNA, 15 bp, Homo sapiens
agatctgtccaatgc

SEQ ID NO: 1290534 - DNA, 15 bp, Homo sapiens
aagatctgtccaatg

SEQ ID NO: 1290535 - DNA, 15 bp, Homo sapiens
gaagatctgtccaat

SEQ ID NO: 1290536 - DNA, 15 bp, Homo sapiens
ggaagatctgtccaa

SEQ ID NO: 1290537 - DNA, 15 bp, Homo sapiens
tggaagatctgtcca

SEQ ID NO: 1290538 - DNA, 15 bp, Homo sapiens
ctggaagatctgtcc

SEQ ID NO: 1290539 - DNA, 15 bp, Homo sapiens
tctggaagatctgtc

SEQ ID NO: 1290540 - DNA, 15 bp, Homo sapiens
gtctggaagatctgt

SEQ ID NO: 1290541 - DNA, 15 bp, Homo sapiens
tgtctggaagatctg

SEQ ID NO: 1290542 - DNA, 15 bp, Homo sapiens
ctgtctggaagatct

SEQ ID NO: 1290543 - DNA, 15 bp, Homo sapiens
tctgtctggaagatc

SEQ ID NO: 1290544 - DNA, 15 bp, Homo sapiens
ttctgtctggaagat

SEQ ID NO: 1290545 - DNA, 15 bp, Homo sapiens
tttctgtctggaaga

SEQ ID NO: 1290546 - DNA, 15 bp, Homo sapiens
ttttctgtctggaag

SEQ ID NO: 1290547 - DNA, 15 bp, Homo sapiens
attttctgtctggaa

SEQ ID NO: 1290548 - DNA, 15 bp, Homo sapiens
gattttctgtctgga

SEQ ID NO: 1290549 - DNA, 15 bp, Homo sapiens
tgattttctgtctgg

SEQ ID NO: 1290550 - DNA, 15 bp, Homo sapiens
ttgattttctgtctg

SEQ ID NO: 1290551 - DNA, 15 bp, Homo sapiens
gttgattttctgtct

SEQ ID NO: 1290552 - DNA, 15 bp, Homo sapiens
tgttgattttctgtc

SEQ ID NO: 1290553 - DNA, 15 bp, Homo sapiens
ttgttgattttctgt

SEQ ID NO: 1290554 - DNA, 15 bp, Homo sapiens
tttgttgattttctg

SEQ ID NO: 1290555 - DNA, 15 bp, Homo sapiens
ctttgttgattttct

SEQ ID NO: 1290556 - DNA, 15 bp, Homo sapiens
tctttgttgattttc

SEQ ID NO: 1290557 - DNA, 15 bp, Homo sapiens
ttctttgttgatttt

SEQ ID NO: 1290558 - DNA, 15 bp, Homo sapiens
tttctttgttgattt

SEQ ID NO: 1290559 - DNA, 15 bp, Homo sapiens
gtttctttgttgatt

SEQ ID NO: 1290560 - DNA, 15 bp, Homo sapiens
tgtttctttgttgat

SEQ ID NO: 1290561 - DNA, 15 bp, Homo sapiens
atgtttctttgttga

SEQ ID NO: 1290562 - DNA, 15 bp, Homo sapiens
gatgtttctttgttg

SEQ ID NO: 1290563 - DNA, 15 bp, Homo sapiens
tgatgtttctttgtt

SEQ ID NO: 1290564 - DNA, 15 bp, Homo sapiens
ctgatgtttctttgt

SEQ ID NO: 1290565 - DNA, 15 bp, Homo sapiens
tctgatgtttctttg

SEQ ID NO: 1290566 - DNA, 15 bp, Homo sapiens
gtctgatgtttcttt

SEQ ID NO: 1290567 - DNA, 15 bp, Homo sapiens
agtctgatgtttctt

SEQ ID NO: 1290568 - DNA, 15 bp, Homo sapiens
aagtctgatgtttct

SEQ ID NO: 1290569 - DNA, 15 bp, Homo sapiens
taagtctgatgtttc

SEQ ID NO: 1290570 - DNA, 15 bp, Homo sapiens
ttaagtctgatgttt

SEQ ID NO: 1290571 - DNA, 15 bp, Homo sapiens
attaagtctgatgtt

SEQ ID NO: 1290572 - DNA, 15 bp, Homo sapiens
gattaagtctgatgt

SEQ ID NO: 1290573 - DNA, 15 bp, Homo sapiens
agattaagtctgatg

SEQ ID NO: 1290574 - DNA, 15 bp, Homo sapiens
cagattaagtctgat

SEQ ID NO: 1290575 - DNA, 15 bp, Homo sapiens
gcagattaagtctga

SEQ ID NO: 1290576 - DNA, 15 bp, Homo sapiens
tgcagattaagtctg

SEQ ID NO: 1290577 - DNA, 15 bp, Homo sapiens
gtgcagattaagtct

SEQ ID NO: 1290578 - DNA, 15 bp, Homo sapiens
agtgcagattaagtc

SEQ ID NO: 1290579 - DNA, 15 bp, Homo sapiens
tagtgcagattaagt

SEQ ID NO: 1290580 - DNA, 15 bp, Homo sapiens
atagtgcagattaag

SEQ ID NO: 1290581 - DNA, 15 bp, Homo sapiens
tatagtgcagattaa

SEQ ID NO: 1290582 - DNA, 15 bp, Homo sapiens
atatagtgcagatta

SEQ ID NO: 1290583 - DNA, 15 bp, Homo sapiens
tatatagtgcagatt

SEQ ID NO: 1290584 - DNA, 15 bp, Homo sapiens
ctatatagtgcagat

SEQ ID NO: 1290585 - DNA, 15 bp, Homo sapiens
tctatatagtgcaga

SEQ ID NO: 1290586 - DNA, 15 bp, Homo sapiens
gtctatatagtgcag

SEQ ID NO: 1290587 - DNA, 15 bp, Homo sapiens
ggtctatatagtgca

SEQ ID NO: 1290588 - DNA, 15 bp, Homo sapiens
tggtctatatagtgc

SEQ ID NO: 1290589 - DNA, 15 bp, Homo sapiens
atggtctatatagtg

SEQ ID NO: 1290590 - DNA, 15 bp, Homo sapiens
tatggtctatatagt

SEQ ID NO: 1290591 - DNA, 15 bp, Homo sapiens
atatggtctatatag

SEQ ID NO: 1290592 - DNA, 15 bp, Homo sapiens
catatggtctatata

SEQ ID NO: 1290593 - DNA, 15 bp, Homo sapiens
tcatatggtctatat

SEQ ID NO: 1290594 - DNA, 15 bp, Homo sapiens
ttcatatggtctata

SEQ ID NO: 1290595 - DNA, 15 bp, Homo sapiens
attcatatggtctat

SEQ ID NO: 1290596 - DNA, 15 bp, Homo sapiens
gattcatatggtcta

SEQ ID NO: 1290597 - DNA, 15 bp, Homo sapiens
agattcatatggtct

SEQ ID NO: 1290598 - DNA, 15 bp, Homo sapiens
tagattcatatggtc

SEQ ID NO: 1290599 - DNA, 15 bp, Homo sapiens
ttagattcatatggt

SEQ ID NO: 1290600 - DNA, 15 bp, Homo sapiens
attagattcatatgg

SEQ ID NO: 1290601 - DNA, 15 bp, Homo sapiens
tattagattcatatg

SEQ ID NO: 1290602 - DNA, 15 bp, Homo sapiens
ctattagattcatat

SEQ ID NO: 1290603 - DNA, 15 bp, Homo sapiens
tctattagattcata

SEQ ID NO: 1290604 - DNA, 15 bp, Homo sapiens
atctattagattcat

SEQ ID NO: 1290605 - DNA, 15 bp, Homo sapiens
tatctattagattca

SEQ ID NO: 1290606 - DNA, 15 bp, Homo sapiens
atatctattagattc

SEQ ID NO: 1290607 - DNA, 15 bp, Homo sapiens
aatatctattagatt

SEQ ID NO: 1290608 - DNA, 15 bp, Homo sapiens
aaatatctattagat

SEQ ID NO: 1290609 - DNA, 15 bp, Homo sapiens
taaatatctattaga

SEQ ID NO: 1290610 - DNA, 15 bp, Homo sapiens
gtaaatatctattag

SEQ ID NO: 1290611 - DNA, 15 bp, Homo sapiens
tgtaaatatctatta

SEQ ID NO: 1290612 - DNA, 15 bp, Homo sapiens
ctgtaaatatctatt

SEQ ID NO: 1290613 - DNA, 15 bp, Homo sapiens
tctgtaaatatctat

SEQ ID NO: 1290614 - DNA, 15 bp, Homo sapiens
ttctgtaaatatcta

SEQ ID NO: 1290615 - DNA, 15 bp, Homo sapiens
gttctgtaaatatct

SEQ ID NO: 1290616 - DNA, 15 bp, Homo sapiens
tgttctgtaaatatc

SEQ ID NO: 1290617 - DNA, 15 bp, Homo sapiens
atgttctgtaaatat

SEQ ID NO: 1290618 - DNA, 15 bp, Homo sapiens
aatgttctgtaaata

SEQ ID NO: 1290619 - DNA, 15 bp, Homo sapiens
aaatgttctgtaaat

SEQ ID NO: 1290620 - DNA, 15 bp, Homo sapiens
gaaatgttctgtaaa

SEQ ID NO: 1290621 - DNA, 15 bp, Homo sapiens
tgaaatgttctgtaa

SEQ ID NO: 1290622 - DNA, 15 bp, Homo sapiens
atgaaatgttctgta

SEQ ID NO: 1290623 - DNA, 15 bp, Homo sapiens
gatgaaatgttctgt

SEQ ID NO: 1290624 - DNA, 15 bp, Homo sapiens
ggatgaaatgttctg

SEQ ID NO: 1290625 - DNA, 15 bp, Homo sapiens
tggatgaaatgttct

SEQ ID NO: 1290626 - DNA, 15 bp, Homo sapiens
ttggatgaaatgttc

SEQ ID NO: 1290627 - DNA, 15 bp, Homo sapiens
cttggatgaaatgtt

SEQ ID NO: 1290628 - DNA, 15 bp, Homo sapiens
tcttggatgaaatgt

SEQ ID NO: 1290629 - DNA, 15 bp, Homo sapiens
ttcttggatgaaatg

SEQ ID NO: 1290630 - DNA, 15 bp, Homo sapiens
attcttggatgaaat

SEQ ID NO: 1290631 - DNA, 15 bp, Homo sapiens
tattcttggatgaaa

SEQ ID NO: 1290632 - DNA, 15 bp, Homo sapiens
atattcttggatgaa

SEQ ID NO: 1290633 - DNA, 15 bp, Homo sapiens
tatattcttggatga

SEQ ID NO: 1290634 - DNA, 15 bp, Homo sapiens
gtatattcttggatg

SEQ ID NO: 1290635 - DNA, 15 bp, Homo sapiens
tgtatattcttggat

SEQ ID NO: 1290636 - DNA, 15 bp, Homo sapiens
atgtatattcttgga

SEQ ID NO: 1290637 - DNA, 15 bp, Homo sapiens
aatgtatattcttgg

SEQ ID NO: 1290638 - DNA, 15 bp, Homo sapiens
gaatgtatattcttg

SEQ ID NO: 1290639 - DNA, 15 bp, Homo sapiens
agaatgtatattctt

SEQ ID NO: 1290640 - DNA, 15 bp, Homo sapiens
aagaatgtatattct

SEQ ID NO: 1290641 - DNA, 15 bp, Homo sapiens
gaagaatgtatattc

SEQ ID NO: 1290642 - DNA, 15 bp, Homo sapiens
agaagaatgtatatt

SEQ ID NO: 1290643 - DNA, 15 bp, Homo sapiens
aagaagaatgtatat

SEQ ID NO: 1290644 - DNA, 15 bp, Homo sapiens
caagaagaatgtata

SEQ ID NO: 1290645 - DNA, 15 bp, Homo sapiens
acaagaagaatgtat

SEQ ID NO: 1290646 - DNA, 15 bp, Homo sapiens
gacaagaagaatgta

SEQ ID NO: 1290647 - DNA, 15 bp, Homo sapiens
agacaagaagaatgt

SEQ ID NO: 1290648 - DNA, 15 bp, Homo sapiens
cagacaagaagaatg

SEQ ID NO: 1290649 - DNA, 15 bp, Homo sapiens
gcagacaagaagaat

SEQ ID NO: 1290650 - DNA, 15 bp, Homo sapiens
tgcagacaagaagaa

SEQ ID NO: 1290651 - DNA, 15 bp, Homo sapiens
atgcagacaagaaga

SEQ ID NO: 1290652 - DNA, 15 bp, Homo sapiens
tatgcagacaagaag

SEQ ID NO: 1290653 - DNA, 15 bp, Homo sapiens
atatgcagacaagaa

SEQ ID NO: 1290654 - DNA, 15 bp, Homo sapiens
aatatgcagacaaga

SEQ ID NO: 1290655 - DNA, 15 bp, Homo sapiens
caatatgcagacaag

SEQ ID NO: 1290656 - DNA, 15 bp, Homo sapiens
tcaatatgcagacaa

SEQ ID NO: 1290657 - DNA, 15 bp, Homo sapiens
atcaatatgcagaca

SEQ ID NO: 1290658 - DNA, 15 bp, Homo sapiens
gatcaatatgcagac

SEQ ID NO: 1290659 - DNA, 15 bp, Homo sapiens
tgatcaatatgcaga

SEQ ID NO: 1290660 - DNA, 15 bp, Homo sapiens
atgatcaatatgcag

SEQ ID NO: 1290661 - DNA, 15 bp, Homo sapiens
aatgatcaatatgca

SEQ ID NO: 1290662 - DNA, 15 bp, Homo sapiens
gaatgatcaatatgc

SEQ ID NO: 1290663 - DNA, 15 bp, Homo sapiens
agaatgatcaatatg

SEQ ID NO: 1290664 - DNA, 15 bp, Homo sapiens
gagaatgatcaatat

SEQ ID NO: 1290665 - DNA, 15 bp, Homo sapiens
tgagaatgatcaata

SEQ ID NO: 1290666 - DNA, 15 bp, Homo sapiens
ttgagaatgatcaat

SEQ ID NO: 1290667 - DNA, 15 bp, Homo sapiens
cttgagaatgatcaa

SEQ ID NO: 1290668 - DNA, 15 bp, Homo sapiens
ccttgagaatgatca

SEQ ID NO: 1290669 - DNA, 15 bp, Homo sapiens
tccttgagaatgatc

SEQ ID NO: 1290670 - DNA, 15 bp, Homo sapiens
atccttgagaatgat

SEQ ID NO: 1290671 - DNA, 15 bp, Homo sapiens
tatccttgagaatga

SEQ ID NO: 1290672 - DNA, 15 bp, Homo sapiens
ctatccttgagaatg

SEQ ID NO: 1290673 - DNA, 15 bp, Homo sapiens
tctatccttgagaat

SEQ ID NO: 1290674 - DNA, 15 bp, Homo sapiens
gtctatccttgagaa

SEQ ID NO: 1290675 - DNA, 15 bp, Homo sapiens
ggtctatccttgaga

SEQ ID NO: 1290676 - DNA, 15 bp, Homo sapiens
tggtctatccttgag

SEQ ID NO: 1290677 - DNA, 15 bp, Homo sapiens
atggtctatccttga

SEQ ID NO: 1290678 - DNA, 15 bp, Homo sapiens
catggtctatccttg

SEQ ID NO: 1290679 - DNA, 15 bp, Homo sapiens
acatggtctatcctt

SEQ ID NO: 1290680 - DNA, 15 bp, Homo sapiens
cacatggtctatcct

SEQ ID NO: 1290681 - DNA, 15 bp, Homo sapiens
acacatggtctatcc

SEQ ID NO: 1290682 - DNA, 15 bp, Homo sapiens
aacacatggtctatc

SEQ ID NO: 1290683 - DNA, 15 bp, Homo sapiens
taacacatggtctat

SEQ ID NO: 1290684 - DNA, 15 bp, Homo sapiens
ctaacacatggtcta

SEQ ID NO: 1290685 - DNA, 15 bp, Homo sapiens
cctaacacatggtct

SEQ ID NO: 1290686 - DNA, 15 bp, Homo sapiens
gcctaacacatggtc

SEQ ID NO: 1290687 - DNA, 15 bp, Homo sapiens
agcctaacacatggt

SEQ ID NO: 1290688 - DNA, 15 bp, Homo sapiens
aagcctaacacatgg

SEQ ID NO: 1290689 - DNA, 15 bp, Homo sapiens
taagcctaacacatg

SEQ ID NO: 1290690 - DNA, 15 bp, Homo sapiens
ttaagcctaacacat

SEQ ID NO: 1290691 - DNA, 15 bp, Homo sapiens
tttaagcctaacaca

SEQ ID NO: 1290692 - DNA, 15 bp, Homo sapiens
ttttaagcctaacac

SEQ ID NO: 1290693 - DNA, 15 bp, Homo sapiens
gttttaagcctaaca

SEQ ID NO: 1290694 - DNA, 15 bp, Homo sapiens
tgttttaagcctaac

SEQ ID NO: 1290695 - DNA, 15 bp, Homo sapiens
atgttttaagcctaa

SEQ ID NO: 1290696 - DNA, 15 bp, Homo sapiens
aatgttttaagccta

SEQ ID NO: 1290697 - DNA, 15 bp, Homo sapiens
taatgttttaagcct

SEQ ID NO: 1290698 - DNA, 15 bp, Homo sapiens
ttaatgttttaagcc

SEQ ID NO: 1290699 - DNA, 15 bp, Homo sapiens
tttaatgttttaagc

SEQ ID NO: 1290700 - DNA, 15 bp, Homo sapiens
ttttaatgttttaag

SEQ ID NO: 1290701 - DNA, 15 bp, Homo sapiens
cttttttaatgtttt

SEQ ID NO: 1290702 - DNA, 15 bp, Homo sapiens
gcttttttaatgttt

SEQ ID NO: 1290703 - DNA, 15 bp, Homo sapiens
tgcttttttaatgtt

SEQ ID NO: 1290704 - DNA, 15 bp, Homo sapiens
atgcttttttaatgt

SEQ ID NO: 1290705 - DNA, 15 bp, Homo sapiens
catgcttttttaatg

SEQ ID NO: 1290706 - DNA, 15 bp, Homo sapiens
tcatgcttttttaat

SEQ ID NO: 1290707 - DNA, 15 bp, Homo sapiens
ttcatgcttttttaa

SEQ ID NO: 1290708 - DNA, 15 bp, Homo sapiens
tttcatgctttttta

SEQ ID NO: 1290709 - DNA, 15 bp, Homo sapiens
atttcatgctttttt

SEQ ID NO: 1290710 - DNA, 15 bp, Homo sapiens
tatttcatgcttttt

SEQ ID NO: 1290711 - DNA, 15 bp, Homo sapiens
ttatttcatgctttt

SEQ ID NO: 1290712 - DNA, 15 bp, Homo sapiens
attatttcatgcttt

SEQ ID NO: 1290713 - DNA, 15 bp, Homo sapiens
tattatttcatgctt

SEQ ID NO: 1290714 - DNA, 15 bp, Homo sapiens
atattatttcatgct

SEQ ID NO: 1290715 - DNA, 15 bp, Homo sapiens
gatattatttcatgc

SEQ ID NO: 1290716 - DNA, 15 bp, Homo sapiens
tgatattatttcatg

SEQ ID NO: 1290717 - DNA, 15 bp, Homo sapiens
ttgatattatttcat

SEQ ID NO: 1290718 - DNA, 15 bp, Homo sapiens
cttgatattatttca

SEQ ID NO: 1290719 - DNA, 15 bp, Homo sapiens
gcttgatattatttc

SEQ ID NO: 1290720 - DNA, 15 bp, Homo sapiens
tgcttgatattattt

SEQ ID NO: 1290721 - DNA, 15 bp, Homo sapiens
atgcttgatattatt

SEQ ID NO: 1290722 - DNA, 15 bp, Homo sapiens
tatgcttgatattat

SEQ ID NO: 1290723 - DNA, 15 bp, Homo sapiens
atatgcttgatatta

SEQ ID NO: 1290724 - DNA, 15 bp, Homo sapiens
aatatgcttgatatt

SEQ ID NO: 1290725 - DNA, 15 bp, Homo sapiens
gaatatgcttgatat

SEQ ID NO: 1290726 - DNA, 15 bp, Homo sapiens
agaatatgcttgata

SEQ ID NO: 1290727 - DNA, 15 bp, Homo sapiens
gagaatatgcttgat

SEQ ID NO: 1290728 - DNA, 15 bp, Homo sapiens
agagaatatgcttga

SEQ ID NO: 1290729 - DNA, 15 bp, Homo sapiens
cagagaatatgcttg

SEQ ID NO: 1290730 - DNA, 15 bp, Homo sapiens
tcagagaatatgctt

SEQ ID NO: 1290731 - DNA, 15 bp, Homo sapiens
atcagagaatatgct

SEQ ID NO: 1290732 - DNA, 15 bp, Homo sapiens
gatcagagaatatgc

SEQ ID NO: 1290733 - DNA, 15 bp, Homo sapiens
tgatcagagaatatg

SEQ ID NO: 1290734 - DNA, 15 bp, Homo sapiens
gtgatcagagaatat

SEQ ID NO: 1290735 - DNA, 15 bp, Homo sapiens
tgtgatcagagaata

SEQ ID NO: 1290736 - DNA, 15 bp, Homo sapiens
ttgtgatcagagaat

SEQ ID NO: 1290737 - DNA, 15 bp, Homo sapiens
attgtgatcagagaa

SEQ ID NO: 1290738 - DNA, 15 bp, Homo sapiens
tattgtgatcagaga

SEQ ID NO: 1290739 - DNA, 15 bp, Homo sapiens
ctattgtgatcagag

SEQ ID NO: 1290740 - DNA, 15 bp, Homo sapiens
tctattgtgatcaga

SEQ ID NO: 1290741 - DNA, 15 bp, Homo sapiens
ttctattgtgatcag

SEQ ID NO: 1290742 - DNA, 15 bp, Homo sapiens
attctattgtgatca

SEQ ID NO: 1290743 - DNA, 15 bp, Homo sapiens
tattctattgtgatc

SEQ ID NO: 1290744 - DNA, 15 bp, Homo sapiens
ttattctattgtgat

SEQ ID NO: 1290745 - DNA, 15 bp, Homo sapiens
tttattctattgtga

SEQ ID NO: 1290746 - DNA, 15 bp, Homo sapiens
ttttattctattgtg

SEQ ID NO: 1290747 - DNA, 15 bp, Homo sapiens
gttttattctattgt

SEQ ID NO: 1290748 - DNA, 15 bp, Homo sapiens
agttttattctattg

SEQ ID NO: 1290749 - DNA, 15 bp, Homo sapiens
tagttttattctatt

SEQ ID NO: 1290750 - DNA, 15 bp, Homo sapiens
ctagttttattctat

SEQ ID NO: 1290751 - DNA, 15 bp, Homo sapiens
tctagttttattcta

SEQ ID NO: 1290752 - DNA, 15 bp, Homo sapiens
ttctagttttattct

SEQ ID NO: 1290753 - DNA, 15 bp, Homo sapiens
tttctagttttattc

SEQ ID NO: 1290754 - DNA, 15 bp, Homo sapiens
atttctagttttatt

SEQ ID NO: 1290755 - DNA, 15 bp, Homo sapiens
aatttctagttttat

SEQ ID NO: 1290756 - DNA, 15 bp, Homo sapiens
taatttctagtttta

SEQ ID NO: 1290757 - DNA, 15 bp, Homo sapiens
ttaatttctagtttt

SEQ ID NO: 1290758 - DNA, 15 bp, Homo sapiens
attaatttctagttt

SEQ ID NO: 1290759 - DNA, 15 bp, Homo sapiens
tattaatttctagtt

SEQ ID NO: 1290760 - DNA, 15 bp, Homo sapiens
gttattaatttctag

SEQ ID NO: 1290761 - DNA, 15 bp, Homo sapiens
tgttattaatttcta

SEQ ID NO: 1290762 - DNA, 15 bp, Homo sapiens
ttgttattaatttct

SEQ ID NO: 1290763 - DNA, 15 bp, Homo sapiens
cttgttattaatttc

SEQ ID NO: 1290764 - DNA, 15 bp, Homo sapiens
ccttgttattaattt

SEQ ID NO: 1290765 - DNA, 15 bp, Homo sapiens
accttgttattaatt

SEQ ID NO: 1290766 - DNA, 15 bp, Homo sapiens
taccttgttattaat

SEQ ID NO: 1290767 - DNA, 15 bp, Homo sapiens
ataccttgttattaa

SEQ ID NO: 1290768 - DNA, 15 bp, Homo sapiens
aataccttgttatta

SEQ ID NO: 1290769 - DNA, 15 bp, Homo sapiens
aaataccttgttatt

SEQ ID NO: 1290770 - DNA, 15 bp, Homo sapiens
aaaataccttgttat

SEQ ID NO: 1290771 - DNA, 15 bp, Homo sapiens
caaaataccttgtta

SEQ ID NO: 1290772 - DNA, 15 bp, Homo sapiens
ccaaaataccttgtt

SEQ ID NO: 1290773 - DNA, 15 bp, Homo sapiens
tccaaaataccttgt

SEQ ID NO: 1290774 - DNA, 15 bp, Homo sapiens
ttccaaaataccttg

SEQ ID NO: 1290775 - DNA, 15 bp, Homo sapiens
tttccaaaatacctt

SEQ ID NO: 1290776 - DNA, 15 bp, Homo sapiens
gtttccaaaatacct

SEQ ID NO: 1290777 - DNA, 15 bp, Homo sapiens
agtttccaaaatacc

SEQ ID NO: 1290778 - DNA, 15 bp, Homo sapiens
cagtttccaaaatac

SEQ ID NO: 1290779 - DNA, 15 bp, Homo sapiens
acagtttccaaaata

SEQ ID NO: 1290780 - DNA, 15 bp, Homo sapiens
tacagtttccaaaat

SEQ ID NO: 1290781 - DNA, 15 bp, Homo sapiens
gtacagtttccaaaa

SEQ ID NO: 1290782 - DNA, 15 bp, Homo sapiens
tgtacagtttccaaa

SEQ ID NO: 1290783 - DNA, 15 bp, Homo sapiens
ctgtacagtttccaa

SEQ ID NO: 1290784 - DNA, 15 bp, Homo sapiens
tctgtacagtttcca

SEQ ID NO: 1290785 - DNA, 15 bp, Homo sapiens
atctgtacagtttcc

SEQ ID NO: 1290786 - DNA, 15 bp, Homo sapiens
tatctgtacagtttc

SEQ ID NO: 1290787 - DNA, 15 bp, Homo sapiens
gtatctgtacagttt

SEQ ID NO: 1290788 - DNA, 15 bp, Homo sapiens
tgtatctgtacagtt

SEQ ID NO: 1290789 - DNA, 15 bp, Homo sapiens
atgtatctgtacagt

SEQ ID NO: 1290790 - DNA, 15 bp, Homo sapiens
catgtatctgtacag

SEQ ID NO: 1290791 - DNA, 15 bp, Homo sapiens
ccatgtatctgtaca

SEQ ID NO: 1290792 - DNA, 15 bp, Homo sapiens
tccatgtatctgtac

SEQ ID NO: 1290793 - DNA, 15 bp, Homo sapiens
ttccatgtatctgta

SEQ ID NO: 1290794 - DNA, 15 bp, Homo sapiens
tttccatgtatctgt

SEQ ID NO: 1290795 - DNA, 15 bp, Homo sapiens
atttccatgtatctg

SEQ ID NO: 1290796 - DNA, 15 bp, Homo sapiens
aatttccatgtatct

SEQ ID NO: 1290797 - DNA, 15 bp, Homo sapiens
taatttccatgtatc

SEQ ID NO: 1290798 - DNA, 15 bp, Homo sapiens
ttaatttccatgtat

SEQ ID NO: 1290799 - DNA, 15 bp, Homo sapiens
tttaatttccatgta

SEQ ID NO: 1290800 - DNA, 15 bp, Homo sapiens
gtttaatttccatgt

SEQ ID NO: 1290801 - DNA, 15 bp, Homo sapiens
tgtttaatttccatg

SEQ ID NO: 1290802 - DNA, 15 bp, Homo sapiens
ttgtttaatttccat

SEQ ID NO: 1290803 - DNA, 15 bp, Homo sapiens
attgtttaatttcca

SEQ ID NO: 1290804 - DNA, 15 bp, Homo sapiens
tattgtttaatttcc

SEQ ID NO: 1290805 - DNA, 15 bp, Homo sapiens
atattgtttaatttc

SEQ ID NO: 1290806 - DNA, 15 bp, Homo sapiens
catattgtttaattt

SEQ ID NO: 1290807 - DNA, 15 bp, Homo sapiens
gcatattgtttaatt

SEQ ID NO: 1290808 - DNA, 15 bp, Homo sapiens
agcatattgtttaat

SEQ ID NO: 1290809 - DNA, 15 bp, Homo sapiens
gagcatattgtttaa

SEQ ID NO: 1290810 - DNA, 15 bp, Homo sapiens
ggagcatattgttta

SEQ ID NO: 1290811 - DNA, 15 bp, Homo sapiens
aggagcatattgttt

SEQ ID NO: 1290812 - DNA, 15 bp, Homo sapiens
caggagcatattgtt

SEQ ID NO: 1290813 - DNA, 15 bp, Homo sapiens
tcaggagcatattgt

SEQ ID NO: 1290814 - DNA, 15 bp, Homo sapiens
ttcaggagcatattg

SEQ ID NO: 1290815 - DNA, 15 bp, Homo sapiens
attcaggagcatatt

SEQ ID NO: 1290816 - DNA, 15 bp, Homo sapiens
cattcaggagcatat

SEQ ID NO: 1290817 - DNA, 15 bp, Homo sapiens
ccattcaggagcata

SEQ ID NO: 1290818 - DNA, 15 bp, Homo sapiens
gccattcaggagcat

SEQ ID NO: 1290819 - DNA, 15 bp, Homo sapiens
ggccattcaggagca

SEQ ID NO: 1290820 - DNA, 15 bp, Homo sapiens
tggccattcaggagc

SEQ ID NO: 1290821 - DNA, 15 bp, Homo sapiens
atggccattcaggag

SEQ ID NO: 1290822 - DNA, 15 bp, Homo sapiens
catggccattcagga

SEQ ID NO: 1290823 - DNA, 15 bp, Homo sapiens
ccatggccattcagg

SEQ ID NO: 1290824 - DNA, 15 bp, Homo sapiens
cccatggccattcag

SEQ ID NO: 1290825 - DNA, 15 bp, Homo sapiens
acccatggccattca

SEQ ID NO: 1290826 - DNA, 15 bp, Homo sapiens
gacccatggccattc

SEQ ID NO: 1290827 - DNA, 15 bp, Homo sapiens
tgacccatggccatt

SEQ ID NO: 1290828 - DNA, 15 bp, Homo sapiens
ttgacccatggccat

SEQ ID NO: 1290829 - DNA, 15 bp, Homo sapiens
attgacccatggcca

SEQ ID NO: 1290830 - DNA, 15 bp, Homo sapiens
cattgacccatggcc

SEQ ID NO: 1290831 - DNA, 15 bp, Homo sapiens
tcattgacccatggc

SEQ ID NO: 1290832 - DNA, 15 bp, Homo sapiens
ttcattgacccatgg

SEQ ID NO: 1290833 - DNA, 15 bp, Homo sapiens
cttcattgacccatg

SEQ ID NO: 1290834 - DNA, 15 bp, Homo sapiens
tcttcattgacccat

SEQ ID NO: 1290835 - DNA, 15 bp, Homo sapiens
ttcttcattgaccca

SEQ ID NO: 1290836 - DNA, 15 bp, Homo sapiens
tttcttcattgaccc

SEQ ID NO: 1290837 - DNA, 15 bp, Homo sapiens
atttcttcattgacc

SEQ ID NO: 1290838 - DNA, 15 bp, Homo sapiens
aatttcttcattgac

SEQ ID NO: 1290839 - DNA, 15 bp, Homo sapiens
taatttcttcattga

SEQ ID NO: 1290840 - DNA, 15 bp, Homo sapiens
ttaatttcttcattg

SEQ ID NO: 1290841 - DNA, 15 bp, Homo sapiens
cttaatttcttcatt

SEQ ID NO: 1290842 - DNA, 15 bp, Homo sapiens
tcttaatttcttcat

SEQ ID NO: 1290843 - DNA, 15 bp, Homo sapiens
ctcttaatttcttca

SEQ ID NO: 1290844 - DNA, 15 bp, Homo sapiens
cctcttaatttcttc

SEQ ID NO: 1290845 - DNA, 15 bp, Homo sapiens
ccctcttaatttctt

SEQ ID NO: 1290846 - DNA, 15 bp, Homo sapiens
tccctcttaatttct

SEQ ID NO: 1290847 - DNA, 15 bp, Homo sapiens
ttccctcttaatttc

SEQ ID NO: 1290848 - DNA, 15 bp, Homo sapiens
tttccctcttaattt

SEQ ID NO: 1290849 - DNA, 15 bp, Homo sapiens
atttccctcttaatt

SEQ ID NO: 1290850 - DNA, 15 bp, Homo sapiens
aatttccctcttaat

SEQ ID NO: 1290851 - DNA, 15 bp, Homo sapiens
taatttccctcttaa

SEQ ID NO: 1290852 - DNA, 15 bp, Homo sapiens
ttaatttccctctta

SEQ ID NO: 1290853 - DNA, 15 bp, Homo sapiens
tttaatttccctctt

SEQ ID NO: 1290854 - DNA, 15 bp, Homo sapiens
ttttaatttccctct

SEQ ID NO: 1290855 - DNA, 15 bp, Homo sapiens
tttttaatttccctc

SEQ ID NO: 1290856 - DNA, 15 bp, Homo sapiens
ttttttaatttccct

SEQ ID NO: 1290857 - DNA, 15 bp, Homo sapiens
tttttttaatttccc

SEQ ID NO: 1290858 - DNA, 15 bp, Homo sapiens
atttttttaatttcc

SEQ ID NO: 1290859 - DNA, 15 bp, Homo sapiens
aatttttttaatttc

SEQ ID NO: 1290860 - DNA, 15 bp, Homo sapiens
aaatttttttaattt

SEQ ID NO: 1290861 - DNA, 15 bp, Homo sapiens
aaaatttttttaatt

SEQ ID NO: 1290862 - DNA, 15 bp, Homo sapiens
aaaaatttttttaat

SEQ ID NO: 1290863 - DNA, 15 bp, Homo sapiens
caaaaatttttttaa

SEQ ID NO: 1290864 - DNA, 15 bp, Homo sapiens
tcaaaaattttttta

SEQ ID NO: 1290865 - DNA, 15 bp, Homo sapiens
ttcaaaaattttttt

SEQ ID NO: 1290866 - DNA, 15 bp, Homo sapiens
tttcaaaaatttttt

SEQ ID NO: 1290867 - DNA, 15 bp, Homo sapiens
gtttcaaaaattttt

SEQ ID NO: 1290868 - DNA, 15 bp, Homo sapiens
tgtttcaaaaatttt

SEQ ID NO: 1290869 - DNA, 15 bp, Homo sapiens
ttgtttcaaaaattt

SEQ ID NO: 1290870 - DNA, 15 bp, Homo sapiens
tttgtttcaaaaatt

SEQ ID NO: 1290871 - DNA, 15 bp, Homo sapiens
atttgtttcaaaaat

SEQ ID NO: 1290872 - DNA, 15 bp, Homo sapiens
tatttgtttcaaaaa

SEQ ID NO: 1290873 - DNA, 15 bp, Homo sapiens
ttatttgtttcaaaa

SEQ ID NO: 1290874 - DNA, 15 bp, Homo sapiens
attatttgtttcaaa

SEQ ID NO: 1290875 - DNA, 15 bp, Homo sapiens
cattatttgtttcaa

SEQ ID NO: 1290876 - DNA, 15 bp, Homo sapiens
ccattatttgtttca

SEQ ID NO: 1290877 - DNA, 15 bp, Homo sapiens
tccattatttgtttc

SEQ ID NO: 1290878 - DNA, 15 bp, Homo sapiens
ttccattatttgttt

SEQ ID NO: 1290879 - DNA, 15 bp, Homo sapiens
tttccattatttgtt

SEQ ID NO: 1290880 - DNA, 15 bp, Homo sapiens
gtttccattatttgt

SEQ ID NO: 1290881 - DNA, 15 bp, Homo sapiens
tgtttccattatttg

SEQ ID NO: 1290882 - DNA, 15 bp, Homo sapiens
atgtttccattattt

SEQ ID NO: 1290883 - DNA, 15 bp, Homo sapiens
tatgtttccattatt

SEQ ID NO: 1290884 - DNA, 15 bp, Homo sapiens
ttatgtttccattat

SEQ ID NO: 1290885 - DNA, 15 bp, Homo sapiens
gttatgtttccatta

SEQ ID NO: 1290886 - DNA, 15 bp, Homo sapiens
tgttatgtttccatt

SEQ ID NO: 1290887 - DNA, 15 bp, Homo sapiens
ttgttatgtttccat

SEQ ID NO: 1290888 - DNA, 15 bp, Homo sapiens
tttgttatgtttcca

SEQ ID NO: 1290889 - DNA, 15 bp, Homo sapiens
gtttgttatgtttcc

SEQ ID NO: 1290890 - DNA, 15 bp, Homo sapiens
ggtttgttatgtttc

SEQ ID NO: 1290891 - DNA, 15 bp, Homo sapiens
tggtttgttatgttt

SEQ ID NO: 1290892 - DNA, 15 bp, Homo sapiens
ttggtttgttatgtt

SEQ ID NO: 1290893 - DNA, 15 bp, Homo sapiens
tttggtttgttatgt

SEQ ID NO: 1290894 - DNA, 15 bp, Homo sapiens
ttttggtttgttatg

SEQ ID NO: 1290895 - DNA, 15 bp, Homo sapiens
gttttggtttgttat

SEQ ID NO: 1290896 - DNA, 15 bp, Homo sapiens
ggttttggtttgtta

SEQ ID NO: 1290897 - DNA, 15 bp, Homo sapiens
aggttttggtttgtt

SEQ ID NO: 1290898 - DNA, 15 bp, Homo sapiens
taggttttggtttgt

SEQ ID NO: 1290899 - DNA, 15 bp, Homo sapiens
ataggttttggtttg

SEQ ID NO: 1290900 - DNA, 15 bp, Homo sapiens
cataggttttggttt

SEQ ID NO: 1290901 - DNA, 15 bp, Homo sapiens
ccataggttttggtt

SEQ ID NO: 1290902 - DNA, 15 bp, Homo sapiens
cccataggttttggt

SEQ ID NO: 1290903 - DNA, 15 bp, Homo sapiens
tcccataggttttgg

SEQ ID NO: 1290904 - DNA, 15 bp, Homo sapiens
atcccataggttttg

SEQ ID NO: 1290905 - DNA, 15 bp, Homo sapiens
tatcccataggtttt

SEQ ID NO: 1290906 - DNA, 15 bp, Homo sapiens
gtatcccataggttt

SEQ ID NO: 1290907 - DNA, 15 bp, Homo sapiens
tgtatcccataggtt

SEQ ID NO: 1290908 - DNA, 15 bp, Homo sapiens
ctgtatcccataggt

SEQ ID NO: 1290909 - DNA, 15 bp, Homo sapiens
actgtatcccatagg

SEQ ID NO: 1290910 - DNA, 15 bp, Homo sapiens
tactgtatcccatag

SEQ ID NO: 1290911 - DNA, 15 bp, Homo sapiens
ttactgtatcccata

SEQ ID NO: 1290912 - DNA, 15 bp, Homo sapiens
tttactgtatcccat

SEQ ID NO: 1290913 - DNA, 15 bp, Homo sapiens
ttttactgtatccca

SEQ ID NO: 1290914 - DNA, 15 bp, Homo sapiens
cttttactgtatccc

SEQ ID NO: 1290915 - DNA, 15 bp, Homo sapiens
gcttttactgtatcc

SEQ ID NO: 1290916 - DNA, 15 bp, Homo sapiens
tgcttttactgtatc

SEQ ID NO: 1290917 - DNA, 15 bp, Homo sapiens
ctgcttttactgtat

SEQ ID NO: 1290918 - DNA, 15 bp, Homo sapiens
actgcttttactgta

SEQ ID NO: 1290919 - DNA, 15 bp, Homo sapiens
tactgcttttactgt

SEQ ID NO: 1290920 - DNA, 15 bp, Homo sapiens
gtactgcttttactg

SEQ ID NO: 1290921 - DNA, 15 bp, Homo sapiens
tgtactgcttttact

SEQ ID NO: 1290922 - DNA, 15 bp, Homo sapiens
ctgtactgcttttac

SEQ ID NO: 1290923 - DNA, 15 bp, Homo sapiens
tctgtactgctttta

SEQ ID NO: 1290924 - DNA, 15 bp, Homo sapiens
ctctgtactgctttt

SEQ ID NO: 1290925 - DNA, 15 bp, Homo sapiens
cctctgtactgcttt

SEQ ID NO: 1290926 - DNA, 15 bp, Homo sapiens
ccctctgtactgctt

SEQ ID NO: 1290927 - DNA, 15 bp, Homo sapiens
tccctctgtactgct

SEQ ID NO: 1290928 - DNA, 15 bp, Homo sapiens
ttccctctgtactgc

SEQ ID NO: 1290929 - DNA, 15 bp, Homo sapiens
cttccctctgtactg

SEQ ID NO: 1290930 - DNA, 15 bp, Homo sapiens
acttccctctgtact

SEQ ID NO: 1290931 - DNA, 15 bp, Homo sapiens
aacttccctctgtac

SEQ ID NO: 1290932 - DNA, 15 bp, Homo sapiens
aaacttccctctgta

SEQ ID NO: 1290933 - DNA, 15 bp, Homo sapiens
taaacttccctctgt

SEQ ID NO: 1290934 - DNA, 15 bp, Homo sapiens
ataaacttccctctg

SEQ ID NO: 1290935 - DNA, 15 bp, Homo sapiens
tataaacttccctct

SEQ ID NO: 1290936 - DNA, 15 bp, Homo sapiens
ctataaacttccctc

SEQ ID NO: 1290937 - DNA, 15 bp, Homo sapiens
gctataaacttccct

SEQ ID NO: 1290938 - DNA, 15 bp, Homo sapiens
agctataaacttccc

SEQ ID NO: 1290939 - DNA, 15 bp, Homo sapiens
cagctataaacttcc

SEQ ID NO: 1290940 - DNA, 15 bp, Homo sapiens
acagctataaacttc

SEQ ID NO: 1290941 - DNA, 15 bp, Homo sapiens
tacagctataaactt

SEQ ID NO: 1290942 - DNA, 15 bp, Homo sapiens
ttacagctataaact

SEQ ID NO: 1290943 - DNA, 15 bp, Homo sapiens
cttacagctataaac

SEQ ID NO: 1290944 - DNA, 15 bp, Homo sapiens
acttacagctataaa

SEQ ID NO: 1290945 - DNA, 15 bp, Homo sapiens
cacttacagctataa

SEQ ID NO: 1290946 - DNA, 15 bp, Homo sapiens
gcacttacagctata

SEQ ID NO: 1290947 - DNA, 15 bp, Homo sapiens
ggcacttacagctat

SEQ ID NO: 1290948 - DNA, 15 bp, Homo sapiens
aggcacttacagcta

SEQ ID NO: 1290949 - DNA, 15 bp, Homo sapiens
taggcacttacagct

SEQ ID NO: 1290950 - DNA, 15 bp, Homo sapiens
gtaggcacttacagc

SEQ ID NO: 1290951 - DNA, 15 bp, Homo sapiens
tgtaggcacttacag

SEQ ID NO: 1290952 - DNA, 15 bp, Homo sapiens
atgtaggcacttaca

SEQ ID NO: 1290953 - DNA, 15 bp, Homo sapiens
gatgtaggcacttac

SEQ ID NO: 1290954 - DNA, 15 bp, Homo sapiens
ggatgtaggcactta

SEQ ID NO: 1290955 - DNA, 15 bp, Homo sapiens
gggatgtaggcactt

SEQ ID NO: 1290956 - DNA, 15 bp, Homo sapiens
tgggatgtaggcact

SEQ ID NO: 1290957 - DNA, 15 bp, Homo sapiens
ttgggatgtaggcac

SEQ ID NO: 1290958 - DNA, 15 bp, Homo sapiens
tttgggatgtaggca

SEQ ID NO: 1290959 - DNA, 15 bp, Homo sapiens
ttttgggatgtaggc

SEQ ID NO: 1290960 - DNA, 15 bp, Homo sapiens
cttttgggatgtagg

SEQ ID NO: 1290961 - DNA, 15 bp, Homo sapiens
tcttttgggatgtag

SEQ ID NO: 1290962 - DNA, 15 bp, Homo sapiens
ctcttttgggatgta

SEQ ID NO: 1290963 - DNA, 15 bp, Homo sapiens
cctcttttgggatgt

SEQ ID NO: 1290964 - DNA, 15 bp, Homo sapiens
tcctcttttgggatg

SEQ ID NO: 1290965 - DNA, 15 bp, Homo sapiens
ttcctcttttgggat

SEQ ID NO: 1290966 - DNA, 15 bp, Homo sapiens
tttcctcttttggga

SEQ ID NO: 1290967 - DNA, 15 bp, Homo sapiens
ttttcctcttttggg

SEQ ID NO: 1290968 - DNA, 15 bp, Homo sapiens
gttttcctcttttgg

SEQ ID NO: 1290969 - DNA, 15 bp, Homo sapiens
tgttttcctcttttg

SEQ ID NO: 1290970 - DNA, 15 bp, Homo sapiens
atgttttcctctttt

SEQ ID NO: 1290971 - DNA, 15 bp, Homo sapiens
gatgttttcctcttt

SEQ ID NO: 1290972 - DNA, 15 bp, Homo sapiens
agatgttttcctctt

SEQ ID NO: 1290973 - DNA, 15 bp, Homo sapiens
aagatgttttcctct

SEQ ID NO: 1290974 - DNA, 15 bp, Homo sapiens
aaagatgttttcctc

SEQ ID NO: 1290975 - DNA, 15 bp, Homo sapiens
aaaagatgttttcct

SEQ ID NO: 1290976 - DNA, 15 bp, Homo sapiens
aaaaagatgttttcc

SEQ ID NO: 1290977 - DNA, 15 bp, Homo sapiens
aaaaaagatgttttc

SEQ ID NO: 1290978 - DNA, 15 bp, Homo sapiens
aaaaaaagatgtttt

SEQ ID NO: 1290979 - DNA, 15 bp, Homo sapiens
taaaaaaagatgttt

SEQ ID NO: 1290980 - DNA, 15 bp, Homo sapiens
ttaaaaaaagatgtt

SEQ ID NO: 1290981 - DNA, 15 bp, Homo sapiens
tttaaaaaaagatgt

SEQ ID NO: 1290982 - DNA, 15 bp, Homo sapiens
ttttaaaaaaagatg

SEQ ID NO: 1290983 - DNA, 15 bp, Homo sapiens
tttttaaaaaaagat

SEQ ID NO: 1290984 - DNA, 15 bp, Homo sapiens
ttttttaaaaaaaga

SEQ ID NO: 1290985 - DNA, 15 bp, Homo sapiens
tttttttaaaaaaag

SEQ ID NO: 1290986 - DNA, 15 bp, Homo sapiens
aagtttttttaaaaa

SEQ ID NO: 1290987 - DNA, 15 bp, Homo sapiens
aaagtttttttaaaa

SEQ ID NO: 1290988 - DNA, 15 bp, Homo sapiens
aaaagtttttttaaa

SEQ ID NO: 1290989 - DNA, 15 bp, Homo sapiens
taaaagtttttttaa

SEQ ID NO: 1290990 - DNA, 15 bp, Homo sapiens
ctaaaagttttttta

SEQ ID NO: 1290991 - DNA, 15 bp, Homo sapiens
cctaaaagttttttt

SEQ ID NO: 1290992 - DNA, 15 bp, Homo sapiens
acctaaaagtttttt

SEQ ID NO: 1290993 - DNA, 15 bp, Homo sapiens
aacctaaaagttttt

SEQ ID NO: 1290994 - DNA, 15 bp, Homo sapiens
gaacctaaaagtttt

SEQ ID NO: 1290995 - DNA, 15 bp, Homo sapiens
tgaacctaaaagttt

SEQ ID NO: 1290996 - DNA, 15 bp, Homo sapiens
ctgaacctaaaagtt

SEQ ID NO: 1290997 - DNA, 15 bp, Homo sapiens
cctgaacctaaaagt

SEQ ID NO: 1290998 - DNA, 15 bp, Homo sapiens
ccctgaacctaaaag

SEQ ID NO: 1290999 - DNA, 15 bp, Homo sapiens
cccctgaacctaaaa

SEQ ID NO: 1291000 - DNA, 15 bp, Homo sapiens
acccctgaacctaaa

SEQ ID NO: 1291001 - DNA, 15 bp, Homo sapiens
tacccctgaacctaa

SEQ ID NO: 1291002 - DNA, 15 bp, Homo sapiens
gtacccctgaaccta

SEQ ID NO: 1291003 - DNA, 15 bp, Homo sapiens
tgtacccctgaacct

SEQ ID NO: 1291004 - DNA, 15 bp, Homo sapiens
atgtacccctgaacc

SEQ ID NO: 1291005 - DNA, 15 bp, Homo sapiens
tcacatgtacccctg

SEQ ID NO: 1291006 - DNA, 15 bp, Homo sapiens
atcacatgtacccct

SEQ ID NO: 1291007 - DNA, 15 bp, Homo sapiens
catcacatgtacccc

SEQ ID NO: 1291008 - DNA, 15 bp, Homo sapiens
ccatcacatgtaccc

SEQ ID NO: 1291009 - DNA, 15 bp, Homo sapiens
accatcacatgtacc

SEQ ID NO: 1291010 - DNA, 15 bp, Homo sapiens
aaccatcacatgtac

SEQ ID NO: 1291011 - DNA, 15 bp, Homo sapiens
aaaccatcacatgta

SEQ ID NO: 1291012 - DNA, 15 bp, Homo sapiens
caaaccatcacatgt

SEQ ID NO: 1291013 - DNA, 15 bp, Homo sapiens
acaaaccatcacatg

SEQ ID NO: 1291014 - DNA, 15 bp, Homo sapiens
aacaaaccatcacat

SEQ ID NO: 1291015 - DNA, 15 bp, Homo sapiens
taacaaaccatcaca

SEQ ID NO: 1291016 - DNA, 15 bp, Homo sapiens
gtaacaaaccatcac

SEQ ID NO: 1291017 - DNA, 15 bp, Homo sapiens
tgtaacaaaccatca

SEQ ID NO: 1291018 - DNA, 15 bp, Homo sapiens
atgtaacaaaccatc

SEQ ID NO: 1291019 - DNA, 15 bp, Homo sapiens
tatgtaacaaaccat

SEQ ID NO: 1291020 - DNA, 15 bp, Homo sapiens
ctatgtaacaaacca

SEQ ID NO: 1291021 - DNA, 15 bp, Homo sapiens
caagtttacctatgt

SEQ ID NO: 1291022 - DNA, 15 bp, Homo sapiens
acaagtttacctatg

SEQ ID NO: 1291023 - DNA, 15 bp, Homo sapiens
cacaagtttacctat

SEQ ID NO: 1291024 - DNA, 15 bp, Homo sapiens
acacaagtttaccta

SEQ ID NO: 1291025 - DNA, 15 bp, Homo sapiens
gacacaagtttacct

SEQ ID NO: 1291026 - DNA, 15 bp, Homo sapiens
tgacacaagtttacc

SEQ ID NO: 1291027 - DNA, 15 bp, Homo sapiens
gtgacacaagtttac

SEQ ID NO: 1291028 - DNA, 15 bp, Homo sapiens
tgtgacacaagttta

SEQ ID NO: 1291029 - DNA, 15 bp, Homo sapiens
ctgtgacacaagttt

SEQ ID NO: 1291030 - DNA, 15 bp, Homo sapiens
cctgtgacacaagtt

SEQ ID NO: 1291031 - DNA, 15 bp, Homo sapiens
ccctgtgacacaagt

SEQ ID NO: 1291032 - DNA, 15 bp, Homo sapiens
cccctgtgacacaag

SEQ ID NO: 1291033 - DNA, 15 bp, Homo sapiens
acccctgtgacacaa

SEQ ID NO: 1291034 - DNA, 15 bp, Homo sapiens
aacccctgtgacaca

SEQ ID NO: 1291035 - DNA, 15 bp, Homo sapiens
aaacccctgtgacac

SEQ ID NO: 1291036 - DNA, 15 bp, Homo sapiens
caaacccctgtgaca

SEQ ID NO: 1291037 - DNA, 15 bp, Homo sapiens
acaaacccctgtgac

SEQ ID NO: 1291038 - DNA, 15 bp, Homo sapiens
aacaaacccctgtga

SEQ ID NO: 1291039 - DNA, 15 bp, Homo sapiens
caacaaacccctgtg

SEQ ID NO: 1291040 - DNA, 15 bp, Homo sapiens
acaacaaacccctgt

SEQ ID NO: 1291041 - DNA, 15 bp, Homo sapiens
tacaacaaacccctg

SEQ ID NO: 1291042 - DNA, 15 bp, Homo sapiens
gtacaacaaacccct

SEQ ID NO: 1291043 - DNA, 15 bp, Homo sapiens
gctgtacaacaaacc

SEQ ID NO: 1291044 - DNA, 15 bp, Homo sapiens
agctgtacaacaaac

SEQ ID NO: 1291045 - DNA, 15 bp, Homo sapiens
aagctgtacaacaaa

SEQ ID NO: 1291046 - DNA, 15 bp, Homo sapiens
taagctgtacaacaa

SEQ ID NO: 1291047 - DNA, 15 bp, Homo sapiens
gtaagctgtacaaca

SEQ ID NO: 1291048 - DNA, 15 bp, Homo sapiens
agtaagctgtacaac

SEQ ID NO: 1291049 - DNA, 15 bp, Homo sapiens
aagtaagctgtacaa

SEQ ID NO: 1291050 - DNA, 15 bp, Homo sapiens
gaagtaagctgtaca

SEQ ID NO: 1291051 - DNA, 15 bp, Homo sapiens
tgaagtaagctgtac

SEQ ID NO: 1291052 - DNA, 15 bp, Homo sapiens
atgaagtaagctgta

SEQ ID NO: 1291053 - DNA, 15 bp, Homo sapiens
gatgaagtaagctgt

SEQ ID NO: 1291054 - DNA, 15 bp, Homo sapiens
tgatgaagtaagctg

SEQ ID NO: 1291055 - DNA, 15 bp, Homo sapiens
gtgatgaagtaagct

SEQ ID NO: 1291056 - DNA, 15 bp, Homo sapiens
ggtgatgaagtaagc

SEQ ID NO: 1291057 - DNA, 15 bp, Homo sapiens
gggtgatgaagtaag

SEQ ID NO: 1291058 - DNA, 15 bp, Homo sapiens
tgggtgatgaagtaa

SEQ ID NO: 1291059 - DNA, 15 bp, Homo sapiens
ctgggtgatgaagta

SEQ ID NO: 1291060 - DNA, 15 bp, Homo sapiens
cctgggtgatgaagt

SEQ ID NO: 1291061 - DNA, 15 bp, Homo sapiens
tcctgggtgatgaag

SEQ ID NO: 1291062 - DNA, 15 bp, Homo sapiens
ttcctgggtgatgaa

SEQ ID NO: 1291063 - DNA, 15 bp, Homo sapiens
attcctgggtgatga

SEQ ID NO: 1291064 - DNA, 15 bp, Homo sapiens
aattcctgggtgatg

SEQ ID NO: 1291065 - DNA, 15 bp, Homo sapiens
taattcctgggtgat

SEQ ID NO: 1291066 - DNA, 15 bp, Homo sapiens
ttaattcctgggtga

SEQ ID NO: 1291067 - DNA, 15 bp, Homo sapiens
cttaattcctgggtg

SEQ ID NO: 1291068 - DNA, 15 bp, Homo sapiens
gcttaattcctgggt

SEQ ID NO: 1291069 - DNA, 15 bp, Homo sapiens
ggcttaattcctggg

SEQ ID NO: 1291070 - DNA, 15 bp, Homo sapiens
gggcttaattcctgg

SEQ ID NO: 1291071 - DNA, 15 bp, Homo sapiens
tgggcttaattcctg

SEQ ID NO: 1291072 - DNA, 15 bp, Homo sapiens
ctgggcttaattcct

SEQ ID NO: 1291073 - DNA, 15 bp, Homo sapiens
actgggcttaattcc

SEQ ID NO: 1291074 - DNA, 15 bp, Homo sapiens
tactgggcttaattc

SEQ ID NO: 1291075 - DNA, 15 bp, Homo sapiens
atactgggcttaatt

SEQ ID NO: 1291076 - DNA, 15 bp, Homo sapiens
gatactgggcttaat

SEQ ID NO: 1291077 - DNA, 15 bp, Homo sapiens
ggatactgggcttaa

SEQ ID NO: 1291078 - DNA, 15 bp, Homo sapiens
tggatactgggctta

SEQ ID NO: 1291079 - DNA, 15 bp, Homo sapiens
ttggatactgggctt

SEQ ID NO: 1291080 - DNA, 15 bp, Homo sapiens
attggatactgggct

SEQ ID NO: 1291081 - DNA, 15 bp, Homo sapiens
tattggatactgggc

SEQ ID NO: 1291082 - DNA, 15 bp, Homo sapiens
ctattggatactggg

SEQ ID NO: 1291083 - DNA, 15 bp, Homo sapiens
gctattggatactgg

SEQ ID NO: 1291084 - DNA, 15 bp, Homo sapiens
agctattggatactg

SEQ ID NO: 1291085 - DNA, 15 bp, Homo sapiens
tagctattggatact

SEQ ID NO: 1291086 - DNA, 15 bp, Homo sapiens
atagctattggatac

SEQ ID NO: 1291087 - DNA, 15 bp, Homo sapiens
aatagctattggata

SEQ ID NO: 1291088 - DNA, 15 bp, Homo sapiens
aaatagctattggat

SEQ ID NO: 1291089 - DNA, 15 bp, Homo sapiens
aaaatagctattgga

SEQ ID NO: 1291090 - DNA, 15 bp, Homo sapiens
aaaaatagctattgg

SEQ ID NO: 1291091 - DNA, 15 bp, Homo sapiens
aaaaaatagctattg

SEQ ID NO: 1291092 - DNA, 15 bp, Homo sapiens
gaaaaaatagctatt

SEQ ID NO: 1291093 - DNA, 15 bp, Homo sapiens
agaaaaaatagctat

SEQ ID NO: 1291094 - DNA, 15 bp, Homo sapiens
cagaaaaaatagcta

SEQ ID NO: 1291095 - DNA, 15 bp, Homo sapiens
acagaaaaaatagct

SEQ ID NO: 1291096 - DNA, 15 bp, Homo sapiens
aacagaaaaaatagc

SEQ ID NO: 1291097 - DNA, 15 bp, Homo sapiens
gaacagaaaaaatag

SEQ ID NO: 1291098 - DNA, 15 bp, Homo sapiens
ggaacagaaaaaata

SEQ ID NO: 1291099 - DNA, 15 bp, Homo sapiens
aggaacagaaaaaat

SEQ ID NO: 1291100 - DNA, 15 bp, Homo sapiens
gaggaacagaaaaaa

SEQ ID NO: 1291101 - DNA, 15 bp, Homo sapiens
agaggaacagaaaaa

SEQ ID NO: 1291102 - DNA, 15 bp, Homo sapiens
gagaggaacagaaaa

SEQ ID NO: 1291103 - DNA, 15 bp, Homo sapiens
ggagaggaacagaaa

SEQ ID NO: 1291104 - DNA, 15 bp, Homo sapiens
gggagaggaacagaa

SEQ ID NO: 1291105 - DNA, 15 bp, Homo sapiens
agggagaggaacaga

SEQ ID NO: 1291106 - DNA, 15 bp, Homo sapiens
gagggagaggaacag

SEQ ID NO: 1291107 - DNA, 15 bp, Homo sapiens
agagggagaggaaca

SEQ ID NO: 1291108 - DNA, 15 bp, Homo sapiens
aagagggagaggaac

SEQ ID NO: 1291109 - DNA, 15 bp, Homo sapiens
gaagagggagaggaa

SEQ ID NO: 1291110 - DNA, 15 bp, Homo sapiens
ggaagagggagagga

SEQ ID NO: 1291111 - DNA, 15 bp, Homo sapiens
gggaagagggagagg

SEQ ID NO: 1291112 - DNA, 15 bp, Homo sapiens
tgggaagagggagag

SEQ ID NO: 1291113 - DNA, 15 bp, Homo sapiens
gtgggaagagggaga

SEQ ID NO: 1291114 - DNA, 15 bp, Homo sapiens
agtgggaagagggag

SEQ ID NO: 1291115 - DNA, 15 bp, Homo sapiens
aagtgggaagaggga

SEQ ID NO: 1291116 - DNA, 15 bp, Homo sapiens
aaagtgggaagaggg

SEQ ID NO: 1291117 - DNA, 15 bp, Homo sapiens
gaaagtgggaagagg

SEQ ID NO: 1291118 - DNA, 15 bp, Homo sapiens
ggaaagtgggaagag

SEQ ID NO: 1291119 - DNA, 15 bp, Homo sapiens
tggaaagtgggaaga

SEQ ID NO: 1291120 - DNA, 15 bp, Homo sapiens
gtggaaagtgggaag

SEQ ID NO: 1291121 - DNA, 15 bp, Homo sapiens
ggtggaaagtgggaa

SEQ ID NO: 1291122 - DNA, 15 bp, Homo sapiens
aggtggaaagtggga

SEQ ID NO: 1291123 - DNA, 15 bp, Homo sapiens
aaggtggaaagtggg

SEQ ID NO: 1291124 - DNA, 15 bp, Homo sapiens
gaaggtggaaagtgg

SEQ ID NO: 1291125 - DNA, 15 bp, Homo sapiens
tgaaggtggaaagtg

SEQ ID NO: 1291126 - DNA, 15 bp, Homo sapiens
ttgaaggtggaaagt

SEQ ID NO: 1291127 - DNA, 15 bp, Homo sapiens
cttgaaggtggaaag

SEQ ID NO: 1291128 - DNA, 15 bp, Homo sapiens
acttgaaggtggaaa

SEQ ID NO: 1291129 - DNA, 15 bp, Homo sapiens
tacttgaaggtggaa

SEQ ID NO: 1291130 - DNA, 15 bp, Homo sapiens
ctacttgaaggtgga

SEQ ID NO: 1291131 - DNA, 15 bp, Homo sapiens
tctacttgaaggtgg

SEQ ID NO: 1291132 - DNA, 15 bp, Homo sapiens
gtctacttgaaggtg

SEQ ID NO: 1291133 - DNA, 15 bp, Homo sapiens
ggtctacttgaaggt

SEQ ID NO: 1291134 - DNA, 15 bp, Homo sapiens
gggtctacttgaagg

SEQ ID NO: 1291135 - DNA, 15 bp, Homo sapiens
ggggtctacttgaag

SEQ ID NO: 1291136 - DNA, 15 bp, Homo sapiens
tggggtctacttgaa

SEQ ID NO: 1291137 - DNA, 15 bp, Homo sapiens
ctggggtctacttga

SEQ ID NO: 1291138 - DNA, 15 bp, Homo sapiens
actggggtctacttg

SEQ ID NO: 1291139 - DNA, 15 bp, Homo sapiens
cactggggtctactt

SEQ ID NO: 1291140 - DNA, 15 bp, Homo sapiens
gcactggggtctact

SEQ ID NO: 1291141 - DNA, 15 bp, Homo sapiens
ggcactggggtctac

SEQ ID NO: 1291142 - DNA, 15 bp, Homo sapiens
aggcactggggtcta

SEQ ID NO: 1291143 - DNA, 15 bp, Homo sapiens
caggcactggggtct

SEQ ID NO: 1291144 - DNA, 15 bp, Homo sapiens
acaggcactggggtc

SEQ ID NO: 1291145 - DNA, 15 bp, Homo sapiens
aacaggcactggggt

SEQ ID NO: 1291146 - DNA, 15 bp, Homo sapiens
caacaggcactgggg

SEQ ID NO: 1291147 - DNA, 15 bp, Homo sapiens
acaacaggcactggg

SEQ ID NO: 1291148 - DNA, 15 bp, Homo sapiens
aacaacaggcactgg

SEQ ID NO: 1291149 - DNA, 15 bp, Homo sapiens
aaacaacaggcactg

SEQ ID NO: 1291150 - DNA, 15 bp, Homo sapiens
gaaacaacaggcact

SEQ ID NO: 1291151 - DNA, 15 bp, Homo sapiens
ggaaacaacaggcac

SEQ ID NO: 1291152 - DNA, 15 bp, Homo sapiens
tggaaacaacaggca

SEQ ID NO: 1291153 - DNA, 15 bp, Homo sapiens
atggaaacaacaggc

SEQ ID NO: 1291154 - DNA, 15 bp, Homo sapiens
gatggaaacaacagg

SEQ ID NO: 1291155 - DNA, 15 bp, Homo sapiens
agatggaaacaacag

SEQ ID NO: 1291156 - DNA, 15 bp, Homo sapiens
aagatggaaacaaca

SEQ ID NO: 1291157 - DNA, 15 bp, Homo sapiens
aaagatggaaacaac

SEQ ID NO: 1291158 - DNA, 15 bp, Homo sapiens
caaagatggaaacaa

SEQ ID NO: 1291159 - DNA, 15 bp, Homo sapiens
acaaagatggaaaca

SEQ ID NO: 1291160 - DNA, 15 bp, Homo sapiens
cacaaagatggaaac

SEQ ID NO: 1291161 - DNA, 15 bp, Homo sapiens
acacaaagatggaaa

SEQ ID NO: 1291162 - DNA, 15 bp, Homo sapiens
aacacaaagatggaa

SEQ ID NO: 1291163 - DNA, 15 bp, Homo sapiens
gaacacaaagatgga

SEQ ID NO: 1291164 - DNA, 15 bp, Homo sapiens
agaacacaaagatgg

SEQ ID NO: 1291165 - DNA, 15 bp, Homo sapiens
aagaacacaaagatg

SEQ ID NO: 1291166 - DNA, 15 bp, Homo sapiens
gaagaacacaaagat

SEQ ID NO: 1291167 - DNA, 15 bp, Homo sapiens
tgaagaacacaaaga

SEQ ID NO: 1291168 - DNA, 15 bp, Homo sapiens
ctgaagaacacaaag

SEQ ID NO: 1291169 - DNA, 15 bp, Homo sapiens
actgaagaacacaaa

SEQ ID NO: 1291170 - DNA, 15 bp, Homo sapiens
aactgaagaacacaa

SEQ ID NO: 1291171 - DNA, 15 bp, Homo sapiens
aaactgaagaacaca

SEQ ID NO: 1291172 - DNA, 15 bp, Homo sapiens
aaaactgaagaacac

SEQ ID NO: 1291173 - DNA, 15 bp, Homo sapiens
gaaaactgaagaaca

SEQ ID NO: 1291174 - DNA, 15 bp, Homo sapiens
tgaaaactgaagaac

SEQ ID NO: 1291175 - DNA, 15 bp, Homo sapiens
atgaaaactgaagaa

SEQ ID NO: 1291176 - DNA, 15 bp, Homo sapiens
gatgaaaactgaaga

SEQ ID NO: 1291177 - DNA, 15 bp, Homo sapiens
tgatgaaaactgaag

SEQ ID NO: 1291178 - DNA, 15 bp, Homo sapiens
atgatgaaaactgaa

SEQ ID NO: 1291179 - DNA, 15 bp, Homo sapiens
aatgatgaaaactga

SEQ ID NO: 1291180 - DNA, 15 bp, Homo sapiens
aaatgatgaaaactg

SEQ ID NO: 1291181 - DNA, 15 bp, Homo sapiens
taaatgatgaaaact

SEQ ID NO: 1291182 - DNA, 15 bp, Homo sapiens
ctaaatgatgaaaac

SEQ ID NO: 1291183 - DNA, 15 bp, Homo sapiens
gctaaatgatgaaaa

SEQ ID NO: 1291184 - DNA, 15 bp, Homo sapiens
agctaaatgatgaaa

SEQ ID NO: 1291185 - DNA, 15 bp, Homo sapiens
gagctaaatgatgaa

SEQ ID NO: 1291186 - DNA, 15 bp, Homo sapiens
ggagctaaatgatga

SEQ ID NO: 1291187 - DNA, 15 bp, Homo sapiens
gggagctaaatgatg

SEQ ID NO: 1291188 - DNA, 15 bp, Homo sapiens
tgggagctaaatgat

SEQ ID NO: 1291189 - DNA, 15 bp, Homo sapiens
gtgggagctaaatga

SEQ ID NO: 1291190 - DNA, 15 bp, Homo sapiens
agtgggagctaaatg

SEQ ID NO: 1291191 - DNA, 15 bp, Homo sapiens
aagtgggagctaaat

SEQ ID NO: 1291192 - DNA, 15 bp, Homo sapiens
cctcacttataagtg

SEQ ID NO: 1291193 - DNA, 15 bp, Homo sapiens
gcctcacttataagt

SEQ ID NO: 1291194 - DNA, 15 bp, Homo sapiens
ggcctcacttataag

SEQ ID NO: 1291195 - DNA, 15 bp, Homo sapiens
tggcctcacttataa

SEQ ID NO: 1291196 - DNA, 15 bp, Homo sapiens
atggcctcacttata

SEQ ID NO: 1291197 - DNA, 15 bp, Homo sapiens
catggcctcacttat

SEQ ID NO: 1291198 - DNA, 15 bp, Homo sapiens
gcatggcctcactta

SEQ ID NO: 1291199 - DNA, 15 bp, Homo sapiens
tgcatggcctcactt

SEQ ID NO: 1291200 - DNA, 15 bp, Homo sapiens
ctgcatggcctcact

SEQ ID NO: 1291201 - DNA, 15 bp, Homo sapiens
actgcatggcctcac

SEQ ID NO: 1291202 - DNA, 15 bp, Homo sapiens
tactgcatggcctca

SEQ ID NO: 1291203 - DNA, 15 bp, Homo sapiens
atactgcatggcctc

SEQ ID NO: 1291204 - DNA, 15 bp, Homo sapiens
aatactgcatggcct

SEQ ID NO: 1291205 - DNA, 15 bp, Homo sapiens
aaatactgcatggcc

SEQ ID NO: 1291206 - DNA, 15 bp, Homo sapiens
taaatactgcatggc

SEQ ID NO: 1291207 - DNA, 15 bp, Homo sapiens
ctaaatactgcatgg

SEQ ID NO: 1291208 - DNA, 15 bp, Homo sapiens
actaaatactgcatg

SEQ ID NO: 1291209 - DNA, 15 bp, Homo sapiens
aactaaatactgcat

SEQ ID NO: 1291210 - DNA, 15 bp, Homo sapiens
aaactaaatactgca

SEQ ID NO: 1291211 - DNA, 15 bp, Homo sapiens
aaaactaaatactgc

SEQ ID NO: 1291212 - DNA, 15 bp, Homo sapiens
aaaaactaaatactg

SEQ ID NO: 1291213 - DNA, 15 bp, Homo sapiens
aaaaaactaaatact

SEQ ID NO: 1291214 - DNA, 15 bp, Homo sapiens
taaaaaactaaatac

SEQ ID NO: 1291215 - DNA, 15 bp, Homo sapiens
ataaaaaactaaata

SEQ ID NO: 1291216 - DNA, 15 bp, Homo sapiens
aataaaaaactaaat

SEQ ID NO: 1291217 - DNA, 15 bp, Homo sapiens
gaataaaaaactaaa

SEQ ID NO: 1291218 - DNA, 15 bp, Homo sapiens
ggaataaaaaactaa

SEQ ID NO: 1291219 - DNA, 15 bp, Homo sapiens
aggaataaaaaacta

SEQ ID NO: 1291220 - DNA, 15 bp, Homo sapiens
caggaataaaaaact

SEQ ID NO: 1291221 - DNA, 15 bp, Homo sapiens
gcaggaataaaaaac

SEQ ID NO: 1291222 - DNA, 15 bp, Homo sapiens
tgcaggaataaaaaa

SEQ ID NO: 1291223 - DNA, 15 bp, Homo sapiens
atgcaggaataaaaa

SEQ ID NO: 1291224 - DNA, 15 bp, Homo sapiens
aatgcaggaataaaa

SEQ ID NO: 1291225 - DNA, 15 bp, Homo sapiens
taatgcaggaataaa

SEQ ID NO: 1291226 - DNA, 15 bp, Homo sapiens
ctaatgcaggaataa

SEQ ID NO: 1291227 - DNA, 15 bp, Homo sapiens
actaatgcaggaata

SEQ ID NO: 1291228 - DNA, 15 bp, Homo sapiens
aactaatgcaggaat

SEQ ID NO: 1291229 - DNA, 15 bp, Homo sapiens
aaactaatgcaggaa

SEQ ID NO: 1291230 - DNA, 15 bp, Homo sapiens
caaactaatgcagga

SEQ ID NO: 1291231 - DNA, 15 bp, Homo sapiens
gcaaactaatgcagg

SEQ ID NO: 1291232 - DNA, 15 bp, Homo sapiens
agcaaactaatgcag

SEQ ID NO: 1291233 - DNA, 15 bp, Homo sapiens
tagcaaactaatgca

SEQ ID NO: 1291234 - DNA, 15 bp, Homo sapiens
ttagcaaactaatgc

SEQ ID NO: 1291235 - DNA, 15 bp, Homo sapiens
cttagcaaactaatg

SEQ ID NO: 1291236 - DNA, 15 bp, Homo sapiens
ccttagcaaactaat

SEQ ID NO: 1291237 - DNA, 15 bp, Homo sapiens
tattatccttagcaa

SEQ ID NO: 1291238 - DNA, 15 bp, Homo sapiens
ctattatccttagca

SEQ ID NO: 1291239 - DNA, 15 bp, Homo sapiens
gctattatccttagc

SEQ ID NO: 1291240 - DNA, 15 bp, Homo sapiens
ggctattatccttag

SEQ ID NO: 1291241 - DNA, 15 bp, Homo sapiens
aggctattatcctta

SEQ ID NO: 1291242 - DNA, 15 bp, Homo sapiens
gaggctattatcctt

SEQ ID NO: 1291243 - DNA, 15 bp, Homo sapiens
ggaggctattatcct

SEQ ID NO: 1291244 - DNA, 15 bp, Homo sapiens
tggaggctattatcc

SEQ ID NO: 1291245 - DNA, 15 bp, Homo sapiens
ctggaggctattatc

SEQ ID NO: 1291246 - DNA, 15 bp, Homo sapiens
gctggaggctattat

SEQ ID NO: 1291247 - DNA, 15 bp, Homo sapiens
agctggaggctatta

SEQ ID NO: 1291248 - DNA, 15 bp, Homo sapiens
gagctggaggctatt

SEQ ID NO: 1291249 - DNA, 15 bp, Homo sapiens
ggagctggaggctat

SEQ ID NO: 1291250 - DNA, 15 bp, Homo sapiens
tggagctggaggcta

SEQ ID NO: 1291251 - DNA, 15 bp, Homo sapiens
atggagctggaggct

SEQ ID NO: 1291252 - DNA, 15 bp, Homo sapiens
gatggagctggaggc

SEQ ID NO: 1291253 - DNA, 15 bp, Homo sapiens
ggatggagctggagg

SEQ ID NO: 1291254 - DNA, 15 bp, Homo sapiens
tggatggagctggag

SEQ ID NO: 1291255 - DNA, 15 bp, Homo sapiens
atggatggagctgga

SEQ ID NO: 1291256 - DNA, 15 bp, Homo sapiens
catggatggagctgg

SEQ ID NO: 1291257 - DNA, 15 bp, Homo sapiens
acatggatggagctg

SEQ ID NO: 1291258 - DNA, 15 bp, Homo sapiens
aacatggatggagct

SEQ ID NO: 1291259 - DNA, 15 bp, Homo sapiens
acaggaacatggatg

SEQ ID NO: 1291260 - DNA, 15 bp, Homo sapiens
cacaggaacatggat

SEQ ID NO: 1291261 - DNA, 15 bp, Homo sapiens
tcacaggaacatgga

SEQ ID NO: 1291262 - DNA, 15 bp, Homo sapiens
ttcacaggaacatgg

SEQ ID NO: 1291263 - DNA, 15 bp, Homo sapiens
cttcacaggaacatg

SEQ ID NO: 1291264 - DNA, 15 bp, Homo sapiens
ccttcacaggaacat

SEQ ID NO: 1291265 - DNA, 15 bp, Homo sapiens
tccttcacaggaaca

SEQ ID NO: 1291266 - DNA, 15 bp, Homo sapiens
gtccttcacaggaac

SEQ ID NO: 1291267 - DNA, 15 bp, Homo sapiens
tgtccttcacaggaa

SEQ ID NO: 1291268 - DNA, 15 bp, Homo sapiens
atgtccttcacagga

SEQ ID NO: 1291269 - DNA, 15 bp, Homo sapiens
catgtccttcacagg

SEQ ID NO: 1291270 - DNA, 15 bp, Homo sapiens
tcatgtccttcacag

SEQ ID NO: 1291271 - DNA, 15 bp, Homo sapiens
atcatgtccttcaca

SEQ ID NO: 1291272 - DNA, 15 bp, Homo sapiens
gatcatgtccttcac

SEQ ID NO: 1291273 - DNA, 15 bp, Homo sapiens
agatcatgtccttca

SEQ ID NO: 1291274 - DNA, 15 bp, Homo sapiens
gagatcatgtccttc

SEQ ID NO: 1291275 - DNA, 15 bp, Homo sapiens
agaatgagatcatgt

SEQ ID NO: 1291276 - DNA, 15 bp, Homo sapiens
aagaatgagatcatg

SEQ ID NO: 1291277 - DNA, 15 bp, Homo sapiens
aaagaatgagatcat

SEQ ID NO: 1291278 - DNA, 15 bp, Homo sapiens
aaaagaatgagatca

SEQ ID NO: 1291279 - DNA, 15 bp, Homo sapiens
aaaaagaatgagatc

SEQ ID NO: 1291280 - DNA, 15 bp, Homo sapiens
aaaaaagaatgagat

SEQ ID NO: 1291281 - DNA, 15 bp, Homo sapiens
cccataaaaaagaat

SEQ ID NO: 1291282 - DNA, 15 bp, Homo sapiens
gcccataaaaaagaa

SEQ ID NO: 1291283 - DNA, 15 bp, Homo sapiens
agcccataaaaaaga

SEQ ID NO: 1291284 - DNA, 15 bp, Homo sapiens
cagcccataaaaaag

SEQ ID NO: 1291285 - DNA, 15 bp, Homo sapiens
gcagcccataaaaaa

SEQ ID NO: 1291286 - DNA, 15 bp, Homo sapiens
tgcagcccataaaaa

SEQ ID NO: 1291287 - DNA, 15 bp, Homo sapiens
atgcagcccataaaa

SEQ ID NO: 1291288 - DNA, 15 bp, Homo sapiens
tatgcagcccataaa

SEQ ID NO: 1291289 - DNA, 15 bp, Homo sapiens
ctatgcagcccataa

SEQ ID NO: 1291290 - DNA, 15 bp, Homo sapiens
tctatgcagcccata

SEQ ID NO: 1291291 - DNA, 15 bp, Homo sapiens
ttctatgcagcccat

SEQ ID NO: 1291292 - DNA, 15 bp, Homo sapiens
attctatgcagccca

SEQ ID NO: 1291293 - DNA, 15 bp, Homo sapiens
aattctatgcagccc

SEQ ID NO: 1291294 - DNA, 15 bp, Homo sapiens
gaattctatgcagcc

SEQ ID NO: 1291295 - DNA, 15 bp, Homo sapiens
ggaattctatgcagc

SEQ ID NO: 1291296 - DNA, 15 bp, Homo sapiens
tggaattctatgcag

SEQ ID NO: 1291297 - DNA, 15 bp, Homo sapiens
atggaattctatgca

SEQ ID NO: 1291298 - DNA, 15 bp, Homo sapiens
catggaattctatgc

SEQ ID NO: 1291299 - DNA, 15 bp, Homo sapiens
ccatggaattctatg

SEQ ID NO: 1291300 - DNA, 15 bp, Homo sapiens
accatggaattctat

SEQ ID NO: 1291301 - DNA, 15 bp, Homo sapiens
taccatggaattcta

SEQ ID NO: 1291302 - DNA, 15 bp, Homo sapiens
ataccatggaattct

SEQ ID NO: 1291303 - DNA, 15 bp, Homo sapiens
tataccatggaattc

SEQ ID NO: 1291304 - DNA, 15 bp, Homo sapiens
atataccatggaatt

SEQ ID NO: 1291305 - DNA, 15 bp, Homo sapiens
tatataccatggaat

SEQ ID NO: 1291306 - DNA, 15 bp, Homo sapiens
atatataccatggaa

SEQ ID NO: 1291307 - DNA, 15 bp, Homo sapiens
catatataccatgga

SEQ ID NO: 1291308 - DNA, 15 bp, Homo sapiens
acatatataccatgg

SEQ ID NO: 1291309 - DNA, 15 bp, Homo sapiens
tacatatataccatg

SEQ ID NO: 1291310 - DNA, 15 bp, Homo sapiens
gtacatatataccat

SEQ ID NO: 1291311 - DNA, 15 bp, Homo sapiens
ggtacatatatacca

SEQ ID NO: 1291312 - DNA, 15 bp, Homo sapiens
tggtacatatatacc

SEQ ID NO: 1291313 - DNA, 15 bp, Homo sapiens
gtggtacatatatac

SEQ ID NO: 1291314 - DNA, 15 bp, Homo sapiens
tgtggtacatatata

SEQ ID NO: 1291315 - DNA, 15 bp, Homo sapiens
atgtggtacatatat

SEQ ID NO: 1291316 - DNA, 15 bp, Homo sapiens
gaatggataaagaaa

SEQ ID NO: 1291317 - DNA, 15 bp, Homo sapiens
agaatggataaagaa

SEQ ID NO: 1291318 - DNA, 15 bp, Homo sapiens
cagaatggataaaga

SEQ ID NO: 1291319 - DNA, 15 bp, Homo sapiens
acagaatggataaag

SEQ ID NO: 1291320 - DNA, 15 bp, Homo sapiens
gacagaatggataaa

SEQ ID NO: 1291321 - DNA, 15 bp, Homo sapiens
tgacagaatggataa

SEQ ID NO: 1291322 - DNA, 15 bp, Homo sapiens
atgacagaatggata

SEQ ID NO: 1291323 - DNA, 15 bp, Homo sapiens
aatgacagaatggat

SEQ ID NO: 1291324 - DNA, 15 bp, Homo sapiens
caatgacagaatgga

SEQ ID NO: 1291325 - DNA, 15 bp, Homo sapiens
tcaatgacagaatgg

SEQ ID NO: 1291326 - DNA, 15 bp, Homo sapiens
atcaatgacagaatg

SEQ ID NO: 1291327 - DNA, 15 bp, Homo sapiens
catcaatgacagaat

SEQ ID NO: 1291328 - DNA, 15 bp, Homo sapiens
tcatcaatgacagaa

SEQ ID NO: 1291329 - DNA, 15 bp, Homo sapiens
ctcatcaatgacaga

SEQ ID NO: 1291330 - DNA, 15 bp, Homo sapiens
gctcatcaatgacag

SEQ ID NO: 1291331 - DNA, 15 bp, Homo sapiens
tgctcatcaatgaca

SEQ ID NO: 1291332 - DNA, 15 bp, Homo sapiens
atgctcatcaatgac

SEQ ID NO: 1291333 - DNA, 15 bp, Homo sapiens
aatgctcatcaatga

SEQ ID NO: 1291334 - DNA, 15 bp, Homo sapiens
aaatgctcatcaatg

SEQ ID NO: 1291335 - DNA, 15 bp, Homo sapiens
taaatgctcatcaat

SEQ ID NO: 1291336 - DNA, 15 bp, Homo sapiens
ctaaatgctcatcaa

SEQ ID NO: 1291337 - DNA, 15 bp, Homo sapiens
cctaaatgctcatca

SEQ ID NO: 1291338 - DNA, 15 bp, Homo sapiens
acctaaatgctcatc

SEQ ID NO: 1291339 - DNA, 15 bp, Homo sapiens
aacctaaatgctcat

SEQ ID NO: 1291340 - DNA, 15 bp, Homo sapiens
caacctaaatgctca

SEQ ID NO: 1291341 - DNA, 15 bp, Homo sapiens
tcaacctaaatgctc

SEQ ID NO: 1291342 - DNA, 15 bp, Homo sapiens
atcaacctaaatgct

SEQ ID NO: 1291343 - DNA, 15 bp, Homo sapiens
catcaacctaaatgc

SEQ ID NO: 1291344 - DNA, 15 bp, Homo sapiens
gcatcaacctaaatg

SEQ ID NO: 1291345 - DNA, 15 bp, Homo sapiens
ggcatcaacctaaat

SEQ ID NO: 1291346 - DNA, 15 bp, Homo sapiens
tggcatcaacctaaa

SEQ ID NO: 1291347 - DNA, 15 bp, Homo sapiens
atggcatcaacctaa

SEQ ID NO: 1291348 - DNA, 15 bp, Homo sapiens
catggcatcaaccta

SEQ ID NO: 1291349 - DNA, 15 bp, Homo sapiens
acatggcatcaacct

SEQ ID NO: 1291350 - DNA, 15 bp, Homo sapiens
gacatggcatcaacc

SEQ ID NO: 1291351 - DNA, 15 bp, Homo sapiens
agacatggcatcaac

SEQ ID NO: 1291352 - DNA, 15 bp, Homo sapiens
aagacatggcatcaa

SEQ ID NO: 1291353 - DNA, 15 bp, Homo sapiens
aaagacatggcatca

SEQ ID NO: 1291354 - DNA, 15 bp, Homo sapiens
caaagacatggcatc

SEQ ID NO: 1291355 - DNA, 15 bp, Homo sapiens
gcaaagacatggcat

SEQ ID NO: 1291356 - DNA, 15 bp, Homo sapiens
agcaaagacatggca

SEQ ID NO: 1291357 - DNA, 15 bp, Homo sapiens
aagcaaagacatggc

SEQ ID NO: 1291358 - DNA, 15 bp, Homo sapiens
aaagcaaagacatgg

SEQ ID NO: 1291359 - DNA, 15 bp, Homo sapiens
aaaagcaaagacatg

SEQ ID NO: 1291360 - DNA, 15 bp, Homo sapiens
caaaagcaaagacat

SEQ ID NO: 1291361 - DNA, 15 bp, Homo sapiens
acaaaagcaaagaca

SEQ ID NO: 1291362 - DNA, 15 bp, Homo sapiens
cacaaaagcaaagac

SEQ ID NO: 1291363 - DNA, 15 bp, Homo sapiens
ccacaaaagcaaaga

SEQ ID NO: 1291364 - DNA, 15 bp, Homo sapiens
tccacaaaagcaaag

SEQ ID NO: 1291365 - DNA, 15 bp, Homo sapiens
atccacaaaagcaaa

SEQ ID NO: 1291366 - DNA, 15 bp, Homo sapiens
tatccacaaaagcaa

SEQ ID NO: 1291367 - DNA, 15 bp, Homo sapiens
ctatccacaaaagca

SEQ ID NO: 1291368 - DNA, 15 bp, Homo sapiens
actatccacaaaagc

SEQ ID NO: 1291369 - DNA, 15 bp, Homo sapiens
cactatccacaaaag

SEQ ID NO: 1291370 - DNA, 15 bp, Homo sapiens
gcactatccacaaaa

SEQ ID NO: 1291371 - DNA, 15 bp, Homo sapiens
agcactatccacaaa

SEQ ID NO: 1291372 - DNA, 15 bp, Homo sapiens
cagcactatccacaa

SEQ ID NO: 1291373 - DNA, 15 bp, Homo sapiens
gcagcactatccaca

SEQ ID NO: 1291374 - DNA, 15 bp, Homo sapiens
tgcagcactatccac

SEQ ID NO: 1291375 - DNA, 15 bp, Homo sapiens
ctgcagcactatcca

SEQ ID NO: 1291376 - DNA, 15 bp, Homo sapiens
actgcagcactatcc

SEQ ID NO: 1291377 - DNA, 15 bp, Homo sapiens
cactgcagcactatc

SEQ ID NO: 1291378 - DNA, 15 bp, Homo sapiens
tcactgcagcactat

SEQ ID NO: 1291379 - DNA, 15 bp, Homo sapiens
ttcactgcagcacta

SEQ ID NO: 1291380 - DNA, 15 bp, Homo sapiens
gttcactgcagcact

SEQ ID NO: 1291381 - DNA, 15 bp, Homo sapiens
tgttcactgcagcac

SEQ ID NO: 1291382 - DNA, 15 bp, Homo sapiens
atgttcactgcagca

SEQ ID NO: 1291383 - DNA, 15 bp, Homo sapiens
aatgttcactgcagc

SEQ ID NO: 1291384 - DNA, 15 bp, Homo sapiens
gaatgttcactgcag

SEQ ID NO: 1291385 - DNA, 15 bp, Homo sapiens
tgaatgttcactgca

SEQ ID NO: 1291386 - DNA, 15 bp, Homo sapiens
gtgaatgttcactgc

SEQ ID NO: 1291387 - DNA, 15 bp, Homo sapiens
cgtgaatgttcactg

SEQ ID NO: 1291388 - DNA, 15 bp, Homo sapiens
acgtgaatgttcact

SEQ ID NO: 1291389 - DNA, 15 bp, Homo sapiens
cacgtgaatgttcac

SEQ ID NO: 1291390 - DNA, 15 bp, Homo sapiens
gcacgtgaatgttca

SEQ ID NO: 1291391 - DNA, 15 bp, Homo sapiens
agcacgtgaatgttc

SEQ ID NO: 1291392 - DNA, 15 bp, Homo sapiens
aagcacgtgaatgtt

SEQ ID NO: 1291393 - DNA, 15 bp, Homo sapiens
aaagcacgtgaatgt

SEQ ID NO: 1291394 - DNA, 15 bp, Homo sapiens
aaaagcacgtgaatg

SEQ ID NO: 1291395 - DNA, 15 bp, Homo sapiens
caaaagcacgtgaat

SEQ ID NO: 1291396 - DNA, 15 bp, Homo sapiens
acaaaagcacgtgaa

SEQ ID NO: 1291397 - DNA, 15 bp, Homo sapiens
gacaaaagcacgtga

SEQ ID NO: 1291398 - DNA, 15 bp, Homo sapiens
agacaaaagcacgtg

SEQ ID NO: 1291399 - DNA, 15 bp, Homo sapiens
aagacaaaagcacgt

SEQ ID NO: 1291400 - DNA, 15 bp, Homo sapiens
aaagacaaaagcacg

SEQ ID NO: 1291401 - DNA, 15 bp, Homo sapiens
taaagacaaaagcac

SEQ ID NO: 1291402 - DNA, 15 bp, Homo sapiens
ataaagacaaaagca

SEQ ID NO: 1291403 - DNA, 15 bp, Homo sapiens
cataaagacaaaagc

SEQ ID NO: 1291404 - DNA, 15 bp, Homo sapiens
ccataaagacaaaag

SEQ ID NO: 1291405 - DNA, 15 bp, Homo sapiens
accataaagacaaaa

SEQ ID NO: 1291406 - DNA, 15 bp, Homo sapiens
taccataaagacaaa

SEQ ID NO: 1291407 - DNA, 15 bp, Homo sapiens
ctaccataaagacaa

SEQ ID NO: 1291408 - DNA, 15 bp, Homo sapiens
tctaccataaagaca

SEQ ID NO: 1291409 - DNA, 15 bp, Homo sapiens
ttctaccataaagac

SEQ ID NO: 1291410 - DNA, 15 bp, Homo sapiens
attctaccataaaga

SEQ ID NO: 1291411 - DNA, 15 bp, Homo sapiens
cattctaccataaag

SEQ ID NO: 1291412 - DNA, 15 bp, Homo sapiens
tcattctaccataaa

SEQ ID NO: 1291413 - DNA, 15 bp, Homo sapiens
atcattctaccataa

SEQ ID NO: 1291414 - DNA, 15 bp, Homo sapiens
aatcattctaccata

SEQ ID NO: 1291415 - DNA, 15 bp, Homo sapiens
aaatcattctaccat

SEQ ID NO: 1291416 - DNA, 15 bp, Homo sapiens
gaaatcattctacca

SEQ ID NO: 1291417 - DNA, 15 bp, Homo sapiens
agaaatcattctacc

SEQ ID NO: 1291418 - DNA, 15 bp, Homo sapiens
tagaaatcattctac

SEQ ID NO: 1291419 - DNA, 15 bp, Homo sapiens
atagaaatcattcta

SEQ ID NO: 1291420 - DNA, 15 bp, Homo sapiens
aatagaaatcattct

SEQ ID NO: 1291421 - DNA, 15 bp, Homo sapiens
gaatagaaatcattc

SEQ ID NO: 1291422 - DNA, 15 bp, Homo sapiens
ggaatagaaatcatt

SEQ ID NO: 1291423 - DNA, 15 bp, Homo sapiens
aggaatagaaatcat

SEQ ID NO: 1291424 - DNA, 15 bp, Homo sapiens
aaggaatagaaatca

SEQ ID NO: 1291425 - DNA, 15 bp, Homo sapiens
aaaggaatagaaatc

SEQ ID NO: 1291426 - DNA, 15 bp, Homo sapiens
caaaggaatagaaat

SEQ ID NO: 1291427 - DNA, 15 bp, Homo sapiens
tcaaaggaatagaaa

SEQ ID NO: 1291428 - DNA, 15 bp, Homo sapiens
ctcaaaggaatagaa

SEQ ID NO: 1291429 - DNA, 15 bp, Homo sapiens
actcaaaggaataga

SEQ ID NO: 1291430 - DNA, 15 bp, Homo sapiens
tactcaaaggaatag

SEQ ID NO: 1291431 - DNA, 15 bp, Homo sapiens
atactcaaaggaata

SEQ ID NO: 1291432 - DNA, 15 bp, Homo sapiens
catactcaaaggaat

SEQ ID NO: 1291433 - DNA, 15 bp, Homo sapiens
acatactcaaaggaa

SEQ ID NO: 1291434 - DNA, 15 bp, Homo sapiens
tacatactcaaagga

SEQ ID NO: 1291435 - DNA, 15 bp, Homo sapiens
gtacatactcaaagg

SEQ ID NO: 1291436 - DNA, 15 bp, Homo sapiens
agtacatactcaaag

SEQ ID NO: 1291437 - DNA, 15 bp, Homo sapiens
gagtacatactcaaa

SEQ ID NO: 1291438 - DNA, 15 bp, Homo sapiens
tgagtacatactcaa

SEQ ID NO: 1291439 - DNA, 15 bp, Homo sapiens
ctgagtacatactca

SEQ ID NO: 1291440 - DNA, 15 bp, Homo sapiens
actgagtacatactc

SEQ ID NO: 1291441 - DNA, 15 bp, Homo sapiens
tactgagtacatact

SEQ ID NO: 1291442 - DNA, 15 bp, Homo sapiens
ttactgagtacatac

SEQ ID NO: 1291443 - DNA, 15 bp, Homo sapiens
attactgagtacata

SEQ ID NO: 1291444 - DNA, 15 bp, Homo sapiens
cattactgagtacat

SEQ ID NO: 1291445 - DNA, 15 bp, Homo sapiens
ccattactgagtaca

SEQ ID NO: 1291446 - DNA, 15 bp, Homo sapiens
cccattactgagtac

SEQ ID NO: 1291447 - DNA, 15 bp, Homo sapiens
tcccattactgagta

SEQ ID NO: 1291448 - DNA, 15 bp, Homo sapiens
atcccattactgagt

SEQ ID NO: 1291449 - DNA, 15 bp, Homo sapiens
aatcccattactgag

SEQ ID NO: 1291450 - DNA, 15 bp, Homo sapiens
caatcccattactga

SEQ ID NO: 1291451 - DNA, 15 bp, Homo sapiens
gcaatcccattactg

SEQ ID NO: 1291452 - DNA, 15 bp, Homo sapiens
agcaatcccattact

SEQ ID NO: 1291453 - DNA, 15 bp, Homo sapiens
cagcaatcccattac

SEQ ID NO: 1291454 - DNA, 15 bp, Homo sapiens
ccagcaatcccatta

SEQ ID NO: 1291455 - DNA, 15 bp, Homo sapiens
cccagcaatcccatt

SEQ ID NO: 1291456 - DNA, 15 bp, Homo sapiens
acccagcaatcccat

SEQ ID NO: 1291457 - DNA, 15 bp, Homo sapiens
gacccagcaatccca

SEQ ID NO: 1291458 - DNA, 15 bp, Homo sapiens
ggacccagcaatccc

SEQ ID NO: 1291459 - DNA, 15 bp, Homo sapiens
tggacccagcaatcc

SEQ ID NO: 1291460 - DNA, 15 bp, Homo sapiens
ttggacccagcaatc

SEQ ID NO: 1291461 - DNA, 15 bp, Homo sapiens
cttggacccagcaat

SEQ ID NO: 1291462 - DNA, 15 bp, Homo sapiens
ccttggacccagcaa

SEQ ID NO: 1291463 - DNA, 15 bp, Homo sapiens
cccttggacccagca

SEQ ID NO: 1291464 - DNA, 15 bp, Homo sapiens
acccttggacccagc

SEQ ID NO: 1291465 - DNA, 15 bp, Homo sapiens
tacccttggacccag

SEQ ID NO: 1291466 - DNA, 15 bp, Homo sapiens
ctacccttggaccca

SEQ ID NO: 1291467 - DNA, 15 bp, Homo sapiens
actacccttggaccc

SEQ ID NO: 1291468 - DNA, 15 bp, Homo sapiens
aactacccttggacc

SEQ ID NO: 1291469 - DNA, 15 bp, Homo sapiens
gaactacccttggac

SEQ ID NO: 1291470 - DNA, 15 bp, Homo sapiens
agaactacccttgga

SEQ ID NO: 1291471 - DNA, 15 bp, Homo sapiens
cagaactacccttgg

SEQ ID NO: 1291472 - DNA, 15 bp, Homo sapiens
gcagaactacccttg

SEQ ID NO: 1291473 - DNA, 15 bp, Homo sapiens
agcagaactaccctt

SEQ ID NO: 1291474 - DNA, 15 bp, Homo sapiens
aagcagaactaccct

SEQ ID NO: 1291475 - DNA, 15 bp, Homo sapiens
aaagcagaactaccc

SEQ ID NO: 1291476 - DNA, 15 bp, Homo sapiens
aaaagcagaactacc

SEQ ID NO: 1291477 - DNA, 15 bp, Homo sapiens
taaaagcagaactac

SEQ ID NO: 1291478 - DNA, 15 bp, Homo sapiens
ctaaaagcagaacta

SEQ ID NO: 1291479 - DNA, 15 bp, Homo sapiens
gctaaaagcagaact

SEQ ID NO: 1291480 - DNA, 15 bp, Homo sapiens
agctaaaagcagaac

SEQ ID NO: 1291481 - DNA, 15 bp, Homo sapiens
gagctaaaagcagaa

SEQ ID NO: 1291482 - DNA, 15 bp, Homo sapiens
agagctaaaagcaga

SEQ ID NO: 1291483 - DNA, 15 bp, Homo sapiens
aagagctaaaagcag

SEQ ID NO: 1291484 - DNA, 15 bp, Homo sapiens
aaagagctaaaagca

SEQ ID NO: 1291485 - DNA, 15 bp, Homo sapiens
caaagagctaaaagc

SEQ ID NO: 1291486 - DNA, 15 bp, Homo sapiens
gcaaagagctaaaag

SEQ ID NO: 1291487 - DNA, 15 bp, Homo sapiens
cgcaaagagctaaaa

SEQ ID NO: 1291488 - DNA, 15 bp, Homo sapiens
ccgcaaagagctaaa

SEQ ID NO: 1291489 - DNA, 15 bp, Homo sapiens
tccgcaaagagctaa

SEQ ID NO: 1291490 - DNA, 15 bp, Homo sapiens
ttccgcaaagagcta

SEQ ID NO: 1291491 - DNA, 15 bp, Homo sapiens
attccgcaaagagct

SEQ ID NO: 1291492 - DNA, 15 bp, Homo sapiens
aattccgcaaagagc

SEQ ID NO: 1291493 - DNA, 15 bp, Homo sapiens
caattccgcaaagag

SEQ ID NO: 1291494 - DNA, 15 bp, Homo sapiens
acaattccgcaaaga

SEQ ID NO: 1291495 - DNA, 15 bp, Homo sapiens
gacaattccgcaaag

SEQ ID NO: 1291496 - DNA, 15 bp, Homo sapiens
tgacaattccgcaaa

SEQ ID NO: 1291497 - DNA, 15 bp, Homo sapiens
ctgacaattccgcaa

SEQ ID NO: 1291498 - DNA, 15 bp, Homo sapiens
tctgacaattccgca

SEQ ID NO: 1291499 - DNA, 15 bp, Homo sapiens
gtctgacaattccgc

SEQ ID NO: 1291500 - DNA, 15 bp, Homo sapiens
agtctgacaattccg

SEQ ID NO: 1291501 - DNA, 15 bp, Homo sapiens
cagtctgacaattcc

SEQ ID NO: 1291502 - DNA, 15 bp, Homo sapiens
gcagtctgacaattc

SEQ ID NO: 1291503 - DNA, 15 bp, Homo sapiens
agcagtctgacaatt

SEQ ID NO: 1291504 - DNA, 15 bp, Homo sapiens
aagcagtctgacaat

SEQ ID NO: 1291505 - DNA, 15 bp, Homo sapiens
aaagcagtctgacaa

SEQ ID NO: 1291506 - DNA, 15 bp, Homo sapiens
gaaagcagtctgaca

SEQ ID NO: 1291507 - DNA, 15 bp, Homo sapiens
agaaagcagtctgac

SEQ ID NO: 1291508 - DNA, 15 bp, Homo sapiens
tagaaagcagtctga

SEQ ID NO: 1291509 - DNA, 15 bp, Homo sapiens
gtagaaagcagtctg

SEQ ID NO: 1291510 - DNA, 15 bp, Homo sapiens
tgtagaaagcagtct

SEQ ID NO: 1291511 - DNA, 15 bp, Homo sapiens
ttgtagaaagcagtc

SEQ ID NO: 1291512 - DNA, 15 bp, Homo sapiens
attgtagaaagcagt

SEQ ID NO: 1291513 - DNA, 15 bp, Homo sapiens
cattgtagaaagcag

SEQ ID NO: 1291514 - DNA, 15 bp, Homo sapiens
acattgtagaaagca

SEQ ID NO: 1291515 - DNA, 15 bp, Homo sapiens
aacattgtagaaagc

SEQ ID NO: 1291516 - DNA, 15 bp, Homo sapiens
aaacattgtagaaag

SEQ ID NO: 1291517 - DNA, 15 bp, Homo sapiens
caaacattgtagaaa

SEQ ID NO: 1291518 - DNA, 15 bp, Homo sapiens
tcaaacattgtagaa

SEQ ID NO: 1291519 - DNA, 15 bp, Homo sapiens
ttcaaacattgtaga

SEQ ID NO: 1291520 - DNA, 15 bp, Homo sapiens
gttcaaacattgtag

SEQ ID NO: 1291521 - DNA, 15 bp, Homo sapiens
agttcaaacattgta

SEQ ID NO: 1291522 - DNA, 15 bp, Homo sapiens
tagttcaaacattgt

SEQ ID NO: 1291523 - DNA, 15 bp, Homo sapiens
ttagttcaaacattg

SEQ ID NO: 1291524 - DNA, 15 bp, Homo sapiens
attagttcaaacatt

SEQ ID NO: 1291525 - DNA, 15 bp, Homo sapiens
aattagttcaaacat

SEQ ID NO: 1291526 - DNA, 15 bp, Homo sapiens
aaattagttcaaaca

SEQ ID NO: 1291527 - DNA, 15 bp, Homo sapiens
taaattagttcaaac

SEQ ID NO: 1291528 - DNA, 15 bp, Homo sapiens
gtaaattagttcaaa

SEQ ID NO: 1291529 - DNA, 15 bp, Homo sapiens
tgtaaattagttcaa

SEQ ID NO: 1291530 - DNA, 15 bp, Homo sapiens
gtgtaaattagttca

SEQ ID NO: 1291531 - DNA, 15 bp, Homo sapiens
agtgtaaattagttc

SEQ ID NO: 1291532 - DNA, 15 bp, Homo sapiens
gagtgtaaattagtt

SEQ ID NO: 1291533 - DNA, 15 bp, Homo sapiens
ggagtgtaaattagt

SEQ ID NO: 1291534 - DNA, 15 bp, Homo sapiens
gggagtgtaaattag

SEQ ID NO: 1291535 - DNA, 15 bp, Homo sapiens
tgggagtgtaaatta

SEQ ID NO: 1291536 - DNA, 15 bp, Homo sapiens
ttgggagtgtaaatt

SEQ ID NO: 1291537 - DNA, 15 bp, Homo sapiens
gttgggagtgtaaat

SEQ ID NO: 1291538 - DNA, 15 bp, Homo sapiens
ggttgggagtgtaaa

SEQ ID NO: 1291539 - DNA, 15 bp, Homo sapiens
tggttgggagtgtaa

SEQ ID NO: 1291540 - DNA, 15 bp, Homo sapiens
ttggttgggagtgta

SEQ ID NO: 1291541 - DNA, 15 bp, Homo sapiens
cttggttgggagtgt

SEQ ID NO: 1291542 - DNA, 15 bp, Homo sapiens
tcttggttgggagtg

SEQ ID NO: 1291543 - DNA, 15 bp, Homo sapiens
ctcttggttgggagt

SEQ ID NO: 1291544 - DNA, 15 bp, Homo sapiens
actcttggttgggag

SEQ ID NO: 1291545 - DNA, 15 bp, Homo sapiens
cactcttggttggga

SEQ ID NO: 1291546 - DNA, 15 bp, Homo sapiens
acactcttggttggg

SEQ ID NO: 1291547 - DNA, 15 bp, Homo sapiens
tacactcttggttgg

SEQ ID NO: 1291548 - DNA, 15 bp, Homo sapiens
atacactcttggttg

SEQ ID NO: 1291549 - DNA, 15 bp, Homo sapiens
tatacactcttggtt

SEQ ID NO: 1291550 - DNA, 15 bp, Homo sapiens
ttatacactcttggt

SEQ ID NO: 1291551 - DNA, 15 bp, Homo sapiens
cttatacactcttgg

SEQ ID NO: 1291552 - DNA, 15 bp, Homo sapiens
acttatacactcttg

SEQ ID NO: 1291553 - DNA, 15 bp, Homo sapiens
cacttatacactctt

SEQ ID NO: 1291554 - DNA, 15 bp, Homo sapiens
acacttatacactct

SEQ ID NO: 1291555 - DNA, 15 bp, Homo sapiens
aacacttatacactc

SEQ ID NO: 1291556 - DNA, 15 bp, Homo sapiens
gaacacttatacact

SEQ ID NO: 1291557 - DNA, 15 bp, Homo sapiens
agaacacttatacac

SEQ ID NO: 1291558 - DNA, 15 bp, Homo sapiens
gagaacacttataca

SEQ ID NO: 1291559 - DNA, 15 bp, Homo sapiens
agagaacacttatac

SEQ ID NO: 1291560 - DNA, 15 bp, Homo sapiens
aagagaacacttata

SEQ ID NO: 1291561 - DNA, 15 bp, Homo sapiens
aaagagaacacttat

SEQ ID NO: 1291562 - DNA, 15 bp, Homo sapiens
aaaagagaacactta

SEQ ID NO: 1291563 - DNA, 15 bp, Homo sapiens
gaaaagagaacactt

SEQ ID NO: 1291564 - DNA, 15 bp, Homo sapiens
agaaaagagaacact

SEQ ID NO: 1291565 - DNA, 15 bp, Homo sapiens
aagaaaagagaacac

SEQ ID NO: 1291566 - DNA, 15 bp, Homo sapiens
aaagaaaagagaaca

SEQ ID NO: 1291567 - DNA, 15 bp, Homo sapiens
aaaagaaaagagaac

SEQ ID NO: 1291568 - DNA, 15 bp, Homo sapiens
caaaagaaaagagaa

SEQ ID NO: 1291569 - DNA, 15 bp, Homo sapiens
gcaaaagaaaagaga

SEQ ID NO: 1291570 - DNA, 15 bp, Homo sapiens
tgcaaaagaaaagag

SEQ ID NO: 1291571 - DNA, 15 bp, Homo sapiens
ttgcaaaagaaaaga

SEQ ID NO: 1291572 - DNA, 15 bp, Homo sapiens
gttgcaaaagaaaag

SEQ ID NO: 1291573 - DNA, 15 bp, Homo sapiens
ggttgcaaaagaaaa

SEQ ID NO: 1291574 - DNA, 15 bp, Homo sapiens
aggttgcaaaagaaa

SEQ ID NO: 1291575 - DNA, 15 bp, Homo sapiens
gaggttgcaaaagaa

SEQ ID NO: 1291576 - DNA, 15 bp, Homo sapiens
tgaggttgcaaaaga

SEQ ID NO: 1291577 - DNA, 15 bp, Homo sapiens
gtgaggttgcaaaag

SEQ ID NO: 1291578 - DNA, 15 bp, Homo sapiens
ggtgaggttgcaaaa

SEQ ID NO: 1291579 - DNA, 15 bp, Homo sapiens
tggtgaggttgcaaa

SEQ ID NO: 1291580 - DNA, 15 bp, Homo sapiens
ctggtgaggttgcaa

SEQ ID NO: 1291581 - DNA, 15 bp, Homo sapiens
actggtgaggttgca

SEQ ID NO: 1291582 - DNA, 15 bp, Homo sapiens
tactggtgaggttgc

SEQ ID NO: 1291583 - DNA, 15 bp, Homo sapiens
atactggtgaggttg

SEQ ID NO: 1291584 - DNA, 15 bp, Homo sapiens
gatactggtgaggtt

SEQ ID NO: 1291585 - DNA, 15 bp, Homo sapiens
agatactggtgaggt

SEQ ID NO: 1291586 - DNA, 15 bp, Homo sapiens
cagatactggtgagg

SEQ ID NO: 1291587 - DNA, 15 bp, Homo sapiens
acagatactggtgag

SEQ ID NO: 1291588 - DNA, 15 bp, Homo sapiens
aacagatactggtga

SEQ ID NO: 1291589 - DNA, 15 bp, Homo sapiens
taacagatactggtg

SEQ ID NO: 1291590 - DNA, 15 bp, Homo sapiens
ataacagatactggt

SEQ ID NO: 1291591 - DNA, 15 bp, Homo sapiens
aataacagatactgg

SEQ ID NO: 1291592 - DNA, 15 bp, Homo sapiens
aaataacagatactg

SEQ ID NO: 1291593 - DNA, 15 bp, Homo sapiens
aaaataacagatact

SEQ ID NO: 1291594 - DNA, 15 bp, Homo sapiens
aaaaataacagatac

SEQ ID NO: 1291595 - DNA, 15 bp, Homo sapiens
aaaaaataacagata

SEQ ID NO: 1291596 - DNA, 15 bp, Homo sapiens
caaaaaataacagat

SEQ ID NO: 1291597 - DNA, 15 bp, Homo sapiens
tcaaaaaataacaga

SEQ ID NO: 1291598 - DNA, 15 bp, Homo sapiens
gtcaaaaaataacag

SEQ ID NO: 1291599 - DNA, 15 bp, Homo sapiens
agtcaaaaaataaca

SEQ ID NO: 1291600 - DNA, 15 bp, Homo sapiens
aagtcaaaaaataac

SEQ ID NO: 1291601 - DNA, 15 bp, Homo sapiens
aaagtcaaaaaataa

SEQ ID NO: 1291602 - DNA, 15 bp, Homo sapiens
taaagtcaaaaaata

SEQ ID NO: 1291603 - DNA, 15 bp, Homo sapiens
ataaagtcaaaaaat

SEQ ID NO: 1291604 - DNA, 15 bp, Homo sapiens
tataaagtcaaaaaa

SEQ ID NO: 1291605 - DNA, 15 bp, Homo sapiens
ctataaagtcaaaaa

SEQ ID NO: 1291606 - DNA, 15 bp, Homo sapiens
actataaagtcaaaa

SEQ ID NO: 1291607 - DNA, 15 bp, Homo sapiens
tactataaagtcaaa

SEQ ID NO: 1291608 - DNA, 15 bp, Homo sapiens
ttactataaagtcaa

SEQ ID NO: 1291609 - DNA, 15 bp, Homo sapiens
gttactataaagtca

SEQ ID NO: 1291610 - DNA, 15 bp, Homo sapiens
tgttactataaagtc

SEQ ID NO: 1291611 - DNA, 15 bp, Homo sapiens
ctgttactataaagt

SEQ ID NO: 1291612 - DNA, 15 bp, Homo sapiens
gctgttactataaag

SEQ ID NO: 1291613 - DNA, 15 bp, Homo sapiens
agctgttactataaa

SEQ ID NO: 1291614 - DNA, 15 bp, Homo sapiens
tagctgttactataa

SEQ ID NO: 1291615 - DNA, 15 bp, Homo sapiens
atagctgttactata

SEQ ID NO: 1291616 - DNA, 15 bp, Homo sapiens
aatagctgttactat

SEQ ID NO: 1291617 - DNA, 15 bp, Homo sapiens
gaatagctgttacta

SEQ ID NO: 1291618 - DNA, 15 bp, Homo sapiens
agaatagctgttact

SEQ ID NO: 1291619 - DNA, 15 bp, Homo sapiens
cagaatagctgttac

SEQ ID NO: 1291620 - DNA, 15 bp, Homo sapiens
tcagaatagctgtta

SEQ ID NO: 1291621 - DNA, 15 bp, Homo sapiens
gtcagaatagctgtt

SEQ ID NO: 1291622 - DNA, 15 bp, Homo sapiens
agtcagaatagctgt

SEQ ID NO: 1291623 - DNA, 15 bp, Homo sapiens
cagtcagaatagctg

SEQ ID NO: 1291624 - DNA, 15 bp, Homo sapiens
ccagtcagaatagct

SEQ ID NO: 1291625 - DNA, 15 bp, Homo sapiens
accagtcagaatagc

SEQ ID NO: 1291626 - DNA, 15 bp, Homo sapiens
caccagtcagaatag

SEQ ID NO: 1291627 - DNA, 15 bp, Homo sapiens
acaccagtcagaata

SEQ ID NO: 1291628 - DNA, 15 bp, Homo sapiens
cacaccagtcagaat

SEQ ID NO: 1291629 - DNA, 15 bp, Homo sapiens
tcacaccagtcagaa

SEQ ID NO: 1291630 - DNA, 15 bp, Homo sapiens
ctcacaccagtcaga

SEQ ID NO: 1291631 - DNA, 15 bp, Homo sapiens
tctcacaccagtcag

SEQ ID NO: 1291632 - DNA, 15 bp, Homo sapiens
atctcacaccagtca

SEQ ID NO: 1291633 - DNA, 15 bp, Homo sapiens
catctcacaccagtc

SEQ ID NO: 1291634 - DNA, 15 bp, Homo sapiens
tcatctcacaccagt

SEQ ID NO: 1291635 - DNA, 15 bp, Homo sapiens
atcatctcacaccag

SEQ ID NO: 1291636 - DNA, 15 bp, Homo sapiens
tatcatctcacacca

SEQ ID NO: 1291637 - DNA, 15 bp, Homo sapiens
atatcatctcacacc

SEQ ID NO: 1291638 - DNA, 15 bp, Homo sapiens
gatatcatctcacac

SEQ ID NO: 1291639 - DNA, 15 bp, Homo sapiens
agatatcatctcaca

SEQ ID NO: 1291640 - DNA, 15 bp, Homo sapiens
gagatatcatctcac

SEQ ID NO: 1291641 - DNA, 15 bp, Homo sapiens
tgagatatcatctca

SEQ ID NO: 1291642 - DNA, 15 bp, Homo sapiens
atgagatatcatctc

SEQ ID NO: 1291643 - DNA, 15 bp, Homo sapiens
aatgagatatcatct

SEQ ID NO: 1291644 - DNA, 15 bp, Homo sapiens
caatgagatatcatc

SEQ ID NO: 1291645 - DNA, 15 bp, Homo sapiens
acaatgagatatcat

SEQ ID NO: 1291646 - DNA, 15 bp, Homo sapiens
cacaatgagatatca

SEQ ID NO: 1291647 - DNA, 15 bp, Homo sapiens
ccacaatgagatatc

SEQ ID NO: 1291648 - DNA, 15 bp, Homo sapiens
accacaatgagatat

SEQ ID NO: 1291649 - DNA, 15 bp, Homo sapiens
gaaatgcaaatcaaa

SEQ ID NO: 1291650 - DNA, 15 bp, Homo sapiens
agaaatgcaaatcaa

SEQ ID NO: 1291651 - DNA, 15 bp, Homo sapiens
gagaaatgcaaatca

SEQ ID NO: 1291652 - DNA, 15 bp, Homo sapiens
agagaaatgcaaatc

SEQ ID NO: 1291653 - DNA, 15 bp, Homo sapiens
tagagaaatgcaaat

SEQ ID NO: 1291654 - DNA, 15 bp, Homo sapiens
ttagagaaatgcaaa

SEQ ID NO: 1291655 - DNA, 15 bp, Homo sapiens
attagagaaatgcaa

SEQ ID NO: 1291656 - DNA, 15 bp, Homo sapiens
cattagagaaatgca

SEQ ID NO: 1291657 - DNA, 15 bp, Homo sapiens
tcattagagaaatgc

SEQ ID NO: 1291658 - DNA, 15 bp, Homo sapiens
atcattagagaaatg

SEQ ID NO: 1291659 - DNA, 15 bp, Homo sapiens
gatcattagagaaat

SEQ ID NO: 1291660 - DNA, 15 bp, Homo sapiens
tgatcattagagaaa

SEQ ID NO: 1291661 - DNA, 15 bp, Homo sapiens
ctgatcattagagaa

SEQ ID NO: 1291662 - DNA, 15 bp, Homo sapiens
actgatcattagaga

SEQ ID NO: 1291663 - DNA, 15 bp, Homo sapiens
cactgatcattagag

SEQ ID NO: 1291664 - DNA, 15 bp, Homo sapiens
tcactgatcattaga

SEQ ID NO: 1291665 - DNA, 15 bp, Homo sapiens
atcactgatcattag

SEQ ID NO: 1291666 - DNA, 15 bp, Homo sapiens
tatcactgatcatta

SEQ ID NO: 1291667 - DNA, 15 bp, Homo sapiens
atatcactgatcatt

SEQ ID NO: 1291668 - DNA, 15 bp, Homo sapiens
catatcactgatcat

SEQ ID NO: 1291669 - DNA, 15 bp, Homo sapiens
ccatatcactgatca

SEQ ID NO: 1291670 - DNA, 15 bp, Homo sapiens
tccatatcactgatc

SEQ ID NO: 1291671 - DNA, 15 bp, Homo sapiens
ctccatatcactgat

SEQ ID NO: 1291672 - DNA, 15 bp, Homo sapiens
gctccatatcactga

SEQ ID NO: 1291673 - DNA, 15 bp, Homo sapiens
agctccatatcactg

SEQ ID NO: 1291674 - DNA, 15 bp, Homo sapiens
aagctccatatcact

SEQ ID NO: 1291675 - DNA, 15 bp, Homo sapiens
aaagctccatatcac

SEQ ID NO: 1291676 - DNA, 15 bp, Homo sapiens
aaaagctccatatca

SEQ ID NO: 1291677 - DNA, 15 bp, Homo sapiens
aaaaagctccatatc

SEQ ID NO: 1291678 - DNA, 15 bp, Homo sapiens
aaaaaagctccatat

SEQ ID NO: 1291679 - DNA, 15 bp, Homo sapiens
aaaaaaagctccata

SEQ ID NO: 1291680 - DNA, 15 bp, Homo sapiens
aaaaaaaagctccat

SEQ ID NO: 1291681 - DNA, 15 bp, Homo sapiens
gaaaaaaaagctcca

SEQ ID NO: 1291682 - DNA, 15 bp, Homo sapiens
tgaaaaaaaagctcc

SEQ ID NO: 1291683 - DNA, 15 bp, Homo sapiens
atgaaaaaaaagctc

SEQ ID NO: 1291684 - DNA, 15 bp, Homo sapiens
tatgaaaaaaaagct

SEQ ID NO: 1291685 - DNA, 15 bp, Homo sapiens
atatgaaaaaaaagc

SEQ ID NO: 1291686 - DNA, 15 bp, Homo sapiens
catatgaaaaaaaag

SEQ ID NO: 1291687 - DNA, 15 bp, Homo sapiens
gcatatgaaaaaaaa

SEQ ID NO: 1291688 - DNA, 15 bp, Homo sapiens
agcatatgaaaaaaa

SEQ ID NO: 1291689 - DNA, 15 bp, Homo sapiens
aagcatatgaaaaaa

SEQ ID NO: 1291690 - DNA, 15 bp, Homo sapiens
taagcatatgaaaaa

SEQ ID NO: 1291691 - DNA, 15 bp, Homo sapiens
ataagcatatgaaaa

SEQ ID NO: 1291692 - DNA, 15 bp, Homo sapiens
aataagcatatgaaa

SEQ ID NO: 1291693 - DNA, 15 bp, Homo sapiens
caataagcatatgaa

SEQ ID NO: 1291694 - DNA, 15 bp, Homo sapiens
ccaataagcatatga

SEQ ID NO: 1291695 - DNA, 15 bp, Homo sapiens
gccaataagcatatg

SEQ ID NO: 1291696 - DNA, 15 bp, Homo sapiens
agccaataagcatat

SEQ ID NO: 1291697 - DNA, 15 bp, Homo sapiens
cagccaataagcata

SEQ ID NO: 1291698 - DNA, 15 bp, Homo sapiens
gcagccaataagcat

SEQ ID NO: 1291699 - DNA, 15 bp, Homo sapiens
tgcagccaataagca

SEQ ID NO: 1291700 - DNA, 15 bp, Homo sapiens
atgcagccaataagc

SEQ ID NO: 1291701 - DNA, 15 bp, Homo sapiens
catgcagccaataag

SEQ ID NO: 1291702 - DNA, 15 bp, Homo sapiens
acatgcagccaataa

SEQ ID NO: 1291703 - DNA, 15 bp, Homo sapiens
tacatgcagccaata

SEQ ID NO: 1291704 - DNA, 15 bp, Homo sapiens
atacatgcagccaat

SEQ ID NO: 1291705 - DNA, 15 bp, Homo sapiens
catacatgcagccaa

SEQ ID NO: 1291706 - DNA, 15 bp, Homo sapiens
acatacatgcagcca

SEQ ID NO: 1291707 - DNA, 15 bp, Homo sapiens
gacatacatgcagcc

SEQ ID NO: 1291708 - DNA, 15 bp, Homo sapiens
agacatacatgcagc

SEQ ID NO: 1291709 - DNA, 15 bp, Homo sapiens
aagacatacatgcag

SEQ ID NO: 1291710 - DNA, 15 bp, Homo sapiens
gaagacatacatgca

SEQ ID NO: 1291711 - DNA, 15 bp, Homo sapiens
aagaagacatacatg

SEQ ID NO: 1291712 - DNA, 15 bp, Homo sapiens
aaagaagacatacat

SEQ ID NO: 1291713 - DNA, 15 bp, Homo sapiens
aaaagaagacataca

SEQ ID NO: 1291714 - DNA, 15 bp, Homo sapiens
caaaagaagacatac

SEQ ID NO: 1291715 - DNA, 15 bp, Homo sapiens
tcaaaagaagacata

SEQ ID NO: 1291716 - DNA, 15 bp, Homo sapiens
ttcaaaagaagacat

SEQ ID NO: 1291717 - DNA, 15 bp, Homo sapiens
tttcaaaagaagaca

SEQ ID NO: 1291718 - DNA, 15 bp, Homo sapiens
ttttcaaaagaagac

SEQ ID NO: 1291719 - DNA, 15 bp, Homo sapiens
cttttcaaaagaaga

SEQ ID NO: 1291720 - DNA, 15 bp, Homo sapiens
acttttcaaaagaag

SEQ ID NO: 1291721 - DNA, 15 bp, Homo sapiens
cacttttcaaaagaa

SEQ ID NO: 1291722 - DNA, 15 bp, Homo sapiens
acacttttcaaaaga

SEQ ID NO: 1291723 - DNA, 15 bp, Homo sapiens
gacacttttcaaaag

SEQ ID NO: 1291724 - DNA, 15 bp, Homo sapiens
agacacttttcaaaa

SEQ ID NO: 1291725 - DNA, 15 bp, Homo sapiens
cagacacttttcaaa

SEQ ID NO: 1291726 - DNA, 15 bp, Homo sapiens
acagacacttttcaa

SEQ ID NO: 1291727 - DNA, 15 bp, Homo sapiens
aacagacacttttca

SEQ ID NO: 1291728 - DNA, 15 bp, Homo sapiens
gaacagacacttttc

SEQ ID NO: 1291729 - DNA, 15 bp, Homo sapiens
tgaacagacactttt

SEQ ID NO: 1291730 - DNA, 15 bp, Homo sapiens
atgaacagacacttt

SEQ ID NO: 1291731 - DNA, 15 bp, Homo sapiens
catgaacagacactt

SEQ ID NO: 1291732 - DNA, 15 bp, Homo sapiens
acatgaacagacact

SEQ ID NO: 1291733 - DNA, 15 bp, Homo sapiens
cacatgaacagacac

SEQ ID NO: 1291734 - DNA, 15 bp, Homo sapiens
gcacatgaacagaca

SEQ ID NO: 1291735 - DNA, 15 bp, Homo sapiens
ggcacatgaacagac

SEQ ID NO: 1291736 - DNA, 15 bp, Homo sapiens
aggcacatgaacaga

SEQ ID NO: 1291737 - DNA, 15 bp, Homo sapiens
aaggcacatgaacag

SEQ ID NO: 1291738 - DNA, 15 bp, Homo sapiens
caaggcacatgaaca

SEQ ID NO: 1291739 - DNA, 15 bp, Homo sapiens
gcaaggcacatgaac

SEQ ID NO: 1291740 - DNA, 15 bp, Homo sapiens
ggcaaggcacatgaa

SEQ ID NO: 1291741 - DNA, 15 bp, Homo sapiens
gggcaaggcacatga

SEQ ID NO: 1291742 - DNA, 15 bp, Homo sapiens
tgggcaaggcacatg

SEQ ID NO: 1291743 - DNA, 15 bp, Homo sapiens
gtgggcaaggcacat

SEQ ID NO: 1291744 - DNA, 15 bp, Homo sapiens
agtgggcaaggcaca

SEQ ID NO: 1291745 - DNA, 15 bp, Homo sapiens
aagtgggcaaggcac

SEQ ID NO: 1291746 - DNA, 15 bp, Homo sapiens
aaagtgggcaaggca

SEQ ID NO: 1291747 - DNA, 15 bp, Homo sapiens
aaaagtgggcaaggc

SEQ ID NO: 1291748 - DNA, 15 bp, Homo sapiens
aaaaagtgggcaagg

SEQ ID NO: 1291749 - DNA, 15 bp, Homo sapiens
taaaaagtgggcaag

SEQ ID NO: 1291750 - DNA, 15 bp, Homo sapiens
ctaaaaagtgggcaa

SEQ ID NO: 1291751 - DNA, 15 bp, Homo sapiens
actaaaaagtgggca

SEQ ID NO: 1291752 - DNA, 15 bp, Homo sapiens
cactaaaaagtgggc

SEQ ID NO: 1291753 - DNA, 15 bp, Homo sapiens
ccactaaaaagtggg

SEQ ID NO: 1291754 - DNA, 15 bp, Homo sapiens
cccactaaaaagtgg

SEQ ID NO: 1291755 - DNA, 15 bp, Homo sapiens
ccccactaaaaagtg

SEQ ID NO: 1291756 - DNA, 15 bp, Homo sapiens
accccactaaaaagt

SEQ ID NO: 1291757 - DNA, 15 bp, Homo sapiens
aaccccactaaaaag

SEQ ID NO: 1291758 - DNA, 15 bp, Homo sapiens
caaccccactaaaaa

SEQ ID NO: 1291759 - DNA, 15 bp, Homo sapiens
ccaaccccactaaaa

SEQ ID NO: 1291760 - DNA, 15 bp, Homo sapiens
accaaccccactaaa

SEQ ID NO: 1291761 - DNA, 15 bp, Homo sapiens
aaccaaccccactaa

SEQ ID NO: 1291762 - DNA, 15 bp, Homo sapiens
aaaccaaccccacta

SEQ ID NO: 1291763 - DNA, 15 bp, Homo sapiens
aaaaccaaccccact

SEQ ID NO: 1291764 - DNA, 15 bp, Homo sapiens
aaaaaccaaccccac

SEQ ID NO: 1291765 - DNA, 15 bp, Homo sapiens
aaaaaaccaacccca

SEQ ID NO: 1291766 - DNA, 15 bp, Homo sapiens
aaaaaaaccaacccc

SEQ ID NO: 1291767 - DNA, 15 bp, Homo sapiens
aaaaaaaaccaaccc

SEQ ID NO: 1291768 - DNA, 15 bp, Homo sapiens
gaaaaaaaaccaacc

SEQ ID NO: 1291769 - DNA, 15 bp, Homo sapiens
agaaaaaaaaccaac

SEQ ID NO: 1291770 - DNA, 15 bp, Homo sapiens
gagaaaaaaaaccaa

SEQ ID NO: 1291771 - DNA, 15 bp, Homo sapiens
agagaaaaaaaacca

SEQ ID NO: 1291772 - DNA, 15 bp, Homo sapiens
aagagaaaaaaaacc

SEQ ID NO: 1291773 - DNA, 15 bp, Homo sapiens
caagagaaaaaaaac

SEQ ID NO: 1291774 - DNA, 15 bp, Homo sapiens
gcaagagaaaaaaaa

SEQ ID NO: 1291775 - DNA, 15 bp, Homo sapiens
tgcaagagaaaaaaa

SEQ ID NO: 1291776 - DNA, 15 bp, Homo sapiens
ttgcaagagaaaaaa

SEQ ID NO: 1291777 - DNA, 15 bp, Homo sapiens
tttgcaagagaaaaa

SEQ ID NO: 1291778 - DNA, 15 bp, Homo sapiens
atttgcaagagaaaa

SEQ ID NO: 1291779 - DNA, 15 bp, Homo sapiens
aatttgcaagagaaa

SEQ ID NO: 1291780 - DNA, 15 bp, Homo sapiens
aaatttgcaagagaa

SEQ ID NO: 1291781 - DNA, 15 bp, Homo sapiens
caaatttgcaagaga

SEQ ID NO: 1291782 - DNA, 15 bp, Homo sapiens
acaaatttgcaagag

SEQ ID NO: 1291783 - DNA, 15 bp, Homo sapiens
gacaaatttgcaaga

SEQ ID NO: 1291784 - DNA, 15 bp, Homo sapiens
agacaaatttgcaag

SEQ ID NO: 1291785 - DNA, 15 bp, Homo sapiens
tagacaaatttgcaa

SEQ ID NO: 1291786 - DNA, 15 bp, Homo sapiens
ttagacaaatttgca

SEQ ID NO: 1291787 - DNA, 15 bp, Homo sapiens
tttagacaaatttgc

SEQ ID NO: 1291788 - DNA, 15 bp, Homo sapiens
atttagacaaatttg

SEQ ID NO: 1291789 - DNA, 15 bp, Homo sapiens
aatttagacaaattt

SEQ ID NO: 1291790 - DNA, 15 bp, Homo sapiens
gaatttagacaaatt

SEQ ID NO: 1291791 - DNA, 15 bp, Homo sapiens
ggaatttagacaaat

SEQ ID NO: 1291792 - DNA, 15 bp, Homo sapiens
aggaatttagacaaa

SEQ ID NO: 1291793 - DNA, 15 bp, Homo sapiens
aaggaatttagacaa

SEQ ID NO: 1291794 - DNA, 15 bp, Homo sapiens
taaggaatttagaca

SEQ ID NO: 1291795 - DNA, 15 bp, Homo sapiens
ataaggaatttagac

SEQ ID NO: 1291796 - DNA, 15 bp, Homo sapiens
tataaggaatttaga

SEQ ID NO: 1291797 - DNA, 15 bp, Homo sapiens
ttataaggaatttag

SEQ ID NO: 1291798 - DNA, 15 bp, Homo sapiens
tttataaggaattta

SEQ ID NO: 1291799 - DNA, 15 bp, Homo sapiens
atttataaggaattt

SEQ ID NO: 1291800 - DNA, 15 bp, Homo sapiens
catttataaggaatt

SEQ ID NO: 1291801 - DNA, 15 bp, Homo sapiens
gcatttataaggaat

SEQ ID NO: 1291802 - DNA, 15 bp, Homo sapiens
agcatttataaggaa

SEQ ID NO: 1291803 - DNA, 15 bp, Homo sapiens
cagcatttataagga

SEQ ID NO: 1291804 - DNA, 15 bp, Homo sapiens
ccagcatttataagg

SEQ ID NO: 1291805 - DNA, 15 bp, Homo sapiens
tccagcatttataag

SEQ ID NO: 1291806 - DNA, 15 bp, Homo sapiens
atccagcatttataa

SEQ ID NO: 1291807 - DNA, 15 bp, Homo sapiens
tatccagcatttata

SEQ ID NO: 1291808 - DNA, 15 bp, Homo sapiens
atatccagcatttat

SEQ ID NO: 1291809 - DNA, 15 bp, Homo sapiens
aatatccagcattta

SEQ ID NO: 1291810 - DNA, 15 bp, Homo sapiens
taatatccagcattt

SEQ ID NO: 1291811 - DNA, 15 bp, Homo sapiens
ttaatatccagcatt

SEQ ID NO: 1291812 - DNA, 15 bp, Homo sapiens
tttaatatccagcat

SEQ ID NO: 1291813 - DNA, 15 bp, Homo sapiens
gtttaatatccagca

SEQ ID NO: 1291814 - DNA, 15 bp, Homo sapiens
ggtttaatatccagc

SEQ ID NO: 1291815 - DNA, 15 bp, Homo sapiens
aggtttaatatccag

SEQ ID NO: 1291816 - DNA, 15 bp, Homo sapiens
aaggtttaatatcca

SEQ ID NO: 1291817 - DNA, 15 bp, Homo sapiens
aaaggtttaatatcc

SEQ ID NO: 1291818 - DNA, 15 bp, Homo sapiens
caaaggtttaatatc

SEQ ID NO: 1291819 - DNA, 15 bp, Homo sapiens
acaaaggtttaatat

SEQ ID NO: 1291820 - DNA, 15 bp, Homo sapiens
gacaaaggtttaata

SEQ ID NO: 1291821 - DNA, 15 bp, Homo sapiens
tgacaaaggtttaat

SEQ ID NO: 1291822 - DNA, 15 bp, Homo sapiens
ctgacaaaggtttaa

SEQ ID NO: 1291823 - DNA, 15 bp, Homo sapiens
tctgacaaaggttta

SEQ ID NO: 1291824 - DNA, 15 bp, Homo sapiens
atctgacaaaggttt

SEQ ID NO: 1291825 - DNA, 15 bp, Homo sapiens
catctgacaaaggtt

SEQ ID NO: 1291826 - DNA, 15 bp, Homo sapiens
gcatctgacaaaggt

SEQ ID NO: 1291827 - DNA, 15 bp, Homo sapiens
tgcatctgacaaagg

SEQ ID NO: 1291828 - DNA, 15 bp, Homo sapiens
atgcatctgacaaag

SEQ ID NO: 1291829 - DNA, 15 bp, Homo sapiens
tatgcatctgacaaa

SEQ ID NO: 1291830 - DNA, 15 bp, Homo sapiens
ctatgcatctgacaa

SEQ ID NO: 1291831 - DNA, 15 bp, Homo sapiens
actatgcatctgaca

SEQ ID NO: 1291832 - DNA, 15 bp, Homo sapiens
aactatgcatctgac

SEQ ID NO: 1291833 - DNA, 15 bp, Homo sapiens
aaactatgcatctga

SEQ ID NO: 1291834 - DNA, 15 bp, Homo sapiens
caaactatgcatctg

SEQ ID NO: 1291835 - DNA, 15 bp, Homo sapiens
gcaaactatgcatct

SEQ ID NO: 1291836 - DNA, 15 bp, Homo sapiens
tgcaaactatgcatc

SEQ ID NO: 1291837 - DNA, 15 bp, Homo sapiens
ttgcaaactatgcat

SEQ ID NO: 1291838 - DNA, 15 bp, Homo sapiens
tttgcaaactatgca

SEQ ID NO: 1291839 - DNA, 15 bp, Homo sapiens
ttttgcaaactatgc

SEQ ID NO: 1291840 - DNA, 15 bp, Homo sapiens
attttgcaaactatg

SEQ ID NO: 1291841 - DNA, 15 bp, Homo sapiens
aattttgcaaactat

SEQ ID NO: 1291842 - DNA, 15 bp, Homo sapiens
aaattttgcaaacta

SEQ ID NO: 1291843 - DNA, 15 bp, Homo sapiens
aaaattttgcaaact

SEQ ID NO: 1291844 - DNA, 15 bp, Homo sapiens
aaaaattttgcaaac

SEQ ID NO: 1291845 - DNA, 15 bp, Homo sapiens
gaaaaattttgcaaa

SEQ ID NO: 1291846 - DNA, 15 bp, Homo sapiens
ggaaaaattttgcaa

SEQ ID NO: 1291847 - DNA, 15 bp, Homo sapiens
gggaaaaattttgca

SEQ ID NO: 1291848 - DNA, 15 bp, Homo sapiens
ggggaaaaattttgc

SEQ ID NO: 1291849 - DNA, 15 bp, Homo sapiens
tggggaaaaattttg

SEQ ID NO: 1291850 - DNA, 15 bp, Homo sapiens
atggggaaaaatttt

SEQ ID NO: 1291851 - DNA, 15 bp, Homo sapiens
aatggggaaaaattt

SEQ ID NO: 1291852 - DNA, 15 bp, Homo sapiens
gaatggggaaaaatt

SEQ ID NO: 1291853 - DNA, 15 bp, Homo sapiens
agaatggggaaaaat

SEQ ID NO: 1291854 - DNA, 15 bp, Homo sapiens
cagaatggggaaaaa

SEQ ID NO: 1291855 - DNA, 15 bp, Homo sapiens
acagaatggggaaaa

SEQ ID NO: 1291856 - DNA, 15 bp, Homo sapiens
tacagaatggggaaa

SEQ ID NO: 1291857 - DNA, 15 bp, Homo sapiens
ctacagaatggggaa

SEQ ID NO: 1291858 - DNA, 15 bp, Homo sapiens
cctacagaatgggga

SEQ ID NO: 1291859 - DNA, 15 bp, Homo sapiens
acctacagaatgggg

SEQ ID NO: 1291860 - DNA, 15 bp, Homo sapiens
aacctacagaatggg

SEQ ID NO: 1291861 - DNA, 15 bp, Homo sapiens
caacctacagaatgg

SEQ ID NO: 1291862 - DNA, 15 bp, Homo sapiens
acaacctacagaatg

SEQ ID NO: 1291863 - DNA, 15 bp, Homo sapiens
aacaacctacagaat

SEQ ID NO: 1291864 - DNA, 15 bp, Homo sapiens
gaacaacctacagaa

SEQ ID NO: 1291865 - DNA, 15 bp, Homo sapiens
tgaacaacctacaga

SEQ ID NO: 1291866 - DNA, 15 bp, Homo sapiens
atgaacaacctacag

SEQ ID NO: 1291867 - DNA, 15 bp, Homo sapiens
aatgaacaacctaca

SEQ ID NO: 1291868 - DNA, 15 bp, Homo sapiens
aaatgaacaacctac

SEQ ID NO: 1291869 - DNA, 15 bp, Homo sapiens
taaatgaacaaccta

SEQ ID NO: 1291870 - DNA, 15 bp, Homo sapiens
gtaaatgaacaacct

SEQ ID NO: 1291871 - DNA, 15 bp, Homo sapiens
agtaaatgaacaacc

SEQ ID NO: 1291872 - DNA, 15 bp, Homo sapiens
gagtaaatgaacaac

SEQ ID NO: 1291873 - DNA, 15 bp, Homo sapiens
agagtaaatgaacaa

SEQ ID NO: 1291874 - DNA, 15 bp, Homo sapiens
cagagtaaatgaaca

SEQ ID NO: 1291875 - DNA, 15 bp, Homo sapiens
acagagtaaatgaac

SEQ ID NO: 1291876 - DNA, 15 bp, Homo sapiens
aacagagtaaatgaa

SEQ ID NO: 1291877 - DNA, 15 bp, Homo sapiens
caacagagtaaatga

SEQ ID NO: 1291878 - DNA, 15 bp, Homo sapiens
tcaacagagtaaatg

SEQ ID NO: 1291879 - DNA, 15 bp, Homo sapiens
atcaacagagtaaat

SEQ ID NO: 1291880 - DNA, 15 bp, Homo sapiens
aatcaacagagtaaa

SEQ ID NO: 1291881 - DNA, 15 bp, Homo sapiens
caatcaacagagtaa

SEQ ID NO: 1291882 - DNA, 15 bp, Homo sapiens
acaatcaacagagta

SEQ ID NO: 1291883 - DNA, 15 bp, Homo sapiens
aacaatcaacagagt

SEQ ID NO: 1291884 - DNA, 15 bp, Homo sapiens
aaacaatcaacagag

SEQ ID NO: 1291885 - DNA, 15 bp, Homo sapiens
gaaacaatcaacaga

SEQ ID NO: 1291886 - DNA, 15 bp, Homo sapiens
agaaacaatcaacag

SEQ ID NO: 1291887 - DNA, 15 bp, Homo sapiens
aagaaacaatcaaca

SEQ ID NO: 1291888 - DNA, 15 bp, Homo sapiens
aaagaaacaatcaac

SEQ ID NO: 1291889 - DNA, 15 bp, Homo sapiens
aaaagaaacaatcaa

SEQ ID NO: 1291890 - DNA, 15 bp, Homo sapiens
caaaagaaacaatca

SEQ ID NO: 1291891 - DNA, 15 bp, Homo sapiens
gcaaaagaaacaatc

SEQ ID NO: 1291892 - DNA, 15 bp, Homo sapiens
agcaaaagaaacaat

SEQ ID NO: 1291893 - DNA, 15 bp, Homo sapiens
cagcaaaagaaacaa

SEQ ID NO: 1291894 - DNA, 15 bp, Homo sapiens
acagcaaaagaaaca

SEQ ID NO: 1291895 - DNA, 15 bp, Homo sapiens
cacagcaaaagaaac

SEQ ID NO: 1291896 - DNA, 15 bp, Homo sapiens
gcacagcaaaagaaa

SEQ ID NO: 1291897 - DNA, 15 bp, Homo sapiens
tgcacagcaaaagaa

SEQ ID NO: 1291898 - DNA, 15 bp, Homo sapiens
ctgcacagcaaaaga

SEQ ID NO: 1291899 - DNA, 15 bp, Homo sapiens
tctgcacagcaaaag

SEQ ID NO: 1291900 - DNA, 15 bp, Homo sapiens
ttctgcacagcaaaa

SEQ ID NO: 1291901 - DNA, 15 bp, Homo sapiens
cttctgcacagcaaa

SEQ ID NO: 1291902 - DNA, 15 bp, Homo sapiens
gcttctgcacagcaa

SEQ ID NO: 1291903 - DNA, 15 bp, Homo sapiens
agcttctgcacagca

SEQ ID NO: 1291904 - DNA, 15 bp, Homo sapiens
gagcttctgcacagc

SEQ ID NO: 1291905 - DNA, 15 bp, Homo sapiens
agagcttctgcacag

SEQ ID NO: 1291906 - DNA, 15 bp, Homo sapiens
aagagcttctgcaca

SEQ ID NO: 1291907 - DNA, 15 bp, Homo sapiens
caagagcttctgcac

SEQ ID NO: 1291908 - DNA, 15 bp, Homo sapiens
tcaagagcttctgca

SEQ ID NO: 1291909 - DNA, 15 bp, Homo sapiens
ctcaagagcttctgc

SEQ ID NO: 1291910 - DNA, 15 bp, Homo sapiens
actcaagagcttctg

SEQ ID NO: 1291911 - DNA, 15 bp, Homo sapiens
aactcaagagcttct

SEQ ID NO: 1291912 - DNA, 15 bp, Homo sapiens
aaactcaagagcttc

SEQ ID NO: 1291913 - DNA, 15 bp, Homo sapiens
taaactcaagagctt

SEQ ID NO: 1291914 - DNA, 15 bp, Homo sapiens
ttaaactcaagagct

SEQ ID NO: 1291915 - DNA, 15 bp, Homo sapiens
attaaactcaagagc

SEQ ID NO: 1291916 - DNA, 15 bp, Homo sapiens
aattaaactcaagag

SEQ ID NO: 1291917 - DNA, 15 bp, Homo sapiens
gaattaaactcaaga

SEQ ID NO: 1291918 - DNA, 15 bp, Homo sapiens
tgaattaaactcaag

SEQ ID NO: 1291919 - DNA, 15 bp, Homo sapiens
ttgaattaaactcaa

SEQ ID NO: 1291920 - DNA, 15 bp, Homo sapiens
attgaattaaactca

SEQ ID NO: 1291921 - DNA, 15 bp, Homo sapiens
gattgaattaaactc

SEQ ID NO: 1291922 - DNA, 15 bp, Homo sapiens
ggattgaattaaact

SEQ ID NO: 1291923 - DNA, 15 bp, Homo sapiens
gggattgaattaaac

SEQ ID NO: 1291924 - DNA, 15 bp, Homo sapiens
tgggattgaattaaa

SEQ ID NO: 1291925 - DNA, 15 bp, Homo sapiens
gtgggattgaattaa

SEQ ID NO: 1291926 - DNA, 15 bp, Homo sapiens
agtgggattgaatta

SEQ ID NO: 1291927 - DNA, 15 bp, Homo sapiens
aagtgggattgaatt

SEQ ID NO: 1291928 - DNA, 15 bp, Homo sapiens
caagtgggattgaat

SEQ ID NO: 1291929 - DNA, 15 bp, Homo sapiens
acaagtgggattgaa

SEQ ID NO: 1291930 - DNA, 15 bp, Homo sapiens
gacaagtgggattga

SEQ ID NO: 1291931 - DNA, 15 bp, Homo sapiens
tgacaagtgggattg

SEQ ID NO: 1291932 - DNA, 15 bp, Homo sapiens
ttgacaagtgggatt

SEQ ID NO: 1291933 - DNA, 15 bp, Homo sapiens
attgacaagtgggat

SEQ ID NO: 1291934 - DNA, 15 bp, Homo sapiens
aattgacaagtggga

SEQ ID NO: 1291935 - DNA, 15 bp, Homo sapiens
aaattgacaagtggg

SEQ ID NO: 1291936 - DNA, 15 bp, Homo sapiens
aaaattgacaagtgg

SEQ ID NO: 1291937 - DNA, 15 bp, Homo sapiens
aaaaattgacaagtg

SEQ ID NO: 1291938 - DNA, 15 bp, Homo sapiens
caaaaattgacaagt

SEQ ID NO: 1291939 - DNA, 15 bp, Homo sapiens
tcaaaaattgacaag

SEQ ID NO: 1291940 - DNA, 15 bp, Homo sapiens
atcaaaaattgacaa

SEQ ID NO: 1291941 - DNA, 15 bp, Homo sapiens
aatcaaaaattgaca

SEQ ID NO: 1291942 - DNA, 15 bp, Homo sapiens
aaatcaaaaattgac

SEQ ID NO: 1291943 - DNA, 15 bp, Homo sapiens
aaaatcaaaaattga

SEQ ID NO: 1291944 - DNA, 15 bp, Homo sapiens
caaaatcaaaaattg

SEQ ID NO: 1291945 - DNA, 15 bp, Homo sapiens
acaaaatcaaaaatt

SEQ ID NO: 1291946 - DNA, 15 bp, Homo sapiens
aacaaaatcaaaaat

SEQ ID NO: 1291947 - DNA, 15 bp, Homo sapiens
caacaaaatcaaaaa

SEQ ID NO: 1291948 - DNA, 15 bp, Homo sapiens
acaacaaaatcaaaa

SEQ ID NO: 1291949 - DNA, 15 bp, Homo sapiens
cacaacaaaatcaaa

SEQ ID NO: 1291950 - DNA, 15 bp, Homo sapiens
tcacaacaaaatcaa

SEQ ID NO: 1291951 - DNA, 15 bp, Homo sapiens
atcacaacaaaatca

SEQ ID NO: 1291952 - DNA, 15 bp, Homo sapiens
aatcacaacaaaatc

SEQ ID NO: 1291953 - DNA, 15 bp, Homo sapiens
caatcacaacaaaat

SEQ ID NO: 1291954 - DNA, 15 bp, Homo sapiens
gcaatcacaacaaaa

SEQ ID NO: 1291955 - DNA, 15 bp, Homo sapiens
agcaatcacaacaaa

SEQ ID NO: 1291956 - DNA, 15 bp, Homo sapiens
aagcaatcacaacaa

SEQ ID NO: 1291957 - DNA, 15 bp, Homo sapiens
aaagcaatcacaaca

SEQ ID NO: 1291958 - DNA, 15 bp, Homo sapiens
aaaagcaatcacaac

SEQ ID NO: 1291959 - DNA, 15 bp, Homo sapiens
caaaagcaatcacaa

SEQ ID NO: 1291960 - DNA, 15 bp, Homo sapiens
ccaaaagcaatcaca

SEQ ID NO: 1291961 - DNA, 15 bp, Homo sapiens
accaaaagcaatcac

SEQ ID NO: 1291962 - DNA, 15 bp, Homo sapiens
caccaaaagcaatca

SEQ ID NO: 1291963 - DNA, 15 bp, Homo sapiens
acaccaaaagcaatc

SEQ ID NO: 1291964 - DNA, 15 bp, Homo sapiens
gacaccaaaagcaat

SEQ ID NO: 1291965 - DNA, 15 bp, Homo sapiens
agacaccaaaagcaa

SEQ ID NO: 1291966 - DNA, 15 bp, Homo sapiens
aagacaccaaaagca

SEQ ID NO: 1291967 - DNA, 15 bp, Homo sapiens
aaagacaccaaaagc

SEQ ID NO: 1291968 - DNA, 15 bp, Homo sapiens
taaagacaccaaaag

SEQ ID NO: 1291969 - DNA, 15 bp, Homo sapiens
ataaagacaccaaaa

SEQ ID NO: 1291970 - DNA, 15 bp, Homo sapiens
gataaagacaccaaa

SEQ ID NO: 1291971 - DNA, 15 bp, Homo sapiens
tgataaagacaccaa

SEQ ID NO: 1291972 - DNA, 15 bp, Homo sapiens
atgataaagacacca

SEQ ID NO: 1291973 - DNA, 15 bp, Homo sapiens
catgataaagacacc

SEQ ID NO: 1291974 - DNA, 15 bp, Homo sapiens
tcatgataaagacac

SEQ ID NO: 1291975 - DNA, 15 bp, Homo sapiens
ttcatgataaagaca

SEQ ID NO: 1291976 - DNA, 15 bp, Homo sapiens
cttcatgataaagac

SEQ ID NO: 1291977 - DNA, 15 bp, Homo sapiens
tcttcatgataaaga

SEQ ID NO: 1291978 - DNA, 15 bp, Homo sapiens
gtcttcatgataaag

SEQ ID NO: 1291979 - DNA, 15 bp, Homo sapiens
agtcttcatgataaa

SEQ ID NO: 1291980 - DNA, 15 bp, Homo sapiens
aagtcttcatgataa

SEQ ID NO: 1291981 - DNA, 15 bp, Homo sapiens
aaagtcttcatgata

SEQ ID NO: 1291982 - DNA, 15 bp, Homo sapiens
caaagtcttcatgat

SEQ ID NO: 1291983 - DNA, 15 bp, Homo sapiens
gcaaagtcttcatga

SEQ ID NO: 1291984 - DNA, 15 bp, Homo sapiens
ggcaaagtcttcatg

SEQ ID NO: 1291985 - DNA, 15 bp, Homo sapiens
aggcaaagtcttcat

SEQ ID NO: 1291986 - DNA, 15 bp, Homo sapiens
caggcaaagtcttca

SEQ ID NO: 1291987 - DNA, 15 bp, Homo sapiens
acaggcaaagtcttc

SEQ ID NO: 1291988 - DNA, 15 bp, Homo sapiens
aacaggcaaagtctt

SEQ ID NO: 1291989 - DNA, 15 bp, Homo sapiens
gaacaggcaaagtct

SEQ ID NO: 1291990 - DNA, 15 bp, Homo sapiens
ggaacaggcaaagtc

SEQ ID NO: 1291991 - DNA, 15 bp, Homo sapiens
aggaacaggcaaagt

SEQ ID NO: 1291992 - DNA, 15 bp, Homo sapiens
taggaacaggcaaag

SEQ ID NO: 1291993 - DNA, 15 bp, Homo sapiens
ataggaacaggcaaa

SEQ ID NO: 1291994 - DNA, 15 bp, Homo sapiens
cataggaacaggcaa

SEQ ID NO: 1291995 - DNA, 15 bp, Homo sapiens
acataggaacaggca

SEQ ID NO: 1291996 - DNA, 15 bp, Homo sapiens
gacataggaacaggc

SEQ ID NO: 1291997 - DNA, 15 bp, Homo sapiens
agacataggaacagg

SEQ ID NO: 1291998 - DNA, 15 bp, Homo sapiens
tagacataggaacag

SEQ ID NO: 1291999 - DNA, 15 bp, Homo sapiens
ctagacataggaaca

SEQ ID NO: 1292000 - DNA, 15 bp, Homo sapiens
cctagacataggaac

SEQ ID NO: 1292001 - DNA, 15 bp, Homo sapiens
tcctagacataggaa

SEQ ID NO: 1292002 - DNA, 15 bp, Homo sapiens
atcctagacatagga

SEQ ID NO: 1292003 - DNA, 15 bp, Homo sapiens
gatcctagacatagg

SEQ ID NO: 1292004 - DNA, 15 bp, Homo sapiens
agatcctagacatag

SEQ ID NO: 1292005 - DNA, 15 bp, Homo sapiens
tagatcctagacata

SEQ ID NO: 1292006 - DNA, 15 bp, Homo sapiens
atagatcctagacat

SEQ ID NO: 1292007 - DNA, 15 bp, Homo sapiens
aatagatcctagaca

SEQ ID NO: 1292008 - DNA, 15 bp, Homo sapiens
aaatagatcctagac

SEQ ID NO: 1292009 - DNA, 15 bp, Homo sapiens
aaaatagatcctaga

SEQ ID NO: 1292010 - DNA, 15 bp, Homo sapiens
aaaaatagatcctag

SEQ ID NO: 1292011 - DNA, 15 bp, Homo sapiens
aaaaaatagatccta

SEQ ID NO: 1292012 - DNA, 15 bp, Homo sapiens
aaaaaaatagatcct

SEQ ID NO: 1292013 - DNA, 15 bp, Homo sapiens
aaaaaaaatagatcc

SEQ ID NO: 1292014 - DNA, 15 bp, Homo sapiens
aaaaaaaaatagatc

SEQ ID NO: 1292015 - DNA, 15 bp, Homo sapiens
aaaaaaaaaatagat

SEQ ID NO: 1292016 - DNA, 15 bp, Homo sapiens
caaaaaaaaaaaata

SEQ ID NO: 1292017 - DNA, 15 bp, Homo sapiens
tcaaaaaaaaaaaat

SEQ ID NO: 1292018 - DNA, 15 bp, Homo sapiens
aaacccgggaggcag

SEQ ID NO: 1292019 - DNA, 15 bp, Homo sapiens
taaacccgggaggca

SEQ ID NO: 1292020 - DNA, 15 bp, Homo sapiens
acttaaacccgggag

SEQ ID NO: 1292021 - DNA, 15 bp, Homo sapiens
cacttaaacccggga

SEQ ID NO: 1292022 - DNA, 15 bp, Homo sapiens
tcacttaaacccggg

SEQ ID NO: 1292023 - DNA, 15 bp, Homo sapiens
atcacttaaacccgg

SEQ ID NO: 1292024 - DNA, 15 bp, Homo sapiens
aatcacttaaacccg

SEQ ID NO: 1292025 - DNA, 15 bp, Homo sapiens
taatcacttaaaccc

SEQ ID NO: 1292026 - DNA, 15 bp, Homo sapiens
ataatcacttaaacc

SEQ ID NO: 1292027 - DNA, 15 bp, Homo sapiens
gataatcacttaaac

SEQ ID NO: 1292028 - DNA, 15 bp, Homo sapiens
agataatcacttaaa

SEQ ID NO: 1292029 - DNA, 15 bp, Homo sapiens
aagataatcacttaa

SEQ ID NO: 1292030 - DNA, 15 bp, Homo sapiens
caagataatcactta

SEQ ID NO: 1292031 - DNA, 15 bp, Homo sapiens
gcaagataatcactt

SEQ ID NO: 1292032 - DNA, 15 bp, Homo sapiens
ggcaagataatcact

SEQ ID NO: 1292033 - DNA, 15 bp, Homo sapiens
aggcaagataatcac

SEQ ID NO: 1292034 - DNA, 15 bp, Homo sapiens
gaggcaagataatca

SEQ ID NO: 1292035 - DNA, 15 bp, Homo sapiens
tgaggcaagataatc

SEQ ID NO: 1292036 - DNA, 15 bp, Homo sapiens
ctgaggcaagataat

SEQ ID NO: 1292037 - DNA, 15 bp, Homo sapiens
gctgaggcaagataa

SEQ ID NO: 1292038 - DNA, 15 bp, Homo sapiens
ggctgaggcaagata

SEQ ID NO: 1292039 - DNA, 15 bp, Homo sapiens
aggctgaggcaagat

SEQ ID NO: 1292040 - DNA, 15 bp, Homo sapiens
acctgtagtcccagt

SEQ ID NO: 1292041 - DNA, 15 bp, Homo sapiens
ggtggtgcacacctg

SEQ ID NO: 1292042 - DNA, 15 bp, Homo sapiens
atggtggtgcacacc

SEQ ID NO: 1292043 - DNA, 15 bp, Homo sapiens
catggtggtgcacac

SEQ ID NO: 1292044 - DNA, 15 bp, Homo sapiens
gcatggtggtgcaca

SEQ ID NO: 1292045 - DNA, 15 bp, Homo sapiens
ggcatggtggtgcac

SEQ ID NO: 1292046 - DNA, 15 bp, Homo sapiens
cgggcatggtggtgc

SEQ ID NO: 1292047 - DNA, 15 bp, Homo sapiens
gtaaaaatacaaaaa

SEQ ID NO: 1292048 - DNA, 15 bp, Homo sapiens
agtaaaaatacaaaa

SEQ ID NO: 1292049 - DNA, 15 bp, Homo sapiens
tagtaaaaatacaaa

SEQ ID NO: 1292050 - DNA, 15 bp, Homo sapiens
ctagtaaaaatacaa

SEQ ID NO: 1292051 - DNA, 15 bp, Homo sapiens
tctagtaaaaataca

SEQ ID NO: 1292052 - DNA, 15 bp, Homo sapiens
ctctagtaaaaatac

SEQ ID NO: 1292053 - DNA, 15 bp, Homo sapiens
tctctagtaaaaata

SEQ ID NO: 1292054 - DNA, 15 bp, Homo sapiens
atctctagtaaaaat

SEQ ID NO: 1292055 - DNA, 15 bp, Homo sapiens
catctctagtaaaaa

SEQ ID NO: 1292056 - DNA, 15 bp, Homo sapiens
ccatctctagtaaaa

SEQ ID NO: 1292057 - DNA, 15 bp, Homo sapiens
cccatctctagtaaa

SEQ ID NO: 1292058 - DNA, 15 bp, Homo sapiens
ccccatctctagtaa

SEQ ID NO: 1292059 - DNA, 15 bp, Homo sapiens
accccatctctagta

SEQ ID NO: 1292060 - DNA, 15 bp, Homo sapiens
aaccccatctctagt

SEQ ID NO: 1292061 - DNA, 15 bp, Homo sapiens
aaaccccatctctag

SEQ ID NO: 1292062 - DNA, 15 bp, Homo sapiens
agtaaaaccccatct

SEQ ID NO: 1292063 - DNA, 15 bp, Homo sapiens
tagtaaaaccccatc

SEQ ID NO: 1292064 - DNA, 15 bp, Homo sapiens
atagtaaaaccccat

SEQ ID NO: 1292065 - DNA, 15 bp, Homo sapiens
catagtaaaacccca

SEQ ID NO: 1292066 - DNA, 15 bp, Homo sapiens
acatagtaaaacccc

SEQ ID NO: 1292067 - DNA, 15 bp, Homo sapiens
aacatagtaaaaccc

SEQ ID NO: 1292068 - DNA, 15 bp, Homo sapiens
caacatagtaaaacc

SEQ ID NO: 1292069 - DNA, 15 bp, Homo sapiens
ccaacatagtaaaac

SEQ ID NO: 1292070 - DNA, 15 bp, Homo sapiens
gccaacatagtaaaa

SEQ ID NO: 1292071 - DNA, 15 bp, Homo sapiens
ggccaacatagtaaa

SEQ ID NO: 1292072 - DNA, 15 bp, Homo sapiens
tggccaacatagtaa

SEQ ID NO: 1292073 - DNA, 15 bp, Homo sapiens
ctggccaacatagta

SEQ ID NO: 1292074 - DNA, 15 bp, Homo sapiens
agggagttcaagacc

SEQ ID NO: 1292075 - DNA, 15 bp, Homo sapiens
tagggagttcaagac

SEQ ID NO: 1292076 - DNA, 15 bp, Homo sapiens
gtagggagttcaaga

SEQ ID NO: 1292077 - DNA, 15 bp, Homo sapiens
ggtagggagttcaag

SEQ ID NO: 1292078 - DNA, 15 bp, Homo sapiens
aggtagggagttcaa

SEQ ID NO: 1292079 - DNA, 15 bp, Homo sapiens
gaggtagggagttca

SEQ ID NO: 1292080 - DNA, 15 bp, Homo sapiens
tgaggtagggagttc

SEQ ID NO: 1292081 - DNA, 15 bp, Homo sapiens
ctgaggtagggagtt

SEQ ID NO: 1292082 - DNA, 15 bp, Homo sapiens
cctgaggtagggagt

SEQ ID NO: 1292083 - DNA, 15 bp, Homo sapiens
acctgaggtagggag

SEQ ID NO: 1292084 - DNA, 15 bp, Homo sapiens
cacctgaggtaggga

SEQ ID NO: 1292085 - DNA, 15 bp, Homo sapiens
tcacctgaggtaggg

SEQ ID NO: 1292086 - DNA, 15 bp, Homo sapiens
atcacctgaggtagg

SEQ ID NO: 1292087 - DNA, 15 bp, Homo sapiens
gatcacctgaggtag

SEQ ID NO: 1292088 - DNA, 15 bp, Homo sapiens
ggatcacctgaggta

SEQ ID NO: 1292089 - DNA, 15 bp, Homo sapiens
atggatcacctgagg

SEQ ID NO: 1292090 - DNA, 15 bp, Homo sapiens
catggatcacctgag

SEQ ID NO: 1292091 - DNA, 15 bp, Homo sapiens
gcatggatcacctga

SEQ ID NO: 1292092 - DNA, 15 bp, Homo sapiens
tgcatggatcacctg

SEQ ID NO: 1292093 - DNA, 15 bp, Homo sapiens
gtgcatggatcacct

SEQ ID NO: 1292094 - DNA, 15 bp, Homo sapiens
ggtgcatggatcacc

SEQ ID NO: 1292095 - DNA, 15 bp, Homo sapiens
aggtgcatggatcac

SEQ ID NO: 1292096 - DNA, 15 bp, Homo sapiens
gaggtgcatggatca

SEQ ID NO: 1292097 - DNA, 15 bp, Homo sapiens
tgaggtgcatggatc

SEQ ID NO: 1292098 - DNA, 15 bp, Homo sapiens
ctgaggtgcatggat

SEQ ID NO: 1292099 - DNA, 15 bp, Homo sapiens
gctgaggtgcatgga

SEQ ID NO: 1292100 - DNA, 15 bp, Homo sapiens
ggctgaggtgcatgg

SEQ ID NO: 1292101 - DNA, 15 bp, Homo sapiens
aggctgaggtgcatg

SEQ ID NO: 1292102 - DNA, 15 bp, Homo sapiens
gaggctgaggtgcat

SEQ ID NO: 1292103 - DNA, 15 bp, Homo sapiens
ggaggctgaggtgca

SEQ ID NO: 1292104 - DNA, 15 bp, Homo sapiens
gggaggctgaggtgc

SEQ ID NO: 1292105 - DNA, 15 bp, Homo sapiens
tcattcctgtaatcc

SEQ ID NO: 1292106 - DNA, 15 bp, Homo sapiens
ctcattcctgtaatc

SEQ ID NO: 1292107 - DNA, 15 bp, Homo sapiens
gctcattcctgtaat

SEQ ID NO: 1292108 - DNA, 15 bp, Homo sapiens
ggctcattcctgtaa

SEQ ID NO: 1292109 - DNA, 15 bp, Homo sapiens
tggctcattcctgta

SEQ ID NO: 1292110 - DNA, 15 bp, Homo sapiens
gtggctcattcctgt

SEQ ID NO: 1292111 - DNA, 15 bp, Homo sapiens
ggtggctcattcctg

SEQ ID NO: 1292112 - DNA, 15 bp, Homo sapiens
tggtggctcattcct

SEQ ID NO: 1292113 - DNA, 15 bp, Homo sapiens
gtggtggctcattcc

SEQ ID NO: 1292114 - DNA, 15 bp, Homo sapiens
tgtggtggctcattc

SEQ ID NO: 1292115 - DNA, 15 bp, Homo sapiens
gtgtggtggctcatt

SEQ ID NO: 1292116 - DNA, 15 bp, Homo sapiens
caggccaggtgtggt

SEQ ID NO: 1292117 - DNA, 15 bp, Homo sapiens
ccaggccaggtgtgg

SEQ ID NO: 1292118 - DNA, 15 bp, Homo sapiens
gccaggccaggtgtg

SEQ ID NO: 1292119 - DNA, 15 bp, Homo sapiens
ggccaggccaggtgt

SEQ ID NO: 1292120 - DNA, 15 bp, Homo sapiens
tggccaggccaggtg

SEQ ID NO: 1292121 - DNA, 15 bp, Homo sapiens
atggccaggccaggt

SEQ ID NO: 1292122 - DNA, 15 bp, Homo sapiens
gatggccaggccagg

SEQ ID NO: 1292123 - DNA, 15 bp, Homo sapiens
agatggccaggccag

SEQ ID NO: 1292124 - DNA, 15 bp, Homo sapiens
aagatggccaggcca

SEQ ID NO: 1292125 - DNA, 15 bp, Homo sapiens
gaagatggccaggcc

SEQ ID NO: 1292126 - DNA, 15 bp, Homo sapiens
tgaagatggccaggc

SEQ ID NO: 1292127 - DNA, 15 bp, Homo sapiens
ttgaagatggccagg

SEQ ID NO: 1292128 - DNA, 15 bp, Homo sapiens
attgaagatggccag

SEQ ID NO: 1292129 - DNA, 15 bp, Homo sapiens
gattgaagatggcca

SEQ ID NO: 1292130 - DNA, 15 bp, Homo sapiens
ggattgaagatggcc

SEQ ID NO: 1292131 - DNA, 15 bp, Homo sapiens
tggattgaagatggc

SEQ ID NO: 1292132 - DNA, 15 bp, Homo sapiens
atggattgaagatgg

SEQ ID NO: 1292133 - DNA, 15 bp, Homo sapiens
gatggattgaagatg

SEQ ID NO: 1292134 - DNA, 15 bp, Homo sapiens
agatggattgaagat

SEQ ID NO: 1292135 - DNA, 15 bp, Homo sapiens
aagatggattgaaga

SEQ ID NO: 1292136 - DNA, 15 bp, Homo sapiens
caagatggattgaag

SEQ ID NO: 1292137 - DNA, 15 bp, Homo sapiens
tcaagatggattgaa

SEQ ID NO: 1292138 - DNA, 15 bp, Homo sapiens
ctcaagatggattga

SEQ ID NO: 1292139 - DNA, 15 bp, Homo sapiens
actcaagatggattg

SEQ ID NO: 1292140 - DNA, 15 bp, Homo sapiens
aactcaagatggatt

SEQ ID NO: 1292141 - DNA, 15 bp, Homo sapiens
caactcaagatggat

SEQ ID NO: 1292142 - DNA, 15 bp, Homo sapiens
tcaactcaagatgga

SEQ ID NO: 1292143 - DNA, 15 bp, Homo sapiens
atcaactcaagatgg

SEQ ID NO: 1292144 - DNA, 15 bp, Homo sapiens
aatcaactcaagatg

SEQ ID NO: 1292145 - DNA, 15 bp, Homo sapiens
aaatcaactcaagat

SEQ ID NO: 1292146 - DNA, 15 bp, Homo sapiens
aaaatcaactcaaga

SEQ ID NO: 1292147 - DNA, 15 bp, Homo sapiens
aaaaatcaactcaag

SEQ ID NO: 1292148 - DNA, 15 bp, Homo sapiens
caaaaatcaactcaa

SEQ ID NO: 1292149 - DNA, 15 bp, Homo sapiens
acaaaaatcaactca

SEQ ID NO: 1292150 - DNA, 15 bp, Homo sapiens
tacaaaaatcaactc

SEQ ID NO: 1292151 - DNA, 15 bp, Homo sapiens
atacaaaaatcaact

SEQ ID NO: 1292152 - DNA, 15 bp, Homo sapiens
tatacaaaaatcaac

SEQ ID NO: 1292153 - DNA, 15 bp, Homo sapiens
atatacaaaaatcaa

SEQ ID NO: 1292154 - DNA, 15 bp, Homo sapiens
catatacaaaaatca

SEQ ID NO: 1292155 - DNA, 15 bp, Homo sapiens
ccatatacaaaaatc

SEQ ID NO: 1292156 - DNA, 15 bp, Homo sapiens
accatatacaaaaat

SEQ ID NO: 1292157 - DNA, 15 bp, Homo sapiens
caccatatacaaaaa

SEQ ID NO: 1292158 - DNA, 15 bp, Homo sapiens
acaccatatacaaaa

SEQ ID NO: 1292159 - DNA, 15 bp, Homo sapiens
tacaccatatacaaa

SEQ ID NO: 1292160 - DNA, 15 bp, Homo sapiens
ttacaccatatacaa

SEQ ID NO: 1292161 - DNA, 15 bp, Homo sapiens
cttacaccatataca

SEQ ID NO: 1292162 - DNA, 15 bp, Homo sapiens
ccttacaccatatac

SEQ ID NO: 1292163 - DNA, 15 bp, Homo sapiens
tccttacaccatata

SEQ ID NO: 1292164 - DNA, 15 bp, Homo sapiens
ttccttacaccatat

SEQ ID NO: 1292165 - DNA, 15 bp, Homo sapiens
attccttacaccata

SEQ ID NO: 1292166 - DNA, 15 bp, Homo sapiens
cattccttacaccat

SEQ ID NO: 1292167 - DNA, 15 bp, Homo sapiens
ccattccttacacca

SEQ ID NO: 1292168 - DNA, 15 bp, Homo sapiens
cccattccttacacc

SEQ ID NO: 1292169 - DNA, 15 bp, Homo sapiens
acccattccttacac

SEQ ID NO: 1292170 - DNA, 15 bp, Homo sapiens
gacccattccttaca

SEQ ID NO: 1292171 - DNA, 15 bp, Homo sapiens
ggacccattccttac

SEQ ID NO: 1292172 - DNA, 15 bp, Homo sapiens
tggacccattcctta

SEQ ID NO: 1292173 - DNA, 15 bp, Homo sapiens
ctggacccattcctt

SEQ ID NO: 1292174 - DNA, 15 bp, Homo sapiens
gctggacccattcct

SEQ ID NO: 1292175 - DNA, 15 bp, Homo sapiens
agctggacccattcc

SEQ ID NO: 1292176 - DNA, 15 bp, Homo sapiens
aagctggacccattc

SEQ ID NO: 1292177 - DNA, 15 bp, Homo sapiens
gaagctggacccatt

SEQ ID NO: 1292178 - DNA, 15 bp, Homo sapiens
tgaagctggacccat

SEQ ID NO: 1292179 - DNA, 15 bp, Homo sapiens
ttgaagctggaccca

SEQ ID NO: 1292180 - DNA, 15 bp, Homo sapiens
attgaagctggaccc

SEQ ID NO: 1292181 - DNA, 15 bp, Homo sapiens
gattgaagctggacc

SEQ ID NO: 1292182 - DNA, 15 bp, Homo sapiens
agattgaagctggac

SEQ ID NO: 1292183 - DNA, 15 bp, Homo sapiens
aagattgaagctgga

SEQ ID NO: 1292184 - DNA, 15 bp, Homo sapiens
gaagattgaagctgg

SEQ ID NO: 1292185 - DNA, 15 bp, Homo sapiens
agaagattgaagctg

SEQ ID NO: 1292186 - DNA, 15 bp, Homo sapiens
cagaagattgaagct

SEQ ID NO: 1292187 - DNA, 15 bp, Homo sapiens
gcagaagattgaagc

SEQ ID NO: 1292188 - DNA, 15 bp, Homo sapiens
tgcagaagattgaag

SEQ ID NO: 1292189 - DNA, 15 bp, Homo sapiens
atgcagaagattgaa

SEQ ID NO: 1292190 - DNA, 15 bp, Homo sapiens
tatgcagaagattga

SEQ ID NO: 1292191 - DNA, 15 bp, Homo sapiens
atatgcagaagattg

SEQ ID NO: 1292192 - DNA, 15 bp, Homo sapiens
catatgcagaagatt

SEQ ID NO: 1292193 - DNA, 15 bp, Homo sapiens
ccatatgcagaagat

SEQ ID NO: 1292194 - DNA, 15 bp, Homo sapiens
gccatatgcagaaga

SEQ ID NO: 1292195 - DNA, 15 bp, Homo sapiens
agccatatgcagaag

SEQ ID NO: 1292196 - DNA, 15 bp, Homo sapiens
tagccatatgcagaa

SEQ ID NO: 1292197 - DNA, 15 bp, Homo sapiens
ctagccatatgcaga

SEQ ID NO: 1292198 - DNA, 15 bp, Homo sapiens
gctagccatatgcag

SEQ ID NO: 1292199 - DNA, 15 bp, Homo sapiens
ggctagccatatgca

SEQ ID NO: 1292200 - DNA, 15 bp, Homo sapiens
tggctagccatatgc

SEQ ID NO: 1292201 - DNA, 15 bp, Homo sapiens
gtggctagccatatg

SEQ ID NO: 1292202 - DNA, 15 bp, Homo sapiens
agtggctagccatat

SEQ ID NO: 1292203 - DNA, 15 bp, Homo sapiens
aagtggctagccata

SEQ ID NO: 1292204 - DNA, 15 bp, Homo sapiens
taagtggctagccat

SEQ ID NO: 1292205 - DNA, 15 bp, Homo sapiens
ataagtggctagcca

SEQ ID NO: 1292206 - DNA, 15 bp, Homo sapiens
gataagtggctagcc

SEQ ID NO: 1292207 - DNA, 15 bp, Homo sapiens
ggataagtggctagc

SEQ ID NO: 1292208 - DNA, 15 bp, Homo sapiens
aggataagtggctag

SEQ ID NO: 1292209 - DNA, 15 bp, Homo sapiens
taggataagtggcta

SEQ ID NO: 1292210 - DNA, 15 bp, Homo sapiens
ctaggataagtggct

SEQ ID NO: 1292211 - DNA, 15 bp, Homo sapiens
gctaggataagtggc

SEQ ID NO: 1292212 - DNA, 15 bp, Homo sapiens
tgctaggataagtgg

SEQ ID NO: 1292213 - DNA, 15 bp, Homo sapiens
gtgctaggataagtg

SEQ ID NO: 1292214 - DNA, 15 bp, Homo sapiens
ggtgctaggataagt

SEQ ID NO: 1292215 - DNA, 15 bp, Homo sapiens
tggtgctaggataag

SEQ ID NO: 1292216 - DNA, 15 bp, Homo sapiens
ctggtgctaggataa

SEQ ID NO: 1292217 - DNA, 15 bp, Homo sapiens
actggtgctaggata

SEQ ID NO: 1292218 - DNA, 15 bp, Homo sapiens
aactggtgctaggat

SEQ ID NO: 1292219 - DNA, 15 bp, Homo sapiens
taactggtgctagga

SEQ ID NO: 1292220 - DNA, 15 bp, Homo sapiens
ttaactggtgctagg

SEQ ID NO: 1292221 - DNA, 15 bp, Homo sapiens
attaactggtgctag

SEQ ID NO: 1292222 - DNA, 15 bp, Homo sapiens
cattaactggtgcta

SEQ ID NO: 1292223 - DNA, 15 bp, Homo sapiens
tcattaactggtgct

SEQ ID NO: 1292224 - DNA, 15 bp, Homo sapiens
ttcattaactggtgc

SEQ ID NO: 1292225 - DNA, 15 bp, Homo sapiens
tttcattaactggtg

SEQ ID NO: 1292226 - DNA, 15 bp, Homo sapiens
atttcattaactggt

SEQ ID NO: 1292227 - DNA, 15 bp, Homo sapiens
catttcattaactgg

SEQ ID NO: 1292228 - DNA, 15 bp, Homo sapiens
ccatttcattaactg

SEQ ID NO: 1292229 - DNA, 15 bp, Homo sapiens
cccatttcattaact

SEQ ID NO: 1292230 - DNA, 15 bp, Homo sapiens
tcccatttcattaac

SEQ ID NO: 1292231 - DNA, 15 bp, Homo sapiens
ctcccatttcattaa

SEQ ID NO: 1292232 - DNA, 15 bp, Homo sapiens
actcccatttcatta

SEQ ID NO: 1292233 - DNA, 15 bp, Homo sapiens
gactcccatttcatt

SEQ ID NO: 1292234 - DNA, 15 bp, Homo sapiens
agactcccatttcat

SEQ ID NO: 1292235 - DNA, 15 bp, Homo sapiens
aagactcccatttca

SEQ ID NO: 1292236 - DNA, 15 bp, Homo sapiens
aaagactcccatttc

SEQ ID NO: 1292237 - DNA, 15 bp, Homo sapiens
aaaagactcccattt

SEQ ID NO: 1292238 - DNA, 15 bp, Homo sapiens
gaaaagactcccatt

SEQ ID NO: 1292239 - DNA, 15 bp, Homo sapiens
ggaaaagactcccat

SEQ ID NO: 1292240 - DNA, 15 bp, Homo sapiens
gggaaaagactccca

SEQ ID NO: 1292241 - DNA, 15 bp, Homo sapiens
ggggaaaagactccc

SEQ ID NO: 1292242 - DNA, 15 bp, Homo sapiens
tggggaaaagactcc

SEQ ID NO: 1292243 - DNA, 15 bp, Homo sapiens
atggggaaaagactc

SEQ ID NO: 1292244 - DNA, 15 bp, Homo sapiens
aatggggaaaagact

SEQ ID NO: 1292245 - DNA, 15 bp, Homo sapiens
caatggggaaaagac

SEQ ID NO: 1292246 - DNA, 15 bp, Homo sapiens
gcaatggggaaaaga

SEQ ID NO: 1292247 - DNA, 15 bp, Homo sapiens
agcaatggggaaaag

SEQ ID NO: 1292248 - DNA, 15 bp, Homo sapiens
aagcaatggggaaaa

SEQ ID NO: 1292249 - DNA, 15 bp, Homo sapiens
caagcaatggggaaa

SEQ ID NO: 1292250 - DNA, 15 bp, Homo sapiens
gcaagcaatggggaa

SEQ ID NO: 1292251 - DNA, 15 bp, Homo sapiens
agcaagcaatgggga

SEQ ID NO: 1292252 - DNA, 15 bp, Homo sapiens
aagcaagcaatgggg

SEQ ID NO: 1292253 - DNA, 15 bp, Homo sapiens
aaagcaagcaatggg

SEQ ID NO: 1292254 - DNA, 15 bp, Homo sapiens
aaaagcaagcaatgg

SEQ ID NO: 1292255 - DNA, 15 bp, Homo sapiens
caaaagcaagcaatg

SEQ ID NO: 1292256 - DNA, 15 bp, Homo sapiens
acaaaagcaagcaat

SEQ ID NO: 1292257 - DNA, 15 bp, Homo sapiens
gacaaaagcaagcaa

SEQ ID NO: 1292258 - DNA, 15 bp, Homo sapiens
tgacaaaagcaagca

SEQ ID NO: 1292259 - DNA, 15 bp, Homo sapiens
ctgacaaaagcaagc

SEQ ID NO: 1292260 - DNA, 15 bp, Homo sapiens
gctgacaaaagcaag

SEQ ID NO: 1292261 - DNA, 15 bp, Homo sapiens
agctgacaaaagcaa

SEQ ID NO: 1292262 - DNA, 15 bp, Homo sapiens
aagctgacaaaagca

SEQ ID NO: 1292263 - DNA, 15 bp, Homo sapiens
aaagctgacaaaagc

SEQ ID NO: 1292264 - DNA, 15 bp, Homo sapiens
caaagctgacaaaag

SEQ ID NO: 1292265 - DNA, 15 bp, Homo sapiens
acaaagctgacaaaa

SEQ ID NO: 1292266 - DNA, 15 bp, Homo sapiens
gacaaagctgacaaa

SEQ ID NO: 1292267 - DNA, 15 bp, Homo sapiens
tgacaaagctgacaa

SEQ ID NO: 1292268 - DNA, 15 bp, Homo sapiens
ttgacaaagctgaca

SEQ ID NO: 1292269 - DNA, 15 bp, Homo sapiens
tttgacaaagctgac

SEQ ID NO: 1292270 - DNA, 15 bp, Homo sapiens
ttttgacaaagctga

SEQ ID NO: 1292271 - DNA, 15 bp, Homo sapiens
tttttgacaaagctg

SEQ ID NO: 1292272 - DNA, 15 bp, Homo sapiens
ctttttgacaaagct

SEQ ID NO: 1292273 - DNA, 15 bp, Homo sapiens
tctttttgacaaagc

SEQ ID NO: 1292274 - DNA, 15 bp, Homo sapiens
atctttttgacaaag

SEQ ID NO: 1292275 - DNA, 15 bp, Homo sapiens
gatctttttgacaaa

SEQ ID NO: 1292276 - DNA, 15 bp, Homo sapiens
tgatctttttgacaa

SEQ ID NO: 1292277 - DNA, 15 bp, Homo sapiens
ctgatctttttgaca

SEQ ID NO: 1292278 - DNA, 15 bp, Homo sapiens
gctgatctttttgac

SEQ ID NO: 1292279 - DNA, 15 bp, Homo sapiens
agctgatctttttga

SEQ ID NO: 1292280 - DNA, 15 bp, Homo sapiens
cagctgatctttttg

SEQ ID NO: 1292281 - DNA, 15 bp, Homo sapiens
ccagctgatcttttt

SEQ ID NO: 1292282 - DNA, 15 bp, Homo sapiens
accagctgatctttt

SEQ ID NO: 1292283 - DNA, 15 bp, Homo sapiens
gaccagctgatcttt

SEQ ID NO: 1292284 - DNA, 15 bp, Homo sapiens
ggaccagctgatctt

SEQ ID NO: 1292285 - DNA, 15 bp, Homo sapiens
aggaccagctgatct

SEQ ID NO: 1292286 - DNA, 15 bp, Homo sapiens
taggaccagctgatc

SEQ ID NO: 1292287 - DNA, 15 bp, Homo sapiens
ctaggaccagctgat

SEQ ID NO: 1292288 - DNA, 15 bp, Homo sapiens
cctaggaccagctga

SEQ ID NO: 1292289 - DNA, 15 bp, Homo sapiens
acctaggaccagctg

SEQ ID NO: 1292290 - DNA, 15 bp, Homo sapiens
cacctaggaccagct

SEQ ID NO: 1292291 - DNA, 15 bp, Homo sapiens
acacctaggaccagc

SEQ ID NO: 1292292 - DNA, 15 bp, Homo sapiens
cacacctaggaccag

SEQ ID NO: 1292293 - DNA, 15 bp, Homo sapiens
gcacacctaggacca

SEQ ID NO: 1292294 - DNA, 15 bp, Homo sapiens
tgcacacctaggacc

SEQ ID NO: 1292295 - DNA, 15 bp, Homo sapiens
ttgcacacctaggac

SEQ ID NO: 1292296 - DNA, 15 bp, Homo sapiens
gttgcacacctagga

SEQ ID NO: 1292297 - DNA, 15 bp, Homo sapiens
ggttgcacacctagg

SEQ ID NO: 1292298 - DNA, 15 bp, Homo sapiens
aggttgcacacctag

SEQ ID NO: 1292299 - DNA, 15 bp, Homo sapiens
aaggttgcacaccta

SEQ ID NO: 1292300 - DNA, 15 bp, Homo sapiens
taaggttgcacacct

SEQ ID NO: 1292301 - DNA, 15 bp, Homo sapiens
ataaggttgcacacc

SEQ ID NO: 1292302 - DNA, 15 bp, Homo sapiens
aataaggttgcacac

SEQ ID NO: 1292303 - DNA, 15 bp, Homo sapiens
aaataaggttgcaca

SEQ ID NO: 1292304 - DNA, 15 bp, Homo sapiens
gaaataaggttgcac

SEQ ID NO: 1292305 - DNA, 15 bp, Homo sapiens
agaaataaggttgca

SEQ ID NO: 1292306 - DNA, 15 bp, Homo sapiens
cagaaataaggttgc

SEQ ID NO: 1292307 - DNA, 15 bp, Homo sapiens
ccagaaataaggttg

SEQ ID NO: 1292308 - DNA, 15 bp, Homo sapiens
cccagaaataaggtt

SEQ ID NO: 1292309 - DNA, 15 bp, Homo sapiens
acccagaaataaggt

SEQ ID NO: 1292310 - DNA, 15 bp, Homo sapiens
cacccagaaataagg

SEQ ID NO: 1292311 - DNA, 15 bp, Homo sapiens
gcacccagaaataag

SEQ ID NO: 1292312 - DNA, 15 bp, Homo sapiens
agcacccagaaataa

SEQ ID NO: 1292313 - DNA, 15 bp, Homo sapiens
gagcacccagaaata

SEQ ID NO: 1292314 - DNA, 15 bp, Homo sapiens
agagcacccagaaat

SEQ ID NO: 1292315 - DNA, 15 bp, Homo sapiens
tagagcacccagaaa

SEQ ID NO: 1292316 - DNA, 15 bp, Homo sapiens
atagagcacccagaa

SEQ ID NO: 1292317 - DNA, 15 bp, Homo sapiens
aatagagcacccaga

SEQ ID NO: 1292318 - DNA, 15 bp, Homo sapiens
gaatagagcacccag

SEQ ID NO: 1292319 - DNA, 15 bp, Homo sapiens
agaatagagcaccca

SEQ ID NO: 1292320 - DNA, 15 bp, Homo sapiens
cagaatagagcaccc

SEQ ID NO: 1292321 - DNA, 15 bp, Homo sapiens
acagaatagagcacc

SEQ ID NO: 1292322 - DNA, 15 bp, Homo sapiens
aacagaatagagcac

SEQ ID NO: 1292323 - DNA, 15 bp, Homo sapiens
gaacagaatagagca

SEQ ID NO: 1292324 - DNA, 15 bp, Homo sapiens
ggaacagaatagagc

SEQ ID NO: 1292325 - DNA, 15 bp, Homo sapiens
tggaacagaatagag

SEQ ID NO: 1292326 - DNA, 15 bp, Homo sapiens
atggaacagaataga

SEQ ID NO: 1292327 - DNA, 15 bp, Homo sapiens
aatggaacagaatag

SEQ ID NO: 1292328 - DNA, 15 bp, Homo sapiens
caatggaacagaata

SEQ ID NO: 1292329 - DNA, 15 bp, Homo sapiens
ccaatggaacagaat

SEQ ID NO: 1292330 - DNA, 15 bp, Homo sapiens
accaatggaacagaa

SEQ ID NO: 1292331 - DNA, 15 bp, Homo sapiens
aaccaatggaacaga

SEQ ID NO: 1292332 - DNA, 15 bp, Homo sapiens
aaaccaatggaacag

SEQ ID NO: 1292333 - DNA, 15 bp, Homo sapiens
taaaccaatggaaca

SEQ ID NO: 1292334 - DNA, 15 bp, Homo sapiens
gtaaaccaatggaac

SEQ ID NO: 1292335 - DNA, 15 bp, Homo sapiens
tgtaaaccaatggaa

SEQ ID NO: 1292336 - DNA, 15 bp, Homo sapiens
atgtaaaccaatgga

SEQ ID NO: 1292337 - DNA, 15 bp, Homo sapiens
aatgtaaaccaatgg

SEQ ID NO: 1292338 - DNA, 15 bp, Homo sapiens
taatgtaaaccaatg

SEQ ID NO: 1292339 - DNA, 15 bp, Homo sapiens
ataatgtaaaccaat

SEQ ID NO: 1292340 - DNA, 15 bp, Homo sapiens
aataatgtaaaccaa

SEQ ID NO: 1292341 - DNA, 15 bp, Homo sapiens
gaataatgtaaacca

SEQ ID NO: 1292342 - DNA, 15 bp, Homo sapiens
agaataatgtaaacc

SEQ ID NO: 1292343 - DNA, 15 bp, Homo sapiens
cagaataatgtaaac

SEQ ID NO: 1292344 - DNA, 15 bp, Homo sapiens
tcagaataatgtaaa

SEQ ID NO: 1292345 - DNA, 15 bp, Homo sapiens
ttcagaataatgtaa

SEQ ID NO: 1292346 - DNA, 15 bp, Homo sapiens
tttcagaataatgta

SEQ ID NO: 1292347 - DNA, 15 bp, Homo sapiens
ttttcagaataatgt

SEQ ID NO: 1292348 - DNA, 15 bp, Homo sapiens
tttttcagaataatg

SEQ ID NO: 1292349 - DNA, 15 bp, Homo sapiens
ttttttcagaataat

SEQ ID NO: 1292350 - DNA, 15 bp, Homo sapiens
tttttttcagaataa

SEQ ID NO: 1292351 - DNA, 15 bp, Homo sapiens
acatttttttcagaa

SEQ ID NO: 1292352 - DNA, 15 bp, Homo sapiens
cacatttttttcaga

SEQ ID NO: 1292353 - DNA, 15 bp, Homo sapiens
gcacatttttttcag

SEQ ID NO: 1292354 - DNA, 15 bp, Homo sapiens
ggcacatttttttca

SEQ ID NO: 1292355 - DNA, 15 bp, Homo sapiens
aggcacatttttttc

SEQ ID NO: 1292356 - DNA, 15 bp, Homo sapiens
caggcacattttttt

SEQ ID NO: 1292357 - DNA, 15 bp, Homo sapiens
acaggcacatttttt

SEQ ID NO: 1292358 - DNA, 15 bp, Homo sapiens
aacaggcacattttt

SEQ ID NO: 1292359 - DNA, 15 bp, Homo sapiens
aaacaggcacatttt

SEQ ID NO: 1292360 - DNA, 15 bp, Homo sapiens
aaaacaggcacattt

SEQ ID NO: 1292361 - DNA, 15 bp, Homo sapiens
aaaaacaggcacatt

SEQ ID NO: 1292362 - DNA, 15 bp, Homo sapiens
caaaaacaggcacat

SEQ ID NO: 1292363 - DNA, 15 bp, Homo sapiens
acaaaaacaggcaca

SEQ ID NO: 1292364 - DNA, 15 bp, Homo sapiens
tacaaaaacaggcac

SEQ ID NO: 1292365 - DNA, 15 bp, Homo sapiens
gtacaaaaacaggca

SEQ ID NO: 1292366 - DNA, 15 bp, Homo sapiens
ggtacaaaaacaggc

SEQ ID NO: 1292367 - DNA, 15 bp, Homo sapiens
tggtacaaaaacagg

SEQ ID NO: 1292368 - DNA, 15 bp, Homo sapiens
ctggtacaaaaacag

SEQ ID NO: 1292369 - DNA, 15 bp, Homo sapiens
actggtacaaaaaca

SEQ ID NO: 1292370 - DNA, 15 bp, Homo sapiens
tactggtacaaaaac

SEQ ID NO: 1292371 - DNA, 15 bp, Homo sapiens
ttactggtacaaaaa

SEQ ID NO: 1292372 - DNA, 15 bp, Homo sapiens
gttactggtacaaaa

SEQ ID NO: 1292373 - DNA, 15 bp, Homo sapiens
tgttactggtacaaa

SEQ ID NO: 1292374 - DNA, 15 bp, Homo sapiens
atgttactggtacaa

SEQ ID NO: 1292375 - DNA, 15 bp, Homo sapiens
catgttactggtaca

SEQ ID NO: 1292376 - DNA, 15 bp, Homo sapiens
gcatgttactggtac

SEQ ID NO: 1292377 - DNA, 15 bp, Homo sapiens
agcatgttactggta

SEQ ID NO: 1292378 - DNA, 15 bp, Homo sapiens
cagcatgttactggt

SEQ ID NO: 1292379 - DNA, 15 bp, Homo sapiens
acagcatgttactgg

SEQ ID NO: 1292380 - DNA, 15 bp, Homo sapiens
aacagcatgttactg

SEQ ID NO: 1292381 - DNA, 15 bp, Homo sapiens
aaacagcatgttact

SEQ ID NO: 1292382 - DNA, 15 bp, Homo sapiens
aaaacagcatgttac

SEQ ID NO: 1292383 - DNA, 15 bp, Homo sapiens
caaaacagcatgtta

SEQ ID NO: 1292384 - DNA, 15 bp, Homo sapiens
ccaaaacagcatgtt

SEQ ID NO: 1292385 - DNA, 15 bp, Homo sapiens
accaaaacagcatgt

SEQ ID NO: 1292386 - DNA, 15 bp, Homo sapiens
aaccaaaacagcatg

SEQ ID NO: 1292387 - DNA, 15 bp, Homo sapiens
taaccaaaacagcat

SEQ ID NO: 1292388 - DNA, 15 bp, Homo sapiens
gtaaccaaaacagca

SEQ ID NO: 1292389 - DNA, 15 bp, Homo sapiens
agtaaccaaaacagc

SEQ ID NO: 1292390 - DNA, 15 bp, Homo sapiens
cagtaaccaaaacag

SEQ ID NO: 1292391 - DNA, 15 bp, Homo sapiens
acagtaaccaaaaca

SEQ ID NO: 1292392 - DNA, 15 bp, Homo sapiens
tacagtaaccaaaac

SEQ ID NO: 1292393 - DNA, 15 bp, Homo sapiens
ctacagtaaccaaaa

SEQ ID NO: 1292394 - DNA, 15 bp, Homo sapiens
gctacagtaaccaaa

SEQ ID NO: 1292395 - DNA, 15 bp, Homo sapiens
ggctacagtaaccaa

SEQ ID NO: 1292396 - DNA, 15 bp, Homo sapiens
gggctacagtaacca

SEQ ID NO: 1292397 - DNA, 15 bp, Homo sapiens
agggctacagtaacc

SEQ ID NO: 1292398 - DNA, 15 bp, Homo sapiens
cagggctacagtaac

SEQ ID NO: 1292399 - DNA, 15 bp, Homo sapiens
acagggctacagtaa

SEQ ID NO: 1292400 - DNA, 15 bp, Homo sapiens
tacagggctacagta

SEQ ID NO: 1292401 - DNA, 15 bp, Homo sapiens
ctacagggctacagt

SEQ ID NO: 1292402 - DNA, 15 bp, Homo sapiens
actacagggctacag

SEQ ID NO: 1292403 - DNA, 15 bp, Homo sapiens
tactacagggctaca

SEQ ID NO: 1292404 - DNA, 15 bp, Homo sapiens
atactacagggctac

SEQ ID NO: 1292405 - DNA, 15 bp, Homo sapiens
tatactacagggcta

SEQ ID NO: 1292406 - DNA, 15 bp, Homo sapiens
ctatactacagggct

SEQ ID NO: 1292407 - DNA, 15 bp, Homo sapiens
actatactacagggc

SEQ ID NO: 1292408 - DNA, 15 bp, Homo sapiens
gactatactacaggg

SEQ ID NO: 1292409 - DNA, 15 bp, Homo sapiens
agactatactacagg

SEQ ID NO: 1292410 - DNA, 15 bp, Homo sapiens
cagactatactacag

SEQ ID NO: 1292411 - DNA, 15 bp, Homo sapiens
tcagactatactaca

SEQ ID NO: 1292412 - DNA, 15 bp, Homo sapiens
ttcagactatactac

SEQ ID NO: 1292413 - DNA, 15 bp, Homo sapiens
cttcagactatacta

SEQ ID NO: 1292414 - DNA, 15 bp, Homo sapiens
acttcagactatact

SEQ ID NO: 1292415 - DNA, 15 bp, Homo sapiens
aacttcagactatac

SEQ ID NO: 1292416 - DNA, 15 bp, Homo sapiens
caacttcagactata

SEQ ID NO: 1292417 - DNA, 15 bp, Homo sapiens
ccaacttcagactat

SEQ ID NO: 1292418 - DNA, 15 bp, Homo sapiens
tccaacttcagacta

SEQ ID NO: 1292419 - DNA, 15 bp, Homo sapiens
atccaacttcagact

SEQ ID NO: 1292420 - DNA, 15 bp, Homo sapiens
tatccaacttcagac

SEQ ID NO: 1292421 - DNA, 15 bp, Homo sapiens
ttatccaacttcaga

SEQ ID NO: 1292422 - DNA, 15 bp, Homo sapiens
attatccaacttcag

SEQ ID NO: 1292423 - DNA, 15 bp, Homo sapiens
cattatccaacttca

SEQ ID NO: 1292424 - DNA, 15 bp, Homo sapiens
acattatccaacttc

SEQ ID NO: 1292425 - DNA, 15 bp, Homo sapiens
cacattatccaactt

SEQ ID NO: 1292426 - DNA, 15 bp, Homo sapiens
tcacattatccaact

SEQ ID NO: 1292427 - DNA, 15 bp, Homo sapiens
atcacattatccaac

SEQ ID NO: 1292428 - DNA, 15 bp, Homo sapiens
catcacattatccaa

SEQ ID NO: 1292429 - DNA, 15 bp, Homo sapiens
gcatcacattatcca

SEQ ID NO: 1292430 - DNA, 15 bp, Homo sapiens
ggcatcacattatcc

SEQ ID NO: 1292431 - DNA, 15 bp, Homo sapiens
aggcatcacattatc

SEQ ID NO: 1292432 - DNA, 15 bp, Homo sapiens
gaggcatcacattat

SEQ ID NO: 1292433 - DNA, 15 bp, Homo sapiens
ggaggcatcacatta

SEQ ID NO: 1292434 - DNA, 15 bp, Homo sapiens
tggaggcatcacatt

SEQ ID NO: 1292435 - DNA, 15 bp, Homo sapiens
ctggaggcatcacat

SEQ ID NO: 1292436 - DNA, 15 bp, Homo sapiens
gctggaggcatcaca

SEQ ID NO: 1292437 - DNA, 15 bp, Homo sapiens
agctggaggcatcac

SEQ ID NO: 1292438 - DNA, 15 bp, Homo sapiens
aacaaagctggaggc

SEQ ID NO: 1292439 - DNA, 15 bp, Homo sapiens
gaacaaagctggagg

SEQ ID NO: 1292440 - DNA, 15 bp, Homo sapiens
agaacaaagctggag

SEQ ID NO: 1292441 - DNA, 15 bp, Homo sapiens
aagaacaaagctgga

SEQ ID NO: 1292442 - DNA, 15 bp, Homo sapiens
aaagaacaaagctgg

SEQ ID NO: 1292443 - DNA, 15 bp, Homo sapiens
aaaagaacaaagctg

SEQ ID NO: 1292444 - DNA, 15 bp, Homo sapiens
aaaaagaacaaagct

SEQ ID NO: 1292445 - DNA, 15 bp, Homo sapiens
caaaaagaacaaagc

SEQ ID NO: 1292446 - DNA, 15 bp, Homo sapiens
gcaaaaagaacaaag

SEQ ID NO: 1292447 - DNA, 15 bp, Homo sapiens
agcaaaaagaacaaa

SEQ ID NO: 1292448 - DNA, 15 bp, Homo sapiens
aagcaaaaagaacaa

SEQ ID NO: 1292449 - DNA, 15 bp, Homo sapiens
taagcaaaaagaaca

SEQ ID NO: 1292450 - DNA, 15 bp, Homo sapiens
ctaagcaaaaagaac

SEQ ID NO: 1292451 - DNA, 15 bp, Homo sapiens
cctaagcaaaaagaa

SEQ ID NO: 1292452 - DNA, 15 bp, Homo sapiens
tcctaagcaaaaaga

SEQ ID NO: 1292453 - DNA, 15 bp, Homo sapiens
atcctaagcaaaaag

SEQ ID NO: 1292454 - DNA, 15 bp, Homo sapiens
aatcctaagcaaaaa

SEQ ID NO: 1292455 - DNA, 15 bp, Homo sapiens
caatcctaagcaaaa

SEQ ID NO: 1292456 - DNA, 15 bp, Homo sapiens
gcaatcctaagcaaa

SEQ ID NO: 1292457 - DNA, 15 bp, Homo sapiens
ggcaatcctaagcaa

SEQ ID NO: 1292458 - DNA, 15 bp, Homo sapiens
aggcaatcctaagca

SEQ ID NO: 1292459 - DNA, 15 bp, Homo sapiens
aaggcaatcctaagc

SEQ ID NO: 1292460 - DNA, 15 bp, Homo sapiens
caaggcaatcctaag

SEQ ID NO: 1292461 - DNA, 15 bp, Homo sapiens
ccaaggcaatcctaa

SEQ ID NO: 1292462 - DNA, 15 bp, Homo sapiens
gccaaggcaatccta

SEQ ID NO: 1292463 - DNA, 15 bp, Homo sapiens
agccaaggcaatcct

SEQ ID NO: 1292464 - DNA, 15 bp, Homo sapiens
tagccaaggcaatcc

SEQ ID NO: 1292465 - DNA, 15 bp, Homo sapiens
atagccaaggcaatc

SEQ ID NO: 1292466 - DNA, 15 bp, Homo sapiens
aatagccaaggcaat

SEQ ID NO: 1292467 - DNA, 15 bp, Homo sapiens
gaatagccaaggcaa

SEQ ID NO: 1292468 - DNA, 15 bp, Homo sapiens
tgaatagccaaggca

SEQ ID NO: 1292469 - DNA, 15 bp, Homo sapiens
ctgaatagccaaggc

SEQ ID NO: 1292470 - DNA, 15 bp, Homo sapiens
cctgaatagccaagg

SEQ ID NO: 1292471 - DNA, 15 bp, Homo sapiens
gcctgaatagccaag

SEQ ID NO: 1292472 - DNA, 15 bp, Homo sapiens
agcctgaatagccaa

SEQ ID NO: 1292473 - DNA, 15 bp, Homo sapiens
gagcctgaatagcca

SEQ ID NO: 1292474 - DNA, 15 bp, Homo sapiens
agagcctgaatagcc

SEQ ID NO: 1292475 - DNA, 15 bp, Homo sapiens
aagagcctgaatagc

SEQ ID NO: 1292476 - DNA, 15 bp, Homo sapiens
aaagagcctgaatag

SEQ ID NO: 1292477 - DNA, 15 bp, Homo sapiens
aaaagagcctgaata

SEQ ID NO: 1292478 - DNA, 15 bp, Homo sapiens
aaaaagagcctgaat

SEQ ID NO: 1292479 - DNA, 15 bp, Homo sapiens
aaaaaagagcctgaa

SEQ ID NO: 1292480 - DNA, 15 bp, Homo sapiens
caaaaaagagcctga

SEQ ID NO: 1292481 - DNA, 15 bp, Homo sapiens
ccaaaaaagagcctg

SEQ ID NO: 1292482 - DNA, 15 bp, Homo sapiens
accaaaaaagagcct

SEQ ID NO: 1292483 - DNA, 15 bp, Homo sapiens
aaccaaaaaagagcc

SEQ ID NO: 1292484 - DNA, 15 bp, Homo sapiens
gaaccaaaaaagagc

SEQ ID NO: 1292485 - DNA, 15 bp, Homo sapiens
ggaaccaaaaaagag

SEQ ID NO: 1292486 - DNA, 15 bp, Homo sapiens
tggaaccaaaaaaga

SEQ ID NO: 1292487 - DNA, 15 bp, Homo sapiens
ctggaaccaaaaaag

SEQ ID NO: 1292488 - DNA, 15 bp, Homo sapiens
actggaaccaaaaaa

SEQ ID NO: 1292489 - DNA, 15 bp, Homo sapiens
aactggaaccaaaaa

SEQ ID NO: 1292490 - DNA, 15 bp, Homo sapiens
caactggaaccaaaa

SEQ ID NO: 1292491 - DNA, 15 bp, Homo sapiens
tcaactggaaccaaa

SEQ ID NO: 1292492 - DNA, 15 bp, Homo sapiens
ttcaactggaaccaa

SEQ ID NO: 1292493 - DNA, 15 bp, Homo sapiens
attcaactggaacca

SEQ ID NO: 1292494 - DNA, 15 bp, Homo sapiens
aattcaactggaacc

SEQ ID NO: 1292495 - DNA, 15 bp, Homo sapiens
aaattcaactggaac

SEQ ID NO: 1292496 - DNA, 15 bp, Homo sapiens
aaaattcaactggaa

SEQ ID NO: 1292497 - DNA, 15 bp, Homo sapiens
taaaattcaactgga

SEQ ID NO: 1292498 - DNA, 15 bp, Homo sapiens
ttaaaattcaactgg

SEQ ID NO: 1292499 - DNA, 15 bp, Homo sapiens
tttaaaattcaactg

SEQ ID NO: 1292500 - DNA, 15 bp, Homo sapiens
ttttaaaattcaact

SEQ ID NO: 1292501 - DNA, 15 bp, Homo sapiens
attttaaaattcaac

SEQ ID NO: 1292502 - DNA, 15 bp, Homo sapiens
tattttaaaattcaa

SEQ ID NO: 1292503 - DNA, 15 bp, Homo sapiens
actattttaaaattc

SEQ ID NO: 1292504 - DNA, 15 bp, Homo sapiens
aactattttaaaatt

SEQ ID NO: 1292505 - DNA, 15 bp, Homo sapiens
aaactattttaaaat

SEQ ID NO: 1292506 - DNA, 15 bp, Homo sapiens
aaaactattttaaaa

SEQ ID NO: 1292507 - DNA, 15 bp, Homo sapiens
aaaaactattttaaa

SEQ ID NO: 1292508 - DNA, 15 bp, Homo sapiens
aaaaaactattttaa

SEQ ID NO: 1292509 - DNA, 15 bp, Homo sapiens
aaaaaaactatttta

SEQ ID NO: 1292510 - DNA, 15 bp, Homo sapiens
aaaaaaaactatttt

SEQ ID NO: 1292511 - DNA, 15 bp, Homo sapiens
aaaaaaaaactattt

SEQ ID NO: 1292512 - DNA, 15 bp, Homo sapiens
taaaaaaaaaaaaac

SEQ ID NO: 1292513 - DNA, 15 bp, Homo sapiens
gaaataaaaaaaaaa

SEQ ID NO: 1292514 - DNA, 15 bp, Homo sapiens
agaaataaaaaaaaa

SEQ ID NO: 1292515 - DNA, 15 bp, Homo sapiens
cagaaataaaaaaaa

SEQ ID NO: 1292516 - DNA, 15 bp, Homo sapiens
acagaaataaaaaaa

SEQ ID NO: 1292517 - DNA, 15 bp, Homo sapiens
cacagaaataaaaaa

SEQ ID NO: 1292518 - DNA, 15 bp, Homo sapiens
tcacagaaataaaaa

SEQ ID NO: 1292519 - DNA, 15 bp, Homo sapiens
ttcacagaaataaaa

SEQ ID NO: 1292520 - DNA, 15 bp, Homo sapiens
cttcacagaaataaa

SEQ ID NO: 1292521 - DNA, 15 bp, Homo sapiens
tcttcacagaaataa

SEQ ID NO: 1292522 - DNA, 15 bp, Homo sapiens
ttcttcacagaaata

SEQ ID NO: 1292523 - DNA, 15 bp, Homo sapiens
attcttcacagaaat

SEQ ID NO: 1292524 - DNA, 15 bp, Homo sapiens
cattcttcacagaaa

SEQ ID NO: 1292525 - DNA, 15 bp, Homo sapiens
acattcttcacagaa

SEQ ID NO: 1292526 - DNA, 15 bp, Homo sapiens
gacattcttcacaga

SEQ ID NO: 1292527 - DNA, 15 bp, Homo sapiens
tgacattcttcacag

SEQ ID NO: 1292528 - DNA, 15 bp, Homo sapiens
atgacattcttcaca

SEQ ID NO: 1292529 - DNA, 15 bp, Homo sapiens
aatgacattcttcac

SEQ ID NO: 1292530 - DNA, 15 bp, Homo sapiens
ctaccaatgacattc

SEQ ID NO: 1292531 - DNA, 15 bp, Homo sapiens
aactaccaatgacat

SEQ ID NO: 1292532 - DNA, 15 bp, Homo sapiens
aaactaccaatgaca

SEQ ID NO: 1292533 - DNA, 15 bp, Homo sapiens
caaactaccaatgac

SEQ ID NO: 1292534 - DNA, 15 bp, Homo sapiens
tcaaactaccaatga

SEQ ID NO: 1292535 - DNA, 15 bp, Homo sapiens
atcaaactaccaatg

SEQ ID NO: 1292536 - DNA, 15 bp, Homo sapiens
tatcaaactaccaat

SEQ ID NO: 1292537 - DNA, 15 bp, Homo sapiens
ctatcaaactaccaa

SEQ ID NO: 1292538 - DNA, 15 bp, Homo sapiens
cctatcaaactacca

SEQ ID NO: 1292539 - DNA, 15 bp, Homo sapiens
tcctatcaaactacc

SEQ ID NO: 1292540 - DNA, 15 bp, Homo sapiens
ttcctatcaaactac

SEQ ID NO: 1292541 - DNA, 15 bp, Homo sapiens
attcctatcaaacta

SEQ ID NO: 1292542 - DNA, 15 bp, Homo sapiens
tattcctatcaaact

SEQ ID NO: 1292543 - DNA, 15 bp, Homo sapiens
ctattcctatcaaac

SEQ ID NO: 1292544 - DNA, 15 bp, Homo sapiens
gctattcctatcaaa

SEQ ID NO: 1292545 - DNA, 15 bp, Homo sapiens
ggctattcctatcaa

SEQ ID NO: 1292546 - DNA, 15 bp, Homo sapiens
aggctattcctatca

SEQ ID NO: 1292547 - DNA, 15 bp, Homo sapiens
aaggctattcctatc

SEQ ID NO: 1292548 - DNA, 15 bp, Homo sapiens
caaggctattcctat

SEQ ID NO: 1292549 - DNA, 15 bp, Homo sapiens
tcaaggctattccta

SEQ ID NO: 1292550 - DNA, 15 bp, Homo sapiens
ttcaaggctattcct

SEQ ID NO: 1292551 - DNA, 15 bp, Homo sapiens
attcaaggctattcc

SEQ ID NO: 1292552 - DNA, 15 bp, Homo sapiens
gattcaaggctattc

SEQ ID NO: 1292553 - DNA, 15 bp, Homo sapiens
agattcaaggctatt

SEQ ID NO: 1292554 - DNA, 15 bp, Homo sapiens
cagattcaaggctat

SEQ ID NO: 1292555 - DNA, 15 bp, Homo sapiens
acagattcaaggcta

SEQ ID NO: 1292556 - DNA, 15 bp, Homo sapiens
tacagattcaaggct

SEQ ID NO: 1292557 - DNA, 15 bp, Homo sapiens
ttacagattcaaggc

SEQ ID NO: 1292558 - DNA, 15 bp, Homo sapiens
attacagattcaagg

SEQ ID NO: 1292559 - DNA, 15 bp, Homo sapiens
aattacagattcaag

SEQ ID NO: 1292560 - DNA, 15 bp, Homo sapiens
aaattacagattcaa

SEQ ID NO: 1292561 - DNA, 15 bp, Homo sapiens
aaaattacagattca

SEQ ID NO: 1292562 - DNA, 15 bp, Homo sapiens
aaaaattacagattc

SEQ ID NO: 1292563 - DNA, 15 bp, Homo sapiens
aaaaaattacagatt

SEQ ID NO: 1292564 - DNA, 15 bp, Homo sapiens
aaaaaaattacagat

SEQ ID NO: 1292565 - DNA, 15 bp, Homo sapiens
caaaaaaattacaga

SEQ ID NO: 1292566 - DNA, 15 bp, Homo sapiens
ccaaaaaaattacag

SEQ ID NO: 1292567 - DNA, 15 bp, Homo sapiens
cccaaaaaaattaca

SEQ ID NO: 1292568 - DNA, 15 bp, Homo sapiens
ccccaaaaaaattac

SEQ ID NO: 1292569 - DNA, 15 bp, Homo sapiens
gccccaaaaaaatta

SEQ ID NO: 1292570 - DNA, 15 bp, Homo sapiens
tgccccaaaaaaatt

SEQ ID NO: 1292571 - DNA, 15 bp, Homo sapiens
ctgccccaaaaaaat

SEQ ID NO: 1292572 - DNA, 15 bp, Homo sapiens
actgccccaaaaaaa

SEQ ID NO: 1292573 - DNA, 15 bp, Homo sapiens
tactgccccaaaaaa

SEQ ID NO: 1292574 - DNA, 15 bp, Homo sapiens
atactgccccaaaaa

SEQ ID NO: 1292575 - DNA, 15 bp, Homo sapiens
catactgccccaaaa

SEQ ID NO: 1292576 - DNA, 15 bp, Homo sapiens
ccatactgccccaaa

SEQ ID NO: 1292577 - DNA, 15 bp, Homo sapiens
gccatactgccccaa

SEQ ID NO: 1292578 - DNA, 15 bp, Homo sapiens
ggccatactgcccca

SEQ ID NO: 1292579 - DNA, 15 bp, Homo sapiens
tggccatactgcccc

SEQ ID NO: 1292580 - DNA, 15 bp, Homo sapiens
atggccatactgccc

SEQ ID NO: 1292581 - DNA, 15 bp, Homo sapiens
aatggccatactgcc

SEQ ID NO: 1292582 - DNA, 15 bp, Homo sapiens
aaatggccatactgc

SEQ ID NO: 1292583 - DNA, 15 bp, Homo sapiens
aaaatggccatactg

SEQ ID NO: 1292584 - DNA, 15 bp, Homo sapiens
taaaatggccatact

SEQ ID NO: 1292585 - DNA, 15 bp, Homo sapiens
ttaaaatggccatac

SEQ ID NO: 1292586 - DNA, 15 bp, Homo sapiens
attaaaatggccata

SEQ ID NO: 1292587 - DNA, 15 bp, Homo sapiens
cattaaaatggccat

SEQ ID NO: 1292588 - DNA, 15 bp, Homo sapiens
aaatatcattaaaat

SEQ ID NO: 1292589 - DNA, 15 bp, Homo sapiens
taaatatcattaaaa

SEQ ID NO: 1292590 - DNA, 15 bp, Homo sapiens
ataaatatcattaaa

SEQ ID NO: 1292591 - DNA, 15 bp, Homo sapiens
aataaatatcattaa

SEQ ID NO: 1292592 - DNA, 15 bp, Homo sapiens
gaataaatatcatta

SEQ ID NO: 1292593 - DNA, 15 bp, Homo sapiens
agaataaatatcatt

SEQ ID NO: 1292594 - DNA, 15 bp, Homo sapiens
aagaataaatatcat

SEQ ID NO: 1292595 - DNA, 15 bp, Homo sapiens
gaagaataaatatca

SEQ ID NO: 1292596 - DNA, 15 bp, Homo sapiens
ggaagaataaatatc

SEQ ID NO: 1292597 - DNA, 15 bp, Homo sapiens
aggaagaataaatat

SEQ ID NO: 1292598 - DNA, 15 bp, Homo sapiens
taggaagaataaata

SEQ ID NO: 1292599 - DNA, 15 bp, Homo sapiens
ataggaagaataaat

SEQ ID NO: 1292600 - DNA, 15 bp, Homo sapiens
gataggaagaataaa

SEQ ID NO: 1292601 - DNA, 15 bp, Homo sapiens
ggataggaagaataa

SEQ ID NO: 1292602 - DNA, 15 bp, Homo sapiens
tggataggaagaata

SEQ ID NO: 1292603 - DNA, 15 bp, Homo sapiens
atggataggaagaat

SEQ ID NO: 1292604 - DNA, 15 bp, Homo sapiens
catggataggaagaa

SEQ ID NO: 1292605 - DNA, 15 bp, Homo sapiens
tcatggataggaaga

SEQ ID NO: 1292606 - DNA, 15 bp, Homo sapiens
ctcatggataggaag

SEQ ID NO: 1292607 - DNA, 15 bp, Homo sapiens
gctcatggataggaa

SEQ ID NO: 1292608 - DNA, 15 bp, Homo sapiens
tgctcatggatagga

SEQ ID NO: 1292609 - DNA, 15 bp, Homo sapiens
atgctcatggatagg

SEQ ID NO: 1292610 - DNA, 15 bp, Homo sapiens
catgctcatggatag

SEQ ID NO: 1292611 - DNA, 15 bp, Homo sapiens
cccatgctcatggat

SEQ ID NO: 1292612 - DNA, 15 bp, Homo sapiens
tcccatgctcatgga

SEQ ID NO: 1292613 - DNA, 15 bp, Homo sapiens
atcccatgctcatgg

SEQ ID NO: 1292614 - DNA, 15 bp, Homo sapiens
catcccatgctcatg

SEQ ID NO: 1292615 - DNA, 15 bp, Homo sapiens
acatcccatgctcat

SEQ ID NO: 1292616 - DNA, 15 bp, Homo sapiens
aacatcccatgctca

SEQ ID NO: 1292617 - DNA, 15 bp, Homo sapiens
aaacatcccatgctc

SEQ ID NO: 1292618 - DNA, 15 bp, Homo sapiens
aaaacatcccatgct

SEQ ID NO: 1292619 - DNA, 15 bp, Homo sapiens
aaaaacatcccatgc

SEQ ID NO: 1292620 - DNA, 15 bp, Homo sapiens
gaaaaacatcccatg

SEQ ID NO: 1292621 - DNA, 15 bp, Homo sapiens
ggaaaaacatcccat

SEQ ID NO: 1292622 - DNA, 15 bp, Homo sapiens
tggaaaaacatccca

SEQ ID NO: 1292623 - DNA, 15 bp, Homo sapiens
atggaaaaacatccc

SEQ ID NO: 1292624 - DNA, 15 bp, Homo sapiens
catggaaaaacatcc

SEQ ID NO: 1292625 - DNA, 15 bp, Homo sapiens
acatggaaaaacatc

SEQ ID NO: 1292626 - DNA, 15 bp, Homo sapiens
cacatggaaaaacat

SEQ ID NO: 1292627 - DNA, 15 bp, Homo sapiens
acacatggaaaaaca

SEQ ID NO: 1292628 - DNA, 15 bp, Homo sapiens
aacacatggaaaaac

SEQ ID NO: 1292629 - DNA, 15 bp, Homo sapiens
aaacacatggaaaaa

SEQ ID NO: 1292630 - DNA, 15 bp, Homo sapiens
caaacacatggaaaa

SEQ ID NO: 1292631 - DNA, 15 bp, Homo sapiens
acaaacacatggaaa

SEQ ID NO: 1292632 - DNA, 15 bp, Homo sapiens
cacaaacacatggaa

SEQ ID NO: 1292633 - DNA, 15 bp, Homo sapiens
acacaaacacatgga

SEQ ID NO: 1292634 - DNA, 15 bp, Homo sapiens
gacacaaacacatgg

SEQ ID NO: 1292635 - DNA, 15 bp, Homo sapiens
tgacacaaacacatg

SEQ ID NO: 1292636 - DNA, 15 bp, Homo sapiens
atgacacaaacacat

SEQ ID NO: 1292637 - DNA, 15 bp, Homo sapiens
gatgacacaaacaca

SEQ ID NO: 1292638 - DNA, 15 bp, Homo sapiens
agatgacacaaacac

SEQ ID NO: 1292639 - DNA, 15 bp, Homo sapiens
gagatgacacaaaca

SEQ ID NO: 1292640 - DNA, 15 bp, Homo sapiens
agagatgacacaaac

SEQ ID NO: 1292641 - DNA, 15 bp, Homo sapiens
cagagatgacacaaa

SEQ ID NO: 1292642 - DNA, 15 bp, Homo sapiens
tcagagatgacacaa

SEQ ID NO: 1292643 - DNA, 15 bp, Homo sapiens
atcagagatgacaca

SEQ ID NO: 1292644 - DNA, 15 bp, Homo sapiens
caatcagagatgaca

SEQ ID NO: 1292645 - DNA, 15 bp, Homo sapiens
gcaatcagagatgac

SEQ ID NO: 1292646 - DNA, 15 bp, Homo sapiens
agcaatcagagatga

SEQ ID NO: 1292647 - DNA, 15 bp, Homo sapiens
aagcaatcagagatg

SEQ ID NO: 1292648 - DNA, 15 bp, Homo sapiens
aaagcaatcagagat

SEQ ID NO: 1292649 - DNA, 15 bp, Homo sapiens
caaagcaatcagaga

SEQ ID NO: 1292650 - DNA, 15 bp, Homo sapiens
tcaaagcaatcagag

SEQ ID NO: 1292651 - DNA, 15 bp, Homo sapiens
ctcaaagcaatcaga

SEQ ID NO: 1292652 - DNA, 15 bp, Homo sapiens
gctcaaagcaatcag

SEQ ID NO: 1292653 - DNA, 15 bp, Homo sapiens
tgctcaaagcaatca

SEQ ID NO: 1292654 - DNA, 15 bp, Homo sapiens
ctgctcaaagcaatc

SEQ ID NO: 1292655 - DNA, 15 bp, Homo sapiens
actgctcaaagcaat

SEQ ID NO: 1292656 - DNA, 15 bp, Homo sapiens
cactgctcaaagcaa

SEQ ID NO: 1292657 - DNA, 15 bp, Homo sapiens
acactgctcaaagca

SEQ ID NO: 1292658 - DNA, 15 bp, Homo sapiens
aacactgctcaaagc

SEQ ID NO: 1292659 - DNA, 15 bp, Homo sapiens
aaacactgctcaaag

SEQ ID NO: 1292660 - DNA, 15 bp, Homo sapiens
aaaacactgctcaaa

SEQ ID NO: 1292661 - DNA, 15 bp, Homo sapiens
caaaacactgctcaa

SEQ ID NO: 1292662 - DNA, 15 bp, Homo sapiens
tcaaaacactgctca

SEQ ID NO: 1292663 - DNA, 15 bp, Homo sapiens
ttcaaaacactgctc

SEQ ID NO: 1292664 - DNA, 15 bp, Homo sapiens
tttcaaaacactgct

SEQ ID NO: 1292665 - DNA, 15 bp, Homo sapiens
atttcaaaacactgc

SEQ ID NO: 1292666 - DNA, 15 bp, Homo sapiens
aatttcaaaacactg

SEQ ID NO: 1292667 - DNA, 15 bp, Homo sapiens
gaatttcaaaacact

SEQ ID NO: 1292668 - DNA, 15 bp, Homo sapiens
agaatttcaaaacac

SEQ ID NO: 1292669 - DNA, 15 bp, Homo sapiens
aagaatttcaaaaca

SEQ ID NO: 1292670 - DNA, 15 bp, Homo sapiens
caagaatttcaaaac

SEQ ID NO: 1292671 - DNA, 15 bp, Homo sapiens
acaagaatttcaaaa

SEQ ID NO: 1292672 - DNA, 15 bp, Homo sapiens
aacaagaatttcaaa

SEQ ID NO: 1292673 - DNA, 15 bp, Homo sapiens
caacaagaatttcaa

SEQ ID NO: 1292674 - DNA, 15 bp, Homo sapiens
acaacaagaatttca

SEQ ID NO: 1292675 - DNA, 15 bp, Homo sapiens
tacaacaagaatttc

SEQ ID NO: 1292676 - DNA, 15 bp, Homo sapiens
ctacaacaagaattt

SEQ ID NO: 1292677 - DNA, 15 bp, Homo sapiens
tctacaacaagaatt

SEQ ID NO: 1292678 - DNA, 15 bp, Homo sapiens
ctctacaacaagaat

SEQ ID NO: 1292679 - DNA, 15 bp, Homo sapiens
tctctacaacaagaa

SEQ ID NO: 1292680 - DNA, 15 bp, Homo sapiens
ctctctacaacaaga

SEQ ID NO: 1292681 - DNA, 15 bp, Homo sapiens
gctctctacaacaag

SEQ ID NO: 1292682 - DNA, 15 bp, Homo sapiens
agctctctacaacaa

SEQ ID NO: 1292683 - DNA, 15 bp, Homo sapiens
aagctctctacaaca

SEQ ID NO: 1292684 - DNA, 15 bp, Homo sapiens
aaagctctctacaac

SEQ ID NO: 1292685 - DNA, 15 bp, Homo sapiens
cagggaggtgaaagc

SEQ ID NO: 1292686 - DNA, 15 bp, Homo sapiens
ccagggaggtgaaag

SEQ ID NO: 1292687 - DNA, 15 bp, Homo sapiens
accagggaggtgaaa

SEQ ID NO: 1292688 - DNA, 15 bp, Homo sapiens
aaccagggaggtgaa

SEQ ID NO: 1292689 - DNA, 15 bp, Homo sapiens
taaccagggaggtga

SEQ ID NO: 1292690 - DNA, 15 bp, Homo sapiens
ctaaccagggaggtg

SEQ ID NO: 1292691 - DNA, 15 bp, Homo sapiens
actaaccagggaggt

SEQ ID NO: 1292692 - DNA, 15 bp, Homo sapiens
aactaaccagggagg

SEQ ID NO: 1292693 - DNA, 15 bp, Homo sapiens
caactaaccagggag

SEQ ID NO: 1292694 - DNA, 15 bp, Homo sapiens
acaactaaccaggga

SEQ ID NO: 1292695 - DNA, 15 bp, Homo sapiens
tacaactaaccaggg

SEQ ID NO: 1292696 - DNA, 15 bp, Homo sapiens
atacaactaaccagg

SEQ ID NO: 1292697 - DNA, 15 bp, Homo sapiens
aatacaactaaccag

SEQ ID NO: 1292698 - DNA, 15 bp, Homo sapiens
gaatacaactaacca

SEQ ID NO: 1292699 - DNA, 15 bp, Homo sapiens
ggaatacaactaacc

SEQ ID NO: 1292700 - DNA, 15 bp, Homo sapiens
aggaatacaactaac

SEQ ID NO: 1292701 - DNA, 15 bp, Homo sapiens
taggaatacaactaa

SEQ ID NO: 1292702 - DNA, 15 bp, Homo sapiens
ataggaatacaacta

SEQ ID NO: 1292703 - DNA, 15 bp, Homo sapiens
cataggaatacaact

SEQ ID NO: 1292704 - DNA, 15 bp, Homo sapiens
acataggaatacaac

SEQ ID NO: 1292705 - DNA, 15 bp, Homo sapiens
tacataggaatacaa

SEQ ID NO: 1292706 - DNA, 15 bp, Homo sapiens
atacataggaataca

SEQ ID NO: 1292707 - DNA, 15 bp, Homo sapiens
aatacataggaatac

SEQ ID NO: 1292708 - DNA, 15 bp, Homo sapiens
gaatacataggaata

SEQ ID NO: 1292709 - DNA, 15 bp, Homo sapiens
agaatacataggaat

SEQ ID NO: 1292710 - DNA, 15 bp, Homo sapiens
aagaatacataggaa

SEQ ID NO: 1292711 - DNA, 15 bp, Homo sapiens
aaagaatacatagga

SEQ ID NO: 1292712 - DNA, 15 bp, Homo sapiens
aaaagaatacatagg

SEQ ID NO: 1292713 - DNA, 15 bp, Homo sapiens
aaaaagaatacatag

SEQ ID NO: 1292714 - DNA, 15 bp, Homo sapiens
caaaaagaatacata

SEQ ID NO: 1292715 - DNA, 15 bp, Homo sapiens
acaaaaagaatacat

SEQ ID NO: 1292716 - DNA, 15 bp, Homo sapiens
cacaaaaagaataca

SEQ ID NO: 1292717 - DNA, 15 bp, Homo sapiens
ccacaaaaagaatac

SEQ ID NO: 1292718 - DNA, 15 bp, Homo sapiens
gccacaaaaagaata

SEQ ID NO: 1292719 - DNA, 15 bp, Homo sapiens
tgccacaaaaagaat

SEQ ID NO: 1292720 - DNA, 15 bp, Homo sapiens
ttgccacaaaaagaa

SEQ ID NO: 1292721 - DNA, 15 bp, Homo sapiens
attgccacaaaaaga

SEQ ID NO: 1292722 - DNA, 15 bp, Homo sapiens
aattgccacaaaaag

SEQ ID NO: 1292723 - DNA, 15 bp, Homo sapiens
aaattgccacaaaaa

SEQ ID NO: 1292724 - DNA, 15 bp, Homo sapiens
aaaattgccacaaaa

SEQ ID NO: 1292725 - DNA, 15 bp, Homo sapiens
aaaaattgccacaaa

SEQ ID NO: 1292726 - DNA, 15 bp, Homo sapiens
taaaaattgccacaa

SEQ ID NO: 1292727 - DNA, 15 bp, Homo sapiens
ttaaaaattgccaca

SEQ ID NO: 1292728 - DNA, 15 bp, Homo sapiens
attaaaaattgccac

SEQ ID NO: 1292729 - DNA, 15 bp, Homo sapiens
cattaaaaattgcca

SEQ ID NO: 1292730 - DNA, 15 bp, Homo sapiens
ccattaaaaattgcc

SEQ ID NO: 1292731 - DNA, 15 bp, Homo sapiens
cccattaaaaattgc

SEQ ID NO: 1292732 - DNA, 15 bp, Homo sapiens
tcccattaaaaattg

SEQ ID NO: 1292733 - DNA, 15 bp, Homo sapiens
atcccattaaaaatt

SEQ ID NO: 1292734 - DNA, 15 bp, Homo sapiens
aatcccattaaaaat

SEQ ID NO: 1292735 - DNA, 15 bp, Homo sapiens
caatcccattaaaaa

SEQ ID NO: 1292736 - DNA, 15 bp, Homo sapiens
gcaatcccattaaaa

SEQ ID NO: 1292737 - DNA, 15 bp, Homo sapiens
ggcaatcccattaaa

SEQ ID NO: 1292738 - DNA, 15 bp, Homo sapiens
aggcaatcccattaa

SEQ ID NO: 1292739 - DNA, 15 bp, Homo sapiens
aaggcaatcccatta

SEQ ID NO: 1292740 - DNA, 15 bp, Homo sapiens
aaaggcaatcccatt

SEQ ID NO: 1292741 - DNA, 15 bp, Homo sapiens
gaaaggcaatcccat

SEQ ID NO: 1292742 - DNA, 15 bp, Homo sapiens
agaaaggcaatccca

SEQ ID NO: 1292743 - DNA, 15 bp, Homo sapiens
cagaaaggcaatccc

SEQ ID NO: 1292744 - DNA, 15 bp, Homo sapiens
tcagaaaggcaatcc

SEQ ID NO: 1292745 - DNA, 15 bp, Homo sapiens
atcagaaaggcaatc

SEQ ID NO: 1292746 - DNA, 15 bp, Homo sapiens
aatcagaaaggcaat

SEQ ID NO: 1292747 - DNA, 15 bp, Homo sapiens
aaatcagaaaggcaa

SEQ ID NO: 1292748 - DNA, 15 bp, Homo sapiens
caaatcagaaaggca

SEQ ID NO: 1292749 - DNA, 15 bp, Homo sapiens
ccaaatcagaaaggc

SEQ ID NO: 1292750 - DNA, 15 bp, Homo sapiens
gccaaatcagaaagg

SEQ ID NO: 1292751 - DNA, 15 bp, Homo sapiens
agccaaatcagaaag

SEQ ID NO: 1292752 - DNA, 15 bp, Homo sapiens
gagccaaatcagaaa

SEQ ID NO: 1292753 - DNA, 15 bp, Homo sapiens
agagccaaatcagaa

SEQ ID NO: 1292754 - DNA, 15 bp, Homo sapiens
gagagccaaatcaga

SEQ ID NO: 1292755 - DNA, 15 bp, Homo sapiens
tgagagccaaatcag

SEQ ID NO: 1292756 - DNA, 15 bp, Homo sapiens
gccaagctgagagcc

SEQ ID NO: 1292757 - DNA, 15 bp, Homo sapiens
agccaagctgagagc

SEQ ID NO: 1292758 - DNA, 15 bp, Homo sapiens
gagccaagctgagag

SEQ ID NO: 1292759 - DNA, 15 bp, Homo sapiens
agagccaagctgaga

SEQ ID NO: 1292760 - DNA, 15 bp, Homo sapiens
aagagccaagctgag

SEQ ID NO: 1292761 - DNA, 15 bp, Homo sapiens
caagagccaagctga

SEQ ID NO: 1292762 - DNA, 15 bp, Homo sapiens
acaagagccaagctg

SEQ ID NO: 1292763 - DNA, 15 bp, Homo sapiens
aacaagagccaagct

SEQ ID NO: 1292764 - DNA, 15 bp, Homo sapiens
caacaagagccaagc

SEQ ID NO: 1292765 - DNA, 15 bp, Homo sapiens
ccaacaagagccaag

SEQ ID NO: 1292766 - DNA, 15 bp, Homo sapiens
accaacaagagccaa

SEQ ID NO: 1292767 - DNA, 15 bp, Homo sapiens
caccaacaagagcca

SEQ ID NO: 1292768 - DNA, 15 bp, Homo sapiens
acaccaacaagagcc

SEQ ID NO: 1292769 - DNA, 15 bp, Homo sapiens
cacaccaacaagagc

SEQ ID NO: 1292770 - DNA, 15 bp, Homo sapiens
acacaccaacaagag

SEQ ID NO: 1292771 - DNA, 15 bp, Homo sapiens
tacacaccaacaaga

SEQ ID NO: 1292772 - DNA, 15 bp, Homo sapiens
ctacacaccaacaag

SEQ ID NO: 1292773 - DNA, 15 bp, Homo sapiens
tctacacaccaacaa

SEQ ID NO: 1292774 - DNA, 15 bp, Homo sapiens
ttctacacaccaaca

SEQ ID NO: 1292775 - DNA, 15 bp, Homo sapiens
gttctacacaccaac

SEQ ID NO: 1292776 - DNA, 15 bp, Homo sapiens
agttctacacaccaa

SEQ ID NO: 1292777 - DNA, 15 bp, Homo sapiens
tagttctacacacca

SEQ ID NO: 1292778 - DNA, 15 bp, Homo sapiens
gtagttctacacacc

SEQ ID NO: 1292779 - DNA, 15 bp, Homo sapiens
agtagttctacacac

SEQ ID NO: 1292780 - DNA, 15 bp, Homo sapiens
tagtagttctacaca

SEQ ID NO: 1292781 - DNA, 15 bp, Homo sapiens
ctagtagttctacac

SEQ ID NO: 1292782 - DNA, 15 bp, Homo sapiens
actagtagttctaca

SEQ ID NO: 1292783 - DNA, 15 bp, Homo sapiens
cactagtagttctac

SEQ ID NO: 1292784 - DNA, 15 bp, Homo sapiens
tcactagtagttcta

SEQ ID NO: 1292785 - DNA, 15 bp, Homo sapiens
atcactagtagttct

SEQ ID NO: 1292786 - DNA, 15 bp, Homo sapiens
aatcactagtagttc

SEQ ID NO: 1292787 - DNA, 15 bp, Homo sapiens
aaatcactagtagtt

SEQ ID NO: 1292788 - DNA, 15 bp, Homo sapiens
aaaatcactagtagt

SEQ ID NO: 1292789 - DNA, 15 bp, Homo sapiens
aaaaatcactagtag

SEQ ID NO: 1292790 - DNA, 15 bp, Homo sapiens
taaaaatcactagta

SEQ ID NO: 1292791 - DNA, 15 bp, Homo sapiens
ataaaaatcactagt

SEQ ID NO: 1292792 - DNA, 15 bp, Homo sapiens
tataaaaatcactag

SEQ ID NO: 1292793 - DNA, 15 bp, Homo sapiens
gtataaaaatcacta

SEQ ID NO: 1292794 - DNA, 15 bp, Homo sapiens
tgtataaaaatcact

SEQ ID NO: 1292795 - DNA, 15 bp, Homo sapiens
atgtataaaaatcac

SEQ ID NO: 1292796 - DNA, 15 bp, Homo sapiens
aatgtataaaaatca

SEQ ID NO: 1292797 - DNA, 15 bp, Homo sapiens
caatgtataaaaatc

SEQ ID NO: 1292798 - DNA, 15 bp, Homo sapiens
tcaatgtataaaaat

SEQ ID NO: 1292799 - DNA, 15 bp, Homo sapiens
atcaatgtataaaaa

SEQ ID NO: 1292800 - DNA, 15 bp, Homo sapiens
aatcaatgtataaaa

SEQ ID NO: 1292801 - DNA, 15 bp, Homo sapiens
aaaatcaatgtataa

SEQ ID NO: 1292802 - DNA, 15 bp, Homo sapiens
caaaatcaatgtata

SEQ ID NO: 1292803 - DNA, 15 bp, Homo sapiens
acaaaatcaatgtat

SEQ ID NO: 1292804 - DNA, 15 bp, Homo sapiens
tacaaaatcaatgta

SEQ ID NO: 1292805 - DNA, 15 bp, Homo sapiens
atacaaaatcaatgt

SEQ ID NO: 1292806 - DNA, 15 bp, Homo sapiens
gatacaaaatcaatg

SEQ ID NO: 1292807 - DNA, 15 bp, Homo sapiens
ggatacaaaatcaat

SEQ ID NO: 1292808 - DNA, 15 bp, Homo sapiens
aggatacaaaatcaa

SEQ ID NO: 1292809 - DNA, 15 bp, Homo sapiens
caggatacaaaatca

SEQ ID NO: 1292810 - DNA, 15 bp, Homo sapiens
tcaggatacaaaatc

SEQ ID NO: 1292811 - DNA, 15 bp, Homo sapiens
ttcaggatacaaaat

SEQ ID NO: 1292812 - DNA, 15 bp, Homo sapiens
tttcaggatacaaaa

SEQ ID NO: 1292813 - DNA, 15 bp, Homo sapiens
gtttcaggatacaaa

SEQ ID NO: 1292814 - DNA, 15 bp, Homo sapiens
agtttcaggatacaa

SEQ ID NO: 1292815 - DNA, 15 bp, Homo sapiens
aagtttcaggataca

SEQ ID NO: 1292816 - DNA, 15 bp, Homo sapiens
aaagtttcaggatac

SEQ ID NO: 1292817 - DNA, 15 bp, Homo sapiens
cagcaaagtttcagg

SEQ ID NO: 1292818 - DNA, 15 bp, Homo sapiens
tcagcaaagtttcag

SEQ ID NO: 1292819 - DNA, 15 bp, Homo sapiens
ttcagcaaagtttca

SEQ ID NO: 1292820 - DNA, 15 bp, Homo sapiens
cttcagcaaagtttc

SEQ ID NO: 1292821 - DNA, 15 bp, Homo sapiens
acttcagcaaagttt

SEQ ID NO: 1292822 - DNA, 15 bp, Homo sapiens
aacttcagcaaagtt

SEQ ID NO: 1292823 - DNA, 15 bp, Homo sapiens
caacttcagcaaagt

SEQ ID NO: 1292824 - DNA, 15 bp, Homo sapiens
acaacttcagcaaag

SEQ ID NO: 1292825 - DNA, 15 bp, Homo sapiens
aacaacttcagcaaa

SEQ ID NO: 1292826 - DNA, 15 bp, Homo sapiens
caacaacttcagcaa

SEQ ID NO: 1292827 - DNA, 15 bp, Homo sapiens
tcaacaacttcagca

SEQ ID NO: 1292828 - DNA, 15 bp, Homo sapiens
atcaacaacttcagc

SEQ ID NO: 1292829 - DNA, 15 bp, Homo sapiens
gatcaacaacttcag

SEQ ID NO: 1292830 - DNA, 15 bp, Homo sapiens
tgatcaacaacttca

SEQ ID NO: 1292831 - DNA, 15 bp, Homo sapiens
ctgatcaacaacttc

SEQ ID NO: 1292832 - DNA, 15 bp, Homo sapiens
gctgatcaacaactt

SEQ ID NO: 1292833 - DNA, 15 bp, Homo sapiens
agctgatcaacaact

SEQ ID NO: 1292834 - DNA, 15 bp, Homo sapiens
cagctgatcaacaac

SEQ ID NO: 1292835 - DNA, 15 bp, Homo sapiens
tcagctgatcaacaa

SEQ ID NO: 1292836 - DNA, 15 bp, Homo sapiens
ttcagctgatcaaca

SEQ ID NO: 1292837 - DNA, 15 bp, Homo sapiens
cttcagctgatcaac

SEQ ID NO: 1292838 - DNA, 15 bp, Homo sapiens
ccttcagctgatcaa

SEQ ID NO: 1292839 - DNA, 15 bp, Homo sapiens
tccttcagctgatca

SEQ ID NO: 1292840 - DNA, 15 bp, Homo sapiens
ctccttcagctgatc

SEQ ID NO: 1292841 - DNA, 15 bp, Homo sapiens
gctccttcagctgat

SEQ ID NO: 1292842 - DNA, 15 bp, Homo sapiens
agctccttcagctga

SEQ ID NO: 1292843 - DNA, 15 bp, Homo sapiens
aagctccttcagctg

SEQ ID NO: 1292844 - DNA, 15 bp, Homo sapiens
aaagctccttcagct

SEQ ID NO: 1292845 - DNA, 15 bp, Homo sapiens
aaaagctccttcagc

SEQ ID NO: 1292846 - DNA, 15 bp, Homo sapiens
aaaaagctccttcag

SEQ ID NO: 1292847 - DNA, 15 bp, Homo sapiens
caaaaagctccttca

SEQ ID NO: 1292848 - DNA, 15 bp, Homo sapiens
ccaaaaagctccttc

SEQ ID NO: 1292849 - DNA, 15 bp, Homo sapiens
gccaaaaagctcctt

SEQ ID NO: 1292850 - DNA, 15 bp, Homo sapiens
agccaaaaagctcct

SEQ ID NO: 1292851 - DNA, 15 bp, Homo sapiens
gagccaaaaagctcc

SEQ ID NO: 1292852 - DNA, 15 bp, Homo sapiens
agagccaaaaagctc

SEQ ID NO: 1292853 - DNA, 15 bp, Homo sapiens
tagagccaaaaagct

SEQ ID NO: 1292854 - DNA, 15 bp, Homo sapiens
ttagagccaaaaagc

SEQ ID NO: 1292855 - DNA, 15 bp, Homo sapiens
cttagagccaaaaag

SEQ ID NO: 1292856 - DNA, 15 bp, Homo sapiens
tcttagagccaaaaa

SEQ ID NO: 1292857 - DNA, 15 bp, Homo sapiens
gtcttagagccaaaa

SEQ ID NO: 1292858 - DNA, 15 bp, Homo sapiens
agtcttagagccaaa

SEQ ID NO: 1292859 - DNA, 15 bp, Homo sapiens
tagtcttagagccaa

SEQ ID NO: 1292860 - DNA, 15 bp, Homo sapiens
gtagtcttagagcca

SEQ ID NO: 1292861 - DNA, 15 bp, Homo sapiens
tgtagtcttagagcc

SEQ ID NO: 1292862 - DNA, 15 bp, Homo sapiens
ctgtagtcttagagc

SEQ ID NO: 1292863 - DNA, 15 bp, Homo sapiens
cctgtagtcttagag

SEQ ID NO: 1292864 - DNA, 15 bp, Homo sapiens
ccctgtagtcttaga

SEQ ID NO: 1292865 - DNA, 15 bp, Homo sapiens
accctgtagtcttag

SEQ ID NO: 1292866 - DNA, 15 bp, Homo sapiens
aaccctgtagtctta

SEQ ID NO: 1292867 - DNA, 15 bp, Homo sapiens
aaaccctgtagtctt

SEQ ID NO: 1292868 - DNA, 15 bp, Homo sapiens
aaaaccctgtagtct

SEQ ID NO: 1292869 - DNA, 15 bp, Homo sapiens
gaaaaccctgtagtc

SEQ ID NO: 1292870 - DNA, 15 bp, Homo sapiens
agaaaaccctgtagt

SEQ ID NO: 1292871 - DNA, 15 bp, Homo sapiens
tagaaaaccctgtag

SEQ ID NO: 1292872 - DNA, 15 bp, Homo sapiens
ctagaaaaccctgta

SEQ ID NO: 1292873 - DNA, 15 bp, Homo sapiens
tctagaaaaccctgt

SEQ ID NO: 1292874 - DNA, 15 bp, Homo sapiens
atctagaaaaccctg

SEQ ID NO: 1292875 - DNA, 15 bp, Homo sapiens
tatctagaaaaccct

SEQ ID NO: 1292876 - DNA, 15 bp, Homo sapiens
atatctagaaaaccc

SEQ ID NO: 1292877 - DNA, 15 bp, Homo sapiens
tatatctagaaaacc

SEQ ID NO: 1292878 - DNA, 15 bp, Homo sapiens
ctatatctagaaaac

SEQ ID NO: 1292879 - DNA, 15 bp, Homo sapiens
gctatatctagaaaa

SEQ ID NO: 1292880 - DNA, 15 bp, Homo sapiens
tgctatatctagaaa

SEQ ID NO: 1292881 - DNA, 15 bp, Homo sapiens
atgctatatctagaa

SEQ ID NO: 1292882 - DNA, 15 bp, Homo sapiens
gatgctatatctaga

SEQ ID NO: 1292883 - DNA, 15 bp, Homo sapiens
tgatgctatatctag

SEQ ID NO: 1292884 - DNA, 15 bp, Homo sapiens
atgatgctatatcta

SEQ ID NO: 1292885 - DNA, 15 bp, Homo sapiens
catgatgctatatct

SEQ ID NO: 1292886 - DNA, 15 bp, Homo sapiens
acatgatgctatatc

SEQ ID NO: 1292887 - DNA, 15 bp, Homo sapiens
gacatgatgctatat

SEQ ID NO: 1292888 - DNA, 15 bp, Homo sapiens
tgacatgatgctata

SEQ ID NO: 1292889 - DNA, 15 bp, Homo sapiens
atgacatgatgctat

SEQ ID NO: 1292890 - DNA, 15 bp, Homo sapiens
gatgacatgatgcta

SEQ ID NO: 1292891 - DNA, 15 bp, Homo sapiens
agatgacatgatgct

SEQ ID NO: 1292892 - DNA, 15 bp, Homo sapiens
cagatgacatgatgc

SEQ ID NO: 1292893 - DNA, 15 bp, Homo sapiens
gcagatgacatgatg

SEQ ID NO: 1292894 - DNA, 15 bp, Homo sapiens
ggcagatgacatgat

SEQ ID NO: 1292895 - DNA, 15 bp, Homo sapiens
tggcagatgacatga

SEQ ID NO: 1292896 - DNA, 15 bp, Homo sapiens
gtggcagatgacatg

SEQ ID NO: 1292897 - DNA, 15 bp, Homo sapiens
tgtggcagatgacat

SEQ ID NO: 1292898 - DNA, 15 bp, Homo sapiens
ctgtggcagatgaca

SEQ ID NO: 1292899 - DNA, 15 bp, Homo sapiens
tctgtggcagatgac

SEQ ID NO: 1292900 - DNA, 15 bp, Homo sapiens
ctctgtggcagatga

SEQ ID NO: 1292901 - DNA, 15 bp, Homo sapiens
tctctgtggcagatg

SEQ ID NO: 1292902 - DNA, 15 bp, Homo sapiens
atctctgtggcagat

SEQ ID NO: 1292903 - DNA, 15 bp, Homo sapiens
tatctctgtggcaga

SEQ ID NO: 1292904 - DNA, 15 bp, Homo sapiens
ctatctctgtggcag

SEQ ID NO: 1292905 - DNA, 15 bp, Homo sapiens
actatctctgtggca

SEQ ID NO: 1292906 - DNA, 15 bp, Homo sapiens
aactatctctgtggc

SEQ ID NO: 1292907 - DNA, 15 bp, Homo sapiens
aaactatctctgtgg

SEQ ID NO: 1292908 - DNA, 15 bp, Homo sapiens
caaactatctctgtg

SEQ ID NO: 1292909 - DNA, 15 bp, Homo sapiens
tcaaactatctctgt

SEQ ID NO: 1292910 - DNA, 15 bp, Homo sapiens
gtcaaactatctctg

SEQ ID NO: 1292911 - DNA, 15 bp, Homo sapiens
agtcaaactatctct

SEQ ID NO: 1292912 - DNA, 15 bp, Homo sapiens
gagtcaaactatctc

SEQ ID NO: 1292913 - DNA, 15 bp, Homo sapiens
ggagtcaaactatct

SEQ ID NO: 1292914 - DNA, 15 bp, Homo sapiens
gggagtcaaactatc

SEQ ID NO: 1292915 - DNA, 15 bp, Homo sapiens
agggagtcaaactat

SEQ ID NO: 1292916 - DNA, 15 bp, Homo sapiens
gagggagtcaaacta

SEQ ID NO: 1292917 - DNA, 15 bp, Homo sapiens
agagggagtcaaact

SEQ ID NO: 1292918 - DNA, 15 bp, Homo sapiens
gagagggagtcaaac

SEQ ID NO: 1292919 - DNA, 15 bp, Homo sapiens
agagagggagtcaaa

SEQ ID NO: 1292920 - DNA, 15 bp, Homo sapiens
aagagagggagtcaa

SEQ ID NO: 1292921 - DNA, 15 bp, Homo sapiens
gaagagagggagtca

SEQ ID NO: 1292922 - DNA, 15 bp, Homo sapiens
ggaagagagggagtc

SEQ ID NO: 1292923 - DNA, 15 bp, Homo sapiens
aggaagagagggagt

SEQ ID NO: 1292924 - DNA, 15 bp, Homo sapiens
taggaagagagggag

SEQ ID NO: 1292925 - DNA, 15 bp, Homo sapiens
ataggaagagaggga

SEQ ID NO: 1292926 - DNA, 15 bp, Homo sapiens
aataggaagagaggg

SEQ ID NO: 1292927 - DNA, 15 bp, Homo sapiens
aaataggaagagagg

SEQ ID NO: 1292928 - DNA, 15 bp, Homo sapiens
caaataggaagagag

SEQ ID NO: 1292929 - DNA, 15 bp, Homo sapiens
ccaaataggaagaga

SEQ ID NO: 1292930 - DNA, 15 bp, Homo sapiens
tccaaataggaagag

SEQ ID NO: 1292931 - DNA, 15 bp, Homo sapiens
atccaaataggaaga

SEQ ID NO: 1292932 - DNA, 15 bp, Homo sapiens
catccaaataggaag

SEQ ID NO: 1292933 - DNA, 15 bp, Homo sapiens
gcatccaaataggaa

SEQ ID NO: 1292934 - DNA, 15 bp, Homo sapiens
ggcatccaaatagga

SEQ ID NO: 1292935 - DNA, 15 bp, Homo sapiens
gggcatccaaatagg

SEQ ID NO: 1292936 - DNA, 15 bp, Homo sapiens
agggcatccaaatag

SEQ ID NO: 1292937 - DNA, 15 bp, Homo sapiens
aagggcatccaaata

SEQ ID NO: 1292938 - DNA, 15 bp, Homo sapiens
gaagggcatccaaat

SEQ ID NO: 1292939 - DNA, 15 bp, Homo sapiens
tgaagggcatccaaa

SEQ ID NO: 1292940 - DNA, 15 bp, Homo sapiens
atgaagggcatccaa

SEQ ID NO: 1292941 - DNA, 15 bp, Homo sapiens
aatgaagggcatcca

SEQ ID NO: 1292942 - DNA, 15 bp, Homo sapiens
aaatgaagggcatcc

SEQ ID NO: 1292943 - DNA, 15 bp, Homo sapiens
gaaatgaagggcatc

SEQ ID NO: 1292944 - DNA, 15 bp, Homo sapiens
agaaatgaagggcat

SEQ ID NO: 1292945 - DNA, 15 bp, Homo sapiens
aagaaatgaagggca

SEQ ID NO: 1292946 - DNA, 15 bp, Homo sapiens
aaagaaatgaagggc

SEQ ID NO: 1292947 - DNA, 15 bp, Homo sapiens
gaaagaaatgaaggg

SEQ ID NO: 1292948 - DNA, 15 bp, Homo sapiens
agaaagaaatgaagg

SEQ ID NO: 1292949 - DNA, 15 bp, Homo sapiens
gagaaagaaatgaag

SEQ ID NO: 1292950 - DNA, 15 bp, Homo sapiens
agagaaagaaatgaa

SEQ ID NO: 1292951 - DNA, 15 bp, Homo sapiens
gagagaaagaaatga

SEQ ID NO: 1292952 - DNA, 15 bp, Homo sapiens
tgagagaaagaaatg

SEQ ID NO: 1292953 - DNA, 15 bp, Homo sapiens
gtgagagaaagaaat

SEQ ID NO: 1292954 - DNA, 15 bp, Homo sapiens
ggtgagagaaagaaa

SEQ ID NO: 1292955 - DNA, 15 bp, Homo sapiens
aggtgagagaaagaa

SEQ ID NO: 1292956 - DNA, 15 bp, Homo sapiens
caggtgagagaaaga

SEQ ID NO: 1292957 - DNA, 15 bp, Homo sapiens
tcaggtgagagaaag

SEQ ID NO: 1292958 - DNA, 15 bp, Homo sapiens
atcaggtgagagaaa

SEQ ID NO: 1292959 - DNA, 15 bp, Homo sapiens
aatcaggtgagagaa

SEQ ID NO: 1292960 - DNA, 15 bp, Homo sapiens
gaatcaggtgagaga

SEQ ID NO: 1292961 - DNA, 15 bp, Homo sapiens
ggaatcaggtgagag

SEQ ID NO: 1292962 - DNA, 15 bp, Homo sapiens
aggaatcaggtgaga

SEQ ID NO: 1292963 - DNA, 15 bp, Homo sapiens
gaggaatcaggtgag

SEQ ID NO: 1292964 - DNA, 15 bp, Homo sapiens
agaggaatcaggtga

SEQ ID NO: 1292965 - DNA, 15 bp, Homo sapiens
cagaggaatcaggtg

SEQ ID NO: 1292966 - DNA, 15 bp, Homo sapiens
tcagaggaatcaggt

SEQ ID NO: 1292967 - DNA, 15 bp, Homo sapiens
atcagaggaatcagg

SEQ ID NO: 1292968 - DNA, 15 bp, Homo sapiens
aatcagaggaatcag

SEQ ID NO: 1292969 - DNA, 15 bp, Homo sapiens
taatcagaggaatca

SEQ ID NO: 1292970 - DNA, 15 bp, Homo sapiens
ctaatcagaggaatc

SEQ ID NO: 1292971 - DNA, 15 bp, Homo sapiens
cctaatcagaggaat

SEQ ID NO: 1292972 - DNA, 15 bp, Homo sapiens
tcctaatcagaggaa

SEQ ID NO: 1292973 - DNA, 15 bp, Homo sapiens
gtcctaatcagagga

SEQ ID NO: 1292974 - DNA, 15 bp, Homo sapiens
agtcctaatcagagg

SEQ ID NO: 1292975 - DNA, 15 bp, Homo sapiens
aagtcctaatcagag

SEQ ID NO: 1292976 - DNA, 15 bp, Homo sapiens
gaagtcctaatcaga

SEQ ID NO: 1292977 - DNA, 15 bp, Homo sapiens
ggaagtcctaatcag

SEQ ID NO: 1292978 - DNA, 15 bp, Homo sapiens
tggaagtcctaatca

SEQ ID NO: 1292979 - DNA, 15 bp, Homo sapiens
ttggaagtcctaatc

SEQ ID NO: 1292980 - DNA, 15 bp, Homo sapiens
attggaagtcctaat

SEQ ID NO: 1292981 - DNA, 15 bp, Homo sapiens
tattggaagtcctaa

SEQ ID NO: 1292982 - DNA, 15 bp, Homo sapiens
agtattggaagtcct

SEQ ID NO: 1292983 - DNA, 15 bp, Homo sapiens
aagtattggaagtcc

SEQ ID NO: 1292984 - DNA, 15 bp, Homo sapiens
aaagtattggaagtc

SEQ ID NO: 1292985 - DNA, 15 bp, Homo sapiens
caaagtattggaagt

SEQ ID NO: 1292986 - DNA, 15 bp, Homo sapiens
acaaagtattggaag

SEQ ID NO: 1292987 - DNA, 15 bp, Homo sapiens
aacaaagtattggaa

SEQ ID NO: 1292988 - DNA, 15 bp, Homo sapiens
caacaaagtattgga

SEQ ID NO: 1292989 - DNA, 15 bp, Homo sapiens
tcaacaaagtattgg

SEQ ID NO: 1292990 - DNA, 15 bp, Homo sapiens
ttcaacaaagtattg

SEQ ID NO: 1292991 - DNA, 15 bp, Homo sapiens
attcaacaaagtatt

SEQ ID NO: 1292992 - DNA, 15 bp, Homo sapiens
tattcaacaaagtat

SEQ ID NO: 1292993 - DNA, 15 bp, Homo sapiens
ctattcaacaaagta

SEQ ID NO: 1292994 - DNA, 15 bp, Homo sapiens
cctattcaacaaagt

SEQ ID NO: 1292995 - DNA, 15 bp, Homo sapiens
tcctattcaacaaag

SEQ ID NO: 1292996 - DNA, 15 bp, Homo sapiens
ctcctattcaacaaa

SEQ ID NO: 1292997 - DNA, 15 bp, Homo sapiens
actcctattcaacaa

SEQ ID NO: 1292998 - DNA, 15 bp, Homo sapiens
ttcaccactcctatt

SEQ ID NO: 1292999 - DNA, 15 bp, Homo sapiens
tttcaccactcctat

SEQ ID NO: 1293000 - DNA, 15 bp, Homo sapiens
ttttcaccactccta

SEQ ID NO: 1293001 - DNA, 15 bp, Homo sapiens
tttttcaccactcct

SEQ ID NO: 1293002 - DNA, 15 bp, Homo sapiens
ctttttcaccactcc

SEQ ID NO: 1293003 - DNA, 15 bp, Homo sapiens
cctttttcaccactc

SEQ ID NO: 1293004 - DNA, 15 bp, Homo sapiens
ccctttttcaccact

SEQ ID NO: 1293005 - DNA, 15 bp, Homo sapiens
gccctttttcaccac

SEQ ID NO: 1293006 - DNA, 15 bp, Homo sapiens
tgccctttttcacca

SEQ ID NO: 1293007 - DNA, 15 bp, Homo sapiens
atgccctttttcacc

SEQ ID NO: 1293008 - DNA, 15 bp, Homo sapiens
gatgccctttttcac

SEQ ID NO: 1293009 - DNA, 15 bp, Homo sapiens
ggatgccctttttca

SEQ ID NO: 1293010 - DNA, 15 bp, Homo sapiens
aggatgccctttttc

SEQ ID NO: 1293011 - DNA, 15 bp, Homo sapiens
aaggatgcccttttt

SEQ ID NO: 1293012 - DNA, 15 bp, Homo sapiens
caaggatgccctttt

SEQ ID NO: 1293013 - DNA, 15 bp, Homo sapiens
acaaggatgcccttt

SEQ ID NO: 1293014 - DNA, 15 bp, Homo sapiens
gacaaggatgccctt

SEQ ID NO: 1293015 - DNA, 15 bp, Homo sapiens
agacaaggatgccct

SEQ ID NO: 1293016 - DNA, 15 bp, Homo sapiens
aagacaaggatgccc

SEQ ID NO: 1293017 - DNA, 15 bp, Homo sapiens
caagacaaggatgcc

SEQ ID NO: 1293018 - DNA, 15 bp, Homo sapiens
acaagacaaggatgc

SEQ ID NO: 1293019 - DNA, 15 bp, Homo sapiens
cacaagacaaggatg

SEQ ID NO: 1293020 - DNA, 15 bp, Homo sapiens
gcacaagacaaggat

SEQ ID NO: 1293021 - DNA, 15 bp, Homo sapiens
ggcacaagacaagga

SEQ ID NO: 1293022 - DNA, 15 bp, Homo sapiens
tggcacaagacaagg

SEQ ID NO: 1293023 - DNA, 15 bp, Homo sapiens
ctggcacaagacaag

SEQ ID NO: 1293024 - DNA, 15 bp, Homo sapiens
actggcacaagacaa

SEQ ID NO: 1293025 - DNA, 15 bp, Homo sapiens
aactggcacaagaca

SEQ ID NO: 1293026 - DNA, 15 bp, Homo sapiens
aaactggcacaagac

SEQ ID NO: 1293027 - DNA, 15 bp, Homo sapiens
aaaagcatattttta

SEQ ID NO: 1293028 - DNA, 15 bp, Homo sapiens
aaaaagcatattttt

SEQ ID NO: 1293029 - DNA, 15 bp, Homo sapiens
caaaaagcatatttt

SEQ ID NO: 1293030 - DNA, 15 bp, Homo sapiens
ccaaaaagcatattt

SEQ ID NO: 1293031 - DNA, 15 bp, Homo sapiens
accaaaaagcatatt

SEQ ID NO: 1293032 - DNA, 15 bp, Homo sapiens
aaccaaaaagcatat

SEQ ID NO: 1293033 - DNA, 15 bp, Homo sapiens
gaaccaaaaagcata

SEQ ID NO: 1293034 - DNA, 15 bp, Homo sapiens
ggaaccaaaaagcat

SEQ ID NO: 1293035 - DNA, 15 bp, Homo sapiens
tggaaccaaaaagca

SEQ ID NO: 1293036 - DNA, 15 bp, Homo sapiens
atggaaccaaaaagc

SEQ ID NO: 1293037 - DNA, 15 bp, Homo sapiens
catggaaccaaaaag

SEQ ID NO: 1293038 - DNA, 15 bp, Homo sapiens
acatggaaccaaaaa

SEQ ID NO: 1293039 - DNA, 15 bp, Homo sapiens
aacatggaaccaaaa

SEQ ID NO: 1293040 - DNA, 15 bp, Homo sapiens
gaacatggaaccaaa

SEQ ID NO: 1293041 - DNA, 15 bp, Homo sapiens
agaacatggaaccaa

SEQ ID NO: 1293042 - DNA, 15 bp, Homo sapiens
aagaacatggaacca

SEQ ID NO: 1293043 - DNA, 15 bp, Homo sapiens
aaagaacatggaacc

SEQ ID NO: 1293044 - DNA, 15 bp, Homo sapiens
taaagaacatggaac

SEQ ID NO: 1293045 - DNA, 15 bp, Homo sapiens
ataaagaacatggaa

SEQ ID NO: 1293046 - DNA, 15 bp, Homo sapiens
cataaagaacatgga

SEQ ID NO: 1293047 - DNA, 15 bp, Homo sapiens
acataaagaacatgg

SEQ ID NO: 1293048 - DNA, 15 bp, Homo sapiens
aacataaagaacatg

SEQ ID NO: 1293049 - DNA, 15 bp, Homo sapiens
aaacataaagaacat

SEQ ID NO: 1293050 - DNA, 15 bp, Homo sapiens
caaacataaagaaca

SEQ ID NO: 1293051 - DNA, 15 bp, Homo sapiens
tcaaacataaagaac

SEQ ID NO: 1293052 - DNA, 15 bp, Homo sapiens
gtcaaacataaagaa

SEQ ID NO: 1293053 - DNA, 15 bp, Homo sapiens
tgtcaaacataaaga

SEQ ID NO: 1293054 - DNA, 15 bp, Homo sapiens
atgtcaaacataaag

SEQ ID NO: 1293055 - DNA, 15 bp, Homo sapiens
catgtcaaacataaa

SEQ ID NO: 1293056 - DNA, 15 bp, Homo sapiens
acatgtcaaacataa

SEQ ID NO: 1293057 - DNA, 15 bp, Homo sapiens
aacatgtcaaacata

SEQ ID NO: 1293058 - DNA, 15 bp, Homo sapiens
aaacatgtcaaacat

SEQ ID NO: 1293059 - DNA, 15 bp, Homo sapiens
taaacatgtcaaaca

SEQ ID NO: 1293060 - DNA, 15 bp, Homo sapiens
ctaaacatgtcaaac

SEQ ID NO: 1293061 - DNA, 15 bp, Homo sapiens
cctaaacatgtcaaa

SEQ ID NO: 1293062 - DNA, 15 bp, Homo sapiens
tcctaaacatgtcaa

SEQ ID NO: 1293063 - DNA, 15 bp, Homo sapiens
ttcctaaacatgtca

SEQ ID NO: 1293064 - DNA, 15 bp, Homo sapiens
attcctaaacatgtc

SEQ ID NO: 1293065 - DNA, 15 bp, Homo sapiens
gattcctaaacatgt

SEQ ID NO: 1293066 - DNA, 15 bp, Homo sapiens
tgattcctaaacatg

SEQ ID NO: 1293067 - DNA, 15 bp, Homo sapiens
atgattcctaaacat

SEQ ID NO: 1293068 - DNA, 15 bp, Homo sapiens
catgattcctaaaca

SEQ ID NO: 1293069 - DNA, 15 bp, Homo sapiens
acatgattcctaaac

SEQ ID NO: 1293070 - DNA, 15 bp, Homo sapiens
gacatgattcctaaa

SEQ ID NO: 1293071 - DNA, 15 bp, Homo sapiens
agacatgattcctaa

SEQ ID NO: 1293072 - DNA, 15 bp, Homo sapiens
tagacatgattccta

SEQ ID NO: 1293073 - DNA, 15 bp, Homo sapiens
atagacatgattcct

SEQ ID NO: 1293074 - DNA, 15 bp, Homo sapiens
tatagacatgattcc

SEQ ID NO: 1293075 - DNA, 15 bp, Homo sapiens
ctatagacatgattc

SEQ ID NO: 1293076 - DNA, 15 bp, Homo sapiens
gctatagacatgatt

SEQ ID NO: 1293077 - DNA, 15 bp, Homo sapiens
agctatagacatgat

SEQ ID NO: 1293078 - DNA, 15 bp, Homo sapiens
aagctatagacatga

SEQ ID NO: 1293079 - DNA, 15 bp, Homo sapiens
aaagctatagacatg

SEQ ID NO: 1293080 - DNA, 15 bp, Homo sapiens
aaaagctatagacat

SEQ ID NO: 1293081 - DNA, 15 bp, Homo sapiens
taaaagctatagaca

SEQ ID NO: 1293082 - DNA, 15 bp, Homo sapiens
ataaaagctatagac

SEQ ID NO: 1293083 - DNA, 15 bp, Homo sapiens
tataaaagctataga

SEQ ID NO: 1293084 - DNA, 15 bp, Homo sapiens
gtataaaagctatag

SEQ ID NO: 1293085 - DNA, 15 bp, Homo sapiens
agtataaaagctata

SEQ ID NO: 1293086 - DNA, 15 bp, Homo sapiens
aagtataaaagctat

SEQ ID NO: 1293087 - DNA, 15 bp, Homo sapiens
caagtataaaagcta

SEQ ID NO: 1293088 - DNA, 15 bp, Homo sapiens
tcaagtataaaagct

SEQ ID NO: 1293089 - DNA, 15 bp, Homo sapiens
ttcaagtataaaagc

SEQ ID NO: 1293090 - DNA, 15 bp, Homo sapiens
cttcaagtataaaag

SEQ ID NO: 1293091 - DNA, 15 bp, Homo sapiens
ccttcaagtataaaa

SEQ ID NO: 1293092 - DNA, 15 bp, Homo sapiens
tccttcaagtataaa

SEQ ID NO: 1293093 - DNA, 15 bp, Homo sapiens
gtccttcaagtataa

SEQ ID NO: 1293094 - DNA, 15 bp, Homo sapiens
tgtccttcaagtata

SEQ ID NO: 1293095 - DNA, 15 bp, Homo sapiens
ctgtccttcaagtat

SEQ ID NO: 1293096 - DNA, 15 bp, Homo sapiens
gctgtccttcaagta

SEQ ID NO: 1293097 - DNA, 15 bp, Homo sapiens
agctgtccttcaagt

SEQ ID NO: 1293098 - DNA, 15 bp, Homo sapiens
aagctgtccttcaag

SEQ ID NO: 1293099 - DNA, 15 bp, Homo sapiens
aaagctgtccttcaa

SEQ ID NO: 1293100 - DNA, 15 bp, Homo sapiens
caaagctgtccttca

SEQ ID NO: 1293101 - DNA, 15 bp, Homo sapiens
acaaagctgtccttc

SEQ ID NO: 1293102 - DNA, 15 bp, Homo sapiens
gacaaagctgtcctt

SEQ ID NO: 1293103 - DNA, 15 bp, Homo sapiens
tgacaaagctgtcct

SEQ ID NO: 1293104 - DNA, 15 bp, Homo sapiens
atgacaaagctgtcc

SEQ ID NO: 1293105 - DNA, 15 bp, Homo sapiens
catgacaaagctgtc

SEQ ID NO: 1293106 - DNA, 15 bp, Homo sapiens
acatgacaaagctgt

SEQ ID NO: 1293107 - DNA, 15 bp, Homo sapiens
tacatgacaaagctg

SEQ ID NO: 1293108 - DNA, 15 bp, Homo sapiens
atacatgacaaagct

SEQ ID NO: 1293109 - DNA, 15 bp, Homo sapiens
aatacatgacaaagc

SEQ ID NO: 1293110 - DNA, 15 bp, Homo sapiens
gaatacatgacaaag

SEQ ID NO: 1293111 - DNA, 15 bp, Homo sapiens
agaatacatgacaaa

SEQ ID NO: 1293112 - DNA, 15 bp, Homo sapiens
tagaatacatgacaa

SEQ ID NO: 1293113 - DNA, 15 bp, Homo sapiens
atagaatacatgaca

SEQ ID NO: 1293114 - DNA, 15 bp, Homo sapiens
aatagaatacatgac

SEQ ID NO: 1293115 - DNA, 15 bp, Homo sapiens
gaatagaatacatga

SEQ ID NO: 1293116 - DNA, 15 bp, Homo sapiens
agaatagaatacatg

SEQ ID NO: 1293117 - DNA, 15 bp, Homo sapiens
aagaatagaatacat

SEQ ID NO: 1293118 - DNA, 15 bp, Homo sapiens
caagaatagaataca

SEQ ID NO: 1293119 - DNA, 15 bp, Homo sapiens
tcaagaatagaatac

SEQ ID NO: 1293120 - DNA, 15 bp, Homo sapiens
ctcaagaatagaata

SEQ ID NO: 1293121 - DNA, 15 bp, Homo sapiens
actcaagaatagaat

SEQ ID NO: 1293122 - DNA, 15 bp, Homo sapiens
gactcaagaatagaa

SEQ ID NO: 1293123 - DNA, 15 bp, Homo sapiens
tgactcaagaataga

SEQ ID NO: 1293124 - DNA, 15 bp, Homo sapiens
atgactcaagaatag

SEQ ID NO: 1293125 - DNA, 15 bp, Homo sapiens
tatgactcaagaata

SEQ ID NO: 1293126 - DNA, 15 bp, Homo sapiens
atatgactcaagaat

SEQ ID NO: 1293127 - DNA, 15 bp, Homo sapiens
aatatgactcaagaa

SEQ ID NO: 1293128 - DNA, 15 bp, Homo sapiens
aaatatgactcaaga

SEQ ID NO: 1293129 - DNA, 15 bp, Homo sapiens
aaaatatgactcaag

SEQ ID NO: 1293130 - DNA, 15 bp, Homo sapiens
caaaatatgactcaa

SEQ ID NO: 1293131 - DNA, 15 bp, Homo sapiens
acaaaatatgactca

SEQ ID NO: 1293132 - DNA, 15 bp, Homo sapiens
aacaaaatatgactc

SEQ ID NO: 1293133 - DNA, 15 bp, Homo sapiens
aaacaaaatatgact

SEQ ID NO: 1293134 - DNA, 15 bp, Homo sapiens
gaaacaaaatatgac

SEQ ID NO: 1293135 - DNA, 15 bp, Homo sapiens
ggaaacaaaatatga

SEQ ID NO: 1293136 - DNA, 15 bp, Homo sapiens
gggaaacaaaatatg

SEQ ID NO: 1293137 - DNA, 15 bp, Homo sapiens
agggaaacaaaatat

SEQ ID NO: 1293138 - DNA, 15 bp, Homo sapiens
gagggaaacaaaata

SEQ ID NO: 1293139 - DNA, 15 bp, Homo sapiens
tgagggaaacaaaat

SEQ ID NO: 1293140 - DNA, 15 bp, Homo sapiens
ctgagggaaacaaaa

SEQ ID NO: 1293141 - DNA, 15 bp, Homo sapiens
cctgagggaaacaaa

SEQ ID NO: 1293142 - DNA, 15 bp, Homo sapiens
tcctgagggaaacaa

SEQ ID NO: 1293143 - DNA, 15 bp, Homo sapiens
gtcctgagggaaaca

SEQ ID NO: 1293144 - DNA, 15 bp, Homo sapiens
tgtcctgagggaaac

SEQ ID NO: 1293145 - DNA, 15 bp, Homo sapiens
ttgtcctgagggaaa

SEQ ID NO: 1293146 - DNA, 15 bp, Homo sapiens
attgtcctgagggaa

SEQ ID NO: 1293147 - DNA, 15 bp, Homo sapiens
tattgtcctgaggga

SEQ ID NO: 1293148 - DNA, 15 bp, Homo sapiens
atattgtcctgaggg

SEQ ID NO: 1293149 - DNA, 15 bp, Homo sapiens
aatattgtcctgagg

SEQ ID NO: 1293150 - DNA, 15 bp, Homo sapiens
aaatattgtcctgag

SEQ ID NO: 1293151 - DNA, 15 bp, Homo sapiens
aaaatattgtcctga

SEQ ID NO: 1293152 - DNA, 15 bp, Homo sapiens
gaaaatattgtcctg

SEQ ID NO: 1293153 - DNA, 15 bp, Homo sapiens
agaaaatattgtcct

SEQ ID NO: 1293154 - DNA, 15 bp, Homo sapiens
cagaaaatattgtcc

SEQ ID NO: 1293155 - DNA, 15 bp, Homo sapiens
ccagaaaatattgtc

SEQ ID NO: 1293156 - DNA, 15 bp, Homo sapiens
gccagaaaatattgt

SEQ ID NO: 1293157 - DNA, 15 bp, Homo sapiens
tgccagaaaatattg

SEQ ID NO: 1293158 - DNA, 15 bp, Homo sapiens
atgccagaaaatatt

SEQ ID NO: 1293159 - DNA, 15 bp, Homo sapiens
aatgccagaaaatat

SEQ ID NO: 1293160 - DNA, 15 bp, Homo sapiens
caatgccagaaaata

SEQ ID NO: 1293161 - DNA, 15 bp, Homo sapiens
tcaatgccagaaaat

SEQ ID NO: 1293162 - DNA, 15 bp, Homo sapiens
ttcaatgccagaaaa

SEQ ID NO: 1293163 - DNA, 15 bp, Homo sapiens
gttcaatgccagaaa

SEQ ID NO: 1293164 - DNA, 15 bp, Homo sapiens
tgttcaatgccagaa

SEQ ID NO: 1293165 - DNA, 15 bp, Homo sapiens
atgttcaatgccaga

SEQ ID NO: 1293166 - DNA, 15 bp, Homo sapiens
aatgttcaatgccag

SEQ ID NO: 1293167 - DNA, 15 bp, Homo sapiens
caatgttcaatgcca

SEQ ID NO: 1293168 - DNA, 15 bp, Homo sapiens
gcaatgttcaatgcc

SEQ ID NO: 1293169 - DNA, 15 bp, Homo sapiens
agcaatgttcaatgc

SEQ ID NO: 1293170 - DNA, 15 bp, Homo sapiens
cagcaatgttcaatg

SEQ ID NO: 1293171 - DNA, 15 bp, Homo sapiens
acagcaatgttcaat

SEQ ID NO: 1293172 - DNA, 15 bp, Homo sapiens
aacagcaatgttcaa

SEQ ID NO: 1293173 - DNA, 15 bp, Homo sapiens
caacagcaatgttca

SEQ ID NO: 1293174 - DNA, 15 bp, Homo sapiens
tcaacagcaatgttc

SEQ ID NO: 1293175 - DNA, 15 bp, Homo sapiens
ctcaacagcaatgtt

SEQ ID NO: 1293176 - DNA, 15 bp, Homo sapiens
tctcaacagcaatgt

SEQ ID NO: 1293177 - DNA, 15 bp, Homo sapiens
ttctcaacagcaatg

SEQ ID NO: 1293178 - DNA, 15 bp, Homo sapiens
tttctcaacagcaat

SEQ ID NO: 1293179 - DNA, 15 bp, Homo sapiens
ctttctcaacagcaa

SEQ ID NO: 1293180 - DNA, 15 bp, Homo sapiens
gctttctcaacagca

SEQ ID NO: 1293181 - DNA, 15 bp, Homo sapiens
agctttctcaacagc

SEQ ID NO: 1293182 - DNA, 15 bp, Homo sapiens
cagctttctcaacag

SEQ ID NO: 1293183 - DNA, 15 bp, Homo sapiens
tcagctttctcaaca

SEQ ID NO: 1293184 - DNA, 15 bp, Homo sapiens
ctcagctttctcaac

SEQ ID NO: 1293185 - DNA, 15 bp, Homo sapiens
tctcagctttctcaa

SEQ ID NO: 1293186 - DNA, 15 bp, Homo sapiens
gtctcagctttctca

SEQ ID NO: 1293187 - DNA, 15 bp, Homo sapiens
agtctcagctttctc

SEQ ID NO: 1293188 - DNA, 15 bp, Homo sapiens
tagtctcagctttct

SEQ ID NO: 1293189 - DNA, 15 bp, Homo sapiens
ctagtctcagctttc

SEQ ID NO: 1293190 - DNA, 15 bp, Homo sapiens
gctagtctcagcttt

SEQ ID NO: 1293191 - DNA, 15 bp, Homo sapiens
cgctagtctcagctt

SEQ ID NO: 1293192 - DNA, 15 bp, Homo sapiens
acgctagtctcagct

SEQ ID NO: 1293193 - DNA, 15 bp, Homo sapiens
tacgctagtctcagc

SEQ ID NO: 1293194 - DNA, 15 bp, Homo sapiens
ttacgctagtctcag

SEQ ID NO: 1293195 - DNA, 15 bp, Homo sapiens
attacgctagtctca

SEQ ID NO: 1293196 - DNA, 15 bp, Homo sapiens
aattacgctagtctc

SEQ ID NO: 1293197 - DNA, 15 bp, Homo sapiens
gaattacgctagtct

SEQ ID NO: 1293198 - DNA, 15 bp, Homo sapiens
ggaattacgctagtc

SEQ ID NO: 1293199 - DNA, 15 bp, Homo sapiens
cggaattacgctagt

SEQ ID NO: 1293200 - DNA, 15 bp, Homo sapiens
gcggaattacgctag

SEQ ID NO: 1293201 - DNA, 15 bp, Homo sapiens
agcggaattacgcta

SEQ ID NO: 1293202 - DNA, 15 bp, Homo sapiens
gagcggaattacgct

SEQ ID NO: 1293203 - DNA, 15 bp, Homo sapiens
ggagcggaattacgc

SEQ ID NO: 1293204 - DNA, 15 bp, Homo sapiens
aggagcggaattacg

SEQ ID NO: 1293205 - DNA, 15 bp, Homo sapiens
gaggagcggaattac

SEQ ID NO: 1293206 - DNA, 15 bp, Homo sapiens
tgaggagcggaatta

SEQ ID NO: 1293207 - DNA, 15 bp, Homo sapiens
atgaggagcggaatt

SEQ ID NO: 1293208 - DNA, 15 bp, Homo sapiens
aatgaggagcggaat

SEQ ID NO: 1293209 - DNA, 15 bp, Homo sapiens
aaatgaggagcggaa

SEQ ID NO: 1293210 - DNA, 15 bp, Homo sapiens
taaatgaggagcgga

SEQ ID NO: 1293211 - DNA, 15 bp, Homo sapiens
gtaaatgaggagcgg

SEQ ID NO: 1293212 - DNA, 15 bp, Homo sapiens
agtaaatgaggagcg

SEQ ID NO: 1293213 - DNA, 15 bp, Homo sapiens
aagtaaatgaggagc

SEQ ID NO: 1293214 - DNA, 15 bp, Homo sapiens
gaagtaaatgaggag

SEQ ID NO: 1293215 - DNA, 15 bp, Homo sapiens
ggaagtaaatgagga

SEQ ID NO: 1293216 - DNA, 15 bp, Homo sapiens
aggaagtaaatgagg

SEQ ID NO: 1293217 - DNA, 15 bp, Homo sapiens
caggaagtaaatgag

SEQ ID NO: 1293218 - DNA, 15 bp, Homo sapiens
tcaggaagtaaatga

SEQ ID NO: 1293219 - DNA, 15 bp, Homo sapiens
ttcaggaagtaaatg

SEQ ID NO: 1293220 - DNA, 15 bp, Homo sapiens
cttcaggaagtaaat

SEQ ID NO: 1293221 - DNA, 15 bp, Homo sapiens
tcttcaggaagtaaa

SEQ ID NO: 1293222 - DNA, 15 bp, Homo sapiens
ttcttcaggaagtaa

SEQ ID NO: 1293223 - DNA, 15 bp, Homo sapiens
attcttcaggaagta

SEQ ID NO: 1293224 - DNA, 15 bp, Homo sapiens
aattcttcaggaagt

SEQ ID NO: 1293225 - DNA, 15 bp, Homo sapiens
aaattcttcaggaag

SEQ ID NO: 1293226 - DNA, 15 bp, Homo sapiens
aaaattcttcaggaa

SEQ ID NO: 1293227 - DNA, 15 bp, Homo sapiens
aaaaattcttcagga

SEQ ID NO: 1293228 - DNA, 15 bp, Homo sapiens
aaaaaattcttcagg

SEQ ID NO: 1293229 - DNA, 15 bp, Homo sapiens
aaaaaaattcttcag

SEQ ID NO: 1293230 - DNA, 15 bp, Homo sapiens
aaaaaaaattcttca

SEQ ID NO: 1293231 - DNA, 15 bp, Homo sapiens
aaaaaaaaattcttc

SEQ ID NO: 1293232 - DNA, 15 bp, Homo sapiens
taaaaaaaaaattct

SEQ ID NO: 1293233 - DNA, 15 bp, Homo sapiens
ttaaaaaaaaaattc

SEQ ID NO: 1293234 - DNA, 15 bp, Homo sapiens
attaaaaaaaaaatt

SEQ ID NO: 1293235 - DNA, 15 bp, Homo sapiens
ctcaaattaaaaaaa

SEQ ID NO: 1293236 - DNA, 15 bp, Homo sapiens
cctcaaattaaaaaa

SEQ ID NO: 1293237 - DNA, 15 bp, Homo sapiens
acctcaaattaaaaa

SEQ ID NO: 1293238 - DNA, 15 bp, Homo sapiens
aacctcaaattaaaa

SEQ ID NO: 1293239 - DNA, 15 bp, Homo sapiens
aaacctcaaattaaa

SEQ ID NO: 1293240 - DNA, 15 bp, Homo sapiens
taaacctcaaattaa

SEQ ID NO: 1293241 - DNA, 15 bp, Homo sapiens
ttaaacctcaaatta

SEQ ID NO: 1293242 - DNA, 15 bp, Homo sapiens
attaaacctcaaatt

SEQ ID NO: 1293243 - DNA, 15 bp, Homo sapiens
tattaaacctcaaat

SEQ ID NO: 1293244 - DNA, 15 bp, Homo sapiens
gtattaaacctcaaa

SEQ ID NO: 1293245 - DNA, 15 bp, Homo sapiens
ggtattaaacctcaa

SEQ ID NO: 1293246 - DNA, 15 bp, Homo sapiens
aggtattaaacctca

SEQ ID NO: 1293247 - DNA, 15 bp, Homo sapiens
aaggtattaaacctc

SEQ ID NO: 1293248 - DNA, 15 bp, Homo sapiens
taaggtattaaacct

SEQ ID NO: 1293249 - DNA, 15 bp, Homo sapiens
ttaaggtattaaacc

SEQ ID NO: 1293250 - DNA, 15 bp, Homo sapiens
tttaaggtattaaac

SEQ ID NO: 1293251 - DNA, 15 bp, Homo sapiens
gtttaaggtattaaa

SEQ ID NO: 1293252 - DNA, 15 bp, Homo sapiens
tgtttaaggtattaa

SEQ ID NO: 1293253 - DNA, 15 bp, Homo sapiens
ctgtttaaggtatta

SEQ ID NO: 1293254 - DNA, 15 bp, Homo sapiens
cctgtttaaggtatt

SEQ ID NO: 1293255 - DNA, 15 bp, Homo sapiens
tcctgtttaaggtat

SEQ ID NO: 1293256 - DNA, 15 bp, Homo sapiens
atcctgtttaaggta

SEQ ID NO: 1293257 - DNA, 15 bp, Homo sapiens
tatcctgtttaaggt

SEQ ID NO: 1293258 - DNA, 15 bp, Homo sapiens
ttatcctgtttaagg

SEQ ID NO: 1293259 - DNA, 15 bp, Homo sapiens
gttatcctgtttaag

SEQ ID NO: 1293260 - DNA, 15 bp, Homo sapiens
tgttatcctgtttaa

SEQ ID NO: 1293261 - DNA, 15 bp, Homo sapiens
atgttatcctgttta

SEQ ID NO: 1293262 - DNA, 15 bp, Homo sapiens
aatgttatcctgttt

SEQ ID NO: 1293263 - DNA, 15 bp, Homo sapiens
aaatgttatcctgtt

SEQ ID NO: 1293264 - DNA, 15 bp, Homo sapiens
gaaatgttatcctgt

SEQ ID NO: 1293265 - DNA, 15 bp, Homo sapiens
agaaatgttatcctg

SEQ ID NO: 1293266 - DNA, 15 bp, Homo sapiens
aagaaatgttatcct

SEQ ID NO: 1293267 - DNA, 15 bp, Homo sapiens
caagaaatgttatcc

SEQ ID NO: 1293268 - DNA, 15 bp, Homo sapiens
tcaagaaatgttatc

SEQ ID NO: 1293269 - DNA, 15 bp, Homo sapiens
atcaagaaatgttat

SEQ ID NO: 1293270 - DNA, 15 bp, Homo sapiens
aatcaagaaatgtta

SEQ ID NO: 1293271 - DNA, 15 bp, Homo sapiens
aaatcaagaaatgtt

SEQ ID NO: 1293272 - DNA, 15 bp, Homo sapiens
aaaatcaagaaatgt

SEQ ID NO: 1293273 - DNA, 15 bp, Homo sapiens
caaaatcaagaaatg

SEQ ID NO: 1293274 - DNA, 15 bp, Homo sapiens
acaaaatcaagaaat

SEQ ID NO: 1293275 - DNA, 15 bp, Homo sapiens
aacaaaatcaagaaa

SEQ ID NO: 1293276 - DNA, 15 bp, Homo sapiens
taacaaaatcaagaa

SEQ ID NO: 1293277 - DNA, 15 bp, Homo sapiens
ataacaaaatcaaga

SEQ ID NO: 1293278 - DNA, 15 bp, Homo sapiens
aataacaaaatcaag

SEQ ID NO: 1293279 - DNA, 15 bp, Homo sapiens
gaataacaaaatcaa

SEQ ID NO: 1293280 - DNA, 15 bp, Homo sapiens
acagaataacaaaat

SEQ ID NO: 1293281 - DNA, 15 bp, Homo sapiens
tacagaataacaaaa

SEQ ID NO: 1293282 - DNA, 15 bp, Homo sapiens
atacagaataacaaa

SEQ ID NO: 1293283 - DNA, 15 bp, Homo sapiens
aatacagaataacaa

SEQ ID NO: 1293284 - DNA, 15 bp, Homo sapiens
taatacagaataaca

SEQ ID NO: 1293285 - DNA, 15 bp, Homo sapiens
ctaatacagaataac

SEQ ID NO: 1293286 - DNA, 15 bp, Homo sapiens
gctaatacagaataa

SEQ ID NO: 1293287 - DNA, 15 bp, Homo sapiens
agctaatacagaata

SEQ ID NO: 1293288 - DNA, 15 bp, Homo sapiens
aagctaatacagaat

SEQ ID NO: 1293289 - DNA, 15 bp, Homo sapiens
aaagctaatacagaa

SEQ ID NO: 1293290 - DNA, 15 bp, Homo sapiens
aaaagctaatacaga

SEQ ID NO: 1293291 - DNA, 15 bp, Homo sapiens
aaaaagctaatacag

SEQ ID NO: 1293292 - DNA, 15 bp, Homo sapiens
aaaaaagctaataca

SEQ ID NO: 1293293 - DNA, 15 bp, Homo sapiens
aaaaaaagctaatac

SEQ ID NO: 1293294 - DNA, 15 bp, Homo sapiens
aaaaaaaagctaata

SEQ ID NO: 1293295 - DNA, 15 bp, Homo sapiens
aaaaaaaaagctaat

SEQ ID NO: 1293296 - DNA, 15 bp, Homo sapiens
aaaaaaaaaagctaa

SEQ ID NO: 1293297 - DNA, 15 bp, Homo sapiens
aaaaaaaaaaagcta

SEQ ID NO: 1293298 - DNA, 15 bp, Homo sapiens
caaaaaaaaaaagct

SEQ ID NO: 1293299 - DNA, 15 bp, Homo sapiens
gttcaaaaaaaaaaa

SEQ ID NO: 1293300 - DNA, 15 bp, Homo sapiens
tgttcaaaaaaaaaa

SEQ ID NO: 1293301 - DNA, 15 bp, Homo sapiens
gtgttcaaaaaaaaa

SEQ ID NO: 1293302 - DNA, 15 bp, Homo sapiens
ggtgttcaaaaaaaa

SEQ ID NO: 1293303 - DNA, 15 bp, Homo sapiens
cggtgttcaaaaaaa

SEQ ID NO: 1293304 - DNA, 15 bp, Homo sapiens
acggtgttcaaaaaa

SEQ ID NO: 1293305 - DNA, 15 bp, Homo sapiens
tacggtgttcaaaaa

SEQ ID NO: 1293306 - DNA, 15 bp, Homo sapiens
atacggtgttcaaaa

SEQ ID NO: 1293307 - DNA, 15 bp, Homo sapiens
gatacggtgttcaaa

SEQ ID NO: 1293308 - DNA, 15 bp, Homo sapiens
ggatacggtgttcaa

SEQ ID NO: 1293309 - DNA, 15 bp, Homo sapiens
aaagtataaatctta

SEQ ID NO: 1293310 - DNA, 15 bp, Homo sapiens
caaagtataaatctt

SEQ ID NO: 1293311 - DNA, 15 bp, Homo sapiens
acaaagtataaatct

SEQ ID NO: 1293312 - DNA, 15 bp, Homo sapiens
cacaaagtataaatc

SEQ ID NO: 1293313 - DNA, 15 bp, Homo sapiens
acacaaagtataaat

SEQ ID NO: 1293314 - DNA, 15 bp, Homo sapiens
aacacaaagtataaa

SEQ ID NO: 1293315 - DNA, 15 bp, Homo sapiens
aaacacaaagtataa

SEQ ID NO: 1293316 - DNA, 15 bp, Homo sapiens
caaacacaaagtata

SEQ ID NO: 1293317 - DNA, 15 bp, Homo sapiens
ccaaacacaaagtat

SEQ ID NO: 1293318 - DNA, 15 bp, Homo sapiens
accaaacacaaagta

SEQ ID NO: 1293319 - DNA, 15 bp, Homo sapiens
aaccaaacacaaagt

SEQ ID NO: 1293320 - DNA, 15 bp, Homo sapiens
caaccaaacacaaag

SEQ ID NO: 1293321 - DNA, 15 bp, Homo sapiens
tcaaccaaacacaaa

SEQ ID NO: 1293322 - DNA, 15 bp, Homo sapiens
gtcaaccaaacacaa

SEQ ID NO: 1293323 - DNA, 15 bp, Homo sapiens
tgtcaaccaaacaca

SEQ ID NO: 1293324 - DNA, 15 bp, Homo sapiens
atgtcaaccaaacac

SEQ ID NO: 1293325 - DNA, 15 bp, Homo sapiens
catgtcaaccaaaca

SEQ ID NO: 1293326 - DNA, 15 bp, Homo sapiens
acatgtcaaccaaac

SEQ ID NO: 1293327 - DNA, 15 bp, Homo sapiens
aacatgtcaaccaaa

SEQ ID NO: 1293328 - DNA, 15 bp, Homo sapiens
aaacatgtcaaccaa

SEQ ID NO: 1293329 - DNA, 15 bp, Homo sapiens
aaaacatgtcaacca

SEQ ID NO: 1293330 - DNA, 15 bp, Homo sapiens
taaaacatgtcaacc

SEQ ID NO: 1293331 - DNA, 15 bp, Homo sapiens
ttaaaacatgtcaac

SEQ ID NO: 1293332 - DNA, 15 bp, Homo sapiens
tttaaaacatgtcaa

SEQ ID NO: 1293333 - DNA, 15 bp, Homo sapiens
ttttaaaacatgtca

SEQ ID NO: 1293334 - DNA, 15 bp, Homo sapiens
tttttaaaacatgtc

SEQ ID NO: 1293335 - DNA, 15 bp, Homo sapiens
gtttttaaaacatgt

SEQ ID NO: 1293336 - DNA, 15 bp, Homo sapiens
agtttttaaaacatg

SEQ ID NO: 1293337 - DNA, 15 bp, Homo sapiens
gagtttttaaaacat

SEQ ID NO: 1293338 - DNA, 15 bp, Homo sapiens
agagtttttaaaaca

SEQ ID NO: 1293339 - DNA, 15 bp, Homo sapiens
aagagtttttaaaac

SEQ ID NO: 1293340 - DNA, 15 bp, Homo sapiens
aaagagtttttaaaa

SEQ ID NO: 1293341 - DNA, 15 bp, Homo sapiens
aaaagagtttttaaa

SEQ ID NO: 1293342 - DNA, 15 bp, Homo sapiens
taaaagagtttttaa

SEQ ID NO: 1293343 - DNA, 15 bp, Homo sapiens
ttaaaagagttttta

SEQ ID NO: 1293344 - DNA, 15 bp, Homo sapiens
tttaaaagagttttt

SEQ ID NO: 1293345 - DNA, 15 bp, Homo sapiens
ttttaaaagagtttt

SEQ ID NO: 1293346 - DNA, 15 bp, Homo sapiens
cttttaaaagagttt

SEQ ID NO: 1293347 - DNA, 15 bp, Homo sapiens
acttttaaaagagtt

SEQ ID NO: 1293348 - DNA, 15 bp, Homo sapiens
aacttttaaaagagt

SEQ ID NO: 1293349 - DNA, 15 bp, Homo sapiens
aaacttttaaaagag

SEQ ID NO: 1293350 - DNA, 15 bp, Homo sapiens
gaaacttttaaaaga

SEQ ID NO: 1293351 - DNA, 15 bp, Homo sapiens
agaaacttttaaaag

SEQ ID NO: 1293352 - DNA, 15 bp, Homo sapiens
gagaaacttttaaaa

SEQ ID NO: 1293353 - DNA, 15 bp, Homo sapiens
agagaaacttttaaa

SEQ ID NO: 1293354 - DNA, 15 bp, Homo sapiens
aagagaaacttttaa

SEQ ID NO: 1293355 - DNA, 15 bp, Homo sapiens
gaagagaaactttta

SEQ ID NO: 1293356 - DNA, 15 bp, Homo sapiens
ggaagagaaactttt

SEQ ID NO: 1293357 - DNA, 15 bp, Homo sapiens
tggaagagaaacttt

SEQ ID NO: 1293358 - DNA, 15 bp, Homo sapiens
atggaagagaaactt

SEQ ID NO: 1293359 - DNA, 15 bp, Homo sapiens
gatggaagagaaact

SEQ ID NO: 1293360 - DNA, 15 bp, Homo sapiens
ggatggaagagaaac

SEQ ID NO: 1293361 - DNA, 15 bp, Homo sapiens
aggatggaagagaaa

SEQ ID NO: 1293362 - DNA, 15 bp, Homo sapiens
aaggatggaagagaa

SEQ ID NO: 1293363 - DNA, 15 bp, Homo sapiens
aaaggatggaagaga

SEQ ID NO: 1293364 - DNA, 15 bp, Homo sapiens
gaaaggatggaagag

SEQ ID NO: 1293365 - DNA, 15 bp, Homo sapiens
agaaaggatggaaga

SEQ ID NO: 1293366 - DNA, 15 bp, Homo sapiens
aagaaaggatggaag

SEQ ID NO: 1293367 - DNA, 15 bp, Homo sapiens
aaagaaaggatggaa

SEQ ID NO: 1293368 - DNA, 15 bp, Homo sapiens
aaaagaaaggatgga

SEQ ID NO: 1293369 - DNA, 15 bp, Homo sapiens
aaaaagaaaggatgg

SEQ ID NO: 1293370 - DNA, 15 bp, Homo sapiens
aaaaaagaaaggatg

SEQ ID NO: 1293371 - DNA, 15 bp, Homo sapiens
aaaaaaagaaaggat

SEQ ID NO: 1293372 - DNA, 15 bp, Homo sapiens
gaaaaaaagaaagga

SEQ ID NO: 1293373 - DNA, 15 bp, Homo sapiens
ggaaaaaaagaaagg

SEQ ID NO: 1293374 - DNA, 15 bp, Homo sapiens
aggaaaaaaagaaag

SEQ ID NO: 1293375 - DNA, 15 bp, Homo sapiens
aaggaaaaaaagaaa

SEQ ID NO: 1293376 - DNA, 15 bp, Homo sapiens
caaggaaaaaaagaa

SEQ ID NO: 1293377 - DNA, 15 bp, Homo sapiens
acaaggaaaaaaaga

SEQ ID NO: 1293378 - DNA, 15 bp, Homo sapiens
tacaaggaaaaaaag

SEQ ID NO: 1293379 - DNA, 15 bp, Homo sapiens
ttacaaggaaaaaaa

SEQ ID NO: 1293380 - DNA, 15 bp, Homo sapiens
attacaaggaaaaaa

SEQ ID NO: 1293381 - DNA, 15 bp, Homo sapiens
aattacaaggaaaaa

SEQ ID NO: 1293382 - DNA, 15 bp, Homo sapiens
aaattacaaggaaaa

SEQ ID NO: 1293383 - DNA, 15 bp, Homo sapiens
taaattacaaggaaa

SEQ ID NO: 1293384 - DNA, 15 bp, Homo sapiens
ataaattacaaggaa

SEQ ID NO: 1293385 - DNA, 15 bp, Homo sapiens
aataaattacaagga

SEQ ID NO: 1293386 - DNA, 15 bp, Homo sapiens
aaataaattacaagg

SEQ ID NO: 1293387 - DNA, 15 bp, Homo sapiens
aaaataaattacaag

SEQ ID NO: 1293388 - DNA, 15 bp, Homo sapiens
aaaaataaattacaa

SEQ ID NO: 1293389 - DNA, 15 bp, Homo sapiens
aaaaaataaattaca

SEQ ID NO: 1293390 - DNA, 15 bp, Homo sapiens
taaaaaataaattac

SEQ ID NO: 1293391 - DNA, 15 bp, Homo sapiens
ttaaaaaataaatta

SEQ ID NO: 1293392 - DNA, 15 bp, Homo sapiens
gattatttaaaaaat

SEQ ID NO: 1293393 - DNA, 15 bp, Homo sapiens
tgattatttaaaaaa

SEQ ID NO: 1293394 - DNA, 15 bp, Homo sapiens
ctgattatttaaaaa

SEQ ID NO: 1293395 - DNA, 15 bp, Homo sapiens
tctgattatttaaaa

SEQ ID NO: 1293396 - DNA, 15 bp, Homo sapiens
atctgattatttaaa

SEQ ID NO: 1293397 - DNA, 15 bp, Homo sapiens
aatctgattatttaa

SEQ ID NO: 1293398 - DNA, 15 bp, Homo sapiens
caatctgattattta

SEQ ID NO: 1293399 - DNA, 15 bp, Homo sapiens
acaatctgattattt

SEQ ID NO: 1293400 - DNA, 15 bp, Homo sapiens
gacaatctgattatt

SEQ ID NO: 1293401 - DNA, 15 bp, Homo sapiens
agacaatctgattat

SEQ ID NO: 1293402 - DNA, 15 bp, Homo sapiens
aagacaatctgatta

SEQ ID NO: 1293403 - DNA, 15 bp, Homo sapiens
caagacaatctgatt

SEQ ID NO: 1293404 - DNA, 15 bp, Homo sapiens
tcaagacaatctgat

SEQ ID NO: 1293405 - DNA, 15 bp, Homo sapiens
ctcaagacaatctga

SEQ ID NO: 1293406 - DNA, 15 bp, Homo sapiens
actcaagacaatctg

SEQ ID NO: 1293407 - DNA, 15 bp, Homo sapiens
aactcaagacaatct

SEQ ID NO: 1293408 - DNA, 15 bp, Homo sapiens
aaactcaagacaatc

SEQ ID NO: 1293409 - DNA, 15 bp, Homo sapiens
aaaactcaagacaat

SEQ ID NO: 1293410 - DNA, 15 bp, Homo sapiens
gaaaactcaagacaa

SEQ ID NO: 1293411 - DNA, 15 bp, Homo sapiens
ggaaaactcaagaca

SEQ ID NO: 1293412 - DNA, 15 bp, Homo sapiens
tggaaaactcaagac

SEQ ID NO: 1293413 - DNA, 15 bp, Homo sapiens
gtggaaaactcaaga

SEQ ID NO: 1293414 - DNA, 15 bp, Homo sapiens
tgtggaaaactcaag

SEQ ID NO: 1293415 - DNA, 15 bp, Homo sapiens
ctgtggaaaactcaa

SEQ ID NO: 1293416 - DNA, 15 bp, Homo sapiens
actgtggaaaactca

SEQ ID NO: 1293417 - DNA, 15 bp, Homo sapiens
cactgtggaaaactc

SEQ ID NO: 1293418 - DNA, 15 bp, Homo sapiens
acactgtggaaaact

SEQ ID NO: 1293419 - DNA, 15 bp, Homo sapiens
cacactgtggaaaac

SEQ ID NO: 1293420 - DNA, 15 bp, Homo sapiens
ccacactgtggaaaa

SEQ ID NO: 1293421 - DNA, 15 bp, Homo sapiens
accacactgtggaaa

SEQ ID NO: 1293422 - DNA, 15 bp, Homo sapiens
aaccacactgtggaa

SEQ ID NO: 1293423 - DNA, 15 bp, Homo sapiens
aaaccacactgtgga

SEQ ID NO: 1293424 - DNA, 15 bp, Homo sapiens
aaaaccacactgtgg

SEQ ID NO: 1293425 - DNA, 15 bp, Homo sapiens
aaaaaccacactgtg

SEQ ID NO: 1293426 - DNA, 15 bp, Homo sapiens
caaaaaccacactgt

SEQ ID NO: 1293427 - DNA, 15 bp, Homo sapiens
gcaaaaaccacactg

SEQ ID NO: 1293428 - DNA, 15 bp, Homo sapiens
agcaaaaaccacact

SEQ ID NO: 1293429 - DNA, 15 bp, Homo sapiens
cagcaaaaaccacac

SEQ ID NO: 1293430 - DNA, 15 bp, Homo sapiens
tcagcaaaaaccaca

SEQ ID NO: 1293431 - DNA, 15 bp, Homo sapiens
atcagcaaaaaccac

SEQ ID NO: 1293432 - DNA, 15 bp, Homo sapiens
gatcagcaaaaacca

SEQ ID NO: 1293433 - DNA, 15 bp, Homo sapiens
tgatcagcaaaaacc

SEQ ID NO: 1293434 - DNA, 15 bp, Homo sapiens
atgatcagcaaaaac

SEQ ID NO: 1293435 - DNA, 15 bp, Homo sapiens
tatgatcagcaaaaa

SEQ ID NO: 1293436 - DNA, 15 bp, Homo sapiens
atatgatcagcaaaa

SEQ ID NO: 1293437 - DNA, 15 bp, Homo sapiens
aatatgatcagcaaa

SEQ ID NO: 1293438 - DNA, 15 bp, Homo sapiens
gaatatgatcagcaa

SEQ ID NO: 1293439 - DNA, 15 bp, Homo sapiens
agaatatgatcagca

SEQ ID NO: 1293440 - DNA, 15 bp, Homo sapiens
cagaatatgatcagc

SEQ ID NO: 1293441 - DNA, 15 bp, Homo sapiens
acagaatatgatcag

SEQ ID NO: 1293442 - DNA, 15 bp, Homo sapiens
cacagaatatgatca

SEQ ID NO: 1293443 - DNA, 15 bp, Homo sapiens
ccacagaatatgatc

SEQ ID NO: 1293444 - DNA, 15 bp, Homo sapiens
accacagaatatgat

SEQ ID NO: 1293445 - DNA, 15 bp, Homo sapiens
taccacagaatatga

SEQ ID NO: 1293446 - DNA, 15 bp, Homo sapiens
ataccacagaatatg

SEQ ID NO: 1293447 - DNA, 15 bp, Homo sapiens
tataccacagaatat

SEQ ID NO: 1293448 - DNA, 15 bp, Homo sapiens
ctataccacagaata

SEQ ID NO: 1293449 - DNA, 15 bp, Homo sapiens
actataccacagaat

SEQ ID NO: 1293450 - DNA, 15 bp, Homo sapiens
aactataccacagaa

SEQ ID NO: 1293451 - DNA, 15 bp, Homo sapiens
aaactataccacaga

SEQ ID NO: 1293452 - DNA, 15 bp, Homo sapiens
taaactataccacag

SEQ ID NO: 1293453 - DNA, 15 bp, Homo sapiens
ttaaactataccaca

SEQ ID NO: 1293454 - DNA, 15 bp, Homo sapiens
gttaaactataccac

SEQ ID NO: 1293455 - DNA, 15 bp, Homo sapiens
tgttaaactatacca

SEQ ID NO: 1293456 - DNA, 15 bp, Homo sapiens
atgttaaactatacc

SEQ ID NO: 1293457 - DNA, 15 bp, Homo sapiens
catgttaaactatac

SEQ ID NO: 1293458 - DNA, 15 bp, Homo sapiens
acatgttaaactata

SEQ ID NO: 1293459 - DNA, 15 bp, Homo sapiens
aacatgttaaactat

SEQ ID NO: 1293460 - DNA, 15 bp, Homo sapiens
gaacatgttaaacta

SEQ ID NO: 1293461 - DNA, 15 bp, Homo sapiens
agaacatgttaaact

SEQ ID NO: 1293462 - DNA, 15 bp, Homo sapiens
aagaacatgttaaac

SEQ ID NO: 1293463 - DNA, 15 bp, Homo sapiens
gaagaacatgttaaa

SEQ ID NO: 1293464 - DNA, 15 bp, Homo sapiens
agaagaacatgttaa

SEQ ID NO: 1293465 - DNA, 15 bp, Homo sapiens
cagaagaacatgtta

SEQ ID NO: 1293466 - DNA, 15 bp, Homo sapiens
acagaagaacatgtt

SEQ ID NO: 1293467 - DNA, 15 bp, Homo sapiens
gacagaagaacatgt

SEQ ID NO: 1293468 - DNA, 15 bp, Homo sapiens
ggacagaagaacatg

SEQ ID NO: 1293469 - DNA, 15 bp, Homo sapiens
aggacagaagaacat

SEQ ID NO: 1293470 - DNA, 15 bp, Homo sapiens
gaggacagaagaaca

SEQ ID NO: 1293471 - DNA, 15 bp, Homo sapiens
agaggacagaagaac

SEQ ID NO: 1293472 - DNA, 15 bp, Homo sapiens
gagaggacagaagaa

SEQ ID NO: 1293473 - DNA, 15 bp, Homo sapiens
ttgagaggacagaag

SEQ ID NO: 1293474 - DNA, 15 bp, Homo sapiens
attgagaggacagaa

SEQ ID NO: 1293475 - DNA, 15 bp, Homo sapiens
aattgagaggacaga

SEQ ID NO: 1293476 - DNA, 15 bp, Homo sapiens
aaattgagaggacag

SEQ ID NO: 1293477 - DNA, 15 bp, Homo sapiens
gaaattgagaggaca

SEQ ID NO: 1293478 - DNA, 15 bp, Homo sapiens
agaaattgagaggac

SEQ ID NO: 1293479 - DNA, 15 bp, Homo sapiens
aagaaattgagagga

SEQ ID NO: 1293480 - DNA, 15 bp, Homo sapiens
caagaaattgagagg

SEQ ID NO: 1293481 - DNA, 15 bp, Homo sapiens
acaagaaattgagag

SEQ ID NO: 1293482 - DNA, 15 bp, Homo sapiens
tacaagaaattgaga

SEQ ID NO: 1293483 - DNA, 15 bp, Homo sapiens
ttacaagaaattgag

SEQ ID NO: 1293484 - DNA, 15 bp, Homo sapiens
cttacaagaaattga

SEQ ID NO: 1293485 - DNA, 15 bp, Homo sapiens
acttacaagaaattg

SEQ ID NO: 1293486 - DNA, 15 bp, Homo sapiens
aacttacaagaaatt

SEQ ID NO: 1293487 - DNA, 15 bp, Homo sapiens
caacttacaagaaat

SEQ ID NO: 1293488 - DNA, 15 bp, Homo sapiens
acaacttacaagaaa

SEQ ID NO: 1293489 - DNA, 15 bp, Homo sapiens
aacaacttacaagaa

SEQ ID NO: 1293490 - DNA, 15 bp, Homo sapiens
caacaacttacaaga

SEQ ID NO: 1293491 - DNA, 15 bp, Homo sapiens
tcaacaacttacaag

SEQ ID NO: 1293492 - DNA, 15 bp, Homo sapiens
atcaacaacttacaa

SEQ ID NO: 1293493 - DNA, 15 bp, Homo sapiens
aatcaacaacttaca

SEQ ID NO: 1293494 - DNA, 15 bp, Homo sapiens
caatcaacaacttac

SEQ ID NO: 1293495 - DNA, 15 bp, Homo sapiens
ccaatcaacaactta

SEQ ID NO: 1293496 - DNA, 15 bp, Homo sapiens
tccaatcaacaactt

SEQ ID NO: 1293497 - DNA, 15 bp, Homo sapiens
atccaatcaacaact

SEQ ID NO: 1293498 - DNA, 15 bp, Homo sapiens
gatccaatcaacaac

SEQ ID NO: 1293499 - DNA, 15 bp, Homo sapiens
agatccaatcaacaa

SEQ ID NO: 1293500 - DNA, 15 bp, Homo sapiens
tagatccaatcaaca

SEQ ID NO: 1293501 - DNA, 15 bp, Homo sapiens
ctagatccaatcaac

SEQ ID NO: 1293502 - DNA, 15 bp, Homo sapiens
tctagatccaatcaa

SEQ ID NO: 1293503 - DNA, 15 bp, Homo sapiens
ctctagatccaatca

SEQ ID NO: 1293504 - DNA, 15 bp, Homo sapiens
cctctagatccaatc

SEQ ID NO: 1293505 - DNA, 15 bp, Homo sapiens
gcctctagatccaat

SEQ ID NO: 1293506 - DNA, 15 bp, Homo sapiens
tgcctctagatccaa

SEQ ID NO: 1293507 - DNA, 15 bp, Homo sapiens
ttgcctctagatcca

SEQ ID NO: 1293508 - DNA, 15 bp, Homo sapiens
attgcctctagatcc

SEQ ID NO: 1293509 - DNA, 15 bp, Homo sapiens
tattgcctctagatc

SEQ ID NO: 1293510 - DNA, 15 bp, Homo sapiens
gtattgcctctagat

SEQ ID NO: 1293511 - DNA, 15 bp, Homo sapiens
tgtattgcctctaga

SEQ ID NO: 1293512 - DNA, 15 bp, Homo sapiens
atgtattgcctctag

SEQ ID NO: 1293513 - DNA, 15 bp, Homo sapiens
tatgtattgcctcta

SEQ ID NO: 1293514 - DNA, 15 bp, Homo sapiens
gtatgtattgcctct

SEQ ID NO: 1293515 - DNA, 15 bp, Homo sapiens
agtatgtattgcctc

SEQ ID NO: 1293516 - DNA, 15 bp, Homo sapiens
aagtatgtattgcct

SEQ ID NO: 1293517 - DNA, 15 bp, Homo sapiens
aaagtatgtattgcc

SEQ ID NO: 1293518 - DNA, 15 bp, Homo sapiens
aaaagtatgtattgc

SEQ ID NO: 1293519 - DNA, 15 bp, Homo sapiens
aaaaagtatgtattg

SEQ ID NO: 1293520 - DNA, 15 bp, Homo sapiens
taaaaagtatgtatt

SEQ ID NO: 1293521 - DNA, 15 bp, Homo sapiens
ataaaaagtatgtat

SEQ ID NO: 1293522 - DNA, 15 bp, Homo sapiens
tataaaaagtatgta

SEQ ID NO: 1293523 - DNA, 15 bp, Homo sapiens
gtataaaaagtatgt

SEQ ID NO: 1293524 - DNA, 15 bp, Homo sapiens
agtataaaaagtatg

SEQ ID NO: 1293525 - DNA, 15 bp, Homo sapiens
aagtataaaaagtat

SEQ ID NO: 1293526 - DNA, 15 bp, Homo sapiens
taagtataaaaagta

SEQ ID NO: 1293527 - DNA, 15 bp, Homo sapiens
ttaagtataaaaagt

SEQ ID NO: 1293528 - DNA, 15 bp, Homo sapiens
attaagtataaaaag

SEQ ID NO: 1293529 - DNA, 15 bp, Homo sapiens
gattaagtataaaaa

SEQ ID NO: 1293530 - DNA, 15 bp, Homo sapiens
tgattaagtataaaa

SEQ ID NO: 1293531 - DNA, 15 bp, Homo sapiens
atgattaagtataaa

SEQ ID NO: 1293532 - DNA, 15 bp, Homo sapiens
gatgattaagtataa

SEQ ID NO: 1293533 - DNA, 15 bp, Homo sapiens
agatgattaagtata

SEQ ID NO: 1293534 - DNA, 15 bp, Homo sapiens
cagatgattaagtat

SEQ ID NO: 1293535 - DNA, 15 bp, Homo sapiens
acagatgattaagta

SEQ ID NO: 1293536 - DNA, 15 bp, Homo sapiens
tacagatgattaagt

SEQ ID NO: 1293537 - DNA, 15 bp, Homo sapiens
ttacagatgattaag

SEQ ID NO: 1293538 - DNA, 15 bp, Homo sapiens
attacagatgattaa

SEQ ID NO: 1293539 - DNA, 15 bp, Homo sapiens
aattacagatgatta

SEQ ID NO: 1293540 - DNA, 15 bp, Homo sapiens
aaattacagatgatt

SEQ ID NO: 1293541 - DNA, 15 bp, Homo sapiens
aaaattacagatgat

SEQ ID NO: 1293542 - DNA, 15 bp, Homo sapiens
aaaaattacagatga

SEQ ID NO: 1293543 - DNA, 15 bp, Homo sapiens
aaaaaattacagatg

SEQ ID NO: 1293544 - DNA, 15 bp, Homo sapiens
aaaaaaaattacaga

SEQ ID NO: 1293545 - DNA, 15 bp, Homo sapiens
gcctcaaaaaaaaaa

SEQ ID NO: 1293546 - DNA, 15 bp, Homo sapiens
tgcctcaaaaaaaaa

SEQ ID NO: 1293547 - DNA, 15 bp, Homo sapiens
ctgcctcaaaaaaaa

SEQ ID NO: 1293548 - DNA, 15 bp, Homo sapiens
tctgcctcaaaaaaa

SEQ ID NO: 1293549 - DNA, 15 bp, Homo sapiens
ctctgcctcaaaaaa

SEQ ID NO: 1293550 - DNA, 15 bp, Homo sapiens
actctgcctcaaaaa

SEQ ID NO: 1293551 - DNA, 15 bp, Homo sapiens
gactctgcctcaaaa

SEQ ID NO: 1293552 - DNA, 15 bp, Homo sapiens
agactctgcctcaaa

SEQ ID NO: 1293553 - DNA, 15 bp, Homo sapiens
gagactctgcctcaa

SEQ ID NO: 1293554 - DNA, 15 bp, Homo sapiens
tgagactctgcctca

SEQ ID NO: 1293555 - DNA, 15 bp, Homo sapiens
gtgagactctgcctc

SEQ ID NO: 1293556 - DNA, 15 bp, Homo sapiens
agtgagactctgcct

SEQ ID NO: 1293557 - DNA, 15 bp, Homo sapiens
gagtgagactctgcc

SEQ ID NO: 1293558 - DNA, 15 bp, Homo sapiens
tgagtgagactctgc

SEQ ID NO: 1293559 - DNA, 15 bp, Homo sapiens
agagtgagtgagact

SEQ ID NO: 1293560 - DNA, 15 bp, Homo sapiens
cagagtgagtgagac

SEQ ID NO: 1293561 - DNA, 15 bp, Homo sapiens
acagagtgagtgaga

SEQ ID NO: 1293562 - DNA, 15 bp, Homo sapiens
gacagagtgagtgag

SEQ ID NO: 1293563 - DNA, 15 bp, Homo sapiens
cgacagagtgagtga

SEQ ID NO: 1293564 - DNA, 15 bp, Homo sapiens
gcgacagagtgagtg

SEQ ID NO: 1293565 - DNA, 15 bp, Homo sapiens
ggcgacagagtgagt

SEQ ID NO: 1293566 - DNA, 15 bp, Homo sapiens
ggcctgggcgacaga

SEQ ID NO: 1293567 - DNA, 15 bp, Homo sapiens
aggcctgggcgacag

SEQ ID NO: 1293568 - DNA, 15 bp, Homo sapiens
caggcctgggcgaca

SEQ ID NO: 1293569 - DNA, 15 bp, Homo sapiens
ccaggcctgggcgac

SEQ ID NO: 1293570 - DNA, 15 bp, Homo sapiens
tccaggcctgggcga

SEQ ID NO: 1293571 - DNA, 15 bp, Homo sapiens
ctccaggcctgggcg

SEQ ID NO: 1293572 - DNA, 15 bp, Homo sapiens
actccaggcctgggc

SEQ ID NO: 1293573 - DNA, 15 bp, Homo sapiens
aactccaggcctggg

SEQ ID NO: 1293574 - DNA, 15 bp, Homo sapiens
gaactccaggcctgg

SEQ ID NO: 1293575 - DNA, 15 bp, Homo sapiens
tgaactccaggcctg

SEQ ID NO: 1293576 - DNA, 15 bp, Homo sapiens
ctgaactccaggcct

SEQ ID NO: 1293577 - DNA, 15 bp, Homo sapiens
actgaactccaggcc

SEQ ID NO: 1293578 - DNA, 15 bp, Homo sapiens
cactgaactccaggc

SEQ ID NO: 1293579 - DNA, 15 bp, Homo sapiens
ccactgaactccagg

SEQ ID NO: 1293580 - DNA, 15 bp, Homo sapiens
gccactgaactccag

SEQ ID NO: 1293581 - DNA, 15 bp, Homo sapiens
cgccactgaactcca

SEQ ID NO: 1293582 - DNA, 15 bp, Homo sapiens
gcgccactgaactcc

SEQ ID NO: 1293583 - DNA, 15 bp, Homo sapiens
agagtttgcagtgag

SEQ ID NO: 1293584 - DNA, 15 bp, Homo sapiens
cagagtttgcagtga

SEQ ID NO: 1293585 - DNA, 15 bp, Homo sapiens
gcagagtttgcagtg

SEQ ID NO: 1293586 - DNA, 15 bp, Homo sapiens
ggcagagtttgcagt

SEQ ID NO: 1293587 - DNA, 15 bp, Homo sapiens
aggcagagtttgcag

SEQ ID NO: 1293588 - DNA, 15 bp, Homo sapiens
gaggcagagtttgca

SEQ ID NO: 1293589 - DNA, 15 bp, Homo sapiens
ggaggcagagtttgc

SEQ ID NO: 1293590 - DNA, 15 bp, Homo sapiens
gggaggcagagtttg

SEQ ID NO: 1293591 - DNA, 15 bp, Homo sapiens
cgggaggcagagttt

SEQ ID NO: 1293592 - DNA, 15 bp, Homo sapiens
ccgggaggcagagtt

SEQ ID NO: 1293593 - DNA, 15 bp, Homo sapiens
cccgggaggcagagt

SEQ ID NO: 1293594 - DNA, 15 bp, Homo sapiens
tgcttgaacccggga

SEQ ID NO: 1293595 - DNA, 15 bp, Homo sapiens
ttgcttgaacccggg

SEQ ID NO: 1293596 - DNA, 15 bp, Homo sapiens
attgcttgaacccgg

SEQ ID NO: 1293597 - DNA, 15 bp, Homo sapiens
agcaggagaattgct

SEQ ID NO: 1293598 - DNA, 15 bp, Homo sapiens
aagcaggagaattgc

SEQ ID NO: 1293599 - DNA, 15 bp, Homo sapiens
gaagcaggagaattg

SEQ ID NO: 1293600 - DNA, 15 bp, Homo sapiens
tgaagcaggagaatt

SEQ ID NO: 1293601 - DNA, 15 bp, Homo sapiens
catagtcccagctac

SEQ ID NO: 1293602 - DNA, 15 bp, Homo sapiens
ccatagtcccagcta

SEQ ID NO: 1293603 - DNA, 15 bp, Homo sapiens
cccatagtcccagct

SEQ ID NO: 1293604 - DNA, 15 bp, Homo sapiens
gcccatagtcccagc

SEQ ID NO: 1293605 - DNA, 15 bp, Homo sapiens
tgcccatagtcccag

SEQ ID NO: 1293606 - DNA, 15 bp, Homo sapiens
atgcccatagtccca

SEQ ID NO: 1293607 - DNA, 15 bp, Homo sapiens
catgcccatagtccc

SEQ ID NO: 1293608 - DNA, 15 bp, Homo sapiens
gcatgcccatagtcc

SEQ ID NO: 1293609 - DNA, 15 bp, Homo sapiens
tgcatgcccatagtc

SEQ ID NO: 1293610 - DNA, 15 bp, Homo sapiens
gtgcatgcccatagt

SEQ ID NO: 1293611 - DNA, 15 bp, Homo sapiens
ggtgcatgcccatag

SEQ ID NO: 1293612 - DNA, 15 bp, Homo sapiens
tggtgcatgcccata

SEQ ID NO: 1293613 - DNA, 15 bp, Homo sapiens
gtggtgcatgcccat

SEQ ID NO: 1293614 - DNA, 15 bp, Homo sapiens
ggtggtgcatgccca

SEQ ID NO: 1293615 - DNA, 15 bp, Homo sapiens
tggtggtgcatgccc

SEQ ID NO: 1293616 - DNA, 15 bp, Homo sapiens
gcctggccaacacgg

SEQ ID NO: 1293617 - DNA, 15 bp, Homo sapiens
agcctggccaacacg

SEQ ID NO: 1293618 - DNA, 15 bp, Homo sapiens
aggtggatcatgagg

SEQ ID NO: 1293619 - DNA, 15 bp, Homo sapiens
caggtggatcatgag

SEQ ID NO: 1293620 - DNA, 15 bp, Homo sapiens
gcaggtggatcatga

SEQ ID NO: 1293621 - DNA, 15 bp, Homo sapiens
ggcaggtggatcatg

SEQ ID NO: 1293622 - DNA, 15 bp, Homo sapiens
aggcaggtggatcat

SEQ ID NO: 1293623 - DNA, 15 bp, Homo sapiens
tggctgggtgtggtg

SEQ ID NO: 1293624 - DNA, 15 bp, Homo sapiens
atggctgggtgtggt

SEQ ID NO: 1293625 - DNA, 15 bp, Homo sapiens
gatggctgggtgtgg

SEQ ID NO: 1293626 - DNA, 15 bp, Homo sapiens
agatggctgggtgtg

SEQ ID NO: 1293627 - DNA, 15 bp, Homo sapiens
cagatggctgggtgt

SEQ ID NO: 1293628 - DNA, 15 bp, Homo sapiens
acagatggctgggtg

SEQ ID NO: 1293629 - DNA, 15 bp, Homo sapiens
tacagatggctgggt

SEQ ID NO: 1293630 - DNA, 15 bp, Homo sapiens
ttacagatggctggg

SEQ ID NO: 1293631 - DNA, 15 bp, Homo sapiens
attacagatggctgg

SEQ ID NO: 1293632 - DNA, 15 bp, Homo sapiens
tattacagatggctg

SEQ ID NO: 1293633 - DNA, 15 bp, Homo sapiens
atattacagatggct

SEQ ID NO: 1293634 - DNA, 15 bp, Homo sapiens
aatattacagatggc

SEQ ID NO: 1293635 - DNA, 15 bp, Homo sapiens
aaatattacagatgg

SEQ ID NO: 1293636 - DNA, 15 bp, Homo sapiens
aaaatattacagatg

SEQ ID NO: 1293637 - DNA, 15 bp, Homo sapiens
aaaaatattacagat

SEQ ID NO: 1293638 - DNA, 15 bp, Homo sapiens
taaaaatattacaga

SEQ ID NO: 1293639 - DNA, 15 bp, Homo sapiens
ttaaaaatattacag

SEQ ID NO: 1293640 - DNA, 15 bp, Homo sapiens
attaaaaatattaca

SEQ ID NO: 1293641 - DNA, 15 bp, Homo sapiens
tattaaaaatattac

SEQ ID NO: 1293642 - DNA, 15 bp, Homo sapiens
ctattaaaaatatta

SEQ ID NO: 1293643 - DNA, 15 bp, Homo sapiens
gctattaaaaatatt

SEQ ID NO: 1293644 - DNA, 15 bp, Homo sapiens
agctattaaaaatat

SEQ ID NO: 1293645 - DNA, 15 bp, Homo sapiens
cagctattaaaaata

SEQ ID NO: 1293646 - DNA, 15 bp, Homo sapiens
tcagctattaaaaat

SEQ ID NO: 1293647 - DNA, 15 bp, Homo sapiens
ttcagctattaaaaa

SEQ ID NO: 1293648 - DNA, 15 bp, Homo sapiens
gttcagctattaaaa

SEQ ID NO: 1293649 - DNA, 15 bp, Homo sapiens
ggttcagctattaaa

SEQ ID NO: 1293650 - DNA, 15 bp, Homo sapiens
aggttcagctattaa

SEQ ID NO: 1293651 - DNA, 15 bp, Homo sapiens
caggttcagctatta

SEQ ID NO: 1293652 - DNA, 15 bp, Homo sapiens
acaggttcagctatt

SEQ ID NO: 1293653 - DNA, 15 bp, Homo sapiens
tacaggttcagctat

SEQ ID NO: 1293654 - DNA, 15 bp, Homo sapiens
atacaggttcagcta

SEQ ID NO: 1293655 - DNA, 15 bp, Homo sapiens
aatacaggttcagct

SEQ ID NO: 1293656 - DNA, 15 bp, Homo sapiens
aaatacaggttcagc

SEQ ID NO: 1293657 - DNA, 15 bp, Homo sapiens
taaatacaggttcag

SEQ ID NO: 1293658 - DNA, 15 bp, Homo sapiens
ctaaatacaggttca

SEQ ID NO: 1293659 - DNA, 15 bp, Homo sapiens
actaaatacaggttc

SEQ ID NO: 1293660 - DNA, 15 bp, Homo sapiens
aactaaatacaggtt

SEQ ID NO: 1293661 - DNA, 15 bp, Homo sapiens
aaactaaatacaggt

SEQ ID NO: 1293662 - DNA, 15 bp, Homo sapiens
caaactaaatacagg

SEQ ID NO: 1293663 - DNA, 15 bp, Homo sapiens
ccaaactaaatacag

SEQ ID NO: 1293664 - DNA, 15 bp, Homo sapiens
tccaaactaaataca

SEQ ID NO: 1293665 - DNA, 15 bp, Homo sapiens
atccaaactaaatac

SEQ ID NO: 1293666 - DNA, 15 bp, Homo sapiens
aatccaaactaaata

SEQ ID NO: 1293667 - DNA, 15 bp, Homo sapiens
caatccaaactaaat

SEQ ID NO: 1293668 - DNA, 15 bp, Homo sapiens
ccaatccaaactaaa

SEQ ID NO: 1293669 - DNA, 15 bp, Homo sapiens
cccaatccaaactaa

SEQ ID NO: 1293670 - DNA, 15 bp, Homo sapiens
tcccaatccaaacta

SEQ ID NO: 1293671 - DNA, 15 bp, Homo sapiens
ttcccaatccaaact

SEQ ID NO: 1293672 - DNA, 15 bp, Homo sapiens
attcccaatccaaac

SEQ ID NO: 1293673 - DNA, 15 bp, Homo sapiens
cattcccaatccaaa

SEQ ID NO: 1293674 - DNA, 15 bp, Homo sapiens
gcattcccaatccaa

SEQ ID NO: 1293675 - DNA, 15 bp, Homo sapiens
agcattcccaatcca

SEQ ID NO: 1293676 - DNA, 15 bp, Homo sapiens
cagcattcccaatcc

SEQ ID NO: 1293677 - DNA, 15 bp, Homo sapiens
tcagcattcccaatc

SEQ ID NO: 1293678 - DNA, 15 bp, Homo sapiens
ttcagcattcccaat

SEQ ID NO: 1293679 - DNA, 15 bp, Homo sapiens
tttcagcattcccaa

SEQ ID NO: 1293680 - DNA, 15 bp, Homo sapiens
ttttcagcattccca

SEQ ID NO: 1293681 - DNA, 15 bp, Homo sapiens
attttcagcattccc

SEQ ID NO: 1293682 - DNA, 15 bp, Homo sapiens
tattttcagcattcc

SEQ ID NO: 1293683 - DNA, 15 bp, Homo sapiens
ttattttcagcattc

SEQ ID NO: 1293684 - DNA, 15 bp, Homo sapiens
attattttcagcatt

SEQ ID NO: 1293685 - DNA, 15 bp, Homo sapiens
gattattttcagcat

SEQ ID NO: 1293686 - DNA, 15 bp, Homo sapiens
ggattattttcagca

SEQ ID NO: 1293687 - DNA, 15 bp, Homo sapiens
tggattattttcagc

SEQ ID NO: 1293688 - DNA, 15 bp, Homo sapiens
ctggattattttcag

SEQ ID NO: 1293689 - DNA, 15 bp, Homo sapiens
cctggattattttca

SEQ ID NO: 1293690 - DNA, 15 bp, Homo sapiens
tcctggattattttc

SEQ ID NO: 1293691 - DNA, 15 bp, Homo sapiens
ctcctggattatttt

SEQ ID NO: 1293692 - DNA, 15 bp, Homo sapiens
tctcctggattattt

SEQ ID NO: 1293693 - DNA, 15 bp, Homo sapiens
atctcctggattatt

SEQ ID NO: 1293694 - DNA, 15 bp, Homo sapiens
aatctcctggattat

SEQ ID NO: 1293695 - DNA, 15 bp, Homo sapiens
aaatctcctggatta

SEQ ID NO: 1293696 - DNA, 15 bp, Homo sapiens
aaaatctcctggatt

SEQ ID NO: 1293697 - DNA, 15 bp, Homo sapiens
aaaaatctcctggat

SEQ ID NO: 1293698 - DNA, 15 bp, Homo sapiens
aaaaaatctcctgga

SEQ ID NO: 1293699 - DNA, 15 bp, Homo sapiens
aaaaaaatctcctgg

SEQ ID NO: 1293700 - DNA, 15 bp, Homo sapiens
aaaaaaaatctcctg

SEQ ID NO: 1293701 - DNA, 15 bp, Homo sapiens
aaaaaaaaatctcct

SEQ ID NO: 1293702 - DNA, 15 bp, Homo sapiens
aaaaaaaaaatctcc

SEQ ID NO: 1293703 - DNA, 15 bp, Homo sapiens
taaaaaaaaaatctc

SEQ ID NO: 1293704 - DNA, 15 bp, Homo sapiens
tttaaaaaaaaaatc

SEQ ID NO: 1293705 - DNA, 15 bp, Homo sapiens
atttaaaaaaaaaat

SEQ ID NO: 1293706 - DNA, 15 bp, Homo sapiens
tgtgatttaaaaaaa

SEQ ID NO: 1293707 - DNA, 15 bp, Homo sapiens
ctgtgatttaaaaaa

SEQ ID NO: 1293708 - DNA, 15 bp, Homo sapiens
actgtgatttaaaaa

SEQ ID NO: 1293709 - DNA, 15 bp, Homo sapiens
aactgtgatttaaaa

SEQ ID NO: 1293710 - DNA, 15 bp, Homo sapiens
aaactgtgatttaaa

SEQ ID NO: 1293711 - DNA, 15 bp, Homo sapiens
taaactgtgatttaa

SEQ ID NO: 1293712 - DNA, 15 bp, Homo sapiens
ataaactgtgattta

SEQ ID NO: 1293713 - DNA, 15 bp, Homo sapiens
aataaactgtgattt

SEQ ID NO: 1293714 - DNA, 15 bp, Homo sapiens
taataaactgtgatt

SEQ ID NO: 1293715 - DNA, 15 bp, Homo sapiens
ataataaactgtgat

SEQ ID NO: 1293716 - DNA, 15 bp, Homo sapiens
gataataaactgtga

SEQ ID NO: 1293717 - DNA, 15 bp, Homo sapiens
tgataataaactgtg

SEQ ID NO: 1293718 - DNA, 15 bp, Homo sapiens
atgataataaactgt

SEQ ID NO: 1293719 - DNA, 15 bp, Homo sapiens
tatgataataaactg

SEQ ID NO: 1293720 - DNA, 15 bp, Homo sapiens
atatgataataaact

SEQ ID NO: 1293721 - DNA, 15 bp, Homo sapiens
aatatgataataaac

SEQ ID NO: 1293722 - DNA, 15 bp, Homo sapiens
taatatgataataaa

SEQ ID NO: 1293723 - DNA, 15 bp, Homo sapiens
ataatatgataataa

SEQ ID NO: 1293724 - DNA, 15 bp, Homo sapiens
aataatatgataata

SEQ ID NO: 1293725 - DNA, 15 bp, Homo sapiens
taataatatgataat

SEQ ID NO: 1293726 - DNA, 15 bp, Homo sapiens
ataataatatgataa

SEQ ID NO: 1293727 - DNA, 15 bp, Homo sapiens
tataataatatgata

SEQ ID NO: 1293728 - DNA, 15 bp, Homo sapiens
atataataatatgat

SEQ ID NO: 1293729 - DNA, 15 bp, Homo sapiens
aatataataatatga

SEQ ID NO: 1293730 - DNA, 15 bp, Homo sapiens
aaatataataatatg

SEQ ID NO: 1293731 - DNA, 15 bp, Homo sapiens
taaatataataatat

SEQ ID NO: 1293732 - DNA, 15 bp, Homo sapiens
gtaaatataataata

SEQ ID NO: 1293733 - DNA, 15 bp, Homo sapiens
agtaaatataataat

SEQ ID NO: 1293734 - DNA, 15 bp, Homo sapiens
tagtaaatataataa

SEQ ID NO: 1293735 - DNA, 15 bp, Homo sapiens
atagtaaatataata

SEQ ID NO: 1293736 - DNA, 15 bp, Homo sapiens
tatagtaaatataat

SEQ ID NO: 1293737 - DNA, 15 bp, Homo sapiens
ttatagtaaatataa

SEQ ID NO: 1293738 - DNA, 15 bp, Homo sapiens
attatagtaaatata

SEQ ID NO: 1293739 - DNA, 15 bp, Homo sapiens
tattatagtaaatat

SEQ ID NO: 1293740 - DNA, 15 bp, Homo sapiens
atattatagtaaata

SEQ ID NO: 1293741 - DNA, 15 bp, Homo sapiens
tatattatagtaaat

SEQ ID NO: 1293742 - DNA, 15 bp, Homo sapiens
atatattatagtaaa

SEQ ID NO: 1293743 - DNA, 15 bp, Homo sapiens
aatatattatagtaa

SEQ ID NO: 1293744 - DNA, 15 bp, Homo sapiens
aaatatattatagta

SEQ ID NO: 1293745 - DNA, 15 bp, Homo sapiens
aaaatatattatagt

SEQ ID NO: 1293746 - DNA, 15 bp, Homo sapiens
taaaatatattatag

SEQ ID NO: 1293747 - DNA, 15 bp, Homo sapiens
ataaaatatattata

SEQ ID NO: 1293748 - DNA, 15 bp, Homo sapiens
tataaaatatattat

SEQ ID NO: 1293749 - DNA, 15 bp, Homo sapiens
gtataaaatatatta

SEQ ID NO: 1293750 - DNA, 15 bp, Homo sapiens
ggtataaaatatatt

SEQ ID NO: 1293751 - DNA, 15 bp, Homo sapiens
aggtataaaatatat

SEQ ID NO: 1293752 - DNA, 15 bp, Homo sapiens
taggtataaaatata

SEQ ID NO: 1293753 - DNA, 15 bp, Homo sapiens
ataggtataaaatat

SEQ ID NO: 1293754 - DNA, 15 bp, Homo sapiens
gataggtataaaata

SEQ ID NO: 1293755 - DNA, 15 bp, Homo sapiens
agataggtataaaat

SEQ ID NO: 1293756 - DNA, 15 bp, Homo sapiens
aagataggtataaaa

SEQ ID NO: 1293757 - DNA, 15 bp, Homo sapiens
aaagataggtataaa

SEQ ID NO: 1293758 - DNA, 15 bp, Homo sapiens
aaaagataggtataa

SEQ ID NO: 1293759 - DNA, 15 bp, Homo sapiens
taaaagataggtata

SEQ ID NO: 1293760 - DNA, 15 bp, Homo sapiens
ttaaaagataggtat

SEQ ID NO: 1293761 - DNA, 15 bp, Homo sapiens
tttaaaagataggta

SEQ ID NO: 1293762 - DNA, 15 bp, Homo sapiens
ctttaaaagataggt

SEQ ID NO: 1293763 - DNA, 15 bp, Homo sapiens
tctttaaaagatagg

SEQ ID NO: 1293764 - DNA, 15 bp, Homo sapiens
gtctttaaaagatag

SEQ ID NO: 1293765 - DNA, 15 bp, Homo sapiens
tgtctttaaaagata

SEQ ID NO: 1293766 - DNA, 15 bp, Homo sapiens
atgtctttaaaagat

SEQ ID NO: 1293767 - DNA, 15 bp, Homo sapiens
gatgtctttaaaaga

SEQ ID NO: 1293768 - DNA, 15 bp, Homo sapiens
tgatgtctttaaaag

SEQ ID NO: 1293769 - DNA, 15 bp, Homo sapiens
atgatgtctttaaaa

SEQ ID NO: 1293770 - DNA, 15 bp, Homo sapiens
tatgatgtctttaaa

SEQ ID NO: 1293771 - DNA, 15 bp, Homo sapiens
ttatgatgtctttaa

SEQ ID NO: 1293772 - DNA, 15 bp, Homo sapiens
attatgatgtcttta

SEQ ID NO: 1293773 - DNA, 15 bp, Homo sapiens
aattatgatgtcttt

SEQ ID NO: 1293774 - DNA, 15 bp, Homo sapiens
aaattatgatgtctt

SEQ ID NO: 1293775 - DNA, 15 bp, Homo sapiens
taaattatgatgtct

SEQ ID NO: 1293776 - DNA, 15 bp, Homo sapiens
gtaaattatgatgtc

SEQ ID NO: 1293777 - DNA, 15 bp, Homo sapiens
agtaaattatgatgt

SEQ ID NO: 1293778 - DNA, 15 bp, Homo sapiens
tagtaaattatgatg

SEQ ID NO: 1293779 - DNA, 15 bp, Homo sapiens
ttagtaaattatgat

SEQ ID NO: 1293780 - DNA, 15 bp, Homo sapiens
tttagtaaattatga

SEQ ID NO: 1293781 - DNA, 15 bp, Homo sapiens
ttttagtaaattatg

SEQ ID NO: 1293782 - DNA, 15 bp, Homo sapiens
gttttagtaaattat

SEQ ID NO: 1293783 - DNA, 15 bp, Homo sapiens
agttttagtaaatta

SEQ ID NO: 1293784 - DNA, 15 bp, Homo sapiens
aagttttagtaaatt

SEQ ID NO: 1293785 - DNA, 15 bp, Homo sapiens
taagttttagtaaat

SEQ ID NO: 1293786 - DNA, 15 bp, Homo sapiens
ttaagttttagtaaa

SEQ ID NO: 1293787 - DNA, 15 bp, Homo sapiens
tttaagttttagtaa

SEQ ID NO: 1293788 - DNA, 15 bp, Homo sapiens
ttttaagttttagta

SEQ ID NO: 1293789 - DNA, 15 bp, Homo sapiens
attttaagttttagt

SEQ ID NO: 1293790 - DNA, 15 bp, Homo sapiens
tattttaagttttag

SEQ ID NO: 1293791 - DNA, 15 bp, Homo sapiens
atattttaagtttta

SEQ ID NO: 1293792 - DNA, 15 bp, Homo sapiens
aatattttaagtttt

SEQ ID NO: 1293793 - DNA, 15 bp, Homo sapiens
caatattttaagttt

SEQ ID NO: 1293794 - DNA, 15 bp, Homo sapiens
acaatattttaagtt

SEQ ID NO: 1293795 - DNA, 15 bp, Homo sapiens
aacaatattttaagt

SEQ ID NO: 1293796 - DNA, 15 bp, Homo sapiens
aaacaatattttaag

SEQ ID NO: 1293797 - DNA, 15 bp, Homo sapiens
aaaacaatattttaa

SEQ ID NO: 1293798 - DNA, 15 bp, Homo sapiens
aaaaacaatatttta

SEQ ID NO: 1293799 - DNA, 15 bp, Homo sapiens
taaaaacaatatttt

SEQ ID NO: 1293800 - DNA, 15 bp, Homo sapiens
ataaaaacaatattt

SEQ ID NO: 1293801 - DNA, 15 bp, Homo sapiens
cataaaaacaatatt

SEQ ID NO: 1293802 - DNA, 15 bp, Homo sapiens
gcataaaaacaatat

SEQ ID NO: 1293803 - DNA, 15 bp, Homo sapiens
agcataaaaacaata

SEQ ID NO: 1293804 - DNA, 15 bp, Homo sapiens
tagcataaaaacaat

SEQ ID NO: 1293805 - DNA, 15 bp, Homo sapiens
atagcataaaaacaa

SEQ ID NO: 1293806 - DNA, 15 bp, Homo sapiens
catagcataaaaaca

SEQ ID NO: 1293807 - DNA, 15 bp, Homo sapiens
acatagcataaaaac

SEQ ID NO: 1293808 - DNA, 15 bp, Homo sapiens
gacatagcataaaaa

SEQ ID NO: 1293809 - DNA, 15 bp, Homo sapiens
agacatagcataaaa

SEQ ID NO: 1293810 - DNA, 15 bp, Homo sapiens
tagacatagcataaa

SEQ ID NO: 1293811 - DNA, 15 bp, Homo sapiens
ctagacatagcataa

SEQ ID NO: 1293812 - DNA, 15 bp, Homo sapiens
tctagacatagcata

SEQ ID NO: 1293813 - DNA, 15 bp, Homo sapiens
ttctagacatagcat

SEQ ID NO: 1293814 - DNA, 15 bp, Homo sapiens
tttctagacatagca

SEQ ID NO: 1293815 - DNA, 15 bp, Homo sapiens
atttctagacatagc

SEQ ID NO: 1293816 - DNA, 15 bp, Homo sapiens
aatttctagacatag

SEQ ID NO: 1293817 - DNA, 15 bp, Homo sapiens
caatttctagacata

SEQ ID NO: 1293818 - DNA, 15 bp, Homo sapiens
tcaatttctagacat

SEQ ID NO: 1293819 - DNA, 15 bp, Homo sapiens
ttcaatttctagaca

SEQ ID NO: 1293820 - DNA, 15 bp, Homo sapiens
attcaatttctagac

SEQ ID NO: 1293821 - DNA, 15 bp, Homo sapiens
aattcaatttctaga

SEQ ID NO: 1293822 - DNA, 15 bp, Homo sapiens
gaattcaatttctag

SEQ ID NO: 1293823 - DNA, 15 bp, Homo sapiens
tgaattcaatttcta

SEQ ID NO: 1293824 - DNA, 15 bp, Homo sapiens
ctgaattcaatttct

SEQ ID NO: 1293825 - DNA, 15 bp, Homo sapiens
tctgaattcaatttc

SEQ ID NO: 1293826 - DNA, 15 bp, Homo sapiens
ttctgaattcaattt

SEQ ID NO: 1293827 - DNA, 15 bp, Homo sapiens
tttctgaattcaatt

SEQ ID NO: 1293828 - DNA, 15 bp, Homo sapiens
atttctgaattcaat

SEQ ID NO: 1293829 - DNA, 15 bp, Homo sapiens
tatttctgaattcaa

SEQ ID NO: 1293830 - DNA, 15 bp, Homo sapiens
atatttctgaattca

SEQ ID NO: 1293831 - DNA, 15 bp, Homo sapiens
aatatttctgaattc

SEQ ID NO: 1293832 - DNA, 15 bp, Homo sapiens
aaatatttctgaatt

SEQ ID NO: 1293833 - DNA, 15 bp, Homo sapiens
caaatatttctgaat

SEQ ID NO: 1293834 - DNA, 15 bp, Homo sapiens
gcaaatatttctgaa

SEQ ID NO: 1293835 - DNA, 15 bp, Homo sapiens
agcaaatatttctga

SEQ ID NO: 1293836 - DNA, 15 bp, Homo sapiens
tagcaaatatttctg

SEQ ID NO: 1293837 - DNA, 15 bp, Homo sapiens
ttagcaaatatttct

SEQ ID NO: 1293838 - DNA, 15 bp, Homo sapiens
attagcaaatatttc

SEQ ID NO: 1293839 - DNA, 15 bp, Homo sapiens
aattagcaaatattt

SEQ ID NO: 1293840 - DNA, 15 bp, Homo sapiens
taattagcaaatatt

SEQ ID NO: 1293841 - DNA, 15 bp, Homo sapiens
ataattagcaaatat

SEQ ID NO: 1293842 - DNA, 15 bp, Homo sapiens
aataattagcaaata

SEQ ID NO: 1293843 - DNA, 15 bp, Homo sapiens
aaataattagcaaat

SEQ ID NO: 1293844 - DNA, 15 bp, Homo sapiens
aaaataattagcaaa

SEQ ID NO: 1293845 - DNA, 15 bp, Homo sapiens
aaaaataattagcaa

SEQ ID NO: 1293846 - DNA, 15 bp, Homo sapiens
taaaaataattagca

SEQ ID NO: 1293847 - DNA, 15 bp, Homo sapiens
ttaaaaataattagc

SEQ ID NO: 1293848 - DNA, 15 bp, Homo sapiens
cttaaaaataattag

SEQ ID NO: 1293849 - DNA, 15 bp, Homo sapiens
tcttaaaaataatta

SEQ ID NO: 1293850 - DNA, 15 bp, Homo sapiens
gtcttaaaaataatt

SEQ ID NO: 1293851 - DNA, 15 bp, Homo sapiens
agtcttaaaaataat

SEQ ID NO: 1293852 - DNA, 15 bp, Homo sapiens
gagtcttaaaaataa

SEQ ID NO: 1293853 - DNA, 15 bp, Homo sapiens
agagtcttaaaaata

SEQ ID NO: 1293854 - DNA, 15 bp, Homo sapiens
tagagtcttaaaaat

SEQ ID NO: 1293855 - DNA, 15 bp, Homo sapiens
ctagagtcttaaaaa

SEQ ID NO: 1293856 - DNA, 15 bp, Homo sapiens
cctagagtcttaaaa

SEQ ID NO: 1293857 - DNA, 15 bp, Homo sapiens
tcctagagtcttaaa

SEQ ID NO: 1293858 - DNA, 15 bp, Homo sapiens
gtcctagagtcttaa

SEQ ID NO: 1293859 - DNA, 15 bp, Homo sapiens
tgtcctagagtctta

SEQ ID NO: 1293860 - DNA, 15 bp, Homo sapiens
ctgtcctagagtctt

SEQ ID NO: 1293861 - DNA, 15 bp, Homo sapiens
tctgtcctagagtct

SEQ ID NO: 1293862 - DNA, 15 bp, Homo sapiens
ttctgtcctagagtc

SEQ ID NO: 1293863 - DNA, 15 bp, Homo sapiens
tttctgtcctagagt

SEQ ID NO: 1293864 - DNA, 15 bp, Homo sapiens
ttttctgtcctagag

SEQ ID NO: 1293865 - DNA, 15 bp, Homo sapiens
gttttctgtcctaga

SEQ ID NO: 1293866 - DNA, 15 bp, Homo sapiens
agttttctgtcctag

SEQ ID NO: 1293867 - DNA, 15 bp, Homo sapiens
aagttttctgtccta

SEQ ID NO: 1293868 - DNA, 15 bp, Homo sapiens
aaagttttctgtcct

SEQ ID NO: 1293869 - DNA, 15 bp, Homo sapiens
aaaagttttctgtcc

SEQ ID NO: 1293870 - DNA, 15 bp, Homo sapiens
aaaaagttttctgtc

SEQ ID NO: 1293871 - DNA, 15 bp, Homo sapiens
aaaaaagttttctgt

SEQ ID NO: 1293872 - DNA, 15 bp, Homo sapiens
aaaaaaagttttctg

SEQ ID NO: 1293873 - DNA, 15 bp, Homo sapiens
aaaaaaaagttttct

SEQ ID NO: 1293874 - DNA, 15 bp, Homo sapiens
gaaaaaaaagttttc

SEQ ID NO: 1293875 - DNA, 15 bp, Homo sapiens
ggaaaaaaaagtttt

SEQ ID NO: 1293876 - DNA, 15 bp, Homo sapiens
aggaaaaaaaagttt

SEQ ID NO: 1293877 - DNA, 15 bp, Homo sapiens
gaggaaaaaaaagtt

SEQ ID NO: 1293878 - DNA, 15 bp, Homo sapiens
agaggaaaaaaaagt

SEQ ID NO: 1293879 - DNA, 15 bp, Homo sapiens
aagaggaaaaaaaag

SEQ ID NO: 1293880 - DNA, 15 bp, Homo sapiens
caagaggaaaaaaaa

SEQ ID NO: 1293881 - DNA, 15 bp, Homo sapiens
gcaagaggaaaaaaa

SEQ ID NO: 1293882 - DNA, 15 bp, Homo sapiens
tgcaagaggaaaaaa

SEQ ID NO: 1293883 - DNA, 15 bp, Homo sapiens
ctgcaagaggaaaaa

SEQ ID NO: 1293884 - DNA, 15 bp, Homo sapiens
tctgcaagaggaaaa

SEQ ID NO: 1293885 - DNA, 15 bp, Homo sapiens
gtctgcaagaggaaa

SEQ ID NO: 1293886 - DNA, 15 bp, Homo sapiens
agtctgcaagaggaa

SEQ ID NO: 1293887 - DNA, 15 bp, Homo sapiens
tagtctgcaagagga

SEQ ID NO: 1293888 - DNA, 15 bp, Homo sapiens
ttagtctgcaagagg

SEQ ID NO: 1293889 - DNA, 15 bp, Homo sapiens
tttagtctgcaagag

SEQ ID NO: 1293890 - DNA, 15 bp, Homo sapiens
ttttagtctgcaaga

SEQ ID NO: 1293891 - DNA, 15 bp, Homo sapiens
attttagtctgcaag

SEQ ID NO: 1293892 - DNA, 15 bp, Homo sapiens
tattttagtctgcaa

SEQ ID NO: 1293893 - DNA, 15 bp, Homo sapiens
gtattttagtctgca

SEQ ID NO: 1293894 - DNA, 15 bp, Homo sapiens
cgtattttagtctgc

SEQ ID NO: 1293895 - DNA, 15 bp, Homo sapiens
gcgtattttagtctg

SEQ ID NO: 1293896 - DNA, 15 bp, Homo sapiens
agcgtattttagtct

SEQ ID NO: 1293897 - DNA, 15 bp, Homo sapiens
aagcgtattttagtc

SEQ ID NO: 1293898 - DNA, 15 bp, Homo sapiens
taagcgtattttagt

SEQ ID NO: 1293899 - DNA, 15 bp, Homo sapiens
ctaagcgtattttag

SEQ ID NO: 1293900 - DNA, 15 bp, Homo sapiens
tctaagcgtatttta

SEQ ID NO: 1293901 - DNA, 15 bp, Homo sapiens
atctaagcgtatttt

SEQ ID NO: 1293902 - DNA, 15 bp, Homo sapiens
aatctaagcgtattt

SEQ ID NO: 1293903 - DNA, 15 bp, Homo sapiens
aaatctaagcgtatt

SEQ ID NO: 1293904 - DNA, 15 bp, Homo sapiens
taaatctaagcgtat

SEQ ID NO: 1293905 - DNA, 15 bp, Homo sapiens
ctaaatctaagcgta

SEQ ID NO: 1293906 - DNA, 15 bp, Homo sapiens
actaaatctaagcgt

SEQ ID NO: 1293907 - DNA, 15 bp, Homo sapiens
aactaaatctaagcg

SEQ ID NO: 1293908 - DNA, 15 bp, Homo sapiens
aaactaaatctaagc

SEQ ID NO: 1293909 - DNA, 15 bp, Homo sapiens
caaactaaatctaag

SEQ ID NO: 1293910 - DNA, 15 bp, Homo sapiens
tcaaactaaatctaa

SEQ ID NO: 1293911 - DNA, 15 bp, Homo sapiens
ttcaaactaaatcta

SEQ ID NO: 1293912 - DNA, 15 bp, Homo sapiens
tttcaaactaaatct

SEQ ID NO: 1293913 - DNA, 15 bp, Homo sapiens
ctttcaaactaaatc

SEQ ID NO: 1293914 - DNA, 15 bp, Homo sapiens
actttcaaactaaat

SEQ ID NO: 1293915 - DNA, 15 bp, Homo sapiens
aactttcaaactaaa

SEQ ID NO: 1293916 - DNA, 15 bp, Homo sapiens
caactttcaaactaa

SEQ ID NO: 1293917 - DNA, 15 bp, Homo sapiens
ccaactttcaaacta

SEQ ID NO: 1293918 - DNA, 15 bp, Homo sapiens
gccaactttcaaact

SEQ ID NO: 1293919 - DNA, 15 bp, Homo sapiens
agccaactttcaaac

SEQ ID NO: 1293920 - DNA, 15 bp, Homo sapiens
tagccaactttcaaa

SEQ ID NO: 1293921 - DNA, 15 bp, Homo sapiens
atagccaactttcaa

SEQ ID NO: 1293922 - DNA, 15 bp, Homo sapiens
aatagccaactttca

SEQ ID NO: 1293923 - DNA, 15 bp, Homo sapiens
aaatagccaactttc

SEQ ID NO: 1293924 - DNA, 15 bp, Homo sapiens
gaaatagccaacttt

SEQ ID NO: 1293925 - DNA, 15 bp, Homo sapiens
ggaaatagccaactt

SEQ ID NO: 1293926 - DNA, 15 bp, Homo sapiens
tggaaatagccaact

SEQ ID NO: 1293927 - DNA, 15 bp, Homo sapiens
atggaaatagccaac

SEQ ID NO: 1293928 - DNA, 15 bp, Homo sapiens
catggaaatagccaa

SEQ ID NO: 1293929 - DNA, 15 bp, Homo sapiens
gcatggaaatagcca

SEQ ID NO: 1293930 - DNA, 15 bp, Homo sapiens
ggcatggaaatagcc

SEQ ID NO: 1293931 - DNA, 15 bp, Homo sapiens
aggcatggaaatagc

SEQ ID NO: 1293932 - DNA, 15 bp, Homo sapiens
aaggcatggaaatag

SEQ ID NO: 1293933 - DNA, 15 bp, Homo sapiens
gaaggcatggaaata

SEQ ID NO: 1293934 - DNA, 15 bp, Homo sapiens
agaaggcatggaaat

SEQ ID NO: 1293935 - DNA, 15 bp, Homo sapiens
aagagaaggcatgga

SEQ ID NO: 1293936 - DNA, 15 bp, Homo sapiens
aaagagaaggcatgg

SEQ ID NO: 1293937 - DNA, 15 bp, Homo sapiens
caaagagaaggcatg

SEQ ID NO: 1293938 - DNA, 15 bp, Homo sapiens
acaaagagaaggcat

SEQ ID NO: 1293939 - DNA, 15 bp, Homo sapiens
tacaaagagaaggca

SEQ ID NO: 1293940 - DNA, 15 bp, Homo sapiens
atacaaagagaaggc

SEQ ID NO: 1293941 - DNA, 15 bp, Homo sapiens
aatacaaagagaagg

SEQ ID NO: 1293942 - DNA, 15 bp, Homo sapiens
aaatacaaagagaag

SEQ ID NO: 1293943 - DNA, 15 bp, Homo sapiens
caaatacaaagagaa

SEQ ID NO: 1293944 - DNA, 15 bp, Homo sapiens
acaaatacaaagaga

SEQ ID NO: 1293945 - DNA, 15 bp, Homo sapiens
aacaaatacaaagag

SEQ ID NO: 1293946 - DNA, 15 bp, Homo sapiens
aaacaaatacaaaga

SEQ ID NO: 1293947 - DNA, 15 bp, Homo sapiens
taaacaaatacaaag

SEQ ID NO: 1293948 - DNA, 15 bp, Homo sapiens
ataaacaaatacaaa

SEQ ID NO: 1293949 - DNA, 15 bp, Homo sapiens
cataaacaaatacaa

SEQ ID NO: 1293950 - DNA, 15 bp, Homo sapiens
tcataaacaaataca

SEQ ID NO: 1293951 - DNA, 15 bp, Homo sapiens
ctcataaacaaatac

SEQ ID NO: 1293952 - DNA, 15 bp, Homo sapiens
tctcataaacaaata

SEQ ID NO: 1293953 - DNA, 15 bp, Homo sapiens
gtctcataaacaaat

SEQ ID NO: 1293954 - DNA, 15 bp, Homo sapiens
agtctcataaacaaa

SEQ ID NO: 1293955 - DNA, 15 bp, Homo sapiens
cagtctcataaacaa

SEQ ID NO: 1293956 - DNA, 15 bp, Homo sapiens
acagtctcataaaca

SEQ ID NO: 1293957 - DNA, 15 bp, Homo sapiens
tacagtctcataaac

SEQ ID NO: 1293958 - DNA, 15 bp, Homo sapiens
ctacagtctcataaa

SEQ ID NO: 1293959 - DNA, 15 bp, Homo sapiens
actacagtctcataa

SEQ ID NO: 1293960 - DNA, 15 bp, Homo sapiens
aactacagtctcata

SEQ ID NO: 1293961 - DNA, 15 bp, Homo sapiens
aaactacagtctcat

SEQ ID NO: 1293962 - DNA, 15 bp, Homo sapiens
taaactacagtctca

SEQ ID NO: 1293963 - DNA, 15 bp, Homo sapiens
gtaaactacagtctc

SEQ ID NO: 1293964 - DNA, 15 bp, Homo sapiens
tgtaaactacagtct

SEQ ID NO: 1293965 - DNA, 15 bp, Homo sapiens
ctgtaaactacagtc

SEQ ID NO: 1293966 - DNA, 15 bp, Homo sapiens
actgtaaactacagt

SEQ ID NO: 1293967 - DNA, 15 bp, Homo sapiens
aactgtaaactacag

SEQ ID NO: 1293968 - DNA, 15 bp, Homo sapiens
gaactgtaaactaca

SEQ ID NO: 1293969 - DNA, 15 bp, Homo sapiens
agaactgtaaactac

SEQ ID NO: 1293970 - DNA, 15 bp, Homo sapiens
aagaactgtaaacta

SEQ ID NO: 1293971 - DNA, 15 bp, Homo sapiens
aaagaactgtaaact

SEQ ID NO: 1293972 - DNA, 15 bp, Homo sapiens
aaaagaactgtaaac

SEQ ID NO: 1293973 - DNA, 15 bp, Homo sapiens
aaaaagaactgtaaa

SEQ ID NO: 1293974 - DNA, 15 bp, Homo sapiens
caaaaagaactgtaa

SEQ ID NO: 1293975 - DNA, 15 bp, Homo sapiens
ccaaaaagaactgta

SEQ ID NO: 1293976 - DNA, 15 bp, Homo sapiens
cccaaaaagaactgt

SEQ ID NO: 1293977 - DNA, 15 bp, Homo sapiens
tcccaaaaagaactg

SEQ ID NO: 1293978 - DNA, 15 bp, Homo sapiens
ctcccaaaaagaact

SEQ ID NO: 1293979 - DNA, 15 bp, Homo sapiens
gctcccaaaaagaac

SEQ ID NO: 1293980 - DNA, 15 bp, Homo sapiens
tgctcccaaaaagaa

SEQ ID NO: 1293981 - DNA, 15 bp, Homo sapiens
ctgctcccaaaaaga

SEQ ID NO: 1293982 - DNA, 15 bp, Homo sapiens
tctgctcccaaaaag

SEQ ID NO: 1293983 - DNA, 15 bp, Homo sapiens
ctctgctcccaaaaa

SEQ ID NO: 1293984 - DNA, 15 bp, Homo sapiens
actctgctcccaaaa

SEQ ID NO: 1293985 - DNA, 15 bp, Homo sapiens
tactctgctcccaaa

SEQ ID NO: 1293986 - DNA, 15 bp, Homo sapiens
ctactctgctcccaa

SEQ ID NO: 1293987 - DNA, 15 bp, Homo sapiens
tctactctgctccca

SEQ ID NO: 1293988 - DNA, 15 bp, Homo sapiens
ttctactctgctccc

SEQ ID NO: 1293989 - DNA, 15 bp, Homo sapiens
cttctactctgctcc

SEQ ID NO: 1293990 - DNA, 15 bp, Homo sapiens
tcttctactctgctc

SEQ ID NO: 1293991 - DNA, 15 bp, Homo sapiens
ctcttctactctgct

SEQ ID NO: 1293992 - DNA, 15 bp, Homo sapiens
cctcttctactctgc

SEQ ID NO: 1293993 - DNA, 15 bp, Homo sapiens
ccctcttctactctg

SEQ ID NO: 1293994 - DNA, 15 bp, Homo sapiens
tccctcttctactct

SEQ ID NO: 1293995 - DNA, 15 bp, Homo sapiens
atccctcttctactc

SEQ ID NO: 1293996 - DNA, 15 bp, Homo sapiens
catccctcttctact

SEQ ID NO: 1293997 - DNA, 15 bp, Homo sapiens
ccatccctcttctac

SEQ ID NO: 1293998 - DNA, 15 bp, Homo sapiens
gccatccctcttcta

SEQ ID NO: 1293999 - DNA, 15 bp, Homo sapiens
tgccatccctcttct

SEQ ID NO: 1294000 - DNA, 15 bp, Homo sapiens
ttgccatccctcttc

SEQ ID NO: 1294001 - DNA, 15 bp, Homo sapiens
tttgccatccctctt

SEQ ID NO: 1294002 - DNA, 15 bp, Homo sapiens
ttttgccatccctct

SEQ ID NO: 1294003 - DNA, 15 bp, Homo sapiens
tttttgccatccctc

SEQ ID NO: 1294004 - DNA, 15 bp, Homo sapiens
gtttttgccatccct

SEQ ID NO: 1294005 - DNA, 15 bp, Homo sapiens
agtttttgccatccc

SEQ ID NO: 1294006 - DNA, 15 bp, Homo sapiens
tagtttttgccatcc

SEQ ID NO: 1294007 - DNA, 15 bp, Homo sapiens
ttagtttttgccatc

SEQ ID NO: 1294008 - DNA, 15 bp, Homo sapiens
attagtttttgccat

SEQ ID NO: 1294009 - DNA, 15 bp, Homo sapiens
tattagtttttgcca

SEQ ID NO: 1294010 - DNA, 15 bp, Homo sapiens
atattagtttttgcc

SEQ ID NO: 1294011 - DNA, 15 bp, Homo sapiens
aatattagtttttgc

SEQ ID NO: 1294012 - DNA, 15 bp, Homo sapiens
taatattagtttttg

SEQ ID NO: 1294013 - DNA, 15 bp, Homo sapiens
ctaatattagttttt

SEQ ID NO: 1294014 - DNA, 15 bp, Homo sapiens
actaatattagtttt

SEQ ID NO: 1294015 - DNA, 15 bp, Homo sapiens
tactaatattagttt

SEQ ID NO: 1294016 - DNA, 15 bp, Homo sapiens
gtactaatattagtt

SEQ ID NO: 1294017 - DNA, 15 bp, Homo sapiens
tgtactaatattagt

SEQ ID NO: 1294018 - DNA, 15 bp, Homo sapiens
atgtactaatattag

SEQ ID NO: 1294019 - DNA, 15 bp, Homo sapiens
tatgtactaatatta

SEQ ID NO: 1294020 - DNA, 15 bp, Homo sapiens
ttatgtactaatatt

SEQ ID NO: 1294021 - DNA, 15 bp, Homo sapiens
attatgtactaatat

SEQ ID NO: 1294022 - DNA, 15 bp, Homo sapiens
aattatgtactaata

SEQ ID NO: 1294023 - DNA, 15 bp, Homo sapiens
aaattatgtactaat

SEQ ID NO: 1294024 - DNA, 15 bp, Homo sapiens
caaattatgtactaa

SEQ ID NO: 1294025 - DNA, 15 bp, Homo sapiens
acaaattatgtacta

SEQ ID NO: 1294026 - DNA, 15 bp, Homo sapiens
tacaaattatgtact

SEQ ID NO: 1294027 - DNA, 15 bp, Homo sapiens
ctacaaattatgtac

SEQ ID NO: 1294028 - DNA, 15 bp, Homo sapiens
actacaaattatgta

SEQ ID NO: 1294029 - DNA, 15 bp, Homo sapiens
tactacaaattatgt

SEQ ID NO: 1294030 - DNA, 15 bp, Homo sapiens
ctactacaaattatg

SEQ ID NO: 1294031 - DNA, 15 bp, Homo sapiens
tctactacaaattat

SEQ ID NO: 1294032 - DNA, 15 bp, Homo sapiens
atctactacaaatta

SEQ ID NO: 1294033 - DNA, 15 bp, Homo sapiens
tatctactacaaatt

SEQ ID NO: 1294034 - DNA, 15 bp, Homo sapiens
atatctactacaaat

SEQ ID NO: 1294035 - DNA, 15 bp, Homo sapiens
catatctactacaaa

SEQ ID NO: 1294036 - DNA, 15 bp, Homo sapiens
ccatatctactacaa

SEQ ID NO: 1294037 - DNA, 15 bp, Homo sapiens
tccatatctactaca

SEQ ID NO: 1294038 - DNA, 15 bp, Homo sapiens
atccatatctactac

SEQ ID NO: 1294039 - DNA, 15 bp, Homo sapiens
catccatatctacta

SEQ ID NO: 1294040 - DNA, 15 bp, Homo sapiens
tcatccatatctact

SEQ ID NO: 1294041 - DNA, 15 bp, Homo sapiens
ttcatccatatctac

SEQ ID NO: 1294042 - DNA, 15 bp, Homo sapiens
tttcatccatatcta

SEQ ID NO: 1294043 - DNA, 15 bp, Homo sapiens
atttcatccatatct

SEQ ID NO: 1294044 - DNA, 15 bp, Homo sapiens
aatttcatccatatc

SEQ ID NO: 1294045 - DNA, 15 bp, Homo sapiens
caatttcatccatat

SEQ ID NO: 1294046 - DNA, 15 bp, Homo sapiens
acaatttcatccata

SEQ ID NO: 1294047 - DNA, 15 bp, Homo sapiens
aacaatttcatccat

SEQ ID NO: 1294048 - DNA, 15 bp, Homo sapiens
taacaatttcatcca

SEQ ID NO: 1294049 - DNA, 15 bp, Homo sapiens
ataacaatttcatcc

SEQ ID NO: 1294050 - DNA, 15 bp, Homo sapiens
gataacaatttcatc

SEQ ID NO: 1294051 - DNA, 15 bp, Homo sapiens
ggataacaatttcat

SEQ ID NO: 1294052 - DNA, 15 bp, Homo sapiens
aggataacaatttca

SEQ ID NO: 1294053 - DNA, 15 bp, Homo sapiens
aaggataacaatttc

SEQ ID NO: 1294054 - DNA, 15 bp, Homo sapiens
gaaggataacaattt

SEQ ID NO: 1294055 - DNA, 15 bp, Homo sapiens
agaaggataacaatt

SEQ ID NO: 1294056 - DNA, 15 bp, Homo sapiens
tagaaggataacaat

SEQ ID NO: 1294057 - DNA, 15 bp, Homo sapiens
ttagaaggataacaa

SEQ ID NO: 1294058 - DNA, 15 bp, Homo sapiens
cattagaaggataac

SEQ ID NO: 1294059 - DNA, 15 bp, Homo sapiens
tcattagaaggataa

SEQ ID NO: 1294060 - DNA, 15 bp, Homo sapiens
ttcattagaaggata

SEQ ID NO: 1294061 - DNA, 15 bp, Homo sapiens
tttcattagaaggat

SEQ ID NO: 1294062 - DNA, 15 bp, Homo sapiens
gtttcattagaagga

SEQ ID NO: 1294063 - DNA, 15 bp, Homo sapiens
ggtttcattagaagg

SEQ ID NO: 1294064 - DNA, 15 bp, Homo sapiens
aggtttcattagaag

SEQ ID NO: 1294065 - DNA, 15 bp, Homo sapiens
taggtttcattagaa

SEQ ID NO: 1294066 - DNA, 15 bp, Homo sapiens
ttaggtttcattaga

SEQ ID NO: 1294067 - DNA, 15 bp, Homo sapiens
attaggtttcattag

SEQ ID NO: 1294068 - DNA, 15 bp, Homo sapiens
tattaggtttcatta

SEQ ID NO: 1294069 - DNA, 15 bp, Homo sapiens
ttattaggtttcatt

SEQ ID NO: 1294070 - DNA, 15 bp, Homo sapiens
cttattaggtttcat

SEQ ID NO: 1294071 - DNA, 15 bp, Homo sapiens
acttattaggtttca

SEQ ID NO: 1294072 - DNA, 15 bp, Homo sapiens
tacttattaggtttc

SEQ ID NO: 1294073 - DNA, 15 bp, Homo sapiens
ttacttattaggttt

SEQ ID NO: 1294074 - DNA, 15 bp, Homo sapiens
tttacttattaggtt

SEQ ID NO: 1294075 - DNA, 15 bp, Homo sapiens
ttttacttattaggt

SEQ ID NO: 1294076 - DNA, 15 bp, Homo sapiens
cttttacttattagg

SEQ ID NO: 1294077 - DNA, 15 bp, Homo sapiens
acttttacttattag

SEQ ID NO: 1294078 - DNA, 15 bp, Homo sapiens
tacttttacttatta

SEQ ID NO: 1294079 - DNA, 15 bp, Homo sapiens
ctacttttacttatt

SEQ ID NO: 1294080 - DNA, 15 bp, Homo sapiens
actacttttacttat

SEQ ID NO: 1294081 - DNA, 15 bp, Homo sapiens
tactacttttactta

SEQ ID NO: 1294082 - DNA, 15 bp, Homo sapiens
ctactacttttactt

SEQ ID NO: 1294083 - DNA, 15 bp, Homo sapiens
tctactacttttact

SEQ ID NO: 1294084 - DNA, 15 bp, Homo sapiens
ttctactacttttac

SEQ ID NO: 1294085 - DNA, 15 bp, Homo sapiens
attctactactttta

SEQ ID NO: 1294086 - DNA, 15 bp, Homo sapiens
cattctactactttt

SEQ ID NO: 1294087 - DNA, 15 bp, Homo sapiens
acattctactacttt

SEQ ID NO: 1294088 - DNA, 15 bp, Homo sapiens
aacattctactactt

SEQ ID NO: 1294089 - DNA, 15 bp, Homo sapiens
taacattctactact

SEQ ID NO: 1294090 - DNA, 15 bp, Homo sapiens
gtaacattctactac

SEQ ID NO: 1294091 - DNA, 15 bp, Homo sapiens
ggtaacattctacta

SEQ ID NO: 1294092 - DNA, 15 bp, Homo sapiens
tggtaacattctact

SEQ ID NO: 1294093 - DNA, 15 bp, Homo sapiens
ttggtaacattctac

SEQ ID NO: 1294094 - DNA, 15 bp, Homo sapiens
cttggtaacattcta

SEQ ID NO: 1294095 - DNA, 15 bp, Homo sapiens
tcttggtaacattct

SEQ ID NO: 1294096 - DNA, 15 bp, Homo sapiens
atcttggtaacattc

SEQ ID NO: 1294097 - DNA, 15 bp, Homo sapiens
aatcttggtaacatt

SEQ ID NO: 1294098 - DNA, 15 bp, Homo sapiens
taatcttggtaacat

SEQ ID NO: 1294099 - DNA, 15 bp, Homo sapiens
ataatcttggtaaca

SEQ ID NO: 1294100 - DNA, 15 bp, Homo sapiens
aataatcttggtaac

SEQ ID NO: 1294101 - DNA, 15 bp, Homo sapiens
aaataatcttggtaa

SEQ ID NO: 1294102 - DNA, 15 bp, Homo sapiens
aaaataatcttggta

SEQ ID NO: 1294103 - DNA, 15 bp, Homo sapiens
aaaaataatcttggt

SEQ ID NO: 1294104 - DNA, 15 bp, Homo sapiens
caaaaataatcttgg

SEQ ID NO: 1294105 - DNA, 15 bp, Homo sapiens
tcaaaaataatcttg

SEQ ID NO: 1294106 - DNA, 15 bp, Homo sapiens
gtcaaaaataatctt

SEQ ID NO: 1294107 - DNA, 15 bp, Homo sapiens
ggtcaaaaataatct

SEQ ID NO: 1294108 - DNA, 15 bp, Homo sapiens
aggtcaaaaataatc

SEQ ID NO: 1294109 - DNA, 15 bp, Homo sapiens
taggtcaaaaataat

SEQ ID NO: 1294110 - DNA, 15 bp, Homo sapiens
ttaggtcaaaaataa

SEQ ID NO: 1294111 - DNA, 15 bp, Homo sapiens
cttaggtcaaaaata

SEQ ID NO: 1294112 - DNA, 15 bp, Homo sapiens
acttaggtcaaaaat

SEQ ID NO: 1294113 - DNA, 15 bp, Homo sapiens
aacttaggtcaaaaa

SEQ ID NO: 1294114 - DNA, 15 bp, Homo sapiens
taacttaggtcaaaa

SEQ ID NO: 1294115 - DNA, 15 bp, Homo sapiens
ataacttaggtcaaa

SEQ ID NO: 1294116 - DNA, 15 bp, Homo sapiens
tataacttaggtcaa

SEQ ID NO: 1294117 - DNA, 15 bp, Homo sapiens
ctataacttaggtca

SEQ ID NO: 1294118 - DNA, 15 bp, Homo sapiens
actataacttaggtc

SEQ ID NO: 1294119 - DNA, 15 bp, Homo sapiens
aactataacttaggt

SEQ ID NO: 1294120 - DNA, 15 bp, Homo sapiens
taactataacttagg

SEQ ID NO: 1294121 - DNA, 15 bp, Homo sapiens
ctaactataacttag

SEQ ID NO: 1294122 - DNA, 15 bp, Homo sapiens
tctaactataactta

SEQ ID NO: 1294123 - DNA, 15 bp, Homo sapiens
ttctaactataactt

SEQ ID NO: 1294124 - DNA, 15 bp, Homo sapiens
attctaactataact

SEQ ID NO: 1294125 - DNA, 15 bp, Homo sapiens
tattctaactataac

SEQ ID NO: 1294126 - DNA, 15 bp, Homo sapiens
gtattctaactataa

SEQ ID NO: 1294127 - DNA, 15 bp, Homo sapiens
agtattctaactata

SEQ ID NO: 1294128 - DNA, 15 bp, Homo sapiens
aagtattctaactat

SEQ ID NO: 1294129 - DNA, 15 bp, Homo sapiens
gaagtattctaacta

SEQ ID NO: 1294130 - DNA, 15 bp, Homo sapiens
tgaagtattctaact

SEQ ID NO: 1294131 - DNA, 15 bp, Homo sapiens
atgaagtattctaac

SEQ ID NO: 1294132 - DNA, 15 bp, Homo sapiens
aatgaagtattctaa

SEQ ID NO: 1294133 - DNA, 15 bp, Homo sapiens
taatgaagtattcta

SEQ ID NO: 1294134 - DNA, 15 bp, Homo sapiens
ataatgaagtattct

SEQ ID NO: 1294135 - DNA, 15 bp, Homo sapiens
aataatgaagtattc

SEQ ID NO: 1294136 - DNA, 15 bp, Homo sapiens
aaataatgaagtatt

SEQ ID NO: 1294137 - DNA, 15 bp, Homo sapiens
aaaataatgaagtat

SEQ ID NO: 1294138 - DNA, 15 bp, Homo sapiens
taaaataatgaagta

SEQ ID NO: 1294139 - DNA, 15 bp, Homo sapiens
ataaaataatgaagt

SEQ ID NO: 1294140 - DNA, 15 bp, Homo sapiens
tataaaataatgaag

SEQ ID NO: 1294141 - DNA, 15 bp, Homo sapiens
atataaaataatgaa

SEQ ID NO: 1294142 - DNA, 15 bp, Homo sapiens
catataaaataatga

SEQ ID NO: 1294143 - DNA, 15 bp, Homo sapiens
tcatataaaataatg

SEQ ID NO: 1294144 - DNA, 15 bp, Homo sapiens
atcatataaaataat

SEQ ID NO: 1294145 - DNA, 15 bp, Homo sapiens
catcatataaaataa

SEQ ID NO: 1294146 - DNA, 15 bp, Homo sapiens
ccatcatataaaata

SEQ ID NO: 1294147 - DNA, 15 bp, Homo sapiens
tccatcatataaaat

SEQ ID NO: 1294148 - DNA, 15 bp, Homo sapiens
atccatcatataaaa

SEQ ID NO: 1294149 - DNA, 15 bp, Homo sapiens
catccatcatataaa

SEQ ID NO: 1294150 - DNA, 15 bp, Homo sapiens
acatccatcatataa

SEQ ID NO: 1294151 - DNA, 15 bp, Homo sapiens
tacatccatcatata

SEQ ID NO: 1294152 - DNA, 15 bp, Homo sapiens
gtacatccatcatat

SEQ ID NO: 1294153 - DNA, 15 bp, Homo sapiens
tgtacatccatcata

SEQ ID NO: 1294154 - DNA, 15 bp, Homo sapiens
ttgtacatccatcat

SEQ ID NO: 1294155 - DNA, 15 bp, Homo sapiens
attgtacatccatca

SEQ ID NO: 1294156 - DNA, 15 bp, Homo sapiens
aattgtacatccatc

SEQ ID NO: 1294157 - DNA, 15 bp, Homo sapiens
caattgtacatccat

SEQ ID NO: 1294158 - DNA, 15 bp, Homo sapiens
acaattgtacatcca

SEQ ID NO: 1294159 - DNA, 15 bp, Homo sapiens
aacaattgtacatcc

SEQ ID NO: 1294160 - DNA, 15 bp, Homo sapiens
gaacaattgtacatc

SEQ ID NO: 1294161 - DNA, 15 bp, Homo sapiens
agaacaattgtacat

SEQ ID NO: 1294162 - DNA, 15 bp, Homo sapiens
aagaacaattgtaca

SEQ ID NO: 1294163 - DNA, 15 bp, Homo sapiens
taagaacaattgtac

SEQ ID NO: 1294164 - DNA, 15 bp, Homo sapiens
ataagaacaattgta

SEQ ID NO: 1294165 - DNA, 15 bp, Homo sapiens
gataagaacaattgt

SEQ ID NO: 1294166 - DNA, 15 bp, Homo sapiens
agataagaacaattg

SEQ ID NO: 1294167 - DNA, 15 bp, Homo sapiens
tagataagaacaatt

SEQ ID NO: 1294168 - DNA, 15 bp, Homo sapiens
ttagataagaacaat

SEQ ID NO: 1294169 - DNA, 15 bp, Homo sapiens
attagataagaacaa

SEQ ID NO: 1294170 - DNA, 15 bp, Homo sapiens
aattagataagaaca

SEQ ID NO: 1294171 - DNA, 15 bp, Homo sapiens
aaattagataagaac

SEQ ID NO: 1294172 - DNA, 15 bp, Homo sapiens
taaattagataagaa

SEQ ID NO: 1294173 - DNA, 15 bp, Homo sapiens
gtaaattagataaga

SEQ ID NO: 1294174 - DNA, 15 bp, Homo sapiens
ggtaaattagataag

SEQ ID NO: 1294175 - DNA, 15 bp, Homo sapiens
tggtaaattagataa

SEQ ID NO: 1294176 - DNA, 15 bp, Homo sapiens
gtggtaaattagata

SEQ ID NO: 1294177 - DNA, 15 bp, Homo sapiens
agtggtaaattagat

SEQ ID NO: 1294178 - DNA, 15 bp, Homo sapiens
aagtggtaaattaga

SEQ ID NO: 1294179 - DNA, 15 bp, Homo sapiens
aaagtggtaaattag

SEQ ID NO: 1294180 - DNA, 15 bp, Homo sapiens
aaaagtggtaaatta

SEQ ID NO: 1294181 - DNA, 15 bp, Homo sapiens
taaaagtggtaaatt

SEQ ID NO: 1294182 - DNA, 15 bp, Homo sapiens
gtaaaagtggtaaat

SEQ ID NO: 1294183 - DNA, 15 bp, Homo sapiens
tgtaaaagtggtaaa

SEQ ID NO: 1294184 - DNA, 15 bp, Homo sapiens
ctgtaaaagtggtaa

SEQ ID NO: 1294185 - DNA, 15 bp, Homo sapiens
tctgtaaaagtggta

SEQ ID NO: 1294186 - DNA, 15 bp, Homo sapiens
ttctgtaaaagtggt

SEQ ID NO: 1294187 - DNA, 15 bp, Homo sapiens
tttctgtaaaagtgg

SEQ ID NO: 1294188 - DNA, 15 bp, Homo sapiens
gtttctgtaaaagtg

SEQ ID NO: 1294189 - DNA, 15 bp, Homo sapiens
tgtttctgtaaaagt

SEQ ID NO: 1294190 - DNA, 15 bp, Homo sapiens
ctgtttctgtaaaag

SEQ ID NO: 1294191 - DNA, 15 bp, Homo sapiens
gctgtttctgtaaaa

SEQ ID NO: 1294192 - DNA, 15 bp, Homo sapiens
agctgtttctgtaaa

SEQ ID NO: 1294193 - DNA, 15 bp, Homo sapiens
cagctgtttctgtaa

SEQ ID NO: 1294194 - DNA, 15 bp, Homo sapiens
acagctgtttctgta

SEQ ID NO: 1294195 - DNA, 15 bp, Homo sapiens
aacagctgtttctgt

SEQ ID NO: 1294196 - DNA, 15 bp, Homo sapiens
taacagctgtttctg

SEQ ID NO: 1294197 - DNA, 15 bp, Homo sapiens
ataacagctgtttct

SEQ ID NO: 1294198 - DNA, 15 bp, Homo sapiens
tataacagctgtttc

SEQ ID NO: 1294199 - DNA, 15 bp, Homo sapiens
gtataacagctgttt

SEQ ID NO: 1294200 - DNA, 15 bp, Homo sapiens
ggtataacagctgtt

SEQ ID NO: 1294201 - DNA, 15 bp, Homo sapiens
gggtataacagctgt

SEQ ID NO: 1294202 - DNA, 15 bp, Homo sapiens
tgggtataacagctg

SEQ ID NO: 1294203 - DNA, 15 bp, Homo sapiens
atgggtataacagct

SEQ ID NO: 1294204 - DNA, 15 bp, Homo sapiens
aatgggtataacagc

SEQ ID NO: 1294205 - DNA, 15 bp, Homo sapiens
taatgggtataacag

SEQ ID NO: 1294206 - DNA, 15 bp, Homo sapiens
ttaatgggtataaca

SEQ ID NO: 1294207 - DNA, 15 bp, Homo sapiens
attaatgggtataac

SEQ ID NO: 1294208 - DNA, 15 bp, Homo sapiens
cattaatgggtataa

SEQ ID NO: 1294209 - DNA, 15 bp, Homo sapiens
ccattaatgggtata

SEQ ID NO: 1294210 - DNA, 15 bp, Homo sapiens
accattaatgggtat

SEQ ID NO: 1294211 - DNA, 15 bp, Homo sapiens
aaccattaatgggta

SEQ ID NO: 1294212 - DNA, 15 bp, Homo sapiens
gaaccattaatgggt

SEQ ID NO: 1294213 - DNA, 15 bp, Homo sapiens
tgaaccattaatggg

SEQ ID NO: 1294214 - DNA, 15 bp, Homo sapiens
gtgaaccattaatgg

SEQ ID NO: 1294215 - DNA, 15 bp, Homo sapiens
ggtgaaccattaatg

SEQ ID NO: 1294216 - DNA, 15 bp, Homo sapiens
aggtgaaccattaat

SEQ ID NO: 1294217 - DNA, 15 bp, Homo sapiens
gaggtgaaccattaa

SEQ ID NO: 1294218 - DNA, 15 bp, Homo sapiens
cgaggtgaaccatta

SEQ ID NO: 1294219 - DNA, 15 bp, Homo sapiens
tcgaggtgaaccatt

SEQ ID NO: 1294220 - DNA, 15 bp, Homo sapiens
ttcgaggtgaaccat

SEQ ID NO: 1294221 - DNA, 15 bp, Homo sapiens
gttcgaggtgaacca

SEQ ID NO: 1294222 - DNA, 15 bp, Homo sapiens
tgttcgaggtgaacc

SEQ ID NO: 1294223 - DNA, 15 bp, Homo sapiens
gtgttcgaggtgaac

SEQ ID NO: 1294224 - DNA, 15 bp, Homo sapiens
ggtgttcgaggtgaa

SEQ ID NO: 1294225 - DNA, 15 bp, Homo sapiens
gggtgttcgaggtga

SEQ ID NO: 1294226 - DNA, 15 bp, Homo sapiens
tgggtgttcgaggtg

SEQ ID NO: 1294227 - DNA, 15 bp, Homo sapiens
ctgggtgttcgaggt

SEQ ID NO: 1294228 - DNA, 15 bp, Homo sapiens
cctgggtgttcgagg

SEQ ID NO: 1294229 - DNA, 15 bp, Homo sapiens
gcctgggtgttcgag

SEQ ID NO: 1294230 - DNA, 15 bp, Homo sapiens
cgcctgggtgttcga

SEQ ID NO: 1294231 - DNA, 15 bp, Homo sapiens
tcgcctgggtgttcg

SEQ ID NO: 1294232 - DNA, 15 bp, Homo sapiens
ctcgcctgggtgttc

SEQ ID NO: 1294233 - DNA, 15 bp, Homo sapiens
cctcgcctgggtgtt

SEQ ID NO: 1294234 - DNA, 15 bp, Homo sapiens
acctcgcctgggtgt

SEQ ID NO: 1294235 - DNA, 15 bp, Homo sapiens
gacctcgcctgggtg

SEQ ID NO: 1294236 - DNA, 15 bp, Homo sapiens
tgacctcgcctgggt

SEQ ID NO: 1294237 - DNA, 15 bp, Homo sapiens
ctgacctcgcctggg

SEQ ID NO: 1294238 - DNA, 15 bp, Homo sapiens
tctgacctcgcctgg

SEQ ID NO: 1294239 - DNA, 15 bp, Homo sapiens
ttctgacctcgcctg

SEQ ID NO: 1294240 - DNA, 15 bp, Homo sapiens
gttctgacctcgcct

SEQ ID NO: 1294241 - DNA, 15 bp, Homo sapiens
tgttctgacctcgcc

SEQ ID NO: 1294242 - DNA, 15 bp, Homo sapiens
ctgttctgacctcgc

SEQ ID NO: 1294243 - DNA, 15 bp, Homo sapiens
cctgttctgacctcg

SEQ ID NO: 1294244 - DNA, 15 bp, Homo sapiens
tcctgttctgacctc

SEQ ID NO: 1294245 - DNA, 15 bp, Homo sapiens
ctcctgttctgacct

SEQ ID NO: 1294246 - DNA, 15 bp, Homo sapiens
actcctgttctgacc

SEQ ID NO: 1294247 - DNA, 15 bp, Homo sapiens
cactcctgttctgac

SEQ ID NO: 1294248 - DNA, 15 bp, Homo sapiens
gcactcctgttctga

SEQ ID NO: 1294249 - DNA, 15 bp, Homo sapiens
tgcactcctgttctg

SEQ ID NO: 1294250 - DNA, 15 bp, Homo sapiens
gtgcactcctgttct

SEQ ID NO: 1294251 - DNA, 15 bp, Homo sapiens
cgtgcactcctgttc

SEQ ID NO: 1294252 - DNA, 15 bp, Homo sapiens
ccgtgcactcctgtt

SEQ ID NO: 1294253 - DNA, 15 bp, Homo sapiens
tccgtgcactcctgt

SEQ ID NO: 1294254 - DNA, 15 bp, Homo sapiens
atccgtgcactcctg

SEQ ID NO: 1294255 - DNA, 15 bp, Homo sapiens
tatccgtgcactcct

SEQ ID NO: 1294256 - DNA, 15 bp, Homo sapiens
ctatccgtgcactcc

SEQ ID NO: 1294257 - DNA, 15 bp, Homo sapiens
gctatccgtgcactc

SEQ ID NO: 1294258 - DNA, 15 bp, Homo sapiens
tgctatccgtgcact

SEQ ID NO: 1294259 - DNA, 15 bp, Homo sapiens
ttgctatccgtgcac

SEQ ID NO: 1294260 - DNA, 15 bp, Homo sapiens
tttgctatccgtgca

SEQ ID NO: 1294261 - DNA, 15 bp, Homo sapiens
ttttgctatccgtgc

SEQ ID NO: 1294262 - DNA, 15 bp, Homo sapiens
gttttgctatccgtg

SEQ ID NO: 1294263 - DNA, 15 bp, Homo sapiens
tgttttgctatccgt

SEQ ID NO: 1294264 - DNA, 15 bp, Homo sapiens
ttgttttgctatccg

SEQ ID NO: 1294265 - DNA, 15 bp, Homo sapiens
gttgttttgctatcc

SEQ ID NO: 1294266 - DNA, 15 bp, Homo sapiens
agttgttttgctatc

SEQ ID NO: 1294267 - DNA, 15 bp, Homo sapiens
tagttgttttgctat

SEQ ID NO: 1294268 - DNA, 15 bp, Homo sapiens
ctagttgttttgcta

SEQ ID NO: 1294269 - DNA, 15 bp, Homo sapiens
tctagttgttttgct

SEQ ID NO: 1294270 - DNA, 15 bp, Homo sapiens
ttctagttgttttgc

SEQ ID NO: 1294271 - DNA, 15 bp, Homo sapiens
tttctagttgttttg

SEQ ID NO: 1294272 - DNA, 15 bp, Homo sapiens
ttttctagttgtttt

SEQ ID NO: 1294273 - DNA, 15 bp, Homo sapiens
attttctagttgttt

SEQ ID NO: 1294274 - DNA, 15 bp, Homo sapiens
cattttctagttgtt

SEQ ID NO: 1294275 - DNA, 15 bp, Homo sapiens
tcattttctagttgt

SEQ ID NO: 1294276 - DNA, 15 bp, Homo sapiens
atcattttctagttg

SEQ ID NO: 1294277 - DNA, 15 bp, Homo sapiens
tatcattttctagtt

SEQ ID NO: 1294278 - DNA, 15 bp, Homo sapiens
gtatcattttctagt

SEQ ID NO: 1294279 - DNA, 15 bp, Homo sapiens
tgtatcattttctag

SEQ ID NO: 1294280 - DNA, 15 bp, Homo sapiens
ttgtatcattttcta

SEQ ID NO: 1294281 - DNA, 15 bp, Homo sapiens
cttgtatcattttct

SEQ ID NO: 1294282 - DNA, 15 bp, Homo sapiens
tcttgtatcattttc

SEQ ID NO: 1294283 - DNA, 15 bp, Homo sapiens
ttcttgtatcatttt

SEQ ID NO: 1294284 - DNA, 15 bp, Homo sapiens
attcttgtatcattt

SEQ ID NO: 1294285 - DNA, 15 bp, Homo sapiens
aattcttgtatcatt

SEQ ID NO: 1294286 - DNA, 15 bp, Homo sapiens
taattcttgtatcat

SEQ ID NO: 1294287 - DNA, 15 bp, Homo sapiens
ataattcttgtatca

SEQ ID NO: 1294288 - DNA, 15 bp, Homo sapiens
aataattcttgtatc

SEQ ID NO: 1294289 - DNA, 15 bp, Homo sapiens
caataattcttgtat

SEQ ID NO: 1294290 - DNA, 15 bp, Homo sapiens
tcaataattcttgta

SEQ ID NO: 1294291 - DNA, 15 bp, Homo sapiens
ttcaataattcttgt

SEQ ID NO: 1294292 - DNA, 15 bp, Homo sapiens
cttcaataattcttg

SEQ ID NO: 1294293 - DNA, 15 bp, Homo sapiens
acttcaataattctt

SEQ ID NO: 1294294 - DNA, 15 bp, Homo sapiens
aacttcaataattct

SEQ ID NO: 1294295 - DNA, 15 bp, Homo sapiens
gaacttcaataattc

SEQ ID NO: 1294296 - DNA, 15 bp, Homo sapiens
agaacttcaataatt

SEQ ID NO: 1294297 - DNA, 15 bp, Homo sapiens
gagaacttcaataat

SEQ ID NO: 1294298 - DNA, 15 bp, Homo sapiens
agagaacttcaataa

SEQ ID NO: 1294299 - DNA, 15 bp, Homo sapiens
cagagaacttcaata

SEQ ID NO: 1294300 - DNA, 15 bp, Homo sapiens
acagagaacttcaat

SEQ ID NO: 1294301 - DNA, 15 bp, Homo sapiens
tacagagaacttcaa

SEQ ID NO: 1294302 - DNA, 15 bp, Homo sapiens
ttacagagaacttca

SEQ ID NO: 1294303 - DNA, 15 bp, Homo sapiens
tttacagagaacttc

SEQ ID NO: 1294304 - DNA, 15 bp, Homo sapiens
ctttacagagaactt

SEQ ID NO: 1294305 - DNA, 15 bp, Homo sapiens
tctttacagagaact

SEQ ID NO: 1294306 - DNA, 15 bp, Homo sapiens
ttctttacagagaac

SEQ ID NO: 1294307 - DNA, 15 bp, Homo sapiens
gttctttacagagaa

SEQ ID NO: 1294308 - DNA, 15 bp, Homo sapiens
tgttctttacagaga

SEQ ID NO: 1294309 - DNA, 15 bp, Homo sapiens
atgttctttacagag

SEQ ID NO: 1294310 - DNA, 15 bp, Homo sapiens
catgttctttacaga

SEQ ID NO: 1294311 - DNA, 15 bp, Homo sapiens
tcatgttctttacag

SEQ ID NO: 1294312 - DNA, 15 bp, Homo sapiens
ttcatgttctttaca

SEQ ID NO: 1294313 - DNA, 15 bp, Homo sapiens
attcatgttctttac

SEQ ID NO: 1294314 - DNA, 15 bp, Homo sapiens
cattcatgttcttta

SEQ ID NO: 1294315 - DNA, 15 bp, Homo sapiens
acattcatgttcttt

SEQ ID NO: 1294316 - DNA, 15 bp, Homo sapiens
tacattcatgttctt

SEQ ID NO: 1294317 - DNA, 15 bp, Homo sapiens
ttacattcatgttct

SEQ ID NO: 1294318 - DNA, 15 bp, Homo sapiens
attacattcatgttc

SEQ ID NO: 1294319 - DNA, 15 bp, Homo sapiens
tattacattcatgtt

SEQ ID NO: 1294320 - DNA, 15 bp, Homo sapiens
atattacattcatgt

SEQ ID NO: 1294321 - DNA, 15 bp, Homo sapiens
tatattacattcatg

SEQ ID NO: 1294322 - DNA, 15 bp, Homo sapiens
ctatattacattcat

SEQ ID NO: 1294323 - DNA, 15 bp, Homo sapiens
tctatattacattca

SEQ ID NO: 1294324 - DNA, 15 bp, Homo sapiens
atctatattacattc

SEQ ID NO: 1294325 - DNA, 15 bp, Homo sapiens
catctatattacatt

SEQ ID NO: 1294326 - DNA, 15 bp, Homo sapiens
tcatctatattacat

SEQ ID NO: 1294327 - DNA, 15 bp, Homo sapiens
ctcatctatattaca

SEQ ID NO: 1294328 - DNA, 15 bp, Homo sapiens
cctcatctatattac

SEQ ID NO: 1294329 - DNA, 15 bp, Homo sapiens
acctcatctatatta

SEQ ID NO: 1294330 - DNA, 15 bp, Homo sapiens
tacctcatctatatt

SEQ ID NO: 1294331 - DNA, 15 bp, Homo sapiens
ttacctcatctatat

SEQ ID NO: 1294332 - DNA, 15 bp, Homo sapiens
attacctcatctata

SEQ ID NO: 1294333 - DNA, 15 bp, Homo sapiens
aattacctcatctat

SEQ ID NO: 1294334 - DNA, 15 bp, Homo sapiens
aaattacctcatcta

SEQ ID NO: 1294335 - DNA, 15 bp, Homo sapiens
taaattacctcatct

SEQ ID NO: 1294336 - DNA, 15 bp, Homo sapiens
ttaaattacctcatc

SEQ ID NO: 1294337 - DNA, 15 bp, Homo sapiens
gttaaattacctcat

SEQ ID NO: 1294338 - DNA, 15 bp, Homo sapiens
agttaaattacctca

SEQ ID NO: 1294339 - DNA, 15 bp, Homo sapiens
aagttaaattacctc

SEQ ID NO: 1294340 - DNA, 15 bp, Homo sapiens
gaagttaaattacct

SEQ ID NO: 1294341 - DNA, 15 bp, Homo sapiens
tgaagttaaattacc

SEQ ID NO: 1294342 - DNA, 15 bp, Homo sapiens
atgaagttaaattac

SEQ ID NO: 1294343 - DNA, 15 bp, Homo sapiens
catgaagttaaatta

SEQ ID NO: 1294344 - DNA, 15 bp, Homo sapiens
tcatgaagttaaatt

SEQ ID NO: 1294345 - DNA, 15 bp, Homo sapiens
atcatgaagttaaat

SEQ ID NO: 1294346 - DNA, 15 bp, Homo sapiens
aatcatgaagttaaa

SEQ ID NO: 1294347 - DNA, 15 bp, Homo sapiens
aaatcatgaagttaa

SEQ ID NO: 1294348 - DNA, 15 bp, Homo sapiens
gaaatcatgaagtta

SEQ ID NO: 1294349 - DNA, 15 bp, Homo sapiens
agaaatcatgaagtt

SEQ ID NO: 1294350 - DNA, 15 bp, Homo sapiens
aagaaatcatgaagt

SEQ ID NO: 1294351 - DNA, 15 bp, Homo sapiens
aaagaaatcatgaag

SEQ ID NO: 1294352 - DNA, 15 bp, Homo sapiens
taaagaaatcatgaa

SEQ ID NO: 1294353 - DNA, 15 bp, Homo sapiens
ttttaaagaaatcat

SEQ ID NO: 1294354 - DNA, 15 bp, Homo sapiens
gttttaaagaaatca

SEQ ID NO: 1294355 - DNA, 15 bp, Homo sapiens
tgttttaaagaaatc

SEQ ID NO: 1294356 - DNA, 15 bp, Homo sapiens
ctgttttaaagaaat

SEQ ID NO: 1294357 - DNA, 15 bp, Homo sapiens
actgttttaaagaaa

SEQ ID NO: 1294358 - DNA, 15 bp, Homo sapiens
aactgttttaaagaa

SEQ ID NO: 1294359 - DNA, 15 bp, Homo sapiens
taactgttttaaaga

SEQ ID NO: 1294360 - DNA, 15 bp, Homo sapiens
ttaactgttttaaag

SEQ ID NO: 1294361 - DNA, 15 bp, Homo sapiens
tttaactgttttaaa

SEQ ID NO: 1294362 - DNA, 15 bp, Homo sapiens
ctttaactgttttaa

SEQ ID NO: 1294363 - DNA, 15 bp, Homo sapiens
actttaactgtttta

SEQ ID NO: 1294364 - DNA, 15 bp, Homo sapiens
tactttaactgtttt

SEQ ID NO: 1294365 - DNA, 15 bp, Homo sapiens
ctactttaactgttt

SEQ ID NO: 1294366 - DNA, 15 bp, Homo sapiens
tctactttaactgtt

SEQ ID NO: 1294367 - DNA, 15 bp, Homo sapiens
atctactttaactgt

SEQ ID NO: 1294368 - DNA, 15 bp, Homo sapiens
aatctactttaactg

SEQ ID NO: 1294369 - DNA, 15 bp, Homo sapiens
aaatctactttaact

SEQ ID NO: 1294370 - DNA, 15 bp, Homo sapiens
taaatctactttaac

SEQ ID NO: 1294371 - DNA, 15 bp, Homo sapiens
ctaaatctactttaa

SEQ ID NO: 1294372 - DNA, 15 bp, Homo sapiens
tctaaatctacttta

SEQ ID NO: 1294373 - DNA, 15 bp, Homo sapiens
atctaaatctacttt

SEQ ID NO: 1294374 - DNA, 15 bp, Homo sapiens
catctaaatctactt

SEQ ID NO: 1294375 - DNA, 15 bp, Homo sapiens
acatctaaatctact

SEQ ID NO: 1294376 - DNA, 15 bp, Homo sapiens
tacatctaaatctac

SEQ ID NO: 1294377 - DNA, 15 bp, Homo sapiens
ttacatctaaatcta

SEQ ID NO: 1294378 - DNA, 15 bp, Homo sapiens
cttacatctaaatct

SEQ ID NO: 1294379 - DNA, 15 bp, Homo sapiens
acttacatctaaatc

SEQ ID NO: 1294380 - DNA, 15 bp, Homo sapiens
aacttacatctaaat

SEQ ID NO: 1294381 - DNA, 15 bp, Homo sapiens
gaacttacatctaaa

SEQ ID NO: 1294382 - DNA, 15 bp, Homo sapiens
agaacttacatctaa

SEQ ID NO: 1294383 - DNA, 15 bp, Homo sapiens
gagaacttacatcta

SEQ ID NO: 1294384 - DNA, 15 bp, Homo sapiens
ggagaacttacatct

SEQ ID NO: 1294385 - DNA, 15 bp, Homo sapiens
gggagaacttacatc

SEQ ID NO: 1294386 - DNA, 15 bp, Homo sapiens
agggagaacttacat

SEQ ID NO: 1294387 - DNA, 15 bp, Homo sapiens
tagggagaacttaca

SEQ ID NO: 1294388 - DNA, 15 bp, Homo sapiens
ttagggagaacttac

SEQ ID NO: 1294389 - DNA, 15 bp, Homo sapiens
gttagggagaactta

SEQ ID NO: 1294390 - DNA, 15 bp, Homo sapiens
tgttagggagaactt

SEQ ID NO: 1294391 - DNA, 15 bp, Homo sapiens
ttgttagggagaact

SEQ ID NO: 1294392 - DNA, 15 bp, Homo sapiens
attgttagggagaac

SEQ ID NO: 1294393 - DNA, 15 bp, Homo sapiens
tattgttagggagaa

SEQ ID NO: 1294394 - DNA, 15 bp, Homo sapiens
atattgttagggaga

SEQ ID NO: 1294395 - DNA, 15 bp, Homo sapiens
aatattgttagggag

SEQ ID NO: 1294396 - DNA, 15 bp, Homo sapiens
aaatattgttaggga

SEQ ID NO: 1294397 - DNA, 15 bp, Homo sapiens
taaatattgttaggg

SEQ ID NO: 1294398 - DNA, 15 bp, Homo sapiens
gtaaatattgttagg

SEQ ID NO: 1294399 - DNA, 15 bp, Homo sapiens
agtaaatattgttag

SEQ ID NO: 1294400 - DNA, 15 bp, Homo sapiens
aagtaaatattgtta

SEQ ID NO: 1294401 - DNA, 15 bp, Homo sapiens
gaagtaaatattgtt

SEQ ID NO: 1294402 - DNA, 15 bp, Homo sapiens
agaagtaaatattgt

SEQ ID NO: 1294403 - DNA, 15 bp, Homo sapiens
aagaagtaaatattg

SEQ ID NO: 1294404 - DNA, 15 bp, Homo sapiens
aaagaagtaaatatt

SEQ ID NO: 1294405 - DNA, 15 bp, Homo sapiens
aaaagaagtaaatat

SEQ ID NO: 1294406 - DNA, 15 bp, Homo sapiens
caaaagaagtaaata

SEQ ID NO: 1294407 - DNA, 15 bp, Homo sapiens
acaaaagaagtaaat

SEQ ID NO: 1294408 - DNA, 15 bp, Homo sapiens
aacaaaagaagtaaa

SEQ ID NO: 1294409 - DNA, 15 bp, Homo sapiens
taacaaaagaagtaa

SEQ ID NO: 1294410 - DNA, 15 bp, Homo sapiens
ataacaaaagaagta

SEQ ID NO: 1294411 - DNA, 15 bp, Homo sapiens
cataacaaaagaagt

SEQ ID NO: 1294412 - DNA, 15 bp, Homo sapiens
tcataacaaaagaag

SEQ ID NO: 1294413 - DNA, 15 bp, Homo sapiens
ctcataacaaaagaa

SEQ ID NO: 1294414 - DNA, 15 bp, Homo sapiens
gctcataacaaaaga

SEQ ID NO: 1294415 - DNA, 15 bp, Homo sapiens
tgctcataacaaaag

SEQ ID NO: 1294416 - DNA, 15 bp, Homo sapiens
atgctcataacaaaa

SEQ ID NO: 1294417 - DNA, 15 bp, Homo sapiens
catgctcataacaaa

SEQ ID NO: 1294418 - DNA, 15 bp, Homo sapiens
acatgctcataacaa

SEQ ID NO: 1294419 - DNA, 15 bp, Homo sapiens
aacatgctcataaca

SEQ ID NO: 1294420 - DNA, 15 bp, Homo sapiens
aaacatgctcataac

SEQ ID NO: 1294421 - DNA, 15 bp, Homo sapiens
aaaacatgctcataa

SEQ ID NO: 1294422 - DNA, 15 bp, Homo sapiens
aaaaacatgctcata

SEQ ID NO: 1294423 - DNA, 15 bp, Homo sapiens
aaaaaacatgctcat

SEQ ID NO: 1294424 - DNA, 15 bp, Homo sapiens
aaaaaaacatgctca

SEQ ID NO: 1294425 - DNA, 15 bp, Homo sapiens
aaaaaaaacatgctc

SEQ ID NO: 1294426 - DNA, 15 bp, Homo sapiens
caaaaaaaacatgct

SEQ ID NO: 1294427 - DNA, 15 bp, Homo sapiens
acaaaaaaaacatgc

SEQ ID NO: 1294428 - DNA, 15 bp, Homo sapiens
tacaaaaaaaacatg

SEQ ID NO: 1294429 - DNA, 15 bp, Homo sapiens
ttacaaaaaaaacat

SEQ ID NO: 1294430 - DNA, 15 bp, Homo sapiens
attacaaaaaaaaca

SEQ ID NO: 1294431 - DNA, 15 bp, Homo sapiens
aattacaaaaaaaac

SEQ ID NO: 1294432 - DNA, 15 bp, Homo sapiens
taattacaaaaaaaa

SEQ ID NO: 1294433 - DNA, 15 bp, Homo sapiens
ctaattacaaaaaaa

SEQ ID NO: 1294434 - DNA, 15 bp, Homo sapiens
actaattacaaaaaa

SEQ ID NO: 1294435 - DNA, 15 bp, Homo sapiens
cactaattacaaaaa

SEQ ID NO: 1294436 - DNA, 15 bp, Homo sapiens
gcactaattacaaaa

SEQ ID NO: 1294437 - DNA, 15 bp, Homo sapiens
agcactaattacaaa

SEQ ID NO: 1294438 - DNA, 15 bp, Homo sapiens
tagcactaattacaa

SEQ ID NO: 1294439 - DNA, 15 bp, Homo sapiens
ttagcactaattaca

SEQ ID NO: 1294440 - DNA, 15 bp, Homo sapiens
gttagcactaattac

SEQ ID NO: 1294441 - DNA, 15 bp, Homo sapiens
agttagcactaatta

SEQ ID NO: 1294442 - DNA, 15 bp, Homo sapiens
gagttagcactaatt

SEQ ID NO: 1294443 - DNA, 15 bp, Homo sapiens
agagttagcactaat

SEQ ID NO: 1294444 - DNA, 15 bp, Homo sapiens
aagagttagcactaa

SEQ ID NO: 1294445 - DNA, 15 bp, Homo sapiens
aaagagttagcacta

SEQ ID NO: 1294446 - DNA, 15 bp, Homo sapiens
aaaagagttagcact

SEQ ID NO: 1294447 - DNA, 15 bp, Homo sapiens
caaaagagttagcac

SEQ ID NO: 1294448 - DNA, 15 bp, Homo sapiens
gcaaaagagttagca

SEQ ID NO: 1294449 - DNA, 15 bp, Homo sapiens
tgcaaaagagttagc

SEQ ID NO: 1294450 - DNA, 15 bp, Homo sapiens
ctgcaaaagagttag

SEQ ID NO: 1294451 - DNA, 15 bp, Homo sapiens
actgcaaaagagtta

SEQ ID NO: 1294452 - DNA, 15 bp, Homo sapiens
tactgcaaaagagtt

SEQ ID NO: 1294453 - DNA, 15 bp, Homo sapiens
ctactgcaaaagagt

SEQ ID NO: 1294454 - DNA, 15 bp, Homo sapiens
gctactgcaaaagag

SEQ ID NO: 1294455 - DNA, 15 bp, Homo sapiens
tgctactgcaaaaga

SEQ ID NO: 1294456 - DNA, 15 bp, Homo sapiens
ttgctactgcaaaag

SEQ ID NO: 1294457 - DNA, 15 bp, Homo sapiens
tttgctactgcaaaa

SEQ ID NO: 1294458 - DNA, 15 bp, Homo sapiens
ttttgctactgcaaa

SEQ ID NO: 1294459 - DNA, 15 bp, Homo sapiens
attttgctactgcaa

SEQ ID NO: 1294460 - DNA, 15 bp, Homo sapiens
tattttgctactgca

SEQ ID NO: 1294461 - DNA, 15 bp, Homo sapiens
atattttgctactgc

SEQ ID NO: 1294462 - DNA, 15 bp, Homo sapiens
aatattttgctactg

SEQ ID NO: 1294463 - DNA, 15 bp, Homo sapiens
aaatattttgctact

SEQ ID NO: 1294464 - DNA, 15 bp, Homo sapiens
taaatattttgctac

SEQ ID NO: 1294465 - DNA, 15 bp, Homo sapiens
ctaaatattttgcta

SEQ ID NO: 1294466 - DNA, 15 bp, Homo sapiens
tctaaatattttgct

SEQ ID NO: 1294467 - DNA, 15 bp, Homo sapiens
ttctaaatattttgc

SEQ ID NO: 1294468 - DNA, 15 bp, Homo sapiens
tttctaaatattttg

SEQ ID NO: 1294469 - DNA, 15 bp, Homo sapiens
ttttctaaatatttt

SEQ ID NO: 1294470 - DNA, 15 bp, Homo sapiens
tttttctaaatattt

SEQ ID NO: 1294471 - DNA, 15 bp, Homo sapiens
ttttttctaaatatt

SEQ ID NO: 1294472 - DNA, 15 bp, Homo sapiens
attttttctaaatat

SEQ ID NO: 1294473 - DNA, 15 bp, Homo sapiens
aattttttctaaata

SEQ ID NO: 1294474 - DNA, 15 bp, Homo sapiens
taattttttctaaat

SEQ ID NO: 1294475 - DNA, 15 bp, Homo sapiens
ttaattttttctaaa

SEQ ID NO: 1294476 - DNA, 15 bp, Homo sapiens
attaattttttctaa

SEQ ID NO: 1294477 - DNA, 15 bp, Homo sapiens
aattaattttttcta

SEQ ID NO: 1294478 - DNA, 15 bp, Homo sapiens
gaattaattttttct

SEQ ID NO: 1294479 - DNA, 15 bp, Homo sapiens
cgaattaattttttc

SEQ ID NO: 1294480 - DNA, 15 bp, Homo sapiens
acgaattaatttttt

SEQ ID NO: 1294481 - DNA, 15 bp, Homo sapiens
aacgaattaattttt

SEQ ID NO: 1294482 - DNA, 15 bp, Homo sapiens
taacgaattaatttt

SEQ ID NO: 1294483 - DNA, 15 bp, Homo sapiens
ataacgaattaattt

SEQ ID NO: 1294484 - DNA, 15 bp, Homo sapiens
tataacgaattaatt

SEQ ID NO: 1294485 - DNA, 15 bp, Homo sapiens
atataacgaattaat

SEQ ID NO: 1294486 - DNA, 15 bp, Homo sapiens
aatataacgaattaa

SEQ ID NO: 1294487 - DNA, 15 bp, Homo sapiens
aaatataacgaatta

SEQ ID NO: 1294488 - DNA, 15 bp, Homo sapiens
taaatataacgaatt

SEQ ID NO: 1294489 - DNA, 15 bp, Homo sapiens
ctaaatataacgaat

SEQ ID NO: 1294490 - DNA, 15 bp, Homo sapiens
actaaatataacgaa

SEQ ID NO: 1294491 - DNA, 15 bp, Homo sapiens
aactaaatataacga

SEQ ID NO: 1294492 - DNA, 15 bp, Homo sapiens
taactaaatataacg

SEQ ID NO: 1294493 - DNA, 15 bp, Homo sapiens
gtaactaaatataac

SEQ ID NO: 1294494 - DNA, 15 bp, Homo sapiens
agtaactaaatataa

SEQ ID NO: 1294495 - DNA, 15 bp, Homo sapiens
aagtaactaaatata

SEQ ID NO: 1294496 - DNA, 15 bp, Homo sapiens
aaagtaactaaatat

SEQ ID NO: 1294497 - DNA, 15 bp, Homo sapiens
caaagtaactaaata

SEQ ID NO: 1294498 - DNA, 15 bp, Homo sapiens
tcaaagtaactaaat

SEQ ID NO: 1294499 - DNA, 15 bp, Homo sapiens
atcaaagtaactaaa

SEQ ID NO: 1294500 - DNA, 15 bp, Homo sapiens
aatcaaagtaactaa

SEQ ID NO: 1294501 - DNA, 15 bp, Homo sapiens
aaatcaaagtaacta

SEQ ID NO: 1294502 - DNA, 15 bp, Homo sapiens
aaaatcaaagtaact

SEQ ID NO: 1294503 - DNA, 15 bp, Homo sapiens
taaaatcaaagtaac

SEQ ID NO: 1294504 - DNA, 15 bp, Homo sapiens
ttaaaatcaaagtaa

SEQ ID NO: 1294505 - DNA, 15 bp, Homo sapiens
tttaaaatcaaagta

SEQ ID NO: 1294506 - DNA, 15 bp, Homo sapiens
ctttaaaatcaaagt

SEQ ID NO: 1294507 - DNA, 15 bp, Homo sapiens
tctttaaaatcaaag

SEQ ID NO: 1294508 - DNA, 15 bp, Homo sapiens
ctctttaaaatcaaa

SEQ ID NO: 1294509 - DNA, 15 bp, Homo sapiens
tctctttaaaatcaa

SEQ ID NO: 1294510 - DNA, 15 bp, Homo sapiens
ctctctttaaaatca

SEQ ID NO: 1294511 - DNA, 15 bp, Homo sapiens
actctctttaaaatc

SEQ ID NO: 1294512 - DNA, 15 bp, Homo sapiens
tactctctttaaaat

SEQ ID NO: 1294513 - DNA, 15 bp, Homo sapiens
ctactctctttaaaa

SEQ ID NO: 1294514 - DNA, 15 bp, Homo sapiens
gctactctctttaaa

SEQ ID NO: 1294515 - DNA, 15 bp, Homo sapiens
agctactctctttaa

SEQ ID NO: 1294516 - DNA, 15 bp, Homo sapiens
gagctactctcttta

SEQ ID NO: 1294517 - DNA, 15 bp, Homo sapiens
ggagctactctcttt

SEQ ID NO: 1294518 - DNA, 15 bp, Homo sapiens
gggagctactctctt

SEQ ID NO: 1294519 - DNA, 15 bp, Homo sapiens
agggagctactctct

SEQ ID NO: 1294520 - DNA, 15 bp, Homo sapiens
gagggagctactctc

SEQ ID NO: 1294521 - DNA, 15 bp, Homo sapiens
tgagggagctactct

SEQ ID NO: 1294522 - DNA, 15 bp, Homo sapiens
gtgagggagctactc

SEQ ID NO: 1294523 - DNA, 15 bp, Homo sapiens
agtgagggagctact

SEQ ID NO: 1294524 - DNA, 15 bp, Homo sapiens
gagtgagggagctac

SEQ ID NO: 1294525 - DNA, 15 bp, Homo sapiens
agagtgagggagcta

SEQ ID NO: 1294526 - DNA, 15 bp, Homo sapiens
cagagtgagggagct

SEQ ID NO: 1294527 - DNA, 15 bp, Homo sapiens
ccagagtgagggagc

SEQ ID NO: 1294528 - DNA, 15 bp, Homo sapiens
tccagagtgagggag

SEQ ID NO: 1294529 - DNA, 15 bp, Homo sapiens
ttccagagtgaggga

SEQ ID NO: 1294530 - DNA, 15 bp, Homo sapiens
attccagagtgaggg

SEQ ID NO: 1294531 - DNA, 15 bp, Homo sapiens
gattccagagtgagg

SEQ ID NO: 1294532 - DNA, 15 bp, Homo sapiens
tgattccagagtgag

SEQ ID NO: 1294533 - DNA, 15 bp, Homo sapiens
gtgattccagagtga

SEQ ID NO: 1294534 - DNA, 15 bp, Homo sapiens
agtgattccagagtg

SEQ ID NO: 1294535 - DNA, 15 bp, Homo sapiens
cagtgattccagagt

SEQ ID NO: 1294536 - DNA, 15 bp, Homo sapiens
tcagtgattccagag

SEQ ID NO: 1294537 - DNA, 15 bp, Homo sapiens
ttcagtgattccaga

SEQ ID NO: 1294538 - DNA, 15 bp, Homo sapiens
tttcagtgattccag

SEQ ID NO: 1294539 - DNA, 15 bp, Homo sapiens
ttttcagtgattcca

SEQ ID NO: 1294540 - DNA, 15 bp, Homo sapiens
cttttcagtgattcc

SEQ ID NO: 1294541 - DNA, 15 bp, Homo sapiens
acttttcagtgattc

SEQ ID NO: 1294542 - DNA, 15 bp, Homo sapiens
tacttttcagtgatt

SEQ ID NO: 1294543 - DNA, 15 bp, Homo sapiens
atacttttcagtgat

SEQ ID NO: 1294544 - DNA, 15 bp, Homo sapiens
tatacttttcagtga

SEQ ID NO: 1294545 - DNA, 15 bp, Homo sapiens
atatacttttcagtg

SEQ ID NO: 1294546 - DNA, 15 bp, Homo sapiens
tatatacttttcagt

SEQ ID NO: 1294547 - DNA, 15 bp, Homo sapiens
ttatatacttttcag

SEQ ID NO: 1294548 - DNA, 15 bp, Homo sapiens
attatatacttttca

SEQ ID NO: 1294549 - DNA, 15 bp, Homo sapiens
gattatatacttttc

SEQ ID NO: 1294550 - DNA, 15 bp, Homo sapiens
tgattatatactttt

SEQ ID NO: 1294551 - DNA, 15 bp, Homo sapiens
ttgattatatacttt

SEQ ID NO: 1294552 - DNA, 15 bp, Homo sapiens
cttgattatatactt

SEQ ID NO: 1294553 - DNA, 15 bp, Homo sapiens
tcttgattatatact

SEQ ID NO: 1294554 - DNA, 15 bp, Homo sapiens
gtcttgattatatac

SEQ ID NO: 1294555 - DNA, 15 bp, Homo sapiens
tgtcttgattatata

SEQ ID NO: 1294556 - DNA, 15 bp, Homo sapiens
ttgtcttgattatat

SEQ ID NO: 1294557 - DNA, 15 bp, Homo sapiens
attgtcttgattata

SEQ ID NO: 1294558 - DNA, 15 bp, Homo sapiens
tattgtcttgattat

SEQ ID NO: 1294559 - DNA, 15 bp, Homo sapiens
ctattgtcttgatta

SEQ ID NO: 1294560 - DNA, 15 bp, Homo sapiens
actattgtcttgatt

SEQ ID NO: 1294561 - DNA, 15 bp, Homo sapiens
aactattgtcttgat

SEQ ID NO: 1294562 - DNA, 15 bp, Homo sapiens
aaactattgtcttga

SEQ ID NO: 1294563 - DNA, 15 bp, Homo sapiens
aaaactattgtcttg

SEQ ID NO: 1294564 - DNA, 15 bp, Homo sapiens
gaaaactattgtctt

SEQ ID NO: 1294565 - DNA, 15 bp, Homo sapiens
tgaaaactattgtct

SEQ ID NO: 1294566 - DNA, 15 bp, Homo sapiens
ttgaaaactattgtc

SEQ ID NO: 1294567 - DNA, 15 bp, Homo sapiens
tttgaaaactattgt

SEQ ID NO: 1294568 - DNA, 15 bp, Homo sapiens
atttgaaaactattg

SEQ ID NO: 1294569 - DNA, 15 bp, Homo sapiens
catttgaaaactatt

SEQ ID NO: 1294570 - DNA, 15 bp, Homo sapiens
ctacatttgaaaact

SEQ ID NO: 1294571 - DNA, 15 bp, Homo sapiens
actacatttgaaaac

SEQ ID NO: 1294572 - DNA, 15 bp, Homo sapiens
aactacatttgaaaa

SEQ ID NO: 1294573 - DNA, 15 bp, Homo sapiens
aaactacatttgaaa

SEQ ID NO: 1294574 - DNA, 15 bp, Homo sapiens
aaaactacatttgaa

SEQ ID NO: 1294575 - DNA, 15 bp, Homo sapiens
aaaaactacatttga

SEQ ID NO: 1294576 - DNA, 15 bp, Homo sapiens
aaaaaactacatttg

SEQ ID NO: 1294577 - DNA, 15 bp, Homo sapiens
aaaaaaactacattt

SEQ ID NO: 1294578 - DNA, 15 bp, Homo sapiens
aaaaaaaactacatt

SEQ ID NO: 1294579 - DNA, 15 bp, Homo sapiens
aaaaaaaaactacat

SEQ ID NO: 1294580 - DNA, 15 bp, Homo sapiens
aaaaaaaaaactaca

SEQ ID NO: 1294581 - DNA, 15 bp, Homo sapiens
aaaaaaaaaaactac

SEQ ID NO: 1294582 - DNA, 15 bp, Homo sapiens
ggaataaaaaaaaaa

SEQ ID NO: 1294583 - DNA, 15 bp, Homo sapiens
aggaataaaaaaaaa

SEQ ID NO: 1294584 - DNA, 15 bp, Homo sapiens
gaggaataaaaaaaa

SEQ ID NO: 1294585 - DNA, 15 bp, Homo sapiens
agaggaataaaaaaa

SEQ ID NO: 1294586 - DNA, 15 bp, Homo sapiens
cagaggaataaaaaa

SEQ ID NO: 1294587 - DNA, 15 bp, Homo sapiens
tcagaggaataaaaa

SEQ ID NO: 1294588 - DNA, 15 bp, Homo sapiens
ctcagaggaataaaa

SEQ ID NO: 1294589 - DNA, 15 bp, Homo sapiens
cctcagaggaataaa

SEQ ID NO: 1294590 - DNA, 15 bp, Homo sapiens
acctcagaggaataa

SEQ ID NO: 1294591 - DNA, 15 bp, Homo sapiens
aacctcagaggaata

SEQ ID NO: 1294592 - DNA, 15 bp, Homo sapiens
taacctcagaggaat

SEQ ID NO: 1294593 - DNA, 15 bp, Homo sapiens
gtaacctcagaggaa

SEQ ID NO: 1294594 - DNA, 15 bp, Homo sapiens
agtaacctcagagga

SEQ ID NO: 1294595 - DNA, 15 bp, Homo sapiens
cagtaacctcagagg

SEQ ID NO: 1294596 - DNA, 15 bp, Homo sapiens
tcagtaacctcagag

SEQ ID NO: 1294597 - DNA, 15 bp, Homo sapiens
atcagtaacctcaga

SEQ ID NO: 1294598 - DNA, 15 bp, Homo sapiens
tatcagtaacctcag

SEQ ID NO: 1294599 - DNA, 15 bp, Homo sapiens
gtatcagtaacctca

SEQ ID NO: 1294600 - DNA, 15 bp, Homo sapiens
ggtatcagtaacctc

SEQ ID NO: 1294601 - DNA, 15 bp, Homo sapiens
gggtatcagtaacct

SEQ ID NO: 1294602 - DNA, 15 bp, Homo sapiens
ggggtatcagtaacc

SEQ ID NO: 1294603 - DNA, 15 bp, Homo sapiens
aggggtatcagtaac

SEQ ID NO: 1294604 - DNA, 15 bp, Homo sapiens
taggggtatcagtaa

SEQ ID NO: 1294605 - DNA, 15 bp, Homo sapiens
ttaggggtatcagta

SEQ ID NO: 1294606 - DNA, 15 bp, Homo sapiens
attaggggtatcagt

SEQ ID NO: 1294607 - DNA, 15 bp, Homo sapiens
cattaggggtatcag

SEQ ID NO: 1294608 - DNA, 15 bp, Homo sapiens
acattaggggtatca

SEQ ID NO: 1294609 - DNA, 15 bp, Homo sapiens
aacattaggggtatc

SEQ ID NO: 1294610 - DNA, 15 bp, Homo sapiens
aaacattaggggtat

SEQ ID NO: 1294611 - DNA, 15 bp, Homo sapiens
aaaacattaggggta

SEQ ID NO: 1294612 - DNA, 15 bp, Homo sapiens
taaaacattaggggt

SEQ ID NO: 1294613 - DNA, 15 bp, Homo sapiens
ttaaaacattagggg

SEQ ID NO: 1294614 - DNA, 15 bp, Homo sapiens
tttaaaacattaggg

SEQ ID NO: 1294615 - DNA, 15 bp, Homo sapiens
ttttaaaacattagg

SEQ ID NO: 1294616 - DNA, 15 bp, Homo sapiens
attttaaaacattag

SEQ ID NO: 1294617 - DNA, 15 bp, Homo sapiens
tattttaaaacatta

SEQ ID NO: 1294618 - DNA, 15 bp, Homo sapiens
gtattttaaaacatt

SEQ ID NO: 1294619 - DNA, 15 bp, Homo sapiens
ggtattttaaaacat

SEQ ID NO: 1294620 - DNA, 15 bp, Homo sapiens
gggtattttaaaaca

SEQ ID NO: 1294621 - DNA, 15 bp, Homo sapiens
agggtattttaaaac

SEQ ID NO: 1294622 - DNA, 15 bp, Homo sapiens
cagggtattttaaaa

SEQ ID NO: 1294623 - DNA, 15 bp, Homo sapiens
gcagggtattttaaa

SEQ ID NO: 1294624 - DNA, 15 bp, Homo sapiens
ggcagggtattttaa

SEQ ID NO: 1294625 - DNA, 15 bp, Homo sapiens
tggcagggtatttta

SEQ ID NO: 1294626 - DNA, 15 bp, Homo sapiens
ttggcagggtatttt

SEQ ID NO: 1294627 - DNA, 15 bp, Homo sapiens
cttggcagggtattt

SEQ ID NO: 1294628 - DNA, 15 bp, Homo sapiens
ccttggcagggtatt

SEQ ID NO: 1294629 - DNA, 15 bp, Homo sapiens
gccttggcagggtat

SEQ ID NO: 1294630 - DNA, 15 bp, Homo sapiens
agccttggcagggta

SEQ ID NO: 1294631 - DNA, 15 bp, Homo sapiens
cagccttggcagggt

SEQ ID NO: 1294632 - DNA, 15 bp, Homo sapiens
ccagccttggcaggg

SEQ ID NO: 1294633 - DNA, 15 bp, Homo sapiens
cccagccttggcagg

SEQ ID NO: 1294634 - DNA, 15 bp, Homo sapiens
gcccagccttggcag

SEQ ID NO: 1294635 - DNA, 15 bp, Homo sapiens
tgcccagccttggca

SEQ ID NO: 1294636 - DNA, 15 bp, Homo sapiens
ccatgcccagccttg

SEQ ID NO: 1294637 - DNA, 15 bp, Homo sapiens
accatgcccagcctt

SEQ ID NO: 1294638 - DNA, 15 bp, Homo sapiens
ggcctcccaaagagc

SEQ ID NO: 1294639 - DNA, 15 bp, Homo sapiens
cggcctcccaaagag

SEQ ID NO: 1294640 - DNA, 15 bp, Homo sapiens
tcggcctcccaaaga

SEQ ID NO: 1294641 - DNA, 15 bp, Homo sapiens
ttcggcctcccaaag

SEQ ID NO: 1294642 - DNA, 15 bp, Homo sapiens
cttcggcctcccaaa

SEQ ID NO: 1294643 - DNA, 15 bp, Homo sapiens
acttcggcctcccaa

SEQ ID NO: 1294644 - DNA, 15 bp, Homo sapiens
cacttcggcctccca

SEQ ID NO: 1294645 - DNA, 15 bp, Homo sapiens
ccacttcggcctccc

SEQ ID NO: 1294646 - DNA, 15 bp, Homo sapiens
cccacttcggcctcc

SEQ ID NO: 1294647 - DNA, 15 bp, Homo sapiens
tcccacttcggcctc

SEQ ID NO: 1294648 - DNA, 15 bp, Homo sapiens
ctcccacttcggcct

SEQ ID NO: 1294649 - DNA, 15 bp, Homo sapiens
cctcccacttcggcc

SEQ ID NO: 1294650 - DNA, 15 bp, Homo sapiens
tcctcccacttcggc

SEQ ID NO: 1294651 - DNA, 15 bp, Homo sapiens
atcctcccacttcgg

SEQ ID NO: 1294652 - DNA, 15 bp, Homo sapiens
aatcctcccacttcg

SEQ ID NO: 1294653 - DNA, 15 bp, Homo sapiens
aaatcctcccacttc

SEQ ID NO: 1294654 - DNA, 15 bp, Homo sapiens
gaaatcctcccactt

SEQ ID NO: 1294655 - DNA, 15 bp, Homo sapiens
agaaatcctcccact

SEQ ID NO: 1294656 - DNA, 15 bp, Homo sapiens
aagaaatcctcccac

SEQ ID NO: 1294657 - DNA, 15 bp, Homo sapiens
caagaaatcctccca

SEQ ID NO: 1294658 - DNA, 15 bp, Homo sapiens
tcaagaaatcctccc

SEQ ID NO: 1294659 - DNA, 15 bp, Homo sapiens
ctcaagaaatcctcc

SEQ ID NO: 1294660 - DNA, 15 bp, Homo sapiens
cctcaagaaatcctc

SEQ ID NO: 1294661 - DNA, 15 bp, Homo sapiens
gcctcaagaaatcct

SEQ ID NO: 1294662 - DNA, 15 bp, Homo sapiens
ggcctcaagaaatcc

SEQ ID NO: 1294663 - DNA, 15 bp, Homo sapiens
tggcctcaagaaatc

SEQ ID NO: 1294664 - DNA, 15 bp, Homo sapiens
ctggcctcaagaaat

SEQ ID NO: 1294665 - DNA, 15 bp, Homo sapiens
cctggcctcaagaaa

SEQ ID NO: 1294666 - DNA, 15 bp, Homo sapiens
tcctggcctcaagaa

SEQ ID NO: 1294667 - DNA, 15 bp, Homo sapiens
cctcctggcctcaag

SEQ ID NO: 1294668 - DNA, 15 bp, Homo sapiens
acctcctggcctcaa

SEQ ID NO: 1294669 - DNA, 15 bp, Homo sapiens
gacctcctggcctca

SEQ ID NO: 1294670 - DNA, 15 bp, Homo sapiens
agacctcctggcctc

SEQ ID NO: 1294671 - DNA, 15 bp, Homo sapiens
tagacctcctggcct

SEQ ID NO: 1294672 - DNA, 15 bp, Homo sapiens
ctagacctcctggcc

SEQ ID NO: 1294673 - DNA, 15 bp, Homo sapiens
tctagacctcctggc

SEQ ID NO: 1294674 - DNA, 15 bp, Homo sapiens
gtctagacctcctgg

SEQ ID NO: 1294675 - DNA, 15 bp, Homo sapiens
ggtctagacctcctg

SEQ ID NO: 1294676 - DNA, 15 bp, Homo sapiens
tggtctagacctcct

SEQ ID NO: 1294677 - DNA, 15 bp, Homo sapiens
ctggtctagacctcc

SEQ ID NO: 1294678 - DNA, 15 bp, Homo sapiens
gctggtctagacctc

SEQ ID NO: 1294679 - DNA, 15 bp, Homo sapiens
ggctggtctagacct

SEQ ID NO: 1294680 - DNA, 15 bp, Homo sapiens
aggctggtctagacc

SEQ ID NO: 1294681 - DNA, 15 bp, Homo sapiens
caggctggtctagac

SEQ ID NO: 1294682 - DNA, 15 bp, Homo sapiens
tcaggctggtctaga

SEQ ID NO: 1294683 - DNA, 15 bp, Homo sapiens
ttcaggctggtctag

SEQ ID NO: 1294684 - DNA, 15 bp, Homo sapiens
gttcaggctggtcta

SEQ ID NO: 1294685 - DNA, 15 bp, Homo sapiens
tgttcaggctggtct

SEQ ID NO: 1294686 - DNA, 15 bp, Homo sapiens
ttgttcaggctggtc

SEQ ID NO: 1294687 - DNA, 15 bp, Homo sapiens
gttgttcaggctggt

SEQ ID NO: 1294688 - DNA, 15 bp, Homo sapiens
tgttgttcaggctgg

SEQ ID NO: 1294689 - DNA, 15 bp, Homo sapiens
atgttgttcaggctg

SEQ ID NO: 1294690 - DNA, 15 bp, Homo sapiens
tatgttgttcaggct

SEQ ID NO: 1294691 - DNA, 15 bp, Homo sapiens
ctatgttgttcaggc

SEQ ID NO: 1294692 - DNA, 15 bp, Homo sapiens
gctatgttgttcagg

SEQ ID NO: 1294693 - DNA, 15 bp, Homo sapiens
cgctatgttgttcag

SEQ ID NO: 1294694 - DNA, 15 bp, Homo sapiens
tcgctatgttgttca

SEQ ID NO: 1294695 - DNA, 15 bp, Homo sapiens
ctcgctatgttgttc

SEQ ID NO: 1294696 - DNA, 15 bp, Homo sapiens
tctcgctatgttgtt

SEQ ID NO: 1294697 - DNA, 15 bp, Homo sapiens
gtctcgctatgttgt

SEQ ID NO: 1294698 - DNA, 15 bp, Homo sapiens
agtctcgctatgttg

SEQ ID NO: 1294699 - DNA, 15 bp, Homo sapiens
gagtctcgctatgtt

SEQ ID NO: 1294700 - DNA, 15 bp, Homo sapiens
agagtctcgctatgt

SEQ ID NO: 1294701 - DNA, 15 bp, Homo sapiens
cagagtctcgctatg

SEQ ID NO: 1294702 - DNA, 15 bp, Homo sapiens
acagagtctcgctat

SEQ ID NO: 1294703 - DNA, 15 bp, Homo sapiens
gacagagtctcgcta

SEQ ID NO: 1294704 - DNA, 15 bp, Homo sapiens
agagacagagtctcg

SEQ ID NO: 1294705 - DNA, 15 bp, Homo sapiens
gtagagacagagtct

SEQ ID NO: 1294706 - DNA, 15 bp, Homo sapiens
tgtagagacagagtc

SEQ ID NO: 1294707 - DNA, 15 bp, Homo sapiens
attttgtagagacag

SEQ ID NO: 1294708 - DNA, 15 bp, Homo sapiens
tattttgtagagaca

SEQ ID NO: 1294709 - DNA, 15 bp, Homo sapiens
gtattttgtagagac

SEQ ID NO: 1294710 - DNA, 15 bp, Homo sapiens
tgtattttgtagaga

SEQ ID NO: 1294711 - DNA, 15 bp, Homo sapiens
atgtattttgtagag

SEQ ID NO: 1294712 - DNA, 15 bp, Homo sapiens
tatgtattttgtaga

SEQ ID NO: 1294713 - DNA, 15 bp, Homo sapiens
atatgtattttgtag

SEQ ID NO: 1294714 - DNA, 15 bp, Homo sapiens
aatatgtattttgta

SEQ ID NO: 1294715 - DNA, 15 bp, Homo sapiens
aaatatgtattttgt

SEQ ID NO: 1294716 - DNA, 15 bp, Homo sapiens
taaatatgtattttg

SEQ ID NO: 1294717 - DNA, 15 bp, Homo sapiens
ttaaatatgtatttt

SEQ ID NO: 1294718 - DNA, 15 bp, Homo sapiens
tttaaatatgtattt

SEQ ID NO: 1294719 - DNA, 15 bp, Homo sapiens
ttttaaatatgtatt

SEQ ID NO: 1294720 - DNA, 15 bp, Homo sapiens
tttttaaatatgtat

SEQ ID NO: 1294721 - DNA, 15 bp, Homo sapiens
ttttttaaatatgta

SEQ ID NO: 1294722 - DNA, 15 bp, Homo sapiens
tttttttaaatatgt

SEQ ID NO: 1294723 - DNA, 15 bp, Homo sapiens
atttttttaaatatg

SEQ ID NO: 1294724 - DNA, 15 bp, Homo sapiens
catttttttaaatat

SEQ ID NO: 1294725 - DNA, 15 bp, Homo sapiens
tcatttttttaaata

SEQ ID NO: 1294726 - DNA, 15 bp, Homo sapiens
ttcatttttttaaat

SEQ ID NO: 1294727 - DNA, 15 bp, Homo sapiens
gttcatttttttaaa

SEQ ID NO: 1294728 - DNA, 15 bp, Homo sapiens
agttcatttttttaa

SEQ ID NO: 1294729 - DNA, 15 bp, Homo sapiens
cagttcattttttta

SEQ ID NO: 1294730 - DNA, 15 bp, Homo sapiens
ccagttcattttttt

SEQ ID NO: 1294731 - DNA, 15 bp, Homo sapiens
cccagttcatttttt

SEQ ID NO: 1294732 - DNA, 15 bp, Homo sapiens
gcccagttcattttt

SEQ ID NO: 1294733 - DNA, 15 bp, Homo sapiens
tgcccagttcatttt

SEQ ID NO: 1294734 - DNA, 15 bp, Homo sapiens
atgcccagttcattt

SEQ ID NO: 1294735 - DNA, 15 bp, Homo sapiens
catgcccagttcatt

SEQ ID NO: 1294736 - DNA, 15 bp, Homo sapiens
ccatgcccagttcat

SEQ ID NO: 1294737 - DNA, 15 bp, Homo sapiens
accatgcccagttca

SEQ ID NO: 1294738 - DNA, 15 bp, Homo sapiens
caccatgcccagttc

SEQ ID NO: 1294739 - DNA, 15 bp, Homo sapiens
ctacaggcacatgcc

SEQ ID NO: 1294740 - DNA, 15 bp, Homo sapiens
actacaggcacatgc

SEQ ID NO: 1294741 - DNA, 15 bp, Homo sapiens
gactacaggcacatg

SEQ ID NO: 1294742 - DNA, 15 bp, Homo sapiens
ggactacaggcacat

SEQ ID NO: 1294743 - DNA, 15 bp, Homo sapiens
tccaagtagctggga

SEQ ID NO: 1294744 - DNA, 15 bp, Homo sapiens
ttccaagtagctggg

SEQ ID NO: 1294745 - DNA, 15 bp, Homo sapiens
cttccaagtagctgg

SEQ ID NO: 1294746 - DNA, 15 bp, Homo sapiens
tcttccaagtagctg

SEQ ID NO: 1294747 - DNA, 15 bp, Homo sapiens
gtcttccaagtagct

SEQ ID NO: 1294748 - DNA, 15 bp, Homo sapiens
agtcttccaagtagc

SEQ ID NO: 1294749 - DNA, 15 bp, Homo sapiens
cagtcttccaagtag

SEQ ID NO: 1294750 - DNA, 15 bp, Homo sapiens
tcagtcttccaagta

SEQ ID NO: 1294751 - DNA, 15 bp, Homo sapiens
ctcagtcttccaagt

SEQ ID NO: 1294752 - DNA, 15 bp, Homo sapiens
cctcagtcttccaag

SEQ ID NO: 1294753 - DNA, 15 bp, Homo sapiens
gcctcagtcttccaa

SEQ ID NO: 1294754 - DNA, 15 bp, Homo sapiens
tgcctcagtcttcca

SEQ ID NO: 1294755 - DNA, 15 bp, Homo sapiens
ttgcctcagtcttcc

SEQ ID NO: 1294756 - DNA, 15 bp, Homo sapiens
tttgcctcagtcttc

SEQ ID NO: 1294757 - DNA, 15 bp, Homo sapiens
ttttgcctcagtctt

SEQ ID NO: 1294758 - DNA, 15 bp, Homo sapiens
cttttgcctcagtct

SEQ ID NO: 1294759 - DNA, 15 bp, Homo sapiens
ccttttgcctcagtc

SEQ ID NO: 1294760 - DNA, 15 bp, Homo sapiens
tccttttgcctcagt

SEQ ID NO: 1294761 - DNA, 15 bp, Homo sapiens
atccttttgcctcag

SEQ ID NO: 1294762 - DNA, 15 bp, Homo sapiens
aatccttttgcctca

SEQ ID NO: 1294763 - DNA, 15 bp, Homo sapiens
caatccttttgcctc

SEQ ID NO: 1294764 - DNA, 15 bp, Homo sapiens
gcaatccttttgcct

SEQ ID NO: 1294765 - DNA, 15 bp, Homo sapiens
agcaatccttttgcc

SEQ ID NO: 1294766 - DNA, 15 bp, Homo sapiens
aagcaatccttttgc

SEQ ID NO: 1294767 - DNA, 15 bp, Homo sapiens
caagcaatccttttg

SEQ ID NO: 1294768 - DNA, 15 bp, Homo sapiens
ctcaagcaatccttt

SEQ ID NO: 1294769 - DNA, 15 bp, Homo sapiens
tctgggctcaagcaa

SEQ ID NO: 1294770 - DNA, 15 bp, Homo sapiens
ttctgggctcaagca

SEQ ID NO: 1294771 - DNA, 15 bp, Homo sapiens
aaacttctgggctca

SEQ ID NO: 1294772 - DNA, 15 bp, Homo sapiens
caaacttctgggctc

SEQ ID NO: 1294773 - DNA, 15 bp, Homo sapiens
tcaaacttctgggct

SEQ ID NO: 1294774 - DNA, 15 bp, Homo sapiens
ctcaaacttctgggc

SEQ ID NO: 1294775 - DNA, 15 bp, Homo sapiens
cctcaaacttctggg

SEQ ID NO: 1294776 - DNA, 15 bp, Homo sapiens
acctcaaacttctgg

SEQ ID NO: 1294777 - DNA, 15 bp, Homo sapiens
aacctcaaacttctg

SEQ ID NO: 1294778 - DNA, 15 bp, Homo sapiens
taacctcaaacttct

SEQ ID NO: 1294779 - DNA, 15 bp, Homo sapiens
gtaacctcaaacttc

SEQ ID NO: 1294780 - DNA, 15 bp, Homo sapiens
tgtaacctcaaactt

SEQ ID NO: 1294781 - DNA, 15 bp, Homo sapiens
ctgtaacctcaaact

SEQ ID NO: 1294782 - DNA, 15 bp, Homo sapiens
actgtaacctcaaac

SEQ ID NO: 1294783 - DNA, 15 bp, Homo sapiens
cactgtaacctcaaa

SEQ ID NO: 1294784 - DNA, 15 bp, Homo sapiens
tcactgtaacctcaa

SEQ ID NO: 1294785 - DNA, 15 bp, Homo sapiens
ctcactgtaacctca

SEQ ID NO: 1294786 - DNA, 15 bp, Homo sapiens
tctcactgtaacctc

SEQ ID NO: 1294787 - DNA, 15 bp, Homo sapiens
gtctcactgtaacct

SEQ ID NO: 1294788 - DNA, 15 bp, Homo sapiens
tgtctcactgtaacc

SEQ ID NO: 1294789 - DNA, 15 bp, Homo sapiens
atgtctcactgtaac

SEQ ID NO: 1294790 - DNA, 15 bp, Homo sapiens
catgtctcactgtaa

SEQ ID NO: 1294791 - DNA, 15 bp, Homo sapiens
tcatgtctcactgta

SEQ ID NO: 1294792 - DNA, 15 bp, Homo sapiens
atcatgtctcactgt

SEQ ID NO: 1294793 - DNA, 15 bp, Homo sapiens
aatcatgtctcactg

SEQ ID NO: 1294794 - DNA, 15 bp, Homo sapiens
caatcatgtctcact

SEQ ID NO: 1294795 - DNA, 15 bp, Homo sapiens
gcaatcatgtctcac

SEQ ID NO: 1294796 - DNA, 15 bp, Homo sapiens
tgcaatcatgtctca

SEQ ID NO: 1294797 - DNA, 15 bp, Homo sapiens
gtgcaatcatgtctc

SEQ ID NO: 1294798 - DNA, 15 bp, Homo sapiens
ggtgcaatcatgtct

SEQ ID NO: 1294799 - DNA, 15 bp, Homo sapiens
tggtgcaatcatgtc

SEQ ID NO: 1294800 - DNA, 15 bp, Homo sapiens
gtggtgcaatcatgt

SEQ ID NO: 1294801 - DNA, 15 bp, Homo sapiens
agtggtgcaatcatg

SEQ ID NO: 1294802 - DNA, 15 bp, Homo sapiens
gcgcccgggctggag

SEQ ID NO: 1294803 - DNA, 15 bp, Homo sapiens
ggcgcccgggctgga

SEQ ID NO: 1294804 - DNA, 15 bp, Homo sapiens
tggcgcccgggctgg

SEQ ID NO: 1294805 - DNA, 15 bp, Homo sapiens
ctggcgcccgggctg

SEQ ID NO: 1294806 - DNA, 15 bp, Homo sapiens
tctggcgcccgggct

SEQ ID NO: 1294807 - DNA, 15 bp, Homo sapiens
ctctggcgcccgggc

SEQ ID NO: 1294808 - DNA, 15 bp, Homo sapiens
actctggcgcccggg

SEQ ID NO: 1294809 - DNA, 15 bp, Homo sapiens
cactctggcgcccgg

SEQ ID NO: 1294810 - DNA, 15 bp, Homo sapiens
tcactctggcgcccg

SEQ ID NO: 1294811 - DNA, 15 bp, Homo sapiens
ctcactctggcgccc

SEQ ID NO: 1294812 - DNA, 15 bp, Homo sapiens
tctcactctggcgcc

SEQ ID NO: 1294813 - DNA, 15 bp, Homo sapiens
gtctcactctggcgc

SEQ ID NO: 1294814 - DNA, 15 bp, Homo sapiens
agtctcactctggcg

SEQ ID NO: 1294815 - DNA, 15 bp, Homo sapiens
tagtctcactctggc

SEQ ID NO: 1294816 - DNA, 15 bp, Homo sapiens
atagtctcactctgg

SEQ ID NO: 1294817 - DNA, 15 bp, Homo sapiens
catagtctcactctg

SEQ ID NO: 1294818 - DNA, 15 bp, Homo sapiens
acatagtctcactct

SEQ ID NO: 1294819 - DNA, 15 bp, Homo sapiens
gacatagtctcactc

SEQ ID NO: 1294820 - DNA, 15 bp, Homo sapiens
agacatagtctcact

SEQ ID NO: 1294821 - DNA, 15 bp, Homo sapiens
gagacatagtctcac

SEQ ID NO: 1294822 - DNA, 15 bp, Homo sapiens
ggagacatagtctca

SEQ ID NO: 1294823 - DNA, 15 bp, Homo sapiens
tggagacatagtctc

SEQ ID NO: 1294824 - DNA, 15 bp, Homo sapiens
ttggagacatagtct

SEQ ID NO: 1294825 - DNA, 15 bp, Homo sapiens
tttggagacatagtc

SEQ ID NO: 1294826 - DNA, 15 bp, Homo sapiens
ttttggagacatagt

SEQ ID NO: 1294827 - DNA, 15 bp, Homo sapiens
tttttggagacatag

SEQ ID NO: 1294828 - DNA, 15 bp, Homo sapiens
gtttttggagacata

SEQ ID NO: 1294829 - DNA, 15 bp, Homo sapiens
cgtttttggagacat

SEQ ID NO: 1294830 - DNA, 15 bp, Homo sapiens
tcgtttttggagaca

SEQ ID NO: 1294831 - DNA, 15 bp, Homo sapiens
ttcgtttttggagac

SEQ ID NO: 1294832 - DNA, 15 bp, Homo sapiens
gttcgtttttggaga

SEQ ID NO: 1294833 - DNA, 15 bp, Homo sapiens
tgttcgtttttggag

SEQ ID NO: 1294834 - DNA, 15 bp, Homo sapiens
ttgttcgtttttgga

SEQ ID NO: 1294835 - DNA, 15 bp, Homo sapiens
tttgttcgtttttgg

SEQ ID NO: 1294836 - DNA, 15 bp, Homo sapiens
gtttgttcgtttttg

SEQ ID NO: 1294837 - DNA, 15 bp, Homo sapiens
tgtttgttcgttttt

SEQ ID NO: 1294838 - DNA, 15 bp, Homo sapiens
ttgtttgttcgtttt

SEQ ID NO: 1294839 - DNA, 15 bp, Homo sapiens
tttgtttgttcgttt

SEQ ID NO: 1294840 - DNA, 15 bp, Homo sapiens
gtttgtttgttcgtt

SEQ ID NO: 1294841 - DNA, 15 bp, Homo sapiens
ggtttgtttgttcgt

SEQ ID NO: 1294842 - DNA, 15 bp, Homo sapiens
tggtttgtttgttcg

SEQ ID NO: 1294843 - DNA, 15 bp, Homo sapiens
ttggtttgtttgttc

SEQ ID NO: 1294844 - DNA, 15 bp, Homo sapiens
gcttttttggtttgt

SEQ ID NO: 1294845 - DNA, 15 bp, Homo sapiens
ggcttttttggtttg

SEQ ID NO: 1294846 - DNA, 15 bp, Homo sapiens
gggcttttttggttt

SEQ ID NO: 1294847 - DNA, 15 bp, Homo sapiens
agggcttttttggtt

SEQ ID NO: 1294848 - DNA, 15 bp, Homo sapiens
cagggcttttttggt

SEQ ID NO: 1294849 - DNA, 15 bp, Homo sapiens
gcagggcttttttgg

SEQ ID NO: 1294850 - DNA, 15 bp, Homo sapiens
agcagggcttttttg

SEQ ID NO: 1294851 - DNA, 15 bp, Homo sapiens
aagcagggctttttt

SEQ ID NO: 1294852 - DNA, 15 bp, Homo sapiens
taagcagggcttttt

SEQ ID NO: 1294853 - DNA, 15 bp, Homo sapiens
ctaagcagggctttt

SEQ ID NO: 1294854 - DNA, 15 bp, Homo sapiens
tctaagcagggcttt

SEQ ID NO: 1294855 - DNA, 15 bp, Homo sapiens
ttctaagcagggctt

SEQ ID NO: 1294856 - DNA, 15 bp, Homo sapiens
tttctaagcagggct

SEQ ID NO: 1294857 - DNA, 15 bp, Homo sapiens
ttttctaagcagggc

SEQ ID NO: 1294858 - DNA, 15 bp, Homo sapiens
gttttctaagcaggg

SEQ ID NO: 1294859 - DNA, 15 bp, Homo sapiens
agttttctaagcagg

SEQ ID NO: 1294860 - DNA, 15 bp, Homo sapiens
gagttttctaagcag

SEQ ID NO: 1294861 - DNA, 15 bp, Homo sapiens
agagttttctaagca

SEQ ID NO: 1294862 - DNA, 15 bp, Homo sapiens
tagagttttctaagc

SEQ ID NO: 1294863 - DNA, 15 bp, Homo sapiens
ctagagttttctaag

SEQ ID NO: 1294864 - DNA, 15 bp, Homo sapiens
actagagttttctaa

SEQ ID NO: 1294865 - DNA, 15 bp, Homo sapiens
cactagagttttcta

SEQ ID NO: 1294866 - DNA, 15 bp, Homo sapiens
gcactagagttttct

SEQ ID NO: 1294867 - DNA, 15 bp, Homo sapiens
agcactagagttttc

SEQ ID NO: 1294868 - DNA, 15 bp, Homo sapiens
gagcactagagtttt

SEQ ID NO: 1294869 - DNA, 15 bp, Homo sapiens
agagcactagagttt

SEQ ID NO: 1294870 - DNA, 15 bp, Homo sapiens
tagagcactagagtt

SEQ ID NO: 1294871 - DNA, 15 bp, Homo sapiens
ctagagcactagagt

SEQ ID NO: 1294872 - DNA, 15 bp, Homo sapiens
actagagcactagag

SEQ ID NO: 1294873 - DNA, 15 bp, Homo sapiens
cactagagcactaga

SEQ ID NO: 1294874 - DNA, 15 bp, Homo sapiens
acactagagcactag

SEQ ID NO: 1294875 - DNA, 15 bp, Homo sapiens
aacactagagcacta

SEQ ID NO: 1294876 - DNA, 15 bp, Homo sapiens
aaacactagagcact

SEQ ID NO: 1294877 - DNA, 15 bp, Homo sapiens
aaaacactagagcac

SEQ ID NO: 1294878 - DNA, 15 bp, Homo sapiens
taaaacactagagca

SEQ ID NO: 1294879 - DNA, 15 bp, Homo sapiens
ctaaaacactagagc

SEQ ID NO: 1294880 - DNA, 15 bp, Homo sapiens
actaaaacactagag

SEQ ID NO: 1294881 - DNA, 15 bp, Homo sapiens
aactaaaacactaga

SEQ ID NO: 1294882 - DNA, 15 bp, Homo sapiens
aaactaaaacactag

SEQ ID NO: 1294883 - DNA, 15 bp, Homo sapiens
taaactaaaacacta

SEQ ID NO: 1294884 - DNA, 15 bp, Homo sapiens
ctaaactaaaacact

SEQ ID NO: 1294885 - DNA, 15 bp, Homo sapiens
actaaactaaaacac

SEQ ID NO: 1294886 - DNA, 15 bp, Homo sapiens
cactaaactaaaaca

SEQ ID NO: 1294887 - DNA, 15 bp, Homo sapiens
tcactaaactaaaac

SEQ ID NO: 1294888 - DNA, 15 bp, Homo sapiens
atcactaaactaaaa

SEQ ID NO: 1294889 - DNA, 15 bp, Homo sapiens
tatcactaaactaaa

SEQ ID NO: 1294890 - DNA, 15 bp, Homo sapiens
ttatcactaaactaa

SEQ ID NO: 1294891 - DNA, 15 bp, Homo sapiens
cttatcactaaacta

SEQ ID NO: 1294892 - DNA, 15 bp, Homo sapiens
acttatcactaaact

SEQ ID NO: 1294893 - DNA, 15 bp, Homo sapiens
cacttatcactaaac

SEQ ID NO: 1294894 - DNA, 15 bp, Homo sapiens
tcacttatcactaaa

SEQ ID NO: 1294895 - DNA, 15 bp, Homo sapiens
atcacttatcactaa

SEQ ID NO: 1294896 - DNA, 15 bp, Homo sapiens
tatcacttatcacta

SEQ ID NO: 1294897 - DNA, 15 bp, Homo sapiens
gtatcacttatcact

SEQ ID NO: 1294898 - DNA, 15 bp, Homo sapiens
ggtatcacttatcac

SEQ ID NO: 1294899 - DNA, 15 bp, Homo sapiens
tggtatcacttatca

SEQ ID NO: 1294900 - DNA, 15 bp, Homo sapiens
ttggtatcacttatc

SEQ ID NO: 1294901 - DNA, 15 bp, Homo sapiens
gttggtatcacttat

SEQ ID NO: 1294902 - DNA, 15 bp, Homo sapiens
tgttggtatcactta

SEQ ID NO: 1294903 - DNA, 15 bp, Homo sapiens
atgttggtatcactt

SEQ ID NO: 1294904 - DNA, 15 bp, Homo sapiens
aatgttggtatcact

SEQ ID NO: 1294905 - DNA, 15 bp, Homo sapiens
taatgttggtatcac

SEQ ID NO: 1294906 - DNA, 15 bp, Homo sapiens
ttaatgttggtatca

SEQ ID NO: 1294907 - DNA, 15 bp, Homo sapiens
tttaatgttggtatc

SEQ ID NO: 1294908 - DNA, 15 bp, Homo sapiens
atttaatgttggtat

SEQ ID NO: 1294909 - DNA, 15 bp, Homo sapiens
aatttaatgttggta

SEQ ID NO: 1294910 - DNA, 15 bp, Homo sapiens
aaatttaatgttggt

SEQ ID NO: 1294911 - DNA, 15 bp, Homo sapiens
gaaatttaatgttgg

SEQ ID NO: 1294912 - DNA, 15 bp, Homo sapiens
agaaatttaatgttg

SEQ ID NO: 1294913 - DNA, 15 bp, Homo sapiens
cagaaatttaatgtt

SEQ ID NO: 1294914 - DNA, 15 bp, Homo sapiens
acagaaatttaatgt

SEQ ID NO: 1294915 - DNA, 15 bp, Homo sapiens
aacagaaatttaatg

SEQ ID NO: 1294916 - DNA, 15 bp, Homo sapiens
aaacagaaatttaat

SEQ ID NO: 1294917 - DNA, 15 bp, Homo sapiens
caaacagaaatttaa

SEQ ID NO: 1294918 - DNA, 15 bp, Homo sapiens
ccaaacagaaattta

SEQ ID NO: 1294919 - DNA, 15 bp, Homo sapiens
gccaaacagaaattt

SEQ ID NO: 1294920 - DNA, 15 bp, Homo sapiens
ggccaaacagaaatt

SEQ ID NO: 1294921 - DNA, 15 bp, Homo sapiens
aggccaaacagaaat

SEQ ID NO: 1294922 - DNA, 15 bp, Homo sapiens
aaggccaaacagaaa

SEQ ID NO: 1294923 - DNA, 15 bp, Homo sapiens
gaaggccaaacagaa

SEQ ID NO: 1294924 - DNA, 15 bp, Homo sapiens
agaaggccaaacaga

SEQ ID NO: 1294925 - DNA, 15 bp, Homo sapiens
tagaaggccaaacag

SEQ ID NO: 1294926 - DNA, 15 bp, Homo sapiens
atagaaggccaaaca

SEQ ID NO: 1294927 - DNA, 15 bp, Homo sapiens
tatagaaggccaaac

SEQ ID NO: 1294928 - DNA, 15 bp, Homo sapiens
ttatagaaggccaaa

SEQ ID NO: 1294929 - DNA, 15 bp, Homo sapiens
attatagaaggccaa

SEQ ID NO: 1294930 - DNA, 15 bp, Homo sapiens
aattatagaaggcca

SEQ ID NO: 1294931 - DNA, 15 bp, Homo sapiens
taattatagaaggcc

SEQ ID NO: 1294932 - DNA, 15 bp, Homo sapiens
gtaattatagaaggc

SEQ ID NO: 1294933 - DNA, 15 bp, Homo sapiens
agtaattatagaagg

SEQ ID NO: 1294934 - DNA, 15 bp, Homo sapiens
gagtaattatagaag

SEQ ID NO: 1294935 - DNA, 15 bp, Homo sapiens
agagtaattatagaa

SEQ ID NO: 1294936 - DNA, 15 bp, Homo sapiens
gagagtaattataga

SEQ ID NO: 1294937 - DNA, 15 bp, Homo sapiens
agagagtaattatag

SEQ ID NO: 1294938 - DNA, 15 bp, Homo sapiens
aagagagtaattata

SEQ ID NO: 1294939 - DNA, 15 bp, Homo sapiens
aaagagagtaattat

SEQ ID NO: 1294940 - DNA, 15 bp, Homo sapiens
gaaagagagtaatta

SEQ ID NO: 1294941 - DNA, 15 bp, Homo sapiens
agaaagagagtaatt

SEQ ID NO: 1294942 - DNA, 15 bp, Homo sapiens
tagaaagagagtaat

SEQ ID NO: 1294943 - DNA, 15 bp, Homo sapiens
ttagaaagagagtaa

SEQ ID NO: 1294944 - DNA, 15 bp, Homo sapiens
tttagaaagagagta

SEQ ID NO: 1294945 - DNA, 15 bp, Homo sapiens
atttagaaagagagt

SEQ ID NO: 1294946 - DNA, 15 bp, Homo sapiens
tatttagaaagagag

SEQ ID NO: 1294947 - DNA, 15 bp, Homo sapiens
atatttagaaagaga

SEQ ID NO: 1294948 - DNA, 15 bp, Homo sapiens
aatatttagaaagag

SEQ ID NO: 1294949 - DNA, 15 bp, Homo sapiens
taatatttagaaaga

SEQ ID NO: 1294950 - DNA, 15 bp, Homo sapiens
gtaatatttagaaag

SEQ ID NO: 1294951 - DNA, 15 bp, Homo sapiens
tgtaatatttagaaa

SEQ ID NO: 1294952 - DNA, 15 bp, Homo sapiens
ctgtaatatttagaa

SEQ ID NO: 1294953 - DNA, 15 bp, Homo sapiens
gctgtaatatttaga

SEQ ID NO: 1294954 - DNA, 15 bp, Homo sapiens
tgctgtaatatttag

SEQ ID NO: 1294955 - DNA, 15 bp, Homo sapiens
gtgctgtaatattta

SEQ ID NO: 1294956 - DNA, 15 bp, Homo sapiens
tgtgctgtaatattt

SEQ ID NO: 1294957 - DNA, 15 bp, Homo sapiens
atgtgctgtaatatt

SEQ ID NO: 1294958 - DNA, 15 bp, Homo sapiens
tatgtgctgtaatat

SEQ ID NO: 1294959 - DNA, 15 bp, Homo sapiens
ttatgtgctgtaata

SEQ ID NO: 1294960 - DNA, 15 bp, Homo sapiens
attatgtgctgtaat

SEQ ID NO: 1294961 - DNA, 15 bp, Homo sapiens
cattatgtgctgtaa

SEQ ID NO: 1294962 - DNA, 15 bp, Homo sapiens
tcattatgtgctgta

SEQ ID NO: 1294963 - DNA, 15 bp, Homo sapiens
gtcattatgtgctgt

SEQ ID NO: 1294964 - DNA, 15 bp, Homo sapiens
agtcattatgtgctg

SEQ ID NO: 1294965 - DNA, 15 bp, Homo sapiens
cagtcattatgtgct

SEQ ID NO: 1294966 - DNA, 15 bp, Homo sapiens
gcagtcattatgtgc

SEQ ID NO: 1294967 - DNA, 15 bp, Homo sapiens
agcagtcattatgtg

SEQ ID NO: 1294968 - DNA, 15 bp, Homo sapiens
cagcagtcattatgt

SEQ ID NO: 1294969 - DNA, 15 bp, Homo sapiens
ccagcagtcattatg

SEQ ID NO: 1294970 - DNA, 15 bp, Homo sapiens
tccagcagtcattat

SEQ ID NO: 1294971 - DNA, 15 bp, Homo sapiens
ctccagcagtcatta

SEQ ID NO: 1294972 - DNA, 15 bp, Homo sapiens
tctccagcagtcatt

SEQ ID NO: 1294973 - DNA, 15 bp, Homo sapiens
ttctccagcagtcat

SEQ ID NO: 1294974 - DNA, 15 bp, Homo sapiens
attctccagcagtca

SEQ ID NO: 1294975 - DNA, 15 bp, Homo sapiens
tattctccagcagtc

SEQ ID NO: 1294976 - DNA, 15 bp, Homo sapiens
gtattctccagcagt

SEQ ID NO: 1294977 - DNA, 15 bp, Homo sapiens
tgtattctccagcag

SEQ ID NO: 1294978 - DNA, 15 bp, Homo sapiens
atgtattctccagca

SEQ ID NO: 1294979 - DNA, 15 bp, Homo sapiens
tatgtattctccagc

SEQ ID NO: 1294980 - DNA, 15 bp, Homo sapiens
atatgtattctccag

SEQ ID NO: 1294981 - DNA, 15 bp, Homo sapiens
catatgtattctcca

SEQ ID NO: 1294982 - DNA, 15 bp, Homo sapiens
tcatatgtattctcc

SEQ ID NO: 1294983 - DNA, 15 bp, Homo sapiens
ttcatatgtattctc

SEQ ID NO: 1294984 - DNA, 15 bp, Homo sapiens
attcatatgtattct

SEQ ID NO: 1294985 - DNA, 15 bp, Homo sapiens
aattcatatgtattc

SEQ ID NO: 1294986 - DNA, 15 bp, Homo sapiens
gaattcatatgtatt

SEQ ID NO: 1294987 - DNA, 15 bp, Homo sapiens
ggaattcatatgtat

SEQ ID NO: 1294988 - DNA, 15 bp, Homo sapiens
gggaattcatatgta

SEQ ID NO: 1294989 - DNA, 15 bp, Homo sapiens
tgggaattcatatgt

SEQ ID NO: 1294990 - DNA, 15 bp, Homo sapiens
ctgggaattcatatg

SEQ ID NO: 1294991 - DNA, 15 bp, Homo sapiens
cctgggaattcatat

SEQ ID NO: 1294992 - DNA, 15 bp, Homo sapiens
tcctgggaattcata

SEQ ID NO: 1294993 - DNA, 15 bp, Homo sapiens
ttcctgggaattcat

SEQ ID NO: 1294994 - DNA, 15 bp, Homo sapiens
attcctgggaattca

SEQ ID NO: 1294995 - DNA, 15 bp, Homo sapiens
aattcctgggaattc

SEQ ID NO: 1294996 - DNA, 15 bp, Homo sapiens
taattcctgggaatt

SEQ ID NO: 1294997 - DNA, 15 bp, Homo sapiens
gtaattcctgggaat

SEQ ID NO: 1294998 - DNA, 15 bp, Homo sapiens
agtaattcctgggaa

SEQ ID NO: 1294999 - DNA, 15 bp, Homo sapiens
aagtaattcctggga

SEQ ID NO: 1295000 - DNA, 15 bp, Homo sapiens
caagtaattcctggg

SEQ ID NO: 1295001 - DNA, 15 bp, Homo sapiens
acaagtaattcctgg

SEQ ID NO: 1295002 - DNA, 15 bp, Homo sapiens
gacaagtaattcctg

SEQ ID NO: 1295003 - DNA, 15 bp, Homo sapiens
agacaagtaattcct

SEQ ID NO: 1295004 - DNA, 15 bp, Homo sapiens
aagacaagtaattcc

SEQ ID NO: 1295005 - DNA, 15 bp, Homo sapiens
caagacaagtaattc

SEQ ID NO: 1295006 - DNA, 15 bp, Homo sapiens
acaagacaagtaatt

SEQ ID NO: 1295007 - DNA, 15 bp, Homo sapiens
aacaagacaagtaat

SEQ ID NO: 1295008 - DNA, 15 bp, Homo sapiens
gaacaagacaagtaa

SEQ ID NO: 1295009 - DNA, 15 bp, Homo sapiens
tgaacaagacaagta

SEQ ID NO: 1295010 - DNA, 15 bp, Homo sapiens
atgaacaagacaagt

SEQ ID NO: 1295011 - DNA, 15 bp, Homo sapiens
tatgaacaagacaag

SEQ ID NO: 1295012 - DNA, 15 bp, Homo sapiens
ctatgaacaagacaa

SEQ ID NO: 1295013 - DNA, 15 bp, Homo sapiens
tctatgaacaagaca

SEQ ID NO: 1295014 - DNA, 15 bp, Homo sapiens
ttctatgaacaagac

SEQ ID NO: 1295015 - DNA, 15 bp, Homo sapiens
attctatgaacaaga

SEQ ID NO: 1295016 - DNA, 15 bp, Homo sapiens
cattctatgaacaag

SEQ ID NO: 1295017 - DNA, 15 bp, Homo sapiens
acattctatgaacaa

SEQ ID NO: 1295018 - DNA, 15 bp, Homo sapiens
cacattctatgaaca

SEQ ID NO: 1295019 - DNA, 15 bp, Homo sapiens
ccacattctatgaac

SEQ ID NO: 1295020 - DNA, 15 bp, Homo sapiens
tccacattctatgaa

SEQ ID NO: 1295021 - DNA, 15 bp, Homo sapiens
atccacattctatga

SEQ ID NO: 1295022 - DNA, 15 bp, Homo sapiens
catccacattctatg

SEQ ID NO: 1295023 - DNA, 15 bp, Homo sapiens
acatccacattctat

SEQ ID NO: 1295024 - DNA, 15 bp, Homo sapiens
aacatccacattcta

SEQ ID NO: 1295025 - DNA, 15 bp, Homo sapiens
taacatccacattct

SEQ ID NO: 1295026 - DNA, 15 bp, Homo sapiens
ctaacatccacattc

SEQ ID NO: 1295027 - DNA, 15 bp, Homo sapiens
tctaacatccacatt

SEQ ID NO: 1295028 - DNA, 15 bp, Homo sapiens
ttctaacatccacat

SEQ ID NO: 1295029 - DNA, 15 bp, Homo sapiens
cttctaacatccaca

SEQ ID NO: 1295030 - DNA, 15 bp, Homo sapiens
ccttctaacatccac

SEQ ID NO: 1295031 - DNA, 15 bp, Homo sapiens
tccttctaacatcca

SEQ ID NO: 1295032 - DNA, 15 bp, Homo sapiens
ttccttctaacatcc

SEQ ID NO: 1295033 - DNA, 15 bp, Homo sapiens
attccttctaacatc

SEQ ID NO: 1295034 - DNA, 15 bp, Homo sapiens
gattccttctaacat

SEQ ID NO: 1295035 - DNA, 15 bp, Homo sapiens
agattccttctaaca

SEQ ID NO: 1295036 - DNA, 15 bp, Homo sapiens
aagattccttctaac

SEQ ID NO: 1295037 - DNA, 15 bp, Homo sapiens
taagattccttctaa

SEQ ID NO: 1295038 - DNA, 15 bp, Homo sapiens
gtaagattccttcta

SEQ ID NO: 1295039 - DNA, 15 bp, Homo sapiens
tgtaagattccttct

SEQ ID NO: 1295040 - DNA, 15 bp, Homo sapiens
ttgtaagattccttc

SEQ ID NO: 1295041 - DNA, 15 bp, Homo sapiens
tttgtaagattcctt

SEQ ID NO: 1295042 - DNA, 15 bp, Homo sapiens
atttgtaagattcct

SEQ ID NO: 1295043 - DNA, 15 bp, Homo sapiens
tatttgtaagattcc

SEQ ID NO: 1295044 - DNA, 15 bp, Homo sapiens
ttatttgtaagattc

SEQ ID NO: 1295045 - DNA, 15 bp, Homo sapiens
attatttgtaagatt

SEQ ID NO: 1295046 - DNA, 15 bp, Homo sapiens
cattatttgtaagat

SEQ ID NO: 1295047 - DNA, 15 bp, Homo sapiens
acattatttgtaaga

SEQ ID NO: 1295048 - DNA, 15 bp, Homo sapiens
tacattatttgtaag

SEQ ID NO: 1295049 - DNA, 15 bp, Homo sapiens
atacattatttgtaa

SEQ ID NO: 1295050 - DNA, 15 bp, Homo sapiens
aatacattatttgta

SEQ ID NO: 1295051 - DNA, 15 bp, Homo sapiens
gaatacattatttgt

SEQ ID NO: 1295052 - DNA, 15 bp, Homo sapiens
tgaatacattatttg

SEQ ID NO: 1295053 - DNA, 15 bp, Homo sapiens
ttgaatacattattt

SEQ ID NO: 1295054 - DNA, 15 bp, Homo sapiens
attgaatacattatt

SEQ ID NO: 1295055 - DNA, 15 bp, Homo sapiens
gattgaatacattat

SEQ ID NO: 1295056 - DNA, 15 bp, Homo sapiens
agattgaatacatta

SEQ ID NO: 1295057 - DNA, 15 bp, Homo sapiens
gagattgaatacatt

SEQ ID NO: 1295058 - DNA, 15 bp, Homo sapiens
ggagattgaatacat

SEQ ID NO: 1295059 - DNA, 15 bp, Homo sapiens
aggagattgaataca

SEQ ID NO: 1295060 - DNA, 15 bp, Homo sapiens
aaggagattgaatac

SEQ ID NO: 1295061 - DNA, 15 bp, Homo sapiens
aaaggagattgaata

SEQ ID NO: 1295062 - DNA, 15 bp, Homo sapiens
aaaaggagattgaat

SEQ ID NO: 1295063 - DNA, 15 bp, Homo sapiens
aaaaaggagattgaa

SEQ ID NO: 1295064 - DNA, 15 bp, Homo sapiens
taaaaaggagattga

SEQ ID NO: 1295065 - DNA, 15 bp, Homo sapiens
ataaaaaggagattg

SEQ ID NO: 1295066 - DNA, 15 bp, Homo sapiens
tataaaaaggagatt

SEQ ID NO: 1295067 - DNA, 15 bp, Homo sapiens
ttataaaaaggagat

SEQ ID NO: 1295068 - DNA, 15 bp, Homo sapiens
attataaaaaggaga

SEQ ID NO: 1295069 - DNA, 15 bp, Homo sapiens
cattataaaaaggag

SEQ ID NO: 1295070 - DNA, 15 bp, Homo sapiens
tcattataaaaagga

SEQ ID NO: 1295071 - DNA, 15 bp, Homo sapiens
ctcattataaaaagg

SEQ ID NO: 1295072 - DNA, 15 bp, Homo sapiens
actcattataaaaag

SEQ ID NO: 1295073 - DNA, 15 bp, Homo sapiens
tactcattataaaaa

SEQ ID NO: 1295074 - DNA, 15 bp, Homo sapiens
ttactcattataaaa

SEQ ID NO: 1295075 - DNA, 15 bp, Homo sapiens
tttactcattataaa

SEQ ID NO: 1295076 - DNA, 15 bp, Homo sapiens
gtttactcattataa

SEQ ID NO: 1295077 - DNA, 15 bp, Homo sapiens
tgtttactcattata

SEQ ID NO: 1295078 - DNA, 15 bp, Homo sapiens
ttgtttactcattat

SEQ ID NO: 1295079 - DNA, 15 bp, Homo sapiens
cttgtttactcatta

SEQ ID NO: 1295080 - DNA, 15 bp, Homo sapiens
gcttgtttactcatt

SEQ ID NO: 1295081 - DNA, 15 bp, Homo sapiens
agcttgtttactcat

SEQ ID NO: 1295082 - DNA, 15 bp, Homo sapiens
aagcttgtttactca

SEQ ID NO: 1295083 - DNA, 15 bp, Homo sapiens
gaagcttgtttactc

SEQ ID NO: 1295084 - DNA, 15 bp, Homo sapiens
ggaagcttgtttact

SEQ ID NO: 1295085 - DNA, 15 bp, Homo sapiens
tggaagcttgtttac

SEQ ID NO: 1295086 - DNA, 15 bp, Homo sapiens
ctggaagcttgttta

SEQ ID NO: 1295087 - DNA, 15 bp, Homo sapiens
cctggaagcttgttt

SEQ ID NO: 1295088 - DNA, 15 bp, Homo sapiens
ccctggaagcttgtt

SEQ ID NO: 1295089 - DNA, 15 bp, Homo sapiens
tccctggaagcttgt

SEQ ID NO: 1295090 - DNA, 15 bp, Homo sapiens
gtccctggaagcttg

SEQ ID NO: 1295091 - DNA, 15 bp, Homo sapiens
agtccctggaagctt

SEQ ID NO: 1295092 - DNA, 15 bp, Homo sapiens
cagtccctggaagct

SEQ ID NO: 1295093 - DNA, 15 bp, Homo sapiens
tcagtccctggaagc

SEQ ID NO: 1295094 - DNA, 15 bp, Homo sapiens
atcagtccctggaag

SEQ ID NO: 1295095 - DNA, 15 bp, Homo sapiens
tatcagtccctggaa

SEQ ID NO: 1295096 - DNA, 15 bp, Homo sapiens
ctatcagtccctgga

SEQ ID NO: 1295097 - DNA, 15 bp, Homo sapiens
gctatcagtccctgg

SEQ ID NO: 1295098 - DNA, 15 bp, Homo sapiens
agctatcagtccctg

SEQ ID NO: 1295099 - DNA, 15 bp, Homo sapiens
aagctatcagtccct

SEQ ID NO: 1295100 - DNA, 15 bp, Homo sapiens
taagctatcagtccc

SEQ ID NO: 1295101 - DNA, 15 bp, Homo sapiens
ataagctatcagtcc

SEQ ID NO: 1295102 - DNA, 15 bp, Homo sapiens
aataagctatcagtc

SEQ ID NO: 1295103 - DNA, 15 bp, Homo sapiens
taataagctatcagt

SEQ ID NO: 1295104 - DNA, 15 bp, Homo sapiens
ataataagctatcag

SEQ ID NO: 1295105 - DNA, 15 bp, Homo sapiens
aataataagctatca

SEQ ID NO: 1295106 - DNA, 15 bp, Homo sapiens
aaataataagctatc

SEQ ID NO: 1295107 - DNA, 15 bp, Homo sapiens
taaataataagctat

SEQ ID NO: 1295108 - DNA, 15 bp, Homo sapiens
gtaaataataagcta

SEQ ID NO: 1295109 - DNA, 15 bp, Homo sapiens
tgtaaataataagct

SEQ ID NO: 1295110 - DNA, 15 bp, Homo sapiens
ctgtaaataataagc

SEQ ID NO: 1295111 - DNA, 15 bp, Homo sapiens
gctgtaaataataag

SEQ ID NO: 1295112 - DNA, 15 bp, Homo sapiens
cgctgtaaataataa

SEQ ID NO: 1295113 - DNA, 15 bp, Homo sapiens
acgctgtaaataata

SEQ ID NO: 1295114 - DNA, 15 bp, Homo sapiens
gacgctgtaaataat

SEQ ID NO: 1295115 - DNA, 15 bp, Homo sapiens
agacgctgtaaataa

SEQ ID NO: 1295116 - DNA, 15 bp, Homo sapiens
tagacgctgtaaata

SEQ ID NO: 1295117 - DNA, 15 bp, Homo sapiens
gtagacgctgtaaat

SEQ ID NO: 1295118 - DNA, 15 bp, Homo sapiens
tgtagacgctgtaaa

SEQ ID NO: 1295119 - DNA, 15 bp, Homo sapiens
atgtagacgctgtaa

SEQ ID NO: 1295120 - DNA, 15 bp, Homo sapiens
aatgtagacgctgta

SEQ ID NO: 1295121 - DNA, 15 bp, Homo sapiens
taatgtagacgctgt

SEQ ID NO: 1295122 - DNA, 15 bp, Homo sapiens
ctaatgtagacgctg

SEQ ID NO: 1295123 - DNA, 15 bp, Homo sapiens
tctaatgtagacgct

SEQ ID NO: 1295124 - DNA, 15 bp, Homo sapiens
gtctaatgtagacgc

SEQ ID NO: 1295125 - DNA, 15 bp, Homo sapiens
agtctaatgtagacg

SEQ ID NO: 1295126 - DNA, 15 bp, Homo sapiens
aagtctaatgtagac

SEQ ID NO: 1295127 - DNA, 15 bp, Homo sapiens
aaagtctaatgtaga

SEQ ID NO: 1295128 - DNA, 15 bp, Homo sapiens
caaagtctaatgtag

SEQ ID NO: 1295129 - DNA, 15 bp, Homo sapiens
ccaaagtctaatgta

SEQ ID NO: 1295130 - DNA, 15 bp, Homo sapiens
cccaaagtctaatgt

SEQ ID NO: 1295131 - DNA, 15 bp, Homo sapiens
tcccaaagtctaatg

SEQ ID NO: 1295132 - DNA, 15 bp, Homo sapiens
atcccaaagtctaat

SEQ ID NO: 1295133 - DNA, 15 bp, Homo sapiens
tatcccaaagtctaa

SEQ ID NO: 1295134 - DNA, 15 bp, Homo sapiens
atatcccaaagtcta

SEQ ID NO: 1295135 - DNA, 15 bp, Homo sapiens
gatatcccaaagtct

SEQ ID NO: 1295136 - DNA, 15 bp, Homo sapiens
agatatcccaaagtc

SEQ ID NO: 1295137 - DNA, 15 bp, Homo sapiens
cagatatcccaaagt

SEQ ID NO: 1295138 - DNA, 15 bp, Homo sapiens
ccagatatcccaaag

SEQ ID NO: 1295139 - DNA, 15 bp, Homo sapiens
accagatatcccaaa

SEQ ID NO: 1295140 - DNA, 15 bp, Homo sapiens
taccagatatcccaa

SEQ ID NO: 1295141 - DNA, 15 bp, Homo sapiens
gtaccagatatccca

SEQ ID NO: 1295142 - DNA, 15 bp, Homo sapiens
agtaccagatatccc

SEQ ID NO: 1295143 - DNA, 15 bp, Homo sapiens
tagtaccagatatcc

SEQ ID NO: 1295144 - DNA, 15 bp, Homo sapiens
atagtaccagatatc

SEQ ID NO: 1295145 - DNA, 15 bp, Homo sapiens
aatagtaccagatat

SEQ ID NO: 1295146 - DNA, 15 bp, Homo sapiens
caatagtaccagata

SEQ ID NO: 1295147 - DNA, 15 bp, Homo sapiens
gcaatagtaccagat

SEQ ID NO: 1295148 - DNA, 15 bp, Homo sapiens
agcaatagtaccaga

SEQ ID NO: 1295149 - DNA, 15 bp, Homo sapiens
aagcaatagtaccag

SEQ ID NO: 1295150 - DNA, 15 bp, Homo sapiens
gaagcaatagtacca

SEQ ID NO: 1295151 - DNA, 15 bp, Homo sapiens
agaagcaatagtacc

SEQ ID NO: 1295152 - DNA, 15 bp, Homo sapiens
aagaagcaatagtac

SEQ ID NO: 1295153 - DNA, 15 bp, Homo sapiens
aaagaagcaatagta

SEQ ID NO: 1295154 - DNA, 15 bp, Homo sapiens
gaaagaagcaatagt

SEQ ID NO: 1295155 - DNA, 15 bp, Homo sapiens
ggaaagaagcaatag

SEQ ID NO: 1295156 - DNA, 15 bp, Homo sapiens
aggaaagaagcaata

SEQ ID NO: 1295157 - DNA, 15 bp, Homo sapiens
aaggaaagaagcaat

SEQ ID NO: 1295158 - DNA, 15 bp, Homo sapiens
aaaggaaagaagcaa

SEQ ID NO: 1295159 - DNA, 15 bp, Homo sapiens
aaaaggaaagaagca

SEQ ID NO: 1295160 - DNA, 15 bp, Homo sapiens
aaaaaggaaagaagc

SEQ ID NO: 1295161 - DNA, 15 bp, Homo sapiens
taaaaaggaaagaag

SEQ ID NO: 1295162 - DNA, 15 bp, Homo sapiens
gtaaaaaggaaagaa

SEQ ID NO: 1295163 - DNA, 15 bp, Homo sapiens
ggtaaaaaggaaaga

SEQ ID NO: 1295164 - DNA, 15 bp, Homo sapiens
tggtaaaaaggaaag

SEQ ID NO: 1295165 - DNA, 15 bp, Homo sapiens
atggtaaaaaggaaa

SEQ ID NO: 1295166 - DNA, 15 bp, Homo sapiens
tatggtaaaaaggaa

SEQ ID NO: 1295167 - DNA, 15 bp, Homo sapiens
gtatggtaaaaagga

SEQ ID NO: 1295168 - DNA, 15 bp, Homo sapiens
tgtatggtaaaaagg

SEQ ID NO: 1295169 - DNA, 15 bp, Homo sapiens
ctgtatggtaaaaag

SEQ ID NO: 1295170 - DNA, 15 bp, Homo sapiens
actgtatggtaaaaa

SEQ ID NO: 1295171 - DNA, 15 bp, Homo sapiens
aactgtatggtaaaa

SEQ ID NO: 1295172 - DNA, 15 bp, Homo sapiens
aaactgtatggtaaa

SEQ ID NO: 1295173 - DNA, 15 bp, Homo sapiens
aaaactgtatggtaa

SEQ ID NO: 1295174 - DNA, 15 bp, Homo sapiens
aaaaactgtatggta

SEQ ID NO: 1295175 - DNA, 15 bp, Homo sapiens
gaaaaactgtatggt

SEQ ID NO: 1295176 - DNA, 15 bp, Homo sapiens
agaaaaactgtatgg

SEQ ID NO: 1295177 - DNA, 15 bp, Homo sapiens
gagaaaaactgtatg

SEQ ID NO: 1295178 - DNA, 15 bp, Homo sapiens
tgagaaaaactgtat

SEQ ID NO: 1295179 - DNA, 15 bp, Homo sapiens
atgagaaaaactgta

SEQ ID NO: 1295180 - DNA, 15 bp, Homo sapiens
tatgagaaaaactgt

SEQ ID NO: 1295181 - DNA, 15 bp, Homo sapiens
ctatgagaaaaactg

SEQ ID NO: 1295182 - DNA, 15 bp, Homo sapiens
actatgagaaaaact

SEQ ID NO: 1295183 - DNA, 15 bp, Homo sapiens
aactatgagaaaaac

SEQ ID NO: 1295184 - DNA, 15 bp, Homo sapiens
aaactatgagaaaaa

SEQ ID NO: 1295185 - DNA, 15 bp, Homo sapiens
caaactatgagaaaa

SEQ ID NO: 1295186 - DNA, 15 bp, Homo sapiens
acaaactatgagaaa

SEQ ID NO: 1295187 - DNA, 15 bp, Homo sapiens
aacaaactatgagaa

SEQ ID NO: 1295188 - DNA, 15 bp, Homo sapiens
aaacaaactatgaga

SEQ ID NO: 1295189 - DNA, 15 bp, Homo sapiens
aaaacaaactatgag

SEQ ID NO: 1295190 - DNA, 15 bp, Homo sapiens
taaaacaaactatga

SEQ ID NO: 1295191 - DNA, 15 bp, Homo sapiens
ataaaacaaactatg

SEQ ID NO: 1295192 - DNA, 15 bp, Homo sapiens
aataaaacaaactat

SEQ ID NO: 1295193 - DNA, 15 bp, Homo sapiens
caataaaacaaacta

SEQ ID NO: 1295194 - DNA, 15 bp, Homo sapiens
acaataaaacaaact

SEQ ID NO: 1295195 - DNA, 15 bp, Homo sapiens
gacaataaaacaaac

SEQ ID NO: 1295196 - DNA, 15 bp, Homo sapiens
ggacaataaaacaaa

SEQ ID NO: 1295197 - DNA, 15 bp, Homo sapiens
tggacaataaaacaa

SEQ ID NO: 1295198 - DNA, 15 bp, Homo sapiens
gtggacaataaaaca

SEQ ID NO: 1295199 - DNA, 15 bp, Homo sapiens
tgtggacaataaaac

SEQ ID NO: 1295200 - DNA, 15 bp, Homo sapiens
ttgtggacaataaaa

SEQ ID NO: 1295201 - DNA, 15 bp, Homo sapiens
attgtggacaataaa

SEQ ID NO: 1295202 - DNA, 15 bp, Homo sapiens
gattgtggacaataa

SEQ ID NO: 1295203 - DNA, 15 bp, Homo sapiens
tgattgtggacaata

SEQ ID NO: 1295204 - DNA, 15 bp, Homo sapiens
gtgattgtggacaat

SEQ ID NO: 1295205 - DNA, 15 bp, Homo sapiens
agtgattgtggacaa

SEQ ID NO: 1295206 - DNA, 15 bp, Homo sapiens
tagtgattgtggaca

SEQ ID NO: 1295207 - DNA, 15 bp, Homo sapiens
ttagtgattgtggac

SEQ ID NO: 1295208 - DNA, 15 bp, Homo sapiens
gttagtgattgtgga

SEQ ID NO: 1295209 - DNA, 15 bp, Homo sapiens
tgttagtgattgtgg

SEQ ID NO: 1295210 - DNA, 15 bp, Homo sapiens
gtgttagtgattgtg

SEQ ID NO: 1295211 - DNA, 15 bp, Homo sapiens
ggtgttagtgattgt

SEQ ID NO: 1295212 - DNA, 15 bp, Homo sapiens
tggtgttagtgattg

SEQ ID NO: 1295213 - DNA, 15 bp, Homo sapiens
ctggtgttagtgatt

SEQ ID NO: 1295214 - DNA, 15 bp, Homo sapiens
tctggtgttagtgat

SEQ ID NO: 1295215 - DNA, 15 bp, Homo sapiens
atctggtgttagtga

SEQ ID NO: 1295216 - DNA, 15 bp, Homo sapiens
tatctggtgttagtg

SEQ ID NO: 1295217 - DNA, 15 bp, Homo sapiens
ctatctggtgttagt

SEQ ID NO: 1295218 - DNA, 15 bp, Homo sapiens
gctatctggtgttag

SEQ ID NO: 1295219 - DNA, 15 bp, Homo sapiens
tgctatctggtgtta

SEQ ID NO: 1295220 - DNA, 15 bp, Homo sapiens
ctgctatctggtgtt

SEQ ID NO: 1295221 - DNA, 15 bp, Homo sapiens
actgctatctggtgt

SEQ ID NO: 1295222 - DNA, 15 bp, Homo sapiens
tactgctatctggtg

SEQ ID NO: 1295223 - DNA, 15 bp, Homo sapiens
ttactgctatctggt

SEQ ID NO: 1295224 - DNA, 15 bp, Homo sapiens
tttactgctatctgg

SEQ ID NO: 1295225 - DNA, 15 bp, Homo sapiens
ttttactgctatctg

SEQ ID NO: 1295226 - DNA, 15 bp, Homo sapiens
tttttactgctatct

SEQ ID NO: 1295227 - DNA, 15 bp, Homo sapiens
ttttttactgctatc

SEQ ID NO: 1295228 - DNA, 15 bp, Homo sapiens
cattttttactgcta

SEQ ID NO: 1295229 - DNA, 15 bp, Homo sapiens
acattttttactgct

SEQ ID NO: 1295230 - DNA, 15 bp, Homo sapiens
aacattttttactgc

SEQ ID NO: 1295231 - DNA, 15 bp, Homo sapiens
taacattttttactg

SEQ ID NO: 1295232 - DNA, 15 bp, Homo sapiens
gtaacattttttact

SEQ ID NO: 1295233 - DNA, 15 bp, Homo sapiens
tgtaacattttttac

SEQ ID NO: 1295234 - DNA, 15 bp, Homo sapiens
atgtaacatttttta

SEQ ID NO: 1295235 - DNA, 15 bp, Homo sapiens
gatgtaacatttttt

SEQ ID NO: 1295236 - DNA, 15 bp, Homo sapiens
agatgtaacattttt

SEQ ID NO: 1295237 - DNA, 15 bp, Homo sapiens
aagatgtaacatttt

SEQ ID NO: 1295238 - DNA, 15 bp, Homo sapiens
aaagatgtaacattt

SEQ ID NO: 1295239 - DNA, 15 bp, Homo sapiens
caaagatgtaacatt

SEQ ID NO: 1295240 - DNA, 15 bp, Homo sapiens
tcaaagatgtaacat

SEQ ID NO: 1295241 - DNA, 15 bp, Homo sapiens
ttcaaagatgtaaca

SEQ ID NO: 1295242 - DNA, 15 bp, Homo sapiens
tttcaaagatgtaac

SEQ ID NO: 1295243 - DNA, 15 bp, Homo sapiens
atttcaaagatgtaa

SEQ ID NO: 1295244 - DNA, 15 bp, Homo sapiens
aatttcaaagatgta

SEQ ID NO: 1295245 - DNA, 15 bp, Homo sapiens
aaatttcaaagatgt

SEQ ID NO: 1295246 - DNA, 15 bp, Homo sapiens
gaaatttcaaagatg

SEQ ID NO: 1295247 - DNA, 15 bp, Homo sapiens
agaaatttcaaagat

SEQ ID NO: 1295248 - DNA, 15 bp, Homo sapiens
gagaaatttcaaaga

SEQ ID NO: 1295249 - DNA, 15 bp, Homo sapiens
agagaaatttcaaag

SEQ ID NO: 1295250 - DNA, 15 bp, Homo sapiens
cagagaaatttcaaa

SEQ ID NO: 1295251 - DNA, 15 bp, Homo sapiens
acagagaaatttcaa

SEQ ID NO: 1295252 - DNA, 15 bp, Homo sapiens
aacagagaaatttca

SEQ ID NO: 1295253 - DNA, 15 bp, Homo sapiens
taacagagaaatttc

SEQ ID NO: 1295254 - DNA, 15 bp, Homo sapiens
ttaacagagaaattt

SEQ ID NO: 1295255 - DNA, 15 bp, Homo sapiens
gttaacagagaaatt

SEQ ID NO: 1295256 - DNA, 15 bp, Homo sapiens
agttaacagagaaat

SEQ ID NO: 1295257 - DNA, 15 bp, Homo sapiens
aagttaacagagaaa

SEQ ID NO: 1295258 - DNA, 15 bp, Homo sapiens
aaagttaacagagaa

SEQ ID NO: 1295259 - DNA, 15 bp, Homo sapiens
caaagttaacagaga

SEQ ID NO: 1295260 - DNA, 15 bp, Homo sapiens
ccaaagttaacagag

SEQ ID NO: 1295261 - DNA, 15 bp, Homo sapiens
cccaaagttaacaga

SEQ ID NO: 1295262 - DNA, 15 bp, Homo sapiens
tcccaaagttaacag

SEQ ID NO: 1295263 - DNA, 15 bp, Homo sapiens
ttcccaaagttaaca

SEQ ID NO: 1295264 - DNA, 15 bp, Homo sapiens
cttcccaaagttaac

SEQ ID NO: 1295265 - DNA, 15 bp, Homo sapiens
ccttcccaaagttaa

SEQ ID NO: 1295266 - DNA, 15 bp, Homo sapiens
tccttcccaaagtta

SEQ ID NO: 1295267 - DNA, 15 bp, Homo sapiens
ctccttcccaaagtt

SEQ ID NO: 1295268 - DNA, 15 bp, Homo sapiens
actccttcccaaagt

SEQ ID NO: 1295269 - DNA, 15 bp, Homo sapiens
cactccttcccaaag

SEQ ID NO: 1295270 - DNA, 15 bp, Homo sapiens
tcactccttcccaaa

SEQ ID NO: 1295271 - DNA, 15 bp, Homo sapiens
ctcactccttcccaa

SEQ ID NO: 1295272 - DNA, 15 bp, Homo sapiens
tctcactccttccca

SEQ ID NO: 1295273 - DNA, 15 bp, Homo sapiens
ctctcactccttccc

SEQ ID NO: 1295274 - DNA, 15 bp, Homo sapiens
actctcactccttcc

SEQ ID NO: 1295275 - DNA, 15 bp, Homo sapiens
cactctcactccttc

SEQ ID NO: 1295276 - DNA, 15 bp, Homo sapiens
acactctcactcctt

SEQ ID NO: 1295277 - DNA, 15 bp, Homo sapiens
cacactctcactcct

SEQ ID NO: 1295278 - DNA, 15 bp, Homo sapiens
ccacactctcactcc

SEQ ID NO: 1295279 - DNA, 15 bp, Homo sapiens
accacactctcactc

SEQ ID NO: 1295280 - DNA, 15 bp, Homo sapiens
gaccacactctcact

SEQ ID NO: 1295281 - DNA, 15 bp, Homo sapiens
ggaccacactctcac

SEQ ID NO: 1295282 - DNA, 15 bp, Homo sapiens
aggaccacactctca

SEQ ID NO: 1295283 - DNA, 15 bp, Homo sapiens
taggaccacactctc

SEQ ID NO: 1295284 - DNA, 15 bp, Homo sapiens
ttaggaccacactct

SEQ ID NO: 1295285 - DNA, 15 bp, Homo sapiens
tttaggaccacactc

SEQ ID NO: 1295286 - DNA, 15 bp, Homo sapiens
ttttaggaccacact

SEQ ID NO: 1295287 - DNA, 15 bp, Homo sapiens
attttaggaccacac

SEQ ID NO: 1295288 - DNA, 15 bp, Homo sapiens
gattttaggaccaca

SEQ ID NO: 1295289 - DNA, 15 bp, Homo sapiens
agattttaggaccac

SEQ ID NO: 1295290 - DNA, 15 bp, Homo sapiens
tagattttaggacca

SEQ ID NO: 1295291 - DNA, 15 bp, Homo sapiens
ctagattttaggacc

SEQ ID NO: 1295292 - DNA, 15 bp, Homo sapiens
actagattttaggac

SEQ ID NO: 1295293 - DNA, 15 bp, Homo sapiens
aactagattttagga

SEQ ID NO: 1295294 - DNA, 15 bp, Homo sapiens
aaactagattttagg

SEQ ID NO: 1295295 - DNA, 15 bp, Homo sapiens
taaactagattttag

SEQ ID NO: 1295296 - DNA, 15 bp, Homo sapiens
ttaaactagatttta

SEQ ID NO: 1295297 - DNA, 15 bp, Homo sapiens
cttaaactagatttt

SEQ ID NO: 1295298 - DNA, 15 bp, Homo sapiens
tcttaaactagattt

SEQ ID NO: 1295299 - DNA, 15 bp, Homo sapiens
ttcttaaactagatt

SEQ ID NO: 1295300 - DNA, 15 bp, Homo sapiens
cttcttaaactagat

SEQ ID NO: 1295301 - DNA, 15 bp, Homo sapiens
acttcttaaactaga

SEQ ID NO: 1295302 - DNA, 15 bp, Homo sapiens
tacttcttaaactag

SEQ ID NO: 1295303 - DNA, 15 bp, Homo sapiens
atacttcttaaacta

SEQ ID NO: 1295304 - DNA, 15 bp, Homo sapiens
aatacttcttaaact

SEQ ID NO: 1295305 - DNA, 15 bp, Homo sapiens
taatacttcttaaac

SEQ ID NO: 1295306 - DNA, 15 bp, Homo sapiens
ctaatacttcttaaa

SEQ ID NO: 1295307 - DNA, 15 bp, Homo sapiens
tctaatacttcttaa

SEQ ID NO: 1295308 - DNA, 15 bp, Homo sapiens
ttctaatacttctta

SEQ ID NO: 1295309 - DNA, 15 bp, Homo sapiens
attctaatacttctt

SEQ ID NO: 1295310 - DNA, 15 bp, Homo sapiens
cattctaatacttct

SEQ ID NO: 1295311 - DNA, 15 bp, Homo sapiens
tcattctaatacttc

SEQ ID NO: 1295312 - DNA, 15 bp, Homo sapiens
atcattctaatactt

SEQ ID NO: 1295313 - DNA, 15 bp, Homo sapiens
aatcattctaatact

SEQ ID NO: 1295314 - DNA, 15 bp, Homo sapiens
aaatcattctaatac

SEQ ID NO: 1295315 - DNA, 15 bp, Homo sapiens
taaatcattctaata

SEQ ID NO: 1295316 - DNA, 15 bp, Homo sapiens
ataaatcattctaat

SEQ ID NO: 1295317 - DNA, 15 bp, Homo sapiens
gataaatcattctaa

SEQ ID NO: 1295318 - DNA, 15 bp, Homo sapiens
tgataaatcattcta

SEQ ID NO: 1295319 - DNA, 15 bp, Homo sapiens
ttgataaatcattct

SEQ ID NO: 1295320 - DNA, 15 bp, Homo sapiens
cttgataaatcattc

SEQ ID NO: 1295321 - DNA, 15 bp, Homo sapiens
tcttgataaatcatt

SEQ ID NO: 1295322 - DNA, 15 bp, Homo sapiens
atcttgataaatcat

SEQ ID NO: 1295323 - DNA, 15 bp, Homo sapiens
tatcttgataaatca

SEQ ID NO: 1295324 - DNA, 15 bp, Homo sapiens
atatcttgataaatc

SEQ ID NO: 1295325 - DNA, 15 bp, Homo sapiens
tatatcttgataaat

SEQ ID NO: 1295326 - DNA, 15 bp, Homo sapiens
atatatcttgataaa

SEQ ID NO: 1295327 - DNA, 15 bp, Homo sapiens
gatatatcttgataa

SEQ ID NO: 1295328 - DNA, 15 bp, Homo sapiens
tgatatatcttgata

SEQ ID NO: 1295329 - DNA, 15 bp, Homo sapiens
atgatatatcttgat

SEQ ID NO: 1295330 - DNA, 15 bp, Homo sapiens
tatgatatatcttga

SEQ ID NO: 1295331 - DNA, 15 bp, Homo sapiens
ctatgatatatcttg

SEQ ID NO: 1295332 - DNA, 15 bp, Homo sapiens
actatgatatatctt

SEQ ID NO: 1295333 - DNA, 15 bp, Homo sapiens
aactatgatatatct

SEQ ID NO: 1295334 - DNA, 15 bp, Homo sapiens
aaactatgatatatc

SEQ ID NO: 1295335 - DNA, 15 bp, Homo sapiens
aaaactatgatatat

SEQ ID NO: 1295336 - DNA, 15 bp, Homo sapiens
aaaaactatgatata

SEQ ID NO: 1295337 - DNA, 15 bp, Homo sapiens
caaaaactatgatat

SEQ ID NO: 1295338 - DNA, 15 bp, Homo sapiens
gcaaaaactatgata

SEQ ID NO: 1295339 - DNA, 15 bp, Homo sapiens
tgcaaaaactatgat

SEQ ID NO: 1295340 - DNA, 15 bp, Homo sapiens
gtgcaaaaactatga

SEQ ID NO: 1295341 - DNA, 15 bp, Homo sapiens
agtgcaaaaactatg

SEQ ID NO: 1295342 - DNA, 15 bp, Homo sapiens
tagtgcaaaaactat

SEQ ID NO: 1295343 - DNA, 15 bp, Homo sapiens
atagtgcaaaaacta

SEQ ID NO: 1295344 - DNA, 15 bp, Homo sapiens
catagtgcaaaaact

SEQ ID NO: 1295345 - DNA, 15 bp, Homo sapiens
ccatagtgcaaaaac

SEQ ID NO: 1295346 - DNA, 15 bp, Homo sapiens
gccatagtgcaaaaa

SEQ ID NO: 1295347 - DNA, 15 bp, Homo sapiens
agccatagtgcaaaa

SEQ ID NO: 1295348 - DNA, 15 bp, Homo sapiens
aagccatagtgcaaa

SEQ ID NO: 1295349 - DNA, 15 bp, Homo sapiens
taagccatagtgcaa

SEQ ID NO: 1295350 - DNA, 15 bp, Homo sapiens
gtaagccatagtgca

SEQ ID NO: 1295351 - DNA, 15 bp, Homo sapiens
agtaagccatagtgc

SEQ ID NO: 1295352 - DNA, 15 bp, Homo sapiens
tagtaagccatagtg

SEQ ID NO: 1295353 - DNA, 15 bp, Homo sapiens
ttagtaagccatagt

SEQ ID NO: 1295354 - DNA, 15 bp, Homo sapiens
attagtaagccatag

SEQ ID NO: 1295355 - DNA, 15 bp, Homo sapiens
aattagtaagccata

SEQ ID NO: 1295356 - DNA, 15 bp, Homo sapiens
aaattagtaagccat

SEQ ID NO: 1295357 - DNA, 15 bp, Homo sapiens
gaaattagtaagcca

SEQ ID NO: 1295358 - DNA, 15 bp, Homo sapiens
tgaaattagtaagcc

SEQ ID NO: 1295359 - DNA, 15 bp, Homo sapiens
ttgaaattagtaagc

SEQ ID NO: 1295360 - DNA, 15 bp, Homo sapiens
gttgaaattagtaag

SEQ ID NO: 1295361 - DNA, 15 bp, Homo sapiens
tgttgaaattagtaa

SEQ ID NO: 1295362 - DNA, 15 bp, Homo sapiens
ttgttgaaattagta

SEQ ID NO: 1295363 - DNA, 15 bp, Homo sapiens
tttgttgaaattagt

SEQ ID NO: 1295364 - DNA, 15 bp, Homo sapiens
atttgttgaaattag

SEQ ID NO: 1295365 - DNA, 15 bp, Homo sapiens
tatttgttgaaatta

SEQ ID NO: 1295366 - DNA, 15 bp, Homo sapiens
atatttgttgaaatt

SEQ ID NO: 1295367 - DNA, 15 bp, Homo sapiens
tatatttgttgaaat

SEQ ID NO: 1295368 - DNA, 15 bp, Homo sapiens
gtatatttgttgaaa

SEQ ID NO: 1295369 - DNA, 15 bp, Homo sapiens
tgtatatttgttgaa

SEQ ID NO: 1295370 - DNA, 15 bp, Homo sapiens
ctgtatatttgttga

SEQ ID NO: 1295371 - DNA, 15 bp, Homo sapiens
actgtatatttgttg

SEQ ID NO: 1295372 - DNA, 15 bp, Homo sapiens
aactgtatatttgtt

SEQ ID NO: 1295373 - DNA, 15 bp, Homo sapiens
caactgtatatttgt

SEQ ID NO: 1295374 - DNA, 15 bp, Homo sapiens
tcaactgtatatttg

SEQ ID NO: 1295375 - DNA, 15 bp, Homo sapiens
gtcaactgtatattt

SEQ ID NO: 1295376 - DNA, 15 bp, Homo sapiens
agtcaactgtatatt

SEQ ID NO: 1295377 - DNA, 15 bp, Homo sapiens
gagtcaactgtatat

SEQ ID NO: 1295378 - DNA, 15 bp, Homo sapiens
agagtcaactgtata

SEQ ID NO: 1295379 - DNA, 15 bp, Homo sapiens
aagagtcaactgtat

SEQ ID NO: 1295380 - DNA, 15 bp, Homo sapiens
caagagtcaactgta

SEQ ID NO: 1295381 - DNA, 15 bp, Homo sapiens
tcaagagtcaactgt

SEQ ID NO: 1295382 - DNA, 15 bp, Homo sapiens
ttcaagagtcaactg

SEQ ID NO: 1295383 - DNA, 15 bp, Homo sapiens
gttcaagagtcaact

SEQ ID NO: 1295384 - DNA, 15 bp, Homo sapiens
tgttcaagagtcaac

SEQ ID NO: 1295385 - DNA, 15 bp, Homo sapiens
ttgttcaagagtcaa

SEQ ID NO: 1295386 - DNA, 15 bp, Homo sapiens
gttgttcaagagtca

SEQ ID NO: 1295387 - DNA, 15 bp, Homo sapiens
tgttgttcaagagtc

SEQ ID NO: 1295388 - DNA, 15 bp, Homo sapiens
ctgttgttcaagagt

SEQ ID NO: 1295389 - DNA, 15 bp, Homo sapiens
cctgttgttcaagag

SEQ ID NO: 1295390 - DNA, 15 bp, Homo sapiens
acctgttgttcaaga

SEQ ID NO: 1295391 - DNA, 15 bp, Homo sapiens
aacctgttgttcaag

SEQ ID NO: 1295392 - DNA, 15 bp, Homo sapiens
aaacctgttgttcaa

SEQ ID NO: 1295393 - DNA, 15 bp, Homo sapiens
caaacctgttgttca

SEQ ID NO: 1295394 - DNA, 15 bp, Homo sapiens
tcaaacctgttgttc

SEQ ID NO: 1295395 - DNA, 15 bp, Homo sapiens
ttcaaacctgttgtt

SEQ ID NO: 1295396 - DNA, 15 bp, Homo sapiens
attcaaacctgttgt

SEQ ID NO: 1295397 - DNA, 15 bp, Homo sapiens
aattcaaacctgttg

SEQ ID NO: 1295398 - DNA, 15 bp, Homo sapiens
caattcaaacctgtt

SEQ ID NO: 1295399 - DNA, 15 bp, Homo sapiens
gcaattcaaacctgt

SEQ ID NO: 1295400 - DNA, 15 bp, Homo sapiens
tgcaattcaaacctg

SEQ ID NO: 1295401 - DNA, 15 bp, Homo sapiens
atgcaattcaaacct

SEQ ID NO: 1295402 - DNA, 15 bp, Homo sapiens
catgcaattcaaacc

SEQ ID NO: 1295403 - DNA, 15 bp, Homo sapiens
ccatgcaattcaaac

SEQ ID NO: 1295404 - DNA, 15 bp, Homo sapiens
cccatgcaattcaaa

SEQ ID NO: 1295405 - DNA, 15 bp, Homo sapiens
acccatgcaattcaa

SEQ ID NO: 1295406 - DNA, 15 bp, Homo sapiens
gacccatgcaattca

SEQ ID NO: 1295407 - DNA, 15 bp, Homo sapiens
ggacccatgcaattc

SEQ ID NO: 1295408 - DNA, 15 bp, Homo sapiens
cggacccatgcaatt

SEQ ID NO: 1295409 - DNA, 15 bp, Homo sapiens
acggacccatgcaat

SEQ ID NO: 1295410 - DNA, 15 bp, Homo sapiens
aacggacccatgcaa

SEQ ID NO: 1295411 - DNA, 15 bp, Homo sapiens
aaacggacccatgca

SEQ ID NO: 1295412 - DNA, 15 bp, Homo sapiens
taaacggacccatgc

SEQ ID NO: 1295413 - DNA, 15 bp, Homo sapiens
ataaacggacccatg

SEQ ID NO: 1295414 - DNA, 15 bp, Homo sapiens
tataaacggacccat

SEQ ID NO: 1295415 - DNA, 15 bp, Homo sapiens
gtataaacggaccca

SEQ ID NO: 1295416 - DNA, 15 bp, Homo sapiens
tgtataaacggaccc

SEQ ID NO: 1295417 - DNA, 15 bp, Homo sapiens
gtgtataaacggacc

SEQ ID NO: 1295418 - DNA, 15 bp, Homo sapiens
tgtgtataaacggac

SEQ ID NO: 1295419 - DNA, 15 bp, Homo sapiens
ctgtgtataaacgga

SEQ ID NO: 1295420 - DNA, 15 bp, Homo sapiens
tctgtgtataaacgg

SEQ ID NO: 1295421 - DNA, 15 bp, Homo sapiens
atctgtgtataaacg

SEQ ID NO: 1295422 - DNA, 15 bp, Homo sapiens
tatctgtgtataaac

SEQ ID NO: 1295423 - DNA, 15 bp, Homo sapiens
atatctgtgtataaa

SEQ ID NO: 1295424 - DNA, 15 bp, Homo sapiens
tatatctgtgtataa

SEQ ID NO: 1295425 - DNA, 15 bp, Homo sapiens
atatatctgtgtata

SEQ ID NO: 1295426 - DNA, 15 bp, Homo sapiens
aatatatctgtgtat

SEQ ID NO: 1295427 - DNA, 15 bp, Homo sapiens
aaatatatctgtgta

SEQ ID NO: 1295428 - DNA, 15 bp, Homo sapiens
taaatatatctgtgt

SEQ ID NO: 1295429 - DNA, 15 bp, Homo sapiens
ttaaatatatctgtg

SEQ ID NO: 1295430 - DNA, 15 bp, Homo sapiens
attaaatatatctgt

SEQ ID NO: 1295431 - DNA, 15 bp, Homo sapiens
aattaaatatatctg

SEQ ID NO: 1295432 - DNA, 15 bp, Homo sapiens
taattaaatatatct

SEQ ID NO: 1295433 - DNA, 15 bp, Homo sapiens
gtaattaaatatatc

SEQ ID NO: 1295434 - DNA, 15 bp, Homo sapiens
tgtaattaaatatat

SEQ ID NO: 1295435 - DNA, 15 bp, Homo sapiens
atgtaattaaatata

SEQ ID NO: 1295436 - DNA, 15 bp, Homo sapiens
tatgtaattaaatat

SEQ ID NO: 1295437 - DNA, 15 bp, Homo sapiens
atatgtaattaaata

SEQ ID NO: 1295438 - DNA, 15 bp, Homo sapiens
tatatgtaattaaat

SEQ ID NO: 1295439 - DNA, 15 bp, Homo sapiens
atatatgtaattaaa

SEQ ID NO: 1295440 - DNA, 15 bp, Homo sapiens
aatatatgtaattaa

SEQ ID NO: 1295441 - DNA, 15 bp, Homo sapiens
taatatatgtaatta

SEQ ID NO: 1295442 - DNA, 15 bp, Homo sapiens
ctaatatatgtaatt

SEQ ID NO: 1295443 - DNA, 15 bp, Homo sapiens
tctaatatatgtaat

SEQ ID NO: 1295444 - DNA, 15 bp, Homo sapiens
ttctaatatatgtaa

SEQ ID NO: 1295445 - DNA, 15 bp, Homo sapiens
tttctaatatatgta

SEQ ID NO: 1295446 - DNA, 15 bp, Homo sapiens
ttttctaatatatgt

SEQ ID NO: 1295447 - DNA, 15 bp, Homo sapiens
tttttctaatatatg

SEQ ID NO: 1295448 - DNA, 15 bp, Homo sapiens
ttttttctaatatat

SEQ ID NO: 1295449 - DNA, 15 bp, Homo sapiens
attttttctaatata

SEQ ID NO: 1295450 - DNA, 15 bp, Homo sapiens
aattttttctaatat

SEQ ID NO: 1295451 - DNA, 15 bp, Homo sapiens
aaattttttctaata

SEQ ID NO: 1295452 - DNA, 15 bp, Homo sapiens
aaaattttttctaat

SEQ ID NO: 1295453 - DNA, 15 bp, Homo sapiens
caaaattttttctaa

SEQ ID NO: 1295454 - DNA, 15 bp, Homo sapiens
ccaaaattttttcta

SEQ ID NO: 1295455 - DNA, 15 bp, Homo sapiens
tccaaaattttttct

SEQ ID NO: 1295456 - DNA, 15 bp, Homo sapiens
ctccaaaattttttc

SEQ ID NO: 1295457 - DNA, 15 bp, Homo sapiens
tctccaaaatttttt

SEQ ID NO: 1295458 - DNA, 15 bp, Homo sapiens
atctccaaaattttt

SEQ ID NO: 1295459 - DNA, 15 bp, Homo sapiens
aatctccaaaatttt

SEQ ID NO: 1295460 - DNA, 15 bp, Homo sapiens
aaatctccaaaattt

SEQ ID NO: 1295461 - DNA, 15 bp, Homo sapiens
caaatctccaaaatt

SEQ ID NO: 1295462 - DNA, 15 bp, Homo sapiens
gcaaatctccaaaat

SEQ ID NO: 1295463 - DNA, 15 bp, Homo sapiens
tgcaaatctccaaaa

SEQ ID NO: 1295464 - DNA, 15 bp, Homo sapiens
ttgcaaatctccaaa

SEQ ID NO: 1295465 - DNA, 15 bp, Homo sapiens
attgcaaatctccaa

SEQ ID NO: 1295466 - DNA, 15 bp, Homo sapiens
tattgcaaatctcca

SEQ ID NO: 1295467 - DNA, 15 bp, Homo sapiens
ttattgcaaatctcc

SEQ ID NO: 1295468 - DNA, 15 bp, Homo sapiens
attattgcaaatctc

SEQ ID NO: 1295469 - DNA, 15 bp, Homo sapiens
aattattgcaaatct

SEQ ID NO: 1295470 - DNA, 15 bp, Homo sapiens
aaattattgcaaatc

SEQ ID NO: 1295471 - DNA, 15 bp, Homo sapiens
caaattattgcaaat

SEQ ID NO: 1295472 - DNA, 15 bp, Homo sapiens
tcaaattattgcaaa

SEQ ID NO: 1295473 - DNA, 15 bp, Homo sapiens
ttcaaattattgcaa

SEQ ID NO: 1295474 - DNA, 15 bp, Homo sapiens
tttcaaattattgca

SEQ ID NO: 1295475 - DNA, 15 bp, Homo sapiens
ttttcaaattattgc

SEQ ID NO: 1295476 - DNA, 15 bp, Homo sapiens
attttttcaaattat

SEQ ID NO: 1295477 - DNA, 15 bp, Homo sapiens
aattttttcaaatta

SEQ ID NO: 1295478 - DNA, 15 bp, Homo sapiens
aaattttttcaaatt

SEQ ID NO: 1295479 - DNA, 15 bp, Homo sapiens
caaattttttcaaat

SEQ ID NO: 1295480 - DNA, 15 bp, Homo sapiens
acaaattttttcaaa

SEQ ID NO: 1295481 - DNA, 15 bp, Homo sapiens
tacaaattttttcaa

SEQ ID NO: 1295482 - DNA, 15 bp, Homo sapiens
ctacaaattttttca

SEQ ID NO: 1295483 - DNA, 15 bp, Homo sapiens
gctacaaattttttc

SEQ ID NO: 1295484 - DNA, 15 bp, Homo sapiens
tgctacaaatttttt

SEQ ID NO: 1295485 - DNA, 15 bp, Homo sapiens
ttgctacaaattttt

SEQ ID NO: 1295486 - DNA, 15 bp, Homo sapiens
tttgctacaaatttt

SEQ ID NO: 1295487 - DNA, 15 bp, Homo sapiens
gtttgctacaaattt

SEQ ID NO: 1295488 - DNA, 15 bp, Homo sapiens
ggtttgctacaaatt

SEQ ID NO: 1295489 - DNA, 15 bp, Homo sapiens
cggtttgctacaaat

SEQ ID NO: 1295490 - DNA, 15 bp, Homo sapiens
acggtttgctacaaa

SEQ ID NO: 1295491 - DNA, 15 bp, Homo sapiens
cacggtttgctacaa

SEQ ID NO: 1295492 - DNA, 15 bp, Homo sapiens
acacggtttgctaca

SEQ ID NO: 1295493 - DNA, 15 bp, Homo sapiens
tacacggtttgctac

SEQ ID NO: 1295494 - DNA, 15 bp, Homo sapiens
ctacacggtttgcta

SEQ ID NO: 1295495 - DNA, 15 bp, Homo sapiens
gctacacggtttgct

SEQ ID NO: 1295496 - DNA, 15 bp, Homo sapiens
ggctacacggtttgc

SEQ ID NO: 1295497 - DNA, 15 bp, Homo sapiens
aggctacacggtttg

SEQ ID NO: 1295498 - DNA, 15 bp, Homo sapiens
taggctacacggttt

SEQ ID NO: 1295499 - DNA, 15 bp, Homo sapiens
gtaggctacacggtt

SEQ ID NO: 1295500 - DNA, 15 bp, Homo sapiens
tgtaggctacacggt

SEQ ID NO: 1295501 - DNA, 15 bp, Homo sapiens
ttgtaggctacacgg

SEQ ID NO: 1295502 - DNA, 15 bp, Homo sapiens
tttgtaggctacacg

SEQ ID NO: 1295503 - DNA, 15 bp, Homo sapiens
atttgtaggctacac

SEQ ID NO: 1295504 - DNA, 15 bp, Homo sapiens
tatttgtaggctaca

SEQ ID NO: 1295505 - DNA, 15 bp, Homo sapiens
gtatttgtaggctac

SEQ ID NO: 1295506 - DNA, 15 bp, Homo sapiens
tgtatttgtaggcta

SEQ ID NO: 1295507 - DNA, 15 bp, Homo sapiens
ctgtatttgtaggct

SEQ ID NO: 1295508 - DNA, 15 bp, Homo sapiens
tctgtatttgtaggc

SEQ ID NO: 1295509 - DNA, 15 bp, Homo sapiens
ttctgtatttgtagg

SEQ ID NO: 1295510 - DNA, 15 bp, Homo sapiens
tttctgtatttgtag

SEQ ID NO: 1295511 - DNA, 15 bp, Homo sapiens
ttttctgtatttgta

SEQ ID NO: 1295512 - DNA, 15 bp, Homo sapiens
tttttctgtatttgt

SEQ ID NO: 1295513 - DNA, 15 bp, Homo sapiens
ttttttctgtatttg

SEQ ID NO: 1295514 - DNA, 15 bp, Homo sapiens
attttttctgtattt

SEQ ID NO: 1295515 - DNA, 15 bp, Homo sapiens
aattttttctgtatt

SEQ ID NO: 1295516 - DNA, 15 bp, Homo sapiens
taattttttctgtat

SEQ ID NO: 1295517 - DNA, 15 bp, Homo sapiens
ttaattttttctgta

SEQ ID NO: 1295518 - DNA, 15 bp, Homo sapiens
cttaattttttctgt

SEQ ID NO: 1295519 - DNA, 15 bp, Homo sapiens
tcttaattttttctg

SEQ ID NO: 1295520 - DNA, 15 bp, Homo sapiens
ttcttaattttttct

SEQ ID NO: 1295521 - DNA, 15 bp, Homo sapiens
tttcttaattttttc

SEQ ID NO: 1295522 - DNA, 15 bp, Homo sapiens
ttttcttaatttttt

SEQ ID NO: 1295523 - DNA, 15 bp, Homo sapiens
tttttcttaattttt

SEQ ID NO: 1295524 - DNA, 15 bp, Homo sapiens
cctttttcttaattt

SEQ ID NO: 1295525 - DNA, 15 bp, Homo sapiens
gcctttttcttaatt

SEQ ID NO: 1295526 - DNA, 15 bp, Homo sapiens
tgcctttttcttaat

SEQ ID NO: 1295527 - DNA, 15 bp, Homo sapiens
atgcctttttcttaa

SEQ ID NO: 1295528 - DNA, 15 bp, Homo sapiens
catgcctttttctta

SEQ ID NO: 1295529 - DNA, 15 bp, Homo sapiens
acatgcctttttctt

SEQ ID NO: 1295530 - DNA, 15 bp, Homo sapiens
gacatgcctttttct

SEQ ID NO: 1295531 - DNA, 15 bp, Homo sapiens
agacatgcctttttc

SEQ ID NO: 1295532 - DNA, 15 bp, Homo sapiens
aagacatgccttttt

SEQ ID NO: 1295533 - DNA, 15 bp, Homo sapiens
caagacatgcctttt

SEQ ID NO: 1295534 - DNA, 15 bp, Homo sapiens
tcaagacatgccttt

SEQ ID NO: 1295535 - DNA, 15 bp, Homo sapiens
ttcaagacatgcctt

SEQ ID NO: 1295536 - DNA, 15 bp, Homo sapiens
attcaagacatgcct

SEQ ID NO: 1295537 - DNA, 15 bp, Homo sapiens
cattcaagacatgcc

SEQ ID NO: 1295538 - DNA, 15 bp, Homo sapiens
acattcaagacatgc

SEQ ID NO: 1295539 - DNA, 15 bp, Homo sapiens
tacattcaagacatg

SEQ ID NO: 1295540 - DNA, 15 bp, Homo sapiens
gtacattcaagacat

SEQ ID NO: 1295541 - DNA, 15 bp, Homo sapiens
tgtacattcaagaca

SEQ ID NO: 1295542 - DNA, 15 bp, Homo sapiens
ttgtacattcaagac

SEQ ID NO: 1295543 - DNA, 15 bp, Homo sapiens
tttgtacattcaaga

SEQ ID NO: 1295544 - DNA, 15 bp, Homo sapiens
ttttgtacattcaag

SEQ ID NO: 1295545 - DNA, 15 bp, Homo sapiens
attttgtacattcaa

SEQ ID NO: 1295546 - DNA, 15 bp, Homo sapiens
tattttgtacattca

SEQ ID NO: 1295547 - DNA, 15 bp, Homo sapiens
atattttgtacattc

SEQ ID NO: 1295548 - DNA, 15 bp, Homo sapiens
tatattttgtacatt

SEQ ID NO: 1295549 - DNA, 15 bp, Homo sapiens
atatattttgtacat

SEQ ID NO: 1295550 - DNA, 15 bp, Homo sapiens
catatattttgtaca

SEQ ID NO: 1295551 - DNA, 15 bp, Homo sapiens
acatatattttgtac

SEQ ID NO: 1295552 - DNA, 15 bp, Homo sapiens
tacatatattttgta

SEQ ID NO: 1295553 - DNA, 15 bp, Homo sapiens
ctacatatattttgt

SEQ ID NO: 1295554 - DNA, 15 bp, Homo sapiens
tctacatatattttg

SEQ ID NO: 1295555 - DNA, 15 bp, Homo sapiens
atctacatatatttt

SEQ ID NO: 1295556 - DNA, 15 bp, Homo sapiens
tatctacatatattt

SEQ ID NO: 1295557 - DNA, 15 bp, Homo sapiens
gtatctacatatatt

SEQ ID NO: 1295558 - DNA, 15 bp, Homo sapiens
agtatctacatatat

SEQ ID NO: 1295559 - DNA, 15 bp, Homo sapiens
tagtatctacatata

SEQ ID NO: 1295560 - DNA, 15 bp, Homo sapiens
ctagtatctacatat

SEQ ID NO: 1295561 - DNA, 15 bp, Homo sapiens
actagtatctacata

SEQ ID NO: 1295562 - DNA, 15 bp, Homo sapiens
gactagtatctacat

SEQ ID NO: 1295563 - DNA, 15 bp, Homo sapiens
agactagtatctaca

SEQ ID NO: 1295564 - DNA, 15 bp, Homo sapiens
tagactagtatctac

SEQ ID NO: 1295565 - DNA, 15 bp, Homo sapiens
atagactagtatcta

SEQ ID NO: 1295566 - DNA, 15 bp, Homo sapiens
aatagactagtatct

SEQ ID NO: 1295567 - DNA, 15 bp, Homo sapiens
aaatagactagtatc

SEQ ID NO: 1295568 - DNA, 15 bp, Homo sapiens
aaaatagactagtat

SEQ ID NO: 1295569 - DNA, 15 bp, Homo sapiens
taaaatagactagta

SEQ ID NO: 1295570 - DNA, 15 bp, Homo sapiens
ataaaatagactagt

SEQ ID NO: 1295571 - DNA, 15 bp, Homo sapiens
gataaaatagactag

SEQ ID NO: 1295572 - DNA, 15 bp, Homo sapiens
tgataaaatagacta

SEQ ID NO: 1295573 - DNA, 15 bp, Homo sapiens
atgataaaatagact

SEQ ID NO: 1295574 - DNA, 15 bp, Homo sapiens
aatgataaaatagac

SEQ ID NO: 1295575 - DNA, 15 bp, Homo sapiens
aaatgataaaataga

SEQ ID NO: 1295576 - DNA, 15 bp, Homo sapiens
taaatgataaaatag

SEQ ID NO: 1295577 - DNA, 15 bp, Homo sapiens
gtaaatgataaaata

SEQ ID NO: 1295578 - DNA, 15 bp, Homo sapiens
agtaaatgataaaat

SEQ ID NO: 1295579 - DNA, 15 bp, Homo sapiens
tagtaaatgataaaa

SEQ ID NO: 1295580 - DNA, 15 bp, Homo sapiens
atagtaaatgataaa

SEQ ID NO: 1295581 - DNA, 15 bp, Homo sapiens
tatagtaaatgataa

SEQ ID NO: 1295582 - DNA, 15 bp, Homo sapiens
gtatagtaaatgata

SEQ ID NO: 1295583 - DNA, 15 bp, Homo sapiens
ggtatagtaaatgat

SEQ ID NO: 1295584 - DNA, 15 bp, Homo sapiens
tggtatagtaaatga

SEQ ID NO: 1295585 - DNA, 15 bp, Homo sapiens
atggtatagtaaatg

SEQ ID NO: 1295586 - DNA, 15 bp, Homo sapiens
tatggtatagtaaat

SEQ ID NO: 1295587 - DNA, 15 bp, Homo sapiens
ttatggtatagtaaa

SEQ ID NO: 1295588 - DNA, 15 bp, Homo sapiens
tttatggtatagtaa

SEQ ID NO: 1295589 - DNA, 15 bp, Homo sapiens
ttttatggtatagta

SEQ ID NO: 1295590 - DNA, 15 bp, Homo sapiens
attttatggtatagt

SEQ ID NO: 1295591 - DNA, 15 bp, Homo sapiens
tattttatggtatag

SEQ ID NO: 1295592 - DNA, 15 bp, Homo sapiens
gtattttatggtata

SEQ ID NO: 1295593 - DNA, 15 bp, Homo sapiens
tgtattttatggtat

SEQ ID NO: 1295594 - DNA, 15 bp, Homo sapiens
atgtattttatggta

SEQ ID NO: 1295595 - DNA, 15 bp, Homo sapiens
tatgtattttatggt

SEQ ID NO: 1295596 - DNA, 15 bp, Homo sapiens
gtatgtattttatgg

SEQ ID NO: 1295597 - DNA, 15 bp, Homo sapiens
tgtatgtattttatg

SEQ ID NO: 1295598 - DNA, 15 bp, Homo sapiens
ttgtatgtattttat

SEQ ID NO: 1295599 - DNA, 15 bp, Homo sapiens
tttgtatgtatttta

SEQ ID NO: 1295600 - DNA, 15 bp, Homo sapiens
gttttgtatgtattt

SEQ ID NO: 1295601 - DNA, 15 bp, Homo sapiens
agttttgtatgtatt

SEQ ID NO: 1295602 - DNA, 15 bp, Homo sapiens
cagttttgtatgtat

SEQ ID NO: 1295603 - DNA, 15 bp, Homo sapiens
acagttttgtatgta

SEQ ID NO: 1295604 - DNA, 15 bp, Homo sapiens
tacagttttgtatgt

SEQ ID NO: 1295605 - DNA, 15 bp, Homo sapiens
ctacagttttgtatg

SEQ ID NO: 1295606 - DNA, 15 bp, Homo sapiens
gctacagttttgtat

SEQ ID NO: 1295607 - DNA, 15 bp, Homo sapiens
agctacagttttgta

SEQ ID NO: 1295608 - DNA, 15 bp, Homo sapiens
cagctacagttttgt

SEQ ID NO: 1295609 - DNA, 15 bp, Homo sapiens
gcagctacagttttg

SEQ ID NO: 1295610 - DNA, 15 bp, Homo sapiens
tgcagctacagtttt

SEQ ID NO: 1295611 - DNA, 15 bp, Homo sapiens
ctgcagctacagttt

SEQ ID NO: 1295612 - DNA, 15 bp, Homo sapiens
tctgcagctacagtt

SEQ ID NO: 1295613 - DNA, 15 bp, Homo sapiens
atctgcagctacagt

SEQ ID NO: 1295614 - DNA, 15 bp, Homo sapiens
catctgcagctacag

SEQ ID NO: 1295615 - DNA, 15 bp, Homo sapiens
gcatctgcagctaca

SEQ ID NO: 1295616 - DNA, 15 bp, Homo sapiens
ggcatctgcagctac

SEQ ID NO: 1295617 - DNA, 15 bp, Homo sapiens
aggcatctgcagcta

SEQ ID NO: 1295618 - DNA, 15 bp, Homo sapiens
caggcatctgcagct

SEQ ID NO: 1295619 - DNA, 15 bp, Homo sapiens
gcaggcatctgcagc

SEQ ID NO: 1295620 - DNA, 15 bp, Homo sapiens
agcaggcatctgcag

SEQ ID NO: 1295621 - DNA, 15 bp, Homo sapiens
cagcaggcatctgca

SEQ ID NO: 1295622 - DNA, 15 bp, Homo sapiens
acagcaggcatctgc

SEQ ID NO: 1295623 - DNA, 15 bp, Homo sapiens
aacagcaggcatctg

SEQ ID NO: 1295624 - DNA, 15 bp, Homo sapiens
aaacagcaggcatct

SEQ ID NO: 1295625 - DNA, 15 bp, Homo sapiens
gaaacagcaggcatc

SEQ ID NO: 1295626 - DNA, 15 bp, Homo sapiens
tgaaacagcaggcat

SEQ ID NO: 1295627 - DNA, 15 bp, Homo sapiens
ctgaaacagcaggca

SEQ ID NO: 1295628 - DNA, 15 bp, Homo sapiens
cctgaaacagcaggc

SEQ ID NO: 1295629 - DNA, 15 bp, Homo sapiens
gcctgaaacagcagg

SEQ ID NO: 1295630 - DNA, 15 bp, Homo sapiens
cgcctgaaacagcag

SEQ ID NO: 1295631 - DNA, 15 bp, Homo sapiens
ccgcctgaaacagca

SEQ ID NO: 1295632 - DNA, 15 bp, Homo sapiens
tccgcctgaaacagc

SEQ ID NO: 1295633 - DNA, 15 bp, Homo sapiens
gtccgcctgaaacag

SEQ ID NO: 1295634 - DNA, 15 bp, Homo sapiens
cgtccgcctgaaaca

SEQ ID NO: 1295635 - DNA, 15 bp, Homo sapiens
tcgtccgcctgaaac

SEQ ID NO: 1295636 - DNA, 15 bp, Homo sapiens
atcgtccgcctgaaa

SEQ ID NO: 1295637 - DNA, 15 bp, Homo sapiens
aatcgtccgcctgaa

SEQ ID NO: 1295638 - DNA, 15 bp, Homo sapiens
aaatcgtccgcctga

SEQ ID NO: 1295639 - DNA, 15 bp, Homo sapiens
aaaatcgtccgcctg

SEQ ID NO: 1295640 - DNA, 15 bp, Homo sapiens
aaaaatcgtccgcct

SEQ ID NO: 1295641 - DNA, 15 bp, Homo sapiens
caaaaatcgtccgcc

SEQ ID NO: 1295642 - DNA, 15 bp, Homo sapiens
acaaaaatcgtccgc

SEQ ID NO: 1295643 - DNA, 15 bp, Homo sapiens
aacaaaaatcgtccg

SEQ ID NO: 1295644 - DNA, 15 bp, Homo sapiens
taacaaaaatcgtcc

SEQ ID NO: 1295645 - DNA, 15 bp, Homo sapiens
ttaacaaaaatcgtc

SEQ ID NO: 1295646 - DNA, 15 bp, Homo sapiens
gttaacaaaaatcgt

SEQ ID NO: 1295647 - DNA, 15 bp, Homo sapiens
tgttaacaaaaatcg

SEQ ID NO: 1295648 - DNA, 15 bp, Homo sapiens
ctgttaacaaaaatc

SEQ ID NO: 1295649 - DNA, 15 bp, Homo sapiens
tctgttaacaaaaat

SEQ ID NO: 1295650 - DNA, 15 bp, Homo sapiens
atctgttaacaaaaa

SEQ ID NO: 1295651 - DNA, 15 bp, Homo sapiens
catctgttaacaaaa

SEQ ID NO: 1295652 - DNA, 15 bp, Homo sapiens
tcatctgttaacaaa

SEQ ID NO: 1295653 - DNA, 15 bp, Homo sapiens
gtcatctgttaacaa

SEQ ID NO: 1295654 - DNA, 15 bp, Homo sapiens
tgtcatctgttaaca

SEQ ID NO: 1295655 - DNA, 15 bp, Homo sapiens
atgtcatctgttaac

SEQ ID NO: 1295656 - DNA, 15 bp, Homo sapiens
tatgtcatctgttaa

SEQ ID NO: 1295657 - DNA, 15 bp, Homo sapiens
ttatgtcatctgtta

SEQ ID NO: 1295658 - DNA, 15 bp, Homo sapiens
tttatgtcatctgtt

SEQ ID NO: 1295659 - DNA, 15 bp, Homo sapiens
gtttatgtcatctgt

SEQ ID NO: 1295660 - DNA, 15 bp, Homo sapiens
agtttatgtcatctg

SEQ ID NO: 1295661 - DNA, 15 bp, Homo sapiens
aagtttatgtcatct

SEQ ID NO: 1295662 - DNA, 15 bp, Homo sapiens
taagtttatgtcatc

SEQ ID NO: 1295663 - DNA, 15 bp, Homo sapiens
gtaagtttatgtcat

SEQ ID NO: 1295664 - DNA, 15 bp, Homo sapiens
agtaagtttatgtca

SEQ ID NO: 1295665 - DNA, 15 bp, Homo sapiens
cagtaagtttatgtc

SEQ ID NO: 1295666 - DNA, 15 bp, Homo sapiens
acagtaagtttatgt

SEQ ID NO: 1295667 - DNA, 15 bp, Homo sapiens
tacagtaagtttatg

SEQ ID NO: 1295668 - DNA, 15 bp, Homo sapiens
ttacagtaagtttat

SEQ ID NO: 1295669 - DNA, 15 bp, Homo sapiens
tttacagtaagttta

SEQ ID NO: 1295670 - DNA, 15 bp, Homo sapiens
atttacagtaagttt

SEQ ID NO: 1295671 - DNA, 15 bp, Homo sapiens
catttacagtaagtt

SEQ ID NO: 1295672 - DNA, 15 bp, Homo sapiens
acatttacagtaagt

SEQ ID NO: 1295673 - DNA, 15 bp, Homo sapiens
tacatttacagtaag

SEQ ID NO: 1295674 - DNA, 15 bp, Homo sapiens
atacatttacagtaa

SEQ ID NO: 1295675 - DNA, 15 bp, Homo sapiens
aatacatttacagta

SEQ ID NO: 1295676 - DNA, 15 bp, Homo sapiens
aaatacatttacagt

SEQ ID NO: 1295677 - DNA, 15 bp, Homo sapiens
aaaatacatttacag

SEQ ID NO: 1295678 - DNA, 15 bp, Homo sapiens
caaaatacatttaca

SEQ ID NO: 1295679 - DNA, 15 bp, Homo sapiens
acaaaatacatttac

SEQ ID NO: 1295680 - DNA, 15 bp, Homo sapiens
gacaaaatacattta

SEQ ID NO: 1295681 - DNA, 15 bp, Homo sapiens
agacaaaatacattt

SEQ ID NO: 1295682 - DNA, 15 bp, Homo sapiens
aagacaaaatacatt

SEQ ID NO: 1295683 - DNA, 15 bp, Homo sapiens
gaagacaaaatacat

SEQ ID NO: 1295684 - DNA, 15 bp, Homo sapiens
agaagacaaaataca

SEQ ID NO: 1295685 - DNA, 15 bp, Homo sapiens
aagaagacaaaatac

SEQ ID NO: 1295686 - DNA, 15 bp, Homo sapiens
taagaagacaaaata

SEQ ID NO: 1295687 - DNA, 15 bp, Homo sapiens
gtaagaagacaaaat

SEQ ID NO: 1295688 - DNA, 15 bp, Homo sapiens
tgtaagaagacaaaa

SEQ ID NO: 1295689 - DNA, 15 bp, Homo sapiens
ttgtaagaagacaaa

SEQ ID NO: 1295690 - DNA, 15 bp, Homo sapiens
attgtaagaagacaa

SEQ ID NO: 1295691 - DNA, 15 bp, Homo sapiens
aattgtaagaagaca

SEQ ID NO: 1295692 - DNA, 15 bp, Homo sapiens
aaattgtaagaagac

SEQ ID NO: 1295693 - DNA, 15 bp, Homo sapiens
aaaattgtaagaaga

SEQ ID NO: 1295694 - DNA, 15 bp, Homo sapiens
gaaaattgtaagaag

SEQ ID NO: 1295695 - DNA, 15 bp, Homo sapiens
ggaaaattgtaagaa

SEQ ID NO: 1295696 - DNA, 15 bp, Homo sapiens
aggaaaattgtaaga

SEQ ID NO: 1295697 - DNA, 15 bp, Homo sapiens
taggaaaattgtaag

SEQ ID NO: 1295698 - DNA, 15 bp, Homo sapiens
ttaggaaaattgtaa

SEQ ID NO: 1295699 - DNA, 15 bp, Homo sapiens
attaggaaaattgta

SEQ ID NO: 1295700 - DNA, 15 bp, Homo sapiens
tattaggaaaattgt

SEQ ID NO: 1295701 - DNA, 15 bp, Homo sapiens
atattaggaaaattg

SEQ ID NO: 1295702 - DNA, 15 bp, Homo sapiens
aatattaggaaaatt

SEQ ID NO: 1295703 - DNA, 15 bp, Homo sapiens
aaatattaggaaaat

SEQ ID NO: 1295704 - DNA, 15 bp, Homo sapiens
aaaatattaggaaaa

SEQ ID NO: 1295705 - DNA, 15 bp, Homo sapiens
gaaaatattaggaaa

SEQ ID NO: 1295706 - DNA, 15 bp, Homo sapiens
agaaaatattaggaa

SEQ ID NO: 1295707 - DNA, 15 bp, Homo sapiens
aagaaaatattagga

SEQ ID NO: 1295708 - DNA, 15 bp, Homo sapiens
aaagaaaatattagg

SEQ ID NO: 1295709 - DNA, 15 bp, Homo sapiens
aaaagaaaatattag

SEQ ID NO: 1295710 - DNA, 15 bp, Homo sapiens
gaaaagaaaatatta

SEQ ID NO: 1295711 - DNA, 15 bp, Homo sapiens
agaaaagaaaatatt

SEQ ID NO: 1295712 - DNA, 15 bp, Homo sapiens
gagaaaagaaaatat

SEQ ID NO: 1295713 - DNA, 15 bp, Homo sapiens
agagaaaagaaaata

SEQ ID NO: 1295714 - DNA, 15 bp, Homo sapiens
tagagaaaagaaaat

SEQ ID NO: 1295715 - DNA, 15 bp, Homo sapiens
atagagaaaagaaaa

SEQ ID NO: 1295716 - DNA, 15 bp, Homo sapiens
gatagagaaaagaaa

SEQ ID NO: 1295717 - DNA, 15 bp, Homo sapiens
agatagagaaaagaa

SEQ ID NO: 1295718 - DNA, 15 bp, Homo sapiens
aagatagagaaaaga

SEQ ID NO: 1295719 - DNA, 15 bp, Homo sapiens
aaagatagagaaaag

SEQ ID NO: 1295720 - DNA, 15 bp, Homo sapiens
taaagatagagaaaa

SEQ ID NO: 1295721 - DNA, 15 bp, Homo sapiens
ataaagatagagaaa

SEQ ID NO: 1295722 - DNA, 15 bp, Homo sapiens
gataaagatagagaa

SEQ ID NO: 1295723 - DNA, 15 bp, Homo sapiens
tgataaagatagaga

SEQ ID NO: 1295724 - DNA, 15 bp, Homo sapiens
atgataaagatagag

SEQ ID NO: 1295725 - DNA, 15 bp, Homo sapiens
tatgataaagataga

SEQ ID NO: 1295726 - DNA, 15 bp, Homo sapiens
ttatgataaagatag

SEQ ID NO: 1295727 - DNA, 15 bp, Homo sapiens
cttatgataaagata

SEQ ID NO: 1295728 - DNA, 15 bp, Homo sapiens
tcttatgataaagat

SEQ ID NO: 1295729 - DNA, 15 bp, Homo sapiens
ttcttatgataaaga

SEQ ID NO: 1295730 - DNA, 15 bp, Homo sapiens
cttcttatgataaag

SEQ ID NO: 1295731 - DNA, 15 bp, Homo sapiens
tcttcttatgataaa

SEQ ID NO: 1295732 - DNA, 15 bp, Homo sapiens
atcttcttatgataa

SEQ ID NO: 1295733 - DNA, 15 bp, Homo sapiens
catcttcttatgata

SEQ ID NO: 1295734 - DNA, 15 bp, Homo sapiens
tcatcttcttatgat

SEQ ID NO: 1295735 - DNA, 15 bp, Homo sapiens
atcatcttcttatga

SEQ ID NO: 1295736 - DNA, 15 bp, Homo sapiens
tatcatcttcttatg

SEQ ID NO: 1295737 - DNA, 15 bp, Homo sapiens
atatcatcttcttat

SEQ ID NO: 1295738 - DNA, 15 bp, Homo sapiens
tatatcatcttctta

SEQ ID NO: 1295739 - DNA, 15 bp, Homo sapiens
atatatcatcttctt

SEQ ID NO: 1295740 - DNA, 15 bp, Homo sapiens
aatatatcatcttct

SEQ ID NO: 1295741 - DNA, 15 bp, Homo sapiens
aaatatatcatcttc

SEQ ID NO: 1295742 - DNA, 15 bp, Homo sapiens
taaatatatcatctt

SEQ ID NO: 1295743 - DNA, 15 bp, Homo sapiens
ctaaatatatcatct

SEQ ID NO: 1295744 - DNA, 15 bp, Homo sapiens
actaaatatatcatc

SEQ ID NO: 1295745 - DNA, 15 bp, Homo sapiens
tactaaatatatcat

SEQ ID NO: 1295746 - DNA, 15 bp, Homo sapiens
atactaaatatatca

SEQ ID NO: 1295747 - DNA, 15 bp, Homo sapiens
catactaaatatatc

SEQ ID NO: 1295748 - DNA, 15 bp, Homo sapiens
acatactaaatatat

SEQ ID NO: 1295749 - DNA, 15 bp, Homo sapiens
tacatactaaatata

SEQ ID NO: 1295750 - DNA, 15 bp, Homo sapiens
atacatactaaatat

SEQ ID NO: 1295751 - DNA, 15 bp, Homo sapiens
tatacatactaaata

SEQ ID NO: 1295752 - DNA, 15 bp, Homo sapiens
atatacatactaaat

SEQ ID NO: 1295753 - DNA, 15 bp, Homo sapiens
tatatacatactaaa

SEQ ID NO: 1295754 - DNA, 15 bp, Homo sapiens
atatatacatactaa

SEQ ID NO: 1295755 - DNA, 15 bp, Homo sapiens
tatatatacatacta

SEQ ID NO: 1295756 - DNA, 15 bp, Homo sapiens
ctatatatacatact

SEQ ID NO: 1295757 - DNA, 15 bp, Homo sapiens
actatatatacatac

SEQ ID NO: 1295758 - DNA, 15 bp, Homo sapiens
tactatatatacata

SEQ ID NO: 1295759 - DNA, 15 bp, Homo sapiens
gtactatatatacat

SEQ ID NO: 1295760 - DNA, 15 bp, Homo sapiens
tgtactatatataca

SEQ ID NO: 1295761 - DNA, 15 bp, Homo sapiens
atgtactatatatac

SEQ ID NO: 1295762 - DNA, 15 bp, Homo sapiens
tatgtactatatata

SEQ ID NO: 1295763 - DNA, 15 bp, Homo sapiens
atatgtactatatat

SEQ ID NO: 1295764 - DNA, 15 bp, Homo sapiens
tatatgtactatata

SEQ ID NO: 1295765 - DNA, 15 bp, Homo sapiens
gtatatgtactatat

SEQ ID NO: 1295766 - DNA, 15 bp, Homo sapiens
tgtatatgtactata

SEQ ID NO: 1295767 - DNA, 15 bp, Homo sapiens
ttgtatatgtactat

SEQ ID NO: 1295768 - DNA, 15 bp, Homo sapiens
tttgtatatgtacta

SEQ ID NO: 1295769 - DNA, 15 bp, Homo sapiens
ttttgtatatgtact

SEQ ID NO: 1295770 - DNA, 15 bp, Homo sapiens
attttgtatatgtac

SEQ ID NO: 1295771 - DNA, 15 bp, Homo sapiens
tattttgtatatgta

SEQ ID NO: 1295772 - DNA, 15 bp, Homo sapiens
atattttgtatatgt

SEQ ID NO: 1295773 - DNA, 15 bp, Homo sapiens
tatattttgtatatg

SEQ ID NO: 1295774 - DNA, 15 bp, Homo sapiens
atatattttgtatat

SEQ ID NO: 1295775 - DNA, 15 bp, Homo sapiens
catatattttgtata

SEQ ID NO: 1295776 - DNA, 15 bp, Homo sapiens
acatatattttgtat

SEQ ID NO: 1295777 - DNA, 15 bp, Homo sapiens
cacatatattttgta

SEQ ID NO: 1295778 - DNA, 15 bp, Homo sapiens
tcacatatattttgt

SEQ ID NO: 1295779 - DNA, 15 bp, Homo sapiens
ttcacatatattttg

SEQ ID NO: 1295780 - DNA, 15 bp, Homo sapiens
attcacatatatttt

SEQ ID NO: 1295781 - DNA, 15 bp, Homo sapiens
aattcacatatattt

SEQ ID NO: 1295782 - DNA, 15 bp, Homo sapiens
gaattcacatatatt

SEQ ID NO: 1295783 - DNA, 15 bp, Homo sapiens
tgaattcacatatat

SEQ ID NO: 1295784 - DNA, 15 bp, Homo sapiens
ttgaattcacatata

SEQ ID NO: 1295785 - DNA, 15 bp, Homo sapiens
attgaattcacatat

SEQ ID NO: 1295786 - DNA, 15 bp, Homo sapiens
gattgaattcacata

SEQ ID NO: 1295787 - DNA, 15 bp, Homo sapiens
agattgaattcacat

SEQ ID NO: 1295788 - DNA, 15 bp, Homo sapiens
aagattgaattcaca

SEQ ID NO: 1295789 - DNA, 15 bp, Homo sapiens
aaagattgaattcac

SEQ ID NO: 1295790 - DNA, 15 bp, Homo sapiens
taaagattgaattca

SEQ ID NO: 1295791 - DNA, 15 bp, Homo sapiens
ataaagattgaattc

SEQ ID NO: 1295792 - DNA, 15 bp, Homo sapiens
cataaagattgaatt

SEQ ID NO: 1295793 - DNA, 15 bp, Homo sapiens
acataaagattgaat

SEQ ID NO: 1295794 - DNA, 15 bp, Homo sapiens
aacataaagattgaa

SEQ ID NO: 1295795 - DNA, 15 bp, Homo sapiens
taacataaagattga

SEQ ID NO: 1295796 - DNA, 15 bp, Homo sapiens
ataacataaagattg

SEQ ID NO: 1295797 - DNA, 15 bp, Homo sapiens
aataacataaagatt

SEQ ID NO: 1295798 - DNA, 15 bp, Homo sapiens
caataacataaagat

SEQ ID NO: 1295799 - DNA, 15 bp, Homo sapiens
ccaataacataaaga

SEQ ID NO: 1295800 - DNA, 15 bp, Homo sapiens
accaataacataaag

SEQ ID NO: 1295801 - DNA, 15 bp, Homo sapiens
aaccaataacataaa

SEQ ID NO: 1295802 - DNA, 15 bp, Homo sapiens
caaccaataacataa

SEQ ID NO: 1295803 - DNA, 15 bp, Homo sapiens
ccaaccaataacata

SEQ ID NO: 1295804 - DNA, 15 bp, Homo sapiens
gccaaccaataacat

SEQ ID NO: 1295805 - DNA, 15 bp, Homo sapiens
agccaaccaataaca

SEQ ID NO: 1295806 - DNA, 15 bp, Homo sapiens
aagccaaccaataac

SEQ ID NO: 1295807 - DNA, 15 bp, Homo sapiens
gaagccaaccaataa

SEQ ID NO: 1295808 - DNA, 15 bp, Homo sapiens
ggaagccaaccaata

SEQ ID NO: 1295809 - DNA, 15 bp, Homo sapiens
tggaagccaaccaat

SEQ ID NO: 1295810 - DNA, 15 bp, Homo sapiens
ctggaagccaaccaa

SEQ ID NO: 1295811 - DNA, 15 bp, Homo sapiens
actggaagccaacca

SEQ ID NO: 1295812 - DNA, 15 bp, Homo sapiens
gactggaagccaacc

SEQ ID NO: 1295813 - DNA, 15 bp, Homo sapiens
tgactggaagccaac

SEQ ID NO: 1295814 - DNA, 15 bp, Homo sapiens
ttgactggaagccaa

SEQ ID NO: 1295815 - DNA, 15 bp, Homo sapiens
gttgactggaagcca

SEQ ID NO: 1295816 - DNA, 15 bp, Homo sapiens
tgttgactggaagcc

SEQ ID NO: 1295817 - DNA, 15 bp, Homo sapiens
ctgttgactggaagc

SEQ ID NO: 1295818 - DNA, 15 bp, Homo sapiens
actgttgactggaag

SEQ ID NO: 1295819 - DNA, 15 bp, Homo sapiens
tactgttgactggaa

SEQ ID NO: 1295820 - DNA, 15 bp, Homo sapiens
ctactgttgactgga

SEQ ID NO: 1295821 - DNA, 15 bp, Homo sapiens
cctactgttgactgg

SEQ ID NO: 1295822 - DNA, 15 bp, Homo sapiens
gcctactgttgactg

SEQ ID NO: 1295823 - DNA, 15 bp, Homo sapiens
agcctactgttgact

SEQ ID NO: 1295824 - DNA, 15 bp, Homo sapiens
cagcctactgttgac

SEQ ID NO: 1295825 - DNA, 15 bp, Homo sapiens
acagcctactgttga

SEQ ID NO: 1295826 - DNA, 15 bp, Homo sapiens
aacagcctactgttg

SEQ ID NO: 1295827 - DNA, 15 bp, Homo sapiens
taacagcctactgtt

SEQ ID NO: 1295828 - DNA, 15 bp, Homo sapiens
ctaacagcctactgt

SEQ ID NO: 1295829 - DNA, 15 bp, Homo sapiens
actaacagcctactg

SEQ ID NO: 1295830 - DNA, 15 bp, Homo sapiens
aactaacagcctact

SEQ ID NO: 1295831 - DNA, 15 bp, Homo sapiens
taactaacagcctac

SEQ ID NO: 1295832 - DNA, 15 bp, Homo sapiens
ttaactaacagccta

SEQ ID NO: 1295833 - DNA, 15 bp, Homo sapiens
tttaactaacagcct

SEQ ID NO: 1295834 - DNA, 15 bp, Homo sapiens
atttaactaacagcc

SEQ ID NO: 1295835 - DNA, 15 bp, Homo sapiens
aatttaactaacagc

SEQ ID NO: 1295836 - DNA, 15 bp, Homo sapiens
aaatttaactaacag

SEQ ID NO: 1295837 - DNA, 15 bp, Homo sapiens
aaaatttaactaaca

SEQ ID NO: 1295838 - DNA, 15 bp, Homo sapiens
caaaatttaactaac

SEQ ID NO: 1295839 - DNA, 15 bp, Homo sapiens
ccaaaatttaactaa

SEQ ID NO: 1295840 - DNA, 15 bp, Homo sapiens
cccaaaatttaacta

SEQ ID NO: 1295841 - DNA, 15 bp, Homo sapiens
acccaaaatttaact

SEQ ID NO: 1295842 - DNA, 15 bp, Homo sapiens
tacccaaaatttaac

SEQ ID NO: 1295843 - DNA, 15 bp, Homo sapiens
gtacccaaaatttaa

SEQ ID NO: 1295844 - DNA, 15 bp, Homo sapiens
agtacccaaaattta

SEQ ID NO: 1295845 - DNA, 15 bp, Homo sapiens
gagtacccaaaattt

SEQ ID NO: 1295846 - DNA, 15 bp, Homo sapiens
tgagtacccaaaatt

SEQ ID NO: 1295847 - DNA, 15 bp, Homo sapiens
ttgagtacccaaaat

SEQ ID NO: 1295848 - DNA, 15 bp, Homo sapiens
tttgagtacccaaaa

SEQ ID NO: 1295849 - DNA, 15 bp, Homo sapiens
ttttgagtacccaaa

SEQ ID NO: 1295850 - DNA, 15 bp, Homo sapiens
cttttgagtacccaa

SEQ ID NO: 1295851 - DNA, 15 bp, Homo sapiens
acttttgagtaccca

SEQ ID NO: 1295852 - DNA, 15 bp, Homo sapiens
tacttttgagtaccc

SEQ ID NO: 1295853 - DNA, 15 bp, Homo sapiens
ttacttttgagtacc

SEQ ID NO: 1295854 - DNA, 15 bp, Homo sapiens
attacttttgagtac

SEQ ID NO: 1295855 - DNA, 15 bp, Homo sapiens
gattacttttgagta

SEQ ID NO: 1295856 - DNA, 15 bp, Homo sapiens
cgattacttttgagt

SEQ ID NO: 1295857 - DNA, 15 bp, Homo sapiens
tcgattacttttgag

SEQ ID NO: 1295858 - DNA, 15 bp, Homo sapiens
atcgattacttttga

SEQ ID NO: 1295859 - DNA, 15 bp, Homo sapiens
tatcgattacttttg

SEQ ID NO: 1295860 - DNA, 15 bp, Homo sapiens
ctatcgattactttt

SEQ ID NO: 1295861 - DNA, 15 bp, Homo sapiens
cctatcgattacttt

SEQ ID NO: 1295862 - DNA, 15 bp, Homo sapiens
acctatcgattactt

SEQ ID NO: 1295863 - DNA, 15 bp, Homo sapiens
gacctatcgattact

SEQ ID NO: 1295864 - DNA, 15 bp, Homo sapiens
agacctatcgattac

SEQ ID NO: 1295865 - DNA, 15 bp, Homo sapiens
cagacctatcgatta

SEQ ID NO: 1295866 - DNA, 15 bp, Homo sapiens
acagacctatcgatt

SEQ ID NO: 1295867 - DNA, 15 bp, Homo sapiens
tacagacctatcgat

SEQ ID NO: 1295868 - DNA, 15 bp, Homo sapiens
ctacagacctatcga

SEQ ID NO: 1295869 - DNA, 15 bp, Homo sapiens
actacagacctatcg

SEQ ID NO: 1295870 - DNA, 15 bp, Homo sapiens
gactacagacctatc

SEQ ID NO: 1295871 - DNA, 15 bp, Homo sapiens
agactacagacctat

SEQ ID NO: 1295872 - DNA, 15 bp, Homo sapiens
gagactacagaccta

SEQ ID NO: 1295873 - DNA, 15 bp, Homo sapiens
tgagactacagacct

SEQ ID NO: 1295874 - DNA, 15 bp, Homo sapiens
ctgagactacagacc

SEQ ID NO: 1295875 - DNA, 15 bp, Homo sapiens
tccacctcagcctcc

SEQ ID NO: 1295876 - DNA, 15 bp, Homo sapiens
ttccacctcagcctc

SEQ ID NO: 1295877 - DNA, 15 bp, Homo sapiens
cttccacctcagcct

SEQ ID NO: 1295878 - DNA, 15 bp, Homo sapiens
ccttccacctcagcc

SEQ ID NO: 1295879 - DNA, 15 bp, Homo sapiens
tccttccacctcagc

SEQ ID NO: 1295880 - DNA, 15 bp, Homo sapiens
atccttccacctcag

SEQ ID NO: 1295881 - DNA, 15 bp, Homo sapiens
catccttccacctca

SEQ ID NO: 1295882 - DNA, 15 bp, Homo sapiens
ccatccttccacctc

SEQ ID NO: 1295883 - DNA, 15 bp, Homo sapiens
gccatccttccacct

SEQ ID NO: 1295884 - DNA, 15 bp, Homo sapiens
agccatccttccacc

SEQ ID NO: 1295885 - DNA, 15 bp, Homo sapiens
aagccatccttccac

SEQ ID NO: 1295886 - DNA, 15 bp, Homo sapiens
caagccatccttcca

SEQ ID NO: 1295887 - DNA, 15 bp, Homo sapiens
tcaagccatccttcc

SEQ ID NO: 1295888 - DNA, 15 bp, Homo sapiens
ctcaagccatccttc

SEQ ID NO: 1295889 - DNA, 15 bp, Homo sapiens
gctcaagccatcctt

SEQ ID NO: 1295890 - DNA, 15 bp, Homo sapiens
ttgggctcaagccat

SEQ ID NO: 1295891 - DNA, 15 bp, Homo sapiens
cttgggctcaagcca

SEQ ID NO: 1295892 - DNA, 15 bp, Homo sapiens
gcttgggctcaagcc

SEQ ID NO: 1295893 - DNA, 15 bp, Homo sapiens
tgcttgggctcaagc

SEQ ID NO: 1295894 - DNA, 15 bp, Homo sapiens
atgcttgggctcaag

SEQ ID NO: 1295895 - DNA, 15 bp, Homo sapiens
aatgcttgggctcaa

SEQ ID NO: 1295896 - DNA, 15 bp, Homo sapiens
aaatgcttgggctca

SEQ ID NO: 1295897 - DNA, 15 bp, Homo sapiens
caaatgcttgggctc

SEQ ID NO: 1295898 - DNA, 15 bp, Homo sapiens
tcaaatgcttgggct

SEQ ID NO: 1295899 - DNA, 15 bp, Homo sapiens
ttcaaatgcttgggc

SEQ ID NO: 1295900 - DNA, 15 bp, Homo sapiens
cttcaaatgcttggg

SEQ ID NO: 1295901 - DNA, 15 bp, Homo sapiens
gcttcaaatgcttgg

SEQ ID NO: 1295902 - DNA, 15 bp, Homo sapiens
agcttcaaatgcttg

SEQ ID NO: 1295903 - DNA, 15 bp, Homo sapiens
cagcttcaaatgctt

SEQ ID NO: 1295904 - DNA, 15 bp, Homo sapiens
acagcttcaaatgct

SEQ ID NO: 1295905 - DNA, 15 bp, Homo sapiens
tacagcttcaaatgc

SEQ ID NO: 1295906 - DNA, 15 bp, Homo sapiens
ttacagcttcaaatg

SEQ ID NO: 1295907 - DNA, 15 bp, Homo sapiens
attacagcttcaaat

SEQ ID NO: 1295908 - DNA, 15 bp, Homo sapiens
cattacagcttcaaa

SEQ ID NO: 1295909 - DNA, 15 bp, Homo sapiens
gcattacagcttcaa

SEQ ID NO: 1295910 - DNA, 15 bp, Homo sapiens
tgcattacagcttca

SEQ ID NO: 1295911 - DNA, 15 bp, Homo sapiens
atgcattacagcttc

SEQ ID NO: 1295912 - DNA, 15 bp, Homo sapiens
catgcattacagctt

SEQ ID NO: 1295913 - DNA, 15 bp, Homo sapiens
acatgcattacagct

SEQ ID NO: 1295914 - DNA, 15 bp, Homo sapiens
cacatgcattacagc

SEQ ID NO: 1295915 - DNA, 15 bp, Homo sapiens
tcacatgcattacag

SEQ ID NO: 1295916 - DNA, 15 bp, Homo sapiens
atcacatgcattaca

SEQ ID NO: 1295917 - DNA, 15 bp, Homo sapiens
aatcacatgcattac

SEQ ID NO: 1295918 - DNA, 15 bp, Homo sapiens
caatcacatgcatta

SEQ ID NO: 1295919 - DNA, 15 bp, Homo sapiens
gcaatcacatgcatt

SEQ ID NO: 1295920 - DNA, 15 bp, Homo sapiens
tgcaatcacatgcat

SEQ ID NO: 1295921 - DNA, 15 bp, Homo sapiens
gtgcaatcacatgca

SEQ ID NO: 1295922 - DNA, 15 bp, Homo sapiens
ggtgcaatcacatgc

SEQ ID NO: 1295923 - DNA, 15 bp, Homo sapiens
aggtgcaatcacatg

SEQ ID NO: 1295924 - DNA, 15 bp, Homo sapiens
caggtgcaatcacat

SEQ ID NO: 1295925 - DNA, 15 bp, Homo sapiens
acaggtgcaatcaca

SEQ ID NO: 1295926 - DNA, 15 bp, Homo sapiens
cacaggtgcaatcac

SEQ ID NO: 1295927 - DNA, 15 bp, Homo sapiens
tcacaggtgcaatca

SEQ ID NO: 1295928 - DNA, 15 bp, Homo sapiens
ttcacaggtgcaatc

SEQ ID NO: 1295929 - DNA, 15 bp, Homo sapiens
attcacaggtgcaat

SEQ ID NO: 1295930 - DNA, 15 bp, Homo sapiens
tattcacaggtgcaa

SEQ ID NO: 1295931 - DNA, 15 bp, Homo sapiens
ctattcacaggtgca

SEQ ID NO: 1295932 - DNA, 15 bp, Homo sapiens
gctattcacaggtgc

SEQ ID NO: 1295933 - DNA, 15 bp, Homo sapiens
ggctattcacaggtg

SEQ ID NO: 1295934 - DNA, 15 bp, Homo sapiens
tggctattcacaggt

SEQ ID NO: 1295935 - DNA, 15 bp, Homo sapiens
gtggctattcacagg

SEQ ID NO: 1295936 - DNA, 15 bp, Homo sapiens
agtggctattcacag

SEQ ID NO: 1295937 - DNA, 15 bp, Homo sapiens
tagtggctattcaca

SEQ ID NO: 1295938 - DNA, 15 bp, Homo sapiens
aagtgtagtggctat

SEQ ID NO: 1295939 - DNA, 15 bp, Homo sapiens
gaagtgtagtggcta

SEQ ID NO: 1295940 - DNA, 15 bp, Homo sapiens
tgaagtgtagtggct

SEQ ID NO: 1295941 - DNA, 15 bp, Homo sapiens
ctgaagtgtagtggc

SEQ ID NO: 1295942 - DNA, 15 bp, Homo sapiens
gctgaagtgtagtgg

SEQ ID NO: 1295943 - DNA, 15 bp, Homo sapiens
ggctgaagtgtagtg

SEQ ID NO: 1295944 - DNA, 15 bp, Homo sapiens
aggctgaagtgtagt

SEQ ID NO: 1295945 - DNA, 15 bp, Homo sapiens
taggctgaagtgtag

SEQ ID NO: 1295946 - DNA, 15 bp, Homo sapiens
ctaggctgaagtgta

SEQ ID NO: 1295947 - DNA, 15 bp, Homo sapiens
cctaggctgaagtgt

SEQ ID NO: 1295948 - DNA, 15 bp, Homo sapiens
gcctaggctgaagtg

SEQ ID NO: 1295949 - DNA, 15 bp, Homo sapiens
tgcctaggctgaagt

SEQ ID NO: 1295950 - DNA, 15 bp, Homo sapiens
ttgcctaggctgaag

SEQ ID NO: 1295951 - DNA, 15 bp, Homo sapiens
attgcctaggctgaa

SEQ ID NO: 1295952 - DNA, 15 bp, Homo sapiens
tattgcctaggctga

SEQ ID NO: 1295953 - DNA, 15 bp, Homo sapiens
tctatattgcctagg

SEQ ID NO: 1295954 - DNA, 15 bp, Homo sapiens
ctctatattgcctag

SEQ ID NO: 1295955 - DNA, 15 bp, Homo sapiens
tctctatattgccta

SEQ ID NO: 1295956 - DNA, 15 bp, Homo sapiens
ctctctatattgcct

SEQ ID NO: 1295957 - DNA, 15 bp, Homo sapiens
tctctctatattgcc

SEQ ID NO: 1295958 - DNA, 15 bp, Homo sapiens
gtctctctatattgc

SEQ ID NO: 1295959 - DNA, 15 bp, Homo sapiens
ggtctctctatattg

SEQ ID NO: 1295960 - DNA, 15 bp, Homo sapiens
gggtctctctatatt

SEQ ID NO: 1295961 - DNA, 15 bp, Homo sapiens
ggggtctctctatat

SEQ ID NO: 1295962 - DNA, 15 bp, Homo sapiens
aggggtctctctata

SEQ ID NO: 1295963 - DNA, 15 bp, Homo sapiens
aaggggtctctctat

SEQ ID NO: 1295964 - DNA, 15 bp, Homo sapiens
gaaggggtctctcta

SEQ ID NO: 1295965 - DNA, 15 bp, Homo sapiens
agaaggggtctctct

SEQ ID NO: 1295966 - DNA, 15 bp, Homo sapiens
gagaaggggtctctc

SEQ ID NO: 1295967 - DNA, 15 bp, Homo sapiens
agagaaggggtctct

SEQ ID NO: 1295968 - DNA, 15 bp, Homo sapiens
tagagaaggggtctc

SEQ ID NO: 1295969 - DNA, 15 bp, Homo sapiens
ttagagaaggggtct

SEQ ID NO: 1295970 - DNA, 15 bp, Homo sapiens
cttagagaaggggtc

SEQ ID NO: 1295971 - DNA, 15 bp, Homo sapiens
tcttagagaaggggt

SEQ ID NO: 1295972 - DNA, 15 bp, Homo sapiens
ttcttagagaagggg

SEQ ID NO: 1295973 - DNA, 15 bp, Homo sapiens
tttcttagagaaggg

SEQ ID NO: 1295974 - DNA, 15 bp, Homo sapiens
ttttcttagagaagg

SEQ ID NO: 1295975 - DNA, 15 bp, Homo sapiens
attttcttagagaag

SEQ ID NO: 1295976 - DNA, 15 bp, Homo sapiens
tattttcttagagaa

SEQ ID NO: 1295977 - DNA, 15 bp, Homo sapiens
ttattttcttagaga

SEQ ID NO: 1295978 - DNA, 15 bp, Homo sapiens
attattttcttagag

SEQ ID NO: 1295979 - DNA, 15 bp, Homo sapiens
tattattttcttaga

SEQ ID NO: 1295980 - DNA, 15 bp, Homo sapiens
ttattattttcttag

SEQ ID NO: 1295981 - DNA, 15 bp, Homo sapiens
tttattattttctta

SEQ ID NO: 1295982 - DNA, 15 bp, Homo sapiens
ttttattattttctt

SEQ ID NO: 1295983 - DNA, 15 bp, Homo sapiens
tttttattattttct

SEQ ID NO: 1295984 - DNA, 15 bp, Homo sapiens
ttttttattattttc

SEQ ID NO: 1295985 - DNA, 15 bp, Homo sapiens
attttttattatttt

SEQ ID NO: 1295986 - DNA, 15 bp, Homo sapiens
tattttttattattt

SEQ ID NO: 1295987 - DNA, 15 bp, Homo sapiens
ttattttttattatt

SEQ ID NO: 1295988 - DNA, 15 bp, Homo sapiens
tttttattttttatt

SEQ ID NO: 1295989 - DNA, 15 bp, Homo sapiens
ttttttattttttat

SEQ ID NO: 1295990 - DNA, 15 bp, Homo sapiens
cttttttatttttta

SEQ ID NO: 1295991 - DNA, 15 bp, Homo sapiens
acttttttatttttt

SEQ ID NO: 1295992 - DNA, 15 bp, Homo sapiens
aacttttttattttt

SEQ ID NO: 1295993 - DNA, 15 bp, Homo sapiens
ataacttttttattt

SEQ ID NO: 1295994 - DNA, 15 bp, Homo sapiens
tataacttttttatt

SEQ ID NO: 1295995 - DNA, 15 bp, Homo sapiens
gtataacttttttat

SEQ ID NO: 1295996 - DNA, 15 bp, Homo sapiens
tgtataactttttta

SEQ ID NO: 1295997 - DNA, 15 bp, Homo sapiens
gtgtataactttttt

SEQ ID NO: 1295998 - DNA, 15 bp, Homo sapiens
tgtgtataacttttt

SEQ ID NO: 1295999 - DNA, 15 bp, Homo sapiens
ctgtgtataactttt

SEQ ID NO: 1296000 - DNA, 15 bp, Homo sapiens
tctgtgtataacttt

SEQ ID NO: 1296001 - DNA, 15 bp, Homo sapiens
atctgtgtataactt

SEQ ID NO: 1296002 - DNA, 15 bp, Homo sapiens
aatctgtgtataact

SEQ ID NO: 1296003 - DNA, 15 bp, Homo sapiens
aaatctgtgtataac

SEQ ID NO: 1296004 - DNA, 15 bp, Homo sapiens
aaaatctgtgtataa

SEQ ID NO: 1296005 - DNA, 15 bp, Homo sapiens
aaaaatctgtgtata

SEQ ID NO: 1296006 - DNA, 15 bp, Homo sapiens
aaaaaatctgtgtat

SEQ ID NO: 1296007 - DNA, 15 bp, Homo sapiens
taaaaaatctgtgta

SEQ ID NO: 1296008 - DNA, 15 bp, Homo sapiens
gtaaaaaatctgtgt

SEQ ID NO: 1296009 - DNA, 15 bp, Homo sapiens
agtaaaaaatctgtg

SEQ ID NO: 1296010 - DNA, 15 bp, Homo sapiens
cagtaaaaaatctgt

SEQ ID NO: 1296011 - DNA, 15 bp, Homo sapiens
gcagtaaaaaatctg

SEQ ID NO: 1296012 - DNA, 15 bp, Homo sapiens
tgcagtaaaaaatct

SEQ ID NO: 1296013 - DNA, 15 bp, Homo sapiens
atgcagtaaaaaatc

SEQ ID NO: 1296014 - DNA, 15 bp, Homo sapiens
catgcagtaaaaaat

SEQ ID NO: 1296015 - DNA, 15 bp, Homo sapiens
ccatgcagtaaaaaa

SEQ ID NO: 1296016 - DNA, 15 bp, Homo sapiens
cccatgcagtaaaaa

SEQ ID NO: 1296017 - DNA, 15 bp, Homo sapiens
ccccatgcagtaaaa

SEQ ID NO: 1296018 - DNA, 15 bp, Homo sapiens
cccccatgcagtaaa

SEQ ID NO: 1296019 - DNA, 15 bp, Homo sapiens
tcccccatgcagtaa

SEQ ID NO: 1296020 - DNA, 15 bp, Homo sapiens
atcccccatgcagta

SEQ ID NO: 1296021 - DNA, 15 bp, Homo sapiens
aatcccccatgcagt

SEQ ID NO: 1296022 - DNA, 15 bp, Homo sapiens
caatcccccatgcag

SEQ ID NO: 1296023 - DNA, 15 bp, Homo sapiens
tcaatcccccatgca

SEQ ID NO: 1296024 - DNA, 15 bp, Homo sapiens
gtcaatcccccatgc

SEQ ID NO: 1296025 - DNA, 15 bp, Homo sapiens
tgtcaatcccccatg

SEQ ID NO: 1296026 - DNA, 15 bp, Homo sapiens
gtgtcaatcccccat

SEQ ID NO: 1296027 - DNA, 15 bp, Homo sapiens
ggtgtcaatccccca

SEQ ID NO: 1296028 - DNA, 15 bp, Homo sapiens
aggtgtcaatccccc

SEQ ID NO: 1296029 - DNA, 15 bp, Homo sapiens
gaggtgtcaatcccc

SEQ ID NO: 1296030 - DNA, 15 bp, Homo sapiens
agaggtgtcaatccc

SEQ ID NO: 1296031 - DNA, 15 bp, Homo sapiens
tagaggtgtcaatcc

SEQ ID NO: 1296032 - DNA, 15 bp, Homo sapiens
ttagaggtgtcaatc

SEQ ID NO: 1296033 - DNA, 15 bp, Homo sapiens
gttagaggtgtcaat

SEQ ID NO: 1296034 - DNA, 15 bp, Homo sapiens
agttagaggtgtcaa

SEQ ID NO: 1296035 - DNA, 15 bp, Homo sapiens
aagttagaggtgtca

SEQ ID NO: 1296036 - DNA, 15 bp, Homo sapiens
taagttagaggtgtc

SEQ ID NO: 1296037 - DNA, 15 bp, Homo sapiens
gtaagttagaggtgt

SEQ ID NO: 1296038 - DNA, 15 bp, Homo sapiens
ggtaagttagaggtg

SEQ ID NO: 1296039 - DNA, 15 bp, Homo sapiens
gggtaagttagaggt

SEQ ID NO: 1296040 - DNA, 15 bp, Homo sapiens
agggtaagttagagg

SEQ ID NO: 1296041 - DNA, 15 bp, Homo sapiens
cagggtaagttagag

SEQ ID NO: 1296042 - DNA, 15 bp, Homo sapiens
gcagggtaagttaga

SEQ ID NO: 1296043 - DNA, 15 bp, Homo sapiens
tgcagggtaagttag

SEQ ID NO: 1296044 - DNA, 15 bp, Homo sapiens
atgcagggtaagtta

SEQ ID NO: 1296045 - DNA, 15 bp, Homo sapiens
aatgcagggtaagtt

SEQ ID NO: 1296046 - DNA, 15 bp, Homo sapiens
caatgcagggtaagt

SEQ ID NO: 1296047 - DNA, 15 bp, Homo sapiens
acaatgcagggtaag

SEQ ID NO: 1296048 - DNA, 15 bp, Homo sapiens
aacaatgcagggtaa

SEQ ID NO: 1296049 - DNA, 15 bp, Homo sapiens
gaacaatgcagggta

SEQ ID NO: 1296050 - DNA, 15 bp, Homo sapiens
tgaacaatgcagggt

SEQ ID NO: 1296051 - DNA, 15 bp, Homo sapiens
ttgaacaatgcaggg

SEQ ID NO: 1296052 - DNA, 15 bp, Homo sapiens
cttgaacaatgcagg

SEQ ID NO: 1296053 - DNA, 15 bp, Homo sapiens
tcttgaacaatgcag

SEQ ID NO: 1296054 - DNA, 15 bp, Homo sapiens
ctcttgaacaatgca

SEQ ID NO: 1296055 - DNA, 15 bp, Homo sapiens
actcttgaacaatgc

SEQ ID NO: 1296056 - DNA, 15 bp, Homo sapiens
gactcttgaacaatg

SEQ ID NO: 1296057 - DNA, 15 bp, Homo sapiens
tgactcttgaacaat

SEQ ID NO: 1296058 - DNA, 15 bp, Homo sapiens
ttgactcttgaacaa

SEQ ID NO: 1296059 - DNA, 15 bp, Homo sapiens
cttgactcttgaaca

SEQ ID NO: 1296060 - DNA, 15 bp, Homo sapiens
tcttgactcttgaac

SEQ ID NO: 1296061 - DNA, 15 bp, Homo sapiens
ctcttgactcttgaa

SEQ ID NO: 1296062 - DNA, 15 bp, Homo sapiens
tctcttgactcttga

SEQ ID NO: 1296063 - DNA, 15 bp, Homo sapiens
atctcttgactcttg

SEQ ID NO: 1296064 - DNA, 15 bp, Homo sapiens
aatctcttgactctt

SEQ ID NO: 1296065 - DNA, 15 bp, Homo sapiens
taatctcttgactct

SEQ ID NO: 1296066 - DNA, 15 bp, Homo sapiens
ctaatctcttgactc

SEQ ID NO: 1296067 - DNA, 15 bp, Homo sapiens
tctaatctcttgact

SEQ ID NO: 1296068 - DNA, 15 bp, Homo sapiens
atctaatctcttgac

SEQ ID NO: 1296069 - DNA, 15 bp, Homo sapiens
aatctaatctcttga

SEQ ID NO: 1296070 - DNA, 15 bp, Homo sapiens
aaatctaatctcttg

SEQ ID NO: 1296071 - DNA, 15 bp, Homo sapiens
aaaatctaatctctt

SEQ ID NO: 1296072 - DNA, 15 bp, Homo sapiens
caaaatctaatctct

SEQ ID NO: 1296073 - DNA, 15 bp, Homo sapiens
acaaaatctaatctc

SEQ ID NO: 1296074 - DNA, 15 bp, Homo sapiens
aacaaaatctaatct

SEQ ID NO: 1296075 - DNA, 15 bp, Homo sapiens
aaacaaaatctaatc

SEQ ID NO: 1296076 - DNA, 15 bp, Homo sapiens
aaaacaaaatctaat

SEQ ID NO: 1296077 - DNA, 15 bp, Homo sapiens
taaaacaaaatctaa

SEQ ID NO: 1296078 - DNA, 15 bp, Homo sapiens
atttaaaacaaaatc

SEQ ID NO: 1296079 - DNA, 15 bp, Homo sapiens
aatttaaaacaaaat

SEQ ID NO: 1296080 - DNA, 15 bp, Homo sapiens
aaatttaaaacaaaa

SEQ ID NO: 1296081 - DNA, 15 bp, Homo sapiens
aaaatttaaaacaaa

SEQ ID NO: 1296082 - DNA, 15 bp, Homo sapiens
taaaatttaaaacaa

SEQ ID NO: 1296083 - DNA, 15 bp, Homo sapiens
ttaaaatttaaaaca

SEQ ID NO: 1296084 - DNA, 15 bp, Homo sapiens
attaaaatttaaaac

SEQ ID NO: 1296085 - DNA, 15 bp, Homo sapiens
cattaaaatttaaaa

SEQ ID NO: 1296086 - DNA, 15 bp, Homo sapiens
tcattaaaatttaaa

SEQ ID NO: 1296087 - DNA, 15 bp, Homo sapiens
atcattaaaatttaa

SEQ ID NO: 1296088 - DNA, 15 bp, Homo sapiens
gatcattaaaattta

SEQ ID NO: 1296089 - DNA, 15 bp, Homo sapiens
tgatcattaaaattt

SEQ ID NO: 1296090 - DNA, 15 bp, Homo sapiens
atgatcattaaaatt

SEQ ID NO: 1296091 - DNA, 15 bp, Homo sapiens
catgatcattaaaat

SEQ ID NO: 1296092 - DNA, 15 bp, Homo sapiens
acatgatcattaaaa

SEQ ID NO: 1296093 - DNA, 15 bp, Homo sapiens
aacatgatcattaaa

SEQ ID NO: 1296094 - DNA, 15 bp, Homo sapiens
caacatgatcattaa

SEQ ID NO: 1296095 - DNA, 15 bp, Homo sapiens
acaacatgatcatta

SEQ ID NO: 1296096 - DNA, 15 bp, Homo sapiens
tacaacatgatcatt

SEQ ID NO: 1296097 - DNA, 15 bp, Homo sapiens
ttacaacatgatcat

SEQ ID NO: 1296098 - DNA, 15 bp, Homo sapiens
gttacaacatgatca

SEQ ID NO: 1296099 - DNA, 15 bp, Homo sapiens
agttacaacatgatc

SEQ ID NO: 1296100 - DNA, 15 bp, Homo sapiens
aagttacaacatgat

SEQ ID NO: 1296101 - DNA, 15 bp, Homo sapiens
gaagttacaacatga

SEQ ID NO: 1296102 - DNA, 15 bp, Homo sapiens
tgaagttacaacatg

SEQ ID NO: 1296103 - DNA, 15 bp, Homo sapiens
atgaagttacaacat

SEQ ID NO: 1296104 - DNA, 15 bp, Homo sapiens
gatgaagttacaaca

SEQ ID NO: 1296105 - DNA, 15 bp, Homo sapiens
agatgaagttacaac

SEQ ID NO: 1296106 - DNA, 15 bp, Homo sapiens
aagatgaagttacaa

SEQ ID NO: 1296107 - DNA, 15 bp, Homo sapiens
aaagatgaagttaca

SEQ ID NO: 1296108 - DNA, 15 bp, Homo sapiens
aaaagatgaagttac

SEQ ID NO: 1296109 - DNA, 15 bp, Homo sapiens
aaaaagatgaagtta

SEQ ID NO: 1296110 - DNA, 15 bp, Homo sapiens
gaaaaagatgaagtt

SEQ ID NO: 1296111 - DNA, 15 bp, Homo sapiens
tgaaaaagatgaagt

SEQ ID NO: 1296112 - DNA, 15 bp, Homo sapiens
ctgaaaaagatgaag

SEQ ID NO: 1296113 - DNA, 15 bp, Homo sapiens
cctgaaaaagatgaa

SEQ ID NO: 1296114 - DNA, 15 bp, Homo sapiens
acctgaaaaagatga

SEQ ID NO: 1296115 - DNA, 15 bp, Homo sapiens
cacctgaaaaagatg

SEQ ID NO: 1296116 - DNA, 15 bp, Homo sapiens
tcacctgaaaaagat

SEQ ID NO: 1296117 - DNA, 15 bp, Homo sapiens
ttcacctgaaaaaga

SEQ ID NO: 1296118 - DNA, 15 bp, Homo sapiens
tttcacctgaaaaag

SEQ ID NO: 1296119 - DNA, 15 bp, Homo sapiens
ttttcacctgaaaaa

SEQ ID NO: 1296120 - DNA, 15 bp, Homo sapiens
tttttcacctgaaaa

SEQ ID NO: 1296121 - DNA, 15 bp, Homo sapiens
atttttcacctgaaa

SEQ ID NO: 1296122 - DNA, 15 bp, Homo sapiens
catttttcacctgaa

SEQ ID NO: 1296123 - DNA, 15 bp, Homo sapiens
acatttttcacctga

SEQ ID NO: 1296124 - DNA, 15 bp, Homo sapiens
aacatttttcacctg

SEQ ID NO: 1296125 - DNA, 15 bp, Homo sapiens
aaacatttttcacct

SEQ ID NO: 1296126 - DNA, 15 bp, Homo sapiens
taaacatttttcacc

SEQ ID NO: 1296127 - DNA, 15 bp, Homo sapiens
ataaacatttttcac

SEQ ID NO: 1296128 - DNA, 15 bp, Homo sapiens
aataaacatttttca

SEQ ID NO: 1296129 - DNA, 15 bp, Homo sapiens
aaataaacatttttc

SEQ ID NO: 1296130 - DNA, 15 bp, Homo sapiens
gaaataaacattttt

SEQ ID NO: 1296131 - DNA, 15 bp, Homo sapiens
tgaaataaacatttt

SEQ ID NO: 1296132 - DNA, 15 bp, Homo sapiens
ttgaaataaacattt

SEQ ID NO: 1296133 - DNA, 15 bp, Homo sapiens
tttgaaataaacatt

SEQ ID NO: 1296134 - DNA, 15 bp, Homo sapiens
ttttgaaataaacat

SEQ ID NO: 1296135 - DNA, 15 bp, Homo sapiens
tttttgaaataaaca

SEQ ID NO: 1296136 - DNA, 15 bp, Homo sapiens
atttttgaaataaac

SEQ ID NO: 1296137 - DNA, 15 bp, Homo sapiens
aatttttgaaataaa

SEQ ID NO: 1296138 - DNA, 15 bp, Homo sapiens
aaatttttgaaataa

SEQ ID NO: 1296139 - DNA, 15 bp, Homo sapiens
aaaatttttgaaata

SEQ ID NO: 1296140 - DNA, 15 bp, Homo sapiens
taaaatttttgaaat

SEQ ID NO: 1296141 - DNA, 15 bp, Homo sapiens
ataaaatttttgaaa

SEQ ID NO: 1296142 - DNA, 15 bp, Homo sapiens
tataaaatttttgaa

SEQ ID NO: 1296143 - DNA, 15 bp, Homo sapiens
gtataaaatttttga

SEQ ID NO: 1296144 - DNA, 15 bp, Homo sapiens
ggtataaaatttttg

SEQ ID NO: 1296145 - DNA, 15 bp, Homo sapiens
aggtataaaattttt

SEQ ID NO: 1296146 - DNA, 15 bp, Homo sapiens
aaggtataaaatttt

SEQ ID NO: 1296147 - DNA, 15 bp, Homo sapiens
aaaggtataaaattt

SEQ ID NO: 1296148 - DNA, 15 bp, Homo sapiens
aaaaggtataaaatt

SEQ ID NO: 1296149 - DNA, 15 bp, Homo sapiens
ataaaaggtataaaa

SEQ ID NO: 1296150 - DNA, 15 bp, Homo sapiens
cataaaaggtataaa

SEQ ID NO: 1296151 - DNA, 15 bp, Homo sapiens
tcataaaaggtataa

SEQ ID NO: 1296152 - DNA, 15 bp, Homo sapiens
ttcataaaaggtata

SEQ ID NO: 1296153 - DNA, 15 bp, Homo sapiens
attcataaaaggtat

SEQ ID NO: 1296154 - DNA, 15 bp, Homo sapiens
aattcataaaaggta

SEQ ID NO: 1296155 - DNA, 15 bp, Homo sapiens
gaattcataaaaggt

SEQ ID NO: 1296156 - DNA, 15 bp, Homo sapiens
agaattcataaaagg

SEQ ID NO: 1296157 - DNA, 15 bp, Homo sapiens
gagaattcataaaag

SEQ ID NO: 1296158 - DNA, 15 bp, Homo sapiens
agagaattcataaaa

SEQ ID NO: 1296159 - DNA, 15 bp, Homo sapiens
aagagaattcataaa

SEQ ID NO: 1296160 - DNA, 15 bp, Homo sapiens
caagagaattcataa

SEQ ID NO: 1296161 - DNA, 15 bp, Homo sapiens
ccaagagaattcata

SEQ ID NO: 1296162 - DNA, 15 bp, Homo sapiens
tccaagagaattcat

SEQ ID NO: 1296163 - DNA, 15 bp, Homo sapiens
gtccaagagaattca

SEQ ID NO: 1296164 - DNA, 15 bp, Homo sapiens
agtccaagagaattc

SEQ ID NO: 1296165 - DNA, 15 bp, Homo sapiens
aagtccaagagaatt

SEQ ID NO: 1296166 - DNA, 15 bp, Homo sapiens
caagtccaagagaat

SEQ ID NO: 1296167 - DNA, 15 bp, Homo sapiens
acaagtccaagagaa

SEQ ID NO: 1296168 - DNA, 15 bp, Homo sapiens
tacaagtccaagaga

SEQ ID NO: 1296169 - DNA, 15 bp, Homo sapiens
ttacaagtccaagag

SEQ ID NO: 1296170 - DNA, 15 bp, Homo sapiens
gttacaagtccaaga

SEQ ID NO: 1296171 - DNA, 15 bp, Homo sapiens
tgttacaagtccaag

SEQ ID NO: 1296172 - DNA, 15 bp, Homo sapiens
atgttacaagtccaa

SEQ ID NO: 1296173 - DNA, 15 bp, Homo sapiens
gatgttacaagtcca

SEQ ID NO: 1296174 - DNA, 15 bp, Homo sapiens
agatgttacaagtcc

SEQ ID NO: 1296175 - DNA, 15 bp, Homo sapiens
tagatgttacaagtc

SEQ ID NO: 1296176 - DNA, 15 bp, Homo sapiens
ttagatgttacaagt

SEQ ID NO: 1296177 - DNA, 15 bp, Homo sapiens
attagatgttacaag

SEQ ID NO: 1296178 - DNA, 15 bp, Homo sapiens
cattagatgttacaa

SEQ ID NO: 1296179 - DNA, 15 bp, Homo sapiens
ccattagatgttaca

SEQ ID NO: 1296180 - DNA, 15 bp, Homo sapiens
tccattagatgttac

SEQ ID NO: 1296181 - DNA, 15 bp, Homo sapiens
gtccattagatgtta

SEQ ID NO: 1296182 - DNA, 15 bp, Homo sapiens
agtccattagatgtt

SEQ ID NO: 1296183 - DNA, 15 bp, Homo sapiens
aagtccattagatgt

SEQ ID NO: 1296184 - DNA, 15 bp, Homo sapiens
gaagtccattagatg

SEQ ID NO: 1296185 - DNA, 15 bp, Homo sapiens
ggaagtccattagat

SEQ ID NO: 1296186 - DNA, 15 bp, Homo sapiens
tggaagtccattaga

SEQ ID NO: 1296187 - DNA, 15 bp, Homo sapiens
ctggaagtccattag

SEQ ID NO: 1296188 - DNA, 15 bp, Homo sapiens
tctggaagtccatta

SEQ ID NO: 1296189 - DNA, 15 bp, Homo sapiens
ctctggaagtccatt

SEQ ID NO: 1296190 - DNA, 15 bp, Homo sapiens
cctctggaagtccat

SEQ ID NO: 1296191 - DNA, 15 bp, Homo sapiens
acctctggaagtcca

SEQ ID NO: 1296192 - DNA, 15 bp, Homo sapiens
tacctctggaagtcc

SEQ ID NO: 1296193 - DNA, 15 bp, Homo sapiens
ttacctctggaagtc

SEQ ID NO: 1296194 - DNA, 15 bp, Homo sapiens
attacctctggaagt

SEQ ID NO: 1296195 - DNA, 15 bp, Homo sapiens
gattacctctggaag

SEQ ID NO: 1296196 - DNA, 15 bp, Homo sapiens
agattacctctggaa

SEQ ID NO: 1296197 - DNA, 15 bp, Homo sapiens
cagattacctctgga

SEQ ID NO: 1296198 - DNA, 15 bp, Homo sapiens
tcagattacctctgg

SEQ ID NO: 1296199 - DNA, 15 bp, Homo sapiens
ttcagattacctctg

SEQ ID NO: 1296200 - DNA, 15 bp, Homo sapiens
tttcagattacctct

SEQ ID NO: 1296201 - DNA, 15 bp, Homo sapiens
ctttcagattacctc

SEQ ID NO: 1296202 - DNA, 15 bp, Homo sapiens
cctttcagattacct

SEQ ID NO: 1296203 - DNA, 15 bp, Homo sapiens
tcctttcagattacc

SEQ ID NO: 1296204 - DNA, 15 bp, Homo sapiens
ttcctttcagattac

SEQ ID NO: 1296205 - DNA, 15 bp, Homo sapiens
atttcctttcagatt

SEQ ID NO: 1296206 - DNA, 15 bp, Homo sapiens
aatttcctttcagat

SEQ ID NO: 1296207 - DNA, 15 bp, Homo sapiens
aaatttcctttcaga

SEQ ID NO: 1296208 - DNA, 15 bp, Homo sapiens
taaatttcctttcag

SEQ ID NO: 1296209 - DNA, 15 bp, Homo sapiens
ttaaatttcctttca

SEQ ID NO: 1296210 - DNA, 15 bp, Homo sapiens
attaaatttcctttc

SEQ ID NO: 1296211 - DNA, 15 bp, Homo sapiens
tattaaatttccttt

SEQ ID NO: 1296212 - DNA, 15 bp, Homo sapiens
ttattaaatttcctt

SEQ ID NO: 1296213 - DNA, 15 bp, Homo sapiens
tttattaaatttcct

SEQ ID NO: 1296214 - DNA, 15 bp, Homo sapiens
ttttattaaatttcc

SEQ ID NO: 1296215 - DNA, 15 bp, Homo sapiens
attttattaaatttc

SEQ ID NO: 1296216 - DNA, 15 bp, Homo sapiens
tattttattaaattt

SEQ ID NO: 1296217 - DNA, 15 bp, Homo sapiens
atattttattaaatt

SEQ ID NO: 1296218 - DNA, 15 bp, Homo sapiens
aatattttattaaat

SEQ ID NO: 1296219 - DNA, 15 bp, Homo sapiens
taatattttattaaa

SEQ ID NO: 1296220 - DNA, 15 bp, Homo sapiens
ttaatattttattaa

SEQ ID NO: 1296221 - DNA, 15 bp, Homo sapiens
attaatattttatta

SEQ ID NO: 1296222 - DNA, 15 bp, Homo sapiens
cattaatattttatt

SEQ ID NO: 1296223 - DNA, 15 bp, Homo sapiens
acattaatattttat

SEQ ID NO: 1296224 - DNA, 15 bp, Homo sapiens
aaaacattaatattt

SEQ ID NO: 1296225 - DNA, 15 bp, Homo sapiens
caaaacattaatatt

SEQ ID NO: 1296226 - DNA, 15 bp, Homo sapiens
tcaaaacattaatat

SEQ ID NO: 1296227 - DNA, 15 bp, Homo sapiens
ctcaaaacattaata

SEQ ID NO: 1296228 - DNA, 15 bp, Homo sapiens
tctcaaaacattaat

SEQ ID NO: 1296229 - DNA, 15 bp, Homo sapiens
gtctcaaaacattaa

SEQ ID NO: 1296230 - DNA, 15 bp, Homo sapiens
agtctcaaaacatta

SEQ ID NO: 1296231 - DNA, 15 bp, Homo sapiens
cagtctcaaaacatt

SEQ ID NO: 1296232 - DNA, 15 bp, Homo sapiens
acagtctcaaaacat

SEQ ID NO: 1296233 - DNA, 15 bp, Homo sapiens
cacagtctcaaaaca

SEQ ID NO: 1296234 - DNA, 15 bp, Homo sapiens
ccacagtctcaaaac

SEQ ID NO: 1296235 - DNA, 15 bp, Homo sapiens
tccacagtctcaaaa

SEQ ID NO: 1296236 - DNA, 15 bp, Homo sapiens
ctccacagtctcaaa

SEQ ID NO: 1296237 - DNA, 15 bp, Homo sapiens
cctccacagtctcaa

SEQ ID NO: 1296238 - DNA, 15 bp, Homo sapiens
ccctccacagtctca

SEQ ID NO: 1296239 - DNA, 15 bp, Homo sapiens
tccctccacagtctc

SEQ ID NO: 1296240 - DNA, 15 bp, Homo sapiens
ctccctccacagtct

SEQ ID NO: 1296241 - DNA, 15 bp, Homo sapiens
cctccctccacagtc

SEQ ID NO: 1296242 - DNA, 15 bp, Homo sapiens
tcctccctccacagt

SEQ ID NO: 1296243 - DNA, 15 bp, Homo sapiens
atcctccctccacag

SEQ ID NO: 1296244 - DNA, 15 bp, Homo sapiens
tatcctccctccaca

SEQ ID NO: 1296245 - DNA, 15 bp, Homo sapiens
ttatcctccctccac

SEQ ID NO: 1296246 - DNA, 15 bp, Homo sapiens
attatcctccctcca

SEQ ID NO: 1296247 - DNA, 15 bp, Homo sapiens
aattatcctccctcc

SEQ ID NO: 1296248 - DNA, 15 bp, Homo sapiens
caattatcctccctc

SEQ ID NO: 1296249 - DNA, 15 bp, Homo sapiens
acaattatcctccct

SEQ ID NO: 1296250 - DNA, 15 bp, Homo sapiens
gacaattatcctccc

SEQ ID NO: 1296251 - DNA, 15 bp, Homo sapiens
agacaattatcctcc

SEQ ID NO: 1296252 - DNA, 15 bp, Homo sapiens
tagacaattatcctc

SEQ ID NO: 1296253 - DNA, 15 bp, Homo sapiens
ttagacaattatcct

SEQ ID NO: 1296254 - DNA, 15 bp, Homo sapiens
gttagacaattatcc

SEQ ID NO: 1296255 - DNA, 15 bp, Homo sapiens
agttagacaattatc

SEQ ID NO: 1296256 - DNA, 15 bp, Homo sapiens
aagttagacaattat

SEQ ID NO: 1296257 - DNA, 15 bp, Homo sapiens
aaagttagacaatta

SEQ ID NO: 1296258 - DNA, 15 bp, Homo sapiens
gaaagttagacaatt

SEQ ID NO: 1296259 - DNA, 15 bp, Homo sapiens
agaaagttagacaat

SEQ ID NO: 1296260 - DNA, 15 bp, Homo sapiens
aagaaagttagacaa

SEQ ID NO: 1296261 - DNA, 15 bp, Homo sapiens
taagaaagttagaca

SEQ ID NO: 1296262 - DNA, 15 bp, Homo sapiens
ctaagaaagttagac

SEQ ID NO: 1296263 - DNA, 15 bp, Homo sapiens
tctaagaaagttaga

SEQ ID NO: 1296264 - DNA, 15 bp, Homo sapiens
atctaagaaagttag

SEQ ID NO: 1296265 - DNA, 15 bp, Homo sapiens
gatctaagaaagtta

SEQ ID NO: 1296266 - DNA, 15 bp, Homo sapiens
tgatctaagaaagtt

SEQ ID NO: 1296267 - DNA, 15 bp, Homo sapiens
ttgatctaagaaagt

SEQ ID NO: 1296268 - DNA, 15 bp, Homo sapiens
attgatctaagaaag

SEQ ID NO: 1296269 - DNA, 15 bp, Homo sapiens
aattgatctaagaaa

SEQ ID NO: 1296270 - DNA, 15 bp, Homo sapiens
aaattgatctaagaa

SEQ ID NO: 1296271 - DNA, 15 bp, Homo sapiens
taaattgatctaaga

SEQ ID NO: 1296272 - DNA, 15 bp, Homo sapiens
gtaaattgatctaag

SEQ ID NO: 1296273 - DNA, 15 bp, Homo sapiens
agtaaattgatctaa

SEQ ID NO: 1296274 - DNA, 15 bp, Homo sapiens
cagtaaattgatcta

SEQ ID NO: 1296275 - DNA, 15 bp, Homo sapiens
acagtaaattgatct

SEQ ID NO: 1296276 - DNA, 15 bp, Homo sapiens
cacagtaaattgatc

SEQ ID NO: 1296277 - DNA, 15 bp, Homo sapiens
acacagtaaattgat

SEQ ID NO: 1296278 - DNA, 15 bp, Homo sapiens
tacacagtaaattga

SEQ ID NO: 1296279 - DNA, 15 bp, Homo sapiens
atacacagtaaattg

SEQ ID NO: 1296280 - DNA, 15 bp, Homo sapiens
gatacacagtaaatt

SEQ ID NO: 1296281 - DNA, 15 bp, Homo sapiens
tgatacacagtaaat

SEQ ID NO: 1296282 - DNA, 15 bp, Homo sapiens
gtgatacacagtaaa

SEQ ID NO: 1296283 - DNA, 15 bp, Homo sapiens
tgtgatacacagtaa

SEQ ID NO: 1296284 - DNA, 15 bp, Homo sapiens
atgtgatacacagta

SEQ ID NO: 1296285 - DNA, 15 bp, Homo sapiens
aatgtgatacacagt

SEQ ID NO: 1296286 - DNA, 15 bp, Homo sapiens
aaatgtgatacacag

SEQ ID NO: 1296287 - DNA, 15 bp, Homo sapiens
aaaatgtgatacaca

SEQ ID NO: 1296288 - DNA, 15 bp, Homo sapiens
aaaaatgtgatacac

SEQ ID NO: 1296289 - DNA, 15 bp, Homo sapiens
aaaaaatgtgataca

SEQ ID NO: 1296290 - DNA, 15 bp, Homo sapiens
aaaaaaatgtgatac

SEQ ID NO: 1296291 - DNA, 15 bp, Homo sapiens
aaaaaaaatgtgata

SEQ ID NO: 1296292 - DNA, 15 bp, Homo sapiens
aaaaaaaaatgtgat

SEQ ID NO: 1296293 - DNA, 15 bp, Homo sapiens
aaaaaaaaaatgtga

SEQ ID NO: 1296294 - DNA, 15 bp, Homo sapiens
caaaaaaaaaatgtg

SEQ ID NO: 1296295 - DNA, 15 bp, Homo sapiens
gcaaaaaaaaaatgt

SEQ ID NO: 1296296 - DNA, 15 bp, Homo sapiens
ggcaaaaaaaaaatg

SEQ ID NO: 1296297 - DNA, 15 bp, Homo sapiens
gggcaaaaaaaaaat

SEQ ID NO: 1296298 - DNA, 15 bp, Homo sapiens
tgggcaaaaaaaaaa

SEQ ID NO: 1296299 - DNA, 15 bp, Homo sapiens
ttgggcaaaaaaaaa

SEQ ID NO: 1296300 - DNA, 15 bp, Homo sapiens
cttgggcaaaaaaaa

SEQ ID NO: 1296301 - DNA, 15 bp, Homo sapiens
tcttgggcaaaaaaa

SEQ ID NO: 1296302 - DNA, 15 bp, Homo sapiens
ttcttgggcaaaaaa

SEQ ID NO: 1296303 - DNA, 15 bp, Homo sapiens
cttcttgggcaaaaa

SEQ ID NO: 1296304 - DNA, 15 bp, Homo sapiens
tcttcttgggcaaaa

SEQ ID NO: 1296305 - DNA, 15 bp, Homo sapiens
ttcttcttgggcaaa

SEQ ID NO: 1296306 - DNA, 15 bp, Homo sapiens
attcttcttgggcaa

SEQ ID NO: 1296307 - DNA, 15 bp, Homo sapiens
gattcttcttgggca

SEQ ID NO: 1296308 - DNA, 15 bp, Homo sapiens
agattcttcttgggc

SEQ ID NO: 1296309 - DNA, 15 bp, Homo sapiens
tagattcttcttggg

SEQ ID NO: 1296310 - DNA, 15 bp, Homo sapiens
ctagattcttcttgg

SEQ ID NO: 1296311 - DNA, 15 bp, Homo sapiens
gctagattcttcttg

SEQ ID NO: 1296312 - DNA, 15 bp, Homo sapiens
ggctagattcttctt

SEQ ID NO: 1296313 - DNA, 15 bp, Homo sapiens
tggctagattcttct

SEQ ID NO: 1296314 - DNA, 15 bp, Homo sapiens
ttggctagattcttc

SEQ ID NO: 1296315 - DNA, 15 bp, Homo sapiens
cttggctagattctt

SEQ ID NO: 1296316 - DNA, 15 bp, Homo sapiens
acttggctagattct

SEQ ID NO: 1296317 - DNA, 15 bp, Homo sapiens
tacttggctagattc

SEQ ID NO: 1296318 - DNA, 15 bp, Homo sapiens
ctacttggctagatt

SEQ ID NO: 1296319 - DNA, 15 bp, Homo sapiens
tctacttggctagat

SEQ ID NO: 1296320 - DNA, 15 bp, Homo sapiens
ttctacttggctaga

SEQ ID NO: 1296321 - DNA, 15 bp, Homo sapiens
attctacttggctag

SEQ ID NO: 1296322 - DNA, 15 bp, Homo sapiens
aattctacttggcta

SEQ ID NO: 1296323 - DNA, 15 bp, Homo sapiens
caattctacttggct

SEQ ID NO: 1296324 - DNA, 15 bp, Homo sapiens
acaattctacttggc

SEQ ID NO: 1296325 - DNA, 15 bp, Homo sapiens
cacaattctacttgg

SEQ ID NO: 1296326 - DNA, 15 bp, Homo sapiens
ccacaattctacttg

SEQ ID NO: 1296327 - DNA, 15 bp, Homo sapiens
accacaattctactt

SEQ ID NO: 1296328 - DNA, 15 bp, Homo sapiens
caccacaattctact

SEQ ID NO: 1296329 - DNA, 15 bp, Homo sapiens
tcaccacaattctac

SEQ ID NO: 1296330 - DNA, 15 bp, Homo sapiens
ttcaccacaattcta

SEQ ID NO: 1296331 - DNA, 15 bp, Homo sapiens
tttcaccacaattct

SEQ ID NO: 1296332 - DNA, 15 bp, Homo sapiens
gtttcaccacaattc

SEQ ID NO: 1296333 - DNA, 15 bp, Homo sapiens
aaagtaaaattactc

SEQ ID NO: 1296334 - DNA, 15 bp, Homo sapiens
aaaagtaaaattact

SEQ ID NO: 1296335 - DNA, 15 bp, Homo sapiens
aaaaagtaaaattac

SEQ ID NO: 1296336 - DNA, 15 bp, Homo sapiens
gaaaaagtaaaatta

SEQ ID NO: 1296337 - DNA, 15 bp, Homo sapiens
agaaaaagtaaaatt

SEQ ID NO: 1296338 - DNA, 15 bp, Homo sapiens
gagaaaaagtaaaat

SEQ ID NO: 1296339 - DNA, 15 bp, Homo sapiens
ggagaaaaagtaaaa

SEQ ID NO: 1296340 - DNA, 15 bp, Homo sapiens
tggagaaaaagtaaa

SEQ ID NO: 1296341 - DNA, 15 bp, Homo sapiens
ttggagaaaaagtaa

SEQ ID NO: 1296342 - DNA, 15 bp, Homo sapiens
attggagaaaaagta

SEQ ID NO: 1296343 - DNA, 15 bp, Homo sapiens
tattggagaaaaagt

SEQ ID NO: 1296344 - DNA, 15 bp, Homo sapiens
atattggagaaaaag

SEQ ID NO: 1296345 - DNA, 15 bp, Homo sapiens
aatattggagaaaaa

SEQ ID NO: 1296346 - DNA, 15 bp, Homo sapiens
aaatattggagaaaa

SEQ ID NO: 1296347 - DNA, 15 bp, Homo sapiens
gaaatattggagaaa

SEQ ID NO: 1296348 - DNA, 15 bp, Homo sapiens
tgaaatattggagaa

SEQ ID NO: 1296349 - DNA, 15 bp, Homo sapiens
gtgaaatattggaga

SEQ ID NO: 1296350 - DNA, 15 bp, Homo sapiens
tgtgaaatattggag

SEQ ID NO: 1296351 - DNA, 15 bp, Homo sapiens
atgtgaaatattgga

SEQ ID NO: 1296352 - DNA, 15 bp, Homo sapiens
tatgtgaaatattgg

SEQ ID NO: 1296353 - DNA, 15 bp, Homo sapiens
ttatgtgaaatattg

SEQ ID NO: 1296354 - DNA, 15 bp, Homo sapiens
attatgtgaaatatt

SEQ ID NO: 1296355 - DNA, 15 bp, Homo sapiens
tattatgtgaaatat

SEQ ID NO: 1296356 - DNA, 15 bp, Homo sapiens
atattatgtgaaata

SEQ ID NO: 1296357 - DNA, 15 bp, Homo sapiens
tatattatgtgaaat

SEQ ID NO: 1296358 - DNA, 15 bp, Homo sapiens
ctatattatgtgaaa

SEQ ID NO: 1296359 - DNA, 15 bp, Homo sapiens
gctatattatgtgaa

SEQ ID NO: 1296360 - DNA, 15 bp, Homo sapiens
ggctatattatgtga

SEQ ID NO: 1296361 - DNA, 15 bp, Homo sapiens
tggctatattatgtg

SEQ ID NO: 1296362 - DNA, 15 bp, Homo sapiens
ttggctatattatgt

SEQ ID NO: 1296363 - DNA, 15 bp, Homo sapiens
attggctatattatg

SEQ ID NO: 1296364 - DNA, 15 bp, Homo sapiens
gattggctatattat

SEQ ID NO: 1296365 - DNA, 15 bp, Homo sapiens
tgattggctatatta

SEQ ID NO: 1296366 - DNA, 15 bp, Homo sapiens
ttgattggctatatt

SEQ ID NO: 1296367 - DNA, 15 bp, Homo sapiens
attgattggctatat

SEQ ID NO: 1296368 - DNA, 15 bp, Homo sapiens
tattgattggctata

SEQ ID NO: 1296369 - DNA, 15 bp, Homo sapiens
ctattgattggctat

SEQ ID NO: 1296370 - DNA, 15 bp, Homo sapiens
tctattgattggcta

SEQ ID NO: 1296371 - DNA, 15 bp, Homo sapiens
atctattgattggct

SEQ ID NO: 1296372 - DNA, 15 bp, Homo sapiens
catctattgattggc

SEQ ID NO: 1296373 - DNA, 15 bp, Homo sapiens
tcatctattgattgg

SEQ ID NO: 1296374 - DNA, 15 bp, Homo sapiens
gtcatctattgattg

SEQ ID NO: 1296375 - DNA, 15 bp, Homo sapiens
agtcatctattgatt

SEQ ID NO: 1296376 - DNA, 15 bp, Homo sapiens
cagtcatctattgat

SEQ ID NO: 1296377 - DNA, 15 bp, Homo sapiens
ccagtcatctattga

SEQ ID NO: 1296378 - DNA, 15 bp, Homo sapiens
accagtcatctattg

SEQ ID NO: 1296379 - DNA, 15 bp, Homo sapiens
taccagtcatctatt

SEQ ID NO: 1296380 - DNA, 15 bp, Homo sapiens
ttaccagtcatctat

SEQ ID NO: 1296381 - DNA, 15 bp, Homo sapiens
attaccagtcatcta

SEQ ID NO: 1296382 - DNA, 15 bp, Homo sapiens
aattaccagtcatct

SEQ ID NO: 1296383 - DNA, 15 bp, Homo sapiens
taattaccagtcatc

SEQ ID NO: 1296384 - DNA, 15 bp, Homo sapiens
ctaattaccagtcat

SEQ ID NO: 1296385 - DNA, 15 bp, Homo sapiens
actaattaccagtca

SEQ ID NO: 1296386 - DNA, 15 bp, Homo sapiens
cactaattaccagtc

SEQ ID NO: 1296387 - DNA, 15 bp, Homo sapiens
gcactaattaccagt

SEQ ID NO: 1296388 - DNA, 15 bp, Homo sapiens
ggcactaattaccag

SEQ ID NO: 1296389 - DNA, 15 bp, Homo sapiens
aggcactaattacca

SEQ ID NO: 1296390 - DNA, 15 bp, Homo sapiens
gaggcactaattacc

SEQ ID NO: 1296391 - DNA, 15 bp, Homo sapiens
tgaggcactaattac

SEQ ID NO: 1296392 - DNA, 15 bp, Homo sapiens
ttgaggcactaatta

SEQ ID NO: 1296393 - DNA, 15 bp, Homo sapiens
gttgaggcactaatt

SEQ ID NO: 1296394 - DNA, 15 bp, Homo sapiens
agttgaggcactaat

SEQ ID NO: 1296395 - DNA, 15 bp, Homo sapiens
tagttgaggcactaa

SEQ ID NO: 1296396 - DNA, 15 bp, Homo sapiens
ttagttgaggcacta

SEQ ID NO: 1296397 - DNA, 15 bp, Homo sapiens
cttagttgaggcact

SEQ ID NO: 1296398 - DNA, 15 bp, Homo sapiens
ccttagttgaggcac

SEQ ID NO: 1296399 - DNA, 15 bp, Homo sapiens
accttagttgaggca

SEQ ID NO: 1296400 - DNA, 15 bp, Homo sapiens
taccttagttgaggc

SEQ ID NO: 1296401 - DNA, 15 bp, Homo sapiens
ctaccttagttgagg

SEQ ID NO: 1296402 - DNA, 15 bp, Homo sapiens
cctaccttagttgag

SEQ ID NO: 1296403 - DNA, 15 bp, Homo sapiens
tcctaccttagttga

SEQ ID NO: 1296404 - DNA, 15 bp, Homo sapiens
gtcctaccttagttg

SEQ ID NO: 1296405 - DNA, 15 bp, Homo sapiens
tgtcctaccttagtt

SEQ ID NO: 1296406 - DNA, 15 bp, Homo sapiens
ctgtcctaccttagt

SEQ ID NO: 1296407 - DNA, 15 bp, Homo sapiens
cctgtcctaccttag

SEQ ID NO: 1296408 - DNA, 15 bp, Homo sapiens
tcctgtcctacctta

SEQ ID NO: 1296409 - DNA, 15 bp, Homo sapiens
ttcctgtcctacctt

SEQ ID NO: 1296410 - DNA, 15 bp, Homo sapiens
gttcctgtcctacct

SEQ ID NO: 1296411 - DNA, 15 bp, Homo sapiens
tgttcctgtcctacc

SEQ ID NO: 1296412 - DNA, 15 bp, Homo sapiens
ttgttcctgtcctac

SEQ ID NO: 1296413 - DNA, 15 bp, Homo sapiens
attgttcctgtccta

SEQ ID NO: 1296414 - DNA, 15 bp, Homo sapiens
cattgttcctgtcct

SEQ ID NO: 1296415 - DNA, 15 bp, Homo sapiens
tcattgttcctgtcc

SEQ ID NO: 1296416 - DNA, 15 bp, Homo sapiens
atcattgttcctgtc

SEQ ID NO: 1296417 - DNA, 15 bp, Homo sapiens
aatcattgttcctgt

SEQ ID NO: 1296418 - DNA, 15 bp, Homo sapiens
taatcattgttcctg

SEQ ID NO: 1296419 - DNA, 15 bp, Homo sapiens
ttaatcattgttcct

SEQ ID NO: 1296420 - DNA, 15 bp, Homo sapiens
tttaatcattgttcc

SEQ ID NO: 1296421 - DNA, 15 bp, Homo sapiens
gtttaatcattgttc

SEQ ID NO: 1296422 - DNA, 15 bp, Homo sapiens
tgtttaatcattgtt

SEQ ID NO: 1296423 - DNA, 15 bp, Homo sapiens
atgtttaatcattgt

SEQ ID NO: 1296424 - DNA, 15 bp, Homo sapiens
tatgtttaatcattg

SEQ ID NO: 1296425 - DNA, 15 bp, Homo sapiens
ttatgtttaatcatt

SEQ ID NO: 1296426 - DNA, 15 bp, Homo sapiens
cttatgtttaatcat

SEQ ID NO: 1296427 - DNA, 15 bp, Homo sapiens
gcttatgtttaatca

SEQ ID NO: 1296428 - DNA, 15 bp, Homo sapiens
tgcttatgtttaatc

SEQ ID NO: 1296429 - DNA, 15 bp, Homo sapiens
atgcttatgtttaat

SEQ ID NO: 1296430 - DNA, 15 bp, Homo sapiens
catgcttatgtttaa

SEQ ID NO: 1296431 - DNA, 15 bp, Homo sapiens
ccatgcttatgttta

SEQ ID NO: 1296432 - DNA, 15 bp, Homo sapiens
tccatgcttatgttt

SEQ ID NO: 1296433 - DNA, 15 bp, Homo sapiens
atccatgcttatgtt

SEQ ID NO: 1296434 - DNA, 15 bp, Homo sapiens
aatccatgcttatgt

SEQ ID NO: 1296435 - DNA, 15 bp, Homo sapiens
taatccatgcttatg

SEQ ID NO: 1296436 - DNA, 15 bp, Homo sapiens
gtaatccatgcttat

SEQ ID NO: 1296437 - DNA, 15 bp, Homo sapiens
agtaatccatgctta

SEQ ID NO: 1296438 - DNA, 15 bp, Homo sapiens
cagtaatccatgctt

SEQ ID NO: 1296439 - DNA, 15 bp, Homo sapiens
acagtaatccatgct

SEQ ID NO: 1296440 - DNA, 15 bp, Homo sapiens
aacagtaatccatgc

SEQ ID NO: 1296441 - DNA, 15 bp, Homo sapiens
gaacagtaatccatg

SEQ ID NO: 1296442 - DNA, 15 bp, Homo sapiens
agaacagtaatccat

SEQ ID NO: 1296443 - DNA, 15 bp, Homo sapiens
tagaacagtaatcca

SEQ ID NO: 1296444 - DNA, 15 bp, Homo sapiens
atagaacagtaatcc

SEQ ID NO: 1296445 - DNA, 15 bp, Homo sapiens
gatagaacagtaatc

SEQ ID NO: 1296446 - DNA, 15 bp, Homo sapiens
agatagaacagtaat

SEQ ID NO: 1296447 - DNA, 15 bp, Homo sapiens
tagatagaacagtaa

SEQ ID NO: 1296448 - DNA, 15 bp, Homo sapiens
ttagatagaacagta

SEQ ID NO: 1296449 - DNA, 15 bp, Homo sapiens
attagatagaacagt

SEQ ID NO: 1296450 - DNA, 15 bp, Homo sapiens
tattagatagaacag

SEQ ID NO: 1296451 - DNA, 15 bp, Homo sapiens
gtattagatagaaca

SEQ ID NO: 1296452 - DNA, 15 bp, Homo sapiens
tgtattagatagaac

SEQ ID NO: 1296453 - DNA, 15 bp, Homo sapiens
atgtattagatagaa

SEQ ID NO: 1296454 - DNA, 15 bp, Homo sapiens
aatgtattagataga

SEQ ID NO: 1296455 - DNA, 15 bp, Homo sapiens
aaatgtattagatag

SEQ ID NO: 1296456 - DNA, 15 bp, Homo sapiens
taaatgtattagata

SEQ ID NO: 1296457 - DNA, 15 bp, Homo sapiens
ataaatgtattagat

SEQ ID NO: 1296458 - DNA, 15 bp, Homo sapiens
cataaatgtattaga

SEQ ID NO: 1296459 - DNA, 15 bp, Homo sapiens
tcataaatgtattag

SEQ ID NO: 1296460 - DNA, 15 bp, Homo sapiens
ttcataaatgtatta

SEQ ID NO: 1296461 - DNA, 15 bp, Homo sapiens
cttcataaatgtatt

SEQ ID NO: 1296462 - DNA, 15 bp, Homo sapiens
tcttcataaatgtat

SEQ ID NO: 1296463 - DNA, 15 bp, Homo sapiens
atcttcataaatgta

SEQ ID NO: 1296464 - DNA, 15 bp, Homo sapiens
aatcttcataaatgt

SEQ ID NO: 1296465 - DNA, 15 bp, Homo sapiens
taatcttcataaatg

SEQ ID NO: 1296466 - DNA, 15 bp, Homo sapiens
ttaatcttcataaat

SEQ ID NO: 1296467 - DNA, 15 bp, Homo sapiens
attaatcttcataaa

SEQ ID NO: 1296468 - DNA, 15 bp, Homo sapiens
cattaatcttcataa

SEQ ID NO: 1296469 - DNA, 15 bp, Homo sapiens
tcattaatcttcata

SEQ ID NO: 1296470 - DNA, 15 bp, Homo sapiens
ttcattaatcttcat

SEQ ID NO: 1296471 - DNA, 15 bp, Homo sapiens
tttcattaatcttca

SEQ ID NO: 1296472 - DNA, 15 bp, Homo sapiens
ttttcattaatcttc

SEQ ID NO: 1296473 - DNA, 15 bp, Homo sapiens
cttttcattaatctt

SEQ ID NO: 1296474 - DNA, 15 bp, Homo sapiens
acttttcattaatct

SEQ ID NO: 1296475 - DNA, 15 bp, Homo sapiens
aacttttcattaatc

SEQ ID NO: 1296476 - DNA, 15 bp, Homo sapiens
aaacttttcattaat

SEQ ID NO: 1296477 - DNA, 15 bp, Homo sapiens
caaacttttcattaa

SEQ ID NO: 1296478 - DNA, 15 bp, Homo sapiens
gcaaacttttcatta

SEQ ID NO: 1296479 - DNA, 15 bp, Homo sapiens
tgcaaacttttcatt

SEQ ID NO: 1296480 - DNA, 15 bp, Homo sapiens
atgcaaacttttcat

SEQ ID NO: 1296481 - DNA, 15 bp, Homo sapiens
aatgcaaacttttca

SEQ ID NO: 1296482 - DNA, 15 bp, Homo sapiens
aaatgcaaacttttc

SEQ ID NO: 1296483 - DNA, 15 bp, Homo sapiens
taaatgcaaactttt

SEQ ID NO: 1296484 - DNA, 15 bp, Homo sapiens
ttaaatgcaaacttt

SEQ ID NO: 1296485 - DNA, 15 bp, Homo sapiens
attaaatgcaaactt

SEQ ID NO: 1296486 - DNA, 15 bp, Homo sapiens
aattaaatgcaaact

SEQ ID NO: 1296487 - DNA, 15 bp, Homo sapiens
caattaaatgcaaac

SEQ ID NO: 1296488 - DNA, 15 bp, Homo sapiens
ccaattaaatgcaaa

SEQ ID NO: 1296489 - DNA, 15 bp, Homo sapiens
tccaattaaatgcaa

SEQ ID NO: 1296490 - DNA, 15 bp, Homo sapiens
atccaattaaatgca

SEQ ID NO: 1296491 - DNA, 15 bp, Homo sapiens
aatccaattaaatgc

SEQ ID NO: 1296492 - DNA, 15 bp, Homo sapiens
aaatccaattaaatg

SEQ ID NO: 1296493 - DNA, 15 bp, Homo sapiens
gaaatccaattaaat

SEQ ID NO: 1296494 - DNA, 15 bp, Homo sapiens
agaaatccaattaaa

SEQ ID NO: 1296495 - DNA, 15 bp, Homo sapiens
aagaaatccaattaa

SEQ ID NO: 1296496 - DNA, 15 bp, Homo sapiens
gaagaaatccaatta

SEQ ID NO: 1296497 - DNA, 15 bp, Homo sapiens
ggaagaaatccaatt

SEQ ID NO: 1296498 - DNA, 15 bp, Homo sapiens
aggaagaaatccaat

SEQ ID NO: 1296499 - DNA, 15 bp, Homo sapiens
taggaagaaatccaa

SEQ ID NO: 1296500 - DNA, 15 bp, Homo sapiens
ataggaagaaatcca

SEQ ID NO: 1296501 - DNA, 15 bp, Homo sapiens
gataggaagaaatcc

SEQ ID NO: 1296502 - DNA, 15 bp, Homo sapiens
tgataggaagaaatc

SEQ ID NO: 1296503 - DNA, 15 bp, Homo sapiens
gtgataggaagaaat

SEQ ID NO: 1296504 - DNA, 15 bp, Homo sapiens
agtgataggaagaaa

SEQ ID NO: 1296505 - DNA, 15 bp, Homo sapiens
gagtgataggaagaa

SEQ ID NO: 1296506 - DNA, 15 bp, Homo sapiens
ggagtgataggaaga

SEQ ID NO: 1296507 - DNA, 15 bp, Homo sapiens
aggagtgataggaag

SEQ ID NO: 1296508 - DNA, 15 bp, Homo sapiens
aaggagtgataggaa

SEQ ID NO: 1296509 - DNA, 15 bp, Homo sapiens
aaaggagtgatagga

SEQ ID NO: 1296510 - DNA, 15 bp, Homo sapiens
aaaaggagtgatagg

SEQ ID NO: 1296511 - DNA, 15 bp, Homo sapiens
taaaaggagtgatag

SEQ ID NO: 1296512 - DNA, 15 bp, Homo sapiens
ttaaaaggagtgata

SEQ ID NO: 1296513 - DNA, 15 bp, Homo sapiens
tttaaaaggagtgat

SEQ ID NO: 1296514 - DNA, 15 bp, Homo sapiens
ttttaaaaggagtga

SEQ ID NO: 1296515 - DNA, 15 bp, Homo sapiens
attttaaaaggagtg

SEQ ID NO: 1296516 - DNA, 15 bp, Homo sapiens
cattttaaaaggagt

SEQ ID NO: 1296517 - DNA, 15 bp, Homo sapiens
gcattttaaaaggag

SEQ ID NO: 1296518 - DNA, 15 bp, Homo sapiens
tgcattttaaaagga

SEQ ID NO: 1296519 - DNA, 15 bp, Homo sapiens
ttgcattttaaaagg

SEQ ID NO: 1296520 - DNA, 15 bp, Homo sapiens
attgcattttaaaag

SEQ ID NO: 1296521 - DNA, 15 bp, Homo sapiens
aattgcattttaaaa

SEQ ID NO: 1296522 - DNA, 15 bp, Homo sapiens
aaattgcattttaaa

SEQ ID NO: 1296523 - DNA, 15 bp, Homo sapiens
aaaattgcattttaa

SEQ ID NO: 1296524 - DNA, 15 bp, Homo sapiens
taaaattgcatttta

SEQ ID NO: 1296525 - DNA, 15 bp, Homo sapiens
gtaaaattgcatttt

SEQ ID NO: 1296526 - DNA, 15 bp, Homo sapiens
agtaaaattgcattt

SEQ ID NO: 1296527 - DNA, 15 bp, Homo sapiens
aagtaaaattgcatt

SEQ ID NO: 1296528 - DNA, 15 bp, Homo sapiens
gaagtaaaattgcat

SEQ ID NO: 1296529 - DNA, 15 bp, Homo sapiens
agaagtaaaattgca

SEQ ID NO: 1296530 - DNA, 15 bp, Homo sapiens
gagaagtaaaattgc

SEQ ID NO: 1296531 - DNA, 15 bp, Homo sapiens
agagaagtaaaattg

SEQ ID NO: 1296532 - DNA, 15 bp, Homo sapiens
cagagaagtaaaatt

SEQ ID NO: 1296533 - DNA, 15 bp, Homo sapiens
tcagagaagtaaaat

SEQ ID NO: 1296534 - DNA, 15 bp, Homo sapiens
ctcagagaagtaaaa

SEQ ID NO: 1296535 - DNA, 15 bp, Homo sapiens
cctcagagaagtaaa

SEQ ID NO: 1296536 - DNA, 15 bp, Homo sapiens
acctcagagaagtaa

SEQ ID NO: 1296537 - DNA, 15 bp, Homo sapiens
aacctcagagaagta

SEQ ID NO: 1296538 - DNA, 15 bp, Homo sapiens
caacctcagagaagt

SEQ ID NO: 1296539 - DNA, 15 bp, Homo sapiens
ccaacctcagagaag

SEQ ID NO: 1296540 - DNA, 15 bp, Homo sapiens
tccaacctcagagaa

SEQ ID NO: 1296541 - DNA, 15 bp, Homo sapiens
ttccaacctcagaga

SEQ ID NO: 1296542 - DNA, 15 bp, Homo sapiens
attccaacctcagag

SEQ ID NO: 1296543 - DNA, 15 bp, Homo sapiens
gattccaacctcaga

SEQ ID NO: 1296544 - DNA, 15 bp, Homo sapiens
tgattccaacctcag

SEQ ID NO: 1296545 - DNA, 15 bp, Homo sapiens
gtgattccaacctca

SEQ ID NO: 1296546 - DNA, 15 bp, Homo sapiens
agtgattccaacctc

SEQ ID NO: 1296547 - DNA, 15 bp, Homo sapiens
aagtgattccaacct

SEQ ID NO: 1296548 - DNA, 15 bp, Homo sapiens
aaagtgattccaacc

SEQ ID NO: 1296549 - DNA, 15 bp, Homo sapiens
caaagtgattccaac

SEQ ID NO: 1296550 - DNA, 15 bp, Homo sapiens
ccaaagtgattccaa

SEQ ID NO: 1296551 - DNA, 15 bp, Homo sapiens
gccaaagtgattcca

SEQ ID NO: 1296552 - DNA, 15 bp, Homo sapiens
cgccaaagtgattcc

SEQ ID NO: 1296553 - DNA, 15 bp, Homo sapiens
acgccaaagtgattc

SEQ ID NO: 1296554 - DNA, 15 bp, Homo sapiens
aacgccaaagtgatt

SEQ ID NO: 1296555 - DNA, 15 bp, Homo sapiens
taacgccaaagtgat

SEQ ID NO: 1296556 - DNA, 15 bp, Homo sapiens
ttaacgccaaagtga

SEQ ID NO: 1296557 - DNA, 15 bp, Homo sapiens
tttaacgccaaagtg

SEQ ID NO: 1296558 - DNA, 15 bp, Homo sapiens
ttttaacgccaaagt

SEQ ID NO: 1296559 - DNA, 15 bp, Homo sapiens
cttttaacgccaaag

SEQ ID NO: 1296560 - DNA, 15 bp, Homo sapiens
acttttaacgccaaa

SEQ ID NO: 1296561 - DNA, 15 bp, Homo sapiens
gacttttaacgccaa

SEQ ID NO: 1296562 - DNA, 15 bp, Homo sapiens
tgacttttaacgcca

SEQ ID NO: 1296563 - DNA, 15 bp, Homo sapiens
gtgacttttaacgcc

SEQ ID NO: 1296564 - DNA, 15 bp, Homo sapiens
tgtgacttttaacgc

SEQ ID NO: 1296565 - DNA, 15 bp, Homo sapiens
ctgtgacttttaacg

SEQ ID NO: 1296566 - DNA, 15 bp, Homo sapiens
actgtgacttttaac

SEQ ID NO: 1296567 - DNA, 15 bp, Homo sapiens
tactgtgacttttaa

SEQ ID NO: 1296568 - DNA, 15 bp, Homo sapiens
ctactgtgactttta

SEQ ID NO: 1296569 - DNA, 15 bp, Homo sapiens
tctactgtgactttt

SEQ ID NO: 1296570 - DNA, 15 bp, Homo sapiens
ttctactgtgacttt

SEQ ID NO: 1296571 - DNA, 15 bp, Homo sapiens
cttctactgtgactt

SEQ ID NO: 1296572 - DNA, 15 bp, Homo sapiens
ccttctactgtgact

SEQ ID NO: 1296573 - DNA, 15 bp, Homo sapiens
gccttctactgtgac

SEQ ID NO: 1296574 - DNA, 15 bp, Homo sapiens
tgccttctactgtga

SEQ ID NO: 1296575 - DNA, 15 bp, Homo sapiens
atgccttctactgtg

SEQ ID NO: 1296576 - DNA, 15 bp, Homo sapiens
catgccttctactgt

SEQ ID NO: 1296577 - DNA, 15 bp, Homo sapiens
gcatgccttctactg

SEQ ID NO: 1296578 - DNA, 15 bp, Homo sapiens
ggcatgccttctact

SEQ ID NO: 1296579 - DNA, 15 bp, Homo sapiens
tggcatgccttctac

SEQ ID NO: 1296580 - DNA, 15 bp, Homo sapiens
ttggcatgccttcta

SEQ ID NO: 1296581 - DNA, 15 bp, Homo sapiens
attggcatgccttct

SEQ ID NO: 1296582 - DNA, 15 bp, Homo sapiens
tattggcatgccttc

SEQ ID NO: 1296583 - DNA, 15 bp, Homo sapiens
ctattggcatgcctt

SEQ ID NO: 1296584 - DNA, 15 bp, Homo sapiens
actattggcatgcct

SEQ ID NO: 1296585 - DNA, 15 bp, Homo sapiens
aactattggcatgcc

SEQ ID NO: 1296586 - DNA, 15 bp, Homo sapiens
aaactattggcatgc

SEQ ID NO: 1296587 - DNA, 15 bp, Homo sapiens
aaaactattggcatg

SEQ ID NO: 1296588 - DNA, 15 bp, Homo sapiens
gaaaactattggcat

SEQ ID NO: 1296589 - DNA, 15 bp, Homo sapiens
agaaaactattggca

SEQ ID NO: 1296590 - DNA, 15 bp, Homo sapiens
gagaaaactattggc

SEQ ID NO: 1296591 - DNA, 15 bp, Homo sapiens
agagaaaactattgg

SEQ ID NO: 1296592 - DNA, 15 bp, Homo sapiens
aagagaaaactattg

SEQ ID NO: 1296593 - DNA, 15 bp, Homo sapiens
caagagaaaactatt

SEQ ID NO: 1296594 - DNA, 15 bp, Homo sapiens
ccaagagaaaactat

SEQ ID NO: 1296595 - DNA, 15 bp, Homo sapiens
cccaagagaaaacta

SEQ ID NO: 1296596 - DNA, 15 bp, Homo sapiens
gcccaagagaaaact

SEQ ID NO: 1296597 - DNA, 15 bp, Homo sapiens
tgcccaagagaaaac

SEQ ID NO: 1296598 - DNA, 15 bp, Homo sapiens
atgcccaagagaaaa

SEQ ID NO: 1296599 - DNA, 15 bp, Homo sapiens
aatgcccaagagaaa

SEQ ID NO: 1296600 - DNA, 15 bp, Homo sapiens
caatgcccaagagaa

SEQ ID NO: 1296601 - DNA, 15 bp, Homo sapiens
ccaatgcccaagaga

SEQ ID NO: 1296602 - DNA, 15 bp, Homo sapiens
accaatgcccaagag

SEQ ID NO: 1296603 - DNA, 15 bp, Homo sapiens
aaccaatgcccaaga

SEQ ID NO: 1296604 - DNA, 15 bp, Homo sapiens
aaaccaatgcccaag

SEQ ID NO: 1296605 - DNA, 15 bp, Homo sapiens
aaaaccaatgcccaa

SEQ ID NO: 1296606 - DNA, 15 bp, Homo sapiens
aaaaaccaatgccca

SEQ ID NO: 1296607 - DNA, 15 bp, Homo sapiens
taaaaaccaatgccc

SEQ ID NO: 1296608 - DNA, 15 bp, Homo sapiens
ttaaaaaccaatgcc

SEQ ID NO: 1296609 - DNA, 15 bp, Homo sapiens
ctttaaaaaccaatg

SEQ ID NO: 1296610 - DNA, 15 bp, Homo sapiens
actttaaaaaccaat

SEQ ID NO: 1296611 - DNA, 15 bp, Homo sapiens
tactttaaaaaccaa

SEQ ID NO: 1296612 - DNA, 15 bp, Homo sapiens
atactttaaaaacca

SEQ ID NO: 1296613 - DNA, 15 bp, Homo sapiens
tatactttaaaaacc

SEQ ID NO: 1296614 - DNA, 15 bp, Homo sapiens
ttatactttaaaaac

SEQ ID NO: 1296615 - DNA, 15 bp, Homo sapiens
attatactttaaaaa

SEQ ID NO: 1296616 - DNA, 15 bp, Homo sapiens
aattatactttaaaa

SEQ ID NO: 1296617 - DNA, 15 bp, Homo sapiens
taattatactttaaa

SEQ ID NO: 1296618 - DNA, 15 bp, Homo sapiens
ttaattatactttaa

SEQ ID NO: 1296619 - DNA, 15 bp, Homo sapiens
tttaattatacttta

SEQ ID NO: 1296620 - DNA, 15 bp, Homo sapiens
ttttaattatacttt

SEQ ID NO: 1296621 - DNA, 15 bp, Homo sapiens
tttttaattatactt

SEQ ID NO: 1296622 - DNA, 15 bp, Homo sapiens
ttttttaattatact

SEQ ID NO: 1296623 - DNA, 15 bp, Homo sapiens
attttttaattatac

SEQ ID NO: 1296624 - DNA, 15 bp, Homo sapiens
aattttttaattata

SEQ ID NO: 1296625 - DNA, 15 bp, Homo sapiens
ccataattttttaat

SEQ ID NO: 1296626 - DNA, 15 bp, Homo sapiens
tccataattttttaa

SEQ ID NO: 1296627 - DNA, 15 bp, Homo sapiens
atccataatttttta

SEQ ID NO: 1296628 - DNA, 15 bp, Homo sapiens
gatccataatttttt

SEQ ID NO: 1296629 - DNA, 15 bp, Homo sapiens
tgatccataattttt

SEQ ID NO: 1296630 - DNA, 15 bp, Homo sapiens
ctgatccataatttt

SEQ ID NO: 1296631 - DNA, 15 bp, Homo sapiens
tctgatccataattt

SEQ ID NO: 1296632 - DNA, 15 bp, Homo sapiens
ttctgatccataatt

SEQ ID NO: 1296633 - DNA, 15 bp, Homo sapiens
gttctgatccataat

SEQ ID NO: 1296634 - DNA, 15 bp, Homo sapiens
agttctgatccataa

SEQ ID NO: 1296635 - DNA, 15 bp, Homo sapiens
cagttctgatccata

SEQ ID NO: 1296636 - DNA, 15 bp, Homo sapiens
tcagttctgatccat

SEQ ID NO: 1296637 - DNA, 15 bp, Homo sapiens
atcagttctgatcca

SEQ ID NO: 1296638 - DNA, 15 bp, Homo sapiens
catcagttctgatcc

SEQ ID NO: 1296639 - DNA, 15 bp, Homo sapiens
tcatcagttctgatc

SEQ ID NO: 1296640 - DNA, 15 bp, Homo sapiens
ttcatcagttctgat

SEQ ID NO: 1296641 - DNA, 15 bp, Homo sapiens
tttcatcagttctga

SEQ ID NO: 1296642 - DNA, 15 bp, Homo sapiens
ctttcatcagttctg

SEQ ID NO: 1296643 - DNA, 15 bp, Homo sapiens
tctttcatcagttct

SEQ ID NO: 1296644 - DNA, 15 bp, Homo sapiens
atctttcatcagttc

SEQ ID NO: 1296645 - DNA, 15 bp, Homo sapiens
aatctttcatcagtt

SEQ ID NO: 1296646 - DNA, 15 bp, Homo sapiens
aaatctttcatcagt

SEQ ID NO: 1296647 - DNA, 15 bp, Homo sapiens
taaatctttcatcag

SEQ ID NO: 1296648 - DNA, 15 bp, Homo sapiens
gtaaatctttcatca

SEQ ID NO: 1296649 - DNA, 15 bp, Homo sapiens
tgtaaatctttcatc

SEQ ID NO: 1296650 - DNA, 15 bp, Homo sapiens
ttgtaaatctttcat

SEQ ID NO: 1296651 - DNA, 15 bp, Homo sapiens
tttgtaaatctttca

SEQ ID NO: 1296652 - DNA, 15 bp, Homo sapiens
atttgtaaatctttc

SEQ ID NO: 1296653 - DNA, 15 bp, Homo sapiens
aatttgtaaatcttt

SEQ ID NO: 1296654 - DNA, 15 bp, Homo sapiens
gaatttgtaaatctt

SEQ ID NO: 1296655 - DNA, 15 bp, Homo sapiens
agaatttgtaaatct

SEQ ID NO: 1296656 - DNA, 15 bp, Homo sapiens
tagaatttgtaaatc

SEQ ID NO: 1296657 - DNA, 15 bp, Homo sapiens
ctagaatttgtaaat

SEQ ID NO: 1296658 - DNA, 15 bp, Homo sapiens
gctagaatttgtaaa

SEQ ID NO: 1296659 - DNA, 15 bp, Homo sapiens
tgctagaatttgtaa

SEQ ID NO: 1296660 - DNA, 15 bp, Homo sapiens
ttgctagaatttgta

SEQ ID NO: 1296661 - DNA, 15 bp, Homo sapiens
attgctagaatttgt

SEQ ID NO: 1296662 - DNA, 15 bp, Homo sapiens
aattgctagaatttg

SEQ ID NO: 1296663 - DNA, 15 bp, Homo sapiens
caattgctagaattt

SEQ ID NO: 1296664 - DNA, 15 bp, Homo sapiens
tcaattgctagaatt

SEQ ID NO: 1296665 - DNA, 15 bp, Homo sapiens
ttcaattgctagaat

SEQ ID NO: 1296666 - DNA, 15 bp, Homo sapiens
tttcaattgctagaa

SEQ ID NO: 1296667 - DNA, 15 bp, Homo sapiens
ttttcaattgctaga

SEQ ID NO: 1296668 - DNA, 15 bp, Homo sapiens
tttttcaattgctag

SEQ ID NO: 1296669 - DNA, 15 bp, Homo sapiens
ctttttcaattgcta

SEQ ID NO: 1296670 - DNA, 15 bp, Homo sapiens
actttttcaattgct

SEQ ID NO: 1296671 - DNA, 15 bp, Homo sapiens
tactttttcaattgc

SEQ ID NO: 1296672 - DNA, 15 bp, Homo sapiens
atactttttcaattg

SEQ ID NO: 1296673 - DNA, 15 bp, Homo sapiens
gatactttttcaatt

SEQ ID NO: 1296674 - DNA, 15 bp, Homo sapiens
agatactttttcaat

SEQ ID NO: 1296675 - DNA, 15 bp, Homo sapiens
tagatactttttcaa

SEQ ID NO: 1296676 - DNA, 15 bp, Homo sapiens
ttagatactttttca

SEQ ID NO: 1296677 - DNA, 15 bp, Homo sapiens
cttagatactttttc

SEQ ID NO: 1296678 - DNA, 15 bp, Homo sapiens
tcttagatacttttt

SEQ ID NO: 1296679 - DNA, 15 bp, Homo sapiens
atcttagatactttt

SEQ ID NO: 1296680 - DNA, 15 bp, Homo sapiens
aatcttagatacttt

SEQ ID NO: 1296681 - DNA, 15 bp, Homo sapiens
caatcttagatactt

SEQ ID NO: 1296682 - DNA, 15 bp, Homo sapiens
ccaatcttagatact

SEQ ID NO: 1296683 - DNA, 15 bp, Homo sapiens
cccaatcttagatac

SEQ ID NO: 1296684 - DNA, 15 bp, Homo sapiens
tcccaatcttagata

SEQ ID NO: 1296685 - DNA, 15 bp, Homo sapiens
ttcccaatcttagat

SEQ ID NO: 1296686 - DNA, 15 bp, Homo sapiens
attcccaatcttaga

SEQ ID NO: 1296687 - DNA, 15 bp, Homo sapiens
tattcccaatcttag

SEQ ID NO: 1296688 - DNA, 15 bp, Homo sapiens
ttattcccaatctta

SEQ ID NO: 1296689 - DNA, 15 bp, Homo sapiens
tttattcccaatctt

SEQ ID NO: 1296690 - DNA, 15 bp, Homo sapiens
atttattcccaatct

SEQ ID NO: 1296691 - DNA, 15 bp, Homo sapiens
aatttattcccaatc

SEQ ID NO: 1296692 - DNA, 15 bp, Homo sapiens
caatttattcccaat

SEQ ID NO: 1296693 - DNA, 15 bp, Homo sapiens
acaatttattcccaa

SEQ ID NO: 1296694 - DNA, 15 bp, Homo sapiens
cacaatttattccca

SEQ ID NO: 1296695 - DNA, 15 bp, Homo sapiens
gcacaatttattccc

SEQ ID NO: 1296696 - DNA, 15 bp, Homo sapiens
tgcacaatttattcc

SEQ ID NO: 1296697 - DNA, 15 bp, Homo sapiens
ttgcacaatttattc

SEQ ID NO: 1296698 - DNA, 15 bp, Homo sapiens
cttgcacaatttatt

SEQ ID NO: 1296699 - DNA, 15 bp, Homo sapiens
acttgcacaatttat

SEQ ID NO: 1296700 - DNA, 15 bp, Homo sapiens
cacttgcacaattta

SEQ ID NO: 1296701 - DNA, 15 bp, Homo sapiens
acacttgcacaattt

SEQ ID NO: 1296702 - DNA, 15 bp, Homo sapiens
cacacttgcacaatt

SEQ ID NO: 1296703 - DNA, 15 bp, Homo sapiens
acacacttgcacaat

SEQ ID NO: 1296704 - DNA, 15 bp, Homo sapiens
aacacacttgcacaa

SEQ ID NO: 1296705 - DNA, 15 bp, Homo sapiens
taacacacttgcaca

SEQ ID NO: 1296706 - DNA, 15 bp, Homo sapiens
ttaacacacttgcac

SEQ ID NO: 1296707 - DNA, 15 bp, Homo sapiens
attaacacacttgca

SEQ ID NO: 1296708 - DNA, 15 bp, Homo sapiens
aattaacacacttgc

SEQ ID NO: 1296709 - DNA, 15 bp, Homo sapiens
caattaacacacttg

SEQ ID NO: 1296710 - DNA, 15 bp, Homo sapiens
tcaattaacacactt

SEQ ID NO: 1296711 - DNA, 15 bp, Homo sapiens
ttcaattaacacact

SEQ ID NO: 1296712 - DNA, 15 bp, Homo sapiens
gttcaattaacacac

SEQ ID NO: 1296713 - DNA, 15 bp, Homo sapiens
agttcaattaacaca

SEQ ID NO: 1296714 - DNA, 15 bp, Homo sapiens
cagttcaattaacac

SEQ ID NO: 1296715 - DNA, 15 bp, Homo sapiens
tcagttcaattaaca

SEQ ID NO: 1296716 - DNA, 15 bp, Homo sapiens
atcagttcaattaac

SEQ ID NO: 1296717 - DNA, 15 bp, Homo sapiens
tatcagttcaattaa

SEQ ID NO: 1296718 - DNA, 15 bp, Homo sapiens
ttatcagttcaatta

SEQ ID NO: 1296719 - DNA, 15 bp, Homo sapiens
tttatcagttcaatt

SEQ ID NO: 1296720 - DNA, 15 bp, Homo sapiens
atttatcagttcaat

SEQ ID NO: 1296721 - DNA, 15 bp, Homo sapiens
aatttatcagttcaa

SEQ ID NO: 1296722 - DNA, 15 bp, Homo sapiens
caatttatcagttca

SEQ ID NO: 1296723 - DNA, 15 bp, Homo sapiens
tcaatttatcagttc

SEQ ID NO: 1296724 - DNA, 15 bp, Homo sapiens
ctcaatttatcagtt

SEQ ID NO: 1296725 - DNA, 15 bp, Homo sapiens
gctcaatttatcagt

SEQ ID NO: 1296726 - DNA, 15 bp, Homo sapiens
agctcaatttatcag

SEQ ID NO: 1296727 - DNA, 15 bp, Homo sapiens
tagctcaatttatca

SEQ ID NO: 1296728 - DNA, 15 bp, Homo sapiens
ttagctcaatttatc

SEQ ID NO: 1296729 - DNA, 15 bp, Homo sapiens
attagctcaatttat

SEQ ID NO: 1296730 - DNA, 15 bp, Homo sapiens
aattagctcaattta

SEQ ID NO: 1296731 - DNA, 15 bp, Homo sapiens
caattagctcaattt

SEQ ID NO: 1296732 - DNA, 15 bp, Homo sapiens
acaattagctcaatt

SEQ ID NO: 1296733 - DNA, 15 bp, Homo sapiens
gacaattagctcaat

SEQ ID NO: 1296734 - DNA, 15 bp, Homo sapiens
agacaattagctcaa

SEQ ID NO: 1296735 - DNA, 15 bp, Homo sapiens
aagacaattagctca

SEQ ID NO: 1296736 - DNA, 15 bp, Homo sapiens
caagacaattagctc

SEQ ID NO: 1296737 - DNA, 15 bp, Homo sapiens
gcaagacaattagct

SEQ ID NO: 1296738 - DNA, 15 bp, Homo sapiens
ggcaagacaattagc

SEQ ID NO: 1296739 - DNA, 15 bp, Homo sapiens
gggcaagacaattag

SEQ ID NO: 1296740 - DNA, 15 bp, Homo sapiens
tgggcaagacaatta

SEQ ID NO: 1296741 - DNA, 15 bp, Homo sapiens
ttgggcaagacaatt

SEQ ID NO: 1296742 - DNA, 15 bp, Homo sapiens
cttgggcaagacaat

SEQ ID NO: 1296743 - DNA, 15 bp, Homo sapiens
tcttgggcaagacaa

SEQ ID NO: 1296744 - DNA, 15 bp, Homo sapiens
atcttgggcaagaca

SEQ ID NO: 1296745 - DNA, 15 bp, Homo sapiens
tatcttgggcaagac

SEQ ID NO: 1296746 - DNA, 15 bp, Homo sapiens
gtatcttgggcaaga

SEQ ID NO: 1296747 - DNA, 15 bp, Homo sapiens
agtatcttgggcaag

SEQ ID NO: 1296748 - DNA, 15 bp, Homo sapiens
aagtatcttgggcaa

SEQ ID NO: 1296749 - DNA, 15 bp, Homo sapiens
taagtatcttgggca

SEQ ID NO: 1296750 - DNA, 15 bp, Homo sapiens
ttaagtatcttgggc

SEQ ID NO: 1296751 - DNA, 15 bp, Homo sapiens
gttaagtatcttggg

SEQ ID NO: 1296752 - DNA, 15 bp, Homo sapiens
agttaagtatcttgg

SEQ ID NO: 1296753 - DNA, 15 bp, Homo sapiens
cagttaagtatcttg

SEQ ID NO: 1296754 - DNA, 15 bp, Homo sapiens
tcagttaagtatctt

SEQ ID NO: 1296755 - DNA, 15 bp, Homo sapiens
ttcagttaagtatct

SEQ ID NO: 1296756 - DNA, 15 bp, Homo sapiens
cttcagttaagtatc

SEQ ID NO: 1296757 - DNA, 15 bp, Homo sapiens
ccttcagttaagtat

SEQ ID NO: 1296758 - DNA, 15 bp, Homo sapiens
cccttcagttaagta

SEQ ID NO: 1296759 - DNA, 15 bp, Homo sapiens
acccttcagttaagt

SEQ ID NO: 1296760 - DNA, 15 bp, Homo sapiens
tacccttcagttaag

SEQ ID NO: 1296761 - DNA, 15 bp, Homo sapiens
gtacccttcagttaa

SEQ ID NO: 1296762 - DNA, 15 bp, Homo sapiens
agtacccttcagtta

SEQ ID NO: 1296763 - DNA, 15 bp, Homo sapiens
cagtacccttcagtt

SEQ ID NO: 1296764 - DNA, 15 bp, Homo sapiens
ccagtacccttcagt

SEQ ID NO: 1296765 - DNA, 15 bp, Homo sapiens
tccagtacccttcag

SEQ ID NO: 1296766 - DNA, 15 bp, Homo sapiens
ctccagtacccttca

SEQ ID NO: 1296767 - DNA, 15 bp, Homo sapiens
actccagtacccttc

SEQ ID NO: 1296768 - DNA, 15 bp, Homo sapiens
cactccagtaccctt

SEQ ID NO: 1296769 - DNA, 15 bp, Homo sapiens
tcactccagtaccct

SEQ ID NO: 1296770 - DNA, 15 bp, Homo sapiens
ttcactccagtaccc

SEQ ID NO: 1296771 - DNA, 15 bp, Homo sapiens
gttcactccagtacc

SEQ ID NO: 1296772 - DNA, 15 bp, Homo sapiens
ggttcactccagtac

SEQ ID NO: 1296773 - DNA, 15 bp, Homo sapiens
tggttcactccagta

SEQ ID NO: 1296774 - DNA, 15 bp, Homo sapiens
ttggttcactccagt

SEQ ID NO: 1296775 - DNA, 15 bp, Homo sapiens
tttggttcactccag

SEQ ID NO: 1296776 - DNA, 15 bp, Homo sapiens
ctttggttcactcca

SEQ ID NO: 1296777 - DNA, 15 bp, Homo sapiens
cctttggttcactcc

SEQ ID NO: 1296778 - DNA, 15 bp, Homo sapiens
ccctttggttcactc

SEQ ID NO: 1296779 - DNA, 15 bp, Homo sapiens
accctttggttcact

SEQ ID NO: 1296780 - DNA, 15 bp, Homo sapiens
aaccctttggttcac

SEQ ID NO: 1296781 - DNA, 15 bp, Homo sapiens
aaaccctttggttca

SEQ ID NO: 1296782 - DNA, 15 bp, Homo sapiens
taaaccctttggttc

SEQ ID NO: 1296783 - DNA, 15 bp, Homo sapiens
ctaaaccctttggtt

SEQ ID NO: 1296784 - DNA, 15 bp, Homo sapiens
tctaaaccctttggt

SEQ ID NO: 1296785 - DNA, 15 bp, Homo sapiens
ttctaaaccctttgg

SEQ ID NO: 1296786 - DNA, 15 bp, Homo sapiens
tttctaaaccctttg

SEQ ID NO: 1296787 - DNA, 15 bp, Homo sapiens
ttttctaaacccttt

SEQ ID NO: 1296788 - DNA, 15 bp, Homo sapiens
gttttctaaaccctt

SEQ ID NO: 1296789 - DNA, 15 bp, Homo sapiens
tgttttctaaaccct

SEQ ID NO: 1296790 - DNA, 15 bp, Homo sapiens
atgttttctaaaccc

SEQ ID NO: 1296791 - DNA, 15 bp, Homo sapiens
aatgttttctaaacc

SEQ ID NO: 1296792 - DNA, 15 bp, Homo sapiens
caatgttttctaaac

SEQ ID NO: 1296793 - DNA, 15 bp, Homo sapiens
ccaatgttttctaaa

SEQ ID NO: 1296794 - DNA, 15 bp, Homo sapiens
accaatgttttctaa

SEQ ID NO: 1296795 - DNA, 15 bp, Homo sapiens
taccaatgttttcta

SEQ ID NO: 1296796 - DNA, 15 bp, Homo sapiens
ctaccaatgttttct

SEQ ID NO: 1296797 - DNA, 15 bp, Homo sapiens
tctaccaatgttttc

SEQ ID NO: 1296798 - DNA, 15 bp, Homo sapiens
ttctaccaatgtttt

SEQ ID NO: 1296799 - DNA, 15 bp, Homo sapiens
attctaccaatgttt

SEQ ID NO: 1296800 - DNA, 15 bp, Homo sapiens
tattctaccaatgtt

SEQ ID NO: 1296801 - DNA, 15 bp, Homo sapiens
atattctaccaatgt

SEQ ID NO: 1296802 - DNA, 15 bp, Homo sapiens
catattctaccaatg

SEQ ID NO: 1296803 - DNA, 15 bp, Homo sapiens
acatattctaccaat

SEQ ID NO: 1296804 - DNA, 15 bp, Homo sapiens
tacatattctaccaa

SEQ ID NO: 1296805 - DNA, 15 bp, Homo sapiens
ttacatattctacca

SEQ ID NO: 1296806 - DNA, 15 bp, Homo sapiens
attacatattctacc

SEQ ID NO: 1296807 - DNA, 15 bp, Homo sapiens
gattacatattctac

SEQ ID NO: 1296808 - DNA, 15 bp, Homo sapiens
tgattacatattcta

SEQ ID NO: 1296809 - DNA, 15 bp, Homo sapiens
ttgattacatattct

SEQ ID NO: 1296810 - DNA, 15 bp, Homo sapiens
cttgattacatattc

SEQ ID NO: 1296811 - DNA, 15 bp, Homo sapiens
tcttgattacatatt

SEQ ID NO: 1296812 - DNA, 15 bp, Homo sapiens
ctcttgattacatat

SEQ ID NO: 1296813 - DNA, 15 bp, Homo sapiens
cctcttgattacata

SEQ ID NO: 1296814 - DNA, 15 bp, Homo sapiens
tcctcttgattacat

SEQ ID NO: 1296815 - DNA, 15 bp, Homo sapiens
atcctcttgattaca

SEQ ID NO: 1296816 - DNA, 15 bp, Homo sapiens
aatcctcttgattac

SEQ ID NO: 1296817 - DNA, 15 bp, Homo sapiens
aaatcctcttgatta

SEQ ID NO: 1296818 - DNA, 15 bp, Homo sapiens
caaatcctcttgatt

SEQ ID NO: 1296819 - DNA, 15 bp, Homo sapiens
gcaaatcctcttgat

SEQ ID NO: 1296820 - DNA, 15 bp, Homo sapiens
tgcaaatcctcttga

SEQ ID NO: 1296821 - DNA, 15 bp, Homo sapiens
ttgcaaatcctcttg

SEQ ID NO: 1296822 - DNA, 15 bp, Homo sapiens
gttgcaaatcctctt

SEQ ID NO: 1296823 - DNA, 15 bp, Homo sapiens
tgttgcaaatcctct

SEQ ID NO: 1296824 - DNA, 15 bp, Homo sapiens
ttgttgcaaatcctc

SEQ ID NO: 1296825 - DNA, 15 bp, Homo sapiens
attgttgcaaatcct

SEQ ID NO: 1296826 - DNA, 15 bp, Homo sapiens
cattgttgcaaatcc

SEQ ID NO: 1296827 - DNA, 15 bp, Homo sapiens
acattgttgcaaatc

SEQ ID NO: 1296828 - DNA, 15 bp, Homo sapiens
aacattgttgcaaat

SEQ ID NO: 1296829 - DNA, 15 bp, Homo sapiens
aaacattgttgcaaa

SEQ ID NO: 1296830 - DNA, 15 bp, Homo sapiens
caaacattgttgcaa

SEQ ID NO: 1296831 - DNA, 15 bp, Homo sapiens
tcaaacattgttgca

SEQ ID NO: 1296832 - DNA, 15 bp, Homo sapiens
ttcaaacattgttgc

SEQ ID NO: 1296833 - DNA, 15 bp, Homo sapiens
tttcaaacattgttg

SEQ ID NO: 1296834 - DNA, 15 bp, Homo sapiens
ttttcaaacattgtt

SEQ ID NO: 1296835 - DNA, 15 bp, Homo sapiens
tttttcaaacattgt

SEQ ID NO: 1296836 - DNA, 15 bp, Homo sapiens
ttttttcaaacattg

SEQ ID NO: 1296837 - DNA, 15 bp, Homo sapiens
attttttcaaacatt

SEQ ID NO: 1296838 - DNA, 15 bp, Homo sapiens
tattttttcaaacat

SEQ ID NO: 1296839 - DNA, 15 bp, Homo sapiens
atattttttcaaaca

SEQ ID NO: 1296840 - DNA, 15 bp, Homo sapiens
aatattttttcaaac

SEQ ID NO: 1296841 - DNA, 15 bp, Homo sapiens
aaatattttttcaaa

SEQ ID NO: 1296842 - DNA, 15 bp, Homo sapiens
aaaatattttttcaa

SEQ ID NO: 1296843 - DNA, 15 bp, Homo sapiens
taaaatattttttca

SEQ ID NO: 1296844 - DNA, 15 bp, Homo sapiens
ataaaatattttttc

SEQ ID NO: 1296845 - DNA, 15 bp, Homo sapiens
tataaaatatttttt

SEQ ID NO: 1296846 - DNA, 15 bp, Homo sapiens
atataaaatattttt

SEQ ID NO: 1296847 - DNA, 15 bp, Homo sapiens
aatataaaatatttt

SEQ ID NO: 1296848 - DNA, 15 bp, Homo sapiens
caatataaaatattt

SEQ ID NO: 1296849 - DNA, 15 bp, Homo sapiens
tcaatataaaatatt

SEQ ID NO: 1296850 - DNA, 15 bp, Homo sapiens
atcaatataaaatat

SEQ ID NO: 1296851 - DNA, 15 bp, Homo sapiens
tatcaatataaaata

SEQ ID NO: 1296852 - DNA, 15 bp, Homo sapiens
ttatcaatataaaat

SEQ ID NO: 1296853 - DNA, 15 bp, Homo sapiens
cttatcaatataaaa

SEQ ID NO: 1296854 - DNA, 15 bp, Homo sapiens
gcttatcaatataaa

SEQ ID NO: 1296855 - DNA, 15 bp, Homo sapiens
tgcttatcaatataa

SEQ ID NO: 1296856 - DNA, 15 bp, Homo sapiens
atgcttatcaatata

SEQ ID NO: 1296857 - DNA, 15 bp, Homo sapiens
tatgcttatcaatat

SEQ ID NO: 1296858 - DNA, 15 bp, Homo sapiens
ttatgcttatcaata

SEQ ID NO: 1296859 - DNA, 15 bp, Homo sapiens
tttatgcttatcaat

SEQ ID NO: 1296860 - DNA, 15 bp, Homo sapiens
ttttatgcttatcaa

SEQ ID NO: 1296861 - DNA, 15 bp, Homo sapiens
cttttatgcttatca

SEQ ID NO: 1296862 - DNA, 15 bp, Homo sapiens
tcttttatgcttatc

SEQ ID NO: 1296863 - DNA, 15 bp, Homo sapiens
atcttttatgcttat

SEQ ID NO: 1296864 - DNA, 15 bp, Homo sapiens
aatcttttatgctta

SEQ ID NO: 1296865 - DNA, 15 bp, Homo sapiens
taatcttttatgctt

SEQ ID NO: 1296866 - DNA, 15 bp, Homo sapiens
ttaatcttttatgct

SEQ ID NO: 1296867 - DNA, 15 bp, Homo sapiens
tttaatcttttatgc

SEQ ID NO: 1296868 - DNA, 15 bp, Homo sapiens
ttttaatcttttatg

SEQ ID NO: 1296869 - DNA, 15 bp, Homo sapiens
cttttaatcttttat

SEQ ID NO: 1296870 - DNA, 15 bp, Homo sapiens
gcttttaatctttta

SEQ ID NO: 1296871 - DNA, 15 bp, Homo sapiens
tgcttttaatctttt

SEQ ID NO: 1296872 - DNA, 15 bp, Homo sapiens
ctgcttttaatcttt

SEQ ID NO: 1296873 - DNA, 15 bp, Homo sapiens
cctgcttttaatctt

SEQ ID NO: 1296874 - DNA, 15 bp, Homo sapiens
gcctgcttttaatct

SEQ ID NO: 1296875 - DNA, 15 bp, Homo sapiens
agcctgcttttaatc

SEQ ID NO: 1296876 - DNA, 15 bp, Homo sapiens
cagcctgcttttaat

SEQ ID NO: 1296877 - DNA, 15 bp, Homo sapiens
ccagcctgcttttaa

SEQ ID NO: 1296878 - DNA, 15 bp, Homo sapiens
cccagcctgctttta

SEQ ID NO: 1296879 - DNA, 15 bp, Homo sapiens
gcccagcctgctttt

SEQ ID NO: 1296880 - DNA, 15 bp, Homo sapiens
cgcccagcctgcttt

SEQ ID NO: 1296881 - DNA, 15 bp, Homo sapiens
gcgcccagcctgctt

SEQ ID NO: 1296882 - DNA, 15 bp, Homo sapiens
cgcgcccagcctgct

SEQ ID NO: 1296883 - DNA, 15 bp, Homo sapiens
ccgcgcccagcctgc

SEQ ID NO: 1296884 - DNA, 15 bp, Homo sapiens
agaattacaggcgtg

SEQ ID NO: 1296885 - DNA, 15 bp, Homo sapiens
tagaattacaggcgt

SEQ ID NO: 1296886 - DNA, 15 bp, Homo sapiens
ctagaattacaggcg

SEQ ID NO: 1296887 - DNA, 15 bp, Homo sapiens
actagaattacaggc

SEQ ID NO: 1296888 - DNA, 15 bp, Homo sapiens
tactagaattacagg

SEQ ID NO: 1296889 - DNA, 15 bp, Homo sapiens
gtactagaattacag

SEQ ID NO: 1296890 - DNA, 15 bp, Homo sapiens
agtactagaattaca

SEQ ID NO: 1296891 - DNA, 15 bp, Homo sapiens
aagtactagaattac

SEQ ID NO: 1296892 - DNA, 15 bp, Homo sapiens
aaagtactagaatta

SEQ ID NO: 1296893 - DNA, 15 bp, Homo sapiens
caaagtactagaatt

SEQ ID NO: 1296894 - DNA, 15 bp, Homo sapiens
ccaaagtactagaat

SEQ ID NO: 1296895 - DNA, 15 bp, Homo sapiens
cccaaagtactagaa

SEQ ID NO: 1296896 - DNA, 15 bp, Homo sapiens
tcccaaagtactaga

SEQ ID NO: 1296897 - DNA, 15 bp, Homo sapiens
ctcccaaagtactag

SEQ ID NO: 1296898 - DNA, 15 bp, Homo sapiens
cctcccaaagtacta

SEQ ID NO: 1296899 - DNA, 15 bp, Homo sapiens
gttggccaagctggt

SEQ ID NO: 1296900 - DNA, 15 bp, Homo sapiens
tgttggccaagctgg

SEQ ID NO: 1296901 - DNA, 15 bp, Homo sapiens
gccatgttggccaag

SEQ ID NO: 1296902 - DNA, 15 bp, Homo sapiens
cgccatgttggccaa

SEQ ID NO: 1296903 - DNA, 15 bp, Homo sapiens
taccatgcccggcta

SEQ ID NO: 1296904 - DNA, 15 bp, Homo sapiens
ctaccatgcccggct

SEQ ID NO: 1296905 - DNA, 15 bp, Homo sapiens
tgctaccatgcccgg

SEQ ID NO: 1296906 - DNA, 15 bp, Homo sapiens
ctgctaccatgcccg

SEQ ID NO: 1296907 - DNA, 15 bp, Homo sapiens
cctgctaccatgccc

SEQ ID NO: 1296908 - DNA, 15 bp, Homo sapiens
acctgctaccatgcc

SEQ ID NO: 1296909 - DNA, 15 bp, Homo sapiens
tacctgctaccatgc

SEQ ID NO: 1296910 - DNA, 15 bp, Homo sapiens
gtacctgctaccatg

SEQ ID NO: 1296911 - DNA, 15 bp, Homo sapiens
ggtacctgctaccat

SEQ ID NO: 1296912 - DNA, 15 bp, Homo sapiens
aggtacctgctacca

SEQ ID NO: 1296913 - DNA, 15 bp, Homo sapiens
taggtacctgctacc

SEQ ID NO: 1296914 - DNA, 15 bp, Homo sapiens
ataggtacctgctac

SEQ ID NO: 1296915 - DNA, 15 bp, Homo sapiens
tataggtacctgcta

SEQ ID NO: 1296916 - DNA, 15 bp, Homo sapiens
ttataggtacctgct

SEQ ID NO: 1296917 - DNA, 15 bp, Homo sapiens
attataggtacctgc

SEQ ID NO: 1296918 - DNA, 15 bp, Homo sapiens
gattataggtacctg

SEQ ID NO: 1296919 - DNA, 15 bp, Homo sapiens
ggattataggtacct

SEQ ID NO: 1296920 - DNA, 15 bp, Homo sapiens
gggattataggtacc

SEQ ID NO: 1296921 - DNA, 15 bp, Homo sapiens
ctttcctgcctcagc

SEQ ID NO: 1296922 - DNA, 15 bp, Homo sapiens
actttcctgcctcag

SEQ ID NO: 1296923 - DNA, 15 bp, Homo sapiens
aactttcctgcctca

SEQ ID NO: 1296924 - DNA, 15 bp, Homo sapiens
caactttcctgcctc

SEQ ID NO: 1296925 - DNA, 15 bp, Homo sapiens
gcaactttcctgcct

SEQ ID NO: 1296926 - DNA, 15 bp, Homo sapiens
agcaactttcctgcc

SEQ ID NO: 1296927 - DNA, 15 bp, Homo sapiens
aagcaactttcctgc

SEQ ID NO: 1296928 - DNA, 15 bp, Homo sapiens
caagcaactttcctg

SEQ ID NO: 1296929 - DNA, 15 bp, Homo sapiens
tcaagcaactttcct

SEQ ID NO: 1296930 - DNA, 15 bp, Homo sapiens
ttcaagcaactttcc

SEQ ID NO: 1296931 - DNA, 15 bp, Homo sapiens
gttcaagcaactttc

SEQ ID NO: 1296932 - DNA, 15 bp, Homo sapiens
ggttcaagcaacttt

SEQ ID NO: 1296933 - DNA, 15 bp, Homo sapiens
gggttcaagcaactt

SEQ ID NO: 1296934 - DNA, 15 bp, Homo sapiens
ggggttcaagcaact

SEQ ID NO: 1296935 - DNA, 15 bp, Homo sapiens
cggggttcaagcaac

SEQ ID NO: 1296936 - DNA, 15 bp, Homo sapiens
ccggggttcaagcaa

SEQ ID NO: 1296937 - DNA, 15 bp, Homo sapiens
cccggggttcaagca

SEQ ID NO: 1296938 - DNA, 15 bp, Homo sapiens
ccccggggttcaagc

SEQ ID NO: 1296939 - DNA, 15 bp, Homo sapiens
cccccggggttcaag

SEQ ID NO: 1296940 - DNA, 15 bp, Homo sapiens
gcccccggggttcaa

SEQ ID NO: 1296941 - DNA, 15 bp, Homo sapiens
tgcccccggggttca

SEQ ID NO: 1296942 - DNA, 15 bp, Homo sapiens
ctgcccccggggttc

SEQ ID NO: 1296943 - DNA, 15 bp, Homo sapiens
tctgcccccggggtt

SEQ ID NO: 1296944 - DNA, 15 bp, Homo sapiens
ctctgcccccggggt

SEQ ID NO: 1296945 - DNA, 15 bp, Homo sapiens
cctctgcccccgggg

SEQ ID NO: 1296946 - DNA, 15 bp, Homo sapiens
acctctgcccccggg

SEQ ID NO: 1296947 - DNA, 15 bp, Homo sapiens
cacctctgcccccgg

SEQ ID NO: 1296948 - DNA, 15 bp, Homo sapiens
gccacctctgccccc

SEQ ID NO: 1296949 - DNA, 15 bp, Homo sapiens
tgccacctctgcccc

SEQ ID NO: 1296950 - DNA, 15 bp, Homo sapiens
ctgccacctctgccc

SEQ ID NO: 1296951 - DNA, 15 bp, Homo sapiens
ggctcactgccacct

SEQ ID NO: 1296952 - DNA, 15 bp, Homo sapiens
cggctcactgccacc

SEQ ID NO: 1296953 - DNA, 15 bp, Homo sapiens
tcggctcactgccac

SEQ ID NO: 1296954 - DNA, 15 bp, Homo sapiens
ctcggctcactgcca

SEQ ID NO: 1296955 - DNA, 15 bp, Homo sapiens
tctcggctcactgcc

SEQ ID NO: 1296956 - DNA, 15 bp, Homo sapiens
ttcgcccaggctgga

SEQ ID NO: 1296957 - DNA, 15 bp, Homo sapiens
tttcgcccaggctgg

SEQ ID NO: 1296958 - DNA, 15 bp, Homo sapiens
ctttcgcccaggctg

SEQ ID NO: 1296959 - DNA, 15 bp, Homo sapiens
tctttcgcccaggct

SEQ ID NO: 1296960 - DNA, 15 bp, Homo sapiens
ctctttcgcccaggc

SEQ ID NO: 1296961 - DNA, 15 bp, Homo sapiens
gctctttcgcccagg

SEQ ID NO: 1296962 - DNA, 15 bp, Homo sapiens
cgctctttcgcccag

SEQ ID NO: 1296963 - DNA, 15 bp, Homo sapiens
tcgctctttcgccca

SEQ ID NO: 1296964 - DNA, 15 bp, Homo sapiens
ttcgctctttcgccc

SEQ ID NO: 1296965 - DNA, 15 bp, Homo sapiens
tttcgctctttcgcc

SEQ ID NO: 1296966 - DNA, 15 bp, Homo sapiens
gtttcgctctttcgc

SEQ ID NO: 1296967 - DNA, 15 bp, Homo sapiens
agtttcgctctttcg

SEQ ID NO: 1296968 - DNA, 15 bp, Homo sapiens
gagtttcgctctttc

SEQ ID NO: 1296969 - DNA, 15 bp, Homo sapiens
ggagtttcgctcttt

SEQ ID NO: 1296970 - DNA, 15 bp, Homo sapiens
ttaatcttttttttt

SEQ ID NO: 1296971 - DNA, 15 bp, Homo sapiens
tttaatctttttttt

SEQ ID NO: 1296972 - DNA, 15 bp, Homo sapiens
ttttaatcttttttt

SEQ ID NO: 1296973 - DNA, 15 bp, Homo sapiens
cttttaatctttttt

SEQ ID NO: 1296974 - DNA, 15 bp, Homo sapiens
acttttaatcttttt

SEQ ID NO: 1296975 - DNA, 15 bp, Homo sapiens
tacttttaatctttt

SEQ ID NO: 1296976 - DNA, 15 bp, Homo sapiens
ttacttttaatcttt

SEQ ID NO: 1296977 - DNA, 15 bp, Homo sapiens
tttacttttaatctt

SEQ ID NO: 1296978 - DNA, 15 bp, Homo sapiens
ctttacttttaatct

SEQ ID NO: 1296979 - DNA, 15 bp, Homo sapiens
gctttacttttaatc

SEQ ID NO: 1296980 - DNA, 15 bp, Homo sapiens
tgctttacttttaat

SEQ ID NO: 1296981 - DNA, 15 bp, Homo sapiens
atgctttacttttaa

SEQ ID NO: 1296982 - DNA, 15 bp, Homo sapiens
tatgctttactttta

SEQ ID NO: 1296983 - DNA, 15 bp, Homo sapiens
atatgctttactttt

SEQ ID NO: 1296984 - DNA, 15 bp, Homo sapiens
tatatgctttacttt

SEQ ID NO: 1296985 - DNA, 15 bp, Homo sapiens
atatatgctttactt

SEQ ID NO: 1296986 - DNA, 15 bp, Homo sapiens
catatatgctttact

SEQ ID NO: 1296987 - DNA, 15 bp, Homo sapiens
ccatatatgctttac

SEQ ID NO: 1296988 - DNA, 15 bp, Homo sapiens
cccatatatgcttta

SEQ ID NO: 1296989 - DNA, 15 bp, Homo sapiens
tcccatatatgcttt

SEQ ID NO: 1296990 - DNA, 15 bp, Homo sapiens
atcccatatatgctt

SEQ ID NO: 1296991 - DNA, 15 bp, Homo sapiens
catcccatatatgct

SEQ ID NO: 1296992 - DNA, 15 bp, Homo sapiens
acatcccatatatgc

SEQ ID NO: 1296993 - DNA, 15 bp, Homo sapiens
aacatcccatatatg

SEQ ID NO: 1296994 - DNA, 15 bp, Homo sapiens
aaacatcccatatat

SEQ ID NO: 1296995 - DNA, 15 bp, Homo sapiens
caaacatcccatata

SEQ ID NO: 1296996 - DNA, 15 bp, Homo sapiens
ccaaacatcccatat

SEQ ID NO: 1296997 - DNA, 15 bp, Homo sapiens
tccaaacatcccata

SEQ ID NO: 1296998 - DNA, 15 bp, Homo sapiens
ttccaaacatcccat

SEQ ID NO: 1296999 - DNA, 15 bp, Homo sapiens
tttccaaacatccca

SEQ ID NO: 1297000 - DNA, 15 bp, Homo sapiens
ttttccaaacatccc

SEQ ID NO: 1297001 - DNA, 15 bp, Homo sapiens
attttccaaacatcc

SEQ ID NO: 1297002 - DNA, 15 bp, Homo sapiens
gattttccaaacatc

SEQ ID NO: 1297003 - DNA, 15 bp, Homo sapiens
agattttccaaacat

SEQ ID NO: 1297004 - DNA, 15 bp, Homo sapiens
aagattttccaaaca

SEQ ID NO: 1297005 - DNA, 15 bp, Homo sapiens
caagattttccaaac

SEQ ID NO: 1297006 - DNA, 15 bp, Homo sapiens
ccaagattttccaaa

SEQ ID NO: 1297007 - DNA, 15 bp, Homo sapiens
gccaagattttccaa

SEQ ID NO: 1297008 - DNA, 15 bp, Homo sapiens
tgccaagattttcca

SEQ ID NO: 1297009 - DNA, 15 bp, Homo sapiens
ctgccaagattttcc

SEQ ID NO: 1297010 - DNA, 15 bp, Homo sapiens
actgccaagattttc

SEQ ID NO: 1297011 - DNA, 15 bp, Homo sapiens
aactgccaagatttt

SEQ ID NO: 1297012 - DNA, 15 bp, Homo sapiens
taactgccaagattt

SEQ ID NO: 1297013 - DNA, 15 bp, Homo sapiens
ttaactgccaagatt

SEQ ID NO: 1297014 - DNA, 15 bp, Homo sapiens
tttaactgccaagat

SEQ ID NO: 1297015 - DNA, 15 bp, Homo sapiens
gtttaactgccaaga

SEQ ID NO: 1297016 - DNA, 15 bp, Homo sapiens
tgtttaactgccaag

SEQ ID NO: 1297017 - DNA, 15 bp, Homo sapiens
ctgtttaactgccaa

SEQ ID NO: 1297018 - DNA, 15 bp, Homo sapiens
actgtttaactgcca

SEQ ID NO: 1297019 - DNA, 15 bp, Homo sapiens
aactgtttaactgcc

SEQ ID NO: 1297020 - DNA, 15 bp, Homo sapiens
taactgtttaactgc

SEQ ID NO: 1297021 - DNA, 15 bp, Homo sapiens
ataactgtttaactg

SEQ ID NO: 1297022 - DNA, 15 bp, Homo sapiens
aataactgtttaact

SEQ ID NO: 1297023 - DNA, 15 bp, Homo sapiens
taataactgtttaac

SEQ ID NO: 1297024 - DNA, 15 bp, Homo sapiens
ataataactgtttaa

SEQ ID NO: 1297025 - DNA, 15 bp, Homo sapiens
tataataactgttta

SEQ ID NO: 1297026 - DNA, 15 bp, Homo sapiens
ttataataactgttt

SEQ ID NO: 1297027 - DNA, 15 bp, Homo sapiens
attataataactgtt

SEQ ID NO: 1297028 - DNA, 15 bp, Homo sapiens
tattataataactgt

SEQ ID NO: 1297029 - DNA, 15 bp, Homo sapiens
gtattataataactg

SEQ ID NO: 1297030 - DNA, 15 bp, Homo sapiens
ggtattataataact

SEQ ID NO: 1297031 - DNA, 15 bp, Homo sapiens
aggtattataataac

SEQ ID NO: 1297032 - DNA, 15 bp, Homo sapiens
taggtattataataa

SEQ ID NO: 1297033 - DNA, 15 bp, Homo sapiens
ataggtattataata

SEQ ID NO: 1297034 - DNA, 15 bp, Homo sapiens
aataggtattataat

SEQ ID NO: 1297035 - DNA, 15 bp, Homo sapiens
aaataggtattataa

SEQ ID NO: 1297036 - DNA, 15 bp, Homo sapiens
aaaataggtattata

SEQ ID NO: 1297037 - DNA, 15 bp, Homo sapiens
aaaaataggtattat

SEQ ID NO: 1297038 - DNA, 15 bp, Homo sapiens
taaaaataggtatta

SEQ ID NO: 1297039 - DNA, 15 bp, Homo sapiens
ataaaaataggtatt

SEQ ID NO: 1297040 - DNA, 15 bp, Homo sapiens
gataaaaataggtat

SEQ ID NO: 1297041 - DNA, 15 bp, Homo sapiens
agataaaaataggta

SEQ ID NO: 1297042 - DNA, 15 bp, Homo sapiens
aagataaaaataggt

SEQ ID NO: 1297043 - DNA, 15 bp, Homo sapiens
taagataaaaatagg

SEQ ID NO: 1297044 - DNA, 15 bp, Homo sapiens
ctaagataaaaatag

SEQ ID NO: 1297045 - DNA, 15 bp, Homo sapiens
cctaagataaaaata

SEQ ID NO: 1297046 - DNA, 15 bp, Homo sapiens
acctaagataaaaat

SEQ ID NO: 1297047 - DNA, 15 bp, Homo sapiens
tacctaagataaaaa

SEQ ID NO: 1297048 - DNA, 15 bp, Homo sapiens
gtacctaagataaaa

SEQ ID NO: 1297049 - DNA, 15 bp, Homo sapiens
agtacctaagataaa

SEQ ID NO: 1297050 - DNA, 15 bp, Homo sapiens
cagtacctaagataa

SEQ ID NO: 1297051 - DNA, 15 bp, Homo sapiens
acagtacctaagata

SEQ ID NO: 1297052 - DNA, 15 bp, Homo sapiens
aacagtacctaagat

SEQ ID NO: 1297053 - DNA, 15 bp, Homo sapiens
aaacagtacctaaga

SEQ ID NO: 1297054 - DNA, 15 bp, Homo sapiens
aaaacagtacctaag

SEQ ID NO: 1297055 - DNA, 15 bp, Homo sapiens
caaaacagtacctaa

SEQ ID NO: 1297056 - DNA, 15 bp, Homo sapiens
acaaaacagtaccta

SEQ ID NO: 1297057 - DNA, 15 bp, Homo sapiens
tacaaaacagtacct

SEQ ID NO: 1297058 - DNA, 15 bp, Homo sapiens
ctacaaaacagtacc

SEQ ID NO: 1297059 - DNA, 15 bp, Homo sapiens
gctacaaaacagtac

SEQ ID NO: 1297060 - DNA, 15 bp, Homo sapiens
tgctacaaaacagta

SEQ ID NO: 1297061 - DNA, 15 bp, Homo sapiens
atgctacaaaacagt

SEQ ID NO: 1297062 - DNA, 15 bp, Homo sapiens
aatgctacaaaacag

SEQ ID NO: 1297063 - DNA, 15 bp, Homo sapiens
caatgctacaaaaca

SEQ ID NO: 1297064 - DNA, 15 bp, Homo sapiens
ccaatgctacaaaac

SEQ ID NO: 1297065 - DNA, 15 bp, Homo sapiens
gccaatgctacaaaa

SEQ ID NO: 1297066 - DNA, 15 bp, Homo sapiens
agccaatgctacaaa

SEQ ID NO: 1297067 - DNA, 15 bp, Homo sapiens
tagccaatgctacaa

SEQ ID NO: 1297068 - DNA, 15 bp, Homo sapiens
atagccaatgctaca

SEQ ID NO: 1297069 - DNA, 15 bp, Homo sapiens
gatagccaatgctac

SEQ ID NO: 1297070 - DNA, 15 bp, Homo sapiens
agatagccaatgcta

SEQ ID NO: 1297071 - DNA, 15 bp, Homo sapiens
aagatagccaatgct

SEQ ID NO: 1297072 - DNA, 15 bp, Homo sapiens
aaagatagccaatgc

SEQ ID NO: 1297073 - DNA, 15 bp, Homo sapiens
caaagatagccaatg

SEQ ID NO: 1297074 - DNA, 15 bp, Homo sapiens
acaaagatagccaat

SEQ ID NO: 1297075 - DNA, 15 bp, Homo sapiens
gacaaagatagccaa

SEQ ID NO: 1297076 - DNA, 15 bp, Homo sapiens
agacaaagatagcca

SEQ ID NO: 1297077 - DNA, 15 bp, Homo sapiens
tagacaaagatagcc

SEQ ID NO: 1297078 - DNA, 15 bp, Homo sapiens
gtagacaaagatagc

SEQ ID NO: 1297079 - DNA, 15 bp, Homo sapiens
tgtagacaaagatag

SEQ ID NO: 1297080 - DNA, 15 bp, Homo sapiens
atgtagacaaagata

SEQ ID NO: 1297081 - DNA, 15 bp, Homo sapiens
tatgtagacaaagat

SEQ ID NO: 1297082 - DNA, 15 bp, Homo sapiens
ttatgtagacaaaga

SEQ ID NO: 1297083 - DNA, 15 bp, Homo sapiens
tttatgtagacaaag

SEQ ID NO: 1297084 - DNA, 15 bp, Homo sapiens
ttttatgtagacaaa

SEQ ID NO: 1297085 - DNA, 15 bp, Homo sapiens
attttatgtagacaa

SEQ ID NO: 1297086 - DNA, 15 bp, Homo sapiens
aattttatgtagaca

SEQ ID NO: 1297087 - DNA, 15 bp, Homo sapiens
gaattttatgtagac

SEQ ID NO: 1297088 - DNA, 15 bp, Homo sapiens
agaattttatgtaga

SEQ ID NO: 1297089 - DNA, 15 bp, Homo sapiens
tagaattttatgtag

SEQ ID NO: 1297090 - DNA, 15 bp, Homo sapiens
ttagaattttatgta

SEQ ID NO: 1297091 - DNA, 15 bp, Homo sapiens
attagaattttatgt

SEQ ID NO: 1297092 - DNA, 15 bp, Homo sapiens
tattagaattttatg

SEQ ID NO: 1297093 - DNA, 15 bp, Homo sapiens
ttattagaattttat

SEQ ID NO: 1297094 - DNA, 15 bp, Homo sapiens
tttattagaatttta

SEQ ID NO: 1297095 - DNA, 15 bp, Homo sapiens
atttattagaatttt

SEQ ID NO: 1297096 - DNA, 15 bp, Homo sapiens
tatttattagaattt

SEQ ID NO: 1297097 - DNA, 15 bp, Homo sapiens
atatttattagaatt

SEQ ID NO: 1297098 - DNA, 15 bp, Homo sapiens
aatatttattagaat

SEQ ID NO: 1297099 - DNA, 15 bp, Homo sapiens
aaatatttattagaa

SEQ ID NO: 1297100 - DNA, 15 bp, Homo sapiens
aaaatatttattaga

SEQ ID NO: 1297101 - DNA, 15 bp, Homo sapiens
gaaaatatttattag

SEQ ID NO: 1297102 - DNA, 15 bp, Homo sapiens
agaaaatatttatta

SEQ ID NO: 1297103 - DNA, 15 bp, Homo sapiens
tagaaaatatttatt

SEQ ID NO: 1297104 - DNA, 15 bp, Homo sapiens
atagaaaatatttat

SEQ ID NO: 1297105 - DNA, 15 bp, Homo sapiens
catagaaaatattta

SEQ ID NO: 1297106 - DNA, 15 bp, Homo sapiens
gcatagaaaatattt

SEQ ID NO: 1297107 - DNA, 15 bp, Homo sapiens
tgcatagaaaatatt

SEQ ID NO: 1297108 - DNA, 15 bp, Homo sapiens
gtgcatagaaaatat

SEQ ID NO: 1297109 - DNA, 15 bp, Homo sapiens
cgtgcatagaaaata

SEQ ID NO: 1297110 - DNA, 15 bp, Homo sapiens
tcgtgcatagaaaat

SEQ ID NO: 1297111 - DNA, 15 bp, Homo sapiens
ttcgtgcatagaaaa

SEQ ID NO: 1297112 - DNA, 15 bp, Homo sapiens
tttcgtgcatagaaa

SEQ ID NO: 1297113 - DNA, 15 bp, Homo sapiens
atttcgtgcatagaa

SEQ ID NO: 1297114 - DNA, 15 bp, Homo sapiens
tatttcgtgcataga

SEQ ID NO: 1297115 - DNA, 15 bp, Homo sapiens
ctatttcgtgcatag

SEQ ID NO: 1297116 - DNA, 15 bp, Homo sapiens
tctatttcgtgcata

SEQ ID NO: 1297117 - DNA, 15 bp, Homo sapiens
gtctatttcgtgcat

SEQ ID NO: 1297118 - DNA, 15 bp, Homo sapiens
ggtctatttcgtgca

SEQ ID NO: 1297119 - DNA, 15 bp, Homo sapiens
aggtctatttcgtgc

SEQ ID NO: 1297120 - DNA, 15 bp, Homo sapiens
taggtctatttcgtg

SEQ ID NO: 1297121 - DNA, 15 bp, Homo sapiens
ttaggtctatttcgt

SEQ ID NO: 1297122 - DNA, 15 bp, Homo sapiens
tttaggtctatttcg

SEQ ID NO: 1297123 - DNA, 15 bp, Homo sapiens
ttttaggtctatttc

SEQ ID NO: 1297124 - DNA, 15 bp, Homo sapiens
attttaggtctattt

SEQ ID NO: 1297125 - DNA, 15 bp, Homo sapiens
gattttaggtctatt

SEQ ID NO: 1297126 - DNA, 15 bp, Homo sapiens
tgattttaggtctat

SEQ ID NO: 1297127 - DNA, 15 bp, Homo sapiens
ttgattttaggtcta

SEQ ID NO: 1297128 - DNA, 15 bp, Homo sapiens
tttgattttaggtct

SEQ ID NO: 1297129 - DNA, 15 bp, Homo sapiens
ctttgattttaggtc

SEQ ID NO: 1297130 - DNA, 15 bp, Homo sapiens
actttgattttaggt

SEQ ID NO: 1297131 - DNA, 15 bp, Homo sapiens
aactttgattttagg

SEQ ID NO: 1297132 - DNA, 15 bp, Homo sapiens
caactttgattttag

SEQ ID NO: 1297133 - DNA, 15 bp, Homo sapiens
tcaactttgatttta

SEQ ID NO: 1297134 - DNA, 15 bp, Homo sapiens
ttcaactttgatttt

SEQ ID NO: 1297135 - DNA, 15 bp, Homo sapiens
gttcaactttgattt

SEQ ID NO: 1297136 - DNA, 15 bp, Homo sapiens
tgttcaactttgatt

SEQ ID NO: 1297137 - DNA, 15 bp, Homo sapiens
ttgttcaactttgat

SEQ ID NO: 1297138 - DNA, 15 bp, Homo sapiens
tttgttcaactttga

SEQ ID NO: 1297139 - DNA, 15 bp, Homo sapiens
atttgttcaactttg

SEQ ID NO: 1297140 - DNA, 15 bp, Homo sapiens
catttgttcaacttt

SEQ ID NO: 1297141 - DNA, 15 bp, Homo sapiens
acatttgttcaactt

SEQ ID NO: 1297142 - DNA, 15 bp, Homo sapiens
aacatttgttcaact

SEQ ID NO: 1297143 - DNA, 15 bp, Homo sapiens
caacatttgttcaac

SEQ ID NO: 1297144 - DNA, 15 bp, Homo sapiens
gcaacatttgttcaa

SEQ ID NO: 1297145 - DNA, 15 bp, Homo sapiens
tgcaacatttgttca

SEQ ID NO: 1297146 - DNA, 15 bp, Homo sapiens
ttgcaacatttgttc

SEQ ID NO: 1297147 - DNA, 15 bp, Homo sapiens
attgcaacatttgtt

SEQ ID NO: 1297148 - DNA, 15 bp, Homo sapiens
aattgcaacatttgt

SEQ ID NO: 1297149 - DNA, 15 bp, Homo sapiens
aaattgcaacatttg

SEQ ID NO: 1297150 - DNA, 15 bp, Homo sapiens
aaaattgcaacattt

SEQ ID NO: 1297151 - DNA, 15 bp, Homo sapiens
gaaaattgcaacatt

SEQ ID NO: 1297152 - DNA, 15 bp, Homo sapiens
agaaaattgcaacat

SEQ ID NO: 1297153 - DNA, 15 bp, Homo sapiens
cagaaaattgcaaca

SEQ ID NO: 1297154 - DNA, 15 bp, Homo sapiens
acagaaaattgcaac

SEQ ID NO: 1297155 - DNA, 15 bp, Homo sapiens
tacagaaaattgcaa

SEQ ID NO: 1297156 - DNA, 15 bp, Homo sapiens
gtacagaaaattgca

SEQ ID NO: 1297157 - DNA, 15 bp, Homo sapiens
ggtacagaaaattgc

SEQ ID NO: 1297158 - DNA, 15 bp, Homo sapiens
aggtacagaaaattg

SEQ ID NO: 1297159 - DNA, 15 bp, Homo sapiens
gaggtacagaaaatt

SEQ ID NO: 1297160 - DNA, 15 bp, Homo sapiens
tgaggtacagaaaat

SEQ ID NO: 1297161 - DNA, 15 bp, Homo sapiens
gtgaggtacagaaaa

SEQ ID NO: 1297162 - DNA, 15 bp, Homo sapiens
agtgaggtacagaaa

SEQ ID NO: 1297163 - DNA, 15 bp, Homo sapiens
aagtgaggtacagaa

SEQ ID NO: 1297164 - DNA, 15 bp, Homo sapiens
aaagtgaggtacaga

SEQ ID NO: 1297165 - DNA, 15 bp, Homo sapiens
aaaagtgaggtacag

SEQ ID NO: 1297166 - DNA, 15 bp, Homo sapiens
taaaagtgaggtaca

SEQ ID NO: 1297167 - DNA, 15 bp, Homo sapiens
ctaaaagtgaggtac

SEQ ID NO: 1297168 - DNA, 15 bp, Homo sapiens
tctaaaagtgaggta

SEQ ID NO: 1297169 - DNA, 15 bp, Homo sapiens
atctaaaagtgaggt

SEQ ID NO: 1297170 - DNA, 15 bp, Homo sapiens
tatctaaaagtgagg

SEQ ID NO: 1297171 - DNA, 15 bp, Homo sapiens
ctatctaaaagtgag

SEQ ID NO: 1297172 - DNA, 15 bp, Homo sapiens
tctatctaaaagtga

SEQ ID NO: 1297173 - DNA, 15 bp, Homo sapiens
gtctatctaaaagtg

SEQ ID NO: 1297174 - DNA, 15 bp, Homo sapiens
ggtctatctaaaagt

SEQ ID NO: 1297175 - DNA, 15 bp, Homo sapiens
aggtctatctaaaag

SEQ ID NO: 1297176 - DNA, 15 bp, Homo sapiens
aaggtctatctaaaa

SEQ ID NO: 1297177 - DNA, 15 bp, Homo sapiens
taaggtctatctaaa

SEQ ID NO: 1297178 - DNA, 15 bp, Homo sapiens
ataaggtctatctaa

SEQ ID NO: 1297179 - DNA, 15 bp, Homo sapiens
aataaggtctatcta

SEQ ID NO: 1297180 - DNA, 15 bp, Homo sapiens
aaataaggtctatct

SEQ ID NO: 1297181 - DNA, 15 bp, Homo sapiens
taaataaggtctatc

SEQ ID NO: 1297182 - DNA, 15 bp, Homo sapiens
ataaataaggtctat

SEQ ID NO: 1297183 - DNA, 15 bp, Homo sapiens
tataaataaggtcta

SEQ ID NO: 1297184 - DNA, 15 bp, Homo sapiens
atataaataaggtct

SEQ ID NO: 1297185 - DNA, 15 bp, Homo sapiens
aatataaataaggtc

SEQ ID NO: 1297186 - DNA, 15 bp, Homo sapiens
caatataaataaggt

SEQ ID NO: 1297187 - DNA, 15 bp, Homo sapiens
gcaatataaataagg

SEQ ID NO: 1297188 - DNA, 15 bp, Homo sapiens
tgcaatataaataag

SEQ ID NO: 1297189 - DNA, 15 bp, Homo sapiens
atgcaatataaataa

SEQ ID NO: 1297190 - DNA, 15 bp, Homo sapiens
catgcaatataaata

SEQ ID NO: 1297191 - DNA, 15 bp, Homo sapiens
gcatgcaatataaat

SEQ ID NO: 1297192 - DNA, 15 bp, Homo sapiens
cgcatgcaatataaa

SEQ ID NO: 1297193 - DNA, 15 bp, Homo sapiens
tcgcatgcaatataa

SEQ ID NO: 1297194 - DNA, 15 bp, Homo sapiens
ttcgcatgcaatata

SEQ ID NO: 1297195 - DNA, 15 bp, Homo sapiens
gttcgcatgcaatat

SEQ ID NO: 1297196 - DNA, 15 bp, Homo sapiens
agttcgcatgcaata

SEQ ID NO: 1297197 - DNA, 15 bp, Homo sapiens
gagttcgcatgcaat

SEQ ID NO: 1297198 - DNA, 15 bp, Homo sapiens
tgagttcgcatgcaa

SEQ ID NO: 1297199 - DNA, 15 bp, Homo sapiens
ctgagttcgcatgca

SEQ ID NO: 1297200 - DNA, 15 bp, Homo sapiens
actgagttcgcatgc

SEQ ID NO: 1297201 - DNA, 15 bp, Homo sapiens
cactgagttcgcatg

SEQ ID NO: 1297202 - DNA, 15 bp, Homo sapiens
acactgagttcgcat

SEQ ID NO: 1297203 - DNA, 15 bp, Homo sapiens
tacactgagttcgca

SEQ ID NO: 1297204 - DNA, 15 bp, Homo sapiens
atacactgagttcgc

SEQ ID NO: 1297205 - DNA, 15 bp, Homo sapiens
tatacactgagttcg

SEQ ID NO: 1297206 - DNA, 15 bp, Homo sapiens
atatacactgagttc

SEQ ID NO: 1297207 - DNA, 15 bp, Homo sapiens
aatatacactgagtt

SEQ ID NO: 1297208 - DNA, 15 bp, Homo sapiens
taatatacactgagt

SEQ ID NO: 1297209 - DNA, 15 bp, Homo sapiens
gtaatatacactgag

SEQ ID NO: 1297210 - DNA, 15 bp, Homo sapiens
tgtaatatacactga

SEQ ID NO: 1297211 - DNA, 15 bp, Homo sapiens
ttgtaatatacactg

SEQ ID NO: 1297212 - DNA, 15 bp, Homo sapiens
tttgtaatatacact

SEQ ID NO: 1297213 - DNA, 15 bp, Homo sapiens
ttttgtaatatacac

SEQ ID NO: 1297214 - DNA, 15 bp, Homo sapiens
attttgtaatataca

SEQ ID NO: 1297215 - DNA, 15 bp, Homo sapiens
aattttgtaatatac

SEQ ID NO: 1297216 - DNA, 15 bp, Homo sapiens
taattttgtaatata

SEQ ID NO: 1297217 - DNA, 15 bp, Homo sapiens
ttaattttgtaatat

SEQ ID NO: 1297218 - DNA, 15 bp, Homo sapiens
tttaattttgtaata

SEQ ID NO: 1297219 - DNA, 15 bp, Homo sapiens
atttaattttgtaat

SEQ ID NO: 1297220 - DNA, 15 bp, Homo sapiens
catttaattttgtaa

SEQ ID NO: 1297221 - DNA, 15 bp, Homo sapiens
acatttaattttgta

SEQ ID NO: 1297222 - DNA, 15 bp, Homo sapiens
tacatttaattttgt

SEQ ID NO: 1297223 - DNA, 15 bp, Homo sapiens
atacatttaattttg

SEQ ID NO: 1297224 - DNA, 15 bp, Homo sapiens
tatacatttaatttt

SEQ ID NO: 1297225 - DNA, 15 bp, Homo sapiens
atatacatttaattt

SEQ ID NO: 1297226 - DNA, 15 bp, Homo sapiens
aatatacatttaatt

SEQ ID NO: 1297227 - DNA, 15 bp, Homo sapiens
taatatacatttaat

SEQ ID NO: 1297228 - DNA, 15 bp, Homo sapiens
ataatatacatttaa

SEQ ID NO: 1297229 - DNA, 15 bp, Homo sapiens
tataatatacattta

SEQ ID NO: 1297230 - DNA, 15 bp, Homo sapiens
gtataatatacattt

SEQ ID NO: 1297231 - DNA, 15 bp, Homo sapiens
tgtataatatacatt

SEQ ID NO: 1297232 - DNA, 15 bp, Homo sapiens
ttgtataatatacat

SEQ ID NO: 1297233 - DNA, 15 bp, Homo sapiens
tttgtataatataca

SEQ ID NO: 1297234 - DNA, 15 bp, Homo sapiens
ttttgtataatatac

SEQ ID NO: 1297235 - DNA, 15 bp, Homo sapiens
tttttgtataatata

SEQ ID NO: 1297236 - DNA, 15 bp, Homo sapiens
atttttgtataatat

SEQ ID NO: 1297237 - DNA, 15 bp, Homo sapiens
aatttttgtataata

SEQ ID NO: 1297238 - DNA, 15 bp, Homo sapiens
gaatttttgtataat

SEQ ID NO: 1297239 - DNA, 15 bp, Homo sapiens
agaatttttgtataa

SEQ ID NO: 1297240 - DNA, 15 bp, Homo sapiens
aagaatttttgtata

SEQ ID NO: 1297241 - DNA, 15 bp, Homo sapiens
aaagaatttttgtat

SEQ ID NO: 1297242 - DNA, 15 bp, Homo sapiens
taaagaatttttgta

SEQ ID NO: 1297243 - DNA, 15 bp, Homo sapiens
ttaaagaatttttgt

SEQ ID NO: 1297244 - DNA, 15 bp, Homo sapiens
attaaagaatttttg

SEQ ID NO: 1297245 - DNA, 15 bp, Homo sapiens
cattaaagaattttt

SEQ ID NO: 1297246 - DNA, 15 bp, Homo sapiens
tcattaaagaatttt

SEQ ID NO: 1297247 - DNA, 15 bp, Homo sapiens
ttcattaaagaattt

SEQ ID NO: 1297248 - DNA, 15 bp, Homo sapiens
tttcattaaagaatt

SEQ ID NO: 1297249 - DNA, 15 bp, Homo sapiens
atttcattaaagaat

SEQ ID NO: 1297250 - DNA, 15 bp, Homo sapiens
gatttcattaaagaa

SEQ ID NO: 1297251 - DNA, 15 bp, Homo sapiens
agatttcattaaaga

SEQ ID NO: 1297252 - DNA, 15 bp, Homo sapiens
cagatttcattaaag

SEQ ID NO: 1297253 - DNA, 15 bp, Homo sapiens
acagatttcattaaa

SEQ ID NO: 1297254 - DNA, 15 bp, Homo sapiens
cacagatttcattaa

SEQ ID NO: 1297255 - DNA, 15 bp, Homo sapiens
gcacagatttcatta

SEQ ID NO: 1297256 - DNA, 15 bp, Homo sapiens
ggcacagatttcatt

SEQ ID NO: 1297257 - DNA, 15 bp, Homo sapiens
aggcacagatttcat

SEQ ID NO: 1297258 - DNA, 15 bp, Homo sapiens
gaggcacagatttca

SEQ ID NO: 1297259 - DNA, 15 bp, Homo sapiens
agaggcacagatttc

SEQ ID NO: 1297260 - DNA, 15 bp, Homo sapiens
cagaggcacagattt

SEQ ID NO: 1297261 - DNA, 15 bp, Homo sapiens
acagaggcacagatt

SEQ ID NO: 1297262 - DNA, 15 bp, Homo sapiens
cacagaggcacagat

SEQ ID NO: 1297263 - DNA, 15 bp, Homo sapiens
acacagaggcacaga

SEQ ID NO: 1297264 - DNA, 15 bp, Homo sapiens
cacacagaggcacag

SEQ ID NO: 1297265 - DNA, 15 bp, Homo sapiens
gcacacagaggcaca

SEQ ID NO: 1297266 - DNA, 15 bp, Homo sapiens
agcacacagaggcac

SEQ ID NO: 1297267 - DNA, 15 bp, Homo sapiens
cagcacacagaggca

SEQ ID NO: 1297268 - DNA, 15 bp, Homo sapiens
tcagcacacagaggc

SEQ ID NO: 1297269 - DNA, 15 bp, Homo sapiens
ctcagcacacagagg

SEQ ID NO: 1297270 - DNA, 15 bp, Homo sapiens
tctcagcacacagag

SEQ ID NO: 1297271 - DNA, 15 bp, Homo sapiens
ctctcagcacacaga

SEQ ID NO: 1297272 - DNA, 15 bp, Homo sapiens
tctctcagcacacag

SEQ ID NO: 1297273 - DNA, 15 bp, Homo sapiens
atctctcagcacaca

SEQ ID NO: 1297274 - DNA, 15 bp, Homo sapiens
catctctcagcacac

SEQ ID NO: 1297275 - DNA, 15 bp, Homo sapiens
acatctctcagcaca

SEQ ID NO: 1297276 - DNA, 15 bp, Homo sapiens
tacatctctcagcac

SEQ ID NO: 1297277 - DNA, 15 bp, Homo sapiens
ttacatctctcagca

SEQ ID NO: 1297278 - DNA, 15 bp, Homo sapiens
attacatctctcagc

SEQ ID NO: 1297279 - DNA, 15 bp, Homo sapiens
cattacatctctcag

SEQ ID NO: 1297280 - DNA, 15 bp, Homo sapiens
tcattacatctctca

SEQ ID NO: 1297281 - DNA, 15 bp, Homo sapiens
gtcattacatctctc

SEQ ID NO: 1297282 - DNA, 15 bp, Homo sapiens
tgtcattacatctct

SEQ ID NO: 1297283 - DNA, 15 bp, Homo sapiens
atgtcattacatctc

SEQ ID NO: 1297284 - DNA, 15 bp, Homo sapiens
catgtcattacatct

SEQ ID NO: 1297285 - DNA, 15 bp, Homo sapiens
acatgtcattacatc

SEQ ID NO: 1297286 - DNA, 15 bp, Homo sapiens
tacatgtcattacat

SEQ ID NO: 1297287 - DNA, 15 bp, Homo sapiens
ttacatgtcattaca

SEQ ID NO: 1297288 - DNA, 15 bp, Homo sapiens
tttacatgtcattac

SEQ ID NO: 1297289 - DNA, 15 bp, Homo sapiens
ctttacatgtcatta

SEQ ID NO: 1297290 - DNA, 15 bp, Homo sapiens
cctttacatgtcatt

SEQ ID NO: 1297291 - DNA, 15 bp, Homo sapiens
tcctttacatgtcat

SEQ ID NO: 1297292 - DNA, 15 bp, Homo sapiens
atcctttacatgtca

SEQ ID NO: 1297293 - DNA, 15 bp, Homo sapiens
tatcctttacatgtc

SEQ ID NO: 1297294 - DNA, 15 bp, Homo sapiens
ttatcctttacatgt

SEQ ID NO: 1297295 - DNA, 15 bp, Homo sapiens
attatcctttacatg

SEQ ID NO: 1297296 - DNA, 15 bp, Homo sapiens
aattatcctttacat

SEQ ID NO: 1297297 - DNA, 15 bp, Homo sapiens
caattatcctttaca

SEQ ID NO: 1297298 - DNA, 15 bp, Homo sapiens
acaattatcctttac

SEQ ID NO: 1297299 - DNA, 15 bp, Homo sapiens
gacaattatccttta

SEQ ID NO: 1297300 - DNA, 15 bp, Homo sapiens
tgacaattatccttt

SEQ ID NO: 1297301 - DNA, 15 bp, Homo sapiens
ctgacaattatcctt

SEQ ID NO: 1297302 - DNA, 15 bp, Homo sapiens
actgacaattatcct

SEQ ID NO: 1297303 - DNA, 15 bp, Homo sapiens
cactgacaattatcc

SEQ ID NO: 1297304 - DNA, 15 bp, Homo sapiens
tcactgacaattatc

SEQ ID NO: 1297305 - DNA, 15 bp, Homo sapiens
gtcactgacaattat

SEQ ID NO: 1297306 - DNA, 15 bp, Homo sapiens
agtcactgacaatta

SEQ ID NO: 1297307 - DNA, 15 bp, Homo sapiens
aagtcactgacaatt

SEQ ID NO: 1297308 - DNA, 15 bp, Homo sapiens
aaagtcactgacaat

SEQ ID NO: 1297309 - DNA, 15 bp, Homo sapiens
aaaagtcactgacaa

SEQ ID NO: 1297310 - DNA, 15 bp, Homo sapiens
aaaaagtcactgaca

SEQ ID NO: 1297311 - DNA, 15 bp, Homo sapiens
aaaaaagtcactgac

SEQ ID NO: 1297312 - DNA, 15 bp, Homo sapiens
gaaaaaagtcactga

SEQ ID NO: 1297313 - DNA, 15 bp, Homo sapiens
agaaaaaagtcactg

SEQ ID NO: 1297314 - DNA, 15 bp, Homo sapiens
aagaaaaaagtcact

SEQ ID NO: 1297315 - DNA, 15 bp, Homo sapiens
aaagaaaaaagtcac

SEQ ID NO: 1297316 - DNA, 15 bp, Homo sapiens
gaaagaaaaaagtca

SEQ ID NO: 1297317 - DNA, 15 bp, Homo sapiens
tgaaagaaaaaagtc

SEQ ID NO: 1297318 - DNA, 15 bp, Homo sapiens
ttgaaagaaaaaagt

SEQ ID NO: 1297319 - DNA, 15 bp, Homo sapiens
cttgaaagaaaaaag

SEQ ID NO: 1297320 - DNA, 15 bp, Homo sapiens
ccttgaaagaaaaaa

SEQ ID NO: 1297321 - DNA, 15 bp, Homo sapiens
accttgaaagaaaaa

SEQ ID NO: 1297322 - DNA, 15 bp, Homo sapiens
aaccttgaaagaaaa

SEQ ID NO: 1297323 - DNA, 15 bp, Homo sapiens
caaccttgaaagaaa

SEQ ID NO: 1297324 - DNA, 15 bp, Homo sapiens
tcaaccttgaaagaa

SEQ ID NO: 1297325 - DNA, 15 bp, Homo sapiens
ttcaaccttgaaaga

SEQ ID NO: 1297326 - DNA, 15 bp, Homo sapiens
tttcaaccttgaaag

SEQ ID NO: 1297327 - DNA, 15 bp, Homo sapiens
ttttcaaccttgaaa

SEQ ID NO: 1297328 - DNA, 15 bp, Homo sapiens
attttcaaccttgaa

SEQ ID NO: 1297329 - DNA, 15 bp, Homo sapiens
gattttcaaccttga

SEQ ID NO: 1297330 - DNA, 15 bp, Homo sapiens
agattttcaaccttg

SEQ ID NO: 1297331 - DNA, 15 bp, Homo sapiens
aagattttcaacctt

SEQ ID NO: 1297332 - DNA, 15 bp, Homo sapiens
aaagattttcaacct

SEQ ID NO: 1297333 - DNA, 15 bp, Homo sapiens
gaaagattttcaacc

SEQ ID NO: 1297334 - DNA, 15 bp, Homo sapiens
agaaagattttcaac

SEQ ID NO: 1297335 - DNA, 15 bp, Homo sapiens
tagaaagattttcaa

SEQ ID NO: 1297336 - DNA, 15 bp, Homo sapiens
ttagaaagattttca

SEQ ID NO: 1297337 - DNA, 15 bp, Homo sapiens
tttagaaagattttc

SEQ ID NO: 1297338 - DNA, 15 bp, Homo sapiens
gtttagaaagatttt

SEQ ID NO: 1297339 - DNA, 15 bp, Homo sapiens
cgtttagaaagattt

SEQ ID NO: 1297340 - DNA, 15 bp, Homo sapiens
tcgtttagaaagatt

SEQ ID NO: 1297341 - DNA, 15 bp, Homo sapiens
atcgtttagaaagat

SEQ ID NO: 1297342 - DNA, 15 bp, Homo sapiens
tatcgtttagaaaga

SEQ ID NO: 1297343 - DNA, 15 bp, Homo sapiens
gtatcgtttagaaag

SEQ ID NO: 1297344 - DNA, 15 bp, Homo sapiens
cgtatcgtttagaaa

SEQ ID NO: 1297345 - DNA, 15 bp, Homo sapiens
tcgtatcgtttagaa

SEQ ID NO: 1297346 - DNA, 15 bp, Homo sapiens
ttcgtatcgtttaga

SEQ ID NO: 1297347 - DNA, 15 bp, Homo sapiens
cttcgtatcgtttag

SEQ ID NO: 1297348 - DNA, 15 bp, Homo sapiens
tcttcgtatcgttta

SEQ ID NO: 1297349 - DNA, 15 bp, Homo sapiens
ttcttcgtatcgttt

SEQ ID NO: 1297350 - DNA, 15 bp, Homo sapiens
tttcttcgtatcgtt

SEQ ID NO: 1297351 - DNA, 15 bp, Homo sapiens
atttcttcgtatcgt

SEQ ID NO: 1297352 - DNA, 15 bp, Homo sapiens
aatttcttcgtatcg

SEQ ID NO: 1297353 - DNA, 15 bp, Homo sapiens
aaatttcttcgtatc

SEQ ID NO: 1297354 - DNA, 15 bp, Homo sapiens
taaatttcttcgtat

SEQ ID NO: 1297355 - DNA, 15 bp, Homo sapiens
ataaatttcttcgta

SEQ ID NO: 1297356 - DNA, 15 bp, Homo sapiens
gataaatttcttcgt

SEQ ID NO: 1297357 - DNA, 15 bp, Homo sapiens
agataaatttcttcg

SEQ ID NO: 1297358 - DNA, 15 bp, Homo sapiens
aagataaatttcttc

SEQ ID NO: 1297359 - DNA, 15 bp, Homo sapiens
taagataaatttctt

SEQ ID NO: 1297360 - DNA, 15 bp, Homo sapiens
ttaagataaatttct

SEQ ID NO: 1297361 - DNA, 15 bp, Homo sapiens
tttaagataaatttc

SEQ ID NO: 1297362 - DNA, 15 bp, Homo sapiens
ttttaagataaattt

SEQ ID NO: 1297363 - DNA, 15 bp, Homo sapiens
tttttaagataaatt

SEQ ID NO: 1297364 - DNA, 15 bp, Homo sapiens
atttttaagataaat

SEQ ID NO: 1297365 - DNA, 15 bp, Homo sapiens
tatttttaagataaa

SEQ ID NO: 1297366 - DNA, 15 bp, Homo sapiens
ttatttttaagataa

SEQ ID NO: 1297367 - DNA, 15 bp, Homo sapiens
tttatttttaagata

SEQ ID NO: 1297368 - DNA, 15 bp, Homo sapiens
ctttatttttaagat

SEQ ID NO: 1297369 - DNA, 15 bp, Homo sapiens
tctttatttttaaga

SEQ ID NO: 1297370 - DNA, 15 bp, Homo sapiens
atctttatttttaag

SEQ ID NO: 1297371 - DNA, 15 bp, Homo sapiens
gatctttatttttaa

SEQ ID NO: 1297372 - DNA, 15 bp, Homo sapiens
agatctttattttta

SEQ ID NO: 1297373 - DNA, 15 bp, Homo sapiens
tagatctttattttt

SEQ ID NO: 1297374 - DNA, 15 bp, Homo sapiens
ctagatctttatttt

SEQ ID NO: 1297375 - DNA, 15 bp, Homo sapiens
tctagatctttattt

SEQ ID NO: 1297376 - DNA, 15 bp, Homo sapiens
atctagatctttatt

SEQ ID NO: 1297377 - DNA, 15 bp, Homo sapiens
catctagatctttat

SEQ ID NO: 1297378 - DNA, 15 bp, Homo sapiens
gcatctagatcttta

SEQ ID NO: 1297379 - DNA, 15 bp, Homo sapiens
tgcatctagatcttt

SEQ ID NO: 1297380 - DNA, 15 bp, Homo sapiens
ttgcatctagatctt

SEQ ID NO: 1297381 - DNA, 15 bp, Homo sapiens
cttgcatctagatct

SEQ ID NO: 1297382 - DNA, 15 bp, Homo sapiens
tcttgcatctagatc

SEQ ID NO: 1297383 - DNA, 15 bp, Homo sapiens
atcttgcatctagat

SEQ ID NO: 1297384 - DNA, 15 bp, Homo sapiens
aatcttgcatctaga

SEQ ID NO: 1297385 - DNA, 15 bp, Homo sapiens
taatcttgcatctag

SEQ ID NO: 1297386 - DNA, 15 bp, Homo sapiens
ataatcttgcatcta

SEQ ID NO: 1297387 - DNA, 15 bp, Homo sapiens
aataatcttgcatct

SEQ ID NO: 1297388 - DNA, 15 bp, Homo sapiens
aaataatcttgcatc

SEQ ID NO: 1297389 - DNA, 15 bp, Homo sapiens
aaaataatcttgcat

SEQ ID NO: 1297390 - DNA, 15 bp, Homo sapiens
aaaaataatcttgca

SEQ ID NO: 1297391 - DNA, 15 bp, Homo sapiens
caaaaataatcttgc

SEQ ID NO: 1297392 - DNA, 15 bp, Homo sapiens
ccaaaaataatcttg

SEQ ID NO: 1297393 - DNA, 15 bp, Homo sapiens
tccaaaaataatctt

SEQ ID NO: 1297394 - DNA, 15 bp, Homo sapiens
atccaaaaataatct

SEQ ID NO: 1297395 - DNA, 15 bp, Homo sapiens
gatccaaaaataatc

SEQ ID NO: 1297396 - DNA, 15 bp, Homo sapiens
tgatccaaaaataat

SEQ ID NO: 1297397 - DNA, 15 bp, Homo sapiens
atgatccaaaaataa

SEQ ID NO: 1297398 - DNA, 15 bp, Homo sapiens
catgatccaaaaata

SEQ ID NO: 1297399 - DNA, 15 bp, Homo sapiens
tcatgatccaaaaat

SEQ ID NO: 1297400 - DNA, 15 bp, Homo sapiens
atcatgatccaaaaa

SEQ ID NO: 1297401 - DNA, 15 bp, Homo sapiens
tatcatgatccaaaa

SEQ ID NO: 1297402 - DNA, 15 bp, Homo sapiens
ttatcatgatccaaa

SEQ ID NO: 1297403 - DNA, 15 bp, Homo sapiens
tttatcatgatccaa

SEQ ID NO: 1297404 - DNA, 15 bp, Homo sapiens
ttttatcatgatcca

SEQ ID NO: 1297405 - DNA, 15 bp, Homo sapiens
gttttatcatgatcc

SEQ ID NO: 1297406 - DNA, 15 bp, Homo sapiens
agttttatcatgatc

SEQ ID NO: 1297407 - DNA, 15 bp, Homo sapiens
gagttttatcatgat

SEQ ID NO: 1297408 - DNA, 15 bp, Homo sapiens
agagttttatcatga

SEQ ID NO: 1297409 - DNA, 15 bp, Homo sapiens
aagagttttatcatg

SEQ ID NO: 1297410 - DNA, 15 bp, Homo sapiens
gaagagttttatcat

SEQ ID NO: 1297411 - DNA, 15 bp, Homo sapiens
tgaagagttttatca

SEQ ID NO: 1297412 - DNA, 15 bp, Homo sapiens
ctgaagagttttatc

SEQ ID NO: 1297413 - DNA, 15 bp, Homo sapiens
tctgaagagttttat

SEQ ID NO: 1297414 - DNA, 15 bp, Homo sapiens
gtctgaagagtttta

SEQ ID NO: 1297415 - DNA, 15 bp, Homo sapiens
agtctgaagagtttt

SEQ ID NO: 1297416 - DNA, 15 bp, Homo sapiens
cagtctgaagagttt

SEQ ID NO: 1297417 - DNA, 15 bp, Homo sapiens
tcagtctgaagagtt

SEQ ID NO: 1297418 - DNA, 15 bp, Homo sapiens
atcagtctgaagagt

SEQ ID NO: 1297419 - DNA, 15 bp, Homo sapiens
aatcagtctgaagag

SEQ ID NO: 1297420 - DNA, 15 bp, Homo sapiens
gaatcagtctgaaga

SEQ ID NO: 1297421 - DNA, 15 bp, Homo sapiens
agaatcagtctgaag

SEQ ID NO: 1297422 - DNA, 15 bp, Homo sapiens
tagaatcagtctgaa

SEQ ID NO: 1297423 - DNA, 15 bp, Homo sapiens
atagaatcagtctga

SEQ ID NO: 1297424 - DNA, 15 bp, Homo sapiens
tatagaatcagtctg

SEQ ID NO: 1297425 - DNA, 15 bp, Homo sapiens
ctatagaatcagtct

SEQ ID NO: 1297426 - DNA, 15 bp, Homo sapiens
tctatagaatcagtc

SEQ ID NO: 1297427 - DNA, 15 bp, Homo sapiens
gtctatagaatcagt

SEQ ID NO: 1297428 - DNA, 15 bp, Homo sapiens
tgtctatagaatcag

SEQ ID NO: 1297429 - DNA, 15 bp, Homo sapiens
ctgtctatagaatca

SEQ ID NO: 1297430 - DNA, 15 bp, Homo sapiens
cctgtctatagaatc

SEQ ID NO: 1297431 - DNA, 15 bp, Homo sapiens
acctgtctatagaat

SEQ ID NO: 1297432 - DNA, 15 bp, Homo sapiens
tacctgtctatagaa

SEQ ID NO: 1297433 - DNA, 15 bp, Homo sapiens
atacctgtctataga

SEQ ID NO: 1297434 - DNA, 15 bp, Homo sapiens
aatacctgtctatag

SEQ ID NO: 1297435 - DNA, 15 bp, Homo sapiens
caatacctgtctata

SEQ ID NO: 1297436 - DNA, 15 bp, Homo sapiens
gcaatacctgtctat

SEQ ID NO: 1297437 - DNA, 15 bp, Homo sapiens
tgcaatacctgtcta

SEQ ID NO: 1297438 - DNA, 15 bp, Homo sapiens
gtgcaatacctgtct

SEQ ID NO: 1297439 - DNA, 15 bp, Homo sapiens
tgtgcaatacctgtc

SEQ ID NO: 1297440 - DNA, 15 bp, Homo sapiens
atgtgcaatacctgt

SEQ ID NO: 1297441 - DNA, 15 bp, Homo sapiens
catgtgcaatacctg

SEQ ID NO: 1297442 - DNA, 15 bp, Homo sapiens
ccatgtgcaatacct

SEQ ID NO: 1297443 - DNA, 15 bp, Homo sapiens
accatgtgcaatacc

SEQ ID NO: 1297444 - DNA, 15 bp, Homo sapiens
taccatgtgcaatac

SEQ ID NO: 1297445 - DNA, 15 bp, Homo sapiens
ataccatgtgcaata

SEQ ID NO: 1297446 - DNA, 15 bp, Homo sapiens
tataccatgtgcaat

SEQ ID NO: 1297447 - DNA, 15 bp, Homo sapiens
atataccatgtgcaa

SEQ ID NO: 1297448 - DNA, 15 bp, Homo sapiens
aatataccatgtgca

SEQ ID NO: 1297449 - DNA, 15 bp, Homo sapiens
aaatataccatgtgc

SEQ ID NO: 1297450 - DNA, 15 bp, Homo sapiens
caaatataccatgtg

SEQ ID NO: 1297451 - DNA, 15 bp, Homo sapiens
tcaaatataccatgt

SEQ ID NO: 1297452 - DNA, 15 bp, Homo sapiens
atcaaatataccatg

SEQ ID NO: 1297453 - DNA, 15 bp, Homo sapiens
aatcaaatataccat

SEQ ID NO: 1297454 - DNA, 15 bp, Homo sapiens
caatcaaatatacca

SEQ ID NO: 1297455 - DNA, 15 bp, Homo sapiens
tcaatcaaatatacc

SEQ ID NO: 1297456 - DNA, 15 bp, Homo sapiens
atcaatcaaatatac

SEQ ID NO: 1297457 - DNA, 15 bp, Homo sapiens
aatcaatcaaatata

SEQ ID NO: 1297458 - DNA, 15 bp, Homo sapiens
aaatcaatcaaatat

SEQ ID NO: 1297459 - DNA, 15 bp, Homo sapiens
caaatcaatcaaata

SEQ ID NO: 1297460 - DNA, 15 bp, Homo sapiens
gcaaatcaatcaaat

SEQ ID NO: 1297461 - DNA, 15 bp, Homo sapiens
agcaaatcaatcaaa

SEQ ID NO: 1297462 - DNA, 15 bp, Homo sapiens
aagcaaatcaatcaa

SEQ ID NO: 1297463 - DNA, 15 bp, Homo sapiens
aaagcaaatcaatca

SEQ ID NO: 1297464 - DNA, 15 bp, Homo sapiens
taaagcaaatcaatc

SEQ ID NO: 1297465 - DNA, 15 bp, Homo sapiens
ctaaagcaaatcaat

SEQ ID NO: 1297466 - DNA, 15 bp, Homo sapiens
tctaaagcaaatcaa

SEQ ID NO: 1297467 - DNA, 15 bp, Homo sapiens
atctaaagcaaatca

SEQ ID NO: 1297468 - DNA, 15 bp, Homo sapiens
tatctaaagcaaatc

SEQ ID NO: 1297469 - DNA, 15 bp, Homo sapiens
atatctaaagcaaat

SEQ ID NO: 1297470 - DNA, 15 bp, Homo sapiens
tatatctaaagcaaa

SEQ ID NO: 1297471 - DNA, 15 bp, Homo sapiens
ctatatctaaagcaa

SEQ ID NO: 1297472 - DNA, 15 bp, Homo sapiens
cctatatctaaagca

SEQ ID NO: 1297473 - DNA, 15 bp, Homo sapiens
acctatatctaaagc

SEQ ID NO: 1297474 - DNA, 15 bp, Homo sapiens
aacctatatctaaag

SEQ ID NO: 1297475 - DNA, 15 bp, Homo sapiens
caacctatatctaaa

SEQ ID NO: 1297476 - DNA, 15 bp, Homo sapiens
tcaacctatatctaa

SEQ ID NO: 1297477 - DNA, 15 bp, Homo sapiens
atcaacctatatcta

SEQ ID NO: 1297478 - DNA, 15 bp, Homo sapiens
tatcaacctatatct

SEQ ID NO: 1297479 - DNA, 15 bp, Homo sapiens
gtatcaacctatatc

SEQ ID NO: 1297480 - DNA, 15 bp, Homo sapiens
agtatcaacctatat

SEQ ID NO: 1297481 - DNA, 15 bp, Homo sapiens
cagtatcaacctata

SEQ ID NO: 1297482 - DNA, 15 bp, Homo sapiens
tcagtatcaacctat

SEQ ID NO: 1297483 - DNA, 15 bp, Homo sapiens
atcagtatcaaccta

SEQ ID NO: 1297484 - DNA, 15 bp, Homo sapiens
tatcagtatcaacct

SEQ ID NO: 1297485 - DNA, 15 bp, Homo sapiens
atatcagtatcaacc

SEQ ID NO: 1297486 - DNA, 15 bp, Homo sapiens
tatatcagtatcaac

SEQ ID NO: 1297487 - DNA, 15 bp, Homo sapiens
ctatatcagtatcaa

SEQ ID NO: 1297488 - DNA, 15 bp, Homo sapiens
cctatatcagtatca

SEQ ID NO: 1297489 - DNA, 15 bp, Homo sapiens
acctatatcagtatc

SEQ ID NO: 1297490 - DNA, 15 bp, Homo sapiens
tacctatatcagtat

SEQ ID NO: 1297491 - DNA, 15 bp, Homo sapiens
ctacctatatcagta

SEQ ID NO: 1297492 - DNA, 15 bp, Homo sapiens
tctacctatatcagt

SEQ ID NO: 1297493 - DNA, 15 bp, Homo sapiens
atctacctatatcag

SEQ ID NO: 1297494 - DNA, 15 bp, Homo sapiens
aatctacctatatca

SEQ ID NO: 1297495 - DNA, 15 bp, Homo sapiens
taatctacctatatc

SEQ ID NO: 1297496 - DNA, 15 bp, Homo sapiens
ataatctacctatat

SEQ ID NO: 1297497 - DNA, 15 bp, Homo sapiens
tataatctacctata

SEQ ID NO: 1297498 - DNA, 15 bp, Homo sapiens
atataatctacctat

SEQ ID NO: 1297499 - DNA, 15 bp, Homo sapiens
tatataatctaccta

SEQ ID NO: 1297500 - DNA, 15 bp, Homo sapiens
ctatataatctacct

SEQ ID NO: 1297501 - DNA, 15 bp, Homo sapiens
actatataatctacc

SEQ ID NO: 1297502 - DNA, 15 bp, Homo sapiens
gactatataatctac

SEQ ID NO: 1297503 - DNA, 15 bp, Homo sapiens
agactatataatcta

SEQ ID NO: 1297504 - DNA, 15 bp, Homo sapiens
aagactatataatct

SEQ ID NO: 1297505 - DNA, 15 bp, Homo sapiens
aaagactatataatc

SEQ ID NO: 1297506 - DNA, 15 bp, Homo sapiens
taaagactatataat

SEQ ID NO: 1297507 - DNA, 15 bp, Homo sapiens
ctaaagactatataa

SEQ ID NO: 1297508 - DNA, 15 bp, Homo sapiens
gctaaagactatata

SEQ ID NO: 1297509 - DNA, 15 bp, Homo sapiens
agctaaagactatat

SEQ ID NO: 1297510 - DNA, 15 bp, Homo sapiens
aagctaaagactata

SEQ ID NO: 1297511 - DNA, 15 bp, Homo sapiens
taagctaaagactat

SEQ ID NO: 1297512 - DNA, 15 bp, Homo sapiens
ctaagctaaagacta

SEQ ID NO: 1297513 - DNA, 15 bp, Homo sapiens
actaagctaaagact

SEQ ID NO: 1297514 - DNA, 15 bp, Homo sapiens
cactaagctaaagac

SEQ ID NO: 1297515 - DNA, 15 bp, Homo sapiens
tcactaagctaaaga

SEQ ID NO: 1297516 - DNA, 15 bp, Homo sapiens
gtcactaagctaaag

SEQ ID NO: 1297517 - DNA, 15 bp, Homo sapiens
ggtcactaagctaaa

SEQ ID NO: 1297518 - DNA, 15 bp, Homo sapiens
aggtcactaagctaa

SEQ ID NO: 1297519 - DNA, 15 bp, Homo sapiens
aaggtcactaagcta

SEQ ID NO: 1297520 - DNA, 15 bp, Homo sapiens
aaaggtcactaagct

SEQ ID NO: 1297521 - DNA, 15 bp, Homo sapiens
taaaggtcactaagc

SEQ ID NO: 1297522 - DNA, 15 bp, Homo sapiens
ctaaaggtcactaag

SEQ ID NO: 1297523 - DNA, 15 bp, Homo sapiens
tctaaaggtcactaa

SEQ ID NO: 1297524 - DNA, 15 bp, Homo sapiens
atctaaaggtcacta

SEQ ID NO: 1297525 - DNA, 15 bp, Homo sapiens
tatctaaaggtcact

SEQ ID NO: 1297526 - DNA, 15 bp, Homo sapiens
atatctaaaggtcac

SEQ ID NO: 1297527 - DNA, 15 bp, Homo sapiens
gatatctaaaggtca

SEQ ID NO: 1297528 - DNA, 15 bp, Homo sapiens
tgatatctaaaggtc

SEQ ID NO: 1297529 - DNA, 15 bp, Homo sapiens
atgatatctaaaggt

SEQ ID NO: 1297530 - DNA, 15 bp, Homo sapiens
aatgatatctaaagg

SEQ ID NO: 1297531 - DNA, 15 bp, Homo sapiens
aaatgatatctaaag

SEQ ID NO: 1297532 - DNA, 15 bp, Homo sapiens
taaatgatatctaaa

SEQ ID NO: 1297533 - DNA, 15 bp, Homo sapiens
ataaatgatatctaa

SEQ ID NO: 1297534 - DNA, 15 bp, Homo sapiens
tataaatgatatcta

SEQ ID NO: 1297535 - DNA, 15 bp, Homo sapiens
ttataaatgatatct

SEQ ID NO: 1297536 - DNA, 15 bp, Homo sapiens
gttataaatgatatc

SEQ ID NO: 1297537 - DNA, 15 bp, Homo sapiens
tgttataaatgatat

SEQ ID NO: 1297538 - DNA, 15 bp, Homo sapiens
ttgttataaatgata

SEQ ID NO: 1297539 - DNA, 15 bp, Homo sapiens
tttgttataaatgat

SEQ ID NO: 1297540 - DNA, 15 bp, Homo sapiens
atttgttataaatga

SEQ ID NO: 1297541 - DNA, 15 bp, Homo sapiens
aatttgttataaatg

SEQ ID NO: 1297542 - DNA, 15 bp, Homo sapiens
taatttgttataaat

SEQ ID NO: 1297543 - DNA, 15 bp, Homo sapiens
gtaatttgttataaa

SEQ ID NO: 1297544 - DNA, 15 bp, Homo sapiens
agtaatttgttataa

SEQ ID NO: 1297545 - DNA, 15 bp, Homo sapiens
aagtaatttgttata

SEQ ID NO: 1297546 - DNA, 15 bp, Homo sapiens
aaagtaatttgttat

SEQ ID NO: 1297547 - DNA, 15 bp, Homo sapiens
gaaagtaatttgtta

SEQ ID NO: 1297548 - DNA, 15 bp, Homo sapiens
tgaaagtaatttgtt

SEQ ID NO: 1297549 - DNA, 15 bp, Homo sapiens
ttgaaagtaatttgt

SEQ ID NO: 1297550 - DNA, 15 bp, Homo sapiens
tttgaaagtaatttg

SEQ ID NO: 1297551 - DNA, 15 bp, Homo sapiens
atttgaaagtaattt

SEQ ID NO: 1297552 - DNA, 15 bp, Homo sapiens
catttgaaagtaatt

SEQ ID NO: 1297553 - DNA, 15 bp, Homo sapiens
acatttgaaagtaat

SEQ ID NO: 1297554 - DNA, 15 bp, Homo sapiens
gacatttgaaagtaa

SEQ ID NO: 1297555 - DNA, 15 bp, Homo sapiens
agacatttgaaagta

SEQ ID NO: 1297556 - DNA, 15 bp, Homo sapiens
aagacatttgaaagt

SEQ ID NO: 1297557 - DNA, 15 bp, Homo sapiens
aaagacatttgaaag

SEQ ID NO: 1297558 - DNA, 15 bp, Homo sapiens
taaagacatttgaaa

SEQ ID NO: 1297559 - DNA, 15 bp, Homo sapiens
ataaagacatttgaa

SEQ ID NO: 1297560 - DNA, 15 bp, Homo sapiens
tataaagacatttga

SEQ ID NO: 1297561 - DNA, 15 bp, Homo sapiens
gtataaagacatttg

SEQ ID NO: 1297562 - DNA, 15 bp, Homo sapiens
tgtataaagacattt

SEQ ID NO: 1297563 - DNA, 15 bp, Homo sapiens
ttgtataaagacatt

SEQ ID NO: 1297564 - DNA, 15 bp, Homo sapiens
tttgtataaagacat

SEQ ID NO: 1297565 - DNA, 15 bp, Homo sapiens
ctttgtataaagaca

SEQ ID NO: 1297566 - DNA, 15 bp, Homo sapiens
tctttgtataaagac

SEQ ID NO: 1297567 - DNA, 15 bp, Homo sapiens
ttctttgtataaaga

SEQ ID NO: 1297568 - DNA, 15 bp, Homo sapiens
tttctttgtataaag

SEQ ID NO: 1297569 - DNA, 15 bp, Homo sapiens
ttttctttgtataaa

SEQ ID NO: 1297570 - DNA, 15 bp, Homo sapiens
cttttctttgtataa

SEQ ID NO: 1297571 - DNA, 15 bp, Homo sapiens
acttttctttgtata

SEQ ID NO: 1297572 - DNA, 15 bp, Homo sapiens
aacttttctttgtat

SEQ ID NO: 1297573 - DNA, 15 bp, Homo sapiens
aaacttttctttgta

SEQ ID NO: 1297574 - DNA, 15 bp, Homo sapiens
taaacttttctttgt

SEQ ID NO: 1297575 - DNA, 15 bp, Homo sapiens
ttaaacttttctttg

SEQ ID NO: 1297576 - DNA, 15 bp, Homo sapiens
gttaaacttttcttt

SEQ ID NO: 1297577 - DNA, 15 bp, Homo sapiens
tgttaaacttttctt

SEQ ID NO: 1297578 - DNA, 15 bp, Homo sapiens
ctgttaaacttttct

SEQ ID NO: 1297579 - DNA, 15 bp, Homo sapiens
actgttaaacttttc

SEQ ID NO: 1297580 - DNA, 15 bp, Homo sapiens
tactgttaaactttt

SEQ ID NO: 1297581 - DNA, 15 bp, Homo sapiens
atactgttaaacttt

SEQ ID NO: 1297582 - DNA, 15 bp, Homo sapiens
aatactgttaaactt

SEQ ID NO: 1297583 - DNA, 15 bp, Homo sapiens
aaatactgttaaact

SEQ ID NO: 1297584 - DNA, 15 bp, Homo sapiens
aaaatactgttaaac

SEQ ID NO: 1297585 - DNA, 15 bp, Homo sapiens
taaaatactgttaaa

SEQ ID NO: 1297586 - DNA, 15 bp, Homo sapiens
ttaaaatactgttaa

SEQ ID NO: 1297587 - DNA, 15 bp, Homo sapiens
cttaaaatactgtta

SEQ ID NO: 1297588 - DNA, 15 bp, Homo sapiens
gcttaaaatactgtt

SEQ ID NO: 1297589 - DNA, 15 bp, Homo sapiens
tgcttaaaatactgt

SEQ ID NO: 1297590 - DNA, 15 bp, Homo sapiens
atgcttaaaatactg

SEQ ID NO: 1297591 - DNA, 15 bp, Homo sapiens
tatgcttaaaatact

SEQ ID NO: 1297592 - DNA, 15 bp, Homo sapiens
atatgcttaaaatac

SEQ ID NO: 1297593 - DNA, 15 bp, Homo sapiens
tatatgcttaaaata

SEQ ID NO: 1297594 - DNA, 15 bp, Homo sapiens
ttatatgcttaaaat

SEQ ID NO: 1297595 - DNA, 15 bp, Homo sapiens
gttatatgcttaaaa

SEQ ID NO: 1297596 - DNA, 15 bp, Homo sapiens
agttatatgcttaaa

SEQ ID NO: 1297597 - DNA, 15 bp, Homo sapiens
aagttatatgcttaa

SEQ ID NO: 1297598 - DNA, 15 bp, Homo sapiens
taagttatatgctta

SEQ ID NO: 1297599 - DNA, 15 bp, Homo sapiens
ataagttatatgctt

SEQ ID NO: 1297600 - DNA, 15 bp, Homo sapiens
gataagttatatgct

SEQ ID NO: 1297601 - DNA, 15 bp, Homo sapiens
agataagttatatgc

SEQ ID NO: 1297602 - DNA, 15 bp, Homo sapiens
tagataagttatatg

SEQ ID NO: 1297603 - DNA, 15 bp, Homo sapiens
gtagataagttatat

SEQ ID NO: 1297604 - DNA, 15 bp, Homo sapiens
tgtagataagttata

SEQ ID NO: 1297605 - DNA, 15 bp, Homo sapiens
ttgtagataagttat

SEQ ID NO: 1297606 - DNA, 15 bp, Homo sapiens
tttgtagataagtta

SEQ ID NO: 1297607 - DNA, 15 bp, Homo sapiens
atttgtagataagtt

SEQ ID NO: 1297608 - DNA, 15 bp, Homo sapiens
tatttgtagataagt

SEQ ID NO: 1297609 - DNA, 15 bp, Homo sapiens
atatttgtagataag

SEQ ID NO: 1297610 - DNA, 15 bp, Homo sapiens
tatatttgtagataa

SEQ ID NO: 1297611 - DNA, 15 bp, Homo sapiens
ctatatttgtagata

SEQ ID NO: 1297612 - DNA, 15 bp, Homo sapiens
tctatatttgtagat

SEQ ID NO: 1297613 - DNA, 15 bp, Homo sapiens
atctatatttgtaga

SEQ ID NO: 1297614 - DNA, 15 bp, Homo sapiens
aatctatatttgtag

SEQ ID NO: 1297615 - DNA, 15 bp, Homo sapiens
aaatctatatttgta

SEQ ID NO: 1297616 - DNA, 15 bp, Homo sapiens
taaatctatatttgt

SEQ ID NO: 1297617 - DNA, 15 bp, Homo sapiens
ttaaatctatatttg

SEQ ID NO: 1297618 - DNA, 15 bp, Homo sapiens
attaaatctatattt

SEQ ID NO: 1297619 - DNA, 15 bp, Homo sapiens
cattaaatctatatt

SEQ ID NO: 1297620 - DNA, 15 bp, Homo sapiens
acattaaatctatat

SEQ ID NO: 1297621 - DNA, 15 bp, Homo sapiens
cacattaaatctata

SEQ ID NO: 1297622 - DNA, 15 bp, Homo sapiens
tcacattaaatctat

SEQ ID NO: 1297623 - DNA, 15 bp, Homo sapiens
ttcacattaaatcta

SEQ ID NO: 1297624 - DNA, 15 bp, Homo sapiens
attcacattaaatct

SEQ ID NO: 1297625 - DNA, 15 bp, Homo sapiens
aattcacattaaatc

SEQ ID NO: 1297626 - DNA, 15 bp, Homo sapiens
caattcacattaaat

SEQ ID NO: 1297627 - DNA, 15 bp, Homo sapiens
acaattcacattaaa

SEQ ID NO: 1297628 - DNA, 15 bp, Homo sapiens
cacaattcacattaa

SEQ ID NO: 1297629 - DNA, 15 bp, Homo sapiens
acacaattcacatta

SEQ ID NO: 1297630 - DNA, 15 bp, Homo sapiens
cacacaattcacatt

SEQ ID NO: 1297631 - DNA, 15 bp, Homo sapiens
acacacaattcacat

SEQ ID NO: 1297632 - DNA, 15 bp, Homo sapiens
gacacacaattcaca

SEQ ID NO: 1297633 - DNA, 15 bp, Homo sapiens
ggacacacaattcac

SEQ ID NO: 1297634 - DNA, 15 bp, Homo sapiens
aggacacacaattca

SEQ ID NO: 1297635 - DNA, 15 bp, Homo sapiens
taggacacacaattc

SEQ ID NO: 1297636 - DNA, 15 bp, Homo sapiens
ataggacacacaatt

SEQ ID NO: 1297637 - DNA, 15 bp, Homo sapiens
tataggacacacaat

SEQ ID NO: 1297638 - DNA, 15 bp, Homo sapiens
ttataggacacacaa

SEQ ID NO: 1297639 - DNA, 15 bp, Homo sapiens
gttataggacacaca

SEQ ID NO: 1297640 - DNA, 15 bp, Homo sapiens
tgttataggacacac

SEQ ID NO: 1297641 - DNA, 15 bp, Homo sapiens
ctgttataggacaca

SEQ ID NO: 1297642 - DNA, 15 bp, Homo sapiens
actgttataggacac

SEQ ID NO: 1297643 - DNA, 15 bp, Homo sapiens
aactgttataggaca

SEQ ID NO: 1297644 - DNA, 15 bp, Homo sapiens
taactgttataggac

SEQ ID NO: 1297645 - DNA, 15 bp, Homo sapiens
gtaactgttatagga

SEQ ID NO: 1297646 - DNA, 15 bp, Homo sapiens
ggtaactgttatagg

SEQ ID NO: 1297647 - DNA, 15 bp, Homo sapiens
aggtaactgttatag

SEQ ID NO: 1297648 - DNA, 15 bp, Homo sapiens
aaggtaactgttata

SEQ ID NO: 1297649 - DNA, 15 bp, Homo sapiens
aaaggtaactgttat

SEQ ID NO: 1297650 - DNA, 15 bp, Homo sapiens
aaaaggtaactgtta

SEQ ID NO: 1297651 - DNA, 15 bp, Homo sapiens
aaaaaggtaactgtt

SEQ ID NO: 1297652 - DNA, 15 bp, Homo sapiens
caaaaaggtaactgt

SEQ ID NO: 1297653 - DNA, 15 bp, Homo sapiens
gcaaaaaggtaactg

SEQ ID NO: 1297654 - DNA, 15 bp, Homo sapiens
tgcaaaaaggtaact

SEQ ID NO: 1297655 - DNA, 15 bp, Homo sapiens
ctgcaaaaaggtaac

SEQ ID NO: 1297656 - DNA, 15 bp, Homo sapiens
actgcaaaaaggtaa

SEQ ID NO: 1297657 - DNA, 15 bp, Homo sapiens
aactgcaaaaaggta

SEQ ID NO: 1297658 - DNA, 15 bp, Homo sapiens
taactgcaaaaaggt

SEQ ID NO: 1297659 - DNA, 15 bp, Homo sapiens
ttaactgcaaaaagg

SEQ ID NO: 1297660 - DNA, 15 bp, Homo sapiens
gttaactgcaaaaag

SEQ ID NO: 1297661 - DNA, 15 bp, Homo sapiens
agttaactgcaaaaa

SEQ ID NO: 1297662 - DNA, 15 bp, Homo sapiens
cagttaactgcaaaa

SEQ ID NO: 1297663 - DNA, 15 bp, Homo sapiens
tcagttaactgcaaa

SEQ ID NO: 1297664 - DNA, 15 bp, Homo sapiens
ttcagttaactgcaa

SEQ ID NO: 1297665 - DNA, 15 bp, Homo sapiens
attcagttaactgca

SEQ ID NO: 1297666 - DNA, 15 bp, Homo sapiens
tattcagttaactgc

SEQ ID NO: 1297667 - DNA, 15 bp, Homo sapiens
atattcagttaactg

SEQ ID NO: 1297668 - DNA, 15 bp, Homo sapiens
tatattcagttaact

SEQ ID NO: 1297669 - DNA, 15 bp, Homo sapiens
ttatattcagttaac

SEQ ID NO: 1297670 - DNA, 15 bp, Homo sapiens
attatattcagttaa

SEQ ID NO: 1297671 - DNA, 15 bp, Homo sapiens
aattatattcagtta

SEQ ID NO: 1297672 - DNA, 15 bp, Homo sapiens
aaattatattcagtt

SEQ ID NO: 1297673 - DNA, 15 bp, Homo sapiens
aaaattatattcagt

SEQ ID NO: 1297674 - DNA, 15 bp, Homo sapiens
aaaaattatattcag

SEQ ID NO: 1297675 - DNA, 15 bp, Homo sapiens
aaaaaattatattca

SEQ ID NO: 1297676 - DNA, 15 bp, Homo sapiens
taaaaaattatattc

SEQ ID NO: 1297677 - DNA, 15 bp, Homo sapiens
ttaaaaaattatatt

SEQ ID NO: 1297678 - DNA, 15 bp, Homo sapiens
tttaaaaaattatat

SEQ ID NO: 1297679 - DNA, 15 bp, Homo sapiens
ttttaaaaaattata

SEQ ID NO: 1297680 - DNA, 15 bp, Homo sapiens
attttaaaaaattat

SEQ ID NO: 1297681 - DNA, 15 bp, Homo sapiens
cattttaaaaaatta

SEQ ID NO: 1297682 - DNA, 15 bp, Homo sapiens
acattttaaaaaatt

SEQ ID NO: 1297683 - DNA, 15 bp, Homo sapiens
cacattttaaaaaat

SEQ ID NO: 1297684 - DNA, 15 bp, Homo sapiens
gcacattttaaaaaa

SEQ ID NO: 1297685 - DNA, 15 bp, Homo sapiens
tgcacattttaaaaa

SEQ ID NO: 1297686 - DNA, 15 bp, Homo sapiens
gtgcacattttaaaa

SEQ ID NO: 1297687 - DNA, 15 bp, Homo sapiens
ggtgcacattttaaa

SEQ ID NO: 1297688 - DNA, 15 bp, Homo sapiens
tggtgcacattttaa

SEQ ID NO: 1297689 - DNA, 15 bp, Homo sapiens
ttggtgcacatttta

SEQ ID NO: 1297690 - DNA, 15 bp, Homo sapiens
tttggtgcacatttt

SEQ ID NO: 1297691 - DNA, 15 bp, Homo sapiens
ttttggtgcacattt

SEQ ID NO: 1297692 - DNA, 15 bp, Homo sapiens
cttttggtgcacatt

SEQ ID NO: 1297693 - DNA, 15 bp, Homo sapiens
tcttttggtgcacat

SEQ ID NO: 1297694 - DNA, 15 bp, Homo sapiens
atcttttggtgcaca

SEQ ID NO: 1297695 - DNA, 15 bp, Homo sapiens
tatcttttggtgcac

SEQ ID NO: 1297696 - DNA, 15 bp, Homo sapiens
ttatcttttggtgca

SEQ ID NO: 1297697 - DNA, 15 bp, Homo sapiens
attatcttttggtgc

SEQ ID NO: 1297698 - DNA, 15 bp, Homo sapiens
cattatcttttggtg

SEQ ID NO: 1297699 - DNA, 15 bp, Homo sapiens
ccattatcttttggt

SEQ ID NO: 1297700 - DNA, 15 bp, Homo sapiens
gccattatcttttgg

SEQ ID NO: 1297701 - DNA, 15 bp, Homo sapiens
agccattatcttttg

SEQ ID NO: 1297702 - DNA, 15 bp, Homo sapiens
tagccattatctttt

SEQ ID NO: 1297703 - DNA, 15 bp, Homo sapiens
ttagccattatcttt

SEQ ID NO: 1297704 - DNA, 15 bp, Homo sapiens
tttagccattatctt

SEQ ID NO: 1297705 - DNA, 15 bp, Homo sapiens
ctttagccattatct

SEQ ID NO: 1297706 - DNA, 15 bp, Homo sapiens
actttagccattatc

SEQ ID NO: 1297707 - DNA, 15 bp, Homo sapiens
tactttagccattat

SEQ ID NO: 1297708 - DNA, 15 bp, Homo sapiens
ttactttagccatta

SEQ ID NO: 1297709 - DNA, 15 bp, Homo sapiens
attactttagccatt

SEQ ID NO: 1297710 - DNA, 15 bp, Homo sapiens
aattactttagccat

SEQ ID NO: 1297711 - DNA, 15 bp, Homo sapiens
taattactttagcca

SEQ ID NO: 1297712 - DNA, 15 bp, Homo sapiens
ctaattactttagcc

SEQ ID NO: 1297713 - DNA, 15 bp, Homo sapiens
actaattactttagc

SEQ ID NO: 1297714 - DNA, 15 bp, Homo sapiens
aactaattactttag

SEQ ID NO: 1297715 - DNA, 15 bp, Homo sapiens
aaactaattacttta

SEQ ID NO: 1297716 - DNA, 15 bp, Homo sapiens
gaaactaattacttt

SEQ ID NO: 1297717 - DNA, 15 bp, Homo sapiens
agaaactaattactt

SEQ ID NO: 1297718 - DNA, 15 bp, Homo sapiens
aagaaactaattact

SEQ ID NO: 1297719 - DNA, 15 bp, Homo sapiens
gaagaaactaattac

SEQ ID NO: 1297720 - DNA, 15 bp, Homo sapiens
tgaagaaactaatta

SEQ ID NO: 1297721 - DNA, 15 bp, Homo sapiens
ttgaagaaactaatt

SEQ ID NO: 1297722 - DNA, 15 bp, Homo sapiens
tttgaagaaactaat

SEQ ID NO: 1297723 - DNA, 15 bp, Homo sapiens
atttgaagaaactaa

SEQ ID NO: 1297724 - DNA, 15 bp, Homo sapiens
tatttgaagaaacta

SEQ ID NO: 1297725 - DNA, 15 bp, Homo sapiens
ctatttgaagaaact

SEQ ID NO: 1297726 - DNA, 15 bp, Homo sapiens
actatttgaagaaac

SEQ ID NO: 1297727 - DNA, 15 bp, Homo sapiens
cactatttgaagaaa

SEQ ID NO: 1297728 - DNA, 15 bp, Homo sapiens
ccactatttgaagaa

SEQ ID NO: 1297729 - DNA, 15 bp, Homo sapiens
accactatttgaaga

SEQ ID NO: 1297730 - DNA, 15 bp, Homo sapiens
gaccactatttgaag

SEQ ID NO: 1297731 - DNA, 15 bp, Homo sapiens
agaccactatttgaa

SEQ ID NO: 1297732 - DNA, 15 bp, Homo sapiens
gagaccactatttga

SEQ ID NO: 1297733 - DNA, 15 bp, Homo sapiens
agagaccactatttg

SEQ ID NO: 1297734 - DNA, 15 bp, Homo sapiens
tagagaccactattt

SEQ ID NO: 1297735 - DNA, 15 bp, Homo sapiens
gtagagaccactatt

SEQ ID NO: 1297736 - DNA, 15 bp, Homo sapiens
ggtagagaccactat

SEQ ID NO: 1297737 - DNA, 15 bp, Homo sapiens
aggtagagaccacta

SEQ ID NO: 1297738 - DNA, 15 bp, Homo sapiens
aaggtagagaccact

SEQ ID NO: 1297739 - DNA, 15 bp, Homo sapiens
taaggtagagaccac

SEQ ID NO: 1297740 - DNA, 15 bp, Homo sapiens
ataaggtagagacca

SEQ ID NO: 1297741 - DNA, 15 bp, Homo sapiens
aataaggtagagacc

SEQ ID NO: 1297742 - DNA, 15 bp, Homo sapiens
aaataaggtagagac

SEQ ID NO: 1297743 - DNA, 15 bp, Homo sapiens
gaaataaggtagaga

SEQ ID NO: 1297744 - DNA, 15 bp, Homo sapiens
agaaataaggtagag

SEQ ID NO: 1297745 - DNA, 15 bp, Homo sapiens
tagaaataaggtaga

SEQ ID NO: 1297746 - DNA, 15 bp, Homo sapiens
atagaaataaggtag

SEQ ID NO: 1297747 - DNA, 15 bp, Homo sapiens
gatagaaataaggta

SEQ ID NO: 1297748 - DNA, 15 bp, Homo sapiens
ggatagaaataaggt

SEQ ID NO: 1297749 - DNA, 15 bp, Homo sapiens
aggatagaaataagg

SEQ ID NO: 1297750 - DNA, 15 bp, Homo sapiens
aaggatagaaataag

SEQ ID NO: 1297751 - DNA, 15 bp, Homo sapiens
aaaggatagaaataa

SEQ ID NO: 1297752 - DNA, 15 bp, Homo sapiens
gaaaggatagaaata

SEQ ID NO: 1297753 - DNA, 15 bp, Homo sapiens
tgaaaggatagaaat

SEQ ID NO: 1297754 - DNA, 15 bp, Homo sapiens
atgaaaggatagaaa

SEQ ID NO: 1297755 - DNA, 15 bp, Homo sapiens
tatgaaaggatagaa

SEQ ID NO: 1297756 - DNA, 15 bp, Homo sapiens
atatgaaaggataga

SEQ ID NO: 1297757 - DNA, 15 bp, Homo sapiens
tatatgaaaggatag

SEQ ID NO: 1297758 - DNA, 15 bp, Homo sapiens
gtatatgaaaggata

SEQ ID NO: 1297759 - DNA, 15 bp, Homo sapiens
agtatatgaaaggat

SEQ ID NO: 1297760 - DNA, 15 bp, Homo sapiens
tagtatatgaaagga

SEQ ID NO: 1297761 - DNA, 15 bp, Homo sapiens
atagtatatgaaagg

SEQ ID NO: 1297762 - DNA, 15 bp, Homo sapiens
aatagtatatgaaag

SEQ ID NO: 1297763 - DNA, 15 bp, Homo sapiens
caatagtatatgaaa

SEQ ID NO: 1297764 - DNA, 15 bp, Homo sapiens
gcaatagtatatgaa

SEQ ID NO: 1297765 - DNA, 15 bp, Homo sapiens
ggcaatagtatatga

SEQ ID NO: 1297766 - DNA, 15 bp, Homo sapiens
aggcaatagtatatg

SEQ ID NO: 1297767 - DNA, 15 bp, Homo sapiens
caggcaatagtatat

SEQ ID NO: 1297768 - DNA, 15 bp, Homo sapiens
gcaggcaatagtata

SEQ ID NO: 1297769 - DNA, 15 bp, Homo sapiens
ggcaggcaatagtat

SEQ ID NO: 1297770 - DNA, 15 bp, Homo sapiens
aggcaggcaatagta

SEQ ID NO: 1297771 - DNA, 15 bp, Homo sapiens
caggcaggcaatagt

SEQ ID NO: 1297772 - DNA, 15 bp, Homo sapiens
ccaggcaggcaatag

SEQ ID NO: 1297773 - DNA, 15 bp, Homo sapiens
aaaccaggcaggcaa

SEQ ID NO: 1297774 - DNA, 15 bp, Homo sapiens
taaaccaggcaggca

SEQ ID NO: 1297775 - DNA, 15 bp, Homo sapiens
ataaaccaggcaggc

SEQ ID NO: 1297776 - DNA, 15 bp, Homo sapiens
aataaaccaggcagg

SEQ ID NO: 1297777 - DNA, 15 bp, Homo sapiens
aaataaaccaggcag

SEQ ID NO: 1297778 - DNA, 15 bp, Homo sapiens
taaataaaccaggca

SEQ ID NO: 1297779 - DNA, 15 bp, Homo sapiens
ttaaataaaccaggc

SEQ ID NO: 1297780 - DNA, 15 bp, Homo sapiens
tttaaataaaccagg

SEQ ID NO: 1297781 - DNA, 15 bp, Homo sapiens
ttttaaataaaccag

SEQ ID NO: 1297782 - DNA, 15 bp, Homo sapiens
tttttaaataaacca

SEQ ID NO: 1297783 - DNA, 15 bp, Homo sapiens
ttttttaaataaacc

SEQ ID NO: 1297784 - DNA, 15 bp, Homo sapiens
cttttttaaataaac

SEQ ID NO: 1297785 - DNA, 15 bp, Homo sapiens
acttttttaaataaa

SEQ ID NO: 1297786 - DNA, 15 bp, Homo sapiens
aacttttttaaataa

SEQ ID NO: 1297787 - DNA, 15 bp, Homo sapiens
aaacttttttaaata

SEQ ID NO: 1297788 - DNA, 15 bp, Homo sapiens
taaacttttttaaat

SEQ ID NO: 1297789 - DNA, 15 bp, Homo sapiens
ataaacttttttaaa

SEQ ID NO: 1297790 - DNA, 15 bp, Homo sapiens
tataaacttttttaa

SEQ ID NO: 1297791 - DNA, 15 bp, Homo sapiens
gtataaactttttta

SEQ ID NO: 1297792 - DNA, 15 bp, Homo sapiens
tgtataaactttttt

SEQ ID NO: 1297793 - DNA, 15 bp, Homo sapiens
ttgtataaacttttt

SEQ ID NO: 1297794 - DNA, 15 bp, Homo sapiens
tttgtataaactttt

SEQ ID NO: 1297795 - DNA, 15 bp, Homo sapiens
ttttgtataaacttt

SEQ ID NO: 1297796 - DNA, 15 bp, Homo sapiens
cttttgtataaactt

SEQ ID NO: 1297797 - DNA, 15 bp, Homo sapiens
acttttgtataaact

SEQ ID NO: 1297798 - DNA, 15 bp, Homo sapiens
cacttttgtataaac

SEQ ID NO: 1297799 - DNA, 15 bp, Homo sapiens
acacttttgtataaa

SEQ ID NO: 1297800 - DNA, 15 bp, Homo sapiens
tacacttttgtataa

SEQ ID NO: 1297801 - DNA, 15 bp, Homo sapiens
ctacacttttgtata

SEQ ID NO: 1297802 - DNA, 15 bp, Homo sapiens
actacacttttgtat

SEQ ID NO: 1297803 - DNA, 15 bp, Homo sapiens
gactacacttttgta

SEQ ID NO: 1297804 - DNA, 15 bp, Homo sapiens
agactacacttttgt

SEQ ID NO: 1297805 - DNA, 15 bp, Homo sapiens
gagactacacttttg

SEQ ID NO: 1297806 - DNA, 15 bp, Homo sapiens
agagactacactttt

SEQ ID NO: 1297807 - DNA, 15 bp, Homo sapiens
cagagactacacttt

SEQ ID NO: 1297808 - DNA, 15 bp, Homo sapiens
acagagactacactt

SEQ ID NO: 1297809 - DNA, 15 bp, Homo sapiens
aacagagactacact

SEQ ID NO: 1297810 - DNA, 15 bp, Homo sapiens
taacagagactacac

SEQ ID NO: 1297811 - DNA, 15 bp, Homo sapiens
ataacagagactaca

SEQ ID NO: 1297812 - DNA, 15 bp, Homo sapiens
aataacagagactac

SEQ ID NO: 1297813 - DNA, 15 bp, Homo sapiens
taataacagagacta

SEQ ID NO: 1297814 - DNA, 15 bp, Homo sapiens
ataataacagagact

SEQ ID NO: 1297815 - DNA, 15 bp, Homo sapiens
gataataacagagac

SEQ ID NO: 1297816 - DNA, 15 bp, Homo sapiens
tgataataacagaga

SEQ ID NO: 1297817 - DNA, 15 bp, Homo sapiens
atgataataacagag

SEQ ID NO: 1297818 - DNA, 15 bp, Homo sapiens
catgataataacaga

SEQ ID NO: 1297819 - DNA, 15 bp, Homo sapiens
acatgataataacag

SEQ ID NO: 1297820 - DNA, 15 bp, Homo sapiens
tacatgataataaca

SEQ ID NO: 1297821 - DNA, 15 bp, Homo sapiens
ctacatgataataac

SEQ ID NO: 1297822 - DNA, 15 bp, Homo sapiens
tctacatgataataa

SEQ ID NO: 1297823 - DNA, 15 bp, Homo sapiens
ttctacatgataata

SEQ ID NO: 1297824 - DNA, 15 bp, Homo sapiens
tttctacatgataat

SEQ ID NO: 1297825 - DNA, 15 bp, Homo sapiens
gtttctacatgataa

SEQ ID NO: 1297826 - DNA, 15 bp, Homo sapiens
ggtttctacatgata

SEQ ID NO: 1297827 - DNA, 15 bp, Homo sapiens
aggtttctacatgat

SEQ ID NO: 1297828 - DNA, 15 bp, Homo sapiens
taggtttctacatga

SEQ ID NO: 1297829 - DNA, 15 bp, Homo sapiens
ttaggtttctacatg

SEQ ID NO: 1297830 - DNA, 15 bp, Homo sapiens
tttaggtttctacat

SEQ ID NO: 1297831 - DNA, 15 bp, Homo sapiens
ttttaggtttctaca

SEQ ID NO: 1297832 - DNA, 15 bp, Homo sapiens
attttaggtttctac

SEQ ID NO: 1297833 - DNA, 15 bp, Homo sapiens
aattttaggtttcta

SEQ ID NO: 1297834 - DNA, 15 bp, Homo sapiens
caattttaggtttct

SEQ ID NO: 1297835 - DNA, 15 bp, Homo sapiens
ccaattttaggtttc

SEQ ID NO: 1297836 - DNA, 15 bp, Homo sapiens
tccaattttaggttt

SEQ ID NO: 1297837 - DNA, 15 bp, Homo sapiens
ttccaattttaggtt

SEQ ID NO: 1297838 - DNA, 15 bp, Homo sapiens
attccaattttaggt

SEQ ID NO: 1297839 - DNA, 15 bp, Homo sapiens
cattccaattttagg

SEQ ID NO: 1297840 - DNA, 15 bp, Homo sapiens
ccattccaattttag

SEQ ID NO: 1297841 - DNA, 15 bp, Homo sapiens
accattccaatttta

SEQ ID NO: 1297842 - DNA, 15 bp, Homo sapiens
aaccattccaatttt

SEQ ID NO: 1297843 - DNA, 15 bp, Homo sapiens
caaccattccaattt

SEQ ID NO: 1297844 - DNA, 15 bp, Homo sapiens
tcaaccattccaatt

SEQ ID NO: 1297845 - DNA, 15 bp, Homo sapiens
ctcaaccattccaat

SEQ ID NO: 1297846 - DNA, 15 bp, Homo sapiens
tctcaaccattccaa

SEQ ID NO: 1297847 - DNA, 15 bp, Homo sapiens
ctctcaaccattcca

SEQ ID NO: 1297848 - DNA, 15 bp, Homo sapiens
actctcaaccattcc

SEQ ID NO: 1297849 - DNA, 15 bp, Homo sapiens
cactctcaaccattc

SEQ ID NO: 1297850 - DNA, 15 bp, Homo sapiens
tcactctcaaccatt

SEQ ID NO: 1297851 - DNA, 15 bp, Homo sapiens
atcactctcaaccat

SEQ ID NO: 1297852 - DNA, 15 bp, Homo sapiens
aatcactctcaacca

SEQ ID NO: 1297853 - DNA, 15 bp, Homo sapiens
caatcactctcaacc

SEQ ID NO: 1297854 - DNA, 15 bp, Homo sapiens
acaatcactctcaac

SEQ ID NO: 1297855 - DNA, 15 bp, Homo sapiens
aacaatcactctcaa

SEQ ID NO: 1297856 - DNA, 15 bp, Homo sapiens
taacaatcactctca

SEQ ID NO: 1297857 - DNA, 15 bp, Homo sapiens
ttaacaatcactctc

SEQ ID NO: 1297858 - DNA, 15 bp, Homo sapiens
tttaacaatcactct

SEQ ID NO: 1297859 - DNA, 15 bp, Homo sapiens
ttttaacaatcactc

SEQ ID NO: 1297860 - DNA, 15 bp, Homo sapiens
attttaacaatcact

SEQ ID NO: 1297861 - DNA, 15 bp, Homo sapiens
aattttaacaatcac

SEQ ID NO: 1297862 - DNA, 15 bp, Homo sapiens
aaattttaacaatca

SEQ ID NO: 1297863 - DNA, 15 bp, Homo sapiens
aaaattttaacaatc

SEQ ID NO: 1297864 - DNA, 15 bp, Homo sapiens
aaaaattttaacaat

SEQ ID NO: 1297865 - DNA, 15 bp, Homo sapiens
caaaaattttaacaa

SEQ ID NO: 1297866 - DNA, 15 bp, Homo sapiens
tcaaaaattttaaca

SEQ ID NO: 1297867 - DNA, 15 bp, Homo sapiens
gtcaaaaattttaac

SEQ ID NO: 1297868 - DNA, 15 bp, Homo sapiens
agtcaaaaattttaa

SEQ ID NO: 1297869 - DNA, 15 bp, Homo sapiens
cagtcaaaaatttta

SEQ ID NO: 1297870 - DNA, 15 bp, Homo sapiens
tcagtcaaaaatttt

SEQ ID NO: 1297871 - DNA, 15 bp, Homo sapiens
atcagtcaaaaattt

SEQ ID NO: 1297872 - DNA, 15 bp, Homo sapiens
gatcagtcaaaaatt

SEQ ID NO: 1297873 - DNA, 15 bp, Homo sapiens
tgatcagtcaaaaat

SEQ ID NO: 1297874 - DNA, 15 bp, Homo sapiens
atgatcagtcaaaaa

SEQ ID NO: 1297875 - DNA, 15 bp, Homo sapiens
tatgatcagtcaaaa

SEQ ID NO: 1297876 - DNA, 15 bp, Homo sapiens
ttatgatcagtcaaa

SEQ ID NO: 1297877 - DNA, 15 bp, Homo sapiens
cttatgatcagtcaa

SEQ ID NO: 1297878 - DNA, 15 bp, Homo sapiens
acttatgatcagtca

SEQ ID NO: 1297879 - DNA, 15 bp, Homo sapiens
tacttatgatcagtc

SEQ ID NO: 1297880 - DNA, 15 bp, Homo sapiens
ttacttatgatcagt

SEQ ID NO: 1297881 - DNA, 15 bp, Homo sapiens
tttacttatgatcag

SEQ ID NO: 1297882 - DNA, 15 bp, Homo sapiens
ctttacttatgatca

SEQ ID NO: 1297883 - DNA, 15 bp, Homo sapiens
actttacttatgatc

SEQ ID NO: 1297884 - DNA, 15 bp, Homo sapiens
aactttacttatgat

SEQ ID NO: 1297885 - DNA, 15 bp, Homo sapiens
taactttacttatga

SEQ ID NO: 1297886 - DNA, 15 bp, Homo sapiens
ttaactttacttatg

SEQ ID NO: 1297887 - DNA, 15 bp, Homo sapiens
attaactttacttat

SEQ ID NO: 1297888 - DNA, 15 bp, Homo sapiens
aattaactttactta

SEQ ID NO: 1297889 - DNA, 15 bp, Homo sapiens
aaattaactttactt

SEQ ID NO: 1297890 - DNA, 15 bp, Homo sapiens
aaaattaactttact

SEQ ID NO: 1297891 - DNA, 15 bp, Homo sapiens
caaaattaactttac

SEQ ID NO: 1297892 - DNA, 15 bp, Homo sapiens
acaaaattaacttta

SEQ ID NO: 1297893 - DNA, 15 bp, Homo sapiens
cacaaaattaacttt

SEQ ID NO: 1297894 - DNA, 15 bp, Homo sapiens
acacaaaattaactt

SEQ ID NO: 1297895 - DNA, 15 bp, Homo sapiens
gacacaaaattaact

SEQ ID NO: 1297896 - DNA, 15 bp, Homo sapiens
agacacaaaattaac

SEQ ID NO: 1297897 - DNA, 15 bp, Homo sapiens
aagacacaaaattaa

SEQ ID NO: 1297898 - DNA, 15 bp, Homo sapiens
aaagacacaaaatta

SEQ ID NO: 1297899 - DNA, 15 bp, Homo sapiens
taaagacacaaaatt

SEQ ID NO: 1297900 - DNA, 15 bp, Homo sapiens
ctaaagacacaaaat

SEQ ID NO: 1297901 - DNA, 15 bp, Homo sapiens
gctaaagacacaaaa

SEQ ID NO: 1297902 - DNA, 15 bp, Homo sapiens
tgctaaagacacaaa

SEQ ID NO: 1297903 - DNA, 15 bp, Homo sapiens
atgctaaagacacaa

SEQ ID NO: 1297904 - DNA, 15 bp, Homo sapiens
catgctaaagacaca

SEQ ID NO: 1297905 - DNA, 15 bp, Homo sapiens
tcatgctaaagacac

SEQ ID NO: 1297906 - DNA, 15 bp, Homo sapiens
ttcatgctaaagaca

SEQ ID NO: 1297907 - DNA, 15 bp, Homo sapiens
gttcatgctaaagac

SEQ ID NO: 1297908 - DNA, 15 bp, Homo sapiens
agttcatgctaaaga

SEQ ID NO: 1297909 - DNA, 15 bp, Homo sapiens
gagttcatgctaaag

SEQ ID NO: 1297910 - DNA, 15 bp, Homo sapiens
agagttcatgctaaa

SEQ ID NO: 1297911 - DNA, 15 bp, Homo sapiens
aagagttcatgctaa

SEQ ID NO: 1297912 - DNA, 15 bp, Homo sapiens
aaagagttcatgcta

SEQ ID NO: 1297913 - DNA, 15 bp, Homo sapiens
aaaagagttcatgct

SEQ ID NO: 1297914 - DNA, 15 bp, Homo sapiens
taaaagagttcatgc

SEQ ID NO: 1297915 - DNA, 15 bp, Homo sapiens
ttaaaagagttcatg

SEQ ID NO: 1297916 - DNA, 15 bp, Homo sapiens
attaaaagagttcat

SEQ ID NO: 1297917 - DNA, 15 bp, Homo sapiens
tattaaaagagttca

SEQ ID NO: 1297918 - DNA, 15 bp, Homo sapiens
atattaaaagagttc

SEQ ID NO: 1297919 - DNA, 15 bp, Homo sapiens
catattaaaagagtt

SEQ ID NO: 1297920 - DNA, 15 bp, Homo sapiens
tcatattaaaagagt

SEQ ID NO: 1297921 - DNA, 15 bp, Homo sapiens
ttcatattaaaagag

SEQ ID NO: 1297922 - DNA, 15 bp, Homo sapiens
tttcatattaaaaga

SEQ ID NO: 1297923 - DNA, 15 bp, Homo sapiens
gtttcatattaaaag

SEQ ID NO: 1297924 - DNA, 15 bp, Homo sapiens
agtttcatattaaaa

SEQ ID NO: 1297925 - DNA, 15 bp, Homo sapiens
cagtttcatattaaa

SEQ ID NO: 1297926 - DNA, 15 bp, Homo sapiens
tcagtttcatattaa

SEQ ID NO: 1297927 - DNA, 15 bp, Homo sapiens
ttcagtttcatatta

SEQ ID NO: 1297928 - DNA, 15 bp, Homo sapiens
tttcagtttcatatt

SEQ ID NO: 1297929 - DNA, 15 bp, Homo sapiens
ttttcagtttcatat

SEQ ID NO: 1297930 - DNA, 15 bp, Homo sapiens
attttcagtttcata

SEQ ID NO: 1297931 - DNA, 15 bp, Homo sapiens
tattttcagtttcat

SEQ ID NO: 1297932 - DNA, 15 bp, Homo sapiens
atattttcagtttca

SEQ ID NO: 1297933 - DNA, 15 bp, Homo sapiens
catattttcagtttc

SEQ ID NO: 1297934 - DNA, 15 bp, Homo sapiens
gcatattttcagttt

SEQ ID NO: 1297935 - DNA, 15 bp, Homo sapiens
cgcatattttcagtt

SEQ ID NO: 1297936 - DNA, 15 bp, Homo sapiens
acgcatattttcagt

SEQ ID NO: 1297937 - DNA, 15 bp, Homo sapiens
tacgcatattttcag

SEQ ID NO: 1297938 - DNA, 15 bp, Homo sapiens
ttacgcatattttca

SEQ ID NO: 1297939 - DNA, 15 bp, Homo sapiens
attacgcatattttc

SEQ ID NO: 1297940 - DNA, 15 bp, Homo sapiens
aattacgcatatttt

SEQ ID NO: 1297941 - DNA, 15 bp, Homo sapiens
aaattacgcatattt

SEQ ID NO: 1297942 - DNA, 15 bp, Homo sapiens
taaattacgcatatt

SEQ ID NO: 1297943 - DNA, 15 bp, Homo sapiens
ctaaattacgcatat

SEQ ID NO: 1297944 - DNA, 15 bp, Homo sapiens
tctaaattacgcata

SEQ ID NO: 1297945 - DNA, 15 bp, Homo sapiens
ttctaaattacgcat

SEQ ID NO: 1297946 - DNA, 15 bp, Homo sapiens
cttctaaattacgca

SEQ ID NO: 1297947 - DNA, 15 bp, Homo sapiens
acttctaaattacgc

SEQ ID NO: 1297948 - DNA, 15 bp, Homo sapiens
aacttctaaattacg

SEQ ID NO: 1297949 - DNA, 15 bp, Homo sapiens
taacttctaaattac

SEQ ID NO: 1297950 - DNA, 15 bp, Homo sapiens
ttaacttctaaatta

SEQ ID NO: 1297951 - DNA, 15 bp, Homo sapiens
tttaacttctaaatt

SEQ ID NO: 1297952 - DNA, 15 bp, Homo sapiens
gtttaacttctaaat

SEQ ID NO: 1297953 - DNA, 15 bp, Homo sapiens
tgtttaacttctaaa

SEQ ID NO: 1297954 - DNA, 15 bp, Homo sapiens
gtgtttaacttctaa

SEQ ID NO: 1297955 - DNA, 15 bp, Homo sapiens
tgtgtttaacttcta

SEQ ID NO: 1297956 - DNA, 15 bp, Homo sapiens
ctgtgtttaacttct

SEQ ID NO: 1297957 - DNA, 15 bp, Homo sapiens
actgtgtttaacttc

SEQ ID NO: 1297958 - DNA, 15 bp, Homo sapiens
tactgtgtttaactt

SEQ ID NO: 1297959 - DNA, 15 bp, Homo sapiens
ttactgtgtttaact

SEQ ID NO: 1297960 - DNA, 15 bp, Homo sapiens
tttactgtgtttaac

SEQ ID NO: 1297961 - DNA, 15 bp, Homo sapiens
ttttactgtgtttaa

SEQ ID NO: 1297962 - DNA, 15 bp, Homo sapiens
attttactgtgttta

SEQ ID NO: 1297963 - DNA, 15 bp, Homo sapiens
cattttactgtgttt

SEQ ID NO: 1297964 - DNA, 15 bp, Homo sapiens
acattttactgtgtt

SEQ ID NO: 1297965 - DNA, 15 bp, Homo sapiens
aacattttactgtgt

SEQ ID NO: 1297966 - DNA, 15 bp, Homo sapiens
aaacattttactgtg

SEQ ID NO: 1297967 - DNA, 15 bp, Homo sapiens
aaaacattttactgt

SEQ ID NO: 1297968 - DNA, 15 bp, Homo sapiens
taaaacattttactg

SEQ ID NO: 1297969 - DNA, 15 bp, Homo sapiens
ttaaaacattttact

SEQ ID NO: 1297970 - DNA, 15 bp, Homo sapiens
tttaaaacattttac

SEQ ID NO: 1297971 - DNA, 15 bp, Homo sapiens
atttaaaacatttta

SEQ ID NO: 1297972 - DNA, 15 bp, Homo sapiens
aatttaaaacatttt

SEQ ID NO: 1297973 - DNA, 15 bp, Homo sapiens
aaatttaaaacattt

SEQ ID NO: 1297974 - DNA, 15 bp, Homo sapiens
aaaatttaaaacatt

SEQ ID NO: 1297975 - DNA, 15 bp, Homo sapiens
taaaatttaaaacat

SEQ ID NO: 1297976 - DNA, 15 bp, Homo sapiens
ataaaatttaaaaca

SEQ ID NO: 1297977 - DNA, 15 bp, Homo sapiens
aataaaatttaaaac

SEQ ID NO: 1297978 - DNA, 15 bp, Homo sapiens
aaataaaatttaaaa

SEQ ID NO: 1297979 - DNA, 15 bp, Homo sapiens
taaataaaatttaaa

SEQ ID NO: 1297980 - DNA, 15 bp, Homo sapiens
ttaaataaaatttaa

SEQ ID NO: 1297981 - DNA, 15 bp, Homo sapiens
cttaaataaaattta

SEQ ID NO: 1297982 - DNA, 15 bp, Homo sapiens
acttaaataaaattt

SEQ ID NO: 1297983 - DNA, 15 bp, Homo sapiens
cacttaaataaaatt

SEQ ID NO: 1297984 - DNA, 15 bp, Homo sapiens
ccacttaaataaaat

SEQ ID NO: 1297985 - DNA, 15 bp, Homo sapiens
tccacttaaataaaa

SEQ ID NO: 1297986 - DNA, 15 bp, Homo sapiens
ttccacttaaataaa

SEQ ID NO: 1297987 - DNA, 15 bp, Homo sapiens
tttccacttaaataa

SEQ ID NO: 1297988 - DNA, 15 bp, Homo sapiens
atttccacttaaata

SEQ ID NO: 1297989 - DNA, 15 bp, Homo sapiens
tatttccacttaaat

SEQ ID NO: 1297990 - DNA, 15 bp, Homo sapiens
ttatttccacttaaa

SEQ ID NO: 1297991 - DNA, 15 bp, Homo sapiens
tttatttccacttaa

SEQ ID NO: 1297992 - DNA, 15 bp, Homo sapiens
ctttatttccactta

SEQ ID NO: 1297993 - DNA, 15 bp, Homo sapiens
actttatttccactt

SEQ ID NO: 1297994 - DNA, 15 bp, Homo sapiens
aactttatttccact

SEQ ID NO: 1297995 - DNA, 15 bp, Homo sapiens
aaactttatttccac

SEQ ID NO: 1297996 - DNA, 15 bp, Homo sapiens
aaaactttatttcca

SEQ ID NO: 1297997 - DNA, 15 bp, Homo sapiens
aaaaactttatttcc

SEQ ID NO: 1297998 - DNA, 15 bp, Homo sapiens
taaaaactttatttc

SEQ ID NO: 1297999 - DNA, 15 bp, Homo sapiens
ctaaaaactttattt

SEQ ID NO: 1298000 - DNA, 15 bp, Homo sapiens
tctaaaaactttatt

SEQ ID NO: 1298001 - DNA, 15 bp, Homo sapiens
ttctaaaaactttat

SEQ ID NO: 1298002 - DNA, 15 bp, Homo sapiens
cttctaaaaacttta

SEQ ID NO: 1298003 - DNA, 15 bp, Homo sapiens
ccttctaaaaacttt

SEQ ID NO: 1298004 - DNA, 15 bp, Homo sapiens
tccttctaaaaactt

SEQ ID NO: 1298005 - DNA, 15 bp, Homo sapiens
ttccttctaaaaact

SEQ ID NO: 1298006 - DNA, 15 bp, Homo sapiens
attccttctaaaaac

SEQ ID NO: 1298007 - DNA, 15 bp, Homo sapiens
tattccttctaaaaa

SEQ ID NO: 1298008 - DNA, 15 bp, Homo sapiens
ttattccttctaaaa

SEQ ID NO: 1298009 - DNA, 15 bp, Homo sapiens
attattccttctaaa

SEQ ID NO: 1298010 - DNA, 15 bp, Homo sapiens
cattattccttctaa

SEQ ID NO: 1298011 - DNA, 15 bp, Homo sapiens
gcattattccttcta

SEQ ID NO: 1298012 - DNA, 15 bp, Homo sapiens
tgcattattccttct

SEQ ID NO: 1298013 - DNA, 15 bp, Homo sapiens
atgcattattccttc

SEQ ID NO: 1298014 - DNA, 15 bp, Homo sapiens
aatgcattattcctt

SEQ ID NO: 1298015 - DNA, 15 bp, Homo sapiens
caatgcattattcct

SEQ ID NO: 1298016 - DNA, 15 bp, Homo sapiens
tcaatgcattattcc

SEQ ID NO: 1298017 - DNA, 15 bp, Homo sapiens
ttcaatgcattattc

SEQ ID NO: 1298018 - DNA, 15 bp, Homo sapiens
tttcaatgcattatt

SEQ ID NO: 1298019 - DNA, 15 bp, Homo sapiens
ttttcaatgcattat

SEQ ID NO: 1298020 - DNA, 15 bp, Homo sapiens
tttttcaatgcatta

SEQ ID NO: 1298021 - DNA, 15 bp, Homo sapiens
gtttttcaatgcatt

SEQ ID NO: 1298022 - DNA, 15 bp, Homo sapiens
agtttttcaatgcat

SEQ ID NO: 1298023 - DNA, 15 bp, Homo sapiens
aagtttttcaatgca

SEQ ID NO: 1298024 - DNA, 15 bp, Homo sapiens
caagtttttcaatgc

SEQ ID NO: 1298025 - DNA, 15 bp, Homo sapiens
tcaagtttttcaatg

SEQ ID NO: 1298026 - DNA, 15 bp, Homo sapiens
ctcaagtttttcaat

SEQ ID NO: 1298027 - DNA, 15 bp, Homo sapiens
actcaagtttttcaa

SEQ ID NO: 1298028 - DNA, 15 bp, Homo sapiens
aactcaagtttttca

SEQ ID NO: 1298029 - DNA, 15 bp, Homo sapiens
aaactcaagtttttc

SEQ ID NO: 1298030 - DNA, 15 bp, Homo sapiens
aaaactcaagttttt

SEQ ID NO: 1298031 - DNA, 15 bp, Homo sapiens
taaaactcaagtttt

SEQ ID NO: 1298032 - DNA, 15 bp, Homo sapiens
ttaaaactcaagttt

SEQ ID NO: 1298033 - DNA, 15 bp, Homo sapiens
attaaaactcaagtt

SEQ ID NO: 1298034 - DNA, 15 bp, Homo sapiens
cattaaaactcaagt

SEQ ID NO: 1298035 - DNA, 15 bp, Homo sapiens
gcattaaaactcaag

SEQ ID NO: 1298036 - DNA, 15 bp, Homo sapiens
agcattaaaactcaa

SEQ ID NO: 1298037 - DNA, 15 bp, Homo sapiens
aagcattaaaactca

SEQ ID NO: 1298038 - DNA, 15 bp, Homo sapiens
aaagcattaaaactc

SEQ ID NO: 1298039 - DNA, 15 bp, Homo sapiens
aaaagcattaaaact

SEQ ID NO: 1298040 - DNA, 15 bp, Homo sapiens
aaaaagcattaaaac

SEQ ID NO: 1298041 - DNA, 15 bp, Homo sapiens
taaaaagcattaaaa

SEQ ID NO: 1298042 - DNA, 15 bp, Homo sapiens
ttaaaaagcattaaa

SEQ ID NO: 1298043 - DNA, 15 bp, Homo sapiens
attaaaaagcattaa

SEQ ID NO: 1298044 - DNA, 15 bp, Homo sapiens
tattaaaaagcatta

SEQ ID NO: 1298045 - DNA, 15 bp, Homo sapiens
gtattaaaaagcatt

SEQ ID NO: 1298046 - DNA, 15 bp, Homo sapiens
agtattaaaaagcat

SEQ ID NO: 1298047 - DNA, 15 bp, Homo sapiens
cagtattaaaaagca

SEQ ID NO: 1298048 - DNA, 15 bp, Homo sapiens
tcagtattaaaaagc

SEQ ID NO: 1298049 - DNA, 15 bp, Homo sapiens
ttcagtattaaaaag

SEQ ID NO: 1298050 - DNA, 15 bp, Homo sapiens
gttcagtattaaaaa

SEQ ID NO: 1298051 - DNA, 15 bp, Homo sapiens
tgttcagtattaaaa

SEQ ID NO: 1298052 - DNA, 15 bp, Homo sapiens
ttgttcagtattaaa

SEQ ID NO: 1298053 - DNA, 15 bp, Homo sapiens
gttgttcagtattaa

SEQ ID NO: 1298054 - DNA, 15 bp, Homo sapiens
agttgttcagtatta

SEQ ID NO: 1298055 - DNA, 15 bp, Homo sapiens
aagttgttcagtatt

SEQ ID NO: 1298056 - DNA, 15 bp, Homo sapiens
caagttgttcagtat

SEQ ID NO: 1298057 - DNA, 15 bp, Homo sapiens
ccaagttgttcagta

SEQ ID NO: 1298058 - DNA, 15 bp, Homo sapiens
accaagttgttcagt

SEQ ID NO: 1298059 - DNA, 15 bp, Homo sapiens
aaccaagttgttcag

SEQ ID NO: 1298060 - DNA, 15 bp, Homo sapiens
taaccaagttgttca

SEQ ID NO: 1298061 - DNA, 15 bp, Homo sapiens
ataaccaagttgttc

SEQ ID NO: 1298062 - DNA, 15 bp, Homo sapiens
gataaccaagttgtt

SEQ ID NO: 1298063 - DNA, 15 bp, Homo sapiens
tgataaccaagttgt

SEQ ID NO: 1298064 - DNA, 15 bp, Homo sapiens
ttgataaccaagttg

SEQ ID NO: 1298065 - DNA, 15 bp, Homo sapiens
attgataaccaagtt

SEQ ID NO: 1298066 - DNA, 15 bp, Homo sapiens
tattgataaccaagt

SEQ ID NO: 1298067 - DNA, 15 bp, Homo sapiens
gtattgataaccaag

SEQ ID NO: 1298068 - DNA, 15 bp, Homo sapiens
ggtattgataaccaa

SEQ ID NO: 1298069 - DNA, 15 bp, Homo sapiens
tggtattgataacca

SEQ ID NO: 1298070 - DNA, 15 bp, Homo sapiens
gtggtattgataacc

SEQ ID NO: 1298071 - DNA, 15 bp, Homo sapiens
ggtggtattgataac

SEQ ID NO: 1298072 - DNA, 15 bp, Homo sapiens
tggtggtattgataa

SEQ ID NO: 1298073 - DNA, 15 bp, Homo sapiens
ctggtggtattgata

SEQ ID NO: 1298074 - DNA, 15 bp, Homo sapiens
cctggtggtattgat

SEQ ID NO: 1298075 - DNA, 15 bp, Homo sapiens
ccctggtggtattga

SEQ ID NO: 1298076 - DNA, 15 bp, Homo sapiens
tccctggtggtattg

SEQ ID NO: 1298077 - DNA, 15 bp, Homo sapiens
ctccctggtggtatt

SEQ ID NO: 1298078 - DNA, 15 bp, Homo sapiens
tctccctggtggtat

SEQ ID NO: 1298079 - DNA, 15 bp, Homo sapiens
ttctccctggtggta

SEQ ID NO: 1298080 - DNA, 15 bp, Homo sapiens
tttctccctggtggt

SEQ ID NO: 1298081 - DNA, 15 bp, Homo sapiens
ctttctccctggtgg

SEQ ID NO: 1298082 - DNA, 15 bp, Homo sapiens
gctttctccctggtg

SEQ ID NO: 1298083 - DNA, 15 bp, Homo sapiens
tgctttctccctggt

SEQ ID NO: 1298084 - DNA, 15 bp, Homo sapiens
atgctttctccctgg

SEQ ID NO: 1298085 - DNA, 15 bp, Homo sapiens
gatgctttctccctg

SEQ ID NO: 1298086 - DNA, 15 bp, Homo sapiens
agatgctttctccct

SEQ ID NO: 1298087 - DNA, 15 bp, Homo sapiens
cagatgctttctccc

SEQ ID NO: 1298088 - DNA, 15 bp, Homo sapiens
tcagatgctttctcc

SEQ ID NO: 1298089 - DNA, 15 bp, Homo sapiens
gtcagatgctttctc

SEQ ID NO: 1298090 - DNA, 15 bp, Homo sapiens
agtcagatgctttct

SEQ ID NO: 1298091 - DNA, 15 bp, Homo sapiens
aagtcagatgctttc

SEQ ID NO: 1298092 - DNA, 15 bp, Homo sapiens
aaagtcagatgcttt

SEQ ID NO: 1298093 - DNA, 15 bp, Homo sapiens
gaaagtcagatgctt

SEQ ID NO: 1298094 - DNA, 15 bp, Homo sapiens
tgaaagtcagatgct

SEQ ID NO: 1298095 - DNA, 15 bp, Homo sapiens
gtgaaagtcagatgc

SEQ ID NO: 1298096 - DNA, 15 bp, Homo sapiens
agtgaaagtcagatg

SEQ ID NO: 1298097 - DNA, 15 bp, Homo sapiens
aagtgaaagtcagat

SEQ ID NO: 1298098 - DNA, 15 bp, Homo sapiens
aaagtgaaagtcaga

SEQ ID NO: 1298099 - DNA, 15 bp, Homo sapiens
aaaagtgaaagtcag

SEQ ID NO: 1298100 - DNA, 15 bp, Homo sapiens
taaaagtgaaagtca

SEQ ID NO: 1298101 - DNA, 15 bp, Homo sapiens
ttaaaagtgaaagtc

SEQ ID NO: 1298102 - DNA, 15 bp, Homo sapiens
tttaaaagtgaaagt

SEQ ID NO: 1298103 - DNA, 15 bp, Homo sapiens
ttttaaaagtgaaag

SEQ ID NO: 1298104 - DNA, 15 bp, Homo sapiens
tttttaaaagtgaaa

SEQ ID NO: 1298105 - DNA, 15 bp, Homo sapiens
ttttttaaaagtgaa

SEQ ID NO: 1298106 - DNA, 15 bp, Homo sapiens
tttttttaaaagtga

SEQ ID NO: 1298107 - DNA, 15 bp, Homo sapiens
ctttttttaaaagtg

SEQ ID NO: 1298108 - DNA, 15 bp, Homo sapiens
tctttttttaaaagt

SEQ ID NO: 1298109 - DNA, 15 bp, Homo sapiens
gtctttttttaaaag

SEQ ID NO: 1298110 - DNA, 15 bp, Homo sapiens
agtctttttttaaaa

SEQ ID NO: 1298111 - DNA, 15 bp, Homo sapiens
aagtctttttttaaa

SEQ ID NO: 1298112 - DNA, 15 bp, Homo sapiens
taagtctttttttaa

SEQ ID NO: 1298113 - DNA, 15 bp, Homo sapiens
ttaagtcttttttta

SEQ ID NO: 1298114 - DNA, 15 bp, Homo sapiens
attaagtcttttttt

SEQ ID NO: 1298115 - DNA, 15 bp, Homo sapiens
cattaagtctttttt

SEQ ID NO: 1298116 - DNA, 15 bp, Homo sapiens
tcattaagtcttttt

SEQ ID NO: 1298117 - DNA, 15 bp, Homo sapiens
atcattaagtctttt

SEQ ID NO: 1298118 - DNA, 15 bp, Homo sapiens
aatcattaagtcttt

SEQ ID NO: 1298119 - DNA, 15 bp, Homo sapiens
caatcattaagtctt

SEQ ID NO: 1298120 - DNA, 15 bp, Homo sapiens
ccaatcattaagtct

SEQ ID NO: 1298121 - DNA, 15 bp, Homo sapiens
accaatcattaagtc

SEQ ID NO: 1298122 - DNA, 15 bp, Homo sapiens
taccaatcattaagt

SEQ ID NO: 1298123 - DNA, 15 bp, Homo sapiens
gatatacttatttac

SEQ ID NO: 1298124 - DNA, 15 bp, Homo sapiens
agatatacttattta

SEQ ID NO: 1298125 - DNA, 15 bp, Homo sapiens
cagatatacttattt

SEQ ID NO: 1298126 - DNA, 15 bp, Homo sapiens
acagatatacttatt

SEQ ID NO: 1298127 - DNA, 15 bp, Homo sapiens
aacagatatacttat

SEQ ID NO: 1298128 - DNA, 15 bp, Homo sapiens
gaacagatatactta

SEQ ID NO: 1298129 - DNA, 15 bp, Homo sapiens
agaacagatatactt

SEQ ID NO: 1298130 - DNA, 15 bp, Homo sapiens
tagaacagatatact

SEQ ID NO: 1298131 - DNA, 15 bp, Homo sapiens
atagaacagatatac

SEQ ID NO: 1298132 - DNA, 15 bp, Homo sapiens
tatagaacagatata

SEQ ID NO: 1298133 - DNA, 15 bp, Homo sapiens
ttatagaacagatat

SEQ ID NO: 1298134 - DNA, 15 bp, Homo sapiens
gttatagaacagata

SEQ ID NO: 1298135 - DNA, 15 bp, Homo sapiens
agttatagaacagat

SEQ ID NO: 1298136 - DNA, 15 bp, Homo sapiens
tagttatagaacaga

SEQ ID NO: 1298137 - DNA, 15 bp, Homo sapiens
atagttatagaacag

SEQ ID NO: 1298138 - DNA, 15 bp, Homo sapiens
tatagttatagaaca

SEQ ID NO: 1298139 - DNA, 15 bp, Homo sapiens
ttatagttatagaac

SEQ ID NO: 1298140 - DNA, 15 bp, Homo sapiens
tttatagttatagaa

SEQ ID NO: 1298141 - DNA, 15 bp, Homo sapiens
gtttatagttataga

SEQ ID NO: 1298142 - DNA, 15 bp, Homo sapiens
agtttatagttatag

SEQ ID NO: 1298143 - DNA, 15 bp, Homo sapiens
aagtttatagttata

SEQ ID NO: 1298144 - DNA, 15 bp, Homo sapiens
taagtttatagttat

SEQ ID NO: 1298145 - DNA, 15 bp, Homo sapiens
ataagtttatagtta

SEQ ID NO: 1298146 - DNA, 15 bp, Homo sapiens
aataagtttatagtt

SEQ ID NO: 1298147 - DNA, 15 bp, Homo sapiens
caataagtttatagt

SEQ ID NO: 1298148 - DNA, 15 bp, Homo sapiens
tcaataagtttatag

SEQ ID NO: 1298149 - DNA, 15 bp, Homo sapiens
atcaataagtttata

SEQ ID NO: 1298150 - DNA, 15 bp, Homo sapiens
aatcaataagtttat

SEQ ID NO: 1298151 - DNA, 15 bp, Homo sapiens
caatcaataagttta

SEQ ID NO: 1298152 - DNA, 15 bp, Homo sapiens
acaatcaataagttt

SEQ ID NO: 1298153 - DNA, 15 bp, Homo sapiens
cacaatcaataagtt

SEQ ID NO: 1298154 - DNA, 15 bp, Homo sapiens
tcacaatcaataagt

SEQ ID NO: 1298155 - DNA, 15 bp, Homo sapiens
ttcacaatcaataag

SEQ ID NO: 1298156 - DNA, 15 bp, Homo sapiens
attcacaatcaataa

SEQ ID NO: 1298157 - DNA, 15 bp, Homo sapiens
tattcacaatcaata

SEQ ID NO: 1298158 - DNA, 15 bp, Homo sapiens
gtattcacaatcaat

SEQ ID NO: 1298159 - DNA, 15 bp, Homo sapiens
tgtattcacaatcaa

SEQ ID NO: 1298160 - DNA, 15 bp, Homo sapiens
atgtattcacaatca

SEQ ID NO: 1298161 - DNA, 15 bp, Homo sapiens
tatgtattcacaatc

SEQ ID NO: 1298162 - DNA, 15 bp, Homo sapiens
atatgtattcacaat

SEQ ID NO: 1298163 - DNA, 15 bp, Homo sapiens
aatatgtattcacaa

SEQ ID NO: 1298164 - DNA, 15 bp, Homo sapiens
aaatatgtattcaca

SEQ ID NO: 1298165 - DNA, 15 bp, Homo sapiens
aaaatatgtattcac

SEQ ID NO: 1298166 - DNA, 15 bp, Homo sapiens
gaaaatatgtattca

SEQ ID NO: 1298167 - DNA, 15 bp, Homo sapiens
agaaaatatgtattc

SEQ ID NO: 1298168 - DNA, 15 bp, Homo sapiens
aagaaaatatgtatt

SEQ ID NO: 1298169 - DNA, 15 bp, Homo sapiens
taagaaaatatgtat

SEQ ID NO: 1298170 - DNA, 15 bp, Homo sapiens
ttaagaaaatatgta

SEQ ID NO: 1298171 - DNA, 15 bp, Homo sapiens
tttaagaaaatatgt

SEQ ID NO: 1298172 - DNA, 15 bp, Homo sapiens
ctttaagaaaatatg

SEQ ID NO: 1298173 - DNA, 15 bp, Homo sapiens
tctttaagaaaatat

SEQ ID NO: 1298174 - DNA, 15 bp, Homo sapiens
atctttaagaaaata

SEQ ID NO: 1298175 - DNA, 15 bp, Homo sapiens
aatctttaagaaaat

SEQ ID NO: 1298176 - DNA, 15 bp, Homo sapiens
aaatctttaagaaaa

SEQ ID NO: 1298177 - DNA, 15 bp, Homo sapiens
taaatctttaagaaa

SEQ ID NO: 1298178 - DNA, 15 bp, Homo sapiens
ttaaatctttaagaa

SEQ ID NO: 1298179 - DNA, 15 bp, Homo sapiens
cttaaatctttaaga

SEQ ID NO: 1298180 - DNA, 15 bp, Homo sapiens
acttaaatctttaag

SEQ ID NO: 1298181 - DNA, 15 bp, Homo sapiens
tacttaaatctttaa

SEQ ID NO: 1298182 - DNA, 15 bp, Homo sapiens
ttacttaaatcttta

SEQ ID NO: 1298183 - DNA, 15 bp, Homo sapiens
tttacttaaatcttt

SEQ ID NO: 1298184 - DNA, 15 bp, Homo sapiens
ttttacttaaatctt

SEQ ID NO: 1298185 - DNA, 15 bp, Homo sapiens
attttacttaaatct

SEQ ID NO: 1298186 - DNA, 15 bp, Homo sapiens
cattttacttaaatc

SEQ ID NO: 1298187 - DNA, 15 bp, Homo sapiens
acattttacttaaat

SEQ ID NO: 1298188 - DNA, 15 bp, Homo sapiens
tacattttacttaaa

SEQ ID NO: 1298189 - DNA, 15 bp, Homo sapiens
ttacattttacttaa

SEQ ID NO: 1298190 - DNA, 15 bp, Homo sapiens
attacattttactta

SEQ ID NO: 1298191 - DNA, 15 bp, Homo sapiens
aattacattttactt

SEQ ID NO: 1298192 - DNA, 15 bp, Homo sapiens
aaattacattttact

SEQ ID NO: 1298193 - DNA, 15 bp, Homo sapiens
gaaattacattttac

SEQ ID NO: 1298194 - DNA, 15 bp, Homo sapiens
agaaattacatttta

SEQ ID NO: 1298195 - DNA, 15 bp, Homo sapiens
aagaaattacatttt

SEQ ID NO: 1298196 - DNA, 15 bp, Homo sapiens
taagaaattacattt

SEQ ID NO: 1298197 - DNA, 15 bp, Homo sapiens
ataagaaattacatt

SEQ ID NO: 1298198 - DNA, 15 bp, Homo sapiens
tataagaaattacat

SEQ ID NO: 1298199 - DNA, 15 bp, Homo sapiens
ttataagaaattaca

SEQ ID NO: 1298200 - DNA, 15 bp, Homo sapiens
tttataagaaattac

SEQ ID NO: 1298201 - DNA, 15 bp, Homo sapiens
gtttataagaaatta

SEQ ID NO: 1298202 - DNA, 15 bp, Homo sapiens
ggtttataagaaatt

SEQ ID NO: 1298203 - DNA, 15 bp, Homo sapiens
tggtttataagaaat

SEQ ID NO: 1298204 - DNA, 15 bp, Homo sapiens
gtggtttataagaaa

SEQ ID NO: 1298205 - DNA, 15 bp, Homo sapiens
tgtggtttataagaa

SEQ ID NO: 1298206 - DNA, 15 bp, Homo sapiens
ctgtggtttataaga

SEQ ID NO: 1298207 - DNA, 15 bp, Homo sapiens
actgtggtttataag

SEQ ID NO: 1298208 - DNA, 15 bp, Homo sapiens
gactgtggtttataa

SEQ ID NO: 1298209 - DNA, 15 bp, Homo sapiens
agactgtggtttata

SEQ ID NO: 1298210 - DNA, 15 bp, Homo sapiens
aagactgtggtttat

SEQ ID NO: 1298211 - DNA, 15 bp, Homo sapiens
taagactgtggttta

SEQ ID NO: 1298212 - DNA, 15 bp, Homo sapiens
ataagactgtggttt

SEQ ID NO: 1298213 - DNA, 15 bp, Homo sapiens
aataagactgtggtt

SEQ ID NO: 1298214 - DNA, 15 bp, Homo sapiens
aaataagactgtggt

SEQ ID NO: 1298215 - DNA, 15 bp, Homo sapiens
caaataagactgtgg

SEQ ID NO: 1298216 - DNA, 15 bp, Homo sapiens
tcaaataagactgtg

SEQ ID NO: 1298217 - DNA, 15 bp, Homo sapiens
ctcaaataagactgt

SEQ ID NO: 1298218 - DNA, 15 bp, Homo sapiens
cctcaaataagactg

SEQ ID NO: 1298219 - DNA, 15 bp, Homo sapiens
ccctcaaataagact

SEQ ID NO: 1298220 - DNA, 15 bp, Homo sapiens
tccctcaaataagac

SEQ ID NO: 1298221 - DNA, 15 bp, Homo sapiens
ttccctcaaataaga

SEQ ID NO: 1298222 - DNA, 15 bp, Homo sapiens
attccctcaaataag

SEQ ID NO: 1298223 - DNA, 15 bp, Homo sapiens
cattccctcaaataa

SEQ ID NO: 1298224 - DNA, 15 bp, Homo sapiens
acattccctcaaata

SEQ ID NO: 1298225 - DNA, 15 bp, Homo sapiens
tacattccctcaaat

SEQ ID NO: 1298226 - DNA, 15 bp, Homo sapiens
ctacattccctcaaa

SEQ ID NO: 1298227 - DNA, 15 bp, Homo sapiens
tctacattccctcaa

SEQ ID NO: 1298228 - DNA, 15 bp, Homo sapiens
ctctacattccctca

SEQ ID NO: 1298229 - DNA, 15 bp, Homo sapiens
tctctacattccctc

SEQ ID NO: 1298230 - DNA, 15 bp, Homo sapiens
gtctctacattccct

SEQ ID NO: 1298231 - DNA, 15 bp, Homo sapiens
tgtctctacattccc

SEQ ID NO: 1298232 - DNA, 15 bp, Homo sapiens
ttgtctctacattcc

SEQ ID NO: 1298233 - DNA, 15 bp, Homo sapiens
cttgtctctacattc

SEQ ID NO: 1298234 - DNA, 15 bp, Homo sapiens
acttgtctctacatt

SEQ ID NO: 1298235 - DNA, 15 bp, Homo sapiens
cacttgtctctacat

SEQ ID NO: 1298236 - DNA, 15 bp, Homo sapiens
ccacttgtctctaca

SEQ ID NO: 1298237 - DNA, 15 bp, Homo sapiens
cccacttgtctctac

SEQ ID NO: 1298238 - DNA, 15 bp, Homo sapiens
tcccacttgtctcta

SEQ ID NO: 1298239 - DNA, 15 bp, Homo sapiens
ctcccacttgtctct

SEQ ID NO: 1298240 - DNA, 15 bp, Homo sapiens
cctcccacttgtctc

SEQ ID NO: 1298241 - DNA, 15 bp, Homo sapiens
gcctcccacttgtct

SEQ ID NO: 1298242 - DNA, 15 bp, Homo sapiens
tgcctcccacttgtc

SEQ ID NO: 1298243 - DNA, 15 bp, Homo sapiens
ctgcctcccacttgt

SEQ ID NO: 1298244 - DNA, 15 bp, Homo sapiens
actgcctcccacttg

SEQ ID NO: 1298245 - DNA, 15 bp, Homo sapiens
cactgcctcccactt

SEQ ID NO: 1298246 - DNA, 15 bp, Homo sapiens
acactgcctcccact

SEQ ID NO: 1298247 - DNA, 15 bp, Homo sapiens
tacactgcctcccac

SEQ ID NO: 1298248 - DNA, 15 bp, Homo sapiens
atacactgcctccca

SEQ ID NO: 1298249 - DNA, 15 bp, Homo sapiens
aatacactgcctccc

SEQ ID NO: 1298250 - DNA, 15 bp, Homo sapiens
aaatacactgcctcc

SEQ ID NO: 1298251 - DNA, 15 bp, Homo sapiens
caaatacactgcctc

SEQ ID NO: 1298252 - DNA, 15 bp, Homo sapiens
tcaaatacactgcct

SEQ ID NO: 1298253 - DNA, 15 bp, Homo sapiens
ttcaaatacactgcc

SEQ ID NO: 1298254 - DNA, 15 bp, Homo sapiens
cttcaaatacactgc

SEQ ID NO: 1298255 - DNA, 15 bp, Homo sapiens
tcttcaaatacactg

SEQ ID NO: 1298256 - DNA, 15 bp, Homo sapiens
atcttcaaatacact

SEQ ID NO: 1298257 - DNA, 15 bp, Homo sapiens
tatcttcaaatacac

SEQ ID NO: 1298258 - DNA, 15 bp, Homo sapiens
gtatcttcaaataca

SEQ ID NO: 1298259 - DNA, 15 bp, Homo sapiens
tgtatcttcaaatac

SEQ ID NO: 1298260 - DNA, 15 bp, Homo sapiens
atgtatcttcaaata

SEQ ID NO: 1298261 - DNA, 15 bp, Homo sapiens
aatgtatcttcaaat

SEQ ID NO: 1298262 - DNA, 15 bp, Homo sapiens
aaatgtatcttcaaa

SEQ ID NO: 1298263 - DNA, 15 bp, Homo sapiens
taaatgtatcttcaa

SEQ ID NO: 1298264 - DNA, 15 bp, Homo sapiens
ttaaatgtatcttca

SEQ ID NO: 1298265 - DNA, 15 bp, Homo sapiens
gttaaatgtatcttc

SEQ ID NO: 1298266 - DNA, 15 bp, Homo sapiens
agttaaatgtatctt

SEQ ID NO: 1298267 - DNA, 15 bp, Homo sapiens
aagttaaatgtatct

SEQ ID NO: 1298268 - DNA, 15 bp, Homo sapiens
caagttaaatgtatc

SEQ ID NO: 1298269 - DNA, 15 bp, Homo sapiens
ccaagttaaatgtat

SEQ ID NO: 1298270 - DNA, 15 bp, Homo sapiens
cccaagttaaatgta

SEQ ID NO: 1298271 - DNA, 15 bp, Homo sapiens
tcccaagttaaatgt

SEQ ID NO: 1298272 - DNA, 15 bp, Homo sapiens
ctcccaagttaaatg

SEQ ID NO: 1298273 - DNA, 15 bp, Homo sapiens
tctcccaagttaaat

SEQ ID NO: 1298274 - DNA, 15 bp, Homo sapiens
atctcccaagttaaa

SEQ ID NO: 1298275 - DNA, 15 bp, Homo sapiens
catctcccaagttaa

SEQ ID NO: 1298276 - DNA, 15 bp, Homo sapiens
ccatctcccaagtta

SEQ ID NO: 1298277 - DNA, 15 bp, Homo sapiens
tccatctcccaagtt

SEQ ID NO: 1298278 - DNA, 15 bp, Homo sapiens
ttccatctcccaagt

SEQ ID NO: 1298279 - DNA, 15 bp, Homo sapiens
tttccatctcccaag

SEQ ID NO: 1298280 - DNA, 15 bp, Homo sapiens
ttttccatctcccaa

SEQ ID NO: 1298281 - DNA, 15 bp, Homo sapiens
gttttccatctccca

SEQ ID NO: 1298282 - DNA, 15 bp, Homo sapiens
tgttttccatctccc

SEQ ID NO: 1298283 - DNA, 15 bp, Homo sapiens
atgttttccatctcc

SEQ ID NO: 1298284 - DNA, 15 bp, Homo sapiens
aatgttttccatctc

SEQ ID NO: 1298285 - DNA, 15 bp, Homo sapiens
aaatgttttccatct

SEQ ID NO: 1298286 - DNA, 15 bp, Homo sapiens
gaaatgttttccatc

SEQ ID NO: 1298287 - DNA, 15 bp, Homo sapiens
tgaaatgttttccat

SEQ ID NO: 1298288 - DNA, 15 bp, Homo sapiens
atgaaatgttttcca

SEQ ID NO: 1298289 - DNA, 15 bp, Homo sapiens
aatgaaatgttttcc

SEQ ID NO: 1298290 - DNA, 15 bp, Homo sapiens
aaatgaaatgttttc

SEQ ID NO: 1298291 - DNA, 15 bp, Homo sapiens
aaaatgaaatgtttt

SEQ ID NO: 1298292 - DNA, 15 bp, Homo sapiens
aaaaatgaaatgttt

SEQ ID NO: 1298293 - DNA, 15 bp, Homo sapiens
aaaaaatgaaatgtt

SEQ ID NO: 1298294 - DNA, 15 bp, Homo sapiens
gaaaaaatgaaatgt

SEQ ID NO: 1298295 - DNA, 15 bp, Homo sapiens
agaaaaaatgaaatg

SEQ ID NO: 1298296 - DNA, 15 bp, Homo sapiens
aagaaaaaatgaaat

SEQ ID NO: 1298297 - DNA, 15 bp, Homo sapiens
aaaagaaaaaatgaa

SEQ ID NO: 1298298 - DNA, 15 bp, Homo sapiens
aaaaagaaaaaatga

SEQ ID NO: 1298299 - DNA, 15 bp, Homo sapiens
aaaaaagaaaaaatg

SEQ ID NO: 1298300 - DNA, 15 bp, Homo sapiens
aaaaaaagaaaaaat

SEQ ID NO: 1298301 - DNA, 15 bp, Homo sapiens
gagaaaaaaagaaaa

SEQ ID NO: 1298302 - DNA, 15 bp, Homo sapiens
ggagaaaaaaagaaa

SEQ ID NO: 1298303 - DNA, 15 bp, Homo sapiens
gggagaaaaaaagaa

SEQ ID NO: 1298304 - DNA, 15 bp, Homo sapiens
agggagaaaaaaaga

SEQ ID NO: 1298305 - DNA, 15 bp, Homo sapiens
aagggagaaaaaaag

SEQ ID NO: 1298306 - DNA, 15 bp, Homo sapiens
gaagggagaaaaaaa

SEQ ID NO: 1298307 - DNA, 15 bp, Homo sapiens
tgaagggagaaaaaa

SEQ ID NO: 1298308 - DNA, 15 bp, Homo sapiens
atgaagggagaaaaa

SEQ ID NO: 1298309 - DNA, 15 bp, Homo sapiens
aatgaagggagaaaa

SEQ ID NO: 1298310 - DNA, 15 bp, Homo sapiens
caatgaagggagaaa

SEQ ID NO: 1298311 - DNA, 15 bp, Homo sapiens
gcaatgaagggagaa

SEQ ID NO: 1298312 - DNA, 15 bp, Homo sapiens
agcaatgaagggaga

SEQ ID NO: 1298313 - DNA, 15 bp, Homo sapiens
aagcaatgaagggag

SEQ ID NO: 1298314 - DNA, 15 bp, Homo sapiens
taagcaatgaaggga

SEQ ID NO: 1298315 - DNA, 15 bp, Homo sapiens
ttaagcaatgaaggg

SEQ ID NO: 1298316 - DNA, 15 bp, Homo sapiens
gttaagcaatgaagg

SEQ ID NO: 1298317 - DNA, 15 bp, Homo sapiens
tgttaagcaatgaag

SEQ ID NO: 1298318 - DNA, 15 bp, Homo sapiens
gtgttaagcaatgaa

SEQ ID NO: 1298319 - DNA, 15 bp, Homo sapiens
tgtgttaagcaatga

SEQ ID NO: 1298320 - DNA, 15 bp, Homo sapiens
atgtgttaagcaatg

SEQ ID NO: 1298321 - DNA, 15 bp, Homo sapiens
aatgtgttaagcaat

SEQ ID NO: 1298322 - DNA, 15 bp, Homo sapiens
aaatgtgttaagcaa

SEQ ID NO: 1298323 - DNA, 15 bp, Homo sapiens
aaaatgtgttaagca

SEQ ID NO: 1298324 - DNA, 15 bp, Homo sapiens
gaaaatgtgttaagc

SEQ ID NO: 1298325 - DNA, 15 bp, Homo sapiens
ggaaaatgtgttaag

SEQ ID NO: 1298326 - DNA, 15 bp, Homo sapiens
aggaaaatgtgttaa

SEQ ID NO: 1298327 - DNA, 15 bp, Homo sapiens
taggaaaatgtgtta

SEQ ID NO: 1298328 - DNA, 15 bp, Homo sapiens
ataggaaaatgtgtt

SEQ ID NO: 1298329 - DNA, 15 bp, Homo sapiens
aataggaaaatgtgt

SEQ ID NO: 1298330 - DNA, 15 bp, Homo sapiens
aaataggaaaatgtg

SEQ ID NO: 1298331 - DNA, 15 bp, Homo sapiens
aaaataggaaaatgt

SEQ ID NO: 1298332 - DNA, 15 bp, Homo sapiens
aaaaataggaaaatg

SEQ ID NO: 1298333 - DNA, 15 bp, Homo sapiens
taaaaataggaaaat

SEQ ID NO: 1298334 - DNA, 15 bp, Homo sapiens
ggataaaaataggaa

SEQ ID NO: 1298335 - DNA, 15 bp, Homo sapiens
gggataaaaatagga

SEQ ID NO: 1298336 - DNA, 15 bp, Homo sapiens
ggggataaaaatagg

SEQ ID NO: 1298337 - DNA, 15 bp, Homo sapiens
aggggataaaaatag

SEQ ID NO: 1298338 - DNA, 15 bp, Homo sapiens
gaggggataaaaata

SEQ ID NO: 1298339 - DNA, 15 bp, Homo sapiens
agaggggataaaaat

SEQ ID NO: 1298340 - DNA, 15 bp, Homo sapiens
tagaggggataaaaa

SEQ ID NO: 1298341 - DNA, 15 bp, Homo sapiens
ctagaggggataaaa

SEQ ID NO: 1298342 - DNA, 15 bp, Homo sapiens
cctagaggggataaa

SEQ ID NO: 1298343 - DNA, 15 bp, Homo sapiens
tcctagaggggataa

SEQ ID NO: 1298344 - DNA, 15 bp, Homo sapiens
gtcctagaggggata

SEQ ID NO: 1298345 - DNA, 15 bp, Homo sapiens
agtcctagaggggat

SEQ ID NO: 1298346 - DNA, 15 bp, Homo sapiens
cagtcctagagggga

SEQ ID NO: 1298347 - DNA, 15 bp, Homo sapiens
acagtcctagagggg

SEQ ID NO: 1298348 - DNA, 15 bp, Homo sapiens
aacagtcctagaggg

SEQ ID NO: 1298349 - DNA, 15 bp, Homo sapiens
taacagtcctagagg

SEQ ID NO: 1298350 - DNA, 15 bp, Homo sapiens
ataacagtcctagag

SEQ ID NO: 1298351 - DNA, 15 bp, Homo sapiens
cataacagtcctaga

SEQ ID NO: 1298352 - DNA, 15 bp, Homo sapiens
tcataacagtcctag

SEQ ID NO: 1298353 - DNA, 15 bp, Homo sapiens
ttcataacagtccta

SEQ ID NO: 1298354 - DNA, 15 bp, Homo sapiens
gttcataacagtcct

SEQ ID NO: 1298355 - DNA, 15 bp, Homo sapiens
tgttcataacagtcc

SEQ ID NO: 1298356 - DNA, 15 bp, Homo sapiens
gtgttcataacagtc

SEQ ID NO: 1298357 - DNA, 15 bp, Homo sapiens
agtgttcataacagt

SEQ ID NO: 1298358 - DNA, 15 bp, Homo sapiens
tagtgttcataacag

SEQ ID NO: 1298359 - DNA, 15 bp, Homo sapiens
atagtgttcataaca

SEQ ID NO: 1298360 - DNA, 15 bp, Homo sapiens
gatagtgttcataac

SEQ ID NO: 1298361 - DNA, 15 bp, Homo sapiens
ggatagtgttcataa

SEQ ID NO: 1298362 - DNA, 15 bp, Homo sapiens
tggatagtgttcata

SEQ ID NO: 1298363 - DNA, 15 bp, Homo sapiens
ttggatagtgttcat

SEQ ID NO: 1298364 - DNA, 15 bp, Homo sapiens
gttggatagtgttca

SEQ ID NO: 1298365 - DNA, 15 bp, Homo sapiens
tgttggatagtgttc

SEQ ID NO: 1298366 - DNA, 15 bp, Homo sapiens
ttgttggatagtgtt

SEQ ID NO: 1298367 - DNA, 15 bp, Homo sapiens
attgttggatagtgt

SEQ ID NO: 1298368 - DNA, 15 bp, Homo sapiens
aattgttggatagtg

SEQ ID NO: 1298369 - DNA, 15 bp, Homo sapiens
taattgttggatagt

SEQ ID NO: 1298370 - DNA, 15 bp, Homo sapiens
ttaattgttggatag

SEQ ID NO: 1298371 - DNA, 15 bp, Homo sapiens
attaattgttggata

SEQ ID NO: 1298372 - DNA, 15 bp, Homo sapiens
cattaattgttggat

SEQ ID NO: 1298373 - DNA, 15 bp, Homo sapiens
tcattaattgttgga

SEQ ID NO: 1298374 - DNA, 15 bp, Homo sapiens
atcattaattgttgg

SEQ ID NO: 1298375 - DNA, 15 bp, Homo sapiens
catcattaattgttg

SEQ ID NO: 1298376 - DNA, 15 bp, Homo sapiens
tcatcattaattgtt

SEQ ID NO: 1298377 - DNA, 15 bp, Homo sapiens
atcatcattaattgt

SEQ ID NO: 1298378 - DNA, 15 bp, Homo sapiens
aatcatcattaattg

SEQ ID NO: 1298379 - DNA, 15 bp, Homo sapiens
aaatcatcattaatt

SEQ ID NO: 1298380 - DNA, 15 bp, Homo sapiens
aaaatcatcattaat

SEQ ID NO: 1298381 - DNA, 15 bp, Homo sapiens
taaaatcatcattaa

SEQ ID NO: 1298382 - DNA, 15 bp, Homo sapiens
ttaaaatcatcatta

SEQ ID NO: 1298383 - DNA, 15 bp, Homo sapiens
tttaaaatcatcatt

SEQ ID NO: 1298384 - DNA, 15 bp, Homo sapiens
atttaaaatcatcat

SEQ ID NO: 1298385 - DNA, 15 bp, Homo sapiens
aatttaaaatcatca

SEQ ID NO: 1298386 - DNA, 15 bp, Homo sapiens
gaatttaaaatcatc

SEQ ID NO: 1298387 - DNA, 15 bp, Homo sapiens
tgaatttaaaatcat

SEQ ID NO: 1298388 - DNA, 15 bp, Homo sapiens
ctgaatttaaaatca

SEQ ID NO: 1298389 - DNA, 15 bp, Homo sapiens
gctgaatttaaaatc

SEQ ID NO: 1298390 - DNA, 15 bp, Homo sapiens
tgctgaatttaaaat

SEQ ID NO: 1298391 - DNA, 15 bp, Homo sapiens
ttgctgaatttaaaa

SEQ ID NO: 1298392 - DNA, 15 bp, Homo sapiens
cttgctgaatttaaa

SEQ ID NO: 1298393 - DNA, 15 bp, Homo sapiens
acttgctgaatttaa

SEQ ID NO: 1298394 - DNA, 15 bp, Homo sapiens
cacttgctgaattta

SEQ ID NO: 1298395 - DNA, 15 bp, Homo sapiens
tcacttgctgaattt

SEQ ID NO: 1298396 - DNA, 15 bp, Homo sapiens
atcacttgctgaatt

SEQ ID NO: 1298397 - DNA, 15 bp, Homo sapiens
gatcacttgctgaat

SEQ ID NO: 1298398 - DNA, 15 bp, Homo sapiens
tgatcacttgctgaa

SEQ ID NO: 1298399 - DNA, 15 bp, Homo sapiens
ttgatcacttgctga

SEQ ID NO: 1298400 - DNA, 15 bp, Homo sapiens
gttgatcacttgctg

SEQ ID NO: 1298401 - DNA, 15 bp, Homo sapiens
ggttgatcacttgct

SEQ ID NO: 1298402 - DNA, 15 bp, Homo sapiens
aggttgatcacttgc

SEQ ID NO: 1298403 - DNA, 15 bp, Homo sapiens
aaggttgatcacttg

SEQ ID NO: 1298404 - DNA, 15 bp, Homo sapiens
gaaggttgatcactt

SEQ ID NO: 1298405 - DNA, 15 bp, Homo sapiens
tgaaggttgatcact

SEQ ID NO: 1298406 - DNA, 15 bp, Homo sapiens
ctgaaggttgatcac

SEQ ID NO: 1298407 - DNA, 15 bp, Homo sapiens
tctgaaggttgatca

SEQ ID NO: 1298408 - DNA, 15 bp, Homo sapiens
ttctgaaggttgatc

SEQ ID NO: 1298409 - DNA, 15 bp, Homo sapiens
tttctgaaggttgat

SEQ ID NO: 1298410 - DNA, 15 bp, Homo sapiens
ttttctgaaggttga

SEQ ID NO: 1298411 - DNA, 15 bp, Homo sapiens
attttctgaaggttg

SEQ ID NO: 1298412 - DNA, 15 bp, Homo sapiens
gattttctgaaggtt

SEQ ID NO: 1298413 - DNA, 15 bp, Homo sapiens
agattttctgaaggt

SEQ ID NO: 1298414 - DNA, 15 bp, Homo sapiens
cagattttctgaagg

SEQ ID NO: 1298415 - DNA, 15 bp, Homo sapiens
tcagattttctgaag

SEQ ID NO: 1298416 - DNA, 15 bp, Homo sapiens
atcagattttctgaa

SEQ ID NO: 1298417 - DNA, 15 bp, Homo sapiens
aatcagattttctga

SEQ ID NO: 1298418 - DNA, 15 bp, Homo sapiens
aaatcagattttctg

SEQ ID NO: 1298419 - DNA, 15 bp, Homo sapiens
gaaatcagattttct

SEQ ID NO: 1298420 - DNA, 15 bp, Homo sapiens
ggaaatcagattttc

SEQ ID NO: 1298421 - DNA, 15 bp, Homo sapiens
aggaaatcagatttt

SEQ ID NO: 1298422 - DNA, 15 bp, Homo sapiens
taggaaatcagattt

SEQ ID NO: 1298423 - DNA, 15 bp, Homo sapiens
ataggaaatcagatt

SEQ ID NO: 1298424 - DNA, 15 bp, Homo sapiens
aataggaaatcagat

SEQ ID NO: 1298425 - DNA, 15 bp, Homo sapiens
aaataggaaatcaga

SEQ ID NO: 1298426 - DNA, 15 bp, Homo sapiens
aaaataggaaatcag

SEQ ID NO: 1298427 - DNA, 15 bp, Homo sapiens
taaaataggaaatca

SEQ ID NO: 1298428 - DNA, 15 bp, Homo sapiens
ttaaaataggaaatc

SEQ ID NO: 1298429 - DNA, 15 bp, Homo sapiens
gttaaaataggaaat

SEQ ID NO: 1298430 - DNA, 15 bp, Homo sapiens
cgttaaaataggaaa

SEQ ID NO: 1298431 - DNA, 15 bp, Homo sapiens
acgttaaaataggaa

SEQ ID NO: 1298432 - DNA, 15 bp, Homo sapiens
tacgttaaaatagga

SEQ ID NO: 1298433 - DNA, 15 bp, Homo sapiens
ttacgttaaaatagg

SEQ ID NO: 1298434 - DNA, 15 bp, Homo sapiens
cttacgttaaaatag

SEQ ID NO: 1298435 - DNA, 15 bp, Homo sapiens
gcttacgttaaaata

SEQ ID NO: 1298436 - DNA, 15 bp, Homo sapiens
ggcttacgttaaaat

SEQ ID NO: 1298437 - DNA, 15 bp, Homo sapiens
tggcttacgttaaaa

SEQ ID NO: 1298438 - DNA, 15 bp, Homo sapiens
atggcttacgttaaa

SEQ ID NO: 1298439 - DNA, 15 bp, Homo sapiens
tatggcttacgttaa

SEQ ID NO: 1298440 - DNA, 15 bp, Homo sapiens
atatggcttacgtta

SEQ ID NO: 1298441 - DNA, 15 bp, Homo sapiens
tatatggcttacgtt

SEQ ID NO: 1298442 - DNA, 15 bp, Homo sapiens
atatatggcttacgt

SEQ ID NO: 1298443 - DNA, 15 bp, Homo sapiens
catatatggcttacg

SEQ ID NO: 1298444 - DNA, 15 bp, Homo sapiens
tcatatatggcttac

SEQ ID NO: 1298445 - DNA, 15 bp, Homo sapiens
ttcatatatggctta

SEQ ID NO: 1298446 - DNA, 15 bp, Homo sapiens
tttcatatatggctt

SEQ ID NO: 1298447 - DNA, 15 bp, Homo sapiens
gtttcatatatggct

SEQ ID NO: 1298448 - DNA, 15 bp, Homo sapiens
tgtttcatatatggc

SEQ ID NO: 1298449 - DNA, 15 bp, Homo sapiens
atgtttcatatatgg

SEQ ID NO: 1298450 - DNA, 15 bp, Homo sapiens
aatgtttcatatatg

SEQ ID NO: 1298451 - DNA, 15 bp, Homo sapiens
taatgtttcatatat

SEQ ID NO: 1298452 - DNA, 15 bp, Homo sapiens
ataatgtttcatata

SEQ ID NO: 1298453 - DNA, 15 bp, Homo sapiens
aataatgtttcatat

SEQ ID NO: 1298454 - DNA, 15 bp, Homo sapiens
aaataatgtttcata

SEQ ID NO: 1298455 - DNA, 15 bp, Homo sapiens
taaataatgtttcat

SEQ ID NO: 1298456 - DNA, 15 bp, Homo sapiens
ataaataatgtttca

SEQ ID NO: 1298457 - DNA, 15 bp, Homo sapiens
aataaataatgtttc

SEQ ID NO: 1298458 - DNA, 15 bp, Homo sapiens
caataaataatgttt

SEQ ID NO: 1298459 - DNA, 15 bp, Homo sapiens
acaataaataatgtt

SEQ ID NO: 1298460 - DNA, 15 bp, Homo sapiens
tacaataaataatgt

SEQ ID NO: 1298461 - DNA, 15 bp, Homo sapiens
ttacaataaataatg

SEQ ID NO: 1298462 - DNA, 15 bp, Homo sapiens
attacaataaataat

SEQ ID NO: 1298463 - DNA, 15 bp, Homo sapiens
tattacaataaataa

SEQ ID NO: 1298464 - DNA, 15 bp, Homo sapiens
atattacaataaata

SEQ ID NO: 1298465 - DNA, 15 bp, Homo sapiens
gatattacaataaat

SEQ ID NO: 1298466 - DNA, 15 bp, Homo sapiens
agatattacaataaa

SEQ ID NO: 1298467 - DNA, 15 bp, Homo sapiens
aagatattacaataa

SEQ ID NO: 1298468 - DNA, 15 bp, Homo sapiens
caagatattacaata

SEQ ID NO: 1298469 - DNA, 15 bp, Homo sapiens
ccaagatattacaat

SEQ ID NO: 1298470 - DNA, 15 bp, Homo sapiens
gccaagatattacaa

SEQ ID NO: 1298471 - DNA, 15 bp, Homo sapiens
tgccaagatattaca

SEQ ID NO: 1298472 - DNA, 15 bp, Homo sapiens
ttgccaagatattac

SEQ ID NO: 1298473 - DNA, 15 bp, Homo sapiens
tttgccaagatatta

SEQ ID NO: 1298474 - DNA, 15 bp, Homo sapiens
ctttgccaagatatt

SEQ ID NO: 1298475 - DNA, 15 bp, Homo sapiens
tctttgccaagatat

SEQ ID NO: 1298476 - DNA, 15 bp, Homo sapiens
ttctttgccaagata

SEQ ID NO: 1298477 - DNA, 15 bp, Homo sapiens
tttctttgccaagat

SEQ ID NO: 1298478 - DNA, 15 bp, Homo sapiens
gtttctttgccaaga

SEQ ID NO: 1298479 - DNA, 15 bp, Homo sapiens
agtttctttgccaag

SEQ ID NO: 1298480 - DNA, 15 bp, Homo sapiens
aagtttctttgccaa

SEQ ID NO: 1298481 - DNA, 15 bp, Homo sapiens
caagtttctttgcca

SEQ ID NO: 1298482 - DNA, 15 bp, Homo sapiens
tcaagtttctttgcc

SEQ ID NO: 1298483 - DNA, 15 bp, Homo sapiens
ttcaagtttctttgc

SEQ ID NO: 1298484 - DNA, 15 bp, Homo sapiens
tttcaagtttctttg

SEQ ID NO: 1298485 - DNA, 15 bp, Homo sapiens
atttcaagtttcttt

SEQ ID NO: 1298486 - DNA, 15 bp, Homo sapiens
aatttcaagtttctt

SEQ ID NO: 1298487 - DNA, 15 bp, Homo sapiens
taatttcaagtttct

SEQ ID NO: 1298488 - DNA, 15 bp, Homo sapiens
ttaatttcaagtttc

SEQ ID NO: 1298489 - DNA, 15 bp, Homo sapiens
tttaatttcaagttt

SEQ ID NO: 1298490 - DNA, 15 bp, Homo sapiens
ttttaatttcaagtt

SEQ ID NO: 1298491 - DNA, 15 bp, Homo sapiens
cttttaatttcaagt

SEQ ID NO: 1298492 - DNA, 15 bp, Homo sapiens
acttttaatttcaag

SEQ ID NO: 1298493 - DNA, 15 bp, Homo sapiens
aacttttaatttcaa

SEQ ID NO: 1298494 - DNA, 15 bp, Homo sapiens
taacttttaatttca

SEQ ID NO: 1298495 - DNA, 15 bp, Homo sapiens
ttaacttttaatttc

SEQ ID NO: 1298496 - DNA, 15 bp, Homo sapiens
tttaacttttaattt

SEQ ID NO: 1298497 - DNA, 15 bp, Homo sapiens
ctttaacttttaatt

SEQ ID NO: 1298498 - DNA, 15 bp, Homo sapiens
actttaacttttaat

SEQ ID NO: 1298499 - DNA, 15 bp, Homo sapiens
tactttaacttttaa

SEQ ID NO: 1298500 - DNA, 15 bp, Homo sapiens
gtactttaactttta

SEQ ID NO: 1298501 - DNA, 15 bp, Homo sapiens
agtactttaactttt

SEQ ID NO: 1298502 - DNA, 15 bp, Homo sapiens
cagtactttaacttt

SEQ ID NO: 1298503 - DNA, 15 bp, Homo sapiens
tcagtactttaactt

SEQ ID NO: 1298504 - DNA, 15 bp, Homo sapiens
ctcagtactttaact

SEQ ID NO: 1298505 - DNA, 15 bp, Homo sapiens
actcagtactttaac

SEQ ID NO: 1298506 - DNA, 15 bp, Homo sapiens
aactcagtactttaa

SEQ ID NO: 1298507 - DNA, 15 bp, Homo sapiens
gaactcagtacttta

SEQ ID NO: 1298508 - DNA, 15 bp, Homo sapiens
agaactcagtacttt

SEQ ID NO: 1298509 - DNA, 15 bp, Homo sapiens
aagaactcagtactt

SEQ ID NO: 1298510 - DNA, 15 bp, Homo sapiens
aaagaactcagtact

SEQ ID NO: 1298511 - DNA, 15 bp, Homo sapiens
aaaagaactcagtac

SEQ ID NO: 1298512 - DNA, 15 bp, Homo sapiens
aaaaagaactcagta

SEQ ID NO: 1298513 - DNA, 15 bp, Homo sapiens
taaaaagaactcagt

SEQ ID NO: 1298514 - DNA, 15 bp, Homo sapiens
ttaaaaagaactcag

SEQ ID NO: 1298515 - DNA, 15 bp, Homo sapiens
tttaaaaagaactca

SEQ ID NO: 1298516 - DNA, 15 bp, Homo sapiens
ttttaaaaagaactc

SEQ ID NO: 1298517 - DNA, 15 bp, Homo sapiens
attttaaaaagaact

SEQ ID NO: 1298518 - DNA, 15 bp, Homo sapiens
tattttaaaaagaac

SEQ ID NO: 1298519 - DNA, 15 bp, Homo sapiens
gtattttaaaaagaa

SEQ ID NO: 1298520 - DNA, 15 bp, Homo sapiens
agtattttaaaaaga

SEQ ID NO: 1298521 - DNA, 15 bp, Homo sapiens
tagtattttaaaaag

SEQ ID NO: 1298522 - DNA, 15 bp, Homo sapiens
ttagtattttaaaaa

SEQ ID NO: 1298523 - DNA, 15 bp, Homo sapiens
attagtattttaaaa

SEQ ID NO: 1298524 - DNA, 15 bp, Homo sapiens
gattagtattttaaa

SEQ ID NO: 1298525 - DNA, 15 bp, Homo sapiens
agattagtattttaa

SEQ ID NO: 1298526 - DNA, 15 bp, Homo sapiens
gagattagtatttta

SEQ ID NO: 1298527 - DNA, 15 bp, Homo sapiens
ggagattagtatttt

SEQ ID NO: 1298528 - DNA, 15 bp, Homo sapiens
aggagattagtattt

SEQ ID NO: 1298529 - DNA, 15 bp, Homo sapiens
taggagattagtatt

SEQ ID NO: 1298530 - DNA, 15 bp, Homo sapiens
ataggagattagtat

SEQ ID NO: 1298531 - DNA, 15 bp, Homo sapiens
gataggagattagta

SEQ ID NO: 1298532 - DNA, 15 bp, Homo sapiens
agataggagattagt

SEQ ID NO: 1298533 - DNA, 15 bp, Homo sapiens
tagataggagattag

SEQ ID NO: 1298534 - DNA, 15 bp, Homo sapiens
ttagataggagatta

SEQ ID NO: 1298535 - DNA, 15 bp, Homo sapiens
gttagataggagatt

SEQ ID NO: 1298536 - DNA, 15 bp, Homo sapiens
tgttagataggagat

SEQ ID NO: 1298537 - DNA, 15 bp, Homo sapiens
atgttagataggaga

SEQ ID NO: 1298538 - DNA, 15 bp, Homo sapiens
catgttagataggag

SEQ ID NO: 1298539 - DNA, 15 bp, Homo sapiens
acatgttagatagga

SEQ ID NO: 1298540 - DNA, 15 bp, Homo sapiens
tacatgttagatagg

SEQ ID NO: 1298541 - DNA, 15 bp, Homo sapiens
ctacatgttagatag

SEQ ID NO: 1298542 - DNA, 15 bp, Homo sapiens
actacatgttagata

SEQ ID NO: 1298543 - DNA, 15 bp, Homo sapiens
aactacatgttagat

SEQ ID NO: 1298544 - DNA, 15 bp, Homo sapiens
taactacatgttaga

SEQ ID NO: 1298545 - DNA, 15 bp, Homo sapiens
ataactacatgttag

SEQ ID NO: 1298546 - DNA, 15 bp, Homo sapiens
gataactacatgtta

SEQ ID NO: 1298547 - DNA, 15 bp, Homo sapiens
ggataactacatgtt

SEQ ID NO: 1298548 - DNA, 15 bp, Homo sapiens
tggataactacatgt

SEQ ID NO: 1298549 - DNA, 15 bp, Homo sapiens
atggataactacatg

SEQ ID NO: 1298550 - DNA, 15 bp, Homo sapiens
tatggataactacat

SEQ ID NO: 1298551 - DNA, 15 bp, Homo sapiens
ttatggataactaca

SEQ ID NO: 1298552 - DNA, 15 bp, Homo sapiens
attatggataactac

SEQ ID NO: 1298553 - DNA, 15 bp, Homo sapiens
gattatggataacta

SEQ ID NO: 1298554 - DNA, 15 bp, Homo sapiens
agattatggataact

SEQ ID NO: 1298555 - DNA, 15 bp, Homo sapiens
aagattatggataac

SEQ ID NO: 1298556 - DNA, 15 bp, Homo sapiens
aaagattatggataa

SEQ ID NO: 1298557 - DNA, 15 bp, Homo sapiens
aaaagattatggata

SEQ ID NO: 1298558 - DNA, 15 bp, Homo sapiens
gaaaagattatggat

SEQ ID NO: 1298559 - DNA, 15 bp, Homo sapiens
agaaaagattatgga

SEQ ID NO: 1298560 - DNA, 15 bp, Homo sapiens
aagaaaagattatgg

SEQ ID NO: 1298561 - DNA, 15 bp, Homo sapiens
caagaaaagattatg

SEQ ID NO: 1298562 - DNA, 15 bp, Homo sapiens
gcaagaaaagattat

SEQ ID NO: 1298563 - DNA, 15 bp, Homo sapiens
agcaagaaaagatta

SEQ ID NO: 1298564 - DNA, 15 bp, Homo sapiens
aagcaagaaaagatt

SEQ ID NO: 1298565 - DNA, 15 bp, Homo sapiens
aaagcaagaaaagat

SEQ ID NO: 1298566 - DNA, 15 bp, Homo sapiens
aaaagcaagaaaaga

SEQ ID NO: 1298567 - DNA, 15 bp, Homo sapiens
aaaaagcaagaaaag

SEQ ID NO: 1298568 - DNA, 15 bp, Homo sapiens
aaaaaagcaagaaaa

SEQ ID NO: 1298569 - DNA, 15 bp, Homo sapiens
taaaaaagcaagaaa

SEQ ID NO: 1298570 - DNA, 15 bp, Homo sapiens
ttaaaaaagcaagaa

SEQ ID NO: 1298571 - DNA, 15 bp, Homo sapiens
attaaaaaagcaaga

SEQ ID NO: 1298572 - DNA, 15 bp, Homo sapiens
gattaaaaaagcaag

SEQ ID NO: 1298573 - DNA, 15 bp, Homo sapiens
agattaaaaaagcaa

SEQ ID NO: 1298574 - DNA, 15 bp, Homo sapiens
aagattaaaaaagca

SEQ ID NO: 1298575 - DNA, 15 bp, Homo sapiens
taagattaaaaaagc

SEQ ID NO: 1298576 - DNA, 15 bp, Homo sapiens
gtaagattaaaaaag

SEQ ID NO: 1298577 - DNA, 15 bp, Homo sapiens
tgtaagattaaaaaa

SEQ ID NO: 1298578 - DNA, 15 bp, Homo sapiens
ttgtaagattaaaaa

SEQ ID NO: 1298579 - DNA, 15 bp, Homo sapiens
tttgtaagattaaaa

SEQ ID NO: 1298580 - DNA, 15 bp, Homo sapiens
atttgtaagattaaa

SEQ ID NO: 1298581 - DNA, 15 bp, Homo sapiens
aatttgtaagattaa

SEQ ID NO: 1298582 - DNA, 15 bp, Homo sapiens
taatttgtaagatta

SEQ ID NO: 1298583 - DNA, 15 bp, Homo sapiens
ataatttgtaagatt

SEQ ID NO: 1298584 - DNA, 15 bp, Homo sapiens
tataatttgtaagat

SEQ ID NO: 1298585 - DNA, 15 bp, Homo sapiens
atataatttgtaaga

SEQ ID NO: 1298586 - DNA, 15 bp, Homo sapiens
tatataatttgtaag

SEQ ID NO: 1298587 - DNA, 15 bp, Homo sapiens
atatataatttgtaa

SEQ ID NO: 1298588 - DNA, 15 bp, Homo sapiens
aatatataatttgta

SEQ ID NO: 1298589 - DNA, 15 bp, Homo sapiens
taatatataatttgt

SEQ ID NO: 1298590 - DNA, 15 bp, Homo sapiens
ataatatataatttg

SEQ ID NO: 1298591 - DNA, 15 bp, Homo sapiens
aataatatataattt

SEQ ID NO: 1298592 - DNA, 15 bp, Homo sapiens
taataatatataatt

SEQ ID NO: 1298593 - DNA, 15 bp, Homo sapiens
ctaataatatataat

SEQ ID NO: 1298594 - DNA, 15 bp, Homo sapiens
actaataatatataa

SEQ ID NO: 1298595 - DNA, 15 bp, Homo sapiens
tactaataatatata

SEQ ID NO: 1298596 - DNA, 15 bp, Homo sapiens
ctactaataatatat

SEQ ID NO: 1298597 - DNA, 15 bp, Homo sapiens
actactaataatata

SEQ ID NO: 1298598 - DNA, 15 bp, Homo sapiens
tactactaataatat

SEQ ID NO: 1298599 - DNA, 15 bp, Homo sapiens
atactactaataata

SEQ ID NO: 1298600 - DNA, 15 bp, Homo sapiens
aatactactaataat

SEQ ID NO: 1298601 - DNA, 15 bp, Homo sapiens
caatactactaataa

SEQ ID NO: 1298602 - DNA, 15 bp, Homo sapiens
acaatactactaata

SEQ ID NO: 1298603 - DNA, 15 bp, Homo sapiens
aacaatactactaat

SEQ ID NO: 1298604 - DNA, 15 bp, Homo sapiens
aaacaatactactaa

SEQ ID NO: 1298605 - DNA, 15 bp, Homo sapiens
aaaacaatactacta

SEQ ID NO: 1298606 - DNA, 15 bp, Homo sapiens
taaaacaatactact

SEQ ID NO: 1298607 - DNA, 15 bp, Homo sapiens
ataaaacaatactac

SEQ ID NO: 1298608 - DNA, 15 bp, Homo sapiens
aataaaacaatacta

SEQ ID NO: 1298609 - DNA, 15 bp, Homo sapiens
aaataaaacaatact

SEQ ID NO: 1298610 - DNA, 15 bp, Homo sapiens
taaataaaacaatac

SEQ ID NO: 1298611 - DNA, 15 bp, Homo sapiens
ataaataaaacaata

SEQ ID NO: 1298612 - DNA, 15 bp, Homo sapiens
tataaataaaacaat

SEQ ID NO: 1298613 - DNA, 15 bp, Homo sapiens
gtataaataaaacaa

SEQ ID NO: 1298614 - DNA, 15 bp, Homo sapiens
tgtataaataaaaca

SEQ ID NO: 1298615 - DNA, 15 bp, Homo sapiens
ctgtataaataaaac

SEQ ID NO: 1298616 - DNA, 15 bp, Homo sapiens
actgtataaataaaa

SEQ ID NO: 1298617 - DNA, 15 bp, Homo sapiens
cactgtataaataaa

SEQ ID NO: 1298618 - DNA, 15 bp, Homo sapiens
acactgtataaataa

SEQ ID NO: 1298619 - DNA, 15 bp, Homo sapiens
aacactgtataaata

SEQ ID NO: 1298620 - DNA, 15 bp, Homo sapiens
taacactgtataaat

SEQ ID NO: 1298621 - DNA, 15 bp, Homo sapiens
ataacactgtataaa

SEQ ID NO: 1298622 - DNA, 15 bp, Homo sapiens
aataacactgtataa

SEQ ID NO: 1298623 - DNA, 15 bp, Homo sapiens
aaataacactgtata

SEQ ID NO: 1298624 - DNA, 15 bp, Homo sapiens
taaataacactgtat

SEQ ID NO: 1298625 - DNA, 15 bp, Homo sapiens
ttaaataacactgta

SEQ ID NO: 1298626 - DNA, 15 bp, Homo sapiens
tttaaataacactgt

SEQ ID NO: 1298627 - DNA, 15 bp, Homo sapiens
ttttaaataacactg

SEQ ID NO: 1298628 - DNA, 15 bp, Homo sapiens
gttttaaataacact

SEQ ID NO: 1298629 - DNA, 15 bp, Homo sapiens
tgttttaaataacac

SEQ ID NO: 1298630 - DNA, 15 bp, Homo sapiens
atgttttaaataaca

SEQ ID NO: 1298631 - DNA, 15 bp, Homo sapiens
aatgttttaaataac

SEQ ID NO: 1298632 - DNA, 15 bp, Homo sapiens
aaatgttttaaataa

SEQ ID NO: 1298633 - DNA, 15 bp, Homo sapiens
aaaatgttttaaata

SEQ ID NO: 1298634 - DNA, 15 bp, Homo sapiens
aaaaatgttttaaat

SEQ ID NO: 1298635 - DNA, 15 bp, Homo sapiens
taaaaatgttttaaa

SEQ ID NO: 1298636 - DNA, 15 bp, Homo sapiens
ataaaaatgttttaa

SEQ ID NO: 1298637 - DNA, 15 bp, Homo sapiens
cataaaaatgtttta

SEQ ID NO: 1298638 - DNA, 15 bp, Homo sapiens
acataaaaatgtttt

SEQ ID NO: 1298639 - DNA, 15 bp, Homo sapiens
aacataaaaatgttt

SEQ ID NO: 1298640 - DNA, 15 bp, Homo sapiens
aaacataaaaatgtt

SEQ ID NO: 1298641 - DNA, 15 bp, Homo sapiens
taaacataaaaatgt

SEQ ID NO: 1298642 - DNA, 15 bp, Homo sapiens
gtaaacataaaaatg

SEQ ID NO: 1298643 - DNA, 15 bp, Homo sapiens
ggtaaacataaaaat

SEQ ID NO: 1298644 - DNA, 15 bp, Homo sapiens
aggtaaacataaaaa

SEQ ID NO: 1298645 - DNA, 15 bp, Homo sapiens
taggtaaacataaaa

SEQ ID NO: 1298646 - DNA, 15 bp, Homo sapiens
ataggtaaacataaa

SEQ ID NO: 1298647 - DNA, 15 bp, Homo sapiens
aataggtaaacataa

SEQ ID NO: 1298648 - DNA, 15 bp, Homo sapiens
aaataggtaaacata

SEQ ID NO: 1298649 - DNA, 15 bp, Homo sapiens
caaataggtaaacat

SEQ ID NO: 1298650 - DNA, 15 bp, Homo sapiens
gcaaataggtaaaca

SEQ ID NO: 1298651 - DNA, 15 bp, Homo sapiens
ggcaaataggtaaac

SEQ ID NO: 1298652 - DNA, 15 bp, Homo sapiens
aggcaaataggtaaa

SEQ ID NO: 1298653 - DNA, 15 bp, Homo sapiens
aaggcaaataggtaa

SEQ ID NO: 1298654 - DNA, 15 bp, Homo sapiens
caaggcaaataggta

SEQ ID NO: 1298655 - DNA, 15 bp, Homo sapiens
gcaaggcaaataggt

SEQ ID NO: 1298656 - DNA, 15 bp, Homo sapiens
agcaaggcaaatagg

SEQ ID NO: 1298657 - DNA, 15 bp, Homo sapiens
gagcaaggcaaatag

SEQ ID NO: 1298658 - DNA, 15 bp, Homo sapiens
tgagcaaggcaaata

SEQ ID NO: 1298659 - DNA, 15 bp, Homo sapiens
gtgagcaaggcaaat

SEQ ID NO: 1298660 - DNA, 15 bp, Homo sapiens
ggtgagcaaggcaaa

SEQ ID NO: 1298661 - DNA, 15 bp, Homo sapiens
tggtgagcaaggcaa

SEQ ID NO: 1298662 - DNA, 15 bp, Homo sapiens
atggtgagcaaggca

SEQ ID NO: 1298663 - DNA, 15 bp, Homo sapiens
aatggtgagcaaggc

SEQ ID NO: 1298664 - DNA, 15 bp, Homo sapiens
gaatggtgagcaagg

SEQ ID NO: 1298665 - DNA, 15 bp, Homo sapiens
agaatggtgagcaag

SEQ ID NO: 1298666 - DNA, 15 bp, Homo sapiens
aagaatggtgagcaa

SEQ ID NO: 1298667 - DNA, 15 bp, Homo sapiens
gaagaatggtgagca

SEQ ID NO: 1298668 - DNA, 15 bp, Homo sapiens
ggaagaatggtgagc

SEQ ID NO: 1298669 - DNA, 15 bp, Homo sapiens
aggaagaatggtgag

SEQ ID NO: 1298670 - DNA, 15 bp, Homo sapiens
aaggaagaatggtga

SEQ ID NO: 1298671 - DNA, 15 bp, Homo sapiens
caaggaagaatggtg

SEQ ID NO: 1298672 - DNA, 15 bp, Homo sapiens
gcaaggaagaatggt

SEQ ID NO: 1298673 - DNA, 15 bp, Homo sapiens
tgcaaggaagaatgg

SEQ ID NO: 1298674 - DNA, 15 bp, Homo sapiens
ttgcaaggaagaatg

SEQ ID NO: 1298675 - DNA, 15 bp, Homo sapiens
gttgcaaggaagaat

SEQ ID NO: 1298676 - DNA, 15 bp, Homo sapiens
agttgcaaggaagaa

SEQ ID NO: 1298677 - DNA, 15 bp, Homo sapiens
aagttgcaaggaaga

SEQ ID NO: 1298678 - DNA, 15 bp, Homo sapiens
taagttgcaaggaag

SEQ ID NO: 1298679 - DNA, 15 bp, Homo sapiens
ataagttgcaaggaa

SEQ ID NO: 1298680 - DNA, 15 bp, Homo sapiens
cataagttgcaagga

SEQ ID NO: 1298681 - DNA, 15 bp, Homo sapiens
gcataagttgcaagg

SEQ ID NO: 1298682 - DNA, 15 bp, Homo sapiens
ggcataagttgcaag

SEQ ID NO: 1298683 - DNA, 15 bp, Homo sapiens
aggcataagttgcaa

SEQ ID NO: 1298684 - DNA, 15 bp, Homo sapiens
gaggcataagttgca

SEQ ID NO: 1298685 - DNA, 15 bp, Homo sapiens
tgaggcataagttgc

SEQ ID NO: 1298686 - DNA, 15 bp, Homo sapiens
gtgaggcataagttg

SEQ ID NO: 1298687 - DNA, 15 bp, Homo sapiens
agtgaggcataagtt

SEQ ID NO: 1298688 - DNA, 15 bp, Homo sapiens
aagtgaggcataagt

SEQ ID NO: 1298689 - DNA, 15 bp, Homo sapiens
gaagtgaggcataag

SEQ ID NO: 1298690 - DNA, 15 bp, Homo sapiens
agaagtgaggcataa

SEQ ID NO: 1298691 - DNA, 15 bp, Homo sapiens
cagaagtgaggcata

SEQ ID NO: 1298692 - DNA, 15 bp, Homo sapiens
tcagaagtgaggcat

SEQ ID NO: 1298693 - DNA, 15 bp, Homo sapiens
ctcagaagtgaggca

SEQ ID NO: 1298694 - DNA, 15 bp, Homo sapiens
tctcagaagtgaggc

SEQ ID NO: 1298695 - DNA, 15 bp, Homo sapiens
atctcagaagtgagg

SEQ ID NO: 1298696 - DNA, 15 bp, Homo sapiens
tatctcagaagtgag

SEQ ID NO: 1298697 - DNA, 15 bp, Homo sapiens
ttatctcagaagtga

SEQ ID NO: 1298698 - DNA, 15 bp, Homo sapiens
attatctcagaagtg

SEQ ID NO: 1298699 - DNA, 15 bp, Homo sapiens
aattatctcagaagt

SEQ ID NO: 1298700 - DNA, 15 bp, Homo sapiens
aaattatctcagaag

SEQ ID NO: 1298701 - DNA, 15 bp, Homo sapiens
aaaattatctcagaa

SEQ ID NO: 1298702 - DNA, 15 bp, Homo sapiens
aaaaattatctcaga

SEQ ID NO: 1298703 - DNA, 15 bp, Homo sapiens
aaaaaattatctcag

SEQ ID NO: 1298704 - DNA, 15 bp, Homo sapiens
aaaaaaattatctca

SEQ ID NO: 1298705 - DNA, 15 bp, Homo sapiens
gaaaaaaattatctc

SEQ ID NO: 1298706 - DNA, 15 bp, Homo sapiens
agaaaaaaattatct

SEQ ID NO: 1298707 - DNA, 15 bp, Homo sapiens
aagaaaaaaattatc

SEQ ID NO: 1298708 - DNA, 15 bp, Homo sapiens
gaagaaaaaaattat

SEQ ID NO: 1298709 - DNA, 15 bp, Homo sapiens
agaagaaaaaaatta

SEQ ID NO: 1298710 - DNA, 15 bp, Homo sapiens
aagaagaaaaaaatt

SEQ ID NO: 1298711 - DNA, 15 bp, Homo sapiens
gaagaagaaaaaaat

SEQ ID NO: 1298712 - DNA, 15 bp, Homo sapiens
tgaagaagaaaaaaa

SEQ ID NO: 1298713 - DNA, 15 bp, Homo sapiens
ctgaagaagaaaaaa

SEQ ID NO: 1298714 - DNA, 15 bp, Homo sapiens
tctgaagaagaaaaa

SEQ ID NO: 1298715 - DNA, 15 bp, Homo sapiens
atctgaagaagaaaa

SEQ ID NO: 1298716 - DNA, 15 bp, Homo sapiens
tatctgaagaagaaa

SEQ ID NO: 1298717 - DNA, 15 bp, Homo sapiens
atatctgaagaagaa

SEQ ID NO: 1298718 - DNA, 15 bp, Homo sapiens
tatatctgaagaaga

SEQ ID NO: 1298719 - DNA, 15 bp, Homo sapiens
atatatctgaagaag

SEQ ID NO: 1298720 - DNA, 15 bp, Homo sapiens
gatatatctgaagaa

SEQ ID NO: 1298721 - DNA, 15 bp, Homo sapiens
ggatatatctgaaga

SEQ ID NO: 1298722 - DNA, 15 bp, Homo sapiens
aggatatatctgaag

SEQ ID NO: 1298723 - DNA, 15 bp, Homo sapiens
aaggatatatctgaa

SEQ ID NO: 1298724 - DNA, 15 bp, Homo sapiens
aaaggatatatctga

SEQ ID NO: 1298725 - DNA, 15 bp, Homo sapiens
caaaggatatatctg

SEQ ID NO: 1298726 - DNA, 15 bp, Homo sapiens
tcaaaggatatatct

SEQ ID NO: 1298727 - DNA, 15 bp, Homo sapiens
atcaaaggatatatc

SEQ ID NO: 1298728 - DNA, 15 bp, Homo sapiens
tatcaaaggatatat

SEQ ID NO: 1298729 - DNA, 15 bp, Homo sapiens
ttatcaaaggatata

SEQ ID NO: 1298730 - DNA, 15 bp, Homo sapiens
attatcaaaggatat

SEQ ID NO: 1298731 - DNA, 15 bp, Homo sapiens
aattatcaaaggata

SEQ ID NO: 1298732 - DNA, 15 bp, Homo sapiens
taattatcaaaggat

SEQ ID NO: 1298733 - DNA, 15 bp, Homo sapiens
gtaattatcaaagga

SEQ ID NO: 1298734 - DNA, 15 bp, Homo sapiens
agtaattatcaaagg

SEQ ID NO: 1298735 - DNA, 15 bp, Homo sapiens
aagtaattatcaaag

SEQ ID NO: 1298736 - DNA, 15 bp, Homo sapiens
aaagtaattatcaaa

SEQ ID NO: 1298737 - DNA, 15 bp, Homo sapiens
taaagtaattatcaa

SEQ ID NO: 1298738 - DNA, 15 bp, Homo sapiens
ctaaagtaattatca

SEQ ID NO: 1298739 - DNA, 15 bp, Homo sapiens
actaaagtaattatc

SEQ ID NO: 1298740 - DNA, 15 bp, Homo sapiens
cactaaagtaattat

SEQ ID NO: 1298741 - DNA, 15 bp, Homo sapiens
ccactaaagtaatta

SEQ ID NO: 1298742 - DNA, 15 bp, Homo sapiens
accactaaagtaatt

SEQ ID NO: 1298743 - DNA, 15 bp, Homo sapiens
taccactaaagtaat

SEQ ID NO: 1298744 - DNA, 15 bp, Homo sapiens
ataccactaaagtaa

SEQ ID NO: 1298745 - DNA, 15 bp, Homo sapiens
aataccactaaagta

SEQ ID NO: 1298746 - DNA, 15 bp, Homo sapiens
taataccactaaagt

SEQ ID NO: 1298747 - DNA, 15 bp, Homo sapiens
ttaataccactaaag

SEQ ID NO: 1298748 - DNA, 15 bp, Homo sapiens
attaataccactaaa

SEQ ID NO: 1298749 - DNA, 15 bp, Homo sapiens
aattaataccactaa

SEQ ID NO: 1298750 - DNA, 15 bp, Homo sapiens
aaattaataccacta

SEQ ID NO: 1298751 - DNA, 15 bp, Homo sapiens
caaattaataccact

SEQ ID NO: 1298752 - DNA, 15 bp, Homo sapiens
ccaaattaataccac

SEQ ID NO: 1298753 - DNA, 15 bp, Homo sapiens
cccaaattaatacca

SEQ ID NO: 1298754 - DNA, 15 bp, Homo sapiens
tcccaaattaatacc

SEQ ID NO: 1298755 - DNA, 15 bp, Homo sapiens
atcccaaattaatac

SEQ ID NO: 1298756 - DNA, 15 bp, Homo sapiens
catcccaaattaata

SEQ ID NO: 1298757 - DNA, 15 bp, Homo sapiens
tcatcccaaattaat

SEQ ID NO: 1298758 - DNA, 15 bp, Homo sapiens
ttcatcccaaattaa

SEQ ID NO: 1298759 - DNA, 15 bp, Homo sapiens
gttcatcccaaatta

SEQ ID NO: 1298760 - DNA, 15 bp, Homo sapiens
agttcatcccaaatt

SEQ ID NO: 1298761 - DNA, 15 bp, Homo sapiens
aagttcatcccaaat

SEQ ID NO: 1298762 - DNA, 15 bp, Homo sapiens
aaagttcatcccaaa

SEQ ID NO: 1298763 - DNA, 15 bp, Homo sapiens
aaaagttcatcccaa

SEQ ID NO: 1298764 - DNA, 15 bp, Homo sapiens
aaaaagttcatccca

SEQ ID NO: 1298765 - DNA, 15 bp, Homo sapiens
caaaaagttcatccc

SEQ ID NO: 1298766 - DNA, 15 bp, Homo sapiens
tcaaaaagttcatcc

SEQ ID NO: 1298767 - DNA, 15 bp, Homo sapiens
ctcaaaaagttcatc

SEQ ID NO: 1298768 - DNA, 15 bp, Homo sapiens
cctcaaaaagttcat

SEQ ID NO: 1298769 - DNA, 15 bp, Homo sapiens
acctcaaaaagttca

SEQ ID NO: 1298770 - DNA, 15 bp, Homo sapiens
aacctcaaaaagttc

SEQ ID NO: 1298771 - DNA, 15 bp, Homo sapiens
aaacctcaaaaagtt

SEQ ID NO: 1298772 - DNA, 15 bp, Homo sapiens
aaaacctcaaaaagt

SEQ ID NO: 1298773 - DNA, 15 bp, Homo sapiens
taaaacctcaaaaag

SEQ ID NO: 1298774 - DNA, 15 bp, Homo sapiens
ataaaacctcaaaaa

SEQ ID NO: 1298775 - DNA, 15 bp, Homo sapiens
aataaaacctcaaaa

SEQ ID NO: 1298776 - DNA, 15 bp, Homo sapiens
aaataaaacctcaaa

SEQ ID NO: 1298777 - DNA, 15 bp, Homo sapiens
aaaataaaacctcaa

SEQ ID NO: 1298778 - DNA, 15 bp, Homo sapiens
caaaataaaacctca

SEQ ID NO: 1298779 - DNA, 15 bp, Homo sapiens
acaaaataaaacctc

SEQ ID NO: 1298780 - DNA, 15 bp, Homo sapiens
aacaaaataaaacct

SEQ ID NO: 1298781 - DNA, 15 bp, Homo sapiens
aaacaaaataaaacc

SEQ ID NO: 1298782 - DNA, 15 bp, Homo sapiens
caaaaaacaaaataa

SEQ ID NO: 1298783 - DNA, 15 bp, Homo sapiens
tcaaaaaacaaaata

SEQ ID NO: 1298784 - DNA, 15 bp, Homo sapiens
atcaaaaaacaaaat

SEQ ID NO: 1298785 - DNA, 15 bp, Homo sapiens
gatcaaaaaacaaaa

SEQ ID NO: 1298786 - DNA, 15 bp, Homo sapiens
agatcaaaaaacaaa

SEQ ID NO: 1298787 - DNA, 15 bp, Homo sapiens
cagatcaaaaaacaa

SEQ ID NO: 1298788 - DNA, 15 bp, Homo sapiens
tcagatcaaaaaaca

SEQ ID NO: 1298789 - DNA, 15 bp, Homo sapiens
ttcagatcaaaaaac

SEQ ID NO: 1298790 - DNA, 15 bp, Homo sapiens
tttcagatcaaaaaa

SEQ ID NO: 1298791 - DNA, 15 bp, Homo sapiens
atttcagatcaaaaa

SEQ ID NO: 1298792 - DNA, 15 bp, Homo sapiens
aatttcagatcaaaa

SEQ ID NO: 1298793 - DNA, 15 bp, Homo sapiens
aaatttcagatcaaa

SEQ ID NO: 1298794 - DNA, 15 bp, Homo sapiens
aaaatttcagatcaa

SEQ ID NO: 1298795 - DNA, 15 bp, Homo sapiens
gaaaatttcagatca

SEQ ID NO: 1298796 - DNA, 15 bp, Homo sapiens
agaaaatttcagatc

SEQ ID NO: 1298797 - DNA, 15 bp, Homo sapiens
aagaaaatttcagat

SEQ ID NO: 1298798 - DNA, 15 bp, Homo sapiens
aaagaaaatttcaga

SEQ ID NO: 1298799 - DNA, 15 bp, Homo sapiens
taaagaaaatttcag

SEQ ID NO: 1298800 - DNA, 15 bp, Homo sapiens
gtaaagaaaatttca

SEQ ID NO: 1298801 - DNA, 15 bp, Homo sapiens
ggtaaagaaaatttc

SEQ ID NO: 1298802 - DNA, 15 bp, Homo sapiens
gggtaaagaaaattt

SEQ ID NO: 1298803 - DNA, 15 bp, Homo sapiens
agggtaaagaaaatt

SEQ ID NO: 1298804 - DNA, 15 bp, Homo sapiens
aagggtaaagaaaat

SEQ ID NO: 1298805 - DNA, 15 bp, Homo sapiens
taagggtaaagaaaa

SEQ ID NO: 1298806 - DNA, 15 bp, Homo sapiens
ataagggtaaagaaa

SEQ ID NO: 1298807 - DNA, 15 bp, Homo sapiens
aataagggtaaagaa

SEQ ID NO: 1298808 - DNA, 15 bp, Homo sapiens
aaataagggtaaaga

SEQ ID NO: 1298809 - DNA, 15 bp, Homo sapiens
aaaataagggtaaag

SEQ ID NO: 1298810 - DNA, 15 bp, Homo sapiens
aaaaataagggtaaa

SEQ ID NO: 1298811 - DNA, 15 bp, Homo sapiens
aaaaaataagggtaa

SEQ ID NO: 1298812 - DNA, 15 bp, Homo sapiens
aaaaaaataagggta

SEQ ID NO: 1298813 - DNA, 15 bp, Homo sapiens
caaaaaaataagggt

SEQ ID NO: 1298814 - DNA, 15 bp, Homo sapiens
acaaaaaaataaggg

SEQ ID NO: 1298815 - DNA, 15 bp, Homo sapiens
cacaaaaaaataagg

SEQ ID NO: 1298816 - DNA, 15 bp, Homo sapiens
tcacaaaaaaataag

SEQ ID NO: 1298817 - DNA, 15 bp, Homo sapiens
ctcacaaaaaaataa

SEQ ID NO: 1298818 - DNA, 15 bp, Homo sapiens
tctcacaaaaaaata

SEQ ID NO: 1298819 - DNA, 15 bp, Homo sapiens
atctcacaaaaaaat

SEQ ID NO: 1298820 - DNA, 15 bp, Homo sapiens
tatctcacaaaaaaa

SEQ ID NO: 1298821 - DNA, 15 bp, Homo sapiens
ctatctcacaaaaaa

SEQ ID NO: 1298822 - DNA, 15 bp, Homo sapiens
gctatctcacaaaaa

SEQ ID NO: 1298823 - DNA, 15 bp, Homo sapiens
agctatctcacaaaa

SEQ ID NO: 1298824 - DNA, 15 bp, Homo sapiens
aagctatctcacaaa

SEQ ID NO: 1298825 - DNA, 15 bp, Homo sapiens
aaagctatctcacaa

SEQ ID NO: 1298826 - DNA, 15 bp, Homo sapiens
caaagctatctcaca

SEQ ID NO: 1298827 - DNA, 15 bp, Homo sapiens
gcaaagctatctcac

SEQ ID NO: 1298828 - DNA, 15 bp, Homo sapiens
agcaaagctatctca

SEQ ID NO: 1298829 - DNA, 15 bp, Homo sapiens
gagcaaagctatctc

SEQ ID NO: 1298830 - DNA, 15 bp, Homo sapiens
cgagcaaagctatct

SEQ ID NO: 1298831 - DNA, 15 bp, Homo sapiens
tcgagcaaagctatc

SEQ ID NO: 1298832 - DNA, 15 bp, Homo sapiens
atcgagcaaagctat

SEQ ID NO: 1298833 - DNA, 15 bp, Homo sapiens
gatcgagcaaagcta

SEQ ID NO: 1298834 - DNA, 15 bp, Homo sapiens
agatcgagcaaagct

SEQ ID NO: 1298835 - DNA, 15 bp, Homo sapiens
aagatcgagcaaagc

SEQ ID NO: 1298836 - DNA, 15 bp, Homo sapiens
gaagatcgagcaaag

SEQ ID NO: 1298837 - DNA, 15 bp, Homo sapiens
tgaagatcgagcaaa

SEQ ID NO: 1298838 - DNA, 15 bp, Homo sapiens
ttgaagatcgagcaa

SEQ ID NO: 1298839 - DNA, 15 bp, Homo sapiens
attgaagatcgagca

SEQ ID NO: 1298840 - DNA, 15 bp, Homo sapiens
aattgaagatcgagc

SEQ ID NO: 1298841 - DNA, 15 bp, Homo sapiens
gaattgaagatcgag

SEQ ID NO: 1298842 - DNA, 15 bp, Homo sapiens
ggaattgaagatcga

SEQ ID NO: 1298843 - DNA, 15 bp, Homo sapiens
tggaattgaagatcg

SEQ ID NO: 1298844 - DNA, 15 bp, Homo sapiens
ctggaattgaagatc

SEQ ID NO: 1298845 - DNA, 15 bp, Homo sapiens
cctggaattgaagat

SEQ ID NO: 1298846 - DNA, 15 bp, Homo sapiens
acctggaattgaaga

SEQ ID NO: 1298847 - DNA, 15 bp, Homo sapiens
aacctggaattgaag

SEQ ID NO: 1298848 - DNA, 15 bp, Homo sapiens
caacctggaattgaa

SEQ ID NO: 1298849 - DNA, 15 bp, Homo sapiens
tcaacctggaattga

SEQ ID NO: 1298850 - DNA, 15 bp, Homo sapiens
gtcaacctggaattg

SEQ ID NO: 1298851 - DNA, 15 bp, Homo sapiens
tgtcaacctggaatt

SEQ ID NO: 1298852 - DNA, 15 bp, Homo sapiens
atgtcaacctggaat

SEQ ID NO: 1298853 - DNA, 15 bp, Homo sapiens
aatgtcaacctggaa

SEQ ID NO: 1298854 - DNA, 15 bp, Homo sapiens
aaatgtcaacctgga

SEQ ID NO: 1298855 - DNA, 15 bp, Homo sapiens
taaatgtcaacctgg

SEQ ID NO: 1298856 - DNA, 15 bp, Homo sapiens
gtaaatgtcaacctg

SEQ ID NO: 1298857 - DNA, 15 bp, Homo sapiens
agtaaatgtcaacct

SEQ ID NO: 1298858 - DNA, 15 bp, Homo sapiens
aagtaaatgtcaacc

SEQ ID NO: 1298859 - DNA, 15 bp, Homo sapiens
aaagtaaatgtcaac

SEQ ID NO: 1298860 - DNA, 15 bp, Homo sapiens
aaaagtaaatgtcaa

SEQ ID NO: 1298861 - DNA, 15 bp, Homo sapiens
aaaaagtaaatgtca

SEQ ID NO: 1298862 - DNA, 15 bp, Homo sapiens
taaaaagtaaatgtc

SEQ ID NO: 1298863 - DNA, 15 bp, Homo sapiens
ctaaaaagtaaatgt

SEQ ID NO: 1298864 - DNA, 15 bp, Homo sapiens
tctaaaaagtaaatg

SEQ ID NO: 1298865 - DNA, 15 bp, Homo sapiens
gtctaaaaagtaaat

SEQ ID NO: 1298866 - DNA, 15 bp, Homo sapiens
agtctaaaaagtaaa

SEQ ID NO: 1298867 - DNA, 15 bp, Homo sapiens
gagtctaaaaagtaa

SEQ ID NO: 1298868 - DNA, 15 bp, Homo sapiens
agagtctaaaaagta

SEQ ID NO: 1298869 - DNA, 15 bp, Homo sapiens
aagagtctaaaaagt

SEQ ID NO: 1298870 - DNA, 15 bp, Homo sapiens
taagagtctaaaaag

SEQ ID NO: 1298871 - DNA, 15 bp, Homo sapiens
ataagagtctaaaaa

SEQ ID NO: 1298872 - DNA, 15 bp, Homo sapiens
tataagagtctaaaa

SEQ ID NO: 1298873 - DNA, 15 bp, Homo sapiens
ttataagagtctaaa

SEQ ID NO: 1298874 - DNA, 15 bp, Homo sapiens
cttataagagtctaa

SEQ ID NO: 1298875 - DNA, 15 bp, Homo sapiens
acttataagagtcta

SEQ ID NO: 1298876 - DNA, 15 bp, Homo sapiens
aacttataagagtct

SEQ ID NO: 1298877 - DNA, 15 bp, Homo sapiens
aaacttataagagtc

SEQ ID NO: 1298878 - DNA, 15 bp, Homo sapiens
caaacttataagagt

SEQ ID NO: 1298879 - DNA, 15 bp, Homo sapiens
tcaaacttataagag

SEQ ID NO: 1298880 - DNA, 15 bp, Homo sapiens
ttcaaacttataaga

SEQ ID NO: 1298881 - DNA, 15 bp, Homo sapiens
cttcaaacttataag

SEQ ID NO: 1298882 - DNA, 15 bp, Homo sapiens
tcttcaaacttataa

SEQ ID NO: 1298883 - DNA, 15 bp, Homo sapiens
atcttcaaacttata

SEQ ID NO: 1298884 - DNA, 15 bp, Homo sapiens
tatcttcaaacttat

SEQ ID NO: 1298885 - DNA, 15 bp, Homo sapiens
ttatcttcaaactta

SEQ ID NO: 1298886 - DNA, 15 bp, Homo sapiens
attatcttcaaactt

SEQ ID NO: 1298887 - DNA, 15 bp, Homo sapiens
tattatcttcaaact

SEQ ID NO: 1298888 - DNA, 15 bp, Homo sapiens
gtattatcttcaaac

SEQ ID NO: 1298889 - DNA, 15 bp, Homo sapiens
tgtattatcttcaaa

SEQ ID NO: 1298890 - DNA, 15 bp, Homo sapiens
atgtattatcttcaa

SEQ ID NO: 1298891 - DNA, 15 bp, Homo sapiens
aatgtattatcttca

SEQ ID NO: 1298892 - DNA, 15 bp, Homo sapiens
taatgtattatcttc

SEQ ID NO: 1298893 - DNA, 15 bp, Homo sapiens
gtaatgtattatctt

SEQ ID NO: 1298894 - DNA, 15 bp, Homo sapiens
ggtaatgtattatct

SEQ ID NO: 1298895 - DNA, 15 bp, Homo sapiens
aggtaatgtattatc

SEQ ID NO: 1298896 - DNA, 15 bp, Homo sapiens
caggtaatgtattat

SEQ ID NO: 1298897 - DNA, 15 bp, Homo sapiens
ccaggtaatgtatta

SEQ ID NO: 1298898 - DNA, 15 bp, Homo sapiens
tccaggtaatgtatt

SEQ ID NO: 1298899 - DNA, 15 bp, Homo sapiens
atccaggtaatgtat

SEQ ID NO: 1298900 - DNA, 15 bp, Homo sapiens
gatccaggtaatgta

SEQ ID NO: 1298901 - DNA, 15 bp, Homo sapiens
ggatccaggtaatgt

SEQ ID NO: 1298902 - DNA, 15 bp, Homo sapiens
gggatccaggtaatg

SEQ ID NO: 1298903 - DNA, 15 bp, Homo sapiens
tgggatccaggtaat

SEQ ID NO: 1298904 - DNA, 15 bp, Homo sapiens
atgggatccaggtaa

SEQ ID NO: 1298905 - DNA, 15 bp, Homo sapiens
aatgggatccaggta

SEQ ID NO: 1298906 - DNA, 15 bp, Homo sapiens
aaatgggatccaggt

SEQ ID NO: 1298907 - DNA, 15 bp, Homo sapiens
aaaatgggatccagg

SEQ ID NO: 1298908 - DNA, 15 bp, Homo sapiens
aaaaatgggatccag

SEQ ID NO: 1298909 - DNA, 15 bp, Homo sapiens
caaaaatgggatcca

SEQ ID NO: 1298910 - DNA, 15 bp, Homo sapiens
gcaaaaatgggatcc

SEQ ID NO: 1298911 - DNA, 15 bp, Homo sapiens
agcaaaaatgggatc

SEQ ID NO: 1298912 - DNA, 15 bp, Homo sapiens
tagcaaaaatgggat

SEQ ID NO: 1298913 - DNA, 15 bp, Homo sapiens
ttagcaaaaatggga

SEQ ID NO: 1298914 - DNA, 15 bp, Homo sapiens
attagcaaaaatggg

SEQ ID NO: 1298915 - DNA, 15 bp, Homo sapiens
aattagcaaaaatgg

SEQ ID NO: 1298916 - DNA, 15 bp, Homo sapiens
taattagcaaaaatg

SEQ ID NO: 1298917 - DNA, 15 bp, Homo sapiens
ttaattagcaaaaat

SEQ ID NO: 1298918 - DNA, 15 bp, Homo sapiens
cttaattagcaaaaa

SEQ ID NO: 1298919 - DNA, 15 bp, Homo sapiens
tcttaattagcaaaa

SEQ ID NO: 1298920 - DNA, 15 bp, Homo sapiens
ttcttaattagcaaa

SEQ ID NO: 1298921 - DNA, 15 bp, Homo sapiens
cttcttaattagcaa

SEQ ID NO: 1298922 - DNA, 15 bp, Homo sapiens
acttcttaattagca

SEQ ID NO: 1298923 - DNA, 15 bp, Homo sapiens
gacttcttaattagc

SEQ ID NO: 1298924 - DNA, 15 bp, Homo sapiens
agacttcttaattag

SEQ ID NO: 1298925 - DNA, 15 bp, Homo sapiens
aagacttcttaatta

SEQ ID NO: 1298926 - DNA, 15 bp, Homo sapiens
taagacttcttaatt

SEQ ID NO: 1298927 - DNA, 15 bp, Homo sapiens
ataagacttcttaat

SEQ ID NO: 1298928 - DNA, 15 bp, Homo sapiens
cataagacttcttaa

SEQ ID NO: 1298929 - DNA, 15 bp, Homo sapiens
gcataagacttctta

SEQ ID NO: 1298930 - DNA, 15 bp, Homo sapiens
ggcataagacttctt

SEQ ID NO: 1298931 - DNA, 15 bp, Homo sapiens
tggcataagacttct

SEQ ID NO: 1298932 - DNA, 15 bp, Homo sapiens
gtggcataagacttc

SEQ ID NO: 1298933 - DNA, 15 bp, Homo sapiens
agtggcataagactt

SEQ ID NO: 1298934 - DNA, 15 bp, Homo sapiens
gagtggcataagact

SEQ ID NO: 1298935 - DNA, 15 bp, Homo sapiens
tgagtggcataagac

SEQ ID NO: 1298936 - DNA, 15 bp, Homo sapiens
ttgagtggcataaga

SEQ ID NO: 1298937 - DNA, 15 bp, Homo sapiens
attgagtggcataag

SEQ ID NO: 1298938 - DNA, 15 bp, Homo sapiens
gattgagtggcataa

SEQ ID NO: 1298939 - DNA, 15 bp, Homo sapiens
agattgagtggcata

SEQ ID NO: 1298940 - DNA, 15 bp, Homo sapiens
tagattgagtggcat

SEQ ID NO: 1298941 - DNA, 15 bp, Homo sapiens
ttagattgagtggca

SEQ ID NO: 1298942 - DNA, 15 bp, Homo sapiens
gttagattgagtggc

SEQ ID NO: 1298943 - DNA, 15 bp, Homo sapiens
agttagattgagtgg

SEQ ID NO: 1298944 - DNA, 15 bp, Homo sapiens
cagttagattgagtg

SEQ ID NO: 1298945 - DNA, 15 bp, Homo sapiens
acagttagattgagt

SEQ ID NO: 1298946 - DNA, 15 bp, Homo sapiens
aacagttagattgag

SEQ ID NO: 1298947 - DNA, 15 bp, Homo sapiens
caacagttagattga

SEQ ID NO: 1298948 - DNA, 15 bp, Homo sapiens
acaacagttagattg

SEQ ID NO: 1298949 - DNA, 15 bp, Homo sapiens
aacaacagttagatt

SEQ ID NO: 1298950 - DNA, 15 bp, Homo sapiens
gaacaacagttagat

SEQ ID NO: 1298951 - DNA, 15 bp, Homo sapiens
ggaacaacagttaga

SEQ ID NO: 1298952 - DNA, 15 bp, Homo sapiens
aggaacaacagttag

SEQ ID NO: 1298953 - DNA, 15 bp, Homo sapiens
aaggaacaacagtta

SEQ ID NO: 1298954 - DNA, 15 bp, Homo sapiens
aaaggaacaacagtt

SEQ ID NO: 1298955 - DNA, 15 bp, Homo sapiens
caaaggaacaacagt

SEQ ID NO: 1298956 - DNA, 15 bp, Homo sapiens
acaaaggaacaacag

SEQ ID NO: 1298957 - DNA, 15 bp, Homo sapiens
tacaaaggaacaaca

SEQ ID NO: 1298958 - DNA, 15 bp, Homo sapiens
ctacaaaggaacaac

SEQ ID NO: 1298959 - DNA, 15 bp, Homo sapiens
actacaaaggaacaa

SEQ ID NO: 1298960 - DNA, 15 bp, Homo sapiens
aactacaaaggaaca

SEQ ID NO: 1298961 - DNA, 15 bp, Homo sapiens
taactacaaaggaac

SEQ ID NO: 1298962 - DNA, 15 bp, Homo sapiens
ttaactacaaaggaa

SEQ ID NO: 1298963 - DNA, 15 bp, Homo sapiens
attaactacaaagga

SEQ ID NO: 1298964 - DNA, 15 bp, Homo sapiens
gattaactacaaagg

SEQ ID NO: 1298965 - DNA, 15 bp, Homo sapiens
agattaactacaaag

SEQ ID NO: 1298966 - DNA, 15 bp, Homo sapiens
cagattaactacaaa

SEQ ID NO: 1298967 - DNA, 15 bp, Homo sapiens
acagattaactacaa

SEQ ID NO: 1298968 - DNA, 15 bp, Homo sapiens
gacagattaactaca

SEQ ID NO: 1298969 - DNA, 15 bp, Homo sapiens
agacagattaactac

SEQ ID NO: 1298970 - DNA, 15 bp, Homo sapiens
aagacagattaacta

SEQ ID NO: 1298971 - DNA, 15 bp, Homo sapiens
aaagacagattaact

SEQ ID NO: 1298972 - DNA, 15 bp, Homo sapiens
aaaagacagattaac

SEQ ID NO: 1298973 - DNA, 15 bp, Homo sapiens
aaaaagacagattaa

SEQ ID NO: 1298974 - DNA, 15 bp, Homo sapiens
gaaaaagacagatta

SEQ ID NO: 1298975 - DNA, 15 bp, Homo sapiens
agaaaaagacagatt

SEQ ID NO: 1298976 - DNA, 15 bp, Homo sapiens
gagaaaaagacagat

SEQ ID NO: 1298977 - DNA, 15 bp, Homo sapiens
agagaaaaagacaga

SEQ ID NO: 1298978 - DNA, 15 bp, Homo sapiens
gagagaaaaagacag

SEQ ID NO: 1298979 - DNA, 15 bp, Homo sapiens
agagagaaaaagaca

SEQ ID NO: 1298980 - DNA, 15 bp, Homo sapiens
cagagagaaaaagac

SEQ ID NO: 1298981 - DNA, 15 bp, Homo sapiens
ccagagagaaaaaga

SEQ ID NO: 1298982 - DNA, 15 bp, Homo sapiens
gccagagagaaaaag

SEQ ID NO: 1298983 - DNA, 15 bp, Homo sapiens
agccagagagaaaaa

SEQ ID NO: 1298984 - DNA, 15 bp, Homo sapiens
tagccagagagaaaa

SEQ ID NO: 1298985 - DNA, 15 bp, Homo sapiens
gtagccagagagaaa

SEQ ID NO: 1298986 - DNA, 15 bp, Homo sapiens
agtagccagagagaa

SEQ ID NO: 1298987 - DNA, 15 bp, Homo sapiens
aagtagccagagaga

SEQ ID NO: 1298988 - DNA, 15 bp, Homo sapiens
aaagtagccagagag

SEQ ID NO: 1298989 - DNA, 15 bp, Homo sapiens
aaaagtagccagaga

SEQ ID NO: 1298990 - DNA, 15 bp, Homo sapiens
taaaagtagccagag

SEQ ID NO: 1298991 - DNA, 15 bp, Homo sapiens
ttaaaagtagccaga

SEQ ID NO: 1298992 - DNA, 15 bp, Homo sapiens
cttaaaagtagccag

SEQ ID NO: 1298993 - DNA, 15 bp, Homo sapiens
tcttaaaagtagcca

SEQ ID NO: 1298994 - DNA, 15 bp, Homo sapiens
atcttaaaagtagcc

SEQ ID NO: 1298995 - DNA, 15 bp, Homo sapiens
gatcttaaaagtagc

SEQ ID NO: 1298996 - DNA, 15 bp, Homo sapiens
agatcttaaaagtag

SEQ ID NO: 1298997 - DNA, 15 bp, Homo sapiens
aagatcttaaaagta

SEQ ID NO: 1298998 - DNA, 15 bp, Homo sapiens
aaagatcttaaaagt

SEQ ID NO: 1298999 - DNA, 15 bp, Homo sapiens
aaaagatcttaaaag

SEQ ID NO: 1299000 - DNA, 15 bp, Homo sapiens
gaaaagatcttaaaa

SEQ ID NO: 1299001 - DNA, 15 bp, Homo sapiens
agaaaagatcttaaa

SEQ ID NO: 1299002 - DNA, 15 bp, Homo sapiens
aagaaaagatcttaa

SEQ ID NO: 1299003 - DNA, 15 bp, Homo sapiens
aaagaaaagatctta

SEQ ID NO: 1299004 - DNA, 15 bp, Homo sapiens
caaagaaaagatctt

SEQ ID NO: 1299005 - DNA, 15 bp, Homo sapiens
tcaaagaaaagatct

SEQ ID NO: 1299006 - DNA, 15 bp, Homo sapiens
ttcaaagaaaagatc

SEQ ID NO: 1299007 - DNA, 15 bp, Homo sapiens
attcaaagaaaagat

SEQ ID NO: 1299008 - DNA, 15 bp, Homo sapiens
cattcaaagaaaaga

SEQ ID NO: 1299009 - DNA, 15 bp, Homo sapiens
acattcaaagaaaag

SEQ ID NO: 1299010 - DNA, 15 bp, Homo sapiens
tacattcaaagaaaa

SEQ ID NO: 1299011 - DNA, 15 bp, Homo sapiens
ctacattcaaagaaa

SEQ ID NO: 1299012 - DNA, 15 bp, Homo sapiens
actacattcaaagaa

SEQ ID NO: 1299013 - DNA, 15 bp, Homo sapiens
tactacattcaaaga

SEQ ID NO: 1299014 - DNA, 15 bp, Homo sapiens
atactacattcaaag

SEQ ID NO: 1299015 - DNA, 15 bp, Homo sapiens
aatactacattcaaa

SEQ ID NO: 1299016 - DNA, 15 bp, Homo sapiens
taatactacattcaa

SEQ ID NO: 1299017 - DNA, 15 bp, Homo sapiens
ctaatactacattca

SEQ ID NO: 1299018 - DNA, 15 bp, Homo sapiens
tctaatactacattc

SEQ ID NO: 1299019 - DNA, 15 bp, Homo sapiens
atctaatactacatt

SEQ ID NO: 1299020 - DNA, 15 bp, Homo sapiens
tatctaatactacat

SEQ ID NO: 1299021 - DNA, 15 bp, Homo sapiens
ctatctaatactaca

SEQ ID NO: 1299022 - DNA, 15 bp, Homo sapiens
cctatctaatactac

SEQ ID NO: 1299023 - DNA, 15 bp, Homo sapiens
tcctatctaatacta

SEQ ID NO: 1299024 - DNA, 15 bp, Homo sapiens
gtcctatctaatact

SEQ ID NO: 1299025 - DNA, 15 bp, Homo sapiens
agtcctatctaatac

SEQ ID NO: 1299026 - DNA, 15 bp, Homo sapiens
aagtcctatctaata

SEQ ID NO: 1299027 - DNA, 15 bp, Homo sapiens
taagtcctatctaat

SEQ ID NO: 1299028 - DNA, 15 bp, Homo sapiens
ttaagtcctatctaa

SEQ ID NO: 1299029 - DNA, 15 bp, Homo sapiens
gttaagtcctatcta

SEQ ID NO: 1299030 - DNA, 15 bp, Homo sapiens
tgttaagtcctatct

SEQ ID NO: 1299031 - DNA, 15 bp, Homo sapiens
atgttaagtcctatc

SEQ ID NO: 1299032 - DNA, 15 bp, Homo sapiens
aatgttaagtcctat

SEQ ID NO: 1299033 - DNA, 15 bp, Homo sapiens
gaatgttaagtccta

SEQ ID NO: 1299034 - DNA, 15 bp, Homo sapiens
ggaatgttaagtcct

SEQ ID NO: 1299035 - DNA, 15 bp, Homo sapiens
gggaatgttaagtcc

SEQ ID NO: 1299036 - DNA, 15 bp, Homo sapiens
ggggaatgttaagtc

SEQ ID NO: 1299037 - DNA, 15 bp, Homo sapiens
tggggaatgttaagt

SEQ ID NO: 1299038 - DNA, 15 bp, Homo sapiens
atggggaatgttaag

SEQ ID NO: 1299039 - DNA, 15 bp, Homo sapiens
tatggggaatgttaa

SEQ ID NO: 1299040 - DNA, 15 bp, Homo sapiens
gtatggggaatgtta

SEQ ID NO: 1299041 - DNA, 15 bp, Homo sapiens
ggtatggggaatgtt

SEQ ID NO: 1299042 - DNA, 15 bp, Homo sapiens
gggtatggggaatgt

SEQ ID NO: 1299043 - DNA, 15 bp, Homo sapiens
ggggtatggggaatg

SEQ ID NO: 1299044 - DNA, 15 bp, Homo sapiens
aggggtatggggaat

SEQ ID NO: 1299045 - DNA, 15 bp, Homo sapiens
taggggtatggggaa

SEQ ID NO: 1299046 - DNA, 15 bp, Homo sapiens
gtaggggtatgggga

SEQ ID NO: 1299047 - DNA, 15 bp, Homo sapiens
tgtaggggtatgggg

SEQ ID NO: 1299048 - DNA, 15 bp, Homo sapiens
ttgtaggggtatggg

SEQ ID NO: 1299049 - DNA, 15 bp, Homo sapiens
attgtaggggtatgg

SEQ ID NO: 1299050 - DNA, 15 bp, Homo sapiens
gattgtaggggtatg

SEQ ID NO: 1299051 - DNA, 15 bp, Homo sapiens
agattgtaggggtat

SEQ ID NO: 1299052 - DNA, 15 bp, Homo sapiens
aagattgtaggggta

SEQ ID NO: 1299053 - DNA, 15 bp, Homo sapiens
aaagattgtaggggt

SEQ ID NO: 1299054 - DNA, 15 bp, Homo sapiens
aaaagattgtagggg

SEQ ID NO: 1299055 - DNA, 15 bp, Homo sapiens
aaaaagattgtaggg

SEQ ID NO: 1299056 - DNA, 15 bp, Homo sapiens
gaaaaagattgtagg

SEQ ID NO: 1299057 - DNA, 15 bp, Homo sapiens
tgaaaaagattgtag

SEQ ID NO: 1299058 - DNA, 15 bp, Homo sapiens
atgaaaaagattgta

SEQ ID NO: 1299059 - DNA, 15 bp, Homo sapiens
gatgaaaaagattgt

SEQ ID NO: 1299060 - DNA, 15 bp, Homo sapiens
ggatgaaaaagattg

SEQ ID NO: 1299061 - DNA, 15 bp, Homo sapiens
tggatgaaaaagatt

SEQ ID NO: 1299062 - DNA, 15 bp, Homo sapiens
ttggatgaaaaagat

SEQ ID NO: 1299063 - DNA, 15 bp, Homo sapiens
attggatgaaaaaga

SEQ ID NO: 1299064 - DNA, 15 bp, Homo sapiens
tattggatgaaaaag

SEQ ID NO: 1299065 - DNA, 15 bp, Homo sapiens
atattggatgaaaaa

SEQ ID NO: 1299066 - DNA, 15 bp, Homo sapiens
aatattggatgaaaa

SEQ ID NO: 1299067 - DNA, 15 bp, Homo sapiens
aaatattggatgaaa

SEQ ID NO: 1299068 - DNA, 15 bp, Homo sapiens
taaatattggatgaa

SEQ ID NO: 1299069 - DNA, 15 bp, Homo sapiens
ttaaatattggatga

SEQ ID NO: 1299070 - DNA, 15 bp, Homo sapiens
gttaaatattggatg

SEQ ID NO: 1299071 - DNA, 15 bp, Homo sapiens
ggttaaatattggat

SEQ ID NO: 1299072 - DNA, 15 bp, Homo sapiens
gggttaaatattgga

SEQ ID NO: 1299073 - DNA, 15 bp, Homo sapiens
tgggttaaatattgg

SEQ ID NO: 1299074 - DNA, 15 bp, Homo sapiens
atgggttaaatattg

SEQ ID NO: 1299075 - DNA, 15 bp, Homo sapiens
aatgggttaaatatt

SEQ ID NO: 1299076 - DNA, 15 bp, Homo sapiens
aaatgggttaaatat

SEQ ID NO: 1299077 - DNA, 15 bp, Homo sapiens
aaaatgggttaaata

SEQ ID NO: 1299078 - DNA, 15 bp, Homo sapiens
aaaaatgggttaaat

SEQ ID NO: 1299079 - DNA, 15 bp, Homo sapiens
taaaaatgggttaaa

SEQ ID NO: 1299080 - DNA, 15 bp, Homo sapiens
ataaaaatgggttaa

SEQ ID NO: 1299081 - DNA, 15 bp, Homo sapiens
aataaaaatgggtta

SEQ ID NO: 1299082 - DNA, 15 bp, Homo sapiens
aaataaaaatgggtt

SEQ ID NO: 1299083 - DNA, 15 bp, Homo sapiens
taaataaaaatgggt

SEQ ID NO: 1299084 - DNA, 15 bp, Homo sapiens
gtaaataaaaatggg

SEQ ID NO: 1299085 - DNA, 15 bp, Homo sapiens
tgtaaataaaaatgg

SEQ ID NO: 1299086 - DNA, 15 bp, Homo sapiens
ttgtaaataaaaatg

SEQ ID NO: 1299087 - DNA, 15 bp, Homo sapiens
attgtaaataaaaat

SEQ ID NO: 1299088 - DNA, 15 bp, Homo sapiens
aattgtaaataaaaa

SEQ ID NO: 1299089 - DNA, 15 bp, Homo sapiens
gaattgtaaataaaa

SEQ ID NO: 1299090 - DNA, 15 bp, Homo sapiens
agaattgtaaataaa

SEQ ID NO: 1299091 - DNA, 15 bp, Homo sapiens
aagaattgtaaataa

SEQ ID NO: 1299092 - DNA, 15 bp, Homo sapiens
taagaattgtaaata

SEQ ID NO: 1299093 - DNA, 15 bp, Homo sapiens
gtaagaattgtaaat

SEQ ID NO: 1299094 - DNA, 15 bp, Homo sapiens
ggtaagaattgtaaa

SEQ ID NO: 1299095 - DNA, 15 bp, Homo sapiens
aggtaagaattgtaa

SEQ ID NO: 1299096 - DNA, 15 bp, Homo sapiens
caggtaagaattgta

SEQ ID NO: 1299097 - DNA, 15 bp, Homo sapiens
ccaggtaagaattgt

SEQ ID NO: 1299098 - DNA, 15 bp, Homo sapiens
gccaggtaagaattg

SEQ ID NO: 1299099 - DNA, 15 bp, Homo sapiens
ggccaggtaagaatt

SEQ ID NO: 1299100 - DNA, 15 bp, Homo sapiens
gggccaggtaagaat

SEQ ID NO: 1299101 - DNA, 15 bp, Homo sapiens
agggccaggtaagaa

SEQ ID NO: 1299102 - DNA, 15 bp, Homo sapiens
cagggccaggtaaga

SEQ ID NO: 1299103 - DNA, 15 bp, Homo sapiens
acagggccaggtaag

SEQ ID NO: 1299104 - DNA, 15 bp, Homo sapiens
aacagggccaggtaa

SEQ ID NO: 1299105 - DNA, 15 bp, Homo sapiens
taacagggccaggta

SEQ ID NO: 1299106 - DNA, 15 bp, Homo sapiens
ctaacagggccaggt

SEQ ID NO: 1299107 - DNA, 15 bp, Homo sapiens
gctaacagggccagg

SEQ ID NO: 1299108 - DNA, 15 bp, Homo sapiens
tgctaacagggccag

SEQ ID NO: 1299109 - DNA, 15 bp, Homo sapiens
atgctaacagggcca

SEQ ID NO: 1299110 - DNA, 15 bp, Homo sapiens
aatgctaacagggcc

SEQ ID NO: 1299111 - DNA, 15 bp, Homo sapiens
taatgctaacagggc

SEQ ID NO: 1299112 - DNA, 15 bp, Homo sapiens
ataatgctaacaggg

SEQ ID NO: 1299113 - DNA, 15 bp, Homo sapiens
tataatgctaacagg

SEQ ID NO: 1299114 - DNA, 15 bp, Homo sapiens
ctataatgctaacag

SEQ ID NO: 1299115 - DNA, 15 bp, Homo sapiens
actataatgctaaca

SEQ ID NO: 1299116 - DNA, 15 bp, Homo sapiens
aactataatgctaac

SEQ ID NO: 1299117 - DNA, 15 bp, Homo sapiens
aaactataatgctaa

SEQ ID NO: 1299118 - DNA, 15 bp, Homo sapiens
caaactataatgcta

SEQ ID NO: 1299119 - DNA, 15 bp, Homo sapiens
gcaaactataatgct

SEQ ID NO: 1299120 - DNA, 15 bp, Homo sapiens
tgcaaactataatgc

SEQ ID NO: 1299121 - DNA, 15 bp, Homo sapiens
ttgcaaactataatg

SEQ ID NO: 1299122 - DNA, 15 bp, Homo sapiens
gttgcaaactataat

SEQ ID NO: 1299123 - DNA, 15 bp, Homo sapiens
agttgcaaactataa

SEQ ID NO: 1299124 - DNA, 15 bp, Homo sapiens
gagttgcaaactata

SEQ ID NO: 1299125 - DNA, 15 bp, Homo sapiens
ggagttgcaaactat

SEQ ID NO: 1299126 - DNA, 15 bp, Homo sapiens
aggagttgcaaacta

SEQ ID NO: 1299127 - DNA, 15 bp, Homo sapiens
caggagttgcaaact

SEQ ID NO: 1299128 - DNA, 15 bp, Homo sapiens
tcaggagttgcaaac

SEQ ID NO: 1299129 - DNA, 15 bp, Homo sapiens
atcaggagttgcaaa

SEQ ID NO: 1299130 - DNA, 15 bp, Homo sapiens
tatcaggagttgcaa

SEQ ID NO: 1299131 - DNA, 15 bp, Homo sapiens
ctatcaggagttgca

SEQ ID NO: 1299132 - DNA, 15 bp, Homo sapiens
tctatcaggagttgc

SEQ ID NO: 1299133 - DNA, 15 bp, Homo sapiens
gtctatcaggagttg

SEQ ID NO: 1299134 - DNA, 15 bp, Homo sapiens
tgtctatcaggagtt

SEQ ID NO: 1299135 - DNA, 15 bp, Homo sapiens
ttgtctatcaggagt

SEQ ID NO: 1299136 - DNA, 15 bp, Homo sapiens
attgtctatcaggag

SEQ ID NO: 1299137 - DNA, 15 bp, Homo sapiens
tattgtctatcagga

SEQ ID NO: 1299138 - DNA, 15 bp, Homo sapiens
ttattgtctatcagg

SEQ ID NO: 1299139 - DNA, 15 bp, Homo sapiens
cttattgtctatcag

SEQ ID NO: 1299140 - DNA, 15 bp, Homo sapiens
acttattgtctatca

SEQ ID NO: 1299141 - DNA, 15 bp, Homo sapiens
aacttattgtctatc

SEQ ID NO: 1299142 - DNA, 15 bp, Homo sapiens
aaacttattgtctat

SEQ ID NO: 1299143 - DNA, 15 bp, Homo sapiens
taaacttattgtcta

SEQ ID NO: 1299144 - DNA, 15 bp, Homo sapiens
ttaaacttattgtct

SEQ ID NO: 1299145 - DNA, 15 bp, Homo sapiens
attaaacttattgtc

SEQ ID NO: 1299146 - DNA, 15 bp, Homo sapiens
tattaaacttattgt

SEQ ID NO: 1299147 - DNA, 15 bp, Homo sapiens
atattaaacttattg

SEQ ID NO: 1299148 - DNA, 15 bp, Homo sapiens
gatattaaacttatt

SEQ ID NO: 1299149 - DNA, 15 bp, Homo sapiens
agatattaaacttat

SEQ ID NO: 1299150 - DNA, 15 bp, Homo sapiens
cagatattaaactta

SEQ ID NO: 1299151 - DNA, 15 bp, Homo sapiens
tcagatattaaactt

SEQ ID NO: 1299152 - DNA, 15 bp, Homo sapiens
ttcagatattaaact

SEQ ID NO: 1299153 - DNA, 15 bp, Homo sapiens
cttcagatattaaac

SEQ ID NO: 1299154 - DNA, 15 bp, Homo sapiens
ccttcagatattaaa

SEQ ID NO: 1299155 - DNA, 15 bp, Homo sapiens
gccttcagatattaa

SEQ ID NO: 1299156 - DNA, 15 bp, Homo sapiens
tgccttcagatatta

SEQ ID NO: 1299157 - DNA, 15 bp, Homo sapiens
atgccttcagatatt

SEQ ID NO: 1299158 - DNA, 15 bp, Homo sapiens
gatgccttcagatat

SEQ ID NO: 1299159 - DNA, 15 bp, Homo sapiens
agatgccttcagata

SEQ ID NO: 1299160 - DNA, 15 bp, Homo sapiens
cagatgccttcagat

SEQ ID NO: 1299161 - DNA, 15 bp, Homo sapiens
tcagatgccttcaga

SEQ ID NO: 1299162 - DNA, 15 bp, Homo sapiens
atcagatgccttcag

SEQ ID NO: 1299163 - DNA, 15 bp, Homo sapiens
tatcagatgccttca

SEQ ID NO: 1299164 - DNA, 15 bp, Homo sapiens
gtatcagatgccttc

SEQ ID NO: 1299165 - DNA, 15 bp, Homo sapiens
ggtatcagatgcctt

SEQ ID NO: 1299166 - DNA, 15 bp, Homo sapiens
gggtatcagatgcct

SEQ ID NO: 1299167 - DNA, 15 bp, Homo sapiens
agggtatcagatgcc

SEQ ID NO: 1299168 - DNA, 15 bp, Homo sapiens
gagggtatcagatgc

SEQ ID NO: 1299169 - DNA, 15 bp, Homo sapiens
agagggtatcagatg

SEQ ID NO: 1299170 - DNA, 15 bp, Homo sapiens
gagagggtatcagat

SEQ ID NO: 1299171 - DNA, 15 bp, Homo sapiens
agagagggtatcaga

SEQ ID NO: 1299172 - DNA, 15 bp, Homo sapiens
gagagagggtatcag

SEQ ID NO: 1299173 - DNA, 15 bp, Homo sapiens
ggagagagggtatca

SEQ ID NO: 1299174 - DNA, 15 bp, Homo sapiens
gggagagagggtatc

SEQ ID NO: 1299175 - DNA, 15 bp, Homo sapiens
ggggagagagggtat

SEQ ID NO: 1299176 - DNA, 15 bp, Homo sapiens
aggggagagagggta

SEQ ID NO: 1299177 - DNA, 15 bp, Homo sapiens
taggggagagagggt

SEQ ID NO: 1299178 - DNA, 15 bp, Homo sapiens
ttaggggagagaggg

SEQ ID NO: 1299179 - DNA, 15 bp, Homo sapiens
tttaggggagagagg

SEQ ID NO: 1299180 - DNA, 15 bp, Homo sapiens
ctttaggggagagag

SEQ ID NO: 1299181 - DNA, 15 bp, Homo sapiens
tctttaggggagaga

SEQ ID NO: 1299182 - DNA, 15 bp, Homo sapiens
gtctttaggggagag

SEQ ID NO: 1299183 - DNA, 15 bp, Homo sapiens
tgtctttaggggaga

SEQ ID NO: 1299184 - DNA, 15 bp, Homo sapiens
ttgtctttaggggag

SEQ ID NO: 1299185 - DNA, 15 bp, Homo sapiens
cttgtctttagggga

SEQ ID NO: 1299186 - DNA, 15 bp, Homo sapiens
ccttgtctttagggg

SEQ ID NO: 1299187 - DNA, 15 bp, Homo sapiens
tccttgtctttaggg

SEQ ID NO: 1299188 - DNA, 15 bp, Homo sapiens
ctccttgtctttagg

SEQ ID NO: 1299189 - DNA, 15 bp, Homo sapiens
tctccttgtctttag

SEQ ID NO: 1299190 - DNA, 15 bp, Homo sapiens
ttctccttgtcttta

SEQ ID NO: 1299191 - DNA, 15 bp, Homo sapiens
tttctccttgtcttt

SEQ ID NO: 1299192 - DNA, 15 bp, Homo sapiens
ctttctccttgtctt

SEQ ID NO: 1299193 - DNA, 15 bp, Homo sapiens
tctttctccttgtct

SEQ ID NO: 1299194 - DNA, 15 bp, Homo sapiens
ttctttctccttgtc

SEQ ID NO: 1299195 - DNA, 15 bp, Homo sapiens
tttctttctccttgt

SEQ ID NO: 1299196 - DNA, 15 bp, Homo sapiens
ctttctttctccttg

SEQ ID NO: 1299197 - DNA, 15 bp, Homo sapiens
tctttctttctcctt

SEQ ID NO: 1299198 - DNA, 15 bp, Homo sapiens
ctctttctttctcct

SEQ ID NO: 1299199 - DNA, 15 bp, Homo sapiens
tctctttctttctcc

SEQ ID NO: 1299200 - DNA, 15 bp, Homo sapiens
ctctctttctttctc

SEQ ID NO: 1299201 - DNA, 15 bp, Homo sapiens
ttctctctctttctt

SEQ ID NO: 1299202 - DNA, 15 bp, Homo sapiens
attctctctctttct

SEQ ID NO: 1299203 - DNA, 15 bp, Homo sapiens
cattctctctctttc

SEQ ID NO: 1299204 - DNA, 15 bp, Homo sapiens
tcattctctctcttt

SEQ ID NO: 1299205 - DNA, 15 bp, Homo sapiens
ttcattctctctctt

SEQ ID NO: 1299206 - DNA, 15 bp, Homo sapiens
tttcattctctctct

SEQ ID NO: 1299207 - DNA, 15 bp, Homo sapiens
gtttcattctctctc

SEQ ID NO: 1299208 - DNA, 15 bp, Homo sapiens
agtttcattctctct

SEQ ID NO: 1299209 - DNA, 15 bp, Homo sapiens
tagtttcattctctc

SEQ ID NO: 1299210 - DNA, 15 bp, Homo sapiens
atagtttcattctct

SEQ ID NO: 1299211 - DNA, 15 bp, Homo sapiens
gatagtttcattctc

SEQ ID NO: 1299212 - DNA, 15 bp, Homo sapiens
tgatagtttcattct

SEQ ID NO: 1299213 - DNA, 15 bp, Homo sapiens
atgatagtttcattc

SEQ ID NO: 1299214 - DNA, 15 bp, Homo sapiens
gatgatagtttcatt

SEQ ID NO: 1299215 - DNA, 15 bp, Homo sapiens
agatgatagtttcat

SEQ ID NO: 1299216 - DNA, 15 bp, Homo sapiens
tagatgatagtttca

SEQ ID NO: 1299217 - DNA, 15 bp, Homo sapiens
atagatgatagtttc

SEQ ID NO: 1299218 - DNA, 15 bp, Homo sapiens
tatagatgatagttt

SEQ ID NO: 1299219 - DNA, 15 bp, Homo sapiens
atatagatgatagtt

SEQ ID NO: 1299220 - DNA, 15 bp, Homo sapiens
aatatagatgatagt

SEQ ID NO: 1299221 - DNA, 15 bp, Homo sapiens
caatatagatgatag

SEQ ID NO: 1299222 - DNA, 15 bp, Homo sapiens
gcaatatagatgata

SEQ ID NO: 1299223 - DNA, 15 bp, Homo sapiens
agcaatatagatgat

SEQ ID NO: 1299224 - DNA, 15 bp, Homo sapiens
aagcaatatagatga

SEQ ID NO: 1299225 - DNA, 15 bp, Homo sapiens
caagcaatatagatg

SEQ ID NO: 1299226 - DNA, 15 bp, Homo sapiens
gcaagcaatatagat

SEQ ID NO: 1299227 - DNA, 15 bp, Homo sapiens
agcaagcaatataga

SEQ ID NO: 1299228 - DNA, 15 bp, Homo sapiens
aagcaagcaatatag

SEQ ID NO: 1299229 - DNA, 15 bp, Homo sapiens
caagcaagcaatata

SEQ ID NO: 1299230 - DNA, 15 bp, Homo sapiens
gcaagcaagcaatat

SEQ ID NO: 1299231 - DNA, 15 bp, Homo sapiens
agcaagcaagcaata

SEQ ID NO: 1299232 - DNA, 15 bp, Homo sapiens
gagcaagcaagcaat

SEQ ID NO: 1299233 - DNA, 15 bp, Homo sapiens
ggagcaagcaagcaa

SEQ ID NO: 1299234 - DNA, 15 bp, Homo sapiens
aggagcaagcaagca

SEQ ID NO: 1299235 - DNA, 15 bp, Homo sapiens
aaggagcaagcaagc

SEQ ID NO: 1299236 - DNA, 15 bp, Homo sapiens
gaaggagcaagcaag

SEQ ID NO: 1299237 - DNA, 15 bp, Homo sapiens
tgaaggagcaagcaa

SEQ ID NO: 1299238 - DNA, 15 bp, Homo sapiens
gtgaaggagcaagca

SEQ ID NO: 1299239 - DNA, 15 bp, Homo sapiens
agtgaaggagcaagc

SEQ ID NO: 1299240 - DNA, 15 bp, Homo sapiens
gagtgaaggagcaag

SEQ ID NO: 1299241 - DNA, 15 bp, Homo sapiens
ggagtgaaggagcaa

SEQ ID NO: 1299242 - DNA, 15 bp, Homo sapiens
aggagtgaaggagca

SEQ ID NO: 1299243 - DNA, 15 bp, Homo sapiens
aaggagtgaaggagc

SEQ ID NO: 1299244 - DNA, 15 bp, Homo sapiens
taaggagtgaaggag

SEQ ID NO: 1299245 - DNA, 15 bp, Homo sapiens
gtaaggagtgaagga

SEQ ID NO: 1299246 - DNA, 15 bp, Homo sapiens
agtaaggagtgaagg

SEQ ID NO: 1299247 - DNA, 15 bp, Homo sapiens
aagtaaggagtgaag

SEQ ID NO: 1299248 - DNA, 15 bp, Homo sapiens
taagtaaggagtgaa

SEQ ID NO: 1299249 - DNA, 15 bp, Homo sapiens
ttaagtaaggagtga

SEQ ID NO: 1299250 - DNA, 15 bp, Homo sapiens
tttaagtaaggagtg

SEQ ID NO: 1299251 - DNA, 15 bp, Homo sapiens
gtttaagtaaggagt

SEQ ID NO: 1299252 - DNA, 15 bp, Homo sapiens
agtttaagtaaggag

SEQ ID NO: 1299253 - DNA, 15 bp, Homo sapiens
gagtttaagtaagga

SEQ ID NO: 1299254 - DNA, 15 bp, Homo sapiens
tgagtttaagtaagg

SEQ ID NO: 1299255 - DNA, 15 bp, Homo sapiens
ctgagtttaagtaag

SEQ ID NO: 1299256 - DNA, 15 bp, Homo sapiens
tctgagtttaagtaa

SEQ ID NO: 1299257 - DNA, 15 bp, Homo sapiens
atctgagtttaagta

SEQ ID NO: 1299258 - DNA, 15 bp, Homo sapiens
catctgagtttaagt

SEQ ID NO: 1299259 - DNA, 15 bp, Homo sapiens
tcatctgagtttaag

SEQ ID NO: 1299260 - DNA, 15 bp, Homo sapiens
ctcatctgagtttaa

SEQ ID NO: 1299261 - DNA, 15 bp, Homo sapiens
cctcatctgagttta

SEQ ID NO: 1299262 - DNA, 15 bp, Homo sapiens
tcctcatctgagttt

SEQ ID NO: 1299263 - DNA, 15 bp, Homo sapiens
atcctcatctgagtt

SEQ ID NO: 1299264 - DNA, 15 bp, Homo sapiens
aatcctcatctgagt

SEQ ID NO: 1299265 - DNA, 15 bp, Homo sapiens
caatcctcatctgag

SEQ ID NO: 1299266 - DNA, 15 bp, Homo sapiens
ccaatcctcatctga

SEQ ID NO: 1299267 - DNA, 15 bp, Homo sapiens
cccaatcctcatctg

SEQ ID NO: 1299268 - DNA, 15 bp, Homo sapiens
tcccaatcctcatct

SEQ ID NO: 1299269 - DNA, 15 bp, Homo sapiens
gtcccaatcctcatc

SEQ ID NO: 1299270 - DNA, 15 bp, Homo sapiens
ggtcccaatcctcat

SEQ ID NO: 1299271 - DNA, 15 bp, Homo sapiens
gggtcccaatcctca

SEQ ID NO: 1299272 - DNA, 15 bp, Homo sapiens
tgggtcccaatcctc

SEQ ID NO: 1299273 - DNA, 15 bp, Homo sapiens
gtgggtcccaatcct

SEQ ID NO: 1299274 - DNA, 15 bp, Homo sapiens
agtgggtcccaatcc

SEQ ID NO: 1299275 - DNA, 15 bp, Homo sapiens
cagtgggtcccaatc

SEQ ID NO: 1299276 - DNA, 15 bp, Homo sapiens
tcagtgggtcccaat

SEQ ID NO: 1299277 - DNA, 15 bp, Homo sapiens
ttcagtgggtcccaa

SEQ ID NO: 1299278 - DNA, 15 bp, Homo sapiens
tttcagtgggtccca

SEQ ID NO: 1299279 - DNA, 15 bp, Homo sapiens
atttcagtgggtccc

SEQ ID NO: 1299280 - DNA, 15 bp, Homo sapiens
catttcagtgggtcc

SEQ ID NO: 1299281 - DNA, 15 bp, Homo sapiens
gcatttcagtgggtc

SEQ ID NO: 1299282 - DNA, 15 bp, Homo sapiens
agcatttcagtgggt

SEQ ID NO: 1299283 - DNA, 15 bp, Homo sapiens
gagcatttcagtggg

SEQ ID NO: 1299284 - DNA, 15 bp, Homo sapiens
tgagcatttcagtgg

SEQ ID NO: 1299285 - DNA, 15 bp, Homo sapiens
atgagcatttcagtg

SEQ ID NO: 1299286 - DNA, 15 bp, Homo sapiens
gatgagcatttcagt

SEQ ID NO: 1299287 - DNA, 15 bp, Homo sapiens
ggatgagcatttcag

SEQ ID NO: 1299288 - DNA, 15 bp, Homo sapiens
tggatgagcatttca

SEQ ID NO: 1299289 - DNA, 15 bp, Homo sapiens
gtggatgagcatttc

SEQ ID NO: 1299290 - DNA, 15 bp, Homo sapiens
agtggatgagcattt

SEQ ID NO: 1299291 - DNA, 15 bp, Homo sapiens
tagtggatgagcatt

SEQ ID NO: 1299292 - DNA, 15 bp, Homo sapiens
ttagtggatgagcat

SEQ ID NO: 1299293 - DNA, 15 bp, Homo sapiens
tttagtggatgagca

SEQ ID NO: 1299294 - DNA, 15 bp, Homo sapiens
ttttagtggatgagc

SEQ ID NO: 1299295 - DNA, 15 bp, Homo sapiens
attttagtggatgag

SEQ ID NO: 1299296 - DNA, 15 bp, Homo sapiens
aattttagtggatga

SEQ ID NO: 1299297 - DNA, 15 bp, Homo sapiens
caattttagtggatg

SEQ ID NO: 1299298 - DNA, 15 bp, Homo sapiens
ccaattttagtggat

SEQ ID NO: 1299299 - DNA, 15 bp, Homo sapiens
tccaattttagtgga

SEQ ID NO: 1299300 - DNA, 15 bp, Homo sapiens
gtccaattttagtgg

SEQ ID NO: 1299301 - DNA, 15 bp, Homo sapiens
tgtccaattttagtg

SEQ ID NO: 1299302 - DNA, 15 bp, Homo sapiens
atgtccaattttagt

SEQ ID NO: 1299303 - DNA, 15 bp, Homo sapiens
tatgtccaattttag

SEQ ID NO: 1299304 - DNA, 15 bp, Homo sapiens
ctatgtccaatttta

SEQ ID NO: 1299305 - DNA, 15 bp, Homo sapiens
cctatgtccaatttt

SEQ ID NO: 1299306 - DNA, 15 bp, Homo sapiens
ccctatgtccaattt

SEQ ID NO: 1299307 - DNA, 15 bp, Homo sapiens
accctatgtccaatt

SEQ ID NO: 1299308 - DNA, 15 bp, Homo sapiens
gaccctatgtccaat

SEQ ID NO: 1299309 - DNA, 15 bp, Homo sapiens
tgaccctatgtccaa

SEQ ID NO: 1299310 - DNA, 15 bp, Homo sapiens
ctgaccctatgtcca

SEQ ID NO: 1299311 - DNA, 15 bp, Homo sapiens
cctgaccctatgtcc

SEQ ID NO: 1299312 - DNA, 15 bp, Homo sapiens
tcctgaccctatgtc

SEQ ID NO: 1299313 - DNA, 15 bp, Homo sapiens
ctcctgaccctatgt

SEQ ID NO: 1299314 - DNA, 15 bp, Homo sapiens
tctcctgaccctatg

SEQ ID NO: 1299315 - DNA, 15 bp, Homo sapiens
gtctcctgaccctat

SEQ ID NO: 1299316 - DNA, 15 bp, Homo sapiens
agtctcctgacccta

SEQ ID NO: 1299317 - DNA, 15 bp, Homo sapiens
aagtctcctgaccct

SEQ ID NO: 1299318 - DNA, 15 bp, Homo sapiens
taagtctcctgaccc

SEQ ID NO: 1299319 - DNA, 15 bp, Homo sapiens
ataagtctcctgacc

SEQ ID NO: 1299320 - DNA, 15 bp, Homo sapiens
aataagtctcctgac

SEQ ID NO: 1299321 - DNA, 15 bp, Homo sapiens
taataagtctcctga

SEQ ID NO: 1299322 - DNA, 15 bp, Homo sapiens
ttaataagtctcctg

SEQ ID NO: 1299323 - DNA, 15 bp, Homo sapiens
tttaataagtctcct

SEQ ID NO: 1299324 - DNA, 15 bp, Homo sapiens
ttttaataagtctcc

SEQ ID NO: 1299325 - DNA, 15 bp, Homo sapiens
attttaataagtctc

SEQ ID NO: 1299326 - DNA, 15 bp, Homo sapiens
aattttaataagtct

SEQ ID NO: 1299327 - DNA, 15 bp, Homo sapiens
aaattttaataagtc

SEQ ID NO: 1299328 - DNA, 15 bp, Homo sapiens
caaattttaataagt

SEQ ID NO: 1299329 - DNA, 15 bp, Homo sapiens
ccaaattttaataag

SEQ ID NO: 1299330 - DNA, 15 bp, Homo sapiens
gccaaattttaataa

SEQ ID NO: 1299331 - DNA, 15 bp, Homo sapiens
agccaaattttaata

SEQ ID NO: 1299332 - DNA, 15 bp, Homo sapiens
aagccaaattttaat

SEQ ID NO: 1299333 - DNA, 15 bp, Homo sapiens
taagccaaattttaa

SEQ ID NO: 1299334 - DNA, 15 bp, Homo sapiens
ataagccaaatttta

SEQ ID NO: 1299335 - DNA, 15 bp, Homo sapiens
aataagccaaatttt

SEQ ID NO: 1299336 - DNA, 15 bp, Homo sapiens
aaataagccaaattt

SEQ ID NO: 1299337 - DNA, 15 bp, Homo sapiens
gaaataagccaaatt

SEQ ID NO: 1299338 - DNA, 15 bp, Homo sapiens
tgaaataagccaaat

SEQ ID NO: 1299339 - DNA, 15 bp, Homo sapiens
ctgaaataagccaaa

SEQ ID NO: 1299340 - DNA, 15 bp, Homo sapiens
gctgaaataagccaa

SEQ ID NO: 1299341 - DNA, 15 bp, Homo sapiens
tgctgaaataagcca

SEQ ID NO: 1299342 - DNA, 15 bp, Homo sapiens
ttgctgaaataagcc

SEQ ID NO: 1299343 - DNA, 15 bp, Homo sapiens
gttgctgaaataagc

SEQ ID NO: 1299344 - DNA, 15 bp, Homo sapiens
agttgctgaaataag

SEQ ID NO: 1299345 - DNA, 15 bp, Homo sapiens
cagttgctgaaataa

SEQ ID NO: 1299346 - DNA, 15 bp, Homo sapiens
acagttgctgaaata

SEQ ID NO: 1299347 - DNA, 15 bp, Homo sapiens
cacagttgctgaaat

SEQ ID NO: 1299348 - DNA, 15 bp, Homo sapiens
gcacagttgctgaaa

SEQ ID NO: 1299349 - DNA, 15 bp, Homo sapiens
agcacagttgctgaa

SEQ ID NO: 1299350 - DNA, 15 bp, Homo sapiens
aagcacagttgctga

SEQ ID NO: 1299351 - DNA, 15 bp, Homo sapiens
aaagcacagttgctg

SEQ ID NO: 1299352 - DNA, 15 bp, Homo sapiens
aaaagcacagttgct

SEQ ID NO: 1299353 - DNA, 15 bp, Homo sapiens
aaaaagcacagttgc

SEQ ID NO: 1299354 - DNA, 15 bp, Homo sapiens
caaaaagcacagttg

SEQ ID NO: 1299355 - DNA, 15 bp, Homo sapiens
acaaaaagcacagtt

SEQ ID NO: 1299356 - DNA, 15 bp, Homo sapiens
tacaaaaagcacagt

SEQ ID NO: 1299357 - DNA, 15 bp, Homo sapiens
gtacaaaaagcacag

SEQ ID NO: 1299358 - DNA, 15 bp, Homo sapiens
agtacaaaaagcaca

SEQ ID NO: 1299359 - DNA, 15 bp, Homo sapiens
aagtacaaaaagcac

SEQ ID NO: 1299360 - DNA, 15 bp, Homo sapiens
caagtacaaaaagca

SEQ ID NO: 1299361 - DNA, 15 bp, Homo sapiens
acaagtacaaaaagc

SEQ ID NO: 1299362 - DNA, 15 bp, Homo sapiens
aacaagtacaaaaag

SEQ ID NO: 1299363 - DNA, 15 bp, Homo sapiens
taacaagtacaaaaa

SEQ ID NO: 1299364 - DNA, 15 bp, Homo sapiens
ttaacaagtacaaaa

SEQ ID NO: 1299365 - DNA, 15 bp, Homo sapiens
gttaacaagtacaaa

SEQ ID NO: 1299366 - DNA, 15 bp, Homo sapiens
tgttaacaagtacaa

SEQ ID NO: 1299367 - DNA, 15 bp, Homo sapiens
ttgttaacaagtaca

SEQ ID NO: 1299368 - DNA, 15 bp, Homo sapiens
attgttaacaagtac

SEQ ID NO: 1299369 - DNA, 15 bp, Homo sapiens
aattgttaacaagta

SEQ ID NO: 1299370 - DNA, 15 bp, Homo sapiens
gaattgttaacaagt

SEQ ID NO: 1299371 - DNA, 15 bp, Homo sapiens
tgaattgttaacaag

SEQ ID NO: 1299372 - DNA, 15 bp, Homo sapiens
atgaattgttaacaa

SEQ ID NO: 1299373 - DNA, 15 bp, Homo sapiens
aatgaattgttaaca

SEQ ID NO: 1299374 - DNA, 15 bp, Homo sapiens
gaatgaattgttaac

SEQ ID NO: 1299375 - DNA, 15 bp, Homo sapiens
tgaatgaattgttaa

SEQ ID NO: 1299376 - DNA, 15 bp, Homo sapiens
atgaatgaattgtta

SEQ ID NO: 1299377 - DNA, 15 bp, Homo sapiens
aatgaatgaattgtt

SEQ ID NO: 1299378 - DNA, 15 bp, Homo sapiens
caatgaatgaattgt

SEQ ID NO: 1299379 - DNA, 15 bp, Homo sapiens
gcaatgaatgaattg

SEQ ID NO: 1299380 - DNA, 15 bp, Homo sapiens
ggcaatgaatgaatt

SEQ ID NO: 1299381 - DNA, 15 bp, Homo sapiens
tggcaatgaatgaat

SEQ ID NO: 1299382 - DNA, 15 bp, Homo sapiens
atggcaatgaatgaa

SEQ ID NO: 1299383 - DNA, 15 bp, Homo sapiens
tatggcaatgaatga

SEQ ID NO: 1299384 - DNA, 15 bp, Homo sapiens
ttatggcaatgaatg

SEQ ID NO: 1299385 - DNA, 15 bp, Homo sapiens
gttatggcaatgaat

SEQ ID NO: 1299386 - DNA, 15 bp, Homo sapiens
ggttatggcaatgaa

SEQ ID NO: 1299387 - DNA, 15 bp, Homo sapiens
aggttatggcaatga

SEQ ID NO: 1299388 - DNA, 15 bp, Homo sapiens
caggttatggcaatg

SEQ ID NO: 1299389 - DNA, 15 bp, Homo sapiens
gcaggttatggcaat

SEQ ID NO: 1299390 - DNA, 15 bp, Homo sapiens
ggcaggttatggcaa

SEQ ID NO: 1299391 - DNA, 15 bp, Homo sapiens
aggcaggttatggca

SEQ ID NO: 1299392 - DNA, 15 bp, Homo sapiens
caggcaggttatggc

SEQ ID NO: 1299393 - DNA, 15 bp, Homo sapiens
acaggcaggttatgg

SEQ ID NO: 1299394 - DNA, 15 bp, Homo sapiens
cacaggcaggttatg

SEQ ID NO: 1299395 - DNA, 15 bp, Homo sapiens
tcacaggcaggttat

SEQ ID NO: 1299396 - DNA, 15 bp, Homo sapiens
atcacaggcaggtta

SEQ ID NO: 1299397 - DNA, 15 bp, Homo sapiens
aatcacaggcaggtt

SEQ ID NO: 1299398 - DNA, 15 bp, Homo sapiens
aaatcacaggcaggt

SEQ ID NO: 1299399 - DNA, 15 bp, Homo sapiens
aaaatcacaggcagg

SEQ ID NO: 1299400 - DNA, 15 bp, Homo sapiens
caaaatcacaggcag

SEQ ID NO: 1299401 - DNA, 15 bp, Homo sapiens
acaaaatcacaggca

SEQ ID NO: 1299402 - DNA, 15 bp, Homo sapiens
gacaaaatcacaggc

SEQ ID NO: 1299403 - DNA, 15 bp, Homo sapiens
tgacaaaatcacagg

SEQ ID NO: 1299404 - DNA, 15 bp, Homo sapiens
atgacaaaatcacag

SEQ ID NO: 1299405 - DNA, 15 bp, Homo sapiens
tatgacaaaatcaca

SEQ ID NO: 1299406 - DNA, 15 bp, Homo sapiens
ttatgacaaaatcac

SEQ ID NO: 1299407 - DNA, 15 bp, Homo sapiens
attatgacaaaatca

SEQ ID NO: 1299408 - DNA, 15 bp, Homo sapiens
gattatgacaaaatc

SEQ ID NO: 1299409 - DNA, 15 bp, Homo sapiens
agattatgacaaaat

SEQ ID NO: 1299410 - DNA, 15 bp, Homo sapiens
cagattatgacaaaa

SEQ ID NO: 1299411 - DNA, 15 bp, Homo sapiens
acagattatgacaaa

SEQ ID NO: 1299412 - DNA, 15 bp, Homo sapiens
aacagattatgacaa

SEQ ID NO: 1299413 - DNA, 15 bp, Homo sapiens
caacagattatgaca

SEQ ID NO: 1299414 - DNA, 15 bp, Homo sapiens
acaacagattatgac

SEQ ID NO: 1299415 - DNA, 15 bp, Homo sapiens
gacaacagattatga

SEQ ID NO: 1299416 - DNA, 15 bp, Homo sapiens
tgacaacagattatg

SEQ ID NO: 1299417 - DNA, 15 bp, Homo sapiens
atgacaacagattat

SEQ ID NO: 1299418 - DNA, 15 bp, Homo sapiens
gatgacaacagatta

SEQ ID NO: 1299419 - DNA, 15 bp, Homo sapiens
agatgacaacagatt

SEQ ID NO: 1299420 - DNA, 15 bp, Homo sapiens
gagatgacaacagat

SEQ ID NO: 1299421 - DNA, 15 bp, Homo sapiens
agagatgacaacaga

SEQ ID NO: 1299422 - DNA, 15 bp, Homo sapiens
aagagatgacaacag

SEQ ID NO: 1299423 - DNA, 15 bp, Homo sapiens
caagagatgacaaca

SEQ ID NO: 1299424 - DNA, 15 bp, Homo sapiens
gcaagagatgacaac

SEQ ID NO: 1299425 - DNA, 15 bp, Homo sapiens
agcaagagatgacaa

SEQ ID NO: 1299426 - DNA, 15 bp, Homo sapiens
tagcaagagatgaca

SEQ ID NO: 1299427 - DNA, 15 bp, Homo sapiens
atagcaagagatgac

SEQ ID NO: 1299428 - DNA, 15 bp, Homo sapiens
catagcaagagatga

SEQ ID NO: 1299429 - DNA, 15 bp, Homo sapiens
acatagcaagagatg

SEQ ID NO: 1299430 - DNA, 15 bp, Homo sapiens
aacatagcaagagat

SEQ ID NO: 1299431 - DNA, 15 bp, Homo sapiens
gaacatagcaagaga

SEQ ID NO: 1299432 - DNA, 15 bp, Homo sapiens
ggaacatagcaagag

SEQ ID NO: 1299433 - DNA, 15 bp, Homo sapiens
gggaacatagcaaga

SEQ ID NO: 1299434 - DNA, 15 bp, Homo sapiens
ggggaacatagcaag

SEQ ID NO: 1299435 - DNA, 15 bp, Homo sapiens
gggggaacatagcaa

SEQ ID NO: 1299436 - DNA, 15 bp, Homo sapiens
tgggggaacatagca

SEQ ID NO: 1299437 - DNA, 15 bp, Homo sapiens
ctgggggaacatagc

SEQ ID NO: 1299438 - DNA, 15 bp, Homo sapiens
cctgggggaacatag

SEQ ID NO: 1299439 - DNA, 15 bp, Homo sapiens
tcctgggggaacata

SEQ ID NO: 1299440 - DNA, 15 bp, Homo sapiens
ttcctgggggaacat

SEQ ID NO: 1299441 - DNA, 15 bp, Homo sapiens
attcctgggggaaca

SEQ ID NO: 1299442 - DNA, 15 bp, Homo sapiens
aattcctgggggaac

SEQ ID NO: 1299443 - DNA, 15 bp, Homo sapiens
taattcctgggggaa

SEQ ID NO: 1299444 - DNA, 15 bp, Homo sapiens
ctaattcctggggga

SEQ ID NO: 1299445 - DNA, 15 bp, Homo sapiens
gctaattcctggggg

SEQ ID NO: 1299446 - DNA, 15 bp, Homo sapiens
tgctaattcctgggg

SEQ ID NO: 1299447 - DNA, 15 bp, Homo sapiens
ttgctaattcctggg

SEQ ID NO: 1299448 - DNA, 15 bp, Homo sapiens
tttgctaattcctgg

SEQ ID NO: 1299449 - DNA, 15 bp, Homo sapiens
ctttgctaattcctg

SEQ ID NO: 1299450 - DNA, 15 bp, Homo sapiens
actttgctaattcct

SEQ ID NO: 1299451 - DNA, 15 bp, Homo sapiens
tactttgctaattcc

SEQ ID NO: 1299452 - DNA, 15 bp, Homo sapiens
ttactttgctaattc

SEQ ID NO: 1299453 - DNA, 15 bp, Homo sapiens
attactttgctaatt

SEQ ID NO: 1299454 - DNA, 15 bp, Homo sapiens
aattactttgctaat

SEQ ID NO: 1299455 - DNA, 15 bp, Homo sapiens
aaattactttgctaa

SEQ ID NO: 1299456 - DNA, 15 bp, Homo sapiens
gaaattactttgcta

SEQ ID NO: 1299457 - DNA, 15 bp, Homo sapiens
agaaattactttgct

SEQ ID NO: 1299458 - DNA, 15 bp, Homo sapiens
cagaaattactttgc

SEQ ID NO: 1299459 - DNA, 15 bp, Homo sapiens
acagaaattactttg

SEQ ID NO: 1299460 - DNA, 15 bp, Homo sapiens
gacagaaattacttt

SEQ ID NO: 1299461 - DNA, 15 bp, Homo sapiens
tgacagaaattactt

SEQ ID NO: 1299462 - DNA, 15 bp, Homo sapiens
atgacagaaattact

SEQ ID NO: 1299463 - DNA, 15 bp, Homo sapiens
gatgacagaaattac

SEQ ID NO: 1299464 - DNA, 15 bp, Homo sapiens
tgatgacagaaatta

SEQ ID NO: 1299465 - DNA, 15 bp, Homo sapiens
atgatgacagaaatt

SEQ ID NO: 1299466 - DNA, 15 bp, Homo sapiens
catgatgacagaaat

SEQ ID NO: 1299467 - DNA, 15 bp, Homo sapiens
acatgatgacagaaa

SEQ ID NO: 1299468 - DNA, 15 bp, Homo sapiens
aacatgatgacagaa

SEQ ID NO: 1299469 - DNA, 15 bp, Homo sapiens
gaacatgatgacaga

SEQ ID NO: 1299470 - DNA, 15 bp, Homo sapiens
cgaacatgatgacag

SEQ ID NO: 1299471 - DNA, 15 bp, Homo sapiens
acgaacatgatgaca

SEQ ID NO: 1299472 - DNA, 15 bp, Homo sapiens
tacgaacatgatgac

SEQ ID NO: 1299473 - DNA, 15 bp, Homo sapiens
ttacgaacatgatga

SEQ ID NO: 1299474 - DNA, 15 bp, Homo sapiens
attacgaacatgatg

SEQ ID NO: 1299475 - DNA, 15 bp, Homo sapiens
aattacgaacatgat

SEQ ID NO: 1299476 - DNA, 15 bp, Homo sapiens
caattacgaacatga

SEQ ID NO: 1299477 - DNA, 15 bp, Homo sapiens
acaattacgaacatg

SEQ ID NO: 1299478 - DNA, 15 bp, Homo sapiens
aacaattacgaacat

SEQ ID NO: 1299479 - DNA, 15 bp, Homo sapiens
aaacaattacgaaca

SEQ ID NO: 1299480 - DNA, 15 bp, Homo sapiens
aaaacaattacgaac

SEQ ID NO: 1299481 - DNA, 15 bp, Homo sapiens
caaaacaattacgaa

SEQ ID NO: 1299482 - DNA, 15 bp, Homo sapiens
ccaaaacaattacga

SEQ ID NO: 1299483 - DNA, 15 bp, Homo sapiens
gccaaaacaattacg

SEQ ID NO: 1299484 - DNA, 15 bp, Homo sapiens
agccaaaacaattac

SEQ ID NO: 1299485 - DNA, 15 bp, Homo sapiens
gagccaaaacaatta

SEQ ID NO: 1299486 - DNA, 15 bp, Homo sapiens
tgagccaaaacaatt

SEQ ID NO: 1299487 - DNA, 15 bp, Homo sapiens
ctgagccaaaacaat

SEQ ID NO: 1299488 - DNA, 15 bp, Homo sapiens
tctgagccaaaacaa

SEQ ID NO: 1299489 - DNA, 15 bp, Homo sapiens
ttctgagccaaaaca

SEQ ID NO: 1299490 - DNA, 15 bp, Homo sapiens
attctgagccaaaac

SEQ ID NO: 1299491 - DNA, 15 bp, Homo sapiens
aattctgagccaaaa

SEQ ID NO: 1299492 - DNA, 15 bp, Homo sapiens
caattctgagccaaa

SEQ ID NO: 1299493 - DNA, 15 bp, Homo sapiens
tcaattctgagccaa

SEQ ID NO: 1299494 - DNA, 15 bp, Homo sapiens
atcaattctgagcca

SEQ ID NO: 1299495 - DNA, 15 bp, Homo sapiens
aatcaattctgagcc

SEQ ID NO: 1299496 - DNA, 15 bp, Homo sapiens
aaatcaattctgagc

SEQ ID NO: 1299497 - DNA, 15 bp, Homo sapiens
aaaatcaattctgag

SEQ ID NO: 1299498 - DNA, 15 bp, Homo sapiens
caaaatcaattctga

SEQ ID NO: 1299499 - DNA, 15 bp, Homo sapiens
acaaaatcaattctg

SEQ ID NO: 1299500 - DNA, 15 bp, Homo sapiens
aacaaaatcaattct

SEQ ID NO: 1299501 - DNA, 15 bp, Homo sapiens
aaacaaaatcaattc

SEQ ID NO: 1299502 - DNA, 15 bp, Homo sapiens
caaacaaaatcaatt

SEQ ID NO: 1299503 - DNA, 15 bp, Homo sapiens
acaaacaaaatcaat

SEQ ID NO: 1299504 - DNA, 15 bp, Homo sapiens
gacaaacaaaatcaa

SEQ ID NO: 1299505 - DNA, 15 bp, Homo sapiens
ggacaaacaaaatca

SEQ ID NO: 1299506 - DNA, 15 bp, Homo sapiens
tggacaaacaaaatc

SEQ ID NO: 1299507 - DNA, 15 bp, Homo sapiens
ttggacaaacaaaat

SEQ ID NO: 1299508 - DNA, 15 bp, Homo sapiens
attggacaaacaaaa

SEQ ID NO: 1299509 - DNA, 15 bp, Homo sapiens
tattggacaaacaaa

SEQ ID NO: 1299510 - DNA, 15 bp, Homo sapiens
atattggacaaacaa

SEQ ID NO: 1299511 - DNA, 15 bp, Homo sapiens
catattggacaaaca

SEQ ID NO: 1299512 - DNA, 15 bp, Homo sapiens
gcatattggacaaac

SEQ ID NO: 1299513 - DNA, 15 bp, Homo sapiens
tgcatattggacaaa

SEQ ID NO: 1299514 - DNA, 15 bp, Homo sapiens
atgcatattggacaa

SEQ ID NO: 1299515 - DNA, 15 bp, Homo sapiens
tatgcatattggaca

SEQ ID NO: 1299516 - DNA, 15 bp, Homo sapiens
ttatgcatattggac

SEQ ID NO: 1299517 - DNA, 15 bp, Homo sapiens
tttatgcatattgga

SEQ ID NO: 1299518 - DNA, 15 bp, Homo sapiens
ctttatgcatattgg

SEQ ID NO: 1299519 - DNA, 15 bp, Homo sapiens
actttatgcatattg

SEQ ID NO: 1299520 - DNA, 15 bp, Homo sapiens
gactttatgcatatt

SEQ ID NO: 1299521 - DNA, 15 bp, Homo sapiens
cgactttatgcatat

SEQ ID NO: 1299522 - DNA, 15 bp, Homo sapiens
gcgactttatgcata

SEQ ID NO: 1299523 - DNA, 15 bp, Homo sapiens
agcgactttatgcat

SEQ ID NO: 1299524 - DNA, 15 bp, Homo sapiens
aagcgactttatgca

SEQ ID NO: 1299525 - DNA, 15 bp, Homo sapiens
aaagcgactttatgc

SEQ ID NO: 1299526 - DNA, 15 bp, Homo sapiens
aaaagcgactttatg

SEQ ID NO: 1299527 - DNA, 15 bp, Homo sapiens
caaaagcgactttat

SEQ ID NO: 1299528 - DNA, 15 bp, Homo sapiens
acaaaagcgacttta

SEQ ID NO: 1299529 - DNA, 15 bp, Homo sapiens
aacaaaagcgacttt

SEQ ID NO: 1299530 - DNA, 15 bp, Homo sapiens
aaacaaaagcgactt

SEQ ID NO: 1299531 - DNA, 15 bp, Homo sapiens
taaacaaaagcgact

SEQ ID NO: 1299532 - DNA, 15 bp, Homo sapiens
ataaacaaaagcgac

SEQ ID NO: 1299533 - DNA, 15 bp, Homo sapiens
cataaacaaaagcga

SEQ ID NO: 1299534 - DNA, 15 bp, Homo sapiens
tcataaacaaaagcg

SEQ ID NO: 1299535 - DNA, 15 bp, Homo sapiens
ctcataaacaaaagc

SEQ ID NO: 1299536 - DNA, 15 bp, Homo sapiens
actcataaacaaaag

SEQ ID NO: 1299537 - DNA, 15 bp, Homo sapiens
aactcataaacaaaa

SEQ ID NO: 1299538 - DNA, 15 bp, Homo sapiens
taactcataaacaaa

SEQ ID NO: 1299539 - DNA, 15 bp, Homo sapiens
ataactcataaacaa

SEQ ID NO: 1299540 - DNA, 15 bp, Homo sapiens
gataactcataaaca

SEQ ID NO: 1299541 - DNA, 15 bp, Homo sapiens
agataactcataaac

SEQ ID NO: 1299542 - DNA, 15 bp, Homo sapiens
tagataactcataaa

SEQ ID NO: 1299543 - DNA, 15 bp, Homo sapiens
atagataactcataa

SEQ ID NO: 1299544 - DNA, 15 bp, Homo sapiens
tatagataactcata

SEQ ID NO: 1299545 - DNA, 15 bp, Homo sapiens
ctatagataactcat

SEQ ID NO: 1299546 - DNA, 15 bp, Homo sapiens
gctatagataactca

SEQ ID NO: 1299547 - DNA, 15 bp, Homo sapiens
tgctatagataactc

SEQ ID NO: 1299548 - DNA, 15 bp, Homo sapiens
gtgctatagataact

SEQ ID NO: 1299549 - DNA, 15 bp, Homo sapiens
tgtgctatagataac

SEQ ID NO: 1299550 - DNA, 15 bp, Homo sapiens
ttgtgctatagataa

SEQ ID NO: 1299551 - DNA, 15 bp, Homo sapiens
cttgtgctatagata

SEQ ID NO: 1299552 - DNA, 15 bp, Homo sapiens
tcttgtgctatagat

SEQ ID NO: 1299553 - DNA, 15 bp, Homo sapiens
ttcttgtgctataga

SEQ ID NO: 1299554 - DNA, 15 bp, Homo sapiens
attcttgtgctatag

SEQ ID NO: 1299555 - DNA, 15 bp, Homo sapiens
tattcttgtgctata

SEQ ID NO: 1299556 - DNA, 15 bp, Homo sapiens
atattcttgtgctat

SEQ ID NO: 1299557 - DNA, 15 bp, Homo sapiens
tatattcttgtgcta

SEQ ID NO: 1299558 - DNA, 15 bp, Homo sapiens
atatattcttgtgct

SEQ ID NO: 1299559 - DNA, 15 bp, Homo sapiens
catatattcttgtgc

SEQ ID NO: 1299560 - DNA, 15 bp, Homo sapiens
gcatatattcttgtg

SEQ ID NO: 1299561 - DNA, 15 bp, Homo sapiens
ggcatatattcttgt

SEQ ID NO: 1299562 - DNA, 15 bp, Homo sapiens
tggcatatattcttg

SEQ ID NO: 1299563 - DNA, 15 bp, Homo sapiens
ttggcatatattctt

SEQ ID NO: 1299564 - DNA, 15 bp, Homo sapiens
tttggcatatattct

SEQ ID NO: 1299565 - DNA, 15 bp, Homo sapiens
ttttggcatatattc

SEQ ID NO: 1299566 - DNA, 15 bp, Homo sapiens
gttttggcatatatt

SEQ ID NO: 1299567 - DNA, 15 bp, Homo sapiens
tgttttggcatatat

SEQ ID NO: 1299568 - DNA, 15 bp, Homo sapiens
atgttttggcatata

SEQ ID NO: 1299569 - DNA, 15 bp, Homo sapiens
tatgttttggcatat

SEQ ID NO: 1299570 - DNA, 15 bp, Homo sapiens
atatgttttggcata

SEQ ID NO: 1299571 - DNA, 15 bp, Homo sapiens
catatgttttggcat

SEQ ID NO: 1299572 - DNA, 15 bp, Homo sapiens
acatatgttttggca

SEQ ID NO: 1299573 - DNA, 15 bp, Homo sapiens
tacatatgttttggc

SEQ ID NO: 1299574 - DNA, 15 bp, Homo sapiens
gtacatatgttttgg

SEQ ID NO: 1299575 - DNA, 15 bp, Homo sapiens
ggtacatatgttttg

SEQ ID NO: 1299576 - DNA, 15 bp, Homo sapiens
gggtacatatgtttt

SEQ ID NO: 1299577 - DNA, 15 bp, Homo sapiens
ggggtacatatgttt

SEQ ID NO: 1299578 - DNA, 15 bp, Homo sapiens
tggggtacatatgtt

SEQ ID NO: 1299579 - DNA, 15 bp, Homo sapiens
ttggggtacatatgt

SEQ ID NO: 1299580 - DNA, 15 bp, Homo sapiens
attggggtacatatg

SEQ ID NO: 1299581 - DNA, 15 bp, Homo sapiens
aattggggtacatat

SEQ ID NO: 1299582 - DNA, 15 bp, Homo sapiens
taattggggtacata

SEQ ID NO: 1299583 - DNA, 15 bp, Homo sapiens
gtaattggggtacat

SEQ ID NO: 1299584 - DNA, 15 bp, Homo sapiens
ggtaattggggtaca

SEQ ID NO: 1299585 - DNA, 15 bp, Homo sapiens
aggtaattggggtac

SEQ ID NO: 1299586 - DNA, 15 bp, Homo sapiens
taggtaattggggta

SEQ ID NO: 1299587 - DNA, 15 bp, Homo sapiens
ttaggtaattggggt

SEQ ID NO: 1299588 - DNA, 15 bp, Homo sapiens
tttaggtaattgggg

SEQ ID NO: 1299589 - DNA, 15 bp, Homo sapiens
gtttaggtaattggg

SEQ ID NO: 1299590 - DNA, 15 bp, Homo sapiens
ggtttaggtaattgg

SEQ ID NO: 1299591 - DNA, 15 bp, Homo sapiens
aggtttaggtaattg

SEQ ID NO: 1299592 - DNA, 15 bp, Homo sapiens
aaggtttaggtaatt

SEQ ID NO: 1299593 - DNA, 15 bp, Homo sapiens
aaaggtttaggtaat

SEQ ID NO: 1299594 - DNA, 15 bp, Homo sapiens
aaaaggtttaggtaa

SEQ ID NO: 1299595 - DNA, 15 bp, Homo sapiens
taaaaggtttaggta

SEQ ID NO: 1299596 - DNA, 15 bp, Homo sapiens
ctaaaaggtttaggt

SEQ ID NO: 1299597 - DNA, 15 bp, Homo sapiens
gctaaaaggtttagg

SEQ ID NO: 1299598 - DNA, 15 bp, Homo sapiens
tgctaaaaggtttag

SEQ ID NO: 1299599 - DNA, 15 bp, Homo sapiens
ttgctaaaaggttta

SEQ ID NO: 1299600 - DNA, 15 bp, Homo sapiens
cttgctaaaaggttt

SEQ ID NO: 1299601 - DNA, 15 bp, Homo sapiens
ccttgctaaaaggtt

SEQ ID NO: 1299602 - DNA, 15 bp, Homo sapiens
cccttgctaaaaggt

SEQ ID NO: 1299603 - DNA, 15 bp, Homo sapiens
gcccttgctaaaagg

SEQ ID NO: 1299604 - DNA, 15 bp, Homo sapiens
agcccttgctaaaag

SEQ ID NO: 1299605 - DNA, 15 bp, Homo sapiens
tagcccttgctaaaa

SEQ ID NO: 1299606 - DNA, 15 bp, Homo sapiens
ttagcccttgctaaa

SEQ ID NO: 1299607 - DNA, 15 bp, Homo sapiens
attagcccttgctaa

SEQ ID NO: 1299608 - DNA, 15 bp, Homo sapiens
cattagcccttgcta

SEQ ID NO: 1299609 - DNA, 15 bp, Homo sapiens
tcattagcccttgct

SEQ ID NO: 1299610 - DNA, 15 bp, Homo sapiens
ttcattagcccttgc

SEQ ID NO: 1299611 - DNA, 15 bp, Homo sapiens
tttcattagcccttg

SEQ ID NO: 1299612 - DNA, 15 bp, Homo sapiens
ctttcattagccctt

SEQ ID NO: 1299613 - DNA, 15 bp, Homo sapiens
tctttcattagccct

SEQ ID NO: 1299614 - DNA, 15 bp, Homo sapiens
ttctttcattagccc

SEQ ID NO: 1299615 - DNA, 15 bp, Homo sapiens
attctttcattagcc

SEQ ID NO: 1299616 - DNA, 15 bp, Homo sapiens
aattctttcattagc

SEQ ID NO: 1299617 - DNA, 15 bp, Homo sapiens
aaattctttcattag

SEQ ID NO: 1299618 - DNA, 15 bp, Homo sapiens
taaattctttcatta

SEQ ID NO: 1299619 - DNA, 15 bp, Homo sapiens
ttaaattctttcatt

SEQ ID NO: 1299620 - DNA, 15 bp, Homo sapiens
tttaaattctttcat

SEQ ID NO: 1299621 - DNA, 15 bp, Homo sapiens
ttttaaattctttca

SEQ ID NO: 1299622 - DNA, 15 bp, Homo sapiens
cttttaaattctttc

SEQ ID NO: 1299623 - DNA, 15 bp, Homo sapiens
tcttttaaattcttt

SEQ ID NO: 1299624 - DNA, 15 bp, Homo sapiens
ttcttttaaattctt

SEQ ID NO: 1299625 - DNA, 15 bp, Homo sapiens
attcttttaaattct

SEQ ID NO: 1299626 - DNA, 15 bp, Homo sapiens
cattcttttaaattc

SEQ ID NO: 1299627 - DNA, 15 bp, Homo sapiens
tcattcttttaaatt

SEQ ID NO: 1299628 - DNA, 15 bp, Homo sapiens
atcattcttttaaat

SEQ ID NO: 1299629 - DNA, 15 bp, Homo sapiens
tatcattcttttaaa

SEQ ID NO: 1299630 - DNA, 15 bp, Homo sapiens
ttatcattcttttaa

SEQ ID NO: 1299631 - DNA, 15 bp, Homo sapiens
cttatcattctttta

SEQ ID NO: 1299632 - DNA, 15 bp, Homo sapiens
gcttatcattctttt

SEQ ID NO: 1299633 - DNA, 15 bp, Homo sapiens
ggcttatcattcttt

SEQ ID NO: 1299634 - DNA, 15 bp, Homo sapiens
gggcttatcattctt

SEQ ID NO: 1299635 - DNA, 15 bp, Homo sapiens
agggcttatcattct

SEQ ID NO: 1299636 - DNA, 15 bp, Homo sapiens
aagggcttatcattc

SEQ ID NO: 1299637 - DNA, 15 bp, Homo sapiens
aaagggcttatcatt

SEQ ID NO: 1299638 - DNA, 15 bp, Homo sapiens
gaaagggcttatcat

SEQ ID NO: 1299639 - DNA, 15 bp, Homo sapiens
agaaagggcttatca

SEQ ID NO: 1299640 - DNA, 15 bp, Homo sapiens
aagaaagggcttatc

SEQ ID NO: 1299641 - DNA, 15 bp, Homo sapiens
gaagaaagggcttat

SEQ ID NO: 1299642 - DNA, 15 bp, Homo sapiens
agaagaaagggctta

SEQ ID NO: 1299643 - DNA, 15 bp, Homo sapiens
gagaagaaagggctt

SEQ ID NO: 1299644 - DNA, 15 bp, Homo sapiens
tgagaagaaagggct

SEQ ID NO: 1299645 - DNA, 15 bp, Homo sapiens
atgagaagaaagggc

SEQ ID NO: 1299646 - DNA, 15 bp, Homo sapiens
tatgagaagaaaggg

SEQ ID NO: 1299647 - DNA, 15 bp, Homo sapiens
atatgagaagaaagg

SEQ ID NO: 1299648 - DNA, 15 bp, Homo sapiens
gatatgagaagaaag

SEQ ID NO: 1299649 - DNA, 15 bp, Homo sapiens
tgatatgagaagaaa

SEQ ID NO: 1299650 - DNA, 15 bp, Homo sapiens
atgatatgagaagaa

SEQ ID NO: 1299651 - DNA, 15 bp, Homo sapiens
aatgatatgagaaga

SEQ ID NO: 1299652 - DNA, 15 bp, Homo sapiens
aaatgatatgagaag

SEQ ID NO: 1299653 - DNA, 15 bp, Homo sapiens
aaaatgatatgagaa

SEQ ID NO: 1299654 - DNA, 15 bp, Homo sapiens
caaaatgatatgaga

SEQ ID NO: 1299655 - DNA, 15 bp, Homo sapiens
tcaaaatgatatgag

SEQ ID NO: 1299656 - DNA, 15 bp, Homo sapiens
ttcaaaatgatatga

SEQ ID NO: 1299657 - DNA, 15 bp, Homo sapiens
attcaaaatgatatg

SEQ ID NO: 1299658 - DNA, 15 bp, Homo sapiens
tattcaaaatgatat

SEQ ID NO: 1299659 - DNA, 15 bp, Homo sapiens
gtattcaaaatgata

SEQ ID NO: 1299660 - DNA, 15 bp, Homo sapiens
agtattcaaaatgat

SEQ ID NO: 1299661 - DNA, 15 bp, Homo sapiens
aagtattcaaaatga

SEQ ID NO: 1299662 - DNA, 15 bp, Homo sapiens
gaagtattcaaaatg

SEQ ID NO: 1299663 - DNA, 15 bp, Homo sapiens
ggaagtattcaaaat

SEQ ID NO: 1299664 - DNA, 15 bp, Homo sapiens
aggaagtattcaaaa

SEQ ID NO: 1299665 - DNA, 15 bp, Homo sapiens
gaggaagtattcaaa

SEQ ID NO: 1299666 - DNA, 15 bp, Homo sapiens
ggaggaagtattcaa

SEQ ID NO: 1299667 - DNA, 15 bp, Homo sapiens
tggaggaagtattca

SEQ ID NO: 1299668 - DNA, 15 bp, Homo sapiens
ttggaggaagtattc

SEQ ID NO: 1299669 - DNA, 15 bp, Homo sapiens
attggaggaagtatt

SEQ ID NO: 1299670 - DNA, 15 bp, Homo sapiens
tattggaggaagtat

SEQ ID NO: 1299671 - DNA, 15 bp, Homo sapiens
atattggaggaagta

SEQ ID NO: 1299672 - DNA, 15 bp, Homo sapiens
aatattggaggaagt

SEQ ID NO: 1299673 - DNA, 15 bp, Homo sapiens
aaatattggaggaag

SEQ ID NO: 1299674 - DNA, 15 bp, Homo sapiens
caaatattggaggaa

SEQ ID NO: 1299675 - DNA, 15 bp, Homo sapiens
ccaaatattggagga

SEQ ID NO: 1299676 - DNA, 15 bp, Homo sapiens
tccaaatattggagg

SEQ ID NO: 1299677 - DNA, 15 bp, Homo sapiens
ctccaaatattggag

SEQ ID NO: 1299678 - DNA, 15 bp, Homo sapiens
actccaaatattgga

SEQ ID NO: 1299679 - DNA, 15 bp, Homo sapiens
tactccaaatattgg

SEQ ID NO: 1299680 - DNA, 15 bp, Homo sapiens
atactccaaatattg

SEQ ID NO: 1299681 - DNA, 15 bp, Homo sapiens
catactccaaatatt

SEQ ID NO: 1299682 - DNA, 15 bp, Homo sapiens
acatactccaaatat

SEQ ID NO: 1299683 - DNA, 15 bp, Homo sapiens
tacatactccaaata

SEQ ID NO: 1299684 - DNA, 15 bp, Homo sapiens
ctacatactccaaat

SEQ ID NO: 1299685 - DNA, 15 bp, Homo sapiens
cctacatactccaaa

SEQ ID NO: 1299686 - DNA, 15 bp, Homo sapiens
tcctacatactccaa

SEQ ID NO: 1299687 - DNA, 15 bp, Homo sapiens
ctcctacatactcca

SEQ ID NO: 1299688 - DNA, 15 bp, Homo sapiens
actcctacatactcc

SEQ ID NO: 1299689 - DNA, 15 bp, Homo sapiens
aactcctacatactc

SEQ ID NO: 1299690 - DNA, 15 bp, Homo sapiens
gaactcctacatact

SEQ ID NO: 1299691 - DNA, 15 bp, Homo sapiens
agaactcctacatac

SEQ ID NO: 1299692 - DNA, 15 bp, Homo sapiens
aagaactcctacata

SEQ ID NO: 1299693 - DNA, 15 bp, Homo sapiens
aaagaactcctacat

SEQ ID NO: 1299694 - DNA, 15 bp, Homo sapiens
aaaagaactcctaca

SEQ ID NO: 1299695 - DNA, 15 bp, Homo sapiens
aaaaagaactcctac

SEQ ID NO: 1299696 - DNA, 15 bp, Homo sapiens
aaaaaagaactccta

SEQ ID NO: 1299697 - DNA, 15 bp, Homo sapiens
taaaaaagaactcct

SEQ ID NO: 1299698 - DNA, 15 bp, Homo sapiens
ataaaaaagaactcc

SEQ ID NO: 1299699 - DNA, 15 bp, Homo sapiens
aataaaaaagaactc

SEQ ID NO: 1299700 - DNA, 15 bp, Homo sapiens
aaataaaaaagaact

SEQ ID NO: 1299701 - DNA, 15 bp, Homo sapiens
taaataaaaaagaac

SEQ ID NO: 1299702 - DNA, 15 bp, Homo sapiens
ttaaataaaaaagaa

SEQ ID NO: 1299703 - DNA, 15 bp, Homo sapiens
tttaaataaaaaaga

SEQ ID NO: 1299704 - DNA, 15 bp, Homo sapiens
ttttaaataaaaaag

SEQ ID NO: 1299705 - DNA, 15 bp, Homo sapiens
tttttaaataaaaaa

SEQ ID NO: 1299706 - DNA, 15 bp, Homo sapiens
ttttttaaataaaaa

SEQ ID NO: 1299707 - DNA, 15 bp, Homo sapiens
attttttaaataaaa

SEQ ID NO: 1299708 - DNA, 15 bp, Homo sapiens
gaattttttaaataa

SEQ ID NO: 1299709 - DNA, 15 bp, Homo sapiens
agaattttttaaata

SEQ ID NO: 1299710 - DNA, 15 bp, Homo sapiens
cagaattttttaaat

SEQ ID NO: 1299711 - DNA, 15 bp, Homo sapiens
gcagaattttttaaa

SEQ ID NO: 1299712 - DNA, 15 bp, Homo sapiens
ggcagaattttttaa

SEQ ID NO: 1299713 - DNA, 15 bp, Homo sapiens
aggcagaatttttta

SEQ ID NO: 1299714 - DNA, 15 bp, Homo sapiens
gaggcagaatttttt

SEQ ID NO: 1299715 - DNA, 15 bp, Homo sapiens
tgaggcagaattttt

SEQ ID NO: 1299716 - DNA, 15 bp, Homo sapiens
ttgaggcagaatttt

SEQ ID NO: 1299717 - DNA, 15 bp, Homo sapiens
tttgaggcagaattt

SEQ ID NO: 1299718 - DNA, 15 bp, Homo sapiens
ctttgaggcagaatt

SEQ ID NO: 1299719 - DNA, 15 bp, Homo sapiens
tctttgaggcagaat

SEQ ID NO: 1299720 - DNA, 15 bp, Homo sapiens
gtctttgaggcagaa

SEQ ID NO: 1299721 - DNA, 15 bp, Homo sapiens
agtctttgaggcaga

SEQ ID NO: 1299722 - DNA, 15 bp, Homo sapiens
aagtctttgaggcag

SEQ ID NO: 1299723 - DNA, 15 bp, Homo sapiens
aaagtctttgaggca

SEQ ID NO: 1299724 - DNA, 15 bp, Homo sapiens
aaaagtctttgaggc

SEQ ID NO: 1299725 - DNA, 15 bp, Homo sapiens
aaaaagtctttgagg

SEQ ID NO: 1299726 - DNA, 15 bp, Homo sapiens
aaaaaagtctttgag

SEQ ID NO: 1299727 - DNA, 15 bp, Homo sapiens
aaaaaaagtctttga

SEQ ID NO: 1299728 - DNA, 15 bp, Homo sapiens
aaaaaaaagtctttg

SEQ ID NO: 1299729 - DNA, 15 bp, Homo sapiens
taaaaaaaagtcttt

SEQ ID NO: 1299730 - DNA, 15 bp, Homo sapiens
ttaaaaaaaagtctt

SEQ ID NO: 1299731 - DNA, 15 bp, Homo sapiens
tttaaaaaaaagtct

SEQ ID NO: 1299732 - DNA, 15 bp, Homo sapiens
gtttaaaaaaaagtc

SEQ ID NO: 1299733 - DNA, 15 bp, Homo sapiens
agtttaaaaaaaagt

SEQ ID NO: 1299734 - DNA, 15 bp, Homo sapiens
aagtttaaaaaaaag

SEQ ID NO: 1299735 - DNA, 15 bp, Homo sapiens
caagtttaaaaaaaa

SEQ ID NO: 1299736 - DNA, 15 bp, Homo sapiens
ccaagtttaaaaaaa

SEQ ID NO: 1299737 - DNA, 15 bp, Homo sapiens
tccaagtttaaaaaa

SEQ ID NO: 1299738 - DNA, 15 bp, Homo sapiens
ttccaagtttaaaaa

SEQ ID NO: 1299739 - DNA, 15 bp, Homo sapiens
tttccaagtttaaaa

SEQ ID NO: 1299740 - DNA, 15 bp, Homo sapiens
gtttccaagtttaaa

SEQ ID NO: 1299741 - DNA, 15 bp, Homo sapiens
agtttccaagtttaa

SEQ ID NO: 1299742 - DNA, 15 bp, Homo sapiens
tagtttccaagttta

SEQ ID NO: 1299743 - DNA, 15 bp, Homo sapiens
atagtttccaagttt

SEQ ID NO: 1299744 - DNA, 15 bp, Homo sapiens
tatagtttccaagtt

SEQ ID NO: 1299745 - DNA, 15 bp, Homo sapiens
atatagtttccaagt

SEQ ID NO: 1299746 - DNA, 15 bp, Homo sapiens
catatagtttccaag

SEQ ID NO: 1299747 - DNA, 15 bp, Homo sapiens
tcatatagtttccaa

SEQ ID NO: 1299748 - DNA, 15 bp, Homo sapiens
atcatatagtttcca

SEQ ID NO: 1299749 - DNA, 15 bp, Homo sapiens
gatcatatagtttcc

SEQ ID NO: 1299750 - DNA, 15 bp, Homo sapiens
agatcatatagtttc

SEQ ID NO: 1299751 - DNA, 15 bp, Homo sapiens
aagatcatatagttt

SEQ ID NO: 1299752 - DNA, 15 bp, Homo sapiens
aaagatcatatagtt

SEQ ID NO: 1299753 - DNA, 15 bp, Homo sapiens
aaaagatcatatagt

SEQ ID NO: 1299754 - DNA, 15 bp, Homo sapiens
aaaaagatcatatag

SEQ ID NO: 1299755 - DNA, 15 bp, Homo sapiens
aaaaaagatcatata

SEQ ID NO: 1299756 - DNA, 15 bp, Homo sapiens
aaaaaaagatcatat

SEQ ID NO: 1299757 - DNA, 15 bp, Homo sapiens
taaaaaaagatcata

SEQ ID NO: 1299758 - DNA, 15 bp, Homo sapiens
ataaaaaaagatcat

SEQ ID NO: 1299759 - DNA, 15 bp, Homo sapiens
cataaaaaaagatca

SEQ ID NO: 1299760 - DNA, 15 bp, Homo sapiens
acataaaaaaagatc

SEQ ID NO: 1299761 - DNA, 15 bp, Homo sapiens
aacataaaaaaagat

SEQ ID NO: 1299762 - DNA, 15 bp, Homo sapiens
aaacataaaaaaaga

SEQ ID NO: 1299763 - DNA, 15 bp, Homo sapiens
aaaacataaaaaaag

SEQ ID NO: 1299764 - DNA, 15 bp, Homo sapiens
aaaaacataaaaaaa

SEQ ID NO: 1299765 - DNA, 15 bp, Homo sapiens
taaaaacataaaaaa

SEQ ID NO: 1299766 - DNA, 15 bp, Homo sapiens
ataaaaacataaaaa

SEQ ID NO: 1299767 - DNA, 15 bp, Homo sapiens
tataaaaacataaaa

SEQ ID NO: 1299768 - DNA, 15 bp, Homo sapiens
gtataaaaacataaa

SEQ ID NO: 1299769 - DNA, 15 bp, Homo sapiens
tgtataaaaacataa

SEQ ID NO: 1299770 - DNA, 15 bp, Homo sapiens
ctgtataaaaacata

SEQ ID NO: 1299771 - DNA, 15 bp, Homo sapiens
actgtataaaaacat

SEQ ID NO: 1299772 - DNA, 15 bp, Homo sapiens
aactgtataaaaaca

SEQ ID NO: 1299773 - DNA, 15 bp, Homo sapiens
aaactgtataaaaac

SEQ ID NO: 1299774 - DNA, 15 bp, Homo sapiens
aaaactgtataaaaa

SEQ ID NO: 1299775 - DNA, 15 bp, Homo sapiens
aaaaactgtataaaa

SEQ ID NO: 1299776 - DNA, 15 bp, Homo sapiens
gaaaaactgtataaa

SEQ ID NO: 1299777 - DNA, 15 bp, Homo sapiens
tgaaaaactgtataa

SEQ ID NO: 1299778 - DNA, 15 bp, Homo sapiens
ttgaaaaactgtata

SEQ ID NO: 1299779 - DNA, 15 bp, Homo sapiens
gttgaaaaactgtat

SEQ ID NO: 1299780 - DNA, 15 bp, Homo sapiens
ggttgaaaaactgta

SEQ ID NO: 1299781 - DNA, 15 bp, Homo sapiens
gggttgaaaaactgt

SEQ ID NO: 1299782 - DNA, 15 bp, Homo sapiens
agggttgaaaaactg

SEQ ID NO: 1299783 - DNA, 15 bp, Homo sapiens
gagggttgaaaaact

SEQ ID NO: 1299784 - DNA, 15 bp, Homo sapiens
cgagggttgaaaaac

SEQ ID NO: 1299785 - DNA, 15 bp, Homo sapiens
gcgagggttgaaaaa

SEQ ID NO: 1299786 - DNA, 15 bp, Homo sapiens
agcgagggttgaaaa

SEQ ID NO: 1299787 - DNA, 15 bp, Homo sapiens
gagcgagggttgaaa

SEQ ID NO: 1299788 - DNA, 15 bp, Homo sapiens
agagcgagggttgaa

SEQ ID NO: 1299789 - DNA, 15 bp, Homo sapiens
gagagcgagggttga

SEQ ID NO: 1299790 - DNA, 15 bp, Homo sapiens
agagagcgagggttg

SEQ ID NO: 1299791 - DNA, 15 bp, Homo sapiens
aagagagcgagggtt

SEQ ID NO: 1299792 - DNA, 15 bp, Homo sapiens
gaagagagcgagggt

SEQ ID NO: 1299793 - DNA, 15 bp, Homo sapiens
ggaagagagcgaggg

SEQ ID NO: 1299794 - DNA, 15 bp, Homo sapiens
aggaagagagcgagg

SEQ ID NO: 1299795 - DNA, 15 bp, Homo sapiens
aaggaagagagcgag

SEQ ID NO: 1299796 - DNA, 15 bp, Homo sapiens
gaaggaagagagcga

SEQ ID NO: 1299797 - DNA, 15 bp, Homo sapiens
ggaaggaagagagcg

SEQ ID NO: 1299798 - DNA, 15 bp, Homo sapiens
gggaaggaagagagc

SEQ ID NO: 1299799 - DNA, 15 bp, Homo sapiens
agggaaggaagagag

SEQ ID NO: 1299800 - DNA, 15 bp, Homo sapiens
gagggaaggaagaga

SEQ ID NO: 1299801 - DNA, 15 bp, Homo sapiens
gaggagggaaggaag

SEQ ID NO: 1299802 - DNA, 15 bp, Homo sapiens
ggaggagggaaggaa

SEQ ID NO: 1299803 - DNA, 15 bp, Homo sapiens
gggaggagggaagga

SEQ ID NO: 1299804 - DNA, 15 bp, Homo sapiens
agggaggagggaagg

SEQ ID NO: 1299805 - DNA, 15 bp, Homo sapiens
gagggaggagggaag

SEQ ID NO: 1299806 - DNA, 15 bp, Homo sapiens
agagggaggagggaa

SEQ ID NO: 1299807 - DNA, 15 bp, Homo sapiens
tagagggaggaggga

SEQ ID NO: 1299808 - DNA, 15 bp, Homo sapiens
ctagagggaggaggg

SEQ ID NO: 1299809 - DNA, 15 bp, Homo sapiens
actagagggaggagg

SEQ ID NO: 1299810 - DNA, 15 bp, Homo sapiens
tactagagggaggag

SEQ ID NO: 1299811 - DNA, 15 bp, Homo sapiens
ctactagagggagga

SEQ ID NO: 1299812 - DNA, 15 bp, Homo sapiens
actactagagggagg

SEQ ID NO: 1299813 - DNA, 15 bp, Homo sapiens
gactactagagggag

SEQ ID NO: 1299814 - DNA, 15 bp, Homo sapiens
agactactagaggga

SEQ ID NO: 1299815 - DNA, 15 bp, Homo sapiens
gagactactagaggg

SEQ ID NO: 1299816 - DNA, 15 bp, Homo sapiens
ggagactactagagg

SEQ ID NO: 1299817 - DNA, 15 bp, Homo sapiens
tggagactactagag

SEQ ID NO: 1299818 - DNA, 15 bp, Homo sapiens
ctggagactactaga

SEQ ID NO: 1299819 - DNA, 15 bp, Homo sapiens
actggagactactag

SEQ ID NO: 1299820 - DNA, 15 bp, Homo sapiens
cactggagactacta

SEQ ID NO: 1299821 - DNA, 15 bp, Homo sapiens
acactggagactact

SEQ ID NO: 1299822 - DNA, 15 bp, Homo sapiens
gacactggagactac

SEQ ID NO: 1299823 - DNA, 15 bp, Homo sapiens
agacactggagacta

SEQ ID NO: 1299824 - DNA, 15 bp, Homo sapiens
tagacactggagact

SEQ ID NO: 1299825 - DNA, 15 bp, Homo sapiens
atagacactggagac

SEQ ID NO: 1299826 - DNA, 15 bp, Homo sapiens
aatagacactggaga

SEQ ID NO: 1299827 - DNA, 15 bp, Homo sapiens
caatagacactggag

SEQ ID NO: 1299828 - DNA, 15 bp, Homo sapiens
gcaatagacactgga

SEQ ID NO: 1299829 - DNA, 15 bp, Homo sapiens
agcaatagacactgg

SEQ ID NO: 1299830 - DNA, 15 bp, Homo sapiens
cagcaatagacactg

SEQ ID NO: 1299831 - DNA, 15 bp, Homo sapiens
gcagcaatagacact

SEQ ID NO: 1299832 - DNA, 15 bp, Homo sapiens
ggcagcaatagacac

SEQ ID NO: 1299833 - DNA, 15 bp, Homo sapiens
tggcagcaatagaca

SEQ ID NO: 1299834 - DNA, 15 bp, Homo sapiens
atggcagcaatagac

SEQ ID NO: 1299835 - DNA, 15 bp, Homo sapiens
gatggcagcaataga

SEQ ID NO: 1299836 - DNA, 15 bp, Homo sapiens
agatggcagcaatag

SEQ ID NO: 1299837 - DNA, 15 bp, Homo sapiens
aagatggcagcaata

SEQ ID NO: 1299838 - DNA, 15 bp, Homo sapiens
aaagatggcagcaat

SEQ ID NO: 1299839 - DNA, 15 bp, Homo sapiens
taaagatggcagcaa

SEQ ID NO: 1299840 - DNA, 15 bp, Homo sapiens
ataaagatggcagca

SEQ ID NO: 1299841 - DNA, 15 bp, Homo sapiens
cataaagatggcagc

SEQ ID NO: 1299842 - DNA, 15 bp, Homo sapiens
acataaagatggcag

SEQ ID NO: 1299843 - DNA, 15 bp, Homo sapiens
gacataaagatggca

SEQ ID NO: 1299844 - DNA, 15 bp, Homo sapiens
ggacataaagatggc

SEQ ID NO: 1299845 - DNA, 15 bp, Homo sapiens
tggacataaagatgg

SEQ ID NO: 1299846 - DNA, 15 bp, Homo sapiens
atggacataaagatg

SEQ ID NO: 1299847 - DNA, 15 bp, Homo sapiens
catggacataaagat

SEQ ID NO: 1299848 - DNA, 15 bp, Homo sapiens
tcatggacataaaga

SEQ ID NO: 1299849 - DNA, 15 bp, Homo sapiens
ctcatggacataaag

SEQ ID NO: 1299850 - DNA, 15 bp, Homo sapiens
actcatggacataaa

SEQ ID NO: 1299851 - DNA, 15 bp, Homo sapiens
tactcatggacataa

SEQ ID NO: 1299852 - DNA, 15 bp, Homo sapiens
gtactcatggacata

SEQ ID NO: 1299853 - DNA, 15 bp, Homo sapiens
ggtactcatggacat

SEQ ID NO: 1299854 - DNA, 15 bp, Homo sapiens
aggtactcatggaca

SEQ ID NO: 1299855 - DNA, 15 bp, Homo sapiens
caggtactcatggac

SEQ ID NO: 1299856 - DNA, 15 bp, Homo sapiens
tcaggtactcatgga

SEQ ID NO: 1299857 - DNA, 15 bp, Homo sapiens
atcaggtactcatgg

SEQ ID NO: 1299858 - DNA, 15 bp, Homo sapiens
tatcaggtactcatg

SEQ ID NO: 1299859 - DNA, 15 bp, Homo sapiens
atatcaggtactcat

SEQ ID NO: 1299860 - DNA, 15 bp, Homo sapiens
aatatcaggtactca

SEQ ID NO: 1299861 - DNA, 15 bp, Homo sapiens
aaatatcaggtactc

SEQ ID NO: 1299862 - DNA, 15 bp, Homo sapiens
taaatatcaggtact

SEQ ID NO: 1299863 - DNA, 15 bp, Homo sapiens
ctaaatatcaggtac

SEQ ID NO: 1299864 - DNA, 15 bp, Homo sapiens
gctaaatatcaggta

SEQ ID NO: 1299865 - DNA, 15 bp, Homo sapiens
agctaaatatcaggt

SEQ ID NO: 1299866 - DNA, 15 bp, Homo sapiens
gagctaaatatcagg

SEQ ID NO: 1299867 - DNA, 15 bp, Homo sapiens
ggagctaaatatcag

SEQ ID NO: 1299868 - DNA, 15 bp, Homo sapiens
gggagctaaatatca

SEQ ID NO: 1299869 - DNA, 15 bp, Homo sapiens
tgggagctaaatatc

SEQ ID NO: 1299870 - DNA, 15 bp, Homo sapiens
gtgggagctaaatat

SEQ ID NO: 1299871 - DNA, 15 bp, Homo sapiens
agtgggagctaaata

SEQ ID NO: 1299872 - DNA, 15 bp, Homo sapiens
gagtgggagctaaat

SEQ ID NO: 1299873 - DNA, 15 bp, Homo sapiens
tgagtgggagctaaa

SEQ ID NO: 1299874 - DNA, 15 bp, Homo sapiens
atgagtgggagctaa

SEQ ID NO: 1299875 - DNA, 15 bp, Homo sapiens
aatgagtgggagcta

SEQ ID NO: 1299876 - DNA, 15 bp, Homo sapiens
taatgagtgggagct

SEQ ID NO: 1299877 - DNA, 15 bp, Homo sapiens
ctaatgagtgggagc

SEQ ID NO: 1299878 - DNA, 15 bp, Homo sapiens
actaatgagtgggag

SEQ ID NO: 1299879 - DNA, 15 bp, Homo sapiens
cactaatgagtggga

SEQ ID NO: 1299880 - DNA, 15 bp, Homo sapiens
tcactaatgagtggg

SEQ ID NO: 1299881 - DNA, 15 bp, Homo sapiens
ctcactaatgagtgg

SEQ ID NO: 1299882 - DNA, 15 bp, Homo sapiens
ttctcactaatgagt

SEQ ID NO: 1299883 - DNA, 15 bp, Homo sapiens
gttctcactaatgag

SEQ ID NO: 1299884 - DNA, 15 bp, Homo sapiens
tgttctcactaatga

SEQ ID NO: 1299885 - DNA, 15 bp, Homo sapiens
atgttctcactaatg

SEQ ID NO: 1299886 - DNA, 15 bp, Homo sapiens
catgttctcactaat

SEQ ID NO: 1299887 - DNA, 15 bp, Homo sapiens
gcatgttctcactaa

SEQ ID NO: 1299888 - DNA, 15 bp, Homo sapiens
tgcatgttctcacta

SEQ ID NO: 1299889 - DNA, 15 bp, Homo sapiens
tactgcatgttctca

SEQ ID NO: 1299890 - DNA, 15 bp, Homo sapiens
atactgcatgttctc

SEQ ID NO: 1299891 - DNA, 15 bp, Homo sapiens
aatactgcatgttct

SEQ ID NO: 1299892 - DNA, 15 bp, Homo sapiens
aaatactgcatgttc

SEQ ID NO: 1299893 - DNA, 15 bp, Homo sapiens
caaatactgcatgtt

SEQ ID NO: 1299894 - DNA, 15 bp, Homo sapiens
ccaaatactgcatgt

SEQ ID NO: 1299895 - DNA, 15 bp, Homo sapiens
accaaatactgcatg

SEQ ID NO: 1299896 - DNA, 15 bp, Homo sapiens
aaccaaatactgcat

SEQ ID NO: 1299897 - DNA, 15 bp, Homo sapiens
aaaccaaatactgca

SEQ ID NO: 1299898 - DNA, 15 bp, Homo sapiens
aaaaccaaatactgc

SEQ ID NO: 1299899 - DNA, 15 bp, Homo sapiens
gaaaaccaaatactg

SEQ ID NO: 1299900 - DNA, 15 bp, Homo sapiens
agaaaaccaaatact

SEQ ID NO: 1299901 - DNA, 15 bp, Homo sapiens
aagaaaaccaaatac

SEQ ID NO: 1299902 - DNA, 15 bp, Homo sapiens
aaagaaaaccaaata

SEQ ID NO: 1299903 - DNA, 15 bp, Homo sapiens
aaaagaaaaccaaat

SEQ ID NO: 1299904 - DNA, 15 bp, Homo sapiens
agaaaaagaaaacca

SEQ ID NO: 1299905 - DNA, 15 bp, Homo sapiens
cagaaaaagaaaacc

SEQ ID NO: 1299906 - DNA, 15 bp, Homo sapiens
acagaaaaagaaaac

SEQ ID NO: 1299907 - DNA, 15 bp, Homo sapiens
tacagaaaaagaaaa

SEQ ID NO: 1299908 - DNA, 15 bp, Homo sapiens
atacagaaaaagaaa

SEQ ID NO: 1299909 - DNA, 15 bp, Homo sapiens
aatacagaaaaagaa

SEQ ID NO: 1299910 - DNA, 15 bp, Homo sapiens
taatacagaaaaaga

SEQ ID NO: 1299911 - DNA, 15 bp, Homo sapiens
ttaatacagaaaaag

SEQ ID NO: 1299912 - DNA, 15 bp, Homo sapiens
attaatacagaaaaa

SEQ ID NO: 1299913 - DNA, 15 bp, Homo sapiens
aattaatacagaaaa

SEQ ID NO: 1299914 - DNA, 15 bp, Homo sapiens
aaattaatacagaaa

SEQ ID NO: 1299915 - DNA, 15 bp, Homo sapiens
caaattaatacagaa

SEQ ID NO: 1299916 - DNA, 15 bp, Homo sapiens
acaaattaatacaga

SEQ ID NO: 1299917 - DNA, 15 bp, Homo sapiens
aacaaattaatacag

SEQ ID NO: 1299918 - DNA, 15 bp, Homo sapiens
aaacaaattaataca

SEQ ID NO: 1299919 - DNA, 15 bp, Homo sapiens
taaacaaattaatac

SEQ ID NO: 1299920 - DNA, 15 bp, Homo sapiens
ctaaacaaattaata

SEQ ID NO: 1299921 - DNA, 15 bp, Homo sapiens
cctaaacaaattaat

SEQ ID NO: 1299922 - DNA, 15 bp, Homo sapiens
tcctaaacaaattaa

SEQ ID NO: 1299923 - DNA, 15 bp, Homo sapiens
atcctaaacaaatta

SEQ ID NO: 1299924 - DNA, 15 bp, Homo sapiens
tatcctaaacaaatt

SEQ ID NO: 1299925 - DNA, 15 bp, Homo sapiens
ttatcctaaacaaat

SEQ ID NO: 1299926 - DNA, 15 bp, Homo sapiens
attatcctaaacaaa

SEQ ID NO: 1299927 - DNA, 15 bp, Homo sapiens
cattatcctaaacaa

SEQ ID NO: 1299928 - DNA, 15 bp, Homo sapiens
tcattatcctaaaca

SEQ ID NO: 1299929 - DNA, 15 bp, Homo sapiens
gtcattatcctaaac

SEQ ID NO: 1299930 - DNA, 15 bp, Homo sapiens
ggtcattatcctaaa

SEQ ID NO: 1299931 - DNA, 15 bp, Homo sapiens
aggtcattatcctaa

SEQ ID NO: 1299932 - DNA, 15 bp, Homo sapiens
gaggtcattatccta

SEQ ID NO: 1299933 - DNA, 15 bp, Homo sapiens
ggaggtcattatcct

SEQ ID NO: 1299934 - DNA, 15 bp, Homo sapiens
tggaggtcattatcc

SEQ ID NO: 1299935 - DNA, 15 bp, Homo sapiens
ctggaggtcattatc

SEQ ID NO: 1299936 - DNA, 15 bp, Homo sapiens
gctggaggtcattat

SEQ ID NO: 1299937 - DNA, 15 bp, Homo sapiens
agctggaggtcatta

SEQ ID NO: 1299938 - DNA, 15 bp, Homo sapiens
tagctggaggtcatt

SEQ ID NO: 1299939 - DNA, 15 bp, Homo sapiens
gtagctggaggtcat

SEQ ID NO: 1299940 - DNA, 15 bp, Homo sapiens
tgtagctggaggtca

SEQ ID NO: 1299941 - DNA, 15 bp, Homo sapiens
atgtagctggaggtc

SEQ ID NO: 1299942 - DNA, 15 bp, Homo sapiens
gatgtagctggaggt

SEQ ID NO: 1299943 - DNA, 15 bp, Homo sapiens
ggatgtagctggagg

SEQ ID NO: 1299944 - DNA, 15 bp, Homo sapiens
tggatgtagctggag

SEQ ID NO: 1299945 - DNA, 15 bp, Homo sapiens
atggatgtagctgga

SEQ ID NO: 1299946 - DNA, 15 bp, Homo sapiens
catggatgtagctgg

SEQ ID NO: 1299947 - DNA, 15 bp, Homo sapiens
acatggatgtagctg

SEQ ID NO: 1299948 - DNA, 15 bp, Homo sapiens
cacatggatgtagct

SEQ ID NO: 1299949 - DNA, 15 bp, Homo sapiens
ccacatggatgtagc

SEQ ID NO: 1299950 - DNA, 15 bp, Homo sapiens
gccacatggatgtag

SEQ ID NO: 1299951 - DNA, 15 bp, Homo sapiens
agccacatggatgta

SEQ ID NO: 1299952 - DNA, 15 bp, Homo sapiens
cagccacatggatgt

SEQ ID NO: 1299953 - DNA, 15 bp, Homo sapiens
gcagccacatggatg

SEQ ID NO: 1299954 - DNA, 15 bp, Homo sapiens
tgcagccacatggat

SEQ ID NO: 1299955 - DNA, 15 bp, Homo sapiens
ttgcagccacatgga

SEQ ID NO: 1299956 - DNA, 15 bp, Homo sapiens
tttgcagccacatgg

SEQ ID NO: 1299957 - DNA, 15 bp, Homo sapiens
ctttgcagccacatg

SEQ ID NO: 1299958 - DNA, 15 bp, Homo sapiens
cctttgcagccacat

SEQ ID NO: 1299959 - DNA, 15 bp, Homo sapiens
ccctttgcagccaca

SEQ ID NO: 1299960 - DNA, 15 bp, Homo sapiens
gccctttgcagccac

SEQ ID NO: 1299961 - DNA, 15 bp, Homo sapiens
tgccctttgcagcca

SEQ ID NO: 1299962 - DNA, 15 bp, Homo sapiens
atgccctttgcagcc

SEQ ID NO: 1299963 - DNA, 15 bp, Homo sapiens
tatgccctttgcagc

SEQ ID NO: 1299964 - DNA, 15 bp, Homo sapiens
ttatgccctttgcag

SEQ ID NO: 1299965 - DNA, 15 bp, Homo sapiens
attatgccctttgca

SEQ ID NO: 1299966 - DNA, 15 bp, Homo sapiens
aattatgccctttgc

SEQ ID NO: 1299967 - DNA, 15 bp, Homo sapiens
aaattatgccctttg

SEQ ID NO: 1299968 - DNA, 15 bp, Homo sapiens
gaaattatgcccttt

SEQ ID NO: 1299969 - DNA, 15 bp, Homo sapiens
tgaaattatgccctt

SEQ ID NO: 1299970 - DNA, 15 bp, Homo sapiens
atgaaattatgccct

SEQ ID NO: 1299971 - DNA, 15 bp, Homo sapiens
aatgaaattatgccc

SEQ ID NO: 1299972 - DNA, 15 bp, Homo sapiens
gaatgaaattatgcc

SEQ ID NO: 1299973 - DNA, 15 bp, Homo sapiens
agaatgaaattatgc

SEQ ID NO: 1299974 - DNA, 15 bp, Homo sapiens
aagaatgaaattatg

SEQ ID NO: 1299975 - DNA, 15 bp, Homo sapiens
aaagaatgaaattat

SEQ ID NO: 1299976 - DNA, 15 bp, Homo sapiens
aaaagaatgaaatta

SEQ ID NO: 1299977 - DNA, 15 bp, Homo sapiens
aaaaagaatgaaatt

SEQ ID NO: 1299978 - DNA, 15 bp, Homo sapiens
aaaaaagaatgaaat

SEQ ID NO: 1299979 - DNA, 15 bp, Homo sapiens
aaaaaaagaatgaaa

SEQ ID NO: 1299980 - DNA, 15 bp, Homo sapiens
taaaaaaagaatgaa

SEQ ID NO: 1299981 - DNA, 15 bp, Homo sapiens
ataaaaaaagaatga

SEQ ID NO: 1299982 - DNA, 15 bp, Homo sapiens
cataaaaaaagaatg

SEQ ID NO: 1299983 - DNA, 15 bp, Homo sapiens
tcataaaaaaagaat

SEQ ID NO: 1299984 - DNA, 15 bp, Homo sapiens
gtcataaaaaaagaa

SEQ ID NO: 1299985 - DNA, 15 bp, Homo sapiens
agtcataaaaaaaga

SEQ ID NO: 1299986 - DNA, 15 bp, Homo sapiens
cagtcataaaaaaag

SEQ ID NO: 1299987 - DNA, 15 bp, Homo sapiens
acagtcataaaaaaa

SEQ ID NO: 1299988 - DNA, 15 bp, Homo sapiens
tacagtcataaaaaa

SEQ ID NO: 1299989 - DNA, 15 bp, Homo sapiens
atacagtcataaaaa

SEQ ID NO: 1299990 - DNA, 15 bp, Homo sapiens
tatacagtcataaaa

SEQ ID NO: 1299991 - DNA, 15 bp, Homo sapiens
ctatacagtcataaa

SEQ ID NO: 1299992 - DNA, 15 bp, Homo sapiens
actatacagtcataa

SEQ ID NO: 1299993 - DNA, 15 bp, Homo sapiens
tactatacagtcata

SEQ ID NO: 1299994 - DNA, 15 bp, Homo sapiens
gtactatacagtcat

SEQ ID NO: 1299995 - DNA, 15 bp, Homo sapiens
agtactatacagtca

SEQ ID NO: 1299996 - DNA, 15 bp, Homo sapiens
gagtactatacagtc

SEQ ID NO: 1299997 - DNA, 15 bp, Homo sapiens
ggagtactatacagt

SEQ ID NO: 1299998 - DNA, 15 bp, Homo sapiens
tggagtactatacag

SEQ ID NO: 1299999 - DNA, 15 bp, Homo sapiens
atggagtactataca

SEQ ID NO: 1300000 - DNA, 15 bp, Homo sapiens
tatggagtactatac

SEQ ID NO: 1300001 - DNA, 15 bp, Homo sapiens
ctatggagtactata

SEQ ID NO: 1300002 - DNA, 15 bp, Homo sapiens
actatggagtactat

SEQ ID NO: 1300003 - DNA, 15 bp, Homo sapiens
cactatggagtacta

SEQ ID NO: 1300004 - DNA, 15 bp, Homo sapiens
acactatggagtact

SEQ ID NO: 1300005 - DNA, 15 bp, Homo sapiens
tacactatggagtac

SEQ ID NO: 1300006 - DNA, 15 bp, Homo sapiens
atacactatggagta

SEQ ID NO: 1300007 - DNA, 15 bp, Homo sapiens
tatacactatggagt

SEQ ID NO: 1300008 - DNA, 15 bp, Homo sapiens
ttatacactatggag

SEQ ID NO: 1300009 - DNA, 15 bp, Homo sapiens
cttatacactatgga

SEQ ID NO: 1300010 - DNA, 15 bp, Homo sapiens
acttatacactatgg

SEQ ID NO: 1300011 - DNA, 15 bp, Homo sapiens
tacttatacactatg

SEQ ID NO: 1300012 - DNA, 15 bp, Homo sapiens
gtacttatacactat

SEQ ID NO: 1300013 - DNA, 15 bp, Homo sapiens
ggtacttatacacta

SEQ ID NO: 1300014 - DNA, 15 bp, Homo sapiens
tggtacttatacact

SEQ ID NO: 1300015 - DNA, 15 bp, Homo sapiens
gtggtacttatacac

SEQ ID NO: 1300016 - DNA, 15 bp, Homo sapiens
tgtggtacttataca

SEQ ID NO: 1300017 - DNA, 15 bp, Homo sapiens
atgtggtacttatac

SEQ ID NO: 1300018 - DNA, 15 bp, Homo sapiens
aatgtggtacttata

SEQ ID NO: 1300019 - DNA, 15 bp, Homo sapiens
aaatgtggtacttat

SEQ ID NO: 1300020 - DNA, 15 bp, Homo sapiens
aaaatgtggtactta

SEQ ID NO: 1300021 - DNA, 15 bp, Homo sapiens
gaaaatgtggtactt

SEQ ID NO: 1300022 - DNA, 15 bp, Homo sapiens
agaaaatgtggtact

SEQ ID NO: 1300023 - DNA, 15 bp, Homo sapiens
ttggataaagaaaat

SEQ ID NO: 1300024 - DNA, 15 bp, Homo sapiens
attggataaagaaaa

SEQ ID NO: 1300025 - DNA, 15 bp, Homo sapiens
gattggataaagaaa

SEQ ID NO: 1300026 - DNA, 15 bp, Homo sapiens
ggattggataaagaa

SEQ ID NO: 1300027 - DNA, 15 bp, Homo sapiens
tggattggataaaga

SEQ ID NO: 1300028 - DNA, 15 bp, Homo sapiens
gtggattggataaag

SEQ ID NO: 1300029 - DNA, 15 bp, Homo sapiens
ggtggattggataaa

SEQ ID NO: 1300030 - DNA, 15 bp, Homo sapiens
tggtggattggataa

SEQ ID NO: 1300031 - DNA, 15 bp, Homo sapiens
gtggtggattggata

SEQ ID NO: 1300032 - DNA, 15 bp, Homo sapiens
agtggtggattggat

SEQ ID NO: 1300033 - DNA, 15 bp, Homo sapiens
cagtggtggattgga

SEQ ID NO: 1300034 - DNA, 15 bp, Homo sapiens
tcagtggtggattgg

SEQ ID NO: 1300035 - DNA, 15 bp, Homo sapiens
ttcagtggtggattg

SEQ ID NO: 1300036 - DNA, 15 bp, Homo sapiens
cttcagtggtggatt

SEQ ID NO: 1300037 - DNA, 15 bp, Homo sapiens
ccttcagtggtggat

SEQ ID NO: 1300038 - DNA, 15 bp, Homo sapiens
cccttcagtggtgga

SEQ ID NO: 1300039 - DNA, 15 bp, Homo sapiens
gcccttcagtggtgg

SEQ ID NO: 1300040 - DNA, 15 bp, Homo sapiens
tgcccttcagtggtg

SEQ ID NO: 1300041 - DNA, 15 bp, Homo sapiens
gtgcccttcagtggt

SEQ ID NO: 1300042 - DNA, 15 bp, Homo sapiens
ggtgcccttcagtgg

SEQ ID NO: 1300043 - DNA, 15 bp, Homo sapiens
aggtgcccttcagtg

SEQ ID NO: 1300044 - DNA, 15 bp, Homo sapiens
taggtgcccttcagt

SEQ ID NO: 1300045 - DNA, 15 bp, Homo sapiens
ctaggtgcccttcag

SEQ ID NO: 1300046 - DNA, 15 bp, Homo sapiens
cctaggtgcccttca

SEQ ID NO: 1300047 - DNA, 15 bp, Homo sapiens
acctaggtgcccttc

SEQ ID NO: 1300048 - DNA, 15 bp, Homo sapiens
aacctaggtgccctt

SEQ ID NO: 1300049 - DNA, 15 bp, Homo sapiens
caacctaggtgccct

SEQ ID NO: 1300050 - DNA, 15 bp, Homo sapiens
tcaacctaggtgccc

SEQ ID NO: 1300051 - DNA, 15 bp, Homo sapiens
atcaacctaggtgcc

SEQ ID NO: 1300052 - DNA, 15 bp, Homo sapiens
aatcaacctaggtgc

SEQ ID NO: 1300053 - DNA, 15 bp, Homo sapiens
gaatcaacctaggtg

SEQ ID NO: 1300054 - DNA, 15 bp, Homo sapiens
ggaatcaacctaggt

SEQ ID NO: 1300055 - DNA, 15 bp, Homo sapiens
tggaatcaacctagg

SEQ ID NO: 1300056 - DNA, 15 bp, Homo sapiens
atggaatcaacctag

SEQ ID NO: 1300057 - DNA, 15 bp, Homo sapiens
catggaatcaaccta

SEQ ID NO: 1300058 - DNA, 15 bp, Homo sapiens
acatggaatcaacct

SEQ ID NO: 1300059 - DNA, 15 bp, Homo sapiens
gacatggaatcaacc

SEQ ID NO: 1300060 - DNA, 15 bp, Homo sapiens
agacatggaatcaac

SEQ ID NO: 1300061 - DNA, 15 bp, Homo sapiens
aagacatggaatcaa

SEQ ID NO: 1300062 - DNA, 15 bp, Homo sapiens
aaagacatggaatca

SEQ ID NO: 1300063 - DNA, 15 bp, Homo sapiens
caaagacatggaatc

SEQ ID NO: 1300064 - DNA, 15 bp, Homo sapiens
gcaaagacatggaat

SEQ ID NO: 1300065 - DNA, 15 bp, Homo sapiens
agcaaagacatggaa

SEQ ID NO: 1300066 - DNA, 15 bp, Homo sapiens
tagcaaagacatgga

SEQ ID NO: 1300067 - DNA, 15 bp, Homo sapiens
atagcaaagacatgg

SEQ ID NO: 1300068 - DNA, 15 bp, Homo sapiens
aatagcaaagacatg

SEQ ID NO: 1300069 - DNA, 15 bp, Homo sapiens
caatagcaaagacat

SEQ ID NO: 1300070 - DNA, 15 bp, Homo sapiens
acaatagcaaagaca

SEQ ID NO: 1300071 - DNA, 15 bp, Homo sapiens
gctattcacaatagc

SEQ ID NO: 1300072 - DNA, 15 bp, Homo sapiens
tgctattcacaatag

SEQ ID NO: 1300073 - DNA, 15 bp, Homo sapiens
atgctattcacaata

SEQ ID NO: 1300074 - DNA, 15 bp, Homo sapiens
tatgctattcacaat

SEQ ID NO: 1300075 - DNA, 15 bp, Homo sapiens
gtatgctattcacaa

SEQ ID NO: 1300076 - DNA, 15 bp, Homo sapiens
ggtatgctattcaca

SEQ ID NO: 1300077 - DNA, 15 bp, Homo sapiens
tggtatgctattcac

SEQ ID NO: 1300078 - DNA, 15 bp, Homo sapiens
ctggtatgctattca

SEQ ID NO: 1300079 - DNA, 15 bp, Homo sapiens
actggtatgctattc

SEQ ID NO: 1300080 - DNA, 15 bp, Homo sapiens
cactggtatgctatt

SEQ ID NO: 1300081 - DNA, 15 bp, Homo sapiens
tcactggtatgctat

SEQ ID NO: 1300082 - DNA, 15 bp, Homo sapiens
ttcactggtatgcta

SEQ ID NO: 1300083 - DNA, 15 bp, Homo sapiens
gttcactggtatgct

SEQ ID NO: 1300084 - DNA, 15 bp, Homo sapiens
tgttcactggtatgc

SEQ ID NO: 1300085 - DNA, 15 bp, Homo sapiens
atgttcactggtatg

SEQ ID NO: 1300086 - DNA, 15 bp, Homo sapiens
tatgttcactggtat

SEQ ID NO: 1300087 - DNA, 15 bp, Homo sapiens
atatgttcactggta

SEQ ID NO: 1300088 - DNA, 15 bp, Homo sapiens
catatgttcactggt

SEQ ID NO: 1300089 - DNA, 15 bp, Homo sapiens
tcatatgttcactgg

SEQ ID NO: 1300090 - DNA, 15 bp, Homo sapiens
ctcatatgttcactg

SEQ ID NO: 1300091 - DNA, 15 bp, Homo sapiens
actcatatgttcact

SEQ ID NO: 1300092 - DNA, 15 bp, Homo sapiens
cactcatatgttcac

SEQ ID NO: 1300093 - DNA, 15 bp, Homo sapiens
gcactcatatgttca

SEQ ID NO: 1300094 - DNA, 15 bp, Homo sapiens
tgcactcatatgttc

SEQ ID NO: 1300095 - DNA, 15 bp, Homo sapiens
atgcactcatatgtt

SEQ ID NO: 1300096 - DNA, 15 bp, Homo sapiens
catgcactcatatgt

SEQ ID NO: 1300097 - DNA, 15 bp, Homo sapiens
acatgcactcatatg

SEQ ID NO: 1300098 - DNA, 15 bp, Homo sapiens
cacatgcactcatat

SEQ ID NO: 1300099 - DNA, 15 bp, Homo sapiens
tcacatgcactcata

SEQ ID NO: 1300100 - DNA, 15 bp, Homo sapiens
ttcacatgcactcat

SEQ ID NO: 1300101 - DNA, 15 bp, Homo sapiens
tttcacatgcactca

SEQ ID NO: 1300102 - DNA, 15 bp, Homo sapiens
ctttcacatgcactc

SEQ ID NO: 1300103 - DNA, 15 bp, Homo sapiens
tctttcacatgcact

SEQ ID NO: 1300104 - DNA, 15 bp, Homo sapiens
gtctttcacatgcac

SEQ ID NO: 1300105 - DNA, 15 bp, Homo sapiens
tgtctttcacatgca

SEQ ID NO: 1300106 - DNA, 15 bp, Homo sapiens
atgtctttcacatgc

SEQ ID NO: 1300107 - DNA, 15 bp, Homo sapiens
aatgtctttcacatg

SEQ ID NO: 1300108 - DNA, 15 bp, Homo sapiens
aaatgtctttcacat

SEQ ID NO: 1300109 - DNA, 15 bp, Homo sapiens
aaaatgtctttcaca

SEQ ID NO: 1300110 - DNA, 15 bp, Homo sapiens
gaaaatgtctttcac

SEQ ID NO: 1300111 - DNA, 15 bp, Homo sapiens
agaaaatgtctttca

SEQ ID NO: 1300112 - DNA, 15 bp, Homo sapiens
tagaaaatgtctttc

SEQ ID NO: 1300113 - DNA, 15 bp, Homo sapiens
ctagaaaatgtcttt

SEQ ID NO: 1300114 - DNA, 15 bp, Homo sapiens
tctagaaaatgtctt

SEQ ID NO: 1300115 - DNA, 15 bp, Homo sapiens
ctctagaaaatgtct

SEQ ID NO: 1300116 - DNA, 15 bp, Homo sapiens
gctctagaaaatgtc

SEQ ID NO: 1300117 - DNA, 15 bp, Homo sapiens
agctctagaaaatgt

SEQ ID NO: 1300118 - DNA, 15 bp, Homo sapiens
gagctctagaaaatg

SEQ ID NO: 1300119 - DNA, 15 bp, Homo sapiens
tgagctctagaaaat

SEQ ID NO: 1300120 - DNA, 15 bp, Homo sapiens
ttgagctctagaaaa

SEQ ID NO: 1300121 - DNA, 15 bp, Homo sapiens
attgagctctagaaa

SEQ ID NO: 1300122 - DNA, 15 bp, Homo sapiens
aattgagctctagaa

SEQ ID NO: 1300123 - DNA, 15 bp, Homo sapiens
aaattgagctctaga

SEQ ID NO: 1300124 - DNA, 15 bp, Homo sapiens
taaattgagctctag

SEQ ID NO: 1300125 - DNA, 15 bp, Homo sapiens
ttaaattgagctcta

SEQ ID NO: 1300126 - DNA, 15 bp, Homo sapiens
tttaaattgagctct

SEQ ID NO: 1300127 - DNA, 15 bp, Homo sapiens
ctttaaattgagctc

SEQ ID NO: 1300128 - DNA, 15 bp, Homo sapiens
gctttaaattgagct

SEQ ID NO: 1300129 - DNA, 15 bp, Homo sapiens
agctttaaattgagc

SEQ ID NO: 1300130 - DNA, 15 bp, Homo sapiens
aagctttaaattgag

SEQ ID NO: 1300131 - DNA, 15 bp, Homo sapiens
taagctttaaattga

SEQ ID NO: 1300132 - DNA, 15 bp, Homo sapiens
ttaagctttaaattg

SEQ ID NO: 1300133 - DNA, 15 bp, Homo sapiens
gttaagctttaaatt

SEQ ID NO: 1300134 - DNA, 15 bp, Homo sapiens
agttaagctttaaat

SEQ ID NO: 1300135 - DNA, 15 bp, Homo sapiens
aagttaagctttaaa

SEQ ID NO: 1300136 - DNA, 15 bp, Homo sapiens
aaagttaagctttaa

SEQ ID NO: 1300137 - DNA, 15 bp, Homo sapiens
aaaagttaagcttta

SEQ ID NO: 1300138 - DNA, 15 bp, Homo sapiens
taaaagttaagcttt

SEQ ID NO: 1300139 - DNA, 15 bp, Homo sapiens
ttaaaagttaagctt

SEQ ID NO: 1300140 - DNA, 15 bp, Homo sapiens
attaaaagttaagct

SEQ ID NO: 1300141 - DNA, 15 bp, Homo sapiens
cattaaaagttaagc

SEQ ID NO: 1300142 - DNA, 15 bp, Homo sapiens
tcattaaaagttaag

SEQ ID NO: 1300143 - DNA, 15 bp, Homo sapiens
ttcattaaaagttaa

SEQ ID NO: 1300144 - DNA, 15 bp, Homo sapiens
cttcattaaaagtta

SEQ ID NO: 1300145 - DNA, 15 bp, Homo sapiens
gcttcattaaaagtt

SEQ ID NO: 1300146 - DNA, 15 bp, Homo sapiens
agcttcattaaaagt

SEQ ID NO: 1300147 - DNA, 15 bp, Homo sapiens
aagcttcattaaaag

SEQ ID NO: 1300148 - DNA, 15 bp, Homo sapiens
taagcttcattaaaa

SEQ ID NO: 1300149 - DNA, 15 bp, Homo sapiens
ttaagcttcattaaa

SEQ ID NO: 1300150 - DNA, 15 bp, Homo sapiens
tttaagcttcattaa

SEQ ID NO: 1300151 - DNA, 15 bp, Homo sapiens
ttttaagcttcatta

SEQ ID NO: 1300152 - DNA, 15 bp, Homo sapiens
cttttaagcttcatt

SEQ ID NO: 1300153 - DNA, 15 bp, Homo sapiens
gcttttaagcttcat

SEQ ID NO: 1300154 - DNA, 15 bp, Homo sapiens
agcttttaagcttca

SEQ ID NO: 1300155 - DNA, 15 bp, Homo sapiens
aagcttttaagcttc

SEQ ID NO: 1300156 - DNA, 15 bp, Homo sapiens
taagcttttaagctt

SEQ ID NO: 1300157 - DNA, 15 bp, Homo sapiens
ttaagcttttaagct

SEQ ID NO: 1300158 - DNA, 15 bp, Homo sapiens
attaagcttttaagc

SEQ ID NO: 1300159 - DNA, 15 bp, Homo sapiens
aattaagcttttaag

SEQ ID NO: 1300160 - DNA, 15 bp, Homo sapiens
taattaagcttttaa

SEQ ID NO: 1300161 - DNA, 15 bp, Homo sapiens
ataattaagctttta

SEQ ID NO: 1300162 - DNA, 15 bp, Homo sapiens
cataattaagctttt

SEQ ID NO: 1300163 - DNA, 15 bp, Homo sapiens
acataattaagcttt

SEQ ID NO: 1300164 - DNA, 15 bp, Homo sapiens
tacataattaagctt

SEQ ID NO: 1300165 - DNA, 15 bp, Homo sapiens
ctacataattaagct

SEQ ID NO: 1300166 - DNA, 15 bp, Homo sapiens
tctacataattaagc

SEQ ID NO: 1300167 - DNA, 15 bp, Homo sapiens
atctacataattaag

SEQ ID NO: 1300168 - DNA, 15 bp, Homo sapiens
catctacataattaa

SEQ ID NO: 1300169 - DNA, 15 bp, Homo sapiens
tcatctacataatta

SEQ ID NO: 1300170 - DNA, 15 bp, Homo sapiens
atcatctacataatt

SEQ ID NO: 1300171 - DNA, 15 bp, Homo sapiens
tatcatctacataat

SEQ ID NO: 1300172 - DNA, 15 bp, Homo sapiens
ttatcatctacataa

SEQ ID NO: 1300173 - DNA, 15 bp, Homo sapiens
cttatcatctacata

SEQ ID NO: 1300174 - DNA, 15 bp, Homo sapiens
acttatcatctacat

SEQ ID NO: 1300175 - DNA, 15 bp, Homo sapiens
aacttatcatctaca

SEQ ID NO: 1300176 - DNA, 15 bp, Homo sapiens
caacttatcatctac

SEQ ID NO: 1300177 - DNA, 15 bp, Homo sapiens
gcaacttatcatcta

SEQ ID NO: 1300178 - DNA, 15 bp, Homo sapiens
tgcaacttatcatct

SEQ ID NO: 1300179 - DNA, 15 bp, Homo sapiens
atgcaacttatcatc

SEQ ID NO: 1300180 - DNA, 15 bp, Homo sapiens
tatgcaacttatcat

SEQ ID NO: 1300181 - DNA, 15 bp, Homo sapiens
atatgcaacttatca

SEQ ID NO: 1300182 - DNA, 15 bp, Homo sapiens
catatgcaacttatc

SEQ ID NO: 1300183 - DNA, 15 bp, Homo sapiens
acatatgcaacttat

SEQ ID NO: 1300184 - DNA, 15 bp, Homo sapiens
gacatatgcaactta

SEQ ID NO: 1300185 - DNA, 15 bp, Homo sapiens
tgacatatgcaactt

SEQ ID NO: 1300186 - DNA, 15 bp, Homo sapiens
ttgacatatgcaact

SEQ ID NO: 1300187 - DNA, 15 bp, Homo sapiens
tttgacatatgcaac

SEQ ID NO: 1300188 - DNA, 15 bp, Homo sapiens
ctttgacatatgcaa

SEQ ID NO: 1300189 - DNA, 15 bp, Homo sapiens
actttgacatatgca

SEQ ID NO: 1300190 - DNA, 15 bp, Homo sapiens
cactttgacatatgc

SEQ ID NO: 1300191 - DNA, 15 bp, Homo sapiens
tcactttgacatatg

SEQ ID NO: 1300192 - DNA, 15 bp, Homo sapiens
ttcactttgacatat

SEQ ID NO: 1300193 - DNA, 15 bp, Homo sapiens
gttcactttgacata

SEQ ID NO: 1300194 - DNA, 15 bp, Homo sapiens
tgttcactttgacat

SEQ ID NO: 1300195 - DNA, 15 bp, Homo sapiens
atgttcactttgaca

SEQ ID NO: 1300196 - DNA, 15 bp, Homo sapiens
catgttcactttgac

SEQ ID NO: 1300197 - DNA, 15 bp, Homo sapiens
acatgttcactttga

SEQ ID NO: 1300198 - DNA, 15 bp, Homo sapiens
gacatgttcactttg

SEQ ID NO: 1300199 - DNA, 15 bp, Homo sapiens
agacatgttcacttt

SEQ ID NO: 1300200 - DNA, 15 bp, Homo sapiens
aagacatgttcactt

SEQ ID NO: 1300201 - DNA, 15 bp, Homo sapiens
caagacatgttcact

SEQ ID NO: 1300202 - DNA, 15 bp, Homo sapiens
tcaagacatgttcac

SEQ ID NO: 1300203 - DNA, 15 bp, Homo sapiens
ttcaagacatgttca

SEQ ID NO: 1300204 - DNA, 15 bp, Homo sapiens
cttcaagacatgttc

SEQ ID NO: 1300205 - DNA, 15 bp, Homo sapiens
ccttcaagacatgtt

SEQ ID NO: 1300206 - DNA, 15 bp, Homo sapiens
accttcaagacatgt

SEQ ID NO: 1300207 - DNA, 15 bp, Homo sapiens
gaccttcaagacatg

SEQ ID NO: 1300208 - DNA, 15 bp, Homo sapiens
tgaccttcaagacat

SEQ ID NO: 1300209 - DNA, 15 bp, Homo sapiens
atgaccttcaagaca

SEQ ID NO: 1300210 - DNA, 15 bp, Homo sapiens
aatgaccttcaagac

SEQ ID NO: 1300211 - DNA, 15 bp, Homo sapiens
taatgaccttcaaga

SEQ ID NO: 1300212 - DNA, 15 bp, Homo sapiens
ataatgaccttcaag

SEQ ID NO: 1300213 - DNA, 15 bp, Homo sapiens
cataatgaccttcaa

SEQ ID NO: 1300214 - DNA, 15 bp, Homo sapiens
acataatgaccttca

SEQ ID NO: 1300215 - DNA, 15 bp, Homo sapiens
aacataatgaccttc

SEQ ID NO: 1300216 - DNA, 15 bp, Homo sapiens
aaacataatgacctt

SEQ ID NO: 1300217 - DNA, 15 bp, Homo sapiens
aaaacataatgacct

SEQ ID NO: 1300218 - DNA, 15 bp, Homo sapiens
aaaaacataatgacc

SEQ ID NO: 1300219 - DNA, 15 bp, Homo sapiens
gaaaaacataatgac

SEQ ID NO: 1300220 - DNA, 15 bp, Homo sapiens
ggaaaaacataatga

SEQ ID NO: 1300221 - DNA, 15 bp, Homo sapiens
aggaaaaacataatg

SEQ ID NO: 1300222 - DNA, 15 bp, Homo sapiens
aaggaaaaacataat

SEQ ID NO: 1300223 - DNA, 15 bp, Homo sapiens
gaaggaaaaacataa

SEQ ID NO: 1300224 - DNA, 15 bp, Homo sapiens
tgaaggaaaaacata

SEQ ID NO: 1300225 - DNA, 15 bp, Homo sapiens
atgaaggaaaaacat

SEQ ID NO: 1300226 - DNA, 15 bp, Homo sapiens
aatgaaggaaaaaca

SEQ ID NO: 1300227 - DNA, 15 bp, Homo sapiens
aaatgaaggaaaaac

SEQ ID NO: 1300228 - DNA, 15 bp, Homo sapiens
aaaatgaaggaaaaa

SEQ ID NO: 1300229 - DNA, 15 bp, Homo sapiens
taaaatgaaggaaaa

SEQ ID NO: 1300230 - DNA, 15 bp, Homo sapiens
gtaaaatgaaggaaa

SEQ ID NO: 1300231 - DNA, 15 bp, Homo sapiens
agtaaaatgaaggaa

SEQ ID NO: 1300232 - DNA, 15 bp, Homo sapiens
aagtaaaatgaagga

SEQ ID NO: 1300233 - DNA, 15 bp, Homo sapiens
gaagtaaaatgaagg

SEQ ID NO: 1300234 - DNA, 15 bp, Homo sapiens
ggaagtaaaatgaag

SEQ ID NO: 1300235 - DNA, 15 bp, Homo sapiens
aggaagtaaaatgaa

SEQ ID NO: 1300236 - DNA, 15 bp, Homo sapiens
aaggaagtaaaatga

SEQ ID NO: 1300237 - DNA, 15 bp, Homo sapiens
taaggaagtaaaatg

SEQ ID NO: 1300238 - DNA, 15 bp, Homo sapiens
ataaggaagtaaaat

SEQ ID NO: 1300239 - DNA, 15 bp, Homo sapiens
aataaggaagtaaaa

SEQ ID NO: 1300240 - DNA, 15 bp, Homo sapiens
taataaggaagtaaa

SEQ ID NO: 1300241 - DNA, 15 bp, Homo sapiens
ctaataaggaagtaa

SEQ ID NO: 1300242 - DNA, 15 bp, Homo sapiens
actaataaggaagta

SEQ ID NO: 1300243 - DNA, 15 bp, Homo sapiens
aactaataaggaagt

SEQ ID NO: 1300244 - DNA, 15 bp, Homo sapiens
gaactaataaggaag

SEQ ID NO: 1300245 - DNA, 15 bp, Homo sapiens
tgaactaataaggaa

SEQ ID NO: 1300246 - DNA, 15 bp, Homo sapiens
ttgaactaataagga

SEQ ID NO: 1300247 - DNA, 15 bp, Homo sapiens
tttgaactaataagg

SEQ ID NO: 1300248 - DNA, 15 bp, Homo sapiens
atttgaactaataag

SEQ ID NO: 1300249 - DNA, 15 bp, Homo sapiens
aatttgaactaataa

SEQ ID NO: 1300250 - DNA, 15 bp, Homo sapiens
aaatttgaactaata

SEQ ID NO: 1300251 - DNA, 15 bp, Homo sapiens
gaaatttgaactaat

SEQ ID NO: 1300252 - DNA, 15 bp, Homo sapiens
agaaatttgaactaa

SEQ ID NO: 1300253 - DNA, 15 bp, Homo sapiens
aagaaatttgaacta

SEQ ID NO: 1300254 - DNA, 15 bp, Homo sapiens
gaagaaatttgaact

SEQ ID NO: 1300255 - DNA, 15 bp, Homo sapiens
tgaagaaatttgaac

SEQ ID NO: 1300256 - DNA, 15 bp, Homo sapiens
atgaagaaatttgaa

SEQ ID NO: 1300257 - DNA, 15 bp, Homo sapiens
aatgaagaaatttga

SEQ ID NO: 1300258 - DNA, 15 bp, Homo sapiens
aaatgaagaaatttg

SEQ ID NO: 1300259 - DNA, 15 bp, Homo sapiens
aaaatgaagaaattt

SEQ ID NO: 1300260 - DNA, 15 bp, Homo sapiens
aaaaatgaagaaatt

SEQ ID NO: 1300261 - DNA, 15 bp, Homo sapiens
taaaaatgaagaaat

SEQ ID NO: 1300262 - DNA, 15 bp, Homo sapiens
ttaaaaatgaagaaa

SEQ ID NO: 1300263 - DNA, 15 bp, Homo sapiens
tttaaaaatgaagaa

SEQ ID NO: 1300264 - DNA, 15 bp, Homo sapiens
ttttaaaaatgaaga

SEQ ID NO: 1300265 - DNA, 15 bp, Homo sapiens
attttaaaaatgaag

SEQ ID NO: 1300266 - DNA, 15 bp, Homo sapiens
ttaattttaaaaatg

SEQ ID NO: 1300267 - DNA, 15 bp, Homo sapiens
attaattttaaaaat

SEQ ID NO: 1300268 - DNA, 15 bp, Homo sapiens
cattaattttaaaaa

SEQ ID NO: 1300269 - DNA, 15 bp, Homo sapiens
gcattaattttaaaa

SEQ ID NO: 1300270 - DNA, 15 bp, Homo sapiens
ggcattaattttaaa

SEQ ID NO: 1300271 - DNA, 15 bp, Homo sapiens
tggcattaattttaa

SEQ ID NO: 1300272 - DNA, 15 bp, Homo sapiens
gtggcattaatttta

SEQ ID NO: 1300273 - DNA, 15 bp, Homo sapiens
ggtggcattaatttt

SEQ ID NO: 1300274 - DNA, 15 bp, Homo sapiens
aggtggcattaattt

SEQ ID NO: 1300275 - DNA, 15 bp, Homo sapiens
aaggtggcattaatt

SEQ ID NO: 1300276 - DNA, 15 bp, Homo sapiens
gaaggtggcattaat

SEQ ID NO: 1300277 - DNA, 15 bp, Homo sapiens
ggaaggtggcattaa

SEQ ID NO: 1300278 - DNA, 15 bp, Homo sapiens
gggaaggtggcatta

SEQ ID NO: 1300279 - DNA, 15 bp, Homo sapiens
agggaaggtggcatt

SEQ ID NO: 1300280 - DNA, 15 bp, Homo sapiens
gagggaaggtggcat

SEQ ID NO: 1300281 - DNA, 15 bp, Homo sapiens
ggagggaaggtggca

SEQ ID NO: 1300282 - DNA, 15 bp, Homo sapiens
tggagggaaggtggc

SEQ ID NO: 1300283 - DNA, 15 bp, Homo sapiens
atggagggaaggtgg

SEQ ID NO: 1300284 - DNA, 15 bp, Homo sapiens
catggagggaaggtg

SEQ ID NO: 1300285 - DNA, 15 bp, Homo sapiens
acatggagggaaggt

SEQ ID NO: 1300286 - DNA, 15 bp, Homo sapiens
tacatggagggaagg

SEQ ID NO: 1300287 - DNA, 15 bp, Homo sapiens
ttacatggagggaag

SEQ ID NO: 1300288 - DNA, 15 bp, Homo sapiens
tttacatggagggaa

SEQ ID NO: 1300289 - DNA, 15 bp, Homo sapiens
ttttacatggaggga

SEQ ID NO: 1300290 - DNA, 15 bp, Homo sapiens
attttacatggaggg

SEQ ID NO: 1300291 - DNA, 15 bp, Homo sapiens
gattttacatggagg

SEQ ID NO: 1300292 - DNA, 15 bp, Homo sapiens
agattttacatggag

SEQ ID NO: 1300293 - DNA, 15 bp, Homo sapiens
aagattttacatgga

SEQ ID NO: 1300294 - DNA, 15 bp, Homo sapiens
taagattttacatgg

SEQ ID NO: 1300295 - DNA, 15 bp, Homo sapiens
ctaagattttacatg

SEQ ID NO: 1300296 - DNA, 15 bp, Homo sapiens
tctaagattttacat

SEQ ID NO: 1300297 - DNA, 15 bp, Homo sapiens
ttctaagattttaca

SEQ ID NO: 1300298 - DNA, 15 bp, Homo sapiens
cttctaagattttac

SEQ ID NO: 1300299 - DNA, 15 bp, Homo sapiens
gcttctaagatttta

SEQ ID NO: 1300300 - DNA, 15 bp, Homo sapiens
agcttctaagatttt

SEQ ID NO: 1300301 - DNA, 15 bp, Homo sapiens
tagcttctaagattt

SEQ ID NO: 1300302 - DNA, 15 bp, Homo sapiens
atagcttctaagatt

SEQ ID NO: 1300303 - DNA, 15 bp, Homo sapiens
catagcttctaagat

SEQ ID NO: 1300304 - DNA, 15 bp, Homo sapiens
tcatagcttctaaga

SEQ ID NO: 1300305 - DNA, 15 bp, Homo sapiens
ttcatagcttctaag

SEQ ID NO: 1300306 - DNA, 15 bp, Homo sapiens
gttcatagcttctaa

SEQ ID NO: 1300307 - DNA, 15 bp, Homo sapiens
tgttcatagcttcta

SEQ ID NO: 1300308 - DNA, 15 bp, Homo sapiens
atgttcatagcttct

SEQ ID NO: 1300309 - DNA, 15 bp, Homo sapiens
aatgttcatagcttc

SEQ ID NO: 1300310 - DNA, 15 bp, Homo sapiens
taaaatgttcatagc

SEQ ID NO: 1300311 - DNA, 15 bp, Homo sapiens
ttaaaatgttcatag

SEQ ID NO: 1300312 - DNA, 15 bp, Homo sapiens
attaaaatgttcata

SEQ ID NO: 1300313 - DNA, 15 bp, Homo sapiens
cattaaaatgttcat

SEQ ID NO: 1300314 - DNA, 15 bp, Homo sapiens
ccattaaaatgttca

SEQ ID NO: 1300315 - DNA, 15 bp, Homo sapiens
tccattaaaatgttc

SEQ ID NO: 1300316 - DNA, 15 bp, Homo sapiens
gtccattaaaatgtt

SEQ ID NO: 1300317 - DNA, 15 bp, Homo sapiens
tgtccattaaaatgt

SEQ ID NO: 1300318 - DNA, 15 bp, Homo sapiens
atgtccattaaaatg

SEQ ID NO: 1300319 - DNA, 15 bp, Homo sapiens
aatgtccattaaaat

SEQ ID NO: 1300320 - DNA, 15 bp, Homo sapiens
aaatgtccattaaaa

SEQ ID NO: 1300321 - DNA, 15 bp, Homo sapiens
aaaatgtccattaaa

SEQ ID NO: 1300322 - DNA, 15 bp, Homo sapiens
caaaatgtccattaa

SEQ ID NO: 1300323 - DNA, 15 bp, Homo sapiens
ccaaaatgtccatta

SEQ ID NO: 1300324 - DNA, 15 bp, Homo sapiens
gccaaaatgtccatt

SEQ ID NO: 1300325 - DNA, 15 bp, Homo sapiens
tgccaaaatgtccat

SEQ ID NO: 1300326 - DNA, 15 bp, Homo sapiens
ttgccaaaatgtcca

SEQ ID NO: 1300327 - DNA, 15 bp, Homo sapiens
gttgccaaaatgtcc

SEQ ID NO: 1300328 - DNA, 15 bp, Homo sapiens
tgttgccaaaatgtc

SEQ ID NO: 1300329 - DNA, 15 bp, Homo sapiens
ttgttgccaaaatgt

SEQ ID NO: 1300330 - DNA, 15 bp, Homo sapiens
attgttgccaaaatg

SEQ ID NO: 1300331 - DNA, 15 bp, Homo sapiens
aattgttgccaaaat

SEQ ID NO: 1300332 - DNA, 15 bp, Homo sapiens
gaattgttgccaaaa

SEQ ID NO: 1300333 - DNA, 15 bp, Homo sapiens
agaattgttgccaaa

SEQ ID NO: 1300334 - DNA, 15 bp, Homo sapiens
aagaattgttgccaa

SEQ ID NO: 1300335 - DNA, 15 bp, Homo sapiens
aaagaattgttgcca

SEQ ID NO: 1300336 - DNA, 15 bp, Homo sapiens
aaaagaattgttgcc

SEQ ID NO: 1300337 - DNA, 15 bp, Homo sapiens
taaaagaattgttgc

SEQ ID NO: 1300338 - DNA, 15 bp, Homo sapiens
ataaaagaattgttg

SEQ ID NO: 1300339 - DNA, 15 bp, Homo sapiens
cataaaagaattgtt

SEQ ID NO: 1300340 - DNA, 15 bp, Homo sapiens
tcataaaagaattgt

SEQ ID NO: 1300341 - DNA, 15 bp, Homo sapiens
gtcataaaagaattg

SEQ ID NO: 1300342 - DNA, 15 bp, Homo sapiens
tgtcataaaagaatt

SEQ ID NO: 1300343 - DNA, 15 bp, Homo sapiens
ctgtcataaaagaat

SEQ ID NO: 1300344 - DNA, 15 bp, Homo sapiens
cctgtcataaaagaa

SEQ ID NO: 1300345 - DNA, 15 bp, Homo sapiens
tcctgtcataaaaga

SEQ ID NO: 1300346 - DNA, 15 bp, Homo sapiens
ttcctgtcataaaag

SEQ ID NO: 1300347 - DNA, 15 bp, Homo sapiens
tttcctgtcataaaa

SEQ ID NO: 1300348 - DNA, 15 bp, Homo sapiens
atttcctgtcataaa

SEQ ID NO: 1300349 - DNA, 15 bp, Homo sapiens
catttcctgtcataa

SEQ ID NO: 1300350 - DNA, 15 bp, Homo sapiens
gcatttcctgtcata

SEQ ID NO: 1300351 - DNA, 15 bp, Homo sapiens
agcatttcctgtcat

SEQ ID NO: 1300352 - DNA, 15 bp, Homo sapiens
aagcatttcctgtca

SEQ ID NO: 1300353 - DNA, 15 bp, Homo sapiens
caagcatttcctgtc

SEQ ID NO: 1300354 - DNA, 15 bp, Homo sapiens
acaagcatttcctgt

SEQ ID NO: 1300355 - DNA, 15 bp, Homo sapiens
aacaagcatttcctg

SEQ ID NO: 1300356 - DNA, 15 bp, Homo sapiens
aaacaagcatttcct

SEQ ID NO: 1300357 - DNA, 15 bp, Homo sapiens
caaacaagcatttcc

SEQ ID NO: 1300358 - DNA, 15 bp, Homo sapiens
acaaacaagcatttc

SEQ ID NO: 1300359 - DNA, 15 bp, Homo sapiens
aacaaacaagcattt

SEQ ID NO: 1300360 - DNA, 15 bp, Homo sapiens
taacaaacaagcatt

SEQ ID NO: 1300361 - DNA, 15 bp, Homo sapiens
ataacaaacaagcat

SEQ ID NO: 1300362 - DNA, 15 bp, Homo sapiens
tataacaaacaagca

SEQ ID NO: 1300363 - DNA, 15 bp, Homo sapiens
atataacaaacaagc

SEQ ID NO: 1300364 - DNA, 15 bp, Homo sapiens
catataacaaacaag

SEQ ID NO: 1300365 - DNA, 15 bp, Homo sapiens
acatataacaaacaa

SEQ ID NO: 1300366 - DNA, 15 bp, Homo sapiens
aacatataacaaaca

SEQ ID NO: 1300367 - DNA, 15 bp, Homo sapiens
aaacatataacaaac

SEQ ID NO: 1300368 - DNA, 15 bp, Homo sapiens
gaaacatataacaaa

SEQ ID NO: 1300369 - DNA, 15 bp, Homo sapiens
agaaacatataacaa

SEQ ID NO: 1300370 - DNA, 15 bp, Homo sapiens
tagaaacatataaca

SEQ ID NO: 1300371 - DNA, 15 bp, Homo sapiens
ttagaaacatataac

SEQ ID NO: 1300372 - DNA, 15 bp, Homo sapiens
cttagaaacatataa

SEQ ID NO: 1300373 - DNA, 15 bp, Homo sapiens
acttagaaacatata

SEQ ID NO: 1300374 - DNA, 15 bp, Homo sapiens
aacttagaaacatat

SEQ ID NO: 1300375 - DNA, 15 bp, Homo sapiens
aaacttagaaacata

SEQ ID NO: 1300376 - DNA, 15 bp, Homo sapiens
caaacttagaaacat

SEQ ID NO: 1300377 - DNA, 15 bp, Homo sapiens
acaaacttagaaaca

SEQ ID NO: 1300378 - DNA, 15 bp, Homo sapiens
cacaaacttagaaac

SEQ ID NO: 1300379 - DNA, 15 bp, Homo sapiens
acacaaacttagaaa

SEQ ID NO: 1300380 - DNA, 15 bp, Homo sapiens
cacacaaacttagaa

SEQ ID NO: 1300381 - DNA, 15 bp, Homo sapiens
gcacacaaacttaga

SEQ ID NO: 1300382 - DNA, 15 bp, Homo sapiens
agcacacaaacttag

SEQ ID NO: 1300383 - DNA, 15 bp, Homo sapiens
cagcacacaaactta

SEQ ID NO: 1300384 - DNA, 15 bp, Homo sapiens
acagcacacaaactt

SEQ ID NO: 1300385 - DNA, 15 bp, Homo sapiens
aacagcacacaaact

SEQ ID NO: 1300386 - DNA, 15 bp, Homo sapiens
aaacagcacacaaac

SEQ ID NO: 1300387 - DNA, 15 bp, Homo sapiens
aaaacagcacacaaa

SEQ ID NO: 1300388 - DNA, 15 bp, Homo sapiens
aaaaacagcacacaa

SEQ ID NO: 1300389 - DNA, 15 bp, Homo sapiens
aaaaaacagcacaca

SEQ ID NO: 1300390 - DNA, 15 bp, Homo sapiens
aaaaaaacagcacac

SEQ ID NO: 1300391 - DNA, 15 bp, Homo sapiens
aaaaaaaacagcaca

SEQ ID NO: 1300392 - DNA, 15 bp, Homo sapiens
aaaaaaaaacagcac

SEQ ID NO: 1300393 - DNA, 15 bp, Homo sapiens
aaaaaaaaaacagca

SEQ ID NO: 1300394 - DNA, 15 bp, Homo sapiens
aaaaaaaaaaacagc

SEQ ID NO: 1300395 - DNA, 15 bp, Homo sapiens
aaaaaaaaaaaacag

SEQ ID NO: 1300396 - DNA, 15 bp, Homo sapiens
ctaaaaaaaaaaaac

SEQ ID NO: 1300397 - DNA, 15 bp, Homo sapiens
tcctaaaaaaaaaaa

SEQ ID NO: 1300398 - DNA, 15 bp, Homo sapiens
ttcctaaaaaaaaaa

SEQ ID NO: 1300399 - DNA, 15 bp, Homo sapiens
attcctaaaaaaaaa

SEQ ID NO: 1300400 - DNA, 15 bp, Homo sapiens
tattcctaaaaaaaa

SEQ ID NO: 1300401 - DNA, 15 bp, Homo sapiens
atattcctaaaaaaa

SEQ ID NO: 1300402 - DNA, 15 bp, Homo sapiens
tatattcctaaaaaa

SEQ ID NO: 1300403 - DNA, 15 bp, Homo sapiens
ctatattcctaaaaa

SEQ ID NO: 1300404 - DNA, 15 bp, Homo sapiens
tctatattcctaaaa

SEQ ID NO: 1300405 - DNA, 15 bp, Homo sapiens
ttctatattcctaaa

SEQ ID NO: 1300406 - DNA, 15 bp, Homo sapiens
attctatattcctaa

SEQ ID NO: 1300407 - DNA, 15 bp, Homo sapiens
aattctatattccta

SEQ ID NO: 1300408 - DNA, 15 bp, Homo sapiens
caattctatattcct

SEQ ID NO: 1300409 - DNA, 15 bp, Homo sapiens
gcaattctatattcc

SEQ ID NO: 1300410 - DNA, 15 bp, Homo sapiens
agcaattctatattc

SEQ ID NO: 1300411 - DNA, 15 bp, Homo sapiens
cagcaattctatatt

SEQ ID NO: 1300412 - DNA, 15 bp, Homo sapiens
tcagcaattctatat

SEQ ID NO: 1300413 - DNA, 15 bp, Homo sapiens
atcagcaattctata

SEQ ID NO: 1300414 - DNA, 15 bp, Homo sapiens
tatcagcaattctat

SEQ ID NO: 1300415 - DNA, 15 bp, Homo sapiens
atatcagcaattcta

SEQ ID NO: 1300416 - DNA, 15 bp, Homo sapiens
aatatcagcaattct

SEQ ID NO: 1300417 - DNA, 15 bp, Homo sapiens
gaatatcagcaattc

SEQ ID NO: 1300418 - DNA, 15 bp, Homo sapiens
agaatatcagcaatt

SEQ ID NO: 1300419 - DNA, 15 bp, Homo sapiens
tagaatatcagcaat

SEQ ID NO: 1300420 - DNA, 15 bp, Homo sapiens
ctagaatatcagcaa

SEQ ID NO: 1300421 - DNA, 15 bp, Homo sapiens
tctagaatatcagca

SEQ ID NO: 1300422 - DNA, 15 bp, Homo sapiens
ttctagaatatcagc

SEQ ID NO: 1300423 - DNA, 15 bp, Homo sapiens
attctagaatatcag

SEQ ID NO: 1300424 - DNA, 15 bp, Homo sapiens
cattctagaatatca

SEQ ID NO: 1300425 - DNA, 15 bp, Homo sapiens
acattctagaatatc

SEQ ID NO: 1300426 - DNA, 15 bp, Homo sapiens
cacattctagaatat

SEQ ID NO: 1300427 - DNA, 15 bp, Homo sapiens
tcacattctagaata

SEQ ID NO: 1300428 - DNA, 15 bp, Homo sapiens
ttcacattctagaat

SEQ ID NO: 1300429 - DNA, 15 bp, Homo sapiens
tttcacattctagaa

SEQ ID NO: 1300430 - DNA, 15 bp, Homo sapiens
ttttcacattctaga

SEQ ID NO: 1300431 - DNA, 15 bp, Homo sapiens
attttcacattctag

SEQ ID NO: 1300432 - DNA, 15 bp, Homo sapiens
cattttcacattcta

SEQ ID NO: 1300433 - DNA, 15 bp, Homo sapiens
acattttcacattct

SEQ ID NO: 1300434 - DNA, 15 bp, Homo sapiens
gacattttcacattc

SEQ ID NO: 1300435 - DNA, 15 bp, Homo sapiens
cgacattttcacatt

SEQ ID NO: 1300436 - DNA, 15 bp, Homo sapiens
gcgacattttcacat

SEQ ID NO: 1300437 - DNA, 15 bp, Homo sapiens
ggcgacattttcaca

SEQ ID NO: 1300438 - DNA, 15 bp, Homo sapiens
tggcgacattttcac

SEQ ID NO: 1300439 - DNA, 15 bp, Homo sapiens
ctggcgacattttca

SEQ ID NO: 1300440 - DNA, 15 bp, Homo sapiens
tctggcgacattttc

SEQ ID NO: 1300441 - DNA, 15 bp, Homo sapiens
gtctggcgacatttt

SEQ ID NO: 1300442 - DNA, 15 bp, Homo sapiens
tgtctggcgacattt

SEQ ID NO: 1300443 - DNA, 15 bp, Homo sapiens
ttgtctggcgacatt

SEQ ID NO: 1300444 - DNA, 15 bp, Homo sapiens
attgtctggcgacat

SEQ ID NO: 1300445 - DNA, 15 bp, Homo sapiens
cattgtctggcgaca

SEQ ID NO: 1300446 - DNA, 15 bp, Homo sapiens
gcattgtctggcgac

SEQ ID NO: 1300447 - DNA, 15 bp, Homo sapiens
tgcattgtctggcga

SEQ ID NO: 1300448 - DNA, 15 bp, Homo sapiens
gtgcattgtctggcg

SEQ ID NO: 1300449 - DNA, 15 bp, Homo sapiens
tgtgcattgtctggc

SEQ ID NO: 1300450 - DNA, 15 bp, Homo sapiens
atgtgcattgtctgg

SEQ ID NO: 1300451 - DNA, 15 bp, Homo sapiens
aatgtgcattgtctg

SEQ ID NO: 1300452 - DNA, 15 bp, Homo sapiens
taatgtgcattgtct

SEQ ID NO: 1300453 - DNA, 15 bp, Homo sapiens
gtaatgtgcattgtc

SEQ ID NO: 1300454 - DNA, 15 bp, Homo sapiens
tgtaatgtgcattgt

SEQ ID NO: 1300455 - DNA, 15 bp, Homo sapiens
ttgtaatgtgcattg

SEQ ID NO: 1300456 - DNA, 15 bp, Homo sapiens
attgtaatgtgcatt

SEQ ID NO: 1300457 - DNA, 15 bp, Homo sapiens
cattgtaatgtgcat

SEQ ID NO: 1300458 - DNA, 15 bp, Homo sapiens
tcattgtaatgtgca

SEQ ID NO: 1300459 - DNA, 15 bp, Homo sapiens
ttcattgtaatgtgc

SEQ ID NO: 1300460 - DNA, 15 bp, Homo sapiens
tttcattgtaatgtg

SEQ ID NO: 1300461 - DNA, 15 bp, Homo sapiens
ttttcattgtaatgt

SEQ ID NO: 1300462 - DNA, 15 bp, Homo sapiens
attttcattgtaatg

SEQ ID NO: 1300463 - DNA, 15 bp, Homo sapiens
aattttcattgtaat

SEQ ID NO: 1300464 - DNA, 15 bp, Homo sapiens
taattttcattgtaa

SEQ ID NO: 1300465 - DNA, 15 bp, Homo sapiens
ataattttcattgta

SEQ ID NO: 1300466 - DNA, 15 bp, Homo sapiens
tataattttcattgt

SEQ ID NO: 1300467 - DNA, 15 bp, Homo sapiens
ttataattttcattg

SEQ ID NO: 1300468 - DNA, 15 bp, Homo sapiens
attataattttcatt

SEQ ID NO: 1300469 - DNA, 15 bp, Homo sapiens
gattataattttcat

SEQ ID NO: 1300470 - DNA, 15 bp, Homo sapiens
agattataattttca

SEQ ID NO: 1300471 - DNA, 15 bp, Homo sapiens
aagattataattttc

SEQ ID NO: 1300472 - DNA, 15 bp, Homo sapiens
taagattataatttt

SEQ ID NO: 1300473 - DNA, 15 bp, Homo sapiens
ataagattataattt

SEQ ID NO: 1300474 - DNA, 15 bp, Homo sapiens
aataagattataatt

SEQ ID NO: 1300475 - DNA, 15 bp, Homo sapiens
aaataagattataat

SEQ ID NO: 1300476 - DNA, 15 bp, Homo sapiens
aaaataagattataa

SEQ ID NO: 1300477 - DNA, 15 bp, Homo sapiens
aaaaataagattata

SEQ ID NO: 1300478 - DNA, 15 bp, Homo sapiens
taaaaataagattat

SEQ ID NO: 1300479 - DNA, 15 bp, Homo sapiens
ataaaaataagatta

SEQ ID NO: 1300480 - DNA, 15 bp, Homo sapiens
aataaaaataagatt

SEQ ID NO: 1300481 - DNA, 15 bp, Homo sapiens
aaataaaaataagat

SEQ ID NO: 1300482 - DNA, 15 bp, Homo sapiens
taaataaaaataaga

SEQ ID NO: 1300483 - DNA, 15 bp, Homo sapiens
ataaataaaaataag

SEQ ID NO: 1300484 - DNA, 15 bp, Homo sapiens
tataaataaaaataa

SEQ ID NO: 1300485 - DNA, 15 bp, Homo sapiens
atataaataaaaata

SEQ ID NO: 1300486 - DNA, 15 bp, Homo sapiens
tatataaataaaaat

SEQ ID NO: 1300487 - DNA, 15 bp, Homo sapiens
atatataaataaaaa

SEQ ID NO: 1300488 - DNA, 15 bp, Homo sapiens
tatatataaataaaa

SEQ ID NO: 1300489 - DNA, 15 bp, Homo sapiens
atatatataaataaa

SEQ ID NO: 1300490 - DNA, 15 bp, Homo sapiens
tatatatataaataa

SEQ ID NO: 1300491 - DNA, 15 bp, Homo sapiens
tatatatatataaat

SEQ ID NO: 1300492 - DNA, 15 bp, Homo sapiens
tcaaaaatatatata

SEQ ID NO: 1300493 - DNA, 15 bp, Homo sapiens
ctcaaaaatatatat

SEQ ID NO: 1300494 - DNA, 15 bp, Homo sapiens
tctcaaaaatatata

SEQ ID NO: 1300495 - DNA, 15 bp, Homo sapiens
gtctcaaaaatatat

SEQ ID NO: 1300496 - DNA, 15 bp, Homo sapiens
tgtctcaaaaatata

SEQ ID NO: 1300497 - DNA, 15 bp, Homo sapiens
ctgtctcaaaaatat

SEQ ID NO: 1300498 - DNA, 15 bp, Homo sapiens
aactctgtctcaaaa

SEQ ID NO: 1300499 - DNA, 15 bp, Homo sapiens
aaactctgtctcaaa

SEQ ID NO: 1300500 - DNA, 15 bp, Homo sapiens
aggcaacagagtgaa

SEQ ID NO: 1300501 - DNA, 15 bp, Homo sapiens
tcactccagcctagg

SEQ ID NO: 1300502 - DNA, 15 bp, Homo sapiens
ttcactccagcctag

SEQ ID NO: 1300503 - DNA, 15 bp, Homo sapiens
tttcactccagccta

SEQ ID NO: 1300504 - DNA, 15 bp, Homo sapiens
atttcactccagcct

SEQ ID NO: 1300505 - DNA, 15 bp, Homo sapiens
catttcactccagcc

SEQ ID NO: 1300506 - DNA, 15 bp, Homo sapiens
ccatttcactccagc

SEQ ID NO: 1300507 - DNA, 15 bp, Homo sapiens
gccatttcactccag

SEQ ID NO: 1300508 - DNA, 15 bp, Homo sapiens
tgccatttcactcca

SEQ ID NO: 1300509 - DNA, 15 bp, Homo sapiens
atgccatttcactcc

SEQ ID NO: 1300510 - DNA, 15 bp, Homo sapiens
catgccatttcactc

SEQ ID NO: 1300511 - DNA, 15 bp, Homo sapiens
tcatgccatttcact

SEQ ID NO: 1300512 - DNA, 15 bp, Homo sapiens
atcatgccatttcac

SEQ ID NO: 1300513 - DNA, 15 bp, Homo sapiens
tatcatgccatttca

SEQ ID NO: 1300514 - DNA, 15 bp, Homo sapiens
ttatcatgccatttc

SEQ ID NO: 1300515 - DNA, 15 bp, Homo sapiens
attatcatgccattt

SEQ ID NO: 1300516 - DNA, 15 bp, Homo sapiens
aattatcatgccatt

SEQ ID NO: 1300517 - DNA, 15 bp, Homo sapiens
caattatcatgccat

SEQ ID NO: 1300518 - DNA, 15 bp, Homo sapiens
ccaattatcatgcca

SEQ ID NO: 1300519 - DNA, 15 bp, Homo sapiens
gccaattatcatgcc

SEQ ID NO: 1300520 - DNA, 15 bp, Homo sapiens
agccaattatcatgc

SEQ ID NO: 1300521 - DNA, 15 bp, Homo sapiens
gagccaattatcatg

SEQ ID NO: 1300522 - DNA, 15 bp, Homo sapiens
tgagccaattatcat

SEQ ID NO: 1300523 - DNA, 15 bp, Homo sapiens
gtgagccaattatca

SEQ ID NO: 1300524 - DNA, 15 bp, Homo sapiens
agtgagccaattatc

SEQ ID NO: 1300525 - DNA, 15 bp, Homo sapiens
tagtgagccaattat

SEQ ID NO: 1300526 - DNA, 15 bp, Homo sapiens
gtagtgagccaatta

SEQ ID NO: 1300527 - DNA, 15 bp, Homo sapiens
tgtagtgagccaatt

SEQ ID NO: 1300528 - DNA, 15 bp, Homo sapiens
ttgtagtgagccaat

SEQ ID NO: 1300529 - DNA, 15 bp, Homo sapiens
atggaggttgtagtg

SEQ ID NO: 1300530 - DNA, 15 bp, Homo sapiens
gatggaggttgtagt

SEQ ID NO: 1300531 - DNA, 15 bp, Homo sapiens
agatggaggttgtag

SEQ ID NO: 1300532 - DNA, 15 bp, Homo sapiens
gagatggaggttgta

SEQ ID NO: 1300533 - DNA, 15 bp, Homo sapiens
ggagatggaggttgt

SEQ ID NO: 1300534 - DNA, 15 bp, Homo sapiens
aggagatggaggttg

SEQ ID NO: 1300535 - DNA, 15 bp, Homo sapiens
caggagatggaggtt

SEQ ID NO: 1300536 - DNA, 15 bp, Homo sapiens
ccaggagatggaggt

SEQ ID NO: 1300537 - DNA, 15 bp, Homo sapiens
cccaggagatggagg

SEQ ID NO: 1300538 - DNA, 15 bp, Homo sapiens
acccaggagatggag

SEQ ID NO: 1300539 - DNA, 15 bp, Homo sapiens
aacccaggagatgga

SEQ ID NO: 1300540 - DNA, 15 bp, Homo sapiens
gaacccaggagatgg

SEQ ID NO: 1300541 - DNA, 15 bp, Homo sapiens
tgaacccaggagatg

SEQ ID NO: 1300542 - DNA, 15 bp, Homo sapiens
ttgaacccaggagat

SEQ ID NO: 1300543 - DNA, 15 bp, Homo sapiens
aagaatcgcttgaac

SEQ ID NO: 1300544 - DNA, 15 bp, Homo sapiens
caagaatcgcttgaa

SEQ ID NO: 1300545 - DNA, 15 bp, Homo sapiens
acaagaatcgcttga

SEQ ID NO: 1300546 - DNA, 15 bp, Homo sapiens
cacaagaatcgcttg

SEQ ID NO: 1300547 - DNA, 15 bp, Homo sapiens
tcacaagaatcgctt

SEQ ID NO: 1300548 - DNA, 15 bp, Homo sapiens
gtcacaagaatcgct

SEQ ID NO: 1300549 - DNA, 15 bp, Homo sapiens
agtcacaagaatcgc

SEQ ID NO: 1300550 - DNA, 15 bp, Homo sapiens
gagtcacaagaatcg

SEQ ID NO: 1300551 - DNA, 15 bp, Homo sapiens
tgagtcacaagaatc

SEQ ID NO: 1300552 - DNA, 15 bp, Homo sapiens
ctgagtcacaagaat

SEQ ID NO: 1300553 - DNA, 15 bp, Homo sapiens
gctgagtcacaagaa

SEQ ID NO: 1300554 - DNA, 15 bp, Homo sapiens
ggctgagtcacaaga

SEQ ID NO: 1300555 - DNA, 15 bp, Homo sapiens
aggctgagtcacaag

SEQ ID NO: 1300556 - DNA, 15 bp, Homo sapiens
gaggctgagtcacaa

SEQ ID NO: 1300557 - DNA, 15 bp, Homo sapiens
ggaggctgagtcaca

SEQ ID NO: 1300558 - DNA, 15 bp, Homo sapiens
gggaggctgagtcac

SEQ ID NO: 1300559 - DNA, 15 bp, Homo sapiens
tgggaggctgagtca

SEQ ID NO: 1300560 - DNA, 15 bp, Homo sapiens
ttgggaggctgagtc

SEQ ID NO: 1300561 - DNA, 15 bp, Homo sapiens
cttgggaggctgagt

SEQ ID NO: 1300562 - DNA, 15 bp, Homo sapiens
caatcccagctactt

SEQ ID NO: 1300563 - DNA, 15 bp, Homo sapiens
gcaatcccagctact

SEQ ID NO: 1300564 - DNA, 15 bp, Homo sapiens
tgcaatcccagctac

SEQ ID NO: 1300565 - DNA, 15 bp, Homo sapiens
ctgcaatcccagcta

SEQ ID NO: 1300566 - DNA, 15 bp, Homo sapiens
tctgcaatcccagct

SEQ ID NO: 1300567 - DNA, 15 bp, Homo sapiens
ttctgcaatcccagc

SEQ ID NO: 1300568 - DNA, 15 bp, Homo sapiens
cttctgcaatcccag

SEQ ID NO: 1300569 - DNA, 15 bp, Homo sapiens
gcttctgcaatccca

SEQ ID NO: 1300570 - DNA, 15 bp, Homo sapiens
ggcttctgcaatccc

SEQ ID NO: 1300571 - DNA, 15 bp, Homo sapiens
aggcttctgcaatcc

SEQ ID NO: 1300572 - DNA, 15 bp, Homo sapiens
caggcttctgcaatc

SEQ ID NO: 1300573 - DNA, 15 bp, Homo sapiens
gcaggcttctgcaat

SEQ ID NO: 1300574 - DNA, 15 bp, Homo sapiens
agcaggcttctgcaa

SEQ ID NO: 1300575 - DNA, 15 bp, Homo sapiens
tagcaggcttctgca

SEQ ID NO: 1300576 - DNA, 15 bp, Homo sapiens
gtagcaggcttctgc

SEQ ID NO: 1300577 - DNA, 15 bp, Homo sapiens
ggtagcaggcttctg

SEQ ID NO: 1300578 - DNA, 15 bp, Homo sapiens
tggtagcaggcttct

SEQ ID NO: 1300579 - DNA, 15 bp, Homo sapiens
atggtagcaggcttc

SEQ ID NO: 1300580 - DNA, 15 bp, Homo sapiens
catggtagcaggctt

SEQ ID NO: 1300581 - DNA, 15 bp, Homo sapiens
acatggtagcaggct

SEQ ID NO: 1300582 - DNA, 15 bp, Homo sapiens
gacatggtagcaggc

SEQ ID NO: 1300583 - DNA, 15 bp, Homo sapiens
ggacatggtagcagg

SEQ ID NO: 1300584 - DNA, 15 bp, Homo sapiens
tggacatggtagcag

SEQ ID NO: 1300585 - DNA, 15 bp, Homo sapiens
ctggacatggtagca

SEQ ID NO: 1300586 - DNA, 15 bp, Homo sapiens
gctggacatggtagc

SEQ ID NO: 1300587 - DNA, 15 bp, Homo sapiens
agctggacatggtag

SEQ ID NO: 1300588 - DNA, 15 bp, Homo sapiens
tagctggacatggta

SEQ ID NO: 1300589 - DNA, 15 bp, Homo sapiens
ttagctggacatggt

SEQ ID NO: 1300590 - DNA, 15 bp, Homo sapiens
attagctggacatgg

SEQ ID NO: 1300591 - DNA, 15 bp, Homo sapiens
aattagctggacatg

SEQ ID NO: 1300592 - DNA, 15 bp, Homo sapiens
taattagctggacat

SEQ ID NO: 1300593 - DNA, 15 bp, Homo sapiens
ataattagctggaca

SEQ ID NO: 1300594 - DNA, 15 bp, Homo sapiens
aataattagctggac

SEQ ID NO: 1300595 - DNA, 15 bp, Homo sapiens
caataattagctgga

SEQ ID NO: 1300596 - DNA, 15 bp, Homo sapiens
acaataattagctgg

SEQ ID NO: 1300597 - DNA, 15 bp, Homo sapiens
tacaataattagctg

SEQ ID NO: 1300598 - DNA, 15 bp, Homo sapiens
ttacaataattagct

SEQ ID NO: 1300599 - DNA, 15 bp, Homo sapiens
attacaataattagc

SEQ ID NO: 1300600 - DNA, 15 bp, Homo sapiens
aattacaataattag

SEQ ID NO: 1300601 - DNA, 15 bp, Homo sapiens
aaattacaataatta

SEQ ID NO: 1300602 - DNA, 15 bp, Homo sapiens
aaaattacaataatt

SEQ ID NO: 1300603 - DNA, 15 bp, Homo sapiens
aaaaattacaataat

SEQ ID NO: 1300604 - DNA, 15 bp, Homo sapiens
caaaaattacaataa

SEQ ID NO: 1300605 - DNA, 15 bp, Homo sapiens
acaaaaattacaata

SEQ ID NO: 1300606 - DNA, 15 bp, Homo sapiens
cacaaaaattacaat

SEQ ID NO: 1300607 - DNA, 15 bp, Homo sapiens
ccacaaaaattacaa

SEQ ID NO: 1300608 - DNA, 15 bp, Homo sapiens
tccacaaaaattaca

SEQ ID NO: 1300609 - DNA, 15 bp, Homo sapiens
ctccacaaaaattac

SEQ ID NO: 1300610 - DNA, 15 bp, Homo sapiens
atctccacaaaaatt

SEQ ID NO: 1300611 - DNA, 15 bp, Homo sapiens
catctccacaaaaat

SEQ ID NO: 1300612 - DNA, 15 bp, Homo sapiens
ccatctccacaaaaa

SEQ ID NO: 1300613 - DNA, 15 bp, Homo sapiens
accatctccacaaaa

SEQ ID NO: 1300614 - DNA, 15 bp, Homo sapiens
caccatctccacaaa

SEQ ID NO: 1300615 - DNA, 15 bp, Homo sapiens
acaccatctccacaa

SEQ ID NO: 1300616 - DNA, 15 bp, Homo sapiens
aacaccatctccaca

SEQ ID NO: 1300617 - DNA, 15 bp, Homo sapiens
aaacaccatctccac

SEQ ID NO: 1300618 - DNA, 15 bp, Homo sapiens
gaaacaccatctcca

SEQ ID NO: 1300619 - DNA, 15 bp, Homo sapiens
tgaaacaccatctcc

SEQ ID NO: 1300620 - DNA, 15 bp, Homo sapiens
tgtgaaacaccatct

SEQ ID NO: 1300621 - DNA, 15 bp, Homo sapiens
ttgtgaaacaccatc

SEQ ID NO: 1300622 - DNA, 15 bp, Homo sapiens
attgtgaaacaccat

SEQ ID NO: 1300623 - DNA, 15 bp, Homo sapiens
cattgtgaaacacca

SEQ ID NO: 1300624 - DNA, 15 bp, Homo sapiens
acattgtgaaacacc

SEQ ID NO: 1300625 - DNA, 15 bp, Homo sapiens
aacattgtgaaacac

SEQ ID NO: 1300626 - DNA, 15 bp, Homo sapiens
aaacattgtgaaaca

SEQ ID NO: 1300627 - DNA, 15 bp, Homo sapiens
gaaacattgtgaaac

SEQ ID NO: 1300628 - DNA, 15 bp, Homo sapiens
ggaaacattgtgaaa

SEQ ID NO: 1300629 - DNA, 15 bp, Homo sapiens
gggaaacattgtgaa

SEQ ID NO: 1300630 - DNA, 15 bp, Homo sapiens
tgggaaacattgtga

SEQ ID NO: 1300631 - DNA, 15 bp, Homo sapiens
ctgggaaacattgtg

SEQ ID NO: 1300632 - DNA, 15 bp, Homo sapiens
cctgggaaacattgt

SEQ ID NO: 1300633 - DNA, 15 bp, Homo sapiens
gcctgggaaacattg

SEQ ID NO: 1300634 - DNA, 15 bp, Homo sapiens
agcctgggaaacatt

SEQ ID NO: 1300635 - DNA, 15 bp, Homo sapiens
cagcctgggaaacat

SEQ ID NO: 1300636 - DNA, 15 bp, Homo sapiens
ccagcctgggaaaca

SEQ ID NO: 1300637 - DNA, 15 bp, Homo sapiens
accagcctgggaaac

SEQ ID NO: 1300638 - DNA, 15 bp, Homo sapiens
gaccagcctgggaaa

SEQ ID NO: 1300639 - DNA, 15 bp, Homo sapiens
agaccagcctgggaa

SEQ ID NO: 1300640 - DNA, 15 bp, Homo sapiens
gagaccagcctggga

SEQ ID NO: 1300641 - DNA, 15 bp, Homo sapiens
tggagtttgagacca

SEQ ID NO: 1300642 - DNA, 15 bp, Homo sapiens
ctggagtttgagacc

SEQ ID NO: 1300643 - DNA, 15 bp, Homo sapiens
tctggagtttgagac

SEQ ID NO: 1300644 - DNA, 15 bp, Homo sapiens
gtctggagtttgaga

SEQ ID NO: 1300645 - DNA, 15 bp, Homo sapiens
ggtctggagtttgag

SEQ ID NO: 1300646 - DNA, 15 bp, Homo sapiens
aggtctggagtttga

SEQ ID NO: 1300647 - DNA, 15 bp, Homo sapiens
gaggtctggagtttg

SEQ ID NO: 1300648 - DNA, 15 bp, Homo sapiens
tgaggtctggagttt

SEQ ID NO: 1300649 - DNA, 15 bp, Homo sapiens
ctgaggtctggagtt

SEQ ID NO: 1300650 - DNA, 15 bp, Homo sapiens
cctgaggtctggagt

SEQ ID NO: 1300651 - DNA, 15 bp, Homo sapiens
acctgaggtctggag

SEQ ID NO: 1300652 - DNA, 15 bp, Homo sapiens
cacctgaggtctgga

SEQ ID NO: 1300653 - DNA, 15 bp, Homo sapiens
tcacctgaggtctgg

SEQ ID NO: 1300654 - DNA, 15 bp, Homo sapiens
atcacctgaggtctg

SEQ ID NO: 1300655 - DNA, 15 bp, Homo sapiens
gatcacctgaggtct

SEQ ID NO: 1300656 - DNA, 15 bp, Homo sapiens
agcagatcacctgag

SEQ ID NO: 1300657 - DNA, 15 bp, Homo sapiens
gagcagatcacctga

SEQ ID NO: 1300658 - DNA, 15 bp, Homo sapiens
tgagcagatcacctg

SEQ ID NO: 1300659 - DNA, 15 bp, Homo sapiens
gtgagcagatcacct

SEQ ID NO: 1300660 - DNA, 15 bp, Homo sapiens
agtgagcagatcacc

SEQ ID NO: 1300661 - DNA, 15 bp, Homo sapiens
aagtgagcagatcac

SEQ ID NO: 1300662 - DNA, 15 bp, Homo sapiens
gaagtgagcagatca

SEQ ID NO: 1300663 - DNA, 15 bp, Homo sapiens
tgaagtgagcagatc

SEQ ID NO: 1300664 - DNA, 15 bp, Homo sapiens
ctgaagtgagcagat

SEQ ID NO: 1300665 - DNA, 15 bp, Homo sapiens
actgaagtgagcaga

SEQ ID NO: 1300666 - DNA, 15 bp, Homo sapiens
aactgaagtgagcag

SEQ ID NO: 1300667 - DNA, 15 bp, Homo sapiens
aaactgaagtgagca

SEQ ID NO: 1300668 - DNA, 15 bp, Homo sapiens
aaaactgaagtgagc

SEQ ID NO: 1300669 - DNA, 15 bp, Homo sapiens
gaaaactgaagtgag

SEQ ID NO: 1300670 - DNA, 15 bp, Homo sapiens
ggaaaactgaagtga

SEQ ID NO: 1300671 - DNA, 15 bp, Homo sapiens
tggaaaactgaagtg

SEQ ID NO: 1300672 - DNA, 15 bp, Homo sapiens
ttggaaaactgaagt

SEQ ID NO: 1300673 - DNA, 15 bp, Homo sapiens
tttggaaaactgaag

SEQ ID NO: 1300674 - DNA, 15 bp, Homo sapiens
ctttggaaaactgaa

SEQ ID NO: 1300675 - DNA, 15 bp, Homo sapiens
actttggaaaactga

SEQ ID NO: 1300676 - DNA, 15 bp, Homo sapiens
cactttggaaaactg

SEQ ID NO: 1300677 - DNA, 15 bp, Homo sapiens
gcactttggaaaact

SEQ ID NO: 1300678 - DNA, 15 bp, Homo sapiens
ggcactttggaaaac

SEQ ID NO: 1300679 - DNA, 15 bp, Homo sapiens
cggcactttggaaaa

SEQ ID NO: 1300680 - DNA, 15 bp, Homo sapiens
ccggcactttggaaa

SEQ ID NO: 1300681 - DNA, 15 bp, Homo sapiens
cccggcactttggaa

SEQ ID NO: 1300682 - DNA, 15 bp, Homo sapiens
tcccggcactttgga

SEQ ID NO: 1300683 - DNA, 15 bp, Homo sapiens
aatcccggcactttg

SEQ ID NO: 1300684 - DNA, 15 bp, Homo sapiens
taatcccggcacttt

SEQ ID NO: 1300685 - DNA, 15 bp, Homo sapiens
gtaatcccggcactt

SEQ ID NO: 1300686 - DNA, 15 bp, Homo sapiens
tgtaatcccggcact

SEQ ID NO: 1300687 - DNA, 15 bp, Homo sapiens
ctgtaatcccggcac

SEQ ID NO: 1300688 - DNA, 15 bp, Homo sapiens
actgtaatcccggca

SEQ ID NO: 1300689 - DNA, 15 bp, Homo sapiens
gactgtaatcccggc

SEQ ID NO: 1300690 - DNA, 15 bp, Homo sapiens
tgactgtaatcccgg

SEQ ID NO: 1300691 - DNA, 15 bp, Homo sapiens
atgactgtaatcccg

SEQ ID NO: 1300692 - DNA, 15 bp, Homo sapiens
gtggctcatgactgt

SEQ ID NO: 1300693 - DNA, 15 bp, Homo sapiens
agtggctcatgactg

SEQ ID NO: 1300694 - DNA, 15 bp, Homo sapiens
cagtggctcatgact

SEQ ID NO: 1300695 - DNA, 15 bp, Homo sapiens
acagtggctcatgac

SEQ ID NO: 1300696 - DNA, 15 bp, Homo sapiens
cacagtggctcatga

SEQ ID NO: 1300697 - DNA, 15 bp, Homo sapiens
tatggccaggcacag

SEQ ID NO: 1300698 - DNA, 15 bp, Homo sapiens
ttatggccaggcaca

SEQ ID NO: 1300699 - DNA, 15 bp, Homo sapiens
attatggccaggcac

SEQ ID NO: 1300700 - DNA, 15 bp, Homo sapiens
gattatggccaggca

SEQ ID NO: 1300701 - DNA, 15 bp, Homo sapiens
agattatggccaggc

SEQ ID NO: 1300702 - DNA, 15 bp, Homo sapiens
aagattatggccagg

SEQ ID NO: 1300703 - DNA, 15 bp, Homo sapiens
taagattatggccag

SEQ ID NO: 1300704 - DNA, 15 bp, Homo sapiens
ttaagattatggcca

SEQ ID NO: 1300705 - DNA, 15 bp, Homo sapiens
attaagattatggcc

SEQ ID NO: 1300706 - DNA, 15 bp, Homo sapiens
aattaagattatggc

SEQ ID NO: 1300707 - DNA, 15 bp, Homo sapiens
aaattaagattatgg

SEQ ID NO: 1300708 - DNA, 15 bp, Homo sapiens
aaaattaagattatg

SEQ ID NO: 1300709 - DNA, 15 bp, Homo sapiens
taaaattaagattat

SEQ ID NO: 1300710 - DNA, 15 bp, Homo sapiens
ctaaaattaagatta

SEQ ID NO: 1300711 - DNA, 15 bp, Homo sapiens
tctaaaattaagatt

SEQ ID NO: 1300712 - DNA, 15 bp, Homo sapiens
ttctaaaattaagat

SEQ ID NO: 1300713 - DNA, 15 bp, Homo sapiens
tttctaaaattaaga

SEQ ID NO: 1300714 - DNA, 15 bp, Homo sapiens
gtttctaaaattaag

SEQ ID NO: 1300715 - DNA, 15 bp, Homo sapiens
agtttctaaaattaa

SEQ ID NO: 1300716 - DNA, 15 bp, Homo sapiens
aagtttctaaaatta

SEQ ID NO: 1300717 - DNA, 15 bp, Homo sapiens
aaagtttctaaaatt

SEQ ID NO: 1300718 - DNA, 15 bp, Homo sapiens
taaagtttctaaaat

SEQ ID NO: 1300719 - DNA, 15 bp, Homo sapiens
ataaagtttctaaaa

SEQ ID NO: 1300720 - DNA, 15 bp, Homo sapiens
aataaagtttctaaa

SEQ ID NO: 1300721 - DNA, 15 bp, Homo sapiens
aaataaagtttctaa

SEQ ID NO: 1300722 - DNA, 15 bp, Homo sapiens
aaaataaagtttcta

SEQ ID NO: 1300723 - DNA, 15 bp, Homo sapiens
aaaaataaagtttct

SEQ ID NO: 1300724 - DNA, 15 bp, Homo sapiens
caaaaataaagtttc

SEQ ID NO: 1300725 - DNA, 15 bp, Homo sapiens
tcaaaaataaagttt

SEQ ID NO: 1300726 - DNA, 15 bp, Homo sapiens
ttcaaaaataaagtt

SEQ ID NO: 1300727 - DNA, 15 bp, Homo sapiens
attcaaaaataaagt

SEQ ID NO: 1300728 - DNA, 15 bp, Homo sapiens
cattcaaaaataaag

SEQ ID NO: 1300729 - DNA, 15 bp, Homo sapiens
acattcaaaaataaa

SEQ ID NO: 1300730 - DNA, 15 bp, Homo sapiens
tacattcaaaaataa

SEQ ID NO: 1300731 - DNA, 15 bp, Homo sapiens
atacattcaaaaata

SEQ ID NO: 1300732 - DNA, 15 bp, Homo sapiens
tatacattcaaaaat

SEQ ID NO: 1300733 - DNA, 15 bp, Homo sapiens
atatacattcaaaaa

SEQ ID NO: 1300734 - DNA, 15 bp, Homo sapiens
tatatacattcaaaa

SEQ ID NO: 1300735 - DNA, 15 bp, Homo sapiens
atatatacattcaaa

SEQ ID NO: 1300736 - DNA, 15 bp, Homo sapiens
aatatatacattcaa

SEQ ID NO: 1300737 - DNA, 15 bp, Homo sapiens
caatatatacattca

SEQ ID NO: 1300738 - DNA, 15 bp, Homo sapiens
tcaatatatacattc

SEQ ID NO: 1300739 - DNA, 15 bp, Homo sapiens
ttcaatatatacatt

SEQ ID NO: 1300740 - DNA, 15 bp, Homo sapiens
attcaatatatacat

SEQ ID NO: 1300741 - DNA, 15 bp, Homo sapiens
cattcaatatataca

SEQ ID NO: 1300742 - DNA, 15 bp, Homo sapiens
acattcaatatatac

SEQ ID NO: 1300743 - DNA, 15 bp, Homo sapiens
cacattcaatatata

SEQ ID NO: 1300744 - DNA, 15 bp, Homo sapiens
acacattcaatatat

SEQ ID NO: 1300745 - DNA, 15 bp, Homo sapiens
aacacattcaatata

SEQ ID NO: 1300746 - DNA, 15 bp, Homo sapiens
aaacacattcaatat

SEQ ID NO: 1300747 - DNA, 15 bp, Homo sapiens
aaaacacattcaata

SEQ ID NO: 1300748 - DNA, 15 bp, Homo sapiens
taaaacacattcaat

SEQ ID NO: 1300749 - DNA, 15 bp, Homo sapiens
ataaaacacattcaa

SEQ ID NO: 1300750 - DNA, 15 bp, Homo sapiens
cataaaacacattca

SEQ ID NO: 1300751 - DNA, 15 bp, Homo sapiens
acataaaacacattc

SEQ ID NO: 1300752 - DNA, 15 bp, Homo sapiens
tacataaaacacatt

SEQ ID NO: 1300753 - DNA, 15 bp, Homo sapiens
atacataaaacacat

SEQ ID NO: 1300754 - DNA, 15 bp, Homo sapiens
tatacataaaacaca

SEQ ID NO: 1300755 - DNA, 15 bp, Homo sapiens
ttatacataaaacac

SEQ ID NO: 1300756 - DNA, 15 bp, Homo sapiens
tttatacataaaaca

SEQ ID NO: 1300757 - DNA, 15 bp, Homo sapiens
ctttatacataaaac

SEQ ID NO: 1300758 - DNA, 15 bp, Homo sapiens
cctttatacataaaa

SEQ ID NO: 1300759 - DNA, 15 bp, Homo sapiens
tcctttatacataaa

SEQ ID NO: 1300760 - DNA, 15 bp, Homo sapiens
atcctttatacataa

SEQ ID NO: 1300761 - DNA, 15 bp, Homo sapiens
tatcctttatacata

SEQ ID NO: 1300762 - DNA, 15 bp, Homo sapiens
ttatcctttatacat

SEQ ID NO: 1300763 - DNA, 15 bp, Homo sapiens
tttatcctttataca

SEQ ID NO: 1300764 - DNA, 15 bp, Homo sapiens
ttttatcctttatac

SEQ ID NO: 1300765 - DNA, 15 bp, Homo sapiens
tttttatcctttata

SEQ ID NO: 1300766 - DNA, 15 bp, Homo sapiens
ttttttatcctttat

SEQ ID NO: 1300767 - DNA, 15 bp, Homo sapiens
attttttatccttta

SEQ ID NO: 1300768 - DNA, 15 bp, Homo sapiens
tattttttatccttt

SEQ ID NO: 1300769 - DNA, 15 bp, Homo sapiens
ctattttttatcctt

SEQ ID NO: 1300770 - DNA, 15 bp, Homo sapiens
tctattttttatcct

SEQ ID NO: 1300771 - DNA, 15 bp, Homo sapiens
ttctattttttatcc

SEQ ID NO: 1300772 - DNA, 15 bp, Homo sapiens
attctattttttatc

SEQ ID NO: 1300773 - DNA, 15 bp, Homo sapiens
tattctattttttat

SEQ ID NO: 1300774 - DNA, 15 bp, Homo sapiens
ttattctatttttta

SEQ ID NO: 1300775 - DNA, 15 bp, Homo sapiens
tttattctatttttt

SEQ ID NO: 1300776 - DNA, 15 bp, Homo sapiens
atttattctattttt

SEQ ID NO: 1300777 - DNA, 15 bp, Homo sapiens
gatttattctatttt

SEQ ID NO: 1300778 - DNA, 15 bp, Homo sapiens
agatttattctattt

SEQ ID NO: 1300779 - DNA, 15 bp, Homo sapiens
aagatttattctatt

SEQ ID NO: 1300780 - DNA, 15 bp, Homo sapiens
aaagatttattctat

SEQ ID NO: 1300781 - DNA, 15 bp, Homo sapiens
caaagatttattcta

SEQ ID NO: 1300782 - DNA, 15 bp, Homo sapiens
acaaagatttattct

SEQ ID NO: 1300783 - DNA, 15 bp, Homo sapiens
tacaaagatttattc

SEQ ID NO: 1300784 - DNA, 15 bp, Homo sapiens
ctacaaagatttatt

SEQ ID NO: 1300785 - DNA, 15 bp, Homo sapiens
gctacaaagatttat

SEQ ID NO: 1300786 - DNA, 15 bp, Homo sapiens
agctacaaagattta

SEQ ID NO: 1300787 - DNA, 15 bp, Homo sapiens
cagctacaaagattt

SEQ ID NO: 1300788 - DNA, 15 bp, Homo sapiens
tcagctacaaagatt

SEQ ID NO: 1300789 - DNA, 15 bp, Homo sapiens
atcagctacaaagat

SEQ ID NO: 1300790 - DNA, 15 bp, Homo sapiens
catcagctacaaaga

SEQ ID NO: 1300791 - DNA, 15 bp, Homo sapiens
tcatcagctacaaag

SEQ ID NO: 1300792 - DNA, 15 bp, Homo sapiens
ctcatcagctacaaa

SEQ ID NO: 1300793 - DNA, 15 bp, Homo sapiens
tctcatcagctacaa

SEQ ID NO: 1300794 - DNA, 15 bp, Homo sapiens
ttctcatcagctaca

SEQ ID NO: 1300795 - DNA, 15 bp, Homo sapiens
attctcatcagctac

SEQ ID NO: 1300796 - DNA, 15 bp, Homo sapiens
gattctcatcagcta

SEQ ID NO: 1300797 - DNA, 15 bp, Homo sapiens
tgattctcatcagct

SEQ ID NO: 1300798 - DNA, 15 bp, Homo sapiens
atgattctcatcagc

SEQ ID NO: 1300799 - DNA, 15 bp, Homo sapiens
catgattctcatcag

SEQ ID NO: 1300800 - DNA, 15 bp, Homo sapiens
gcatgattctcatca

SEQ ID NO: 1300801 - DNA, 15 bp, Homo sapiens
agcatgattctcatc

SEQ ID NO: 1300802 - DNA, 15 bp, Homo sapiens
cagcatgattctcat

SEQ ID NO: 1300803 - DNA, 15 bp, Homo sapiens
acagcatgattctca

SEQ ID NO: 1300804 - DNA, 15 bp, Homo sapiens
cacagcatgattctc

SEQ ID NO: 1300805 - DNA, 15 bp, Homo sapiens
tcacagcatgattct

SEQ ID NO: 1300806 - DNA, 15 bp, Homo sapiens
atcacagcatgattc

SEQ ID NO: 1300807 - DNA, 15 bp, Homo sapiens
aatcacagcatgatt

SEQ ID NO: 1300808 - DNA, 15 bp, Homo sapiens
taatcacagcatgat

SEQ ID NO: 1300809 - DNA, 15 bp, Homo sapiens
gtaatcacagcatga

SEQ ID NO: 1300810 - DNA, 15 bp, Homo sapiens
agtaatcacagcatg

SEQ ID NO: 1300811 - DNA, 15 bp, Homo sapiens
aagtaatcacagcat

SEQ ID NO: 1300812 - DNA, 15 bp, Homo sapiens
aaagtaatcacagca

SEQ ID NO: 1300813 - DNA, 15 bp, Homo sapiens
aaaagtaatcacagc

SEQ ID NO: 1300814 - DNA, 15 bp, Homo sapiens
aaaaagtaatcacag

SEQ ID NO: 1300815 - DNA, 15 bp, Homo sapiens
taaaaagtaatcaca

SEQ ID NO: 1300816 - DNA, 15 bp, Homo sapiens
ataaaaagtaatcac

SEQ ID NO: 1300817 - DNA, 15 bp, Homo sapiens
tataaaaagtaatca

SEQ ID NO: 1300818 - DNA, 15 bp, Homo sapiens
atataaaaagtaatc

SEQ ID NO: 1300819 - DNA, 15 bp, Homo sapiens
tatataaaaagtaat

SEQ ID NO: 1300820 - DNA, 15 bp, Homo sapiens
atatataaaaagtaa

SEQ ID NO: 1300821 - DNA, 15 bp, Homo sapiens
gatatataaaaagta

SEQ ID NO: 1300822 - DNA, 15 bp, Homo sapiens
tgatatataaaaagt

SEQ ID NO: 1300823 - DNA, 15 bp, Homo sapiens
atgatatataaaaag

SEQ ID NO: 1300824 - DNA, 15 bp, Homo sapiens
tatgatatataaaaa

SEQ ID NO: 1300825 - DNA, 15 bp, Homo sapiens
ttatgatatataaaa

SEQ ID NO: 1300826 - DNA, 15 bp, Homo sapiens
attatgatatataaa

SEQ ID NO: 1300827 - DNA, 15 bp, Homo sapiens
tattatgatatataa

SEQ ID NO: 1300828 - DNA, 15 bp, Homo sapiens
atattatgatatata

SEQ ID NO: 1300829 - DNA, 15 bp, Homo sapiens
catattatgatatat

SEQ ID NO: 1300830 - DNA, 15 bp, Homo sapiens
tcatattatgatata

SEQ ID NO: 1300831 - DNA, 15 bp, Homo sapiens
ttcatattatgatat

SEQ ID NO: 1300832 - DNA, 15 bp, Homo sapiens
attcatattatgata

SEQ ID NO: 1300833 - DNA, 15 bp, Homo sapiens
aattcatattatgat

SEQ ID NO: 1300834 - DNA, 15 bp, Homo sapiens
ataattcatattatg

SEQ ID NO: 1300835 - DNA, 15 bp, Homo sapiens
tataattcatattat

SEQ ID NO: 1300836 - DNA, 15 bp, Homo sapiens
atataattcatatta

SEQ ID NO: 1300837 - DNA, 15 bp, Homo sapiens
tatataattcatatt

SEQ ID NO: 1300838 - DNA, 15 bp, Homo sapiens
ttatataattcatat

SEQ ID NO: 1300839 - DNA, 15 bp, Homo sapiens
attatataattcata

SEQ ID NO: 1300840 - DNA, 15 bp, Homo sapiens
tattatataattcat

SEQ ID NO: 1300841 - DNA, 15 bp, Homo sapiens
atattatataattca

SEQ ID NO: 1300842 - DNA, 15 bp, Homo sapiens
aatattatataattc

SEQ ID NO: 1300843 - DNA, 15 bp, Homo sapiens
taatattatataatt

SEQ ID NO: 1300844 - DNA, 15 bp, Homo sapiens
tattatataatatta

SEQ ID NO: 1300845 - DNA, 15 bp, Homo sapiens
atattatataatatt

SEQ ID NO: 1300846 - DNA, 15 bp, Homo sapiens
catattatataatat

SEQ ID NO: 1300847 - DNA, 15 bp, Homo sapiens
gcatattatataata

SEQ ID NO: 1300848 - DNA, 15 bp, Homo sapiens
tgcatattatataat

SEQ ID NO: 1300849 - DNA, 15 bp, Homo sapiens
atgcatattatataa

SEQ ID NO: 1300850 - DNA, 15 bp, Homo sapiens
aatgcatattatata

SEQ ID NO: 1300851 - DNA, 15 bp, Homo sapiens
aaatgcatattatat

SEQ ID NO: 1300852 - DNA, 15 bp, Homo sapiens
aaaatgcatattata

SEQ ID NO: 1300853 - DNA, 15 bp, Homo sapiens
taaaatgcatattat

SEQ ID NO: 1300854 - DNA, 15 bp, Homo sapiens
ttaaaatgcatatta

SEQ ID NO: 1300855 - DNA, 15 bp, Homo sapiens
attaaaatgcatatt

SEQ ID NO: 1300856 - DNA, 15 bp, Homo sapiens
tattaaaatgcatat

SEQ ID NO: 1300857 - DNA, 15 bp, Homo sapiens
gtattaaaatgcata

SEQ ID NO: 1300858 - DNA, 15 bp, Homo sapiens
tgtattaaaatgcat

SEQ ID NO: 1300859 - DNA, 15 bp, Homo sapiens
atgtattaaaatgca

SEQ ID NO: 1300860 - DNA, 15 bp, Homo sapiens
gatgtattaaaatgc

SEQ ID NO: 1300861 - DNA, 15 bp, Homo sapiens
tgatgtattaaaatg

SEQ ID NO: 1300862 - DNA, 15 bp, Homo sapiens
atgatgtattaaaat

SEQ ID NO: 1300863 - DNA, 15 bp, Homo sapiens
gatgatgtattaaaa

SEQ ID NO: 1300864 - DNA, 15 bp, Homo sapiens
agatgatgtattaaa

SEQ ID NO: 1300865 - DNA, 15 bp, Homo sapiens
aagatgatgtattaa

SEQ ID NO: 1300866 - DNA, 15 bp, Homo sapiens
caagatgatgtatta

SEQ ID NO: 1300867 - DNA, 15 bp, Homo sapiens
acaagatgatgtatt

SEQ ID NO: 1300868 - DNA, 15 bp, Homo sapiens
cacaagatgatgtat

SEQ ID NO: 1300869 - DNA, 15 bp, Homo sapiens
tcacaagatgatgta

SEQ ID NO: 1300870 - DNA, 15 bp, Homo sapiens
atcacaagatgatgt

SEQ ID NO: 1300871 - DNA, 15 bp, Homo sapiens
catcacaagatgatg

SEQ ID NO: 1300872 - DNA, 15 bp, Homo sapiens
acatcacaagatgat

SEQ ID NO: 1300873 - DNA, 15 bp, Homo sapiens
cacatcacaagatga

SEQ ID NO: 1300874 - DNA, 15 bp, Homo sapiens
acacatcacaagatg

SEQ ID NO: 1300875 - DNA, 15 bp, Homo sapiens
aacacatcacaagat

SEQ ID NO: 1300876 - DNA, 15 bp, Homo sapiens
aaacacatcacaaga

SEQ ID NO: 1300877 - DNA, 15 bp, Homo sapiens
aaaacacatcacaag

SEQ ID NO: 1300878 - DNA, 15 bp, Homo sapiens
taaaacacatcacaa

SEQ ID NO: 1300879 - DNA, 15 bp, Homo sapiens
ttaaaacacatcaca

SEQ ID NO: 1300880 - DNA, 15 bp, Homo sapiens
attaaaacacatcac

SEQ ID NO: 1300881 - DNA, 15 bp, Homo sapiens
aattaaaacacatca

SEQ ID NO: 1300882 - DNA, 15 bp, Homo sapiens
taattaaaacacatc

SEQ ID NO: 1300883 - DNA, 15 bp, Homo sapiens
ataattaaaacacat

SEQ ID NO: 1300884 - DNA, 15 bp, Homo sapiens
aataattaaaacaca

SEQ ID NO: 1300885 - DNA, 15 bp, Homo sapiens
taataattaaaacac

SEQ ID NO: 1300886 - DNA, 15 bp, Homo sapiens
ttaataattaaaaca

SEQ ID NO: 1300887 - DNA, 15 bp, Homo sapiens
tttaataattaaaac

SEQ ID NO: 1300888 - DNA, 15 bp, Homo sapiens
ctttaataattaaaa

SEQ ID NO: 1300889 - DNA, 15 bp, Homo sapiens
actttaataattaaa

SEQ ID NO: 1300890 - DNA, 15 bp, Homo sapiens
aactttaataattaa

SEQ ID NO: 1300891 - DNA, 15 bp, Homo sapiens
caactttaataatta

SEQ ID NO: 1300892 - DNA, 15 bp, Homo sapiens
tcaactttaataatt

SEQ ID NO: 1300893 - DNA, 15 bp, Homo sapiens
ttcaactttaataat

SEQ ID NO: 1300894 - DNA, 15 bp, Homo sapiens
attcaactttaataa

SEQ ID NO: 1300895 - DNA, 15 bp, Homo sapiens
tattcaactttaata

SEQ ID NO: 1300896 - DNA, 15 bp, Homo sapiens
ctattcaactttaat

SEQ ID NO: 1300897 - DNA, 15 bp, Homo sapiens
gctattcaactttaa

SEQ ID NO: 1300898 - DNA, 15 bp, Homo sapiens
ggctattcaacttta

SEQ ID NO: 1300899 - DNA, 15 bp, Homo sapiens
gggctattcaacttt

SEQ ID NO: 1300900 - DNA, 15 bp, Homo sapiens
ggggctattcaactt

SEQ ID NO: 1300901 - DNA, 15 bp, Homo sapiens
tggggctattcaact

SEQ ID NO: 1300902 - DNA, 15 bp, Homo sapiens
gtggggctattcaac

SEQ ID NO: 1300903 - DNA, 15 bp, Homo sapiens
agtggggctattcaa

SEQ ID NO: 1300904 - DNA, 15 bp, Homo sapiens
gagtggggctattca

SEQ ID NO: 1300905 - DNA, 15 bp, Homo sapiens
ggagtggggctattc

SEQ ID NO: 1300906 - DNA, 15 bp, Homo sapiens
tggagtggggctatt

SEQ ID NO: 1300907 - DNA, 15 bp, Homo sapiens
ttggagtggggctat

SEQ ID NO: 1300908 - DNA, 15 bp, Homo sapiens
tttggagtggggcta

SEQ ID NO: 1300909 - DNA, 15 bp, Homo sapiens
atttggagtggggct

SEQ ID NO: 1300910 - DNA, 15 bp, Homo sapiens
catttggagtggggc

SEQ ID NO: 1300911 - DNA, 15 bp, Homo sapiens
tcatttggagtgggg

SEQ ID NO: 1300912 - DNA, 15 bp, Homo sapiens
atcatttggagtggg

SEQ ID NO: 1300913 - DNA, 15 bp, Homo sapiens
tatcatttggagtgg

SEQ ID NO: 1300914 - DNA, 15 bp, Homo sapiens
gtatcatttggagtg

SEQ ID NO: 1300915 - DNA, 15 bp, Homo sapiens
tgtatcatttggagt

SEQ ID NO: 1300916 - DNA, 15 bp, Homo sapiens
atgtatcatttggag

SEQ ID NO: 1300917 - DNA, 15 bp, Homo sapiens
catgtatcatttgga

SEQ ID NO: 1300918 - DNA, 15 bp, Homo sapiens
acatgtatcatttgg

SEQ ID NO: 1300919 - DNA, 15 bp, Homo sapiens
tacatgtatcatttg

SEQ ID NO: 1300920 - DNA, 15 bp, Homo sapiens
atacatgtatcattt

SEQ ID NO: 1300921 - DNA, 15 bp, Homo sapiens
aatacatgtatcatt

SEQ ID NO: 1300922 - DNA, 15 bp, Homo sapiens
caatacatgtatcat

SEQ ID NO: 1300923 - DNA, 15 bp, Homo sapiens
ccaatacatgtatca

SEQ ID NO: 1300924 - DNA, 15 bp, Homo sapiens
tccaatacatgtatc

SEQ ID NO: 1300925 - DNA, 15 bp, Homo sapiens
ttccaatacatgtat

SEQ ID NO: 1300926 - DNA, 15 bp, Homo sapiens
gttccaatacatgta

SEQ ID NO: 1300927 - DNA, 15 bp, Homo sapiens
agttccaatacatgt

SEQ ID NO: 1300928 - DNA, 15 bp, Homo sapiens
aagttccaatacatg

SEQ ID NO: 1300929 - DNA, 15 bp, Homo sapiens
gaagttccaatacat

SEQ ID NO: 1300930 - DNA, 15 bp, Homo sapiens
agaagttccaataca

SEQ ID NO: 1300931 - DNA, 15 bp, Homo sapiens
aagaagttccaatac

SEQ ID NO: 1300932 - DNA, 15 bp, Homo sapiens
aaagaagttccaata

SEQ ID NO: 1300933 - DNA, 15 bp, Homo sapiens
aaaagaagttccaat

SEQ ID NO: 1300934 - DNA, 15 bp, Homo sapiens
caaaagaagttccaa

SEQ ID NO: 1300935 - DNA, 15 bp, Homo sapiens
gcaaaagaagttcca

SEQ ID NO: 1300936 - DNA, 15 bp, Homo sapiens
tgcaaaagaagttcc

SEQ ID NO: 1300937 - DNA, 15 bp, Homo sapiens
ttgcaaaagaagttc

SEQ ID NO: 1300938 - DNA, 15 bp, Homo sapiens
gttgcaaaagaagtt

SEQ ID NO: 1300939 - DNA, 15 bp, Homo sapiens
tgttgcaaaagaagt

SEQ ID NO: 1300940 - DNA, 15 bp, Homo sapiens
ttgttgcaaaagaag

SEQ ID NO: 1300941 - DNA, 15 bp, Homo sapiens
attgttgcaaaagaa

SEQ ID NO: 1300942 - DNA, 15 bp, Homo sapiens
aattgttgcaaaaga

SEQ ID NO: 1300943 - DNA, 15 bp, Homo sapiens
aaattgttgcaaaag

SEQ ID NO: 1300944 - DNA, 15 bp, Homo sapiens
gaaattgttgcaaaa

SEQ ID NO: 1300945 - DNA, 15 bp, Homo sapiens
ggaaattgttgcaaa

SEQ ID NO: 1300946 - DNA, 15 bp, Homo sapiens
gggaaattgttgcaa

SEQ ID NO: 1300947 - DNA, 15 bp, Homo sapiens
agggaaattgttgca

SEQ ID NO: 1300948 - DNA, 15 bp, Homo sapiens
tagggaaattgttgc

SEQ ID NO: 1300949 - DNA, 15 bp, Homo sapiens
atagggaaattgttg

SEQ ID NO: 1300950 - DNA, 15 bp, Homo sapiens
gatagggaaattgtt

SEQ ID NO: 1300951 - DNA, 15 bp, Homo sapiens
agatagggaaattgt

SEQ ID NO: 1300952 - DNA, 15 bp, Homo sapiens
aagatagggaaattg

SEQ ID NO: 1300953 - DNA, 15 bp, Homo sapiens
caagatagggaaatt

SEQ ID NO: 1300954 - DNA, 15 bp, Homo sapiens
acaagatagggaaat

SEQ ID NO: 1300955 - DNA, 15 bp, Homo sapiens
tacaagatagggaaa

SEQ ID NO: 1300956 - DNA, 15 bp, Homo sapiens
atacaagatagggaa

SEQ ID NO: 1300957 - DNA, 15 bp, Homo sapiens
aatacaagataggga

SEQ ID NO: 1300958 - DNA, 15 bp, Homo sapiens
aaatacaagataggg

SEQ ID NO: 1300959 - DNA, 15 bp, Homo sapiens
gaaatacaagatagg

SEQ ID NO: 1300960 - DNA, 15 bp, Homo sapiens
agaaatacaagatag

SEQ ID NO: 1300961 - DNA, 15 bp, Homo sapiens
cagaaatacaagata

SEQ ID NO: 1300962 - DNA, 15 bp, Homo sapiens
tcagaaatacaagat

SEQ ID NO: 1300963 - DNA, 15 bp, Homo sapiens
ttcagaaatacaaga

SEQ ID NO: 1300964 - DNA, 15 bp, Homo sapiens
tttcagaaatacaag

SEQ ID NO: 1300965 - DNA, 15 bp, Homo sapiens
ttttcagaaatacaa

SEQ ID NO: 1300966 - DNA, 15 bp, Homo sapiens
attttcagaaataca

SEQ ID NO: 1300967 - DNA, 15 bp, Homo sapiens
cattttcagaaatac

SEQ ID NO: 1300968 - DNA, 15 bp, Homo sapiens
acattttcagaaata

SEQ ID NO: 1300969 - DNA, 15 bp, Homo sapiens
tacattttcagaaat

SEQ ID NO: 1300970 - DNA, 15 bp, Homo sapiens
ttacattttcagaaa

SEQ ID NO: 1300971 - DNA, 15 bp, Homo sapiens
attacattttcagaa

SEQ ID NO: 1300972 - DNA, 15 bp, Homo sapiens
gattacattttcaga

SEQ ID NO: 1300973 - DNA, 15 bp, Homo sapiens
tgattacattttcag

SEQ ID NO: 1300974 - DNA, 15 bp, Homo sapiens
ttgattacattttca

SEQ ID NO: 1300975 - DNA, 15 bp, Homo sapiens
tttgattacattttc

SEQ ID NO: 1300976 - DNA, 15 bp, Homo sapiens
atttgattacatttt

SEQ ID NO: 1300977 - DNA, 15 bp, Homo sapiens
catttgattacattt

SEQ ID NO: 1300978 - DNA, 15 bp, Homo sapiens
tcatttgattacatt

SEQ ID NO: 1300979 - DNA, 15 bp, Homo sapiens
atcatttgattacat

SEQ ID NO: 1300980 - DNA, 15 bp, Homo sapiens
aatcatttgattaca

SEQ ID NO: 1300981 - DNA, 15 bp, Homo sapiens
aaatcatttgattac

SEQ ID NO: 1300982 - DNA, 15 bp, Homo sapiens
taaatcatttgatta

SEQ ID NO: 1300983 - DNA, 15 bp, Homo sapiens
ctaaatcatttgatt

SEQ ID NO: 1300984 - DNA, 15 bp, Homo sapiens
gctaaatcatttgat

SEQ ID NO: 1300985 - DNA, 15 bp, Homo sapiens
agctaaatcatttga

SEQ ID NO: 1300986 - DNA, 15 bp, Homo sapiens
tagctaaatcatttg

SEQ ID NO: 1300987 - DNA, 15 bp, Homo sapiens
ttagctaaatcattt

SEQ ID NO: 1300988 - DNA, 15 bp, Homo sapiens
attagctaaatcatt

SEQ ID NO: 1300989 - DNA, 15 bp, Homo sapiens
aattagctaaatcat

SEQ ID NO: 1300990 - DNA, 15 bp, Homo sapiens
gaattagctaaatca

SEQ ID NO: 1300991 - DNA, 15 bp, Homo sapiens
tgaattagctaaatc

SEQ ID NO: 1300992 - DNA, 15 bp, Homo sapiens
atgaattagctaaat

SEQ ID NO: 1300993 - DNA, 15 bp, Homo sapiens
tatgaattagctaaa

SEQ ID NO: 1300994 - DNA, 15 bp, Homo sapiens
ttatgaattagctaa

SEQ ID NO: 1300995 - DNA, 15 bp, Homo sapiens
gttatgaattagcta

SEQ ID NO: 1300996 - DNA, 15 bp, Homo sapiens
agttatgaattagct

SEQ ID NO: 1300997 - DNA, 15 bp, Homo sapiens
gagttatgaattagc

SEQ ID NO: 1300998 - DNA, 15 bp, Homo sapiens
agagttatgaattag

SEQ ID NO: 1300999 - DNA, 15 bp, Homo sapiens
aagagttatgaatta

SEQ ID NO: 1301000 - DNA, 15 bp, Homo sapiens
aaagagttatgaatt

SEQ ID NO: 1301001 - DNA, 15 bp, Homo sapiens
gaaagagttatgaat

SEQ ID NO: 1301002 - DNA, 15 bp, Homo sapiens
tgaaagagttatgaa

SEQ ID NO: 1301003 - DNA, 15 bp, Homo sapiens
ttgaaagagttatga

SEQ ID NO: 1301004 - DNA, 15 bp, Homo sapiens
tttgaaagagttatg

SEQ ID NO: 1301005 - DNA, 15 bp, Homo sapiens
ctttgaaagagttat

SEQ ID NO: 1301006 - DNA, 15 bp, Homo sapiens
gctttgaaagagtta

SEQ ID NO: 1301007 - DNA, 15 bp, Homo sapiens
tgctttgaaagagtt

SEQ ID NO: 1301008 - DNA, 15 bp, Homo sapiens
gtgctttgaaagagt

SEQ ID NO: 1301009 - DNA, 15 bp, Homo sapiens
cgtgctttgaaagag

SEQ ID NO: 1301010 - DNA, 15 bp, Homo sapiens
acgtgctttgaaaga

SEQ ID NO: 1301011 - DNA, 15 bp, Homo sapiens
aacgtgctttgaaag

SEQ ID NO: 1301012 - DNA, 15 bp, Homo sapiens
aaacgtgctttgaaa

SEQ ID NO: 1301013 - DNA, 15 bp, Homo sapiens
aaaacgtgctttgaa

SEQ ID NO: 1301014 - DNA, 15 bp, Homo sapiens
taaaacgtgctttga

SEQ ID NO: 1301015 - DNA, 15 bp, Homo sapiens
ttaaaacgtgctttg

SEQ ID NO: 1301016 - DNA, 15 bp, Homo sapiens
tttaaaacgtgcttt

SEQ ID NO: 1301017 - DNA, 15 bp, Homo sapiens
ttttaaaacgtgctt

SEQ ID NO: 1301018 - DNA, 15 bp, Homo sapiens
attttaaaacgtgct

SEQ ID NO: 1301019 - DNA, 15 bp, Homo sapiens
aattttaaaacgtgc

SEQ ID NO: 1301020 - DNA, 15 bp, Homo sapiens
taattttaaaacgtg

SEQ ID NO: 1301021 - DNA, 15 bp, Homo sapiens
ctaattttaaaacgt

SEQ ID NO: 1301022 - DNA, 15 bp, Homo sapiens
cctaattttaaaacg

SEQ ID NO: 1301023 - DNA, 15 bp, Homo sapiens
tcctaattttaaaac

SEQ ID NO: 1301024 - DNA, 15 bp, Homo sapiens
ttcctaattttaaaa

SEQ ID NO: 1301025 - DNA, 15 bp, Homo sapiens
tttcctaattttaaa

SEQ ID NO: 1301026 - DNA, 15 bp, Homo sapiens
atttcctaattttaa

SEQ ID NO: 1301027 - DNA, 15 bp, Homo sapiens
catttcctaatttta

SEQ ID NO: 1301028 - DNA, 15 bp, Homo sapiens
ccatttcctaatttt

SEQ ID NO: 1301029 - DNA, 15 bp, Homo sapiens
accatttcctaattt

SEQ ID NO: 1301030 - DNA, 15 bp, Homo sapiens
gaccatttcctaatt

SEQ ID NO: 1301031 - DNA, 15 bp, Homo sapiens
ggaccatttcctaat

SEQ ID NO: 1301032 - DNA, 15 bp, Homo sapiens
cggaccatttcctaa

SEQ ID NO: 1301033 - DNA, 15 bp, Homo sapiens
ccggaccatttccta

SEQ ID NO: 1301034 - DNA, 15 bp, Homo sapiens
cccggaccatttcct

SEQ ID NO: 1301035 - DNA, 15 bp, Homo sapiens
gcccggaccatttcc

SEQ ID NO: 1301036 - DNA, 15 bp, Homo sapiens
tgcccggaccatttc

SEQ ID NO: 1301037 - DNA, 15 bp, Homo sapiens
atgcccggaccattt

SEQ ID NO: 1301038 - DNA, 15 bp, Homo sapiens
catgcccggaccatt

SEQ ID NO: 1301039 - DNA, 15 bp, Homo sapiens
ccatgcccggaccat

SEQ ID NO: 1301040 - DNA, 15 bp, Homo sapiens
accatgcccggacca

SEQ ID NO: 1301041 - DNA, 15 bp, Homo sapiens
caccatgcccggacc

SEQ ID NO: 1301042 - DNA, 15 bp, Homo sapiens
ccaccatgcccggac

SEQ ID NO: 1301043 - DNA, 15 bp, Homo sapiens
gccaccatgcccgga

SEQ ID NO: 1301044 - DNA, 15 bp, Homo sapiens
aaccaccttggcctc

SEQ ID NO: 1301045 - DNA, 15 bp, Homo sapiens
caaccaccttggcct

SEQ ID NO: 1301046 - DNA, 15 bp, Homo sapiens
ccaaccaccttggcc

SEQ ID NO: 1301047 - DNA, 15 bp, Homo sapiens
tccaaccaccttggc

SEQ ID NO: 1301048 - DNA, 15 bp, Homo sapiens
atccaaccaccttgg

SEQ ID NO: 1301049 - DNA, 15 bp, Homo sapiens
gatccaaccaccttg

SEQ ID NO: 1301050 - DNA, 15 bp, Homo sapiens
tgatccaaccacctt

SEQ ID NO: 1301051 - DNA, 15 bp, Homo sapiens
gtgatccaaccacct

SEQ ID NO: 1301052 - DNA, 15 bp, Homo sapiens
ggtgatccaaccacc

SEQ ID NO: 1301053 - DNA, 15 bp, Homo sapiens
aggtgatccaaccac

SEQ ID NO: 1301054 - DNA, 15 bp, Homo sapiens
caggtgatccaacca

SEQ ID NO: 1301055 - DNA, 15 bp, Homo sapiens
tcaggtgatccaacc

SEQ ID NO: 1301056 - DNA, 15 bp, Homo sapiens
ttcaggtgatccaac

SEQ ID NO: 1301057 - DNA, 15 bp, Homo sapiens
tttcaggtgatccaa

SEQ ID NO: 1301058 - DNA, 15 bp, Homo sapiens
atttcaggtgatcca

SEQ ID NO: 1301059 - DNA, 15 bp, Homo sapiens
gatttcaggtgatcc

SEQ ID NO: 1301060 - DNA, 15 bp, Homo sapiens
tgatttcaggtgatc

SEQ ID NO: 1301061 - DNA, 15 bp, Homo sapiens
ctgatttcaggtgat

SEQ ID NO: 1301062 - DNA, 15 bp, Homo sapiens
cctgatttcaggtga

SEQ ID NO: 1301063 - DNA, 15 bp, Homo sapiens
tcctgatttcaggtg

SEQ ID NO: 1301064 - DNA, 15 bp, Homo sapiens
ctcctgatttcaggt

SEQ ID NO: 1301065 - DNA, 15 bp, Homo sapiens
actcctgatttcagg

SEQ ID NO: 1301066 - DNA, 15 bp, Homo sapiens
aactcctgatttcag

SEQ ID NO: 1301067 - DNA, 15 bp, Homo sapiens
gaactcctgatttca

SEQ ID NO: 1301068 - DNA, 15 bp, Homo sapiens
cgaactcctgatttc

SEQ ID NO: 1301069 - DNA, 15 bp, Homo sapiens
tcgaactcctgattt

SEQ ID NO: 1301070 - DNA, 15 bp, Homo sapiens
ctcgaactcctgatt

SEQ ID NO: 1301071 - DNA, 15 bp, Homo sapiens
cctggtctcgaactc

SEQ ID NO: 1301072 - DNA, 15 bp, Homo sapiens
gcctggtctcgaact

SEQ ID NO: 1301073 - DNA, 15 bp, Homo sapiens
agcctggtctcgaac

SEQ ID NO: 1301074 - DNA, 15 bp, Homo sapiens
cagcctggtctcgaa

SEQ ID NO: 1301075 - DNA, 15 bp, Homo sapiens
ccagcctggtctcga

SEQ ID NO: 1301076 - DNA, 15 bp, Homo sapiens
accagcctggtctcg

SEQ ID NO: 1301077 - DNA, 15 bp, Homo sapiens
gaccagcctggtctc

SEQ ID NO: 1301078 - DNA, 15 bp, Homo sapiens
tgaccagcctggtct

SEQ ID NO: 1301079 - DNA, 15 bp, Homo sapiens
ttgaccagcctggtc

SEQ ID NO: 1301080 - DNA, 15 bp, Homo sapiens
gttgaccagcctggt

SEQ ID NO: 1301081 - DNA, 15 bp, Homo sapiens
tgttgaccagcctgg

SEQ ID NO: 1301082 - DNA, 15 bp, Homo sapiens
atgttgaccagcctg

SEQ ID NO: 1301083 - DNA, 15 bp, Homo sapiens
catgttgaccagcct

SEQ ID NO: 1301084 - DNA, 15 bp, Homo sapiens
ccatgttgaccagcc

SEQ ID NO: 1301085 - DNA, 15 bp, Homo sapiens
gccatgttgaccagc

SEQ ID NO: 1301086 - DNA, 15 bp, Homo sapiens
tgccatgttgaccag

SEQ ID NO: 1301087 - DNA, 15 bp, Homo sapiens
ttgccatgttgacca

SEQ ID NO: 1301088 - DNA, 15 bp, Homo sapiens
tttgccatgttgacc

SEQ ID NO: 1301089 - DNA, 15 bp, Homo sapiens
ttttgccatgttgac

SEQ ID NO: 1301090 - DNA, 15 bp, Homo sapiens
gttttgccatgttga

SEQ ID NO: 1301091 - DNA, 15 bp, Homo sapiens
tggggttttgccatg

SEQ ID NO: 1301092 - DNA, 15 bp, Homo sapiens
atggggttttgccat

SEQ ID NO: 1301093 - DNA, 15 bp, Homo sapiens
gagatggggttttgc

SEQ ID NO: 1301094 - DNA, 15 bp, Homo sapiens
ctttagtagagatgg

SEQ ID NO: 1301095 - DNA, 15 bp, Homo sapiens
tctttagtagagatg

SEQ ID NO: 1301096 - DNA, 15 bp, Homo sapiens
ctctttagtagagat

SEQ ID NO: 1301097 - DNA, 15 bp, Homo sapiens
tctctttagtagaga

SEQ ID NO: 1301098 - DNA, 15 bp, Homo sapiens
gtctctttagtagag

SEQ ID NO: 1301099 - DNA, 15 bp, Homo sapiens
tgtctctttagtaga

SEQ ID NO: 1301100 - DNA, 15 bp, Homo sapiens
ttgtctctttagtag

SEQ ID NO: 1301101 - DNA, 15 bp, Homo sapiens
tttgtctctttagta

SEQ ID NO: 1301102 - DNA, 15 bp, Homo sapiens
ttttgtctctttagt

SEQ ID NO: 1301103 - DNA, 15 bp, Homo sapiens
tttttgtctctttag

SEQ ID NO: 1301104 - DNA, 15 bp, Homo sapiens
atttttgtctcttta

SEQ ID NO: 1301105 - DNA, 15 bp, Homo sapiens
aatttttgtctcttt

SEQ ID NO: 1301106 - DNA, 15 bp, Homo sapiens
taatttttgtctctt

SEQ ID NO: 1301107 - DNA, 15 bp, Homo sapiens
ctaatttttgtctct

SEQ ID NO: 1301108 - DNA, 15 bp, Homo sapiens
actaatttttgtctc

SEQ ID NO: 1301109 - DNA, 15 bp, Homo sapiens
cactaatttttgtct

SEQ ID NO: 1301110 - DNA, 15 bp, Homo sapiens
tcactaatttttgtc

SEQ ID NO: 1301111 - DNA, 15 bp, Homo sapiens
ctcactaatttttgt

SEQ ID NO: 1301112 - DNA, 15 bp, Homo sapiens
cctcactaatttttg

SEQ ID NO: 1301113 - DNA, 15 bp, Homo sapiens
gcctcactaattttt

SEQ ID NO: 1301114 - DNA, 15 bp, Homo sapiens
cgcctcactaatttt

SEQ ID NO: 1301115 - DNA, 15 bp, Homo sapiens
acgcctcactaattt

SEQ ID NO: 1301116 - DNA, 15 bp, Homo sapiens
cacgcctcactaatt

SEQ ID NO: 1301117 - DNA, 15 bp, Homo sapiens
ccacgcctcactaat

SEQ ID NO: 1301118 - DNA, 15 bp, Homo sapiens
accacgcctcactaa

SEQ ID NO: 1301119 - DNA, 15 bp, Homo sapiens
caccacgcctcacta

SEQ ID NO: 1301120 - DNA, 15 bp, Homo sapiens
gcaccacgcctcact

SEQ ID NO: 1301121 - DNA, 15 bp, Homo sapiens
cgcaccacgcctcac

SEQ ID NO: 1301122 - DNA, 15 bp, Homo sapiens
gcgcaccacgcctca

SEQ ID NO: 1301123 - DNA, 15 bp, Homo sapiens
agcgcaccacgcctc

SEQ ID NO: 1301124 - DNA, 15 bp, Homo sapiens
aagcgcaccacgcct

SEQ ID NO: 1301125 - DNA, 15 bp, Homo sapiens
caagcgcaccacgcc

SEQ ID NO: 1301126 - DNA, 15 bp, Homo sapiens
gcaagcgcaccacgc

SEQ ID NO: 1301127 - DNA, 15 bp, Homo sapiens
ggcaagcgcaccacg

SEQ ID NO: 1301128 - DNA, 15 bp, Homo sapiens
aggcaagcgcaccac

SEQ ID NO: 1301129 - DNA, 15 bp, Homo sapiens
taggcaagcgcacca

SEQ ID NO: 1301130 - DNA, 15 bp, Homo sapiens
ataggcaagcgcacc

SEQ ID NO: 1301131 - DNA, 15 bp, Homo sapiens
tataggcaagcgcac

SEQ ID NO: 1301132 - DNA, 15 bp, Homo sapiens
ttataggcaagcgca

SEQ ID NO: 1301133 - DNA, 15 bp, Homo sapiens
attataggcaagcgc

SEQ ID NO: 1301134 - DNA, 15 bp, Homo sapiens
gattataggcaagcg

SEQ ID NO: 1301135 - DNA, 15 bp, Homo sapiens
ggattataggcaagc

SEQ ID NO: 1301136 - DNA, 15 bp, Homo sapiens
gggattataggcaag

SEQ ID NO: 1301137 - DNA, 15 bp, Homo sapiens
tgggattataggcaa

SEQ ID NO: 1301138 - DNA, 15 bp, Homo sapiens
atcccaagtagctgg

SEQ ID NO: 1301139 - DNA, 15 bp, Homo sapiens
catcccaagtagctg

SEQ ID NO: 1301140 - DNA, 15 bp, Homo sapiens
gcatcccaagtagct

SEQ ID NO: 1301141 - DNA, 15 bp, Homo sapiens
agcatcccaagtagc

SEQ ID NO: 1301142 - DNA, 15 bp, Homo sapiens
cagcatcccaagtag

SEQ ID NO: 1301143 - DNA, 15 bp, Homo sapiens
tcagcatcccaagta

SEQ ID NO: 1301144 - DNA, 15 bp, Homo sapiens
ctcagcatcccaagt

SEQ ID NO: 1301145 - DNA, 15 bp, Homo sapiens
cctcagcatcccaag

SEQ ID NO: 1301146 - DNA, 15 bp, Homo sapiens
gcctcagcatcccaa

SEQ ID NO: 1301147 - DNA, 15 bp, Homo sapiens
tgcctcagcatccca

SEQ ID NO: 1301148 - DNA, 15 bp, Homo sapiens
ctgcctcagcatccc

SEQ ID NO: 1301149 - DNA, 15 bp, Homo sapiens
gcctcccaagttcaa

SEQ ID NO: 1301150 - DNA, 15 bp, Homo sapiens
cgcctcccaagttca

SEQ ID NO: 1301151 - DNA, 15 bp, Homo sapiens
ccgcctcccaagttc

SEQ ID NO: 1301152 - DNA, 15 bp, Homo sapiens
tccgcctcccaagtt

SEQ ID NO: 1301153 - DNA, 15 bp, Homo sapiens
ctccgcctcccaagt

SEQ ID NO: 1301154 - DNA, 15 bp, Homo sapiens
cctccgcctcccaag

SEQ ID NO: 1301155 - DNA, 15 bp, Homo sapiens
tactgcaacctccgc

SEQ ID NO: 1301156 - DNA, 15 bp, Homo sapiens
ttactgcaacctccg

SEQ ID NO: 1301157 - DNA, 15 bp, Homo sapiens
cttactgcaacctcc

SEQ ID NO: 1301158 - DNA, 15 bp, Homo sapiens
gcttactgcaacctc

SEQ ID NO: 1301159 - DNA, 15 bp, Homo sapiens
cggcttactgcaacc

SEQ ID NO: 1301160 - DNA, 15 bp, Homo sapiens
tcggcttactgcaac

SEQ ID NO: 1301161 - DNA, 15 bp, Homo sapiens
ctcggcttactgcaa

SEQ ID NO: 1301162 - DNA, 15 bp, Homo sapiens
tctcggcttactgca

SEQ ID NO: 1301163 - DNA, 15 bp, Homo sapiens
atctcggcttactgc

SEQ ID NO: 1301164 - DNA, 15 bp, Homo sapiens
aatctcggcttactg

SEQ ID NO: 1301165 - DNA, 15 bp, Homo sapiens
caatctcggcttact

SEQ ID NO: 1301166 - DNA, 15 bp, Homo sapiens
gcaatctcggcttac

SEQ ID NO: 1301167 - DNA, 15 bp, Homo sapiens
cgcaatctcggctta

SEQ ID NO: 1301168 - DNA, 15 bp, Homo sapiens
gcgcaatctcggctt

SEQ ID NO: 1301169 - DNA, 15 bp, Homo sapiens
ggcgcaatctcggct

SEQ ID NO: 1301170 - DNA, 15 bp, Homo sapiens
tggcgcaatctcggc

SEQ ID NO: 1301171 - DNA, 15 bp, Homo sapiens
gtcactctgtcgccc

SEQ ID NO: 1301172 - DNA, 15 bp, Homo sapiens
tgtcactctgtcgcc

SEQ ID NO: 1301173 - DNA, 15 bp, Homo sapiens
gtgtcactctgtcgc

SEQ ID NO: 1301174 - DNA, 15 bp, Homo sapiens
agtgtcactctgtcg

SEQ ID NO: 1301175 - DNA, 15 bp, Homo sapiens
aagtgtcactctgtc

SEQ ID NO: 1301176 - DNA, 15 bp, Homo sapiens
gaagtgtcactctgt

SEQ ID NO: 1301177 - DNA, 15 bp, Homo sapiens
tgaagtgtcactctg

SEQ ID NO: 1301178 - DNA, 15 bp, Homo sapiens
atgaagtgtcactct

SEQ ID NO: 1301179 - DNA, 15 bp, Homo sapiens
gatgaagtgtcactc

SEQ ID NO: 1301180 - DNA, 15 bp, Homo sapiens
agatgaagtgtcact

SEQ ID NO: 1301181 - DNA, 15 bp, Homo sapiens
gagatgaagtgtcac

SEQ ID NO: 1301182 - DNA, 15 bp, Homo sapiens
tgagatgaagtgtca

SEQ ID NO: 1301183 - DNA, 15 bp, Homo sapiens
ttgagatgaagtgtc

SEQ ID NO: 1301184 - DNA, 15 bp, Homo sapiens
tttgagatgaagtgt

SEQ ID NO: 1301185 - DNA, 15 bp, Homo sapiens
ttttgagatgaagtg

SEQ ID NO: 1301186 - DNA, 15 bp, Homo sapiens
tttttgagatgaagt

SEQ ID NO: 1301187 - DNA, 15 bp, Homo sapiens
ttttttgagatgaag

SEQ ID NO: 1301188 - DNA, 15 bp, Homo sapiens
actaatttttttttt

SEQ ID NO: 1301189 - DNA, 15 bp, Homo sapiens
tactaattttttttt

SEQ ID NO: 1301190 - DNA, 15 bp, Homo sapiens
ttactaatttttttt

SEQ ID NO: 1301191 - DNA, 15 bp, Homo sapiens
tttactaattttttt

SEQ ID NO: 1301192 - DNA, 15 bp, Homo sapiens
atttactaatttttt

SEQ ID NO: 1301193 - DNA, 15 bp, Homo sapiens
catttactaattttt

SEQ ID NO: 1301194 - DNA, 15 bp, Homo sapiens
tcatttactaatttt

SEQ ID NO: 1301195 - DNA, 15 bp, Homo sapiens
atcatttactaattt

SEQ ID NO: 1301196 - DNA, 15 bp, Homo sapiens
tatcatttactaatt

SEQ ID NO: 1301197 - DNA, 15 bp, Homo sapiens
gtatcatttactaat

SEQ ID NO: 1301198 - DNA, 15 bp, Homo sapiens
ggtatcatttactaa

SEQ ID NO: 1301199 - DNA, 15 bp, Homo sapiens
tggtatcatttacta

SEQ ID NO: 1301200 - DNA, 15 bp, Homo sapiens
ttggtatcatttact

SEQ ID NO: 1301201 - DNA, 15 bp, Homo sapiens
cttggtatcatttac

SEQ ID NO: 1301202 - DNA, 15 bp, Homo sapiens
gcttggtatcattta

SEQ ID NO: 1301203 - DNA, 15 bp, Homo sapiens
agcttggtatcattt

SEQ ID NO: 1301204 - DNA, 15 bp, Homo sapiens
gagcttggtatcatt

SEQ ID NO: 1301205 - DNA, 15 bp, Homo sapiens
tgagcttggtatcat

SEQ ID NO: 1301206 - DNA, 15 bp, Homo sapiens
ttgagcttggtatca

SEQ ID NO: 1301207 - DNA, 15 bp, Homo sapiens
cttgagcttggtatc

SEQ ID NO: 1301208 - DNA, 15 bp, Homo sapiens
gcttgagcttggtat

SEQ ID NO: 1301209 - DNA, 15 bp, Homo sapiens
ggcttgagcttggta

SEQ ID NO: 1301210 - DNA, 15 bp, Homo sapiens
aggcttgagcttggt

SEQ ID NO: 1301211 - DNA, 15 bp, Homo sapiens
aaggcttgagcttgg

SEQ ID NO: 1301212 - DNA, 15 bp, Homo sapiens
caaggcttgagcttg

SEQ ID NO: 1301213 - DNA, 15 bp, Homo sapiens
ccaaggcttgagctt

SEQ ID NO: 1301214 - DNA, 15 bp, Homo sapiens
accaaggcttgagct

SEQ ID NO: 1301215 - DNA, 15 bp, Homo sapiens
aaccaaggcttgagc

SEQ ID NO: 1301216 - DNA, 15 bp, Homo sapiens
aaaccaaggcttgag

SEQ ID NO: 1301217 - DNA, 15 bp, Homo sapiens
aaaaccaaggcttga

SEQ ID NO: 1301218 - DNA, 15 bp, Homo sapiens
taaaaccaaggcttg

SEQ ID NO: 1301219 - DNA, 15 bp, Homo sapiens
ataaaaccaaggctt

SEQ ID NO: 1301220 - DNA, 15 bp, Homo sapiens
aataaaaccaaggct

SEQ ID NO: 1301221 - DNA, 15 bp, Homo sapiens
aaataaaaccaaggc

SEQ ID NO: 1301222 - DNA, 15 bp, Homo sapiens
gaaataaaaccaagg

SEQ ID NO: 1301223 - DNA, 15 bp, Homo sapiens
tgaaataaaaccaag

SEQ ID NO: 1301224 - DNA, 15 bp, Homo sapiens
atgaaataaaaccaa

SEQ ID NO: 1301225 - DNA, 15 bp, Homo sapiens
aatgaaataaaacca

SEQ ID NO: 1301226 - DNA, 15 bp, Homo sapiens
aaatgaaataaaacc

SEQ ID NO: 1301227 - DNA, 15 bp, Homo sapiens
gcaaatgaaataaaa

SEQ ID NO: 1301228 - DNA, 15 bp, Homo sapiens
aaagcaaatgaaata

SEQ ID NO: 1301229 - DNA, 15 bp, Homo sapiens
aaaagcaaatgaaat

SEQ ID NO: 1301230 - DNA, 15 bp, Homo sapiens
aaaaagcaaatgaaa

SEQ ID NO: 1301231 - DNA, 15 bp, Homo sapiens
gaaaaagcaaatgaa

SEQ ID NO: 1301232 - DNA, 15 bp, Homo sapiens
cgaaaaagcaaatga

SEQ ID NO: 1301233 - DNA, 15 bp, Homo sapiens
ccgaaaaagcaaatg

SEQ ID NO: 1301234 - DNA, 15 bp, Homo sapiens
tccgaaaaagcaaat

SEQ ID NO: 1301235 - DNA, 15 bp, Homo sapiens
ttccgaaaaagcaaa

SEQ ID NO: 1301236 - DNA, 15 bp, Homo sapiens
cttccgaaaaagcaa

SEQ ID NO: 1301237 - DNA, 15 bp, Homo sapiens
gcttccgaaaaagca

SEQ ID NO: 1301238 - DNA, 15 bp, Homo sapiens
tgcttccgaaaaagc

SEQ ID NO: 1301239 - DNA, 15 bp, Homo sapiens
ttgcttccgaaaaag

SEQ ID NO: 1301240 - DNA, 15 bp, Homo sapiens
gttgcttccgaaaaa

SEQ ID NO: 1301241 - DNA, 15 bp, Homo sapiens
tgttgcttccgaaaa

SEQ ID NO: 1301242 - DNA, 15 bp, Homo sapiens
atgttgcttccgaaa

SEQ ID NO: 1301243 - DNA, 15 bp, Homo sapiens
tatgttgcttccgaa

SEQ ID NO: 1301244 - DNA, 15 bp, Homo sapiens
gtatgttgcttccga

SEQ ID NO: 1301245 - DNA, 15 bp, Homo sapiens
tgtatgttgcttccg

SEQ ID NO: 1301246 - DNA, 15 bp, Homo sapiens
atgtatgttgcttcc

SEQ ID NO: 1301247 - DNA, 15 bp, Homo sapiens
gatgtatgttgcttc

SEQ ID NO: 1301248 - DNA, 15 bp, Homo sapiens
ggatgtatgttgctt

SEQ ID NO: 1301249 - DNA, 15 bp, Homo sapiens
gggatgtatgttgct

SEQ ID NO: 1301250 - DNA, 15 bp, Homo sapiens
tgggatgtatgttgc

SEQ ID NO: 1301251 - DNA, 15 bp, Homo sapiens
ttgggatgtatgttg

SEQ ID NO: 1301252 - DNA, 15 bp, Homo sapiens
attgggatgtatgtt

SEQ ID NO: 1301253 - DNA, 15 bp, Homo sapiens
tattgggatgtatgt

SEQ ID NO: 1301254 - DNA, 15 bp, Homo sapiens
atattgggatgtatg

SEQ ID NO: 1301255 - DNA, 15 bp, Homo sapiens
tatattgggatgtat

SEQ ID NO: 1301256 - DNA, 15 bp, Homo sapiens
ttatattgggatgta

SEQ ID NO: 1301257 - DNA, 15 bp, Homo sapiens
gttatattgggatgt

SEQ ID NO: 1301258 - DNA, 15 bp, Homo sapiens
agttatattgggatg

SEQ ID NO: 1301259 - DNA, 15 bp, Homo sapiens
gagttatattgggat

SEQ ID NO: 1301260 - DNA, 15 bp, Homo sapiens
agagttatattggga

SEQ ID NO: 1301261 - DNA, 15 bp, Homo sapiens
aagagttatattggg

SEQ ID NO: 1301262 - DNA, 15 bp, Homo sapiens
taagagttatattgg

SEQ ID NO: 1301263 - DNA, 15 bp, Homo sapiens
ttaagagttatattg

SEQ ID NO: 1301264 - DNA, 15 bp, Homo sapiens
attaagagttatatt

SEQ ID NO: 1301265 - DNA, 15 bp, Homo sapiens
aattaagagttatat

SEQ ID NO: 1301266 - DNA, 15 bp, Homo sapiens
caattaagagttata

SEQ ID NO: 1301267 - DNA, 15 bp, Homo sapiens
tcaattaagagttat

SEQ ID NO: 1301268 - DNA, 15 bp, Homo sapiens
ttcaattaagagtta

SEQ ID NO: 1301269 - DNA, 15 bp, Homo sapiens
cttcaattaagagtt

SEQ ID NO: 1301270 - DNA, 15 bp, Homo sapiens
ccttcaattaagagt

SEQ ID NO: 1301271 - DNA, 15 bp, Homo sapiens
accttcaattaagag

SEQ ID NO: 1301272 - DNA, 15 bp, Homo sapiens
taccttcaattaaga

SEQ ID NO: 1301273 - DNA, 15 bp, Homo sapiens
ataccttcaattaag

SEQ ID NO: 1301274 - DNA, 15 bp, Homo sapiens
aataccttcaattaa

SEQ ID NO: 1301275 - DNA, 15 bp, Homo sapiens
aaataccttcaatta

SEQ ID NO: 1301276 - DNA, 15 bp, Homo sapiens
aaaataccttcaatt

SEQ ID NO: 1301277 - DNA, 15 bp, Homo sapiens
taaaataccttcaat

SEQ ID NO: 1301278 - DNA, 15 bp, Homo sapiens
ataaaataccttcaa

SEQ ID NO: 1301279 - DNA, 15 bp, Homo sapiens
cataaaataccttca

SEQ ID NO: 1301280 - DNA, 15 bp, Homo sapiens
tcataaaataccttc

SEQ ID NO: 1301281 - DNA, 15 bp, Homo sapiens
ctcataaaatacctt

SEQ ID NO: 1301282 - DNA, 15 bp, Homo sapiens
tctcataaaatacct

SEQ ID NO: 1301283 - DNA, 15 bp, Homo sapiens
ttctcataaaatacc

SEQ ID NO: 1301284 - DNA, 15 bp, Homo sapiens
attctcataaaatac

SEQ ID NO: 1301285 - DNA, 15 bp, Homo sapiens
cattctcataaaata

SEQ ID NO: 1301286 - DNA, 15 bp, Homo sapiens
acattctcataaaat

SEQ ID NO: 1301287 - DNA, 15 bp, Homo sapiens
tacattctcataaaa

SEQ ID NO: 1301288 - DNA, 15 bp, Homo sapiens
atacattctcataaa

SEQ ID NO: 1301289 - DNA, 15 bp, Homo sapiens
catacattctcataa

SEQ ID NO: 1301290 - DNA, 15 bp, Homo sapiens
tcatacattctcata

SEQ ID NO: 1301291 - DNA, 15 bp, Homo sapiens
ctcatacattctcat

SEQ ID NO: 1301292 - DNA, 15 bp, Homo sapiens
cctcatacattctca

SEQ ID NO: 1301293 - DNA, 15 bp, Homo sapiens
gcctcatacattctc

SEQ ID NO: 1301294 - DNA, 15 bp, Homo sapiens
agcctcatacattct

SEQ ID NO: 1301295 - DNA, 15 bp, Homo sapiens
gagcctcatacattc

SEQ ID NO: 1301296 - DNA, 15 bp, Homo sapiens
agagcctcatacatt

SEQ ID NO: 1301297 - DNA, 15 bp, Homo sapiens
aagagcctcatacat

SEQ ID NO: 1301298 - DNA, 15 bp, Homo sapiens
aaagagcctcataca

SEQ ID NO: 1301299 - DNA, 15 bp, Homo sapiens
gaaagagcctcatac

SEQ ID NO: 1301300 - DNA, 15 bp, Homo sapiens
agaaagagcctcata

SEQ ID NO: 1301301 - DNA, 15 bp, Homo sapiens
cagaaagagcctcat

SEQ ID NO: 1301302 - DNA, 15 bp, Homo sapiens
tcagaaagagcctca

SEQ ID NO: 1301303 - DNA, 15 bp, Homo sapiens
atcagaaagagcctc

SEQ ID NO: 1301304 - DNA, 15 bp, Homo sapiens
catcagaaagagcct

SEQ ID NO: 1301305 - DNA, 15 bp, Homo sapiens
ccatcagaaagagcc

SEQ ID NO: 1301306 - DNA, 15 bp, Homo sapiens
tccatcagaaagagc

SEQ ID NO: 1301307 - DNA, 15 bp, Homo sapiens
atccatcagaaagag

SEQ ID NO: 1301308 - DNA, 15 bp, Homo sapiens
catccatcagaaaga

SEQ ID NO: 1301309 - DNA, 15 bp, Homo sapiens
ccatccatcagaaag

SEQ ID NO: 1301310 - DNA, 15 bp, Homo sapiens
tccatccatcagaaa

SEQ ID NO: 1301311 - DNA, 15 bp, Homo sapiens
ttccatccatcagaa

SEQ ID NO: 1301312 - DNA, 15 bp, Homo sapiens
tttccatccatcaga

SEQ ID NO: 1301313 - DNA, 15 bp, Homo sapiens
ctttccatccatcag

SEQ ID NO: 1301314 - DNA, 15 bp, Homo sapiens
gctttccatccatca

SEQ ID NO: 1301315 - DNA, 15 bp, Homo sapiens
agctttccatccatc

SEQ ID NO: 1301316 - DNA, 15 bp, Homo sapiens
aagctttccatccat

SEQ ID NO: 1301317 - DNA, 15 bp, Homo sapiens
taagctttccatcca

SEQ ID NO: 1301318 - DNA, 15 bp, Homo sapiens
ttaagctttccatcc

SEQ ID NO: 1301319 - DNA, 15 bp, Homo sapiens
gttaagctttccatc

SEQ ID NO: 1301320 - DNA, 15 bp, Homo sapiens
tgttaagctttccat

SEQ ID NO: 1301321 - DNA, 15 bp, Homo sapiens
ttgttaagctttcca

SEQ ID NO: 1301322 - DNA, 15 bp, Homo sapiens
tttgttaagctttcc

SEQ ID NO: 1301323 - DNA, 15 bp, Homo sapiens
atttgttaagctttc

SEQ ID NO: 1301324 - DNA, 15 bp, Homo sapiens
aatttgttaagcttt

SEQ ID NO: 1301325 - DNA, 15 bp, Homo sapiens
aaatttgttaagctt

SEQ ID NO: 1301326 - DNA, 15 bp, Homo sapiens
caaatttgttaagct

SEQ ID NO: 1301327 - DNA, 15 bp, Homo sapiens
gcaaatttgttaagc

SEQ ID NO: 1301328 - DNA, 15 bp, Homo sapiens
agcaaatttgttaag

SEQ ID NO: 1301329 - DNA, 15 bp, Homo sapiens
gagcaaatttgttaa

SEQ ID NO: 1301330 - DNA, 15 bp, Homo sapiens
agagcaaatttgtta

SEQ ID NO: 1301331 - DNA, 15 bp, Homo sapiens
aagagcaaatttgtt

SEQ ID NO: 1301332 - DNA, 15 bp, Homo sapiens
gaagagcaaatttgt

SEQ ID NO: 1301333 - DNA, 15 bp, Homo sapiens
agaagagcaaatttg

SEQ ID NO: 1301334 - DNA, 15 bp, Homo sapiens
gagaagagcaaattt

SEQ ID NO: 1301335 - DNA, 15 bp, Homo sapiens
agagaagagcaaatt

SEQ ID NO: 1301336 - DNA, 15 bp, Homo sapiens
tagagaagagcaaat

SEQ ID NO: 1301337 - DNA, 15 bp, Homo sapiens
gctagagaagagcaa

SEQ ID NO: 1301338 - DNA, 15 bp, Homo sapiens
ggctagagaagagca

SEQ ID NO: 1301339 - DNA, 15 bp, Homo sapiens
aggctagagaagagc

SEQ ID NO: 1301340 - DNA, 15 bp, Homo sapiens
taggctagagaagag

SEQ ID NO: 1301341 - DNA, 15 bp, Homo sapiens
ctaggctagagaaga

SEQ ID NO: 1301342 - DNA, 15 bp, Homo sapiens
actaggctagagaag

SEQ ID NO: 1301343 - DNA, 15 bp, Homo sapiens
cactaggctagagaa

SEQ ID NO: 1301344 - DNA, 15 bp, Homo sapiens
ccactaggctagaga

SEQ ID NO: 1301345 - DNA, 15 bp, Homo sapiens
gccactaggctagag

SEQ ID NO: 1301346 - DNA, 15 bp, Homo sapiens
tgccactaggctaga

SEQ ID NO: 1301347 - DNA, 15 bp, Homo sapiens
ctgccactaggctag

SEQ ID NO: 1301348 - DNA, 15 bp, Homo sapiens
tctgccactaggcta

SEQ ID NO: 1301349 - DNA, 15 bp, Homo sapiens
ttctgccactaggct

SEQ ID NO: 1301350 - DNA, 15 bp, Homo sapiens
tttctgccactaggc

SEQ ID NO: 1301351 - DNA, 15 bp, Homo sapiens
ttttctgccactagg

SEQ ID NO: 1301352 - DNA, 15 bp, Homo sapiens
attttctgccactag

SEQ ID NO: 1301353 - DNA, 15 bp, Homo sapiens
aattttctgccacta

SEQ ID NO: 1301354 - DNA, 15 bp, Homo sapiens
aaattttctgccact

SEQ ID NO: 1301355 - DNA, 15 bp, Homo sapiens
taaattttctgccac

SEQ ID NO: 1301356 - DNA, 15 bp, Homo sapiens
ctaaattttctgcca

SEQ ID NO: 1301357 - DNA, 15 bp, Homo sapiens
tctaaattttctgcc

SEQ ID NO: 1301358 - DNA, 15 bp, Homo sapiens
atctaaattttctgc

SEQ ID NO: 1301359 - DNA, 15 bp, Homo sapiens
tatctaaattttctg

SEQ ID NO: 1301360 - DNA, 15 bp, Homo sapiens
ttatctaaattttct

SEQ ID NO: 1301361 - DNA, 15 bp, Homo sapiens
attatctaaattttc

SEQ ID NO: 1301362 - DNA, 15 bp, Homo sapiens
tattatctaaatttt

SEQ ID NO: 1301363 - DNA, 15 bp, Homo sapiens
ctattatctaaattt

SEQ ID NO: 1301364 - DNA, 15 bp, Homo sapiens
cctattatctaaatt

SEQ ID NO: 1301365 - DNA, 15 bp, Homo sapiens
ccctattatctaaat

SEQ ID NO: 1301366 - DNA, 15 bp, Homo sapiens
accctattatctaaa

SEQ ID NO: 1301367 - DNA, 15 bp, Homo sapiens
aaccctattatctaa

SEQ ID NO: 1301368 - DNA, 15 bp, Homo sapiens
aaaccctattatcta

SEQ ID NO: 1301369 - DNA, 15 bp, Homo sapiens
aaaaccctattatct

SEQ ID NO: 1301370 - DNA, 15 bp, Homo sapiens
aaaaaccctattatc

SEQ ID NO: 1301371 - DNA, 15 bp, Homo sapiens
taaaaaaccctatta

SEQ ID NO: 1301372 - DNA, 15 bp, Homo sapiens
ctaaaaaaccctatt

SEQ ID NO: 1301373 - DNA, 15 bp, Homo sapiens
actaaaaaaccctat

SEQ ID NO: 1301374 - DNA, 15 bp, Homo sapiens
aactaaaaaacccta

SEQ ID NO: 1301375 - DNA, 15 bp, Homo sapiens
caactaaaaaaccct

SEQ ID NO: 1301376 - DNA, 15 bp, Homo sapiens
acaactaaaaaaccc

SEQ ID NO: 1301377 - DNA, 15 bp, Homo sapiens
tacaactaaaaaacc

SEQ ID NO: 1301378 - DNA, 15 bp, Homo sapiens
gtacaactaaaaaac

SEQ ID NO: 1301379 - DNA, 15 bp, Homo sapiens
agtacaactaaaaaa

SEQ ID NO: 1301380 - DNA, 15 bp, Homo sapiens
cagtacaactaaaaa

SEQ ID NO: 1301381 - DNA, 15 bp, Homo sapiens
acagtacaactaaaa

SEQ ID NO: 1301382 - DNA, 15 bp, Homo sapiens
tacagtacaactaaa

SEQ ID NO: 1301383 - DNA, 15 bp, Homo sapiens
ctacagtacaactaa

SEQ ID NO: 1301384 - DNA, 15 bp, Homo sapiens
actacagtacaacta

SEQ ID NO: 1301385 - DNA, 15 bp, Homo sapiens
tactacagtacaact

SEQ ID NO: 1301386 - DNA, 15 bp, Homo sapiens
atactacagtacaac

SEQ ID NO: 1301387 - DNA, 15 bp, Homo sapiens
aatactacagtacaa

SEQ ID NO: 1301388 - DNA, 15 bp, Homo sapiens
aaatactacagtaca

SEQ ID NO: 1301389 - DNA, 15 bp, Homo sapiens
aaaatactacagtac

SEQ ID NO: 1301390 - DNA, 15 bp, Homo sapiens
aaaaatactacagta

SEQ ID NO: 1301391 - DNA, 15 bp, Homo sapiens
aaaaaatactacagt

SEQ ID NO: 1301392 - DNA, 15 bp, Homo sapiens
caaaaaatactacag

SEQ ID NO: 1301393 - DNA, 15 bp, Homo sapiens
gcaaaaaatactaca

SEQ ID NO: 1301394 - DNA, 15 bp, Homo sapiens
agcaaaaaatactac

SEQ ID NO: 1301395 - DNA, 15 bp, Homo sapiens
gagcaaaaaatacta

SEQ ID NO: 1301396 - DNA, 15 bp, Homo sapiens
tgagcaaaaaatact

SEQ ID NO: 1301397 - DNA, 15 bp, Homo sapiens
atgagcaaaaaatac

SEQ ID NO: 1301398 - DNA, 15 bp, Homo sapiens
aatgagcaaaaaata

SEQ ID NO: 1301399 - DNA, 15 bp, Homo sapiens
taatgagcaaaaaat

SEQ ID NO: 1301400 - DNA, 15 bp, Homo sapiens
ttaatgagcaaaaaa

SEQ ID NO: 1301401 - DNA, 15 bp, Homo sapiens
gttaatgagcaaaaa

SEQ ID NO: 1301402 - DNA, 15 bp, Homo sapiens
tgttaatgagcaaaa

SEQ ID NO: 1301403 - DNA, 15 bp, Homo sapiens
atgttaatgagcaaa

SEQ ID NO: 1301404 - DNA, 15 bp, Homo sapiens
gatgttaatgagcaa

SEQ ID NO: 1301405 - DNA, 15 bp, Homo sapiens
ggatgttaatgagca

SEQ ID NO: 1301406 - DNA, 15 bp, Homo sapiens
tggatgttaatgagc

SEQ ID NO: 1301407 - DNA, 15 bp, Homo sapiens
ctggatgttaatgag

SEQ ID NO: 1301408 - DNA, 15 bp, Homo sapiens
actggatgttaatga

SEQ ID NO: 1301409 - DNA, 15 bp, Homo sapiens
cactggatgttaatg

SEQ ID NO: 1301410 - DNA, 15 bp, Homo sapiens
tcactggatgttaat

SEQ ID NO: 1301411 - DNA, 15 bp, Homo sapiens
ttcactggatgttaa

SEQ ID NO: 1301412 - DNA, 15 bp, Homo sapiens
tttcactggatgtta

SEQ ID NO: 1301413 - DNA, 15 bp, Homo sapiens
atttcactggatgtt

SEQ ID NO: 1301414 - DNA, 15 bp, Homo sapiens
catttcactggatgt

SEQ ID NO: 1301415 - DNA, 15 bp, Homo sapiens
tcatttcactggatg

SEQ ID NO: 1301416 - DNA, 15 bp, Homo sapiens
atcatttcactggat

SEQ ID NO: 1301417 - DNA, 15 bp, Homo sapiens
tatcatttcactgga

SEQ ID NO: 1301418 - DNA, 15 bp, Homo sapiens
atatcatttcactgg

SEQ ID NO: 1301419 - DNA, 15 bp, Homo sapiens
aatatcatttcactg

SEQ ID NO: 1301420 - DNA, 15 bp, Homo sapiens
caatatcatttcact

SEQ ID NO: 1301421 - DNA, 15 bp, Homo sapiens
acaatatcatttcac

SEQ ID NO: 1301422 - DNA, 15 bp, Homo sapiens
gacaatatcatttca

SEQ ID NO: 1301423 - DNA, 15 bp, Homo sapiens
agacaatatcatttc

SEQ ID NO: 1301424 - DNA, 15 bp, Homo sapiens
cagacaatatcattt

SEQ ID NO: 1301425 - DNA, 15 bp, Homo sapiens
gcagacaatatcatt

SEQ ID NO: 1301426 - DNA, 15 bp, Homo sapiens
agcagacaatatcat

SEQ ID NO: 1301427 - DNA, 15 bp, Homo sapiens
aagcagacaatatca

SEQ ID NO: 1301428 - DNA, 15 bp, Homo sapiens
taagcagacaatatc

SEQ ID NO: 1301429 - DNA, 15 bp, Homo sapiens
ataagcagacaatat

SEQ ID NO: 1301430 - DNA, 15 bp, Homo sapiens
cataagcagacaata

SEQ ID NO: 1301431 - DNA, 15 bp, Homo sapiens
acataagcagacaat

SEQ ID NO: 1301432 - DNA, 15 bp, Homo sapiens
aacataagcagacaa

SEQ ID NO: 1301433 - DNA, 15 bp, Homo sapiens
gaacataagcagaca

SEQ ID NO: 1301434 - DNA, 15 bp, Homo sapiens
tgaacataagcagac

SEQ ID NO: 1301435 - DNA, 15 bp, Homo sapiens
ctgaacataagcaga

SEQ ID NO: 1301436 - DNA, 15 bp, Homo sapiens
actgaacataagcag

SEQ ID NO: 1301437 - DNA, 15 bp, Homo sapiens
tactgaacataagca

SEQ ID NO: 1301438 - DNA, 15 bp, Homo sapiens
ctactgaacataagc

SEQ ID NO: 1301439 - DNA, 15 bp, Homo sapiens
actactgaacataag

SEQ ID NO: 1301440 - DNA, 15 bp, Homo sapiens
aactactgaacataa

SEQ ID NO: 1301441 - DNA, 15 bp, Homo sapiens
caactactgaacata

SEQ ID NO: 1301442 - DNA, 15 bp, Homo sapiens
acaactactgaacat

SEQ ID NO: 1301443 - DNA, 15 bp, Homo sapiens
cacaactactgaaca

SEQ ID NO: 1301444 - DNA, 15 bp, Homo sapiens
ccacaactactgaac

SEQ ID NO: 1301445 - DNA, 15 bp, Homo sapiens
accacaactactgaa

SEQ ID NO: 1301446 - DNA, 15 bp, Homo sapiens
aaccacaactactga

SEQ ID NO: 1301447 - DNA, 15 bp, Homo sapiens
taaccacaactactg

SEQ ID NO: 1301448 - DNA, 15 bp, Homo sapiens
gtaaccacaactact

SEQ ID NO: 1301449 - DNA, 15 bp, Homo sapiens
ggtaaccacaactac

SEQ ID NO: 1301450 - DNA, 15 bp, Homo sapiens
aggtaaccacaacta

SEQ ID NO: 1301451 - DNA, 15 bp, Homo sapiens
taggtaaccacaact

SEQ ID NO: 1301452 - DNA, 15 bp, Homo sapiens
ctaggtaaccacaac

SEQ ID NO: 1301453 - DNA, 15 bp, Homo sapiens
actaggtaaccacaa

SEQ ID NO: 1301454 - DNA, 15 bp, Homo sapiens
aactaggtaaccaca

SEQ ID NO: 1301455 - DNA, 15 bp, Homo sapiens
taactaggtaaccac

SEQ ID NO: 1301456 - DNA, 15 bp, Homo sapiens
ataactaggtaacca

SEQ ID NO: 1301457 - DNA, 15 bp, Homo sapiens
aataactaggtaacc

SEQ ID NO: 1301458 - DNA, 15 bp, Homo sapiens
taataactaggtaac

SEQ ID NO: 1301459 - DNA, 15 bp, Homo sapiens
ataataactaggtaa

SEQ ID NO: 1301460 - DNA, 15 bp, Homo sapiens
cataataactaggta

SEQ ID NO: 1301461 - DNA, 15 bp, Homo sapiens
ccataataactaggt

SEQ ID NO: 1301462 - DNA, 15 bp, Homo sapiens
tccataataactagg

SEQ ID NO: 1301463 - DNA, 15 bp, Homo sapiens
ttccataataactag

SEQ ID NO: 1301464 - DNA, 15 bp, Homo sapiens
cttccataataacta

SEQ ID NO: 1301465 - DNA, 15 bp, Homo sapiens
acttccataataact

SEQ ID NO: 1301466 - DNA, 15 bp, Homo sapiens
cacttccataataac

SEQ ID NO: 1301467 - DNA, 15 bp, Homo sapiens
acacttccataataa

SEQ ID NO: 1301468 - DNA, 15 bp, Homo sapiens
aacacttccataata

SEQ ID NO: 1301469 - DNA, 15 bp, Homo sapiens
aaacacttccataat

SEQ ID NO: 1301470 - DNA, 15 bp, Homo sapiens
gaaacacttccataa

SEQ ID NO: 1301471 - DNA, 15 bp, Homo sapiens
ggaaacacttccata

SEQ ID NO: 1301472 - DNA, 15 bp, Homo sapiens
tggaaacacttccat

SEQ ID NO: 1301473 - DNA, 15 bp, Homo sapiens
gtggaaacacttcca

SEQ ID NO: 1301474 - DNA, 15 bp, Homo sapiens
tgtggaaacacttcc

SEQ ID NO: 1301475 - DNA, 15 bp, Homo sapiens
atgtggaaacacttc

SEQ ID NO: 1301476 - DNA, 15 bp, Homo sapiens
aatgtggaaacactt

SEQ ID NO: 1301477 - DNA, 15 bp, Homo sapiens
aaatgtggaaacact

SEQ ID NO: 1301478 - DNA, 15 bp, Homo sapiens
aaaatgtggaaacac

SEQ ID NO: 1301479 - DNA, 15 bp, Homo sapiens
aaaaatgtggaaaca

SEQ ID NO: 1301480 - DNA, 15 bp, Homo sapiens
taaaaatgtggaaac

SEQ ID NO: 1301481 - DNA, 15 bp, Homo sapiens
ataaaaatgtggaaa

SEQ ID NO: 1301482 - DNA, 15 bp, Homo sapiens
cataaaaatgtggaa

SEQ ID NO: 1301483 - DNA, 15 bp, Homo sapiens
tcataaaaatgtgga

SEQ ID NO: 1301484 - DNA, 15 bp, Homo sapiens
ttcataaaaatgtgg

SEQ ID NO: 1301485 - DNA, 15 bp, Homo sapiens
gttcataaaaatgtg

SEQ ID NO: 1301486 - DNA, 15 bp, Homo sapiens
tgttcataaaaatgt

SEQ ID NO: 1301487 - DNA, 15 bp, Homo sapiens
ttgttcataaaaatg

SEQ ID NO: 1301488 - DNA, 15 bp, Homo sapiens
attgttcataaaaat

SEQ ID NO: 1301489 - DNA, 15 bp, Homo sapiens
aattgttcataaaaa

SEQ ID NO: 1301490 - DNA, 15 bp, Homo sapiens
aaattgttcataaaa

SEQ ID NO: 1301491 - DNA, 15 bp, Homo sapiens
taaattgttcataaa

SEQ ID NO: 1301492 - DNA, 15 bp, Homo sapiens
ttaaattgttcataa

SEQ ID NO: 1301493 - DNA, 15 bp, Homo sapiens
tttaaattgttcata

SEQ ID NO: 1301494 - DNA, 15 bp, Homo sapiens
ttttaaattgttcat

SEQ ID NO: 1301495 - DNA, 15 bp, Homo sapiens
tttttaaattgttca

SEQ ID NO: 1301496 - DNA, 15 bp, Homo sapiens
ctttttaaattgttc

SEQ ID NO: 1301497 - DNA, 15 bp, Homo sapiens
actttttaaattgtt

SEQ ID NO: 1301498 - DNA, 15 bp, Homo sapiens
gactttttaaattgt

SEQ ID NO: 1301499 - DNA, 15 bp, Homo sapiens
tgactttttaaattg

SEQ ID NO: 1301500 - DNA, 15 bp, Homo sapiens
atgactttttaaatt

SEQ ID NO: 1301501 - DNA, 15 bp, Homo sapiens
tatgactttttaaat

SEQ ID NO: 1301502 - DNA, 15 bp, Homo sapiens
atatgactttttaaa

SEQ ID NO: 1301503 - DNA, 15 bp, Homo sapiens
tatatgactttttaa

SEQ ID NO: 1301504 - DNA, 15 bp, Homo sapiens
atatatgacttttta

SEQ ID NO: 1301505 - DNA, 15 bp, Homo sapiens
aatatatgacttttt

SEQ ID NO: 1301506 - DNA, 15 bp, Homo sapiens
taatatatgactttt

SEQ ID NO: 1301507 - DNA, 15 bp, Homo sapiens
ataatatatgacttt

SEQ ID NO: 1301508 - DNA, 15 bp, Homo sapiens
cataatatatgactt

SEQ ID NO: 1301509 - DNA, 15 bp, Homo sapiens
ccataatatatgact

SEQ ID NO: 1301510 - DNA, 15 bp, Homo sapiens
tccataatatatgac

SEQ ID NO: 1301511 - DNA, 15 bp, Homo sapiens
ctccataatatatga

SEQ ID NO: 1301512 - DNA, 15 bp, Homo sapiens
gctccataatatatg

SEQ ID NO: 1301513 - DNA, 15 bp, Homo sapiens
tgctccataatatat

SEQ ID NO: 1301514 - DNA, 15 bp, Homo sapiens
ctgctccataatata

SEQ ID NO: 1301515 - DNA, 15 bp, Homo sapiens
tctgctccataatat

SEQ ID NO: 1301516 - DNA, 15 bp, Homo sapiens
ttctgctccataata

SEQ ID NO: 1301517 - DNA, 15 bp, Homo sapiens
tttctgctccataat

SEQ ID NO: 1301518 - DNA, 15 bp, Homo sapiens
ttttctgctccataa

SEQ ID NO: 1301519 - DNA, 15 bp, Homo sapiens
attttctgctccata

SEQ ID NO: 1301520 - DNA, 15 bp, Homo sapiens
tattttctgctccat

SEQ ID NO: 1301521 - DNA, 15 bp, Homo sapiens
atattttctgctcca

SEQ ID NO: 1301522 - DNA, 15 bp, Homo sapiens
aatattttctgctcc

SEQ ID NO: 1301523 - DNA, 15 bp, Homo sapiens
taatattttctgctc

SEQ ID NO: 1301524 - DNA, 15 bp, Homo sapiens
ttaatattttctgct

SEQ ID NO: 1301525 - DNA, 15 bp, Homo sapiens
attaatattttctgc

SEQ ID NO: 1301526 - DNA, 15 bp, Homo sapiens
aattaatattttctg

SEQ ID NO: 1301527 - DNA, 15 bp, Homo sapiens
gaattaatattttct

SEQ ID NO: 1301528 - DNA, 15 bp, Homo sapiens
agaattaatattttc

SEQ ID NO: 1301529 - DNA, 15 bp, Homo sapiens
cagaattaatatttt

SEQ ID NO: 1301530 - DNA, 15 bp, Homo sapiens
tcagaattaatattt

SEQ ID NO: 1301531 - DNA, 15 bp, Homo sapiens
atcagaattaatatt

SEQ ID NO: 1301532 - DNA, 15 bp, Homo sapiens
aatcagaattaatat

SEQ ID NO: 1301533 - DNA, 15 bp, Homo sapiens
taatcagaattaata

SEQ ID NO: 1301534 - DNA, 15 bp, Homo sapiens
gtaatcagaattaat

SEQ ID NO: 1301535 - DNA, 15 bp, Homo sapiens
tgtaatcagaattaa

SEQ ID NO: 1301536 - DNA, 15 bp, Homo sapiens
gtgtaatcagaatta

SEQ ID NO: 1301537 - DNA, 15 bp, Homo sapiens
tgtgtaatcagaatt

SEQ ID NO: 1301538 - DNA, 15 bp, Homo sapiens
ctgtgtaatcagaat

SEQ ID NO: 1301539 - DNA, 15 bp, Homo sapiens
actgtgtaatcagaa

SEQ ID NO: 1301540 - DNA, 15 bp, Homo sapiens
tactgtgtaatcaga

SEQ ID NO: 1301541 - DNA, 15 bp, Homo sapiens
atactgtgtaatcag

SEQ ID NO: 1301542 - DNA, 15 bp, Homo sapiens
gatactgtgtaatca

SEQ ID NO: 1301543 - DNA, 15 bp, Homo sapiens
ggatactgtgtaatc

SEQ ID NO: 1301544 - DNA, 15 bp, Homo sapiens
aggatactgtgtaat

SEQ ID NO: 1301545 - DNA, 15 bp, Homo sapiens
gaggatactgtgtaa

SEQ ID NO: 1301546 - DNA, 15 bp, Homo sapiens
cgaggatactgtgta

SEQ ID NO: 1301547 - DNA, 15 bp, Homo sapiens
tcgaggatactgtgt

SEQ ID NO: 1301548 - DNA, 15 bp, Homo sapiens
gtcgaggatactgtg

SEQ ID NO: 1301549 - DNA, 15 bp, Homo sapiens
tgtcgaggatactgt

SEQ ID NO: 1301550 - DNA, 15 bp, Homo sapiens
atgtcgaggatactg

SEQ ID NO: 1301551 - DNA, 15 bp, Homo sapiens
aatgtcgaggatact

SEQ ID NO: 1301552 - DNA, 15 bp, Homo sapiens
caatgtcgaggatac

SEQ ID NO: 1301553 - DNA, 15 bp, Homo sapiens
tcaatgtcgaggata

SEQ ID NO: 1301554 - DNA, 15 bp, Homo sapiens
atcaatgtcgaggat

SEQ ID NO: 1301555 - DNA, 15 bp, Homo sapiens
aatcaatgtcgagga

SEQ ID NO: 1301556 - DNA, 15 bp, Homo sapiens
aaatcaatgtcgagg

SEQ ID NO: 1301557 - DNA, 15 bp, Homo sapiens
gaaatcaatgtcgag

SEQ ID NO: 1301558 - DNA, 15 bp, Homo sapiens
agaaatcaatgtcga

SEQ ID NO: 1301559 - DNA, 15 bp, Homo sapiens
cagaaatcaatgtcg

SEQ ID NO: 1301560 - DNA, 15 bp, Homo sapiens
acagaaatcaatgtc

SEQ ID NO: 1301561 - DNA, 15 bp, Homo sapiens
aacagaaatcaatgt

SEQ ID NO: 1301562 - DNA, 15 bp, Homo sapiens
aaacagaaatcaatg

SEQ ID NO: 1301563 - DNA, 15 bp, Homo sapiens
aaaacagaaatcaat

SEQ ID NO: 1301564 - DNA, 15 bp, Homo sapiens
aaaaacagaaatcaa

SEQ ID NO: 1301565 - DNA, 15 bp, Homo sapiens
taaaaacagaaatca

SEQ ID NO: 1301566 - DNA, 15 bp, Homo sapiens
gtaaaaacagaaatc

SEQ ID NO: 1301567 - DNA, 15 bp, Homo sapiens
ggtaaaaacagaaat

SEQ ID NO: 1301568 - DNA, 15 bp, Homo sapiens
aggtaaaaacagaaa

SEQ ID NO: 1301569 - DNA, 15 bp, Homo sapiens
gaggtaaaaacagaa

SEQ ID NO: 1301570 - DNA, 15 bp, Homo sapiens
ggaggtaaaaacaga

SEQ ID NO: 1301571 - DNA, 15 bp, Homo sapiens
aggaggtaaaaacag

SEQ ID NO: 1301572 - DNA, 15 bp, Homo sapiens
taggaggtaaaaaca

SEQ ID NO: 1301573 - DNA, 15 bp, Homo sapiens
ttaggaggtaaaaac

SEQ ID NO: 1301574 - DNA, 15 bp, Homo sapiens
tttaggaggtaaaaa

SEQ ID NO: 1301575 - DNA, 15 bp, Homo sapiens
ctttaggaggtaaaa

SEQ ID NO: 1301576 - DNA, 15 bp, Homo sapiens
tctttaggaggtaaa

SEQ ID NO: 1301577 - DNA, 15 bp, Homo sapiens
ttctttaggaggtaa

SEQ ID NO: 1301578 - DNA, 15 bp, Homo sapiens
gttctttaggaggta

SEQ ID NO: 1301579 - DNA, 15 bp, Homo sapiens
agttctttaggaggt

SEQ ID NO: 1301580 - DNA, 15 bp, Homo sapiens
cagttctttaggagg

SEQ ID NO: 1301581 - DNA, 15 bp, Homo sapiens
gcagttctttaggag

SEQ ID NO: 1301582 - DNA, 15 bp, Homo sapiens
tgcagttctttagga

SEQ ID NO: 1301583 - DNA, 15 bp, Homo sapiens
gtgcagttctttagg

SEQ ID NO: 1301584 - DNA, 15 bp, Homo sapiens
tgtgcagttctttag

SEQ ID NO: 1301585 - DNA, 15 bp, Homo sapiens
ctgtgcagttcttta

SEQ ID NO: 1301586 - DNA, 15 bp, Homo sapiens
actgtgcagttcttt

SEQ ID NO: 1301587 - DNA, 15 bp, Homo sapiens
cactgtgcagttctt

SEQ ID NO: 1301588 - DNA, 15 bp, Homo sapiens
tcactgtgcagttct

SEQ ID NO: 1301589 - DNA, 15 bp, Homo sapiens
ttcactgtgcagttc

SEQ ID NO: 1301590 - DNA, 15 bp, Homo sapiens
attcactgtgcagtt

SEQ ID NO: 1301591 - DNA, 15 bp, Homo sapiens
gattcactgtgcagt

SEQ ID NO: 1301592 - DNA, 15 bp, Homo sapiens
ggattcactgtgcag

SEQ ID NO: 1301593 - DNA, 15 bp, Homo sapiens
tggattcactgtgca

SEQ ID NO: 1301594 - DNA, 15 bp, Homo sapiens
ttggattcactgtgc

SEQ ID NO: 1301595 - DNA, 15 bp, Homo sapiens
tttggattcactgtg

SEQ ID NO: 1301596 - DNA, 15 bp, Homo sapiens
ttttggattcactgt

SEQ ID NO: 1301597 - DNA, 15 bp, Homo sapiens
cttttggattcactg

SEQ ID NO: 1301598 - DNA, 15 bp, Homo sapiens
tcttttggattcact

SEQ ID NO: 1301599 - DNA, 15 bp, Homo sapiens
ttcttttggattcac

SEQ ID NO: 1301600 - DNA, 15 bp, Homo sapiens
tttcttttggattca

SEQ ID NO: 1301601 - DNA, 15 bp, Homo sapiens
ctttcttttggattc

SEQ ID NO: 1301602 - DNA, 15 bp, Homo sapiens
actttcttttggatt

SEQ ID NO: 1301603 - DNA, 15 bp, Homo sapiens
tactttcttttggat

SEQ ID NO: 1301604 - DNA, 15 bp, Homo sapiens
atactttcttttgga

SEQ ID NO: 1301605 - DNA, 15 bp, Homo sapiens
tatactttcttttgg

SEQ ID NO: 1301606 - DNA, 15 bp, Homo sapiens
gtatactttcttttg

SEQ ID NO: 1301607 - DNA, 15 bp, Homo sapiens
agtatactttctttt

SEQ ID NO: 1301608 - DNA, 15 bp, Homo sapiens
cagtatactttcttt

SEQ ID NO: 1301609 - DNA, 15 bp, Homo sapiens
tcagtatactttctt

SEQ ID NO: 1301610 - DNA, 15 bp, Homo sapiens
ttcagtatactttct

SEQ ID NO: 1301611 - DNA, 15 bp, Homo sapiens
tttcagtatactttc

SEQ ID NO: 1301612 - DNA, 15 bp, Homo sapiens
ttttcagtatacttt

SEQ ID NO: 1301613 - DNA, 15 bp, Homo sapiens
cttttcagtatactt

SEQ ID NO: 1301614 - DNA, 15 bp, Homo sapiens
tcttttcagtatact

SEQ ID NO: 1301615 - DNA, 15 bp, Homo sapiens
ctcttttcagtatac

SEQ ID NO: 1301616 - DNA, 15 bp, Homo sapiens
actcttttcagtata

SEQ ID NO: 1301617 - DNA, 15 bp, Homo sapiens
cactcttttcagtat

SEQ ID NO: 1301618 - DNA, 15 bp, Homo sapiens
tcactcttttcagta

SEQ ID NO: 1301619 - DNA, 15 bp, Homo sapiens
ttcactcttttcagt

SEQ ID NO: 1301620 - DNA, 15 bp, Homo sapiens
cttcactcttttcag

SEQ ID NO: 1301621 - DNA, 15 bp, Homo sapiens
ccttcactcttttca

SEQ ID NO: 1301622 - DNA, 15 bp, Homo sapiens
tccttcactcttttc

SEQ ID NO: 1301623 - DNA, 15 bp, Homo sapiens
atccttcactctttt

SEQ ID NO: 1301624 - DNA, 15 bp, Homo sapiens
tatccttcactcttt

SEQ ID NO: 1301625 - DNA, 15 bp, Homo sapiens
atatccttcactctt

SEQ ID NO: 1301626 - DNA, 15 bp, Homo sapiens
tatatccttcactct

SEQ ID NO: 1301627 - DNA, 15 bp, Homo sapiens
ctatatccttcactc

SEQ ID NO: 1301628 - DNA, 15 bp, Homo sapiens
cctatatccttcact

SEQ ID NO: 1301629 - DNA, 15 bp, Homo sapiens
tcctatatccttcac

SEQ ID NO: 1301630 - DNA, 15 bp, Homo sapiens
atcctatatccttca

SEQ ID NO: 1301631 - DNA, 15 bp, Homo sapiens
tatcctatatccttc

SEQ ID NO: 1301632 - DNA, 15 bp, Homo sapiens
gtatcctatatcctt

SEQ ID NO: 1301633 - DNA, 15 bp, Homo sapiens
tgtatcctatatcct

SEQ ID NO: 1301634 - DNA, 15 bp, Homo sapiens
atgtatcctatatcc

SEQ ID NO: 1301635 - DNA, 15 bp, Homo sapiens
gatgtatcctatatc

SEQ ID NO: 1301636 - DNA, 15 bp, Homo sapiens
agatgtatcctatat

SEQ ID NO: 1301637 - DNA, 15 bp, Homo sapiens
aagatgtatcctata

SEQ ID NO: 1301638 - DNA, 15 bp, Homo sapiens
aaagatgtatcctat

SEQ ID NO: 1301639 - DNA, 15 bp, Homo sapiens
taaagatgtatccta

SEQ ID NO: 1301640 - DNA, 15 bp, Homo sapiens
ttaaagatgtatcct

SEQ ID NO: 1301641 - DNA, 15 bp, Homo sapiens
tttaaagatgtatcc

SEQ ID NO: 1301642 - DNA, 15 bp, Homo sapiens
ctttaaagatgtatc

SEQ ID NO: 1301643 - DNA, 15 bp, Homo sapiens
tctttaaagatgtat

SEQ ID NO: 1301644 - DNA, 15 bp, Homo sapiens
ctctttaaagatgta

SEQ ID NO: 1301645 - DNA, 15 bp, Homo sapiens
tctctttaaagatgt

SEQ ID NO: 1301646 - DNA, 15 bp, Homo sapiens
ttctctttaaagatg

SEQ ID NO: 1301647 - DNA, 15 bp, Homo sapiens
tttctctttaaagat

SEQ ID NO: 1301648 - DNA, 15 bp, Homo sapiens
atttctctttaaaga

SEQ ID NO: 1301649 - DNA, 15 bp, Homo sapiens
aatttctctttaaag

SEQ ID NO: 1301650 - DNA, 15 bp, Homo sapiens
aaatttctctttaaa

SEQ ID NO: 1301651 - DNA, 15 bp, Homo sapiens
caaatttctctttaa

SEQ ID NO: 1301652 - DNA, 15 bp, Homo sapiens
gcaaatttctcttta

SEQ ID NO: 1301653 - DNA, 15 bp, Homo sapiens
agcaaatttctcttt

SEQ ID NO: 1301654 - DNA, 15 bp, Homo sapiens
tagcaaatttctctt

SEQ ID NO: 1301655 - DNA, 15 bp, Homo sapiens
ttagcaaatttctct

SEQ ID NO: 1301656 - DNA, 15 bp, Homo sapiens
tttagcaaatttctc

SEQ ID NO: 1301657 - DNA, 15 bp, Homo sapiens
ctttagcaaatttct

SEQ ID NO: 1301658 - DNA, 15 bp, Homo sapiens
gctttagcaaatttc

SEQ ID NO: 1301659 - DNA, 15 bp, Homo sapiens
agctttagcaaattt

SEQ ID NO: 1301660 - DNA, 15 bp, Homo sapiens
cagctttagcaaatt

SEQ ID NO: 1301661 - DNA, 15 bp, Homo sapiens
acagctttagcaaat

SEQ ID NO: 1301662 - DNA, 15 bp, Homo sapiens
cacagctttagcaaa

SEQ ID NO: 1301663 - DNA, 15 bp, Homo sapiens
ccacagctttagcaa

SEQ ID NO: 1301664 - DNA, 15 bp, Homo sapiens
cccacagctttagca

SEQ ID NO: 1301665 - DNA, 15 bp, Homo sapiens
tcccacagctttagc

SEQ ID NO: 1301666 - DNA, 15 bp, Homo sapiens
gtcccacagctttag

SEQ ID NO: 1301667 - DNA, 15 bp, Homo sapiens
tgtcccacagcttta

SEQ ID NO: 1301668 - DNA, 15 bp, Homo sapiens
ctgtcccacagcttt

SEQ ID NO: 1301669 - DNA, 15 bp, Homo sapiens
cctgtcccacagctt

SEQ ID NO: 1301670 - DNA, 15 bp, Homo sapiens
ccctgtcccacagct

SEQ ID NO: 1301671 - DNA, 15 bp, Homo sapiens
accctgtcccacagc

SEQ ID NO: 1301672 - DNA, 15 bp, Homo sapiens
aaccctgtcccacag

SEQ ID NO: 1301673 - DNA, 15 bp, Homo sapiens
caaccctgtcccaca

SEQ ID NO: 1301674 - DNA, 15 bp, Homo sapiens
acaaccctgtcccac

SEQ ID NO: 1301675 - DNA, 15 bp, Homo sapiens
cacaaccctgtccca

SEQ ID NO: 1301676 - DNA, 15 bp, Homo sapiens
acacaaccctgtccc

SEQ ID NO: 1301677 - DNA, 15 bp, Homo sapiens
gacacaaccctgtcc

SEQ ID NO: 1301678 - DNA, 15 bp, Homo sapiens
cgacacaaccctgtc

SEQ ID NO: 1301679 - DNA, 15 bp, Homo sapiens
tcgacacaaccctgt

SEQ ID NO: 1301680 - DNA, 15 bp, Homo sapiens
ttcgacacaaccctg

SEQ ID NO: 1301681 - DNA, 15 bp, Homo sapiens
tttcgacacaaccct

SEQ ID NO: 1301682 - DNA, 15 bp, Homo sapiens
atttcgacacaaccc

SEQ ID NO: 1301683 - DNA, 15 bp, Homo sapiens
aatttcgacacaacc

SEQ ID NO: 1301684 - DNA, 15 bp, Homo sapiens
caatttcgacacaac

SEQ ID NO: 1301685 - DNA, 15 bp, Homo sapiens
ccaatttcgacacaa

SEQ ID NO: 1301686 - DNA, 15 bp, Homo sapiens
tccaatttcgacaca

SEQ ID NO: 1301687 - DNA, 15 bp, Homo sapiens
atccaatttcgacac

SEQ ID NO: 1301688 - DNA, 15 bp, Homo sapiens
gatccaatttcgaca

SEQ ID NO: 1301689 - DNA, 15 bp, Homo sapiens
tgatccaatttcgac

SEQ ID NO: 1301690 - DNA, 15 bp, Homo sapiens
gtgatccaatttcga

SEQ ID NO: 1301691 - DNA, 15 bp, Homo sapiens
tgtgatccaatttcg

SEQ ID NO: 1301692 - DNA, 15 bp, Homo sapiens
ctgtgatccaatttc

SEQ ID NO: 1301693 - DNA, 15 bp, Homo sapiens
cctgtgatccaattt

SEQ ID NO: 1301694 - DNA, 15 bp, Homo sapiens
acctgtgatccaatt

SEQ ID NO: 1301695 - DNA, 15 bp, Homo sapiens
tacctgtgatccaat

SEQ ID NO: 1301696 - DNA, 15 bp, Homo sapiens
ttacctgtgatccaa

SEQ ID NO: 1301697 - DNA, 15 bp, Homo sapiens
gttacctgtgatcca

SEQ ID NO: 1301698 - DNA, 15 bp, Homo sapiens
agttacctgtgatcc

SEQ ID NO: 1301699 - DNA, 15 bp, Homo sapiens
aagttacctgtgatc

SEQ ID NO: 1301700 - DNA, 15 bp, Homo sapiens
caagttacctgtgat

SEQ ID NO: 1301701 - DNA, 15 bp, Homo sapiens
tcaagttacctgtga

SEQ ID NO: 1301702 - DNA, 15 bp, Homo sapiens
ttcaagttacctgtg

SEQ ID NO: 1301703 - DNA, 15 bp, Homo sapiens
attcaagttacctgt

SEQ ID NO: 1301704 - DNA, 15 bp, Homo sapiens
aattcaagttacctg

SEQ ID NO: 1301705 - DNA, 15 bp, Homo sapiens
gaattcaagttacct

SEQ ID NO: 1301706 - DNA, 15 bp, Homo sapiens
tgaattcaagttacc

SEQ ID NO: 1301707 - DNA, 15 bp, Homo sapiens
atgaattcaagttac

SEQ ID NO: 1301708 - DNA, 15 bp, Homo sapiens
aatgaattcaagtta

SEQ ID NO: 1301709 - DNA, 15 bp, Homo sapiens
caatgaattcaagtt

SEQ ID NO: 1301710 - DNA, 15 bp, Homo sapiens
acaatgaattcaagt

SEQ ID NO: 1301711 - DNA, 15 bp, Homo sapiens
tacaatgaattcaag

SEQ ID NO: 1301712 - DNA, 15 bp, Homo sapiens
ttacaatgaattcaa

SEQ ID NO: 1301713 - DNA, 15 bp, Homo sapiens
attacaatgaattca

SEQ ID NO: 1301714 - DNA, 15 bp, Homo sapiens
aattacaatgaattc

SEQ ID NO: 1301715 - DNA, 15 bp, Homo sapiens
gaattacaatgaatt

SEQ ID NO: 1301716 - DNA, 15 bp, Homo sapiens
cgaattacaatgaat

SEQ ID NO: 1301717 - DNA, 15 bp, Homo sapiens
acgaattacaatgaa

SEQ ID NO: 1301718 - DNA, 15 bp, Homo sapiens
cacgaattacaatga

SEQ ID NO: 1301719 - DNA, 15 bp, Homo sapiens
ccacgaattacaatg

SEQ ID NO: 1301720 - DNA, 15 bp, Homo sapiens
accacgaattacaat

SEQ ID NO: 1301721 - DNA, 15 bp, Homo sapiens
taccacgaattacaa

SEQ ID NO: 1301722 - DNA, 15 bp, Homo sapiens
gtaccacgaattaca

SEQ ID NO: 1301723 - DNA, 15 bp, Homo sapiens
agtaccacgaattac

SEQ ID NO: 1301724 - DNA, 15 bp, Homo sapiens
tagtaccacgaatta

SEQ ID NO: 1301725 - DNA, 15 bp, Homo sapiens
atagtaccacgaatt

SEQ ID NO: 1301726 - DNA, 15 bp, Homo sapiens
tatagtaccacgaat

SEQ ID NO: 1301727 - DNA, 15 bp, Homo sapiens
ctatagtaccacgaa

SEQ ID NO: 1301728 - DNA, 15 bp, Homo sapiens
tctatagtaccacga

SEQ ID NO: 1301729 - DNA, 15 bp, Homo sapiens
ctctatagtaccacg

SEQ ID NO: 1301730 - DNA, 15 bp, Homo sapiens
actctatagtaccac

SEQ ID NO: 1301731 - DNA, 15 bp, Homo sapiens
tactctatagtacca

SEQ ID NO: 1301732 - DNA, 15 bp, Homo sapiens
ttactctatagtacc

SEQ ID NO: 1301733 - DNA, 15 bp, Homo sapiens
attactctatagtac

SEQ ID NO: 1301734 - DNA, 15 bp, Homo sapiens
tattactctatagta

SEQ ID NO: 1301735 - DNA, 15 bp, Homo sapiens
ttattactctatagt

SEQ ID NO: 1301736 - DNA, 15 bp, Homo sapiens
attattactctatag

SEQ ID NO: 1301737 - DNA, 15 bp, Homo sapiens
tattattactctata

SEQ ID NO: 1301738 - DNA, 15 bp, Homo sapiens
atattattactctat

SEQ ID NO: 1301739 - DNA, 15 bp, Homo sapiens
aatattattactcta

SEQ ID NO: 1301740 - DNA, 15 bp, Homo sapiens
taatattattactct

SEQ ID NO: 1301741 - DNA, 15 bp, Homo sapiens
ttaatattattactc

SEQ ID NO: 1301742 - DNA, 15 bp, Homo sapiens
tttaatattattact

SEQ ID NO: 1301743 - DNA, 15 bp, Homo sapiens
ttttaatattattac

SEQ ID NO: 1301744 - DNA, 15 bp, Homo sapiens
cttttaatattatta

SEQ ID NO: 1301745 - DNA, 15 bp, Homo sapiens
gcttttaatattatt

SEQ ID NO: 1301746 - DNA, 15 bp, Homo sapiens
tgcttttaatattat

SEQ ID NO: 1301747 - DNA, 15 bp, Homo sapiens
ctgcttttaatatta

SEQ ID NO: 1301748 - DNA, 15 bp, Homo sapiens
gctgcttttaatatt

SEQ ID NO: 1301749 - DNA, 15 bp, Homo sapiens
tgctgcttttaatat

SEQ ID NO: 1301750 - DNA, 15 bp, Homo sapiens
atgctgcttttaata

SEQ ID NO: 1301751 - DNA, 15 bp, Homo sapiens
gatgctgcttttaat

SEQ ID NO: 1301752 - DNA, 15 bp, Homo sapiens
agatgctgcttttaa

SEQ ID NO: 1301753 - DNA, 15 bp, Homo sapiens
aagatgctgctttta

SEQ ID NO: 1301754 - DNA, 15 bp, Homo sapiens
aaagatgctgctttt

SEQ ID NO: 1301755 - DNA, 15 bp, Homo sapiens
gaaagatgctgcttt

SEQ ID NO: 1301756 - DNA, 15 bp, Homo sapiens
ggaaagatgctgctt

SEQ ID NO: 1301757 - DNA, 15 bp, Homo sapiens
tggaaagatgctgct

SEQ ID NO: 1301758 - DNA, 15 bp, Homo sapiens
ctggaaagatgctgc

SEQ ID NO: 1301759 - DNA, 15 bp, Homo sapiens
actggaaagatgctg

SEQ ID NO: 1301760 - DNA, 15 bp, Homo sapiens
aactggaaagatgct

SEQ ID NO: 1301761 - DNA, 15 bp, Homo sapiens
gaactggaaagatgc

SEQ ID NO: 1301762 - DNA, 15 bp, Homo sapiens
cgaactggaaagatg

SEQ ID NO: 1301763 - DNA, 15 bp, Homo sapiens
acgaactggaaagat

SEQ ID NO: 1301764 - DNA, 15 bp, Homo sapiens
tacgaactggaaaga

SEQ ID NO: 1301765 - DNA, 15 bp, Homo sapiens
atacgaactggaaag

SEQ ID NO: 1301766 - DNA, 15 bp, Homo sapiens
tatacgaactggaaa

SEQ ID NO: 1301767 - DNA, 15 bp, Homo sapiens
ttatacgaactggaa

SEQ ID NO: 1301768 - DNA, 15 bp, Homo sapiens
tttatacgaactgga

SEQ ID NO: 1301769 - DNA, 15 bp, Homo sapiens
atttatacgaactgg

SEQ ID NO: 1301770 - DNA, 15 bp, Homo sapiens
tatttatacgaactg

SEQ ID NO: 1301771 - DNA, 15 bp, Homo sapiens
gtatttatacgaact

SEQ ID NO: 1301772 - DNA, 15 bp, Homo sapiens
agtatttatacgaac

SEQ ID NO: 1301773 - DNA, 15 bp, Homo sapiens
gagtatttatacgaa

SEQ ID NO: 1301774 - DNA, 15 bp, Homo sapiens
agagtatttatacga

SEQ ID NO: 1301775 - DNA, 15 bp, Homo sapiens
tagagtatttatacg

SEQ ID NO: 1301776 - DNA, 15 bp, Homo sapiens
ttagagtatttatac

SEQ ID NO: 1301777 - DNA, 15 bp, Homo sapiens
gttagagtatttata

SEQ ID NO: 1301778 - DNA, 15 bp, Homo sapiens
tgttagagtatttat

SEQ ID NO: 1301779 - DNA, 15 bp, Homo sapiens
ctgttagagtattta

SEQ ID NO: 1301780 - DNA, 15 bp, Homo sapiens
actgttagagtattt

SEQ ID NO: 1301781 - DNA, 15 bp, Homo sapiens
tactgttagagtatt

SEQ ID NO: 1301782 - DNA, 15 bp, Homo sapiens
atactgttagagtat

SEQ ID NO: 1301783 - DNA, 15 bp, Homo sapiens
aatactgttagagta

SEQ ID NO: 1301784 - DNA, 15 bp, Homo sapiens
aaatactgttagagt

SEQ ID NO: 1301785 - DNA, 15 bp, Homo sapiens
caaatactgttagag

SEQ ID NO: 1301786 - DNA, 15 bp, Homo sapiens
acaaatactgttaga

SEQ ID NO: 1301787 - DNA, 15 bp, Homo sapiens
gacaaatactgttag

SEQ ID NO: 1301788 - DNA, 15 bp, Homo sapiens
agacaaatactgtta

SEQ ID NO: 1301789 - DNA, 15 bp, Homo sapiens
tagacaaatactgtt

SEQ ID NO: 1301790 - DNA, 15 bp, Homo sapiens
ctagacaaatactgt

SEQ ID NO: 1301791 - DNA, 15 bp, Homo sapiens
actagacaaatactg

SEQ ID NO: 1301792 - DNA, 15 bp, Homo sapiens
tactagacaaatact

SEQ ID NO: 1301793 - DNA, 15 bp, Homo sapiens
ctactagacaaatac

SEQ ID NO: 1301794 - DNA, 15 bp, Homo sapiens
actactagacaaata

SEQ ID NO: 1301795 - DNA, 15 bp, Homo sapiens
tactactagacaaat

SEQ ID NO: 1301796 - DNA, 15 bp, Homo sapiens
atactactagacaaa

SEQ ID NO: 1301797 - DNA, 15 bp, Homo sapiens
tatactactagacaa

SEQ ID NO: 1301798 - DNA, 15 bp, Homo sapiens
ttatactactagaca

SEQ ID NO: 1301799 - DNA, 15 bp, Homo sapiens
tttatactactagac

SEQ ID NO: 1301800 - DNA, 15 bp, Homo sapiens
ttttatactactaga

SEQ ID NO: 1301801 - DNA, 15 bp, Homo sapiens
attttatactactag

SEQ ID NO: 1301802 - DNA, 15 bp, Homo sapiens
tattttatactacta

SEQ ID NO: 1301803 - DNA, 15 bp, Homo sapiens
gtattttatactact

SEQ ID NO: 1301804 - DNA, 15 bp, Homo sapiens
agtattttatactac

SEQ ID NO: 1301805 - DNA, 15 bp, Homo sapiens
cagtattttatacta

SEQ ID NO: 1301806 - DNA, 15 bp, Homo sapiens
acagtattttatact

SEQ ID NO: 1301807 - DNA, 15 bp, Homo sapiens
gacagtattttatac

SEQ ID NO: 1301808 - DNA, 15 bp, Homo sapiens
tgacagtattttata

SEQ ID NO: 1301809 - DNA, 15 bp, Homo sapiens
ctgacagtattttat

SEQ ID NO: 1301810 - DNA, 15 bp, Homo sapiens
tctgacagtatttta

SEQ ID NO: 1301811 - DNA, 15 bp, Homo sapiens
atctgacagtatttt

SEQ ID NO: 1301812 - DNA, 15 bp, Homo sapiens
tatctgacagtattt

SEQ ID NO: 1301813 - DNA, 15 bp, Homo sapiens
gtatctgacagtatt

SEQ ID NO: 1301814 - DNA, 15 bp, Homo sapiens
agtatctgacagtat

SEQ ID NO: 1301815 - DNA, 15 bp, Homo sapiens
tagtatctgacagta

SEQ ID NO: 1301816 - DNA, 15 bp, Homo sapiens
atagtatctgacagt

SEQ ID NO: 1301817 - DNA, 15 bp, Homo sapiens
tatagtatctgacag

SEQ ID NO: 1301818 - DNA, 15 bp, Homo sapiens
atatagtatctgaca

SEQ ID NO: 1301819 - DNA, 15 bp, Homo sapiens
gatatagtatctgac

SEQ ID NO: 1301820 - DNA, 15 bp, Homo sapiens
ggatatagtatctga

SEQ ID NO: 1301821 - DNA, 15 bp, Homo sapiens
gggatatagtatctg

SEQ ID NO: 1301822 - DNA, 15 bp, Homo sapiens
agggatatagtatct

SEQ ID NO: 1301823 - DNA, 15 bp, Homo sapiens
cagggatatagtatc

SEQ ID NO: 1301824 - DNA, 15 bp, Homo sapiens
gcagggatatagtat

SEQ ID NO: 1301825 - DNA, 15 bp, Homo sapiens
agcagggatatagta

SEQ ID NO: 1301826 - DNA, 15 bp, Homo sapiens
cagcagggatatagt

SEQ ID NO: 1301827 - DNA, 15 bp, Homo sapiens
gcagcagggatatag

SEQ ID NO: 1301828 - DNA, 15 bp, Homo sapiens
ggcagcagggatata

SEQ ID NO: 1301829 - DNA, 15 bp, Homo sapiens
aggcagcagggatat

SEQ ID NO: 1301830 - DNA, 15 bp, Homo sapiens
caggcagcagggata

SEQ ID NO: 1301831 - DNA, 15 bp, Homo sapiens
acaggcagcagggat

SEQ ID NO: 1301832 - DNA, 15 bp, Homo sapiens
cacaggcagcaggga

SEQ ID NO: 1301833 - DNA, 15 bp, Homo sapiens
acacaggcagcaggg

SEQ ID NO: 1301834 - DNA, 15 bp, Homo sapiens
tacacaggcagcagg

SEQ ID NO: 1301835 - DNA, 15 bp, Homo sapiens
atacacaggcagcag

SEQ ID NO: 1301836 - DNA, 15 bp, Homo sapiens
catacacaggcagca

SEQ ID NO: 1301837 - DNA, 15 bp, Homo sapiens
gcatacacaggcagc

SEQ ID NO: 1301838 - DNA, 15 bp, Homo sapiens
agcatacacaggcag

SEQ ID NO: 1301839 - DNA, 15 bp, Homo sapiens
cagcatacacaggca

SEQ ID NO: 1301840 - DNA, 15 bp, Homo sapiens
gcagcatacacaggc

SEQ ID NO: 1301841 - DNA, 15 bp, Homo sapiens
agcagcatacacagg

SEQ ID NO: 1301842 - DNA, 15 bp, Homo sapiens
tagcagcatacacag

SEQ ID NO: 1301843 - DNA, 15 bp, Homo sapiens
atagcagcatacaca

SEQ ID NO: 1301844 - DNA, 15 bp, Homo sapiens
aatagcagcatacac

SEQ ID NO: 1301845 - DNA, 15 bp, Homo sapiens
aaatagcagcataca

SEQ ID NO: 1301846 - DNA, 15 bp, Homo sapiens
taaatagcagcatac

SEQ ID NO: 1301847 - DNA, 15 bp, Homo sapiens
ataaatagcagcata

SEQ ID NO: 1301848 - DNA, 15 bp, Homo sapiens
cataaatagcagcat

SEQ ID NO: 1301849 - DNA, 15 bp, Homo sapiens
ccataaatagcagca

SEQ ID NO: 1301850 - DNA, 15 bp, Homo sapiens
cccataaatagcagc

SEQ ID NO: 1301851 - DNA, 15 bp, Homo sapiens
acccataaatagcag

SEQ ID NO: 1301852 - DNA, 15 bp, Homo sapiens
tacccataaatagca

SEQ ID NO: 1301853 - DNA, 15 bp, Homo sapiens
ttacccataaatagc

SEQ ID NO: 1301854 - DNA, 15 bp, Homo sapiens
gttacccataaatag

SEQ ID NO: 1301855 - DNA, 15 bp, Homo sapiens
agttacccataaata

SEQ ID NO: 1301856 - DNA, 15 bp, Homo sapiens
aagttacccataaat

SEQ ID NO: 1301857 - DNA, 15 bp, Homo sapiens
aaagttacccataaa

SEQ ID NO: 1301858 - DNA, 15 bp, Homo sapiens
taaagttacccataa

SEQ ID NO: 1301859 - DNA, 15 bp, Homo sapiens
ataaagttacccata

SEQ ID NO: 1301860 - DNA, 15 bp, Homo sapiens
cataaagttacccat

SEQ ID NO: 1301861 - DNA, 15 bp, Homo sapiens
ccataaagttaccca

SEQ ID NO: 1301862 - DNA, 15 bp, Homo sapiens
tccataaagttaccc

SEQ ID NO: 1301863 - DNA, 15 bp, Homo sapiens
ttccataaagttacc

SEQ ID NO: 1301864 - DNA, 15 bp, Homo sapiens
tttccataaagttac

SEQ ID NO: 1301865 - DNA, 15 bp, Homo sapiens
ttttccataaagtta

SEQ ID NO: 1301866 - DNA, 15 bp, Homo sapiens
gttttccataaagtt

SEQ ID NO: 1301867 - DNA, 15 bp, Homo sapiens
agttttccataaagt

SEQ ID NO: 1301868 - DNA, 15 bp, Homo sapiens
tagttttccataaag

SEQ ID NO: 1301869 - DNA, 15 bp, Homo sapiens
gtagttttccataaa

SEQ ID NO: 1301870 - DNA, 15 bp, Homo sapiens
ggtagttttccataa

SEQ ID NO: 1301871 - DNA, 15 bp, Homo sapiens
aggtagttttccata

SEQ ID NO: 1301872 - DNA, 15 bp, Homo sapiens
gaggtagttttccat

SEQ ID NO: 1301873 - DNA, 15 bp, Homo sapiens
ggaggtagttttcca

SEQ ID NO: 1301874 - DNA, 15 bp, Homo sapiens
gggaggtagttttcc

SEQ ID NO: 1301875 - DNA, 15 bp, Homo sapiens
tgggaggtagttttc

SEQ ID NO: 1301876 - DNA, 15 bp, Homo sapiens
gtgggaggtagtttt

SEQ ID NO: 1301877 - DNA, 15 bp, Homo sapiens
ggtgggaggtagttt

SEQ ID NO: 1301878 - DNA, 15 bp, Homo sapiens
gggtgggaggtagtt

SEQ ID NO: 1301879 - DNA, 15 bp, Homo sapiens
ggggtgggaggtagt

SEQ ID NO: 1301880 - DNA, 15 bp, Homo sapiens
tggggtgggaggtag

SEQ ID NO: 1301881 - DNA, 15 bp, Homo sapiens
atggggtgggaggta

SEQ ID NO: 1301882 - DNA, 15 bp, Homo sapiens
aatggggtgggaggt

SEQ ID NO: 1301883 - DNA, 15 bp, Homo sapiens
taatggggtgggagg

SEQ ID NO: 1301884 - DNA, 15 bp, Homo sapiens
ataatggggtgggag

SEQ ID NO: 1301885 - DNA, 15 bp, Homo sapiens
tataatggggtggga

SEQ ID NO: 1301886 - DNA, 15 bp, Homo sapiens
ttataatggggtggg

SEQ ID NO: 1301887 - DNA, 15 bp, Homo sapiens
tttataatggggtgg

SEQ ID NO: 1301888 - DNA, 15 bp, Homo sapiens
ttttataatggggtg

SEQ ID NO: 1301889 - DNA, 15 bp, Homo sapiens
tttttataatggggt

SEQ ID NO: 1301890 - DNA, 15 bp, Homo sapiens
gtttttataatgggg

SEQ ID NO: 1301891 - DNA, 15 bp, Homo sapiens
agtttttataatggg

SEQ ID NO: 1301892 - DNA, 15 bp, Homo sapiens
tagtttttataatgg

SEQ ID NO: 1301893 - DNA, 15 bp, Homo sapiens
atagtttttataatg

SEQ ID NO: 1301894 - DNA, 15 bp, Homo sapiens
catagtttttataat

SEQ ID NO: 1301895 - DNA, 15 bp, Homo sapiens
acatagtttttataa

SEQ ID NO: 1301896 - DNA, 15 bp, Homo sapiens
tacatagtttttata

SEQ ID NO: 1301897 - DNA, 15 bp, Homo sapiens
ttacatagtttttat

SEQ ID NO: 1301898 - DNA, 15 bp, Homo sapiens
attacatagttttta

SEQ ID NO: 1301899 - DNA, 15 bp, Homo sapiens
tattacatagttttt

SEQ ID NO: 1301900 - DNA, 15 bp, Homo sapiens
ttattacatagtttt

SEQ ID NO: 1301901 - DNA, 15 bp, Homo sapiens
tttattacatagttt

SEQ ID NO: 1301902 - DNA, 15 bp, Homo sapiens
ctttattacatagtt

SEQ ID NO: 1301903 - DNA, 15 bp, Homo sapiens
cctttattacatagt

SEQ ID NO: 1301904 - DNA, 15 bp, Homo sapiens
tcctttattacatag

SEQ ID NO: 1301905 - DNA, 15 bp, Homo sapiens
ttcctttattacata

SEQ ID NO: 1301906 - DNA, 15 bp, Homo sapiens
gttcctttattacat

SEQ ID NO: 1301907 - DNA, 15 bp, Homo sapiens
tgttcctttattaca

SEQ ID NO: 1301908 - DNA, 15 bp, Homo sapiens
gtgttcctttattac

SEQ ID NO: 1301909 - DNA, 15 bp, Homo sapiens
tgtgttcctttatta

SEQ ID NO: 1301910 - DNA, 15 bp, Homo sapiens
atgtgttcctttatt

SEQ ID NO: 1301911 - DNA, 15 bp, Homo sapiens
tatgtgttcctttat

SEQ ID NO: 1301912 - DNA, 15 bp, Homo sapiens
ctatgtgttccttta

SEQ ID NO: 1301913 - DNA, 15 bp, Homo sapiens
gctatgtgttccttt

SEQ ID NO: 1301914 - DNA, 15 bp, Homo sapiens
ggctatgtgttcctt

SEQ ID NO: 1301915 - DNA, 15 bp, Homo sapiens
tggctatgtgttcct

SEQ ID NO: 1301916 - DNA, 15 bp, Homo sapiens
atggctatgtgttcc

SEQ ID NO: 1301917 - DNA, 15 bp, Homo sapiens
aatggctatgtgttc

SEQ ID NO: 1301918 - DNA, 15 bp, Homo sapiens
caatggctatgtgtt

SEQ ID NO: 1301919 - DNA, 15 bp, Homo sapiens
acaatggctatgtgt

SEQ ID NO: 1301920 - DNA, 15 bp, Homo sapiens
tacaatggctatgtg

SEQ ID NO: 1301921 - DNA, 15 bp, Homo sapiens
ctacaatggctatgt

SEQ ID NO: 1301922 - DNA, 15 bp, Homo sapiens
tctacaatggctatg

SEQ ID NO: 1301923 - DNA, 15 bp, Homo sapiens
ttctacaatggctat

SEQ ID NO: 1301924 - DNA, 15 bp, Homo sapiens
tttctacaatggcta

SEQ ID NO: 1301925 - DNA, 15 bp, Homo sapiens
atttctacaatggct

SEQ ID NO: 1301926 - DNA, 15 bp, Homo sapiens
aatttctacaatggc

SEQ ID NO: 1301927 - DNA, 15 bp, Homo sapiens
aaatttctacaatgg

SEQ ID NO: 1301928 - DNA, 15 bp, Homo sapiens
aaaatttctacaatg

SEQ ID NO: 1301929 - DNA, 15 bp, Homo sapiens
caaaatttctacaat

SEQ ID NO: 1301930 - DNA, 15 bp, Homo sapiens
ccaaaatttctacaa

SEQ ID NO: 1301931 - DNA, 15 bp, Homo sapiens
tccaaaatttctaca

SEQ ID NO: 1301932 - DNA, 15 bp, Homo sapiens
ttccaaaatttctac

SEQ ID NO: 1301933 - DNA, 15 bp, Homo sapiens
tttccaaaatttcta

SEQ ID NO: 1301934 - DNA, 15 bp, Homo sapiens
ttttccaaaatttct

SEQ ID NO: 1301935 - DNA, 15 bp, Homo sapiens
attttccaaaatttc

SEQ ID NO: 1301936 - DNA, 15 bp, Homo sapiens
tattttccaaaattt

SEQ ID NO: 1301937 - DNA, 15 bp, Homo sapiens
gtattttccaaaatt

SEQ ID NO: 1301938 - DNA, 15 bp, Homo sapiens
tgtattttccaaaat

SEQ ID NO: 1301939 - DNA, 15 bp, Homo sapiens
ttgtattttccaaaa

SEQ ID NO: 1301940 - DNA, 15 bp, Homo sapiens
gttgtattttccaaa

SEQ ID NO: 1301941 - DNA, 15 bp, Homo sapiens
agttgtattttccaa

SEQ ID NO: 1301942 - DNA, 15 bp, Homo sapiens
tagttgtattttcca

SEQ ID NO: 1301943 - DNA, 15 bp, Homo sapiens
ttagttgtattttcc

SEQ ID NO: 1301944 - DNA, 15 bp, Homo sapiens
cttagttgtattttc

SEQ ID NO: 1301945 - DNA, 15 bp, Homo sapiens
tcttagttgtatttt

SEQ ID NO: 1301946 - DNA, 15 bp, Homo sapiens
ttcttagttgtattt

SEQ ID NO: 1301947 - DNA, 15 bp, Homo sapiens
tttcttagttgtatt

SEQ ID NO: 1301948 - DNA, 15 bp, Homo sapiens
ttttcttagttgtat

SEQ ID NO: 1301949 - DNA, 15 bp, Homo sapiens
tttttcttagttgta

SEQ ID NO: 1301950 - DNA, 15 bp, Homo sapiens
ttttttcttagttgt

SEQ ID NO: 1301951 - DNA, 15 bp, Homo sapiens
tttttttcttagttg

SEQ ID NO: 1301952 - DNA, 15 bp, Homo sapiens
atttttttcttagtt

SEQ ID NO: 1301953 - DNA, 15 bp, Homo sapiens
aatttttttcttagt

SEQ ID NO: 1301954 - DNA, 15 bp, Homo sapiens
caatttttttcttag

SEQ ID NO: 1301955 - DNA, 15 bp, Homo sapiens
tcaatttttttctta

SEQ ID NO: 1301956 - DNA, 15 bp, Homo sapiens
ttcaatttttttctt

SEQ ID NO: 1301957 - DNA, 15 bp, Homo sapiens
tttcaatttttttct

SEQ ID NO: 1301958 - DNA, 15 bp, Homo sapiens
atttcaatttttttc

SEQ ID NO: 1301959 - DNA, 15 bp, Homo sapiens
gatttcaattttttt

SEQ ID NO: 1301960 - DNA, 15 bp, Homo sapiens
agatttcaatttttt

SEQ ID NO: 1301961 - DNA, 15 bp, Homo sapiens
aagatttcaattttt

SEQ ID NO: 1301962 - DNA, 15 bp, Homo sapiens
aaagatttcaatttt

SEQ ID NO: 1301963 - DNA, 15 bp, Homo sapiens
caaagatttcaattt

SEQ ID NO: 1301964 - DNA, 15 bp, Homo sapiens
tcaaagatttcaatt

SEQ ID NO: 1301965 - DNA, 15 bp, Homo sapiens
atcaaagatttcaat

SEQ ID NO: 1301966 - DNA, 15 bp, Homo sapiens
tatcaaagatttcaa

SEQ ID NO: 1301967 - DNA, 15 bp, Homo sapiens
atatcaaagatttca

SEQ ID NO: 1301968 - DNA, 15 bp, Homo sapiens
aatatcaaagatttc

SEQ ID NO: 1301969 - DNA, 15 bp, Homo sapiens
taatatcaaagattt

SEQ ID NO: 1301970 - DNA, 15 bp, Homo sapiens
ttaatatcaaagatt

SEQ ID NO: 1301971 - DNA, 15 bp, Homo sapiens
tttaatatcaaagat

SEQ ID NO: 1301972 - DNA, 15 bp, Homo sapiens
atttaatatcaaaga

SEQ ID NO: 1301973 - DNA, 15 bp, Homo sapiens
aatttaatatcaaag

SEQ ID NO: 1301974 - DNA, 15 bp, Homo sapiens
aaatttaatatcaaa

SEQ ID NO: 1301975 - DNA, 15 bp, Homo sapiens
aaaatttaatatcaa

SEQ ID NO: 1301976 - DNA, 15 bp, Homo sapiens
aaaaatttaatatca

SEQ ID NO: 1301977 - DNA, 15 bp, Homo sapiens
caaaaatttaatatc

SEQ ID NO: 1301978 - DNA, 15 bp, Homo sapiens
tcaaaaatttaatat

SEQ ID NO: 1301979 - DNA, 15 bp, Homo sapiens
atcaaaaatttaata

SEQ ID NO: 1301980 - DNA, 15 bp, Homo sapiens
aatcaaaaatttaat

SEQ ID NO: 1301981 - DNA, 15 bp, Homo sapiens
aaatcaaaaatttaa

SEQ ID NO: 1301982 - DNA, 15 bp, Homo sapiens
aaaatcaaaaattta

SEQ ID NO: 1301983 - DNA, 15 bp, Homo sapiens
caaaatcaaaaattt

SEQ ID NO: 1301984 - DNA, 15 bp, Homo sapiens
gcaaaatcaaaaatt

SEQ ID NO: 1301985 - DNA, 15 bp, Homo sapiens
agcaaaatcaaaaat

SEQ ID NO: 1301986 - DNA, 15 bp, Homo sapiens
aagcaaaatcaaaaa

SEQ ID NO: 1301987 - DNA, 15 bp, Homo sapiens
gtcaaagcaaaatca

SEQ ID NO: 1301988 - DNA, 15 bp, Homo sapiens
agtcaaagcaaaatc

SEQ ID NO: 1301989 - DNA, 15 bp, Homo sapiens
aagtcaaagcaaaat

SEQ ID NO: 1301990 - DNA, 15 bp, Homo sapiens
gaagtcaaagcaaaa

SEQ ID NO: 1301991 - DNA, 15 bp, Homo sapiens
agaagtcaaagcaaa

SEQ ID NO: 1301992 - DNA, 15 bp, Homo sapiens
tagaagtcaaagcaa

SEQ ID NO: 1301993 - DNA, 15 bp, Homo sapiens
gtagaagtcaaagca

SEQ ID NO: 1301994 - DNA, 15 bp, Homo sapiens
tgtagaagtcaaagc

SEQ ID NO: 1301995 - DNA, 15 bp, Homo sapiens
atgtagaagtcaaag

SEQ ID NO: 1301996 - DNA, 15 bp, Homo sapiens
catgtagaagtcaaa

SEQ ID NO: 1301997 - DNA, 15 bp, Homo sapiens
acatgtagaagtcaa

SEQ ID NO: 1301998 - DNA, 15 bp, Homo sapiens
tacatgtagaagtca

SEQ ID NO: 1301999 - DNA, 15 bp, Homo sapiens
atacatgtagaagtc

SEQ ID NO: 1302000 - DNA, 15 bp, Homo sapiens
catacatgtagaagt

SEQ ID NO: 1302001 - DNA, 15 bp, Homo sapiens
tcatacatgtagaag

SEQ ID NO: 1302002 - DNA, 15 bp, Homo sapiens
gtcatacatgtagaa

SEQ ID NO: 1302003 - DNA, 15 bp, Homo sapiens
agtcatacatgtaga

SEQ ID NO: 1302004 - DNA, 15 bp, Homo sapiens
cagtcatacatgtag

SEQ ID NO: 1302005 - DNA, 15 bp, Homo sapiens
acagtcatacatgta

SEQ ID NO: 1302006 - DNA, 15 bp, Homo sapiens
aacagtcatacatgt

SEQ ID NO: 1302007 - DNA, 15 bp, Homo sapiens
gaacagtcatacatg

SEQ ID NO: 1302008 - DNA, 15 bp, Homo sapiens
tgaacagtcatacat

SEQ ID NO: 1302009 - DNA, 15 bp, Homo sapiens
atgaacagtcataca

SEQ ID NO: 1302010 - DNA, 15 bp, Homo sapiens
catgaacagtcatac

SEQ ID NO: 1302011 - DNA, 15 bp, Homo sapiens
acatgaacagtcata

SEQ ID NO: 1302012 - DNA, 15 bp, Homo sapiens
atacatgaacagtca

SEQ ID NO: 1302013 - DNA, 15 bp, Homo sapiens
catacatgaacagtc

SEQ ID NO: 1302014 - DNA, 15 bp, Homo sapiens
gcatacatgaacagt

SEQ ID NO: 1302015 - DNA, 15 bp, Homo sapiens
tgcatacatgaacag

SEQ ID NO: 1302016 - DNA, 15 bp, Homo sapiens
atgcatacatgaaca

SEQ ID NO: 1302017 - DNA, 15 bp, Homo sapiens
tatgcatacatgaac

SEQ ID NO: 1302018 - DNA, 15 bp, Homo sapiens
atatgcatacatgaa

SEQ ID NO: 1302019 - DNA, 15 bp, Homo sapiens
gatatgcatacatga

SEQ ID NO: 1302020 - DNA, 15 bp, Homo sapiens
ggatatgcatacatg

SEQ ID NO: 1302021 - DNA, 15 bp, Homo sapiens
aggatatgcatacat

SEQ ID NO: 1302022 - DNA, 15 bp, Homo sapiens
taggatatgcataca

SEQ ID NO: 1302023 - DNA, 15 bp, Homo sapiens
ttaggatatgcatac

SEQ ID NO: 1302024 - DNA, 15 bp, Homo sapiens
attaggatatgcata

SEQ ID NO: 1302025 - DNA, 15 bp, Homo sapiens
cattaggatatgcat

SEQ ID NO: 1302026 - DNA, 15 bp, Homo sapiens
acattaggatatgca

SEQ ID NO: 1302027 - DNA, 15 bp, Homo sapiens
cacattaggatatgc

SEQ ID NO: 1302028 - DNA, 15 bp, Homo sapiens
tcacattaggatatg

SEQ ID NO: 1302029 - DNA, 15 bp, Homo sapiens
ttcacattaggatat

SEQ ID NO: 1302030 - DNA, 15 bp, Homo sapiens
attcacattaggata

SEQ ID NO: 1302031 - DNA, 15 bp, Homo sapiens
cattcacattaggat

SEQ ID NO: 1302032 - DNA, 15 bp, Homo sapiens
ccattcacattagga

SEQ ID NO: 1302033 - DNA, 15 bp, Homo sapiens
cccattcacattagg

SEQ ID NO: 1302034 - DNA, 15 bp, Homo sapiens
tcccattcacattag

SEQ ID NO: 1302035 - DNA, 15 bp, Homo sapiens
gtcccattcacatta

SEQ ID NO: 1302036 - DNA, 15 bp, Homo sapiens
agtcccattcacatt

SEQ ID NO: 1302037 - DNA, 15 bp, Homo sapiens
tagtcccattcacat

SEQ ID NO: 1302038 - DNA, 15 bp, Homo sapiens
atagtcccattcaca

SEQ ID NO: 1302039 - DNA, 15 bp, Homo sapiens
tatagtcccattcac

SEQ ID NO: 1302040 - DNA, 15 bp, Homo sapiens
gtatagtcccattca

SEQ ID NO: 1302041 - DNA, 15 bp, Homo sapiens
tgtatagtcccattc

SEQ ID NO: 1302042 - DNA, 15 bp, Homo sapiens
atgtatagtcccatt

SEQ ID NO: 1302043 - DNA, 15 bp, Homo sapiens
catgtatagtcccat

SEQ ID NO: 1302044 - DNA, 15 bp, Homo sapiens
gcatgtatagtccca

SEQ ID NO: 1302045 - DNA, 15 bp, Homo sapiens
ggcatgtatagtccc

SEQ ID NO: 1302046 - DNA, 15 bp, Homo sapiens
tggcatgtatagtcc

SEQ ID NO: 1302047 - DNA, 15 bp, Homo sapiens
atggcatgtatagtc

SEQ ID NO: 1302048 - DNA, 15 bp, Homo sapiens
aatggcatgtatagt

SEQ ID NO: 1302049 - DNA, 15 bp, Homo sapiens
aaatggcatgtatag

SEQ ID NO: 1302050 - DNA, 15 bp, Homo sapiens
caaatggcatgtata

SEQ ID NO: 1302051 - DNA, 15 bp, Homo sapiens
acaaatggcatgtat

SEQ ID NO: 1302052 - DNA, 15 bp, Homo sapiens
gacaaatggcatgta

SEQ ID NO: 1302053 - DNA, 15 bp, Homo sapiens
tgacaaatggcatgt

SEQ ID NO: 1302054 - DNA, 15 bp, Homo sapiens
ctgacaaatggcatg

SEQ ID NO: 1302055 - DNA, 15 bp, Homo sapiens
actgacaaatggcat

SEQ ID NO: 1302056 - DNA, 15 bp, Homo sapiens
cactgacaaatggca

SEQ ID NO: 1302057 - DNA, 15 bp, Homo sapiens
tcactgacaaatggc

SEQ ID NO: 1302058 - DNA, 15 bp, Homo sapiens
atcactgacaaatgg

SEQ ID NO: 1302059 - DNA, 15 bp, Homo sapiens
tatcactgacaaatg

SEQ ID NO: 1302060 - DNA, 15 bp, Homo sapiens
atatcactgacaaat

SEQ ID NO: 1302061 - DNA, 15 bp, Homo sapiens
aatatcactgacaaa

SEQ ID NO: 1302062 - DNA, 15 bp, Homo sapiens
taatatcactgacaa

SEQ ID NO: 1302063 - DNA, 15 bp, Homo sapiens
ataatatcactgaca

SEQ ID NO: 1302064 - DNA, 15 bp, Homo sapiens
aataatatcactgac

SEQ ID NO: 1302065 - DNA, 15 bp, Homo sapiens
caataatatcactga

SEQ ID NO: 1302066 - DNA, 15 bp, Homo sapiens
tcaataatatcactg

SEQ ID NO: 1302067 - DNA, 15 bp, Homo sapiens
ctcaataatatcact

SEQ ID NO: 1302068 - DNA, 15 bp, Homo sapiens
actcaataatatcac

SEQ ID NO: 1302069 - DNA, 15 bp, Homo sapiens
cactcaataatatca

SEQ ID NO: 1302070 - DNA, 15 bp, Homo sapiens
tcactcaataatatc

SEQ ID NO: 1302071 - DNA, 15 bp, Homo sapiens
atcactcaataatat

SEQ ID NO: 1302072 - DNA, 15 bp, Homo sapiens
tatcactcaataata

SEQ ID NO: 1302073 - DNA, 15 bp, Homo sapiens
atatcactcaataat

SEQ ID NO: 1302074 - DNA, 15 bp, Homo sapiens
aatatcactcaataa

SEQ ID NO: 1302075 - DNA, 15 bp, Homo sapiens
taatatcactcaata

SEQ ID NO: 1302076 - DNA, 15 bp, Homo sapiens
ataatatcactcaat

SEQ ID NO: 1302077 - DNA, 15 bp, Homo sapiens
aataatatcactcaa

SEQ ID NO: 1302078 - DNA, 15 bp, Homo sapiens
aaataatatcactca

SEQ ID NO: 1302079 - DNA, 15 bp, Homo sapiens
gaaataatatcactc

SEQ ID NO: 1302080 - DNA, 15 bp, Homo sapiens
tgaaataatatcact

SEQ ID NO: 1302081 - DNA, 15 bp, Homo sapiens
ctgaaataatatcac

SEQ ID NO: 1302082 - DNA, 15 bp, Homo sapiens
cctgaaataatatca

SEQ ID NO: 1302083 - DNA, 15 bp, Homo sapiens
tcctgaaataatatc

SEQ ID NO: 1302084 - DNA, 15 bp, Homo sapiens
ttcctgaaataatat

SEQ ID NO: 1302085 - DNA, 15 bp, Homo sapiens
tttcctgaaataata

SEQ ID NO: 1302086 - DNA, 15 bp, Homo sapiens
atttcctgaaataat

SEQ ID NO: 1302087 - DNA, 15 bp, Homo sapiens
gatttcctgaaataa

SEQ ID NO: 1302088 - DNA, 15 bp, Homo sapiens
agatttcctgaaata

SEQ ID NO: 1302089 - DNA, 15 bp, Homo sapiens
tagatttcctgaaat

SEQ ID NO: 1302090 - DNA, 15 bp, Homo sapiens
ttagatttcctgaaa

SEQ ID NO: 1302091 - DNA, 15 bp, Homo sapiens
tttagatttcctgaa

SEQ ID NO: 1302092 - DNA, 15 bp, Homo sapiens
ctttagatttcctga

SEQ ID NO: 1302093 - DNA, 15 bp, Homo sapiens
gctttagatttcctg

SEQ ID NO: 1302094 - DNA, 15 bp, Homo sapiens
agctttagatttcct

SEQ ID NO: 1302095 - DNA, 15 bp, Homo sapiens
tagctttagatttcc

SEQ ID NO: 1302096 - DNA, 15 bp, Homo sapiens
ttagctttagatttc

SEQ ID NO: 1302097 - DNA, 15 bp, Homo sapiens
attagctttagattt

SEQ ID NO: 1302098 - DNA, 15 bp, Homo sapiens
tattagctttagatt

SEQ ID NO: 1302099 - DNA, 15 bp, Homo sapiens
atattagctttagat

SEQ ID NO: 1302100 - DNA, 15 bp, Homo sapiens
tatattagctttaga

SEQ ID NO: 1302101 - DNA, 15 bp, Homo sapiens
ttatattagctttag

SEQ ID NO: 1302102 - DNA, 15 bp, Homo sapiens
attatattagcttta

SEQ ID NO: 1302103 - DNA, 15 bp, Homo sapiens
tattatattagcttt

SEQ ID NO: 1302104 - DNA, 15 bp, Homo sapiens
ctattatattagctt

SEQ ID NO: 1302105 - DNA, 15 bp, Homo sapiens
cctattatattagct

SEQ ID NO: 1302106 - DNA, 15 bp, Homo sapiens
acctattatattagc

SEQ ID NO: 1302107 - DNA, 15 bp, Homo sapiens
tacctattatattag

SEQ ID NO: 1302108 - DNA, 15 bp, Homo sapiens
ttacctattatatta

SEQ ID NO: 1302109 - DNA, 15 bp, Homo sapiens
cttacctattatatt

SEQ ID NO: 1302110 - DNA, 15 bp, Homo sapiens
tcttacctattatat

SEQ ID NO: 1302111 - DNA, 15 bp, Homo sapiens
ctcttacctattata

SEQ ID NO: 1302112 - DNA, 15 bp, Homo sapiens
actcttacctattat

SEQ ID NO: 1302113 - DNA, 15 bp, Homo sapiens
tactcttacctatta

SEQ ID NO: 1302114 - DNA, 15 bp, Homo sapiens
atactcttacctatt

SEQ ID NO: 1302115 - DNA, 15 bp, Homo sapiens
catactcttacctat

SEQ ID NO: 1302116 - DNA, 15 bp, Homo sapiens
ccatactcttaccta

SEQ ID NO: 1302117 - DNA, 15 bp, Homo sapiens
cccatactcttacct

SEQ ID NO: 1302118 - DNA, 15 bp, Homo sapiens
gcccatactcttacc

SEQ ID NO: 1302119 - DNA, 15 bp, Homo sapiens
ggcccatactcttac

SEQ ID NO: 1302120 - DNA, 15 bp, Homo sapiens
tggcccatactctta

SEQ ID NO: 1302121 - DNA, 15 bp, Homo sapiens
atggcccatactctt

SEQ ID NO: 1302122 - DNA, 15 bp, Homo sapiens
catggcccatactct

SEQ ID NO: 1302123 - DNA, 15 bp, Homo sapiens
ccatggcccatactc

SEQ ID NO: 1302124 - DNA, 15 bp, Homo sapiens
tccatggcccatact

SEQ ID NO: 1302125 - DNA, 15 bp, Homo sapiens
ctccatggcccatac

SEQ ID NO: 1302126 - DNA, 15 bp, Homo sapiens
actccatggcccata

SEQ ID NO: 1302127 - DNA, 15 bp, Homo sapiens
cactccatggcccat

SEQ ID NO: 1302128 - DNA, 15 bp, Homo sapiens
tcactccatggccca

SEQ ID NO: 1302129 - DNA, 15 bp, Homo sapiens
gtcactccatggccc

SEQ ID NO: 1302130 - DNA, 15 bp, Homo sapiens
tgtcactccatggcc

SEQ ID NO: 1302131 - DNA, 15 bp, Homo sapiens
ctgtcactccatggc

SEQ ID NO: 1302132 - DNA, 15 bp, Homo sapiens
gctgtcactccatgg

SEQ ID NO: 1302133 - DNA, 15 bp, Homo sapiens
ggctgtcactccatg

SEQ ID NO: 1302134 - DNA, 15 bp, Homo sapiens
gggctgtcactccat

SEQ ID NO: 1302135 - DNA, 15 bp, Homo sapiens
agggctgtcactcca

SEQ ID NO: 1302136 - DNA, 15 bp, Homo sapiens
cagggctgtcactcc

SEQ ID NO: 1302137 - DNA, 15 bp, Homo sapiens
ccagggctgtcactc

SEQ ID NO: 1302138 - DNA, 15 bp, Homo sapiens
cccagggctgtcact

SEQ ID NO: 1302139 - DNA, 15 bp, Homo sapiens
acccagggctgtcac

SEQ ID NO: 1302140 - DNA, 15 bp, Homo sapiens
aacccagggctgtca

SEQ ID NO: 1302141 - DNA, 15 bp, Homo sapiens
aaacccagggctgtc

SEQ ID NO: 1302142 - DNA, 15 bp, Homo sapiens
taaacccagggctgt

SEQ ID NO: 1302143 - DNA, 15 bp, Homo sapiens
ataaacccagggctg

SEQ ID NO: 1302144 - DNA, 15 bp, Homo sapiens
tataaacccagggct

SEQ ID NO: 1302145 - DNA, 15 bp, Homo sapiens
atataaacccagggc

SEQ ID NO: 1302146 - DNA, 15 bp, Homo sapiens
aatataaacccaggg

SEQ ID NO: 1302147 - DNA, 15 bp, Homo sapiens
aaatataaacccagg

SEQ ID NO: 1302148 - DNA, 15 bp, Homo sapiens
caaatataaacccag

SEQ ID NO: 1302149 - DNA, 15 bp, Homo sapiens
ccaaatataaaccca

SEQ ID NO: 1302150 - DNA, 15 bp, Homo sapiens
accaaatataaaccc

SEQ ID NO: 1302151 - DNA, 15 bp, Homo sapiens
aaccaaatataaacc

SEQ ID NO: 1302152 - DNA, 15 bp, Homo sapiens
gaaccaaatataaac

SEQ ID NO: 1302153 - DNA, 15 bp, Homo sapiens
agaaccaaatataaa

SEQ ID NO: 1302154 - DNA, 15 bp, Homo sapiens
tagaaccaaatataa

SEQ ID NO: 1302155 - DNA, 15 bp, Homo sapiens
gtagaaccaaatata

SEQ ID NO: 1302156 - DNA, 15 bp, Homo sapiens
ggtagaaccaaatat

SEQ ID NO: 1302157 - DNA, 15 bp, Homo sapiens
tggtagaaccaaata

SEQ ID NO: 1302158 - DNA, 15 bp, Homo sapiens
atggtagaaccaaat

SEQ ID NO: 1302159 - DNA, 15 bp, Homo sapiens
aatggtagaaccaaa

SEQ ID NO: 1302160 - DNA, 15 bp, Homo sapiens
caatggtagaaccaa

SEQ ID NO: 1302161 - DNA, 15 bp, Homo sapiens
acaatggtagaacca

SEQ ID NO: 1302162 - DNA, 15 bp, Homo sapiens
aacaatggtagaacc

SEQ ID NO: 1302163 - DNA, 15 bp, Homo sapiens
caacaatggtagaac

SEQ ID NO: 1302164 - DNA, 15 bp, Homo sapiens
tcaacaatggtagaa

SEQ ID NO: 1302165 - DNA, 15 bp, Homo sapiens
atcaacaatggtaga

SEQ ID NO: 1302166 - DNA, 15 bp, Homo sapiens
gatcaacaatggtag

SEQ ID NO: 1302167 - DNA, 15 bp, Homo sapiens
agatcaacaatggta

SEQ ID NO: 1302168 - DNA, 15 bp, Homo sapiens
aagatcaacaatggt

SEQ ID NO: 1302169 - DNA, 15 bp, Homo sapiens
caagatcaacaatgg

SEQ ID NO: 1302170 - DNA, 15 bp, Homo sapiens
ccaagatcaacaatg

SEQ ID NO: 1302171 - DNA, 15 bp, Homo sapiens
tccaagatcaacaat

SEQ ID NO: 1302172 - DNA, 15 bp, Homo sapiens
gtccaagatcaacaa

SEQ ID NO: 1302173 - DNA, 15 bp, Homo sapiens
tgtccaagatcaaca

SEQ ID NO: 1302174 - DNA, 15 bp, Homo sapiens
atgtccaagatcaac

SEQ ID NO: 1302175 - DNA, 15 bp, Homo sapiens
catgtccaagatcaa

SEQ ID NO: 1302176 - DNA, 15 bp, Homo sapiens
acatgtccaagatca

SEQ ID NO: 1302177 - DNA, 15 bp, Homo sapiens
gacatgtccaagatc

SEQ ID NO: 1302178 - DNA, 15 bp, Homo sapiens
tgacatgtccaagat

SEQ ID NO: 1302179 - DNA, 15 bp, Homo sapiens
atgacatgtccaaga

SEQ ID NO: 1302180 - DNA, 15 bp, Homo sapiens
aatgacatgtccaag

SEQ ID NO: 1302181 - DNA, 15 bp, Homo sapiens
aaatgacatgtccaa

SEQ ID NO: 1302182 - DNA, 15 bp, Homo sapiens
taaatgacatgtcca

SEQ ID NO: 1302183 - DNA, 15 bp, Homo sapiens
ttaaatgacatgtcc

SEQ ID NO: 1302184 - DNA, 15 bp, Homo sapiens
gttaaatgacatgtc

SEQ ID NO: 1302185 - DNA, 15 bp, Homo sapiens
agttaaatgacatgt

SEQ ID NO: 1302186 - DNA, 15 bp, Homo sapiens
aagttaaatgacatg

SEQ ID NO: 1302187 - DNA, 15 bp, Homo sapiens
gaagttaaatgacat

SEQ ID NO: 1302188 - DNA, 15 bp, Homo sapiens
agaagttaaatgaca

SEQ ID NO: 1302189 - DNA, 15 bp, Homo sapiens
gagaagttaaatgac

SEQ ID NO: 1302190 - DNA, 15 bp, Homo sapiens
agagaagttaaatga

SEQ ID NO: 1302191 - DNA, 15 bp, Homo sapiens
cagagaagttaaatg

SEQ ID NO: 1302192 - DNA, 15 bp, Homo sapiens
tcagagaagttaaat

SEQ ID NO: 1302193 - DNA, 15 bp, Homo sapiens
ctcagagaagttaaa

SEQ ID NO: 1302194 - DNA, 15 bp, Homo sapiens
tctcagagaagttaa

SEQ ID NO: 1302195 - DNA, 15 bp, Homo sapiens
atctcagagaagtta

SEQ ID NO: 1302196 - DNA, 15 bp, Homo sapiens
aatctcagagaagtt

SEQ ID NO: 1302197 - DNA, 15 bp, Homo sapiens
gaatctcagagaagt

SEQ ID NO: 1302198 - DNA, 15 bp, Homo sapiens
tgaatctcagagaag

SEQ ID NO: 1302199 - DNA, 15 bp, Homo sapiens
cctgaatctcagaga

SEQ ID NO: 1302200 - DNA, 15 bp, Homo sapiens
acctgaatctcagag

SEQ ID NO: 1302201 - DNA, 15 bp, Homo sapiens
aacctgaatctcaga

SEQ ID NO: 1302202 - DNA, 15 bp, Homo sapiens
gaacctgaatctcag

SEQ ID NO: 1302203 - DNA, 15 bp, Homo sapiens
agaacctgaatctca

SEQ ID NO: 1302204 - DNA, 15 bp, Homo sapiens
tagaacctgaatctc

SEQ ID NO: 1302205 - DNA, 15 bp, Homo sapiens
atagaacctgaatct

SEQ ID NO: 1302206 - DNA, 15 bp, Homo sapiens
tatagaacctgaatc

SEQ ID NO: 1302207 - DNA, 15 bp, Homo sapiens
atatagaacctgaat

SEQ ID NO: 1302208 - DNA, 15 bp, Homo sapiens
aatatagaacctgaa

SEQ ID NO: 1302209 - DNA, 15 bp, Homo sapiens
aaatatagaacctga

SEQ ID NO: 1302210 - DNA, 15 bp, Homo sapiens
caaatatagaacctg

SEQ ID NO: 1302211 - DNA, 15 bp, Homo sapiens
gcaaatatagaacct

SEQ ID NO: 1302212 - DNA, 15 bp, Homo sapiens
agcaaatatagaacc

SEQ ID NO: 1302213 - DNA, 15 bp, Homo sapiens
gagcaaatatagaac

SEQ ID NO: 1302214 - DNA, 15 bp, Homo sapiens
agagcaaatatagaa

SEQ ID NO: 1302215 - DNA, 15 bp, Homo sapiens
cagagcaaatataga

SEQ ID NO: 1302216 - DNA, 15 bp, Homo sapiens
gcagagcaaatatag

SEQ ID NO: 1302217 - DNA, 15 bp, Homo sapiens
agcagagcaaatata

SEQ ID NO: 1302218 - DNA, 15 bp, Homo sapiens
aagcagagcaaatat

SEQ ID NO: 1302219 - DNA, 15 bp, Homo sapiens
aaagcagagcaaata

SEQ ID NO: 1302220 - DNA, 15 bp, Homo sapiens
caaagcagagcaaat

SEQ ID NO: 1302221 - DNA, 15 bp, Homo sapiens
acaaagcagagcaaa

SEQ ID NO: 1302222 - DNA, 15 bp, Homo sapiens
aacaaagcagagcaa

SEQ ID NO: 1302223 - DNA, 15 bp, Homo sapiens
caacaaagcagagca

SEQ ID NO: 1302224 - DNA, 15 bp, Homo sapiens
acaacaaagcagagc

SEQ ID NO: 1302225 - DNA, 15 bp, Homo sapiens
cacaacaaagcagag

SEQ ID NO: 1302226 - DNA, 15 bp, Homo sapiens
acacaacaaagcaga

SEQ ID NO: 1302227 - DNA, 15 bp, Homo sapiens
cacacaacaaagcag

SEQ ID NO: 1302228 - DNA, 15 bp, Homo sapiens
ccacacaacaaagca

SEQ ID NO: 1302229 - DNA, 15 bp, Homo sapiens
gccacacaacaaagc

SEQ ID NO: 1302230 - DNA, 15 bp, Homo sapiens
tgccacacaacaaag

SEQ ID NO: 1302231 - DNA, 15 bp, Homo sapiens
atgccacacaacaaa

SEQ ID NO: 1302232 - DNA, 15 bp, Homo sapiens
aatgccacacaacaa

SEQ ID NO: 1302233 - DNA, 15 bp, Homo sapiens
taatgccacacaaca

SEQ ID NO: 1302234 - DNA, 15 bp, Homo sapiens
ttaatgccacacaac

SEQ ID NO: 1302235 - DNA, 15 bp, Homo sapiens
attaatgccacacaa

SEQ ID NO: 1302236 - DNA, 15 bp, Homo sapiens
cattaatgccacaca

SEQ ID NO: 1302237 - DNA, 15 bp, Homo sapiens
tcattaatgccacac

SEQ ID NO: 1302238 - DNA, 15 bp, Homo sapiens
ctcattaatgccaca

SEQ ID NO: 1302239 - DNA, 15 bp, Homo sapiens
cctcattaatgccac

SEQ ID NO: 1302240 - DNA, 15 bp, Homo sapiens
tcctcattaatgcca

SEQ ID NO: 1302241 - DNA, 15 bp, Homo sapiens
atcctcattaatgcc

SEQ ID NO: 1302242 - DNA, 15 bp, Homo sapiens
tatcctcattaatgc

SEQ ID NO: 1302243 - DNA, 15 bp, Homo sapiens
ttatcctcattaatg

SEQ ID NO: 1302244 - DNA, 15 bp, Homo sapiens
attatcctcattaat

SEQ ID NO: 1302245 - DNA, 15 bp, Homo sapiens
tattatcctcattaa

SEQ ID NO: 1302246 - DNA, 15 bp, Homo sapiens
atattatcctcatta

SEQ ID NO: 1302247 - DNA, 15 bp, Homo sapiens
tatattatcctcatt

SEQ ID NO: 1302248 - DNA, 15 bp, Homo sapiens
gtatattatcctcat

SEQ ID NO: 1302249 - DNA, 15 bp, Homo sapiens
tgtatattatcctca

SEQ ID NO: 1302250 - DNA, 15 bp, Homo sapiens
ttgtatattatcctc

SEQ ID NO: 1302251 - DNA, 15 bp, Homo sapiens
tttgtatattatcct

SEQ ID NO: 1302252 - DNA, 15 bp, Homo sapiens
ttttgtatattatcc

SEQ ID NO: 1302253 - DNA, 15 bp, Homo sapiens
tttttgtatattatc

SEQ ID NO: 1302254 - DNA, 15 bp, Homo sapiens
atttttgtatattat

SEQ ID NO: 1302255 - DNA, 15 bp, Homo sapiens
tatttttgtatatta

SEQ ID NO: 1302256 - DNA, 15 bp, Homo sapiens
atatttttgtatatt

SEQ ID NO: 1302257 - DNA, 15 bp, Homo sapiens
tatatttttgtatat

SEQ ID NO: 1302258 - DNA, 15 bp, Homo sapiens
atatatttttgtata

SEQ ID NO: 1302259 - DNA, 15 bp, Homo sapiens
aatatatttttgtat

SEQ ID NO: 1302260 - DNA, 15 bp, Homo sapiens
caatatatttttgta

SEQ ID NO: 1302261 - DNA, 15 bp, Homo sapiens
ccaatatatttttgt

SEQ ID NO: 1302262 - DNA, 15 bp, Homo sapiens
tccaatatatttttg

SEQ ID NO: 1302263 - DNA, 15 bp, Homo sapiens
ttccaatatattttt

SEQ ID NO: 1302264 - DNA, 15 bp, Homo sapiens
tttccaatatatttt

SEQ ID NO: 1302265 - DNA, 15 bp, Homo sapiens
ttttccaatatattt

SEQ ID NO: 1302266 - DNA, 15 bp, Homo sapiens
gttttccaatatatt

SEQ ID NO: 1302267 - DNA, 15 bp, Homo sapiens
agttttccaatatat

SEQ ID NO: 1302268 - DNA, 15 bp, Homo sapiens
cagttttccaatata

SEQ ID NO: 1302269 - DNA, 15 bp, Homo sapiens
ccagttttccaatat

SEQ ID NO: 1302270 - DNA, 15 bp, Homo sapiens
tccagttttccaata

SEQ ID NO: 1302271 - DNA, 15 bp, Homo sapiens
ctccagttttccaat

SEQ ID NO: 1302272 - DNA, 15 bp, Homo sapiens
actccagttttccaa

SEQ ID NO: 1302273 - DNA, 15 bp, Homo sapiens
gactccagttttcca

SEQ ID NO: 1302274 - DNA, 15 bp, Homo sapiens
ggactccagttttcc

SEQ ID NO: 1302275 - DNA, 15 bp, Homo sapiens
tggactccagttttc

SEQ ID NO: 1302276 - DNA, 15 bp, Homo sapiens
gtggactccagtttt

SEQ ID NO: 1302277 - DNA, 15 bp, Homo sapiens
agtggactccagttt

SEQ ID NO: 1302278 - DNA, 15 bp, Homo sapiens
cagtggactccagtt

SEQ ID NO: 1302279 - DNA, 15 bp, Homo sapiens
acagtggactccagt

SEQ ID NO: 1302280 - DNA, 15 bp, Homo sapiens
tacagtggactccag

SEQ ID NO: 1302281 - DNA, 15 bp, Homo sapiens
gtacagtggactcca

SEQ ID NO: 1302282 - DNA, 15 bp, Homo sapiens
tgtacagtggactcc

SEQ ID NO: 1302283 - DNA, 15 bp, Homo sapiens
gtgtacagtggactc

SEQ ID NO: 1302284 - DNA, 15 bp, Homo sapiens
tgtgtacagtggact

SEQ ID NO: 1302285 - DNA, 15 bp, Homo sapiens
atgtgtacagtggac

SEQ ID NO: 1302286 - DNA, 15 bp, Homo sapiens
aatgtgtacagtgga

SEQ ID NO: 1302287 - DNA, 15 bp, Homo sapiens
aaatgtgtacagtgg

SEQ ID NO: 1302288 - DNA, 15 bp, Homo sapiens
taaatgtgtacagtg

SEQ ID NO: 1302289 - DNA, 15 bp, Homo sapiens
ataaatgtgtacagt

SEQ ID NO: 1302290 - DNA, 15 bp, Homo sapiens
aataaatgtgtacag

SEQ ID NO: 1302291 - DNA, 15 bp, Homo sapiens
aaataaatgtgtaca

SEQ ID NO: 1302292 - DNA, 15 bp, Homo sapiens
gaaataaatgtgtac

SEQ ID NO: 1302293 - DNA, 15 bp, Homo sapiens
tgaaataaatgtgta

SEQ ID NO: 1302294 - DNA, 15 bp, Homo sapiens
ctgaaataaatgtgt

SEQ ID NO: 1302295 - DNA, 15 bp, Homo sapiens
actgaaataaatgtg

SEQ ID NO: 1302296 - DNA, 15 bp, Homo sapiens
cactgaaataaatgt

SEQ ID NO: 1302297 - DNA, 15 bp, Homo sapiens
acactgaaataaatg

SEQ ID NO: 1302298 - DNA, 15 bp, Homo sapiens
tacactgaaataaat

SEQ ID NO: 1302299 - DNA, 15 bp, Homo sapiens
ctacactgaaataaa

SEQ ID NO: 1302300 - DNA, 15 bp, Homo sapiens
actacactgaaataa

SEQ ID NO: 1302301 - DNA, 15 bp, Homo sapiens
cactacactgaaata

SEQ ID NO: 1302302 - DNA, 15 bp, Homo sapiens
tcactacactgaaat

SEQ ID NO: 1302303 - DNA, 15 bp, Homo sapiens
ctcactacactgaaa

SEQ ID NO: 1302304 - DNA, 15 bp, Homo sapiens
cctcactacactgaa

SEQ ID NO: 1302305 - DNA, 15 bp, Homo sapiens
acctcactacactga

SEQ ID NO: 1302306 - DNA, 15 bp, Homo sapiens
aacctcactacactg

SEQ ID NO: 1302307 - DNA, 15 bp, Homo sapiens
taacctcactacact

SEQ ID NO: 1302308 - DNA, 15 bp, Homo sapiens
ataacctcactacac

SEQ ID NO: 1302309 - DNA, 15 bp, Homo sapiens
tataacctcactaca

SEQ ID NO: 1302310 - DNA, 15 bp, Homo sapiens
atataacctcactac

SEQ ID NO: 1302311 - DNA, 15 bp, Homo sapiens
aatataacctcacta

SEQ ID NO: 1302312 - DNA, 15 bp, Homo sapiens
aaatataacctcact

SEQ ID NO: 1302313 - DNA, 15 bp, Homo sapiens
aaaatataacctcac

SEQ ID NO: 1302314 - DNA, 15 bp, Homo sapiens
caaaatataacctca

SEQ ID NO: 1302315 - DNA, 15 bp, Homo sapiens
tcaaaatataacctc

SEQ ID NO: 1302316 - DNA, 15 bp, Homo sapiens
atcaaaatataacct

SEQ ID NO: 1302317 - DNA, 15 bp, Homo sapiens
catcaaaatataacc

SEQ ID NO: 1302318 - DNA, 15 bp, Homo sapiens
gcatcaaaatataac

SEQ ID NO: 1302319 - DNA, 15 bp, Homo sapiens
ggcatcaaaatataa

SEQ ID NO: 1302320 - DNA, 15 bp, Homo sapiens
tggcatcaaaatata

SEQ ID NO: 1302321 - DNA, 15 bp, Homo sapiens
atggcatcaaaatat

SEQ ID NO: 1302322 - DNA, 15 bp, Homo sapiens
gatggcatcaaaata

SEQ ID NO: 1302323 - DNA, 15 bp, Homo sapiens
tgatggcatcaaaat

SEQ ID NO: 1302324 - DNA, 15 bp, Homo sapiens
ctgatggcatcaaaa

SEQ ID NO: 1302325 - DNA, 15 bp, Homo sapiens
actgatggcatcaaa

SEQ ID NO: 1302326 - DNA, 15 bp, Homo sapiens
cactgatggcatcaa

SEQ ID NO: 1302327 - DNA, 15 bp, Homo sapiens
acactgatggcatca

SEQ ID NO: 1302328 - DNA, 15 bp, Homo sapiens
aacactgatggcatc

SEQ ID NO: 1302329 - DNA, 15 bp, Homo sapiens
aaacactgatggcat

SEQ ID NO: 1302330 - DNA, 15 bp, Homo sapiens
aaaacactgatggca

SEQ ID NO: 1302331 - DNA, 15 bp, Homo sapiens
taaaacactgatggc

SEQ ID NO: 1302332 - DNA, 15 bp, Homo sapiens
ttaaaacactgatgg

SEQ ID NO: 1302333 - DNA, 15 bp, Homo sapiens
tttaaaacactgatg

SEQ ID NO: 1302334 - DNA, 15 bp, Homo sapiens
gtttaaaacactgat

SEQ ID NO: 1302335 - DNA, 15 bp, Homo sapiens
tgtttaaaacactga

SEQ ID NO: 1302336 - DNA, 15 bp, Homo sapiens
atgtttaaaacactg

SEQ ID NO: 1302337 - DNA, 15 bp, Homo sapiens
aatgtttaaaacact

SEQ ID NO: 1302338 - DNA, 15 bp, Homo sapiens
caatgtttaaaacac

SEQ ID NO: 1302339 - DNA, 15 bp, Homo sapiens
tcaatgtttaaaaca

SEQ ID NO: 1302340 - DNA, 15 bp, Homo sapiens
atcaatgtttaaaac

SEQ ID NO: 1302341 - DNA, 15 bp, Homo sapiens
tatcaatgtttaaaa

SEQ ID NO: 1302342 - DNA, 15 bp, Homo sapiens
atatcaatgtttaaa

SEQ ID NO: 1302343 - DNA, 15 bp, Homo sapiens
aatatcaatgtttaa

SEQ ID NO: 1302344 - DNA, 15 bp, Homo sapiens
aaatatcaatgttta

SEQ ID NO: 1302345 - DNA, 15 bp, Homo sapiens
taaatatcaatgttt

SEQ ID NO: 1302346 - DNA, 15 bp, Homo sapiens
ttaaatatcaatgtt

SEQ ID NO: 1302347 - DNA, 15 bp, Homo sapiens
attaaatatcaatgt

SEQ ID NO: 1302348 - DNA, 15 bp, Homo sapiens
cattaaatatcaatg

SEQ ID NO: 1302349 - DNA, 15 bp, Homo sapiens
ccattaaatatcaat

SEQ ID NO: 1302350 - DNA, 15 bp, Homo sapiens
accattaaatatcaa

SEQ ID NO: 1302351 - DNA, 15 bp, Homo sapiens
aaccattaaatatca

SEQ ID NO: 1302352 - DNA, 15 bp, Homo sapiens
gaaccattaaatatc

SEQ ID NO: 1302353 - DNA, 15 bp, Homo sapiens
agaaccattaaatat

SEQ ID NO: 1302354 - DNA, 15 bp, Homo sapiens
aagaaccattaaata

SEQ ID NO: 1302355 - DNA, 15 bp, Homo sapiens
aaagaaccattaaat

SEQ ID NO: 1302356 - DNA, 15 bp, Homo sapiens
aaaagaaccattaaa

SEQ ID NO: 1302357 - DNA, 15 bp, Homo sapiens
aaaaagaaccattaa

SEQ ID NO: 1302358 - DNA, 15 bp, Homo sapiens
caaaaagaaccatta

SEQ ID NO: 1302359 - DNA, 15 bp, Homo sapiens
tcaaaaagaaccatt

SEQ ID NO: 1302360 - DNA, 15 bp, Homo sapiens
atcaaaaagaaccat

SEQ ID NO: 1302361 - DNA, 15 bp, Homo sapiens
aatcaaaaagaacca

SEQ ID NO: 1302362 - DNA, 15 bp, Homo sapiens
gaatcaaaaagaacc

SEQ ID NO: 1302363 - DNA, 15 bp, Homo sapiens
agaatcaaaaagaac

SEQ ID NO: 1302364 - DNA, 15 bp, Homo sapiens
tagaatcaaaaagaa

SEQ ID NO: 1302365 - DNA, 15 bp, Homo sapiens
gtagaatcaaaaaga

SEQ ID NO: 1302366 - DNA, 15 bp, Homo sapiens
tgtagaatcaaaaag

SEQ ID NO: 1302367 - DNA, 15 bp, Homo sapiens
ctgtagaatcaaaaa

SEQ ID NO: 1302368 - DNA, 15 bp, Homo sapiens
gctgtagaatcaaaa

SEQ ID NO: 1302369 - DNA, 15 bp, Homo sapiens
ggctgtagaatcaaa

SEQ ID NO: 1302370 - DNA, 15 bp, Homo sapiens
tggctgtagaatcaa

SEQ ID NO: 1302371 - DNA, 15 bp, Homo sapiens
atggctgtagaatca

SEQ ID NO: 1302372 - DNA, 15 bp, Homo sapiens
catggctgtagaatc

SEQ ID NO: 1302373 - DNA, 15 bp, Homo sapiens
gcatggctgtagaat

SEQ ID NO: 1302374 - DNA, 15 bp, Homo sapiens
tgcatggctgtagaa

SEQ ID NO: 1302375 - DNA, 15 bp, Homo sapiens
gtgcatggctgtaga

SEQ ID NO: 1302376 - DNA, 15 bp, Homo sapiens
ggtgcatggctgtag

SEQ ID NO: 1302377 - DNA, 15 bp, Homo sapiens
tggtgcatggctgta

SEQ ID NO: 1302378 - DNA, 15 bp, Homo sapiens
gtggtgcatggctgt

SEQ ID NO: 1302379 - DNA, 15 bp, Homo sapiens
agtggtgcatggctg

SEQ ID NO: 1302380 - DNA, 15 bp, Homo sapiens
aagtggtgcatggct

SEQ ID NO: 1302381 - DNA, 15 bp, Homo sapiens
taagtggtgcatggc

SEQ ID NO: 1302382 - DNA, 15 bp, Homo sapiens
ttaagtggtgcatgg

SEQ ID NO: 1302383 - DNA, 15 bp, Homo sapiens
gttaagtggtgcatg

SEQ ID NO: 1302384 - DNA, 15 bp, Homo sapiens
tgttaagtggtgcat

SEQ ID NO: 1302385 - DNA, 15 bp, Homo sapiens
ctgttaagtggtgca

SEQ ID NO: 1302386 - DNA, 15 bp, Homo sapiens
cctgttaagtggtgc

SEQ ID NO: 1302387 - DNA, 15 bp, Homo sapiens
ccctgttaagtggtg

SEQ ID NO: 1302388 - DNA, 15 bp, Homo sapiens
tccctgttaagtggt

SEQ ID NO: 1302389 - DNA, 15 bp, Homo sapiens
atccctgttaagtgg

SEQ ID NO: 1302390 - DNA, 15 bp, Homo sapiens
tatccctgttaagtg

SEQ ID NO: 1302391 - DNA, 15 bp, Homo sapiens
atatccctgttaagt

SEQ ID NO: 1302392 - DNA, 15 bp, Homo sapiens
catatccctgttaag

SEQ ID NO: 1302393 - DNA, 15 bp, Homo sapiens
acatatccctgttaa

SEQ ID NO: 1302394 - DNA, 15 bp, Homo sapiens
aacatatccctgtta

SEQ ID NO: 1302395 - DNA, 15 bp, Homo sapiens
gaacatatccctgtt

SEQ ID NO: 1302396 - DNA, 15 bp, Homo sapiens
agaacatatccctgt

SEQ ID NO: 1302397 - DNA, 15 bp, Homo sapiens
cagaacatatccctg

SEQ ID NO: 1302398 - DNA, 15 bp, Homo sapiens
tcagaacatatccct

SEQ ID NO: 1302399 - DNA, 15 bp, Homo sapiens
gtcagaacatatccc

SEQ ID NO: 1302400 - DNA, 15 bp, Homo sapiens
tgtcagaacatatcc

SEQ ID NO: 1302401 - DNA, 15 bp, Homo sapiens
ttgtcagaacatatc

SEQ ID NO: 1302402 - DNA, 15 bp, Homo sapiens
tttgtcagaacatat

SEQ ID NO: 1302403 - DNA, 15 bp, Homo sapiens
atttgtcagaacata

SEQ ID NO: 1302404 - DNA, 15 bp, Homo sapiens
catttgtcagaacat

SEQ ID NO: 1302405 - DNA, 15 bp, Homo sapiens
gcatttgtcagaaca

SEQ ID NO: 1302406 - DNA, 15 bp, Homo sapiens
tgcatttgtcagaac

SEQ ID NO: 1302407 - DNA, 15 bp, Homo sapiens
atgcatttgtcagaa

SEQ ID NO: 1302408 - DNA, 15 bp, Homo sapiens
gatgcatttgtcaga

SEQ ID NO: 1302409 - DNA, 15 bp, Homo sapiens
tgatgcatttgtcag

SEQ ID NO: 1302410 - DNA, 15 bp, Homo sapiens
atgatgcatttgtca

SEQ ID NO: 1302411 - DNA, 15 bp, Homo sapiens
aatgatgcatttgtc

SEQ ID NO: 1302412 - DNA, 15 bp, Homo sapiens
taatgatgcatttgt

SEQ ID NO: 1302413 - DNA, 15 bp, Homo sapiens
ctaatgatgcatttg

SEQ ID NO: 1302414 - DNA, 15 bp, Homo sapiens
gcctaatgatgcatt

SEQ ID NO: 1302415 - DNA, 15 bp, Homo sapiens
tgcctaatgatgcat

SEQ ID NO: 1302416 - DNA, 15 bp, Homo sapiens
ttgcctaatgatgca

SEQ ID NO: 1302417 - DNA, 15 bp, Homo sapiens
attgcctaatgatgc

SEQ ID NO: 1302418 - DNA, 15 bp, Homo sapiens
aattgcctaatgatg

SEQ ID NO: 1302419 - DNA, 15 bp, Homo sapiens
acacaacaaaattgc

SEQ ID NO: 1302420 - DNA, 15 bp, Homo sapiens
cacacaacaaaattg

SEQ ID NO: 1302421 - DNA, 15 bp, Homo sapiens
tcacacaacaaaatt

SEQ ID NO: 1302422 - DNA, 15 bp, Homo sapiens
ttcacacaacaaaat

SEQ ID NO: 1302423 - DNA, 15 bp, Homo sapiens
gttcacacaacaaaa

SEQ ID NO: 1302424 - DNA, 15 bp, Homo sapiens
ggttcacacaacaaa

SEQ ID NO: 1302425 - DNA, 15 bp, Homo sapiens
aggttcacacaacaa

SEQ ID NO: 1302426 - DNA, 15 bp, Homo sapiens
caggttcacacaaca

SEQ ID NO: 1302427 - DNA, 15 bp, Homo sapiens
ccaggttcacacaac

SEQ ID NO: 1302428 - DNA, 15 bp, Homo sapiens
accaggttcacacaa

SEQ ID NO: 1302429 - DNA, 15 bp, Homo sapiens
taccaggttcacaca

SEQ ID NO: 1302430 - DNA, 15 bp, Homo sapiens
ctaccaggttcacac

SEQ ID NO: 1302431 - DNA, 15 bp, Homo sapiens
tctaccaggttcaca

SEQ ID NO: 1302432 - DNA, 15 bp, Homo sapiens
ctctaccaggttcac

SEQ ID NO: 1302433 - DNA, 15 bp, Homo sapiens
actctaccaggttca

SEQ ID NO: 1302434 - DNA, 15 bp, Homo sapiens
cactctaccaggttc

SEQ ID NO: 1302435 - DNA, 15 bp, Homo sapiens
acactctaccaggtt

SEQ ID NO: 1302436 - DNA, 15 bp, Homo sapiens
cacactctaccaggt

SEQ ID NO: 1302437 - DNA, 15 bp, Homo sapiens
acacactctaccagg

SEQ ID NO: 1302438 - DNA, 15 bp, Homo sapiens
gacacactctaccag

SEQ ID NO: 1302439 - DNA, 15 bp, Homo sapiens
agacacactctacca

SEQ ID NO: 1302440 - DNA, 15 bp, Homo sapiens
cagacacactctacc

SEQ ID NO: 1302441 - DNA, 15 bp, Homo sapiens
acagacacactctac

SEQ ID NO: 1302442 - DNA, 15 bp, Homo sapiens
tacagacacactcta

SEQ ID NO: 1302443 - DNA, 15 bp, Homo sapiens
gtacagacacactct

SEQ ID NO: 1302444 - DNA, 15 bp, Homo sapiens
tgtacagacacactc

SEQ ID NO: 1302445 - DNA, 15 bp, Homo sapiens
ttgtacagacacact

SEQ ID NO: 1302446 - DNA, 15 bp, Homo sapiens
tttgtacagacacac

SEQ ID NO: 1302447 - DNA, 15 bp, Homo sapiens
gtttgtacagacaca

SEQ ID NO: 1302448 - DNA, 15 bp, Homo sapiens
ggtttgtacagacac

SEQ ID NO: 1302449 - DNA, 15 bp, Homo sapiens
aggtttgtacagaca

SEQ ID NO: 1302450 - DNA, 15 bp, Homo sapiens
taggtttgtacagac

SEQ ID NO: 1302451 - DNA, 15 bp, Homo sapiens
ctaggtttgtacaga

SEQ ID NO: 1302452 - DNA, 15 bp, Homo sapiens
tctaggtttgtacag

SEQ ID NO: 1302453 - DNA, 15 bp, Homo sapiens
atctaggtttgtaca

SEQ ID NO: 1302454 - DNA, 15 bp, Homo sapiens
catctaggtttgtac

SEQ ID NO: 1302455 - DNA, 15 bp, Homo sapiens
ccatctaggtttgta

SEQ ID NO: 1302456 - DNA, 15 bp, Homo sapiens
accatctaggtttgt

SEQ ID NO: 1302457 - DNA, 15 bp, Homo sapiens
taccatctaggtttg

SEQ ID NO: 1302458 - DNA, 15 bp, Homo sapiens
ataccatctaggttt

SEQ ID NO: 1302459 - DNA, 15 bp, Homo sapiens
tataccatctaggtt

SEQ ID NO: 1302460 - DNA, 15 bp, Homo sapiens
ctataccatctaggt

SEQ ID NO: 1302461 - DNA, 15 bp, Homo sapiens
gctataccatctagg

SEQ ID NO: 1302462 - DNA, 15 bp, Homo sapiens
ggctataccatctag

SEQ ID NO: 1302463 - DNA, 15 bp, Homo sapiens
cggctataccatcta

SEQ ID NO: 1302464 - DNA, 15 bp, Homo sapiens
tcggctataccatct

SEQ ID NO: 1302465 - DNA, 15 bp, Homo sapiens
atcggctataccatc

SEQ ID NO: 1302466 - DNA, 15 bp, Homo sapiens
aatcggctataccat

SEQ ID NO: 1302467 - DNA, 15 bp, Homo sapiens
caatcggctatacca

SEQ ID NO: 1302468 - DNA, 15 bp, Homo sapiens
acaatcggctatacc

SEQ ID NO: 1302469 - DNA, 15 bp, Homo sapiens
tacaatcggctatac

SEQ ID NO: 1302470 - DNA, 15 bp, Homo sapiens
gtacaatcggctata

SEQ ID NO: 1302471 - DNA, 15 bp, Homo sapiens
tgtacaatcggctat

SEQ ID NO: 1302472 - DNA, 15 bp, Homo sapiens
atgtacaatcggcta

SEQ ID NO: 1302473 - DNA, 15 bp, Homo sapiens
gatgtacaatcggct

SEQ ID NO: 1302474 - DNA, 15 bp, Homo sapiens
agatgtacaatcggc

SEQ ID NO: 1302475 - DNA, 15 bp, Homo sapiens
tagatgtacaatcgg

SEQ ID NO: 1302476 - DNA, 15 bp, Homo sapiens
ttagatgtacaatcg

SEQ ID NO: 1302477 - DNA, 15 bp, Homo sapiens
cttagatgtacaatc

SEQ ID NO: 1302478 - DNA, 15 bp, Homo sapiens
gcttagatgtacaat

SEQ ID NO: 1302479 - DNA, 15 bp, Homo sapiens
agcttagatgtacaa

SEQ ID NO: 1302480 - DNA, 15 bp, Homo sapiens
cagcttagatgtaca

SEQ ID NO: 1302481 - DNA, 15 bp, Homo sapiens
acagcttagatgtac

SEQ ID NO: 1302482 - DNA, 15 bp, Homo sapiens
tacagcttagatgta

SEQ ID NO: 1302483 - DNA, 15 bp, Homo sapiens
atacagcttagatgt

SEQ ID NO: 1302484 - DNA, 15 bp, Homo sapiens
catacagcttagatg

SEQ ID NO: 1302485 - DNA, 15 bp, Homo sapiens
tcatacagcttagat

SEQ ID NO: 1302486 - DNA, 15 bp, Homo sapiens
atcatacagcttaga

SEQ ID NO: 1302487 - DNA, 15 bp, Homo sapiens
tatcatacagcttag

SEQ ID NO: 1302488 - DNA, 15 bp, Homo sapiens
atatcatacagctta

SEQ ID NO: 1302489 - DNA, 15 bp, Homo sapiens
tatatcatacagctt

SEQ ID NO: 1302490 - DNA, 15 bp, Homo sapiens
ctatatcatacagct

SEQ ID NO: 1302491 - DNA, 15 bp, Homo sapiens
gctatatcatacagc

SEQ ID NO: 1302492 - DNA, 15 bp, Homo sapiens
ggctatatcatacag

SEQ ID NO: 1302493 - DNA, 15 bp, Homo sapiens
aggctatatcataca

SEQ ID NO: 1302494 - DNA, 15 bp, Homo sapiens
taggctatatcatac

SEQ ID NO: 1302495 - DNA, 15 bp, Homo sapiens
ataggctatatcata

SEQ ID NO: 1302496 - DNA, 15 bp, Homo sapiens
aataggctatatcat

SEQ ID NO: 1302497 - DNA, 15 bp, Homo sapiens
gaataggctatatca

SEQ ID NO: 1302498 - DNA, 15 bp, Homo sapiens
tgaataggctatatc

SEQ ID NO: 1302499 - DNA, 15 bp, Homo sapiens
atgaataggctatat

SEQ ID NO: 1302500 - DNA, 15 bp, Homo sapiens
aatgaataggctata

SEQ ID NO: 1302501 - DNA, 15 bp, Homo sapiens
gaatgaataggctat

SEQ ID NO: 1302502 - DNA, 15 bp, Homo sapiens
ggaatgaataggcta

SEQ ID NO: 1302503 - DNA, 15 bp, Homo sapiens
aggaatgaataggct

SEQ ID NO: 1302504 - DNA, 15 bp, Homo sapiens
taggaatgaataggc

SEQ ID NO: 1302505 - DNA, 15 bp, Homo sapiens
ctaggaatgaatagg

SEQ ID NO: 1302506 - DNA, 15 bp, Homo sapiens
cctaggaatgaatag

SEQ ID NO: 1302507 - DNA, 15 bp, Homo sapiens
gcctaggaatgaata

SEQ ID NO: 1302508 - DNA, 15 bp, Homo sapiens
agcctaggaatgaat

SEQ ID NO: 1302509 - DNA, 15 bp, Homo sapiens
tagcctaggaatgaa

SEQ ID NO: 1302510 - DNA, 15 bp, Homo sapiens
gtagcctaggaatga

SEQ ID NO: 1302511 - DNA, 15 bp, Homo sapiens
tgtagcctaggaatg

SEQ ID NO: 1302512 - DNA, 15 bp, Homo sapiens
ctgtagcctaggaat

SEQ ID NO: 1302513 - DNA, 15 bp, Homo sapiens
cctgtagcctaggaa

SEQ ID NO: 1302514 - DNA, 15 bp, Homo sapiens
gcctgtagcctagga

SEQ ID NO: 1302515 - DNA, 15 bp, Homo sapiens
ggcctgtagcctagg

SEQ ID NO: 1302516 - DNA, 15 bp, Homo sapiens
aggcctgtagcctag

SEQ ID NO: 1302517 - DNA, 15 bp, Homo sapiens
gaggcctgtagccta

SEQ ID NO: 1302518 - DNA, 15 bp, Homo sapiens
agaggcctgtagcct

SEQ ID NO: 1302519 - DNA, 15 bp, Homo sapiens
tagaggcctgtagcc

SEQ ID NO: 1302520 - DNA, 15 bp, Homo sapiens
gtagaggcctgtagc

SEQ ID NO: 1302521 - DNA, 15 bp, Homo sapiens
tgtagaggcctgtag

SEQ ID NO: 1302522 - DNA, 15 bp, Homo sapiens
ctgtagaggcctgta

SEQ ID NO: 1302523 - DNA, 15 bp, Homo sapiens
gctgtagaggcctgt

SEQ ID NO: 1302524 - DNA, 15 bp, Homo sapiens
tgctgtagaggcctg

SEQ ID NO: 1302525 - DNA, 15 bp, Homo sapiens
atgctgtagaggcct

SEQ ID NO: 1302526 - DNA, 15 bp, Homo sapiens
catgctgtagaggcc

SEQ ID NO: 1302527 - DNA, 15 bp, Homo sapiens
acatgctgtagaggc

SEQ ID NO: 1302528 - DNA, 15 bp, Homo sapiens
cacatgctgtagagg

SEQ ID NO: 1302529 - DNA, 15 bp, Homo sapiens
acacatgctgtagag

SEQ ID NO: 1302530 - DNA, 15 bp, Homo sapiens
tacacatgctgtaga

SEQ ID NO: 1302531 - DNA, 15 bp, Homo sapiens
gtacacatgctgtag

SEQ ID NO: 1302532 - DNA, 15 bp, Homo sapiens
agtacacatgctgta

SEQ ID NO: 1302533 - DNA, 15 bp, Homo sapiens
cagtacacatgctgt

SEQ ID NO: 1302534 - DNA, 15 bp, Homo sapiens
tcagtacacatgctg

SEQ ID NO: 1302535 - DNA, 15 bp, Homo sapiens
ttcagtacacatgct

SEQ ID NO: 1302536 - DNA, 15 bp, Homo sapiens
attcagtacacatgc

SEQ ID NO: 1302537 - DNA, 15 bp, Homo sapiens
tattcagtacacatg

SEQ ID NO: 1302538 - DNA, 15 bp, Homo sapiens
gtattcagtacacat

SEQ ID NO: 1302539 - DNA, 15 bp, Homo sapiens
agtattcagtacaca

SEQ ID NO: 1302540 - DNA, 15 bp, Homo sapiens
cagtattcagtacac

SEQ ID NO: 1302541 - DNA, 15 bp, Homo sapiens
acagtattcagtaca

SEQ ID NO: 1302542 - DNA, 15 bp, Homo sapiens
tacagtattcagtac

SEQ ID NO: 1302543 - DNA, 15 bp, Homo sapiens
ctacagtattcagta

SEQ ID NO: 1302544 - DNA, 15 bp, Homo sapiens
cctacagtattcagt

SEQ ID NO: 1302545 - DNA, 15 bp, Homo sapiens
acctacagtattcag

SEQ ID NO: 1302546 - DNA, 15 bp, Homo sapiens
tacctacagtattca

SEQ ID NO: 1302547 - DNA, 15 bp, Homo sapiens
ttacctacagtattc

SEQ ID NO: 1302548 - DNA, 15 bp, Homo sapiens
attacctacagtatt

SEQ ID NO: 1302549 - DNA, 15 bp, Homo sapiens
cattacctacagtat

SEQ ID NO: 1302550 - DNA, 15 bp, Homo sapiens
ccattacctacagta

SEQ ID NO: 1302551 - DNA, 15 bp, Homo sapiens
accattacctacagt

SEQ ID NO: 1302552 - DNA, 15 bp, Homo sapiens
taccattacctacag

SEQ ID NO: 1302553 - DNA, 15 bp, Homo sapiens
ttaccattacctaca

SEQ ID NO: 1302554 - DNA, 15 bp, Homo sapiens
gttaccattacctac

SEQ ID NO: 1302555 - DNA, 15 bp, Homo sapiens
tgttaccattaccta

SEQ ID NO: 1302556 - DNA, 15 bp, Homo sapiens
atgttaccattacct

SEQ ID NO: 1302557 - DNA, 15 bp, Homo sapiens
tatgttaccattacc

SEQ ID NO: 1302558 - DNA, 15 bp, Homo sapiens
ttatgttaccattac

SEQ ID NO: 1302559 - DNA, 15 bp, Homo sapiens
attatgttaccatta

SEQ ID NO: 1302560 - DNA, 15 bp, Homo sapiens
cattatgttaccatt

SEQ ID NO: 1302561 - DNA, 15 bp, Homo sapiens
acattatgttaccat

SEQ ID NO: 1302562 - DNA, 15 bp, Homo sapiens
cacattatgttacca

SEQ ID NO: 1302563 - DNA, 15 bp, Homo sapiens
acacattatgttacc

SEQ ID NO: 1302564 - DNA, 15 bp, Homo sapiens
aacacattatgttac

SEQ ID NO: 1302565 - DNA, 15 bp, Homo sapiens
taacacattatgtta

SEQ ID NO: 1302566 - DNA, 15 bp, Homo sapiens
gtaacacattatgtt

SEQ ID NO: 1302567 - DNA, 15 bp, Homo sapiens
ggtaacacattatgt

SEQ ID NO: 1302568 - DNA, 15 bp, Homo sapiens
tggtaacacattatg

SEQ ID NO: 1302569 - DNA, 15 bp, Homo sapiens
atggtaacacattat

SEQ ID NO: 1302570 - DNA, 15 bp, Homo sapiens
aatggtaacacatta

SEQ ID NO: 1302571 - DNA, 15 bp, Homo sapiens
aaatggtaacacatt

SEQ ID NO: 1302572 - DNA, 15 bp, Homo sapiens
caaatggtaacacat

SEQ ID NO: 1302573 - DNA, 15 bp, Homo sapiens
acaaatggtaacaca

SEQ ID NO: 1302574 - DNA, 15 bp, Homo sapiens
cacaaatggtaacac

SEQ ID NO: 1302575 - DNA, 15 bp, Homo sapiens
acacaaatggtaaca

SEQ ID NO: 1302576 - DNA, 15 bp, Homo sapiens
tacacaaatggtaac

SEQ ID NO: 1302577 - DNA, 15 bp, Homo sapiens
atacacaaatggtaa

SEQ ID NO: 1302578 - DNA, 15 bp, Homo sapiens
gatacacaaatggta

SEQ ID NO: 1302579 - DNA, 15 bp, Homo sapiens
agatacacaaatggt

SEQ ID NO: 1302580 - DNA, 15 bp, Homo sapiens
tagatacacaaatgg

SEQ ID NO: 1302581 - DNA, 15 bp, Homo sapiens
ttagatacacaaatg

SEQ ID NO: 1302582 - DNA, 15 bp, Homo sapiens
tttagatacacaaat

SEQ ID NO: 1302583 - DNA, 15 bp, Homo sapiens
atttagatacacaaa

SEQ ID NO: 1302584 - DNA, 15 bp, Homo sapiens
atatttagatacaca

SEQ ID NO: 1302585 - DNA, 15 bp, Homo sapiens
tatatttagatacac

SEQ ID NO: 1302586 - DNA, 15 bp, Homo sapiens
atatatttagataca

SEQ ID NO: 1302587 - DNA, 15 bp, Homo sapiens
gatatatttagatac

SEQ ID NO: 1302588 - DNA, 15 bp, Homo sapiens
ggatatatttagata

SEQ ID NO: 1302589 - DNA, 15 bp, Homo sapiens
tggatatatttagat

SEQ ID NO: 1302590 - DNA, 15 bp, Homo sapiens
ttggatatatttaga

SEQ ID NO: 1302591 - DNA, 15 bp, Homo sapiens
tttggatatatttag

SEQ ID NO: 1302592 - DNA, 15 bp, Homo sapiens
gtttggatatattta

SEQ ID NO: 1302593 - DNA, 15 bp, Homo sapiens
tgtttggatatattt

SEQ ID NO: 1302594 - DNA, 15 bp, Homo sapiens
atgtttggatatatt

SEQ ID NO: 1302595 - DNA, 15 bp, Homo sapiens
tatgtttggatatat

SEQ ID NO: 1302596 - DNA, 15 bp, Homo sapiens
ctatgtttggatata

SEQ ID NO: 1302597 - DNA, 15 bp, Homo sapiens
tctatgtttggatat

SEQ ID NO: 1302598 - DNA, 15 bp, Homo sapiens
ttctatgtttggata

SEQ ID NO: 1302599 - DNA, 15 bp, Homo sapiens
tttctatgtttggat

SEQ ID NO: 1302600 - DNA, 15 bp, Homo sapiens
ttttctatgtttgga

SEQ ID NO: 1302601 - DNA, 15 bp, Homo sapiens
cttttctatgtttgg

SEQ ID NO: 1302602 - DNA, 15 bp, Homo sapiens
ccttttctatgtttg

SEQ ID NO: 1302603 - DNA, 15 bp, Homo sapiens
accttttctatgttt

SEQ ID NO: 1302604 - DNA, 15 bp, Homo sapiens
taccttttctatgtt

SEQ ID NO: 1302605 - DNA, 15 bp, Homo sapiens
ttaccttttctatgt

SEQ ID NO: 1302606 - DNA, 15 bp, Homo sapiens
tttaccttttctatg

SEQ ID NO: 1302607 - DNA, 15 bp, Homo sapiens
ctttaccttttctat

SEQ ID NO: 1302608 - DNA, 15 bp, Homo sapiens
tctttaccttttcta

SEQ ID NO: 1302609 - DNA, 15 bp, Homo sapiens
atctttaccttttct

SEQ ID NO: 1302610 - DNA, 15 bp, Homo sapiens
tatctttaccttttc

SEQ ID NO: 1302611 - DNA, 15 bp, Homo sapiens
atatctttacctttt

SEQ ID NO: 1302612 - DNA, 15 bp, Homo sapiens
tatatctttaccttt

SEQ ID NO: 1302613 - DNA, 15 bp, Homo sapiens
ctatatctttacctt

SEQ ID NO: 1302614 - DNA, 15 bp, Homo sapiens
actatatctttacct

SEQ ID NO: 1302615 - DNA, 15 bp, Homo sapiens
tactatatctttacc

SEQ ID NO: 1302616 - DNA, 15 bp, Homo sapiens
gtactatatctttac

SEQ ID NO: 1302617 - DNA, 15 bp, Homo sapiens
tgtactatatcttta

SEQ ID NO: 1302618 - DNA, 15 bp, Homo sapiens
ttgtactatatcttt

SEQ ID NO: 1302619 - DNA, 15 bp, Homo sapiens
tttgtactatatctt

SEQ ID NO: 1302620 - DNA, 15 bp, Homo sapiens
ttttgtactatatct

SEQ ID NO: 1302621 - DNA, 15 bp, Homo sapiens
cttttgtactatatc

SEQ ID NO: 1302622 - DNA, 15 bp, Homo sapiens
tcttttgtactatat

SEQ ID NO: 1302623 - DNA, 15 bp, Homo sapiens
atcttttgtactata

SEQ ID NO: 1302624 - DNA, 15 bp, Homo sapiens
tatcttttgtactat

SEQ ID NO: 1302625 - DNA, 15 bp, Homo sapiens
ttatcttttgtacta

SEQ ID NO: 1302626 - DNA, 15 bp, Homo sapiens
tttatcttttgtact

SEQ ID NO: 1302627 - DNA, 15 bp, Homo sapiens
ttttatcttttgtac

SEQ ID NO: 1302628 - DNA, 15 bp, Homo sapiens
tttttatcttttgta

SEQ ID NO: 1302629 - DNA, 15 bp, Homo sapiens
ttttttatcttttgt

SEQ ID NO: 1302630 - DNA, 15 bp, Homo sapiens
attttttatcttttg

SEQ ID NO: 1302631 - DNA, 15 bp, Homo sapiens
cattttttatctttt

SEQ ID NO: 1302632 - DNA, 15 bp, Homo sapiens
ccattttttatcttt

SEQ ID NO: 1302633 - DNA, 15 bp, Homo sapiens
tccattttttatctt

SEQ ID NO: 1302634 - DNA, 15 bp, Homo sapiens
ttccattttttatct

SEQ ID NO: 1302635 - DNA, 15 bp, Homo sapiens
gttccattttttatc

SEQ ID NO: 1302636 - DNA, 15 bp, Homo sapiens
tgttccattttttat

SEQ ID NO: 1302637 - DNA, 15 bp, Homo sapiens
atgttccatttttta

SEQ ID NO: 1302638 - DNA, 15 bp, Homo sapiens
aatgttccatttttt

SEQ ID NO: 1302639 - DNA, 15 bp, Homo sapiens
aaatgttccattttt

SEQ ID NO: 1302640 - DNA, 15 bp, Homo sapiens
caaatgttccatttt

SEQ ID NO: 1302641 - DNA, 15 bp, Homo sapiens
gcaaatgttccattt

SEQ ID NO: 1302642 - DNA, 15 bp, Homo sapiens
tgcaaatgttccatt

SEQ ID NO: 1302643 - DNA, 15 bp, Homo sapiens
gtgcaaatgttccat

SEQ ID NO: 1302644 - DNA, 15 bp, Homo sapiens
tgtgcaaatgttcca

SEQ ID NO: 1302645 - DNA, 15 bp, Homo sapiens
ctgtgcaaatgttcc

SEQ ID NO: 1302646 - DNA, 15 bp, Homo sapiens
tctgtgcaaatgttc

SEQ ID NO: 1302647 - DNA, 15 bp, Homo sapiens
ctctgtgcaaatgtt

SEQ ID NO: 1302648 - DNA, 15 bp, Homo sapiens
gctctgtgcaaatgt

SEQ ID NO: 1302649 - DNA, 15 bp, Homo sapiens
tgctctgtgcaaatg

SEQ ID NO: 1302650 - DNA, 15 bp, Homo sapiens
gtgctctgtgcaaat

SEQ ID NO: 1302651 - DNA, 15 bp, Homo sapiens
agtgctctgtgcaaa

SEQ ID NO: 1302652 - DNA, 15 bp, Homo sapiens
aagtgctctgtgcaa

SEQ ID NO: 1302653 - DNA, 15 bp, Homo sapiens
taagtgctctgtgca

SEQ ID NO: 1302654 - DNA, 15 bp, Homo sapiens
gtaagtgctctgtgc

SEQ ID NO: 1302655 - DNA, 15 bp, Homo sapiens
agtaagtgctctgtg

SEQ ID NO: 1302656 - DNA, 15 bp, Homo sapiens
tagtaagtgctctgt

SEQ ID NO: 1302657 - DNA, 15 bp, Homo sapiens
atagtaagtgctctg

SEQ ID NO: 1302658 - DNA, 15 bp, Homo sapiens
catagtaagtgctct

SEQ ID NO: 1302659 - DNA, 15 bp, Homo sapiens
tcatagtaagtgctc

SEQ ID NO: 1302660 - DNA, 15 bp, Homo sapiens
ttcatagtaagtgct

SEQ ID NO: 1302661 - DNA, 15 bp, Homo sapiens
tttcatagtaagtgc

SEQ ID NO: 1302662 - DNA, 15 bp, Homo sapiens
ctttcatagtaagtg

SEQ ID NO: 1302663 - DNA, 15 bp, Homo sapiens
cctttcatagtaagt

SEQ ID NO: 1302664 - DNA, 15 bp, Homo sapiens
tcctttcatagtaag

SEQ ID NO: 1302665 - DNA, 15 bp, Homo sapiens
ctcctttcatagtaa

SEQ ID NO: 1302666 - DNA, 15 bp, Homo sapiens
gctcctttcatagta

SEQ ID NO: 1302667 - DNA, 15 bp, Homo sapiens
agctcctttcatagt

SEQ ID NO: 1302668 - DNA, 15 bp, Homo sapiens
aagctcctttcatag

SEQ ID NO: 1302669 - DNA, 15 bp, Homo sapiens
taagctcctttcata

SEQ ID NO: 1302670 - DNA, 15 bp, Homo sapiens
gtaagctcctttcat

SEQ ID NO: 1302671 - DNA, 15 bp, Homo sapiens
tgtaagctcctttca

SEQ ID NO: 1302672 - DNA, 15 bp, Homo sapiens
ctgtaagctcctttc

SEQ ID NO: 1302673 - DNA, 15 bp, Homo sapiens
cctgtaagctccttt

SEQ ID NO: 1302674 - DNA, 15 bp, Homo sapiens
tcctgtaagctcctt

SEQ ID NO: 1302675 - DNA, 15 bp, Homo sapiens
atcctgtaagctcct

SEQ ID NO: 1302676 - DNA, 15 bp, Homo sapiens
aatcctgtaagctcc

SEQ ID NO: 1302677 - DNA, 15 bp, Homo sapiens
caatcctgtaagctc

SEQ ID NO: 1302678 - DNA, 15 bp, Homo sapiens
tcaatcctgtaagct

SEQ ID NO: 1302679 - DNA, 15 bp, Homo sapiens
ttcaatcctgtaagc

SEQ ID NO: 1302680 - DNA, 15 bp, Homo sapiens
tttcaatcctgtaag

SEQ ID NO: 1302681 - DNA, 15 bp, Homo sapiens
ctttcaatcctgtaa

SEQ ID NO: 1302682 - DNA, 15 bp, Homo sapiens
actttcaatcctgta

SEQ ID NO: 1302683 - DNA, 15 bp, Homo sapiens
aactttcaatcctgt

SEQ ID NO: 1302684 - DNA, 15 bp, Homo sapiens
caactttcaatcctg

SEQ ID NO: 1302685 - DNA, 15 bp, Homo sapiens
gcaactttcaatcct

SEQ ID NO: 1302686 - DNA, 15 bp, Homo sapiens
agcaactttcaatcc

SEQ ID NO: 1302687 - DNA, 15 bp, Homo sapiens
gagcaactttcaatc

SEQ ID NO: 1302688 - DNA, 15 bp, Homo sapiens
agagcaactttcaat

SEQ ID NO: 1302689 - DNA, 15 bp, Homo sapiens
cagagcaactttcaa

SEQ ID NO: 1302690 - DNA, 15 bp, Homo sapiens
tcagagcaactttca

SEQ ID NO: 1302691 - DNA, 15 bp, Homo sapiens
ttcagagcaactttc

SEQ ID NO: 1302692 - DNA, 15 bp, Homo sapiens
attcagagcaacttt

SEQ ID NO: 1302693 - DNA, 15 bp, Homo sapiens
cattcagagcaactt

SEQ ID NO: 1302694 - DNA, 15 bp, Homo sapiens
tcattcagagcaact

SEQ ID NO: 1302695 - DNA, 15 bp, Homo sapiens
ctcattcagagcaac

SEQ ID NO: 1302696 - DNA, 15 bp, Homo sapiens
actcattcagagcaa

SEQ ID NO: 1302697 - DNA, 15 bp, Homo sapiens
gactcattcagagca

SEQ ID NO: 1302698 - DNA, 15 bp, Homo sapiens
tgactcattcagagc

SEQ ID NO: 1302699 - DNA, 15 bp, Homo sapiens
ctgactcattcagag

SEQ ID NO: 1302700 - DNA, 15 bp, Homo sapiens
actgactcattcaga

SEQ ID NO: 1302701 - DNA, 15 bp, Homo sapiens
cactgactcattcag

SEQ ID NO: 1302702 - DNA, 15 bp, Homo sapiens
tcactgactcattca

SEQ ID NO: 1302703 - DNA, 15 bp, Homo sapiens
ctcactgactcattc

SEQ ID NO: 1302704 - DNA, 15 bp, Homo sapiens
actcactgactcatt

SEQ ID NO: 1302705 - DNA, 15 bp, Homo sapiens
gactcactgactcat

SEQ ID NO: 1302706 - DNA, 15 bp, Homo sapiens
cgactcactgactca

SEQ ID NO: 1302707 - DNA, 15 bp, Homo sapiens
tcgactcactgactc

SEQ ID NO: 1302708 - DNA, 15 bp, Homo sapiens
ctcgactcactgact

SEQ ID NO: 1302709 - DNA, 15 bp, Homo sapiens
actcgactcactgac

SEQ ID NO: 1302710 - DNA, 15 bp, Homo sapiens
cactcgactcactga

SEQ ID NO: 1302711 - DNA, 15 bp, Homo sapiens
ccactcgactcactg

SEQ ID NO: 1302712 - DNA, 15 bp, Homo sapiens
gccactcgactcact

SEQ ID NO: 1302713 - DNA, 15 bp, Homo sapiens
tgccactcgactcac

SEQ ID NO: 1302714 - DNA, 15 bp, Homo sapiens
ttgccactcgactca

SEQ ID NO: 1302715 - DNA, 15 bp, Homo sapiens
cttgccactcgactc

SEQ ID NO: 1302716 - DNA, 15 bp, Homo sapiens
acttgccactcgact

SEQ ID NO: 1302717 - DNA, 15 bp, Homo sapiens
cacttgccactcgac

SEQ ID NO: 1302718 - DNA, 15 bp, Homo sapiens
tcacttgccactcga

SEQ ID NO: 1302719 - DNA, 15 bp, Homo sapiens
ttcacttgccactcg

SEQ ID NO: 1302720 - DNA, 15 bp, Homo sapiens
attcacttgccactc

SEQ ID NO: 1302721 - DNA, 15 bp, Homo sapiens
cattcacttgccact

SEQ ID NO: 1302722 - DNA, 15 bp, Homo sapiens
acattcacttgccac

SEQ ID NO: 1302723 - DNA, 15 bp, Homo sapiens
cacattcacttgcca

SEQ ID NO: 1302724 - DNA, 15 bp, Homo sapiens
tcacattcacttgcc

SEQ ID NO: 1302725 - DNA, 15 bp, Homo sapiens
ttcacattcacttgc

SEQ ID NO: 1302726 - DNA, 15 bp, Homo sapiens
cttcacattcacttg

SEQ ID NO: 1302727 - DNA, 15 bp, Homo sapiens
ccttcacattcactt

SEQ ID NO: 1302728 - DNA, 15 bp, Homo sapiens
gccttcacattcact

SEQ ID NO: 1302729 - DNA, 15 bp, Homo sapiens
ggccttcacattcac

SEQ ID NO: 1302730 - DNA, 15 bp, Homo sapiens
aggccttcacattca

SEQ ID NO: 1302731 - DNA, 15 bp, Homo sapiens
taggccttcacattc

SEQ ID NO: 1302732 - DNA, 15 bp, Homo sapiens
gtaggccttcacatt

SEQ ID NO: 1302733 - DNA, 15 bp, Homo sapiens
tgtaggccttcacat

SEQ ID NO: 1302734 - DNA, 15 bp, Homo sapiens
ttgtaggccttcaca

SEQ ID NO: 1302735 - DNA, 15 bp, Homo sapiens
attgtaggccttcac

SEQ ID NO: 1302736 - DNA, 15 bp, Homo sapiens
tattgtaggccttca

SEQ ID NO: 1302737 - DNA, 15 bp, Homo sapiens
atattgtaggccttc

SEQ ID NO: 1302738 - DNA, 15 bp, Homo sapiens
aatattgtaggcctt

SEQ ID NO: 1302739 - DNA, 15 bp, Homo sapiens
taatattgtaggcct

SEQ ID NO: 1302740 - DNA, 15 bp, Homo sapiens
gtaatattgtaggcc

SEQ ID NO: 1302741 - DNA, 15 bp, Homo sapiens
ggtaatattgtaggc

SEQ ID NO: 1302742 - DNA, 15 bp, Homo sapiens
aggtaatattgtagg

SEQ ID NO: 1302743 - DNA, 15 bp, Homo sapiens
taggtaatattgtag

SEQ ID NO: 1302744 - DNA, 15 bp, Homo sapiens
ataggtaatattgta

SEQ ID NO: 1302745 - DNA, 15 bp, Homo sapiens
cataggtaatattgt

SEQ ID NO: 1302746 - DNA, 15 bp, Homo sapiens
tcataggtaatattg

SEQ ID NO: 1302747 - DNA, 15 bp, Homo sapiens
gtcataggtaatatt

SEQ ID NO: 1302748 - DNA, 15 bp, Homo sapiens
tgtcataggtaatat

SEQ ID NO: 1302749 - DNA, 15 bp, Homo sapiens
atgtcataggtaata

SEQ ID NO: 1302750 - DNA, 15 bp, Homo sapiens
catgtcataggtaat

SEQ ID NO: 1302751 - DNA, 15 bp, Homo sapiens
tcatgtcataggtaa

SEQ ID NO: 1302752 - DNA, 15 bp, Homo sapiens
gtcatgtcataggta

SEQ ID NO: 1302753 - DNA, 15 bp, Homo sapiens
agtcatgtcataggt

SEQ ID NO: 1302754 - DNA, 15 bp, Homo sapiens
cagtcatgtcatagg

SEQ ID NO: 1302755 - DNA, 15 bp, Homo sapiens
acagtcatgtcatag

SEQ ID NO: 1302756 - DNA, 15 bp, Homo sapiens
tacagtcatgtcata

SEQ ID NO: 1302757 - DNA, 15 bp, Homo sapiens
gtacagtcatgtcat

SEQ ID NO: 1302758 - DNA, 15 bp, Homo sapiens
tgtacagtcatgtca

SEQ ID NO: 1302759 - DNA, 15 bp, Homo sapiens
gtgtacagtcatgtc

SEQ ID NO: 1302760 - DNA, 15 bp, Homo sapiens
agtgtacagtcatgt

SEQ ID NO: 1302761 - DNA, 15 bp, Homo sapiens
tagtgtacagtcatg

SEQ ID NO: 1302762 - DNA, 15 bp, Homo sapiens
atagtgtacagtcat

SEQ ID NO: 1302763 - DNA, 15 bp, Homo sapiens
gatagtgtacagtca

SEQ ID NO: 1302764 - DNA, 15 bp, Homo sapiens
cgatagtgtacagtc

SEQ ID NO: 1302765 - DNA, 15 bp, Homo sapiens
acgatagtgtacagt

SEQ ID NO: 1302766 - DNA, 15 bp, Homo sapiens
tacgatagtgtacag

SEQ ID NO: 1302767 - DNA, 15 bp, Homo sapiens
ctacgatagtgtaca

SEQ ID NO: 1302768 - DNA, 15 bp, Homo sapiens
tctacgatagtgtac

SEQ ID NO: 1302769 - DNA, 15 bp, Homo sapiens
gtctacgatagtgta

SEQ ID NO: 1302770 - DNA, 15 bp, Homo sapiens
agtctacgatagtgt

SEQ ID NO: 1302771 - DNA, 15 bp, Homo sapiens
aagtctacgatagtg

SEQ ID NO: 1302772 - DNA, 15 bp, Homo sapiens
aaagtctacgatagt

SEQ ID NO: 1302773 - DNA, 15 bp, Homo sapiens
taaagtctacgatag

SEQ ID NO: 1302774 - DNA, 15 bp, Homo sapiens
ataaagtctacgata

SEQ ID NO: 1302775 - DNA, 15 bp, Homo sapiens
tataaagtctacgat

SEQ ID NO: 1302776 - DNA, 15 bp, Homo sapiens
ttataaagtctacga

SEQ ID NO: 1302777 - DNA, 15 bp, Homo sapiens
tttataaagtctacg

SEQ ID NO: 1302778 - DNA, 15 bp, Homo sapiens
atttataaagtctac

SEQ ID NO: 1302779 - DNA, 15 bp, Homo sapiens
tatttataaagtcta

SEQ ID NO: 1302780 - DNA, 15 bp, Homo sapiens
gtatttataaagtct

SEQ ID NO: 1302781 - DNA, 15 bp, Homo sapiens
agtatttataaagtc

SEQ ID NO: 1302782 - DNA, 15 bp, Homo sapiens
tagtatttataaagt

SEQ ID NO: 1302783 - DNA, 15 bp, Homo sapiens
gtagtatttataaag

SEQ ID NO: 1302784 - DNA, 15 bp, Homo sapiens
tgtagtatttataaa

SEQ ID NO: 1302785 - DNA, 15 bp, Homo sapiens
gtgtagtatttataa

SEQ ID NO: 1302786 - DNA, 15 bp, Homo sapiens
agtgtagtatttata

SEQ ID NO: 1302787 - DNA, 15 bp, Homo sapiens
aagtgtagtatttat

SEQ ID NO: 1302788 - DNA, 15 bp, Homo sapiens
taagtgtagtattta

SEQ ID NO: 1302789 - DNA, 15 bp, Homo sapiens
ctaagtgtagtattt

SEQ ID NO: 1302790 - DNA, 15 bp, Homo sapiens
cctaagtgtagtatt

SEQ ID NO: 1302791 - DNA, 15 bp, Homo sapiens
gcctaagtgtagtat

SEQ ID NO: 1302792 - DNA, 15 bp, Homo sapiens
agcctaagtgtagta

SEQ ID NO: 1302793 - DNA, 15 bp, Homo sapiens
tagcctaagtgtagt

SEQ ID NO: 1302794 - DNA, 15 bp, Homo sapiens
ttagcctaagtgtag

SEQ ID NO: 1302795 - DNA, 15 bp, Homo sapiens
tttagcctaagtgta

SEQ ID NO: 1302796 - DNA, 15 bp, Homo sapiens
gtttagcctaagtgt

SEQ ID NO: 1302797 - DNA, 15 bp, Homo sapiens
agtttagcctaagtg

SEQ ID NO: 1302798 - DNA, 15 bp, Homo sapiens
tagtttagcctaagt

SEQ ID NO: 1302799 - DNA, 15 bp, Homo sapiens
ttagtttagcctaag

SEQ ID NO: 1302800 - DNA, 15 bp, Homo sapiens
attagtttagcctaa

SEQ ID NO: 1302801 - DNA, 15 bp, Homo sapiens
aattagtttagccta

SEQ ID NO: 1302802 - DNA, 15 bp, Homo sapiens
aaattagtttagcct

SEQ ID NO: 1302803 - DNA, 15 bp, Homo sapiens
gaaattagtttagcc

SEQ ID NO: 1302804 - DNA, 15 bp, Homo sapiens
tgaaattagtttagc

SEQ ID NO: 1302805 - DNA, 15 bp, Homo sapiens
atgaaattagtttag

SEQ ID NO: 1302806 - DNA, 15 bp, Homo sapiens
tatgaaattagttta

SEQ ID NO: 1302807 - DNA, 15 bp, Homo sapiens
ttatgaaattagttt

SEQ ID NO: 1302808 - DNA, 15 bp, Homo sapiens
tttatgaaattagtt

SEQ ID NO: 1302809 - DNA, 15 bp, Homo sapiens
gtttatgaaattagt

SEQ ID NO: 1302810 - DNA, 15 bp, Homo sapiens
tgtttatgaaattag

SEQ ID NO: 1302811 - DNA, 15 bp, Homo sapiens
atgtttatgaaatta

SEQ ID NO: 1302812 - DNA, 15 bp, Homo sapiens
aatgtttatgaaatt

SEQ ID NO: 1302813 - DNA, 15 bp, Homo sapiens
aaatgtttatgaaat

SEQ ID NO: 1302814 - DNA, 15 bp, Homo sapiens
aaaatgtttatgaaa

SEQ ID NO: 1302815 - DNA, 15 bp, Homo sapiens
aaaaatgtttatgaa

SEQ ID NO: 1302816 - DNA, 15 bp, Homo sapiens
aaaaaatgtttatga

SEQ ID NO: 1302817 - DNA, 15 bp, Homo sapiens
gaaaaaatgtttatg

SEQ ID NO: 1302818 - DNA, 15 bp, Homo sapiens
agaaaaaatgtttat

SEQ ID NO: 1302819 - DNA, 15 bp, Homo sapiens
aagaaaaaatgttta

SEQ ID NO: 1302820 - DNA, 15 bp, Homo sapiens
aaagaaaaaatgttt

SEQ ID NO: 1302821 - DNA, 15 bp, Homo sapiens
gaaagaaaaaatgtt

SEQ ID NO: 1302822 - DNA, 15 bp, Homo sapiens
agaaagaaaaaatgt

SEQ ID NO: 1302823 - DNA, 15 bp, Homo sapiens
aagaaagaaaaaatg

SEQ ID NO: 1302824 - DNA, 15 bp, Homo sapiens
gaagaaagaaaaaat

SEQ ID NO: 1302825 - DNA, 15 bp, Homo sapiens
tgaagaaagaaaaaa

SEQ ID NO: 1302826 - DNA, 15 bp, Homo sapiens
ctgaagaaagaaaaa

SEQ ID NO: 1302827 - DNA, 15 bp, Homo sapiens
actgaagaaagaaaa

SEQ ID NO: 1302828 - DNA, 15 bp, Homo sapiens
tactgaagaaagaaa

SEQ ID NO: 1302829 - DNA, 15 bp, Homo sapiens
ctactgaagaaagaa

SEQ ID NO: 1302830 - DNA, 15 bp, Homo sapiens
actactgaagaaaga

SEQ ID NO: 1302831 - DNA, 15 bp, Homo sapiens
tactactgaagaaag

SEQ ID NO: 1302832 - DNA, 15 bp, Homo sapiens
ttactactgaagaaa

SEQ ID NO: 1302833 - DNA, 15 bp, Homo sapiens
tttactactgaagaa

SEQ ID NO: 1302834 - DNA, 15 bp, Homo sapiens
atttactactgaaga

SEQ ID NO: 1302835 - DNA, 15 bp, Homo sapiens
aatttactactgaag

SEQ ID NO: 1302836 - DNA, 15 bp, Homo sapiens
taatttactactgaa

SEQ ID NO: 1302837 - DNA, 15 bp, Homo sapiens
ttaatttactactga

SEQ ID NO: 1302838 - DNA, 15 bp, Homo sapiens
gttaatttactactg

SEQ ID NO: 1302839 - DNA, 15 bp, Homo sapiens
ggttaatttactact

SEQ ID NO: 1302840 - DNA, 15 bp, Homo sapiens
tggttaatttactac

SEQ ID NO: 1302841 - DNA, 15 bp, Homo sapiens
atggttaatttacta

SEQ ID NO: 1302842 - DNA, 15 bp, Homo sapiens
tatggttaatttact

SEQ ID NO: 1302843 - DNA, 15 bp, Homo sapiens
ctatggttaatttac

SEQ ID NO: 1302844 - DNA, 15 bp, Homo sapiens
gctatggttaattta

SEQ ID NO: 1302845 - DNA, 15 bp, Homo sapiens
agctatggttaattt

SEQ ID NO: 1302846 - DNA, 15 bp, Homo sapiens
gagctatggttaatt

SEQ ID NO: 1302847 - DNA, 15 bp, Homo sapiens
tgagctatggttaat

SEQ ID NO: 1302848 - DNA, 15 bp, Homo sapiens
gtgagctatggttaa

SEQ ID NO: 1302849 - DNA, 15 bp, Homo sapiens
agtgagctatggtta

SEQ ID NO: 1302850 - DNA, 15 bp, Homo sapiens
acagtgagctatggt

SEQ ID NO: 1302851 - DNA, 15 bp, Homo sapiens
tacagtgagctatgg

SEQ ID NO: 1302852 - DNA, 15 bp, Homo sapiens
ttacagtgagctatg

SEQ ID NO: 1302853 - DNA, 15 bp, Homo sapiens
gttacagtgagctat

SEQ ID NO: 1302854 - DNA, 15 bp, Homo sapiens
agttacagtgagcta

SEQ ID NO: 1302855 - DNA, 15 bp, Homo sapiens
aagttacagtgagct

SEQ ID NO: 1302856 - DNA, 15 bp, Homo sapiens
aaagttacagtgagc

SEQ ID NO: 1302857 - DNA, 15 bp, Homo sapiens
aaaagttacagtgag

SEQ ID NO: 1302858 - DNA, 15 bp, Homo sapiens
aaaaagttacagtga

SEQ ID NO: 1302859 - DNA, 15 bp, Homo sapiens
aaaaaagttacagtg

SEQ ID NO: 1302860 - DNA, 15 bp, Homo sapiens
taaaaaagttacagt

SEQ ID NO: 1302861 - DNA, 15 bp, Homo sapiens
gtaaaaaagttacag

SEQ ID NO: 1302862 - DNA, 15 bp, Homo sapiens
agtaaaaaagttaca

SEQ ID NO: 1302863 - DNA, 15 bp, Homo sapiens
aagtaaaaaagttac

SEQ ID NO: 1302864 - DNA, 15 bp, Homo sapiens
aaagtaaaaaagtta

SEQ ID NO: 1302865 - DNA, 15 bp, Homo sapiens
taaagtaaaaaagtt

SEQ ID NO: 1302866 - DNA, 15 bp, Homo sapiens
ataaagtaaaaaagt

SEQ ID NO: 1302867 - DNA, 15 bp, Homo sapiens
tataaagtaaaaaag

SEQ ID NO: 1302868 - DNA, 15 bp, Homo sapiens
ttataaagtaaaaaa

SEQ ID NO: 1302869 - DNA, 15 bp, Homo sapiens
tttataaagtaaaaa

SEQ ID NO: 1302870 - DNA, 15 bp, Homo sapiens
atttataaagtaaaa

SEQ ID NO: 1302871 - DNA, 15 bp, Homo sapiens
gatttataaagtaaa

SEQ ID NO: 1302872 - DNA, 15 bp, Homo sapiens
agatttataaagtaa

SEQ ID NO: 1302873 - DNA, 15 bp, Homo sapiens
aagatttataaagta

SEQ ID NO: 1302874 - DNA, 15 bp, Homo sapiens
gaagatttataaagt

SEQ ID NO: 1302875 - DNA, 15 bp, Homo sapiens
tgaagatttataaag

SEQ ID NO: 1302876 - DNA, 15 bp, Homo sapiens
ctgaagatttataaa

SEQ ID NO: 1302877 - DNA, 15 bp, Homo sapiens
aactgaagatttata

SEQ ID NO: 1302878 - DNA, 15 bp, Homo sapiens
aaactgaagatttat

SEQ ID NO: 1302879 - DNA, 15 bp, Homo sapiens
caaactgaagattta

SEQ ID NO: 1302880 - DNA, 15 bp, Homo sapiens
acaaactgaagattt

SEQ ID NO: 1302881 - DNA, 15 bp, Homo sapiens
tacaaactgaagatt

SEQ ID NO: 1302882 - DNA, 15 bp, Homo sapiens
ttacaaactgaagat

SEQ ID NO: 1302883 - DNA, 15 bp, Homo sapiens
cttacaaactgaaga

SEQ ID NO: 1302884 - DNA, 15 bp, Homo sapiens
tcttacaaactgaag

SEQ ID NO: 1302885 - DNA, 15 bp, Homo sapiens
ttcttacaaactgaa

SEQ ID NO: 1302886 - DNA, 15 bp, Homo sapiens
tttcttacaaactga

SEQ ID NO: 1302887 - DNA, 15 bp, Homo sapiens
gtttcttacaaactg

SEQ ID NO: 1302888 - DNA, 15 bp, Homo sapiens
agtttcttacaaact

SEQ ID NO: 1302889 - DNA, 15 bp, Homo sapiens
aagtttcttacaaac

SEQ ID NO: 1302890 - DNA, 15 bp, Homo sapiens
aaagtttcttacaaa

SEQ ID NO: 1302891 - DNA, 15 bp, Homo sapiens
aaaagtttcttacaa

SEQ ID NO: 1302892 - DNA, 15 bp, Homo sapiens
caaaagtttcttaca

SEQ ID NO: 1302893 - DNA, 15 bp, Homo sapiens
tcaaaagtttcttac

SEQ ID NO: 1302894 - DNA, 15 bp, Homo sapiens
gtcaaaagtttctta

SEQ ID NO: 1302895 - DNA, 15 bp, Homo sapiens
agtcaaaagtttctt

SEQ ID NO: 1302896 - DNA, 15 bp, Homo sapiens
gagtcaaaagtttct

SEQ ID NO: 1302897 - DNA, 15 bp, Homo sapiens
agagtcaaaagtttc

SEQ ID NO: 1302898 - DNA, 15 bp, Homo sapiens
aagagtcaaaagttt

SEQ ID NO: 1302899 - DNA, 15 bp, Homo sapiens
taagagtcaaaagtt

SEQ ID NO: 1302900 - DNA, 15 bp, Homo sapiens
ataagagtcaaaagt

SEQ ID NO: 1302901 - DNA, 15 bp, Homo sapiens
tataagagtcaaaag

SEQ ID NO: 1302902 - DNA, 15 bp, Homo sapiens
ttataagagtcaaaa

SEQ ID NO: 1302903 - DNA, 15 bp, Homo sapiens
gttataagagtcaaa

SEQ ID NO: 1302904 - DNA, 15 bp, Homo sapiens
tgttataagagtcaa

SEQ ID NO: 1302905 - DNA, 15 bp, Homo sapiens
gtgttataagagtca

SEQ ID NO: 1302906 - DNA, 15 bp, Homo sapiens
agtgttataagagtc

SEQ ID NO: 1302907 - DNA, 15 bp, Homo sapiens
aagtgttataagagt

SEQ ID NO: 1302908 - DNA, 15 bp, Homo sapiens
taagtgttataagag

SEQ ID NO: 1302909 - DNA, 15 bp, Homo sapiens
ctaagtgttataaga

SEQ ID NO: 1302910 - DNA, 15 bp, Homo sapiens
gctaagtgttataag

SEQ ID NO: 1302911 - DNA, 15 bp, Homo sapiens
agctaagtgttataa

SEQ ID NO: 1302912 - DNA, 15 bp, Homo sapiens
aagctaagtgttata

SEQ ID NO: 1302913 - DNA, 15 bp, Homo sapiens
taagctaagtgttat

SEQ ID NO: 1302914 - DNA, 15 bp, Homo sapiens
ttaagctaagtgtta

SEQ ID NO: 1302915 - DNA, 15 bp, Homo sapiens
tttaagctaagtgtt

SEQ ID NO: 1302916 - DNA, 15 bp, Homo sapiens
ttttaagctaagtgt

SEQ ID NO: 1302917 - DNA, 15 bp, Homo sapiens
gttttaagctaagtg

SEQ ID NO: 1302918 - DNA, 15 bp, Homo sapiens
tgttttaagctaagt

SEQ ID NO: 1302919 - DNA, 15 bp, Homo sapiens
gtgttttaagctaag

SEQ ID NO: 1302920 - DNA, 15 bp, Homo sapiens
tgtgttttaagctaa

SEQ ID NO: 1302921 - DNA, 15 bp, Homo sapiens
ttgtgttttaagcta

SEQ ID NO: 1302922 - DNA, 15 bp, Homo sapiens
tttgtgttttaagct

SEQ ID NO: 1302923 - DNA, 15 bp, Homo sapiens
gtttgtgttttaagc

SEQ ID NO: 1302924 - DNA, 15 bp, Homo sapiens
tgtttgtgttttaag

SEQ ID NO: 1302925 - DNA, 15 bp, Homo sapiens
gtgtttgtgttttaa

SEQ ID NO: 1302926 - DNA, 15 bp, Homo sapiens
ggtgtttgtgtttta

SEQ ID NO: 1302927 - DNA, 15 bp, Homo sapiens
aggtgtttgtgtttt

SEQ ID NO: 1302928 - DNA, 15 bp, Homo sapiens
aaggtgtttgtgttt

SEQ ID NO: 1302929 - DNA, 15 bp, Homo sapiens
taaggtgtttgtgtt

SEQ ID NO: 1302930 - DNA, 15 bp, Homo sapiens
ataaggtgtttgtgt

SEQ ID NO: 1302931 - DNA, 15 bp, Homo sapiens
tataaggtgtttgtg

SEQ ID NO: 1302932 - DNA, 15 bp, Homo sapiens
gtataaggtgtttgt

SEQ ID NO: 1302933 - DNA, 15 bp, Homo sapiens
tgtataaggtgtttg

SEQ ID NO: 1302934 - DNA, 15 bp, Homo sapiens
ctgtataaggtgttt

SEQ ID NO: 1302935 - DNA, 15 bp, Homo sapiens
gctgtataaggtgtt

SEQ ID NO: 1302936 - DNA, 15 bp, Homo sapiens
agctgtataaggtgt

SEQ ID NO: 1302937 - DNA, 15 bp, Homo sapiens
cagctgtataaggtg

SEQ ID NO: 1302938 - DNA, 15 bp, Homo sapiens
acagctgtataaggt

SEQ ID NO: 1302939 - DNA, 15 bp, Homo sapiens
tacagctgtataagg

SEQ ID NO: 1302940 - DNA, 15 bp, Homo sapiens
gtacagctgtataag

SEQ ID NO: 1302941 - DNA, 15 bp, Homo sapiens
tgtacagctgtataa

SEQ ID NO: 1302942 - DNA, 15 bp, Homo sapiens
ttgtacagctgtata

SEQ ID NO: 1302943 - DNA, 15 bp, Homo sapiens
tttgtacagctgtat

SEQ ID NO: 1302944 - DNA, 15 bp, Homo sapiens
ttttgtacagctgta

SEQ ID NO: 1302945 - DNA, 15 bp, Homo sapiens
tttttgtacagctgt

SEQ ID NO: 1302946 - DNA, 15 bp, Homo sapiens
atttttgtacagctg

SEQ ID NO: 1302947 - DNA, 15 bp, Homo sapiens
tatttttgtacagct

SEQ ID NO: 1302948 - DNA, 15 bp, Homo sapiens
atatttttgtacagc

SEQ ID NO: 1302949 - DNA, 15 bp, Homo sapiens
aatatttttgtacag

SEQ ID NO: 1302950 - DNA, 15 bp, Homo sapiens
aaatatttttgtaca

SEQ ID NO: 1302951 - DNA, 15 bp, Homo sapiens
aaaatatttttgtac

SEQ ID NO: 1302952 - DNA, 15 bp, Homo sapiens
gaaaatatttttgta

SEQ ID NO: 1302953 - DNA, 15 bp, Homo sapiens
agaaaatatttttgt

SEQ ID NO: 1302954 - DNA, 15 bp, Homo sapiens
aagaaaatatttttg

SEQ ID NO: 1302955 - DNA, 15 bp, Homo sapiens
aaagaaaatattttt

SEQ ID NO: 1302956 - DNA, 15 bp, Homo sapiens
gaaagaaaatatttt

SEQ ID NO: 1302957 - DNA, 15 bp, Homo sapiens
agaaagaaaatattt

SEQ ID NO: 1302958 - DNA, 15 bp, Homo sapiens
aagaaagaaaatatt

SEQ ID NO: 1302959 - DNA, 15 bp, Homo sapiens
aaagaaagaaaatat

SEQ ID NO: 1302960 - DNA, 15 bp, Homo sapiens
taaagaaagaaaata

SEQ ID NO: 1302961 - DNA, 15 bp, Homo sapiens
ataaagaaagaaaat

SEQ ID NO: 1302962 - DNA, 15 bp, Homo sapiens
tataaagaaagaaaa

SEQ ID NO: 1302963 - DNA, 15 bp, Homo sapiens
ttataaagaaagaaa

SEQ ID NO: 1302964 - DNA, 15 bp, Homo sapiens
attataaagaaagaa

SEQ ID NO: 1302965 - DNA, 15 bp, Homo sapiens
gattataaagaaaga

SEQ ID NO: 1302966 - DNA, 15 bp, Homo sapiens
ggattataaagaaag

SEQ ID NO: 1302967 - DNA, 15 bp, Homo sapiens
aggattataaagaaa

SEQ ID NO: 1302968 - DNA, 15 bp, Homo sapiens
aaggattataaagaa

SEQ ID NO: 1302969 - DNA, 15 bp, Homo sapiens
taaggattataaaga

SEQ ID NO: 1302970 - DNA, 15 bp, Homo sapiens
ataaggattataaag

SEQ ID NO: 1302971 - DNA, 15 bp, Homo sapiens
aataaggattataaa

SEQ ID NO: 1302972 - DNA, 15 bp, Homo sapiens
gaataaggattataa

SEQ ID NO: 1302973 - DNA, 15 bp, Homo sapiens
agaataaggattata

SEQ ID NO: 1302974 - DNA, 15 bp, Homo sapiens
cagaataaggattat

SEQ ID NO: 1302975 - DNA, 15 bp, Homo sapiens
acagaataaggatta

SEQ ID NO: 1302976 - DNA, 15 bp, Homo sapiens
tacagaataaggatt

SEQ ID NO: 1302977 - DNA, 15 bp, Homo sapiens
gtacagaataaggat

SEQ ID NO: 1302978 - DNA, 15 bp, Homo sapiens
tgtacagaataagga

SEQ ID NO: 1302979 - DNA, 15 bp, Homo sapiens
gtgtacagaataagg

SEQ ID NO: 1302980 - DNA, 15 bp, Homo sapiens
agtgtacagaataag

SEQ ID NO: 1302981 - DNA, 15 bp, Homo sapiens
aagtgtacagaataa

SEQ ID NO: 1302982 - DNA, 15 bp, Homo sapiens
aaagtgtacagaata

SEQ ID NO: 1302983 - DNA, 15 bp, Homo sapiens
aaaagtgtacagaat

SEQ ID NO: 1302984 - DNA, 15 bp, Homo sapiens
aaaaagtgtacagaa

SEQ ID NO: 1302985 - DNA, 15 bp, Homo sapiens
aaaaaagtgtacaga

SEQ ID NO: 1302986 - DNA, 15 bp, Homo sapiens
gaaaaaagtgtacag

SEQ ID NO: 1302987 - DNA, 15 bp, Homo sapiens
agaaaaaagtgtaca

SEQ ID NO: 1302988 - DNA, 15 bp, Homo sapiens
tagaaaaaagtgtac

SEQ ID NO: 1302989 - DNA, 15 bp, Homo sapiens
atagaaaaaagtgta

SEQ ID NO: 1302990 - DNA, 15 bp, Homo sapiens
aatagaaaaaagtgt

SEQ ID NO: 1302991 - DNA, 15 bp, Homo sapiens
aaatagaaaaaagtg

SEQ ID NO: 1302992 - DNA, 15 bp, Homo sapiens
taaatagaaaaaagt

SEQ ID NO: 1302993 - DNA, 15 bp, Homo sapiens
ttaaatagaaaaaag

SEQ ID NO: 1302994 - DNA, 15 bp, Homo sapiens
tttaaatagaaaaaa

SEQ ID NO: 1302995 - DNA, 15 bp, Homo sapiens
ttttaaatagaaaaa

SEQ ID NO: 1302996 - DNA, 15 bp, Homo sapiens
tttttaaatagaaaa

SEQ ID NO: 1302997 - DNA, 15 bp, Homo sapiens
atttttaaatagaaa

SEQ ID NO: 1302998 - DNA, 15 bp, Homo sapiens
aatttttaaatagaa

SEQ ID NO: 1302999 - DNA, 15 bp, Homo sapiens
aaatttttaaataga

SEQ ID NO: 1303000 - DNA, 15 bp, Homo sapiens
aaaatttttaaatag

SEQ ID NO: 1303001 - DNA, 15 bp, Homo sapiens
aaaaatttttaaata

SEQ ID NO: 1303002 - DNA, 15 bp, Homo sapiens
gaaaaaatttttaaa

SEQ ID NO: 1303003 - DNA, 15 bp, Homo sapiens
tgaaaaaatttttaa

SEQ ID NO: 1303004 - DNA, 15 bp, Homo sapiens
ttgaaaaaattttta

SEQ ID NO: 1303005 - DNA, 15 bp, Homo sapiens
attgaaaaaattttt

SEQ ID NO: 1303006 - DNA, 15 bp, Homo sapiens
aattgaaaaaatttt

SEQ ID NO: 1303007 - DNA, 15 bp, Homo sapiens
aaattgaaaaaattt

SEQ ID NO: 1303008 - DNA, 15 bp, Homo sapiens
gaaattgaaaaaatt

SEQ ID NO: 1303009 - DNA, 15 bp, Homo sapiens
tgaaattgaaaaaat

SEQ ID NO: 1303010 - DNA, 15 bp, Homo sapiens
atgaaattgaaaaaa

SEQ ID NO: 1303011 - DNA, 15 bp, Homo sapiens
tatgaaattgaaaaa

SEQ ID NO: 1303012 - DNA, 15 bp, Homo sapiens
ttatgaaattgaaaa

SEQ ID NO: 1303013 - DNA, 15 bp, Homo sapiens
tttatgaaattgaaa

SEQ ID NO: 1303014 - DNA, 15 bp, Homo sapiens
ctttatgaaattgaa

SEQ ID NO: 1303015 - DNA, 15 bp, Homo sapiens
tctttatgaaattga

SEQ ID NO: 1303016 - DNA, 15 bp, Homo sapiens
atctttatgaaattg

SEQ ID NO: 1303017 - DNA, 15 bp, Homo sapiens
aatctttatgaaatt

SEQ ID NO: 1303018 - DNA, 15 bp, Homo sapiens
aaatctttatgaaat

SEQ ID NO: 1303019 - DNA, 15 bp, Homo sapiens
aaaatctttatgaaa

SEQ ID NO: 1303020 - DNA, 15 bp, Homo sapiens
aaaaatctttatgaa

SEQ ID NO: 1303021 - DNA, 15 bp, Homo sapiens
caaaaatctttatga

SEQ ID NO: 1303022 - DNA, 15 bp, Homo sapiens
gcaaaaatctttatg

SEQ ID NO: 1303023 - DNA, 15 bp, Homo sapiens
ggcaaaaatctttat

SEQ ID NO: 1303024 - DNA, 15 bp, Homo sapiens
tggcaaaaatcttta

SEQ ID NO: 1303025 - DNA, 15 bp, Homo sapiens
ttggcaaaaatcttt

SEQ ID NO: 1303026 - DNA, 15 bp, Homo sapiens
tttggcaaaaatctt

SEQ ID NO: 1303027 - DNA, 15 bp, Homo sapiens
ttttggcaaaaatct

SEQ ID NO: 1303028 - DNA, 15 bp, Homo sapiens
tttttggcaaaaatc

SEQ ID NO: 1303029 - DNA, 15 bp, Homo sapiens
gtttttggcaaaaat

SEQ ID NO: 1303030 - DNA, 15 bp, Homo sapiens
tgtttttggcaaaaa

SEQ ID NO: 1303031 - DNA, 15 bp, Homo sapiens
ttgtttttggcaaaa

SEQ ID NO: 1303032 - DNA, 15 bp, Homo sapiens
tttgtttttggcaaa

SEQ ID NO: 1303033 - DNA, 15 bp, Homo sapiens
ctttgtttttggcaa

SEQ ID NO: 1303034 - DNA, 15 bp, Homo sapiens
cctttgtttttggca

SEQ ID NO: 1303035 - DNA, 15 bp, Homo sapiens
gcctttgtttttggc

SEQ ID NO: 1303036 - DNA, 15 bp, Homo sapiens
tgcctttgtttttgg

SEQ ID NO: 1303037 - DNA, 15 bp, Homo sapiens
ttgcctttgtttttg

SEQ ID NO: 1303038 - DNA, 15 bp, Homo sapiens
tttgcctttgttttt

SEQ ID NO: 1303039 - DNA, 15 bp, Homo sapiens
gtttgcctttgtttt

SEQ ID NO: 1303040 - DNA, 15 bp, Homo sapiens
tgtttgcctttgttt

SEQ ID NO: 1303041 - DNA, 15 bp, Homo sapiens
gtgtttgcctttgtt

SEQ ID NO: 1303042 - DNA, 15 bp, Homo sapiens
tgtgtttgcctttgt

SEQ ID NO: 1303043 - DNA, 15 bp, Homo sapiens
gtgtgtttgcctttg

SEQ ID NO: 1303044 - DNA, 15 bp, Homo sapiens
tgtgtgtttgccttt

SEQ ID NO: 1303045 - DNA, 15 bp, Homo sapiens
gtgtgtgtttgcctt

SEQ ID NO: 1303046 - DNA, 15 bp, Homo sapiens
tgtgtgtgtttgcct

SEQ ID NO: 1303047 - DNA, 15 bp, Homo sapiens
atgtgtgtgtttgcc

SEQ ID NO: 1303048 - DNA, 15 bp, Homo sapiens
aatgtgtgtgtttgc

SEQ ID NO: 1303049 - DNA, 15 bp, Homo sapiens
taatgtgtgtgtttg

SEQ ID NO: 1303050 - DNA, 15 bp, Homo sapiens
ctaatgtgtgtgttt

SEQ ID NO: 1303051 - DNA, 15 bp, Homo sapiens
gctaatgtgtgtgtt

SEQ ID NO: 1303052 - DNA, 15 bp, Homo sapiens
ggctaatgtgtgtgt

SEQ ID NO: 1303053 - DNA, 15 bp, Homo sapiens
aggctaatgtgtgtg

SEQ ID NO: 1303054 - DNA, 15 bp, Homo sapiens
taggctaatgtgtgt

SEQ ID NO: 1303055 - DNA, 15 bp, Homo sapiens
ctaggctaatgtgtg

SEQ ID NO: 1303056 - DNA, 15 bp, Homo sapiens
cctaggctaatgtgt

SEQ ID NO: 1303057 - DNA, 15 bp, Homo sapiens
gcctaggctaatgtg

SEQ ID NO: 1303058 - DNA, 15 bp, Homo sapiens
ggcctaggctaatgt

SEQ ID NO: 1303059 - DNA, 15 bp, Homo sapiens
aggcctaggctaatg

SEQ ID NO: 1303060 - DNA, 15 bp, Homo sapiens
taggcctaggctaat

SEQ ID NO: 1303061 - DNA, 15 bp, Homo sapiens
gtaggcctaggctaa

SEQ ID NO: 1303062 - DNA, 15 bp, Homo sapiens
tgtaggcctaggcta

SEQ ID NO: 1303063 - DNA, 15 bp, Homo sapiens
gtgtaggcctaggct

SEQ ID NO: 1303064 - DNA, 15 bp, Homo sapiens
tgtgtaggcctaggc

SEQ ID NO: 1303065 - DNA, 15 bp, Homo sapiens
ctgtgtaggcctagg

SEQ ID NO: 1303066 - DNA, 15 bp, Homo sapiens
cctgtgtaggcctag

SEQ ID NO: 1303067 - DNA, 15 bp, Homo sapiens
tcctgtgtaggccta

SEQ ID NO: 1303068 - DNA, 15 bp, Homo sapiens
atcctgtgtaggcct

SEQ ID NO: 1303069 - DNA, 15 bp, Homo sapiens
gatcctgtgtaggcc

SEQ ID NO: 1303070 - DNA, 15 bp, Homo sapiens
tgatcctgtgtaggc

SEQ ID NO: 1303071 - DNA, 15 bp, Homo sapiens
ctgatcctgtgtagg

SEQ ID NO: 1303072 - DNA, 15 bp, Homo sapiens
cctgatcctgtgtag

SEQ ID NO: 1303073 - DNA, 15 bp, Homo sapiens
tcctgatcctgtgta

SEQ ID NO: 1303074 - DNA, 15 bp, Homo sapiens
atcctgatcctgtgt

SEQ ID NO: 1303075 - DNA, 15 bp, Homo sapiens
aatcctgatcctgtg

SEQ ID NO: 1303076 - DNA, 15 bp, Homo sapiens
taatcctgatcctgt

SEQ ID NO: 1303077 - DNA, 15 bp, Homo sapiens
ttaatcctgatcctg

SEQ ID NO: 1303078 - DNA, 15 bp, Homo sapiens
gttaatcctgatcct

SEQ ID NO: 1303079 - DNA, 15 bp, Homo sapiens
tgttaatcctgatcc

SEQ ID NO: 1303080 - DNA, 15 bp, Homo sapiens
ttgttaatcctgatc

SEQ ID NO: 1303081 - DNA, 15 bp, Homo sapiens
attgttaatcctgat

SEQ ID NO: 1303082 - DNA, 15 bp, Homo sapiens
tattgttaatcctga

SEQ ID NO: 1303083 - DNA, 15 bp, Homo sapiens
gtattgttaatcctg

SEQ ID NO: 1303084 - DNA, 15 bp, Homo sapiens
ggtattgttaatcct

SEQ ID NO: 1303085 - DNA, 15 bp, Homo sapiens
tggtattgttaatcc

SEQ ID NO: 1303086 - DNA, 15 bp, Homo sapiens
gtggtattgttaatc

SEQ ID NO: 1303087 - DNA, 15 bp, Homo sapiens
agtggtattgttaat

SEQ ID NO: 1303088 - DNA, 15 bp, Homo sapiens
cagtggtattgttaa

SEQ ID NO: 1303089 - DNA, 15 bp, Homo sapiens
acagtggtattgtta

SEQ ID NO: 1303090 - DNA, 15 bp, Homo sapiens
gacagtggtattgtt

SEQ ID NO: 1303091 - DNA, 15 bp, Homo sapiens
agacagtggtattgt

SEQ ID NO: 1303092 - DNA, 15 bp, Homo sapiens
aagacagtggtattg

SEQ ID NO: 1303093 - DNA, 15 bp, Homo sapiens
gaagacagtggtatt

SEQ ID NO: 1303094 - DNA, 15 bp, Homo sapiens
agaagacagtggtat

SEQ ID NO: 1303095 - DNA, 15 bp, Homo sapiens
cagaagacagtggta

SEQ ID NO: 1303096 - DNA, 15 bp, Homo sapiens
gcagaagacagtggt

SEQ ID NO: 1303097 - DNA, 15 bp, Homo sapiens
ggcagaagacagtgg

SEQ ID NO: 1303098 - DNA, 15 bp, Homo sapiens
aggcagaagacagtg

SEQ ID NO: 1303099 - DNA, 15 bp, Homo sapiens
gaggcagaagacagt

SEQ ID NO: 1303100 - DNA, 15 bp, Homo sapiens
ggaggcagaagacag

SEQ ID NO: 1303101 - DNA, 15 bp, Homo sapiens
tggaggcagaagaca

SEQ ID NO: 1303102 - DNA, 15 bp, Homo sapiens
ttggaggcagaagac

SEQ ID NO: 1303103 - DNA, 15 bp, Homo sapiens
tttggaggcagaaga

SEQ ID NO: 1303104 - DNA, 15 bp, Homo sapiens
atttggaggcagaag

SEQ ID NO: 1303105 - DNA, 15 bp, Homo sapiens
aatttggaggcagaa

SEQ ID NO: 1303106 - DNA, 15 bp, Homo sapiens
gaatttggaggcaga

SEQ ID NO: 1303107 - DNA, 15 bp, Homo sapiens
agaatttggaggcag

SEQ ID NO: 1303108 - DNA, 15 bp, Homo sapiens
cagaatttggaggca

SEQ ID NO: 1303109 - DNA, 15 bp, Homo sapiens
acagaatttggaggc

SEQ ID NO: 1303110 - DNA, 15 bp, Homo sapiens
gacagaatttggagg

SEQ ID NO: 1303111 - DNA, 15 bp, Homo sapiens
ggacagaatttggag

SEQ ID NO: 1303112 - DNA, 15 bp, Homo sapiens
gggacagaatttgga

SEQ ID NO: 1303113 - DNA, 15 bp, Homo sapiens
tgggacagaatttgg

SEQ ID NO: 1303114 - DNA, 15 bp, Homo sapiens
ttgggacagaatttg

SEQ ID NO: 1303115 - DNA, 15 bp, Homo sapiens
cttgggacagaattt

SEQ ID NO: 1303116 - DNA, 15 bp, Homo sapiens
acttgggacagaatt

SEQ ID NO: 1303117 - DNA, 15 bp, Homo sapiens
gacttgggacagaat

SEQ ID NO: 1303118 - DNA, 15 bp, Homo sapiens
agacttgggacagaa

SEQ ID NO: 1303119 - DNA, 15 bp, Homo sapiens
aagacttgggacaga

SEQ ID NO: 1303120 - DNA, 15 bp, Homo sapiens
gaagacttgggacag

SEQ ID NO: 1303121 - DNA, 15 bp, Homo sapiens
tgaagacttgggaca

SEQ ID NO: 1303122 - DNA, 15 bp, Homo sapiens
ctgaagacttgggac

SEQ ID NO: 1303123 - DNA, 15 bp, Homo sapiens
cctgaagacttggga

SEQ ID NO: 1303124 - DNA, 15 bp, Homo sapiens
ccctgaagacttggg

SEQ ID NO: 1303125 - DNA, 15 bp, Homo sapiens
tccctgaagacttgg

SEQ ID NO: 1303126 - DNA, 15 bp, Homo sapiens
gtccctgaagacttg

SEQ ID NO: 1303127 - DNA, 15 bp, Homo sapiens
tgtccctgaagactt

SEQ ID NO: 1303128 - DNA, 15 bp, Homo sapiens
ttgtccctgaagact

SEQ ID NO: 1303129 - DNA, 15 bp, Homo sapiens
attgtccctgaagac

SEQ ID NO: 1303130 - DNA, 15 bp, Homo sapiens
tattgtccctgaaga

SEQ ID NO: 1303131 - DNA, 15 bp, Homo sapiens
ttattgtccctgaag

SEQ ID NO: 1303132 - DNA, 15 bp, Homo sapiens
tttattgtccctgaa

SEQ ID NO: 1303133 - DNA, 15 bp, Homo sapiens
ttttattgtccctga

SEQ ID NO: 1303134 - DNA, 15 bp, Homo sapiens
attttattgtccctg

SEQ ID NO: 1303135 - DNA, 15 bp, Homo sapiens
cattttattgtccct

SEQ ID NO: 1303136 - DNA, 15 bp, Homo sapiens
gcattttattgtccc

SEQ ID NO: 1303137 - DNA, 15 bp, Homo sapiens
tgcattttattgtcc

SEQ ID NO: 1303138 - DNA, 15 bp, Homo sapiens
atgcattttattgtc

SEQ ID NO: 1303139 - DNA, 15 bp, Homo sapiens
tatgcattttattgt

SEQ ID NO: 1303140 - DNA, 15 bp, Homo sapiens
ctatgcattttattg

SEQ ID NO: 1303141 - DNA, 15 bp, Homo sapiens
tctatgcattttatt

SEQ ID NO: 1303142 - DNA, 15 bp, Homo sapiens
ctctatgcattttat

SEQ ID NO: 1303143 - DNA, 15 bp, Homo sapiens
gctctatgcatttta

SEQ ID NO: 1303144 - DNA, 15 bp, Homo sapiens
agctctatgcatttt

SEQ ID NO: 1303145 - DNA, 15 bp, Homo sapiens
cagctctatgcattt

SEQ ID NO: 1303146 - DNA, 15 bp, Homo sapiens
acagctctatgcatt

SEQ ID NO: 1303147 - DNA, 15 bp, Homo sapiens
gacagctctatgcat

SEQ ID NO: 1303148 - DNA, 15 bp, Homo sapiens
tgacagctctatgca

SEQ ID NO: 1303149 - DNA, 15 bp, Homo sapiens
ttgacagctctatgc

SEQ ID NO: 1303150 - DNA, 15 bp, Homo sapiens
gttgacagctctatg

SEQ ID NO: 1303151 - DNA, 15 bp, Homo sapiens
agttgacagctctat

SEQ ID NO: 1303152 - DNA, 15 bp, Homo sapiens
gagttgacagctcta

SEQ ID NO: 1303153 - DNA, 15 bp, Homo sapiens
ggagttgacagctct

SEQ ID NO: 1303154 - DNA, 15 bp, Homo sapiens
aggagttgacagctc

SEQ ID NO: 1303155 - DNA, 15 bp, Homo sapiens
taggagttgacagct

SEQ ID NO: 1303156 - DNA, 15 bp, Homo sapiens
ataggagttgacagc

SEQ ID NO: 1303157 - DNA, 15 bp, Homo sapiens
cataggagttgacag

SEQ ID NO: 1303158 - DNA, 15 bp, Homo sapiens
tcataggagttgaca

SEQ ID NO: 1303159 - DNA, 15 bp, Homo sapiens
atcataggagttgac

SEQ ID NO: 1303160 - DNA, 15 bp, Homo sapiens
catcataggagttga

SEQ ID NO: 1303161 - DNA, 15 bp, Homo sapiens
tcatcataggagttg

SEQ ID NO: 1303162 - DNA, 15 bp, Homo sapiens
atcatcataggagtt

SEQ ID NO: 1303163 - DNA, 15 bp, Homo sapiens
catcatcataggagt

SEQ ID NO: 1303164 - DNA, 15 bp, Homo sapiens
tcatcatcataggag

SEQ ID NO: 1303165 - DNA, 15 bp, Homo sapiens
atcatcatcatagga

SEQ ID NO: 1303166 - DNA, 15 bp, Homo sapiens
catcatcatcatagg

SEQ ID NO: 1303167 - DNA, 15 bp, Homo sapiens
gcatcatcatcatag

SEQ ID NO: 1303168 - DNA, 15 bp, Homo sapiens
agcatcatcatcata

SEQ ID NO: 1303169 - DNA, 15 bp, Homo sapiens
tagcatcatcatcat

SEQ ID NO: 1303170 - DNA, 15 bp, Homo sapiens
atagcatcatcatca

SEQ ID NO: 1303171 - DNA, 15 bp, Homo sapiens
gatagcatcatcatc

SEQ ID NO: 1303172 - DNA, 15 bp, Homo sapiens
agatagcatcatcat

SEQ ID NO: 1303173 - DNA, 15 bp, Homo sapiens
aagatagcatcatca

SEQ ID NO: 1303174 - DNA, 15 bp, Homo sapiens
gaagatagcatcatc

SEQ ID NO: 1303175 - DNA, 15 bp, Homo sapiens
agaagatagcatcat

SEQ ID NO: 1303176 - DNA, 15 bp, Homo sapiens
cagaagatagcatca

SEQ ID NO: 1303177 - DNA, 15 bp, Homo sapiens
ccagaagatagcatc

SEQ ID NO: 1303178 - DNA, 15 bp, Homo sapiens
tccagaagatagcat

SEQ ID NO: 1303179 - DNA, 15 bp, Homo sapiens
ttccagaagatagca

SEQ ID NO: 1303180 - DNA, 15 bp, Homo sapiens
attccagaagatagc

SEQ ID NO: 1303181 - DNA, 15 bp, Homo sapiens
tattccagaagatag

SEQ ID NO: 1303182 - DNA, 15 bp, Homo sapiens
atattccagaagata

SEQ ID NO: 1303183 - DNA, 15 bp, Homo sapiens
gatattccagaagat

SEQ ID NO: 1303184 - DNA, 15 bp, Homo sapiens
agatattccagaaga

SEQ ID NO: 1303185 - DNA, 15 bp, Homo sapiens
gagatattccagaag

SEQ ID NO: 1303186 - DNA, 15 bp, Homo sapiens
ggagatattccagaa

SEQ ID NO: 1303187 - DNA, 15 bp, Homo sapiens
aggagatattccaga

SEQ ID NO: 1303188 - DNA, 15 bp, Homo sapiens
caggagatattccag

SEQ ID NO: 1303189 - DNA, 15 bp, Homo sapiens
tcaggagatattcca

SEQ ID NO: 1303190 - DNA, 15 bp, Homo sapiens
ttcaggagatattcc

SEQ ID NO: 1303191 - DNA, 15 bp, Homo sapiens
cttcaggagatattc

SEQ ID NO: 1303192 - DNA, 15 bp, Homo sapiens
ccttcaggagatatt

SEQ ID NO: 1303193 - DNA, 15 bp, Homo sapiens
tccttcaggagatat

SEQ ID NO: 1303194 - DNA, 15 bp, Homo sapiens
ctccttcaggagata

SEQ ID NO: 1303195 - DNA, 15 bp, Homo sapiens
gctccttcaggagat

SEQ ID NO: 1303196 - DNA, 15 bp, Homo sapiens
agctccttcaggaga

SEQ ID NO: 1303197 - DNA, 15 bp, Homo sapiens
cagctccttcaggag

SEQ ID NO: 1303198 - DNA, 15 bp, Homo sapiens
gcagctccttcagga

SEQ ID NO: 1303199 - DNA, 15 bp, Homo sapiens
ggcagctccttcagg

SEQ ID NO: 1303200 - DNA, 15 bp, Homo sapiens
aggcagctccttcag

SEQ ID NO: 1303201 - DNA, 15 bp, Homo sapiens
caggcagctccttca

SEQ ID NO: 1303202 - DNA, 15 bp, Homo sapiens
tcaggcagctccttc

SEQ ID NO: 1303203 - DNA, 15 bp, Homo sapiens
ctcaggcagctcctt

SEQ ID NO: 1303204 - DNA, 15 bp, Homo sapiens
cctcaggcagctcct

SEQ ID NO: 1303205 - DNA, 15 bp, Homo sapiens
ccctcaggcagctcc

SEQ ID NO: 1303206 - DNA, 15 bp, Homo sapiens
accctcaggcagctc

SEQ ID NO: 1303207 - DNA, 15 bp, Homo sapiens
caccctcaggcagct

SEQ ID NO: 1303208 - DNA, 15 bp, Homo sapiens
acaccctcaggcagc

SEQ ID NO: 1303209 - DNA, 15 bp, Homo sapiens
aacaccctcaggcag

SEQ ID NO: 1303210 - DNA, 15 bp, Homo sapiens
aaacaccctcaggca

SEQ ID NO: 1303211 - DNA, 15 bp, Homo sapiens
aaaacaccctcaggc

SEQ ID NO: 1303212 - DNA, 15 bp, Homo sapiens
taaaacaccctcagg

SEQ ID NO: 1303213 - DNA, 15 bp, Homo sapiens
gtaaaacaccctcag

SEQ ID NO: 1303214 - DNA, 15 bp, Homo sapiens
tgtaaaacaccctca

SEQ ID NO: 1303215 - DNA, 15 bp, Homo sapiens
atgtaaaacaccctc

SEQ ID NO: 1303216 - DNA, 15 bp, Homo sapiens
aatgtaaaacaccct

SEQ ID NO: 1303217 - DNA, 15 bp, Homo sapiens
aaatgtaaaacaccc

SEQ ID NO: 1303218 - DNA, 15 bp, Homo sapiens
taaatgtaaaacacc

SEQ ID NO: 1303219 - DNA, 15 bp, Homo sapiens
ttaaatgtaaaacac

SEQ ID NO: 1303220 - DNA, 15 bp, Homo sapiens
gttaaatgtaaaaca

SEQ ID NO: 1303221 - DNA, 15 bp, Homo sapiens
agttaaatgtaaaac

SEQ ID NO: 1303222 - DNA, 15 bp, Homo sapiens
aagttaaatgtaaaa

SEQ ID NO: 1303223 - DNA, 15 bp, Homo sapiens
aaagttaaatgtaaa

SEQ ID NO: 1303224 - DNA, 15 bp, Homo sapiens
aaaagttaaatgtaa

SEQ ID NO: 1303225 - DNA, 15 bp, Homo sapiens
aaaaagttaaatgta

SEQ ID NO: 1303226 - DNA, 15 bp, Homo sapiens
aaaaaagttaaatgt

SEQ ID NO: 1303227 - DNA, 15 bp, Homo sapiens
aaaaaaagttaaatg

SEQ ID NO: 1303228 - DNA, 15 bp, Homo sapiens
aaaaaaaagttaaat

SEQ ID NO: 1303229 - DNA, 15 bp, Homo sapiens
aaaaaaaaagttaaa

SEQ ID NO: 1303230 - DNA, 15 bp, Homo sapiens
aaaaaaaaaagttaa

SEQ ID NO: 1303231 - DNA, 15 bp, Homo sapiens
aaaaaaaaaaagtta

SEQ ID NO: 1303232 - DNA, 15 bp, Homo sapiens
cttgtaaaaaaaaaa

SEQ ID NO: 1303233 - DNA, 15 bp, Homo sapiens
acttgtaaaaaaaaa

SEQ ID NO: 1303234 - DNA, 15 bp, Homo sapiens
tacttgtaaaaaaaa

SEQ ID NO: 1303235 - DNA, 15 bp, Homo sapiens
ctacttgtaaaaaaa

SEQ ID NO: 1303236 - DNA, 15 bp, Homo sapiens
tctacttgtaaaaaa

SEQ ID NO: 1303237 - DNA, 15 bp, Homo sapiens
ttctacttgtaaaaa

SEQ ID NO: 1303238 - DNA, 15 bp, Homo sapiens
cttctacttgtaaaa

SEQ ID NO: 1303239 - DNA, 15 bp, Homo sapiens
ccttctacttgtaaa

SEQ ID NO: 1303240 - DNA, 15 bp, Homo sapiens
tccttctacttgtaa

SEQ ID NO: 1303241 - DNA, 15 bp, Homo sapiens
ctccttctacttgta

SEQ ID NO: 1303242 - DNA, 15 bp, Homo sapiens
cctccttctacttgt

SEQ ID NO: 1303243 - DNA, 15 bp, Homo sapiens
tcctccttctacttg

SEQ ID NO: 1303244 - DNA, 15 bp, Homo sapiens
atcctccttctactt

SEQ ID NO: 1303245 - DNA, 15 bp, Homo sapiens
catcctccttctact

SEQ ID NO: 1303246 - DNA, 15 bp, Homo sapiens
gcatcctccttctac

SEQ ID NO: 1303247 - DNA, 15 bp, Homo sapiens
agcatcctccttcta

SEQ ID NO: 1303248 - DNA, 15 bp, Homo sapiens
gagcatcctccttct

SEQ ID NO: 1303249 - DNA, 15 bp, Homo sapiens
agagcatcctccttc

SEQ ID NO: 1303250 - DNA, 15 bp, Homo sapiens
tagagcatcctcctt

SEQ ID NO: 1303251 - DNA, 15 bp, Homo sapiens
ttagagcatcctcct

SEQ ID NO: 1303252 - DNA, 15 bp, Homo sapiens
tttagagcatcctcc

SEQ ID NO: 1303253 - DNA, 15 bp, Homo sapiens
gtttagagcatcctc

SEQ ID NO: 1303254 - DNA, 15 bp, Homo sapiens
agtttagagcatcct

SEQ ID NO: 1303255 - DNA, 15 bp, Homo sapiens
tagtttagagcatcc

SEQ ID NO: 1303256 - DNA, 15 bp, Homo sapiens
ttagtttagagcatc

SEQ ID NO: 1303257 - DNA, 15 bp, Homo sapiens
attagtttagagcat

SEQ ID NO: 1303258 - DNA, 15 bp, Homo sapiens
tattagtttagagca

SEQ ID NO: 1303259 - DNA, 15 bp, Homo sapiens
ttattagtttagagc

SEQ ID NO: 1303260 - DNA, 15 bp, Homo sapiens
tttattagtttagag

SEQ ID NO: 1303261 - DNA, 15 bp, Homo sapiens
ttttattagtttaga

SEQ ID NO: 1303262 - DNA, 15 bp, Homo sapiens
tttttattagtttag

SEQ ID NO: 1303263 - DNA, 15 bp, Homo sapiens
ctttttattagttta

SEQ ID NO: 1303264 - DNA, 15 bp, Homo sapiens
actttttattagttt

SEQ ID NO: 1303265 - DNA, 15 bp, Homo sapiens
tactttttattagtt

SEQ ID NO: 1303266 - DNA, 15 bp, Homo sapiens
atactttttattagt

SEQ ID NO: 1303267 - DNA, 15 bp, Homo sapiens
tatactttttattag

SEQ ID NO: 1303268 - DNA, 15 bp, Homo sapiens
ctatactttttatta

SEQ ID NO: 1303269 - DNA, 15 bp, Homo sapiens
actatactttttatt

SEQ ID NO: 1303270 - DNA, 15 bp, Homo sapiens
tactatactttttat

SEQ ID NO: 1303271 - DNA, 15 bp, Homo sapiens
atactatacttttta

SEQ ID NO: 1303272 - DNA, 15 bp, Homo sapiens
tatactatacttttt

SEQ ID NO: 1303273 - DNA, 15 bp, Homo sapiens
ttatactatactttt

SEQ ID NO: 1303274 - DNA, 15 bp, Homo sapiens
attatactatacttt

SEQ ID NO: 1303275 - DNA, 15 bp, Homo sapiens
tattatactatactt

SEQ ID NO: 1303276 - DNA, 15 bp, Homo sapiens
ttattatactatact

SEQ ID NO: 1303277 - DNA, 15 bp, Homo sapiens
tttattatactatac

SEQ ID NO: 1303278 - DNA, 15 bp, Homo sapiens
atttattatactata

SEQ ID NO: 1303279 - DNA, 15 bp, Homo sapiens
tatttattatactat

SEQ ID NO: 1303280 - DNA, 15 bp, Homo sapiens
gtatttattatacta

SEQ ID NO: 1303281 - DNA, 15 bp, Homo sapiens
tgtatttattatact

SEQ ID NO: 1303282 - DNA, 15 bp, Homo sapiens
atgtatttattatac

SEQ ID NO: 1303283 - DNA, 15 bp, Homo sapiens
tatgtatttattata

SEQ ID NO: 1303284 - DNA, 15 bp, Homo sapiens
ttatgtatttattat

SEQ ID NO: 1303285 - DNA, 15 bp, Homo sapiens
tttatgtatttatta

SEQ ID NO: 1303286 - DNA, 15 bp, Homo sapiens
gtttatgtatttatt

SEQ ID NO: 1303287 - DNA, 15 bp, Homo sapiens
ggtttatgtatttat

SEQ ID NO: 1303288 - DNA, 15 bp, Homo sapiens
tggtttatgtattta

SEQ ID NO: 1303289 - DNA, 15 bp, Homo sapiens
ctggtttatgtattt

SEQ ID NO: 1303290 - DNA, 15 bp, Homo sapiens
actggtttatgtatt

SEQ ID NO: 1303291 - DNA, 15 bp, Homo sapiens
tactggtttatgtat

SEQ ID NO: 1303292 - DNA, 15 bp, Homo sapiens
ttactggtttatgta

SEQ ID NO: 1303293 - DNA, 15 bp, Homo sapiens
gttactggtttatgt

SEQ ID NO: 1303294 - DNA, 15 bp, Homo sapiens
tgttactggtttatg

SEQ ID NO: 1303295 - DNA, 15 bp, Homo sapiens
atgttactggtttat

SEQ ID NO: 1303296 - DNA, 15 bp, Homo sapiens
catgttactggttta

SEQ ID NO: 1303297 - DNA, 15 bp, Homo sapiens
acatgttactggttt

SEQ ID NO: 1303298 - DNA, 15 bp, Homo sapiens
aacatgttactggtt

SEQ ID NO: 1303299 - DNA, 15 bp, Homo sapiens
gaacatgttactggt

SEQ ID NO: 1303300 - DNA, 15 bp, Homo sapiens
tgaacatgttactgg

SEQ ID NO: 1303301 - DNA, 15 bp, Homo sapiens
atgaacatgttactg

SEQ ID NO: 1303302 - DNA, 15 bp, Homo sapiens
aatgaacatgttact

SEQ ID NO: 1303303 - DNA, 15 bp, Homo sapiens
taatgaacatgttac

SEQ ID NO: 1303304 - DNA, 15 bp, Homo sapiens
ataatgaacatgtta

SEQ ID NO: 1303305 - DNA, 15 bp, Homo sapiens
aataatgaacatgtt

SEQ ID NO: 1303306 - DNA, 15 bp, Homo sapiens
taataatgaacatgt

SEQ ID NO: 1303307 - DNA, 15 bp, Homo sapiens
ttaataatgaacatg

SEQ ID NO: 1303308 - DNA, 15 bp, Homo sapiens
cttaataatgaacat

SEQ ID NO: 1303309 - DNA, 15 bp, Homo sapiens
acttaataatgaaca

SEQ ID NO: 1303310 - DNA, 15 bp, Homo sapiens
tacttaataatgaac

SEQ ID NO: 1303311 - DNA, 15 bp, Homo sapiens
atacttaataatgaa

SEQ ID NO: 1303312 - DNA, 15 bp, Homo sapiens
aatacttaataatga

SEQ ID NO: 1303313 - DNA, 15 bp, Homo sapiens
taatacttaataatg

SEQ ID NO: 1303314 - DNA, 15 bp, Homo sapiens
ataatacttaataat

SEQ ID NO: 1303315 - DNA, 15 bp, Homo sapiens
cataatacttaataa

SEQ ID NO: 1303316 - DNA, 15 bp, Homo sapiens
acataatacttaata

SEQ ID NO: 1303317 - DNA, 15 bp, Homo sapiens
tacataatacttaat

SEQ ID NO: 1303318 - DNA, 15 bp, Homo sapiens
gtacataatacttaa

SEQ ID NO: 1303319 - DNA, 15 bp, Homo sapiens
agtacataatactta

SEQ ID NO: 1303320 - DNA, 15 bp, Homo sapiens
cagtacataatactt

SEQ ID NO: 1303321 - DNA, 15 bp, Homo sapiens
acagtacataatact

SEQ ID NO: 1303322 - DNA, 15 bp, Homo sapiens
tacagtacataatac

SEQ ID NO: 1303323 - DNA, 15 bp, Homo sapiens
gtacagtacataata

SEQ ID NO: 1303324 - DNA, 15 bp, Homo sapiens
tgtacagtacataat

SEQ ID NO: 1303325 - DNA, 15 bp, Homo sapiens
atgtacagtacataa

SEQ ID NO: 1303326 - DNA, 15 bp, Homo sapiens
tatgtacagtacata

SEQ ID NO: 1303327 - DNA, 15 bp, Homo sapiens
ttatgtacagtacat

SEQ ID NO: 1303328 - DNA, 15 bp, Homo sapiens
attatgtacagtaca

SEQ ID NO: 1303329 - DNA, 15 bp, Homo sapiens
aattatgtacagtac

SEQ ID NO: 1303330 - DNA, 15 bp, Homo sapiens
caattatgtacagta

SEQ ID NO: 1303331 - DNA, 15 bp, Homo sapiens
acaattatgtacagt

SEQ ID NO: 1303332 - DNA, 15 bp, Homo sapiens
tacaattatgtacag

SEQ ID NO: 1303333 - DNA, 15 bp, Homo sapiens
atacaattatgtaca

SEQ ID NO: 1303334 - DNA, 15 bp, Homo sapiens
catacaattatgtac

SEQ ID NO: 1303335 - DNA, 15 bp, Homo sapiens
acatacaattatgta

SEQ ID NO: 1303336 - DNA, 15 bp, Homo sapiens
tacatacaattatgt

SEQ ID NO: 1303337 - DNA, 15 bp, Homo sapiens
gtacatacaattatg

SEQ ID NO: 1303338 - DNA, 15 bp, Homo sapiens
agtacatacaattat

SEQ ID NO: 1303339 - DNA, 15 bp, Homo sapiens
tagtacatacaatta

SEQ ID NO: 1303340 - DNA, 15 bp, Homo sapiens
atagtacatacaatt

SEQ ID NO: 1303341 - DNA, 15 bp, Homo sapiens
tatagtacatacaat

SEQ ID NO: 1303342 - DNA, 15 bp, Homo sapiens
gtatagtacatacaa

SEQ ID NO: 1303343 - DNA, 15 bp, Homo sapiens
agtatagtacataca

SEQ ID NO: 1303344 - DNA, 15 bp, Homo sapiens
aagtatagtacatac

SEQ ID NO: 1303345 - DNA, 15 bp, Homo sapiens
aaagtatagtacata

SEQ ID NO: 1303346 - DNA, 15 bp, Homo sapiens
aaaagtatagtacat

SEQ ID NO: 1303347 - DNA, 15 bp, Homo sapiens
taaaagtatagtaca

SEQ ID NO: 1303348 - DNA, 15 bp, Homo sapiens
ataaaagtatagtac

SEQ ID NO: 1303349 - DNA, 15 bp, Homo sapiens
tataaaagtatagta

SEQ ID NO: 1303350 - DNA, 15 bp, Homo sapiens
atataaaagtatagt

SEQ ID NO: 1303351 - DNA, 15 bp, Homo sapiens
catataaaagtatag

SEQ ID NO: 1303352 - DNA, 15 bp, Homo sapiens
tcatataaaagtata

SEQ ID NO: 1303353 - DNA, 15 bp, Homo sapiens
gtcatataaaagtat

SEQ ID NO: 1303354 - DNA, 15 bp, Homo sapiens
agtcatataaaagta

SEQ ID NO: 1303355 - DNA, 15 bp, Homo sapiens
cagtcatataaaagt

SEQ ID NO: 1303356 - DNA, 15 bp, Homo sapiens
ccagtcatataaaag

SEQ ID NO: 1303357 - DNA, 15 bp, Homo sapiens
gccagtcatataaaa

SEQ ID NO: 1303358 - DNA, 15 bp, Homo sapiens
tgccagtcatataaa

SEQ ID NO: 1303359 - DNA, 15 bp, Homo sapiens
ctgccagtcatataa

SEQ ID NO: 1303360 - DNA, 15 bp, Homo sapiens
actgccagtcatata

SEQ ID NO: 1303361 - DNA, 15 bp, Homo sapiens
cactgccagtcatat

SEQ ID NO: 1303362 - DNA, 15 bp, Homo sapiens
gcactgccagtcata

SEQ ID NO: 1303363 - DNA, 15 bp, Homo sapiens
tgcactgccagtcat

SEQ ID NO: 1303364 - DNA, 15 bp, Homo sapiens
ttgcactgccagtca

SEQ ID NO: 1303365 - DNA, 15 bp, Homo sapiens
attgcactgccagtc

SEQ ID NO: 1303366 - DNA, 15 bp, Homo sapiens
tattgcactgccagt

SEQ ID NO: 1303367 - DNA, 15 bp, Homo sapiens
ctattgcactgccag

SEQ ID NO: 1303368 - DNA, 15 bp, Homo sapiens
cctattgcactgcca

SEQ ID NO: 1303369 - DNA, 15 bp, Homo sapiens
acctattgcactgcc

SEQ ID NO: 1303370 - DNA, 15 bp, Homo sapiens
aacctattgcactgc

SEQ ID NO: 1303371 - DNA, 15 bp, Homo sapiens
aaacctattgcactg

SEQ ID NO: 1303372 - DNA, 15 bp, Homo sapiens
taaacctattgcact

SEQ ID NO: 1303373 - DNA, 15 bp, Homo sapiens
ataaacctattgcac

SEQ ID NO: 1303374 - DNA, 15 bp, Homo sapiens
aataaacctattgca

SEQ ID NO: 1303375 - DNA, 15 bp, Homo sapiens
aaataaacctattgc

SEQ ID NO: 1303376 - DNA, 15 bp, Homo sapiens
taaataaacctattg

SEQ ID NO: 1303377 - DNA, 15 bp, Homo sapiens
gtaaataaacctatt

SEQ ID NO: 1303378 - DNA, 15 bp, Homo sapiens
tgtaaataaacctat

SEQ ID NO: 1303379 - DNA, 15 bp, Homo sapiens
atgtaaataaaccta

SEQ ID NO: 1303380 - DNA, 15 bp, Homo sapiens
gatgtaaataaacct

SEQ ID NO: 1303381 - DNA, 15 bp, Homo sapiens
tgatgtaaataaacc

SEQ ID NO: 1303382 - DNA, 15 bp, Homo sapiens
gctgatgtaaataaa

SEQ ID NO: 1303383 - DNA, 15 bp, Homo sapiens
tgctgatgtaaataa

SEQ ID NO: 1303384 - DNA, 15 bp, Homo sapiens
atgctgatgtaaata

SEQ ID NO: 1303385 - DNA, 15 bp, Homo sapiens
gatgctgatgtaaat

SEQ ID NO: 1303386 - DNA, 15 bp, Homo sapiens
tgatgctgatgtaaa

SEQ ID NO: 1303387 - DNA, 15 bp, Homo sapiens
atgatgctgatgtaa

SEQ ID NO: 1303388 - DNA, 15 bp, Homo sapiens
gatgatgctgatgta

SEQ ID NO: 1303389 - DNA, 15 bp, Homo sapiens
tgatgatgctgatgt

SEQ ID NO: 1303390 - DNA, 15 bp, Homo sapiens
gtgatgatgctgatg

SEQ ID NO: 1303391 - DNA, 15 bp, Homo sapiens
tgtgatgatgctgat

SEQ ID NO: 1303392 - DNA, 15 bp, Homo sapiens
ttgtgatgatgctga

SEQ ID NO: 1303393 - DNA, 15 bp, Homo sapiens
tttgtgatgatgctg

SEQ ID NO: 1303394 - DNA, 15 bp, Homo sapiens
ctttgtgatgatgct

SEQ ID NO: 1303395 - DNA, 15 bp, Homo sapiens
tctttgtgatgatgc

SEQ ID NO: 1303396 - DNA, 15 bp, Homo sapiens
atctttgtgatgatg

SEQ ID NO: 1303397 - DNA, 15 bp, Homo sapiens
catctttgtgatgat

SEQ ID NO: 1303398 - DNA, 15 bp, Homo sapiens
acatctttgtgatga

SEQ ID NO: 1303399 - DNA, 15 bp, Homo sapiens
cacatctttgtgatg

SEQ ID NO: 1303400 - DNA, 15 bp, Homo sapiens
tcacatctttgtgat

SEQ ID NO: 1303401 - DNA, 15 bp, Homo sapiens
ctcacatctttgtga

SEQ ID NO: 1303402 - DNA, 15 bp, Homo sapiens
actcacatctttgtg

SEQ ID NO: 1303403 - DNA, 15 bp, Homo sapiens
tactcacatctttgt

SEQ ID NO: 1303404 - DNA, 15 bp, Homo sapiens
ttactcacatctttg

SEQ ID NO: 1303405 - DNA, 15 bp, Homo sapiens
attactcacatcttt

SEQ ID NO: 1303406 - DNA, 15 bp, Homo sapiens
cattactcacatctt

SEQ ID NO: 1303407 - DNA, 15 bp, Homo sapiens
acattactcacatct

SEQ ID NO: 1303408 - DNA, 15 bp, Homo sapiens
tacattactcacatc

SEQ ID NO: 1303409 - DNA, 15 bp, Homo sapiens
ttacattactcacat

SEQ ID NO: 1303410 - DNA, 15 bp, Homo sapiens
attacattactcaca

SEQ ID NO: 1303411 - DNA, 15 bp, Homo sapiens
cattacattactcac

SEQ ID NO: 1303412 - DNA, 15 bp, Homo sapiens
gcattacattactca

SEQ ID NO: 1303413 - DNA, 15 bp, Homo sapiens
tgcattacattactc

SEQ ID NO: 1303414 - DNA, 15 bp, Homo sapiens
atgcattacattact

SEQ ID NO: 1303415 - DNA, 15 bp, Homo sapiens
aatgcattacattac

SEQ ID NO: 1303416 - DNA, 15 bp, Homo sapiens
caatgcattacatta

SEQ ID NO: 1303417 - DNA, 15 bp, Homo sapiens
gcaatgcattacatt

SEQ ID NO: 1303418 - DNA, 15 bp, Homo sapiens
tgcaatgcattacat

SEQ ID NO: 1303419 - DNA, 15 bp, Homo sapiens
gtgcaatgcattaca

SEQ ID NO: 1303420 - DNA, 15 bp, Homo sapiens
agtgcaatgcattac

SEQ ID NO: 1303421 - DNA, 15 bp, Homo sapiens
tagtgcaatgcatta

SEQ ID NO: 1303422 - DNA, 15 bp, Homo sapiens
gtagtgcaatgcatt

SEQ ID NO: 1303423 - DNA, 15 bp, Homo sapiens
tgtagtgcaatgcat

SEQ ID NO: 1303424 - DNA, 15 bp, Homo sapiens
atgtagtgcaatgca

SEQ ID NO: 1303425 - DNA, 15 bp, Homo sapiens
aatgtagtgcaatgc

SEQ ID NO: 1303426 - DNA, 15 bp, Homo sapiens
taatgtagtgcaatg

SEQ ID NO: 1303427 - DNA, 15 bp, Homo sapiens
gtaatgtagtgcaat

SEQ ID NO: 1303428 - DNA, 15 bp, Homo sapiens
tgtaatgtagtgcaa

SEQ ID NO: 1303429 - DNA, 15 bp, Homo sapiens
gtgtaatgtagtgca

SEQ ID NO: 1303430 - DNA, 15 bp, Homo sapiens
agtgtaatgtagtgc

SEQ ID NO: 1303431 - DNA, 15 bp, Homo sapiens
tagtgtaatgtagtg

SEQ ID NO: 1303432 - DNA, 15 bp, Homo sapiens
ttagtgtaatgtagt

SEQ ID NO: 1303433 - DNA, 15 bp, Homo sapiens
tttagtgtaatgtag

SEQ ID NO: 1303434 - DNA, 15 bp, Homo sapiens
gtttagtgtaatgta

SEQ ID NO: 1303435 - DNA, 15 bp, Homo sapiens
tgtttagtgtaatgt

SEQ ID NO: 1303436 - DNA, 15 bp, Homo sapiens
ttgtttagtgtaatg

SEQ ID NO: 1303437 - DNA, 15 bp, Homo sapiens
attgtttagtgtaat

SEQ ID NO: 1303438 - DNA, 15 bp, Homo sapiens
tattgtttagtgtaa

SEQ ID NO: 1303439 - DNA, 15 bp, Homo sapiens
ctattgtttagtgta

SEQ ID NO: 1303440 - DNA, 15 bp, Homo sapiens
cctattgtttagtgt

SEQ ID NO: 1303441 - DNA, 15 bp, Homo sapiens
tcctattgtttagtg

SEQ ID NO: 1303442 - DNA, 15 bp, Homo sapiens
ttcctattgtttagt

SEQ ID NO: 1303443 - DNA, 15 bp, Homo sapiens
attcctattgtttag

SEQ ID NO: 1303444 - DNA, 15 bp, Homo sapiens
aattcctattgttta

SEQ ID NO: 1303445 - DNA, 15 bp, Homo sapiens
aaattcctattgttt

SEQ ID NO: 1303446 - DNA, 15 bp, Homo sapiens
aaaattcctattgtt

SEQ ID NO: 1303447 - DNA, 15 bp, Homo sapiens
aaaaattcctattgt

SEQ ID NO: 1303448 - DNA, 15 bp, Homo sapiens
gaaaaattcctattg

SEQ ID NO: 1303449 - DNA, 15 bp, Homo sapiens
ctgaaaaattcctat

SEQ ID NO: 1303450 - DNA, 15 bp, Homo sapiens
aatggagctgaaaaa

SEQ ID NO: 1303451 - DNA, 15 bp, Homo sapiens
taatggagctgaaaa

SEQ ID NO: 1303452 - DNA, 15 bp, Homo sapiens
ataatggagctgaaa

SEQ ID NO: 1303453 - DNA, 15 bp, Homo sapiens
tataatggagctgaa

SEQ ID NO: 1303454 - DNA, 15 bp, Homo sapiens
ttataatggagctga

SEQ ID NO: 1303455 - DNA, 15 bp, Homo sapiens
attataatggagctg

SEQ ID NO: 1303456 - DNA, 15 bp, Homo sapiens
gattataatggagct

SEQ ID NO: 1303457 - DNA, 15 bp, Homo sapiens
agattataatggagc

SEQ ID NO: 1303458 - DNA, 15 bp, Homo sapiens
aagattataatggag

SEQ ID NO: 1303459 - DNA, 15 bp, Homo sapiens
taagattataatgga

SEQ ID NO: 1303460 - DNA, 15 bp, Homo sapiens
ataagattataatgg

SEQ ID NO: 1303461 - DNA, 15 bp, Homo sapiens
cataagattataatg

SEQ ID NO: 1303462 - DNA, 15 bp, Homo sapiens
ccataagattataat

SEQ ID NO: 1303463 - DNA, 15 bp, Homo sapiens
cccataagattataa

SEQ ID NO: 1303464 - DNA, 15 bp, Homo sapiens
tcccataagattata

SEQ ID NO: 1303465 - DNA, 15 bp, Homo sapiens
agtcccataagatta

SEQ ID NO: 1303466 - DNA, 15 bp, Homo sapiens
tagtcccataagatt

SEQ ID NO: 1303467 - DNA, 15 bp, Homo sapiens
gtagtcccataagat

SEQ ID NO: 1303468 - DNA, 15 bp, Homo sapiens
agtagtcccataaga

SEQ ID NO: 1303469 - DNA, 15 bp, Homo sapiens
cagtagtcccataag

SEQ ID NO: 1303470 - DNA, 15 bp, Homo sapiens
acagtagtcccataa

SEQ ID NO: 1303471 - DNA, 15 bp, Homo sapiens
aacagtagtcccata

SEQ ID NO: 1303472 - DNA, 15 bp, Homo sapiens
taacagtagtcccat

SEQ ID NO: 1303473 - DNA, 15 bp, Homo sapiens
ctaacagtagtccca

SEQ ID NO: 1303474 - DNA, 15 bp, Homo sapiens
tctaacagtagtccc

SEQ ID NO: 1303475 - DNA, 15 bp, Homo sapiens
atctaacagtagtcc

SEQ ID NO: 1303476 - DNA, 15 bp, Homo sapiens
tatctaacagtagtc

SEQ ID NO: 1303477 - DNA, 15 bp, Homo sapiens
atatctaacagtagt

SEQ ID NO: 1303478 - DNA, 15 bp, Homo sapiens
catatctaacagtag

SEQ ID NO: 1303479 - DNA, 15 bp, Homo sapiens
gcatatctaacagta

SEQ ID NO: 1303480 - DNA, 15 bp, Homo sapiens
tgcatatctaacagt

SEQ ID NO: 1303481 - DNA, 15 bp, Homo sapiens
ctgcatatctaacag

SEQ ID NO: 1303482 - DNA, 15 bp, Homo sapiens
actgcatatctaaca

SEQ ID NO: 1303483 - DNA, 15 bp, Homo sapiens
gactgcatatctaac

SEQ ID NO: 1303484 - DNA, 15 bp, Homo sapiens
tgactgcatatctaa

SEQ ID NO: 1303485 - DNA, 15 bp, Homo sapiens
ctgactgcatatcta

SEQ ID NO: 1303486 - DNA, 15 bp, Homo sapiens
actgactgcatatct

SEQ ID NO: 1303487 - DNA, 15 bp, Homo sapiens
aactgactgcatatc

SEQ ID NO: 1303488 - DNA, 15 bp, Homo sapiens
taactgactgcatat

SEQ ID NO: 1303489 - DNA, 15 bp, Homo sapiens
ataactgactgcata

SEQ ID NO: 1303490 - DNA, 15 bp, Homo sapiens
aataactgactgcat

SEQ ID NO: 1303491 - DNA, 15 bp, Homo sapiens
caataactgactgca

SEQ ID NO: 1303492 - DNA, 15 bp, Homo sapiens
tcaataactgactgc

SEQ ID NO: 1303493 - DNA, 15 bp, Homo sapiens
gtcaataactgactg

SEQ ID NO: 1303494 - DNA, 15 bp, Homo sapiens
ggtcaataactgact

SEQ ID NO: 1303495 - DNA, 15 bp, Homo sapiens
tggtcaataactgac

SEQ ID NO: 1303496 - DNA, 15 bp, Homo sapiens
ttggtcaataactga

SEQ ID NO: 1303497 - DNA, 15 bp, Homo sapiens
tttggtcaataactg

SEQ ID NO: 1303498 - DNA, 15 bp, Homo sapiens
ttttggtcaataact

SEQ ID NO: 1303499 - DNA, 15 bp, Homo sapiens
tttttggtcaataac

SEQ ID NO: 1303500 - DNA, 15 bp, Homo sapiens
gtttttggtcaataa

SEQ ID NO: 1303501 - DNA, 15 bp, Homo sapiens
cgtttttggtcaata

SEQ ID NO: 1303502 - DNA, 15 bp, Homo sapiens
acgtttttggtcaat

SEQ ID NO: 1303503 - DNA, 15 bp, Homo sapiens
aacgtttttggtcaa

SEQ ID NO: 1303504 - DNA, 15 bp, Homo sapiens
caacgtttttggtca

SEQ ID NO: 1303505 - DNA, 15 bp, Homo sapiens
acaacgtttttggtc

SEQ ID NO: 1303506 - DNA, 15 bp, Homo sapiens
aacaacgtttttggt

SEQ ID NO: 1303507 - DNA, 15 bp, Homo sapiens
taacaacgtttttgg

SEQ ID NO: 1303508 - DNA, 15 bp, Homo sapiens
ataacaacgtttttg

SEQ ID NO: 1303509 - DNA, 15 bp, Homo sapiens
cataacaacgttttt

SEQ ID NO: 1303510 - DNA, 15 bp, Homo sapiens
gcataacaacgtttt

SEQ ID NO: 1303511 - DNA, 15 bp, Homo sapiens
cgcataacaacgttt

SEQ ID NO: 1303512 - DNA, 15 bp, Homo sapiens
ccgcataacaacgtt

SEQ ID NO: 1303513 - DNA, 15 bp, Homo sapiens
accgcataacaacgt

SEQ ID NO: 1303514 - DNA, 15 bp, Homo sapiens
caccgcataacaacg

SEQ ID NO: 1303515 - DNA, 15 bp, Homo sapiens
gcaccgcataacaac

SEQ ID NO: 1303516 - DNA, 15 bp, Homo sapiens
tgcaccgcataacaa

SEQ ID NO: 1303517 - DNA, 15 bp, Homo sapiens
atgcaccgcataaca

SEQ ID NO: 1303518 - DNA, 15 bp, Homo sapiens
catgcaccgcataac

SEQ ID NO: 1303519 - DNA, 15 bp, Homo sapiens
tcatgcaccgcataa

SEQ ID NO: 1303520 - DNA, 15 bp, Homo sapiens
atcatgcaccgcata

SEQ ID NO: 1303521 - DNA, 15 bp, Homo sapiens
aatcatgcaccgcat

SEQ ID NO: 1303522 - DNA, 15 bp, Homo sapiens
taatcatgcaccgca

SEQ ID NO: 1303523 - DNA, 15 bp, Homo sapiens
ataatcatgcaccgc

SEQ ID NO: 1303524 - DNA, 15 bp, Homo sapiens
tataatcatgcaccg

SEQ ID NO: 1303525 - DNA, 15 bp, Homo sapiens
atataatcatgcacc

SEQ ID NO: 1303526 - DNA, 15 bp, Homo sapiens
tatataatcatgcac

SEQ ID NO: 1303527 - DNA, 15 bp, Homo sapiens
atatataatcatgca

SEQ ID NO: 1303528 - DNA, 15 bp, Homo sapiens
catatataatcatgc

SEQ ID NO: 1303529 - DNA, 15 bp, Homo sapiens
tcatatataatcatg

SEQ ID NO: 1303530 - DNA, 15 bp, Homo sapiens
ctcatatataatcat

SEQ ID NO: 1303531 - DNA, 15 bp, Homo sapiens
tctcatatataatca

SEQ ID NO: 1303532 - DNA, 15 bp, Homo sapiens
atctcatatataatc

SEQ ID NO: 1303533 - DNA, 15 bp, Homo sapiens
aatctcatatataat

SEQ ID NO: 1303534 - DNA, 15 bp, Homo sapiens
aaatctcatatataa

SEQ ID NO: 1303535 - DNA, 15 bp, Homo sapiens
aaaatctcatatata

SEQ ID NO: 1303536 - DNA, 15 bp, Homo sapiens
aaaaatctcatatat

SEQ ID NO: 1303537 - DNA, 15 bp, Homo sapiens
caaaaatctcatata

SEQ ID NO: 1303538 - DNA, 15 bp, Homo sapiens
gcaaaaatctcatat

SEQ ID NO: 1303539 - DNA, 15 bp, Homo sapiens
agcaaaaatctcata

SEQ ID NO: 1303540 - DNA, 15 bp, Homo sapiens
gagcaaaaatctcat

SEQ ID NO: 1303541 - DNA, 15 bp, Homo sapiens
agagcaaaaatctca

SEQ ID NO: 1303542 - DNA, 15 bp, Homo sapiens
aagagcaaaaatctc

SEQ ID NO: 1303543 - DNA, 15 bp, Homo sapiens
taagagcaaaaatct

SEQ ID NO: 1303544 - DNA, 15 bp, Homo sapiens
ctaagagcaaaaatc

SEQ ID NO: 1303545 - DNA, 15 bp, Homo sapiens
actaagagcaaaaat

SEQ ID NO: 1303546 - DNA, 15 bp, Homo sapiens
aactaagagcaaaaa

SEQ ID NO: 1303547 - DNA, 15 bp, Homo sapiens
aaactaagagcaaaa

SEQ ID NO: 1303548 - DNA, 15 bp, Homo sapiens
caaactaagagcaaa

SEQ ID NO: 1303549 - DNA, 15 bp, Homo sapiens
ccaaactaagagcaa

SEQ ID NO: 1303550 - DNA, 15 bp, Homo sapiens
tccaaactaagagca

SEQ ID NO: 1303551 - DNA, 15 bp, Homo sapiens
ttccaaactaagagc

SEQ ID NO: 1303552 - DNA, 15 bp, Homo sapiens
cttccaaactaagag

SEQ ID NO: 1303553 - DNA, 15 bp, Homo sapiens
ccttccaaactaaga

SEQ ID NO: 1303554 - DNA, 15 bp, Homo sapiens
tccttccaaactaag

SEQ ID NO: 1303555 - DNA, 15 bp, Homo sapiens
ttccttccaaactaa

SEQ ID NO: 1303556 - DNA, 15 bp, Homo sapiens
tttccttccaaacta

SEQ ID NO: 1303557 - DNA, 15 bp, Homo sapiens
atttccttccaaact

SEQ ID NO: 1303558 - DNA, 15 bp, Homo sapiens
tatttccttccaaac

SEQ ID NO: 1303559 - DNA, 15 bp, Homo sapiens
ttatttccttccaaa

SEQ ID NO: 1303560 - DNA, 15 bp, Homo sapiens
attatttccttccaa

SEQ ID NO: 1303561 - DNA, 15 bp, Homo sapiens
tattatttccttcca

SEQ ID NO: 1303562 - DNA, 15 bp, Homo sapiens
atattatttccttcc

SEQ ID NO: 1303563 - DNA, 15 bp, Homo sapiens
catattatttccttc

SEQ ID NO: 1303564 - DNA, 15 bp, Homo sapiens
ccatattatttcctt

SEQ ID NO: 1303565 - DNA, 15 bp, Homo sapiens
accatattatttcct

SEQ ID NO: 1303566 - DNA, 15 bp, Homo sapiens
caccatattatttcc

SEQ ID NO: 1303567 - DNA, 15 bp, Homo sapiens
acaccatattatttc

SEQ ID NO: 1303568 - DNA, 15 bp, Homo sapiens
cacaccatattattt

SEQ ID NO: 1303569 - DNA, 15 bp, Homo sapiens
acacaccatattatt

SEQ ID NO: 1303570 - DNA, 15 bp, Homo sapiens
cacacaccatattat

SEQ ID NO: 1303571 - DNA, 15 bp, Homo sapiens
acacacaccatatta

SEQ ID NO: 1303572 - DNA, 15 bp, Homo sapiens
aacacacaccatatt

SEQ ID NO: 1303573 - DNA, 15 bp, Homo sapiens
aaacacacaccatat

SEQ ID NO: 1303574 - DNA, 15 bp, Homo sapiens
taaacacacaccata

SEQ ID NO: 1303575 - DNA, 15 bp, Homo sapiens
ataaacacacaccat

SEQ ID NO: 1303576 - DNA, 15 bp, Homo sapiens
tataaacacacacca

SEQ ID NO: 1303577 - DNA, 15 bp, Homo sapiens
atataaacacacacc

SEQ ID NO: 1303578 - DNA, 15 bp, Homo sapiens
aatataaacacacac

SEQ ID NO: 1303579 - DNA, 15 bp, Homo sapiens
aaatataaacacaca

SEQ ID NO: 1303580 - DNA, 15 bp, Homo sapiens
gaaatataaacacac

SEQ ID NO: 1303581 - DNA, 15 bp, Homo sapiens
agaaatataaacaca

SEQ ID NO: 1303582 - DNA, 15 bp, Homo sapiens
tagaaatataaacac

SEQ ID NO: 1303583 - DNA, 15 bp, Homo sapiens
ttagaaatataaaca

SEQ ID NO: 1303584 - DNA, 15 bp, Homo sapiens
tttagaaatataaac

SEQ ID NO: 1303585 - DNA, 15 bp, Homo sapiens
ttttagaaatataaa

SEQ ID NO: 1303586 - DNA, 15 bp, Homo sapiens
attttagaaatataa

SEQ ID NO: 1303587 - DNA, 15 bp, Homo sapiens
aattttagaaatata

SEQ ID NO: 1303588 - DNA, 15 bp, Homo sapiens
aaattttagaaatat

SEQ ID NO: 1303589 - DNA, 15 bp, Homo sapiens
caaattttagaaata

SEQ ID NO: 1303590 - DNA, 15 bp, Homo sapiens
ccaaattttagaaat

SEQ ID NO: 1303591 - DNA, 15 bp, Homo sapiens
accaaattttagaaa

SEQ ID NO: 1303592 - DNA, 15 bp, Homo sapiens
aaccaaattttagaa

SEQ ID NO: 1303593 - DNA, 15 bp, Homo sapiens
taaccaaattttaga

SEQ ID NO: 1303594 - DNA, 15 bp, Homo sapiens
ataaccaaattttag

SEQ ID NO: 1303595 - DNA, 15 bp, Homo sapiens
aataaccaaatttta

SEQ ID NO: 1303596 - DNA, 15 bp, Homo sapiens
gaataaccaaatttt

SEQ ID NO: 1303597 - DNA, 15 bp, Homo sapiens
agaataaccaaattt

SEQ ID NO: 1303598 - DNA, 15 bp, Homo sapiens
aagaataaccaaatt

SEQ ID NO: 1303599 - DNA, 15 bp, Homo sapiens
aaagaataaccaaat

SEQ ID NO: 1303600 - DNA, 15 bp, Homo sapiens
gaaagaataaccaaa

SEQ ID NO: 1303601 - DNA, 15 bp, Homo sapiens
tgaaagaataaccaa

SEQ ID NO: 1303602 - DNA, 15 bp, Homo sapiens
ttgaaagaataacca

SEQ ID NO: 1303603 - DNA, 15 bp, Homo sapiens
tttgaaagaataacc

SEQ ID NO: 1303604 - DNA, 15 bp, Homo sapiens
atttgaaagaataac

SEQ ID NO: 1303605 - DNA, 15 bp, Homo sapiens
tatttgaaagaataa

SEQ ID NO: 1303606 - DNA, 15 bp, Homo sapiens
ttatttgaaagaata

SEQ ID NO: 1303607 - DNA, 15 bp, Homo sapiens
attatttgaaagaat

SEQ ID NO: 1303608 - DNA, 15 bp, Homo sapiens
cattatttgaaagaa

SEQ ID NO: 1303609 - DNA, 15 bp, Homo sapiens
ccattatttgaaaga

SEQ ID NO: 1303610 - DNA, 15 bp, Homo sapiens
cccattatttgaaag

SEQ ID NO: 1303611 - DNA, 15 bp, Homo sapiens
tcccattatttgaaa

SEQ ID NO: 1303612 - DNA, 15 bp, Homo sapiens
ttcccattatttgaa

SEQ ID NO: 1303613 - DNA, 15 bp, Homo sapiens
gttcccattatttga

SEQ ID NO: 1303614 - DNA, 15 bp, Homo sapiens
agttcccattatttg

SEQ ID NO: 1303615 - DNA, 15 bp, Homo sapiens
tagttcccattattt

SEQ ID NO: 1303616 - DNA, 15 bp, Homo sapiens
ctagttcccattatt

SEQ ID NO: 1303617 - DNA, 15 bp, Homo sapiens
actagttcccattat

SEQ ID NO: 1303618 - DNA, 15 bp, Homo sapiens
aactagttcccatta

SEQ ID NO: 1303619 - DNA, 15 bp, Homo sapiens
taactagttcccatt

SEQ ID NO: 1303620 - DNA, 15 bp, Homo sapiens
ataactagttcccat

SEQ ID NO: 1303621 - DNA, 15 bp, Homo sapiens
aataactagttccca

SEQ ID NO: 1303622 - DNA, 15 bp, Homo sapiens
aaataactagttccc

SEQ ID NO: 1303623 - DNA, 15 bp, Homo sapiens
caaataactagttcc

SEQ ID NO: 1303624 - DNA, 15 bp, Homo sapiens
ccaaataactagttc

SEQ ID NO: 1303625 - DNA, 15 bp, Homo sapiens
gccaaataactagtt

SEQ ID NO: 1303626 - DNA, 15 bp, Homo sapiens
agccaaataactagt

SEQ ID NO: 1303627 - DNA, 15 bp, Homo sapiens
tagccaaataactag

SEQ ID NO: 1303628 - DNA, 15 bp, Homo sapiens
ttagccaaataacta

SEQ ID NO: 1303629 - DNA, 15 bp, Homo sapiens
tttagccaaataact

SEQ ID NO: 1303630 - DNA, 15 bp, Homo sapiens
ttttagccaaataac

SEQ ID NO: 1303631 - DNA, 15 bp, Homo sapiens
gttttagccaaataa

SEQ ID NO: 1303632 - DNA, 15 bp, Homo sapiens
agttttagccaaata

SEQ ID NO: 1303633 - DNA, 15 bp, Homo sapiens
aagttttagccaaat

SEQ ID NO: 1303634 - DNA, 15 bp, Homo sapiens
gaagttttagccaaa

SEQ ID NO: 1303635 - DNA, 15 bp, Homo sapiens
agaagttttagccaa

SEQ ID NO: 1303636 - DNA, 15 bp, Homo sapiens
aagaagttttagcca

SEQ ID NO: 1303637 - DNA, 15 bp, Homo sapiens
caagaagttttagcc

SEQ ID NO: 1303638 - DNA, 15 bp, Homo sapiens
gcaagaagttttagc

SEQ ID NO: 1303639 - DNA, 15 bp, Homo sapiens
agcaagaagttttag

SEQ ID NO: 1303640 - DNA, 15 bp, Homo sapiens
gagcaagaagtttta

SEQ ID NO: 1303641 - DNA, 15 bp, Homo sapiens
tgagcaagaagtttt

SEQ ID NO: 1303642 - DNA, 15 bp, Homo sapiens
atgagcaagaagttt

SEQ ID NO: 1303643 - DNA, 15 bp, Homo sapiens
tatgagcaagaagtt

SEQ ID NO: 1303644 - DNA, 15 bp, Homo sapiens
ttatgagcaagaagt

SEQ ID NO: 1303645 - DNA, 15 bp, Homo sapiens
cttatgagcaagaag

SEQ ID NO: 1303646 - DNA, 15 bp, Homo sapiens
ccttatgagcaagaa

SEQ ID NO: 1303647 - DNA, 15 bp, Homo sapiens
accttatgagcaaga

SEQ ID NO: 1303648 - DNA, 15 bp, Homo sapiens
gaccttatgagcaag

SEQ ID NO: 1303649 - DNA, 15 bp, Homo sapiens
tgaccttatgagcaa

SEQ ID NO: 1303650 - DNA, 15 bp, Homo sapiens
ctgaccttatgagca

SEQ ID NO: 1303651 - DNA, 15 bp, Homo sapiens
actgaccttatgagc

SEQ ID NO: 1303652 - DNA, 15 bp, Homo sapiens
aactgaccttatgag

SEQ ID NO: 1303653 - DNA, 15 bp, Homo sapiens
aaactgaccttatga

SEQ ID NO: 1303654 - DNA, 15 bp, Homo sapiens
caaactgaccttatg

SEQ ID NO: 1303655 - DNA, 15 bp, Homo sapiens
tcaaactgaccttat

SEQ ID NO: 1303656 - DNA, 15 bp, Homo sapiens
atcaaactgacctta

SEQ ID NO: 1303657 - DNA, 15 bp, Homo sapiens
gatcaaactgacctt

SEQ ID NO: 1303658 - DNA, 15 bp, Homo sapiens
agatcaaactgacct

SEQ ID NO: 1303659 - DNA, 15 bp, Homo sapiens
cagatcaaactgacc

SEQ ID NO: 1303660 - DNA, 15 bp, Homo sapiens
tcagatcaaactgac

SEQ ID NO: 1303661 - DNA, 15 bp, Homo sapiens
atcagatcaaactga

SEQ ID NO: 1303662 - DNA, 15 bp, Homo sapiens
aatcagatcaaactg

SEQ ID NO: 1303663 - DNA, 15 bp, Homo sapiens
aaatcagatcaaact

SEQ ID NO: 1303664 - DNA, 15 bp, Homo sapiens
aaaatcagatcaaac

SEQ ID NO: 1303665 - DNA, 15 bp, Homo sapiens
aaaaatcagatcaaa

SEQ ID NO: 1303666 - DNA, 15 bp, Homo sapiens
caaaaatcagatcaa

SEQ ID NO: 1303667 - DNA, 15 bp, Homo sapiens
gcaaaaatcagatca

SEQ ID NO: 1303668 - DNA, 15 bp, Homo sapiens
ggcaaaaatcagatc

SEQ ID NO: 1303669 - DNA, 15 bp, Homo sapiens
aggcaaaaatcagat

SEQ ID NO: 1303670 - DNA, 15 bp, Homo sapiens
caggcaaaaatcaga

SEQ ID NO: 1303671 - DNA, 15 bp, Homo sapiens
acaggcaaaaatcag

SEQ ID NO: 1303672 - DNA, 15 bp, Homo sapiens
cacaggcaaaaatca

SEQ ID NO: 1303673 - DNA, 15 bp, Homo sapiens
acacaggcaaaaatc

SEQ ID NO: 1303674 - DNA, 15 bp, Homo sapiens
gacacaggcaaaaat

SEQ ID NO: 1303675 - DNA, 15 bp, Homo sapiens
tgacacaggcaaaaa

SEQ ID NO: 1303676 - DNA, 15 bp, Homo sapiens
ctgacacaggcaaaa

SEQ ID NO: 1303677 - DNA, 15 bp, Homo sapiens
actgacacaggcaaa

SEQ ID NO: 1303678 - DNA, 15 bp, Homo sapiens
aactgacacaggcaa

SEQ ID NO: 1303679 - DNA, 15 bp, Homo sapiens
aaactgacacaggca

SEQ ID NO: 1303680 - DNA, 15 bp, Homo sapiens
aaaactgacacaggc

SEQ ID NO: 1303681 - DNA, 15 bp, Homo sapiens
taaaactgacacagg

SEQ ID NO: 1303682 - DNA, 15 bp, Homo sapiens
gtaaaactgacacag

SEQ ID NO: 1303683 - DNA, 15 bp, Homo sapiens
agtaaaactgacaca

SEQ ID NO: 1303684 - DNA, 15 bp, Homo sapiens
tagtaaaactgacac

SEQ ID NO: 1303685 - DNA, 15 bp, Homo sapiens
ttagtaaaactgaca

SEQ ID NO: 1303686 - DNA, 15 bp, Homo sapiens
tttagtaaaactgac

SEQ ID NO: 1303687 - DNA, 15 bp, Homo sapiens
atttagtaaaactga

SEQ ID NO: 1303688 - DNA, 15 bp, Homo sapiens
aatttagtaaaactg

SEQ ID NO: 1303689 - DNA, 15 bp, Homo sapiens
aaatttagtaaaact

SEQ ID NO: 1303690 - DNA, 15 bp, Homo sapiens
taaatttagtaaaac

SEQ ID NO: 1303691 - DNA, 15 bp, Homo sapiens
ataaatttagtaaaa

SEQ ID NO: 1303692 - DNA, 15 bp, Homo sapiens
cataaatttagtaaa

SEQ ID NO: 1303693 - DNA, 15 bp, Homo sapiens
ccataaatttagtaa

SEQ ID NO: 1303694 - DNA, 15 bp, Homo sapiens
tccataaatttagta

SEQ ID NO: 1303695 - DNA, 15 bp, Homo sapiens
gtccataaatttagt

SEQ ID NO: 1303696 - DNA, 15 bp, Homo sapiens
tgtccataaatttag

SEQ ID NO: 1303697 - DNA, 15 bp, Homo sapiens
ttgtccataaattta

SEQ ID NO: 1303698 - DNA, 15 bp, Homo sapiens
tttgtccataaattt

SEQ ID NO: 1303699 - DNA, 15 bp, Homo sapiens
ctttgtccataaatt

SEQ ID NO: 1303700 - DNA, 15 bp, Homo sapiens
tctttgtccataaat

SEQ ID NO: 1303701 - DNA, 15 bp, Homo sapiens
gtctttgtccataaa

SEQ ID NO: 1303702 - DNA, 15 bp, Homo sapiens
agtctttgtccataa

SEQ ID NO: 1303703 - DNA, 15 bp, Homo sapiens
cagtctttgtccata

SEQ ID NO: 1303704 - DNA, 15 bp, Homo sapiens
acagtctttgtccat

SEQ ID NO: 1303705 - DNA, 15 bp, Homo sapiens
gacagtctttgtcca

SEQ ID NO: 1303706 - DNA, 15 bp, Homo sapiens
ggacagtctttgtcc

SEQ ID NO: 1303707 - DNA, 15 bp, Homo sapiens
aggacagtctttgtc

SEQ ID NO: 1303708 - DNA, 15 bp, Homo sapiens
gaggacagtctttgt

SEQ ID NO: 1303709 - DNA, 15 bp, Homo sapiens
agaggacagtctttg

SEQ ID NO: 1303710 - DNA, 15 bp, Homo sapiens
aagaggacagtcttt

SEQ ID NO: 1303711 - DNA, 15 bp, Homo sapiens
taagaggacagtctt

SEQ ID NO: 1303712 - DNA, 15 bp, Homo sapiens
ttaagaggacagtct

SEQ ID NO: 1303713 - DNA, 15 bp, Homo sapiens
attaagaggacagtc

SEQ ID NO: 1303714 - DNA, 15 bp, Homo sapiens
gattaagaggacagt

SEQ ID NO: 1303715 - DNA, 15 bp, Homo sapiens
ggattaagaggacag

SEQ ID NO: 1303716 - DNA, 15 bp, Homo sapiens
aggattaagaggaca

SEQ ID NO: 1303717 - DNA, 15 bp, Homo sapiens
caggattaagaggac

SEQ ID NO: 1303718 - DNA, 15 bp, Homo sapiens
ccaggattaagagga

SEQ ID NO: 1303719 - DNA, 15 bp, Homo sapiens
tccaggattaagagg

SEQ ID NO: 1303720 - DNA, 15 bp, Homo sapiens
gtccaggattaagag

SEQ ID NO: 1303721 - DNA, 15 bp, Homo sapiens
tgtccaggattaaga

SEQ ID NO: 1303722 - DNA, 15 bp, Homo sapiens
ctgtccaggattaag

SEQ ID NO: 1303723 - DNA, 15 bp, Homo sapiens
gctgtccaggattaa

SEQ ID NO: 1303724 - DNA, 15 bp, Homo sapiens
agctgtccaggatta

SEQ ID NO: 1303725 - DNA, 15 bp, Homo sapiens
tagctgtccaggatt

SEQ ID NO: 1303726 - DNA, 15 bp, Homo sapiens
atagctgtccaggat

SEQ ID NO: 1303727 - DNA, 15 bp, Homo sapiens
gatagctgtccagga

SEQ ID NO: 1303728 - DNA, 15 bp, Homo sapiens
agatagctgtccagg

SEQ ID NO: 1303729 - DNA, 15 bp, Homo sapiens
aagatagctgtccag

SEQ ID NO: 1303730 - DNA, 15 bp, Homo sapiens
caagatagctgtcca

SEQ ID NO: 1303731 - DNA, 15 bp, Homo sapiens
tcaagatagctgtcc

SEQ ID NO: 1303732 - DNA, 15 bp, Homo sapiens
ttcaagatagctgtc

SEQ ID NO: 1303733 - DNA, 15 bp, Homo sapiens
tttcaagatagctgt

SEQ ID NO: 1303734 - DNA, 15 bp, Homo sapiens
ttttcaagatagctg

SEQ ID NO: 1303735 - DNA, 15 bp, Homo sapiens
attttcaagatagct

SEQ ID NO: 1303736 - DNA, 15 bp, Homo sapiens
tattttcaagatagc

SEQ ID NO: 1303737 - DNA, 15 bp, Homo sapiens
gtattttcaagatag

SEQ ID NO: 1303738 - DNA, 15 bp, Homo sapiens
tgtattttcaagata

SEQ ID NO: 1303739 - DNA, 15 bp, Homo sapiens
atgtattttcaagat

SEQ ID NO: 1303740 - DNA, 15 bp, Homo sapiens
catgtattttcaaga

SEQ ID NO: 1303741 - DNA, 15 bp, Homo sapiens
acatgtattttcaag

SEQ ID NO: 1303742 - DNA, 15 bp, Homo sapiens
gacatgtattttcaa

SEQ ID NO: 1303743 - DNA, 15 bp, Homo sapiens
ggacatgtattttca

SEQ ID NO: 1303744 - DNA, 15 bp, Homo sapiens
aggacatgtattttc

SEQ ID NO: 1303745 - DNA, 15 bp, Homo sapiens
taggacatgtatttt

SEQ ID NO: 1303746 - DNA, 15 bp, Homo sapiens
ctaggacatgtattt

SEQ ID NO: 1303747 - DNA, 15 bp, Homo sapiens
cctaggacatgtatt

SEQ ID NO: 1303748 - DNA, 15 bp, Homo sapiens
acctaggacatgtat

SEQ ID NO: 1303749 - DNA, 15 bp, Homo sapiens
gacctaggacatgta

SEQ ID NO: 1303750 - DNA, 15 bp, Homo sapiens
tgacctaggacatgt

SEQ ID NO: 1303751 - DNA, 15 bp, Homo sapiens
atgacctaggacatg

SEQ ID NO: 1303752 - DNA, 15 bp, Homo sapiens
catgacctaggacat

SEQ ID NO: 1303753 - DNA, 15 bp, Homo sapiens
tcatgacctaggaca

SEQ ID NO: 1303754 - DNA, 15 bp, Homo sapiens
ctcatgacctaggac

SEQ ID NO: 1303755 - DNA, 15 bp, Homo sapiens
tctcatgacctagga

SEQ ID NO: 1303756 - DNA, 15 bp, Homo sapiens
ttctcatgacctagg

SEQ ID NO: 1303757 - DNA, 15 bp, Homo sapiens
tttctcatgacctag

SEQ ID NO: 1303758 - DNA, 15 bp, Homo sapiens
atttctcatgaccta

SEQ ID NO: 1303759 - DNA, 15 bp, Homo sapiens
catttctcatgacct

SEQ ID NO: 1303760 - DNA, 15 bp, Homo sapiens
acatttctcatgacc

SEQ ID NO: 1303761 - DNA, 15 bp, Homo sapiens
aacatttctcatgac

SEQ ID NO: 1303762 - DNA, 15 bp, Homo sapiens
taacatttctcatga

SEQ ID NO: 1303763 - DNA, 15 bp, Homo sapiens
ataacatttctcatg

SEQ ID NO: 1303764 - DNA, 15 bp, Homo sapiens
tataacatttctcat

SEQ ID NO: 1303765 - DNA, 15 bp, Homo sapiens
atataacatttctca

SEQ ID NO: 1303766 - DNA, 15 bp, Homo sapiens
tatataacatttctc

SEQ ID NO: 1303767 - DNA, 15 bp, Homo sapiens
ttatataacatttct

SEQ ID NO: 1303768 - DNA, 15 bp, Homo sapiens
cttatataacatttc

SEQ ID NO: 1303769 - DNA, 15 bp, Homo sapiens
ccttatataacattt

SEQ ID NO: 1303770 - DNA, 15 bp, Homo sapiens
accttatataacatt

SEQ ID NO: 1303771 - DNA, 15 bp, Homo sapiens
taccttatataacat

SEQ ID NO: 1303772 - DNA, 15 bp, Homo sapiens
gtaccttatataaca

SEQ ID NO: 1303773 - DNA, 15 bp, Homo sapiens
tgtaccttatataac

SEQ ID NO: 1303774 - DNA, 15 bp, Homo sapiens
atgtaccttatataa

SEQ ID NO: 1303775 - DNA, 15 bp, Homo sapiens
tatgtaccttatata

SEQ ID NO: 1303776 - DNA, 15 bp, Homo sapiens
ttatgtaccttatat

SEQ ID NO: 1303777 - DNA, 15 bp, Homo sapiens
tttatgtaccttata

SEQ ID NO: 1303778 - DNA, 15 bp, Homo sapiens
ctttatgtaccttat

SEQ ID NO: 1303779 - DNA, 15 bp, Homo sapiens
actttatgtacctta

SEQ ID NO: 1303780 - DNA, 15 bp, Homo sapiens
cactttatgtacctt

SEQ ID NO: 1303781 - DNA, 15 bp, Homo sapiens
gcactttatgtacct

SEQ ID NO: 1303782 - DNA, 15 bp, Homo sapiens
agcactttatgtacc

SEQ ID NO: 1303783 - DNA, 15 bp, Homo sapiens
aagcactttatgtac

SEQ ID NO: 1303784 - DNA, 15 bp, Homo sapiens
taagcactttatgta

SEQ ID NO: 1303785 - DNA, 15 bp, Homo sapiens
ttaagcactttatgt

SEQ ID NO: 1303786 - DNA, 15 bp, Homo sapiens
tttaagcactttatg

SEQ ID NO: 1303787 - DNA, 15 bp, Homo sapiens
ttttaagcactttat

SEQ ID NO: 1303788 - DNA, 15 bp, Homo sapiens
attttaagcacttta

SEQ ID NO: 1303789 - DNA, 15 bp, Homo sapiens
tattttaagcacttt

SEQ ID NO: 1303790 - DNA, 15 bp, Homo sapiens
ctattttaagcactt

SEQ ID NO: 1303791 - DNA, 15 bp, Homo sapiens
actattttaagcact

SEQ ID NO: 1303792 - DNA, 15 bp, Homo sapiens
tactattttaagcac

SEQ ID NO: 1303793 - DNA, 15 bp, Homo sapiens
gtactattttaagca

SEQ ID NO: 1303794 - DNA, 15 bp, Homo sapiens
agtactattttaagc

SEQ ID NO: 1303795 - DNA, 15 bp, Homo sapiens
cagtactattttaag

SEQ ID NO: 1303796 - DNA, 15 bp, Homo sapiens
ccagtactattttaa

SEQ ID NO: 1303797 - DNA, 15 bp, Homo sapiens
cccagtactatttta

SEQ ID NO: 1303798 - DNA, 15 bp, Homo sapiens
gcccagtactatttt

SEQ ID NO: 1303799 - DNA, 15 bp, Homo sapiens
tgcccagtactattt

SEQ ID NO: 1303800 - DNA, 15 bp, Homo sapiens
gtgcccagtactatt

SEQ ID NO: 1303801 - DNA, 15 bp, Homo sapiens
tgtgcccagtactat

SEQ ID NO: 1303802 - DNA, 15 bp, Homo sapiens
atgtgcccagtacta

SEQ ID NO: 1303803 - DNA, 15 bp, Homo sapiens
tatgtgcccagtact

SEQ ID NO: 1303804 - DNA, 15 bp, Homo sapiens
ttatgtgcccagtac

SEQ ID NO: 1303805 - DNA, 15 bp, Homo sapiens
gttatgtgcccagta

SEQ ID NO: 1303806 - DNA, 15 bp, Homo sapiens
ggttatgtgcccagt

SEQ ID NO: 1303807 - DNA, 15 bp, Homo sapiens
aggttatgtgcccag

SEQ ID NO: 1303808 - DNA, 15 bp, Homo sapiens
taggttatgtgccca

SEQ ID NO: 1303809 - DNA, 15 bp, Homo sapiens
ataggttatgtgccc

SEQ ID NO: 1303810 - DNA, 15 bp, Homo sapiens
gataggttatgtgcc

SEQ ID NO: 1303811 - DNA, 15 bp, Homo sapiens
agataggttatgtgc

SEQ ID NO: 1303812 - DNA, 15 bp, Homo sapiens
aagataggttatgtg

SEQ ID NO: 1303813 - DNA, 15 bp, Homo sapiens
aaagataggttatgt

SEQ ID NO: 1303814 - DNA, 15 bp, Homo sapiens
taaagataggttatg

SEQ ID NO: 1303815 - DNA, 15 bp, Homo sapiens
ctaaagataggttat

SEQ ID NO: 1303816 - DNA, 15 bp, Homo sapiens
actaaagataggtta

SEQ ID NO: 1303817 - DNA, 15 bp, Homo sapiens
tactaaagataggtt

SEQ ID NO: 1303818 - DNA, 15 bp, Homo sapiens
atactaaagataggt

SEQ ID NO: 1303819 - DNA, 15 bp, Homo sapiens
catactaaagatagg

SEQ ID NO: 1303820 - DNA, 15 bp, Homo sapiens
tcatactaaagatag

SEQ ID NO: 1303821 - DNA, 15 bp, Homo sapiens
ttcatactaaagata

SEQ ID NO: 1303822 - DNA, 15 bp, Homo sapiens
attcatactaaagat

SEQ ID NO: 1303823 - DNA, 15 bp, Homo sapiens
cattcatactaaaga

SEQ ID NO: 1303824 - DNA, 15 bp, Homo sapiens
tcattcatactaaag

SEQ ID NO: 1303825 - DNA, 15 bp, Homo sapiens
atcattcatactaaa

SEQ ID NO: 1303826 - DNA, 15 bp, Homo sapiens
tatcattcatactaa

SEQ ID NO: 1303827 - DNA, 15 bp, Homo sapiens
atatcattcatacta

SEQ ID NO: 1303828 - DNA, 15 bp, Homo sapiens
tatatcattcatact

SEQ ID NO: 1303829 - DNA, 15 bp, Homo sapiens
ttatatcattcatac

SEQ ID NO: 1303830 - DNA, 15 bp, Homo sapiens
tttatatcattcata

SEQ ID NO: 1303831 - DNA, 15 bp, Homo sapiens
gtttatatcattcat

SEQ ID NO: 1303832 - DNA, 15 bp, Homo sapiens
agtttatatcattca

SEQ ID NO: 1303833 - DNA, 15 bp, Homo sapiens
cagtttatatcattc

SEQ ID NO: 1303834 - DNA, 15 bp, Homo sapiens
tcagtttatatcatt

SEQ ID NO: 1303835 - DNA, 15 bp, Homo sapiens
ttcagtttatatcat

SEQ ID NO: 1303836 - DNA, 15 bp, Homo sapiens
tttcagtttatatca

SEQ ID NO: 1303837 - DNA, 15 bp, Homo sapiens
atttcagtttatatc

SEQ ID NO: 1303838 - DNA, 15 bp, Homo sapiens
catttcagtttatat

SEQ ID NO: 1303839 - DNA, 15 bp, Homo sapiens
ccatttcagtttata

SEQ ID NO: 1303840 - DNA, 15 bp, Homo sapiens
tccatttcagtttat

SEQ ID NO: 1303841 - DNA, 15 bp, Homo sapiens
ctccatttcagttta

SEQ ID NO: 1303842 - DNA, 15 bp, Homo sapiens
actccatttcagttt

SEQ ID NO: 1303843 - DNA, 15 bp, Homo sapiens
aactccatttcagtt

SEQ ID NO: 1303844 - DNA, 15 bp, Homo sapiens
taactccatttcagt

SEQ ID NO: 1303845 - DNA, 15 bp, Homo sapiens
ttaactccatttcag

SEQ ID NO: 1303846 - DNA, 15 bp, Homo sapiens
cttaactccatttca

SEQ ID NO: 1303847 - DNA, 15 bp, Homo sapiens
ccttaactccatttc

SEQ ID NO: 1303848 - DNA, 15 bp, Homo sapiens
tccttaactccattt

SEQ ID NO: 1303849 - DNA, 15 bp, Homo sapiens
ttccttaactccatt

SEQ ID NO: 1303850 - DNA, 15 bp, Homo sapiens
tttccttaactccat

SEQ ID NO: 1303851 - DNA, 15 bp, Homo sapiens
atttccttaactcca

SEQ ID NO: 1303852 - DNA, 15 bp, Homo sapiens
gatttccttaactcc

SEQ ID NO: 1303853 - DNA, 15 bp, Homo sapiens
ggatttccttaactc

SEQ ID NO: 1303854 - DNA, 15 bp, Homo sapiens
tggatttccttaact

SEQ ID NO: 1303855 - DNA, 15 bp, Homo sapiens
ctggatttccttaac

SEQ ID NO: 1303856 - DNA, 15 bp, Homo sapiens
cctggatttccttaa

SEQ ID NO: 1303857 - DNA, 15 bp, Homo sapiens
acctggatttcctta

SEQ ID NO: 1303858 - DNA, 15 bp, Homo sapiens
tacctggatttcctt

SEQ ID NO: 1303859 - DNA, 15 bp, Homo sapiens
gtacctggatttcct

SEQ ID NO: 1303860 - DNA, 15 bp, Homo sapiens
agtacctggatttcc

SEQ ID NO: 1303861 - DNA, 15 bp, Homo sapiens
cagtacctggatttc

SEQ ID NO: 1303862 - DNA, 15 bp, Homo sapiens
ccagtacctggattt

SEQ ID NO: 1303863 - DNA, 15 bp, Homo sapiens
tccagtacctggatt

SEQ ID NO: 1303864 - DNA, 15 bp, Homo sapiens
gtccagtacctggat

SEQ ID NO: 1303865 - DNA, 15 bp, Homo sapiens
ggtccagtacctgga

SEQ ID NO: 1303866 - DNA, 15 bp, Homo sapiens
aggtccagtacctgg

SEQ ID NO: 1303867 - DNA, 15 bp, Homo sapiens
taggtccagtacctg

SEQ ID NO: 1303868 - DNA, 15 bp, Homo sapiens
gtaggtccagtacct

SEQ ID NO: 1303869 - DNA, 15 bp, Homo sapiens
ggtaggtccagtacc

SEQ ID NO: 1303870 - DNA, 15 bp, Homo sapiens
gggtaggtccagtac

SEQ ID NO: 1303871 - DNA, 15 bp, Homo sapiens
agggtaggtccagta

SEQ ID NO: 1303872 - DNA, 15 bp, Homo sapiens
gagggtaggtccagt

SEQ ID NO: 1303873 - DNA, 15 bp, Homo sapiens
agagggtaggtccag

SEQ ID NO: 1303874 - DNA, 15 bp, Homo sapiens
aagagggtaggtcca

SEQ ID NO: 1303875 - DNA, 15 bp, Homo sapiens
caagagggtaggtcc

SEQ ID NO: 1303876 - DNA, 15 bp, Homo sapiens
acaagagggtaggtc

SEQ ID NO: 1303877 - DNA, 15 bp, Homo sapiens
aacaagagggtaggt

SEQ ID NO: 1303878 - DNA, 15 bp, Homo sapiens
taacaagagggtagg

SEQ ID NO: 1303879 - DNA, 15 bp, Homo sapiens
ttaacaagagggtag

SEQ ID NO: 1303880 - DNA, 15 bp, Homo sapiens
attaacaagagggta

SEQ ID NO: 1303881 - DNA, 15 bp, Homo sapiens
aattaacaagagggt

SEQ ID NO: 1303882 - DNA, 15 bp, Homo sapiens
aaattaacaagaggg

SEQ ID NO: 1303883 - DNA, 15 bp, Homo sapiens
taaattaacaagagg

SEQ ID NO: 1303884 - DNA, 15 bp, Homo sapiens
gtaaattaacaagag

SEQ ID NO: 1303885 - DNA, 15 bp, Homo sapiens
agtaaattaacaaga

SEQ ID NO: 1303886 - DNA, 15 bp, Homo sapiens
aagtaaattaacaag

SEQ ID NO: 1303887 - DNA, 15 bp, Homo sapiens
caagtaaattaacaa

SEQ ID NO: 1303888 - DNA, 15 bp, Homo sapiens
ccaagtaaattaaca

SEQ ID NO: 1303889 - DNA, 15 bp, Homo sapiens
cccaagtaaattaac

SEQ ID NO: 1303890 - DNA, 15 bp, Homo sapiens
tcccaagtaaattaa

SEQ ID NO: 1303891 - DNA, 15 bp, Homo sapiens
ttcccaagtaaatta

SEQ ID NO: 1303892 - DNA, 15 bp, Homo sapiens
attcccaagtaaatt

SEQ ID NO: 1303893 - DNA, 15 bp, Homo sapiens
cattcccaagtaaat

SEQ ID NO: 1303894 - DNA, 15 bp, Homo sapiens
acattcccaagtaaa

SEQ ID NO: 1303895 - DNA, 15 bp, Homo sapiens
aacattcccaagtaa

SEQ ID NO: 1303896 - DNA, 15 bp, Homo sapiens
taacattcccaagta

SEQ ID NO: 1303897 - DNA, 15 bp, Homo sapiens
ttaacattcccaagt

SEQ ID NO: 1303898 - DNA, 15 bp, Homo sapiens
attaacattcccaag

SEQ ID NO: 1303899 - DNA, 15 bp, Homo sapiens
gattaacattcccaa

SEQ ID NO: 1303900 - DNA, 15 bp, Homo sapiens
tgattaacattccca

SEQ ID NO: 1303901 - DNA, 15 bp, Homo sapiens
gtgattaacattccc

SEQ ID NO: 1303902 - DNA, 15 bp, Homo sapiens
ggtgattaacattcc

SEQ ID NO: 1303903 - DNA, 15 bp, Homo sapiens
tggtgattaacattc

SEQ ID NO: 1303904 - DNA, 15 bp, Homo sapiens
gtggtgattaacatt

SEQ ID NO: 1303905 - DNA, 15 bp, Homo sapiens
agtggtgattaacat

SEQ ID NO: 1303906 - DNA, 15 bp, Homo sapiens
aagtggtgattaaca

SEQ ID NO: 1303907 - DNA, 15 bp, Homo sapiens
taagtggtgattaac

SEQ ID NO: 1303908 - DNA, 15 bp, Homo sapiens
ttaagtggtgattaa

SEQ ID NO: 1303909 - DNA, 15 bp, Homo sapiens
attaagtggtgatta

SEQ ID NO: 1303910 - DNA, 15 bp, Homo sapiens
tattaagtggtgatt

SEQ ID NO: 1303911 - DNA, 15 bp, Homo sapiens
gtattaagtggtgat

SEQ ID NO: 1303912 - DNA, 15 bp, Homo sapiens
agtattaagtggtga

SEQ ID NO: 1303913 - DNA, 15 bp, Homo sapiens
aagtattaagtggtg

SEQ ID NO: 1303914 - DNA, 15 bp, Homo sapiens
taagtattaagtggt

SEQ ID NO: 1303915 - DNA, 15 bp, Homo sapiens
ttaagtattaagtgg

SEQ ID NO: 1303916 - DNA, 15 bp, Homo sapiens
cttaagtattaagtg

SEQ ID NO: 1303917 - DNA, 15 bp, Homo sapiens
acttaagtattaagt

SEQ ID NO: 1303918 - DNA, 15 bp, Homo sapiens
aacttaagtattaag

SEQ ID NO: 1303919 - DNA, 15 bp, Homo sapiens
caacttaagtattaa

SEQ ID NO: 1303920 - DNA, 15 bp, Homo sapiens
acaacttaagtatta

SEQ ID NO: 1303921 - DNA, 15 bp, Homo sapiens
cacaacttaagtatt

SEQ ID NO: 1303922 - DNA, 15 bp, Homo sapiens
tcacaacttaagtat

SEQ ID NO: 1303923 - DNA, 15 bp, Homo sapiens
ctcacaacttaagta

SEQ ID NO: 1303924 - DNA, 15 bp, Homo sapiens
actcacaacttaagt

SEQ ID NO: 1303925 - DNA, 15 bp, Homo sapiens
aactcacaacttaag

SEQ ID NO: 1303926 - DNA, 15 bp, Homo sapiens
aaactcacaacttaa

SEQ ID NO: 1303927 - DNA, 15 bp, Homo sapiens
aaaactcacaactta

SEQ ID NO: 1303928 - DNA, 15 bp, Homo sapiens
taaaactcacaactt

SEQ ID NO: 1303929 - DNA, 15 bp, Homo sapiens
ctaaaactcacaact

SEQ ID NO: 1303930 - DNA, 15 bp, Homo sapiens
tctaaaactcacaac

SEQ ID NO: 1303931 - DNA, 15 bp, Homo sapiens
gtctaaaactcacaa

SEQ ID NO: 1303932 - DNA, 15 bp, Homo sapiens
tgtctaaaactcaca

SEQ ID NO: 1303933 - DNA, 15 bp, Homo sapiens
ttgtctaaaactcac

SEQ ID NO: 1303934 - DNA, 15 bp, Homo sapiens
cttgtctaaaactca

SEQ ID NO: 1303935 - DNA, 15 bp, Homo sapiens
gcttgtctaaaactc

SEQ ID NO: 1303936 - DNA, 15 bp, Homo sapiens
agcttgtctaaaact

SEQ ID NO: 1303937 - DNA, 15 bp, Homo sapiens
tagcttgtctaaaac

SEQ ID NO: 1303938 - DNA, 15 bp, Homo sapiens
ctagcttgtctaaaa

SEQ ID NO: 1303939 - DNA, 15 bp, Homo sapiens
gctagcttgtctaaa

SEQ ID NO: 1303940 - DNA, 15 bp, Homo sapiens
agctagcttgtctaa

SEQ ID NO: 1303941 - DNA, 15 bp, Homo sapiens
aagctagcttgtcta

SEQ ID NO: 1303942 - DNA, 15 bp, Homo sapiens
aaagctagcttgtct

SEQ ID NO: 1303943 - DNA, 15 bp, Homo sapiens
aaaagctagcttgtc

SEQ ID NO: 1303944 - DNA, 15 bp, Homo sapiens
caaaagctagcttgt

SEQ ID NO: 1303945 - DNA, 15 bp, Homo sapiens
acaaaagctagcttg

SEQ ID NO: 1303946 - DNA, 15 bp, Homo sapiens
cacaaaagctagctt

SEQ ID NO: 1303947 - DNA, 15 bp, Homo sapiens
acacaaaagctagct

SEQ ID NO: 1303948 - DNA, 15 bp, Homo sapiens
aacacaaaagctagc

SEQ ID NO: 1303949 - DNA, 15 bp, Homo sapiens
caacacaaaagctag

SEQ ID NO: 1303950 - DNA, 15 bp, Homo sapiens
acaacacaaaagcta

SEQ ID NO: 1303951 - DNA, 15 bp, Homo sapiens
gacaacacaaaagct

SEQ ID NO: 1303952 - DNA, 15 bp, Homo sapiens
agacaacacaaaagc

SEQ ID NO: 1303953 - DNA, 15 bp, Homo sapiens
aagacaacacaaaag

SEQ ID NO: 1303954 - DNA, 15 bp, Homo sapiens
caagacaacacaaaa

SEQ ID NO: 1303955 - DNA, 15 bp, Homo sapiens
ccaagacaacacaaa

SEQ ID NO: 1303956 - DNA, 15 bp, Homo sapiens
gccaagacaacacaa

SEQ ID NO: 1303957 - DNA, 15 bp, Homo sapiens
cgccaagacaacaca

SEQ ID NO: 1303958 - DNA, 15 bp, Homo sapiens
ccgccaagacaacac

SEQ ID NO: 1303959 - DNA, 15 bp, Homo sapiens
gccgccaagacaaca

SEQ ID NO: 1303960 - DNA, 15 bp, Homo sapiens
ggccgccaagacaac

SEQ ID NO: 1303961 - DNA, 15 bp, Homo sapiens
tggccgccaagacaa

SEQ ID NO: 1303962 - DNA, 15 bp, Homo sapiens
atggccgccaagaca

SEQ ID NO: 1303963 - DNA, 15 bp, Homo sapiens
tatggccgccaagac

SEQ ID NO: 1303964 - DNA, 15 bp, Homo sapiens
atatggccgccaaga

SEQ ID NO: 1303965 - DNA, 15 bp, Homo sapiens
aatatggccgccaag

SEQ ID NO: 1303966 - DNA, 15 bp, Homo sapiens
aaatatggccgccaa

SEQ ID NO: 1303967 - DNA, 15 bp, Homo sapiens
caaatatggccgcca

SEQ ID NO: 1303968 - DNA, 15 bp, Homo sapiens
acaaatatggccgcc

SEQ ID NO: 1303969 - DNA, 15 bp, Homo sapiens
tacaaatatggccgc

SEQ ID NO: 1303970 - DNA, 15 bp, Homo sapiens
ttacaaatatggccg

SEQ ID NO: 1303971 - DNA, 15 bp, Homo sapiens
cttacaaatatggcc

SEQ ID NO: 1303972 - DNA, 15 bp, Homo sapiens
tcttacaaatatggc

SEQ ID NO: 1303973 - DNA, 15 bp, Homo sapiens
ttcttacaaatatgg

SEQ ID NO: 1303974 - DNA, 15 bp, Homo sapiens
cttcttacaaatatg

SEQ ID NO: 1303975 - DNA, 15 bp, Homo sapiens
ccttcttacaaatat

SEQ ID NO: 1303976 - DNA, 15 bp, Homo sapiens
cccttcttacaaata

SEQ ID NO: 1303977 - DNA, 15 bp, Homo sapiens
acccttcttacaaat

SEQ ID NO: 1303978 - DNA, 15 bp, Homo sapiens
cacccttcttacaaa

SEQ ID NO: 1303979 - DNA, 15 bp, Homo sapiens
tcacccttcttacaa

SEQ ID NO: 1303980 - DNA, 15 bp, Homo sapiens
ctcacccttcttaca

SEQ ID NO: 1303981 - DNA, 15 bp, Homo sapiens
tctcacccttcttac

SEQ ID NO: 1303982 - DNA, 15 bp, Homo sapiens
ttctcacccttctta

SEQ ID NO: 1303983 - DNA, 15 bp, Homo sapiens
cttctcacccttctt

SEQ ID NO: 1303984 - DNA, 15 bp, Homo sapiens
acttctcacccttct

SEQ ID NO: 1303985 - DNA, 15 bp, Homo sapiens
tacttctcacccttc

SEQ ID NO: 1303986 - DNA, 15 bp, Homo sapiens
atacttctcaccctt

SEQ ID NO: 1303987 - DNA, 15 bp, Homo sapiens
catacttctcaccct

SEQ ID NO: 1303988 - DNA, 15 bp, Homo sapiens
acatacttctcaccc

SEQ ID NO: 1303989 - DNA, 15 bp, Homo sapiens
aacatacttctcacc

SEQ ID NO: 1303990 - DNA, 15 bp, Homo sapiens
aaacatacttctcac

SEQ ID NO: 1303991 - DNA, 15 bp, Homo sapiens
aaaacatacttctca

SEQ ID NO: 1303992 - DNA, 15 bp, Homo sapiens
taaaacatacttctc

SEQ ID NO: 1303993 - DNA, 15 bp, Homo sapiens
ttaaaacatacttct

SEQ ID NO: 1303994 - DNA, 15 bp, Homo sapiens
cttaaaacatacttc

SEQ ID NO: 1303995 - DNA, 15 bp, Homo sapiens
tcttaaaacatactt

SEQ ID NO: 1303996 - DNA, 15 bp, Homo sapiens
ttcttaaaacatact

SEQ ID NO: 1303997 - DNA, 15 bp, Homo sapiens
tttcttaaaacatac

SEQ ID NO: 1303998 - DNA, 15 bp, Homo sapiens
ttttcttaaaacata

SEQ ID NO: 1303999 - DNA, 15 bp, Homo sapiens
ccttttcttaaaaca

SEQ ID NO: 1304000 - DNA, 15 bp, Homo sapiens
gccttttcttaaaac

SEQ ID NO: 1304001 - DNA, 15 bp, Homo sapiens
agccttttcttaaaa

SEQ ID NO: 1304002 - DNA, 15 bp, Homo sapiens
aagccttttcttaaa

SEQ ID NO: 1304003 - DNA, 15 bp, Homo sapiens
aaagccttttcttaa

SEQ ID NO: 1304004 - DNA, 15 bp, Homo sapiens
aaaagccttttctta

SEQ ID NO: 1304005 - DNA, 15 bp, Homo sapiens
aaaaagccttttctt

SEQ ID NO: 1304006 - DNA, 15 bp, Homo sapiens
taaaaagccttttct

SEQ ID NO: 1304007 - DNA, 15 bp, Homo sapiens
ttaaaaagccttttc

SEQ ID NO: 1304008 - DNA, 15 bp, Homo sapiens
tttaaaaagcctttt

SEQ ID NO: 1304009 - DNA, 15 bp, Homo sapiens
ttttaaaaagccttt

SEQ ID NO: 1304010 - DNA, 15 bp, Homo sapiens
tttttaaaaagcctt

SEQ ID NO: 1304011 - DNA, 15 bp, Homo sapiens
ttttttaaaaagcct

SEQ ID NO: 1304012 - DNA, 15 bp, Homo sapiens
attttttaaaaagcc

SEQ ID NO: 1304013 - DNA, 15 bp, Homo sapiens
aattttttaaaaagc

SEQ ID NO: 1304014 - DNA, 15 bp, Homo sapiens
aaattttttaaaaag

SEQ ID NO: 1304015 - DNA, 15 bp, Homo sapiens
aaaattttttaaaaa

SEQ ID NO: 1304016 - DNA, 15 bp, Homo sapiens
taaaattttttaaaa

SEQ ID NO: 1304017 - DNA, 15 bp, Homo sapiens
ctaaaattttttaaa

SEQ ID NO: 1304018 - DNA, 15 bp, Homo sapiens
actaaaattttttaa

SEQ ID NO: 1304019 - DNA, 15 bp, Homo sapiens
ttactaaaatttttt

SEQ ID NO: 1304020 - DNA, 15 bp, Homo sapiens
attactaaaattttt

SEQ ID NO: 1304021 - DNA, 15 bp, Homo sapiens
aattactaaaatttt

SEQ ID NO: 1304022 - DNA, 15 bp, Homo sapiens
caattactaaaattt

SEQ ID NO: 1304023 - DNA, 15 bp, Homo sapiens
acaattactaaaatt

SEQ ID NO: 1304024 - DNA, 15 bp, Homo sapiens
gacaattactaaaat

SEQ ID NO: 1304025 - DNA, 15 bp, Homo sapiens
tgacaattactaaaa

SEQ ID NO: 1304026 - DNA, 15 bp, Homo sapiens
ctgacaattactaaa

SEQ ID NO: 1304027 - DNA, 15 bp, Homo sapiens
gctgacaattactaa

SEQ ID NO: 1304028 - DNA, 15 bp, Homo sapiens
agctgacaattacta

SEQ ID NO: 1304029 - DNA, 15 bp, Homo sapiens
cagctgacaattact

SEQ ID NO: 1304030 - DNA, 15 bp, Homo sapiens
ccagctgacaattac

SEQ ID NO: 1304031 - DNA, 15 bp, Homo sapiens
cccagctgacaatta

SEQ ID NO: 1304032 - DNA, 15 bp, Homo sapiens
acccagctgacaatt

SEQ ID NO: 1304033 - DNA, 15 bp, Homo sapiens
tacccagctgacaat

SEQ ID NO: 1304034 - DNA, 15 bp, Homo sapiens
atacccagctgacaa

SEQ ID NO: 1304035 - DNA, 15 bp, Homo sapiens
tatacccagctgaca

SEQ ID NO: 1304036 - DNA, 15 bp, Homo sapiens
ctatacccagctgac

SEQ ID NO: 1304037 - DNA, 15 bp, Homo sapiens
actatacccagctga

SEQ ID NO: 1304038 - DNA, 15 bp, Homo sapiens
cactatacccagctg

SEQ ID NO: 1304039 - DNA, 15 bp, Homo sapiens
ccactatacccagct

SEQ ID NO: 1304040 - DNA, 15 bp, Homo sapiens
accactatacccagc

SEQ ID NO: 1304041 - DNA, 15 bp, Homo sapiens
taccactatacccag

SEQ ID NO: 1304042 - DNA, 15 bp, Homo sapiens
gtaccactataccca

SEQ ID NO: 1304043 - DNA, 15 bp, Homo sapiens
tgtaccactataccc

SEQ ID NO: 1304044 - DNA, 15 bp, Homo sapiens
atgtaccactatacc

SEQ ID NO: 1304045 - DNA, 15 bp, Homo sapiens
catgtaccactatac

SEQ ID NO: 1304046 - DNA, 15 bp, Homo sapiens
gcatgtaccactata

SEQ ID NO: 1304047 - DNA, 15 bp, Homo sapiens
ggcatgtaccactat

SEQ ID NO: 1304048 - DNA, 15 bp, Homo sapiens
aggcatgtaccacta

SEQ ID NO: 1304049 - DNA, 15 bp, Homo sapiens
taggcatgtaccact

SEQ ID NO: 1304050 - DNA, 15 bp, Homo sapiens
ataggcatgtaccac

SEQ ID NO: 1304051 - DNA, 15 bp, Homo sapiens
tataggcatgtacca

SEQ ID NO: 1304052 - DNA, 15 bp, Homo sapiens
ttataggcatgtacc

SEQ ID NO: 1304053 - DNA, 15 bp, Homo sapiens
attataggcatgtac

SEQ ID NO: 1304054 - DNA, 15 bp, Homo sapiens
gattataggcatgta

SEQ ID NO: 1304055 - DNA, 15 bp, Homo sapiens
ggctgggattatagg

SEQ ID NO: 1304056 - DNA, 15 bp, Homo sapiens
aggctgggattatag

SEQ ID NO: 1304057 - DNA, 15 bp, Homo sapiens
gaggctgggattata

SEQ ID NO: 1304058 - DNA, 15 bp, Homo sapiens
agaggctgggattat

SEQ ID NO: 1304059 - DNA, 15 bp, Homo sapiens
aagaggctgggatta

SEQ ID NO: 1304060 - DNA, 15 bp, Homo sapiens
caagaggctgggatt

SEQ ID NO: 1304061 - DNA, 15 bp, Homo sapiens
ccaagaggctgggat

SEQ ID NO: 1304062 - DNA, 15 bp, Homo sapiens
cccaagaggctggga

SEQ ID NO: 1304063 - DNA, 15 bp, Homo sapiens
tcccaagaggctggg

SEQ ID NO: 1304064 - DNA, 15 bp, Homo sapiens
ctcccaagaggctgg

SEQ ID NO: 1304065 - DNA, 15 bp, Homo sapiens
cctcccaagaggctg

SEQ ID NO: 1304066 - DNA, 15 bp, Homo sapiens
gcctcccaagaggct

SEQ ID NO: 1304067 - DNA, 15 bp, Homo sapiens
ggcctcccaagaggc

SEQ ID NO: 1304068 - DNA, 15 bp, Homo sapiens
tggcctcccaagagg

SEQ ID NO: 1304069 - DNA, 15 bp, Homo sapiens
ttggcctcccaagag

SEQ ID NO: 1304070 - DNA, 15 bp, Homo sapiens
tttggcctcccaaga

SEQ ID NO: 1304071 - DNA, 15 bp, Homo sapiens
ctttggcctcccaag

SEQ ID NO: 1304072 - DNA, 15 bp, Homo sapiens
tcctgctttggcctc

SEQ ID NO: 1304073 - DNA, 15 bp, Homo sapiens
ctcctgctttggcct

SEQ ID NO: 1304074 - DNA, 15 bp, Homo sapiens
cctcctgctttggcc

SEQ ID NO: 1304075 - DNA, 15 bp, Homo sapiens
tcctcctgctttggc

SEQ ID NO: 1304076 - DNA, 15 bp, Homo sapiens
atcctcctgctttgg

SEQ ID NO: 1304077 - DNA, 15 bp, Homo sapiens
gatcctcctgctttg

SEQ ID NO: 1304078 - DNA, 15 bp, Homo sapiens
agatcctcctgcttt

SEQ ID NO: 1304079 - DNA, 15 bp, Homo sapiens
gagatcctcctgctt

SEQ ID NO: 1304080 - DNA, 15 bp, Homo sapiens
agagatcctcctgct

SEQ ID NO: 1304081 - DNA, 15 bp, Homo sapiens
aagagatcctcctgc

SEQ ID NO: 1304082 - DNA, 15 bp, Homo sapiens
caagagatcctcctg

SEQ ID NO: 1304083 - DNA, 15 bp, Homo sapiens
tcaagagatcctcct

SEQ ID NO: 1304084 - DNA, 15 bp, Homo sapiens
ctgggctcaagagat

SEQ ID NO: 1304085 - DNA, 15 bp, Homo sapiens
cctgggctcaagaga

SEQ ID NO: 1304086 - DNA, 15 bp, Homo sapiens
tcctgggctcaagag

SEQ ID NO: 1304087 - DNA, 15 bp, Homo sapiens
ctcctgggctcaaga

SEQ ID NO: 1304088 - DNA, 15 bp, Homo sapiens
cactcctgggctcaa

SEQ ID NO: 1304089 - DNA, 15 bp, Homo sapiens
acactcctgggctca

SEQ ID NO: 1304090 - DNA, 15 bp, Homo sapiens
cacactcctgggctc

SEQ ID NO: 1304091 - DNA, 15 bp, Homo sapiens
tcacactcctgggct

SEQ ID NO: 1304092 - DNA, 15 bp, Homo sapiens
ttcacactcctgggc

SEQ ID NO: 1304093 - DNA, 15 bp, Homo sapiens
cttcacactcctggg

SEQ ID NO: 1304094 - DNA, 15 bp, Homo sapiens
ccttcacactcctgg

SEQ ID NO: 1304095 - DNA, 15 bp, Homo sapiens
gccttcacactcctg

SEQ ID NO: 1304096 - DNA, 15 bp, Homo sapiens
ggccttcacactcct

SEQ ID NO: 1304097 - DNA, 15 bp, Homo sapiens
tggccttcacactcc

SEQ ID NO: 1304098 - DNA, 15 bp, Homo sapiens
ctggccttcacactc

SEQ ID NO: 1304099 - DNA, 15 bp, Homo sapiens
gctggccttcacact

SEQ ID NO: 1304100 - DNA, 15 bp, Homo sapiens
ggctggccttcacac

SEQ ID NO: 1304101 - DNA, 15 bp, Homo sapiens
aggctggccttcaca

SEQ ID NO: 1304102 - DNA, 15 bp, Homo sapiens
caggctggccttcac

SEQ ID NO: 1304103 - DNA, 15 bp, Homo sapiens
ccaggctggccttca

SEQ ID NO: 1304104 - DNA, 15 bp, Homo sapiens
cccaggctggccttc

SEQ ID NO: 1304105 - DNA, 15 bp, Homo sapiens
gcccaggctggcctt

SEQ ID NO: 1304106 - DNA, 15 bp, Homo sapiens
tttgcccaggctggc

SEQ ID NO: 1304107 - DNA, 15 bp, Homo sapiens
gttttgcccaggctg

SEQ ID NO: 1304108 - DNA, 15 bp, Homo sapiens
tgttttgcccaggct

SEQ ID NO: 1304109 - DNA, 15 bp, Homo sapiens
ctgttttgcccaggc

SEQ ID NO: 1304110 - DNA, 15 bp, Homo sapiens
actgttttgcccagg

SEQ ID NO: 1304111 - DNA, 15 bp, Homo sapiens
cactgttttgcccag

SEQ ID NO: 1304112 - DNA, 15 bp, Homo sapiens
tcactgttttgccca

SEQ ID NO: 1304113 - DNA, 15 bp, Homo sapiens
ctcactgttttgccc

SEQ ID NO: 1304114 - DNA, 15 bp, Homo sapiens
tctcactgttttgcc

SEQ ID NO: 1304115 - DNA, 15 bp, Homo sapiens
gtctcactgttttgc

SEQ ID NO: 1304116 - DNA, 15 bp, Homo sapiens
agtctcactgttttg

SEQ ID NO: 1304117 - DNA, 15 bp, Homo sapiens
gagtctcactgtttt

SEQ ID NO: 1304118 - DNA, 15 bp, Homo sapiens
ggagtctcactgttt

SEQ ID NO: 1304119 - DNA, 15 bp, Homo sapiens
tggagtctcactgtt

SEQ ID NO: 1304120 - DNA, 15 bp, Homo sapiens
atggagtctcactgt

SEQ ID NO: 1304121 - DNA, 15 bp, Homo sapiens
gatggagtctcactg

SEQ ID NO: 1304122 - DNA, 15 bp, Homo sapiens
atgaaattttttttt

SEQ ID NO: 1304123 - DNA, 15 bp, Homo sapiens
tatgaaatttttttt

SEQ ID NO: 1304124 - DNA, 15 bp, Homo sapiens
ttatgaaattttttt

SEQ ID NO: 1304125 - DNA, 15 bp, Homo sapiens
attatgaaatttttt

SEQ ID NO: 1304126 - DNA, 15 bp, Homo sapiens
aattatgaaattttt

SEQ ID NO: 1304127 - DNA, 15 bp, Homo sapiens
caattatgaaatttt

SEQ ID NO: 1304128 - DNA, 15 bp, Homo sapiens
acaattatgaaattt

SEQ ID NO: 1304129 - DNA, 15 bp, Homo sapiens
cacaattatgaaatt

SEQ ID NO: 1304130 - DNA, 15 bp, Homo sapiens
tcacaattatgaaat

SEQ ID NO: 1304131 - DNA, 15 bp, Homo sapiens
atcacaattatgaaa

SEQ ID NO: 1304132 - DNA, 15 bp, Homo sapiens
aatcacaattatgaa

SEQ ID NO: 1304133 - DNA, 15 bp, Homo sapiens
aaatcacaattatga

SEQ ID NO: 1304134 - DNA, 15 bp, Homo sapiens
aaaatcacaattatg

SEQ ID NO: 1304135 - DNA, 15 bp, Homo sapiens
gaaaatcacaattat

SEQ ID NO: 1304136 - DNA, 15 bp, Homo sapiens
agaaaatcacaatta

SEQ ID NO: 1304137 - DNA, 15 bp, Homo sapiens
tagaaaatcacaatt

SEQ ID NO: 1304138 - DNA, 15 bp, Homo sapiens
ttagaaaatcacaat

SEQ ID NO: 1304139 - DNA, 15 bp, Homo sapiens
tttagaaaatcacaa

SEQ ID NO: 1304140 - DNA, 15 bp, Homo sapiens
ttttagaaaatcaca

SEQ ID NO: 1304141 - DNA, 15 bp, Homo sapiens
attttagaaaatcac

SEQ ID NO: 1304142 - DNA, 15 bp, Homo sapiens
tattttagaaaatca

SEQ ID NO: 1304143 - DNA, 15 bp, Homo sapiens
ctattttagaaaatc

SEQ ID NO: 1304144 - DNA, 15 bp, Homo sapiens
gctattttagaaaat

SEQ ID NO: 1304145 - DNA, 15 bp, Homo sapiens
tgctattttagaaaa

SEQ ID NO: 1304146 - DNA, 15 bp, Homo sapiens
ctgctattttagaaa

SEQ ID NO: 1304147 - DNA, 15 bp, Homo sapiens
cctgctattttagaa

SEQ ID NO: 1304148 - DNA, 15 bp, Homo sapiens
gcctgctattttaga

SEQ ID NO: 1304149 - DNA, 15 bp, Homo sapiens
agcctgctattttag

SEQ ID NO: 1304150 - DNA, 15 bp, Homo sapiens
gagcctgctatttta

SEQ ID NO: 1304151 - DNA, 15 bp, Homo sapiens
agagcctgctatttt

SEQ ID NO: 1304152 - DNA, 15 bp, Homo sapiens
aagagcctgctattt

SEQ ID NO: 1304153 - DNA, 15 bp, Homo sapiens
taagagcctgctatt

SEQ ID NO: 1304154 - DNA, 15 bp, Homo sapiens
ataagagcctgctat

SEQ ID NO: 1304155 - DNA, 15 bp, Homo sapiens
aataagagcctgcta

SEQ ID NO: 1304156 - DNA, 15 bp, Homo sapiens
aaataagagcctgct

SEQ ID NO: 1304157 - DNA, 15 bp, Homo sapiens
aaaataagagcctgc

SEQ ID NO: 1304158 - DNA, 15 bp, Homo sapiens
aaaaataagagcctg

SEQ ID NO: 1304159 - DNA, 15 bp, Homo sapiens
gaaaaataagagcct

SEQ ID NO: 1304160 - DNA, 15 bp, Homo sapiens
agaaaaataagagcc

SEQ ID NO: 1304161 - DNA, 15 bp, Homo sapiens
aagaaaaataagagc

SEQ ID NO: 1304162 - DNA, 15 bp, Homo sapiens
aaagaaaaataagag

SEQ ID NO: 1304163 - DNA, 15 bp, Homo sapiens
caaaaagaaaaataa

SEQ ID NO: 1304164 - DNA, 15 bp, Homo sapiens
acaaaaagaaaaata

SEQ ID NO: 1304165 - DNA, 15 bp, Homo sapiens
aacaaaaagaaaaat

SEQ ID NO: 1304166 - DNA, 15 bp, Homo sapiens
aaacaaaaagaaaaa

SEQ ID NO: 1304167 - DNA, 15 bp, Homo sapiens
caaacaaaaagaaaa

SEQ ID NO: 1304168 - DNA, 15 bp, Homo sapiens
acaaacaaaaagaaa

SEQ ID NO: 1304169 - DNA, 15 bp, Homo sapiens
aacaaacaaaaagaa

SEQ ID NO: 1304170 - DNA, 15 bp, Homo sapiens
aaacaaacaaaaaga

SEQ ID NO: 1304171 - DNA, 15 bp, Homo sapiens
tacaaacaaacaaaa

SEQ ID NO: 1304172 - DNA, 15 bp, Homo sapiens
ctacaaacaaacaaa

SEQ ID NO: 1304173 - DNA, 15 bp, Homo sapiens
gctacaaacaaacaa

SEQ ID NO: 1304174 - DNA, 15 bp, Homo sapiens
cgctacaaacaaaca

SEQ ID NO: 1304175 - DNA, 15 bp, Homo sapiens
tcgctacaaacaaac

SEQ ID NO: 1304176 - DNA, 15 bp, Homo sapiens
atcgctacaaacaaa

SEQ ID NO: 1304177 - DNA, 15 bp, Homo sapiens
tatcgctacaaacaa

SEQ ID NO: 1304178 - DNA, 15 bp, Homo sapiens
gtatcgctacaaaca

SEQ ID NO: 1304179 - DNA, 15 bp, Homo sapiens
tgtatcgctacaaac

SEQ ID NO: 1304180 - DNA, 15 bp, Homo sapiens
ttgtatcgctacaaa

SEQ ID NO: 1304181 - DNA, 15 bp, Homo sapiens
tttgtatcgctacaa

SEQ ID NO: 1304182 - DNA, 15 bp, Homo sapiens
gtttgtatcgctaca

SEQ ID NO: 1304183 - DNA, 15 bp, Homo sapiens
agtttgtatcgctac

SEQ ID NO: 1304184 - DNA, 15 bp, Homo sapiens
aagtttgtatcgcta

SEQ ID NO: 1304185 - DNA, 15 bp, Homo sapiens
caagtttgtatcgct

SEQ ID NO: 1304186 - DNA, 15 bp, Homo sapiens
ccaagtttgtatcgc

SEQ ID NO: 1304187 - DNA, 15 bp, Homo sapiens
tccaagtttgtatcg

SEQ ID NO: 1304188 - DNA, 15 bp, Homo sapiens
ctccaagtttgtatc

SEQ ID NO: 1304189 - DNA, 15 bp, Homo sapiens
actccaagtttgtat

SEQ ID NO: 1304190 - DNA, 15 bp, Homo sapiens
aactccaagtttgta

SEQ ID NO: 1304191 - DNA, 15 bp, Homo sapiens
gaactccaagtttgt

SEQ ID NO: 1304192 - DNA, 15 bp, Homo sapiens
cgaactccaagtttg

SEQ ID NO: 1304193 - DNA, 15 bp, Homo sapiens
gcgaactccaagttt

SEQ ID NO: 1304194 - DNA, 15 bp, Homo sapiens
agcgaactccaagtt

SEQ ID NO: 1304195 - DNA, 15 bp, Homo sapiens
aagcgaactccaagt

SEQ ID NO: 1304196 - DNA, 15 bp, Homo sapiens
caagcgaactccaag

SEQ ID NO: 1304197 - DNA, 15 bp, Homo sapiens
acaagcgaactccaa

SEQ ID NO: 1304198 - DNA, 15 bp, Homo sapiens
tacaagcgaactcca

SEQ ID NO: 1304199 - DNA, 15 bp, Homo sapiens
atacaagcgaactcc

SEQ ID NO: 1304200 - DNA, 15 bp, Homo sapiens
aatacaagcgaactc

SEQ ID NO: 1304201 - DNA, 15 bp, Homo sapiens
taatacaagcgaact

SEQ ID NO: 1304202 - DNA, 15 bp, Homo sapiens
gtaatacaagcgaac

SEQ ID NO: 1304203 - DNA, 15 bp, Homo sapiens
ggtaatacaagcgaa

SEQ ID NO: 1304204 - DNA, 15 bp, Homo sapiens
cggtaatacaagcga

SEQ ID NO: 1304205 - DNA, 15 bp, Homo sapiens
tcggtaatacaagcg

SEQ ID NO: 1304206 - DNA, 15 bp, Homo sapiens
ctcggtaatacaagc

SEQ ID NO: 1304207 - DNA, 15 bp, Homo sapiens
actcggtaatacaag

SEQ ID NO: 1304208 - DNA, 15 bp, Homo sapiens
tactcggtaatacaa

SEQ ID NO: 1304209 - DNA, 15 bp, Homo sapiens
ttactcggtaataca

SEQ ID NO: 1304210 - DNA, 15 bp, Homo sapiens
attactcggtaatac

SEQ ID NO: 1304211 - DNA, 15 bp, Homo sapiens
cattactcggtaata

SEQ ID NO: 1304212 - DNA, 15 bp, Homo sapiens
ccattactcggtaat

SEQ ID NO: 1304213 - DNA, 15 bp, Homo sapiens
tccattactcggtaa

SEQ ID NO: 1304214 - DNA, 15 bp, Homo sapiens
ttccattactcggta

SEQ ID NO: 1304215 - DNA, 15 bp, Homo sapiens
attccattactcggt

SEQ ID NO: 1304216 - DNA, 15 bp, Homo sapiens
gattccattactcgg

SEQ ID NO: 1304217 - DNA, 15 bp, Homo sapiens
ggattccattactcg

SEQ ID NO: 1304218 - DNA, 15 bp, Homo sapiens
tggattccattactc

SEQ ID NO: 1304219 - DNA, 15 bp, Homo sapiens
atggattccattact

SEQ ID NO: 1304220 - DNA, 15 bp, Homo sapiens
catggattccattac

SEQ ID NO: 1304221 - DNA, 15 bp, Homo sapiens
gcatggattccatta

SEQ ID NO: 1304222 - DNA, 15 bp, Homo sapiens
agcatggattccatt

SEQ ID NO: 1304223 - DNA, 15 bp, Homo sapiens
aagcatggattccat

SEQ ID NO: 1304224 - DNA, 15 bp, Homo sapiens
taagcatggattcca

SEQ ID NO: 1304225 - DNA, 15 bp, Homo sapiens
ttaagcatggattcc

SEQ ID NO: 1304226 - DNA, 15 bp, Homo sapiens
tttaagcatggattc

SEQ ID NO: 1304227 - DNA, 15 bp, Homo sapiens
atttaagcatggatt

SEQ ID NO: 1304228 - DNA, 15 bp, Homo sapiens
gatttaagcatggat

SEQ ID NO: 1304229 - DNA, 15 bp, Homo sapiens
tgatttaagcatgga

SEQ ID NO: 1304230 - DNA, 15 bp, Homo sapiens
ctgatttaagcatgg

SEQ ID NO: 1304231 - DNA, 15 bp, Homo sapiens
actgatttaagcatg

SEQ ID NO: 1304232 - DNA, 15 bp, Homo sapiens
tactgatttaagcat

SEQ ID NO: 1304233 - DNA, 15 bp, Homo sapiens
ttactgatttaagca

SEQ ID NO: 1304234 - DNA, 15 bp, Homo sapiens
cttactgatttaagc

SEQ ID NO: 1304235 - DNA, 15 bp, Homo sapiens
acttactgatttaag

SEQ ID NO: 1304236 - DNA, 15 bp, Homo sapiens
aacttactgatttaa

SEQ ID NO: 1304237 - DNA, 15 bp, Homo sapiens
taacttactgattta

SEQ ID NO: 1304238 - DNA, 15 bp, Homo sapiens
ttaacttactgattt

SEQ ID NO: 1304239 - DNA, 15 bp, Homo sapiens
tttaacttactgatt

SEQ ID NO: 1304240 - DNA, 15 bp, Homo sapiens
ttttaacttactgat

SEQ ID NO: 1304241 - DNA, 15 bp, Homo sapiens
tttttaacttactga

SEQ ID NO: 1304242 - DNA, 15 bp, Homo sapiens
gtttttaacttactg

SEQ ID NO: 1304243 - DNA, 15 bp, Homo sapiens
tgtttttaacttact

SEQ ID NO: 1304244 - DNA, 15 bp, Homo sapiens
ttgtttttaacttac

SEQ ID NO: 1304245 - DNA, 15 bp, Homo sapiens
attgtttttaactta

SEQ ID NO: 1304246 - DNA, 15 bp, Homo sapiens
tattgtttttaactt

SEQ ID NO: 1304247 - DNA, 15 bp, Homo sapiens
atattgtttttaact

SEQ ID NO: 1304248 - DNA, 15 bp, Homo sapiens
tatattgtttttaac

SEQ ID NO: 1304249 - DNA, 15 bp, Homo sapiens
ttatattgtttttaa

SEQ ID NO: 1304250 - DNA, 15 bp, Homo sapiens
tttatattgttttta

SEQ ID NO: 1304251 - DNA, 15 bp, Homo sapiens
ttttatattgttttt

SEQ ID NO: 1304252 - DNA, 15 bp, Homo sapiens
tttttatattgtttt

SEQ ID NO: 1304253 - DNA, 15 bp, Homo sapiens
ttttttatattgttt

SEQ ID NO: 1304254 - DNA, 15 bp, Homo sapiens
tttttttatattgtt

SEQ ID NO: 1304255 - DNA, 15 bp, Homo sapiens
atttttttatattgt

SEQ ID NO: 1304256 - DNA, 15 bp, Homo sapiens
aatttttttatattg

SEQ ID NO: 1304257 - DNA, 15 bp, Homo sapiens
aaatttttttatatt

SEQ ID NO: 1304258 - DNA, 15 bp, Homo sapiens
gaaatttttttatat

SEQ ID NO: 1304259 - DNA, 15 bp, Homo sapiens
tgaaatttttttata

SEQ ID NO: 1304260 - DNA, 15 bp, Homo sapiens
ctgaaatttttttat

SEQ ID NO: 1304261 - DNA, 15 bp, Homo sapiens
gctgaaattttttta

SEQ ID NO: 1304262 - DNA, 15 bp, Homo sapiens
ggctgaaattttttt

SEQ ID NO: 1304263 - DNA, 15 bp, Homo sapiens
cggctgaaatttttt

SEQ ID NO: 1304264 - DNA, 15 bp, Homo sapiens
ccggctgaaattttt

SEQ ID NO: 1304265 - DNA, 15 bp, Homo sapiens
cccggctgaaatttt

SEQ ID NO: 1304266 - DNA, 15 bp, Homo sapiens
gcccggctgaaattt

SEQ ID NO: 1304267 - DNA, 15 bp, Homo sapiens
cgcccggctgaaatt

SEQ ID NO: 1304268 - DNA, 15 bp, Homo sapiens
gcgcccggctgaaat

SEQ ID NO: 1304269 - DNA, 15 bp, Homo sapiens
cgcgcccggctgaaa

SEQ ID NO: 1304270 - DNA, 15 bp, Homo sapiens
ccgcgcccggctgaa

SEQ ID NO: 1304271 - DNA, 15 bp, Homo sapiens
accgcgcccggctga

SEQ ID NO: 1304272 - DNA, 15 bp, Homo sapiens
caccgcgcccggctg

SEQ ID NO: 1304273 - DNA, 15 bp, Homo sapiens
gcaggcgtgagccac

SEQ ID NO: 1304274 - DNA, 15 bp, Homo sapiens
tgcaggcgtgagcca

SEQ ID NO: 1304275 - DNA, 15 bp, Homo sapiens
ttgcaggcgtgagcc

SEQ ID NO: 1304276 - DNA, 15 bp, Homo sapiens
attgcaggcgtgagc

SEQ ID NO: 1304277 - DNA, 15 bp, Homo sapiens
gattgcaggcgtgag

SEQ ID NO: 1304278 - DNA, 15 bp, Homo sapiens
ggattgcaggcgtga

SEQ ID NO: 1304279 - DNA, 15 bp, Homo sapiens
gggattgcaggcgtg

SEQ ID NO: 1304280 - DNA, 15 bp, Homo sapiens
tgggattgcaggcgt

SEQ ID NO: 1304281 - DNA, 15 bp, Homo sapiens
ctgggattgcaggcg

SEQ ID NO: 1304282 - DNA, 15 bp, Homo sapiens
gctgggattgcaggc

SEQ ID NO: 1304283 - DNA, 15 bp, Homo sapiens
agtgctgggattgca

SEQ ID NO: 1304284 - DNA, 15 bp, Homo sapiens
ctgatctgcccacct

SEQ ID NO: 1304285 - DNA, 15 bp, Homo sapiens
cctgatctgcccacc

SEQ ID NO: 1304286 - DNA, 15 bp, Homo sapiens
tcctgatctgcccac

SEQ ID NO: 1304287 - DNA, 15 bp, Homo sapiens
ctcctgatctgccca

SEQ ID NO: 1304288 - DNA, 15 bp, Homo sapiens
cctcctgatctgccc

SEQ ID NO: 1304289 - DNA, 15 bp, Homo sapiens
acctcctgatctgcc

SEQ ID NO: 1304290 - DNA, 15 bp, Homo sapiens
gacctcctgatctgc

SEQ ID NO: 1304291 - DNA, 15 bp, Homo sapiens
tgacctcctgatctg

SEQ ID NO: 1304292 - DNA, 15 bp, Homo sapiens
ttgacctcctgatct

SEQ ID NO: 1304293 - DNA, 15 bp, Homo sapiens
cttgacctcctgatc

SEQ ID NO: 1304294 - DNA, 15 bp, Homo sapiens
ccttgacctcctgat

SEQ ID NO: 1304295 - DNA, 15 bp, Homo sapiens
gccttgacctcctga

SEQ ID NO: 1304296 - DNA, 15 bp, Homo sapiens
tgccttgacctcctg

SEQ ID NO: 1304297 - DNA, 15 bp, Homo sapiens
atgccttgacctcct

SEQ ID NO: 1304298 - DNA, 15 bp, Homo sapiens
gatgccttgacctcc

SEQ ID NO: 1304299 - DNA, 15 bp, Homo sapiens
tgatgccttgacctc

SEQ ID NO: 1304300 - DNA, 15 bp, Homo sapiens
ttgatgccttgacct

SEQ ID NO: 1304301 - DNA, 15 bp, Homo sapiens
cttgatgccttgacc

SEQ ID NO: 1304302 - DNA, 15 bp, Homo sapiens
tcttgatgccttgac

SEQ ID NO: 1304303 - DNA, 15 bp, Homo sapiens
atcttgatgccttga

SEQ ID NO: 1304304 - DNA, 15 bp, Homo sapiens
gatcttgatgccttg

SEQ ID NO: 1304305 - DNA, 15 bp, Homo sapiens
tgatcttgatgcctt

SEQ ID NO: 1304306 - DNA, 15 bp, Homo sapiens
atgatcttgatgcct

SEQ ID NO: 1304307 - DNA, 15 bp, Homo sapiens
gatgatcttgatgcc

SEQ ID NO: 1304308 - DNA, 15 bp, Homo sapiens
ggatgatcttgatgc

SEQ ID NO: 1304309 - DNA, 15 bp, Homo sapiens
aggatgatcttgatg

SEQ ID NO: 1304310 - DNA, 15 bp, Homo sapiens
caggatgatcttgat

SEQ ID NO: 1304311 - DNA, 15 bp, Homo sapiens
ccaggatgatcttga

SEQ ID NO: 1304312 - DNA, 15 bp, Homo sapiens
gccaggatgatcttg

SEQ ID NO: 1304313 - DNA, 15 bp, Homo sapiens
ggccaggatgatctt

SEQ ID NO: 1304314 - DNA, 15 bp, Homo sapiens
tggccaggatgatct

SEQ ID NO: 1304315 - DNA, 15 bp, Homo sapiens
ttggccaggatgatc

SEQ ID NO: 1304316 - DNA, 15 bp, Homo sapiens
tttggccaggatgat

SEQ ID NO: 1304317 - DNA, 15 bp, Homo sapiens
ttttggccaggatga

SEQ ID NO: 1304318 - DNA, 15 bp, Homo sapiens
attttggccaggatg

SEQ ID NO: 1304319 - DNA, 15 bp, Homo sapiens
cattttggccaggat

SEQ ID NO: 1304320 - DNA, 15 bp, Homo sapiens
ccattttggccagga

SEQ ID NO: 1304321 - DNA, 15 bp, Homo sapiens
ggtttcaccattttg

SEQ ID NO: 1304322 - DNA, 15 bp, Homo sapiens
gggtttcaccatttt

SEQ ID NO: 1304323 - DNA, 15 bp, Homo sapiens
agggtttcaccattt

SEQ ID NO: 1304324 - DNA, 15 bp, Homo sapiens
cagggtttcaccatt

SEQ ID NO: 1304325 - DNA, 15 bp, Homo sapiens
cttttagtagagaca

SEQ ID NO: 1304326 - DNA, 15 bp, Homo sapiens
accaccacgcccagc

SEQ ID NO: 1304327 - DNA, 15 bp, Homo sapiens
tacaccaccacgccc

SEQ ID NO: 1304328 - DNA, 15 bp, Homo sapiens
ctacaccaccacgcc

SEQ ID NO: 1304329 - DNA, 15 bp, Homo sapiens
tctacaccaccacgc

SEQ ID NO: 1304330 - DNA, 15 bp, Homo sapiens
gtctacaccaccacg

SEQ ID NO: 1304331 - DNA, 15 bp, Homo sapiens
ggtctacaccaccac

SEQ ID NO: 1304332 - DNA, 15 bp, Homo sapiens
aggtctacaccacca

SEQ ID NO: 1304333 - DNA, 15 bp, Homo sapiens
caggtctacaccacc

SEQ ID NO: 1304334 - DNA, 15 bp, Homo sapiens
acaggtctacaccac

SEQ ID NO: 1304335 - DNA, 15 bp, Homo sapiens
tacaggtctacacca

SEQ ID NO: 1304336 - DNA, 15 bp, Homo sapiens
ctacaggtctacacc

SEQ ID NO: 1304337 - DNA, 15 bp, Homo sapiens
actacaggtctacac

SEQ ID NO: 1304338 - DNA, 15 bp, Homo sapiens
gactacaggtctaca

SEQ ID NO: 1304339 - DNA, 15 bp, Homo sapiens
ggactacaggtctac

SEQ ID NO: 1304340 - DNA, 15 bp, Homo sapiens
gggactacaggtcta

SEQ ID NO: 1304341 - DNA, 15 bp, Homo sapiens
tgggactacaggtct

SEQ ID NO: 1304342 - DNA, 15 bp, Homo sapiens
gccaagtagctggga

SEQ ID NO: 1304343 - DNA, 15 bp, Homo sapiens
tgccaagtagctggg

SEQ ID NO: 1304344 - DNA, 15 bp, Homo sapiens
ctgccaagtagctgg

SEQ ID NO: 1304345 - DNA, 15 bp, Homo sapiens
cctgccaagtagctg

SEQ ID NO: 1304346 - DNA, 15 bp, Homo sapiens
gcctgccaagtagct

SEQ ID NO: 1304347 - DNA, 15 bp, Homo sapiens
agcctgccaagtagc

SEQ ID NO: 1304348 - DNA, 15 bp, Homo sapiens
cagcctgccaagtag

SEQ ID NO: 1304349 - DNA, 15 bp, Homo sapiens
tcagcctgccaagta

SEQ ID NO: 1304350 - DNA, 15 bp, Homo sapiens
ctcagcctgccaagt

SEQ ID NO: 1304351 - DNA, 15 bp, Homo sapiens
cctcagcctgccaag

SEQ ID NO: 1304352 - DNA, 15 bp, Homo sapiens
gcctcagcctgccaa

SEQ ID NO: 1304353 - DNA, 15 bp, Homo sapiens
tgcctcagcctgcca

SEQ ID NO: 1304354 - DNA, 15 bp, Homo sapiens
ctgcctcagcctgcc

SEQ ID NO: 1304355 - DNA, 15 bp, Homo sapiens
cctgcctcagcctgc

SEQ ID NO: 1304356 - DNA, 15 bp, Homo sapiens
tcctgcctcagcctg

SEQ ID NO: 1304357 - DNA, 15 bp, Homo sapiens
ggattctcctgcctc

SEQ ID NO: 1304358 - DNA, 15 bp, Homo sapiens
tggttcaagggattc

SEQ ID NO: 1304359 - DNA, 15 bp, Homo sapiens
ctggttcaagggatt

SEQ ID NO: 1304360 - DNA, 15 bp, Homo sapiens
cctggttcaagggat

SEQ ID NO: 1304361 - DNA, 15 bp, Homo sapiens
ccctggttcaaggga

SEQ ID NO: 1304362 - DNA, 15 bp, Homo sapiens
tccctggttcaaggg

SEQ ID NO: 1304363 - DNA, 15 bp, Homo sapiens
ctccctggttcaagg

SEQ ID NO: 1304364 - DNA, 15 bp, Homo sapiens
cctccctggttcaag

SEQ ID NO: 1304365 - DNA, 15 bp, Homo sapiens
acctccctggttcaa

SEQ ID NO: 1304366 - DNA, 15 bp, Homo sapiens
acaatcttggctcac

SEQ ID NO: 1304367 - DNA, 15 bp, Homo sapiens
cacaatcttggctca

SEQ ID NO: 1304368 - DNA, 15 bp, Homo sapiens
gcacaatcttggctc

SEQ ID NO: 1304369 - DNA, 15 bp, Homo sapiens
ggcacaatcttggct

SEQ ID NO: 1304370 - DNA, 15 bp, Homo sapiens
tggcacaatcttggc

SEQ ID NO: 1304371 - DNA, 15 bp, Homo sapiens
atggcacaatcttgg

SEQ ID NO: 1304372 - DNA, 15 bp, Homo sapiens
aatggcacaatcttg

SEQ ID NO: 1304373 - DNA, 15 bp, Homo sapiens
aaatggcacaatctt

SEQ ID NO: 1304374 - DNA, 15 bp, Homo sapiens
gaaatggcacaatct

SEQ ID NO: 1304375 - DNA, 15 bp, Homo sapiens
tgaaatggcacaatc

SEQ ID NO: 1304376 - DNA, 15 bp, Homo sapiens
gtgaaatggcacaat

SEQ ID NO: 1304377 - DNA, 15 bp, Homo sapiens
ggtgaaatggcacaa

SEQ ID NO: 1304378 - DNA, 15 bp, Homo sapiens
gggtgaaatggcaca

SEQ ID NO: 1304379 - DNA, 15 bp, Homo sapiens
ggggtgaaatggcac

SEQ ID NO: 1304380 - DNA, 15 bp, Homo sapiens
tggggtgaaatggca

SEQ ID NO: 1304381 - DNA, 15 bp, Homo sapiens
ctggggtgaaatggc

SEQ ID NO: 1304382 - DNA, 15 bp, Homo sapiens
gctggggtgaaatgg

SEQ ID NO: 1304383 - DNA, 15 bp, Homo sapiens
ggctggggtgaaatg

SEQ ID NO: 1304384 - DNA, 15 bp, Homo sapiens
aggctggggtgaaat

SEQ ID NO: 1304385 - DNA, 15 bp, Homo sapiens
caggctggggtgaaa

SEQ ID NO: 1304386 - DNA, 15 bp, Homo sapiens
ccaggctggggtgaa

SEQ ID NO: 1304387 - DNA, 15 bp, Homo sapiens
gccaggctggggtga

SEQ ID NO: 1304388 - DNA, 15 bp, Homo sapiens
tgccaggctggggtg

SEQ ID NO: 1304389 - DNA, 15 bp, Homo sapiens
ttgccaggctggggt

SEQ ID NO: 1304390 - DNA, 15 bp, Homo sapiens
gttgccaggctgggg

SEQ ID NO: 1304391 - DNA, 15 bp, Homo sapiens
tgttgccaggctggg

SEQ ID NO: 1304392 - DNA, 15 bp, Homo sapiens
tgtcttgctctgttg

SEQ ID NO: 1304393 - DNA, 15 bp, Homo sapiens
gtgtcttgctctgtt

SEQ ID NO: 1304394 - DNA, 15 bp, Homo sapiens
ggtgtcttgctctgt

SEQ ID NO: 1304395 - DNA, 15 bp, Homo sapiens
tggtgtcttgctctg

SEQ ID NO: 1304396 - DNA, 15 bp, Homo sapiens
atggtgtcttgctct

SEQ ID NO: 1304397 - DNA, 15 bp, Homo sapiens
gatggtgtcttgctc

SEQ ID NO: 1304398 - DNA, 15 bp, Homo sapiens
agatggtgtcttgct

SEQ ID NO: 1304399 - DNA, 15 bp, Homo sapiens
tagatggtgtcttgc

SEQ ID NO: 1304400 - DNA, 15 bp, Homo sapiens
ttagatggtgtcttg

SEQ ID NO: 1304401 - DNA, 15 bp, Homo sapiens
tttagatggtgtctt

SEQ ID NO: 1304402 - DNA, 15 bp, Homo sapiens
ttttagatggtgtct

SEQ ID NO: 1304403 - DNA, 15 bp, Homo sapiens
tttttagatggtgtc

SEQ ID NO: 1304404 - DNA, 15 bp, Homo sapiens
ttttttagatggtgt

SEQ ID NO: 1304405 - DNA, 15 bp, Homo sapiens
tttttttagatggtg

SEQ ID NO: 1304406 - DNA, 15 bp, Homo sapiens
ttttttttagatggt

SEQ ID NO: 1304407 - DNA, 15 bp, Homo sapiens
ttgaatttttttttt

SEQ ID NO: 1304408 - DNA, 15 bp, Homo sapiens
attgaattttttttt

SEQ ID NO: 1304409 - DNA, 15 bp, Homo sapiens
cattgaatttttttt

SEQ ID NO: 1304410 - DNA, 15 bp, Homo sapiens
gcattgaattttttt

SEQ ID NO: 1304411 - DNA, 15 bp, Homo sapiens
agcattgaatttttt

SEQ ID NO: 1304412 - DNA, 15 bp, Homo sapiens
cagcattgaattttt

SEQ ID NO: 1304413 - DNA, 15 bp, Homo sapiens
tcagcattgaatttt

SEQ ID NO: 1304414 - DNA, 15 bp, Homo sapiens
gtcagcattgaattt

SEQ ID NO: 1304415 - DNA, 15 bp, Homo sapiens
tgtcagcattgaatt

SEQ ID NO: 1304416 - DNA, 15 bp, Homo sapiens
gtgtcagcattgaat

SEQ ID NO: 1304417 - DNA, 15 bp, Homo sapiens
tgtgtcagcattgaa

SEQ ID NO: 1304418 - DNA, 15 bp, Homo sapiens
ttgtgtcagcattga

SEQ ID NO: 1304419 - DNA, 15 bp, Homo sapiens
tttgtgtcagcattg

SEQ ID NO: 1304420 - DNA, 15 bp, Homo sapiens
atttgtgtcagcatt

SEQ ID NO: 1304421 - DNA, 15 bp, Homo sapiens
tatttgtgtcagcat

SEQ ID NO: 1304422 - DNA, 15 bp, Homo sapiens
ttatttgtgtcagca

SEQ ID NO: 1304423 - DNA, 15 bp, Homo sapiens
cttatttgtgtcagc

SEQ ID NO: 1304424 - DNA, 15 bp, Homo sapiens
ccttatttgtgtcag

SEQ ID NO: 1304425 - DNA, 15 bp, Homo sapiens
accttatttgtgtca

SEQ ID NO: 1304426 - DNA, 15 bp, Homo sapiens
aaccttatttgtgtc

SEQ ID NO: 1304427 - DNA, 15 bp, Homo sapiens
aaaccttatttgtgt

SEQ ID NO: 1304428 - DNA, 15 bp, Homo sapiens
gaaaccttatttgtg

SEQ ID NO: 1304429 - DNA, 15 bp, Homo sapiens
tgaaaccttatttgt

SEQ ID NO: 1304430 - DNA, 15 bp, Homo sapiens
ttgaaaccttatttg

SEQ ID NO: 1304431 - DNA, 15 bp, Homo sapiens
attgaaaccttattt

SEQ ID NO: 1304432 - DNA, 15 bp, Homo sapiens
aattgaaaccttatt

SEQ ID NO: 1304433 - DNA, 15 bp, Homo sapiens
taattgaaaccttat

SEQ ID NO: 1304434 - DNA, 15 bp, Homo sapiens
ttaattgaaacctta

SEQ ID NO: 1304435 - DNA, 15 bp, Homo sapiens
tttaattgaaacctt

SEQ ID NO: 1304436 - DNA, 15 bp, Homo sapiens
gtttaattgaaacct

SEQ ID NO: 1304437 - DNA, 15 bp, Homo sapiens
tgtttaattgaaacc

SEQ ID NO: 1304438 - DNA, 15 bp, Homo sapiens
ttgtttaattgaaac

SEQ ID NO: 1304439 - DNA, 15 bp, Homo sapiens
gttgtttaattgaaa

SEQ ID NO: 1304440 - DNA, 15 bp, Homo sapiens
agttgtttaattgaa

SEQ ID NO: 1304441 - DNA, 15 bp, Homo sapiens
aagttgtttaattga

SEQ ID NO: 1304442 - DNA, 15 bp, Homo sapiens
gaagttgtttaattg

SEQ ID NO: 1304443 - DNA, 15 bp, Homo sapiens
agaagttgtttaatt

SEQ ID NO: 1304444 - DNA, 15 bp, Homo sapiens
aagaagttgtttaat

SEQ ID NO: 1304445 - DNA, 15 bp, Homo sapiens
aaagaagttgtttaa

SEQ ID NO: 1304446 - DNA, 15 bp, Homo sapiens
aaaagaagttgttta

SEQ ID NO: 1304447 - DNA, 15 bp, Homo sapiens
aaaaagaagttgttt

SEQ ID NO: 1304448 - DNA, 15 bp, Homo sapiens
aaaaaagaagttgtt

SEQ ID NO: 1304449 - DNA, 15 bp, Homo sapiens
aaaaaaagaagttgt

SEQ ID NO: 1304450 - DNA, 15 bp, Homo sapiens
aaaaaaaagaagttg

SEQ ID NO: 1304451 - DNA, 15 bp, Homo sapiens
aaaaaaaaagaagtt

SEQ ID NO: 1304452 - DNA, 15 bp, Homo sapiens
taaaaaaaaaaaaag

SEQ ID NO: 1304453 - DNA, 15 bp, Homo sapiens
taatttaaaaaaaaa

SEQ ID NO: 1304454 - DNA, 15 bp, Homo sapiens
ataatttaaaaaaaa

SEQ ID NO: 1304455 - DNA, 15 bp, Homo sapiens
acagataatttaaaa

SEQ ID NO: 1304456 - DNA, 15 bp, Homo sapiens
aacagataatttaaa

SEQ ID NO: 1304457 - DNA, 15 bp, Homo sapiens
aaacagataatttaa

SEQ ID NO: 1304458 - DNA, 15 bp, Homo sapiens
gaaacagataattta

SEQ ID NO: 1304459 - DNA, 15 bp, Homo sapiens
tgaaacagataattt

SEQ ID NO: 1304460 - DNA, 15 bp, Homo sapiens
ctgaaacagataatt

SEQ ID NO: 1304461 - DNA, 15 bp, Homo sapiens
cctgaaacagataat

SEQ ID NO: 1304462 - DNA, 15 bp, Homo sapiens
tcctgaaacagataa

SEQ ID NO: 1304463 - DNA, 15 bp, Homo sapiens
ttcctgaaacagata

SEQ ID NO: 1304464 - DNA, 15 bp, Homo sapiens
cttcctgaaacagat

SEQ ID NO: 1304465 - DNA, 15 bp, Homo sapiens
tcttcctgaaacaga

SEQ ID NO: 1304466 - DNA, 15 bp, Homo sapiens
ttcttcctgaaacag

SEQ ID NO: 1304467 - DNA, 15 bp, Homo sapiens
cttcttcctgaaaca

SEQ ID NO: 1304468 - DNA, 15 bp, Homo sapiens
tcttcttcctgaaac

SEQ ID NO: 1304469 - DNA, 15 bp, Homo sapiens
ttcttcttcctgaaa

SEQ ID NO: 1304470 - DNA, 15 bp, Homo sapiens
gttcttcttcctgaa

SEQ ID NO: 1304471 - DNA, 15 bp, Homo sapiens
cgttcttcttcctga

SEQ ID NO: 1304472 - DNA, 15 bp, Homo sapiens
tcgttcttcttcctg

SEQ ID NO: 1304473 - DNA, 15 bp, Homo sapiens
atcgttcttcttcct

SEQ ID NO: 1304474 - DNA, 15 bp, Homo sapiens
aatcgttcttcttcc

SEQ ID NO: 1304475 - DNA, 15 bp, Homo sapiens
taatcgttcttcttc

SEQ ID NO: 1304476 - DNA, 15 bp, Homo sapiens
ataatcgttcttctt

SEQ ID NO: 1304477 - DNA, 15 bp, Homo sapiens
gataatcgttcttct

SEQ ID NO: 1304478 - DNA, 15 bp, Homo sapiens
ggataatcgttcttc

SEQ ID NO: 1304479 - DNA, 15 bp, Homo sapiens
tggataatcgttctt

SEQ ID NO: 1304480 - DNA, 15 bp, Homo sapiens
atggataatcgttct

SEQ ID NO: 1304481 - DNA, 15 bp, Homo sapiens
aatggataatcgttc

SEQ ID NO: 1304482 - DNA, 15 bp, Homo sapiens
gaatggataatcgtt

SEQ ID NO: 1304483 - DNA, 15 bp, Homo sapiens
tgaatggataatcgt

SEQ ID NO: 1304484 - DNA, 15 bp, Homo sapiens
ttgaatggataatcg

SEQ ID NO: 1304485 - DNA, 15 bp, Homo sapiens
tttgaatggataatc

SEQ ID NO: 1304486 - DNA, 15 bp, Homo sapiens
ttttgaatggataat

SEQ ID NO: 1304487 - DNA, 15 bp, Homo sapiens
aaattttgaatggat

SEQ ID NO: 1304488 - DNA, 15 bp, Homo sapiens
aaaattttgaatgga

SEQ ID NO: 1304489 - DNA, 15 bp, Homo sapiens
taaaattttgaatgg

SEQ ID NO: 1304490 - DNA, 15 bp, Homo sapiens
ctaaaattttgaatg

SEQ ID NO: 1304491 - DNA, 15 bp, Homo sapiens
cctaaaattttgaat

SEQ ID NO: 1304492 - DNA, 15 bp, Homo sapiens
acctaaaattttgaa

SEQ ID NO: 1304493 - DNA, 15 bp, Homo sapiens
tacctaaaattttga

SEQ ID NO: 1304494 - DNA, 15 bp, Homo sapiens
ttacctaaaattttg

SEQ ID NO: 1304495 - DNA, 15 bp, Homo sapiens
tttacctaaaatttt

SEQ ID NO: 1304496 - DNA, 15 bp, Homo sapiens
atttacctaaaattt

SEQ ID NO: 1304497 - DNA, 15 bp, Homo sapiens
aatttacctaaaatt

SEQ ID NO: 1304498 - DNA, 15 bp, Homo sapiens
aaatttacctaaaat

SEQ ID NO: 1304499 - DNA, 15 bp, Homo sapiens
aaaatttacctaaaa

SEQ ID NO: 1304500 - DNA, 15 bp, Homo sapiens
aaaaatttacctaaa

SEQ ID NO: 1304501 - DNA, 15 bp, Homo sapiens
aaaaaatttacctaa

SEQ ID NO: 1304502 - DNA, 15 bp, Homo sapiens
taaaaaatttaccta

SEQ ID NO: 1304503 - DNA, 15 bp, Homo sapiens
gtaaaaaatttacct

SEQ ID NO: 1304504 - DNA, 15 bp, Homo sapiens
agtaaaaaatttacc

SEQ ID NO: 1304505 - DNA, 15 bp, Homo sapiens
aagtaaaaaatttac

SEQ ID NO: 1304506 - DNA, 15 bp, Homo sapiens
aaagtaaaaaattta

SEQ ID NO: 1304507 - DNA, 15 bp, Homo sapiens
aaaagtaaaaaattt

SEQ ID NO: 1304508 - DNA, 15 bp, Homo sapiens
taaaagtaaaaaatt

SEQ ID NO: 1304509 - DNA, 15 bp, Homo sapiens
ctaaaagtaaaaaat

SEQ ID NO: 1304510 - DNA, 15 bp, Homo sapiens
actaaaagtaaaaaa

SEQ ID NO: 1304511 - DNA, 15 bp, Homo sapiens
tactaaaagtaaaaa

SEQ ID NO: 1304512 - DNA, 15 bp, Homo sapiens
ttactaaaagtaaaa

SEQ ID NO: 1304513 - DNA, 15 bp, Homo sapiens
tttactaaaagtaaa

SEQ ID NO: 1304514 - DNA, 15 bp, Homo sapiens
ttttactaaaagtaa

SEQ ID NO: 1304515 - DNA, 15 bp, Homo sapiens
tttttactaaaagta

SEQ ID NO: 1304516 - DNA, 15 bp, Homo sapiens
ttttttactaaaagt

SEQ ID NO: 1304517 - DNA, 15 bp, Homo sapiens
attttttactaaaag

SEQ ID NO: 1304518 - DNA, 15 bp, Homo sapiens
aattttttactaaaa

SEQ ID NO: 1304519 - DNA, 15 bp, Homo sapiens
aaattttttactaaa

SEQ ID NO: 1304520 - DNA, 15 bp, Homo sapiens
aaaattttttactaa

SEQ ID NO: 1304521 - DNA, 15 bp, Homo sapiens
aaaaattttttacta

SEQ ID NO: 1304522 - DNA, 15 bp, Homo sapiens
aaaaaattttttact

SEQ ID NO: 1304523 - DNA, 15 bp, Homo sapiens
aaaaaaattttttac

SEQ ID NO: 1304524 - DNA, 15 bp, Homo sapiens
gaaaaaaatttttta

SEQ ID NO: 1304525 - DNA, 15 bp, Homo sapiens
agaaaaaaatttttt

SEQ ID NO: 1304526 - DNA, 15 bp, Homo sapiens
aagaaaaaaattttt

SEQ ID NO: 1304527 - DNA, 15 bp, Homo sapiens
aaagaaaaaaatttt

SEQ ID NO: 1304528 - DNA, 15 bp, Homo sapiens
aaaagaaaaaaattt

SEQ ID NO: 1304529 - DNA, 15 bp, Homo sapiens
taaaaagaaaaaaat

SEQ ID NO: 1304530 - DNA, 15 bp, Homo sapiens
ataaaaagaaaaaaa

SEQ ID NO: 1304531 - DNA, 15 bp, Homo sapiens
tataaaaagaaaaaa

SEQ ID NO: 1304532 - DNA, 15 bp, Homo sapiens
ctataaaaagaaaaa

SEQ ID NO: 1304533 - DNA, 15 bp, Homo sapiens
tctataaaaagaaaa

SEQ ID NO: 1304534 - DNA, 15 bp, Homo sapiens
ttctataaaaagaaa

SEQ ID NO: 1304535 - DNA, 15 bp, Homo sapiens
cttctataaaaagaa

SEQ ID NO: 1304536 - DNA, 15 bp, Homo sapiens
acttctataaaaaga

SEQ ID NO: 1304537 - DNA, 15 bp, Homo sapiens
tacttctataaaaag

SEQ ID NO: 1304538 - DNA, 15 bp, Homo sapiens
ttacttctataaaaa

SEQ ID NO: 1304539 - DNA, 15 bp, Homo sapiens
cttacttctataaaa

SEQ ID NO: 1304540 - DNA, 15 bp, Homo sapiens
acttacttctataaa

SEQ ID NO: 1304541 - DNA, 15 bp, Homo sapiens
tacttacttctataa

SEQ ID NO: 1304542 - DNA, 15 bp, Homo sapiens
atacttacttctata

SEQ ID NO: 1304543 - DNA, 15 bp, Homo sapiens
aatacttacttctat

SEQ ID NO: 1304544 - DNA, 15 bp, Homo sapiens
aaatacttacttcta

SEQ ID NO: 1304545 - DNA, 15 bp, Homo sapiens
aaaatacttacttct

SEQ ID NO: 1304546 - DNA, 15 bp, Homo sapiens
taaaatacttacttc

SEQ ID NO: 1304547 - DNA, 15 bp, Homo sapiens
ataaaatacttactt

SEQ ID NO: 1304548 - DNA, 15 bp, Homo sapiens
tataaaatacttact

SEQ ID NO: 1304549 - DNA, 15 bp, Homo sapiens
ttataaaatacttac

SEQ ID NO: 1304550 - DNA, 15 bp, Homo sapiens
attataaaatactta

SEQ ID NO: 1304551 - DNA, 15 bp, Homo sapiens
gattataaaatactt

SEQ ID NO: 1304552 - DNA, 15 bp, Homo sapiens
agattataaaatact

SEQ ID NO: 1304553 - DNA, 15 bp, Homo sapiens
aagattataaaatac

SEQ ID NO: 1304554 - DNA, 15 bp, Homo sapiens
aaaagattataaaat

SEQ ID NO: 1304555 - DNA, 15 bp, Homo sapiens
aaaaagattataaaa

SEQ ID NO: 1304556 - DNA, 15 bp, Homo sapiens
aaaaaagattataaa

SEQ ID NO: 1304557 - DNA, 15 bp, Homo sapiens
aaaaaaagattataa

SEQ ID NO: 1304558 - DNA, 15 bp, Homo sapiens
aaaaaaaagattata

SEQ ID NO: 1304559 - DNA, 15 bp, Homo sapiens
aaaaaaaaagattat

SEQ ID NO: 1304560 - DNA, 15 bp, Homo sapiens
gaaaaaaaaaaagat

SEQ ID NO: 1304561 - DNA, 15 bp, Homo sapiens
taaaggaaaaaaaaa

SEQ ID NO: 1304562 - DNA, 15 bp, Homo sapiens
ctaaaggaaaaaaaa

SEQ ID NO: 1304563 - DNA, 15 bp, Homo sapiens
gctaaaggaaaaaaa

SEQ ID NO: 1304564 - DNA, 15 bp, Homo sapiens
tgctaaaggaaaaaa

SEQ ID NO: 1304565 - DNA, 15 bp, Homo sapiens
ttgctaaaggaaaaa

SEQ ID NO: 1304566 - DNA, 15 bp, Homo sapiens
tttgctaaaggaaaa

SEQ ID NO: 1304567 - DNA, 15 bp, Homo sapiens
gtttgctaaaggaaa

SEQ ID NO: 1304568 - DNA, 15 bp, Homo sapiens
agtttgctaaaggaa

SEQ ID NO: 1304569 - DNA, 15 bp, Homo sapiens
aagtttgctaaagga

SEQ ID NO: 1304570 - DNA, 15 bp, Homo sapiens
gaagtttgctaaagg

SEQ ID NO: 1304571 - DNA, 15 bp, Homo sapiens
agaagtttgctaaag

SEQ ID NO: 1304572 - DNA, 15 bp, Homo sapiens
cagaagtttgctaaa

SEQ ID NO: 1304573 - DNA, 15 bp, Homo sapiens
tcagaagtttgctaa

SEQ ID NO: 1304574 - DNA, 15 bp, Homo sapiens
ttcagaagtttgcta

SEQ ID NO: 1304575 - DNA, 15 bp, Homo sapiens
attcagaagtttgct

SEQ ID NO: 1304576 - DNA, 15 bp, Homo sapiens
cattcagaagtttgc

SEQ ID NO: 1304577 - DNA, 15 bp, Homo sapiens
tcattcagaagtttg

SEQ ID NO: 1304578 - DNA, 15 bp, Homo sapiens
gtcattcagaagttt

SEQ ID NO: 1304579 - DNA, 15 bp, Homo sapiens
tgtcattcagaagtt

SEQ ID NO: 1304580 - DNA, 15 bp, Homo sapiens
ttgtcattcagaagt

SEQ ID NO: 1304581 - DNA, 15 bp, Homo sapiens
gttgtcattcagaag

SEQ ID NO: 1304582 - DNA, 15 bp, Homo sapiens
tgttgtcattcagaa

SEQ ID NO: 1304583 - DNA, 15 bp, Homo sapiens
atgttgtcattcaga

SEQ ID NO: 1304584 - DNA, 15 bp, Homo sapiens
aatgttgtcattcag

SEQ ID NO: 1304585 - DNA, 15 bp, Homo sapiens
aaatgttgtcattca

SEQ ID NO: 1304586 - DNA, 15 bp, Homo sapiens
aaaatgttgtcattc

SEQ ID NO: 1304587 - DNA, 15 bp, Homo sapiens
aaaaatgttgtcatt

SEQ ID NO: 1304588 - DNA, 15 bp, Homo sapiens
gaaaaatgttgtcat

SEQ ID NO: 1304589 - DNA, 15 bp, Homo sapiens
tgaaaaatgttgtca

SEQ ID NO: 1304590 - DNA, 15 bp, Homo sapiens
atgaaaaatgttgtc

SEQ ID NO: 1304591 - DNA, 15 bp, Homo sapiens
tatgaaaaatgttgt

SEQ ID NO: 1304592 - DNA, 15 bp, Homo sapiens
atatgaaaaatgttg

SEQ ID NO: 1304593 - DNA, 15 bp, Homo sapiens
catatgaaaaatgtt

SEQ ID NO: 1304594 - DNA, 15 bp, Homo sapiens
acatatgaaaaatgt

SEQ ID NO: 1304595 - DNA, 15 bp, Homo sapiens
gacatatgaaaaatg

SEQ ID NO: 1304596 - DNA, 15 bp, Homo sapiens
agacatatgaaaaat

SEQ ID NO: 1304597 - DNA, 15 bp, Homo sapiens
aagacatatgaaaaa

SEQ ID NO: 1304598 - DNA, 15 bp, Homo sapiens
aaagacatatgaaaa

SEQ ID NO: 1304599 - DNA, 15 bp, Homo sapiens
taaagacatatgaaa

SEQ ID NO: 1304600 - DNA, 15 bp, Homo sapiens
ataaagacatatgaa

SEQ ID NO: 1304601 - DNA, 15 bp, Homo sapiens
aataaagacatatga

SEQ ID NO: 1304602 - DNA, 15 bp, Homo sapiens
caataaagacatatg

SEQ ID NO: 1304603 - DNA, 15 bp, Homo sapiens
ccaataaagacatat

SEQ ID NO: 1304604 - DNA, 15 bp, Homo sapiens
gccaataaagacata

SEQ ID NO: 1304605 - DNA, 15 bp, Homo sapiens
cgccaataaagacat

SEQ ID NO: 1304606 - DNA, 15 bp, Homo sapiens
acgccaataaagaca

SEQ ID NO: 1304607 - DNA, 15 bp, Homo sapiens
cacgccaataaagac

SEQ ID NO: 1304608 - DNA, 15 bp, Homo sapiens
gcacgccaataaaga

SEQ ID NO: 1304609 - DNA, 15 bp, Homo sapiens
cgcacgccaataaag

SEQ ID NO: 1304610 - DNA, 15 bp, Homo sapiens
gcgcacgccaataaa

SEQ ID NO: 1304611 - DNA, 15 bp, Homo sapiens
agcgcacgccaataa

SEQ ID NO: 1304612 - DNA, 15 bp, Homo sapiens
gagcgcacgccaata

SEQ ID NO: 1304613 - DNA, 15 bp, Homo sapiens
agagcgcacgccaat

SEQ ID NO: 1304614 - DNA, 15 bp, Homo sapiens
aagagcgcacgccaa

SEQ ID NO: 1304615 - DNA, 15 bp, Homo sapiens
caagagcgcacgcca

SEQ ID NO: 1304616 - DNA, 15 bp, Homo sapiens
tcaagagcgcacgcc

SEQ ID NO: 1304617 - DNA, 15 bp, Homo sapiens
ctcaagagcgcacgc

SEQ ID NO: 1304618 - DNA, 15 bp, Homo sapiens
cctcaagagcgcacg

SEQ ID NO: 1304619 - DNA, 15 bp, Homo sapiens
acctcaagagcgcac

SEQ ID NO: 1304620 - DNA, 15 bp, Homo sapiens
aacctcaagagcgca

SEQ ID NO: 1304621 - DNA, 15 bp, Homo sapiens
caacctcaagagcgc

SEQ ID NO: 1304622 - DNA, 15 bp, Homo sapiens
acaacctcaagagcg

SEQ ID NO: 1304623 - DNA, 15 bp, Homo sapiens
tacaacctcaagagc

SEQ ID NO: 1304624 - DNA, 15 bp, Homo sapiens
ttacaacctcaagag

SEQ ID NO: 1304625 - DNA, 15 bp, Homo sapiens
attacaacctcaaga

SEQ ID NO: 1304626 - DNA, 15 bp, Homo sapiens
cattacaacctcaag

SEQ ID NO: 1304627 - DNA, 15 bp, Homo sapiens
ccattacaacctcaa

SEQ ID NO: 1304628 - DNA, 15 bp, Homo sapiens
gccattacaacctca

SEQ ID NO: 1304629 - DNA, 15 bp, Homo sapiens
ggccattacaacctc

SEQ ID NO: 1304630 - DNA, 15 bp, Homo sapiens
tggccattacaacct

SEQ ID NO: 1304631 - DNA, 15 bp, Homo sapiens
gtggccattacaacc

SEQ ID NO: 1304632 - DNA, 15 bp, Homo sapiens
tgtggccattacaac

SEQ ID NO: 1304633 - DNA, 15 bp, Homo sapiens
atgtggccattacaa

SEQ ID NO: 1304634 - DNA, 15 bp, Homo sapiens
tatgtggccattaca

SEQ ID NO: 1304635 - DNA, 15 bp, Homo sapiens
atatgtggccattac

SEQ ID NO: 1304636 - DNA, 15 bp, Homo sapiens
tatatgtggccatta

SEQ ID NO: 1304637 - DNA, 15 bp, Homo sapiens
ctatatgtggccatt

SEQ ID NO: 1304638 - DNA, 15 bp, Homo sapiens
gctatatgtggccat

SEQ ID NO: 1304639 - DNA, 15 bp, Homo sapiens
tgctatatgtggcca

SEQ ID NO: 1304640 - DNA, 15 bp, Homo sapiens
ctgctatatgtggcc

SEQ ID NO: 1304641 - DNA, 15 bp, Homo sapiens
actgctatatgtggc

SEQ ID NO: 1304642 - DNA, 15 bp, Homo sapiens
tactgctatatgtgg

SEQ ID NO: 1304643 - DNA, 15 bp, Homo sapiens
ttactgctatatgtg

SEQ ID NO: 1304644 - DNA, 15 bp, Homo sapiens
cttactgctatatgt

SEQ ID NO: 1304645 - DNA, 15 bp, Homo sapiens
acttactgctatatg

SEQ ID NO: 1304646 - DNA, 15 bp, Homo sapiens
aacttactgctatat

SEQ ID NO: 1304647 - DNA, 15 bp, Homo sapiens
taacttactgctata

SEQ ID NO: 1304648 - DNA, 15 bp, Homo sapiens
ttaacttactgctat

SEQ ID NO: 1304649 - DNA, 15 bp, Homo sapiens
tttaacttactgcta

SEQ ID NO: 1304650 - DNA, 15 bp, Homo sapiens
atttaacttactgct

SEQ ID NO: 1304651 - DNA, 15 bp, Homo sapiens
aatttaacttactgc

SEQ ID NO: 1304652 - DNA, 15 bp, Homo sapiens
aaatttaacttactg

SEQ ID NO: 1304653 - DNA, 15 bp, Homo sapiens
aaaatttaacttact

SEQ ID NO: 1304654 - DNA, 15 bp, Homo sapiens
gaaaatttaacttac

SEQ ID NO: 1304655 - DNA, 15 bp, Homo sapiens
tgaaaatttaactta

SEQ ID NO: 1304656 - DNA, 15 bp, Homo sapiens
atgaaaatttaactt

SEQ ID NO: 1304657 - DNA, 15 bp, Homo sapiens
tatgaaaatttaact

SEQ ID NO: 1304658 - DNA, 15 bp, Homo sapiens
ttatgaaaatttaac

SEQ ID NO: 1304659 - DNA, 15 bp, Homo sapiens
tttatgaaaatttaa

SEQ ID NO: 1304660 - DNA, 15 bp, Homo sapiens
atttatgaaaattta

SEQ ID NO: 1304661 - DNA, 15 bp, Homo sapiens
tatttatgaaaattt

SEQ ID NO: 1304662 - DNA, 15 bp, Homo sapiens
ttatttatgaaaatt

SEQ ID NO: 1304663 - DNA, 15 bp, Homo sapiens
tttatttatgaaaat

SEQ ID NO: 1304664 - DNA, 15 bp, Homo sapiens
gtttatttatgaaaa

SEQ ID NO: 1304665 - DNA, 15 bp, Homo sapiens
tgtttatttatgaaa

SEQ ID NO: 1304666 - DNA, 15 bp, Homo sapiens
gtgtttatttatgaa

SEQ ID NO: 1304667 - DNA, 15 bp, Homo sapiens
agtgtttatttatga

SEQ ID NO: 1304668 - DNA, 15 bp, Homo sapiens
aagtgtttatttatg

SEQ ID NO: 1304669 - DNA, 15 bp, Homo sapiens
aaagtgtttatttat

SEQ ID NO: 1304670 - DNA, 15 bp, Homo sapiens
aaaagtgtttattta

SEQ ID NO: 1304671 - DNA, 15 bp, Homo sapiens
caaaagtgtttattt

SEQ ID NO: 1304672 - DNA, 15 bp, Homo sapiens
acaaaagtgtttatt

SEQ ID NO: 1304673 - DNA, 15 bp, Homo sapiens
aacaaaagtgtttat

SEQ ID NO: 1304674 - DNA, 15 bp, Homo sapiens
gaacaaaagtgttta

SEQ ID NO: 1304675 - DNA, 15 bp, Homo sapiens
tgaacaaaagtgttt

SEQ ID NO: 1304676 - DNA, 15 bp, Homo sapiens
ttgaacaaaagtgtt

SEQ ID NO: 1304677 - DNA, 15 bp, Homo sapiens
attgaacaaaagtgt

SEQ ID NO: 1304678 - DNA, 15 bp, Homo sapiens
aattgaacaaaagtg

SEQ ID NO: 1304679 - DNA, 15 bp, Homo sapiens
aaattgaacaaaagt

SEQ ID NO: 1304680 - DNA, 15 bp, Homo sapiens
taaattgaacaaaag

SEQ ID NO: 1304681 - DNA, 15 bp, Homo sapiens
ttaaattgaacaaaa

SEQ ID NO: 1304682 - DNA, 15 bp, Homo sapiens
tttaaattgaacaaa

SEQ ID NO: 1304683 - DNA, 15 bp, Homo sapiens
ctttaaattgaacaa

SEQ ID NO: 1304684 - DNA, 15 bp, Homo sapiens
actttaaattgaaca

SEQ ID NO: 1304685 - DNA, 15 bp, Homo sapiens
aactttaaattgaac

SEQ ID NO: 1304686 - DNA, 15 bp, Homo sapiens
taactttaaattgaa

SEQ ID NO: 1304687 - DNA, 15 bp, Homo sapiens
ttaactttaaattga

SEQ ID NO: 1304688 - DNA, 15 bp, Homo sapiens
tttaactttaaattg

SEQ ID NO: 1304689 - DNA, 15 bp, Homo sapiens
ttttaactttaaatt

SEQ ID NO: 1304690 - DNA, 15 bp, Homo sapiens
attttaactttaaat

SEQ ID NO: 1304691 - DNA, 15 bp, Homo sapiens
cattttaactttaaa

SEQ ID NO: 1304692 - DNA, 15 bp, Homo sapiens
acattttaactttaa

SEQ ID NO: 1304693 - DNA, 15 bp, Homo sapiens
cacattttaacttta

SEQ ID NO: 1304694 - DNA, 15 bp, Homo sapiens
ccacattttaacttt

SEQ ID NO: 1304695 - DNA, 15 bp, Homo sapiens
accacattttaactt

SEQ ID NO: 1304696 - DNA, 15 bp, Homo sapiens
caccacattttaact

SEQ ID NO: 1304697 - DNA, 15 bp, Homo sapiens
acaccacattttaac

SEQ ID NO: 1304698 - DNA, 15 bp, Homo sapiens
cacaccacattttaa

SEQ ID NO: 1304699 - DNA, 15 bp, Homo sapiens
acacaccacatttta

SEQ ID NO: 1304700 - DNA, 15 bp, Homo sapiens
aacacaccacatttt

SEQ ID NO: 1304701 - DNA, 15 bp, Homo sapiens
aaacacaccacattt

SEQ ID NO: 1304702 - DNA, 15 bp, Homo sapiens
gaaacacaccacatt

SEQ ID NO: 1304703 - DNA, 15 bp, Homo sapiens
agaaacacaccacat

SEQ ID NO: 1304704 - DNA, 15 bp, Homo sapiens
aagaaacacaccaca

SEQ ID NO: 1304705 - DNA, 15 bp, Homo sapiens
aaagaaacacaccac

SEQ ID NO: 1304706 - DNA, 15 bp, Homo sapiens
caaagaaacacacca

SEQ ID NO: 1304707 - DNA, 15 bp, Homo sapiens
ccaaagaaacacacc

SEQ ID NO: 1304708 - DNA, 15 bp, Homo sapiens
accaaagaaacacac

SEQ ID NO: 1304709 - DNA, 15 bp, Homo sapiens
gaccaaagaaacaca

SEQ ID NO: 1304710 - DNA, 15 bp, Homo sapiens
cgaccaaagaaacac

SEQ ID NO: 1304711 - DNA, 15 bp, Homo sapiens
ccgaccaaagaaaca

SEQ ID NO: 1304712 - DNA, 15 bp, Homo sapiens
cccgaccaaagaaac

SEQ ID NO: 1304713 - DNA, 15 bp, Homo sapiens
ccccgaccaaagaaa

SEQ ID NO: 1304714 - DNA, 15 bp, Homo sapiens
cccccgaccaaagaa

SEQ ID NO: 1304715 - DNA, 15 bp, Homo sapiens
tcccccgaccaaaga

SEQ ID NO: 1304716 - DNA, 15 bp, Homo sapiens
ctcccccgaccaaag

SEQ ID NO: 1304717 - DNA, 15 bp, Homo sapiens
tctcccccgaccaaa

SEQ ID NO: 1304718 - DNA, 15 bp, Homo sapiens
ctctcccccgaccaa

SEQ ID NO: 1304719 - DNA, 15 bp, Homo sapiens
cctctcccccgacca

SEQ ID NO: 1304720 - DNA, 15 bp, Homo sapiens
ccctctcccccgacc

SEQ ID NO: 1304721 - DNA, 15 bp, Homo sapiens
tccctctcccccgac

SEQ ID NO: 1304722 - DNA, 15 bp, Homo sapiens
atccctctcccccga

SEQ ID NO: 1304723 - DNA, 15 bp, Homo sapiens
tatccctctcccccg

SEQ ID NO: 1304724 - DNA, 15 bp, Homo sapiens
ctatccctctccccc

SEQ ID NO: 1304725 - DNA, 15 bp, Homo sapiens
actatccctctcccc

SEQ ID NO: 1304726 - DNA, 15 bp, Homo sapiens
cactatccctctccc

SEQ ID NO: 1304727 - DNA, 15 bp, Homo sapiens
acactatccctctcc

SEQ ID NO: 1304728 - DNA, 15 bp, Homo sapiens
cacactatccctctc

SEQ ID NO: 1304729 - DNA, 15 bp, Homo sapiens
tcacactatccctct

SEQ ID NO: 1304730 - DNA, 15 bp, Homo sapiens
ctcacactatccctc

SEQ ID NO: 1304731 - DNA, 15 bp, Homo sapiens
cctcacactatccct

SEQ ID NO: 1304732 - DNA, 15 bp, Homo sapiens
acctcacactatccc

SEQ ID NO: 1304733 - DNA, 15 bp, Homo sapiens
aacctcacactatcc

SEQ ID NO: 1304734 - DNA, 15 bp, Homo sapiens
taacctcacactatc

SEQ ID NO: 1304735 - DNA, 15 bp, Homo sapiens
ttaacctcacactat

SEQ ID NO: 1304736 - DNA, 15 bp, Homo sapiens
cttaacctcacacta

SEQ ID NO: 1304737 - DNA, 15 bp, Homo sapiens
ccttaacctcacact

SEQ ID NO: 1304738 - DNA, 15 bp, Homo sapiens
tccttaacctcacac

SEQ ID NO: 1304739 - DNA, 15 bp, Homo sapiens
ctccttaacctcaca

SEQ ID NO: 1304740 - DNA, 15 bp, Homo sapiens
tctccttaacctcac

SEQ ID NO: 1304741 - DNA, 15 bp, Homo sapiens
ttctccttaacctca

SEQ ID NO: 1304742 - DNA, 15 bp, Homo sapiens
cttctccttaacctc

SEQ ID NO: 1304743 - DNA, 15 bp, Homo sapiens
ccttctccttaacct

SEQ ID NO: 1304744 - DNA, 15 bp, Homo sapiens
tccttctccttaacc

SEQ ID NO: 1304745 - DNA, 15 bp, Homo sapiens
ttccttctccttaac

SEQ ID NO: 1304746 - DNA, 15 bp, Homo sapiens
attccttctccttaa

SEQ ID NO: 1304747 - DNA, 15 bp, Homo sapiens
cattccttctcctta

SEQ ID NO: 1304748 - DNA, 15 bp, Homo sapiens
gcattccttctcctt

SEQ ID NO: 1304749 - DNA, 15 bp, Homo sapiens
agcattccttctcct

SEQ ID NO: 1304750 - DNA, 15 bp, Homo sapiens
aagcattccttctcc

SEQ ID NO: 1304751 - DNA, 15 bp, Homo sapiens
taagcattccttctc

SEQ ID NO: 1304752 - DNA, 15 bp, Homo sapiens
ataagcattccttct

SEQ ID NO: 1304753 - DNA, 15 bp, Homo sapiens
aataagcattccttc

SEQ ID NO: 1304754 - DNA, 15 bp, Homo sapiens
aaataagcattcctt

SEQ ID NO: 1304755 - DNA, 15 bp, Homo sapiens
aaaataagcattcct

SEQ ID NO: 1304756 - DNA, 15 bp, Homo sapiens
taaaataagcattcc

SEQ ID NO: 1304757 - DNA, 15 bp, Homo sapiens
ctaaaataagcattc

SEQ ID NO: 1304758 - DNA, 15 bp, Homo sapiens
tctaaaataagcatt

SEQ ID NO: 1304759 - DNA, 15 bp, Homo sapiens
atctaaaataagcat

SEQ ID NO: 1304760 - DNA, 15 bp, Homo sapiens
gatctaaaataagca

SEQ ID NO: 1304761 - DNA, 15 bp, Homo sapiens
tgatctaaaataagc

SEQ ID NO: 1304762 - DNA, 15 bp, Homo sapiens
gtgatctaaaataag

SEQ ID NO: 1304763 - DNA, 15 bp, Homo sapiens
agtgatctaaaataa

SEQ ID NO: 1304764 - DNA, 15 bp, Homo sapiens
tagtgatctaaaata

SEQ ID NO: 1304765 - DNA, 15 bp, Homo sapiens
atagtgatctaaaat

SEQ ID NO: 1304766 - DNA, 15 bp, Homo sapiens
tatagtgatctaaaa

SEQ ID NO: 1304767 - DNA, 15 bp, Homo sapiens
atatagtgatctaaa

SEQ ID NO: 1304768 - DNA, 15 bp, Homo sapiens
tatatagtgatctaa

SEQ ID NO: 1304769 - DNA, 15 bp, Homo sapiens
gtatatagtgatcta

SEQ ID NO: 1304770 - DNA, 15 bp, Homo sapiens
agtatatagtgatct

SEQ ID NO: 1304771 - DNA, 15 bp, Homo sapiens
cagtatatagtgatc

SEQ ID NO: 1304772 - DNA, 15 bp, Homo sapiens
tcagtatatagtgat

SEQ ID NO: 1304773 - DNA, 15 bp, Homo sapiens
ttcagtatatagtga

SEQ ID NO: 1304774 - DNA, 15 bp, Homo sapiens
cttcagtatatagtg

SEQ ID NO: 1304775 - DNA, 15 bp, Homo sapiens
tcttcagtatatagt

SEQ ID NO: 1304776 - DNA, 15 bp, Homo sapiens
ttcttcagtatatag

SEQ ID NO: 1304777 - DNA, 15 bp, Homo sapiens
attcttcagtatata

SEQ ID NO: 1304778 - DNA, 15 bp, Homo sapiens
cattcttcagtatat

SEQ ID NO: 1304779 - DNA, 15 bp, Homo sapiens
acattcttcagtata

SEQ ID NO: 1304780 - DNA, 15 bp, Homo sapiens
tacattcttcagtat

SEQ ID NO: 1304781 - DNA, 15 bp, Homo sapiens
ttacattcttcagta

SEQ ID NO: 1304782 - DNA, 15 bp, Homo sapiens
attacattcttcagt

SEQ ID NO: 1304783 - DNA, 15 bp, Homo sapiens
aattacattcttcag

SEQ ID NO: 1304784 - DNA, 15 bp, Homo sapiens
caattacattcttca

SEQ ID NO: 1304785 - DNA, 15 bp, Homo sapiens
ccaattacattcttc

SEQ ID NO: 1304786 - DNA, 15 bp, Homo sapiens
accaattacattctt

SEQ ID NO: 1304787 - DNA, 15 bp, Homo sapiens
tgaccaattacattc

SEQ ID NO: 1304788 - DNA, 15 bp, Homo sapiens
atgaccaattacatt

SEQ ID NO: 1304789 - DNA, 15 bp, Homo sapiens
aatgaccaattacat

SEQ ID NO: 1304790 - DNA, 15 bp, Homo sapiens
taatgaccaattaca

SEQ ID NO: 1304791 - DNA, 15 bp, Homo sapiens
ataatgaccaattac

SEQ ID NO: 1304792 - DNA, 15 bp, Homo sapiens
tataatgaccaatta

SEQ ID NO: 1304793 - DNA, 15 bp, Homo sapiens
ttataatgaccaatt

SEQ ID NO: 1304794 - DNA, 15 bp, Homo sapiens
cttataatgaccaat

SEQ ID NO: 1304795 - DNA, 15 bp, Homo sapiens
gcttataatgaccaa

SEQ ID NO: 1304796 - DNA, 15 bp, Homo sapiens
ggcttataatgacca

SEQ ID NO: 1304797 - DNA, 15 bp, Homo sapiens
tggcttataatgacc

SEQ ID NO: 1304798 - DNA, 15 bp, Homo sapiens
atggcttataatgac

SEQ ID NO: 1304799 - DNA, 15 bp, Homo sapiens
aatggcttataatga

SEQ ID NO: 1304800 - DNA, 15 bp, Homo sapiens
aaatggcttataatg

SEQ ID NO: 1304801 - DNA, 15 bp, Homo sapiens
taaatggcttataat

SEQ ID NO: 1304802 - DNA, 15 bp, Homo sapiens
ttaaatggcttataa

SEQ ID NO: 1304803 - DNA, 15 bp, Homo sapiens
cttaaatggcttata

SEQ ID NO: 1304804 - DNA, 15 bp, Homo sapiens
tcttaaatggcttat

SEQ ID NO: 1304805 - DNA, 15 bp, Homo sapiens
ctcttaaatggctta

SEQ ID NO: 1304806 - DNA, 15 bp, Homo sapiens
cctcttaaatggctt

SEQ ID NO: 1304807 - DNA, 15 bp, Homo sapiens
gcctcttaaatggct

SEQ ID NO: 1304808 - DNA, 15 bp, Homo sapiens
agcctcttaaatggc

SEQ ID NO: 1304809 - DNA, 15 bp, Homo sapiens
aagcctcttaaatgg

SEQ ID NO: 1304810 - DNA, 15 bp, Homo sapiens
taagcctcttaaatg

SEQ ID NO: 1304811 - DNA, 15 bp, Homo sapiens
ataagcctcttaaat

SEQ ID NO: 1304812 - DNA, 15 bp, Homo sapiens
aataagcctcttaaa

SEQ ID NO: 1304813 - DNA, 15 bp, Homo sapiens
aaataagcctcttaa

SEQ ID NO: 1304814 - DNA, 15 bp, Homo sapiens
caaataagcctctta

SEQ ID NO: 1304815 - DNA, 15 bp, Homo sapiens
tcaaataagcctctt

SEQ ID NO: 1304816 - DNA, 15 bp, Homo sapiens
ctcaaataagcctct

SEQ ID NO: 1304817 - DNA, 15 bp, Homo sapiens
actcaaataagcctc

SEQ ID NO: 1304818 - DNA, 15 bp, Homo sapiens
aactcaaataagcct

SEQ ID NO: 1304819 - DNA, 15 bp, Homo sapiens
taactcaaataagcc

SEQ ID NO: 1304820 - DNA, 15 bp, Homo sapiens
ataactcaaataagc

SEQ ID NO: 1304821 - DNA, 15 bp, Homo sapiens
aataactcaaataag

SEQ ID NO: 1304822 - DNA, 15 bp, Homo sapiens
aaataactcaaataa

SEQ ID NO: 1304823 - DNA, 15 bp, Homo sapiens
caaataactcaaata

SEQ ID NO: 1304824 - DNA, 15 bp, Homo sapiens
tcaaataactcaaat

SEQ ID NO: 1304825 - DNA, 15 bp, Homo sapiens
ctcaaataactcaaa

SEQ ID NO: 1304826 - DNA, 15 bp, Homo sapiens
cctcaaataactcaa

SEQ ID NO: 1304827 - DNA, 15 bp, Homo sapiens
gcctcaaataactca

SEQ ID NO: 1304828 - DNA, 15 bp, Homo sapiens
ggcctcaaataactc

SEQ ID NO: 1304829 - DNA, 15 bp, Homo sapiens
tggcctcaaataact

SEQ ID NO: 1304830 - DNA, 15 bp, Homo sapiens
atggcctcaaataac

SEQ ID NO: 1304831 - DNA, 15 bp, Homo sapiens
gatggcctcaaataa

SEQ ID NO: 1304832 - DNA, 15 bp, Homo sapiens
agatggcctcaaata

SEQ ID NO: 1304833 - DNA, 15 bp, Homo sapiens
aagatggcctcaaat

SEQ ID NO: 1304834 - DNA, 15 bp, Homo sapiens
caagatggcctcaaa

SEQ ID NO: 1304835 - DNA, 15 bp, Homo sapiens
ccaagatggcctcaa

SEQ ID NO: 1304836 - DNA, 15 bp, Homo sapiens
cccaagatggcctca

SEQ ID NO: 1304837 - DNA, 15 bp, Homo sapiens
ccccaagatggcctc

SEQ ID NO: 1304838 - DNA, 15 bp, Homo sapiens
tccccaagatggcct

SEQ ID NO: 1304839 - DNA, 15 bp, Homo sapiens
atccccaagatggcc

SEQ ID NO: 1304840 - DNA, 15 bp, Homo sapiens
tatccccaagatggc

SEQ ID NO: 1304841 - DNA, 15 bp, Homo sapiens
ttatccccaagatgg

SEQ ID NO: 1304842 - DNA, 15 bp, Homo sapiens
attatccccaagatg

SEQ ID NO: 1304843 - DNA, 15 bp, Homo sapiens
tattatccccaagat

SEQ ID NO: 1304844 - DNA, 15 bp, Homo sapiens
atattatccccaaga

SEQ ID NO: 1304845 - DNA, 15 bp, Homo sapiens
aatattatccccaag

SEQ ID NO: 1304846 - DNA, 15 bp, Homo sapiens
aaatattatccccaa

SEQ ID NO: 1304847 - DNA, 15 bp, Homo sapiens
gaaatattatcccca

SEQ ID NO: 1304848 - DNA, 15 bp, Homo sapiens
tgaaatattatcccc

SEQ ID NO: 1304849 - DNA, 15 bp, Homo sapiens
gtgaaatattatccc

SEQ ID NO: 1304850 - DNA, 15 bp, Homo sapiens
agtgaaatattatcc

SEQ ID NO: 1304851 - DNA, 15 bp, Homo sapiens
tagtgaaatattatc

SEQ ID NO: 1304852 - DNA, 15 bp, Homo sapiens
ctagtgaaatattat

SEQ ID NO: 1304853 - DNA, 15 bp, Homo sapiens
cctagtgaaatatta

SEQ ID NO: 1304854 - DNA, 15 bp, Homo sapiens
gcctagtgaaatatt

SEQ ID NO: 1304855 - DNA, 15 bp, Homo sapiens
agcctagtgaaatat

SEQ ID NO: 1304856 - DNA, 15 bp, Homo sapiens
aagcctagtgaaata

SEQ ID NO: 1304857 - DNA, 15 bp, Homo sapiens
gaagcctagtgaaat

SEQ ID NO: 1304858 - DNA, 15 bp, Homo sapiens
agaagcctagtgaaa

SEQ ID NO: 1304859 - DNA, 15 bp, Homo sapiens
gagaagcctagtgaa

SEQ ID NO: 1304860 - DNA, 15 bp, Homo sapiens
agagaagcctagtga

SEQ ID NO: 1304861 - DNA, 15 bp, Homo sapiens
aagagaagcctagtg

SEQ ID NO: 1304862 - DNA, 15 bp, Homo sapiens
gaagagaagcctagt

SEQ ID NO: 1304863 - DNA, 15 bp, Homo sapiens
agaagagaagcctag

SEQ ID NO: 1304864 - DNA, 15 bp, Homo sapiens
cagaagagaagccta

SEQ ID NO: 1304865 - DNA, 15 bp, Homo sapiens
tcagaagagaagcct

SEQ ID NO: 1304866 - DNA, 15 bp, Homo sapiens
ctcagaagagaagcc

SEQ ID NO: 1304867 - DNA, 15 bp, Homo sapiens
actcagaagagaagc

SEQ ID NO: 1304868 - DNA, 15 bp, Homo sapiens
tactcagaagagaag

SEQ ID NO: 1304869 - DNA, 15 bp, Homo sapiens
atactcagaagagaa

SEQ ID NO: 1304870 - DNA, 15 bp, Homo sapiens
tatactcagaagaga

SEQ ID NO: 1304871 - DNA, 15 bp, Homo sapiens
gtatactcagaagag

SEQ ID NO: 1304872 - DNA, 15 bp, Homo sapiens
agtatactcagaaga

SEQ ID NO: 1304873 - DNA, 15 bp, Homo sapiens
cagtatactcagaag

SEQ ID NO: 1304874 - DNA, 15 bp, Homo sapiens
ccagtatactcagaa

SEQ ID NO: 1304875 - DNA, 15 bp, Homo sapiens
accagtatactcaga

SEQ ID NO: 1304876 - DNA, 15 bp, Homo sapiens
taccagtatactcag

SEQ ID NO: 1304877 - DNA, 15 bp, Homo sapiens
ataccagtatactca

SEQ ID NO: 1304878 - DNA, 15 bp, Homo sapiens
tataccagtatactc

SEQ ID NO: 1304879 - DNA, 15 bp, Homo sapiens
gtataccagtatact

SEQ ID NO: 1304880 - DNA, 15 bp, Homo sapiens
agtataccagtatac

SEQ ID NO: 1304881 - DNA, 15 bp, Homo sapiens
cagtataccagtata

SEQ ID NO: 1304882 - DNA, 15 bp, Homo sapiens
tcagtataccagtat

SEQ ID NO: 1304883 - DNA, 15 bp, Homo sapiens
ttcagtataccagta

SEQ ID NO: 1304884 - DNA, 15 bp, Homo sapiens
attcagtataccagt

SEQ ID NO: 1304885 - DNA, 15 bp, Homo sapiens
gattcagtataccag

SEQ ID NO: 1304886 - DNA, 15 bp, Homo sapiens
ggattcagtatacca

SEQ ID NO: 1304887 - DNA, 15 bp, Homo sapiens
tggattcagtatacc

SEQ ID NO: 1304888 - DNA, 15 bp, Homo sapiens
ttggattcagtatac

SEQ ID NO: 1304889 - DNA, 15 bp, Homo sapiens
tttggattcagtata

SEQ ID NO: 1304890 - DNA, 15 bp, Homo sapiens
ttttggattcagtat

SEQ ID NO: 1304891 - DNA, 15 bp, Homo sapiens
tttttggattcagta

SEQ ID NO: 1304892 - DNA, 15 bp, Homo sapiens
ttttttggattcagt

SEQ ID NO: 1304893 - DNA, 15 bp, Homo sapiens
cttttttggattcag

SEQ ID NO: 1304894 - DNA, 15 bp, Homo sapiens
ccttttttggattca

SEQ ID NO: 1304895 - DNA, 15 bp, Homo sapiens
accttttttggattc

SEQ ID NO: 1304896 - DNA, 15 bp, Homo sapiens
taccttttttggatt

SEQ ID NO: 1304897 - DNA, 15 bp, Homo sapiens
gtaccttttttggat

SEQ ID NO: 1304898 - DNA, 15 bp, Homo sapiens
agtaccttttttgga

SEQ ID NO: 1304899 - DNA, 15 bp, Homo sapiens
aagtaccttttttgg

SEQ ID NO: 1304900 - DNA, 15 bp, Homo sapiens
aaagtaccttttttg

SEQ ID NO: 1304901 - DNA, 15 bp, Homo sapiens
aaaagtacctttttt

SEQ ID NO: 1304902 - DNA, 15 bp, Homo sapiens
aaaaagtaccttttt

SEQ ID NO: 1304903 - DNA, 15 bp, Homo sapiens
caaaaagtacctttt

SEQ ID NO: 1304904 - DNA, 15 bp, Homo sapiens
tcaaaaagtaccttt

SEQ ID NO: 1304905 - DNA, 15 bp, Homo sapiens
ttcaaaaagtacctt

SEQ ID NO: 1304906 - DNA, 15 bp, Homo sapiens
tttcaaaaagtacct

SEQ ID NO: 1304907 - DNA, 15 bp, Homo sapiens
atttcaaaaagtacc

SEQ ID NO: 1304908 - DNA, 15 bp, Homo sapiens
gatttcaaaaagtac

SEQ ID NO: 1304909 - DNA, 15 bp, Homo sapiens
ggatttcaaaaagta

SEQ ID NO: 1304910 - DNA, 15 bp, Homo sapiens
gggatttcaaaaagt

SEQ ID NO: 1304911 - DNA, 15 bp, Homo sapiens
agggatttcaaaaag

SEQ ID NO: 1304912 - DNA, 15 bp, Homo sapiens
gagggatttcaaaaa

SEQ ID NO: 1304913 - DNA, 15 bp, Homo sapiens
ggagggatttcaaaa

SEQ ID NO: 1304914 - DNA, 15 bp, Homo sapiens
cggagggatttcaaa

SEQ ID NO: 1304915 - DNA, 15 bp, Homo sapiens
tcggagggatttcaa

SEQ ID NO: 1304916 - DNA, 15 bp, Homo sapiens
ttcggagggatttca

SEQ ID NO: 1304917 - DNA, 15 bp, Homo sapiens
cttcggagggatttc

SEQ ID NO: 1304918 - DNA, 15 bp, Homo sapiens
tcttcggagggattt

SEQ ID NO: 1304919 - DNA, 15 bp, Homo sapiens
gtcttcggagggatt

SEQ ID NO: 1304920 - DNA, 15 bp, Homo sapiens
ggtcttcggagggat

SEQ ID NO: 1304921 - DNA, 15 bp, Homo sapiens
aggtcttcggaggga

SEQ ID NO: 1304922 - DNA, 15 bp, Homo sapiens
aaggtcttcggaggg

SEQ ID NO: 1304923 - DNA, 15 bp, Homo sapiens
aaaggtcttcggagg

SEQ ID NO: 1304924 - DNA, 15 bp, Homo sapiens
caaaggtcttcggag

SEQ ID NO: 1304925 - DNA, 15 bp, Homo sapiens
tcaaaggtcttcgga

SEQ ID NO: 1304926 - DNA, 15 bp, Homo sapiens
ctcaaaggtcttcgg

SEQ ID NO: 1304927 - DNA, 15 bp, Homo sapiens
tctcaaaggtcttcg

SEQ ID NO: 1304928 - DNA, 15 bp, Homo sapiens
atctcaaaggtcttc

SEQ ID NO: 1304929 - DNA, 15 bp, Homo sapiens
aatctcaaaggtctt

SEQ ID NO: 1304930 - DNA, 15 bp, Homo sapiens
caatctcaaaggtct

SEQ ID NO: 1304931 - DNA, 15 bp, Homo sapiens
acaatctcaaaggtc

SEQ ID NO: 1304932 - DNA, 15 bp, Homo sapiens
tacaatctcaaaggt

SEQ ID NO: 1304933 - DNA, 15 bp, Homo sapiens
ctacaatctcaaagg

SEQ ID NO: 1304934 - DNA, 15 bp, Homo sapiens
tctacaatctcaaag

SEQ ID NO: 1304935 - DNA, 15 bp, Homo sapiens
ctctacaatctcaaa

SEQ ID NO: 1304936 - DNA, 15 bp, Homo sapiens
actctacaatctcaa

SEQ ID NO: 1304937 - DNA, 15 bp, Homo sapiens
cactctacaatctca

SEQ ID NO: 1304938 - DNA, 15 bp, Homo sapiens
gcactctacaatctc

SEQ ID NO: 1304939 - DNA, 15 bp, Homo sapiens
ggcactctacaatct

SEQ ID NO: 1304940 - DNA, 15 bp, Homo sapiens
tggcactctacaatc

SEQ ID NO: 1304941 - DNA, 15 bp, Homo sapiens
ttggcactctacaat

SEQ ID NO: 1304942 - DNA, 15 bp, Homo sapiens
tttggcactctacaa

SEQ ID NO: 1304943 - DNA, 15 bp, Homo sapiens
ctttggcactctaca

SEQ ID NO: 1304944 - DNA, 15 bp, Homo sapiens
cctttggcactctac

SEQ ID NO: 1304945 - DNA, 15 bp, Homo sapiens
tcctttggcactcta

SEQ ID NO: 1304946 - DNA, 15 bp, Homo sapiens
ctcctttggcactct

SEQ ID NO: 1304947 - DNA, 15 bp, Homo sapiens
actcctttggcactc

SEQ ID NO: 1304948 - DNA, 15 bp, Homo sapiens
tactcctttggcact

SEQ ID NO: 1304949 - DNA, 15 bp, Homo sapiens
atactcctttggcac

SEQ ID NO: 1304950 - DNA, 15 bp, Homo sapiens
aatactcctttggca

SEQ ID NO: 1304951 - DNA, 15 bp, Homo sapiens
gaatactcctttggc

SEQ ID NO: 1304952 - DNA, 15 bp, Homo sapiens
tgaatactcctttgg

SEQ ID NO: 1304953 - DNA, 15 bp, Homo sapiens
ttgaatactcctttg

SEQ ID NO: 1304954 - DNA, 15 bp, Homo sapiens
cttgaatactccttt

SEQ ID NO: 1304955 - DNA, 15 bp, Homo sapiens
tcttgaatactcctt

SEQ ID NO: 1304956 - DNA, 15 bp, Homo sapiens
ctcttgaatactcct

SEQ ID NO: 1304957 - DNA, 15 bp, Homo sapiens
actcttgaatactcc

SEQ ID NO: 1304958 - DNA, 15 bp, Homo sapiens
cactcttgaatactc

SEQ ID NO: 1304959 - DNA, 15 bp, Homo sapiens
ccactcttgaatact

SEQ ID NO: 1304960 - DNA, 15 bp, Homo sapiens
gccactcttgaatac

SEQ ID NO: 1304961 - DNA, 15 bp, Homo sapiens
ggccactcttgaata

SEQ ID NO: 1304962 - DNA, 15 bp, Homo sapiens
aggccactcttgaat

SEQ ID NO: 1304963 - DNA, 15 bp, Homo sapiens
gaggccactcttgaa

SEQ ID NO: 1304964 - DNA, 15 bp, Homo sapiens
agaggccactcttga

SEQ ID NO: 1304965 - DNA, 15 bp, Homo sapiens
tagaggccactcttg

SEQ ID NO: 1304966 - DNA, 15 bp, Homo sapiens
gtagaggccactctt

SEQ ID NO: 1304967 - DNA, 15 bp, Homo sapiens
agtagaggccactct

SEQ ID NO: 1304968 - DNA, 15 bp, Homo sapiens
cagtagaggccactc

SEQ ID NO: 1304969 - DNA, 15 bp, Homo sapiens
tcagtagaggccact

SEQ ID NO: 1304970 - DNA, 15 bp, Homo sapiens
atcagtagaggccac

SEQ ID NO: 1304971 - DNA, 15 bp, Homo sapiens
tatcagtagaggcca

SEQ ID NO: 1304972 - DNA, 15 bp, Homo sapiens
atatcagtagaggcc

SEQ ID NO: 1304973 - DNA, 15 bp, Homo sapiens
catatcagtagaggc

SEQ ID NO: 1304974 - DNA, 15 bp, Homo sapiens
ccatatcagtagagg

SEQ ID NO: 1304975 - DNA, 15 bp, Homo sapiens
tccatatcagtagag

SEQ ID NO: 1304976 - DNA, 15 bp, Homo sapiens
ttccatatcagtaga

SEQ ID NO: 1304977 - DNA, 15 bp, Homo sapiens
cttccatatcagtag

SEQ ID NO: 1304978 - DNA, 15 bp, Homo sapiens
gcttccatatcagta

SEQ ID NO: 1304979 - DNA, 15 bp, Homo sapiens
tgcttccatatcagt

SEQ ID NO: 1304980 - DNA, 15 bp, Homo sapiens
gtgcttccatatcag

SEQ ID NO: 1304981 - DNA, 15 bp, Homo sapiens
agtgcttccatatca

SEQ ID NO: 1304982 - DNA, 15 bp, Homo sapiens
cagtgcttccatatc

SEQ ID NO: 1304983 - DNA, 15 bp, Homo sapiens
gcagtgcttccatat

SEQ ID NO: 1304984 - DNA, 15 bp, Homo sapiens
agcagtgcttccata

SEQ ID NO: 1304985 - DNA, 15 bp, Homo sapiens
cagcagtgcttccat

SEQ ID NO: 1304986 - DNA, 15 bp, Homo sapiens
acagcagtgcttcca

SEQ ID NO: 1304987 - DNA, 15 bp, Homo sapiens
tacagcagtgcttcc

SEQ ID NO: 1304988 - DNA, 15 bp, Homo sapiens
ttacagcagtgcttc

SEQ ID NO: 1304989 - DNA, 15 bp, Homo sapiens
gttacagcagtgctt

SEQ ID NO: 1304990 - DNA, 15 bp, Homo sapiens
ggttacagcagtgct

SEQ ID NO: 1304991 - DNA, 15 bp, Homo sapiens
aggttacagcagtgc

SEQ ID NO: 1304992 - DNA, 15 bp, Homo sapiens
gaggttacagcagtg

SEQ ID NO: 1304993 - DNA, 15 bp, Homo sapiens
ggaggttacagcagt

SEQ ID NO: 1304994 - DNA, 15 bp, Homo sapiens
tggaggttacagcag

SEQ ID NO: 1304995 - DNA, 15 bp, Homo sapiens
atggaggttacagca

SEQ ID NO: 1304996 - DNA, 15 bp, Homo sapiens
catggaggttacagc

SEQ ID NO: 1304997 - DNA, 15 bp, Homo sapiens
ccatggaggttacag

SEQ ID NO: 1304998 - DNA, 15 bp, Homo sapiens
accatggaggttaca

SEQ ID NO: 1304999 - DNA, 15 bp, Homo sapiens
aaccatggaggttac

SEQ ID NO: 1305000 - DNA, 15 bp, Homo sapiens
taaccatggaggtta

SEQ ID NO: 1305001 - DNA, 15 bp, Homo sapiens
ataaccatggaggtt

SEQ ID NO: 1305002 - DNA, 15 bp, Homo sapiens
cataaccatggaggt

SEQ ID NO: 1305003 - DNA, 15 bp, Homo sapiens
tcataaccatggagg

SEQ ID NO: 1305004 - DNA, 15 bp, Homo sapiens
ttcataaccatggag

SEQ ID NO: 1305005 - DNA, 15 bp, Homo sapiens
tttcataaccatgga

SEQ ID NO: 1305006 - DNA, 15 bp, Homo sapiens
gtttcataaccatgg

SEQ ID NO: 1305007 - DNA, 15 bp, Homo sapiens
agtttcataaccatg

SEQ ID NO: 1305008 - DNA, 15 bp, Homo sapiens
tagtttcataaccat

SEQ ID NO: 1305009 - DNA, 15 bp, Homo sapiens
ttagtttcataacca

SEQ ID NO: 1305010 - DNA, 15 bp, Homo sapiens
tttagtttcataacc

SEQ ID NO: 1305011 - DNA, 15 bp, Homo sapiens
ctttagtttcataac

SEQ ID NO: 1305012 - DNA, 15 bp, Homo sapiens
tctttagtttcataa

SEQ ID NO: 1305013 - DNA, 15 bp, Homo sapiens
atctttagtttcata

SEQ ID NO: 1305014 - DNA, 15 bp, Homo sapiens
aatctttagtttcat

SEQ ID NO: 1305015 - DNA, 15 bp, Homo sapiens
caatctttagtttca

SEQ ID NO: 1305016 - DNA, 15 bp, Homo sapiens
tcaatctttagtttc

SEQ ID NO: 1305017 - DNA, 15 bp, Homo sapiens
ttcaatctttagttt

SEQ ID NO: 1305018 - DNA, 15 bp, Homo sapiens
cttcaatctttagtt

SEQ ID NO: 1305019 - DNA, 15 bp, Homo sapiens
gcttcaatctttagt

SEQ ID NO: 1305020 - DNA, 15 bp, Homo sapiens
agcttcaatctttag

SEQ ID NO: 1305021 - DNA, 15 bp, Homo sapiens
tagcttcaatcttta

SEQ ID NO: 1305022 - DNA, 15 bp, Homo sapiens
ctagcttcaatcttt

SEQ ID NO: 1305023 - DNA, 15 bp, Homo sapiens
tctagcttcaatctt

SEQ ID NO: 1305024 - DNA, 15 bp, Homo sapiens
ttctagcttcaatct

SEQ ID NO: 1305025 - DNA, 15 bp, Homo sapiens
attctagcttcaatc

SEQ ID NO: 1305026 - DNA, 15 bp, Homo sapiens
gattctagcttcaat

SEQ ID NO: 1305027 - DNA, 15 bp, Homo sapiens
ggattctagcttcaa

SEQ ID NO: 1305028 - DNA, 15 bp, Homo sapiens
tggattctagcttca

SEQ ID NO: 1305029 - DNA, 15 bp, Homo sapiens
gtggattctagcttc

SEQ ID NO: 1305030 - DNA, 15 bp, Homo sapiens
agtggattctagctt

SEQ ID NO: 1305031 - DNA, 15 bp, Homo sapiens
cagtggattctagct

SEQ ID NO: 1305032 - DNA, 15 bp, Homo sapiens
ccagtggattctagc

SEQ ID NO: 1305033 - DNA, 15 bp, Homo sapiens
tccagtggattctag

SEQ ID NO: 1305034 - DNA, 15 bp, Homo sapiens
atccagtggattcta

SEQ ID NO: 1305035 - DNA, 15 bp, Homo sapiens
tatccagtggattct

SEQ ID NO: 1305036 - DNA, 15 bp, Homo sapiens
ttatccagtggattc

SEQ ID NO: 1305037 - DNA, 15 bp, Homo sapiens
tttatccagtggatt

SEQ ID NO: 1305038 - DNA, 15 bp, Homo sapiens
gtttatccagtggat

SEQ ID NO: 1305039 - DNA, 15 bp, Homo sapiens
tgtttatccagtgga

SEQ ID NO: 1305040 - DNA, 15 bp, Homo sapiens
ctgtttatccagtgg

SEQ ID NO: 1305041 - DNA, 15 bp, Homo sapiens
tctgtttatccagtg

SEQ ID NO: 1305042 - DNA, 15 bp, Homo sapiens
ttctgtttatccagt

SEQ ID NO: 1305043 - DNA, 15 bp, Homo sapiens
gttctgtttatccag

SEQ ID NO: 1305044 - DNA, 15 bp, Homo sapiens
tgttctgtttatcca

SEQ ID NO: 1305045 - DNA, 15 bp, Homo sapiens
ttgttctgtttatcc

SEQ ID NO: 1305046 - DNA, 15 bp, Homo sapiens
tttgttctgtttatc

SEQ ID NO: 1305047 - DNA, 15 bp, Homo sapiens
ctttgttctgtttat

SEQ ID NO: 1305048 - DNA, 15 bp, Homo sapiens
cctttgttctgttta

SEQ ID NO: 1305049 - DNA, 15 bp, Homo sapiens
gcctttgttctgttt

SEQ ID NO: 1305050 - DNA, 15 bp, Homo sapiens
ggcctttgttctgtt

SEQ ID NO: 1305051 - DNA, 15 bp, Homo sapiens
tggcctttgttctgt

SEQ ID NO: 1305052 - DNA, 15 bp, Homo sapiens
ttggcctttgttctg

SEQ ID NO: 1305053 - DNA, 15 bp, Homo sapiens
attggcctttgttct

SEQ ID NO: 1305054 - DNA, 15 bp, Homo sapiens
aattggcctttgttc

SEQ ID NO: 1305055 - DNA, 15 bp, Homo sapiens
taattggcctttgtt

SEQ ID NO: 1305056 - DNA, 15 bp, Homo sapiens
gtaattggcctttgt

SEQ ID NO: 1305057 - DNA, 15 bp, Homo sapiens
tgtaattggcctttg

SEQ ID NO: 1305058 - DNA, 15 bp, Homo sapiens
ttgtaattggccttt

SEQ ID NO: 1305059 - DNA, 15 bp, Homo sapiens
attgtaattggcctt

SEQ ID NO: 1305060 - DNA, 15 bp, Homo sapiens
cattgtaattggcct

SEQ ID NO: 1305061 - DNA, 15 bp, Homo sapiens
acattgtaattggcc

SEQ ID NO: 1305062 - DNA, 15 bp, Homo sapiens
aacattgtaattggc

SEQ ID NO: 1305063 - DNA, 15 bp, Homo sapiens
aaacattgtaattgg

SEQ ID NO: 1305064 - DNA, 15 bp, Homo sapiens
aaaacattgtaattg

SEQ ID NO: 1305065 - DNA, 15 bp, Homo sapiens
aaaaacattgtaatt

SEQ ID NO: 1305066 - DNA, 15 bp, Homo sapiens
taaaaacattgtaat

SEQ ID NO: 1305067 - DNA, 15 bp, Homo sapiens
ttaaaaacattgtaa

SEQ ID NO: 1305068 - DNA, 15 bp, Homo sapiens
tttaaaaacattgta

SEQ ID NO: 1305069 - DNA, 15 bp, Homo sapiens
ttttaaaaacattgt

SEQ ID NO: 1305070 - DNA, 15 bp, Homo sapiens
tttttaaaaacattg

SEQ ID NO: 1305071 - DNA, 15 bp, Homo sapiens
gtttttaaaaacatt

SEQ ID NO: 1305072 - DNA, 15 bp, Homo sapiens
tatgtttttaaaaac

SEQ ID NO: 1305073 - DNA, 15 bp, Homo sapiens
ttatgtttttaaaaa

SEQ ID NO: 1305074 - DNA, 15 bp, Homo sapiens
tttatgtttttaaaa

SEQ ID NO: 1305075 - DNA, 15 bp, Homo sapiens
atttatgtttttaaa

SEQ ID NO: 1305076 - DNA, 15 bp, Homo sapiens
catttatgtttttaa

SEQ ID NO: 1305077 - DNA, 15 bp, Homo sapiens
acatttatgttttta

SEQ ID NO: 1305078 - DNA, 15 bp, Homo sapiens
tacatttatgttttt

SEQ ID NO: 1305079 - DNA, 15 bp, Homo sapiens
atacatttatgtttt

SEQ ID NO: 1305080 - DNA, 15 bp, Homo sapiens
tatacatttatgttt

SEQ ID NO: 1305081 - DNA, 15 bp, Homo sapiens
atatacatttatgtt

SEQ ID NO: 1305082 - DNA, 15 bp, Homo sapiens
gatatacatttatgt

SEQ ID NO: 1305083 - DNA, 15 bp, Homo sapiens
tgatatacatttatg

SEQ ID NO: 1305084 - DNA, 15 bp, Homo sapiens
gtgatatacatttat

SEQ ID NO: 1305085 - DNA, 15 bp, Homo sapiens
agtgatatacattta

SEQ ID NO: 1305086 - DNA, 15 bp, Homo sapiens
aagtgatatacattt

SEQ ID NO: 1305087 - DNA, 15 bp, Homo sapiens
aaagtgatatacatt

SEQ ID NO: 1305088 - DNA, 15 bp, Homo sapiens
caaagtgatatacat

SEQ ID NO: 1305089 - DNA, 15 bp, Homo sapiens
gcaaagtgatataca

SEQ ID NO: 1305090 - DNA, 15 bp, Homo sapiens
tgcaaagtgatatac

SEQ ID NO: 1305091 - DNA, 15 bp, Homo sapiens
ttgcaaagtgatata

SEQ ID NO: 1305092 - DNA, 15 bp, Homo sapiens
tttgcaaagtgatat

SEQ ID NO: 1305093 - DNA, 15 bp, Homo sapiens
atttgcaaagtgata

SEQ ID NO: 1305094 - DNA, 15 bp, Homo sapiens
aatttgcaaagtgat

SEQ ID NO: 1305095 - DNA, 15 bp, Homo sapiens
taatttgcaaagtga

SEQ ID NO: 1305096 - DNA, 15 bp, Homo sapiens
ataatttgcaaagtg

SEQ ID NO: 1305097 - DNA, 15 bp, Homo sapiens
cataatttgcaaagt

SEQ ID NO: 1305098 - DNA, 15 bp, Homo sapiens
acataatttgcaaag

SEQ ID NO: 1305099 - DNA, 15 bp, Homo sapiens
aacataatttgcaaa

SEQ ID NO: 1305100 - DNA, 15 bp, Homo sapiens
caacataatttgcaa

SEQ ID NO: 1305101 - DNA, 15 bp, Homo sapiens
gcaacataatttgca

SEQ ID NO: 1305102 - DNA, 15 bp, Homo sapiens
tgcaacataatttgc

SEQ ID NO: 1305103 - DNA, 15 bp, Homo sapiens
ttgcaacataatttg

SEQ ID NO: 1305104 - DNA, 15 bp, Homo sapiens
tttgcaacataattt

SEQ ID NO: 1305105 - DNA, 15 bp, Homo sapiens
atttgcaacataatt

SEQ ID NO: 1305106 - DNA, 15 bp, Homo sapiens
catttgcaacataat

SEQ ID NO: 1305107 - DNA, 15 bp, Homo sapiens
acatttgcaacataa

SEQ ID NO: 1305108 - DNA, 15 bp, Homo sapiens
aacatttgcaacata

SEQ ID NO: 1305109 - DNA, 15 bp, Homo sapiens
taacatttgcaacat

SEQ ID NO: 1305110 - DNA, 15 bp, Homo sapiens
ttaacatttgcaaca

SEQ ID NO: 1305111 - DNA, 15 bp, Homo sapiens
tttaacatttgcaac

SEQ ID NO: 1305112 - DNA, 15 bp, Homo sapiens
ttttaacatttgcaa

SEQ ID NO: 1305113 - DNA, 15 bp, Homo sapiens
cttttaacatttgca

SEQ ID NO: 1305114 - DNA, 15 bp, Homo sapiens
tcttttaacatttgc

SEQ ID NO: 1305115 - DNA, 15 bp, Homo sapiens
ttcttttaacatttg

SEQ ID NO: 1305116 - DNA, 15 bp, Homo sapiens
tttcttttaacattt

SEQ ID NO: 1305117 - DNA, 15 bp, Homo sapiens
ctttcttttaacatt

SEQ ID NO: 1305118 - DNA, 15 bp, Homo sapiens
actttcttttaacat

SEQ ID NO: 1305119 - DNA, 15 bp, Homo sapiens
aactttcttttaaca

SEQ ID NO: 1305120 - DNA, 15 bp, Homo sapiens
aaactttcttttaac

SEQ ID NO: 1305121 - DNA, 15 bp, Homo sapiens
aaaactttcttttaa

SEQ ID NO: 1305122 - DNA, 15 bp, Homo sapiens
caaaactttctttta

SEQ ID NO: 1305123 - DNA, 15 bp, Homo sapiens
gcaaaactttctttt

SEQ ID NO: 1305124 - DNA, 15 bp, Homo sapiens
agcaaaactttcttt

SEQ ID NO: 1305125 - DNA, 15 bp, Homo sapiens
aagcaaaactttctt

SEQ ID NO: 1305126 - DNA, 15 bp, Homo sapiens
caagcaaaactttct

SEQ ID NO: 1305127 - DNA, 15 bp, Homo sapiens
gcaagcaaaactttc

SEQ ID NO: 1305128 - DNA, 15 bp, Homo sapiens
tgcaagcaaaacttt

SEQ ID NO: 1305129 - DNA, 15 bp, Homo sapiens
ctgcaagcaaaactt

SEQ ID NO: 1305130 - DNA, 15 bp, Homo sapiens
tctgcaagcaaaact

SEQ ID NO: 1305131 - DNA, 15 bp, Homo sapiens
ttctgcaagcaaaac

SEQ ID NO: 1305132 - DNA, 15 bp, Homo sapiens
tttctgcaagcaaaa

SEQ ID NO: 1305133 - DNA, 15 bp, Homo sapiens
gtttctgcaagcaaa

SEQ ID NO: 1305134 - DNA, 15 bp, Homo sapiens
tgtttctgcaagcaa

SEQ ID NO: 1305135 - DNA, 15 bp, Homo sapiens
ttgtttctgcaagca

SEQ ID NO: 1305136 - DNA, 15 bp, Homo sapiens
tttgtttctgcaagc

SEQ ID NO: 1305137 - DNA, 15 bp, Homo sapiens
ttttgtttctgcaag

SEQ ID NO: 1305138 - DNA, 15 bp, Homo sapiens
cttttgtttctgcaa

SEQ ID NO: 1305139 - DNA, 15 bp, Homo sapiens
ccttttgtttctgca

SEQ ID NO: 1305140 - DNA, 15 bp, Homo sapiens
tccttttgtttctgc

SEQ ID NO: 1305141 - DNA, 15 bp, Homo sapiens
ttccttttgtttctg

SEQ ID NO: 1305142 - DNA, 15 bp, Homo sapiens
gttccttttgtttct

SEQ ID NO: 1305143 - DNA, 15 bp, Homo sapiens
tgttccttttgtttc

SEQ ID NO: 1305144 - DNA, 15 bp, Homo sapiens
atgttccttttgttt

SEQ ID NO: 1305145 - DNA, 15 bp, Homo sapiens
aatgttccttttgtt

SEQ ID NO: 1305146 - DNA, 15 bp, Homo sapiens
aaatgttccttttgt

SEQ ID NO: 1305147 - DNA, 15 bp, Homo sapiens
caaatgttccttttg

SEQ ID NO: 1305148 - DNA, 15 bp, Homo sapiens
acaaatgttcctttt

SEQ ID NO: 1305149 - DNA, 15 bp, Homo sapiens
tacaaatgttccttt

SEQ ID NO: 1305150 - DNA, 15 bp, Homo sapiens
atacaaatgttcctt

SEQ ID NO: 1305151 - DNA, 15 bp, Homo sapiens
tatacaaatgttcct

SEQ ID NO: 1305152 - DNA, 15 bp, Homo sapiens
ttatacaaatgttcc

SEQ ID NO: 1305153 - DNA, 15 bp, Homo sapiens
cttatacaaatgttc

SEQ ID NO: 1305154 - DNA, 15 bp, Homo sapiens
ccttatacaaatgtt

SEQ ID NO: 1305155 - DNA, 15 bp, Homo sapiens
tccttatacaaatgt

SEQ ID NO: 1305156 - DNA, 15 bp, Homo sapiens
atccttatacaaatg

SEQ ID NO: 1305157 - DNA, 15 bp, Homo sapiens
catccttatacaaat

SEQ ID NO: 1305158 - DNA, 15 bp, Homo sapiens
gcatccttatacaaa

SEQ ID NO: 1305159 - DNA, 15 bp, Homo sapiens
tgcatccttatacaa

SEQ ID NO: 1305160 - DNA, 15 bp, Homo sapiens
ttgcatccttataca

SEQ ID NO: 1305161 - DNA, 15 bp, Homo sapiens
tttgcatccttatac

SEQ ID NO: 1305162 - DNA, 15 bp, Homo sapiens
ttttgcatccttata

SEQ ID NO: 1305163 - DNA, 15 bp, Homo sapiens
gttttgcatccttat

SEQ ID NO: 1305164 - DNA, 15 bp, Homo sapiens
tgttttgcatcctta

SEQ ID NO: 1305165 - DNA, 15 bp, Homo sapiens
gtgttttgcatcctt

SEQ ID NO: 1305166 - DNA, 15 bp, Homo sapiens
tgtgttttgcatcct

SEQ ID NO: 1305167 - DNA, 15 bp, Homo sapiens
ctgtgttttgcatcc

SEQ ID NO: 1305168 - DNA, 15 bp, Homo sapiens
tctgtgttttgcatc

SEQ ID NO: 1305169 - DNA, 15 bp, Homo sapiens
ttctgtgttttgcat

SEQ ID NO: 1305170 - DNA, 15 bp, Homo sapiens
tttctgtgttttgca

SEQ ID NO: 1305171 - DNA, 15 bp, Homo sapiens
ttttctgtgttttgc

SEQ ID NO: 1305172 - DNA, 15 bp, Homo sapiens
tttttctgtgttttg

SEQ ID NO: 1305173 - DNA, 15 bp, Homo sapiens
ctttttctgtgtttt

SEQ ID NO: 1305174 - DNA, 15 bp, Homo sapiens
tctttttctgtgttt

SEQ ID NO: 1305175 - DNA, 15 bp, Homo sapiens
ctctttttctgtgtt

SEQ ID NO: 1305176 - DNA, 15 bp, Homo sapiens
cctctttttctgtgt

SEQ ID NO: 1305177 - DNA, 15 bp, Homo sapiens
tcctctttttctgtg

SEQ ID NO: 1305178 - DNA, 15 bp, Homo sapiens
ttcctctttttctgt

SEQ ID NO: 1305179 - DNA, 15 bp, Homo sapiens
gttcctctttttctg

SEQ ID NO: 1305180 - DNA, 15 bp, Homo sapiens
agttcctctttttct

SEQ ID NO: 1305181 - DNA, 15 bp, Homo sapiens
aagttcctctttttc

SEQ ID NO: 1305182 - DNA, 15 bp, Homo sapiens
aaagttcctcttttt

SEQ ID NO: 1305183 - DNA, 15 bp, Homo sapiens
aaaagttcctctttt

SEQ ID NO: 1305184 - DNA, 15 bp, Homo sapiens
taaaagttcctcttt

SEQ ID NO: 1305185 - DNA, 15 bp, Homo sapiens
ctaaaagttcctctt

SEQ ID NO: 1305186 - DNA, 15 bp, Homo sapiens
actaaaagttcctct

SEQ ID NO: 1305187 - DNA, 15 bp, Homo sapiens
aactaaaagttcctc

SEQ ID NO: 1305188 - DNA, 15 bp, Homo sapiens
aaactaaaagttcct

SEQ ID NO: 1305189 - DNA, 15 bp, Homo sapiens
gaaactaaaagttcc

SEQ ID NO: 1305190 - DNA, 15 bp, Homo sapiens
ggaaactaaaagttc

SEQ ID NO: 1305191 - DNA, 15 bp, Homo sapiens
aggaaactaaaagtt

SEQ ID NO: 1305192 - DNA, 15 bp, Homo sapiens
aaggaaactaaaagt

SEQ ID NO: 1305193 - DNA, 15 bp, Homo sapiens
taaggaaactaaaag

SEQ ID NO: 1305194 - DNA, 15 bp, Homo sapiens
ataaggaaactaaaa

SEQ ID NO: 1305195 - DNA, 15 bp, Homo sapiens
aataaggaaactaaa

SEQ ID NO: 1305196 - DNA, 15 bp, Homo sapiens
taataaggaaactaa

SEQ ID NO: 1305197 - DNA, 15 bp, Homo sapiens
ctaataaggaaacta

SEQ ID NO: 1305198 - DNA, 15 bp, Homo sapiens
actaataaggaaact

SEQ ID NO: 1305199 - DNA, 15 bp, Homo sapiens
tactaataaggaaac

SEQ ID NO: 1305200 - DNA, 15 bp, Homo sapiens
ttactaataaggaaa

SEQ ID NO: 1305201 - DNA, 15 bp, Homo sapiens
tttactaataaggaa

SEQ ID NO: 1305202 - DNA, 15 bp, Homo sapiens
gtttactaataagga

SEQ ID NO: 1305203 - DNA, 15 bp, Homo sapiens
tgtttactaataagg

SEQ ID NO: 1305204 - DNA, 15 bp, Homo sapiens
ctgtttactaataag

SEQ ID NO: 1305205 - DNA, 15 bp, Homo sapiens
tctgtttactaataa

SEQ ID NO: 1305206 - DNA, 15 bp, Homo sapiens
atctgtttactaata

SEQ ID NO: 1305207 - DNA, 15 bp, Homo sapiens
tatctgtttactaat

SEQ ID NO: 1305208 - DNA, 15 bp, Homo sapiens
ttatctgtttactaa

SEQ ID NO: 1305209 - DNA, 15 bp, Homo sapiens
cttatctgtttacta

SEQ ID NO: 1305210 - DNA, 15 bp, Homo sapiens
ccttatctgtttact

SEQ ID NO: 1305211 - DNA, 15 bp, Homo sapiens
tccttatctgtttac

SEQ ID NO: 1305212 - DNA, 15 bp, Homo sapiens
ttccttatctgttta

SEQ ID NO: 1305213 - DNA, 15 bp, Homo sapiens
tttccttatctgttt

SEQ ID NO: 1305214 - DNA, 15 bp, Homo sapiens
ttttccttatctgtt

SEQ ID NO: 1305215 - DNA, 15 bp, Homo sapiens
gttttccttatctgt

SEQ ID NO: 1305216 - DNA, 15 bp, Homo sapiens
agttttccttatctg

SEQ ID NO: 1305217 - DNA, 15 bp, Homo sapiens
cagttttccttatct

SEQ ID NO: 1305218 - DNA, 15 bp, Homo sapiens
acagttttccttatc

SEQ ID NO: 1305219 - DNA, 15 bp, Homo sapiens
cacagttttccttat

SEQ ID NO: 1305220 - DNA, 15 bp, Homo sapiens
tcacagttttcctta

SEQ ID NO: 1305221 - DNA, 15 bp, Homo sapiens
ttcacagttttcctt

SEQ ID NO: 1305222 - DNA, 15 bp, Homo sapiens
attcacagttttcct

SEQ ID NO: 1305223 - DNA, 15 bp, Homo sapiens
gattcacagttttcc

SEQ ID NO: 1305224 - DNA, 15 bp, Homo sapiens
ggattcacagttttc

SEQ ID NO: 1305225 - DNA, 15 bp, Homo sapiens
aggattcacagtttt

SEQ ID NO: 1305226 - DNA, 15 bp, Homo sapiens
gaggattcacagttt

SEQ ID NO: 1305227 - DNA, 15 bp, Homo sapiens
tgaggattcacagtt

SEQ ID NO: 1305228 - DNA, 15 bp, Homo sapiens
atgaggattcacagt

SEQ ID NO: 1305229 - DNA, 15 bp, Homo sapiens
aatgaggattcacag

SEQ ID NO: 1305230 - DNA, 15 bp, Homo sapiens
aaatgaggattcaca

SEQ ID NO: 1305231 - DNA, 15 bp, Homo sapiens
taaatgaggattcac

SEQ ID NO: 1305232 - DNA, 15 bp, Homo sapiens
ataaatgaggattca

SEQ ID NO: 1305233 - DNA, 15 bp, Homo sapiens
tataaatgaggattc

SEQ ID NO: 1305234 - DNA, 15 bp, Homo sapiens
ttataaatgaggatt

SEQ ID NO: 1305235 - DNA, 15 bp, Homo sapiens
gttataaatgaggat

SEQ ID NO: 1305236 - DNA, 15 bp, Homo sapiens
ggttataaatgagga

SEQ ID NO: 1305237 - DNA, 15 bp, Homo sapiens
tggttataaatgagg

SEQ ID NO: 1305238 - DNA, 15 bp, Homo sapiens
ttggttataaatgag

SEQ ID NO: 1305239 - DNA, 15 bp, Homo sapiens
cttggttataaatga

SEQ ID NO: 1305240 - DNA, 15 bp, Homo sapiens
tcttggttataaatg

SEQ ID NO: 1305241 - DNA, 15 bp, Homo sapiens
ttcttggttataaat

SEQ ID NO: 1305242 - DNA, 15 bp, Homo sapiens
tttcttggttataaa

SEQ ID NO: 1305243 - DNA, 15 bp, Homo sapiens
atttcttggttataa

SEQ ID NO: 1305244 - DNA, 15 bp, Homo sapiens
catttcttggttata

SEQ ID NO: 1305245 - DNA, 15 bp, Homo sapiens
gcatttcttggttat

SEQ ID NO: 1305246 - DNA, 15 bp, Homo sapiens
tgcatttcttggtta

SEQ ID NO: 1305247 - DNA, 15 bp, Homo sapiens
atgcatttcttggtt

SEQ ID NO: 1305248 - DNA, 15 bp, Homo sapiens
tatgcatttcttggt

SEQ ID NO: 1305249 - DNA, 15 bp, Homo sapiens
atatgcatttcttgg

SEQ ID NO: 1305250 - DNA, 15 bp, Homo sapiens
aatatgcatttcttg

SEQ ID NO: 1305251 - DNA, 15 bp, Homo sapiens
aaatatgcatttctt

SEQ ID NO: 1305252 - DNA, 15 bp, Homo sapiens
aaaatatgcatttct

SEQ ID NO: 1305253 - DNA, 15 bp, Homo sapiens
taaaatatgcatttc

SEQ ID NO: 1305254 - DNA, 15 bp, Homo sapiens
ttaaaatatgcattt

SEQ ID NO: 1305255 - DNA, 15 bp, Homo sapiens
attaaaatatgcatt

SEQ ID NO: 1305256 - DNA, 15 bp, Homo sapiens
cattaaaatatgcat

SEQ ID NO: 1305257 - DNA, 15 bp, Homo sapiens
tcattaaaatatgca

SEQ ID NO: 1305258 - DNA, 15 bp, Homo sapiens
ctcattaaaatatgc

SEQ ID NO: 1305259 - DNA, 15 bp, Homo sapiens
tctcattaaaatatg

SEQ ID NO: 1305260 - DNA, 15 bp, Homo sapiens
atctcattaaaatat

SEQ ID NO: 1305261 - DNA, 15 bp, Homo sapiens
tatctcattaaaata

SEQ ID NO: 1305262 - DNA, 15 bp, Homo sapiens
gtatctcattaaaat

SEQ ID NO: 1305263 - DNA, 15 bp, Homo sapiens
ggtatctcattaaaa

SEQ ID NO: 1305264 - DNA, 15 bp, Homo sapiens
tggtatctcattaaa

SEQ ID NO: 1305265 - DNA, 15 bp, Homo sapiens
atggtatctcattaa

SEQ ID NO: 1305266 - DNA, 15 bp, Homo sapiens
aatggtatctcatta

SEQ ID NO: 1305267 - DNA, 15 bp, Homo sapiens
aaatggtatctcatt

SEQ ID NO: 1305268 - DNA, 15 bp, Homo sapiens
aaaatggtatctcat

SEQ ID NO: 1305269 - DNA, 15 bp, Homo sapiens
caaaatggtatctca

SEQ ID NO: 1305270 - DNA, 15 bp, Homo sapiens
acaaaatggtatctc

SEQ ID NO: 1305271 - DNA, 15 bp, Homo sapiens
tacaaaatggtatct

SEQ ID NO: 1305272 - DNA, 15 bp, Homo sapiens
ttacaaaatggtatc

SEQ ID NO: 1305273 - DNA, 15 bp, Homo sapiens
gttacaaaatggtat

SEQ ID NO: 1305274 - DNA, 15 bp, Homo sapiens
agttacaaaatggta

SEQ ID NO: 1305275 - DNA, 15 bp, Homo sapiens
tagttacaaaatggt

SEQ ID NO: 1305276 - DNA, 15 bp, Homo sapiens
ttagttacaaaatgg

SEQ ID NO: 1305277 - DNA, 15 bp, Homo sapiens
attagttacaaaatg

SEQ ID NO: 1305278 - DNA, 15 bp, Homo sapiens
cattagttacaaaat

SEQ ID NO: 1305279 - DNA, 15 bp, Homo sapiens
tcattagttacaaaa

SEQ ID NO: 1305280 - DNA, 15 bp, Homo sapiens
ttcattagttacaaa

SEQ ID NO: 1305281 - DNA, 15 bp, Homo sapiens
tttcattagttacaa

SEQ ID NO: 1305282 - DNA, 15 bp, Homo sapiens
atttcattagttaca

SEQ ID NO: 1305283 - DNA, 15 bp, Homo sapiens
aatttcattagttac

SEQ ID NO: 1305284 - DNA, 15 bp, Homo sapiens
taatttcattagtta

SEQ ID NO: 1305285 - DNA, 15 bp, Homo sapiens
ctaatttcattagtt

SEQ ID NO: 1305286 - DNA, 15 bp, Homo sapiens
gctaatttcattagt

SEQ ID NO: 1305287 - DNA, 15 bp, Homo sapiens
tgctaatttcattag

SEQ ID NO: 1305288 - DNA, 15 bp, Homo sapiens
ctgctaatttcatta

SEQ ID NO: 1305289 - DNA, 15 bp, Homo sapiens
tctgctaatttcatt

SEQ ID NO: 1305290 - DNA, 15 bp, Homo sapiens
ttctgctaatttcat

SEQ ID NO: 1305291 - DNA, 15 bp, Homo sapiens
attctgctaatttca

SEQ ID NO: 1305292 - DNA, 15 bp, Homo sapiens
gattctgctaatttc

SEQ ID NO: 1305293 - DNA, 15 bp, Homo sapiens
agattctgctaattt

SEQ ID NO: 1305294 - DNA, 15 bp, Homo sapiens
aagattctgctaatt

SEQ ID NO: 1305295 - DNA, 15 bp, Homo sapiens
caagattctgctaat

SEQ ID NO: 1305296 - DNA, 15 bp, Homo sapiens
tcaagattctgctaa

SEQ ID NO: 1305297 - DNA, 15 bp, Homo sapiens
ttcaagattctgcta

SEQ ID NO: 1305298 - DNA, 15 bp, Homo sapiens
cttcaagattctgct

SEQ ID NO: 1305299 - DNA, 15 bp, Homo sapiens
tcttcaagattctgc

SEQ ID NO: 1305300 - DNA, 15 bp, Homo sapiens
ttcttcaagattctg

SEQ ID NO: 1305301 - DNA, 15 bp, Homo sapiens
attcttcaagattct

SEQ ID NO: 1305302 - DNA, 15 bp, Homo sapiens
gattcttcaagattc

SEQ ID NO: 1305303 - DNA, 15 bp, Homo sapiens
agattcttcaagatt

SEQ ID NO: 1305304 - DNA, 15 bp, Homo sapiens
cagattcttcaagat

SEQ ID NO: 1305305 - DNA, 15 bp, Homo sapiens
acagattcttcaaga

SEQ ID NO: 1305306 - DNA, 15 bp, Homo sapiens
gacagattcttcaag

SEQ ID NO: 1305307 - DNA, 15 bp, Homo sapiens
agacagattcttcaa

SEQ ID NO: 1305308 - DNA, 15 bp, Homo sapiens
tagacagattcttca

SEQ ID NO: 1305309 - DNA, 15 bp, Homo sapiens
atagacagattcttc

SEQ ID NO: 1305310 - DNA, 15 bp, Homo sapiens
gatagacagattctt

SEQ ID NO: 1305311 - DNA, 15 bp, Homo sapiens
ggatagacagattct

SEQ ID NO: 1305312 - DNA, 15 bp, Homo sapiens
aggatagacagattc

SEQ ID NO: 1305313 - DNA, 15 bp, Homo sapiens
gaggatagacagatt

SEQ ID NO: 1305314 - DNA, 15 bp, Homo sapiens
agaggatagacagat

SEQ ID NO: 1305315 - DNA, 15 bp, Homo sapiens
aagaggatagacaga

SEQ ID NO: 1305316 - DNA, 15 bp, Homo sapiens
taagaggatagacag

SEQ ID NO: 1305317 - DNA, 15 bp, Homo sapiens
gtaagaggatagaca

SEQ ID NO: 1305318 - DNA, 15 bp, Homo sapiens
ggtaagaggatagac

SEQ ID NO: 1305319 - DNA, 15 bp, Homo sapiens
tggtaagaggataga

SEQ ID NO: 1305320 - DNA, 15 bp, Homo sapiens
ttggtaagaggatag

SEQ ID NO: 1305321 - DNA, 15 bp, Homo sapiens
cttggtaagaggata

SEQ ID NO: 1305322 - DNA, 15 bp, Homo sapiens
ccttggtaagaggat

SEQ ID NO: 1305323 - DNA, 15 bp, Homo sapiens
tccttggtaagagga

SEQ ID NO: 1305324 - DNA, 15 bp, Homo sapiens
atccttggtaagagg

SEQ ID NO: 1305325 - DNA, 15 bp, Homo sapiens
aatccttggtaagag

SEQ ID NO: 1305326 - DNA, 15 bp, Homo sapiens
taatccttggtaaga

SEQ ID NO: 1305327 - DNA, 15 bp, Homo sapiens
ttaatccttggtaag

SEQ ID NO: 1305328 - DNA, 15 bp, Homo sapiens
attaatccttggtaa

SEQ ID NO: 1305329 - DNA, 15 bp, Homo sapiens
cattaatccttggta

SEQ ID NO: 1305330 - DNA, 15 bp, Homo sapiens
tcattaatccttggt

SEQ ID NO: 1305331 - DNA, 15 bp, Homo sapiens
ctcattaatccttgg

SEQ ID NO: 1305332 - DNA, 15 bp, Homo sapiens
tctcattaatccttg

SEQ ID NO: 1305333 - DNA, 15 bp, Homo sapiens
ttctcattaatcctt

SEQ ID NO: 1305334 - DNA, 15 bp, Homo sapiens
attctcattaatcct

SEQ ID NO: 1305335 - DNA, 15 bp, Homo sapiens
aattctcattaatcc

SEQ ID NO: 1305336 - DNA, 15 bp, Homo sapiens
taattctcattaatc

SEQ ID NO: 1305337 - DNA, 15 bp, Homo sapiens
ttaattctcattaat

SEQ ID NO: 1305338 - DNA, 15 bp, Homo sapiens
tttaattctcattaa

SEQ ID NO: 1305339 - DNA, 15 bp, Homo sapiens
ttttaattctcatta

SEQ ID NO: 1305340 - DNA, 15 bp, Homo sapiens
attttaattctcatt

SEQ ID NO: 1305341 - DNA, 15 bp, Homo sapiens
tattttaattctcat

SEQ ID NO: 1305342 - DNA, 15 bp, Homo sapiens
ctattttaattctca

SEQ ID NO: 1305343 - DNA, 15 bp, Homo sapiens
tctattttaattctc

SEQ ID NO: 1305344 - DNA, 15 bp, Homo sapiens
atctattttaattct

SEQ ID NO: 1305345 - DNA, 15 bp, Homo sapiens
tatctattttaattc

SEQ ID NO: 1305346 - DNA, 15 bp, Homo sapiens
atatctattttaatt

SEQ ID NO: 1305347 - DNA, 15 bp, Homo sapiens
catatctattttaat

SEQ ID NO: 1305348 - DNA, 15 bp, Homo sapiens
gcatatctattttaa

SEQ ID NO: 1305349 - DNA, 15 bp, Homo sapiens
ggcatatctatttta

SEQ ID NO: 1305350 - DNA, 15 bp, Homo sapiens
tggcatatctatttt

SEQ ID NO: 1305351 - DNA, 15 bp, Homo sapiens
ttggcatatctattt

SEQ ID NO: 1305352 - DNA, 15 bp, Homo sapiens
attggcatatctatt

SEQ ID NO: 1305353 - DNA, 15 bp, Homo sapiens
cattggcatatctat

SEQ ID NO: 1305354 - DNA, 15 bp, Homo sapiens
ccattggcatatcta

SEQ ID NO: 1305355 - DNA, 15 bp, Homo sapiens
gccattggcatatct

SEQ ID NO: 1305356 - DNA, 15 bp, Homo sapiens
agccattggcatatc

SEQ ID NO: 1305357 - DNA, 15 bp, Homo sapiens
cagccattggcatat

SEQ ID NO: 1305358 - DNA, 15 bp, Homo sapiens
tcagccattggcata

SEQ ID NO: 1305359 - DNA, 15 bp, Homo sapiens
atcagccattggcat

SEQ ID NO: 1305360 - DNA, 15 bp, Homo sapiens
tatcagccattggca

SEQ ID NO: 1305361 - DNA, 15 bp, Homo sapiens
ttatcagccattggc

SEQ ID NO: 1305362 - DNA, 15 bp, Homo sapiens
cttatcagccattgg

SEQ ID NO: 1305363 - DNA, 15 bp, Homo sapiens
tcttatcagccattg

SEQ ID NO: 1305364 - DNA, 15 bp, Homo sapiens
atcttatcagccatt

SEQ ID NO: 1305365 - DNA, 15 bp, Homo sapiens
tatcttatcagccat

SEQ ID NO: 1305366 - DNA, 15 bp, Homo sapiens
gtatcttatcagcca

SEQ ID NO: 1305367 - DNA, 15 bp, Homo sapiens
agtatcttatcagcc

SEQ ID NO: 1305368 - DNA, 15 bp, Homo sapiens
tagtatcttatcagc

SEQ ID NO: 1305369 - DNA, 15 bp, Homo sapiens
ttagtatcttatcag

SEQ ID NO: 1305370 - DNA, 15 bp, Homo sapiens
tttagtatcttatca

SEQ ID NO: 1305371 - DNA, 15 bp, Homo sapiens
gtttagtatcttatc

SEQ ID NO: 1305372 - DNA, 15 bp, Homo sapiens
ggtttagtatcttat

SEQ ID NO: 1305373 - DNA, 15 bp, Homo sapiens
aggtttagtatctta

SEQ ID NO: 1305374 - DNA, 15 bp, Homo sapiens
caggtttagtatctt

SEQ ID NO: 1305375 - DNA, 15 bp, Homo sapiens
acaggtttagtatct

SEQ ID NO: 1305376 - DNA, 15 bp, Homo sapiens
aacaggtttagtatc

SEQ ID NO: 1305377 - DNA, 15 bp, Homo sapiens
gaacaggtttagtat

SEQ ID NO: 1305378 - DNA, 15 bp, Homo sapiens
ggaacaggtttagta

SEQ ID NO: 1305379 - DNA, 15 bp, Homo sapiens
aggaacaggtttagt

SEQ ID NO: 1305380 - DNA, 15 bp, Homo sapiens
caggaacaggtttag

SEQ ID NO: 1305381 - DNA, 15 bp, Homo sapiens
tcaggaacaggttta

SEQ ID NO: 1305382 - DNA, 15 bp, Homo sapiens
atcaggaacaggttt

SEQ ID NO: 1305383 - DNA, 15 bp, Homo sapiens
tatcaggaacaggtt

SEQ ID NO: 1305384 - DNA, 15 bp, Homo sapiens
atatcaggaacaggt

SEQ ID NO: 1305385 - DNA, 15 bp, Homo sapiens
tatatcaggaacagg

SEQ ID NO: 1305386 - DNA, 15 bp, Homo sapiens
ttatatcaggaacag

SEQ ID NO: 1305387 - DNA, 15 bp, Homo sapiens
cttatatcaggaaca

SEQ ID NO: 1305388 - DNA, 15 bp, Homo sapiens
acttatatcaggaac

SEQ ID NO: 1305389 - DNA, 15 bp, Homo sapiens
aacttatatcaggaa

SEQ ID NO: 1305390 - DNA, 15 bp, Homo sapiens
aaacttatatcagga

SEQ ID NO: 1305391 - DNA, 15 bp, Homo sapiens
taaacttatatcagg

SEQ ID NO: 1305392 - DNA, 15 bp, Homo sapiens
ctaaacttatatcag

SEQ ID NO: 1305393 - DNA, 15 bp, Homo sapiens
cctaaacttatatca

SEQ ID NO: 1305394 - DNA, 15 bp, Homo sapiens
ccctaaacttatatc

SEQ ID NO: 1305395 - DNA, 15 bp, Homo sapiens
accctaaacttatat

SEQ ID NO: 1305396 - DNA, 15 bp, Homo sapiens
taccctaaacttata

SEQ ID NO: 1305397 - DNA, 15 bp, Homo sapiens
ataccctaaacttat

SEQ ID NO: 1305398 - DNA, 15 bp, Homo sapiens
aataccctaaactta

SEQ ID NO: 1305399 - DNA, 15 bp, Homo sapiens
aaataccctaaactt

SEQ ID NO: 1305400 - DNA, 15 bp, Homo sapiens
taaataccctaaact

SEQ ID NO: 1305401 - DNA, 15 bp, Homo sapiens
ttaaataccctaaac

SEQ ID NO: 1305402 - DNA, 15 bp, Homo sapiens
tttaaataccctaaa

SEQ ID NO: 1305403 - DNA, 15 bp, Homo sapiens
atttaaataccctaa

SEQ ID NO: 1305404 - DNA, 15 bp, Homo sapiens
gatttaaatacccta

SEQ ID NO: 1305405 - DNA, 15 bp, Homo sapiens
agatttaaataccct

SEQ ID NO: 1305406 - DNA, 15 bp, Homo sapiens
aagatttaaataccc

SEQ ID NO: 1305407 - DNA, 15 bp, Homo sapiens
aaagatttaaatacc

SEQ ID NO: 1305408 - DNA, 15 bp, Homo sapiens
caaagatttaaatac

SEQ ID NO: 1305409 - DNA, 15 bp, Homo sapiens
tcaaagatttaaata

SEQ ID NO: 1305410 - DNA, 15 bp, Homo sapiens
ttcaaagatttaaat

SEQ ID NO: 1305411 - DNA, 15 bp, Homo sapiens
tttcaaagatttaaa

SEQ ID NO: 1305412 - DNA, 15 bp, Homo sapiens
ttttcaaagatttaa

SEQ ID NO: 1305413 - DNA, 15 bp, Homo sapiens
attttcaaagattta

SEQ ID NO: 1305414 - DNA, 15 bp, Homo sapiens
aattttcaaagattt

SEQ ID NO: 1305415 - DNA, 15 bp, Homo sapiens
aaattttcaaagatt

SEQ ID NO: 1305416 - DNA, 15 bp, Homo sapiens
caaattttcaaagat

SEQ ID NO: 1305417 - DNA, 15 bp, Homo sapiens
tcaaattttcaaaga

SEQ ID NO: 1305418 - DNA, 15 bp, Homo sapiens
ctcaaattttcaaag

SEQ ID NO: 1305419 - DNA, 15 bp, Homo sapiens
tctcaaattttcaaa

SEQ ID NO: 1305420 - DNA, 15 bp, Homo sapiens
atctcaaattttcaa

SEQ ID NO: 1305421 - DNA, 15 bp, Homo sapiens
gatctcaaattttca

SEQ ID NO: 1305422 - DNA, 15 bp, Homo sapiens
tgatctcaaattttc

SEQ ID NO: 1305423 - DNA, 15 bp, Homo sapiens
ctgatctcaaatttt

SEQ ID NO: 1305424 - DNA, 15 bp, Homo sapiens
gctgatctcaaattt

SEQ ID NO: 1305425 - DNA, 15 bp, Homo sapiens
agctgatctcaaatt

SEQ ID NO: 1305426 - DNA, 15 bp, Homo sapiens
tagctgatctcaaat

SEQ ID NO: 1305427 - DNA, 15 bp, Homo sapiens
atagctgatctcaaa

SEQ ID NO: 1305428 - DNA, 15 bp, Homo sapiens
tatagctgatctcaa

SEQ ID NO: 1305429 - DNA, 15 bp, Homo sapiens
ttatagctgatctca

SEQ ID NO: 1305430 - DNA, 15 bp, Homo sapiens
cttatagctgatctc

SEQ ID NO: 1305431 - DNA, 15 bp, Homo sapiens
acttatagctgatct

SEQ ID NO: 1305432 - DNA, 15 bp, Homo sapiens
gacttatagctgatc

SEQ ID NO: 1305433 - DNA, 15 bp, Homo sapiens
ggacttatagctgat

SEQ ID NO: 1305434 - DNA, 15 bp, Homo sapiens
aggacttatagctga

SEQ ID NO: 1305435 - DNA, 15 bp, Homo sapiens
aaggacttatagctg

SEQ ID NO: 1305436 - DNA, 15 bp, Homo sapiens
aaaggacttatagct

SEQ ID NO: 1305437 - DNA, 15 bp, Homo sapiens
gaaaggacttatagc

SEQ ID NO: 1305438 - DNA, 15 bp, Homo sapiens
agaaaggacttatag

SEQ ID NO: 1305439 - DNA, 15 bp, Homo sapiens
gagaaaggacttata

SEQ ID NO: 1305440 - DNA, 15 bp, Homo sapiens
agagaaaggacttat

SEQ ID NO: 1305441 - DNA, 15 bp, Homo sapiens
tagagaaaggactta

SEQ ID NO: 1305442 - DNA, 15 bp, Homo sapiens
ctagagaaaggactt

SEQ ID NO: 1305443 - DNA, 15 bp, Homo sapiens
cctagagaaaggact

SEQ ID NO: 1305444 - DNA, 15 bp, Homo sapiens
tcctagagaaaggac

SEQ ID NO: 1305445 - DNA, 15 bp, Homo sapiens
ttcctagagaaagga

SEQ ID NO: 1305446 - DNA, 15 bp, Homo sapiens
tttcctagagaaagg

SEQ ID NO: 1305447 - DNA, 15 bp, Homo sapiens
ttttcctagagaaag

SEQ ID NO: 1305448 - DNA, 15 bp, Homo sapiens
tttttcctagagaaa

SEQ ID NO: 1305449 - DNA, 15 bp, Homo sapiens
gtttttcctagagaa

SEQ ID NO: 1305450 - DNA, 15 bp, Homo sapiens
tgtttttcctagaga

SEQ ID NO: 1305451 - DNA, 15 bp, Homo sapiens
gtgtttttcctagag

SEQ ID NO: 1305452 - DNA, 15 bp, Homo sapiens
tgtgtttttcctaga

SEQ ID NO: 1305453 - DNA, 15 bp, Homo sapiens
ctgtgtttttcctag

SEQ ID NO: 1305454 - DNA, 15 bp, Homo sapiens
tctgtgtttttccta

SEQ ID NO: 1305455 - DNA, 15 bp, Homo sapiens
atctgtgtttttcct

SEQ ID NO: 1305456 - DNA, 15 bp, Homo sapiens
aatctgtgtttttcc

SEQ ID NO: 1305457 - DNA, 15 bp, Homo sapiens
aaatctgtgtttttc

SEQ ID NO: 1305458 - DNA, 15 bp, Homo sapiens
caaatctgtgttttt

SEQ ID NO: 1305459 - DNA, 15 bp, Homo sapiens
gcaaatctgtgtttt

SEQ ID NO: 1305460 - DNA, 15 bp, Homo sapiens
agcaaatctgtgttt

SEQ ID NO: 1305461 - DNA, 15 bp, Homo sapiens
aagcaaatctgtgtt

SEQ ID NO: 1305462 - DNA, 15 bp, Homo sapiens
taagcaaatctgtgt

SEQ ID NO: 1305463 - DNA, 15 bp, Homo sapiens
gtaagcaaatctgtg

SEQ ID NO: 1305464 - DNA, 15 bp, Homo sapiens
tgtaagcaaatctgt

SEQ ID NO: 1305465 - DNA, 15 bp, Homo sapiens
gtgtaagcaaatctg

SEQ ID NO: 1305466 - DNA, 15 bp, Homo sapiens
agtgtaagcaaatct

SEQ ID NO: 1305467 - DNA, 15 bp, Homo sapiens
gagtgtaagcaaatc

SEQ ID NO: 1305468 - DNA, 15 bp, Homo sapiens
tgagtgtaagcaaat

SEQ ID NO: 1305469 - DNA, 15 bp, Homo sapiens
ttgagtgtaagcaaa

SEQ ID NO: 1305470 - DNA, 15 bp, Homo sapiens
tttgagtgtaagcaa

SEQ ID NO: 1305471 - DNA, 15 bp, Homo sapiens
ttttgagtgtaagca

SEQ ID NO: 1305472 - DNA, 15 bp, Homo sapiens
attttgagtgtaagc

SEQ ID NO: 1305473 - DNA, 15 bp, Homo sapiens
aattttgagtgtaag

SEQ ID NO: 1305474 - DNA, 15 bp, Homo sapiens
caattttgagtgtaa

SEQ ID NO: 1305475 - DNA, 15 bp, Homo sapiens
ccaattttgagtgta

SEQ ID NO: 1305476 - DNA, 15 bp, Homo sapiens
tccaattttgagtgt

SEQ ID NO: 1305477 - DNA, 15 bp, Homo sapiens
ttccaattttgagtg

SEQ ID NO: 1305478 - DNA, 15 bp, Homo sapiens
cttccaattttgagt

SEQ ID NO: 1305479 - DNA, 15 bp, Homo sapiens
ccttccaattttgag

SEQ ID NO: 1305480 - DNA, 15 bp, Homo sapiens
gccttccaattttga

SEQ ID NO: 1305481 - DNA, 15 bp, Homo sapiens
agccttccaattttg

SEQ ID NO: 1305482 - DNA, 15 bp, Homo sapiens
tagccttccaatttt

SEQ ID NO: 1305483 - DNA, 15 bp, Homo sapiens
atagccttccaattt

SEQ ID NO: 1305484 - DNA, 15 bp, Homo sapiens
aatagccttccaatt

SEQ ID NO: 1305485 - DNA, 15 bp, Homo sapiens
aaatagccttccaat

SEQ ID NO: 1305486 - DNA, 15 bp, Homo sapiens
gaaatagccttccaa

SEQ ID NO: 1305487 - DNA, 15 bp, Homo sapiens
ggaaatagccttcca

SEQ ID NO: 1305488 - DNA, 15 bp, Homo sapiens
aggaaatagccttcc

SEQ ID NO: 1305489 - DNA, 15 bp, Homo sapiens
taggaaatagccttc

SEQ ID NO: 1305490 - DNA, 15 bp, Homo sapiens
ataggaaatagcctt

SEQ ID NO: 1305491 - DNA, 15 bp, Homo sapiens
cataggaaatagcct

SEQ ID NO: 1305492 - DNA, 15 bp, Homo sapiens
tcataggaaatagcc

SEQ ID NO: 1305493 - DNA, 15 bp, Homo sapiens
ctcataggaaatagc

SEQ ID NO: 1305494 - DNA, 15 bp, Homo sapiens
actcataggaaatag

SEQ ID NO: 1305495 - DNA, 15 bp, Homo sapiens
gactcataggaaata

SEQ ID NO: 1305496 - DNA, 15 bp, Homo sapiens
ggactcataggaaat

SEQ ID NO: 1305497 - DNA, 15 bp, Homo sapiens
cggactcataggaaa

SEQ ID NO: 1305498 - DNA, 15 bp, Homo sapiens
acggactcataggaa

SEQ ID NO: 1305499 - DNA, 15 bp, Homo sapiens
tacggactcatagga

SEQ ID NO: 1305500 - DNA, 15 bp, Homo sapiens
ctacggactcatagg

SEQ ID NO: 1305501 - DNA, 15 bp, Homo sapiens
tctacggactcatag

SEQ ID NO: 1305502 - DNA, 15 bp, Homo sapiens
gtctacggactcata

SEQ ID NO: 1305503 - DNA, 15 bp, Homo sapiens
agtctacggactcat

SEQ ID NO: 1305504 - DNA, 15 bp, Homo sapiens
gagtctacggactca

SEQ ID NO: 1305505 - DNA, 15 bp, Homo sapiens
ggagtctacggactc

SEQ ID NO: 1305506 - DNA, 15 bp, Homo sapiens
tggagtctacggact

SEQ ID NO: 1305507 - DNA, 15 bp, Homo sapiens
ttggagtctacggac

SEQ ID NO: 1305508 - DNA, 15 bp, Homo sapiens
tttggagtctacgga

SEQ ID NO: 1305509 - DNA, 15 bp, Homo sapiens
ttttggagtctacgg

SEQ ID NO: 1305510 - DNA, 15 bp, Homo sapiens
attttggagtctacg

SEQ ID NO: 1305511 - DNA, 15 bp, Homo sapiens
tattttggagtctac

SEQ ID NO: 1305512 - DNA, 15 bp, Homo sapiens
ttattttggagtcta

SEQ ID NO: 1305513 - DNA, 15 bp, Homo sapiens
tttattttggagtct

SEQ ID NO: 1305514 - DNA, 15 bp, Homo sapiens
ttttattttggagtc

SEQ ID NO: 1305515 - DNA, 15 bp, Homo sapiens
tttttattttggagt

SEQ ID NO: 1305516 - DNA, 15 bp, Homo sapiens
ttttttattttggag

SEQ ID NO: 1305517 - DNA, 15 bp, Homo sapiens
attttttattttgga

SEQ ID NO: 1305518 - DNA, 15 bp, Homo sapiens
aattttttattttgg

SEQ ID NO: 1305519 - DNA, 15 bp, Homo sapiens
gaattttttattttg

SEQ ID NO: 1305520 - DNA, 15 bp, Homo sapiens
agaattttttatttt

SEQ ID NO: 1305521 - DNA, 15 bp, Homo sapiens
cagaattttttattt

SEQ ID NO: 1305522 - DNA, 15 bp, Homo sapiens
gcagaattttttatt

SEQ ID NO: 1305523 - DNA, 15 bp, Homo sapiens
agcagaattttttat

SEQ ID NO: 1305524 - DNA, 15 bp, Homo sapiens
gagcagaatttttta

SEQ ID NO: 1305525 - DNA, 15 bp, Homo sapiens
agagcagaatttttt

SEQ ID NO: 1305526 - DNA, 15 bp, Homo sapiens
tagagcagaattttt

SEQ ID NO: 1305527 - DNA, 15 bp, Homo sapiens
ttagagcagaatttt

SEQ ID NO: 1305528 - DNA, 15 bp, Homo sapiens
tttagagcagaattt

SEQ ID NO: 1305529 - DNA, 15 bp, Homo sapiens
atttagagcagaatt

SEQ ID NO: 1305530 - DNA, 15 bp, Homo sapiens
tatttagagcagaat

SEQ ID NO: 1305531 - DNA, 15 bp, Homo sapiens
ttatttagagcagaa

SEQ ID NO: 1305532 - DNA, 15 bp, Homo sapiens
tttatttagagcaga

SEQ ID NO: 1305533 - DNA, 15 bp, Homo sapiens
ttttatttagagcag

SEQ ID NO: 1305534 - DNA, 15 bp, Homo sapiens
tttttatttagagca

SEQ ID NO: 1305535 - DNA, 15 bp, Homo sapiens
atttttatttagagc

SEQ ID NO: 1305536 - DNA, 15 bp, Homo sapiens
catttttatttagag

SEQ ID NO: 1305537 - DNA, 15 bp, Homo sapiens
ccatttttatttaga

SEQ ID NO: 1305538 - DNA, 15 bp, Homo sapiens
accatttttatttag

SEQ ID NO: 1305539 - DNA, 15 bp, Homo sapiens
aaccatttttattta

SEQ ID NO: 1305540 - DNA, 15 bp, Homo sapiens
aaaccatttttattt

SEQ ID NO: 1305541 - DNA, 15 bp, Homo sapiens
taaaccatttttatt

SEQ ID NO: 1305542 - DNA, 15 bp, Homo sapiens
ttaaaccatttttat

SEQ ID NO: 1305543 - DNA, 15 bp, Homo sapiens
gttaaaccattttta

SEQ ID NO: 1305544 - DNA, 15 bp, Homo sapiens
ggttaaaccattttt

SEQ ID NO: 1305545 - DNA, 15 bp, Homo sapiens
aggttaaaccatttt

SEQ ID NO: 1305546 - DNA, 15 bp, Homo sapiens
aaggttaaaccattt

SEQ ID NO: 1305547 - DNA, 15 bp, Homo sapiens
aaaggttaaaccatt

SEQ ID NO: 1305548 - DNA, 15 bp, Homo sapiens
gaaaggttaaaccat

SEQ ID NO: 1305549 - DNA, 15 bp, Homo sapiens
agaaaggttaaacca

SEQ ID NO: 1305550 - DNA, 15 bp, Homo sapiens
tagaaaggttaaacc

SEQ ID NO: 1305551 - DNA, 15 bp, Homo sapiens
gtagaaaggttaaac

SEQ ID NO: 1305552 - DNA, 15 bp, Homo sapiens
agtagaaaggttaaa

SEQ ID NO: 1305553 - DNA, 15 bp, Homo sapiens
cagtagaaaggttaa

SEQ ID NO: 1305554 - DNA, 15 bp, Homo sapiens
acagtagaaaggtta

SEQ ID NO: 1305555 - DNA, 15 bp, Homo sapiens
aacagtagaaaggtt

SEQ ID NO: 1305556 - DNA, 15 bp, Homo sapiens
aaacagtagaaaggt

SEQ ID NO: 1305557 - DNA, 15 bp, Homo sapiens
aaaacagtagaaagg

SEQ ID NO: 1305558 - DNA, 15 bp, Homo sapiens
gaaaacagtagaaag

SEQ ID NO: 1305559 - DNA, 15 bp, Homo sapiens
agaaaacagtagaaa

SEQ ID NO: 1305560 - DNA, 15 bp, Homo sapiens
aagaaaacagtagaa

SEQ ID NO: 1305561 - DNA, 15 bp, Homo sapiens
aaagaaaacagtaga

SEQ ID NO: 1305562 - DNA, 15 bp, Homo sapiens
caaagaaaacagtag

SEQ ID NO: 1305563 - DNA, 15 bp, Homo sapiens
acaaagaaaacagta

SEQ ID NO: 1305564 - DNA, 15 bp, Homo sapiens
gacaaagaaaacagt

SEQ ID NO: 1305565 - DNA, 15 bp, Homo sapiens
agacaaagaaaacag

SEQ ID NO: 1305566 - DNA, 15 bp, Homo sapiens
cagacaaagaaaaca

SEQ ID NO: 1305567 - DNA, 15 bp, Homo sapiens
tcagacaaagaaaac

SEQ ID NO: 1305568 - DNA, 15 bp, Homo sapiens
atcagacaaagaaaa

SEQ ID NO: 1305569 - DNA, 15 bp, Homo sapiens
tatcagacaaagaaa

SEQ ID NO: 1305570 - DNA, 15 bp, Homo sapiens
ttatcagacaaagaa

SEQ ID NO: 1305571 - DNA, 15 bp, Homo sapiens
attatcagacaaaga

SEQ ID NO: 1305572 - DNA, 15 bp, Homo sapiens
tattatcagacaaag

SEQ ID NO: 1305573 - DNA, 15 bp, Homo sapiens
ttattatcagacaaa

SEQ ID NO: 1305574 - DNA, 15 bp, Homo sapiens
gttattatcagacaa

SEQ ID NO: 1305575 - DNA, 15 bp, Homo sapiens
agttattatcagaca

SEQ ID NO: 1305576 - DNA, 15 bp, Homo sapiens
aagttattatcagac

SEQ ID NO: 1305577 - DNA, 15 bp, Homo sapiens
gaagttattatcaga

SEQ ID NO: 1305578 - DNA, 15 bp, Homo sapiens
ggaagttattatcag

SEQ ID NO: 1305579 - DNA, 15 bp, Homo sapiens
tggaagttattatca

SEQ ID NO: 1305580 - DNA, 15 bp, Homo sapiens
ttggaagttattatc

SEQ ID NO: 1305581 - DNA, 15 bp, Homo sapiens
tttggaagttattat

SEQ ID NO: 1305582 - DNA, 15 bp, Homo sapiens
ttttggaagttatta

SEQ ID NO: 1305583 - DNA, 15 bp, Homo sapiens
tttttggaagttatt

SEQ ID NO: 1305584 - DNA, 15 bp, Homo sapiens
ttttttggaagttat

SEQ ID NO: 1305585 - DNA, 15 bp, Homo sapiens
tttttttggaagtta

SEQ ID NO: 1305586 - DNA, 15 bp, Homo sapiens
atttttttggaagtt

SEQ ID NO: 1305587 - DNA, 15 bp, Homo sapiens
tatttttttggaagt

SEQ ID NO: 1305588 - DNA, 15 bp, Homo sapiens
gtatttttttggaag

SEQ ID NO: 1305589 - DNA, 15 bp, Homo sapiens
ggtatttttttggaa

SEQ ID NO: 1305590 - DNA, 15 bp, Homo sapiens
aggtatttttttgga

SEQ ID NO: 1305591 - DNA, 15 bp, Homo sapiens
taggtatttttttgg

SEQ ID NO: 1305592 - DNA, 15 bp, Homo sapiens
ctaggtatttttttg

SEQ ID NO: 1305593 - DNA, 15 bp, Homo sapiens
gctaggtattttttt

SEQ ID NO: 1305594 - DNA, 15 bp, Homo sapiens
agctaggtatttttt

SEQ ID NO: 1305595 - DNA, 15 bp, Homo sapiens
gagctaggtattttt

SEQ ID NO: 1305596 - DNA, 15 bp, Homo sapiens
tgagctaggtatttt

SEQ ID NO: 1305597 - DNA, 15 bp, Homo sapiens
ttgagctaggtattt

SEQ ID NO: 1305598 - DNA, 15 bp, Homo sapiens
cttgagctaggtatt

SEQ ID NO: 1305599 - DNA, 15 bp, Homo sapiens
ccttgagctaggtat

SEQ ID NO: 1305600 - DNA, 15 bp, Homo sapiens
cccttgagctaggta

SEQ ID NO: 1305601 - DNA, 15 bp, Homo sapiens
acccttgagctaggt

SEQ ID NO: 1305602 - DNA, 15 bp, Homo sapiens
aacccttgagctagg

SEQ ID NO: 1305603 - DNA, 15 bp, Homo sapiens
taacccttgagctag

SEQ ID NO: 1305604 - DNA, 15 bp, Homo sapiens
ttaacccttgagcta

SEQ ID NO: 1305605 - DNA, 15 bp, Homo sapiens
attaacccttgagct

SEQ ID NO: 1305606 - DNA, 15 bp, Homo sapiens
tattaacccttgagc

SEQ ID NO: 1305607 - DNA, 15 bp, Homo sapiens
atattaacccttgag

SEQ ID NO: 1305608 - DNA, 15 bp, Homo sapiens
aatattaacccttga

SEQ ID NO: 1305609 - DNA, 15 bp, Homo sapiens
aaatattaacccttg

SEQ ID NO: 1305610 - DNA, 15 bp, Homo sapiens
gaaatattaaccctt

SEQ ID NO: 1305611 - DNA, 15 bp, Homo sapiens
tgaaatattaaccct

SEQ ID NO: 1305612 - DNA, 15 bp, Homo sapiens
atgaaatattaaccc

SEQ ID NO: 1305613 - DNA, 15 bp, Homo sapiens
tatgaaatattaacc

SEQ ID NO: 1305614 - DNA, 15 bp, Homo sapiens
ttatgaaatattaac

SEQ ID NO: 1305615 - DNA, 15 bp, Homo sapiens
tttatgaaatattaa

SEQ ID NO: 1305616 - DNA, 15 bp, Homo sapiens
atttatgaaatatta

SEQ ID NO: 1305617 - DNA, 15 bp, Homo sapiens
tatttatgaaatatt

SEQ ID NO: 1305618 - DNA, 15 bp, Homo sapiens
ctatttatgaaatat

SEQ ID NO: 1305619 - DNA, 15 bp, Homo sapiens
actatttatgaaata

SEQ ID NO: 1305620 - DNA, 15 bp, Homo sapiens
aactatttatgaaat

SEQ ID NO: 1305621 - DNA, 15 bp, Homo sapiens
taactatttatgaaa

SEQ ID NO: 1305622 - DNA, 15 bp, Homo sapiens
gtaactatttatgaa

SEQ ID NO: 1305623 - DNA, 15 bp, Homo sapiens
agtaactatttatga

SEQ ID NO: 1305624 - DNA, 15 bp, Homo sapiens
aagtaactatttatg

SEQ ID NO: 1305625 - DNA, 15 bp, Homo sapiens
aaagtaactatttat

SEQ ID NO: 1305626 - DNA, 15 bp, Homo sapiens
aaaagtaactattta

SEQ ID NO: 1305627 - DNA, 15 bp, Homo sapiens
aaaaagtaactattt

SEQ ID NO: 1305628 - DNA, 15 bp, Homo sapiens
aaaaaagtaactatt

SEQ ID NO: 1305629 - DNA, 15 bp, Homo sapiens
aaaaaaagtaactat

SEQ ID NO: 1305630 - DNA, 15 bp, Homo sapiens
aaaaaaaagtaacta

SEQ ID NO: 1305631 - DNA, 15 bp, Homo sapiens
aaaaaaaaagtaact

SEQ ID NO: 1305632 - DNA, 15 bp, Homo sapiens
aaaaaaaaaagtaac

SEQ ID NO: 1305633 - DNA, 15 bp, Homo sapiens
gaaaaaaaaaagtaa

SEQ ID NO: 1305634 - DNA, 15 bp, Homo sapiens
tgaaaaaaaaaagta

SEQ ID NO: 1305635 - DNA, 15 bp, Homo sapiens
atgaaaaaaaaaagt

SEQ ID NO: 1305636 - DNA, 15 bp, Homo sapiens
aatgaaaaaaaaaag

SEQ ID NO: 1305637 - DNA, 15 bp, Homo sapiens
aaatgaaaaaaaaaa

SEQ ID NO: 1305638 - DNA, 15 bp, Homo sapiens
aaaatgaaaaaaaaa

SEQ ID NO: 1305639 - DNA, 15 bp, Homo sapiens
taaaaatgaaaaaaa

SEQ ID NO: 1305640 - DNA, 15 bp, Homo sapiens
ctaaaaatgaaaaaa

SEQ ID NO: 1305641 - DNA, 15 bp, Homo sapiens
cctaaaaatgaaaaa

SEQ ID NO: 1305642 - DNA, 15 bp, Homo sapiens
tcctaaaaatgaaaa

SEQ ID NO: 1305643 - DNA, 15 bp, Homo sapiens
ttcctaaaaatgaaa

SEQ ID NO: 1305644 - DNA, 15 bp, Homo sapiens
cttcctaaaaatgaa

SEQ ID NO: 1305645 - DNA, 15 bp, Homo sapiens
acttcctaaaaatga

SEQ ID NO: 1305646 - DNA, 15 bp, Homo sapiens
tacttcctaaaaatg

SEQ ID NO: 1305647 - DNA, 15 bp, Homo sapiens
gtacttcctaaaaat

SEQ ID NO: 1305648 - DNA, 15 bp, Homo sapiens
tgtacttcctaaaaa

SEQ ID NO: 1305649 - DNA, 15 bp, Homo sapiens
atgtacttcctaaaa

SEQ ID NO: 1305650 - DNA, 15 bp, Homo sapiens
gatgtacttcctaaa

SEQ ID NO: 1305651 - DNA, 15 bp, Homo sapiens
agatgtacttcctaa

SEQ ID NO: 1305652 - DNA, 15 bp, Homo sapiens
gagatgtacttccta

SEQ ID NO: 1305653 - DNA, 15 bp, Homo sapiens
tgagatgtacttcct

SEQ ID NO: 1305654 - DNA, 15 bp, Homo sapiens
ctgagatgtacttcc

SEQ ID NO: 1305655 - DNA, 15 bp, Homo sapiens
tctgagatgtacttc

SEQ ID NO: 1305656 - DNA, 15 bp, Homo sapiens
ttctgagatgtactt

SEQ ID NO: 1305657 - DNA, 15 bp, Homo sapiens
attctgagatgtact

SEQ ID NO: 1305658 - DNA, 15 bp, Homo sapiens
gattctgagatgtac

SEQ ID NO: 1305659 - DNA, 15 bp, Homo sapiens
agattctgagatgta

SEQ ID NO: 1305660 - DNA, 15 bp, Homo sapiens
aagattctgagatgt

SEQ ID NO: 1305661 - DNA, 15 bp, Homo sapiens
caagattctgagatg

SEQ ID NO: 1305662 - DNA, 15 bp, Homo sapiens
tcaagattctgagat

SEQ ID NO: 1305663 - DNA, 15 bp, Homo sapiens
atcaagattctgaga

SEQ ID NO: 1305664 - DNA, 15 bp, Homo sapiens
aatcaagattctgag

SEQ ID NO: 1305665 - DNA, 15 bp, Homo sapiens
gaatcaagattctga

SEQ ID NO: 1305666 - DNA, 15 bp, Homo sapiens
agaatcaagattctg

SEQ ID NO: 1305667 - DNA, 15 bp, Homo sapiens
cagaatcaagattct

SEQ ID NO: 1305668 - DNA, 15 bp, Homo sapiens
ccagaatcaagattc

SEQ ID NO: 1305669 - DNA, 15 bp, Homo sapiens
tccagaatcaagatt

SEQ ID NO: 1305670 - DNA, 15 bp, Homo sapiens
ttccagaatcaagat

SEQ ID NO: 1305671 - DNA, 15 bp, Homo sapiens
gttccagaatcaaga

SEQ ID NO: 1305672 - DNA, 15 bp, Homo sapiens
tgttccagaatcaag

SEQ ID NO: 1305673 - DNA, 15 bp, Homo sapiens
ctgttccagaatcaa

SEQ ID NO: 1305674 - DNA, 15 bp, Homo sapiens
tctgttccagaatca

SEQ ID NO: 1305675 - DNA, 15 bp, Homo sapiens
atctgttccagaatc

SEQ ID NO: 1305676 - DNA, 15 bp, Homo sapiens
aatctgttccagaat

SEQ ID NO: 1305677 - DNA, 15 bp, Homo sapiens
aaatctgttccagaa

SEQ ID NO: 1305678 - DNA, 15 bp, Homo sapiens
caaatctgttccaga

SEQ ID NO: 1305679 - DNA, 15 bp, Homo sapiens
acaaatctgttccag

SEQ ID NO: 1305680 - DNA, 15 bp, Homo sapiens
gacaaatctgttcca

SEQ ID NO: 1305681 - DNA, 15 bp, Homo sapiens
agacaaatctgttcc

SEQ ID NO: 1305682 - DNA, 15 bp, Homo sapiens
aagacaaatctgttc

SEQ ID NO: 1305683 - DNA, 15 bp, Homo sapiens
aaagacaaatctgtt

SEQ ID NO: 1305684 - DNA, 15 bp, Homo sapiens
gaaagacaaatctgt

SEQ ID NO: 1305685 - DNA, 15 bp, Homo sapiens
ggaaagacaaatctg

SEQ ID NO: 1305686 - DNA, 15 bp, Homo sapiens
gggaaagacaaatct

SEQ ID NO: 1305687 - DNA, 15 bp, Homo sapiens
tgggaaagacaaatc

SEQ ID NO: 1305688 - DNA, 15 bp, Homo sapiens
atgggaaagacaaat

SEQ ID NO: 1305689 - DNA, 15 bp, Homo sapiens
catgggaaagacaaa

SEQ ID NO: 1305690 - DNA, 15 bp, Homo sapiens
ccatgggaaagacaa

SEQ ID NO: 1305691 - DNA, 15 bp, Homo sapiens
tccatgggaaagaca

SEQ ID NO: 1305692 - DNA, 15 bp, Homo sapiens
atccatgggaaagac

SEQ ID NO: 1305693 - DNA, 15 bp, Homo sapiens
aatccatgggaaaga

SEQ ID NO: 1305694 - DNA, 15 bp, Homo sapiens
gaatccatgggaaag

SEQ ID NO: 1305695 - DNA, 15 bp, Homo sapiens
agaatccatgggaaa

SEQ ID NO: 1305696 - DNA, 15 bp, Homo sapiens
cagaatccatgggaa

SEQ ID NO: 1305697 - DNA, 15 bp, Homo sapiens
tcagaatccatggga

SEQ ID NO: 1305698 - DNA, 15 bp, Homo sapiens
ttcagaatccatggg

SEQ ID NO: 1305699 - DNA, 15 bp, Homo sapiens
attcagaatccatgg

SEQ ID NO: 1305700 - DNA, 15 bp, Homo sapiens
cattcagaatccatg

SEQ ID NO: 1305701 - DNA, 15 bp, Homo sapiens
acattcagaatccat

SEQ ID NO: 1305702 - DNA, 15 bp, Homo sapiens
cacattcagaatcca

SEQ ID NO: 1305703 - DNA, 15 bp, Homo sapiens
gcacattcagaatcc

SEQ ID NO: 1305704 - DNA, 15 bp, Homo sapiens
agcacattcagaatc

SEQ ID NO: 1305705 - DNA, 15 bp, Homo sapiens
aagcacattcagaat

SEQ ID NO: 1305706 - DNA, 15 bp, Homo sapiens
taagcacattcagaa

SEQ ID NO: 1305707 - DNA, 15 bp, Homo sapiens
ttaagcacattcaga

SEQ ID NO: 1305708 - DNA, 15 bp, Homo sapiens
attaagcacattcag

SEQ ID NO: 1305709 - DNA, 15 bp, Homo sapiens
aattaagcacattca

SEQ ID NO: 1305710 - DNA, 15 bp, Homo sapiens
aaattaagcacattc

SEQ ID NO: 1305711 - DNA, 15 bp, Homo sapiens
taaattaagcacatt

SEQ ID NO: 1305712 - DNA, 15 bp, Homo sapiens
ttaaattaagcacat

SEQ ID NO: 1305713 - DNA, 15 bp, Homo sapiens
tttaaattaagcaca

SEQ ID NO: 1305714 - DNA, 15 bp, Homo sapiens
ttttaaattaagcac

SEQ ID NO: 1305715 - DNA, 15 bp, Homo sapiens
cttttaaattaagca

SEQ ID NO: 1305716 - DNA, 15 bp, Homo sapiens
gcttttaaattaagc

SEQ ID NO: 1305717 - DNA, 15 bp, Homo sapiens
ggcttttaaattaag

SEQ ID NO: 1305718 - DNA, 15 bp, Homo sapiens
aggcttttaaattaa

SEQ ID NO: 1305719 - DNA, 15 bp, Homo sapiens
aaggcttttaaatta

SEQ ID NO: 1305720 - DNA, 15 bp, Homo sapiens
aaaggcttttaaatt

SEQ ID NO: 1305721 - DNA, 15 bp, Homo sapiens
caaaggcttttaaat

SEQ ID NO: 1305722 - DNA, 15 bp, Homo sapiens
tcaaaggcttttaaa

SEQ ID NO: 1305723 - DNA, 15 bp, Homo sapiens
atcaaaggcttttaa

SEQ ID NO: 1305724 - DNA, 15 bp, Homo sapiens
aatcaaaggctttta

SEQ ID NO: 1305725 - DNA, 15 bp, Homo sapiens
aaatcaaaggctttt

SEQ ID NO: 1305726 - DNA, 15 bp, Homo sapiens
aaaatcaaaggcttt

SEQ ID NO: 1305727 - DNA, 15 bp, Homo sapiens
aaaaatcaaaggctt

SEQ ID NO: 1305728 - DNA, 15 bp, Homo sapiens
taaaaatcaaaggct

SEQ ID NO: 1305729 - DNA, 15 bp, Homo sapiens
gtaaaaatcaaaggc

SEQ ID NO: 1305730 - DNA, 15 bp, Homo sapiens
tgtaaaaatcaaagg

SEQ ID NO: 1305731 - DNA, 15 bp, Homo sapiens
ttgtaaaaatcaaag

SEQ ID NO: 1305732 - DNA, 15 bp, Homo sapiens
tttgtaaaaatcaaa

SEQ ID NO: 1305733 - DNA, 15 bp, Homo sapiens
ctttgtaaaaatcaa

SEQ ID NO: 1305734 - DNA, 15 bp, Homo sapiens
actttgtaaaaatca

SEQ ID NO: 1305735 - DNA, 15 bp, Homo sapiens
cactttgtaaaaatc

SEQ ID NO: 1305736 - DNA, 15 bp, Homo sapiens
tcactttgtaaaaat

SEQ ID NO: 1305737 - DNA, 15 bp, Homo sapiens
atcactttgtaaaaa

SEQ ID NO: 1305738 - DNA, 15 bp, Homo sapiens
gatcactttgtaaaa

SEQ ID NO: 1305739 - DNA, 15 bp, Homo sapiens
cgatcactttgtaaa

SEQ ID NO: 1305740 - DNA, 15 bp, Homo sapiens
tcgatcactttgtaa

SEQ ID NO: 1305741 - DNA, 15 bp, Homo sapiens
ttcgatcactttgta

SEQ ID NO: 1305742 - DNA, 15 bp, Homo sapiens
tttcgatcactttgt

SEQ ID NO: 1305743 - DNA, 15 bp, Homo sapiens
ctttcgatcactttg

SEQ ID NO: 1305744 - DNA, 15 bp, Homo sapiens
actttcgatcacttt

SEQ ID NO: 1305745 - DNA, 15 bp, Homo sapiens
aactttcgatcactt

SEQ ID NO: 1305746 - DNA, 15 bp, Homo sapiens
aaactttcgatcact

SEQ ID NO: 1305747 - DNA, 15 bp, Homo sapiens
aaaactttcgatcac

SEQ ID NO: 1305748 - DNA, 15 bp, Homo sapiens
taaaactttcgatca

SEQ ID NO: 1305749 - DNA, 15 bp, Homo sapiens
ataaaactttcgatc

SEQ ID NO: 1305750 - DNA, 15 bp, Homo sapiens
gataaaactttcgat

SEQ ID NO: 1305751 - DNA, 15 bp, Homo sapiens
tgataaaactttcga

SEQ ID NO: 1305752 - DNA, 15 bp, Homo sapiens
ttgataaaactttcg

SEQ ID NO: 1305753 - DNA, 15 bp, Homo sapiens
tttgataaaactttc

SEQ ID NO: 1305754 - DNA, 15 bp, Homo sapiens
ctttgataaaacttt

SEQ ID NO: 1305755 - DNA, 15 bp, Homo sapiens
gctttgataaaactt

SEQ ID NO: 1305756 - DNA, 15 bp, Homo sapiens
tgctttgataaaact

SEQ ID NO: 1305757 - DNA, 15 bp, Homo sapiens
ctgctttgataaaac

SEQ ID NO: 1305758 - DNA, 15 bp, Homo sapiens
tctgctttgataaaa

SEQ ID NO: 1305759 - DNA, 15 bp, Homo sapiens
ttctgctttgataaa

SEQ ID NO: 1305760 - DNA, 15 bp, Homo sapiens
cttctgctttgataa

SEQ ID NO: 1305761 - DNA, 15 bp, Homo sapiens
ccttctgctttgata

SEQ ID NO: 1305762 - DNA, 15 bp, Homo sapiens
gccttctgctttgat

SEQ ID NO: 1305763 - DNA, 15 bp, Homo sapiens
tgccttctgctttga

SEQ ID NO: 1305764 - DNA, 15 bp, Homo sapiens
ttgccttctgctttg

SEQ ID NO: 1305765 - DNA, 15 bp, Homo sapiens
gttgccttctgcttt

SEQ ID NO: 1305766 - DNA, 15 bp, Homo sapiens
agttgccttctgctt

SEQ ID NO: 1305767 - DNA, 15 bp, Homo sapiens
aagttgccttctgct

SEQ ID NO: 1305768 - DNA, 15 bp, Homo sapiens
caagttgccttctgc

SEQ ID NO: 1305769 - DNA, 15 bp, Homo sapiens
tcaagttgccttctg

SEQ ID NO: 1305770 - DNA, 15 bp, Homo sapiens
gtcaagttgccttct

SEQ ID NO: 1305771 - DNA, 15 bp, Homo sapiens
tgtcaagttgccttc

SEQ ID NO: 1305772 - DNA, 15 bp, Homo sapiens
ttgtcaagttgcctt

SEQ ID NO: 1305773 - DNA, 15 bp, Homo sapiens
cttgtcaagttgcct

SEQ ID NO: 1305774 - DNA, 15 bp, Homo sapiens
tcttgtcaagttgcc

SEQ ID NO: 1305775 - DNA, 15 bp, Homo sapiens
ctcttgtcaagttgc

SEQ ID NO: 1305776 - DNA, 15 bp, Homo sapiens
tctcttgtcaagttg

SEQ ID NO: 1305777 - DNA, 15 bp, Homo sapiens
ttctcttgtcaagtt

SEQ ID NO: 1305778 - DNA, 15 bp, Homo sapiens
tttctcttgtcaagt

SEQ ID NO: 1305779 - DNA, 15 bp, Homo sapiens
atttctcttgtcaag

SEQ ID NO: 1305780 - DNA, 15 bp, Homo sapiens
catttctcttgtcaa

SEQ ID NO: 1305781 - DNA, 15 bp, Homo sapiens
tcatttctcttgtca

SEQ ID NO: 1305782 - DNA, 15 bp, Homo sapiens
atcatttctcttgtc

SEQ ID NO: 1305783 - DNA, 15 bp, Homo sapiens
tatcatttctcttgt

SEQ ID NO: 1305784 - DNA, 15 bp, Homo sapiens
ttatcatttctcttg

SEQ ID NO: 1305785 - DNA, 15 bp, Homo sapiens
tttatcatttctctt

SEQ ID NO: 1305786 - DNA, 15 bp, Homo sapiens
ttttatcatttctct

SEQ ID NO: 1305787 - DNA, 15 bp, Homo sapiens
gttttatcatttctc

SEQ ID NO: 1305788 - DNA, 15 bp, Homo sapiens
tgttttatcatttct

SEQ ID NO: 1305789 - DNA, 15 bp, Homo sapiens
atgttttatcatttc

SEQ ID NO: 1305790 - DNA, 15 bp, Homo sapiens
aatgttttatcattt

SEQ ID NO: 1305791 - DNA, 15 bp, Homo sapiens
aaatgttttatcatt

SEQ ID NO: 1305792 - DNA, 15 bp, Homo sapiens
taaatgttttatcat

SEQ ID NO: 1305793 - DNA, 15 bp, Homo sapiens
ctaaatgttttatca

SEQ ID NO: 1305794 - DNA, 15 bp, Homo sapiens
tctaaatgttttatc

SEQ ID NO: 1305795 - DNA, 15 bp, Homo sapiens
ttctaaatgttttat

SEQ ID NO: 1305796 - DNA, 15 bp, Homo sapiens
gttctaaatgtttta

SEQ ID NO: 1305797 - DNA, 15 bp, Homo sapiens
cgttctaaatgtttt

SEQ ID NO: 1305798 - DNA, 15 bp, Homo sapiens
tcgttctaaatgttt

SEQ ID NO: 1305799 - DNA, 15 bp, Homo sapiens
atcgttctaaatgtt

SEQ ID NO: 1305800 - DNA, 15 bp, Homo sapiens
catcgttctaaatgt

SEQ ID NO: 1305801 - DNA, 15 bp, Homo sapiens
acatcgttctaaatg

SEQ ID NO: 1305802 - DNA, 15 bp, Homo sapiens
cacatcgttctaaat

SEQ ID NO: 1305803 - DNA, 15 bp, Homo sapiens
tcacatcgttctaaa

SEQ ID NO: 1305804 - DNA, 15 bp, Homo sapiens
ttcacatcgttctaa

SEQ ID NO: 1305805 - DNA, 15 bp, Homo sapiens
gttcacatcgttcta

SEQ ID NO: 1305806 - DNA, 15 bp, Homo sapiens
tgttcacatcgttct

SEQ ID NO: 1305807 - DNA, 15 bp, Homo sapiens
atgttcacatcgttc

SEQ ID NO: 1305808 - DNA, 15 bp, Homo sapiens
gatgttcacatcgtt

SEQ ID NO: 1305809 - DNA, 15 bp, Homo sapiens
cgatgttcacatcgt

SEQ ID NO: 1305810 - DNA, 15 bp, Homo sapiens
tcgatgttcacatcg

SEQ ID NO: 1305811 - DNA, 15 bp, Homo sapiens
ttcgatgttcacatc

SEQ ID NO: 1305812 - DNA, 15 bp, Homo sapiens
attcgatgttcacat

SEQ ID NO: 1305813 - DNA, 15 bp, Homo sapiens
gattcgatgttcaca

SEQ ID NO: 1305814 - DNA, 15 bp, Homo sapiens
tgattcgatgttcac

SEQ ID NO: 1305815 - DNA, 15 bp, Homo sapiens
atgattcgatgttca

SEQ ID NO: 1305816 - DNA, 15 bp, Homo sapiens
catgattcgatgttc

SEQ ID NO: 1305817 - DNA, 15 bp, Homo sapiens
ccatgattcgatgtt

SEQ ID NO: 1305818 - DNA, 15 bp, Homo sapiens
tccatgattcgatgt

SEQ ID NO: 1305819 - DNA, 15 bp, Homo sapiens
ttccatgattcgatg

SEQ ID NO: 1305820 - DNA, 15 bp, Homo sapiens
attccatgattcgat

SEQ ID NO: 1305821 - DNA, 15 bp, Homo sapiens
gattccatgattcga

SEQ ID NO: 1305822 - DNA, 15 bp, Homo sapiens
ggattccatgattcg

SEQ ID NO: 1305823 - DNA, 15 bp, Homo sapiens
gggattccatgattc

SEQ ID NO: 1305824 - DNA, 15 bp, Homo sapiens
agggattccatgatt

SEQ ID NO: 1305825 - DNA, 15 bp, Homo sapiens
aagggattccatgat

SEQ ID NO: 1305826 - DNA, 15 bp, Homo sapiens
caagggattccatga

SEQ ID NO: 1305827 - DNA, 15 bp, Homo sapiens
gcaagggattccatg

SEQ ID NO: 1305828 - DNA, 15 bp, Homo sapiens
tgcaagggattccat

SEQ ID NO: 1305829 - DNA, 15 bp, Homo sapiens
atgcaagggattcca

SEQ ID NO: 1305830 - DNA, 15 bp, Homo sapiens
catgcaagggattcc

SEQ ID NO: 1305831 - DNA, 15 bp, Homo sapiens
ccatgcaagggattc

SEQ ID NO: 1305832 - DNA, 15 bp, Homo sapiens
gccatgcaagggatt

SEQ ID NO: 1305833 - DNA, 15 bp, Homo sapiens
agccatgcaagggat

SEQ ID NO: 1305834 - DNA, 15 bp, Homo sapiens
gagccatgcaaggga

SEQ ID NO: 1305835 - DNA, 15 bp, Homo sapiens
agagccatgcaaggg

SEQ ID NO: 1305836 - DNA, 15 bp, Homo sapiens
gagagccatgcaagg

SEQ ID NO: 1305837 - DNA, 15 bp, Homo sapiens
tgagagccatgcaag

SEQ ID NO: 1305838 - DNA, 15 bp, Homo sapiens
ctgagagccatgcaa

SEQ ID NO: 1305839 - DNA, 15 bp, Homo sapiens
actgagagccatgca

SEQ ID NO: 1305840 - DNA, 15 bp, Homo sapiens
tactgagagccatgc

SEQ ID NO: 1305841 - DNA, 15 bp, Homo sapiens
ttactgagagccatg

SEQ ID NO: 1305842 - DNA, 15 bp, Homo sapiens
cttactgagagccat

SEQ ID NO: 1305843 - DNA, 15 bp, Homo sapiens
acttactgagagcca

SEQ ID NO: 1305844 - DNA, 15 bp, Homo sapiens
tacttactgagagcc

SEQ ID NO: 1305845 - DNA, 15 bp, Homo sapiens
ctacttactgagagc

SEQ ID NO: 1305846 - DNA, 15 bp, Homo sapiens
gctacttactgagag

SEQ ID NO: 1305847 - DNA, 15 bp, Homo sapiens
agctacttactgaga

SEQ ID NO: 1305848 - DNA, 15 bp, Homo sapiens
tagctacttactgag

SEQ ID NO: 1305849 - DNA, 15 bp, Homo sapiens
ttagctacttactga

SEQ ID NO: 1305850 - DNA, 15 bp, Homo sapiens
tttagctacttactg

SEQ ID NO: 1305851 - DNA, 15 bp, Homo sapiens
atttagctacttact

SEQ ID NO: 1305852 - DNA, 15 bp, Homo sapiens
tatttagctacttac

SEQ ID NO: 1305853 - DNA, 15 bp, Homo sapiens
ttatttagctactta

SEQ ID NO: 1305854 - DNA, 15 bp, Homo sapiens
attatttagctactt

SEQ ID NO: 1305855 - DNA, 15 bp, Homo sapiens
aattatttagctact

SEQ ID NO: 1305856 - DNA, 15 bp, Homo sapiens
caattatttagctac

SEQ ID NO: 1305857 - DNA, 15 bp, Homo sapiens
tcaattatttagcta

SEQ ID NO: 1305858 - DNA, 15 bp, Homo sapiens
ttcaattatttagct

SEQ ID NO: 1305859 - DNA, 15 bp, Homo sapiens
cttcaattatttagc

SEQ ID NO: 1305860 - DNA, 15 bp, Homo sapiens
tcttcaattatttag

SEQ ID NO: 1305861 - DNA, 15 bp, Homo sapiens
ttcttcaattattta

SEQ ID NO: 1305862 - DNA, 15 bp, Homo sapiens
tttcttcaattattt

SEQ ID NO: 1305863 - DNA, 15 bp, Homo sapiens
atttcttcaattatt

SEQ ID NO: 1305864 - DNA, 15 bp, Homo sapiens
aatttcttcaattat

SEQ ID NO: 1305865 - DNA, 15 bp, Homo sapiens
gaatttcttcaatta

SEQ ID NO: 1305866 - DNA, 15 bp, Homo sapiens
tgaatttcttcaatt

SEQ ID NO: 1305867 - DNA, 15 bp, Homo sapiens
atgaatttcttcaat

SEQ ID NO: 1305868 - DNA, 15 bp, Homo sapiens
aatgaatttcttcaa

SEQ ID NO: 1305869 - DNA, 15 bp, Homo sapiens
gaatgaatttcttca

SEQ ID NO: 1305870 - DNA, 15 bp, Homo sapiens
tgaatgaatttcttc

SEQ ID NO: 1305871 - DNA, 15 bp, Homo sapiens
atgaatgaatttctt

SEQ ID NO: 1305872 - DNA, 15 bp, Homo sapiens
catgaatgaatttct

SEQ ID NO: 1305873 - DNA, 15 bp, Homo sapiens
acatgaatgaatttc

SEQ ID NO: 1305874 - DNA, 15 bp, Homo sapiens
cacatgaatgaattt

SEQ ID NO: 1305875 - DNA, 15 bp, Homo sapiens
gcacatgaatgaatt

SEQ ID NO: 1305876 - DNA, 15 bp, Homo sapiens
tgcacatgaatgaat

SEQ ID NO: 1305877 - DNA, 15 bp, Homo sapiens
atgcacatgaatgaa

SEQ ID NO: 1305878 - DNA, 15 bp, Homo sapiens
tatgcacatgaatga

SEQ ID NO: 1305879 - DNA, 15 bp, Homo sapiens
atatgcacatgaatg

SEQ ID NO: 1305880 - DNA, 15 bp, Homo sapiens
catatgcacatgaat

SEQ ID NO: 1305881 - DNA, 15 bp, Homo sapiens
ccatatgcacatgaa

SEQ ID NO: 1305882 - DNA, 15 bp, Homo sapiens
gccatatgcacatga

SEQ ID NO: 1305883 - DNA, 15 bp, Homo sapiens
agccatatgcacatg

SEQ ID NO: 1305884 - DNA, 15 bp, Homo sapiens
tagccatatgcacat

SEQ ID NO: 1305885 - DNA, 15 bp, Homo sapiens
ttagccatatgcaca

SEQ ID NO: 1305886 - DNA, 15 bp, Homo sapiens
gttagccatatgcac

SEQ ID NO: 1305887 - DNA, 15 bp, Homo sapiens
tgttagccatatgca

SEQ ID NO: 1305888 - DNA, 15 bp, Homo sapiens
ttgttagccatatgc

SEQ ID NO: 1305889 - DNA, 15 bp, Homo sapiens
tttgttagccatatg

SEQ ID NO: 1305890 - DNA, 15 bp, Homo sapiens
atttgttagccatat

SEQ ID NO: 1305891 - DNA, 15 bp, Homo sapiens
aatttgttagccata

SEQ ID NO: 1305892 - DNA, 15 bp, Homo sapiens
taatttgttagccat

SEQ ID NO: 1305893 - DNA, 15 bp, Homo sapiens
ataatttgttagcca

SEQ ID NO: 1305894 - DNA, 15 bp, Homo sapiens
aataatttgttagcc

SEQ ID NO: 1305895 - DNA, 15 bp, Homo sapiens
caataatttgttagc

SEQ ID NO: 1305896 - DNA, 15 bp, Homo sapiens
acaataatttgttag

SEQ ID NO: 1305897 - DNA, 15 bp, Homo sapiens
aacaataatttgtta

SEQ ID NO: 1305898 - DNA, 15 bp, Homo sapiens
taacaataatttgtt

SEQ ID NO: 1305899 - DNA, 15 bp, Homo sapiens
ctaacaataatttgt

SEQ ID NO: 1305900 - DNA, 15 bp, Homo sapiens
actaacaataatttg

SEQ ID NO: 1305901 - DNA, 15 bp, Homo sapiens
cactaacaataattt

SEQ ID NO: 1305902 - DNA, 15 bp, Homo sapiens
tcactaacaataatt

SEQ ID NO: 1305903 - DNA, 15 bp, Homo sapiens
ctcactaacaataat

SEQ ID NO: 1305904 - DNA, 15 bp, Homo sapiens
tctcactaacaataa

SEQ ID NO: 1305905 - DNA, 15 bp, Homo sapiens
ctctcactaacaata

SEQ ID NO: 1305906 - DNA, 15 bp, Homo sapiens
cctctcactaacaat

SEQ ID NO: 1305907 - DNA, 15 bp, Homo sapiens
acctctcactaacaa

SEQ ID NO: 1305908 - DNA, 15 bp, Homo sapiens
cacctctcactaaca

SEQ ID NO: 1305909 - DNA, 15 bp, Homo sapiens
acacctctcactaac

SEQ ID NO: 1305910 - DNA, 15 bp, Homo sapiens
aacacctctcactaa

SEQ ID NO: 1305911 - DNA, 15 bp, Homo sapiens
aaacacctctcacta

SEQ ID NO: 1305912 - DNA, 15 bp, Homo sapiens
gaaacacctctcact

SEQ ID NO: 1305913 - DNA, 15 bp, Homo sapiens
agaaacacctctcac

SEQ ID NO: 1305914 - DNA, 15 bp, Homo sapiens
aagaaacacctctca

SEQ ID NO: 1305915 - DNA, 15 bp, Homo sapiens
taagaaacacctctc

SEQ ID NO: 1305916 - DNA, 15 bp, Homo sapiens
ttaagaaacacctct

SEQ ID NO: 1305917 - DNA, 15 bp, Homo sapiens
gttaagaaacacctc

SEQ ID NO: 1305918 - DNA, 15 bp, Homo sapiens
tgttaagaaacacct

SEQ ID NO: 1305919 - DNA, 15 bp, Homo sapiens
atgttaagaaacacc

SEQ ID NO: 1305920 - DNA, 15 bp, Homo sapiens
gatgttaagaaacac

SEQ ID NO: 1305921 - DNA, 15 bp, Homo sapiens
agatgttaagaaaca

SEQ ID NO: 1305922 - DNA, 15 bp, Homo sapiens
tagatgttaagaaac

SEQ ID NO: 1305923 - DNA, 15 bp, Homo sapiens
gtagatgttaagaaa

SEQ ID NO: 1305924 - DNA, 15 bp, Homo sapiens
ggtagatgttaagaa

SEQ ID NO: 1305925 - DNA, 15 bp, Homo sapiens
aggtagatgttaaga

SEQ ID NO: 1305926 - DNA, 15 bp, Homo sapiens
gaggtagatgttaag

SEQ ID NO: 1305927 - DNA, 15 bp, Homo sapiens
tgaggtagatgttaa

SEQ ID NO: 1305928 - DNA, 15 bp, Homo sapiens
ttgaggtagatgtta

SEQ ID NO: 1305929 - DNA, 15 bp, Homo sapiens
cttgaggtagatgtt

SEQ ID NO: 1305930 - DNA, 15 bp, Homo sapiens
tcttgaggtagatgt

SEQ ID NO: 1305931 - DNA, 15 bp, Homo sapiens
ttcttgaggtagatg

SEQ ID NO: 1305932 - DNA, 15 bp, Homo sapiens
gttcttgaggtagat

SEQ ID NO: 1305933 - DNA, 15 bp, Homo sapiens
tgttcttgaggtaga

SEQ ID NO: 1305934 - DNA, 15 bp, Homo sapiens
atgttcttgaggtag

SEQ ID NO: 1305935 - DNA, 15 bp, Homo sapiens
tatgttcttgaggta

SEQ ID NO: 1305936 - DNA, 15 bp, Homo sapiens
atatgttcttgaggt

SEQ ID NO: 1305937 - DNA, 15 bp, Homo sapiens
tatatgttcttgagg

SEQ ID NO: 1305938 - DNA, 15 bp, Homo sapiens
ctatatgttcttgag

SEQ ID NO: 1305939 - DNA, 15 bp, Homo sapiens
cctatatgttcttga

SEQ ID NO: 1305940 - DNA, 15 bp, Homo sapiens
ccctatatgttcttg

SEQ ID NO: 1305941 - DNA, 15 bp, Homo sapiens
tccctatatgttctt

SEQ ID NO: 1305942 - DNA, 15 bp, Homo sapiens
ttccctatatgttct

SEQ ID NO: 1305943 - DNA, 15 bp, Homo sapiens
attccctatatgttc

SEQ ID NO: 1305944 - DNA, 15 bp, Homo sapiens
aattccctatatgtt

SEQ ID NO: 1305945 - DNA, 15 bp, Homo sapiens
aaattccctatatgt

SEQ ID NO: 1305946 - DNA, 15 bp, Homo sapiens
taaattccctatatg

SEQ ID NO: 1305947 - DNA, 15 bp, Homo sapiens
ttaaattccctatat

SEQ ID NO: 1305948 - DNA, 15 bp, Homo sapiens
attaaattccctata

SEQ ID NO: 1305949 - DNA, 15 bp, Homo sapiens
cattaaattccctat

SEQ ID NO: 1305950 - DNA, 15 bp, Homo sapiens
tcattaaattcccta

SEQ ID NO: 1305951 - DNA, 15 bp, Homo sapiens
ttcattaaattccct

SEQ ID NO: 1305952 - DNA, 15 bp, Homo sapiens
attcattaaattccc

SEQ ID NO: 1305953 - DNA, 15 bp, Homo sapiens
tattcattaaattcc

SEQ ID NO: 1305954 - DNA, 15 bp, Homo sapiens
ttattcattaaattc

SEQ ID NO: 1305955 - DNA, 15 bp, Homo sapiens
attattcattaaatt

SEQ ID NO: 1305956 - DNA, 15 bp, Homo sapiens
cattattcattaaat

SEQ ID NO: 1305957 - DNA, 15 bp, Homo sapiens
acattattcattaaa

SEQ ID NO: 1305958 - DNA, 15 bp, Homo sapiens
aacattattcattaa

SEQ ID NO: 1305959 - DNA, 15 bp, Homo sapiens
taacattattcatta

SEQ ID NO: 1305960 - DNA, 15 bp, Homo sapiens
ataacattattcatt

SEQ ID NO: 1305961 - DNA, 15 bp, Homo sapiens
aataacattattcat

SEQ ID NO: 1305962 - DNA, 15 bp, Homo sapiens
aaataacattattca

SEQ ID NO: 1305963 - DNA, 15 bp, Homo sapiens
gaaataacattattc

SEQ ID NO: 1305964 - DNA, 15 bp, Homo sapiens
tgaaataacattatt

SEQ ID NO: 1305965 - DNA, 15 bp, Homo sapiens
ctgaaataacattat

SEQ ID NO: 1305966 - DNA, 15 bp, Homo sapiens
actgaaataacatta

SEQ ID NO: 1305967 - DNA, 15 bp, Homo sapiens
gactgaaataacatt

SEQ ID NO: 1305968 - DNA, 15 bp, Homo sapiens
agactgaaataacat

SEQ ID NO: 1305969 - DNA, 15 bp, Homo sapiens
tagactgaaataaca

SEQ ID NO: 1305970 - DNA, 15 bp, Homo sapiens
atagactgaaataac

SEQ ID NO: 1305971 - DNA, 15 bp, Homo sapiens
tatagactgaaataa

SEQ ID NO: 1305972 - DNA, 15 bp, Homo sapiens
ctatagactgaaata

SEQ ID NO: 1305973 - DNA, 15 bp, Homo sapiens
gctatagactgaaat

SEQ ID NO: 1305974 - DNA, 15 bp, Homo sapiens
ggctatagactgaaa

SEQ ID NO: 1305975 - DNA, 15 bp, Homo sapiens
gggctatagactgaa

SEQ ID NO: 1305976 - DNA, 15 bp, Homo sapiens
tgggctatagactga

SEQ ID NO: 1305977 - DNA, 15 bp, Homo sapiens
ttgggctatagactg

SEQ ID NO: 1305978 - DNA, 15 bp, Homo sapiens
cttgggctatagact

SEQ ID NO: 1305979 - DNA, 15 bp, Homo sapiens
ccttgggctatagac

SEQ ID NO: 1305980 - DNA, 15 bp, Homo sapiens
tccttgggctataga

SEQ ID NO: 1305981 - DNA, 15 bp, Homo sapiens
atccttgggctatag

SEQ ID NO: 1305982 - DNA, 15 bp, Homo sapiens
gatccttgggctata

SEQ ID NO: 1305983 - DNA, 15 bp, Homo sapiens
tgatccttgggctat

SEQ ID NO: 1305984 - DNA, 15 bp, Homo sapiens
ttgatccttgggcta

SEQ ID NO: 1305985 - DNA, 15 bp, Homo sapiens
cttgatccttgggct

SEQ ID NO: 1305986 - DNA, 15 bp, Homo sapiens
acttgatccttgggc

SEQ ID NO: 1305987 - DNA, 15 bp, Homo sapiens
cacttgatccttggg

SEQ ID NO: 1305988 - DNA, 15 bp, Homo sapiens
ccacttgatccttgg

SEQ ID NO: 1305989 - DNA, 15 bp, Homo sapiens
tccacttgatccttg

SEQ ID NO: 1305990 - DNA, 15 bp, Homo sapiens
ttccacttgatcctt

SEQ ID NO: 1305991 - DNA, 15 bp, Homo sapiens
attccacttgatcct

SEQ ID NO: 1305992 - DNA, 15 bp, Homo sapiens
tattccacttgatcc

SEQ ID NO: 1305993 - DNA, 15 bp, Homo sapiens
atattccacttgatc

SEQ ID NO: 1305994 - DNA, 15 bp, Homo sapiens
aatattccacttgat

SEQ ID NO: 1305995 - DNA, 15 bp, Homo sapiens
taatattccacttga

SEQ ID NO: 1305996 - DNA, 15 bp, Homo sapiens
ctaatattccacttg

SEQ ID NO: 1305997 - DNA, 15 bp, Homo sapiens
tctaatattccactt

SEQ ID NO: 1305998 - DNA, 15 bp, Homo sapiens
ttctaatattccact

SEQ ID NO: 1305999 - DNA, 15 bp, Homo sapiens
attctaatattccac

SEQ ID NO: 1306000 - DNA, 15 bp, Homo sapiens
cattctaatattcca

SEQ ID NO: 1306001 - DNA, 15 bp, Homo sapiens
ccattctaatattcc

SEQ ID NO: 1306002 - DNA, 15 bp, Homo sapiens
tccattctaatattc

SEQ ID NO: 1306003 - DNA, 15 bp, Homo sapiens
ctccattctaatatt

SEQ ID NO: 1306004 - DNA, 15 bp, Homo sapiens
gctccattctaatat

SEQ ID NO: 1306005 - DNA, 15 bp, Homo sapiens
agctccattctaata

SEQ ID NO: 1306006 - DNA, 15 bp, Homo sapiens
aagctccattctaat

SEQ ID NO: 1306007 - DNA, 15 bp, Homo sapiens
aaagctccattctaa

SEQ ID NO: 1306008 - DNA, 15 bp, Homo sapiens
taaagctccattcta

SEQ ID NO: 1306009 - DNA, 15 bp, Homo sapiens
ttaaagctccattct

SEQ ID NO: 1306010 - DNA, 15 bp, Homo sapiens
attaaagctccattc

SEQ ID NO: 1306011 - DNA, 15 bp, Homo sapiens
gattaaagctccatt

SEQ ID NO: 1306012 - DNA, 15 bp, Homo sapiens
cgattaaagctccat

SEQ ID NO: 1306013 - DNA, 15 bp, Homo sapiens
tcgattaaagctcca

SEQ ID NO: 1306014 - DNA, 15 bp, Homo sapiens
ctcgattaaagctcc

SEQ ID NO: 1306015 - DNA, 15 bp, Homo sapiens
gctcgattaaagctc

SEQ ID NO: 1306016 - DNA, 15 bp, Homo sapiens
tgctcgattaaagct

SEQ ID NO: 1306017 - DNA, 15 bp, Homo sapiens
gtgctcgattaaagc

SEQ ID NO: 1306018 - DNA, 15 bp, Homo sapiens
ggtgctcgattaaag

SEQ ID NO: 1306019 - DNA, 15 bp, Homo sapiens
gggtgctcgattaaa

SEQ ID NO: 1306020 - DNA, 15 bp, Homo sapiens
agggtgctcgattaa

SEQ ID NO: 1306021 - DNA, 15 bp, Homo sapiens
tagggtgctcgatta

SEQ ID NO: 1306022 - DNA, 15 bp, Homo sapiens
ttagggtgctcgatt

SEQ ID NO: 1306023 - DNA, 15 bp, Homo sapiens
tttagggtgctcgat

SEQ ID NO: 1306024 - DNA, 15 bp, Homo sapiens
gtttagggtgctcga

SEQ ID NO: 1306025 - DNA, 15 bp, Homo sapiens
ggtttagggtgctcg

SEQ ID NO: 1306026 - DNA, 15 bp, Homo sapiens
tggtttagggtgctc

SEQ ID NO: 1306027 - DNA, 15 bp, Homo sapiens
atggtttagggtgct

SEQ ID NO: 1306028 - DNA, 15 bp, Homo sapiens
gatggtttagggtgc

SEQ ID NO: 1306029 - DNA, 15 bp, Homo sapiens
agatggtttagggtg

SEQ ID NO: 1306030 - DNA, 15 bp, Homo sapiens
tagatggtttagggt

SEQ ID NO: 1306031 - DNA, 15 bp, Homo sapiens
ttagatggtttaggg

SEQ ID NO: 1306032 - DNA, 15 bp, Homo sapiens
attagatggtttagg

SEQ ID NO: 1306033 - DNA, 15 bp, Homo sapiens
tattagatggtttag

SEQ ID NO: 1306034 - DNA, 15 bp, Homo sapiens
gtattagatggttta

SEQ ID NO: 1306035 - DNA, 15 bp, Homo sapiens
tgtattagatggttt

SEQ ID NO: 1306036 - DNA, 15 bp, Homo sapiens
ctgtattagatggtt

SEQ ID NO: 1306037 - DNA, 15 bp, Homo sapiens
gctgtattagatggt

SEQ ID NO: 1306038 - DNA, 15 bp, Homo sapiens
tgctgtattagatgg

SEQ ID NO: 1306039 - DNA, 15 bp, Homo sapiens
gtgctgtattagatg

SEQ ID NO: 1306040 - DNA, 15 bp, Homo sapiens
tgtgctgtattagat

SEQ ID NO: 1306041 - DNA, 15 bp, Homo sapiens
ctgtgctgtattaga

SEQ ID NO: 1306042 - DNA, 15 bp, Homo sapiens
actgtgctgtattag

SEQ ID NO: 1306043 - DNA, 15 bp, Homo sapiens
cactgtgctgtatta

SEQ ID NO: 1306044 - DNA, 15 bp, Homo sapiens
tcactgtgctgtatt

SEQ ID NO: 1306045 - DNA, 15 bp, Homo sapiens
atcactgtgctgtat

SEQ ID NO: 1306046 - DNA, 15 bp, Homo sapiens
aatcactgtgctgta

SEQ ID NO: 1306047 - DNA, 15 bp, Homo sapiens
aaatcactgtgctgt

SEQ ID NO: 1306048 - DNA, 15 bp, Homo sapiens
taaatcactgtgctg

SEQ ID NO: 1306049 - DNA, 15 bp, Homo sapiens
ataaatcactgtgct

SEQ ID NO: 1306050 - DNA, 15 bp, Homo sapiens
aataaatcactgtgc

SEQ ID NO: 1306051 - DNA, 15 bp, Homo sapiens
aaataaatcactgtg

SEQ ID NO: 1306052 - DNA, 15 bp, Homo sapiens
taaataaatcactgt

SEQ ID NO: 1306053 - DNA, 15 bp, Homo sapiens
ttaaataaatcactg

SEQ ID NO: 1306054 - DNA, 15 bp, Homo sapiens
cttaaataaatcact

SEQ ID NO: 1306055 - DNA, 15 bp, Homo sapiens
tcttaaataaatcac

SEQ ID NO: 1306056 - DNA, 15 bp, Homo sapiens
ttcttaaataaatca

SEQ ID NO: 1306057 - DNA, 15 bp, Homo sapiens
attcttaaataaatc

SEQ ID NO: 1306058 - DNA, 15 bp, Homo sapiens
tattcttaaataaat

SEQ ID NO: 1306059 - DNA, 15 bp, Homo sapiens
ctattcttaaataaa

SEQ ID NO: 1306060 - DNA, 15 bp, Homo sapiens
gctattcttaaataa

SEQ ID NO: 1306061 - DNA, 15 bp, Homo sapiens
agctattcttaaata

SEQ ID NO: 1306062 - DNA, 15 bp, Homo sapiens
aagctattcttaaat

SEQ ID NO: 1306063 - DNA, 15 bp, Homo sapiens
aaagctattcttaaa

SEQ ID NO: 1306064 - DNA, 15 bp, Homo sapiens
aaaagctattcttaa

SEQ ID NO: 1306065 - DNA, 15 bp, Homo sapiens
gaaaagctattctta

SEQ ID NO: 1306066 - DNA, 15 bp, Homo sapiens
agaaaagctattctt

SEQ ID NO: 1306067 - DNA, 15 bp, Homo sapiens
aagaaaagctattct

SEQ ID NO: 1306068 - DNA, 15 bp, Homo sapiens
taagaaaagctattc

SEQ ID NO: 1306069 - DNA, 15 bp, Homo sapiens
ttaagaaaagctatt

SEQ ID NO: 1306070 - DNA, 15 bp, Homo sapiens
tttaagaaaagctat

SEQ ID NO: 1306071 - DNA, 15 bp, Homo sapiens
ttttaagaaaagcta

SEQ ID NO: 1306072 - DNA, 15 bp, Homo sapiens
gttttaagaaaagct

SEQ ID NO: 1306073 - DNA, 15 bp, Homo sapiens
tgttttaagaaaagc

SEQ ID NO: 1306074 - DNA, 15 bp, Homo sapiens
catgttttaagaaaa

SEQ ID NO: 1306075 - DNA, 15 bp, Homo sapiens
gcatgttttaagaaa

SEQ ID NO: 1306076 - DNA, 15 bp, Homo sapiens
ggcatgttttaagaa

SEQ ID NO: 1306077 - DNA, 15 bp, Homo sapiens
tggcatgttttaaga

SEQ ID NO: 1306078 - DNA, 15 bp, Homo sapiens
gtggcatgttttaag

SEQ ID NO: 1306079 - DNA, 15 bp, Homo sapiens
agtggcatgttttaa

SEQ ID NO: 1306080 - DNA, 15 bp, Homo sapiens
aagtggcatgtttta

SEQ ID NO: 1306081 - DNA, 15 bp, Homo sapiens
aaagtggcatgtttt

SEQ ID NO: 1306082 - DNA, 15 bp, Homo sapiens
taaagtggcatgttt

SEQ ID NO: 1306083 - DNA, 15 bp, Homo sapiens
ttaaagtggcatgtt

SEQ ID NO: 1306084 - DNA, 15 bp, Homo sapiens
tttaaagtggcatgt

SEQ ID NO: 1306085 - DNA, 15 bp, Homo sapiens
ttttaaagtggcatg

SEQ ID NO: 1306086 - DNA, 15 bp, Homo sapiens
gttttaaagtggcat

SEQ ID NO: 1306087 - DNA, 15 bp, Homo sapiens
tgttttaaagtggca

SEQ ID NO: 1306088 - DNA, 15 bp, Homo sapiens
ttgttttaaagtggc

SEQ ID NO: 1306089 - DNA, 15 bp, Homo sapiens
tttgttttaaagtgg

SEQ ID NO: 1306090 - DNA, 15 bp, Homo sapiens
ttttgttttaaagtg

SEQ ID NO: 1306091 - DNA, 15 bp, Homo sapiens
cgttttgttttaaag

SEQ ID NO: 1306092 - DNA, 15 bp, Homo sapiens
ccgttttgttttaaa

SEQ ID NO: 1306093 - DNA, 15 bp, Homo sapiens
tccgttttgttttaa

SEQ ID NO: 1306094 - DNA, 15 bp, Homo sapiens
atccgttttgtttta

SEQ ID NO: 1306095 - DNA, 15 bp, Homo sapiens
aatccgttttgtttt

SEQ ID NO: 1306096 - DNA, 15 bp, Homo sapiens
aaatccgttttgttt

SEQ ID NO: 1306097 - DNA, 15 bp, Homo sapiens
aaaatccgttttgtt

SEQ ID NO: 1306098 - DNA, 15 bp, Homo sapiens
aaaaatccgttttgt

SEQ ID NO: 1306099 - DNA, 15 bp, Homo sapiens
aaaaaatccgttttg

SEQ ID NO: 1306100 - DNA, 15 bp, Homo sapiens
aaaaaaatccgtttt

SEQ ID NO: 1306101 - DNA, 15 bp, Homo sapiens
aaaaaaaatccgttt

SEQ ID NO: 1306102 - DNA, 15 bp, Homo sapiens
aaaaaaaaatccgtt

SEQ ID NO: 1306103 - DNA, 15 bp, Homo sapiens
aaaaaaaaaatccgt

SEQ ID NO: 1306104 - DNA, 15 bp, Homo sapiens
taaaaaaaaaatccg

SEQ ID NO: 1306105 - DNA, 15 bp, Homo sapiens
tataaaaaaaaaatc

SEQ ID NO: 1306106 - DNA, 15 bp, Homo sapiens
gtataaaaaaaaaat

SEQ ID NO: 1306107 - DNA, 15 bp, Homo sapiens
agtataaaaaaaaaa

SEQ ID NO: 1306108 - DNA, 15 bp, Homo sapiens
aagtataaaaaaaaa

SEQ ID NO: 1306109 - DNA, 15 bp, Homo sapiens
aaagtataaaaaaaa

SEQ ID NO: 1306110 - DNA, 15 bp, Homo sapiens
taaagtataaaaaaa

SEQ ID NO: 1306111 - DNA, 15 bp, Homo sapiens
ttaaagtataaaaaa

SEQ ID NO: 1306112 - DNA, 15 bp, Homo sapiens
cttaaagtataaaaa

SEQ ID NO: 1306113 - DNA, 15 bp, Homo sapiens
acttaaagtataaaa

SEQ ID NO: 1306114 - DNA, 15 bp, Homo sapiens
tagaacttaaagtat

SEQ ID NO: 1306115 - DNA, 15 bp, Homo sapiens
ctagaacttaaagta

SEQ ID NO: 1306116 - DNA, 15 bp, Homo sapiens
cctagaacttaaagt

SEQ ID NO: 1306117 - DNA, 15 bp, Homo sapiens
ccctagaacttaaag

SEQ ID NO: 1306118 - DNA, 15 bp, Homo sapiens
accctagaacttaaa

SEQ ID NO: 1306119 - DNA, 15 bp, Homo sapiens
taccctagaacttaa

SEQ ID NO: 1306120 - DNA, 15 bp, Homo sapiens
gtaccctagaactta

SEQ ID NO: 1306121 - DNA, 15 bp, Homo sapiens
tgtaccctagaactt

SEQ ID NO: 1306122 - DNA, 15 bp, Homo sapiens
atgtaccctagaact

SEQ ID NO: 1306123 - DNA, 15 bp, Homo sapiens
catgtaccctagaac

SEQ ID NO: 1306124 - DNA, 15 bp, Homo sapiens
acatgtaccctagaa

SEQ ID NO: 1306125 - DNA, 15 bp, Homo sapiens
cacatgtaccctaga

SEQ ID NO: 1306126 - DNA, 15 bp, Homo sapiens
gcacatgtaccctag

SEQ ID NO: 1306127 - DNA, 15 bp, Homo sapiens
gttgtgcacatgtac

SEQ ID NO: 1306128 - DNA, 15 bp, Homo sapiens
cgttgtgcacatgta

SEQ ID NO: 1306129 - DNA, 15 bp, Homo sapiens
acgttgtgcacatgt

SEQ ID NO: 1306130 - DNA, 15 bp, Homo sapiens
cacgttgtgcacatg

SEQ ID NO: 1306131 - DNA, 15 bp, Homo sapiens
gcacgttgtgcacat

SEQ ID NO: 1306132 - DNA, 15 bp, Homo sapiens
tgcacgttgtgcaca

SEQ ID NO: 1306133 - DNA, 15 bp, Homo sapiens
ctgcacgttgtgcac

SEQ ID NO: 1306134 - DNA, 15 bp, Homo sapiens
cctgcacgttgtgca

SEQ ID NO: 1306135 - DNA, 15 bp, Homo sapiens
acctgcacgttgtgc

SEQ ID NO: 1306136 - DNA, 15 bp, Homo sapiens
aacctgcacgttgtg

SEQ ID NO: 1306137 - DNA, 15 bp, Homo sapiens
aaacctgcacgttgt

SEQ ID NO: 1306138 - DNA, 15 bp, Homo sapiens
caaacctgcacgttg

SEQ ID NO: 1306139 - DNA, 15 bp, Homo sapiens
atatgtaacaaacct

SEQ ID NO: 1306140 - DNA, 15 bp, Homo sapiens
catatgtaacaaacc

SEQ ID NO: 1306141 - DNA, 15 bp, Homo sapiens
acatatgtaacaaac

SEQ ID NO: 1306142 - DNA, 15 bp, Homo sapiens
tacatatgtaacaaa

SEQ ID NO: 1306143 - DNA, 15 bp, Homo sapiens
atacatatgtaacaa

SEQ ID NO: 1306144 - DNA, 15 bp, Homo sapiens
tatacatatgtaaca

SEQ ID NO: 1306145 - DNA, 15 bp, Homo sapiens
atgtatacatatgta

SEQ ID NO: 1306146 - DNA, 15 bp, Homo sapiens
catgtatacatatgt

SEQ ID NO: 1306147 - DNA, 15 bp, Homo sapiens
acatgtatacatatg

SEQ ID NO: 1306148 - DNA, 15 bp, Homo sapiens
cacatgtatacatat

SEQ ID NO: 1306149 - DNA, 15 bp, Homo sapiens
gcacatgtatacata

SEQ ID NO: 1306150 - DNA, 15 bp, Homo sapiens
ggcacatgtatacat

SEQ ID NO: 1306151 - DNA, 15 bp, Homo sapiens
tggcacatgtataca

SEQ ID NO: 1306152 - DNA, 15 bp, Homo sapiens
atggcacatgtatac

SEQ ID NO: 1306153 - DNA, 15 bp, Homo sapiens
tatggcacatgtata

SEQ ID NO: 1306154 - DNA, 15 bp, Homo sapiens
atatggcacatgtat

SEQ ID NO: 1306155 - DNA, 15 bp, Homo sapiens
aatatggcacatgta

SEQ ID NO: 1306156 - DNA, 15 bp, Homo sapiens
caatatggcacatgt

SEQ ID NO: 1306157 - DNA, 15 bp, Homo sapiens
ccaatatggcacatg

SEQ ID NO: 1306158 - DNA, 15 bp, Homo sapiens
accaatatggcacat

SEQ ID NO: 1306159 - DNA, 15 bp, Homo sapiens
caccaatatggcaca

SEQ ID NO: 1306160 - DNA, 15 bp, Homo sapiens
acaccaatatggcac

SEQ ID NO: 1306161 - DNA, 15 bp, Homo sapiens
cacaccaatatggca

SEQ ID NO: 1306162 - DNA, 15 bp, Homo sapiens
gcacaccaatatggc

SEQ ID NO: 1306163 - DNA, 15 bp, Homo sapiens
agcacaccaatatgg

SEQ ID NO: 1306164 - DNA, 15 bp, Homo sapiens
cagcacaccaatatg

SEQ ID NO: 1306165 - DNA, 15 bp, Homo sapiens
gcagcacaccaatat

SEQ ID NO: 1306166 - DNA, 15 bp, Homo sapiens
tgcagcacaccaata

SEQ ID NO: 1306167 - DNA, 15 bp, Homo sapiens
gtgcagcacaccaat

SEQ ID NO: 1306168 - DNA, 15 bp, Homo sapiens
ggtgcagcacaccaa

SEQ ID NO: 1306169 - DNA, 15 bp, Homo sapiens
gggtgcagcacacca

SEQ ID NO: 1306170 - DNA, 15 bp, Homo sapiens
tgggtgcagcacacc

SEQ ID NO: 1306171 - DNA, 15 bp, Homo sapiens
atgggtgcagcacac

SEQ ID NO: 1306172 - DNA, 15 bp, Homo sapiens
aatgggtgcagcaca

SEQ ID NO: 1306173 - DNA, 15 bp, Homo sapiens
taatgggtgcagcac

SEQ ID NO: 1306174 - DNA, 15 bp, Homo sapiens
ttaatgggtgcagca

SEQ ID NO: 1306175 - DNA, 15 bp, Homo sapiens
gttaatgggtgcagc

SEQ ID NO: 1306176 - DNA, 15 bp, Homo sapiens
agttaatgggtgcag

SEQ ID NO: 1306177 - DNA, 15 bp, Homo sapiens
aagttaatgggtgca

SEQ ID NO: 1306178 - DNA, 15 bp, Homo sapiens
caagttaatgggtgc

SEQ ID NO: 1306179 - DNA, 15 bp, Homo sapiens
acaagttaatgggtg

SEQ ID NO: 1306180 - DNA, 15 bp, Homo sapiens
gacaagttaatgggt

SEQ ID NO: 1306181 - DNA, 15 bp, Homo sapiens
tgacaagttaatggg

SEQ ID NO: 1306182 - DNA, 15 bp, Homo sapiens
atgacaagttaatgg

SEQ ID NO: 1306183 - DNA, 15 bp, Homo sapiens
aatgacaagttaatg

SEQ ID NO: 1306184 - DNA, 15 bp, Homo sapiens
aaatgacaagttaat

SEQ ID NO: 1306185 - DNA, 15 bp, Homo sapiens
taaatgacaagttaa

SEQ ID NO: 1306186 - DNA, 15 bp, Homo sapiens
gtaaatgacaagtta

SEQ ID NO: 1306187 - DNA, 15 bp, Homo sapiens
tgtaaatgacaagtt

SEQ ID NO: 1306188 - DNA, 15 bp, Homo sapiens
atgtaaatgacaagt

SEQ ID NO: 1306189 - DNA, 15 bp, Homo sapiens
aatgtaaatgacaag

SEQ ID NO: 1306190 - DNA, 15 bp, Homo sapiens
ctaatgtaaatgaca

SEQ ID NO: 1306191 - DNA, 15 bp, Homo sapiens
tctaatgtaaatgac

SEQ ID NO: 1306192 - DNA, 15 bp, Homo sapiens
atctaatgtaaatga

SEQ ID NO: 1306193 - DNA, 15 bp, Homo sapiens
tatctaatgtaaatg

SEQ ID NO: 1306194 - DNA, 15 bp, Homo sapiens
atatctaatgtaaat

SEQ ID NO: 1306195 - DNA, 15 bp, Homo sapiens
tatatctaatgtaaa

SEQ ID NO: 1306196 - DNA, 15 bp, Homo sapiens
atatatctaatgtaa

SEQ ID NO: 1306197 - DNA, 15 bp, Homo sapiens
gatatatctaatgta

SEQ ID NO: 1306198 - DNA, 15 bp, Homo sapiens
agatatatctaatgt

SEQ ID NO: 1306199 - DNA, 15 bp, Homo sapiens
gagatatatctaatg

SEQ ID NO: 1306200 - DNA, 15 bp, Homo sapiens
ggagatatatctaat

SEQ ID NO: 1306201 - DNA, 15 bp, Homo sapiens
aggagatatatctaa

SEQ ID NO: 1306202 - DNA, 15 bp, Homo sapiens
taggagatatatcta

SEQ ID NO: 1306203 - DNA, 15 bp, Homo sapiens
ttaggagatatatct

SEQ ID NO: 1306204 - DNA, 15 bp, Homo sapiens
attaggagatatatc

SEQ ID NO: 1306205 - DNA, 15 bp, Homo sapiens
cattaggagatatat

SEQ ID NO: 1306206 - DNA, 15 bp, Homo sapiens
gcattaggagatata

SEQ ID NO: 1306207 - DNA, 15 bp, Homo sapiens
agcattaggagatat

SEQ ID NO: 1306208 - DNA, 15 bp, Homo sapiens
tagcattaggagata

SEQ ID NO: 1306209 - DNA, 15 bp, Homo sapiens
atagcattaggagat

SEQ ID NO: 1306210 - DNA, 15 bp, Homo sapiens
gatagcattaggaga

SEQ ID NO: 1306211 - DNA, 15 bp, Homo sapiens
ggatagcattaggag

SEQ ID NO: 1306212 - DNA, 15 bp, Homo sapiens
gggatagcattagga

SEQ ID NO: 1306213 - DNA, 15 bp, Homo sapiens
agggatagcattagg

SEQ ID NO: 1306214 - DNA, 15 bp, Homo sapiens
gagggatagcattag

SEQ ID NO: 1306215 - DNA, 15 bp, Homo sapiens
agggagggatagcat

SEQ ID NO: 1306216 - DNA, 15 bp, Homo sapiens
gagggagggatagca

SEQ ID NO: 1306217 - DNA, 15 bp, Homo sapiens
ggagggagggatagc

SEQ ID NO: 1306218 - DNA, 15 bp, Homo sapiens
aggagggagggatag

SEQ ID NO: 1306219 - DNA, 15 bp, Homo sapiens
gaggagggagggata

SEQ ID NO: 1306220 - DNA, 15 bp, Homo sapiens
agaggagggagggat

SEQ ID NO: 1306221 - DNA, 15 bp, Homo sapiens
gagaggagggaggga

SEQ ID NO: 1306222 - DNA, 15 bp, Homo sapiens
ggagaggagggaggg

SEQ ID NO: 1306223 - DNA, 15 bp, Homo sapiens
gggagaggagggagg

SEQ ID NO: 1306224 - DNA, 15 bp, Homo sapiens
agggagaggagggag

SEQ ID NO: 1306225 - DNA, 15 bp, Homo sapiens
tagggagaggaggga

SEQ ID NO: 1306226 - DNA, 15 bp, Homo sapiens
gtagggagaggaggg

SEQ ID NO: 1306227 - DNA, 15 bp, Homo sapiens
ggtagggagaggagg

SEQ ID NO: 1306228 - DNA, 15 bp, Homo sapiens
gggtagggagaggag

SEQ ID NO: 1306229 - DNA, 15 bp, Homo sapiens
ggggtagggagagga

SEQ ID NO: 1306230 - DNA, 15 bp, Homo sapiens
tggggtagggagagg

SEQ ID NO: 1306231 - DNA, 15 bp, Homo sapiens
atggggtagggagag

SEQ ID NO: 1306232 - DNA, 15 bp, Homo sapiens
catggggtagggaga

SEQ ID NO: 1306233 - DNA, 15 bp, Homo sapiens
tcatggggtagggag

SEQ ID NO: 1306234 - DNA, 15 bp, Homo sapiens
gtcatggggtaggga

SEQ ID NO: 1306235 - DNA, 15 bp, Homo sapiens
tgtcatggggtaggg

SEQ ID NO: 1306236 - DNA, 15 bp, Homo sapiens
ctgtcatggggtagg

SEQ ID NO: 1306237 - DNA, 15 bp, Homo sapiens
cctgtcatggggtag

SEQ ID NO: 1306238 - DNA, 15 bp, Homo sapiens
gcctgtcatggggta

SEQ ID NO: 1306239 - DNA, 15 bp, Homo sapiens
ggcctgtcatggggt

SEQ ID NO: 1306240 - DNA, 15 bp, Homo sapiens
gggcctgtcatgggg

SEQ ID NO: 1306241 - DNA, 15 bp, Homo sapiens
ggggcctgtcatggg

SEQ ID NO: 1306242 - DNA, 15 bp, Homo sapiens
tggggcctgtcatgg

SEQ ID NO: 1306243 - DNA, 15 bp, Homo sapiens
ctggggcctgtcatg

SEQ ID NO: 1306244 - DNA, 15 bp, Homo sapiens
actggggcctgtcat

SEQ ID NO: 1306245 - DNA, 15 bp, Homo sapiens
cactggggcctgtca

SEQ ID NO: 1306246 - DNA, 15 bp, Homo sapiens
acactggggcctgtc

SEQ ID NO: 1306247 - DNA, 15 bp, Homo sapiens
tcacacactggggcc

SEQ ID NO: 1306248 - DNA, 15 bp, Homo sapiens
atcacacactggggc

SEQ ID NO: 1306249 - DNA, 15 bp, Homo sapiens
catcacacactgggg

SEQ ID NO: 1306250 - DNA, 15 bp, Homo sapiens
acatcacacactggg

SEQ ID NO: 1306251 - DNA, 15 bp, Homo sapiens
aacatcacacactgg

SEQ ID NO: 1306252 - DNA, 15 bp, Homo sapiens
gaacatcacacactg

SEQ ID NO: 1306253 - DNA, 15 bp, Homo sapiens
ggaacatcacacact

SEQ ID NO: 1306254 - DNA, 15 bp, Homo sapiens
gggaacatcacacac

SEQ ID NO: 1306255 - DNA, 15 bp, Homo sapiens
ggggaacatcacaca

SEQ ID NO: 1306256 - DNA, 15 bp, Homo sapiens
tggggaacatcacac

SEQ ID NO: 1306257 - DNA, 15 bp, Homo sapiens
gtggggaacatcaca

SEQ ID NO: 1306258 - DNA, 15 bp, Homo sapiens
ggtggggaacatcac

SEQ ID NO: 1306259 - DNA, 15 bp, Homo sapiens
gggtggggaacatca

SEQ ID NO: 1306260 - DNA, 15 bp, Homo sapiens
agggtggggaacatc

SEQ ID NO: 1306261 - DNA, 15 bp, Homo sapiens
cagggtggggaacat

SEQ ID NO: 1306262 - DNA, 15 bp, Homo sapiens
acagggtggggaaca

SEQ ID NO: 1306263 - DNA, 15 bp, Homo sapiens
cacagggtggggaac

SEQ ID NO: 1306264 - DNA, 15 bp, Homo sapiens
acacagggtggggaa

SEQ ID NO: 1306265 - DNA, 15 bp, Homo sapiens
gacacagggtgggga

SEQ ID NO: 1306266 - DNA, 15 bp, Homo sapiens
ggacacagggtgggg

SEQ ID NO: 1306267 - DNA, 15 bp, Homo sapiens
tggacacagggtggg

SEQ ID NO: 1306268 - DNA, 15 bp, Homo sapiens
gtggacacagggtgg

SEQ ID NO: 1306269 - DNA, 15 bp, Homo sapiens
cgtggacacagggtg

SEQ ID NO: 1306270 - DNA, 15 bp, Homo sapiens
acgtggacacagggt

SEQ ID NO: 1306271 - DNA, 15 bp, Homo sapiens
cacgtggacacaggg

SEQ ID NO: 1306272 - DNA, 15 bp, Homo sapiens
acacgtggacacagg

SEQ ID NO: 1306273 - DNA, 15 bp, Homo sapiens
aacacgtggacacag

SEQ ID NO: 1306274 - DNA, 15 bp, Homo sapiens
gaacacgtggacaca

SEQ ID NO: 1306275 - DNA, 15 bp, Homo sapiens
agaacacgtggacac

SEQ ID NO: 1306276 - DNA, 15 bp, Homo sapiens
gagaacacgtggaca

SEQ ID NO: 1306277 - DNA, 15 bp, Homo sapiens
tgagaacacgtggac

SEQ ID NO: 1306278 - DNA, 15 bp, Homo sapiens
atgagaacacgtgga

SEQ ID NO: 1306279 - DNA, 15 bp, Homo sapiens
aatgagaacacgtgg

SEQ ID NO: 1306280 - DNA, 15 bp, Homo sapiens
caatgagaacacgtg

SEQ ID NO: 1306281 - DNA, 15 bp, Homo sapiens
acaatgagaacacgt

SEQ ID NO: 1306282 - DNA, 15 bp, Homo sapiens
aacaatgagaacacg

SEQ ID NO: 1306283 - DNA, 15 bp, Homo sapiens
atgaacaatgagaac

SEQ ID NO: 1306284 - DNA, 15 bp, Homo sapiens
aatgaacaatgagaa

SEQ ID NO: 1306285 - DNA, 15 bp, Homo sapiens
aaatgaacaatgaga

SEQ ID NO: 1306286 - DNA, 15 bp, Homo sapiens
gaaatgaacaatgag

SEQ ID NO: 1306287 - DNA, 15 bp, Homo sapiens
ggaaatgaacaatga

SEQ ID NO: 1306288 - DNA, 15 bp, Homo sapiens
gggaaatgaacaatg

SEQ ID NO: 1306289 - DNA, 15 bp, Homo sapiens
tgggaaatgaacaat

SEQ ID NO: 1306290 - DNA, 15 bp, Homo sapiens
gtgggaaatgaacaa

SEQ ID NO: 1306291 - DNA, 15 bp, Homo sapiens
ggtgggaaatgaaca

SEQ ID NO: 1306292 - DNA, 15 bp, Homo sapiens
aggtgggaaatgaac

SEQ ID NO: 1306293 - DNA, 15 bp, Homo sapiens
taggtgggaaatgaa

SEQ ID NO: 1306294 - DNA, 15 bp, Homo sapiens
ataggtgggaaatga

SEQ ID NO: 1306295 - DNA, 15 bp, Homo sapiens
cataggtgggaaatg

SEQ ID NO: 1306296 - DNA, 15 bp, Homo sapiens
tcataggtgggaaat

SEQ ID NO: 1306297 - DNA, 15 bp, Homo sapiens
ctcataggtgggaaa

SEQ ID NO: 1306298 - DNA, 15 bp, Homo sapiens
actcataggtgggaa

SEQ ID NO: 1306299 - DNA, 15 bp, Homo sapiens
cactcataggtggga

SEQ ID NO: 1306300 - DNA, 15 bp, Homo sapiens
tcactcataggtggg

SEQ ID NO: 1306301 - DNA, 15 bp, Homo sapiens
ctcactcataggtgg

SEQ ID NO: 1306302 - DNA, 15 bp, Homo sapiens
tctcactcataggtg

SEQ ID NO: 1306303 - DNA, 15 bp, Homo sapiens
ttctcactcataggt

SEQ ID NO: 1306304 - DNA, 15 bp, Homo sapiens
gttctcactcatagg

SEQ ID NO: 1306305 - DNA, 15 bp, Homo sapiens
tgttctcactcatag

SEQ ID NO: 1306306 - DNA, 15 bp, Homo sapiens
atgttctcactcata

SEQ ID NO: 1306307 - DNA, 15 bp, Homo sapiens
catgttctcactcat

SEQ ID NO: 1306308 - DNA, 15 bp, Homo sapiens
gcatgttctcactca

SEQ ID NO: 1306309 - DNA, 15 bp, Homo sapiens
tgcatgttctcactc

SEQ ID NO: 1306310 - DNA, 15 bp, Homo sapiens
ttcttaaaggttagt

SEQ ID NO: 1306311 - DNA, 15 bp, Homo sapiens
tttcttaaaggttag

SEQ ID NO: 1306312 - DNA, 15 bp, Homo sapiens
gtttcttaaaggtta

SEQ ID NO: 1306313 - DNA, 15 bp, Homo sapiens
agtttcttaaaggtt

SEQ ID NO: 1306314 - DNA, 15 bp, Homo sapiens
tagtttcttaaaggt

SEQ ID NO: 1306315 - DNA, 15 bp, Homo sapiens
atagtttcttaaagg

SEQ ID NO: 1306316 - DNA, 15 bp, Homo sapiens
catagtttcttaaag

SEQ ID NO: 1306317 - DNA, 15 bp, Homo sapiens
tcatagtttcttaaa

SEQ ID NO: 1306318 - DNA, 15 bp, Homo sapiens
gtcatagtttcttaa

SEQ ID NO: 1306319 - DNA, 15 bp, Homo sapiens
agtcatagtttctta

SEQ ID NO: 1306320 - DNA, 15 bp, Homo sapiens
aagtcatagtttctt

SEQ ID NO: 1306321 - DNA, 15 bp, Homo sapiens
caagtcatagtttct

SEQ ID NO: 1306322 - DNA, 15 bp, Homo sapiens
acaagtcatagtttc

SEQ ID NO: 1306323 - DNA, 15 bp, Homo sapiens
gacaagtcatagttt

SEQ ID NO: 1306324 - DNA, 15 bp, Homo sapiens
cgacaagtcatagtt

SEQ ID NO: 1306325 - DNA, 15 bp, Homo sapiens
tcgacaagtcatagt

SEQ ID NO: 1306326 - DNA, 15 bp, Homo sapiens
ctcgacaagtcatag

SEQ ID NO: 1306327 - DNA, 15 bp, Homo sapiens
actcgacaagtcata

SEQ ID NO: 1306328 - DNA, 15 bp, Homo sapiens
aactcgacaagtcat

SEQ ID NO: 1306329 - DNA, 15 bp, Homo sapiens
aaactcgacaagtca

SEQ ID NO: 1306330 - DNA, 15 bp, Homo sapiens
aaaactcgacaagtc

SEQ ID NO: 1306331 - DNA, 15 bp, Homo sapiens
caaaactcgacaagt

SEQ ID NO: 1306332 - DNA, 15 bp, Homo sapiens
ccaaaactcgacaag

SEQ ID NO: 1306333 - DNA, 15 bp, Homo sapiens
gccaaaactcgacaa

SEQ ID NO: 1306334 - DNA, 15 bp, Homo sapiens
cgccaaaactcgaca

SEQ ID NO: 1306335 - DNA, 15 bp, Homo sapiens
acgccaaaactcgac

SEQ ID NO: 1306336 - DNA, 15 bp, Homo sapiens
tacgccaaaactcga

SEQ ID NO: 1306337 - DNA, 15 bp, Homo sapiens
ctacgccaaaactcg

SEQ ID NO: 1306338 - DNA, 15 bp, Homo sapiens
actacgccaaaactc

SEQ ID NO: 1306339 - DNA, 15 bp, Homo sapiens
cactacgccaaaact

SEQ ID NO: 1306340 - DNA, 15 bp, Homo sapiens
acactacgccaaaac

SEQ ID NO: 1306341 - DNA, 15 bp, Homo sapiens
gacactacgccaaaa

SEQ ID NO: 1306342 - DNA, 15 bp, Homo sapiens
tgacactacgccaaa

SEQ ID NO: 1306343 - DNA, 15 bp, Homo sapiens
ctgacactacgccaa

SEQ ID NO: 1306344 - DNA, 15 bp, Homo sapiens
tctgacactacgcca

SEQ ID NO: 1306345 - DNA, 15 bp, Homo sapiens
ttctgacactacgcc

SEQ ID NO: 1306346 - DNA, 15 bp, Homo sapiens
tttctgacactacgc

SEQ ID NO: 1306347 - DNA, 15 bp, Homo sapiens
ttttctgacactacg

SEQ ID NO: 1306348 - DNA, 15 bp, Homo sapiens
gttttctgacactac

SEQ ID NO: 1306349 - DNA, 15 bp, Homo sapiens
tgttttctgacacta

SEQ ID NO: 1306350 - DNA, 15 bp, Homo sapiens
ctgttttctgacact

SEQ ID NO: 1306351 - DNA, 15 bp, Homo sapiens
actgttttctgacac

SEQ ID NO: 1306352 - DNA, 15 bp, Homo sapiens
tactgttttctgaca

SEQ ID NO: 1306353 - DNA, 15 bp, Homo sapiens
ttactgttttctgac

SEQ ID NO: 1306354 - DNA, 15 bp, Homo sapiens
gttactgttttctga

SEQ ID NO: 1306355 - DNA, 15 bp, Homo sapiens
ggttactgttttctg

SEQ ID NO: 1306356 - DNA, 15 bp, Homo sapiens
tggttactgttttct

SEQ ID NO: 1306357 - DNA, 15 bp, Homo sapiens
atggttactgttttc

SEQ ID NO: 1306358 - DNA, 15 bp, Homo sapiens
tatggttactgtttt

SEQ ID NO: 1306359 - DNA, 15 bp, Homo sapiens
ttatggttactgttt

SEQ ID NO: 1306360 - DNA, 15 bp, Homo sapiens
attatggttactgtt

SEQ ID NO: 1306361 - DNA, 15 bp, Homo sapiens
aattatggttactgt

SEQ ID NO: 1306362 - DNA, 15 bp, Homo sapiens
taattatggttactg

SEQ ID NO: 1306363 - DNA, 15 bp, Homo sapiens
ataattatggttact

SEQ ID NO: 1306364 - DNA, 15 bp, Homo sapiens
gataattatggttac

SEQ ID NO: 1306365 - DNA, 15 bp, Homo sapiens
agataattatggtta

SEQ ID NO: 1306366 - DNA, 15 bp, Homo sapiens
cagataattatggtt

SEQ ID NO: 1306367 - DNA, 15 bp, Homo sapiens
tcagataattatggt

SEQ ID NO: 1306368 - DNA, 15 bp, Homo sapiens
ttcagataattatgg

SEQ ID NO: 1306369 - DNA, 15 bp, Homo sapiens
tttcagataattatg

SEQ ID NO: 1306370 - DNA, 15 bp, Homo sapiens
ttttcagataattat

SEQ ID NO: 1306371 - DNA, 15 bp, Homo sapiens
cttttcagataatta

SEQ ID NO: 1306372 - DNA, 15 bp, Homo sapiens
ccttttcagataatt

SEQ ID NO: 1306373 - DNA, 15 bp, Homo sapiens
accttttcagataat

SEQ ID NO: 1306374 - DNA, 15 bp, Homo sapiens
aaccttttcagataa

SEQ ID NO: 1306375 - DNA, 15 bp, Homo sapiens
taaccttttcagata

SEQ ID NO: 1306376 - DNA, 15 bp, Homo sapiens
ataaccttttcagat

SEQ ID NO: 1306377 - DNA, 15 bp, Homo sapiens
aataaccttttcaga

SEQ ID NO: 1306378 - DNA, 15 bp, Homo sapiens
taataaccttttcag

SEQ ID NO: 1306379 - DNA, 15 bp, Homo sapiens
ttaataaccttttca

SEQ ID NO: 1306380 - DNA, 15 bp, Homo sapiens
tttaataaccttttc

SEQ ID NO: 1306381 - DNA, 15 bp, Homo sapiens
ctttaataacctttt

SEQ ID NO: 1306382 - DNA, 15 bp, Homo sapiens
actttaataaccttt

SEQ ID NO: 1306383 - DNA, 15 bp, Homo sapiens
tactttaataacctt

SEQ ID NO: 1306384 - DNA, 15 bp, Homo sapiens
gtactttaataacct

SEQ ID NO: 1306385 - DNA, 15 bp, Homo sapiens
agtactttaataacc

SEQ ID NO: 1306386 - DNA, 15 bp, Homo sapiens
gagtactttaataac

SEQ ID NO: 1306387 - DNA, 15 bp, Homo sapiens
ggagtactttaataa

SEQ ID NO: 1306388 - DNA, 15 bp, Homo sapiens
aggagtactttaata

SEQ ID NO: 1306389 - DNA, 15 bp, Homo sapiens
gaggagtactttaat

SEQ ID NO: 1306390 - DNA, 15 bp, Homo sapiens
ggaggagtactttaa

SEQ ID NO: 1306391 - DNA, 15 bp, Homo sapiens
aggaggagtacttta

SEQ ID NO: 1306392 - DNA, 15 bp, Homo sapiens
gaggaggagtacttt

SEQ ID NO: 1306393 - DNA, 15 bp, Homo sapiens
agaggaggagtactt

SEQ ID NO: 1306394 - DNA, 15 bp, Homo sapiens
aagaggaggagtact

SEQ ID NO: 1306395 - DNA, 15 bp, Homo sapiens
aaagaggaggagtac

SEQ ID NO: 1306396 - DNA, 15 bp, Homo sapiens
gaaagaggaggagta

SEQ ID NO: 1306397 - DNA, 15 bp, Homo sapiens
ggaaagaggaggagt

SEQ ID NO: 1306398 - DNA, 15 bp, Homo sapiens
tggaaagaggaggag

SEQ ID NO: 1306399 - DNA, 15 bp, Homo sapiens
atggaaagaggagga

SEQ ID NO: 1306400 - DNA, 15 bp, Homo sapiens
tatggaaagaggagg

SEQ ID NO: 1306401 - DNA, 15 bp, Homo sapiens
atatggaaagaggag

SEQ ID NO: 1306402 - DNA, 15 bp, Homo sapiens
catatggaaagagga

SEQ ID NO: 1306403 - DNA, 15 bp, Homo sapiens
tcatatggaaagagg

SEQ ID NO: 1306404 - DNA, 15 bp, Homo sapiens
ctcatatggaaagag

SEQ ID NO: 1306405 - DNA, 15 bp, Homo sapiens
cctcatatggaaaga

SEQ ID NO: 1306406 - DNA, 15 bp, Homo sapiens
gcctcatatggaaag

SEQ ID NO: 1306407 - DNA, 15 bp, Homo sapiens
ggcctcatatggaaa

SEQ ID NO: 1306408 - DNA, 15 bp, Homo sapiens
tggcctcatatggaa

SEQ ID NO: 1306409 - DNA, 15 bp, Homo sapiens
ctggcctcatatgga

SEQ ID NO: 1306410 - DNA, 15 bp, Homo sapiens
tctggcctcatatgg

SEQ ID NO: 1306411 - DNA, 15 bp, Homo sapiens
atctggcctcatatg

SEQ ID NO: 1306412 - DNA, 15 bp, Homo sapiens
aatctggcctcatat

SEQ ID NO: 1306413 - DNA, 15 bp, Homo sapiens
aaatctggcctcata

SEQ ID NO: 1306414 - DNA, 15 bp, Homo sapiens
aaaatctggcctcat

SEQ ID NO: 1306415 - DNA, 15 bp, Homo sapiens
aaaaatctggcctca

SEQ ID NO: 1306416 - DNA, 15 bp, Homo sapiens
gaaaaatctggcctc

SEQ ID NO: 1306417 - DNA, 15 bp, Homo sapiens
agaaaaatctggcct

SEQ ID NO: 1306418 - DNA, 15 bp, Homo sapiens
aagaaaaatctggcc

SEQ ID NO: 1306419 - DNA, 15 bp, Homo sapiens
aaagaaaaatctggc

SEQ ID NO: 1306420 - DNA, 15 bp, Homo sapiens
caaagaaaaatctgg

SEQ ID NO: 1306421 - DNA, 15 bp, Homo sapiens
acaaagaaaaatctg

SEQ ID NO: 1306422 - DNA, 15 bp, Homo sapiens
tacaaagaaaaatct

SEQ ID NO: 1306423 - DNA, 15 bp, Homo sapiens
atacaaagaaaaatc

SEQ ID NO: 1306424 - DNA, 15 bp, Homo sapiens
tatacaaagaaaaat

SEQ ID NO: 1306425 - DNA, 15 bp, Homo sapiens
gtatacaaagaaaaa

SEQ ID NO: 1306426 - DNA, 15 bp, Homo sapiens
agtatacaaagaaaa

SEQ ID NO: 1306427 - DNA, 15 bp, Homo sapiens
aagtatacaaagaaa

SEQ ID NO: 1306428 - DNA, 15 bp, Homo sapiens
gaagtatacaaagaa

SEQ ID NO: 1306429 - DNA, 15 bp, Homo sapiens
tgaagtatacaaaga

SEQ ID NO: 1306430 - DNA, 15 bp, Homo sapiens
ttgaagtatacaaag

SEQ ID NO: 1306431 - DNA, 15 bp, Homo sapiens
gttgaagtatacaaa

SEQ ID NO: 1306432 - DNA, 15 bp, Homo sapiens
ggttgaagtatacaa

SEQ ID NO: 1306433 - DNA, 15 bp, Homo sapiens
aggttgaagtataca

SEQ ID NO: 1306434 - DNA, 15 bp, Homo sapiens
taggttgaagtatac

SEQ ID NO: 1306435 - DNA, 15 bp, Homo sapiens
ttaggttgaagtata

SEQ ID NO: 1306436 - DNA, 15 bp, Homo sapiens
tttaggttgaagtat

SEQ ID NO: 1306437 - DNA, 15 bp, Homo sapiens
gtttaggttgaagta

SEQ ID NO: 1306438 - DNA, 15 bp, Homo sapiens
tgtttaggttgaagt

SEQ ID NO: 1306439 - DNA, 15 bp, Homo sapiens
ctgtttaggttgaag

SEQ ID NO: 1306440 - DNA, 15 bp, Homo sapiens
gctgtttaggttgaa

SEQ ID NO: 1306441 - DNA, 15 bp, Homo sapiens
tgctgtttaggttga

SEQ ID NO: 1306442 - DNA, 15 bp, Homo sapiens
atgctgtttaggttg

SEQ ID NO: 1306443 - DNA, 15 bp, Homo sapiens
tatgctgtttaggtt

SEQ ID NO: 1306444 - DNA, 15 bp, Homo sapiens
atatgctgtttaggt

SEQ ID NO: 1306445 - DNA, 15 bp, Homo sapiens
aatatgctgtttagg

SEQ ID NO: 1306446 - DNA, 15 bp, Homo sapiens
caatatgctgtttag

SEQ ID NO: 1306447 - DNA, 15 bp, Homo sapiens
gcaatatgctgttta

SEQ ID NO: 1306448 - DNA, 15 bp, Homo sapiens
tgcaatatgctgttt

SEQ ID NO: 1306449 - DNA, 15 bp, Homo sapiens
ttgcaatatgctgtt

SEQ ID NO: 1306450 - DNA, 15 bp, Homo sapiens
gttgcaatatgctgt

SEQ ID NO: 1306451 - DNA, 15 bp, Homo sapiens
tgttgcaatatgctg

SEQ ID NO: 1306452 - DNA, 15 bp, Homo sapiens
ttgttgcaatatgct

SEQ ID NO: 1306453 - DNA, 15 bp, Homo sapiens
tttgttgcaatatgc

SEQ ID NO: 1306454 - DNA, 15 bp, Homo sapiens
ctttgttgcaatatg

SEQ ID NO: 1306455 - DNA, 15 bp, Homo sapiens
actttgttgcaatat

SEQ ID NO: 1306456 - DNA, 15 bp, Homo sapiens
tactttgttgcaata

SEQ ID NO: 1306457 - DNA, 15 bp, Homo sapiens
ttactttgttgcaat

SEQ ID NO: 1306458 - DNA, 15 bp, Homo sapiens
tttactttgttgcaa

SEQ ID NO: 1306459 - DNA, 15 bp, Homo sapiens
atttactttgttgca

SEQ ID NO: 1306460 - DNA, 15 bp, Homo sapiens
catttactttgttgc

SEQ ID NO: 1306461 - DNA, 15 bp, Homo sapiens
acatttactttgttg

SEQ ID NO: 1306462 - DNA, 15 bp, Homo sapiens
tacatttactttgtt

SEQ ID NO: 1306463 - DNA, 15 bp, Homo sapiens
ctacatttactttgt

SEQ ID NO: 1306464 - DNA, 15 bp, Homo sapiens
tctacatttactttg

SEQ ID NO: 1306465 - DNA, 15 bp, Homo sapiens
ttctacatttacttt

SEQ ID NO: 1306466 - DNA, 15 bp, Homo sapiens
cttctacatttactt

SEQ ID NO: 1306467 - DNA, 15 bp, Homo sapiens
gcttctacatttact

SEQ ID NO: 1306468 - DNA, 15 bp, Homo sapiens
cgcttctacatttac

SEQ ID NO: 1306469 - DNA, 15 bp, Homo sapiens
ccgcttctacattta

SEQ ID NO: 1306470 - DNA, 15 bp, Homo sapiens
tccgcttctacattt

SEQ ID NO: 1306471 - DNA, 15 bp, Homo sapiens
atccgcttctacatt

SEQ ID NO: 1306472 - DNA, 15 bp, Homo sapiens
tatccgcttctacat

SEQ ID NO: 1306473 - DNA, 15 bp, Homo sapiens
ctatccgcttctaca

SEQ ID NO: 1306474 - DNA, 15 bp, Homo sapiens
cctatccgcttctac

SEQ ID NO: 1306475 - DNA, 15 bp, Homo sapiens
tcctatccgcttcta

SEQ ID NO: 1306476 - DNA, 15 bp, Homo sapiens
ttcctatccgcttct

SEQ ID NO: 1306477 - DNA, 15 bp, Homo sapiens
tttcctatccgcttc

SEQ ID NO: 1306478 - DNA, 15 bp, Homo sapiens
ttttcctatccgctt

SEQ ID NO: 1306479 - DNA, 15 bp, Homo sapiens
attttcctatccgct

SEQ ID NO: 1306480 - DNA, 15 bp, Homo sapiens
aattttcctatccgc

SEQ ID NO: 1306481 - DNA, 15 bp, Homo sapiens
gaattttcctatccg

SEQ ID NO: 1306482 - DNA, 15 bp, Homo sapiens
tgaattttcctatcc

SEQ ID NO: 1306483 - DNA, 15 bp, Homo sapiens
ctgaattttcctatc

SEQ ID NO: 1306484 - DNA, 15 bp, Homo sapiens
gctgaattttcctat

SEQ ID NO: 1306485 - DNA, 15 bp, Homo sapiens
agctgaattttccta

SEQ ID NO: 1306486 - DNA, 15 bp, Homo sapiens
gagctgaattttcct

SEQ ID NO: 1306487 - DNA, 15 bp, Homo sapiens
agagctgaattttcc

SEQ ID NO: 1306488 - DNA, 15 bp, Homo sapiens
aagagctgaattttc

SEQ ID NO: 1306489 - DNA, 15 bp, Homo sapiens
aaagagctgaatttt

SEQ ID NO: 1306490 - DNA, 15 bp, Homo sapiens
caaagagctgaattt

SEQ ID NO: 1306491 - DNA, 15 bp, Homo sapiens
gcaaagagctgaatt

SEQ ID NO: 1306492 - DNA, 15 bp, Homo sapiens
agcaaagagctgaat

SEQ ID NO: 1306493 - DNA, 15 bp, Homo sapiens
cagcaaagagctgaa

SEQ ID NO: 1306494 - DNA, 15 bp, Homo sapiens
acagcaaagagctga

SEQ ID NO: 1306495 - DNA, 15 bp, Homo sapiens
aacagcaaagagctg

SEQ ID NO: 1306496 - DNA, 15 bp, Homo sapiens
taacagcaaagagct

SEQ ID NO: 1306497 - DNA, 15 bp, Homo sapiens
ataacagcaaagagc

SEQ ID NO: 1306498 - DNA, 15 bp, Homo sapiens
cataacagcaaagag

SEQ ID NO: 1306499 - DNA, 15 bp, Homo sapiens
gcataacagcaaaga

SEQ ID NO: 1306500 - DNA, 15 bp, Homo sapiens
ggcataacagcaaag

SEQ ID NO: 1306501 - DNA, 15 bp, Homo sapiens
tggcataacagcaaa

SEQ ID NO: 1306502 - DNA, 15 bp, Homo sapiens
ctggcataacagcaa

SEQ ID NO: 1306503 - DNA, 15 bp, Homo sapiens
tctggcataacagca

SEQ ID NO: 1306504 - DNA, 15 bp, Homo sapiens
atctggcataacagc

SEQ ID NO: 1306505 - DNA, 15 bp, Homo sapiens
tatctggcataacag

SEQ ID NO: 1306506 - DNA, 15 bp, Homo sapiens
ctatctggcataaca

SEQ ID NO: 1306507 - DNA, 15 bp, Homo sapiens
actatctggcataac

SEQ ID NO: 1306508 - DNA, 15 bp, Homo sapiens
cactatctggcataa

SEQ ID NO: 1306509 - DNA, 15 bp, Homo sapiens
tcactatctggcata

SEQ ID NO: 1306510 - DNA, 15 bp, Homo sapiens
ttcactatctggcat

SEQ ID NO: 1306511 - DNA, 15 bp, Homo sapiens
cttcactatctggca

SEQ ID NO: 1306512 - DNA, 15 bp, Homo sapiens
tcttcactatctggc

SEQ ID NO: 1306513 - DNA, 15 bp, Homo sapiens
gtcttcactatctgg

SEQ ID NO: 1306514 - DNA, 15 bp, Homo sapiens
tgtcttcactatctg

SEQ ID NO: 1306515 - DNA, 15 bp, Homo sapiens
atgtcttcactatct

SEQ ID NO: 1306516 - DNA, 15 bp, Homo sapiens
aatgtcttcactatc

SEQ ID NO: 1306517 - DNA, 15 bp, Homo sapiens
gaatgtcttcactat

SEQ ID NO: 1306518 - DNA, 15 bp, Homo sapiens
tgaatgtcttcacta

SEQ ID NO: 1306519 - DNA, 15 bp, Homo sapiens
ctgaatgtcttcact

SEQ ID NO: 1306520 - DNA, 15 bp, Homo sapiens
tctgaatgtcttcac

SEQ ID NO: 1306521 - DNA, 15 bp, Homo sapiens
ttctgaatgtcttca

SEQ ID NO: 1306522 - DNA, 15 bp, Homo sapiens
cttctgaatgtcttc

SEQ ID NO: 1306523 - DNA, 15 bp, Homo sapiens
tcttctgaatgtctt

SEQ ID NO: 1306524 - DNA, 15 bp, Homo sapiens
atcttctgaatgtct

SEQ ID NO: 1306525 - DNA, 15 bp, Homo sapiens
gatcttctgaatgtc

SEQ ID NO: 1306526 - DNA, 15 bp, Homo sapiens
tgatcttctgaatgt

SEQ ID NO: 1306527 - DNA, 15 bp, Homo sapiens
atgatcttctgaatg

SEQ ID NO: 1306528 - DNA, 15 bp, Homo sapiens
tatgatcttctgaat

SEQ ID NO: 1306529 - DNA, 15 bp, Homo sapiens
ttatgatcttctgaa

SEQ ID NO: 1306530 - DNA, 15 bp, Homo sapiens
tttatgatcttctga

SEQ ID NO: 1306531 - DNA, 15 bp, Homo sapiens
ttttatgatcttctg

SEQ ID NO: 1306532 - DNA, 15 bp, Homo sapiens
gttttatgatcttct

SEQ ID NO: 1306533 - DNA, 15 bp, Homo sapiens
tgttttatgatcttc

SEQ ID NO: 1306534 - DNA, 15 bp, Homo sapiens
ctgttttatgatctt

SEQ ID NO: 1306535 - DNA, 15 bp, Homo sapiens
actgttttatgatct

SEQ ID NO: 1306536 - DNA, 15 bp, Homo sapiens
cactgttttatgatc

SEQ ID NO: 1306537 - DNA, 15 bp, Homo sapiens
gcactgttttatgat

SEQ ID NO: 1306538 - DNA, 15 bp, Homo sapiens
agcactgttttatga

SEQ ID NO: 1306539 - DNA, 15 bp, Homo sapiens
tagcactgttttatg

SEQ ID NO: 1306540 - DNA, 15 bp, Homo sapiens
atagcactgttttat

SEQ ID NO: 1306541 - DNA, 15 bp, Homo sapiens
aatagcactgtttta

SEQ ID NO: 1306542 - DNA, 15 bp, Homo sapiens
caatagcactgtttt

SEQ ID NO: 1306543 - DNA, 15 bp, Homo sapiens
acaatagcactgttt

SEQ ID NO: 1306544 - DNA, 15 bp, Homo sapiens
aacaatagcactgtt

SEQ ID NO: 1306545 - DNA, 15 bp, Homo sapiens
gaacaatagcactgt

SEQ ID NO: 1306546 - DNA, 15 bp, Homo sapiens
agaacaatagcactg

SEQ ID NO: 1306547 - DNA, 15 bp, Homo sapiens
tagaacaatagcact

SEQ ID NO: 1306548 - DNA, 15 bp, Homo sapiens
atagaacaatagcac

SEQ ID NO: 1306549 - DNA, 15 bp, Homo sapiens
gatagaacaatagca

SEQ ID NO: 1306550 - DNA, 15 bp, Homo sapiens
agatagaacaatagc

SEQ ID NO: 1306551 - DNA, 15 bp, Homo sapiens
aagatagaacaatag

SEQ ID NO: 1306552 - DNA, 15 bp, Homo sapiens
aaagatagaacaata

SEQ ID NO: 1306553 - DNA, 15 bp, Homo sapiens
aaaagatagaacaat

SEQ ID NO: 1306554 - DNA, 15 bp, Homo sapiens
aaaaagatagaacaa

SEQ ID NO: 1306555 - DNA, 15 bp, Homo sapiens
aaaaaagatagaaca

SEQ ID NO: 1306556 - DNA, 15 bp, Homo sapiens
caaaaaagatagaac

SEQ ID NO: 1306557 - DNA, 15 bp, Homo sapiens
acaaaaaagatagaa

SEQ ID NO: 1306558 - DNA, 15 bp, Homo sapiens
aacaaaaaagataga

SEQ ID NO: 1306559 - DNA, 15 bp, Homo sapiens
aaacaaaaaagatag

SEQ ID NO: 1306560 - DNA, 15 bp, Homo sapiens
aaaacaaaaaagata

SEQ ID NO: 1306561 - DNA, 15 bp, Homo sapiens
caaaacaaaaaagat

SEQ ID NO: 1306562 - DNA, 15 bp, Homo sapiens
tacaaaacaaaaaag

SEQ ID NO: 1306563 - DNA, 15 bp, Homo sapiens
ctacaaaacaaaaaa

SEQ ID NO: 1306564 - DNA, 15 bp, Homo sapiens
tctacaaaacaaaaa

SEQ ID NO: 1306565 - DNA, 15 bp, Homo sapiens
ttctacaaaacaaaa

SEQ ID NO: 1306566 - DNA, 15 bp, Homo sapiens
attctacaaaacaaa

SEQ ID NO: 1306567 - DNA, 15 bp, Homo sapiens
tattctacaaaacaa

SEQ ID NO: 1306568 - DNA, 15 bp, Homo sapiens
atattctacaaaaca

SEQ ID NO: 1306569 - DNA, 15 bp, Homo sapiens
catattctacaaaac

SEQ ID NO: 1306570 - DNA, 15 bp, Homo sapiens
ccatattctacaaaa

SEQ ID NO: 1306571 - DNA, 15 bp, Homo sapiens
accatattctacaaa

SEQ ID NO: 1306572 - DNA, 15 bp, Homo sapiens
aaccatattctacaa

SEQ ID NO: 1306573 - DNA, 15 bp, Homo sapiens
taaccatattctaca

SEQ ID NO: 1306574 - DNA, 15 bp, Homo sapiens
ataaccatattctac

SEQ ID NO: 1306575 - DNA, 15 bp, Homo sapiens
aataaccatattcta

SEQ ID NO: 1306576 - DNA, 15 bp, Homo sapiens
aaataaccatattct

SEQ ID NO: 1306577 - DNA, 15 bp, Homo sapiens
aaaataaccatattc

SEQ ID NO: 1306578 - DNA, 15 bp, Homo sapiens
aaaaataaccatatt

SEQ ID NO: 1306579 - DNA, 15 bp, Homo sapiens
gaaaaataaccatat

SEQ ID NO: 1306580 - DNA, 15 bp, Homo sapiens
tgaaaaataaccata

SEQ ID NO: 1306581 - DNA, 15 bp, Homo sapiens
atgaaaaataaccat

SEQ ID NO: 1306582 - DNA, 15 bp, Homo sapiens
taatgaaaaataacc

SEQ ID NO: 1306583 - DNA, 15 bp, Homo sapiens
ttaatgaaaaataac

SEQ ID NO: 1306584 - DNA, 15 bp, Homo sapiens
tttaatgaaaaataa

SEQ ID NO: 1306585 - DNA, 15 bp, Homo sapiens
ttttaatgaaaaata

SEQ ID NO: 1306586 - DNA, 15 bp, Homo sapiens
tttttaatgaaaaat

SEQ ID NO: 1306587 - DNA, 15 bp, Homo sapiens
atttttaatgaaaaa

SEQ ID NO: 1306588 - DNA, 15 bp, Homo sapiens
aatttttaatgaaaa

SEQ ID NO: 1306589 - DNA, 15 bp, Homo sapiens
aataatttttaatga

SEQ ID NO: 1306590 - DNA, 15 bp, Homo sapiens
aaataatttttaatg

SEQ ID NO: 1306591 - DNA, 15 bp, Homo sapiens
taaataatttttaat

SEQ ID NO: 1306592 - DNA, 15 bp, Homo sapiens
ataaataatttttaa

SEQ ID NO: 1306593 - DNA, 15 bp, Homo sapiens
cataaataattttta

SEQ ID NO: 1306594 - DNA, 15 bp, Homo sapiens
acataaataattttt

SEQ ID NO: 1306595 - DNA, 15 bp, Homo sapiens
aacataaataatttt

SEQ ID NO: 1306596 - DNA, 15 bp, Homo sapiens
taacataaataattt

SEQ ID NO: 1306597 - DNA, 15 bp, Homo sapiens
ttaacataaataatt

SEQ ID NO: 1306598 - DNA, 15 bp, Homo sapiens
gttaacataaataat

SEQ ID NO: 1306599 - DNA, 15 bp, Homo sapiens
tgttaacataaataa

SEQ ID NO: 1306600 - DNA, 15 bp, Homo sapiens
atgttaacataaata

SEQ ID NO: 1306601 - DNA, 15 bp, Homo sapiens
tatgttaacataaat

SEQ ID NO: 1306602 - DNA, 15 bp, Homo sapiens
ttatgttaacataaa

SEQ ID NO: 1306603 - DNA, 15 bp, Homo sapiens
attatgttaacataa

SEQ ID NO: 1306604 - DNA, 15 bp, Homo sapiens
cattatgttaacata

SEQ ID NO: 1306605 - DNA, 15 bp, Homo sapiens
ccattatgttaacat

SEQ ID NO: 1306606 - DNA, 15 bp, Homo sapiens
cccattatgttaaca

SEQ ID NO: 1306607 - DNA, 15 bp, Homo sapiens
acccattatgttaac

SEQ ID NO: 1306608 - DNA, 15 bp, Homo sapiens
aacccattatgttaa

SEQ ID NO: 1306609 - DNA, 15 bp, Homo sapiens
aaacccattatgtta

SEQ ID NO: 1306610 - DNA, 15 bp, Homo sapiens
taaacccattatgtt

SEQ ID NO: 1306611 - DNA, 15 bp, Homo sapiens
ataaacccattatgt

SEQ ID NO: 1306612 - DNA, 15 bp, Homo sapiens
aataaacccattatg

SEQ ID NO: 1306613 - DNA, 15 bp, Homo sapiens
taataaacccattat

SEQ ID NO: 1306614 - DNA, 15 bp, Homo sapiens
ttaataaacccatta

SEQ ID NO: 1306615 - DNA, 15 bp, Homo sapiens
cttaataaacccatt

SEQ ID NO: 1306616 - DNA, 15 bp, Homo sapiens
tcttaataaacccat

SEQ ID NO: 1306617 - DNA, 15 bp, Homo sapiens
atcttaataaaccca

SEQ ID NO: 1306618 - DNA, 15 bp, Homo sapiens
tatcttaataaaccc

SEQ ID NO: 1306619 - DNA, 15 bp, Homo sapiens
ttatcttaataaacc

SEQ ID NO: 1306620 - DNA, 15 bp, Homo sapiens
tttatcttaataaac

SEQ ID NO: 1306621 - DNA, 15 bp, Homo sapiens
atttatcttaataaa

SEQ ID NO: 1306622 - DNA, 15 bp, Homo sapiens
tatttatcttaataa

SEQ ID NO: 1306623 - DNA, 15 bp, Homo sapiens
atatttatcttaata

SEQ ID NO: 1306624 - DNA, 15 bp, Homo sapiens
aatatttatcttaat

SEQ ID NO: 1306625 - DNA, 15 bp, Homo sapiens
aaatatttatcttaa

SEQ ID NO: 1306626 - DNA, 15 bp, Homo sapiens
aaaatatttatctta

SEQ ID NO: 1306627 - DNA, 15 bp, Homo sapiens
ttaaaaatatttatc

SEQ ID NO: 1306628 - DNA, 15 bp, Homo sapiens
tttaaaaatatttat

SEQ ID NO: 1306629 - DNA, 15 bp, Homo sapiens
atttaaaaatattta

SEQ ID NO: 1306630 - DNA, 15 bp, Homo sapiens
aatttaaaaatattt

SEQ ID NO: 1306631 - DNA, 15 bp, Homo sapiens
aaatttaaaaatatt

SEQ ID NO: 1306632 - DNA, 15 bp, Homo sapiens
aaaatttaaaaatat

SEQ ID NO: 1306633 - DNA, 15 bp, Homo sapiens
gaaaatttaaaaata

SEQ ID NO: 1306634 - DNA, 15 bp, Homo sapiens
agaaaatttaaaaat

SEQ ID NO: 1306635 - DNA, 15 bp, Homo sapiens
gagaaaatttaaaaa

SEQ ID NO: 1306636 - DNA, 15 bp, Homo sapiens
tgagaaaatttaaaa

SEQ ID NO: 1306637 - DNA, 15 bp, Homo sapiens
ttgagaaaatttaaa

SEQ ID NO: 1306638 - DNA, 15 bp, Homo sapiens
cttgagaaaatttaa

SEQ ID NO: 1306639 - DNA, 15 bp, Homo sapiens
acttgagaaaattta

SEQ ID NO: 1306640 - DNA, 15 bp, Homo sapiens
aacttgagaaaattt

SEQ ID NO: 1306641 - DNA, 15 bp, Homo sapiens
gaacttgagaaaatt

SEQ ID NO: 1306642 - DNA, 15 bp, Homo sapiens
agaacttgagaaaat

SEQ ID NO: 1306643 - DNA, 15 bp, Homo sapiens
aagaacttgagaaaa

SEQ ID NO: 1306644 - DNA, 15 bp, Homo sapiens
aaagaacttgagaaa

SEQ ID NO: 1306645 - DNA, 15 bp, Homo sapiens
aaaagaacttgagaa

SEQ ID NO: 1306646 - DNA, 15 bp, Homo sapiens
caaaagaacttgaga

SEQ ID NO: 1306647 - DNA, 15 bp, Homo sapiens
tcaaaagaacttgag

SEQ ID NO: 1306648 - DNA, 15 bp, Homo sapiens
ctcaaaagaacttga

SEQ ID NO: 1306649 - DNA, 15 bp, Homo sapiens
gctcaaaagaacttg

SEQ ID NO: 1306650 - DNA, 15 bp, Homo sapiens
ggctcaaaagaactt

SEQ ID NO: 1306651 - DNA, 15 bp, Homo sapiens
gggctcaaaagaact

SEQ ID NO: 1306652 - DNA, 15 bp, Homo sapiens
agggctcaaaagaac

SEQ ID NO: 1306653 - DNA, 15 bp, Homo sapiens
gagggctcaaaagaa

SEQ ID NO: 1306654 - DNA, 15 bp, Homo sapiens
tgagggctcaaaaga

SEQ ID NO: 1306655 - DNA, 15 bp, Homo sapiens
ttgagggctcaaaag

SEQ ID NO: 1306656 - DNA, 15 bp, Homo sapiens
gttgagggctcaaaa

SEQ ID NO: 1306657 - DNA, 15 bp, Homo sapiens
tgttgagggctcaaa

SEQ ID NO: 1306658 - DNA, 15 bp, Homo sapiens
atgttgagggctcaa

SEQ ID NO: 1306659 - DNA, 15 bp, Homo sapiens
gatgttgagggctca

SEQ ID NO: 1306660 - DNA, 15 bp, Homo sapiens
ggatgttgagggctc

SEQ ID NO: 1306661 - DNA, 15 bp, Homo sapiens
aggatgttgagggct

SEQ ID NO: 1306662 - DNA, 15 bp, Homo sapiens
aaggatgttgagggc

SEQ ID NO: 1306663 - DNA, 15 bp, Homo sapiens
aaaggatgttgaggg

SEQ ID NO: 1306664 - DNA, 15 bp, Homo sapiens
taaaggatgttgagg

SEQ ID NO: 1306665 - DNA, 15 bp, Homo sapiens
ttaaaggatgttgag

SEQ ID NO: 1306666 - DNA, 15 bp, Homo sapiens
attaaaggatgttga

SEQ ID NO: 1306667 - DNA, 15 bp, Homo sapiens
cattaaaggatgttg

SEQ ID NO: 1306668 - DNA, 15 bp, Homo sapiens
acattaaaggatgtt

SEQ ID NO: 1306669 - DNA, 15 bp, Homo sapiens
tacattaaaggatgt

SEQ ID NO: 1306670 - DNA, 15 bp, Homo sapiens
ttacattaaaggatg

SEQ ID NO: 1306671 - DNA, 15 bp, Homo sapiens
tttacattaaaggat

SEQ ID NO: 1306672 - DNA, 15 bp, Homo sapiens
ttttacattaaagga

SEQ ID NO: 1306673 - DNA, 15 bp, Homo sapiens
tttttacattaaagg

SEQ ID NO: 1306674 - DNA, 15 bp, Homo sapiens
ttttttacattaaag

SEQ ID NO: 1306675 - DNA, 15 bp, Homo sapiens
cttttttacattaaa

SEQ ID NO: 1306676 - DNA, 15 bp, Homo sapiens
gcttttttacattaa

SEQ ID NO: 1306677 - DNA, 15 bp, Homo sapiens
agcttttttacatta

SEQ ID NO: 1306678 - DNA, 15 bp, Homo sapiens
tagcttttttacatt

SEQ ID NO: 1306679 - DNA, 15 bp, Homo sapiens
atagcttttttacat

SEQ ID NO: 1306680 - DNA, 15 bp, Homo sapiens
aatagcttttttaca

SEQ ID NO: 1306681 - DNA, 15 bp, Homo sapiens
taatagcttttttac

SEQ ID NO: 1306682 - DNA, 15 bp, Homo sapiens
ctaatagctttttta

SEQ ID NO: 1306683 - DNA, 15 bp, Homo sapiens
gctaatagctttttt

SEQ ID NO: 1306684 - DNA, 15 bp, Homo sapiens
agctaatagcttttt

SEQ ID NO: 1306685 - DNA, 15 bp, Homo sapiens
tagctaatagctttt

SEQ ID NO: 1306686 - DNA, 15 bp, Homo sapiens
gtagctaatagcttt

SEQ ID NO: 1306687 - DNA, 15 bp, Homo sapiens
agtagctaatagctt

SEQ ID NO: 1306688 - DNA, 15 bp, Homo sapiens
aagtagctaatagct

SEQ ID NO: 1306689 - DNA, 15 bp, Homo sapiens
aaagtagctaatagc

SEQ ID NO: 1306690 - DNA, 15 bp, Homo sapiens
taaagtagctaatag

SEQ ID NO: 1306691 - DNA, 15 bp, Homo sapiens
ataaagtagctaata

SEQ ID NO: 1306692 - DNA, 15 bp, Homo sapiens
cataaagtagctaat

SEQ ID NO: 1306693 - DNA, 15 bp, Homo sapiens
gcataaagtagctaa

SEQ ID NO: 1306694 - DNA, 15 bp, Homo sapiens
agcataaagtagcta

SEQ ID NO: 1306695 - DNA, 15 bp, Homo sapiens
aagcataaagtagct

SEQ ID NO: 1306696 - DNA, 15 bp, Homo sapiens
gaagcataaagtagc

SEQ ID NO: 1306697 - DNA, 15 bp, Homo sapiens
ggaagcataaagtag

SEQ ID NO: 1306698 - DNA, 15 bp, Homo sapiens
aggaagcataaagta

SEQ ID NO: 1306699 - DNA, 15 bp, Homo sapiens
taggaagcataaagt

SEQ ID NO: 1306700 - DNA, 15 bp, Homo sapiens
ttaggaagcataaag

SEQ ID NO: 1306701 - DNA, 15 bp, Homo sapiens
attaggaagcataaa

SEQ ID NO: 1306702 - DNA, 15 bp, Homo sapiens
cattaggaagcataa

SEQ ID NO: 1306703 - DNA, 15 bp, Homo sapiens
ccattaggaagcata

SEQ ID NO: 1306704 - DNA, 15 bp, Homo sapiens
tccattaggaagcat

SEQ ID NO: 1306705 - DNA, 15 bp, Homo sapiens
ttccattaggaagca

SEQ ID NO: 1306706 - DNA, 15 bp, Homo sapiens
cttccattaggaagc

SEQ ID NO: 1306707 - DNA, 15 bp, Homo sapiens
tcttccattaggaag

SEQ ID NO: 1306708 - DNA, 15 bp, Homo sapiens
ttcttccattaggaa

SEQ ID NO: 1306709 - DNA, 15 bp, Homo sapiens
attcttccattagga

SEQ ID NO: 1306710 - DNA, 15 bp, Homo sapiens
tattcttccattagg

SEQ ID NO: 1306711 - DNA, 15 bp, Homo sapiens
atattcttccattag

SEQ ID NO: 1306712 - DNA, 15 bp, Homo sapiens
tatattcttccatta

SEQ ID NO: 1306713 - DNA, 15 bp, Homo sapiens
atatattcttccatt

SEQ ID NO: 1306714 - DNA, 15 bp, Homo sapiens
tatatattcttccat

SEQ ID NO: 1306715 - DNA, 15 bp, Homo sapiens
ttatatattcttcca

SEQ ID NO: 1306716 - DNA, 15 bp, Homo sapiens
gttatatattcttcc

SEQ ID NO: 1306717 - DNA, 15 bp, Homo sapiens
ggttatatattcttc

SEQ ID NO: 1306718 - DNA, 15 bp, Homo sapiens
tggttatatattctt

SEQ ID NO: 1306719 - DNA, 15 bp, Homo sapiens
gtggttatatattct

SEQ ID NO: 1306720 - DNA, 15 bp, Homo sapiens
ggtggttatatattc

SEQ ID NO: 1306721 - DNA, 15 bp, Homo sapiens
aggtggttatatatt

SEQ ID NO: 1306722 - DNA, 15 bp, Homo sapiens
aaggtggttatatat

SEQ ID NO: 1306723 - DNA, 15 bp, Homo sapiens
caaggtggttatata

SEQ ID NO: 1306724 - DNA, 15 bp, Homo sapiens
tcaaggtggttatat

SEQ ID NO: 1306725 - DNA, 15 bp, Homo sapiens
ttcaaggtggttata

SEQ ID NO: 1306726 - DNA, 15 bp, Homo sapiens
tttcaaggtggttat

SEQ ID NO: 1306727 - DNA, 15 bp, Homo sapiens
ttttcaaggtggtta

SEQ ID NO: 1306728 - DNA, 15 bp, Homo sapiens
gttttcaaggtggtt

SEQ ID NO: 1306729 - DNA, 15 bp, Homo sapiens
tgttttcaaggtggt

SEQ ID NO: 1306730 - DNA, 15 bp, Homo sapiens
atgttttcaaggtgg

SEQ ID NO: 1306731 - DNA, 15 bp, Homo sapiens
catgttttcaaggtg

SEQ ID NO: 1306732 - DNA, 15 bp, Homo sapiens
tcatgttttcaaggt

SEQ ID NO: 1306733 - DNA, 15 bp, Homo sapiens
atcatgttttcaagg

SEQ ID NO: 1306734 - DNA, 15 bp, Homo sapiens
catcatgttttcaag

SEQ ID NO: 1306735 - DNA, 15 bp, Homo sapiens
acatcatgttttcaa

SEQ ID NO: 1306736 - DNA, 15 bp, Homo sapiens
aacatcatgttttca

SEQ ID NO: 1306737 - DNA, 15 bp, Homo sapiens
caacatcatgttttc

SEQ ID NO: 1306738 - DNA, 15 bp, Homo sapiens
tcaacatcatgtttt

SEQ ID NO: 1306739 - DNA, 15 bp, Homo sapiens
ttcaacatcatgttt

SEQ ID NO: 1306740 - DNA, 15 bp, Homo sapiens
tttcaacatcatgtt

SEQ ID NO: 1306741 - DNA, 15 bp, Homo sapiens
ctttcaacatcatgt

SEQ ID NO: 1306742 - DNA, 15 bp, Homo sapiens
tctttcaacatcatg

SEQ ID NO: 1306743 - DNA, 15 bp, Homo sapiens
ttctttcaacatcat

SEQ ID NO: 1306744 - DNA, 15 bp, Homo sapiens
cttctttcaacatca

SEQ ID NO: 1306745 - DNA, 15 bp, Homo sapiens
gcttctttcaacatc

SEQ ID NO: 1306746 - DNA, 15 bp, Homo sapiens
ggcttctttcaacat

SEQ ID NO: 1306747 - DNA, 15 bp, Homo sapiens
tggcttctttcaaca

SEQ ID NO: 1306748 - DNA, 15 bp, Homo sapiens
ctggcttctttcaac

SEQ ID NO: 1306749 - DNA, 15 bp, Homo sapiens
actggcttctttcaa

SEQ ID NO: 1306750 - DNA, 15 bp, Homo sapiens
gactggcttctttca

SEQ ID NO: 1306751 - DNA, 15 bp, Homo sapiens
tgactggcttctttc

SEQ ID NO: 1306752 - DNA, 15 bp, Homo sapiens
gtgactggcttcttt

SEQ ID NO: 1306753 - DNA, 15 bp, Homo sapiens
tgtgactggcttctt

SEQ ID NO: 1306754 - DNA, 15 bp, Homo sapiens
ctgtgactggcttct

SEQ ID NO: 1306755 - DNA, 15 bp, Homo sapiens
tctgtgactggcttc

SEQ ID NO: 1306756 - DNA, 15 bp, Homo sapiens
ttctgtgactggctt

SEQ ID NO: 1306757 - DNA, 15 bp, Homo sapiens
tttctgtgactggct

SEQ ID NO: 1306758 - DNA, 15 bp, Homo sapiens
ttttctgtgactggc

SEQ ID NO: 1306759 - DNA, 15 bp, Homo sapiens
gttttctgtgactgg

SEQ ID NO: 1306760 - DNA, 15 bp, Homo sapiens
ggttttctgtgactg

SEQ ID NO: 1306761 - DNA, 15 bp, Homo sapiens
tggttttctgtgact

SEQ ID NO: 1306762 - DNA, 15 bp, Homo sapiens
gtggttttctgtgac

SEQ ID NO: 1306763 - DNA, 15 bp, Homo sapiens
tgtggttttctgtga

SEQ ID NO: 1306764 - DNA, 15 bp, Homo sapiens
atgtggttttctgtg

SEQ ID NO: 1306765 - DNA, 15 bp, Homo sapiens
tatgtggttttctgt

SEQ ID NO: 1306766 - DNA, 15 bp, Homo sapiens
atatgtggttttctg

SEQ ID NO: 1306767 - DNA, 15 bp, Homo sapiens
aatatgtggttttct

SEQ ID NO: 1306768 - DNA, 15 bp, Homo sapiens
caatatgtggttttc

SEQ ID NO: 1306769 - DNA, 15 bp, Homo sapiens
acaatatgtggtttt

SEQ ID NO: 1306770 - DNA, 15 bp, Homo sapiens
tacaatatgtggttt

SEQ ID NO: 1306771 - DNA, 15 bp, Homo sapiens
atacaatatgtggtt

SEQ ID NO: 1306772 - DNA, 15 bp, Homo sapiens
tatacaatatgtggt

SEQ ID NO: 1306773 - DNA, 15 bp, Homo sapiens
ttatacaatatgtgg

SEQ ID NO: 1306774 - DNA, 15 bp, Homo sapiens
tttatacaatatgtg

SEQ ID NO: 1306775 - DNA, 15 bp, Homo sapiens
atttatacaatatgt

SEQ ID NO: 1306776 - DNA, 15 bp, Homo sapiens
aatttatacaatatg

SEQ ID NO: 1306777 - DNA, 15 bp, Homo sapiens
gaatttatacaatat

SEQ ID NO: 1306778 - DNA, 15 bp, Homo sapiens
tgaatttatacaata

SEQ ID NO: 1306779 - DNA, 15 bp, Homo sapiens
atgaatttatacaat

SEQ ID NO: 1306780 - DNA, 15 bp, Homo sapiens
aatgaatttatacaa

SEQ ID NO: 1306781 - DNA, 15 bp, Homo sapiens
aaatgaatttataca

SEQ ID NO: 1306782 - DNA, 15 bp, Homo sapiens
taaatgaatttatac

SEQ ID NO: 1306783 - DNA, 15 bp, Homo sapiens
ataaatgaatttata

SEQ ID NO: 1306784 - DNA, 15 bp, Homo sapiens
tataaatgaatttat

SEQ ID NO: 1306785 - DNA, 15 bp, Homo sapiens
atataaatgaattta

SEQ ID NO: 1306786 - DNA, 15 bp, Homo sapiens
catataaatgaattt

SEQ ID NO: 1306787 - DNA, 15 bp, Homo sapiens
tcatataaatgaatt

SEQ ID NO: 1306788 - DNA, 15 bp, Homo sapiens
ttcatataaatgaat

SEQ ID NO: 1306789 - DNA, 15 bp, Homo sapiens
tttcatataaatgaa

SEQ ID NO: 1306790 - DNA, 15 bp, Homo sapiens
atttcatataaatga

SEQ ID NO: 1306791 - DNA, 15 bp, Homo sapiens
catttcatataaatg

SEQ ID NO: 1306792 - DNA, 15 bp, Homo sapiens
acatttcatataaat

SEQ ID NO: 1306793 - DNA, 15 bp, Homo sapiens
gacatttcatataaa

SEQ ID NO: 1306794 - DNA, 15 bp, Homo sapiens
ggacatttcatataa

SEQ ID NO: 1306795 - DNA, 15 bp, Homo sapiens
tggacatttcatata

SEQ ID NO: 1306796 - DNA, 15 bp, Homo sapiens
gtggacatttcatat

SEQ ID NO: 1306797 - DNA, 15 bp, Homo sapiens
tgtggacatttcata

SEQ ID NO: 1306798 - DNA, 15 bp, Homo sapiens
ttgtggacatttcat

SEQ ID NO: 1306799 - DNA, 15 bp, Homo sapiens
cttgtggacatttca

SEQ ID NO: 1306800 - DNA, 15 bp, Homo sapiens
tcttgtggacatttc

SEQ ID NO: 1306801 - DNA, 15 bp, Homo sapiens
ctcttgtggacattt

SEQ ID NO: 1306802 - DNA, 15 bp, Homo sapiens
cctcttgtggacatt

SEQ ID NO: 1306803 - DNA, 15 bp, Homo sapiens
gcctcttgtggacat

SEQ ID NO: 1306804 - DNA, 15 bp, Homo sapiens
tgcctcttgtggaca

SEQ ID NO: 1306805 - DNA, 15 bp, Homo sapiens
ttgcctcttgtggac

SEQ ID NO: 1306806 - DNA, 15 bp, Homo sapiens
attgcctcttgtgga

SEQ ID NO: 1306807 - DNA, 15 bp, Homo sapiens
aattgcctcttgtgg

SEQ ID NO: 1306808 - DNA, 15 bp, Homo sapiens
gaattgcctcttgtg

SEQ ID NO: 1306809 - DNA, 15 bp, Homo sapiens
tgaattgcctcttgt

SEQ ID NO: 1306810 - DNA, 15 bp, Homo sapiens
ctgaattgcctcttg

SEQ ID NO: 1306811 - DNA, 15 bp, Homo sapiens
actgaattgcctctt

SEQ ID NO: 1306812 - DNA, 15 bp, Homo sapiens
tactgaattgcctct

SEQ ID NO: 1306813 - DNA, 15 bp, Homo sapiens
ctactgaattgcctc

SEQ ID NO: 1306814 - DNA, 15 bp, Homo sapiens
tctactgaattgcct

SEQ ID NO: 1306815 - DNA, 15 bp, Homo sapiens
ctctactgaattgcc

SEQ ID NO: 1306816 - DNA, 15 bp, Homo sapiens
tctctactgaattgc

SEQ ID NO: 1306817 - DNA, 15 bp, Homo sapiens
atctctactgaattg

SEQ ID NO: 1306818 - DNA, 15 bp, Homo sapiens
tatctctactgaatt

SEQ ID NO: 1306819 - DNA, 15 bp, Homo sapiens
ctatctctactgaat

SEQ ID NO: 1306820 - DNA, 15 bp, Homo sapiens
cctatctctactgaa

SEQ ID NO: 1306821 - DNA, 15 bp, Homo sapiens
tcctatctctactga

SEQ ID NO: 1306822 - DNA, 15 bp, Homo sapiens
ttcctatctctactg

SEQ ID NO: 1306823 - DNA, 15 bp, Homo sapiens
cttcctatctctact

SEQ ID NO: 1306824 - DNA, 15 bp, Homo sapiens
acttcctatctctac

SEQ ID NO: 1306825 - DNA, 15 bp, Homo sapiens
tacttcctatctcta

SEQ ID NO: 1306826 - DNA, 15 bp, Homo sapiens
ctacttcctatctct

SEQ ID NO: 1306827 - DNA, 15 bp, Homo sapiens
tctacttcctatctc

SEQ ID NO: 1306828 - DNA, 15 bp, Homo sapiens
atctacttcctatct

SEQ ID NO: 1306829 - DNA, 15 bp, Homo sapiens
aatctacttcctatc

SEQ ID NO: 1306830 - DNA, 15 bp, Homo sapiens
taatctacttcctat

SEQ ID NO: 1306831 - DNA, 15 bp, Homo sapiens
ataatctacttccta

SEQ ID NO: 1306832 - DNA, 15 bp, Homo sapiens
aataatctacttcct

SEQ ID NO: 1306833 - DNA, 15 bp, Homo sapiens
caataatctacttcc

SEQ ID NO: 1306834 - DNA, 15 bp, Homo sapiens
ccaataatctacttc

SEQ ID NO: 1306835 - DNA, 15 bp, Homo sapiens
accaataatctactt

SEQ ID NO: 1306836 - DNA, 15 bp, Homo sapiens
aaccaataatctact

SEQ ID NO: 1306837 - DNA, 15 bp, Homo sapiens
aaaccaataatctac

SEQ ID NO: 1306838 - DNA, 15 bp, Homo sapiens
aaaaccaataatcta

SEQ ID NO: 1306839 - DNA, 15 bp, Homo sapiens
gaaaaccaataatct

SEQ ID NO: 1306840 - DNA, 15 bp, Homo sapiens
agaaaaccaataatc

SEQ ID NO: 1306841 - DNA, 15 bp, Homo sapiens
ttagaaaaccaataa

SEQ ID NO: 1306842 - DNA, 15 bp, Homo sapiens
cttagaaaaccaata

SEQ ID NO: 1306843 - DNA, 15 bp, Homo sapiens
ccttagaaaaccaat

SEQ ID NO: 1306844 - DNA, 15 bp, Homo sapiens
gccttagaaaaccaa

SEQ ID NO: 1306845 - DNA, 15 bp, Homo sapiens
agccttagaaaacca

SEQ ID NO: 1306846 - DNA, 15 bp, Homo sapiens
cagccttagaaaacc

SEQ ID NO: 1306847 - DNA, 15 bp, Homo sapiens
ccagccttagaaaac

SEQ ID NO: 1306848 - DNA, 15 bp, Homo sapiens
accagccttagaaaa

SEQ ID NO: 1306849 - DNA, 15 bp, Homo sapiens
caccagccttagaaa

SEQ ID NO: 1306850 - DNA, 15 bp, Homo sapiens
ccaccagccttagaa

SEQ ID NO: 1306851 - DNA, 15 bp, Homo sapiens
cccaccagccttaga

SEQ ID NO: 1306852 - DNA, 15 bp, Homo sapiens
ccccaccagccttag

SEQ ID NO: 1306853 - DNA, 15 bp, Homo sapiens
tccccaccagcctta

SEQ ID NO: 1306854 - DNA, 15 bp, Homo sapiens
ctccccaccagcctt

SEQ ID NO: 1306855 - DNA, 15 bp, Homo sapiens
cctccccaccagcct

SEQ ID NO: 1306856 - DNA, 15 bp, Homo sapiens
tcctccccaccagcc

SEQ ID NO: 1306857 - DNA, 15 bp, Homo sapiens
gtcctccccaccagc

SEQ ID NO: 1306858 - DNA, 15 bp, Homo sapiens
agtcctccccaccag

SEQ ID NO: 1306859 - DNA, 15 bp, Homo sapiens
tagtcctccccacca

SEQ ID NO: 1306860 - DNA, 15 bp, Homo sapiens
ctagtcctccccacc

SEQ ID NO: 1306861 - DNA, 15 bp, Homo sapiens
cctagtcctccccac

SEQ ID NO: 1306862 - DNA, 15 bp, Homo sapiens
acctagtcctcccca

SEQ ID NO: 1306863 - DNA, 15 bp, Homo sapiens
cacctagtcctcccc

SEQ ID NO: 1306864 - DNA, 15 bp, Homo sapiens
acacctagtcctccc

SEQ ID NO: 1306865 - DNA, 15 bp, Homo sapiens
aacacctagtcctcc

SEQ ID NO: 1306866 - DNA, 15 bp, Homo sapiens
aaacacctagtcctc

SEQ ID NO: 1306867 - DNA, 15 bp, Homo sapiens
aaaacacctagtcct

SEQ ID NO: 1306868 - DNA, 15 bp, Homo sapiens
caaaacacctagtcc

SEQ ID NO: 1306869 - DNA, 15 bp, Homo sapiens
tcaaaacacctagtc

SEQ ID NO: 1306870 - DNA, 15 bp, Homo sapiens
ctcaaaacacctagt

SEQ ID NO: 1306871 - DNA, 15 bp, Homo sapiens
cctcaaaacacctag

SEQ ID NO: 1306872 - DNA, 15 bp, Homo sapiens
tcctcaaaacaccta

SEQ ID NO: 1306873 - DNA, 15 bp, Homo sapiens
atcctcaaaacacct

SEQ ID NO: 1306874 - DNA, 15 bp, Homo sapiens
catcctcaaaacacc

SEQ ID NO: 1306875 - DNA, 15 bp, Homo sapiens
tcatcctcaaaacac

SEQ ID NO: 1306876 - DNA, 15 bp, Homo sapiens
atcatcctcaaaaca

SEQ ID NO: 1306877 - DNA, 15 bp, Homo sapiens
catcatcctcaaaac

SEQ ID NO: 1306878 - DNA, 15 bp, Homo sapiens
ccatcatcctcaaaa

SEQ ID NO: 1306879 - DNA, 15 bp, Homo sapiens
gccatcatcctcaaa

SEQ ID NO: 1306880 - DNA, 15 bp, Homo sapiens
agccatcatcctcaa

SEQ ID NO: 1306881 - DNA, 15 bp, Homo sapiens
tagccatcatcctca

SEQ ID NO: 1306882 - DNA, 15 bp, Homo sapiens
ctagccatcatcctc

SEQ ID NO: 1306883 - DNA, 15 bp, Homo sapiens
tctagccatcatcct

SEQ ID NO: 1306884 - DNA, 15 bp, Homo sapiens
ctctagccatcatcc

SEQ ID NO: 1306885 - DNA, 15 bp, Homo sapiens
tctctagccatcatc

SEQ ID NO: 1306886 - DNA, 15 bp, Homo sapiens
ctctctagccatcat

SEQ ID NO: 1306887 - DNA, 15 bp, Homo sapiens
actctctagccatca

SEQ ID NO: 1306888 - DNA, 15 bp, Homo sapiens
tactctctagccatc

SEQ ID NO: 1306889 - DNA, 15 bp, Homo sapiens
atactctctagccat

SEQ ID NO: 1306890 - DNA, 15 bp, Homo sapiens
catactctctagcca

SEQ ID NO: 1306891 - DNA, 15 bp, Homo sapiens
ccatactctctagcc

SEQ ID NO: 1306892 - DNA, 15 bp, Homo sapiens
accatactctctagc

SEQ ID NO: 1306893 - DNA, 15 bp, Homo sapiens
aaccatactctctag

SEQ ID NO: 1306894 - DNA, 15 bp, Homo sapiens
aaaccatactctcta

SEQ ID NO: 1306895 - DNA, 15 bp, Homo sapiens
aaaaccatactctct

SEQ ID NO: 1306896 - DNA, 15 bp, Homo sapiens
aaaaaccatactctc

SEQ ID NO: 1306897 - DNA, 15 bp, Homo sapiens
gaaaaaccatactct

SEQ ID NO: 1306898 - DNA, 15 bp, Homo sapiens
agaaaaaccatactc

SEQ ID NO: 1306899 - DNA, 15 bp, Homo sapiens
aagaaaaaccatact

SEQ ID NO: 1306900 - DNA, 15 bp, Homo sapiens
aaagaaaaaccatac

SEQ ID NO: 1306901 - DNA, 15 bp, Homo sapiens
aaaagaaaaaccata

SEQ ID NO: 1306902 - DNA, 15 bp, Homo sapiens
aaaaagaaaaaccat

SEQ ID NO: 1306903 - DNA, 15 bp, Homo sapiens
caaaaagaaaaacca

SEQ ID NO: 1306904 - DNA, 15 bp, Homo sapiens
tcaaaaagaaaaacc

SEQ ID NO: 1306905 - DNA, 15 bp, Homo sapiens
ctcaaaaagaaaaac

SEQ ID NO: 1306906 - DNA, 15 bp, Homo sapiens
tctcaaaaagaaaaa

SEQ ID NO: 1306907 - DNA, 15 bp, Homo sapiens
atctcaaaaagaaaa

SEQ ID NO: 1306908 - DNA, 15 bp, Homo sapiens
tatctcaaaaagaaa

SEQ ID NO: 1306909 - DNA, 15 bp, Homo sapiens
ttatctcaaaaagaa

SEQ ID NO: 1306910 - DNA, 15 bp, Homo sapiens
attatctcaaaaaga

SEQ ID NO: 1306911 - DNA, 15 bp, Homo sapiens
cattatctcaaaaag

SEQ ID NO: 1306912 - DNA, 15 bp, Homo sapiens
tcattatctcaaaaa

SEQ ID NO: 1306913 - DNA, 15 bp, Homo sapiens
ttcattatctcaaaa

SEQ ID NO: 1306914 - DNA, 15 bp, Homo sapiens
tttcattatctcaaa

SEQ ID NO: 1306915 - DNA, 15 bp, Homo sapiens
ttttcattatctcaa

SEQ ID NO: 1306916 - DNA, 15 bp, Homo sapiens
attttcattatctca

SEQ ID NO: 1306917 - DNA, 15 bp, Homo sapiens
cattttcattatctc

SEQ ID NO: 1306918 - DNA, 15 bp, Homo sapiens
acattttcattatct

SEQ ID NO: 1306919 - DNA, 15 bp, Homo sapiens
aacattttcattatc

SEQ ID NO: 1306920 - DNA, 15 bp, Homo sapiens
caacattttcattat

SEQ ID NO: 1306921 - DNA, 15 bp, Homo sapiens
acaacattttcatta

SEQ ID NO: 1306922 - DNA, 15 bp, Homo sapiens
gagtcaattttacaa

SEQ ID NO: 1306923 - DNA, 15 bp, Homo sapiens
tgagtcaattttaca

SEQ ID NO: 1306924 - DNA, 15 bp, Homo sapiens
atgagtcaattttac

SEQ ID NO: 1306925 - DNA, 15 bp, Homo sapiens
aatgagtcaatttta

SEQ ID NO: 1306926 - DNA, 15 bp, Homo sapiens
taatgagtcaatttt

SEQ ID NO: 1306927 - DNA, 15 bp, Homo sapiens
ataatgagtcaattt

SEQ ID NO: 1306928 - DNA, 15 bp, Homo sapiens
aataatgagtcaatt

SEQ ID NO: 1306929 - DNA, 15 bp, Homo sapiens
caataatgagtcaat

SEQ ID NO: 1306930 - DNA, 15 bp, Homo sapiens
acaataatgagtcaa

SEQ ID NO: 1306931 - DNA, 15 bp, Homo sapiens
tacaataatgagtca

SEQ ID NO: 1306932 - DNA, 15 bp, Homo sapiens
ctacaataatgagtc

SEQ ID NO: 1306933 - DNA, 15 bp, Homo sapiens
actacaataatgagt

SEQ ID NO: 1306934 - DNA, 15 bp, Homo sapiens
gactacaataatgag

SEQ ID NO: 1306935 - DNA, 15 bp, Homo sapiens
tgactacaataatga

SEQ ID NO: 1306936 - DNA, 15 bp, Homo sapiens
ttgactacaataatg

SEQ ID NO: 1306937 - DNA, 15 bp, Homo sapiens
attgactacaataat

SEQ ID NO: 1306938 - DNA, 15 bp, Homo sapiens
aattgactacaataa

SEQ ID NO: 1306939 - DNA, 15 bp, Homo sapiens
aaattgactacaata

SEQ ID NO: 1306940 - DNA, 15 bp, Homo sapiens
aaaattgactacaat

SEQ ID NO: 1306941 - DNA, 15 bp, Homo sapiens
taaaattgactacaa

SEQ ID NO: 1306942 - DNA, 15 bp, Homo sapiens
ataaaattgactaca

SEQ ID NO: 1306943 - DNA, 15 bp, Homo sapiens
tataaaattgactac

SEQ ID NO: 1306944 - DNA, 15 bp, Homo sapiens
ttataaaattgacta

SEQ ID NO: 1306945 - DNA, 15 bp, Homo sapiens
gttataaaattgact

SEQ ID NO: 1306946 - DNA, 15 bp, Homo sapiens
tgttataaaattgac

SEQ ID NO: 1306947 - DNA, 15 bp, Homo sapiens
gtgttataaaattga

SEQ ID NO: 1306948 - DNA, 15 bp, Homo sapiens
agtgttataaaattg

SEQ ID NO: 1306949 - DNA, 15 bp, Homo sapiens
aagtgttataaaatt

SEQ ID NO: 1306950 - DNA, 15 bp, Homo sapiens
aaagtgttataaaat

SEQ ID NO: 1306951 - DNA, 15 bp, Homo sapiens
aaaagtgttataaaa

SEQ ID NO: 1306952 - DNA, 15 bp, Homo sapiens
taaaagtgttataaa

SEQ ID NO: 1306953 - DNA, 15 bp, Homo sapiens
ataaaagtgttataa

SEQ ID NO: 1306954 - DNA, 15 bp, Homo sapiens
gataaaagtgttata

SEQ ID NO: 1306955 - DNA, 15 bp, Homo sapiens
tgataaaagtgttat

SEQ ID NO: 1306956 - DNA, 15 bp, Homo sapiens
atgataaaagtgtta

SEQ ID NO: 1306957 - DNA, 15 bp, Homo sapiens
gatgataaaagtgtt

SEQ ID NO: 1306958 - DNA, 15 bp, Homo sapiens
agatgataaaagtgt

SEQ ID NO: 1306959 - DNA, 15 bp, Homo sapiens
gagatgataaaagtg

SEQ ID NO: 1306960 - DNA, 15 bp, Homo sapiens
agagatgataaaagt

SEQ ID NO: 1306961 - DNA, 15 bp, Homo sapiens
cagagatgataaaag

SEQ ID NO: 1306962 - DNA, 15 bp, Homo sapiens
acagagatgataaaa

SEQ ID NO: 1306963 - DNA, 15 bp, Homo sapiens
cacagagatgataaa

SEQ ID NO: 1306964 - DNA, 15 bp, Homo sapiens
tcacagagatgataa

SEQ ID NO: 1306965 - DNA, 15 bp, Homo sapiens
ttcacagagatgata

SEQ ID NO: 1306966 - DNA, 15 bp, Homo sapiens
attcacagagatgat

SEQ ID NO: 1306967 - DNA, 15 bp, Homo sapiens
tattcacagagatga

SEQ ID NO: 1306968 - DNA, 15 bp, Homo sapiens
atattcacagagatg

SEQ ID NO: 1306969 - DNA, 15 bp, Homo sapiens
tatattcacagagat

SEQ ID NO: 1306970 - DNA, 15 bp, Homo sapiens
gtatattcacagaga

SEQ ID NO: 1306971 - DNA, 15 bp, Homo sapiens
agtatattcacagag

SEQ ID NO: 1306972 - DNA, 15 bp, Homo sapiens
tagtatattcacaga

SEQ ID NO: 1306973 - DNA, 15 bp, Homo sapiens
ttagtatattcacag

SEQ ID NO: 1306974 - DNA, 15 bp, Homo sapiens
tttagtatattcaca

SEQ ID NO: 1306975 - DNA, 15 bp, Homo sapiens
ttttagtatattcac

SEQ ID NO: 1306976 - DNA, 15 bp, Homo sapiens
tttttagtatattca

SEQ ID NO: 1306977 - DNA, 15 bp, Homo sapiens
gtttttagtatattc

SEQ ID NO: 1306978 - DNA, 15 bp, Homo sapiens
agtttttagtatatt

SEQ ID NO: 1306979 - DNA, 15 bp, Homo sapiens
tagtttttagtatat

SEQ ID NO: 1306980 - DNA, 15 bp, Homo sapiens
atagtttttagtata

SEQ ID NO: 1306981 - DNA, 15 bp, Homo sapiens
aatagtttttagtat

SEQ ID NO: 1306982 - DNA, 15 bp, Homo sapiens
caatagtttttagta

SEQ ID NO: 1306983 - DNA, 15 bp, Homo sapiens
tcaatagtttttagt

SEQ ID NO: 1306984 - DNA, 15 bp, Homo sapiens
ttcaatagtttttag

SEQ ID NO: 1306985 - DNA, 15 bp, Homo sapiens
attcaatagttttta

SEQ ID NO: 1306986 - DNA, 15 bp, Homo sapiens
aattcaatagttttt

SEQ ID NO: 1306987 - DNA, 15 bp, Homo sapiens
caattcaatagtttt

SEQ ID NO: 1306988 - DNA, 15 bp, Homo sapiens
acaattcaatagttt

SEQ ID NO: 1306989 - DNA, 15 bp, Homo sapiens
tacaattcaatagtt

SEQ ID NO: 1306990 - DNA, 15 bp, Homo sapiens
gtacaattcaatagt

SEQ ID NO: 1306991 - DNA, 15 bp, Homo sapiens
tgtacaattcaatag

SEQ ID NO: 1306992 - DNA, 15 bp, Homo sapiens
gtgtacaattcaata

SEQ ID NO: 1306993 - DNA, 15 bp, Homo sapiens
tgtgtacaattcaat

SEQ ID NO: 1306994 - DNA, 15 bp, Homo sapiens
atgtgtacaattcaa

SEQ ID NO: 1306995 - DNA, 15 bp, Homo sapiens
aatgtgtacaattca

SEQ ID NO: 1306996 - DNA, 15 bp, Homo sapiens
taatgtgtacaattc

SEQ ID NO: 1306997 - DNA, 15 bp, Homo sapiens
ttaatgtgtacaatt

SEQ ID NO: 1306998 - DNA, 15 bp, Homo sapiens
tttaatgtgtacaat

SEQ ID NO: 1306999 - DNA, 15 bp, Homo sapiens
atttaatgtgtacaa

SEQ ID NO: 1307000 - DNA, 15 bp, Homo sapiens
catttaatgtgtaca

SEQ ID NO: 1307001 - DNA, 15 bp, Homo sapiens
ccatttaatgtgtac

SEQ ID NO: 1307002 - DNA, 15 bp, Homo sapiens
cccatttaatgtgta

SEQ ID NO: 1307003 - DNA, 15 bp, Homo sapiens
acccatttaatgtgt

SEQ ID NO: 1307004 - DNA, 15 bp, Homo sapiens
cacccatttaatgtg

SEQ ID NO: 1307005 - DNA, 15 bp, Homo sapiens
tcacccatttaatgt

SEQ ID NO: 1307006 - DNA, 15 bp, Homo sapiens
ttcacccatttaatg

SEQ ID NO: 1307007 - DNA, 15 bp, Homo sapiens
attcacccatttaat

SEQ ID NO: 1307008 - DNA, 15 bp, Homo sapiens
aattcacccatttaa

SEQ ID NO: 1307009 - DNA, 15 bp, Homo sapiens
caattcacccattta

SEQ ID NO: 1307010 - DNA, 15 bp, Homo sapiens
acaattcacccattt

SEQ ID NO: 1307011 - DNA, 15 bp, Homo sapiens
tacaattcacccatt

SEQ ID NO: 1307012 - DNA, 15 bp, Homo sapiens
atacaattcacccat

SEQ ID NO: 1307013 - DNA, 15 bp, Homo sapiens
tatacaattcaccca

SEQ ID NO: 1307014 - DNA, 15 bp, Homo sapiens
ctatacaattcaccc

SEQ ID NO: 1307015 - DNA, 15 bp, Homo sapiens
cctatacaattcacc

SEQ ID NO: 1307016 - DNA, 15 bp, Homo sapiens
tcctatacaattcac

SEQ ID NO: 1307017 - DNA, 15 bp, Homo sapiens
atcctatacaattca

SEQ ID NO: 1307018 - DNA, 15 bp, Homo sapiens
catcctatacaattc

SEQ ID NO: 1307019 - DNA, 15 bp, Homo sapiens
acatcctatacaatt

SEQ ID NO: 1307020 - DNA, 15 bp, Homo sapiens
tacatcctatacaat

SEQ ID NO: 1307021 - DNA, 15 bp, Homo sapiens
ttacatcctatacaa

SEQ ID NO: 1307022 - DNA, 15 bp, Homo sapiens
attacatcctataca

SEQ ID NO: 1307023 - DNA, 15 bp, Homo sapiens
aattacatcctatac

SEQ ID NO: 1307024 - DNA, 15 bp, Homo sapiens
aaattacatcctata

SEQ ID NO: 1307025 - DNA, 15 bp, Homo sapiens
aaaattacatcctat

SEQ ID NO: 1307026 - DNA, 15 bp, Homo sapiens
aaaaattacatccta

SEQ ID NO: 1307027 - DNA, 15 bp, Homo sapiens
aaaaaattacatcct

SEQ ID NO: 1307028 - DNA, 15 bp, Homo sapiens
taaaaaattacatcc

SEQ ID NO: 1307029 - DNA, 15 bp, Homo sapiens
ttaaaaaattacatc

SEQ ID NO: 1307030 - DNA, 15 bp, Homo sapiens
tttaaaaaattacat

SEQ ID NO: 1307031 - DNA, 15 bp, Homo sapiens
atttaaaaaattaca

SEQ ID NO: 1307032 - DNA, 15 bp, Homo sapiens
aatttaaaaaattac

SEQ ID NO: 1307033 - DNA, 15 bp, Homo sapiens
aaatttaaaaaatta

SEQ ID NO: 1307034 - DNA, 15 bp, Homo sapiens
gaaatttaaaaaatt

SEQ ID NO: 1307035 - DNA, 15 bp, Homo sapiens
agaaatttaaaaaat

SEQ ID NO: 1307036 - DNA, 15 bp, Homo sapiens
cagaaatttaaaaaa

SEQ ID NO: 1307037 - DNA, 15 bp, Homo sapiens
acagaaatttaaaaa

SEQ ID NO: 1307038 - DNA, 15 bp, Homo sapiens
aacagaaatttaaaa

SEQ ID NO: 1307039 - DNA, 15 bp, Homo sapiens
aaacagaaatttaaa

SEQ ID NO: 1307040 - DNA, 15 bp, Homo sapiens
aaaacagaaatttaa

SEQ ID NO: 1307041 - DNA, 15 bp, Homo sapiens
taaaacagaaattta

SEQ ID NO: 1307042 - DNA, 15 bp, Homo sapiens
ttaaaacagaaattt

SEQ ID NO: 1307043 - DNA, 15 bp, Homo sapiens
attaaaacagaaatt

SEQ ID NO: 1307044 - DNA, 15 bp, Homo sapiens
aattaaaacagaaat

SEQ ID NO: 1307045 - DNA, 15 bp, Homo sapiens
taattaaaacagaaa

SEQ ID NO: 1307046 - DNA, 15 bp, Homo sapiens
ttaattaaaacagaa

SEQ ID NO: 1307047 - DNA, 15 bp, Homo sapiens
tttaattaaaacaga

SEQ ID NO: 1307048 - DNA, 15 bp, Homo sapiens
atttaattaaaacag

SEQ ID NO: 1307049 - DNA, 15 bp, Homo sapiens
aatttaattaaaaca

SEQ ID NO: 1307050 - DNA, 15 bp, Homo sapiens
aaatttaattaaaac

SEQ ID NO: 1307051 - DNA, 15 bp, Homo sapiens
aaaatttaattaaaa

SEQ ID NO: 1307052 - DNA, 15 bp, Homo sapiens
taaaatttaattaaa

SEQ ID NO: 1307053 - DNA, 15 bp, Homo sapiens
ttaaaatttaattaa

SEQ ID NO: 1307054 - DNA, 15 bp, Homo sapiens
gttaaaatttaatta

SEQ ID NO: 1307055 - DNA, 15 bp, Homo sapiens
agttaaaatttaatt

SEQ ID NO: 1307056 - DNA, 15 bp, Homo sapiens
tagttaaaatttaat

SEQ ID NO: 1307057 - DNA, 15 bp, Homo sapiens
ttagttaaaatttaa

SEQ ID NO: 1307058 - DNA, 15 bp, Homo sapiens
tttagttaaaattta

SEQ ID NO: 1307059 - DNA, 15 bp, Homo sapiens
atttagttaaaattt

SEQ ID NO: 1307060 - DNA, 15 bp, Homo sapiens
aatttagttaaaatt

SEQ ID NO: 1307061 - DNA, 15 bp, Homo sapiens
taatttagttaaaat

SEQ ID NO: 1307062 - DNA, 15 bp, Homo sapiens
ttaatttagttaaaa

SEQ ID NO: 1307063 - DNA, 15 bp, Homo sapiens
cttaatttagttaaa

SEQ ID NO: 1307064 - DNA, 15 bp, Homo sapiens
acttaatttagttaa

SEQ ID NO: 1307065 - DNA, 15 bp, Homo sapiens
aacttaatttagtta

SEQ ID NO: 1307066 - DNA, 15 bp, Homo sapiens
aaacttaatttagtt

SEQ ID NO: 1307067 - DNA, 15 bp, Homo sapiens
aaaacttaatttagt

SEQ ID NO: 1307068 - DNA, 15 bp, Homo sapiens
taaaacttaatttag

SEQ ID NO: 1307069 - DNA, 15 bp, Homo sapiens
ttaaaacttaattta

SEQ ID NO: 1307070 - DNA, 15 bp, Homo sapiens
attaaaacttaattt

SEQ ID NO: 1307071 - DNA, 15 bp, Homo sapiens
aattaaaacttaatt

SEQ ID NO: 1307072 - DNA, 15 bp, Homo sapiens
taattaaaacttaat

SEQ ID NO: 1307073 - DNA, 15 bp, Homo sapiens
gtaattaaaacttaa

SEQ ID NO: 1307074 - DNA, 15 bp, Homo sapiens
agtaattaaaactta

SEQ ID NO: 1307075 - DNA, 15 bp, Homo sapiens
tagtaattaaaactt

SEQ ID NO: 1307076 - DNA, 15 bp, Homo sapiens
ttagtaattaaaact

SEQ ID NO: 1307077 - DNA, 15 bp, Homo sapiens
gttagtaattaaaac

SEQ ID NO: 1307078 - DNA, 15 bp, Homo sapiens
tgttagtaattaaaa

SEQ ID NO: 1307079 - DNA, 15 bp, Homo sapiens
ttgttagtaattaaa

SEQ ID NO: 1307080 - DNA, 15 bp, Homo sapiens
tttgttagtaattaa

SEQ ID NO: 1307081 - DNA, 15 bp, Homo sapiens
ctttgttagtaatta

SEQ ID NO: 1307082 - DNA, 15 bp, Homo sapiens
actttgttagtaatt

SEQ ID NO: 1307083 - DNA, 15 bp, Homo sapiens
tactttgttagtaat

SEQ ID NO: 1307084 - DNA, 15 bp, Homo sapiens
ttactttgttagtaa

SEQ ID NO: 1307085 - DNA, 15 bp, Homo sapiens
tttactttgttagta

SEQ ID NO: 1307086 - DNA, 15 bp, Homo sapiens
atttactttgttagt

SEQ ID NO: 1307087 - DNA, 15 bp, Homo sapiens
tatttactttgttag

SEQ ID NO: 1307088 - DNA, 15 bp, Homo sapiens
atatttactttgtta

SEQ ID NO: 1307089 - DNA, 15 bp, Homo sapiens
aatatttactttgtt

SEQ ID NO: 1307090 - DNA, 15 bp, Homo sapiens
taatatttactttgt

SEQ ID NO: 1307091 - DNA, 15 bp, Homo sapiens
ttaatatttactttg

SEQ ID NO: 1307092 - DNA, 15 bp, Homo sapiens
attaatatttacttt

SEQ ID NO: 1307093 - DNA, 15 bp, Homo sapiens
tattaatatttactt

SEQ ID NO: 1307094 - DNA, 15 bp, Homo sapiens
ctattaatatttact

SEQ ID NO: 1307095 - DNA, 15 bp, Homo sapiens
tctattaatatttac

SEQ ID NO: 1307096 - DNA, 15 bp, Homo sapiens
atctattaatattta

SEQ ID NO: 1307097 - DNA, 15 bp, Homo sapiens
aatctattaatattt

SEQ ID NO: 1307098 - DNA, 15 bp, Homo sapiens
aaatctattaatatt

SEQ ID NO: 1307099 - DNA, 15 bp, Homo sapiens
taaatctattaatat

SEQ ID NO: 1307100 - DNA, 15 bp, Homo sapiens
ttaaatctattaata

SEQ ID NO: 1307101 - DNA, 15 bp, Homo sapiens
gttaaatctattaat

SEQ ID NO: 1307102 - DNA, 15 bp, Homo sapiens
ggttaaatctattaa

SEQ ID NO: 1307103 - DNA, 15 bp, Homo sapiens
gggttaaatctatta

SEQ ID NO: 1307104 - DNA, 15 bp, Homo sapiens
tgggttaaatctatt

SEQ ID NO: 1307105 - DNA, 15 bp, Homo sapiens
gtgggttaaatctat

SEQ ID NO: 1307106 - DNA, 15 bp, Homo sapiens
tgtgggttaaatcta

SEQ ID NO: 1307107 - DNA, 15 bp, Homo sapiens
gtgtgggttaaatct

SEQ ID NO: 1307108 - DNA, 15 bp, Homo sapiens
tgtgtgggttaaatc

SEQ ID NO: 1307109 - DNA, 15 bp, Homo sapiens
ttgtgtgggttaaat

SEQ ID NO: 1307110 - DNA, 15 bp, Homo sapiens
tttgtgtgggttaaa

SEQ ID NO: 1307111 - DNA, 15 bp, Homo sapiens
gtttgtgtgggttaa

SEQ ID NO: 1307112 - DNA, 15 bp, Homo sapiens
tgtttgtgtgggtta

SEQ ID NO: 1307113 - DNA, 15 bp, Homo sapiens
ttgtttgtgtgggtt

SEQ ID NO: 1307114 - DNA, 15 bp, Homo sapiens
tttgtttgtgtgggt

SEQ ID NO: 1307115 - DNA, 15 bp, Homo sapiens
ttttgtttgtgtggg

SEQ ID NO: 1307116 - DNA, 15 bp, Homo sapiens
cttttgtttgtgtgg

SEQ ID NO: 1307117 - DNA, 15 bp, Homo sapiens
gcttttgtttgtgtg

SEQ ID NO: 1307118 - DNA, 15 bp, Homo sapiens
agcttttgtttgtgt

SEQ ID NO: 1307119 - DNA, 15 bp, Homo sapiens
aagcttttgtttgtg

SEQ ID NO: 1307120 - DNA, 15 bp, Homo sapiens
aaagcttttgtttgt

SEQ ID NO: 1307121 - DNA, 15 bp, Homo sapiens
aaaagcttttgtttg

SEQ ID NO: 1307122 - DNA, 15 bp, Homo sapiens
caaaagcttttgttt

SEQ ID NO: 1307123 - DNA, 15 bp, Homo sapiens
ccaaaagcttttgtt

SEQ ID NO: 1307124 - DNA, 15 bp, Homo sapiens
cccaaaagcttttgt

SEQ ID NO: 1307125 - DNA, 15 bp, Homo sapiens
ccccaaaagcttttg

SEQ ID NO: 1307126 - DNA, 15 bp, Homo sapiens
accccaaaagctttt

SEQ ID NO: 1307127 - DNA, 15 bp, Homo sapiens
gaccccaaaagcttt

SEQ ID NO: 1307128 - DNA, 15 bp, Homo sapiens
ggaccccaaaagctt

SEQ ID NO: 1307129 - DNA, 15 bp, Homo sapiens
aggaccccaaaagct

SEQ ID NO: 1307130 - DNA, 15 bp, Homo sapiens
aaggaccccaaaagc

SEQ ID NO: 1307131 - DNA, 15 bp, Homo sapiens
taaggaccccaaaag

SEQ ID NO: 1307132 - DNA, 15 bp, Homo sapiens
ctaaggaccccaaaa

SEQ ID NO: 1307133 - DNA, 15 bp, Homo sapiens
actaaggaccccaaa

SEQ ID NO: 1307134 - DNA, 15 bp, Homo sapiens
tactaaggaccccaa

SEQ ID NO: 1307135 - DNA, 15 bp, Homo sapiens
ttactaaggacccca

SEQ ID NO: 1307136 - DNA, 15 bp, Homo sapiens
attactaaggacccc

SEQ ID NO: 1307137 - DNA, 15 bp, Homo sapiens
aattactaaggaccc

SEQ ID NO: 1307138 - DNA, 15 bp, Homo sapiens
aaattactaaggacc

SEQ ID NO: 1307139 - DNA, 15 bp, Homo sapiens
aaaattactaaggac

SEQ ID NO: 1307140 - DNA, 15 bp, Homo sapiens
taaaattactaagga

SEQ ID NO: 1307141 - DNA, 15 bp, Homo sapiens
ttaaaattactaagg

SEQ ID NO: 1307142 - DNA, 15 bp, Homo sapiens
cttaaaattactaag

SEQ ID NO: 1307143 - DNA, 15 bp, Homo sapiens
tcttaaaattactaa

SEQ ID NO: 1307144 - DNA, 15 bp, Homo sapiens
ttcttaaaattacta

SEQ ID NO: 1307145 - DNA, 15 bp, Homo sapiens
attcttaaaattact

SEQ ID NO: 1307146 - DNA, 15 bp, Homo sapiens
tattcttaaaattac

SEQ ID NO: 1307147 - DNA, 15 bp, Homo sapiens
atattcttaaaatta

SEQ ID NO: 1307148 - DNA, 15 bp, Homo sapiens
tatattcttaaaatt

SEQ ID NO: 1307149 - DNA, 15 bp, Homo sapiens
ttatattcttaaaat

SEQ ID NO: 1307150 - DNA, 15 bp, Homo sapiens
tttatattcttaaaa

SEQ ID NO: 1307151 - DNA, 15 bp, Homo sapiens
ttttatattcttaaa

SEQ ID NO: 1307152 - DNA, 15 bp, Homo sapiens
cttttatattcttaa

SEQ ID NO: 1307153 - DNA, 15 bp, Homo sapiens
ccttttatattctta

SEQ ID NO: 1307154 - DNA, 15 bp, Homo sapiens
cccttttatattctt

SEQ ID NO: 1307155 - DNA, 15 bp, Homo sapiens
acccttttatattct

SEQ ID NO: 1307156 - DNA, 15 bp, Homo sapiens
aacccttttatattc

SEQ ID NO: 1307157 - DNA, 15 bp, Homo sapiens
aaacccttttatatt

SEQ ID NO: 1307158 - DNA, 15 bp, Homo sapiens
aaaacccttttatat

SEQ ID NO: 1307159 - DNA, 15 bp, Homo sapiens
caaaacccttttata

SEQ ID NO: 1307160 - DNA, 15 bp, Homo sapiens
tcaaaacccttttat

SEQ ID NO: 1307161 - DNA, 15 bp, Homo sapiens
ctcaaaaccctttta

SEQ ID NO: 1307162 - DNA, 15 bp, Homo sapiens
actcaaaaccctttt

SEQ ID NO: 1307163 - DNA, 15 bp, Homo sapiens
gactcaaaacccttt

SEQ ID NO: 1307164 - DNA, 15 bp, Homo sapiens
ggactcaaaaccctt

SEQ ID NO: 1307165 - DNA, 15 bp, Homo sapiens
tggactcaaaaccct

SEQ ID NO: 1307166 - DNA, 15 bp, Homo sapiens
ttggactcaaaaccc

SEQ ID NO: 1307167 - DNA, 15 bp, Homo sapiens
tttggactcaaaacc

SEQ ID NO: 1307168 - DNA, 15 bp, Homo sapiens
ttttggactcaaaac

SEQ ID NO: 1307169 - DNA, 15 bp, Homo sapiens
tttttggactcaaaa

SEQ ID NO: 1307170 - DNA, 15 bp, Homo sapiens
ctttttggactcaaa

SEQ ID NO: 1307171 - DNA, 15 bp, Homo sapiens
actttttggactcaa

SEQ ID NO: 1307172 - DNA, 15 bp, Homo sapiens
aactttttggactca

SEQ ID NO: 1307173 - DNA, 15 bp, Homo sapiens
aaactttttggactc

SEQ ID NO: 1307174 - DNA, 15 bp, Homo sapiens
caaactttttggact

SEQ ID NO: 1307175 - DNA, 15 bp, Homo sapiens
tcaaactttttggac

SEQ ID NO: 1307176 - DNA, 15 bp, Homo sapiens
ctcaaactttttgga

SEQ ID NO: 1307177 - DNA, 15 bp, Homo sapiens
tctcaaactttttgg

SEQ ID NO: 1307178 - DNA, 15 bp, Homo sapiens
ttctcaaactttttg

SEQ ID NO: 1307179 - DNA, 15 bp, Homo sapiens
gttctcaaacttttt

SEQ ID NO: 1307180 - DNA, 15 bp, Homo sapiens
ggttctcaaactttt

SEQ ID NO: 1307181 - DNA, 15 bp, Homo sapiens
gggttctcaaacttt

SEQ ID NO: 1307182 - DNA, 15 bp, Homo sapiens
agggttctcaaactt

SEQ ID NO: 1307183 - DNA, 15 bp, Homo sapiens
aagggttctcaaact

SEQ ID NO: 1307184 - DNA, 15 bp, Homo sapiens
caagggttctcaaac

SEQ ID NO: 1307185 - DNA, 15 bp, Homo sapiens
gcaagggttctcaaa

SEQ ID NO: 1307186 - DNA, 15 bp, Homo sapiens
ggcaagggttctcaa

SEQ ID NO: 1307187 - DNA, 15 bp, Homo sapiens
aggcaagggttctca

SEQ ID NO: 1307188 - DNA, 15 bp, Homo sapiens
caggcaagggttctc

SEQ ID NO: 1307189 - DNA, 15 bp, Homo sapiens
acaggcaagggttct

SEQ ID NO: 1307190 - DNA, 15 bp, Homo sapiens
tacaggcaagggttc

SEQ ID NO: 1307191 - DNA, 15 bp, Homo sapiens
atacaggcaagggtt

SEQ ID NO: 1307192 - DNA, 15 bp, Homo sapiens
aatacaggcaagggt

SEQ ID NO: 1307193 - DNA, 15 bp, Homo sapiens
gaatacaggcaaggg

SEQ ID NO: 1307194 - DNA, 15 bp, Homo sapiens
agaatacaggcaagg

SEQ ID NO: 1307195 - DNA, 15 bp, Homo sapiens
gagaatacaggcaag

SEQ ID NO: 1307196 - DNA, 15 bp, Homo sapiens
agagaatacaggcaa

SEQ ID NO: 1307197 - DNA, 15 bp, Homo sapiens
aagagaatacaggca

SEQ ID NO: 1307198 - DNA, 15 bp, Homo sapiens
gaagagaatacaggc

SEQ ID NO: 1307199 - DNA, 15 bp, Homo sapiens
ggaagagaatacagg

SEQ ID NO: 1307200 - DNA, 15 bp, Homo sapiens
gggaagagaatacag

SEQ ID NO: 1307201 - DNA, 15 bp, Homo sapiens
ggggaagagaataca

SEQ ID NO: 1307202 - DNA, 15 bp, Homo sapiens
tggggaagagaatac

SEQ ID NO: 1307203 - DNA, 15 bp, Homo sapiens
gtggggaagagaata

SEQ ID NO: 1307204 - DNA, 15 bp, Homo sapiens
agtggggaagagaat

SEQ ID NO: 1307205 - DNA, 15 bp, Homo sapiens
gagtggggaagagaa

SEQ ID NO: 1307206 - DNA, 15 bp, Homo sapiens
tgagtggggaagaga

SEQ ID NO: 1307207 - DNA, 15 bp, Homo sapiens
ctgagtggggaagag

SEQ ID NO: 1307208 - DNA, 15 bp, Homo sapiens
tctgagtggggaaga

SEQ ID NO: 1307209 - DNA, 15 bp, Homo sapiens
gtctgagtggggaag

SEQ ID NO: 1307210 - DNA, 15 bp, Homo sapiens
agtctgagtggggaa

SEQ ID NO: 1307211 - DNA, 15 bp, Homo sapiens
aagtctgagtgggga

SEQ ID NO: 1307212 - DNA, 15 bp, Homo sapiens
caagtctgagtgggg

SEQ ID NO: 1307213 - DNA, 15 bp, Homo sapiens
acaagtctgagtggg

SEQ ID NO: 1307214 - DNA, 15 bp, Homo sapiens
gacaagtctgagtgg

SEQ ID NO: 1307215 - DNA, 15 bp, Homo sapiens
agacaagtctgagtg

SEQ ID NO: 1307216 - DNA, 15 bp, Homo sapiens
aagacaagtctgagt

SEQ ID NO: 1307217 - DNA, 15 bp, Homo sapiens
aaagacaagtctgag

SEQ ID NO: 1307218 - DNA, 15 bp, Homo sapiens
gaaagacaagtctga

SEQ ID NO: 1307219 - DNA, 15 bp, Homo sapiens
tgaaagacaagtctg

SEQ ID NO: 1307220 - DNA, 15 bp, Homo sapiens
gtgaaagacaagtct

SEQ ID NO: 1307221 - DNA, 15 bp, Homo sapiens
agtgaaagacaagtc

SEQ ID NO: 1307222 - DNA, 15 bp, Homo sapiens
gagtgaaagacaagt

SEQ ID NO: 1307223 - DNA, 15 bp, Homo sapiens
tgagtgaaagacaag

SEQ ID NO: 1307224 - DNA, 15 bp, Homo sapiens
gtgagtgaaagacaa

SEQ ID NO: 1307225 - DNA, 15 bp, Homo sapiens
tgtgagtgaaagaca

SEQ ID NO: 1307226 - DNA, 15 bp, Homo sapiens
gtgtgagtgaaagac

SEQ ID NO: 1307227 - DNA, 15 bp, Homo sapiens
tgtgtgagtgaaaga

SEQ ID NO: 1307228 - DNA, 15 bp, Homo sapiens
ttgtgtgagtgaaag

SEQ ID NO: 1307229 - DNA, 15 bp, Homo sapiens
gttgtgtgagtgaaa

SEQ ID NO: 1307230 - DNA, 15 bp, Homo sapiens
ggttgtgtgagtgaa

SEQ ID NO: 1307231 - DNA, 15 bp, Homo sapiens
tggttgtgtgagtga

SEQ ID NO: 1307232 - DNA, 15 bp, Homo sapiens
atggttgtgtgagtg

SEQ ID NO: 1307233 - DNA, 15 bp, Homo sapiens
catggttgtgtgagt

SEQ ID NO: 1307234 - DNA, 15 bp, Homo sapiens
acatggttgtgtgag

SEQ ID NO: 1307235 - DNA, 15 bp, Homo sapiens
aacatggttgtgtga

SEQ ID NO: 1307236 - DNA, 15 bp, Homo sapiens
aaacatggttgtgtg

SEQ ID NO: 1307237 - DNA, 15 bp, Homo sapiens
caaacatggttgtgt

SEQ ID NO: 1307238 - DNA, 15 bp, Homo sapiens
acaaacatggttgtg

SEQ ID NO: 1307239 - DNA, 15 bp, Homo sapiens
aacaaacatggttgt

SEQ ID NO: 1307240 - DNA, 15 bp, Homo sapiens
aaacaaacatggttg

SEQ ID NO: 1307241 - DNA, 15 bp, Homo sapiens
aaaacaaacatggtt

SEQ ID NO: 1307242 - DNA, 15 bp, Homo sapiens
aaaaacaaacatggt

SEQ ID NO: 1307243 - DNA, 15 bp, Homo sapiens
caaaaacaaacatgg

SEQ ID NO: 1307244 - DNA, 15 bp, Homo sapiens
gcaaaaacaaacatg

SEQ ID NO: 1307245 - DNA, 15 bp, Homo sapiens
ggcaaaaacaaacat

SEQ ID NO: 1307246 - DNA, 15 bp, Homo sapiens
aggcaaaaacaaaca

SEQ ID NO: 1307247 - DNA, 15 bp, Homo sapiens
caggcaaaaacaaac

SEQ ID NO: 1307248 - DNA, 15 bp, Homo sapiens
acaggcaaaaacaaa

SEQ ID NO: 1307249 - DNA, 15 bp, Homo sapiens
gacaggcaaaaacaa

SEQ ID NO: 1307250 - DNA, 15 bp, Homo sapiens
ggacaggcaaaaaca

SEQ ID NO: 1307251 - DNA, 15 bp, Homo sapiens
gggacaggcaaaaac

SEQ ID NO: 1307252 - DNA, 15 bp, Homo sapiens
agggacaggcaaaaa

SEQ ID NO: 1307253 - DNA, 15 bp, Homo sapiens
cagggacaggcaaaa

SEQ ID NO: 1307254 - DNA, 15 bp, Homo sapiens
tcagggacaggcaaa

SEQ ID NO: 1307255 - DNA, 15 bp, Homo sapiens
ctcagggacaggcaa

SEQ ID NO: 1307256 - DNA, 15 bp, Homo sapiens
actcagggacaggca

SEQ ID NO: 1307257 - DNA, 15 bp, Homo sapiens
gactcagggacaggc

SEQ ID NO: 1307258 - DNA, 15 bp, Homo sapiens
agactcagggacagg

SEQ ID NO: 1307259 - DNA, 15 bp, Homo sapiens
aagactcagggacag

SEQ ID NO: 1307260 - DNA, 15 bp, Homo sapiens
caagactcagggaca

SEQ ID NO: 1307261 - DNA, 15 bp, Homo sapiens
tcaagactcagggac

SEQ ID NO: 1307262 - DNA, 15 bp, Homo sapiens
ttcaagactcaggga

SEQ ID NO: 1307263 - DNA, 15 bp, Homo sapiens
tttcaagactcaggg

SEQ ID NO: 1307264 - DNA, 15 bp, Homo sapiens
atttcaagactcagg

SEQ ID NO: 1307265 - DNA, 15 bp, Homo sapiens
catttcaagactcag

SEQ ID NO: 1307266 - DNA, 15 bp, Homo sapiens
gcatttcaagactca

SEQ ID NO: 1307267 - DNA, 15 bp, Homo sapiens
agcatttcaagactc

SEQ ID NO: 1307268 - DNA, 15 bp, Homo sapiens
aagcatttcaagact

SEQ ID NO: 1307269 - DNA, 15 bp, Homo sapiens
aaagcatttcaagac

SEQ ID NO: 1307270 - DNA, 15 bp, Homo sapiens
gaaagcatttcaaga

SEQ ID NO: 1307271 - DNA, 15 bp, Homo sapiens
ggaaagcatttcaag

SEQ ID NO: 1307272 - DNA, 15 bp, Homo sapiens
aggaaagcatttcaa

SEQ ID NO: 1307273 - DNA, 15 bp, Homo sapiens
gaggaaagcatttca

SEQ ID NO: 1307274 - DNA, 15 bp, Homo sapiens
agaggaaagcatttc

SEQ ID NO: 1307275 - DNA, 15 bp, Homo sapiens
cagaggaaagcattt

SEQ ID NO: 1307276 - DNA, 15 bp, Homo sapiens
gcagaggaaagcatt

SEQ ID NO: 1307277 - DNA, 15 bp, Homo sapiens
ggcagaggaaagcat

SEQ ID NO: 1307278 - DNA, 15 bp, Homo sapiens
aggcagaggaaagca

SEQ ID NO: 1307279 - DNA, 15 bp, Homo sapiens
caagaaaaaggcaga

SEQ ID NO: 1307280 - DNA, 15 bp, Homo sapiens
tcaagaaaaaggcag

SEQ ID NO: 1307281 - DNA, 15 bp, Homo sapiens
gtcaagaaaaaggca

SEQ ID NO: 1307282 - DNA, 15 bp, Homo sapiens
ggtcaagaaaaaggc

SEQ ID NO: 1307283 - DNA, 15 bp, Homo sapiens
tggtcaagaaaaagg

SEQ ID NO: 1307284 - DNA, 15 bp, Homo sapiens
ctggtcaagaaaaag

SEQ ID NO: 1307285 - DNA, 15 bp, Homo sapiens
tctggtcaagaaaaa

SEQ ID NO: 1307286 - DNA, 15 bp, Homo sapiens
atctggtcaagaaaa

SEQ ID NO: 1307287 - DNA, 15 bp, Homo sapiens
aatctggtcaagaaa

SEQ ID NO: 1307288 - DNA, 15 bp, Homo sapiens
aaatctggtcaagaa

SEQ ID NO: 1307289 - DNA, 15 bp, Homo sapiens
aaaatctggtcaaga

SEQ ID NO: 1307290 - DNA, 15 bp, Homo sapiens
taaaatctggtcaag

SEQ ID NO: 1307291 - DNA, 15 bp, Homo sapiens
ttaaaatctggtcaa

SEQ ID NO: 1307292 - DNA, 15 bp, Homo sapiens
cttaaaatctggtca

SEQ ID NO: 1307293 - DNA, 15 bp, Homo sapiens
ccttaaaatctggtc

SEQ ID NO: 1307294 - DNA, 15 bp, Homo sapiens
accttaaaatctggt

SEQ ID NO: 1307295 - DNA, 15 bp, Homo sapiens
gaccttaaaatctgg

SEQ ID NO: 1307296 - DNA, 15 bp, Homo sapiens
ggaccttaaaatctg

SEQ ID NO: 1307297 - DNA, 15 bp, Homo sapiens
tggaccttaaaatct

SEQ ID NO: 1307298 - DNA, 15 bp, Homo sapiens
atggaccttaaaatc

SEQ ID NO: 1307299 - DNA, 15 bp, Homo sapiens
aatggaccttaaaat

SEQ ID NO: 1307300 - DNA, 15 bp, Homo sapiens
aaatggaccttaaaa

SEQ ID NO: 1307301 - DNA, 15 bp, Homo sapiens
aaaatggaccttaaa

SEQ ID NO: 1307302 - DNA, 15 bp, Homo sapiens
caaaatggaccttaa

SEQ ID NO: 1307303 - DNA, 15 bp, Homo sapiens
gcaaaatggacctta

SEQ ID NO: 1307304 - DNA, 15 bp, Homo sapiens
ggcaaaatggacctt

SEQ ID NO: 1307305 - DNA, 15 bp, Homo sapiens
aggcaaaatggacct

SEQ ID NO: 1307306 - DNA, 15 bp, Homo sapiens
aaggcaaaatggacc

SEQ ID NO: 1307307 - DNA, 15 bp, Homo sapiens
aaaggcaaaatggac

SEQ ID NO: 1307308 - DNA, 15 bp, Homo sapiens
gaaaggcaaaatgga

SEQ ID NO: 1307309 - DNA, 15 bp, Homo sapiens
ggaaaggcaaaatgg

SEQ ID NO: 1307310 - DNA, 15 bp, Homo sapiens
aggaaaggcaaaatg

SEQ ID NO: 1307311 - DNA, 15 bp, Homo sapiens
caggaaaggcaaaat

SEQ ID NO: 1307312 - DNA, 15 bp, Homo sapiens
tcaggaaaggcaaaa

SEQ ID NO: 1307313 - DNA, 15 bp, Homo sapiens
atcaggaaaggcaaa

SEQ ID NO: 1307314 - DNA, 15 bp, Homo sapiens
gatcaggaaaggcaa

SEQ ID NO: 1307315 - DNA, 15 bp, Homo sapiens
tgatcaggaaaggca

SEQ ID NO: 1307316 - DNA, 15 bp, Homo sapiens
atgatcaggaaaggc

SEQ ID NO: 1307317 - DNA, 15 bp, Homo sapiens
gatgatcaggaaagg

SEQ ID NO: 1307318 - DNA, 15 bp, Homo sapiens
ggatgatcaggaaag

SEQ ID NO: 1307319 - DNA, 15 bp, Homo sapiens
aggatgatcaggaaa

SEQ ID NO: 1307320 - DNA, 15 bp, Homo sapiens
taggatgatcaggaa

SEQ ID NO: 1307321 - DNA, 15 bp, Homo sapiens
ctaggatgatcagga

SEQ ID NO: 1307322 - DNA, 15 bp, Homo sapiens
actaggatgatcagg

SEQ ID NO: 1307323 - DNA, 15 bp, Homo sapiens
gactaggatgatcag

SEQ ID NO: 1307324 - DNA, 15 bp, Homo sapiens
agactaggatgatca

SEQ ID NO: 1307325 - DNA, 15 bp, Homo sapiens
tagactaggatgatc

SEQ ID NO: 1307326 - DNA, 15 bp, Homo sapiens
atagactaggatgat

SEQ ID NO: 1307327 - DNA, 15 bp, Homo sapiens
tatagactaggatga

SEQ ID NO: 1307328 - DNA, 15 bp, Homo sapiens
ctatagactaggatg

SEQ ID NO: 1307329 - DNA, 15 bp, Homo sapiens
actatagactaggat

SEQ ID NO: 1307330 - DNA, 15 bp, Homo sapiens
gactatagactagga

SEQ ID NO: 1307331 - DNA, 15 bp, Homo sapiens
tgactatagactagg

SEQ ID NO: 1307332 - DNA, 15 bp, Homo sapiens
atgactatagactag

SEQ ID NO: 1307333 - DNA, 15 bp, Homo sapiens
aatgactatagacta

SEQ ID NO: 1307334 - DNA, 15 bp, Homo sapiens
gaatgactatagact

SEQ ID NO: 1307335 - DNA, 15 bp, Homo sapiens
agaatgactatagac

SEQ ID NO: 1307336 - DNA, 15 bp, Homo sapiens
aagaatgactataga

SEQ ID NO: 1307337 - DNA, 15 bp, Homo sapiens
gaagaatgactatag

SEQ ID NO: 1307338 - DNA, 15 bp, Homo sapiens
ggaagaatgactata

SEQ ID NO: 1307339 - DNA, 15 bp, Homo sapiens
gggaagaatgactat

SEQ ID NO: 1307340 - DNA, 15 bp, Homo sapiens
agggaagaatgacta

SEQ ID NO: 1307341 - DNA, 15 bp, Homo sapiens
gagggaagaatgact

SEQ ID NO: 1307342 - DNA, 15 bp, Homo sapiens
tgagggaagaatgac

SEQ ID NO: 1307343 - DNA, 15 bp, Homo sapiens
atgagggaagaatga

SEQ ID NO: 1307344 - DNA, 15 bp, Homo sapiens
aatgagggaagaatg

SEQ ID NO: 1307345 - DNA, 15 bp, Homo sapiens
aaatgagggaagaat

SEQ ID NO: 1307346 - DNA, 15 bp, Homo sapiens
taaatgagggaagaa

SEQ ID NO: 1307347 - DNA, 15 bp, Homo sapiens
ctaaatgagggaaga

SEQ ID NO: 1307348 - DNA, 15 bp, Homo sapiens
actaaatgagggaag

SEQ ID NO: 1307349 - DNA, 15 bp, Homo sapiens
gactaaatgagggaa

SEQ ID NO: 1307350 - DNA, 15 bp, Homo sapiens
agactaaatgaggga

SEQ ID NO: 1307351 - DNA, 15 bp, Homo sapiens
aagactaaatgaggg

SEQ ID NO: 1307352 - DNA, 15 bp, Homo sapiens
taagactaaatgagg

SEQ ID NO: 1307353 - DNA, 15 bp, Homo sapiens
ttaagactaaatgag

SEQ ID NO: 1307354 - DNA, 15 bp, Homo sapiens
tttaagactaaatga

SEQ ID NO: 1307355 - DNA, 15 bp, Homo sapiens
atttaagactaaatg

SEQ ID NO: 1307356 - DNA, 15 bp, Homo sapiens
aatttaagactaaat

SEQ ID NO: 1307357 - DNA, 15 bp, Homo sapiens
caatttaagactaaa

SEQ ID NO: 1307358 - DNA, 15 bp, Homo sapiens
acaatttaagactaa

SEQ ID NO: 1307359 - DNA, 15 bp, Homo sapiens
aacaatttaagacta

SEQ ID NO: 1307360 - DNA, 15 bp, Homo sapiens
aaacaatttaagact

SEQ ID NO: 1307361 - DNA, 15 bp, Homo sapiens
taaacaatttaagac

SEQ ID NO: 1307362 - DNA, 15 bp, Homo sapiens
ataaacaatttaaga

SEQ ID NO: 1307363 - DNA, 15 bp, Homo sapiens
aataaacaatttaag

SEQ ID NO: 1307364 - DNA, 15 bp, Homo sapiens
taataaacaatttaa

SEQ ID NO: 1307365 - DNA, 15 bp, Homo sapiens
ataataaacaattta

SEQ ID NO: 1307366 - DNA, 15 bp, Homo sapiens
gataataaacaattt

SEQ ID NO: 1307367 - DNA, 15 bp, Homo sapiens
agataataaacaatt

SEQ ID NO: 1307368 - DNA, 15 bp, Homo sapiens
tagataataaacaat

SEQ ID NO: 1307369 - DNA, 15 bp, Homo sapiens
atagataataaacaa

SEQ ID NO: 1307370 - DNA, 15 bp, Homo sapiens
tatagataataaaca

SEQ ID NO: 1307371 - DNA, 15 bp, Homo sapiens
atatagataataaac

SEQ ID NO: 1307372 - DNA, 15 bp, Homo sapiens
tatatagataataaa

SEQ ID NO: 1307373 - DNA, 15 bp, Homo sapiens
gtatatagataataa

SEQ ID NO: 1307374 - DNA, 15 bp, Homo sapiens
agtatatagataata

SEQ ID NO: 1307375 - DNA, 15 bp, Homo sapiens
aagtatatagataat

SEQ ID NO: 1307376 - DNA, 15 bp, Homo sapiens
taagtatatagataa

SEQ ID NO: 1307377 - DNA, 15 bp, Homo sapiens
ttaagtatatagata

SEQ ID NO: 1307378 - DNA, 15 bp, Homo sapiens
gttaagtatatagat

SEQ ID NO: 1307379 - DNA, 15 bp, Homo sapiens
agttaagtatataga

SEQ ID NO: 1307380 - DNA, 15 bp, Homo sapiens
tagttaagtatatag

SEQ ID NO: 1307381 - DNA, 15 bp, Homo sapiens
ctagttaagtatata

SEQ ID NO: 1307382 - DNA, 15 bp, Homo sapiens
actagttaagtatat

SEQ ID NO: 1307383 - DNA, 15 bp, Homo sapiens
gactagttaagtata

SEQ ID NO: 1307384 - DNA, 15 bp, Homo sapiens
tgactagttaagtat

SEQ ID NO: 1307385 - DNA, 15 bp, Homo sapiens
atgactagttaagta

SEQ ID NO: 1307386 - DNA, 15 bp, Homo sapiens
aatgactagttaagt

SEQ ID NO: 1307387 - DNA, 15 bp, Homo sapiens
aaatgactagttaag

SEQ ID NO: 1307388 - DNA, 15 bp, Homo sapiens
taaatgactagttaa

SEQ ID NO: 1307389 - DNA, 15 bp, Homo sapiens
ataaatgactagtta

SEQ ID NO: 1307390 - DNA, 15 bp, Homo sapiens
tataaatgactagtt

SEQ ID NO: 1307391 - DNA, 15 bp, Homo sapiens
ttataaatgactagt

SEQ ID NO: 1307392 - DNA, 15 bp, Homo sapiens
tttataaatgactag

SEQ ID NO: 1307393 - DNA, 15 bp, Homo sapiens
gtttataaatgacta

SEQ ID NO: 1307394 - DNA, 15 bp, Homo sapiens
agtttataaatgact

SEQ ID NO: 1307395 - DNA, 15 bp, Homo sapiens
aagtttataaatgac

SEQ ID NO: 1307396 - DNA, 15 bp, Homo sapiens
aaagtttataaatga

SEQ ID NO: 1307397 - DNA, 15 bp, Homo sapiens
caaagtttataaatg

SEQ ID NO: 1307398 - DNA, 15 bp, Homo sapiens
acaaagtttataaat

SEQ ID NO: 1307399 - DNA, 15 bp, Homo sapiens
aacaaagtttataaa

SEQ ID NO: 1307400 - DNA, 15 bp, Homo sapiens
aaacaaagtttataa

SEQ ID NO: 1307401 - DNA, 15 bp, Homo sapiens
aaaacaaagtttata

SEQ ID NO: 1307402 - DNA, 15 bp, Homo sapiens
taaaacaaagtttat

SEQ ID NO: 1307403 - DNA, 15 bp, Homo sapiens
gtaaaacaaagttta

SEQ ID NO: 1307404 - DNA, 15 bp, Homo sapiens
agtaaaacaaagttt

SEQ ID NO: 1307405 - DNA, 15 bp, Homo sapiens
tagtaaaacaaagtt

SEQ ID NO: 1307406 - DNA, 15 bp, Homo sapiens
atagtaaaacaaagt

SEQ ID NO: 1307407 - DNA, 15 bp, Homo sapiens
tatagtaaaacaaag

SEQ ID NO: 1307408 - DNA, 15 bp, Homo sapiens
atatagtaaaacaaa

SEQ ID NO: 1307409 - DNA, 15 bp, Homo sapiens
catatagtaaaacaa

SEQ ID NO: 1307410 - DNA, 15 bp, Homo sapiens
acatatagtaaaaca

SEQ ID NO: 1307411 - DNA, 15 bp, Homo sapiens
cacatatagtaaaac

SEQ ID NO: 1307412 - DNA, 15 bp, Homo sapiens
gcacatatagtaaaa

SEQ ID NO: 1307413 - DNA, 15 bp, Homo sapiens
tgcacatatagtaaa

SEQ ID NO: 1307414 - DNA, 15 bp, Homo sapiens
atgcacatatagtaa

SEQ ID NO: 1307415 - DNA, 15 bp, Homo sapiens
tatgcacatatagta

SEQ ID NO: 1307416 - DNA, 15 bp, Homo sapiens
atatgcacatatagt

SEQ ID NO: 1307417 - DNA, 15 bp, Homo sapiens
gatatgcacatatag

SEQ ID NO: 1307418 - DNA, 15 bp, Homo sapiens
agatatgcacatata

SEQ ID NO: 1307419 - DNA, 15 bp, Homo sapiens
gagatatgcacatat

SEQ ID NO: 1307420 - DNA, 15 bp, Homo sapiens
tgagatatgcacata

SEQ ID NO: 1307421 - DNA, 15 bp, Homo sapiens
atgagatatgcacat

SEQ ID NO: 1307422 - DNA, 15 bp, Homo sapiens
catgagatatgcaca

SEQ ID NO: 1307423 - DNA, 15 bp, Homo sapiens
acatgagatatgcac

SEQ ID NO: 1307424 - DNA, 15 bp, Homo sapiens
aacatgagatatgca

SEQ ID NO: 1307425 - DNA, 15 bp, Homo sapiens
taacatgagatatgc

SEQ ID NO: 1307426 - DNA, 15 bp, Homo sapiens
ttaacatgagatatg

SEQ ID NO: 1307427 - DNA, 15 bp, Homo sapiens
tttaacatgagatat

SEQ ID NO: 1307428 - DNA, 15 bp, Homo sapiens
atttaacatgagata

SEQ ID NO: 1307429 - DNA, 15 bp, Homo sapiens
aatttaacatgagat

SEQ ID NO: 1307430 - DNA, 15 bp, Homo sapiens
gaatttaacatgaga

SEQ ID NO: 1307431 - DNA, 15 bp, Homo sapiens
tgaatttaacatgag

SEQ ID NO: 1307432 - DNA, 15 bp, Homo sapiens
atgaatttaacatga

SEQ ID NO: 1307433 - DNA, 15 bp, Homo sapiens
catgaatttaacatg

SEQ ID NO: 1307434 - DNA, 15 bp, Homo sapiens
acatgaatttaacat

SEQ ID NO: 1307435 - DNA, 15 bp, Homo sapiens
tacatgaatttaaca

SEQ ID NO: 1307436 - DNA, 15 bp, Homo sapiens
ttacatgaatttaac

SEQ ID NO: 1307437 - DNA, 15 bp, Homo sapiens
tttacatgaatttaa

SEQ ID NO: 1307438 - DNA, 15 bp, Homo sapiens
ctttacatgaattta

SEQ ID NO: 1307439 - DNA, 15 bp, Homo sapiens
actttacatgaattt

SEQ ID NO: 1307440 - DNA, 15 bp, Homo sapiens
tactttacatgaatt

SEQ ID NO: 1307441 - DNA, 15 bp, Homo sapiens
gtactttacatgaat

SEQ ID NO: 1307442 - DNA, 15 bp, Homo sapiens
agtactttacatgaa

SEQ ID NO: 1307443 - DNA, 15 bp, Homo sapiens
aagtactttacatga

SEQ ID NO: 1307444 - DNA, 15 bp, Homo sapiens
taagtactttacatg

SEQ ID NO: 1307445 - DNA, 15 bp, Homo sapiens
ttaagtactttacat

SEQ ID NO: 1307446 - DNA, 15 bp, Homo sapiens
tttaagtactttaca

SEQ ID NO: 1307447 - DNA, 15 bp, Homo sapiens
ttttaagtactttac

SEQ ID NO: 1307448 - DNA, 15 bp, Homo sapiens
gttttaagtacttta

SEQ ID NO: 1307449 - DNA, 15 bp, Homo sapiens
tgttttaagtacttt

SEQ ID NO: 1307450 - DNA, 15 bp, Homo sapiens
ttgttttaagtactt

SEQ ID NO: 1307451 - DNA, 15 bp, Homo sapiens
attgttttaagtact

SEQ ID NO: 1307452 - DNA, 15 bp, Homo sapiens
tattgttttaagtac

SEQ ID NO: 1307453 - DNA, 15 bp, Homo sapiens
atattgttttaagta

SEQ ID NO: 1307454 - DNA, 15 bp, Homo sapiens
gatattgttttaagt

SEQ ID NO: 1307455 - DNA, 15 bp, Homo sapiens
agatattgttttaag

SEQ ID NO: 1307456 - DNA, 15 bp, Homo sapiens
cagatattgttttaa

SEQ ID NO: 1307457 - DNA, 15 bp, Homo sapiens
tcagatattgtttta

SEQ ID NO: 1307458 - DNA, 15 bp, Homo sapiens
gtcagatattgtttt

SEQ ID NO: 1307459 - DNA, 15 bp, Homo sapiens
tgtcagatattgttt

SEQ ID NO: 1307460 - DNA, 15 bp, Homo sapiens
atgtcagatattgtt

SEQ ID NO: 1307461 - DNA, 15 bp, Homo sapiens
aatgtcagatattgt

SEQ ID NO: 1307462 - DNA, 15 bp, Homo sapiens
caatgtcagatattg

SEQ ID NO: 1307463 - DNA, 15 bp, Homo sapiens
acaatgtcagatatt

SEQ ID NO: 1307464 - DNA, 15 bp, Homo sapiens
tacaatgtcagatat

SEQ ID NO: 1307465 - DNA, 15 bp, Homo sapiens
atacaatgtcagata

SEQ ID NO: 1307466 - DNA, 15 bp, Homo sapiens
aatacaatgtcagat

SEQ ID NO: 1307467 - DNA, 15 bp, Homo sapiens
taatacaatgtcaga

SEQ ID NO: 1307468 - DNA, 15 bp, Homo sapiens
ataatacaatgtcag

SEQ ID NO: 1307469 - DNA, 15 bp, Homo sapiens
tataatacaatgtca

SEQ ID NO: 1307470 - DNA, 15 bp, Homo sapiens
ttataatacaatgtc

SEQ ID NO: 1307471 - DNA, 15 bp, Homo sapiens
tttataatacaatgt

SEQ ID NO: 1307472 - DNA, 15 bp, Homo sapiens
ttttataatacaatg

SEQ ID NO: 1307473 - DNA, 15 bp, Homo sapiens
attttataatacaat

SEQ ID NO: 1307474 - DNA, 15 bp, Homo sapiens
cattttataatacaa

SEQ ID NO: 1307475 - DNA, 15 bp, Homo sapiens
acattttataataca

SEQ ID NO: 1307476 - DNA, 15 bp, Homo sapiens
tacattttataatac

SEQ ID NO: 1307477 - DNA, 15 bp, Homo sapiens
ctacattttataata

SEQ ID NO: 1307478 - DNA, 15 bp, Homo sapiens
gctacattttataat

SEQ ID NO: 1307479 - DNA, 15 bp, Homo sapiens
tgctacattttataa

SEQ ID NO: 1307480 - DNA, 15 bp, Homo sapiens
ctgctacattttata

SEQ ID NO: 1307481 - DNA, 15 bp, Homo sapiens
actgctacattttat

SEQ ID NO: 1307482 - DNA, 15 bp, Homo sapiens
aactgctacatttta

SEQ ID NO: 1307483 - DNA, 15 bp, Homo sapiens
taactgctacatttt

SEQ ID NO: 1307484 - DNA, 15 bp, Homo sapiens
ttaactgctacattt

SEQ ID NO: 1307485 - DNA, 15 bp, Homo sapiens
attaactgctacatt

SEQ ID NO: 1307486 - DNA, 15 bp, Homo sapiens
aattaactgctacat

SEQ ID NO: 1307487 - DNA, 15 bp, Homo sapiens
taattaactgctaca

SEQ ID NO: 1307488 - DNA, 15 bp, Homo sapiens
gtaattaactgctac

SEQ ID NO: 1307489 - DNA, 15 bp, Homo sapiens
tgtaattaactgcta

SEQ ID NO: 1307490 - DNA, 15 bp, Homo sapiens
atgtaattaactgct

SEQ ID NO: 1307491 - DNA, 15 bp, Homo sapiens
tatgtaattaactgc

SEQ ID NO: 1307492 - DNA, 15 bp, Homo sapiens
ttatgtaattaactg

SEQ ID NO: 1307493 - DNA, 15 bp, Homo sapiens
cttatgtaattaact

SEQ ID NO: 1307494 - DNA, 15 bp, Homo sapiens
ccttatgtaattaac

SEQ ID NO: 1307495 - DNA, 15 bp, Homo sapiens
cccttatgtaattaa

SEQ ID NO: 1307496 - DNA, 15 bp, Homo sapiens
acccttatgtaatta

SEQ ID NO: 1307497 - DNA, 15 bp, Homo sapiens
tacccttatgtaatt

SEQ ID NO: 1307498 - DNA, 15 bp, Homo sapiens
ttacccttatgtaat

SEQ ID NO: 1307499 - DNA, 15 bp, Homo sapiens
tttacccttatgtaa

SEQ ID NO: 1307500 - DNA, 15 bp, Homo sapiens
ctttacccttatgta

SEQ ID NO: 1307501 - DNA, 15 bp, Homo sapiens
tctttacccttatgt

SEQ ID NO: 1307502 - DNA, 15 bp, Homo sapiens
ttctttacccttatg

SEQ ID NO: 1307503 - DNA, 15 bp, Homo sapiens
gttctttacccttat

SEQ ID NO: 1307504 - DNA, 15 bp, Homo sapiens
tgttctttaccctta

SEQ ID NO: 1307505 - DNA, 15 bp, Homo sapiens
ctgttctttaccctt

SEQ ID NO: 1307506 - DNA, 15 bp, Homo sapiens
tctgttctttaccct

SEQ ID NO: 1307507 - DNA, 15 bp, Homo sapiens
ctctgttctttaccc

SEQ ID NO: 1307508 - DNA, 15 bp, Homo sapiens
tctctgttctttacc

SEQ ID NO: 1307509 - DNA, 15 bp, Homo sapiens
ctctctgttctttac

SEQ ID NO: 1307510 - DNA, 15 bp, Homo sapiens
cctctctgttcttta

SEQ ID NO: 1307511 - DNA, 15 bp, Homo sapiens
tcctctctgttcttt

SEQ ID NO: 1307512 - DNA, 15 bp, Homo sapiens
ctcctctctgttctt

SEQ ID NO: 1307513 - DNA, 15 bp, Homo sapiens
actcctctctgttct

SEQ ID NO: 1307514 - DNA, 15 bp, Homo sapiens
gactcctctctgttc

SEQ ID NO: 1307515 - DNA, 15 bp, Homo sapiens
tgactcctctctgtt

SEQ ID NO: 1307516 - DNA, 15 bp, Homo sapiens
ttgactcctctctgt

SEQ ID NO: 1307517 - DNA, 15 bp, Homo sapiens
gttgactcctctctg

SEQ ID NO: 1307518 - DNA, 15 bp, Homo sapiens
agttgactcctctct

SEQ ID NO: 1307519 - DNA, 15 bp, Homo sapiens
aagttgactcctctc

SEQ ID NO: 1307520 - DNA, 15 bp, Homo sapiens
taagttgactcctct

SEQ ID NO: 1307521 - DNA, 15 bp, Homo sapiens
ataagttgactcctc

SEQ ID NO: 1307522 - DNA, 15 bp, Homo sapiens
cataagttgactcct

SEQ ID NO: 1307523 - DNA, 15 bp, Homo sapiens
tcataagttgactcc

SEQ ID NO: 1307524 - DNA, 15 bp, Homo sapiens
atcataagttgactc

SEQ ID NO: 1307525 - DNA, 15 bp, Homo sapiens
catcataagttgact

SEQ ID NO: 1307526 - DNA, 15 bp, Homo sapiens
tcatcataagttgac

SEQ ID NO: 1307527 - DNA, 15 bp, Homo sapiens
gtcatcataagttga

SEQ ID NO: 1307528 - DNA, 15 bp, Homo sapiens
tgtcatcataagttg

SEQ ID NO: 1307529 - DNA, 15 bp, Homo sapiens
atgtcatcataagtt

SEQ ID NO: 1307530 - DNA, 15 bp, Homo sapiens
catgtcatcataagt

SEQ ID NO: 1307531 - DNA, 15 bp, Homo sapiens
gcatgtcatcataag

SEQ ID NO: 1307532 - DNA, 15 bp, Homo sapiens
tgcatgtcatcataa

SEQ ID NO: 1307533 - DNA, 15 bp, Homo sapiens
ctgcatgtcatcata

SEQ ID NO: 1307534 - DNA, 15 bp, Homo sapiens
cctgcatgtcatcat

SEQ ID NO: 1307535 - DNA, 15 bp, Homo sapiens
acctgcatgtcatca

SEQ ID NO: 1307536 - DNA, 15 bp, Homo sapiens
aacctgcatgtcatc

SEQ ID NO: 1307537 - DNA, 15 bp, Homo sapiens
aaacctgcatgtcat

SEQ ID NO: 1307538 - DNA, 15 bp, Homo sapiens
gaaacctgcatgtca

SEQ ID NO: 1307539 - DNA, 15 bp, Homo sapiens
agaaacctgcatgtc

SEQ ID NO: 1307540 - DNA, 15 bp, Homo sapiens
cagaaacctgcatgt

SEQ ID NO: 1307541 - DNA, 15 bp, Homo sapiens
ccagaaacctgcatg

SEQ ID NO: 1307542 - DNA, 15 bp, Homo sapiens
gccagaaacctgcat

SEQ ID NO: 1307543 - DNA, 15 bp, Homo sapiens
agccagaaacctgca

SEQ ID NO: 1307544 - DNA, 15 bp, Homo sapiens
aagccagaaacctgc

SEQ ID NO: 1307545 - DNA, 15 bp, Homo sapiens
caagccagaaacctg

SEQ ID NO: 1307546 - DNA, 15 bp, Homo sapiens
acaagccagaaacct

SEQ ID NO: 1307547 - DNA, 15 bp, Homo sapiens
tacaagccagaaacc

SEQ ID NO: 1307548 - DNA, 15 bp, Homo sapiens
atacaagccagaaac

SEQ ID NO: 1307549 - DNA, 15 bp, Homo sapiens
tatacaagccagaaa

SEQ ID NO: 1307550 - DNA, 15 bp, Homo sapiens
ttatacaagccagaa

SEQ ID NO: 1307551 - DNA, 15 bp, Homo sapiens
gttatacaagccaga

SEQ ID NO: 1307552 - DNA, 15 bp, Homo sapiens
agttatacaagccag

SEQ ID NO: 1307553 - DNA, 15 bp, Homo sapiens
aagttatacaagcca

SEQ ID NO: 1307554 - DNA, 15 bp, Homo sapiens
taagttatacaagcc

SEQ ID NO: 1307555 - DNA, 15 bp, Homo sapiens
ttaagttatacaagc

SEQ ID NO: 1307556 - DNA, 15 bp, Homo sapiens
cttaagttatacaag

SEQ ID NO: 1307557 - DNA, 15 bp, Homo sapiens
acttaagttatacaa

SEQ ID NO: 1307558 - DNA, 15 bp, Homo sapiens
cacttaagttataca

SEQ ID NO: 1307559 - DNA, 15 bp, Homo sapiens
ccacttaagttatac

SEQ ID NO: 1307560 - DNA, 15 bp, Homo sapiens
tccacttaagttata

SEQ ID NO: 1307561 - DNA, 15 bp, Homo sapiens
atccacttaagttat

SEQ ID NO: 1307562 - DNA, 15 bp, Homo sapiens
tatccacttaagtta

SEQ ID NO: 1307563 - DNA, 15 bp, Homo sapiens
ctatccacttaagtt

SEQ ID NO: 1307564 - DNA, 15 bp, Homo sapiens
actatccacttaagt

SEQ ID NO: 1307565 - DNA, 15 bp, Homo sapiens
tactatccacttaag

SEQ ID NO: 1307566 - DNA, 15 bp, Homo sapiens
ctactatccacttaa

SEQ ID NO: 1307567 - DNA, 15 bp, Homo sapiens
actactatccactta

SEQ ID NO: 1307568 - DNA, 15 bp, Homo sapiens
cactactatccactt

SEQ ID NO: 1307569 - DNA, 15 bp, Homo sapiens
acactactatccact

SEQ ID NO: 1307570 - DNA, 15 bp, Homo sapiens
gacactactatccac

SEQ ID NO: 1307571 - DNA, 15 bp, Homo sapiens
tgacactactatcca

SEQ ID NO: 1307572 - DNA, 15 bp, Homo sapiens
atgacactactatcc

SEQ ID NO: 1307573 - DNA, 15 bp, Homo sapiens
aatgacactactatc

SEQ ID NO: 1307574 - DNA, 15 bp, Homo sapiens
gaatgacactactat

SEQ ID NO: 1307575 - DNA, 15 bp, Homo sapiens
tgaatgacactacta

SEQ ID NO: 1307576 - DNA, 15 bp, Homo sapiens
atgaatgacactact

SEQ ID NO: 1307577 - DNA, 15 bp, Homo sapiens
aatgaatgacactac

SEQ ID NO: 1307578 - DNA, 15 bp, Homo sapiens
taatgaatgacacta

SEQ ID NO: 1307579 - DNA, 15 bp, Homo sapiens
ttaatgaatgacact

SEQ ID NO: 1307580 - DNA, 15 bp, Homo sapiens
tttaatgaatgacac

SEQ ID NO: 1307581 - DNA, 15 bp, Homo sapiens
ttttaatgaatgaca

SEQ ID NO: 1307582 - DNA, 15 bp, Homo sapiens
attttaatgaatgac

SEQ ID NO: 1307583 - DNA, 15 bp, Homo sapiens
tattttaatgaatga

SEQ ID NO: 1307584 - DNA, 15 bp, Homo sapiens
ttattttaatgaatg

SEQ ID NO: 1307585 - DNA, 15 bp, Homo sapiens
cttattttaatgaat

SEQ ID NO: 1307586 - DNA, 15 bp, Homo sapiens
tcttattttaatgaa

SEQ ID NO: 1307587 - DNA, 15 bp, Homo sapiens
atcttattttaatga

SEQ ID NO: 1307588 - DNA, 15 bp, Homo sapiens
tatcttattttaatg

SEQ ID NO: 1307589 - DNA, 15 bp, Homo sapiens
gtatcttattttaat

SEQ ID NO: 1307590 - DNA, 15 bp, Homo sapiens
ggtatcttattttaa

SEQ ID NO: 1307591 - DNA, 15 bp, Homo sapiens
aggtatcttatttta

SEQ ID NO: 1307592 - DNA, 15 bp, Homo sapiens
taggtatcttatttt

SEQ ID NO: 1307593 - DNA, 15 bp, Homo sapiens
ctaggtatcttattt

SEQ ID NO: 1307594 - DNA, 15 bp, Homo sapiens
cctaggtatcttatt

SEQ ID NO: 1307595 - DNA, 15 bp, Homo sapiens
tcctaggtatcttat

SEQ ID NO: 1307596 - DNA, 15 bp, Homo sapiens
atcctaggtatctta

SEQ ID NO: 1307597 - DNA, 15 bp, Homo sapiens
aatcctaggtatctt

SEQ ID NO: 1307598 - DNA, 15 bp, Homo sapiens
caatcctaggtatct

SEQ ID NO: 1307599 - DNA, 15 bp, Homo sapiens
tcaatcctaggtatc

SEQ ID NO: 1307600 - DNA, 15 bp, Homo sapiens
ttcaatcctaggtat

SEQ ID NO: 1307601 - DNA, 15 bp, Homo sapiens
attcaatcctaggta

SEQ ID NO: 1307602 - DNA, 15 bp, Homo sapiens
cattcaatcctaggt

SEQ ID NO: 1307603 - DNA, 15 bp, Homo sapiens
tcattcaatcctagg

SEQ ID NO: 1307604 - DNA, 15 bp, Homo sapiens
ctcattcaatcctag

SEQ ID NO: 1307605 - DNA, 15 bp, Homo sapiens
cctcattcaatccta

SEQ ID NO: 1307606 - DNA, 15 bp, Homo sapiens
acctcattcaatcct

SEQ ID NO: 1307607 - DNA, 15 bp, Homo sapiens
aacctcattcaatcc

SEQ ID NO: 1307608 - DNA, 15 bp, Homo sapiens
aaacctcattcaatc

SEQ ID NO: 1307609 - DNA, 15 bp, Homo sapiens
caaacctcattcaat

SEQ ID NO: 1307610 - DNA, 15 bp, Homo sapiens
gcaaacctcattcaa

SEQ ID NO: 1307611 - DNA, 15 bp, Homo sapiens
agcaaacctcattca

SEQ ID NO: 1307612 - DNA, 15 bp, Homo sapiens
aagcaaacctcattc

SEQ ID NO: 1307613 - DNA, 15 bp, Homo sapiens
caagcaaacctcatt

SEQ ID NO: 1307614 - DNA, 15 bp, Homo sapiens
ccaagcaaacctcat

SEQ ID NO: 1307615 - DNA, 15 bp, Homo sapiens
cccaagcaaacctca

SEQ ID NO: 1307616 - DNA, 15 bp, Homo sapiens
tcccaagcaaacctc

SEQ ID NO: 1307617 - DNA, 15 bp, Homo sapiens
ttcccaagcaaacct

SEQ ID NO: 1307618 - DNA, 15 bp, Homo sapiens
cttcccaagcaaacc

SEQ ID NO: 1307619 - DNA, 15 bp, Homo sapiens
tcttcccaagcaaac

SEQ ID NO: 1307620 - DNA, 15 bp, Homo sapiens
atcttcccaagcaaa

SEQ ID NO: 1307621 - DNA, 15 bp, Homo sapiens
catcttcccaagcaa

SEQ ID NO: 1307622 - DNA, 15 bp, Homo sapiens
tcatcttcccaagca

SEQ ID NO: 1307623 - DNA, 15 bp, Homo sapiens
ttcatcttcccaagc

SEQ ID NO: 1307624 - DNA, 15 bp, Homo sapiens
attcatcttcccaag

SEQ ID NO: 1307625 - DNA, 15 bp, Homo sapiens
aattcatcttcccaa

SEQ ID NO: 1307626 - DNA, 15 bp, Homo sapiens
aaattcatcttccca

SEQ ID NO: 1307627 - DNA, 15 bp, Homo sapiens
gaaattcatcttccc

SEQ ID NO: 1307628 - DNA, 15 bp, Homo sapiens
tgaaattcatcttcc

SEQ ID NO: 1307629 - DNA, 15 bp, Homo sapiens
atgaaattcatcttc

SEQ ID NO: 1307630 - DNA, 15 bp, Homo sapiens
aatgaaattcatctt

SEQ ID NO: 1307631 - DNA, 15 bp, Homo sapiens
aaatgaaattcatct

SEQ ID NO: 1307632 - DNA, 15 bp, Homo sapiens
caaatgaaattcatc

SEQ ID NO: 1307633 - DNA, 15 bp, Homo sapiens
tcaaatgaaattcat

SEQ ID NO: 1307634 - DNA, 15 bp, Homo sapiens
atcaaatgaaattca

SEQ ID NO: 1307635 - DNA, 15 bp, Homo sapiens
catcaaatgaaattc

SEQ ID NO: 1307636 - DNA, 15 bp, Homo sapiens
tcatcaaatgaaatt

SEQ ID NO: 1307637 - DNA, 15 bp, Homo sapiens
ctcatcaaatgaaat

SEQ ID NO: 1307638 - DNA, 15 bp, Homo sapiens
actcatcaaatgaaa

SEQ ID NO: 1307639 - DNA, 15 bp, Homo sapiens
aactcatcaaatgaa

SEQ ID NO: 1307640 - DNA, 15 bp, Homo sapiens
aaactcatcaaatga

SEQ ID NO: 1307641 - DNA, 15 bp, Homo sapiens
aaaactcatcaaatg

SEQ ID NO: 1307642 - DNA, 15 bp, Homo sapiens
taaaactcatcaaat

SEQ ID NO: 1307643 - DNA, 15 bp, Homo sapiens
ttaaaactcatcaaa

SEQ ID NO: 1307644 - DNA, 15 bp, Homo sapiens
cttaaaactcatcaa

SEQ ID NO: 1307645 - DNA, 15 bp, Homo sapiens
acttaaaactcatca

SEQ ID NO: 1307646 - DNA, 15 bp, Homo sapiens
tacttaaaactcatc

SEQ ID NO: 1307647 - DNA, 15 bp, Homo sapiens
ttacttaaaactcat

SEQ ID NO: 1307648 - DNA, 15 bp, Homo sapiens
attacttaaaactca

SEQ ID NO: 1307649 - DNA, 15 bp, Homo sapiens
aattacttaaaactc

SEQ ID NO: 1307650 - DNA, 15 bp, Homo sapiens
taattacttaaaact

SEQ ID NO: 1307651 - DNA, 15 bp, Homo sapiens
ataattacttaaaac

SEQ ID NO: 1307652 - DNA, 15 bp, Homo sapiens
tataattacttaaaa

SEQ ID NO: 1307653 - DNA, 15 bp, Homo sapiens
ctataattacttaaa

SEQ ID NO: 1307654 - DNA, 15 bp, Homo sapiens
cctataattacttaa

SEQ ID NO: 1307655 - DNA, 15 bp, Homo sapiens
acctataattactta

SEQ ID NO: 1307656 - DNA, 15 bp, Homo sapiens
gacctataattactt

SEQ ID NO: 1307657 - DNA, 15 bp, Homo sapiens
tgacctataattact

SEQ ID NO: 1307658 - DNA, 15 bp, Homo sapiens
atgacctataattac

SEQ ID NO: 1307659 - DNA, 15 bp, Homo sapiens
aatgacctataatta

SEQ ID NO: 1307660 - DNA, 15 bp, Homo sapiens
aaatgacctataatt

SEQ ID NO: 1307661 - DNA, 15 bp, Homo sapiens
gaaatgacctataat

SEQ ID NO: 1307662 - DNA, 15 bp, Homo sapiens
tgaaatgacctataa

SEQ ID NO: 1307663 - DNA, 15 bp, Homo sapiens
ttgaaatgacctata

SEQ ID NO: 1307664 - DNA, 15 bp, Homo sapiens
attgaaatgacctat

SEQ ID NO: 1307665 - DNA, 15 bp, Homo sapiens
tattgaaatgaccta

SEQ ID NO: 1307666 - DNA, 15 bp, Homo sapiens
ctattgaaatgacct

SEQ ID NO: 1307667 - DNA, 15 bp, Homo sapiens
tctattgaaatgacc

SEQ ID NO: 1307668 - DNA, 15 bp, Homo sapiens
ctctattgaaatgac

SEQ ID NO: 1307669 - DNA, 15 bp, Homo sapiens
cctctattgaaatga

SEQ ID NO: 1307670 - DNA, 15 bp, Homo sapiens
acctctattgaaatg

SEQ ID NO: 1307671 - DNA, 15 bp, Homo sapiens
cacctctattgaaat

SEQ ID NO: 1307672 - DNA, 15 bp, Homo sapiens
acacctctattgaaa

SEQ ID NO: 1307673 - DNA, 15 bp, Homo sapiens
gacacctctattgaa

SEQ ID NO: 1307674 - DNA, 15 bp, Homo sapiens
tgacacctctattga

SEQ ID NO: 1307675 - DNA, 15 bp, Homo sapiens
ttgacacctctattg

SEQ ID NO: 1307676 - DNA, 15 bp, Homo sapiens
cttgacacctctatt

SEQ ID NO: 1307677 - DNA, 15 bp, Homo sapiens
acttgacacctctat

SEQ ID NO: 1307678 - DNA, 15 bp, Homo sapiens
tacttgacacctcta

SEQ ID NO: 1307679 - DNA, 15 bp, Homo sapiens
ctacttgacacctct

SEQ ID NO: 1307680 - DNA, 15 bp, Homo sapiens
gctacttgacacctc

SEQ ID NO: 1307681 - DNA, 15 bp, Homo sapiens
tgctacttgacacct

SEQ ID NO: 1307682 - DNA, 15 bp, Homo sapiens
ctgctacttgacacc

SEQ ID NO: 1307683 - DNA, 15 bp, Homo sapiens
actgctacttgacac

SEQ ID NO: 1307684 - DNA, 15 bp, Homo sapiens
aactgctacttgaca

SEQ ID NO: 1307685 - DNA, 15 bp, Homo sapiens
caactgctacttgac

SEQ ID NO: 1307686 - DNA, 15 bp, Homo sapiens
ccaactgctacttga

SEQ ID NO: 1307687 - DNA, 15 bp, Homo sapiens
tccaactgctacttg

SEQ ID NO: 1307688 - DNA, 15 bp, Homo sapiens
atccaactgctactt

SEQ ID NO: 1307689 - DNA, 15 bp, Homo sapiens
tatccaactgctact

SEQ ID NO: 1307690 - DNA, 15 bp, Homo sapiens
atatccaactgctac

SEQ ID NO: 1307691 - DNA, 15 bp, Homo sapiens
catatccaactgcta

SEQ ID NO: 1307692 - DNA, 15 bp, Homo sapiens
acatatccaactgct

SEQ ID NO: 1307693 - DNA, 15 bp, Homo sapiens
cacatatccaactgc

SEQ ID NO: 1307694 - DNA, 15 bp, Homo sapiens
acacatatccaactg

SEQ ID NO: 1307695 - DNA, 15 bp, Homo sapiens
cacacatatccaact

SEQ ID NO: 1307696 - DNA, 15 bp, Homo sapiens
acacacatatccaac

SEQ ID NO: 1307697 - DNA, 15 bp, Homo sapiens
gacacacatatccaa

SEQ ID NO: 1307698 - DNA, 15 bp, Homo sapiens
agacacacatatcca

SEQ ID NO: 1307699 - DNA, 15 bp, Homo sapiens
cagacacacatatcc

SEQ ID NO: 1307700 - DNA, 15 bp, Homo sapiens
ccagacacacatatc

SEQ ID NO: 1307701 - DNA, 15 bp, Homo sapiens
tccagacacacatat

SEQ ID NO: 1307702 - DNA, 15 bp, Homo sapiens
ttccagacacacata

SEQ ID NO: 1307703 - DNA, 15 bp, Homo sapiens
gttccagacacacat

SEQ ID NO: 1307704 - DNA, 15 bp, Homo sapiens
agttccagacacaca

SEQ ID NO: 1307705 - DNA, 15 bp, Homo sapiens
aagttccagacacac

SEQ ID NO: 1307706 - DNA, 15 bp, Homo sapiens
taagttccagacaca

SEQ ID NO: 1307707 - DNA, 15 bp, Homo sapiens
ctaagttccagacac

SEQ ID NO: 1307708 - DNA, 15 bp, Homo sapiens
cctaagttccagaca

SEQ ID NO: 1307709 - DNA, 15 bp, Homo sapiens
tcctaagttccagac

SEQ ID NO: 1307710 - DNA, 15 bp, Homo sapiens
ttcctaagttccaga

SEQ ID NO: 1307711 - DNA, 15 bp, Homo sapiens
tttcctaagttccag

SEQ ID NO: 1307712 - DNA, 15 bp, Homo sapiens
ctttcctaagttcca

SEQ ID NO: 1307713 - DNA, 15 bp, Homo sapiens
tctttcctaagttcc

SEQ ID NO: 1307714 - DNA, 15 bp, Homo sapiens
ttctttcctaagttc

SEQ ID NO: 1307715 - DNA, 15 bp, Homo sapiens
tttctttcctaagtt

SEQ ID NO: 1307716 - DNA, 15 bp, Homo sapiens
atttctttcctaagt

SEQ ID NO: 1307717 - DNA, 15 bp, Homo sapiens
gatttctttcctaag

SEQ ID NO: 1307718 - DNA, 15 bp, Homo sapiens
agatttctttcctaa

SEQ ID NO: 1307719 - DNA, 15 bp, Homo sapiens
tagatttctttccta

SEQ ID NO: 1307720 - DNA, 15 bp, Homo sapiens
ctagatttctttcct

SEQ ID NO: 1307721 - DNA, 15 bp, Homo sapiens
cctagatttctttcc

SEQ ID NO: 1307722 - DNA, 15 bp, Homo sapiens
gcctagatttctttc

SEQ ID NO: 1307723 - DNA, 15 bp, Homo sapiens
agcctagatttcttt

SEQ ID NO: 1307724 - DNA, 15 bp, Homo sapiens
tagcctagatttctt

SEQ ID NO: 1307725 - DNA, 15 bp, Homo sapiens
ttagcctagatttct

SEQ ID NO: 1307726 - DNA, 15 bp, Homo sapiens
cttagcctagatttc

SEQ ID NO: 1307727 - DNA, 15 bp, Homo sapiens
tcttagcctagattt

SEQ ID NO: 1307728 - DNA, 15 bp, Homo sapiens
atcttagcctagatt

SEQ ID NO: 1307729 - DNA, 15 bp, Homo sapiens
aatcttagcctagat

SEQ ID NO: 1307730 - DNA, 15 bp, Homo sapiens
taatcttagcctaga

SEQ ID NO: 1307731 - DNA, 15 bp, Homo sapiens
ataatcttagcctag

SEQ ID NO: 1307732 - DNA, 15 bp, Homo sapiens
cataatcttagccta

SEQ ID NO: 1307733 - DNA, 15 bp, Homo sapiens
ccataatcttagcct

SEQ ID NO: 1307734 - DNA, 15 bp, Homo sapiens
tccataatcttagcc

SEQ ID NO: 1307735 - DNA, 15 bp, Homo sapiens
gtccataatcttagc

SEQ ID NO: 1307736 - DNA, 15 bp, Homo sapiens
ggtccataatcttag

SEQ ID NO: 1307737 - DNA, 15 bp, Homo sapiens
tggtccataatctta

SEQ ID NO: 1307738 - DNA, 15 bp, Homo sapiens
atggtccataatctt

SEQ ID NO: 1307739 - DNA, 15 bp, Homo sapiens
tatggtccataatct

SEQ ID NO: 1307740 - DNA, 15 bp, Homo sapiens
ttatggtccataatc

SEQ ID NO: 1307741 - DNA, 15 bp, Homo sapiens
tttatggtccataat

SEQ ID NO: 1307742 - DNA, 15 bp, Homo sapiens
ttttatggtccataa

SEQ ID NO: 1307743 - DNA, 15 bp, Homo sapiens
tttttatggtccata

SEQ ID NO: 1307744 - DNA, 15 bp, Homo sapiens
ttttttatggtccat

SEQ ID NO: 1307745 - DNA, 15 bp, Homo sapiens
attttttatggtcca

SEQ ID NO: 1307746 - DNA, 15 bp, Homo sapiens
cattttttatggtcc

SEQ ID NO: 1307747 - DNA, 15 bp, Homo sapiens
gcattttttatggtc

SEQ ID NO: 1307748 - DNA, 15 bp, Homo sapiens
ggcattttttatggt

SEQ ID NO: 1307749 - DNA, 15 bp, Homo sapiens
tggcattttttatgg

SEQ ID NO: 1307750 - DNA, 15 bp, Homo sapiens
gtggcattttttatg

SEQ ID NO: 1307751 - DNA, 15 bp, Homo sapiens
ggtggcattttttat

SEQ ID NO: 1307752 - DNA, 15 bp, Homo sapiens
gggtggcatttttta

SEQ ID NO: 1307753 - DNA, 15 bp, Homo sapiens
agggtggcatttttt

SEQ ID NO: 1307754 - DNA, 15 bp, Homo sapiens
aagggtggcattttt

SEQ ID NO: 1307755 - DNA, 15 bp, Homo sapiens
aaagggtggcatttt

SEQ ID NO: 1307756 - DNA, 15 bp, Homo sapiens
aaaagggtggcattt

SEQ ID NO: 1307757 - DNA, 15 bp, Homo sapiens
aaaaagggtggcatt

SEQ ID NO: 1307758 - DNA, 15 bp, Homo sapiens
aaaaaagggtggcat

SEQ ID NO: 1307759 - DNA, 15 bp, Homo sapiens
caaaaaagggtggca

SEQ ID NO: 1307760 - DNA, 15 bp, Homo sapiens
tcaaaaaagggtggc

SEQ ID NO: 1307761 - DNA, 15 bp, Homo sapiens
gtcaaaaaagggtgg

SEQ ID NO: 1307762 - DNA, 15 bp, Homo sapiens
tgtcaaaaaagggtg

SEQ ID NO: 1307763 - DNA, 15 bp, Homo sapiens
ctgtcaaaaaagggt

SEQ ID NO: 1307764 - DNA, 15 bp, Homo sapiens
actgtcaaaaaaggg

SEQ ID NO: 1307765 - DNA, 15 bp, Homo sapiens
aactgtcaaaaaagg

SEQ ID NO: 1307766 - DNA, 15 bp, Homo sapiens
aaactgtcaaaaaag

SEQ ID NO: 1307767 - DNA, 15 bp, Homo sapiens
taaactgtcaaaaaa

SEQ ID NO: 1307768 - DNA, 15 bp, Homo sapiens
ataaactgtcaaaaa

SEQ ID NO: 1307769 - DNA, 15 bp, Homo sapiens
gataaactgtcaaaa

SEQ ID NO: 1307770 - DNA, 15 bp, Homo sapiens
agataaactgtcaaa

SEQ ID NO: 1307771 - DNA, 15 bp, Homo sapiens
aagataaactgtcaa

SEQ ID NO: 1307772 - DNA, 15 bp, Homo sapiens
caagataaactgtca

SEQ ID NO: 1307773 - DNA, 15 bp, Homo sapiens
acaagataaactgtc

SEQ ID NO: 1307774 - DNA, 15 bp, Homo sapiens
cacaagataaactgt

SEQ ID NO: 1307775 - DNA, 15 bp, Homo sapiens
gcacaagataaactg

SEQ ID NO: 1307776 - DNA, 15 bp, Homo sapiens
ggcacaagataaact

SEQ ID NO: 1307777 - DNA, 15 bp, Homo sapiens
tggcacaagataaac

SEQ ID NO: 1307778 - DNA, 15 bp, Homo sapiens
ctggcacaagataaa

SEQ ID NO: 1307779 - DNA, 15 bp, Homo sapiens
cctggcacaagataa

SEQ ID NO: 1307780 - DNA, 15 bp, Homo sapiens
gcctggcacaagata

SEQ ID NO: 1307781 - DNA, 15 bp, Homo sapiens
tgcctggcacaagat

SEQ ID NO: 1307782 - DNA, 15 bp, Homo sapiens
gtgcctggcacaaga

SEQ ID NO: 1307783 - DNA, 15 bp, Homo sapiens
agtgcctggcacaag

SEQ ID NO: 1307784 - DNA, 15 bp, Homo sapiens
aagtgcctggcacaa

SEQ ID NO: 1307785 - DNA, 15 bp, Homo sapiens
caaagtgcctggcac

SEQ ID NO: 1307786 - DNA, 15 bp, Homo sapiens
ccaaagtgcctggca

SEQ ID NO: 1307787 - DNA, 15 bp, Homo sapiens
accaaagtgcctggc

SEQ ID NO: 1307788 - DNA, 15 bp, Homo sapiens
caccaaagtgcctgg

SEQ ID NO: 1307789 - DNA, 15 bp, Homo sapiens
tcaccaaagtgcctg

SEQ ID NO: 1307790 - DNA, 15 bp, Homo sapiens
ctcaccaaagtgcct

SEQ ID NO: 1307791 - DNA, 15 bp, Homo sapiens
gctcaccaaagtgcc

SEQ ID NO: 1307792 - DNA, 15 bp, Homo sapiens
tgctcaccaaagtgc

SEQ ID NO: 1307793 - DNA, 15 bp, Homo sapiens
gtgctcaccaaagtg

SEQ ID NO: 1307794 - DNA, 15 bp, Homo sapiens
agtgctcaccaaagt

SEQ ID NO: 1307795 - DNA, 15 bp, Homo sapiens
aagtgctcaccaaag

SEQ ID NO: 1307796 - DNA, 15 bp, Homo sapiens
gaagtgctcaccaaa

SEQ ID NO: 1307797 - DNA, 15 bp, Homo sapiens
agaagtgctcaccaa

SEQ ID NO: 1307798 - DNA, 15 bp, Homo sapiens
aagaagtgctcacca

SEQ ID NO: 1307799 - DNA, 15 bp, Homo sapiens
taagaagtgctcacc

SEQ ID NO: 1307800 - DNA, 15 bp, Homo sapiens
ttaagaagtgctcac

SEQ ID NO: 1307801 - DNA, 15 bp, Homo sapiens
tttaagaagtgctca

SEQ ID NO: 1307802 - DNA, 15 bp, Homo sapiens
atttaagaagtgctc

SEQ ID NO: 1307803 - DNA, 15 bp, Homo sapiens
aatttaagaagtgct

SEQ ID NO: 1307804 - DNA, 15 bp, Homo sapiens
aaatttaagaagtgc

SEQ ID NO: 1307805 - DNA, 15 bp, Homo sapiens
taaatttaagaagtg

SEQ ID NO: 1307806 - DNA, 15 bp, Homo sapiens
ttaaatttaagaagt

SEQ ID NO: 1307807 - DNA, 15 bp, Homo sapiens
attaaatttaagaag

SEQ ID NO: 1307808 - DNA, 15 bp, Homo sapiens
aattaaatttaagaa

SEQ ID NO: 1307809 - DNA, 15 bp, Homo sapiens
aaattaaatttaaga

SEQ ID NO: 1307810 - DNA, 15 bp, Homo sapiens
aaaattaaatttaag

SEQ ID NO: 1307811 - DNA, 15 bp, Homo sapiens
gaaaattaaatttaa

SEQ ID NO: 1307812 - DNA, 15 bp, Homo sapiens
tgaaaattaaattta

SEQ ID NO: 1307813 - DNA, 15 bp, Homo sapiens
atgaaaattaaattt

SEQ ID NO: 1307814 - DNA, 15 bp, Homo sapiens
gatgaaaattaaatt

SEQ ID NO: 1307815 - DNA, 15 bp, Homo sapiens
tgatgaaaattaaat

SEQ ID NO: 1307816 - DNA, 15 bp, Homo sapiens
atgatgaaaattaaa

SEQ ID NO: 1307817 - DNA, 15 bp, Homo sapiens
tatgatgaaaattaa

SEQ ID NO: 1307818 - DNA, 15 bp, Homo sapiens
ttatgatgaaaatta

SEQ ID NO: 1307819 - DNA, 15 bp, Homo sapiens
attatgatgaaaatt

SEQ ID NO: 1307820 - DNA, 15 bp, Homo sapiens
gattatgatgaaaat

SEQ ID NO: 1307821 - DNA, 15 bp, Homo sapiens
ggattatgatgaaaa

SEQ ID NO: 1307822 - DNA, 15 bp, Homo sapiens
tggattatgatgaaa

SEQ ID NO: 1307823 - DNA, 15 bp, Homo sapiens
atggattatgatgaa

SEQ ID NO: 1307824 - DNA, 15 bp, Homo sapiens
catggattatgatga

SEQ ID NO: 1307825 - DNA, 15 bp, Homo sapiens
tcatggattatgatg

SEQ ID NO: 1307826 - DNA, 15 bp, Homo sapiens
ctcatggattatgat

SEQ ID NO: 1307827 - DNA, 15 bp, Homo sapiens
cctcatggattatga

SEQ ID NO: 1307828 - DNA, 15 bp, Homo sapiens
acctcatggattatg

SEQ ID NO: 1307829 - DNA, 15 bp, Homo sapiens
tacctcatggattat

SEQ ID NO: 1307830 - DNA, 15 bp, Homo sapiens
ctacctcatggatta

SEQ ID NO: 1307831 - DNA, 15 bp, Homo sapiens
actacctcatggatt

SEQ ID NO: 1307832 - DNA, 15 bp, Homo sapiens
aactacctcatggat

SEQ ID NO: 1307833 - DNA, 15 bp, Homo sapiens
aaactacctcatgga

SEQ ID NO: 1307834 - DNA, 15 bp, Homo sapiens
taaactacctcatgg

SEQ ID NO: 1307835 - DNA, 15 bp, Homo sapiens
gtaaactacctcatg

SEQ ID NO: 1307836 - DNA, 15 bp, Homo sapiens
ggtaaactacctcat

SEQ ID NO: 1307837 - DNA, 15 bp, Homo sapiens
gggtaaactacctca

SEQ ID NO: 1307838 - DNA, 15 bp, Homo sapiens
agggtaaactacctc

SEQ ID NO: 1307839 - DNA, 15 bp, Homo sapiens
tagggtaaactacct

SEQ ID NO: 1307840 - DNA, 15 bp, Homo sapiens
ctagggtaaactacc

SEQ ID NO: 1307841 - DNA, 15 bp, Homo sapiens
tctagggtaaactac

SEQ ID NO: 1307842 - DNA, 15 bp, Homo sapiens
atctagggtaaacta

SEQ ID NO: 1307843 - DNA, 15 bp, Homo sapiens
gatctagggtaaact

SEQ ID NO: 1307844 - DNA, 15 bp, Homo sapiens
tgatctagggtaaac

SEQ ID NO: 1307845 - DNA, 15 bp, Homo sapiens
ctgatctagggtaaa

SEQ ID NO: 1307846 - DNA, 15 bp, Homo sapiens
cctgatctagggtaa

SEQ ID NO: 1307847 - DNA, 15 bp, Homo sapiens
tcctgatctagggta

SEQ ID NO: 1307848 - DNA, 15 bp, Homo sapiens
ttcctgatctagggt

SEQ ID NO: 1307849 - DNA, 15 bp, Homo sapiens
tttcctgatctaggg

SEQ ID NO: 1307850 - DNA, 15 bp, Homo sapiens
atttcctgatctagg

SEQ ID NO: 1307851 - DNA, 15 bp, Homo sapiens
catttcctgatctag

SEQ ID NO: 1307852 - DNA, 15 bp, Homo sapiens
tcatttcctgatcta

SEQ ID NO: 1307853 - DNA, 15 bp, Homo sapiens
ttcatttcctgatct

SEQ ID NO: 1307854 - DNA, 15 bp, Homo sapiens
attcatttcctgatc

SEQ ID NO: 1307855 - DNA, 15 bp, Homo sapiens
cattcatttcctgat

SEQ ID NO: 1307856 - DNA, 15 bp, Homo sapiens
gcattcatttcctga

SEQ ID NO: 1307857 - DNA, 15 bp, Homo sapiens
agcattcatttcctg

SEQ ID NO: 1307858 - DNA, 15 bp, Homo sapiens
aagcattcatttcct

SEQ ID NO: 1307859 - DNA, 15 bp, Homo sapiens
taagcattcatttcc

SEQ ID NO: 1307860 - DNA, 15 bp, Homo sapiens
ctaagcattcatttc

SEQ ID NO: 1307861 - DNA, 15 bp, Homo sapiens
tctaagcattcattt

SEQ ID NO: 1307862 - DNA, 15 bp, Homo sapiens
ttctaagcattcatt

SEQ ID NO: 1307863 - DNA, 15 bp, Homo sapiens
tttctaagcattcat

SEQ ID NO: 1307864 - DNA, 15 bp, Homo sapiens
ttttctaagcattca

SEQ ID NO: 1307865 - DNA, 15 bp, Homo sapiens
cttttctaagcattc

SEQ ID NO: 1307866 - DNA, 15 bp, Homo sapiens
acttttctaagcatt

SEQ ID NO: 1307867 - DNA, 15 bp, Homo sapiens
aacttttctaagcat

SEQ ID NO: 1307868 - DNA, 15 bp, Homo sapiens
aaacttttctaagca

SEQ ID NO: 1307869 - DNA, 15 bp, Homo sapiens
taaacttttctaagc

SEQ ID NO: 1307870 - DNA, 15 bp, Homo sapiens
ttaaacttttctaag

SEQ ID NO: 1307871 - DNA, 15 bp, Homo sapiens
attaaacttttctaa

SEQ ID NO: 1307872 - DNA, 15 bp, Homo sapiens
tattaaacttttcta

SEQ ID NO: 1307873 - DNA, 15 bp, Homo sapiens
ttattaaacttttct

SEQ ID NO: 1307874 - DNA, 15 bp, Homo sapiens
gttattaaacttttc

SEQ ID NO: 1307875 - DNA, 15 bp, Homo sapiens
agttattaaactttt

SEQ ID NO: 1307876 - DNA, 15 bp, Homo sapiens
aagttattaaacttt

SEQ ID NO: 1307877 - DNA, 15 bp, Homo sapiens
caagttattaaactt

SEQ ID NO: 1307878 - DNA, 15 bp, Homo sapiens
gcaagttattaaact

SEQ ID NO: 1307879 - DNA, 15 bp, Homo sapiens
ggcaagttattaaac

SEQ ID NO: 1307880 - DNA, 15 bp, Homo sapiens
gggcaagttattaaa

SEQ ID NO: 1307881 - DNA, 15 bp, Homo sapiens
agggcaagttattaa

SEQ ID NO: 1307882 - DNA, 15 bp, Homo sapiens
tagggcaagttatta

SEQ ID NO: 1307883 - DNA, 15 bp, Homo sapiens
ctagggcaagttatt

SEQ ID NO: 1307884 - DNA, 15 bp, Homo sapiens
tctagggcaagttat

SEQ ID NO: 1307885 - DNA, 15 bp, Homo sapiens
gtctagggcaagtta

SEQ ID NO: 1307886 - DNA, 15 bp, Homo sapiens
ggtctagggcaagtt

SEQ ID NO: 1307887 - DNA, 15 bp, Homo sapiens
tggtctagggcaagt

SEQ ID NO: 1307888 - DNA, 15 bp, Homo sapiens
gtggtctagggcaag

SEQ ID NO: 1307889 - DNA, 15 bp, Homo sapiens
tgtggtctagggcaa

SEQ ID NO: 1307890 - DNA, 15 bp, Homo sapiens
gtgtggtctagggca

SEQ ID NO: 1307891 - DNA, 15 bp, Homo sapiens
tgtgtggtctagggc

SEQ ID NO: 1307892 - DNA, 15 bp, Homo sapiens
ttgtgtggtctaggg

SEQ ID NO: 1307893 - DNA, 15 bp, Homo sapiens
cttgtgtggtctagg

SEQ ID NO: 1307894 - DNA, 15 bp, Homo sapiens
gcttgtgtggtctag

SEQ ID NO: 1307895 - DNA, 15 bp, Homo sapiens
tgcttgtgtggtcta

SEQ ID NO: 1307896 - DNA, 15 bp, Homo sapiens
ttgcttgtgtggtct

SEQ ID NO: 1307897 - DNA, 15 bp, Homo sapiens
tttgcttgtgtggtc

SEQ ID NO: 1307898 - DNA, 15 bp, Homo sapiens
ttttgcttgtgtggt

SEQ ID NO: 1307899 - DNA, 15 bp, Homo sapiens
attttgcttgtgtgg

SEQ ID NO: 1307900 - DNA, 15 bp, Homo sapiens
cattttgcttgtgtg

SEQ ID NO: 1307901 - DNA, 15 bp, Homo sapiens
ccattttgcttgtgt

SEQ ID NO: 1307902 - DNA, 15 bp, Homo sapiens
gccattttgcttgtg

SEQ ID NO: 1307903 - DNA, 15 bp, Homo sapiens
tgccattttgcttgt

SEQ ID NO: 1307904 - DNA, 15 bp, Homo sapiens
ttgccattttgcttg

SEQ ID NO: 1307905 - DNA, 15 bp, Homo sapiens
cttgccattttgctt

SEQ ID NO: 1307906 - DNA, 15 bp, Homo sapiens
tcttgccattttgct

SEQ ID NO: 1307907 - DNA, 15 bp, Homo sapiens
atcttgccattttgc

SEQ ID NO: 1307908 - DNA, 15 bp, Homo sapiens
gatcttgccattttg

SEQ ID NO: 1307909 - DNA, 15 bp, Homo sapiens
agatcttgccatttt

SEQ ID NO: 1307910 - DNA, 15 bp, Homo sapiens
cagatcttgccattt

SEQ ID NO: 1307911 - DNA, 15 bp, Homo sapiens
acagatcttgccatt

SEQ ID NO: 1307912 - DNA, 15 bp, Homo sapiens
cacagatcttgccat

SEQ ID NO: 1307913 - DNA, 15 bp, Homo sapiens
tcacagatcttgcca

SEQ ID NO: 1307914 - DNA, 15 bp, Homo sapiens
atcacagatcttgcc

SEQ ID NO: 1307915 - DNA, 15 bp, Homo sapiens
aatcacagatcttgc

SEQ ID NO: 1307916 - DNA, 15 bp, Homo sapiens
aaatcacagatcttg

SEQ ID NO: 1307917 - DNA, 15 bp, Homo sapiens
caaatcacagatctt

SEQ ID NO: 1307918 - DNA, 15 bp, Homo sapiens
tcaaatcacagatct

SEQ ID NO: 1307919 - DNA, 15 bp, Homo sapiens
ttcaaatcacagatc

SEQ ID NO: 1307920 - DNA, 15 bp, Homo sapiens
gttcaaatcacagat

SEQ ID NO: 1307921 - DNA, 15 bp, Homo sapiens
ggttcaaatcacaga

SEQ ID NO: 1307922 - DNA, 15 bp, Homo sapiens
gggttcaaatcacag

SEQ ID NO: 1307923 - DNA, 15 bp, Homo sapiens
tgggttcaaatcaca

SEQ ID NO: 1307924 - DNA, 15 bp, Homo sapiens
ctgggttcaaatcac

SEQ ID NO: 1307925 - DNA, 15 bp, Homo sapiens
cctgggttcaaatca

SEQ ID NO: 1307926 - DNA, 15 bp, Homo sapiens
acctgggttcaaatc

SEQ ID NO: 1307927 - DNA, 15 bp, Homo sapiens
gacctgggttcaaat

SEQ ID NO: 1307928 - DNA, 15 bp, Homo sapiens
agacctgggttcaaa

SEQ ID NO: 1307929 - DNA, 15 bp, Homo sapiens
aagacctgggttcaa

SEQ ID NO: 1307930 - DNA, 15 bp, Homo sapiens
aaagacctgggttca

SEQ ID NO: 1307931 - DNA, 15 bp, Homo sapiens
gaaagacctgggttc

SEQ ID NO: 1307932 - DNA, 15 bp, Homo sapiens
agaaagacctgggtt

SEQ ID NO: 1307933 - DNA, 15 bp, Homo sapiens
cagaaagacctgggt

SEQ ID NO: 1307934 - DNA, 15 bp, Homo sapiens
ccagaaagacctggg

SEQ ID NO: 1307935 - DNA, 15 bp, Homo sapiens
gccagaaagacctgg

SEQ ID NO: 1307936 - DNA, 15 bp, Homo sapiens
agccagaaagacctg

SEQ ID NO: 1307937 - DNA, 15 bp, Homo sapiens
gagccagaaagacct

SEQ ID NO: 1307938 - DNA, 15 bp, Homo sapiens
ggagccagaaagacc

SEQ ID NO: 1307939 - DNA, 15 bp, Homo sapiens
tggagccagaaagac

SEQ ID NO: 1307940 - DNA, 15 bp, Homo sapiens
ttggagccagaaaga

SEQ ID NO: 1307941 - DNA, 15 bp, Homo sapiens
tttggagccagaaag

SEQ ID NO: 1307942 - DNA, 15 bp, Homo sapiens
ctttggagccagaaa

SEQ ID NO: 1307943 - DNA, 15 bp, Homo sapiens
gctttggagccagaa

SEQ ID NO: 1307944 - DNA, 15 bp, Homo sapiens
agctttggagccaga

SEQ ID NO: 1307945 - DNA, 15 bp, Homo sapiens
tagctttggagccag

SEQ ID NO: 1307946 - DNA, 15 bp, Homo sapiens
atagctttggagcca

SEQ ID NO: 1307947 - DNA, 15 bp, Homo sapiens
aatagctttggagcc

SEQ ID NO: 1307948 - DNA, 15 bp, Homo sapiens
taatagctttggagc

SEQ ID NO: 1307949 - DNA, 15 bp, Homo sapiens
ttaatagctttggag

SEQ ID NO: 1307950 - DNA, 15 bp, Homo sapiens
attaatagctttgga

SEQ ID NO: 1307951 - DNA, 15 bp, Homo sapiens
gattaatagctttgg

SEQ ID NO: 1307952 - DNA, 15 bp, Homo sapiens
ggattaatagctttg

SEQ ID NO: 1307953 - DNA, 15 bp, Homo sapiens
aggattaatagcttt

SEQ ID NO: 1307954 - DNA, 15 bp, Homo sapiens
aaggattaatagctt

SEQ ID NO: 1307955 - DNA, 15 bp, Homo sapiens
taaggattaatagct

SEQ ID NO: 1307956 - DNA, 15 bp, Homo sapiens
ataaggattaatagc

SEQ ID NO: 1307957 - DNA, 15 bp, Homo sapiens
cataaggattaatag

SEQ ID NO: 1307958 - DNA, 15 bp, Homo sapiens
gcataaggattaata

SEQ ID NO: 1307959 - DNA, 15 bp, Homo sapiens
agcataaggattaat

SEQ ID NO: 1307960 - DNA, 15 bp, Homo sapiens
aagcataaggattaa

SEQ ID NO: 1307961 - DNA, 15 bp, Homo sapiens
aaagcataaggatta

SEQ ID NO: 1307962 - DNA, 15 bp, Homo sapiens
caaagcataaggatt

SEQ ID NO: 1307963 - DNA, 15 bp, Homo sapiens
gcaaagcataaggat

SEQ ID NO: 1307964 - DNA, 15 bp, Homo sapiens
agcaaagcataagga

SEQ ID NO: 1307965 - DNA, 15 bp, Homo sapiens
cagcaaagcataagg

SEQ ID NO: 1307966 - DNA, 15 bp, Homo sapiens
tcagcaaagcataag

SEQ ID NO: 1307967 - DNA, 15 bp, Homo sapiens
ctcagcaaagcataa

SEQ ID NO: 1307968 - DNA, 15 bp, Homo sapiens
actcagcaaagcata

SEQ ID NO: 1307969 - DNA, 15 bp, Homo sapiens
tactcagcaaagcat

SEQ ID NO: 1307970 - DNA, 15 bp, Homo sapiens
ttactcagcaaagca

SEQ ID NO: 1307971 - DNA, 15 bp, Homo sapiens
gttactcagcaaagc

SEQ ID NO: 1307972 - DNA, 15 bp, Homo sapiens
agttactcagcaaag

SEQ ID NO: 1307973 - DNA, 15 bp, Homo sapiens
cagttactcagcaaa

SEQ ID NO: 1307974 - DNA, 15 bp, Homo sapiens
tcagttactcagcaa

SEQ ID NO: 1307975 - DNA, 15 bp, Homo sapiens
ttcagttactcagca

SEQ ID NO: 1307976 - DNA, 15 bp, Homo sapiens
cttcagttactcagc

SEQ ID NO: 1307977 - DNA, 15 bp, Homo sapiens
acttcagttactcag

SEQ ID NO: 1307978 - DNA, 15 bp, Homo sapiens
aacttcagttactca

SEQ ID NO: 1307979 - DNA, 15 bp, Homo sapiens
aaacttcagttactc

SEQ ID NO: 1307980 - DNA, 15 bp, Homo sapiens
caaacttcagttact

SEQ ID NO: 1307981 - DNA, 15 bp, Homo sapiens
ccaaacttcagttac

SEQ ID NO: 1307982 - DNA, 15 bp, Homo sapiens
tccaaacttcagtta

SEQ ID NO: 1307983 - DNA, 15 bp, Homo sapiens
ctccaaacttcagtt

SEQ ID NO: 1307984 - DNA, 15 bp, Homo sapiens
tctccaaacttcagt

SEQ ID NO: 1307985 - DNA, 15 bp, Homo sapiens
ttctccaaacttcag

SEQ ID NO: 1307986 - DNA, 15 bp, Homo sapiens
cttctccaaacttca

SEQ ID NO: 1307987 - DNA, 15 bp, Homo sapiens
ccttctccaaacttc

SEQ ID NO: 1307988 - DNA, 15 bp, Homo sapiens
cccttctccaaactt

SEQ ID NO: 1307989 - DNA, 15 bp, Homo sapiens
tcccttctccaaact

SEQ ID NO: 1307990 - DNA, 15 bp, Homo sapiens
atcccttctccaaac

SEQ ID NO: 1307991 - DNA, 15 bp, Homo sapiens
tatcccttctccaaa

SEQ ID NO: 1307992 - DNA, 15 bp, Homo sapiens
ttatcccttctccaa

SEQ ID NO: 1307993 - DNA, 15 bp, Homo sapiens
cttatcccttctcca

SEQ ID NO: 1307994 - DNA, 15 bp, Homo sapiens
tcttatcccttctcc

SEQ ID NO: 1307995 - DNA, 15 bp, Homo sapiens
atcttatcccttctc

SEQ ID NO: 1307996 - DNA, 15 bp, Homo sapiens
gatcttatcccttct

SEQ ID NO: 1307997 - DNA, 15 bp, Homo sapiens
tgatcttatcccttc

SEQ ID NO: 1307998 - DNA, 15 bp, Homo sapiens
gtgatcttatccctt

SEQ ID NO: 1307999 - DNA, 15 bp, Homo sapiens
agtgatcttatccct

SEQ ID NO: 1308000 - DNA, 15 bp, Homo sapiens
aagtgatcttatccc

SEQ ID NO: 1308001 - DNA, 15 bp, Homo sapiens
taagtgatcttatcc

SEQ ID NO: 1308002 - DNA, 15 bp, Homo sapiens
ttaagtgatcttatc

SEQ ID NO: 1308003 - DNA, 15 bp, Homo sapiens
cttaagtgatcttat

SEQ ID NO: 1308004 - DNA, 15 bp, Homo sapiens
ccttaagtgatctta

SEQ ID NO: 1308005 - DNA, 15 bp, Homo sapiens
cccttaagtgatctt

SEQ ID NO: 1308006 - DNA, 15 bp, Homo sapiens
ccccttaagtgatct

SEQ ID NO: 1308007 - DNA, 15 bp, Homo sapiens
tccccttaagtgatc

SEQ ID NO: 1308008 - DNA, 15 bp, Homo sapiens
ctccccttaagtgat

SEQ ID NO: 1308009 - DNA, 15 bp, Homo sapiens
tctccccttaagtga

SEQ ID NO: 1308010 - DNA, 15 bp, Homo sapiens
ttctccccttaagtg

SEQ ID NO: 1308011 - DNA, 15 bp, Homo sapiens
attctccccttaagt

SEQ ID NO: 1308012 - DNA, 15 bp, Homo sapiens
tattctccccttaag

SEQ ID NO: 1308013 - DNA, 15 bp, Homo sapiens
atattctccccttaa

SEQ ID NO: 1308014 - DNA, 15 bp, Homo sapiens
tatattctcccctta

SEQ ID NO: 1308015 - DNA, 15 bp, Homo sapiens
ctatattctcccctt

SEQ ID NO: 1308016 - DNA, 15 bp, Homo sapiens
actatattctcccct

SEQ ID NO: 1308017 - DNA, 15 bp, Homo sapiens
tactatattctcccc

SEQ ID NO: 1308018 - DNA, 15 bp, Homo sapiens
atactatattctccc

SEQ ID NO: 1308019 - DNA, 15 bp, Homo sapiens
catactatattctcc

SEQ ID NO: 1308020 - DNA, 15 bp, Homo sapiens
tcatactatattctc

SEQ ID NO: 1308021 - DNA, 15 bp, Homo sapiens
ctcatactatattct

SEQ ID NO: 1308022 - DNA, 15 bp, Homo sapiens
tctcatactatattc

SEQ ID NO: 1308023 - DNA, 15 bp, Homo sapiens
ttctcatactatatt

SEQ ID NO: 1308024 - DNA, 15 bp, Homo sapiens
cttctcatactatat

SEQ ID NO: 1308025 - DNA, 15 bp, Homo sapiens
tcttctcatactata

SEQ ID NO: 1308026 - DNA, 15 bp, Homo sapiens
ctcttctcatactat

SEQ ID NO: 1308027 - DNA, 15 bp, Homo sapiens
tctcttctcatacta

SEQ ID NO: 1308028 - DNA, 15 bp, Homo sapiens
ttctcttctcatact

SEQ ID NO: 1308029 - DNA, 15 bp, Homo sapiens
cttctcttctcatac

SEQ ID NO: 1308030 - DNA, 15 bp, Homo sapiens
ccttctcttctcata

SEQ ID NO: 1308031 - DNA, 15 bp, Homo sapiens
tccttctcttctcat

SEQ ID NO: 1308032 - DNA, 15 bp, Homo sapiens
ctccttctcttctca

SEQ ID NO: 1308033 - DNA, 15 bp, Homo sapiens
cctccttctcttctc

SEQ ID NO: 1308034 - DNA, 15 bp, Homo sapiens
gcctccttctcttct

SEQ ID NO: 1308035 - DNA, 15 bp, Homo sapiens
agcctccttctcttc

SEQ ID NO: 1308036 - DNA, 15 bp, Homo sapiens
tagcctccttctctt

SEQ ID NO: 1308037 - DNA, 15 bp, Homo sapiens
ttagcctccttctct

SEQ ID NO: 1308038 - DNA, 15 bp, Homo sapiens
tttagcctccttctc

SEQ ID NO: 1308039 - DNA, 15 bp, Homo sapiens
ctttagcctccttct

SEQ ID NO: 1308040 - DNA, 15 bp, Homo sapiens
tctttagcctccttc

SEQ ID NO: 1308041 - DNA, 15 bp, Homo sapiens
atctttagcctcctt

SEQ ID NO: 1308042 - DNA, 15 bp, Homo sapiens
tatctttagcctcct

SEQ ID NO: 1308043 - DNA, 15 bp, Homo sapiens
ctatctttagcctcc

SEQ ID NO: 1308044 - DNA, 15 bp, Homo sapiens
tctatctttagcctc

SEQ ID NO: 1308045 - DNA, 15 bp, Homo sapiens
ttctatctttagcct

SEQ ID NO: 1308046 - DNA, 15 bp, Homo sapiens
attctatctttagcc

SEQ ID NO: 1308047 - DNA, 15 bp, Homo sapiens
aattctatctttagc

SEQ ID NO: 1308048 - DNA, 15 bp, Homo sapiens
gaattctatctttag

SEQ ID NO: 1308049 - DNA, 15 bp, Homo sapiens
agaattctatcttta

SEQ ID NO: 1308050 - DNA, 15 bp, Homo sapiens
tagaattctatcttt

SEQ ID NO: 1308051 - DNA, 15 bp, Homo sapiens
ttagaattctatctt

SEQ ID NO: 1308052 - DNA, 15 bp, Homo sapiens
cttagaattctatct

SEQ ID NO: 1308053 - DNA, 15 bp, Homo sapiens
ccttagaattctatc

SEQ ID NO: 1308054 - DNA, 15 bp, Homo sapiens
tccttagaattctat

SEQ ID NO: 1308055 - DNA, 15 bp, Homo sapiens
ctccttagaattcta

SEQ ID NO: 1308056 - DNA, 15 bp, Homo sapiens
gctccttagaattct

SEQ ID NO: 1308057 - DNA, 15 bp, Homo sapiens
agctccttagaattc

SEQ ID NO: 1308058 - DNA, 15 bp, Homo sapiens
gagctccttagaatt

SEQ ID NO: 1308059 - DNA, 15 bp, Homo sapiens
agagctccttagaat

SEQ ID NO: 1308060 - DNA, 15 bp, Homo sapiens
tagagctccttagaa

SEQ ID NO: 1308061 - DNA, 15 bp, Homo sapiens
ttagagctccttaga

SEQ ID NO: 1308062 - DNA, 15 bp, Homo sapiens
gttagagctccttag

SEQ ID NO: 1308063 - DNA, 15 bp, Homo sapiens
tgttagagctcctta

SEQ ID NO: 1308064 - DNA, 15 bp, Homo sapiens
atgttagagctcctt

SEQ ID NO: 1308065 - DNA, 15 bp, Homo sapiens
aatgttagagctcct

SEQ ID NO: 1308066 - DNA, 15 bp, Homo sapiens
aaatgttagagctcc

SEQ ID NO: 1308067 - DNA, 15 bp, Homo sapiens
taaatgttagagctc

SEQ ID NO: 1308068 - DNA, 15 bp, Homo sapiens
ttaaatgttagagct

SEQ ID NO: 1308069 - DNA, 15 bp, Homo sapiens
tttaaatgttagagc

SEQ ID NO: 1308070 - DNA, 15 bp, Homo sapiens
ctttaaatgttagag

SEQ ID NO: 1308071 - DNA, 15 bp, Homo sapiens
cctttaaatgttaga

SEQ ID NO: 1308072 - DNA, 15 bp, Homo sapiens
tcctttaaatgttag

SEQ ID NO: 1308073 - DNA, 15 bp, Homo sapiens
atcctttaaatgtta

SEQ ID NO: 1308074 - DNA, 15 bp, Homo sapiens
catcctttaaatgtt

SEQ ID NO: 1308075 - DNA, 15 bp, Homo sapiens
ccatcctttaaatgt

SEQ ID NO: 1308076 - DNA, 15 bp, Homo sapiens
tccatcctttaaatg

SEQ ID NO: 1308077 - DNA, 15 bp, Homo sapiens
gtccatcctttaaat

SEQ ID NO: 1308078 - DNA, 15 bp, Homo sapiens
tgtccatcctttaaa

SEQ ID NO: 1308079 - DNA, 15 bp, Homo sapiens
ctgtccatcctttaa

SEQ ID NO: 1308080 - DNA, 15 bp, Homo sapiens
tctgtccatccttta

SEQ ID NO: 1308081 - DNA, 15 bp, Homo sapiens
ttctgtccatccttt

SEQ ID NO: 1308082 - DNA, 15 bp, Homo sapiens
tttctgtccatcctt

SEQ ID NO: 1308083 - DNA, 15 bp, Homo sapiens
ttttctgtccatcct

SEQ ID NO: 1308084 - DNA, 15 bp, Homo sapiens
cttttctgtccatcc

SEQ ID NO: 1308085 - DNA, 15 bp, Homo sapiens
tcttttctgtccatc

SEQ ID NO: 1308086 - DNA, 15 bp, Homo sapiens
ctcttttctgtccat

SEQ ID NO: 1308087 - DNA, 15 bp, Homo sapiens
tctcttttctgtcca

SEQ ID NO: 1308088 - DNA, 15 bp, Homo sapiens
ttctcttttctgtcc

SEQ ID NO: 1308089 - DNA, 15 bp, Homo sapiens
cttctcttttctgtc

SEQ ID NO: 1308090 - DNA, 15 bp, Homo sapiens
gcttctcttttctgt

SEQ ID NO: 1308091 - DNA, 15 bp, Homo sapiens
ggcttctcttttctg

SEQ ID NO: 1308092 - DNA, 15 bp, Homo sapiens
aggcttctcttttct

SEQ ID NO: 1308093 - DNA, 15 bp, Homo sapiens
caggcttctcttttc

SEQ ID NO: 1308094 - DNA, 15 bp, Homo sapiens
acaggcttctctttt

SEQ ID NO: 1308095 - DNA, 15 bp, Homo sapiens
cacaggcttctcttt

SEQ ID NO: 1308096 - DNA, 15 bp, Homo sapiens
gcacaggcttctctt

SEQ ID NO: 1308097 - DNA, 15 bp, Homo sapiens
ggcacaggcttctct

SEQ ID NO: 1308098 - DNA, 15 bp, Homo sapiens
aggcacaggcttctc

SEQ ID NO: 1308099 - DNA, 15 bp, Homo sapiens
taggcacaggcttct

SEQ ID NO: 1308100 - DNA, 15 bp, Homo sapiens
gtaggcacaggcttc

SEQ ID NO: 1308101 - DNA, 15 bp, Homo sapiens
tgtaggcacaggctt

SEQ ID NO: 1308102 - DNA, 15 bp, Homo sapiens
ttgtaggcacaggct

SEQ ID NO: 1308103 - DNA, 15 bp, Homo sapiens
tttgtaggcacaggc

SEQ ID NO: 1308104 - DNA, 15 bp, Homo sapiens
ttttgtaggcacagg

SEQ ID NO: 1308105 - DNA, 15 bp, Homo sapiens
cttttgtaggcacag

SEQ ID NO: 1308106 - DNA, 15 bp, Homo sapiens
tcttttgtaggcaca

SEQ ID NO: 1308107 - DNA, 15 bp, Homo sapiens
ctcttttgtaggcac

SEQ ID NO: 1308108 - DNA, 15 bp, Homo sapiens
tctcttttgtaggca

SEQ ID NO: 1308109 - DNA, 15 bp, Homo sapiens
atctcttttgtaggc

SEQ ID NO: 1308110 - DNA, 15 bp, Homo sapiens
aatctcttttgtagg

SEQ ID NO: 1308111 - DNA, 15 bp, Homo sapiens
caatctcttttgtag

SEQ ID NO: 1308112 - DNA, 15 bp, Homo sapiens
tcaatctcttttgta

SEQ ID NO: 1308113 - DNA, 15 bp, Homo sapiens
ttcaatctcttttgt

SEQ ID NO: 1308114 - DNA, 15 bp, Homo sapiens
tttcaatctcttttg

SEQ ID NO: 1308115 - DNA, 15 bp, Homo sapiens
atttcaatctctttt

SEQ ID NO: 1308116 - DNA, 15 bp, Homo sapiens
tatttcaatctcttt

SEQ ID NO: 1308117 - DNA, 15 bp, Homo sapiens
ctatttcaatctctt

SEQ ID NO: 1308118 - DNA, 15 bp, Homo sapiens
tctatttcaatctct

SEQ ID NO: 1308119 - DNA, 15 bp, Homo sapiens
ttctatttcaatctc

SEQ ID NO: 1308120 - DNA, 15 bp, Homo sapiens
gttctatttcaatct

SEQ ID NO: 1308121 - DNA, 15 bp, Homo sapiens
tgttctatttcaatc

SEQ ID NO: 1308122 - DNA, 15 bp, Homo sapiens
ctgttctatttcaat

SEQ ID NO: 1308123 - DNA, 15 bp, Homo sapiens
gctgttctatttcaa

SEQ ID NO: 1308124 - DNA, 15 bp, Homo sapiens
ggctgttctatttca

SEQ ID NO: 1308125 - DNA, 15 bp, Homo sapiens
tggctgttctatttc

SEQ ID NO: 1308126 - DNA, 15 bp, Homo sapiens
ctggctgttctattt

SEQ ID NO: 1308127 - DNA, 15 bp, Homo sapiens
cctggctgttctatt

SEQ ID NO: 1308128 - DNA, 15 bp, Homo sapiens
tcctggctgttctat

SEQ ID NO: 1308129 - DNA, 15 bp, Homo sapiens
ttcctggctgttcta

SEQ ID NO: 1308130 - DNA, 15 bp, Homo sapiens
cttcctggctgttct

SEQ ID NO: 1308131 - DNA, 15 bp, Homo sapiens
tcttcctggctgttc

SEQ ID NO: 1308132 - DNA, 15 bp, Homo sapiens
atcttcctggctgtt

SEQ ID NO: 1308133 - DNA, 15 bp, Homo sapiens
tatcttcctggctgt

SEQ ID NO: 1308134 - DNA, 15 bp, Homo sapiens
ttatcttcctggctg

SEQ ID NO: 1308135 - DNA, 15 bp, Homo sapiens
cttatcttcctggct

SEQ ID NO: 1308136 - DNA, 15 bp, Homo sapiens
tcttatcttcctggc

SEQ ID NO: 1308137 - DNA, 15 bp, Homo sapiens
ttcttatcttcctgg

SEQ ID NO: 1308138 - DNA, 15 bp, Homo sapiens
cttcttatcttcctg

SEQ ID NO: 1308139 - DNA, 15 bp, Homo sapiens
tcttcttatcttcct

SEQ ID NO: 1308140 - DNA, 15 bp, Homo sapiens
ttcttcttatcttcc

SEQ ID NO: 1308141 - DNA, 15 bp, Homo sapiens
tttcttcttatcttc

SEQ ID NO: 1308142 - DNA, 15 bp, Homo sapiens
ttttcttcttatctt

SEQ ID NO: 1308143 - DNA, 15 bp, Homo sapiens
attttcttcttatct

SEQ ID NO: 1308144 - DNA, 15 bp, Homo sapiens
gattttcttcttatc

SEQ ID NO: 1308145 - DNA, 15 bp, Homo sapiens
tgattttcttcttat

SEQ ID NO: 1308146 - DNA, 15 bp, Homo sapiens
ctgattttcttctta

SEQ ID NO: 1308147 - DNA, 15 bp, Homo sapiens
cctgattttcttctt

SEQ ID NO: 1308148 - DNA, 15 bp, Homo sapiens
tcctgattttcttct

SEQ ID NO: 1308149 - DNA, 15 bp, Homo sapiens
ctcctgattttcttc

SEQ ID NO: 1308150 - DNA, 15 bp, Homo sapiens
tctcctgattttctt

SEQ ID NO: 1308151 - DNA, 15 bp, Homo sapiens
ttctcctgattttct

SEQ ID NO: 1308152 - DNA, 15 bp, Homo sapiens
cttctcctgattttc

SEQ ID NO: 1308153 - DNA, 15 bp, Homo sapiens
acttctcctgatttt

SEQ ID NO: 1308154 - DNA, 15 bp, Homo sapiens
cacttctcctgattt

SEQ ID NO: 1308155 - DNA, 15 bp, Homo sapiens
ccacttctcctgatt

SEQ ID NO: 1308156 - DNA, 15 bp, Homo sapiens
accacttctcctgat

SEQ ID NO: 1308157 - DNA, 15 bp, Homo sapiens
taccacttctcctga

SEQ ID NO: 1308158 - DNA, 15 bp, Homo sapiens
ataccacttctcctg

SEQ ID NO: 1308159 - DNA, 15 bp, Homo sapiens
gataccacttctcct

SEQ ID NO: 1308160 - DNA, 15 bp, Homo sapiens
tgataccacttctcc

SEQ ID NO: 1308161 - DNA, 15 bp, Homo sapiens
atgataccacttctc

SEQ ID NO: 1308162 - DNA, 15 bp, Homo sapiens
tatgataccacttct

SEQ ID NO: 1308163 - DNA, 15 bp, Homo sapiens
ctatgataccacttc

SEQ ID NO: 1308164 - DNA, 15 bp, Homo sapiens
tctatgataccactt

SEQ ID NO: 1308165 - DNA, 15 bp, Homo sapiens
ctctatgataccact

SEQ ID NO: 1308166 - DNA, 15 bp, Homo sapiens
tctctatgataccac

SEQ ID NO: 1308167 - DNA, 15 bp, Homo sapiens
ctctctatgatacca

SEQ ID NO: 1308168 - DNA, 15 bp, Homo sapiens
tctctctatgatacc

SEQ ID NO: 1308169 - DNA, 15 bp, Homo sapiens
gtctctctatgatac

SEQ ID NO: 1308170 - DNA, 15 bp, Homo sapiens
ggtctctctatgata

SEQ ID NO: 1308171 - DNA, 15 bp, Homo sapiens
cggtctctctatgat

SEQ ID NO: 1308172 - DNA, 15 bp, Homo sapiens
tcggtctctctatga

SEQ ID NO: 1308173 - DNA, 15 bp, Homo sapiens
gtcggtctctctatg

SEQ ID NO: 1308174 - DNA, 15 bp, Homo sapiens
ggtcggtctctctat

SEQ ID NO: 1308175 - DNA, 15 bp, Homo sapiens
tggtcggtctctcta

SEQ ID NO: 1308176 - DNA, 15 bp, Homo sapiens
ctggtcggtctctct

SEQ ID NO: 1308177 - DNA, 15 bp, Homo sapiens
cctggtcggtctctc

SEQ ID NO: 1308178 - DNA, 15 bp, Homo sapiens
acctggtcggtctct

SEQ ID NO: 1308179 - DNA, 15 bp, Homo sapiens
cacctggtcggtctc

SEQ ID NO: 1308180 - DNA, 15 bp, Homo sapiens
gcacctggtcggtct

SEQ ID NO: 1308181 - DNA, 15 bp, Homo sapiens
tgcacctggtcggtc

SEQ ID NO: 1308182 - DNA, 15 bp, Homo sapiens
ttgcacctggtcggt

SEQ ID NO: 1308183 - DNA, 15 bp, Homo sapiens
attgcacctggtcgg

SEQ ID NO: 1308184 - DNA, 15 bp, Homo sapiens
cattgcacctggtcg

SEQ ID NO: 1308185 - DNA, 15 bp, Homo sapiens
ccattgcacctggtc

SEQ ID NO: 1308186 - DNA, 15 bp, Homo sapiens
gccattgcacctggt

SEQ ID NO: 1308187 - DNA, 15 bp, Homo sapiens
agccattgcacctgg

SEQ ID NO: 1308188 - DNA, 15 bp, Homo sapiens
gagccattgcacctg

SEQ ID NO: 1308189 - DNA, 15 bp, Homo sapiens
ggagccattgcacct

SEQ ID NO: 1308190 - DNA, 15 bp, Homo sapiens
gggagccattgcacc

SEQ ID NO: 1308191 - DNA, 15 bp, Homo sapiens
cgggagccattgcac

SEQ ID NO: 1308192 - DNA, 15 bp, Homo sapiens
gcgggagccattgca

SEQ ID NO: 1308193 - DNA, 15 bp, Homo sapiens
ggcgggagccattgc

SEQ ID NO: 1308194 - DNA, 15 bp, Homo sapiens
aggcgggagccattg

SEQ ID NO: 1308195 - DNA, 15 bp, Homo sapiens
caggcgggagccatt

SEQ ID NO: 1308196 - DNA, 15 bp, Homo sapiens
acaggcgggagccat

SEQ ID NO: 1308197 - DNA, 15 bp, Homo sapiens
tacaggcgggagcca

SEQ ID NO: 1308198 - DNA, 15 bp, Homo sapiens
ttacaggcgggagcc

SEQ ID NO: 1308199 - DNA, 15 bp, Homo sapiens
attacaggcgggagc

SEQ ID NO: 1308200 - DNA, 15 bp, Homo sapiens
gattacaggcgggag

SEQ ID NO: 1308201 - DNA, 15 bp, Homo sapiens
ggattacaggcggga

SEQ ID NO: 1308202 - DNA, 15 bp, Homo sapiens
gggattacaggcggg

SEQ ID NO: 1308203 - DNA, 15 bp, Homo sapiens
cgaactcctggcctc

SEQ ID NO: 1308204 - DNA, 15 bp, Homo sapiens
gtcaggctagtctcg

SEQ ID NO: 1308205 - DNA, 15 bp, Homo sapiens
ggtcaggctagtctc

SEQ ID NO: 1308206 - DNA, 15 bp, Homo sapiens
tggtcaggctagtct

SEQ ID NO: 1308207 - DNA, 15 bp, Homo sapiens
ttggtcaggctagtc

SEQ ID NO: 1308208 - DNA, 15 bp, Homo sapiens
gttggtcaggctagt

SEQ ID NO: 1308209 - DNA, 15 bp, Homo sapiens
tgttggtcaggctag

SEQ ID NO: 1308210 - DNA, 15 bp, Homo sapiens
atgttggtcaggcta

SEQ ID NO: 1308211 - DNA, 15 bp, Homo sapiens
gtcatgttggtcagg

SEQ ID NO: 1308212 - DNA, 15 bp, Homo sapiens
tgtcatgttggtcag

SEQ ID NO: 1308213 - DNA, 15 bp, Homo sapiens
ttgtcatgttggtca

SEQ ID NO: 1308214 - DNA, 15 bp, Homo sapiens
tttgtcatgttggtc

SEQ ID NO: 1308215 - DNA, 15 bp, Homo sapiens
ttttgtcatgttggt

SEQ ID NO: 1308216 - DNA, 15 bp, Homo sapiens
gttttgtcatgttgg

SEQ ID NO: 1308217 - DNA, 15 bp, Homo sapiens
ggttttgtcatgttg

SEQ ID NO: 1308218 - DNA, 15 bp, Homo sapiens
gggttttgtcatgtt

SEQ ID NO: 1308219 - DNA, 15 bp, Homo sapiens
agggttttgtcatgt

SEQ ID NO: 1308220 - DNA, 15 bp, Homo sapiens
cagggttttgtcatg

SEQ ID NO: 1308221 - DNA, 15 bp, Homo sapiens
acagggttttgtcat

SEQ ID NO: 1308222 - DNA, 15 bp, Homo sapiens
ccaggcccagctaat

SEQ ID NO: 1308223 - DNA, 15 bp, Homo sapiens
accaggcccagctaa

SEQ ID NO: 1308224 - DNA, 15 bp, Homo sapiens
caccaggcccagcta

SEQ ID NO: 1308225 - DNA, 15 bp, Homo sapiens
ccaccaggcccagct

SEQ ID NO: 1308226 - DNA, 15 bp, Homo sapiens
accaccaggcccagc

SEQ ID NO: 1308227 - DNA, 15 bp, Homo sapiens
caccaccaggcccag

SEQ ID NO: 1308228 - DNA, 15 bp, Homo sapiens
tcaccaccaggccca

SEQ ID NO: 1308229 - DNA, 15 bp, Homo sapiens
ttcaccaccaggccc

SEQ ID NO: 1308230 - DNA, 15 bp, Homo sapiens
attcaccaccaggcc

SEQ ID NO: 1308231 - DNA, 15 bp, Homo sapiens
cattcaccaccaggc

SEQ ID NO: 1308232 - DNA, 15 bp, Homo sapiens
gcattcaccaccagg

SEQ ID NO: 1308233 - DNA, 15 bp, Homo sapiens
ggcattcaccaccag

SEQ ID NO: 1308234 - DNA, 15 bp, Homo sapiens
aggcattcaccacca

SEQ ID NO: 1308235 - DNA, 15 bp, Homo sapiens
caggcattcaccacc

SEQ ID NO: 1308236 - DNA, 15 bp, Homo sapiens
acaggcattcaccac

SEQ ID NO: 1308237 - DNA, 15 bp, Homo sapiens
tacaggcattcacca

SEQ ID NO: 1308238 - DNA, 15 bp, Homo sapiens
ttacaggcattcacc

SEQ ID NO: 1308239 - DNA, 15 bp, Homo sapiens
attacaggcattcac

SEQ ID NO: 1308240 - DNA, 15 bp, Homo sapiens
aattacaggcattca

SEQ ID NO: 1308241 - DNA, 15 bp, Homo sapiens
gaattacaggcattc

SEQ ID NO: 1308242 - DNA, 15 bp, Homo sapiens
agaattacaggcatt

SEQ ID NO: 1308243 - DNA, 15 bp, Homo sapiens
tagaattacaggcat

SEQ ID NO: 1308244 - DNA, 15 bp, Homo sapiens
ctagaattacaggca

SEQ ID NO: 1308245 - DNA, 15 bp, Homo sapiens
gctagaattacaggc

SEQ ID NO: 1308246 - DNA, 15 bp, Homo sapiens
agctagaattacagg

SEQ ID NO: 1308247 - DNA, 15 bp, Homo sapiens
tagctagaattacag

SEQ ID NO: 1308248 - DNA, 15 bp, Homo sapiens
gtagctagaattaca

SEQ ID NO: 1308249 - DNA, 15 bp, Homo sapiens
agtagctagaattac

SEQ ID NO: 1308250 - DNA, 15 bp, Homo sapiens
gagtagctagaatta

SEQ ID NO: 1308251 - DNA, 15 bp, Homo sapiens
cgagtagctagaatt

SEQ ID NO: 1308252 - DNA, 15 bp, Homo sapiens
ccgagtagctagaat

SEQ ID NO: 1308253 - DNA, 15 bp, Homo sapiens
cccgagtagctagaa

SEQ ID NO: 1308254 - DNA, 15 bp, Homo sapiens
tcccgagtagctaga

SEQ ID NO: 1308255 - DNA, 15 bp, Homo sapiens
cgattctcatgcctc

SEQ ID NO: 1308256 - DNA, 15 bp, Homo sapiens
ctcaagcgattctca

SEQ ID NO: 1308257 - DNA, 15 bp, Homo sapiens
gggctcaagcgattc

SEQ ID NO: 1308258 - DNA, 15 bp, Homo sapiens
cgggctcaagcgatt

SEQ ID NO: 1308259 - DNA, 15 bp, Homo sapiens
ccgggctcaagcgat

SEQ ID NO: 1308260 - DNA, 15 bp, Homo sapiens
cccgggctcaagcga

SEQ ID NO: 1308261 - DNA, 15 bp, Homo sapiens
tcccgggctcaagcg

SEQ ID NO: 1308262 - DNA, 15 bp, Homo sapiens
ctcccgggctcaagc

SEQ ID NO: 1308263 - DNA, 15 bp, Homo sapiens
cctcccgggctcaag

SEQ ID NO: 1308264 - DNA, 15 bp, Homo sapiens
gcctcccgggctcaa

SEQ ID NO: 1308265 - DNA, 15 bp, Homo sapiens
cgcctcccgggctca

SEQ ID NO: 1308266 - DNA, 15 bp, Homo sapiens
ccgcctcccgggctc

SEQ ID NO: 1308267 - DNA, 15 bp, Homo sapiens
tccgcctcccgggct

SEQ ID NO: 1308268 - DNA, 15 bp, Homo sapiens
ctccgcctcccgggc

SEQ ID NO: 1308269 - DNA, 15 bp, Homo sapiens
ctcaacctccgcctc

SEQ ID NO: 1308270 - DNA, 15 bp, Homo sapiens
actcaacctccgcct

SEQ ID NO: 1308271 - DNA, 15 bp, Homo sapiens
cactcaacctccgcc

SEQ ID NO: 1308272 - DNA, 15 bp, Homo sapiens
tcactcaacctccgc

SEQ ID NO: 1308273 - DNA, 15 bp, Homo sapiens
ctcactcaacctccg

SEQ ID NO: 1308274 - DNA, 15 bp, Homo sapiens
gctcactcaacctcc

SEQ ID NO: 1308275 - DNA, 15 bp, Homo sapiens
ggctcactcaacctc

SEQ ID NO: 1308276 - DNA, 15 bp, Homo sapiens
tggctcactcaacct

SEQ ID NO: 1308277 - DNA, 15 bp, Homo sapiens
ttggctcactcaacc

SEQ ID NO: 1308278 - DNA, 15 bp, Homo sapiens
cttggctcactcaac

SEQ ID NO: 1308279 - DNA, 15 bp, Homo sapiens
tcttggctcactcaa

SEQ ID NO: 1308280 - DNA, 15 bp, Homo sapiens
atcttggctcactca

SEQ ID NO: 1308281 - DNA, 15 bp, Homo sapiens
aatcttggctcactc

SEQ ID NO: 1308282 - DNA, 15 bp, Homo sapiens
gtggcacaatcttgg

SEQ ID NO: 1308283 - DNA, 15 bp, Homo sapiens
agtggcacaatcttg

SEQ ID NO: 1308284 - DNA, 15 bp, Homo sapiens
cagtggcacaatctt

SEQ ID NO: 1308285 - DNA, 15 bp, Homo sapiens
ttgctctgtcactga

SEQ ID NO: 1308286 - DNA, 15 bp, Homo sapiens
cttgctctgtcactg

SEQ ID NO: 1308287 - DNA, 15 bp, Homo sapiens
tcttgctctgtcact

SEQ ID NO: 1308288 - DNA, 15 bp, Homo sapiens
aattttattttattt

SEQ ID NO: 1308289 - DNA, 15 bp, Homo sapiens
taattttattttatt

SEQ ID NO: 1308290 - DNA, 15 bp, Homo sapiens
ttaattttattttat

SEQ ID NO: 1308291 - DNA, 15 bp, Homo sapiens
tttaattttatttta

SEQ ID NO: 1308292 - DNA, 15 bp, Homo sapiens
atttaattttatttt

SEQ ID NO: 1308293 - DNA, 15 bp, Homo sapiens
aatttaattttattt

SEQ ID NO: 1308294 - DNA, 15 bp, Homo sapiens
taatttaattttatt

SEQ ID NO: 1308295 - DNA, 15 bp, Homo sapiens
ttaatttaattttat

SEQ ID NO: 1308296 - DNA, 15 bp, Homo sapiens
tttaatttaatttta

SEQ ID NO: 1308297 - DNA, 15 bp, Homo sapiens
atttaatttaatttt

SEQ ID NO: 1308298 - DNA, 15 bp, Homo sapiens
aatttaatttaattt

SEQ ID NO: 1308299 - DNA, 15 bp, Homo sapiens
taatttaatttaatt

SEQ ID NO: 1308300 - DNA, 15 bp, Homo sapiens
ttaatttaatttaat

SEQ ID NO: 1308301 - DNA, 15 bp, Homo sapiens
tttaatttaatttaa

SEQ ID NO: 1308302 - DNA, 15 bp, Homo sapiens
ttttaatttaattta

SEQ ID NO: 1308303 - DNA, 15 bp, Homo sapiens
gtttttaatttaatt

SEQ ID NO: 1308304 - DNA, 15 bp, Homo sapiens
agtttttaatttaat

SEQ ID NO: 1308305 - DNA, 15 bp, Homo sapiens
cagtttttaatttaa

SEQ ID NO: 1308306 - DNA, 15 bp, Homo sapiens
tcagtttttaattta

SEQ ID NO: 1308307 - DNA, 15 bp, Homo sapiens
ttcagtttttaattt

SEQ ID NO: 1308308 - DNA, 15 bp, Homo sapiens
tttcagtttttaatt

SEQ ID NO: 1308309 - DNA, 15 bp, Homo sapiens
ttttcagtttttaat

SEQ ID NO: 1308310 - DNA, 15 bp, Homo sapiens
tttttcagtttttaa

SEQ ID NO: 1308311 - DNA, 15 bp, Homo sapiens
ttttttcagttttta

SEQ ID NO: 1308312 - DNA, 15 bp, Homo sapiens
tttttttcagttttt

SEQ ID NO: 1308313 - DNA, 15 bp, Homo sapiens
ctttttttcagtttt

SEQ ID NO: 1308314 - DNA, 15 bp, Homo sapiens
cctttttttcagttt

SEQ ID NO: 1308315 - DNA, 15 bp, Homo sapiens
tcctttttttcagtt

SEQ ID NO: 1308316 - DNA, 15 bp, Homo sapiens
ttcctttttttcagt

SEQ ID NO: 1308317 - DNA, 15 bp, Homo sapiens
tttcctttttttcag

SEQ ID NO: 1308318 - DNA, 15 bp, Homo sapiens
ttttcctttttttca

SEQ ID NO: 1308319 - DNA, 15 bp, Homo sapiens
cttttcctttttttc

SEQ ID NO: 1308320 - DNA, 15 bp, Homo sapiens
ccttttccttttttt

SEQ ID NO: 1308321 - DNA, 15 bp, Homo sapiens
tccttttcctttttt

SEQ ID NO: 1308322 - DNA, 15 bp, Homo sapiens
ctccttttccttttt

SEQ ID NO: 1308323 - DNA, 15 bp, Homo sapiens
tctccttttcctttt

SEQ ID NO: 1308324 - DNA, 15 bp, Homo sapiens
ctctccttttccttt

SEQ ID NO: 1308325 - DNA, 15 bp, Homo sapiens
tctctccttttcctt

SEQ ID NO: 1308326 - DNA, 15 bp, Homo sapiens
ctctctccttttcct

SEQ ID NO: 1308327 - DNA, 15 bp, Homo sapiens
tctctctccttttcc

SEQ ID NO: 1308328 - DNA, 15 bp, Homo sapiens
ctctctctccttttc

SEQ ID NO: 1308329 - DNA, 15 bp, Homo sapiens
tctctctctcctttt

SEQ ID NO: 1308330 - DNA, 15 bp, Homo sapiens
ttctctctctccttt

SEQ ID NO: 1308331 - DNA, 15 bp, Homo sapiens
gttctctctctcctt

SEQ ID NO: 1308332 - DNA, 15 bp, Homo sapiens
tgttctctctctcct

SEQ ID NO: 1308333 - DNA, 15 bp, Homo sapiens
atgttctctctctcc

SEQ ID NO: 1308334 - DNA, 15 bp, Homo sapiens
aatgttctctctctc

SEQ ID NO: 1308335 - DNA, 15 bp, Homo sapiens
taatgttctctctct

SEQ ID NO: 1308336 - DNA, 15 bp, Homo sapiens
gtaatgttctctctc

SEQ ID NO: 1308337 - DNA, 15 bp, Homo sapiens
tgtaatgttctctct

SEQ ID NO: 1308338 - DNA, 15 bp, Homo sapiens
ttgtaatgttctctc

SEQ ID NO: 1308339 - DNA, 15 bp, Homo sapiens
tttgtaatgttctct

SEQ ID NO: 1308340 - DNA, 15 bp, Homo sapiens
ctttgtaatgttctc

SEQ ID NO: 1308341 - DNA, 15 bp, Homo sapiens
actttgtaatgttct

SEQ ID NO: 1308342 - DNA, 15 bp, Homo sapiens
gactttgtaatgttc

SEQ ID NO: 1308343 - DNA, 15 bp, Homo sapiens
agactttgtaatgtt

SEQ ID NO: 1308344 - DNA, 15 bp, Homo sapiens
cagactttgtaatgt

SEQ ID NO: 1308345 - DNA, 15 bp, Homo sapiens
tcagactttgtaatg

SEQ ID NO: 1308346 - DNA, 15 bp, Homo sapiens
ctcagactttgtaat

SEQ ID NO: 1308347 - DNA, 15 bp, Homo sapiens
actcagactttgtaa

SEQ ID NO: 1308348 - DNA, 15 bp, Homo sapiens
cactcagactttgta

SEQ ID NO: 1308349 - DNA, 15 bp, Homo sapiens
tcactcagactttgt

SEQ ID NO: 1308350 - DNA, 15 bp, Homo sapiens
ctcactcagactttg

SEQ ID NO: 1308351 - DNA, 15 bp, Homo sapiens
actcactcagacttt

SEQ ID NO: 1308352 - DNA, 15 bp, Homo sapiens
cactcactcagactt

SEQ ID NO: 1308353 - DNA, 15 bp, Homo sapiens
gcactcactcagact

SEQ ID NO: 1308354 - DNA, 15 bp, Homo sapiens
agcactcactcagac

SEQ ID NO: 1308355 - DNA, 15 bp, Homo sapiens
aagcactcactcaga

SEQ ID NO: 1308356 - DNA, 15 bp, Homo sapiens
caagcactcactcag

SEQ ID NO: 1308357 - DNA, 15 bp, Homo sapiens
gcaagcactcactca

SEQ ID NO: 1308358 - DNA, 15 bp, Homo sapiens
agcaagcactcactc

SEQ ID NO: 1308359 - DNA, 15 bp, Homo sapiens
gagcaagcactcact

SEQ ID NO: 1308360 - DNA, 15 bp, Homo sapiens
tgagcaagcactcac

SEQ ID NO: 1308361 - DNA, 15 bp, Homo sapiens
gtgagcaagcactca

SEQ ID NO: 1308362 - DNA, 15 bp, Homo sapiens
agtgagcaagcactc

SEQ ID NO: 1308363 - DNA, 15 bp, Homo sapiens
gagtgagcaagcact

SEQ ID NO: 1308364 - DNA, 15 bp, Homo sapiens
tgagtgagcaagcac

SEQ ID NO: 1308365 - DNA, 15 bp, Homo sapiens
ctgagtgagcaagca

SEQ ID NO: 1308366 - DNA, 15 bp, Homo sapiens
tctgagtgagcaagc

SEQ ID NO: 1308367 - DNA, 15 bp, Homo sapiens
gtctgagtgagcaag

SEQ ID NO: 1308368 - DNA, 15 bp, Homo sapiens
agtctgagtgagcaa

SEQ ID NO: 1308369 - DNA, 15 bp, Homo sapiens
aagtctgagtgagca

SEQ ID NO: 1308370 - DNA, 15 bp, Homo sapiens
aaagtctgagtgagc

SEQ ID NO: 1308371 - DNA, 15 bp, Homo sapiens
aaaagtctgagtgag

SEQ ID NO: 1308372 - DNA, 15 bp, Homo sapiens
gaaaagtctgagtga

SEQ ID NO: 1308373 - DNA, 15 bp, Homo sapiens
tgaaaagtctgagtg

SEQ ID NO: 1308374 - DNA, 15 bp, Homo sapiens
ctgaaaagtctgagt

SEQ ID NO: 1308375 - DNA, 15 bp, Homo sapiens
tctgaaaagtctgag

SEQ ID NO: 1308376 - DNA, 15 bp, Homo sapiens
atctgaaaagtctga

SEQ ID NO: 1308377 - DNA, 15 bp, Homo sapiens
tatctgaaaagtctg

SEQ ID NO: 1308378 - DNA, 15 bp, Homo sapiens
ctatctgaaaagtct

SEQ ID NO: 1308379 - DNA, 15 bp, Homo sapiens
cctatctgaaaagtc

SEQ ID NO: 1308380 - DNA, 15 bp, Homo sapiens
tcctatctgaaaagt

SEQ ID NO: 1308381 - DNA, 15 bp, Homo sapiens
ctcctatctgaaaag

SEQ ID NO: 1308382 - DNA, 15 bp, Homo sapiens
gctcctatctgaaaa

SEQ ID NO: 1308383 - DNA, 15 bp, Homo sapiens
agctcctatctgaaa

SEQ ID NO: 1308384 - DNA, 15 bp, Homo sapiens
cagctcctatctgaa

SEQ ID NO: 1308385 - DNA, 15 bp, Homo sapiens
tcagctcctatctga

SEQ ID NO: 1308386 - DNA, 15 bp, Homo sapiens
ttcagctcctatctg

SEQ ID NO: 1308387 - DNA, 15 bp, Homo sapiens
tttcagctcctatct

SEQ ID NO: 1308388 - DNA, 15 bp, Homo sapiens
ttttcagctcctatc

SEQ ID NO: 1308389 - DNA, 15 bp, Homo sapiens
cttttcagctcctat

SEQ ID NO: 1308390 - DNA, 15 bp, Homo sapiens
acttttcagctccta

SEQ ID NO: 1308391 - DNA, 15 bp, Homo sapiens
aacttttcagctcct

SEQ ID NO: 1308392 - DNA, 15 bp, Homo sapiens
aaacttttcagctcc

SEQ ID NO: 1308393 - DNA, 15 bp, Homo sapiens
aaaacttttcagctc

SEQ ID NO: 1308394 - DNA, 15 bp, Homo sapiens
taaaacttttcagct

SEQ ID NO: 1308395 - DNA, 15 bp, Homo sapiens
ctaaaacttttcagc

SEQ ID NO: 1308396 - DNA, 15 bp, Homo sapiens
gctaaaacttttcag

SEQ ID NO: 1308397 - DNA, 15 bp, Homo sapiens
tgctaaaacttttca

SEQ ID NO: 1308398 - DNA, 15 bp, Homo sapiens
ttgctaaaacttttc

SEQ ID NO: 1308399 - DNA, 15 bp, Homo sapiens
gttgctaaaactttt

SEQ ID NO: 1308400 - DNA, 15 bp, Homo sapiens
tgttgctaaaacttt

SEQ ID NO: 1308401 - DNA, 15 bp, Homo sapiens
ttgttgctaaaactt

SEQ ID NO: 1308402 - DNA, 15 bp, Homo sapiens
attgttgctaaaact

SEQ ID NO: 1308403 - DNA, 15 bp, Homo sapiens
cattgttgctaaaac

SEQ ID NO: 1308404 - DNA, 15 bp, Homo sapiens
tcattgttgctaaaa

SEQ ID NO: 1308405 - DNA, 15 bp, Homo sapiens
ttcattgttgctaaa

SEQ ID NO: 1308406 - DNA, 15 bp, Homo sapiens
cttcattgttgctaa

SEQ ID NO: 1308407 - DNA, 15 bp, Homo sapiens
acttcattgttgcta

SEQ ID NO: 1308408 - DNA, 15 bp, Homo sapiens
gacttcattgttgct

SEQ ID NO: 1308409 - DNA, 15 bp, Homo sapiens
tgacttcattgttgc

SEQ ID NO: 1308410 - DNA, 15 bp, Homo sapiens
gtgacttcattgttg

SEQ ID NO: 1308411 - DNA, 15 bp, Homo sapiens
agtgacttcattgtt

SEQ ID NO: 1308412 - DNA, 15 bp, Homo sapiens
cagtgacttcattgt

SEQ ID NO: 1308413 - DNA, 15 bp, Homo sapiens
ccagtgacttcattg

SEQ ID NO: 1308414 - DNA, 15 bp, Homo sapiens
accagtgacttcatt

SEQ ID NO: 1308415 - DNA, 15 bp, Homo sapiens
caccagtgacttcat

SEQ ID NO: 1308416 - DNA, 15 bp, Homo sapiens
tcaccagtgacttca

SEQ ID NO: 1308417 - DNA, 15 bp, Homo sapiens
gtcaccagtgacttc

SEQ ID NO: 1308418 - DNA, 15 bp, Homo sapiens
tgtcaccagtgactt

SEQ ID NO: 1308419 - DNA, 15 bp, Homo sapiens
ctgtcaccagtgact

SEQ ID NO: 1308420 - DNA, 15 bp, Homo sapiens
actgtcaccagtgac

SEQ ID NO: 1308421 - DNA, 15 bp, Homo sapiens
cactgtcaccagtga

SEQ ID NO: 1308422 - DNA, 15 bp, Homo sapiens
tcactgtcaccagtg

SEQ ID NO: 1308423 - DNA, 15 bp, Homo sapiens
gtcactgtcaccagt

SEQ ID NO: 1308424 - DNA, 15 bp, Homo sapiens
tgtcactgtcaccag

SEQ ID NO: 1308425 - DNA, 15 bp, Homo sapiens
ttgtcactgtcacca

SEQ ID NO: 1308426 - DNA, 15 bp, Homo sapiens
cttgtcactgtcacc

SEQ ID NO: 1308427 - DNA, 15 bp, Homo sapiens
ccttgtcactgtcac

SEQ ID NO: 1308428 - DNA, 15 bp, Homo sapiens
tccttgtcactgtca

SEQ ID NO: 1308429 - DNA, 15 bp, Homo sapiens
gtccttgtcactgtc

SEQ ID NO: 1308430 - DNA, 15 bp, Homo sapiens
agtccttgtcactgt

SEQ ID NO: 1308431 - DNA, 15 bp, Homo sapiens
cagtccttgtcactg

SEQ ID NO: 1308432 - DNA, 15 bp, Homo sapiens
acagtccttgtcact

SEQ ID NO: 1308433 - DNA, 15 bp, Homo sapiens
aacagtccttgtcac

SEQ ID NO: 1308434 - DNA, 15 bp, Homo sapiens
taacagtccttgtca

SEQ ID NO: 1308435 - DNA, 15 bp, Homo sapiens
ttaacagtccttgtc

SEQ ID NO: 1308436 - DNA, 15 bp, Homo sapiens
tttaacagtccttgt

SEQ ID NO: 1308437 - DNA, 15 bp, Homo sapiens
atttaacagtccttg

SEQ ID NO: 1308438 - DNA, 15 bp, Homo sapiens
catttaacagtcctt

SEQ ID NO: 1308439 - DNA, 15 bp, Homo sapiens
tcatttaacagtcct

SEQ ID NO: 1308440 - DNA, 15 bp, Homo sapiens
ttcatttaacagtcc

SEQ ID NO: 1308441 - DNA, 15 bp, Homo sapiens
cttcatttaacagtc

SEQ ID NO: 1308442 - DNA, 15 bp, Homo sapiens
ccttcatttaacagt

SEQ ID NO: 1308443 - DNA, 15 bp, Homo sapiens
cccttcatttaacag

SEQ ID NO: 1308444 - DNA, 15 bp, Homo sapiens
ccccttcatttaaca

SEQ ID NO: 1308445 - DNA, 15 bp, Homo sapiens
accccttcatttaac

SEQ ID NO: 1308446 - DNA, 15 bp, Homo sapiens
caccccttcatttaa

SEQ ID NO: 1308447 - DNA, 15 bp, Homo sapiens
ccaccccttcattta

SEQ ID NO: 1308448 - DNA, 15 bp, Homo sapiens
cccaccccttcattt

SEQ ID NO: 1308449 - DNA, 15 bp, Homo sapiens
ccccaccccttcatt

SEQ ID NO: 1308450 - DNA, 15 bp, Homo sapiens
tccccaccccttcat

SEQ ID NO: 1308451 - DNA, 15 bp, Homo sapiens
atccccaccccttca

SEQ ID NO: 1308452 - DNA, 15 bp, Homo sapiens
tatccccaccccttc

SEQ ID NO: 1308453 - DNA, 15 bp, Homo sapiens
ctatccccacccctt

SEQ ID NO: 1308454 - DNA, 15 bp, Homo sapiens
cctatccccacccct

SEQ ID NO: 1308455 - DNA, 15 bp, Homo sapiens
tcctatccccacccc

SEQ ID NO: 1308456 - DNA, 15 bp, Homo sapiens
atcctatccccaccc

SEQ ID NO: 1308457 - DNA, 15 bp, Homo sapiens
catcctatccccacc

SEQ ID NO: 1308458 - DNA, 15 bp, Homo sapiens
tcatcctatccccac

SEQ ID NO: 1308459 - DNA, 15 bp, Homo sapiens
ctcatcctatcccca

SEQ ID NO: 1308460 - DNA, 15 bp, Homo sapiens
tctcatcctatcccc

SEQ ID NO: 1308461 - DNA, 15 bp, Homo sapiens
atctcatcctatccc

SEQ ID NO: 1308462 - DNA, 15 bp, Homo sapiens
gatctcatcctatcc

SEQ ID NO: 1308463 - DNA, 15 bp, Homo sapiens
agatctcatcctatc

SEQ ID NO: 1308464 - DNA, 15 bp, Homo sapiens
cagatctcatcctat

SEQ ID NO: 1308465 - DNA, 15 bp, Homo sapiens
tcagatctcatccta

SEQ ID NO: 1308466 - DNA, 15 bp, Homo sapiens
ttcagatctcatcct

SEQ ID NO: 1308467 - DNA, 15 bp, Homo sapiens
attcagatctcatcc

SEQ ID NO: 1308468 - DNA, 15 bp, Homo sapiens
cattcagatctcatc

SEQ ID NO: 1308469 - DNA, 15 bp, Homo sapiens
tcattcagatctcat

SEQ ID NO: 1308470 - DNA, 15 bp, Homo sapiens
ctcattcagatctca

SEQ ID NO: 1308471 - DNA, 15 bp, Homo sapiens
tctcattcagatctc

SEQ ID NO: 1308472 - DNA, 15 bp, Homo sapiens
ctctcattcagatct

SEQ ID NO: 1308473 - DNA, 15 bp, Homo sapiens
tctctcattcagatc

SEQ ID NO: 1308474 - DNA, 15 bp, Homo sapiens
atctctcattcagat

SEQ ID NO: 1308475 - DNA, 15 bp, Homo sapiens
tatctctcattcaga

SEQ ID NO: 1308476 - DNA, 15 bp, Homo sapiens
ttatctctcattcag

SEQ ID NO: 1308477 - DNA, 15 bp, Homo sapiens
tttatctctcattca

SEQ ID NO: 1308478 - DNA, 15 bp, Homo sapiens
ctttatctctcattc

SEQ ID NO: 1308479 - DNA, 15 bp, Homo sapiens
actttatctctcatt

SEQ ID NO: 1308480 - DNA, 15 bp, Homo sapiens
cactttatctctcat

SEQ ID NO: 1308481 - DNA, 15 bp, Homo sapiens
ccactttatctctca

SEQ ID NO: 1308482 - DNA, 15 bp, Homo sapiens
tccactttatctctc

SEQ ID NO: 1308483 - DNA, 15 bp, Homo sapiens
gtccactttatctct

SEQ ID NO: 1308484 - DNA, 15 bp, Homo sapiens
tgtccactttatctc

SEQ ID NO: 1308485 - DNA, 15 bp, Homo sapiens
gtgtccactttatct

SEQ ID NO: 1308486 - DNA, 15 bp, Homo sapiens
tgtgtccactttatc

SEQ ID NO: 1308487 - DNA, 15 bp, Homo sapiens
ctgtgtccactttat

SEQ ID NO: 1308488 - DNA, 15 bp, Homo sapiens
actgtgtccacttta

SEQ ID NO: 1308489 - DNA, 15 bp, Homo sapiens
gactgtgtccacttt

SEQ ID NO: 1308490 - DNA, 15 bp, Homo sapiens
tgactgtgtccactt

SEQ ID NO: 1308491 - DNA, 15 bp, Homo sapiens
ttgactgtgtccact

SEQ ID NO: 1308492 - DNA, 15 bp, Homo sapiens
tttgactgtgtccac

SEQ ID NO: 1308493 - DNA, 15 bp, Homo sapiens
atttgactgtgtcca

SEQ ID NO: 1308494 - DNA, 15 bp, Homo sapiens
tatttgactgtgtcc

SEQ ID NO: 1308495 - DNA, 15 bp, Homo sapiens
ctatttgactgtgtc

SEQ ID NO: 1308496 - DNA, 15 bp, Homo sapiens
tctatttgactgtgt

SEQ ID NO: 1308497 - DNA, 15 bp, Homo sapiens
atctatttgactgtg

SEQ ID NO: 1308498 - DNA, 15 bp, Homo sapiens
catctatttgactgt

SEQ ID NO: 1308499 - DNA, 15 bp, Homo sapiens
ccatctatttgactg

SEQ ID NO: 1308500 - DNA, 15 bp, Homo sapiens
gccatctatttgact

SEQ ID NO: 1308501 - DNA, 15 bp, Homo sapiens
agccatctatttgac

SEQ ID NO: 1308502 - DNA, 15 bp, Homo sapiens
aagccatctatttga

SEQ ID NO: 1308503 - DNA, 15 bp, Homo sapiens
aaagccatctatttg

SEQ ID NO: 1308504 - DNA, 15 bp, Homo sapiens
aaaagccatctattt

SEQ ID NO: 1308505 - DNA, 15 bp, Homo sapiens
taaaagccatctatt

SEQ ID NO: 1308506 - DNA, 15 bp, Homo sapiens
ataaaagccatctat

SEQ ID NO: 1308507 - DNA, 15 bp, Homo sapiens
gataaaagccatcta

SEQ ID NO: 1308508 - DNA, 15 bp, Homo sapiens
tgataaaagccatct

SEQ ID NO: 1308509 - DNA, 15 bp, Homo sapiens
ttgataaaagccatc

SEQ ID NO: 1308510 - DNA, 15 bp, Homo sapiens
tttgataaaagccat

SEQ ID NO: 1308511 - DNA, 15 bp, Homo sapiens
ttttgataaaagcca

SEQ ID NO: 1308512 - DNA, 15 bp, Homo sapiens
cttttgataaaagcc

SEQ ID NO: 1308513 - DNA, 15 bp, Homo sapiens
acttttgataaaagc

SEQ ID NO: 1308514 - DNA, 15 bp, Homo sapiens
aacttttgataaaag

SEQ ID NO: 1308515 - DNA, 15 bp, Homo sapiens
aaacttttgataaaa

SEQ ID NO: 1308516 - DNA, 15 bp, Homo sapiens
aaaacttttgataaa

SEQ ID NO: 1308517 - DNA, 15 bp, Homo sapiens
caaaacttttgataa

SEQ ID NO: 1308518 - DNA, 15 bp, Homo sapiens
gcaaaacttttgata

SEQ ID NO: 1308519 - DNA, 15 bp, Homo sapiens
ggcaaaacttttgat

SEQ ID NO: 1308520 - DNA, 15 bp, Homo sapiens
aggcaaaacttttga

SEQ ID NO: 1308521 - DNA, 15 bp, Homo sapiens
caggcaaaacttttg

SEQ ID NO: 1308522 - DNA, 15 bp, Homo sapiens
acaggcaaaactttt

SEQ ID NO: 1308523 - DNA, 15 bp, Homo sapiens
cacaggcaaaacttt

SEQ ID NO: 1308524 - DNA, 15 bp, Homo sapiens
tcacaggcaaaactt

SEQ ID NO: 1308525 - DNA, 15 bp, Homo sapiens
ttcacaggcaaaact

SEQ ID NO: 1308526 - DNA, 15 bp, Homo sapiens
cttcacaggcaaaac

SEQ ID NO: 1308527 - DNA, 15 bp, Homo sapiens
tcttcacaggcaaaa

SEQ ID NO: 1308528 - DNA, 15 bp, Homo sapiens
ctcttcacaggcaaa

SEQ ID NO: 1308529 - DNA, 15 bp, Homo sapiens
tctcttcacaggcaa

SEQ ID NO: 1308530 - DNA, 15 bp, Homo sapiens
ttctcttcacaggca

SEQ ID NO: 1308531 - DNA, 15 bp, Homo sapiens
tttctcttcacaggc

SEQ ID NO: 1308532 - DNA, 15 bp, Homo sapiens
atttctcttcacagg

SEQ ID NO: 1308533 - DNA, 15 bp, Homo sapiens
tatttctcttcacag

SEQ ID NO: 1308534 - DNA, 15 bp, Homo sapiens
ttatttctcttcaca

SEQ ID NO: 1308535 - DNA, 15 bp, Homo sapiens
tttatttctcttcac

SEQ ID NO: 1308536 - DNA, 15 bp, Homo sapiens
ctttatttctcttca

SEQ ID NO: 1308537 - DNA, 15 bp, Homo sapiens
tctttatttctcttc

SEQ ID NO: 1308538 - DNA, 15 bp, Homo sapiens
atctttatttctctt

SEQ ID NO: 1308539 - DNA, 15 bp, Homo sapiens
tatctttatttctct

SEQ ID NO: 1308540 - DNA, 15 bp, Homo sapiens
atatctttatttctc

SEQ ID NO: 1308541 - DNA, 15 bp, Homo sapiens
tatatctttatttct

SEQ ID NO: 1308542 - DNA, 15 bp, Homo sapiens
ttatatctttatttc

SEQ ID NO: 1308543 - DNA, 15 bp, Homo sapiens
gttatatctttattt

SEQ ID NO: 1308544 - DNA, 15 bp, Homo sapiens
tgttatatctttatt

SEQ ID NO: 1308545 - DNA, 15 bp, Homo sapiens
ctgttatatctttat

SEQ ID NO: 1308546 - DNA, 15 bp, Homo sapiens
tctgttatatcttta

SEQ ID NO: 1308547 - DNA, 15 bp, Homo sapiens
ttctgttatatcttt

SEQ ID NO: 1308548 - DNA, 15 bp, Homo sapiens
cttctgttatatctt

SEQ ID NO: 1308549 - DNA, 15 bp, Homo sapiens
acttctgttatatct

SEQ ID NO: 1308550 - DNA, 15 bp, Homo sapiens
tacttctgttatatc

SEQ ID NO: 1308551 - DNA, 15 bp, Homo sapiens
ttacttctgttatat

SEQ ID NO: 1308552 - DNA, 15 bp, Homo sapiens
tttacttctgttata

SEQ ID NO: 1308553 - DNA, 15 bp, Homo sapiens
ctttacttctgttat

SEQ ID NO: 1308554 - DNA, 15 bp, Homo sapiens
tctttacttctgtta

SEQ ID NO: 1308555 - DNA, 15 bp, Homo sapiens
atctttacttctgtt

SEQ ID NO: 1308556 - DNA, 15 bp, Homo sapiens
tatctttacttctgt

SEQ ID NO: 1308557 - DNA, 15 bp, Homo sapiens
gtatctttacttctg

SEQ ID NO: 1308558 - DNA, 15 bp, Homo sapiens
tgtatctttacttct

SEQ ID NO: 1308559 - DNA, 15 bp, Homo sapiens
ctgtatctttacttc

SEQ ID NO: 1308560 - DNA, 15 bp, Homo sapiens
gctgtatctttactt

SEQ ID NO: 1308561 - DNA, 15 bp, Homo sapiens
agctgtatctttact

SEQ ID NO: 1308562 - DNA, 15 bp, Homo sapiens
aagctgtatctttac

SEQ ID NO: 1308563 - DNA, 15 bp, Homo sapiens
caagctgtatcttta

SEQ ID NO: 1308564 - DNA, 15 bp, Homo sapiens
tcaagctgtatcttt

SEQ ID NO: 1308565 - DNA, 15 bp, Homo sapiens
atcaagctgtatctt

SEQ ID NO: 1308566 - DNA, 15 bp, Homo sapiens
catcaagctgtatct

SEQ ID NO: 1308567 - DNA, 15 bp, Homo sapiens
acatcaagctgtatc

SEQ ID NO: 1308568 - DNA, 15 bp, Homo sapiens
tacatcaagctgtat

SEQ ID NO: 1308569 - DNA, 15 bp, Homo sapiens
atacatcaagctgta

SEQ ID NO: 1308570 - DNA, 15 bp, Homo sapiens
catacatcaagctgt

SEQ ID NO: 1308571 - DNA, 15 bp, Homo sapiens
acatacatcaagctg

SEQ ID NO: 1308572 - DNA, 15 bp, Homo sapiens
cacatacatcaagct

SEQ ID NO: 1308573 - DNA, 15 bp, Homo sapiens
tcacatacatcaagc

SEQ ID NO: 1308574 - DNA, 15 bp, Homo sapiens
ttcacatacatcaag

SEQ ID NO: 1308575 - DNA, 15 bp, Homo sapiens
cttcacatacatcaa

SEQ ID NO: 1308576 - DNA, 15 bp, Homo sapiens
acttcacatacatca

SEQ ID NO: 1308577 - DNA, 15 bp, Homo sapiens
tacttcacatacatc

SEQ ID NO: 1308578 - DNA, 15 bp, Homo sapiens
ctacttcacatacat

SEQ ID NO: 1308579 - DNA, 15 bp, Homo sapiens
tctacttcacataca

SEQ ID NO: 1308580 - DNA, 15 bp, Homo sapiens
ctctacttcacatac

SEQ ID NO: 1308581 - DNA, 15 bp, Homo sapiens
cctctacttcacata

SEQ ID NO: 1308582 - DNA, 15 bp, Homo sapiens
ccctctacttcacat

SEQ ID NO: 1308583 - DNA, 15 bp, Homo sapiens
tccctctacttcaca

SEQ ID NO: 1308584 - DNA, 15 bp, Homo sapiens
ttccctctacttcac

SEQ ID NO: 1308585 - DNA, 15 bp, Homo sapiens
attccctctacttca

SEQ ID NO: 1308586 - DNA, 15 bp, Homo sapiens
tattccctctacttc

SEQ ID NO: 1308587 - DNA, 15 bp, Homo sapiens
atattccctctactt

SEQ ID NO: 1308588 - DNA, 15 bp, Homo sapiens
tatattccctctact

SEQ ID NO: 1308589 - DNA, 15 bp, Homo sapiens
ttatattccctctac

SEQ ID NO: 1308590 - DNA, 15 bp, Homo sapiens
tttatattccctcta

SEQ ID NO: 1308591 - DNA, 15 bp, Homo sapiens
gtttatattccctct

SEQ ID NO: 1308592 - DNA, 15 bp, Homo sapiens
tgtttatattccctc

SEQ ID NO: 1308593 - DNA, 15 bp, Homo sapiens
atgtttatattccct

SEQ ID NO: 1308594 - DNA, 15 bp, Homo sapiens
tatgtttatattccc

SEQ ID NO: 1308595 - DNA, 15 bp, Homo sapiens
atatgtttatattcc

SEQ ID NO: 1308596 - DNA, 15 bp, Homo sapiens
aatatgtttatattc

SEQ ID NO: 1308597 - DNA, 15 bp, Homo sapiens
aaatatgtttatatt

SEQ ID NO: 1308598 - DNA, 15 bp, Homo sapiens
aaaatatgtttatat

SEQ ID NO: 1308599 - DNA, 15 bp, Homo sapiens
aaaaatatgtttata

SEQ ID NO: 1308600 - DNA, 15 bp, Homo sapiens
aaaaaatatgtttat

SEQ ID NO: 1308601 - DNA, 15 bp, Homo sapiens
taaaaaatatgttta

SEQ ID NO: 1308602 - DNA, 15 bp, Homo sapiens
ttaaaaaatatgttt

SEQ ID NO: 1308603 - DNA, 15 bp, Homo sapiens
tttaaaaaatatgtt

SEQ ID NO: 1308604 - DNA, 15 bp, Homo sapiens
atttaaaaaatatgt

SEQ ID NO: 1308605 - DNA, 15 bp, Homo sapiens
gatttaaaaaatatg

SEQ ID NO: 1308606 - DNA, 15 bp, Homo sapiens
tgatttaaaaaatat

SEQ ID NO: 1308607 - DNA, 15 bp, Homo sapiens
ctgatttaaaaaata

SEQ ID NO: 1308608 - DNA, 15 bp, Homo sapiens
tctgatttaaaaaat

SEQ ID NO: 1308609 - DNA, 15 bp, Homo sapiens
ttctgatttaaaaaa

SEQ ID NO: 1308610 - DNA, 15 bp, Homo sapiens
tttctgatttaaaaa

SEQ ID NO: 1308611 - DNA, 15 bp, Homo sapiens
ctttctgatttaaaa

SEQ ID NO: 1308612 - DNA, 15 bp, Homo sapiens
cctttctgatttaaa

SEQ ID NO: 1308613 - DNA, 15 bp, Homo sapiens
acctttctgatttaa

SEQ ID NO: 1308614 - DNA, 15 bp, Homo sapiens
tacctttctgattta

SEQ ID NO: 1308615 - DNA, 15 bp, Homo sapiens
ctacctttctgattt

SEQ ID NO: 1308616 - DNA, 15 bp, Homo sapiens
cctacctttctgatt

SEQ ID NO: 1308617 - DNA, 15 bp, Homo sapiens
ccctacctttctgat

SEQ ID NO: 1308618 - DNA, 15 bp, Homo sapiens
accctacctttctga

SEQ ID NO: 1308619 - DNA, 15 bp, Homo sapiens
aaccctacctttctg

SEQ ID NO: 1308620 - DNA, 15 bp, Homo sapiens
aaaccctacctttct

SEQ ID NO: 1308621 - DNA, 15 bp, Homo sapiens
taaaccctacctttc

SEQ ID NO: 1308622 - DNA, 15 bp, Homo sapiens
ttaaaccctaccttt

SEQ ID NO: 1308623 - DNA, 15 bp, Homo sapiens
tttaaaccctacctt

SEQ ID NO: 1308624 - DNA, 15 bp, Homo sapiens
atttaaaccctacct

SEQ ID NO: 1308625 - DNA, 15 bp, Homo sapiens
tatttaaaccctacc

SEQ ID NO: 1308626 - DNA, 15 bp, Homo sapiens
atatttaaaccctac

SEQ ID NO: 1308627 - DNA, 15 bp, Homo sapiens
aatatttaaacccta

SEQ ID NO: 1308628 - DNA, 15 bp, Homo sapiens
caatatttaaaccct

SEQ ID NO: 1308629 - DNA, 15 bp, Homo sapiens
tcaatatttaaaccc

SEQ ID NO: 1308630 - DNA, 15 bp, Homo sapiens
atcaatatttaaacc

SEQ ID NO: 1308631 - DNA, 15 bp, Homo sapiens
catcaatatttaaac

SEQ ID NO: 1308632 - DNA, 15 bp, Homo sapiens
ccatcaatatttaaa

SEQ ID NO: 1308633 - DNA, 15 bp, Homo sapiens
tccatcaatatttaa

SEQ ID NO: 1308634 - DNA, 15 bp, Homo sapiens
ttccatcaatattta

SEQ ID NO: 1308635 - DNA, 15 bp, Homo sapiens
tttccatcaatattt

SEQ ID NO: 1308636 - DNA, 15 bp, Homo sapiens
ttttccatcaatatt

SEQ ID NO: 1308637 - DNA, 15 bp, Homo sapiens
cttttccatcaatat

SEQ ID NO: 1308638 - DNA, 15 bp, Homo sapiens
tcttttccatcaata

SEQ ID NO: 1308639 - DNA, 15 bp, Homo sapiens
ctcttttccatcaat

SEQ ID NO: 1308640 - DNA, 15 bp, Homo sapiens
gctcttttccatcaa

SEQ ID NO: 1308641 - DNA, 15 bp, Homo sapiens
ggctcttttccatca

SEQ ID NO: 1308642 - DNA, 15 bp, Homo sapiens
tggctcttttccatc

SEQ ID NO: 1308643 - DNA, 15 bp, Homo sapiens
atggctcttttccat

SEQ ID NO: 1308644 - DNA, 15 bp, Homo sapiens
aatggctcttttcca

SEQ ID NO: 1308645 - DNA, 15 bp, Homo sapiens
taatggctcttttcc

SEQ ID NO: 1308646 - DNA, 15 bp, Homo sapiens
ctaatggctcttttc

SEQ ID NO: 1308647 - DNA, 15 bp, Homo sapiens
tctaatggctctttt

SEQ ID NO: 1308648 - DNA, 15 bp, Homo sapiens
ttctaatggctcttt

SEQ ID NO: 1308649 - DNA, 15 bp, Homo sapiens
cttctaatggctctt

SEQ ID NO: 1308650 - DNA, 15 bp, Homo sapiens
acttctaatggctct

SEQ ID NO: 1308651 - DNA, 15 bp, Homo sapiens
cacttctaatggctc

SEQ ID NO: 1308652 - DNA, 15 bp, Homo sapiens
acacttctaatggct

SEQ ID NO: 1308653 - DNA, 15 bp, Homo sapiens
aacacttctaatggc

SEQ ID NO: 1308654 - DNA, 15 bp, Homo sapiens
gaacacttctaatgg

SEQ ID NO: 1308655 - DNA, 15 bp, Homo sapiens
agaacacttctaatg

SEQ ID NO: 1308656 - DNA, 15 bp, Homo sapiens
gagaacacttctaat

SEQ ID NO: 1308657 - DNA, 15 bp, Homo sapiens
agagaacacttctaa

SEQ ID NO: 1308658 - DNA, 15 bp, Homo sapiens
tagagaacacttcta

SEQ ID NO: 1308659 - DNA, 15 bp, Homo sapiens
atagagaacacttct

SEQ ID NO: 1308660 - DNA, 15 bp, Homo sapiens
aatagagaacacttc

SEQ ID NO: 1308661 - DNA, 15 bp, Homo sapiens
caatagagaacactt

SEQ ID NO: 1308662 - DNA, 15 bp, Homo sapiens
gcaatagagaacact

SEQ ID NO: 1308663 - DNA, 15 bp, Homo sapiens
agcaatagagaacac

SEQ ID NO: 1308664 - DNA, 15 bp, Homo sapiens
cagcaatagagaaca

SEQ ID NO: 1308665 - DNA, 15 bp, Homo sapiens
ccagcaatagagaac

SEQ ID NO: 1308666 - DNA, 15 bp, Homo sapiens
tccagcaatagagaa

SEQ ID NO: 1308667 - DNA, 15 bp, Homo sapiens
atccagcaatagaga

SEQ ID NO: 1308668 - DNA, 15 bp, Homo sapiens
tatccagcaatagag

SEQ ID NO: 1308669 - DNA, 15 bp, Homo sapiens
ttatccagcaataga

SEQ ID NO: 1308670 - DNA, 15 bp, Homo sapiens
gttatccagcaatag

SEQ ID NO: 1308671 - DNA, 15 bp, Homo sapiens
tgttatccagcaata

SEQ ID NO: 1308672 - DNA, 15 bp, Homo sapiens
ttgttatccagcaat

SEQ ID NO: 1308673 - DNA, 15 bp, Homo sapiens
tttgttatccagcaa

SEQ ID NO: 1308674 - DNA, 15 bp, Homo sapiens
atttgttatccagca

SEQ ID NO: 1308675 - DNA, 15 bp, Homo sapiens
aatttgttatccagc

SEQ ID NO: 1308676 - DNA, 15 bp, Homo sapiens
taatttgttatccag

SEQ ID NO: 1308677 - DNA, 15 bp, Homo sapiens
ctaatttgttatcca

SEQ ID NO: 1308678 - DNA, 15 bp, Homo sapiens
actaatttgttatcc

SEQ ID NO: 1308679 - DNA, 15 bp, Homo sapiens
cactaatttgttatc

SEQ ID NO: 1308680 - DNA, 15 bp, Homo sapiens
ccactaatttgttat

SEQ ID NO: 1308681 - DNA, 15 bp, Homo sapiens
gccactaatttgtta

SEQ ID NO: 1308682 - DNA, 15 bp, Homo sapiens
agccactaatttgtt

SEQ ID NO: 1308683 - DNA, 15 bp, Homo sapiens
aagccactaatttgt

SEQ ID NO: 1308684 - DNA, 15 bp, Homo sapiens
aaagccactaatttg

SEQ ID NO: 1308685 - DNA, 15 bp, Homo sapiens
taaagccactaattt

SEQ ID NO: 1308686 - DNA, 15 bp, Homo sapiens
ttaaagccactaatt

SEQ ID NO: 1308687 - DNA, 15 bp, Homo sapiens
tttaaagccactaat

SEQ ID NO: 1308688 - DNA, 15 bp, Homo sapiens
gtttaaagccactaa

SEQ ID NO: 1308689 - DNA, 15 bp, Homo sapiens
tgtttaaagccacta

SEQ ID NO: 1308690 - DNA, 15 bp, Homo sapiens
ttgtttaaagccact

SEQ ID NO: 1308691 - DNA, 15 bp, Homo sapiens
tttgtttaaagccac

SEQ ID NO: 1308692 - DNA, 15 bp, Homo sapiens
atttgtttaaagcca

SEQ ID NO: 1308693 - DNA, 15 bp, Homo sapiens
tatttgtttaaagcc

SEQ ID NO: 1308694 - DNA, 15 bp, Homo sapiens
atatttgtttaaagc

SEQ ID NO: 1308695 - DNA, 15 bp, Homo sapiens
aatatttgtttaaag

SEQ ID NO: 1308696 - DNA, 15 bp, Homo sapiens
aaatatttgtttaaa

SEQ ID NO: 1308697 - DNA, 15 bp, Homo sapiens
aaaatatttgtttaa

SEQ ID NO: 1308698 - DNA, 15 bp, Homo sapiens
taaaatatttgttta

SEQ ID NO: 1308699 - DNA, 15 bp, Homo sapiens
ataaaatatttgttt

SEQ ID NO: 1308700 - DNA, 15 bp, Homo sapiens
aataaaatatttgtt

SEQ ID NO: 1308701 - DNA, 15 bp, Homo sapiens
aaataaaatatttgt

SEQ ID NO: 1308702 - DNA, 15 bp, Homo sapiens
aaaataaaatatttg

SEQ ID NO: 1308703 - DNA, 15 bp, Homo sapiens
aagcaaaataaaata

SEQ ID NO: 1308704 - DNA, 15 bp, Homo sapiens
taagcaaaataaaat

SEQ ID NO: 1308705 - DNA, 15 bp, Homo sapiens
ataagcaaaataaaa

SEQ ID NO: 1308706 - DNA, 15 bp, Homo sapiens
cataagcaaaataaa

SEQ ID NO: 1308707 - DNA, 15 bp, Homo sapiens
tcataagcaaaataa

SEQ ID NO: 1308708 - DNA, 15 bp, Homo sapiens
atcataagcaaaata

SEQ ID NO: 1308709 - DNA, 15 bp, Homo sapiens
aatcataagcaaaat

SEQ ID NO: 1308710 - DNA, 15 bp, Homo sapiens
aaatcataagcaaaa

SEQ ID NO: 1308711 - DNA, 15 bp, Homo sapiens
aaaatcataagcaaa

SEQ ID NO: 1308712 - DNA, 15 bp, Homo sapiens
aaaaatcataagcaa

SEQ ID NO: 1308713 - DNA, 15 bp, Homo sapiens
aaaaaatcataagca

SEQ ID NO: 1308714 - DNA, 15 bp, Homo sapiens
caaaaaatcataagc

SEQ ID NO: 1308715 - DNA, 15 bp, Homo sapiens
ccaaaaaatcataag

SEQ ID NO: 1308716 - DNA, 15 bp, Homo sapiens
cccaaaaaatcataa

SEQ ID NO: 1308717 - DNA, 15 bp, Homo sapiens
acccaaaaaatcata

SEQ ID NO: 1308718 - DNA, 15 bp, Homo sapiens
gacccaaaaaatcat

SEQ ID NO: 1308719 - DNA, 15 bp, Homo sapiens
tgacccaaaaaatca

SEQ ID NO: 1308720 - DNA, 15 bp, Homo sapiens
ctgacccaaaaaatc

SEQ ID NO: 1308721 - DNA, 15 bp, Homo sapiens
cctgacccaaaaaat

SEQ ID NO: 1308722 - DNA, 15 bp, Homo sapiens
tcctgacccaaaaaa

SEQ ID NO: 1308723 - DNA, 15 bp, Homo sapiens
ttcctgacccaaaaa

SEQ ID NO: 1308724 - DNA, 15 bp, Homo sapiens
attcctgacccaaaa

SEQ ID NO: 1308725 - DNA, 15 bp, Homo sapiens
aattcctgacccaaa

SEQ ID NO: 1308726 - DNA, 15 bp, Homo sapiens
aaattcctgacccaa

SEQ ID NO: 1308727 - DNA, 15 bp, Homo sapiens
caaattcctgaccca

SEQ ID NO: 1308728 - DNA, 15 bp, Homo sapiens
ccaaattcctgaccc

SEQ ID NO: 1308729 - DNA, 15 bp, Homo sapiens
cccaaattcctgacc

SEQ ID NO: 1308730 - DNA, 15 bp, Homo sapiens
acccaaattcctgac

SEQ ID NO: 1308731 - DNA, 15 bp, Homo sapiens
aacccaaattcctga

SEQ ID NO: 1308732 - DNA, 15 bp, Homo sapiens
caacccaaattcctg

SEQ ID NO: 1308733 - DNA, 15 bp, Homo sapiens
tcaacccaaattcct

SEQ ID NO: 1308734 - DNA, 15 bp, Homo sapiens
ttcaacccaaattcc

SEQ ID NO: 1308735 - DNA, 15 bp, Homo sapiens
gttcaacccaaattc

SEQ ID NO: 1308736 - DNA, 15 bp, Homo sapiens
agttcaacccaaatt

SEQ ID NO: 1308737 - DNA, 15 bp, Homo sapiens
aagttcaacccaaat

SEQ ID NO: 1308738 - DNA, 15 bp, Homo sapiens
caagttcaacccaaa

SEQ ID NO: 1308739 - DNA, 15 bp, Homo sapiens
tcaagttcaacccaa

SEQ ID NO: 1308740 - DNA, 15 bp, Homo sapiens
gtcaagttcaaccca

SEQ ID NO: 1308741 - DNA, 15 bp, Homo sapiens
agtcaagttcaaccc

SEQ ID NO: 1308742 - DNA, 15 bp, Homo sapiens
cagtcaagttcaacc

SEQ ID NO: 1308743 - DNA, 15 bp, Homo sapiens
ccagtcaagttcaac

SEQ ID NO: 1308744 - DNA, 15 bp, Homo sapiens
cccagtcaagttcaa

SEQ ID NO: 1308745 - DNA, 15 bp, Homo sapiens
acccagtcaagttca

SEQ ID NO: 1308746 - DNA, 15 bp, Homo sapiens
cacccagtcaagttc

SEQ ID NO: 1308747 - DNA, 15 bp, Homo sapiens
ccacccagtcaagtt

SEQ ID NO: 1308748 - DNA, 15 bp, Homo sapiens
accacccagtcaagt

SEQ ID NO: 1308749 - DNA, 15 bp, Homo sapiens
aaccacccagtcaag

SEQ ID NO: 1308750 - DNA, 15 bp, Homo sapiens
aaaccacccagtcaa

SEQ ID NO: 1308751 - DNA, 15 bp, Homo sapiens
caaaccacccagtca

SEQ ID NO: 1308752 - DNA, 15 bp, Homo sapiens
acaaaccacccagtc

SEQ ID NO: 1308753 - DNA, 15 bp, Homo sapiens
gacaaaccacccagt

SEQ ID NO: 1308754 - DNA, 15 bp, Homo sapiens
agacaaaccacccag

SEQ ID NO: 1308755 - DNA, 15 bp, Homo sapiens
gagacaaaccaccca

SEQ ID NO: 1308756 - DNA, 15 bp, Homo sapiens
ggagacaaaccaccc

SEQ ID NO: 1308757 - DNA, 15 bp, Homo sapiens
cggagacaaaccacc

SEQ ID NO: 1308758 - DNA, 15 bp, Homo sapiens
tcggagacaaaccac

SEQ ID NO: 1308759 - DNA, 15 bp, Homo sapiens
gtcggagacaaacca

SEQ ID NO: 1308760 - DNA, 15 bp, Homo sapiens
agtcggagacaaacc

SEQ ID NO: 1308761 - DNA, 15 bp, Homo sapiens
tagtcggagacaaac

SEQ ID NO: 1308762 - DNA, 15 bp, Homo sapiens
atagtcggagacaaa

SEQ ID NO: 1308763 - DNA, 15 bp, Homo sapiens
catagtcggagacaa

SEQ ID NO: 1308764 - DNA, 15 bp, Homo sapiens
acatagtcggagaca

SEQ ID NO: 1308765 - DNA, 15 bp, Homo sapiens
cacatagtcggagac

SEQ ID NO: 1308766 - DNA, 15 bp, Homo sapiens
acacatagtcggaga

SEQ ID NO: 1308767 - DNA, 15 bp, Homo sapiens
gacacatagtcggag

SEQ ID NO: 1308768 - DNA, 15 bp, Homo sapiens
tgacacatagtcgga

SEQ ID NO: 1308769 - DNA, 15 bp, Homo sapiens
ctgacacatagtcgg

SEQ ID NO: 1308770 - DNA, 15 bp, Homo sapiens
gctgacacatagtcg

SEQ ID NO: 1308771 - DNA, 15 bp, Homo sapiens
tgctgacacatagtc

SEQ ID NO: 1308772 - DNA, 15 bp, Homo sapiens
ctgctgacacatagt

SEQ ID NO: 1308773 - DNA, 15 bp, Homo sapiens
cctgctgacacatag

SEQ ID NO: 1308774 - DNA, 15 bp, Homo sapiens
acctgctgacacata

SEQ ID NO: 1308775 - DNA, 15 bp, Homo sapiens
cacctgctgacacat

SEQ ID NO: 1308776 - DNA, 15 bp, Homo sapiens
gcacctgctgacaca

SEQ ID NO: 1308777 - DNA, 15 bp, Homo sapiens
ggcacctgctgacac

SEQ ID NO: 1308778 - DNA, 15 bp, Homo sapiens
aggcacctgctgaca

SEQ ID NO: 1308779 - DNA, 15 bp, Homo sapiens
caggcacctgctgac

SEQ ID NO: 1308780 - DNA, 15 bp, Homo sapiens
ccaggcacctgctga

SEQ ID NO: 1308781 - DNA, 15 bp, Homo sapiens
tccaggcacctgctg

SEQ ID NO: 1308782 - DNA, 15 bp, Homo sapiens
ctccaggcacctgct

SEQ ID NO: 1308783 - DNA, 15 bp, Homo sapiens
gctccaggcacctgc

SEQ ID NO: 1308784 - DNA, 15 bp, Homo sapiens
agctccaggcacctg

SEQ ID NO: 1308785 - DNA, 15 bp, Homo sapiens
tagctccaggcacct

SEQ ID NO: 1308786 - DNA, 15 bp, Homo sapiens
atagctccaggcacc

SEQ ID NO: 1308787 - DNA, 15 bp, Homo sapiens
tatagctccaggcac

SEQ ID NO: 1308788 - DNA, 15 bp, Homo sapiens
ctatagctccaggca

SEQ ID NO: 1308789 - DNA, 15 bp, Homo sapiens
cctatagctccaggc

SEQ ID NO: 1308790 - DNA, 15 bp, Homo sapiens
ccctatagctccagg

SEQ ID NO: 1308791 - DNA, 15 bp, Homo sapiens
accctatagctccag

SEQ ID NO: 1308792 - DNA, 15 bp, Homo sapiens
gaccctatagctcca

SEQ ID NO: 1308793 - DNA, 15 bp, Homo sapiens
ggaccctatagctcc

SEQ ID NO: 1308794 - DNA, 15 bp, Homo sapiens
tggaccctatagctc

SEQ ID NO: 1308795 - DNA, 15 bp, Homo sapiens
gtggaccctatagct

SEQ ID NO: 1308796 - DNA, 15 bp, Homo sapiens
agtggaccctatagc

SEQ ID NO: 1308797 - DNA, 15 bp, Homo sapiens
aagtggaccctatag

SEQ ID NO: 1308798 - DNA, 15 bp, Homo sapiens
gaagtggaccctata

SEQ ID NO: 1308799 - DNA, 15 bp, Homo sapiens
ggaagtggaccctat

SEQ ID NO: 1308800 - DNA, 15 bp, Homo sapiens
tggaagtggacccta

SEQ ID NO: 1308801 - DNA, 15 bp, Homo sapiens
ttggaagtggaccct

SEQ ID NO: 1308802 - DNA, 15 bp, Homo sapiens
cttggaagtggaccc

SEQ ID NO: 1308803 - DNA, 15 bp, Homo sapiens
tcttggaagtggacc

SEQ ID NO: 1308804 - DNA, 15 bp, Homo sapiens
atcttggaagtggac

SEQ ID NO: 1308805 - DNA, 15 bp, Homo sapiens
catcttggaagtgga

SEQ ID NO: 1308806 - DNA, 15 bp, Homo sapiens
gcatcttggaagtgg

SEQ ID NO: 1308807 - DNA, 15 bp, Homo sapiens
agcatcttggaagtg

SEQ ID NO: 1308808 - DNA, 15 bp, Homo sapiens
aagcatcttggaagt

SEQ ID NO: 1308809 - DNA, 15 bp, Homo sapiens
gaagcatcttggaag

SEQ ID NO: 1308810 - DNA, 15 bp, Homo sapiens
agaagcatcttggaa

SEQ ID NO: 1308811 - DNA, 15 bp, Homo sapiens
aagaagcatcttgga

SEQ ID NO: 1308812 - DNA, 15 bp, Homo sapiens
gaagaagcatcttgg

SEQ ID NO: 1308813 - DNA, 15 bp, Homo sapiens
tgaagaagcatcttg

SEQ ID NO: 1308814 - DNA, 15 bp, Homo sapiens
gtgaagaagcatctt

SEQ ID NO: 1308815 - DNA, 15 bp, Homo sapiens
agtgaagaagcatct

SEQ ID NO: 1308816 - DNA, 15 bp, Homo sapiens
gagtgaagaagcatc

SEQ ID NO: 1308817 - DNA, 15 bp, Homo sapiens
tgagtgaagaagcat

SEQ ID NO: 1308818 - DNA, 15 bp, Homo sapiens
gtgagtgaagaagca

SEQ ID NO: 1308819 - DNA, 15 bp, Homo sapiens
tgtgagtgaagaagc

SEQ ID NO: 1308820 - DNA, 15 bp, Homo sapiens
ctgtgagtgaagaag

SEQ ID NO: 1308821 - DNA, 15 bp, Homo sapiens
cctgtgagtgaagaa

SEQ ID NO: 1308822 - DNA, 15 bp, Homo sapiens
acctgtgagtgaaga

SEQ ID NO: 1308823 - DNA, 15 bp, Homo sapiens
gacctgtgagtgaag

SEQ ID NO: 1308824 - DNA, 15 bp, Homo sapiens
agacctgtgagtgaa

SEQ ID NO: 1308825 - DNA, 15 bp, Homo sapiens
cagacctgtgagtga

SEQ ID NO: 1308826 - DNA, 15 bp, Homo sapiens
ccagacctgtgagtg

SEQ ID NO: 1308827 - DNA, 15 bp, Homo sapiens
gccagacctgtgagt

SEQ ID NO: 1308828 - DNA, 15 bp, Homo sapiens
tgccagacctgtgag

SEQ ID NO: 1308829 - DNA, 15 bp, Homo sapiens
atgccagacctgtga

SEQ ID NO: 1308830 - DNA, 15 bp, Homo sapiens
gatgccagacctgtg

SEQ ID NO: 1308831 - DNA, 15 bp, Homo sapiens
agatgccagacctgt

SEQ ID NO: 1308832 - DNA, 15 bp, Homo sapiens
aagatgccagacctg

SEQ ID NO: 1308833 - DNA, 15 bp, Homo sapiens
taagatgccagacct

SEQ ID NO: 1308834 - DNA, 15 bp, Homo sapiens
gtaagatgccagacc

SEQ ID NO: 1308835 - DNA, 15 bp, Homo sapiens
ggtaagatgccagac

SEQ ID NO: 1308836 - DNA, 15 bp, Homo sapiens
cggtaagatgccaga

SEQ ID NO: 1308837 - DNA, 15 bp, Homo sapiens
gcggtaagatgccag

SEQ ID NO: 1308838 - DNA, 15 bp, Homo sapiens
agcggtaagatgcca

SEQ ID NO: 1308839 - DNA, 15 bp, Homo sapiens
gagcggtaagatgcc

SEQ ID NO: 1308840 - DNA, 15 bp, Homo sapiens
ggagcggtaagatgc

SEQ ID NO: 1308841 - DNA, 15 bp, Homo sapiens
aggagcggtaagatg

SEQ ID NO: 1308842 - DNA, 15 bp, Homo sapiens
aaggagcggtaagat

SEQ ID NO: 1308843 - DNA, 15 bp, Homo sapiens
caaggagcggtaaga

SEQ ID NO: 1308844 - DNA, 15 bp, Homo sapiens
ccaaggagcggtaag

SEQ ID NO: 1308845 - DNA, 15 bp, Homo sapiens
accaaggagcggtaa

SEQ ID NO: 1308846 - DNA, 15 bp, Homo sapiens
caccaaggagcggta

SEQ ID NO: 1308847 - DNA, 15 bp, Homo sapiens
gcaccaaggagcggt

SEQ ID NO: 1308848 - DNA, 15 bp, Homo sapiens
tgcaccaaggagcgg

SEQ ID NO: 1308849 - DNA, 15 bp, Homo sapiens
gtgcaccaaggagcg

SEQ ID NO: 1308850 - DNA, 15 bp, Homo sapiens
tgtgcaccaaggagc

SEQ ID NO: 1308851 - DNA, 15 bp, Homo sapiens
gtgtgcaccaaggag

SEQ ID NO: 1308852 - DNA, 15 bp, Homo sapiens
agtgtgcaccaagga

SEQ ID NO: 1308853 - DNA, 15 bp, Homo sapiens
gagtgtgcaccaagg

SEQ ID NO: 1308854 - DNA, 15 bp, Homo sapiens
tgagtgtgcaccaag

SEQ ID NO: 1308855 - DNA, 15 bp, Homo sapiens
ctgagtgtgcaccaa

SEQ ID NO: 1308856 - DNA, 15 bp, Homo sapiens
gctgagtgtgcacca

SEQ ID NO: 1308857 - DNA, 15 bp, Homo sapiens
agctgagtgtgcacc

SEQ ID NO: 1308858 - DNA, 15 bp, Homo sapiens
gagctgagtgtgcac

SEQ ID NO: 1308859 - DNA, 15 bp, Homo sapiens
agagctgagtgtgca

SEQ ID NO: 1308860 - DNA, 15 bp, Homo sapiens
gagagctgagtgtgc

SEQ ID NO: 1308861 - DNA, 15 bp, Homo sapiens
agagagctgagtgtg

SEQ ID NO: 1308862 - DNA, 15 bp, Homo sapiens
aagagagctgagtgt

SEQ ID NO: 1308863 - DNA, 15 bp, Homo sapiens
gaagagagctgagtg

SEQ ID NO: 1308864 - DNA, 15 bp, Homo sapiens
ggaagagagctgagt

SEQ ID NO: 1308865 - DNA, 15 bp, Homo sapiens
aggaagagagctgag

SEQ ID NO: 1308866 - DNA, 15 bp, Homo sapiens
gaggaagagagctga

SEQ ID NO: 1308867 - DNA, 15 bp, Homo sapiens
ggaggaagagagctg

SEQ ID NO: 1308868 - DNA, 15 bp, Homo sapiens
gggaggaagagagct

SEQ ID NO: 1308869 - DNA, 15 bp, Homo sapiens
tgggaggaagagagc

SEQ ID NO: 1308870 - DNA, 15 bp, Homo sapiens
atgggaggaagagag

SEQ ID NO: 1308871 - DNA, 15 bp, Homo sapiens
gatgggaggaagaga

SEQ ID NO: 1308872 - DNA, 15 bp, Homo sapiens
ggatgggaggaagag

SEQ ID NO: 1308873 - DNA, 15 bp, Homo sapiens
aggatgggaggaaga

SEQ ID NO: 1308874 - DNA, 15 bp, Homo sapiens
gaggatgggaggaag

SEQ ID NO: 1308875 - DNA, 15 bp, Homo sapiens
ggaggatgggaggaa

SEQ ID NO: 1308876 - DNA, 15 bp, Homo sapiens
gggaggatgggagga

SEQ ID NO: 1308877 - DNA, 15 bp, Homo sapiens
agggaggatgggagg

SEQ ID NO: 1308878 - DNA, 15 bp, Homo sapiens
gagggaggatgggag

SEQ ID NO: 1308879 - DNA, 15 bp, Homo sapiens
ggagggaggatggga

SEQ ID NO: 1308880 - DNA, 15 bp, Homo sapiens
gggagggaggatggg

SEQ ID NO: 1308881 - DNA, 15 bp, Homo sapiens
agggagggaggatgg

SEQ ID NO: 1308882 - DNA, 15 bp, Homo sapiens
tagggagggaggatg

SEQ ID NO: 1308883 - DNA, 15 bp, Homo sapiens
ctagggagggaggat

SEQ ID NO: 1308884 - DNA, 15 bp, Homo sapiens
tctagggagggagga

SEQ ID NO: 1308885 - DNA, 15 bp, Homo sapiens
ctctagggagggagg

SEQ ID NO: 1308886 - DNA, 15 bp, Homo sapiens
actctagggagggag

SEQ ID NO: 1308887 - DNA, 15 bp, Homo sapiens
cactctagggaggga

SEQ ID NO: 1308888 - DNA, 15 bp, Homo sapiens
ccactctagggaggg

SEQ ID NO: 1308889 - DNA, 15 bp, Homo sapiens
accactctagggagg

SEQ ID NO: 1308890 - DNA, 15 bp, Homo sapiens
aaccactctagggag

SEQ ID NO: 1308891 - DNA, 15 bp, Homo sapiens
taaccactctaggga

SEQ ID NO: 1308892 - DNA, 15 bp, Homo sapiens
ctaaccactctaggg

SEQ ID NO: 1308893 - DNA, 15 bp, Homo sapiens
tctaaccactctagg

SEQ ID NO: 1308894 - DNA, 15 bp, Homo sapiens
ttctaaccactctag

SEQ ID NO: 1308895 - DNA, 15 bp, Homo sapiens
attctaaccactcta

SEQ ID NO: 1308896 - DNA, 15 bp, Homo sapiens
cattctaaccactct

SEQ ID NO: 1308897 - DNA, 15 bp, Homo sapiens
acattctaaccactc

SEQ ID NO: 1308898 - DNA, 15 bp, Homo sapiens
aacattctaaccact

SEQ ID NO: 1308899 - DNA, 15 bp, Homo sapiens
taacattctaaccac

SEQ ID NO: 1308900 - DNA, 15 bp, Homo sapiens
ttaacattctaacca

SEQ ID NO: 1308901 - DNA, 15 bp, Homo sapiens
cttaacattctaacc

SEQ ID NO: 1308902 - DNA, 15 bp, Homo sapiens
gcttaacattctaac

SEQ ID NO: 1308903 - DNA, 15 bp, Homo sapiens
agcttaacattctaa

SEQ ID NO: 1308904 - DNA, 15 bp, Homo sapiens
aagcttaacattcta

SEQ ID NO: 1308905 - DNA, 15 bp, Homo sapiens
aaagcttaacattct

SEQ ID NO: 1308906 - DNA, 15 bp, Homo sapiens
caaagcttaacattc

SEQ ID NO: 1308907 - DNA, 15 bp, Homo sapiens
ccaaagcttaacatt

SEQ ID NO: 1308908 - DNA, 15 bp, Homo sapiens
tccaaagcttaacat

SEQ ID NO: 1308909 - DNA, 15 bp, Homo sapiens
ctccaaagcttaaca

SEQ ID NO: 1308910 - DNA, 15 bp, Homo sapiens
actccaaagcttaac

SEQ ID NO: 1308911 - DNA, 15 bp, Homo sapiens
aactccaaagcttaa

SEQ ID NO: 1308912 - DNA, 15 bp, Homo sapiens
aaactccaaagctta

SEQ ID NO: 1308913 - DNA, 15 bp, Homo sapiens
aaaactccaaagctt

SEQ ID NO: 1308914 - DNA, 15 bp, Homo sapiens
gaaaactccaaagct

SEQ ID NO: 1308915 - DNA, 15 bp, Homo sapiens
tgaaaactccaaagc

SEQ ID NO: 1308916 - DNA, 15 bp, Homo sapiens
gtgaaaactccaaag

SEQ ID NO: 1308917 - DNA, 15 bp, Homo sapiens
ggtgaaaactccaaa

SEQ ID NO: 1308918 - DNA, 15 bp, Homo sapiens
aggtgaaaactccaa

SEQ ID NO: 1308919 - DNA, 15 bp, Homo sapiens
caggtgaaaactcca

SEQ ID NO: 1308920 - DNA, 15 bp, Homo sapiens
gcaggtgaaaactcc

SEQ ID NO: 1308921 - DNA, 15 bp, Homo sapiens
tgcaggtgaaaactc

SEQ ID NO: 1308922 - DNA, 15 bp, Homo sapiens
ctgcaggtgaaaact

SEQ ID NO: 1308923 - DNA, 15 bp, Homo sapiens
tctgcaggtgaaaac

SEQ ID NO: 1308924 - DNA, 15 bp, Homo sapiens
ctctgcaggtgaaaa

SEQ ID NO: 1308925 - DNA, 15 bp, Homo sapiens
tctctgcaggtgaaa

SEQ ID NO: 1308926 - DNA, 15 bp, Homo sapiens
ctctctgcaggtgaa

SEQ ID NO: 1308927 - DNA, 15 bp, Homo sapiens
tctctctgcaggtga

SEQ ID NO: 1308928 - DNA, 15 bp, Homo sapiens
ttctctctgcaggtg

SEQ ID NO: 1308929 - DNA, 15 bp, Homo sapiens
cttctctctgcaggt

SEQ ID NO: 1308930 - DNA, 15 bp, Homo sapiens
tcttctctctgcagg

SEQ ID NO: 1308931 - DNA, 15 bp, Homo sapiens
atcttctctctgcag

SEQ ID NO: 1308932 - DNA, 15 bp, Homo sapiens
tatcttctctctgca

SEQ ID NO: 1308933 - DNA, 15 bp, Homo sapiens
ctatcttctctctgc

SEQ ID NO: 1308934 - DNA, 15 bp, Homo sapiens
cctatcttctctctg

SEQ ID NO: 1308935 - DNA, 15 bp, Homo sapiens
tcctatcttctctct

SEQ ID NO: 1308936 - DNA, 15 bp, Homo sapiens
ctcctatcttctctc

SEQ ID NO: 1308937 - DNA, 15 bp, Homo sapiens
tctcctatcttctct

SEQ ID NO: 1308938 - DNA, 15 bp, Homo sapiens
atctcctatcttctc

SEQ ID NO: 1308939 - DNA, 15 bp, Homo sapiens
aatctcctatcttct

SEQ ID NO: 1308940 - DNA, 15 bp, Homo sapiens
gaatctcctatcttc

SEQ ID NO: 1308941 - DNA, 15 bp, Homo sapiens
tgaatctcctatctt

SEQ ID NO: 1308942 - DNA, 15 bp, Homo sapiens
atgaatctcctatct

SEQ ID NO: 1308943 - DNA, 15 bp, Homo sapiens
tatgaatctcctatc

SEQ ID NO: 1308944 - DNA, 15 bp, Homo sapiens
ctatgaatctcctat

SEQ ID NO: 1308945 - DNA, 15 bp, Homo sapiens
actatgaatctccta

SEQ ID NO: 1308946 - DNA, 15 bp, Homo sapiens
cactatgaatctcct

SEQ ID NO: 1308947 - DNA, 15 bp, Homo sapiens
tcactatgaatctcc

SEQ ID NO: 1308948 - DNA, 15 bp, Homo sapiens
ttcactatgaatctc

SEQ ID NO: 1308949 - DNA, 15 bp, Homo sapiens
tttcactatgaatct

SEQ ID NO: 1308950 - DNA, 15 bp, Homo sapiens
ctttcactatgaatc

SEQ ID NO: 1308951 - DNA, 15 bp, Homo sapiens
actttcactatgaat

SEQ ID NO: 1308952 - DNA, 15 bp, Homo sapiens
tactttcactatgaa

SEQ ID NO: 1308953 - DNA, 15 bp, Homo sapiens
ctactttcactatga

SEQ ID NO: 1308954 - DNA, 15 bp, Homo sapiens
tctactttcactatg

SEQ ID NO: 1308955 - DNA, 15 bp, Homo sapiens
ctctactttcactat

SEQ ID NO: 1308956 - DNA, 15 bp, Homo sapiens
cctctactttcacta

SEQ ID NO: 1308957 - DNA, 15 bp, Homo sapiens
acctctactttcact

SEQ ID NO: 1308958 - DNA, 15 bp, Homo sapiens
aacctctactttcac

SEQ ID NO: 1308959 - DNA, 15 bp, Homo sapiens
aaacctctactttca

SEQ ID NO: 1308960 - DNA, 15 bp, Homo sapiens
aaaacctctactttc

SEQ ID NO: 1308961 - DNA, 15 bp, Homo sapiens
taaaacctctacttt

SEQ ID NO: 1308962 - DNA, 15 bp, Homo sapiens
ttaaaacctctactt

SEQ ID NO: 1308963 - DNA, 15 bp, Homo sapiens
cttaaaacctctact

SEQ ID NO: 1308964 - DNA, 15 bp, Homo sapiens
tcttaaaacctctac

SEQ ID NO: 1308965 - DNA, 15 bp, Homo sapiens
ttcttaaaacctcta

SEQ ID NO: 1308966 - DNA, 15 bp, Homo sapiens
tttcttaaaacctct

SEQ ID NO: 1308967 - DNA, 15 bp, Homo sapiens
gtttcttaaaacctc

SEQ ID NO: 1308968 - DNA, 15 bp, Homo sapiens
tgtttcttaaaacct

SEQ ID NO: 1308969 - DNA, 15 bp, Homo sapiens
ctgtttcttaaaacc

SEQ ID NO: 1308970 - DNA, 15 bp, Homo sapiens
cctgtttcttaaaac

SEQ ID NO: 1308971 - DNA, 15 bp, Homo sapiens
tcctgtttcttaaaa

SEQ ID NO: 1308972 - DNA, 15 bp, Homo sapiens
atcctgtttcttaaa

SEQ ID NO: 1308973 - DNA, 15 bp, Homo sapiens
tatcctgtttcttaa

SEQ ID NO: 1308974 - DNA, 15 bp, Homo sapiens
atatcctgtttctta

SEQ ID NO: 1308975 - DNA, 15 bp, Homo sapiens
aatatcctgtttctt

SEQ ID NO: 1308976 - DNA, 15 bp, Homo sapiens
aaatatcctgtttct

SEQ ID NO: 1308977 - DNA, 15 bp, Homo sapiens
caaatatcctgtttc

SEQ ID NO: 1308978 - DNA, 15 bp, Homo sapiens
ccaaatatcctgttt

SEQ ID NO: 1308979 - DNA, 15 bp, Homo sapiens
gccaaatatcctgtt

SEQ ID NO: 1308980 - DNA, 15 bp, Homo sapiens
tgccaaatatcctgt

SEQ ID NO: 1308981 - DNA, 15 bp, Homo sapiens
ctgccaaatatcctg

SEQ ID NO: 1308982 - DNA, 15 bp, Homo sapiens
cctgccaaatatcct

SEQ ID NO: 1308983 - DNA, 15 bp, Homo sapiens
ccctgccaaatatcc

SEQ ID NO: 1308984 - DNA, 15 bp, Homo sapiens
accctgccaaatatc

SEQ ID NO: 1308985 - DNA, 15 bp, Homo sapiens
caccctgccaaatat

SEQ ID NO: 1308986 - DNA, 15 bp, Homo sapiens
gcaccctgccaaata

SEQ ID NO: 1308987 - DNA, 15 bp, Homo sapiens
tgcaccctgccaaat

SEQ ID NO: 1308988 - DNA, 15 bp, Homo sapiens
ctgcaccctgccaaa

SEQ ID NO: 1308989 - DNA, 15 bp, Homo sapiens
actgcaccctgccaa

SEQ ID NO: 1308990 - DNA, 15 bp, Homo sapiens
cactgcaccctgcca

SEQ ID NO: 1308991 - DNA, 15 bp, Homo sapiens
acactgcaccctgcc

SEQ ID NO: 1308992 - DNA, 15 bp, Homo sapiens
gacactgcaccctgc

SEQ ID NO: 1308993 - DNA, 15 bp, Homo sapiens
agacactgcaccctg

SEQ ID NO: 1308994 - DNA, 15 bp, Homo sapiens
gagacactgcaccct

SEQ ID NO: 1308995 - DNA, 15 bp, Homo sapiens
tgagacactgcaccc

SEQ ID NO: 1308996 - DNA, 15 bp, Homo sapiens
gtgagacactgcacc

SEQ ID NO: 1308997 - DNA, 15 bp, Homo sapiens
tgtgagacactgcac

SEQ ID NO: 1308998 - DNA, 15 bp, Homo sapiens
gtgtgagacactgca

SEQ ID NO: 1308999 - DNA, 15 bp, Homo sapiens
ggtgtgagacactgc

SEQ ID NO: 1309000 - DNA, 15 bp, Homo sapiens
aggtgtgagacactg

SEQ ID NO: 1309001 - DNA, 15 bp, Homo sapiens
caggtgtgagacact

SEQ ID NO: 1309002 - DNA, 15 bp, Homo sapiens
acaggtgtgagacac

SEQ ID NO: 1309003 - DNA, 15 bp, Homo sapiens
tacaggtgtgagaca

SEQ ID NO: 1309004 - DNA, 15 bp, Homo sapiens
ttacaggtgtgagac

SEQ ID NO: 1309005 - DNA, 15 bp, Homo sapiens
attacaggtgtgaga

SEQ ID NO: 1309006 - DNA, 15 bp, Homo sapiens
tcaccttggcttccc

SEQ ID NO: 1309007 - DNA, 15 bp, Homo sapiens
ctcaccttggcttcc

SEQ ID NO: 1309008 - DNA, 15 bp, Homo sapiens
tctcaccttggcttc

SEQ ID NO: 1309009 - DNA, 15 bp, Homo sapiens
ctctcaccttggctt

SEQ ID NO: 1309010 - DNA, 15 bp, Homo sapiens
cctctcaccttggct

SEQ ID NO: 1309011 - DNA, 15 bp, Homo sapiens
tcctctcaccttggc

SEQ ID NO: 1309012 - DNA, 15 bp, Homo sapiens
atcctctcaccttgg

SEQ ID NO: 1309013 - DNA, 15 bp, Homo sapiens
aatcctctcaccttg

SEQ ID NO: 1309014 - DNA, 15 bp, Homo sapiens
caatcctctcacctt

SEQ ID NO: 1309015 - DNA, 15 bp, Homo sapiens
gcaatcctctcacct

SEQ ID NO: 1309016 - DNA, 15 bp, Homo sapiens
agcaatcctctcacc

SEQ ID NO: 1309017 - DNA, 15 bp, Homo sapiens
aagcaatcctctcac

SEQ ID NO: 1309018 - DNA, 15 bp, Homo sapiens
cgggctcaagcaatc

SEQ ID NO: 1309019 - DNA, 15 bp, Homo sapiens
actcgggctcaagca

SEQ ID NO: 1309020 - DNA, 15 bp, Homo sapiens
aactcgggctcaagc

SEQ ID NO: 1309021 - DNA, 15 bp, Homo sapiens
gaactcgggctcaag

SEQ ID NO: 1309022 - DNA, 15 bp, Homo sapiens
tgaactcgggctcaa

SEQ ID NO: 1309023 - DNA, 15 bp, Homo sapiens
ttgaactcgggctca

SEQ ID NO: 1309024 - DNA, 15 bp, Homo sapiens
cttgaactcgggctc

SEQ ID NO: 1309025 - DNA, 15 bp, Homo sapiens
tcttgaactcgggct

SEQ ID NO: 1309026 - DNA, 15 bp, Homo sapiens
gtcttgaactcgggc

SEQ ID NO: 1309027 - DNA, 15 bp, Homo sapiens
ggtcttgaactcggg

SEQ ID NO: 1309028 - DNA, 15 bp, Homo sapiens
tggtcttgaactcgg

SEQ ID NO: 1309029 - DNA, 15 bp, Homo sapiens
ctggtcttgaactcg

SEQ ID NO: 1309030 - DNA, 15 bp, Homo sapiens
aaggctggtcttgaa

SEQ ID NO: 1309031 - DNA, 15 bp, Homo sapiens
caaggctggtcttga

SEQ ID NO: 1309032 - DNA, 15 bp, Homo sapiens
ccaaggctggtcttg

SEQ ID NO: 1309033 - DNA, 15 bp, Homo sapiens
gccaaggctggtctt

SEQ ID NO: 1309034 - DNA, 15 bp, Homo sapiens
tgccaaggctggtct

SEQ ID NO: 1309035 - DNA, 15 bp, Homo sapiens
ttgccaaggctggtc

SEQ ID NO: 1309036 - DNA, 15 bp, Homo sapiens
gttgccaaggctggt

SEQ ID NO: 1309037 - DNA, 15 bp, Homo sapiens
tgttgccaaggctgg

SEQ ID NO: 1309038 - DNA, 15 bp, Homo sapiens
atgttgccaaggctg

SEQ ID NO: 1309039 - DNA, 15 bp, Homo sapiens
tatgttgccaaggct

SEQ ID NO: 1309040 - DNA, 15 bp, Homo sapiens
ctatgttgccaaggc

SEQ ID NO: 1309041 - DNA, 15 bp, Homo sapiens
cctatgttgccaagg

SEQ ID NO: 1309042 - DNA, 15 bp, Homo sapiens
ccctatgttgccaag

SEQ ID NO: 1309043 - DNA, 15 bp, Homo sapiens
tccctatgttgccaa

SEQ ID NO: 1309044 - DNA, 15 bp, Homo sapiens
ctccctatgttgcca

SEQ ID NO: 1309045 - DNA, 15 bp, Homo sapiens
agggtctccctatgt

SEQ ID NO: 1309046 - DNA, 15 bp, Homo sapiens
cagggtctccctatg

SEQ ID NO: 1309047 - DNA, 15 bp, Homo sapiens
acagggtctccctat

SEQ ID NO: 1309048 - DNA, 15 bp, Homo sapiens
gacagggtctcccta

SEQ ID NO: 1309049 - DNA, 15 bp, Homo sapiens
agacagggtctccct

SEQ ID NO: 1309050 - DNA, 15 bp, Homo sapiens
gagacagggtctccc

SEQ ID NO: 1309051 - DNA, 15 bp, Homo sapiens
agagacagggtctcc

SEQ ID NO: 1309052 - DNA, 15 bp, Homo sapiens
ctgtagagacagggt

SEQ ID NO: 1309053 - DNA, 15 bp, Homo sapiens
tctgtagagacaggg

SEQ ID NO: 1309054 - DNA, 15 bp, Homo sapiens
atctgtagagacagg

SEQ ID NO: 1309055 - DNA, 15 bp, Homo sapiens
tatctgtagagacag

SEQ ID NO: 1309056 - DNA, 15 bp, Homo sapiens
ttatctgtagagaca

SEQ ID NO: 1309057 - DNA, 15 bp, Homo sapiens
attatctgtagagac

SEQ ID NO: 1309058 - DNA, 15 bp, Homo sapiens
aattatctgtagaga

SEQ ID NO: 1309059 - DNA, 15 bp, Homo sapiens
aaattatctgtagag

SEQ ID NO: 1309060 - DNA, 15 bp, Homo sapiens
aaaattatctgtaga

SEQ ID NO: 1309061 - DNA, 15 bp, Homo sapiens
aaaaattatctgtag

SEQ ID NO: 1309062 - DNA, 15 bp, Homo sapiens
taaaaattatctgta

SEQ ID NO: 1309063 - DNA, 15 bp, Homo sapiens
ttaaaaattatctgt

SEQ ID NO: 1309064 - DNA, 15 bp, Homo sapiens
tttaaaaattatctg

SEQ ID NO: 1309065 - DNA, 15 bp, Homo sapiens
ttttaaaaattatct

SEQ ID NO: 1309066 - DNA, 15 bp, Homo sapiens
attttaaaaattatc

SEQ ID NO: 1309067 - DNA, 15 bp, Homo sapiens
aattttaaaaattat

SEQ ID NO: 1309068 - DNA, 15 bp, Homo sapiens
taattttaaaaatta

SEQ ID NO: 1309069 - DNA, 15 bp, Homo sapiens
ctaattttaaaaatt

SEQ ID NO: 1309070 - DNA, 15 bp, Homo sapiens
gctaattttaaaaat

SEQ ID NO: 1309071 - DNA, 15 bp, Homo sapiens
ggctaattttaaaaa

SEQ ID NO: 1309072 - DNA, 15 bp, Homo sapiens
tggctaattttaaaa

SEQ ID NO: 1309073 - DNA, 15 bp, Homo sapiens
ctggctaattttaaa

SEQ ID NO: 1309074 - DNA, 15 bp, Homo sapiens
cctggctaattttaa

SEQ ID NO: 1309075 - DNA, 15 bp, Homo sapiens
acctggctaatttta

SEQ ID NO: 1309076 - DNA, 15 bp, Homo sapiens
tgtgtgccaccacac

SEQ ID NO: 1309077 - DNA, 15 bp, Homo sapiens
gtgtgtgccaccaca

SEQ ID NO: 1309078 - DNA, 15 bp, Homo sapiens
ggtgtgtgccaccac

SEQ ID NO: 1309079 - DNA, 15 bp, Homo sapiens
aggtgtgtgccacca

SEQ ID NO: 1309080 - DNA, 15 bp, Homo sapiens
caggtgtgtgccacc

SEQ ID NO: 1309081 - DNA, 15 bp, Homo sapiens
acaggtgtgtgccac

SEQ ID NO: 1309082 - DNA, 15 bp, Homo sapiens
cacaggtgtgtgcca

SEQ ID NO: 1309083 - DNA, 15 bp, Homo sapiens
ccacaggtgtgtgcc

SEQ ID NO: 1309084 - DNA, 15 bp, Homo sapiens
accacaggtgtgtgc

SEQ ID NO: 1309085 - DNA, 15 bp, Homo sapiens
aaccacaggtgtgtg

SEQ ID NO: 1309086 - DNA, 15 bp, Homo sapiens
gaaccacaggtgtgt

SEQ ID NO: 1309087 - DNA, 15 bp, Homo sapiens
agaaccacaggtgtg

SEQ ID NO: 1309088 - DNA, 15 bp, Homo sapiens
aagaaccacaggtgt

SEQ ID NO: 1309089 - DNA, 15 bp, Homo sapiens
caagaaccacaggtg

SEQ ID NO: 1309090 - DNA, 15 bp, Homo sapiens
ccaagaaccacaggt

SEQ ID NO: 1309091 - DNA, 15 bp, Homo sapiens
cccaagaaccacagg

SEQ ID NO: 1309092 - DNA, 15 bp, Homo sapiens
tcccaagaaccacag

SEQ ID NO: 1309093 - DNA, 15 bp, Homo sapiens
ctcccaagaaccaca

SEQ ID NO: 1309094 - DNA, 15 bp, Homo sapiens
cctcccaagaaccac

SEQ ID NO: 1309095 - DNA, 15 bp, Homo sapiens
gcctcccaagaacca

SEQ ID NO: 1309096 - DNA, 15 bp, Homo sapiens
agcctcccaagaacc

SEQ ID NO: 1309097 - DNA, 15 bp, Homo sapiens
cagcctcccaagaac

SEQ ID NO: 1309098 - DNA, 15 bp, Homo sapiens
tcagcctcccaagaa

SEQ ID NO: 1309099 - DNA, 15 bp, Homo sapiens
ttcagcctcccaaga

SEQ ID NO: 1309100 - DNA, 15 bp, Homo sapiens
gttcagcctcccaag

SEQ ID NO: 1309101 - DNA, 15 bp, Homo sapiens
agttcagcctcccaa

SEQ ID NO: 1309102 - DNA, 15 bp, Homo sapiens
cagttcagcctccca

SEQ ID NO: 1309103 - DNA, 15 bp, Homo sapiens
ccagttcagcctccc

SEQ ID NO: 1309104 - DNA, 15 bp, Homo sapiens
cccagttcagcctcc

SEQ ID NO: 1309105 - DNA, 15 bp, Homo sapiens
tcccagttcagcctc

SEQ ID NO: 1309106 - DNA, 15 bp, Homo sapiens
ctcccagttcagcct

SEQ ID NO: 1309107 - DNA, 15 bp, Homo sapiens
tctcccagttcagcc

SEQ ID NO: 1309108 - DNA, 15 bp, Homo sapiens
ttctcccagttcagc

SEQ ID NO: 1309109 - DNA, 15 bp, Homo sapiens
attctcccagttcag

SEQ ID NO: 1309110 - DNA, 15 bp, Homo sapiens
aattctcccagttca

SEQ ID NO: 1309111 - DNA, 15 bp, Homo sapiens
caattctcccagttc

SEQ ID NO: 1309112 - DNA, 15 bp, Homo sapiens
gcaattctcccagtt

SEQ ID NO: 1309113 - DNA, 15 bp, Homo sapiens
ggcaattctcccagt

SEQ ID NO: 1309114 - DNA, 15 bp, Homo sapiens
aggcaattctcccag

SEQ ID NO: 1309115 - DNA, 15 bp, Homo sapiens
caggcaattctccca

SEQ ID NO: 1309116 - DNA, 15 bp, Homo sapiens
tcaggcaattctccc

SEQ ID NO: 1309117 - DNA, 15 bp, Homo sapiens
ctcaggcaattctcc

SEQ ID NO: 1309118 - DNA, 15 bp, Homo sapiens
gctcaggcaattctc

SEQ ID NO: 1309119 - DNA, 15 bp, Homo sapiens
ggctcaggcaattct

SEQ ID NO: 1309120 - DNA, 15 bp, Homo sapiens
aggctcaggcaattc

SEQ ID NO: 1309121 - DNA, 15 bp, Homo sapiens
ccaggctcaggcaat

SEQ ID NO: 1309122 - DNA, 15 bp, Homo sapiens
cccaggctcaggcaa

SEQ ID NO: 1309123 - DNA, 15 bp, Homo sapiens
tcccaggctcaggca

SEQ ID NO: 1309124 - DNA, 15 bp, Homo sapiens
atcccaggctcaggc

SEQ ID NO: 1309125 - DNA, 15 bp, Homo sapiens
catcccaggctcagg

SEQ ID NO: 1309126 - DNA, 15 bp, Homo sapiens
acatcccaggctcag

SEQ ID NO: 1309127 - DNA, 15 bp, Homo sapiens
aacatcccaggctca

SEQ ID NO: 1309128 - DNA, 15 bp, Homo sapiens
taacatcccaggctc

SEQ ID NO: 1309129 - DNA, 15 bp, Homo sapiens
ttaacatcccaggct

SEQ ID NO: 1309130 - DNA, 15 bp, Homo sapiens
cttaacatcccaggc

SEQ ID NO: 1309131 - DNA, 15 bp, Homo sapiens
ccttaacatcccagg

SEQ ID NO: 1309132 - DNA, 15 bp, Homo sapiens
gccttaacatcccag

SEQ ID NO: 1309133 - DNA, 15 bp, Homo sapiens
agccttaacatccca

SEQ ID NO: 1309134 - DNA, 15 bp, Homo sapiens
cagccttaacatccc

SEQ ID NO: 1309135 - DNA, 15 bp, Homo sapiens
gcagccttaacatcc

SEQ ID NO: 1309136 - DNA, 15 bp, Homo sapiens
tgcagccttaacatc

SEQ ID NO: 1309137 - DNA, 15 bp, Homo sapiens
ctgcagccttaacat

SEQ ID NO: 1309138 - DNA, 15 bp, Homo sapiens
actgcagccttaaca

SEQ ID NO: 1309139 - DNA, 15 bp, Homo sapiens
tgtagtacagtgaca

SEQ ID NO: 1309140 - DNA, 15 bp, Homo sapiens
atgtagtacagtgac

SEQ ID NO: 1309141 - DNA, 15 bp, Homo sapiens
aatgtagtacagtga

SEQ ID NO: 1309142 - DNA, 15 bp, Homo sapiens
taatgtagtacagtg

SEQ ID NO: 1309143 - DNA, 15 bp, Homo sapiens
ataatgtagtacagt

SEQ ID NO: 1309144 - DNA, 15 bp, Homo sapiens
aataatgtagtacag

SEQ ID NO: 1309145 - DNA, 15 bp, Homo sapiens
aaataatgtagtaca

SEQ ID NO: 1309146 - DNA, 15 bp, Homo sapiens
gaaataatgtagtac

SEQ ID NO: 1309147 - DNA, 15 bp, Homo sapiens
agaaataatgtagta

SEQ ID NO: 1309148 - DNA, 15 bp, Homo sapiens
cagaaataatgtagt

SEQ ID NO: 1309149 - DNA, 15 bp, Homo sapiens
acagaaataatgtag

SEQ ID NO: 1309150 - DNA, 15 bp, Homo sapiens
cacagaaataatgta

SEQ ID NO: 1309151 - DNA, 15 bp, Homo sapiens
tcacagaaataatgt

SEQ ID NO: 1309152 - DNA, 15 bp, Homo sapiens
ttcacagaaataatg

SEQ ID NO: 1309153 - DNA, 15 bp, Homo sapiens
tttcacagaaataat

SEQ ID NO: 1309154 - DNA, 15 bp, Homo sapiens
atttcacagaaataa

SEQ ID NO: 1309155 - DNA, 15 bp, Homo sapiens
gatttcacagaaata

SEQ ID NO: 1309156 - DNA, 15 bp, Homo sapiens
tgatttcacagaaat

SEQ ID NO: 1309157 - DNA, 15 bp, Homo sapiens
atgatttcacagaaa

SEQ ID NO: 1309158 - DNA, 15 bp, Homo sapiens
aatgatttcacagaa

SEQ ID NO: 1309159 - DNA, 15 bp, Homo sapiens
gaatgatttcacaga

SEQ ID NO: 1309160 - DNA, 15 bp, Homo sapiens
tgaatgatttcacag

SEQ ID NO: 1309161 - DNA, 15 bp, Homo sapiens
atgaatgatttcaca

SEQ ID NO: 1309162 - DNA, 15 bp, Homo sapiens
catgaatgatttcac

SEQ ID NO: 1309163 - DNA, 15 bp, Homo sapiens
gcatgaatgatttca

SEQ ID NO: 1309164 - DNA, 15 bp, Homo sapiens
agcatgaatgatttc

SEQ ID NO: 1309165 - DNA, 15 bp, Homo sapiens
cagcatgaatgattt

SEQ ID NO: 1309166 - DNA, 15 bp, Homo sapiens
acagcatgaatgatt

SEQ ID NO: 1309167 - DNA, 15 bp, Homo sapiens
aacagcatgaatgat

SEQ ID NO: 1309168 - DNA, 15 bp, Homo sapiens
aaacagcatgaatga

SEQ ID NO: 1309169 - DNA, 15 bp, Homo sapiens
aaaacagcatgaatg

SEQ ID NO: 1309170 - DNA, 15 bp, Homo sapiens
aaaaacagcatgaat

SEQ ID NO: 1309171 - DNA, 15 bp, Homo sapiens
taaaaacagcatgaa

SEQ ID NO: 1309172 - DNA, 15 bp, Homo sapiens
gtaaaaacagcatga

SEQ ID NO: 1309173 - DNA, 15 bp, Homo sapiens
agtaaaaacagcatg

SEQ ID NO: 1309174 - DNA, 15 bp, Homo sapiens
tagtaaaaacagcat

SEQ ID NO: 1309175 - DNA, 15 bp, Homo sapiens
gtagtaaaaacagca

SEQ ID NO: 1309176 - DNA, 15 bp, Homo sapiens
ggtagtaaaaacagc

SEQ ID NO: 1309177 - DNA, 15 bp, Homo sapiens
aggtagtaaaaacag

SEQ ID NO: 1309178 - DNA, 15 bp, Homo sapiens
gaggtagtaaaaaca

SEQ ID NO: 1309179 - DNA, 15 bp, Homo sapiens
agaggtagtaaaaac

SEQ ID NO: 1309180 - DNA, 15 bp, Homo sapiens
tagaggtagtaaaaa

SEQ ID NO: 1309181 - DNA, 15 bp, Homo sapiens
atagaggtagtaaaa

SEQ ID NO: 1309182 - DNA, 15 bp, Homo sapiens
tatagaggtagtaaa

SEQ ID NO: 1309183 - DNA, 15 bp, Homo sapiens
ttatagaggtagtaa

SEQ ID NO: 1309184 - DNA, 15 bp, Homo sapiens
attatagaggtagta

SEQ ID NO: 1309185 - DNA, 15 bp, Homo sapiens
tattatagaggtagt

SEQ ID NO: 1309186 - DNA, 15 bp, Homo sapiens
atattatagaggtag

SEQ ID NO: 1309187 - DNA, 15 bp, Homo sapiens
tatattatagaggta

SEQ ID NO: 1309188 - DNA, 15 bp, Homo sapiens
atatattatagaggt

SEQ ID NO: 1309189 - DNA, 15 bp, Homo sapiens
tatatattatagagg

SEQ ID NO: 1309190 - DNA, 15 bp, Homo sapiens
ctatatattatagag

SEQ ID NO: 1309191 - DNA, 15 bp, Homo sapiens
actatatattataga

SEQ ID NO: 1309192 - DNA, 15 bp, Homo sapiens
gactatatattatag

SEQ ID NO: 1309193 - DNA, 15 bp, Homo sapiens
tgactatatattata

SEQ ID NO: 1309194 - DNA, 15 bp, Homo sapiens
ctgactatatattat

SEQ ID NO: 1309195 - DNA, 15 bp, Homo sapiens
cctgactatatatta

SEQ ID NO: 1309196 - DNA, 15 bp, Homo sapiens
gcctgactatatatt

SEQ ID NO: 1309197 - DNA, 15 bp, Homo sapiens
tgcctgactatatat

SEQ ID NO: 1309198 - DNA, 15 bp, Homo sapiens
atgcctgactatata

SEQ ID NO: 1309199 - DNA, 15 bp, Homo sapiens
tatgcctgactatat

SEQ ID NO: 1309200 - DNA, 15 bp, Homo sapiens
atatgcctgactata

SEQ ID NO: 1309201 - DNA, 15 bp, Homo sapiens
catatgcctgactat

SEQ ID NO: 1309202 - DNA, 15 bp, Homo sapiens
ccatatgcctgacta

SEQ ID NO: 1309203 - DNA, 15 bp, Homo sapiens
cccatatgcctgact

SEQ ID NO: 1309204 - DNA, 15 bp, Homo sapiens
tcccatatgcctgac

SEQ ID NO: 1309205 - DNA, 15 bp, Homo sapiens
gtcccatatgcctga

SEQ ID NO: 1309206 - DNA, 15 bp, Homo sapiens
tgtcccatatgcctg

SEQ ID NO: 1309207 - DNA, 15 bp, Homo sapiens
ctgtcccatatgcct

SEQ ID NO: 1309208 - DNA, 15 bp, Homo sapiens
actgtcccatatgcc

SEQ ID NO: 1309209 - DNA, 15 bp, Homo sapiens
tactgtcccatatgc

SEQ ID NO: 1309210 - DNA, 15 bp, Homo sapiens
atactgtcccatatg

SEQ ID NO: 1309211 - DNA, 15 bp, Homo sapiens
tatactgtcccatat

SEQ ID NO: 1309212 - DNA, 15 bp, Homo sapiens
ttatactgtcccata

SEQ ID NO: 1309213 - DNA, 15 bp, Homo sapiens
tttatactgtcccat

SEQ ID NO: 1309214 - DNA, 15 bp, Homo sapiens
ctttatactgtccca

SEQ ID NO: 1309215 - DNA, 15 bp, Homo sapiens
cctttatactgtccc

SEQ ID NO: 1309216 - DNA, 15 bp, Homo sapiens
ccctttatactgtcc

SEQ ID NO: 1309217 - DNA, 15 bp, Homo sapiens
tccctttatactgtc

SEQ ID NO: 1309218 - DNA, 15 bp, Homo sapiens
ctccctttatactgt

SEQ ID NO: 1309219 - DNA, 15 bp, Homo sapiens
gctccctttatactg

SEQ ID NO: 1309220 - DNA, 15 bp, Homo sapiens
tgctccctttatact

SEQ ID NO: 1309221 - DNA, 15 bp, Homo sapiens
ttgctccctttatac

SEQ ID NO: 1309222 - DNA, 15 bp, Homo sapiens
attgctccctttata

SEQ ID NO: 1309223 - DNA, 15 bp, Homo sapiens
tattgctccctttat

SEQ ID NO: 1309224 - DNA, 15 bp, Homo sapiens
gtattgctcccttta

SEQ ID NO: 1309225 - DNA, 15 bp, Homo sapiens
tgtattgctcccttt

SEQ ID NO: 1309226 - DNA, 15 bp, Homo sapiens
ttgtattgctccctt

SEQ ID NO: 1309227 - DNA, 15 bp, Homo sapiens
tttgtattgctccct

SEQ ID NO: 1309228 - DNA, 15 bp, Homo sapiens
atttgtattgctccc

SEQ ID NO: 1309229 - DNA, 15 bp, Homo sapiens
tatttgtattgctcc

SEQ ID NO: 1309230 - DNA, 15 bp, Homo sapiens
ctatttgtattgctc

SEQ ID NO: 1309231 - DNA, 15 bp, Homo sapiens
actatttgtattgct

SEQ ID NO: 1309232 - DNA, 15 bp, Homo sapiens
tactatttgtattgc

SEQ ID NO: 1309233 - DNA, 15 bp, Homo sapiens
ttactatttgtattg

SEQ ID NO: 1309234 - DNA, 15 bp, Homo sapiens
cttactatttgtatt

SEQ ID NO: 1309235 - DNA, 15 bp, Homo sapiens
acttactatttgtat

SEQ ID NO: 1309236 - DNA, 15 bp, Homo sapiens
aacttactatttgta

SEQ ID NO: 1309237 - DNA, 15 bp, Homo sapiens
taacttactatttgt

SEQ ID NO: 1309238 - DNA, 15 bp, Homo sapiens
ttaacttactatttg

SEQ ID NO: 1309239 - DNA, 15 bp, Homo sapiens
attaacttactattt

SEQ ID NO: 1309240 - DNA, 15 bp, Homo sapiens
aattaacttactatt

SEQ ID NO: 1309241 - DNA, 15 bp, Homo sapiens
aaattaacttactat

SEQ ID NO: 1309242 - DNA, 15 bp, Homo sapiens
aaaattaacttacta

SEQ ID NO: 1309243 - DNA, 15 bp, Homo sapiens
taaaattaacttact

SEQ ID NO: 1309244 - DNA, 15 bp, Homo sapiens
ataaaattaacttac

SEQ ID NO: 1309245 - DNA, 15 bp, Homo sapiens
aataaaattaactta

SEQ ID NO: 1309246 - DNA, 15 bp, Homo sapiens
gaataaaattaactt

SEQ ID NO: 1309247 - DNA, 15 bp, Homo sapiens
agaataaaattaact

SEQ ID NO: 1309248 - DNA, 15 bp, Homo sapiens
tagaataaaattaac

SEQ ID NO: 1309249 - DNA, 15 bp, Homo sapiens
ttagaataaaattaa

SEQ ID NO: 1309250 - DNA, 15 bp, Homo sapiens
cttagaataaaatta

SEQ ID NO: 1309251 - DNA, 15 bp, Homo sapiens
acttagaataaaatt

SEQ ID NO: 1309252 - DNA, 15 bp, Homo sapiens
cacttagaataaaat

SEQ ID NO: 1309253 - DNA, 15 bp, Homo sapiens
tcacttagaataaaa

SEQ ID NO: 1309254 - DNA, 15 bp, Homo sapiens
ttcacttagaataaa

SEQ ID NO: 1309255 - DNA, 15 bp, Homo sapiens
tttcacttagaataa

SEQ ID NO: 1309256 - DNA, 15 bp, Homo sapiens
ctttcacttagaata

SEQ ID NO: 1309257 - DNA, 15 bp, Homo sapiens
gctttcacttagaat

SEQ ID NO: 1309258 - DNA, 15 bp, Homo sapiens
tgctttcacttagaa

SEQ ID NO: 1309259 - DNA, 15 bp, Homo sapiens
atgctttcacttaga

SEQ ID NO: 1309260 - DNA, 15 bp, Homo sapiens
tatgctttcacttag

SEQ ID NO: 1309261 - DNA, 15 bp, Homo sapiens
ttatgctttcactta

SEQ ID NO: 1309262 - DNA, 15 bp, Homo sapiens
attatgctttcactt

SEQ ID NO: 1309263 - DNA, 15 bp, Homo sapiens
tattatgctttcact

SEQ ID NO: 1309264 - DNA, 15 bp, Homo sapiens
atattatgctttcac

SEQ ID NO: 1309265 - DNA, 15 bp, Homo sapiens
catattatgctttca

SEQ ID NO: 1309266 - DNA, 15 bp, Homo sapiens
acatattatgctttc

SEQ ID NO: 1309267 - DNA, 15 bp, Homo sapiens
tacatattatgcttt

SEQ ID NO: 1309268 - DNA, 15 bp, Homo sapiens
atacatattatgctt

SEQ ID NO: 1309269 - DNA, 15 bp, Homo sapiens
catacatattatgct

SEQ ID NO: 1309270 - DNA, 15 bp, Homo sapiens
acatacatattatgc

SEQ ID NO: 1309271 - DNA, 15 bp, Homo sapiens
cacatacatattatg

SEQ ID NO: 1309272 - DNA, 15 bp, Homo sapiens
acacatacatattat

SEQ ID NO: 1309273 - DNA, 15 bp, Homo sapiens
tacacatacatatta

SEQ ID NO: 1309274 - DNA, 15 bp, Homo sapiens
atacacatacatatt

SEQ ID NO: 1309275 - DNA, 15 bp, Homo sapiens
aatacacatacatat

SEQ ID NO: 1309276 - DNA, 15 bp, Homo sapiens
aaatacacatacata

SEQ ID NO: 1309277 - DNA, 15 bp, Homo sapiens
aaaatacacatacat

SEQ ID NO: 1309278 - DNA, 15 bp, Homo sapiens
aaaaatacacataca

SEQ ID NO: 1309279 - DNA, 15 bp, Homo sapiens
aaaaaatacacatac

SEQ ID NO: 1309280 - DNA, 15 bp, Homo sapiens
taaaaaatacacata

SEQ ID NO: 1309281 - DNA, 15 bp, Homo sapiens
ataaaaaatacacat

SEQ ID NO: 1309282 - DNA, 15 bp, Homo sapiens
gataaaaaatacaca

SEQ ID NO: 1309283 - DNA, 15 bp, Homo sapiens
ggataaaaaatacac

SEQ ID NO: 1309284 - DNA, 15 bp, Homo sapiens
aggataaaaaataca

SEQ ID NO: 1309285 - DNA, 15 bp, Homo sapiens
caggataaaaaatac

SEQ ID NO: 1309286 - DNA, 15 bp, Homo sapiens
tcaggataaaaaata

SEQ ID NO: 1309287 - DNA, 15 bp, Homo sapiens
ctcaggataaaaaat

SEQ ID NO: 1309288 - DNA, 15 bp, Homo sapiens
actcaggataaaaaa

SEQ ID NO: 1309289 - DNA, 15 bp, Homo sapiens
tactcaggataaaaa

SEQ ID NO: 1309290 - DNA, 15 bp, Homo sapiens
ttactcaggataaaa

SEQ ID NO: 1309291 - DNA, 15 bp, Homo sapiens
gttactcaggataaa

SEQ ID NO: 1309292 - DNA, 15 bp, Homo sapiens
tgttactcaggataa

SEQ ID NO: 1309293 - DNA, 15 bp, Homo sapiens
ttgttactcaggata

SEQ ID NO: 1309294 - DNA, 15 bp, Homo sapiens
cttgttactcaggat

SEQ ID NO: 1309295 - DNA, 15 bp, Homo sapiens
ccttgttactcagga

SEQ ID NO: 1309296 - DNA, 15 bp, Homo sapiens
cccttgttactcagg

SEQ ID NO: 1309297 - DNA, 15 bp, Homo sapiens
tcccttgttactcag

SEQ ID NO: 1309298 - DNA, 15 bp, Homo sapiens
ttcccttgttactca

SEQ ID NO: 1309299 - DNA, 15 bp, Homo sapiens
cttcccttgttactc

SEQ ID NO: 1309300 - DNA, 15 bp, Homo sapiens
acttcccttgttact

SEQ ID NO: 1309301 - DNA, 15 bp, Homo sapiens
cacttcccttgttac

SEQ ID NO: 1309302 - DNA, 15 bp, Homo sapiens
acacttcccttgtta

SEQ ID NO: 1309303 - DNA, 15 bp, Homo sapiens
aacacttcccttgtt

SEQ ID NO: 1309304 - DNA, 15 bp, Homo sapiens
aaacacttcccttgt

SEQ ID NO: 1309305 - DNA, 15 bp, Homo sapiens
aaaacacttcccttg

SEQ ID NO: 1309306 - DNA, 15 bp, Homo sapiens
caaaacacttccctt

SEQ ID NO: 1309307 - DNA, 15 bp, Homo sapiens
gcaaaacacttccct

SEQ ID NO: 1309308 - DNA, 15 bp, Homo sapiens
ggcaaaacacttccc

SEQ ID NO: 1309309 - DNA, 15 bp, Homo sapiens
aggcaaaacacttcc

SEQ ID NO: 1309310 - DNA, 15 bp, Homo sapiens
taggcaaaacacttc

SEQ ID NO: 1309311 - DNA, 15 bp, Homo sapiens
ctaggcaaaacactt

SEQ ID NO: 1309312 - DNA, 15 bp, Homo sapiens
cctaggcaaaacact

SEQ ID NO: 1309313 - DNA, 15 bp, Homo sapiens
tcctaggcaaaacac

SEQ ID NO: 1309314 - DNA, 15 bp, Homo sapiens
ctcctaggcaaaaca

SEQ ID NO: 1309315 - DNA, 15 bp, Homo sapiens
gctcctaggcaaaac

SEQ ID NO: 1309316 - DNA, 15 bp, Homo sapiens
agctcctaggcaaaa

SEQ ID NO: 1309317 - DNA, 15 bp, Homo sapiens
tagctcctaggcaaa

SEQ ID NO: 1309318 - DNA, 15 bp, Homo sapiens
ttagctcctaggcaa

SEQ ID NO: 1309319 - DNA, 15 bp, Homo sapiens
attagctcctaggca

SEQ ID NO: 1309320 - DNA, 15 bp, Homo sapiens
tattagctcctaggc

SEQ ID NO: 1309321 - DNA, 15 bp, Homo sapiens
ttattagctcctagg

SEQ ID NO: 1309322 - DNA, 15 bp, Homo sapiens
cttattagctcctag

SEQ ID NO: 1309323 - DNA, 15 bp, Homo sapiens
acttattagctccta

SEQ ID NO: 1309324 - DNA, 15 bp, Homo sapiens
tacttattagctcct

SEQ ID NO: 1309325 - DNA, 15 bp, Homo sapiens
ttacttattagctcc

SEQ ID NO: 1309326 - DNA, 15 bp, Homo sapiens
gttacttattagctc

SEQ ID NO: 1309327 - DNA, 15 bp, Homo sapiens
tgttacttattagct

SEQ ID NO: 1309328 - DNA, 15 bp, Homo sapiens
ttgttacttattagc

SEQ ID NO: 1309329 - DNA, 15 bp, Homo sapiens
cttgttacttattag

SEQ ID NO: 1309330 - DNA, 15 bp, Homo sapiens
tcttgttacttatta

SEQ ID NO: 1309331 - DNA, 15 bp, Homo sapiens
ttcttgttacttatt

SEQ ID NO: 1309332 - DNA, 15 bp, Homo sapiens
tttcttgttacttat

SEQ ID NO: 1309333 - DNA, 15 bp, Homo sapiens
ctttcttgttactta

SEQ ID NO: 1309334 - DNA, 15 bp, Homo sapiens
cctttcttgttactt

SEQ ID NO: 1309335 - DNA, 15 bp, Homo sapiens
ccctttcttgttact

SEQ ID NO: 1309336 - DNA, 15 bp, Homo sapiens
tccctttcttgttac

SEQ ID NO: 1309337 - DNA, 15 bp, Homo sapiens
ttccctttcttgtta

SEQ ID NO: 1309338 - DNA, 15 bp, Homo sapiens
tttccctttcttgtt

SEQ ID NO: 1309339 - DNA, 15 bp, Homo sapiens
ttttccctttcttgt

SEQ ID NO: 1309340 - DNA, 15 bp, Homo sapiens
cttttccctttcttg

SEQ ID NO: 1309341 - DNA, 15 bp, Homo sapiens
acttttccctttctt

SEQ ID NO: 1309342 - DNA, 15 bp, Homo sapiens
tacttttccctttct

SEQ ID NO: 1309343 - DNA, 15 bp, Homo sapiens
ttacttttccctttc

SEQ ID NO: 1309344 - DNA, 15 bp, Homo sapiens
gttacttttcccttt

SEQ ID NO: 1309345 - DNA, 15 bp, Homo sapiens
tgttacttttccctt

SEQ ID NO: 1309346 - DNA, 15 bp, Homo sapiens
atgttacttttccct

SEQ ID NO: 1309347 - DNA, 15 bp, Homo sapiens
aatgttacttttccc

SEQ ID NO: 1309348 - DNA, 15 bp, Homo sapiens
aaatgttacttttcc

SEQ ID NO: 1309349 - DNA, 15 bp, Homo sapiens
caaatgttacttttc

SEQ ID NO: 1309350 - DNA, 15 bp, Homo sapiens
acaaatgttactttt

SEQ ID NO: 1309351 - DNA, 15 bp, Homo sapiens
aacaaatgttacttt

SEQ ID NO: 1309352 - DNA, 15 bp, Homo sapiens
caacaaatgttactt

SEQ ID NO: 1309353 - DNA, 15 bp, Homo sapiens
tcaacaaatgttact

SEQ ID NO: 1309354 - DNA, 15 bp, Homo sapiens
gtcaacaaatgttac

SEQ ID NO: 1309355 - DNA, 15 bp, Homo sapiens
agtcaacaaatgtta

SEQ ID NO: 1309356 - DNA, 15 bp, Homo sapiens
tagtcaacaaatgtt

SEQ ID NO: 1309357 - DNA, 15 bp, Homo sapiens
ctagtcaacaaatgt

SEQ ID NO: 1309358 - DNA, 15 bp, Homo sapiens
gctagtcaacaaatg

SEQ ID NO: 1309359 - DNA, 15 bp, Homo sapiens
agctagtcaacaaat

SEQ ID NO: 1309360 - DNA, 15 bp, Homo sapiens
gagctagtcaacaaa

SEQ ID NO: 1309361 - DNA, 15 bp, Homo sapiens
ggagctagtcaacaa

SEQ ID NO: 1309362 - DNA, 15 bp, Homo sapiens
aggagctagtcaaca

SEQ ID NO: 1309363 - DNA, 15 bp, Homo sapiens
aaggagctagtcaac

SEQ ID NO: 1309364 - DNA, 15 bp, Homo sapiens
aaaggagctagtcaa

SEQ ID NO: 1309365 - DNA, 15 bp, Homo sapiens
caaaggagctagtca

SEQ ID NO: 1309366 - DNA, 15 bp, Homo sapiens
acaaaggagctagtc

SEQ ID NO: 1309367 - DNA, 15 bp, Homo sapiens
cacaaaggagctagt

SEQ ID NO: 1309368 - DNA, 15 bp, Homo sapiens
gcacaaaggagctag

SEQ ID NO: 1309369 - DNA, 15 bp, Homo sapiens
tgcacaaaggagcta

SEQ ID NO: 1309370 - DNA, 15 bp, Homo sapiens
ctgcacaaaggagct

SEQ ID NO: 1309371 - DNA, 15 bp, Homo sapiens
actgcacaaaggagc

SEQ ID NO: 1309372 - DNA, 15 bp, Homo sapiens
cactgcacaaaggag

SEQ ID NO: 1309373 - DNA, 15 bp, Homo sapiens
gcactgcacaaagga

SEQ ID NO: 1309374 - DNA, 15 bp, Homo sapiens
tgcactgcacaaagg

SEQ ID NO: 1309375 - DNA, 15 bp, Homo sapiens
gtgcactgcacaaag

SEQ ID NO: 1309376 - DNA, 15 bp, Homo sapiens
agtgcactgcacaaa

SEQ ID NO: 1309377 - DNA, 15 bp, Homo sapiens
cagtgcactgcacaa

SEQ ID NO: 1309378 - DNA, 15 bp, Homo sapiens
acagtgcactgcaca

SEQ ID NO: 1309379 - DNA, 15 bp, Homo sapiens
cacagtgcactgcac

SEQ ID NO: 1309380 - DNA, 15 bp, Homo sapiens
tcacagtgcactgca

SEQ ID NO: 1309381 - DNA, 15 bp, Homo sapiens
gtcacagtgcactgc

SEQ ID NO: 1309382 - DNA, 15 bp, Homo sapiens
agtcacagtgcactg

SEQ ID NO: 1309383 - DNA, 15 bp, Homo sapiens
tagtcacagtgcact

SEQ ID NO: 1309384 - DNA, 15 bp, Homo sapiens
atagtcacagtgcac

SEQ ID NO: 1309385 - DNA, 15 bp, Homo sapiens
aatagtcacagtgca

SEQ ID NO: 1309386 - DNA, 15 bp, Homo sapiens
caatagtcacagtgc

SEQ ID NO: 1309387 - DNA, 15 bp, Homo sapiens
ccaatagtcacagtg

SEQ ID NO: 1309388 - DNA, 15 bp, Homo sapiens
accaatagtcacagt

SEQ ID NO: 1309389 - DNA, 15 bp, Homo sapiens
gaccaatagtcacag

SEQ ID NO: 1309390 - DNA, 15 bp, Homo sapiens
agaccaatagtcaca

SEQ ID NO: 1309391 - DNA, 15 bp, Homo sapiens
cagaccaatagtcac

SEQ ID NO: 1309392 - DNA, 15 bp, Homo sapiens
ccagaccaatagtca

SEQ ID NO: 1309393 - DNA, 15 bp, Homo sapiens
gccagaccaatagtc

SEQ ID NO: 1309394 - DNA, 15 bp, Homo sapiens
agccagaccaatagt

SEQ ID NO: 1309395 - DNA, 15 bp, Homo sapiens
aagccagaccaatag

SEQ ID NO: 1309396 - DNA, 15 bp, Homo sapiens
taagccagaccaata

SEQ ID NO: 1309397 - DNA, 15 bp, Homo sapiens
ataagccagaccaat

SEQ ID NO: 1309398 - DNA, 15 bp, Homo sapiens
aataagccagaccaa

SEQ ID NO: 1309399 - DNA, 15 bp, Homo sapiens
gaataagccagacca

SEQ ID NO: 1309400 - DNA, 15 bp, Homo sapiens
ggaataagccagacc

SEQ ID NO: 1309401 - DNA, 15 bp, Homo sapiens
aggaataagccagac

SEQ ID NO: 1309402 - DNA, 15 bp, Homo sapiens
gaggaataagccaga

SEQ ID NO: 1309403 - DNA, 15 bp, Homo sapiens
tgaggaataagccag

SEQ ID NO: 1309404 - DNA, 15 bp, Homo sapiens
ctgaggaataagcca

SEQ ID NO: 1309405 - DNA, 15 bp, Homo sapiens
cctgaggaataagcc

SEQ ID NO: 1309406 - DNA, 15 bp, Homo sapiens
tcctgaggaataagc

SEQ ID NO: 1309407 - DNA, 15 bp, Homo sapiens
ttcctgaggaataag

SEQ ID NO: 1309408 - DNA, 15 bp, Homo sapiens
cttcctgaggaataa

SEQ ID NO: 1309409 - DNA, 15 bp, Homo sapiens
tcttcctgaggaata

SEQ ID NO: 1309410 - DNA, 15 bp, Homo sapiens
ttcttcctgaggaat

SEQ ID NO: 1309411 - DNA, 15 bp, Homo sapiens
cttcttcctgaggaa

SEQ ID NO: 1309412 - DNA, 15 bp, Homo sapiens
ccttcttcctgagga

SEQ ID NO: 1309413 - DNA, 15 bp, Homo sapiens
tccttcttcctgagg

SEQ ID NO: 1309414 - DNA, 15 bp, Homo sapiens
atccttcttcctgag

SEQ ID NO: 1309415 - DNA, 15 bp, Homo sapiens
aatccttcttcctga

SEQ ID NO: 1309416 - DNA, 15 bp, Homo sapiens
taatccttcttcctg

SEQ ID NO: 1309417 - DNA, 15 bp, Homo sapiens
ttaatccttcttcct

SEQ ID NO: 1309418 - DNA, 15 bp, Homo sapiens
tttaatccttcttcc

SEQ ID NO: 1309419 - DNA, 15 bp, Homo sapiens
ttttaatccttcttc

SEQ ID NO: 1309420 - DNA, 15 bp, Homo sapiens
cttttaatccttctt

SEQ ID NO: 1309421 - DNA, 15 bp, Homo sapiens
tcttttaatccttct

SEQ ID NO: 1309422 - DNA, 15 bp, Homo sapiens
ttcttttaatccttc

SEQ ID NO: 1309423 - DNA, 15 bp, Homo sapiens
cttcttttaatcctt

SEQ ID NO: 1309424 - DNA, 15 bp, Homo sapiens
tcttcttttaatcct

SEQ ID NO: 1309425 - DNA, 15 bp, Homo sapiens
gtcttcttttaatcc

SEQ ID NO: 1309426 - DNA, 15 bp, Homo sapiens
aaagtcttcttttaa

SEQ ID NO: 1309427 - DNA, 15 bp, Homo sapiens
taaagtcttctttta

SEQ ID NO: 1309428 - DNA, 15 bp, Homo sapiens
gtaaagtcttctttt

SEQ ID NO: 1309429 - DNA, 15 bp, Homo sapiens
tgtaaagtcttcttt

SEQ ID NO: 1309430 - DNA, 15 bp, Homo sapiens
ttgtaaagtcttctt

SEQ ID NO: 1309431 - DNA, 15 bp, Homo sapiens
tttgtaaagtcttct

SEQ ID NO: 1309432 - DNA, 15 bp, Homo sapiens
ttttgtaaagtcttc

SEQ ID NO: 1309433 - DNA, 15 bp, Homo sapiens
tttttgtaaagtctt

SEQ ID NO: 1309434 - DNA, 15 bp, Homo sapiens
atttttgtaaagtct

SEQ ID NO: 1309435 - DNA, 15 bp, Homo sapiens
catttttgtaaagtc

SEQ ID NO: 1309436 - DNA, 15 bp, Homo sapiens
tcatttttgtaaagt

SEQ ID NO: 1309437 - DNA, 15 bp, Homo sapiens
ctcatttttgtaaag

SEQ ID NO: 1309438 - DNA, 15 bp, Homo sapiens
gctcatttttgtaaa

SEQ ID NO: 1309439 - DNA, 15 bp, Homo sapiens
tgctcatttttgtaa

SEQ ID NO: 1309440 - DNA, 15 bp, Homo sapiens
ttgctcatttttgta

SEQ ID NO: 1309441 - DNA, 15 bp, Homo sapiens
tttgctcatttttgt

SEQ ID NO: 1309442 - DNA, 15 bp, Homo sapiens
gtttgctcatttttg

SEQ ID NO: 1309443 - DNA, 15 bp, Homo sapiens
agtttgctcattttt

SEQ ID NO: 1309444 - DNA, 15 bp, Homo sapiens
tagtttgctcatttt

SEQ ID NO: 1309445 - DNA, 15 bp, Homo sapiens
atagtttgctcattt

SEQ ID NO: 1309446 - DNA, 15 bp, Homo sapiens
tatagtttgctcatt

SEQ ID NO: 1309447 - DNA, 15 bp, Homo sapiens
atatagtttgctcat

SEQ ID NO: 1309448 - DNA, 15 bp, Homo sapiens
aatatagtttgctca

SEQ ID NO: 1309449 - DNA, 15 bp, Homo sapiens
taatatagtttgctc

SEQ ID NO: 1309450 - DNA, 15 bp, Homo sapiens
ataatatagtttgct

SEQ ID NO: 1309451 - DNA, 15 bp, Homo sapiens
tataatatagtttgc

SEQ ID NO: 1309452 - DNA, 15 bp, Homo sapiens
ttataatatagtttg

SEQ ID NO: 1309453 - DNA, 15 bp, Homo sapiens
tttataatatagttt

SEQ ID NO: 1309454 - DNA, 15 bp, Homo sapiens
ttttataatatagtt

SEQ ID NO: 1309455 - DNA, 15 bp, Homo sapiens
cttttataatatagt

SEQ ID NO: 1309456 - DNA, 15 bp, Homo sapiens
acttttataatatag

SEQ ID NO: 1309457 - DNA, 15 bp, Homo sapiens
tacttttataatata

SEQ ID NO: 1309458 - DNA, 15 bp, Homo sapiens
ttacttttataatat

SEQ ID NO: 1309459 - DNA, 15 bp, Homo sapiens
tttacttttataata

SEQ ID NO: 1309460 - DNA, 15 bp, Homo sapiens
atttacttttataat

SEQ ID NO: 1309461 - DNA, 15 bp, Homo sapiens
catttacttttataa

SEQ ID NO: 1309462 - DNA, 15 bp, Homo sapiens
gcatttacttttata

SEQ ID NO: 1309463 - DNA, 15 bp, Homo sapiens
agcatttacttttat

SEQ ID NO: 1309464 - DNA, 15 bp, Homo sapiens
tagcatttactttta

SEQ ID NO: 1309465 - DNA, 15 bp, Homo sapiens
ctagcatttactttt

SEQ ID NO: 1309466 - DNA, 15 bp, Homo sapiens
actagcatttacttt

SEQ ID NO: 1309467 - DNA, 15 bp, Homo sapiens
tactagcatttactt

SEQ ID NO: 1309468 - DNA, 15 bp, Homo sapiens
atactagcatttact

SEQ ID NO: 1309469 - DNA, 15 bp, Homo sapiens
catactagcatttac

SEQ ID NO: 1309470 - DNA, 15 bp, Homo sapiens
gcatactagcattta

SEQ ID NO: 1309471 - DNA, 15 bp, Homo sapiens
tgcatactagcattt

SEQ ID NO: 1309472 - DNA, 15 bp, Homo sapiens
atgcatactagcatt

SEQ ID NO: 1309473 - DNA, 15 bp, Homo sapiens
tatgcatactagcat

SEQ ID NO: 1309474 - DNA, 15 bp, Homo sapiens
atatgcatactagca

SEQ ID NO: 1309475 - DNA, 15 bp, Homo sapiens
tatatgcatactagc

SEQ ID NO: 1309476 - DNA, 15 bp, Homo sapiens
atatatgcatactag

SEQ ID NO: 1309477 - DNA, 15 bp, Homo sapiens
catatatgcatacta

SEQ ID NO: 1309478 - DNA, 15 bp, Homo sapiens
acatatatgcatact

SEQ ID NO: 1309479 - DNA, 15 bp, Homo sapiens
aacatatatgcatac

SEQ ID NO: 1309480 - DNA, 15 bp, Homo sapiens
aaacatatatgcata

SEQ ID NO: 1309481 - DNA, 15 bp, Homo sapiens
gaaacatatatgcat

SEQ ID NO: 1309482 - DNA, 15 bp, Homo sapiens
tgaaacatatatgca

SEQ ID NO: 1309483 - DNA, 15 bp, Homo sapiens
atgaaacatatatgc

SEQ ID NO: 1309484 - DNA, 15 bp, Homo sapiens
aatgaaacatatatg

SEQ ID NO: 1309485 - DNA, 15 bp, Homo sapiens
gaatgaaacatatat

SEQ ID NO: 1309486 - DNA, 15 bp, Homo sapiens
tgaatgaaacatata

SEQ ID NO: 1309487 - DNA, 15 bp, Homo sapiens
atgaatgaaacatat

SEQ ID NO: 1309488 - DNA, 15 bp, Homo sapiens
catgaatgaaacata

SEQ ID NO: 1309489 - DNA, 15 bp, Homo sapiens
gcatgaatgaaacat

SEQ ID NO: 1309490 - DNA, 15 bp, Homo sapiens
tgcatgaatgaaaca

SEQ ID NO: 1309491 - DNA, 15 bp, Homo sapiens
ttgcatgaatgaaac

SEQ ID NO: 1309492 - DNA, 15 bp, Homo sapiens
gttgcatgaatgaaa

SEQ ID NO: 1309493 - DNA, 15 bp, Homo sapiens
agttgcatgaatgaa

SEQ ID NO: 1309494 - DNA, 15 bp, Homo sapiens
gagttgcatgaatga

SEQ ID NO: 1309495 - DNA, 15 bp, Homo sapiens
ggagttgcatgaatg

SEQ ID NO: 1309496 - DNA, 15 bp, Homo sapiens
aggagttgcatgaat

SEQ ID NO: 1309497 - DNA, 15 bp, Homo sapiens
taggagttgcatgaa

SEQ ID NO: 1309498 - DNA, 15 bp, Homo sapiens
ctaggagttgcatga

SEQ ID NO: 1309499 - DNA, 15 bp, Homo sapiens
tctaggagttgcatg

SEQ ID NO: 1309500 - DNA, 15 bp, Homo sapiens
ttctaggagttgcat

SEQ ID NO: 1309501 - DNA, 15 bp, Homo sapiens
tttctaggagttgca

SEQ ID NO: 1309502 - DNA, 15 bp, Homo sapiens
atttctaggagttgc

SEQ ID NO: 1309503 - DNA, 15 bp, Homo sapiens
catttctaggagttg

SEQ ID NO: 1309504 - DNA, 15 bp, Homo sapiens
tcatttctaggagtt

SEQ ID NO: 1309505 - DNA, 15 bp, Homo sapiens
ctcatttctaggagt

SEQ ID NO: 1309506 - DNA, 15 bp, Homo sapiens
tctcatttctaggag

SEQ ID NO: 1309507 - DNA, 15 bp, Homo sapiens
ttctcatttctagga

SEQ ID NO: 1309508 - DNA, 15 bp, Homo sapiens
attctcatttctagg

SEQ ID NO: 1309509 - DNA, 15 bp, Homo sapiens
aattctcatttctag

SEQ ID NO: 1309510 - DNA, 15 bp, Homo sapiens
aaattctcatttcta

SEQ ID NO: 1309511 - DNA, 15 bp, Homo sapiens
taaattctcatttct

SEQ ID NO: 1309512 - DNA, 15 bp, Homo sapiens
gtaaattctcatttc

SEQ ID NO: 1309513 - DNA, 15 bp, Homo sapiens
agtaaattctcattt

SEQ ID NO: 1309514 - DNA, 15 bp, Homo sapiens
tagtaaattctcatt

SEQ ID NO: 1309515 - DNA, 15 bp, Homo sapiens
atagtaaattctcat

SEQ ID NO: 1309516 - DNA, 15 bp, Homo sapiens
tatagtaaattctca

SEQ ID NO: 1309517 - DNA, 15 bp, Homo sapiens
ttatagtaaattctc

SEQ ID NO: 1309518 - DNA, 15 bp, Homo sapiens
cttatagtaaattct

SEQ ID NO: 1309519 - DNA, 15 bp, Homo sapiens
acttatagtaaattc

SEQ ID NO: 1309520 - DNA, 15 bp, Homo sapiens
cacttatagtaaatt

SEQ ID NO: 1309521 - DNA, 15 bp, Homo sapiens
acacttatagtaaat

SEQ ID NO: 1309522 - DNA, 15 bp, Homo sapiens
aacacttatagtaaa

SEQ ID NO: 1309523 - DNA, 15 bp, Homo sapiens
aaacacttatagtaa

SEQ ID NO: 1309524 - DNA, 15 bp, Homo sapiens
aaaacacttatagta

SEQ ID NO: 1309525 - DNA, 15 bp, Homo sapiens
gaaaacacttatagt

SEQ ID NO: 1309526 - DNA, 15 bp, Homo sapiens
tgaaaacacttatag

SEQ ID NO: 1309527 - DNA, 15 bp, Homo sapiens
ctgaaaacacttata

SEQ ID NO: 1309528 - DNA, 15 bp, Homo sapiens
tctgaaaacacttat

SEQ ID NO: 1309529 - DNA, 15 bp, Homo sapiens
ttctgaaaacactta

SEQ ID NO: 1309530 - DNA, 15 bp, Homo sapiens
attctgaaaacactt

SEQ ID NO: 1309531 - DNA, 15 bp, Homo sapiens
gattctgaaaacact

SEQ ID NO: 1309532 - DNA, 15 bp, Homo sapiens
ggattctgaaaacac

SEQ ID NO: 1309533 - DNA, 15 bp, Homo sapiens
tggattctgaaaaca

SEQ ID NO: 1309534 - DNA, 15 bp, Homo sapiens
gtggattctgaaaac

SEQ ID NO: 1309535 - DNA, 15 bp, Homo sapiens
tgtggattctgaaaa

SEQ ID NO: 1309536 - DNA, 15 bp, Homo sapiens
ttgtggattctgaaa

SEQ ID NO: 1309537 - DNA, 15 bp, Homo sapiens
attgtggattctgaa

SEQ ID NO: 1309538 - DNA, 15 bp, Homo sapiens
tattgtggattctga

SEQ ID NO: 1309539 - DNA, 15 bp, Homo sapiens
ttattgtggattctg

SEQ ID NO: 1309540 - DNA, 15 bp, Homo sapiens
attattgtggattct

SEQ ID NO: 1309541 - DNA, 15 bp, Homo sapiens
aattattgtggattc

SEQ ID NO: 1309542 - DNA, 15 bp, Homo sapiens
aaattattgtggatt

SEQ ID NO: 1309543 - DNA, 15 bp, Homo sapiens
taaattattgtggat

SEQ ID NO: 1309544 - DNA, 15 bp, Homo sapiens
ctaaattattgtgga

SEQ ID NO: 1309545 - DNA, 15 bp, Homo sapiens
cctaaattattgtgg

SEQ ID NO: 1309546 - DNA, 15 bp, Homo sapiens
acctaaattattgtg

SEQ ID NO: 1309547 - DNA, 15 bp, Homo sapiens
aacctaaattattgt

SEQ ID NO: 1309548 - DNA, 15 bp, Homo sapiens
caacctaaattattg

SEQ ID NO: 1309549 - DNA, 15 bp, Homo sapiens
tcaacctaaattatt

SEQ ID NO: 1309550 - DNA, 15 bp, Homo sapiens
ttcaacctaaattat

SEQ ID NO: 1309551 - DNA, 15 bp, Homo sapiens
tttcaacctaaatta

SEQ ID NO: 1309552 - DNA, 15 bp, Homo sapiens
atttcaacctaaatt

SEQ ID NO: 1309553 - DNA, 15 bp, Homo sapiens
aatttcaacctaaat

SEQ ID NO: 1309554 - DNA, 15 bp, Homo sapiens
taatttcaacctaaa

SEQ ID NO: 1309555 - DNA, 15 bp, Homo sapiens
ctaatttcaacctaa

SEQ ID NO: 1309556 - DNA, 15 bp, Homo sapiens
cctaatttcaaccta

SEQ ID NO: 1309557 - DNA, 15 bp, Homo sapiens
acctaatttcaacct

SEQ ID NO: 1309558 - DNA, 15 bp, Homo sapiens
tacctaatttcaacc

SEQ ID NO: 1309559 - DNA, 15 bp, Homo sapiens
atacctaatttcaac

SEQ ID NO: 1309560 - DNA, 15 bp, Homo sapiens
aatacctaatttcaa

SEQ ID NO: 1309561 - DNA, 15 bp, Homo sapiens
aaatacctaatttca

SEQ ID NO: 1309562 - DNA, 15 bp, Homo sapiens
caaatacctaatttc

SEQ ID NO: 1309563 - DNA, 15 bp, Homo sapiens
ccaaatacctaattt

SEQ ID NO: 1309564 - DNA, 15 bp, Homo sapiens
tccaaatacctaatt

SEQ ID NO: 1309565 - DNA, 15 bp, Homo sapiens
atccaaatacctaat

SEQ ID NO: 1309566 - DNA, 15 bp, Homo sapiens
gatccaaatacctaa

SEQ ID NO: 1309567 - DNA, 15 bp, Homo sapiens
tgatccaaataccta

SEQ ID NO: 1309568 - DNA, 15 bp, Homo sapiens
ttgatccaaatacct

SEQ ID NO: 1309569 - DNA, 15 bp, Homo sapiens
gttgatccaaatacc

SEQ ID NO: 1309570 - DNA, 15 bp, Homo sapiens
agttgatccaaatac

SEQ ID NO: 1309571 - DNA, 15 bp, Homo sapiens
aagttgatccaaata

SEQ ID NO: 1309572 - DNA, 15 bp, Homo sapiens
aaagttgatccaaat

SEQ ID NO: 1309573 - DNA, 15 bp, Homo sapiens
gaaagttgatccaaa

SEQ ID NO: 1309574 - DNA, 15 bp, Homo sapiens
tgaaagttgatccaa

SEQ ID NO: 1309575 - DNA, 15 bp, Homo sapiens
ttgaaagttgatcca

SEQ ID NO: 1309576 - DNA, 15 bp, Homo sapiens
cttgaaagttgatcc

SEQ ID NO: 1309577 - DNA, 15 bp, Homo sapiens
ccttgaaagttgatc

SEQ ID NO: 1309578 - DNA, 15 bp, Homo sapiens
cccttgaaagttgat

SEQ ID NO: 1309579 - DNA, 15 bp, Homo sapiens
tcccttgaaagttga

SEQ ID NO: 1309580 - DNA, 15 bp, Homo sapiens
ttcccttgaaagttg

SEQ ID NO: 1309581 - DNA, 15 bp, Homo sapiens
cttcccttgaaagtt

SEQ ID NO: 1309582 - DNA, 15 bp, Homo sapiens
ccttcccttgaaagt

SEQ ID NO: 1309583 - DNA, 15 bp, Homo sapiens
cccttcccttgaaag

SEQ ID NO: 1309584 - DNA, 15 bp, Homo sapiens
ccccttcccttgaaa

SEQ ID NO: 1309585 - DNA, 15 bp, Homo sapiens
accccttcccttgaa

SEQ ID NO: 1309586 - DNA, 15 bp, Homo sapiens
caccccttcccttga

SEQ ID NO: 1309587 - DNA, 15 bp, Homo sapiens
tcaccccttcccttg

SEQ ID NO: 1309588 - DNA, 15 bp, Homo sapiens
gtcaccccttccctt

SEQ ID NO: 1309589 - DNA, 15 bp, Homo sapiens
tgtcaccccttccct

SEQ ID NO: 1309590 - DNA, 15 bp, Homo sapiens
ttgtcaccccttccc

SEQ ID NO: 1309591 - DNA, 15 bp, Homo sapiens
attgtcaccccttcc

SEQ ID NO: 1309592 - DNA, 15 bp, Homo sapiens
cattgtcaccccttc

SEQ ID NO: 1309593 - DNA, 15 bp, Homo sapiens
tcattgtcacccctt

SEQ ID NO: 1309594 - DNA, 15 bp, Homo sapiens
ctcattgtcacccct

SEQ ID NO: 1309595 - DNA, 15 bp, Homo sapiens
cctcattgtcacccc

SEQ ID NO: 1309596 - DNA, 15 bp, Homo sapiens
acctcattgtcaccc

SEQ ID NO: 1309597 - DNA, 15 bp, Homo sapiens
cacctcattgtcacc

SEQ ID NO: 1309598 - DNA, 15 bp, Homo sapiens
tcacctcattgtcac

SEQ ID NO: 1309599 - DNA, 15 bp, Homo sapiens
ttcacctcattgtca

SEQ ID NO: 1309600 - DNA, 15 bp, Homo sapiens
tttcacctcattgtc

SEQ ID NO: 1309601 - DNA, 15 bp, Homo sapiens
atttcacctcattgt

SEQ ID NO: 1309602 - DNA, 15 bp, Homo sapiens
tatttcacctcattg

SEQ ID NO: 1309603 - DNA, 15 bp, Homo sapiens
ctatttcacctcatt

SEQ ID NO: 1309604 - DNA, 15 bp, Homo sapiens
tctatttcacctcat

SEQ ID NO: 1309605 - DNA, 15 bp, Homo sapiens
gtctatttcacctca

SEQ ID NO: 1309606 - DNA, 15 bp, Homo sapiens
tgtctatttcacctc

SEQ ID NO: 1309607 - DNA, 15 bp, Homo sapiens
atgtctatttcacct

SEQ ID NO: 1309608 - DNA, 15 bp, Homo sapiens
gatgtctatttcacc

SEQ ID NO: 1309609 - DNA, 15 bp, Homo sapiens
agatgtctatttcac

SEQ ID NO: 1309610 - DNA, 15 bp, Homo sapiens
tagatgtctatttca

SEQ ID NO: 1309611 - DNA, 15 bp, Homo sapiens
ctagatgtctatttc

SEQ ID NO: 1309612 - DNA, 15 bp, Homo sapiens
tctagatgtctattt

SEQ ID NO: 1309613 - DNA, 15 bp, Homo sapiens
atctagatgtctatt

SEQ ID NO: 1309614 - DNA, 15 bp, Homo sapiens
aatctagatgtctat

SEQ ID NO: 1309615 - DNA, 15 bp, Homo sapiens
caatctagatgtcta

SEQ ID NO: 1309616 - DNA, 15 bp, Homo sapiens
acaatctagatgtct

SEQ ID NO: 1309617 - DNA, 15 bp, Homo sapiens
aacaatctagatgtc

SEQ ID NO: 1309618 - DNA, 15 bp, Homo sapiens
aaacaatctagatgt

SEQ ID NO: 1309619 - DNA, 15 bp, Homo sapiens
aaaacaatctagatg

SEQ ID NO: 1309620 - DNA, 15 bp, Homo sapiens
gaaaacaatctagat

SEQ ID NO: 1309621 - DNA, 15 bp, Homo sapiens
cgaaaacaatctaga

SEQ ID NO: 1309622 - DNA, 15 bp, Homo sapiens
acgaaaacaatctag

SEQ ID NO: 1309623 - DNA, 15 bp, Homo sapiens
tacgaaaacaatcta

SEQ ID NO: 1309624 - DNA, 15 bp, Homo sapiens
ctacgaaaacaatct

SEQ ID NO: 1309625 - DNA, 15 bp, Homo sapiens
tctacgaaaacaatc

SEQ ID NO: 1309626 - DNA, 15 bp, Homo sapiens
gtctacgaaaacaat

SEQ ID NO: 1309627 - DNA, 15 bp, Homo sapiens
agtctacgaaaacaa

SEQ ID NO: 1309628 - DNA, 15 bp, Homo sapiens
cagtctacgaaaaca

SEQ ID NO: 1309629 - DNA, 15 bp, Homo sapiens
tcagtctacgaaaac

SEQ ID NO: 1309630 - DNA, 15 bp, Homo sapiens
ttcagtctacgaaaa

SEQ ID NO: 1309631 - DNA, 15 bp, Homo sapiens
tttcagtctacgaaa

SEQ ID NO: 1309632 - DNA, 15 bp, Homo sapiens
gtttcagtctacgaa

SEQ ID NO: 1309633 - DNA, 15 bp, Homo sapiens
tgtttcagtctacga

SEQ ID NO: 1309634 - DNA, 15 bp, Homo sapiens
atgtttcagtctacg

SEQ ID NO: 1309635 - DNA, 15 bp, Homo sapiens
aatgtttcagtctac

SEQ ID NO: 1309636 - DNA, 15 bp, Homo sapiens
caatgtttcagtcta

SEQ ID NO: 1309637 - DNA, 15 bp, Homo sapiens
ccaatgtttcagtct

SEQ ID NO: 1309638 - DNA, 15 bp, Homo sapiens
tccaatgtttcagtc

SEQ ID NO: 1309639 - DNA, 15 bp, Homo sapiens
gtccaatgtttcagt

SEQ ID NO: 1309640 - DNA, 15 bp, Homo sapiens
ggtccaatgtttcag

SEQ ID NO: 1309641 - DNA, 15 bp, Homo sapiens
aggtccaatgtttca

SEQ ID NO: 1309642 - DNA, 15 bp, Homo sapiens
caggtccaatgtttc

SEQ ID NO: 1309643 - DNA, 15 bp, Homo sapiens
tcaggtccaatgttt

SEQ ID NO: 1309644 - DNA, 15 bp, Homo sapiens
ctcaggtccaatgtt

SEQ ID NO: 1309645 - DNA, 15 bp, Homo sapiens
cctcaggtccaatgt

SEQ ID NO: 1309646 - DNA, 15 bp, Homo sapiens
acctcaggtccaatg

SEQ ID NO: 1309647 - DNA, 15 bp, Homo sapiens
aacctcaggtccaat

SEQ ID NO: 1309648 - DNA, 15 bp, Homo sapiens
aaacctcaggtccaa

SEQ ID NO: 1309649 - DNA, 15 bp, Homo sapiens
aaaacctcaggtcca

SEQ ID NO: 1309650 - DNA, 15 bp, Homo sapiens
aaaaacctcaggtcc

SEQ ID NO: 1309651 - DNA, 15 bp, Homo sapiens
caaaaacctcaggtc

SEQ ID NO: 1309652 - DNA, 15 bp, Homo sapiens
acaaaaacctcaggt

SEQ ID NO: 1309653 - DNA, 15 bp, Homo sapiens
aacaaaaacctcagg

SEQ ID NO: 1309654 - DNA, 15 bp, Homo sapiens
caacaaaaacctcag

SEQ ID NO: 1309655 - DNA, 15 bp, Homo sapiens
acaacaaaaacctca

SEQ ID NO: 1309656 - DNA, 15 bp, Homo sapiens
aacaacaaaaacctc

SEQ ID NO: 1309657 - DNA, 15 bp, Homo sapiens
caacaacaaaaacct

SEQ ID NO: 1309658 - DNA, 15 bp, Homo sapiens
acaacaacaaaaacc

SEQ ID NO: 1309659 - DNA, 15 bp, Homo sapiens
aacaacaacaaaaac

SEQ ID NO: 1309660 - DNA, 15 bp, Homo sapiens
aaaacaacaacaaaa

SEQ ID NO: 1309661 - DNA, 15 bp, Homo sapiens
taaaacaacaacaaa

SEQ ID NO: 1309662 - DNA, 15 bp, Homo sapiens
gtaaaacaacaacaa

SEQ ID NO: 1309663 - DNA, 15 bp, Homo sapiens
agtaaaacaacaaca

SEQ ID NO: 1309664 - DNA, 15 bp, Homo sapiens
gagtaaaacaacaac

SEQ ID NO: 1309665 - DNA, 15 bp, Homo sapiens
agagtaaaacaacaa

SEQ ID NO: 1309666 - DNA, 15 bp, Homo sapiens
aagagtaaaacaaca

SEQ ID NO: 1309667 - DNA, 15 bp, Homo sapiens
aaagagtaaaacaac

SEQ ID NO: 1309668 - DNA, 15 bp, Homo sapiens
gaaagagtaaaacaa

SEQ ID NO: 1309669 - DNA, 15 bp, Homo sapiens
agaaagagtaaaaca

SEQ ID NO: 1309670 - DNA, 15 bp, Homo sapiens
gagaaagagtaaaac

SEQ ID NO: 1309671 - DNA, 15 bp, Homo sapiens
agagaaagagtaaaa

SEQ ID NO: 1309672 - DNA, 15 bp, Homo sapiens
cagagaaagagtaaa

SEQ ID NO: 1309673 - DNA, 15 bp, Homo sapiens
acagagaaagagtaa

SEQ ID NO: 1309674 - DNA, 15 bp, Homo sapiens
aacagagaaagagta

SEQ ID NO: 1309675 - DNA, 15 bp, Homo sapiens
aaacagagaaagagt

SEQ ID NO: 1309676 - DNA, 15 bp, Homo sapiens
aaaacagagaaagag

SEQ ID NO: 1309677 - DNA, 15 bp, Homo sapiens
aaaaacagagaaaga

SEQ ID NO: 1309678 - DNA, 15 bp, Homo sapiens
taaaaacagagaaag

SEQ ID NO: 1309679 - DNA, 15 bp, Homo sapiens
ctaaaaacagagaaa

SEQ ID NO: 1309680 - DNA, 15 bp, Homo sapiens
actaaaaacagagaa

SEQ ID NO: 1309681 - DNA, 15 bp, Homo sapiens
tactaaaaacagaga

SEQ ID NO: 1309682 - DNA, 15 bp, Homo sapiens
ttactaaaaacagag

SEQ ID NO: 1309683 - DNA, 15 bp, Homo sapiens
tttactaaaaacaga

SEQ ID NO: 1309684 - DNA, 15 bp, Homo sapiens
ttttactaaaaacag

SEQ ID NO: 1309685 - DNA, 15 bp, Homo sapiens
cttttactaaaaaca

SEQ ID NO: 1309686 - DNA, 15 bp, Homo sapiens
tcttttactaaaaac

SEQ ID NO: 1309687 - DNA, 15 bp, Homo sapiens
atcttttactaaaaa

SEQ ID NO: 1309688 - DNA, 15 bp, Homo sapiens
aatcttttactaaaa

SEQ ID NO: 1309689 - DNA, 15 bp, Homo sapiens
gaatcttttactaaa

SEQ ID NO: 1309690 - DNA, 15 bp, Homo sapiens
ggaatcttttactaa

SEQ ID NO: 1309691 - DNA, 15 bp, Homo sapiens
tggaatcttttacta

SEQ ID NO: 1309692 - DNA, 15 bp, Homo sapiens
ctggaatcttttact

SEQ ID NO: 1309693 - DNA, 15 bp, Homo sapiens
cctggaatcttttac

SEQ ID NO: 1309694 - DNA, 15 bp, Homo sapiens
acctggaatctttta

SEQ ID NO: 1309695 - DNA, 15 bp, Homo sapiens
tacctggaatctttt

SEQ ID NO: 1309696 - DNA, 15 bp, Homo sapiens
atacctggaatcttt

SEQ ID NO: 1309697 - DNA, 15 bp, Homo sapiens
catacctggaatctt

SEQ ID NO: 1309698 - DNA, 15 bp, Homo sapiens
gcatacctggaatct

SEQ ID NO: 1309699 - DNA, 15 bp, Homo sapiens
ggcatacctggaatc

SEQ ID NO: 1309700 - DNA, 15 bp, Homo sapiens
aggcatacctggaat

SEQ ID NO: 1309701 - DNA, 15 bp, Homo sapiens
taggcatacctggaa

SEQ ID NO: 1309702 - DNA, 15 bp, Homo sapiens
ttaggcatacctgga

SEQ ID NO: 1309703 - DNA, 15 bp, Homo sapiens
tttaggcatacctgg

SEQ ID NO: 1309704 - DNA, 15 bp, Homo sapiens
ctttaggcatacctg

SEQ ID NO: 1309705 - DNA, 15 bp, Homo sapiens
actttaggcatacct

SEQ ID NO: 1309706 - DNA, 15 bp, Homo sapiens
gactttaggcatacc

SEQ ID NO: 1309707 - DNA, 15 bp, Homo sapiens
tgactttaggcatac

SEQ ID NO: 1309708 - DNA, 15 bp, Homo sapiens
atgactttaggcata

SEQ ID NO: 1309709 - DNA, 15 bp, Homo sapiens
gatgactttaggcat

SEQ ID NO: 1309710 - DNA, 15 bp, Homo sapiens
agatgactttaggca

SEQ ID NO: 1309711 - DNA, 15 bp, Homo sapiens
aagatgactttaggc

SEQ ID NO: 1309712 - DNA, 15 bp, Homo sapiens
gaagatgactttagg

SEQ ID NO: 1309713 - DNA, 15 bp, Homo sapiens
agaagatgactttag

SEQ ID NO: 1309714 - DNA, 15 bp, Homo sapiens
tagaagatgacttta

SEQ ID NO: 1309715 - DNA, 15 bp, Homo sapiens
atagaagatgacttt

SEQ ID NO: 1309716 - DNA, 15 bp, Homo sapiens
tatagaagatgactt

SEQ ID NO: 1309717 - DNA, 15 bp, Homo sapiens
gtatagaagatgact

SEQ ID NO: 1309718 - DNA, 15 bp, Homo sapiens
cgtatagaagatgac

SEQ ID NO: 1309719 - DNA, 15 bp, Homo sapiens
tcgtatagaagatga

SEQ ID NO: 1309720 - DNA, 15 bp, Homo sapiens
ttcgtatagaagatg

SEQ ID NO: 1309721 - DNA, 15 bp, Homo sapiens
attcgtatagaagat

SEQ ID NO: 1309722 - DNA, 15 bp, Homo sapiens
cattcgtatagaaga

SEQ ID NO: 1309723 - DNA, 15 bp, Homo sapiens
gcattcgtatagaag

SEQ ID NO: 1309724 - DNA, 15 bp, Homo sapiens
tgcattcgtatagaa

SEQ ID NO: 1309725 - DNA, 15 bp, Homo sapiens
ttgcattcgtataga

SEQ ID NO: 1309726 - DNA, 15 bp, Homo sapiens
tttgcattcgtatag

SEQ ID NO: 1309727 - DNA, 15 bp, Homo sapiens
ttttgcattcgtata

SEQ ID NO: 1309728 - DNA, 15 bp, Homo sapiens
tttttgcattcgtat

SEQ ID NO: 1309729 - DNA, 15 bp, Homo sapiens
atttttgcattcgta

SEQ ID NO: 1309730 - DNA, 15 bp, Homo sapiens
catttttgcattcgt

SEQ ID NO: 1309731 - DNA, 15 bp, Homo sapiens
acatttttgcattcg

SEQ ID NO: 1309732 - DNA, 15 bp, Homo sapiens
tacatttttgcattc

SEQ ID NO: 1309733 - DNA, 15 bp, Homo sapiens
ttacatttttgcatt

SEQ ID NO: 1309734 - DNA, 15 bp, Homo sapiens
gttacatttttgcat

SEQ ID NO: 1309735 - DNA, 15 bp, Homo sapiens
cgttacatttttgca

SEQ ID NO: 1309736 - DNA, 15 bp, Homo sapiens
tcgttacatttttgc

SEQ ID NO: 1309737 - DNA, 15 bp, Homo sapiens
gtcgttacatttttg

SEQ ID NO: 1309738 - DNA, 15 bp, Homo sapiens
tgtcgttacattttt

SEQ ID NO: 1309739 - DNA, 15 bp, Homo sapiens
ttgtcgttacatttt

SEQ ID NO: 1309740 - DNA, 15 bp, Homo sapiens
tttgtcgttacattt

SEQ ID NO: 1309741 - DNA, 15 bp, Homo sapiens
ctttgtcgttacatt

SEQ ID NO: 1309742 - DNA, 15 bp, Homo sapiens
tctttgtcgttacat

SEQ ID NO: 1309743 - DNA, 15 bp, Homo sapiens
ttctttgtcgttaca

SEQ ID NO: 1309744 - DNA, 15 bp, Homo sapiens
cttctttgtcgttac

SEQ ID NO: 1309745 - DNA, 15 bp, Homo sapiens
ccttctttgtcgtta

SEQ ID NO: 1309746 - DNA, 15 bp, Homo sapiens
cccttctttgtcgtt

SEQ ID NO: 1309747 - DNA, 15 bp, Homo sapiens
tcccttctttgtcgt

SEQ ID NO: 1309748 - DNA, 15 bp, Homo sapiens
ttcccttctttgtcg

SEQ ID NO: 1309749 - DNA, 15 bp, Homo sapiens
tttcccttctttgtc

SEQ ID NO: 1309750 - DNA, 15 bp, Homo sapiens
ttttcccttctttgt

SEQ ID NO: 1309751 - DNA, 15 bp, Homo sapiens
attttcccttctttg

SEQ ID NO: 1309752 - DNA, 15 bp, Homo sapiens
tattttcccttcttt

SEQ ID NO: 1309753 - DNA, 15 bp, Homo sapiens
ttattttcccttctt

SEQ ID NO: 1309754 - DNA, 15 bp, Homo sapiens
tttattttcccttct

SEQ ID NO: 1309755 - DNA, 15 bp, Homo sapiens
ttttattttcccttc

SEQ ID NO: 1309756 - DNA, 15 bp, Homo sapiens
cttttattttccctt

SEQ ID NO: 1309757 - DNA, 15 bp, Homo sapiens
tcttttattttccct

SEQ ID NO: 1309758 - DNA, 15 bp, Homo sapiens
ttcttttattttccc

SEQ ID NO: 1309759 - DNA, 15 bp, Homo sapiens
cttcttttattttcc

SEQ ID NO: 1309760 - DNA, 15 bp, Homo sapiens
ccttcttttattttc

SEQ ID NO: 1309761 - DNA, 15 bp, Homo sapiens
gccttcttttatttt

SEQ ID NO: 1309762 - DNA, 15 bp, Homo sapiens
tgccttcttttattt

SEQ ID NO: 1309763 - DNA, 15 bp, Homo sapiens
ttgccttcttttatt

SEQ ID NO: 1309764 - DNA, 15 bp, Homo sapiens
attgccttcttttat

SEQ ID NO: 1309765 - DNA, 15 bp, Homo sapiens
tattgccttctttta

SEQ ID NO: 1309766 - DNA, 15 bp, Homo sapiens
atattgccttctttt

SEQ ID NO: 1309767 - DNA, 15 bp, Homo sapiens
gatattgccttcttt

SEQ ID NO: 1309768 - DNA, 15 bp, Homo sapiens
agatattgccttctt

SEQ ID NO: 1309769 - DNA, 15 bp, Homo sapiens
aagatattgccttct

SEQ ID NO: 1309770 - DNA, 15 bp, Homo sapiens
taagatattgccttc

SEQ ID NO: 1309771 - DNA, 15 bp, Homo sapiens
ctaagatattgcctt

SEQ ID NO: 1309772 - DNA, 15 bp, Homo sapiens
cctaagatattgcct

SEQ ID NO: 1309773 - DNA, 15 bp, Homo sapiens
tcctaagatattgcc

SEQ ID NO: 1309774 - DNA, 15 bp, Homo sapiens
ttcctaagatattgc

SEQ ID NO: 1309775 - DNA, 15 bp, Homo sapiens
attcctaagatattg

SEQ ID NO: 1309776 - DNA, 15 bp, Homo sapiens
tattcctaagatatt

SEQ ID NO: 1309777 - DNA, 15 bp, Homo sapiens
ttattcctaagatat

SEQ ID NO: 1309778 - DNA, 15 bp, Homo sapiens
tttattcctaagata

SEQ ID NO: 1309779 - DNA, 15 bp, Homo sapiens
atttattcctaagat

SEQ ID NO: 1309780 - DNA, 15 bp, Homo sapiens
tatttattcctaaga

SEQ ID NO: 1309781 - DNA, 15 bp, Homo sapiens
atatttattcctaag

SEQ ID NO: 1309782 - DNA, 15 bp, Homo sapiens
aatatttattcctaa

SEQ ID NO: 1309783 - DNA, 15 bp, Homo sapiens
aaatatttattccta

SEQ ID NO: 1309784 - DNA, 15 bp, Homo sapiens
aaaatatttattcct

SEQ ID NO: 1309785 - DNA, 15 bp, Homo sapiens
taaaatatttattcc

SEQ ID NO: 1309786 - DNA, 15 bp, Homo sapiens
ataaaatatttattc

SEQ ID NO: 1309787 - DNA, 15 bp, Homo sapiens
tataaaatatttatt

SEQ ID NO: 1309788 - DNA, 15 bp, Homo sapiens
ctataaaatatttat

SEQ ID NO: 1309789 - DNA, 15 bp, Homo sapiens
actataaaatattta

SEQ ID NO: 1309790 - DNA, 15 bp, Homo sapiens
cactataaaatattt

SEQ ID NO: 1309791 - DNA, 15 bp, Homo sapiens
tcactataaaatatt

SEQ ID NO: 1309792 - DNA, 15 bp, Homo sapiens
gtcactataaaatat

SEQ ID NO: 1309793 - DNA, 15 bp, Homo sapiens
tgtcactataaaata

SEQ ID NO: 1309794 - DNA, 15 bp, Homo sapiens
atgtcactataaaat

SEQ ID NO: 1309795 - DNA, 15 bp, Homo sapiens
aatgtcactataaaa

SEQ ID NO: 1309796 - DNA, 15 bp, Homo sapiens
taatgtcactataaa

SEQ ID NO: 1309797 - DNA, 15 bp, Homo sapiens
ataatgtcactataa

SEQ ID NO: 1309798 - DNA, 15 bp, Homo sapiens
aataatgtcactata

SEQ ID NO: 1309799 - DNA, 15 bp, Homo sapiens
aaataatgtcactat

SEQ ID NO: 1309800 - DNA, 15 bp, Homo sapiens
aaaataatgtcacta

SEQ ID NO: 1309801 - DNA, 15 bp, Homo sapiens
aaaaataatgtcact

SEQ ID NO: 1309802 - DNA, 15 bp, Homo sapiens
gaaaaataatgtcac

SEQ ID NO: 1309803 - DNA, 15 bp, Homo sapiens
agaaaaataatgtca

SEQ ID NO: 1309804 - DNA, 15 bp, Homo sapiens
cagaaaaataatgtc

SEQ ID NO: 1309805 - DNA, 15 bp, Homo sapiens
gcagaaaaataatgt

SEQ ID NO: 1309806 - DNA, 15 bp, Homo sapiens
agcagaaaaataatg

SEQ ID NO: 1309807 - DNA, 15 bp, Homo sapiens
tagcagaaaaataat

SEQ ID NO: 1309808 - DNA, 15 bp, Homo sapiens
ctagcagaaaaataa

SEQ ID NO: 1309809 - DNA, 15 bp, Homo sapiens
actagcagaaaaata

SEQ ID NO: 1309810 - DNA, 15 bp, Homo sapiens
cactagcagaaaaat

SEQ ID NO: 1309811 - DNA, 15 bp, Homo sapiens
tcactagcagaaaaa

SEQ ID NO: 1309812 - DNA, 15 bp, Homo sapiens
ttcactagcagaaaa

SEQ ID NO: 1309813 - DNA, 15 bp, Homo sapiens
gttcactagcagaaa

SEQ ID NO: 1309814 - DNA, 15 bp, Homo sapiens
agttcactagcagaa

SEQ ID NO: 1309815 - DNA, 15 bp, Homo sapiens
tagttcactagcaga

SEQ ID NO: 1309816 - DNA, 15 bp, Homo sapiens
ttagttcactagcag

SEQ ID NO: 1309817 - DNA, 15 bp, Homo sapiens
attagttcactagca

SEQ ID NO: 1309818 - DNA, 15 bp, Homo sapiens
tattagttcactagc

SEQ ID NO: 1309819 - DNA, 15 bp, Homo sapiens
ttattagttcactag

SEQ ID NO: 1309820 - DNA, 15 bp, Homo sapiens
attattagttcacta

SEQ ID NO: 1309821 - DNA, 15 bp, Homo sapiens
gattattagttcact

SEQ ID NO: 1309822 - DNA, 15 bp, Homo sapiens
agattattagttcac

SEQ ID NO: 1309823 - DNA, 15 bp, Homo sapiens
tagattattagttca

SEQ ID NO: 1309824 - DNA, 15 bp, Homo sapiens
gtagattattagttc

SEQ ID NO: 1309825 - DNA, 15 bp, Homo sapiens
tgtagattattagtt

SEQ ID NO: 1309826 - DNA, 15 bp, Homo sapiens
ttgtagattattagt

SEQ ID NO: 1309827 - DNA, 15 bp, Homo sapiens
tttgtagattattag

SEQ ID NO: 1309828 - DNA, 15 bp, Homo sapiens
ttttgtagattatta

SEQ ID NO: 1309829 - DNA, 15 bp, Homo sapiens
tttttgtagattatt

SEQ ID NO: 1309830 - DNA, 15 bp, Homo sapiens
atttttgtagattat

SEQ ID NO: 1309831 - DNA, 15 bp, Homo sapiens
aatttttgtagatta

SEQ ID NO: 1309832 - DNA, 15 bp, Homo sapiens
aaatttttgtagatt

SEQ ID NO: 1309833 - DNA, 15 bp, Homo sapiens
aaaatttttgtagat

SEQ ID NO: 1309834 - DNA, 15 bp, Homo sapiens
taaaatttttgtaga

SEQ ID NO: 1309835 - DNA, 15 bp, Homo sapiens
ttaaaatttttgtag

SEQ ID NO: 1309836 - DNA, 15 bp, Homo sapiens
cttaaaatttttgta

SEQ ID NO: 1309837 - DNA, 15 bp, Homo sapiens
tcttaaaatttttgt

SEQ ID NO: 1309838 - DNA, 15 bp, Homo sapiens
atcttaaaatttttg

SEQ ID NO: 1309839 - DNA, 15 bp, Homo sapiens
tatcttaaaattttt

SEQ ID NO: 1309840 - DNA, 15 bp, Homo sapiens
ctatcttaaaatttt

SEQ ID NO: 1309841 - DNA, 15 bp, Homo sapiens
tctatcttaaaattt

SEQ ID NO: 1309842 - DNA, 15 bp, Homo sapiens
atctatcttaaaatt

SEQ ID NO: 1309843 - DNA, 15 bp, Homo sapiens
tatctatcttaaaat

SEQ ID NO: 1309844 - DNA, 15 bp, Homo sapiens
ttatctatcttaaaa

SEQ ID NO: 1309845 - DNA, 15 bp, Homo sapiens
cttatctatcttaaa

SEQ ID NO: 1309846 - DNA, 15 bp, Homo sapiens
gcttatctatcttaa

SEQ ID NO: 1309847 - DNA, 15 bp, Homo sapiens
tgcttatctatctta

SEQ ID NO: 1309848 - DNA, 15 bp, Homo sapiens
ctgcttatctatctt

SEQ ID NO: 1309849 - DNA, 15 bp, Homo sapiens
tctgcttatctatct

SEQ ID NO: 1309850 - DNA, 15 bp, Homo sapiens
ttctgcttatctatc

SEQ ID NO: 1309851 - DNA, 15 bp, Homo sapiens
tttctgcttatctat

SEQ ID NO: 1309852 - DNA, 15 bp, Homo sapiens
ctttctgcttatcta

SEQ ID NO: 1309853 - DNA, 15 bp, Homo sapiens
tctttctgcttatct

SEQ ID NO: 1309854 - DNA, 15 bp, Homo sapiens
ttctttctgcttatc

SEQ ID NO: 1309855 - DNA, 15 bp, Homo sapiens
attctttctgcttat

SEQ ID NO: 1309856 - DNA, 15 bp, Homo sapiens
tattctttctgctta

SEQ ID NO: 1309857 - DNA, 15 bp, Homo sapiens
gtattctttctgctt

SEQ ID NO: 1309858 - DNA, 15 bp, Homo sapiens
tgtattctttctgct

SEQ ID NO: 1309859 - DNA, 15 bp, Homo sapiens
ttgtattctttctgc

SEQ ID NO: 1309860 - DNA, 15 bp, Homo sapiens
tttgtattctttctg

SEQ ID NO: 1309861 - DNA, 15 bp, Homo sapiens
gtttgtattctttct

SEQ ID NO: 1309862 - DNA, 15 bp, Homo sapiens
tgtttgtattctttc

SEQ ID NO: 1309863 - DNA, 15 bp, Homo sapiens
ttgtttgtattcttt

SEQ ID NO: 1309864 - DNA, 15 bp, Homo sapiens
tttgtttgtattctt

SEQ ID NO: 1309865 - DNA, 15 bp, Homo sapiens
ttttgtttgtattct

SEQ ID NO: 1309866 - DNA, 15 bp, Homo sapiens
tttttgtttgtattc

SEQ ID NO: 1309867 - DNA, 15 bp, Homo sapiens
ttttttgtttgtatt

SEQ ID NO: 1309868 - DNA, 15 bp, Homo sapiens
tttttttgtttgtat

SEQ ID NO: 1309869 - DNA, 15 bp, Homo sapiens
ctttttttgtttgta

SEQ ID NO: 1309870 - DNA, 15 bp, Homo sapiens
atctttttttgtttg

SEQ ID NO: 1309871 - DNA, 15 bp, Homo sapiens
tatctttttttgttt

SEQ ID NO: 1309872 - DNA, 15 bp, Homo sapiens
ctatctttttttgtt

SEQ ID NO: 1309873 - DNA, 15 bp, Homo sapiens
actatctttttttgt

SEQ ID NO: 1309874 - DNA, 15 bp, Homo sapiens
tactatctttttttg

SEQ ID NO: 1309875 - DNA, 15 bp, Homo sapiens
ttactatcttttttt

SEQ ID NO: 1309876 - DNA, 15 bp, Homo sapiens
attactatctttttt

SEQ ID NO: 1309877 - DNA, 15 bp, Homo sapiens
aattactatcttttt

SEQ ID NO: 1309878 - DNA, 15 bp, Homo sapiens
aaattactatctttt

SEQ ID NO: 1309879 - DNA, 15 bp, Homo sapiens
taaattactatcttt

SEQ ID NO: 1309880 - DNA, 15 bp, Homo sapiens
ttaaattactatctt

SEQ ID NO: 1309881 - DNA, 15 bp, Homo sapiens
gttaaattactatct

SEQ ID NO: 1309882 - DNA, 15 bp, Homo sapiens
agttaaattactatc

SEQ ID NO: 1309883 - DNA, 15 bp, Homo sapiens
gagttaaattactat

SEQ ID NO: 1309884 - DNA, 15 bp, Homo sapiens
tgagttaaattacta

SEQ ID NO: 1309885 - DNA, 15 bp, Homo sapiens
atgagttaaattact

SEQ ID NO: 1309886 - DNA, 15 bp, Homo sapiens
tatgagttaaattac

SEQ ID NO: 1309887 - DNA, 15 bp, Homo sapiens
atatgagttaaatta

SEQ ID NO: 1309888 - DNA, 15 bp, Homo sapiens
catatgagttaaatt

SEQ ID NO: 1309889 - DNA, 15 bp, Homo sapiens
tcatatgagttaaat

SEQ ID NO: 1309890 - DNA, 15 bp, Homo sapiens
ttcatatgagttaaa

SEQ ID NO: 1309891 - DNA, 15 bp, Homo sapiens
attcatatgagttaa

SEQ ID NO: 1309892 - DNA, 15 bp, Homo sapiens
tattcatatgagtta

SEQ ID NO: 1309893 - DNA, 15 bp, Homo sapiens
ttattcatatgagtt

SEQ ID NO: 1309894 - DNA, 15 bp, Homo sapiens
attattcatatgagt

SEQ ID NO: 1309895 - DNA, 15 bp, Homo sapiens
gattattcatatgag

SEQ ID NO: 1309896 - DNA, 15 bp, Homo sapiens
tgattattcatatga

SEQ ID NO: 1309897 - DNA, 15 bp, Homo sapiens
atgattattcatatg

SEQ ID NO: 1309898 - DNA, 15 bp, Homo sapiens
gatgattattcatat

SEQ ID NO: 1309899 - DNA, 15 bp, Homo sapiens
ggatgattattcata

SEQ ID NO: 1309900 - DNA, 15 bp, Homo sapiens
tggatgattattcat

SEQ ID NO: 1309901 - DNA, 15 bp, Homo sapiens
gtggatgattattca

SEQ ID NO: 1309902 - DNA, 15 bp, Homo sapiens
agtggatgattattc

SEQ ID NO: 1309903 - DNA, 15 bp, Homo sapiens
cagtggatgattatt

SEQ ID NO: 1309904 - DNA, 15 bp, Homo sapiens
tcagtggatgattat

SEQ ID NO: 1309905 - DNA, 15 bp, Homo sapiens
ttcagtggatgatta

SEQ ID NO: 1309906 - DNA, 15 bp, Homo sapiens
tttcagtggatgatt

SEQ ID NO: 1309907 - DNA, 15 bp, Homo sapiens
atttcagtggatgat

SEQ ID NO: 1309908 - DNA, 15 bp, Homo sapiens
catttcagtggatga

SEQ ID NO: 1309909 - DNA, 15 bp, Homo sapiens
acatttcagtggatg

SEQ ID NO: 1309910 - DNA, 15 bp, Homo sapiens
tacatttcagtggat

SEQ ID NO: 1309911 - DNA, 15 bp, Homo sapiens
ctacatttcagtgga

SEQ ID NO: 1309912 - DNA, 15 bp, Homo sapiens
gctacatttcagtgg

SEQ ID NO: 1309913 - DNA, 15 bp, Homo sapiens
tgctacatttcagtg

SEQ ID NO: 1309914 - DNA, 15 bp, Homo sapiens
ttgctacatttcagt

SEQ ID NO: 1309915 - DNA, 15 bp, Homo sapiens
cttgctacatttcag

SEQ ID NO: 1309916 - DNA, 15 bp, Homo sapiens
ccttgctacatttca

SEQ ID NO: 1309917 - DNA, 15 bp, Homo sapiens
tccttgctacatttc

SEQ ID NO: 1309918 - DNA, 15 bp, Homo sapiens
atccttgctacattt

SEQ ID NO: 1309919 - DNA, 15 bp, Homo sapiens
tatccttgctacatt

SEQ ID NO: 1309920 - DNA, 15 bp, Homo sapiens
atatccttgctacat

SEQ ID NO: 1309921 - DNA, 15 bp, Homo sapiens
catatccttgctaca

SEQ ID NO: 1309922 - DNA, 15 bp, Homo sapiens
gcatatccttgctac

SEQ ID NO: 1309923 - DNA, 15 bp, Homo sapiens
agcatatccttgcta

SEQ ID NO: 1309924 - DNA, 15 bp, Homo sapiens
tagcatatccttgct

SEQ ID NO: 1309925 - DNA, 15 bp, Homo sapiens
gtagcatatccttgc

SEQ ID NO: 1309926 - DNA, 15 bp, Homo sapiens
tgtagcatatccttg

SEQ ID NO: 1309927 - DNA, 15 bp, Homo sapiens
atgtagcatatcctt

SEQ ID NO: 1309928 - DNA, 15 bp, Homo sapiens
tatgtagcatatcct

SEQ ID NO: 1309929 - DNA, 15 bp, Homo sapiens
atatgtagcatatcc

SEQ ID NO: 1309930 - DNA, 15 bp, Homo sapiens
catatgtagcatatc

SEQ ID NO: 1309931 - DNA, 15 bp, Homo sapiens
tcatatgtagcatat

SEQ ID NO: 1309932 - DNA, 15 bp, Homo sapiens
ttcatatgtagcata

SEQ ID NO: 1309933 - DNA, 15 bp, Homo sapiens
tttcatatgtagcat

SEQ ID NO: 1309934 - DNA, 15 bp, Homo sapiens
atttcatatgtagca

SEQ ID NO: 1309935 - DNA, 15 bp, Homo sapiens
catttcatatgtagc

SEQ ID NO: 1309936 - DNA, 15 bp, Homo sapiens
acatttcatatgtag

SEQ ID NO: 1309937 - DNA, 15 bp, Homo sapiens
tacatttcatatgta

SEQ ID NO: 1309938 - DNA, 15 bp, Homo sapiens
ttacatttcatatgt

SEQ ID NO: 1309939 - DNA, 15 bp, Homo sapiens
attacatttcatatg

SEQ ID NO: 1309940 - DNA, 15 bp, Homo sapiens
aattacatttcatat

SEQ ID NO: 1309941 - DNA, 15 bp, Homo sapiens
taattacatttcata

SEQ ID NO: 1309942 - DNA, 15 bp, Homo sapiens
ctaattacatttcat
